United States Patent Application Publication US 2021/0199660 A1 - sequence listing, part 4

SEQ ID NO: 42584 - DNA, 120 bp, Artificial Sequence
  ENSG00000061936_54 (sequence is synthesized)
gggacagcagtcagagctgagctgctgcccacagagcaggctccactgcccagaggctaagcggtatcaccaagcggcggacaactggcaggtcaggaagaagtgccactccagcctgga

SEQ ID NO: 42585 - DNA, 120 bp, Artificial Sequence
  ENSG00000061936_55 (sequence is synthesized)
caacagagtgagaccccatctcttaagaaaaaggaagaagcagcaccagaagctgcgccccctagtcttaactgtctgggaggctgaggcaggaggttgcttgaggtcaggaggtgaagg

SEQ ID NO: 42586 - DNA, 120 bp, Artificial Sequence
  ENSG00000061936_56 (sequence is synthesized)
ctgcagtgagctgtaatggcaccactgcactccagcctggacagcagcacgagaccttgtctgttttttcaaaaaaaaggaacactaaactttgatgtattgatactttaataaatttcc

SEQ ID NO: 42587 - DNA, 120 bp, Artificial Sequence
  ENSG00000061936_57 (sequence is synthesized)
tttttattgatgaaacataagtggcaaagcactatgaactgcctgtggtggcttatcttaggtattttacatgtaaataaaatgctggttgcatcttaaataccacaaatattttacttg

SEQ ID NO: 42588 - DNA, 120 bp, Artificial Sequence
  ENSG00000061936_58 (sequence is synthesized)
aggtcctaaatggggacgcgtcatctgttatcagttaaatgaaataagtagctttaagagaagttaatgggtttggagtggttccgtccctgaattgtgccttgatgaactcttagccaa

SEQ ID NO: 42589 - DNA, 62 bp, Artificial Sequence
  ENSG00000061936_59 (sequence is synthesized)
tatcttccagtatagagagctatatgataaaaatatatttctggccgggcgtgtgagaccat

SEQ ID NO: 42590 - DNA, 120 bp, Artificial Sequence
  ENSG00000061936_60 (sequence is synthesized)
ttgtagaaattagctccctaaatacttggggttggtgaaggagactggggatttggaagacttttcttaggagtcttgtttagcattcagaagggactcaggccacactgggtttctatt

SEQ ID NO: 42591 - DNA, 120 bp, Artificial Sequence
  ENSG00000061936_61 (sequence is synthesized)
ttaggttgaaagttgtggctcctcactgccctttttacccacaataaattgcatagcaaatccgtaaaagcgatgactcatctcctaatcctgccccttaaagggggaaaccagatgctt

SEQ ID NO: 42592 - DNA, 120 bp, Artificial Sequence
  ENSG00000061936_62 (sequence is synthesized)
gcagttccccaagtggtagtgttgatcatgccaaggtgaggaccgtcgttccatcccttgcaaagtgaatcaaagtgaattgtagccaaacacagataagaccagagggtgtctgcactg

SEQ ID NO: 42593 - DNA, 120 bp, Artificial Sequence
  ENSG00000061936_63 (sequence is synthesized)
agcagtccaggaaggaggggagctgcagtggctgtcaccgggctgggacacgaggaggaattgcaggtgaaatcagatccagtttcaacttgaggaaaattcagccccgggagctgctgg

SEQ ID NO: 42594 - DNA, 120 bp, Artificial Sequence
  ENSG00000061936_64 (sequence is synthesized)
tagagcccagaccttgatgctgagtcatctgcacagagaattccgtgacagaaaggccgtgggtagagacgtgaatggaggaagtggagtagatgaaatggttaaatgttggagaaaaga

SEQ ID NO: 42595 - DNA, 120 bp, Artificial Sequence
  ENSG00000061936_65 (sequence is synthesized)
ggctatttatgaatatgaccactgtcattcagataaaatttctggactgttatcattgaaaaaagtctcattatgtttctatttgaaagcaaaccattatgcttttttgaggaaaaaaaa

SEQ ID NO: 42596 - DNA, 120 bp, Artificial Sequence
  ENSG00000061936_66 (sequence is synthesized)
aaactgtgagtcacgttatgcttgcaagtgtttaattcagaccatttcatctttaagaaggcccctggtcacattatacggatgatttgcttattaaatggaactcctgtttcttgcacc

SEQ ID NO: 42597 - DNA, 120 bp, Artificial Sequence
  ENSG00000061936_67 (sequence is synthesized)
atgttgtggggtcaatatgagaagcctaattaacagaataaaaagcattaaagcttctttagctaaagtcaaacttagagaattgtctaatggtatgtagcccctcgttctaagatgggc

SEQ ID NO: 42598 - DNA, 120 bp, Artificial Sequence
  ENSG00000061936_68 (sequence is synthesized)
gttttccccagataacttgaaaatctactggtaacagccacttccctttaaagaattctattactaatagccatgacaaaatggtattgtatttcaaagttaagaatttgcaggccttaa

SEQ ID NO: 42599 - DNA, 120 bp, Artificial Sequence
  ENSG00000061936_69 (sequence is synthesized)
aaactaacttatttttcctgattattgagtttattgtagaattctacgtgtaagcattccccagccgctatagctttgaataagcagagcttttttcagagttctggtagcgcccagccc

SEQ ID NO: 42600 - DNA, 120 bp, Artificial Sequence
  ENSG00000061936_70 (sequence is synthesized)
acgattctgtccgttaaagggcagccactcctggccctccaggatgccggggtctgagtgatcccgagctgatctgcagaagcacagcctgtggcatttgcggtttattgtcatgaaaat

SEQ ID NO: 42601 - DNA, 120 bp, Artificial Sequence
  ENSG00000061936_71 (sequence is synthesized)
gattcaacgtagaactttttcaaatggcaaaatcaaaccgctcttctttatattgtttttgaatgagttgtcatggaaacaaaatggaaataaatggtgttttttttccagatttgtgct

SEQ ID NO: 42602 - DNA, 120 bp, Artificial Sequence
  ENSG00000061936_72 (sequence is synthesized)
cattgcaggtcttcccaaaatagtagctttactgaatgaacaaagaactaaaatgaaggtcccaaactcatcgctaaggggcctccactaaagagcatcacccctggaggggcgcgggtc

SEQ ID NO: 42603 - DNA, 120 bp, Artificial Sequence
  ENSG00000061936_73 (sequence is synthesized)
tcagggtccttggccgcgtgtggattatgtcaccacaggagagggacgagtcctttccaggcacatgaggaggaggaatcagtgttaatgggtggctttgcatctgtgaaatcgcataaa

SEQ ID NO: 42604 - DNA, 120 bp, Artificial Sequence
  ENSG00000061936_74 (sequence is synthesized)
cttaagttagctgaagctgtcgtgagactggcatttccaaattggattgaaggtttcaggcttcatgccagcgcaccacagcctgttcctgagtatctgtgctgagaggctgtaagatta

SEQ ID NO: 42605 - DNA, 120 bp, Artificial Sequence
  ENSG00000061936_75 (sequence is synthesized)
tcttgtctttgccgtaacagtctttaatacagttcttaatcccaaaattttctcagcaggaagaaattttccacaaaagacgtgtattcagctgtctgtgggtaaacatgtactgacaaa

SEQ ID NO: 42606 - DNA, 120 bp, Artificial Sequence
  ENSG00000061936_76 (sequence is synthesized)
agtacataatgatagatataaagtgtgaatttttaaaactattttacctcaaaagtaggttgaaaaaagtatgttgtatgctttactgatagctacaactttagaaatatataaagtttt

SEQ ID NO: 42607 - DNA, 120 bp, Artificial Sequence
  ENSG00000061938_0 (sequence is synthesized)
gggagcccgcggaggctgctgcagcagcccgaaccggcgtccgagtccggggaaggcccccgcgagcgcagggaggggccggaaagttccggcgaactgggggagcggcagtgggagagc

SEQ ID NO: 42608 - DNA, 80 bp, Artificial Sequence
  ENSG00000061938_1 (sequence is synthesized)
cagtgggagagcgtcgggcgggaggcggtggtcctgggagcggccccggcgccccgaagccgccccgagctggtggggag

SEQ ID NO: 42609 - DNA, 120 bp, Artificial Sequence
  ENSG00000061938_2 (sequence is synthesized)
caagaggcgaattggctgcccggggtgcaggagggacaggtggtgcgggctgtccaggaaacctacctgaacgggaaggagccccaggagggagagggacccggcgaggggctcaggacc

SEQ ID NO: 42610 - DNA, 120 bp, Artificial Sequence
  ENSG00000061938_3 (sequence is synthesized)
cggaggcgccggcggaggaggaggtggtgactggcaggcccgggccccacggtacctccggggctgaaggggacgcaggatgtaggggcatggggagtcgggcgcagaagagtgcgggga

SEQ ID NO: 42611 - DNA, 120 bp, Artificial Sequence
  ENSG00000061938_4 (sequence is synthesized)
accgctgagctctgggagccactgcctgagggcaggccgcggccggcgggaacctcttctgccgtctcagcctgggcgtcgctgaagctgtgtctgcggggaggcagcggaaggcggcag

SEQ ID NO: 42612 - DNA, 120 bp, Artificial Sequence
  ENSG00000061938_5 (sequence is synthesized)
aggctgggaggcggcagaatgcagccagaggagggcacaggctggctgctggagctgctgtccgaggtgcagctgcaacagtacttcctgcggctccgagatgacctcaacgtcacccgc

SEQ ID NO: 42613 - DNA, 120 bp, Artificial Sequence
  ENSG00000061938_6 (sequence is synthesized)
ctgtcccactttgagtacgtcaagaatgaggacctggagaagatcggcatgggtcggcctggccagcggcggctgtgggaggctgtgaagaggaggaaggccttgtgcaaacgcaagtcg

SEQ ID NO: 42614 - DNA, 120 bp, Artificial Sequence
  ENSG00000061938_7 (sequence is synthesized)
tggatgagtaaggtgttcagtggaaagcgactggaggctgagttcccacctcatcactctcagagcaccttccggaagacctcgcccgcccctgggggcccagcaggggaggggcccctg

SEQ ID NO: 42615 - DNA, 120 bp, Artificial Sequence
  ENSG00000061938_8 (sequence is synthesized)
cagagcctcacctgcctcattggggagaaggacctgcgcctcctggagaagctgggtgatggttcctttggcgtggtgcgcaggggcgagtgggacgcgccctcagggaagacggtgagt

SEQ ID NO: 42616 - DNA, 120 bp, Artificial Sequence
  ENSG00000061938_9 (sequence is synthesized)
gtggctgtgaagtgcctgaagcccgatgtcctgagccagccagaagccatggacgacttcatccgggaggtcaatgccatgcactcgctcgaccaccgaaacctcatccgcctctacggg

SEQ ID NO: 42617 - DNA, 120 bp, Artificial Sequence
  ENSG00000061938_10 (sequence is synthesized)
gtggtgctcacgccgcccatgaagatggtgacagagctggcacctctgggatcgttgttggaccggctacgtaagcaccagggccacttcctcctggggactctgagccgctacgctgtg

SEQ ID NO: 42618 - DNA, 120 bp, Artificial Sequence
  ENSG00000061938_11 (sequence is synthesized)
caggtggctgagggcatgggctacctggagtccaagcgctttattcaccgtgacctggctgcccgcaatctgctgttggctacccgcgacctggtcaagatcggggactttgggctgatg

SEQ ID NO: 42619 - DNA, 120 bp, Artificial Sequence
  ENSG00000061938_12 (sequence is synthesized)
cgagcactacctcagaatgacgaccattacgtcatgcaggaacatcgcaaggtgcccttcgcctggtgtgcccccgagagcctgaagacacgcaccttctcccatgccagcgacacctgg

SEQ ID NO: 42620 - DNA, 120 bp, Artificial Sequence
  ENSG00000061938_13 (sequence is synthesized)
atgttcggggtgacactgtgggaaatgttcacctacggccaggagccctggatcggcctcaacggcagtcagatcctgcataagatcgacaaggagggggagcggctgccccggcccgag

SEQ ID NO: 42621 - DNA, 120 bp, Artificial Sequence
  ENSG00000061938_14 (sequence is synthesized)
gactgtccccaggacatctacaacgtcatggtccagtgctgggctcacaagccagaggacagacccacgtttgtggccctgcgggacttcctgctggaggcccagcccacagacatgcgg

SEQ ID NO: 42622 - DNA, 120 bp, Artificial Sequence
  ENSG00000061938_15 (sequence is synthesized)
gcccttcaggactttgaggaaccggacaagctgcacatccagatgaatgatgtcatcaccgtcatcgagggaagggccgagaactactggtggcgtggccagaacacacggacgctgtgt

SEQ ID NO: 42623 - DNA, 120 bp, Artificial Sequence
  ENSG00000061938_16 (sequence is synthesized)
gtggggcccttccctcgcaacgtggtgacctccgtggccggcctgtcggcccaggacatcagccagcccctgcagaacagcttcatccacacagggcatggcgacagtgacccccgccac

SEQ ID NO: 42624 - DNA, 120 bp, Artificial Sequence
  ENSG00000061938_17 (sequence is synthesized)
tgctggggcttcccggacaggattgacgaactgtatctgggaaaccccatggacccccccgacctcctgagcgtggaactgagcacctcccggcccccccagcatctaggaggggtgaaa

SEQ ID NO: 42625 - DNA, 120 bp, Artificial Sequence
  ENSG00000061938_18 (sequence is synthesized)
cggcgcgggtgccgggcaccaaggccagccgaggcagcggggctgaggtcacgctcatcgacttcggtgaggagcccgtggtcccggccctacggccctgcgcgccctccctggcgcagc

SEQ ID NO: 42626 - DNA, 120 bp, Artificial Sequence
  ENSG00000061938_19 (sequence is synthesized)
cagctggccatggacgcctgctccctgctggacgagaccccgcctcagagccccacgcgggcactgccccggcccctgcaccccacgcctgtggtggactgggacgcacgcccgctgccc

SEQ ID NO: 42627 - DNA, 120 bp, Artificial Sequence
  ENSG00000061938_20 (sequence is synthesized)
cgcccgcctatgacgacgtggcccaggatgaggatgactttgagatctgctccatcaacagcaccctcgtgggcgcgggggtccctgccgggcccagccagggccagaccaactacgcct

SEQ ID NO: 42628 - DNA, 120 bp, Artificial Sequence
  ENSG00000061938_21 (sequence is synthesized)
ttgtgcctgagcaggcgcggccgccccctcccctggaggacaacctgttcctcccgccccagggtgggggcaagccgcccagctccgcacagaccgcagagatcttccaggcgctacagc

SEQ ID NO: 42629 - DNA, 120 bp, Artificial Sequence
  ENSG00000061938_22 (sequence is synthesized)
aggagtgcatgaggcaactgcaggctccggccggctccccggccccctctcccagcccggggggtgacgacaagccccaggtgcctcctcgggtacccatcccccctcggcccacgcgcc

SEQ ID NO: 42630 - DNA, 120 bp, Artificial Sequence
  ENSG00000061938_23 (sequence is synthesized)
cacacgtccagctgtctccagcccccccgggcgaggaggagaccagccagtggcctggacctgcttcccctccccgggtgcctccgcgggagcccctgtcccctcaaggctcgaggacac

SEQ ID NO: 42631 - DNA, 120 bp, Artificial Sequence
  ENSG00000061938_24 (sequence is synthesized)
ccagccccctggtaccacctggcagctccccgctgccaccccggctctcaagctcacctgggaagaccatgcccaccacccagagctttgcctcagaccccaagtacgccaccccccagg

SEQ ID NO: 42632 - DNA, 120 bp, Artificial Sequence
  ENSG00000061938_25 (sequence is synthesized)
tgatccaggcccctggcccgcgggctggtccctgcatcctgcccatcgtccgggatggcaagaaggtcagcagcacccactattacttgctgcccgagcgaccatcctacctggagcgct

SEQ ID NO: 42633 - DNA, 120 bp, Artificial Sequence
  ENSG00000061938_26 (sequence is synthesized)
cgctaccagcgcttcctgcgtgaggcccagagccccgaggagcctacccccctgcctgtgcctctgctgctgcccccacccagcaccccagcccccgccgcccccacggccaccgtgcgg

SEQ ID NO: 42634 - DNA, 120 bp, Artificial Sequence
  ENSG00000061938_27 (sequence is synthesized)
tgccccaggctgccttggaccccaaggccaacttctccaccaacaacagcaacccaggggcccggccaccacccccgagggccactgctcggctgccacagaggggctgccctggcgatg

SEQ ID NO: 42635 - DNA, 120 bp, Artificial Sequence
  ENSG00000061938_28 (sequence is synthesized)
ggccagaggcgggccggccagcagacaagatccagatggccatggtgcatggggtgaccacagaggagtgccaggcggccctgcagtgccacggctggagcgtgcagagggctgcccagt

SEQ ID NO: 42636 - DNA, 120 bp, Artificial Sequence
  ENSG00000061938_29 (sequence is synthesized)
atctgaaggtggagcagctcttcgggctgggtctgcggcccagaggggagtgccacaaagtgctggagatgttcgactggaacctggagcaggccggctgccaccttctgggctcctggg

SEQ ID NO: 42637 - DNA, 120 bp, Artificial Sequence
  ENSG00000061938_30 (sequence is synthesized)
gccctgcccaccacaagcgctgagatgcgtctggagagccagagggcctgcctgaaggaatcacctgagcctgtccgtccaccaggagtggggagatgcccccatccagtcctggaggac

SEQ ID NO: 42638 - DNA, 120 bp, Artificial Sequence
  ENSG00000061938_31 (sequence is synthesized)
ccgctgctcctgctgctcccggggatggagcaaggccaaggctgcgggaggctgggagccctgccctgcccatccctcctgcaccagcgctgtccctgcacactttggttcagtcccggt

SEQ ID NO: 42639 - DNA, 120 bp, Artificial Sequence
  ENSG00000061938_32 (sequence is synthesized)
gcccctgccaagatgtggaaggggccgggtgaagacaggcttgagggctgccccagcaggctctgggtatgacctgcctctggccctggtcctgggcggggcctgtgggtggagtagtac

SEQ ID NO: 42640 - DNA, 120 bp, Artificial Sequence
  ENSG00000061938_33 (sequence is synthesized)
ccccaggccctgccctgggtgacagactgggaggaaaccaggctggacctgggcaggcgggatgtgttggccacagggagaggcggaccggcacccggtgggacctcctaggactgggcc

SEQ ID NO: 42641 - DNA, 120 bp, Artificial Sequence
  ENSG00000061938_34 (sequence is synthesized)
ttcttccagggggcccctggcagcagctggggtgtcgggcagaatgtgacttgtggccttaccatggacttgaatgggacttggctggcctcaggatcttgtgcctggaaatagcctgag

SEQ ID NO: 42642 - DNA, 120 bp, Artificial Sequence
  ENSG00000061938_35 (sequence is synthesized)
gtggctcaggaagcggagaaagggtgccagaccattctctggcggggaccagggcccaaggccccagggctggaaggagaccaaggggcagccgccctggagggacatcagtgcttcctc

SEQ ID NO: 42643 - DNA, 120 bp, Artificial Sequence
  ENSG00000061938_36 (sequence is synthesized)
ttccacccaattcccccacgcggttccatgttttcccaccagcctgttggcgaagttgctgctccggcattcagtacctgcttcttccagagaaataaagttagtttctattttatgtta

SEQ ID NO: 42644 - DNA, 120 bp, Artificial Sequence
  ENSG00000061938_37 (sequence is synthesized)
gttgggtggggaagccggggagtagggctggactgtgaccactgccctggagagaagacagaaacaggacagaggatcccggctgcagccagcgtgaggaaagctctgctccctgccaga

SEQ ID NO: 42645 - DNA, 120 bp, Artificial Sequence
  ENSG00000061938_38 (sequence is synthesized)
ccggccagctgtggaaacccagcggggcttgcagcagagcggaggggcccaccccgttcttcctcatttcccacccctggtgtgggatttggggggctcctgggcagagtgcgaagctcc

SEQ ID NO: 42646 - DNA, 120 bp, Artificial Sequence
  ENSG00000061938_39 (sequence is synthesized)
ggagccgaggccactggatccccagtgactgctcgggggggtcccgctgcgtggagatgccggcagcacgtcggttccctggcctggagctctccttccctctcctggccagactgcggc

SEQ ID NO: 42647 - DNA, 120 bp, Artificial Sequence
  ENSG00000061938_40 (sequence is synthesized)
ctgagctggattactgggccagttacaggtcttgttcttactggacatccaagcatcccggagttccttcccgtcctcccacatgcatcccctgtgcagagctgcgctgttgctgggtca

SEQ ID NO: 42648 - DNA, 120 bp, Artificial Sequence
  ENSG00000061938_41 (sequence is synthesized)
ggctctgggggctccttccccctgggccaccagccctggcttggaaccacagcacctgccctccgtgcctggagctgctcaggagggccgagaactactggtggcgtggccagaacacac

SEQ ID NO: 42649 - DNA, 120 bp, Artificial Sequence
  ENSG00000061938_42 (sequence is synthesized)
ctccgtgcctggagctgctcaggaggtgggaggtgaggggcaggaggccacaacagccggtgaggcttgggagcgggcctgggtgtcggtggtggcagagcttgactctgcccccttgtt

SEQ ID NO: 42650 - DNA, 120 bp, Artificial Sequence
  ENSG00000061938_43 (sequence is synthesized)
ggagaggaggaacggagctgggacgggctgcaggagggaatggccgcaggccggcaggaggaggggcgcgaccacccggccgccggccgatggcggatgaggctatgggggctgagacgc

SEQ ID NO: 42651 - DNA, 120 bp, Artificial Sequence
  ENSG00000061938_44 (sequence is synthesized)
agtagcggccctgcacttctggaggatgctcgaggcccggccccccaggacgcagggcagtgacgctgccggtgccgctgcggggcgggggctgcgggcgctgcttctctccctgaccgc

SEQ ID NO: 42652 - DNA, 120 bp, Artificial Sequence
  ENSG00000061938_45 (sequence is synthesized)
ccggacaggattgacgagtgtcctttctctgccttctctccaggacaccccccagctgagacgtgcggtcaggttctgtggactgggaggcgggaggcctgtgcttcagacccaagacta

SEQ ID NO: 42653 - DNA, 120 bp, Artificial Sequence
  ENSG00000061938_46 (sequence is synthesized)
cacccggtttcctccaggacgaaggggctctgatgagattctgccacccctccacacgcttcccctgctctcttgacccagctctctcccccacagactgtatctgggaaaccccatgga

SEQ ID NO: 42654 - DNA, 120 bp, Artificial Sequence
  ENSG00000061938_47 (sequence is synthesized)
cgtttgctgggggcttgtacattcactcgcccccattcacttctctcccttcgtctctctacactctgccctctcgtccggccgtctccctcctttgtcctctgtcctgctccgtctctc

SEQ ID NO: 42655 - DNA, 120 bp, Artificial Sequence
  ENSG00000061938_48 (sequence is synthesized)
tccccctgtccgcatggcctttcttgcaggggagcctccacctcgcccacctcagcctgccttcttcactcagagtaagtggggctgcttccgatgccttggcccccgcccccgccccct

SEQ ID NO: 42656 - DNA, 120 bp, Artificial Sequence
  ENSG00000061938_49 (sequence is synthesized)
ctctctcactcctctcctggaaggtacagagcctgggcggctgggccggaggggaggtgggtgggtgtgtgctgtgagcttccgcggctgccctggcctagcatgcctgccccccctcga

SEQ ID NO: 42657 - DNA, 120 bp, Artificial Sequence
  ENSG00000061938_50 (sequence is synthesized)
gcccgccccccggagcctgggcttctgctcacgagtgtggccctggcttccgcctcggcctcactccctcccagacctgtctgagcttctggagcacgagtgtggccctggcttctgcct

SEQ ID NO: 42658 - DNA, 120 bp, Artificial Sequence
  ENSG00000061938_51 (sequence is synthesized)
tggcctcgctgcctcccagacctgcaggcgctgtctgggctttgtggccgttggtcaggagtactgtcctctccaaggatagtccttatagcccctgatggcaggaggcggctccgtgcc

SEQ ID NO: 42659 - DNA, 120 bp, Artificial Sequence
  ENSG00000061938_52 (sequence is synthesized)
tgcactaatggtgtgccgtgacaggggcggggatgagggctcactaactcgccagggcgcaggagcagggccgccggggtcttgtgctggtggaggcagcgtcaggcaggagccagtgtt

SEQ ID NO: 42660 - DNA, 120 bp, Artificial Sequence
  ENSG00000061938_53 (sequence is synthesized)
gcttgctgcagcttagacggagcgaggcggggctcaccggcccacatggggctgccgggcagagcaggttccgccctcctgatggagtggtcggaggtgcgctgagaacctggccgccgg

SEQ ID NO: 42661 - DNA, 120 bp, Artificial Sequence
  ENSG00000061938_54 (sequence is synthesized)
tggctgacctcagacctcggggggagttgggagtggagggttgctgggggacacttggctttctctcccacgtgccacctcccctcgtgtcccagaccctgcctgactgccttcctgttg

SEQ ID NO: 42662 - DNA, 120 bp, Artificial Sequence
  ENSG00000061938_55 (sequence is synthesized)
ggctctccctttccatcacagaaccaacctatgaccctgtgagcgaggaccaagaccccttgtccagcgacttcaagaggctgggcctgcggaagccaggcctgccccgagggctgtggc

SEQ ID NO: 42663 - DNA, 120 bp, Artificial Sequence
  ENSG00000061938_56 (sequence is synthesized)
ctgtatccgccgaggtgggcctcctcgggctgggtctgcagcaggcccgtccgccccggcgtccctcctccctccttccacggccgagctcagatcctggctttcctcacttccccctaa

SEQ ID NO: 42664 - DNA, 120 bp, Artificial Sequence
  ENSG00000061938_57 (sequence is synthesized)
tcctgctctcctgtcccaagccaaaaccaccccacggctccggctctgcctggggcctcctccatctcccggtcctctgcctatcatactggaccgccgtgttcctcatcctgccgcctg

SEQ ID NO: 42665 - DNA, 120 bp, Artificial Sequence
  ENSG00000061938_58 (sequence is synthesized)
gagggggtgtacacgtggggtggattctcgaactcctagagggaaggtgccctgagctcagccctaaatacctggtactaaagagtcagtggctgcttcagatgccaccagaatgagaag

SEQ ID NO: 42666 - DNA, 120 bp, Artificial Sequence
  ENSG00000061938_59 (sequence is synthesized)
cggtgccttggggccccgggggagaggaagagcctctgccctgggacttcctgtgccggcgatggcctcgcgccagtgctgggcgcggcacccccgcgtgggcctgtgttgggcggcttt

SEQ ID NO: 42667 - DNA, 120 bp, Artificial Sequence
  ENSG00000061938_60 (sequence is synthesized)
gggatcctttggcttttcctggaaacactgtcctggtcctttgcccgggttttagggaaggatgagtagtgtcgggatggtggaggcaggagaagagagcagcgtggtttgctgagattt

SEQ ID NO: 42668 - DNA, 120 bp, Artificial Sequence
  ENSG00000061938_61 (sequence is synthesized)
aggggtcttggatctgccactggctcctgataggtccctgggcggtcagtggcctccagatttttgttgtgtcttcagtgaaatgataccggtccccactgcccagctcacctcccgggg

SEQ ID NO: 42669 - DNA, 120 bp, Artificial Sequence
  ENSG00000061938_62 (sequence is synthesized)
ctgcaggaggcaccggagataatggctgtagagggtcttgtaacctgaacattgcttgcaaacataaggaattctagttactgggaggaagcacagggcagaggccagaagaggccctca

SEQ ID NO: 42670 - DNA, 120 bp, Artificial Sequence
  ENSG00000061938_63 (sequence is synthesized)
gatttgaggcaccctagcccagacggataaggatccaccagctctgggggcgtgagacccaagctggcaagaatctgcaatctggagccaaggctgtgggtgcctcagtggaggccgagt

SEQ ID NO: 42671 - DNA, 120 bp, Artificial Sequence
  ENSG00000061938_64 (sequence is synthesized)
cagaccgacgtggccagctttgaccctcatggcctcctttcttctgtcccttgaccttcggctcctccctgtccaccctggcctccgagtctcctccacttttccttccgtctcagccct

SEQ ID NO: 42672 - DNA, 120 bp, Artificial Sequence
  ENSG00000061938_65 (sequence is synthesized)
cagctctaggcgcccctccagagacccagctgtcttcccaggccccttcccagcaaggactagcttcatctgaaccacacacacactcacggttcaacctcagactaaaattatcctctc

SEQ ID NO: 42673 - DNA, 120 bp, Artificial Sequence
  ENSG00000061938_66 (sequence is synthesized)
ccctgggcaggatgaagggcagccgactccctggtgagggtggagacagacagcaccaaatggtcaggccagagaaggggccagggctaaaaatggacaaggaggtgtctgtggagggcc

SEQ ID NO: 42674 - DNA, 120 bp, Artificial Sequence
  ENSG00000061938_67 (sequence is synthesized)
cctgcggctccatcgatgcgggttagggctggagtctgcggggtggcgggtgcaggaagggagggtggggcaggactgggaggagactccgaccttggctgggcggtgccctccctctcc

SEQ ID NO: 42675 - DNA, 120 bp, Artificial Sequence
  ENSG00000061938_68 (sequence is synthesized)
acacagctgggtgtggggccgctcagccacaggctgcatgcctgtcggtctctttctggcaccctccttgaggccagcatcaggctttgggttcatgtttgggggtgtgccctggacgga

SEQ ID NO: 42676 - DNA, 120 bp, Artificial Sequence
  ENSG00000061938_69 (sequence is synthesized)
gtgtgggcctccagccaggctgccccactgacagtttggcaaaaccaggacctatctggaagccgaagccggggatcaccaggtggacccagcggggtgggactgagtgactgaccctgg

SEQ ID NO: 42677 - DNA, 87 bp, Artificial Sequence
  ENSG00000061938_70 (sequence is synthesized)
ctcttctgcccccaaccagggtgtggatgggactggggatgcgtcacagtgtggctcatcccagagtccgtgctcaggatttttggg

SEQ ID NO: 42678 - DNA, 78 bp, Artificial Sequence
  ENSG00000061938_71 (sequence is synthesized)
tgacctcagatgatctgcccactttccagcccatgctcaggtttaactaagcacatttattatttcaactataaaaat

SEQ ID NO: 42679 - DNA, 120 bp, Artificial Sequence
  ENSG00000061938_72 (sequence is synthesized)
aggtttaactaagcacatttattatttcaactataaaaataatttattataaaagtttggaaagtatttgaaaaacaagaaaaaaaaaatcgcctgtaatcccaccactcagaggaagcc

SEQ ID NO: 42680 - DNA, 120 bp, Artificial Sequence
  ENSG00000061938_73 (sequence is synthesized)
gagcctcttcctcccactttaggtattttgttggatttagttaagatacaaattctggatacagcttttaaaatcttgttctttcttctcggcgttgcatttaacattttcccctcaggg

SEQ ID NO: 42681 - DNA, 120 bp, Artificial Sequence
  ENSG00000061938_74 (sequence is synthesized)
ataacgtgtcaccacagcatacagttctggtgtgactgtttcctgtgcagcagccgtgtccttactgctcagatcacgtgcggtgcattcccagcacctcagagggctcctcattctccg

SEQ ID NO: 42682 - DNA, 120 bp, Artificial Sequence
  ENSG00000061938_75 (sequence is synthesized)
tccactcagtgcgtccttctcccggggaagccgctgtcactcagtgcatccttctcccggggaagccgctgtgcagacttccagctccacagctttgtttttggcattacatttacagca

SEQ ID NO: 42683 - DNA, 120 bp, Artificial Sequence
  ENSG00000061938_76 (sequence is synthesized)
ccagctccacagctttgtttttggcattacatttacagcattttccttctacagcaaaacaccttttaatattccattttatgaccagcctgagcaatatggagaaaccccatctctact

SEQ ID NO: 42684 - DNA, 73 bp, Artificial Sequence
  ENSG00000061938_77 (sequence is synthesized)
ttccagcctgggcgacaagagcgagactgtctcaaaaaaaaaaattccattttataacatttgaatattctct

SEQ ID NO: 42685 - DNA, 120 bp, Artificial Sequence
  ENSG00000061938_78 (sequence is synthesized)
aaaaaaaaaaattccattttataacatttgaatattctctcatcatactggttatctcttactttttggttggtatttaagcccggcattcccccaggaaggggaggtgtggccgacgat

SEQ ID NO: 42686 - DNA, 120 bp, Artificial Sequence
  ENSG00000061938_79 (sequence is synthesized)
ggctcctgagggccagccgtctgcccttctccagccaggcctcacgcagagcacgtaagcccaggcactggtgacatgcttacccacccagatgaggagctcacaggcagggatcgttga

SEQ ID NO: 42687 - DNA, 120 bp, Artificial Sequence
  ENSG00000061938_80 (sequence is synthesized)
gtgccccgccccgcccttccgtcgaaggcccccgttggccccagccgctggttccctgtggctgctgctggtggggctctgggggctccttccccctgggccaccagccctggcttggaa

SEQ ID NO: 42688 - DNA, 120 bp, Artificial Sequence
  ENSG00000061938_81 (sequence is synthesized)
atgtttttagtctggggctccttcctcatgtcagctccctagtggcagagcagtctccctcggtgtctctctggccaccatgatcagtgtcacggacacatcccagcatagccccagttc

SEQ ID NO: 42689 - DNA, 120 bp, Artificial Sequence
  ENSG00000061938_82 (sequence is synthesized)
ggcgatggcctcgcgccagtgctgggcgcggcacccccgcgtgggcctgtgttgggcggcttttgagcaggagtccgggccctcgtgtcaccgctctgaagtcaaggagggccgagaact

SEQ ID NO: 42690 - DNA, 120 bp, Artificial Sequence
  ENSG00000061938_83 (sequence is synthesized)
accacagcacctgccctccgtgcctggagctgctcaggaggtgggaggtgaggggcaggaggccacaacagccgggccgagaactactggtggcgtggccagaacacacggacgctgtgt

SEQ ID NO: 42691 - DNA, 120 bp, Artificial Sequence
  ENSG00000061938_84 (sequence is synthesized)
gcgttgggtcccaggtctgctgggatctttctggtaaccgtggacaggtcatgttgcctgctgcagcagcttccagcgtgcctccttatttgcaaaccatagggaaagctgcctgaccca

SEQ ID NO: 42692 - DNA, 120 bp, Artificial Sequence
  ENSG00000061938_85 (sequence is synthesized)
cctagagagttgtgggtaaggccgtgtgcaaacaggcctgtacggggcatggtgggtcacgggggctgttggggaggagggccggtggcacacagcctggtcctgaggcctgagctccat

SEQ ID NO: 42693 - DNA, 120 bp, Artificial Sequence
  ENSG00000061938_86 (sequence is synthesized)
cccccttctgccacagtggccagggtgtgaggagggtcccagtgccggggctgccccgccacgcctggcgttcaccgtgccatctctgtcgcgcagggccgagaactactggtggcgtgg

SEQ ID NO: 42694 - DNA, 120 bp, Artificial Sequence
  ENSG00000061938_87 (sequence is synthesized)
cttctctccctgccccatcccagagcctctgacctccttcctttccatgcttctctggctgggaaacttcctttcctcttcccccaccaggctgcaagtgaataagaggcctgggcttag

SEQ ID NO: 42695 - DNA, 120 bp, Artificial Sequence
  ENSG00000061938_88 (sequence is synthesized)
acgatttccccaagtccctgcatcgtgtcgtcaaggggtcctgcccgcttcacacggcgcccctgagacccactgttgaacctggcacagggggtcacaacaagtgtttgctgcatgagt

SEQ ID NO: 42696 - DNA, 120 bp, Artificial Sequence
  ENSG00000061938_89 (sequence is synthesized)
gttttaagtccctggggcggacgcaggtagggtgtttgagagggcttctctttgacccctgcctctgccaggtgtgcccccgagagcctgaagacacgcaccttctcccatgccagcgac

SEQ ID NO: 42697 - DNA, 120 bp, Artificial Sequence
  ENSG00000061987_0 (sequence is synthesized)
gactcggctaatggcgtcggcgagtcttaggggcctggggagctggcgctgaagcttcttgccaggttggctggtgacacccggtgtggctgggccccgcggcagcggagggacctgccc

SEQ ID NO: 42698 - DNA, 120 bp, Artificial Sequence
  ENSG00000061987_1 (sequence is synthesized)
gccttgtgggtttctcggccagagtcggcggagcctagcgggacggtgcgactgcggggggcgcctccgagaaaagccagaggtgttgcggggaagctgctgggggacgctcgagcaggc

SEQ ID NO: 42699 - DNA, 120 bp, Artificial Sequence
  ENSG00000061987_2 (sequence is synthesized)
tccgggttcgcagcccagggcccaagaagcgggctgctgaaggaccagagacaccgggagggagctgcctgtggccctaaggagctgaccgtgccagagcttgtttgtacctctcggaaa

SEQ ID NO: 42700 - DNA, 120 bp, Artificial Sequence
  ENSG00000061987_3 (sequence is synthesized)
ttggctgggaccttggaggatcatgtccggcaccagcagccccgaggcggtgaagaagctgctggagaatatgcagagcgacttgcgcgccttgtcactggagtgcaagaagaaattccc

SEQ ID NO: 42701 - DNA, 120 bp, Artificial Sequence
  ENSG00000061987_4 (sequence is synthesized)
acctgtcaaagaggctgctgaatcaggaataataaaagttaaaacaattgctgcacgaaacactgaaattttggcagcactgaaagagaacagctcagaggttgtacagccttttttaat

SEQ ID NO: 42702 - DNA, 120 bp, Artificial Sequence
  ENSG00000061987_5 (sequence is synthesized)
gggttgtggaaccaaggaaccgaagatcactcagctatgtttggctgctattcagagactcatgtcacatgaagtcgtgtctgagactgcagctggaaatataattaacatgctttggca

SEQ ID NO: 42703 - DNA, 120 bp, Artificial Sequence
  ENSG00000061987_6 (sequence is synthesized)
gctaatggagaatagtcttgaagaacttaagctacttcaaacagttcttgttcttttaacaaccaatacagtagttcatgatgaggcactttctaaggcaatcgttctttgttttcgact

SEQ ID NO: 42704 - DNA, 120 bp, Artificial Sequence
  ENSG00000061987_7 (sequence is synthesized)
acacttcacaaaagataatattacaaataatacagctgctgctacagtgcgacaagttgttactgttgtttttgagaggatggttgctgaagatgaacgacacagagatattatagaaca

SEQ ID NO: 42705 - DNA, 120 bp, Artificial Sequence
  ENSG00000061987_8 (sequence is synthesized)
accagtactggtacaaggaaatagtaacagaagatctgtcagtaccctcaaaccttgtgctaaagatgcatatatgcttttccaggatctttgtcagttggttaatgctgatgctcctta

SEQ ID NO: 42706 - DNA, 120 bp, Artificial Sequence
  ENSG00000061987_9 (sequence is synthesized)
ttggctagtgggcatgacagaaatgactcggacgtttggcctcgaattacttgagtcagtcctcaatgattttccgcaggtctttttacaacaccaagaatttagtttcctcctcaaaga

SEQ ID NO: 42707 - DNA, 120 bp, Artificial Sequence
  ENSG00000061987_10 (sequence is synthesized)
aagggtatgtcctcttgtgataaagctcttttctccaaatataaagttcagacaaggttccagcacctcatcttctccagcaccagttgaaaaaccatattttcctatctgcatgcgttt

SEQ ID NO: 42708 - DNA, 120 bp, Artificial Sequence
  ENSG00000061987_11 (sequence is synthesized)
gctgagagtagtatctgttctgattaagcagttttacagtcttttggtaactgaatgtgagatatttctgtcacttctggtgaaatttctggatgcagataaaccacagtggctacgagc

SEQ ID NO: 42709 - DNA, 120 bp, Artificial Sequence
  ENSG00000061987_12 (sequence is synthesized)
tgttgcggtggaatcaatacacagattctgtgtgcagcctcaactattaaggtcattttgtcagtcctatgatatgaaacagcattctaccaaggtttttcgtgatattgtaaatgcact

SEQ ID NO: 42710 - DNA, 120 bp, Artificial Sequence
  ENSG00000061987_13 (sequence is synthesized)
gggatcttttatacagtccttgtttcttgtcccccctactggaaatcctgcaacaagcaaccaagctggaaacaataatttaggtggctcagtctcagcaccagctaactcaggaatggt

SEQ ID NO: 42711 - DNA, 120 bp, Artificial Sequence
  ENSG00000061987_14 (sequence is synthesized)
ggggattggtggaggtgttactttgctaccagcatttgaatataggggaacctggatacctattctgacaatcacagttcaaggcagtgctaaagccacctacttagaaatgttggacaa

SEQ ID NO: 42712 - DNA, 120 bp, Artificial Sequence
  ENSG00000061987_15 (sequence is synthesized)
agttgagcctccaactatacctgaaggttacgccatgtctgtggcattccattgtttgctagaccttgttcgtggaatcacaagtatgattgaaggagagctaggagagcttgaaacaga

SEQ ID NO: 42713 - DNA, 120 bp, Artificial Sequence
  ENSG00000061987_16 (sequence is synthesized)
atgtcaaaccaccactgaagaaggttcttcaccaacacagtcgacagaacagcaggatttacagtcaacatcagaccaaatggataaggaaattgttagtagggctgtttgggaagaaat

SEQ ID NO: 42714 - DNA, 120 bp, Artificial Sequence
  ENSG00000061987_17 (sequence is synthesized)
ggtgaatgcctgctggtgtggtcttcttgctgcactctcactccttcttgatgccagcacagatgaagctgccactgagaatattttaaaagctgaactgactatggctgctctttgtgg

SEQ ID NO: 42715 - DNA, 120 bp, Artificial Sequence
  ENSG00000061987_18 (sequence is synthesized)
aagactgggccttgtaacttcaagagatgcctttataactgcaatatgcaaaggttccctgcctccccattatgctcttactgtattgaataccaccactgcagctacactttccaacaa

SEQ ID NO: 42716 - DNA, 120 bp, Artificial Sequence
  ENSG00000061987_19 (sequence is synthesized)
atcatattccgttcagggccaaagtgttatgatgataagtccatcaagtgaatctcaccaacaagttgtggcagtgggtcaacctttagcagtccagcctcaagggacagtaatgctgac

SEQ ID NO: 42717 - DNA, 120 bp, Artificial Sequence
  ENSG00000061987_20 (sequence is synthesized)
ttccaaaaatatccagtgtatgaggactttacttaacttggcgcattgccatggggctgttcttggaacatcatggcaacttgtcttggcaactcttcagcatcttgtgtggattctggg

SEQ ID NO: 42718 - DNA, 120 bp, Artificial Sequence
  ENSG00000061987_21 (sequence is synthesized)
attaaagcctagtagtggcggtgccttgaaacctgggagagctgtagaaggacccagtacagttctaacaacagcagtgatgacagatttaccagtgatttccaatatactttcaagatt

SEQ ID NO: 42719 - DNA, 120 bp, Artificial Sequence
  ENSG00000061987_22 (sequence is synthesized)
gtttgaaagctcacagtatcttgatgatgtatcactgcatcatttaataaatgcactttgctccttgtctctagaagcaatggatatggcctatggaaataataaggaaccatctctttt

SEQ ID NO: 42720 - DNA, 120 bp, Artificial Sequence
  ENSG00000061987_23 (sequence is synthesized)
tgctgttgccaaattgttagaaactggtttagttaatatgcaccgaatagaaattctgtggagacctctgactggccatctacttgaggtctgccagcatccaaactctcgaatgagaga

SEQ ID NO: 42721 - DNA, 120 bp, Artificial Sequence
  ENSG00000061987_24 (sequence is synthesized)
atggggagcagaagctttaacttctcttattaaagcaggattaacatttaaccatgatcctccactctcacaaaaccagaggctgcagttgcttttattgaacccgttaaaggagatgtc

SEQ ID NO: 42722 - DNA, 120 bp, Artificial Sequence
  ENSG00000061987_25 (sequence is synthesized)
caatattaatcatccagatattcgactcaagcagttagaatgcgtgttgcagattctgcagagtcagggagacagtcttgggcctggatggccattagtgcttggagtcatgggagcaat

SEQ ID NO: 42723 - DNA, 120 bp, Artificial Sequence
  ENSG00000061987_26 (sequence is synthesized)
cagaaatgatcaaggagaatccttgatacgaactgcattccagtgtcttcagttggttgtgacagattttctaccaacaatgccttgtacttgcctgcaaatagttgtagatgttgcagg

SEQ ID NO: 42724 - DNA, 120 bp, Artificial Sequence
  ENSG00000061987_27 (sequence is synthesized)
tagctttggcctccataaccaagaactcaatattagtttaacttcaataggtttattgtggaatatttcagattattttttccaaagaggggaaactattgaaaaagaactaaataagga

SEQ ID NO: 42725 - DNA, 120 bp, Artificial Sequence
  ENSG00000061987_28 (sequence is synthesized)
agaggcagcacagcaaaagcaggcagaagagaaaggagttgttttaaatcggccattccaccctgcaccgccatttgattgcttgtggttatgtctttatgcaaaattgggtgaactatg

SEQ ID NO: 42726 - DNA, 120 bp, Artificial Sequence
  ENSG00000061987_29 (sequence is synthesized)
tgtggatccccgtcctgctgtcaggaagagtgcagggcaaactctgttttctacaattggtgcgcatggaactttattacagcattcaacctggcacactgttatctggaaggtactctt

SEQ ID NO: 42727 - DNA, 120 bp, Artificial Sequence
  ENSG00000061987_30 (sequence is synthesized)
tcatctactggacagagttcgagagtcctctaccactgcagacaaagaaaagattgagtctggaggtggcaatattctcattcatcattcaagggacaccgccgagaagcaatgggctga

SEQ ID NO: 42728 - DNA, 120 bp, Artificial Sequence
  ENSG00000061987_31 (sequence is synthesized)
gacgtgggtattaacattggctggagtagcaaggatcttcaacactagaagatatttgctgcagcctttaggagatttttcaagagcttgggatgttcttcttgaccatatacagtcagc

SEQ ID NO: 42729 - DNA, 120 bp, Artificial Sequence
  ENSG00000061987_32 (sequence is synthesized)
agcactcagcaaaaacaatgaagtatctctggctgctctgaaaagcttccaggaaattttacagattgtgtcccctgtcagagactcagataagcctgagacaccacctgtagttaatgt

SEQ ID NO: 42730 - DNA, 120 bp, Artificial Sequence
  ENSG00000061987_33 (sequence is synthesized)
acctgtgcctgttcttatagggcccatatcaggcatgagcaggccatttgtaagaacagattccattggagaaaaactaggaagatatagtagctctgagccacccattgttactgatga

SEQ ID NO: 42731 - DNA, 120 bp, Artificial Sequence
  ENSG00000061987_34 (sequence is synthesized)
gcttgaagatttgaatctatggtgggctgcgtggaatacctggtatagaattggatctgaaagtactaagcctcctattacttttgataaactaacttttattcctagccagccttttct

SEQ ID NO: 42732 - DNA, 120 bp, Artificial Sequence
  ENSG00000061987_35 (sequence is synthesized)
tacagctttaattcagatatttccagctctctaccaacacataaaaactggtttcaatatggatgacttgcaaaagttgggagtcatattgcacagtgctatttcagtcccaataagttc

SEQ ID NO: 42733 - DNA, 120 bp, Artificial Sequence
  ENSG00000061987_36 (sequence is synthesized)
agatgcatccccttttattcttccatcttataccgaagcagttttgacaagtttacaggaagctgtacttacagctttagatgttctccaaaaggccatttgtgtaggaccagaaaacat

SEQ ID NO: 42734 - DNA, 120 bp, Artificial Sequence
  ENSG00000061987_37 (sequence is synthesized)
gcagataatgtatccagctatatttgaccagttgttggcatttgtagaattttcctgtaaacctccacagtatggacagctggaaacaaagcacattgcaaatgcaaaatataatcagat

SEQ ID NO: 42735 - DNA, 120 bp, Artificial Sequence
  ENSG00000061987_38 (sequence is synthesized)
ccaactatttgcaccggcggaatgggtagccttgaattatgtgccgtttgctgaaaggtctttagaagtagttgtggatttataccaaaaaacagcgtgtcacaaagcagtggtgaatga

SEQ ID NO: 42736 - DNA, 120 bp, Artificial Sequence
  ENSG00000061987_39 (sequence is synthesized)
gaaagtgctccagaatattattaagactcttagggttcctctcagtttgaagtattcctgcccttctgaaagcacatggaaactagcagtatcctctctcctcagagttctttctattgg

SEQ ID NO: 42737 - DNA, 120 bp, Artificial Sequence
  ENSG00000061987_40 (sequence is synthesized)
gctacctgttgcccggcagcatgcttcttctggaaaatttgacagtatgtggccagaactagccaatacttttgaagattttctctttactaaaagcatacctccagataatctctctat

SEQ ID NO: 42738 - DNA, 120 bp, Artificial Sequence
  ENSG00000061987_41 (sequence is synthesized)
tcaagagtttcaaagaaatgaaaatattgatgtcgaggtagttcaacttatcagcaatgagatactaccttatgccaattttattcctaaggaatttgttggtcaaataatgacaatgct

SEQ ID NO: 42739 - DNA, 120 bp, Artificial Sequence
  ENSG00000061987_42 (sequence is synthesized)
taacaagggctcaatacattctcagtcatcttcatttacagaagcagagattgatattcgtttgagagaggaattttctaaaatgtgttttgaaacattactccagttttccttcagtaa

SEQ ID NO: 42740 - DNA, 120 bp, Artificial Sequence
  ENSG00000061987_43 (sequence is synthesized)
taaagtcacaacacctcaagaaggctacatctcacgaatggcactctcagtgcttttaaagaggtcccaagatgtactacatcgctatatagaggatgaaagattaagtggtaaatgccc

SEQ ID NO: 42741 - DNA, 120 bp, Artificial Sequence
  ENSG00000061987_44 (sequence is synthesized)
tcttccaaggcaacaagtaacagaaattatatttgttttaaaagcagtcagtactcttattgattcacttaagaaaactcagcctgagaatgttgatggaaatacctgggcacaagtaat

SEQ ID NO: 42742 - DNA, 120 bp, Artificial Sequence
  ENSG00000061987_45 (sequence is synthesized)
tgccttatacccaactttagtagaatgcatcacctgttcttcttcagaagtctgttctgcacttaaagaggcactagttccttttaaggatttcatgcagccaccagcatccagagttca

SEQ ID NO: 42743 - DNA, 120 bp, Artificial Sequence
  ENSG00000061987_46 (sequence is synthesized)
aaatggagaatcttgaccggctacaatatatttgaaagcaggaagatagtctaaaaaatgtttgctcctaattgagtcttctgtgagaaggacatttcttactgcagataattcttggca

SEQ ID NO: 42744 - DNA, 120 bp, Artificial Sequence
  ENSG00000061987_47 (sequence is synthesized)
gctgttgttggcctcctttaaattctacttacctgagttcagtaattcatattacaggcttgcacatcaacaaaggctcctgaatgaacagcagtgtaaggctttaataaattaaactga

SEQ ID NO: 42745 - DNA, 120 bp, Artificial Sequence
  ENSG00000061987_48 (sequence is synthesized)
tgggagggataattaacactacagtatacatgctaccatatctccagttggtgatttaaagtgagcttatgtacagtttgtggtgtatgtgttaatgatgtactttttaaaaagaaagaa

SEQ ID NO: 42746 - DNA, 120 bp, Artificial Sequence
  ENSG00000061987_49 (sequence is synthesized)
gagatatttcaattcagtcagatttattagtctggtgtttttgcaccctttttcaagtacaaaatcgtactagaattttatgcaagatggtactgtaacattccatattatctataacca

SEQ ID NO: 42747 - DNA, 120 bp, Artificial Sequence
  ENSG00000061987_50 (sequence is synthesized)
gcctttgttaacaaagggaactgatatacttgtgtgtataataaatggtacagttctgtataaaatagtgcatttatttaaattttaaaagtattgataatgttaaatgcttaaagctct

SEQ ID NO: 42748 - DNA, 120 bp, Artificial Sequence
  ENSG00000061987_51 (sequence is synthesized)
atttattattaatacaaaattgtttgcttacatttttacttataatttgccttcatatgtggcggataagctcaccatatgatcatgcagttagcttcatgcttattttaaatgtattat

SEQ ID NO: 42749 - DNA, 120 bp, Artificial Sequence
  ENSG00000061987_52 (sequence is synthesized)
tagtgaccattaaacatctgaccagtaaggtcatgtgaacacagcagcaaatagtttatgatttgctgattttggagctttgaaatataggttcttaatacattgatacatattgtagca

SEQ ID NO: 42750 - DNA, 120 bp, Artificial Sequence
  ENSG00000061987_53 (sequence is synthesized)
ctatgacttcatcatacctcatttctttaaacagctctccaagctttcactgaagtctgtctgttttttatattggctgtctggattttaaagacttttcatattttatatttctactga

SEQ ID NO: 42751 - DNA, 120 bp, Artificial Sequence
  ENSG00000061987_54 (sequence is synthesized)
ttttgtttcccctaacaacatttgtcactgtctttgaattatgacccaggcaagatgatttcagattttctaaaatcttgcctgtgaggttttgttcatatcagtgcttcattttgtaat

SEQ ID NO: 42752 - DNA, 120 bp, Artificial Sequence
  ENSG00000061987_55 (sequence is synthesized)
atgaaaagtgtatttttggagatagtcaagcatttagaagtgcagtgaacttgctgtcacggagtaaaatgctaattatgtttcactttcctagcctagtgaaaaagaaaagtgctcttg

SEQ ID NO: 42753 - DNA, 120 bp, Artificial Sequence
  ENSG00000061987_56 (sequence is synthesized)
agtacaataccttaattatttcttaaaatactgactttgacctagctcactgtattttttatttaatggattatggattacagtatttttcttctgagttaaattttcataatttatgtg

SEQ ID NO: 42754 - DNA, 120 bp, Artificial Sequence
  ENSG00000061987_57 (sequence is synthesized)
aagacacaaagatgtttaaaacaatgattattcataagaaatcatgatggtctcagtattattttagtgtattggaaggtctttgatcttaatagaatttataaatttcagcttctccag

SEQ ID NO: 42755 - DNA, 120 bp, Artificial Sequence
  ENSG00000061987_58 (sequence is synthesized)
aataatcataaaactgcaaaaagatattataattgagtcatgattgagatacagttttgaggctattataattgtataattatttaatttgcattatctgtaaaatgtagtaaggtcttt

SEQ ID NO: 42756 - DNA, 120 bp, Artificial Sequence
  ENSG00000061987_59 (sequence is synthesized)
gaggggatattttttatttacatgaattactgaatttctattttattatttcacctaaaattaaggtaaaatatggcatttcataagttctgctttcagcattttccttaaagttgtaaa

SEQ ID NO: 42757 - DNA, 120 bp, Artificial Sequence
  ENSG00000061987_60 (sequence is synthesized)
aaatcaagctatgtacttattttctatatttgggtgtgttaaattgaggattagaaaaatccacataatcactgataaagcattgaaacagaataacccaagggtagtgtaccgattcag

SEQ ID NO: 42758 - DNA, 120 bp, Artificial Sequence
  ENSG00000061987_61 (sequence is synthesized)
taacatgttaaaaatattgctatgcatttattcaaaggaaaatggtctgttcttgagaaataaaagatcagttgcaattaggataattaaatagttaaatatgagtcaagtgtatgcaat

SEQ ID NO: 42759 - DNA, 120 bp, Artificial Sequence
  ENSG00000061987_62 (sequence is synthesized)
atacatttatatgaaccaaagcttgctttatcaggaccatgccctacagttcaaaacataaacatagtgaatgtgttaatatcatataataaggtaataaatgccagtcttagtgtgaag

SEQ ID NO: 42760 - DNA, 120 bp, Artificial Sequence
  ENSG00000061987_63 (sequence is synthesized)
caagtgggtggcccccttggtagtataattggacaggattttcctccagaatatttcctgtcaccctccaagagtcactacagtaattgattgctggcatggaacacattgcccttgtct

SEQ ID NO: 42761 - DNA, 120 bp, Artificial Sequence
  ENSG00000061987_64 (sequence is synthesized)
tgttagtatgaattgggttctccagtgactagaagaactggggtgtgtgaaagtattcgatgccaggagattcaaaaaggaagctctcaaagataagatcattttatggcacaattgagt

SEQ ID NO: 42762 - DNA, 120 bp, Artificial Sequence
  ENSG00000061987_65 (sequence is synthesized)
gcacaattgagtctataaccagccctttaagcagtagtaaaaatgtcctttgtcatacttactagaaatactatgagttttttttttttttttcatttgagacggagtctcgctctgtca

SEQ ID NO: 42763 - DNA, 120 bp, Artificial Sequence
  ENSG00000061987_66 (sequence is synthesized)
tgcaacctctgcttcccgggttcaagcagtttcctgcttcagacttccaagtagctgggattacagacatgccaccatgccaggctaatttttttaatatttttagtagagatggggttt

SEQ ID NO: 42764 - DNA, 120 bp, Artificial Sequence
  ENSG00000061987_67 (sequence is synthesized)
gcccagccaataccatgagttttaagcctcacatcgtcacttgctgtcactgccagtgcctgttttattcatattgctggacaacagacatatgccaccaattgtatgattaataaagtc

SEQ ID NO: 42765 - DNA, 120 bp, Artificial Sequence
  ENSG00000061987_68 (sequence is synthesized)
tttttctggccattttgtccattataaaggaaataaactaattgttaacttgcatagattacttcttagtttcctatgctaccaccactgccaagggagaaaaaaatacatcattttgta

SEQ ID NO: 42766 - DNA, 120 bp, Artificial Sequence
  ENSG00000061987_69 (sequence is synthesized)
atgtctttagtatttctttataactagtgttaaggttttgttaattttattgtatacatttgtaacatttattaggagccttttaggttccaaaacaaacaaaaggcataaaaaagtcta

SEQ ID NO: 42767 - DNA, 120 bp, Artificial Sequence
  ENSG00000061987_70 (sequence is synthesized)
gcttagaaccacttttcacttgctttcatttttaattttattcacttaacagctaacatctttcttgtttcttgttttttccattatatggttatcgattcaactcttgctatattcctt

SEQ ID NO: 42768 - DNA, 120 bp, Artificial Sequence
  ENSG00000061987_71 (sequence is synthesized)
aaatttgtatgtatcatcagaagaaagagatgaacaatttagtgtagatattttattctggagaataatattcaattaaattatttctacagcaggccagtaacaactagattatttgtc

SEQ ID NO: 42769 - DNA, 120 bp, Artificial Sequence
  ENSG00000061987_72 (sequence is synthesized)
ctttctcagtataattttaaagagcattttgttttattgtcacaatttggtaccactagtcccaggtaaccattgggccaaaggatcagttgagaaacagttaaggatgaattagcataa

SEQ ID NO: 42770 - DNA, 120 bp, Artificial Sequence
  ENSG00000061987_73 (sequence is synthesized)
gttatggaacagtgttagaaaacaactcaaaagtatattctttattaatgaggtggtcattattacatttgtgtcaatgaagggcagtgtagttattttaaaatgactaatattttctcc

SEQ ID NO: 42771 - DNA, 120 bp, Artificial Sequence
  ENSG00000061987_74 (sequence is synthesized)
ccaaatacagaataattcagatgggcaaccaagttttcaagagactgctgtaggtgaagtctgtctagccaaggcagaacacttacaggagtccctaactgtgccacccttggaatgggt

SEQ ID NO: 42772 - DNA, 120 bp, Artificial Sequence
  ENSG00000061987_75 (sequence is synthesized)
tagtgtacaggctcagaatattgtggattacagtttttcagagaaaactaccacagatgtagacaaaaatgatctctgaaagcattgccagcagccaggtatgttccttagatttccact

SEQ ID NO: 42773 - DNA, 120 bp, Artificial Sequence
  ENSG00000061987_76 (sequence is synthesized)
taggtttggcattttggcagataagctaatcttgtataaagcatcacattttactatgcttagtgttcctgggttgtatttatctacattattagagggaatttttattttaaaaaaatt

SEQ ID NO: 42774 - DNA, 120 bp, Artificial Sequence
  ENSG00000061987_77 (sequence is synthesized)
gtcattcatgagaagaatgggagttcatgccacatagtattttaccaatttatataaagtgggaaaagtctttaatacttcatgatcacttgaattaaagtttttgtatctctggaaagt

SEQ ID NO: 42775 - DNA, 120 bp, Artificial Sequence
  ENSG00000061987_78 (sequence is synthesized)
agaatagtgctttcatttgaatgaaaagtgtttatagattcagaaagagagatgatatctttgtatcttgatttatatacagaccatttcagaggaagttaaatgtcttacaaatccaat

SEQ ID NO: 42776 - DNA, 120 bp, Artificial Sequence
  ENSG00000061987_79 (sequence is synthesized)
actttctaatgctctaacagtgttggctatttaaaagaacatgtggcaagttctatatgaatattcttggtcatctcgactaattctgaggcaatgatggacagagatgctacttcttat

SEQ ID NO: 42777 - DNA, 120 bp, Artificial Sequence
  ENSG00000061987_80 (sequence is synthesized)
ttaactctaggcatgttgacttttcaaagcggtttccttatttctaaacagagatgatgatcaatgagttactaattctttagaggaaaaaatgcataatttgagtgtggagttgatttt

SEQ ID NO: 42778 - DNA, 120 bp, Artificial Sequence
  ENSG00000061987_81 (sequence is synthesized)
aatgacagggtaattcaagttgtttgataaatttattactatattgtaagagagatctttgaccatttttcttcctttttcttggacatcactttcttccctccccttctctcttttatg

SEQ ID NO: 42779 - DNA, 120 bp, Artificial Sequence
  ENSG00000061987_82 (sequence is synthesized)
tttttatccttgttaaattttatgtttacgttaccatctttcttatactttcccctgatttttctcttttaattcctctttcattctctgcctcttctctttcagctctttctctaattg

SEQ ID NO: 42780 - DNA, 120 bp, Artificial Sequence
  ENSG00000061987_83 (sequence is synthesized)
tgcctattccttgttcataagaagtggagctgttagtggtagaaccactgctcatggttctaccactacaaagtggaaagtagaaatactttgcactttggccactgttgcgtttttgcc

SEQ ID NO: 42781 - DNA, 120 bp, Artificial Sequence
  ENSG00000061987_84 (sequence is synthesized)
aaggtaaagttcccctgccattttgaaatagctgaacaagttaaagtaatatgttccaaaaactggaagtgccataaaaaactaaaaataaaaaaaaattgtgactataactcctactgt

SEQ ID NO: 42782 - DNA, 120 bp, Artificial Sequence
  ENSG00000061987_85 (sequence is synthesized)
ctttatgaatacacgggattcagcagccaagatgctcacaaaatgggattgctataaatatgatggattcagcacctaaatttggaataatcatgtcttttctgttatgtgggtagagag

SEQ ID NO: 42783 - DNA, 120 bp, Artificial Sequence
  ENSG00000061987_86 (sequence is synthesized)
gaataatcatgtcttttctgttatgtgggtagagagattatatatcttttctcaaagtaaagtatttaaaacctgtttaaatgagggttttggctggcgtggtggcccacacctgtaatc

SEQ ID NO: 42784 - DNA, 120 bp, Artificial Sequence
  ENSG00000061987_87 (sequence is synthesized)
gaggccaggagtttgagactagcctagacaacatagcaagatcctatctctagttcaaaaaaatatttttaattagggttttggttttttatgattttggggggtgggggagatatttgt

SEQ ID NO: 42785 - DNA, 120 bp, Artificial Sequence
  ENSG00000061987_88 (sequence is synthesized)
ttttttgaggcagacgtttaaacttttagatttatcccatcttaatattgatttatattgacactgcctacttacaagaataatttgaggcagcatattgcccatgtatttcaactattt

SEQ ID NO: 42786 - DNA, 120 bp, Artificial Sequence
  ENSG00000061987_89 (sequence is synthesized)
tcatttttctgttgcaaagcagtctttgatggaagacccggaatcttatagttctcatatctgagtctttctggagtgtatttggtgtctgtgtgattggttcacccagaggtcacccag

SEQ ID NO: 42787 - DNA, 120 bp, Artificial Sequence
  ENSG00000061987_90 (sequence is synthesized)
aggtcaattgaaaccttcctaattgtactatggtattgattctatcccctcaagtatgaaaaaattaaattttcagaccattttcagttgctgcgaatgtagttacactaagttttattt

SEQ ID NO: 42788 - DNA, 120 bp, Artificial Sequence
  ENSG00000061987_91 (sequence is synthesized)
taaactaaaattcaataaacagtgcagccagggaagatctgctaaaccatgccgttatttggaaaatcattgcaatatattaacaactgcttccttctatgatgtttactagatggagaa

SEQ ID NO: 42789 - DNA, 120 bp, Artificial Sequence
  ENSG00000061987_92 (sequence is synthesized)
aaatactccatacctatattgcaattttatttttatctagaaaaagaaaatattaggcttcagacccaactgtgcaaatttcatttgctttccatctcttactactacctctgtgtcata

SEQ ID NO: 42790 - DNA, 120 bp, Artificial Sequence
  ENSG00000061987_93 (sequence is synthesized)
atttaacacgtaacatacaactcctgtctcttaaggcagctaccatatggtgtttatgtcagactggatatatttatctaattttgtgaaattattttttagttcccaacacaattcttg

SEQ ID NO: 42791 - DNA, 120 bp, Artificial Sequence
  ENSG00000061987_94 (sequence is synthesized)
aaagtaataccactgttgttactctttctccttacaatttttatgttgttgagatgtatcagttatgtattataatcatgaaattgtattggcctcaaacccaaattttctttgtagtct

SEQ ID NO: 42792 - DNA, 120 bp, Artificial Sequence
  ENSG00000061987_95 (sequence is synthesized)
aggatagatttttcatgaaagctatatagttataactgtgattgtacagattgtttatttgttttacagctaacattaagcatgattccaggtttttaattatgttccagcaacactagt

SEQ ID NO: 42793 - DNA, 120 bp, Artificial Sequence
  ENSG00000061987_96 (sequence is synthesized)
gtttctttataacttaaaatcataaccactttgataatttacctttggatctgaccagtgattcatttttttcttgaatatactttgtgtttgctttctcatccccgttaagtctgaaac

SEQ ID NO: 42794 - DNA, 120 bp, Artificial Sequence
  ENSG00000061987_97 (sequence is synthesized)
attattgacaccccacatcacttactctgtttaaagactttacgagtagtgagtcacatgtttaggatgatcactttgggaaaaaaaaaattatagagtaaaggggaaatgttcttgaga

SEQ ID NO: 42795 - DNA, 120 bp, Artificial Sequence
  ENSG00000061987_98 (sequence is synthesized)
gctttattaaaaccattaatatataaaatgaaaaaataataaacagaagacacgaagtgtctctcaatagtttagaaagaaagatttggaactttaagtaaaaatgctaggtcaagtaaa

SEQ ID NO: 42796 - DNA, 120 bp, Artificial Sequence
  ENSG00000061987_99 (sequence is synthesized)
aatcctgatgtagattagattatcttaatcttatgagcatttttttttaatttggtgaagctgttttgaaactgcctgtccatatcaatgccagactatctctctacctctcaaagaaaa

SEQ ID NO: 42797 - DNA, 120 bp, Artificial Sequence
  ENSG00000061987_100 (sequence is synthesized)
taatttgcattaaaattcctttttttgttatgtaatgaaagtataaaacaagaatttgtacgttactcagtgtgtactgcagtcagatatagttaaaataatttttctgatgcgtaattt

SEQ ID NO: 42798 - DNA, 120 bp, Artificial Sequence
  ENSG00000061987_101 (sequence is synthesized)
taaccaccatttctggagtacctagtatgtgcaggccaaggctttgcctatattattccctttaatcctcaaagtagccttgcaaagaagttattttcattttacagaagagtcaaggat

SEQ ID NO: 42799 - DNA, 120 bp, Artificial Sequence
  ENSG00000061987_102 (sequence is synthesized)
tagggggttgaagtgagctgcctagagtcacatacctaaagtccaggtggatcactatgtcttgctttttcaaaagcagttctttctactacagtacaatagtttcatgttttacagtcc

SEQ ID NO: 42800 - DNA, 120 bp, Artificial Sequence
  ENSG00000061987_103 (sequence is synthesized)
attaaaatccaagacttataaaataaactaaaaatactcttgaggcaattactatttctatgatgggcactgggacaaatatacttgaacataacaaagaactaaaaatactgtgaaaaa

SEQ ID NO: 42801 - DNA, 120 bp, Artificial Sequence
  ENSG00000061987_104 (sequence is synthesized)
aagatttgtcttaacgatgaccttgaaagttgcattgggtttttattattggtccaggtttaaaacattttatctatttaaaacatatgttgtgtgttttaagaagttatgttataaata

SEQ ID NO: 42802 - DNA, 120 bp, Artificial Sequence
  ENSG00000061987_105 (sequence is synthesized)
acagcattgtggttaagagcccagagtctggggccaggcttcttagatgcaaatcccaactctgttattttactaaatgtgtgaccttgggcaagttaattaacctgttttggtgtcctc

SEQ ID NO: 42803 - DNA, 120 bp, Artificial Sequence
  ENSG00000061987_106 (sequence is synthesized)
ctctgtgaaatggagttaatcgtggtatttaacagaattcaaaatgtagtgtgttctaaagcgctgtgcctggagcatcatcaccactaggtggttagggaagtaaaacacatttggcac

SEQ ID NO: 42804 - DNA, 120 bp, Artificial Sequence
  ENSG00000061987_107 (sequence is synthesized)
acatcattcaagaatggccagaaaatccatgtcttcccacaatagggaccaattttttgcctttcaccagacaaccactgaatgttaagaatctactgtgtgctaataactgtgtccttg

SEQ ID NO: 42805 - DNA, 120 bp, Artificial Sequence
  ENSG00000061987_108 (sequence is synthesized)
ctgtatgacagaagctatttggagcgctctcaagtgcttattacagctagtcaaggaaaccgcatatataaaataatactggatacaagactatacaattaaatactggtgtatcactaa

SEQ ID NO: 42806 - DNA, 120 bp, Artificial Sequence
  ENSG00000061987_109 (sequence is synthesized)
atatttcattttattaaagaaataaatgtattgttgtactaattgttgataacaaggaaaactctgaaaagcaagtgtttttgtaagtgatctgaactaagctgaagttgtttataatct

SEQ ID NO: 42807 - DNA, 120 bp, Artificial Sequence
  ENSG00000061987_110 (sequence is synthesized)
tatttatcccatatggtgtaaatattcacaggttttcctgcagatatattaacatgttttgttatggggtgcttttttagatccctcatggagattatgtaacatatgatacataggtac

SEQ ID NO: 42808 - DNA, 120 bp, Artificial Sequence
  ENSG00000061987_111 (sequence is synthesized)
tcactttgttggccctttttctattcttttaagaaataaatcacactgtaaaaaagaacattttttagctgattaacagtttcagcctatactttattctataacagtttaaaatagttt

SEQ ID NO: 42809 - DNA, 120 bp, Artificial Sequence
  ENSG00000061987_112 (sequence is synthesized)
gtgtcctttagggctcagaaaagatggtataatacataaaataagacagtttttaagattctgtggttaaacaaatatatacacagtaaagaacttaatggagttcagattatgcattct

SEQ ID NO: 42810 - DNA, 120 bp, Artificial Sequence
  ENSG00000061987_113 (sequence is synthesized)
gtttaaatatgtattaacttttctcattctatttgtcttgcaacacaatggaatcacaatagatccaactatttgcaccggtgagttaaatttcctaaaattgtcctaacctcttggcaa

SEQ ID NO: 42811 - DNA, 120 bp, Artificial Sequence
  ENSG00000061987_114 (sequence is synthesized)
caaataaagtacatctttcccggttcttggtagaatgctgtatgtgctttttccaatagttttaatttttgcctggctgaaaattatttttttcatgaagtacatatctctttgaaaact

SEQ ID NO: 42812 - DNA, 120 bp, Artificial Sequence
  ENSG00000061987_115 (sequence is synthesized)
cactgaaattttggcaggataaaaactgcaattatgcagtgaaactgctcagagcaaggaaacccctaggatatggggacctggtggacctttttcagcactgaaagagaacagctcaga

SEQ ID NO: 42813 - DNA, 120 bp, Artificial Sequence
  ENSG00000061987_116 (sequence is synthesized)
cttatttcttttaatttttaaagaatttccatgcatttgtgtatttgacaaaacaggaaataactgtgtcatattgtaaattgtacctcataaagagcaaattaaatattaacagcctta

SEQ ID NO: 42814 - DNA, 120 bp, Artificial Sequence
  ENSG00000061987_117 (sequence is synthesized)
aagtcatggcaagaataactacaaatttgatttgcacactgaagtacatataaataaaatgatttttacttttatatgaatttaaaactaacattaaccttgcattgtattgtgttcagt

SEQ ID NO: 42815 - DNA, 120 bp, Artificial Sequence
  ENSG00000061987_118 (sequence is synthesized)
tctgttgtagcgcatttagttttttcaattcagttcaacagaatttttttgagtacctacgtgtagtctaggtactctaaaggtttgttctatcctttcttgaatcttgcttatgtttat

SEQ ID NO: 42816 - DNA, 120 bp, Artificial Sequence
  ENSG00000061987_119 (sequence is synthesized)
agagtattcataatgtgtgaagcagagtcattgcctgttgtctgaagccagcataggaattgtcgttttggaactcagcttcttagctaattgtctgtatctcatttgaaggattattaa

SEQ ID NO: 42817 - DNA, 120 bp, Artificial Sequence
  ENSG00000061987_120 (sequence is synthesized)
aattatagtctcttcagtttattctgctttcatttatactgtttcatatgtcttaacagattaaagcaaagacattaaagatttggtcaaatctaagattagaaaccaattattttgact

SEQ ID NO: 42818 - DNA, 120 bp, Artificial Sequence
  ENSG00000061987_121 (sequence is synthesized)
tacagtccaatattgtatctgttttgcataagttaatggatgcctattatgttgtgatattccggatgataattctatttatgtaatgctttagtcgtaaacattcaaatactgtttctc

SEQ ID NO: 42819 - DNA, 120 bp, Artificial Sequence
  ENSG00000061987_122 (sequence is synthesized)
tcaaatactgtttctcagaaaaaataatgcaccgtgtttttttaaaattctgtgttaggtcaaattcagcattctgtaattttttcacatttatattcttcttcttcttttttttttttt

SEQ ID NO: 42820 - DNA, 120 bp, Artificial Sequence
  ENSG00000061987_123 (sequence is synthesized)
gtcctaagttacgacttttccaatgattctctggttaagaacgagaacttcttacttaatcattaataaaggtgggtagactgaagatgttactgaaatgcttttgtttcaacctcgttg

SEQ ID NO: 42821 - DNA, 120 bp, Artificial Sequence
  ENSG00000061987_124 (sequence is synthesized)
atttaattttctgttatcctttggcagaagttctgggaaatggtataaatatgtataagtacatacatattttggggtttttaattttttttatttcagtagcttttggggtacaagtgg

SEQ ID NO: 42822 - DNA, 120 bp, Artificial Sequence
  ENSG00000061987_125 (sequence is synthesized)
tggtgaagtctgagattttagtgcactcgtcacctacctgagttttgtttttaagattgaaacattatttgatatatccatcatcctcctcttggtgccctttgttcctatatctgaaaa

SEQ ID NO: 42823 - DNA, 120 bp, Artificial Sequence
  ENSG00000061987_126 (sequence is synthesized)
tggtgccctttgttcctatatctgaaaaatttttttactgaatttctaggttgtgataattttaattcccattgttagtaccttagtacctagtcatatattttccagttctgtaggatt

SEQ ID NO: 42824 - DNA, 120 bp, Artificial Sequence
  ENSG00000061987_127 (sequence is synthesized)
ttaagcagaaaaattaagcaaatatgctttcaagtgtctaatatgaagagaaaatttgatcgcttttatgataatagtttttttttctcttcctaatataggagatttttcaagagcttg

SEQ ID NO: 42825 - DNA, 120 bp, Artificial Sequence
  ENSG00000062038_0 (sequence is synthesized)
aaaggggcaagagctgagcggaacaccggcccgccgtcgcggcagctgcttcacccctctctctgcagccatggggctccctcgtggacctctcgcgtctctcctccttctccaggtttg

SEQ ID NO: 42826 - DNA, 120 bp, Artificial Sequence
  ENSG00000062038_1 (sequence is synthesized)
ctggctgcagtgcgcggcctccgagccgtgccgggcggtcttcagggaggctgaagtgaccttggaggcgggaggcgcggagcaggagcccggccaggcgctggggaaagtattcatggg

SEQ ID NO: 42827 - DNA, 120 bp, Artificial Sequence
  ENSG00000062038_2 (sequence is synthesized)
ctgccctgggcaagagccagctctgtttagcactgataatgatgacttcactgtgcggaatggcgagacagtccaggaaagaaggtcactgaaggaaaggaatccattgaagatcttccc

SEQ ID NO: 42828 - DNA, 120 bp, Artificial Sequence
  ENSG00000062038_3 (sequence is synthesized)
atccaaacgtatcttacgaagacacaagagagattgggtggttgctccaatatctgtccctgaaaatggcaagggtcccttcccccagagactgaatcagctcaagtctaataaagatag

SEQ ID NO: 42829 - DNA, 120 bp, Artificial Sequence
  ENSG00000062038_4 (sequence is synthesized)
agacaccaagattttctacagcatcacggggccgggggcagacagcccccctgagggtgtcttcgctgtagagaaggagacaggctggttgttgttgaataagccactggaccgggagga

SEQ ID NO: 42830 - DNA, 120 bp, Artificial Sequence
  ENSG00000062038_5 (sequence is synthesized)
gattgccaagtatgagctctttggccacgctgtgtcagagaatggtgcctcagtggaggaccccatgaacatctccatcatcgtgaccgaccagaatgaccacaagcccaagtttaccca

SEQ ID NO: 42831 - DNA, 120 bp, Artificial Sequence
  ENSG00000062038_6 (sequence is synthesized)
ggacaccttccgagggagtgtcttagagggagtcctaccaggtacttctgtgatgcaggtgacagccacggatgaggatgatgccatctacacctacaatggggtggttgcttactccat

SEQ ID NO: 42832 - DNA, 120 bp, Artificial Sequence
  ENSG00000062038_7 (sequence is synthesized)
ccatagccaagaaccaaaggacccacacgacctcatgttcaccattcaccggagcacaggcaccatcagcgtcatctccagtggcctggaccgggaaaaagtccctgagtacacactgac

SEQ ID NO: 42833 - DNA, 120 bp, Artificial Sequence
  ENSG00000062038_8 (sequence is synthesized)
catccaggccacagacatggatggggacggctccaccaccacggcagtggcagtagtggagatccttgatgccaatgacaatgctcccatgtttgacccccagaagtacgaggcccatgt

SEQ ID NO: 42834 - DNA, 120 bp, Artificial Sequence
  ENSG00000062038_9 (sequence is synthesized)
gcctgagaatgcagtgggccatgaggtgcagaggctgacggtcactgatctggacgcccccaactcaccagcgtggcgtgccacctaccttatcatgggcggtgacgacggggaccattt

SEQ ID NO: 42835 - DNA, 120 bp, Artificial Sequence
  ENSG00000062038_10 (sequence is synthesized)
taccatcaccacccaccctgagagcaaccagggcatcctgacaaccaggaagggtttggattttgaggccaaaaaccagcacaccctgtacgttgaagtgaccaacgaggccccttttgt

SEQ ID NO: 42836 - DNA, 120 bp, Artificial Sequence
  ENSG00000062038_11 (sequence is synthesized)
gctgaagctcccaacctccacagccaccatagtggtccacgtggaggatgtgaatgaggcacctgtgtttgtcccaccctccaaagtcgttgaggtccaggagggcatccccactgggga

SEQ ID NO: 42837 - DNA, 120 bp, Artificial Sequence
  ENSG00000062038_12 (sequence is synthesized)
gcctgtgtgtgtctacactgcagaagaccctgacaaggagaatcaaaagatcagctaccgcatcctgagagacccagcagggtggctagccatggacccagacagtgggcaggtcacagc

SEQ ID NO: 42838 - DNA, 120 bp, Artificial Sequence
  ENSG00000062038_13 (sequence is synthesized)
tgtgggcaccctcgaccgtgaggatgagcagtttgtgaggaacaacatctatgaagtcatggtcttggccatggacaatggaagccctcccaccactggcacgggaacccttctgctaac

SEQ ID NO: 42839 - DNA, 120 bp, Artificial Sequence
  ENSG00000062038_14 (sequence is synthesized)
actgattgatgtcaatgaccatggcccagtccctgagccccgtcagatcaccatctgcaaccaaagccctgtgcgccaggtgctgaacatcacggacaaggacctgtctccccacacctc

SEQ ID NO: 42840 - DNA, 120 bp, Artificial Sequence
  ENSG00000062038_15 (sequence is synthesized)
ccctttccaggcccagctcacagatgactcagacatctactggacggcagaggtcaacgaggaaggtgacacagtggtcttgtccctgaagaagttcctgaagcaggatacatatgacgt

SEQ ID NO: 42841 - DNA, 120 bp, Artificial Sequence
  ENSG00000062038_16 (sequence is synthesized)
gcacctttctctgtctgaccatggcaacaaagagcagctgacggtgatcagggccactgtgtgcgactgccatggccatgtcgaaacctgccctggaccctggaagggaggtttcatcct

SEQ ID NO: 42842 - DNA, 120 bp, Artificial Sequence
  ENSG00000062038_17 (sequence is synthesized)
ccctgtgctgggggctgtcctggctctgctgttcctcctgctggtgctgcttttgttggtgagaaagaagcggaagatcaaggagcccctcctactcccagaagatgacacccgtgacaa

SEQ ID NO: 42843 - DNA, 120 bp, Artificial Sequence
  ENSG00000062038_18 (sequence is synthesized)
tggcgaagaggggggtggcgaagaggaccaggactatgacatcacccagctccaccgaggtctggaggccaggccggaggtggttctccgcaatgacgtggcaccaaccatcatcccgac

SEQ ID NO: 42844 - DNA, 120 bp, Artificial Sequence
  ENSG00000062038_19 (sequence is synthesized)
acccatgtaccgtcctcggccagccaacccagatgaaatcggcaactttataattgagaacctgaaggcggctaacacagaccccacagccccgccctacgacaccctcttggtgttcga

SEQ ID NO: 42845 - DNA, 120 bp, Artificial Sequence
  ENSG00000062038_20 (sequence is synthesized)
ctatgagggcagcggctccgacgccgcgtccctgagctccctcacctcctccgcctccgaccaagaccaagattacgattatctgaacgagtggggcagccgcttcaagaagctggcaga

SEQ ID NO: 42846 - DNA, 120 bp, Artificial Sequence
  ENSG00000062038_21 (sequence is synthesized)
catgtacggtggcggggaggacgactaggcggcctgcctgcagggctggggaccaaacgtcaggccacagagcatctccaaggggtctcagttcccccttcagctgaggacttcggagct

SEQ ID NO: 42847 - DNA, 120 bp, Artificial Sequence
  ENSG00000062038_22 (sequence is synthesized)
tgtcaggaagtggccgtagcaacttggcggagacaggctatgagtctgacgttagagtggtggcttccttagcctttcaggatggaggaatgtgggcagtttgacttcagcactgaaaac

SEQ ID NO: 42848 - DNA, 120 bp, Artificial Sequence
  ENSG00000062038_23 (sequence is synthesized)
ctctccacctgggccagggttgcctcagaggccaagtttccagaagcctcttacctgccgtaaaatgctcaaccctgtgtcctgggcctgggcctgctgtgactgacctacagtggactt

SEQ ID NO: 42849 - DNA, 120 bp, Artificial Sequence
  ENSG00000062038_24 (sequence is synthesized)
tctctctggaatggaaccttcttaggcctcctggtgcaacttaatttttttttttaatgctatcttcaaaacgttagagaaagttcttcaaaagtgcagcccagagctgctgggcccact

SEQ ID NO: 42850 - DNA, 120 bp, Artificial Sequence
  ENSG00000062038_25 (sequence is synthesized)
ggccgtcctgcatttctggtttccagaccccaatgcctcccattcggatggatctctgcgtttttatactgagtgtgcctaggttgccccttattttttattttccctgttgcgttgcta

SEQ ID NO: 42851 - DNA, 120 bp, Artificial Sequence
  ENSG00000062038_26 (sequence is synthesized)
tagatgaagggtgaggacaatcgtgtatatgtactagaacttttttattaaagaaacttttcccagaggtgcctggggagtgaactgttttctaaatagaaggtttattggcatctaact

SEQ ID NO: 42852 - DNA, 120 bp, Artificial Sequence
  ENSG00000062038_27 (sequence is synthesized)
cacataccataccattcacttgtttaacgtttacaattcaatggtttttagaattttcagagttctgcaaaaagagtgggctctgtttaccctgctggcttcacccaagcttcctctcaa

SEQ ID NO: 42853 - DNA, 120 bp, Artificial Sequence
  ENSG00000062038_28 (sequence is synthesized)
tggcaggggatactcagggtcagcttccatgcctaagtgggctcagggaggggagacttgccctcctttgcaaagtcagttgctccatgagagagaaccattaacctcttaccccaaggc

SEQ ID NO: 42854 - DNA, 120 bp, Artificial Sequence
  ENSG00000062038_29 (sequence is synthesized)
tgagcccctccacagccccagcaaggtctcttctggaacagcggctgccctccctgcaggacagtgtgtgacgacttcctcttctatgctggaggggtccctgttgaaaggcaggggttg

SEQ ID NO: 42855 - DNA, 71 bp, Artificial Sequence
  ENSG00000062038_30 (sequence is synthesized)
cttctatgctggaggggtccctgttgaaaggcaggggttggggaacagccagctctgctacttgctagcac

SEQ ID NO: 42856 - DNA, 70 bp, Artificial Sequence
  ENSG00000062038_31 (sequence is synthesized)
atccgcccacgctggcacatcatttaacctccagttgcctcagattttacatttacaaaatggggagttt

SEQ ID NO: 42857 - DNA, 120 bp, Artificial Sequence
  ENSG00000062038_32 (sequence is synthesized)
ccagttgcctcagattttacatttacaaaatggggagtttttgtggagattaagtgaattaatatctggcacatggtccatgcaatctgttagttggtaacagctaccatttattcagta

SEQ ID NO: 42858 - DNA, 120 bp, Artificial Sequence
  ENSG00000062038_33 (sequence is synthesized)
cttttaaaggccagacaggacttcgattatttcctctaaatcctcacaatcaccctctgaggggactttctcctttaaagaatggccacattgtatttgtttttttaaatgacatctggt

SEQ ID NO: 42859 - DNA, 120 bp, Artificial Sequence
  ENSG00000062038_34 (sequence is synthesized)
catcatcgaaatcaagcaaaacaaaattaagagaacctacccaagatgtcagtgaaattggaacattcctgacaataccagggcataaatgcaggaatcaggaataggcagcagtgatag

SEQ ID NO: 42860 - DNA, 120 bp, Artificial Sequence
  ENSG00000062038_35 (sequence is synthesized)
aacaattctgtttgtgcccttgttaacgtgaagttcaaagtcatctttgcaattagccaaaagaatctgaagtgaagctgaggaaattgctgatgttgaaataaacatttccttccatga

SEQ ID NO: 42861 - DNA, 120 bp, Artificial Sequence
  ENSG00000062038_36 (sequence is synthesized)
gtggttctccgcaatgacgtggcaccaaccatcatcccgacacccatgtaccgtcctcggccagccaacccagatgaaatcggcaactttataattgaggttttattgctctgcaggtct

SEQ ID NO: 42862 - DNA, 120 bp, Artificial Sequence
  ENSG00000062038_37 (sequence is synthesized)
ccagttccacctttcccacctacaacacctggcaagaccaagacacagcccttccacaaatacatgagtacatgagcacgtggggtggacaagccatccaatcagtcctcactgactctg

SEQ ID NO: 42863 - DNA, 120 bp, Artificial Sequence
  ENSG00000062038_38 (sequence is synthesized)
ctgtgcgccaggtgctgaacatcacggacaaggacctgtctccccacacctcccctttccaggcccagctcacagatgactcagacatctactggacggcagaggtcaacgaggaaggta

SEQ ID NO: 42864 - DNA, 69 bp, Artificial Sequence
  ENSG00000062038_39 (sequence is synthesized)
agctactcgggaggctgagcacatgggtgcaacttatggctgtagtgaatgccgagaatgaagtactca

SEQ ID NO: 42865 - DNA, 120 bp, Artificial Sequence
  ENSG00000062038_40 (sequence is synthesized)
gatctgtctgccaggtatttattgagagagcttgtttaaactacaatttagacaaacaagagacatccaccaggtggctcttggcggtcgggtatgaggcacatatggccttgtaaaaaa

SEQ ID NO: 42866 - DNA, 120 bp, Artificial Sequence
  ENSG00000062038_41 (sequence is synthesized)
cactcaaaccacatttttaggaggctgtgttcagcgctccttatcacacatactactccctgtcctgttttcaaggtccaggagatctagtcttgtgtacaaacaacatgcacacagcgc

SEQ ID NO: 42867 - DNA, 120 bp, Artificial Sequence
  ENSG00000062038_42 (sequence is synthesized)
cttttttccgctgtagccgcaaggcaaggaaacatttctcttcccgtactgaggaggctgaggagtgcactgggtgttcttttctcctctaacccagaactgcgagacagaggctgagtc

SEQ ID NO: 42868 - DNA, 120 bp, Artificial Sequence
  ENSG00000062038_43 (sequence is synthesized)
cctgtaaagaacagctccagaaaagccaggagagcgcaggagggcatccgggaggccaggaggggttcgctggggcctcaaccgcacccacatcggtcccacctgcgagggggcgggacc

SEQ ID NO: 42869 - DNA, 120 bp, Artificial Sequence
  ENSG00000062038_44 (sequence is synthesized)
caactttataattgaggggaggggagagaggggctcacagagaggaaatggaggcttgcagctggcaagaggcaggacccgccgctcctaactacctgttctctgttgccgcagaacctg

SEQ ID NO: 42870 - DNA, 120 bp, Artificial Sequence
  ENSG00000062038_45 (sequence is synthesized)
cagatgaaatcggcaactttataattgaggtgaggcgtggcaggccagtcgagggccaccctttattcaagcccagcaccagccacacaggagaacaagcatgggcctggagtcttgggt

SEQ ID NO: 42871 - DNA, 120 bp, Artificial Sequence
  ENSG00000062038_46 (sequence is synthesized)
ctgggttcaaattctgactccaccaccaaccagcttttgacctctggcttatttgagtaacttctggggtttgtttcttcctccatagaactcacttgcagagtggttaaaaatgattag

SEQ ID NO: 42872 - DNA, 120 bp, Artificial Sequence
  ENSG00000062038_47 (sequence is synthesized)
tttgctggctgcagtgcgcggcctccgagccgtgccgggcggtcttcagggaggctgaagtgaccttggaggcgggaggcgcggagcaggagcccggccaggcgctggggaaaggaaaga

SEQ ID NO: 42873 - DNA, 120 bp, Artificial Sequence
  ENSG00000062038_48 (sequence is synthesized)
aaactgacagctcaggccttggcaaaaattccccagtgctgaaggcagcacagccccacccaagattcagggaaagggaaggtatgcagcccaggtttctcgacctgggcagcctgcctc

SEQ ID NO: 42874 - DNA, 120 bp, Artificial Sequence
  ENSG00000062096_0 (sequence is synthesized)
gttctgctcctagacattagagagataatacggctgatagacaacaagaaggtattccaagctgcacaatgaggcccaggagacccttggtcttcatgtctttggtgtgtgcactcttga

SEQ ID NO: 42875 - DNA, 120 bp, Artificial Sequence
  ENSG00000062096_1 (sequence is synthesized)
acacatgccaggcacacagggtgcatgacgacaagcctaatattgtcctaatcatggttgatgacctgggtattggagatctgggctgctacggcaatgacaccatgaggacgcctcaca

SEQ ID NO: 42876 - DNA, 120 bp, Artificial Sequence
  ENSG00000062096_2 (sequence is synthesized)
tcgaccgccttgccagggaaggcgtgcgactgactcagcacatctctgccgcctccctctgcagcccaagccggtccgcgttcttgacgggaagataccccatccgatcaggtatggttt

SEQ ID NO: 42877 - DNA, 120 bp, Artificial Sequence
  ENSG00000062096_3 (sequence is synthesized)
ctagtggtaatagacgtgtcatccaaaatcttgcagtccccgcaggcctccctcttaatgagacaacacttgcagccttgctaaagaagcaaggatacagcacggggcttataggcaaat

SEQ ID NO: 42878 - DNA, 120 bp, Artificial Sequence
  ENSG00000062096_4 (sequence is synthesized)
ggcaccaaggcttgaactgcgactcccgaagtgaccagtgccaccatccatataattatgggtttgactactactatggcatgccgttcactctcgttgacagctgctggccggacccct

SEQ ID NO: 42879 - DNA, 120 bp, Artificial Sequence
  ENSG00000062096_5 (sequence is synthesized)
ctcgtaacacggaattagcctttgagagtcagctctggctctgtgtgcagctagttgccattgccatcctcaccctaacctttgggaagctgagcggctgggtctctgttccctggctcc

SEQ ID NO: 42880 - DNA, 120 bp, Artificial Sequence
  ENSG00000062096_6 (sequence is synthesized)
tgatcttctccatgattctgtttattttcctcttgggctatgcttggttctccagccacacgtcccctttatactgggactgcctcctcatgcgggggcacgagatcacggagcagccca

SEQ ID NO: 42881 - DNA, 120 bp, Artificial Sequence
  ENSG00000062096_7 (sequence is synthesized)
tgaaggctgaacgagctggatccattatggtgaaggaagcgatttcctttttagaaaggcacagtaaggaaactttccttctctttttctcctttcttcacgtgcacacacctctcccca

SEQ ID NO: 42882 - DNA, 120 bp, Artificial Sequence
  ENSG00000062096_8 (sequence is synthesized)
gtgggcaagattcttgatgctatcgatgattttggcctaaggaacaacacccttgtctactttacatcagatcacggagggcatttggaagctaggcgagggcatgcccaacttggtgga

SEQ ID NO: 42883 - DNA, 120 bp, Artificial Sequence
  ENSG00000062096_9 (sequence is synthesized)
tggaatggaatatacaaaggtggaaaaggcatggggggctgggaaggtggaatccgcgtcccaggaattgtccgatggcctggaaaggtaccagctggacggttgattaaggaacctaca

SEQ ID NO: 42884 - DNA, 120 bp, Artificial Sequence
  ENSG00000062096_10 (sequence is synthesized)
agtttaatggatattttaccaactgtcgcatcagtgtcaggaggaagtctccctcaggacagggtcattgacggccgagacctcatgcccttgctgcagggcaacgtcaggcactcggag

SEQ ID NO: 42885 - DNA, 120 bp, Artificial Sequence
  ENSG00000062096_11 (sequence is synthesized)
catgaatttcttttccactactgtggctcctacctgcacgccgtgcggtggatccccaaggacgacagtgggtcagtttggaaggctcactatgtgaccccggtattccagccaccagct

SEQ ID NO: 42886 - DNA, 120 bp, Artificial Sequence
  ENSG00000062096_12 (sequence is synthesized)
tctggtggctgctatgtcacctcattatgcagatgtttcggagaacaggttacctaccacaacccccctctgctcttcgatctctccagggacccctcagagtccacacccctgacacct

SEQ ID NO: 42887 - DNA, 120 bp, Artificial Sequence
  ENSG00000062096_13 (sequence is synthesized)
gccacagagcccctccatgattttgtgattaaaaaggtggccaacgccctgaaggaacaccaggaaaccatcgtgcctgtgacctaccaactctcagaactgaatcagggcaggacgtgg

SEQ ID NO: 42888 - DNA, 120 bp, Artificial Sequence
  ENSG00000062096_14 (sequence is synthesized)
ctgaagccttgctgtggggtgttcccattttgtctgtgtgacaaggaagaggaagtctctcagcctcggggtcctaacgagaagagataattacaatcaggctaccagaggaagcctttg

SEQ ID NO: 42889 - DNA, 120 bp, Artificial Sequence
  ENSG00000062096_15 (sequence is synthesized)
gtcctaacgagaagagataattacaatcaggctaccaaaggaagcactaactttggtgctttcaagttggcaaggagtgcatttaatagtcaataaattcatctaccattccagattatt

SEQ ID NO: 42890 - DNA, 120 bp, Artificial Sequence
  ENSG00000062194_0 (sequence is synthesized)
attgcggatcgggtcggcgccattttgggactgagactggttgtgggggagggaaaagcggcaaaaggggattattcaaagtaccgaaaaccttctcccgggatcaggcgcggcggcacc

SEQ ID NO: 42891 - DNA, 120 bp, Artificial Sequence
  ENSG00000062194_1 (sequence is synthesized)
cccaggccaggggcacctctggtggggcagaaggtgattgaattactcagatatgaagatcatcatctaggttttgtgtaaaaggccctggatattttaagtggccattttggatttaca

SEQ ID NO: 42892 - DNA, 120 bp, Artificial Sequence
  ENSG00000062194_2 (sequence is synthesized)
gtgtttttggataattttgccccagaagtttattaaaattggcaagaatcgtctgtgaagtgaattgatagtagtgaacaattcagcaagctacttaaaaagagacccaggcagcatttc

SEQ ID NO: 42893 - DNA, 120 bp, Artificial Sequence
  ENSG00000062194_3 (sequence is synthesized)
ttcagtattttggttcaaacggattatataactggttacagtatttcagctggtggtaatttttgcctccccttcccccaccccgttgttggggttcttcagccgaaactgagagacgtt

SEQ ID NO: 42894 - DNA, 120 bp, Artificial Sequence
  ENSG00000062194_4 (sequence is synthesized)
gatttgtgtactgagtagtttcagcagtttcaaatgactgagtattgctgaagtttcatggcagtttatttttacctttattgaaagttttaggaatttttgacttcagctctttcatgt

SEQ ID NO: 42895 - DNA, 120 bp, Artificial Sequence
  ENSG00000062194_5 (sequence is synthesized)
cacaatgggacactttttctgaatgaagagattgaaagaatacagagtttttttccttttatcttttatttacgtggaaatttaagatgttgcagttttccggcagcatggtagtattga

SEQ ID NO: 42896 - DNA, 120 bp, Artificial Sequence
  ENSG00000062194_6 (sequence is synthesized)
gatagctatgtgtgtctctgtatatgctgatgtttaggaatgctcttcagatgtgaaattttctttttgtttttgctttttggctcgtaaattggatatttcatctggagtggacaagta

SEQ ID NO: 42897 - DNA, 120 bp, Artificial Sequence
  ENSG00000062194_7 (sequence is synthesized)
caacagtggcaagtacatggaataataaagaagactttgatcttaaatctaaagaacttggctaattcgggagatagccatatgaaaactttaaaacagaagtatgggtagctgacttga

SEQ ID NO: 42898 - DNA, 120 bp, Artificial Sequence
  ENSG00000062194_8 (sequence is synthesized)
agtaactctatgtcaaatagtcgtaggttaagtatcttcaaagaacttcgatattatttcagaggatacaaaataaaaatacaaactggaaaataaagattacagagaaaaaaccaacac

SEQ ID NO: 42899 - DNA, 120 bp, Artificial Sequence
  ENSG00000062194_9 (sequence is synthesized)
cttcctgtgcagtcctgttggaatttggacttgccatgaggtgttgaagccttgtttcactgagttggagagactggacctaaatggcgcagcatgactttgctccagcctggcttaatt

SEQ ID NO: 42900 - DNA, 120 bp, Artificial Sequence
  ENSG00000062194_10 (sequence is synthesized)
tccctactccaccatcatcaacaaagtcgtcattgaattttgagaagcattctgaaaactttgcatggacagagaatcgttatgatgtgaaccgtcgacgacacaactcttcagatggct

SEQ ID NO: 42901 - DNA, 120 bp, Artificial Sequence
  ENSG00000062194_11 (sequence is synthesized)
ttgattctgctattgggcgtcctaatggaggtaactttggaaggaaagaaaaaaatggatggcgtacacatggaagaaatggtacagaaaacataaatcatcgaggtggataccatggtg

SEQ ID NO: 42902 - DNA, 120 bp, Artificial Sequence
  ENSG00000062194_12 (sequence is synthesized)
gaagttcccgttctcgtagcagtattttccatgcaggaaaaagccaaggactacatgaaaacaacatacctgacaatgaaaccgggaggaaagaagacaagagagaacgcaaacagtttg

SEQ ID NO: 42903 - DNA, 120 bp, Artificial Sequence
  ENSG00000062194_13 (sequence is synthesized)
aagctgaggattttccgtctttaaatcctgagtatgagagagaaccaaatcacaataagtctttagctgcaggtgtgtgggaatatcctccgaatcctaaatctagagctccaaggatgc

SEQ ID NO: 42904 - DNA, 120 bp, Artificial Sequence
  ENSG00000062194_14 (sequence is synthesized)
tggtcattaagaaaggtaatacaaaagacttacagctatctggattcccagtagtaggaaatcttccgtcacagccagttaagaatggaactggtccaagtgtttataaaggtttagtcc

SEQ ID NO: 42905 - DNA, 120 bp, Artificial Sequence
  ENSG00000062194_15 (sequence is synthesized)
ctaaacctgctgctccacctacaaaacctacacaatggaaaagccaaacaaaagaaaataaagttggaacttctttccctcatgagtccacatttggcgttggcaactttaatgctttta

SEQ ID NO: 42906 - DNA, 120 bp, Artificial Sequence
  ENSG00000062194_16 (sequence is synthesized)
aatcaactgccaagaactttagtccatctacaaattcagtgaaagagtgtaatcgctcaaattcctcttctcctgttgacaaacttaatcagcagcctcgtctaaccaaactgacacgaa

SEQ ID NO: 42907 - DNA, 120 bp, Artificial Sequence
  ENSG00000062194_17 (sequence is synthesized)
tgcgcactgataagaagagtgaatttttgaaagcattgaaaagagacagagtagaagaggaacatgaagatgaaagccgtgctggctcagagaaggatgacgactcatttaatttacata

SEQ ID NO: 42908 - DNA, 120 bp, Artificial Sequence
  ENSG00000062194_18 (sequence is synthesized)
agaatggcaatgcctcagtgatttcccagcagatcattcggtcttcaaccttcccacaaactgatgttctttcaagttcacttgaggcagaacacagattgttaaaggaaatgggctggc

SEQ ID NO: 42909 - DNA, 120 bp, Artificial Sequence
  ENSG00000062194_19 (sequence is synthesized)
aggaagacagtgaaaatgatgaaacatgtgctcccttaactgaggatgaaatgagagaattccaagttattagtgaacagttacagaagaatggtctgagaaaaaatggtattttgaaaa

SEQ ID NO: 42910 - DNA, 120 bp, Artificial Sequence
  ENSG00000062194_20 (sequence is synthesized)
atggcttgatctgtgacttcaagtttggaccgtggaagaacagcactttcaaacccacaactgagaatgatgacacagagacaagtagcagtgatacatcagatgacgacgatgtgtgaa

SEQ ID NO: 42911 - DNA, 120 bp, Artificial Sequence
  ENSG00000062194_21 (sequence is synthesized)
ggatttcctaacagctttagaaatcttagtgtgatacatctctcatacagtttggggtgaattgtaaaaatgaagaactataatttatgtagtgaaataccccattagaagaggattttt

SEQ ID NO: 42912 - DNA, 120 bp, Artificial Sequence
  ENSG00000062194_22 (sequence is synthesized)
tgggggacttcaatatgaagaaaaccaagaatgttttgttgggctgtgttgaacattatttctttgtaaatgaatgttgtaggaatgaggacttgggttggtccaacattgactttcttc

SEQ ID NO: 42913 - DNA, 120 bp, Artificial Sequence
  ENSG00000062194_23 (sequence is synthesized)
atcactgcaacatttctctgactagcaatgtgacgatgtaacaaatgagattttctcatttaataataaaaaattgtgtaatgttttgcaaagcttctgtcttaaaatgtccaggtctta

SEQ ID NO: 42914 - DNA, 120 bp, Artificial Sequence
  ENSG00000062194_24 (sequence is synthesized)
agaaaaaaggcagcttacactgttttgcttgcagagtcatatctttttcgtacaatggaaatcctcaagtccactttgtgcggtctccctctccttcccccaaaaaacaacaacaacaaa

SEQ ID NO: 42915 - DNA, 120 bp, Artificial Sequence
  ENSG00000062194_25 (sequence is synthesized)
acaaaaaccaaaaaggaaaatgtagcatgttggctaaaactggagcaaagtgcactaaaacaatttcctgaactcacctgttgtactattcaccttttaaaccataaattgctctttagc

SEQ ID NO: 42916 - DNA, 120 bp, Artificial Sequence
  ENSG00000062194_26 (sequence is synthesized)
catttgtagtgcagtaaatgttacaggaaaagacttggcacattttcttccaaattttaagaggtgattttcaaaagctttattggggtatgttgtcagaccagggttttcagagttgat

SEQ ID NO: 42917 - DNA, 120 bp, Artificial Sequence
  ENSG00000062194_27 (sequence is synthesized)
ggaaaagagtcttgtgagaaaacttattttgataaattattacacacgcagaaaaactgatcacactgactggatctgtccacgacatggaaaataaactggattttcagaatattgttg

SEQ ID NO: 42918 - DNA, 120 bp, Artificial Sequence
  ENSG00000062194_28 (sequence is synthesized)
ttttctgtagtgttcaaggtattgtttctaaacataaacatactctaaacatgctttattcacttgttaaagtcatacttttaaaagtaataccttactaaagatggtgattacttttcc

SEQ ID NO: 42919 - DNA, 120 bp, Artificial Sequence
  ENSG00000062194_29 (sequence is synthesized)
gaggtcagaaaaggaaagctaagcgttttcattatcaaatacacaagcttattaaatgaatgactgttaactactttattttcatttgcacattaattttggaattgtttctgttttgct

SEQ ID NO: 42920 - DNA, 120 bp, Artificial Sequence
  ENSG00000062194_30 (sequence is synthesized)
gctgacggaaatactattttggctctgtgtatatttgtattttgatttttctggtttgtttacccccatttgcttttagctcccccttatgtttaaatatattctaacttatgtaaagag

SEQ ID NO: 42921 - DNA, 120 bp, Artificial Sequence
  ENSG00000062194_31 (sequence is synthesized)
cataatcttagagcaaaaatacttgaggttttatgtcagatctaatcttaagtgtttgttgttttttaaaaagtgttttctcagatggctgcagtgtttttgctatttctgcataaatac

SEQ ID NO: 42922 - DNA, 120 bp, Artificial Sequence
  ENSG00000062194_32 (sequence is synthesized)
cctacctggactccccagttttcaccagaaactgttatttttttttgttgttgttcccactgagactgatggtgatggggaaattaaaaacaacacactagcacactcccacaaaacttg

SEQ ID NO: 42923 - DNA, 120 bp, Artificial Sequence
  ENSG00000062194_33 (sequence is synthesized)
aggaagagttagaatggtaataaaatattaaatagaccttatacttaaaataaggtttcactatataatttgtcacaattcaatctaatcagctaaagttaaatgtagttagaattagcc

SEQ ID NO: 42924 - DNA, 120 bp, Artificial Sequence
  ENSG00000062194_34 (sequence is synthesized)
acaggagaatgtaaagcatgctttgacgaagctatcggtaacacatattgaatgtctttgagactcttagattgtactatttgcttaatagattaatgaaatttatcagatacaacctgt

SEQ ID NO: 42925 - DNA, 120 bp, Artificial Sequence
  ENSG00000062194_35 (sequence is synthesized)
atttccaaaaacaagctagaaggaacctgaggaatgtggtttacatttgagatccaccttactgtgttttctactttcagaaaagattctgtagttttggtttttggcatctttcttata

SEQ ID NO: 42926 - DNA, 120 bp, Artificial Sequence
  ENSG00000062194_36 (sequence is synthesized)
ctcagttttttctgccttaattcccatttaccagcagttaactcatgtttattgtgctttcatgcattgtgatatggaatgtgtttagtaatttactccttataaatatggtaaagtaca

SEQ ID NO: 42927 - DNA, 120 bp, Artificial Sequence
  ENSG00000062194_37 (sequence is synthesized)
tagaatctctaagaaattaggaataatttggatttgattagaatgaaagttttaaaaatcaagaatgccagtgagcgtttgtcatataaaactatctatagatactattggtactgatcc

SEQ ID NO: 42928 - DNA, 120 bp, Artificial Sequence
  ENSG00000062194_38 (sequence is synthesized)
tgggttgatttaataatcttagaaatgatttagagacaaagacatatttgaaaataatgagagtaaaatgtattaatatgaagattttggttctactgtttcagggttggtctaaggatt

SEQ ID NO: 42929 - DNA, 120 bp, Artificial Sequence
  ENSG00000062194_39 (sequence is synthesized)
cttttgttagaaccatgtgaatggcattgttttttctgtattgcaaattagtatttctaccactctccccaggcctacacgcccagacacacacatacccaaccaaaaaaatctcccaag

SEQ ID NO: 42930 - DNA, 120 bp, Artificial Sequence
  ENSG00000062194_40 (sequence is synthesized)
actaattcacatgatcttatttaatgtggagaacttaatttattctaaactttccagctgtgaaactgatgcttttaaaagtttttgtaagggaagaaagaaagacttcactgcaatgtc

SEQ ID NO: 42931 - DNA, 120 bp, Artificial Sequence
  ENSG00000062194_41 (sequence is synthesized)
tgtttgattacacacacacattgattaaattataggaataataggtatttttggcaactgcagtagtcttgagaaaagtctgcctttagcaattattcgtagtatttatcttcagaaatc

SEQ ID NO: 42932 - DNA, 120 bp, Artificial Sequence
  ENSG00000062194_42 (sequence is synthesized)
aggattgagttggttggtctgcattcatataatgctttgaatgtagataaatggtcaataaatacatgaatgaattgatattgtgaaatagaattctcagtcataactgaagtatttaga

SEQ ID NO: 42933 - DNA, 120 bp, Artificial Sequence
  ENSG00000062194_43 (sequence is synthesized)
aataaaaggaatgtaatttcttgcttattggtaataactttgtaagtggagtaaaaagaatgaaaaaattgaaattttaattctcttcaaatggggaagggaaaatagaaatgtatttta

SEQ ID NO: 42934 - DNA, 120 bp, Artificial Sequence
  ENSG00000062194_44 (sequence is synthesized)
tattctaaatcttaagagtcattaggttgatgtttgcaattttttatagttaatgcaaggcatgttaaaatataatttgtcttggttttaacattctgagccactgtgtagcagaattta

SEQ ID NO: 42935 - DNA, 120 bp, Artificial Sequence
  ENSG00000062194_45 (sequence is synthesized)
ttcaattggaatatagtttgtacttttttagtttagttattttacccaggaggcagctgttagttaaaaaaaaaaaaaaatttggaatatactgttcttttggtggttttattctatact

SEQ ID NO: 42936 - DNA, 120 bp, Artificial Sequence
  ENSG00000062194_46 (sequence is synthesized)
cgtgactaataatccatatgacacagagttttaacattctgttttgtgttccactgtcaaaacaccaaagaaccaaaaacaaaaggattctttctcctctcctccctgccatctcacaaa

SEQ ID NO: 42937 - DNA, 120 bp, Artificial Sequence
  ENSG00000062194_47 (sequence is synthesized)
cattttaccaggtgaaatccactcttataaaccctatgtatgtgtataaataattataaaatacattttattggagctgttactgaactctagaactctgtgtaacacagtttgaaaagc

SEQ ID NO: 42938 - DNA, 120 bp, Artificial Sequence
  ENSG00000062194_48 (sequence is synthesized)
tgctcttctgtgtattatagaaaagtttaaacaattctaggatgcatttataaaataatagacacctaatttagaatcatagttctgagtattatcagaccttcattgtttgtgggataa

SEQ ID NO: 42939 - DNA, 120 bp, Artificial Sequence
  ENSG00000062194_49 (sequence is synthesized)
gaaaattattttgttgactcattcagtaggggaaaaaacagggatagaactagactgtaacatagacattataatcaattttattttgtgagtaaaggtaaaataggaagctgtggtagt

SEQ ID NO: 42940 - DNA, 120 bp, Artificial Sequence
  ENSG00000062282_0 (sequence is synthesized)
gccgcggctgccgcctctgctggggtctaggctgtttctctcgcgccaccactggccgccggccgcagctccaggtgtcctagccgcccagcctcgacgccgtcccgggacccctgtgct

SEQ ID NO: 42941 - DNA, 120 bp, Artificial Sequence
  ENSG00000062282_1 (sequence is synthesized)
ctgcgcgaagccctggccccgggggccggggcatgggccaggggcgcggggtgaagcggcttcccgcggggccgtgactgggcgggcttcagccatgaagaccctcatagccgcctactc

SEQ ID NO: 42942 - DNA, 120 bp, Artificial Sequence
  ENSG00000062282_2 (sequence is synthesized)
cggggtcctgcgcggcgagcgtcaggccgaggctgaccggagccagcgctctcacggaggacctgcgctgtcgcgcgaggggtctgggagatggggcactggatccagcatcctctccgc

SEQ ID NO: 42943 - DNA, 120 bp, Artificial Sequence
  ENSG00000062282_3 (sequence is synthesized)
cctccaggacctcttctctgtcacctggctcaataggtccaaggtggaaaagcagctacaggtcatctcagtgctccagtgggtcctgtccttccttgtactgggagtggcctgcagtgc

SEQ ID NO: 42944 - DNA, 120 bp, Artificial Sequence
  ENSG00000062282_4 (sequence is synthesized)
catcctcatgtacatattctgcactgattgctggctcatcgctgtgctctacttcacttggctggtgtttgactggaacacacccaagaaaggtggcaggaggtcacagtgggtccgaaa

SEQ ID NO: 42945 - DNA, 120 bp, Artificial Sequence
  ENSG00000062282_5 (sequence is synthesized)
ctgggctgtgtggcgctactttcgagactactttcccatccagctggtgaagacacacaacctgctgaccaccaggaactatatctttggataccacccccatggtatcatgggcctggg

SEQ ID NO: 42946 - DNA, 120 bp, Artificial Sequence
  ENSG00000062282_6 (sequence is synthesized)
tgccttctgcaacttcagcacagaggccacagaagtgagcaagaagttcccaggcatacggccttacctggctacactggcaggcaacttccgaatgcctgtgttgagggagtacctgat

SEQ ID NO: 42947 - DNA, 120 bp, Artificial Sequence
  ENSG00000062282_7 (sequence is synthesized)
gtctggaggtatctgccctgtcagccgggacaccatagactatttgctttcaaagaatgggagtggcaatgctatcatcatcgtggtcgggggtgcggctgagtctctgagctccatgcc

SEQ ID NO: 42948 - DNA, 120 bp, Artificial Sequence
  ENSG00000062282_8 (sequence is synthesized)
tggcaagaatgcagtcaccctgcggaaccgcaagggctttgtgaaactggccctgcgtcatggagctgacctggttcccatctactcctttggagagaatgaagtgtacaagcaggtgat

SEQ ID NO: 42949 - DNA, 120 bp, Artificial Sequence
  ENSG00000062282_9 (sequence is synthesized)
cttcgaggagggctcctggggccgatgggtccagaagaagttccagaaatacattggtttcgccccatgcatcttccatggtcgaggcctcttctcctccgacacctgggggctggtgcc

SEQ ID NO: 42950 - DNA, 120 bp, Artificial Sequence
  ENSG00000062282_10 (sequence is synthesized)
aagcccatcaccactgttgtgggagagcccatcaccatccccaagctggagcacccaacccagcaagacatcgacctgtaccacaccatgtacatggaggccctggtgaagctcttcgac

SEQ ID NO: 42951 - DNA, 120 bp, Artificial Sequence
  ENSG00000062282_11 (sequence is synthesized)
aagcacaagaccaagttcggcctcccggagactgaggtcctggaggtgaactgagccagccttcggggccaattccctggaggaaccagctgcaaatcacttttttgctctgtaaatttg

SEQ ID NO: 42952 - DNA, 120 bp, Artificial Sequence
  ENSG00000062282_12 (sequence is synthesized)
gaagtgtcatgggtgtctgtgggttatttaaaagaaattataacaattttgctaaaccattacaatgttaggtcttttttaagaaggaaaaagtcagtatttcaagttctttcacttcca

SEQ ID NO: 42953 - DNA, 120 bp, Artificial Sequence
  ENSG00000062282_13 (sequence is synthesized)
gcttgccctgttctaggtggtggctaaatctgggcctaatctgggtggctcagctaacctctcttcttcccttcctgaagtgacaaaggaaactcagtcttcttggggaagaaggattgc

SEQ ID NO: 42954 - DNA, 120 bp, Artificial Sequence
  ENSG00000062282_14 (sequence is synthesized)
cattagtgacttggaccagttagatgattcactttttgcccctagggatgagaggcgaaagccacttctcatacaagcccctttattgccactaccccacgctcgtctagtcctgaaact

SEQ ID NO: 42955 - DNA, 120 bp, Artificial Sequence
  ENSG00000062282_15 (sequence is synthesized)
gcaggaccagtttctctgccaaggggaggagttggagagcacagttgccccgttgtgtgagggcagtagtaggcatctggaatgctccagtttgatctcccttctgccacccctacctca

SEQ ID NO: 42956 - DNA, 120 bp, Artificial Sequence
  ENSG00000062282_16 (sequence is synthesized)
cccctagtcactcatatcggagcctggactggcctccaggatgaggatgggggtggcaatgacaccctgcaggggaaaggactgccccccatgcaccattgcagggaggatgccgccacc

SEQ ID NO: 42957 - DNA, 120 bp, Artificial Sequence
  ENSG00000062282_17 (sequence is synthesized)
atgagctaggtggagtaactggtttttcttgggtggctgatgacatggatgcagcacagactcagccttggcctggagcacatgcttactggtggcctcagtttaccttccccagatcct

SEQ ID NO: 42958 - DNA, 120 bp, Artificial Sequence
  ENSG00000062282_18 (sequence is synthesized)
agattctggatgtgaggaagagatccctcttcagaaggggcctggccttctgagcagcagattagttccaaagcaggtggcccccgaacccaagcctcacttttctgtgccttcctgagg

SEQ ID NO: 42959 - DNA, 120 bp, Artificial Sequence
  ENSG00000062282_19 (sequence is synthesized)
gggttgggccggggaggaaacccaaccctctcctgtgtgttctgttatctcttgatgagatcattgcaccatgtcagacttttgtatatgccttgaaaataaatgaaagtgagaatcctc

SEQ ID NO: 42960 - DNA, 120 bp, Artificial Sequence
  ENSG00000062282_20 (sequence is synthesized)
ggaatctggagacaggggaccagtgaagaggatagtacagctgtctatgcaaggtggcatggcccaaggcagaagagagaaggagagaactgtttcctggttgttgggcatagaggcact

SEQ ID NO: 42961 - DNA, 120 bp, Artificial Sequence
  ENSG00000062282_21 (sequence is synthesized)
aaagactgccaagaggtgagaccggggagcttgatcaccctgaggtcagggaagtcttcctggaagaggtgacattcagtccggatctggaaagatgaatagacatcagcaagacaggca

SEQ ID NO: 42962 - DNA, 120 bp, Artificial Sequence
  ENSG00000062282_22 (sequence is synthesized)
agaacattcaggtacaggaaatagcataaatagaggcatgagatttggatgggagaggcagactgactgcagggcctctgagtgaccaactgaggctgaggtcttggtgtactgagagcc

SEQ ID NO: 42963 - DNA, 120 bp, Artificial Sequence
  ENSG00000062282_23 (sequence is synthesized)
gagcgaggggaataaccgggcgcgccccttggaagcagggctcagagctgctctcctctcacgcattccccggatccgcgcggagcaggctgctggccagccccgggcccgcgccaagca

SEQ ID NO: 42964 - DNA, 120 bp, Artificial Sequence
  ENSG00000062282_24 (sequence is synthesized)
gtgtcctttgctatctgatctccacccttccaaaagaaccaaacaaacccctgtgtccttctcacatctctgttccaagaagtcagctgggagttggagccttagggcacatacaacctg

SEQ ID NO: 42965 - DNA, 120 bp, Artificial Sequence
  ENSG00000062282_25 (sequence is synthesized)
gccctgtgagggctccctggggcactaggacaaaagccaaactgggcccgaggcaggctggggtgttgagcctcaacccggggcttaggctgatcaacccggggcttaggctgagcctgc

SEQ ID NO: 42966 - DNA, 120 bp, Artificial Sequence
  ENSG00000062282_26 (sequence is synthesized)
ctctctccctctgggcctcaatctccccttcacttggccttggtgatctgacatcaggtctgacactctatgggggtgtgtgtgaccctcctgtcccacccccttttcctggcctcttgc

SEQ ID NO: 42967 - DNA, 120 bp, Artificial Sequence
  ENSG00000062282_27 (sequence is synthesized)
cagtaatcatgtaatgaagatctgccgctgtacccacccgcccacctactcccttcctggtgggactctggtctttgctgccagaacagctcatctggcccagagtgtatcccttctgtt

SEQ ID NO: 42968 - DNA, 120 bp, Artificial Sequence
  ENSG00000062282_28 (sequence is synthesized)
ggcacaggtggggttcttgtgttagcaacagccaccgagaccaccagccacctggaagaggagcagacagtgccccacatcacctctccccaaagtgtaggcagaatccttggagaggag

SEQ ID NO: 42969 - DNA, 120 bp, Artificial Sequence
  ENSG00000062282_29 (sequence is synthesized)
actaggaaacactctctctaagcttagaatcacctgtccatctgcctcatttcactgataggcttactgaggcacagagaggagggactatcccaaggtcacaaagcttaagtagtagca

SEQ ID NO: 42970 - DNA, 120 bp, Artificial Sequence
  ENSG00000062282_30 (sequence is synthesized)
ggactagtgtaggaaccagggctgtctgctttggggcccatggtcttactcctgtgttactttcaccatcaccatgccgtgctgtgtaaacttaagcaagcctttgctcttctgtgggtc

SEQ ID NO: 42971 - DNA, 120 bp, Artificial Sequence
  ENSG00000062282_31 (sequence is synthesized)
tgaattttttcctctatgcactgctgtggtgggacaagcctatctgagcaccttgcctctcctgggagggagggtataaagagtgacttgataggaatgtgtcccagactgacattagcg

SEQ ID NO: 42972 - DNA, 120 bp, Artificial Sequence
  ENSG00000062282_32 (sequence is synthesized)
agcaggccgggcctgggcatcgtgttgggctgggactttgccacgggaaacaggcagcaagaggacacaagagcaggcatgtcaacagaaccttcattggcggtatccttcccctccttc

SEQ ID NO: 42973 - DNA, 120 bp, Artificial Sequence
  ENSG00000062282_33 (sequence is synthesized)
cagaacggacattctctccagccctgggggaggggagtgtgacatgaaaacagatcagagctggtcagatgcctacattcttctgggtcctacagcaagggcattgacttgcactgtgtc

SEQ ID NO: 42974 - DNA, 120 bp, Artificial Sequence
  ENSG00000062282_34 (sequence is synthesized)
ccaaggcacctcattcaaccaaatgtcccatcagagccttggggagggaggaaatgatttaaagagccacctggggcccactgggtgacacatcttcatccagcagcccagggaaaagtg

SEQ ID NO: 42975 - DNA, 120 bp, Artificial Sequence
  ENSG00000062282_35 (sequence is synthesized)
cagcgactggcctgctccagatgtgcaggataatttgctgtgacctccacaggggaattgcagctcccttttctaggcctcagcttccccccgtcatccaaggaatggcttagacctttc

SEQ ID NO: 42976 - DNA, 120 bp, Artificial Sequence
  ENSG00000062282_36 (sequence is synthesized)
agggctctgccagcccatgcagtgctgtgggttcctggttatcggcccagtgggaaggtcgggggagccataggaaggggacaaaaagatgctgcacggcgtgatggtcacctgccaggg

SEQ ID NO: 42977 - DNA, 120 bp, Artificial Sequence
  ENSG00000062282_37 (sequence is synthesized)
taactatcccaggcctggccatcagctcaggagcaagtttccaagtttcccacctggtattggctgccccagctcttccctcaatgcctgcctgcctttttcatcaaaactagcacaagg

SEQ ID NO: 42978 - DNA, 120 bp, Artificial Sequence
  ENSG00000062282_38 (sequence is synthesized)
aactttttaattccagcttcactgagagctaacttggtgggcagacctgcttgttaggcaaaacattggaacagcaatcttaacagagctcatgtaaacgagattttgagatctgctcgc

SEQ ID NO: 42979 - DNA, 120 bp, Artificial Sequence
  ENSG00000062282_39 (sequence is synthesized)
tgccccgagccccactagctatggattagactgctgctgtttcccatttatttggggagtagctgagagttggtttggtttttgagcaactttaatctgtttgccaagggcaaagcggga

SEQ ID NO: 42980 - DNA, 120 bp, Artificial Sequence
  ENSG00000062282_40 (sequence is synthesized)
gaaagagcatcagtgccccaagcagtggggatgagagtgagggagtcttgctcacatttgcacagactggcagcgtcagagctgggagtggtgccagccagccttttccatcccctctgt

SEQ ID NO: 42981 - DNA, 120 bp, Artificial Sequence
  ENSG00000062282_41 (sequence is synthesized)
cacctgaagatttgcatttcaattttccaaggccagccaccagcaccctctcccccagagctgcacacaagtccttcagctctgccaggaggctcccaaatctggagtcacagaaaacct

SEQ ID NO: 42982 - DNA, 120 bp, Artificial Sequence
  ENSG00000062282_42 (sequence is synthesized)
gggctcttgacattctgctggtggccagtgactctgcttccagctggcaccagtgcagggaaggggcactttgcagcactcaggtgggagtgtcattgatgtcacctcttttgaggcagg

SEQ ID NO: 42983 - DNA, 120 bp, Artificial Sequence
  ENSG00000062282_43 (sequence is synthesized)
gcagccaaaaagaccaacgtgttcattccttgttatccaggaattgtatttctagaagtttgtttcacaaaagcaatcagatatgtggacaaagataaggtatttattgaagcattactt

SEQ ID NO: 42984 - DNA, 120 bp, Artificial Sequence
  ENSG00000062282_44 (sequence is synthesized)
ctaagagggaaattttggaagcttttaaaatgtccatcaatcagggtttgagtcagtgctgttacatgcatgagagctgtgctgtagaatacaaatgcagccacgagaagatatggaact

SEQ ID NO: 42985 - DNA, 120 bp, Artificial Sequence
  ENSG00000062282_45 (sequence is synthesized)
gagggattttgataaggacagatagctgtatgtttggtagaaaatgatataaaaatgatatcaacccatataacctcaattttgtgggttttgaaaaagagcatgtatatttttgagtag

SEQ ID NO: 42986 - DNA, 120 bp, Artificial Sequence
  ENSG00000062282_46 (sequence is synthesized)
aaaaaggactcaatgcgtcagatggttttatctggatggaaatattatggattttttaaattttctttttgctttcctatatttttaaaattctctaggagtttctcttcttttccctct

SEQ ID NO: 42987 - DNA, 120 bp, Artificial Sequence
  ENSG00000062282_47 (sequence is synthesized)
cccctcccctcccctcccctccccctcctccgttcctctcccctctcctccgttcctctgccctctcctccgttcctctcccctctcctctcctctcccttctctcctttcttcctttcc

SEQ ID NO: 42988 - DNA, 84 bp, Artificial Sequence
  ENSG00000062282_48 (sequence is synthesized)
cctttcttctcactctgtcactcaggcttgagtgcagtggtgcaatctcggtttactgcagcctctgcctcctgggctcaagcc

SEQ ID NO: 42989 - DNA, 70 bp, Artificial Sequence
  ENSG00000062282_49 (sequence is synthesized)
caggtgcgtgccaccatgcccagttaatttctgtatttttgtagagataatcctcccaccttggcctccc

SEQ ID NO: 42990 - DNA, 120 bp, Artificial Sequence
  ENSG00000062282_50 (sequence is synthesized)
ctattatttttctaatcagaataaaaatgatgtttttatgagcagaatacccttactcattgtctctctcagcctcttccacccccatcacattccttgtaacacagggtaggtgtcaca

SEQ ID NO: 42991 - DNA, 120 bp, Artificial Sequence
  ENSG00000062282_51 (sequence is synthesized)
ggctttgcctctcatgactcagggtttagggacactgcatcacccaccccttcaagcaccagccccagggcaggaggtgggccctgaggaagccaatcatcgtttagagcatcccagtgt

SEQ ID NO: 42992 - DNA, 120 bp, Artificial Sequence
  ENSG00000062282_52 (sequence is synthesized)
ccttagtaccacaggtcaggtcctcagctgctgcagccttacaactaacctctaccccaggctggctggcacagggctgtcgcttgtcctgtcttgtccttcctgccttagaacctgaac

SEQ ID NO: 42993 - DNA, 120 bp, Artificial Sequence
  ENSG00000062282_53 (sequence is synthesized)
tgagcccagctgactgtgggaaagtttccatttgggccagctgcagtgtcccttttccaggccaggggagtaggaggtgggctgcctgtctcattctgtgagctgtggaggagcccacag

SEQ ID NO: 42994 - DNA, 120 bp, Artificial Sequence
  ENSG00000062282_54 (sequence is synthesized)
agcacagggccaagtaaaccctacctccaaggagctcacagtttggagagactgacagtgggggcagagcttgcagccaaggccccggttgccaaactcaggaacttggactttactcac

SEQ ID NO: 42995 - DNA, 120 bp, Artificial Sequence
  ENSG00000062282_55 (sequence is synthesized)
atgaagccagacacactctccagtctaagagtgacaagggttggatttgagttttagaataatcactctggctgttgcgaaaaggatgggcccagagggagggaaggcaggaggctggca

SEQ ID NO: 42996 - DNA, 120 bp, Artificial Sequence
  ENSG00000062282_56 (sequence is synthesized)
gagtgcaaagaagagctgctgtgtgcatggctgaagactgagaggaacaagggcaaacattgcccaccccttcccagagacccacagtgcaaatggtgactgcccaacaccagcactgtg

SEQ ID NO: 42997 - DNA, 120 bp, Artificial Sequence
  ENSG00000062282_57 (sequence is synthesized)
gccctggggatgagagtctgaggtaaggtgtggagattcattgcagccctcaggcccatggaggtccaggggaaatgacacatccaatccctccctaccctccgggtatgccccggtatc

SEQ ID NO: 42998 - DNA, 120 bp, Artificial Sequence
  ENSG00000062282_58 (sequence is synthesized)
caacacaccattccttggtgctgggcctgcattgggagatgcaacctgcttcagacatggtgggtcagggctgaggaggagagctgtccatatggtcttgagaattcaactcggataaca

SEQ ID NO: 42999 - DNA, 120 bp, Artificial Sequence
  ENSG00000062282_59 (sequence is synthesized)
tcttccctaggaggccttctttgacccccttttctggggacccccagcccttgtgttgccttttgtacaacctgattgttgtccatggcactgtaattgtccacctgcctgagacctccc

SEQ ID NO: 43000 - DNA, 120 bp, Artificial Sequence
  ENSG00000062282_60 (sequence is synthesized)
accagactgatgcattgggatccccaacacctcgcaccgacttggcagaattagggccctgggaatgtttgccaaatgcatgagttcccaaaacaaccttgtatcattagctgcatttta

SEQ ID NO: 43001 - DNA, 120 bp, Artificial Sequence
  ENSG00000062282_61 (sequence is synthesized)
cagatgaggaaactgaggctcagaaaaatgaatagcttacacagaaccagacaactccaaaggggctgggctaggtctggggcccaggtccagggttctttatgttttatacctgactgt

SEQ ID NO: 43002 - DNA, 120 bp, Artificial Sequence
  ENSG00000062370_0 (sequence is synthesized)
acttccgccccaggtacgctaggccgcggccttcgttcctcccagaaaggagatggtgacattcaaggatgttgctgtggtcttcactgaggaggagctggggctgctggactctgtcca

SEQ ID NO: 43003 - DNA, 120 bp, Artificial Sequence
  ENSG00000062370_1 (sequence is synthesized)
gaggaagctgtaccgagatgtgatgctggagaacttcaggaacctgctcttagtagcacatcagcccttcaagccagacctaatatcccagctggagagagaagaaaagcttttgatggt

SEQ ID NO: 43004 - DNA, 120 bp, Artificial Sequence
  ENSG00000062370_2 (sequence is synthesized)
ggagacagaaaccccaagagatggatgttcaggaaggaagaatcaacaaaagatggagagtattcaggaagtaacagtaagctacttttcccccaaagagctttcctcccgtcagacctg

SEQ ID NO: 43005 - DNA, 120 bp, Artificial Sequence
  ENSG00000062370_3 (sequence is synthesized)
gcaacaaagtgcaggtgggttaatcaggtgtcaagatttcctgaaagtttttcaagggaagaattctcagttgcaagaacaaggtaattccctcggccaggtttgggcaggaataccagt

SEQ ID NO: 43006 - DNA, 120 bp, Artificial Sequence
  ENSG00000062370_4 (sequence is synthesized)
tcagatttctgaagataagaactatatattcactcatatagggaatggctccaattatataaaaagtcaagggtatccatcttggagggcacatcattcttggaggaaaatgtatctgaa

SEQ ID NO: 43007 - DNA, 120 bp, Artificial Sequence
  ENSG00000062370_5 (sequence is synthesized)
agagtcacataattatcagtgtagatgtcagcaaatttccatgaaaaatcatttctgtaagtgtgacagtgtcagttggctctcacatcacaatgataaactggaagtacacagaaaaga

SEQ ID NO: 43008 - DNA, 120 bp, Artificial Sequence
  ENSG00000062370_6 (sequence is synthesized)
aaactacagctgccatgactgtggagaagatatcatgaaggtatcattacttaatcaggagtcaattcaaacagaggagaagccctatccatgtactgggtatagaaaagccttcagtaa

SEQ ID NO: 43009 - DNA, 120 bp, Artificial Sequence
  ENSG00000062370_7 (sequence is synthesized)
tgactccagctctgaggttcatcagcagttccacttggaagggaagccctatacatacagttcatgtggaaagggctgtaattatagttcacttcttcatattcatcaaaatattgagag

SEQ ID NO: 43010 - DNA, 120 bp, Artificial Sequence
  ENSG00000062370_8 (sequence is synthesized)
agaagatgatattgagaattcacatctgaaatcctatcagagagtgcatacagaggagaaaccatgcaaatgtggtgaatatggtgagaacttcaatcactgttcccctcttaacactta

SEQ ID NO: 43011 - DNA, 120 bp, Artificial Sequence
  ENSG00000062370_9 (sequence is synthesized)
tgaacttatccacacaggtgagatgtcctataggcacaacatttatgagaaagccttcagtcatagcttagaccttaatagtatttttagggtccatactagggatgaaccccatgaata

SEQ ID NO: 43012 - DNA, 120 bp, Artificial Sequence
  ENSG00000062370_10 (sequence is synthesized)
tgaggaaaatgagaatgtctttaatcagagttcatgtcttcaagtccatcaaaaaatccacactgaagagaaactatacacagatatagagtatggaaagagtttcatttgtagttcaaa

SEQ ID NO: 43013 - DNA, 120 bp, Artificial Sequence
  ENSG00000062370_11 (sequence is synthesized)
tcttgacattcagcatagggttcatatggaagagaattcatataattctgaggagtgtggtaatggcttcagtctggcctcacattttcaggaccttcagatagtccacactaaggaaca

SEQ ID NO: 43014 - DNA, 120 bp, Artificial Sequence
  ENSG00000062370_12 (sequence is synthesized)
accatataaacgctatgtgtgtagtaacagcttcagccataatttatatcttcaaggtcatccaaaaattcacattggagagaaaccacgtaaggagcatgggaatggcttcaactggag

SEQ ID NO: 43015 - DNA, 120 bp, Artificial Sequence
  ENSG00000062370_13 (sequence is synthesized)
ctcaaaacttaaagatcatcagagagtccacactggacagaagccatacaaatgcaatatatgcggcaaaggtttcaatcatagatcagttctgaatgttcatcagagagtccacacagg

SEQ ID NO: 43016 - DNA, 120 bp, Artificial Sequence
  ENSG00000062370_14 (sequence is synthesized)
agagaaaccttataaatgcgaggaatgtgataagggattcagtcggagttcatatcttcaagcccatcagagagtccacactggagaaaaaccttataaatgtgaggaatgtgggaaggg

SEQ ID NO: 43017 - DNA, 120 bp, Artificial Sequence
  ENSG00000062370_15 (sequence is synthesized)
accatacaagtgtgaggagtgtgggaagggcttcagtcggagttcacaccttcaaggccatcagagagtccacactggagaaaaaccattcaaatgtgaggaatgtgggaaggggttcag

SEQ ID NO: 43018 - DNA, 120 bp, Artificial Sequence
  ENSG00000062370_16 (sequence is synthesized)
ttggagctttaatcttcaaattcatcagagggttcacacaggagaaaaaccctataaatgtgaagaatgtggtaaaggcttcagtaaggcctcaacacttttggcccatcagagggtcca

SEQ ID NO: 43019 - DNA, 120 bp, Artificial Sequence
  ENSG00000062370_17 (sequence is synthesized)
cacgggagagaagccataccaatgtgatgagtgtggtaagagtttcagtcagagatcataccttcagagtcatcagagtgtccattctggagaaagaccatatatatgtgaggtatgtgg

SEQ ID NO: 43020 - DNA, 120 bp, Artificial Sequence
  ENSG00000062370_18 (sequence is synthesized)
aaagggcttcagtcagagagcatatcttcaaggtcatcagagagtccacactagagtgaaaccgtataaatgtgagatgtgtgggaagggctttagtcagagttcgcgccttgaagcaca

SEQ ID NO: 43021 - DNA, 120 bp, Artificial Sequence
  ENSG00000062370_19 (sequence is synthesized)
tcggagggttcacacaggagggaaaccatacaaatgtgaggtgtgtacaaagggtttcagtgagagttcacgccttcaagcacaccaaagggttcatgtggaagggagaccctataaatg

SEQ ID NO: 43022 - DNA, 120 bp, Artificial Sequence
  ENSG00000062370_20 (sequence is synthesized)
tgaacagtgtggtaagggtttcagtgggtattcaagtcttcaagcccatcacagagtccacacaggagagaaaccatacaaatgtgaggtatgtggaaagggcttcagtcagagatcaaa

SEQ ID NO: 43023 - DNA, 120 bp, Artificial Sequence
  ENSG00000062370_21 (sequence is synthesized)
tcttcaggctcaccagagagtccacacaggagagaaaccatacaaatgtgatgcatgtggtaagggtttccgttggagctcaggtcttctcattcatcaaagagtccatagtagtgataa

SEQ ID NO: 43024 - DNA, 120 bp, Artificial Sequence
  ENSG00000062370_22 (sequence is synthesized)
attctataaaagcgaagactatggtaaggactacccttcatcagagaatctacacagaaatgaagattctgttttgttttgaagtcctcaaatgggagctgaaattttccagtcactaga

SEQ ID NO: 43025 - DNA, 120 bp, Artificial Sequence
  ENSG00000062370_23 (sequence is synthesized)
gttctttcagtagaaaaagaatttttaaaaattaaaatgtaatgttgctgcccaacttcaacattcataatggccaggagaccacacaacagagacatttaatgagaggggtttcacgag

SEQ ID NO: 43026 - DNA, 120 bp, Artificial Sequence
  ENSG00000062370_24 (sequence is synthesized)
ggattttgttagaactttaacatcagtcattgcacaggagctaaggcttataaaatatgagtatggtcaggaatttaataaaagtacagtgatgagcatgcctaaatccatgttctctag

SEQ ID NO: 43027 - DNA, 120 bp, Artificial Sequence
  ENSG00000062370_25 (sequence is synthesized)
aatgtaagcttggtgaaagaagggactttgttcattgctagtctacaaaactaggacatttcataacgcaatgtaggtgctcagtactttttgctaaataactaaaagtatgtaaaggta

SEQ ID NO: 43028 - DNA, 120 bp, Artificial Sequence
  ENSG00000062370_26 (sequence is synthesized)
aaaggtttgaaatttttaagcgcattttttaaaacttaaaatgtatttggaggagaaatcctgcaagtaatcttaataaaatcatttcaagtaaatatttgaaatgtagaacaataagca

SEQ ID NO: 43029 - DNA, 120 bp, Artificial Sequence
  ENSG00000062370_27 (sequence is synthesized)
ttatgatgatctgaaataacattaatttgattgtaaccctattggggttagttcccaccctttgttccatcttgagcagagatgtgctgcatttcttaacgtttggtctctatacattat

SEQ ID NO: 43030 - DNA, 120 bp, Artificial Sequence
  ENSG00000062370_28 (sequence is synthesized)
accatctgctgaagtttagctttgtgtgtgtgtatatgtacccatgtgtgcacttgaaatatcagtacaaactgataaacaatgtttctggttaatgttgcaaaaatggaacactgtatt

SEQ ID NO: 43031 - DNA, 120 bp, Artificial Sequence
  ENSG00000062370_29 (sequence is synthesized)
ttacataattgattttctactcctgccctgtgaattaaggcagagttttactgtaatatttgcaagtatccaaaatggttactgatgacaaatactttttaataaatgtcaaaatcacaa

SEQ ID NO: 43032 - DNA, 120 bp, Artificial Sequence
  ENSG00000062370_30 (sequence is synthesized)
agagccacttccgccccaggtacgctaggccgcggccttcgttcctcccagaaaggtctctgcctttctctagaaaaagaaagagaaaaatgaccaaattccaggagatggtgacattca

SEQ ID NO: 43033 - DNA, 120 bp, Artificial Sequence
  ENSG00000062370_31 (sequence is synthesized)
gaaagtgaggtcatcattcctttcaggaagttgagtgaggcctgagacagcaatgtttcgtttagcctggcggcggccctccttgtcttcgagaagagcatccgcggctagcagtggaag

SEQ ID NO: 43034 - DNA, 120 bp, Artificial Sequence
  ENSG00000062485_0 (sequence is synthesized)
ccttcagccgcctcctttcaaccttgtcaacccgtcggcgcggcctctggtgcagcggcggcggctcctgttcctgccgcagctctctccctttcttacctccccaccagatcccggaga

SEQ ID NO: 43035 - DNA, 120 bp, Artificial Sequence
  ENSG00000062485_1 (sequence is synthesized)
tcgcccgccatggctttacttactgcggccgcccggctcttgggaaccaagaatgcatcttgtcttgttcttgcagcccggcatgccagtgcttcctccacgaatttgaaagacatattg

SEQ ID NO: 43036 - DNA, 120 bp, Artificial Sequence
  ENSG00000062485_2 (sequence is synthesized)
gctgacctgatacctaaggagcaggccagaattaagactttcaggcagcaacatggcaagacggtggtgggccaaatcactgtggacatgatgtatggtggcatgagaggcatgaaggga

SEQ ID NO: 43037 - DNA, 120 bp, Artificial Sequence
  ENSG00000062485_3 (sequence is synthesized)
ttggtctatgaaacatcagttcttgatcctgatgagggcatccgtttccgaggctttagtatccctgaatgccagaaactgctacccaaggctaagggtggggaagaacccctgcctgag

SEQ ID NO: 43038 - DNA, 120 bp, Artificial Sequence
  ENSG00000062485_4 (sequence is synthesized)
ggcttattttggctgctggtaactggacatatcccaacagaggaacaggtatcttggctctcaaaagagtgggcaaagagggcagctctgccttcccatgtggtcaccatgctggacaac

SEQ ID NO: 43039 - DNA, 120 bp, Artificial Sequence
  ENSG00000062485_5 (sequence is synthesized)
tttcccaccaatctacaccccatgtctcagctcagtgcagctgttacagccctcaacagtgaaagtaactttgcccgagcatatgcacagggtatcagccgaaccaagtactgggagttg

SEQ ID NO: 43040 - DNA, 120 bp, Artificial Sequence
  ENSG00000062485_6 (sequence is synthesized)
atttatgaagactctatggatctaatcgcaaagctaccttgtgttgcagcaaagatctaccgaaatctctacagagaaggcagcggtattggggccattgactctaacctggactggtct

SEQ ID NO: 43041 - DNA, 120 bp, Artificial Sequence
  ENSG00000062485_7 (sequence is synthesized)
cacaatttcaccaacatgttaggctatactgatcatcagttcactgagctcacgcgcctgtacctcaccatccacagtgaccatgagggtggcaatgtaagtgcccataccagccatttg

SEQ ID NO: 43042 - DNA, 120 bp, Artificial Sequence
  ENSG00000062485_8 (sequence is synthesized)
gtgggcagtgccctttccgacccttacctgtcctttgcagcagccatgaacgggctggcagggcctctccatggactggcaaatcaggaagtgcttgtctggctaacacagctgcagaag

SEQ ID NO: 43043 - DNA, 120 bp, Artificial Sequence
  ENSG00000062485_9 (sequence is synthesized)
gaagttggcaaagatgtgtcagatgagaagttacgagactacatctggaacacactcaactcaggacgggttgttccaggctatggccatgcagtactaaggaagactgatccgcgatat

SEQ ID NO: 43044 - DNA, 120 bp, Artificial Sequence
  ENSG00000062485_10 (sequence is synthesized)
acctgtcagcgagagtttgctctgaaacacctgcctaatgaccccatgtttaagttggttgctcagctgtacaagattgtgcccaatgtcctcttagagcagggtaaagccaagaatcct

SEQ ID NO: 43045 - DNA, 120 bp, Artificial Sequence
  ENSG00000062485_11 (sequence is synthesized)
tggcccaatgtagatgctcacagtggggtgctgctccagtattatggcatgacggagatgaattactacacggtcctgtttggggtgtcacgagcattgggtgtactggcacagctcatc

SEQ ID NO: 43046 - DNA, 120 bp, Artificial Sequence
  ENSG00000062485_12 (sequence is synthesized)
caagtccatgagcacagagggtctgatgaagtttgtggactctaagtcagggtaaaactggagactgggtgaaagtgactaccagaaagtgaggaagcctaaataaaaagtatacttttg

SEQ ID NO: 43047 - DNA, 120 bp, Artificial Sequence
  ENSG00000062485_13 (sequence is synthesized)
tttcagggggcctttaaagacttaagattaaattatatctgaggcactgataatatgtttgaggttaaaatataaattaagactttaaaagatgaaaaatggtcccttcttccctaatca

SEQ ID NO: 43048 - DNA, 120 bp, Artificial Sequence
  ENSG00000062485_14 (sequence is synthesized)
gctcccttcccctgcctggtatgagttgcccatcatacgcatggtcctggaggatgaccaggactaatgcatgtggtatgagtaggtttggccccctcactatctctagagtgagaatct

SEQ ID NO: 43049 - DNA, 120 bp, Artificial Sequence
  ENSG00000062485_15 (sequence is synthesized)
ggctcctgtttccatgggtcaaagccggttgcagagaatctgtagtcactttggagctttagcttctctgccaagccctcaataagccagcaaaccaggactctgccccttctgtttcca

SEQ ID NO: 43050 - DNA, 120 bp, Artificial Sequence
  ENSG00000062485_16 (sequence is synthesized)
taggaatcatgttggatagtcagctgtaccaagccccttggccctctcccatgcacacaaacacctcctagcaagacctgttggttagctggacatgctttggcaatttttttatactac

SEQ ID NO: 43051 - DNA, 120 bp, Artificial Sequence
  ENSG00000062485_17 (sequence is synthesized)
caagtgaccataaaggcatggcatttgttgtgactggcacccaatgtttgattttttttttaaaactatccaattaaaattaaggtctgggagtgttctgtttcccattactttaatact

SEQ ID NO: 43052 - DNA, 120 bp, Artificial Sequence
  ENSG00000062485_18 (sequence is synthesized)
cacctcctcccagactttctacacctgttgcacctcaggcagaggatgttctggacctccccctcttggtccctactagagacctctcaacagatctgtgggcccagtcattgggtttta

SEQ ID NO: 43053 - DNA, 120 bp, Artificial Sequence
  ENSG00000062485_19 (sequence is synthesized)
tcagtgcttaatgtgaactaagttttttacttccacagaatacaagccactaccttctgacctccccaccccccaccaacccccatcttttaatatgctgtggggcatagaactccggaa

SEQ ID NO: 43054 - DNA, 120 bp, Artificial Sequence
  ENSG00000062485_20 (sequence is synthesized)
tgaccagcatgatattttcagagtcttgtccccggggtattagcacctctttttgaacagggaattgattcaagattggacatggtctcctctgattatcaggtactggggctgagggca

SEQ ID NO: 43055 - DNA, 120 bp, Artificial Sequence
  ENSG00000062485_21 (sequence is synthesized)
ttaaaaatagtaagcctccctcctcgtcccctgcctcaagaaattgcctccttatttatcaacatctttttcctccctttccctgagagctcacagtacaatgtttcagaagccccattt

SEQ ID NO: 43056 - DNA, 120 bp, Artificial Sequence
  ENSG00000062485_22 (sequence is synthesized)
gcacaggttttcagcaactcagaatgctctacttctttttctttgagaaaggattaagatacactcctgctgtgcccccatctttcctccaaactcctgcctgtgtttgtgtggataccc

SEQ ID NO: 43057 - DNA, 120 bp, Artificial Sequence
  ENSG00000062485_23 (sequence is synthesized)
agtcccagaaccacactgttgagttggacacactgtaaacccctgggtaactgtcaagtcatgatggagacttcaggttgttctgtataaaatgcaaaataaatgtttttattaacaatg

SEQ ID NO: 43058 - DNA, 120 bp, Artificial Sequence
  ENSG00000062485_24 (sequence is synthesized)
caggaccatgtgccgcgcttcccttctggctcctgggggtgaagtgcacgccgcccgccctcggcccgcagtccagaacgcgtgaggaggccgaccctgctgtcaccccgcatgtctgaa

SEQ ID NO: 43059 - DNA, 120 bp, Artificial Sequence
  ENSG00000062485_25 (sequence is synthesized)
tgttactattgttattgttatagctgctattattattatattactatttaacaaataatttactcagtggtatagtgagatgggaatatcaatacatttgcctaattcttttaaatgttt

SEQ ID NO: 43060 - DNA, 120 bp, Artificial Sequence
  ENSG00000062485_26 (sequence is synthesized)
taagtagtgtaaaatatacataacataaaatttaccattttaatcatttttaagtatatggtttagtggcagtagatatgtttacattattgtgcaaccatccatctccagaacttttgt

SEQ ID NO: 43061 - DNA, 76 bp, Artificial Sequence
  ENSG00000062485_27 (sequence is synthesized)
tgggaggctgaggcgggtggctatggtggcatgagaggcatgaagggattggtctatgaaacatcagttcttgatc

SEQ ID NO: 43062 - DNA, 120 bp, Artificial Sequence
  ENSG00000062485_28 (sequence is synthesized)
tttacttactgcggccgcccggctcttgggaaccaaggcacccagtggcaagtactagctgagcatttgggagatgcttgtcttacttggctgttgcttctcctgctgctggggaaaagg

SEQ ID NO: 43063 - DNA, 120 bp, Artificial Sequence
  ENSG00000062485_29 (sequence is synthesized)
gagctgacctattgagtgagatgactgcctgattctcctgagagctgctgttccagtaaggtgactctacaggtggcatgcatccagaagccaaaagcccaactgtcacacctccaggat

SEQ ID NO: 43064 - DNA, 120 bp, Artificial Sequence
  ENSG00000062485_30 (sequence is synthesized)
cacaggtaagctagacccagcaaccacagccactaggtgcctcaattggtgggaaatttttttaaaagctcctttatgttctcatcttctgagaacagatgataggcagcaagaagacag

SEQ ID NO: 43065 - DNA, 120 bp, Artificial Sequence
  ENSG00000062485_31 (sequence is synthesized)
aaacgtggcataaaggatgatccaaggcaagaaaggggtctagtaagcaaggtcaggaggcctaaagaaattactgtaaccatgctaagaacaagatggtgcttctggctgggaaaaggt

SEQ ID NO: 43066 - DNA, 120 bp, Artificial Sequence
  ENSG00000062485_32 (sequence is synthesized)
tcgcccgccatggctttacttactgcggccgcccggctcttgggaaccaagctggaaggaattatccattcacctctgcctcaggcttgactgcctctttcctgggatccaactcccagg

SEQ ID NO: 43067 - DNA, 120 bp, Artificial Sequence
  ENSG00000062485_33 (sequence is synthesized)
tttgtaccaaaccctattgttatctgccatgcacaaagtcaattaactcctagtcagagcagggacttccctcacagagcattttgataaagttgactatgagagggttgggggttgggg

SEQ ID NO: 43068 - DNA, 120 bp, Artificial Sequence
  ENSG00000062485_34 (sequence is synthesized)
ttgctctgttttcagaatcccaattgctatacttttctcagtgtcatttctatttaaggttgactgggctaagtccttggagaaaaatggaaaatttagcttttaaggtttctatcacct

SEQ ID NO: 43069 - DNA, 120 bp, Artificial Sequence
  ENSG00000062485_35 (sequence is synthesized)
aggacttgtacatgccactgcctctgccttaaatgaaatatttttctcttctaccttacagtattatggcatgacggagatgaattactacacggtcctgtttggggtgtcacgagcatt

SEQ ID NO: 43070 - DNA, 120 bp, Artificial Sequence
  ENSG00000062485_36 (sequence is synthesized)
atcagcagagttctgctgtataaatggattgggttgacctctcttgggttttctttactcagatgttgctgtccttttttatttttctccttccttgtccttgctggtgttctgagcact

SEQ ID NO: 43071 - DNA, 120 bp, Artificial Sequence
  ENSG00000062485_37 (sequence is synthesized)
tgctattaaagctaggttggagtcatggagcagagcatacaggcatcatcaaccagtaacctctccagctctgtggatgagtgaacaaaagctggtaatgagattaggatgctttttttt

SEQ ID NO: 43072 - DNA, 120 bp, Artificial Sequence
  ENSG00000062485_38 (sequence is synthesized)
taggcgtgagccactgtgcctggccaagattaggatgtcttttacaagagtttaggtataactgactggctataggctggcatgagcccataactaggctagtaagtggcaaataagaga

SEQ ID NO: 43073 - DNA, 120 bp, Artificial Sequence
  ENSG00000062485_39 (sequence is synthesized)
ggctagtaagtggcaaataagagaacagcaaagtttccataatctgccccttctttcttcccttggctctcccttcttacttccccacagtgaccatgagggtggcaatgtaagtgccca

SEQ ID NO: 43074 - DNA, 120 bp, Artificial Sequence
  ENSG00000062485_40 (sequence is synthesized)
caagttctgcaatttggaagaattaagaaaagaatgaaagaggtccctaaattagagatttttttttcttcatttatctaccttgaagaatttagaaaagaatttctaggtgggcacaat

SEQ ID NO: 43075 - DNA, 120 bp, Artificial Sequence
  ENSG00000062485_41 (sequence is synthesized)
aagaggattgcttgaggccaggagtttaaggctgcagtgtgctaagatcactcctgtgaatagccactacactccagccaggacaacacagcaagaccccattctctaaaaaacagtttt

SEQ ID NO: 43076 - DNA, 120 bp, Artificial Sequence
  ENSG00000062485_42 (sequence is synthesized)
ggacaacacagcaagaccccattctctaaaaaacagttttaaataggttgagtgtggtggctcacgcttataatcttagcactttgggagtccagggtggatggatctcgtgagcccagg

SEQ ID NO: 43077 - DNA, 120 bp, Artificial Sequence
  ENSG00000062485_43 (sequence is synthesized)
agtttgagaccagcctgagcaacacagaccctatcttttttttttttttttttttaaagacagtcttgctcttgttgcccaggctagaatgcagtggcgcaacctcagttcactgcaacc

SEQ ID NO: 43078 - DNA, 120 bp, Artificial Sequence
  ENSG00000062485_44 (sequence is synthesized)
agccctgcgtgaagctacaggaccatgtgccgcgcttcccttctggctcctgggggtgaagtgcacgccgcccgccctcggcccgcagtccagaacgcaatgcatcttgtcttgttcttg

SEQ ID NO: 43079 - DNA, 120 bp, Artificial Sequence
  ENSG00000062524_0 (sequence is synthesized)
agcacacccctgtaagtggtggccagggctgccgtggcaaaatgagctgtcaactttaggttgacaggggtgtggccgcgaccgcaagggcttttgttgccgggtggacccaacagggat

SEQ ID NO: 43080 - DNA, 120 bp, Artificial Sequence
  ENSG00000062524_1 (sequence is synthesized)
gggctgctggggacagctgctggtgtggttcggagccgcgggcgccattctctgctctagcccggggtcccaggagacttttctgcggtcctcgcccctgccgctggcaagtcccagccc

SEQ ID NO: 43081 - DNA, 120 bp, Artificial Sequence
  ENSG00000062524_2 (sequence is synthesized)
ccgggacccgaaagtcagcgccccgcctagtatcttggagccagcctccccgctgaattctccgggcaccgaggggtcttggctgttttctacctgcggggccagcggccggcatgggcc

SEQ ID NO: 43082 - DNA, 120 bp, Artificial Sequence
  ENSG00000062524_3 (sequence is synthesized)
cacacagacacaatgtgacggggcgtacgcggggaccagcgtggtggtgaccgtgggggccgccgggcagctgagaggcgtgcagctgtggcgcgtgccgggccctggccagtatctgat

SEQ ID NO: 43083 - DNA, 120 bp, Artificial Sequence
  ENSG00000062524_4 (sequence is synthesized)
ctcagcctacggagccgcgggcggcaaaggcgccaagaaccacctgtcgcgggcgcatggcgtcttcgtctcagcaatcttctccctcggtctcggggagtcgctgtacatcctggtggg

SEQ ID NO: 43084 - DNA, 120 bp, Artificial Sequence
  ENSG00000062524_5 (sequence is synthesized)
gcagcagggagaggacgcctgtcccggaggtagcccggagagccagctcgtctgcctcggggagtctcgagccgttgaagagcacgcggcgatggatgggagcgaaggggtcccggggtc

SEQ ID NO: 43085 - DNA, 120 bp, Artificial Sequence
  ENSG00000062524_6 (sequence is synthesized)
gcggcgctgggcgggaggtggcgggggtggcgggggcgccacctacgttttccgggtgcgcgctggcgagctggaaccgttgctggtggcggccggaggcggcggtcgggcctacctgag

SEQ ID NO: 43086 - DNA, 120 bp, Artificial Sequence
  ENSG00000062524_7 (sequence is synthesized)
tgaggccgcgggaccgaggccggactcaggcctcccccgagaaactggagaaccgctcggaggcgcccgggagcggcgggagaggcggggcggcaggtggtgggggcggctggacgtcgc

SEQ ID NO: 43087 - DNA, 80 bp, Artificial Sequence
  ENSG00000062524_8 (sequence is synthesized)
tccctctccgcaggccggccgctcactgcaggagggggcggagggcggccagggctgctccgaggcttgggcgacccttg

SEQ ID NO: 43088 - DNA, 120 bp, Artificial Sequence
  ENSG00000062524_9 (sequence is synthesized)
ctgcactgcgggcggaggcggcggcggctacagggggggcgacgcttcagagactgacaacctctgggctgatggggaagatggagtatccttcatacaccccagcagcgagctcttcct

SEQ ID NO: 43089 - DNA, 120 bp, Artificial Sequence
  ENSG00000062524_10 (sequence is synthesized)
gcagcctctggcagtcaccgagaaccacggagaggtagagatccgaaggcacctcaactgcagtcactgccctttgagagactgccaatggcaggcagagctccagctggctgaatgcct

SEQ ID NO: 43090 - DNA, 120 bp, Artificial Sequence
  ENSG00000062524_11 (sequence is synthesized)
gtgcccagaaggcatggagctagctgtggataacgtcacctgcatggacctgcacaagcccccaggccctctggttctgatggtggctgtggtggcaacctcaacactgagcctccttat

SEQ ID NO: 43091 - DNA, 120 bp, Artificial Sequence
  ENSG00000062524_12 (sequence is synthesized)
tgagcttgagctgagcaagcttcgaacctctgccatcaggacagcccccaatccctattattgccaggtggggcttggcccggcccagtcctggcctctgccaccaggtgtcaccgaggt

SEQ ID NO: 43092 - DNA, 120 bp, Artificial Sequence
  ENSG00000062524_13 (sequence is synthesized)
ttccccagccaatgttactctgctcagagccctgggccatggtgcctttggggaggtgtatgagggactggtaattggccttcctggggactccagtcccctgcaggtagctatcaagac

SEQ ID NO: 43093 - DNA, 120 bp, Artificial Sequence
  ENSG00000062524_14 (sequence is synthesized)
cctgccagaactctgctcgcctcaggatgagctggatttcctcatggaggccctcatcatcagcaagtttcgccatcagaacattgtgcggtgtgtggggctcagcctcagggccacccc

SEQ ID NO: 43094 - DNA, 120 bp, Artificial Sequence
  ENSG00000062524_15 (sequence is synthesized)
tcgcctcattctgctggaactgatgtctggaggggacatgaagagtttcctgaggcacagtcggccacacctgggccagccatcacctctggtcatgcgggacctgctgcaactggccca

SEQ ID NO: 43095 - DNA, 120 bp, Artificial Sequence
  ENSG00000062524_16 (sequence is synthesized)
ggacatagcccagggctgccactacctggaggaaaatcacttcatccacagggatattgccgcccggaactgcctgctgagctgcgctggacccagccgagtggccaagattggggactt

SEQ ID NO: 43096 - DNA, 120 bp, Artificial Sequence
  ENSG00000062524_17 (sequence is synthesized)
tgggatggcacgagatatctaccgggccagttattaccgcaggggggaccgggccttgctcccagtcaagtggatgcccccagaggccttcctggagggcatcttcacatccaagacaga

SEQ ID NO: 43097 - DNA, 120 bp, Artificial Sequence
  ENSG00000062524_18 (sequence is synthesized)
ttcctggtcttttggggtgctgctctgggagatcttctcactgggctacatgccctatcctgggcgcaccaaccaggaggtgctggacttcgtcgttggaggaggccggatggaccctcc

SEQ ID NO: 43098 - DNA, 120 bp, Artificial Sequence
  ENSG00000062524_19 (sequence is synthesized)
taggggctgcccagggcctgtgtaccgcatcatgacccagtgttggcagcacgagcctgagctccgccctagctttgccagcatcttggagcgtctgcagtactgcactcaggacccgga

SEQ ID NO: 43099 - DNA, 120 bp, Artificial Sequence
  ENSG00000062524_20 (sequence is synthesized)
tgtgctgaattcactcctgccaatggagctggggcccaccccagaggaggaagggacttctgggctggggaacagatctttggagtgcctaagacccccacagccccaggaactgagtcc

SEQ ID NO: 43100 - DNA, 120 bp, Artificial Sequence
  ENSG00000062524_21 (sequence is synthesized)
agagaagttgaaaagctggggaggtagccctcttggcccctggctgtcctctggcctcaagcccctcaaatccaggggcctccaacctcagaacctttggaatcccacttatcgctcctg

SEQ ID NO: 43101 - DNA, 120 bp, Artificial Sequence
  ENSG00000062524_22 (sequence is synthesized)
agccccaaggggccctgagggtaaggactgaggcactgagggtccctccctatactcctcaggctcctgggtggcctgttatgccagcggcctctgttccctgcagtctgtgctgtgtgt

SEQ ID NO: 43102 - DNA, 120 bp, Artificial Sequence
  ENSG00000062524_23 (sequence is synthesized)
ctgggcctgtctcggggctggcctggcagcgctgcacttgccatgctggaaaccagcccaggcctcccagggaagggcccagccacttccagcttttgatcttggggccagaggccgcct

SEQ ID NO: 43103 - DNA, 120 bp, Artificial Sequence
  ENSG00000062524_24 (sequence is synthesized)
tacacacaccccaggtgtccatggggagcactggattgctctcccattatgagcatccttcatctgggcagaccccccaccctgcagatgcttctaataaaaagctcttctcatcctcca

SEQ ID NO: 43104 - DNA, 120 bp, Artificial Sequence
  ENSG00000062524_25 (sequence is synthesized)
ttctgcggggtcccggggctgacttcaagaccactcaccgcagcagagccgtggtagactcctctgggattctaagataggaaggagctggggaggcctggggaaaacgtttaccttaat

SEQ ID NO: 43105 - DNA, 120 bp, Artificial Sequence
  ENSG00000062582_0 (sequence is synthesized)
cccgcgctccgcttggcccaagatggcggcctccgtgtgcagcgggttgctggggccacgggtgctgtcctggagccgagagctgccttgcgcttggcgcgccctgcacacctccccggt

SEQ ID NO: 43106 - DNA, 120 bp, Artificial Sequence
  ENSG00000062582_1 (sequence is synthesized)
ctgcgccaagaaccgggcggcccgagtacgcgtaagcaagggggacaagccggtgacctacgaggaggcacacgcgccgcactacatcgcccaccgtaaaggctggctgtcgctgcacac

SEQ ID NO: 43107 - DNA, 120 bp, Artificial Sequence
  ENSG00000062582_2 (sequence is synthesized)
atgtggggtaccttcccaggctgcctggctgaccagctggttttaaagcgccggggtaaccagttggagatctgtgccgtggtcctgaggcagttgtctccacacaagtactacttcctc

SEQ ID NO: 43108 - DNA, 120 bp, Artificial Sequence
  ENSG00000062582_3 (sequence is synthesized)
gtgggctacagtgaaactttgctgtcctacttttacaaatgtcctgtgcgactccacctccaaactgtgccctcaaaggttgtgtataagtacctctagaacaatccccttttttccatc

SEQ ID NO: 43109 - DNA, 120 bp, Artificial Sequence
  ENSG00000062582_4 (sequence is synthesized)
aagctgtagcctgcagagaatggaaacgtgggaaaggaatggtatgtgggggaaatgcatcccctcagaggactgaggcatagtctctcatctgctattgaataaagaccttctatcttg

SEQ ID NO: 43110 - DNA, 120 bp, Artificial Sequence
  ENSG00000062582_5 (sequence is synthesized)
gcttggcccaagatggcggcctccgtgtgcagcgggttgctggggccacgggtgagtggggcgactcggcaggtccctgcgagtcggaggtggggtccctagtttccgcctcacgcgccc

SEQ ID NO: 43111 - DNA, 120 bp, Artificial Sequence
  ENSG00000062582_6 (sequence is synthesized)
gtaaacaaaatgaacacgtgtcacaggttttctttaactcaggaaataatgctagggtcagaaatctatgaaaccaactcaagggagacataaaaaagcagagatatatatagatcagga

SEQ ID NO: 43112 - DNA, 120 bp, Artificial Sequence
  ENSG00000062582_7 (sequence is synthesized)
tgttgaaacaaatttgaagatggatgcaaaactgactttttccatggcaggcagggactcaattgatcctccactgaacagaaattatttgcatgtctacagacaagaattattttgcat

SEQ ID NO: 43113 - DNA, 120 bp, Artificial Sequence
  ENSG00000062582_8 (sequence is synthesized)
tcctgtcagttatctgtaatttacagagctgtaaaatagctcagagtcaaggaaaggagtgaaaccgttgcagaatctgataaccctgaacagtgtgctctaaggaatgcagttttccac

SEQ ID NO: 43114 - DNA, 120 bp, Artificial Sequence
  ENSG00000062582_9 (sequence is synthesized)
taaagcacaaatttttctctgtaaatatatacagacaaccctcgttattcatgaattccatattttcagattcttctactgactaaaatttatttgtaagccccaaatcaacactctggg

SEQ ID NO: 43115 - DNA, 120 bp, Artificial Sequence
  ENSG00000062582_10 (sequence is synthesized)
gcatgtcccgagctgaggtcgacaaggctctgcctagtttcagctctcgtactgtaaaaggtgtcctttttatggtctagaatcttttttttttaatttgcattttcgtgctttttgtta

SEQ ID NO: 43116 - DNA, 120 bp, Artificial Sequence
  ENSG00000062582_11 (sequence is synthesized)
gtgattttgctgtttaaaatggccttgcaatgctgaagtgctatctagtgttcctaagcgggagaaggctgtgacgtgccttagggagaacatacatgtattagagaatctttcttcagt

SEQ ID NO: 43117 - DNA, 120 bp, Artificial Sequence
  ENSG00000062582_12 (sequence is synthesized)
catgagttgctcttggccctgaattcaatgttagtgaatctaccatatatattaaacaaggtgtctttaaacagaaacacaaaggaaactaggttatgtattgatttgttaacaaaaata

SEQ ID NO: 43118 - DNA, 120 bp, Artificial Sequence
  ENSG00000062582_13 (sequence is synthesized)
cggtgcccagaggctgaaaggaatctaaccctgtatttcacctaggagcaatggttcagtattcactaagtcagtgttggcagtgactttatagaatataactattgtgaacaattgata

SEQ ID NO: 43119 - DNA, 120 bp, Artificial Sequence
  ENSG00000062582_14 (sequence is synthesized)
gaacaattgataaccaactgtgctttgtttagtacaggggttcttggatgtttgagatgcatctagagaacttacttaaaatacagatgcttgcctggcacggtggctcacgcctgtaat

SEQ ID NO: 43120 - DNA, 120 bp, Artificial Sequence
  ENSG00000062582_15 (sequence is synthesized)
aggacctggggaaacgcttggctcctcttcgagccccgagggtgcaggttgggcagggcgggctccggtgggccgcacacccatcacccgtactagcgtgaggttgtcgaagagaaaatc

SEQ ID NO: 43121 - DNA, 120 bp, Artificial Sequence
  ENSG00000062582_16 (sequence is synthesized)
tcacgtttcgcatcctcaaatttccggatctgaaaccctatgcaagcagcaaccgcgggagagcgaacagcggcgggatgagcattcacaaggctgagcattcacagggctgcggggaag

SEQ ID NO: 43122 - DNA, 120 bp, Artificial Sequence
  ENSG00000062582_17 (sequence is synthesized)
gcgggagtaacagctagcagcataccgcggccccgccccgcagaggccctgccccgcccccgccagagtacagagtacgagctccgacttggtctcgtccgcggtcgtccccacccctca

SEQ ID NO: 43123 - DNA, 120 bp, Artificial Sequence
  ENSG00000062598_0 (sequence is synthesized)
gggcggaggctggaggagccgccgagcggagacccgggagcaggagctgggcctaggtctgcgccctggagggaggtgtagaaagaggtacatggagaacaagtttgtcaatccgtctga

SEQ ID NO: 43124 - DNA, 120 bp, Artificial Sequence
  ENSG00000062598_1 (sequence is synthesized)
acttcagttgccttacctgtaaggcagccgtgtctgtgtttttgtctcgcagaattagagcccattgggaacgatgccaccaccgtcagacattgtcaaagtggccattgagtggccagg

SEQ ID NO: 43125 - DNA, 120 bp, Artificial Sequence
  ENSG00000062598_2 (sequence is synthesized)
tgctaacgcccagctccttgaaatcgaccagaaacggcccctggcatccattatcaaggaagtttgtgatgggtggtcgttgccaaacccagagtattataccctccgttatgcagatgg

SEQ ID NO: 43126 - DNA, 120 bp, Artificial Sequence
  ENSG00000062598_3 (sequence is synthesized)
tcctcagctgtacatcaccgaacagactcgcagtgacattaagaatgggacaatcttacaactggctatctccccgtcccgggctgcacgccagctgatggagaggacccagtcatccaa

SEQ ID NO: 43127 - DNA, 120 bp, Artificial Sequence
  ENSG00000062598_4 (sequence is synthesized)
catggagacccggctggatgccatgaaggagctggccaagctctctgccgacgtgactttcgctactgagttcatcaacatggatggcatcattgtgctgacaaggctcgtggaaagtgg

SEQ ID NO: 43128 - DNA, 120 bp, Artificial Sequence
  ENSG00000062598_5 (sequence is synthesized)
aaccaagctcttgtcccactacagtgagatgctggcattcaccctgactgccttcctagagctcatggaccatggcattgtctcctgggacatggtttcaatcacctttattaagcagat

SEQ ID NO: 43129 - DNA, 120 bp, Artificial Sequence
  ENSG00000062598_6 (sequence is synthesized)
tgcagggtatgtgagccagcccatggtggacgtgtcaatccttcagaggtccctggccatcctggagagcatggtcttgaacagccagagtctgtaccagaagatagccgaggaaatcac

SEQ ID NO: 43130 - DNA, 120 bp, Artificial Sequence
  ENSG00000062598_7 (sequence is synthesized)
cgtgggacagctcatctcacacctccaggtctccaaccaggagattcagacctacgccattgcactgattaatgcactttttctgaaggctcctgaggacaaacgacaggatatggcaaa

SEQ ID NO: 43131 - DNA, 120 bp, Artificial Sequence
  ENSG00000062598_8 (sequence is synthesized)
tgcatttgcacagaagcatctccggtctataatcctgaatcatgtgatccgagggaaccgccccatcaaaactgagatggcccatcagctatatgtccttcaagtcctaacctttaacct

SEQ ID NO: 43132 - DNA, 120 bp, Artificial Sequence
  ENSG00000062598_9 (sequence is synthesized)
tctggaagaaaggatgatgaccaagatggaccccaatgaccaggctcaaagggacatcatatttgaactgaggaggattgcatttgacgcagagtctgatcctagcaatgcccctgggag

SEQ ID NO: 43133 - DNA, 120 bp, Artificial Sequence
  ENSG00000062598_10 (sequence is synthesized)
tgggaccgaaaaacgcaaagccatgtacacaaaggactacaaaatgctgggatttaccaaccacatcaatccagccatggactttacccagactcctcctggaatgctggccttggacaa

SEQ ID NO: 43134 - DNA, 120 bp, Artificial Sequence
  ENSG00000062598_11 (sequence is synthesized)
catgctgtacttggctaaagtccaccaggacacctacatccggattgtcttggagaacagtagccgggaagacaaacatgaatgcccctttggccgcagtgccattgagctcaccaaaat

SEQ ID NO: 43135 - DNA, 120 bp, Artificial Sequence
  ENSG00000062598_12 (sequence is synthesized)
gctctgtgaaatcctgcaggttggggaactaccaaatgaaggacgcaatgactaccacccgatgttctttacccatgaccgagcctttgaagagctctttggaatctgcatccagctgtt

SEQ ID NO: 43136 - DNA, 120 bp, Artificial Sequence
  ENSG00000062598_13 (sequence is synthesized)
gaacaagacctggaaggagatgagggcaacagcagaggacttcaacaaggttatgcaagtcgtccgagagcaaatcactcgagctttgccctccaaacccaactctttggatcagttcaa

SEQ ID NO: 43137 - DNA, 120 bp, Artificial Sequence
  ENSG00000062598_14 (sequence is synthesized)
gagcaaattgcgtagcctgagttactctgagattctacgactgcgccagtctgagaggatgagtcaggatgacttccagtccccgccaattgtggagctgagggagaagatccagcccga

SEQ ID NO: 43138 - DNA, 120 bp, Artificial Sequence
  ENSG00000062598_15 (sequence is synthesized)
tgggaaccgccgaaggcaagaacggttctggtactgccggttggcactgaaccacaaggtccttcactatggtgacttggatgacaacccacaaggggaggtgacatttgaatccctgca

SEQ ID NO: 43139 - DNA, 120 bp, Artificial Sequence
  ENSG00000062598_16 (sequence is synthesized)
ggagaaaattcctgttgcagacattaaggccattgtcactgggaaagattgtccccacatgaaagagaaaagtgctctgaaacagaacaaggaggtgttggaattggccttctccatcct

SEQ ID NO: 43140 - DNA, 120 bp, Artificial Sequence
  ENSG00000062598_17 (sequence is synthesized)
gtatgaccctgatgagaccttaaacttcatcgcacctaataaatatgagtactgcatctggattgatggcctcagtgcccttctggggaaggacatgtccagtgagctgaccaagagtga

SEQ ID NO: 43141 - DNA, 120 bp, Artificial Sequence
  ENSG00000062598_18 (sequence is synthesized)
cctggacaccctgctgagcatggagatgaagctgcggctcctggacctggagaacatccagattcccgaagccccaccccccatccccaaggagcccagcagctatgactttgtctatca

SEQ ID NO: 43142 - DNA, 120 bp, Artificial Sequence
  ENSG00000062598_19 (sequence is synthesized)
ctatggctgagcctggagccagaaacgacggtacccaggagaagggattttgggcccaggagaaacacttacattctggtgccttgtcttttgcttgtacagaatctgtagtgattttgg

SEQ ID NO: 43143 - DNA, 120 bp, Artificial Sequence
  ENSG00000062598_20 (sequence is synthesized)
tggccagtaaatgccagccatttctcaaacccacctcggaccacccagagtttcctcttggtccctgtctactaagagtcatgaaggcagggtgctctgcccactccatcaccatgaagc

SEQ ID NO: 43144 - DNA, 120 bp, Artificial Sequence
  ENSG00000062598_21 (sequence is synthesized)
ctgggattgggccacgaggaacaaacagcagatgcccttgccttccagtccaagaaactgcttcttgaaatggatttaacaacagccactcaccttttcctcctgagcctgctctctgat

SEQ ID NO: 43145 - DNA, 120 bp, Artificial Sequence
  ENSG00000062598_22 (sequence is synthesized)
cagctggatccccacgtgagcaacagctggcccaggaaaggctgcctgcagaggacaggtgtgttgggcgtgttgagagccttgaagtgactacctgtatcttagatctgagtacaagcc

SEQ ID NO: 43146 - DNA, 120 bp, Artificial Sequence
  ENSG00000062598_23 (sequence is synthesized)
tgaggcttttgcttttgtcttttttgatgagggctcactccagcttcatatggtgccaagacgttgctgcttctgaggttggctctaacatctctggtctttagagccaccagatctctc

SEQ ID NO: 43147 - DNA, 120 bp, Artificial Sequence
  ENSG00000062598_24 (sequence is synthesized)
tggcccatacagatatcagagcagacggaaatttctccctgcaagcgctcagtctcatcccagcaagtcaaagacctcctggccaagtcctgccctcttaagtctccaggaacgctgcag

SEQ ID NO: 43148 - DNA, 120 bp, Artificial Sequence
  ENSG00000062598_25 (sequence is synthesized)
ggaaaacccagctgaggcctgggcctagactgtggtgaggtcactagattctactgctcttcccccacattaataccttttccttcctcagagagaaatctcccctaacctgaattgcag

SEQ ID NO: 43149 - DNA, 120 bp, Artificial Sequence
  ENSG00000062598_26 (sequence is synthesized)
ccccctccagtttgctttcctttggccttccagaccccaggaagttggccttcccttcctagtgctatggtttctgccattggccatgatttcagggagctggctgaggccggctgaggc

SEQ ID NO: 43150 - DNA, 120 bp, Artificial Sequence
  ENSG00000062598_27 (sequence is synthesized)
cacacctgtgccagtggggcttccctggtgctgcagcacttgtaaaccacacacacagcctctctccctggacatacgttagcacattggcattcagtattggtggcctggcatggtagg

SEQ ID NO: 43151 - DNA, 120 bp, Artificial Sequence
  ENSG00000062598_28 (sequence is synthesized)
tactacccaatgaagagtgtactatatattttcattactataggccatacttatacagacgtgtatatatatttatataagatctacctatcttaggatggaaccttggggaaaaataaa

SEQ ID NO: 43152 - DNA, 120 bp, Artificial Sequence
  ENSG00000062598_29 (sequence is synthesized)
attgaggggaagtaaaaagtatgtaacacttccagttgtgagccaagattgtaaccagagagcagccaggagcttcctgtcagtaaccatgttttcaataaatactctttcatgtacaaa

SEQ ID NO: 43153 - DNA, 120 bp, Artificial Sequence
  ENSG00000062598_30 (sequence is synthesized)
tcccaagaaggcggggcgggcggaggctggaggagccgccgagcggagacccgggagcaggagctgggcctaggtctgcgccctgaattagagcccattgggaacgatgccaccaccgtc

SEQ ID NO: 43154 - DNA, 120 bp, Artificial Sequence
  ENSG00000062598_31 (sequence is synthesized)
gaccatcacacgacagcctttgacagctggctggcacctggagaatccctgagctggaaaagcagcttggtctgcagaactgagtcacaagactgaggcactggggagcctcagccccat

SEQ ID NO: 43155 - DNA, 120 bp, Artificial Sequence
  ENSG00000062598_32 (sequence is synthesized)
acgtacatccatcatggcctcatacatgagaggcatggtgaccaagaagggctcagatcgcttaggaatgaaggttggggtcacaccatcaggagggaggtgtagaaagaggtacatgga

SEQ ID NO: 43156 - DNA, 120 bp, Artificial Sequence
  ENSG00000062598_33 (sequence is synthesized)
aggaagtttgtgatgggtaggttgaaatggacctcgttttcaacagtggcagctccgactgaaagagcactcctacaccttgaggtggtcgttgccaaacccagagtattataccctccg

SEQ ID NO: 43157 - DNA, 120 bp, Artificial Sequence
  ENSG00000062598_34 (sequence is synthesized)
gtagctggcccagtgatacttggagagtgccattggtggtggttttttccaggtgcattcttggcatcttcccctctctattcctgaatgttttattaagaattttgaacatacacaaaa

SEQ ID NO: 43158 - DNA, 120 bp, Artificial Sequence
  ENSG00000062598_35 (sequence is synthesized)
atagatggaacctctgtatacacatcacccagactcagcaaccatggccagttctgcccatccacttgtttctctcctttatcgctttgaagaaagtcccaagtatcacactgtttcatc

SEQ ID NO: 43159 - DNA, 120 bp, Artificial Sequence
  ENSG00000062598_36 (sequence is synthesized)
tgtaaatatttagtgtacatcgtatagtgtataacattgccaccagtccattagcacacataacaggaaatgaaagtagttatttcagatcaaatattccactgatggtgactttctacc

SEQ ID NO: 43160 - DNA, 88 bp, Artificial Sequence
  ENSG00000062598_37 (sequence is synthesized)
tatttcagatcaaatattccactgatggtgactttctaccaattgtcttataaatgtcataatttctctacagatatataaatgttta

SEQ ID NO: 43161 - DNA, 120 bp, Artificial Sequence
  ENSG00000062598_38 (sequence is synthesized)
accagagtctaagactggtcttttaagtttcttaattcataagttcccccgcccccccatcccccaccatcttttcctttgcagtttattagctgaagaaccagattgcttgtttggtag

SEQ ID NO: 43162 - DNA, 120 bp, Artificial Sequence
  ENSG00000062598_39 (sequence is synthesized)
tttcctagcatctgaattttgctgattgtttccccgtggtacagtttaacttgttcctctgtcccagatctgtacattggaagagggatctagaggtttgatccagttcaggtttaactt

SEQ ID NO: 43163 - DNA, 120 bp, Artificial Sequence
  ENSG00000062598_40 (sequence is synthesized)
ttttcctggccagtgtcatcagtggtattatgttctatcaagaggcacataacgtctggtggtctctccttttgtgataattagcagactgttgaagctcagtgcctcattccatcagtc

SEQ ID NO: 43164 - DNA, 120 bp, Artificial Sequence
  ENSG00000062598_41 (sequence is synthesized)
aactaaggtttgcaaactcatgatattttgatgcagtcattgcttttcatttatgagctgaaccatgaaacttgcccttatctactattggtttcccagtggtacagtttatataggaaa

SEQ ID NO: 43165 - DNA, 120 bp, Artificial Sequence
  ENSG00000062598_42 (sequence is synthesized)
aaataatgagttagttccttggtatcatgcaacagtgaccaattttgtgtgtgtgtgtgttttgttttgttttttaattgttaagacattcctatgccaaatacagcacgatagaagttg

SEQ ID NO: 43166 - DNA, 120 bp, Artificial Sequence
  ENSG00000062598_43 (sequence is synthesized)
ttagtcatcttggtaatataaaaacttttaggataacttacagtcatggatcgtgaccttccagggttctgagtgttgaaaatgacttttttccaatcttaaaaatatcacaacatcttt

SEQ ID NO: 43167 - DNA, 120 bp, Artificial Sequence
  ENSG00000062598_44 (sequence is synthesized)
gatgtgacttgggcagggagtgggtaagttaaggttgatttatgctgggcctcatctccagccacacttgtggccgcctaggagcattgatgacattcatctgaatcagcatgtttggtg

SEQ ID NO: 43168 - DNA, 120 bp, Artificial Sequence
  ENSG00000062598_45 (sequence is synthesized)
atgatgccgagtcactaggactttggccaagatcttgatgtgcagaccccaggctgttccatcgctctaatttaaaccctttctccttcaggaggtgttggaattggccttctccatcct

SEQ ID NO: 43169 - DNA, 120 bp, Artificial Sequence
  ENSG00000062598_46 (sequence is synthesized)
gccgtaggccctcatttgtccattgaagttagcacctgtccctcccgtcctccagagaggtcaggaggataagcattagaagactcactgtggtttattgagtgcttactgtgcaggtac

SEQ ID NO: 43170 - DNA, 120 bp, Artificial Sequence
  ENSG00000062598_47 (sequence is synthesized)
tgctgtagttttgtgaactgggaaggttaggagagaagagtggactggcatgatgtgcacaccctgggtacttaatcgatagttatccctcggtgctttcagtcctcactctatgcagag

SEQ ID NO: 43171 - DNA, 120 bp, Artificial Sequence
  ENSG00000062598_48 (sequence is synthesized)
cactgttgtgccaggccctcaaaagctgatcatctaggggtcgagtgttttgaagttgatcatctcatcataaaaaatttggaaagtataaagaataaaaagttacctgtatttacacca

SEQ ID NO: 43172 - DNA, 120 bp, Artificial Sequence
  ENSG00000062598_49 (sequence is synthesized)
gctgtagccgctagccacggtgactactaagcacttaaaatgtggctggtgcaactaaggaaccaaattttcaacttaaatttgttttaactgatttaaatgcaaatagctgcatatggc

SEQ ID NO: 43173 - DNA, 120 bp, Artificial Sequence
  ENSG00000062598_50 (sequence is synthesized)
tagtggctgctatactggacagcacagccctagagacagagctactgagtagggaaattgaaggacatagtggtggtacatgtggaaaatggaggagagcctcatttgggcaagaaagaa

SEQ ID NO: 43174 - DNA, 120 bp, Artificial Sequence
  ENSG00000062598_51 (sequence is synthesized)
gaggacacacagaggaaccttatcaataggtaaatacctcttgaactgaatagctttttcccgcgatcctctgtgagcagagttgcctctaggcagccatctcaccagcaattgcagtgc

SEQ ID NO: 43175 - DNA, 120 bp, Artificial Sequence
  ENSG00000062598_52 (sequence is synthesized)
gtccagggagggaccaaggccagctctactgtttgttgccctgcaactccagaatttttatccagagggaatatgttaaaataggcacaaagggggaaaataactcatccaactgacact

SEQ ID NO: 43176 - DNA, 120 bp, Artificial Sequence
  ENSG00000062598_53 (sequence is synthesized)
caatacctgggctgaatctgctctacactggctaggtgtgcacacaggcacttacagttacagttgcatcgactgatttcccatggggtgttcacattaaaattcatcttttttgtggct

SEQ ID NO: 43177 - DNA, 120 bp, Artificial Sequence
  ENSG00000062650_0 (sequence is synthesized)
gtgacggagcgagcggctgttggaggaaggaggtgggggccgggagcgcaaatggcgttgagatggttcagggccctgttcaaactccagcactgaccattcaccggcggaagcggcggc

SEQ ID NO: 43178 - DNA, 120 bp, Artificial Sequence
  ENSG00000062650_1 (sequence is synthesized)
gcaggaggcggcggcggcccagcgggggcacacagcaggctctgttaccagctccagcagtggcggccagcgagagctaggcctgggcccggccggcggcgctcgaggcggggagggaag

SEQ ID NO: 43179 - DNA, 120 bp, Artificial Sequence
  ENSG00000062650_2 (sequence is synthesized)
ttgcggggccgccgctcctgcccccccaaccgggcttcctatttaccgaaagcagagtccctcgcctctctcggctctcacctgccggccctgctctcccgcgcgagggttccgcgcccg

SEQ ID NO: 43180 - DNA, 120 bp, Artificial Sequence
  ENSG00000062650_3 (sequence is synthesized)
cccgcgggccgtagggagcgggagaggcggaggcggcccgtggccaaagcacccgccaggctccgaggagaatatgaaactggtgtcaaaatgacatccagatttgggaaaacatacagt

SEQ ID NO: 43181 - DNA, 120 bp, Artificial Sequence
  ENSG00000062650_4 (sequence is synthesized)
aggaaaggtggaaatggcagttcaaaattcgatgaagtcttttccaacaaacggactacccttagcacaaaatggggagagaccacatttatggctaaattagggcagaagaggcccaat

SEQ ID NO: 43182 - DNA, 120 bp, Artificial Sequence
  ENSG00000062650_5 (sequence is synthesized)
ttcaaaccagatatccaagaaattccgaagaaacctaaagtggaagaagaaagtactggagatccttttggatttgatagtgatgatgagtctctaccagtttcttcaaagaatttagcc

SEQ ID NO: 43183 - DNA, 120 bp, Artificial Sequence
  ENSG00000062650_6 (sequence is synthesized)
caggttaagtgttcctcttattcagaatctagtgaagctgctcagttggaagaggtcacttcagtacttgaagctaatagcaaaattagtcatgtggtcgttgaagacactgtcgtttct

SEQ ID NO: 43184 - DNA, 120 bp, Artificial Sequence
  ENSG00000062650_7 (sequence is synthesized)
gataaatgcttccctttggaggacactttacttgggaaagaaaagagcacaaaccgaattgtagaagatgatgcaagcataagtagctgtaataaattaataacttcagataaagtggag

SEQ ID NO: 43185 - DNA, 120 bp, Artificial Sequence
  ENSG00000062650_8 (sequence is synthesized)
aattttcatgaagaacatgaaaagaatagtcaccatattcacaaaaatgctgatgacagtactaagaaacccaatgcagaaactacagtggcttctgaaatcaaggaaacaaatgatact

SEQ ID NO: 43186 - DNA, 120 bp, Artificial Sequence
  ENSG00000062650_9 (sequence is synthesized)
tggaactcccagtttgggaaaaggccagaatcaccatcagaaatatctccaatcaagggatctgttagaactggtttgtttgaatgggataatgattttgaagatatcagatcagaagac

SEQ ID NO: 43187 - DNA, 120 bp, Artificial Sequence
  ENSG00000062650_10 (sequence is synthesized)
tgtattttaagtttggatagtgatccccttttggagatgaaggatgacgattttaaaaatcgattggaaaatctgaatgaagccattgaggaagatattgtacaaagtgttcttaggcca

SEQ ID NO: 43188 - DNA, 120 bp, Artificial Sequence
  ENSG00000062650_11 (sequence is synthesized)
accaactgtaggacgtactgtagggccaataaaacgaaatcctcccaaggagcatcaaattttgataagctgatggacggcaccagtcaggccttagccaaagcaaacagtgaatcgagt

SEQ ID NO: 43189 - DNA, 120 bp, Artificial Sequence
  ENSG00000062650_12 (sequence is synthesized)
aaagatggcctgaatcaggcaaagaaagggggtgtaagttgtgggaccagttttagagggacagttggacggactagagattacactgttttacatccatcttgcttgtcagtttgtaat

SEQ ID NO: 43190 - DNA, 120 bp, Artificial Sequence
  ENSG00000062650_13 (sequence is synthesized)
gttaccatacaggatactatggaacgcagcatggatgagttcactgcatccactcctgcagatttgggagaagctggtcgtctcagaaaaaaggcagatattgcaacttctaagactact

SEQ ID NO: 43191 - DNA, 120 bp, Artificial Sequence
  ENSG00000062650_14 (sequence is synthesized)
actagatttcgacctagtaatactaaatccaaaaaggatgttaaacttgaattttttggttttgaagatcatgagacaggaggtgatgaaggaggttctggaagttctaattacaaaatt

SEQ ID NO: 43192 - DNA, 120 bp, Artificial Sequence
  ENSG00000062650_15 (sequence is synthesized)
aagtattttggctttgatgatctcagtgaaagcgaagatgatgaagatgatgactgtcaagtagaaagaaagacaagcaaaaaaagaactaaaacagctccatcaccctccttgcagcct

SEQ ID NO: 43193 - DNA, 120 bp, Artificial Sequence
  ENSG00000062650_16 (sequence is synthesized)
cccccagaaagcaatgataattcccaggacagtcagtctggtactaacaatgcagaaaacttggattttacagaggacttgcctggtgtgcctgaaagtgtgaagaagcccataaataaa

SEQ ID NO: 43194 - DNA, 120 bp, Artificial Sequence
  ENSG00000062650_17 (sequence is synthesized)
caaggagataaatcaaaggaaaataccagaaagatttttagtggccccaaacggtcacccacaaaagctgtatataatgccagacattggaatcatccagattcagaagaactgcctggg

SEQ ID NO: 43195 - DNA, 120 bp, Artificial Sequence
  ENSG00000062650_18 (sequence is synthesized)
ccaccagtagtaaaacctcagagtgtcacagtgaggctgtcttcaaaggaaccaaatcaaaaagatgatggagtttttaaggctcctgcaccaccatccaaagtgataaaaactgtgaca

SEQ ID NO: 43196 - DNA, 120 bp, Artificial Sequence
  ENSG00000062650_19 (sequence is synthesized)
atacctactcagccctaccaagatatagttactgcactgaaatgcagacgagaagacaaagaattatatactgttgttcagcacgtgaagcacttcaacgatgttgtagaatttggtgaa

SEQ ID NO: 43197 - DNA, 120 bp, Artificial Sequence
  ENSG00000062650_20 (sequence is synthesized)
aatcaagagttcactgatgacattgagtacttgttaagtggcttaaagagcactcagcctctaaacacacgttgccttagtgttattagcttggctactaaatgtgccatgcccagtttt

SEQ ID NO: 43198 - DNA, 120 bp, Artificial Sequence
  ENSG00000062650_21 (sequence is synthesized)
cgaatgcacctgagagcacatgggatggtagcaatggtctttaaaaccttggatgattcccagcaccatcagaatctgtccctctgtacagctgccctcatgtatatactgagtagagat

SEQ ID NO: 43199 - DNA, 120 bp, Artificial Sequence
  ENSG00000062650_22 (sequence is synthesized)
cgtttgaacatggatcttgatagagctagcttagatctaatgattcgacttttggaactggaacaagatgcttcatcagccaagctactgaatgaaaaagacatgaacaaaattaaagaa

SEQ ID NO: 43200 - DNA, 120 bp, Artificial Sequence
  ENSG00000062650_23 (sequence is synthesized)
aaaatccgaaggctctgtgaaactgtacacaacaagcatcttgatctagaaaatataacgactgggcatttagctatggagacattattatcccttacttctaaacgagcaggagactgg

SEQ ID NO: 43201 - DNA, 120 bp, Artificial Sequence
  ENSG00000062650_24 (sequence is synthesized)
tttaaagaagaactccggcttttgggtggtctggatcatattgtagataaagtaaaagaatgtgtggatcatttaagtagagatgaggatgaagagaaactggtagcctcactatgggga

SEQ ID NO: 43202 - DNA, 120 bp, Artificial Sequence
  ENSG00000062650_25 (sequence is synthesized)
gcagagagatgtttacgagttttagaaagtgtaactgtgcataatcccgaaaatcaaagctacttgatagcatataaagattcccaacttattgtttcatcagctaaagcattacagcat

SEQ ID NO: 43203 - DNA, 120 bp, Artificial Sequence
  ENSG00000062650_26 (sequence is synthesized)
ctcaccagaatgtaactaaccatgtaggcaaagcagtggaggactgcatgagggccatcatcggggtgttgcttaatttaactaatgataatgagtggggcagcaccaaaacaggagagc

SEQ ID NO: 43204 - DNA, 120 bp, Artificial Sequence
  ENSG00000062650_27 (sequence is synthesized)
aggacggtctcataggcacagcgctgaactgtgtgcttcaggttccaaagtacctacctcaggagcagagatttgatattcgagtgctgggcttaggtctgctgataaatctagtggagt

SEQ ID NO: 43205 - DNA, 120 bp, Artificial Sequence
  ENSG00000062650_28 (sequence is synthesized)
atagtgctcggaatcggcactgtcttgtcaacatggaaacatcgtgctcttttgattcttccatctgtagtggagaaggggatgatagtttaaggataggtggacaagttcatgctgtcc

SEQ ID NO: 43206 - DNA, 120 bp, Artificial Sequence
  ENSG00000062650_29 (sequence is synthesized)
aggctttagtgcagctattccttgagcgagagcgggcagcccagctagcagaaagtaaaacagatgagttgatcaaagatgctcccaccactcagcatgataagagtggagagtggcaag

SEQ ID NO: 43207 - DNA, 120 bp, Artificial Sequence
  ENSG00000062650_30 (sequence is synthesized)
aaacaagtggagaaatacagtgggtgtcaactgaaaagactgatggtacagaagagaaacataagaaggaggaggaggatgaagaacttgacctcaataaagcccttcagcatgccggca

SEQ ID NO: 43208 - DNA, 120 bp, Artificial Sequence
  ENSG00000062650_31 (sequence is synthesized)
aacacatggaggattgcattgtggcctcctacacagcactacttcttgggtgtctctgccaggaaagtccaatcaatgtaaccactgtgcgggaatatctgccagaaggagacttttcaa

SEQ ID NO: 43209 - DNA, 120 bp, Artificial Sequence
  ENSG00000062650_32 (sequence is synthesized)
taatgacagagatgctcaaaaaatttttgagttttatgaatctcacttgtgctgttggaacaactggccagaaatctatctctagagtgattgaatatttggaacattgctagctgcttt

SEQ ID NO: 43210 - DNA, 120 bp, Artificial Sequence
  ENSG00000062650_33 (sequence is synthesized)
acctttgcttcaggtgctcggtaatgctggagctatccttagacaaagaaaagtcaagtcatgaaagaagtccttgaagatataccaagaacattcatcagtatcattcgtgtttggatt

SEQ ID NO: 43211 - DNA, 120 bp, Artificial Sequence
  ENSG00000062650_34 (sequence is synthesized)
tttaaggccacctgatttcttcgtcatgcattcggcatttgctaaatgacagttactacatcaatctgcaactatcaaaaatgaggggaaaaggttcaggctgttaacaattccatgcag

SEQ ID NO: 43212 - DNA, 120 bp, Artificial Sequence
  ENSG00000062650_35 (sequence is synthesized)
tatttaaatacatttactttggcagagtttataccctccccttgttttcttgctttattctgggcaagtttgaaggggaaaatttgtgctgctgttagtgcaactgctgtgtatgttgag

SEQ ID NO: 43213 - DNA, 120 bp, Artificial Sequence
  ENSG00000062650_36 (sequence is synthesized)
ccactgttgtcatgccagccaggtgcaaaggcagcttagctactgaggtagcgaatgttctgaggacattctagacaacagcttagttcctttttcaggctcatttgcttttgctttttt

SEQ ID NO: 43214 - DNA, 120 bp, Artificial Sequence
  ENSG00000062650_37 (sequence is synthesized)
gttgaatgattccaatcgtaaataaagcttttaataattttgtgaattttttggttgttgttccctgaactactgtctatatttaaaattagatggaatccaaagatacacgggattaat

SEQ ID NO: 43215 - DNA, 120 bp, Artificial Sequence
  ENSG00000062650_38 (sequence is synthesized)
agtatatttttttattcttgattaggtttgggttattgaactattttttacttttgagaccacaaccatattcaatatcataccataatgtgtcatagctataggcacaagaaaaacaac

SEQ ID NO: 43216 - DNA, 120 bp, Artificial Sequence
  ENSG00000062650_39 (sequence is synthesized)
agtttgagagaatattatataagatgatgtgccctgttaaaaggaggaggcaaaatagtcaaacccagggtagtttacacttaatgctagggaggctcttaaaacattattagattttga

SEQ ID NO: 43217 - DNA, 120 bp, Artificial Sequence
  ENSG00000062650_40 (sequence is synthesized)
ggaaagactctctagatatattttctaatgttcagtacaataaatataaggaagctaaaacaccaatgtggaattcctgtttccagataacatgtatattcttctatagagtgacaggat

SEQ ID NO: 43218 - DNA, 120 bp, Artificial Sequence
  ENSG00000062650_41 (sequence is synthesized)
caattgcataagcgcaaagccttaaattgctggtttagagaagacccttttttcattcagattctttgttcgtagagcagttatttgaaaaacagttatggaacacaaaacattttatag

SEQ ID NO: 43219 - DNA, 120 bp, Artificial Sequence
  ENSG00000062650_42 (sequence is synthesized)
atttaatatcataacattgcaaatttttcttgtattattcacaccactggttatacttttttttttccttttttattgattgggcctgaatacaggctttctagagatctttttcattaa

SEQ ID NO: 43220 - DNA, 120 bp, Artificial Sequence
  ENSG00000062650_43 (sequence is synthesized)
tacttttaaatacctttcaggtagttacatcatgtttcttcattggatttgtaaaacttgaagccataaaaatattagtttggtgtgtattggggaaaatagctaaaagtctaattttta

SEQ ID NO: 43221 - DNA, 120 bp, Artificial Sequence
  ENSG00000062650_44 (sequence is synthesized)
cccatttagactttgttatttccttgtataaagtgacaaatcggggctcttgtatcagtgccagctgtaatgtttttaaatgcagtggctgccttctattgtcttcctatttttgataat

SEQ ID NO: 43222 - DNA, 120 bp, Artificial Sequence
  ENSG00000062650_45 (sequence is synthesized)
gcagattgttgggaaatctgtaaggaagtaactgattccaggcaaattgttttcttccttctacccaccccaacccctacccatcaccttttaagaacatagtacgccagtgtaacgtgg

SEQ ID NO: 43223 - DNA, 120 bp, Artificial Sequence
  ENSG00000062650_46 (sequence is synthesized)
gaaccattgagattgtatttgccctgagtattaaagctagcttagcaaaatacttttaaaaacatattggtaaatgatacccgtaaaattaaattagttatattttattttaaaatgcaa

SEQ ID NO: 43224 - DNA, 120 bp, Artificial Sequence
  ENSG00000062650_47 (sequence is synthesized)
aatacattgatatttattaatcattggatttagggaaagggacagatttttggtgaacctgacttgtggcagatggtaaggaatattataaaacatttggatgagaacaatcagggcgaa

SEQ ID NO: 43225 - DNA, 120 bp, Artificial Sequence
  ENSG00000062650_48 (sequence is synthesized)
ctgcatttttctgttacactggtaatcatttgaaaattgatttacctcagtgtttaacagttttttgttttgttttgttttttaaataataactaattgtcgagcactgatagagatgca

SEQ ID NO: 43226 - DNA, 120 bp, Artificial Sequence
  ENSG00000062650_49 (sequence is synthesized)
gattttggtggggggaggtggtgggggagataatcacttcaccaactgcagtgcatttgtgtgtttttaaccctcagagaactctgcattttagggtacttgaggctgacttaactaaaa

SEQ ID NO: 43227 - DNA, 120 bp, Artificial Sequence
  ENSG00000062650_50 (sequence is synthesized)
gttttaaagtaaccttttttccattgtaaatatttctgtaaatactaccaattggaaattagaacagtagagtacttttctgaatccaatcctatttttattttatacagtatttctcag

SEQ ID NO: 43228 - DNA, 120 bp, Artificial Sequence
  ENSG00000062650_51 (sequence is synthesized)
ctgtgatctttggagcaaaagccaacggcaggaaaaaatagtttgtaccagtttcatgaagtatgtctttgggtttttgtaaataattttaactcaaataaaattgctactttcaataca

SEQ ID NO: 43229 - DNA, 120 bp, Artificial Sequence
  ENSG00000062650_52 (sequence is synthesized)
tagaaaatataacggtgggttccttcttccttccttctaagatgagaattactttcagaaagtctttggttagttgcagtagctgtgtgactgtgggcaaattattttaattctaacctt

SEQ ID NO: 43230 - DNA, 120 bp, Artificial Sequence
  ENSG00000062650_53 (sequence is synthesized)
ggtttacagtttggcaaatttcttatgtttagatctgagcataatttcattccttgcctgaacttcctaaactagtttatctgtatttaggctttttgcccaataaatagttgcacattt

SEQ ID NO: 43231 - DNA, 86 bp, Artificial Sequence
  ENSG00000062650_54 (sequence is synthesized)
ccaggctggagagcagtggcacgatcagggcttactgcagccttgacggcaagtagctgggagctacaggcgtgcaccgccacacc

SEQ ID NO: 43232 - DNA, 120 bp, Artificial Sequence
  ENSG00000062650_55 (sequence is synthesized)
tcaagcgatcctcccacctcagccttgcaagtagctgggagctacaggcgtgcaccgccacacccattaaaggtttttgaattttaatggagaggaggtctcactatgttgcccaggctg

SEQ ID NO: 43233 - DNA, 120 bp, Artificial Sequence
  ENSG00000062650_56 (sequence is synthesized)
aactcagccttccaaagtgctagaattataggtgtgaggcaccacgcctggccctttgcccagttttaattgggttgtttttgttgttgagttgtaagaatgttttttatatgttctgga

SEQ ID NO: 43234 - DNA, 120 bp, Artificial Sequence
  ENSG00000062650_57 (sequence is synthesized)
tacttgacccttatcaagttcatgatttgcaaatatattttctcattctgtggattaatcttttcagtttgttaattgtgtcctttgcaacacaaaaattttaactaaaagttttatggt

SEQ ID NO: 43235 - DNA, 120 bp, Artificial Sequence
  ENSG00000062650_58 (sequence is synthesized)
ttcagcttttcttttggatccctatttcattttgattaaatttttgttaatctgtggatatccagttgtcctagcatcattcgttgatttgtagcagttttaaagtaaagataactaaca

SEQ ID NO: 43236 - DNA, 120 bp, Artificial Sequence
  ENSG00000062716_0 (sequence is synthesized)
gggttccggttgtctggagcccagcggcgggtgtgagagtccgtaaggagcagcttccaggatcctgagatccggagcagccggggtcggagcggctcctcaagagttactgatctatga

SEQ ID NO: 43237 - DNA, 120 bp, Artificial Sequence
  ENSG00000062716_1 (sequence is synthesized)
aatggcagagaatggaaaaaattgtgaccagagacgtgtagcaatgaacaaggaacatcataatggaaatttcacagacccctcttcagtgaatgaaaagaagaggagggagcgggaaga

SEQ ID NO: 43238 - DNA, 120 bp, Artificial Sequence
  ENSG00000062716_2 (sequence is synthesized)
aaggcagaatattgtcctgtggagacagccgctcattaccttgcagtatttttctctggaaatccttgtaatcttgaaggaatggacctcaaaattatggcatcgtcaaagcattgtggt

SEQ ID NO: 43239 - DNA, 120 bp, Artificial Sequence
  ENSG00000062716_3 (sequence is synthesized)
gtcttttttactgctgcttgctgtgcttatagctacgtattatgttgaaggagtgcatcaacagtatgtgcaacgtatagagaaacagtttcttttgtatgcctactggataggcttagg

SEQ ID NO: 43240 - DNA, 120 bp, Artificial Sequence
  ENSG00000062716_4 (sequence is synthesized)
aattttgtcttctgttgggcttggaacagggctgcacacctttctgctttatctgggtccacatatagcctcagttacattagctgcttatgaatgcaattcagttaattttcccgaacc

SEQ ID NO: 43241 - DNA, 120 bp, Artificial Sequence
  ENSG00000062716_5 (sequence is synthesized)
accctatcctgatcagattatttgtccagatgaagagggcactgaaggaaccatttctttgtggagtatcatctcaaaagttaggattgaagcctgcatgtggggtatcggtacagcaat

SEQ ID NO: 43242 - DNA, 120 bp, Artificial Sequence
  ENSG00000062716_6 (sequence is synthesized)
cggagagctgcctccatatttcatggccagagcagctcgcctctcaggtgctgaaccagatgatgaagagtatcaggaatttgaagagatgctggaacatgcagagtctgcacaagactt

SEQ ID NO: 43243 - DNA, 120 bp, Artificial Sequence
  ENSG00000062716_7 (sequence is synthesized)
tgcctcccgggccaaactggcagttcaaaaactagtacagaaagttggattttttggaattttggcctgtgcttcaattccaaatcctttatttgatctggctggaataacgtgtggaca

SEQ ID NO: 43244 - DNA, 120 bp, Artificial Sequence
  ENSG00000062716_8 (sequence is synthesized)
ctttctggtacctttttggaccttctttggtgcaaccctaattggaaaagcaataataaaaatgcatatccagaaaatttttgttataataacattcagcaagcacatagtggagcaaat

SEQ ID NO: 43245 - DNA, 120 bp, Artificial Sequence
  ENSG00000062716_9 (sequence is synthesized)
ggtggctttcattggtgctgtccccggcataggtccatctctgcagaagccatttcaggagtacctggaggctcaacggcagaagcttcaccacaaaagcgaaatgggcacaccacaggg

SEQ ID NO: 43246 - DNA, 120 bp, Artificial Sequence
  ENSG00000062716_10 (sequence is synthesized)
agaaaactggttgtcctggatgtttgaaaagttggtcgttgtcatggtgtgttacttcatcctatctatcattaactccatggcacaaagttatgccaaacgaatccagcagcggttgaa

SEQ ID NO: 43247 - DNA, 120 bp, Artificial Sequence
  ENSG00000062716_11 (sequence is synthesized)
ctcagaggagaaaactaaataagtagagaaagttttaaactgcagaaattggagtggatgggttctgccttaaattgggaggactccaagccgggaaggaaaattcccttttccaacctg

SEQ ID NO: 43248 - DNA, 120 bp, Artificial Sequence
  ENSG00000062716_12 (sequence is synthesized)
tatcaatttttacaacttttttcctgaaagcagtttagtccatactttgcactgacatactttttccttctgtgctaaggtaaggtatccaccctcgatgcaatccaccttgtgttttct

SEQ ID NO: 43249 - DNA, 120 bp, Artificial Sequence
  ENSG00000062716_13 (sequence is synthesized)
tagggtggaatgtgatgttcagcagcaaacttgcaacagactggccttctgtttgttactttcaaaaggcccacatgatacaattagagaattcccaccgcacaaaaaaagttcctaagt

SEQ ID NO: 43250 - DNA, 120 bp, Artificial Sequence
  ENSG00000062716_14 (sequence is synthesized)
atgttaaatatgtcaagctttttaggcttgtcacaaatgattgctttgttttcctaagtcatcaaaatgtatataaattatctagattggataacagtcttgcatgtttatcatgttaca

SEQ ID NO: 43251 - DNA, 120 bp, Artificial Sequence
  ENSG00000062716_15 (sequence is synthesized)
ttgatctttaaattttgagacagtataaggaaaatctggttggtgtcttacaagtgagctgacaccattttttattctgtgtatttagaatgaagtcttgaaaaaaactttataaagaca

SEQ ID NO: 43252 - DNA, 120 bp, Artificial Sequence
  ENSG00000062716_16 (sequence is synthesized)
tctttaatcattccaaaattgtgtccgttttcttgagcgttttgattttttacttttagcttataccagctgaatggcagccttgcctaatccacctacaacaagaatttcttaagcttt

SEQ ID NO: 43253 - DNA, 120 bp, Artificial Sequence
  ENSG00000062716_17 (sequence is synthesized)
cttttatttgcatgagagagccactaccaaggcatgttttgttatgctgaaactgggctgctgcatactgctaaatggcacctctgggattggcctacctggggatttcttggtttgtga

SEQ ID NO: 43254 - DNA, 120 bp, Artificial Sequence
  ENSG00000062716_18 (sequence is synthesized)
aaacaggagaggagaaatatctcatacaagtgaaaggatactggagagagaaattacccatttctaaaaaaaaaccacactctgtcgtatctgtgttaatgttttctagcatgtactctg

SEQ ID NO: 43255 - DNA, 120 bp, Artificial Sequence
  ENSG00000062716_19 (sequence is synthesized)
gtttcaacagacacaaatttatatgttaacccagttttcttgccgttctgtaagtgttttattcttagtgtgatttttttccattgggatgtttttgattgaacttgttcattttgtttt

SEQ ID NO: 43256 - DNA, 120 bp, Artificial Sequence
  ENSG00000062716_20 (sequence is synthesized)
gcttgggaggaaaataaacaattttacttttttcctttaggagcattatgagcattatgtcagaatagaatagaattggggttcgatcttaacaggccagaaatgcctgggtttttttgg

SEQ ID NO: 43257 - DNA, 120 bp, Artificial Sequence
  ENSG00000062716_21 (sequence is synthesized)
tttgtttttgtttttgtttttttatcaaatcctgcctgactgtctgcttgttttgcctaccatcgtgacatctccatggctgtaccaccttgtcgggtagcttatcagactgatgttgac

SEQ ID NO: 43258 - DNA, 120 bp, Artificial Sequence
  ENSG00000062716_22 (sequence is synthesized)
tgttgaatctcatggcaacaccagtcgatgggctgtctgacattttggtatctttcatctgaccatccatatccaatgttctcatttaaacattacccagcatcattgtttataatcaga

SEQ ID NO: 43259 - DNA, 120 bp, Artificial Sequence
  ENSG00000062716_23 (sequence is synthesized)
aactctggtccttctgtctggtggcacttagagtcttttgtgccataatgcagcagtatggagggaggattttatggagaaatggggatagtcttcatgaccacaaataaataaaggaaa

SEQ ID NO: 43260 - DNA, 120 bp, Artificial Sequence
  ENSG00000062716_24 (sequence is synthesized)
actaagctgcattgtgggttttgaaaaggttattatacttcttaacaattctttttttcagggacttttctagctgtatgactgttacttgaccttctttgaaaagcattcccaaaatgc

SEQ ID NO: 43261 - DNA, 120 bp, Artificial Sequence
  ENSG00000062716_25 (sequence is synthesized)
tctattttagatagattaacattaaccaacataattttttttagatcgagtcagcataaatttctaagtcagcctctagtcgtggttcatctctttcacctgcattttatttggtgtttg

SEQ ID NO: 43262 - DNA, 120 bp, Artificial Sequence
  ENSG00000062716_26 (sequence is synthesized)
tctgaagaaaggaaagaggaaagcaaatacgaattgtactatttgtaccaaatctttgggattcattggcaaataatttcagtgtggtgtattattaaatagaaaaaaaaaattttgttt

SEQ ID NO: 43263 - DNA, 120 bp, Artificial Sequence
  ENSG00000062716_27 (sequence is synthesized)
cctaggttgaaggtctaattgatacgtttgacttatgatgaccatttatgcactttcaaatgaatttgctttcaaaataaatgaagagcagctgtccttctttcctcttttaagtgttca

SEQ ID NO: 43264 - DNA, 120 bp, Artificial Sequence
  ENSG00000062716_28 (sequence is synthesized)
gctgtggcatgctcagaggttcctgctggattccagctggagcggtgtgatacccttctttttcagctgttcgtgccttcctttcttgtatccaccaaagtggagacaaatacatgatct

SEQ ID NO: 43265 - DNA, 120 bp, Artificial Sequence
  ENSG00000062716_29 (sequence is synthesized)
caaagatacacagtacctacttaattccagctgatgggagaccaaagaatttgcaagtggatggtttggtatcactgtaaataaaaagagggcctgggaattcttgcgattccatctcta

SEQ ID NO: 43266 - DNA, 120 bp, Artificial Sequence
  ENSG00000062716_30 (sequence is synthesized)
ggaacagggctgcacacctttctgctttatctgattatttgtccagatgaagagggcactgaaggaaccatttctttgtggagtatcatctcaaaagttaggattgaagcctgcatgtgg

SEQ ID NO: 43267 - DNA, 120 bp, Artificial Sequence
  ENSG00000062716_31 (sequence is synthesized)
ctgagatccggagcagccggggtcggagcgggtaggtaaactaactcagggaattggggaccgaagcctgaggctgtcctcagagcttggcgtcttccggagctctcccacttaggcatt

SEQ ID NO: 43268 - DNA, 120 bp, Artificial Sequence
  ENSG00000062716_32 (sequence is synthesized)
gcggatctggggcactgtgattccgacttccagcagtgttttaggacgctgctgactggatgtctcaccctggatgtctcacgctggcggtagccaggttatttgggacaccttctcatg

SEQ ID NO: 43269 - DNA, 120 bp, Artificial Sequence
  ENSG00000062716_33 (sequence is synthesized)
gttggtcacccggacattgaacccagacaccgggctgttcgttctcctctccgcgtacttggaagccttgctaggcttctttagagaacctcttagtcccgggatgtccaggaccttgga

SEQ ID NO: 43270 - DNA, 120 bp, Artificial Sequence
  ENSG00000062716_34 (sequence is synthesized)
attttattctttgtgccataccagagtacagtatcagctgagctgaccttactctgaggactaactcttttgctggaagcggtttctgatttacagctcttggtttctcccagacatgtt

SEQ ID NO: 43271 - DNA, 84 bp, Artificial Sequence
  ENSG00000062716_35 (sequence is synthesized)
aaaaggggtcacagaatttcagcagttctctgatttttatattttattcctcttcctatccaatccctgccttttgagtccagg

SEQ ID NO: 43272 - DNA, 120 bp, Artificial Sequence
  ENSG00000062716_36 (sequence is synthesized)
tattcctcttcctatccaatccctgccttttgagtccaggtggtaagtacattttctttaacgtttttcctgcttttcttcccaaatgtgtctttttctttgggctactgtaccctgctt

SEQ ID NO: 43273 - DNA, 120 bp, Artificial Sequence
  ENSG00000062716_37 (sequence is synthesized)
ccggtttcttctcccctctgggaagtttcgggctgaaattacattcacagctctcactcacatttttaggcaaataagtgaagttggtttgccagtgttccttgacagaagttgagcgtc

SEQ ID NO: 43274 - DNA, 120 bp, Artificial Sequence
  ENSG00000062716_38 (sequence is synthesized)
tgtgtatgctctactgggaaatttgtctttgtcttagactagaaagtgtaacttctgtacatcttctcctaaaaacaagggtagagccaatggaaagtaatggttctgttacatagaatg

SEQ ID NO: 43275 - DNA, 120 bp, Artificial Sequence
  ENSG00000062716_39 (sequence is synthesized)
agttgttgccttgatcttaaatgatgtattggtagatatacttcccaagtggattaaaaagttaaaacttacagcataacaaagtattagacttactgaggtgacttgaatatctccttt

SEQ ID NO: 43276 - DNA, 120 bp, Artificial Sequence
  ENSG00000062716_40 (sequence is synthesized)
tgattttcactctatttttcttttcacccatgggaaaatgataattttttaataaaccaaggctcttaccatagctgaactttaaaacttagactgtcttttctgtaaacgattctgagg

SEQ ID NO: 43277 - DNA, 120 bp, Artificial Sequence
  ENSG00000062716_41 (sequence is synthesized)
caaagggaaatgactagaagaggatgagtaaacaataacctgaaatgggaaactcgagggaagcacaggttttttttgttttgttttgtttggttcgttttttgttctttggggtttttt

SEQ ID NO: 43278 - DNA, 68 bp, Artificial Sequence
  ENSG00000062716_42 (sequence is synthesized)
ttgttttgtttggttcgttttttgttctttggggtttttttgagacagaatttcgctctcgttgccca

SEQ ID NO: 43279 - DNA, 77 bp, Artificial Sequence
  ENSG00000062716_43 (sequence is synthesized)
gcctcagcctcccaagtagctgtgattccaggcacgtgccaccacaccagctaattttttgtattttaagacctcag

SEQ ID NO: 43280 - DNA, 120 bp, Artificial Sequence
  ENSG00000062716_44 (sequence is synthesized)
ttacagatgtgagccaccgcgcccggccagagcactgttttttttaatggccttgcactcttcttatggacctttgctgccctcagttgaccaaacatgacatcagaaacagatacattt

SEQ ID NO: 43281 - DNA, 120 bp, Artificial Sequence
  ENSG00000062716_45 (sequence is synthesized)
acagatacatttgtgtgttttaaaaacagctcctaatactggaacaaaaatatttaactgtcttgacaatactcatgagtatctgcatggcgacttcagagttgagtttaatcaaagagt

SEQ ID NO: 43282 - DNA, 120 bp, Artificial Sequence
  ENSG00000062716_46 (sequence is synthesized)
ttattcttaggtcctagtagaagagctaacctcacactcatcccattctaaactatgtgattcaacactgattttacatccaacaaagtgaaatcttgatagttgggtgtaaaaaggaga

SEQ ID NO: 43283 - DNA, 120 bp, Artificial Sequence
  ENSG00000062716_47 (sequence is synthesized)
gtaatggagatttcagagtagttggggttgcttacttttcatttttaattctttaggttttgtaagttacacacttcaagcattatagatgatcctctttttactactgaactaatgaag

SEQ ID NO: 43284 - DNA, 120 bp, Artificial Sequence
  ENSG00000062716_48 (sequence is synthesized)
ttcaaagttcatagttccttctttgttcctttgttaatcactgacttctgactagtgggaggtgcctcccaagtttgctaatgcattctttttggataaggatgacgcacagattgtcct

SEQ ID NO: 43285 - DNA, 120 bp, Artificial Sequence
  ENSG00000062716_49 (sequence is synthesized)
acacctcatttactcatttaaaaaatcctcagtaatctcttactttctgccctctactccatcaaaatggattaattacctttagaatattaccataggaacatatttattctcctttct

SEQ ID NO: 43286 - DNA, 120 bp, Artificial Sequence
  ENSG00000062716_50 (sequence is synthesized)
ttaggttgaagaaaaatagattagggaaagacattgctatttgctgtttgcttactggattatcacagttgtccactgttttttcatgttgaatctgcagtggagaacactgaaaaatac

SEQ ID NO: 43287 - DNA, 120 bp, Artificial Sequence
  ENSG00000062716_51 (sequence is synthesized)
gcgaggatcaaccgagctcgccgaaaggagggaggaacgtatcccttctggaggctgtctcagggggcagagggaccggaccggaagtgacgtgagcgggttccggttgtctggagccca

SEQ ID NO: 43288 - DNA, 120 bp, Artificial Sequence
  ENSG00000062725_0 (sequence is synthesized)
gcacacgcagccccgcccctgcagagatcagcgctgggacggaacccgggttcctctcgaaccgggattgtgacgcttttggcctggctggccgctgttttctgtcccactttttactcg

SEQ ID NO: 43289 - DNA, 120 bp, Artificial Sequence
  ENSG00000062725_1 (sequence is synthesized)
ggcctgcgtccgctgccgccgtccctcagtttgcccccggaggaggcagggcggccgtgccttctgccgtgcgcccgcgtggctgccaccgcccctccgaatcctccggggccgcagagg

SEQ ID NO: 43290 - DNA, 120 bp, Artificial Sequence
  ENSG00000062725_2 (sequence is synthesized)
ggttcgctacggagggaggtgggggccttcgggaggaggaggcggaggaggcggaggaggagggaaggaagatggcggccgtggaactagagtggatcccagagactctctataacaccg

SEQ ID NO: 43291 - DNA, 120 bp, Artificial Sequence
  ENSG00000062725_3 (sequence is synthesized)
ccatctccgctgtcgtggacaactacatccgctcccgccgagacatccgctccttgcccgagaacatccagtttgatgtttactacaagctttaccaacagggacgcttatgtcaactgg

SEQ ID NO: 43292 - DNA, 120 bp, Artificial Sequence
  ENSG00000062725_4 (sequence is synthesized)
gcagtgaattttgtgaattggaagtttttgctaaagtactgagagctttggataaaagacatttgcttcatcattgttttcaggctttgatggatcatggtgttaaagttgcttcagtct

SEQ ID NO: 43293 - DNA, 120 bp, Artificial Sequence
  ENSG00000062725_5 (sequence is synthesized)
tggcctactcattcagtaggcggtgctcttatatagcagaatcagatgctgcagtaaaggaaaaagccattcaggttggctttgttttaggtggctttctttcagatgcaggctggtaca

SEQ ID NO: 43294 - DNA, 120 bp, Artificial Sequence
  ENSG00000062725_6 (sequence is synthesized)
gtgatgctgagaaagtttttctgtcctgccttcagttgtgtactctacacgatgagatgcttcattggtttcgtgcagtagaatgttgtgtgaggttgcttcatgtgcgaaatggaaact

SEQ ID NO: 43295 - DNA, 120 bp, Artificial Sequence
  ENSG00000062725_7 (sequence is synthesized)
gcaaatatcatttgggtgaagaaacatttaaattagctcagacatatatggataaactatcaaaacatggccagcaagcaaataaagctgcactctatggagaactgtgtgcactcctat

SEQ ID NO: 43296 - DNA, 120 bp, Artificial Sequence
  ENSG00000062725_8 (sequence is synthesized)
ttgcaaaaagtcactatgatgaggcatacaaatggtgcatcgaggcaatgaaagaaattacagcaggcttaccagtgaaagttgtggtggatgtcttaagacaagcttctaaggcttgtg

SEQ ID NO: 43297 - DNA, 120 bp, Artificial Sequence
  ENSG00000062725_9 (sequence is synthesized)
tagtaaaacgtgaatttaagaaggcagaacagttaattaaacatgcagtgtatttggcacgggatcattttggatccaaacacccaaaatattctgatacactgctagattatgggttct

SEQ ID NO: 43298 - DNA, 120 bp, Artificial Sequence
  ENSG00000062725_10 (sequence is synthesized)
acttactcaatgtagataatatctgtcagtctgttgcaatttatcaggcagcccttgacattagacagtcagtgtttggtggcaaaaatatccacgtagcaacagctcatgaagatttgg

SEQ ID NO: 43299 - DNA, 120 bp, Artificial Sequence
  ENSG00000062725_11 (sequence is synthesized)
cctactcttcttatgtccaccagtatagctctgggaaatttgacaatgcactatttcatgcagaaagagctattggtatcattacccacatcctacctgaagatcatcttcttttggctt

SEQ ID NO: 43300 - DNA, 120 bp, Artificial Sequence
  ENSG00000062725_12 (sequence is synthesized)
cttcaaagagggtgaaagcacttattttagaggagattgcaattgattgtcataataaggaaactgaacagaggctgcttcaagaagctcatgatttgcacctgtcttcactccaactag

SEQ ID NO: 43301 - DNA, 120 bp, Artificial Sequence
  ENSG00000062725_13 (sequence is synthesized)
ctaaaaaagcttttggggaatttaatgtacagactgcaaaacactatggaaaccttggaagactttatcagtcaatgagaaaatttaaggaagctgaagaaatgcacatcaaagcaattc

SEQ ID NO: 43302 - DNA, 120 bp, Artificial Sequence
  ENSG00000062725_14 (sequence is synthesized)
agattaaagaacaacttcttggtcaagaagattatgaagtagccctttcagtgggacatctggcttctttatataattatgacatgaatcagtatgaaaatgctgagaaactttatttgc

SEQ ID NO: 43303 - DNA, 120 bp, Artificial Sequence
  ENSG00000062725_15 (sequence is synthesized)
gatctatagcaattgggaagaaactttttggtgagggctacagtggactagaatatgattatcgaggtctcattaaactttacaactccattggaaattacgagaaagtgtttgaatatc

SEQ ID NO: 43304 - DNA, 120 bp, Artificial Sequence
  ENSG00000062725_16 (sequence is synthesized)
acaatgttctgtctaactggaaccggttgcgagatcggcaatattcagtgacagatgctcttgaagatgtcagcaccagcccccagtccactgaagaagtggtgcagtccttcctgattt

SEQ ID NO: 43305 - DNA, 120 bp, Artificial Sequence
  ENSG00000062725_17 (sequence is synthesized)
ctcagaatgtcgagggaccgagctgctgagggaggacctcagttaaccaattaccttttcccggattccagggaattcatactgtgaaatcaaaaccatgttgttttggggggctggaat

SEQ ID NO: 43306 - DNA, 120 bp, Artificial Sequence
  ENSG00000062725_18 (sequence is synthesized)
ttgcattgaaacactggtccagtccattgaagaccctattttgggtgatccctatcttgcagaatgtctgtaggaataagcatatattcagttatattcagcatgtaccgcatgtgtaag

SEQ ID NO: 43307 - DNA, 120 bp, Artificial Sequence
  ENSG00000062725_19 (sequence is synthesized)
tagtctggcccacattttcaacctagtagaacaaacaacaggaaatcttttttttgttgtttttaaaaaattcattttgcagaaagcctgaaagaaaaaaaatacccctaaataaaacta

SEQ ID NO: 43308 - DNA, 120 bp, Artificial Sequence
  ENSG00000062725_20 (sequence is synthesized)
tttaagagtttaaaagagttgcattcttattatgtaaggatgattttaacaactttttaatatgtaattcttccatgtggaggtattcaatactgtagtgtaaagaaattttatgcggaa

SEQ ID NO: 43309 - DNA, 120 bp, Artificial Sequence
  ENSG00000062725_21 (sequence is synthesized)
aatctttatatgcagtatagaaaagttaacacaagtactaataaaagagggacatcccgacttacgtttttctaccttgcccagataagtggatacaaccactctatattacaaggaaag

SEQ ID NO: 43310 - DNA, 120 bp, Artificial Sequence
  ENSG00000062725_22 (sequence is synthesized)
gactgtcagattcatctgaactggaccagtgttgatctgtaatgtaatagaaaatctgatagaccagcacttctgacttttttttttttggtacaacaatgcaagatgctctgatagcat

SEQ ID NO: 43311 - DNA, 120 bp, Artificial Sequence
  ENSG00000062725_23 (sequence is synthesized)
ttgctaacaggaccaggaggatctaaaaaggaccagcctaatgtagaaggtggttacttggaccagaggctttagattattattttagatcctacatatacttttatcagtagaatgatt

SEQ ID NO: 43312 - DNA, 120 bp, Artificial Sequence
  ENSG00000062725_24 (sequence is synthesized)
tcatttagatgtataatgaaaaaggataatgcaaaaattatgtaatagataccaaattagggaagtttggcaatttcaatggcatatttttagtcaaggtacacagatggcagtgccata

SEQ ID NO: 43313 - DNA, 120 bp, Artificial Sequence
  ENSG00000062725_25 (sequence is synthesized)
agcaagtctataaatatcggctgcagccatccccctcattttaaatgttgccctaataatcaatgcagttaacaagtatattggctgtgtgtcatgaaatagttcatgttcagatggaaa

SEQ ID NO: 43314 - DNA, 120 bp, Artificial Sequence
  ENSG00000062725_26 (sequence is synthesized)
tgttaggttactgtatggtttatggagattaatgaaaatgaatgcccaaaaataagtcttagaaaatcctccatttttatggtaaatagtaatacaactaggtcatttcatttgaaatct

SEQ ID NO: 43315 - DNA, 120 bp, Artificial Sequence
  ENSG00000062725_27 (sequence is synthesized)
gaaagatcccctaataatacacctatttcactaacttgtctttctgtttattgggttttgatttgattttttgtaagccagtcaggttatttaatgatgaggtaataatcaaatttaaga

SEQ ID NO: 43316 - DNA, 120 bp, Artificial Sequence
  ENSG00000062725_28 (sequence is synthesized)
atttgtgacatgtagcaattcaagaaacaaaaaggtattttgctgttacctcaattcttactgtagtagcccatctgatgcttctatagttaagaatctgggttccccccctattttcag

SEQ ID NO: 43317 - DNA, 120 bp, Artificial Sequence
  ENSG00000062725_29 (sequence is synthesized)
gggttcatgacttggctgttaaagatgttgctcctagctaatgcttggagtagtctgtgggtgaatggatgtgtgttgaattttagttttcttttaacatgcatgttgggtgagagggga

SEQ ID NO: 43318 - DNA, 120 bp, Artificial Sequence
  ENSG00000062725_30 (sequence is synthesized)
aaaaaatctaagctgtctgccacattgagtacagaaaagttgtagatttcaaattttattaatattttaagcacttttttgaacttcccaaccttgtttgaagctgttatttgcagtcct

SEQ ID NO: 43319 - DNA, 120 bp, Artificial Sequence
  ENSG00000062725_31 (sequence is synthesized)
attagttttgagccattgcatttaagttccctaggagggggttggttgggggatgtactgaaagagatgaagcaaacccacaccctaagatggtaactgtgtgatttagaaacctgagtt

SEQ ID NO: 43320 - DNA, 120 bp, Artificial Sequence
  ENSG00000062725_32 (sequence is synthesized)
tactcctcaaatcgaattattttctttttaaattttggaaagagtaaattgacgtacttgcagtttatgaagctgccccccacccctcagttaattgcagtctaatgtcaagaggcactt

SEQ ID NO: 43321 - DNA, 120 bp, Artificial Sequence
  ENSG00000062725_33 (sequence is synthesized)
ctttattaattaccaaatagtctttgtgaccaaggactaacatttttaagttactcagctctatcctcatgggcctatatatttaatacctccaaagatattttcaggataggctttgta

SEQ ID NO: 43322 - DNA, 120 bp, Artificial Sequence
  ENSG00000062725_34 (sequence is synthesized)
tacttttattggttatttagaatccagtggtatgtttgtggtataggaatgtcatggtaaattgtttttcaataaatattttgaaacatgtttccatatgaagtttttttttcaatctgt

SEQ ID NO: 43323 - DNA, 120 bp, Artificial Sequence
  ENSG00000062725_35 (sequence is synthesized)
attttttggttttgtgcacatacagcatttcctaggataaaaataaacaaatgacttacagcctcatcctccctaactccatttgaactcaacttagctcacactcagtgataaaacaac

SEQ ID NO: 43324 - DNA, 120 bp, Artificial Sequence
  ENSG00000062725_36 (sequence is synthesized)
atggtatgtagaagcctaggatcacagggtgataatgtcaattggcagccagttgtgtttttttgaaacatcattattggcagtttctccttatcaccactgctttaatgtagttttttt

SEQ ID NO: 43325 - DNA, 120 bp, Artificial Sequence
  ENSG00000062725_37 (sequence is synthesized)
gtaaatccatatactttaatgcatacactctagcttaagaaaacattgccattttggttagggatatgacttaatgtgctattatttctggttctaatgaagaataataccctatgactt

SEQ ID NO: 43326 - DNA, 120 bp, Artificial Sequence
  ENSG00000062725_38 (sequence is synthesized)
taagtgtaagattcatcctttaagtagggatgtttaggataagttagatgtgtgccactatgatttattgggtttcttaaaaatcttgaagaaaataataaaatttatctcacaataagt

SEQ ID NO: 43327 - DNA, 120 bp, Artificial Sequence
  ENSG00000062725_39 (sequence is synthesized)
taacttgcgcaaactttttacatatggtgaggtgcgtaaggaagccctggccaacttaaagatttttctggaggttcagcaaagttatgttaaattaggggcctttggtctcatccttct

SEQ ID NO: 43328 - DNA, 120 bp, Artificial Sequence
  ENSG00000062725_40 (sequence is synthesized)
ctgactcttctacccagtcttttcctaaagttcggtgctactccagttgggtgcatcagggagctccgtcagcactcgcatgtgtcgctcaggtggccactcatgcctgcattccattta

SEQ ID NO: 43329 - DNA, 120 bp, Artificial Sequence
  ENSG00000062725_41 (sequence is synthesized)
atagagtcaattggaatttttagagcataatctttatggatcctcaaagctgactttgccaaagggattgagacccttactaccatcaaatctctgtctctgcttggttaaaaattggct

SEQ ID NO: 43330 - DNA, 120 bp, Artificial Sequence
  ENSG00000062725_42 (sequence is synthesized)
cactattgctttgtagtaacccctgcccaggtattttttcacttgtgaaaataatttgagaaagacctttgttcctagcctgttgggaaaagtttataattttatgaaaattaagtacag

SEQ ID NO: 43331 - DNA, 120 bp, Artificial Sequence
  ENSG00000062725_43 (sequence is synthesized)
aggctgcgatcttagaaataatgaaggtgccatttggctgctccttaatagtgcagacagaaaactgcagtgaacacatgccaaaacatgattgaagcctttggctgaaactttatacat

SEQ ID NO: 43332 - DNA, 120 bp, Artificial Sequence
  ENSG00000062725_44 (sequence is synthesized)
agaaataatgatttgctcataacaggtatcattaactgccactttttatgttttccctagaatttgtagccttgctgcttgcttttcttctgggtggcaaagttactactggaaaaacac

SEQ ID NO: 43333 - DNA, 120 bp, Artificial Sequence
  ENSG00000062725_45 (sequence is synthesized)
tataagtacaaagtttttggggttttatctttgctttagaagtggatgtgtacttcacctcttggctgtggaggaacttagttgccaggaaattttttttttttttttcagacggagttt

SEQ ID NO: 43334 - DNA, 120 bp, Artificial Sequence
  ENSG00000062725_46 (sequence is synthesized)
tgccaccacgcctggctaggaaattttttgttgttaatatgacatttggattaatctccagcttcaacagtacttcttttgtccataaatctcaggaatgttttaggcagaaaactggtt

SEQ ID NO: 43335 - DNA, 120 bp, Artificial Sequence
  ENSG00000062725_47 (sequence is synthesized)
ttaccctgttgataatcagaaggagtgtgctttaggatttattgcataatactattctttaattgcaatcctaggtatctatagcatgagtggccttagtgagtttgttgaagtgcacat

SEQ ID NO: 43336 - DNA, 120 bp, Artificial Sequence
  ENSG00000062725_48 (sequence is synthesized)
gtttttcaagagtaaaatttaagattaaaaatatatcctatatatagatatctagaaaacttggtttgtggtgcacagttaagtgttggatcactaaataaccattgcaggtaccgtttg

SEQ ID NO: 43337 - DNA, 120 bp, Artificial Sequence
  ENSG00000062725_49 (sequence is synthesized)
tgtaacattactcatttctgtatattccttttatgggaagatattttgccatggtaactaaaacttttcagttctacttttatgatgtgaatgaatgctacgttttattaaatattacca

SEQ ID NO: 43338 - DNA, 120 bp, Artificial Sequence
  ENSG00000062725_50 (sequence is synthesized)
ggtcagtactatttttatactttattaagcaacaggggattttagtttaataggctcaaaataaaaagttcttaatggaacagttaaaaacaaaacactaacaatctttacgtgaaaatc

SEQ ID NO: 43339 - DNA, 120 bp, Artificial Sequence
  ENSG00000062725_51 (sequence is synthesized)
cccactaatagtgccacaataatttctatagaaatatctaaggtcattaaatagatttttgaagacggttcttcattgtgtcaggatgacctttcatatcattctcaccaacttgtagtg

SEQ ID NO: 43340 - DNA, 120 bp, Artificial Sequence
  ENSG00000062725_52 (sequence is synthesized)
cccaccgttatttgtaactattaaaccatactaagtatgtttgtaaccagcattgtgatatattctgtacttgtattgctaaaaatgaattattgacctaataaatatagtgttcctgca

SEQ ID NO: 43341 - DNA, 120 bp, Artificial Sequence
  ENSG00000062725_53 (sequence is synthesized)
gaaacttcatggagaagtactgccggctcttggacttttcttccagaagtggcacatttcacttctcatattttaattgtggaaagaaatcacatggccacacttgtctttgtttgtttg

SEQ ID NO: 43342 - DNA, 83 bp, Artificial Sequence
  ENSG00000062725_54 (sequence is synthesized)
ggaaagaaatcacatggccacacttgtctttgtttgtttgtttgtctgtttgtttgagacagcgtctcactccatcaccaagg

SEQ ID NO: 43343 - DNA, 120 bp, Artificial Sequence
  ENSG00000062725_55 (sequence is synthesized)
acatcaccacgcccagctaatttttttgatttttgatagagacaaagtctcactatgttataacccaggctggtttcaaacttctgagcttggcgatcctcccatctcagcctcccaaag

SEQ ID NO: 43344 - DNA, 120 bp, Artificial Sequence
  ENSG00000062725_56 (sequence is synthesized)
aggcatgagccactgtgcccggccacaagatttatatttctatatgcaaattatatttagagtttttagaaaatgcctagctataatcatggatcaaaataacaactgagagctgtgcac

SEQ ID NO: 43345 - DNA, 120 bp, Artificial Sequence
  ENSG00000062725_57 (sequence is synthesized)
aggagttcaagtccagcctgggcaacataaaaccttgtctcttaagaaaagaattaataggaaaacttgaaattctatgcatttaaaaattattaaatgaaaataacaaaagattgttgt

SEQ ID NO: 43346 - DNA, 120 bp, Artificial Sequence
  ENSG00000062725_58 (sequence is synthesized)
attattaaatgaaaataacaaaagattgttgtcagccactccaggactgggatataaggaccttagaaaatgctgtggtaaattctgcccccattgttttattttaataatagcggaaaa

SEQ ID NO: 43347 - DNA, 120 bp, Artificial Sequence
  ENSG00000062725_59 (sequence is synthesized)
tgggggtataccagctttgtaaggtaactttgttttgacagatttgtactaggactgactgtcaaaattttaaactttataattttcccagcttatatacagatctgtttataatagaat

SEQ ID NO: 43348 - DNA, 120 bp, Artificial Sequence
  ENSG00000062725_60 (sequence is synthesized)
ttttaagtacttggaaggaaagaaattacaaatagaacctttgtatttatgtttggagggttttttttcttattaactcttatagccagaatatataaactacacgtattttagcacact

SEQ ID NO: 43349 - DNA, 120 bp, Artificial Sequence
  ENSG00000062725_61 (sequence is synthesized)
aatgaactgtttgagagttaaccatttttcactttatctttaggcttgtgtagtaaaacgtgaatttaagaaggcagaacagttaattaaacatgcagtgtatttggcacggtaggtgat

SEQ ID NO: 43350 - DNA, 120 bp, Artificial Sequence
  ENSG00000062725_62 (sequence is synthesized)
tattattaaaaatatccttttaaattgtctctatactttatatcctaataattttgtgtctttttatagggatcattttggatccaaacacccaaaatattctgatacactgctagatta

SEQ ID NO: 43351 - DNA, 120 bp, Artificial Sequence
  ENSG00000062725_63 (sequence is synthesized)
tgggttctacttactcaatgtagataatatctgtcagtctgttgcaatttatcaggtatgttaatggttaccctttttttctttcaacctgtattgacttgctgacctgtatttgtttgt

SEQ ID NO: 43352 - DNA, 120 bp, Artificial Sequence
  ENSG00000062725_64 (sequence is synthesized)
ggtgtataaaccactctaaaaatgactttttgacaactaccccgcccaccaatataggttgcatcattattttattaagtattacctagaaggtgtaaaagttaatgctttgggaattaa

SEQ ID NO: 43353 - DNA, 120 bp, Artificial Sequence
  ENSG00000062725_65 (sequence is synthesized)
agaaaatcattcaggaaaggaattattgggttgtgagctcatatgtgggagtagttttccattttttatttacccatgtaatggcttgtctttgttgttgatttagcaaatgtcactaaa

SEQ ID NO: 43354 - DNA, 120 bp, Artificial Sequence
  ENSG00000062725_66 (sequence is synthesized)
actgcctttgtagtaacaaagatggctgataattattttaggtctttcttactcattctcaggtaaatgatgtattatgccattgctgtagacaaggcatacttgacttcaaggttcact

SEQ ID NO: 43355 - DNA, 77 bp, Artificial Sequence
  ENSG00000062725_67 (sequence is synthesized)
ctctgcctcccaagttcaagcaattctcgtgcctcggcctcctgagtatctgggattacaggccccggtttcagcat

SEQ ID NO: 43356 - DNA, 78 bp, Artificial Sequence
  ENSG00000062725_68 (sequence is synthesized)
cacctttgcctcccagggttcacttttgaagaaggaaacagagcaaaacattcccaatgtcttgattctcaagacata

SEQ ID NO: 43357 - DNA, 120 bp, Artificial Sequence
  ENSG00000062725_69 (sequence is synthesized)
cagagcaaaacattcccaatgtcttgattctcaagacataggaatgattattattattattattattaagccgtggccttttaagtcaaactcgtatcttcagaaattcaggacttctag

SEQ ID NO: 43358 - DNA, 120 bp, Artificial Sequence
  ENSG00000062725_70 (sequence is synthesized)
gtgactttcatgttctgtaatttaaatacagcaggactttctgggcttcaaaattttatggtgttaggcatatagatatatatttaaattactaggatgtttaatttaactaggtggtat

SEQ ID NO: 43359 - DNA, 120 bp, Artificial Sequence
  ENSG00000062725_71 (sequence is synthesized)
tcttatgtccaccagtatagctctgggaaatttgacaatgcactgtaagttccacattccttttctctgaaggaggaaatactgtttttgttttattttgttttttcccattagggaact

SEQ ID NO: 43360 - DNA, 120 bp, Artificial Sequence
  ENSG00000062725_72 (sequence is synthesized)
attattacattaataatagtacttgatatactttatggattgaacttgtcttcctggagctttatcagaatgcctaaaatgttcttgaagtcatttaaaatcataccagttttcaggtgc

SEQ ID NO: 43361 - DNA, 120 bp, Artificial Sequence
  ENSG00000062725_73 (sequence is synthesized)
ccagcactttgggaggctgaggtggaaagattgcttgagcccaagagtttgagaccctgtctactcaaaaaatttttaaaactagatggacgttttggtgcatgcctgtggtcccagctt

SEQ ID NO: 43362 - DNA, 75 bp, Artificial Sequence
  ENSG00000062725_74 (sequence is synthesized)
gacgttttggtgcatgcctgtggagaggtcaaggatgcagcgaagcatattcacaccactgcattccagcctggg

SEQ ID NO: 43363 - DNA, 120 bp, Artificial Sequence
  ENSG00000062725_75 (sequence is synthesized)
accctgtttccaaaaataaataaagtcatactaatttataggttattcatttagcctttatgtgatttactattgagacttgtatattttcatgcagaatataacttatgttttgagtat

SEQ ID NO: 43364 - DNA, 120 bp, Artificial Sequence
  ENSG00000062725_76 (sequence is synthesized)
ttccttcaataatttttgagtaatacagtagcaaacttaataacctaaaaacttcttggtgataacacatagaaatactgaataacaattgtctttttaaatatataactgagcttgcaa

SEQ ID NO: 43365 - DNA, 120 bp, Artificial Sequence
  ENSG00000062725_77 (sequence is synthesized)
gagtgagggggaaatcccccaagggccaataatggacactaaaatttaaaggattaagtatggcctgtggtataactgctctggggtgatgggaaagtttacagatttctgtaaccttgg

SEQ ID NO: 43366 - DNA, 120 bp, Artificial Sequence
  ENSG00000062725_78 (sequence is synthesized)
acagatttctgtaaccttggtttaagaaacagcctataggaggctgggagttagaactgaaaccctcacatgaagcaaagtcaagactgcaacccggccgggcgtggtggctcacgcctg

SEQ ID NO: 43367 - DNA, 120 bp, Artificial Sequence
  ENSG00000062725_79 (sequence is synthesized)
tgcagtagaatgttgtgtgaggaataggagactacattatcccatatgggatttgggagattgttatttcaggagaatacttacagtgaaggtctttggaaaggaaattcttagcattgt

SEQ ID NO: 43368 - DNA, 120 bp, Artificial Sequence
  ENSG00000062725_80 (sequence is synthesized)
ggaaatgagaagttgcttcatgtgcgaaatggaaactgcaaatatcatttgggtgaagaaacatttaaattagctcagacatatatggataaactatcaaaacatggccagcaagcaaat

SEQ ID NO: 43369 - DNA, 120 bp, Artificial Sequence
  ENSG00000062822_0 (sequence is synthesized)
agtcaggggtcacggcggcgtaggctgtggcgggaaacgctgtttgaagcgggatggatggcaagcggcggccaggcccagggcccggggtgcccccaaagcgggcccgtgggggcctct

SEQ ID NO: 43370 - DNA, 120 bp, Artificial Sequence
  ENSG00000062822_1 (sequence is synthesized)
gggatgatgatgatgcacctcggccatcccaattcgaggaggacctggcactgatggaggagatggaggcagaacacaggctgcaggagcaggaggaggaggagctgcagtcagtcctgg

SEQ ID NO: 43371 - DNA, 120 bp, Artificial Sequence
  ENSG00000062822_2 (sequence is synthesized)
agggggttgcagacgggcaggtcccaccatcagccatagatcctcgctggcttcggcccacaccaccagcgctggacccccagacagagcccctcatcttccaacagttggagattgacc

SEQ ID NO: 43372 - DNA, 120 bp, Artificial Sequence
  ENSG00000062822_3 (sequence is synthesized)
attatgtgggcccagcgcagcctgtgcctggggggcccccaccatcccgcggctccgtgcctgtgctccgcgccttcggggtcaccgatgaggggttctctgtctgctgccacatccacg

SEQ ID NO: 43373 - DNA, 120 bp, Artificial Sequence
  ENSG00000062822_4 (sequence is synthesized)
gcttcgctccctacttctacaccccagcgccccctggtttcgggcccgagcacatgggtgacctgcaacgggagctgaacttggccatcagccgggacagtcgcggggggagggagctga

SEQ ID NO: 43374 - DNA, 120 bp, Artificial Sequence
  ENSG00000062822_5 (sequence is synthesized)
ctgggccggccgtgctggctgtggaactgtgctcccgagagagcatgtttgggtaccacgggcacggcccctccccgttcctgcgcatcaccgtggcgctgccgcgcctcgtggccccgg

SEQ ID NO: 43375 - DNA, 120 bp, Artificial Sequence
  ENSG00000062822_6 (sequence is synthesized)
cccgccgtctcctggaacagggcatccgtgtggcaggcctgggcacgcccagcttcgcgccctacgaggccaacgtcgactttgagatccggttcatggtggacacggacatcgtcggct

SEQ ID NO: 43376 - DNA, 120 bp, Artificial Sequence
  ENSG00000062822_7 (sequence is synthesized)
gcaactggctggagctcccagctgggaaatacgccctgaggctgaaggagaaggctacgcagtgccagctggaggcggacgtgctgtggtctgacgtggtcagtcacccaccggaagggc

SEQ ID NO: 43377 - DNA, 120 bp, Artificial Sequence
  ENSG00000062822_8 (sequence is synthesized)
catggcagcgcattgcgcccttgcgcgtgctcagcttcgatatcgagtgcgccggccgcaaaggcatcttccctgagcctgagcgggaccctgtcatccagatctgctcgctgggcctgc

SEQ ID NO: 43378 - DNA, 120 bp, Artificial Sequence
  ENSG00000062822_9 (sequence is synthesized)
gctggggggagccggagcccttcctacgcctggcgctcaccctgcggccctgtgcccccatcctgggtgccaaggtgcagagctacgagaaggaggaggacctgctgcaggcctggtcca

SEQ ID NO: 43379 - DNA, 120 bp, Artificial Sequence
  ENSG00000062822_10 (sequence is synthesized)
ccttcatccgtatcatggaccccgacgtgatcaccggttacaacatccagaacttcgaccttccgtacctcatctctcgggcccagaccctcaaggtacaaacattccctttcctgggcc

SEQ ID NO: 43380 - DNA, 120 bp, Artificial Sequence
  ENSG00000062822_11 (sequence is synthesized)
gtgtggccggcctttgctccaacatccgggactcttcattccagtccaagcagacgggccggcgggacaccaaggttgtcagcatggtgggccgcgtgcagatggacatgctgcaggtgc

SEQ ID NO: 43381 - DNA, 120 bp, Artificial Sequence
  ENSG00000062822_12 (sequence is synthesized)
tgctgcgggagtacaagctccgctcctacacgctcaatgccgtgagcttccacttcctgggcgagcagaaggaggacgtgcagcacagcatcatcaccgacctgcagaatgggaacgacc

SEQ ID NO: 43382 - DNA, 120 bp, Artificial Sequence
  ENSG00000062822_13 (sequence is synthesized)
agacccgccgccgcctggctgtgtactgcctgaaggatgcctacctgccactgcggctgctggagcggctcatggtgctggtgaacgccgtggagatggcgagggtcactggcgtgcccc

SEQ ID NO: 43383 - DNA, 120 bp, Artificial Sequence
  ENSG00000062822_14 (sequence is synthesized)
ccgtggtgaagtcagagggcggcgaggactacacgggagccactgtcatcgagcccctcaaagggtactacgacgtccccatcgccaccctggacttctcctcgctgtacccgtccatca

SEQ ID NO: 43384 - DNA, 120 bp, Artificial Sequence
  ENSG00000062822_15 (sequence is synthesized)
tgatggcccacaacctgtgttacaccacgctccttcggcccgggactgcacagaaactgggcctgactgaggatcagttcatcaggacccccaccggggacgagtttgtgaagacctcag

SEQ ID NO: 43385 - DNA, 120 bp, Artificial Sequence
  ENSG00000062822_16 (sequence is synthesized)
tgcggaaggggctgctgccccagatcctggagaacctgctcagtgcccggaagagggccaaggccgagctggccaaggagacagaccccctccggcgccaggtcctggatggacggcagc

SEQ ID NO: 43386 - DNA, 120 bp, Artificial Sequence
  ENSG00000062822_17 (sequence is synthesized)
tggcgctgaaggtgagcgccaactccgtatacggcttcactggcgcccaggtgggcaagttgccgtgcctggagatctcacagagcgtcacggggttcggacgtcagatgatcgagaaaa

SEQ ID NO: 43387 - DNA, 120 bp, Artificial Sequence
  ENSG00000062822_18 (sequence is synthesized)
ccaagcagctggtggagtctaagtacacagtggagaatggctacagcaccagtgccaaggtggtgtatggtgacactgactccgtcatgtgccgattcggcgtgtcctcggtggctgagg

SEQ ID NO: 43388 - DNA, 120 bp, Artificial Sequence
  ENSG00000062822_19 (sequence is synthesized)
cgatggccctggggcgggaggccgcggactgggtgtcaggtcacttcccgtcgcccatccggctggagtttgagaaggtctacttcccatacctgcttatcagcaagaagcgctacgcgg

SEQ ID NO: 43389 - DNA, 120 bp, Artificial Sequence
  ENSG00000062822_20 (sequence is synthesized)
gcctgctcttctcctcccggcccgacgcccacgaccgcatggactgcaagggcctggaggccgtgcgcagggacaactgccccctcgtggccaacctggtcactgcctcactgcgccgcc

SEQ ID NO: 43390 - DNA, 120 bp, Artificial Sequence
  ENSG00000062822_21 (sequence is synthesized)
tgctcatcgaccgagaccctgagggcgcggtggctcacgcacaggacgtcatctcggacctgctgtgcaaccgcatcgatatctcccagctggtcatcaccaaggagctgacccgcgcgg

SEQ ID NO: 43391 - DNA, 120 bp, Artificial Sequence
  ENSG00000062822_22 (sequence is synthesized)
cctccgactatgccggcaagcaggcccacgtggagctggccgagaggatgaggaagcgggaccccgggagtgcgcccagcctgggcgaccgcgtcccctacgtgatcatcagtgccgcca

SEQ ID NO: 43392 - DNA, 120 bp, Artificial Sequence
  ENSG00000062822_23 (sequence is synthesized)
agggtgtggccgcctacatgaagtcggaggacccgctgttcgtgctggagcacagcctgcccattgacacgcagtactacctggagcagcagctggccaagcccctcctgcgcatcttcg

SEQ ID NO: 43393 - DNA, 120 bp, Artificial Sequence
  ENSG00000062822_24 (sequence is synthesized)
agcccatcctgggcgagggccgtgccgaggctgtgctactgcggggggaccacacgcgctgcaagacggtgctcacgggcaaggtgggcggcctcctggccttcgccaaacgccgcaact

SEQ ID NO: 43394 - DNA, 120 bp, Artificial Sequence
  ENSG00000062822_25 (sequence is synthesized)
gctgcattggctgccgcacagtgctcagccaccagggagccgtgtgtgagttctgccagccccgggagtctgagctgtatcagaaggaggtatcccatctgaatgccctggaggagcgct

SEQ ID NO: 43395 - DNA, 120 bp, Artificial Sequence
  ENSG00000062822_26 (sequence is synthesized)
tctcgcgcctctggacgcagtgccagcgctgccagggcagcctgcacgaggacgtcatctgcaccagccgggactgccccatcttctacatgcgcaagaaggtgcggaaggacctggaag

SEQ ID NO: 43396 - DNA, 120 bp, Artificial Sequence
  ENSG00000062822_27 (sequence is synthesized)
accaggagcagctcctgcggcgcttcggaccccctggacctgaggcctggtgaccttgcaagcatcccatggggcgggggcgggaccagggagaattaataaagttctggacttttgcta

SEQ ID NO: 43397 - DNA, 120 bp, Artificial Sequence
  ENSG00000062822_28 (sequence is synthesized)
ggcttgcgcgcgcgggagtcaggggtcacggcggcgtaggctgtggcgggaaacgctgtttgaagcggcaggatggatggcaagcggcggccaggcccagggcccggggtgcccccaaag

SEQ ID NO: 43398 - DNA, 120 bp, Artificial Sequence
  ENSG00000062822_29 (sequence is synthesized)
acagggcgggggcggcatgggaactcctagccctgactcccggccgcggctgctcccctcccaggtactacgacgtccccatcgccaccctggacttctcctcgctgtacccgtccatca

SEQ ID NO: 43399 - DNA, 120 bp, Artificial Sequence
  ENSG00000062822_30 (sequence is synthesized)
aaacgctgtttgaagcggcttcagcactgactctgggctcccacaagcccctgcgcttcctctgtcccacccgggtctctcctcgcagatcatcactccctgtccctctctggctacttg

SEQ ID NO: 43400 - DNA, 120 bp, Artificial Sequence
  ENSG00000062822_31 (sequence is synthesized)
cacaacccgaagccagagccgctaacgacgcttgcttcttcctgtctaagctgttgtaccaaggagcccccaaaacacagtggcccaagaaagatacaaattgatttctccacataacgc

SEQ ID NO: 43401 - DNA, 120 bp, Artificial Sequence
  ENSG00000062822_32 (sequence is synthesized)
actttcagaagctgggattggcagtgggcagggatggggtggcccagttcctggctgggccccagcacttgggctgacccgcctccccacaggagccgtgtgtgagttctgccagccccg

SEQ ID NO: 43402 - DNA, 120 bp, Artificial Sequence
  ENSG00000062822_33 (sequence is synthesized)
gccacttcggaagctgagagagggggcggggcctgccctgcagtcgaacaagcggggcgtggccttgcccgcacttgggcaggcgggggcgtggcccgtctctgagcgccgcggctctgg

SEQ ID NO: 43403 - DNA, 120 bp, Artificial Sequence
  ENSG00000062822_34 (sequence is synthesized)
caggggtcacggcggcgtaggctgtggcgggaaacgctgtttgaagcggtagagacagggtttcaccatgttgataaggctggtctcaaacaactgacctcaagtgatccacccgcctcg

SEQ ID NO: 43404 - DNA, 120 bp, Artificial Sequence
  ENSG00000062822_35 (sequence is synthesized)
ttccgagatgggcgggcctgcgggaagggtggggcctcccgtgccctgtggggccctgagaaccgccccccatggcagcctgggtgtggcctcggccccctctggaggtcccccctctat

SEQ ID NO: 43405 - DNA, 120 bp, Artificial Sequence
  ENSG00000062822_36 (sequence is synthesized)
tctgacccctcccttgcttccctatggaaggggccccagtccctcccctgtgcatacagctccccagccgggggttcccttggattcataatcctccagctctacccccacccccagtga

SEQ ID NO: 43406 - DNA, 120 bp, Artificial Sequence
  ENSG00000062822_37 (sequence is synthesized)
tgagagccctacagactctgtggcccagagactccgtgacctccgaccccatcccagacccaggccccccccatgtcacagcccgcaggcaggcctaggccctaagccccaggccccatg

SEQ ID NO: 43407 - DNA, 80 bp, Artificial Sequence
  ENSG00000063015_0 (sequence is synthesized)
gtggtgctgattctgtcaggcgctggcggcggcagcggcggtgacggctgcggccccgctccctctacccggccggaccc

SEQ ID NO: 43408 - DNA, 120 bp, Artificial Sequence
  ENSG00000063015_1 (sequence is synthesized)
ctcccgccgcggtcccagcccagggcgcggccgcaaccagcaccatgcgcccggtagccctgctgctcctgccctcgctgctggcgctcctggctcacggactctctttagaggccccaa

SEQ ID NO: 43409 - DNA, 120 bp, Artificial Sequence
  ENSG00000063015_2 (sequence is synthesized)
ccgtggggaaaggacaagccccaggcatcgaggagacagatggcgagctgacagcagcccccacacctgagcagccagaacgaggcgtccactttgtcacaacagcccccaccttgaagc

SEQ ID NO: 43410 - DNA, 120 bp, Artificial Sequence
  ENSG00000063015_3 (sequence is synthesized)
tgctcaaccaccacccgctgcttgaggaattcctacaagaggggctggaaaagggagatgaggagctgaggccagcactgcccttccagcctgacccacctgcacccttcaccccaagtc

SEQ ID NO: 43411 - DNA, 120 bp, Artificial Sequence
  ENSG00000063015_4 (sequence is synthesized)
cccttccccgcctggccaaccaggacagccgccctgtctttaccagccccactccagccatggctgcggtacccactcagccccagtccaaggagggaccctggagtccggagtcagagt

SEQ ID NO: 43412 - DNA, 120 bp, Artificial Sequence
  ENSG00000063015_5 (sequence is synthesized)
cccctatgcttcgaatcacagctcccctacctccagggcccagcatggcagtgcccaccctaggcccaggggagatagccagcactacaccccccagcagagcctggacaccaacccaag

SEQ ID NO: 43413 - DNA, 120 bp, Artificial Sequence
  ENSG00000063015_6 (sequence is synthesized)
agggtcctggagacatgggaaggccgtgggttgcagaggttgtgtcccagggcgcagggatcgggatccaggggaccatcacctcctccacagcttcaggagatgatgaggagaccacca

SEQ ID NO: 43414 - DNA, 120 bp, Artificial Sequence
  ENSG00000063015_7 (sequence is synthesized)
ctaccaccaccatcatcaccaccaccatcaccacagtccagacaccaggcccttgtagctggaatttctcaggcccagagggctctctggactcccctacagacctcagctcccccactg

SEQ ID NO: 43415 - DNA, 120 bp, Artificial Sequence
  ENSG00000063015_8 (sequence is synthesized)
atgttggcctggactgcttcttctacatctctgtctaccctggctatggcgtggaaatcaaggtccagaatatcagcctccgggaaggggagacagtgactgtggaaggcctgggggggc

SEQ ID NO: 43416 - DNA, 120 bp, Artificial Sequence
  ENSG00000063015_9 (sequence is synthesized)
ctgacccactgcccctggccaaccagtctttcctgctgcggggccaagtcatccgcagccccacccaccaagcggccctgaggttccagagcctcccgccaccggctggccctggcacct

SEQ ID NO: 43417 - DNA, 120 bp, Artificial Sequence
  ENSG00000063015_10 (sequence is synthesized)
tccatttccattaccaagcctatctcctgagctgccactttccccgtcgtccagcttatggagatgtgactgtcaccagcctccacccagggggtagtgcccgcttccattgtgccactg

SEQ ID NO: 43418 - DNA, 120 bp, Artificial Sequence
  ENSG00000063015_11 (sequence is synthesized)
gctaccagctgaagggcgccaggcatctcacctgtctcaatgccacccagcccttctgggattcaaaggagcccgtctgcatcgctgcttgcggcggagtgatccgcaatgccaccaccg

SEQ ID NO: 43419 - DNA, 120 bp, Artificial Sequence
  ENSG00000063015_12 (sequence is synthesized)
gccgcatcgtctctccaggcttcccgggcaactacagcaacaacctcacctgtcactggctgcttgaggctcctgagggccagcggctacacctgcactttgagaaggtttccctggcag

SEQ ID NO: 43420 - DNA, 120 bp, Artificial Sequence
  ENSG00000063015_13 (sequence is synthesized)
aggatgatgacaggctcatcattcgcaatggggacaacgtggaggccccaccagtgtatgattcctatgaggtggaatacctgcccattgagggcctgctcagctctggcaaacacttct

SEQ ID NO: 43421 - DNA, 120 bp, Artificial Sequence
  ENSG00000063015_14 (sequence is synthesized)
ttgttgagctcagtactgacagcagcggggcagctgcaggcatggccctgcgctatgaggccttccagcagggccattgctatgagccctttgtcaaatacggtaacttcagcagcagca

SEQ ID NO: 43422 - DNA, 120 bp, Artificial Sequence
  ENSG00000063015_15 (sequence is synthesized)
cacccacctaccctgtgggtaccactgtggagttcagctgcgaccctggctacaccctggagcagggctccatcatcatcgagtgtgttgacccccacgacccccagtggaatgagacag

SEQ ID NO: 43423 - DNA, 120 bp, Artificial Sequence
  ENSG00000063015_16 (sequence is synthesized)
agccagcctgccgagccgtgtgcagcggggagatcacagactcggctggcgtggtactctctcccaactggccagagccctacggtcgtgggcaggattgtatctggggtgtgcatgtgg

SEQ ID NO: 43424 - DNA, 120 bp, Artificial Sequence
  ENSG00000063015_17 (sequence is synthesized)
acaagcgcatcatgctggacatccgagtgctgcgcataggccctggtgatgtgcttaccttctatgatggggatgacctgacggcccgggttctgggccagtactcagggccccgtagcc

SEQ ID NO: 43425 - DNA, 120 bp, Artificial Sequence
  ENSG00000063015_18 (sequence is synthesized)
acttcaagctctttacctccatggctgatgtcaccattcagttccagtcggaccccgggacctcagtgctgggctaccagcagggcttcgtcatccacttctttgaggtgccccgcaatg

SEQ ID NO: 43426 - DNA, 120 bp, Artificial Sequence
  ENSG00000063015_19 (sequence is synthesized)
acacatgtccggagctgcctgagatccccaatggctggaagagcccatcgcagcctgagctagtgcacggcaccgtggtcacttaccagtgctaccctggctaccaggtagtgggatcca

SEQ ID NO: 43427 - DNA, 120 bp, Artificial Sequence
  ENSG00000063015_20 (sequence is synthesized)
gtgtcctcatgtgccagtgggacctaacttggagtgaggacctgccctcatgccagagggtgacttcctgccacgatcctggagatgtggagcacagccgacgcctcatatccagcccca

SEQ ID NO: 43428 - DNA, 120 bp, Artificial Sequence
  ENSG00000063015_21 (sequence is synthesized)
agtttcccgtgggggccaccgtgcaatatatctgtgaccagggttttgtgctgatgggcagctccatcctcacctgccatgatcgccaggctggcagccccaagtggagtgaccgggccc

SEQ ID NO: 43429 - DNA, 120 bp, Artificial Sequence
  ENSG00000063015_22 (sequence is synthesized)
ctaaatgtctcctggaacagctcaagccatgccatggtctcagtgcccctgagaatggtgcccgaagtcctgagaagcagctacacccagcaggggccaccatccacttctcgtgtgccc

SEQ ID NO: 43430 - DNA, 120 bp, Artificial Sequence
  ENSG00000063015_23 (sequence is synthesized)
ctggctatgtgctgaagggccaggccagcatcaagtgtgtgcctgggcacccctcgcattggagtgaccccccacccatctgtagggctgcctctctggatgggttctacaacagtcgca

SEQ ID NO: 43431 - DNA, 120 bp, Artificial Sequence
  ENSG00000063015_24 (sequence is synthesized)
gcctggatgttgccaaggcacctgctgcctccagcaccctggatgctgcccacattgcagctgccatcttcttgccactggtggcgatggtgttgttggtaggaggtgtatacttctact

SEQ ID NO: 43432 - DNA, 120 bp, Artificial Sequence
  ENSG00000063015_25 (sequence is synthesized)
tctccaggctccagggaaaaagctccctgcagctgccccgcccccgcccccgcccctacaaccgcattaccatagagtcagcgtttgacaatccaacttacgagactggatctctttcct

SEQ ID NO: 43433 - DNA, 120 bp, Artificial Sequence
  ENSG00000063015_26 (sequence is synthesized)
ttgcaggagacgagagaatatgaagtctccatctaggtgggggcagtctagggaagtcaactcagacttgcaccacagtccagcagcaaggctccttgcttcctgctgtccctccacctc

SEQ ID NO: 43434 - DNA, 120 bp, Artificial Sequence
  ENSG00000063015_27 (sequence is synthesized)
ctgtatataccacctaggaggagatgccaccaagccctcaagaagttgtgcccttccccgcctgcgatgcccaccatggcctattttcttggtgtcattgcccacttggggcccttcatt

SEQ ID NO: 43435 - DNA, 120 bp, Artificial Sequence
  ENSG00000063015_28 (sequence is synthesized)
gggcccatgtcagggggcatctacctgtgggaagaacatagctggagcacaagcatcaacagccagcatcctgagcctcctcatgccctggaccagcctggaacacactagcagagcagg

SEQ ID NO: 43436 - DNA, 120 bp, Artificial Sequence
  ENSG00000063015_29 (sequence is synthesized)
agtacctttctccacatgaccaccatcccgccctggcatggcaacctgcagcaggattaacttgaccatggtgggaactgcaccagggtactcctcacagcgccatcaccaatggccaaa

SEQ ID NO: 43437 - DNA, 120 bp, Artificial Sequence
  ENSG00000063015_30 (sequence is synthesized)
actcctctcaacggtgacctctgggtagtcctggcatgccaacatcagcctcttgggaggtctctagttctctaaagttctggacagttctgcctcctgccctgtcccagtggaggcagt

SEQ ID NO: 43438 - DNA, 120 bp, Artificial Sequence
  ENSG00000063015_31 (sequence is synthesized)
aattctaggagatcctaaggggttcagggggaccctacccccacctcaggttgggcttccctgggcactcatgctccacaccaaagcaggacacgccattttccactgaccaccctatac

SEQ ID NO: 43439 - DNA, 120 bp, Artificial Sequence
  ENSG00000063015_32 (sequence is synthesized)
cctgaggaaagggagactttcctccgatgtttatttagctgttgcaaacatcttcaccctaatagtccctcctccaattccagccacttgtcaggctctcctcttgaccactgtgttatg

SEQ ID NO: 43440 - DNA, 120 bp, Artificial Sequence
  ENSG00000063015_33 (sequence is synthesized)
ggataaggggagggggtgggcatattctggagaggagcagaggtccaaggacccaggaatttggcatggaacaggtggtaggagagccccagggagacgcccaggagctggctgaaagcc

SEQ ID NO: 43441 - DNA, 120 bp, Artificial Sequence
  ENSG00000063015_34 (sequence is synthesized)
agccactttgtacatgtaatgtattatatggggtctgggctccagccagagaacaatcttttatttctgttgtttccttattaaaatggtgtttttggaaaaaaaaaaaaaaaaaaaaaa

SEQ ID NO: 43442 - DNA, 120 bp, Artificial Sequence
  ENSG00000063015_35 (sequence is synthesized)
tcatctgtgaaatggggatgatacttttcatggggttatcagccacgtactctaagtatttcattcctggtagatggccaatcagtttttatcgaacctaatagatgggaaggggacaaa

SEQ ID NO: 43443 - DNA, 120 bp, Artificial Sequence
  ENSG00000063015_36 (sequence is synthesized)
tggggggacacactagcataatggtagggacagatacgtagggggtagacccatacgacatgaagaagttagctggcctggaacaaagccagggtggattggcctctgcttagttctcct

SEQ ID NO: 43444 - DNA, 120 bp, Artificial Sequence
  ENSG00000063015_37 (sequence is synthesized)
ggtggcgggtccacggggatgggctcgggcctagggtctttctcccacaccctacccctctctgcctccatgctgtcactccttccaagtcagcccctgctcactcagtacttaggcccc

SEQ ID NO: 43445 - DNA, 120 bp, Artificial Sequence
  ENSG00000063015_38 (sequence is synthesized)
ctttccctgcccctctctttgggtccgggatccctaccacagctttgcaggaaacctctgcctggacccaggccctatggtccaagggaataaattctccagattttgaaaagcaaaaaa

SEQ ID NO: 43446 - DNA, 120 bp, Artificial Sequence
  ENSG00000063046_0 (sequence is synthesized)
tcttccggcaggaagtctgtgcgtcaggaggccggccaggactcagctccagccccgcgctcgcgtgtagccctacgtaaagcgtgaggggtttcgcgacaacccaggccccgccccttt

SEQ ID NO: 43447 - DNA, 120 bp, Artificial Sequence
  ENSG00000063046_1 (sequence is synthesized)
ggccacatgtcgcgcatgtcttcccgtcggacggcgtgccacctcgccgcgcagctttacgaacctagagcagcgccgccccgcctcctgtctccgtcctcacctccccgccccctccca

SEQ ID NO: 43448 - DNA, 120 bp, Artificial Sequence
  ENSG00000063046_2 (sequence is synthesized)
gcttcgcgtctcctagctcgacgcgcccgctataatcacgtgattgcctcatccgggtcttttgcgttctctttccctctcccaacatggcggcctcagcaaaaaagaagaataagaagg

SEQ ID NO: 43449 - DNA, 120 bp, Artificial Sequence
  ENSG00000063046_3 (sequence is synthesized)
ggaagactatctccctaacagactttctggctgaggatgggggtactggtggaggaagcacctatgtttccaaaccagtcagctgggctgatgaaacggatgacctggaaggagatgttt

SEQ ID NO: 43450 - DNA, 120 bp, Artificial Sequence
  ENSG00000063046_4 (sequence is synthesized)
cgaccacttggcacagtaacgatgacgatgtgtatagggcgcctccaattgaccgttccatccttcccactgctccacgggctgctcgggaacccaatatcgaccggagccgtcttccca

SEQ ID NO: 43451 - DNA, 120 bp, Artificial Sequence
  ENSG00000063046_5 (sequence is synthesized)
aatcgccaccctacactgcttttctaggaaacctaccctatgatgttacagaagagtcaattaaggaattctttcgaggattaaatatcagtgcagtgcgtttaccacgtgaacccagca

SEQ ID NO: 43452 - DNA, 120 bp, Artificial Sequence
  ENSG00000063046_6 (sequence is synthesized)
atccagagaggttgaaaggttttggttatgctgaatttgaggacctggattccctgctcagtgccctgagtctcaatgaagagtctctaggtaacaggagaattcgagtggacgttgctg

SEQ ID NO: 43453 - DNA, 120 bp, Artificial Sequence
  ENSG00000063046_7 (sequence is synthesized)
atcaagcacaggataaagacagggatgatcgttcttttggccgtgatagaaatcgggattctgacaaaacagatacagactggagggctcgtcctgctacagacagctttgatgactacc

SEQ ID NO: 43454 - DNA, 120 bp, Artificial Sequence
  ENSG00000063046_8 (sequence is synthesized)
cacctagaagaggtgatgatagctttggagacaagtatcgagatcgttatgattcagaccggtatcgggatgggtatcgggatgggtatcgggatggcccacgccgggatatggatcgat

SEQ ID NO: 43455 - DNA, 120 bp, Artificial Sequence
  ENSG00000063046_9 (sequence is synthesized)
atggtggccgggatcgctatgatgaccgaggcagcagagactatgatagaggctatgattcccggataggcagtggcagaagagcatttggcagtgggtatcgcagggatgatgactaca

SEQ ID NO: 43456 - DNA, 120 bp, Artificial Sequence
  ENSG00000063046_10 (sequence is synthesized)
gaggaggcggggaccgctatgaagaccgatatgacagacgggatgatcggtcgtggagctccagagatgattactctcgggatgattataggcgtgatgatagaggtcccccccaaagac

SEQ ID NO: 43457 - DNA, 120 bp, Artificial Sequence
  ENSG00000063046_11 (sequence is synthesized)
ccaaactgaatctaaagcctcggagtactcctaaggaagatgattcctctgctagtacctcccagtccactcgagctgcttctatctttggaggggcaaagcctgttgacacagctgcta

SEQ ID NO: 43458 - DNA, 120 bp, Artificial Sequence
  ENSG00000063046_12 (sequence is synthesized)
gagaaagagaagtagaagaacggctacagaaggaacaagagaagttgcagcgtcagctggatgagccaaaactagaacgacggcctcgggagagacacccaagctggcgaagtgaagaaa

SEQ ID NO: 43459 - DNA, 120 bp, Artificial Sequence
  ENSG00000063046_13 (sequence is synthesized)
ctcaggaacgggaacggtcgaggacaggaagtgagtcatcacaaactgggacctccaccacatctagcagaaatgcacgaaggagagagagtgagaagtctctagaaaatgaaacactca

SEQ ID NO: 43460 - DNA, 120 bp, Artificial Sequence
  ENSG00000063046_14 (sequence is synthesized)
ataaggaggaagattgccactctccaacttctaaacctcccaaacctgatcagcccctaaaggtaatgccagcccctccaccaaaggagaatgcttgggtgaagcgaagttctaaccctc

SEQ ID NO: 43461 - DNA, 120 bp, Artificial Sequence
  ENSG00000063046_15 (sequence is synthesized)
ctgctcgatctcagagctcagacacagagcagcagtcccctacaagtggtgggggaaaagtagctccagctcaaccatctgaggaaggaccaggaaggaaagatgaaaataaagtagatg

SEQ ID NO: 43462 - DNA, 120 bp, Artificial Sequence
  ENSG00000063046_16 (sequence is synthesized)
ggatgaatgccccaaaaggccaaactgggaactctagccgtggtccaggcgacggagggaacagagaccactggaaggagtcagataggaaagatggcaaaaaggatcaagactccagat

SEQ ID NO: 43463 - DNA, 120 bp, Artificial Sequence
  ENSG00000063046_17 (sequence is synthesized)
gctctctctgttgatggtgaagatgaaaatgagggagaagattatgccgaatagacctctacatcctgtgcttttctcctagtttctctccaccctggaacattcgagagcaaatcaaaa

SEQ ID NO: 43464 - DNA, 120 bp, Artificial Sequence
  ENSG00000063046_18 (sequence is synthesized)
cctctatccagacaagacaaaataaaactcaccatctcctgaagacctttcttacctttttttaaaaacaaaaaatgaaattattttgcatgctgctgcagcctttaaagtattgaagta

SEQ ID NO: 43465 - DNA, 120 bp, Artificial Sequence
  ENSG00000063046_19 (sequence is synthesized)
actggagaattgccaatacagccagagagaaagggactacagctttttagaggaaaagttgtggtgcgttatgtcaccatgcagttgccagtgtgattagtgcctaggggtctccattta

SEQ ID NO: 43466 - DNA, 120 bp, Artificial Sequence
  ENSG00000063046_20 (sequence is synthesized)
gcagaaatggtaatgacagtgatataatgcctggaacctggttgggcagtaggggagggaggtagaaggaaaagtgtgagatttctaccttttagtttttatcctattgtggcatatatg

SEQ ID NO: 43467 - DNA, 120 bp, Artificial Sequence
  ENSG00000063046_21 (sequence is synthesized)
aattctcaaacattatctgaataaattttccactcttggaaaggtagatttagcctcaagttgttctagtctccaggaggctgccagcccctcctcttatttaattctgagttttggggg

SEQ ID NO: 43468 - DNA, 120 bp, Artificial Sequence
  ENSG00000063046_22 (sequence is synthesized)
ccagcctagagggaattccttttttttttttaaccccccaggggggtagttgggagtgagactataggccataaagaatgggactgcattggaccaaaataaatgggaaaatcgtggttt

SEQ ID NO: 43469 - DNA, 120 bp, Artificial Sequence
  ENSG00000063046_23 (sequence is synthesized)
gaaaagaagcttttgggaagtgatgagtcattttgcaccaggtaataggggaaaattgtgtgacctccagcaaacacatgaatggttatttcctggagccggaagcacttgggggtcgtg

SEQ ID NO: 43470 - DNA, 120 bp, Artificial Sequence
  ENSG00000063046_24 (sequence is synthesized)
gtaattcccagtgttttctgtgtcctagttttaccctttctaaacactgtcctttttgaaagttttgaatatatccacattctattgaaaccttgaaactaaaaatttagactcttatca

SEQ ID NO: 43471 - DNA, 120 bp, Artificial Sequence
  ENSG00000063046_25 (sequence is synthesized)
tcatcttaagttcttcatgctactcttaacctcccaaaaagcagtatctaagtcacatacatgatgtcttgggcattttctcagccatggagaactctgaaaggaagaatcgctgctttt

SEQ ID NO: 43472 - DNA, 120 bp, Artificial Sequence
  ENSG00000063046_26 (sequence is synthesized)
ctcaagcaaatcggtttcttgatgtcttttggttctccttgcctgctcctgatgcttggaccccttttattgatcagagtgctctagaataatggatggtcttggatgatggataaatag

SEQ ID NO: 43473 - DNA, 120 bp, Artificial Sequence
  ENSG00000063046_27 (sequence is synthesized)
ggacagggacagttaaattgggagcctttcttacaaccttgatgggatttttccccccaagtttccttctccactgaaatgccacactaatgcttgttggattcatgaggtggccagacc

SEQ ID NO: 43474 - DNA, 120 bp, Artificial Sequence
  ENSG00000063046_28 (sequence is synthesized)
aatgtgttgttttgttgttgtttttttaagcttcccttgagagaataaatggtaatggagagaactatttaacaaggtcctggtttctcttgcaacacagtagctaaacttgcctgcttt

SEQ ID NO: 43475 - DNA, 120 bp, Artificial Sequence
  ENSG00000063046_29 (sequence is synthesized)
tatatgcatttttgtagggatcagcttggtagacagtattagcggagaaacaccttgatcttggtttgcaagcccttctcccatcagtcctagattaggccctgttcagccatgcagggg

SEQ ID NO: 43476 - DNA, 120 bp, Artificial Sequence
  ENSG00000063046_30 (sequence is synthesized)
tgttggtttatgcgtgctgcagcagtgggcataatgaatataatttacccagtggacaaaggtgtgtaccaagtgaatttaaataattggtgtggattggccagtagctaagaagtgggc

SEQ ID NO: 43477 - DNA, 120 bp, Artificial Sequence
  ENSG00000063046_31 (sequence is synthesized)
ttttaaagagtattgaagattgaaagggtttttctttcttttttaaaaaagaaaaacaaactattgattgtagataatgaaaagctagggtttgccctcttcatgtctactctccttcca

SEQ ID NO: 43478 - DNA, 120 bp, Artificial Sequence
  ENSG00000063046_32 (sequence is synthesized)
aatagttatatccaaaactgtttttccctctcccctaccttgtcccccctattaaaatagaaacagggattgattaatgtcccgctcctgaatacatgtaaaatttgtacaaaaatatct

SEQ ID NO: 43479 - DNA, 120 bp, Artificial Sequence
  ENSG00000063046_33 (sequence is synthesized)
tctatgaaaatgatttgtaatctgtagacttattacctgggagatgtcttgatgtaaaatcccatcctttgggttgtgggttttttgttttctccaaataaatctgatctttaaagttca

SEQ ID NO: 43480 - DNA, 120 bp, Artificial Sequence
  ENSG00000063046_34 (sequence is synthesized)
aagagtgcttctgctatgcccagacgttcaaggtcactcaagggatttgtgcataatggggcaaaaggttggttaatatggtcctatgctctcagtctctaggtaacaggagaattcgag

SEQ ID NO: 43481 - DNA, 120 bp, Artificial Sequence
  ENSG00000063046_35 (sequence is synthesized)
gcagcagtcccctacaaggtgagtcagtttggaaacagtagttggttaactgcagattctaaaatactgtgatgtaatgatggaagatctcctacgggatgccagcgttgtatagcacct

SEQ ID NO: 43482 - DNA, 120 bp, Artificial Sequence
  ENSG00000063046_36 (sequence is synthesized)
ataagttatgctggctttagtctcttagtgtgctggaactggctcataagacctagttgttccattttctggagttccaccactttgatagcttgaaatcagctatgatgggagtactaa

SEQ ID NO: 43483 - DNA, 120 bp, Artificial Sequence
  ENSG00000063046_37 (sequence is synthesized)
tgccgcacaaatctgcaaatactgtaagtcagaggcttcccttttgccacatattggcagtatggtagggggtaacttcctttcatttctcttaagtcttctcatttgtaagcaaaatag

SEQ ID NO: 43484 - DNA, 120 bp, Artificial Sequence
  ENSG00000063046_38 (sequence is synthesized)
actccagcctgggcgacagagttaagactccaaaagaaaagaaaatagcaatactaatcctgcatgatgtgatgattagaaagcatatggcactttagtgttcaaattactgctttcatt

SEQ ID NO: 43485 - DNA, 120 bp, Artificial Sequence
  ENSG00000063046_39 (sequence is synthesized)
gtaatctttcccatattttaatgttccataacattgagtatgattttgttttctataaagcttacccactgcatttggaggatgattatgtttcttggttgttttctccctgaaacaact

SEQ ID NO: 43486 - DNA, 120 bp, Artificial Sequence
  ENSG00000063046_40 (sequence is synthesized)
gatgaatgtgattacctgttttccttctagtggtgggggaaaagtagctccagctcaaccatctgaggaaggaccaggaaggaaaggtgagctcatagtatgggaaataggtttttcacc

SEQ ID NO: 43487 - DNA, 120 bp, Artificial Sequence
  ENSG00000063046_41 (sequence is synthesized)
cacctagaagcctaaataaaaaggcctccaaaattagattttgaagagcagtgtgtctcgcacctgataccgtgttaagagttcttgggttggccaggcgcaggggctcacacctgtaat

SEQ ID NO: 43488 - DNA, 120 bp, Artificial Sequence
  ENSG00000063046_42 (sequence is synthesized)
caagactctgtctcaaaaaaaaaagaattattgggttatctaccttttcttgccagtagagggaggagtggcctctttggagaaagtatgaaaccctgccctttcctggtagaacatttc

SEQ ID NO: 43489 - DNA, 120 bp, Artificial Sequence
  ENSG00000063046_43 (sequence is synthesized)
cctggtagaacatttctttgacggggagaaaaaaatcggaaggaaattaaccaaggtcactacagagcgtcataatctttatttccagcttgcttttcatgatggcatatccctacatgg

SEQ ID NO: 43490 - DNA, 120 bp, Artificial Sequence
  ENSG00000063046_44 (sequence is synthesized)
aactttttagtggattttgtttgttttttgtatttttgtgtgctgtagaggatgtggaaagaagggcttcaggaaggaagtctgggttggggtgaggttagtttccctcagtacatgtgg

SEQ ID NO: 43491 - DNA, 120 bp, Artificial Sequence
  ENSG00000063127_0 (sequence is synthesized)
agatcgaggggtgtcgcccaaaccgatctgtcgacgcctgaaggggcctgaggagattgctaggcttctcagctggggcttcttcaccctcatttttgtccgactggctggactgaagaa

SEQ ID NO: 43492 - DNA, 120 bp, Artificial Sequence
  ENSG00000063127_1 (sequence is synthesized)
cctggcagaagccttggggctagggtctcctcaggaagatgaaccctcccttgcagaagcgggagctgccccagagagtctgtgtgagatgaagacagaggcccagccttcgacatcctt

SEQ ID NO: 43493 - DNA, 120 bp, Artificial Sequence
  ENSG00000063127_2 (sequence is synthesized)
gctggcaaacacctcatggactggcacagtgatttctgacagtgtcccaggaagtcaaacgtgggaagacaagggttcattgacccggtctgcaacatcttggacctcagaggcccaagt

SEQ ID NO: 43494 - DNA, 120 bp, Artificial Sequence
  ENSG00000063127_3 (sequence is synthesized)
ttcagcagcccgggttgcagaggctcaggccaggaccagtcagcccaagcaaatttctgtattggaggcgttaactgcctcagccctgaaccagaaacccacgcatgagaaggtgcagat

SEQ ID NO: 43495 - DNA, 120 bp, Artificial Sequence
  ENSG00000063127_4 (sequence is synthesized)
gacagagaagaaagagagtgaggtcctccttgcccgtccgttctggtccagcaaaactgagtatattctggctcaggtgggcttctctatgaagccatcttgtctctggcgctttgccta

SEQ ID NO: 43496 - DNA, 120 bp, Artificial Sequence
  ENSG00000063127_5 (sequence is synthesized)
cctgtggcttaacagtggaggctgcagtttcgctgccatctacatcttcatgctgttcctggtcggggttcctcttctcttcctggagatggcagctggtcagagcatgcgtcagggtgg

SEQ ID NO: 43497 - DNA, 120 bp, Artificial Sequence
  ENSG00000063127_6 (sequence is synthesized)
catgggtgtatggaagatcattgccccctggattggtggtgtggggtattctagcttcatggtgtgcttcatcctcggcctgtacttcaatgtggtcaattcctggatcatcttctacat

SEQ ID NO: 43498 - DNA, 120 bp, Artificial Sequence
  ENSG00000063127_7 (sequence is synthesized)
gagccagtccttccagtttcccgttccatgggagaaatgtcccttaacgatgaactctagtggctttgatcctgaatgtgaacggacaacaccctccatatacttctggtaccagcaggc

SEQ ID NO: 43499 - DNA, 120 bp, Artificial Sequence
  ENSG00000063127_8 (sequence is synthesized)
cttgaaggcctcagacagaatcgaggatggcgggtcaccagtctacagtctggtcctgcccttctttctttgctggtgtcttgttggtgctttcatgatcaatgggctcaagtccactgg

SEQ ID NO: 43500 - DNA, 120 bp, Artificial Sequence
  ENSG00000063127_9 (sequence is synthesized)
gaaggtaatctatgtcttggtactgctcccctgtttcatcattgtcggtttcttcatccggactctactcctggaaggggcaaaatttggccttcaacagttggtggttgccaagatatc

SEQ ID NO: 43501 - DNA, 120 bp, Artificial Sequence
  ENSG00000063127_10 (sequence is synthesized)
ggatgtgtacaatatgagtgtgtggtctctagcagggggtcaagttttgtctaacacaggcataggccttggctccgttgcctccttagcctcctacatgccccagtccaacaactgtct

SEQ ID NO: 43502 - DNA, 120 bp, Artificial Sequence
  ENSG00000063127_11 (sequence is synthesized)
cagtgatgcctttctcgtgtctgtgataaacctgctcactttgttggttttcacatctttcaacttctgtgtcctgggcttctgggcgacagtcatcacacatcgctgctgtgagaggaa

SEQ ID NO: 43503 - DNA, 120 bp, Artificial Sequence
  ENSG00000063127_12 (sequence is synthesized)
aaacctagggaaactgcctcctgatgccaagccccctgtcaacctgctttacaacccaacctccatctacaatgcctggctcagtggccttccccagcacatcaaaagcatggttctccg

SEQ ID NO: 43504 - DNA, 120 bp, Artificial Sequence
  ENSG00000063127_13 (sequence is synthesized)
cgaggtgactgagtgcaacatagagactcagtttcttaaggctagcgagggcccaaagtttgcattcctgtcctttgttgaagccatgtccttccttcctccgtctgtcttctggtcttt

SEQ ID NO: 43505 - DNA, 120 bp, Artificial Sequence
  ENSG00000063127_14 (sequence is synthesized)
tatcttcttcctgatgttgctggccatggggctgagcagcgcaatagggattatgcagggcatcattactccactccaggacaccttctctttcttcaggaaacatacaaagctgctcat

SEQ ID NO: 43506 - DNA, 120 bp, Artificial Sequence
  ENSG00000063127_15 (sequence is synthesized)
agtgggagtctttttgctcatgttcgtgtgcggcctcttcttcactcgaccttcaggcagctacttcatcagactgctgagtgactactggatagtcttccccatcatcgtcgttgtcgt

SEQ ID NO: 43507 - DNA, 120 bp, Artificial Sequence
  ENSG00000063127_16 (sequence is synthesized)
atttgaaaccatggctgtatcctgggcctatggggccaggaggttccttgcagacctgacgatcctgttgggccaccccatctctcccatctttggttggctgtggccccatctgtgtcc

SEQ ID NO: 43508 - DNA, 120 bp, Artificial Sequence
  ENSG00000063127_17 (sequence is synthesized)
agttgtgctgctaatcatctttgtgaccatgatggttcatctttgtatgaagccgatcacctacatgtcctgggactcaagcacctcaaaagaggtgcttcgaccatacccaccgtgggc

SEQ ID NO: 43509 - DNA, 120 bp, Artificial Sequence
  ENSG00000063127_18 (sequence is synthesized)
actgctcttgatgatcaccctttttgccattgtcatcctccccatccctgcatactttgtatactgccgcatacataggattcccttcaggcccaagagcggagacgggcctatgacagc

SEQ ID NO: 43510 - DNA, 120 bp, Artificial Sequence
  ENSG00000063127_19 (sequence is synthesized)
ctccacatccctacccctaagtcaccagctaacacccagtaaagaggttcaaaaggaagaaattctacaagttgatgaaacaaagtacccatcaacttgtaatgtgacttcctaacttca

SEQ ID NO: 43511 - DNA, 120 bp, Artificial Sequence
  ENSG00000063127_20 (sequence is synthesized)
ttaatttggcttcacataacatatcccttagaacagatccaatagacaactcttaatatcagcttgcaactgttgatctccctggatccagaaccacttttatttccaagaggaggggca

SEQ ID NO: 43512 - DNA, 120 bp, Artificial Sequence
  ENSG00000063127_21 (sequence is synthesized)
ttctttgggggtgttcatggggcctggacttgcaatcccttcctgggtcccatcttacctggtgaccaccatcattgttttccccatcctcttcctcaacacacatacatgcacaacaca

SEQ ID NO: 43513 - DNA, 120 bp, Artificial Sequence
  ENSG00000063127_22 (sequence is synthesized)
tatacaatactagtgatgtctaccagtcctgctacttctggggtgcctgtctcctggaatggagctggaggagcaatgctgttggtgaataaatcagtctactggaactccaaggactgg

SEQ ID NO: 43514 - DNA, 120 bp, Artificial Sequence
  ENSG00000063127_23 (sequence is synthesized)
atgtaagcagatctttttttcctatagatgtctcagatgttcagttttcctgtcacaaggcttccagtctgtattagttcattttcacactgctaataaagacatacctgaaactgggaa

SEQ ID NO: 43515 - DNA, 120 bp, Artificial Sequence
  ENSG00000063127_24 (sequence is synthesized)
gtgagcctcccccaggacccagaacccctttgggagtaggggccagacctttcaattcactctgggtgaaagaacccagtcatctcattctcttactgcccgaagactcatgggttttct

SEQ ID NO: 43516 - DNA, 120 bp, Artificial Sequence
  ENSG00000063127_25 (sequence is synthesized)
gctttggttccccacccatccttcccctccacaactcttccttttctcttggggattttgatattctgaacccttttcccatctctccacagtcaaaagaggtgcttcgaccatacccac

SEQ ID NO: 43517 - DNA, 76 bp, Artificial Sequence
  ENSG00000063127_26 (sequence is synthesized)
ttgttggttttcacatctttcaacttctgtgtcctgggcttctgggcgacagtcatcacacatcgctgctgtgaga

SEQ ID NO: 43518 - DNA, 120 bp, Artificial Sequence
  ENSG00000063127_27 (sequence is synthesized)
ctgtataatgtttcagtatatgaatataccacagtttttaaaaatccattcaactattgataacatttggagtctttccagttttatgctattaaaacaatgttgctgcaaacattctta

SEQ ID NO: 43519 - DNA, 120 bp, Artificial Sequence
  ENSG00000063127_28 (sequence is synthesized)
tgcatgttcctgatgtactacatatgtgcacatttttctgggatatgagttagattgttggggcatagttgtctattcttgggtaacaaatcactctggaagtaaatggattaaaacaac

SEQ ID NO: 43520 - DNA, 120 bp, Artificial Sequence
  ENSG00000063169_0 (sequence is synthesized)
gcgcggccagagcggccggggacaggctccgaggcaggcccgacccgcctccccggcgccgccgtggctcgacggagaccagctaggctggcccccaagaggaccctttccaagtcccca

SEQ ID NO: 43521 - DNA, 120 bp, Artificial Sequence
  ENSG00000063169_1 (sequence is synthesized)
gctgggggccctgtgtagacctggagtggacacgcccctccttcccttcatgattcgtttgtagcgcagtggcgatggatgatgaggatgggagatgcttactagacgtgatttgtgacc

SEQ ID NO: 43522 - DNA, 120 bp, Artificial Sequence
  ENSG00000063169_2 (sequence is synthesized)
cacaggccctcaatgacttcttgcatggatccgagaagcttgacagtgatgacctcctggataatcccggggaggcccaaagtgccttctatgaaggtcctgggctccatgtgcaagaag

SEQ ID NO: 43523 - DNA, 120 bp, Artificial Sequence
  ENSG00000063169_3 (sequence is synthesized)
cttccggcaaccacctgaacccagagcccaaccagccggcccccagtgtggacctagacttcctggaagatgacatcctgggctctcctgcgacagggggcggcggcgggggcagtgggg

SEQ ID NO: 43524 - DNA, 120 bp, Artificial Sequence
  ENSG00000063169_4 (sequence is synthesized)
gcgctgaccagccctgtgacatcctccagcagagcctccaagaggccaacatcacggagcagacgctggaggccgaggctgagctggacctgggtcccttccagctgcccaccctgcagc

SEQ ID NO: 43525 - DNA, 120 bp, Artificial Sequence
  ENSG00000063169_5 (sequence is synthesized)
ccgacgggcgctggaggggcagcggccgtggctgcggggccccaagccctcttcccaggcagcaccgacctgctggggctgcagggcccgcctaccgtgctgacccaccaggccctggtg

SEQ ID NO: 43526 - DNA, 120 bp, Artificial Sequence
  ENSG00000063169_6 (sequence is synthesized)
tgacccaccaggccctggtgccgccccaggacgtggtcaacaaggccctgagtgtgcagcccttcctgcagcctgtgggcctgggcaatgtgacactgcagcccatcccgggcctccaag

SEQ ID NO: 43527 - DNA, 120 bp, Artificial Sequence
  ENSG00000063169_7 (sequence is synthesized)
gcctgcccaatggcagccctgggggtgccacggcggccacactgggcctggcgcccatccaggtggtgggccagcccgtcatggcgctcaacacgcccacctcccagctcctggccaagc

SEQ ID NO: 43528 - DNA, 120 bp, Artificial Sequence
  ENSG00000063169_8 (sequence is synthesized)
aggtgcccgtcagcggctacctggcctcggcggctggcccctcggagcccgtgacgctggcgtcggccggtgtctcgccacagggggctggcctggtcatccagaagaacctctcggccg

SEQ ID NO: 43529 - DNA, 120 bp, Artificial Sequence
  ENSG00000063169_9 (sequence is synthesized)
ctgtggccaccacgctcaatgggaactctgtgttcggaggcgcgggggccgcctcggctcccaccgggacgccctcgggacagccgctggcggtggccccaggcctcggctcgtcgccac

SEQ ID NO: 43530 - DNA, 120 bp, Artificial Sequence
  ENSG00000063169_10 (sequence is synthesized)
tggtcccggcgcccaacgtgatcctgcatcgcacacccacgcccatccagcccaagcccgcgggggtgctgccgcccaagctctaccagctgacgcccaagccgtttgcgcccgcgggcg

SEQ ID NO: 43531 - DNA, 120 bp, Artificial Sequence
  ENSG00000063169_11 (sequence is synthesized)
ccacgctcaccatccagggcgagccgggggcgctcccgcagcagcccaaggccccgcagaacctgacgttcatggcggcggggaaggcgggccagaacgtggtgctgtcgggcttccccg

SEQ ID NO: 43532 - DNA, 120 bp, Artificial Sequence
  ENSG00000063169_12 (sequence is synthesized)
cgcctgcgctgcaagcgaacgtcttcaagcagccaccggccaccaccaccggagcggccccgccgcagccccccggggccctgagcaaacccatgagcgtccacctcctgaaccaaggca

SEQ ID NO: 43533 - DNA, 120 bp, Artificial Sequence
  ENSG00000063169_13 (sequence is synthesized)
gcagcatcgtcatccccgcccagcacatgctgccgggccagaaccagttcctactgcctggcgccccggcggtccagctcccgcagcagctctcagccctgccggccaacgtgggcgggc

SEQ ID NO: 43534 - DNA, 120 bp, Artificial Sequence
  ENSG00000063169_14 (sequence is synthesized)
agatcctggcggccgctgccccccacacaggtggacagctcatcgcgaaccccatcctcacaaaccagaacctggcgggcccactgagcctgggccccgtgttggccccccactccgggg

SEQ ID NO: 43535 - DNA, 120 bp, Artificial Sequence
  ENSG00000063169_15 (sequence is synthesized)
cccacagcgcgcacatcctctccgccgctcccatccaggtgggccagcctgcgctcttccagatgcccgtgtcgctggcggcgggcagcctgcccacgcagagccagccagcgcccgccg

SEQ ID NO: 43536 - DNA, 120 bp, Artificial Sequence
  ENSG00000063169_16 (sequence is synthesized)
gccaccactgtcctccagggggtcaccctgccccccagcgccgtggccatgctcaacacccccgacggcctggtgcagccggccacccctgccgctgccaccggggaggccgcgcctgtc

SEQ ID NO: 43537 - DNA, 80 bp, Artificial Sequence
  ENSG00000063169_17 (sequence is synthesized)
cgcctgtcctcacggtgcagcctgccccccaggcgccccccgcggtcagcacacccctgcccctgggcctccagcagccg

SEQ ID NO: 43538 - DNA, 120 bp, Artificial Sequence
  ENSG00000063169_18 (sequence is synthesized)
ccgccccgcctcaggccaccaccccccagcccagccctggcctggcgtctagcccggagaagatcgtcctggggcagccgccctctgccacccccacggccatcctcactcaggactccc

SEQ ID NO: 43539 - DNA, 120 bp, Artificial Sequence
  ENSG00000063169_19 (sequence is synthesized)
tgcagatgttcctgccccaggagaggagccagcagcccctctccgcagagggcccccacctctccgtgcctgcctcggtcatagtcagcgccccgcctcccgcccaagacccagccccag

SEQ ID NO: 43540 - DNA, 120 bp, Artificial Sequence
  ENSG00000063169_20 (sequence is synthesized)
ccacccccgtcgccaaaggagctggcctcggccctcaggcccccgacagccaggcttccccggctccggccccccagatcccggcagcggctccgctgaagggcccaggcccctcttcgt

SEQ ID NO: 43541 - DNA, 120 bp, Artificial Sequence
  ENSG00000063169_21 (sequence is synthesized)
ccccgtcactacctcaccaggcccctctgggggacagcccccacctgccctccccacaccccacccggcccccttcccgcccaccctcccggccacagagtgtgtcccgccctccctcag

SEQ ID NO: 43542 - DNA, 120 bp, Artificial Sequence
  ENSG00000063169_22 (sequence is synthesized)
agccacccttgcacccttgccccccaccccaggcccccccaactctgcctggcatctttgtcatccaaaaccagctaggcgttcccccgcctgccagcaacccggcccctactgccccag

SEQ ID NO: 43543 - DNA, 120 bp, Artificial Sequence
  ENSG00000063169_23 (sequence is synthesized)
cctcctcctctgagacgtcctccaggttgccagcccctacgccatccgacttccagctccagttcccacccagccaggggccccacaagtcccccactccccctccaaccctccacctgg

SEQ ID NO: 43544 - DNA, 120 bp, Artificial Sequence
  ENSG00000063169_24 (sequence is synthesized)
tccctgagccggcagcaccccccccaccgcctcctcggaccttccagatggtgaccacccccttcccagcgctgccccagccgaaggctcttctcgagagatttcaccaggtgccgtccg

SEQ ID NO: 43545 - DNA, 120 bp, Artificial Sequence
  ENSG00000063169_25 (sequence is synthesized)
gaatcatcctccagaacaaggctgggggggcccctgccgccccgcagacctccaccagcctggggcccctcaccagccccgctgcgtctgtgctggtcagtgggcaggccccatctggga

SEQ ID NO: 43546 - DNA, 120 bp, Artificial Sequence
  ENSG00000063169_26 (sequence is synthesized)
cccccactgcccccagccacgcccccgccccggcacccatggccgccacaggcctccctcctctgcttccagccgagaacaaggcttttgccagcaacctcccgaccctgaatgtggcca

SEQ ID NO: 43547 - DNA, 120 bp, Artificial Sequence
  ENSG00000063169_27 (sequence is synthesized)
aggccgcttcctccgggccagggaagccctccgggctgcagtatgagagcaaactgagtggcctgaagaagccccccacgcttcagcccagcaaggaagcctgtttcctggagcatttgc

SEQ ID NO: 43548 - DNA, 120 bp, Artificial Sequence
  ENSG00000063169_28 (sequence is synthesized)
acaaacaccagggctccgtcctgcaccccgactacaagacggccttcccctcctttgaggacgccctgcatcgcctcctgccctaccatgtctaccagggcgccctcccctcccccagtg

SEQ ID NO: 43549 - DNA, 120 bp, Artificial Sequence
  ENSG00000063169_29 (sequence is synthesized)
actaccacaaagtggacgaggagtttgagacggtctccacgcagctgctgaaacgcacccaggccatgctcaataaatatcggctcctgctcctggaggagtcccggagggtgagcccct

SEQ ID NO: 43550 - DNA, 120 bp, Artificial Sequence
  ENSG00000063169_30 (sequence is synthesized)
cagcggagatggtaatgatcgaccgaatgttcattcaggaggagaagaccacccttgccttggataaacagctggccaaggagaagccggacgagtacgtgtcttcctcccgctcgctcg

SEQ ID NO: 43551 - DNA, 120 bp, Artificial Sequence
  ENSG00000063169_31 (sequence is synthesized)
gcctccccatcgcagcctcttccgagggtcatcggcttcccggccacggccccctgtcgtcttcagctcccggggcctccacccagccccctccacacctgcccaccaagcttgtgatcc

SEQ ID NO: 43552 - DNA, 120 bp, Artificial Sequence
  ENSG00000063169_32 (sequence is synthesized)
ggcacggcggggcaggcggctccccttcggtcacctgggcccgggcgtcctcctccctgtcctcctcttcctcctcctcctctgccgcctcctccttggacgccgacgaggacggcccca

SEQ ID NO: 43553 - DNA, 120 bp, Artificial Sequence
  ENSG00000063169_33 (sequence is synthesized)
tgccctcccgcaaccgcccgcccatcaagacctacgaggcccggagccgcatcgggctcaagctcaagatcaagcaggaagccgggctcagcaaggtcgtgcacaacacggccctggacc

SEQ ID NO: 43554 - DNA, 120 bp, Artificial Sequence
  ENSG00000063169_34 (sequence is synthesized)
gcacaacacggccctggaccccgtgcaccagcccccgccaccccccgctaccctcaaggtggccgagcccccgccacggccgccaccaccaccgccgcccacgggccagatgaacggcac

SEQ ID NO: 43555 - DNA, 120 bp, Artificial Sequence
  ENSG00000063169_35 (sequence is synthesized)
gatgaacggcacggtggaccacccgccgcctgccgcccccgagcgcaagcccctgggcaccgccccgcactgcccgcgcctgccactgcgcaagacctaccgcgagaacgtggggggccc

SEQ ID NO: 43556 - DNA, 120 bp, Artificial Sequence
  ENSG00000063169_36 (sequence is synthesized)
cacggggaggcagcccggcgccgctgcccgccaaagtggacgaggccaccagcgggctcatccgcgagctggcggccgtggaggacgagctgtaccagcgtatgctgaagggccccccgc

SEQ ID NO: 43557 - DNA, 120 bp, Artificial Sequence
  ENSG00000063169_37 (sequence is synthesized)
cagagcccgcagccagcgccgcccaaggcaccggggaccccgactgggaggcgcccgggctgccccctgccaagcggcgcaagtccgagtcgcccgacgtggaccaggccagcttctcca

SEQ ID NO: 43558 - DNA, 120 bp, Artificial Sequence
  ENSG00000063169_38 (sequence is synthesized)
gcgacagcccgcaggatgacacgctcaccgagcacctgcagagcgccatcgacagcatcctgaacctgcagcaggcccccggccggacgcccgcgccctcgtacccccacgctgcctcgg

SEQ ID NO: 43559 - DNA, 120 bp, Artificial Sequence
  ENSG00000063169_39 (sequence is synthesized)
ccggcacccccgcatccccgccgcccctgcacaggcccgaggcctacccaccctccagtcacaacggtggcctcggcgccaggacgttgaccagataacaccgggccgcctccccttccc

SEQ ID NO: 43560 - DNA, 120 bp, Artificial Sequence
  ENSG00000063169_40 (sequence is synthesized)
cgtcccctcctcccgaagacgccgggacagtcgggtgtccgccctcagcctcctggggactcgagccggggatcccctgacggtttttcttgcctaagttatttgagtcacaaaggcctc

SEQ ID NO: 43561 - DNA, 120 bp, Artificial Sequence
  ENSG00000063169_41 (sequence is synthesized)
cttccctgccgcctgcttcagctgggttgctggggggtgggcgtggatttagggagggggctgtgatgtaaaacgtctcccctgccaaaggaggggcaaagtgctgtgtcagttcctgtt

SEQ ID NO: 43562 - DNA, 120 bp, Artificial Sequence
  ENSG00000063169_42 (sequence is synthesized)
tcttcccatttcctggcacactctgcccctctgtccgggggacacgcgcatgtgtttgccagggatggggccaccgggttgatgccaacgctccgggtgcctgtcttgtctgtgtggctt

SEQ ID NO: 43563 - DNA, 120 bp, Artificial Sequence
  ENSG00000063169_43 (sequence is synthesized)
ctcagatggtggagggtgctgggagctggcagggtccttccagacagtctcagcctctccccgccgcccccaacaggctgtcaaacaaaaccggagagggggtgggggagccagcctccc

SEQ ID NO: 43564 - DNA, 120 bp, Artificial Sequence
  ENSG00000063169_44 (sequence is synthesized)
agcgtgctgtgcccgcaggcacccgtgtgacatccgcacgtccagctccgtgacctgtgtgtgtgtgtgtgtgcacaagtgagtgagagatttcgaacgcccacccctcgactttgaaat

SEQ ID NO: 43565 - DNA, 120 bp, Artificial Sequence
  ENSG00000063169_45 (sequence is synthesized)
ctgagcaaaacaagaaactggggtcttcctctcccccgaacctctccccagctagtcttccctctgttcttcctgcctccagccgcccgcgccagattttgaaatctcggagacaaaact

SEQ ID NO: 43566 - DNA, 120 bp, Artificial Sequence
  ENSG00000063169_46 (sequence is synthesized)
agtactgtaagataaatttttttgtactgtatttattgtgtataacgatttttttaaaggagaattctgtacatttagaactcttgtaaattaaaaaccgatcctttttttaaaactgta

SEQ ID NO: 43567 - DNA, 88 bp, Artificial Sequence
  ENSG00000063169_47 (sequence is synthesized)
aagaccacaggcacatgctgccacccctgactaatttttcttttttaaaatttttttctcactgcgttgcccaggctggtctcaaact

SEQ ID NO: 43568 - DNA, 120 bp, Artificial Sequence
  ENSG00000063169_48 (sequence is synthesized)
acatgctgccacccctgactaatttttcttttttaaaatttttttctcactgcgttgcccaggctggtctcaaactctttggctcaagccatccatcctcctacctcagcctcccaaagt

SEQ ID NO: 43569 - DNA, 120 bp, Artificial Sequence
  ENSG00000063169_49 (sequence is synthesized)
gaatgttctttcttgaacgtggctgccctgtcacctcagcattctttgcggcagctgtggcctaagcgtagccccttgctaacctcagctctttccttcccacctttcccggcctgcagc

SEQ ID NO: 43570 - DNA, 120 bp, Artificial Sequence
  ENSG00000063169_50 (sequence is synthesized)
ttttacgtcgagctctggaccttaattttgaaaaagtagtcattggtacttaaatgagtgcaaaggggtggccatagtgaaggaggggccaggagcgagtctgaagtctctagggtagga

SEQ ID NO: 43571 - DNA, 120 bp, Artificial Sequence
  ENSG00000063169_51 (sequence is synthesized)
gaggaagggtagttccgtggttaggggctcgatgctggagtcttggtttaaatcctggctctgccacttactaactgtgtgaccttgggcaagttacttaccttctctgtgtctctgtat

SEQ ID NO: 43572 - DNA, 120 bp, Artificial Sequence
  ENSG00000063169_52 (sequence is synthesized)
tctcattttgtaaagtgggggttatgatgatcagcttacaatctcttatctgacaccctcggggcctgatatgttctggaatctttttgcttttagaaaggcaatgagctcactccagcc

SEQ ID NO: 43573 - DNA, 120 bp, Artificial Sequence
  ENSG00000063169_53 (sequence is synthesized)
cgagactccgtctcaaaaaaaaagaaaggcaatgagctacctcaatgctgtcttctgatttacccccagtgggtttggggaagcactgtgtgatcaaacacactagtatttctggagtga

SEQ ID NO: 43574 - DNA, 120 bp, Artificial Sequence
  ENSG00000063169_54 (sequence is synthesized)
aagcactgtgtgatcaaacacactagtatttctggagtgaaatcgatgggtatccagagtagttgagataaatcatgaccataaataacctcatgtagccgggtgtggtggctcacacct

SEQ ID NO: 43575 - DNA, 72 bp, Artificial Sequence
  ENSG00000063169_55 (sequence is synthesized)
ctttgggaggctgaggcgggcgatcacctgtggtcaggagtgtgagaccagactgggtgtggtgtctggcac

SEQ ID NO: 43576 - DNA, 120 bp, Artificial Sequence
  ENSG00000063169_56 (sequence is synthesized)
aacaaacaaacaaaaaacctcatgtcatttcggaccagattttgaaattagatacctccttagccccatttttaaaaagttatgtatataattagagcagtgctgtccaatagaacttca

SEQ ID NO: 43577 - DNA, 120 bp, Artificial Sequence
  ENSG00000063169_57 (sequence is synthesized)
taattagagcagtgctgtccaatagaacttcatattttatttattgtttttttgtttgtttgtttgtagagacaggggtctcactactgtggccaggcaggtctcaaactcctgggctca

SEQ ID NO: 43578 - DNA, 120 bp, Artificial Sequence
  ENSG00000063169_58 (sequence is synthesized)
tgggattacaggcctgagccttgttttgtattctcttaatttacttatgtctgaatgagccccacgtggctcgtggcgctgtgccaggcacagtggttttagagttgggggaatttgggc

SEQ ID NO: 43579 - DNA, 120 bp, Artificial Sequence
  ENSG00000063169_59 (sequence is synthesized)
cttgctgaagagggtctcaccaagcctatcctgaggattggagggtccagggtgcagtctggtgcctggcaggtagtaggtgctcactgcacacagctcctcccagctcggtcggggggt

SEQ ID NO: 43580 - DNA, 120 bp, Artificial Sequence
  ENSG00000063176_0 (sequence is synthesized)
agtggctcccggaggacccggcgggcccagtgttggagagctgaaggtcaggccaggacagtgagacctgactccttgctcctaccagcctactatggcttaagacccagggccagggtc

SEQ ID NO: 43581 - DNA, 120 bp, Artificial Sequence
  ENSG00000063176_1 (sequence is synthesized)
ccgttgatgtaacagagcagaggaccagcagatgaatggacaccttgaagcagaggagcagcaggaccagaggccagaccaggagctgaccgggagctggggccacgggcctaggagcac

SEQ ID NO: 43582 - DNA, 120 bp, Artificial Sequence
  ENSG00000063176_2 (sequence is synthesized)
cctggtcagggctaaggccatggccccgcccccaccgccactggctgccagcaccccgctcctccatggcgagtttggctcctacccagcccgaggcccacgctttgccctcacccttac

SEQ ID NO: 43583 - DNA, 120 bp, Artificial Sequence
  ENSG00000063176_3 (sequence is synthesized)
atcgcaggccctgcacatacagcggctgcgccccaaacctgaagccaggccccggggtggcctggtcccgttggccgaggtctcaggctgctgcaccctgcgaagccgcagcccctcaga

SEQ ID NO: 43584 - DNA, 120 bp, Artificial Sequence
  ENSG00000063176_4 (sequence is synthesized)
ctcagcggcctacttctgcatctacacctaccctcggggccggcgcggggcccggcgcagagccactcgcaccttccgggcagatggggccgccacctacgaagagaaccgtgccgaggc

SEQ ID NO: 43585 - DNA, 120 bp, Artificial Sequence
  ENSG00000063176_5 (sequence is synthesized)
ccagcgctgggccactgccctcacctgtctgctccgaggactgccactgcccggggatggggagatcacccctgacctgctacctcggccgccccggttgcttctattggtcaatccctt

SEQ ID NO: 43586 - DNA, 120 bp, Artificial Sequence
  ENSG00000063176_6 (sequence is synthesized)
tgggggtcggggcctggcctggcagtggtgtaagaaccacgtgcttcccatgatctctgaagctgggctgtccttcaacctcatccagacagaacgacagaaccacgcccgggagctggt

SEQ ID NO: 43587 - DNA, 120 bp, Artificial Sequence
  ENSG00000063176_7 (sequence is synthesized)
ccaggggctgagcctgagtgagtgggatggcatcgtcacggtctcgggagacgggctgctccatgaggtgctgaacgggctcctagatcgccctgactgggaggaagctgtgaagatgcc

SEQ ID NO: 43588 - DNA, 120 bp, Artificial Sequence
  ENSG00000063176_8 (sequence is synthesized)
tgtgggcatcctcccctgcggctcgggcaacgcgctggccggagcagtgaaccagcacgggggatttgagccagccctgggcctcgacctgttgctcaactgctcactgttgctgtgccg

SEQ ID NO: 43589 - DNA, 120 bp, Artificial Sequence
  ENSG00000063176_9 (sequence is synthesized)
gggtggtggccacccactggacctgctctccgtgacgctggcctcgggctcccgctgtttctccttcctgtctgtggcctggggcttcgtgtcagatgtggatatccagagcgagcgctt

SEQ ID NO: 43590 - DNA, 120 bp, Artificial Sequence
  ENSG00000063176_10 (sequence is synthesized)
cagggccttgggcagtgcccgcttcacactgggcacggtgctgggcctcgccacactgcacacctaccgcggacgcctctcctacctccccgccactgtggaacctgcctcgcccacccc

SEQ ID NO: 43591 - DNA, 120 bp, Artificial Sequence
  ENSG00000063176_11 (sequence is synthesized)
cctgccccagcctgccctggcctctcctggctcgccagaacccctgcccatcctgtccctcaacggtgggggcccagagctggctggggactggggtggggctggggatgctccgctgtc

SEQ ID NO: 43592 - DNA, 120 bp, Artificial Sequence
  ENSG00000063176_12 (sequence is synthesized)
cccggacccactgctgtcttcacctcctggctctcccaaggcagctctacactcacccgtctccgaaggggcccccgtaattcccccatcctctgggctcccacttcccacccctgatgc

SEQ ID NO: 43593 - DNA, 120 bp, Artificial Sequence
  ENSG00000063176_13 (sequence is synthesized)
ccgggtaggggcctccacctgcggcccgcccgaccacctgctgcctccgctgggcaccccgctgcccccagactgggtgacgctggagggggactttgtgctcatgttggccatctcgcc

SEQ ID NO: 43594 - DNA, 120 bp, Artificial Sequence
  ENSG00000063176_14 (sequence is synthesized)
cagccacctaggcgctgacctggtggcagctccgcatgcgcgcttcgacgacggcctggtgcacctgtgctgggtgcgtagcggcatctcgcgggctgcgctgctgcgccttttcttggc

SEQ ID NO: 43595 - DNA, 120 bp, Artificial Sequence
  ENSG00000063176_15 (sequence is synthesized)
catggagcgtggtagccacttcagcctgggctgtccgcagctgggctacgccgcggcccgtgccttccgcctagagccgctcacaccacgcggcgtgctcacagtggacggggagcaggt

SEQ ID NO: 43596 - DNA, 120 bp, Artificial Sequence
  ENSG00000063176_16 (sequence is synthesized)
ggagtatgggccgctacaggcacagatgcaccctggcatcggtacactgctcactgggcctcctggctgcccggggcgggagccctgaaactaaacaagcttggtacccgccgggggcgg

SEQ ID NO: 43597 - DNA, 120 bp, Artificial Sequence
  ENSG00000063176_17 (sequence is synthesized)
ggcctacattccaatggggcggagcctgagctagggggtgtggcctggctgctagagttgtggtggcaggggccctggccccgtctcaggattgcgctcgctttcatgggaccagacgtg

SEQ ID NO: 43598 - DNA, 120 bp, Artificial Sequence
  ENSG00000063176_18 (sequence is synthesized)
atgctggaaggtgggcgtcgtcacggttaaagagaaatgggctcgtcccgagggtagtgcctgatcaatgagggcggggcctggcgtctgatctggggccgcccttacggggcagggctc

SEQ ID NO: 43599 - DNA, 120 bp, Artificial Sequence
  ENSG00000063176_19 (sequence is synthesized)
agtcctgacgcttgccacctgctcctacccggccaggatggctgagggcggagtctattttacgcgtcgcccaatgacaggacctggaatgtactggctggggtaggcctcagtgagtcg

SEQ ID NO: 43600 - DNA, 120 bp, Artificial Sequence
  ENSG00000063176_20 (sequence is synthesized)
gccggtcagggcccgcagcctcgccccatccactccggtgcctccatttagctggccaatcagcccaggaggggcaggttccccggggccggcgctaggatttgcactaatgttcctctc

SEQ ID NO: 43601 - DNA, 120 bp, Artificial Sequence
  ENSG00000063176_21 (sequence is synthesized)
cccgcgggtgggggcggggaaattcatatcccctgttcgtctcatgcgcgtcctccgtccccaatctaaaaagcaattgaaaaggtctatgcaataaaggcagtcgcttcattcctctca

SEQ ID NO: 43602 - DNA, 120 bp, Artificial Sequence
  ENSG00000063176_22 (sequence is synthesized)
agtgttggaggtgaggaggcggggctggcagggctagtcggggcatctggaaatttccgaccccacgcttcgggcgtttccttatcaggttcaccgctccctgatctcgcgctgcacttc

SEQ ID NO: 43603 - DNA, 120 bp, Artificial Sequence
  ENSG00000063176_23 (sequence is synthesized)
gaaaggaggaggcagaatccgggcagagggcagggagagggcctgtggggaagggacctcagtcctgctcccacccgctccctggagagcaggcggccagacacccaggtcagtgctcag

SEQ ID NO: 43604 - DNA, 120 bp, Artificial Sequence
  ENSG00000063176_24 (sequence is synthesized)
ggaccagctcttggcccctgccccttgcaggcgctcgcatgtggctcctctcggaccccgtagtccctgtcatatcccttctctccagctgtctccatgcctgcctcgtacccctcctat

SEQ ID NO: 43605 - DNA, 120 bp, Artificial Sequence
  ENSG00000063176_25 (sequence is synthesized)
ttgctctcccttccactctgtcttgcctttctcgttggggtgaaaaagtcttactctcttaagtatctttcatcgcctgagtttcacctcattgaccctgtttgtctcctctcagtgttt

SEQ ID NO: 43606 - DNA, 120 bp, Artificial Sequence
  ENSG00000063176_26 (sequence is synthesized)
ctctggctctcagaccctatctctattgcgtttgtgattgttttgctgttttacccactgcaccgtatggggggtgggggtgtcggggaggtgtgtctttcagtctttgcatgtctgttt

SEQ ID NO: 43607 - DNA, 120 bp, Artificial Sequence
  ENSG00000063176_27 (sequence is synthesized)
ctgcatatccaatcccactatccattccccttcctgtgccttcttttcccccaaagcccgttatcatcacccaaccacctgtatatttcaatcctttctcttgtttatctattcctatga

SEQ ID NO: 43608 - DNA, 120 bp, Artificial Sequence
  ENSG00000063176_28 (sequence is synthesized)
aggcaaggatttggggctattttgtctcctgctgtgtttgctaggcctagcaccgtgattggcacataaagggtactgaatacttactggggaataaatgattggatgtttgcatgcccg

SEQ ID NO: 43609 - DNA, 120 bp, Artificial Sequence
  ENSG00000063176_29 (sequence is synthesized)
ggtctccggccccctctgggatgctggcctctgtcccgcatcctcaaggtctgcccacacctgtctgagcctgtctgtctctgatgctcctgtctcacctgccactgcccctcattgtct

SEQ ID NO: 43610 - DNA, 120 bp, Artificial Sequence
  ENSG00000063176_30 (sequence is synthesized)
cctcctgtccacagcccctgcccctccctgcccctgccatggggtcctgaattctcaccccttctctcctcccttcccacagaggccagaccaggagctgaccgggagctggggccacgg

SEQ ID NO: 43611 - DNA, 120 bp, Artificial Sequence
  ENSG00000063176_31 (sequence is synthesized)
ctctatggacgacagcccggagctgcccacgggctgcagccagtatgccagggagctgccctcttcttccacaacagctggctctggggttctcaagatttattcaggatcgtgttaacg

SEQ ID NO: 43612 - DNA, 120 bp, Artificial Sequence
  ENSG00000063176_32 (sequence is synthesized)
gaggcggtgggaggatagggtccctgacgtgccggggacacacacagagaaccctccccgcccccgcaagggaggggggaggctcgctttttcttaaaaatataaatgtatttatctgca

SEQ ID NO: 43613 - DNA, 120 bp, Artificial Sequence
  ENSG00000063176_33 (sequence is synthesized)
ggggaacaaaggtgagcgaaaggaggaggcagaatccgggcagagggcagggagagggcctgtggggaagggacctcagtcctgctcccacccgctccctggagagcaggcggccagaca

SEQ ID NO: 43614 - DNA, 120 bp, Artificial Sequence
  ENSG00000063176_34 (sequence is synthesized)
ccacgaagggagggatgagcccctcctggggtgatagggacccctatatctcccactcagccaaacccacagtcagtcaagtaaatcagcctgcctgtgggatgctcacccccagctcct

SEQ ID NO: 43615 - DNA, 120 bp, Artificial Sequence
  ENSG00000063176_35 (sequence is synthesized)
ggacatttttgcctgcctgcttcccagctgtatcccgagcgcccagaactctgcctggcatgggaggcactcagtgaattgtagggagcaaatgaaagatgaccaggaacctggccccgt

SEQ ID NO: 43616 - DNA, 120 bp, Artificial Sequence
  ENSG00000063176_36 (sequence is synthesized)
aaggagtcgcctggaggtggccccacggctgtggtgggcctgggccatggccttcgtggtctcattgccagctgctttcctacctgtctctttccccaacccctgtttgctccttccttc

SEQ ID NO: 43617 - DNA, 120 bp, Artificial Sequence
  ENSG00000063176_37 (sequence is synthesized)
cgtgtgaggagggtgcgggggtcggggcagggaccggagtctaggggactgagggaccaagaggaacagagactcaggcccgggactggggcaccggggtgggagatggaaatggaaaac

SEQ ID NO: 43618 - DNA, 120 bp, Artificial Sequence
  ENSG00000063176_38 (sequence is synthesized)
ctgggccaggactgaacccagccaggcctgggactgggttctggaaataagagtgcggatggcggtttgggggcccagggccagacacgcaggcctatggattggggaccaatggatgga

SEQ ID NO: 43619 - DNA, 120 bp, Artificial Sequence
  ENSG00000063176_39 (sequence is synthesized)
aggtttgggggtgaagcagacgtcctggacccgagagagccgctggggataggggggcagatgtagttcctaaggaggccagaccaggagctgaccgggagctggggccacgggcctagg

SEQ ID NO: 43620 - DNA, 120 bp, Artificial Sequence
  ENSG00000063176_40 (sequence is synthesized)
cgactgactagccgggcgataacggcagagagcatagagcgcaggaacaagcgcaacgtccaagagggaagggccagcacgtcgggggcctctctggccctacccaggccgtgttctcga

SEQ ID NO: 43621 - DNA, 120 bp, Artificial Sequence
  ENSG00000063176_41 (sequence is synthesized)
atctctgggcctttgttacgcgtgttagagtctctgtctttgcagctaaagacctcctccctcacgccccttttcttttgtgaattcaatggatgagacaggcccactctcccttaacaa

SEQ ID NO: 43622 - DNA, 120 bp, Artificial Sequence
  ENSG00000063176_42 (sequence is synthesized)
agatggcgacaacggcgctgtctatggggccgcgacgtcgtctccgctgcgcgtcggccctcacccacgatggcggccagtctcccgaagcgcgaggccccgcccagctctcggcctctc

SEQ ID NO: 43623 - DNA, 120 bp, Artificial Sequence
  ENSG00000063176_43 (sequence is synthesized)
ccgcggccggtccctgcaccaagctcgcgagctgactggctccaccccccgcgccctcgtattggtgcggcccaggccggctgcacggccattggctgagcggatgcacaccctcccccc

SEQ ID NO: 43624 - DNA, 120 bp, Artificial Sequence
  ENSG00000063176_44 (sequence is synthesized)
cgaggactgccactgcccggggatgggggtgaggtgctgggcagctgctctatcctggagccaccttggtgtctctgcagaatttcctccataggcagctgtgtctttatttttctgtgt

SEQ ID NO: 43625 - DNA, 120 bp, Artificial Sequence
  ENSG00000063176_45 (sequence is synthesized)
gtctgggtgatgtatctctctggatccgttaggagtgatacacagggatgggctacagaaggaacaaaaagacaagaggaccggatgtggtggctcatgtctgtaatcctagcaatttgg

SEQ ID NO: 43626 - DNA, 120 bp, Artificial Sequence
  ENSG00000063176_46 (sequence is synthesized)
gagcggatgcacaccctccccccacccctaggtctgatgggggctgttggtgctgacttgcgggaccgcctggaggaggacccggcgtgtgaggaggaggccagaccaggagctgaccgg

SEQ ID NO: 43627 - DNA, 120 bp, Artificial Sequence
  ENSG00000063177_0 (sequence is synthesized)
ctctttccggacctggccgagcaggaggcgccatcatgggagtggacatccgccataacaaggaccgaaaggttcggcgcaaggagcccaagagccaggatatctacctgaggctgttgg

SEQ ID NO: 43628 - DNA, 120 bp, Artificial Sequence
  ENSG00000063177_1 (sequence is synthesized)
tcaagttatacaggtttctggccagaagaaccaactccacattcaaccaggttgtgttgaagaggttgtttatgagtcgcaccaaccggccgcctctgtccctttcccggatgatccgga

SEQ ID NO: 43629 - DNA, 120 bp, Artificial Sequence
  ENSG00000063177_2 (sequence is synthesized)
ggggaccataactgatgatgtgcgggttcaggaggtacccaaactgaaggtatgtgcactgcgcgtgaccagccgggcccgcagccgcatcctcagggcagggggcaagatcctcacttt

SEQ ID NO: 43630 - DNA, 120 bp, Artificial Sequence
  ENSG00000063177_3 (sequence is synthesized)
cgaccagctggccctggactcccctaagggctgtggcactgtcctgctctccggtcctcgcaagggccgagaggtgtaccggcatttcggcaaggccccaggaaccccgcacagccacac

SEQ ID NO: 43631 - DNA, 120 bp, Artificial Sequence
  ENSG00000063177_4 (sequence is synthesized)
caaaccctacgtccgctccaagggccggaagttcgagcgtgccagaggccgacgggccagccgaggctacaaaaactaaccctggatcctactctcttattaaaaagatttttgctgaca

SEQ ID NO: 43632 - DNA, 120 bp, Artificial Sequence
  ENSG00000063177_5 (sequence is synthesized)
agaccctacgtccgctccaagggccggaagttcgagcgtgccagaggccgacgggccagccgaggctacaaaaactaaccctggatcctactctcttattaaaaagatttttgctgacag

SEQ ID NO: 43633 - DNA, 120 bp, Artificial Sequence
  ENSG00000063177_6 (sequence is synthesized)
tttccggacctggccgagcaggaggcgccatcatggtgagctcgctttgcggcgttcggggctggataatccgctgccatccgccgtggttttgggctaggggcacgctggagggcggca

SEQ ID NO: 43634 - DNA, 120 bp, Artificial Sequence
  ENSG00000063177_7 (sequence is synthesized)
gggggtctgcggctgcccggagggagcaattcccgatactggggacctactctgggggccaggaaagcagggatgggtcagtcatagcctaccgcccccacttagtagatgaccaagtgg

SEQ ID NO: 43635 - DNA, 120 bp, Artificial Sequence
  ENSG00000063177_8 (sequence is synthesized)
aggtactcggaggctgatatgactgggtttacaaagccaggaagtggcagagccaggattccgacccaggtggctggacccgcagccactcttagttatttggctttgctgcctttatct

SEQ ID NO: 43636 - DNA, 120 bp, Artificial Sequence
  ENSG00000063177_9 (sequence is synthesized)
ggacctgtcactttctagtatgaaaagtcgggttcgatgggggccgcggcgggtgagaggatcgagagccgaataactggatttggggaccaggcaggtctctgagtctcaggccccttc

SEQ ID NO: 43637 - DNA, 120 bp, Artificial Sequence
  ENSG00000063177_10 (sequence is synthesized)
ccaccttgtgatggtttttgagcctttgccccagtgtctggctgttcgttgggtacacagtaatctcatctgacaagtttgtgaatttgggaagaaataattcacaggagatgctcatca

SEQ ID NO: 43638 - DNA, 120 bp, Artificial Sequence
  ENSG00000063177_11 (sequence is synthesized)
cggggttttgcacacagtaagtgctgcataagtggagctattaaatagttcttgtaattgtcaacacagtctgaaaaacttaagttgctcagaaaggcagcagggcggtaggagcctggc

SEQ ID NO: 43639 - DNA, 90 bp, Artificial Sequence
  ENSG00000063177_12 (sequence is synthesized)
gaggcgggaggattccttgctgtgagaccctgtctccactttaaaaacgatgttttaaaaagacactatttggtaagggttgttggattg

SEQ ID NO: 43640 - DNA, 120 bp, Artificial Sequence
  ENSG00000063177_13 (sequence is synthesized)
tgttttaaaaagacactatttggtaagggttgttggattgactgatgctgtaggagaggtggttctagtagtattgctaggttctgaataaggattcgttttcatcattactgccattgg

SEQ ID NO: 43641 - DNA, 120 bp, Artificial Sequence
  ENSG00000063177_14 (sequence is synthesized)
tttgatatttttggttatccctccgggtatgggaaccagttttgataacattgttgcaaaatacaagttgtaaagaattgacctttttgtattaagttaatatgattgctgtgttacgat

SEQ ID NO: 43642 - DNA, 120 bp, Artificial Sequence
  ENSG00000063177_15 (sequence is synthesized)
gtttcagggttctgtgtgccatgggctgaaggctttgtaaacagcccctttttacagagggatcagtggcagcccacaggtctcctggtggtgggcctgggatttgagctggtgtgttca

SEQ ID NO: 43643 - DNA, 120 bp, Artificial Sequence
  ENSG00000063177_16 (sequence is synthesized)
gacctgggcttgtgtcccagctctcagtttcagaaataagtaataattggctatggttgggggtaattgggtccatggttgcctcttcacccccacagggagtggacatccgccataaca

SEQ ID NO: 43644 - DNA, 120 bp, Artificial Sequence
  ENSG00000063177_17 (sequence is synthesized)
tcctccattctagtgctggcaccaagctcctcccaggggcctgcagagcagtctcgggtctctggttctgttccagggtctcctgcatttgtattttcagcctctaggctgtgtacagct

SEQ ID NO: 43645 - DNA, 120 bp, Artificial Sequence
  ENSG00000063177_18 (sequence is synthesized)
cgggagtggagccaggattttctaggtccttggccaggaaggacctgggccagctttctccctctaggtcggtgggttgggggaaagggataaagattattttagtccagatcatcatgt

SEQ ID NO: 43646 - DNA, 120 bp, Artificial Sequence
  ENSG00000063177_19 (sequence is synthesized)
gaggcaggacttggagctctgggagcaaccagggcatcaagggtttgtctcagccagtcgcgagcgtagagcttggactgttggttggaactgagtgtccatgggcagtgggcaagtctc

SEQ ID NO: 43647 - DNA, 120 bp, Artificial Sequence
  ENSG00000063177_20 (sequence is synthesized)
ctggtcctcctctccttctctttgtgaggtggaggtgtcctggtggcttcaggagattgccccaagtcataactgagttttatgtcaaaggctctgctgagggaggccctattgaacagt

SEQ ID NO: 43648 - DNA, 120 bp, Artificial Sequence
  ENSG00000063177_21 (sequence is synthesized)
ctgcatttttttttttatctggagctttccccagctggacctgaggagaggcctgtggggtttaaggggtgtggtgtgagtggggggtcccgttagagggcacagctgccctggcctggg

SEQ ID NO: 43649 - DNA, 120 bp, Artificial Sequence
  ENSG00000063177_22 (sequence is synthesized)
gatgcctcaagcggggctgaatgtaaacaccagaacaacttacgacgtacatcctccccaccctaagatccggaagatgaagcttcctggccgggaaaacaagacggccgtggttgtggg

SEQ ID NO: 43650 - DNA, 120 bp, Artificial Sequence
  ENSG00000063177_23 (sequence is synthesized)
gaccataactgatgatgtgcgggttcaggaggtacccaaactgaaggtgagctggcgggggctgggcagacccatcagacccttgctgtactgtgctgtgctgtgctgtgctgtgctgtg

SEQ ID NO: 43651 - DNA, 120 bp, Artificial Sequence
  ENSG00000063177_24 (sequence is synthesized)
ctgtgctggtccatcctcagtcttgccaccgctggtgaggcaagcatcctgcctgtctgagtggctttgaggattggtgtgggtcgtctctggcatggttgatggtggggtcccctgggc

SEQ ID NO: 43652 - DNA, 120 bp, Artificial Sequence
  ENSG00000063177_25 (sequence is synthesized)
aagcttcttctggggcaagttgtaaactgttagtgctggcccctagagccagacagcctgggctcaagtctagactcctttgtcacctctgcacaggtctttttttggcccagcttcctt

SEQ ID NO: 43653 - DNA, 120 bp, Artificial Sequence
  ENSG00000063177_26 (sequence is synthesized)
gctgtagtttctagcataacaccagggatgtggtggtgaaagttccggaagtgttgagaactgctgctgtcagcccagggtgctccgggtagtaaacgatagtgttggttaccagggctc

SEQ ID NO: 43654 - DNA, 120 bp, Artificial Sequence
  ENSG00000063177_27 (sequence is synthesized)
tgctgcgccaaggcagtggagggtgagtcctggcagcccctgggtgaccacgcaggggtctgacccgccagccttgtcctctccaccaggtatgtgcactgcgcgtgaccagccgggccc

SEQ ID NO: 43655 - DNA, 120 bp, Artificial Sequence
  ENSG00000063177_28 (sequence is synthesized)
gactgagctgtgtggctactggcagccttcaccctcctggatctgggaggccagaagctgggcgccagatccctgtctcacccggttctccttccccttccctaggtcctcgcaagggcc

SEQ ID NO: 43656 - DNA, 120 bp, Artificial Sequence
  ENSG00000063177_29 (sequence is synthesized)
acttgggctgcttctcctatccctcgtaccagccagccccaggccttctggaactctcagctgcctcatcctgcctgcttttcccttcaacactgcttggagctgtgttttccagggcct

SEQ ID NO: 43657 - DNA, 120 bp, Artificial Sequence
  ENSG00000063177_30 (sequence is synthesized)
gagcaggcatctcctggggagcatgcagttcaccggcctttgccagcccaggctgggaccctccaggtggtggggcaggtgcttccatagcccctcctggctccttggcttcccactctg

SEQ ID NO: 43658 - DNA, 120 bp, Artificial Sequence
  ENSG00000063177_31 (sequence is synthesized)
ccaagcttttccagcagcattgactctcctggggctgaatgtgacaggcttgtggtgttcctgtgccactccacaatggcctcctttaagagggcccccctctcactccctcctctcccc

SEQ ID NO: 43659 - DNA, 120 bp, Artificial Sequence
  ENSG00000063177_32 (sequence is synthesized)
acagaccctacgtccgctccaagggccggaagttcgagcgtgccagaggccgacgggccagccgaggctacaaaaactaaccctggatcctactctcttattaaaaagatttttgctgac

SEQ ID NO: 43660 - DNA, 120 bp, Artificial Sequence
  ENSG00000063180_0 (sequence is synthesized)
aagagagaagagagactgaaacagggagaagaggcaggagaggaggaggtggggagagcacgaagctggaggccgacactgagggagggcgggaggaggtgaagaaggagagaggggaga

SEQ ID NO: 43661 - DNA, 120 bp, Artificial Sequence
  ENSG00000063180_1 (sequence is synthesized)
agaggcaggagctggaaaggagagagggaggaggaggaggagatgcgggatggagacctggagttaggtggcttgggagagcttaatgaaaagagaacggagaggaggtgtgggttagga

SEQ ID NO: 43662 - DNA, 120 bp, Artificial Sequence
  ENSG00000063180_2 (sequence is synthesized)
accaagaggtagccctgggggcagcagaaggctgagaggagtaggaagatcaggagctagagggagactggagggttccgggaaaagagcagaggaaagaggaaagacacagagagacgg

SEQ ID NO: 43663 - DNA, 120 bp, Artificial Sequence
  ENSG00000063180_3 (sequence is synthesized)
gagagagaagaagagtgggtttgaagggcggatctcagtccctggctgctttggcatttggggaactgggactccctgtggggaggagaggaaagctggaagtcctggagggacagggtc

SEQ ID NO: 43664 - DNA, 120 bp, Artificial Sequence
  ENSG00000063180_4 (sequence is synthesized)
ccagaaggaggggacagaggagctgagagaggggggcagggcgttgggcaggggtccctcggaggcctcctggggatgggggctgcagctcgtctgagcgcccctcgagcgctggtactc

SEQ ID NO: 43665 - DNA, 120 bp, Artificial Sequence
  ENSG00000063180_5 (sequence is synthesized)
tgggctgcactgggggcagcagctcacatcggaccagcacctgaccccgaggactggtggagctacaaggataatctccagggaaacttcgtgccagggcctcctttctggggcctggtg

SEQ ID NO: 43666 - DNA, 120 bp, Artificial Sequence
  ENSG00000063180_6 (sequence is synthesized)
aatgcagcgtggagtctgtgtgctgtggggaagcggcagagccccgtggatgtggagctgaagagggttctttatgacccctttctgcccccattaaggctcagcactggaggagagaag

SEQ ID NO: 43667 - DNA, 120 bp, Artificial Sequence
  ENSG00000063180_7 (sequence is synthesized)
ctccttcctgcctgcaccccgacctgtggtcaatgtgtctggaggtcccctcctttacagccaccgactcagtgaactgcggctgctgtttggagctcgcgacggagccggctcggaaca

SEQ ID NO: 43668 - DNA, 120 bp, Artificial Sequence
  ENSG00000063180_8 (sequence is synthesized)
tcagatcaaccaccagggcttctctgctgaggtgcagctcattcacttcaaccaggaactctacgggaatttcagcgctgcctcccgcggccccaatggcctggccattctcagcctctt

SEQ ID NO: 43669 - DNA, 120 bp, Artificial Sequence
  ENSG00000063180_9 (sequence is synthesized)
tgtcaacgttgccagtacctctaacccattcctcagtcgcctccttaaccgcgacaccatcactcgcatctcctacaagaatgatgcctactttcttcaagacctgagcctggagctcct

SEQ ID NO: 43670 - DNA, 120 bp, Artificial Sequence
  ENSG00000063180_10 (sequence is synthesized)
gttccctgaatccttcggcttcatcacctatcagggctctctcagcaccccgccctgctccgagactgtcacctggatcctcattgaccgggccctcaatatcacctcccttcagatgca

SEQ ID NO: 43671 - DNA, 120 bp, Artificial Sequence
  ENSG00000063180_11 (sequence is synthesized)
ctccctgagactcctgagccagaatcctccatctcagatcttccagagcctcagcggtaacagccggcccctgcagcccttggcccacagggcactgaggggcaacagggacccccggca

SEQ ID NO: 43672 - DNA, 120 bp, Artificial Sequence
  ENSG00000063180_12 (sequence is synthesized)
ccccgagaggcgctgccgaggccccaactaccgcctgcatgtggatggtgtcccccatggtcgctgagactccccttcgaggattgcacccgcccgtcctaagcctccccacaaggcgag

SEQ ID NO: 43673 - DNA, 120 bp, Artificial Sequence
  ENSG00000063180_13 (sequence is synthesized)
gggagttacccctaaaacaaagctattaaagggacagaatacttcctgttttctcagtggtctgattctaggcgcggtggggaaacatttgggtattaaagaacagacttcttccggaaa

SEQ ID NO: 43674 - DNA, 120 bp, Artificial Sequence
  ENSG00000063180_14 (sequence is synthesized)
cccccccccccatgaagaccttcaagtagttcagcctactgctgaatctggacgtcccgattcccccctcctattggcttcttgtggttcagcccagtgcttctcgacctagtacattct

SEQ ID NO: 43675 - DNA, 120 bp, Artificial Sequence
  ENSG00000063241_0 (sequence is synthesized)
aacgaaacggtaaccagccctgggaagcccgcaagaggcctcagcggtggccgtccgagagccgagaggtgagggtgcccccgcctcacctgcagaggggccgttccgggctcgaacccg

SEQ ID NO: 43676 - DNA, 120 bp, Artificial Sequence
  ENSG00000063241_1 (sequence is synthesized)
gcaccttccggaaaatggcggctgccaggcccagcctgggccgagtcctcccaggatcctctgtcctgttcctgtgtgacatgcaggagaagttccgccacaacatcgcctacttcccac

SEQ ID NO: 43677 - DNA, 120 bp, Artificial Sequence
  ENSG00000063241_2 (sequence is synthesized)
agatcgtctcagtggctgcccgcatgctcaaggtggcccggctgcttgaggtgccagtcatgctgacggagcagtacccacaaggcctgggccccacggtgcccgagctggggactgagg

SEQ ID NO: 43678 - DNA, 120 bp, Artificial Sequence
  ENSG00000063241_3 (sequence is synthesized)
gccttcggccgctggccaagacctgcttcagcatggtgcctgccctgcagcaggagctggacagtcggccccagctgcgctctgtgctgctctgtggcattgaggcacaggcctgcatct

SEQ ID NO: 43679 - DNA, 120 bp, Artificial Sequence
  ENSG00000063241_4 (sequence is synthesized)
tggtgccttcctctccaccagcgaagggctcattctgcagcttgtgggcgatgccgtccacccccagttcaaggagatccagaaactcatcaaggagcccgccccagacagcggactgct

SEQ ID NO: 43680 - DNA, 120 bp, Artificial Sequence
  ENSG00000063241_5 (sequence is synthesized)
gggcctcttccaaggccagaactccctcctccactgaactccaaccctgccttgagggaagaccaccctcctgtcacccggacctcagtggaagcccgttccccccatccctggatccca

SEQ ID NO: 43681 - DNA, 120 bp, Artificial Sequence
  ENSG00000063241_6 (sequence is synthesized)
agagtggtgcgatccaccaggagtgccgcccccttgtggggggggcagggtgctgccttcccattggacagctgctcccggaaatgcaaatgagactcctggaaactgggtgggaattgg

SEQ ID NO: 43682 - DNA, 120 bp, Artificial Sequence
  ENSG00000063241_7 (sequence is synthesized)
ctgagccaagatggaggcggggctcggccccgggccacttcacggggcgggaaggggaggggaagaagagtctcagactgtgggacacggactcgcagaataaacatatatgtggctgtg

SEQ ID NO: 43683 - DNA, 120 bp, Artificial Sequence
  ENSG00000063241_8 (sequence is synthesized)
ctttctctcaacctccatttccaagcacagagtctaaattattctaaacaccacccgaggaggcaggtgctgtacagatggggaaactgaggcagcacagagcgcaaaggacaggggggc

SEQ ID NO: 43684 - DNA, 120 bp, Artificial Sequence
  ENSG00000063241_9 (sequence is synthesized)
gtcaaattcctcacttgatcgctccctcagccagccccttcctggaaagtgcttgggtatctttgtaagcctccgtttcttgagagagggccaggtttcgaaccgcagacatgcctctac

SEQ ID NO: 43685 - DNA, 120 bp, Artificial Sequence
  ENSG00000063241_10 (sequence is synthesized)
tctaggtaagacccctctctctctctcccggcctcggcggtctgctctgtgcaatggggccggccgagacgccctctctccagccagagtctgagccttcggagaccaccgcgcgactcc

SEQ ID NO: 43686 - DNA, 120 bp, Artificial Sequence
  ENSG00000063241_11 (sequence is synthesized)
gccccgtcggccgccactcacgccctctacggctctccattggcagaacgacctgctgccccgcccccacggcgcctttgcgagctaatcattttcttgagactgacagccttgccggca

SEQ ID NO: 43687 - DNA, 120 bp, Artificial Sequence
  ENSG00000063241_12 (sequence is synthesized)
ccgccccccctggggcgggagcaaagcagctgcatatgcggattggttgagaggcagggggcggggtgagttggtgagcgccgattgcgggcagaggcagtggcacatgcggattggccg

SEQ ID NO: 43688 - DNA, 120 bp, Artificial Sequence
  ENSG00000063241_13 (sequence is synthesized)
gctcaagaacacgaccctggacctcctagaccgggggctgcaggtccatgtggtggtggacgcctgctcctcacgcagccaggtggaccggctggtggctctggcccgcatgagacagag

SEQ ID NO: 43689 - DNA, 120 bp, Artificial Sequence
  ENSG00000063241_14 (sequence is synthesized)
agagggtttgtgtatccatcattttgagaaatgcagctgctcggctgtccctaggagttgttgtgacccacactcctaccaggccagaggggagttcctgggtgctccacatgcctgtcc

SEQ ID NO: 43690 - DNA, 120 bp, Artificial Sequence
  ENSG00000063241_15 (sequence is synthesized)
taggcttttggacatgctggcccccagatctgcccctccatggctcctcactgccctcagcagagagactccagggcccttgtgacccacctgtcagctctccagctcctggttccctca

SEQ ID NO: 43691 - DNA, 120 bp, Artificial Sequence
  ENSG00000063241_16 (sequence is synthesized)
acccaggatccaggctcagccctccaccctcagacccaggatccaggctcagccctccaccctcagatccaggatccaggctcagccctccaccctcagacccaggatccaggctcagcc

SEQ ID NO: 43692 - DNA, 120 bp, Artificial Sequence
  ENSG00000063241_17 (sequence is synthesized)
ctccaccctcagacccaggcgtccaggcccaactcctcttccttcagacccagggatccaggcccacttcctcttccctcagacgcaggagtccaggcccagctcctcctccctcagact

SEQ ID NO: 43693 - DNA, 71 bp, Artificial Sequence
  ENSG00000063241_18 (sequence is synthesized)
agacgcaggagtccaggcccagctcctcctccctcagactcaggagtccaggcatagcccctcctccctca

SEQ ID NO: 43694 - DNA, 120 bp, Artificial Sequence
  ENSG00000063241_19 (sequence is synthesized)
ctccttccctgaccagaaacctccacttccctgcaggacccccatcctgacctgggccctctctcctcacctgtgggccccatcctatcttggatcccctcctgacctgggggccccttc

SEQ ID NO: 43695 - DNA, 120 bp, Artificial Sequence
  ENSG00000063241_20 (sequence is synthesized)
ctctgatccgagcctccctcctccccattctgggcccctaattctgactcaccatccccaattccttacccaggacccccgttcttatccggggttggccctgacctctctctacccaca

SEQ ID NO: 43696 - DNA, 120 bp, Artificial Sequence
  ENSG00000063241_21 (sequence is synthesized)
gggccatcaggggctcccaggaagggccacaggcggcattcccaccagggtgcctgcgtgtctgggtgtccagactgcggcgtccacaccaaccttccctccctccctcccactcacagc

SEQ ID NO: 43697 - DNA, 120 bp, Artificial Sequence
  ENSG00000063241_22 (sequence is synthesized)
atgcccgcctggccgcccccacctcccctgcatctgtcaaaggtcttgtctttgggctctgagaatacatctcggcaccagcaggctgccgcctccagggggagccaggttcttggaggg

SEQ ID NO: 43698 - DNA, 120 bp, Artificial Sequence
  ENSG00000063241_23 (sequence is synthesized)
gaggctgctggtcactgtcactgccataaatccatgaaaggagcccacagatggaccataagggccacagagaacaataaaatgggggaggcaatccagagggtcagggcacagaggagg

SEQ ID NO: 43699 - DNA, 120 bp, Artificial Sequence
  ENSG00000063241_24 (sequence is synthesized)
gggtttgtattggagggtctggggggcatcctggagcaggtgactttagaatgaactgaaggagggagtgaccaggcggacactggggaagaacaggtcagcagagaccctctagataga

SEQ ID NO: 43700 - DNA, 120 bp, Artificial Sequence
  ENSG00000063241_25 (sequence is synthesized)
agccccttgacccgtccacacccatctccaactctccatctcctccgcctctgccccttccggcccgggtgcccctcctccagtttctcagactccactggccaccctgctaccggggtc

SEQ ID NO: 43701 - DNA, 120 bp, Artificial Sequence
  ENSG00000063241_26 (sequence is synthesized)
caggtactgggcccccctgcttcaagccattggccctcaggatgctggagaggccccagaccttgacattcccaggccctcccaggtctgctccttaccttccttctagttcagctctgt

SEQ ID NO: 43702 - DNA, 120 bp, Artificial Sequence
  ENSG00000063241_27 (sequence is synthesized)
gggacattcaccgagcacccactctgtgccagccactgtggtgagccctggagtctgcagcaatccatgttcagtgacacattgtgacccccagctggggcaggagttgcagagggatga

SEQ ID NO: 43703 - DNA, 120 bp, Artificial Sequence
  ENSG00000063241_28 (sequence is synthesized)
gcaagagtggcagaggtggccctgaattctgagctgccggggaagggggcatcaggcactcacagtgttcccaggggagggggactgagctttctttgaggagctgtagcaggccagggt

SEQ ID NO: 43704 - DNA, 120 bp, Artificial Sequence
  ENSG00000063241_29 (sequence is synthesized)
gagcaccacgcgggaggagccagcagcctgtcttcacgcaggagtcagagcccagaggtttgagatttcagccacgggcagccatcagggtttgatgcaggggagctggccatatcagat

SEQ ID NO: 43705 - DNA, 120 bp, Artificial Sequence
  ENSG00000063241_30 (sequence is synthesized)
cggcagtttacaaagttctttctggccctgtgtgaccagtggattagggagtgtggcatagaggggaggagggagacctgtcagtaaggaggttaatttgggcgcccaggcaagcggtga

SEQ ID NO: 43706 - DNA, 120 bp, Artificial Sequence
  ENSG00000063241_31 (sequence is synthesized)
tgaggcagtgaggagctcaaccagtcacgtgtaatgaaagggaggccccaggaaaagtcttgagaagagggagtgttgtcttgggcagctgctagccagaaggtccgagagatgaagacg

SEQ ID NO: 43707 - DNA, 120 bp, Artificial Sequence
  ENSG00000063241_32 (sequence is synthesized)
gagaggtgtccctcagatttgtcatccatggagatcgggaccctagacgcttcctgacccatcgccccctgcccttacagatccagaaactcatcaaggagcccgccccagacagcggac

SEQ ID NO: 43708 - DNA, 120 bp, Artificial Sequence
  ENSG00000063241_33 (sequence is synthesized)
gccctgggaagcccgcaagaggcctcagcggtggccgtccgagagccgagaggtgagggtgcccccgcctcacctgcagaggggccgttccgggctcgaacccggcaccttccgggaaaa

SEQ ID NO: 43709 - DNA, 120 bp, Artificial Sequence
  ENSG00000063241_34 (sequence is synthesized)
cgggatcgcacgctccgtggtctttgtgttgagatctatccaggttgtggcctgtgcagggtcccccttctttcctatggctgaagaatatggcctcagtttcctcttggagcaggaaaa

SEQ ID NO: 43710 - DNA, 120 bp, Artificial Sequence
  ENSG00000063244_0 (sequence is synthesized)
gaggcgaaagctgcacagggccctacgcggccgcctcagcatgtcggacttcgacgagttcgagcggcagctcaacgagaataaacaagagcgggacaaggagaaccggcatcggaagcg

SEQ ID NO: 43711 - DNA, 120 bp, Artificial Sequence
  ENSG00000063244_1 (sequence is synthesized)
cagccacagccgctctcggagccgggaccgcaaacgccggagccggagccgcgaccggcgcaaccgggaccagcggagcgcctcccgggacaggcgacgacgcagcaaacctttgaccag

SEQ ID NO: 43712 - DNA, 120 bp, Artificial Sequence
  ENSG00000063244_2 (sequence is synthesized)
aggcgctaaagaggagcacggtggactgattcgttccccccgccacgagaagaagaagaaggtccgtaaatactgggacgtgccacccccaggctttgagcacatcaccccaatgcagta

SEQ ID NO: 43713 - DNA, 120 bp, Artificial Sequence
  ENSG00000063244_3 (sequence is synthesized)
caaggccatgcaagctgcgggtcagattccagccactgctcttctccccaccatgacccctgacggtctggctgtgaccccaacgccggtgcccgtggtcgggagccagatgaccagaca

SEQ ID NO: 43714 - DNA, 120 bp, Artificial Sequence
  ENSG00000063244_4 (sequence is synthesized)
agcccggcgcctctacgtgggcaacatcccctttggcatcactgaggaggccatgatggatttcttcaacgcccagatgcgcctgggggggctgacccaggcccctggcaacccagtgtt

SEQ ID NO: 43715 - DNA, 120 bp, Artificial Sequence
  ENSG00000063244_5 (sequence is synthesized)
ggctgtgcagattaaccaggacaagaattttgcctttttggagttccgctcagtggacgagactacccaggctatggcctttgatggcatcatcttccagggccagtcactaaagatccg

SEQ ID NO: 43716 - DNA, 120 bp, Artificial Sequence
  ENSG00000063244_6 (sequence is synthesized)
caggcctcacgactaccagccgcttcctggcatgtcagagaacccctccgtctatgtgcctggggttgtgtccactgtggtccccgactctgcccacaagctgttcatcgggggcttacc

SEQ ID NO: 43717 - DNA, 120 bp, Artificial Sequence
  ENSG00000063244_7 (sequence is synthesized)
ccaggtcaaagagctgctgacatcctttgggcccctcaaggccttcaacctggtcaaggacagtgccacggggctctccaagggctacgccttctgtgagtacgtggacatcaacgtcac

SEQ ID NO: 43718 - DNA, 120 bp, Artificial Sequence
  ENSG00000063244_8 (sequence is synthesized)
ggatcaggccattgcggggctgaacggcatgcagctgggggataagaagctgctggtccagagggcgagtgtgggagccaagaatgccacgctggtgagccccccgagcaccatcaatca

SEQ ID NO: 43719 - DNA, 120 bp, Artificial Sequence
  ENSG00000063244_9 (sequence is synthesized)
gacgcctgtgaccctgcaagtgccgggcttgatgagctcccaggtgcagatgggcggccacccgactgaggtcctgtgcctcatgaacatggtgctgcctgaggagctgctggacgacga

SEQ ID NO: 43720 - DNA, 120 bp, Artificial Sequence
  ENSG00000063244_10 (sequence is synthesized)
ggagtatgaggagatcgtggaggacgtgcgggacgagtgcagcaagtacgggcttgtcaagtccatcgagatcccccggcctgtggacggcgtcgaggtgcccggctgcggaaagatctt

SEQ ID NO: 43721 - DNA, 120 bp, Artificial Sequence
  ENSG00000063244_11 (sequence is synthesized)
tgtggagttcacctctgtgtttgactgccagaaagccatgcagggcctgacgggccgcaagttcgccaacagagtggttgtcacaaaatactgtgaccccgactcttatcaccgccggga

SEQ ID NO: 43722 - DNA, 120 bp, Artificial Sequence
  ENSG00000063244_12 (sequence is synthesized)
cttctggtagaggcggctgggggagggtgggggcagggctggctgggggcttctccccactcccgccccccccttatccccctctgaagacgatgggcagaggagtgacagccgcagaca

SEQ ID NO: 43723 - DNA, 120 bp, Artificial Sequence
  ENSG00000063244_13 (sequence is synthesized)
cacgacagccggcagcaactggaatggcagcaattaagggtggggggcgggggttggggggttggggggttagggcagggaggggactggggaagtgcgcacacagcccacacagacaac

SEQ ID NO: 43724 - DNA, 120 bp, Artificial Sequence
  ENSG00000063244_14 (sequence is synthesized)
gcaacctccgcagcggtcgcgcgcacccttcatccctcttgctgcttttgtctggcacaaccttctcaggccctccgcgaggccggccctttttttctttcactttccccacccggagag

SEQ ID NO: 43725 - DNA, 120 bp, Artificial Sequence
  ENSG00000063244_15 (sequence is synthesized)
ccaggtgccgagaactaggacctcgtccccttctctatcccttcccctgatccatctcgtctctgttctccttcccttttccgttcccgaagccggaaggagccgaggtacccacggaaa

SEQ ID NO: 43726 - DNA, 120 bp, Artificial Sequence
  ENSG00000063244_16 (sequence is synthesized)
aagtcgaagctgtccccggagagtgaggccttcacgaagcggtggcggaaggagccgaagttctctgatcggaggcgtgagcaagtggcatctccggaaagagccgaaacacggactcga

SEQ ID NO: 43727 - DNA, 120 bp, Artificial Sequence
  ENSG00000063244_17 (sequence is synthesized)
gcttaatcccaggaggggcccgagggcgagatccggaaatctccggaaagagccgaaggccgggacggttaggattgtcggaagtggccgattgcttggacagggccggcggagaagatc

SEQ ID NO: 43728 - DNA, 120 bp, Artificial Sequence
  ENSG00000063244_18 (sequence is synthesized)
ggagcaagtccgtggaagaagccaaagactgggacggattgaattgttggaagaacccgaactcgcagaggggactgggcgcagtggcacacgaggacacacggaaacctccgaacgttg

SEQ ID NO: 43729 - DNA, 120 bp, Artificial Sequence
  ENSG00000063244_19 (sequence is synthesized)
aggagataatctcggaaaagttacggaaacctgggaagtcggcgaaaccctacgttcgggtgttttcggaagcagccgaagcggccgcctgcttcgccttcgtccagtatccggagatag

SEQ ID NO: 43730 - DNA, 120 bp, Artificial Sequence
  ENSG00000063244_20 (sequence is synthesized)
cttcggagccaggctcggggggaggggcaagctcgcgggcgggcgggcgggtgagggggcggagcccgggcggggcggggagggctgccggaggcttgattaggtaggaggtggcgaagc

SEQ ID NO: 43731 - DNA, 120 bp, Artificial Sequence
  ENSG00000063244_21 (sequence is synthesized)
ggcggggtaggaccccagcccctcccaaaacagcctctccttctcccatagacccctttcttctccccttccccacggtaggaacatagcgtgtttatattttatggccaaactattttg

SEQ ID NO: 43732 - DNA, 120 bp, Artificial Sequence
  ENSG00000063244_22 (sequence is synthesized)
aattttgttgtccggccctcagtgccctgccctctcccttaccaggaccacagctctgttccttcggcctctggtcctctctggtcccctcctgggtttcttacgtagttgatttttcct

SEQ ID NO: 43733 - DNA, 120 bp, Artificial Sequence
  ENSG00000063244_23 (sequence is synthesized)
ctttagtctcccccgacctgcgcccagccccgtggcccctgcccctctcctactctctgtggcagtttcatatttgctaagacgaatttgctcattaaacattttgttgtattttacttt

SEQ ID NO: 43734 - DNA, 120 bp, Artificial Sequence
  ENSG00000063244_24 (sequence is synthesized)
ctttggcatcactgagtgaaatattgtggggctgagatccctcgtagcaacaaaaagtttgctaccatcgtcgaaggcaagccatgatggatttcttcaacgcccagatgcgcctggggg

SEQ ID NO: 43735 - DNA, 120 bp, Artificial Sequence
  ENSG00000063244_25 (sequence is synthesized)
cggacttcgacgagttcgagcggcagctcaacgagaataaacaagcctctagccctgcccctctcagggacgaccctggggtcaggcccctcagccctcgagggggaccaggagccagcc

SEQ ID NO: 43736 - DNA, 120 bp, Artificial Sequence
  ENSG00000063244_26 (sequence is synthesized)
gaaggcaagtaaggtccattctgactttctcaacctgcactttgctacatttgataaaccagcccccggactccagggccagattcctccacatcactcttttctcctcccctcccgtcc

SEQ ID NO: 43737 - DNA, 120 bp, Artificial Sequence
  ENSG00000063244_27 (sequence is synthesized)
ctcccctgccccctaccctctcccttgtccctctaccccgttcctccccttccctccattccctttccccaacctgcacgggtcagactctgctcctgcaagaccccccggccccctccc

SEQ ID NO: 43738 - DNA, 120 bp, Artificial Sequence
  ENSG00000063244_28 (sequence is synthesized)
ctccctgatgtccactcccttcaccttcctcacgcccgtgcaccctgtcccgcccatttccagccctggcccaagcactgggaagagtccacttaccttgaaaccagcacccctttccca

SEQ ID NO: 43739 - DNA, 120 bp, Artificial Sequence
  ENSG00000063244_29 (sequence is synthesized)
ggccctgccccagaccctctccttccctggagagagtggagcttacatggttgcggggagggtgaaagggtgcctgggagggggctcgcaggcccactgttggtcagactgaggttgccc

SEQ ID NO: 43740 - DNA, 120 bp, Artificial Sequence
  ENSG00000063244_30 (sequence is synthesized)
ctggagtggcttaggaagttgtgtaagtactgtggaagataggtgccttttccctgcttcccctaagtctctgtgagtggggtgctctcctgctggtagagaaggtgcctagggccggga

SEQ ID NO: 43741 - DNA, 120 bp, Artificial Sequence
  ENSG00000063244_31 (sequence is synthesized)
gaatgagctgtcacctgctgaggacacacagcttgtacgtggcagagccaggatcagaccaaaggtgctggggaagcgaggggcttgtggcctggacctcgtgcctgcgttgcggctgtg

SEQ ID NO: 43742 - DNA, 80 bp, Artificial Sequence
  ENSG00000063245_0 (sequence is synthesized)
ctgttgcttcccgtctcctcggcggctcccctcccccgcccggctctccgcgccccttctgggcggcggggcggcggagc

SEQ ID NO: 43743 - DNA, 120 bp, Artificial Sequence
  ENSG00000063245_1 (sequence is synthesized)
ccggcgcacgtcccgcgacaccgaggccgagcggggcagggggctgaccgccatgaccccccagagcccggcgtgagggggccgagatgcggtgacctgccagcacctgccgcagccttc

SEQ ID NO: 43744 - DNA, 120 bp, Artificial Sequence
  ENSG00000063245_2 (sequence is synthesized)
cttcgtccgggagtcgccccatctctccacgcatcggggccctgtgccccttgctgctgcagccgggcaccatgtcgacctcgtccttgaggcgccagatgaagaacatcgtccacaact

SEQ ID NO: 43745 - DNA, 120 bp, Artificial Sequence
  ENSG00000063245_3 (sequence is synthesized)
actcagaggcggagatcaaggttcgagaggccacgagcaatgacccctggggcccatccagctccctcatgtcagagattgccgacctcacctacaacgttgtcgccttctcggagatca

SEQ ID NO: 43746 - DNA, 120 bp, Artificial Sequence
  ENSG00000063245_4 (sequence is synthesized)
tgagcatgatctggaagcggctcaatgaccatggcaagaactggcgtcacgtttacaaggccatgacgctgatggagtacctcatcaagaccggctcggagcgcgtgtcgcagcagtgca

SEQ ID NO: 43747 - DNA, 120 bp, Artificial Sequence
  ENSG00000063245_5 (sequence is synthesized)
aggagaacatgtacgccgtgcagacgctgaaggacttccagtacgtggaccgcgacggcaaggaccagggcgtgaacgtgcgtgagaaagctaagcagctggtggccctgctgcgcgacg

SEQ ID NO: 43748 - DNA, 120 bp, Artificial Sequence
  ENSG00000063245_6 (sequence is synthesized)
aggaccggctgcgggaagagcgggcgcacgcgctcaagaccaaggaaaagctggcacagaccgccacggcctcatcagcagctgtgggctcaggcccccctcccgaggcggagcaggcgt

SEQ ID NO: 43749 - DNA, 120 bp, Artificial Sequence
  ENSG00000063245_7 (sequence is synthesized)
ggccgcagagcagcggggaggaggagctgcagctccagctggccctggccatgagcaaggaggaggccgaccagcccccgtcctgcggccccgaggacgacgcccagctccagctggccc

SEQ ID NO: 43750 - DNA, 120 bp, Artificial Sequence
  ENSG00000063245_8 (sequence is synthesized)
ttagtttgagccgagaagagcatgataaggaggagcggatccgtcgcggggatgacctgcggctgcagatggcaatcgaggagagcaagagggagactgggggcaaggaggagtcgtccc

SEQ ID NO: 43751 - DNA, 120 bp, Artificial Sequence
  ENSG00000063245_9 (sequence is synthesized)
tcatggaccttgctgacgtcttcacggccccagctcctgccccgaccacagacccctgggggggcccagcacccatggctgctgccgtccccacggctgcccccacctcggacccctggg

SEQ ID NO: 43752 - DNA, 120 bp, Artificial Sequence
  ENSG00000063245_10 (sequence is synthesized)
gcggcccccctgtccctccagctgctgatccctggggaggtccagcccccacgccggcctctggggacccctggaggcctgctgcccctgcaggaccctcagttgacccttggggtggga

SEQ ID NO: 43753 - DNA, 120 bp, Artificial Sequence
  ENSG00000063245_11 (sequence is synthesized)
ccccagcccctgcagctggggaggggcccacgcctgatccatggggaagttccgatggtggggtcccggtcagtgggccctcagcctccgatccctggacaccggccccggccttctcag

SEQ ID NO: 43754 - DNA, 120 bp, Artificial Sequence
  ENSG00000063245_12 (sequence is synthesized)
atccctggggagggtcacctgccaagcccagcaccaatggcacaacagcagccgggggattcgacacggagcccgacgagttctctgactttgaccgactccgcacggcactgccgacct

SEQ ID NO: 43755 - DNA, 120 bp, Artificial Sequence
  ENSG00000063245_13 (sequence is synthesized)
ccgggagcagcgcaggagagctggagctgctggcaggagaggtgccggcccgaagccctggggcgtttgacatgagtggggtcaggggatctctggctgaggctgtgggcagccccccac

SEQ ID NO: 43756 - DNA, 120 bp, Artificial Sequence
  ENSG00000063245_14 (sequence is synthesized)
ctgcagccacaccaactcccacgccccccacccggaagacgccggagtcattcctggggcccaatgcagccctcgtcgacctggactcgctggtgagccggccgggccccacgccgcctg

SEQ ID NO: 43757 - DNA, 120 bp, Artificial Sequence
  ENSG00000063245_15 (sequence is synthesized)
gagccaaggcctccaaccccttcctgccaggcggaggcccagccactggcccttccgtcaccaaccccttccagcccgcgcctcccgcgacgctcaccctgaaccagctccgtctcagtc

SEQ ID NO: 43758 - DNA, 120 bp, Artificial Sequence
  ENSG00000063245_16 (sequence is synthesized)
ctgtgcctcccgtccctggagcgccacccacgtacatctctccccttggcgggggccctggcctgccccccatgatgcccccgggccccccggcccccaacactaatcccttcctcctat

SEQ ID NO: 43759 - DNA, 120 bp, Artificial Sequence
  ENSG00000063245_17 (sequence is synthesized)
aatccagggcggaagggggcctggctccatccggctgccccattccggctccctgggagatcagtgttgtgagtgcatgtgaaatgggggatccccacccccagtgcccttccccttcct

SEQ ID NO: 43760 - DNA, 120 bp, Artificial Sequence
  ENSG00000063245_18 (sequence is synthesized)
ggggcccactcacactacaccctcttcctttcccaccccacctccccggagagaaactggacatggggcctggggaggggagctggccagaggaggacccctttcccgtggcattagaag

SEQ ID NO: 43761 - DNA, 120 bp, Artificial Sequence
  ENSG00000063245_19 (sequence is synthesized)
ggggaggggtggctggggcccccacccattccccctccctccaaactcccaacccccagtcagtgtttgagcctcctcgttcccctcacgcacccgctcacgcaccctcggtgaatcctt

SEQ ID NO: 43762 - DNA, 120 bp, Artificial Sequence
  ENSG00000063245_20 (sequence is synthesized)
ggtgatgattttggcaactttgggaataaatggcaattcccacgggcttggcactcccagattcccatctgtgatttcgtgtgtcccccagagccccttcatccagggacccagggctca

SEQ ID NO: 43763 - DNA, 120 bp, Artificial Sequence
  ENSG00000063245_21 (sequence is synthesized)
ggtcacatctctttctcgggggtggctggcaaccagcccctctgtctcagaagccctgatttccctgaccctcccaggtcaagggatggctgggttgagggtggactgtgcgaggcctgg

SEQ ID NO: 43764 - DNA, 120 bp, Artificial Sequence
  ENSG00000063245_22 (sequence is synthesized)
cggagctgtagcccacacaggtccaggtggtcgggaggccactcatggccagacgcttccggtgcaggaggccttgctcttgtgttgaggggacaccaggatgaggtcagagagtgcact

SEQ ID NO: 43765 - DNA, 120 bp, Artificial Sequence
  ENSG00000063245_23 (sequence is synthesized)
ggggttcagggaggagaagaatcctgagagatggcacatgtgcaacacaggtcaccgtcgccatcgcccgggcccaccgcaagcatcactaatccatccctgcactcctggaaagccggg

SEQ ID NO: 43766 - DNA, 120 bp, Artificial Sequence
  ENSG00000063245_24 (sequence is synthesized)
tcagcctctgccggctgagctgagtggaccaccaggcgcctcctggttgtcctctgtgtgctgttttcctctgtgtgctcttgtcctgggctggaccacacctggtgagactatccggga

SEQ ID NO: 43767 - DNA, 120 bp, Artificial Sequence
  ENSG00000063245_25 (sequence is synthesized)
gaatcctcgggccgccttgtgaggggggtgttgctgtcatctccagggctaggtgacagcttgttgcaggccccacagccagggcctcagggatggggatctggccatgtctgttttaag

SEQ ID NO: 43768 - DNA, 120 bp, Artificial Sequence
  ENSG00000063245_26 (sequence is synthesized)
ccgaacaggctgttcttccatgtggagtctccctccgtgatcccctggggtcaagtcctgacggctgggttcgctccctcagtgactccgacagctcttgtctcagaggtgctggggtga

SEQ ID NO: 43769 - DNA, 120 bp, Artificial Sequence
  ENSG00000063245_27 (sequence is synthesized)
aggctgtgtggggccaggcccctggggtcagacttcttgccccttctgcccgggggacgctctgggctcagggtggggccagacagctacatcacagggacacttgttatgggtcggggt

SEQ ID NO: 43770 - DNA, 120 bp, Artificial Sequence
  ENSG00000063245_28 (sequence is synthesized)
ccagggagcacccagccagtggagtgttggaggccactgagagggacatgactgcggtgtccgagcagcgtcgtggccaccctgtgtgcccactccctggtggacagacctacgtcacct

SEQ ID NO: 43771 - DNA, 120 bp, Artificial Sequence
  ENSG00000063245_29 (sequence is synthesized)
ggggattgcagagcaaaaggagtgctgttggggtgatgtgaggttggggttctgtttcttgctgtgaattgggtcatgacctgtgtcggagcgttctctggcctccacttgcccctgcag

SEQ ID NO: 43772 - DNA, 120 bp, Artificial Sequence
  ENSG00000063245_30 (sequence is synthesized)
accagggtgtctggagggttgtcgggggcttgatggaggaattgctgaccacaccatgcaggaagaggtgggtcccagggacacaggaactttggggtcagccggttccagattcagttg

SEQ ID NO: 43773 - DNA, 120 bp, Artificial Sequence
  ENSG00000063245_31 (sequence is synthesized)
cagaggagcatcccccttgcttagccagggaggggaagccctcttctcacacccggcctgggtatgttgtgggagagtcatttcccaggaggaaatggggactgttaccgggggaggggg

SEQ ID NO: 43774 - DNA, 120 bp, Artificial Sequence
  ENSG00000063245_32 (sequence is synthesized)
tgctgtccccaggcagcagcaagcgtcccttacgcttgggctgtccgagaccctgctgctctaggcggttgtgatgggggagccccacagggcacagagagccagctgaaggcggcagct

SEQ ID NO: 43775 - DNA, 120 bp, Artificial Sequence
  ENSG00000063245_33 (sequence is synthesized)
ctgggtgggatcacatggaaaggggaggcgagccgagcctccctcttgccaatcttggtctccccacagggtcatagctcctgggcccctcacttgtcagaccctccattcaccaaatta

SEQ ID NO: 43776 - DNA, 120 bp, Artificial Sequence
  ENSG00000063245_34 (sequence is synthesized)
aggataagtttcacgatttcgcactgcggagcctgcactccctttctcttcaaaaaagctgaggacgaagataaaatgatacagttggattagtccagtggaggggttaaaggtgtgagg

SEQ ID NO: 43777 - DNA, 120 bp, Artificial Sequence
  ENSG00000063245_35 (sequence is synthesized)
ctttaattctccccaccatttcctcatttggcaaaacagagaagacaggattgaaaaacaagacaaaaacccagaggcttgcacataaatttggggcttaactacagcatcttcggcatc

SEQ ID NO: 43778 - DNA, 120 bp, Artificial Sequence
  ENSG00000063245_36 (sequence is synthesized)
ttcttttccctacagtgcgaattacaaagtagcaccacagatctcgtgtctcctactttattcctctttctagaatattccagccaccaaagtgctcagcaggagctgctgtgtaggagt

SEQ ID NO: 43779 - DNA, 120 bp, Artificial Sequence
  ENSG00000063245_37 (sequence is synthesized)
cccccatgaggcccaagcacctgagcttagtgacatacacggttgaacgctgggagaatgctgggagcctgctgttgtccccgattgagggctccccccactgtgtgtgtatcactcttt

SEQ ID NO: 43780 - DNA, 120 bp, Artificial Sequence
  ENSG00000063245_38 (sequence is synthesized)
ctacagcagatgtgtctctctccccacagtgggatggcgagcttgttaaatggccgtgaggaagactttattcaggaccatcgagacaggtacaggtaccatcagtggatggaaaatcac

SEQ ID NO: 43781 - DNA, 120 bp, Artificial Sequence
  ENSG00000063245_39 (sequence is synthesized)
taagagcaaacctcaggggtccgggggttttcggctaaacccacctagcaggattcttgctgaaggcaggccagggtgatcagaggtcacctggggatggtggaggctgaagaagcctat

SEQ ID NO: 43782 - DNA, 120 bp, Artificial Sequence
  ENSG00000063245_40 (sequence is synthesized)
cagatgtgagggtggcgggggttgggggggatggcggcggggttcatttgctgaaaggattttacaagggcatgcacggatgggcctaggaggaggttcagatccctcaggtttggctaa

SEQ ID NO: 43783 - DNA, 120 bp, Artificial Sequence
  ENSG00000063245_41 (sequence is synthesized)
gcaagagtcatggtggtgctcccggctggctctcaggagcagatgtgcttctgacccgacgtcttcccccagagagggctgaagtggaaaaaaccccagaatttctccctgggacaggtg

SEQ ID NO: 43784 - DNA, 120 bp, Artificial Sequence
  ENSG00000063245_42 (sequence is synthesized)
aagcgatggggcgtgggacattcctgggtctcgactctgttcagggcctaggggttgggtggggaaggcacttgagggaaccttcctggagcccgtaggagcttcatccgagctcctggg

SEQ ID NO: 43785 - DNA, 120 bp, Artificial Sequence
  ENSG00000063245_43 (sequence is synthesized)
tcaccccgcccaccagagtccaggcccaccagagtcccctgccacctgtgctcaccctagccttacccctcgctctactcccgccctcgccctatcctcgctcctcgccctacgcttgcc

SEQ ID NO: 43786 - DNA, 120 bp, Artificial Sequence
  ENSG00000063245_44 (sequence is synthesized)
cctcgctctggagctgcgatgccagcctcagggctttcagtcctgccttgatctttttttatactgaaactcaattttacacacacaaacccactcccagccagcctctgccttttgcct

SEQ ID NO: 43787 - DNA, 120 bp, Artificial Sequence
  ENSG00000063245_45 (sequence is synthesized)
acacacaaacccactcccagccagcctctgccttttgccttttcctcatgttctcattgaataggaagaaatgcccttttttttcccccctagaaggagtcttgctctgttgccaggctg

SEQ ID NO: 43788 - DNA, 120 bp, Artificial Sequence
  ENSG00000063245_46 (sequence is synthesized)
cttccctcccgcctcccccaggcccttagtttgtgctgctctgcgttggttttctgcgtgtgctaaaaggggagggagagtttctgtgcccattcccaggcaccttcttgcagccgcagg

SEQ ID NO: 43789 - DNA, 120 bp, Artificial Sequence
  ENSG00000063245_47 (sequence is synthesized)
catctcccccacacgtgcttctagcttcccgggtgtggcgtgagccattgcgtccggccagaaatgttttatttcttgagaacttgtctgtctctgtgatgactgtgggttgtccagctc

SEQ ID NO: 43790 - DNA, 120 bp, Artificial Sequence
  ENSG00000063245_48 (sequence is synthesized)
atccctcaagcgccatcctgccaggcccttcactgtggtgagaaaccggcctactcacatcacaggtgcccctggagtttctcaaactgcagcccaaggattggctgcttgcttttgtaa

SEQ ID NO: 43791 - DNA, 120 bp, Artificial Sequence
  ENSG00000063245_49 (sequence is synthesized)
aaaaaaatgttttattagagtgcagccacggctgcttctgcactacagtggcaatggtgacattgagtgtggcagagaccgagtgtcccttgagcctaaaatatttactatctggctctt

SEQ ID NO: 43792 - DNA, 120 bp, Artificial Sequence
  ENSG00000063245_50 (sequence is synthesized)
caacaaaaagtgtgctgacccccggtgattgcttgtatgtggcaggggtctaaggcctgcctgcacgtcctgggacagcccacgcttccacagggttccagcatgctttccgccgagaaa

SEQ ID NO: 43793 - DNA, 120 bp, Artificial Sequence
  ENSG00000063245_51 (sequence is synthesized)
tcgctccctttgctgtttgttttgtattgaatgtttcttcatgcttttgttttactttcagggataattatataatgttatgtttcatccacattattttagtatggatatttataattt

SEQ ID NO: 43794 - DNA, 88 bp, Artificial Sequence
  ENSG00000063245_52 (sequence is synthesized)
cataaagcactatttaatgactgctccataaatacaaacttcctttccttattattattatttattttttttttgagatggagtcttg

SEQ ID NO: 43795 - DNA, 76 bp, Artificial Sequence
  ENSG00000063245_53 (sequence is synthesized)
cctcccgggttcaagcgattctcctgacttgggactacaggtgcgtgcgaccacagccaactcatttttctgaact

SEQ ID NO: 43796 - DNA, 120 bp, Artificial Sequence
  ENSG00000063245_54 (sequence is synthesized)
caggcgtgagccacggcacccggcccataattacaaactttctgagggacatcttgaagcacacaaaactatagacaatattatcataaccacccctgcaaatgcctcactcgtgttcag

SEQ ID NO: 43797 - DNA, 120 bp, Artificial Sequence
  ENSG00000063245_55 (sequence is synthesized)
aatgcctcactcgtgttcagccatcatttacatttgaaccactcctgtttcacctacagcctcctcatggcccctcccctggagcacttaaaaatggtaatgacatgctctctagtaatc

SEQ ID NO: 43798 - DNA, 120 bp, Artificial Sequence
  ENSG00000063245_56 (sequence is synthesized)
gttgtgtgttactgtcaaaaggtataactcatgcattgatgggggtaacccctacagcagttaaccctgcgtgctcagaggggaatgaaaggtagctcagaggctcgggaggtgaggttg

SEQ ID NO: 43799 - DNA, 120 bp, Artificial Sequence
  ENSG00000063245_57 (sequence is synthesized)
caaaatggcttgtgttgtggggaatgttctcatccacccaaatcaagcatcactacatccatccgcaggggaggcaagcttagggcatcacgtccaggagtggccaggtcccgatgtcac

SEQ ID NO: 43800 - DNA, 120 bp, Artificial Sequence
  ENSG00000063245_58 (sequence is synthesized)
ggggagccgggctgggacaagctccagacggccagggtggtgtgggtttgcagtgggagggctggcgcgggggccctgagggctccctggttcccatcttatcaagatgctggactcggt

SEQ ID NO: 43801 - DNA, 120 bp, Artificial Sequence
  ENSG00000063245_59 (sequence is synthesized)
cccatcttatcaagatgctggactcggtgcttgaaacatgtcctgacagccacatgaaaagggttagaaatgatactgtttcgcctgggtgctgtggctcatgcttgtaatcctagcact

SEQ ID NO: 43802 - DNA, 68 bp, Artificial Sequence
  ENSG00000063245_60 (sequence is synthesized)
tgatactgtttcctgtatttttttctcttagtatcttaagaaatacatgatttgaacaaggaccttgt

SEQ ID NO: 43803 - DNA, 120 bp, Artificial Sequence
  ENSG00000063245_61 (sequence is synthesized)
tagtatcttaagaaatacatgatttgaacaaggaccttgtgtctcctctcccctttcccggactattctgaccccagcagttctcagaaggagctgacattaatgagaacttctccctgt

SEQ ID NO: 43804 - DNA, 120 bp, Artificial Sequence
  ENSG00000063245_62 (sequence is synthesized)
tagacccttaaaatactgagctttcgggaccctgcctggcttgttcctgtaaaacggtcttgtctgtggtaaatactaaggtttttggtctcacagccgaggaaatcaaggatgtggatg

SEQ ID NO: 43805 - DNA, 120 bp, Artificial Sequence
  ENSG00000063245_63 (sequence is synthesized)
cacacagagtgagatttggagcaggagtttaataggcaaaaggaagaaacagctctgtcacagagacgggtcccgaacgggttgtgaagttgtagaagaaatgtcaggggttttatagat

SEQ ID NO: 43806 - DNA, 120 bp, Artificial Sequence
  ENSG00000063245_64 (sequence is synthesized)
gggctagtgaggaggggtgtcttttcttcctagggcctgaagaaccagttaggaccaggtgtgctgtctgcatcgagcagagtctctagcagcccccaccccattctttttttttttttt

SEQ ID NO: 43807 - DNA, 120 bp, Artificial Sequence
  ENSG00000063245_65 (sequence is synthesized)
gcctcccaaagtagtgggattgcaggcgtgagccaccgcgccgggcccccaccccattctttgatcctgcaggcaggcccttcgtttgtgctgctctgcgctgctgcttatctgtgtgtg

SEQ ID NO: 43808 - DNA, 120 bp, Artificial Sequence
  ENSG00000063245_66 (sequence is synthesized)
ctaaaaggggagggagtgtttctgtgcccattcccaggcaccttcgtgcagctgcaggcatctcccccacgcgcttccagcttcccttagtgtgcctaaagaaagggaaaggaatgtgct

SEQ ID NO: 43809 - DNA, 120 bp, Artificial Sequence
  ENSG00000063245_67 (sequence is synthesized)
ttaggcccactgttttcactggggcccatctatgtatgtggcttggtgattacccaggaacctcccaagtctgtgcccgagttgcttatctgtgttttacagcctgaaagatcaggctgc

SEQ ID NO: 43810 - DNA, 120 bp, Artificial Sequence
  ENSG00000063245_68 (sequence is synthesized)
tctttgttaggagaagtgatttctttgaactgcgtggtgtggtgagaaagggagcaatttctaagctgctttttgttaggaagttttttgctggggactctcttcgccctatctacctaa

SEQ ID NO: 43811 - DNA, 120 bp, Artificial Sequence
  ENSG00000063245_69 (sequence is synthesized)
atgatttctgtttcttacatcaattgggtattgatttcaggtagaatgggtgaatgcatttattcgttcatctaagccgcatttactcctttcttttctttcactgttgttttttttttg

SEQ ID NO: 43812 - DNA, 120 bp, Artificial Sequence
  ENSG00000063245_70 (sequence is synthesized)
ggattacagccgtgagccaccgcacctggcctctttcagttttgatagcagattatttcctttggccctgcgtggtctctctctggctgggcagctctgggccagccataaatggagggg

SEQ ID NO: 43813 - DNA, 120 bp, Artificial Sequence
  ENSG00000063245_71 (sequence is synthesized)
taaatggaggggagggcgtgtgtgtggccacgtgtgtttctgtcctggacaacactgtccggaggggcctaagtgggaagtgccctcaaccaaggagatagctgctgtgtgtgtgtgtgt

SEQ ID NO: 43814 - DNA, 120 bp, Artificial Sequence
  ENSG00000063245_72 (sequence is synthesized)
aggagatagctgctgtgtgtgtgtgtgttgtgtgtggttgggacagtcggggattctcacttttttttaaaatttgagatggagtttcactgtcgtcacccaggctagagtgcaatggtg

SEQ ID NO: 43815 - DNA, 86 bp, Artificial Sequence
  ENSG00000063245_73 (sequence is synthesized)
tcggcccggcgcagcctgggatcctcactttttcgcagattggtcactagcagggcgtctgatggaactttctgagatgccggaaa

SEQ ID NO: 43816 - DNA, 120 bp, Artificial Sequence
  ENSG00000063245_74 (sequence is synthesized)
ctagcagggcgtctgatggaactttctgagatgccggaaatgttctctgtgctgtacaaaagggatgccactagccacatgccacgtagaacagttgaaatgtggccagcatgagatttt

SEQ ID NO: 43817 - DNA, 120 bp, Artificial Sequence
  ENSG00000063245_75 (sequence is synthesized)
tttaatcttgccaatttttgatggatttaagtttaagcacctgcgtgtgagcggctaccgcgtgggctgggattggaggaagctggaaagcgctcccctgcgtttcggctgctggcccag

SEQ ID NO: 43818 - DNA, 120 bp, Artificial Sequence
  ENSG00000063245_76 (sequence is synthesized)
cagagggcgccggagagcggacggagccgcaggcggggttgtgggaagacgctgggatcccgtgcgcgcttgtgctccttccttctgggccagcgcgcagactatcaaccgaggtattca

SEQ ID NO: 43819 - DNA, 120 bp, Artificial Sequence
  ENSG00000063245_77 (sequence is synthesized)
gtccctcggaaacccagttcctccgtttccaggcttctcgcccacacggagacagtcgctctcacacgtacctctcgcgggctcttactcgtggtcccggtctcctcctggtccccacct

SEQ ID NO: 43820 - DNA, 120 bp, Artificial Sequence
  ENSG00000063245_78 (sequence is synthesized)
tccagcccagcgcgcacactagacggcacgtgctctccacgctctttctccagcgccccttgctcacccgccccccgttggagtggcccatcctctccgcttagacacctgcagtcactg

SEQ ID NO: 43821 - DNA, 120 bp, Artificial Sequence
  ENSG00000063245_79 (sequence is synthesized)
tcactagctgaactgcgccctcctgaaagctctatgttgaaaccctaccccccaccctgcaccgaccccgtaccccagaatggggctgtatttggagacagggcctttacaaggtaagta

SEQ ID NO: 43822 - DNA, 120 bp, Artificial Sequence
  ENSG00000063245_80 (sequence is synthesized)
aggttaaaatgaggacattagggtgggtcctaatccaatctgactgttatatagtggggttgcaccttcatgtgaggacgccgggagaagacagccgtctgggagccaaggagagaggcc

SEQ ID NO: 43823 - DNA, 120 bp, Artificial Sequence
  ENSG00000063245_81 (sequence is synthesized)
ttggcggaagccaaccctgcagcaccttcatcttgaatttctggtttccagaactgtgagaaaatccattgacgttctatagcgctcccagctggcggtactttgttatgacagccctaa

SEQ ID NO: 43824 - DNA, 120 bp, Artificial Sequence
  ENSG00000063245_82 (sequence is synthesized)
catgaatgcagccatccacactgtctgggggaaggcacacacaccccacagcacccttgctgtctcaccccgtatcgcaaaagctcacgcatgtgtctctcccgagtccctggagggtcc

SEQ ID NO: 43825 - DNA, 120 bp, Artificial Sequence
  ENSG00000063245_83 (sequence is synthesized)
tgccacctacatctctctccttggcctgccgcctgtgatgctcctgggccccctgctccagcaccgctcccttccttctgtaatacagacaacagagacaggagatggcctggccccact

SEQ ID NO: 43826 - DNA, 120 bp, Artificial Sequence
  ENSG00000063245_84 (sequence is synthesized)
tcatttctgttccctgggaaataagcatcgcaagtgatccgtagaatggtagacatcatccacttcccaagcatctctggctgaatgctgttctcatccacttcccaagcatctctggct

SEQ ID NO: 43827 - DNA, 120 bp, Artificial Sequence
  ENSG00000063245_85 (sequence is synthesized)
gaatgctgttctacacatgcacgtgggaggcaccagggagcccagaagaaatgaaaagcctgggcagactcgcagttctgccacacagtgaatgtgctactcaagccactcagcctgggc

SEQ ID NO: 43828 - DNA, 120 bp, Artificial Sequence
  ENSG00000063245_86 (sequence is synthesized)
tgcagaggttggaagcctcactggcctgaggtttctgagtaagctctgacccaatcattgactattaaacttcagaggtccatggagacctcttaggagtctttgaaggaacttagcata

SEQ ID NO: 43829 - DNA, 120 bp, Artificial Sequence
  ENSG00000063245_87 (sequence is synthesized)
gataccgatagctgctgactgcagggagatggggagatatgttttgtaaacctgtccaggcaacttttttgcctacggaaacacacaaaaacgaaaacaaaccaatgaaaaaaacctctc

SEQ ID NO: 43830 - DNA, 120 bp, Artificial Sequence
  ENSG00000063245_88 (sequence is synthesized)
tctcagaacgatacagaatccagagccactacaacacatttcatgaagtggcgtgagcctgtaattccagcagtttgggaggccggggcgaatggatgacttgaggtcaggagttcgaga

SEQ ID NO: 43831 - DNA, 120 bp, Artificial Sequence
  ENSG00000063245_89 (sequence is synthesized)
gagatcgcaccattgcactccagcatggacaacagagcaagaccctttcttagaaaaaagaaaagtatccccgaacattatcagagtcaagttaataaaggccaaaggtagagaaaatct

SEQ ID NO: 43832 - DNA, 120 bp, Artificial Sequence
  ENSG00000063245_90 (sequence is synthesized)
aaaggccaaaggtagagaaaatcttgaaagtatcgagaaaatgacatgtcaatcataaggtcaggttcttcaacagtcatactgacattgtggctggaatatttgttgttgtgggatata

SEQ ID NO: 43833 - DNA, 120 bp, Artificial Sequence
  ENSG00000063245_91 (sequence is synthesized)
tatatatatatatatttagagtgttgtgggatatatatatatatttagagacaaggtcttgctctatcactaaagctgcattgcagtgtgtgatcatagctcaccatgggattcttgatt

SEQ ID NO: 43834 - DNA, 120 bp, Artificial Sequence
  ENSG00000063245_92 (sequence is synthesized)
ttcagtgagtataaagtgtaagacaaaataagtcttagttcaggtatgctggatgggaagccagaggtctgcatagcagttacaaagaaggccttattatctggaagaaaagggaccata

SEQ ID NO: 43835 - DNA, 120 bp, Artificial Sequence
  ENSG00000063245_93 (sequence is synthesized)
gaatgtccattggttggggaacaacccagctttagtttttccagattctctgcatgtgcaggtttatgagactggagaactttgatttcttcttcctcctcctcctctcttttcttcttc

SEQ ID NO: 43836 - DNA, 120 bp, Artificial Sequence
  ENSG00000063245_94 (sequence is synthesized)
ctcttcctcctttttctcctcctttcttcctttatttttctttcttcctttcctcctctttcttctcctttttcctcctcttttcttcctttcttctctttttcttcttctttttttttt

SEQ ID NO: 43837 - DNA, 86 bp, Artificial Sequence
  ENSG00000063245_95 (sequence is synthesized)
aagaccgtgttactgttttagaaaagtgaaagagggccgggcgtggtggctcatgtctgaaatcctagcactttgggaggctgagg

SEQ ID NO: 43838 - DNA, 89 bp, Artificial Sequence
  ENSG00000063245_96 (sequence is synthesized)
cccagcattgcaggaaagagagaaaaaggagggaaggggaaggaaaaggaaagaaagaaaagaggggaagggaagggagagatttaaaa

SEQ ID NO: 43839 - DNA, 120 bp, Artificial Sequence
  ENSG00000063245_97 (sequence is synthesized)
aaagaaagaaaagaggggaagggaagggagagatttaaaaaacaatagtaaagagagatttaaaaaacaatagtaaagagagattaaaaaaaaaaagtaaatgggccaggtgcgatggct

SEQ ID NO: 43840 - DNA, 120 bp, Artificial Sequence
  ENSG00000063245_98 (sequence is synthesized)
aaaagtaaatgggccaggtgcgatggcttgtgcctgtaatcccagcagtttgagaggctgaagtgggaggatcacttgaagccaggagtaccagaccagcctgggaaacatagtgagacc

SEQ ID NO: 43841 - DNA, 68 bp, Artificial Sequence
  ENSG00000063245_99 (sequence is synthesized)
aaccccatctctactaaaaataccaaaacaaaaactagcagggcatggtggcgcatgcctgaaatccc

SEQ ID NO: 43842 - DNA, 89 bp, Artificial Sequence
  ENSG00000063245_100 (sequence is synthesized)
ttgtgccactgcactccagcctgggcgagcaacagagtgaggctgtctctcaaaaaaaaaaaaaaaggaacggtagtgtgcacctgtgc

SEQ ID NO: 43843 - DNA, 120 bp, Artificial Sequence
  ENSG00000063245_101 (sequence is synthesized)
gctgcagtgagctatgatggcaccactgccctccagactgagccaaaaagcagaccctgactctaaaacaaaagaaagaacaaataacaaatgaaaataaatacccaaaaaccagtcaaa

SEQ ID NO: 43844 - DNA, 120 bp, Artificial Sequence
  ENSG00000063245_102 (sequence is synthesized)
ataaatacccaaaaaccagtcaaatgtgaaactggtgtcaggggtatgttctccatgttgagccccttctgtggaatatgacagtgtctctatttcgggtaaaggaaagaccaaaataac

SEQ ID NO: 43845 - DNA, 120 bp, Artificial Sequence
  ENSG00000063245_103 (sequence is synthesized)
tttccaagatgaaaagctaagagtgctgatctcatcacagacatagccagctcttcagttcagaccacctggaaaccctccccatgtcttttcagaacaatgtcctaagaaccatagggg

SEQ ID NO: 43846 - DNA, 120 bp, Artificial Sequence
  ENSG00000063245_104 (sequence is synthesized)
aagtggccataaaaaccatctttcctttgcagactggggtggggactctggccaatgccattctgttcttccataatatctttcccatcttgactgagcatcaaatgaggcccacacaca

SEQ ID NO: 43847 - DNA, 120 bp, Artificial Sequence
  ENSG00000063245_105 (sequence is synthesized)
agattctcacccacatggccgtggcaaactccttggttcttctttccactggaatcccccacacaatggtgtcttttgtcctatggaaacccttgtccagtcttgagtgtaaactcgtgt

SEQ ID NO: 43848 - DNA, 81 bp, Artificial Sequence
  ENSG00000063245_106 (sequence is synthesized)
ctatggaaacccttgtccagtcttgagtgtaaactcgtgtttacaggtcttaaagtcctgacctggtgatccgcccgcgtg

SEQ ID NO: 43849 - DNA, 120 bp, Artificial Sequence
  ENSG00000063245_107 (sequence is synthesized)
ggccaaaagcaaatagaaaattgggcaaaaaagttcataattgcttaaacatatggaaaacctggaagtaaaattaagcaagtaagtgcgagcactctacattgaagattatagaaaatt

SEQ ID NO: 43850 - DNA, 120 bp, Artificial Sequence
  ENSG00000063245_108 (sequence is synthesized)
cagcctcccaaatatccaaagaatccaggagtgtgccaagagatccaagagtaggtccacaatttctcattctcaggagaatctgagattatatttcaatctaatgataactgattatat

SEQ ID NO: 43851 - DNA, 120 bp, Artificial Sequence
  ENSG00000063245_109 (sequence is synthesized)
aatccaatttctgcatcatcttgcttttatgttttgtaataaaaattttagaccaggccaataaggcatcagcaatttaccgtagggaactagggaatgtttaattatgacaatgaagtg

SEQ ID NO: 43852 - DNA, 120 bp, Artificial Sequence
  ENSG00000063245_110 (sequence is synthesized)
tttaatattgtgttttgaaatataaacagtgtagatatatttgaataatactgaatttttagaaaaatctattggggtgtcatatataaaaggataagtagagatttggaaatgcttttt

SEQ ID NO: 43853 - DNA, 120 bp, Artificial Sequence
  ENSG00000063245_111 (sequence is synthesized)
tattggacaagaaaattgatcaaatcgaaatctggacaaactagaaagtctggatgctagcaatacaatctatagacacattctagcatcacttctgtgtcagaagtatccggattgtgg

SEQ ID NO: 43854 - DNA, 120 bp, Artificial Sequence
  ENSG00000063245_112 (sequence is synthesized)
tgcctacaaatgcatgctcctacacaccaagacatccattaagaaaataaagccatgctttccagagcgtttagcacttgtttaacgtacttgtgcttctaaatatcacaaggcaggatg

SEQ ID NO: 43855 - DNA, 120 bp, Artificial Sequence
  ENSG00000063245_113 (sequence is synthesized)
ggatttctaaagacaaggggatataggaccgaggcaaagacaatcagcatgtacactgaatcacactccataatcatattgctagaacacttagggagtacctctgaaatcacagccctg

SEQ ID NO: 43856 - DNA, 120 bp, Artificial Sequence
  ENSG00000063245_114 (sequence is synthesized)
ctgccatgatgtgcaattacaggatagaggtgccaggtgaaggtcccactgtggccaaggaaagcctttgtgagacgactacttcagggtgttccccatcagaggagcacacccctgatc

SEQ ID NO: 43857 - DNA, 120 bp, Artificial Sequence
  ENSG00000063245_115 (sequence is synthesized)
ttgtattcctcgtcaatccaaggtccatgtgaaatggtcagatggggaattttttcttccacagacatcaggatcttctgagtttcttcatcaaagccagatttgtgcagcctgggaaaa

SEQ ID NO: 43858 - DNA, 120 bp, Artificial Sequence
  ENSG00000063245_116 (sequence is synthesized)
tagaaataaagtttttttttttgtttttcatttttacacagtattgcctctctacattctgatgtctacctctcctctcctctttattctttcctagaaatcactgggagaattgtactg

SEQ ID NO: 43859 - DNA, 120 bp, Artificial Sequence
  ENSG00000063245_117 (sequence is synthesized)
aatttgaaaaacaagcatgaatctttcctataggataggaagcctctgatttataccataaagtgaaatttcatatacaggatgtatcaattaagatttaattcaaaaaagatgaattta

SEQ ID NO: 43860 - DNA, 120 bp, Artificial Sequence
  ENSG00000063245_118 (sequence is synthesized)
agttaaaaagaaaaacacaggataacttccattcatctgatgttcatatgccctggcacatctattgcttcttataatgtgcttgcttaaaaaaaaaaaacatgagcttttctcagagac

SEQ ID NO: 43861 - DNA, 120 bp, Artificial Sequence
  ENSG00000063245_119 (sequence is synthesized)
actaatataatgaattcatgtacccatcaccaacttctacaattaccaatattcagcctcttccatttacaacctgcccattttctaagaaataattaaagcacatgctacacccataaa

SEQ ID NO: 43862 - DNA, 120 bp, Artificial Sequence
  ENSG00000063245_120 (sequence is synthesized)
agggcaggggtccaggagggggtccctgggtccacgtctagccagcgcctcccttcctggctgaccacttctatcccgcagtccccttctggaagccatgacgctgatggagtacctcat

SEQ ID NO: 43863 - DNA, 120 bp, Artificial Sequence
  ENSG00000063245_121 (sequence is synthesized)
agggatgaaaagttcagttgggtagagtgggccagaaccatccacctgtctttaaaagaagtgtgcatctttattttagagaaattgcagacttagagaaaaactgagaattgttctcaa

SEQ ID NO: 43864 - DNA, 120 bp, Artificial Sequence
  ENSG00000063245_122 (sequence is synthesized)
ggtttcccacccgaatgttgacctctgacccgtctctgcctccacgttgcttgagtgccttgcaaactctccaggtgtctcaaagaacacggactgtcttgtcctgtgcagtgagctgcg

SEQ ID NO: 43865 - DNA, 120 bp, Artificial Sequence
  ENSG00000063245_123 (sequence is synthesized)
ccaagcccagcaccaatggcacaacagcagccgggggattcgacacggagcccgacgagttctctgactttgaccgactccgcacggcactgccgacctccgggagcagcgcagcttact

SEQ ID NO: 43866 - DNA, 120 bp, Artificial Sequence
  ENSG00000063245_124 (sequence is synthesized)
tcctcctggcttctactccctcaacagctatcgttcttgctttatacgttgaatctctgtctctttataacttctaaatgttctcagcatcaggaaaatataaaaaataagttcacaaat

SEQ ID NO: 43867 - DNA, 120 bp, Artificial Sequence
  ENSG00000063245_125 (sequence is synthesized)
aattctttcatttcagagttgagcaaactgtgtctcaaggaggtgtgcgctgcaggtagctgatgtggccaggatttgaacccacattttatattctttgccattagattccatttttct

SEQ ID NO: 43868 - DNA, 120 bp, Artificial Sequence
  ENSG00000063245_126 (sequence is synthesized)
tatctcttatttctcagcgccaggtctctttttgtttctgggcctctttcttccttggcctcctgcctccctgtcttcccatgttcttgtatctgctgctgcctgtgtttttctcattgt

SEQ ID NO: 43869 - DNA, 120 bp, Artificial Sequence
  ENSG00000063245_127 (sequence is synthesized)
gtctctgcctagctccctctgcccaggtttctatgtgtctctttctgtcagaactgtcttctatttcttctcagtccccttctctgcatttgttacatcatctcttcatcttaatgtatt

SEQ ID NO: 43870 - DNA, 120 bp, Artificial Sequence
  ENSG00000063245_128 (sequence is synthesized)
aggctggggctgttttgggactccagagagttactttttaactagctacatctgtcttcaggtgcctggctttctggcctgaggtggaagcagaggccagcctctctccgtcatccctat

SEQ ID NO: 43871 - DNA, 120 bp, Artificial Sequence
  ENSG00000063245_129 (sequence is synthesized)
ctcccctgggcttacatcatggcggggctttgaaaatctccctctgtggcttcttggagccgcatagatgggtgatcagagctggctctggaaccaggctgctccaggagtaaggagccc

SEQ ID NO: 43872 - DNA, 120 bp, Artificial Sequence
  ENSG00000063245_130 (sequence is synthesized)
agtctttgcatgcagtgttgaaaaaggtaatgtccctcttgtgctgagcgagcacctggcacacagcagggacccaggcagtggggctgttaggttccttatctctcctgagccttgggc

SEQ ID NO: 43873 - DNA, 120 bp, Artificial Sequence
  ENSG00000063322_0 (sequence is synthesized)
ggcgggactaactagcaaacggggactagaaatagggatgctgaaaagcaacggggagagacgcagtcgtaacgcacttccggcggtctacgcgaggaagatggctgcatcccagcagca

SEQ ID NO: 43874 - DNA, 120 bp, Artificial Sequence
  ENSG00000063322_1 (sequence is synthesized)
agcttcagcggcttcctcagctgctggtgtatcgggtcctagttcggctggcggcccgggtccccagcagcagccgcaaccgccagcacaactggtgggccctgcccagagcggcctcct

SEQ ID NO: 43875 - DNA, 120 bp, Artificial Sequence
  ENSG00000063322_2 (sequence is synthesized)
gcagcaacagcaacaggacttcgatcctgtgcagcgttataagatgctcatcccgcagctgaaggagagtctacagaccttgatgaaggttgcggcccaaaacttgattcagaacactaa

SEQ ID NO: 43876 - DNA, 120 bp, Artificial Sequence
  ENSG00000063322_3 (sequence is synthesized)
catcgacaatggacaaaagagcagtgatggacccatacagcgctttgacaagtgcctggaagagttctatgcactctgtgaccagctggagctgtgcctgcgcctggcgcatgagtgcct

SEQ ID NO: 43877 - DNA, 120 bp, Artificial Sequence
  ENSG00000063322_4 (sequence is synthesized)
gtcacagagttgtgacagtgccaagcactctccaacgttggtgcccacagccaccaagcccgacgcagtgcagcctgacagcctcccctacccacagtacctggcggtcatcaaagccca

SEQ ID NO: 43878 - DNA, 120 bp, Artificial Sequence
  ENSG00000063322_5 (sequence is synthesized)
gatttcctgtgccaaggacattcacaccgccctgctggactgtgccaacaaggtcacgggcaagacacccgcaccacctgctggccctgggggcactctgtgaagtgggggacagggagt

SEQ ID NO: 43879 - DNA, 120 bp, Artificial Sequence
  ENSG00000063322_6 (sequence is synthesized)
ggggcaggcagtggttggtgggtggtgtgcaaagggaatgaagagcgtcctgggcctaaacacagcagcctcctctcttcctgcctgagcaccgcagcgggagccagcagggggcagcag

SEQ ID NO: 43880 - DNA, 120 bp, Artificial Sequence
  ENSG00000063322_7 (sequence is synthesized)
aggccaacagggagctcgcaggccgggcccctgcgtccctgccccttcttcctgctccccctcctagcctagggtagactttgaactgtgtgtgttgatgacttctctgttccacaggcc

SEQ ID NO: 43881 - DNA, 120 bp, Artificial Sequence
  ENSG00000063322_8 (sequence is synthesized)
ctcccccattcttgcctgggtgtggagccctggctgtcccctctccctcagtccttcctgactgtctccagctgggaggtggtctctgtgtgccactcctctgtgtctctattacagttg

SEQ ID NO: 43882 - DNA, 120 bp, Artificial Sequence
  ENSG00000063322_9 (sequence is synthesized)
tgtctctctcatcctgtctctttttcccttgtttctctgttcctgttaatgtgtttctccccatggtcctatttctctcactctgacctctctctcttagtcccctttagctgtcttcta

SEQ ID NO: 43883 - DNA, 120 bp, Artificial Sequence
  ENSG00000063322_10 (sequence is synthesized)
tccccagctcctaactgggactctgtgtctatgcagggggccagcacccctgggttatctggggctaagggaagggacttcatttccaggggccacagccaagcccagagtcccccagcg

SEQ ID NO: 43884 - DNA, 120 bp, Artificial Sequence
  ENSG00000063322_11 (sequence is synthesized)
gctcgcatgtcagcccagaccccagggtccttggcctaggagaggagcagtggaggggcccaggctctgagctccacaggtctgagcagggagcaactcaggcccccacccaagcctgcg

SEQ ID NO: 43885 - DNA, 120 bp, Artificial Sequence
  ENSG00000063322_12 (sequence is synthesized)
tcagcggaacttgagtgaggggcgttgtgcaatttgtggcaaggctggcccagctggatgcctgggtcccagtatttttagccccaaaggagaagtgaaaaggccccagccggggtgaat

SEQ ID NO: 43886 - DNA, 120 bp, Artificial Sequence
  ENSG00000063322_13 (sequence is synthesized)
catcagtcctggggaagaacccaggcgcctgagccccagctccgggaagcaggcactggggagggggcttcaaggagggagtgccccctcagactccctgcttccctggaagcttcagga

SEQ ID NO: 43887 - DNA, 120 bp, Artificial Sequence
  ENSG00000063322_14 (sequence is synthesized)
tgactcagcctggttggagaactgccccacccagtatcttctgtgccatggttcccacattcgcactccatggcctcctgtcctggaccccacgtctgcaaggaaaccctaggaccatgg

SEQ ID NO: 43888 - DNA, 120 bp, Artificial Sequence
  ENSG00000063322_15 (sequence is synthesized)
atacctctgtgattcacgctgagcccaagtccccacactggaaaactgggaaatggccagctgtgtgtcccaggaaattcctccccttattcttccttgaagtgcccgagcatgtagggc

SEQ ID NO: 43889 - DNA, 120 bp, Artificial Sequence
  ENSG00000063322_16 (sequence is synthesized)
aagaaggaaggctgaagcgctgtccctaggaggaatttctccttcaggggagcctcagttttgcccatttatctaattgaatcagttttttacccaatcccccgattttgtaggataatc

SEQ ID NO: 43890 - DNA, 120 bp, Artificial Sequence
  ENSG00000063322_17 (sequence is synthesized)
tcccttatctaaagtcaactgattatggactttaatcacatctacaaaacacttccatggcgacagctagatgagtgtttgaataactgggactgtagcccgtccaagttgacacataaa

SEQ ID NO: 43891 - DNA, 120 bp, Artificial Sequence
  ENSG00000063322_18 (sequence is synthesized)
agactctgtctcaaaaaaaataaaaaactgaccatctagtccttgtcatctgggcaccctcacacatctccttaaccacacttaatctccaaataagtacgataacatagtcatagtccc

SEQ ID NO: 43892 - DNA, 120 bp, Artificial Sequence
  ENSG00000063322_19 (sequence is synthesized)
cttaatctccaaataagtacgataacatagtcatagtcccacccaacatgatgcagttatcttgcatacaactgaagacaactaaccctttccccaacagagcccaccagcagtggtgga

SEQ ID NO: 43893 - DNA, 120 bp, Artificial Sequence
  ENSG00000063322_20 (sequence is synthesized)
gatgtcggtccatgagcgcacacacaagactgagggactgtcggccctcccaggtggtgtcaacacaacatcacacacaggtgggggggcctgatagcccagcacccatgatacagggcc

SEQ ID NO: 43894 - DNA, 120 bp, Artificial Sequence
  ENSG00000063322_21 (sequence is synthesized)
taccaatgcttaaaaccacacccagggagcccacagaggcactcagtgggtggtggggtgatggatacacatctatcaggcacagggcggaggtgggcaccactgagttgcactcagcaa

SEQ ID NO: 43895 - DNA, 120 bp, Artificial Sequence
  ENSG00000063322_22 (sequence is synthesized)
acacattgggtatcttgtgcccaaggcctgtatttgtggagctgatgttctagtgagagacagtaaatgtgacaaaagtaaaatatatcagatggtgagaaaacagaaaaatgagatcag

SEQ ID NO: 43896 - DNA, 120 bp, Artificial Sequence
  ENSG00000063322_23 (sequence is synthesized)
aagtggagatgttggggccaggcacagtggcccaggcctgtaatcccatcactttgggaggtgcaggcaggcagatggcttgagcccaggaattcaagaccagtccgagcaacatagcaa

SEQ ID NO: 43897 - DNA, 89 bp, Artificial Sequence
  ENSG00000063322_24 (sequence is synthesized)
aaaattagccaggtgtggtggtgcgtgcccaggttcccaggtactcggaggctgagaggtgggaggatgccttgagcttgagaggttga

SEQ ID NO: 43898 - DNA, 120 bp, Artificial Sequence
  ENSG00000063322_25 (sequence is synthesized)
gctgtgatcgcaccactgcactccagcttggttcatggagaccctgtttttttaaaaaaagaagtggaggtgtttacaccagcaaaatactcattttttaagtgtaattaagttgaagat

SEQ ID NO: 43899 - DNA, 120 bp, Artificial Sequence
  ENSG00000063322_26 (sequence is synthesized)
agatcaaaaaatggaaatgtataattaaatcatacttagcaaatctaacacatgaaatgtaacatctgcatatggagaatcgtgttactttattgaaaaacattaaaagtttgagaactt

SEQ ID NO: 43900 - DNA, 120 bp, Artificial Sequence
  ENSG00000063322_27 (sequence is synthesized)
aatggacaggtctccctctgtcacccaggctggactacagtggcacgatcttggctcattgcagccttgaacacctgagttaggagatcctcttgcctcagcctcccaagtagccaggac

SEQ ID NO: 43901 - DNA, 120 bp, Artificial Sequence
  ENSG00000063322_28 (sequence is synthesized)
gacatggctacagactacagatgcctggctaatttaaagagcagtgatggacccatacagcgctttgacaagtgcctggaagagttctatgcactctgtgaccagctggagctgtgcctg

SEQ ID NO: 43902 - DNA, 120 bp, Artificial Sequence
  ENSG00000063438_0 (sequence is synthesized)
attttacgaacgaggacatcaaggccgaggacgatgatcccgccgggggagtgcacgtacgcgggccggaagcggaggaggcccctgcagaaacagaggcccgccgtgggggcagagaag

SEQ ID NO: 43903 - DNA, 120 bp, Artificial Sequence
  ENSG00000063438_1 (sequence is synthesized)
ctttctgtcctgcgcctcagtgtcagttacctccgggtgaagagcttcttccaaggacaggggttggcagtggcagatgccgaagatgtggatgaccacacgggcgaacgaaggcccatg

SEQ ID NO: 43904 - DNA, 120 bp, Artificial Sequence
  ENSG00000063438_2 (sequence is synthesized)
tcgttcaggaggccccgagcattggacacccaggccctgagacgtactcagttcggtctgcatctgttgatggtgaatattgcaggactgatagccactgaccgcctgtagtgatgtgtg

SEQ ID NO: 43905 - DNA, 120 bp, Artificial Sequence
  ENSG00000063438_3 (sequence is synthesized)
acgcacacgcagccacccacccacacaggcgcacatacgctggcaccgctgaacagccaaaatatacacgatggttcttcttatggttcaggaggtggaaagttgaaaccatagcaagaa

SEQ ID NO: 43906 - DNA, 120 bp, Artificial Sequence
  ENSG00000063438_4 (sequence is synthesized)
acgtggcctatccaccgcagcgactaaaagataaagagggaaaaggacaaacattggccagaaggtgcagcggctggagcgttcgcgccttaactggaagaggagccgccccgcctggga

SEQ ID NO: 43907 - DNA, 120 bp, Artificial Sequence
  ENSG00000063438_5 (sequence is synthesized)
ggccgctctggcgcccggctggtgccgggcaggaggcccttgcggacccagcggcctcctcgtcggcaacgcccaccccgcggttcagccacggagcggatgccgtgtgcaggcacggaa

SEQ ID NO: 43908 - DNA, 120 bp, Artificial Sequence
  ENSG00000063438_6 (sequence is synthesized)
cgggcgaggctgttgcgctgcaggtgcccccacggtcgcgatgcggggcagggggatgccgacggatgtaatgcaccagaacatttatgactacatccacgtggacgaccgccaggactt

SEQ ID NO: 43909 - DNA, 120 bp, Artificial Sequence
  ENSG00000063438_7 (sequence is synthesized)
ctgccggcagctccactgggccatggaccctccccaggtggtgtttgggcagcccccgcccttggagacaggagatgatgctatcctggggaggctgctcagggcccaggagtggggcac

SEQ ID NO: 43910 - DNA, 120 bp, Artificial Sequence
  ENSG00000063438_8 (sequence is synthesized)
aggcacgcccaccgagtactcggccttcctgacccgctgcttcatctgccgtgtgcgctgcctgctggacagcacctcgggcttcctgacgatgcagtttcaaggaaaactaaaattcct

SEQ ID NO: 43911 - DNA, 120 bp, Artificial Sequence
  ENSG00000063438_9 (sequence is synthesized)
gtttggacagaagaagaaggcgccgtcaggagccatgctcccgccgcggctgtcgctgttctgcattgcggcacccgttctcctcccctccgcagcggagatgaaaatgaggagcgcgct

SEQ ID NO: 43912 - DNA, 120 bp, Artificial Sequence
  ENSG00000063438_10 (sequence is synthesized)
cctgagggcaaaacccagagcagacaccgcagccaccgcggatgcaaaagtaaaagccaccaccagtctgtgcgaatcggaactgcatggaaaacccaattactcagcaggaaggagcag

SEQ ID NO: 43913 - DNA, 120 bp, Artificial Sequence
  ENSG00000063438_11 (sequence is synthesized)
cagagagagcggcgttttggtgctcagggaacagactgacgctggccgatgggcacaggttcccgccagggccccatgcctgtgcctccggggtggccctgaccttgtccttgaccccaa

SEQ ID NO: 43914 - DNA, 120 bp, Artificial Sequence
  ENSG00000063438_12 (sequence is synthesized)
agggagactccaggacccacaaagcccctgccctggacagcgggaaagcacagtgaggatggtgccaggccgaggctgcagcccagcaagaatgacccgccctccctgcgccccatgccc

SEQ ID NO: 43915 - DNA, 120 bp, Artificial Sequence
  ENSG00000063438_13 (sequence is synthesized)
cgcggctcctgcctgccctgcccgtgtgtccagggcactttcaggaactcgcccatctctcacccgccgagcccgtcccccagtgcctactccagccggaccagcagacccatgcgggat

SEQ ID NO: 43916 - DNA, 120 bp, Artificial Sequence
  ENSG00000063438_14 (sequence is synthesized)
gtcggtgaggaccaggtgcaccctcccctctgccactttccccagaggagcctgcagcaccagctccctcagcctggagctcagcgttttgccacgaggggctatcccatggaggacatg

SEQ ID NO: 43917 - DNA, 120 bp, Artificial Sequence
  ENSG00000063438_15 (sequence is synthesized)
aagctgcaaggtgtaccgatgcctccgggggacctgtgtggtccgacgctgctgctagatgtgtccatcaagatggagaaggactctgggtgtgagggtgctgcagacggctgtgtgccc

SEQ ID NO: 43918 - DNA, 120 bp, Artificial Sequence
  ENSG00000063438_16 (sequence is synthesized)
agccaggtgtggctgggggccagtgacaggagccacccagccaccttccctaccaggatgcacctgaaaacagagccagactctcggcaacaggtgtacatctcgcacctggggcacggc

SEQ ID NO: 43919 - DNA, 120 bp, Artificial Sequence
  ENSG00000063438_17 (sequence is synthesized)
gtgcggggggctcagccccatgggagggccactgctgggcgcagcagggagctgacccctttccaccctgcacactgtgcctgcctggagcccacagacggccttccccagtcggagcct

SEQ ID NO: 43920 - DNA, 120 bp, Artificial Sequence
  ENSG00000063438_18 (sequence is synthesized)
ccccaccagctctgtgcacggggccgaggtgaacagtcctgcacctgcagagctgctgaggccgcccctgtggtcaagcgggagcccttggactcaccccagtgggctactcacagccag

SEQ ID NO: 43921 - DNA, 120 bp, Artificial Sequence
  ENSG00000063438_19 (sequence is synthesized)
ggaatggtgcccgggatgttgcccaaaagtgccttggccacgctggtcccgccccaagcttcggggtgcacattcctgccatagcgcagtgaccaccatccaagctcagatctgtgtgtc

SEQ ID NO: 43922 - DNA, 120 bp, Artificial Sequence
  ENSG00000063438_20 (sequence is synthesized)
tacgctcagatgcgtcggtggctgggctgccctgctcctggtcaggccggagcccgtcctaagacacacgctttgcagagctgtgcatgcgcagtctgctagtgtgtgtgtgcagcatac

SEQ ID NO: 43923 - DNA, 120 bp, Artificial Sequence
  ENSG00000063438_21 (sequence is synthesized)
gcaggagcctatcctgaattttgtaaaatatcccaacagttcttaaatgaaaactggccttaagtctattcaagcatgacagcatttctctttgaggaattaaaatctttaggaaagtga

SEQ ID NO: 43924 - DNA, 120 bp, Artificial Sequence
  ENSG00000063438_22 (sequence is synthesized)
ctcctcccctccgcagcggagatgaaaatgaggagcgcgctcctgagggcaaaacccagagcagacaccgcagccaccgcggatgcaaaggacagggaggaggagcagcacaggatgctg

SEQ ID NO: 43925 - DNA, 120 bp, Artificial Sequence
  ENSG00000063438_23 (sequence is synthesized)
gggaaaccgagtcacaaagagtccaagtcgacaggaaagtggatgtcttggccccagagtgtctgcggcccagaagatgcccgtctcttagcctcccgcttgccccgaaaggctggatgt

SEQ ID NO: 43926 - DNA, 120 bp, Artificial Sequence
  ENSG00000063438_24 (sequence is synthesized)
gggcaccacttggcgggcagacgggtgggcgggtgctccaggcaacttagacatcttctcaggagggagtggggaaccggggccaagcgccgtctcttcggtgggattctctccctgtgg

SEQ ID NO: 43927 - DNA, 120 bp, Artificial Sequence
  ENSG00000063438_25 (sequence is synthesized)
ccttggctgcgccccgccccgcccgttcctggcttcctcgatggcttcctcctcaggacgccggtctcccgccacggcgccctgagccaggctccagagcaggcggcttctctgggggag

SEQ ID NO: 43928 - DNA, 120 bp, Artificial Sequence
  ENSG00000063438_26 (sequence is synthesized)
gatcagtgtgatgcgtgtgtgggtacacacacatgtcccgtgtgagttggtctccaactcacctcagtgttcacttcctggaacataactacctggagtcatgagaatggaccgtatttt

SEQ ID NO: 43929 - DNA, 120 bp, Artificial Sequence
  ENSG00000063438_27 (sequence is synthesized)
ctttctggccttccaggaaaaaaatataagctctaaaaatcatcctatgattttatccttctactttctgaagcaaattcattagcccttcattggcctgaaaagtgacgtgacaatatt

SEQ ID NO: 43930 - DNA, 120 bp, Artificial Sequence
  ENSG00000063438_28 (sequence is synthesized)
ttcagtaaacctgtaactgagaaaataactttccacactataaagaattaaacaagagtgaactattgtttctgtcttcactgctcaggtgtgacagcaatacctgtcattattaatttc

SEQ ID NO: 43931 - DNA, 120 bp, Artificial Sequence
  ENSG00000063438_29 (sequence is synthesized)
taccatcaaaacatgtttcatccacatgtcatcttgttcatccgtcacatgtcacatgttcatctgtgttcttcacagagtaaaagccaccaccagtctgtgcgaatcggaactgcatgg

SEQ ID NO: 43932 - DNA, 120 bp, Artificial Sequence
  ENSG00000063438_30 (sequence is synthesized)
aaaacccaattactcagcaggtacttagaacatttcttatctgatcttttccacatgggtaaaatgtgtttctgcccttggagagcttccccgcccagtggagatgttggcgtattccat

SEQ ID NO: 43933 - DNA, 120 bp, Artificial Sequence
  ENSG00000063438_31 (sequence is synthesized)
ggaaaagccattttgcagagacttggtgtctgtcctgctgtggacaagtgccgttcctgggctctggtctgtgcatttctgaggagccgatgggtcctgccttgctgagaacaagcaacc

SEQ ID NO: 43934 - DNA, 120 bp, Artificial Sequence
  ENSG00000063438_32 (sequence is synthesized)
cttcttccaagtcgtgcaggagcagagctcacggcagcctgcggccggcgccccctcgcccggagacagctgtcctcttgcagggtctgccgtgctggagggaaggctgctgttggagtc

SEQ ID NO: 43935 - DNA, 120 bp, Artificial Sequence
  ENSG00000063438_33 (sequence is synthesized)
tcttaatggctttgctctggtcgtgagtgcagaagggacgatattttatgcatcagcaacgatcgtggactatctgggcttccatcagacggatgtaatgcaccagaacatttatgacta

SEQ ID NO: 43936 - DNA, 120 bp, Artificial Sequence
  ENSG00000063438_34 (sequence is synthesized)
cgcgctgccccgcgggtgtgcctgagcctccgcgccccgcaggccctgggccgaggacgatgatcccgccgggggagtgcacgtacgcgggccggaagcggaggaggcccctgcagaaac

SEQ ID NO: 43937 - DNA, 80 bp, Artificial Sequence
  ENSG00000063515_0 (sequence is synthesized)
atggcggcagcggctgggggcgcggcgagccgccggggtgccgggcggccctgccccttctccatcgagcacatcctctc

SEQ ID NO: 43938 - DNA, 80 bp, Artificial Sequence
  ENSG00000063515_1 (sequence is synthesized)
ccaccgcagcccgccggtcgccagagccccgcgaagccagaggagcccggggcgcccgaggctgcgccctgcgcctgctg

SEQ ID NO: 43939 - DNA, 120 bp, Artificial Sequence
  ENSG00000063515_2 (sequence is synthesized)
cgctcgtctggcgtggccgctgaggctgggaccggcggtgcccttgtctctgggtgcgccagccggaggttccggggcgctcccgggcgcggtcggcccgggttcgcagcggcgcacgag

SEQ ID NO: 43940 - DNA, 120 bp, Artificial Sequence
  ENSG00000063515_3 (sequence is synthesized)
ggttcgcagcggcgcacgaggcgccaccgcaccatcttcagcgaagagcagctgcaggcgctcgaggcgcttttcgtgcagaaccagtatcctgacgtgagtacgcgcgagcgcctggcc

SEQ ID NO: 43941 - DNA, 120 bp, Artificial Sequence
  ENSG00000063515_4 (sequence is synthesized)
agcgcgcgtcggcttccgcgaggctcctgcccggcgtcaagaagtccccgaaggggagctgctgatgactctaggagctgcccctgggctcggccaccctttttgggatctttggagttg

SEQ ID NO: 43942 - DNA, 120 bp, Artificial Sequence
  ENSG00000063515_5 (sequence is synthesized)
gcgctgagagaagacaggtctacccgaaaaggagctgggagagtacaccggccgcctccacccgtctccacagcccttgcctcctgcagctcgtgctgccgtggcgctggggacgggccc

SEQ ID NO: 43943 - DNA, 120 bp, Artificial Sequence
  ENSG00000063515_6 (sequence is synthesized)
ccggtgcttggtgttccacggcagtgggagtggcgagtcccttgggggtgggctggggcatagagcagtttcctcagctccctaccccccgagagacactaactccaccgcaggagggga

SEQ ID NO: 43944 - DNA, 120 bp, Artificial Sequence
  ENSG00000063515_7 (sequence is synthesized)
accaccccgtatcaacacgggacccagaatcctacgcagtggagcgtctctccgcaccctgggacatgctggccaccctcttctcaatgtggacattgacctaacttgacctggctcgtc

SEQ ID NO: 43945 - DNA, 120 bp, Artificial Sequence
  ENSG00000063587_0 (sequence is synthesized)
cacgggcggctccgtggcgcttcctgccacgccaggcctgcctgggccgcgccagcgccgctccaccgagggccgcgcgtcggccgccgccgggcctgggcgttcctgttttaaatcctg

SEQ ID NO: 43946 - DNA, 120 bp, Artificial Sequence
  ENSG00000063587_1 (sequence is synthesized)
cggccgccgccgggcctgggcgttcctgttttaaatcctgccttggtccctcacctggcacaaggacaagtgctactggtgtcagacccatcgcccaacactgatcctgctaagtactct

SEQ ID NO: 43947 - DNA, 120 bp, Artificial Sequence
  ENSG00000063587_2 (sequence is synthesized)
gaaagcacctccgcgacccgacaccagatgaagggggaagatgcccagccacaggagatggcgtccacaagcttcccaagggccagtggtcccagtcctgaattcagacagcacggggac

SEQ ID NO: 43948 - DNA, 120 bp, Artificial Sequence
  ENSG00000063587_3 (sequence is synthesized)
tctgacgggaagagagggagcccacagaatctgcccatagaacatcattttgcttgtaaagagtgtggggacacctttcggcttaaagtcctgcttgtccagcaccagagagtccacagt

SEQ ID NO: 43949 - DNA, 120 bp, Artificial Sequence
  ENSG00000063587_4 (sequence is synthesized)
gaggagaagggctgggaatgtggcgactgcgggaaggtctttaggggggtggcggagtttaatgagcacaggaaaagccacgtagctgcggagccccagcccggccccagtagggccctg

SEQ ID NO: 43950 - DNA, 120 bp, Artificial Sequence
  ENSG00000063587_5 (sequence is synthesized)
gagaatgccgcggagaagagggagcagatggagagggaggcaaagcccttcgagtgcgaggagtgcggaaaacggtttaagaagaatgcaggcctgagtcagcatctgagggtccacagc

SEQ ID NO: 43951 - DNA, 120 bp, Artificial Sequence
  ENSG00000063587_6 (sequence is synthesized)
agagagaagccctttgattgcgaggaatgcgggcggtcgttcaaagtcaacacccacctcttccgacatcagaaacttcacacttcggaaaagcctttcgcctgcaaggcgtgcagcagg

SEQ ID NO: 43952 - DNA, 120 bp, Artificial Sequence
  ENSG00000063587_7 (sequence is synthesized)
gatttcctggatcgccaggagcttctcaagcaccagcgcatgcacactggccacctgcccttcgactgcgacgactgcggcaagtccttccgaggggtcaacgggctggccgagcaccag

SEQ ID NO: 43953 - DNA, 120 bp, Artificial Sequence
  ENSG00000063587_8 (sequence is synthesized)
cgcatccacagtggggccaagccatacgggtgtccccactgcggcaagctcttccgaaggagctcggagctcaccaagcaccggcggatccacacgggcgagaagccctacgcctgcggc

SEQ ID NO: 43954 - DNA, 120 bp, Artificial Sequence
  ENSG00000063587_9 (sequence is synthesized)
cagtgcggcaaggccttccgccagagctccagcctcctggagcacgcacgcatccacagtggcgagcggccctacgcatgcggcgagtgtggcaaggccttccgtgggccctctgacctc

SEQ ID NO: 43955 - DNA, 120 bp, Artificial Sequence
  ENSG00000063587_10 (sequence is synthesized)
atcaagcaccggcgcatccacagcggactgaaaccctatgagtgcgacaaatgcggcaaggccttccgccggagctccggcctcagtcgccaccggcggatccacagtggggcgcggcgc

SEQ ID NO: 43956 - DNA, 120 bp, Artificial Sequence
  ENSG00000063587_11 (sequence is synthesized)
tgcgaatgcagccagtgtggccgcgtgttcaagaggcgctcggcactgcagaagcatcagccaacccaccacgagtagaaacgccctgtggtcccgcgggacagggacggagtccccaga

SEQ ID NO: 43957 - DNA, 120 bp, Artificial Sequence
  ENSG00000063587_12 (sequence is synthesized)
ggggatggcagagtcaaaggagatgaacagttttgtagcgcttatatattttgtcttccaaaaggttgagaccgatttatactgccaccagcaatttataagtgttacgttatgcccatc

SEQ ID NO: 43958 - DNA, 120 bp, Artificial Sequence
  ENSG00000063587_13 (sequence is synthesized)
aagagtagcttgtaccatttaacttagtttggctagtttaactggtaggaagtaccatcaaggtatttcagtccacatgccttgaatccaagaatgagagaggacaaatctggatgtggg

SEQ ID NO: 43959 - DNA, 120 bp, Artificial Sequence
  ENSG00000063587_14 (sequence is synthesized)
gtagggaggggcttagaggtcatcaactccaagctccccccgccccagagaaacacacagagctgttccacgatggcgtcctcataatgtgatcccagctttcctgaagagaacgttgcc

SEQ ID NO: 43960 - DNA, 120 bp, Artificial Sequence
  ENSG00000063587_15 (sequence is synthesized)
tgccctcatgatttttggcctacttgaatttataaatttttagggatgtaaatagaacactcaaatgtcttaaaatatttaatttattaatttagttatacatacatactgtaaatcaca

SEQ ID NO: 43961 - DNA, 120 bp, Artificial Sequence
  ENSG00000063587_16 (sequence is synthesized)
atataaaataatatattaatttagaaaataccccatttttgccaccctccctttcacgaaatcattttactctgactcctcaccgtcttcaccaacatgggaaccctgtttgagtcatca

SEQ ID NO: 43962 - DNA, 120 bp, Artificial Sequence
  ENSG00000063587_17 (sequence is synthesized)
gacagtttcaagacacacccagtcacttccatccgagctctgcacggtcgctcagtgacgatcccttcatgaggctctcattagaaattttctcccaagccataagaccatatttgcaga

SEQ ID NO: 43963 - DNA, 120 bp, Artificial Sequence
  ENSG00000063587_18 (sequence is synthesized)
acattaggacgatttctcttgtcgttttttaatctgtcctgtgactgtacaatataaccacttaaggtcatactttttcaaacaacctttaaacgtcttttcttttaaagcacccaaaat

SEQ ID NO: 43964 - DNA, 120 bp, Artificial Sequence
  ENSG00000063587_19 (sequence is synthesized)
gtcattgtgaggccaaacgcctagtaacagttactgaatctgggttaaatgtcggtatctttttttcttaaaccatttcaatttggtgtcccctatacatatccaaaactagcatcgatt

SEQ ID NO: 43965 - DNA, 120 bp, Artificial Sequence
  ENSG00000063587_20 (sequence is synthesized)
ggggttgttttgaactaatgggtcttgtcctcaagcagcactattttgttcaaaataaaatagttgagagcatgcccctaagaagagatacatctcaaggactcaagtgcagggtgacgc

SEQ ID NO: 43966 - DNA, 120 bp, Artificial Sequence
  ENSG00000063587_21 (sequence is synthesized)
ctccttttggaaatgagcctctcctggtatcaggcctagatggtacttctccagccttccgtttcttgttctataaaacaggggtgatcacagcacctacctccgaaggttatcacgagg

SEQ ID NO: 43967 - DNA, 120 bp, Artificial Sequence
  ENSG00000063587_22 (sequence is synthesized)
actgccatcgtggctgcagagtgccaggaccaccggcctggtatggaggtacacactcagtgaaggccatctgctgtcattgtcattgtcatagttattgccgtcattctgtggcttgtc

SEQ ID NO: 43968 - DNA, 120 bp, Artificial Sequence
  ENSG00000063587_23 (sequence is synthesized)
aattccagaactggggatagaccccaggcctcctgaccaccagtctcatctttctcttatgcgatgacttaaatggtgtttctgttttttgcatgcaaatggtccgttcatctcctttga

SEQ ID NO: 43969 - DNA, 120 bp, Artificial Sequence
  ENSG00000063587_24 (sequence is synthesized)
ctagttatcaacttaccttcggatatattaactttatgtagcagttctttctatattgatggtgatgttctcttttccaattttattgctttgctttttgtagcagttttattacgtttt

SEQ ID NO: 43970 - DNA, 120 bp, Artificial Sequence
  ENSG00000063587_25 (sequence is synthesized)
tgttgtgaaagcttttaatttttacatatccaagcattcattttttgtccactcagtcataactttcattgcttctgtagctagatatgatgacattttctctagaattttaattacaaa

SEQ ID NO: 43971 - DNA, 120 bp, Artificial Sequence
  ENSG00000063587_26 (sequence is synthesized)
ggccagagaagcaggctctttcctcatccgagatgcggactccctgtctatctgtgggcaccacttgactatccaacctgaccactgcggcacactggagatgctcccatcatagattag

SEQ ID NO: 43972 - DNA, 120 bp, Artificial Sequence
  ENSG00000063587_27 (sequence is synthesized)
ccagaactctgtgactgctcatcattatagaccccgccagcagcagtggggcttggcctcacctagatcaatggagtggtccaaacttggtctgggagcaagcagcccagccatcctttg

SEQ ID NO: 43973 - DNA, 120 bp, Artificial Sequence
  ENSG00000063587_28 (sequence is synthesized)
agctcctgggagccttggcaatgctccgagtggattcagtgactgagcagcagattcacccaagaaacatctccttggacacaagaagacttgcctagaccacatcctcctttcagccgg

SEQ ID NO: 43974 - DNA, 120 bp, Artificial Sequence
  ENSG00000063587_29 (sequence is synthesized)
tgactctagaactagaaagagattggttcataggcttctgctgtgggcagctaggggaaaattcacccatgtgttctggcatcacttcctatagccacacctaagtgagggcaacagagc

SEQ ID NO: 43975 - DNA, 120 bp, Artificial Sequence
  ENSG00000063587_30 (sequence is synthesized)
agaggctcggagaggaaccctgcccctccgatggcttgtgcgttatgctgatagaagctggcagcactgccctgggctatgatttgcaacagccatgcccaggaggagcactaaagcaaa

SEQ ID NO: 43976 - DNA, 120 bp, Artificial Sequence
  ENSG00000063587_31 (sequence is synthesized)
ggtttggagggcagtggaacccttctgaaagcctgtgtggcatagaagtagaagctggtcctcctgggtctgagctaccatttccagtgggctcccccaagaggaacagcagcaagggct

SEQ ID NO: 43977 - DNA, 120 bp, Artificial Sequence
  ENSG00000063587_32 (sequence is synthesized)
agcgaggaacctgcccctccagtggcccacagaagccacagatagaagccagccccaccagggctgtgctgtgacttcccagcagctgtggctggggacagggacactaggagggcctgg

SEQ ID NO: 43978 - DNA, 120 bp, Artificial Sequence
  ENSG00000063587_33 (sequence is synthesized)
caaggaagtgtgcccttctcgtgggcccaccaaggctgaggcagagcttcctagcagacacaacttggaagggcttctcaggcacccatcctgacccccaggctggagaggagccaaaag

SEQ ID NO: 43979 - DNA, 120 bp, Artificial Sequence
  ENSG00000063587_34 (sequence is synthesized)
cacttgttacatagtgattccttttgccctgtgggcctcagttcttgcagtagttgtgaatctgtgtctgaaatcactactttcttctcggatcctttttctcttttcgagttgttagga

SEQ ID NO: 43980 - DNA, 120 bp, Artificial Sequence
  ENSG00000063587_35 (sequence is synthesized)
tgtgttttgtacagctgtcatttgataaagaaggttgacctctaccaggggcaagtctggcacctttacctagaagtactctgccatgtcttgcccgttcatttatcgtttgttgggttt

SEQ ID NO: 43981 - DNA, 120 bp, Artificial Sequence
  ENSG00000063587_36 (sequence is synthesized)
catgagggatcccattgaagtagatcccttttatgaagggatcccattgaatgcagcattaactcagaacgtagcataaagtcgtcactgctcccagctgggacgtggtgtcttggcatc

SEQ ID NO: 43982 - DNA, 120 bp, Artificial Sequence
  ENSG00000063587_37 (sequence is synthesized)
ccttcctgccgtccttgactctttcccatcttcagttctataattttctcccaaacaaatgctcttttagagttaacactaaagatctggtctttgccgtcaaggttgacagaacagctg

SEQ ID NO: 43983 - DNA, 120 bp, Artificial Sequence
  ENSG00000063587_38 (sequence is synthesized)
ttcatggtgtttgcggtgaaacccgtgttctctttcaatgcagtctgtggctttaacgtgtgtcctgtaatttcgccaagatcatttcttgcctctggtaacttgggggtggatttcctt

SEQ ID NO: 43984 - DNA, 120 bp, Artificial Sequence
  ENSG00000063587_39 (sequence is synthesized)
gggctctctaggtgtactgctatgtcagatgcaaaatgtcacccagcttcctgtcacatatccttgtctgtgcattcatgcatctacctcattccggttttctttctaatctcatgtatt

SEQ ID NO: 43985 - DNA, 120 bp, Artificial Sequence
  ENSG00000063587_40 (sequence is synthesized)
cctgttgtgaggaaatgtgttcttttcccgatccttttgtagttcatacacatgacaattgggtttccacgcacgtgcatgagatgttcctccttcaaaccttgttactatgtcagcaca

SEQ ID NO: 43986 - DNA, 120 bp, Artificial Sequence
  ENSG00000063587_41 (sequence is synthesized)
ttaactgcctggcatggaaaaagaaaaaaaaaaaagaaatatgttcttttcctaccatttgaaaaaaatcctccattgcttttattagagttttgaatacttgtgaaaattttcaaaaga

SEQ ID NO: 43987 - DNA, 120 bp, Artificial Sequence
  ENSG00000063587_42 (sequence is synthesized)
aagtaattgattaccatttttgctgcttattacgatgagctgtgtccattagctgtgtcaccccactcttgcatttccagaatagtccctacccaattgcagcgggcatgtttttgagtg

SEQ ID NO: 43988 - DNA, 120 bp, Artificial Sequence
  ENSG00000063587_43 (sequence is synthesized)
gtgttgcattccatgtgcttgattttgtcctagaactggcacagcgcctgccctacctgcagccctgggttgtggccctgttgcgtaccatgtgatttgccaccccgcttctaggccata

SEQ ID NO: 43989 - DNA, 120 bp, Artificial Sequence
  ENSG00000063587_44 (sequence is synthesized)
ttaattcagccagaactgaacacctgacccaagggcagcaagcaatcatcagagcatagagctgacagaacatgatggaccacggacaccaccaggccttccagatctgaaatgcaaaca

SEQ ID NO: 43990 - DNA, 120 bp, Artificial Sequence
  ENSG00000063587_45 (sequence is synthesized)
aggaaacagaagcttctaggcatcagaaggtgtggggagcagcacagtactcagaggagtgaggagcgtggcgcctgctgggaggaaggcctggccatggtatgttcttggatttctggc

SEQ ID NO: 43991 - DNA, 120 bp, Artificial Sequence
  ENSG00000063587_46 (sequence is synthesized)
agcagccctcattggtccacgtgcgtccccactacagactccttgacttgagccagcttgagtgggtctctactcttttctattgtgttttgccacttggctgcttcctggccaagtcgc

SEQ ID NO: 43992 - DNA, 120 bp, Artificial Sequence
  ENSG00000063587_47 (sequence is synthesized)
acctgactgcatgaacacctgttcaaacgtgtgttctctgttctctaagatgggtgaaagtcgatgccttctagtctcagtgaatttaacctgtgattttatgtctacgtatattgttcc

SEQ ID NO: 43993 - DNA, 120 bp, Artificial Sequence
  ENSG00000063587_48 (sequence is synthesized)
tttactgaacccaccacatgcgggccataaaatgagtgaaatcacagtgcaccctgttctcttatttttgaagtgtttcacgatttccagcatgtccatcagatggggggattgctaact

SEQ ID NO: 43994 - DNA, 120 bp, Artificial Sequence
  ENSG00000063587_49 (sequence is synthesized)
tctctcttactcatgtacttacattctgtagttctcattgcatcactttggatgtttactttgaaaagcagaaactgtctctttaaacttggccctcaatgtcatttgcgtatctctgag

SEQ ID NO: 43995 - DNA, 120 bp, Artificial Sequence
  ENSG00000063587_50 (sequence is synthesized)
aacaatagctatgtcccaccccagtttgtatttccgttggttgttggcacttttttctcattcccccatctcattaccttgtctgttttctggcactcactataatcagccttgcactag

SEQ ID NO: 43996 - DNA, 120 bp, Artificial Sequence
  ENSG00000063587_51 (sequence is synthesized)
agctgtttgtggacttggcttcaccccctcctcctcagccctcccccacccattaaattgtgagctcttagaagacaggggtggcctttcatgtctgatcccctaccaaatctagcacag

SEQ ID NO: 43997 - DNA, 120 bp, Artificial Sequence
  ENSG00000063587_52 (sequence is synthesized)
ctgaaatgcaaacaaggaaacagaagcttctaggcatcagaaggtgtggggagcagcacagtactcagaggagtgaggagcgtggcgcctgctgggaggaaggcctggccatgatgagtg

SEQ ID NO: 43998 - DNA, 120 bp, Artificial Sequence
  ENSG00000063587_53 (sequence is synthesized)
gcttcccagtctggtggtgaatcctccacaatctgagctggccctctggtgcccaaagcagactcctggggtccctgtattgggcacttacccacttcctgctggccgcagcatgacacc

SEQ ID NO: 43999 - DNA, 120 bp, Artificial Sequence
  ENSG00000063587_54 (sequence is synthesized)
gttgggtcaaatctcaaaaactctttgcccttaactactgaaaacttccagcatctatagcagtcatagtcacaagatttcctttaaatttttcagcaattgttttcctaaggcattctg

SEQ ID NO: 44000 - DNA, 120 bp, Artificial Sequence
  ENSG00000063587_55 (sequence is synthesized)
taaagtctggcttgaagtttgtttagttgagataaaaatgtgtttgactgcactccagcctgagagacagagtgacatactgtctcaaaaataaataaacaaataagttttttaaaacat

SEQ ID NO: 44001 - DNA, 120 bp, Artificial Sequence
  ENSG00000063587_56 (sequence is synthesized)
ctctgtctcttgccccagcatgacacacggcagagtatgaaccccagctgctgccttcctaccctccctctgcttctcttctggaggctgccaaggattggatgtccactgggcttggag

SEQ ID NO: 44002 - DNA, 120 bp, Artificial Sequence
  ENSG00000063587_57 (sequence is synthesized)
ttccaatcatccaggtggggaagctgagtttccatccaggaaagtgattgaatggaggtcccttggaaagacgagaggccaggtccatggcccagggatcctagtgcttgatcaggttct

SEQ ID NO: 44003 - DNA, 120 bp, Artificial Sequence
  ENSG00000063587_58 (sequence is synthesized)
cttttcaggacttcttggagctgtggttaggcctccatgttagcaacagacacccactccagaccctcacctcttgaccctggcattactggcgctgcccctgcctcattctaaaataga

SEQ ID NO: 44004 - DNA, 120 bp, Artificial Sequence
  ENSG00000063587_59 (sequence is synthesized)
tggaaagactgatgagccctgggaattctttcaggatttggtgacatttgatgatgtggcatggtacctcaccacaagggagtggtttaagctggaccctgaacagagggcactggaata

SEQ ID NO: 44005 - DNA, 120 bp, Artificial Sequence
  ENSG00000063587_60 (sequence is synthesized)
ttatgggaacgtgacctctgtgggtaaggatgtcccagcccttcctcaaattcaccaccttcttggagtggggcaggggacacatggctacccccacagaagctcaccttctccctgggt

SEQ ID NO: 44006 - DNA, 120 bp, Artificial Sequence
  ENSG00000063587_61 (sequence is synthesized)
tgtggggaaacacaatgggtctgccacacctgatatgtcagagtagtatgagctcccccaactcctcttggcatggaaagaacccctctcagtcttttactgggaaagaaattagaacac

SEQ ID NO: 44007 - DNA, 120 bp, Artificial Sequence
  ENSG00000063587_62 (sequence is synthesized)
tgccactgtaatgtagaatgcccttttcattttaatgcacaaattatgcaaattgcatggccatttggtttgagtttatttgtgagaaaggttgacgtgatcaagatcttgttcacccat

SEQ ID NO: 44008 - DNA, 120 bp, Artificial Sequence
  ENSG00000063587_63 (sequence is synthesized)
taggggtctgcatgtgtgcagtggggaggaggttttaggaggagagacgttgggagtcagatttgggagctgtcgaagtccacgtgtctgggaagagcatgaagttaaatgtgtgagctc

SEQ ID NO: 44009 - DNA, 120 bp, Artificial Sequence
  ENSG00000063587_64 (sequence is synthesized)
tgagtgggtggacagagagaagacagggtgaagatcacctcctcagggtggccacttgatactccacagagcctccccaaggtgggcccagaggctgccttcctcaagctcctggaagga

SEQ ID NO: 44010 - DNA, 120 bp, Artificial Sequence
  ENSG00000063587_65 (sequence is synthesized)
gcctgaccttgggaaacacctttgaactgaatgaatgacttgcctaaagcctggtctttgaagattgaagggggttccccttcaaaggccttgcctatgttcctccactattctcatgtc

SEQ ID NO: 44011 - DNA, 120 bp, Artificial Sequence
  ENSG00000063601_0 (sequence is synthesized)
gggtaacgcggggccgccaggtgacagctaatggcggcggccgcctgaggcgggcgggcggtatagagcgggcggcaggaggcaagcagcgaaaccttcccggccgccgctcccgtcccg

SEQ ID NO: 44012 - DNA, 80 bp, Artificial Sequence
  ENSG00000063601_1 (sequence is synthesized)
ttcccggccgccgctcccgtcccgacggcggcttccccaaggcggcaggactcggcgcgccatggacaggccggcggcgg

SEQ ID NO: 44013 - DNA, 120 bp, Artificial Sequence
  ENSG00000063601_2 (sequence is synthesized)
tcctcgggccgcggggggcgccaccgccggctcccggcagcccagcgtggagaccctggacagtcccacaggatcacatgttgaatggtgtaaacagcttatagctgctacaatttctag

SEQ ID NO: 44014 - DNA, 120 bp, Artificial Sequence
  ENSG00000063601_3 (sequence is synthesized)
tcagatttcaggttcagtgacatcagaaaatgtgtccagagattacaaggctctaagggatggaaataagctggcacagatggaagaggctccacttttcccaggagaatcaattaaagc

SEQ ID NO: 44015 - DNA, 120 bp, Artificial Sequence
  ENSG00000063601_4 (sequence is synthesized)
cattgtgaaagatgtcatgtatatctgcccatttatgggagcagtgagtggaaccctgacagtgacggactttaagctgtacttcaaaaatgtcgagagggacccgcattttatccttga

SEQ ID NO: 44016 - DNA, 120 bp, Artificial Sequence
  ENSG00000063601_5 (sequence is synthesized)
tgttccccttggagtgatcagcagagtggagaagattggagcacagagccatggagacaattcctgtggtatagagatagtgtgcaaggatatgaggaacttgcggcttgcttataaaca

SEQ ID NO: 44017 - DNA, 120 bp, Artificial Sequence
  ENSG00000063601_6 (sequence is synthesized)
ggaagaacagagtaaactagggatatttgaaaacctcaacaaacatgcatttcctctttctaacggacaggcactatttgcattcagctataaagaaaaatttccaattaatggctggaa

SEQ ID NO: 44018 - DNA, 120 bp, Artificial Sequence
  ENSG00000063601_7 (sequence is synthesized)
agtttatgatccagtatctgaatataagagacagggcttgccaaatgagagttggaaaatatccaaaataaacagtaattatgagttctgtgacacctaccctgccatcattgttgtgcc

SEQ ID NO: 44019 - DNA, 120 bp, Artificial Sequence
  ENSG00000063601_8 (sequence is synthesized)
aactagtgtaaaagatgatgacctttcaaaagtggcagcttttcgagcaaaaggcagagtccctgtgttgtcatggattcatccggaaagtcaagcaacgattacccgttgcagccagcc

SEQ ID NO: 44020 - DNA, 120 bp, Artificial Sequence
  ENSG00000063601_9 (sequence is synthesized)
acttgtgggtcccaatgataagcgctgcaaagaggatgaaaaatacttgcaaacaataatggatgctaacgcacagtcacacaagcttatcatctttgatgctcgacaaaacagtgtcgc

SEQ ID NO: 44021 - DNA, 120 bp, Artificial Sequence
  ENSG00000063601_10 (sequence is synthesized)
tgataccaacaagacaaagggtggaggatatgaaagtgaaagtgcttacccaaatgcagaacttgtgttcttggagatccacaacattcatgtcatgcgagagtcactacgcaaattaaa

SEQ ID NO: 44022 - DNA, 120 bp, Artificial Sequence
  ENSG00000063601_11 (sequence is synthesized)
atagaatctgggaaaacatctgtggtggtgcattgcagcgacggttgggaccgaacagcccagctcacatctctggctatgctaatgttggacagttactacaggaccattaaaggattt

SEQ ID NO: 44023 - DNA, 120 bp, Artificial Sequence
  ENSG00000063601_12 (sequence is synthesized)
gaaactctcgtagaaaaggagtggataagctttggacacaggtttgcactgcgagtgggccatggtaatgacaaccatgcggatgctgaccgatctcccatatttctgcagtttgttgat

SEQ ID NO: 44024 - DNA, 120 bp, Artificial Sequence
  ENSG00000063601_13 (sequence is synthesized)
tgtgtttggcaaatgacaaggcagtttccttcagcattcgagtttaatgagctattcttgattacaattttggatcacctttatagctgtctttttgggacctttttgtgcaactgtgaa

SEQ ID NO: 44025 - DNA, 120 bp, Artificial Sequence
  ENSG00000063601_14 (sequence is synthesized)
cagcagcgattcaaagaggatgtatatacaaagacgatatctttatggtcgtatatcaatagccagctagacgagttttctaatcccttctttgtgaattatgaaaaccacgtgttatat

SEQ ID NO: 44026 - DNA, 120 bp, Artificial Sequence
  ENSG00000063601_15 (sequence is synthesized)
cctgttgctagtctgagtcatttggaattgtgggtaaattattatgtacgatggaatccacggatgagacctcagatgcccattcaccagaatctcaaggagctgctggccgtcagggcg

SEQ ID NO: 44027 - DNA, 120 bp, Artificial Sequence
  ENSG00000063601_16 (sequence is synthesized)
gagctgcagaagcgtgtggagggcctacagcgggaggtggccacgcgcgccgtctcatcctcatctgagcggggctcctcgccctcccactccgccacctccgtccacacctcggtctga

SEQ ID NO: 44028 - DNA, 120 bp, Artificial Sequence
  ENSG00000063601_17 (sequence is synthesized)
tgggcgagaaatatgtaatcccctggctgactaggactgttaaacatagtgtggactggatgatgccttcgacaaaccagagaagccaagttggggggagctggtgcctggagtgggccc

SEQ ID NO: 44029 - DNA, 120 bp, Artificial Sequence
  ENSG00000063601_18 (sequence is synthesized)
tgtgcacctcacctggcggaggctggggggggctctgtcagcaggaccctagaggagactctcattcgattttaaagaagcacaacgggtcattttcctttgtatgttcctagcgcagaa

SEQ ID NO: 44030 - DNA, 120 bp, Artificial Sequence
  ENSG00000063601_19 (sequence is synthesized)
ctgtttctaaaacaacttgaagtatagttttgttatctaagcaatttttgttttaagtaagtaagtgtactagaatgcgaagccgttatggttcaggtttttaaaaactggtacagtatt

SEQ ID NO: 44031 - DNA, 120 bp, Artificial Sequence
  ENSG00000063601_20 (sequence is synthesized)
gtatttgtctcatctgttgcactgtatttcaatcatctgtaattaaaatgatcatatgtttgctccctggtcttttttaagtaagtaagtaagtatcttagtagatttttcctttgagga

SEQ ID NO: 44032 - DNA, 120 bp, Artificial Sequence
  ENSG00000063601_21 (sequence is synthesized)
aaatcggtaataaaataacatggattgaatgtttactgtgcgtcaagcacagttaatatatgatgatgtaaagtaactaactttatgtgatttaattcattcagtaaattgtaaatgtat

SEQ ID NO: 44033 - DNA, 120 bp, Artificial Sequence
  ENSG00000063601_22 (sequence is synthesized)
attaggcccagggaccatttgtgtggctaggtgacagctcccactgttggcaaccgttaccctcctgtcagcggtttcacaggggagccgtctgtcacgcccaccctgtgaagcaacttc

SEQ ID NO: 44034 - DNA, 120 bp, Artificial Sequence
  ENSG00000063601_23 (sequence is synthesized)
tggcattcaggcagcttgggagaaactaagtgaacggaatgcagtactgaggttcaagaaagctgtacgccatttctttccaacttaaatccttcagtaacaacaaacaccactcacttc

SEQ ID NO: 44035 - DNA, 120 bp, Artificial Sequence
  ENSG00000063601_24 (sequence is synthesized)
aagatgcattgccagccccgtggcttccctcagctcttggccacaacttgaaaactgtcttgaatgaagtacttggggagaagacaggccactgccctctgttccacagttttcttcatg

SEQ ID NO: 44036 - DNA, 120 bp, Artificial Sequence
  ENSG00000063601_25 (sequence is synthesized)
cacggggtcctcctgttaacaattactgttgtgtacatataaggtatttttagagaagagaaacaggcctttattttcctatgtccttttttacgtttagaatagtcacccgagggggga

SEQ ID NO: 44037 - DNA, 120 bp, Artificial Sequence
  ENSG00000063601_26 (sequence is synthesized)
tcagctcaactgtactgtgggagaaattcttttccaacaaacctcatgctcgtttttctgtggtgcaatttcaagggcaacgtgttctgtcctcacctcactctggtactcgcctcttgg

SEQ ID NO: 44038 - DNA, 120 bp, Artificial Sequence
  ENSG00000063601_27 (sequence is synthesized)
ggcggctcagcccattcatggggatggcaccaagcggccatgctcagtcttccagccccgctgagggtaaaccgaggcctctggcagctgtgcacaggtgctggcctctggctccttcaa

SEQ ID NO: 44039 - DNA, 120 bp, Artificial Sequence
  ENSG00000063601_28 (sequence is synthesized)
ggagcactgcctgtcactcgctcctgggctgtctagccatgtctcccacccccactttaccgcagccagctgctgggatcaaagcaagtctgttcttatgttatttgcctgtatgaaatc

SEQ ID NO: 44040 - DNA, 120 bp, Artificial Sequence
  ENSG00000063601_29 (sequence is synthesized)
atttctcattttatcacaattccttcaactcagcttactcgcgtggctgcctgttcatatttgaaagcagccaccgtgctgtggctttggtttggaaaagcatagcacgcacttcccttg

SEQ ID NO: 44041 - DNA, 120 bp, Artificial Sequence
  ENSG00000063601_30 (sequence is synthesized)
gttttcccttcccagagccgaccgcagctggtcagccctctcttcccgctcctgaacctttacttactgactttgagctctgtgactccgtcggttctcgcaggaattaactaacttacc

SEQ ID NO: 44042 - DNA, 120 bp, Artificial Sequence
  ENSG00000063601_31 (sequence is synthesized)
aattggttcaatccacttgagcgccatagctctgagctcctctgtgtgacatgccacagatgactattgcacacctgggtcctgccccagcaggccatgcccctcccatgtgccgtgcct

SEQ ID NO: 44043 - DNA, 120 bp, Artificial Sequence
  ENSG00000063601_32 (sequence is synthesized)
gttgctgcagctgcccccccaccccgccactggctgcaggaattcagcctttagaggcagaggcagctgcagcggcccctgaggtcaaaccccagtgtgactgcatagcagtgttagctg

SEQ ID NO: 44044 - DNA, 120 bp, Artificial Sequence
  ENSG00000063601_33 (sequence is synthesized)
gttggtttcaaactactggattccaggcaaaggcctacagattgaccttattatttttgaaaatatgttaagggttttttcgtagagagagaaagaatggatttttttttaactgggaac

SEQ ID NO: 44045 - DNA, 120 bp, Artificial Sequence
  ENSG00000063601_34 (sequence is synthesized)
ctcctgattcttacggaaaattatccttctataagaagataccagagagatttattcaaggtaatttgataacctaaaatcaattctccattttttatcatatgtgggatttgttgctaa

SEQ ID NO: 44046 - DNA, 120 bp, Artificial Sequence
  ENSG00000063601_35 (sequence is synthesized)
gtcgtgttcaacaatagcttttatgttcctaacatatctgaaagcttatttatgaatggatatactggattattgatatactgattttttttttaatggggacatttgccattttcttcc

SEQ ID NO: 44047 - DNA, 120 bp, Artificial Sequence
  ENSG00000063601_36 (sequence is synthesized)
ggaggaattgctaaaatgcacggaattgctcctgcttcaagatgtcaagaccgagggagcttgagctgttctataccttttccgggaaggacaactgagtcccacaggatcacatgttga

SEQ ID NO: 44048 - DNA, 120 bp, Artificial Sequence
  ENSG00000063601_37 (sequence is synthesized)
aagatgtcaagaccgagggagcttgagctgttctataccttttccgggaaggacaactgaggatcacatgttgaatggtgtaaacagcttatagctgctacaatttctagtcagatttca

SEQ ID NO: 44049 - DNA, 120 bp, Artificial Sequence
  ENSG00000063601_38 (sequence is synthesized)
ggttcagtgacatcagaaaatgtgtccagagattacaaggttttcaggaggcctgatctaaggaatttagcaactaaaaaaaaaaaggagattcaggaagaacacaatggctacccttct

SEQ ID NO: 44050 - DNA, 120 bp, Artificial Sequence
  ENSG00000063601_39 (sequence is synthesized)
catgttgaatggtgtaaacagcttatagctgctacaatttctagtcagatttcaggttcagtgacatcagaaaatgtgtccagagattacaaggttttcaggaggcctgatctaaggaac

SEQ ID NO: 44051 - DNA, 120 bp, Artificial Sequence
  ENSG00000063601_40 (sequence is synthesized)
ttcatgtagtctccgctgcaccaactccaaaaccgtgggattctgcttttcatcctctgtggtgttggccagatcatacttgaaggccttggaaatggagtctgctgattagccaaaaag

SEQ ID NO: 44052 - DNA, 120 bp, Artificial Sequence
  ENSG00000063601_41 (sequence is synthesized)
tttgcatgtattttcataagggatgttaatctgtggttttctcttcttgtgatgtctttgtctagctttggtatcaggatacagctagcctcatggaatgaactaggaagtatgccctcc

SEQ ID NO: 44053 - DNA, 120 bp, Artificial Sequence
  ENSG00000063601_42 (sequence is synthesized)
tcttctagtttttggatgacccatcatctcttacctcacctacagcaggaaccttgaaattggacttctgcctcacaccctgcaatctcatctccacattatgaccagagtgatcttctt

SEQ ID NO: 44054 - DNA, 120 bp, Artificial Sequence
  ENSG00000063601_43 (sequence is synthesized)
ttttaaaaaaaacttattgttactatttcaattgataaatgaattgtatatatttatggtgtacaacgtggtattttgattgtgtacacattgtggaatggctaaatcaagctaattaac

SEQ ID NO: 44055 - DNA, 120 bp, Artificial Sequence
  ENSG00000063601_44 (sequence is synthesized)
acaccattttttgtggtgagaacacttaaaatctactctcagcagttttcagatacagactacattgttattgactgtagtcaccatgttgtacagagtgatcttctcagtggacaactc

SEQ ID NO: 44056 - DNA, 120 bp, Artificial Sequence
  ENSG00000063601_45 (sequence is synthesized)
tgtgcacatccctcagagccgcaaggcagtgatatccaggttcctgaacagggtctccaaagccctccacccacgggtcctttccttcctgtctcgccacatcttccaggtccatgtctc

SEQ ID NO: 44057 - DNA, 120 bp, Artificial Sequence
  ENSG00000063601_46 (sequence is synthesized)
agctatgtgaggttcttttcagttccttaagcacatcccactgttagctcagagatatgttgcagtcctaactccaagtacctataaatgtggccttatttcacaatagggtctttgtaa

SEQ ID NO: 44058 - DNA, 120 bp, Artificial Sequence
  ENSG00000063601_47 (sequence is synthesized)
atgtaattaagttaggatgtggtcatattgaattggggggtgggggttaagccaaatgactgtgtccttagaagaagaggagaagagacagacacagacaaaggaaagaaggtcaggtgg

SEQ ID NO: 44059 - DNA, 120 bp, Artificial Sequence
  ENSG00000063601_48 (sequence is synthesized)
aaatggaggcagagatcagaatgatgtgtgtataagccaagaacacctgggactatcggaacctggggcagccaaggaaggatcctcccctagagtgttcggaggaagcatggcactgcc

SEQ ID NO: 44060 - DNA, 120 bp, Artificial Sequence
  ENSG00000063601_49 (sequence is synthesized)
acttccagcctccagaactaggagagaataaacttctgttgttttaagccactgagtttgtggttctttttccagcagccctaggaaactcatacaaggatataggaggtttatttgcag

SEQ ID NO: 44061 - DNA, 80 bp, Artificial Sequence
  ENSG00000063660_0 (sequence is synthesized)
gccgagccgggactgcgctagcccgccgcgctctgggctgcccgagcgagcgttcggacctcgcaccccgcgcgccccgc

SEQ ID NO: 44062 - DNA, 120 bp, Artificial Sequence
  ENSG00000063660_1 (sequence is synthesized)
tgtctccgcctcctcggccgccgccgcctctggaccgcgagccgcgcgcgccgggaccttggctctgcccttcgcgggcgggaactgcgcaggacccggccaggatccgagagaggcgcg

SEQ ID NO: 44063 - DNA, 120 bp, Artificial Sequence
  ENSG00000063660_2 (sequence is synthesized)
cgccatggagctccgggcccgaggctggtggctgctatgtgcggccgcagcgctggtcgcctgcgcccgcggggacccggccagcaagagccggagctgcggcgaggtccgccagatcta

SEQ ID NO: 44064 - DNA, 120 bp, Artificial Sequence
  ENSG00000063660_3 (sequence is synthesized)
ccgccagatctacggagccaagggcttcagcctgagcgacgtgccccaggcggagatctcgggtgagcacctgcggatctgtccccagggctacacctgctgcaccagcgagatggagga

SEQ ID NO: 44065 - DNA, 120 bp, Artificial Sequence
  ENSG00000063660_4 (sequence is synthesized)
gaacctggccaaccgcagccatgccgagctggagaccgcgctccgggacagcagccgcgtcctgcaggccatgcttgccacccagctgcgcagcttcgatgaccacttccagcacctgct

SEQ ID NO: 44066 - DNA, 120 bp, Artificial Sequence
  ENSG00000063660_5 (sequence is synthesized)
gaacgactcggagcggacgctgcaggccaccttccccggcgccttcggagagctgtacacgcagaacgcgagggccttccgggacctgtactcagagctgcgcctgtactaccgcggtgc

SEQ ID NO: 44067 - DNA, 120 bp, Artificial Sequence
  ENSG00000063660_6 (sequence is synthesized)
caacctgcacctggaggagacgctggccgagttctgggcccgcctgctcgagcgcctcttcaagcagctgcacccccagctgctgctgcctgatgactacctggactgcctgggcaagca

SEQ ID NO: 44068 - DNA, 120 bp, Artificial Sequence
  ENSG00000063660_7 (sequence is synthesized)
ggccgaggcgctgcggcccttcggggaggccccgagagagctgcgcctgcgggccacccgtgccttcgtggctgctcgctcctttgtgcagggcctgggcgtggccagcgacgtggtccg

SEQ ID NO: 44069 - DNA, 120 bp, Artificial Sequence
  ENSG00000063660_8 (sequence is synthesized)
gaaagtggctcaggtccccctgggcccggagtgctcgagagctgtcatgaagctggtctactgtgctcactgcctgggagtccccggcgccaggccctgccctgactattgccgaaatgt

SEQ ID NO: 44070 - DNA, 120 bp, Artificial Sequence
  ENSG00000063660_9 (sequence is synthesized)
gctcaagggctgccttgccaaccaggccgacctggacgccgagtggaggaacctcctggactccatggtgctcatcaccgacaagttctggggtacatcgggtgtggagagtgtcatcgg

SEQ ID NO: 44071 - DNA, 120 bp, Artificial Sequence
  ENSG00000063660_10 (sequence is synthesized)
cagcgtgcacacgtggctggcggaggccatcaacgccctccaggacaacagggacacgctcacggccaaggtcatccagggctgcgggaaccccaaggtcaacccccagggccccgggcc

SEQ ID NO: 44072 - DNA, 120 bp, Artificial Sequence
  ENSG00000063660_11 (sequence is synthesized)
tgaggagaagcggcgccggggcaagctggccccgcgggagaggccaccttcaggcacgctggagaagctggtctccgaagccaaggcccagctccgcgacgtccaggacttctggatcag

SEQ ID NO: 44073 - DNA, 120 bp, Artificial Sequence
  ENSG00000063660_12 (sequence is synthesized)
cctcccagggacactgtgcagtgagaagatggccctgagcactgccagtgatgaccgctgctggaacgggatggccagaggccggtacctccccgaggtcatgggtgacggcctggccaa

SEQ ID NO: 44074 - DNA, 120 bp, Artificial Sequence
  ENSG00000063660_13 (sequence is synthesized)
ccagatcaacaaccccgaggtggaggtggacatcaccaagccggacatgaccatccggcagcagatcatgcagctgaagatcatgaccaaccggctgcgcagcgcctacaacggcaacga

SEQ ID NO: 44075 - DNA, 120 bp, Artificial Sequence
  ENSG00000063660_14 (sequence is synthesized)
cgtggacttccaggacgccagtgacgacggcagcggctcgggcagcggtgatggctgtctggatgacctctgcagccggaaggtcagcaggaagagctccagctcccggacgcccttgac

SEQ ID NO: 44076 - DNA, 120 bp, Artificial Sequence
  ENSG00000063660_15 (sequence is synthesized)
cccggtggcggtaactgccccaaggccccagggacagaggccaaggactgactttgccaaaaatacaacacagacgatatttaattcacctcagcctggagaggcctggggtgggacagg

SEQ ID NO: 44077 - DNA, 120 bp, Artificial Sequence
  ENSG00000063660_16 (sequence is synthesized)
gagggccggcggctctgagcaggggcaggcgcagaggtcccagccccaggcctggcctcgcctgcctttctgccttttaattttgtatgaggtcctcaggtcagctgggagccagtgtgc

SEQ ID NO: 44078 - DNA, 120 bp, Artificial Sequence
  ENSG00000063660_17 (sequence is synthesized)
ccaaaagccatgtatttcagggacctcaggggcacctccggctgcctagccctccccccagctccctgcaccgccgcagaagcagcccctcgaggcctacagaggaggcctcaaagcaac

SEQ ID NO: 44079 - DNA, 120 bp, Artificial Sequence
  ENSG00000063660_18 (sequence is synthesized)
ccgctggagcccacagcgagcctgtgccttcctccccgcctcctcccactgggactcccagcagagcccaccagccagccctggcccaccccccagcctccagagaagccccgcacgggc

SEQ ID NO: 44080 - DNA, 120 bp, Artificial Sequence
  ENSG00000063660_19 (sequence is synthesized)
tgtctgggtgtccgccatccagggtctggcagagcctctgagatgatgcatgatgccctcccctcagcgcaggctgcagagcccggccccacctccctgcgcccttgaggggccccagcg

SEQ ID NO: 44081 - DNA, 120 bp, Artificial Sequence
  ENSG00000063660_20 (sequence is synthesized)
tctgcagggtgacgcctgagacagcaccactgctgaggagtctgaggactgtcctcccacagacctgcagtgaggggccctccatgcgcagatgaggggccactgacccacctgcgcttc

SEQ ID NO: 44082 - DNA, 120 bp, Artificial Sequence
  ENSG00000063660_21 (sequence is synthesized)
tgctggaggaggggaagctgggcccaaaggcccagggaggcagcgtgggctctgccaatgtgggctgcccctcgcacacagggctcacagggcaggccttgctggggtccagggctgttg

SEQ ID NO: 44083 - DNA, 120 bp, Artificial Sequence
  ENSG00000063660_22 (sequence is synthesized)
gaggaccccgagggctgaggagcagccaggacccgcctgctcccatcctcacccagatcaggaaccagggcctccctgttcacggtgacacaggtcagggctcagagtgaccctcagctg

SEQ ID NO: 44084 - DNA, 120 bp, Artificial Sequence
  ENSG00000063660_23 (sequence is synthesized)
tcacctgctcacagggatgctggtggctggtgagaccccgcactgcagacgggaatgcctaggtcccttcccgacccagccagctgcagggcacggggacctggatagttaagggctttt

SEQ ID NO: 44085 - DNA, 120 bp, Artificial Sequence
  ENSG00000063660_24 (sequence is synthesized)
ccaaacatgcatccatttactgacacttcctgtccttgttcatggagagctgttcgctcctcccagatggcttcggagggccgcagggcccaccttggaccctggtgacctcctgtcact

SEQ ID NO: 44086 - DNA, 120 bp, Artificial Sequence
  ENSG00000063660_25 (sequence is synthesized)
cactgaggccatcagggccctgccccaggcctggacgggccctccttccctcctgtgccccagctgccaggcggccctggggaggggtggtgtggtgttgggaaggggtcctgcaggggg

SEQ ID NO: 44087 - DNA, 120 bp, Artificial Sequence
  ENSG00000063660_26 (sequence is synthesized)
aggaggacttggagggtctgggggcagctgtcctgaaccgactgaccctgaggaggccgcttagtgctgctttgcttttcatcaccgtcccgcacagtggacggaggtccccggttgctg

SEQ ID NO: 44088 - DNA, 120 bp, Artificial Sequence
  ENSG00000063660_27 (sequence is synthesized)
gtcaggtccccatggcttgttctctggaacctgactttagatgttttgggatcaggagcccccaacacaggcaagtccaccccataataaccctgccagtgccagggtgggctggggact

SEQ ID NO: 44089 - DNA, 120 bp, Artificial Sequence
  ENSG00000063660_28 (sequence is synthesized)
ctggcacagtgatgccgggcgccaggacagcagcactcccgctgcacacagacggcctaggggtggcgctcagaccccaccctacgctcatctctggaaggggcagccctgagtggtcac

SEQ ID NO: 44090 - DNA, 120 bp, Artificial Sequence
  ENSG00000063660_29 (sequence is synthesized)
tggtcagggcagtggccaagcctgctgtgtccttcctccacaaggtccccccaccgctcagtgtcagcgggtgacgtgtgttcttttgagtccttgtatgaataaaaggctggaaaccta

SEQ ID NO: 44091 - DNA, 120 bp, Artificial Sequence
  ENSG00000063660_30 (sequence is synthesized)
ctgtgcctgacctaggccagcaccaggagggccttagaggcgggggacgaggcccagaaggaacagtgtggccccgtcagtgtggagtcctgagcttaggcagccggaaccacttgcccc

SEQ ID NO: 44092 - DNA, 120 bp, Artificial Sequence
  ENSG00000063660_31 (sequence is synthesized)
tttaaaaaatgcagtttttcctgatgccacacacccattccaggtgggccctgaggtgtgcacagcagggctgagagctgactcaaagcctgtcctgtccccactccccacaaggaggtg

SEQ ID NO: 44093 - DNA, 120 bp, Artificial Sequence
  ENSG00000063660_32 (sequence is synthesized)
aagctgtctctgatggcagtgccgctgtcactgcctcggacgctggagcagagtagctcatggcaggctgcagaggaggggactccacaaggacaccaggaggcacagggtgcaccctgc

SEQ ID NO: 44094 - DNA, 120 bp, Artificial Sequence
  ENSG00000063660_33 (sequence is synthesized)
agggcttggggcatggtccaatgaccctttcatggggcctgccagctgcaccagagcacacctgcccccataccagactcgtgcctggggtcctgcagggccactgcctctgaccagccc

SEQ ID NO: 44095 - DNA, 120 bp, Artificial Sequence
  ENSG00000063660_34 (sequence is synthesized)
actgttggtgggatctgccgtccttgcagtgggagcttggtgccccccagggctggtgtgggaagagagggggattggattccttcctccttccccatcctcagacatgggcccaggcaa

SEQ ID NO: 44096 - DNA, 120 bp, Artificial Sequence
  ENSG00000063660_35 (sequence is synthesized)
ggggtgcctttcgggcctgggagccttctccacacttgcacacaggaacctgaggccagttctttgcttgcagctgctgggacagcaggctggggggcaggacttgcccaaggggcctcc

SEQ ID NO: 44097 - DNA, 120 bp, Artificial Sequence
  ENSG00000063660_36 (sequence is synthesized)
tgccctgtagaggcagccgtgctcttgtgtcacgtgtgggaagctacgggaccgaagccaggccttttcctccctccacaccccgaccacttctgccttcacccagggcaccccccaggc

SEQ ID NO: 44098 - DNA, 120 bp, Artificial Sequence
  ENSG00000063660_37 (sequence is synthesized)
tggcccacccctgagctgtgctccaccctgggtctgccatcctgcccaggagagcctgagggtgccctcctggctcccagtgctgtcccagcccctctccctcacactggcctttcccca

SEQ ID NO: 44099 - DNA, 120 bp, Artificial Sequence
  ENSG00000063660_38 (sequence is synthesized)
gtgagcccccacccgcgagagcggcctggaactgtcttggggagtgcacgactgggggtcctggggggcgggtggtccctagcttagagcttggacccagggacctgatcagggatgccc

SEQ ID NO: 44100 - DNA, 120 bp, Artificial Sequence
  ENSG00000063660_39 (sequence is synthesized)
ggtgccttttgaatgtcctgagtgatgtgtgacttggggcagctgccagggagggagccctgtggggtcatagtttcttgtccttccccacttagcaagcacctcggtgtgcatacatgc

SEQ ID NO: 44101 - DNA, 120 bp, Artificial Sequence
  ENSG00000063660_40 (sequence is synthesized)
caacacgtgtgactcatcgaggaccggcacttgtttaagctaacacatacatgcaccgtcacatgacaggctgacacatgcgaactggcgtgctcacttgctgacacacagtgggccagt

SEQ ID NO: 44102 - DNA, 120 bp, Artificial Sequence
  ENSG00000063660_41 (sequence is synthesized)
gcccaccagtacagcgtgtgctcctgggcgcatgtgatgacatgagctgggctgacccgcatcaatgccaacacgtgtgtggtaatatgtacatgcttatccagatccactaacatgtac

SEQ ID NO: 44103 - DNA, 120 bp, Artificial Sequence
  ENSG00000063660_42 (sequence is synthesized)
acatgcttacatgaggggggacagcatgcatctgtgccaacacgtgctagcatgtgctgacacggggccaacaggtgtgtgctaacgtgatgggagctgacaaaatgcatgagctttact

SEQ ID NO: 44104 - DNA, 120 bp, Artificial Sequence
  ENSG00000063660_43 (sequence is synthesized)
tgtacatgtgctcaccgtgcacgcaacacacacatgaactaaggtgtacatggggggggcatgaggtaagccagcatgcatacacaccagctcacacgggctcatgtgcacacaagctgg

SEQ ID NO: 44105 - DNA, 120 bp, Artificial Sequence
  ENSG00000063660_44 (sequence is synthesized)
accaaggtgagccagcgtatgtacatgtcaacacctgcatgagccagcgtggacatacgagacacggcaggccagcaagcatgcagaatggcctctgtgtatgtgcgtgttcacctgtgc

SEQ ID NO: 44106 - DNA, 120 bp, Artificial Sequence
  ENSG00000063660_45 (sequence is synthesized)
ccgtggcacaggtgcacacgtgggtgtgggccaagctgagtgcacgtggcctgcacatgtcacacgggccaacctgagtgcacacgtgggatctcccatgctgacccgtgctgtcaagac

SEQ ID NO: 44107 - DNA, 120 bp, Artificial Sequence
  ENSG00000063660_46 (sequence is synthesized)
tgcattaacatgcacacgtggtgacgcctgcgtgtgcgtgtcaacgcctgtgtgcgcgcgttaacgcctgtgtgtccgcgtgttaacgcctgtcctagactccatggtgctcatcaccga

SEQ ID NO: 44108 - DNA, 120 bp, Artificial Sequence
  ENSG00000063660_47 (sequence is synthesized)
actggtcacgggcagctgccaggctgggtctggacaaatgaggtctgggtccatcattggggatgggggccactgtcaggatgggagtctcgcctaaagctttggggtgaaggtgctgat

SEQ ID NO: 44109 - DNA, 120 bp, Artificial Sequence
  ENSG00000063660_48 (sequence is synthesized)
gaccaagaggaaactgcggggtggggacatgtcagcaggggacgagaatgcatgacctaaaaggtgagcacctgcggatctgtccccagggctacacctgctgcaccagcgagatggagg

SEQ ID NO: 44110 - DNA, 80 bp, Artificial Sequence
  ENSG00000063660_49 (sequence is synthesized)
ccagagtctcccgcgcgcccggcggaccgcagcccgccctcgtcccccgctggcttttcgcctcctgcgagcccttccgc

SEQ ID NO: 44111 - DNA, 80 bp, Artificial Sequence
  ENSG00000063660_50 (sequence is synthesized)
cgccgcctttccccggcccgagcacctgcacccagagcccgcgcgccgcccggagccgctggagccgccgctgcgaaggg

SEQ ID NO: 44112 - DNA, 120 bp, Artificial Sequence
  ENSG00000063660_51 (sequence is synthesized)
aagtgtttccagggctgtcggaacagtgccacaggctgagcagctgcagctgcagacatgggtcgtccgtggttctagagcctggaagcctgagatcaagtgtgcgtccaccaggctggc

SEQ ID NO: 44113 - DNA, 120 bp, Artificial Sequence
  ENSG00000063761_0 (sequence is synthesized)
gctaattccccgctaccgggttgcggccggaagccgggcgccgcggctctgcttccctcggggatctggcgacatggccagaaaggctctcaagcttgcttcgtggaccagcatggctct

SEQ ID NO: 44114 - DNA, 120 bp, Artificial Sequence
  ENSG00000063761_1 (sequence is synthesized)
tgctgcctctggcatctacttctacagtaacaagtacttggaccctaatgactttggcgctgtcagggtgggcagagcagttgctacgacggctgtcatcagttacgactacctcacttc

SEQ ID NO: 44115 - DNA, 120 bp, Artificial Sequence
  ENSG00000063761_2 (sequence is synthesized)
cctgaagagtgtcccttatggctcagaggagtacttgcagctgagatctaaggtgcaccttcgctctgccaggcgtctctgtgagctctgctgtgccaaccggggcaccttcatcaaggt

SEQ ID NO: 44116 - DNA, 120 bp, Artificial Sequence
  ENSG00000063761_3 (sequence is synthesized)
gggccagcacctgggggctctggactacctgttgccagaggagtacaccagcacgctgaaggtactgcacagccaggctccacagagcagcatgcaagagatccgccaggtcatccgaga

SEQ ID NO: 44117 - DNA, 120 bp, Artificial Sequence
  ENSG00000063761_4 (sequence is synthesized)
agatctgggcaaggagatccatgatttgttccagagcttcgatgacacccctctggggacggcctccctggcccaggtccacaaggcagtgctgcatgatgggcggacggtggccgtgaa

SEQ ID NO: 44118 - DNA, 120 bp, Artificial Sequence
  ENSG00000063761_5 (sequence is synthesized)
ggtccagcacccaaaggtgcgggctcagagctcgaaggacattctcctgatggaggtgctcgttctggctgtgaagcagctgttcccagagtttgagtttatgtggcttgtggatgaagc

SEQ ID NO: 44119 - DNA, 120 bp, Artificial Sequence
  ENSG00000063761_6 (sequence is synthesized)
caagaagaacctgcctttggagctggatttcctcaatgaagggaggaatgctgagaaggtgtcccagatgctcaggcattttgacttcttgaaggtcccccgaatccactgggacctgtc

SEQ ID NO: 44120 - DNA, 120 bp, Artificial Sequence
  ENSG00000063761_7 (sequence is synthesized)
cacggagcgggtcctcctgatggagtttgtggatggcgggcaggtcaatgacagagactacatggagaggaacaagatcgacgtcaatgagatctcacgccacctgggcaagatgtatag

SEQ ID NO: 44121 - DNA, 120 bp, Artificial Sequence
  ENSG00000063761_8 (sequence is synthesized)
tgagatgatcttcgtcaatggcttcgtgcactgcgatccccaccccggcaatgtactggtgcggaagcaccccggcacgggaaaggcggagattgtcctgttggaccatgggctttacca

SEQ ID NO: 44122 - DNA, 120 bp, Artificial Sequence
  ENSG00000063761_9 (sequence is synthesized)
gatgctcacggaagaattccgcctgaattactgccacctctggcagtctctgatctggactgacatgaagagagtgaaggagtacagccagcgactgggagccggggatctctacccctt

SEQ ID NO: 44123 - DNA, 120 bp, Artificial Sequence
  ENSG00000063761_10 (sequence is synthesized)
gtttgcctgcatgctgacggcgcgatcgtgggactcggtcaacagaggcatcagccaagctcccgtcactgccactgaggacttagagattcgcaacaacgcggccaactacctccccca

SEQ ID NO: 44124 - DNA, 120 bp, Artificial Sequence
  ENSG00000063761_11 (sequence is synthesized)
gatcagccatctcctcaaccacgtgccgcgccagatgctgctcatcttgaagaccaacgacctgctgcgtggcattgaggccgccctgggcacccgcgccagcgccagctcctttctcaa

SEQ ID NO: 44125 - DNA, 120 bp, Artificial Sequence
  ENSG00000063761_12 (sequence is synthesized)
catgtcacgttgctgcatcagagcgctagctgagcacaagaagaagaatacctgttcattcttcagaaggacccagatctctttcagcgaggccttcaacttatggcagatcaacctcca

SEQ ID NO: 44126 - DNA, 120 bp, Artificial Sequence
  ENSG00000063761_13 (sequence is synthesized)
aagctggctgaccgggtcttggccctaatatgctggctgttccctgctccactctgagtggaattgctctccctgccccattctggtgtctttccactcctcagcccctcatcttgcctc

SEQ ID NO: 44127 - DNA, 120 bp, Artificial Sequence
  ENSG00000063761_14 (sequence is synthesized)
cacccagctgctccatttttgccacatcgtggcccgcagccccagagtcactgtccatgtcaccatccttctcctcctttggaatcctctccgcacactgtggcccttgtctcagggccc

SEQ ID NO: 44128 - DNA, 120 bp, Artificial Sequence
  ENSG00000063761_15 (sequence is synthesized)
acaagctgaactgtggcatagctctctcttcttctccaagaagactcagcagcctacattcccattcctggtatgtgccattgggttggatgtccccactacttccgttaacccttccca

SEQ ID NO: 44129 - DNA, 120 bp, Artificial Sequence
  ENSG00000063761_16 (sequence is synthesized)
ttgtcaagatgtgccacgggtgccactgggggcacactgaacttgtagggagtgtgattttgttggaggtgcacatggtctctgaatttgacagagaacaccttccctttccttgccatg

SEQ ID NO: 44130 - DNA, 120 bp, Artificial Sequence
  ENSG00000063761_17 (sequence is synthesized)
tcaccctccagaggaagtcacacctcagcgaggtggtttggcatctggggccaactccattacagctatgagctcactgctgtcagtgacgtttggtgttttctgtactgtgtttcaata

SEQ ID NO: 44131 - DNA, 120 bp, Artificial Sequence
  ENSG00000063761_18 (sequence is synthesized)
aaaactccttcaaggttgcaggatttgtccatcataactcactggcctcccacctgaccccaggcacgtgcccttccagaatgtgctcatggtcctcgccaagggcttatggttcctctt

SEQ ID NO: 44132 - DNA, 120 bp, Artificial Sequence
  ENSG00000063761_19 (sequence is synthesized)
ggttgctgcttcctcagggtttcccagggagatctagggaacagaaggccaggggctgtttggtgggattttccttataggttgggagttcacctacaatgcccattaggtcagagtgga

SEQ ID NO: 44133 - DNA, 120 bp, Artificial Sequence
  ENSG00000063761_20 (sequence is synthesized)
cctgaatcgagtattggtgtgatcttctgcttggcttcttgctcctgtaatccttccaacctgtggggccacttccactatggggccacttcctgcttcttgggggtttctcttaccttc

SEQ ID NO: 44134 - DNA, 120 bp, Artificial Sequence
  ENSG00000063761_21 (sequence is synthesized)
caagactcagactctggttggaggagttaagaagcccaaggccaggaactcagaggctcagctgaaaccttggaccttgtttttctgtgacctgggtaccaaccttgttctactgtttcc

SEQ ID NO: 44135 - DNA, 120 bp, Artificial Sequence
  ENSG00000063761_22 (sequence is synthesized)
tgacttatccctttggttctcattcagtggccccagttttaggcctggaattctacttgtctccccccagtccttctggagaccttagtcctcttgctgaaacctccgtcactgtggctg

SEQ ID NO: 44136 - DNA, 120 bp, Artificial Sequence
  ENSG00000063761_23 (sequence is synthesized)
ggttttcactgggaaacttctgtgtttctaccccattgcttgctgccagcactgcctctccccccagcctggttgtctgcttctgtttcttggacatccctaagctcctgctctaattcc

SEQ ID NO: 44137 - DNA, 120 bp, Artificial Sequence
  ENSG00000063761_24 (sequence is synthesized)
catgtctttgtctttggcaggtcctactgtctgctttcacggacagtaattgtatttgagcctctctgatcttacttcacccaattcacaagggcagaaaaaatcctgaatttgagccta

SEQ ID NO: 44138 - DNA, 120 bp, Artificial Sequence
  ENSG00000063761_25 (sequence is synthesized)
attttctgtactctttattcatagtacagcaagcagatttttcagtgatcagtgacaattcacaatccttttatttcccaaaagaattaattgttcttagtgaccagttggatgcaccca

SEQ ID NO: 44139 - DNA, 120 bp, Artificial Sequence
  ENSG00000063761_26 (sequence is synthesized)
gggacctgagagtataatttgcaatatctgattattaatcttgaggatgtgtgctgcatagtatattttatggtgtcttttatagccactgaagtaaatataaatgtcctttctgttcaa

SEQ ID NO: 44140 - DNA, 120 bp, Artificial Sequence
  ENSG00000063761_27 (sequence is synthesized)
tcttcagagaggtgatgctgatctgggatgggaaggaagagagagggtaagccaggtgaaggggagatggcaagaatgctcctggcagcaggaatagcatgtgcaaaggccctgaggcca

SEQ ID NO: 44141 - DNA, 120 bp, Artificial Sequence
  ENSG00000063761_28 (sequence is synthesized)
gaaagcacacggattgctggggaagagaaagagtgaatatggctggaatgtcagtgtggtgtgagatgagaccaggcaggaggcagggcctggtcaggtaggactttgtaggctggggga

SEQ ID NO: 44142 - DNA, 120 bp, Artificial Sequence
  ENSG00000063761_29 (sequence is synthesized)
aagaggagaatttttaagatcccaatcctgtgttccccacccgtgggccccagctcctctcccctctgaccaggttaggtttgttaatgaccatggggtctagccgaggccgagagggtt

SEQ ID NO: 44143 - DNA, 120 bp, Artificial Sequence
  ENSG00000063761_30 (sequence is synthesized)
gcctagggcagcttgtgtcctggcgtgtcagctttctgggtcgagcatctctttgttccctggaaacctgtcaacagaccctctatgggcccaggtctggctttattcagcagctgttcc

SEQ ID NO: 44144 - DNA, 120 bp, Artificial Sequence
  ENSG00000063761_31 (sequence is synthesized)
ttagcggggaagaggcttttagctttaataaaaaagggactagagataagaagactgcctcgtcagggagagcagcagtgacaggatgatttaaacggcttctctagtgtcatttcttct

SEQ ID NO: 44145 - DNA, 120 bp, Artificial Sequence
  ENSG00000063761_32 (sequence is synthesized)
gtgcagacatcataaatcagattagcattgggctctggcagggaggggagcagggagaggggaggggagcagggagaggggaggcgggcctgtgactctgggtccacctagcacaggcct

SEQ ID NO: 44146 - DNA, 120 bp, Artificial Sequence
  ENSG00000063761_33 (sequence is synthesized)
ggagcaggtggggcagccccagaggaggcggtggggtcacctgctcctgatcctcagccccctcaccctgttctttggagaaggggtgagtggaatgactccctcagcccagctgttcag

SEQ ID NO: 44147 - DNA, 120 bp, Artificial Sequence
  ENSG00000063761_34 (sequence is synthesized)
cccattctcagctttggggggaaatggagaaggactgataaaagggtatggaggagagaaatgggggacaagtcggggggcgggtgtgggaggtggagagtgcagttctcctacctaatc

SEQ ID NO: 44148 - DNA, 120 bp, Artificial Sequence
  ENSG00000063761_35 (sequence is synthesized)
ccatgttcacgtcacctcgaactttaaaaaatactggtgccttgtaccgcccacatggtttcatgattctaaggtgcagctaaagttaagaaatcttaaactcaaagagtatgtcatctc

SEQ ID NO: 44149 - DNA, 120 bp, Artificial Sequence
  ENSG00000063761_36 (sequence is synthesized)
aaacaatcactcccaccacaaccgctccggcccaccgattttctctggcctccccttaaaagtgaccacattgagagaccagacagaggtccctcggatagatgtgagtggagaggagct

SEQ ID NO: 44150 - DNA, 120 bp, Artificial Sequence
  ENSG00000063761_37 (sequence is synthesized)
ctgtcatcagttacgactacctcacttccctgaagagtgtcccttatggctcagaggagtacttgcagctgagatctaagagtcttgctgtatctcccaggctggagtgcattggcgtga

SEQ ID NO: 44151 - DNA, 120 bp, Artificial Sequence
  ENSG00000063761_38 (sequence is synthesized)
ctgggcaacagagcgagactgcgtctcaaggaacaacaacaacaacaaaaaagaaatgggacagaaagttgtaaggccagatgtgggtgactcaccgactcgcagcgatgtcgaggtccc

SEQ ID NO: 44152 - DNA, 120 bp, Artificial Sequence
  ENSG00000063761_39 (sequence is synthesized)
tgtgtgtaaatccaggagtgcagcctagatctggtgtcactgccccagccttggagctcaaaccaccagttcagtgaaaacttggctctttgagacaagtgataatgttaactaattagc

SEQ ID NO: 44153 - DNA, 120 bp, Artificial Sequence
  ENSG00000063761_40 (sequence is synthesized)
ataatgctatagagtctaatacatgcttctacttgcttattccatttcttttattcccaagcttgttgctgtgctgggagctgaggtttgtccctgctctggaaaacttctcatctagtg

SEQ ID NO: 44154 - DNA, 120 bp, Artificial Sequence
  ENSG00000063761_41 (sequence is synthesized)
gagggacagacacagcaatgtgttgttgcagtgcaggtttgttagcaccatgacaggcattcatctgtgtttctgtggattcccaagaggaagtacgtaattctacccaggataaagggc

SEQ ID NO: 44155 - DNA, 120 bp, Artificial Sequence
  ENSG00000063761_42 (sequence is synthesized)
gccccacaaagctaagcggccacagagaacaatgatgcaaaatcagtgggacttaatccttttggctctgtggggcctgtctgttgtctcttccctcttcctgcccttctctctccttcc

SEQ ID NO: 44156 - DNA, 120 bp, Artificial Sequence
  ENSG00000063854_0 (sequence is synthesized)
ggcccgggtcatggtggtgggccgagggctgctcggccgccgcagcctcgccgcgctgggagccgcctgcgcccgccgaggcctcggtccagccctgctgggagttttctgccacacaga

SEQ ID NO: 44157 - DNA, 120 bp, Artificial Sequence
  ENSG00000063854_1 (sequence is synthesized)
ccctgctgggagttttctgccacacagatttgcggaagaacctgaccgtggacgagggcaccatgaaggtagaggtgctgcctgccctgaccgacaactacatgtacctggtcattgatg

SEQ ID NO: 44158 - DNA, 120 bp, Artificial Sequence
  ENSG00000063854_2 (sequence is synthesized)
atgagaccaaggaggctgccattgtggatccggtgcagccccagaaggtcgtggacgcggcgagaaagcacggggtgaaactgaccacagtgctcaccacccaccaccactgggaccatg

SEQ ID NO: 44159 - DNA, 120 bp, Artificial Sequence
  ENSG00000063854_3 (sequence is synthesized)
ctggcgggaatgagaaactggtcaagctggagtcgggactgaaggtgtacgggggtgacgaccgtatcggggccctgactcacaagatcactcacctgtccacactgcaggtggggtctc

SEQ ID NO: 44160 - DNA, 120 bp, Artificial Sequence
  ENSG00000063854_4 (sequence is synthesized)
tgaacgtcaagtgcctggcgaccccgtgccacacttcaggacacatttgttacttcgtgagcaagcccggaggctcggagccccctgccgtgttcacaggtgacaccttgtttgtggctg

SEQ ID NO: 44161 - DNA, 120 bp, Artificial Sequence
  ENSG00000063854_5 (sequence is synthesized)
gctgcgggaagttctatgaagggactgcggatgagatgtgtaaagctctgctggaggtcttgggccggctccccccggacacaagagtctactgtggccacgagtacaccatcaacaacc

SEQ ID NO: 44162 - DNA, 120 bp, Artificial Sequence
  ENSG00000063854_6 (sequence is synthesized)
tcaagtttgcacgccacgtggagcccggcaatgccgccatccgggagaagctggcctgggccaaggagaagtacagcatcggggagcccacagtgccatccaccctggcagaggagttta

SEQ ID NO: 44163 - DNA, 120 bp, Artificial Sequence
  ENSG00000063854_7 (sequence is synthesized)
cctacaaccccttcatgagagtgagggagaagacggtgcagcagcacgcaggtgagacggacccggtgaccaccatgcgggccgtgcgcagggagaaggaccagttcaagatgccccggg

SEQ ID NO: 44164 - DNA, 120 bp, Artificial Sequence
  ENSG00000063854_8 (sequence is synthesized)
actgaggccgccctgcaccttcagcggatttggggattaggctcttttaggtaactggctttcctgctggtccgtgcgggaaattcagtcttgatttaaccttaattttacagcccttgg

SEQ ID NO: 44165 - DNA, 120 bp, Artificial Sequence
  ENSG00000063854_9 (sequence is synthesized)
cttgtgttatcggacattctaatgcatatttataagagaagtttaacaagtatttattcccataacttccccttgcagactgttttcttctggcctttaggcctctgcttgtcccctcgg

SEQ ID NO: 44166 - DNA, 120 bp, Artificial Sequence
  ENSG00000063854_10 (sequence is synthesized)
ggactgtcaggcccactgctgcggtcggtacctttgcagcctgtgcttgtggtctgatctgctcaggcccccggcagggagaggtggccgcgtcttcttcctggaggcggccagatcgcg

SEQ ID NO: 44167 - DNA, 120 bp, Artificial Sequence
  ENSG00000063854_11 (sequence is synthesized)
cgacctccaggcagtgctcctactcggcagcacccacctgcctctgcttgagaaagcacaaaccgccctctggggaagcagccagctggggagtgctctcggcctgtgaccccgggaggg

SEQ ID NO: 44168 - DNA, 120 bp, Artificial Sequence
  ENSG00000063854_12 (sequence is synthesized)
ctgggtaggtggccacatgtcctgccccggctctgggtgtggctggtggcagagggtctatgagggaagggcaggacaaaggcaacccctaaggctaatctgaaatttagggctgggcgt

SEQ ID NO: 44169 - DNA, 81 bp, Artificial Sequence
  ENSG00000063854_13 (sequence is synthesized)
caagactctgtctcaaaaaaaaaaaaatatgaaatttaataataatctttttaaaaagttacctgggcagggtggtgtgca

SEQ ID NO: 44170 - DNA, 120 bp, Artificial Sequence
  ENSG00000063854_14 (sequence is synthesized)
ggctgaggcaggaggatcgcttgagcccgggagtccaaggctgcagtgagcattgcttgtgccactgcattctggcttggggaacagggagaccctgtctcaaagaaattaattaatcat

SEQ ID NO: 44171 - DNA, 120 bp, Artificial Sequence
  ENSG00000063854_15 (sequence is synthesized)
gcagttgagtggtatttagtccattcacaatgctgcagccgcctctcgcgtgttctgaaacatttgacctattcactgactgactgactgctctgtcagtgagctgtgaggggaggtgac

SEQ ID NO: 44172 - DNA, 120 bp, Artificial Sequence
  ENSG00000063854_16 (sequence is synthesized)
tctgtgtggggcccacaccctctgccacctggtcctatagacagactcttctgagtggaggggcagagcggccctgggacctaggagcaagcctggcccgaggcttgtggattgaagagg

SEQ ID NO: 44173 - DNA, 120 bp, Artificial Sequence
  ENSG00000063854_17 (sequence is synthesized)
aaggctggcactgcacttcagaccacatgcatgccctccccccggaggggtcactggtctgttcgcatactcgcagacccctctgggatgccacggaagccaggcgtgtgtgaggaggca

SEQ ID NO: 44174 - DNA, 120 bp, Artificial Sequence
  ENSG00000063854_18 (sequence is synthesized)
gggcagactgcttctccggctttcttctcccactacccccgccccagcgcaaagagtttgttctattgttcagcaaatattcttaggccagaatcttaaatgtttccattctataacaaa

SEQ ID NO: 44175 - DNA, 120 bp, Artificial Sequence
  ENSG00000063854_19 (sequence is synthesized)
taagtgccgcgtctcacctgggggtgtgggacctggctcacttctcgccccggtgggtttagggacatcaaggcctgtctccccccacggctctgtctgctttgtgaggacaagccccca

SEQ ID NO: 44176 - DNA, 120 bp, Artificial Sequence
  ENSG00000063854_20 (sequence is synthesized)
ctgaggccccgagggtgaggggagaaggttacagccttaccctcaggccccaccccccggctctctcctgggccatgcgggtttgtgccctggcacgttggcctcaatgttggggaggaa

SEQ ID NO: 44177 - DNA, 79 bp, Artificial Sequence
  ENSG00000063854_21 (sequence is synthesized)
gtttgtgccctggcacgttggcctcaatgttggggaggaaatgagtctacaggtgagtggttgccagccgggcacggtg

SEQ ID NO: 44178 - DNA, 87 bp, Artificial Sequence
  ENSG00000063854_22 (sequence is synthesized)
aatcccagcactttgggaggctgaggtagttgggtcacttgaggtcaggaccagcctggccaacacggtgaaacccagtctctaccg

SEQ ID NO: 44179 - DNA, 69 bp, Artificial Sequence
  ENSG00000063854_23 (sequence is synthesized)
ccgtgagccaagatcgtggaagacaagcagccatatctggagaggttgggtttttaaaaatccttgaaa

SEQ ID NO: 44180 - DNA, 120 bp, Artificial Sequence
  ENSG00000063854_24 (sequence is synthesized)
gccatatctggagaggttgggtttttaaaaatccttgaaaatggatgaataaaatgccctgtctgggttctagggctggcattgcctgctcaaggccgttgtttggcttttagaaatttt

SEQ ID NO: 44181 - DNA, 120 bp, Artificial Sequence
  ENSG00000063854_25 (sequence is synthesized)
gtgcgtgttcgagtgtgggtgggggcgggggttcttcgtgaagaccctgtgtctcctgccaggcaggctcacggggcagcttcgtggccttctctgttgcaccggtgtgagggggcccag

SEQ ID NO: 44182 - DNA, 120 bp, Artificial Sequence
  ENSG00000063854_26 (sequence is synthesized)
gggtgggtgctggggagcctcatggtggggctggccgattcctcccatgatgggtttggatcgtggtctggaaggaagttacgcttgcagcaagggctgtgctggcggagactgctggac

SEQ ID NO: 44183 - DNA, 120 bp, Artificial Sequence
  ENSG00000063854_27 (sequence is synthesized)
agctggggtccgggcgggtcccacgggaaaggagtcagtttcttccagcagggcgaggggtggctcagccctggggctgtgttccttgatgccgtagtgtggactcagggacctgtgcta

SEQ ID NO: 44184 - DNA, 120 bp, Artificial Sequence
  ENSG00000063854_28 (sequence is synthesized)
gtctgggggccctgcctgcctcccagggtggttgcagacctgtggagccacctgtggaggtcatatggccgggggacggcctcactgtaggccgggcccttcatggctgcggccttctaa

SEQ ID NO: 44185 - DNA, 120 bp, Artificial Sequence
  ENSG00000063854_29 (sequence is synthesized)
ggcggtgcggaggctgctggtggtgggggctgcctcccgtgcttgttactgtggccttgtcccgactggcctcacagtgcggggtttcacccggtgactcgatgtgggccttgtacggct

SEQ ID NO: 44186 - DNA, 120 bp, Artificial Sequence
  ENSG00000063854_30 (sequence is synthesized)
agcgggcggcgccgggccgtcgtttggcgaccgctgacgcggtgtctgttgcgcaggtgcctaaggccgcgctgccgggctcgagcggaggcggcgcaggcgctgaggctggcgcggagc

SEQ ID NO: 44187 - DNA, 120 bp, Artificial Sequence
  ENSG00000063854_31 (sequence is synthesized)
ctcggaacgctgtcccccgcagcgacggcccgttccacctcgcgatctgccgggtacccgggcggcgtggcgctcggcctccagggatccactgtgcggtgccaaaaaagaggcggaggc

SEQ ID NO: 44188 - DNA, 120 bp, Artificial Sequence
  ENSG00000063854_32 (sequence is synthesized)
ggggattaggctcttttagaaatcagccagctaactagaaaatcggcaagagaccgaaaccagcagtggctgaggccagatgaccctgtggctgtgtgctggacaagatgctcggtctcc

SEQ ID NO: 44189 - DNA, 120 bp, Artificial Sequence
  ENSG00000063854_33 (sequence is synthesized)
ggactacaggcatgtgccaccatgcctggaagggaagaacagattagtgagaaaccatcttggcatctaccagacccccgcttggtgcagctctaccagctgaagagtcactcaccgaca

SEQ ID NO: 44190 - DNA, 120 bp, Artificial Sequence
  ENSG00000063854_34 (sequence is synthesized)
agctctaccagctgaagagtcactcaccgacaccactgcccatagcgggtggggaacctcgggggtgaggcgcggtggtcttgagcctgtgcgtgggcaccagcagcttctgtcagagct

SEQ ID NO: 44191 - DNA, 120 bp, Artificial Sequence
  ENSG00000063854_35 (sequence is synthesized)
ctgccctgaggccctcctggtgcggctgcggtagaagggccggggctgtgtggagaccccgctgttgccgccctgtgttttcctgctaactgttggccccgtggctgggtttgcattctc

SEQ ID NO: 44192 - DNA, 120 bp, Artificial Sequence
  ENSG00000063854_36 (sequence is synthesized)
ctccccccgcccccaccccatctgccctggtcagtgctggtcggaagggagaccatctccatctcgagaggaggtgaccagctgcctgcctgcaggggcttgggtggcctcccctgctgc

SEQ ID NO: 44193 - DNA, 120 bp, Artificial Sequence
  ENSG00000063854_37 (sequence is synthesized)
tggtccctgtgcccctcctccccgtgcttgctgtgaggctgcagctgtggcggtttcttttctgtgtctcctgcattgctgttacctccataatgtgaaatgtaaaccatgtgaatgaaa

SEQ ID NO: 44194 - DNA, 120 bp, Artificial Sequence
  ENSG00000063854_38 (sequence is synthesized)
aggaagctccgtccctgtcgtcctctccaggccggtgcgggaaggcggatgtgtggctcatcccggacgctggcttctcttccctcttccacacgcgcacacccgccgggctctgctcac

SEQ ID NO: 44195 - DNA, 120 bp, Artificial Sequence
  ENSG00000063854_39 (sequence is synthesized)
cctaaggttaccaggaggtgttctgaagcattttttgagacgtgatgtcgctgtcacccaggctggagggcagtagcacagtcttggctcactgtagcctcgacctgtgctcaagcgatc

SEQ ID NO: 44196 - DNA, 120 bp, Artificial Sequence
  ENSG00000063854_40 (sequence is synthesized)
catctgccttagcctcccaaagtgctggtatcacagacgtgagcctccgtgcctggtctgccatcctgtgaagttcccgtgataaagtggtgcgtttctcttgcaggagaagtacagcat

SEQ ID NO: 44197 - DNA, 120 bp, Artificial Sequence
  ENSG00000063978_0 (sequence is synthesized)
agcggaagtgggttgctgttgaggcggcggcatctttctcgaggagctctcctgggcggctgaagaaggagcttcttctccggagtgcgccggcggtggcgcctgcggacctaactagct

SEQ ID NO: 44198 - DNA, 120 bp, Artificial Sequence
  ENSG00000063978_1 (sequence is synthesized)
ccaggttaggccgagctttgcgggaaagcagcggacttgaaaatactggaaatctgtccggatccaaattattttgcaagccagatgagtaaccagagggcatgaaaggttgagaacatt

SEQ ID NO: 44199 - DNA, 120 bp, Artificial Sequence
  ENSG00000063978_2 (sequence is synthesized)
tgacttccctgcaaaccttggtatagatcacttccttttctgtaggaaaggaaaggcaccaaagagcacaatgagtacaagaaagcgtcgtggtggagcaataaattctagacaagctca

SEQ ID NO: 44200 - DNA, 120 bp, Artificial Sequence
  ENSG00000063978_3 (sequence is synthesized)
gaagcgaactcgggaagcaacctccacccccgagatctccttggaagcagaacccatagaactcgtggaaactgctggagatgaaattgtggacctcacttgtgaatctttagagcctgt

SEQ ID NO: 44201 - DNA, 120 bp, Artificial Sequence
  ENSG00000063978_4 (sequence is synthesized)
ggtggttgatctgactcacaatgactctgttgtgattgttgacgaaagaagaagaccaaggaggaatgctaggaggctgccccaggaccatgctgacagctgtgtggtgagcagtgacga

SEQ ID NO: 44202 - DNA, 120 bp, Artificial Sequence
  ENSG00000063978_5 (sequence is synthesized)
tgaggagttgtccagggacagagacgtatatgtgactacccatactcccagaaacgccagggatgagggcgctacaggcctcaggccctcaggtactgtcagttgtcccatctgcatgga

SEQ ID NO: 44203 - DNA, 120 bp, Artificial Sequence
  ENSG00000063978_6 (sequence is synthesized)
cggatactcagagatcgtgcagaatggacgtctcatcgtttccacagaatgcggccatgtcttctgtagccagtgcctccgtgattccctgaagaatgctaatacttgcccaacttgtag

SEQ ID NO: 44204 - DNA, 120 bp, Artificial Sequence
  ENSG00000063978_7 (sequence is synthesized)
gaaaaagatcaaccacaaacggtaccaccccatttatatatgaagtattcagagccccccaggagagacggatggacagacagacagccaggttctccagtggtatctgcctccattttc

SEQ ID NO: 44205 - DNA, 120 bp, Artificial Sequence
  ENSG00000063978_8 (sequence is synthesized)
ctgagatcaaaaagactgtttcgaaaccaacatctgatatgtaaactgctcttttgtttccaaccccttccttttgttatctccagtttgatgctatggcgctggacccagggccctccc

SEQ ID NO: 44206 - DNA, 120 bp, Artificial Sequence
  ENSG00000063978_9 (sequence is synthesized)
aggccatctctgttcctctggggtggtccagttctagagtgggagaaagggagtcaggcgcattgggaatcgtggttccagtctggttgcagaatctgcacatttgccaagaaattttcc

SEQ ID NO: 44207 - DNA, 120 bp, Artificial Sequence
  ENSG00000063978_10 (sequence is synthesized)
ctgtttggaaagtttgccccagctttcccgggcacaccaccttttgtcccaagtgtctgccggtcgaccaatctgcctgccacacattgaccaagccagacccggttcacccagctcgag

SEQ ID NO: 44208 - DNA, 120 bp, Artificial Sequence
  ENSG00000063978_11 (sequence is synthesized)
gatcccaggttgaagagtggccccttgaggccctggaaagaccaatcactggacttcttcccttgagagtcagaggtcacccgtgattctgcctgcaccttatcattgatctgcagtgat

SEQ ID NO: 44209 - DNA, 120 bp, Artificial Sequence
  ENSG00000063978_12 (sequence is synthesized)
tcctaagaacgaaaaagtgcaataaaggccattcgttacctacttttcagcagcccacaagatgtagcactattagtgtccccctcagaggcttaatgttgcctgtggagcagtgcccat

SEQ ID NO: 44210 - DNA, 120 bp, Artificial Sequence
  ENSG00000063978_13 (sequence is synthesized)
cccagcccgtttctgcccaccagttgttctcaggaaccttacccatgctccagcgtccttcacctggcacaggacatgcaagataaatagggcaggcacgtgtttgggtgtcctctcttt

SEQ ID NO: 44211 - DNA, 120 bp, Artificial Sequence
  ENSG00000063978_14 (sequence is synthesized)
tctgataaaatccatcccgtgtttgccacacgccctccagtcctcagttcccactgcctaacgtctgcccccgtgtagatactgagaggtggtggcagtaattgtggccttatcagccgc

SEQ ID NO: 44212 - DNA, 120 bp, Artificial Sequence
  ENSG00000063978_15 (sequence is synthesized)
tcagttccaggcttttgcccaggtcactgttgccccatgttcggagaacctggcccacctgtcttggctttctcatccttcccaacccagtgccgtttatttcagaagcttcctggccac

SEQ ID NO: 44213 - DNA, 120 bp, Artificial Sequence
  ENSG00000063978_16 (sequence is synthesized)
tgggcttggatgcttcgggcttctgactgctccataggttttgactggtgaaacaggggcccagatgacaacctctccttcgctccacaggtacgcgggagcctcaggttctctcagggg

SEQ ID NO: 44214 - DNA, 120 bp, Artificial Sequence
  ENSG00000063978_17 (sequence is synthesized)
cagcaaagtggcccaagctgcccctgacagcacagggcctggggggtggctaacgagagaggccttacagtgccggcatgcctcctcttccactgtcgtccttcctcagagggcctcacg

SEQ ID NO: 44215 - DNA, 120 bp, Artificial Sequence
  ENSG00000063978_18 (sequence is synthesized)
ccaaacaaacggccttttcgtgtgaaacatcttcagggcgggaaaggggccacttctggctttgttagcaataactgaccttcagtttacccttctgaaggagcagggactcagcacaga

SEQ ID NO: 44216 - DNA, 120 bp, Artificial Sequence
  ENSG00000063978_19 (sequence is synthesized)
attcactttagacggggctgaaggagtgtccctcctctatgtgaaaagaaaattgttttattcttcattctgactttttaactgtttggctcacttccagttagtttgaatgaaaataat

SEQ ID NO: 44217 - DNA, 120 bp, Artificial Sequence
  ENSG00000063978_20 (sequence is synthesized)
aattttctacttggagttgaagagggcagaatccgcagctctcatcattgtgatgtgtagcatgtctgccctctgactggacatcattgccattaactttcttctgggcatcacggcaat

SEQ ID NO: 44218 - DNA, 120 bp, Artificial Sequence
  ENSG00000063978_21 (sequence is synthesized)
gtcacgatgcccagacttggagcaaggcaaccttggagtcagtccactcataaaatatggtaacacccattttaaaatttaagttttgtccttaaagacaacttcagtggttaattataa

SEQ ID NO: 44219 - DNA, 120 bp, Artificial Sequence
  ENSG00000063978_22 (sequence is synthesized)
aagttgtgttacttcgtcctaaattaaattgatagaaagatttaaaaatgtgttttgtttctactattcagaaactgcgaactagggaaaggttggtatgaagaaatgtctttccttttt

SEQ ID NO: 44220 - DNA, 120 bp, Artificial Sequence
  ENSG00000063978_23 (sequence is synthesized)
tcaatgtacatagttcaactctttctttgttacatttaaactatatccatggatatcagtctgctttggactcctctgctagtgttacagatggaaataaaaccattaatttgaaccaaa

SEQ ID NO: 44221 - DNA, 120 bp, Artificial Sequence
  ENSG00000063978_24 (sequence is synthesized)
agaagttaggaggtctgcgtctgggtctcggctcaccctggggggccgcggccatggggcttagttcctagcctaggaagggaaactgagactctgggaggggcaggaacgcccccaagg

SEQ ID NO: 44222 - DNA, 120 bp, Artificial Sequence
  ENSG00000063978_25 (sequence is synthesized)
tcacttggaaagtcgggcaggatgtgctgttagggggaagacccgggcagggtttttgttccccgctgacgacgcctcctttgtgtgttcgcgccgccgccccgccatcgtggggcctgc

SEQ ID NO: 44223 - DNA, 120 bp, Artificial Sequence
  ENSG00000063978_26 (sequence is synthesized)
gagtttgccggggtgcgtgggccgcgtggcggggccttttgtaggtcgggaggatctgagtacgggtgcgggcctgaccgtgggggcgccgaggtcgcagtctaaaacttagtagggcct

SEQ ID NO: 44224 - DNA, 120 bp, Artificial Sequence
  ENSG00000063978_27 (sequence is synthesized)
cgatttccgggcgcgcttccgggccccggctggtggttggtggaacgtgcgactgtgaggcttgcggcccagccctgcaccgctcgggcccttcaccgctctggcgcgcctatagacagg

SEQ ID NO: 44225 - DNA, 120 bp, Artificial Sequence
  ENSG00000063978_28 (sequence is synthesized)
tgtatgaagattctcacgacccgaaacagagttgctagtaaacaccgcttttccgcctttgatccatcgagggaagagggaaaaggatagagcttgggcaagccgttttggtggaatctc

SEQ ID NO: 44226 - DNA, 120 bp, Artificial Sequence
  ENSG00000063978_29 (sequence is synthesized)
agagcttgggcaagccgttttggtggaatctcactctgtcacccaggatgcagtgcactggcgtgttctcggtctcactgtaacctctgccatctgggctcaagtgattctcctgcctca

SEQ ID NO: 44227 - DNA, 120 bp, Artificial Sequence
  ENSG00000063978_30 (sequence is synthesized)
tttttctctttcaaaaacactctgccatcttttcaaggtatccgccatctctttcaagcatgtgaggagcttgataacttttgttgggggtcggtgttcagaatgacaagggtcttgccc

SEQ ID NO: 44228 - DNA, 120 bp, Artificial Sequence
  ENSG00000063978_31 (sequence is synthesized)
gaatgacaagggtcttgcccaggctggagtgcagtagcacagtcataactcactctagcctcaacctcccagggcacaagcgatcctcccatcttagcctcctgagtaactgggactaca

SEQ ID NO: 44229 - DNA, 120 bp, Artificial Sequence
  ENSG00000063978_32 (sequence is synthesized)
gctaatttttttttttctttggtattaatattttgtagagaaggagtttcaccatgttgcccaggctggtccagaactcctgggctcaagcaatcctgccttggcttcccaaagtgctgg

SEQ ID NO: 44230 - DNA, 87 bp, Artificial Sequence
  ENSG00000063978_33 (sequence is synthesized)
acaggcatgagccaccatgcctggccctagagcttgataatttcattcattcattgtctgtcacccaggttggagtgcaatggcgca

SEQ ID NO: 44231 - DNA, 71 bp, Artificial Sequence
  ENSG00000063978_34 (sequence is synthesized)
aaactcccaacctcaggtcagaccttgataatttcagtgaggaaaaaaaaaaaatctcatttacatgtttg

SEQ ID NO: 44232 - DNA, 120 bp, Artificial Sequence
  ENSG00000063978_35 (sequence is synthesized)
tttcagtgaggaaaaaaaaaaaatctcatttacatgtttgtgccaagtgctgtgctagtgggtggggacaccatgataagtatttgataagttatgtttcttgatttaagggagtataga

SEQ ID NO: 44233 - DNA, 120 bp, Artificial Sequence
  ENSG00000063978_36 (sequence is synthesized)
agaaatggttaagtcaggactaggaggagtgagagaaatggaagcaacctttgaggtaggccctgaagaacgagcagaaattccctaaagcggggtgggagcggcaggaccaacctggcc

SEQ ID NO: 44234 - DNA, 120 bp, Artificial Sequence
  ENSG00000063978_37 (sequence is synthesized)
aacttcggaccttctttgaggtccaaagtcaggtactttgaactgacttccaggatacctggagtaaagtacagttctgtttgaagtgtttgtttggaaagatgagtttgttccagtgag

SEQ ID NO: 44235 - DNA, 120 bp, Artificial Sequence
  ENSG00000063978_38 (sequence is synthesized)
gttgctgtattagagaaccacttgagagtttgctgcccacagtgtcatctgtgagaaatattaggtgaacgcaaaaagttgaggccagctgaaccaagccatgtaatatacacaccttcc

SEQ ID NO: 44236 - DNA, 120 bp, Artificial Sequence
  ENSG00000063978_39 (sequence is synthesized)
acatagatcagtcacctcagttgacttgtatgtgagccacatttgtgtccatctgatgttacagcattcactctctttgcctccacttctcaataactcacaatctgtaaactgactgag

SEQ ID NO: 44237 - DNA, 63 bp, Artificial Sequence
  ENSG00000063978_40 (sequence is synthesized)
cagaacttttgaaaagaggcaaaggcagaggagaataaaggaaggaggaagtaacttgtggaa

SEQ ID NO: 44238 - DNA, 87 bp, Artificial Sequence
  ENSG00000063978_41 (sequence is synthesized)
gaggagaataaaagagaaagcgtcgtggtggagcaataaattctagacaagctcagaagcgaactcgggaagcaacctccacccccg

SEQ ID NO: 44239 - DNA, 120 bp, Artificial Sequence
  ENSG00000063978_42 (sequence is synthesized)
gtgcagaagtgaacggaaagactcatcattcttagagagtggaattaagactgcgagcaaattggccctttccatggctcccaagggcaacagcgtgctgcacctgccactgtgggtgtg

SEQ ID NO: 44240 - DNA, 120 bp, Artificial Sequence
  ENSG00000063978_43 (sequence is synthesized)
cccggactgccgcaggaccgtggagaaggaggagaggcatggcggccttgaccagccagtgagccaagattttcttcttcactcctcgcttggtggctcccagccagaggccggcagtgg

SEQ ID NO: 44241 - DNA, 120 bp, Artificial Sequence
  ENSG00000063978_44 (sequence is synthesized)
gttgtgcggctggaaatctaggaatgggaaggttcggggcctgctcggctccggaggcagctggcgggtcgtccctggcggcgttggagcggtcagtggcagccgggcacgggcgaccgg

SEQ ID NO: 44242 - DNA, 120 bp, Artificial Sequence
  ENSG00000063978_45 (sequence is synthesized)
tccttgtagcacattagtgaaagtgagttccataatgtcacttctaagtaaccccacttcttgaaggagtatgtataggagctttctggtggttacatcagcttacttaccgacattgag

SEQ ID NO: 44243 - DNA, 120 bp, Artificial Sequence
  ENSG00000063978_46 (sequence is synthesized)
ctacattcgagtcataaagggcagagccctgaagacaaaaggctgagaaggaatagcttagggtttggtaatctcagaccttcacaacagttgtcagtgtcatagaaatactaaaacttt

SEQ ID NO: 44244 - DNA, 120 bp, Artificial Sequence
  ENSG00000063978_47 (sequence is synthesized)
gcttctgcttggctgcctagtccacagcctcccgattcaccattcacctggtcccagcaacagaagtctcagctggacacacaacatgctttagagacttgaaaatactggaaatctgtc

SEQ ID NO: 44245 - DNA, 120 bp, Artificial Sequence
  ENSG00000063978_48 (sequence is synthesized)
cagggtgagctagtagaaggtgctttcagtgtctttagaaggcctatgcagtctcacactcaccatgtacaactcaaagcttcacagattctgaaatagcttctcaactgggctaactgt

SEQ ID NO: 44246 - DNA, 120 bp, Artificial Sequence
  ENSG00000063978_49 (sequence is synthesized)
tagaagtgctggagactcccccaacccctccagcccctgagcggtggtactgtctaggagcgcgccgcggcccctgggcctcgctgtctgtcctaaatcattccggtgaacctctccggc

SEQ ID NO: 44247 - DNA, 120 bp, Artificial Sequence
  ENSG00000063978_50 (sequence is synthesized)
tgcgtagctccttgcccccgcgtcgcttggacacgggtggcatcctgggtctggcctgggcctcccgccggcctgctcctgagcccgccgcgtcgcccgccaggtgggaggaaaagaagg

SEQ ID NO: 44248 - DNA, 120 bp, Artificial Sequence
  ENSG00000063978_51 (sequence is synthesized)
ccttggaagcagaacccatagaactcgtggaaactgattgttgacgaaagaagaagaccaaggaggaatgctaggaggctgccccaggaccatgctgacagctgtgtggtgagcagtgac

SEQ ID NO: 44249 - DNA, 120 bp, Artificial Sequence
  ENSG00000063978_52 (sequence is synthesized)
ttcgtttcctttttcactgggtttggagaggaaactggcataggtgagagccgcggtgctgcaggtcttgccagaccatccccaagggcttggagcgctccaagcaggaagatgccttcg

SEQ ID NO: 44250 - DNA, 120 bp, Artificial Sequence
  ENSG00000063978_53 (sequence is synthesized)
cagatgctgtggtcagacccacacagccagtcccccttgtgcctgctgaagaaacttcaccactatcattgagcactgagctatagtcctttcttgtggcctaccagattttggagaagg

SEQ ID NO: 44251 - DNA, 120 bp, Artificial Sequence
  ENSG00000063978_54 (sequence is synthesized)
ctggtagctcacagcaggggttggggggtttctcctgggaagataagatagtggcctccagagctgggcagaaccttctgggttatagctgagcatggcagcagtttgtctctgggggtc

SEQ ID NO: 44252 - DNA, 87 bp, Artificial Sequence
  ENSG00000063978_55 (sequence is synthesized)
gagatgaaattgtggacctcacttgtgaatctttagagcctgtggtggttgatctgactcacaatgactctgttgtggtaagtgttg

SEQ ID NO: 44253 - DNA, 120 bp, Artificial Sequence
  ENSG00000064012_0 (sequence is synthesized)
ctgtttcaccttgtgtctgagctggtctgaaggctggttgttcagactgagcttcctgcctgcctgtaccccgccaacagcttcagaagaaggagcagcccctgggtgcgtccactttct

SEQ ID NO: 44254 - DNA, 120 bp, Artificial Sequence
  ENSG00000064012_1 (sequence is synthesized)
gggcacgtgaggttgggccttggccgcctgagcccttgagttggtcacttgaaccttgggaatattgagatggacttcagcagaaatctttatgatattggggaacaactggacagtgaa

SEQ ID NO: 44255 - DNA, 120 bp, Artificial Sequence
  ENSG00000064012_2 (sequence is synthesized)
gatctggcctccctcaagttcctgagcctggactacattccgcaaaggaagcaagaacccatcaaggatgccttgatgttattccagagactccaggaaaagagaatgttggaggaaagc

SEQ ID NO: 44256 - DNA, 120 bp, Artificial Sequence
  ENSG00000064012_3 (sequence is synthesized)
aatctgtccttcctgaaggagctgctcttccgaattaatagactggatttgctgattacctacctaaacactagaaaggaggagatggaaagggaacttcagacaccaggcagggctcaa

SEQ ID NO: 44257 - DNA, 120 bp, Artificial Sequence
  ENSG00000064012_4 (sequence is synthesized)
atttctgcctacagggtcatgctctatcagatttcagaagaagtgagcagatcagaattgaggtcttttaagtttcttttgcaagaggaaatctccaaatgcaaactggatgatgacatg

SEQ ID NO: 44258 - DNA, 120 bp, Artificial Sequence
  ENSG00000064012_5 (sequence is synthesized)
aacctgctggatattttcatagagatggagaagagggtcatcctgggagaaggaaagttggacatcctgaaaagagtctgtgcccaaatcaacaagagcctgctgaagataatcaacgac

SEQ ID NO: 44259 - DNA, 120 bp, Artificial Sequence
  ENSG00000064012_6 (sequence is synthesized)
gagttgtgtggggtaatgacaatctcggactctccaagagaacaggatagtgaatcacagactttggacaaagtttaccaaatgaaaagcaaacctcggggatactgtctgatcatcaac

SEQ ID NO: 44260 - DNA, 120 bp, Artificial Sequence
  ENSG00000064012_7 (sequence is synthesized)
aatcacaattttgcaaaagcacgggagaaagtgcccaaacttcacagcattagggacaggaatggaacacacttggatgcaggggctttgaccacgacctttgaagagcttcattttgag

SEQ ID NO: 44261 - DNA, 120 bp, Artificial Sequence
  ENSG00000064012_8 (sequence is synthesized)
atcaagccccacgatgactgcacagtagagcaaatctatgagattttgaaaatctaccaactcatggaccacagtaacatggactgcttcatctgctgtatcctctcccatggagacaag

SEQ ID NO: 44262 - DNA, 120 bp, Artificial Sequence
  ENSG00000064012_9 (sequence is synthesized)
ggcatcatctatggcactgatggacaggaggcccccatctatgagctgacatctcagttcactggtttgaagtgcccttcccttgctggaaaacccaaagtgttttttattcaggcttgt

SEQ ID NO: 44263 - DNA, 120 bp, Artificial Sequence
  ENSG00000064012_10 (sequence is synthesized)
cagggggataactaccagaaaggtatacctgttgagactgattcagaggagcaaccctatttagaaatggatttatcatcacctcaaacgagatatatcccggatgaggctgactttctg

SEQ ID NO: 44264 - DNA, 120 bp, Artificial Sequence
  ENSG00000064012_11 (sequence is synthesized)
ctggggatggccactgtgaataactgtgtttcctaccgaaaccctgcagagggaacctggtacatccagtcactttgccagagcctgagagagcgatgtcctcgaggcgatgatattctc

SEQ ID NO: 44265 - DNA, 120 bp, Artificial Sequence
  ENSG00000064012_12 (sequence is synthesized)
accatcctgactgaagtgaactatgaagtaagcaacaaggatgacaagaaaaacatggggaaacagatgcctcagcctactttcacactaagaaaaaaacttgtcttcccttctgattga

SEQ ID NO: 44266 - DNA, 120 bp, Artificial Sequence
  ENSG00000064012_13 (sequence is synthesized)
gtagagctggctggctgtgcccttccgtccttcattagacgtttgctcttgtcttagatgctcagatggtagtggataggcctgtgacgaaggtgctaccatcgtgagagtaagattata

SEQ ID NO: 44267 - DNA, 120 bp, Artificial Sequence
  ENSG00000064012_14 (sequence is synthesized)
caggcgtgagccaccgcgcctggccgatggtactatttagatataacactatgtttatttactaattttctagattttctactttattaattgttttgcacttttttataagagctaaag

SEQ ID NO: 44268 - DNA, 120 bp, Artificial Sequence
  ENSG00000064012_15 (sequence is synthesized)
tgcacttttttataagagctaaagttaaataggatattaacaacaataacactgtctcctttctcttatgcttaaggctttgggaatgtttttagctggtggcaataaataccagacacg

SEQ ID NO: 44269 - DNA, 120 bp, Artificial Sequence
  ENSG00000064012_16 (sequence is synthesized)
tacaaaatccagctatgaatatagagggcttatgattcagattgttatctatcaactataagcccactgttaatattctattaactttaattctctttcaaagctaaattccacactacc

SEQ ID NO: 44270 - DNA, 74 bp, Artificial Sequence
  ENSG00000064012_17 (sequence is synthesized)
tgtacccaagaggtcaaggctgcagtgagccatgttcacaccgctgcactcaagcttgggtgacagaacaagac

SEQ ID NO: 44271 - DNA, 120 bp, Artificial Sequence
  ENSG00000064012_18 (sequence is synthesized)
ttcacaccgctgcactcaagcttgggtgacagaacaagaccccgtctcaaaaaaaattttttttttaataaaacaaaatttgtttgaaatcttttaaaaattcaaatgatttttacaagt

SEQ ID NO: 44272 - DNA, 120 bp, Artificial Sequence
  ENSG00000064012_19 (sequence is synthesized)
tttaaataagctctccccaaacttgctttatgccttcttattgcttttatgatatatatatgcttggctaactatatttgctttttgctaacaatgctctggggtctttttatgcatttg

SEQ ID NO: 44273 - DNA, 120 bp, Artificial Sequence
  ENSG00000064012_20 (sequence is synthesized)
tgcatttgcatttgctctttcatctctgcttggattattttaaatcattaggaattaagttatctttaaaatttaagtatcttttttcaaaaacattttttaatagaataaaatataatt

SEQ ID NO: 44274 - DNA, 120 bp, Artificial Sequence
  ENSG00000064012_21 (sequence is synthesized)
agtcatctctgttctgctttaggagtaaagtttaccctgcagttccttctgtggtgaagttttctctttctctcggagaccagattctgcctttctgctggagggaagtgttttcacagg

SEQ ID NO: 44275 - DNA, 120 bp, Artificial Sequence
  ENSG00000064012_22 (sequence is synthesized)
ttctcctccttttatcttttgtgttttttttcaagccctgctgaatttgctagtcaactcaacaggaagtgaggccatggagggaggcagaagagccagggtggttattgaaagtaaaag

SEQ ID NO: 44276 - DNA, 120 bp, Artificial Sequence
  ENSG00000064012_23 (sequence is synthesized)
aaacttcttcctgggagcctttcccacccccttccctgctgagcacgtggagttaggcaggttaggggactcggagactgcgatggtgccaggaaagggtggagcggattatattctcct

SEQ ID NO: 44277 - DNA, 120 bp, Artificial Sequence
  ENSG00000064012_24 (sequence is synthesized)
agattctagcacttcctttgtgaggctctaaccccctctcctatagtggatttgttaagaacttctgtttttgtggctttgttattataaaattttttgaaatgttgttctctaaaaaag

SEQ ID NO: 44278 - DNA, 120 bp, Artificial Sequence
  ENSG00000064012_25 (sequence is synthesized)
ttatgattttatgtttttcttcatgagattctttcactgccttccagctgcaagtagaatgacgtctaaatctttgtgatctgtcactgaagcccttgagtgagacacttaaatctggct

SEQ ID NO: 44279 - DNA, 120 bp, Artificial Sequence
  ENSG00000064012_26 (sequence is synthesized)
gttcagactgagcttcctgcctgcctgtaccccgccaacagcttcagaagaaggtgactggtggctgcctgaggaataccagtgggcaagagaattagcatttctggagcatctgctgtc

SEQ ID NO: 44280 - DNA, 120 bp, Artificial Sequence
  ENSG00000064012_27 (sequence is synthesized)
atggttggaaattgggcatctgttcctttaaacaggaaacatttcttgttcgaattatattctcctgccttttaaaaagatggacttcagcagaaatctttatgatattggggaacaact

SEQ ID NO: 44281 - DNA, 120 bp, Artificial Sequence
  ENSG00000064012_28 (sequence is synthesized)
gcctcccaaagtgctggaattacaggtgtcagccacctgtacctggtccctgctaacatttgatttgtttatttaagcaaatctaagcctttaaaaaggcacagagattaagtccattga

SEQ ID NO: 44282 - DNA, 120 bp, Artificial Sequence
  ENSG00000064012_29 (sequence is synthesized)
ctttaaaaaggcacagagattaagtccattgattacatcattcgtcactatgcgcttggtattgaaaaaaatattttggacccttgatttgtattcttttaaaattaaaacatttctatt

SEQ ID NO: 44283 - DNA, 120 bp, Artificial Sequence
  ENSG00000064012_30 (sequence is synthesized)
gcaggtacagtagaacccaaaagagaaaagtaaaatatttcttatgcctatttttttttaaatcaaaagggagagaacaaaagctataccaaaagggccatgtttcaagaaaatggattt

SEQ ID NO: 44284 - DNA, 120 bp, Artificial Sequence
  ENSG00000064012_31 (sequence is synthesized)
aatcggcaaaacctactctaaaattgaaactgacaaatcgctccatatcacagttgtttctaatcaaatattgtttggggtttccccttttaattcagagagaagcagcagccttgaagg

SEQ ID NO: 44285 - DNA, 120 bp, Artificial Sequence
  ENSG00000064012_32 (sequence is synthesized)
cttgggaatattgagagaaacattagaatcattgccctttagaagagcagaactatgatgcctcctgtcagggatggaacgaggcattccatgcagatgacaacccaaagagagcaagag

SEQ ID NO: 44286 - DNA, 120 bp, Artificial Sequence
  ENSG00000064012_33 (sequence is synthesized)
tggctctatttatatcagacaaaatcgactttaagtcaaaaactgtcacaagagacattaaagtatattatataatgaaaaaagcatcaatccaccatgaagatataacaattataaata

SEQ ID NO: 44287 - DNA, 120 bp, Artificial Sequence
  ENSG00000064012_34 (sequence is synthesized)
tatgcactcaatatcagagcacctaaatatatgaaacaaacaatgacagaactgaagggagaaatagccagccatacaaaaatagtaggagacttcaacactgtactttaaataatggat

SEQ ID NO: 44288 - DNA, 120 bp, Artificial Sequence
  ENSG00000064012_35 (sequence is synthesized)
agaacattcagacagaagattaataaggaaacaggggacttaaacaacattatagaccaaatggaccgaacagaaatacacagaacgttccaccctacagcagtagaacacacattatcc

SEQ ID NO: 44289 - DNA, 120 bp, Artificial Sequence
  ENSG00000064012_36 (sequence is synthesized)
tcaaatgcacatggaactttctccaaggtagatcacaagttgggtcacaaaacaagtctttgcaaatttaagagactgaaatcataccatgtatcttttctgaccatgatggaatgaaac

SEQ ID NO: 44290 - DNA, 120 bp, Artificial Sequence
  ENSG00000064012_37 (sequence is synthesized)
taaaaatcaatggcagaaggaaaaatagaaagttcacaaatatgtggaaattaaacaacacactcttgaacaacaattaggccataaaaataaaaaaagaaattaggaaatatcttgaga

SEQ ID NO: 44291 - DNA, 120 bp, Artificial Sequence
  ENSG00000064012_38 (sequence is synthesized)
taaatgaaaagaaaagcacaacatacccaaacttacaggataaaagcagtactaagcaaagaagtactaagaggtactttattgcaatacacatctgcagtgaaaaagaagaaagatctc

SEQ ID NO: 44292 - DNA, 120 bp, Artificial Sequence
  ENSG00000064012_39 (sequence is synthesized)
aagtaaatagtctaacttcgtgcctcaaggagaggagaagaagatgaagaagaagaggaactaagcctaaaattagtgaaggaaataacaaagattagagtaggaaccaagaaaatacag

SEQ ID NO: 44293 - DNA, 120 bp, Artificial Sequence
  ENSG00000064012_40 (sequence is synthesized)
aatagaaaagcaatagaaaaaaaatcaacaaattttttgaaaagaataacaaaagaattggttttttgaaaagataaacaaaatcaacaaatccctagttaggctaagtaagaaagagag

SEQ ID NO: 44294 - DNA, 120 bp, Artificial Sequence
  ENSG00000064012_41 (sequence is synthesized)
aagactcaaataaacaatatcagaaataaaagaggagacattacaactgatgccacagaaataaaaacatgaggctataatgaacaattctattccaacaaactggataatctagaagaa

SEQ ID NO: 44295 - DNA, 120 bp, Artificial Sequence
  ENSG00000064012_42 (sequence is synthesized)
gatgactgaatcatgaagaaatacaaagtctgaacagacttataactaatgtggaggtttagtcaataatcaaaaatgttccccaaacgaagaagtccaggaccagatggcttcacaggt

SEQ ID NO: 44296 - DNA, 120 bp, Artificial Sequence
  ENSG00000064012_43 (sequence is synthesized)
gaattcttccaaacatctcaagaagaattaatgccagttcttcttaaactatttttaaaaattgaagaagagggcacacttccaaatttattttatgtggccaacattatcccgatacca

SEQ ID NO: 44297 - DNA, 120 bp, Artificial Sequence
  ENSG00000064012_44 (sequence is synthesized)
aagccaaacaaagacaccacaagaaatgaaaactgcaggtcaatatctctgatgaatatacatataaaaactcataacaaaatactagcaaatcaaattcaacagtacatttaaatgatc

SEQ ID NO: 44298 - DNA, 120 bp, Artificial Sequence
  ENSG00000064012_45 (sequence is synthesized)
gtacatcctgactgagtggcatttatccctaggatacaagtatggatcaacatacaaaaataaatcagtgcgaaatggcctattaacagggcaaagatataaagataacatgatcatctc

SEQ ID NO: 44299 - DNA, 120 bp, Artificial Sequence
  ENSG00000064012_46 (sequence is synthesized)
aatagatgcagagaaagcatttgacaaaattcaataccctttcgtgattaaacaatttttcaacaaactggaaatagagtctcaacatcatcaagaccatatataagaaaattttcactg

SEQ ID NO: 44300 - DNA, 120 bp, Artificial Sequence
  ENSG00000064012_47 (sequence is synthesized)
ttgagtattatattagatgtgagcttttcatatatgggattcataatatgtttcaaatatattacaaagctatagtaattgaaacagcatgggaatagcataaagacaaacacataggcc

SEQ ID NO: 44301 - DNA, 120 bp, Artificial Sequence
  ENSG00000064012_48 (sequence is synthesized)
atcagaagagaagagagagctcagaaataaatccatgcatatacagtgccttagtccattcagcctgctaaaacaaaataccatagactggtggcttataaaacacagaaatttattttt

SEQ ID NO: 44302 - DNA, 120 bp, Artificial Sequence
  ENSG00000064012_49 (sequence is synthesized)
cacagttctggaggctaggaaattcaagatcaagtagctagcagatttgctatctagtgagggcctgcttcttggttcataaatggccatcttctccatgtgtcctcatggaattagggt

SEQ ID NO: 44303 - DNA, 120 bp, Artificial Sequence
  ENSG00000064012_50 (sequence is synthesized)
gatggagcgctctgggatttcttttataaggcactagtcccattcataagtgctctaccttcatgacctaatcacctcccaaaggtcccatctccaaataccaacacataggggattagg

SEQ ID NO: 44304 - DNA, 120 bp, Artificial Sequence
  ENSG00000064012_51 (sequence is synthesized)
tttcaacatatgaattttaggggaaacaaacatcagtctattgcatatactacctaaagcaatctacaaatttggtgtgatctctattaacatcccaatggattttttttttacagaaaa

SEQ ID NO: 44305 - DNA, 120 bp, Artificial Sequence
  ENSG00000064012_52 (sequence is synthesized)
aaacctctgaagtataaaaaggaccacaaatagctaaatcagttttgaggaagaacaaagctagaagcaccatacttcctgatttctaaatatattatactcccatggtcatagcagcac

SEQ ID NO: 44306 - DNA, 120 bp, Artificial Sequence
  ENSG00000064012_53 (sequence is synthesized)
tatttacagtagccaagatgtgcaaacaacctaaatatctaggatggggaaagaaaatgtggtagtcacataaaatggaatattatttgccttataaaggagggaaattctataatataa

SEQ ID NO: 44307 - DNA, 120 bp, Artificial Sequence
  ENSG00000064042_0 (sequence is synthesized)
cgacggcggcggccgtcctcatcccggcgcttgagaggacgcggggctgcgcaaatggcttgtcccgctctcggtctggaagctcttcagcccctgcagcccgagccgccccccgagccc

SEQ ID NO: 44308 - DNA, 120 bp, Artificial Sequence
  ENSG00000064042_1 (sequence is synthesized)
gccttctccgaggcgcagaagtggattgagcaagtaactggcagaagttttggtgataaagattttcggacaggtttagaaaatggaatcctcctctgcgagttgctgaatgctataaag

SEQ ID NO: 44309 - DNA, 120 bp, Artificial Sequence
  ENSG00000064042_2 (sequence is synthesized)
ccaggacttgttaaaaagatcaatagattgcctacccccattgcaggactggacaatattatcttattcttgagaggttgtaaagagctcggccttaaagaatctcaactttttgacccg

SEQ ID NO: 44310 - DNA, 120 bp, Artificial Sequence
  ENSG00000064042_3 (sequence is synthesized)
agtgacctccaggatacatccaacagagtaacagtcaagagccttgattatagtaggaagctgaaaaatgtattagttaccatttactggctgggaaaagcagcaaacagctgcacatcc

SEQ ID NO: 44311 - DNA, 120 bp, Artificial Sequence
  ENSG00000064042_4 (sequence is synthesized)
tacagcggaacgacactaaacctgaaggagtttgaaggattgttggctcagatgcgaaaggacactgatgacattgaaagtcctaaacgcagtatccgagacagtggctacatcgactgc

SEQ ID NO: 44312 - DNA, 120 bp, Artificial Sequence
  ENSG00000064042_5 (sequence is synthesized)
tgggattccgagcgcagcgactccctctctcctcctcgccacggcagagatgattccttcgacagcctggattcctttggctctcgctctcggcagacgccttcaccagatgtagtcctc

SEQ ID NO: 44313 - DNA, 120 bp, Artificial Sequence
  ENSG00000064042_6 (sequence is synthesized)
aggggaagcagcgatgggagaggaagcgactctgaatccgacttgcctcatcggaagctgccagatgtgaagaaggatgacatgtctgcacggcggacttcccatggtgagccgaaatca

SEQ ID NO: 44314 - DNA, 120 bp, Artificial Sequence
  ENSG00000064042_7 (sequence is synthesized)
gcagtgccttttaaccagtacctcccgaacaaaagcaatcagacggcctacgtccccgcgcctctgagaaagaagaaagcagagagagaggaataccgcaagagctggagtaccgccacc

SEQ ID NO: 44315 - DNA, 120 bp, Artificial Sequence
  ENSG00000064042_8 (sequence is synthesized)
tccccgctgggtggggagaggcccttcagatacggtccgagaactcctgtgtctgatgacgcagagagcaccagcatgtttgacatgcggtgtgaggaggaggccgcggtgcagccgcac

SEQ ID NO: 44316 - DNA, 120 bp, Artificial Sequence
  ENSG00000064042_9 (sequence is synthesized)
agcagggcccgccaggagcagctgcagctgataaataaccagctgagggaagaggacgacaaatggcaagatgacctggctcgttggaagagtcgtagaagaagtgtttctcaggactta

SEQ ID NO: 44317 - DNA, 120 bp, Artificial Sequence
  ENSG00000064042_10 (sequence is synthesized)
atcaagaaagaggaagaaaggaaaaaaatggagaagttactggctggagaagatgggacaagtgaacgaaggaaaagcatcaaaacctacagagaaattgttcaagaaaaagagcggaga

SEQ ID NO: 44318 - DNA, 120 bp, Artificial Sequence
  ENSG00000064042_11 (sequence is synthesized)
gagagagagctgcatgaagcatataagaacgctcggtcccaggaggaggcagaggggatccttcaacagtacattgagaggttcaccatcagtgaggctgttctcgaacgcttggagatg

SEQ ID NO: 44319 - DNA, 120 bp, Artificial Sequence
  ENSG00000064042_12 (sequence is synthesized)
ccaaaaattctggaaagaagccattcaacagagccaaatttatcctccttcctgaatgaccccaatcccatgaaatacctgcggcaacagtcactgcctccacccaaattcactgccact

SEQ ID NO: 44320 - DNA, 120 bp, Artificial Sequence
  ENSG00000064042_13 (sequence is synthesized)
gttgaaaccaccattgctcgtgccagtgttctggataccagcatgtcagcaggcagtgggtctccaagcaaaactgtcactcccaaagcagtgcctatgctgacacccaagccttactcc

SEQ ID NO: 44321 - DNA, 120 bp, Artificial Sequence
  ENSG00000064042_14 (sequence is synthesized)
cagcccaaaaattctcaagatgttctgaagacctttaaggtagacgggaaagtcagtgtgaatggagagacggttcatagagaggaggagaaggaaagagagtgtcccacggtggcacct

SEQ ID NO: 44322 - DNA, 120 bp, Artificial Sequence
  ENSG00000064042_15 (sequence is synthesized)
gcccactccttaaccaaatcccagatgtttgaaggtgtggccagagtgcacgggtctccactggagctgaaacaagacaacggtagcatcgagatcaacataaagaagccaaactctgtt

SEQ ID NO: 44323 - DNA, 120 bp, Artificial Sequence
  ENSG00000064042_16 (sequence is synthesized)
ccccaagagctcgcagcaaccactgagaaaacggaaccgaatagtcaagaggacaagaatgatggtggaaaatcaagaaaagggaatatagaacttgcctcatcagaaccacagcatttt

SEQ ID NO: 44324 - DNA, 120 bp, Artificial Sequence
  ENSG00000064042_17 (sequence is synthesized)
acaacaactgtgactcgatgcagcccgaccgtggcctttgtggaatttccctccagcccccagctgaagaatgatgtgtcggaagaaaaagaccagaagaaaccagaaaatgaaatgagt

SEQ ID NO: 44325 - DNA, 120 bp, Artificial Sequence
  ENSG00000064042_18 (sequence is synthesized)
ggaaaggtggagttggtgctgtcacaaaaggtggtaaagccaaaatctccagaacccgaagcaacgctgacatttccatttctggacaaaatgcctgaagccaaccaactacatttgcca

SEQ ID NO: 44326 - DNA, 120 bp, Artificial Sequence
  ENSG00000064042_19 (sequence is synthesized)
aatctcaattctcaagtggattctccaagcagtgagaagtcacctgttatgacacctcagtttaagttctgggcatgggacccagaagaggagcgcaggcgacaggaaaaatggcaacag

SEQ ID NO: 44327 - DNA, 120 bp, Artificial Sequence
  ENSG00000064042_20 (sequence is synthesized)
gaacaggaacgtttgctccaggagagataccagaaggagcaggacaagctgaaagaagagtgggaaaaggcccaaaaggaggtggaagaggaagaacgcagatactatgaggaggagcgt

SEQ ID NO: 44328 - DNA, 120 bp, Artificial Sequence
  ENSG00000064042_21 (sequence is synthesized)
aagataattgaagacactgtggttccatttactgtttcttcaagttccgctgaccagctgtctacctcttcctccatgactgaaggcagtgggacaatgaataagatagacctgggaaac

SEQ ID NO: 44329 - DNA, 120 bp, Artificial Sequence
  ENSG00000064042_22 (sequence is synthesized)
tgtcaagatgaaaaacaagacagaagatggaagaaatcattccagggagatgacagtgacttattgctgaagactagggaaagtgatcgactggaggagaagggcagcctaactgaaggg

SEQ ID NO: 44330 - DNA, 120 bp, Artificial Sequence
  ENSG00000064042_23 (sequence is synthesized)
gccttggctcattctgggaaccctgtatcaaaaggagtccatgaagaccatcagctggataccgaggctggggccccacactgtggaacaaacccacagcttgctcaggatccatcccag

SEQ ID NO: 44331 - DNA, 120 bp, Artificial Sequence
  ENSG00000064042_24 (sequence is synthesized)
aatcagcagacatcaaatccaacgcacagttcagaagatgtgaagccaaaaaccctcccgctggataaaagcattaaccatcagatcgagtctcccagtgaaaggcggaagaaaagtccc

SEQ ID NO: 44332 - DNA, 120 bp, Artificial Sequence
  ENSG00000064042_25 (sequence is synthesized)
cctcccggtcagtcaccaaacaggtctataagtggaaagaagctgtgctcttcctgtgggcttcctttgggtaaaggagctgcaatgatcatcgagaccctcaatctctattttcacatc

SEQ ID NO: 44333 - DNA, 120 bp, Artificial Sequence
  ENSG00000064042_26 (sequence is synthesized)
cagtgtttcaggtgtggaatttgtaaaggccagcttggagatgcagtgagtgggacggatgttaggattcgaaatggtctcctgaactgtaatgattgctacatgcgatccagaagtgcc

SEQ ID NO: 44334 - DNA, 120 bp, Artificial Sequence
  ENSG00000064042_27 (sequence is synthesized)
gggcagcctacaacattgtgacacggctttcaagcttccggatcactcaccatttctttactgagagtgtcccctggcaactgcttaacaaaatcccaagctcaggggcttctcagcatt

SEQ ID NO: 44335 - DNA, 120 bp, Artificial Sequence
  ENSG00000064042_28 (sequence is synthesized)
ctcaggggcttctcagcatttacctaatttctgaaaggctcttctgaaaggtggtatctgttctttcgtagcacagtgtttatgtttttcctgtttattgttttggtttttttttttttt

SEQ ID NO: 44336 - DNA, 120 bp, Artificial Sequence
  ENSG00000064042_29 (sequence is synthesized)
caaaagaatatggggttgtaatgatcctgaatagctcaaaaaaggttttagcatggtcaaacaggcttatggtttaaaatgtgttattctcttctttgggaattagctaaatgatgcaat

SEQ ID NO: 44337 - DNA, 120 bp, Artificial Sequence
  ENSG00000064042_30 (sequence is synthesized)
aaacctgttttgttttagaatgtctaggaattaaacactttatgtttacagaattgagctgcagaaagtgcaagacatgccaatttgagacacacggtcttctaagactgaaggataaat

SEQ ID NO: 44338 - DNA, 120 bp, Artificial Sequence
  ENSG00000064042_31 (sequence is synthesized)
ttaatgcatttcagaaactaaacatcacagcaagctctatctctgagctataatttgtttttaatgcaaagacactagtttgataatatatactgtaatcctgaaacatttgtgttactt

SEQ ID NO: 44339 - DNA, 120 bp, Artificial Sequence
  ENSG00000064042_32 (sequence is synthesized)
acctttggaggtagaaattataccaataaattattgcaccgttagtattagattctgtgtaccttggaagttatgtcattaatataggctggttcatcaaataaagcaaaaccttgcaat

SEQ ID NO: 44340 - DNA, 120 bp, Artificial Sequence
  ENSG00000064042_33 (sequence is synthesized)
atcagctagatttacactccgggacgttgcccaaaggtaggaagaaagcagagggaaatatttcagtcatcatttccaaagtcattatcaaaatctgtgaggaagtttaatcttccaaag

SEQ ID NO: 44341 - DNA, 120 bp, Artificial Sequence
  ENSG00000064042_34 (sequence is synthesized)
agtcaatgtcagacatcaggcctctgttgcctgcttctctcgaggcactagattaggagtcttcaataagagacttaacatgaggtatatggaagatgaggcaccgagataagttcatca

SEQ ID NO: 44342 - DNA, 120 bp, Artificial Sequence
  ENSG00000064042_35 (sequence is synthesized)
ttaggtgtgagcactgctcacccttgctggcaagttctccttaagggcctgaagcacaggtgtccaaagaaaagcgttaagtccatcttaatagaatctatgtggtatatgatgtggtca

SEQ ID NO: 44343 - DNA, 120 bp, Artificial Sequence
  ENSG00000064042_36 (sequence is synthesized)
gcccctggtctgtgatcagcaagaacctacagcacagattatgccctgcccacttcaatgaatacctactctcctccattctccatcactttttttgctatcaagaactccggaccttgc

SEQ ID NO: 44344 - DNA, 120 bp, Artificial Sequence
  ENSG00000064042_37 (sequence is synthesized)
ccatggagaagtttagagaggaactcttgtggagagctggtttattttctgccctgtgcgacgagtttcagctggccaagaaaggagtcaagttattaaaaagcatcacaatgtagatct

SEQ ID NO: 44345 - DNA, 120 bp, Artificial Sequence
  ENSG00000064042_38 (sequence is synthesized)
ccaggctggttttttgttttttgttgttaagactggggaaagggggactatttattctgccttaaatcaatggcaaataagtcaagatgacattttgtgaatgtagactatggatacact

SEQ ID NO: 44346 - DNA, 120 bp, Artificial Sequence
  ENSG00000064042_39 (sequence is synthesized)
cctaatagattgatgtagtcataaaagggggtcaagtagatgtttttctgttatgtaagcaataatttttccgtgtcttattgagtatggctagcgattatttattacatgctagatggg

SEQ ID NO: 44347 - DNA, 120 bp, Artificial Sequence
  ENSG00000064042_40 (sequence is synthesized)
ttctttgcatgtgggttccatataggtgcagaaatttcctcagccactggagggatttcgaccatatttgtcatttggatgagctgttattagattgaaatctacacatcatttcattaa

SEQ ID NO: 44348 - DNA, 120 bp, Artificial Sequence
  ENSG00000064042_41 (sequence is synthesized)
aaattgtgccttagaaaacgcaaagctgttgcacatggcgataaattatggatgcagtacattgaagagagatgaagtcacttccaagtttccaagacttctcatggaggtgtttgctgt

SEQ ID NO: 44349 - DNA, 120 bp, Artificial Sequence
  ENSG00000064042_42 (sequence is synthesized)
gaaaaaaagaaaaaattaaaaagaaaaattgttttgaaaatgtacagatcaagtccaatattttgattatccacctgcatgttttattaaatattttgataatgtggatgtttacacttt

SEQ ID NO: 44350 - DNA, 120 bp, Artificial Sequence
  ENSG00000064042_43 (sequence is synthesized)
attttgataatgtggatgtttacactttgcatgatattagcagagtaccactagtaatgcacaaacatgtacaatatggtcattcataaccgatttttatagaatactttttacatgtgc

SEQ ID NO: 44351 - DNA, 120 bp, Artificial Sequence
  ENSG00000064042_44 (sequence is synthesized)
aactccatccgttatgtaaggattacatgaatattgcacattcccttctggtttcacaaacccatttatacatatttcttagtgaggctcattgtacatgtattgaagctagaatcgagt

SEQ ID NO: 44352 - DNA, 120 bp, Artificial Sequence
  ENSG00000064042_45 (sequence is synthesized)
caagaaaaataaagccccattctccaactgcaaaatgtgctttcccataatgaacactagtcaccagcacagaataatctccaacattttctaaattctaattgccaactgtttctattt

SEQ ID NO: 44353 - DNA, 120 bp, Artificial Sequence
  ENSG00000064042_46 (sequence is synthesized)
atatttgatttatatttcatttggagtctgttacatggcagcttaggcagactagatcttgttttttccaatgcagcataatgagtatgatctatttcttttcaaataatctttgagatc

SEQ ID NO: 44354 - DNA, 120 bp, Artificial Sequence
  ENSG00000064042_47 (sequence is synthesized)
ccaggaaaaaaaaaatgctctgctccattgagctataatgtaaatgtgtttgtttaaaaaacaggtgaggcaagtgagtgatttattgttcctgaggaagtatatctgattttttttctc

SEQ ID NO: 44355 - DNA, 120 bp, Artificial Sequence
  ENSG00000064042_48 (sequence is synthesized)
atactccaaaagctagtccctactctttaataaaaataatgggtaactttttgtttttcactagcgaacttccatgacatttcctttctatgtagtgtgattaatgcaatacatattata

SEQ ID NO: 44356 - DNA, 120 bp, Artificial Sequence
  ENSG00000064042_49 (sequence is synthesized)
gttatctatacacagtgtaagatttaacaaactgaaatgatccacctcatatgtgagtccgtccaaaagatgttactgctctgggtgggccagtgttctatatcggttatactaactttc

SEQ ID NO: 44357 - DNA, 120 bp, Artificial Sequence
  ENSG00000064042_50 (sequence is synthesized)
atttaaagtatttattctaaaatgcctctgagaaacagtaaaaaataaaaacaacaagttgtctaaaatgcaacagcttttatagtaaatgtacatttataaataaaatactcaaatcaa

SEQ ID NO: 44358 - DNA, 120 bp, Artificial Sequence
  ENSG00000064042_51 (sequence is synthesized)
gacgatcccagtttttctcccagtcagtggattctccaagcagtgagaagtcacctgttatgacaccttttaagttctgggcatgggacccagaagaggagcgcaggcgacaggaaaaat

SEQ ID NO: 44359 - DNA, 120 bp, Artificial Sequence
  ENSG00000064042_52 (sequence is synthesized)
agagcaggaatttcccttcaaggtagcaggagatgaacgcgtgctgctccaggattttacagaactgattctgcagcaaagacaaatgttgcctgtatttgccagatagtataaacagga

SEQ ID NO: 44360 - DNA, 120 bp, Artificial Sequence
  ENSG00000064042_53 (sequence is synthesized)
gcaaaagttgcacagctaaaccaggggctcattcccaggacagacatgcagttatggattccgaaagacaagtcaaggacactgatgacattgaaagtcctaaacgcagtatccgagaca

SEQ ID NO: 44361 - DNA, 80 bp, Artificial Sequence
  ENSG00000064042_54 (sequence is synthesized)
acggcgcgttggagcccgggcggcgccgggaacagctgccgcggcgtcctctagcagcgcgcggctctcccgggacctgc

SEQ ID NO: 44362 - DNA, 120 bp, Artificial Sequence
  ENSG00000064042_55 (sequence is synthesized)
gctgccctcttcctggcttgggcatgagtggtttgggaactgcagctcctggacaggaacgaggttaaatgaccaattcagaactttgatggaagattacagatggaggtgggtgggaca

SEQ ID NO: 44363 - DNA, 120 bp, Artificial Sequence
  ENSG00000064042_56 (sequence is synthesized)
gatctttggagagagcttgtcaggagaaaatagaagcttcgtgagtgcgcctagaacagtgcctggcacacagtaggtattcagcaactacttgtctaaataagcagatttctgaaacca

SEQ ID NO: 44364 - DNA, 120 bp, Artificial Sequence
  ENSG00000064042_57 (sequence is synthesized)
attctgttgataggacattgagagcaaatctgtcatccttgtccttctgcggagactgcttgactcccaatcctgtcagattaggcgtagaaagattcctatctttatgcaaaaagatgt

SEQ ID NO: 44365 - DNA, 120 bp, Artificial Sequence
  ENSG00000064042_58 (sequence is synthesized)
tttaaaactctaggcttaaattaacttgatataagctcaaatatgtgatgcatggaatgtggttcacaataacatatagaaatagtcataataaatggatttctcatctctttagagaaa

SEQ ID NO: 44366 - DNA, 120 bp, Artificial Sequence
  ENSG00000064042_59 (sequence is synthesized)
agcatttcagccgcagcagcctgcttgtggacagagcaggggttggcagtggtgacgactgttttgggaaaggaaatgtaagggcatttcggctgctgtgctggggctgacgaggagcac

SEQ ID NO: 44367 - DNA, 120 bp, Artificial Sequence
  ENSG00000064042_60 (sequence is synthesized)
acaggagagatgcccctcccatctcccagagtgggttggctggagttcattgcggagcatgaggacgtgtgggggacaatattatcttattcttgagaggttgtaaagagctcggcctta

SEQ ID NO: 44368 - DNA, 120 bp, Artificial Sequence
  ENSG00000064042_61 (sequence is synthesized)
aaatgaatcctggttggaagccttccgatggtgggtgtgaattacctgacggcagtggtaaggagcacccttcttcagacggggctgtggtggcaccagctcccaagtctgaagaaaaag

SEQ ID NO: 44369 - DNA, 120 bp, Artificial Sequence
  ENSG00000064042_62 (sequence is synthesized)
atgctgctgagatccaaaagcgcaaaaggctagagcaagctggaatcaaggtcatgccagcagcacagcgctttgccagtcaaaaacaattaagtgaagagaaagaagctattcgtgata

SEQ ID NO: 44370 - DNA, 120 bp, Artificial Sequence
  ENSG00000064042_63 (sequence is synthesized)
ttgtccttcgcaaagaaaactctttcctgacccaccaacatggcaacgattcagaggcagaaggtgaagttgtgtgtcgactgcctgatcttgagaaggatgactttgctgcaaggagag

SEQ ID NO: 44371 - DNA, 120 bp, Artificial Sequence
  ENSG00000064042_64 (sequence is synthesized)
caaggatgaaccaaaccaagccaatggtgccattaaatcaactcctctatggcccttatccaaagaaaggggcagagaaatcagatggcagcaaacagctctcaaagggaatctcaaaaa

SEQ ID NO: 44372 - DNA, 120 bp, Artificial Sequence
  ENSG00000064042_65 (sequence is synthesized)
aaagaagtctagaatataaaagaaaccagggccacacagaagaggtgaagttgatagtgacctgtaacatgagggctcaggaaagtgaacctgtggaaggaggactcaggaaggtgccag

SEQ ID NO: 44373 - DNA, 120 bp, Artificial Sequence
  ENSG00000064042_66 (sequence is synthesized)
atcttcacaaggatgacctggcccagcagagaattcagggcagccttgcccctcaccgcgagcccccgagcttcattacgctctccaacataacagaagctgacttggagacgtgggaga

SEQ ID NO: 44374 - DNA, 120 bp, Artificial Sequence
  ENSG00000064042_67 (sequence is synthesized)
gactcaaagtgtcagaaaaggcgagggatggagatgttcagcacatctgtgcttctgagccttccccagaaattaaagcagaaactgccattcgtgatgactttgccaaccgcaaagcaa

SEQ ID NO: 44375 - DNA, 120 bp, Artificial Sequence
  ENSG00000064042_68 (sequence is synthesized)
gggcctctaagaaagcttccagccccaggcaaaagtttgtgcactttgggccagtgacggagctagatcagcagaaatggaagcggcttagcattggcaaggctgggcctagagaggatg

SEQ ID NO: 44376 - DNA, 120 bp, Artificial Sequence
  ENSG00000064042_69 (sequence is synthesized)
aagaagaagtcatctgtcatggcagcaagattcaaatggactctgtgtctcctgtctcagcggccacttccagcttaaagggccaccaaatatttaatcgacaaaatgactgcagaacaa

SEQ ID NO: 44377 - DNA, 120 bp, Artificial Sequence
  ENSG00000064042_70 (sequence is synthesized)
tgaattgtggccgaggtgactattgcagaagggcctcgtggctggctcctgtgccggagtctcaggaagagtgggtctgcagtttgggcgagtgcccgagggggacagaggaagttacat

SEQ ID NO: 44378 - DNA, 120 bp, Artificial Sequence
  ENSG00000064042_71 (sequence is synthesized)
ccaaacagctgccacaggatggcaaagaagaaacagaaagcgctccaagagattctgagaggctgtcaaaggcagaaagatcagaggacagcagccagccactggtgtgtcctctggcct

SEQ ID NO: 44379 - DNA, 120 bp, Artificial Sequence
  ENSG00000064042_72 (sequence is synthesized)
ctgagtgtgaggcttcagggacagaagagaagttggagaagatgacagctcctgcctggagtggcagtggactgaaaggccagcgaaagttggatgattcacgaaaagatgacatgatgg

SEQ ID NO: 44380 - DNA, 120 bp, Artificial Sequence
  ENSG00000064042_73 (sequence is synthesized)
ccaggagaactgggatgtcccttagacacactggatccaacccaaaccagttccttccagttccatttgcaaagcaacaggatgtggaagaatcttctaaaggtctacccatgaaagatc

SEQ ID NO: 44381 - DNA, 120 bp, Artificial Sequence
  ENSG00000064042_74 (sequence is synthesized)
aatgctgcttgtgaccatgaaactctgttaactcaggcttttaaagggctgacacgcaggctgaggaggaagaggaggagttggtcttgttgtttcagggatggcagaggcggaagaaaa

SEQ ID NO: 44382 - DNA, 120 bp, Artificial Sequence
  ENSG00000064042_75 (sequence is synthesized)
gcagctgtctaattaggctcagagatccttccaaacaagtgcatgattcttaaaattttccaaaggagttgctcaggacaaaataacactggacaatattatcttattcttgagaggttg

SEQ ID NO: 44383 - DNA, 120 bp, Artificial Sequence
  ENSG00000064042_76 (sequence is synthesized)
tttatttttcctttctattgggaatgcagaggggactttcgcgagcatcccagggaatctgcagtgtggcattccagtctttgcggatgagaacatgcctctctgccagtgttatccaca

SEQ ID NO: 44384 - DNA, 120 bp, Artificial Sequence
  ENSG00000064042_77 (sequence is synthesized)
gtcctaattttaagcgacagtctggatgatattaaattgaggtttatctttgagtgaccagagttatttttgttttagtcagcctggactattgtaattaatgctaagacactggcggga

SEQ ID NO: 44385 - DNA, 120 bp, Artificial Sequence
  ENSG00000064042_78 (sequence is synthesized)
atacatccaacagagtaacagtcaagtaagtaaagcgtgatttatgtttaagggaaactcctttatagtttgatttgcaattttgtgatgatgttgtaagttctaagagacagagaattg

SEQ ID NO: 44386 - DNA, 120 bp, Artificial Sequence
  ENSG00000064042_79 (sequence is synthesized)
aaaaaggtggcgtatatattgacactactaaaacagatctgccaaagagcctgttgaatttttctttgtaatgcaactttttggagccaactcaagtaactggcagaagttttggtgata

SEQ ID NO: 44387 - DNA, 120 bp, Artificial Sequence
  ENSG00000064042_80 (sequence is synthesized)
cctgccttcaagaatcttacaataaaataaacttgtctaatagtccatctgtactattattttccattgaataaagatgttattacaatttttaatttgctgaacaaactaatgaaattt

SEQ ID NO: 44388 - DNA, 120 bp, Artificial Sequence
  ENSG00000064042_81 (sequence is synthesized)
acctttccagcagaaaaggtttttgcctttcattatcaagtctgggataactctcaatgttgcgggtatgatgcattgtatgaattaaatggctgcgttgaattttcttcacattatcag

SEQ ID NO: 44389 - DNA, 120 bp, Artificial Sequence
  ENSG00000064042_82 (sequence is synthesized)
ggatcgggagaccattatgggatggggaagcctttaccatacctaggcctgggaggttgagtgggacaagaggagatgaggaaccttctggaaaccccctaaccacctgcaggaagggac

SEQ ID NO: 44390 - DNA, 120 bp, Artificial Sequence
  ENSG00000064042_83 (sequence is synthesized)
attgttctccctgctctgaacatgtgggtcagccacaagtgctttcagctcccccagcgccaagagctggctgagagcgagagcatgcctggattcttctgaggcatcaggaaaagcgtt

SEQ ID NO: 44391 - DNA, 120 bp, Artificial Sequence
  ENSG00000064042_84 (sequence is synthesized)
cagtcagaaactcttttaaaaaattggagtgaagatagggagtgtgaaattcaagaatgactatttctcaaagtgaagtcacgtttttactgcctttttacatggatctcaaatctctgc

SEQ ID NO: 44392 - DNA, 120 bp, Artificial Sequence
  ENSG00000064042_85 (sequence is synthesized)
attatttgctgccttagtaagtgagaagcctgcttgctttcccgtcttgcatccgggcctcctactgtggaaggtgcatgttagtttgcggggcagcagggggtgctgttgcctagccgc

SEQ ID NO: 44393 - DNA, 120 bp, Artificial Sequence
  ENSG00000064042_86 (sequence is synthesized)
tgtttagaaaatctgaaaatggccagtggcttgcctcggaatgtttcctcattctccatcatgagtacagtccttctggtgggtcacctagacagcagaagaccttttagtgcagattca

SEQ ID NO: 44394 - DNA, 120 bp, Artificial Sequence
  ENSG00000064102_0 (sequence is synthesized)
cctgctcttaggaagcctgggaaggaccggtgtgctaggagatgatcggggaaagcatagtcccctgtctgtggcaccagacactcccgactgtgcgctgactctccccgcccagccagc

SEQ ID NO: 44395 - DNA, 120 bp, Artificial Sequence
  ENSG00000064102_1 (sequence is synthesized)
agccttttccagagaggctgtggtccatagcctctgttcgttttcactgcaggaccaggcacgaaagttaaaacaaaatgaagattttttctgaatctcataaaacagtgtttgttgtgg

SEQ ID NO: 44396 - DNA, 120 bp, Artificial Sequence
  ENSG00000064102_2 (sequence is synthesized)
atcactgcccttatatggcagaatcttgcaggcagcatgtcgagtttgatatgctggtgaagaatagaacccaaggaatcattcctttggcccccatatctaaatcattgtggacttgct

SEQ ID NO: 44397 - DNA, 120 bp, Artificial Sequence
  ENSG00000064102_3 (sequence is synthesized)
cagtagaatcttccatggaatattgtagaataatgtatgatatatttcctttcaaaaagctggtgaattttattgtgagtgactctggagcacatgttttaaattcttggactcaagaag

SEQ ID NO: 44398 - DNA, 120 bp, Artificial Sequence
  ENSG00000064102_4 (sequence is synthesized)
accaaaatttacaggagctaatggcagcattagccgctgttgggcctcctaatcctcgggcagatccagagtgctgcagtattctgcatggccttgttgcagcagtggaaactctctgca

SEQ ID NO: 44399 - DNA, 120 bp, Artificial Sequence
  ENSG00000064102_5 (sequence is synthesized)
aaattactgaataccaacatgaggctcgtactctactcatggagaatgcagaacgtgttggaaatagaggacgaataatctgtattactaatgcaaaaagtgatagtcatgtgcgaatgc

SEQ ID NO: 44400 - DNA, 120 bp, Artificial Sequence
  ENSG00000064102_6 (sequence is synthesized)
ttgaagactgtgtccaggaaacgattcatgaacataacaagcttgctgcaaattcagatcatctcatgcagattcaaaaatgtgagttggtcttgatccacacctacccagttggtgaag

SEQ ID NO: 44401 - DNA, 120 bp, Artificial Sequence
  ENSG00000064102_7 (sequence is synthesized)
acagccttgtatctgatcgttctaaaaaagagttgtccccggttttaaccagtgaagttcatagtgttcgtgcaggacggcatcttgctaccaaattgaatattttagtacagcaacatt

SEQ ID NO: 44402 - DNA, 120 bp, Artificial Sequence
  ENSG00000064102_8 (sequence is synthesized)
ttgacttggcttcaactactattacaaatattccaatgaaggaagaacagcatgctaacacatctgccaattatgatgtggagctacttcatcacaaagatgcacatgtagatttcctga

SEQ ID NO: 44403 - DNA, 120 bp, Artificial Sequence
  ENSG00000064102_9 (sequence is synthesized)
aaagtggtgattcgcatctaggtggcggcagtcgagaaggctcgtttaaagaaacaataacattaaagtggtgtacaccaaggacaaataacattgaattacactattgtactggagctt

SEQ ID NO: 44404 - DNA, 120 bp, Artificial Sequence
  ENSG00000064102_10 (sequence is synthesized)
ttagtcatatgcttagtagccatggaggagagatttttttgcacgtccttagcagttctcgatccattctagaagatccaccttcaattagtgaaggatgtggaggaagagttacagact

SEQ ID NO: 44405 - DNA, 120 bp, Artificial Sequence
  ENSG00000064102_11 (sequence is synthesized)
accggattacagattttggtgaatttatgagggaaaacagattaactccttttctagaccccagatataaaatcgatggaagtcttgaggtccctttggaacgagcaaaagatcagttag

SEQ ID NO: 44406 - DNA, 120 bp, Artificial Sequence
  ENSG00000064102_12 (sequence is synthesized)
aaaaacatacccgttactggcctatgatcatttcacaaaccaccatttttaacatgcaagcggtagttccattagccagtgttattgtgaaagaatctctgacagaagaagatgtgttaa

SEQ ID NO: 44407 - DNA, 120 bp, Artificial Sequence
  ENSG00000064102_13 (sequence is synthesized)
actgtcaaaaaacaatatacaacttagttgatatggaaagaaaaaatgatcctctacctatttccacagttggtacaagaggaaagggccctaaaagagatgaacaataccgtatcatgt

SEQ ID NO: 44408 - DNA, 120 bp, Artificial Sequence
  ENSG00000064102_14 (sequence is synthesized)
ggaatgaattagaaacccttgtcagagcccatatcaacaactcagagaaacatcaaagagtcttggaatgtctgatggcatgcaggagcaaacccccagaagaggaagaacgaaagaaac

SEQ ID NO: 44409 - DNA, 120 bp, Artificial Sequence
  ENSG00000064102_15 (sequence is synthesized)
gaggaagaaagagggaagacaaagaggacaagtcagagaaagcagtgaaagattatgaacaggaaaagtcttggcaagactcagagagattaaaaggaatcttagagcgtggaaaagaag

SEQ ID NO: 44410 - DNA, 120 bp, Artificial Sequence
  ENSG00000064102_16 (sequence is synthesized)
aattggctgaagctgagattataaaagattcgcctgattccccagaacctccaaacaaaaaaccccttgttgaaatggatgaaactccacaagtggaaaaatcaaaagggccagtgtcgt

SEQ ID NO: 44411 - DNA, 120 bp, Artificial Sequence
  ENSG00000064102_17 (sequence is synthesized)
tattatccttgtggagtaatagaatcaatactgccaattccagaaaacatcaggaatttgctggacgtttgaactctgttaataacagagctgaactatatcaacatcttaaagaggaaa

SEQ ID NO: 44412 - DNA, 120 bp, Artificial Sequence
  ENSG00000064102_18 (sequence is synthesized)
atgggatggagacaacagaaaatggaaaagccagccggcagtgaagagtgacttgaagaactaaatttagcatattgcaaaaatattttgtgcggaattcgatataagtacttttacagc

SEQ ID NO: 44413 - DNA, 120 bp, Artificial Sequence
  ENSG00000064102_19 (sequence is synthesized)
aagatggtatagttatgttgcctggactggtttttacatttttaaaatatttcagctgtcatttttgtactaattataaaattggcacataattcaaaaatatacatttgagatgatttg

SEQ ID NO: 44414 - DNA, 120 bp, Artificial Sequence
  ENSG00000064102_20 (sequence is synthesized)
tcctcccaaattatacaagtttattttatggtataaagtgttctctctggaaatgtttttaaaaaaattcttaggcttctctttgcgaaataaaactattaaaatatttgaaatgcaaaa

SEQ ID NO: 44415 - DNA, 120 bp, Artificial Sequence
  ENSG00000064102_21 (sequence is synthesized)
accggcctgggtggagagacagagaaggggagaccgggaccaggcacgaaagtaagcgaacctcgatcctgaggtcttccctatccactcaccttgtattttccaccccccaccctccag

SEQ ID NO: 44416 - DNA, 120 bp, Artificial Sequence
  ENSG00000064102_22 (sequence is synthesized)
caaagtgggtctagaaggtttctcaaagagagttttgcatgaaggggagatgcgtcttgaaagcaagaggttaaaacaaaatgaagattttttctgaatctcataaaacagtgtttgttg

SEQ ID NO: 44417 - DNA, 120 bp, Artificial Sequence
  ENSG00000064102_23 (sequence is synthesized)
gtgtgttactggatttggtttgctactatttttttaagaatgttcatgtccatatatgtaagatacattggtgtgtagttttctttcttgtgatatttttatctgaattgcacatactct

SEQ ID NO: 44418 - DNA, 120 bp, Artificial Sequence
  ENSG00000064115_0 (sequence is synthesized)
aggtgccggaagaggaaacctctcgctggggctaggagttcggcggggcgcgcgccggcggctgcggagctggcaggtgcgaagcgtctgcacctggcgggcgatggcgcccgatgcggg

SEQ ID NO: 44419 - DNA, 120 bp, Artificial Sequence
  ENSG00000064115_1 (sequence is synthesized)
ccgggatagcgtgggcgaggctgcggggccccggcgcgcacgcccgcacctctccccagccctggcgtgggcccagcccggcccaggcagcaatggggttcctgcagctgctggtcgtag

SEQ ID NO: 44420 - DNA, 120 bp, Artificial Sequence
  ENSG00000064115_2 (sequence is synthesized)
gtagcggtgctggcatccgaacaccgggtggctggtgcagccgaggtcttcgggaattccagcgagggtcttattgaattttctgtggggaaatttagatacttcgagctcaataggccc

SEQ ID NO: 44421 - DNA, 120 bp, Artificial Sequence
  ENSG00000064115_3 (sequence is synthesized)
tttccagaggaagctattttgcatgatatttcaagcaatgtgacttttcttattttccaaatacactcacagtatcagaatacaactgtttccttttctccgactctcctttccaattcc

SEQ ID NO: 44422 - DNA, 120 bp, Artificial Sequence
  ENSG00000064115_4 (sequence is synthesized)
tcggaaacaggcactgccagtggactggttttcatccttagaccagagcagagtacatgcacttggtacttggggacttcaggcatacagcctgtccagaatatggctatcctactctcc

SEQ ID NO: 44423 - DNA, 120 bp, Artificial Sequence
  ENSG00000064115_5 (sequence is synthesized)
tactcagaaagagatcctgtccctggaggctgtaatttggagttcgatttagatattgatcccaacatttacttggagtataatttctttgaaacgactatcaagtttgccccagcaaac

SEQ ID NO: 44424 - DNA, 120 bp, Artificial Sequence
  ENSG00000064115_6 (sequence is synthesized)
ctaggctatgcgagaggcgtagatcccccaccatgtgacgctgggacagaccaggactccaggtggaggttgcagtatgatgtctatcagtattttctgcctgagaatgacctcactgag

SEQ ID NO: 44425 - DNA, 120 bp, Artificial Sequence
  ENSG00000064115_7 (sequence is synthesized)
gagatgttgctgaagcatctgcagaggatggtcagtgtgccccaggtgaaggccagtgctctcaaggtggttaccctaacagctaatgataagacaagtgtttccttctcctccctcccg

SEQ ID NO: 44426 - DNA, 120 bp, Artificial Sequence
  ENSG00000064115_8 (sequence is synthesized)
ggacaaggtgtcatatacaatgtcattgtttgggacccgtttctaaatacatctgctgcctacattcctgctcacacatacgcttgcagctttgaggcaggagagggtagttgtgcttcc

SEQ ID NO: 44427 - DNA, 120 bp, Artificial Sequence
  ENSG00000064115_9 (sequence is synthesized)
ctaggaagagtgtcttccaaagtgttcttcactctttttgccctgcttggtttcttcatttgtttctttggacacagattctggaaaacagaattattcttcataggctttatcatcatg

SEQ ID NO: 44428 - DNA, 120 bp, Artificial Sequence
  ENSG00000064115_10 (sequence is synthesized)
ggattcttcttttatatactgattacaagactgacacctatcaagtatgatgtgaatctgattctgacagctgtcactggaagcgtcggtggaatgttcttggtagctgtgtggtggcga

SEQ ID NO: 44429 - DNA, 120 bp, Artificial Sequence
  ENSG00000064115_11 (sequence is synthesized)
tttggaatcctctcgatctgcatgctctgtgttggactagtgctggggttcctcatctcgtcagtgactttctttactccactgggaaacctaaagatttttcatgatgatggtgtattc

SEQ ID NO: 44430 - DNA, 120 bp, Artificial Sequence
  ENSG00000064115_12 (sequence is synthesized)
tgggtcactttctcttgcatagctatcctcattccagtagttttcatgggctgcctaagaatactgaacatactgacttgtggagtcattggctcctattcggtggttttagccattgac

SEQ ID NO: 44431 - DNA, 120 bp, Artificial Sequence
  ENSG00000064115_13 (sequence is synthesized)
agttactggtccacaagcctttcctacatcactttgaacgtactcaagagagcgctcaacaaggatttccacagagctttcacaaatgtgccttttcaaactaatgacttcattatcctg

SEQ ID NO: 44432 - DNA, 120 bp, Artificial Sequence
  ENSG00000064115_14 (sequence is synthesized)
gcagtatggggcatgctggctgtaagtggaattacgttacagattcgaagagagagaggacgaccgttcttccctccccacccatacaagttatggaagcaagagagagagcgccgagtg

SEQ ID NO: 44433 - DNA, 120 bp, Artificial Sequence
  ENSG00000064115_15 (sequence is synthesized)
acaaacattctggaccctagctaccacattcctccattgagagagaggctctatggccgattaacccagattaaagggctcttccagaaggagcagccagctggagagagaacgcctttg

SEQ ID NO: 44434 - DNA, 120 bp, Artificial Sequence
  ENSG00000064115_16 (sequence is synthesized)
cttctgtagatgcccaggggcttggtcagtgtgcctcagctttggagttcatgcctggagtggttcaacagtctctggtgcaagtctaataagagatcaggcatatatatctgttctttg

SEQ ID NO: 44435 - DNA, 120 bp, Artificial Sequence
  ENSG00000064115_17 (sequence is synthesized)
tttccaaatacttgagaaattaccttttggtttacaaatctatgatcaacttattccattaaatagatacattaaaaaaattaaaaactgattcttctgcagagcactggtgtttctttt

SEQ ID NO: 44436 - DNA, 120 bp, Artificial Sequence
  ENSG00000064115_18 (sequence is synthesized)
tataaccccttgaaacaagtctctcacctgagcctgtctaaactttcggagggagtttattattgagtctttatctgtgacagtatttggagatttagggatttgatacttaggcctttg

SEQ ID NO: 44437 - DNA, 120 bp, Artificial Sequence
  ENSG00000064115_19 (sequence is synthesized)
acatggtggctcacacctgtaatcccaatactgggaagccaaggtgggagtatcgcttgagcccaggagtttgagaccgacatgggcaacatgacaagaccccatctctacaaaaaaatt

SEQ ID NO: 44438 - DNA, 120 bp, Artificial Sequence
  ENSG00000064115_20 (sequence is synthesized)
aattagccaggcatggtggcacatgcctactcccagctcccaaggagactgagatgggaggatccctggagccctgaagattgaggctacagtgagccttgattgtgtcactgcactcca

SEQ ID NO: 44439 - DNA, 120 bp, Artificial Sequence
  ENSG00000064115_21 (sequence is synthesized)
ggctacagtgagccttgattgtgtcactgcactccagcttgggtgacagagaccctgtctcgagaaattaaaaaaaaaaaaaacttattttcttactaaaagcagtctgattacttagtt

SEQ ID NO: 44440 - DNA, 120 bp, Artificial Sequence
  ENSG00000064115_22 (sequence is synthesized)
gcatgcccttcttagtatcatacattatccaaaagttaccctttgtttttttttcagtattttttaaaatttttaagttgtgataaaatacacatgaaatttaccttcttattcatgttt

SEQ ID NO: 44441 - DNA, 120 bp, Artificial Sequence
  ENSG00000064115_23 (sequence is synthesized)
aagtgtacaattcagtaggttccctttgtttttgccttttattgcttaaaatggtaattgaaatagctaaattattatttgaaaataggccaatttatatagataatagaattttataag

SEQ ID NO: 44442 - DNA, 120 bp, Artificial Sequence
  ENSG00000064115_24 (sequence is synthesized)
ggtgatttatattccaaataatggcccccttttttttttcaaggccttttcaaatagtgtcaacaggtgatctttaatttaactgcattagatgacatatggattacttttgtttttagg

SEQ ID NO: 44443 - DNA, 90 bp, Artificial Sequence
  ENSG00000064115_25 (sequence is synthesized)
aactgcattagatgacatatggattacttttgtttttaggaaataacccccaccttaatctatattgccgaccaggtgcggtggctcaaa

SEQ ID NO: 44444 - DNA, 73 bp, Artificial Sequence
  ENSG00000064115_26 (sequence is synthesized)
agttcgagaccagcctggccaacatagtggtctctactatagtatagtagaatatatactaccaggtgcctgt

SEQ ID NO: 44445 - DNA, 120 bp, Artificial Sequence
  ENSG00000064115_27 (sequence is synthesized)
ctgtattgccattaataagaaaaccttagaaaaatttgtacttcatagttctttctgctcaattagctgttagcattagtgtaaaatatagtttttaataatttctgtacaaagcctttg

SEQ ID NO: 44446 - DNA, 120 bp, Artificial Sequence
  ENSG00000064115_28 (sequence is synthesized)
tacagaaaggcttcatccttaaagtgatgagaatggagtcaaaaaggattcaggtgtttagaggagctgcttttcattaggaccttggagagtcccctcagttttgacacccttgtttca

SEQ ID NO: 44447 - DNA, 120 bp, Artificial Sequence
  ENSG00000064115_29 (sequence is synthesized)
ccacaagaaagcacccgacaccctgggttgcatacttactactcaggggctttccccccagctttcagagcactgaattattgtgagctggtgactctgcaggcctgagtggtattaggg

SEQ ID NO: 44448 - DNA, 120 bp, Artificial Sequence
  ENSG00000064115_30 (sequence is synthesized)
ttgtggaatgttgttgcatacacgtttatgagttaaccactatttaaatgatgctgctttttaaagttttttcaaagtacaatagatttttgaagtttcaggtaactggaaaaatattta

SEQ ID NO: 44449 - DNA, 120 bp, Artificial Sequence
  ENSG00000064115_31 (sequence is synthesized)
acttttgctttaagtgtttggggcaggataaaacaacatagaaaatataaaacaatttttgctttgaaaaatacagtgcaggtgaccatttactgcttattctgtaatccttactgtcta

SEQ ID NO: 44450 - DNA, 120 bp, Artificial Sequence
  ENSG00000064115_32 (sequence is synthesized)
taattaacttcagtaacactgaaacttgatgaaaagttttaaaaaattatttactgtagggacaaagttatatggaatgtttgttattttctatactatctgaatgcactgccagtgaag

SEQ ID NO: 44451 - DNA, 120 bp, Artificial Sequence
  ENSG00000064115_33 (sequence is synthesized)
actgtaaagacagaacacactattttggagggaggatactaattgtttaaaatttttcatcatttgtgagtgataaaaagtttgtatagtttttataataaatccctattttgaaaaaaa

SEQ ID NO: 44452 - DNA, 120 bp, Artificial Sequence
  ENSG00000064115_34 (sequence is synthesized)
gtcctttttcatgcctgagggagcagatgtgattgcctgtgattgaagccagtggagagttataaactatttttgttctaacatggatgatgcctaaactcttccactcttccacagctg

SEQ ID NO: 44453 - DNA, 120 bp, Artificial Sequence
  ENSG00000064115_35 (sequence is synthesized)
tgttgaggttttctttacctgaaaacagatacctccctaccccattatgtttaacagaatgcttgtcaacttttccttctcaatcccaatttattgacaagccaagcctgtcactggccc

SEQ ID NO: 44454 - DNA, 120 bp, Artificial Sequence
  ENSG00000064115_36 (sequence is synthesized)
tgtgaggtttagctccctagctaatttccttgtctcagcccagacccctccctagagagggttgctctatgctggcttcatggcaccactgaagagccctcagtgcctgacctacagaaa

SEQ ID NO: 44455 - DNA, 120 bp, Artificial Sequence
  ENSG00000064115_37 (sequence is synthesized)
gtttgggacccgtttctaaatacatctgctgcctacattcctgctcacacatacgcttgcagctttgaggcaggagagggtagttgtgcttccctagaattattcttcataggctttatc

SEQ ID NO: 44456 - DNA, 120 bp, Artificial Sequence
  ENSG00000064115_38 (sequence is synthesized)
gtgacgcagcgagagcccgggaggaggcgcgggaacgcgcgttgggggtcaggtgccggaagaggaaacctctcgctggggctaggagttcggcggggcgcgcgccggcggctgcggagc

SEQ ID NO: 44457 - DNA, 120 bp, Artificial Sequence
  ENSG00000064195_0 (sequence is synthesized)
agcatttgattgtggcttgggacgcgaggagaggcgcgcagcgaccgcctgacggcaggcaatggtgtaagcgcctctcggcctccccctccccccagacgcggccgggtcctcccttcg

SEQ ID NO: 44458 - DNA, 120 bp, Artificial Sequence
  ENSG00000064195_1 (sequence is synthesized)
ccttctggacacacacccctgcctcgtctcttccgcctctctcgcactccggtccgttcctgtcctctgcggaggccagccctggggaggtgcagcgcccgccaggatgagtggctcctt

SEQ ID NO: 44459 - DNA, 120 bp, Artificial Sequence
  ENSG00000064195_2 (sequence is synthesized)
cgatcgcaagctcagcagcatcctcaccgacatctccagctcccttagctgccatgcgggctccaaggactcgcctaccctgcccgagtcttctgtcactgacctgggctactacagcgc

SEQ ID NO: 44460 - DNA, 120 bp, Artificial Sequence
  ENSG00000064195_3 (sequence is synthesized)
tccccagcacgattactactcgggccagccctatggccagacggtgaacccctacacctaccaccaccaattcaatctcaatgggcttgcaggcacgggcgcttactcgcccaagtcgga

SEQ ID NO: 44461 - DNA, 120 bp, Artificial Sequence
  ENSG00000064195_4 (sequence is synthesized)
atatacctacggagcctcctaccggcaatacggggcgtatcgggagcagccgctgccagcccaggacccagtgtcggtgaaggaggagccggaagcagaggtgcgcatggtgaatgggaa

SEQ ID NO: 44462 - DNA, 120 bp, Artificial Sequence
  ENSG00000064195_5 (sequence is synthesized)
gcccaagaaggtccgaaagccgcgtacgatctactccagctaccagctggccgccctgcagcgccgcttccagaaggcccagtacctggcgctgcccgagcgcgccgagctggccgcgca

SEQ ID NO: 44463 - DNA, 120 bp, Artificial Sequence
  ENSG00000064195_6 (sequence is synthesized)
gctgggcctcacgcagacacaggtgaaaatctggttccagaaccgccgttccaagttcaagaaactctacaagaacggggaggtgccgctggagcacagtcccaataacagtgattccat

SEQ ID NO: 44464 - DNA, 120 bp, Artificial Sequence
  ENSG00000064195_7 (sequence is synthesized)
ggcctgcaactcaccaccatcacccgccctctgggacacctcttcccactccactccggcccctgcccgcagtcagctgcccccgccgctcccatacagtgcctcccccagctacctgga

SEQ ID NO: 44465 - DNA, 120 bp, Artificial Sequence
  ENSG00000064195_8 (sequence is synthesized)
cgaccccaccaactcctggtatcacgcacagaacctgagtggaccccacttacagcagcagccgcctcagccagccaccctgcaccatgcctctcccgggcccccgcccaaccctggggc

SEQ ID NO: 44466 - DNA, 120 bp, Artificial Sequence
  ENSG00000064195_9 (sequence is synthesized)
tgtgtactgagcacccatctggcctgcacccttgacaaaggaccccaggaccaggcagaaggcgcctccgtcctagccactcaggaatcatcgaggagcacagggaaaaggaactccctt

SEQ ID NO: 44467 - DNA, 120 bp, Artificial Sequence
  ENSG00000064195_10 (sequence is synthesized)
cctccctctgcctagacactggggtacccctccagatgtggggacattccaccccagtggggacagccattcccctacctgctccaggagcctggattggctttaaatggctcatcatct

SEQ ID NO: 44468 - DNA, 120 bp, Artificial Sequence
  ENSG00000064195_11 (sequence is synthesized)
tccagcttcttaaacttagtgcctgttcccagactggagaccttgggatgggggagagtgtggagggtttgcgggtcctgcctgtgctggggcacctggcaccgtggatcttaaaacttg

SEQ ID NO: 44469 - DNA, 120 bp, Artificial Sequence
  ENSG00000064195_12 (sequence is synthesized)
ccaggcctagttcctcctgagcctctggtggtctccccctgctcgagcggcccctcggccaataagacagtggacatcatgacgaggactccgggtggggacctgaactggtcaccgccc

SEQ ID NO: 44470 - DNA, 120 bp, Artificial Sequence
  ENSG00000064195_13 (sequence is synthesized)
tgcacttctagccctcatttaagatttgagggtgaaaccaaagaaaaccccctaagtgagggaatcttttaatatttgtggctttagaggaaagaactaaaggagccatctctctcccct

SEQ ID NO: 44471 - DNA, 120 bp, Artificial Sequence
  ENSG00000064195_14 (sequence is synthesized)
ctcctccgttccgagaggaggggtgggtctcagacgtttttcctatggacttatttcttccatgtccaggactttgcacaactttggttttaaaagctgttgaaaaataggaaaacaaag

SEQ ID NO: 44472 - DNA, 120 bp, Artificial Sequence
  ENSG00000064195_15 (sequence is synthesized)
ggcattgttcacagatagggccaagtctccccttgcaagggtgcctctgttctgtccctgcccccacctcaccttctctactcctccagtaagttggcagttttggtgccaaaccccaaa

SEQ ID NO: 44473 - DNA, 120 bp, Artificial Sequence
  ENSG00000064195_16 (sequence is synthesized)
tctccaaagagacataccaggcaagacaaacccccaaacacctcctttccggtggccttggaaacagattgctccgagctggagaatgtcgggtgaggtgtatgggagaggaggggagag

SEQ ID NO: 44474 - DNA, 120 bp, Artificial Sequence
  ENSG00000064195_17 (sequence is synthesized)
ttagaacttgtgcctttgggagtaaggggtaactgcctggagggctggtggcactgcccctccctgacccagacatcccaccaaagctaactttcccccacccctgatgcagtaaaacat

SEQ ID NO: 44475 - DNA, 120 bp, Artificial Sequence
  ENSG00000064195_18 (sequence is synthesized)
tgaaaaaaaaaaaaaaggagaggtagaagactgtagctatatatataaatatatagtaagttttttttttttaagagcaacagagagaagcagcctcctccctgctgcggtttcctattt

SEQ ID NO: 44476 - DNA, 120 bp, Artificial Sequence
  ENSG00000064195_19 (sequence is synthesized)
atgtggccatgttcctcctggacggatctccctgtgtgtttcaagctgagagatgtgggctccggctggatttgggttttgtgggaggtgcaggggccaagagagacgtggtaggtctcc

SEQ ID NO: 44477 - DNA, 120 bp, Artificial Sequence
  ENSG00000064195_20 (sequence is synthesized)
aagagtcccacccgggggggaagaagcaaagccatctcccaccccctcccagccttctcatttctgctttcttactggactcatctttatatataatgttaataaaaaagacgaaaataa

SEQ ID NO: 44478 - DNA, 120 bp, Artificial Sequence
  ENSG00000064195_21 (sequence is synthesized)
cgcggcgagtcggtgggcggaagcgaggggcgtccggcggggccctggagggtcgcaggagtcgcaggccgaggctgaaccgccccctcttccgcccggtgcgttccccgcagtgtcggt

SEQ ID NO: 44479 - DNA, 120 bp, Artificial Sequence
  ENSG00000064199_0 (sequence is synthesized)
ttttgcagtcctcgcagcctcccgcgacctcaggactgggctgtactcgccccttctcggccgccgtagtttttttttttttttaaagaaaaaacggttacccagcaactagaaaaacaa

SEQ ID NO: 44480 - DNA, 120 bp, Artificial Sequence
  ENSG00000064199_1 (sequence is synthesized)
ccggaaccggcggcaccagctcggagagaaaggaggttccataggcagttcttaccaagaagatgtcgattccattctccaacacccactaccgaattccacaaggatttgggaatcttc

SEQ ID NO: 44481 - DNA, 120 bp, Artificial Sequence
  ENSG00000064199_2 (sequence is synthesized)
ttgaagggctgacacgcgagattctgagagagcaaccggacaatataccagcttttgcagcagcctattttgagagccttctagagaaaagagagaaaaccaactttgatccagcagaat

SEQ ID NO: 44482 - DNA, 120 bp, Artificial Sequence
  ENSG00000064199_3 (sequence is synthesized)
agaagaccgcttctataacaatcatgcattcgaggagcaagaaccacctgagaaaagtgatcctaaacaagaagagtctcagatatctgggaaggaggaagagacatcagtcaccatctt

SEQ ID NO: 44483 - DNA, 120 bp, Artificial Sequence
  ENSG00000064199_4 (sequence is synthesized)
agactcttctgaggaagataaggaaaaagaagaggttgctgctgtcaaaatccaagctgccttccggggacacatagccagagaggaggcaaagaaaatgaaaacaaatagtcttcaaaa

SEQ ID NO: 44484 - DNA, 120 bp, Artificial Sequence
  ENSG00000064199_5 (sequence is synthesized)
tgaggaaaaagaggaaaacaagtgaggacactggttttacctccaggaaacatgaaaaataatccaaatccatcaaccttcttattaatgtcatttcttcctgaggaaggaagatttgat

SEQ ID NO: 44485 - DNA, 120 bp, Artificial Sequence
  ENSG00000064199_6 (sequence is synthesized)
gttgtgaaataacattcgttactgttgtgaaaatctgtcatgagcatttgtttaataagcataccattgaaacatgccacttgaagatttctctgagatcatgagtttgtttacacttgt

SEQ ID NO: 44486 - DNA, 120 bp, Artificial Sequence
  ENSG00000064199_7 (sequence is synthesized)
tcgccccttctcggccgccgtagtttttttttttttttaaagaaaaaacggttacccagcaactagaaaaacaaccggaaccggcggcaccagctcggagagaaaggaggtgaggccgct

SEQ ID NO: 44487 - DNA, 120 bp, Artificial Sequence
  ENSG00000064199_8 (sequence is synthesized)
tccccacttcctctccgataccaagacctagccttttcccttcgtctctcttattctctcagcatcccagacacagcctcggagccctgggccgtttgggagccgaggcagcccattctg

SEQ ID NO: 44488 - DNA, 120 bp, Artificial Sequence
  ENSG00000064199_9 (sequence is synthesized)
cgcgagtctgaaatcccaggtcctcaacatcccgcccccgactagacccgtctgccccctccgcccgccctcctctgcccacattggttcagaatctcgccagctcttttcaccactcta

SEQ ID NO: 44489 - DNA, 120 bp, Artificial Sequence
  ENSG00000064199_10 (sequence is synthesized)
tggttcagaatctcgccagctcttttcaccactctagaatggttcgatacccccatctactgctccctcagaaaaagcaaaagagaggagtcaggcgtggtggcgcgcgcctgtaatccc

SEQ ID NO: 44490 - DNA, 120 bp, Artificial Sequence
  ENSG00000064199_11 (sequence is synthesized)
gcccaggagttcgaggccagagaccccctctcaaagaaaaaaaaagcgatgaaacgagaaccctccatagtctgagcctcattaaaccgtccagttctcccaacctggacccctaccacg

SEQ ID NO: 44491 - DNA, 120 bp, Artificial Sequence
  ENSG00000064199_12 (sequence is synthesized)
gcctccgcctctattccgcattgacgcacactctcacattaacaggccaggtcccggaggattcttttcatactcagtagtagctcagcccgctgcttagcagctacccttaatctagcc

SEQ ID NO: 44492 - DNA, 120 bp, Artificial Sequence
  ENSG00000064199_13 (sequence is synthesized)
cttgtatttcaagacagaaagagacaacctgatcaagaagaaaccgaaaaatataagaattctaaaactttagaggctgggatttcaaaatcatgacacacagccccatcccatcccatc

SEQ ID NO: 44493 - DNA, 120 bp, Artificial Sequence
  ENSG00000064199_14 (sequence is synthesized)
cctccctcacacacacgcacgcacaaccccattccacagtacgaaggtgttcgaagcattgtgggtcatgcttcagaagtggcagcaaggggaaagattgtgcaacttcttcattcaaca

SEQ ID NO: 44494 - DNA, 120 bp, Artificial Sequence
  ENSG00000064199_15 (sequence is synthesized)
aattaatttctagaaccaggactaatttctactctttaaaaaaaaatagacctcaaagaaggtcttctcagcaattgacaatgaatttaactttttagcaatcattctctctaaattcct

SEQ ID NO: 44495 - DNA, 120 bp, Artificial Sequence
  ENSG00000064199_16 (sequence is synthesized)
gtgtgatagcaaaaattacccttaccttttgagcatataaagggtaaagagagaaaaagtcatattgaaaattatgggttttttgcaggattttaaatgatttggcctagtgaatgggtc

SEQ ID NO: 44496 - DNA, 120 bp, Artificial Sequence
  ENSG00000064199_17 (sequence is synthesized)
tgtgtttgtattatactaattcacaatggagatttcaaaactctttggaagaaatggatgggcttgggttgtgttagggaaaaaagaattcaagtccagatgtatgagtctcagaaataa

SEQ ID NO: 44497 - DNA, 120 bp, Artificial Sequence
  ENSG00000064199_18 (sequence is synthesized)
ctcagaggttatgtgttctaactattatcaaatgaataaatcctctctatcacatcccccaaaaatgttctttagctcctgtttcactcctagtggtaaagaatttcactgctttttaag

SEQ ID NO: 44498 - DNA, 120 bp, Artificial Sequence
  ENSG00000064199_19 (sequence is synthesized)
cctagtggtaaagaatttcactgctttttaaggatagtctatttaattttggaatttttagaaagataagctgggacaaaaatctgcctccttcagcctggccaacatggtgaaacccca

SEQ ID NO: 44499 - DNA, 120 bp, Artificial Sequence
  ENSG00000064199_20 (sequence is synthesized)
aaacaaaaaaaagcctctgcctccttgtaagtttaacccactggttttcatttatcatacatgtattcaatcatttattgaaaatgtattgagtactattcatgtgctgggaattagtag

SEQ ID NO: 44500 - DNA, 120 bp, Artificial Sequence
  ENSG00000064199_21 (sequence is synthesized)
tgaatacttgttcttacactcatacaacttacaatgctttattgttttgctctccagaaccacacagaacaagactaataacatcatattgtaaaaagcaaaagctatcatatcatgctg

SEQ ID NO: 44501 - DNA, 120 bp, Artificial Sequence
  ENSG00000064199_22 (sequence is synthesized)
ccttcttcagttaaaacttcccaagtttttaaatatacaatggtaatgcctgtttaacaaactcagaggctttatctcttttatgttttcaatgattcattcaaatccctagtgccttag

SEQ ID NO: 44502 - DNA, 120 bp, Artificial Sequence
  ENSG00000064199_23 (sequence is synthesized)
ttttagaaagttccgtctctcctttttgaggcctctccacccttgattgtccaagaaactgagggttcatgtcttagaccaaagggtgcagttctcttcccaatacaaaaggtagaaagt

SEQ ID NO: 44503 - DNA, 120 bp, Artificial Sequence
  ENSG00000064199_24 (sequence is synthesized)
ggagtcttaccatttagttaatgctgttgccttctaccataatgttgtagcatagtccagcagactgaggtgattctctggctggttccaattcctgcctgcaccatagtggatggccca

SEQ ID NO: 44504 - DNA, 120 bp, Artificial Sequence
  ENSG00000064199_25 (sequence is synthesized)
tgatttagttccaggattacatctctcttggtttatagtcacaaagccagtgttcccccaaagcttaaaaacaagccaggatggctcagtcctgaggagattctaaaaccaggtctatgt

SEQ ID NO: 44505 - DNA, 120 bp, Artificial Sequence
  ENSG00000064199_26 (sequence is synthesized)
tgtcacaacaaatactctcctacaaacactttgatccttgtcctaggcttagacatgctctttctgcaaagcagttttatttcaggtgcctcactgcccttccctggcactgagccttta

SEQ ID NO: 44506 - DNA, 120 bp, Artificial Sequence
  ENSG00000064199_27 (sequence is synthesized)
tcaggctctgcaacagaggttcccccaagtgatcgccactcaaacacagttgattcacaccaaccctttcaaggttgtggctttcattctctaatgtccactcatacaggcagcctttct

SEQ ID NO: 44507 - DNA, 120 bp, Artificial Sequence
  ENSG00000064199_28 (sequence is synthesized)
ccttccaaaatcttgctgccactgtagagagtttcatgctagctaaacacaagtctctaatatcccccttcctctcctccttaacccctctcctccaggcttacagaggaaaagaaatca

SEQ ID NO: 44508 - DNA, 120 bp, Artificial Sequence
  ENSG00000064199_29 (sequence is synthesized)
gttctcctccaggattccagctgttcgtccctcccattccactgaaagcaccagcttctaacaccttcccctctcagacagagccatcctgcttagcggattgtcaaggggggacccaga

SEQ ID NO: 44509 - DNA, 120 bp, Artificial Sequence
  ENSG00000064199_30 (sequence is synthesized)
atttatgcaaagacttagattccctgacctggagagatcagaagaggaaaaaagggattttttccctagtgagtatatagcaggaaaaaaaaaaaagatgagttagctttttcagtaatt

SEQ ID NO: 44510 - DNA, 120 bp, Artificial Sequence
  ENSG00000064199_31 (sequence is synthesized)
ctcctgttatacacataaagtgactagcactatgcattccatacacacacacacacacacacagatctcatggtagtgatattggtagtgaaggaggaaaaggaaaaggtgagcaatgga

SEQ ID NO: 44511 - DNA, 120 bp, Artificial Sequence
  ENSG00000064199_32 (sequence is synthesized)
tgtgatattatgagaacaacacatatgaatgacactttattagaacttatctggttttcctcttatctctctggctgttccttctcaattcccttcactggtaactcttcaactccccaa

SEQ ID NO: 44512 - DNA, 120 bp, Artificial Sequence
  ENSG00000064199_33 (sequence is synthesized)
ccactaaatgctaagtgcccttaggctcagtctttcgaccccatttctacactcacttgatttcctgcagtttcatagctttaaaatccaatcttcttaatgatcactcccagacctttc

SEQ ID NO: 44513 - DNA, 120 bp, Artificial Sequence
  ENSG00000064199_34 (sequence is synthesized)
tctcctctgcctgcgaacttctatattcaactgcctacataacatccccatttggatgtctataggcatctcaaaagtaacatataaaaaatgaatcctgatattgcccccaaatctgaa

SEQ ID NO: 44514 - DNA, 120 bp, Artificial Sequence
  ENSG00000064199_35 (sequence is synthesized)
acttcccccacacccaagtttttccattcaaaaatggctgctccattcttccatttgctcaggccaaaaaccttggattcatctttaatgcgtcactttctttcacaccccatatacaat

SEQ ID NO: 44515 - DNA, 120 bp, Artificial Sequence
  ENSG00000064199_36 (sequence is synthesized)
ctatcagcaaaacctgtgggctgtacctataaaataatactcagaatctgcctacttctaaccacttccattgttaccgccttggtcctagttcccatgatagccttgtgaattattgca

SEQ ID NO: 44516 - DNA, 120 bp, Artificial Sequence
  ENSG00000064199_37 (sequence is synthesized)
ataacctatattggccagtgattatctcactactactgcacaacccattccaaagttagtggtttaagacaattatattttctcctgggtctgtaggtcagtggtaatgtagctaagcta

SEQ ID NO: 44517 - DNA, 120 bp, Artificial Sequence
  ENSG00000064199_38 (sequence is synthesized)
ggctggactacaatctcaaggttaggttcaggtcagctctaagctgtgggtttgtgggctgacaggaaggtctgcttcaggctgtgggcccaagggtcagctgcagcacagtgcctctgc

SEQ ID NO: 44518 - DNA, 120 bp, Artificial Sequence
  ENSG00000064199_39 (sequence is synthesized)
ttcacgtgtccttttctgagcccctgctgaaagacgttatccaggacaagctcttctcatgctggtcacagaagacaagcaggaaaacccagcatgcaagaatatttcaagcttttgctc

SEQ ID NO: 44519 - DNA, 120 bp, Artificial Sequence
  ENSG00000064199_40 (sequence is synthesized)
gcatactgttcctatgcatccctggcagctgactgttattcctgagatgagtatctgtggtttcctttcaattttgattccttccatttgaaagtattttaagtactgcaaaaagaattc

SEQ ID NO: 44520 - DNA, 120 bp, Artificial Sequence
  ENSG00000064201_0 (sequence is synthesized)
agggcgatgttgacagacagacagaggggcggatgcagcctacctcctgggcagtgagctgcggtctgaggcccctgcccagctggaaaccacagggaggggaagggaggggaggagagg

SEQ ID NO: 44521 - DNA, 120 bp, Artificial Sequence
  ENSG00000064201_1 (sequence is synthesized)
agaggagaggaaccgtcatggggccttggagtcgagtcagggttgccaaatgccagatgctggtcacctgcttctttatcttgctgctgggcctctctgtggccaccatggtgactctta

SEQ ID NO: 44522 - DNA, 120 bp, Artificial Sequence
  ENSG00000064201_2 (sequence is synthesized)
cctacttcggggcccactttgctgtcatccgccgagcgtccctggagaagaacccgtaccaggctgtgcaccaatgggccttctctgcggggttgagcctggtgggcctcctgactctgg

SEQ ID NO: 44523 - DNA, 120 bp, Artificial Sequence
  ENSG00000064201_3 (sequence is synthesized)
gagccgtgctgagcgctgcagccaccgtgagggaggcccagggcctcatggcagggggcttcctgtgcttctccctggcgttctgcgcacaggtgcaggtggtgttctggagactccaca

SEQ ID NO: 44524 - DNA, 120 bp, Artificial Sequence
  ENSG00000064201_4 (sequence is synthesized)
gccccacccaggtggaggacgccatgctggacacctacgacctggtatatgagcaggcgatgaaaggtacgtcccacgtccggcggcaggagctggcggccatccaggacgtgtttctgt

SEQ ID NO: 44525 - DNA, 120 bp, Artificial Sequence
  ENSG00000064201_5 (sequence is synthesized)
ccagcaggtcgcctccagcctgaccagcatcggcctggccctcacggtgtccgccttgctcttcagctccttcctgtggtttgccatccgctgtggctgcagcttggaccgcaagggcaa

SEQ ID NO: 44526 - DNA, 120 bp, Artificial Sequence
  ENSG00000064201_6 (sequence is synthesized)
atacaccctgaccccacgagcatgtggccgccagccccaggagcccagcctcttgagatgctcccagggtggacccacacattgtctccactccgaagcagttgctattggtccaagagg

SEQ ID NO: 44527 - DNA, 120 bp, Artificial Sequence
  ENSG00000064201_7 (sequence is synthesized)
atgctcgggtagtcttcggtggctgcaggagagcgatgctgcgcctctgcccctctcctgccacctggctgcccacagagctctccagggcagaagtcgcggtgggctcagtgggtgccc

SEQ ID NO: 44528 - DNA, 120 bp, Artificial Sequence
  ENSG00000064201_8 (sequence is synthesized)
tgagcggggtctctcagactgacgtcaggccttggtgggctgcactctcacctggaggctccggggaagcatctgcctccaggaccattcaggctgttgacaagtcaactcctcatggct

SEQ ID NO: 44529 - DNA, 120 bp, Artificial Sequence
  ENSG00000064201_9 (sequence is synthesized)
gtaggactgaggttcccaagtccttgtccctggtcctgtggtccctccaccttcaaaccagcaatggtgcattgagcaaattgtggtcaaatatacatcacatcaaatttaccatcttaa

SEQ ID NO: 44530 - DNA, 120 bp, Artificial Sequence
  ENSG00000064201_10 (sequence is synthesized)
ctgagcctgtctctcacgggaccgggaagctggagagagccccaaccctgcccgctggggccgagctccctgctcctgcagcagtcccatgccccacactctgagtctgccctatccaca

SEQ ID NO: 44531 - DNA, 120 bp, Artificial Sequence
  ENSG00000064201_11 (sequence is synthesized)
tcagggagaggaggcggcgagagaggtgagggggggacctggatgctggccaggcaagaccctcgggggctggacaccctggggcccaaccccaagacccagggccatcctcccacccca

SEQ ID NO: 44532 - DNA, 120 bp, Artificial Sequence
  ENSG00000064201_12 (sequence is synthesized)
ttctgtgctgtgggaagaagtctcctttcagccgtctggggagcacagaggctgacctgtgtcagggagaggaggcggcgagagaggactgccttcagggcatccggagcttcctgagga

SEQ ID NO: 44533 - DNA, 120 bp, Artificial Sequence
  ENSG00000064201_13 (sequence is synthesized)
gaagggctcagggaaggttctgatgtgatcggaggctagttagggttcatggtacgccaagcccattgggtggccaggctgggctcaagacataaacacaggcccctttgcccagctgga

SEQ ID NO: 44534 - DNA, 120 bp, Artificial Sequence
  ENSG00000064201_14 (sequence is synthesized)
cgcaggccccatgcgccattcactccttcaagccagttccagcctggggacttcccaaggccagctaagtccacagaagcctcttggagtgcacccatgagggctctgtgccaagggctg

SEQ ID NO: 44535 - DNA, 120 bp, Artificial Sequence
  ENSG00000064201_15 (sequence is synthesized)
cagggctggtgtggtgggctctgtctagggggaagggtgcaggcgtcctggggggcatcagaaggagttgaagggcactcagaggagaagaagtaggccagggtgtggccagggcttcag

SEQ ID NO: 44536 - DNA, 120 bp, Artificial Sequence
  ENSG00000064201_16 (sequence is synthesized)
caacaacagagcggggcccgaggccaggaagcctttcctccccagggccctgggagagactgggccctcctctctttctcctggtgcccggcagccctcccccagcccaccctgccccct

SEQ ID NO: 44537 - DNA, 120 bp, Artificial Sequence
  ENSG00000064201_17 (sequence is synthesized)
ccctgctcccctccccgctcccctcccctactgtcctggaaacaaacccaccctatctcacagtgggaggcacctggcgaccctccaagaaacagaggggaggagagcaaatggctggag

SEQ ID NO: 44538 - DNA, 120 bp, Artificial Sequence
  ENSG00000064201_18 (sequence is synthesized)
gcctggtgaggggtggagccacagccaaggctctgagggcagaagggctggcgctgaggatggtgctggggagggaccagcggcattgggggcagggctaacagtcaggacccctgtgcc

SEQ ID NO: 44539 - DNA, 120 bp, Artificial Sequence
  ENSG00000064201_19 (sequence is synthesized)
gcccgactgcaaagcctcctggggagccggaagagccagcacaggcggcaggcacggagccacccagatgggctggcatgggcgggagggaggcagacctgcctgcgggggacaggaggg

SEQ ID NO: 44540 - DNA, 120 bp, Artificial Sequence
  ENSG00000064201_20 (sequence is synthesized)
tgagccctgagaccctgcggaggcctccacaggccgccccagttgccatcatctccagggttcagagacaggcctgccacctcccttttctgaaaagatgcctctgggtgccatgccctg

SEQ ID NO: 44541 - DNA, 120 bp, Artificial Sequence
  ENSG00000064201_21 (sequence is synthesized)
gggtggcactggaagcctgggatggaaccaggaagctgggactgtgcggggacccccctcacacccctccaccagctggcttcctgccctccctgttagccatcaccctctggtcaccaa

SEQ ID NO: 44542 - DNA, 120 bp, Artificial Sequence
  ENSG00000064201_22 (sequence is synthesized)
ggtgctgtgcccggccctgggctggatgctgggaacccagagtgaattcgaagtggcccggcccaggggagccaacgtgtggcccaacatggacgctcaggacagctgggagacggcacc

SEQ ID NO: 44543 - DNA, 120 bp, Artificial Sequence
  ENSG00000064201_23 (sequence is synthesized)
ggccgggcccagggcagtgccagagtgcccacagaggccagccctgtcccactgggcttcacctgctcgtgctgcctttccctagagccctgggggcttcctaggaatgtgccgcacccg

SEQ ID NO: 44544 - DNA, 120 bp, Artificial Sequence
  ENSG00000064201_24 (sequence is synthesized)
ccgccctgctgccctggcattggcctaggtgggcgctgcagctccatggccccacagaggccgcttgtccaggcagggagggccgctcagggcgggtaccatgcctgctgccctctcaca

SEQ ID NO: 44545 - DNA, 120 bp, Artificial Sequence
  ENSG00000064201_25 (sequence is synthesized)
tcctgcccctcagcctgcccagcccccgactcagatggaagggtgacccgggacaggatctctggtcttgagcctcactggctgccaacctcagggagctgctctggtgtgacagggcct

SEQ ID NO: 44546 - DNA, 120 bp, Artificial Sequence
  ENSG00000064201_26 (sequence is synthesized)
gcctcctacagctgggccgcccccttacactgcagagtcctgatgcttcctggggaggggcgcccgcaccctggggcagtggggcagccgcgggtgtctccctcccaggtgtccgccttg

SEQ ID NO: 44547 - DNA, 120 bp, Artificial Sequence
  ENSG00000064201_27 (sequence is synthesized)
cttggagaggaaggaggcctccctggcccagcagagaatgagagctcggtagcagagccagccccaccttccccttgagagccagacctggcccagaaggatcccagaggggctgagccc

SEQ ID NO: 44548 - DNA, 120 bp, Artificial Sequence
  ENSG00000064205_0 (sequence is synthesized)
gtgtgtgtgtgtgtgtgagcgcgcgcgcgcgcgcgcgtgtgtactcgtgcgtgtgcctgtgtgtgcctgggagtgacctcacagctgccggaacataaagactcacaggtccgcctccca

SEQ ID NO: 44549 - DNA, 120 bp, Artificial Sequence
  ENSG00000064205_1 (sequence is synthesized)
ggctcaaagctggctctgcaggggacatgagaggcacaccgaagacccacctcctggccttctccctcctctgcctcctctcaaaggtgcgtacccagctgtgcccgacaccatgtacct

SEQ ID NO: 44550 - DNA, 120 bp, Artificial Sequence
  ENSG00000064205_2 (sequence is synthesized)
gcccctggccacctccccgatgcccgctgggagtacccctggtgctggatggctgtggctgctgccgggtatgtgcacggcggctgggggagccctgcgaccaactccacgtctgcgacg

SEQ ID NO: 44551 - DNA, 120 bp, Artificial Sequence
  ENSG00000064205_3 (sequence is synthesized)
ccagccagggcctggtctgccagcccggggcaggacccggtggccggggggccctgtgcctcttggcagaggacgacagcagctgtgaggtgaacggccgcctgtatcgggaaggggaga

SEQ ID NO: 44552 - DNA, 120 bp, Artificial Sequence
  ENSG00000064205_4 (sequence is synthesized)
ccttccagccccactgcagcatccgctgccgctgcgaggacggcggcttcacctgcgtgccgctgtgcagcgaggatgtgcggctgcccagctgggactgcccccaccccaggagggtcg

SEQ ID NO: 44553 - DNA, 120 bp, Artificial Sequence
  ENSG00000064205_5 (sequence is synthesized)
cagttttctggccttgtctcttccctgccccctggtgtcccctgcccagaatggagcacggcctggggaccctgctcgaccacctgtgggctgggcatggccacccgggtgtccaaccag

SEQ ID NO: 44554 - DNA, 120 bp, Artificial Sequence
  ENSG00000064205_6 (sequence is synthesized)
aaccgcttctgccgactggagacccagcgccgcctgtgcctgtccaggccctgcccaccctccaggggtcgcagtccacaaaacagtgccttctagagccgggctgggaatggggacacg

SEQ ID NO: 44555 - DNA, 120 bp, Artificial Sequence
  ENSG00000064205_7 (sequence is synthesized)
gtgtccaccatccccagctggtggccctgtgcctgggccctgggctgatggaagatggtccgtgcccaggcccttggctgcaggcaacactttagcttgggtccaccatgcagaacacca

SEQ ID NO: 44556 - DNA, 120 bp, Artificial Sequence
  ENSG00000064205_8 (sequence is synthesized)
atattaacacgctgcctggtctgtctggatcccgaggtatggcagaggtgcaagacctagtcccctttcctctaactcactgcctaggaggctggccaaggtgtccagggtcctctagcc

SEQ ID NO: 44557 - DNA, 120 bp, Artificial Sequence
  ENSG00000064205_9 (sequence is synthesized)
cactccctgcctacacacacagcctatatcaaacatgcacacgggcgagctttctctccgacttcccctgggcaagagatgggacaagcagtcccttaatattgaggctgcagcaggtgc

SEQ ID NO: 44558 - DNA, 120 bp, Artificial Sequence
  ENSG00000064205_10 (sequence is synthesized)
tgggctggactggccatttttctgggggtaggatgaagagaaggcacacagagattctggatctcctgctgccttttctggagtttgtaaaattgttcctgaatacaagcctatgcgtga

SEQ ID NO: 44559 - DNA, 120 bp, Artificial Sequence
  ENSG00000064205_11 (sequence is synthesized)
ctgggccgcggctacccagagtcagggccacggagcttaggagaccttgggtcagctctgcaaaggggttgtttactgaatgcttctggtatctgcagccccgctggggttcggacaggg

SEQ ID NO: 44560 - DNA, 120 bp, Artificial Sequence
  ENSG00000064205_12 (sequence is synthesized)
ggtctggaatagggcttcacaactacagcagggctaggaccctcttgggctggaaggagctggagaggcctctgcaagctgtcacaggctcttggtgctggcactggctcaggctttcac

SEQ ID NO: 44561 - DNA, 120 bp, Artificial Sequence
  ENSG00000064205_13 (sequence is synthesized)
cggtggccggggggccctgtgcctctgtaagcaggtttgcaggactgagtgggggcgggtgtgagcgggaggtcaaggccgtggtgtcctggatcaaagtgcagccctcctctctctacc

SEQ ID NO: 44562 - DNA, 120 bp, Artificial Sequence
  ENSG00000064205_14 (sequence is synthesized)
tccttgggtgctcacttcaggtatcccatccattccagctgaacttggtgtcccaaagcccactccccactccctcctctcccttcttggcctctgcttaaaccatctcactaccccaat

SEQ ID NO: 44563 - DNA, 120 bp, Artificial Sequence
  ENSG00000064205_15 (sequence is synthesized)
caccactcccttctcaggatccttacaacactttggggaaaataaaagtgcaaccttttagggcataatatgtgtccagaactgtgctaagcacttactacacaagtcacatcatcctca

SEQ ID NO: 44564 - DNA, 120 bp, Artificial Sequence
  ENSG00000064205_16 (sequence is synthesized)
caataaccctatgatgggaagtactttcagacctattttatgaatgaggaaacaggttcaccagcattaagggacatgcttcatgtcacacggcacgggaccagatccaacgggctctaa

SEQ ID NO: 44565 - DNA, 120 bp, Artificial Sequence
  ENSG00000064205_17 (sequence is synthesized)
ggaacagtttattctgtcttctcccatagtgggggccctcggagcactgctgggatcctgggtttgccatgtattcagcagtcacccgagcatgtgacattcctcaccactcttctaggc

SEQ ID NO: 44566 - DNA, 120 bp, Artificial Sequence
  ENSG00000064205_18 (sequence is synthesized)
cttggtattctctgatgcttcggggcagggctttgcaagctggctccagtgactgggtgccagagaattagttgttgtgggagggctgtcctgtgcatggtaagacttctagcagcatcc

SEQ ID NO: 44567 - DNA, 120 bp, Artificial Sequence
  ENSG00000064205_19 (sequence is synthesized)
ccgaactccacccactgtatgccagcagcactccccatcccccaagtcatgacagtctgtcttcagacagtgccaaatttccccagggggcaaaatctccagttgggaaccatcacttta

SEQ ID NO: 44568 - DNA, 120 bp, Artificial Sequence
  ENSG00000064205_20 (sequence is synthesized)
gagaaatgcaaagaggcaagagattgttcttcttttttcttttttaataataagccttgtagaacaatttgcctctttcatctatgtgcatgtcacacttttataaaaataagaacgaaa

SEQ ID NO: 44569 - DNA, 120 bp, Artificial Sequence
  ENSG00000064205_21 (sequence is synthesized)
gagagagagagagaagctcatgaatcattgataatgaattcatctgtaggaaaagccttgttaaaaaacaacaggccaggcacagtgactcatgcctataatcctatcagtttgggagac

SEQ ID NO: 44570 - DNA, 120 bp, Artificial Sequence
  ENSG00000064205_22 (sequence is synthesized)
atcctatcagtttgggagactgaggcgggacgaccacttgagcccaggagttctagtccagccttggcaacatagtaagatcctctctctatcaaaaaaaaaaaaaaaaaattagccggg

SEQ ID NO: 44571 - DNA, 120 bp, Artificial Sequence
  ENSG00000064205_23 (sequence is synthesized)
gtcccagctacttgagaggctgaggtgagaggctcgcttgagcctgggtgtttgaggctgcagtgagccatggttgcgccactacattccagcccgggcaacagaccaaaccctatctcc

SEQ ID NO: 44572 - DNA, 120 bp, Artificial Sequence
  ENSG00000064205_24 (sequence is synthesized)
gcagctcacacgcttcaccagcgctcttacttcattctgtcttggagatgatgccctcacacccgtccccctttcccaagcccatgagtccctcaaggcaggaactgtcctctttctgtc

SEQ ID NO: 44573 - DNA, 120 bp, Artificial Sequence
  ENSG00000064205_25 (sequence is synthesized)
tgggagcacagtggttggcacacaggcgggaaacagtaaatatctctggaatgataaggagtagggctattttatcagggtctctcatgtgccaaggcttatgccagctattcactgaag

SEQ ID NO: 44574 - DNA, 120 bp, Artificial Sequence
  ENSG00000064205_26 (sequence is synthesized)
gggcattcctacagtactgtgtgtcgcacctaggctctgagcccaccggagggtgcagagacgcacactggccgccccagccctcaaggagttcatgtccagtggaggaagtggcaataa

SEQ ID NO: 44575 - DNA, 120 bp, Artificial Sequence
  ENSG00000064205_27 (sequence is synthesized)
cacccatatcttgagggcttcattgaaagagtgttccctgagcacctaggccatgcctagcactgtgtgctagagggtacggacatgtcatcccatggaacctgaagttacgattactga

SEQ ID NO: 44576 - DNA, 120 bp, Artificial Sequence
  ENSG00000064205_28 (sequence is synthesized)
gctcatcattgctgtagttcaggccactcagagaagttaagtaacttactcaaagacacacagccagcaagttaagccctgacctgacagtgatgacagcacaagtggacaacgactttg

SEQ ID NO: 44577 - DNA, 120 bp, Artificial Sequence
  ENSG00000064205_29 (sequence is synthesized)
ttgcatgaaatctcagcgtgtatagaatacttaaactttattaatatatagtaactatactaatgataataacagagtagctaggacctatggaaggtctcttttatgttgtgatcatta

SEQ ID NO: 44578 - DNA, 120 bp, Artificial Sequence
  ENSG00000064205_30 (sequence is synthesized)
cgcctatcattccgagtagtctctaccaccctggaaaataagtaccattatatcccagcttgcaaatgtggaaactgaggcaagaagaagtgaaatcacttggcccaggttcacagctaa

SEQ ID NO: 44579 - DNA, 120 bp, Artificial Sequence
  ENSG00000064205_31 (sequence is synthesized)
gaaagggcagagtttggggggtcaatccaggcctgtcttcttgcaatccctgtgccgggatccagggtgccccagcaggctggtggagggctggggagaggtgcatatcctgggctggag

SEQ ID NO: 44580 - DNA, 120 bp, Artificial Sequence
  ENSG00000064205_32 (sequence is synthesized)
ccctgggcagggcccagctactgtgaggcagctgcctcaggcagcgggatctgggcagctctgcagagaaggctgtgccgctttgcgggtcaccgatgggggtgcggtttttcctccgca

SEQ ID NO: 44581 - DNA, 120 bp, Artificial Sequence
  ENSG00000064205_33 (sequence is synthesized)
tcacaaggtgaaatcacatggtcttaaagaaagccagaagacaggccttcaagtgatccaagaaacccaattcatattaataataattaacttttttatttatttatttttttgagatgg

SEQ ID NO: 44582 - DNA, 85 bp, Artificial Sequence
  ENSG00000064205_34 (sequence is synthesized)
agttttgctcttgttgcccaggctggagctggagtacaatagcacgatctcgactcactggactcctgagtagctgggattatag

SEQ ID NO: 44583 - DNA, 82 bp, Artificial Sequence
  ENSG00000064205_35 (sequence is synthesized)
gtagctgggattataggcgcatgccaccatgctcggctttttttttttttttaaatatatttttagtagagatggggtttag

SEQ ID NO: 44584 - DNA, 120 bp, Artificial Sequence
  ENSG00000064205_36 (sequence is synthesized)
tacaggcgtgagctactgcgcccagccaataattaacattgcttgagcgcctgctatgtgctaggcactagcactttatacagaccagtgcttcccagcgtttttgaccagagaagagca

SEQ ID NO: 44585 - DNA, 120 bp, Artificial Sequence
  ENSG00000064205_37 (sequence is synthesized)
gaagagcagggagaatgaaggctgcctcccagggactggggagcatagcctgaaatcaactaacccaagggtgaaattgttcgaagtctcatgttttattgtttacaaacaaaacaaaac

SEQ ID NO: 44586 - DNA, 120 bp, Artificial Sequence
  ENSG00000064205_38 (sequence is synthesized)
caggcacccccttggtggccttcacagtttcaccttcaggtaaatgggctcatcctttgagccatgaggatgggaagcgaagcaaggaatgaaaaagctagtgtgtttgtgtgtgtgtgt

SEQ ID NO: 44587 - DNA, 120 bp, Artificial Sequence
  ENSG00000064218_0 (sequence is synthesized)
gcagaagagctggctcagaccttaatcagagctgtcgccggctccttgcagccgccgcagcgcctccgcgaaggaggacgtgccgacccggctgcgcgcccaaggcagaggcccgcgtcg

SEQ ID NO: 44588 - DNA, 120 bp, Artificial Sequence
  ENSG00000064218_1 (sequence is synthesized)
gcgttggctgggcgtgagctgggaggccgagctgtgagcgcgaagggagctggagagacgactgcggcacctccggccgccccggagcacacacgaccaccggggctgcgggaccaaggg

SEQ ID NO: 44589 - DNA, 120 bp, Artificial Sequence
  ENSG00000064218_2 (sequence is synthesized)
ccgcgtcgcccggaggccgcccctgagcgggcctcgcagccccgccgtccagcgctccctggccctctcccgcagccaggctgccaactcattcgggagcccggggcatgaacggctacg

SEQ ID NO: 44590 - DNA, 120 bp, Artificial Sequence
  ENSG00000064218_3 (sequence is synthesized)
gctccccctacctgtacatgggcggcccggtgtcgcagccgccacgggcgcccctgcagcgcacgcccaagtgcgcgcgctgccgcaaccatggcgtcctgtcctggctcaagggccaca

SEQ ID NO: 44591 - DNA, 120 bp, Artificial Sequence
  ENSG00000064218_4 (sequence is synthesized)
agcgttactgccgcttcaaggactgcacctgcgagaagtgcatcctcatcatcgagcggcagcgggtcatggctgcgcaggtggcgctgcgccggcagcaggccaacgagagcttggaga

SEQ ID NO: 44592 - DNA, 120 bp, Artificial Sequence
  ENSG00000064218_5 (sequence is synthesized)
aacgagagcttggagagcctcatccccgactcgctgcgcgctctgccagggcccccgccgccgggggacgccgtcgccgccccgcagccgccgccagcctctcagccgtcgcagccgcag

SEQ ID NO: 44593 - DNA, 120 bp, Artificial Sequence
  ENSG00000064218_6 (sequence is synthesized)
ccgagttggccgcggccgccgcgctgcgttggactgccgagccgcagcccggggctctgcaggcgcagctcgccaagccagatttgactgaagaacgacttggagacggcaagtcggcag

SEQ ID NO: 44594 - DNA, 120 bp, Artificial Sequence
  ENSG00000064218_7 (sequence is synthesized)
acaatacagaggtcttcagtgacaaagacactgaccagaggagttccccagatgtggcaaagagtaagggctgcttcacccctgagagccctgagatagtgtccgtggaggaagggggat

SEQ ID NO: 44595 - DNA, 120 bp, Artificial Sequence
  ENSG00000064218_8 (sequence is synthesized)
acgctgtccagaaaaacggaggcaaccccgagagccgccctgacagccccaagtgtcacgcggagcagaatcacctcctgattgagggcccctcggggactgtttctctgcccttcagct

SEQ ID NO: 44596 - DNA, 120 bp, Artificial Sequence
  ENSG00000064218_9 (sequence is synthesized)
tgaaagccaacagaccgccgcttgaagtgttaaaaaagatattccccaaccagaagccaacggtgcttgagctcatcctcaagggctgtggcggggacctggtgagcgccgtggaagtcc

SEQ ID NO: 44597 - DNA, 120 bp, Artificial Sequence
  ENSG00000064218_10 (sequence is synthesized)
acaccttgagctcctaccccatctcgtcttccaaatggtctgtgggatcagcctttcgagtcccagacacgttgaggttttctgccgactctagcaacgttgtccccagtcccttggctg

SEQ ID NO: 44598 - DNA, 120 bp, Artificial Sequence
  ENSG00000064218_11 (sequence is synthesized)
ggcctctgcagccccctttcccccagccaccccggtacccgctgatgctgaggaatactttggcgagaagccagtcgagcccctttttgcccaatgatgtcaccctgtggaacaccatga

SEQ ID NO: 44599 - DNA, 120 bp, Artificial Sequence
  ENSG00000064218_12 (sequence is synthesized)
cgctgcagcagcagtatcagctgaggtcccagtatgtcagtcctttccccagtaactctaccagcgtcttcagaagctcgcccgtccttcctgcccgcgccacggaagaccctcggattt

SEQ ID NO: 44600 - DNA, 120 bp, Artificial Sequence
  ENSG00000064218_13 (sequence is synthesized)
ccatccctgatgatgggtgtccatttgtgtcaaagcagtccatttacaccgaggacgactatgacgagaggtctgactcctcagactctagaacactcaacacatcatcttaaagtggtg

SEQ ID NO: 44601 - DNA, 120 bp, Artificial Sequence
  ENSG00000064218_14 (sequence is synthesized)
ctggatgggtggtggccaggtgacattttctgtgcgttttgaccctgaggcatctgaggagaggccacatcttgtgtatgccctttccttctgtttgacaaagtgactgtgcttgattct

SEQ ID NO: 44602 - DNA, 120 bp, Artificial Sequence
  ENSG00000064218_15 (sequence is synthesized)
atacattagcaataaaaacataacttatttaacttcttgcacttcactggaaaatgccaaatagctctgttctgtggctttagtgctgaatgtttattgtaaaagagagtctaatgttaa

SEQ ID NO: 44603 - DNA, 120 bp, Artificial Sequence
  ENSG00000064218_16 (sequence is synthesized)
gaatagtcttgggaaggctgggtccgtggaagatttatttggggatgtaaagctgaaggtcagccttgcacctaaacccaacctggaatgttaaatgaaataatatacttgaatgcaatt

SEQ ID NO: 44604 - DNA, 120 bp, Artificial Sequence
  ENSG00000064218_17 (sequence is synthesized)
ttgtaaaagtggattcctcaggatatgtgaaacctaaaggaagtggttctgttgcaaatggactataaacagggacattatattcttacactaaaaatccttgcattttaaagagagatg

SEQ ID NO: 44605 - DNA, 120 bp, Artificial Sequence
  ENSG00000064218_18 (sequence is synthesized)
cacttaagaatagagtgaactgctcatatgcttatttaagcttggacagttttcagagacaaaccccattaagaattactcttttcacatggctgaatcgaaacatgtgtaatgtcaatg

SEQ ID NO: 44606 - DNA, 120 bp, Artificial Sequence
  ENSG00000064218_19 (sequence is synthesized)
taaaaccaatcacagctgtgaactgcatgaaatgtattgtgaaacgaacacaagattaagctttgtcaggttaatgtagcatgttaaggactctagaaaaaaataaactaaggagacgag

SEQ ID NO: 44607 - DNA, 120 bp, Artificial Sequence
  ENSG00000064218_20 (sequence is synthesized)
tgatttctagatctttatttacagggtttttgtttcatttgccagtgatatagttcgaatttttttaaaaaggcttgtagtatattatgacccattgagatgcatttgctcttccaaaaa

SEQ ID NO: 44608 - DNA, 120 bp, Artificial Sequence
  ENSG00000064218_21 (sequence is synthesized)
gcacgtgtacaggtctcttctgagcacatctgctcctctttatgcacaccaggaaaagattaactcagctgttctgttttccagatttgactgaagaacgacttggagacggcaagtcgg

SEQ ID NO: 44609 - DNA, 120 bp, Artificial Sequence
  ENSG00000064225_0 (sequence is synthesized)
gtcgcccgggattggggctggcgggagcctgagactccgggcagggctgctccctcctctgctcccccgccagatccgcggggaaggaatcgtgcccgcgccgcccctggcccgcgccac

SEQ ID NO: 44610 - DNA, 120 bp, Artificial Sequence
  ENSG00000064225_1 (sequence is synthesized)
cttcctttggtttctgccggcctcgggcttctgcggcccgatgtggcaggcgccgcgagagaggcagcagccggctggagcagcggcccctcaggtctcggagcccggtgcgcctctgcg

SEQ ID NO: 44611 - DNA, 120 bp, Artificial Sequence
  ENSG00000064225_2 (sequence is synthesized)
gtcgtcgctcctgggcctcggcgggtcactcttgccggccggcttcgctgcgggtttgcactgcccggcatttgcaagtgaggaagcagcacaaccctgggttttagataatttctaaca

SEQ ID NO: 44612 - DNA, 120 bp, Artificial Sequence
  ENSG00000064225_3 (sequence is synthesized)
gagaggccccagcaattcagcaggcagcgtcctgagtctttggcagcctggtccctctttcgcaaattctccacctttgcgaacagagggtctttaggacacagattcttaaaagtgcag

SEQ ID NO: 44613 - DNA, 120 bp, Artificial Sequence
  ENSG00000064225_4 (sequence is synthesized)
gtgagccagccatgagagggtatcttgtggccatattcctgagtgctgtcttcctctattatgtactgcattgcatattatggggaacgaatgtctattgggtggcacctgtggaaatga

SEQ ID NO: 44614 - DNA, 120 bp, Artificial Sequence
  ENSG00000064225_5 (sequence is synthesized)
aacggagaaataagatccagccttgtttatcaaagccagcttttgcctctctgctgaggtttcatcagtttcacccttttctgtgtgcggctgattttagaaagattgcttccttgtatg

SEQ ID NO: 44615 - DNA, 120 bp, Artificial Sequence
  ENSG00000064225_6 (sequence is synthesized)
gtagcgataagtttgatttgccctatgggatgagaacatcagcggaatattttcgacttgctctttcaaaactgcagagttgtgatctctttgatgagtttgacaacataccctgtaaaa

SEQ ID NO: 44616 - DNA, 120 bp, Artificial Sequence
  ENSG00000064225_7 (sequence is synthesized)
agtgtgtggtggttggtaatggaggagttttgaagaataagacattaggagaaaaaatcgactcctatgatgtaataataagaatgaataatggtcctgttttaggacatgaagaagaag

SEQ ID NO: 44617 - DNA, 120 bp, Artificial Sequence
  ENSG00000064225_8 (sequence is synthesized)
ttgggagaaggacaaccttccgacttttttatccagaatctgttttttcagatcctattcacaatgaccctaatacgacagtgattctcactgcttttaagccacatgatttaaggtggc

SEQ ID NO: 44618 - DNA, 120 bp, Artificial Sequence
  ENSG00000064225_9 (sequence is synthesized)
tgttggaattgttgatgggtgacaaaataaacactaatggtttttggaagaaaccagccttaaacctgatttataaaccttatcaaatccgaatattagatcctttcattatcagaacag

SEQ ID NO: 44619 - DNA, 120 bp, Artificial Sequence
  ENSG00000064225_10 (sequence is synthesized)
cagcttatgaactgcttcattttccaaaagtgtttcccaaaaatcagaaacctaaacacccaacaacaggaattattgccatcacattggcgttttacatatgtcacgaagttcacctag

SEQ ID NO: 44620 - DNA, 120 bp, Artificial Sequence
  ENSG00000064225_11 (sequence is synthesized)
ctggttttaaatacaacttttctgacctcaagagtcctttgcactactatgggaatgccaccatgtctttgatgaataagaacgcgtatcacaatgtgactgcagagcagctctttttga

SEQ ID NO: 44621 - DNA, 120 bp, Artificial Sequence
  ENSG00000064225_12 (sequence is synthesized)
aggacattatagaaaaaaacctcgtaatcaacttgactcaagattgactctacagactcagaagatgatgctaacagtgttagttttatttttgtactgcaatttttagtttaaaatatg

SEQ ID NO: 44622 - DNA, 120 bp, Artificial Sequence
  ENSG00000064225_13 (sequence is synthesized)
ttggatgcactcgtcaaataattatgtatactgtctgttgctgcctggtgattcataaccaccagcttaatttctgtgaatactgtatatttaacttatgaaaaccaagaaatgtaaaga

SEQ ID NO: 44623 - DNA, 120 bp, Artificial Sequence
  ENSG00000064225_14 (sequence is synthesized)
agatttttgaagggatatgacttcctactaaggatttagtttaccacaacaattctgactacaataagacattttgaggaggatatttggctactgtaaacatggctggtggaaaatcac

SEQ ID NO: 44624 - DNA, 120 bp, Artificial Sequence
  ENSG00000064225_15 (sequence is synthesized)
gattgtggcttgatgtggcaagccgaaaccacttggctctggaaatctaagttcatactggtttaattaagctctctcctgacaacccccagaattaaatgaaccatgattgtgaagagt

SEQ ID NO: 44625 - DNA, 120 bp, Artificial Sequence
  ENSG00000064225_16 (sequence is synthesized)
aatttggtacaatgaaggcagtgtttgtttttaagttaaaggaaatgggctaaacataaagttcttattagataagtaaataactaaagaaagaatacaattactaaactctgatggctt

SEQ ID NO: 44626 - DNA, 120 bp, Artificial Sequence
  ENSG00000064225_17 (sequence is synthesized)
tgtattattttaaagaaatgaagtttaactttatacagtgaagctaagctaggcaagctcaagaaggaaaaaaaaatcttgaacattatttttttttgcctgacttacttattcattaaa

SEQ ID NO: 44627 - DNA, 120 bp, Artificial Sequence
  ENSG00000064225_18 (sequence is synthesized)
ttttgaaggttttccacttgaagtaaattaggaaaggtaaagaagataacagaacaagtaaacacttaagaaaagtcaagctgaggccgggcagggtggctcacacctgtaatcctaaca

SEQ ID NO: 44628 - DNA, 76 bp, Artificial Sequence
  ENSG00000064225_19 (sequence is synthesized)
ctgaggccgggcagggtggctcacacctgtaatcctaacaaacactttgggaggccgagggaggcagctggattgc

SEQ ID NO: 44629 - DNA, 120 bp, Artificial Sequence
  ENSG00000064225_20 (sequence is synthesized)
tgaggctgtcttctaaaaaatataaaaagtgaagttgggatttttggatttaaatggtacaaaaagaatatctcattttcccatgattaaagctaatcttcagatggaaagcttgcctgg

SEQ ID NO: 44630 - DNA, 120 bp, Artificial Sequence
  ENSG00000064225_21 (sequence is synthesized)
ctacctagggtgcaccagagaatctgatccaatgcaagccagtcaatcctacaaatgtggtgagctagtcttccttcctatattttaataaatgtaaccaaaggccatctggaggtaggg

SEQ ID NO: 44631 - DNA, 120 bp, Artificial Sequence
  ENSG00000064225_22 (sequence is synthesized)
gaatgagaggtgaagaaacagaaaaatagaggttataaggatggaactaaaagttgtcagaagaggtatgagctgaagaaagaattactctcttttgaccaataaatacaattgggaaac

SEQ ID NO: 44632 - DNA, 120 bp, Artificial Sequence
  ENSG00000064225_23 (sequence is synthesized)
actggaaaaccatggcttgattactgacaaccaacctgcctctctaaagagggtgtataaagggtgaaatacattagatttggctcagaaacagaatgcggtacttataaagcagaataa

SEQ ID NO: 44633 - DNA, 120 bp, Artificial Sequence
  ENSG00000064225_24 (sequence is synthesized)
aggggagaacagtagtagttgatctaacccagattagacatgaataccagcatatgtttgcagagtcccacagttttgattcctcttataactttttgaggtgcaaaaggaaggtaccag

SEQ ID NO: 44634 - DNA, 120 bp, Artificial Sequence
  ENSG00000064225_25 (sequence is synthesized)
aactggaatcacatgtaatcaatcagtgtgattttcccctcataccacacagccataggctgcagtgtggctgctgaagttcaattgatataaagtaaatcaggcttcaaaaagaatggt

SEQ ID NO: 44635 - DNA, 120 bp, Artificial Sequence
  ENSG00000064225_26 (sequence is synthesized)
gctgtgggtacacaaggacataaagatgggaacgatagacactgaggactgcggcggggggagcgaggggagcggggagggcaagggctgaaagactatgtattgggtactatgctcaca

SEQ ID NO: 44636 - DNA, 120 bp, Artificial Sequence
  ENSG00000064225_27 (sequence is synthesized)
acctggatgatgggatcattcataccacaaacctcagtatcacacaatatacccatgtaacaacctgcactctgcacatgtacccttagaatctaaaataaaagttgaaattattttttt

SEQ ID NO: 44637 - DNA, 120 bp, Artificial Sequence
  ENSG00000064225_28 (sequence is synthesized)
gtgtcacagtcagtccgcggcgccacaagcctcagtgtttacttctgccgcctgccagccgggcggggaaggggagtacccggccacccctcactttagctcctgcagctttccaaacaa

SEQ ID NO: 44638 - DNA, 120 bp, Artificial Sequence
  ENSG00000064225_29 (sequence is synthesized)
accagggcgggatgggagtgtcttcttggctgtggaaatcgatcctcctaccttgtcctgaagccacccgccgcctttcctcgtccctcccttcgcggtgattttccggtcccggcgccc

SEQ ID NO: 44639 - DNA, 120 bp, Artificial Sequence
  ENSG00000064225_30 (sequence is synthesized)
agtataaagtggacaccccatatttaaggaagagcttgaatatcctgtctctttttgtgcttttagtcagagctctgcatatattttaagaaaaggcattgaggaactcaatcaaaccag

SEQ ID NO: 44640 - DNA, 120 bp, Artificial Sequence
  ENSG00000064225_31 (sequence is synthesized)
gccatgttccacacagtctggagtgtatgtcagtgtgagctgaagaccagcagagactaggatggatgacggcctgtccaggggctgaatggacacaggtgtcagcagggccacctggta

SEQ ID NO: 44641 - DNA, 120 bp, Artificial Sequence
  ENSG00000064225_32 (sequence is synthesized)
agtagcttctcagctgttttcccagtcactttcagaagcaaggctgctatagctaattgatgtatgcaagatgtaattacagccattgatagggaaaatatcagcaatatgatgcccttg

SEQ ID NO: 44642 - DNA, 120 bp, Artificial Sequence
  ENSG00000064225_33 (sequence is synthesized)
gaagctcagaaaaaagtcaaaaggctgtaccatgactctcacaatagccagatctgaatataaaatctagtctcttctggtgatggagaaaaggaagtgtcatccatacaagatgaattt

SEQ ID NO: 44643 - DNA, 120 bp, Artificial Sequence
  ENSG00000064225_34 (sequence is synthesized)
ggccactttctcagaaacagaaaagccagcagcaatttggagaagctcttctgggaaacctggagcttttatcttcagtgttataaagagaacatcttcccttataattaggcttgggtg

SEQ ID NO: 44644 - DNA, 120 bp, Artificial Sequence
  ENSG00000064225_35 (sequence is synthesized)
tggatttcagctgtcatttatgggatagtgaccccagacttgtcatagctgatacaacttcacatatatggtttcatcagtttcacccttttctgtgtgcggctgattttagaaagattg

SEQ ID NO: 44645 - DNA, 120 bp, Artificial Sequence
  ENSG00000064225_36 (sequence is synthesized)
gaacatcagtgattggccctatatagcattaagttctagatttttgagggatcataaaagcccaaggtgacaagccttcaacattcggaatattttcgacttgctctttcaaaactgcag

SEQ ID NO: 44646 - DNA, 120 bp, Artificial Sequence
  ENSG00000064225_37 (sequence is synthesized)
agttgtgatctctttgatgagtttgacaaaacgcgtatcacaatgtgactgcagagcagctctttttgaaggacattatagaaaaaaacctcgtaatcaacttgactcaagattgactct

SEQ ID NO: 44647 - DNA, 120 bp, Artificial Sequence
  ENSG00000064225_38 (sequence is synthesized)
gatttgtagagtcccccggatcccaaggcaagggtctatggaacctgttcaggtcaggtgtttctgtggtgttcgctgccggtgtgcgtcagcagatgtggcaggaggagggtggcacct

SEQ ID NO: 44648 - DNA, 120 bp, Artificial Sequence
  ENSG00000064225_39 (sequence is synthesized)
acagaaagccggtctcctcatgagaaacagatacacaggacaaactacacaagttttccagaagaaaaagaacagagcttgttttaagaaatttgtacttttcatttcattacttaggaa

SEQ ID NO: 44649 - DNA, 120 bp, Artificial Sequence
  ENSG00000064225_40 (sequence is synthesized)
ttacaagagactttgcagaagggtaaaaatggggagcgacatccctctgatagaaatgagatgcaaagaccacgtgagttacctgcccggtcccagtaaggagaaatcaacatctcatgg

SEQ ID NO: 44650 - DNA, 120 bp, Artificial Sequence
  ENSG00000064225_41 (sequence is synthesized)
aacatacaaaccattacaagaggatgcaatttatccctgttttcttttttaaagtatgaaagagagaattcacaaacactaaatctttctaaaggtataacatggtaaaggaatgaaagg

SEQ ID NO: 44651 - DNA, 120 bp, Artificial Sequence
  ENSG00000064225_42 (sequence is synthesized)
gtctgcataaaataatctagaaaaaaaaaaaaaaaaagaagggaaggtagttgaatctataccagggatgggcaaatgactgcccatgcatggcctgttttgtatgggccgtgagttaag

SEQ ID NO: 44652 - DNA, 120 bp, Artificial Sequence
  ENSG00000064225_43 (sequence is synthesized)
aataaagagctataaataaaacaaaaaaagaataagctgcagcgacatgtggcctgtaaagcctaaaatatttattagctggatctttacagaacaaatctgctgaatcctgttgtatac

SEQ ID NO: 44653 - DNA, 120 bp, Artificial Sequence
  ENSG00000064225_44 (sequence is synthesized)
gtccatctccacacttgtgcagcagagagccagaggtagaatcttcgaggagtgggtaatgctggcaaagaatgtagacctgcataatgtaaaacacaaatgcagagtcctatatggagc

SEQ ID NO: 44654 - DNA, 120 bp, Artificial Sequence
  ENSG00000064225_45 (sequence is synthesized)
caaatcaaatataatatgtctgacattgatttcatttttgctccatctatagactcccagaaaaaagaaataaaaaaaatgcaaagaaaatttaaatgaacaaacagacccttctggaac

SEQ ID NO: 44655 - DNA, 120 bp, Artificial Sequence
  ENSG00000064225_46 (sequence is synthesized)
ctactgtgacatgagatgtgtccacaaggcgaggtttcaggcacacactgaaggagcatctgctggacagccctccccgcccccaagtccttaccaacctgtgccactgcataccctgta

SEQ ID NO: 44656 - DNA, 120 bp, Artificial Sequence
  ENSG00000064225_47 (sequence is synthesized)
taattttaagggcttttattctttctgcttcctaatgatttccaatggatatgattttgggatggaatgaaatgaattacattttaaaatataaattatcactccttttgaggcagtata

SEQ ID NO: 44657 - DNA, 120 bp, Artificial Sequence
  ENSG00000064225_48 (sequence is synthesized)
acgcgaggagggttgaggggtctggaaggttctggtctcttaccgtataaagtttttcgagaaaccctttttccctccacaatggaactagacctaacaaaacaagctccgaggcagttt

SEQ ID NO: 44658 - DNA, 120 bp, Artificial Sequence
  ENSG00000064270_0 (sequence is synthesized)
gggtccggcccaggaggcttgggcgcgcgcagccatcccgggcctcgccggggacctagggacgcaggcaacgcctgcgcccgctcaccatggtcgagggacgcgtctccgagttcctga

SEQ ID NO: 44659 - DNA, 120 bp, Artificial Sequence
  ENSG00000064270_1 (sequence is synthesized)
agaaactcggcttctcgggcgggggccgccagtaccaggcgctggagaaggacgaagaggaagccttgattgatgaacagagtgagctgaaagccatcgagaaagagaagaaggtgacag

SEQ ID NO: 44660 - DNA, 120 bp, Artificial Sequence
  ENSG00000064270_2 (sequence is synthesized)
ccctgccccccaaggaagcgtgcaaatgccagaaagaggatttggccagagcgttttgtgtggacttacacactgggctgtcggagttctcggtgacgcagcgccggctggcccatggct

SEQ ID NO: 44661 - DNA, 120 bp, Artificial Sequence
  ENSG00000064270_3 (sequence is synthesized)
ggaatgagtttgttgctgacaacagcgaacctgtgtggaagaaatacctggatcagtttaagaaccccctgatcctgctgctgctgggctctgccctggtgagtgtcctcaccaaggagt

SEQ ID NO: 44662 - DNA, 120 bp, Artificial Sequence
  ENSG00000064270_4 (sequence is synthesized)
atgaggacgccgtcagcatcgccacggcagtgcttgtcgtggtcactgtcgccttcatccaggagtacaggtcggagaaatctctggaagagctgaccaagctggttcctccagaatgta

SEQ ID NO: 44663 - DNA, 120 bp, Artificial Sequence
  ENSG00000064270_5 (sequence is synthesized)
actgcctaagagaaggaaaactccagcacctgcttgctcgagaactggttcctggtgatgtcgtatctctctcgatcggagaccggatccctgcagacatccgactcactgaggtcacgg

SEQ ID NO: 44664 - DNA, 120 bp, Artificial Sequence
  ENSG00000064270_6 (sequence is synthesized)
acctcttggtggatgaatccagtttcaccggggaagccgagccatgtagtaaaacagacagccccttgacaggcggtggggacctcaccaccctcagcaacatcgtcttcatggggaccc

SEQ ID NO: 44665 - DNA, 120 bp, Artificial Sequence
  ENSG00000064270_7 (sequence is synthesized)
tggtgcagtatgggaggggccagggggtcgtgattggaacaggggaaagctctcagttcggagaagtgtttaagatgatgcaggctgaagagacacctaaaactcctttgcagaaaagca

SEQ ID NO: 44666 - DNA, 120 bp, Artificial Sequence
  ENSG00000064270_8 (sequence is synthesized)
tggacaggctaggaaagcaactgacactcttctcctttggcataatcggtctcatcatgctcattggctggtcgcaagggaaacaactcctgagtatgttcacgatcggggtcagcctgg

SEQ ID NO: 44667 - DNA, 120 bp, Artificial Sequence
  ENSG00000064270_9 (sequence is synthesized)
ctgtggcggccattccagagggtctgcccatcgtcgtcatggtgacgctggtcctgggagtgctgcggatggccaagaagcgggtcatcgtgaagaagttacccatcgtggagactttag

SEQ ID NO: 44668 - DNA, 120 bp, Artificial Sequence
  ENSG00000064270_10 (sequence is synthesized)
gttgctgcagcgttctctgttctgacaagacggggactctgactgccaatgaaatgacagtgacccagcttgtaacgtcagatgggcttcgtgccgaggtcagcggagttgggtatgacg

SEQ ID NO: 44669 - DNA, 120 bp, Artificial Sequence
  ENSG00000064270_11 (sequence is synthesized)
gtcaagggactgtgtgtcttctaccatccaaggaagtcattaaggaattttccaatgtctcagtgggaaagttagtggaggcgggctgtgttgccaacaatgcggtcatcagaaagaacg

SEQ ID NO: 44670 - DNA, 120 bp, Artificial Sequence
  ENSG00000064270_12 (sequence is synthesized)
ccgtgatggggcagcccaccgagggtgcattgatggccctggcgatgaagatggacttaagtgatattaaaaattcatatataagaaaaaaagagattccattcagttcagagcagaagt

SEQ ID NO: 44671 - DNA, 120 bp, Artificial Sequence
  ENSG00000064270_13 (sequence is synthesized)
ggatggcggtgaaatgcagtctgaagactgaggatcaggaagacatttacttcatgaaaggggccttggaagaggtgatccgctactgcaccatgtacaacaacgggggcatccccctgc

SEQ ID NO: 44672 - DNA, 120 bp, Artificial Sequence
  ENSG00000064270_14 (sequence is synthesized)
gaggtcattctgcctgcaggaagagaagaggatggggtcgctcggtttgcgggtgctggccctggcttctgggcccgagctggggcggctgacgtttctcggtcttgtgggcatcattga

SEQ ID NO: 44673 - DNA, 120 bp, Artificial Sequence
  ENSG00000064270_15 (sequence is synthesized)
ccccccgagagttggcgtgaaggaagcagtccaggttctctccgagtctggtgtgtctgtgaagatgataacgggggatgccctggagacggccttggccataggaagaaacatcggcct

SEQ ID NO: 44674 - DNA, 120 bp, Artificial Sequence
  ENSG00000064270_16 (sequence is synthesized)
gtgcaacgggaagctgcaagccatgtccggggaggaggtggacagcgtggagaagggcgagctggccgaccgcgtggggaaggtgtccgtgttcttcaggaccagcccaaagcacaagct

SEQ ID NO: 44675 - DNA, 120 bp, Artificial Sequence
  ENSG00000064270_17 (sequence is synthesized)
caaaatcatcaaggctctgcaggagtcaggggcgatcgtggccatgactggggatggggtgaacgacgcagtggccctgaagtctgcagacattgggatcgccatggggcagacagggac

SEQ ID NO: 44676 - DNA, 120 bp, Artificial Sequence
  ENSG00000064270_18 (sequence is synthesized)
ggacgtcagcaaagaggccgccaacatgatcctggtggatgatgacttctcagccatcatgaatgcagtggaggaaggcaagggtattttttacaacatcaaaaactttgtccgattcca

SEQ ID NO: 44677 - DNA, 120 bp, Artificial Sequence
  ENSG00000064270_19 (sequence is synthesized)
gctgagcacgagcatctccgccctgagtctcatcactctgtccaccgtgttcaacctgcccagccccctcaacgccatgcagatcctatggatcaacatcatcatggatgggccaccggc

SEQ ID NO: 44678 - DNA, 120 bp, Artificial Sequence
  ENSG00000064270_20 (sequence is synthesized)
gcagagcttgggggtagagcccgttgacaaagacgccttcaggcagccaccacggagtgtgcgggacaccatcctcagcagagccctcatcctgaagatcctcatgtccgcggccatcat

SEQ ID NO: 44679 - DNA, 120 bp, Artificial Sequence
  ENSG00000064270_21 (sequence is synthesized)
catcagcgggaccctctttatcttctggaaggagatgcctgaagacagagcaagcactccccgcaccacgacgatgacgttcacttgttttgtgtttttcgatctcttcaacgccttgac

SEQ ID NO: 44680 - DNA, 120 bp, Artificial Sequence
  ENSG00000064270_22 (sequence is synthesized)
ctgccgctctcagaccaagctgatatttgagatcggctttctcaggaaccacatgttcctctactccgtcctggggtccatcctggggcagctggcggtcatttacatccccccgctgca

SEQ ID NO: 44681 - DNA, 120 bp, Artificial Sequence
  ENSG00000064270_23 (sequence is synthesized)
gagggtcttccagacggagaacctgggagcgcttgatttgctgtttttaactggattggcctcatccgtcttcattttgtcagagctcctcaaactatgtgaaaaatactgttgcagccc

SEQ ID NO: 44682 - DNA, 120 bp, Artificial Sequence
  ENSG00000064270_24 (sequence is synthesized)
caagagagtccagatgcaccctgaagatgtgtagtggaccgcactccgcggcaccttccctaatcatctcgatctggttgtgactgtggcccctgccgtgtctcctcgtcaggggagact

SEQ ID NO: 44683 - DNA, 120 bp, Artificial Sequence
  ENSG00000064270_25 (sequence is synthesized)
tttaggaggccgcagccttccatcaccggatcagtttttcctcttaggaaagctgcaggaacctcgtgggctccagggacccaggcccacatccatccagcgttcccgctggctgtggga

SEQ ID NO: 44684 - DNA, 120 bp, Artificial Sequence
  ENSG00000064270_26 (sequence is synthesized)
cagacagggaggggcctgtacagaaacaccacactgtttattaaatcacaatgatttttattaaccatgtctaactacgtatctgtgccacagcttgcagtgaggcaggccactcgtggc

SEQ ID NO: 44685 - DNA, 120 bp, Artificial Sequence
  ENSG00000064270_27 (sequence is synthesized)
agatacaaggggctcctgagaggcagtgggtaggatggtcacactctgcccattgccctcctggaggccccatttcctcatcataaaatgagggacttttaaataaagtgctatgccggg

SEQ ID NO: 44686 - DNA, 120 bp, Artificial Sequence
  ENSG00000064270_28 (sequence is synthesized)
atcatcatcagcgggaccctctttatcttctggaaggagctctccctctactactgacggccatccttcagccttccttgtaggaaatgaccttcactctgggtttaactggagtggcat

SEQ ID NO: 44687 - DNA, 120 bp, Artificial Sequence
  ENSG00000064270_29 (sequence is synthesized)
ataggtgccctgcccccatcctcatggtggcagcaaatcagcatgtgctggggagaccctggggtagcagccactgacctcacacctggaggaagctgtgtgaccgattcatgagcttgt

SEQ ID NO: 44688 - DNA, 120 bp, Artificial Sequence
  ENSG00000064270_30 (sequence is synthesized)
agactagaaccaggacactggggacacctaagacaagcttcaccagccaaaagcattgccagccccagctgagagtcacacactccttaaatgtgttagaggggactcatttgacctttc

SEQ ID NO: 44689 - DNA, 120 bp, Artificial Sequence
  ENSG00000064270_31 (sequence is synthesized)
agctgatgaggggctctgcggagggcggagcctggagcctgtttctccaggcgcaacgttggggggggtcccctcggggtgatggagatcatctgggtgtatggaactgtgtgtggttgg

SEQ ID NO: 44690 - DNA, 120 bp, Artificial Sequence
  ENSG00000064270_32 (sequence is synthesized)
ccttacggggtggtcttccttcactgtctgcgggacagatggaggggcacagctgcccatggacccaggctctggggcttctggaaggtgccgaggagggcaggtgcgatgcctgggggc

SEQ ID NO: 44691 - DNA, 120 bp, Artificial Sequence
  ENSG00000064270_33 (sequence is synthesized)
gttcagcaaatgcctggccctgccccctgtgccaacttggcctgggaggctcaggcacagctgtttcaagggtcctttatttcattcctggttcatttcaaagtgtctgtgtcttgttcg

SEQ ID NO: 44692 - DNA, 120 bp, Artificial Sequence
  ENSG00000064270_34 (sequence is synthesized)
catcagcgggaccctctttatcttctggaaggaggtgagcgagggtcaccccggcctgttctccaagccctggtgcggtgcagacgctggggactgcagtccctgccctcctgccacagc

SEQ ID NO: 44693 - DNA, 120 bp, Artificial Sequence
  ENSG00000064270_35 (sequence is synthesized)
tcacatctgggagaggcaaacatgtacacacaccggacaatgtgatgccatcagaggcgtggggtgcatgaggcaaagggactgggtgacccttgaaagaagggaggtcgccaggtgtgt

SEQ ID NO: 44694 - DNA, 120 bp, Artificial Sequence
  ENSG00000064270_36 (sequence is synthesized)
agttgaaatgtacatgaggacaggctgccccctgttcccttgtcaccaggaaacaatttgaaatctgctaaatatcctcctgtgttacactctagaggtgattgtttgctttggatctag

SEQ ID NO: 44695 - DNA, 120 bp, Artificial Sequence
  ENSG00000064270_37 (sequence is synthesized)
gcctgggtcaccttttcatggcctgcaggttcagggagctctatgccaggacgggccacgatctaggtgggaaatgaggcaggtgacccatgtgaccacaccacagattgcccatgtgca

SEQ ID NO: 44696 - DNA, 120 bp, Artificial Sequence
  ENSG00000064270_38 (sequence is synthesized)
aggatggaggttgtctcttcccgcctaacctctcacctttgtgctcaccttccagatgcctgaagacagagcaagcactccccgcaccacgacgatgacgttcacttgttttgtgttttt

SEQ ID NO: 44697 - DNA, 120 bp, Artificial Sequence
  ENSG00000064270_39 (sequence is synthesized)
tatggccgccccttgccttgccagggtggtcaatgggctctgagcccttccctgccgcaagagaaggtggggaggctgcagaataggaagggttgggaaggtgcagccccgtcacccaaa

SEQ ID NO: 44698 - DNA, 120 bp, Artificial Sequence
  ENSG00000064270_40 (sequence is synthesized)
ctccagcctcccaatagcatgttctccgacaggtacagagtgcccggcgaatgcttgcaaaatgaatgacagcaaatgatccagggtgtcccttttgtattaggctgttcttgcattgct

SEQ ID NO: 44699 - DNA, 120 bp, Artificial Sequence
  ENSG00000064270_41 (sequence is synthesized)
attcatcgatgcgttttggcagcaaaataggcttctggtgacagggaactcatcacctcacaaggcagccctgttcctctgtctcaggagtctcaccattaggaattctaccttagcacg

SEQ ID NO: 44700 - DNA, 120 bp, Artificial Sequence
  ENSG00000064270_42 (sequence is synthesized)
gcgtaaggctctggacgggatggcagggaggcactaggctggtgctctgaggaggtggcatctgggcagagatctgagtgaaatgagacggaaagccatgtgaggatgtggatggagggc

SEQ ID NO: 44701 - DNA, 120 bp, Artificial Sequence
  ENSG00000064270_43 (sequence is synthesized)
tctgccctggtgagtgtcctcaccaaggagtatgaggacgccgtcagcatcgccacggcagtgcttgtcgtggtcactgtcgccttcatccaggtgagtatttcctgaggtcccagtcag

SEQ ID NO: 44702 - DNA, 120 bp, Artificial Sequence
  ENSG00000064270_44 (sequence is synthesized)
acctttaaacagcacatctgatgtgcttcctgccaggagtacaggtcggagaaatctctggaagagctgaccaagctggttcctccagaatgtaactggtaagtcagagcctccctggga

SEQ ID NO: 44703 - DNA, 120 bp, Artificial Sequence
  ENSG00000064270_45 (sequence is synthesized)
ctttttggttcactggaggagccagggagctggagagtttggcaaatgtttgctgaaagttgtatccttggtagtgtcggacaagagaaccacatctcactgggagttctaaggcctggt

SEQ ID NO: 44704 - DNA, 120 bp, Artificial Sequence
  ENSG00000064270_46 (sequence is synthesized)
gtgggtccccggaggcttggctggcagtggggctgggtcacagctttgaaatctgattcttcgtcttccccgtctccgtgtccaggtgtccgtgttcttcaggaccagcccaaagcacaa

SEQ ID NO: 44705 - DNA, 120 bp, Artificial Sequence
  ENSG00000064270_47 (sequence is synthesized)
tttctgctccctctgcctggatgctctctctgggcaacctgcatggctcattctcatgcttcattccagtcaccagtcactgccttcaggaagtcttccctgattgcactcccactcaat

SEQ ID NO: 44706 - DNA, 120 bp, Artificial Sequence
  ENSG00000064270_48 (sequence is synthesized)
cccctcaccctgctgtatttttccctagagaggaagatacacacagacacacttttccttatggatctgattgtgatctgtctcccctttagaacatcagtttcatggaggcggagtttg

SEQ ID NO: 44707 - DNA, 120 bp, Artificial Sequence
  ENSG00000064270_49 (sequence is synthesized)
tgtttcatccctgatgtctagagataaagggcttgccactcagtaggtgctcaggagtccacccgctccgccacttaatatccccttcaacaagctggccaagtggtgtgggggaaggaa

SEQ ID NO: 44708 - DNA, 120 bp, Artificial Sequence
  ENSG00000064270_50 (sequence is synthesized)
tgcgctttggagtcaggggacccatctggccacgtgtgcgtaaccgtatgagcacagagccagtgcttccgctggagctcagtgctgctgttatcaccagtgatagctgccaagggaaag

SEQ ID NO: 44709 - DNA, 120 bp, Artificial Sequence
  ENSG00000064270_51 (sequence is synthesized)
agagtcctcatttgtgtccccaaagccaagtgtgagggttacctctcctgccagccctccctgggagcagaagtgggaccaggaagctggcctcagctgtgtctgagcggcagggcctca

SEQ ID NO: 44710 - DNA, 120 bp, Artificial Sequence
  ENSG00000064270_52 (sequence is synthesized)
tgctgtgtgttctcgacagcagcgccccgaccctgcccgcagcattgagcggctctggctcagcgtgggcagtcagagctcccctgcctgtacctggggtgtggacagcacacaatcccc

SEQ ID NO: 44711 - DNA, 120 bp, Artificial Sequence
  ENSG00000064270_53 (sequence is synthesized)
cgtgtgaccttctccctgcagaccaagctgatatttgagatcggctttctcaggaaccacatgttcctctactccgtcctggggtccatcctggggcagctggcggtcatttacatcccc

SEQ ID NO: 44712 - DNA, 120 bp, Artificial Sequence
  ENSG00000064270_54 (sequence is synthesized)
gaatcaacagaatttgtctttttgtgactggtttatttcacttaacttcatcctcaaggttcaacttaaaggtgtatccatgttgtagcacgtgtcagcattttctttcgttctcaggct

SEQ ID NO: 44713 - DNA, 120 bp, Artificial Sequence
  ENSG00000064270_55 (sequence is synthesized)
aaatagtatttcattgtgtgtgtacaccatgtttcatgcattcattcatcccttgaaagattggtgggttgtttcctcctttttgcttttgtgaacagtgctacgaacatggttgtacaa

SEQ ID NO: 44714 - DNA, 120 bp, Artificial Sequence
  ENSG00000064270_56 (sequence is synthesized)
acatctcttggagccccactagcagttcctttgggtatataccccaaagtggaattgctggatctggtagctccctttttaattttttgaggaatcgccacacagtttccataacagctg

SEQ ID NO: 44715 - DNA, 120 bp, Artificial Sequence
  ENSG00000064270_57 (sequence is synthesized)
caccattttacattcccaagaccttttttttttttttttttttaagaagaaaagatgtgtttctgcatttctggaagtctatgctgcatttccatttgttgaaatttaagaccagagtcg

SEQ ID NO: 44716 - DNA, 120 bp, Artificial Sequence
  ENSG00000064270_58 (sequence is synthesized)
tcttttctgctgtaattataatggtcactggcttgtgccttttcctcctctctctgccccatctgcacggggtctttgaacaagtcccagcaccttggtggacaagcctgtgtccctggc

SEQ ID NO: 44717 - DNA, 120 bp, Artificial Sequence
  ENSG00000064270_59 (sequence is synthesized)
ccatcatggaagccgctgcctttcagagtgggagtctgtaccctgttgcctcattccttgctgcgcccatgagtgagcttgtgcctgacctctccttccaggtggacttacacactgggc

SEQ ID NO: 44718 - DNA, 120 bp, Artificial Sequence
  ENSG00000064300_0 (sequence is synthesized)
agagcgagccgagccgcggccagctccggcgggcagggggggcgctggagcgcagcgcagcgcagccccatcagtccgcaaagcggaccgagctggaagtcgagcgctgccgcgggaggc

SEQ ID NO: 44719 - DNA, 120 bp, Artificial Sequence
  ENSG00000064300_1 (sequence is synthesized)
gggcgatgggggcaggtgccaccggccgcgccatggacgggccgcgcctgctgctgttgctgcttctgggggtgtcccttggaggtgccaaggaggcatgccccacaggcctgtacacac

SEQ ID NO: 44720 - DNA, 120 bp, Artificial Sequence
  ENSG00000064300_2 (sequence is synthesized)
acagcggtgagtgctgcaaagcctgcaacctgggcgagggtgtggcccagccttgtggagccaaccagaccgtgtgtgagccctgcctggacagcgtgacgttctccgacgtggtgagcg

SEQ ID NO: 44721 - DNA, 120 bp, Artificial Sequence
  ENSG00000064300_3 (sequence is synthesized)
cgaccgagccgtgcaagccgtgcaccgagtgcgtggggctccagagcatgtcggcgccgtgcgtggaggccgacgacgccgtgtgccgctgcgcctacggctactaccaggatgagacga

SEQ ID NO: 44722 - DNA, 120 bp, Artificial Sequence
  ENSG00000064300_4 (sequence is synthesized)
ctgggcgctgcgaggcgtgccgcgtgtgcgaggcgggctcgggcctcgtgttctcctgccaggacaagcagaacaccgtgtgcgaggagtgccccgacggcacgtattccgacgaggcca

SEQ ID NO: 44723 - DNA, 120 bp, Artificial Sequence
  ENSG00000064300_5 (sequence is synthesized)
accacgtggacccgtgcctgccctgcaccgtgtgcgaggacaccgagcgccagctccgcgagtgcacacgctgggccgacgccgagtgcgaggagatccctggccgttggattacacggt

SEQ ID NO: 44724 - DNA, 120 bp, Artificial Sequence
  ENSG00000064300_6 (sequence is synthesized)
ccacacccccagagggctcggacagcacagcccccagcacccaggagcctgaggcacctccagaacaagacctcatagccagcacggtggcaggtgtggtgaccacagtgatgggcagct

SEQ ID NO: 44725 - DNA, 120 bp, Artificial Sequence
  ENSG00000064300_7 (sequence is synthesized)
cccagcccgtggtgacccgaggcaccaccgacaacctcatccctgtctattgctccatcctggctgctgtggttgtgggccttgtggcctacatagccttcaagaggtggaacagctgca

SEQ ID NO: 44726 - DNA, 120 bp, Artificial Sequence
  ENSG00000064300_8 (sequence is synthesized)
agcagaacaagcaaggagccaacagccggccagtgaaccagacgcccccaccagagggagaaaaactccacagcgacagtggcatctccgtggacagccagagcctgcatgaccagcagc

SEQ ID NO: 44727 - DNA, 120 bp, Artificial Sequence
  ENSG00000064300_9 (sequence is synthesized)
cccacacgcagacagcctcgggccaggccctcaagggtgacggaggcctctacagcagcctgcccccagccaagcgggaggaggtggagaagcttctcaacggctctgcgggggacacct

SEQ ID NO: 44728 - DNA, 120 bp, Artificial Sequence
  ENSG00000064300_10 (sequence is synthesized)
ggcggcacctggcgggcgagctgggctaccagcccgagcacatagactcctttacccatgaggcctgccccgttcgcgccctgcttgcaagctgggccacccaggacagcgccacactgg

SEQ ID NO: 44729 - DNA, 120 bp, Artificial Sequence
  ENSG00000064300_11 (sequence is synthesized)
acgccctcctggccgccctgcgccgcatccagcgagccgacctcgtggagagtctgtgcagtgagtccactgccacatccccggtgtgagcccaaccggggagcccccgccccgccccac

SEQ ID NO: 44730 - DNA, 120 bp, Artificial Sequence
  ENSG00000064300_12 (sequence is synthesized)
attccgacaaccgatgctccagccaacccctgtggagcccgcacccccaccctttggggggggcccgcctggcagaactgagctcctctgggcaggacctcagagtccaggccccaaaac

SEQ ID NO: 44731 - DNA, 120 bp, Artificial Sequence
  ENSG00000064300_13 (sequence is synthesized)
cacagccctgtcagtgcagcccgtgtggccccttcacttctgaccacacttcctgtccagagagagaagtgcccctgctgcctccccaaccctgcccctgccccgtcaccatctcaggcc

SEQ ID NO: 44732 - DNA, 120 bp, Artificial Sequence
  ENSG00000064300_14 (sequence is synthesized)
cagcaggtgtcatatatggggggccaacaccagggatggtactagggggaagtgacaaggccccagagactcagagggaggaatcgaggaaccagagccatggactctacactgtgaact

SEQ ID NO: 44733 - DNA, 120 bp, Artificial Sequence
  ENSG00000064300_15 (sequence is synthesized)
tggggaacaagggtggcatcccagtggcctcaaccctccctcagcccctcttgccccccaccccagcctaagatgaagaggatcggaggcttgtcagagctgggaggggttttcgaagct

SEQ ID NO: 44734 - DNA, 120 bp, Artificial Sequence
  ENSG00000064300_16 (sequence is synthesized)
cagcccacccccctcattttggatataggtcagtgaggcccagggagaggccatgattcgcccaaagccagacagcaacggggaggccaagtgcaggctggcaccgccttctctaaatga

SEQ ID NO: 44735 - DNA, 120 bp, Artificial Sequence
  ENSG00000064300_17 (sequence is synthesized)
ggggcctcaggtttgcctgagggcgaggggagggtggcaggtgaccttctgggaaatggcttgaagccaagtcagctttgccttccacgctgtctccagacccccaccccttccccactg

SEQ ID NO: 44736 - DNA, 120 bp, Artificial Sequence
  ENSG00000064300_18 (sequence is synthesized)
cctgcccacccgtggagatgggatgcttgcctagggcctggtccatgatggagtcaggtttggggttcgtggaaagggtgctgcttccctctgcctgtccctctcaggcatgcctgtgtg

SEQ ID NO: 44737 - DNA, 120 bp, Artificial Sequence
  ENSG00000064300_19 (sequence is synthesized)
acatcagtggcatggctccagtctgctgccctccatcccgacatggacccggagctaacactggcccctagaatcagcctaggggtcagggaccaaggacccctcaccttgcaacacaca

SEQ ID NO: 44738 - DNA, 120 bp, Artificial Sequence
  ENSG00000064300_20 (sequence is synthesized)
gacacacgcacacacacacacaggaggagaaatctcacttttctccatgagttttttctcttgggctgagactggatactgcccggggcagctgccagagaagcatcggagggaattgag

SEQ ID NO: 44739 - DNA, 120 bp, Artificial Sequence
  ENSG00000064300_21 (sequence is synthesized)
gtctgctcggccgtcttcactcgcccccgggtttggcgggccaaggactgccgaccgaggctggagctggcgtctgtcttcaagggcttacacgtggaggaatgctcccccatcctcccc

SEQ ID NO: 44740 - DNA, 120 bp, Artificial Sequence
  ENSG00000064300_22 (sequence is synthesized)
ttccctgcaaacatggggttggctgggcccagaaggttgtgatgaagaaaagtgggccagtgtgggaatgcggcaagaaggaattgacttcgactgtgacctgtggggatttctcccagc

SEQ ID NO: 44741 - DNA, 120 bp, Artificial Sequence
  ENSG00000064300_23 (sequence is synthesized)
tctagacaaccctgcaaaggactgttttttcctgagcttggccagaagggggccatgaggcctcagtggactttccaccccctccctggcctgttctgttttgcctgaagttggagtgag

SEQ ID NO: 44742 - DNA, 120 bp, Artificial Sequence
  ENSG00000064300_24 (sequence is synthesized)
tgtggctcccctctatttagcatgacaagccccaggcaggctgtgcgctgacaaccaccgctccccagcccagggttcccccagccctgtggaagggactaggagcactgtagtaaatgg

SEQ ID NO: 44743 - DNA, 120 bp, Artificial Sequence
  ENSG00000064300_25 (sequence is synthesized)
caattctttgacctcaacctgtgatgaggggaggaaactcacctgctggcccctcacctgggcacctggggagtgggacagagtctgggtgtatttattttcctccccagcaggtgggga

SEQ ID NO: 44744 - DNA, 120 bp, Artificial Sequence
  ENSG00000064300_26 (sequence is synthesized)
gggggtttgggggcttgcaagtatgttttagcatgtgtttggttctggggcccctttttactccccttgagctgagatggaacccttttggcccccgagctgggggccatgagctccaga

SEQ ID NO: 44745 - DNA, 120 bp, Artificial Sequence
  ENSG00000064300_27 (sequence is synthesized)
cccccagcaaccctcctatcacctcccctccttgcctcctgtgtaatcatttcttgggccctcctgaaacttacacacaaaacgttaagtgatgaacattaaatagcaaagaaagaaaaa

SEQ ID NO: 44746 - DNA, 120 bp, Artificial Sequence
  ENSG00000064300_28 (sequence is synthesized)
gtagaccaggagagcggggaggagggaccggatcccagaggggcaacgacttgggctccgggtctgggcaagagcgagggtccccgcgcgaagacccaaggaaggaggggagctgggcgt

SEQ ID NO: 44747 - DNA, 120 bp, Artificial Sequence
  ENSG00000064300_29 (sequence is synthesized)
ggaggacctgggcgcttgggaaggtgtaccccgacaggaacctgccgtctgcagcccctgcggctcccgcctccgcctcggcgcgcggctgctcggtctgggatggctgtgcgcggtccg

SEQ ID NO: 44748 - DNA, 120 bp, Artificial Sequence
  ENSG00000064300_30 (sequence is synthesized)
gagtctggggctgcgcgccgctccccacctagctgcgcgacccgagcgccgcgcccaccgcgctccgtgggctcccgcgcctcgaagggtcgggatccggtctgagcctctcctggctct

SEQ ID NO: 44749 - DNA, 120 bp, Artificial Sequence
  ENSG00000064300_31 (sequence is synthesized)
cggtgcaagccgctgggcacctaacgagacgggggcgcccggacgcctcggattctgtagcgcggtatcccgggccaccgactcggcaaaggtcggcgggtcctccgggtggtccgacga

SEQ ID NO: 44750 - DNA, 120 bp, Artificial Sequence
  ENSG00000064300_32 (sequence is synthesized)
gcactgcgccccaaattccggctttacagatacggagactgaggctctgagagtttaaacgacttggccaagatctcacagcaagttgggccagagtcgtggctagactccccgacctga

SEQ ID NO: 44751 - DNA, 120 bp, Artificial Sequence
  ENSG00000064309_0 (sequence is synthesized)
gtctctccaagggaatgaaaggtgaggggagcgtgagtgcaggcatgatgggaatctccgtgacttgtgaaccaaggactgggttttgctctggaagcctgtcctgattgcttctgtaat

SEQ ID NO: 44752 - DNA, 120 bp, Artificial Sequence
  ENSG00000064309_1 (sequence is synthesized)
ctggcgctatgcatccggatcttggacccttatgtacactgctgtatgttactcttacaattctgtgctcttctgtgagttcagacttggcaccttattttacttctgagccgctctctg

SEQ ID NO: 44753 - DNA, 120 bp, Artificial Sequence
  ENSG00000064309_2 (sequence is synthesized)
ctgtccagaaacttggtggacctgtagtactgcattgttctgctcaacctgtgaccactcgtatctcatggctgcataacggaaaaacattggatggaaacctggaacatgttaagattc

SEQ ID NO: 44754 - DNA, 120 bp, Artificial Sequence
  ENSG00000064309_3 (sequence is synthesized)
atcaggggactctgacaattctttctctcaactcctctcttttgggttactaccagtgccttgccaacaatagcatcggtgccattgtgagtggccctgcgacagtatctgtggcagttc

SEQ ID NO: 44755 - DNA, 120 bp, Artificial Sequence
  ENSG00000064309_4 (sequence is synthesized)
ttggtgattttggttcatccacaaagcatgttattacagcagaagaaaaaagtgctggtttcattggctgcagggtaccggagagtaaccccaaagctgaggtgcgctataaaatccggg

SEQ ID NO: 44756 - DNA, 120 bp, Artificial Sequence
  ENSG00000064309_5 (sequence is synthesized)
gaaaatggctggaacattccacagagaattacttaatccttccatcaggaaatcttcagattttgaatgtatccttagaggacaagggatcatacaaatgtgcagcttataatcctgtca

SEQ ID NO: 44757 - DNA, 120 bp, Artificial Sequence
  ENSG00000064309_6 (sequence is synthesized)
cacatcaattaaaagttgaacctattggccgaaagctccttgtgagtcgtccttcttcagatgatgttcacattcttcaccccacccattcacaggcattagctgttctttctcgtagcc

SEQ ID NO: 44758 - DNA, 120 bp, Artificial Sequence
  ENSG00000064309_7 (sequence is synthesized)
ctgtaaccttggagtgtgtggtgagtggggtcccggctcctcaagtgtattggctaaaggacgggcaggacattgcaccaggaagcaactggagaaggttgtattctcatcttgccactg

SEQ ID NO: 44759 - DNA, 120 bp, Artificial Sequence
  ENSG00000064309_8 (sequence is synthesized)
atagcgttgacccggcggactccggaaactattcctgcatggcgggaaacaagtctggagatgtaaaatatgtgacttacatggttaatgtacttgaacatgcttccatttctaaaggac

SEQ ID NO: 44760 - DNA, 120 bp, Artificial Sequence
  ENSG00000064309_9 (sequence is synthesized)
tacaggatcagatagtgtctctgggtgccacagtacactttacctgcgacgttcatgggaacccagcccccaactgtacctggtttcacaatgcacagcctattcatccttctgcacgac

SEQ ID NO: 44761 - DNA, 120 bp, Artificial Sequence
  ENSG00000064309_10 (sequence is synthesized)
atctaactgcaggaaacggactgaaaatcagtggggttactgtggaagatgttgggatgtatcagtgtgtagcagataatgggattggatttatgcactctactggaagacttgaaattg

SEQ ID NO: 44762 - DNA, 120 bp, Artificial Sequence
  ENSG00000064309_11 (sequence is synthesized)
aaaatgacggtggattcaagccagttataattacggcaccagtaagtgcaaaggttgcagacggagactttgttactctgtcctgcaatgccagtgggctgccggttccggtcattcgtt

SEQ ID NO: 44763 - DNA, 120 bp, Artificial Sequence
  ENSG00000064309_12 (sequence is synthesized)
ggtatgacagccatggattgataaccagccatccatctcaagtcctgagatcgaaatcccgaaaatcacagttatcaagacctgagggcttgaacctggagcctgtgtacttcgtcctgt

SEQ ID NO: 44764 - DNA, 120 bp, Artificial Sequence
  ENSG00000064309_13 (sequence is synthesized)
cccaagctggtgcaagctctctccatattcaggctgtgactcaggaacatgcggggaaatacatctgcgaagctgcaaatgaacatggtaccacacaggcagaagcatctctcatggttg

SEQ ID NO: 44765 - DNA, 120 bp, Artificial Sequence
  ENSG00000064309_14 (sequence is synthesized)
ttccttttgaaacaaatacaaaagcagagacagtcacacttcctgatgctgctcagaatgatgacagaagtaagagagatggttcagaaactgggttactgagctcatttccggtgaagg

SEQ ID NO: 44766 - DNA, 120 bp, Artificial Sequence
  ENSG00000064309_15 (sequence is synthesized)
tccatcccagtgcagtggaatcagcaccagagaaaaacgccagcggcatctctgttcctgatgcccccatcatactgagccccccacagacccacacaccagacacgtacaacctggtgt

SEQ ID NO: 44767 - DNA, 120 bp, Artificial Sequence
  ENSG00000064309_16 (sequence is synthesized)
ggagggcaggcaaggatggtgggctgcccatcaatgcttactttgtgaagtatcgaaagctggatgatggggttggcatgctgggaagctggcacacggttcgagtcccaggaagtgaaa

SEQ ID NO: 44768 - DNA, 120 bp, Artificial Sequence
  ENSG00000064309_17 (sequence is synthesized)
cagcaaagaaaaaacagcgtcatcaaaaaacacccaggcatcctctccacccgtgggcatccctaagtatcccgttgtttcagaggctgcaaacaacaattttggagtggtacttacaga

SEQ ID NO: 44769 - DNA, 120 bp, Artificial Sequence
  ENSG00000064309_18 (sequence is synthesized)
ttcctctaggcacagtggagttccagaggcaccagatcggcctaccatctccactgcatcagagacatcagtctatgtcacttggattcctcgggcaaacgggggttctccaatcactgc

SEQ ID NO: 44770 - DNA, 120 bp, Artificial Sequence
  ENSG00000064309_19 (sequence is synthesized)
cttcaaagtcgaatataaacggatgaggaccagcaattggctggtggcagctgaagacatccctccttccaaactttcagtggaagttcgtagtttagaaccaggttcaacatacaaatt

SEQ ID NO: 44771 - DNA, 120 bp, Artificial Sequence
  ENSG00000064309_20 (sequence is synthesized)
tagggtcattgccatcaaccattatggtgagagttttcggagttcagcatctcgtccttatcaagtggttgggttccccaatcgcttttccagccgtccaataactggacctcacattgc

SEQ ID NO: 44772 - DNA, 120 bp, Artificial Sequence
  ENSG00000064309_21 (sequence is synthesized)
atacacagaggctgtcagcgatactcagatcatgctaaagtggacgtacattccatcaagtaacaataacactcccattcaaggattttatatctattaccgaccaacagatagtgacaa

SEQ ID NO: 44773 - DNA, 120 bp, Artificial Sequence
  ENSG00000064309_22 (sequence is synthesized)
tgacagtgattacaagagggatgttgtagaaggttcaaagcagtggcacatgattggccacctgcagccagaaacctcctatgacattaaaatgcaatgcttcaatgaaggaggagaaag

SEQ ID NO: 44774 - DNA, 120 bp, Artificial Sequence
  ENSG00000064309_23 (sequence is synthesized)
tgaatttagcaatgtgatgatctgcgagactaaagtgaaacgtgttcctggagcttctgaatatcctgtcaaagacttgagtacccctccaaattctttgggaagtggaggaaatgtggg

SEQ ID NO: 44775 - DNA, 120 bp, Artificial Sequence
  ENSG00000064309_24 (sequence is synthesized)
gcctgcaaccagccctgccagaagcagtgacatgttatatctgatcgttggctgtgtgctgggcgtcatggtcctcattctgatggttttcattgcaatgtgcctgtggaagaatcgcca

SEQ ID NO: 44776 - DNA, 120 bp, Artificial Sequence
  ENSG00000064309_25 (sequence is synthesized)
gcagaataccatacaaaaatatgacccaccaggatatctctaccaaggatcagatatgaacgggcagatggtggactacaccactctctcaggagcaagtcagataaatggaaatgttca

SEQ ID NO: 44777 - DNA, 120 bp, Artificial Sequence
  ENSG00000064309_26 (sequence is synthesized)
cggaggcttcctaaccaatggcggtctcagcagtggctattcccaccttcaccataaggtccccaatgcagtcaatggaattgtgaatgggagcctaaatggagggctttactccgggca

SEQ ID NO: 44778 - DNA, 120 bp, Artificial Sequence
  ENSG00000064309_27 (sequence is synthesized)
cagcaactctctaaccaggacacacgtggattttgaacatcctcatcatctagtgaatggtggtggaatgtacacggccgtgcctcagattgaccctctggagtgtgttaactgccgaaa

SEQ ID NO: 44779 - DNA, 120 bp, Artificial Sequence
  ENSG00000064309_28 (sequence is synthesized)
ttgtcgaaacaacaataggtgtttcaccaaaaccaacagcactttcagcagcagccctcctcctgtggtccctgtggtagcaccttatcctcaggatggtttggaaatgaagcccctcag

SEQ ID NO: 44780 - DNA, 120 bp, Artificial Sequence
  ENSG00000064309_29 (sequence is synthesized)
tcacgtgaaggtgcctgtatgcctgacttccgcagtccctgattgtggccagttgccggaggagagcgtcaaggacaatgtggaaccagtccctactcagcgtacctgctgtcaggacat

SEQ ID NO: 44781 - DNA, 120 bp, Artificial Sequence
  ENSG00000064309_30 (sequence is synthesized)
tgtaaatgacgtcagctctgatggctcagaagatccagcagagttcagcagaggagacagctgtgcccattcagaaacagagatcaacattgtaagttggaatgctcttattttgccacc

SEQ ID NO: 44782 - DNA, 120 bp, Artificial Sequence
  ENSG00000064309_31 (sequence is synthesized)
tgtccccgagggctgtgctgagaagacaatgtggtctccacctggcattcctttagacagcccgacagaggtccttcagcagccccgggaaacctgaggacatgcaaacaaccagtcatg

SEQ ID NO: 44783 - DNA, 120 bp, Artificial Sequence
  ENSG00000064309_32 (sequence is synthesized)
ttccaacttcaagccggtaactgcacacaacaggcctgggagcgaactgtgtgaaggaccttaattcaaatcagagaaaatcattatttatttttttgtagtagtaatgtcatatgaatg

SEQ ID NO: 44784 - DNA, 120 bp, Artificial Sequence
  ENSG00000064309_33 (sequence is synthesized)
tatcttaaaacgtgtgcccttttatattatttatgccttaaatgttttcttccccattccttcctccccctcggtaggaaacaaccttgttttgcatagtattcagtcacctggagggca

SEQ ID NO: 44785 - DNA, 120 bp, Artificial Sequence
  ENSG00000064309_34 (sequence is synthesized)
gctctgatggctcagaagatccagcagagttcagcagaggtcaggaaggcatgatcaaccttaggattccagatcatcttcagttagctaagagctgtgtatgggaaggagacagctgtg

SEQ ID NO: 44786 - DNA, 120 bp, Artificial Sequence
  ENSG00000064309_35 (sequence is synthesized)
atctcttggctgcttcggctaggagggaatgcaggggcccgttgaaggttgccaccagctgggttttcaggtggaaaatggtctttcaatagtgtattctcagacttttttttgtttgtt

SEQ ID NO: 44787 - DNA, 60 bp, Artificial Sequence
  ENSG00000064309_36 (sequence is synthesized)
ggcacctgccaccacgtccagctaattgtcttgtatttttattagagacaaggttgagga

SEQ ID NO: 44788 - DNA, 120 bp, Artificial Sequence
  ENSG00000064309_37 (sequence is synthesized)
gccaccacgtctggcctgtattatcagacttcctgagaacactttgaaatcaactgcagttgtgacccatgtttataataacagacctggctgacggattttacaagagtgccttccaca

SEQ ID NO: 44789 - DNA, 120 bp, Artificial Sequence
  ENSG00000064309_38 (sequence is synthesized)
gaagtggtaatgtgacctgttgactttgtatctgcacgtgggcacgagtgatgttcagtttgctaggcactagtcatagtgttatggacgtggtggagtgtaaggtcttgatgaattacg

SEQ ID NO: 44790 - DNA, 120 bp, Artificial Sequence
  ENSG00000064309_39 (sequence is synthesized)
gcagtatgcagaaaaggaaccaaggccagagagacaaataatgcctcatgtcccactgctttaaaattacattaatttataaaatggccactatgggctctttttgactgtttctcggag

SEQ ID NO: 44791 - DNA, 120 bp, Artificial Sequence
  ENSG00000064309_40 (sequence is synthesized)
taggaacaaaataagacattaaatggtggcttgaagagaaagatacacattttcagaagaaagaaaggggagggctgcagggagcctgtcttggcgggagctctccagtctgttggatta

SEQ ID NO: 44792 - DNA, 120 bp, Artificial Sequence
  ENSG00000064309_41 (sequence is synthesized)
gcacagggacacgcttatggtgccatgacgccgaaactagtcatcccccatctccagcataggcaacggcctgcaggggtgagtgtcagaaaagacttactttggaagaaaagggttttt

SEQ ID NO: 44793 - DNA, 120 bp, Artificial Sequence
  ENSG00000064309_42 (sequence is synthesized)
tttgtttttttttgtttgtttgttttgggtttttttcctgaaatttcctgatacctttttcagaatgtcacccttgtaaataggcacctaaagccaagttggtcagcagagctcctgacc

SEQ ID NO: 44794 - DNA, 120 bp, Artificial Sequence
  ENSG00000064309_43 (sequence is synthesized)
agcagagctcctgaccacggctgcctctgcgtgacaaggacatttgcagctgcctttggaaggctcttcacattaaaaaacaataattatgtaagtgtgtttcatagcttgagtcaagct

SEQ ID NO: 44795 - DNA, 120 bp, Artificial Sequence
  ENSG00000064309_44 (sequence is synthesized)
ttcaaggatcactgctcctttgtgcattgtgcatccctttggggaaagaaacagaaaattattctctttctatagagtcaagcaattccagcagaagtgaagaaatgttagtttcccaga

SEQ ID NO: 44796 - DNA, 120 bp, Artificial Sequence
  ENSG00000064309_45 (sequence is synthesized)
aatcgcagtggaatagaatacaatactgtgttaaccaactttctgtataaatgcatcagtattcccttacatatgtctatatattttataatagaactgttagtgaaaatgtgcttgttt

SEQ ID NO: 44797 - DNA, 120 bp, Artificial Sequence
  ENSG00000064309_46 (sequence is synthesized)
aagctgggtcactatgcaagagttacttccagtagaatgtagtgaatgtaattccctagtcggatattagggatgctgtagacccaagttctacattccagatgtccgtgcctatagtat

SEQ ID NO: 44798 - DNA, 120 bp, Artificial Sequence
  ENSG00000064309_47 (sequence is synthesized)
actggatttattcttcatgttgcttaaatgcagttagctctggagggggatagctgcatcccttacttctgtgactagcaaaggacaaagtcccagcgcacagaatatgaaaacataccc

SEQ ID NO: 44799 - DNA, 120 bp, Artificial Sequence
  ENSG00000064309_48 (sequence is synthesized)
tgtgttagccaatcaagttacagcaatgctgtcacaaagggagttttagaaaactggggagtcattgtccgtagacagccattttgatttaggaaacaggtgtattagcatgagccttag

SEQ ID NO: 44800 - DNA, 120 bp, Artificial Sequence
  ENSG00000064309_49 (sequence is synthesized)
gtcatgaactgcttttaaagattgagtttgaatatgggatctgtccacgaggaagagaaaatggctttacctttaggacaatctcattgtggactgctttatttatattattagtaacgc

SEQ ID NO: 44801 - DNA, 120 bp, Artificial Sequence
  ENSG00000064309_50 (sequence is synthesized)
tatatataattgcctttatatttaggcggtatgagttctccctaagcgtgagttggctctgccctgcacaggcacccaaacagtcctacctaatgtcacttcaccaggaaatgagaggac

SEQ ID NO: 44802 - DNA, 120 bp, Artificial Sequence
  ENSG00000064309_51 (sequence is synthesized)
atggtacagtgtgggagacagcactaacacgtgctgaataactactgtgtaccaggcactgtgctcggtgcttgttactgttaactcatttaacccccacaactcatctacaaagttggc

SEQ ID NO: 44803 - DNA, 120 bp, Artificial Sequence
  ENSG00000064309_52 (sequence is synthesized)
attaaaatccccaagtcactcagtgagccatgggacctgaatccgaacctagtttatctggagccataatctgggctcctcccatttttccatactgctttccaaaagcattgtggttca

SEQ ID NO: 44804 - DNA, 120 bp, Artificial Sequence
  ENSG00000064309_53 (sequence is synthesized)
ctctttggatggaaccagtcccgttccgtatgctgtgatctatccctgccgtggaattcctccgaggctccaactccgcagccagagaagctgctctctggcctccgcgggcagagctct

SEQ ID NO: 44805 - DNA, 120 bp, Artificial Sequence
  ENSG00000064309_54 (sequence is synthesized)
gcttatgacttcgtcttccagaggtccacatttctccccttgacgccccctgtctaccacctccacctggaaatttgatctttactgtgctcagtgatcacgaaattggtcaagcctatt

SEQ ID NO: 44806 - DNA, 120 bp, Artificial Sequence
  ENSG00000064309_55 (sequence is synthesized)
catgttccttctcatctagaattctgtgtgattgttttagcataaactgccccgctcccactgtatcatttcacgatctccttttaatgtttttctttcagttttgcactgacagtctgg

SEQ ID NO: 44807 - DNA, 120 bp, Artificial Sequence
  ENSG00000064309_56 (sequence is synthesized)
tgacaggtgctgccagggtgcaagttacattgcaatgttctaaaccttttgaagtgttcttagcaaaagcctttctttctgggtgtttttgtcgaatgagtctatgaagactcaatgcat

SEQ ID NO: 44808 - DNA, 120 bp, Artificial Sequence
  ENSG00000064309_57 (sequence is synthesized)
ccatcttgggctgatcatgccacagatctcattccagctatagtactgccaagaagtgaagtttatcattgaattttacctgtgttgctctcttttaaagtaatgactttgagatgcatg

SEQ ID NO: 44809 - DNA, 120 bp, Artificial Sequence
  ENSG00000064309_58 (sequence is synthesized)
ctttgtatcatattgaaaagtatgttttattttccttaaagttgtaatattgtgtgtgaaactgtacatattttaaatgatgtagctttggcaggttttatttggttgatatgattttat

SEQ ID NO: 44810 - DNA, 120 bp, Artificial Sequence
  ENSG00000064309_59 (sequence is synthesized)
attaaaagagaaggctgctttcatatagcatagcccctgaaggtgggaatactccctgtttgtacaacgctgcttatagtttgtgattggggtgggcgaatgtcttcctctgaaattctt

SEQ ID NO: 44811 - DNA, 120 bp, Artificial Sequence
  ENSG00000064309_60 (sequence is synthesized)
tggaaccccccacccctgtcctcccctgaaactcccctgtgcacacccctctgttctgactgcagagatcaaggccctgaaggagcaggatcttgggcaagtgttttaggggacgctgag

SEQ ID NO: 44812 - DNA, 120 bp, Artificial Sequence
  ENSG00000064309_61 (sequence is synthesized)
aacatacctgaccctgggggcgatgtggaggcaggcccacctcctcggggcaactttgcgtttccttggagggaagggaggtgggtaggagaggagcttgggaggatgaggaggagcggt

SEQ ID NO: 44813 - DNA, 120 bp, Artificial Sequence
  ENSG00000064309_62 (sequence is synthesized)
cccgcctcacacattgtctatttttaccattaaccgagcgccacatgtttatgaacttcaggatagaaatttagcctccttgtgaaaacgttttgttttactgccctaagaaaatacaca

SEQ ID NO: 44814 - DNA, 120 bp, Artificial Sequence
  ENSG00000064309_63 (sequence is synthesized)
tctctaggcttgtctgaccagaaagccagcaaagtcttttgcatcgggtgtggcccttttgtattttatttcccatatttaaataagccttccttaaaccctagccccagtcctgagagc

SEQ ID NO: 44815 - DNA, 120 bp, Artificial Sequence
  ENSG00000064309_64 (sequence is synthesized)
tttgagggtagccgaaaccccttatctaataaagtctaactctgtgagaaccacagaatcttcttaagcttctcaattttctgtctcctttcaggcgccacgtcccttgtgctggcgggt

SEQ ID NO: 44816 - DNA, 120 bp, Artificial Sequence
  ENSG00000064309_65 (sequence is synthesized)
cccccgttggctttcttgccgtttcttctcatctgtgtctcctgcagaggcggctcggagtcccgagtcttctagtcagttgaacaagcattcatttgtgttttcacccagattacagac

SEQ ID NO: 44817 - DNA, 120 bp, Artificial Sequence
  ENSG00000064309_66 (sequence is synthesized)
acacacacaaacagacacacacacttggagctagtgagtcatgctggcagctgacattgtgactctggaacagccccggtgctctgtgggccagctcccccagcctgggggcgggaagct

SEQ ID NO: 44818 - DNA, 120 bp, Artificial Sequence
  ENSG00000064309_67 (sequence is synthesized)
acatctgcagtacctctgctccgtatcttgtgggctgcgactcctggagtcggaccactgcagcgtcagtgatgttcgtaagctatggttgagcaaaggaacacacacctacacaccttg

SEQ ID NO: 44819 - DNA, 120 bp, Artificial Sequence
  ENSG00000064309_68 (sequence is synthesized)
cttcttcccactagccaaacctgggacccagccatcagcctgtctctgtgggagtcgcaatggaagtagccctctattggcgtgaacatcagctctgatttatttaggaattgctccatc

SEQ ID NO: 44820 - DNA, 120 bp, Artificial Sequence
  ENSG00000064309_69 (sequence is synthesized)
cacagactttttttctggaagcagctagcttgctcatacttctatagcaccacagatccttcccagtaccatggctttcacttgccctcagacacccagagatccctgtctccccattgt

SEQ ID NO: 44821 - DNA, 120 bp, Artificial Sequence
  ENSG00000064309_70 (sequence is synthesized)
gggtcctcttccttgtcctgccacctctgtcttccacaaggtgggccagggcttctcttgtaaccatgtcacttagggacactgcagctgggccttgtaccagttgtgaagactgggtat

SEQ ID NO: 44822 - DNA, 120 bp, Artificial Sequence
  ENSG00000064309_71 (sequence is synthesized)
taagtgaaagtggtagttggtgtcttagctacgttggttttatgaccaaagtctgacagaagggctcttcccaaatcccacctgccctccctaagcctatttgcatcttcctctttgggc

SEQ ID NO: 44823 - DNA, 120 bp, Artificial Sequence
  ENSG00000064309_72 (sequence is synthesized)
cttatggtgttgcagtcactgtgatggtgacattcactggagaatccgtggtttcttgtgcaggatccaaacctggggtggtggttggtgtttcaaggcctatgaagagcatatgtgggc

SEQ ID NO: 44824 - DNA, 120 bp, Artificial Sequence
  ENSG00000064309_73 (sequence is synthesized)
caaaaatgaaattatttttactaaaagaaaataaccctagcaccgtacaagaacggtgttcattttccatggtcctggctagtgacaggtaggcatttccatgaagaagtaatcttatta

SEQ ID NO: 44825 - DNA, 120 bp, Artificial Sequence
  ENSG00000064309_74 (sequence is synthesized)
atcaagctcattaaaaaaagtttttaaaaaattttcaacagattctgcctactttaaaaatctatatggtacaatctctctcttactcttattccctagacagtcagttcctctctttag

SEQ ID NO: 44826 - DNA, 120 bp, Artificial Sequence
  ENSG00000064309_75 (sequence is synthesized)
aaataattagttttatcagtttcttgagcagccttgtatgtagtgcacatatgagtggtttcacacaacatgagagagtgtgtgtgcattttataacaatacctttttttgtttttttta

SEQ ID NO: 44827 - DNA, 80 bp, Artificial Sequence
  ENSG00000064309_76 (sequence is synthesized)
ccagcgccccagccccggcgtgcgaggcgccgctccctcctctgccctgcgcggtgcatggaggggcccgttcggatcgc

SEQ ID NO: 44828 - DNA, 120 bp, Artificial Sequence
  ENSG00000064309_77 (sequence is synthesized)
agccgccgccaccgtagccgccgccgcgcgcgcgcggggggatgacctgggggtggctttccgagccggctgcagcgcaggaggtctggaggcttagccagccccgcggagagtgaacca

SEQ ID NO: 44829 - DNA, 120 bp, Artificial Sequence
  ENSG00000064309_78 (sequence is synthesized)
tgtcagagagatcccagtcatgctggatttaccaatcctaggaaagcactgagaatgaagtataatttccccccaaattggaattctaggaacccaatgatgtctttacatgtgtattca

SEQ ID NO: 44830 - DNA, 120 bp, Artificial Sequence
  ENSG00000064309_79 (sequence is synthesized)
aatgttttagcccttcaacataaagctctataaccacttttaaaacacaaattccttccctctctaaggtagtagaataccatttatgtagcaaataaagcagtttcttattaaaaacaa

SEQ ID NO: 44831 - DNA, 120 bp, Artificial Sequence
  ENSG00000064309_80 (sequence is synthesized)
ataattaccaatgatacctattattttatacttattttattcttcattagcccaggaagaaagaaggcattgtttccattacaagtaaaggaaacagagtctgggagggcagtaacttgc

SEQ ID NO: 44832 - DNA, 120 bp, Artificial Sequence
  ENSG00000064309_81 (sequence is synthesized)
ttgaggccacacattagtggtcagatgcagagccaggagtctttctacagtgagaattgcagcgttcttgcagcagatcttctatttcttaatatgaagaagtattgtgtcttttttact

SEQ ID NO: 44833 - DNA, 120 bp, Artificial Sequence
  ENSG00000064309_82 (sequence is synthesized)
taccatgctgtattacttcttaaaactcttctagaattaaatgaatcctagttttgatcaaatgtgaccgaaagatttcctatcctccatctcctgcttttcttttctggtgtgttttct

SEQ ID NO: 44834 - DNA, 120 bp, Artificial Sequence
  ENSG00000064313_0 (sequence is synthesized)
agaggttacagacaagatgtcggcggatggtagcttcgagcccttgcggagaggagcatctctgtgacagaagcttgtcgacggcggcttctaggagctagtcgaaggagcgaggttgag

SEQ ID NO: 44835 - DNA, 120 bp, Artificial Sequence
  ENSG00000064313_1 (sequence is synthesized)
gcgggcagcgacccgtcaggtcgctcacctgggcaccggccagctgcgagacgtgacttggggaccgcaggggagtggagagtgtgaggtgccaaagactagtaatgccccgtatccccc

SEQ ID NO: 44836 - DNA, 120 bp, Artificial Sequence
  ENSG00000064313_2 (sequence is synthesized)
taggaagccgggaagccaagctccgcgggaccgcttcatgccgctgactggtgtagagcccgccagaatgaacaggaagaaaggagacaagggctttgaaagcccaaggccatataaatt

SEQ ID NO: 44837 - DNA, 120 bp, Artificial Sequence
  ENSG00000064313_3 (sequence is synthesized)
aacccatcaggtcgtctgcatcaacaacataaatttccagagaaaatctgttgtgggatttgtggaactgactatatttcccacagttgcaaacttgaatagaatcaagttgaacagcaa

SEQ ID NO: 44838 - DNA, 120 bp, Artificial Sequence
  ENSG00000064313_4 (sequence is synthesized)
acagtgtagaatataccgagtaaggatcaatgatttagaggctgcttttatttataatgacccaaccttggaagtttgtcacagtgaatcaaaacagagaaacctcaattatttttccaa

SEQ ID NO: 44839 - DNA, 120 bp, Artificial Sequence
  ENSG00000064313_5 (sequence is synthesized)
tgcttatgcagctgcagttagtgctgtggaccctgatgcaggaaatggagaactttgcattaaggttccatcagagctatggaaacacgttgatgagttaaaggtcctgaagatacacat

SEQ ID NO: 44840 - DNA, 120 bp, Artificial Sequence
  ENSG00000064313_6 (sequence is synthesized)
caatttttctttggatcagcccaaaggaggtcttcattttgtggtacccagtgtagagggaagtatggcagagagaggtgctcatgttttctcttgtgggtatcaaaattctacaagatt

SEQ ID NO: 44841 - DNA, 120 bp, Artificial Sequence
  ENSG00000064313_7 (sequence is synthesized)
ttggttcccttgtgttgattcatactctgaattgtgtacatggaaattagaatttacagtagatgctgcaatggttgctgtttctaatggcgatttggtggagacagtgtatactcatga

SEQ ID NO: 44842 - DNA, 120 bp, Artificial Sequence
  ENSG00000064313_8 (sequence is synthesized)
tatgaggaagaaaactttccattatatgcttaccattcctacagcagcgtcaaatatctccttggccattggaccatttgaaatactggtagatccatacatgcatgaggttactcattt

SEQ ID NO: 44843 - DNA, 120 bp, Artificial Sequence
  ENSG00000064313_9 (sequence is synthesized)
ttgtttgccccaacttcttccattgctgaaacataccacatcataccttcatgaagtctttgaattttatgaagaaattcttacatgtcgttacccatactcctgttttaagactgtctt

SEQ ID NO: 44844 - DNA, 120 bp, Artificial Sequence
  ENSG00000064313_10 (sequence is synthesized)
cattgatgaggcttatgttgaagtggctgcttatgcttccatgagcatttttagcacaaatcttttacacagtgccatgattatagatgagacacctttgactagaaggtgtttagccca

SEQ ID NO: 44845 - DNA, 120 bp, Artificial Sequence
  ENSG00000064313_11 (sequence is synthesized)
atccttggcccagcagttttttggttgtttcatatctagaatgtcttggtctgatgaatgggtgctgaagggaatttcaggctatatctatggactttggatgaaaaaaacttttggtgt

SEQ ID NO: 44846 - DNA, 120 bp, Artificial Sequence
  ENSG00000064313_12 (sequence is synthesized)
taatgagtaccgccattggattaaagaggagctagacaaaatagtggcatatgaactaaaaactggtggggttttactacatcccatatttggtggaggaaaagagaaggataatccggc

SEQ ID NO: 44847 - DNA, 120 bp, Artificial Sequence
  ENSG00000064313_13 (sequence is synthesized)
ttcccatctacacttttcaataaagcatccacatacactgtcctgggaatactacagtatgtttcagtgtaaagcccaccttgtgatgagattgattgaaaataggatcagtatggaatt

SEQ ID NO: 44848 - DNA, 120 bp, Artificial Sequence
  ENSG00000064313_14 (sequence is synthesized)
tatgctacaagttttcaataaactgctaagtctggctagtactgcttcatctcagaagttccagtcacatatgtggagtcagatgttggtttccacatctgggtttttgaaatccatttc

SEQ ID NO: 44849 - DNA, 120 bp, Artificial Sequence
  ENSG00000064313_15 (sequence is synthesized)
aaatgtctctggcaaagatattcagccgttaataaagcagtgggtagatcagagtggagtggtaaaattttatggaagttttgcatttaatagaaaacgaaatgtcttggaactggaaat

SEQ ID NO: 44850 - DNA, 120 bp, Artificial Sequence
  ENSG00000064313_16 (sequence is synthesized)
aaaacaggactatacatctcctggaactcagaaatacgtgggaccacttaaagtgacagtgcaggagttagatggatccttcaatcatacactgcaaattgaagaaaacagccttaaaca

SEQ ID NO: 44851 - DNA, 120 bp, Artificial Sequence
  ENSG00000064313_17 (sequence is synthesized)
tgatataccctgccattccaaaagtagaaggaataaaaagaaaaaaatcccactgatgaatggagaagaagttgatatggatctttctgcaatggatgctgattcccctttgctgtggat

SEQ ID NO: 44852 - DNA, 120 bp, Artificial Sequence
  ENSG00000064313_18 (sequence is synthesized)
aaggatagacccagatatgtcagtattgaggaaggtagaatttgagcaagctgattttatgtggcagtatcagctccgctatgagagagatgttgttgcacagcaggaatccattttggc

SEQ ID NO: 44853 - DNA, 120 bp, Artificial Sequence
  ENSG00000064313_19 (sequence is synthesized)
tttggaaaaattccctactccagcatctcggcttgcactcactgatatattagaacaagagcagtgtttctacagagtaagaatgtcagcttgcttctgtcttgcaaagattgcaaattc

SEQ ID NO: 44854 - DNA, 120 bp, Artificial Sequence
  ENSG00000064313_20 (sequence is synthesized)
ttcaaagctattttctacagaagactatgccagttgcaatggctttattaagagatgttcataatctttgtcctaaagaagtcttaacatttattttagacttaatcaagtacaatgaca

SEQ ID NO: 44855 - DNA, 120 bp, Artificial Sequence
  ENSG00000064313_21 (sequence is synthesized)
acaggaaaaataagttttcagataactattatcgtgcagaaatgattgatgccctggccaactctgttacacctgcagtcagtgtgaataatgaagttagaactttggataacttaaatc

SEQ ID NO: 44856 - DNA, 120 bp, Artificial Sequence
  ENSG00000064313_22 (sequence is synthesized)
ctgatgtgcgactcattcttgaagaaatcaccagatttttgaatatggaaaaacttcttccgagttacaggcataccatcactgtcagttgtttgagagccatacgggtacttcagaaga

SEQ ID NO: 44857 - DNA, 120 bp, Artificial Sequence
  ENSG00000064313_23 (sequence is synthesized)
acggacatgtgccaagtgatccagctctttttaaatcttatgctgaatatggccactttgtggacattaggatagcagctttggaagcagttgttgattatactaaagtggacagaagtt

SEQ ID NO: 44858 - DNA, 120 bp, Artificial Sequence
  ENSG00000064313_24 (sequence is synthesized)
atgaagaactgcaatggctacttaatatgattcagaatgaccctgtaccctatgtaaggcataagattctcaacatgttgactaagaacccaccatttactaagaacatggagtctccct

SEQ ID NO: 44859 - DNA, 120 bp, Artificial Sequence
  ENSG00000064313_25 (sequence is synthesized)
tatgcaatgaagccctggtagatcaactttggaaacttatgaattctggtacttcacatgactggaggttacggtgtggtgctgtggacttgtacttcacactttttggcctcagtagac

SEQ ID NO: 44860 - DNA, 120 bp, Artificial Sequence
  ENSG00000064313_26 (sequence is synthesized)
cttcctgtttacccttgccagagcttgggttggttcttaatctaaaggagaaaaaagctgtcttgaatcctaccataattccagagtcagtagcaggcaaccaagaagctgcaaataatc

SEQ ID NO: 44861 - DNA, 120 bp, Artificial Sequence
  ENSG00000064313_27 (sequence is synthesized)
caagcagtcacccacagctagttggatttcagaaccctttttccagttctcaagatgaggaggagattgatatggatactgttcatgatagccaggccttcatttcccatcatttaaaca

SEQ ID NO: 44862 - DNA, 120 bp, Artificial Sequence
  ENSG00000064313_28 (sequence is synthesized)
tgcttgaaaggccgtcaactccagggctctcgaaatatcggccagctagctcccgatctgctttaataccccagcactcagcaggctgtgacagcacacccaccacaaaaccccagtgga

SEQ ID NO: 44863 - DNA, 120 bp, Artificial Sequence
  ENSG00000064313_29 (sequence is synthesized)
gtttggaacttgcacggaagggaacaggtaaagaacaagcacctttggagatgagtatgcatccagcggcaagcgctccactctcagtctttactaaggaatctacagcctccaaacaca

SEQ ID NO: 44864 - DNA, 120 bp, Artificial Sequence
  ENSG00000064313_30 (sequence is synthesized)
gtgaccaccatcaccaccatcaccatgagcacaagaaaaagaagaagaagcataaacataagcacaaacacaagcataagcatgacagtaaagaaaaggacaaggagcctttcactttct

SEQ ID NO: 44865 - DNA, 120 bp, Artificial Sequence
  ENSG00000064313_31 (sequence is synthesized)
ccagccctgccagtggcaggtctattcgttctccttccctttcagactgagaaggggacaaaaagacctttcctttcatgtccagaagaatgtatgtaactaaagctttgtcctctgtga

SEQ ID NO: 44866 - DNA, 120 bp, Artificial Sequence
  ENSG00000064313_32 (sequence is synthesized)
agaattataaaagggaggggggaaaggattcgcctctcctacagaaattctgaattcatttaagttctaagcatttgatttatgttatttatacagttgggatctaattaggaaaatgtg

SEQ ID NO: 44867 - DNA, 120 bp, Artificial Sequence
  ENSG00000064313_33 (sequence is synthesized)
ttttgtagttctggataaactatttcatccgctgtttcctccccaaaacacacacacagagcaaactccctttcataaaagccctcatatccactggcagtccccgttcgcatcatggtc

SEQ ID NO: 44868 - DNA, 120 bp, Artificial Sequence
  ENSG00000064313_34 (sequence is synthesized)
tccatgtgtaccgccaaagtcaattatgtttgaaagcctttggtggatgttatggggcaaagttatgatttacacagaagcaactgccaaatctgtggtgcaaccactatctccagtgaa

SEQ ID NO: 44869 - DNA, 120 bp, Artificial Sequence
  ENSG00000064313_35 (sequence is synthesized)
atattgtataacaccatttggaactactgaaaagacagtggcttttctacagtactcttccttattgcaccatttttgtattaacgtagaaactaagcatcagaatttatgaacaaagaa

SEQ ID NO: 44870 - DNA, 120 bp, Artificial Sequence
  ENSG00000064313_36 (sequence is synthesized)
tatgttatttttccttttgctctaaaatactgagatttggggaagcaattcttttttaaaaaaattttgaataactatcttttgataacacattcggcggttacgatgttggaatttagc

SEQ ID NO: 44871 - DNA, 120 bp, Artificial Sequence
  ENSG00000064313_37 (sequence is synthesized)
tagcagaactatcaaatccaaaattattttcaaatcaagatgtttaaattataagtttttttgttttgttttccagtaagtataaatgaaaatattcatatgtaaaatatgttttgctta

SEQ ID NO: 44872 - DNA, 120 bp, Artificial Sequence
  ENSG00000064313_38 (sequence is synthesized)
ggacaatttacacacccaacacatactgtttccaaaattatttctatatgacacaaagtatgatacctttaaaaaggtgagcttatatattgtttattaacctggaaatagacaatttgg

SEQ ID NO: 44873 - DNA, 120 bp, Artificial Sequence
  ENSG00000064313_39 (sequence is synthesized)
ctctcataccataagcatttaaaaacatatgaaatattttgatttctttatatggtggtgtgtttttatttctgaattttccatgtgctttaatatttgtttaagaatattttttatatc

SEQ ID NO: 44874 - DNA, 120 bp, Artificial Sequence
  ENSG00000064313_40 (sequence is synthesized)
tgttcaatttttatcattccccttatcattagaaagtttgacaaaaatacttgaatcttggacctctaaatatacttttagttgtgtttaacttgtttaataaataactttttaagttga

SEQ ID NO: 44875 - DNA, 120 bp, Artificial Sequence
  ENSG00000064313_41 (sequence is synthesized)
cttctcttttctgtttctctggctagaactcctacattaaccctccagtttctttatgctttcctcctattttctatcattagttttccatcagtaaactaatgtattgttatagtgaat

SEQ ID NO: 44876 - DNA, 120 bp, Artificial Sequence
  ENSG00000064313_42 (sequence is synthesized)
ctcttactgttttcagagtgaccacatgcaaagggtggagttgaatgtttaccagaggacttgcttgtgttttgggaaaatttttattttatctaaaatgtaattatacaaattttattt

SEQ ID NO: 44877 - DNA, 120 bp, Artificial Sequence
  ENSG00000064313_43 (sequence is synthesized)
gcttcttttagaggctggaccacataatcttttctttctcttaatatctttgaagaaagaaactactttttattttaagattatatgggggtatatcctatggcctctctgctacttttc

SEQ ID NO: 44878 - DNA, 120 bp, Artificial Sequence
  ENSG00000064313_44 (sequence is synthesized)
atatcattttagaaagaactatttactttttaaagccagtgttgttggggttttcgtaatatgtataacacagatattttaattttaaattcttgacttagtgatttagaaatcatcttt

SEQ ID NO: 44879 - DNA, 120 bp, Artificial Sequence
  ENSG00000064313_45 (sequence is synthesized)
atcacattataagaattgatgagattggaaggtagtcctgtttatccccctatagtaagtggctgtcagttctgtgtcatatgaattaaatttgtggaggcttacagaatcagaagatat

SEQ ID NO: 44880 - DNA, 120 bp, Artificial Sequence
  ENSG00000064313_46 (sequence is synthesized)
ataaagagaaattttttccttcatttcttttagtacttttataatggtttttgttttacatatataatcaatctttaatatattttagtgcatgcttcaatgttgggatattgattggaa

SEQ ID NO: 44881 - DNA, 120 bp, Artificial Sequence
  ENSG00000064313_47 (sequence is synthesized)
ttgcactgattgtattgatggatttggggagaatggaagtatttacagtattgtatcttcccatctaggagcttggtgtttgtttccatttattcagattttcctttatgtccttaagta

SEQ ID NO: 44882 - DNA, 120 bp, Artificial Sequence
  ENSG00000064313_48 (sequence is synthesized)
tagttaagtttatttttagatgtttattagtactaaggaaattgcttatatattctcctgaggttttttgggtattttcttgatgtggtcatgaaatttattttttatttaatagtcaca

SEQ ID NO: 44883 - DNA, 120 bp, Artificial Sequence
  ENSG00000064313_49 (sequence is synthesized)
gaagatgatcaccttgccaaggaagcatcatgtaatatatcagctcatcagcagggagtgaagaggaagtctgatacaccactggggtccccactagaacctggtcaaatactggagaag

SEQ ID NO: 44884 - DNA, 120 bp, Artificial Sequence
  ENSG00000064393_0 (sequence is synthesized)
gcgcgggcggcctcggctgcgccgagagcggagacacaggctcaagatggcagattccgactgaggctgggggggccgagctcgcgcgccgctttcccgtccccgttgccatgaaccgcg

SEQ ID NO: 44885 - DNA, 120 bp, Artificial Sequence
  ENSG00000064393_1 (sequence is synthesized)
gacaccccggccccgatggcccccgtgtacgaaggtatggcctcacatgtgcaagttttctcccctcacacccttcaatcaagtgccttctgtagtgtgaagaaactgaaaatagagccg

SEQ ID NO: 44886 - DNA, 120 bp, Artificial Sequence
  ENSG00000064393_2 (sequence is synthesized)
agttccaactgggacatgactgggtacggctcccacagcaaagtgtatagccagagcaagaacatccccctgtcgcagccagccaccacaaccgtcagcacctccttgccggtcccaaac

SEQ ID NO: 44887 - DNA, 120 bp, Artificial Sequence
  ENSG00000064393_3 (sequence is synthesized)
ccaagcctaccttacgagcagaccatcgtcttcccaggaagcaccgggcacatcgtggtcacctcagcaagcagcacttctgtcaccgggcaagtcctcggcggaccacacaacctaatg

SEQ ID NO: 44888 - DNA, 120 bp, Artificial Sequence
  ENSG00000064393_4 (sequence is synthesized)
cgtcgaagcactgtgagcctccttgatacctaccaaaaatgtggactcaagcgtaagagcgaggagatcgagaacacaagcagcgtgcagatcatcgaggagcatccacccatgattcag

SEQ ID NO: 44889 - DNA, 120 bp, Artificial Sequence
  ENSG00000064393_5 (sequence is synthesized)
aataatgcaagcggggccactgtcgccactgccaccacgtctactgccacctccaaaaacagcggctccaacagcgagggcgactatcagctggtgcagcatgaggtgctgtgctccatg

SEQ ID NO: 44890 - DNA, 120 bp, Artificial Sequence
  ENSG00000064393_6 (sequence is synthesized)
accaacacctacgaggtcttagagttcttgggccgagggacgtttgggcaagtggtcaagtgctggaaacggggcaccaatgagatcgtagccatcaagatcctgaagaaccacccatcc

SEQ ID NO: 44891 - DNA, 120 bp, Artificial Sequence
  ENSG00000064393_7 (sequence is synthesized)
tatgcccgacaaggtcagattgaagtgagcatcctggcccggttgagcacggagagtgccgatgactataacttcgtccgggcctacgaatgcttccagcacaagaaccacacgtgcttg

SEQ ID NO: 44892 - DNA, 120 bp, Artificial Sequence
  ENSG00000064393_8 (sequence is synthesized)
gtcttcgagatgttggagcagaacctctatgactttctgaagcaaaacaagtttagccccttgcccctcaaatacattcgcccagttctccagcaggtagccacagccctgatgaaactc

SEQ ID NO: 44893 - DNA, 120 bp, Artificial Sequence
  ENSG00000064393_9 (sequence is synthesized)
aaaagcctaggtcttatccacgctgacctcaaaccagaaaacatcatgctggtggatccatctagacaaccatacagagtcaaggtcatcgactttggttcagccagccacgtctccaag

SEQ ID NO: 44894 - DNA, 120 bp, Artificial Sequence
  ENSG00000064393_10 (sequence is synthesized)
gctgtgtgctccacctacttgcagtccagatattacagggcccctgagatcatccttggtttaccattttgtgaggcaattgacatgtggtccctgggctgtgttattgcagaattgttc

SEQ ID NO: 44895 - DNA, 120 bp, Artificial Sequence
  ENSG00000064393_11 (sequence is synthesized)
ctgggttggccgttatatccaggagcttcggagtatgatcagattcggtatatttcacaaacacagggtttgcctgctgaatatttattaagcgccgggacaaagacaactaggtttttc

SEQ ID NO: 44896 - DNA, 120 bp, Artificial Sequence
  ENSG00000064393_12 (sequence is synthesized)
aaccgtgacacggactcaccatatcctttgtggagactgaagacaccagatgaccatgaagcagagacagggattaagtcaaaagaagcaagaaagtacattttcaactgtttagatgat

SEQ ID NO: 44897 - DNA, 120 bp, Artificial Sequence
  ENSG00000064393_13 (sequence is synthesized)
atggcccaggtgaacatgacgacagatttggaagggagcgacatgttggtagaaaaggctgaccggcgggagttcattgacctgttgaagaagatgctgaccattgatgctgacaagaga

SEQ ID NO: 44898 - DNA, 120 bp, Artificial Sequence
  ENSG00000064393_14 (sequence is synthesized)
atcactccaatcgaaaccctgaaccatccctttgtcaccatgacacacttactcgattttccccacagcacacacgtcaaatcatgtttccagaacatggagatctgcaagcgtcgggtg

SEQ ID NO: 44899 - DNA, 120 bp, Artificial Sequence
  ENSG00000064393_15 (sequence is synthesized)
aatatgtatgacacggtgaaccagagcaaaacccctttcatcacgcacgtggcccccagcacgtccaccaacctgaccatgacctttaacaaccagctgaccactgtccacaaccaggct

SEQ ID NO: 44900 - DNA, 120 bp, Artificial Sequence
  ENSG00000064393_16 (sequence is synthesized)
ccctcctctaccagtgccactatttccttagccaatcccgaagtctccatactaaactacccatctacactctaccagccctcagcggcatccatggctgcagtggcccagcggagcatg

SEQ ID NO: 44901 - DNA, 120 bp, Artificial Sequence
  ENSG00000064393_17 (sequence is synthesized)
cccctgcagacaggaacagcccagatttgtgcccggcctgacccgttccagcaagctctcatcgtgtgtccccccggcttccaaggcttgcaggcctctccctctaagcacgctggctac

SEQ ID NO: 44902 - DNA, 120 bp, Artificial Sequence
  ENSG00000064393_18 (sequence is synthesized)
tcggtgcgaatggaaaatgcagttcccatcgtcactcaagccccaggagctcagcctcttcagatccaaccaggtctgcttgcccagcaggcttggccaagtgggacccagcagatcctg

SEQ ID NO: 44903 - DNA, 120 bp, Artificial Sequence
  ENSG00000064393_19 (sequence is synthesized)
cttcccccagcatggcagcaactgactggagtggccacccacacatcagtgcagcatgccaccgtgattcccgagaccatggcaggcacccagcagctggcggactggagaaatacgcat

SEQ ID NO: 44904 - DNA, 120 bp, Artificial Sequence
  ENSG00000064393_20 (sequence is synthesized)
gctcacggaagccattataatcccatcatgcagcagcctgcactattgaccggtcatgtgacccttccagcagcacagcccttaaatgtgggtgtggcccacgtgatgcggcagcagcca

SEQ ID NO: 44905 - DNA, 120 bp, Artificial Sequence
  ENSG00000064393_21 (sequence is synthesized)
accagcaccacctcctcccggaagagtaagcagcaccagtcatctgtgagaaatgtctccacctgtgaggtgtcctcctctcaggccatcagctccccacagcgatccaagcgtgtcaag

SEQ ID NO: 44906 - DNA, 120 bp, Artificial Sequence
  ENSG00000064393_22 (sequence is synthesized)
gagaacacacctccccgctgtgccatggtgcacagtagcccggcctgcagcacctcggtcacctgtgggtggggcgacgtggcctccagcaccacccgggaacggcagcggcagacaatt

SEQ ID NO: 44907 - DNA, 120 bp, Artificial Sequence
  ENSG00000064393_23 (sequence is synthesized)
gtcattcccgacactcccagccccacggtcagcgtcatcaccatcagcagtgacacggacgaggaggaggaacagaaacacgcccccaccagcactgtctccaagcaaagaaaaaacgtc

SEQ ID NO: 44908 - DNA, 120 bp, Artificial Sequence
  ENSG00000064393_24 (sequence is synthesized)
atcagctgtgtcacagtccacgactccccctactccgactcctccagcaacaccagcccctactccgtgcagcagcgtgctgggcacaacaatgccaatgcctttgacaccaaggggagc

SEQ ID NO: 44909 - DNA, 120 bp, Artificial Sequence
  ENSG00000064393_25 (sequence is synthesized)
ctggagaatcactgcacggggaacccccgaaccatcatcgtgccacccctgaaaacccaggccagcgaagtattggtggagtgtgatagcctggtgccagtcaacaccagtcaccactcg

SEQ ID NO: 44910 - DNA, 120 bp, Artificial Sequence
  ENSG00000064393_26 (sequence is synthesized)
tcctcctacaagtccaagtcctccagcaacgtgacctccaccagcggtcactcttcagggagctcatctggagccatcacctaccggcagcagcggccgggcccccacttccagcagcag

SEQ ID NO: 44911 - DNA, 120 bp, Artificial Sequence
  ENSG00000064393_27 (sequence is synthesized)
cagccactcaatctcagccaggctcagcagcacatcaccacggaccgcactgggagccaccgaaggcagcaggcctacatcactcccaccatggcccaggctccgtactccttcccgcac

SEQ ID NO: 44912 - DNA, 120 bp, Artificial Sequence
  ENSG00000064393_28 (sequence is synthesized)
aacagccccagccacggcactgtgcacccgcatctggctgcagccgctgccgctgcccacctccccacccagccccacctctacacctacactgcgccggcggccctgggctccaccggc

SEQ ID NO: 44913 - DNA, 120 bp, Artificial Sequence
  ENSG00000064393_29 (sequence is synthesized)
accgtggcccacctggtggcctcgcaaggctctgcgcgccacaccgtgcagcacactgcctacccagccagcatcgtccaccaggtccccgtgagcatgggcccccgggtcctgccctcg

SEQ ID NO: 44914 - DNA, 120 bp, Artificial Sequence
  ENSG00000064393_30 (sequence is synthesized)
cccaccatccacccgagtcagtatccagcccaatttgcccaccagacctacatcagcgcctcgccagcctccaccgtctacactggatacccactgagccccgccaaggtcaaccagtac

SEQ ID NO: 44915 - DNA, 120 bp, Artificial Sequence
  ENSG00000064393_31 (sequence is synthesized)
ccttacatataaacactggaggggagggagggagggagggagggagagaatggcccgagggaggagggagagaaggagggaggcgctcctgggaccgtgggcgctggccttttatactga

SEQ ID NO: 44916 - DNA, 120 bp, Artificial Sequence
  ENSG00000064393_32 (sequence is synthesized)
ggggggggggggggcagagggcagggggacgggtcgggacaccagtgaaacttgaaccgggaagtgggaggacgtagagcagagaagagaacatttttaaaaggaagggattaaagaggg

SEQ ID NO: 44917 - DNA, 120 bp, Artificial Sequence
  ENSG00000064393_33 (sequence is synthesized)
agagaagagaacatttttaaaaggaagggattaaagagggtgggaaatctatggtttttattttaaaaaagaaaaaggaaaaaaaaaaagtcaataacaaaaaacccagctcaagaaccc

SEQ ID NO: 44918 - DNA, 120 bp, Artificial Sequence
  ENSG00000064393_34 (sequence is synthesized)
attctacgccaaactggaaaggagaagagagcaacaggaagattccagaaacggggggccccagtttttgaagaactttatgaacttttcaaagattattttcatatggcagcaagtgat

SEQ ID NO: 44919 - DNA, 120 bp, Artificial Sequence
  ENSG00000064393_35 (sequence is synthesized)
acggaagactgctgtcagggacacctgatatggaaatcaaatagatttttaattaattgaacataagatttagggatttttccagaactcgaaagggtcaacagccctccagaatgtcgg

SEQ ID NO: 44920 - DNA, 120 bp, Artificial Sequence
  ENSG00000064393_36 (sequence is synthesized)
gctgcagcctgaggaggctgatgtttggagctggtgtgggattggcgaagcccagtccgggctccctagtcaggaaagacgggggacggccaggctgctggaaggcccccgggggcgcgg

SEQ ID NO: 44921 - DNA, 120 bp, Artificial Sequence
  ENSG00000064393_37 (sequence is synthesized)
ggcgagttttctttttctgagcactctggataaatccctaagcaacgttgtttctcaaatgtcattaataatgtgtgttgcaaactttaggtttttttcttttctgaaaatgtattttct

SEQ ID NO: 44922 - DNA, 120 bp, Artificial Sequence
  ENSG00000064393_38 (sequence is synthesized)
ctttgaatccacccctagtcgcgtagcgtagggctagcggtcgtcacagacaccctagtagaatgtagcactcagcacccttgtctcctaccttgtgttcaactccaatgataccaatag

SEQ ID NO: 44923 - DNA, 120 bp, Artificial Sequence
  ENSG00000064393_39 (sequence is synthesized)
aatattcctcaatgtaattgcacaaaaaaaagcgatataacataggcatgtaaccaatgtggcggtgcaggtgtgcgggtgagcgagcacgtgtgggtgtgcacgcgccgccctccccgc

SEQ ID NO: 44924 - DNA, 120 bp, Artificial Sequence
  ENSG00000064393_40 (sequence is synthesized)
gtggccctcggcgccgccaccctagctggcgcagtcttgacactgcatccttccctcctagtgccttaccgagcgacagacgcggcgtgagggtttacttccactggtactccaagaaac

SEQ ID NO: 44925 - DNA, 120 bp, Artificial Sequence
  ENSG00000064393_41 (sequence is synthesized)
gagggtttacttccactggtactccaagaaactgaggctagtcagacacaatctcagctcttctgttgtgctgttgtaacagtttacgctggccttttttttttctttttctttttcttt

SEQ ID NO: 44926 - DNA, 120 bp, Artificial Sequence
  ENSG00000064393_42 (sequence is synthesized)
ctgtttgctagcggaaggatgccagggaagccagcaggagctaggagagagtccgtggatctcgaaagaaatatgggagacagatgcccggcgggtgcgtctggagatggggacggcggg

SEQ ID NO: 44927 - DNA, 120 bp, Artificial Sequence
  ENSG00000064393_43 (sequence is synthesized)
agttgagttgtggcagtagttgagttgtaatttgtgggcggaggcccagagagactccccacccttcacccctgccccactctgtccccagttccgccatttgtgaggccagaggtttcc

SEQ ID NO: 44928 - DNA, 120 bp, Artificial Sequence
  ENSG00000064393_44 (sequence is synthesized)
ggactgttggcctcgccaggcagccgtctcccgccccaggcggcatcccccagtccctcccgcctccacgagagcctggagctctcagcctcgcccggggctccactctctcctccggct

SEQ ID NO: 44929 - DNA, 120 bp, Artificial Sequence
  ENSG00000064393_45 (sequence is synthesized)
ccctgggctgttttgctctaacgatcttgccagatccctccctctgtagacaaccaccaacctctgtttgctgttgaattctctcctcacattacccaggtctgctcaagacatgatttt

SEQ ID NO: 44930 - DNA, 120 bp, Artificial Sequence
  ENSG00000064393_46 (sequence is synthesized)
ggttttggtttctgagggttctagtgggcagaaggttggagggacacttatgagggtggccgggggtctgacgctgcactttggaaaaactcacacagttgaatttccaaagaaatctgc

SEQ ID NO: 44931 - DNA, 120 bp, Artificial Sequence
  ENSG00000064393_47 (sequence is synthesized)
cctttgccctctttgcacctttgatacattctggaagttttctcaggctttggacacttctggggatggaggtgtggagaagtggggagttccctctcttcatagtaaataactctgaaa

SEQ ID NO: 44932 - DNA, 120 bp, Artificial Sequence
  ENSG00000064393_48 (sequence is synthesized)
tatgtgaatgtgaatggcaggagaatctggccaaggatggggccgaaaagggtggttctaattgtttgcttctgatgttgagtctttagctgaccccacaggcaggtttccaaggtgcaa

SEQ ID NO: 44933 - DNA, 120 bp, Artificial Sequence
  ENSG00000064393_49 (sequence is synthesized)
agagatctttcccgagtcagcggccccatcctcatcctccctccctttacttcctcactgtgcagtctccctcaaggatctactgtgaaaggtgtgtttgtagtgatatccaacctaact

SEQ ID NO: 44934 - DNA, 120 bp, Artificial Sequence
  ENSG00000064393_50 (sequence is synthesized)
cagtaacgaagtcgttacttagctcttagctgtgaaataactctggaaacttccccaccccaaccataaattcttacttataaagaaacaggtccccaaactggaaacagcttagtccag

SEQ ID NO: 44935 - DNA, 120 bp, Artificial Sequence
  ENSG00000064393_51 (sequence is synthesized)
gcctcagcgagaaggaaggacaccatgactgctccatgctgggcacagccgggcagtcttgccaagtgcctgctggaggctgtgccggcaagaggcctgcagcaaggagattcccttccc

SEQ ID NO: 44936 - DNA, 120 bp, Artificial Sequence
  ENSG00000064393_52 (sequence is synthesized)
tcgggccattatcaatactgtctttatctggaggtggggaagcgcagccctctgagacagcaggacaatggtcagttcagagagggtgagggcagcaaacgcttcagaggacacagaagc

SEQ ID NO: 44937 - DNA, 120 bp, Artificial Sequence
  ENSG00000064393_53 (sequence is synthesized)
cagaggacccccccccgccccacagctgggtcagcctggaaaatccatctattagggactttttggcagccagatggcagcaatagcccattaggtctcatcccgagttccaagtcttgg

SEQ ID NO: 44938 - DNA, 120 bp, Artificial Sequence
  ENSG00000064393_54 (sequence is synthesized)
ctgcaaatgagcctcagttcgccttactggagagcacccccagattcctgggcacagttcatttccagccctttctagatctgatcttttagggggaaagacagcttaaaatgttctttt

SEQ ID NO: 44939 - DNA, 120 bp, Artificial Sequence
  ENSG00000064393_55 (sequence is synthesized)
cattttaaagaaaattattctgtctgcttaagttggaggctacttactctttcacctgacattttctttccttttattcttccagatcaggaatgaaatttccatgctgctcataaagat

SEQ ID NO: 44940 - DNA, 120 bp, Artificial Sequence
  ENSG00000064393_56 (sequence is synthesized)
agataatattattgtactaattatttttattaccattgtaattatgatcattatgttgatattttagtcagggttttaaatgcacatttattccaagtatctttgtgttttctctttaat

SEQ ID NO: 44941 - DNA, 120 bp, Artificial Sequence
  ENSG00000064393_57 (sequence is synthesized)
aaacttattctctctgtgagtatataagtagactggagggacatccagatgtccagttttgtcaggcaaaaaaaaaaaggaaagacttaggaagtaggaaaattgtttctgtcatctcta

SEQ ID NO: 44942 - DNA, 120 bp, Artificial Sequence
  ENSG00000064393_58 (sequence is synthesized)
tcccaacaagagacgtcaagaaagatccaccacagaacaaaagtttaaagaagaatcaaagccttgattgggcttctgacaacatggtcaccatcaaggttgtcattttctagatcccag

SEQ ID NO: 44943 - DNA, 120 bp, Artificial Sequence
  ENSG00000064393_59 (sequence is synthesized)
aggcctgggatgcgacgtcaggtggcatctcatgggctcggggaatgtcgagtcactgactgtccagcccttagccagcttctctcccacatcctcagagctctcctgtgcttctgaaat

SEQ ID NO: 44944 - DNA, 120 bp, Artificial Sequence
  ENSG00000064393_60 (sequence is synthesized)
ctgttaactaaatctttggcttgcctctggtatttaagcaagaaaattccctcccagaggtgaccccatccgcttccccacaatccatccttttgccatcggcgcacctggggcgtggct

SEQ ID NO: 44945 - DNA, 120 bp, Artificial Sequence
  ENSG00000064393_61 (sequence is synthesized)
ccccaggaaatttcaccacaccacccagttcctcagcctgccccctccccctgtgatgcatgcccccagcacccaattctagccagctggaagtgggtggagggacagcaggaggccaga

SEQ ID NO: 44946 - DNA, 120 bp, Artificial Sequence
  ENSG00000064393_62 (sequence is synthesized)
gaaaccctgaacaaagctgggcggctgctcaggcatcacaggctgcaccccctctgaaagcatccccactgggctccggccacatcttcagtgcactgtgctgtgtgcgctgggtgctca

SEQ ID NO: 44947 - DNA, 120 bp, Artificial Sequence
  ENSG00000064393_63 (sequence is synthesized)
cacgctgtccccagacccacaaagtgctaggccccagttgaagaaaggggtgaaatagccagcttcaccgaagggaagggaagggaagtattgggcgatgccagccccacagacgctcag

SEQ ID NO: 44948 - DNA, 120 bp, Artificial Sequence
  ENSG00000064393_64 (sequence is synthesized)
caaacattagtgcacattctcctagtcctcacccaatggcctcctctacccccatgcatggagctgccacatcagaagccccaagagaagctccctgcaggagaggccagctccctggat

SEQ ID NO: 44949 - DNA, 120 bp, Artificial Sequence
  ENSG00000064393_65 (sequence is synthesized)
gcccaattgcatacctggccgaatctgccattgagtcaccttagcaaataggctgctgtcactaggaccaagctctcaagcagagggatgccaacctagtccttacttagcccacgaatc

SEQ ID NO: 44950 - DNA, 120 bp, Artificial Sequence
  ENSG00000064393_66 (sequence is synthesized)
atctagagcatcctctagtcttttgtgggctccctccttcccatttgaagagacattgttcagaggaagaggggaagatttgaaatgtcaggtcacggaggagtgtttaactggagcctg

SEQ ID NO: 44951 - DNA, 120 bp, Artificial Sequence
  ENSG00000064393_67 (sequence is synthesized)
gtgaaccgcagggcaatttgcttctgctcactgggttctgactggcccgtctggacgtgggcccccatgtctctgtgcttagggcctcttcatgatgttttggatgtttccaagggaagt

SEQ ID NO: 44952 - DNA, 120 bp, Artificial Sequence
  ENSG00000064393_68 (sequence is synthesized)
gggtgagcagatcaaggggtgggagagtcgaggcttgatgccagttaatactgtgaagtggagcgtgcggtcagtggaattcagaggaaaaagaagggttggagcaaagcggcattcatc

SEQ ID NO: 44953 - DNA, 120 bp, Artificial Sequence
  ENSG00000064393_69 (sequence is synthesized)
tcctggactgttagcctttctagtcttcctggtggctgaggtgttcacgggctgggggagccagctgacctttgtcctcttcaacctagaagactcagcccgcccagacaccaacgtgtg

SEQ ID NO: 44954 - DNA, 120 bp, Artificial Sequence
  ENSG00000064393_70 (sequence is synthesized)
agacggatggacatcaggaagggaaggggagattagcccaactgctgacagaacgatttcccttggttggaccttgggaatggcaaacactcatattggaacaagcttggggtggaagat

SEQ ID NO: 44955 - DNA, 120 bp, Artificial Sequence
  ENSG00000064393_71 (sequence is synthesized)
ttaggccgtgtgagcatgtgtgagtgagtggaacaaactttcttggaaactggagggaggagatgaggaggcttcgggaagtattactgatggctcatggttgagagagcgacgtgggga

SEQ ID NO: 44956 - DNA, 120 bp, Artificial Sequence
  ENSG00000064393_72 (sequence is synthesized)
cccagctcgccccagcttttgtcccaggttctctttgtctgatgctgagggcagggtggggtgtgggaccaccactcttgttggcctgtcaagtagaccctaggacagaaaatggaaaga

SEQ ID NO: 44957 - DNA, 120 bp, Artificial Sequence
  ENSG00000064393_73 (sequence is synthesized)
aggaaatggctcggtgctctcaactagcagagagaattgaggagaggtaagggttccttctgcaggccagcctgggactccacagcgccagcaggagtgacttggccacaagacattcca

SEQ ID NO: 44958 - DNA, 120 bp, Artificial Sequence
  ENSG00000064393_74 (sequence is synthesized)
gccccagggactttgcaggcttcattccctgtctgtgtcttttccttctggtgtgttttacagacttctgatggggaagcttcaaacttgagcaggccagagatgtccttaccaaattgg

SEQ ID NO: 44959 - DNA, 120 bp, Artificial Sequence
  ENSG00000064393_75 (sequence is synthesized)
aaaggaaggtgaaactgttcctttctttagccaaagaacccttctcaaagacgcctccagaaatggacaaaatggccttcccttcgttcctttccaggcaataatgacatcattagtgat

SEQ ID NO: 44960 - DNA, 120 bp, Artificial Sequence
  ENSG00000064393_76 (sequence is synthesized)
gcaattctatttgtctttctctttcctctctgtccttttttttaaaaaaaaaaaatgcatttatttcaaaactgtgctattcttttaagaggagtggaggtgaccccttcgatgctgctg

SEQ ID NO: 44961 - DNA, 120 bp, Artificial Sequence
  ENSG00000064393_77 (sequence is synthesized)
ctatcgggagacaaggtgccataccaatacgtgggcttgactaatcccaggccaccatgggagagagcaaagcagggctgccaggagttcagttgcatcaagggcgtagagcacgcgggg

SEQ ID NO: 44962 - DNA, 120 bp, Artificial Sequence
  ENSG00000064393_78 (sequence is synthesized)
gctgggctcggaatagcagtacttttccactttgatgccttagaactctcacttctcatctccacagaccagactcagtaaaatctcaggccactagagaatggaaggcggtgaaacagg

SEQ ID NO: 44963 - DNA, 120 bp, Artificial Sequence
  ENSG00000064393_79 (sequence is synthesized)
atttaaatgcaaaaaaaacctattggaggcttttggcaccgtggctcactagagggacccagcatagtagaggtttctcttgttgcagcttctgaaaagttcaaaaaagaactccaggcc

SEQ ID NO: 44964 - DNA, 120 bp, Artificial Sequence
  ENSG00000064393_80 (sequence is synthesized)
gttcttccctcaaacccagtgagagtttgcagagaagtgccccctgcagggctcccgtcccagaacaccagcaccagagagggtcttcccgatgccccccgctggacttgcccaagcctc

SEQ ID NO: 44965 - DNA, 120 bp, Artificial Sequence
  ENSG00000064393_81 (sequence is synthesized)
tgggagcccctcatctcagatccctgtgttgaacatgacactgactgtcccttatttgttaaaatttgcaatatctctcaagtaaataatagccaacatttgttgaatgctttcatgact

SEQ ID NO: 44966 - DNA, 120 bp, Artificial Sequence
  ENSG00000064393_82 (sequence is synthesized)
cccgggctaaggcctttatgagcgttgtctcaaggggccccaacagccatcccacagggagggggataacagcccccatttatagataagggagctgaccggatgctctgagaagtggca

SEQ ID NO: 44967 - DNA, 120 bp, Artificial Sequence
  ENSG00000064393_83 (sequence is synthesized)
ggtgttgaaggaaggataaagcagtgatgggccagaatccccaaggttcccttttttgttcatcaggcccttcctgagatgtgatttttaatcttttaactttttttaattaatagcaat

SEQ ID NO: 44968 - DNA, 120 bp, Artificial Sequence
  ENSG00000064393_84 (sequence is synthesized)
gcgtggcctcatatttctatgaaccatttagtgatactcccgcttcctgcatgccacacactgtgctgggaattgctcatgggttgtcctgtttcatcttctccgtagccctgtgagatc

SEQ ID NO: 44969 - DNA, 120 bp, Artificial Sequence
  ENSG00000064393_85 (sequence is synthesized)
ggcaatattagtccccctacagccaaggaaactgcccagagccacacaactcttgaggggcgaggagggcttgaacctgagtctgcccagctccagaactgagcttgcagccattagcca

SEQ ID NO: 44970 - DNA, 120 bp, Artificial Sequence
  ENSG00000064393_86 (sequence is synthesized)
cagctgtctcctgcatgtctgagcaaagaaaggcctttacacagcatcaccctgtgccatcccatgcaccgtgggactcagctaaaggactgtgcaaagagggggctcctgagttggatt

SEQ ID NO: 44971 - DNA, 120 bp, Artificial Sequence
  ENSG00000064393_87 (sequence is synthesized)
taggcaaaaggggcagaattcgtttgatttttagagaaaatctctggagagtttcttttgattcatagaattccttttagatttctttccagcataccaactagctttagtagtgctgct

SEQ ID NO: 44972 - DNA, 120 bp, Artificial Sequence
  ENSG00000064393_88 (sequence is synthesized)
acaaccagctcttataagtaagagtgaaaaagtattcttttcttctttaaaaaataagtttttcttgcttatagttaattctagaaaggcaatactaaaggtatatatttttttcaaaat

SEQ ID NO: 44973 - DNA, 120 bp, Artificial Sequence
  ENSG00000064393_89 (sequence is synthesized)
gctattttttactgcacttgataattatcctgacagctctgatctctgtaatagattcactcttcagctctgggcagaaccagaggcagggttcacaccaaatttgtaaataccatatgt

SEQ ID NO: 44974 - DNA, 87 bp, Artificial Sequence
  ENSG00000064393_90 (sequence is synthesized)
ggtggaagaaagacaagacttagaggaacaaaagaatgttttcttttgagatactcttctcaaagaaatagcaacaattgtataaac

SEQ ID NO: 44975 - DNA, 120 bp, Artificial Sequence
  ENSG00000064393_91 (sequence is synthesized)
gagatactcttctcaaagaaatagcaacaattgtataaacaggaaaaccagccagctttcatgataaaaggaaggcgtgtctcttgccctggtatgagattaacagaaatacagatgcat

SEQ ID NO: 44976 - DNA, 120 bp, Artificial Sequence
  ENSG00000064393_92 (sequence is synthesized)
ttttattttgattgaaagatggtgagaatgtagaaatgcttaggactagatttttaattttttaaaataactattatcatttattatgaaatatttgttcagttgttttgagtgggtttc

SEQ ID NO: 44977 - DNA, 120 bp, Artificial Sequence
  ENSG00000064393_93 (sequence is synthesized)
ttgttccttttttcatttaaaaccttctttgttgactggctccaggcttgtttgcctaaattcttaggtagtttacacaagttctagaatcttttagaactttaactccattggaagcaa

SEQ ID NO: 44978 - DNA, 120 bp, Artificial Sequence
  ENSG00000064393_94 (sequence is synthesized)
acctaactaatcggagtttgagatcctggttggtttcaataggtattctggaattctggcagaacacctaaagattttttttttttttagaaggttttagatacattatcttacacaaac

SEQ ID NO: 44979 - DNA, 120 bp, Artificial Sequence
  ENSG00000064393_95 (sequence is synthesized)
tgtgacctaatggcaataattacctcaaatgtgggcattcatcctggttttagccttttttgaaatcatgtagccagcttgatcttggaatttaaagactatgaattctctgtgggctga

SEQ ID NO: 44980 - DNA, 120 bp, Artificial Sequence
  ENSG00000064393_96 (sequence is synthesized)
aaataatgattacttcatacccccggtcatcgttgcttaagtgaattctgaaaatagctcatctttacaacaaaaattaaaccaaggaagagattattctttgtgtgttgtactcaaatg

SEQ ID NO: 44981 - DNA, 120 bp, Artificial Sequence
  ENSG00000064393_97 (sequence is synthesized)
cgatgttcaaatgcacatgttaagtatatatgtttttagctactgtaaaatgctgttagccttctaagctatcaaaacagtcacattttaaatgagtaaactaaacaattgactgtggat

SEQ ID NO: 44982 - DNA, 120 bp, Artificial Sequence
  ENSG00000064393_98 (sequence is synthesized)
acttaagcatatttctggctacgttttatagttaaagtgttttatagtttacatttagactggtactttttaaagaaaagttctgtttataactgacatccgcaaaccccagtgaatgcc

SEQ ID NO: 44983 - DNA, 120 bp, Artificial Sequence
  ENSG00000064393_99 (sequence is synthesized)
tcttagttggaggttgtgtctcccccaaggcaagtgtgttgtcccagactcttctgtagtccagcatgcgcacttccctctggattattactttccacgtgaactcaagagaacatgaaa

SEQ ID NO: 44984 - DNA, 120 bp, Artificial Sequence
  ENSG00000064393_100 (sequence is synthesized)
ggcaatccagatggagggaaaaggtgtgagtccgcagcccgggccagatgcgaaggtctcatgcgtgtcgtctaaacacttgtcttcaaggccttctctctgacatcttggaagagtcat

SEQ ID NO: 44985 - DNA, 120 bp, Artificial Sequence
  ENSG00000064393_101 (sequence is synthesized)
tgagaacagataacctggttcattgatttttgtcttgatttgaatatttaacttattaatagatccactgatttccaggcaccaggcagtagaagagactgggattcaggtgaccatgaa

SEQ ID NO: 44986 - DNA, 120 bp, Artificial Sequence
  ENSG00000064393_102 (sequence is synthesized)
ggcacagctgctacttctgggccgggggtgatattttgatcagcgttttgtaggggaggaccatatacccctattcccatggtcgctggctgggttttccatatatctgctgtcatttat

SEQ ID NO: 44987 - DNA, 120 bp, Artificial Sequence
  ENSG00000064393_103 (sequence is synthesized)
tcgttttccccttaaaagcaaaatcaatgtaaaaggctatgtttacgttttactcattgtccagcttagactcaaagtctagttcggtgggagggggaccttagcatcctctcagagatg

SEQ ID NO: 44988 - DNA, 120 bp, Artificial Sequence
  ENSG00000064393_104 (sequence is synthesized)
gtcagggctgagcaggaggaggcagagacagaggggcagctcagcctggtccattgagacccactctaaacagacatcatatttggaacaagaagatgcttcgagacaggaatgggcccc

SEQ ID NO: 44989 - DNA, 120 bp, Artificial Sequence
  ENSG00000064393_105 (sequence is synthesized)
actgtcatgcagaaacagactgggggaatggcagtttccctgagtcttggtttcttttatgttttctcttgtgccaccaccaaactgcagaggacctgctgtgacctaaagggcattcct

SEQ ID NO: 44990 - DNA, 120 bp, Artificial Sequence
  ENSG00000064393_106 (sequence is synthesized)
ttagcagataagaccttgaaaactgcaaaacacctgggaccagggagcttttaaaaaatacaaaaaaataccacatttgctttttccctgtgaactgtattgacagcgtgttcttaggac

SEQ ID NO: 44991 - DNA, 120 bp, Artificial Sequence
  ENSG00000064393_107 (sequence is synthesized)
agtcttttggtggaaatgttactgtaaaatagttttcatctcacccctcctaatcatactcccactttcctgtttgtgtggtggtgttgctgttttttcctttacatgaattaaccaaat

SEQ ID NO: 44992 - DNA, 120 bp, Artificial Sequence
  ENSG00000064393_108 (sequence is synthesized)
gaattttgtgtcattgtttttggggcttatatttttaaaacatagaaattgccttttgttcatttgaaaagtaagtatgttgtatctgaaaaagggctctgcctctgctctccctcgctt

SEQ ID NO: 44993 - DNA, 120 bp, Artificial Sequence
  ENSG00000064393_109 (sequence is synthesized)
ccttgtaaccaatctccaaacgaatctctcctggcaccgcccccttccttatatagggtcactgtccccggggccacctctgcctccaccctgctgtcaccactgccctgggccaaggca

SEQ ID NO: 44994 - DNA, 120 bp, Artificial Sequence
  ENSG00000064393_110 (sequence is synthesized)
cccaggactcccagaaagcgcgagagccagcaagaaggccccactcagccttgagactggtggtcacacctccctgtcagagtcgcctgctgggctgaaggggcaatggattgtcattgt

SEQ ID NO: 44995 - DNA, 120 bp, Artificial Sequence
  ENSG00000064393_111 (sequence is synthesized)
tgaaattgtttggctcaggttataaggaggaacttgggaagtagaaagtgacttgaccatgtgcatccttggtagcttcctgtaactaacaaatggaacagagagcacacccccgccccg

SEQ ID NO: 44996 - DNA, 120 bp, Artificial Sequence
  ENSG00000064393_112 (sequence is synthesized)
ccccaccccaagcagatgttcccgtcagcgctgccctgagtcagtcggtcccccgtttctgctctcctcccttttgtgttcctgctcacttcaagcttcttccatggactttccagggca

SEQ ID NO: 44997 - DNA, 120 bp, Artificial Sequence
  ENSG00000064393_113 (sequence is synthesized)
cagtcatctctagcccccaaatcatctcttcatcctctgtgtgtgcatttttttaaccaaatgaaatagacaagaaagtcatactttggggcagcagaatttctaatttagtagaatcac

SEQ ID NO: 44998 - DNA, 120 bp, Artificial Sequence
  ENSG00000064393_114 (sequence is synthesized)
tgtatagagatagatgttgatatatatgtttgtgtatatatatcaaaccaaattggataggagaagtatagctttacagatgaggagaaggagctctttagaggtcggagtcaagactgg

SEQ ID NO: 44999 - DNA, 120 bp, Artificial Sequence
  ENSG00000064393_115 (sequence is synthesized)
tgtcttggacgtgcatgggctgtgtcccaggccactccgcacacatggggctgaggcgtggcgccgggcccttgtcatccacctcaccacggcagagccagcaggccctgtagggtgctg

SEQ ID NO: 45000 - DNA, 120 bp, Artificial Sequence
  ENSG00000064393_116 (sequence is synthesized)
ctgctgtctcactgggtcccagcttcaagcgcatcagtgggtgacgggggcaacaaatcagagtgactggaagtttccatcccgttttgctttgaccacgtgtactgagctgcagcctct

SEQ ID NO: 45001 - DNA, 120 bp, Artificial Sequence
  ENSG00000064393_117 (sequence is synthesized)
gatactctgtcacgtttccaaaaatggtatccattaggatagaaagagaatggatctgcagaaatgtttacctttcaactgctcatgaattcaggacactggatagaaagactcactccc

SEQ ID NO: 45002 - DNA, 120 bp, Artificial Sequence
  ENSG00000064393_118 (sequence is synthesized)
caaaatgagaacagggaagaggagacccggcgacactaagtcaccaggtccaaggaacgtggctccctccccagggtcatctcacctagatctttctctcccaggtcatctcagctcaat

SEQ ID NO: 45003 - DNA, 120 bp, Artificial Sequence
  ENSG00000064393_119 (sequence is synthesized)
ctcaataaccctatgaaagccctggtctgttgtgttccttcaccgtacggtttctgtaataaaaagtgttaatccatgttaatctgtgtgaaaattattgcgtgcaacagtattttctcg

SEQ ID NO: 45004 - DNA, 120 bp, Artificial Sequence
  ENSG00000064393_120 (sequence is synthesized)
tgtacctctttttcctatgtgaattgtccctcttttttatttataaatgtctacttttgtttttttaaagacaaaccaatgtgttgtagacctatatgtaacctattccttagtctcata

SEQ ID NO: 45005 - DNA, 120 bp, Artificial Sequence
  ENSG00000064393_121 (sequence is synthesized)
ttataggtatgttataagaatggatattttacttggctttagaatgttttacaagaaaactaattcttaactgatcaagtccttgctactaaaatgcttgtgtttttcatcatgacgtcg

SEQ ID NO: 45006 - DNA, 120 bp, Artificial Sequence
  ENSG00000064393_122 (sequence is synthesized)
tgtgcttctaaattaatcattttcgttgtagaaaaatggagtgaatttatattagtcttggaaactaataatagcattgtaaatttatgagatgattttaacagaaaaaatatagaagaa

SEQ ID NO: 45007 - DNA, 120 bp, Artificial Sequence
  ENSG00000064393_123 (sequence is synthesized)
tatagttattttaattgtaatattactaactgtagggtgagaaaaaggggggggggtcccattgtggtgaactatgttatagcttgttactcatagtttctttttgatcattttttcggt

SEQ ID NO: 45008 - DNA, 120 bp, Artificial Sequence
  ENSG00000064393_124 (sequence is synthesized)
ctccgaggtgaaatgacttattaattaaaatttgtaaactcacatatgcatattgtatatgtgtagaaatgtaatcacactttgtcttggaattacattaaactgtttgaaatcactgta

SEQ ID NO: 45009 - DNA, 120 bp, Artificial Sequence
  ENSG00000064393_125 (sequence is synthesized)
gcttttctgctgctagaaatgttgctgtatgggagctagtacaatagaaagtgcccagtgactgcaggcgacccttaccgaggattttattcaagtatccaggggaggcttctgctgaac

SEQ ID NO: 45010 - DNA, 120 bp, Artificial Sequence
  ENSG00000064393_126 (sequence is synthesized)
agcacattgtataagcagcgttttccttctttaatcctgtaatcaatacctctctgcctttacaatggctctgcttccaactaggttgattaatagaaaataaaagcctcctggttcttt

SEQ ID NO: 45011 - DNA, 120 bp, Artificial Sequence
  ENSG00000064419_0 (sequence is synthesized)
ccctggtaacggccaaagaggaggagatggcgccagtcagggagcggccgtggcccagacagtgaggaagcgcgaaggcggagcaaccgaggaatcctccggagaagaatcagagccgtc

SEQ ID NO: 45012 - DNA, 120 bp, Artificial Sequence
  ENSG00000064419_1 (sequence is synthesized)
gctaccgccactaccgccaccaccatggaaggagcaaagccgacattgcagctcgtgtaccaggcagtgcaggcgctttaccacgacccagatcccagcggaaaggagcgcgcctctttt

SEQ ID NO: 45013 - DNA, 120 bp, Artificial Sequence
  ENSG00000064419_2 (sequence is synthesized)
tggcttggggagctgcagcgttcggttcatgcatgggagatctcagaccagttgttacagatccggcaggatgtggagtcatgctattttgctgcacagaccatgaaaatgaagattcag

SEQ ID NO: 45014 - DNA, 120 bp, Artificial Sequence
  ENSG00000064419_3 (sequence is synthesized)
acctcattttatgagctccccacagactctcatgcctctttacgggactcattgctaacccatatccagaacttgaaagacttgtcacctgttattgtaacgcagctggctttagcaata

SEQ ID NO: 45015 - DNA, 120 bp, Artificial Sequence
  ENSG00000064419_4 (sequence is synthesized)
gcagatcttgccctacagatgccttcctggaagggatgtgtgcaaacactggtggaaaaatacagcaatgatgtgacttctttgccttttttgctggagatccttacagtgttacctgaa

SEQ ID NO: 45016 - DNA, 120 bp, Artificial Sequence
  ENSG00000064419_5 (sequence is synthesized)
gaagtacatagtcgttccttacgaattggagctaatcggcgcacagaaattatagaagatttggccttctactctagtacagtagtatctctattgatgacctgtgtagaaaaagcagga

SEQ ID NO: 45017 - DNA, 120 bp, Artificial Sequence
  ENSG00000064419_6 (sequence is synthesized)
acagatgagaaaatgcttatgaaggtttttcgctgtttgggaagttggtttaacttgggagttttggacagtaacttcatggctaacaataaattactagcactcctttttgaggttttg

SEQ ID NO: 45018 - DNA, 120 bp, Artificial Sequence
  ENSG00000064419_7 (sequence is synthesized)
caacaggataagacctcgtctaacctacatgaagctgcttcggactgtgtatgctcagctctctatgccattgagaatgtggagactaacttgccattagccatgcaactttttcaggga

SEQ ID NO: 45019 - DNA, 120 bp, Artificial Sequence
  ENSG00000064419_8 (sequence is synthesized)
gtgctgacattggagactgcctatcatatggccgtggcacgtgaagatttagacaaagttctgaattactgccgtattttcactgaactatgtgaaacttttcttgaaaaaattgtttgt

SEQ ID NO: 45020 - DNA, 120 bp, Artificial Sequence
  ENSG00000064419_9 (sequence is synthesized)
actccaggccaaggtcttggggaccttcgaactctggagctgctgcttatctgtgcaggccatcctcaatatgaggtagtagaaatttcatttaacttttggtaccgactgggggaacat

SEQ ID NO: 45021 - DNA, 120 bp, Artificial Sequence
  ENSG00000064419_10 (sequence is synthesized)
ttgtacaaaactaacgatgaagttattcatggcatcttcaaagcttacattcagaggctgcttcacgccttggctcgacactgccagctggaaccagaccatgagggggttcctgaggag

SEQ ID NO: 45022 - DNA, 120 bp, Artificial Sequence
  ENSG00000064419_11 (sequence is synthesized)
actgatgactttggggagtttcgcatgagggtatcagacctggtaaaggacttgattttcttgatagggtctatggagtgttttgctcagttatattctactctgaaagaaggcaaccca

SEQ ID NO: 45023 - DNA, 120 bp, Artificial Sequence
  ENSG00000064419_12 (sequence is synthesized)
ccctgggaggtgacagaagcggttctctttatcatggctgctatagcaaagagtgttgatccggaaaacaatccaacacttgtggaagtcctagaaggagttgtccgcctcccggagacc

SEQ ID NO: 45024 - DNA, 120 bp, Artificial Sequence
  ENSG00000064419_13 (sequence is synthesized)
gtacatacggctgtgcgatacaccagcattgaattggttggagagatgagtgaagtcgttgatcgaaatcctcagttccttgaccctgtgttgggctatttgatgaaaggcctgtgtgaa

SEQ ID NO: 45025 - DNA, 120 bp, Artificial Sequence
  ENSG00000064419_14 (sequence is synthesized)
aagcccctggcttctgctgcagccaaagccattcataacatttgctctgtctgccgagatcacatggctcagcactttaatggactcctggagattgcccgctccctcgattccttcctg

SEQ ID NO: 45026 - DNA, 120 bp, Artificial Sequence
  ENSG00000064419_15 (sequence is synthesized)
ttgtctccagaagctgctgtgggcttgctaaaagggacagcacttgtcctagcccgattacctttggataagattaccgaatgtcttagtgaactatgttctgttcaggttatggcattg

SEQ ID NO: 45027 - DNA, 120 bp, Artificial Sequence
  ENSG00000064419_16 (sequence is synthesized)
aaaaagctgttgtctcaagagcccagcaatggcatatcctcagatcccacagtgttcttagatcgccttgcagtgatatttaggcataccaatcccattgtggaaaatggacagactcat

SEQ ID NO: 45028 - DNA, 120 bp, Artificial Sequence
  ENSG00000064419_17 (sequence is synthesized)
ggattgtagagcgttgttgcaggtgcctgcgctttgctgttcgctgtgtaggcaaaggatctgcagcactgctgcagccactagtcacacagatggtgaatgtgtaccacgtacatcagc

SEQ ID NO: 45029 - DNA, 120 bp, Artificial Sequence
  ENSG00000064419_18 (sequence is synthesized)
attcctgcttcctgtaccttggcagtatccttgtggatgaatatggcatggaagaaggctgtcggcagggactgctagacatgctccaggcactgtgcatccccacctttcagctcctag

SEQ ID NO: 45030 - DNA, 120 bp, Artificial Sequence
  ENSG00000064419_19 (sequence is synthesized)
aacagcagaatggtctccagaatcaccctgacactgtagatgacctgttccggctagccaccaggtttattcagcgtagccctgtcaccttgctgcggagccaagtggtcatccctatct

SEQ ID NO: 45031 - DNA, 120 bp, Artificial Sequence
  ENSG00000064419_20 (sequence is synthesized)
tacagtgggccattgcctctactaccctggaccaccgggatgccaattgtagtgtcatgaggtttctacgagacctcattcatacaggggtagccaatgatcatgaagaagactttgaat

SEQ ID NO: 45032 - DNA, 120 bp, Artificial Sequence
  ENSG00000064419_21 (sequence is synthesized)
tacggaaagaactgattggacaggtgatgaaccagcttggacagcagcttgtcagccagctgctgcacacctgctgcttttgcctccccccctataccctaccagatgtggctgaagtgc

SEQ ID NO: 45033 - DNA, 120 bp, Artificial Sequence
  ENSG00000064419_22 (sequence is synthesized)
tctgggagatcatgcaggttgacagaccgactttttgtcgatggttagaaaattccttaaaaggtttgccaaaggaaacaaccgtgggagccgtcacagtgacacacaaacaacttacag

SEQ ID NO: 45034 - DNA, 120 bp, Artificial Sequence
  ENSG00000064419_23 (sequence is synthesized)
acttccacaagcaagtcactagtgctgaggaatgtaaacaagtttgctgggccttgcgagacttcaccaggttgtttcgatagctcacactcctgcactgtgcctgtcacccaggaatgt

SEQ ID NO: 45035 - DNA, 120 bp, Artificial Sequence
  ENSG00000064419_24 (sequence is synthesized)
cttttttaattagaagacaggaagaaaacaaaaaccagactgtgtcccacaatcagaaacctccgttgtggcagaggggccttcaccgccaccagggtgtcccgccagacagggagagac

SEQ ID NO: 45036 - DNA, 120 bp, Artificial Sequence
  ENSG00000064419_25 (sequence is synthesized)
tccagccttctgaggccatcctgaggagttcctgtttgggggtgtgagggaaaatcagcgcggattttaaaaagatggctgtggcctgcccggcgtggtgggaggggagctggtttcctg

SEQ ID NO: 45037 - DNA, 120 bp, Artificial Sequence
  ENSG00000064419_26 (sequence is synthesized)
gtgaactttctaaaaggaaaaataattttaagtaaagaaaaaagaaaaaaaaggaagactaaacagaaaccagaactgaaacattcacctggtagcaaatgacacatgcacgcacacaca

SEQ ID NO: 45038 - DNA, 120 bp, Artificial Sequence
  ENSG00000064419_27 (sequence is synthesized)
catacacgcacaagcgccagtgcgcacgtgtacacagaaaaacaaaaggacaagctttctgtgaaacaaaatatttacttagggataatgtggggattcacatgaattaaatagctgcaa

SEQ ID NO: 45039 - DNA, 120 bp, Artificial Sequence
  ENSG00000064419_28 (sequence is synthesized)
ttggaagaagagggtcagggtcatttgttcaggttttctattgttttgtcctctctttcctctcctacccttccttctctttctctctcccctccttttaaatgcaaatgagtagaaatt

SEQ ID NO: 45040 - DNA, 120 bp, Artificial Sequence
  ENSG00000064419_29 (sequence is synthesized)
tcttctaccttccccagctgtttcttcccacctttagagttgtttagacaaggaggagtaagcaaggaacttgttctgctttctatcgtggtcacattggtgatgctcgggacctgccag

SEQ ID NO: 45041 - DNA, 120 bp, Artificial Sequence
  ENSG00000064419_30 (sequence is synthesized)
ggtcagaatttatggatatctgaaccctgaccccgttcattctctcagtccacttccaatccacatcagtttgttgtctgccttggagagaagagccaaaactggggtgggcgggtgggt

SEQ ID NO: 45042 - DNA, 120 bp, Artificial Sequence
  ENSG00000064419_31 (sequence is synthesized)
ggggagtgcaggatataaatgtgtaagtttttgttttttaaggtttttttcttagtgaattattcacccacagacatgagagaaaaaaagagggagggtgtgtggagaaaaaatgtttac

SEQ ID NO: 45043 - DNA, 120 bp, Artificial Sequence
  ENSG00000064419_32 (sequence is synthesized)
agggctaacaagggatgatgtgtcatttagtatgttactaaaaagtgtggaaatgacttgattttaaggggagggtgaggccgaagagggaagcccaaagcagatcttaatgtttcaaag

SEQ ID NO: 45044 - DNA, 120 bp, Artificial Sequence
  ENSG00000064419_33 (sequence is synthesized)
gagtgcagcccttcacagccatcagatatgagggcactgttctgtctggtgttgtagccatctcaagaacaaatcaacagcaacaaaagagaaagaataaatttttaaaatttaaccagt

SEQ ID NO: 45045 - DNA, 120 bp, Artificial Sequence
  ENSG00000064419_34 (sequence is synthesized)
ctggtgtgtggcctcccaagataggcttctgagggcaagtcagcgactgaagacgggagcgccagaatctgtggactcaagagtctagaatcaagtggaaaaaccggaaaaaaggccagg

SEQ ID NO: 45046 - DNA, 120 bp, Artificial Sequence
  ENSG00000064419_35 (sequence is synthesized)
cctcctgctgactctgagccccaggcttcagttgagatggtcctttcagaaatgtggagcttagtccaagcctggatttcagtgggtagcacctggcatctgtggctagaaagtcctatg

SEQ ID NO: 45047 - DNA, 120 bp, Artificial Sequence
  ENSG00000064419_36 (sequence is synthesized)
gagtgttgatccaaagaagccctttagcaatgctgtgtgtcgtcacagcctgttatttggccagaatataacctctgaaatcagtaactgtgagtacttaccgcctgtactcagggaaaa

SEQ ID NO: 45048 - DNA, 120 bp, Artificial Sequence
  ENSG00000064490_0 (sequence is synthesized)
ctttgcggacaagaaaggggctgtgtgagacgcagggaaggaggcacacccgggggtggcgcagtgaggagggggcgcgacggccaggaggctggtggagcgacacccaggcaggagagg

SEQ ID NO: 45049 - DNA, 120 bp, Artificial Sequence
  ENSG00000064490_1 (sequence is synthesized)
gggaagaactctctccctttctgaacccccttttccttgagagacgagttgggggagtcctccacgcattacccactcgggccgcaaaaactcccttctttagccctctgcccccgccct

SEQ ID NO: 45050 - DNA, 120 bp, Artificial Sequence
  ENSG00000064490_2 (sequence is synthesized)
tgcttataagcctttgagaccgcagaagggaccttgttgtggaacgggacggccaagaggaagccagatcgctgagggtccggtctccagtttgcctcctgctatatccattggaagaga

SEQ ID NO: 45051 - DNA, 120 bp, Artificial Sequence
  ENSG00000064490_3 (sequence is synthesized)
aaagtttgtgacttgggcccccaagttttgagagaactgggctttcggcgcggggggacagaggaggctcgtggggagctttccccatggagcttacccagcctgcagaagacctcatcc

SEQ ID NO: 45052 - DNA, 120 bp, Artificial Sequence
  ENSG00000064490_4 (sequence is synthesized)
agacccagcagacccctgcctcagaacttggggaccctgaagaccccggagaggaggctgcagatggctcagacactgtggtcctcagtctctttccctgcacccctgagcctgtgaatc

SEQ ID NO: 45053 - DNA, 120 bp, Artificial Sequence
  ENSG00000064490_5 (sequence is synthesized)
accactctcaccaaccggcagcgagggaacgaggtgtcagctctgccggccaccctagactccctgtccatccaccagctcgcagcacagggggagctggaccagctgaaggagcatttg

SEQ ID NO: 45054 - DNA, 120 bp, Artificial Sequence
  ENSG00000064490_6 (sequence is synthesized)
cggaaaggtgacaacctcgtcaacaagccagacgagcgcggcttcacccccctcatctgggcctccgcctttggagagattgagaccgttcgcttcctgctggagtggggtgccgacccc

SEQ ID NO: 45055 - DNA, 120 bp, Artificial Sequence
  ENSG00000064490_7 (sequence is synthesized)
cacatcctggcaaaagagcgagagagcgccctgtcgctggccagcacaggcggctacacagacattgtggggctgctgctggagcgtgacgtggacatcaacatctatgattggaatgga

SEQ ID NO: 45056 - DNA, 120 bp, Artificial Sequence
  ENSG00000064490_8 (sequence is synthesized)
gggacgccactgctgtacgctgtgcgcgggaaccacgtgaaatgcgttgaggccttgctggcccgaggcgctgacctcaccaccgaagccgactctggctacaccccgatggaccttgcc

SEQ ID NO: 45057 - DNA, 120 bp, Artificial Sequence
  ENSG00000064490_9 (sequence is synthesized)
gtggccctgggataccggaaagtgcaacaggtgatcgagaaccacatcctcaagctcttccagagcaacctggtgcccgctgaccctgagtgaaggccgcctgccggggactcagacact

SEQ ID NO: 45058 - DNA, 120 bp, Artificial Sequence
  ENSG00000064490_10 (sequence is synthesized)
cagggaacaaaatggtcagccagagctggggaaacccagaactgacttcaaaggcagcttctggacaggtggtgggaggggacccttcccaagaggaaccaataaaccttctgtgcagaa

SEQ ID NO: 45059 - DNA, 120 bp, Artificial Sequence
  ENSG00000064490_11 (sequence is synthesized)
aaaagaaggcgcaggcgcaactgccctcccaggaccccagcggaacccacgccctcccctaagtcttaaagggccagaggcagcacttactgcccgggcccttcctcacttttggggggc

SEQ ID NO: 45060 - DNA, 120 bp, Artificial Sequence
  ENSG00000064490_12 (sequence is synthesized)
gggggtgcgcaagcgcagtgggggagctctggggtgggggtagcggtcgagtatcaagttgctttctgtcccggcagaggaagccagatcgctgagggtccggtctccagtttgcctcct

SEQ ID NO: 45061 - DNA, 82 bp, Artificial Sequence
  ENSG00000064490_13 (sequence is synthesized)
cccgaggcgctgacctcaccaccgaagccgactctggctacaccccgatggaccttgccgtggccctgggataccggatatg

SEQ ID NO: 45062 - DNA, 120 bp, Artificial Sequence
  ENSG00000064490_14 (sequence is synthesized)
gggaaccacgtgaaatgcgttgaggccttgctggagacccttcagccacgttcttcagtggagaccaagatagcagagcccgaggcgctgacctcaccaccgaagccgactctggctaca

SEQ ID NO: 45063 - DNA, 120 bp, Artificial Sequence
  ENSG00000064490_15 (sequence is synthesized)
tatgggtgtccatacccactcatgacgtgacctgtgagtgtccacgtgtatgattgtatctaactgtgtgtgtgaccgtgttcatgtatgtccatcaacatacgctccccctcattcccc

SEQ ID NO: 45064 - DNA, 120 bp, Artificial Sequence
  ENSG00000064490_16 (sequence is synthesized)
atcctgagggcagggagacgcccaagtgttgcttgaagagttcttggagcaggtagtccctgcctgctcttctcggaggatggatcagaggggaggaggtggtaggaccacacgggagtc

SEQ ID NO: 45065 - DNA, 120 bp, Artificial Sequence
  ENSG00000064490_17 (sequence is synthesized)
tcttcttgagatagccccgcccatctacccgaagccggagccaattggctccctctggaaaaatctgtgggcagggtaaagaggaagccagatcgctgagggtccggtctccagtttgcc

SEQ ID NO: 45066 - DNA, 120 bp, Artificial Sequence
  ENSG00000064490_18 (sequence is synthesized)
agaggagtaggagggtgggagggcctgtgaggagcaatcgtggacagagggtaaactgaggcacagagaagcaaggggatgagtgaggactctgcctctgtcctgccccagccctgtcca

SEQ ID NO: 45067 - DNA, 120 bp, Artificial Sequence
  ENSG00000064545_0 (sequence is synthesized)
gcccggagccctaggccggtgggtgagtgcaccgcgttctcgcacgcgtcatggcggtcctcggagtacagctggtggtgaccctgctcactgccaccctcatgcacaggctggcgccac

SEQ ID NO: 45068 - DNA, 120 bp, Artificial Sequence
  ENSG00000064545_1 (sequence is synthesized)
actgctccttcgcgcgctggctgctctgtaacggcagtttgttccgatacaagcacccgtctgaggaggagcttcgggccctggcggggaagccgaggcccagaggcaggaaagagcggt

SEQ ID NO: 45069 - DNA, 120 bp, Artificial Sequence
  ENSG00000064545_2 (sequence is synthesized)
gggccaatggccttagtgaggagaagccactgtctgtgccccgagatgccccgttccagctggagacctgccccctcacgaccgtggatgccctggtcctgcgcttcttcctggagtacc

SEQ ID NO: 45070 - DNA, 120 bp, Artificial Sequence
  ENSG00000064545_3 (sequence is synthesized)
agtggtttgtggactttgctgtgtactcgggcggcgtgtacctcttcacagaggcctactactacatgctgggaccagccaaggagactaacattgctgtgttctggtgcctgctcacgg

SEQ ID NO: 45071 - DNA, 120 bp, Artificial Sequence
  ENSG00000064545_4 (sequence is synthesized)
tgaccttctccatcaagatgttcctgacagtgacacggctgtacttcagcgccgaggaggggggtgagcgctctgtctgcctcacctttgccttcctcttcctgctgctggccatgctgg

SEQ ID NO: 45072 - DNA, 120 bp, Artificial Sequence
  ENSG00000064545_5 (sequence is synthesized)
tgcaagtggtgcgggaggagaccctcgagctgggcctggagcctggtctggccagcatgacccagaacttagagccacttctgaagaagcagggctgggactgggcgcttcctgtggcca

SEQ ID NO: 45073 - DNA, 120 bp, Artificial Sequence
  ENSG00000064545_6 (sequence is synthesized)
agctggctatccgcgtgggactggcagtggtgggctctgtgctgggtgccttcctcaccttcccaggcctgcggctggcccagacccaccgggacgcactgaccatgtcggaggacagac

SEQ ID NO: 45074 - DNA, 120 bp, Artificial Sequence
  ENSG00000064545_7 (sequence is synthesized)
ccatgctgcagttcctcctgcacaccagcttcctgtctcccctgttcatcctgtggctctggacaaagcccattgcacgggacttcctgcaccagccgccgtttggggagacgcgtttct

SEQ ID NO: 45075 - DNA, 120 bp, Artificial Sequence
  ENSG00000064545_8 (sequence is synthesized)
ccctgctgtccgattctgccttcgactctgggcgcctctggttgctggtggtgctgtgcctgctgcggctggcggtgacccggccccacctgcaggcctacctgtgcctggccaaggccc

SEQ ID NO: 45076 - DNA, 120 bp, Artificial Sequence
  ENSG00000064545_9 (sequence is synthesized)
gagcttgcagtacctgacgccgctcatcctcaccctcaactgcacacttctgctcaagacgctgggaggctattcctggggcctgggcccagctcctctactatcccccgacccatcctc

SEQ ID NO: 45077 - DNA, 120 bp, Artificial Sequence
  ENSG00000064545_10 (sequence is synthesized)
agccagcgctgcccccatcggctctggggaggacgaagtccagcagactgcagcgcggattgccggggctctgggtggcctgcttactcccctcttcctccgtggcgtcctggcctacct

SEQ ID NO: 45078 - DNA, 120 bp, Artificial Sequence
  ENSG00000064545_11 (sequence is synthesized)
catctggtggacggctgcctgccagctgctcgccagccttttcggcctctacttccaccagcacttggcaggctcctagctgcctgcagaccctcctggggccctgaggtctgttcctgg

SEQ ID NO: 45079 - DNA, 120 bp, Artificial Sequence
  ENSG00000064545_12 (sequence is synthesized)
ggcagcgggacactagcctgccccctctgtttgcgcccccgtgtccccagctgcaaggtggggccggactccccggcgttcccttcaccacagtgcctgacccgcggccccccttggacg

SEQ ID NO: 45080 - DNA, 120 bp, Artificial Sequence
  ENSG00000064545_13 (sequence is synthesized)
ccgagtttctgcctcagaactgtctctcctgggcccagcagcatgagggtcccgaggccattgtctccgaagcgtatgtgccaggtttgagtggcaagggtgatgctggctgctcttctg

SEQ ID NO: 45081 - DNA, 120 bp, Artificial Sequence
  ENSG00000064545_14 (sequence is synthesized)
aacaaataaaggagcatgccgatttttacaaacagggtctgagtggtttgggactcgggcttgtgcagggtggtagctgtcttgcacgtccctgtggcacctgcccgggtgcagggtggg

SEQ ID NO: 45082 - DNA, 120 bp, Artificial Sequence
  ENSG00000064545_15 (sequence is synthesized)
ggctgcgcgggagggagagaggagcaggactgagaggggagcaaaggtctgggaggagaaaggagagcaagaaggaggccaggctcggcggctcacgcccgtaatcccaaatcccagcac

SEQ ID NO: 45083 - DNA, 120 bp, Artificial Sequence
  ENSG00000064545_16 (sequence is synthesized)
tgaggccagcagtttgagaccagcctggtcaacgcatggtgaaacccagtctttactaaaataacaaaaattaggcatggtggcgcatgcatgtagttccagctactgagaaggatgagc

SEQ ID NO: 45084 - DNA, 90 bp, Artificial Sequence
  ENSG00000064545_17 (sequence is synthesized)
ttactaaaataacaaaaattaggcatggtggcgcatgcatgtagttccagctactgagaaggatgagccagaagagtcgcttgaacctga

SEQ ID NO: 45085 - DNA, 120 bp, Artificial Sequence
  ENSG00000064545_18 (sequence is synthesized)
ctgtaacggcaggctaccctctaactagaatccctggatttggggttcactgcctcaacctcccaaccccacgcctgagcttccctgactgcccgtccttgctctcagtttgttccgata

SEQ ID NO: 45086 - DNA, 120 bp, Artificial Sequence
  ENSG00000064545_19 (sequence is synthesized)
taggccggtgggtgagtgcaccgcgttctcgcacgcgtcatggtgctgccagtcatgtcccctccccccaggcggtcctcggagtacagctggtggtgaccctgctcactgccaccctca

SEQ ID NO: 45087 - DNA, 120 bp, Artificial Sequence
  ENSG00000064545_20 (sequence is synthesized)
ggccatctcccactcaacgggaacccccagcccacatcctgatctgagatccagcaccccaaaaccgaactcctctaggtcatccccaaggcctatttgtgcagcagtgcttgttccctg

SEQ ID NO: 45088 - DNA, 120 bp, Artificial Sequence
  ENSG00000064545_21 (sequence is synthesized)
actctactccctcagccctgaaggtctccacaccctcatgggggtggggaggatttgaaggaagaatgttctattaggaggggagcgagctgggccccagggctgagcagagtgcccccc

SEQ ID NO: 45089 - DNA, 120 bp, Artificial Sequence
  ENSG00000064545_22 (sequence is synthesized)
tgggccccagccccagccttgggagggtggctcctccccaggaacggcctcacccctgctcagggggctctgggctcagggacacaggaccggcccacccatacttccaggcgctgatct

SEQ ID NO: 45090 - DNA, 120 bp, Artificial Sequence
  ENSG00000064545_23 (sequence is synthesized)
gggcacaggtgaaccgggagaccctagtccaaggagatggtcactgtcaagttagcatctgtttcctggcagtttgctctagccagtcctgtgggtgggtggggggatccccatatccca

SEQ ID NO: 45091 - DNA, 120 bp, Artificial Sequence
  ENSG00000064545_24 (sequence is synthesized)
gacctaggccagagggaacctggggctcagggtggggttcctggtcctttgggcgtggagtcgtcccaaaccagaaggcctcctgctgcagccacccctgctacctgcccacaggtggtc

SEQ ID NO: 45092 - DNA, 120 bp, Artificial Sequence
  ENSG00000064547_0 (sequence is synthesized)
ctctcagcaacccgcacagggcgcacccggacgctctaccgctcccgccgcagtcgccgggccatgggcctcgagcccgccccgaacccccgcgagcccgccttgtctgcggcgtgactg

SEQ ID NO: 45093 - DNA, 120 bp, Artificial Sequence
  ENSG00000064547_1 (sequence is synthesized)
gaggcccagatggtcatcatgggccagtgctactacaacgagaccatcggcttcttctataacaacagtggcaaagagctcagctcccactggcggcccaaggatgtggtcgtggtggca

SEQ ID NO: 45094 - DNA, 120 bp, Artificial Sequence
  ENSG00000064547_2 (sequence is synthesized)
ctggggctgaccgtcagcgtgctggtgctgctgaccaatctgctggtcatagcagccatcgcctccaaccgccgcttccaccagcccatctactacctgctcggcaatctggccgcggct

SEQ ID NO: 45095 - DNA, 120 bp, Artificial Sequence
  ENSG00000064547_3 (sequence is synthesized)
gacctcttcgcgggcgtggcctacctcttcctcatgttccacactggtccccgcacagcccgactttcacttgagggctggttcctgcggcagggcttgctggacacaagcctcactgcg

SEQ ID NO: 45096 - DNA, 120 bp, Artificial Sequence
  ENSG00000064547_4 (sequence is synthesized)
tcggtggccacactgctggccatcgccgtggagcggcaccgcagtgtgatggccgtgcagctgcacagccgcctgccccgtggccgcgtggtcatgctcattgtgggcgtgtgggtggct

SEQ ID NO: 45097 - DNA, 120 bp, Artificial Sequence
  ENSG00000064547_5 (sequence is synthesized)
gccctgggcctggggctgctgcctgcccactcctggcactgcctctgtgccctggaccgctgctcacgcatggcacccctgctcagccgctcctatttggccgtctgggctctgtcgagc

SEQ ID NO: 45098 - DNA, 120 bp, Artificial Sequence
  ENSG00000064547_6 (sequence is synthesized)
ctgcttgtcttcctgctcatggtggctgtgtacacccgcattttcttctacgtgcggcggcgagtgcagcgcatggcagagcatgtcagctgccacccccgctaccgagagaccacgctc

SEQ ID NO: 45099 - DNA, 120 bp, Artificial Sequence
  ENSG00000064547_7 (sequence is synthesized)
tcctggctgtagaaaagtacttcctactgttggccgaggccaactccctggtcaatgctgctgtgtactcttgccgagatgctgagatgcgccgcaccttccgccgccttctctgctgcg

SEQ ID NO: 45100 - DNA, 120 bp, Artificial Sequence
  ENSG00000064547_8 (sequence is synthesized)
cgtgcctccgccagtccacccgcgagtctgtccactatacatcctctgcccagggaggtgccagcactcgcatcatgcttcccgagaacggccacccactgatggactccaccctttagc

SEQ ID NO: 45101 - DNA, 120 bp, Artificial Sequence
  ENSG00000064547_9 (sequence is synthesized)
taccttgaacttcagcggtacgcggcaagcaacaaatccacagcccctgatgacttgtgggtgctcctggctcaacccaaccaacaggactgactgactggcaggacaaggtctggcatg

SEQ ID NO: 45102 - DNA, 120 bp, Artificial Sequence
  ENSG00000064547_10 (sequence is synthesized)
gcacagcaccactgccaggcctccccaggcacaccactctgcccagggaatgggggctttgggtcatctcccactgcctgggggagtcagatggggtgcaggaatctggctcttcagcca

SEQ ID NO: 45103 - DNA, 120 bp, Artificial Sequence
  ENSG00000064547_11 (sequence is synthesized)
tctcaggtttagggggtttgtaacagacattattctgttttcactgcgtatccttggtaagccctgtggactggttcctgctgtgtgatgctgagggttttaaggtggggagagataagg

SEQ ID NO: 45104 - DNA, 120 bp, Artificial Sequence
  ENSG00000064547_12 (sequence is synthesized)
gctctctcgggccatgctacccggtatgactgggtaatgaggacagactgtggacaccccatctacctgagtctgattctttagcagcagagactgaggggtgcagagtgtgagctggga

SEQ ID NO: 45105 - DNA, 120 bp, Artificial Sequence
  ENSG00000064547_13 (sequence is synthesized)
aaggtttgtggctccttgcagcctccagggactggcctgtccccgatagaattgaagcagtccacggggaggggatgatacaaggagtaaacctttctttacactctgaggtctccaaaa

SEQ ID NO: 45106 - DNA, 120 bp, Artificial Sequence
  ENSG00000064547_14 (sequence is synthesized)
ataacaaagtaccgataaccgggacaatggggctgtgtgctccggaccgtgggagcccggggccgccgcagggaggccgagggaggaagccacagggcagggcagggcagggccgggctt

SEQ ID NO: 45107 - DNA, 120 bp, Artificial Sequence
  ENSG00000064547_15 (sequence is synthesized)
tgcagggggcagcgctgtcccagggtgaggggtacgggggcgggattgcaaaaccctagcgtgcgcccgatgatcagctggggccgcagaggtgggcctcgcacaggaggccgcggctcg

SEQ ID NO: 45108 - DNA, 120 bp, Artificial Sequence
  ENSG00000064547_16 (sequence is synthesized)
ctgatactgcgagctggcaaagccgaagctgggcgggggtccgggcggtgggagccaagtcggatcagggagtggcttgtaactcggcggccgattggacacgaagaagagagcggggtg

SEQ ID NO: 45109 - DNA, 120 bp, Artificial Sequence
  ENSG00000064547_17 (sequence is synthesized)
gggctgggagggttgggggtccggagcgggggcgcggacccaagaccacctggagctccgcccgggcagcgcggggtcacggcgggaattttcgggtcgccgagtgactcagccccgcag

SEQ ID NO: 45110 - DNA, 120 bp, Artificial Sequence
  ENSG00000064547_18 (sequence is synthesized)
ggccatccatcccttccccaaccgctgtctttgtcccggagaccgccagtgtcctccgtcccacccggaacagcctattgccccgcccgcttgggaagcactcgcgcccaaatcccgccg

SEQ ID NO: 45111 - DNA, 120 bp, Artificial Sequence
  ENSG00000064547_19 (sequence is synthesized)
actaacttctggggccgcctctctgtccactccgatcacctccacgcctcggcaccgccccctcgcagggttctagtcttattagtaggtaagaaacagctgctcctccacctccacccc

SEQ ID NO: 45112 - DNA, 120 bp, Artificial Sequence
  ENSG00000064547_20 (sequence is synthesized)
cgcacagggcgcacccggacgctctaccgctcccgccgcagtcgccgggccatgggcctcgagcccgccccgaacccccgcgagcccgccttgtctgcggcgtgactggaggcccagctg

SEQ ID NO: 45113 - DNA, 120 bp, Artificial Sequence
  ENSG00000064547_21 (sequence is synthesized)
tcctccctcatctcttcccgcagctcacacccctttgtctttccctaaccctcctctccccacaacccaaaccgggtcacacattggcggcaggtgggctgggattcgaccatagatggg

SEQ ID NO: 45114 - DNA, 120 bp, Artificial Sequence
  ENSG00000064547_22 (sequence is synthesized)
ttttgtttcacttctggttcaaaaacctattgacttgggtgatgtcttgcacacaggtcttattagtaggtaagaaacagctgctcctccacctccaccccagccccatggagcttgctt

SEQ ID NO: 45115 - DNA, 120 bp, Artificial Sequence
  ENSG00000064547_23 (sequence is synthesized)
ccaggtcttattagtaggtaagaaacagctgctcctccacctccaccccagccccatggagcttgctttttccaggccaccgtagtcctcaccactgccactttgcttcgaggtatctga

SEQ ID NO: 45116 - DNA, 120 bp, Artificial Sequence
  ENSG00000064601_0 (sequence is synthesized)
gcaatgatggtgaccgcaaggcgaccttgtaaggcatttcccccctgactcccttccccgagcctctgcccgggggtcctagcgccgctttctcagccatcccgcctacaacttagccgt

SEQ ID NO: 45117 - DNA, 120 bp, Artificial Sequence
  ENSG00000064601_1 (sequence is synthesized)
ccacaacaggatcatctgatcgcgtgcgcccgggctacgatctgcgaggcccgcggaccttgacccggcattgaccgccaccgccccccaggtccgtagggaccaaagaaggggcgggag

SEQ ID NO: 45118 - DNA, 120 bp, Artificial Sequence
  ENSG00000064601_2 (sequence is synthesized)
gaagactgtcacgtggcgccggagttcacgtgactcgtacacatgacttccagtccccgggcgcctcctggagagcaaggacgcgggggagcagagatgatccgagccgcgccgccgccg

SEQ ID NO: 45119 - DNA, 120 bp, Artificial Sequence
  ENSG00000064601_3 (sequence is synthesized)
ctgttcctgctgctgctgctgctgctgctgctagtgtcctgggcgtcccgaggcgaggcagcccccgaccaggacgagatccagcgcctccccgggctggccaagcagccgtctttccgc

SEQ ID NO: 45120 - DNA, 120 bp, Artificial Sequence
  ENSG00000064601_4 (sequence is synthesized)
cagtactccggctacctcaaaggctccggctccaagcacctccactactggtttgtggagtcccagaaggatcccgagaacagccctgtggtgctttggctcaatgggggtcccggctgc

SEQ ID NO: 45121 - DNA, 120 bp, Artificial Sequence
  ENSG00000064601_5 (sequence is synthesized)
agctcactagatgggctcctcacagagcatggccccttcctggtccagccagatggtgtcaccctggagtacaacccctattcttggaatctgattgccaatgtgttatacctggagtcc

SEQ ID NO: 45122 - DNA, 120 bp, Artificial Sequence
  ENSG00000064601_6 (sequence is synthesized)
ccagctggggtgggcttctcctactccgatgacaagttttatgcaactaatgacactgaggtcgcccagagcaattttgaggcccttcaagatttcttccgcctctttccggagtacaag

SEQ ID NO: 45123 - DNA, 120 bp, Artificial Sequence
  ENSG00000064601_7 (sequence is synthesized)
aacaacaaacttttcctgaccggggagagctatgctggcatctacatccccaccctggccgtgctggtcatgcaggatcccagcatgaaccttcaggggctggctgtgggcaatggactc

SEQ ID NO: 45124 - DNA, 120 bp, Artificial Sequence
  ENSG00000064601_8 (sequence is synthesized)
agtgtaacttctatgacaacaaagacctggaatgcgtgaccaatcttcaggaagtggcccgcatcgtgggcaactctggcctcaacatctacaatctctatgccccgtgtgctggagggg

SEQ ID NO: 45125 - DNA, 120 bp, Artificial Sequence
  ENSG00000064601_9 (sequence is synthesized)
tgcccagccattttaggtatgagaaggacactgttgtggtccaggatttgggcaacatcttcactcgcctgccactcaagcggatgtggcatcaggcactgctgcgctcaggggataaag

SEQ ID NO: 45126 - DNA, 120 bp, Artificial Sequence
  ENSG00000064601_10 (sequence is synthesized)
tgcgcatggaccccccctgcaccaacacaacagctgcttccacctacctcaacaacccgtacgtgcggaaggccctcaacatcccggagcagctgccacaatgggacatgtgcaactttc

SEQ ID NO: 45127 - DNA, 120 bp, Artificial Sequence
  ENSG00000064601_11 (sequence is synthesized)
tggtaaacttacagtaccgccgtctctaccgaagcatgaactcccagtatctgaagctgcttagctcacagaaataccagatcctattatataatggagatgtagacatggcctgcaatt

SEQ ID NO: 45128 - DNA, 120 bp, Artificial Sequence
  ENSG00000064601_12 (sequence is synthesized)
tcatgggggatgagtggtttgtggattccctcaaccagaagatggaggtgcagcgccggccctggttagtgaagtacggggacagcggggagcagattgccggcttcgtgaaggagttct

SEQ ID NO: 45129 - DNA, 120 bp, Artificial Sequence
  ENSG00000064601_13 (sequence is synthesized)
cccacatcgcctttctcacgatcaagggcgccggccacatggttcccaccgacaagcccctcgctgccttcaccatgttctcccgcttcctgaacaagcagccatactgatgaccacagc

SEQ ID NO: 45130 - DNA, 120 bp, Artificial Sequence
  ENSG00000064601_14 (sequence is synthesized)
aaccagctccacggcctgatgcagcccctcccagcctctcccgctaggagagtcctcttctaagcaaagtgcccctgcaggccgggttctgccgccaggactgcccccttcccagagccc

SEQ ID NO: 45131 - DNA, 120 bp, Artificial Sequence
  ENSG00000064601_15 (sequence is synthesized)
tgtacatcccagactgggcccagggtctcccatagacagcctgggggcaagttagcactttattcccgcagcagttcctgaatggggtggcctggccccttctctgcttaaagaatgccc

SEQ ID NO: 45132 - DNA, 120 bp, Artificial Sequence
  ENSG00000064601_16 (sequence is synthesized)
tttatgatgcactgattccatcccaggaacccaacagagctcaggacagcccacagggaggtggtggacggactgtaattgatagattgattatggaattaaattgggtacagcttcaaa

SEQ ID NO: 45133 - DNA, 120 bp, Artificial Sequence
  ENSG00000064601_17 (sequence is synthesized)
agaggtgagctggcaccggaggctggaggggatccccgagcccgggatcggtgcgcggcagaggaggctcgcgggtgggagctggcgctggggccggggcttccctcgcggaggcgccgc

SEQ ID NO: 45134 - DNA, 120 bp, Artificial Sequence
  ENSG00000064601_18 (sequence is synthesized)
ttgaatttcctgaggggtaggccttgaactagggaagggctggggactgggcttgttccacacccctcatttttaccccatcctgctttagaaataccagatcctattatataatggaga

SEQ ID NO: 45135 - DNA, 120 bp, Artificial Sequence
  ENSG00000064601_19 (sequence is synthesized)
tgtagacatggcctgcaatttcatgggggatgagtggtttgtggattccctcaaccagaagagggcaagtgtggaggaattcccagccctaaggtcttgctggtagctgtgagcaaggat

SEQ ID NO: 45136 - DNA, 120 bp, Artificial Sequence
  ENSG00000064601_20 (sequence is synthesized)
acctccccaccaccggctgccctaggtctgtctgtgtgcctcccacacaggaaactcacctgtcaggctgccagctctgtgttttgcattgagtggcctctcatacccaccggcctacat

SEQ ID NO: 45137 - DNA, 120 bp, Artificial Sequence
  ENSG00000064601_21 (sequence is synthesized)
aaaccaccctgggtttcagcttccggattgctgaaggtctgggtggtagggtgagggaggctcttcctttttgccctccacatgagctgagcaccctgggtgtttcacaggggctggctg

SEQ ID NO: 45138 - DNA, 120 bp, Artificial Sequence
  ENSG00000064601_22 (sequence is synthesized)
taaactagtgccggacagacgaaggcctagcacatgggctacggagccctagtagattccagtccccacactgagccaggaggggtcgctgcccagggatacctacagccatactcgagc

SEQ ID NO: 45139 - DNA, 120 bp, Artificial Sequence
  ENSG00000064601_23 (sequence is synthesized)
tggacaaggcgcacgctctttgtggaagcaaacacgtccaccaccgcgtagaggggctgcgcagctggcagtccccgggcgctcgggcccatgtcctcgccgttgatgatgatgtgcatg

SEQ ID NO: 45140 - DNA, 120 bp, Artificial Sequence
  ENSG00000064601_24 (sequence is synthesized)
tcggccgtgccatcggggcgcgggcaaaagaggacacccaggcggctacggcgcgcggtcggaggcagcacgttcagctcatagagctggtccaagagatggctgtagagccctggccgg

SEQ ID NO: 45141 - DNA, 120 bp, Artificial Sequence
  ENSG00000064601_25 (sequence is synthesized)
ctgcggcccaccaggcggtcccggggaatgcgaaactgctcaatgcgcagatatggttccacgaggagggttggaggtcggctgggggccgctgcctccgcctccgggcggccctcccgg

SEQ ID NO: 45142 - DNA, 120 bp, Artificial Sequence
  ENSG00000064601_26 (sequence is synthesized)
ggcacgcggttgtggtggcgcgtgatggcgaagacccaggtgtggcccaggttgaccagatcgggcagagaaaactcgggaacgggggccagactggcggggtccagcgcggtcagaccg

SEQ ID NO: 45143 - DNA, 120 bp, Artificial Sequence
  ENSG00000064601_27 (sequence is synthesized)
agacgcagatgtccgcaccagcccagctctttctcctcgatctcgaccaggaagacctggcccggggccagcggctcgcggctgaagcacacgccgtgggcgaagctctccacgcgtgtg

SEQ ID NO: 45144 - DNA, 120 bp, Artificial Sequence
  ENSG00000064601_28 (sequence is synthesized)
gcccgcgtcccagaggggtccacgcggatgttggcaccgtgcacccgatggaagcgggtgggagggggctccgggcgctcgagtccccagagtgcacccgaatccacgggctcggaggca

SEQ ID NO: 45145 - DNA, 120 bp, Artificial Sequence
  ENSG00000064601_29 (sequence is synthesized)
gagccaccacgcccagcatccctgtacctttctaaatggtggtgagttgaggctgtctgaatcccagcccatccagcccaacatccaagtcagtcctagagaggtggcccccccccaaaa

SEQ ID NO: 45146 - DNA, 120 bp, Artificial Sequence
  ENSG00000064601_30 (sequence is synthesized)
caagtgaggttccgtggccacctgtgacttggggtggtgggttgctggggcttgtgggcatcggcaggtttctcagggatcttctgtgtagagtttctcaatgagatgagctgtagagga

SEQ ID NO: 45147 - DNA, 120 bp, Artificial Sequence
  ENSG00000064601_31 (sequence is synthesized)
atgccagatgcatcccagtcctcgtaacaaccaaaatgcgtcccttgtacatttctttttctttttttttttgagatggagtcttgctgtcactcaggctggagtgcagtgctgcgatct

SEQ ID NO: 45148 - DNA, 120 bp, Artificial Sequence
  ENSG00000064601_32 (sequence is synthesized)
agctgggggcccttgagacttcctgtcaggacaagggaagctgaaactccgaaaggcgaagcccagggtcctgtgattggtggggtcagaatttgaacctgggtttgtccccacccatgc

SEQ ID NO: 45149 - DNA, 120 bp, Artificial Sequence
  ENSG00000064601_33 (sequence is synthesized)
tgtcctgctataggaggcctaggggtctgcatcagccacggagtcttaagggtgagaagagcttcattcatgccaaaaatgggccagcagaggtccagggtgggaggagaccttgcacaa

SEQ ID NO: 45150 - DNA, 120 bp, Artificial Sequence
  ENSG00000064601_34 (sequence is synthesized)
ggtgatataggaagcactggcagggccaagttaggactaggttctgtccagcacagtggttaatagcatgggctctggagtcacatggcctgggtgcaagtccctgtactagccacataa

SEQ ID NO: 45151 - DNA, 120 bp, Artificial Sequence
  ENSG00000064601_35 (sequence is synthesized)
gagcctcaggttctccatctgtaaaatggggataataatgatatctaccttcacagataaaacatttagtagaatactggacatgcagtaagtcgttagaaaacatgaaaattccctggt

SEQ ID NO: 45152 - DNA, 120 bp, Artificial Sequence
  ENSG00000064601_36 (sequence is synthesized)
tgtggaggattgggagcgggtatgcctgggagtggccagctggctgcctggctctggcccacagagggcaagtgtggaggaattcccagccctaaggtcttgctggtagctgtgagcaag

SEQ ID NO: 45153 - DNA, 120 bp, Artificial Sequence
  ENSG00000064601_37 (sequence is synthesized)
ctttgcatgagctctcccatccctaatcctgagaacaggaccacattccctccttggggactccttgttctccgtccctcattgctttcttgcacctttaagcaatttagtgttctctgg

SEQ ID NO: 45154 - DNA, 120 bp, Artificial Sequence
  ENSG00000064601_38 (sequence is synthesized)
gacatgtgtctaagtgtgtattcccaccaccacctcctatggtggcaaatcccataacctccgtgaggagaaaggacttcttcacatttatcaaacacctgcaacgtggcaggcactgtg

SEQ ID NO: 45155 - DNA, 120 bp, Artificial Sequence
  ENSG00000064601_39 (sequence is synthesized)
cagagcatggccccttcctggtgagtggacagcagggggaaagcacagttcccaaagtaaaaggctggggaaagcgagagaggggctttgtgattttccaaaaagtttccttccttctaa

SEQ ID NO: 45156 - DNA, 120 bp, Artificial Sequence
  ENSG00000064601_40 (sequence is synthesized)
gcctcgggattttcctctatgccattggctttgctgcctgtacctctcagaggttttacccacatgtaaagtgcctctcatggtggccctttccctccacccagctggcccttgggactt

SEQ ID NO: 45157 - DNA, 120 bp, Artificial Sequence
  ENSG00000064607_0 (sequence is synthesized)
gcgctgcggagaccgttggttcatttgcatgtccccgcctcgcgcggcggcggcggcgggtgaggagcctgaggcggcggcgggggtggctccgcgcgcggtggtctcgggggcaaaata

SEQ ID NO: 45158 - DNA, 120 bp, Artificial Sequence
  ENSG00000064607_1 (sequence is synthesized)
gggggcaaaataacatggcagccagacgaattacacaggagacttttgatgctgtattacaagaaaaagccaaacgatatcacatggatgccagtggtgaggctgtaagcgaaactcttc

SEQ ID NO: 45159 - DNA, 120 bp, Artificial Sequence
  ENSG00000064607_2 (sequence is synthesized)
agtttaaagctcaagatctcttaagggcagtcccaagatccagagcagagatgtatgatgacgtccacagcgatggcagatactccctcagtggatctgtagctcactctagagatgccg

SEQ ID NO: 45160 - DNA, 120 bp, Artificial Sequence
  ENSG00000064607_3 (sequence is synthesized)
gaagagaaggcctgagaagtgacgtatttccagggccttccttcagatcaagcaacccttccatcagtgatgacagctactttcgcaaagaatgtggccgggatctggaattttctcact

SEQ ID NO: 45161 - DNA, 120 bp, Artificial Sequence
  ENSG00000064607_4 (sequence is synthesized)
ctgattctcgggaccaggtcattggccaccggaaattggggcatttccgttctcaggactggaaatttgcgctccgtggttcttgggaacaagactttggccatccagtttctcaagagt

SEQ ID NO: 45162 - DNA, 120 bp, Artificial Sequence
  ENSG00000064607_5 (sequence is synthesized)
cctcttggtcacaggagtatagttttggtccctctgcagttttgggggactttggatcttccaggctgattgagaaagagtgtttggagaaggagagtcgggattatgacgtggaccatc

SEQ ID NO: 45163 - DNA, 120 bp, Artificial Sequence
  ENSG00000064607_6 (sequence is synthesized)
ctggggaggctgactctgtgcttaggggcggcagtcaagtccaggccagaggtcgagctctaaacatcgttgaccaggaaggttccctcctaggaaagggggagactcagggcctgctca

SEQ ID NO: 45164 - DNA, 120 bp, Artificial Sequence
  ENSG00000064607_7 (sequence is synthesized)
cagctaaggggggtgttgggaaacttgtcacattgagaaatgtgagcacaaaaaaaatacccaccgtgaatcgtattactcccaaaactcagggcactaaccaaatccagaaaaacactc

SEQ ID NO: 45165 - DNA, 120 bp, Artificial Sequence
  ENSG00000064607_8 (sequence is synthesized)
caagtcctgatgtgaccctggggacaaacccagggacagaagatatccagttccccattcagaagatccctctggggctggatctgaagaatcttcggctccccagaagaaagatgagct

SEQ ID NO: 45166 - DNA, 120 bp, Artificial Sequence
  ENSG00000064607_9 (sequence is synthesized)
ttgacatcatagataagtctgatgttttttcaagatttgggatagaaataatcaaatgggcaggattccacaccataaaagatgatattaaattttcccaacttttccagactctctttg

SEQ ID NO: 45167 - DNA, 120 bp, Artificial Sequence
  ENSG00000064607_10 (sequence is synthesized)
aacttgaaacagaaacctgtgctaaaatgcttgcctcattcaaatgttccttaaaaccagagcacagagatttttgcttttttactatcaaatttttaaagcactctgctttgaaaacac

SEQ ID NO: 45168 - DNA, 120 bp, Artificial Sequence
  ENSG00000064607_11 (sequence is synthesized)
ccagagttgataatgagtttttaaacatgcttttagacaaaggtgctgtgaagaccaaaaattgcttttttgaaatcataaagccttttgacaagtacataatgagacttcaagaccggc

SEQ ID NO: 45169 - DNA, 120 bp, Artificial Sequence
  ENSG00000064607_12 (sequence is synthesized)
ttctgaagagtgtcacacctttgcttatggcctgcaatgcctacgagctaagtgtcaagatgaagaccctcagtaaccccctggacttggctcttgccctagaaaccaccaactctctct

SEQ ID NO: 45170 - DNA, 120 bp, Artificial Sequence
  ENSG00000064607_13 (sequence is synthesized)
gccggaagtctttggcccttttgggacagacattttccttggcctcttctttccggcaggagaaaatcttagaagctgtcggcctgcaagatatagctccctcacctgctgcgtttccaa

SEQ ID NO: 45171 - DNA, 120 bp, Artificial Sequence
  ENSG00000064607_14 (sequence is synthesized)
acttcgaagactccactttgtttgggcgagagtacatagaccacctgaaggcctggctagtcagcagcggatgtcccctccaggttaagaaagccgaaccagagccgatgcgagaggagg

SEQ ID NO: 45172 - DNA, 120 bp, Artificial Sequence
  ENSG00000064607_15 (sequence is synthesized)
ggctccaagtagtctgagtgatgctgtcccccagcgagcagatcacagggtagtgggcaccatcgaccagcttgtgaaacgtgtcatcgaaggcagcctgtctcccaaagagagaactct

SEQ ID NO: 45173 - DNA, 120 bp, Artificial Sequence
  ENSG00000064607_16 (sequence is synthesized)
tctcaaagaggaccctgcttactggtttttgtctgatgaaaatagtctggagtataaatattacaagctgaagttggcagaaatgcagcggatgagcgagaacttgcgaggagccgacca

SEQ ID NO: 45174 - DNA, 120 bp, Artificial Sequence
  ENSG00000064607_17 (sequence is synthesized)
gaagccgacctcagcagactgtgcagtgagggccatgctgtactcccgggctgtccgcaacctcaagaagaaactccttccgtggcagcggcgggggctcctccgtgctcaagggctccg

SEQ ID NO: 45175 - DNA, 120 bp, Artificial Sequence
  ENSG00000064607_18 (sequence is synthesized)
gggctggaaggcgaggagagcgaccaccgggacccagaccctcctatcctcaggcaccaggctgaaacaccacggccggcaggctccaggcctctcacaggcaaaaccatccctgccaga

SEQ ID NO: 45176 - DNA, 120 bp, Artificial Sequence
  ENSG00000064607_19 (sequence is synthesized)
cagaaatgatgctgccaaggactgcccgccagacccagttggaccttctcctcaggaccccagcttagaagcctcaggcccatcccccaagccagcaggagtggacatctctgaagcacc

SEQ ID NO: 45177 - DNA, 120 bp, Artificial Sequence
  ENSG00000064607_20 (sequence is synthesized)
tcagacctcttctccctgcccatctgctgacattgacatgaagacaatggagactgcagagaaactggctagatttgttgctcaggtgggaccagagatcgaacaattcagcatagaaaa

SEQ ID NO: 45178 - DNA, 120 bp, Artificial Sequence
  ENSG00000064607_21 (sequence is synthesized)
cagcaccgataaccctgacctgtggtttctacatgaccaaaatagttctgctttcaaattctatcgaaagaaagtgtttgaactatgtccatcaatttgtttcacgtcatctccgcacaa

SEQ ID NO: 45179 - DNA, 120 bp, Artificial Sequence
  ENSG00000064607_22 (sequence is synthesized)
ccttcacactggtggtggtgacaccacgggttctcaggagagccccgtggacctcatggaaggggaagcagagtttgaagacgagccccctccgcgggaggctgagctggagagcccaga

SEQ ID NO: 45180 - DNA, 120 bp, Artificial Sequence
  ENSG00000064607_23 (sequence is synthesized)
ggtgatgcctgaggaggaggacgaggacgatgaggatgggggagaggaggcccccgctcctggaggggcgggcaagtctgagggcagcacccctgccgacggccttcccggcgaggctgc

SEQ ID NO: 45181 - DNA, 120 bp, Artificial Sequence
  ENSG00000064607_24 (sequence is synthesized)
cgaggacgacctggctggagcacctgccttgtcacaggcctcctcaggtacctgcttccctcggaagaggatcagcagcaagtcattgaaggttggcatgattccagctcccaagagagt

SEQ ID NO: 45182 - DNA, 120 bp, Artificial Sequence
  ENSG00000064607_25 (sequence is synthesized)
gtgtctcatccaggagccaaaagtccatgaaccagttcgaattgcctatgacaggcctcggggtcgtcccatgtccaaaaagaagaaacccaaggacttggacttcgcccagcagaagct

SEQ ID NO: 45183 - DNA, 120 bp, Artificial Sequence
  ENSG00000064607_26 (sequence is synthesized)
gaccgataagaacctgggcttccagatgctgcagaagatgggctggaaggagggccatggcctgggctccctcggaaagggcatcagggagccggtcagcgtgggaaccccctcggaagg

SEQ ID NO: 45184 - DNA, 120 bp, Artificial Sequence
  ENSG00000064607_27 (sequence is synthesized)
ggaagggttgggtgctgacgggcaggagcacaaagaagacacattcgatgtgttccgacagaggatgatgcagatgtacagacacaagcgggccaacaaatagttccagggtcacccccg

SEQ ID NO: 45185 - DNA, 120 bp, Artificial Sequence
  ENSG00000064607_28 (sequence is synthesized)
agaggacaacaggcatctggaagtgctctctcgccactctgggtgctttactgtctctggcttgtttccatcactggaaatcacttagagaattgtagtgtttttggtccttgataaagc

SEQ ID NO: 45186 - DNA, 120 bp, Artificial Sequence
  ENSG00000064607_29 (sequence is synthesized)
ctagaagacatttgtgatgttacaaaatggaagttttcttttgtttctgttttttaagatctaagaagttgtgaatgttgttaatcatttagccgttgcaataaatgtagaggaaatgca

SEQ ID NO: 45187 - DNA, 120 bp, Artificial Sequence
  ENSG00000064607_30 (sequence is synthesized)
cccaagtacggtttggtgtgtacatgaaaacaaacgtctctgcagtctctggggcggaggtttcgctggcttttctttctctcaaagaaaaaaacatgcaccattttcaatgtgcttttg

SEQ ID NO: 45188 - DNA, 120 bp, Artificial Sequence
  ENSG00000064607_31 (sequence is synthesized)
cctctcctctctgttcacatgcttttagcagcaagtcccctccaaatctgtcttggttccccttcagaaggtggcgctgcccccgaaaggcacctcagcctgtgagtgctgaggaaccag

SEQ ID NO: 45189 - DNA, 120 bp, Artificial Sequence
  ENSG00000064607_32 (sequence is synthesized)
ctcctctggctgattttccagttggactggccattgctctccagaagtgctctgttagcaaacgtgatgtggaaacgatcacagatggtgttttctcgttgttcgccagaatttatacgg

SEQ ID NO: 45190 - DNA, 120 bp, Artificial Sequence
  ENSG00000064607_33 (sequence is synthesized)
gggagacaaattcccggtaattaccaagtctgcactcgggtaccaaagctctgaagctctctgaacagttgccatacttgagttgatgaatgtgttattcatggtgtctcatctcatcaa

SEQ ID NO: 45191 - DNA, 120 bp, Artificial Sequence
  ENSG00000064607_34 (sequence is synthesized)
tgcatcttgagagacttaatgaaattttagcaacagtatagaatagctctatcgggtggggagtaatcattaaacagatgaaatcggccccagatttacatgtctctttagaatccacag

SEQ ID NO: 45192 - DNA, 120 bp, Artificial Sequence
  ENSG00000064607_35 (sequence is synthesized)
tgtaagcaaactacagttacaaagggatgggggttgtaaaccctctgagactctgcacttttcgcacgtatggcatcgtcaagtgctgtcttattacagcctttgtaaggagaggcaggc

SEQ ID NO: 45193 - DNA, 120 bp, Artificial Sequence
  ENSG00000064607_36 (sequence is synthesized)
tcctcctggggtgggctctgcagctgctctatttccaggcatgtgatcgcccccgctctccagattccccagcactctgctgcgtgtaactccactcaattctccactcatccttccttg

SEQ ID NO: 45194 - DNA, 120 bp, Artificial Sequence
  ENSG00000064607_37 (sequence is synthesized)
tgaagcaggatcgttgaagttttaagtatgggcaaaaatctggaaaacttaggatccctctgacaccccaggattaggggacacagcagtggctagggcatcagccacagaactgagcgg

SEQ ID NO: 45195 - DNA, 79 bp, Artificial Sequence
  ENSG00000064607_38 (sequence is synthesized)
acacagcagtggctagggcatcagccacagaactgagcgggaaatgccacttgtattggctgtaaagaaatcctggctt

SEQ ID NO: 45196 - DNA, 120 bp, Artificial Sequence
  ENSG00000064607_39 (sequence is synthesized)
gcgagactctgtctcaaaaaaaaaaaaggaaatcctggctttctttaagccacagacttcctaggctgtggtcccagctccttgtctgcctggtccctgtcaccttgcagtgccaccacc

SEQ ID NO: 45197 - DNA, 120 bp, Artificial Sequence
  ENSG00000064607_40 (sequence is synthesized)
ccaccacccccaggggctctgcttgcttccagtggcttctgtagctttggcaactggcagatctttatggcagtagaggtgccagcatggaggatggagtttgggtttataacccaaccc

SEQ ID NO: 45198 - DNA, 120 bp, Artificial Sequence
  ENSG00000064607_41 (sequence is synthesized)
tcgaacgaaccagcctgtgggggcctggagtggagctggttttggggagtcacaggtgcggggggttcatcttctcctttctccttctcctttcctgacccctccgacagcttccatgtt

SEQ ID NO: 45199 - DNA, 120 bp, Artificial Sequence
  ENSG00000064607_42 (sequence is synthesized)
ggccatgggtcaggtgaatggatggagctccaagcggggctcagcccattgacccgagcgaggcgcacacacctgcagcgtggatcaagcgcactctctccagcatcgccctgaccattc

SEQ ID NO: 45200 - DNA, 120 bp, Artificial Sequence
  ENSG00000064607_43 (sequence is synthesized)
catgtgctttgtcctagcatgttcattcttgactttctccacttcattttattaaaaagttaaatgctttaggaatctgtggcgtgtggccactgaccgccccccacctcctgccgctcc

SEQ ID NO: 45201 - DNA, 120 bp, Artificial Sequence
  ENSG00000064607_44 (sequence is synthesized)
tccaagtttgagctgagatggttctgtgagtccttggcaggggtcaaagggcacatctccttgaacctagaaagccccctacactctcagaggacacctctcctgtggattcagcgctgg

SEQ ID NO: 45202 - DNA, 120 bp, Artificial Sequence
  ENSG00000064607_45 (sequence is synthesized)
ggcagtgaaggtgtcgggagccagcagagcatggtgcgtgctgccagctgccggccagccgggatagaggagatgccactggccctccgtgcccccagcccctccctcttaaccgaggct

SEQ ID NO: 45203 - DNA, 120 bp, Artificial Sequence
  ENSG00000064607_46 (sequence is synthesized)
gtccttgctctctgcagaggccgctctgcaggatcctcgtgtcgcgcgtgatgtgtggtggcacagccgtgtcaaagtcacagtgtcttttctgtcgttctagttccagggtcacccccg

SEQ ID NO: 45204 - DNA, 120 bp, Artificial Sequence
  ENSG00000064607_47 (sequence is synthesized)
aaccacgtacccgagggtcgcgccagcccgaccctgcggcacccccactccccactccgcgcgggacaggcctcggcagccgcagcgtctcacccggtcttcgcggccacgtggggaaag

SEQ ID NO: 45205 - DNA, 120 bp, Artificial Sequence
  ENSG00000064607_48 (sequence is synthesized)
gtggggcgcgcggttgtcacccagggagccgcctctagccccttccggccgccgtacgcgcgcaggcgctgtggcgcccctaggcttggcctcccagagactcgcggacgctcacgataa

SEQ ID NO: 45206 - DNA, 120 bp, Artificial Sequence
  ENSG00000064607_49 (sequence is synthesized)
tgatgttccctgctcccccaaaaatgccacacacaaaaaaaatcacaaaattctgtgagggaaacaaaagggtctatggatgtggatatgccccattcttaccttccaggtttgctgaag

SEQ ID NO: 45207 - DNA, 120 bp, Artificial Sequence
  ENSG00000064607_50 (sequence is synthesized)
gagcaaacctcacactggccaagggcagatgcgcatggcctgcctggtgccccggctgtgagcccctcaaggcctccaggccagcctccgtggatgtgcgtgtggaaataggccacgcct

SEQ ID NO: 45208 - DNA, 120 bp, Artificial Sequence
  ENSG00000064607_51 (sequence is synthesized)
gtctcttctcttgctcaagttttctctcacagatgacagccacctaccacataacatgaccagcaaacggactgttcctagtccagagggccttgccatcatgcaagtggaagggcgact

SEQ ID NO: 45209 - DNA, 120 bp, Artificial Sequence
  ENSG00000064607_52 (sequence is synthesized)
gtgacagccactgccacagaggatggcagttggctgtgtccctttgtgagggtcttcaaatccttttccttctgcagggccttgggcctgtaaatatcctcatctttctattcttttttt

SEQ ID NO: 45210 - DNA, 120 bp, Artificial Sequence
  ENSG00000064607_53 (sequence is synthesized)
tttttagttgccccctcacctaatttccacctcagttttgaacaaaatcgttctcttcctgaatagatcaaaaccactgatgtgaaagataagccttgaagcagcaattgcccttaaaac

SEQ ID NO: 45211 - DNA, 120 bp, Artificial Sequence
  ENSG00000064607_54 (sequence is synthesized)
cctgcagcctgccgcttggctccttcacagccaagatggcttacagctggcagttgatttttgttttttaaacagaaggcatcttcagatgagaagctgatcatttacatgtgcaggtgt

SEQ ID NO: 45212 - DNA, 120 bp, Artificial Sequence
  ENSG00000064607_55 (sequence is synthesized)
ttacagggctcctttctgtcctggtgtagattttttaaccagcttgttggccctggtcattttggccacatttgtgaccatcataaaagctaagtggtatttctgtgtagtttccgtctg

SEQ ID NO: 45213 - DNA, 120 bp, Artificial Sequence
  ENSG00000064607_56 (sequence is synthesized)
gaactgctttcccattcccgggaacccatagccgggccagccagggtcccgaacacaggcccaaagtttattaaaccccgatcataacctccagcaggcatttcatttaatactgagctt

SEQ ID NO: 45214 - DNA, 120 bp, Artificial Sequence
  ENSG00000064607_57 (sequence is synthesized)
agttcctgctgggtaaggcattccgaggtaaccagggccctctgggcaccccctcaaaagccagctcttcgagggtgagtactccttgtttctactgtgagtcgcgtcttgattttccct

SEQ ID NO: 45215 - DNA, 120 bp, Artificial Sequence
  ENSG00000064607_58 (sequence is synthesized)
ttctttgatgtctcagtgtgtgtcccaaacacctgcatctcatggactgtttgtgcccatgcccagttcctggcatgccaggccctgggctcaggtgcacaactgactctctttttcact

SEQ ID NO: 45216 - DNA, 120 bp, Artificial Sequence
  ENSG00000064607_59 (sequence is synthesized)
ggggacctgccttcatctcgggcatcaggaaaaacctccccagagggacatttaatctgcatccaaaggctaaataggagttggccaggggaggggagagaggtttctacatgaccaaaa

SEQ ID NO: 45217 - DNA, 120 bp, Artificial Sequence
  ENSG00000064607_60 (sequence is synthesized)
tccatgaaccagttcgaattgcctatgacaggcctcggggtcgtcccatgtccaaaaagaagggcccaggtcgtgcacagctcccagaagggcctgacggatgccccgtttctcatctca

SEQ ID NO: 45218 - DNA, 80 bp, Artificial Sequence
  ENSG00000064607_61 (sequence is synthesized)
gtgggaagctcgggctcggccttgggggcccgccccgggctccgtgatggcgtcgcaggctcggccctctggctgcggcg

SEQ ID NO: 45219 - DNA, 120 bp, Artificial Sequence
  ENSG00000064607_62 (sequence is synthesized)
gtccccgccgggttggcctgggtggccggctgcggcctcccgggcccggcgcccccatttcctcgcccgcagaggccgggagacggcgggccgcgtccacaaaggctcattggttcagtc

SEQ ID NO: 45220 - DNA, 120 bp, Artificial Sequence
  ENSG00000064607_63 (sequence is synthesized)
gttcagtcgttcattcattcctcccgaactcggagcggcccccgctcgggaggagataacggcgcccagcgctgcatcgggcccttgccctctttagaaccggttcagcccccacaccag

SEQ ID NO: 45221 - DNA, 120 bp, Artificial Sequence
  ENSG00000064651_0 (sequence is synthesized)
acactcgcgcgctcgctcggctgccggtggcctctgtggccgtccaggctagcggcggcccgcaggcggcggggagaaagactctctcacctggtcttgcggctgtggccaccgccggcc

SEQ ID NO: 45222 - DNA, 120 bp, Artificial Sequence
  ENSG00000064651_1 (sequence is synthesized)
ggtcttgcggctgtggccaccgccggccaggggtgtggagggcgtgctgccggagacgtccgccgggctctgcagttccgccgggggtcgggcagctatggagccgcggcccacggcgcc

SEQ ID NO: 45223 - DNA, 80 bp, Artificial Sequence
  ENSG00000064651_2 (sequence is synthesized)
gtcggggagacgccgtcagccgctgcgctggccgcagccagggtggaactgcccggcacggctgtgccctcggtgccgga

SEQ ID NO: 45224 - DNA, 120 bp, Artificial Sequence
  ENSG00000064651_3 (sequence is synthesized)
gatgagggccccgcggcggccggggacgggctgggcagacccttggggcccaccccgagccagagccgtttccaggtggacctggtttccgagaacgccgggcgggccgctgctgcggcg

SEQ ID NO: 45225 - DNA, 120 bp, Artificial Sequence
  ENSG00000064651_4 (sequence is synthesized)
gcggcagcggcggcggctggtgctggggcgggggccaagcagacccccgcggacggggaagccagcggcgagagcgagccggctaaaggcagcgaggaagccaagggccgcttccgcgtg

SEQ ID NO: 45226 - DNA, 120 bp, Artificial Sequence
  ENSG00000064651_5 (sequence is synthesized)
cgcttccgcgtgaacttcgtggacccagctgcctcctcgtcggctgaagacagcctgtcagatgctgccggggtcggagtcgacgggcccaacgtgagcttccagaacggcggggacacg

SEQ ID NO: 45227 - DNA, 120 bp, Artificial Sequence
  ENSG00000064651_6 (sequence is synthesized)
gtgctgagcgagggcagcagcctgcactccggcggcggcggcggcagtgggcaccaccagcactactattatgatacccacaccaacacctactacctgcgcaccttcggccacaacacc

SEQ ID NO: 45228 - DNA, 120 bp, Artificial Sequence
  ENSG00000064651_7 (sequence is synthesized)
atggacgctgtgcccaggatcgatcactaccggcacacagccgcgcagctgggcgagaagctgctccggcctagcctggcggagctccacgacgagctggaaaaggaaccttttgaggat

SEQ ID NO: 45229 - DNA, 120 bp, Artificial Sequence
  ENSG00000064651_8 (sequence is synthesized)
ggctttgcaaatggggaagaaagtactccaaccagagatgctgtggtcacgtatactgcagaaagtaaaggagtcgtgaagtttggctggatcaagggtgtattagtacgttgtatgtta

SEQ ID NO: 45230 - DNA, 120 bp, Artificial Sequence
  ENSG00000064651_9 (sequence is synthesized)
aacatttggggtgtgatgcttttcattagattgtcatggattgtgggtcaagctggaataggtctatcagtccttgtaataatgatggccactgttgtgacaactatcacaggattgtct

SEQ ID NO: 45231 - DNA, 120 bp, Artificial Sequence
  ENSG00000064651_10 (sequence is synthesized)
acttcagcaatagcaactaatggatttgtaagaggaggaggagcatattatttaatatctagaagtctagggccagaatttggtggtgcaattggtctaatcttcgcctttgccaacgct

SEQ ID NO: 45232 - DNA, 120 bp, Artificial Sequence
  ENSG00000064651_11 (sequence is synthesized)
gttgcagttgctatgtatgtggttggatttgcagaaaccgtggtggagttgcttaaggaacattccatacttatgatagatgaaatcaatgatatccgaattattggagccattacagtc

SEQ ID NO: 45233 - DNA, 120 bp, Artificial Sequence
  ENSG00000064651_12 (sequence is synthesized)
gtgattcttttaggtatctcagtagctggaatggagtgggaagcaaaagctcagattgttcttttggtgatcctacttcttgctattggtgatttcgtcataggaacatttatcccactg

SEQ ID NO: 45234 - DNA, 120 bp, Artificial Sequence
  ENSG00000064651_13 (sequence is synthesized)
gagagcaagaagccaaaagggttttttggttataaatctgaaatatttaatgagaactttgggcccgattttcgagaggaagagactttcttttctgtatttgccatcttttttcctgct

SEQ ID NO: 45235 - DNA, 120 bp, Artificial Sequence
  ENSG00000064651_14 (sequence is synthesized)
gcaactggtattctggctggagcaaatatctcaggtgatcttgcagatcctcagtcagccatacccaaaggaacactcctagccattttaattactacattggtttacgtaggaattgca

SEQ ID NO: 45236 - DNA, 120 bp, Artificial Sequence
  ENSG00000064651_15 (sequence is synthesized)
gtatctgtaggttcttgtgttgttcgagatgccactggaaacgttaatgacactatcgtaacagagctaacaaactgtacttctgcagcctgcaaattaaactttgatttttcatcttgt

SEQ ID NO: 45237 - DNA, 120 bp, Artificial Sequence
  ENSG00000064651_16 (sequence is synthesized)
gaaagcagtccttgttcctatggcctaatgaacaacttccaggtaatgagtatggtgtcaggatttacaccactaatttctgcaggtatattttcagccactctttcttcagcattagca

SEQ ID NO: 45238 - DNA, 120 bp, Artificial Sequence
  ENSG00000064651_17 (sequence is synthesized)
tccctagtgagtgctcccaaaatatttcaggctctatgtaaggacaacatctacccagctttccagatgtttgctaaaggttatgggaaaaataatgaacctcttcgtggctacatctta

SEQ ID NO: 45239 - DNA, 120 bp, Artificial Sequence
  ENSG00000064651_18 (sequence is synthesized)
acattcttaattgcacttggattcatcttaattgctgaactgaatgttattgcaccaattatctcaaacttcttccttgcatcatatgcattgatcaatttttcagtattccatgcatca

SEQ ID NO: 45240 - DNA, 120 bp, Artificial Sequence
  ENSG00000064651_19 (sequence is synthesized)
cttgcaaaatctccaggatggcgtcctgcattcaaatactacaacatgtggatatcacttcttggagcaattctttgttgcatagtaatgttcgtcattaactggtgggctgcattgcta

SEQ ID NO: 45241 - DNA, 120 bp, Artificial Sequence
  ENSG00000064651_20 (sequence is synthesized)
acatatgtgatagtccttgggctgtatatttatgttacctacaaaaaaccagatgtgaattggggatcctctacacaagccctgacttacctgaatgcactgcagcattcaattcgtctt

SEQ ID NO: 45242 - DNA, 120 bp, Artificial Sequence
  ENSG00000064651_21 (sequence is synthesized)
tctggagtggaagaccacgtgaaaaactttaggccacagtgtcttgttatgacaggtgctccaaactcacgtccagctttacttcatcttgttcatgatttcacaaaaaatgttggtttg

SEQ ID NO: 45243 - DNA, 120 bp, Artificial Sequence
  ENSG00000064651_22 (sequence is synthesized)
atgatctgtggccatgtacatatgggtcctcgaagacaagccatgaaagagatgtccatcgatcaagccaaatatcagcgatggcttattaagaacaaaatgaaggcattttatgctcca

SEQ ID NO: 45244 - DNA, 120 bp, Artificial Sequence
  ENSG00000064651_23 (sequence is synthesized)
gtacatgcagatgacttgagagaaggtgcacagtatttgatgcaggctgctggtcttggtcgtatgaagccaaacacacttgtccttggatttaagaaagattggttgcaagcagatatg

SEQ ID NO: 45245 - DNA, 120 bp, Artificial Sequence
  ENSG00000064651_24 (sequence is synthesized)
agggatgtggatatgtatataaacttatttcatgatgcttttgacatacaatatggagtagtggttattcgcctaaaagaaggtctggatatatctcatcttcaaggacaagaagaatta

SEQ ID NO: 45246 - DNA, 120 bp, Artificial Sequence
  ENSG00000064651_25 (sequence is synthesized)
ttgtcatcacaagagaaatctcctggcaccaaggatgtggtagtaagtgtggaatatagtaaaaagtccgatttagatacttccaaaccactcagtgaaaaaccaattacacacaaagtt

SEQ ID NO: 45247 - DNA, 120 bp, Artificial Sequence
  ENSG00000064651_26 (sequence is synthesized)
gaggaagaggatggcaagactgcaactcaaccactgttgaaaaaagaatccaaaggccctattgtgcctttaaatgtagctgaccaaaagcttcttgaagctagtacacagtttcagaaa

SEQ ID NO: 45248 - DNA, 120 bp, Artificial Sequence
  ENSG00000064651_27 (sequence is synthesized)
aaacaaggaaagaatactattgatgtctggtggctttttgatgatggaggtttgaccttattgataccttaccttctgacgaccaagaaaaaatggaaagactgtaagatcagagtattc

SEQ ID NO: 45249 - DNA, 120 bp, Artificial Sequence
  ENSG00000064651_28 (sequence is synthesized)
ggagagcgatggctactttgcttagcaagttccggatagacttttctgatatcatggttctaggagatatcaataccaaaccaaagaaagaaaatattatagcttttgaggaaatcattg

SEQ ID NO: 45250 - DNA, 120 bp, Artificial Sequence
  ENSG00000064651_29 (sequence is synthesized)
agccatacagacttcatgaagatgataaagagcaagatattgcagataaaatgaaagaagatgaaccatggcgaataacagataatgagcttgaactttataagaccaagacataccggc

SEQ ID NO: 45251 - DNA, 120 bp, Artificial Sequence
  ENSG00000064651_30 (sequence is synthesized)
agatcaggttaaatgagttattaaaggaacattcaagcacagctaatattattgtcatgagtctcccagttgcacgaaaaggtgctgtgtctagtgctctctacatggcatggttagaag

SEQ ID NO: 45252 - DNA, 120 bp, Artificial Sequence
  ENSG00000064651_31 (sequence is synthesized)
ctctatctaaggacctaccaccaatcctcctagttcgtgggaatcatcagagtgtccttaccttctattcataaatgttctatacagtggacagccctccagaatggtacttcagtgcct

SEQ ID NO: 45253 - DNA, 120 bp, Artificial Sequence
  ENSG00000064651_32 (sequence is synthesized)
agtgtagtaactgaaatcttcaatgacacattaacatcacaatggcgaatggtgacttttctttcacgatttcattaatttgaaagcacacaggaaagttgctccattgataacgtgtat

SEQ ID NO: 45254 - DNA, 120 bp, Artificial Sequence
  ENSG00000064651_33 (sequence is synthesized)
ggagacttcggttttagtcaattccatatctcaatcttaatggtgattcttctctgttgaactgaagtttgtgagagtagttttcctttgctacttgaatagcaataaaagcgtgttaac

SEQ ID NO: 45255 - DNA, 120 bp, Artificial Sequence
  ENSG00000064651_34 (sequence is synthesized)
tttttgattgatgaaagaagtacaaaaagcctttagccttgaggtgccttctgaaattaaccaaatttcatccatatatcctcttttataaacttatagaatgtcaaactttgccttcaa

SEQ ID NO: 45256 - DNA, 120 bp, Artificial Sequence
  ENSG00000064651_35 (sequence is synthesized)
ctgtttttatttctagtctcttccactttaaaacaaaatgaacactgcttgtcttcttccattgaccatttagtgttgagtactgtatgtgttttgttaattctataaaggtatctgtta

SEQ ID NO: 45257 - DNA, 120 bp, Artificial Sequence
  ENSG00000064651_36 (sequence is synthesized)
gatattaaaggtgagaattagggcaggttaatcaaaaatggggaaggggaaatggtaaccaaaaagtaaccccatggtaaggtttatatgagtatatgtgaatatagagctaggaaaaaa

SEQ ID NO: 45258 - DNA, 120 bp, Artificial Sequence
  ENSG00000064651_37 (sequence is synthesized)
agcccccccaaatacctttttaacccctctgattggctattattactatatttattattatttattgaaaccttagggaagattgaagattcatcccatacttctatataccatgcttaa

SEQ ID NO: 45259 - DNA, 120 bp, Artificial Sequence
  ENSG00000064651_38 (sequence is synthesized)
aaatcacgtcattctttaaacaaaaatactcaagatcatttatatttatttggagagaaaactgtcctaatttagaatttccctcaaatctgagggacttttaagaaatgctaacagatt

SEQ ID NO: 45260 - DNA, 120 bp, Artificial Sequence
  ENSG00000064651_39 (sequence is synthesized)
tttctggaggaaatttagacaaaacaatgtcatttagtagaatatttcagtatttaagtggaatttcagtatactgtactatcctttataagtcattaaaataatgtttcatcaaatggt

SEQ ID NO: 45261 - DNA, 120 bp, Artificial Sequence
  ENSG00000064651_40 (sequence is synthesized)
taaatggaccactggtttcttagagaaatgtttttaggcttaattcattcaattgtcaagtacacttagtcttaatacactcaggtttgaacagattattctgaatattaaaatttaatc

SEQ ID NO: 45262 - DNA, 120 bp, Artificial Sequence
  ENSG00000064651_41 (sequence is synthesized)
cattcttaatattttaaaacttttgttaagaaaaactgccagtttgtgcttttgaaatgtctgttttgacatcatagtctagtaaaattttgacagtgcatatgtactgttactaaaagc

SEQ ID NO: 45263 - DNA, 120 bp, Artificial Sequence
  ENSG00000064651_42 (sequence is synthesized)
tttatatgaaattattaatgtgaagtttttcatttataattcaaggaaggatttcctgaaaacatttcaagggatttatgtctacatatttgtgtgtgtgtgtgtatatatatgtaatat

SEQ ID NO: 45264 - DNA, 120 bp, Artificial Sequence
  ENSG00000064651_43 (sequence is synthesized)
gcatacacagatgcatatgtgtatatataatgaaatttatgttgctggtattttgcattttaaagtgatcaagattcattaggcaaactttggtttaagtaaacatatgttcaaaatcag

SEQ ID NO: 45265 - DNA, 120 bp, Artificial Sequence
  ENSG00000064651_44 (sequence is synthesized)
attaacagatacaggtttcatagagaacaaaggtgatcatttgaagggcatgctgtaatttcacacaattttccagttcaaaaatggagaatacttcgcctaaaatactgttaagtgggt

SEQ ID NO: 45266 - DNA, 86 bp, Artificial Sequence
  ENSG00000064651_45 (sequence is synthesized)
aaaatggagaatacttcgcctaaaatactgttaagtgggttaattgatacaagtttctgtggtggaaaatttatgcaggttttcac

SEQ ID NO: 45267 - DNA, 120 bp, Artificial Sequence
  ENSG00000064651_46 (sequence is synthesized)
tcatgaatcttgatagacatctataacgttattattttcagtggtgtgcagcatttttgcttcatgagtatgacctaggtatagagatctgataacttgaattcagaatattaagaaaat

SEQ ID NO: 45268 - DNA, 120 bp, Artificial Sequence
  ENSG00000064651_47 (sequence is synthesized)
gaagtaactgattttctaaaaaaaaaaaaaaaaaaaatttctacattataactcacagcattgttccattgcaggttttgcaatgtttgggggtaaagacagtagaaatattattcagta

SEQ ID NO: 45269 - DNA, 120 bp, Artificial Sequence
  ENSG00000064651_48 (sequence is synthesized)
aacaataatgtgtgaacttttaagatggataatagggcatggactgagtgctgctatcttgaaatgtgcacaggtacacttaccttttttttttttttttttaagtttttcccattcagg

SEQ ID NO: 45270 - DNA, 120 bp, Artificial Sequence
  ENSG00000064651_49 (sequence is synthesized)
aaaacaacattgtgatctgtactacaggaaccaaatgtcatgcgtcatacatgtgggtataaagtacataaaatatatctaactattcataatgtggggtgggtaatactgtctgtgaaa

SEQ ID NO: 45271 - DNA, 120 bp, Artificial Sequence
  ENSG00000064651_50 (sequence is synthesized)
taatgtaagaagcttttcacttaaaaaaaatgcattactttcacttaacactagacaccaggtcgaaaattttcaaggttatagtacttatttcaacaattcttagagatgctagctagt

SEQ ID NO: 45272 - DNA, 120 bp, Artificial Sequence
  ENSG00000064651_51 (sequence is synthesized)
gttgaagctaaaaatagctttatttatgctgaattgtgatttttttatgccaaattttttttagttctaatcattgatgatagcttggaaataaataattatgccatggcatttgacagt

SEQ ID NO: 45273 - DNA, 120 bp, Artificial Sequence
  ENSG00000064651_52 (sequence is synthesized)
tcattattcctataagaattaaattgagtttagagagaatggtggtgttgagctgattattaacagttactgaaatcaaatatttatttgttacattattccatttgtattttaggtttc

SEQ ID NO: 45274 - DNA, 120 bp, Artificial Sequence
  ENSG00000064651_53 (sequence is synthesized)
cttttacattctttttatatgcattctgacattacatattttttaagactatggaaataatttaaagatttaagctctggtggatgattatctgctaagtaagtctgaaaatgtaatatt

SEQ ID NO: 45275 - DNA, 120 bp, Artificial Sequence
  ENSG00000064651_54 (sequence is synthesized)
ttgataatactgtaatatacctgtcacacaaatgcttttctaatgttttaaccttgagtattgcagttgctgctttgtacagaggttactgcaataaaggaagtggattcattaaaccta

SEQ ID NO: 45276 - DNA, 120 bp, Artificial Sequence
  ENSG00000064651_55 (sequence is synthesized)
ataagttttttatttacaaaaatataaactactttgttagaaaattatattctcacaaactgggctcttcgttacttttaataattatgtatcgtggacttattgtatggcattttaaga

SEQ ID NO: 45277 - DNA, 120 bp, Artificial Sequence
  ENSG00000064651_56 (sequence is synthesized)
agcttgtcctaatttttggagactgtttctcatatagtctcttgtaatggaaatataagaacgaaaagaatcacacaaagcatctgggttttaaattgataatctattaacaatttttta

SEQ ID NO: 45278 - DNA, 120 bp, Artificial Sequence
  ENSG00000064651_57 (sequence is synthesized)
tatatatatacacacacacacacatatatgtatgtatatgtatatatgtatacactctggcttctcatttaagtttgtaaactttttcctatccctccagctgttgctgagcagagttcc

SEQ ID NO: 45279 - DNA, 120 bp, Artificial Sequence
  ENSG00000064651_58 (sequence is synthesized)
tttcctatccctccagctgttgctgagcagagttcccaaatgtcagacccatcacctcctaaactatgtcattataatgtgctgaggaagagtgttttatcgctgtttaggcttgttccc

SEQ ID NO: 45280 - DNA, 120 bp, Artificial Sequence
  ENSG00000064651_59 (sequence is synthesized)
cttccaaacaaattttgcagttaatcatttggttcattcattaagttatttacatttcttttatttaaatgtacttatatgttttgtttttctaccactatgaagagttaagtttgagtt

SEQ ID NO: 45281 - DNA, 71 bp, Artificial Sequence
  ENSG00000064651_60 (sequence is synthesized)
gttttgtttttctaccactatgaagagttaagtttgagttcactgtaacttccgttttttgcgttgtctag

SEQ ID NO: 45282 - DNA, 120 bp, Artificial Sequence
  ENSG00000064651_61 (sequence is synthesized)
ttcaggatgattcaagcgcattacatttattgtggactttatttatattattattacatattcaccgtaatgtagactcagtgggagtcctgagcttgtttttctccaactaggcagtcc

SEQ ID NO: 45283 - DNA, 120 bp, Artificial Sequence
  ENSG00000064651_62 (sequence is synthesized)
cgtctgggggtgatgggagacaattgacgatcatcaggcattaaattctcataaggagcgcacaacctagattcctcacatgcgcagttcataataaagtttgcactcctttgagcaatt

SEQ ID NO: 45284 - DNA, 120 bp, Artificial Sequence
  ENSG00000064651_63 (sequence is synthesized)
ggtgccgctgctgatctgatgaggtgtacttcaggtggtaatgctcacctgcccatggctcaccttctgctgtgcagcccacccagttcctaacaagcctggctcattactggtccatga

SEQ ID NO: 45285 - DNA, 120 bp, Artificial Sequence
  ENSG00000064651_64 (sequence is synthesized)
cccaggtattggggacccttggtatagtgcgttcttttttattctttgctactttgtctttctggttgtgttctgtttgtggattttgtggatgtttaatgtaatctaccacatactttt

SEQ ID NO: 45286 - DNA, 120 bp, Artificial Sequence
  ENSG00000064651_65 (sequence is synthesized)
tgtttaataacaataaaactttttttttgtttttgccagattttcttcttaatcttgaaaagtacttcttttcctactattctaagatttgcctaacctatttatcttgtttatactgaa

SEQ ID NO: 45287 - DNA, 120 bp, Artificial Sequence
  ENSG00000064651_66 (sequence is synthesized)
gataagcattccctctccactatgccatacttgatttgaggagtagtttttttctcatcctaagcactgatgaaatagaactgtctgcttcctcttataattgtcctttaaaaaaaactt

SEQ ID NO: 45288 - DNA, 120 bp, Artificial Sequence
  ENSG00000064651_67 (sequence is synthesized)
ttttgatctgatcacccttttttctcactggagttacttccttactggaactcctgttgtatctttggctataaccacatatatttgcctgtctcacatatgatggttttattagtgaca

SEQ ID NO: 45289 - DNA, 120 bp, Artificial Sequence
  ENSG00000064651_68 (sequence is synthesized)
tttgaaaagtctttgaggaagcagctggatctcatactctactttttaaaggatctctttatatggattagtaatatatatgataaacaagatttaccaactaatcgttaaatgctttta

SEQ ID NO: 45290 - DNA, 120 bp, Artificial Sequence
  ENSG00000064651_69 (sequence is synthesized)
gtaaaattaaaactgctgatgtgttgtatgttgttactactgctgagttttggttttattaatgtttttgtaagcaaaacctcattgtggctttctaattttgtattctgtgtatatagg

SEQ ID NO: 45291 - DNA, 120 bp, Artificial Sequence
  ENSG00000064651_70 (sequence is synthesized)
gattagggacagaaagattaatgtggtccatgagccatgaaaccctatgctttttccctctcaagacctaagaacagtgagatgacgtaattatcctaaaaaatagaaaaagtgacattt

SEQ ID NO: 45292 - DNA, 120 bp, Artificial Sequence
  ENSG00000064651_71 (sequence is synthesized)
tttacaaattctttcatacacctgtcacattattagttgtagttgctcataatggaacactggaaggggtctttctgactctgactttctagggattaaagtgagtgagtgttctgaaag

SEQ ID NO: 45293 - DNA, 120 bp, Artificial Sequence
  ENSG00000064651_72 (sequence is synthesized)
ttgagtattagtctaaacattattcctgtacattaggcagcagttaaagaataggtaaaatactgctttctggttttagaaccatgtaaattaatagcagtttcacagcagtgacactgc

SEQ ID NO: 45294 - DNA, 120 bp, Artificial Sequence
  ENSG00000064651_73 (sequence is synthesized)
tcattctttatcttgttgcacttccactgatgttttagctgtgatttttaaataccttgtgcaatttaagtatgctttatatattgtgtttttattaatagtatataagatctgaagctg

SEQ ID NO: 45295 - DNA, 120 bp, Artificial Sequence
  ENSG00000064651_74 (sequence is synthesized)
caaatcaatttttatagcttataacaaaaacatttatttgttttaatccacagtaaacttggggagctatattccctggctttaaagaaattgattttgatttagtcgatttattaaaca

SEQ ID NO: 45296 - DNA, 120 bp, Artificial Sequence
  ENSG00000064651_75 (sequence is synthesized)
atttttaaaatgcttatagttattttttctctagtattaattatatctttcaagatacagctgagaaagattaacatgcctattaaatttatttctccagtgactttgttaactttagct

SEQ ID NO: 45297 - DNA, 120 bp, Artificial Sequence
  ENSG00000064651_76 (sequence is synthesized)
catcataggaatgtggccaaattgtctctccatgatttaaaaacaacaaaagaccttttataaccatatattatatcctgaacacattcttccatttgtcagtaagagtaataatttgac

SEQ ID NO: 45298 - DNA, 120 bp, Artificial Sequence
  ENSG00000064651_77 (sequence is synthesized)
tgactgttttattggattttagcctttttgatttcatatagctgtatcttaatatatcattgtttttaatatgtctacattgaatacttattacttgtgcaatgaaaaataataattaaa

SEQ ID NO: 45299 - DNA, 120 bp, Artificial Sequence
  ENSG00000064651_78 (sequence is synthesized)
aaagttaagcctgttaccactttcagagaacaacgtgacgttttggaatttaaaattttttcagtagatttgagaaaaacttgggttaaaatgaagatttatgctcagaactgagattcc

SEQ ID NO: 45300 - DNA, 120 bp, Artificial Sequence
  ENSG00000064651_79 (sequence is synthesized)
agggtttaagtctggttttaaagctgtcttcaagattttaatgtattttctgtgtgtataggatgctctcatttctgtttttaaaaatgaaagggatcgctcctgtaatcccagcacttt

SEQ ID NO: 45301 - DNA, 120 bp, Artificial Sequence
  ENSG00000064651_80 (sequence is synthesized)
tagccatttataaagtatacttttattataaacaactgaaagtttatggtagatgccgtatacaattgtctgaattatctgtagtataaacatctgaatatacaaacattaggaaatgat

SEQ ID NO: 45302 - DNA, 120 bp, Artificial Sequence
  ENSG00000064651_81 (sequence is synthesized)
tcaaaaattacaatatttctcacagtcgtgctgcgtttgggagatacacagtcatgtcaacatacatgaattttatgagaaggagatagagaatccaaaggccctattgtgcctttaaat

SEQ ID NO: 45303 - DNA, 120 bp, Artificial Sequence
  ENSG00000064652_0 (sequence is synthesized)
agccggctggccggcgcggccatggaggtctacatcccgtcctttcgctatgaagagagcgacctggagcggggatacacggtgtttaagatagaagtgctaatgaatggaagaaaacat

SEQ ID NO: 45304 - DNA, 120 bp, Artificial Sequence
  ENSG00000064652_1 (sequence is synthesized)
tttgttgaaaagagatacagcgaatttcatgctttgcacaaaaagcttaagaaatgtataaaaactccagaaatcccttctaaacatgttaggaactgggtccccaaagtcttggaacag

SEQ ID NO: 45305 - DNA, 120 bp, Artificial Sequence
  ENSG00000064652_2 (sequence is synthesized)
cgacgacaaggcttggaaacatacttacaggctgtcattttagaaaatgaagaacttcccaaactgtttcttgatttcctaaatgtgcgacacttgccctctctaccaaaggcagaaagt

SEQ ID NO: 45306 - DNA, 120 bp, Artificial Sequence
  ENSG00000064652_3 (sequence is synthesized)
tgtggatcttttgatgaaacagagtctgaagagtcaagcaaactgtcccaccagcctgtgctgctgttcctcagggatccatatgtcttgcctgcagccagcgattttccaaatgtggtt

SEQ ID NO: 45307 - DNA, 120 bp, Artificial Sequence
  ENSG00000064652_4 (sequence is synthesized)
attgaaggagtcctccatgggatattttaccctcatctacagcccaggtagaaatcctacatggctaaaagaagcagaagcaagtttcgaagtcacagtcaaggaaatcaatacctacca

SEQ ID NO: 45308 - DNA, 120 bp, Artificial Sequence
  ENSG00000064652_5 (sequence is synthesized)
atttaacctaaacgctatgatatataacagctctagctagtggtaaagtgcacagtcccagcttaattcagggcagggacatttccattagaatggtgctcttaaaaatagaaactgaac

SEQ ID NO: 45309 - DNA, 120 bp, Artificial Sequence
  ENSG00000064652_6 (sequence is synthesized)
cggggcggtggtcaggctaaggccaagtgtttaagaagtagagtgtagctgccagcgtagaaacccatgaaaaggaggccacaggagattcctgggagcactgggtgtagcaaaacaaag

SEQ ID NO: 45310 - DNA, 120 bp, Artificial Sequence
  ENSG00000064652_7 (sequence is synthesized)
ccactctctgcttcagtcgcaccatttgctaattgaaaatcatatcctgaatcatactgagactgatcaactttggtagcttttttgttcagatcttatgacacactactcttctcaccg

SEQ ID NO: 45311 - DNA, 120 bp, Artificial Sequence
  ENSG00000064652_8 (sequence is synthesized)
actgctaaatgtgaagatggaactaaactggaaattaaattatactgacaatattatggcatttttaagatcatggcattttaatttacattagagtggagttgcatcatactcaggggt

SEQ ID NO: 45312 - DNA, 120 bp, Artificial Sequence
  ENSG00000064652_9 (sequence is synthesized)
tagcttccaaggtcagtacataggtaaaatgggctattaggatgatccttgaaagccctttagaagggtgccatgttggaaacctgtacatccacaacaagtagcttttcctcctatgtt

SEQ ID NO: 45313 - DNA, 120 bp, Artificial Sequence
  ENSG00000064652_10 (sequence is synthesized)
ggaaaaaaagactgtttctttgtttgaagaccaagtgaagttgttggtgtttgtttaggggccattttgttaaaaaaaaaaaaaaaaaagcacataacttttaacactagaatcagcccg

SEQ ID NO: 45314 - DNA, 120 bp, Artificial Sequence
  ENSG00000064652_11 (sequence is synthesized)
caagatgcttgccccgctagtggcagatgtgaactgacaaggagtgaagcgcccacccagcggatggacagcacccacctgggtttactcaagggtgtgcattcattttaggtgggatcg

SEQ ID NO: 45315 - DNA, 120 bp, Artificial Sequence
  ENSG00000064652_12 (sequence is synthesized)
ccacaggatttcatgttattttccttacggcttccttttcactgacctcatttgttgagttaatgtaagttaaatgtgtttatgatataactccactgtacatcatcctttgagtagtaa

SEQ ID NO: 45316 - DNA, 120 bp, Artificial Sequence
  ENSG00000064652_13 (sequence is synthesized)
aggataaaagcatatatactacctatatgtatgtgctgtatgtgggcatttcattgagatctaattaatagctagcctatttatggttattcgttttagtaagttctgtgggagcaaggt

SEQ ID NO: 45317 - DNA, 120 bp, Artificial Sequence
  ENSG00000064652_14 (sequence is synthesized)
atttaaaatcaaaactaataactacatcatggtttttgattaggatctaaatattcaggttttaagcctgctgcaaacttttaaaatattatgatagattctgtactacatgtgggaaac

SEQ ID NO: 45318 - DNA, 120 bp, Artificial Sequence
  ENSG00000064652_15 (sequence is synthesized)
aagcaagaactaaataatcaaatgttgtcaaccaaaagtaatagttgggtattggagatttttttaaaatgtttttatgttattagctatttggagttaaataaaaacagaacaaggaaa

SEQ ID NO: 45319 - DNA, 120 bp, Artificial Sequence
  ENSG00000064652_16 (sequence is synthesized)
tgaagagagcgacctggagcggggatacacggtgagggtcttgcagtgttgcccaggcaggccctgaactcctggtctcaagcgatcctaccgcttcagcctcccaagatgctggcatta

SEQ ID NO: 45320 - DNA, 120 bp, Artificial Sequence
  ENSG00000064652_17 (sequence is synthesized)
ccagcgaatacaactcggtgagatggatcctcactgcttgagtcctggaggagaagcaatggcactgttttctaacagacaacacttcccatctgaacagagatcaagcactctctatta

SEQ ID NO: 45321 - DNA, 120 bp, Artificial Sequence
  ENSG00000064652_18 (sequence is synthesized)
tagccagatgacatctttatatttggcttcaaagaaagaagacccaatttaaaggaaataaaattgagacatacctctcctgttgctagagcaacaaaattttccactgtcttgggcaca

SEQ ID NO: 45322 - DNA, 120 bp, Artificial Sequence
  ENSG00000064652_19 (sequence is synthesized)
taacagctctttactgatctgaccctgcaccacataaaccacgtttttaatacaggtctaacagagtgacattggtcccgggcttaataatctgccaataaaccagtgctcttggtataa

SEQ ID NO: 45323 - DNA, 120 bp, Artificial Sequence
  ENSG00000064652_20 (sequence is synthesized)
aaagcatgcttgccctaaaacctagtaggtagggtagataaataaatcatacatacagtgtatagtcaccagaggcttaaggtaacctacaagctgggctctgaactcagatagcttatc

SEQ ID NO: 45324 - DNA, 120 bp, Artificial Sequence
  ENSG00000064652_21 (sequence is synthesized)
gtccgcagagctggttagttacctcaggaggtgctggccagaagtgaaagaaaggtgtgtagtcacagggcacagctaaggcacagttttgagagaagggcacatcctggagctgcaaat

SEQ ID NO: 45325 - DNA, 120 bp, Artificial Sequence
  ENSG00000064652_22 (sequence is synthesized)
tttatggctgggctaatagaccctcaagaacacacccacacattgatagtttgtatacattttcagcaagggaaaagtaaattatacacagctattagtggaatacagcaaatggatatc

SEQ ID NO: 45326 - DNA, 120 bp, Artificial Sequence
  ENSG00000064652_23 (sequence is synthesized)
gtgctatttttcagagaaagtaaacacatacacacacatggatggagagagggacagagggatggacggatgaatgcattggtagatgggaaaacgcttagagagtgatacgctatttcg

SEQ ID NO: 45327 - DNA, 120 bp, Artificial Sequence
  ENSG00000064652_24 (sequence is synthesized)
gcgatgacatctttatatttggcttcaaagaaagaagacccaatttaaaggaaataaaattgagacatacctctcctgttgctagagcaacaaaattttccactgtcttgggcacaactt

SEQ ID NO: 45328 - DNA, 120 bp, Artificial Sequence
  ENSG00000064652_25 (sequence is synthesized)
tcgccctcagccggctggccggcgcggccatggaggtctacatcccgtcctttcgctatgaagagagcgacctggagcggggatacacggtggtaatagtttggcatagagccttccaga

SEQ ID NO: 45329 - DNA, 120 bp, Artificial Sequence
  ENSG00000064655_0 (sequence is synthesized)
cggcaacggcagagacagcaacgtgcccgccgcagtcagcccggcctcgtcggacccgcaccggcccgcccgcccgcccgcaccgcgtcggggcgccctctccactgcgcgcggtacaag

SEQ ID NO: 45330 - DNA, 120 bp, Artificial Sequence
  ENSG00000064655_1 (sequence is synthesized)
cggggcgccctctccactgcgcgcggtacaaggaaatggtagaactagtgatctcacccagcctcactgtaaacagcgattgtctggataaactgaagtttaaccgtgctgacgctgctg

SEQ ID NO: 45331 - DNA, 120 bp, Artificial Sequence
  ENSG00000064655_2 (sequence is synthesized)
tgtggactctgagtgacagacaaggcatcaccaaatcggcccccctgagagtgtcccagctcttctccagatcttgcccacgtgtcctcccccgccagccttccacagccatggcagcct

SEQ ID NO: 45332 - DNA, 120 bp, Artificial Sequence
  ENSG00000064655_3 (sequence is synthesized)
acggccagacgcagtacagtgcggggatccagcaggctaccccctatacagcttacccacctccagcacaagcctatggaatcccttcctacagcatcaagacagaagacagcttgaacc

SEQ ID NO: 45333 - DNA, 120 bp, Artificial Sequence
  ENSG00000064655_4 (sequence is synthesized)
attcccctggccagagtggattcctcagctatggctccagcttcagcacctcacccactggacagagcccatacacctaccagatgcacggcacaacagggttctatcaaggaggaaatg

SEQ ID NO: 45334 - DNA, 120 bp, Artificial Sequence
  ENSG00000064655_5 (sequence is synthesized)
gactgggcaacgcagccggtttcgggagtgtgcaccaggactatccttcctaccccggcttcccccagagccagtacccccagtattacggctcatcctacaaccctccctacgtcccgg

SEQ ID NO: 45335 - DNA, 120 bp, Artificial Sequence
  ENSG00000064655_6 (sequence is synthesized)
ccagcagcatctgcccttcgcccctctccacgtccacctacgtcctccaggaggcatctcacaacgtccccaaccagagttccgagtcacttgctggtgaatacaacacacacaatggac

SEQ ID NO: 45336 - DNA, 120 bp, Artificial Sequence
  ENSG00000064655_7 (sequence is synthesized)
cttccacaccagcgaaagagggagacacagacaggccgcaccgggcctccgacgggaagctccgaggccggtctaagaggagcagtgacccgtccccggcaggggacaatgagattgagc

SEQ ID NO: 45337 - DNA, 120 bp, Artificial Sequence
  ENSG00000064655_8 (sequence is synthesized)
gtgtgttcgtgtgggacttggatgagacaataattatttttcactccttactcacggggacatttgcatccagatacgggaaggacaccacgacgtccgtgcgcattggccttatgatgg

SEQ ID NO: 45338 - DNA, 120 bp, Artificial Sequence
  ENSG00000064655_9 (sequence is synthesized)
aagagatgatcttcaaccttgcagatacacatctgttcttcaatgacctggaggattgtgaccagatccacgttgatgacgtctcatcagatgacaatggccaagatttaagcacataca

SEQ ID NO: 45339 - DNA, 120 bp, Artificial Sequence
  ENSG00000064655_10 (sequence is synthesized)
atgaggaagctggccttccgctaccggcgggtgaaggagatgtacaatacctacaagaacaacgttggtgggttgataggcactcccaaaagggagacctggctacagctccgagctgag

SEQ ID NO: 45340 - DNA, 120 bp, Artificial Sequence
  ENSG00000064655_11 (sequence is synthesized)
ctggaagctctcacagacctctggctgacccactccctgaaggcactaaacctcatcaactcccggcccaactgtgtcaatgtgctggtcaccaccactcaactaattcctgccctggcc

SEQ ID NO: 45341 - DNA, 120 bp, Artificial Sequence
  ENSG00000064655_12 (sequence is synthesized)
aaagtcctgctatatggcctggggtctgtgtttcctattgagaacatctacagtgcaaccaagacagggaaggagagctgcttcgagaggataatgcagagattcggcagaaaagctgtc

SEQ ID NO: 45342 - DNA, 120 bp, Artificial Sequence
  ENSG00000064655_13 (sequence is synthesized)
tacgtggtgatcggtgatggtgtggaagaggagcaaggagcgaaaaagcacaacatgcctttctggcggatatcctgccacgcagacctggaggcactgaggcacgccctggagctggag

SEQ ID NO: 45343 - DNA, 120 bp, Artificial Sequence
  ENSG00000064655_14 (sequence is synthesized)
tatttatagcaggatcagcagcatctccacctgccatctcaccctcagaccccctcgccttccccacctccccaccgagaactccagagacccagatgttggacaccaggaaggggcccc

SEQ ID NO: 45344 - DNA, 120 bp, Artificial Sequence
  ENSG00000064655_15 (sequence is synthesized)
acagccgagacgacgtgtccagtgaccatctcagaagccgtccatcagtccaaatgggggttctgagaaggaaagtacccaacattggcttcggagtatttgactttggggaaaagggct

SEQ ID NO: 45345 - DNA, 120 bp, Artificial Sequence
  ENSG00000064655_16 (sequence is synthesized)
ggctcggagtctagactcttctgtaagactcacagaacaaaagcaaggaattgctgatttggggggtgcctggtgatgaggaggggatgggtttgtcttgtcttctttttaatttatgga

SEQ ID NO: 45346 - DNA, 120 bp, Artificial Sequence
  ENSG00000064655_17 (sequence is synthesized)
ctagtctcattactccggaattatgctcttgtacctgtgtggctgggtttcttagtcgttggtttggtttggttttttgaactggtatgtggggtggttcacagttctaatgtaagcact

SEQ ID NO: 45347 - DNA, 120 bp, Artificial Sequence
  ENSG00000064655_18 (sequence is synthesized)
ctattctccaagttgtgctttgtggggacaatcattctttgaacattagagaggaaggcagttcaagctgttgaaaagactattgcttatttttgtttttaaagacctacttgacgtcat

SEQ ID NO: 45348 - DNA, 120 bp, Artificial Sequence
  ENSG00000064655_19 (sequence is synthesized)
gtggacagtgcacgtgccttacgctacatcttgttttctaggaagagggggatgctgggaaggaatgggtgctttgtgatggataaaaggcattaaataaaaccacgtttacattttgaa

SEQ ID NO: 45349 - DNA, 120 bp, Artificial Sequence
  ENSG00000064655_20 (sequence is synthesized)
tcagtcccagccaagccacgtggactgagagtcatggggagacctagggaaattaaataactcacaaacacctgtaaaaactgttacagtgactggtgtgtgtgatagagggccatgggc

SEQ ID NO: 45350 - DNA, 120 bp, Artificial Sequence
  ENSG00000064655_21 (sequence is synthesized)
aacagcatgtacaaaggccctgtggcaagagggagtgtggagcgagagaaaggccagcgtgctggaatcagatattggacaaggagaagccagatcaaggctgtgttcggaactctttgc

SEQ ID NO: 45351 - DNA, 120 bp, Artificial Sequence
  ENSG00000064655_22 (sequence is synthesized)
tttatcttaagagcaatggaaagccgtcagaggttataagcaaggatgaggtacaaggaaatggtagaactagtgatctcacccagcctcactgtaaacagcgattgtctggataaactg

SEQ ID NO: 45352 - DNA, 120 bp, Artificial Sequence
  ENSG00000064655_23 (sequence is synthesized)
gagctcaactctgcccctcaaaccacaataggaaccagtggtttccgggtgatcctgatgacagtttccagtgtctacctggaatgaaacgaatggtacaaggaaatggtagaactagtg

SEQ ID NO: 45353 - DNA, 120 bp, Artificial Sequence
  ENSG00000064655_24 (sequence is synthesized)
aagctaagtctttctcctaccccagattccttgaaggctgtctgagttctctcttccttcccctgcatagagaataagctggtctccaatttcaggtacaaggaaatggtagaactagtg

SEQ ID NO: 45354 - DNA, 80 bp, Artificial Sequence
  ENSG00000064655_25 (sequence is synthesized)
gcgcgctctgctcggctgcaggctcaggaagcggcgcggcggcacgtgctgggccagagccccgcgccctgcgtccagcc

SEQ ID NO: 45355 - DNA, 120 bp, Artificial Sequence
  ENSG00000064655_26 (sequence is synthesized)
caaaacaaggaagaaaaccaaggaagagagacttgggatccagaaaacagtggatccaacccagaaatacaatgaagggaagtctgcagcaagcctaaaaatgatccagtccacattgga

SEQ ID NO: 45356 - DNA, 120 bp, Artificial Sequence
  ENSG00000064655_27 (sequence is synthesized)
ggtttctatcactgaggatagatatctccaatacagagtgtgtggctgaatttgacattttaatgaaggtacattgttgcaaacaagaaaaaattaataaattctgacaaaaccaaaaaa

SEQ ID NO: 45357 - DNA, 120 bp, Artificial Sequence
  ENSG00000064666_0 (sequence is synthesized)
ggtcccgtcccgtcccgtcctgtgcggccccgtcccgccgcccgcccgccagccatgagctccacgcagttcaacaagggcccctcgtacgggctgtcggccgaggtcaagaaccggctc

SEQ ID NO: 45358 - DNA, 120 bp, Artificial Sequence
  ENSG00000064666_1 (sequence is synthesized)
ctgtccaaatatgacccccagaaggaggcagagctccgcacctggatcgagggactcaccggcctctccatcggccccgacttccagaagggcctgaaggatggaactatcttatgcaca

SEQ ID NO: 45359 - DNA, 120 bp, Artificial Sequence
  ENSG00000064666_2 (sequence is synthesized)
ctcatgaacaagctacagccgggctccgtccccaagatcaaccgctccatgcagaactggcaccagctagaaaacctgtccaacttcatcaaggccatggtcagctacggcatgaaccct

SEQ ID NO: 45360 - DNA, 120 bp, Artificial Sequence
  ENSG00000064666_3 (sequence is synthesized)
gtggacctgttcgaggccaacgacctgtttgagagtgggaacatgacgcaggtgcaggtgtctcttctcgccctggcggggaaggccaagactaaggggctgcagagcggggtggacatt

SEQ ID NO: 45361 - DNA, 120 bp, Artificial Sequence
  ENSG00000064666_4 (sequence is synthesized)
ggcgtcaagtactcggagaagcaggagcggaatttcgacgatgccaccatgaaggctggccagtgcgtcatcgggctgcagatgggcaccaacaaatgcgccagccagtcgggcatgact

SEQ ID NO: 45362 - DNA, 120 bp, Artificial Sequence
  ENSG00000064666_5 (sequence is synthesized)
gcctacggcacgagaaggcatctctatgaccccaagaaccatatcctgccccccatggaccactcgaccatcagcctccagatgggcacgaacaagtgtgccagccaggtgggcatgacg

SEQ ID NO: 45363 - DNA, 120 bp, Artificial Sequence
  ENSG00000064666_6 (sequence is synthesized)
gctcccgggacccggcggcacatctatgataccaagctgggaaccgacaagtgtgacaactcctccatgtccctgcagatgggctacacgcagggcgccaaccagagcggccaggtcttc

SEQ ID NO: 45364 - DNA, 120 bp, Artificial Sequence
  ENSG00000064666_7 (sequence is synthesized)
ggcctgggccggcagatatatgaccccaagtactgcccgcaaggcacagtggccgatggggctccctcgggcaccggcgactgcccggacccgggggaggtccctgaatatcccccttac

SEQ ID NO: 45365 - DNA, 120 bp, Artificial Sequence
  ENSG00000064666_8 (sequence is synthesized)
taacccgttcagtgctgccagtcaaccaagggtctgtgagtgtcagcgtgggatcaggcagcagagcttttttcccctttgccttgatccttcgcaaggctgagccactgggctgtgggg

SEQ ID NO: 45366 - DNA, 120 bp, Artificial Sequence
  ENSG00000064666_9 (sequence is synthesized)
gaaggggtcaaggccatatcccaatacgtgtagggcgagggtccctgctggcacattcaggctgtgctgggaagaagagacctgggcttggaaggaaccggtccccgacggtttctgctt

SEQ ID NO: 45367 - DNA, 120 bp, Artificial Sequence
  ENSG00000064666_10 (sequence is synthesized)
gcctcgcctcttcccccttttgtcagctgagcagtttgtggtttctatgcccgcaagtttcaggaagtattcacaaaagaaaaatacattttttcccccaggggtggggcaaggacagtg

SEQ ID NO: 45368 - DNA, 120 bp, Artificial Sequence
  ENSG00000064666_11 (sequence is synthesized)
gagagagtgctaggaaatgagtcccctgggaaaggggaccgggccgtgatgttaaatatctccggctcccaagtgactggatttgcctaggaccttcagaccaacagacttcagaccctc

SEQ ID NO: 45369 - DNA, 120 bp, Artificial Sequence
  ENSG00000064666_12 (sequence is synthesized)
agacctgccccggggccaggtggagaaagtgagggccgtacaaggaagtgaaattctgagttgttggggctaagcctgaccccctctccatgctccccgccccaacccactctggcctca

SEQ ID NO: 45370 - DNA, 74 bp, Artificial Sequence
  ENSG00000064666_13 (sequence is synthesized)
cccctctccatgctccccgccccaacccactctggcctcagtagatttttttttcagttgtggcctccaccttc

SEQ ID NO: 45371 - DNA, 120 bp, Artificial Sequence
  ENSG00000064666_14 (sequence is synthesized)
aggtgtgagccaccgtgcccagcccctcagtaggttttaaggagcccccagccctcctcccttctgggcccgaccagcttatactgctccatcttccccggccacatgccccgccaagta

SEQ ID NO: 45372 - DNA, 120 bp, Artificial Sequence
  ENSG00000064666_15 (sequence is synthesized)
cccggccacatgccccgccaagtactgcacagggaccccccacccaggggacctgctccgtgagataatgtgaaatacgactgtggaccaaacgcaataaaacctctgtttgtacgaaga

SEQ ID NO: 45373 - DNA, 120 bp, Artificial Sequence
  ENSG00000064666_16 (sequence is synthesized)
gggacctccaggccgctctatctgctgttgccctggagtccccggccccaccctctgcagagcttctgtggggttcctgctgggggtgcccccagcccagctcagtctcgtgccctttgc

SEQ ID NO: 45374 - DNA, 120 bp, Artificial Sequence
  ENSG00000064666_17 (sequence is synthesized)
cccaaccccgcgccagcccggcggtcccgtcccgtcccgtcctgtgcggccccgtcccgccgcccgcccgccagccatgagctccacgcagttcaacaagggcccctcgtacgggctgtc

SEQ ID NO: 45375 - DNA, 120 bp, Artificial Sequence
  ENSG00000064666_18 (sequence is synthesized)
ggccgaggtcaagaaccgggggtagttgggtctgacttcgtcccctcgccatggccccaggacccccacgtgtgaagcccctggcgcccactcaaccttcgagaaggtccgttcaagctc

SEQ ID NO: 45376 - DNA, 120 bp, Artificial Sequence
  ENSG00000064666_19 (sequence is synthesized)
ctcgcccgggtgcccccgactcctctccctgcccctctacaccctgtggtctcggcccctccctggggccacctccagcttctctccccactctcagtctcagccccttccctagaccac

SEQ ID NO: 45377 - DNA, 81 bp, Artificial Sequence
  ENSG00000064666_20 (sequence is synthesized)
cttaaggactgcccaaaggtccacccaattctttttttttaatctttatttattttatttatgtatttattttgagatagg

SEQ ID NO: 45378 - DNA, 72 bp, Artificial Sequence
  ENSG00000064666_21 (sequence is synthesized)
acctcccaaactgctagggttacaggtgtgagccaccgcacccggccacacccagctaatttttgtattttt

SEQ ID NO: 45379 - DNA, 81 bp, Artificial Sequence
  ENSG00000064666_22 (sequence is synthesized)
cccagagtcacacagcgaggtggatgtagctgctgcattcactcgtttgcaaatttctgtttgtttatttttgagtgtgat

SEQ ID NO: 45380 - DNA, 63 bp, Artificial Sequence
  ENSG00000064666_23 (sequence is synthesized)
tgaaggtcccctcttctctccaccatgacctgctccacccctccttcctctccaggtgggcat

SEQ ID NO: 45381 - DNA, 120 bp, Artificial Sequence
  ENSG00000064687_0 (sequence is synthesized)
gggcaagctcagcgcacttggcttaaggggcggcgcgctccctgcctgctgctgggcggagggaaggcggcaagagctgcggagcccctggaagagcttccaggaaccctgcgctgtggg

SEQ ID NO: 45382 - DNA, 120 bp, Artificial Sequence
  ENSG00000064687_1 (sequence is synthesized)
ataaaggaatgaggttcagaaaggggcagggagttgcccgcagccgcaccgcacgtcttcagcccgaccgttgtcctgacctctctgtcccgtcccctgcccagtctcaccatggccttc

SEQ ID NO: 45383 - DNA, 120 bp, Artificial Sequence
  ENSG00000064687_2 (sequence is synthesized)
tggacacagctgatgctgctgctctggaagaatttcatgtatcgccggagacagccggtccagctcctggtcgaattgctgtggcctctcttcctcttcttcatcctggtggctgttcgc

SEQ ID NO: 45384 - DNA, 120 bp, Artificial Sequence
  ENSG00000064687_3 (sequence is synthesized)
cactcccacccgcccctggagcaccatgaatgccacttcccaaacaagccactgccatcggcgggcaccgtgccctggctccagggtctcatctgtaatgtgaacaacacctgctttccg

SEQ ID NO: 45385 - DNA, 120 bp, Artificial Sequence
  ENSG00000064687_4 (sequence is synthesized)
cagctgacaccgggcgaggagcccgggcgcctgagcaacttcaacgactccctggtctcccggctgctagccgatgcccgcactgtgctgggaggggccagtgcccacaggacgctggct

SEQ ID NO: 45386 - DNA, 120 bp, Artificial Sequence
  ENSG00000064687_5 (sequence is synthesized)
ggcctagggaagctgatcgccacgctgagggctgcacgcagcacggcccagcctcaaccaaccaagcagtctccactggaaccacccatgctggatgtcgcggagctgctgacgtcactg

SEQ ID NO: 45387 - DNA, 120 bp, Artificial Sequence
  ENSG00000064687_6 (sequence is synthesized)
ctgcgcacggaatccctggggttggcactgggccaagcccaggagcccttgcacagcttgttggaggccgctgaggacctggcccaggagctcctggcgctgcgcagcctggtggagctt

SEQ ID NO: 45388 - DNA, 120 bp, Artificial Sequence
  ENSG00000064687_7 (sequence is synthesized)
cgggcactgctgcagagaccccgagggaccagcggccccctggagttgctgtcagaggccctctgcagtgtcaggggacctagcagcacagtgggcccctccctcaactggtacgaggct

SEQ ID NO: 45389 - DNA, 120 bp, Artificial Sequence
  ENSG00000064687_8 (sequence is synthesized)
agtgacctgatggagctggtggggcaggagccagaatccgccctgccagacagcagcctgagccccgcctgctcggagctgattggagccctggacagccacccgctgtcccgcctgctc

SEQ ID NO: 45390 - DNA, 120 bp, Artificial Sequence
  ENSG00000064687_9 (sequence is synthesized)
tggagacgcctgaagcctctgatcctcgggaagctactctttgcaccagatacaccttttacccggaagctcatggcccaggtgaaccggaccttcgaggagctcaccctgctgagggat

SEQ ID NO: 45391 - DNA, 120 bp, Artificial Sequence
  ENSG00000064687_10 (sequence is synthesized)
gtccgggaggtgtgggagatgctgggaccccggatcttcaccttcatgaacgacagttccaatgtggccatgctgcagcggctcctgcagatgcaggatgaaggaagaaggcagcccaga

SEQ ID NO: 45392 - DNA, 120 bp, Artificial Sequence
  ENSG00000064687_11 (sequence is synthesized)
cctggaggccgggaccacatggaggccctgcgatcctttctggaccctgggagcggtggctacagctggcaggacgcacacgctgatgtggggcacctggtgggcacgctgggccgagtg

SEQ ID NO: 45393 - DNA, 120 bp, Artificial Sequence
  ENSG00000064687_12 (sequence is synthesized)
acggagtgcctgtccttggacaagctggaggcggcaccctcagaggcagccctggtgtcgcgggccctgcaactgctcgcggaacatcgattctgggccggcgtcgtcttcttgggacct

SEQ ID NO: 45394 - DNA, 120 bp, Artificial Sequence
  ENSG00000064687_13 (sequence is synthesized)
gaggactcttcagaccccacagagcacccaaccccagacctgggccccggccacgtgcgcatcaaaatccgcatggacattgacgtggtcacgaggaccaataagatcagggacaggttt

SEQ ID NO: 45395 - DNA, 120 bp, Artificial Sequence
  ENSG00000064687_14 (sequence is synthesized)
tgggaccctggcccagccgcggaccccctgaccgacctgcgctacgtgtggggcggcttcgtgtacctgcaagacctggtggagcgtgcagccgtccgcgtgctcagcggcgccaacccc

SEQ ID NO: 45396 - DNA, 120 bp, Artificial Sequence
  ENSG00000064687_15 (sequence is synthesized)
cgggccggcctctacctgcagcagatgccctatccgtgctatgtggacgacgtgttcctgcgtgtgctgagccggtcgctgccgctcttcctgacgctggcctggatctactccgtgaca

SEQ ID NO: 45397 - DNA, 120 bp, Artificial Sequence
  ENSG00000064687_16 (sequence is synthesized)
ctgacagtgaaggccgtggtgcgggagaaggagacgcggctgcgggacaccatgcgcgccatggggctcagccgcgcggtgctctggctaggctggttcctcagctgcctcgggcccttc

SEQ ID NO: 45398 - DNA, 120 bp, Artificial Sequence
  ENSG00000064687_17 (sequence is synthesized)
ctgctcagcgccgcactgctggttctggtgctcaagctgggagacatcctcccctacagccacccgggcgtggtcttcctgttcttggcagccttcgcggtggccacggtgacccagagc

SEQ ID NO: 45399 - DNA, 120 bp, Artificial Sequence
  ENSG00000064687_18 (sequence is synthesized)
ttcctgctcagcgccttcttctcccgcgccaacctggctgcggcctgcggcggcctggcctacttctccctctacctgccctacgtgctgtgtgtggcttggcgggaccggctgcccgcg

SEQ ID NO: 45400 - DNA, 120 bp, Artificial Sequence
  ENSG00000064687_19 (sequence is synthesized)
ggtggccgcgtggccgcgagcctgctgtcgcccgtggccttcggcttcggctgcgagagcctggctctgctggaggagcagggcgagggcgcgcagtggcacaacgtgggcacccggcct

SEQ ID NO: 45401 - DNA, 120 bp, Artificial Sequence
  ENSG00000064687_20 (sequence is synthesized)
acggcagacgtcttcagcctggcccaggtctctggccttctgctgctggacgcggcgctctacggcctcgccacctggtacctggaagctgtgtgcccaggccagtacgggatccctgaa

SEQ ID NO: 45402 - DNA, 120 bp, Artificial Sequence
  ENSG00000064687_21 (sequence is synthesized)
ccatggaattttccttttcggaggagctactggtgcggacctcggccccccaagagtccagccccttgccccaccccgctggacccaaaggtgctggtagaagaggcaccgcccggcctg

SEQ ID NO: 45403 - DNA, 120 bp, Artificial Sequence
  ENSG00000064687_22 (sequence is synthesized)
agtcctggcgtctccgttcgcagcctggagaagcgctttcctggaagcccgcagccagccctgcgggggctcagcctggacttctaccagggccacatcaccgccttcctgggccacaac

SEQ ID NO: 45404 - DNA, 120 bp, Artificial Sequence
  ENSG00000064687_23 (sequence is synthesized)
ggggccggcaagaccaccaccctgtccatcttgagtggcctcttcccacccagtggtggctctgccttcatcctgggccacgacgtccgctccagcatggccgccatccggccccacctg

SEQ ID NO: 45405 - DNA, 120 bp, Artificial Sequence
  ENSG00000064687_24 (sequence is synthesized)
ggcgtctgtcctcagtacaacgtgctgtttgacatgctgaccgtggacgagcacgtctggttctatgggcggctgaagggtctgagtgccgctgtagtgggccccgagcaggaccgtctg

SEQ ID NO: 45406 - DNA, 120 bp, Artificial Sequence
  ENSG00000064687_25 (sequence is synthesized)
ctgcaggatgtggggctggtctccaagcagagtgtgcagactcgccacctctctggtgggatgcaacggaagctgtccgtggccattgcctttgtgggcggctcccaagttgttatcctg

SEQ ID NO: 45407 - DNA, 120 bp, Artificial Sequence
  ENSG00000064687_26 (sequence is synthesized)
gacgagcctacggctggcgtggatcctgcttcccgccgcggtatttgggagctgctgctcaaataccgagaaggtcgcacgctgatcctctccacccaccacctggatgaggcagagctg

SEQ ID NO: 45408 - DNA, 120 bp, Artificial Sequence
  ENSG00000064687_27 (sequence is synthesized)
ctgggagaccgtgtggccgtggtggcaggtggccgcttgtgctgctgtggctccccactcttcctgcgccgtcacctgggctccggctactacctgacgctggtgaaggcccgcctgccc

SEQ ID NO: 45409 - DNA, 120 bp, Artificial Sequence
  ENSG00000064687_28 (sequence is synthesized)
cctcagctgctggccctggtacagcactgggtgcccggggcacggctggtggaggagctgccacacgagctggtgctggtgctgccctacacgggtgcccatgacggcagcttcgccaca

SEQ ID NO: 45410 - DNA, 120 bp, Artificial Sequence
  ENSG00000064687_29 (sequence is synthesized)
ctcttccgagagctagacacgcggctggcggagctgaggctcactggctacgggatctccgacaccagcctcgaggagatcttcctgaaggtggtggaggagtgtgctgcggacacagat

SEQ ID NO: 45411 - DNA, 120 bp, Artificial Sequence
  ENSG00000064687_30 (sequence is synthesized)
atggaggatggcagctgcgggcagcacctatgcacaggcattgctggcctagacgtaaccctacggctcaagatgccgccacaggagacagcgctggagaacggggaaccagctgggtca

SEQ ID NO: 45412 - DNA, 120 bp, Artificial Sequence
  ENSG00000064687_31 (sequence is synthesized)
gccccagagactgaccagggctctgggccagacgccgtgggccgggtacagggctgggcactgacccgccagcagctccaggccctgcttctcaagcgctttctgcttgcccgccgcagc

SEQ ID NO: 45413 - DNA, 120 bp, Artificial Sequence
  ENSG00000064687_32 (sequence is synthesized)
cgccgcggcctgttcgcccagatcgtgctgcctgccctctttgtgggcctggccctcgtgttcagcctcatcgtgcctcctttcgggcactacccggctctgcggctcagtcccaccatg

SEQ ID NO: 45414 - DNA, 120 bp, Artificial Sequence
  ENSG00000064687_33 (sequence is synthesized)
tacggtgctcaggtgtccttcttcagtgaggacgccccaggggaccctggacgtgcccggctgctcgaggcgctgctgcaggaggcaggactggaggagcccccagtgcagcatagctcc

SEQ ID NO: 45415 - DNA, 120 bp, Artificial Sequence
  ENSG00000064687_34 (sequence is synthesized)
cacaggttctcggcaccagaagttcctgctgaagtggccaaggtcttggccagtggcaactggaccccagagtctccatccccagcctgccagtgtagccggcccggtgcccggcgcctg

SEQ ID NO: 45416 - DNA, 120 bp, Artificial Sequence
  ENSG00000064687_35 (sequence is synthesized)
ctgcccgactgcccggctgcagctggtggtccccctccgccccaggcagtgaccggctctggggaagtggttcagaacctgacaggccggaacctgtctgacttcctggtcaagacctac

SEQ ID NO: 45417 - DNA, 120 bp, Artificial Sequence
  ENSG00000064687_36 (sequence is synthesized)
ccgcgcctggtgcgccagggcctgaagactaagaagtgggtgaatgaggtcagatacggaggcttctcgctggggggccgagacccaggcctgccctcgggccaagagttgggccgctca

SEQ ID NO: 45418 - DNA, 120 bp, Artificial Sequence
  ENSG00000064687_37 (sequence is synthesized)
gtggaggagttgtgggcgctgctgagtcccctgcctggcggggccctcgaccgtgtcctgaaaaacctcacagcctgggctcacagcctggatgctcaggacagtctcaagatctggttc

SEQ ID NO: 45419 - DNA, 120 bp, Artificial Sequence
  ENSG00000064687_38 (sequence is synthesized)
aacaacaaaggctggcactccatggtggcctttgtcaaccgagccagcaacgcaatcctccgtgctcacctgcccccaggcccggcccgccacgcccacagcatcaccacactcaaccac

SEQ ID NO: 45420 - DNA, 120 bp, Artificial Sequence
  ENSG00000064687_39 (sequence is synthesized)
cccttgaacctcaccaaggagcagctgtctgagggtgcactgatggcctcctcggtggacgtcctcgtctccatctgtgtggtctttgccatgtcctttgtcccggccagcttcactctt

SEQ ID NO: 45421 - DNA, 120 bp, Artificial Sequence
  ENSG00000064687_40 (sequence is synthesized)
gtcctcattgaggagcgagtcacccgagccaagcacctgcagctcatggggggcctgtcccccaccctctactggcttggcaactttctctgggacatgtgtaactacttggtgccagca

SEQ ID NO: 45422 - DNA, 120 bp, Artificial Sequence
  ENSG00000064687_41 (sequence is synthesized)
tgcatcgtggtgctcatctttctggccttccagcagagggcatatgtggcccctgccaacctgcctgctctcctgctgttgctactactgtatggctggtcgatcacaccgctcatgtac

SEQ ID NO: 45423 - DNA, 120 bp, Artificial Sequence
  ENSG00000064687_42 (sequence is synthesized)
ccagcctccttcttcttctccgtgcccagcacagcctatgtggtgctcacctgcataaacctctttattggcatcaatggaagcatggccacctttgtgcttgagctcttctctgatcag

SEQ ID NO: 45424 - DNA, 120 bp, Artificial Sequence
  ENSG00000064687_43 (sequence is synthesized)
aagctgcaggaggtgagccggatcttgaaacaggtcttccttatcttcccccacttctgcttgggccgggggctcattgacatggtgcggaaccaggccatggctgatgcctttgagcgc

SEQ ID NO: 45425 - DNA, 120 bp, Artificial Sequence
  ENSG00000064687_44 (sequence is synthesized)
ttgggagacaggcagttccagtcacccctgcgctgggaggtggtcggcaagaacctcttggccatggtgatacaggggcccctcttccttctcttcacactactgctgcagcaccgaagc

SEQ ID NO: 45426 - DNA, 120 bp, Artificial Sequence
  ENSG00000064687_45 (sequence is synthesized)
caactcctgccacagcccagggtgaggtctctgccactcctgggagaggaggacgaggatgtagcccgtgaacgggagcgggtggtccaaggagccacccagggggatgtgttggtgctg

SEQ ID NO: 45427 - DNA, 120 bp, Artificial Sequence
  ENSG00000064687_46 (sequence is synthesized)
aggaacttgaccaaggtataccgtgggcagaggatgccagctgttgaccgcttgtgcctggggattccccctggtgagtgttttgggctgctgggtgtgaatggagcagggaagacgtcc

SEQ ID NO: 45428 - DNA, 120 bp, Artificial Sequence
  ENSG00000064687_47 (sequence is synthesized)
acgtttcgcatggtgacgggggacacattggccagcaggggcgaggctgtgctggcaggccacagcgtggcccgggaacccagtgctgcgcacctcagcatgggatactgccctcaatcc

SEQ ID NO: 45429 - DNA, 120 bp, Artificial Sequence
  ENSG00000064687_48 (sequence is synthesized)
gatgccatctttgagctgctgacgggccgcgagcacctggagctgcttgcgcgcctgcgcggtgtcccggaggcccaggttgcccagaccgctggctcgggcctggcgcgtctgggactc

SEQ ID NO: 45430 - DNA, 120 bp, Artificial Sequence
  ENSG00000064687_49 (sequence is synthesized)
tcatggtacgcagaccggcctgcaggcacctacagcggagggaacaaacgcaagctggcgacggccctggcgctggttggggacccagccgtggtgtttctggacgagccgaccacaggc

SEQ ID NO: 45431 - DNA, 120 bp, Artificial Sequence
  ENSG00000064687_50 (sequence is synthesized)
atggaccccagcgcgcggcgcttcctttggaacagccttttggccgtggtgcgggagggccgttcagtgatgctcacctcccatagcatggaggagtgtgaagcgctctgctcgcgcctg

SEQ ID NO: 45432 - DNA, 120 bp, Artificial Sequence
  ENSG00000064687_51 (sequence is synthesized)
gccatcatggtgaatgggcggttccgctgcctgggcagcccgcaacatctcaagggcagattcgcggcgggtcacacactgaccctgcgggtgcccgccgcaaggtcccagccggcagcg

SEQ ID NO: 45433 - DNA, 120 bp, Artificial Sequence
  ENSG00000064687_52 (sequence is synthesized)
gccttcgtggcggccgagttccctggggcggagctgcgcgaggcacatggaggccgcctgcgcttccagctgccgccgggagggcgctgcgccctggcgcgcgtctttggagagctggcg

SEQ ID NO: 45434 - DNA, 120 bp, Artificial Sequence
  ENSG00000064687_53 (sequence is synthesized)
gtgcacggcgcagagcacggcgtggaggacttttccgtgagccagacgatgctggaggaggtattcttgtacttctccaaggaccaggggaaggacgaggacaccgaagagcagaaggag

SEQ ID NO: 45435 - DNA, 120 bp, Artificial Sequence
  ENSG00000064687_54 (sequence is synthesized)
gcaggagtgggagtggaccccgcgccaggcctgcagcaccccaaacgcgtcagccagttcctcgatgaccctagcactgccgagactgtgctctgagcctccctcccctgcggggccgcg

SEQ ID NO: 45436 - DNA, 120 bp, Artificial Sequence
  ENSG00000064687_55 (sequence is synthesized)
gggaggccctgggaatggcaagggcaaggtagagtgcctaggagccctggactcaggctggcagaggggctggtgccctggagaaaataaagagaaggctggagagaagccgtggtggtg

SEQ ID NO: 45437 - DNA, 120 bp, Artificial Sequence
  ENSG00000064687_56 (sequence is synthesized)
tcagtttccctatttgtaaagtgggggctatgatagtatggtctgcctgggaactggccagagcgctggacccctagtgagtgttcaaaatcattgtcccccttgtggtctttctcccca

SEQ ID NO: 45438 - DNA, 120 bp, Artificial Sequence
  ENSG00000064687_57 (sequence is synthesized)
tcaagtggggtgatagcttcgagagcaacctgggcaacctagggagaccccatctctataaaaaatttaaaaattagctggacatggtgattcgcggcgggtcacacactgaccctgcgg

SEQ ID NO: 45439 - DNA, 120 bp, Artificial Sequence
  ENSG00000064687_58 (sequence is synthesized)
gagaccagggccgggtgggcaggcagcccccactgtcccccaccgtctcccacctattctcccccaggtccagctcctggtcgaattgctgtggcctctcttcctcttcttcatcctggt

SEQ ID NO: 45440 - DNA, 120 bp, Artificial Sequence
  ENSG00000064687_59 (sequence is synthesized)
gggagatgtccacaccagaagggtggcccaggccgggggaagcaggcagtgtggcgccaggcacaggtggccccggcctcacggagctcgtggtgccgggtcccgacagcatggaggagt

SEQ ID NO: 45441 - DNA, 120 bp, Artificial Sequence
  ENSG00000064687_60 (sequence is synthesized)
cagtgggtgcggccggcctgcaaactcggggctgcagtgccggccggaaccccgcctcctgccctctctctgtccccagggtctcccggctgctagccgatgcccgcactgtgctgggag

SEQ ID NO: 45442 - DNA, 120 bp, Artificial Sequence
  ENSG00000064687_61 (sequence is synthesized)
tgtccctggtctctgcggtgatgctgcttgtccgtctgggcccccagacagagtgtgtctgacccagtgaggaagactcgtctgtgagatctccaatgagtccctttgcctctcagagcc

SEQ ID NO: 45443 - DNA, 120 bp, Artificial Sequence
  ENSG00000064687_62 (sequence is synthesized)
ctggagcaccatgaatgtgagcccccccagggaccaggcactttgtgtgtgtaggggaaggcagatggctcacccgtgcacaggaatcccccgtgcatgtcagggagccttcaccaggcc

SEQ ID NO: 45444 - DNA, 120 bp, Artificial Sequence
  ENSG00000064687_63 (sequence is synthesized)
tgagctctccatcgctggaggcatgcaagcggtgccgggcgacccgatgggggtggagtcaggcagagtccacagggcctcagcaccaggcgtctccccgcaggccacttcccaaacaag

SEQ ID NO: 45445 - DNA, 120 bp, Artificial Sequence
  ENSG00000064687_64 (sequence is synthesized)
ctgtcccccaccctctactggcttggcaactttctctgggacatggtgcgggggctgcttggacgggtgggggcccagccactgcttgccactgccctgtctggccccttgtaggcaggg

SEQ ID NO: 45446 - DNA, 120 bp, Artificial Sequence
  ENSG00000064687_65 (sequence is synthesized)
gcttgtccaagatggcctgggtaaagtcttgaggattgtgggagactttgtgccttcctactcaaaaagcaaggaggtcagggtgggaacagggctgagggtggcagtgcccacctcttt

SEQ ID NO: 45447 - DNA, 120 bp, Artificial Sequence
  ENSG00000064687_66 (sequence is synthesized)
cctgcccatcatcctttactgaacacctactgtgtatccaccaccttttattgggcacctactgtatgccaatatttgtgctcctatttttattttattatattattatttatttattta

SEQ ID NO: 45448 - DNA, 120 bp, Artificial Sequence
  ENSG00000064692_0 (sequence is synthesized)
agtcagtcccttcgcgctcctgagccgccggcgcgccgggcgccccgggaatttataagtatttgaccgtactcaaaatgtgcaaggaagaataatggaagcccctgaataccttgattt

SEQ ID NO: 45449 - DNA, 120 bp, Artificial Sequence
  ENSG00000064692_1 (sequence is synthesized)
ggatgaaattgactttagtgatgacatatcttattcagtcacatcactcaagacgatcccagaactgtgccgaagatgtgatacgcaaaacgaagacagatcagtttctagctctagctg

SEQ ID NO: 45450 - DNA, 120 bp, Artificial Sequence
  ENSG00000064692_2 (sequence is synthesized)
gaattgtggcatctcaactcttattacaaacacgcaaaagcccacaggaatcgctgatgtgtacagtaagttccgcccagtgaagcgggtttcgccactgaaacatcagccagagactct

SEQ ID NO: 45451 - DNA, 120 bp, Artificial Sequence
  ENSG00000064692_3 (sequence is synthesized)
ggagaacaatgaaagtgatgaccaaaagaaccagaaagtggttgagtaccagaaagggggtgagtctgacctgggcccccagcctcaggagcttggccctggagatggagtgggcggccc

SEQ ID NO: 45452 - DNA, 120 bp, Artificial Sequence
  ENSG00000064692_4 (sequence is synthesized)
accaggtaagagctctgagcccagcacatcgctgggtgaactggagcactacgacctcgacatggatgagattctggatgtgccttatattaaatccagtcagcagcttgcctcttttac

SEQ ID NO: 45453 - DNA, 120 bp, Artificial Sequence
  ENSG00000064692_5 (sequence is synthesized)
caaggtgacttcagaaaaaagaattttgggcttatgcacaaccatcaatggcctttctggcaaagcctgctctacaggaagttctgagagctcatcatccaacatggcaccattttgtgt

SEQ ID NO: 45454 - DNA, 120 bp, Artificial Sequence
  ENSG00000064692_6 (sequence is synthesized)
tctttctcccgtgaaaagccctcacttgagaaaagcatcagctgtcatccacgaccagcacaagctgtccactgaagaaaccgagatctcacctcctctggttaaatgtggctctgcata

SEQ ID NO: 45455 - DNA, 120 bp, Artificial Sequence
  ENSG00000064692_7 (sequence is synthesized)
tgagcctgaaaaccagagtaaagacttcctaaacaagacatttagtgatcctcatggtcgaaaagttgagaagacaacaccagactgccagctcagggccttccacctacaatcctcagc

SEQ ID NO: 45456 - DNA, 120 bp, Artificial Sequence
  ENSG00000064692_8 (sequence is synthesized)
agcagaatccaaaccagaagagcaggtcagtggcctaaaccggaccagctcccaaggcccagaagaaaggagtgagtatctgaaaaaagtgaaaagcatcttgaacattgttaaagaagg

SEQ ID NO: 45457 - DNA, 120 bp, Artificial Sequence
  ENSG00000064692_9 (sequence is synthesized)
acagatctctctcctgccacacctagctgcagacaatctagacaaaattcacgacgaaaatggaaacaatctattacatattgcggcgtcacagggacacgcagagtgtctacagcacct

SEQ ID NO: 45458 - DNA, 120 bp, Artificial Sequence
  ENSG00000064692_10 (sequence is synthesized)
cacttctttgatgggagaagactgcctcaatgagcgcaacactgagaagttgactccagcaggcctggccattaagaatggtcagttggagtgcgtacgctggatggtgagcgaaacaga

SEQ ID NO: 45459 - DNA, 120 bp, Artificial Sequence
  ENSG00000064692_11 (sequence is synthesized)
agccattgcagaactgagttgttctaaggattttccaagccttattcattacgcaggttgctatggccaggaaaagattcttctgtggcttcttcagtttatgcaagaacagggcatctc

SEQ ID NO: 45460 - DNA, 120 bp, Artificial Sequence
  ENSG00000064692_12 (sequence is synthesized)
gttggatgaagtagaccaggatggcaacagtgccgttcacgtagcctcacagcatggctaccttggatgcatacagaccttggttgaatatggagcaaatgtcaccatgcagaaccacgc

SEQ ID NO: 45461 - DNA, 120 bp, Artificial Sequence
  ENSG00000064692_13 (sequence is synthesized)
tggggaaaagccctcccagagcgccgagcggcaggggcacaccctgtgctccaggtacctggtggtggtggagacctgcatgtcgctggcctctcaagtggtgaagttaaccaagcagct

SEQ ID NO: 45462 - DNA, 120 bp, Artificial Sequence
  ENSG00000064692_14 (sequence is synthesized)
agttcaccatcctcacctgcctccagaaagtcccagtggaaatctccagatgcagatgatgattctgtagccaaaagcaagccaggagtccaagaggggattcaggttcttggaagcctg

SEQ ID NO: 45463 - DNA, 120 bp, Artificial Sequence
  ENSG00000064692_15 (sequence is synthesized)
tcagcctccagccgggctagacccaaagcaaaagatgaagattctgataaaatcttacgccagttattgggaaaggaaatctcagaaaatgtctgcacccaggaaaaactgtccttggaa

SEQ ID NO: 45464 - DNA, 120 bp, Artificial Sequence
  ENSG00000064692_16 (sequence is synthesized)
ttccaggatgctcaggcttcctctagaaattctaaaaagatcccactggagaagagggaactgaagttagccaggctgagacagctgatgcagaggtcactgagtgagtctgacacagac

SEQ ID NO: 45465 - DNA, 120 bp, Artificial Sequence
  ENSG00000064692_17 (sequence is synthesized)
tccaacaactctgaggaccccaagactaccccagtgaggaaggctgaccgaccaaggccgcagcccattgtagaaagcgtagagagtatggacagcgcagaaagcctgcacctgatgatt

SEQ ID NO: 45466 - DNA, 120 bp, Artificial Sequence
  ENSG00000064692_18 (sequence is synthesized)
aagaaacacaccttggcatcagggggacgcaggtttcctttcagcatcaaggcctccaaatccctggatggccacagcccatctcccacctcagagagcagcgaaccagacttagaatcc

SEQ ID NO: 45467 - DNA, 120 bp, Artificial Sequence
  ENSG00000064692_19 (sequence is synthesized)
cagtatccaggctcagggagtattcctccaaaccagccctctggtgaccctcagcagcccagccctgacagtactgctgcccagaaagttgccacaagtcccaagagtgccctcaagtct

SEQ ID NO: 45468 - DNA, 120 bp, Artificial Sequence
  ENSG00000064692_20 (sequence is synthesized)
ccatcttccaagcgtaggacatctcagaacttaaaactgagagttacctttgaggagcctgtggtgcagatggagcagcctagccttgaactgaatggagaaaaagacaaagataagggc

SEQ ID NO: 45469 - DNA, 120 bp, Artificial Sequence
  ENSG00000064692_21 (sequence is synthesized)
aggactctccagcggacctccacaagtaacgaatcgggggatcaactgaaaaggccttttggagcctttcgatctatcatggagacactaagtggcaaccaaaacaataataataactac

SEQ ID NO: 45470 - DNA, 120 bp, Artificial Sequence
  ENSG00000064692_22 (sequence is synthesized)
caggcagccaaccagctgaaaacctctacattgcccttgacctcacttgggaggaagacagatgccaagggaaaccctgccagctccgctagcaaaggaaagaataaggcagcataatga

SEQ ID NO: 45471 - DNA, 120 bp, Artificial Sequence
  ENSG00000064692_23 (sequence is synthesized)
catcaatagaaaaatgaagaaatcctacagcataaagcacattgctgagccagagtcaaaagaactcttcttgtaaatcactttttaaattttctctcactgatgccctttggaaattat

SEQ ID NO: 45472 - DNA, 120 bp, Artificial Sequence
  ENSG00000064692_24 (sequence is synthesized)
tggaaatttctggactatcctctttggaaagagaaccatgaaaacaatgcctcaccagcagaagaacagaatatcaggatgccttaaatttatagtagtagactgtaaaagattcatttt

SEQ ID NO: 45473 - DNA, 120 bp, Artificial Sequence
  ENSG00000064692_25 (sequence is synthesized)
ggggtgatatctgtatatataacttgtttttttaaaagatgccgtttaaaagcatgattgggaaaatgtatgttttttaagagtagattgattcaccctacccacaggacattcaccaag

SEQ ID NO: 45474 - DNA, 120 bp, Artificial Sequence
  ENSG00000064692_26 (sequence is synthesized)
ccactgataccattttatatttcatcaattgcatgagtatttgctaatgttgattgaacctccctttccccataatgtgggcagatttggctcagctccttcatgagatcaggtcagtgg

SEQ ID NO: 45475 - DNA, 120 bp, Artificial Sequence
  ENSG00000064692_27 (sequence is synthesized)
tattgtttctgtcaagagtgttttttctgtcatttctactttttgtataaaggaaataaaacaatgttaacagccacctataagcttggggcacctactttctaacaaatctgtgatgtt

SEQ ID NO: 45476 - DNA, 120 bp, Artificial Sequence
  ENSG00000064692_28 (sequence is synthesized)
ctgatttctaagggactttgcaagtattttgattgctgatatttgatttcaggaacaaactgctcagtttagcagttttcccataggcgtcaaataaaacattctatatttcattaagta

SEQ ID NO: 45477 - DNA, 120 bp, Artificial Sequence
  ENSG00000064692_29 (sequence is synthesized)
gctcctgccgctgcggtccgtcggtcggtcagtcagtcccttcgcgctcctgagccgccggcgcgccgggcgccccggaaaagagtgcctgagagtgccagaggcttggtggaagggcag

SEQ ID NO: 45478 - DNA, 120 bp, Artificial Sequence
  ENSG00000064692_30 (sequence is synthesized)
acgagagaagaggaggcattgtattggccactgggacaactgcagactcactcttacctgtaaagaagcagttaatgttggggaatgtagtcaggattggaaaaccacggggatttctgc

SEQ ID NO: 45479 - DNA, 120 bp, Artificial Sequence
  ENSG00000064692_31 (sequence is synthesized)
acattataattgagaatgtaaatattcttaaagtggcaccctgaaagagacaagcattgaaaccagacaaaataaattggatcatgaacagaatgagacatcttaaaggagatagcatgt

SEQ ID NO: 45480 - DNA, 120 bp, Artificial Sequence
  ENSG00000064692_32 (sequence is synthesized)
ggaggcctgctgggaagtagaggcaaattccagatgcctaggagccttagtctaaggtggggccatccaacccacagaaataaatatgggcagtggcccaagacttcctataatgagctg

SEQ ID NO: 45481 - DNA, 120 bp, Artificial Sequence
  ENSG00000064692_33 (sequence is synthesized)
cacctgttgtaagtcttgtgttcttgcctatagaataaagaacctcactaccatcctgcaagtgcaaattgaaagattcctgttgtgatgccatgagttattatccgctggttatattct

SEQ ID NO: 45482 - DNA, 120 bp, Artificial Sequence
  ENSG00000064692_34 (sequence is synthesized)
attggaatggctacactcaactggatattgctgtctatattgttggagcacctcaaacaggggtgcaatggttatttgttaatttacttaattaagacatgttcatccacattttatagt

SEQ ID NO: 45483 - DNA, 120 bp, Artificial Sequence
  ENSG00000064692_35 (sequence is synthesized)
ttcatttatttaaagatccatttggtccccagcttcgatgcatgtttctctgcttcatctccccatatttccatgttcctgctgatgtttataccatatcctggcacccagcatcatctg

SEQ ID NO: 45484 - DNA, 120 bp, Artificial Sequence
  ENSG00000064692_36 (sequence is synthesized)
tgtgttgttcaccaaggccgtgggaacagagtctgtaaatcaatagttcatcacggagtacagatttcatgaaaagaaattggattggaagaaagtctcctagtgaacacgctagtatcc

SEQ ID NO: 45485 - DNA, 120 bp, Artificial Sequence
  ENSG00000064692_37 (sequence is synthesized)
aaagagtctggattgtatcagaatccatcacagtaggagagaatgttgttttgagtaatttccaagcagagtacatatattttcctctgaaaatctttgtaaattgaagaaaagtgacat

SEQ ID NO: 45486 - DNA, 120 bp, Artificial Sequence
  ENSG00000064692_38 (sequence is synthesized)
ttttataccaagcaatttgtttgataacctattttcagatttctacaaataataaaatttctgattttaaatattttttacaaatacaagttggttttcttttcattgtaagccttactg

SEQ ID NO: 45487 - DNA, 120 bp, Artificial Sequence
  ENSG00000064692_39 (sequence is synthesized)
tgatttcagaagaatttttaacatttgctaaatggataatctcatttaaacatggaagtaacatcctaatcctttcttggatggactctgtatctattgtaattaagactttaaaaatgg

SEQ ID NO: 45488 - DNA, 120 bp, Artificial Sequence
  ENSG00000064692_40 (sequence is synthesized)
gaataccttgatttggatgaaattgactttagtgatgacatatctgacaataggagtcaagggaacaggctacaaaagcttggattggaggacacagacagggaagatgcaatgggcttt

SEQ ID NO: 45489 - DNA, 120 bp, Artificial Sequence
  ENSG00000064692_41 (sequence is synthesized)
agactcaagattcaagggacttggaatgggagtgagacatgcctttttacacaccactttagctcctatccccctatctcttctgggctgcagtgtcaaggacaagaaggagttcttttt

SEQ ID NO: 45490 - DNA, 120 bp, Artificial Sequence
  ENSG00000064692_42 (sequence is synthesized)
attcctgatcaggttggcgcagcaacaaataaacaggtgttatttcaaaaccaattaccagagaccaaatccagttactagagcccaagcaaatgagaacagaccttggttgaatatgga

SEQ ID NO: 45491 - DNA, 120 bp, Artificial Sequence
  ENSG00000064692_43 (sequence is synthesized)
aatattaaacaaaacattaaaattatgttcactaggagaatgtctgaattaattcaccttttgtatggtcgtagacaataaggaattattgctctatttgtgtttccagaaatccacaca

SEQ ID NO: 45492 - DNA, 120 bp, Artificial Sequence
  ENSG00000064692_44 (sequence is synthesized)
aatgtaggtaggcataaatatccataagagtttctctttcagtgtcccagggtgttgaaagggacttttcctgctcccttatcactgctctaaagccccagtgctgaggacaatagacat

SEQ ID NO: 45493 - DNA, 120 bp, Artificial Sequence
  ENSG00000064692_45 (sequence is synthesized)
taaatttccccatgttctcaaggcaccagagaaaccactaccaggcagacatctgtctctcaagtggcaggctgctcttcccctaactagtaaatttcatcctccaggtatatgaagaat

SEQ ID NO: 45494 - DNA, 120 bp, Artificial Sequence
  ENSG00000064692_46 (sequence is synthesized)
aagatagatttttcaggaatggattagaattctttgtgtagggagttgtaggctagagagagaatgctgtagttccccctttctctgtagtaggactgagcttctcaaatgcattcaaaa

SEQ ID NO: 45495 - DNA, 69 bp, Artificial Sequence
  ENSG00000064692_47 (sequence is synthesized)
aaaaagagcgaaaggtaaagaaagagcaggttcgtggacaggagccggcgggcaggccgggggatccct

SEQ ID NO: 45496 - DNA, 120 bp, Artificial Sequence
  ENSG00000064692_48 (sequence is synthesized)
agtcgaggtaaaaagagcgaaaggtaaagaaagagcaggttcgtggacaggagccggcgggcaggccgggggatccctggaatttataagtatttgaccgtactcaaaatgtgcaaggaa

SEQ ID NO: 45497 - DNA, 120 bp, Artificial Sequence
  ENSG00000064692_49 (sequence is synthesized)
gagcacagaacattccaggcaggcaaagccacccttgccctcctctccttggccacgtcctcaggggtgggcgagcttcggggggaggggtgggggtgaagactccgtgccaacgcaaaa

SEQ ID NO: 45498 - DNA, 120 bp, Artificial Sequence
  ENSG00000064692_50 (sequence is synthesized)
tactctgccaaaaggcttctcagacatgagtttcccagggcaatgcccaccttccgttccccgccttcccgagtctcttctcccagtttatgctggaaccctggaatggtctggggacca

SEQ ID NO: 45499 - DNA, 120 bp, Artificial Sequence
  ENSG00000064692_51 (sequence is synthesized)
gcctacttcggctgaggctgttctgctcctgccgctgcggtccgtcggtcggtcagtcagtcccttcgcgctcctgagccgccggcgcgccgggcgccccggagacagggtttcaccatg

SEQ ID NO: 45500 - DNA, 120 bp, Artificial Sequence
  ENSG00000064692_52 (sequence is synthesized)
attgttcttttcatttgcccgcctcatgtggttcttattcttgctgtcacccgggatcttatcgcaggcagggatgggcagttccgcggctcggaaaagctgagataaggaggggcgaag

SEQ ID NO: 45501 - DNA, 120 bp, Artificial Sequence
  ENSG00000064692_53 (sequence is synthesized)
taatagtaatagcgacagtactaacaacggtaataatagctgtagaaaagggacgtctggtgttgctgccgcccctcgctcatcagcaccagctccccgactgccctgtccagcccgggc

SEQ ID NO: 45502 - DNA, 120 bp, Artificial Sequence
  ENSG00000064692_54 (sequence is synthesized)
aaagtgggaagcgcggacaaaaagtaggcggggaggagaggagagccccagctggggaaaagcaacggcagtcgaggtaaaaagagcgaaaggaatttataagtatttgaccgtactcaa

SEQ ID NO: 45503 - DNA, 120 bp, Artificial Sequence
  ENSG00000064692_55 (sequence is synthesized)
ttacgcaggttgctatggccagtcagagattcaaggattttcaattcacatctgaatgagaattttctcttgctacggaaaagattcttctgtggcttcttcagtttatgcaagaacagg

SEQ ID NO: 45504 - DNA, 120 bp, Artificial Sequence
  ENSG00000064692_56 (sequence is synthesized)
gaccaaatccagttactagagcccaagcaaatgagaacaggtaagattccagtctccccctcttacaggcatctctgactatgagtgattctcttggagcccaaccatgacaagagacag

SEQ ID NO: 45505 - DNA, 120 bp, Artificial Sequence
  ENSG00000064692_57 (sequence is synthesized)
aactccccaccacaaagactgcactgcatatctcataaaggagagcacactatggacagcctcctcctctccttcccagccccctccttatgtgggctgcagatgagcattgatagtagt

SEQ ID NO: 45506 - DNA, 120 bp, Artificial Sequence
  ENSG00000064692_58 (sequence is synthesized)
aggactggctctgctacatcatcatagactctgaagggaggtgtgtgatattgactgctgaaaggtccctagaggctctcttcatactattcaacattctgttacagtcattaaaaaata

SEQ ID NO: 45507 - DNA, 120 bp, Artificial Sequence
  ENSG00000064703_0 (sequence is synthesized)
gcgagatctgacggcgcggctaccatggcggcggcatttgaagcctcgggagccttagcagcagtggcgactgctatgccggctgagcatgtggccgtgcaggtcccggccccagagcca

SEQ ID NO: 45508 - DNA, 120 bp, Artificial Sequence
  ENSG00000064703_1 (sequence is synthesized)
acacccgggcctgtgaggatcctgcggaccgctcaggatctcagcagcccgcggacccgcacgggggatgtgctgttggcggagccggccgacttcgagtcactgctgctttcgcggccg

SEQ ID NO: 45509 - DNA, 120 bp, Artificial Sequence
  ENSG00000064703_2 (sequence is synthesized)
gtgctggaggggctgcgggcggccggcttcgagaggccctcgccggtgcagctcaaggccatcccgttggggcgctgcgggctcgatttaattgttcaagctaaatctggcaccgggaaa

SEQ ID NO: 45510 - DNA, 120 bp, Artificial Sequence
  ENSG00000064703_3 (sequence is synthesized)
acctgtgtgttctccaccatagctttggactctcttgttcttgaaaacttaagtacccagattttgatcttggctcctacaagagaaattgctgtacagatacattctgttattacagcc

SEQ ID NO: 45511 - DNA, 120 bp, Artificial Sequence
  ENSG00000064703_4 (sequence is synthesized)
attggaataaaaatggaaggcttagagtgtcatgtctttattggagggaccccattatcacaagacaaaaccagacttaaaaagtgtcatattgctgttggatctcctggcagaattaag

SEQ ID NO: 45512 - DNA, 120 bp, Artificial Sequence
  ENSG00000064703_5 (sequence is synthesized)
caactcatagaacttgactacttgaacccaggcagtatacgcctctttattcttgatgaagcagataagcttttagaagaaggcagcttccaggagcaaataaattggatttattcttcc

SEQ ID NO: 45513 - DNA, 120 bp, Artificial Sequence
  ENSG00000064703_6 (sequence is synthesized)
ttgcctgccagtaaacagatgctggcagtatcagctacttatcccgaatttttggctaatgctttgacaaagtacatgagagatcccacttttgtaagactgaattccagtgatccaagt

SEQ ID NO: 45514 - DNA, 120 bp, Artificial Sequence
  ENSG00000064703_7 (sequence is synthesized)
ctcataggtttgaagcagtattacaaagttgtcaattcataccctttggcacataaggtttttgaggaaaagactcagcatttacaggaactgttcagcagaattccatttaatcaagct

SEQ ID NO: 45515 - DNA, 120 bp, Artificial Sequence
  ENSG00000064703_8 (sequence is synthesized)
ttagtcttttctaatttgcacagcagagcacaacatttggctgatatcctttcttctaaaggctttcctgctgagtgcatttcaggcaatatgaatcagaatcagcgtcttgatgctatg

SEQ ID NO: 45516 - DNA, 120 bp, Artificial Sequence
  ENSG00000064703_9 (sequence is synthesized)
gctaaactgaagcactttcattgcagagtcctcatttccacagatttgacttctcgtgggattgatgctgagaaggtgaatctggttgtaaatctggatgtaccattggattgggagaca

SEQ ID NO: 45517 - DNA, 120 bp, Artificial Sequence
  ENSG00000064703_10 (sequence is synthesized)
tacatgcatcggattgggagagctggccgttttggtacattggggctgacagtgacctactgttgccggggagaggaagaaaatatgatgatgagaattgcccagaaatgtaatatcaac

SEQ ID NO: 45518 - DNA, 120 bp, Artificial Sequence
  ENSG00000064703_11 (sequence is synthesized)
cttctccctttaccagatcccattccttctggtctgatggaagaatgtgtggattgggatgtggaagttaaagctgctgtgcatacatatggtatagcaagtgtacctaaccaaccctta

SEQ ID NO: 45519 - DNA, 120 bp, Artificial Sequence
  ENSG00000064703_12 (sequence is synthesized)
aaaaagcaaattcagaaaatagagagaacccttcaaattcagaaagctcatggtgaccacatggcttcctctagaaataattctgtatctggactatcagtcaaatcaaaaaataatacc

SEQ ID NO: 45520 - DNA, 120 bp, Artificial Sequence
  ENSG00000064703_13 (sequence is synthesized)
aaacaaaagcttcctgtgaaaagccactcagaatgtggaatcatagaaaaagcaacgtcaccaaaagaactgggctgtgacaggcaatccgaagagcaaatgaagaattctgttcagact

SEQ ID NO: 45521 - DNA, 120 bp, Artificial Sequence
  ENSG00000064703_14 (sequence is synthesized)
cccgttgaaaactccaccaacagtcagcaccaggtcaaagaagctttacctgtgtcactcccccagattccttgtctgtcttcctttaaaatccatcagccatacacgttgacttttgct

SEQ ID NO: 45522 - DNA, 120 bp, Artificial Sequence
  ENSG00000064703_15 (sequence is synthesized)
gaattggtagaggattatgaacattatattaaagaggggttagagaaacctgtggaaatcatcaggcactacacaggccctggggatcagactgtgaatcctcaaaatggttttgtgaga

SEQ ID NO: 45523 - DNA, 120 bp, Artificial Sequence
  ENSG00000064703_16 (sequence is synthesized)
aataaagttattgaacagagagtccctgtgttggcaagtagtagccaatctggagactctgagagtgacagtgattcttacagctcaagaacctcttcccagagcaaaggaaataagtca

SEQ ID NO: 45524 - DNA, 120 bp, Artificial Sequence
  ENSG00000064703_17 (sequence is synthesized)
tacttggaaggctcttctgataatcagctgaaagactctgaatctacgcctgtggatgatcgtatttctttggaacaaccaccaaatggaagtgacacccccaatccagagaaatatcaa

SEQ ID NO: 45525 - DNA, 120 bp, Artificial Sequence
  ENSG00000064703_18 (sequence is synthesized)
gaatcacctggaatccagatgaagacaagacttaaagagggggctagccagagagctaagcagagccggagaaacctacccaggcggtcttccttcagattgcagactgaagcccaggaa

SEQ ID NO: 45526 - DNA, 120 bp, Artificial Sequence
  ENSG00000064703_19 (sequence is synthesized)
gatgattggtatgactgtcatagggaaatacgtctgagtttttctgatacctatcaggattatgaggagtactggagagcttactacagggcatggcaagaatattatgctgccgcttct

SEQ ID NO: 45527 - DNA, 120 bp, Artificial Sequence
  ENSG00000064703_20 (sequence is synthesized)
cattcatattattggaatgctcagagacatccaagttggatggcagcttatcacatgaataccatttatctacaagaaatgatgcatagtaaccagtgattataggatatacctgagacc

SEQ ID NO: 45528 - DNA, 120 bp, Artificial Sequence
  ENSG00000064703_21 (sequence is synthesized)
atcaggaactgtcaacaaatgatacctttggatatccatcctcctcgacttatagtacagtggtgtatagtggcatttctgataaacttgaaaagacttgagtctttccactgggacaca

SEQ ID NO: 45529 - DNA, 120 bp, Artificial Sequence
  ENSG00000064703_22 (sequence is synthesized)
tccatttttcagattgttttgatttaggccaggtatattatcttcatttttaagagtttctttaagaaacttcatcagattgttgaaagataatttttgggacatagagctgaaagtttc

SEQ ID NO: 45530 - DNA, 120 bp, Artificial Sequence
  ENSG00000064703_23 (sequence is synthesized)
agggtgccattttctataagatcttcccaaaagaaacatttaaaaagatgacatataccaccacttacttaaaaacaataaaagcaatagatttgattagtaatattattgctgtggagt

SEQ ID NO: 45531 - DNA, 120 bp, Artificial Sequence
  ENSG00000064703_24 (sequence is synthesized)
tctttacaaagggcttaggctgcatttccttctatagaggtgcattcttgtagaaatttgtagcatggtagatcagaaaatcctcttaggttttaggcaggaaggaatatttaaacattg

SEQ ID NO: 45532 - DNA, 120 bp, Artificial Sequence
  ENSG00000064703_25 (sequence is synthesized)
ctttagattttcctaaaggtatttgatttgatctgttagcttccagtaaaaatatttgtttttagtaaaaacaaatttaaatatatttacatgtttgttgtttatcttttgaatgtcttt

SEQ ID NO: 45533 - DNA, 120 bp, Artificial Sequence
  ENSG00000064703_26 (sequence is synthesized)
tgaggctgtgaaagctgtccacatttttgctgtgtattaaatagctgtgggtcatcagttgctgtcttacttgtgttgctcagatagaggagcagctcttaatcttttttggttcttgga

SEQ ID NO: 45534 - DNA, 120 bp, Artificial Sequence
  ENSG00000064703_27 (sequence is synthesized)
tccttttatgaatcagctgatagctatagattgacttcaggaaatttctcattccataagcacagaattgtgagtgtaatttcaaggggttcatagaccctctgaagttcatctatacag

SEQ ID NO: 45535 - DNA, 120 bp, Artificial Sequence
  ENSG00000064703_28 (sequence is synthesized)
tccagattaacaagtgacctgctctgctggtaggctaggggaagttctagctcttagttttaagtattttgtggaagctggaattgattctcttcagacacttcttagtacatcctaatt

SEQ ID NO: 45536 - DNA, 120 bp, Artificial Sequence
  ENSG00000064703_29 (sequence is synthesized)
ttgtgtcttctagaaaattttccccagtttttacctctaatgttaggatccaagaggagcttggatctgagctgatgcatctgtaaattacgatttagaaaaatataattggaaattaca

SEQ ID NO: 45537 - DNA, 120 bp, Artificial Sequence
  ENSG00000064703_30 (sequence is synthesized)
tttgcacagcaggtaatgtaacttaaaaggtcatctggggaacttgtgaaataaaaggatagtcatggggcaatatttgtaaatttgtaaccatttatgttatatttcatagagcacaac

SEQ ID NO: 45538 - DNA, 120 bp, Artificial Sequence
  ENSG00000064703_31 (sequence is synthesized)
atttggctgatatcctttcttctaaaggctttcctgctgagtgcatttcaggtaagttcatctcttactttaatctttatttagtatactgacttgaagcctccaaagtcaggaggaaaa

SEQ ID NO: 45539 - DNA, 120 bp, Artificial Sequence
  ENSG00000064703_32 (sequence is synthesized)
aataccactttatgagttgtcttgagagtgtgaaattatcttgtatcttttagagtaaaggaattttcaggcttatttttcattggaatttgatatgtcaatattctatttttaaggagt

SEQ ID NO: 45540 - DNA, 120 bp, Artificial Sequence
  ENSG00000064703_33 (sequence is synthesized)
aacttggtatatagtaaaaagttagaaaactagtgttcagaaagacaattttattagaatctctcttatagccacatataacttaattctataaaaccaagtttgtctgtattgtgttaa

SEQ ID NO: 45541 - DNA, 120 bp, Artificial Sequence
  ENSG00000064703_34 (sequence is synthesized)
gataaaaatattttttctttagaatttttttttttaataattgttaaaatgctggagattgctaactgaattgactgttttatggttttgtggaaggcaaaagtgattgagttcttgctg

SEQ ID NO: 45542 - DNA, 120 bp, Artificial Sequence
  ENSG00000064703_35 (sequence is synthesized)
caaagttaaatgattactgctggcataataagaatgaaagagtcgaaggattttttgatcagtgagatcctttttagagttttgtttggtgtcagcttaatttttaacctgttggcatga

SEQ ID NO: 45543 - DNA, 120 bp, Artificial Sequence
  ENSG00000064703_36 (sequence is synthesized)
gcttgtttagttatggtatatcacgagatactggggagactattttctaatgaaccaatacttaaactatagatcacactttaacaccaaattataaacagctgattaaagcatttttat

SEQ ID NO: 45544 - DNA, 120 bp, Artificial Sequence
  ENSG00000064703_37 (sequence is synthesized)
tttcctaagaattgctagttatacttcatatgtaactttgcaaatagaatgttatatattcaggcatggcctgatcactatttaggattgatttttgaatttcaagttgattgcctaaac

SEQ ID NO: 45545 - DNA, 120 bp, Artificial Sequence
  ENSG00000064703_38 (sequence is synthesized)
catagtttaaaagattttaactttggatcttaacctagatttgcacagaaggacagaattaactgtggttggtgtattaaaagtgttaagactgggtgttatgctttttactttttgtgg

SEQ ID NO: 45546 - DNA, 120 bp, Artificial Sequence
  ENSG00000064703_39 (sequence is synthesized)
attggataaatatgtattagcttagttgtttttatgtgactttcttttggggtccttttaggcaatatgaatcagaatcagcgtcttgatgctatggctaaactgaagcactttcattgc

SEQ ID NO: 45547 - DNA, 120 bp, Artificial Sequence
  ENSG00000064703_40 (sequence is synthesized)
agagtcctcatttccacagatttggtaaatttcctattcagtttgggtgactaatccatcttgacatatgttctattatcagatgtacagatttcatatattattttatgtaggcgtatc

SEQ ID NO: 45548 - DNA, 120 bp, Artificial Sequence
  ENSG00000064703_41 (sequence is synthesized)
taacaagaataccagaagataattatctttccagtgctgaggaaaatactttcttaaaaatgtctttaatatgtttatctttgtccttgaaattagtcattaggaatgaatttccttttc

SEQ ID NO: 45549 - DNA, 120 bp, Artificial Sequence
  ENSG00000064703_42 (sequence is synthesized)
ctctgctcctcagtattcagttcttaatttgtctcttgactgtactggaagaatataatatgcattggtatccatgctgtatagttaatgcaaacaaataattgctatcttcttcaattc

SEQ ID NO: 45550 - DNA, 120 bp, Artificial Sequence
  ENSG00000064703_43 (sequence is synthesized)
agtgctttctttaaggggagggatctataatgtgacaggtgggctttgaatattatttttgtgaaaatgatttactacctaacattctctctgcttttaggtacattggggctgacagtg

SEQ ID NO: 45551 - DNA, 120 bp, Artificial Sequence
  ENSG00000064703_44 (sequence is synthesized)
cttgggagctgttagtccagttccaggttccaattcaacgtacttttatcagagctcactgtgcgccagggacttgctaggagataaatggggtttatctcaccggagataaatgtggtt

SEQ ID NO: 45552 - DNA, 120 bp, Artificial Sequence
  ENSG00000064726_0 (sequence is synthesized)
gcctttcccggaaggcagggaggcagcgccggcctccggaggcggcctgggcgatggcggcggagttttgtccataacgtgggcaaccgcgcagctggaggatggcctcactcgggcctg

SEQ ID NO: 45553 - DNA, 120 bp, Artificial Sequence
  ENSG00000064726_1 (sequence is synthesized)
gggctgaggcggagccgggccccgcggggccgccgccgccgccctcaccgtcctctctggggcccctgctccccctgcagcgggaacctctctacaactggcaggcgaccaaggcgtcgc

SEQ ID NO: 45554 - DNA, 120 bp, Artificial Sequence
  ENSG00000064726_2 (sequence is synthesized)
actggcaggcgaccaaggcgtcgctgaaggagcgcttcgccttcctcttcaactcggagctgctgagcgatgtgcgcttcgtactgggcaagggtcgcggcgccgccgccgctgggggcc

SEQ ID NO: 45555 - DNA, 120 bp, Artificial Sequence
  ENSG00000064726_3 (sequence is synthesized)
cgcagcgcatccccgcccaccgcttcgtgctggcggccggcagcgccgtctttgacgccatgttcaacggcggcatggccaccacgtcggccgagatcgagctgccggacgtggagcccg

SEQ ID NO: 45556 - DNA, 120 bp, Artificial Sequence
  ENSG00000064726_4 (sequence is synthesized)
cagccttcctggcgctgctgagatttctatattcagatgaagttcaaattggtccagaaacagttatgaccactctttatactgccaagaaatacgcagtcccagccttggaagcacact

SEQ ID NO: 45557 - DNA, 120 bp, Artificial Sequence
  ENSG00000064726_5 (sequence is synthesized)
gtgtagaatttctcaccaaacatcttagggcagataatgcctttatgttacttactcaggctcgattatttgatgaacctcagcttgctagtctttgtctagatacaatagacaaaagca

SEQ ID NO: 45558 - DNA, 120 bp, Artificial Sequence
  ENSG00000064726_6 (sequence is synthesized)
caatggatgcaataagtgcagaagggtttactgatattgatatagatacactctgtgcagttttagagagagacacactcagtattcgagaaagtcgactttttggagctgttgtacgct

SEQ ID NO: 45559 - DNA, 120 bp, Artificial Sequence
  ENSG00000064726_7 (sequence is synthesized)
gggcagaagcagaatgtcagagacaacaattacctgtgacttttgggaataaacaaaaagttctaggaaaagcactttccttaatccggttcccactgatgacaattgaggaatttgcag

SEQ ID NO: 45560 - DNA, 120 bp, Artificial Sequence
  ENSG00000064726_8 (sequence is synthesized)
caggtcctgctcaatctggaattttgtcagatcgtgaagtggtaaacctctttcttcattttactgtcaaccctaaaccccgagttgaatacattgaccgaccaagatgctgtctcaggg

SEQ ID NO: 45561 - DNA, 120 bp, Artificial Sequence
  ENSG00000064726_9 (sequence is synthesized)
gaaaggaatgctgcatcaatagattccagcaagtagaaagccgctggggttacagtgggacgagtgatcgaatcagattcacagttaatagaaggatctctatagttggatttggcttgt

SEQ ID NO: 45562 - DNA, 120 bp, Artificial Sequence
  ENSG00000064726_10 (sequence is synthesized)
atggatctattcatggccctacagattatcaagtgaatatacagatcattgaatatgagaaaaagcaaaccctgggacagaatgataccggctttagttgtgatgggacagctaacacat

SEQ ID NO: 45563 - DNA, 120 bp, Artificial Sequence
  ENSG00000064726_11 (sequence is synthesized)
tcagggtcatgttcaaggaacccatagagatcctgcccaatgtgtgctacacagcatgtgcaacactcaaaggtccagattcccactatggcacaaaaggattgaagaaagtagtgcatg

SEQ ID NO: 45564 - DNA, 120 bp, Artificial Sequence
  ENSG00000064726_12 (sequence is synthesized)
agacacctgctgcaagcaagactgtttttttcttttttagttcccctggcaataataatggcacttcaatagaagatggacaaattccagaaatcatattttatacataatttagcatta

SEQ ID NO: 45565 - DNA, 120 bp, Artificial Sequence
  ENSG00000064726_13 (sequence is synthesized)
tgttatgaatatttaaaattgtaagataagaaacagtttcttagagcagatagaaaaatgcttatttaaatctttgcatgatttaaaaacagattttccattttcttacaactttaagag

SEQ ID NO: 45566 - DNA, 120 bp, Artificial Sequence
  ENSG00000064726_14 (sequence is synthesized)
aaaagaactgggtttaatggtttaaaaaaaagcacagctttttcaccttcatcttgtataatttcatagattggctgacttagggtctttcaatagtttgggaattgaaagattcttgtt

SEQ ID NO: 45567 - DNA, 120 bp, Artificial Sequence
  ENSG00000064726_15 (sequence is synthesized)
atatatagctagtttgggtttgtttttgttttaactattttgaaggttaggtgagatgggcaaataggcttaactattttgaaggttggatgaaaagagatgggtcagtattcctacaga

SEQ ID NO: 45568 - DNA, 120 bp, Artificial Sequence
  ENSG00000064726_16 (sequence is synthesized)
attcttattaactcaaataactaaatttcagaaaattaagaagctgactttatatttggtggtttgaagtatcttgttgttagcatttgtaataatgctaaaaaaggcctaataaaatgc

SEQ ID NO: 45569 - DNA, 120 bp, Artificial Sequence
  ENSG00000064726_17 (sequence is synthesized)
ccaagaaaatattcagtgcatttatagagaaggatattttgtagtagtatagtaatgtgttatgtagtacagttttaaagctataaatggaattttgtgtaaattcacaaaaatgtgata

SEQ ID NO: 45570 - DNA, 120 bp, Artificial Sequence
  ENSG00000064726_18 (sequence is synthesized)
taaacaggatctaagactggattccctgtcactaaactgcaccactatacctgtctctctgtgtgggggacactgctgatgattcccaagattgagatgatgacggtgatgacgactggg

SEQ ID NO: 45571 - DNA, 120 bp, Artificial Sequence
  ENSG00000064726_19 (sequence is synthesized)
tgaacagccatcacttcaacattgtgataatccttcacagcaagaaaccgaataaaatactaacatttctaacaactgctctgacattgtaaagagatccaacagaatcactcctgctga

SEQ ID NO: 45572 - DNA, 120 bp, Artificial Sequence
  ENSG00000064726_20 (sequence is synthesized)
aaaatacgctttctgccacctacacatttctatttaggaagtaaaatttgcttcatggtcatgaccccattagtcagtgttacagctgtgttggggataggaagtatatctggcagattg

SEQ ID NO: 45573 - DNA, 120 bp, Artificial Sequence
  ENSG00000064726_21 (sequence is synthesized)
atatttatacacttttttataaagcagattttaaaatatagtaacatccatttttttcccttgaaagtgattctcttataaaaaatgaaagtggagtttaaggtatatcaaatcgttgtg

SEQ ID NO: 45574 - DNA, 120 bp, Artificial Sequence
  ENSG00000064726_22 (sequence is synthesized)
tcgttgtggaaggtgattaaaaatcaaaattcttttaaatatcaacttaattttttctaagtaagatacaaaaaattttcatctaaagtaatatttcactttatattgtaaagaaggtag

SEQ ID NO: 45575 - DNA, 120 bp, Artificial Sequence
  ENSG00000064726_23 (sequence is synthesized)
gtggctgaggtctcttgaaattgctaaagggaaatttttctatggtaatgctcttacggatataaacctcagttaaatggaattatctatgggatgtgtggttctggttaactaaaaatt

SEQ ID NO: 45576 - DNA, 120 bp, Artificial Sequence
  ENSG00000064726_24 (sequence is synthesized)
aaccagtaaacactctgtagtaaccattacagaaaatacttctgccttaaaaaatatgatatgccagagatgagttagtgtttcttgacgttggagaccttttaaatgcctcatctgttg

SEQ ID NO: 45577 - DNA, 120 bp, Artificial Sequence
  ENSG00000064726_25 (sequence is synthesized)
tactgaacaattgaaactgcatgcagccataaaagggacaagaaacagaactgtttactaactttgggacatcccctggagtttttaaaaataaataaatatatatatatataaaaaaaa

SEQ ID NO: 45578 - DNA, 87 bp, Artificial Sequence
  ENSG00000064726_26 (sequence is synthesized)
ggggaaaggaatgctgcatcaatagattccagcaagtagaaagccgctggggttacagtgggacgagtgatcgaatcagatggaggg

SEQ ID NO: 45579 - DNA, 61 bp, Artificial Sequence
  ENSG00000064726_27 (sequence is synthesized)
ctgtaaggcatgcatcaccacgcccagctaatctttttggatttttagtagagacggggtt

SEQ ID NO: 45580 - DNA, 90 bp, Artificial Sequence
  ENSG00000064726_28 (sequence is synthesized)
tccaaagtgctggggttacaggggtgagccaccacgcccagctgttacatgatttttgtttggatcaccactgccagtgggctgagttct

SEQ ID NO: 45581 - DNA, 120 bp, Artificial Sequence
  ENSG00000064726_29 (sequence is synthesized)
tttttgttgcatttgcttttgggttcttagtcatgaattctttacctaagccaatgtcttgaagagtttttttgatgctatcttctagaatttttatggtttcttagatttaagtctttg

SEQ ID NO: 45582 - DNA, 120 bp, Artificial Sequence
  ENSG00000064726_30 (sequence is synthesized)
tgagttgatttttgtataaggtgagaaaggaggattcctggcatccatgaggaatagcatttattcctggatctaagttttgactaattaatgcttttaacattttaattaatgtgttta

SEQ ID NO: 45583 - DNA, 120 bp, Artificial Sequence
  ENSG00000064726_31 (sequence is synthesized)
ttaaaatatatgcaaaaattatatatgctaagatttttttcccctatttttatgttacgtcctctagatttgaatttacgttaagtgaattccaaagttaggaattgaaatcaaattcct

SEQ ID NO: 45584 - DNA, 120 bp, Artificial Sequence
  ENSG00000064726_32 (sequence is synthesized)
gaaatacgcagtcccagccttggaagcacactgtgtagaatttctcaccaaacatcttagggcagataatgcctttatgttacttactcagatacactctgtgcagttttagagagagac

SEQ ID NO: 45585 - DNA, 120 bp, Artificial Sequence
  ENSG00000064763_0 (sequence is synthesized)
cacagagcctttcaattcagcttggggtgagctgcacttcaggcatggggatataatagtgtgatgaaccattcttctgaaggttcttctgaaaagctgctggtcttgggatactgtgag

SEQ ID NO: 45586 - DNA, 120 bp, Artificial Sequence
  ENSG00000064763_1 (sequence is synthesized)
agcccctctcattgctctttagaagtaatttaaatttttctgctacattgtctgctcagctcgtattctggtcatagaggaacctgaagccagagaaactagacaaaaaggaacctcttt

SEQ ID NO: 45587 - DNA, 120 bp, Artificial Sequence
  ENSG00000064763_2 (sequence is synthesized)
caggagctataaaagaaagggaggaatcatgtccacaattgcagctttctatggcggcaagtccattctcatcacgggggccacaggctttctgggcaaagtgctgatggagaagctgtt

SEQ ID NO: 45588 - DNA, 120 bp, Artificial Sequence
  ENSG00000064763_3 (sequence is synthesized)
tcgcaccagcccagacctgaaagtcatttacatccttgtgaggcccaaggctggccagacactgcagcagagggttttccagatcctagacagtaagctatttgagaaagtcaaagaagt

SEQ ID NO: 45589 - DNA, 120 bp, Artificial Sequence
  ENSG00000064763_4 (sequence is synthesized)
ttgtccaaatgtgcatgagaagatcagagctatttatgcagatctcaatcagaatgactttgccatcagcaaagaggacatgcaggagcttctctcctgtacaaacataatatttcactg

SEQ ID NO: 45590 - DNA, 120 bp, Artificial Sequence
  ENSG00000064763_5 (sequence is synthesized)
tgcagccactgtacgctttgacgacactctcagacatgctgtgcaacttaacgtcactgccacccggcagctcttgcttatggctagtcagatgccaaagctggaagcctttatacatat

SEQ ID NO: 45591 - DNA, 120 bp, Artificial Sequence
  ENSG00000064763_6 (sequence is synthesized)
ctctactgcctattcaaattgtaacctgaagcacatcgatgaagttatctatccgtgccctgtggagccaaaaaaaatcattgattcccttgagtggttagacgatgctattattgacga

SEQ ID NO: 45592 - DNA, 120 bp, Artificial Sequence
  ENSG00000064763_7 (sequence is synthesized)
gattacacccaagctgatcagagattggcccaatatttatacctacaccaaggccttgggagaaatggtggtgcagcaagagagcaggaacctgaacattgccatcataaggccctccat

SEQ ID NO: 45593 - DNA, 120 bp, Artificial Sequence
  ENSG00000064763_8 (sequence is synthesized)
cctaatggaatcattattgcgactgggaaagggtttcttcgggccataaaagctactccaatggctgtggcagacgtaattccagttgatacagtcgtcaatctcatgctagctgtagga

SEQ ID NO: 45594 - DNA, 120 bp, Artificial Sequence
  ENSG00000064763_9 (sequence is synthesized)
tggtatactgcagttcacagacctaagtcaacattagtctaccacattacatctggtaacatgaatccctgcaattggcacaaaatgggagtccaagtcttggcaacctttgaaaaaatc

SEQ ID NO: 45595 - DNA, 120 bp, Artificial Sequence
  ENSG00000064763_10 (sequence is synthesized)
ccatttgagagacctttcaggaggccaaatgctaattttaccagcaacagcttcacatcacagtactggaatgcggtcagccaccgggcccctgccattatctatgactgctatctgcgg

SEQ ID NO: 45596 - DNA, 120 bp, Artificial Sequence
  ENSG00000064763_11 (sequence is synthesized)
ctcactggaaggaagcccaggatgacaaagctcatgaatcggcttttaagaactgtttccatgttggagtatttcatcaaccggagttgggaatggagcacgtacaatacagaaatgctg

SEQ ID NO: 45597 - DNA, 120 bp, Artificial Sequence
  ENSG00000064763_12 (sequence is synthesized)
atgtctgagctgagtcctgaagaccagagagtattcaactttgacgtgcgccagttgaactggttggaatacattgaaaattatgttttgggagttaaaaaatacttattgaaagaggat

SEQ ID NO: 45598 - DNA, 120 bp, Artificial Sequence
  ENSG00000064763_13 (sequence is synthesized)
atggctgggatcccaaaagcaaagcaacgcttaaaaaggctccgaaatattcactacctctttaatactgccctcttccttatcgcctggcgccttctcattgcaagatctcagatggct

SEQ ID NO: 45599 - DNA, 120 bp, Artificial Sequence
  ENSG00000064763_14 (sequence is synthesized)
cggaatgtctggttcttcattgtaagcttctgttataaattcctctcctactttagagcatccagcacgctcaaagtttaagagcatttagccatcgctttttatctggaacctctcaga

SEQ ID NO: 45600 - DNA, 120 bp, Artificial Sequence
  ENSG00000064763_15 (sequence is synthesized)
tacctctaaaacagcaaactgtgattctcaagattagaaagtaacaaggaatatgcccaaactgtcaaatgtcacctgttatgtattcgtccctattccttaactatgtatttttatttc

SEQ ID NO: 45601 - DNA, 120 bp, Artificial Sequence
  ENSG00000064763_16 (sequence is synthesized)
agtgagagaaggaaagttgtaaactagcccatagtcacctatattttagggaaaaaaatccaaattgtttcctaacattctattttatgcccttgcgtattaaacgtgaaagtactccca

SEQ ID NO: 45602 - DNA, 120 bp, Artificial Sequence
  ENSG00000064763_17 (sequence is synthesized)
agagtgtcacgtttgggagccgaaagactggagccgtttccttgtggctggagcgcttcccgtagcctcggggaaggagcaggatttagaggaccactagttggaccccatcctcgtgct

SEQ ID NO: 45603 - DNA, 120 bp, Artificial Sequence
  ENSG00000064763_18 (sequence is synthesized)
aaccttggaaccattctgggtacccaaaagaaaaatttaaaatcaagatgagtaaaaggagaatggtctcaatatcctcaaaaatgcagtaagagaagtaattccccactgaaaatgtct

SEQ ID NO: 45604 - DNA, 120 bp, Artificial Sequence
  ENSG00000064763_19 (sequence is synthesized)
ctctttctttctatgttataccctggagtcctggttgaggggtgggggaatcagaaaagtaggtttacatttaacatttttcttaactacattcacttcttaaaaaggaacaagaagtgt

SEQ ID NO: 45605 - DNA, 120 bp, Artificial Sequence
  ENSG00000064763_20 (sequence is synthesized)
aaataagtatgtatagagtgagggattaagcatatttgcattggggactcgtgtattatgcttttaagtcaaaattaatattctcaaattcgaatttgatagctattatttctaaatctt

SEQ ID NO: 45606 - DNA, 120 bp, Artificial Sequence
  ENSG00000064763_21 (sequence is synthesized)
tttaatcctcaattttcctggtaaccttctttcaagagtctccttcttctaaaagttgccaaaccctttatatttaagctttttccactcaggactcaattagagtggtcaacagggaga

SEQ ID NO: 45607 - DNA, 120 bp, Artificial Sequence
  ENSG00000064763_22 (sequence is synthesized)
gggatggtcccatttgatctttgccactgagcaaaacaaaacttcaaatgaacttttaaactgtagctttagtcttctggtataaagtggggaagattacacttatgtgatcaccaaagg

SEQ ID NO: 45608 - DNA, 120 bp, Artificial Sequence
  ENSG00000064763_23 (sequence is synthesized)
atttactagtatcttggtcattccaattgcacaatgttaactgtacaacacacagcagaaaagtgaatagacttcactaagggattctaagtttagaaaataggttttgttttcttaaaa

SEQ ID NO: 45609 - DNA, 120 bp, Artificial Sequence
  ENSG00000064763_24 (sequence is synthesized)
aattttgtgtataatacaaactaatgaaaactatacatattctccaattcctatagtaataataatgtaactgttacaccaactttcctcatatttgagagatgagtacatgttggattg

SEQ ID NO: 45610 - DNA, 120 bp, Artificial Sequence
  ENSG00000064763_25 (sequence is synthesized)
cagcatttcttcatgttaaaaacatggaatattattcaaatatagtacttggggcctaaacaactaaaattagtcaccgcataactagttgaaaatggcataggcataaaatgttaataa

SEQ ID NO: 45611 - DNA, 120 bp, Artificial Sequence
  ENSG00000064763_26 (sequence is synthesized)
agaatggcagttatatttatgctcacttcctggagtaattgggtaatattcagaaaggcacatcgtggtagtttaagtgtacaaggccttagggcagtatctagcccagtattattccag

SEQ ID NO: 45612 - DNA, 120 bp, Artificial Sequence
  ENSG00000064763_27 (sequence is synthesized)
attctcctgagctctatataaagggcattttggaggaactcttctgggcaatatctttcccaatctcatctaaattctgggaaatattttccatagcagacaacccagctctgaaactaa

SEQ ID NO: 45613 - DNA, 120 bp, Artificial Sequence
  ENSG00000064763_28 (sequence is synthesized)
gcacctggtgatctttagtttgagatgtctatatggtacttttgagttatatcaattaagatacaagctatagacatgataaaaatatgaaatcaagatatagctcagtgggattggatt

SEQ ID NO: 45614 - DNA, 120 bp, Artificial Sequence
  ENSG00000064763_29 (sequence is synthesized)
attggattaagacataataatagttctaagaattcacttttgattgtatgttttaccaattcaataattccactaatcaagtattcacattttgacttttgattaaataaaaatttgaat

SEQ ID NO: 45615 - DNA, 90 bp, Artificial Sequence
  ENSG00000064763_30 (sequence is synthesized)
gcccaaccatctgggaagtgtggagcgcctctgcccagctgcccactgtctgggatgtgaggagtgcctctgcccagctgccgccccatc

SEQ ID NO: 45616 - DNA, 120 bp, Artificial Sequence
  ENSG00000064763_31 (sequence is synthesized)
cgccccatctggcaagtgaggagtgcctttgccggcctgccaaccgcctgtgaagtgaggagcacctctgcctggccgccaaccatgtgggaagtgatgagggcctctgcccagctgctg

SEQ ID NO: 45617 - DNA, 120 bp, Artificial Sequence
  ENSG00000064763_32 (sequence is synthesized)
ccccatctggcatgtgaggagcacctcggactgactgcccaccatccaggaagtgagaagtgcctctgcccagctgcccactgtctgggaactgaggagcacctctgcccggccgctgcc

SEQ ID NO: 45618 - DNA, 120 bp, Artificial Sequence
  ENSG00000064763_33 (sequence is synthesized)
ccatctgggaagtgaggagcgtctctgccctgccgcccaactgactggtaagtgaggagtgcctctgcccggccgccaaccatctgggaagtaaggagcacctctgcctggctgccgccc

SEQ ID NO: 45619 - DNA, 87 bp, Artificial Sequence
  ENSG00000064763_34 (sequence is synthesized)
ctgactggtaagtgaggagtgcctctgcccggccgccaaccatctgggaagtaaggagcacctctgcctggcttctggccgctgcct

SEQ ID NO: 45620 - DNA, 120 bp, Artificial Sequence
  ENSG00000064763_35 (sequence is synthesized)
gatgctgtcgcccccgcgacctgtagggccttcgctggcccctcaccctcctcccgccccgggctgaggctgccgccggtttcgcgcccagtgccgaggcagcggcggagccggggaagg

SEQ ID NO: 45621 - DNA, 120 bp, Artificial Sequence
  ENSG00000064763_36 (sequence is synthesized)
tgtggctggagcgcttcccgtagcctcggggaaggagcaggatttagaggaccactagttggaccccatcctcgtgctggaggaacaggagttcatggcctccttgatgcccagcctcct

SEQ ID NO: 45622 - DNA, 120 bp, Artificial Sequence
  ENSG00000064763_37 (sequence is synthesized)
acattctagatgtccagaggctccaggcagggccagcttcatggaaatacaaaactgcaaccgcacagggccttgcacttggaagggccctgcgtttggtaatgttctgctatcaccgtc

SEQ ID NO: 45623 - DNA, 120 bp, Artificial Sequence
  ENSG00000064763_38 (sequence is synthesized)
ttggtctaaaactaaccaaataacagtgtttgaacagcaatcccacatttacggtgagttctccagtacaaacctgaaatttatctgctgctcacttaggtgctcttggacatgtcattc

SEQ ID NO: 45624 - DNA, 120 bp, Artificial Sequence
  ENSG00000064763_39 (sequence is synthesized)
agtcttcctacatttcagtttcctcattgacaaaataaagacaacagatgacaccttctactttctttattttcaaggttgtactatctctaagtaaaaagaggtaataattgtaaaaaa

SEQ ID NO: 45625 - DNA, 120 bp, Artificial Sequence
  ENSG00000064763_40 (sequence is synthesized)
atatggctgggatcccaaaagcaaagcaacgcttaaaaaggtcctgcactccatactctaccctgtaacacagtttcatttagacttcaccacacctctatgaggctccgaaatattcac

SEQ ID NO: 45626 - DNA, 120 bp, Artificial Sequence
  ENSG00000064763_41 (sequence is synthesized)
attttgataccacccatttgctatgaaaatataagaaggcgtcatcttcaaagcaacactccagttgggcttcttcatcgtttagctgcatgatttcttctacgacatttgtaacagaca

SEQ ID NO: 45627 - DNA, 120 bp, Artificial Sequence
  ENSG00000064787_0 (sequence is synthesized)
gtattcagccagcaggctctgcacaaggaagcaaagtgcagggagccaggctccaccgacagccaggcactgggcagcacgcactggagacccaggaccctgtgcaggagcagctccggg

SEQ ID NO: 45628 - DNA, 120 bp, Artificial Sequence
  ENSG00000064787_1 (sequence is synthesized)
tgacacgaggggactgaagatactcccacaggggctcagcaggagcaatgggtaaccaaatgagtgttccccaaagagttgaagaccaagagaatgaaccagaagcagagacttaccagg

SEQ ID NO: 45629 - DNA, 120 bp, Artificial Sequence
  ENSG00000064787_2 (sequence is synthesized)
acaacgcgtctgctctgaacggggttccagtggtggtgtcgacccacacagttcagcacttagaggaagtcgacttgggaataagtgtcaagacggataatgtggccacttcttcccccg

SEQ ID NO: 45630 - DNA, 120 bp, Artificial Sequence
  ENSG00000064787_3 (sequence is synthesized)
agacaacggagataagtgctgttgcggatgccaacggaaagaatcttgggaaagaggccaaacccgaggcaccagctgctaaatctcgttttttcttgatgctctctcggcctgtaccag

SEQ ID NO: 45631 - DNA, 120 bp, Artificial Sequence
  ENSG00000064787_4 (sequence is synthesized)
gacgtaccggagaccaagccgcagattcatcccttggatcagtgaagcttgatgtcagctccaataaagctccagcgaacaaagacccaagtgagagctggacacttccggtggcagctg

SEQ ID NO: 45632 - DNA, 120 bp, Artificial Sequence
  ENSG00000064787_5 (sequence is synthesized)
gaccggggcaggacacagataaaaccccagggcacgccccggcccaagacaaggtcctctctgccgccagggatcccacgcttctcccacctgagacagggggagcaggaggagaagctc

SEQ ID NO: 45633 - DNA, 120 bp, Artificial Sequence
  ENSG00000064787_6 (sequence is synthesized)
cctccaagcccaaggactccagcttttttgacaaattcttcaagctggacaagggacaggaaaaggtgccaggtgacagccaacaggaagccaagagggcagagcatcaagacaaggtgg

SEQ ID NO: 45634 - DNA, 120 bp, Artificial Sequence
  ENSG00000064787_7 (sequence is synthesized)
atgaggttcctggcttatcagggcagtccgatgatgtccctgcagggaaggacatagttgacggcaaggaaaaagaaggacaagaacttggaactgcggattgctctgtccctggggacc

SEQ ID NO: 45635 - DNA, 120 bp, Artificial Sequence
  ENSG00000064787_8 (sequence is synthesized)
cagaaggactggagactgcaaaggacgattcccaggcagcagctatagcagagaataataattccatcatgagtttctttaaaactctggtttcacctaacaaagctgaaacaaaaaagg

SEQ ID NO: 45636 - DNA, 120 bp, Artificial Sequence
  ENSG00000064787_9 (sequence is synthesized)
acccagaagacacgggtgctgaaaagtcacccaccacttcagctgaccttaagtcagacaaagccaactttacatcccaggagacccaaggggctggcaagaattccaaaggatgcaacc

SEQ ID NO: 45637 - DNA, 120 bp, Artificial Sequence
  ENSG00000064787_10 (sequence is synthesized)
catcggggcacacacagtccgtgacaacccctgaacctgcgaaggaaggcaccaaggagaaatcaggacccacctctctgcctctgggcaaactgttttggaaaaagtcagttaaagagg

SEQ ID NO: 45638 - DNA, 120 bp, Artificial Sequence
  ENSG00000064787_11 (sequence is synthesized)
actcagtccccacaggtgcggaggagaatgtggtgtgtgagtcaccagtagagattataaagtccaaggaagtagaatcagccttacaaacagtggacctcaacgaaggagatgctgcac

SEQ ID NO: 45639 - DNA, 120 bp, Artificial Sequence
  ENSG00000064787_12 (sequence is synthesized)
ctgaacccacagaagcgaaactcaaaagagaagaaagcaaaccaagaacctctctgatggcgtttctcagacaaatgtcagtgaaaggggatggagggatcacccactcagaagaaataa

SEQ ID NO: 45640 - DNA, 120 bp, Artificial Sequence
  ENSG00000064787_13 (sequence is synthesized)
ctgaaccaacaggagcaccacagaagggtaaagagggctcctcgaaggacaagaagtcagcagccgagatgaacaagcagaagagcaacaagcaggaagccaaagaaccagcccagtgca

SEQ ID NO: 45641 - DNA, 120 bp, Artificial Sequence
  ENSG00000064787_14 (sequence is synthesized)
cagagcaggccacggtggacacgaactcactgcagaatggggacaagctccaaaagagacctgagaagcggcagcagtcccttgggggcttctttaaaggcctgggaccaaagcggatgt

SEQ ID NO: 45642 - DNA, 120 bp, Artificial Sequence
  ENSG00000064787_15 (sequence is synthesized)
tggatgctcaagtgcaaacagacccagtatccatcggaccagttggcaaatccaagtaaacaaatcagcacggttcccaccaggttctcctgccaccaagatgtgttctccttactccat

SEQ ID NO: 45643 - DNA, 120 bp, Artificial Sequence
  ENSG00000064787_16 (sequence is synthesized)
ctcctccccaaacacgctccatgtatatattcttctgatggccagcaaatgaaattctgcctagaaattaagcccgagctgttgtatattgaggtgtattatttacgtctctggtccagt

SEQ ID NO: 45644 - DNA, 120 bp, Artificial Sequence
  ENSG00000064787_17 (sequence is synthesized)
cttttctggcaaataacagtaaagatggtttagcaggtcacctagttgggtcagaagagtcgatgatcaccaagcaggaaagggagggaatagaggaatgtgttcgggttaagtgatgaa

SEQ ID NO: 45645 - DNA, 70 bp, Artificial Sequence
  ENSG00000064787_18 (sequence is synthesized)
agggagggaatagaggaatgtgttcgggttaagtgatgaaaatggcagtggtggccgggcgtggtggctc

SEQ ID NO: 45646 - DNA, 120 bp, Artificial Sequence
  ENSG00000064787_19 (sequence is synthesized)
gccgaagttgcaccattgcactccaccctgggcgacagagcaagattctatcaaaaaaaaaaaaaggcagtggcaagtaagttatagaagagaaatgctgctagaaggaattaagcgttg

SEQ ID NO: 45647 - DNA, 120 bp, Artificial Sequence
  ENSG00000064787_20 (sequence is synthesized)
tagtaaatgcgtgcttatcctctaagcttgaagaagggagacgaaaatccatttgtttaaattcacatctcaaggagggagaacccgggctgtgttgggtggttgccaatttcctagaac

SEQ ID NO: 45648 - DNA, 120 bp, Artificial Sequence
  ENSG00000064787_21 (sequence is synthesized)
ggaatgtgtggggtatagaaaaaggaatgaataagcgttgtttttcaaatagggtccttgtaagttattgatgagagggaaaagattgactggggagggcttaaaatgatttgggaaaac

SEQ ID NO: 45649 - DNA, 89 bp, Artificial Sequence
  ENSG00000064787_22 (sequence is synthesized)
cttgttgcacggttattttgcaacacaagggggcggcaaggtccccatttttatcctgtaatactgtatccctaacaaagatttggtct

SEQ ID NO: 45650 - DNA, 120 bp, Artificial Sequence
  ENSG00000064787_23 (sequence is synthesized)
tttatcctgtaatactgtatccctaacaaagatttggtctctgctatcttacattattaatgtttctcagatggctgaggggctcgcttcatctgttccgtctgacacttatctcaagtg

SEQ ID NO: 45651 - DNA, 120 bp, Artificial Sequence
  ENSG00000064787_24 (sequence is synthesized)
tgtctgtcattcctaatgttctcaggatgtgctctgataaaaccctccccataacctcagttaataaaaatttacagaagacttctcaaatacctgagttgtttttaatacctgtacaaa

SEQ ID NO: 45652 - DNA, 120 bp, Artificial Sequence
  ENSG00000064787_25 (sequence is synthesized)
ggagtaaataggaccctgagtctattaaaatgtaattcaaagtagcatatgattgactgacagtcatgtaaactgtatctttctttttctgatttaataaaaaatacatttacttctaaa

SEQ ID NO: 45653 - DNA, 120 bp, Artificial Sequence
  ENSG00000064787_26 (sequence is synthesized)
gtgcaaacagacccagtatccatcggaccagttggcaaatccaagtacacagggaagtgtgtcttctcccatgtcaagaagaagtggcctttccaggaatggagctattgagctgaaatg

SEQ ID NO: 45654 - DNA, 120 bp, Artificial Sequence
  ENSG00000064787_27 (sequence is synthesized)
cacgcgcacacacacacacacacacacacctcccttccagttccagctgacggtgactttttgactggtaaccataaaagaattcattcaaaagggcagttgttcccagcagccagtgag

SEQ ID NO: 45655 - DNA, 120 bp, Artificial Sequence
  ENSG00000064787_28 (sequence is synthesized)
cagttgttcccagcagccagtgaggtccttcctgcattcgttgtcttggagaaggaggcacataacaaaatagaaaccaaaatgggaaggaaaagagaaagaaagtgaaattcctggtct

SEQ ID NO: 45656 - DNA, 120 bp, Artificial Sequence
  ENSG00000064787_29 (sequence is synthesized)
ttgttgtatgtatccccttgctttttagataaattatcaggggtttaaacacacactctctcccctccctcctcccacttcacacacactagattgttcttgtctgtttgcaaacagtcc

SEQ ID NO: 45657 - DNA, 120 bp, Artificial Sequence
  ENSG00000064787_30 (sequence is synthesized)
agaagcactggggtctcattaaattagattctaagtgtcttaaagaattagatttcaagaaaccaagaatctgtgtcctttcccttctcagagtgcctggaagggtgcagatttctccaa

SEQ ID NO: 45658 - DNA, 120 bp, Artificial Sequence
  ENSG00000064787_31 (sequence is synthesized)
tctgaatctgacaatgttatttcttatgtcagataatcccaagtagatcttataccttaaaaaaataaaatcagctacactacctaccttacagggaaggaaaaagaactaattccaatt

SEQ ID NO: 45659 - DNA, 120 bp, Artificial Sequence
  ENSG00000064787_32 (sequence is synthesized)
attaactaacccaagatacaaacacaggggaaactagggaatgtgctttgcagcaatgtaagattataggggttggttttaaccatcctttgaatgtccctctttaagcctttttaaagg

SEQ ID NO: 45660 - DNA, 120 bp, Artificial Sequence
  ENSG00000064787_33 (sequence is synthesized)
gcaattttgcacggtgagtagaattaggcttctccgtggtcaagattttgttcactctatcagtgcaaattaagtggcaccggcccactggaaattatagtctccattaggaagaaaaga

SEQ ID NO: 45661 - DNA, 120 bp, Artificial Sequence
  ENSG00000064787_34 (sequence is synthesized)
aattacttaccgagcagcaaattctctaaatttgtaattcagatctttagtgcagaatgccggtcaggatccagccctttgcataaattggttttctggggagtttaaccccttagcctc

SEQ ID NO: 45662 - DNA, 120 bp, Artificial Sequence
  ENSG00000064787_35 (sequence is synthesized)
tgttgcccttttcttgaatggcattcacgcaaccctctccatctcctggccctttaactggccccggcagaagttgcagtccacaatttcacagaagtaaggataatacattatcacaca

SEQ ID NO: 45663 - DNA, 120 bp, Artificial Sequence
  ENSG00000064787_36 (sequence is synthesized)
ttaccgtttataaagtgctctgggtacaatctgtaatttaaagctgtatttccctcactgaacttaagtgcttcctttgttacatttcattaccgggggactggcatgcacctgtataga

SEQ ID NO: 45664 - DNA, 120 bp, Artificial Sequence
  ENSG00000064787_37 (sequence is synthesized)
ttttcattttttgttttgttttgtttttccaaataagcacttcttgacaaaatggcccccagctgcacttctgctaatgacagccatggaagggctggttccttacgtgatctactctct

SEQ ID NO: 45665 - DNA, 120 bp, Artificial Sequence
  ENSG00000064787_38 (sequence is synthesized)
gatctactctctcagaagcttgcttttgtcaaaatgcagccacgtgggggagctgcaggacctggggttttacaatgcctagccctttttccctgattgcctaaccgggaaactgggcca

SEQ ID NO: 45666 - DNA, 120 bp, Artificial Sequence
  ENSG00000064787_39 (sequence is synthesized)
aagcagcctgagagtgtatttgttgattaacttctagaaagcagtcaagtttaattaggagaactagaacgagaaagctgaactgggcaagtcagttgccttctatgattctcagtcctc

SEQ ID NO: 45667 - DNA, 120 bp, Artificial Sequence
  ENSG00000064787_40 (sequence is synthesized)
tgcatttaagtaatccttactggcccatcctgctccacaaagcagccttacctctcatcttctccactcccaactaaagagcaagtgatttaaactctgagtgtcctccctcaacaatgg

SEQ ID NO: 45668 - DNA, 120 bp, Artificial Sequence
  ENSG00000064787_41 (sequence is synthesized)
gctaataatagagcctactcgtggagttgctgccagcatgcagtgagatggtgcataccaaacatttagtgcagtggctggcacattgtaagcacttaggaaaggcaagctattctatca

SEQ ID NO: 45669 - DNA, 120 bp, Artificial Sequence
  ENSG00000064787_42 (sequence is synthesized)
tggggaacttttagcaccaagtaacagaaaacccctacttgaattggcagataatcgtaacaataagggtatttatcatttcatataataggtgttgtataacatctttggctttgattc

SEQ ID NO: 45670 - DNA, 120 bp, Artificial Sequence
  ENSG00000064787_43 (sequence is synthesized)
tctgagactctcttccagctaacaacgataatgaggaaatgtatcgtttcatataactggtgttaagtctcatagcctggctctggttctctgacactccattctgccatgttccatggg

SEQ ID NO: 45671 - DNA, 120 bp, Artificial Sequence
  ENSG00000064787_44 (sequence is synthesized)
ttgacttcatcctaaaactgtgctgaatgatggatgcagttccaggcaaggggattatgggaataccataatcagtttcaatgaatcattttggtgaaatcatgttgagaaggcaataca

SEQ ID NO: 45672 - DNA, 120 bp, Artificial Sequence
  ENSG00000064787_45 (sequence is synthesized)
atgatacagtagacagtaaagccattattggtatcagtggctttaaggctaaccattccccaaactaactgtgtcccttcaattcacacccatgggatttgtgtaatgacggcccccacc

SEQ ID NO: 45673 - DNA, 120 bp, Artificial Sequence
  ENSG00000064787_46 (sequence is synthesized)
ttccaaagcagtgccactagaatgtgaacttatcaagatctgaaccttcttgtcttgctcattcattgttctattgtcagtgtctagcacaatgcctggacatggtagatactcaacaaa

SEQ ID NO: 45674 - DNA, 120 bp, Artificial Sequence
  ENSG00000064787_47 (sequence is synthesized)
tattggttgaatggataaattgctaaacaaatatcctgtggccacacccattgtggattgccttatcctctagtgtgaatttgttttagctctgaatgtctgatcaccctaaccagacat

SEQ ID NO: 45675 - DNA, 120 bp, Artificial Sequence
  ENSG00000064787_48 (sequence is synthesized)
ctacccttcccaggtaaccagcccagtggttctaaaagtacagtcccaggaccagcagcctcagcaccacctgagaacatgttaggaatgcaaactctcaagccccactccatacccgca

SEQ ID NO: 45676 - DNA, 120 bp, Artificial Sequence
  ENSG00000064787_49 (sequence is synthesized)
gaatcaaaaactcttggggtgggacccagtaacctgtgttttagcagcctctcaggaggttccaatgaaggagaaaatttgaaaaccactggtccaggtagagctaccacttcactgagc

SEQ ID NO: 45677 - DNA, 120 bp, Artificial Sequence
  ENSG00000064787_50 (sequence is synthesized)
atcaacagcatgtttggtccaaagactggccctgaagatgcttagataaaaaaagctaacattgaacctcactatatgccaggtattgtgtgtcacatgacttaactttgttcactgctt

SEQ ID NO: 45678 - DNA, 120 bp, Artificial Sequence
  ENSG00000064787_51 (sequence is synthesized)
atttggcagctgaggaaactaaggctcacagagaaaaaaacaactttgcccaagaacacacatggcagagccaaggttgaaatccaacctaagtacataaaagcttgctttcatgtctgt

SEQ ID NO: 45679 - DNA, 120 bp, Artificial Sequence
  ENSG00000064787_52 (sequence is synthesized)
gggagagacaggcaggcaaaaagataataataatacaatgtaagagaagcaaatgcagggtgtcatgggactcaggggaaggcactggcgcaagaccacagtgggtggaggttggccact

SEQ ID NO: 45680 - DNA, 120 bp, Artificial Sequence
  ENSG00000064787_53 (sequence is synthesized)
ttggggaggtgacagttgagttaactcacacagaatgaataagcgttggacaaaagggctcccagaagaacagcaagtgcaagagcccagggtccacagagagaatggcaggtagcttag

SEQ ID NO: 45681 - DNA, 120 bp, Artificial Sequence
  ENSG00000064787_54 (sequence is synthesized)
catggctgaagtgagactgtgaggagaacggataagaggatggaagctggggaggtggcacagatggatctcaaggacttggagtaaaaagtccatagtaacgagtttaaattgtctctt

SEQ ID NO: 45682 - DNA, 120 bp, Artificial Sequence
  ENSG00000064787_55 (sequence is synthesized)
gacggcaatggggagccatggaagatatttgagctggagggtaacatagatttatattttggctgcaggtaggatctaatacaaaagcaattcaactaatattcactaagtgacctgagt

SEQ ID NO: 45683 - DNA, 120 bp, Artificial Sequence
  ENSG00000064787_56 (sequence is synthesized)
tatctgtgagatatttattataaggtgttaaacttctttgaagattgtaagaaagagataaaacctctaaatggttttgacccttcaaaggacatttaaatggttatttctaagtgtcat

SEQ ID NO: 45684 - DNA, 120 bp, Artificial Sequence
  ENSG00000064787_57 (sequence is synthesized)
aaacatggacttgggatttggcctcatcattcacccagatgattcatacccatgatcccaggctgtgaggtcttgagcaaattacttcttctcagagccttagtttgttcctctgtggaa

SEQ ID NO: 45685 - DNA, 120 bp, Artificial Sequence
  ENSG00000064787_58 (sequence is synthesized)
tgggaatgctaacagcacttacctcggaaagttgctgagaataaacgagaccgtgcatttagagcatgtaggcaccgtgtctggcaggtaatgagtgctcagtcagcttattgatgagga

SEQ ID NO: 45686 - DNA, 120 bp, Artificial Sequence
  ENSG00000064787_59 (sequence is synthesized)
tgcagatgacctcagcctgagatagaacagatgtgttctctttcatggactgaaggccacccagactttgcgacatccttaaactttgccccagtttctccttatcctcataagcagttg

SEQ ID NO: 45687 - DNA, 120 bp, Artificial Sequence
  ENSG00000064787_60 (sequence is synthesized)
gctggctggcttatctagaaaaaagaaaggagggaggagaaaaagcaaagaaaaatgttcattttccctgctgttcaccccattctaaagtaaggcagaatttctggagagggggctcag

SEQ ID NO: 45688 - DNA, 120 bp, Artificial Sequence
  ENSG00000064787_61 (sequence is synthesized)
gtccacccttggctatccttggttgtacagttgcatctacttataacggtggccaagtcgccatggcagtaggtgctgtggctgccctgccccatcgtcttcagactacccgagtttacc

SEQ ID NO: 45689 - DNA, 120 bp, Artificial Sequence
  ENSG00000064787_62 (sequence is synthesized)
tgcagcactgacagcttcccaccccaaaactcctcgttctttgcttttcctctcggtggctttctccaggggctgtaggagcttgtttagcccacctgcatggcattttgaaaatacctg

SEQ ID NO: 45690 - DNA, 120 bp, Artificial Sequence
  ENSG00000064787_63 (sequence is synthesized)
aaattttatgccccgaaggacaattctcaatcagtgaaagatgggagaggaaaggtaaacacctcagctgccccatctctcagtgggacaatgttgaggggtcgtctttgtgttctctca

SEQ ID NO: 45691 - DNA, 120 bp, Artificial Sequence
  ENSG00000064787_64 (sequence is synthesized)
agggtcctcagcaagaccgagccacccgtcacccacagcagtaacatactcatgagcacgcccccccaccccaccttttgtgcttcctgggatcacttcccaaataaactacttgcacct

SEQ ID NO: 45692 - DNA, 120 bp, Artificial Sequence
  ENSG00000064835_0 (sequence is synthesized)
agagccttcctgatgtatatatgcaggtagtgagaattgaatcggccctttgagacagtaatataataaaactctgatttggggagcagcggttctccttatttttctactctcttgtgg

SEQ ID NO: 45693 - DNA, 120 bp, Artificial Sequence
  ENSG00000064835_1 (sequence is synthesized)
gaatgagttgccaagcttttacttcggctgatacctttatacctctgaattctgacgcctctgcaactctgcctctgataatgcatcacagtgctgccgagtgtctaccagtctccaacc

SEQ ID NO: 45694 - DNA, 120 bp, Artificial Sequence
  ENSG00000064835_2 (sequence is synthesized)
atgccaccaatgtgatgtctacagcaacaggacttcattattctgttccttcctgtcattatggaaaccagccatcaacctatggagtgatggcaggtagtttaaccccttgtctttata

SEQ ID NO: 45695 - DNA, 120 bp, Artificial Sequence
  ENSG00000064835_3 (sequence is synthesized)
aatttcctgaccacaccttgagtcatggatttcctcctatacaccagcctcttctggcagaggaccccacagctgctgatttcaagcaggaactcaggcggaaaagtaaattggtggaag

SEQ ID NO: 45696 - DNA, 120 bp, Artificial Sequence
  ENSG00000064835_4 (sequence is synthesized)
agccaatagacatggattctccagaaatcagagaacttgaaaagtttgccaatgaatttaaagtgagacgaattaaattaggatacacccagacaaatgttggggaggccctggcagctg

SEQ ID NO: 45697 - DNA, 120 bp, Artificial Sequence
  ENSG00000064835_5 (sequence is synthesized)
tgcatggctctgaattcagtcaaacaacaatctgccgatttgaaaatctgcagctcagctttaaaaatgcatgcaaactgaaagcaatattatccaaatggctggaggaagctgagcaag

SEQ ID NO: 45698 - DNA, 120 bp, Artificial Sequence
  ENSG00000064835_6 (sequence is synthesized)
aacgaagaacaactataagcattgctgctaaagatgctctggagagacactttggagaacagaataaaccttcttctcaagagatcatgaggatggctgaagaactgaatctggagaaag

SEQ ID NO: 45699 - DNA, 120 bp, Artificial Sequence
  ENSG00000064835_7 (sequence is synthesized)
aagtagtaagagtttggttttgcaaccggaggcagagagaaaaacgggtgaaaacaagtctgaatcagagtttattttctatttctaaggaacatcttgagtgcagataagatttttcta

SEQ ID NO: 45700 - DNA, 120 bp, Artificial Sequence
  ENSG00000064835_8 (sequence is synthesized)
ttgtataatagcctttttctcccgtttcattcctttctcttcctcaacaaaaacagaaattacttggttgacttaaaatcattttatatcaatagcttttacagaagctttacttttcca

SEQ ID NO: 45701 - DNA, 120 bp, Artificial Sequence
  ENSG00000064835_9 (sequence is synthesized)
aaaaagaaaccaacaatttaaattatattgatgttatttacttaaaataattattctcagaagccacattatctattttaagccaaatatattaacagtaataaaatgatctctctgtct

SEQ ID NO: 45702 - DNA, 120 bp, Artificial Sequence
  ENSG00000064835_10 (sequence is synthesized)
atctctctgtctctcccgctctctttctcacacacacgcagacatatgagtatgggtttataagttccttttccaaacatgtatattagctttttaacatgtaagtcagtaatgacacat

SEQ ID NO: 45703 - DNA, 120 bp, Artificial Sequence
  ENSG00000064835_11 (sequence is synthesized)
atgtaaagcacatcaccagaaatatccaattcaaaaattaaccaatgttctgctttctaccaactctactaatttgtctgaactaaaagttttgaacttaagagctggaggtgtcttata

SEQ ID NO: 45704 - DNA, 120 bp, Artificial Sequence
  ENSG00000064886_0 (sequence is synthesized)
agaagctggccaaggatatgggagcaaccaccatggaccagaagtctctctgggcaggtgtagtggtcttgctgcttctccagggaggatctgcctacaaactggtttgctactttacca

SEQ ID NO: 45705 - DNA, 120 bp, Artificial Sequence
  ENSG00000064886_1 (sequence is synthesized)
actggtcccaggaccggcaggaaccaggaaaattcacccctgagaatattgaccccttcctatgctctcatctcatctattcattcgccagcatcgaaaacaacaaggttatcatcaagg

SEQ ID NO: 45706 - DNA, 120 bp, Artificial Sequence
  ENSG00000064886_2 (sequence is synthesized)
acaagagtgaagtgatgctctaccagaccatcaacagtctcaaaaccaagaatcccaaactgaaaattctcttgtccattggagggtacctgtttggttccaaagggttccaccctatgg

SEQ ID NO: 45707 - DNA, 120 bp, Artificial Sequence
  ENSG00000064886_3 (sequence is synthesized)
tggattcttctacatcacgcttggaattcattaactccataatcctgtttctgaggaaccataactttgatggactggatgtaagctggatctacccagatcagaaagaaaacactcatt

SEQ ID NO: 45708 - DNA, 120 bp, Artificial Sequence
  ENSG00000064886_4 (sequence is synthesized)
tcactgtgctgattcatgagttagcagaagcctttcagaaggacttcacaaaatccaccaaggaaaggcttctcttgactgcgggcgtatctgcagggaggcaaatgattgataacagct

SEQ ID NO: 45709 - DNA, 120 bp, Artificial Sequence
  ENSG00000064886_5 (sequence is synthesized)
acagccctctgagcaaggggtggcaggacagagggccaagctcctactacaatgtggaatatgctgtggggtactggatacataagggaatgccatcagagaaggtggtcatgggcatcc

SEQ ID NO: 45710 - DNA, 120 bp, Artificial Sequence
  ENSG00000064886_6 (sequence is synthesized)
ccacatatgggcactccttcacactggcctctgcagaaaccaccgtgggggcccctgcctctggccctggagctgctggacccatcacagagtcttcaggcttcctggcctattatgaga

SEQ ID NO: 45711 - DNA, 120 bp, Artificial Sequence
  ENSG00000064886_7 (sequence is synthesized)
tctgccagttcctgaaaggagccaagatcacgcggctccaggatcagcaggttccctacgcagtcaaggggaaccagtgggtgggctatgatgatgtgaagagtatggagaccaaggttc

SEQ ID NO: 45712 - DNA, 120 bp, Artificial Sequence
  ENSG00000064886_8 (sequence is synthesized)
agttcttaaagaatttaaacctgggaggagccatgatctggtctattgacatggatgacttcactggcaaatcctgcaaccagggcccttaccctcttgtccaagcagtcaagagaagcc

SEQ ID NO: 45713 - DNA, 120 bp, Artificial Sequence
  ENSG00000064886_9 (sequence is synthesized)
ttggctccctgtgaaggattaacttacagagaagcaggcaagatgaccttgctgcctggggcctgctctctcccaggaattctcatgtgggattccccttgccaggctggcctttggatc

SEQ ID NO: 45714 - DNA, 120 bp, Artificial Sequence
  ENSG00000064886_10 (sequence is synthesized)
tctcttccaagcctttcctgacttcctcttagatcatagattggacctggttttgttttcctgcagctgttgacttgttgccctgaagtacaataaaaaaaattcattttgctccagtaa

SEQ ID NO: 45715 - DNA, 120 bp, Artificial Sequence
  ENSG00000064886_11 (sequence is synthesized)
cctctggctgaaagtagccggaaaggcctggctacttatgggctaagggttttgaatctgggctgcagattgtgcagagagttaatttacaaccttagaacagtggacaatgcttgatag

SEQ ID NO: 45716 - DNA, 120 bp, Artificial Sequence
  ENSG00000064886_12 (sequence is synthesized)
tgtcagactgtgggcactggaaaccggctggtctcaggatagggatcctatacctccaacacttggattgctgacctttcacttctcaacttggtcaacggaagtcaaaaaccccagcaa

SEQ ID NO: 45717 - DNA, 120 bp, Artificial Sequence
  ENSG00000064886_13 (sequence is synthesized)
ggccacctgctgaattctagaacttccaggacttcccgacctagagcacatggccaaacactttctgcagccaggatgtcactgccctcccctgattaagataaatagacttggcctaat

SEQ ID NO: 45718 - DNA, 120 bp, Artificial Sequence
  ENSG00000064886_14 (sequence is synthesized)
aattatccaaatagattaattcttccaacaaaagaaagagttctggaagtcaatacccaatagccttctttcctgatggtgcagtagagagcaaaatccatctctaagcccagagttcgt

SEQ ID NO: 45719 - DNA, 120 bp, Artificial Sequence
  ENSG00000064886_15 (sequence is synthesized)
gatattttggaaatagctacaatggtgaatttcaccccctggagagttctgtcactggcacttgttccagggttccagcagagtccctcttctcaaataggaagcactggctcagaagac

SEQ ID NO: 45720 - DNA, 120 bp, Artificial Sequence
  ENSG00000064886_16 (sequence is synthesized)
gtctcgctctgtcacccaggctggaccatgagtgcttttttaaacctcattttaaatctgaaagaagaatgaatacattggacaggctgtcgaaacctcagtggataaaagacctagaga

SEQ ID NO: 45721 - DNA, 120 bp, Artificial Sequence
  ENSG00000064886_17 (sequence is synthesized)
agagttggcattgctcaaatctgggcttcatttccaagaagtttcacaagtctgccaggggaagtccctggacttcttgcttctttcgtgtaggacaggctgtcgaaacctcagtggata

SEQ ID NO: 45722 - DNA, 120 bp, Artificial Sequence
  ENSG00000064886_18 (sequence is synthesized)
aaaaaaaaaaaaaagaaaccacagcagctgtggctggggagcccagatgaagtgtggctctatcttgtatgtgagcacacccacattttcactgccattatctgggacagcagaaccagg

SEQ ID NO: 45723 - DNA, 120 bp, Artificial Sequence
  ENSG00000064886_19 (sequence is synthesized)
ttttcctccttctaagaagagatattaaactaggctttaagaggttttcccttggccaggtggcaaaactgatctgagatttgtcataagcagaggaacagcattaggtttcctggggtc

SEQ ID NO: 45724 - DNA, 120 bp, Artificial Sequence
  ENSG00000064886_20 (sequence is synthesized)
ggcagacagctgggcagaacagggcacaggagactgggggagatcatcttcacatatttggactaatcctttctcatgctcctttggctcttctgccatgttttcttagcaattaggctg

SEQ ID NO: 45725 - DNA, 120 bp, Artificial Sequence
  ENSG00000064886_21 (sequence is synthesized)
gttctgcccttttcataggcttcccatagacttttaaagtaataataataatattgataaattttggctaccatttattgagcatagtatgagctaaagactttcattacatatatatta

SEQ ID NO: 45726 - DNA, 120 bp, Artificial Sequence
  ENSG00000064886_22 (sequence is synthesized)
ctggtcttaagctgacactaagacatactatctcattcattcattcattcctatatatttctctgggtgtatttctgatcctaactgttctcaccagtgcttcatcccttcactgaactt

SEQ ID NO: 45727 - DNA, 120 bp, Artificial Sequence
  ENSG00000064886_23 (sequence is synthesized)
gcccaggaattcaagaccagcctgggaccgggtcccttttaggtgagactagatgaaaagggctcttcagcagctgacttcacagcaactaatttctgacaggtcagagttggcattgct

SEQ ID NO: 45728 - DNA, 120 bp, Artificial Sequence
  ENSG00000064932_0 (sequence is synthesized)
aagatggcgcccgaaacccggaagtgagcggcggcagctgcgaggctcggagaaacaggcgccgcgggctccgcgcccggccggacccgggcccgagatcatgatgctgccgccaccgcc

SEQ ID NO: 45729 - DNA, 120 bp, Artificial Sequence
  ENSG00000064932_1 (sequence is synthesized)
gccaccacggagcgagaagcccagatagacgccccggcggccccgggtcctggagtcccgccgcctgctgcccggccgaggaccccaccccgcctgccgcccgatgcttgcagtggggcc

SEQ ID NO: 45730 - DNA, 120 bp, Artificial Sequence
  ENSG00000064932_2 (sequence is synthesized)
cgccatggacagggattacccgcagcatgaacccccgccggcgggcagcctcctgtacagcccgccgcccctgcagagcgccatgctgcactgcccctactggaacaccttctcgctgcc

SEQ ID NO: 45731 - DNA, 120 bp, Artificial Sequence
  ENSG00000064932_3 (sequence is synthesized)
gccataccctgccttctccagcgacagccgcccgttcatgagctccgcctccttcctcggcagccagccctgcccagacaccagctatgcccccgtggccaccgcctccagcttgccacc

SEQ ID NO: 45732 - DNA, 120 bp, Artificial Sequence
  ENSG00000064932_4 (sequence is synthesized)
aaagacctgcgactttgctcaggactcctcctattttgaggacttctccaacatctccatcttctcctcgtccgtggactccctgtcggacatcgtggacacgcccgacttcctgccggc

SEQ ID NO: 45733 - DNA, 120 bp, Artificial Sequence
  ENSG00000064932_5 (sequence is synthesized)
tgacagcctcaaccaggtgtccaccatctgggacgataaccctgccccctccacccacgataagctgttccagctcagcaggccgtttgcaggcttcgaggactttctgccctcccacag

SEQ ID NO: 45734 - DNA, 120 bp, Artificial Sequence
  ENSG00000064932_6 (sequence is synthesized)
caccccgcttctcgtcagctaccaggagcagagtgtgcagagccagccagaggaggaggacgaggctgaggaggaggaggcggaggagctggggcacacagagacctacgccgactacgt

SEQ ID NO: 45735 - DNA, 120 bp, Artificial Sequence
  ENSG00000064932_7 (sequence is synthesized)
gccgtccaagtccaagatcgggaagcagcacccagaccgcgtggtggagaccagcacactgtccagcgtcccacccccagacatcacctacaccctggccctgccctcggacagcggggc

SEQ ID NO: 45736 - DNA, 120 bp, Artificial Sequence
  ENSG00000064932_8 (sequence is synthesized)
cctgtctgccctgcagctagaggccatcacctacgcctgccagcaacacgaggtcctgctccccagcgggcagcgcgcgggctttctcatcggcgatggggccggcgtgggcaaaggccg

SEQ ID NO: 45737 - DNA, 120 bp, Artificial Sequence
  ENSG00000064932_9 (sequence is synthesized)
gacggtggccggagtcatcctggagaaccacctgcgcggccggaagaaagcattgtggttcagcgtctccaacgacctcaagtacgatgcggagcgcgacctgcgggacatcgaagccac

SEQ ID NO: 45738 - DNA, 120 bp, Artificial Sequence
  ENSG00000064932_10 (sequence is synthesized)
gggcatcgcggtgcacgcgctcagcaagatcaagtacggtgacaccactacctcagagggcgtcctcttcgccacctactccgccctgattggggagagccaggccggcggccagcaccg

SEQ ID NO: 45739 - DNA, 120 bp, Artificial Sequence
  ENSG00000064932_11 (sequence is synthesized)
cactcgcctccggcagatcctggactggtgtggggaggccttcgagggcgtcatcgtgttcgacgagtgtcacaaagccaagaatgccggctccaccaagatgggcaaggctgtgctaga

SEQ ID NO: 45740 - DNA, 120 bp, Artificial Sequence
  ENSG00000064932_12 (sequence is synthesized)
cctgcagaacaagctgcccctggcccgcgtggtctacgccagcgccacaggtgcctctgagcctcggaacatgatctacatgagccgcttgggtatctggggcgagggcacacccttccg

SEQ ID NO: 45741 - DNA, 120 bp, Artificial Sequence
  ENSG00000064932_13 (sequence is synthesized)
gaactttgaggagttcctgcacgccatcgagaagaggggcgttggcgccatggagatcgtggccatggacatgaaggtcagcggcatgtacatcgcacgccagctcagcttctccggcgt

SEQ ID NO: 45742 - DNA, 120 bp, Artificial Sequence
  ENSG00000064932_14 (sequence is synthesized)
caccttccgcatcgaggagatcccgctggccccagccttcgagtgcgtctacaaccgcgcggccctgctgtgggccgaggccctgaacgtgttccagcaggcggccgactggatcggcct

SEQ ID NO: 45743 - DNA, 120 bp, Artificial Sequence
  ENSG00000064932_15 (sequence is synthesized)
ggagtcgcgcaagtccctgtggggccagttctggtcggcacaccagcgcttcttcaagtatctgtgcatcgcagccaaggtgcgccggctggtggagctggcccgagaggagctggcgcg

SEQ ID NO: 45744 - DNA, 120 bp, Artificial Sequence
  ENSG00000064932_16 (sequence is synthesized)
agacaagtgcgtggtcatcgggctgcagtccacgggcgaggcgcgcacgcgggaggtgctgggggagaacgatgggcacctcaactgcttcgtctcggccgctgaaggcgtgttcctgtc

SEQ ID NO: 45745 - DNA, 120 bp, Artificial Sequence
  ENSG00000064932_17 (sequence is synthesized)
gctaattcagaagcactttccgtccaccaagagaaagcgggacagaggagcgggcagcaagcggaaacggcgacctcggggacgcggggccaaagccccccggctggcgtgcgagacagc

SEQ ID NO: 45746 - DNA, 120 bp, Artificial Sequence
  ENSG00000064932_18 (sequence is synthesized)
gggcgtcatccgcatcagtgacgacagcagcacggagtcggaccctggcctggacagcgacttcaactcctcccccgagtccctggtggatgacgacgttgtcatcgttgatgcagtcgg

SEQ ID NO: 45747 - DNA, 120 bp, Artificial Sequence
  ENSG00000064932_19 (sequence is synthesized)
gctccccagtgacgaccggggacccctgtgcctcctgcagagagacccgcatggccccggggtcctggagcgggtggagcggctgaagcaggatctgctggacaaagtgcggcggctggg

SEQ ID NO: 45748 - DNA, 120 bp, Artificial Sequence
  ENSG00000064932_20 (sequence is synthesized)
gacgggacggtggccttcgagtcgcgggcagagcagggtctgtccatcgaccacgtgaacctcagggagaagcagcgcttcatgagcggcgagaagctcgtggccatcatctcggaggcc

SEQ ID NO: 45749 - DNA, 120 bp, Artificial Sequence
  ENSG00000064932_21 (sequence is synthesized)
tccagctcgggtgtctccctccaagccgaccgccgtgtccagaaccagcggcgccgcgtgcacatgaccttggagctgccgtggagcgccgaccgcgccatccagcagttcggccgcacc

SEQ ID NO: 45750 - DNA, 120 bp, Artificial Sequence
  ENSG00000064932_22 (sequence is synthesized)
caccggtccaaccaggtctccgcgccagagtatgtcttcctcatctcggagctggccggggagcgccggttcgcctccatcgtggccaagcgcctggagagtctgggggccctgacccac

SEQ ID NO: 45751 - DNA, 120 bp, Artificial Sequence
  ENSG00000064932_23 (sequence is synthesized)
ggagaccgccgcgccacggagtcccgtgacctcagcaagtacaactttgagaacaagtatggcacccgggccctgcactgtgtcctcaccaccatcctgagccagactgagaacaaagtg

SEQ ID NO: 45752 - DNA, 120 bp, Artificial Sequence
  ENSG00000064932_24 (sequence is synthesized)
cctgtgccccagggataccctggaggggtccccaccttcttccgggacatgaagcagggcctgctgtctgtgggcattggtggccgggagtcccggaatggctgcctggacgtggagaag

SEQ ID NO: 45753 - DNA, 120 bp, Artificial Sequence
  ENSG00000064932_25 (sequence is synthesized)
gactgttccatcaccaagttcctgaaccgcatcctggggctggaggtgcacaagcagaacgccctgttccagtacttctcagacaccttcgaccacctcatcgagatggacaagcgggag

SEQ ID NO: 45754 - DNA, 120 bp, Artificial Sequence
  ENSG00000064932_26 (sequence is synthesized)
ggcaaatacgacatgggcatcctggaccttgctcccggtatcgaggagatctacgaggagagccagcaggtgttcctggctcccgggcacccgcaggacgggcaggtggtcttctacaag

SEQ ID NO: 45755 - DNA, 120 bp, Artificial Sequence
  ENSG00000064932_27 (sequence is synthesized)
atcagcgtggaccgcggcctgaagtgggaggacgcctttgccaagtcgctggcgctgacgggcccctatgacggcttctacctctcctacaaggtccgcggtaacaagcccagctgcctg

SEQ ID NO: 45756 - DNA, 120 bp, Artificial Sequence
  ENSG00000064932_28 (sequence is synthesized)
ctggcggagcagaaccgcggccagttcttcacggtgtacaagcccaacatcggccggcagagccagctggaggccctggacagcctccgccgcaagttccaccgggtcaccgcggaggag

SEQ ID NO: 45757 - DNA, 120 bp, Artificial Sequence
  ENSG00000064932_29 (sequence is synthesized)
gccaaggagccctgggagagtggctacgctttgtcgctgacgcactgcagccacagcgcctggaaccggcactgccggctggcgcaggagggtaaggactgcctgcaggggctgcggctg

SEQ ID NO: 45758 - DNA, 120 bp, Artificial Sequence
  ENSG00000064932_30 (sequence is synthesized)
cggcaccactacatgctgtgcggcgcgctgctgcgcgtgtggggccgcatcgccgccgtcatggccgacgtcagcagcagcagctacctgcagatcgtgcggctgaagaccaaggacagg

SEQ ID NO: 45759 - DNA, 120 bp, Artificial Sequence
  ENSG00000064932_31 (sequence is synthesized)
aagaagcaagtgggcatcaagatccccgagggctgcgtgcgccgggtgctgcaggagctgcggctgatggatgcggacgtgaagcgcaggcaggcgcccgccctgggctgccccgccccg

SEQ ID NO: 45760 - DNA, 120 bp, Artificial Sequence
  ENSG00000064932_32 (sequence is synthesized)
ccccgcgcccgctggcgctgccttgcggccccggagaggtgctggacctcacctacagccccccggccgaggccttcccgccgcccccgcacttctctttcccggcgccgctgtccctgg

SEQ ID NO: 45761 - DNA, 120 bp, Artificial Sequence
  ENSG00000064932_33 (sequence is synthesized)
ctggacgccggccccggcgtcgtgccgctgggcacccccgacgcccaggccgaccctgcggccctcgcgcaccagggctgcgacatcaacttcaaggaggtgctggaggacatgctgcgc

SEQ ID NO: 45762 - DNA, 120 bp, Artificial Sequence
  ENSG00000064932_34 (sequence is synthesized)
gcgcgctgggggagggcgcgggggcggggggcgcggcgggcggtggtcccgagcggcagagcgtgatccagttcagcccacccttccccggcgcccaggctcctctctgacacgccttta

SEQ ID NO: 45763 - DNA, 120 bp, Artificial Sequence
  ENSG00000064932_35 (sequence is synthesized)
gcccaggctcctctctgacacgcctttaggcgaaacatgccccaagacacagggaccgtttctcccctaggagcagcggtggggagcagggccaaggtcccctgaccactgctcagagga

SEQ ID NO: 45764 - DNA, 120 bp, Artificial Sequence
  ENSG00000064932_36 (sequence is synthesized)
taggccctggccgcagtgccttcagcgcccgacccgggcccccacctggtcagccctggcggggcccactcaggacagctgggggccggggcgtggcagggccctctctgtgcctctcct

SEQ ID NO: 45765 - DNA, 120 bp, Artificial Sequence
  ENSG00000064932_37 (sequence is synthesized)
tcctcccaagtaggaaggggctccgggtggctgctctgggactgggcacccacaagggctcagtgggcccaaacccttgaaatccgtgaaaccgggtggtcccaagagctagaaactcag

SEQ ID NO: 45766 - DNA, 120 bp, Artificial Sequence
  ENSG00000064932_38 (sequence is synthesized)
gaaaccccaggtgctcagggccccgcgtctcgggggctccgtggggcagacccctgctaatatatgcaattctccctcccccagcccttccctgacccctaagttattgcccgctcacct

SEQ ID NO: 45767 - DNA, 120 bp, Artificial Sequence
  ENSG00000064932_39 (sequence is synthesized)
ctcccaggccccaggccgcggagctggcagggtggcgcctgcggtttctatgtatttatagcaagttctgatgtacatatgtaaaggacttttttaaatatatgtgccttttgcctactt

SEQ ID NO: 45768 - DNA, 120 bp, Artificial Sequence
  ENSG00000064932_40 (sequence is synthesized)
aatgctggggctgctgccgcggtcatgagggagccgctcccgggcagcgcttcctgggggacccctggccccccgagcgccgggaccatgtcccagctgcagctgtggctgcagtttgag

SEQ ID NO: 45769 - DNA, 120 bp, Artificial Sequence
  ENSG00000064932_41 (sequence is synthesized)
cccccaccccgtgccgtggcagatcagcgtggaccgcggcctgaagtgggaggacgcctttgccaagtcgctggcgctgacgggcccctatgacggcttctacctctcctacaaggtggg

SEQ ID NO: 45770 - DNA, 120 bp, Artificial Sequence
  ENSG00000064932_42 (sequence is synthesized)
ggcgtttgccccccaccaggaaggtggggtcttgggtggtcaggacctgggctcctggggtcgcccccgtccttcagaatactccttaacccacgtgtgcctcagatcgtgttcgacgag

SEQ ID NO: 45771 - DNA, 120 bp, Artificial Sequence
  ENSG00000064932_43 (sequence is synthesized)
gcagatcggactggcgggcctggtgccgctgtctcagtgacctgctttgtgactcgtgcccgtgcttcccggagccttgtgattgacctccatccccagcaagaacaagcgtccaagtga

SEQ ID NO: 45772 - DNA, 120 bp, Artificial Sequence
  ENSG00000064932_44 (sequence is synthesized)
aaccgaaagaggcggccttggccttggttccaggccccgctgcgttttgaaagtgatgtgcgccaggttccggaaggcggctcactcgcgtttcctgggagtctctgccgctgtgggctc

SEQ ID NO: 45773 - DNA, 120 bp, Artificial Sequence
  ENSG00000064932_45 (sequence is synthesized)
ctggggccaaggccctgggtgctggggcgtggggagggggagccggtgagccttcgggcctggcgggcagtaaacgtttctggaactgactcacttgctggggaggggcagccagggagg

SEQ ID NO: 45774 - DNA, 120 bp, Artificial Sequence
  ENSG00000064932_46 (sequence is synthesized)
tggtcgctccctgcttcccccactcccccgtccactcagccaaatgcaggtcctgtccgtgccaggcaggctcaaggctccgctgccagtggcaggtcttgcgtggaccctgccatggaa

SEQ ID NO: 45775 - DNA, 120 bp, Artificial Sequence
  ENSG00000064932_47 (sequence is synthesized)
cgcttagggaagaggaagcaacagacagcctgaaggacacagacgtgggtgccgagcgagacccggggggcgggacacggacgcgggtgctgagcgagacccctcccaccttccgttttc

SEQ ID NO: 45776 - DNA, 120 bp, Artificial Sequence
  ENSG00000064932_48 (sequence is synthesized)
agggtctccacggtcccttggggagcccattgataacccccaggcttctgtcacagggaagcccagagctgcctgtcgaagtctggtgtgtggcctccccaggcaccccgcgtgtccacc

SEQ ID NO: 45777 - DNA, 120 bp, Artificial Sequence
  ENSG00000064932_49 (sequence is synthesized)
gtctggtgtgtggcctccccaggcaccccgcgtgtccaccatactggccaggcctgaaaggacgttggatatgggtttattaatattgtcccgttggctgggcgtggtggctcacgcctg

SEQ ID NO: 45778 - DNA, 120 bp, Artificial Sequence
  ENSG00000064933_0 (sequence is synthesized)
agactcgctgccagcggattggctgcgagcagcgccaatctcacgttgcccccgggcgaggcgggactcagtgccgcgctctctgcacccgctctgccgcgcgcgtgcgtgctgggtgcg

SEQ ID NO: 45779 - DNA, 120 bp, Artificial Sequence
  ENSG00000064933_1 (sequence is synthesized)
ggtgcgggtgcggggttgggcctgcgcatcgggtgagacgctggctgcttgcggctagtggatggtaattgcctgcctcgcgctagcaggaagctgctctgttaaaagcgaaaatgaaac

SEQ ID NO: 45780 - DNA, 120 bp, Artificial Sequence
  ENSG00000064933_2 (sequence is synthesized)
aattgcctgcggcaacagttcgactcctttcaagttctcagatcatcacttcggtggtcagtgttgtaaaagagcttattgaaaactccttggatgctggtgccacaagcgtagatgtta

SEQ ID NO: 45781 - DNA, 120 bp, Artificial Sequence
  ENSG00000064933_3 (sequence is synthesized)
aactggagaactatggatttgataaaattgaggtgcgagataacggggagggtatcaaggctgttgatgcacctgtaatggcaatgaagtactacacctcaaaaataaatagtcatgaag

SEQ ID NO: 45782 - DNA, 120 bp, Artificial Sequence
  ENSG00000064933_4 (sequence is synthesized)
atcttgaaaatttgacaacttacggttttcgtggagaagccttggggtcaatttgttgtatagctgaggttttaattacaacaagaacggctgctgataattttagcacccagtatgttt

SEQ ID NO: 45783 - DNA, 120 bp, Artificial Sequence
  ENSG00000064933_5 (sequence is synthesized)
tagatggcagtggccacatactttctcagaaaccttcacatcttggtcaaggtacaactgtaactgctttaagattatttaagaatctacctgtaagaaagcagttttactcaactgcaa

SEQ ID NO: 45784 - DNA, 120 bp, Artificial Sequence
  ENSG00000064933_6 (sequence is synthesized)
aaaaatgtaaagatgaaataaaaaagatccaagatctcctcatgagctttggtatccttaaacctgacttaaggattgtctttgtacataacaaggcagttatttggcagaaaagcagag

SEQ ID NO: 45785 - DNA, 120 bp, Artificial Sequence
  ENSG00000064933_7 (sequence is synthesized)
tatcagatcacaagatggctctcatgtcagttctggggactgctgttatgaacaatatggaatcctttcagtaccactctgaagaatctcagatttatctcagtggatttcttccaaagt

SEQ ID NO: 45786 - DNA, 120 bp, Artificial Sequence
  ENSG00000064933_8 (sequence is synthesized)
gtgatgcagaccactctttcactagtctttcaacaccagaaagaagtttcatcttcataaacagtcgaccagtacatcaaaaagatatcttaaagttaatccgacatcattacaatctga

SEQ ID NO: 45787 - DNA, 120 bp, Artificial Sequence
  ENSG00000064933_9 (sequence is synthesized)
aatgcctaaaggaatctactcgtttgtatcctgttttctttctgaaaatcgatgttcctacagctgatgttgatgtaaatttaacaccagataaaagccaagtattattacaaaataagg

SEQ ID NO: 45788 - DNA, 120 bp, Artificial Sequence
  ENSG00000064933_10 (sequence is synthesized)
aatctgttttaattgctcttgaaaatctgatgacgacttgttatggaccattacctagtacaaattcttatgaaaataataaaacagatgtttccgcagctgacatcgttcttagtaaaa

SEQ ID NO: 45789 - DNA, 120 bp, Artificial Sequence
  ENSG00000064933_11 (sequence is synthesized)
cagcagaaacagatgtgctttttaataaagtggaatcatctggaaagaattattcaaatgttgatacttcagtcattccattccaaaatgatatgcataatgatgaatctggaaaaaaca

SEQ ID NO: 45790 - DNA, 120 bp, Artificial Sequence
  ENSG00000064933_12 (sequence is synthesized)
ctgatgattgtttaaatcaccagataagtattggtgactttggttatggtcattgtagtagtgaaatttctaacattgataaaaacactaagaatgcatttcaggacatttcaatgagta

SEQ ID NO: 45791 - DNA, 120 bp, Artificial Sequence
  ENSG00000064933_13 (sequence is synthesized)
gtggggaaaatgaggaagaagcaggtcttgaaaactcttcggaaatttctgcagatgagtggagcaggggaaatatacttaaaaattcagtgggagagaatattgaacctgtgaaaattt

SEQ ID NO: 45792 - DNA, 120 bp, Artificial Sequence
  ENSG00000064933_14 (sequence is synthesized)
tagtgcctgaaaaaagtttaccatgtaaagtaagtaataataattatccaatccctgaacaaatgaatcttaatgaagattcatgtaacaaaaaatcaaatgtaatagataataaatctg

SEQ ID NO: 45793 - DNA, 120 bp, Artificial Sequence
  ENSG00000064933_15 (sequence is synthesized)
gaaaagttacagcttatgatttacttagcaatcgagtaatcaagaaacccatgtcagcaagtgctctttttgttcaagatcatcgtcctcagtttctcatagaaaatcctaagactagtt

SEQ ID NO: 45794 - DNA, 120 bp, Artificial Sequence
  ENSG00000064933_16 (sequence is synthesized)
tagaggatgcaacactacaaattgaagaactgtggaagacattgagtgaagaggaaaaactgaaatatgaagagaaggctactaaagacttggaacgatacaatagtcaaatgaagagag

SEQ ID NO: 45795 - DNA, 120 bp, Artificial Sequence
  ENSG00000064933_17 (sequence is synthesized)
ccattgaacaggagtcacaaatgtcactaaaagatggcagaaaaaagataaaacccaccagcgcatggaatttggcccagaagcacaagttaaaaacctcattatctaatcaaccaaaac

SEQ ID NO: 45796 - DNA, 120 bp, Artificial Sequence
  ENSG00000064933_18 (sequence is synthesized)
ttgatgaactccttcagtcccaaattgaaaaaagaaggagtcaaaatattaaaatggtacagatccccttttctatgaaaaacttaaaaataaattttaagaaacaaaacaaagttgact

SEQ ID NO: 45797 - DNA, 120 bp, Artificial Sequence
  ENSG00000064933_19 (sequence is synthesized)
tagaagagaaggatgaaccttgcttgatccacaatctcaggtttcctgatgcatggctaatgacatccaaaacagaggtaatgttattaaatccatatagagtagaagaagccctgctat

SEQ ID NO: 45798 - DNA, 120 bp, Artificial Sequence
  ENSG00000064933_20 (sequence is synthesized)
ttaaaagacttcttgagaatcataaacttcctgcagagccactggaaaagccaattatgttaacagagagtctttttaatggatctcattatttagacgttttatataaaatgacagcag

SEQ ID NO: 45799 - DNA, 120 bp, Artificial Sequence
  ENSG00000064933_21 (sequence is synthesized)
atgaccaaagatacagtggatcaacttacctgtctgatcctcgtcttacagcgaatggtttcaagataaaattgataccaggagtttcaattactgaaaattacttggaaatagaaggaa

SEQ ID NO: 45800 - DNA, 120 bp, Artificial Sequence
  ENSG00000064933_22 (sequence is synthesized)
tggctaattgtctcccattctatggagtagcagatttaaaagaaattcttaatgctatattaaacagaaatgcaaaggaagtttatgaatgtagacctcgcaaagtgataagttatttag

SEQ ID NO: 45801 - DNA, 120 bp, Artificial Sequence
  ENSG00000064933_23 (sequence is synthesized)
agggagaagcagtgcgtctatccagacaattacccatgtacttatcaaaagaggacatccaagacattatctacagaatgaagcaccagtttggaaatgaaattaaagagtgtgttcatg

SEQ ID NO: 45802 - DNA, 120 bp, Artificial Sequence
  ENSG00000064933_24 (sequence is synthesized)
gtcgcccattttttcatcatttaacctatcttccagaaactacatgattaaatatgtttaagaagattagttaccattgaaattggttctgtcataaaacagcatgagtctggttttaaa

SEQ ID NO: 45803 - DNA, 120 bp, Artificial Sequence
  ENSG00000064933_25 (sequence is synthesized)
ttatctttgtattatgtgtcacatggttattttttaaatgaggattcactgacttgtttttatattgaaaaaagttccacgtattgtagaaaacgtaaataaactaatatagactattca

SEQ ID NO: 45804 - DNA, 120 bp, Artificial Sequence
  ENSG00000064933_26 (sequence is synthesized)
ggcaagacaacgaggatttgcgtagggggcgagcctctgaggccacttggctcttacggccacgcagggcgccgcagatgcagccggagcccgcttttccctctcaggacgacccctagg

SEQ ID NO: 45805 - DNA, 120 bp, Artificial Sequence
  ENSG00000064933_27 (sequence is synthesized)
ccgccagcagttccctaccgacgaaggcgactgtacagcgtccaccgcgttcgtgcccacttacccgccgccccactccgggccgccggctcgcagcaggaccagcccggctgctacggc

SEQ ID NO: 45806 - DNA, 120 bp, Artificial Sequence
  ENSG00000064933_28 (sequence is synthesized)
gggttgggcctgcgcatcgggtgagacgctggctgcttgcggctagtggatggcacacctgttgtccttaactgactttccgggtcatcagcacttcttcagaagtgttccttttccctc

SEQ ID NO: 45807 - DNA, 120 bp, Artificial Sequence
  ENSG00000064933_29 (sequence is synthesized)
ggctgcttgcggctagtggatggtaattgcctgcctcgcgctagcaggaaggtagtgtggtgtgactaacgggtatttattatatcctcgatggctcgagggccccgtcccctctactcg

SEQ ID NO: 45808 - DNA, 120 bp, Artificial Sequence
  ENSG00000064933_30 (sequence is synthesized)
tcctggtccgggcgcgaacgctatagggcagctaagggcgctccccgcggggcgggaagcgaagccgggcttgcgggcgcgcacacgtggaacgcgttttctgagcagctgctctgttaa

SEQ ID NO: 45809 - DNA, 120 bp, Artificial Sequence
  ENSG00000064933_31 (sequence is synthesized)
atacaaacattctttaccttttctgtcttaattgttggtttaaaaaaaaaaagttactcggtgaatacaaatatattgctttgggcttggtcctgataaaggctagttaacttccaagta

SEQ ID NO: 45810 - DNA, 120 bp, Artificial Sequence
  ENSG00000064933_32 (sequence is synthesized)
aacattcagcctttattctagccaccaatttcttaaatatttagaattgttctcaaaaggaactgtatgagagactggacacttccatggactagttactcctctgtaaaaactaagagt

SEQ ID NO: 45811 - DNA, 120 bp, Artificial Sequence
  ENSG00000064933_33 (sequence is synthesized)
attgatttggtaatagtggaaataaacgataccatcaagatatgattaaataatttaaaatctatttgttaattgatggaaaacttcaaacatgcataagaagttactgtacttatcact

SEQ ID NO: 45812 - DNA, 120 bp, Artificial Sequence
  ENSG00000064933_34 (sequence is synthesized)
cagtttcaataatttatcaattcattgctaaagttctttcatgtaataccctcgcccatttcttccctttctatattactttgaagcaaatacgtattgtttctacttgtaatgtagtta

SEQ ID NO: 45813 - DNA, 80 bp, Artificial Sequence
  ENSG00000064933_35 (sequence is synthesized)
ttacattttaattgatatcttatgttttttattttattttattttattttcctgagacagggtctcactctgtcacacag

SEQ ID NO: 45814 - DNA, 120 bp, Artificial Sequence
  ENSG00000064933_36 (sequence is synthesized)
agacagggttttgctgtgttgcccagctggcctcgaactcctgagcccaagcgatacacctgccttggcctcccagagtgctgagattacagatgtgagccactgtgttcagctgataag

SEQ ID NO: 45815 - DNA, 120 bp, Artificial Sequence
  ENSG00000064933_37 (sequence is synthesized)
ctgataagtgtttaaatttctctaaaaactatttacttataaaggtaaaaaagatctctttaggcttcagtttcacatatctcctttaatctttttttaataatttctagtgatgggatg

SEQ ID NO: 45816 - DNA, 120 bp, Artificial Sequence
  ENSG00000064933_38 (sequence is synthesized)
attaagagactattaaagctattacctctttagagtcatgttcaaaataattattagatctgaaaagggacttgtgggttttgttgttgttgtttatccttctgcttctccaatttgtgt

SEQ ID NO: 45817 - DNA, 120 bp, Artificial Sequence
  ENSG00000064933_39 (sequence is synthesized)
tgtaaattcatgtttaattttgtgttccctcattgcagtttatcaaagtacattctgtatattttctgtggtttttttccttcagttttaatattaaattattggattctttttttcaaa

SEQ ID NO: 45818 - DNA, 120 bp, Artificial Sequence
  ENSG00000064933_40 (sequence is synthesized)
gaaggtagagcaaaaatgatacaacacccaagaatcgtactagctaccatttctcttcctgtctttatcttggagttctgtccatgatcctaaattctctaagatatgaagagaaggcta

SEQ ID NO: 45819 - DNA, 120 bp, Artificial Sequence
  ENSG00000064933_41 (sequence is synthesized)
agtgaagaggaaaaactgaagacacttaatataaacacaaaatattatgttctggtgatctaatccagcagaaaatgagagtgaaattatacctccaatcatatacagatatgaagagaa

SEQ ID NO: 45820 - DNA, 120 bp, Artificial Sequence
  ENSG00000064961_0 (sequence is synthesized)
ggttggttggagcgtcgcgcagtcgggaggtccgggaaagtttctttggaggtccggcccggagcggccatgtcccacggccccaagcagcccggcgcggccgccgcgccggcgggcggc

SEQ ID NO: 45821 - DNA, 120 bp, Artificial Sequence
  ENSG00000064961_1 (sequence is synthesized)
aaggctccgggccagcatgggggcttcgtggtgactgtcaagcaagagcgcggcgagggtccacgcgcgggcgagaaggggtcccacgaggaggagccggtgaagaaacgcggctggccc

SEQ ID NO: 45822 - DNA, 120 bp, Artificial Sequence
  ENSG00000064961_2 (sequence is synthesized)
aagggcaagaagcggaagaagattctgccgaatgggcccaaggcaccggtcacgggctacgtgcgcttcctgaacgagcggcgcgagcagatccgcacgcgccacccggatctgcccttt

SEQ ID NO: 45823 - DNA, 120 bp, Artificial Sequence
  ENSG00000064961_3 (sequence is synthesized)
cccgagatcaccaagatgctgggcgccgagtggagcaagctgcagccaacggaaaagcagcggtacctggatgaggccgagagagagaagcagcagtacatgaaggagctgcgggcgtac

SEQ ID NO: 45824 - DNA, 120 bp, Artificial Sequence
  ENSG00000064961_4 (sequence is synthesized)
cagcagtctgaagcctataagatgtgcacggagaagatccaggagaagaagatcaagaaagaagactcgagctctgggctcatgaacactctcctgaatggacacaagggtggggactgc

SEQ ID NO: 45825 - DNA, 120 bp, Artificial Sequence
  ENSG00000064961_5 (sequence is synthesized)
gatggcttctccaccttcgatgttcccatcttcactgaagagttcttggaccaaaacaaagcgcgtgaggcggagcttcggcgcttgcggaagatgaatgtggccttcgaggagcagaac

SEQ ID NO: 45826 - DNA, 120 bp, Artificial Sequence
  ENSG00000064961_6 (sequence is synthesized)
gcatgagcagcgcgcgcgagcgtctggagcaggagctggcgctggaggagcggaggacgctggcgctgcagcagcagctccaggccgtgcgccaggcgctcaccgccagcttcgcctcac

SEQ ID NO: 45827 - DNA, 120 bp, Artificial Sequence
  ENSG00000064961_7 (sequence is synthesized)
tgccggtgccgggcacgggcgaaacgcccacgctgggcactctggacttctacatggcccggcttcacggagccatcgagcgcgaccccgcccagcacgagaagctcatcgtccgcatca

SEQ ID NO: 45828 - DNA, 120 bp, Artificial Sequence
  ENSG00000064961_8 (sequence is synthesized)
aggaaatcctggcccaggtcgccagcgagcacctgtgaggagtgggcgggcccacgatgcagaggagaagctgtgggcgcggccctgccacaccccaccccgtggacgagaggctggggg

SEQ ID NO: 45829 - DNA, 120 bp, Artificial Sequence
  ENSG00000064961_9 (sequence is synthesized)
tccaccctttggggcctggtcccatcctgcaccttgggggctccagcccccctaaaattaaatttctgcagcatccctttagctttcaatctccccagccccctgaacccggaaaaagca

SEQ ID NO: 45830 - DNA, 120 bp, Artificial Sequence
  ENSG00000064961_10 (sequence is synthesized)
ctcgctgcgcgatacacccagaagaacctcacagccgagggtgcccctcctcggaggacagccacgcgctacactggctctccgggccacccccaggacacagggcagacgaaacccacc

SEQ ID NO: 45831 - DNA, 120 bp, Artificial Sequence
  ENSG00000064961_11 (sequence is synthesized)
cccagcacacggcaggaccccccaaattactcactacggggggctgtgccataggccacacaggaagctgccttgtggggacttacctggggtgtcccccgcatgcctgtaccccagatg

SEQ ID NO: 45832 - DNA, 120 bp, Artificial Sequence
  ENSG00000064961_12 (sequence is synthesized)
ggtgggggccggctttgcccatcctgctctcctccagccgagggaccctggtgggggtggctccttctcactgctggatccggactttttaaataaaaacaagtaaaatttgtgttttaa

SEQ ID NO: 45833 - DNA, 120 bp, Artificial Sequence
  ENSG00000064961_13 (sequence is synthesized)
gggaaagtttctttggaggtgaaaacagccgcggaactccgggccctgagagggggcgggggtgcaggggtcccagggccgggccggggtctttcctggcccgggggaaaccggcccagg

SEQ ID NO: 45834 - DNA, 120 bp, Artificial Sequence
  ENSG00000064961_14 (sequence is synthesized)
cctcccggggggggcaatcgcccaacaaaggattcttggggcgcccgccctcgaggacttccctgcccctggatccggcccccccagcgctccgggcccggcatcccggggctctccatc

SEQ ID NO: 45835 - DNA, 120 bp, Artificial Sequence
  ENSG00000064961_15 (sequence is synthesized)
gcggggtaccccagttcgcggtctgccatcgggcagcccgggcgctactcacctccgcccgcgtccgtgttccaggtccggcccggagcggccatgtcccacggccccaagcagcccggc

SEQ ID NO: 45836 - DNA, 120 bp, Artificial Sequence
  ENSG00000064961_16 (sequence is synthesized)
tggaggcttctagaaccctgagtcagagccagtgctcgcccagatgtgtgcaagcaggggcggtgccactgcaccgtgggatcgctgttgattgtactcccaccggggtgtcccaggaga

SEQ ID NO: 45837 - DNA, 120 bp, Artificial Sequence
  ENSG00000064961_17 (sequence is synthesized)
caggtcgccaggtgtgtgccgggcgaggcggggcggggccggggttcaaggcccggatgtgcccgccctggggttccccaggtccgcgagggctgctgggtgggactccgcagcttacta

SEQ ID NO: 45838 - DNA, 120 bp, Artificial Sequence
  ENSG00000064961_18 (sequence is synthesized)
gagatcacctcccggaggggcctacctgcggtcgcccctgatgcaccagtgctaggatggccatggagaaccccgggccggcgggacccactcgggggcaccagaacttccctaaagctt

SEQ ID NO: 45839 - DNA, 120 bp, Artificial Sequence
  ENSG00000064961_19 (sequence is synthesized)
cggtatctgcatgggctcgcccggggggaaggtctcacccaatgggaccgttcgccgaggccttcattagcatgccgggggcggggaggggcggggcggccgacgggggcgggctgcggg

SEQ ID NO: 45840 - DNA, 120 bp, Artificial Sequence
  ENSG00000064961_20 (sequence is synthesized)
tcctctggaagctgagaccccgccccgtgccagctgccacgcccctgacaggtcctctgccactctaagtccaggccccgcccaccgcacaatgccagctctgcccactctaaggtcccg

SEQ ID NO: 45841 - DNA, 120 bp, Artificial Sequence
  ENSG00000064961_21 (sequence is synthesized)
cccacttccactccttgggggcggcaccctccccttggtcctgtgggcccgttctccagcagaaaaccacgcccaccaagcagaggccacgcccacaaccgaagtcaacgccaaccctgt

SEQ ID NO: 45842 - DNA, 120 bp, Artificial Sequence
  ENSG00000064961_22 (sequence is synthesized)
actcaaacctcggcccatagttcctcagatcccctcacccctggccagggatccctctaacccaccgtgtcccgactgctgaccgggccctacctccatcttttccgggttcttcctccc

SEQ ID NO: 45843 - DNA, 60 bp, Artificial Sequence
  ENSG00000064961_23 (sequence is synthesized)
ccgtgggaggggccggtgcgagcagttggggtcctgctctgtggggtgcgacctcagccc

SEQ ID NO: 45844 - DNA, 120 bp, Artificial Sequence
  ENSG00000064961_24 (sequence is synthesized)
agcagttggggtcctgctctgtggggtgcgacctcagcccaggcagggcctccctccgtggggcacagtcccgtgggttgggcgggggaaagatacatagccagacaggagtgaaggggg

SEQ ID NO: 45845 - DNA, 120 bp, Artificial Sequence
  ENSG00000064961_25 (sequence is synthesized)
ctcactcggtacagcgatgggggatgcccagacgcggggcactcaagtggggagctggagccggctgagcagcgctgacctagggtgcagggcgtggtccctggaggcctgggaggctga

SEQ ID NO: 45846 - DNA, 120 bp, Artificial Sequence
  ENSG00000064961_26 (sequence is synthesized)
acatgaaggagctgcgggcgtaccagcagtctgaagcctataagatgtgcacggagaagatccaggagaagaagatcaagaaaggtgggaggggtcgggcgcggtggctcacgcctgtca

SEQ ID NO: 45847 - DNA, 120 bp, Artificial Sequence
  ENSG00000064961_27 (sequence is synthesized)
ccccatccccgcccatacgcgttaggccccgcccatgcccctctgagccctgccccagtacgccaggcccccctcccaacgacgcagcccggttctgcagccggtgaagaaacgcggctg

SEQ ID NO: 45848 - DNA, 120 bp, Artificial Sequence
  ENSG00000064989_0 (sequence is synthesized)
agaacaacctctctctctccagcagagagtgtcacctcctgctttaggaccatcaagctctgctaactgaatctcatcctaattgcaggatcacattgcaaagctttcactctttcccac

SEQ ID NO: 45849 - DNA, 120 bp, Artificial Sequence
  ENSG00000064989_1 (sequence is synthesized)
cttgcttgtgggtaaatctcttctgcggaatctcagaaagtaaagttccatcctgagaatatttcacaaagaatttccttaagagctggactgggtcttgacccctgaatttaagaaatt

SEQ ID NO: 45850 - DNA, 120 bp, Artificial Sequence
  ENSG00000064989_2 (sequence is synthesized)
cttaaagacaatgtcaaatatgatccaagagaaaatgtgatttgagactggagacaattgtgcatatcgtctaataataaaaacccatactagcctatagaaaacaatatttgaaagatt

SEQ ID NO: 45851 - DNA, 120 bp, Artificial Sequence
  ENSG00000064989_3 (sequence is synthesized)
gctaccactaaaaagaaaactactacaacttgacaagactgctgcaaacttcaatttgtcaaccacaacttgacaaggttgctataaaacaagattgctacaacttctagtttatgttat

SEQ ID NO: 45852 - DNA, 120 bp, Artificial Sequence
  ENSG00000064989_4 (sequence is synthesized)
acagcatatttcattttggcttaatgatggagaaaaagtgtaccctgtattttctggttctcttgcctttttttatgattcttgttacagcagaattagaagagagtcctgaggactcaa

SEQ ID NO: 45853 - DNA, 120 bp, Artificial Sequence
  ENSG00000064989_5 (sequence is synthesized)
ttcagttgggagttactagaaataaaatcatgacagctcaatatgaatgttaccaaaagattatgcaagaccccattcaacaagcagaaggcgtttactgcaacagaacctgggatggat

SEQ ID NO: 45854 - DNA, 120 bp, Artificial Sequence
  ENSG00000064989_6 (sequence is synthesized)
ggctctgctggaacgatgttgcagcaggaactgaatcaatgcagctctgccctgattactttcaggactttgatccatcagaaaaagttacaaagatctgtgaccaagatggaaactggt

SEQ ID NO: 45855 - DNA, 120 bp, Artificial Sequence
  ENSG00000064989_7 (sequence is synthesized)
ttagacatccagcaagcaacagaacatggacaaattatacccagtgtaatgttaacacccacgagaaagtgaagactgcactaaatttgttttacctgaccataattggacacggattgt

SEQ ID NO: 45856 - DNA, 120 bp, Artificial Sequence
  ENSG00000064989_8 (sequence is synthesized)
ctattgcatcactgcttatctcgcttggcatattcttttatttcaagagcctaagttgccaaaggattaccttacacaaaaatctgttcttctcatttgtttgtaactctgttgtaacaa

SEQ ID NO: 45857 - DNA, 120 bp, Artificial Sequence
  ENSG00000064989_9 (sequence is synthesized)
tcattcacctcactgcagtggccaacaaccaggccttagtagccacaaatcctgttagttgcaaagtgtcccagttcattcatctttacctgatgggctgtaattacttttggatgctct

SEQ ID NO: 45858 - DNA, 120 bp, Artificial Sequence
  ENSG00000064989_10 (sequence is synthesized)
gtgaaggcatttacctacacacactcattgtggtggccgtgtttgcagagaagcaacatttaatgtggtattattttcttggctggggatttccactgattcctgcttgtatacatgcca

SEQ ID NO: 45859 - DNA, 120 bp, Artificial Sequence
  ENSG00000064989_11 (sequence is synthesized)
ttgctagaagcttatattacaatgacaattgctggatcagttctgatacccatctcctctacattatccatggcccaatttgtgctgctttactggtgaatctttttttcttgttaaata

SEQ ID NO: 45860 - DNA, 120 bp, Artificial Sequence
  ENSG00000064989_12 (sequence is synthesized)
ttgtacgcgttctcatcaccaagttaaaagttacacaccaagcggaatccaatctgtacatgaaagctgtgagagctactcttatcttggtgccattgcttggcattgaatttgtgctga

SEQ ID NO: 45861 - DNA, 120 bp, Artificial Sequence
  ENSG00000064989_13 (sequence is synthesized)
ttccatggcgacctgaaggaaagattgcagaggaggtatatgactacatcatgcacatccttatgcacttccagggtcttttggtctctaccattttctgcttctttaatggagaggttc

SEQ ID NO: 45862 - DNA, 120 bp, Artificial Sequence
  ENSG00000064989_14 (sequence is synthesized)
aagcaattctgagaagaaactggaatcaatacaaaatccaatttggaaacagcttttccaactcagaagctcttcgtagtgcgtcttacacagtgtcaacaatcagtgatggtccaggtt

SEQ ID NO: 45863 - DNA, 120 bp, Artificial Sequence
  ENSG00000064989_15 (sequence is synthesized)
atagtcatgactgtcctagtgaacacttaaatggaaaaagcatccatgatattgaaaatgttctcttaaaaccagaaaatttatataattgaaaatagaaggatggttgtctcactgttt

SEQ ID NO: 45864 - DNA, 120 bp, Artificial Sequence
  ENSG00000064989_16 (sequence is synthesized)
tgtgcttctcctaactcaaggacttggacccatgactctgtagccagaagacttcaatattaaatgactttttgaatgtcataaagaagagccttcacatgaaattagtagtgtgttgat

SEQ ID NO: 45865 - DNA, 120 bp, Artificial Sequence
  ENSG00000064989_17 (sequence is synthesized)
aagagtgtaacatccagctctatgtgggaaaaaagaaatcctggtttgtaatgtttgtcagtaaatactcccactatgcctgatgtgacgctactaacctgacatcaccaagtgtggaat

SEQ ID NO: 45866 - DNA, 120 bp, Artificial Sequence
  ENSG00000064989_18 (sequence is synthesized)
tggagaaaagcacaatcaacttttctgagctggtgtaagccagttccagcacaccattgcatgaattcacaaacaaatggctgtaaaactaaacatacatgttgggcatgattctaccct

SEQ ID NO: 45867 - DNA, 120 bp, Artificial Sequence
  ENSG00000064989_19 (sequence is synthesized)
tattgccccaagagacctagctaaggtctataaacatgaagggaaaattagcttttagttttaaaactctttatcccatcttgattggggcagttgactttttttttgcccagagtgccg

SEQ ID NO: 45868 - DNA, 120 bp, Artificial Sequence
  ENSG00000064989_20 (sequence is synthesized)
tagtcctttttgtaactaccctctcaaatggacaataccagaagtgaattatccctgctggctttcttttctctatgaaaagcaactgagtacaattgttatgatctactcatttgctga

SEQ ID NO: 45869 - DNA, 120 bp, Artificial Sequence
  ENSG00000064989_21 (sequence is synthesized)
cacatcagttatatcttgtggcatatccattgtggaaactggatgaacaggatgtataatatgcaatcctacttctatatcattaggaaaacatcttagttgatgctacaaaacaccttg

SEQ ID NO: 45870 - DNA, 120 bp, Artificial Sequence
  ENSG00000064989_22 (sequence is synthesized)
tcaacctcttcctgtcttaccaaacagtgggagggaattcctagctgtaaatataaattttgtcccttccatttctactgtataaacaaattagcaatcattttatataaagaaaatcaa

SEQ ID NO: 45871 - DNA, 120 bp, Artificial Sequence
  ENSG00000064989_23 (sequence is synthesized)
tgaaggatttcttattttcttggaattttgtaaaaagaaattgtgaaaaatgagcttgtaaatactccattattttattttatagtctcaaatcaaatacatacaacctatgtaattttt

SEQ ID NO: 45872 - DNA, 120 bp, Artificial Sequence
  ENSG00000064989_24 (sequence is synthesized)
aaagcaaatatataatgcaacaatgtgtgtatgttaatatctgatactgtatctgggctgattttttaaataaaatagagtctggaatgctatatttggtaaatattttaaagacaacca

SEQ ID NO: 45873 - DNA, 120 bp, Artificial Sequence
  ENSG00000064989_25 (sequence is synthesized)
taactcataccttaataataggtgtgtttgacatatttcttttttcattttgacaatgaactcacattctaatccagaaattttaaacaactactgtgataaataccaatctgctacttt

SEQ ID NO: 45874 - DNA, 120 bp, Artificial Sequence
  ENSG00000064989_26 (sequence is synthesized)
tatagattttaccccattaaaatattactttactgacttttactatgtgaagatatatagctttggaaatgtcccaggctattcaagaaatataaaaaactagaaggatactatatatac

SEQ ID NO: 45875 - DNA, 120 bp, Artificial Sequence
  ENSG00000064989_27 (sequence is synthesized)
catatacaatgctttaatattttaatagagctactgtatataatacaaattagggaaatacttgaatatatcattgagaaaaaattattgtcagatcttactgaattattgtcagacttt

SEQ ID NO: 45876 - DNA, 120 bp, Artificial Sequence
  ENSG00000064989_28 (sequence is synthesized)
attaaataaagatagaagaaaaccttgctaatgaattaaagtgaaatttgcatgggattcagtttctctaatgttattttccgctgaaatctctaaagaacaagaatgacttcaattagt

SEQ ID NO: 45877 - DNA, 120 bp, Artificial Sequence
  ENSG00000064989_29 (sequence is synthesized)
aaaagtcaattttgggaaaagtcatgggtatctgttttttaagtgtgtcaatctgattaaaatggatgaaacaaattactcatcataagttgtttcttaagctgtcaatatgtcaataga

SEQ ID NO: 45878 - DNA, 120 bp, Artificial Sequence
  ENSG00000064989_30 (sequence is synthesized)
tggtgagttcagaacttatttcaaattgctaagacaaattatctaaattcgtaagaattaacatatagaatggtctggtcagtacatttataatttatctatgcatgaaaaagtattgtt

SEQ ID NO: 45879 - DNA, 120 bp, Artificial Sequence
  ENSG00000064989_31 (sequence is synthesized)
ttgtttgaaacatgaatttcatagcaagctgccatagaaaggaacgcaggctgttctagaccttcaactgcctaaattatacaaaaattcattttaataaactcaattattagctattta

SEQ ID NO: 45880 - DNA, 120 bp, Artificial Sequence
  ENSG00000064989_32 (sequence is synthesized)
ttattcaaagacccatatttaaatcctttgctgaccatgttgacatatatcagccttcttctagacaaactgtcaactctcaaccatcttgacagtagaagtgacagtaaaaaatgttga

SEQ ID NO: 45881 - DNA, 120 bp, Artificial Sequence
  ENSG00000064989_33 (sequence is synthesized)
atgatcagagattatattaaaataaacatgtaattttcaagtatttttgttgtgcttttataatattaattctagatcagatttattttatagccagggtttgtctgttgtagagtcttg

SEQ ID NO: 45882 - DNA, 120 bp, Artificial Sequence
  ENSG00000064989_34 (sequence is synthesized)
aggcgtagcagtcattcatgattaatcactgttagttttgtacccatatatttttagaatagttttaaatgttagatttctcaaaagctaaatgctacttaatatctttgtatcatactc

SEQ ID NO: 45883 - DNA, 120 bp, Artificial Sequence
  ENSG00000064989_35 (sequence is synthesized)
ataaagcaaagtaaatctgacactttttttaaagcaaacttctttgctgtcaaaaaaataaatttggggaaatttctagcttttaaaatgtagatctgcattttactgtgattacttgtg

SEQ ID NO: 45884 - DNA, 120 bp, Artificial Sequence
  ENSG00000064989_36 (sequence is synthesized)
aaagtcatattttaattttctaaattctaatttgtcattttatttcctaaagttaatttccaatgcatttattcataaaatattcattctggaatgcagtgtttgtttaaatgtaatcca

SEQ ID NO: 45885 - DNA, 120 bp, Artificial Sequence
  ENSG00000064989_37 (sequence is synthesized)
atgtatatagaattagtggtggctgtagtgctgtatttattgcttataattttttttaaatgtgaacttacttttaattttctcttggttttaatctgctagtagaaaccactagttatc

SEQ ID NO: 45886 - DNA, 120 bp, Artificial Sequence
  ENSG00000064989_38 (sequence is synthesized)
attctgatcaattataacaatttatgttatgcctagagtatatctctattttttgattgtatgaaaatattaaagttatgagttaaagtttattttcactgatatttactacagtgccaa

SEQ ID NO: 45887 - DNA, 120 bp, Artificial Sequence
  ENSG00000064989_39 (sequence is synthesized)
gatatttactacagtgccaaataatctaatttataaacataattcttacagtaatcaatgggatacttctcaaaattaacaaatctcttaacaaaatatatcttttgccctctttaaagt

SEQ ID NO: 45888 - DNA, 120 bp, Artificial Sequence
  ENSG00000064989_40 (sequence is synthesized)
cttcagtaaaccagtaaatgaattcaataaaccaattaagaaaaagtcatgatttgtttttcaaactaaaaaaatccaactatactacaatggatgcaaactccttcttatgctgaaaga

SEQ ID NO: 45889 - DNA, 120 bp, Artificial Sequence
  ENSG00000064989_41 (sequence is synthesized)
aagaagaaaaaggatgtctcaaaataagaaaatgttcagaaattcatctcctttatctactatatttcattttgtagttttgtttaaatattagaaagaaaaataagtatttaaaggtaa

SEQ ID NO: 45890 - DNA, 120 bp, Artificial Sequence
  ENSG00000064989_42 (sequence is synthesized)
taaagagggcatattcatggctctcacacaaatataaaatgaaaatgtttcaaagatttcgtttaactcattaattaatgaaggaacaagtaagatgttacaaaaattcaaaggagaatt

SEQ ID NO: 45891 - DNA, 120 bp, Artificial Sequence
  ENSG00000064989_43 (sequence is synthesized)
caaaatatcacactatatgagaatattaaaaatgttgaaataaatttataaataagtgcaaaaccactctatccttagggcaataatcagttgcattccacttaataactaatttttatt

SEQ ID NO: 45892 - DNA, 120 bp, Artificial Sequence
  ENSG00000064989_44 (sequence is synthesized)
tttatgatcaataataatgtacatcattttctgttttctggagaaaatgcccatttaaaacacttgtgtttttttcttataatctctcctccttgtgattatactaatctcaaagaaaga

SEQ ID NO: 45893 - DNA, 120 bp, Artificial Sequence
  ENSG00000064989_45 (sequence is synthesized)
atattcttgattaaaaatattgctagtttaataaggtttggcctattgttgagataggtacatgagagtgttaattacaatatagacctcctcaagttggttttacaaatctagaaccat

SEQ ID NO: 45894 - DNA, 120 bp, Artificial Sequence
  ENSG00000064989_46 (sequence is synthesized)
agtgcactttttaacagcttcattgagatatacttgacatatcatataatacttcatattcaaagcagtttttagtatattagtagagtatattttaatacatccatagagacacgctac

SEQ ID NO: 45895 - DNA, 120 bp, Artificial Sequence
  ENSG00000064989_47 (sequence is synthesized)
catcaccaatttcattacatttttatgaccttgagaagaaacagtgtatcctttagccatcacttctctatccctctatctctactttcatttcagctataaacatcactaatttacatt

SEQ ID NO: 45896 - DNA, 120 bp, Artificial Sequence
  ENSG00000064989_48 (sequence is synthesized)
ctgtctcaacagatttccctattctagactttcatatgattgtaatcatatagtatgtgaccttttgtgactaaatgatttcacttatgtttttaaaattcattcatgttttggcatgta

SEQ ID NO: 45897 - DNA, 120 bp, Artificial Sequence
  ENSG00000064989_49 (sequence is synthesized)
tcaatgtttccttttattccattgggtgaacataccacattttatttattcatttgtctgttgatggatatgtttgttttgcttttaccttttggttattataaataatatacctataaa

SEQ ID NO: 45898 - DNA, 120 bp, Artificial Sequence
  ENSG00000064989_50 (sequence is synthesized)
acacagcctatgatctctctctgttcaggctgcttcttgctcttgtctcacaataagaaaggagtgctgctttcctggggtatgctatttgagaaagaaagtaacctaacactaactgca

SEQ ID NO: 45899 - DNA, 120 bp, Artificial Sequence
  ENSG00000064989_51 (sequence is synthesized)
ctactttcaggtcttgacccctgaatttaagaaattcttaaagacaatgtcaaatatgatccaagagaaaatgtgatttgagactggagacaattgtgcatatcgtctaataataaaaac

SEQ ID NO: 45900 - DNA, 120 bp, Artificial Sequence
  ENSG00000064989_52 (sequence is synthesized)
gggcgttaggaaaaactatacagtgcttggtgtaaacttttggatggtaaagccttatctgccttttcgactgggacaatgggtcctacgatgatacaccaaccacttgtgctaccatct

SEQ ID NO: 45901 - DNA, 120 bp, Artificial Sequence
  ENSG00000064989_53 (sequence is synthesized)
caaagaatttccttaagagctggactggggtcctacgatgatacaccaaccacttgtgctaccatctgtcaaaactttggatggccctactttcaggcggagtcttgctctgtcgcccag

SEQ ID NO: 45902 - DNA, 80 bp, Artificial Sequence
  ENSG00000064989_54 (sequence is synthesized)
tggctgcttatagtattttgaagtgttgcttaatgaatcaattttatgaatgatcatcttatcatctctttaaaatttta

SEQ ID NO: 45903 - DNA, 120 bp, Artificial Sequence
  ENSG00000064989_55 (sequence is synthesized)
attttatgaatgatcatcttatcatctctttaaaattttatagcacactgtcctatttctcagagttcaaattaggtatactcccatgtgtatgagagacacaattaatgacttgtaggt

SEQ ID NO: 45904 - DNA, 120 bp, Artificial Sequence
  ENSG00000064989_56 (sequence is synthesized)
cataattaaagattcaaaagattcatttttgttaatagaatgtttacaaatacttattctcattttgctgtataatgagcagtgtctccaattaaagtaattaaaattcaaccaaatgag

SEQ ID NO: 45905 - DNA, 120 bp, Artificial Sequence
  ENSG00000064989_57 (sequence is synthesized)
tgcatgtaagtattgggaaattaaattttctcatggtaaaatttaataaaaactaaaatattaacttattaattactgaattaaataaactgactcattgttttctgtctataacaacac

SEQ ID NO: 45906 - DNA, 120 bp, Artificial Sequence
  ENSG00000064989_58 (sequence is synthesized)
gtattttggttatatttttctcaagatcgtctaataataaaaacccatactagcctatagaaaacaatatttgaaagattgctaccactaaaaagaaaactactacaacttgacaagact

SEQ ID NO: 45907 - DNA, 120 bp, Artificial Sequence
  ENSG00000064995_0 (sequence is synthesized)
aagatcctggcctgtgcagctcgggtttccgagcttctgcctcaggcatctccgcgatctcctctcccctccaatcctatccgtgatggacgatgcccacgagtcgccctccgacaaagg

SEQ ID NO: 45908 - DNA, 120 bp, Artificial Sequence
  ENSG00000064995_1 (sequence is synthesized)
tggagagacaggggagtcggatgagacggccgctgtgcccggggacccgggggctaccgacaccgatggaatcccagaggaaactgacggagacgcagatgtggacttgaaagaagctgc

SEQ ID NO: 45909 - DNA, 120 bp, Artificial Sequence
  ENSG00000064995_2 (sequence is synthesized)
agcggaggaaggcgagctcgagagtcaggatgtctcagatttaacaacagttgaaagggaagactcatcattacttaatcctgcagccaaaaaactgaaaatagataccaaagaaaagaa

SEQ ID NO: 45910 - DNA, 120 bp, Artificial Sequence
  ENSG00000064995_3 (sequence is synthesized)
agagaaaaagcagaaagtagatgaagatgagattcagaagatgcaaatcctggtttcttctttttctgaggagcagctgaaccgttatgaaatgtatcgccgctcagctttccctaaggc

SEQ ID NO: 45911 - DNA, 120 bp, Artificial Sequence
  ENSG00000064995_4 (sequence is synthesized)
agccatcaaaaggctgatccagtccatcactggcacctctgtgtctcagaatgttgttattgctatgtctggtatttccaaggttttcgtcggggaggtggtagaagaagcactggatgt

SEQ ID NO: 45912 - DNA, 120 bp, Artificial Sequence
  ENSG00000064995_5 (sequence is synthesized)
gtgtgagaagtggggagaaatgccaccactacaacccaaacatatgagggaagccgttagaaggttaaagtcaaaaggacagatccctaactcgaagcacaaaaaaatcatcttcttcta

SEQ ID NO: 45913 - DNA, 120 bp, Artificial Sequence
  ENSG00000064995_6 (sequence is synthesized)
gaccaaagtctagaaaggcctatgttactgacggaagaagtattggttccagacttcctataagactgtctgcattggtgctttagtatctcaggcctccaaggattccatgatgatttt

SEQ ID NO: 45914 - DNA, 120 bp, Artificial Sequence
  ENSG00000064995_7 (sequence is synthesized)
cctgattgatacttgccttgactaaattttgggacctcttggggcattttgaagtatttaactgtcttgaccagttggaagaagatacgtgggccataagcatcttctggacaggggaac

SEQ ID NO: 45915 - DNA, 120 bp, Artificial Sequence
  ENSG00000064995_8 (sequence is synthesized)
tgctttcagagagaaaacctttccaagagagttttgttttgttttggtttcgttttgtttgagatagggtcttgctctatcacctaggctggagtgcagcggcatgactgcagccttgaa

SEQ ID NO: 45916 - DNA, 120 bp, Artificial Sequence
  ENSG00000064995_9 (sequence is synthesized)
ctcctgggcttaagtgaccctcccacctcagtctcctgagtagctaggactacaggcacacactactgtgcccagctaacttatttttattttttatggagatggggtcttgctttgttg

SEQ ID NO: 45917 - DNA, 120 bp, Artificial Sequence
  ENSG00000064995_10 (sequence is synthesized)
cccaggctggtcgtgaactcctggcttcaagcagtcctcctgcctcagcctcctaaagtgctgagggctttaatggtttcacattgaagcctgaagttgctaagacttaggttgtttctt

SEQ ID NO: 45918 - DNA, 120 bp, Artificial Sequence
  ENSG00000064995_11 (sequence is synthesized)
atatctggttttaagtagatgaaacaaccagaaacttttacttgtgatactctaccatgaaggatgcggtaatggcaggaatagcagaataattggtgcttgtaaacatttaagattctc

SEQ ID NO: 45919 - DNA, 120 bp, Artificial Sequence
  ENSG00000064995_12 (sequence is synthesized)
ctgtggattttggtgagtgatcattaaactgttttccaacttgccctaggtgtattcattttctgtctagctggttggaatgggaagttgatcattcttttttggtgttccaatacaact

SEQ ID NO: 45920 - DNA, 120 bp, Artificial Sequence
  ENSG00000064995_13 (sequence is synthesized)
ggttttggctattttgtgaaaatttgagcactttttctagtagaaccattaaaattttatctcataaaagagtacttcaagcactgttaaaaacagtgtaataattccccccccaagact

SEQ ID NO: 45921 - DNA, 120 bp, Artificial Sequence
  ENSG00000064995_14 (sequence is synthesized)
gagatgaaaataaacaatataaaagcccatatatttcagattcttatcaacggatatacaacaatcattatggtttaatacatttaatttgttttttcaggtggttcacagaaccagtac

SEQ ID NO: 45922 - DNA, 120 bp, Artificial Sequence
  ENSG00000064999_0 (sequence is synthesized)
agtgacgcgctcgtggggaaaaggcagggagggggtggtgtccccagccggtttggggggtgcgttgcccggagacggaaagtttgggagcccgagcaggctcggctgcagcctcgggga

SEQ ID NO: 45923 - DNA, 120 bp, Artificial Sequence
  ENSG00000064999_1 (sequence is synthesized)
gggggtccagcgggtggcggccctggggatggggaaggagcaggagctgctggaggcggcccgcaccgggcacctcccggcggtggagaagctgctgtccgggaagcggctctcctcagg

SEQ ID NO: 45924 - DNA, 120 bp, Artificial Sequence
  ENSG00000064999_2 (sequence is synthesized)
gcggcggcggcggtggctctgggggcggcggcggcggcagcggcggcggcggcggcggcctcggctcttccagccaccccctctccagtctgctcagcatgtggagagggccaaatgtga

SEQ ID NO: 45925 - DNA, 120 bp, Artificial Sequence
  ENSG00000064999_3 (sequence is synthesized)
aaatgtgaactgtgttgacagcactggctacacacccctgcaccatgctgctttgaatggccataaggatgtggtcgaggttcttctgaggaacgatgcgctgaccaacgtggctgactc

SEQ ID NO: 45926 - DNA, 120 bp, Artificial Sequence
  ENSG00000064999_4 (sequence is synthesized)
aaaaggctgctaccctctgcatttggcagcctggaaaggagatgcccagatagtgcggttgctcatccatcaagggccttcacacaccagagtcaatgaacagaacaatgacaacgagac

SEQ ID NO: 45927 - DNA, 120 bp, Artificial Sequence
  ENSG00000064999_5 (sequence is synthesized)
agccctgcattgtgcagcgcagtatggccacacagaggtggtgaaggtgctcttagaggagctgacggaccccaccatgcgcaacaacaaattcgagacccctttggacctggcagcact

SEQ ID NO: 45928 - DNA, 120 bp, Artificial Sequence
  ENSG00000064999_6 (sequence is synthesized)
gtacgggcgactggaggtggtgaaaatgctccttaatgcacaccccaacctcctgagctgcaacactaagaagcacacccctctgcacttggcagcaaggaatggccacaaagccgtggt

SEQ ID NO: 45929 - DNA, 120 bp, Artificial Sequence
  ENSG00000064999_7 (sequence is synthesized)
ccaggtcctcctcgatgctggcatggacagcaactaccagacggagatgggcagtgctttgcatgaggctgctttgtttggcaagaccgatgtggtgcaaatcctgctggctgcaggaac

SEQ ID NO: 45930 - DNA, 120 bp, Artificial Sequence
  ENSG00000064999_8 (sequence is synthesized)
tgacgtcaacataaaagataaccatggactgactgccctagacactgttcgggaactgccttctcaaaagagccagcaaatagcagcattaattgaagatcacatgactggaaaaagaag

SEQ ID NO: 45931 - DNA, 120 bp, Artificial Sequence
  ENSG00000064999_9 (sequence is synthesized)
tacaaaagaagtagataaaacccccccaccccagccacctctcatctccagtatggactccatatcacagaagtctcagggtgacgtggagaaagcagtgactgaactgattatagattt

SEQ ID NO: 45932 - DNA, 120 bp, Artificial Sequence
  ENSG00000064999_10 (sequence is synthesized)
tgatgcaaatgctgaagaagagggtccctacgaagctctgtataatgccatctcctgccattcgttggacagcatggccagcgggcgatcatctgaccaagactccacgaacaaggaggc

SEQ ID NO: 45933 - DNA, 120 bp, Artificial Sequence
  ENSG00000064999_11 (sequence is synthesized)
tgaggcagcaggagtgaaacctgctggagtgaggcctagggaacgtccaccacctccagcaaagccaccgcccgatgaagaggaagaagaccacatagataagaagtattttcccttgac

SEQ ID NO: 45934 - DNA, 120 bp, Artificial Sequence
  ENSG00000064999_12 (sequence is synthesized)
agcttctgaggttctgtccatgagacctaggattcatgggagtgcagcccgggaagaagacgaacacccttatgaactgttgttaacagcagagacaaagaaagtggtgttggtggatgg

SEQ ID NO: 45935 - DNA, 120 bp, Artificial Sequence
  ENSG00000064999_13 (sequence is synthesized)
aaaaacaaaagaccacaggcggagcagcagcagccggagccaggactctgcggaggggcaggacgggcaggtcccagagcagttctcaggcctcctccacggctcctccccggtgtgcga

SEQ ID NO: 45936 - DNA, 120 bp, Artificial Sequence
  ENSG00000064999_14 (sequence is synthesized)
ggtggggcaggaccctttccagctgctctgtaccgctggccagagccatccagacgggtccccccagcagggcgcctgccacaaggccagcatgcagctggaggagacgggtgtgcatgc

SEQ ID NO: 45937 - DNA, 120 bp, Artificial Sequence
  ENSG00000064999_15 (sequence is synthesized)
tcctggagcctcccagcccagtgccctggaccagagcaagagagtgggctacctcacaggcctgcccaccaccaacagccgctcgcaccctgaaactttgactcacacagcatctccgca

SEQ ID NO: 45938 - DNA, 120 bp, Artificial Sequence
  ENSG00000064999_16 (sequence is synthesized)
ccctggtggtgctgaggaaggagaccggagtggggccaggagccgagcgcctcccactagcaaacccaaagctgaactcaaactcagccgcagcttgtccaagtctgactctgatctcct

SEQ ID NO: 45939 - DNA, 120 bp, Artificial Sequence
  ENSG00000064999_17 (sequence is synthesized)
gacctgctcacccacagaggacgctaccatggggagtcggagtgagtccttatccaactgcagcattgggaagaaaaggctagagaagtcaccctccttcgcctcggagtgggatgagat

SEQ ID NO: 45940 - DNA, 120 bp, Artificial Sequence
  ENSG00000064999_18 (sequence is synthesized)
tgagaaaatcatgagttctattggagaagggattgacttttctcaggaacggcagaagatctcaggtttacggacgctggagcagagtgtcggggagtggctggagtcgattgggctgca

SEQ ID NO: 45941 - DNA, 120 bp, Artificial Sequence
  ENSG00000064999_19 (sequence is synthesized)
gcagtatgagagcaagttgcttctgaatggctttgacgatgtccacttcctggggtctaatgtgatggaagagcaggacctgcgggacatcggcatcagcgacccacagcaccggcggaa

SEQ ID NO: 45942 - DNA, 120 bp, Artificial Sequence
  ENSG00000064999_20 (sequence is synthesized)
gctgctccaggcggcacgctccctacccaaggtgaaggctctgggttatgacgggaacagcccccctagcgtgccctcctggctggactccctggggctgcaggactacgtccattcctt

SEQ ID NO: 45943 - DNA, 120 bp, Artificial Sequence
  ENSG00000064999_21 (sequence is synthesized)
cttgtcaagtggttacagctccattgacaccgtgaagaacctctgggagctagagctcgtcaatgtcctgaaggtccagctgctcggccatcgcaagcgcatcatcgcctccctcgcaga

SEQ ID NO: 45944 - DNA, 120 bp, Artificial Sequence
  ENSG00000064999_22 (sequence is synthesized)
cagaccgtacgaggagccgccccagaagccccccagattctcccagctgaggtgccaagatttgctctcccagacgtcatccccactgagtcagaatgattcctgcactgggcggtcggc

SEQ ID NO: 45945 - DNA, 120 bp, Artificial Sequence
  ENSG00000064999_23 (sequence is synthesized)
agatctgctgctgcctccaggggacacaggcaggaggcgccatgacagtctccatgaccctgcggcaccctcccgagcggagcgcttcaggatccaggaggagcaccgtgaggccaagct

SEQ ID NO: 45946 - DNA, 120 bp, Artificial Sequence
  ENSG00000064999_24 (sequence is synthesized)
gaccctgcggcccccgagcctggcagccccctacgccccagtgcagagttggcaacaccagccagagaaactcatcttcgagtcctgtggttatgaagccaattatctgggctccatgct

SEQ ID NO: 45947 - DNA, 120 bp, Artificial Sequence
  ENSG00000064999_25 (sequence is synthesized)
gatcaaagatctgcgagggacagaatccacgcaagacgcctgtgccaagatgcggaaatctacggagcacatgaagaagatccccaccatcatcctgtccatcacatacaaaggtgtcaa

SEQ ID NO: 45948 - DNA, 120 bp, Artificial Sequence
  ENSG00000064999_26 (sequence is synthesized)
acctgcagaccagccaccactattgccatgtgttcagcaccgtggatgtgaacctgacctacgagatcatcctgacgctggggcaggccttcgaagtggcctatcagttggccctgcagg

SEQ ID NO: 45949 - DNA, 120 bp, Artificial Sequence
  ENSG00000064999_27 (sequence is synthesized)
cccagaagtccagggcgacgggcgcctctgcagctgagatgattgaaacaaaatcttccaaaccggtgcctaagcctcgggtcggcgtgaggaaatccgcactggaaccacctgatatgg

SEQ ID NO: 45950 - DNA, 120 bp, Artificial Sequence
  ENSG00000064999_28 (sequence is synthesized)
accaagatgcccaatcccatgccagtgtctcctgggttgtggaccccaaaccagactctaagcggagcctcagcaccaactgagccactgaggaaccacactgtgctgcggaaacataga

SEQ ID NO: 45951 - DNA, 120 bp, Artificial Sequence
  ENSG00000064999_29 (sequence is synthesized)
cgtgggggcataggctcccactgccaccaccgccatcgcctcacctgcagctctgaagacccaggcctcacctccgcctgcaggacctcctcttggccacttggcctgggcctgccacca

SEQ ID NO: 45952 - DNA, 120 bp, Artificial Sequence
  ENSG00000064999_30 (sequence is synthesized)
ccacgtcctgcagaacgagccctgccttggctgtggagaagcactccaggccgctagcagatgggactggcattccagagggtcaagaagtgacttgttcagaacacattgtttttaaca

SEQ ID NO: 45953 - DNA, 120 bp, Artificial Sequence
  ENSG00000064999_31 (sequence is synthesized)
gaaaaaaaatctttttataaaatgaacttttaacacttggctcaaacctctaggtcatactgccaatctttagacaaatggccatggggcagaggacaggggagctgaggttggttcaga

SEQ ID NO: 45954 - DNA, 120 bp, Artificial Sequence
  ENSG00000064999_32 (sequence is synthesized)
ggccagcctgcatagcctctgtcctcaggacggaacttgggtgcagctcagtgggtcggaagagaaggcggtggcctgtgggtgaggggaacggagcaggctcaggcagaattgagtacg

SEQ ID NO: 45955 - DNA, 120 bp, Artificial Sequence
  ENSG00000064999_33 (sequence is synthesized)
gtgcgtctgcttttcaaacccaaccatatcagctgctgctctttatgaactgcccaacttcctgtccctttcaggggctagacacaggcttctcgtaagaacacagccttagaggcacct

SEQ ID NO: 45956 - DNA, 120 bp, Artificial Sequence
  ENSG00000064999_34 (sequence is synthesized)
gagcaactcaaaggtttccggtccatttctggggttcccgatgggaaggttcagtggccaaatgaagataagtgtgcagtttctagtgctgggaagtcttagccagcaccagagcgccag

SEQ ID NO: 45957 - DNA, 120 bp, Artificial Sequence
  ENSG00000064999_35 (sequence is synthesized)
gcctctccctggcctcttacctgtcagtgatcggagcactgccctgggctggccggcgccgtactgcctgcgttgtgtcagagaataggaaaagcagctttgtttggggcattaatgctt

SEQ ID NO: 45958 - DNA, 120 bp, Artificial Sequence
  ENSG00000064999_36 (sequence is synthesized)
ggagtggggtcagctaaggttgctacttgccaatttgtgatttgtctaatcagcctgtgtgattggggctcattttgattctctgaattatcggtttgacggttacacttggctgctggg

SEQ ID NO: 45959 - DNA, 120 bp, Artificial Sequence
  ENSG00000064999_37 (sequence is synthesized)
cccatccctggcccccggtgtggaaaaggctaaataaggtgacagtgcatcgatgctcccccgcgtggcctttggggcaggctggcatcccggtgcgcctctgcttcttaagctttcctg

SEQ ID NO: 45960 - DNA, 120 bp, Artificial Sequence
  ENSG00000064999_38 (sequence is synthesized)
ctgctcgctttgtttttaaaagtaacttgggttgcattcttccctctggactagagtagaaatgcaggggaaactgctgtggatttgagaggcaaagttggctcagctgtgtgcccagtt

SEQ ID NO: 45961 - DNA, 120 bp, Artificial Sequence
  ENSG00000064999_39 (sequence is synthesized)
cctcctgtgggcactttagcaggctccgagctttcctggcataggtcaatcaggtcccaggatgaataatccaggcttcagcaacactcctctttcccagccagcaaaggctgtgaattt

SEQ ID NO: 45962 - DNA, 120 bp, Artificial Sequence
  ENSG00000064999_40 (sequence is synthesized)
gaattctttgttggtatgtatgtgcagggagtactgttaggcacattcttaacccatgtggttggccagaaatcagaagtggggctgtgtctctgactggctagaggccaggccttgtgg

SEQ ID NO: 45963 - DNA, 120 bp, Artificial Sequence
  ENSG00000064999_41 (sequence is synthesized)
gtttctatctgctaagcacccagcaggttggggcctgggactcagctctctctgcggtagaggcaggccctcctccacttcttggtactaaacgaagatctcgacaccttgcagttttac

SEQ ID NO: 45964 - DNA, 120 bp, Artificial Sequence
  ENSG00000064999_42 (sequence is synthesized)
ttcatttcctgcccctttcagggcctgtgaggatgcccatgagctaccgctgtacagttctcggccccggctttcttccaagagttgaccaggaaccctaaagcatccagagtagactgc

SEQ ID NO: 45965 - DNA, 120 bp, Artificial Sequence
  ENSG00000064999_43 (sequence is synthesized)
gctgccactgcgcacatgctggtgcccgtcttcctcctaaggggccaggccacatccaagtgggcctctgtcgggggcggggcggtaggtccgaaagaaaccgcagacactacgatgcac

SEQ ID NO: 45966 - DNA, 120 bp, Artificial Sequence
  ENSG00000064999_44 (sequence is synthesized)
tcctcaagctgtcttttgtgcttagatcatccataggtgtttcttctgcttgaagctgctatatcatctttatttattcagggtattttcatattggaagccttggctagtctgctctag

SEQ ID NO: 45967 - DNA, 120 bp, Artificial Sequence
  ENSG00000064999_45 (sequence is synthesized)
ctctgggttctgtttagagattggtttatttctgaatattcaagaaaggaaaatgactgggcctttctttcttttcttctcctctgggatgggtagtctccctttcctagaaaggttatt

SEQ ID NO: 45968 - DNA, 120 bp, Artificial Sequence
  ENSG00000064999_46 (sequence is synthesized)
ataactttaaggacaggcttcaagtgggaaggcccctacttttgcacttctccaagtgcaggtcacaccaggggcagaccctgtcgctgcgtttctgaactgtgaaggagcccattcggg

SEQ ID NO: 45969 - DNA, 120 bp, Artificial Sequence
  ENSG00000064999_47 (sequence is synthesized)
tgggagacttcagatgggctcagtacctgtcccagccacaggcttcttgtccacctcttctcccctgcccaccagctgctcagcgcataagaccttcccgacaggctctgcgtgtgcagc

SEQ ID NO: 45970 - DNA, 120 bp, Artificial Sequence
  ENSG00000064999_48 (sequence is synthesized)
tctctgcgtccctcctgggccctccagcgtcagacactaatgggagttcccgagatgctcgggtttgagcagggagcaggcagagctgcagtcagagacattagaaaaccagtctgaatt

SEQ ID NO: 45971 - DNA, 120 bp, Artificial Sequence
  ENSG00000064999_49 (sequence is synthesized)
gggtctgtctttgagatgcccaggccagcagaaagcagctcagaagtattgttgctcatggtgtggcaatggactgaactgtaatgaaaatgttatttaatctttgtctctgtattttga

SEQ ID NO: 45972 - DNA, 120 bp, Artificial Sequence
  ENSG00000064999_50 (sequence is synthesized)
tacttgaatgactttcccttttgttttactgtatataaaattgttaatctgtctgattttgtctgaattataaacactttgaggtaccaaacataaccaatctgtgcaacaacatagact

SEQ ID NO: 45973 - DNA, 120 bp, Artificial Sequence
  ENSG00000064999_51 (sequence is synthesized)
gacctcagtacccaagagagtgtaaatatttctgggcttccagctttggttttgttattttcataactgtacacaacttagaacagactgaattaataaatgagaagcgacatgaacgca

SEQ ID NO: 45974 - DNA, 120 bp, Artificial Sequence
  ENSG00000064999_52 (sequence is synthesized)
gctgccatctgttagtcctggagtcaagctggaaccacctgatatggaccaagatgcccaatcccatgccagtgtctcctgggttgtggaccccaaaccagactctaagcggagcctcag

SEQ ID NO: 45975 - DNA, 120 bp, Artificial Sequence
  ENSG00000064999_53 (sequence is synthesized)
caccaagtatgagaccactatcttctaaaacaacccactccctgtctccactagtctcactgtgcctttgccatccgatctttctgctgtcctcaactctctccttccagctgctgatgc

SEQ ID NO: 45976 - DNA, 120 bp, Artificial Sequence
  ENSG00000064999_54 (sequence is synthesized)
caaggccccacctgcactgggacctgctcctcttgggcgggcggcagcgtagacgctgtacacttgcagctctcgcacctaccaccaccgaacactgtgaattctcccccttgggctgag

SEQ ID NO: 45977 - DNA, 120 bp, Artificial Sequence
  ENSG00000064999_55 (sequence is synthesized)
gacagcttgagggggtgagttgcctttgaggtgggcatcaagagggctcaggggttctgttgcaccctggaagcctccacgggcaggcactgtgaaccccgacgggcagggcagtctcca

SEQ ID NO: 45978 - DNA, 120 bp, Artificial Sequence
  ENSG00000064999_56 (sequence is synthesized)
gcaggatcccaacggcactgatagctccccagggttgggctgggctctgtgtggctccctcctcctgtctgctgtactgagccacagctgggcaccgttgccaagagctagctgactgtt

SEQ ID NO: 45979 - DNA, 120 bp, Artificial Sequence
  ENSG00000064999_57 (sequence is synthesized)
ctcacctctcctgaaccaaccaaccactgtgaccacccagtgccagagtccccagcactctgctcacagccggcctgcagccccaccccactgtcctccgctactccgaggtgctggcct

SEQ ID NO: 45980 - DNA, 120 bp, Artificial Sequence
  ENSG00000064999_58 (sequence is synthesized)
cactctcatggctaggcccttgtgagaccttgagctcagtgatgtggctggaccagggacagactgctttctgtgagggcccaagatatgcgccaggcccttgggtccgtgctgactgcc

SEQ ID NO: 45981 - DNA, 120 bp, Artificial Sequence
  ENSG00000064999_59 (sequence is synthesized)
ccacttggggctctgggtatctgaacactcacaggctggctcacacagcaggtgtctcagtcctgatgggccttcccctccaaggaggtgggtggcatgtgtgtggacagcccctctatc

SEQ ID NO: 45982 - DNA, 120 bp, Artificial Sequence
  ENSG00000064999_60 (sequence is synthesized)
ttcgccatggagtctcaaggcctggcagccttgggcctggctctggagtctagctcactgaggaggaaggccttccgtagaaccaacgaggaggcggcctgtgccctgcacacacggcgc

SEQ ID NO: 45983 - DNA, 120 bp, Artificial Sequence
  ENSG00000064999_61 (sequence is synthesized)
accttcttccctcacagaacagagctgctggaggacagggacctggaccaagtggcctccattgtcctctgggagctttctgacactctccacggtgggggatcacagatagacagcgcc

SEQ ID NO: 45984 - DNA, 120 bp, Artificial Sequence
  ENSG00000064999_62 (sequence is synthesized)
gtccagcatgcccctgaccacctccctcagcctcctgactcctccgaaaggagaggccgtcccatcgcagcagctcagaagctgggatggtggagctgagtctttgaagaggcaccccat

SEQ ID NO: 45985 - DNA, 120 bp, Artificial Sequence
  ENSG00000064999_63 (sequence is synthesized)
tctccagtgtgggcaaatcagtttggatggcaggagacaggaaggaagcggcgcccataggcagccgtgcacacatagcagagtccactaggaaagccagtcggccagggcagtcaaaac

SEQ ID NO: 45986 - DNA, 120 bp, Artificial Sequence
  ENSG00000064999_64 (sequence is synthesized)
ccaagtcgataaactgggtgggtcctgcgtacccacccatccttgtgccttcctgagcagagtcactgagccagaggcagtgggggctgcaggctgtgggtgctcaaagcaggcatggag

SEQ ID NO: 45987 - DNA, 120 bp, Artificial Sequence
  ENSG00000064999_65 (sequence is synthesized)
ggtgccccggggaggctgtgagggatcgtctgtcctgctctgtgtttcctttccatttcctccaccgtccgcaggccccattggttaaccctttcctccccccattgtttgcttctgcca

SEQ ID NO: 45988 - DNA, 120 bp, Artificial Sequence
  ENSG00000064999_66 (sequence is synthesized)
cctttagacaaagcattctgctgcggctctgtcagcgcgcacatccaccggcagcaggcaggaccacagctgcccggctgggggattacaagcaagaatgaatcagcacccggggacact

SEQ ID NO: 45989 - DNA, 120 bp, Artificial Sequence
  ENSG00000064999_67 (sequence is synthesized)
tgacttcatgggcatagaagaacctgccacgtaggctcctggagcagacttccccattcaagggcaggggagctcaagtatcccccagactcggcatcttggagcgctgcggcagcgtgc

SEQ ID NO: 45990 - DNA, 120 bp, Artificial Sequence
  ENSG00000064999_68 (sequence is synthesized)
atccagaaggccgccgggtccctgaccatcatctgttctgcaggagacagaggagagggagtggaggctggcagagttggtcaccagggtcttgtagataaccaaggaagttggcattgt

SEQ ID NO: 45991 - DNA, 80 bp, Artificial Sequence
  ENSG00000065000_0 (sequence is synthesized)
ttgtccgccatttgcaaggggcccggagcgggatcgcggcacctgccgagcgggtcgccgcctctgccgcggtccttgga

SEQ ID NO: 45992 - DNA, 120 bp, Artificial Sequence
  ENSG00000065000_1 (sequence is synthesized)
ggcggcaggcacgggccccgggccccctcacggcgcccagccgcgggcctcccgaggcaaaagcccgtgggccgccgcgatggccctcaagatggtgaagggcagcatcgaccgcatgtt

SEQ ID NO: 45993 - DNA, 120 bp, Artificial Sequence
  ENSG00000065000_2 (sequence is synthesized)
gaagggcagcatcgaccgcatgttcgacaagaatctgcaggacttggtccgcggcatccgtaaccacaaggaggacgaggcaaaatacatatctcagtgcattgatgagatcaagcagga

SEQ ID NO: 45994 - DNA, 120 bp, Artificial Sequence
  ENSG00000065000_3 (sequence is synthesized)
gctgaagcaggacaacatagcggtgaaggcgaacgcggtctgcaagctgacgtatttacagatgttgggatacgacatcagctgggccgccttcaacatcatagaagtgatgagtgcctc

SEQ ID NO: 45995 - DNA, 120 bp, Artificial Sequence
  ENSG00000065000_4 (sequence is synthesized)
caagttcaccttcaagcgaattggctacctcgctgcttcccagagctttcacgaaggcaccgacgtcatcatgctgaccaccaatcagatccgtaaggacttgagcagccccagccagta

SEQ ID NO: 45996 - DNA, 120 bp, Artificial Sequence
  ENSG00000065000_5 (sequence is synthesized)
cgacacaggtgttgcactgacgggtctgtcctgcttcgtcaccccagaccttgccagagacctggcaaatgacatcatgacactgatgtcacacaccaagccctacatcaggaagaaggc

SEQ ID NO: 45997 - DNA, 120 bp, Artificial Sequence
  ENSG00000065000_6 (sequence is synthesized)
tgtgctgatcatgtacaaggtgttcctgaagtaccccgagtcgctgcgccctgcctttccccggctgaaggagaagctggaggaccccgaccccggggttcagtcggctgccgtcaatgt

SEQ ID NO: 45998 - DNA, 120 bp, Artificial Sequence
  ENSG00000065000_7 (sequence is synthesized)
catctgcgagctggccagacgcaaccctaagaactacctgtccctggccccgctctttttcaagctgatgacgtcctccaccaacaactgggtcctcatcaagatcatcaagctgttcgg

SEQ ID NO: 45999 - DNA, 120 bp, Artificial Sequence
  ENSG00000065000_8 (sequence is synthesized)
tgctcttactcctttggaaccgcggctgggcaagaagctgatcgagcccctcaccaatctcatccacagcacgtctgccatgtctctcctctatgaatgtgtgaacaccgtgattgcagt

SEQ ID NO: 46000 - DNA, 120 bp, Artificial Sequence
  ENSG00000065000_9 (sequence is synthesized)
gctcatctcgctgtcctccggcatgcccaaccacagcgccagcatccagctttgtgttcagaaattaaggatattgatcgaggactccgatcagaacttgaagtacctggggctgctggc

SEQ ID NO: 46001 - DNA, 120 bp, Artificial Sequence
  ENSG00000065000_10 (sequence is synthesized)
aatgtccaagatcctgaagacccaccccaagtccgtgcagtcccacaaggacctcatcctgcagtgcctggacgacaaggacgagtccatccggctgcgggccctggacctgctctatgg

SEQ ID NO: 46002 - DNA, 120 bp, Artificial Sequence
  ENSG00000065000_11 (sequence is synthesized)
gatggtgtccaagaagaacctgatggagatcgtgaagaagctgatgacccacgtagacaaggcagagggtaccacctaccgtgacgagctgctcaccaagatcattgacatctgcagcca

SEQ ID NO: 46003 - DNA, 120 bp, Artificial Sequence
  ENSG00000065000_12 (sequence is synthesized)
gtccaactaccagtacatcaccaacttcgagtggtacatcagcatcctggtggagctgacccggctggagggcacacggcacggccacctcatcgccgcccaaatgctggacgtggccat

SEQ ID NO: 46004 - DNA, 120 bp, Artificial Sequence
  ENSG00000065000_13 (sequence is synthesized)
ccgcgtgaaggccatccgcaagttcgccgtgtcccagatgtctgcgctgcttgacagtgcacacctgctggccagcagcacccagcggaacgggatctgtgaggtgctgtacgctgccgc

SEQ ID NO: 46005 - DNA, 120 bp, Artificial Sequence
  ENSG00000065000_14 (sequence is synthesized)
ctggatctgcggggagttctcagagcatctgcaggaaccacaccacactttggaggccatgctgcggcccagagtcaccacgctgccaggccacatccaggccgtgtatgtgcagaacgt

SEQ ID NO: 46006 - DNA, 120 bp, Artificial Sequence
  ENSG00000065000_15 (sequence is synthesized)
ggtcaagctctacgcctccatcctgcagcagaaggagcaggccggggaggcagagggcgctcaggccgtcacccagctcatggtggaccggctgccccagtttgtgcagagcgcagacct

SEQ ID NO: 46007 - DNA, 120 bp, Artificial Sequence
  ENSG00000065000_16 (sequence is synthesized)
ggaggtgcaggagcgggcgtcctgcatcctgcagctggtcaagcacatccagaagcttcaggccaaggacgtgcctgtggcagaggaggtcagcgctctctttgctggggagctgaaccc

SEQ ID NO: 46008 - DNA, 120 bp, Artificial Sequence
  ENSG00000065000_17 (sequence is synthesized)
agtggcccccaaggcccagaagaaggttccagtccccgaaggcctggacctggacgcctggatcaatgagccactctcggacagcgagtcagaggacgagaggcccagggccgtcttcca

SEQ ID NO: 46009 - DNA, 120 bp, Artificial Sequence
  ENSG00000065000_18 (sequence is synthesized)
cgaggaggagcagcggcgtcccaagcaccggccgtcggaggcggacgaggaagagctggctcggcgccgagaggcccggaagcaggagcaggccaacaaccccttctacatcaagagctc

SEQ ID NO: 46010 - DNA, 120 bp, Artificial Sequence
  ENSG00000065000_19 (sequence is synthesized)
gccatcgccacagaagcggtaccaggacaccccgggcgtggagcacattcccgtggtgcagattgacctctccgtccccttgaaggttccagggctgcctatgtcagatcagtatgtgaa

SEQ ID NO: 46011 - DNA, 120 bp, Artificial Sequence
  ENSG00000065000_20 (sequence is synthesized)
gagaagaagggcaagcgccgccacagctcgctgcccacggagagcgacgaggacatcgcccctgcccagcaggtggacatcgtcacagaggagatgcctgagaatgctctgcccagcgac

SEQ ID NO: 46012 - DNA, 120 bp, Artificial Sequence
  ENSG00000065000_21 (sequence is synthesized)
gaggatgacaaagaccccaacgacccctacagggctctggatattgacctggataagcccttagccgacagcgagaaactgcctattcagaaacacagaaacaccgagacctcaaaatcc

SEQ ID NO: 46013 - DNA, 120 bp, Artificial Sequence
  ENSG00000065000_22 (sequence is synthesized)
cctgagaaggacgttcccatggtagaaaagaagagcaagaaacccaagaagaaagagaaaaaacacaaagagaaagagagagacaaggagaagaagaaggagaaggagaagaagaaatct

SEQ ID NO: 46014 - DNA, 120 bp, Artificial Sequence
  ENSG00000065000_23 (sequence is synthesized)
cccaagcctaagaagaagaagcacaggaaggagaaggaggagcggaccaaaggcaagaagaagtccaagaagcagcctccaggcagcgaggaggcagcgggggagccggtgcagaatggc

SEQ ID NO: 46015 - DNA, 120 bp, Artificial Sequence
  ENSG00000065000_24 (sequence is synthesized)
gcgccagaggaggagcagctcccgcctgagtccagctactccctcctcgctgaaaattcctatgttaaaatgacctgtgacatccggggcagtctgcaggaggacagccaggtcactgtg

SEQ ID NO: 46016 - DNA, 120 bp, Artificial Sequence
  ENSG00000065000_25 (sequence is synthesized)
gccatcgtgctggagaacaggagcagcagcatcctcaagggcatggagctcagcgtgctggactcactcaatgccaggatggcccggccgcagggctcctccgtccacgatggcgtcccc

SEQ ID NO: 46017 - DNA, 120 bp, Artificial Sequence
  ENSG00000065000_26 (sequence is synthesized)
gtgcctttccagctgcccccaggcgtctccaacgaagcccagtatgtgttcaccatccagagcatcgtcatggcgcagaagctcaaggggaccctgtccttcattgccaagaatgacgag

SEQ ID NO: 46018 - DNA, 120 bp, Artificial Sequence
  ENSG00000065000_27 (sequence is synthesized)
ggtgcgacccacgagaagctggacttcaggctgcacttcagctgcagctcctacttgatcaccactccctgctacagtgacgcctttgctaagttgctggagtctggggacttgagcatg

SEQ ID NO: 46019 - DNA, 120 bp, Artificial Sequence
  ENSG00000065000_28 (sequence is synthesized)
agctcaatcaaagtcgatggcattcggatgtccttccagaatcttctggcgaagatctgttttcaccaccatttttccgttgtggagcgagtggactcctgcgcctccatgtacagccgc

SEQ ID NO: 46020 - DNA, 120 bp, Artificial Sequence
  ENSG00000065000_29 (sequence is synthesized)
tccatccagggccaccatgtctgcctcctggtgaaaaagggtgagaactctgtctcagtcgacgggaagtgcagtgactccacgctactgagcaacttgttagaagagatgaaggcgacg

SEQ ID NO: 46021 - DNA, 120 bp, Artificial Sequence
  ENSG00000065000_30 (sequence is synthesized)
ctggccaagtgttgagagctgcctgcgagccccgcaccaccccgcggagcacgtacccagggaccgcagccctgacgtgtctcgcctctcctcagtcgtgtgtactgtacccaagcctga

SEQ ID NO: 46022 - DNA, 120 bp, Artificial Sequence
  ENSG00000065000_31 (sequence is synthesized)
gtgttaatttaactctatgttgtccgccgtgtagacatccgaggtcatttgttgcgttgaattatctgaccatccttttttactgtgactcttcccattctctttggcaagaagtcccct

SEQ ID NO: 46023 - DNA, 120 bp, Artificial Sequence
  ENSG00000065000_32 (sequence is synthesized)
tctcgcccccaaaccagcaagggactcccccacctgggtctgtgccctgccccgcgctgggggccgagtccttgaatgtggcttcaggggctcctgtcctgggccagggcctgatgggca

SEQ ID NO: 46024 - DNA, 120 bp, Artificial Sequence
  ENSG00000065000_33 (sequence is synthesized)
ccacgtgaggggcacttggtggacagggcggggctgacgtggcctcctctggggtcgcctgcttttgacccaaaggtcctgacggttgcgtccgggggaggggaaggaagggccgctgtc

SEQ ID NO: 46025 - DNA, 120 bp, Artificial Sequence
  ENSG00000065000_34 (sequence is synthesized)
gccaaggttttctctcccagaacccacagtgggaaagcggtcttgccaggcgttgtccattgtcagtgtgctcgtgggctggtgactgggtcttgggatcccaggccacgcgccagccag

SEQ ID NO: 46026 - DNA, 120 bp, Artificial Sequence
  ENSG00000065000_35 (sequence is synthesized)
gctgtgggcagggcggggccagggacgccaaagagaggttgcagtcagaaccgtggacggggtgggttgaggcctctctgccacccgtcttcctggtcagcagaagtgcatctcggcttg

SEQ ID NO: 46027 - DNA, 120 bp, Artificial Sequence
  ENSG00000065000_36 (sequence is synthesized)
ggtttggggtggtccgcatcccctgcttgccactatgcgcaccaaggtttccccacatccttcccagcacccttaggaaggcccaggcagggcctggaagcagcggacctgggctgttct

SEQ ID NO: 46028 - DNA, 120 bp, Artificial Sequence
  ENSG00000065000_37 (sequence is synthesized)
gtgttgaaggagtgtgcccagtgcccttgggcaggacctgtgagagccacctcacaggcagagcccccaccaggcagggcaaggagactccgctcactccccacggccagcgtgggcaca

SEQ ID NO: 46029 - DNA, 120 bp, Artificial Sequence
  ENSG00000065000_38 (sequence is synthesized)
ggactgacccttcttcagagataatgacattttatcttctccttttgatgaaaactgtcactttagcatgtaatccattacagaatcccatgcagtgattccaggatttgaaattgtatg

SEQ ID NO: 46030 - DNA, 120 bp, Artificial Sequence
  ENSG00000065000_39 (sequence is synthesized)
atgtgttacataagaatttatttgctatcgacattcccgtataaagagagagacatatcacgctgctgtcatgattttgtgtcaagatgatccaataaagttgtaaaacaggcatttcca

SEQ ID NO: 46031 - DNA, 120 bp, Artificial Sequence
  ENSG00000065000_40 (sequence is synthesized)
tccacgggggagctcagtgtgaacactgtcactaccccgaaggacgagtgtgaggacgccaagacggaggcgcagggcgaggaggacgatgccgaggggcaagaccaggacaagaaatct

SEQ ID NO: 46032 - DNA, 120 bp, Artificial Sequence
  ENSG00000065000_41 (sequence is synthesized)
gtggtgggctgtgtggtcctgggagccggggatccctcatcggctcctttgaagccccttgccccaagcattcttggagtcgtggcattcgacctggggtattgggccatactggagtct

SEQ ID NO: 46033 - DNA, 120 bp, Artificial Sequence
  ENSG00000065000_42 (sequence is synthesized)
gcgcggggctcccaccctgcgggaaacagccgcggggccctcggccgggaagcaacgggggtggagcagcgacagtggagtccagggtctccgttccgcaggggggaccggcaaaataca

SEQ ID NO: 46034 - DNA, 120 bp, Artificial Sequence
  ENSG00000065000_43 (sequence is synthesized)
gcatgagccccagcaccccaacgtggggccggacacagcttccgccacccaggtcccagggcagccctgctctcgcatttgtgttggcgttctcacgggccttttgttgtggttgtggtc

SEQ ID NO: 46035 - DNA, 120 bp, Artificial Sequence
  ENSG00000065000_44 (sequence is synthesized)
ttgtgtttttttaataaccttcttattcacacatggttcataagtctcatagagtttattcatttgaagtatgtatacagtggttttctgtatattcacagagttgtgcaaccatcatca

SEQ ID NO: 46036 - DNA, 120 bp, Artificial Sequence
  ENSG00000065000_45 (sequence is synthesized)
cctctgtctagttccagaactttccatgacccctaaagaagctccattcccaccagccgttacttctcactcccttccctgccctggcacccacgcatccccttcctgtctctgtggatc

SEQ ID NO: 46037 - DNA, 120 bp, Artificial Sequence
  ENSG00000065000_46 (sequence is synthesized)
agtgtgtcctggacatttcatagaaatggggtcatacaccgtgtggtcttttgtgtgtggcgtctcactgagtgtgatgtcctcaaggtgcatccacactatggcttgggtcagagcctg

SEQ ID NO: 46038 - DNA, 120 bp, Artificial Sequence
  ENSG00000065000_47 (sequence is synthesized)
gttcctgttcgtggccgggtcatgttccagtgcgtggacaggtcaccctctgctgaccccgttcctccgcggatgggccacactgtgctgacccactcatctgttgatagccacttgggc

SEQ ID NO: 46039 - DNA, 120 bp, Artificial Sequence
  ENSG00000065000_48 (sequence is synthesized)
cgcttcccctttgtggtgacacagtatgccgctttgaacatctgcgcagtgcgcgtggatgtgtgtgttccctctcggatgtgcacatgggcgtggggttgctgcgtcaagtgtggtgtc

SEQ ID NO: 46040 - DNA, 120 bp, Artificial Sequence
  ENSG00000065000_49 (sequence is synthesized)
ctcactggtttgccctgcatggctccctggtcggtggggactgttccccgggctgctttggcgcttgccgccaaccagagacggccccagcctccgctgggcctggtctggcctgagctt

SEQ ID NO: 46041 - DNA, 120 bp, Artificial Sequence
  ENSG00000065000_50 (sequence is synthesized)
gtcccggtaggcctgaggcgtggctggtcctgccatcccacccaggcacgtgggaccctcagcctgagcagccctgctgtgatcctgacctcacactgtgatgggggcgtgctggagcag

SEQ ID NO: 46042 - DNA, 120 bp, Artificial Sequence
  ENSG00000065000_51 (sequence is synthesized)
gggcagggtgggccagcccacactctttggcatgggatcgcgcggaacccgggcagcccccacagctcccggatgttggtatacccagggcctgtgattcctggcaggggcgttgcttgg

SEQ ID NO: 46043 - DNA, 120 bp, Artificial Sequence
  ENSG00000065000_52 (sequence is synthesized)
gcagcacctctggcttggggtaaggttggagacatgccctgagacttggactggcaggagggtccccgccatgcactcaaagagcagccataggaggcgcttggcctgcggctagggggc

SEQ ID NO: 46044 - DNA, 120 bp, Artificial Sequence
  ENSG00000065000_53 (sequence is synthesized)
gcccctctccgtgccttcctgtgcctgtgggacccctgctgcctctgtggtcattaagagacaggtggctgtgcctgttccctgtggcgggcccgcctgccctgctaacactggccatgc

SEQ ID NO: 46045 - DNA, 120 bp, Artificial Sequence
  ENSG00000065000_54 (sequence is synthesized)
tcaccactccctgctacaggtggggcccaggcccactcccctatgtccccgaaccccctccgcctcccctctaccttgcagacacctgtgccccggggactgaggcttctgggcaggact

SEQ ID NO: 46046 - DNA, 120 bp, Artificial Sequence
  ENSG00000065000_55 (sequence is synthesized)
ttagagacggatttggaggcgctggctcgtgactggtgcaggtcaggctgcctggtgtctgcgccagccggggccgtgtagttgaagccacaggccaggcagcgtcacccatagaggtcc

SEQ ID NO: 46047 - DNA, 120 bp, Artificial Sequence
  ENSG00000065000_56 (sequence is synthesized)
aggcccctggaagtcctgaaggctggaggggtgagaccaaggagccagcagggcaggctcctcctgaagcctctcctcggcacggcttggcgtgcggcaccccctcccccctgagtcctc

SEQ ID NO: 46048 - DNA, 120 bp, Artificial Sequence
  ENSG00000065000_57 (sequence is synthesized)
acaggccgtcctctgcgtgcctgcatcctagcctatccccccagtcccttcctacaggacatccgtccttgtcggaggagggcccatcccatggcttcaggcacctctgtgacctcttta

SEQ ID NO: 46049 - DNA, 120 bp, Artificial Sequence
  ENSG00000065000_58 (sequence is synthesized)
aagacaagtcattgtcagtttctgggtgtgacggcttccgcacatgaaaatgagccacaccttccaggacccccaagacctcccggcccagacacacaggagggtgtccaagcgcagcgt

SEQ ID NO: 46050 - DNA, 120 bp, Artificial Sequence
  ENSG00000065000_59 (sequence is synthesized)
gtgtggcaggttttgttggcctctgtgccaggaagcctgaggagcccggccccaccgcagtcagcctccctgtccctcccacagtgacgcctttgctaagttgctggagtctggggactt

SEQ ID NO: 46051 - DNA, 120 bp, Artificial Sequence
  ENSG00000065000_60 (sequence is synthesized)
ttcaccaccatttttccggcctcctgaagctgtggccaagggcagcccaagaaggtggcccctgctctgggggtggggctgcagccatgcaatgtccgggaagcctaacactgcccgctc

SEQ ID NO: 46052 - DNA, 120 bp, Artificial Sequence
  ENSG00000065000_61 (sequence is synthesized)
tgttgcagttgtggagcgagtggactcctgcgcctccatgtacagccgctccatccagggccaccatgtctgcctcctggtgaaaaagggtgagaactctgtctcagtcgacgggaagtg

SEQ ID NO: 46053 - DNA, 120 bp, Artificial Sequence
  ENSG00000065000_62 (sequence is synthesized)
agctcccggtgaggggtacttcagcgcccccgccccacgccggggttcctggcgggctgtgcgctgctccccactcctgcagcctccatgcgggagagaactgagcagattcgagaagaa

SEQ ID NO: 46054 - DNA, 120 bp, Artificial Sequence
  ENSG00000065000_63 (sequence is synthesized)
caggagggtgtggggctgattggaggcctcaggcgggtatatccctcacacggactcaccaggtctctcactggttctgggatctggcttctgcctggggatgctccctgcgaagtgggc

SEQ ID NO: 46055 - DNA, 120 bp, Artificial Sequence
  ENSG00000065000_64 (sequence is synthesized)
ctgctcccacccttgccataaagctctgaggcagcctgagcctgccgtgggggccccactgtgaccctgccgcagtcttcctgggtccctgcgtcctcttaaggggcagtgacacctgcc

SEQ ID NO: 46056 - DNA, 120 bp, Artificial Sequence
  ENSG00000065000_65 (sequence is synthesized)
tcgctggccctgtgtgggtggcaggccccactgtttgggatatcacatggccaggcacgtggtgagcctgctcagggcggacgcctgcaggcgcgtgctcggtcacacactgccttgtgt

SEQ ID NO: 46057 - DNA, 120 bp, Artificial Sequence
  ENSG00000065000_66 (sequence is synthesized)
ggacctggacttctggctgtctaccaccccaccgcctgcccccgcccccgcccccgcccccgttccatccacggtaagagactggcagctggccagtgccagcctcggtgtctgcagagg

SEQ ID NO: 46058 - DNA, 120 bp, Artificial Sequence
  ENSG00000065000_67 (sequence is synthesized)
ctcccgggtcccagtgggccaagcaggggccaggggaaggggaggacagccagggcctctgtgctcacaggctccctgtcactcggagggcactgtggcctctcaggcaggcgtgagggc

SEQ ID NO: 46059 - DNA, 120 bp, Artificial Sequence
  ENSG00000065029_0 (sequence is synthesized)
gcgcgcgggcgggcgggctatggcgcaggcgggttgtggggccggcgctggtggcggggcccggtgcatggcggtctgtcggcggagtcgccctcgggggctgtcagatttgtgacccag

SEQ ID NO: 46060 - DNA, 120 bp, Artificial Sequence
  ENSG00000065029_1 (sequence is synthesized)
aaggaaatctctgacctcagctgtggctcttggtgctggccagaagccaacttcatgtctgagtgcacgagcagcagtttgccatggagagcttggggctgcacacggtgacccttagtg

SEQ ID NO: 46061 - DNA, 120 bp, Artificial Sequence
  ENSG00000065029_2 (sequence is synthesized)
atgggacaacagcctacgtccagcaagctgtcaaaggagagaagcttcttgaagggcaggtgatccagctcgaggatgggaccaccgcatacattcaccaggtgacggtacagaaagaag

SEQ ID NO: 46062 - DNA, 120 bp, Artificial Sequence
  ENSG00000065029_3 (sequence is synthesized)
ctctctcctttgaggatggtcagcctgtgcagctggaagatggcagcatggcttacatacaccgcacacccagagaaggctatgaccccagcaccctggaagccgtccaactggaagatg

SEQ ID NO: 46063 - DNA, 120 bp, Artificial Sequence
  ENSG00000065029_4 (sequence is synthesized)
gctccactgcctacattcaccaccctgtggctgtgccatcggagagcaccatcctggccgtacagacagaggtgggcttggaggacctggcagcagaggatgatgagggcttcagtgcag

SEQ ID NO: 46064 - DNA, 120 bp, Artificial Sequence
  ENSG00000065029_5 (sequence is synthesized)
acgcagtggtggccctggagcagtatgccagcaaggttcttcatgacagccagattccccgtaatggaaaagggcagcaagttggagacagagcattccgctgtggctacaagggctgtg

SEQ ID NO: 46065 - DNA, 120 bp, Artificial Sequence
  ENSG00000065029_6 (sequence is synthesized)
ggcgtctctacaccaccgctcatcacttaaaggtgcatgaacgagctcatacaggtgaccgtccatacagatgtgacttccccagctgtggaaaggcctttgccacaggctatggactga

SEQ ID NO: 46066 - DNA, 120 bp, Artificial Sequence
  ENSG00000065029_7 (sequence is synthesized)
agagccacgttcgtacccacactggtgagaaaccatacaagtgcccagaggagctgtgcagcaaggccttcaagacctcaggagacctgcagaagcatgtccgtacccacactggtgaac

SEQ ID NO: 46067 - DNA, 120 bp, Artificial Sequence
  ENSG00000065029_8 (sequence is synthesized)
gcccgttccagtgcccttttgagggctgtggccgctccttcaccacatctaacatccgcaaggtacatgtgcgcacccacacaggcgagaggccctacacctgcccggagccccactgtg

SEQ ID NO: 46068 - DNA, 120 bp, Artificial Sequence
  ENSG00000065029_9 (sequence is synthesized)
gccgcggcttcaccagcgccaccaactataagaatcacgtgcgcatccacacaggggagaagccatacgtttgcacggtgccaggctgcgggaaacgcttcaccgagtactcgagcttgt

SEQ ID NO: 46069 - DNA, 120 bp, Artificial Sequence
  ENSG00000065029_10 (sequence is synthesized)
ataagcaccacgtggtgcacacacactgcaagccctacacctgcagcacctgcggcaagacctaccggcagacctccaccttggccatgcacaagcgcagtgcccacggcgagctggagg

SEQ ID NO: 46070 - DNA, 120 bp, Artificial Sequence
  ENSG00000065029_11 (sequence is synthesized)
cgagcaggccctctatgagcagcagcaacttgaggccgcctctgcagccgaggagagtccgccacccaaacgaccccggatagcttacctttcggaggtgaaggaagagagagatgacat

SEQ ID NO: 46071 - DNA, 120 bp, Artificial Sequence
  ENSG00000065029_12 (sequence is synthesized)
cccagcccaggtggcgatggtgactgaagaagatggggccccccaggtggctctgatcactcaggatggtgcccagcaggtcagcctgtccccggaagacctgcaggccctggggagtgc

SEQ ID NO: 46072 - DNA, 120 bp, Artificial Sequence
  ENSG00000065029_13 (sequence is synthesized)
catcagtatggtcacccagcacggcagcaccaccctcaccatccccagtcctgatgccgacctggccacatctggcacacatacagtcaccatggtcagcgccgatggcacccagacgca

SEQ ID NO: 46073 - DNA, 120 bp, Artificial Sequence
  ENSG00000065029_14 (sequence is synthesized)
gcccgtcacaatcattacctctggggctgtggtggctgaggactcaagtgtagcatctcttcgtcatcaacaggtggcactgttggccacagccaacggaacgcacattgcagtgcagct

SEQ ID NO: 46074 - DNA, 120 bp, Artificial Sequence
  ENSG00000065029_15 (sequence is synthesized)
ggaggaacagcagaccttagaggaggccatcaatgtggccactgcggccatgcagcaaggggctgtgaccctggagacaacagtgtcggagagtggctgctgagtccaagagggctgggt

SEQ ID NO: 46075 - DNA, 120 bp, Artificial Sequence
  ENSG00000065029_16 (sequence is synthesized)
cccacaccatgctggaggaagtgccatctgcatggccactcttgcccccaagggcccaggctgtggctgacacatagaaggtggccacataggtctctggggtgagaagacagcaagaaa

SEQ ID NO: 46076 - DNA, 120 bp, Artificial Sequence
  ENSG00000065029_17 (sequence is synthesized)
actgcctaactgaagggaatgggggccctgctcaagaagggggccaggcagctggaatcaggggagtgcatcatcctcgggagctgacaacagccaggctacaccagggcacccgcctct

SEQ ID NO: 46077 - DNA, 120 bp, Artificial Sequence
  ENSG00000065029_18 (sequence is synthesized)
caaaatcagctgggcgcccactctcctcctaaagaacacccttctggccctcagtctgttccccttctcaggtagagattggggctgctatggggactggccctgtagggttgagccaca

SEQ ID NO: 46078 - DNA, 120 bp, Artificial Sequence
  ENSG00000065029_19 (sequence is synthesized)
gacagctcttcagcccagtagcagtggagcaggccctgtcctgccctcccagcaataaccacctccctggaggccagctgagatgcctggctacttggcaccagggacttcctgacacca

SEQ ID NO: 46079 - DNA, 120 bp, Artificial Sequence
  ENSG00000065029_20 (sequence is synthesized)
cagtcaattaattcctcaggggcctgtggctgaagaaaaggtgcccagcccccaccactcctcagctgccccccaacctctctatggcagagaggcagggagtggccctgtacatagact

SEQ ID NO: 46080 - DNA, 120 bp, Artificial Sequence
  ENSG00000065029_21 (sequence is synthesized)
gctggggattgggtttgatttgttttgttttttttaattccattttgataatttttttcctgctctgggtggtggtggcacatggatgaatgagtatttaataaaagttccaaatttcca

SEQ ID NO: 46081 - DNA, 120 bp, Artificial Sequence
  ENSG00000065029_22 (sequence is synthesized)
gctccgaagagctcggttcagatcccggccgcctgggctccaggagccccggaaccaggataagttggatggctgccgcggcgaagcggggggcggggtggaccgtgcccggtattttct

SEQ ID NO: 46082 - DNA, 120 bp, Artificial Sequence
  ENSG00000065029_23 (sequence is synthesized)
cggggaaggatgggaggcaggactggaggatggggtggcaggactggaggatgggatggcacacaactggggtgtagacatgggagctgtcatctccatggtacacacatgctcacctgg

SEQ ID NO: 46083 - DNA, 120 bp, Artificial Sequence
  ENSG00000065029_24 (sequence is synthesized)
attagcagccttgcccaccttccctggtgcagaccacaggagcagctatgtctgcaactgggaggtgagccttggagatcagtgacgtggactttgatggtggccttggctccagcacag

SEQ ID NO: 46084 - DNA, 120 bp, Artificial Sequence
  ENSG00000065029_25 (sequence is synthesized)
ccacaaagtcttagggctttaaataggacccgaggatatcatccaagaccaggaaaaaaaactaatattttagaatgaagctcctaaggtgctgaagaataacaatttattccttccgca

SEQ ID NO: 46085 - DNA, 120 bp, Artificial Sequence
  ENSG00000065029_26 (sequence is synthesized)
gccccaacccctctactgtaggcttcccatctaagacacattcccaactcccagcccagaacccttctgtgccagccattccaggctggtctgggggtagggtatccccagaacaactct

SEQ ID NO: 46086 - DNA, 120 bp, Artificial Sequence
  ENSG00000065029_27 (sequence is synthesized)
gcttgcagtgagtaattcctcaatttccagttaggtccaatctgaaaggtattgccagtcctctctggggtccctcagctccctaccacccctctacacccaccctgagttctccaactc

SEQ ID NO: 46087 - DNA, 120 bp, Artificial Sequence
  ENSG00000065029_28 (sequence is synthesized)
tgactgaactcttgaaaagaggccagggtcaggaatgatggggaagaagcagagtgaactgtcaccttcaactcctcaccttatccgccgtccatgactcctgtgtatcctcaccctccc

SEQ ID NO: 46088 - DNA, 120 bp, Artificial Sequence
  ENSG00000065029_29 (sequence is synthesized)
aaagcaagcctacaaaagggagtagtcggtttcgagcctgacggtggagctgacgcgggaatgagagagaacctgagaagaccgccagggcgccctccctgcggaggcgagtccctcacc

SEQ ID NO: 46089 - DNA, 120 bp, Artificial Sequence
  ENSG00000065029_30 (sequence is synthesized)
gcccctctacatcgtccttttcaataaggagctcttaatacctgcaactgcttccttcaaggggtggctggaagatcagtaggcaaggcctgcggactgcgcaccttaaagcgcttcggg

SEQ ID NO: 46090 - DNA, 120 bp, Artificial Sequence
  ENSG00000065029_31 (sequence is synthesized)
accgtaagacagtgagtgctgagcgcgcggccgggaagaagcctggaggctctgagctcggaggacagagaccgaagccccagggcctgcgtccctcacaacctgcgcctcctgtcctcc

SEQ ID NO: 46091 - DNA, 120 bp, Artificial Sequence
  ENSG00000065029_32 (sequence is synthesized)
cgcgctactcccgaagcgcaccttctcgcccgcaggccgcagaagtgatgacgcaaagccctcggggcctccgccacctcctcacgcttctgctggaccgaatccttggaatggacagat

SEQ ID NO: 46092 - DNA, 120 bp, Artificial Sequence
  ENSG00000065029_33 (sequence is synthesized)
tgccagcaaggtgagcacgcacagcgtgacacggtctgtcactctagacaaccgggcctggcctgcgcactgcctcttggccctgccagaacttcacctctcaagaggacaagggcagcc

SEQ ID NO: 46093 - DNA, 120 bp, Artificial Sequence
  ENSG00000065029_34 (sequence is synthesized)
ctgtgcttgggcaccatgtgggatattccctttgcccctccaccccagctcccccaactcacctgtcacacatcattgtctagggcatgcaacacagcctggcctggccgctgacagctg

SEQ ID NO: 46094 - DNA, 120 bp, Artificial Sequence
  ENSG00000065029_35 (sequence is synthesized)
tttacgctcacttttgtttacgctgtctttgcagagggaaagctgccataagaaacagtggcatccttatgctgaggagttaggcccagcttcactttggctgctgtagtaatcctctgc

SEQ ID NO: 46095 - DNA, 120 bp, Artificial Sequence
  ENSG00000065029_36 (sequence is synthesized)
actagctgggaaagccctgccagtgacttgtattagctttctagtccactgaggtaattgtatttatttcttctctgtgactcagtcatttggaaaattaacctcagtgggctatgacaa

SEQ ID NO: 46096 - DNA, 120 bp, Artificial Sequence
  ENSG00000065029_37 (sequence is synthesized)
aacaaggaataaaggggaattagatgaggatcttgaagagaagggcatctgactcaaaaagagcccatttcagaggacagatccctttcctcctgcatccatgcatctgtctcaggctcg

SEQ ID NO: 46097 - DNA, 120 bp, Artificial Sequence
  ENSG00000065029_38 (sequence is synthesized)
ctcttggctgaggcagaatgttgaagcctcttctggccttcaggataactccgatggcagtccacctgtggtccaagcccttcatcattttgtgtctctgtttcttcatctggaaatgaa

SEQ ID NO: 46098 - DNA, 120 bp, Artificial Sequence
  ENSG00000065029_39 (sequence is synthesized)
ggaggctgacgtagatgatcaccacggttctcttcagccagtccttcctccgtgagcaagtgggtctctctgaccctggctattccagggccccctggccatgcctagcctaataggact

SEQ ID NO: 46099 - DNA, 120 bp, Artificial Sequence
  ENSG00000065029_40 (sequence is synthesized)
aaagatattccctgaaaagtcgcccttccatcgtcatcaccactcagtcatccttccacaggcaaccctgatttgtgacccagaaggaaatctctgacctcagctgtggctcttggtgct

SEQ ID NO: 46100 - DNA, 120 bp, Artificial Sequence
  ENSG00000065029_41 (sequence is synthesized)
ctgtcccccgtttcctttccgccttgtctctggattcagtggttcaacacctgtgtcctctctgtgttccactggccatcttccccaaccctgtccattcagagtctcaggtctcagtcc

SEQ ID NO: 46101 - DNA, 120 bp, Artificial Sequence
  ENSG00000065029_42 (sequence is synthesized)
ctctccctccctctggctctcccttcaccaaccctgtccctcacccctgtccccttagtttcccccttgccagccccagttcccacccccctcacagcccagtgtccccaggggagaagc

SEQ ID NO: 46102 - DNA, 120 bp, Artificial Sequence
  ENSG00000065029_43 (sequence is synthesized)
tctctgaagggaacccaacaccaggctgctttcctggagaaactaccgtcagagtactctgacttgcagggtgctctctctggaggaaaccttgttacgggagtgcaaggcagcatggtt

SEQ ID NO: 46103 - DNA, 120 bp, Artificial Sequence
  ENSG00000065029_44 (sequence is synthesized)
caggccagcagaaggagcctggagggttggtggagagacccagcctcttgtgtcagctctgatgccaaccagctgtggattattgggtgggccattgcatctctctgggcttattttccc

SEQ ID NO: 46104 - DNA, 120 bp, Artificial Sequence
  ENSG00000065029_45 (sequence is synthesized)
ctctgtgaaactagtacctttagccatgagttctctaagtttcttttcatgctcatgttctggtatggctccaactgctcctggagagggaagcagggcagagtgggcttttccagcccc

SEQ ID NO: 46105 - DNA, 120 bp, Artificial Sequence
  ENSG00000065029_46 (sequence is synthesized)
tgcccagggcaggggtgggatagaggcagacatgggcttcttgagccaaaggaggtggagagcctgtgcatgaggtggacggtggaggatgagaccccactgggtgctcatctcaccccc

SEQ ID NO: 46106 - DNA, 120 bp, Artificial Sequence
  ENSG00000065029_47 (sequence is synthesized)
cttattttgtcattcctttccatggggcgggcattaaagtgcagcctaaactagtcaagtcttcttaccaggacaaagattccccacaaaagaaggggtcttccccacagttcctgggcc

SEQ ID NO: 46107 - DNA, 120 bp, Artificial Sequence
  ENSG00000065029_48 (sequence is synthesized)
atgagcagctcttacctttaaaagcagttgaatggaggtcaagagacactttctaaatctcaattcaaccctgatttgttgtgcaaccttaggcaaatcacttttccatggacttctgtc

SEQ ID NO: 46108 - DNA, 120 bp, Artificial Sequence
  ENSG00000065029_49 (sequence is synthesized)
cattttcaagtgaggggattaaaatatctctggaattttttacagctctgtccttctgtgattcaaaatccctaaattaaattgggctctaagttgggaggaaacccagccttacttagc

SEQ ID NO: 46109 - DNA, 120 bp, Artificial Sequence
  ENSG00000065029_50 (sequence is synthesized)
tctgagcctcaggctaattaatctgacccatacggttttatccattctcttctgggttgttcccagcaccttaattggagggatgtttatttggattgtggggagggagagtatactgca

SEQ ID NO: 46110 - DNA, 120 bp, Artificial Sequence
  ENSG00000065029_51 (sequence is synthesized)
cgtgtggcactgggtagatgggggagagtcaaaaaaaaaagtaggccacatattactaacactggaatctagcagggagggtctcactgtctccttccttctgcacccccttccccacag

SEQ ID NO: 46111 - DNA, 120 bp, Artificial Sequence
  ENSG00000065054_0 (sequence is synthesized)
cgctgcggccgcgcctgtgccgcttggtgcgcggagagcagggctacggcttccacctgcacggcgagaagggccgccgcgggcagttcatccggcgcgtggaacccggttcccccgccg

SEQ ID NO: 46112 - DNA, 120 bp, Artificial Sequence
  ENSG00000065054_1 (sequence is synthesized)
aggccgccgcgctgcgcgctggggaccgcctggtcgaggtcaacggcgtcaacgtggagggcgagacgcaccaccaggtggtgcaaaggatcaaggctgtggaggggcagactcggctgc

SEQ ID NO: 46113 - DNA, 120 bp, Artificial Sequence
  ENSG00000065054_2 (sequence is synthesized)
tggtggtggaccaggagacagatgaggagctccgccggcggcagctgacctgtaccgaggagatggcccagcgagggctcccacccgcccacgacccctgggagccgaagccagactggg

SEQ ID NO: 46114 - DNA, 120 bp, Artificial Sequence
  ENSG00000065054_3 (sequence is synthesized)
cacacaccggcagccacagctccgaagctggcaagaaggatgtcagtgggcccctgagggagctgcgccctcggctctgccacctgcgaaagggacctcagggctatgggttcaacctgc

SEQ ID NO: 46115 - DNA, 120 bp, Artificial Sequence
  ENSG00000065054_4 (sequence is synthesized)
atagtgacaagtcccggcccggccagtacatccgctctgtggacccgggctcacctgccgcccgctctggcctccgcgcccaggaccggctcattgaggtgaacgggcagaatgtggagg

SEQ ID NO: 46116 - DNA, 120 bp, Artificial Sequence
  ENSG00000065054_5 (sequence is synthesized)
gactgcgccatgctgaggtggtggccagcatcaaggcacgggaggacgaggcccggctgctggtcgtggaccccgagacagatgaacacttcaagcggcttcgggtcacacccaccgagg

SEQ ID NO: 46117 - DNA, 120 bp, Artificial Sequence
  ENSG00000065054_6 (sequence is synthesized)
agcacgtggaaggtcctctgccgtcacccgtcaccaatggaaccagccctgcccagctcaatggtggctctgcgtgctcgtcccgaagtgacctgcctggttccgacaaggacactgagg

SEQ ID NO: 46118 - DNA, 120 bp, Artificial Sequence
  ENSG00000065054_7 (sequence is synthesized)
atggcagtgcctggaagcaagatcccttccaggagagcggcctccacctgagccccacggcggccgaggccaaggagaaggctcgagccatgcgagtcaacaagcgcgcgccacagatgg

SEQ ID NO: 46119 - DNA, 120 bp, Artificial Sequence
  ENSG00000065054_8 (sequence is synthesized)
actggaacaggaagcgtgaaatcttcagcaacttctgagccccttcctgcctgtctcgggaccctgggacccctcccgcacggaccttgggcctcagcctgccccgagctcccccagcct

SEQ ID NO: 46120 - DNA, 120 bp, Artificial Sequence
  ENSG00000065054_9 (sequence is synthesized)
cagtggactggagggtggtcctgccattgcccagaaatcagccccagccccggtgagcccccatcctgcccctgcccaccaggtactgggggcctgtggcagcaagatagggggagagag

SEQ ID NO: 46121 - DNA, 120 bp, Artificial Sequence
  ENSG00000065054_10 (sequence is synthesized)
cagagacagagagagagagagagagacacagagagagacagagagagagcgagcgagcgcgcggcagccgcggggcgagggcctttgctgctctgccggggcctgctgactgaaaggaat

SEQ ID NO: 46122 - DNA, 120 bp, Artificial Sequence
  ENSG00000065054_11 (sequence is synthesized)
ctgccggggcctgctgactgaaaggaatttgtgtttttgctttttttccaaaaagatctccagctccacacatgtttccacttaataccagagacccccccccttcccctcccccttccc

SEQ ID NO: 46123 - DNA, 120 bp, Artificial Sequence
  ENSG00000065054_12 (sequence is synthesized)
ctcccccttgggacgcgctctaaataattgcaataaaacaaacctttctctgcaaaccatttcctccccgccccctcccctcagcagcggccgtcctgagtgggagtccctgggacttcc

SEQ ID NO: 46124 - DNA, 120 bp, Artificial Sequence
  ENSG00000065054_13 (sequence is synthesized)
cagtggccaagttggggcgcccagcctcttcgtggggaccttgggtaaggccagggaggcctgatgtggccgtaggagctgcccctgcccacctgccctggtgtgggggtccctaggcca

SEQ ID NO: 46125 - DNA, 120 bp, Artificial Sequence
  ENSG00000065054_14 (sequence is synthesized)
caccctgctccccacccagctaccctgtgcgcctgtgccctgctgggggcctgggctctccgaggggcctgaggatggaggccccacgtccccgaggagggcggcctctggacaggcccc

SEQ ID NO: 46126 - DNA, 120 bp, Artificial Sequence
  ENSG00000065054_15 (sequence is synthesized)
tcattccgcgcggcagctcccaggcctggggaacgtaggtgtgtgagagcggcacccgggaaggacgcctggcctctggctcagccctgcttggcgggctcccccgtggacaccctgttg

SEQ ID NO: 46127 - DNA, 120 bp, Artificial Sequence
  ENSG00000065054_16 (sequence is synthesized)
actttgcacttccctcccgggccccgcacccccgaaccgaccaccgatcgaccggcaccgctgttgcctcgtaagccatagcgcatgcgcgctctcaggataaacaggccctgcctggga

SEQ ID NO: 46128 - DNA, 120 bp, Artificial Sequence
  ENSG00000065054_17 (sequence is synthesized)
tggggtggcagcctgggtcggccagagagttcaggccaccccggccggacgcctgccacttgctgtcactgtgccgctgtcatggcacgctccgggagtgccacgccacctgcccgggct

SEQ ID NO: 46129 - DNA, 120 bp, Artificial Sequence
  ENSG00000065054_18 (sequence is synthesized)
cagcggtgccaggccctggaggtggtggcagaccctgagccctctgccccctgcccctagcccatgtctccacccccatctggagggccttgggggctaagagcagccctggcctggcct

SEQ ID NO: 46130 - DNA, 120 bp, Artificial Sequence
  ENSG00000065054_19 (sequence is synthesized)
ggcctgtggtccctcagggacacacagggaggtaggaggtgagggaagggccctggcagcccccagcccgcctgcacagtctcccctgcgcacgccctcaagcttggcgctccctggaaa

SEQ ID NO: 46131 - DNA, 120 bp, Artificial Sequence
  ENSG00000065054_20 (sequence is synthesized)
ccgccccaggaggccaacggcgacagttcatcccacctggtgcttcctcccaccctgcctgtgcgccacgctggcctcgagccaaaggaattctcccagcaacccgggaaggcggctggg

SEQ ID NO: 46132 - DNA, 120 bp, Artificial Sequence
  ENSG00000065054_21 (sequence is synthesized)
cccgtcggggaggcttctgggtttgaaaacaggctttgcccaagttcccacagctaaagctctgtcacaggcagcctgggtgcccggagtgtttgccactgagacctgggcctgcccgtg

SEQ ID NO: 46133 - DNA, 120 bp, Artificial Sequence
  ENSG00000065054_22 (sequence is synthesized)
gggggcacggtaccgagtttgggcagtggcggcaccaccggggagtggcctctggaggcgggaggctggagcaagagactgaccctgtccgttgggcctgcaggatgtcagtgggcccct

SEQ ID NO: 46134 - DNA, 120 bp, Artificial Sequence
  ENSG00000065054_23 (sequence is synthesized)
agagagatggaagcggccggccgggcgggagcctgaagcagccttacccaggaattgcaggggttggggtggcgagcagtcgcggcgcctcagcctaagtggcttttaggggcagctgcc

SEQ ID NO: 46135 - DNA, 120 bp, Artificial Sequence
  ENSG00000065054_24 (sequence is synthesized)
gggatatgggcacccagggggccatggcccaggaggctgcccagaggcgagccctgtgcttgggtgggggcaggggagcccagcccagggccccggagagacgagagggagaggaggact

SEQ ID NO: 46136 - DNA, 120 bp, Artificial Sequence
  ENSG00000065057_0 (sequence is synthesized)
ggccgcatgggccgccgggatgtgtagtccgcaggagtccggcatgaccgccttgagcgcgaggatgctgacccggagccggagcctgggacccggggctgggccgcgggggtgtaggga

SEQ ID NO: 46137 - DNA, 120 bp, Artificial Sequence
  ENSG00000065057_1 (sequence is synthesized)
ggagcccgggcctctccggagaagagaggctgcagcagaagcgaggaaaagccacagccccgtgaagcgtccgcggaaagcacagagactgcgtgtggcctatgagggctcggacagtga

SEQ ID NO: 46138 - DNA, 120 bp, Artificial Sequence
  ENSG00000065057_2 (sequence is synthesized)
gaaaggtgagggggctgagcccctcaaggtgccagtctgggagccccaggactggcagcaacagctggtcaacatccgtgccatgaggaacaaaaaggatgcacctgtggaccatctggg

SEQ ID NO: 46139 - DNA, 120 bp, Artificial Sequence
  ENSG00000065057_3 (sequence is synthesized)
gactgagcactgctatgactccagtgcccccccaaaggtacgcaggtaccaggtgctgctgtcactgatgctctccagccaaaccaaagaccaggtgacggcgggcgccatgcagcgact

SEQ ID NO: 46140 - DNA, 120 bp, Artificial Sequence
  ENSG00000065057_4 (sequence is synthesized)
agcagaccagcgccatcctgcagcagcactacggtggggacatcccagcctctgtggccgagctggtggcgctgccgggtgttgggcccaagatggcacacctggctatggctgtggcct

SEQ ID NO: 46141 - DNA, 120 bp, Artificial Sequence
  ENSG00000065057_5 (sequence is synthesized)
ggggcactgtgtcaggcattgcagtggacacgcatgtgcacagaatcgccaacaggctgaggtggaccaagaaggcaaccaagtccccagaggagacccgcgccgccctggaggagtggc

SEQ ID NO: 46142 - DNA, 120 bp, Artificial Sequence
  ENSG00000065057_6 (sequence is synthesized)
tgcctagggagctgtggcacgagatcaatggactcttggtgggcttcggccagcagacctgtctgcctgtgcaccctcgctgccacgcctgcctcaaccaagccctctgcccggccgccc

SEQ ID NO: 46143 - DNA, 120 bp, Artificial Sequence
  ENSG00000065057_7 (sequence is synthesized)
agggtctctgatggccgcatggctctggccgaggtgccgctgtggccaccgtctgtgaagtggctttacgcttcaggaagccacgcctgttgaataaagctttggtgtgtttgcagatgg

SEQ ID NO: 46144 - DNA, 120 bp, Artificial Sequence
  ENSG00000065057_8 (sequence is synthesized)
agaagagaggctgcagcaggtagcgccgcgccgtggctggagcgtgggaggaggcgggataggggctgcaggctggagtcccgggccgcctcctgcggctcccagctgcgcgggcagggg

SEQ ID NO: 46145 - DNA, 120 bp, Artificial Sequence
  ENSG00000065057_9 (sequence is synthesized)
ctgcaaacccggcagccgcgaacggttcccacgtgcggccctgcgttcccaccttgcgcctttttcccaaagattgcggtccgcaggggctgggtttcgggcgctccgctccgctgcccc

SEQ ID NO: 46146 - DNA, 120 bp, Artificial Sequence
  ENSG00000065057_10 (sequence is synthesized)
ggtcccatccccgccctcctgcagtgaacttgctgtcctcggagaggctgggtgccaaggacacacgcagccagaagcctgctcccccagctcgggggagggtgcctctgagggaaaaca

SEQ ID NO: 46147 - DNA, 120 bp, Artificial Sequence
  ENSG00000065057_11 (sequence is synthesized)
ggaaagggcatggcacttattatatttatcctgcagccgttgaggacctgctgggggccaagcactgcagtgagcagtgagggacacggacagggcctctgcgctagtcccgctgggact

SEQ ID NO: 46148 - DNA, 120 bp, Artificial Sequence
  ENSG00000065057_12 (sequence is synthesized)
tctgcagaattggccagagctggattcccataggcacccagggaccccaggggtagtccagactatgtcaggaggaactggtgcagctgggagcaggcaggtggtgatgccagccagggt

SEQ ID NO: 46149 - DNA, 120 bp, Artificial Sequence
  ENSG00000065057_13 (sequence is synthesized)
ggcaggagctttgatgccaggatagagtttggagtttattatgacagtaaacggaagtcaattaggaggttttgttgtttgttttgagatcgggtcttgctctgtcacccaggctgtagt

SEQ ID NO: 46150 - DNA, 120 bp, Artificial Sequence
  ENSG00000065057_14 (sequence is synthesized)
ggctcaggtgatgggagagaggcctgcaccccaacagagggctcagcccctgccccagcacctcaggggcagccaagatggtcacatgtaggcttgcagccagggctttgcggttccaat

SEQ ID NO: 46151 - DNA, 120 bp, Artificial Sequence
  ENSG00000065057_15 (sequence is synthesized)
gtctaactggagggccacgggggtggtggcagactcgcctctgggcggggaggggcacgggctaggctggtggagtgtgcccctgttcaccccgcttggcctcccagcagcagtggacac

SEQ ID NO: 46152 - DNA, 120 bp, Artificial Sequence
  ENSG00000065060_0 (sequence is synthesized)
gtggcggagcgccaggcgcccaaagaggggcgagaaagcgccatggcggcggcggcggctgtgtccggtgctcacgccgcggcgaggtgaggggaccgcctcttctccacaactgaggag

SEQ ID NO: 46153 - DNA, 120 bp, Artificial Sequence
  ENSG00000065060_1 (sequence is synthesized)
gccacagctgccggcccacccgccttccacgcgggccgcggctccggcatggccgggatcattaagaagcagatcctgaaacacctgtcccggttcactaagaatctttccccagacaaa

SEQ ID NO: 46154 - DNA, 120 bp, Artificial Sequence
  ENSG00000065060_2 (sequence is synthesized)
atcaacctgagcaccctgaaaggggagggtcagctgaccaacctggagctggatgaagaggttctacagaatgtactggagctgcccacctggttagccatcactcgggtctactgcaac

SEQ ID NO: 46155 - DNA, 120 bp, Artificial Sequence
  ENSG00000065060_3 (sequence is synthesized)
agggcctccatccggatccagtggacaaagttgaagacacaccctatttgcttgtgtctggataaggtagaggtggagatgaagacatgtgaggatcctcggccccccaatggacagtct

SEQ ID NO: 46156 - DNA, 120 bp, Artificial Sequence
  ENSG00000065060_4 (sequence is synthesized)
cccattgcccttgcttcaggacagagtgaatatggctttgccgaaaaggtggtggaagggatgttcatcattgtcaattctatcaccatcaagattcactccaaggccttccacgcttct

SEQ ID NO: 46157 - DNA, 120 bp, Artificial Sequence
  ENSG00000065060_5 (sequence is synthesized)
tttgaattgtggcagctccagggctatagtgtcaaccccaactggcagcagagtgaccttcgccttacccgcatcactgacccctgccgaggagaggttttaacatttaaggaaataact

SEQ ID NO: 46158 - DNA, 120 bp, Artificial Sequence
  ENSG00000065060_6 (sequence is synthesized)
tggcaaacactccgaattgaggcagatgctacagacaatggtgatcaggacccagtcaccactccattgaggcttattacgaaccaaggcaggatccaaatagccctcaaaagaagaacc

SEQ ID NO: 46159 - DNA, 120 bp, Artificial Sequence
  ENSG00000065060_7 (sequence is synthesized)
aaagattgcaatgtgatatcctccaagctgatgttcctgttggatgacctgctctgggtgctgactgactcacagctcaaggctatgatgaagtatgcagagtcactgagtgaagccatg

SEQ ID NO: 46160 - DNA, 120 bp, Artificial Sequence
  ENSG00000065060_8 (sequence is synthesized)
gagaagtcagcccatcaaagaaagagcctggcccctgaacctgtgcagatcactccaccagcccccagtgcccagcagtcctgggcccaggcatttggtggcagccagggcaacagcaac

SEQ ID NO: 46161 - DNA, 120 bp, Artificial Sequence
  ENSG00000065060_9 (sequence is synthesized)
agcagcagcagccgcctcagccagtactttgagaaatttgatgtgaaagagtcctcctaccatctgctcatctcccgcctggacctgcacatttgtgatgatagccagtcccgagagcca

SEQ ID NO: 46162 - DNA, 120 bp, Artificial Sequence
  ENSG00000065060_10 (sequence is synthesized)
ggtgtctctgccaacagactcatgggtggtgccatgcagcttaccttccgcaagatggcgtttgactattaccctttccattgggcaggtgatagctgcaaacattgggtacgccactgt

SEQ ID NO: 46163 - DNA, 120 bp, Artificial Sequence
  ENSG00000065060_11 (sequence is synthesized)
gaggccatggagacccgaggccagtgggcccagaagctggtgatggaatttcagagcaaaatggagaagtggcatgaagagacgggtctgaaaccaccctggcaccttggagtagactct

SEQ ID NO: 46164 - DNA, 120 bp, Artificial Sequence
  ENSG00000065060_12 (sequence is synthesized)
ctctttcggagaaaagcagattctctttccagtcctcgaaagaaccctcttgagagaagcccctctcagggcagacagcctgcctttcagcctccagcatggaaccgcttacgctctagc

SEQ ID NO: 46165 - DNA, 120 bp, Artificial Sequence
  ENSG00000065060_13 (sequence is synthesized)
tgcatggtggtacgggtggatgacctggacatccaccaggtttccaccgctggacagccaagtaaaaagccatctacactcctttcctgcagtcggaaacttcacaacctccctacccag

SEQ ID NO: 46166 - DNA, 120 bp, Artificial Sequence
  ENSG00000065060_14 (sequence is synthesized)
gtctctgccattcatattgagttcacagagtattacttcccagataatcaggagcttccagttccttgtcctaatctctacattcagttaaatggtctgacatttactatggatcctgtc

SEQ ID NO: 46167 - DNA, 120 bp, Artificial Sequence
  ENSG00000065060_15 (sequence is synthesized)
agtttgctctggggaaacctcttttgcctggatttataccgcagcttggagcagttcaaagctatctacaagctggaagattcaagtcagaaagatgaacacttggacatccgactagat

SEQ ID NO: 46168 - DNA, 120 bp, Artificial Sequence
  ENSG00000065060_16 (sequence is synthesized)
gcattctggttgaaggtgagctttccactggaaaagagagagcgggcagagttgcatcgtccccaggcccttgtcttctctgcgtcaggcatgattgccaccaatacacgtcatgctcca

SEQ ID NO: 46169 - DNA, 120 bp, Artificial Sequence
  ENSG00000065060_17 (sequence is synthesized)
cattgtagttgttcagacctccagagtctcttccggggttttgctgctgctgagttctttcattccaattatgatcactttcctaaggttccaggtggctttagccttctgcacatgctt

SEQ ID NO: 46170 - DNA, 120 bp, Artificial Sequence
  ENSG00000065060_18 (sequence is synthesized)
tttttgcatcatgcctttcagatggattcctgcctgcctcagcctaataccctccctccccagagacctaaggcttcctgggatctctggtctgtccactttacccagatctccttggac

SEQ ID NO: 46171 - DNA, 120 bp, Artificial Sequence
  ENSG00000065060_19 (sequence is synthesized)
tttgagggaacagaaaacttcaaaggccataccttgaattttgtagcccccttccccctgtccatttgggcctgcctacccctccgctggcagcaagcccaggcacggaagcttcttttg

SEQ ID NO: 46172 - DNA, 120 bp, Artificial Sequence
  ENSG00000065060_20 (sequence is synthesized)
gcctcagaggggaggctgaaaccatcagccagttttggaagtcctgtccagtctgaggctcttgcccctgactctatgtcccatccgcggtcaaagactgaacatgacttgaaaagctta

SEQ ID NO: 46173 - DNA, 120 bp, Artificial Sequence
  ENSG00000065060_21 (sequence is synthesized)
tcaggacttacagaagtcatggaaattctgaaagaaggcagtagtggtatggacaacaaagggcctctgacagagctggaggatgtagcagatgttcatatgcttgtacattccccggcc

SEQ ID NO: 46174 - DNA, 120 bp, Artificial Sequence
  ENSG00000065060_22 (sequence is synthesized)
catgtccgcgtgaggcttgaccactaccagtacttggctctgcttcgcctgaaggaggtgctgcagaggcttcaggagcagctgactaaggatacagagtcaatgactgggtctcccctg

SEQ ID NO: 46175 - DNA, 120 bp, Artificial Sequence
  ENSG00000065060_23 (sequence is synthesized)
cagaatcagacagcttgcattggagttctctttcccagtgctgaagtggctctgcttatgcatcctgcacccggtgctgtcgatgctgactctgcaggctcagatagcactagcctcgta

SEQ ID NO: 46176 - DNA, 120 bp, Artificial Sequence
  ENSG00000065060_24 (sequence is synthesized)
gattcagagctatctccttcagaggatcgggaactgaagtctgatgcctcatcagaccagggcccagcaagccctgagaaggtcttggaggaaagtagcattgaaaatcaggatgtatcc

SEQ ID NO: 46177 - DNA, 120 bp, Artificial Sequence
  ENSG00000065060_25 (sequence is synthesized)
caggagaggccacatagcaatggagaactgcaggactcaggtccacttgcccagcagctggcagggaagggccatgaggcagtagagtccctacaggccaagaaactgagcagaacccaa

SEQ ID NO: 46178 - DNA, 120 bp, Artificial Sequence
  ENSG00000065060_26 (sequence is synthesized)
gcctccagctcaccagctgcattgaagcccccagctggcagggagactgctgtgaatggacagggtgagctcatccccttgaagaacattgagggagaattgtcaagtgctattcacatg

SEQ ID NO: 46179 - DNA, 120 bp, Artificial Sequence
  ENSG00000065060_27 (sequence is synthesized)
accaaggatgccaccaaggaggctctacatgccaccatggacctcaccaaggaagctgtgtccctgactaaggatgccttcagtttgggcagagatcgaatgacctccaccatgcacaag

SEQ ID NO: 46180 - DNA, 120 bp, Artificial Sequence
  ENSG00000065060_28 (sequence is synthesized)
atgttgtccctgcccccagccaaggagcccatggccaagacagatgagggggtggcagccccagtgagtggaggtgctgcacgactccgatttttctccatgaagaggacggtatctcaa

SEQ ID NO: 46181 - DNA, 120 bp, Artificial Sequence
  ENSG00000065060_29 (sequence is synthesized)
cagtcatttgatggtgtctcattggatagcagtggccctgaagaccggatttcagtggacagtgatggcagtgatagctttgtgatgctcttggagtctgagtctggtccagaatctgtt

SEQ ID NO: 46182 - DNA, 120 bp, Artificial Sequence
  ENSG00000065060_30 (sequence is synthesized)
ccaccaggatctctttcaaatgtctcagataatgctggtgttcaagggagccctcttgtgaataattatggccaggggtcaccagcagccaacagttcagtttcacccagtggagaagac

SEQ ID NO: 46183 - DNA, 120 bp, Artificial Sequence
  ENSG00000065060_31 (sequence is synthesized)
ctcatctttcacccggtctcagttctggtcctgaaggtgaatgaggtgtcttttgggattgaggtacgtggtgaggacctgactgtggccctgcaagcagaggaactgaccctccagcag

SEQ ID NO: 46184 - DNA, 120 bp, Artificial Sequence
  ENSG00000065060_32 (sequence is synthesized)
ctgggcaccgtgggactctggcagttcctgcatggacagtgcccaggtacatgctttcaggaatcctcaactttgaagactggccacatcaggccagctgtgggccttcgctttgaggtg

SEQ ID NO: 46185 - DNA, 120 bp, Artificial Sequence
  ENSG00000065060_33 (sequence is synthesized)
gggcctggagcagctgttcattcccccctggcctcacaaaatggcttcctacatttattgcttcatggctgtgacctcgagctgctcacttcagtgctcagtggcctggggcccttcttg

SEQ ID NO: 46186 - DNA, 120 bp, Artificial Sequence
  ENSG00000065060_34 (sequence is synthesized)
gaggatgaggagatcccggtggtagtccccatgcagattgagcttctgaactccagcatcaccctaaaggatgatatcccccccatctatccaacatctccaggccccatccccatcact

SEQ ID NO: 46187 - DNA, 120 bp, Artificial Sequence
  ENSG00000065060_35 (sequence is synthesized)
ctggccatggaacatgttgtgctgaagaggagtgatgatggtgtgttccacataggcgctgctgctcaggacaaaccatcagctgaagtacttaaaagtgagaagagacagcccccaaaa

SEQ ID NO: 46188 - DNA, 120 bp, Artificial Sequence
  ENSG00000065060_36 (sequence is synthesized)
gaacaggtgtttttggtgcccacaggagaggtttttgaacagcaggtgaaagaactgcctatcctacaaaaagaacttatagaaactaaacaagccttggccaatgccaaccaggataaa

SEQ ID NO: 46189 - DNA, 120 bp, Artificial Sequence
  ENSG00000065060_37 (sequence is synthesized)
gaaaaacttcttcaggagattaggaaatataaccccttctttgagctctgaaaccagtggctcagccatctgtgccaaggagagaggctatcaccagcaatagcaccacctaggacagag

SEQ ID NO: 46190 - DNA, 120 bp, Artificial Sequence
  ENSG00000065060_38 (sequence is synthesized)
ggcactgtccagtgctgaataagtcactacggatgccagagggactggggagcactcacttcacttgtgtgggtgtgctttccactagctgttcttacttggactgaggacaagggcaaa

SEQ ID NO: 46191 - DNA, 120 bp, Artificial Sequence
  ENSG00000065060_39 (sequence is synthesized)
tgtactaggtggaatcttctcaacactgtagggccatttcacctcatggtttcatggcagggacatttgcttccttcacaggcctgtgtgaacaagcaaaagtacccacctcctcggtca

SEQ ID NO: 46192 - DNA, 120 bp, Artificial Sequence
  ENSG00000065060_40 (sequence is synthesized)
cccacagagccaccaaagattccatgtcccagagcttcccatagcagacctgaaaagtccatgacctgagctttggccatggtagtggagtggaacaggaaatagtccagcagaggagtg

SEQ ID NO: 46193 - DNA, 120 bp, Artificial Sequence
  ENSG00000065060_41 (sequence is synthesized)
tgggggaagggggcaggagaggcacaagaataagggagacctggactctgcctttttgggaaaaggaaccaagctcatagcaatttggctgataacacaatcagatttttccaggttaag

SEQ ID NO: 46194 - DNA, 120 bp, Artificial Sequence
  ENSG00000065060_42 (sequence is synthesized)
cttcctttctgttatactttcatcattgtgatgctgtggtagaaagtaaataacagtagtggctcagtcatttaatctttcccctctataatacaacttacttgaaatttaaatcaagaa

SEQ ID NO: 46195 - DNA, 120 bp, Artificial Sequence
  ENSG00000065060_43 (sequence is synthesized)
aaaatttctgacgctgagctaggttggtggcatgatatgccaggggtcagtgggggagcttgcttctgagccccctgttgtccgcctggagtcctgcttgtctttcccagctgtgctgag

SEQ ID NO: 46196 - DNA, 120 bp, Artificial Sequence
  ENSG00000065060_44 (sequence is synthesized)
tggctcttctgtctccctggggtccctggcacatctgctttcccagctctgtgaccttaccagttctctcctcagcccttggtggtttgggagctgaatatatgttttaaacttttacat

SEQ ID NO: 46197 - DNA, 120 bp, Artificial Sequence
  ENSG00000065060_45 (sequence is synthesized)
aaacaactcaacctgttgcctctcacttccctccatcactgtggcttttaaaactcatgtattttgactcaagtgaaaaaaacacaaaaatccctcatcccagctaggttttgccccctg

SEQ ID NO: 46198 - DNA, 120 bp, Artificial Sequence
  ENSG00000065060_46 (sequence is synthesized)
ccctataagagagctatttccccctttctttcctttgaattcttctccaacaccatcccttcattcatactgccctgtgatacacttgaagctgtgttgattggacagacgttcatcagc

SEQ ID NO: 46199 - DNA, 120 bp, Artificial Sequence
  ENSG00000065060_47 (sequence is synthesized)
taacttacctttacttggcaagatggtaaaatagtaacttagtgatgttactaaagtctcgaccattcacctttccatactgaaggaaaggtaaaaaggtttcttctatgggaaattatg

SEQ ID NO: 46200 - DNA, 120 bp, Artificial Sequence
  ENSG00000065060_48 (sequence is synthesized)
cttgacttgcatactctagtttgatgaggataaaaagaaacatgtaattgcagtggtgtttacaactaattgatcacaaccaatcatagatttctttgttccttctccactctcaacact

SEQ ID NO: 46201 - DNA, 120 bp, Artificial Sequence
  ENSG00000065060_49 (sequence is synthesized)
tcatttgactagaaaaaaaaaatgtattcaccaaggaacaggacccaatttgttcagacttttgttaagtttctttactaaggcaatttttgaaacaccagttactatgggatggtggga

SEQ ID NO: 46202 - DNA, 120 bp, Artificial Sequence
  ENSG00000065060_50 (sequence is synthesized)
atttttcatgcttaagaaatagagacttaggaacaaagaaacatctttctggagaagatgctaatgggaagttacctaaggcttgatgcttggttcaaccttatttaaaatttttataaa

SEQ ID NO: 46203 - DNA, 120 bp, Artificial Sequence
  ENSG00000065060_51 (sequence is synthesized)
tgacctgaaagtaggattttacagtgaaatcaaatgtcactacttccaggcagtgaaaggtaatctagaagaggtttaaaaaacacaaaaccggtcgggcacagcggctcacgcctgtaa

SEQ ID NO: 46204 - DNA, 120 bp, Artificial Sequence
  ENSG00000065060_52 (sequence is synthesized)
gactccgtctcacaacaaacaaacaaacacaaaaccacagaagggttactaataagcagggctgagaatactcagaaaactgacaggtgaggttcaacataatataaggaaatgtattta

SEQ ID NO: 46205 - DNA, 120 bp, Artificial Sequence
  ENSG00000065060_53 (sequence is synthesized)
tggaagaattatcaactgatatgcctgaacactgttagaactcaggaaagaaacaagcattgctgagggggaggagagatcaatgtgctgctgtggccaaaagcctaattgccctgtggg

SEQ ID NO: 46206 - DNA, 120 bp, Artificial Sequence
  ENSG00000065060_54 (sequence is synthesized)
catcatcaggaagggcttttggagataacagagaacagcactttatacaaaaccatggatatgtcttgatcggattatctgtgtttctagtgaccttatttacaagatatatgataaagg

SEQ ID NO: 46207 - DNA, 120 bp, Artificial Sequence
  ENSG00000065060_55 (sequence is synthesized)
gaggaaaggtccagagaacagccaaaattatcaggggatggaggtatatccatatgaggacacatttttaaaatatagactctatcctgcaaagatgaaagcagaggggagttagatcaa

SEQ ID NO: 46208 - DNA, 120 bp, Artificial Sequence
  ENSG00000065060_56 (sequence is synthesized)
atatccaatcaagagcaaggacccggtcctgtactactagctctagggctctatctcatagccttagtaaagaaagcacttctcatagcaaatcagaaatgtaaggagctcattgtctaa

SEQ ID NO: 46209 - DNA, 120 bp, Artificial Sequence
  ENSG00000065060_57 (sequence is synthesized)
gaagggatgccaccagaaactatacatgggtgcaggtttatgaggaatccttgcatgacggccttctacaaggaattatagaaaagtagggctacttggtaatatacaactgagagggta

SEQ ID NO: 46210 - DNA, 120 bp, Artificial Sequence
  ENSG00000065060_58 (sequence is synthesized)
actgtgtccctcaacaaactactccttagtgcctctttcaaaggcagaatgttgatctgaatggatcactggtcaagtatggcatctctaatgttcttgaagggggaggaaggagatctg

SEQ ID NO: 46211 - DNA, 120 bp, Artificial Sequence
  ENSG00000065060_59 (sequence is synthesized)
gtagctggaaaatataattattccacgttaggctcacctgaattggtttaaaatcatattctgattctcttctcatcccttcctcccctcacccaccatatacctctggcatccctccat

SEQ ID NO: 46212 - DNA, 120 bp, Artificial Sequence
  ENSG00000065060_60 (sequence is synthesized)
gcaaagaaatgtcgaataggcatttcttggtataatttacctacacttgtgcttgtggggtgggagtaaaaacatatccagtaagtaccaaggctaacctcctaatggctggagctcagt

SEQ ID NO: 46213 - DNA, 120 bp, Artificial Sequence
  ENSG00000065060_61 (sequence is synthesized)
taggtctctgggctctctaaaggagtccagagctcttgtccatgtcacaaatggagccttagaatttctgtctttccttatgtggcagctttggccattgtgtcttgaaattctccctca

SEQ ID NO: 46214 - DNA, 120 bp, Artificial Sequence
  ENSG00000065060_62 (sequence is synthesized)
ggaaatgtgataggggatattatcccatgggattttagtaaaaatcagcttgcctaatttcatattcgtgttcataatgaagaaatgcgaagtggtggtagtcctcaggattaagtgtaa

SEQ ID NO: 46215 - DNA, 120 bp, Artificial Sequence
  ENSG00000065060_63 (sequence is synthesized)
aggaaaatatgcaaggaaaaagtagcagtgtcagcccttttggactgcttatgatttctgccttagagctacaagacttggaacaagaaataacaatacctcaagaaaatgtctggagag

SEQ ID NO: 46216 - DNA, 120 bp, Artificial Sequence
  ENSG00000065060_64 (sequence is synthesized)
atagcaccactgtccctcaaagacttcagccactgcacattaccaattcagctgtgaagcatttacaactgtattatctgtgattgtctgcatttcctgtttacatgcatgtgctgggga

SEQ ID NO: 46217 - DNA, 120 bp, Artificial Sequence
  ENSG00000065060_65 (sequence is synthesized)
tatgctttagtgtgtatggactagagtttaaatcctgtctttaactgggctgcaaggatggctatcaatcccaaattctgttttcaactcactggaataattaatctggtgttcctgata

SEQ ID NO: 46218 - DNA, 120 bp, Artificial Sequence
  ENSG00000065060_66 (sequence is synthesized)
taaaacaggtgggttctattcacatgatggctgctctttaccatatatttcacctgaccctcattttgccatgggcctcaacctttatgtgtgctttttatggctctgaaaggactggct

SEQ ID NO: 46219 - DNA, 120 bp, Artificial Sequence
  ENSG00000065060_67 (sequence is synthesized)
cccgtgtgtggaatatacaaggtataaacaccacccctcacatacccctgtaacttaaatgcttccatttaactcacttagattactttccccttagtggtaaacgggttgggggatggg

SEQ ID NO: 46220 - DNA, 120 bp, Artificial Sequence
  ENSG00000065060_68 (sequence is synthesized)
tggtagtgcaaagaaggtagtttgaaatattgccatagtaatatgggaactttttattccaaccctttaccctggcttttttttctctcaatatttgcctaaaattctaaaatgagttat

SEQ ID NO: 46221 - DNA, 120 bp, Artificial Sequence
  ENSG00000065060_69 (sequence is synthesized)
agtaaaatcataaaactatggaaacaactgaactttggtacacaagttagttcgatgacatcttgttatttgagaacagtaaaaggtgtgtcattgcctcatgatttatcatagtcatta

SEQ ID NO: 46222 - DNA, 120 bp, Artificial Sequence
  ENSG00000065060_70 (sequence is synthesized)
ctaagggtttcagagagaatctggtgtgaagcactatcctttcagacactaaggcctttacctagttgctcccctaccttctgtcggaataggattattcccatgcacctctgggtaggt

SEQ ID NO: 46223 - DNA, 120 bp, Artificial Sequence
  ENSG00000065060_71 (sequence is synthesized)
ataggtagtagctattgaacggggattattttccccatggcacaaggggaaacactcttggataaccttcaacaatgaggctttgctaagtggccagacttgggatttgatcttcctcac

SEQ ID NO: 46224 - DNA, 120 bp, Artificial Sequence
  ENSG00000065060_72 (sequence is synthesized)
ttgttatttattaagtttaagccttattcagtatctctaattgcaatagatatagttcctgtgacttctaaaaaaaattcctgttaatgctgagacagtatcttttttgtcagtttatta

SEQ ID NO: 46225 - DNA, 120 bp, Artificial Sequence
  ENSG00000065060_73 (sequence is synthesized)
atttttggtcaagatttagcctgagtcttaaagcatttatttgtggaatgccccactgaagtgtcttctccattggctaagtacatgtttaaagccatgggttttaatgtaagatacttt

SEQ ID NO: 46226 - DNA, 120 bp, Artificial Sequence
  ENSG00000065060_74 (sequence is synthesized)
cagtatctaattctgtttcccccactgagggtgctaaagagaattagaatctttactaagacatgctcaggaaagcttcacgagagaacagcttcaaaatcctccctatgacactgaatg

SEQ ID NO: 46227 - DNA, 120 bp, Artificial Sequence
  ENSG00000065060_75 (sequence is synthesized)
gtagtgaggaaagaattcttggggatgccagttacatacaatagccttattactgctaatcactgtcaataaaaggtcacttcattcacctctatttgaggaaaacaatgagaatgtatc

SEQ ID NO: 46228 - DNA, 120 bp, Artificial Sequence
  ENSG00000065060_76 (sequence is synthesized)
tgatgaactagaatccttgtcagtattgggaaattttaatgttgcaatatctagtcaaactttgagtgtactggttctgtgaaccacctgaaaaaacaaattaaatgtattaaaccataa

SEQ ID NO: 46229 - DNA, 120 bp, Artificial Sequence
  ENSG00000065060_77 (sequence is synthesized)
tgccagtgatggactggatcagcttgaaagaagcacaaagactccgtgatcacaatagtcaaagactggctttggaacacagtaccaagtaattcacagaaaaagtttttggctgcagga

SEQ ID NO: 46230 - DNA, 120 bp, Artificial Sequence
  ENSG00000065060_78 (sequence is synthesized)
ttaagtaatgatgagtcttccctttcaactgttgttaaatctgagacatcctgactctcgagctgggaagatgaaagaaactctattatatatttggcctactttccaggcttgggcaaa

SEQ ID NO: 46231 - DNA, 120 bp, Artificial Sequence
  ENSG00000065135_0 (sequence is synthesized)
gacggagagggccaccgcccagcaatagacggtgcctcagcctgccgagccgcagtttccgtggtgtgagtgagtccgggcccgtgtcccctctcccgccgccgccatgggctgcacgtt

SEQ ID NO: 46232 - DNA, 120 bp, Artificial Sequence
  ENSG00000065135_1 (sequence is synthesized)
gagcgccgaagacaaggcggcagtggagcgaagcaagatgatcgaccgcaacttacgggaggacggggaaaaagcggccaaagaagtgaagctgctgctactcggtgctggagaatctgg

SEQ ID NO: 46233 - DNA, 120 bp, Artificial Sequence
  ENSG00000065135_2 (sequence is synthesized)
taaaagcaccattgtgaaacagatgaaaatcattcatgaggatggctattcagaggatgaatgtaaacaatataaagtagttgtctacagcaatactatacagtccatcattgcaatcat

SEQ ID NO: 46234 - DNA, 120 bp, Artificial Sequence
  ENSG00000065135_3 (sequence is synthesized)
aagagccatgggacggctaaagattgactttggggaagctgccagggcagatgatgcccggcaattatttgttttagctggcagtgctgaagaaggagtcatgactccagaactagcagg

SEQ ID NO: 46235 - DNA, 120 bp, Artificial Sequence
  ENSG00000065135_4 (sequence is synthesized)
agtgattaaacggttatggcgagatggtggggtacaagcttgcttcagcagatccagggaatatcagctcaatgattctgcttcatattatctaaatgatctggatagaatatcccagtc

SEQ ID NO: 46236 - DNA, 120 bp, Artificial Sequence
  ENSG00000065135_5 (sequence is synthesized)
taactacattccaactcagcaagatgttcttcggacgagagtgaagaccacaggcattgtagaaacacatttcaccttcaaagacctatacttcaagatgtttgatgtaggtggccaaag

SEQ ID NO: 46237 - DNA, 120 bp, Artificial Sequence
  ENSG00000065135_6 (sequence is synthesized)
atcagaacgaaaaaagtggattcactgttttgagggagtgacagcaattatcttctgtgtggccctcagtgattatgaccttgttctggctgaggacgaggagatgaaccgaatgcatga

SEQ ID NO: 46238 - DNA, 120 bp, Artificial Sequence
  ENSG00000065135_7 (sequence is synthesized)
aagcatgaaactgtttgacagcatttgtaataacaaatggtttacagaaacttcaatcattctcttccttaacaagaaagacctttttgaggaaaaaataaagaggagtccgttaactat

SEQ ID NO: 46239 - DNA, 120 bp, Artificial Sequence
  ENSG00000065135_8 (sequence is synthesized)
ctgttatccagaatacacaggttccaatacatatgaagaggcagctgcctatattcaatgccagtttgaagatctgaacagaagaaaagataccaaggagatctatactcacttcacctg

SEQ ID NO: 46240 - DNA, 120 bp, Artificial Sequence
  ENSG00000065135_9 (sequence is synthesized)
tgccacagacacgaagaatgtgcagtttgtttttgatgctgttacagatgtcatcattaaaaacaacttaaaggaatgtggactttattgagaagcatggatgttagtgaaagttactac

SEQ ID NO: 46241 - DNA, 120 bp, Artificial Sequence
  ENSG00000065135_10 (sequence is synthesized)
agtgtggagtgttgagaccagacaccttttgctgtctcatggggcagctacaagcatgaacgggaccagggaatggcagcagcatgcagaatcttagcactctttagcacaatattttgt

SEQ ID NO: 46242 - DNA, 120 bp, Artificial Sequence
  ENSG00000065135_11 (sequence is synthesized)
attagggaacttttaattgacatgagatgctaaagtcagacattggaattggaagaactataaagtgtgattcgatcgtcaagacatcacttggatttcttaatcttaaatgcttatgga

SEQ ID NO: 46243 - DNA, 120 bp, Artificial Sequence
  ENSG00000065135_12 (sequence is synthesized)
agatgtgaagttgaggtgctgcattctagaacttcaatatgtagcttactctttttttccccccttcttaaaccaccagtggttcatttttaaggttttttcatcaagagaagaataact

SEQ ID NO: 46244 - DNA, 120 bp, Artificial Sequence
  ENSG00000065135_13 (sequence is synthesized)
ttactaaattttatttctttatttgcaaaagaatctttattaaaacaaacaatcttaactatgcacatgatgtgaccagatcatcttgaaaatattcctctttagtaggaactctttgtt

SEQ ID NO: 46245 - DNA, 120 bp, Artificial Sequence
  ENSG00000065135_14 (sequence is synthesized)
tttaactcttggtatggtcagaatataatacttccataattacttataattctttccggttactggggctataaatacaactttttaaatgaaatttatgttattatcctgctcaaagta

SEQ ID NO: 46246 - DNA, 120 bp, Artificial Sequence
  ENSG00000065135_15 (sequence is synthesized)
ccattatggtttccatatggtaattacattggaaagttctgcaataagattctagttctctcttttctttaagcttatggttgaaggttaaccttgtttgtgcagattaccaaattactg

SEQ ID NO: 46247 - DNA, 120 bp, Artificial Sequence
  ENSG00000065135_16 (sequence is synthesized)
ctgatgtagtatgataaagtcagcttcttggatacagacacacccagggcagctgccaatcagaaatgcaaattgctaaattccaaacagaaccagtgactttgctgctacatatttact

SEQ ID NO: 46248 - DNA, 120 bp, Artificial Sequence
  ENSG00000065135_17 (sequence is synthesized)
aaattgaccactttgattcttgcttgtttgtctcagttatagggagttttgtacatggtgcctcttgttttccatcttcatggccttttctgttgagaaacatctaaagtgtattaacag

SEQ ID NO: 46249 - DNA, 120 bp, Artificial Sequence
  ENSG00000065135_18 (sequence is synthesized)
tgcatgcttttactttgtaaatgtggtgccaaatccctgtttgccatcgtttttactgtaccgatgttaactgtagtaatccttagccagtatgttcttttgctgaaactgttgcatttt

SEQ ID NO: 46250 - DNA, 120 bp, Artificial Sequence
  ENSG00000065135_19 (sequence is synthesized)
gggacttttttccactttgtcatgtgtacatttttaatctgttatagttggcggcagtattaaaatggtgagtaaagagcccaggtttgctcctgtttgtaactagtcttttctggaaat

SEQ ID NO: 46251 - DNA, 120 bp, Artificial Sequence
  ENSG00000065135_20 (sequence is synthesized)
actgtcttctgtttccttttgcctttgcagaatgtgctttagcctttgtctgagaatgggtttaggtagaagggtttcctgaaagtctagtcttttggtgtaatagtattgttgaacctt

SEQ ID NO: 46252 - DNA, 120 bp, Artificial Sequence
  ENSG00000065135_21 (sequence is synthesized)
aggttttatgttatatctgcatatgagtgatatgtgatcatgattcattttgcagatttacattttgcttgtgtggaaagttacgttcacttcaacctacagacccttttgtataatgta

SEQ ID NO: 46253 - DNA, 120 bp, Artificial Sequence
  ENSG00000065135_22 (sequence is synthesized)
cagcaaatgtcattaaatattgaatgctctattgggggaagacaaatgaagagaatgcattttgagcatttcaaatcagtagtttgggcagtgccttttggggtccaatctttttggatt

SEQ ID NO: 46254 - DNA, 120 bp, Artificial Sequence
  ENSG00000065135_23 (sequence is synthesized)
ggattctatttcatcttttgatgtgacttttcactagtttacaaaaaaaaggttggtggtcaacaaaaaaagcaagtcatagcagttcagtgcctttgttggtagtttttaacttttttt

SEQ ID NO: 46255 - DNA, 120 bp, Artificial Sequence
  ENSG00000065135_24 (sequence is synthesized)
gtgattctttttggaaaatcatagcttacagatggtataactgtattatataatggaattttctttaggtgtgggaaaacttgatctgaaagaaaattatcagcttcaattggcgattga

SEQ ID NO: 46256 - DNA, 120 bp, Artificial Sequence
  ENSG00000065135_25 (sequence is synthesized)
ttcagtgcccacaatgtaaacagggttggtagttgttactcattttgaatataccttttccttattgtattctgtaatataggatcctggaaatgagacctggtggaatattattttcaa

SEQ ID NO: 46257 - DNA, 120 bp, Artificial Sequence
  ENSG00000065135_26 (sequence is synthesized)
ctgtagtctttctatactgtggactaatgaaatggtgttgttgataatctaaaataaccaataatccaaaaaagttcattttactttgaatttgtattttcatttgaatatctatctgat

SEQ ID NO: 46258 - DNA, 120 bp, Artificial Sequence
  ENSG00000065135_27 (sequence is synthesized)
atgttaaatttttagcccttctgttaaagaaaaatagcaggtccccatttttctgcctctgtaccatttacatttgctctctgtttgttaacatgaagatcactcttatttcaccatccc

SEQ ID NO: 46259 - DNA, 120 bp, Artificial Sequence
  ENSG00000065135_28 (sequence is synthesized)
aaataacttatctaaatgcacattccttgaggacacagggagacaatttaagtcagtagtttttaatatgacttaagtaaaaatcacttggacccatctaagggattgacttttggctgg

SEQ ID NO: 46260 - DNA, 64 bp, Artificial Sequence
  ENSG00000065135_29 (sequence is synthesized)
ttgcaagctctgcctcccgggttcatgctattctcctgctgggactaccaggttcctgccacca

SEQ ID NO: 46261 - DNA, 88 bp, Artificial Sequence
  ENSG00000065135_30 (sequence is synthesized)
gcgcgatctcggcttattgcaagctctgcctcccgggttcatgctattctcctgctgggactaccaggttgtcttagtagagacgggg

SEQ ID NO: 46262 - DNA, 120 bp, Artificial Sequence
  ENSG00000065135_31 (sequence is synthesized)
caggcgtgagccaccgcacctggctggcaatttataatttttaaaaggtgattctgattaccagccaggcttgcaaatcactggtttgtattgaaataaaagatattttcttgtagcagg

SEQ ID NO: 46263 - DNA, 120 bp, Artificial Sequence
  ENSG00000065135_32 (sequence is synthesized)
ctggtttgtattgaaataaaagatattttcttgtagcagggctaaaatgtgggatgaaacattaaatctactagcctgaaaaaaaactttggcatttgtaatcaaagaagctgaaagttg

SEQ ID NO: 46264 - DNA, 120 bp, Artificial Sequence
  ENSG00000065135_33 (sequence is synthesized)
ccttgtgtgtttcctctgaagaatgctggagatttgtgatggataatgtttcagaattcaggtgcctatgctttggaccatcaaagaagccattagtctctgtgtaaagaagaagtattc

SEQ ID NO: 46265 - DNA, 120 bp, Artificial Sequence
  ENSG00000065135_34 (sequence is synthesized)
ttaatggacagtcccccctaaccttataaattcagctttgcaacagatttcacctcctagcatgaaaattccaaaaactttaacaattactcataagtggatcttgagatgacattttca

SEQ ID NO: 46266 - DNA, 120 bp, Artificial Sequence
  ENSG00000065135_35 (sequence is synthesized)
tcttggacagtttgaattctaaatctctagttcacagtgaatcgttttttaaatttttactgatggatcgttatttttcacaaggtactacattcttacaatgtaagactagatggacca

SEQ ID NO: 46267 - DNA, 120 bp, Artificial Sequence
  ENSG00000065135_36 (sequence is synthesized)
aaattttaaaaaaaacttcttgccttgtttttttaattttcatatatattctatttgttgtatatacacattagactattttaaaataacagctggtttttgtaattcattcattcaccc

SEQ ID NO: 46268 - DNA, 120 bp, Artificial Sequence
  ENSG00000065135_37 (sequence is synthesized)
tatattcttatattctgctcattattctctcatttatagctgtgacattctttggacattacttgcctggcctgattagttacttaatataatttattcatttgcttagcatgtgtgaca

SEQ ID NO: 46269 - DNA, 120 bp, Artificial Sequence
  ENSG00000065135_38 (sequence is synthesized)
tagttctggaatttcctgttgcagaactccttgctgtattgcagtcatatataaggtaaagtcagtctcttgttcctattaaaaagctaccattgattattttccctttttacatgttca

SEQ ID NO: 46270 - DNA, 120 bp, Artificial Sequence
  ENSG00000065135_39 (sequence is synthesized)
aaaaaaaaaaaataagcaaccctctactcatttgtataaacctaaaacgtcactgttttccttgagcgttagtacttgtgggttctttccttttcatgtgtaatactgattttaagagca

SEQ ID NO: 46271 - DNA, 120 bp, Artificial Sequence
  ENSG00000065135_40 (sequence is synthesized)
atgatcttagtttgccagtgccaggtaattattgtgttctactttaggcttcgtagtgcaaatcagggatctgacctggatcagcctcagctctttacatagctttatgatcatcatatt

SEQ ID NO: 46272 - DNA, 120 bp, Artificial Sequence
  ENSG00000065135_41 (sequence is synthesized)
ttgttgtattgctcccaacaagcacaagagaaaaaggcaggcttcctagagacctcaagttgaaagttgattttgctgacaactatcagggagtaaaagaaagcctttttcaggcactgg

SEQ ID NO: 46273 - DNA, 120 bp, Artificial Sequence
  ENSG00000065135_42 (sequence is synthesized)
agaactaactttaatgatgatcaaggtctttatgcctttatcttttagtttttaagatcatttctctccctcctttccccccagttttctcaacatttatgagttagttctgctgagaac

SEQ ID NO: 46274 - DNA, 88 bp, Artificial Sequence
  ENSG00000065135_43 (sequence is synthesized)
ccagttttctcaacatttatgagttagttctgctgagaacaacatacttcagaacatgtcaggatagggcaagacagtcttgctctgt

SEQ ID NO: 46275 - DNA, 74 bp, Artificial Sequence
  ENSG00000065135_44 (sequence is synthesized)
accactccacccactcagggcagttttttttctgataccatatcaggcctaggcctgggctgactcaaatcttc

SEQ ID NO: 46276 - DNA, 120 bp, Artificial Sequence
  ENSG00000065135_45 (sequence is synthesized)
ataccatatcaggcctaggcctgggctgactcaaatcttctcaggaataagaggtaagaaggaatgttaaacagcagtagttacctggggtacatggttaatttgatttagcagattctt

SEQ ID NO: 46277 - DNA, 120 bp, Artificial Sequence
  ENSG00000065135_46 (sequence is synthesized)
tggctaaaccctagtaaattaaaatgtctgagccaggtcatgggaatatacatgtttttaatacattccttaggtgattttgatgtagccaatctgggccaacatttggggacaactgag

SEQ ID NO: 46278 - DNA, 120 bp, Artificial Sequence
  ENSG00000065135_47 (sequence is synthesized)
taggacctaatacaggttgaatagcccttatccaaatctcttgggaccagaagtgtttgagagttcagatttttgtgaggttttgaaatatttgcattatatacttattggttcgggatt

SEQ ID NO: 46279 - DNA, 120 bp, Artificial Sequence
  ENSG00000065135_48 (sequence is synthesized)
ccaaatccaaaaatctgaaatccaaaatgccccagtgtgtgcttcctttgagtgttatgttgttacccaaaaagcttttgattttggagcattttagattttggattttcagatttgaaa

SEQ ID NO: 46280 - DNA, 72 bp, Artificial Sequence
  ENSG00000065135_49 (sequence is synthesized)
attttggagcattttagattttggattttcagatttgaaatgctcaatctatattaaagatcaacacaggct

SEQ ID NO: 46281 - DNA, 120 bp, Artificial Sequence
  ENSG00000065135_50 (sequence is synthesized)
tgcagtgagccgagatcgcaccactgaattccagcctgggcgacagagtgagtctgttttttttttgtttttttttaaagtcaacacaaatattgaaaataagcaacttcagtgcacaaa

SEQ ID NO: 46282 - DNA, 120 bp, Artificial Sequence
  ENSG00000065135_51 (sequence is synthesized)
tgcacaaataagctcaaaatcactagtgagtgatctattttttgccaataagaagtaccatttgtacatgacttaaagtgccttccaccaagaaaattattgaaaactgttgggtcacat

SEQ ID NO: 46283 - DNA, 120 bp, Artificial Sequence
  ENSG00000065135_52 (sequence is synthesized)
aacattcctacactttggatacagagtatttagttttatacaaaattaagacaacaagaaacctaggatgtccaaacattcatttcatttattttactgcatttatttatgcagtgaaaa

SEQ ID NO: 46284 - DNA, 120 bp, Artificial Sequence
  ENSG00000065135_53 (sequence is synthesized)
ttgaaagatacaccaaattaaagataaaaccctgtgacagataacagtatatgtaataacatgaatatttatttacacttggtagagaaagcaaagctagctagctctaaactagaatga

SEQ ID NO: 46285 - DNA, 120 bp, Artificial Sequence
  ENSG00000065135_54 (sequence is synthesized)
aagtcgttttgaaatgggtacgggggtatataaggggaatgattgagtcacatgtaaaagcctttgtatgcccagtgctagtgttttcctgaaatctagtgagaatcacaaggtaccaga

SEQ ID NO: 46286 - DNA, 120 bp, Artificial Sequence
  ENSG00000065135_55 (sequence is synthesized)
aataatcaaataataaatattaatacactgctgggatagaagtatctcagtgtaccagcattcactaagctataaaatctgtgacagcaggaatattaaattatgaacaacctggtttat

SEQ ID NO: 46287 - DNA, 120 bp, Artificial Sequence
  ENSG00000065135_56 (sequence is synthesized)
ctgtctcctcttatcttttacctctccctacgcccaaaattctccttaggttatccagacatttttactaagatgcttatttatatgtaagagagatttccagtagatacaacaaaacac

SEQ ID NO: 46288 - DNA, 120 bp, Artificial Sequence
  ENSG00000065135_57 (sequence is synthesized)
aagaaatcacctgttctgtttattcttgctcatgtaggataaaggtcctgagacctctcagaatcttacgaggttggagagttgtttggaatgctgggttctggtcttgtctctgcttcc

SEQ ID NO: 46289 - DNA, 120 bp, Artificial Sequence
  ENSG00000065135_58 (sequence is synthesized)
aaccagctatggaatcttgtgtattctttcagtcttaaatcactcatctgttatctaaagatggactaaattattccttcctgctgtgatattctgtggttctcatcagatagaaataac

SEQ ID NO: 46290 - DNA, 120 bp, Artificial Sequence
  ENSG00000065135_59 (sequence is synthesized)
atatttgaaaatgctttgtaaatgttatgatactcaggattatactgcacagaaaaaaaaaaatcctaaggcagcaccaacaaaggtattcaacgtagtgggtggtcttttacagcatta

SEQ ID NO: 46291 - DNA, 120 bp, Artificial Sequence
  ENSG00000065135_60 (sequence is synthesized)
ctttgcccatattcattttgaagacctgaaatgaagttgaactataaattgctctaaaattcgtgaagcagggtgaaaaggtctttgctttgttttacatttaaatccagctgtctattt

SEQ ID NO: 46292 - DNA, 120 bp, Artificial Sequence
  ENSG00000065135_61 (sequence is synthesized)
tctgcttatactagtgctttttcatggcaaaaagacagaaaagttcccttctgcagtctccagtgtcttctgacctcacagaaatgttttcatgcttttacctagcaggaccaccagagg

SEQ ID NO: 46293 - DNA, 120 bp, Artificial Sequence
  ENSG00000065135_62 (sequence is synthesized)
ctctgtcacacttgcagtccctggcccaacaccgaaatccttctggaatctgtgctctgggggctgtgccgggtagagagggcagtgggaggtaagagctcttcacccttcaccaccttc

SEQ ID NO: 46294 - DNA, 120 bp, Artificial Sequence
  ENSG00000065135_63 (sequence is synthesized)
tccacccagcatggccggcacactttggtctacggcacatctccaagtatagagtgggttttgaatgctgttatgtctcaccgtggggatgggaaggaatactctgttttggactatttg

SEQ ID NO: 46295 - DNA, 120 bp, Artificial Sequence
  ENSG00000065135_64 (sequence is synthesized)
gaggtacatgtgagtggattttattaccagagtaggaactgtttcaagttaatgtgtcttttatgttgcttttaagacaacttttgtgccgcttttatccattcttccttttatccacag

SEQ ID NO: 46296 - DNA, 120 bp, Artificial Sequence
  ENSG00000065135_65 (sequence is synthesized)
ttccttttatccacagaaatacaaatttctaattatagtatattttttctatttttaaaattgtgataaagcatatataacaaaatttgccatcttaagtgtacagttcagtggcattaa

SEQ ID NO: 46297 - DNA, 120 bp, Artificial Sequence
  ENSG00000065135_66 (sequence is synthesized)
gcacagccatcaccaccatccatttccagaacttgttttcatcttcctgaactgaaactctgtacctgttaaacagtaactccccatgccccaccttctttcagcccctggtaaccagca

SEQ ID NO: 46298 - DNA, 120 bp, Artificial Sequence
  ENSG00000065135_67 (sequence is synthesized)
ttttcctttgtctctatgaatttgactattttagatacctcatataagtggaatcatagtatttgtccttttgtgtcaatcatattgtatttttgtctaaaaaaggaaaactatcagatt

SEQ ID NO: 46299 - DNA, 120 bp, Artificial Sequence
  ENSG00000065135_68 (sequence is synthesized)
tatgtgaaatgtaacgtaatttacatttgatttactgttagtaatgtctctttaatcatgctatgctagggaagtacattatggtctctccctctaagaatatgaagaggaaattttacc

SEQ ID NO: 46300 - DNA, 120 bp, Artificial Sequence
  ENSG00000065135_69 (sequence is synthesized)
ttcaacaaacaagcaaacttagttatatttttgtgattttatgctgttttcatattctattttgagatctatttgtcttagcttggaggtggttttgttaaatgtccacgatttagagac

SEQ ID NO: 46301 - DNA, 120 bp, Artificial Sequence
  ENSG00000065135_70 (sequence is synthesized)
ggcataatgaaaaaatgaccaagaatttggttgggaatgggaggagcttagaagaacaagaaattggctttgattttatagtgtatggtgctctgttggtagctggacatcatcacaggc

SEQ ID NO: 46302 - DNA, 120 bp, Artificial Sequence
  ENSG00000065135_71 (sequence is synthesized)
tttggattgagaagacctgttctggagttctagttctgctactgcctagcgttgtgatcttgatgaagatactcttccttcctgggcttcagtttttgatctataaattgctagtgatgg

SEQ ID NO: 46303 - DNA, 120 bp, Artificial Sequence
  ENSG00000065135_72 (sequence is synthesized)
ggctggactatttttaagtttgttctaactttagcagtcttaagaattaaggttgcatgccagaaaatagggttaaatatttgtttctgatctggttacaaaaaaaaaaaaaacttgatg

SEQ ID NO: 46304 - DNA, 120 bp, Artificial Sequence
  ENSG00000065135_73 (sequence is synthesized)
gcttaaagtaaataaaaattcaacagtacggtgtaaatttaaaatgaggcaaaagaaagataatgacttaatttttattttaatctttcttatagctgttttatataagaacttttcatg

SEQ ID NO: 46305 - DNA, 120 bp, Artificial Sequence
  ENSG00000065135_74 (sequence is synthesized)
aatacaatcaaaatgtccatgagataaaaataagctaattgtgcaggaaaagtacaaatgcactttttctgcagctctaacatgtaaggtttgggaacaatcgttgggcctgacaaacag

SEQ ID NO: 46306 - DNA, 120 bp, Artificial Sequence
  ENSG00000065135_75 (sequence is synthesized)
ttgagctagggtaagggtgaatgccttttctggaagcctatcaagagcatcgaggtgaagtcctcttacctttaatcatgggagagcccattctggaccaagggtttgagaaaattattc

SEQ ID NO: 46307 - DNA, 120 bp, Artificial Sequence
  ENSG00000065135_76 (sequence is synthesized)
tgactgtgttctaaggtaataggtgaatgggtgctcaagggcccctgttgcatttcatgtagacttgccagaagagttttagcttgaaaacatcataagatgaatataggcagatcccaa

SEQ ID NO: 46308 - DNA, 120 bp, Artificial Sequence
  ENSG00000065135_77 (sequence is synthesized)
actcagtaaaaaaacagctatagaatgttgctctatcctccaagatgaacactttacataatgtttgtacaaggtggcttgtgtgagtttgttgataaaccagttaaaagttgggatatc

SEQ ID NO: 46309 - DNA, 120 bp, Artificial Sequence
  ENSG00000065135_78 (sequence is synthesized)
ccccagctatcccaaaagaagaggactaaatacaaccatgttttagtctgctagagacttgtgttctgacctaagacctgtcagaagacctgtcccactggctctgcttctgtactagta

SEQ ID NO: 46310 - DNA, 120 bp, Artificial Sequence
  ENSG00000065135_79 (sequence is synthesized)
ctataaggcaggttctgtgtgaacattaataaccaaggatcctgagttagacttatagtttggtcaataaccaatttatacctagattgaaagaccaaggaaaagttaataaaataatca

SEQ ID NO: 46311 - DNA, 120 bp, Artificial Sequence
  ENSG00000065135_80 (sequence is synthesized)
acaatctggtactatttgagggaaagtagggctatcctatttggagatggaataaatgggataaattatgtttggggcctgaatagacaagatcatagcttgtatagtaagggttcttaa

SEQ ID NO: 46312 - DNA, 120 bp, Artificial Sequence
  ENSG00000065135_81 (sequence is synthesized)
cctggggcttcagagctccagcgagtctacagagagactatttgatatgctagttttctttgtatttctctgaatttaattttacgtgtttaaaaatatgatgatgaaaagaggcacatg

SEQ ID NO: 46313 - DNA, 120 bp, Artificial Sequence
  ENSG00000065135_82 (sequence is synthesized)
gtttcatcagattgccggaaggatccatgatacaaaacagattcagaactcctgtatgttgagttaaagtgaacagattagtaatggttggagcatgatattcagagtagttcctgaaca

SEQ ID NO: 46314 - DNA, 86 bp, Artificial Sequence
  ENSG00000065135_83 (sequence is synthesized)
gtaatggttggagcatgatattcagagtagttcctgaacagctcttgaatatgagaagtctttcccaggatctcactgtcgcccag

SEQ ID NO: 46315 - DNA, 65 bp, Artificial Sequence
  ENSG00000065135_84 (sequence is synthesized)
gtttgttctttggcttgagttttttcatcagcagtagccagagtagtttctcggataattctccc

SEQ ID NO: 46316 - DNA, 120 bp, Artificial Sequence
  ENSG00000065135_85 (sequence is synthesized)
catcagcagtagccagagtagtttctcggataattctcccaagctgctttctttttagggaatcagaaagactattaaatgagtttaacttttatagctacaaatttattcttaagtgta

SEQ ID NO: 46317 - DNA, 120 bp, Artificial Sequence
  ENSG00000065135_86 (sequence is synthesized)
tttcaagctcatatggctctctagtattaatattgctagtagcagcctaagtgtgagtgggtgtttctggcaaggagcaatttccattttaattgacattttcttctatgtactaaatct

SEQ ID NO: 46318 - DNA, 120 bp, Artificial Sequence
  ENSG00000065135_87 (sequence is synthesized)
tggatgccaagagctttcctcactggtagttgtaaatgctaaatctatatacttaacttcatccccttctgtcaagataaatgcaaacttcatttcccctcaaaggagttcaaaggaaaa

SEQ ID NO: 46319 - DNA, 120 bp, Artificial Sequence
  ENSG00000065135_88 (sequence is synthesized)
cttcttggcgtgtttggggagatgttttcatccaccatcacatggacccaactgcaaagattttcagtgcctaaaacaagctcacctgtcttggttcttctgaaacacgtagcagttgaa

SEQ ID NO: 46320 - DNA, 120 bp, Artificial Sequence
  ENSG00000065135_89 (sequence is synthesized)
aagtttagaattgttcacttgttccaaattctatgatagagaggcggcagcaatacattcattaatactctaaatgagagtatttgatgtcctctaagtttattcaggaagtatcttatg

SEQ ID NO: 46321 - DNA, 120 bp, Artificial Sequence
  ENSG00000065135_90 (sequence is synthesized)
tagctaagaaacatttgtagagataaaggtctgtttgatagcctgggggcagagggataatgtttgcttaataaagatgatcgttttgggatgtgccttagaaactaacaaactcgcatc

SEQ ID NO: 46322 - DNA, 120 bp, Artificial Sequence
  ENSG00000065135_91 (sequence is synthesized)
tcctatccagtgatccagatctctgagctaaggcacatagaggtctgttagtaaaaagggaatggcaggtttatttaggtttggttaatactagttttttacagactataggaagccttg

SEQ ID NO: 46323 - DNA, 120 bp, Artificial Sequence
  ENSG00000065135_92 (sequence is synthesized)
ctattttgcttggaatagtttgttgcaatagtttattctaaaaaccaggtgttgaatttaatatatggcagcttttatatttttatataggatttatttctgtgaccctaagcacaagca

SEQ ID NO: 46324 - DNA, 120 bp, Artificial Sequence
  ENSG00000065135_93 (sequence is synthesized)
aagcgtgagccactgtgcctggcctgcacaagcagtttttatgtgccttcccttcagttatgttcgtgctcctcagaataaccctgtaaagtaggtagggaagtcatcttcattttatag

SEQ ID NO: 46325 - DNA, 120 bp, Artificial Sequence
  ENSG00000065135_94 (sequence is synthesized)
tgtaaagtaggtagggaagtcatcttcattttatagttgaaagactcaagactcagaaataaagtattcacagttttgtattaagttggaaaaccagtactggaacctggggggtcttct

SEQ ID NO: 46326 - DNA, 120 bp, Artificial Sequence
  ENSG00000065135_95 (sequence is synthesized)
aactactggcctgtgctctttaagctgcaatagctatcccactttgaaaagaacgtatgaaatacagttgcagtcatgtatactccatctccaaagaatggattcattcttcatgtcatg

SEQ ID NO: 46327 - DNA, 120 bp, Artificial Sequence
  ENSG00000065135_96 (sequence is synthesized)
gtatattgactataattttctgtttttaattacccagattccaagcctgtttatagaacttatacctgaggaatggtgaggattagaagaggccgcagtccttgaggttttctttgatga

SEQ ID NO: 46328 - DNA, 120 bp, Artificial Sequence
  ENSG00000065135_97 (sequence is synthesized)
taatatctgtaactgcatcaaacacaaatttgacattctgtgtatctgtagcacaggtcatgtgactgtagatttctttgacatcttttcgcatattgaggtcaaggaactggctcttta

SEQ ID NO: 46329 - DNA, 120 bp, Artificial Sequence
  ENSG00000065135_98 (sequence is synthesized)
tgtaattccccgcatcatcataggagttgttacctggttttccagaaaaatagtgaaaaagtagaataaatgaacccttgttagttgctgactcactttaggtgattgacttgatccttg

SEQ ID NO: 46330 - DNA, 120 bp, Artificial Sequence
  ENSG00000065135_99 (sequence is synthesized)
aaatgttattagacaacagcagttgggggcctatttttggagggaagattctctattgcactccagtgtttctcactttagttgaaaagaaattgaggagaggtgtctttccacctttgg

SEQ ID NO: 46331 - DNA, 120 bp, Artificial Sequence
  ENSG00000065135_100 (sequence is synthesized)
ttttcagtaggtatcatatgaagtcagtggctctcctgcatctaatgcctgctgtattccagagtatctgaatttaaaccctgtaactgtgcccaaggttctcccttaagttcctttgtg

SEQ ID NO: 46332 - DNA, 120 bp, Artificial Sequence
  ENSG00000065135_101 (sequence is synthesized)
tcatcttggcctaaaaaatgagacaattgccagtctctactaaaaggcattattattatttccagcccctgacacttaccatcatactctggaaaacaaatgctgagatggactttcttg

SEQ ID NO: 46333 - DNA, 120 bp, Artificial Sequence
  ENSG00000065135_102 (sequence is synthesized)
attttttcctcaaagaggtccttcttgttgagaaagaggacaatggaagtagccgcaaagaatttgtggttacatatgctgttgaacagatgcaaagactcatgcatacgattctagtaa

SEQ ID NO: 46334 - DNA, 120 bp, Artificial Sequence
  ENSG00000065135_103 (sequence is synthesized)
gaggaaacaccattggaaatatcagatttggcttatagaatatctacctacttcctgctcttgttccccttggagagaccagtgctccaaatgtaaaaagcaagacagagaacagcttat

SEQ ID NO: 46335 - DNA, 120 bp, Artificial Sequence
  ENSG00000065135_104 (sequence is synthesized)
ctcaatgtaccagagtaaagccagagagatgtgggatcattctagttccctatctttctaatagctgtgtgacttgtggaaaattattgagctttttctgagtctgttttcctatcttat

SEQ ID NO: 46336 - DNA, 120 bp, Artificial Sequence
  ENSG00000065135_105 (sequence is synthesized)
agggttacaatgaaagctaaatgagattgtgtatgtatattgtccatgatagtggctggcatataggtctataatgtgttatgcagatctttagcagccaggatgcaactgagaacttga

SEQ ID NO: 46337 - DNA, 120 bp, Artificial Sequence
  ENSG00000065135_106 (sequence is synthesized)
cattttataagtagtgctgataatgggttgaaacaggcccaagttagcatgtgcccatatgcatctccaggatgattttgataggcttctttcatggggtcccagatctcagtttgggct

SEQ ID NO: 46338 - DNA, 120 bp, Artificial Sequence
  ENSG00000065135_107 (sequence is synthesized)
actttggtcctgctgccacatggtgagagttagagaatttcccagtgccataccacaagcatttctgctctctcatttccttctctgattgctacttagcgagaagtcgggctgcatatc

SEQ ID NO: 46339 - DNA, 120 bp, Artificial Sequence
  ENSG00000065135_108 (sequence is synthesized)
agggttttgaagtatactatcagctgacttgcgttcagtctacttatctaataaagcaagaacaatcccatttgtggctttttccccataatactcctgtacaaccctttaaggtctcat

SEQ ID NO: 46340 - DNA, 120 bp, Artificial Sequence
  ENSG00000065135_109 (sequence is synthesized)
agacttgttttattaatgtctcatagactttaataaacctcatagactcatagactttagggttaaagatggaaagtctcatagactgtaatctttaggcttaaagatgggaagtgaata

SEQ ID NO: 46341 - DNA, 120 bp, Artificial Sequence
  ENSG00000065135_110 (sequence is synthesized)
gctctgtaagacattttgattagacgatattcagagtgctctaatgtgaagttaaaactaccaaagggaagggaagagaacaagctgtggcaagggataggagtatccctttcatcagca

SEQ ID NO: 46342 - DNA, 120 bp, Artificial Sequence
  ENSG00000065135_111 (sequence is synthesized)
agctgtggacctccatttgtaagcagatgcttgggtgaaattaacatttttcacgcctctaacctttcccaaattcagaggtcatcagcaaggtgtggacctccatttgtgagcagatgc

SEQ ID NO: 46343 - DNA, 120 bp, Artificial Sequence
  ENSG00000065135_112 (sequence is synthesized)
ttgggtgaaattaacgtttttcacgcctctaacttttcccaaattcagaaagcagatgcttgggtgaaattaacgtttttctcacctctaacctttcccaaattcagaaactggctgggc

SEQ ID NO: 46344 - DNA, 120 bp, Artificial Sequence
  ENSG00000065135_113 (sequence is synthesized)
tctaacacttgtcctatagaactcctgtcctacagaattctacaggctaaagagaaccactcttgggtagtcttccagctgccaatttaattggcatgagagaaagctggtctgccagtc

SEQ ID NO: 46345 - DNA, 120 bp, Artificial Sequence
  ENSG00000065135_114 (sequence is synthesized)
tctccttaaactcctacggacagtacatttttagcctcctaagtggggttactagctcaacccttctattatgttgcaatgaagattcatatcatatgttattttctctgttctgtcatt

SEQ ID NO: 46346 - DNA, 120 bp, Artificial Sequence
  ENSG00000065135_115 (sequence is synthesized)
ttcatctccttccttaggcaatttgggagagtactaagtgtaactcctttgctttgcctagttgatggtcccttatctctttgcactcaattcctcttatgagctttgtgatgtccaagt

SEQ ID NO: 46347 - DNA, 120 bp, Artificial Sequence
  ENSG00000065135_116 (sequence is synthesized)
gatacttagatgtctaatttgagaccaagctcactgtcagtaaatttggagctctaaaatgctaatctagaacctgcagaagaagttgttttttagaattatttgcatgagacattgatt

SEQ ID NO: 46348 - DNA, 120 bp, Artificial Sequence
  ENSG00000065135_117 (sequence is synthesized)
ggtctgctggagggctgctagactgaaattacctaagttggggcagtagagtgacacaaggcttagagaaagggtcatggggagaacttgttctaccaaagctgcttgatgcaaaggcca

SEQ ID NO: 46349 - DNA, 120 bp, Artificial Sequence
  ENSG00000065135_118 (sequence is synthesized)
ctcaccacttcgtcatcttccaccagcaccatatcataggcactgagggctgcacagaaaatgatgcaggtgactccctcgaagcagtggatccacttctttctctcggatctctgccct

SEQ ID NO: 46350 - DNA, 120 bp, Artificial Sequence
  ENSG00000065135_119 (sequence is synthesized)
cccacatcaaacatcctgagggaagaagcagctattttcataggtatgcccaacatacgacctatatgcctttgatggtcaccccgtgaagtgggagaggaaaagggggagaagcagaac

SEQ ID NO: 46351 - DNA, 120 bp, Artificial Sequence
  ENSG00000065135_120 (sequence is synthesized)
agtaatttagattaggcttcaccaaaggccaagaagcctgcctgtgccccttttcaggattccacacgtgtatccgagatgccctagggaaccatgcacttacctgaaattcaagtcttt

SEQ ID NO: 46352 - DNA, 120 bp, Artificial Sequence
  ENSG00000065135_121 (sequence is synthesized)
gacggaaaacttggtttcaatgatgcccgtggttttgactctggatcggagcacatcttgctcactagggaggtactcagggtctgtaattcgttctaattggttcaggtagctagagaa

SEQ ID NO: 46353 - DNA, 120 bp, Artificial Sequence
  ENSG00000065135_122 (sequence is synthesized)
aagtgattagcatcaatgacaaattttccacagacgaggctaagagacgtaaaaggtatcttacccaaagtcacacagctaatttggtgatagaaatcaggactagaagccatattgtta

SEQ ID NO: 46354 - DNA, 120 bp, Artificial Sequence
  ENSG00000065135_123 (sequence is synthesized)
aatttaggattctttccttcaaaccttcatatgtcattaactagaggaaatgggggatggactgagggacaagcccatttgaggctggagttccagcgcatttaaatcaagttagataag

SEQ ID NO: 46355 - DNA, 120 bp, Artificial Sequence
  ENSG00000065135_124 (sequence is synthesized)
ttttccttgggtttgccctgactgcaagcttttgtagatttttgaatgagatttagtgggtgctaaaagttccatcaagaggcagtaaattgaaagagactttaaagacatgaaccaatg

SEQ ID NO: 46356 - DNA, 120 bp, Artificial Sequence
  ENSG00000065135_125 (sequence is synthesized)
caacacatggactttgtttatatcctgaatcaaactggggaggaaacatttgagataactggggaaatttgaacaccgacttggtgatatttgatgctattaaggaattgttaactattt

SEQ ID NO: 46357 - DNA, 120 bp, Artificial Sequence
  ENSG00000065135_126 (sequence is synthesized)
gggtgtgattatattctttttataaaaagggtcaatattttagagatccataatgacatttttaggatgaaatgatacctggaatttgcttcaaaataatccagtagggaatggaggtaa

SEQ ID NO: 46358 - DNA, 120 bp, Artificial Sequence
  ENSG00000065135_127 (sequence is synthesized)
aaagaaataagattggccatgagttgataactgttgaaggtaattcattatgttatttctacttttgtatgtttgaaagttaccttaaaaaagaaaaagttattttttttaaaaaaaaaa

SEQ ID NO: 46359 - DNA, 64 bp, Artificial Sequence
  ENSG00000065135_128 (sequence is synthesized)
taccttaaaaaagaaaaagttattttttttaaaaaaaaaaaaggtggccaggcacggtggctcg

SEQ ID NO: 46360 - DNA, 120 bp, Artificial Sequence
  ENSG00000065135_129 (sequence is synthesized)
tgggtgacaaagcgagactccgtctccaaaaaaaaaaaaggcaagaggaaggcagatgtgaactgagatgactgagaggaggagggaagtacaagtaacacaagtgcctattgtatgcca

SEQ ID NO: 46361 - DNA, 120 bp, Artificial Sequence
  ENSG00000065135_130 (sequence is synthesized)
caagtgcctattgtatgccaggcattttaatgttcagattctcgtttaaactcctaagccatcaagtttcatatccccattttacagatggagaaattcagaagagttaaatacttggct

SEQ ID NO: 46362 - DNA, 120 bp, Artificial Sequence
  ENSG00000065135_131 (sequence is synthesized)
agggtcaagagaaattgtggtgtattatgaaaaatattcagctttgtagtcaagcagcccaatgcaaatgcagtctctgctatttatctacatgaccttgggcagttaattaacttctct

SEQ ID NO: 46363 - DNA, 120 bp, Artificial Sequence
  ENSG00000065135_132 (sequence is synthesized)
gaacttcagtttttccatgtgtaaaatgaggctaattagaaaggtaccatctaccttaaggtcttactgcgtagatgggtaaagggcgttgagatggtatacacagtacacctagcagtg

SEQ ID NO: 46364 - DNA, 120 bp, Artificial Sequence
  ENSG00000065135_133 (sequence is synthesized)
actgggctttgagtgctccgggaacagtaagtgatagcattattacaagattaggagacagatggttaggttaaataaactcaggtttgactttgaagcccatacttgtctatgatccca

SEQ ID NO: 46365 - DNA, 120 bp, Artificial Sequence
  ENSG00000065135_134 (sequence is synthesized)
tactgtctgaggtaggattgataaattatgtcccttagctttttggaagcagctttgcaatgatggtactaattcctgaccaccttcccttggtttgcccttgtagtttgtgtcccctgc

SEQ ID NO: 46366 - DNA, 120 bp, Artificial Sequence
  ENSG00000065135_135 (sequence is synthesized)
cttggcatcgtgacataagatgctctaggtgtaggagactcatttctgcttagtggcctaagtagatcctagattaccagatagaaaattctgccctgaaagagccatcatgaatcacat

SEQ ID NO: 46367 - DNA, 120 bp, Artificial Sequence
  ENSG00000065135_136 (sequence is synthesized)
tactcctgcgagagtgtatgacagaactgcagggctatcttagggttctggaaggagaggcttagtgtacacctcaattaagagaacagggctgagggctactaggcagaacacgtcttt

SEQ ID NO: 46368 - DNA, 120 bp, Artificial Sequence
  ENSG00000065135_137 (sequence is synthesized)
tgaattttgcatcttcagccttgtaggctgtagtgagccagtgtaaagcaatagaaagtcatgacaactgtggcagatctccccatagcattaaattcaaaacattgctgaagcctaaca

SEQ ID NO: 46369 - DNA, 120 bp, Artificial Sequence
  ENSG00000065135_138 (sequence is synthesized)
aaacagatccacaggctgaattcagtctgggtctccagctttcaatgcctgaaattttgggttgggtgaggtttctcccaaccagagagaagactggctagaagattgcttaagcatcaa

SEQ ID NO: 46370 - DNA, 120 bp, Artificial Sequence
  ENSG00000065135_139 (sequence is synthesized)
cccaccctctcaccagtcagtcttactaagatgcggagtcattaagctggtattctgcagctctctcgaagcaggcttgcaccccaccatccttccacaacctcctaatgacctccacga

SEQ ID NO: 46371 - DNA, 120 bp, Artificial Sequence
  ENSG00000065135_140 (sequence is synthesized)
gctcaggaggcatggttccctcctcaatggagtcagccaggttgttgagctgtcgcccgtcatcctgtaatgcagaaacctggttaagaacttcacaggagtaatagctttccaggaggc

SEQ ID NO: 46372 - DNA, 120 bp, Artificial Sequence
  ENSG00000065135_141 (sequence is synthesized)
ttctgggaatactgctgaatggaaatcattttacattactacgaagacctaagatggaagcagtatccagtgaagattctatgtaagaaaacatactgttgaatttttgagtatgctccc

SEQ ID NO: 46373 - DNA, 120 bp, Artificial Sequence
  ENSG00000065135_142 (sequence is synthesized)
cagatgcagagggtggcactatacccagccctggggtgtgtctaaagcggggcaggggtcccaggtatttcctctctggagtttctggcttccatccttagtctgaaagtttaccgccac

SEQ ID NO: 46374 - DNA, 120 bp, Artificial Sequence
  ENSG00000065135_143 (sequence is synthesized)
aaaacgtgggtcctctgctgcagagagactgaaaatgtaaaggccagattgaccatgaaatagacaagatagaagacagggacccatcacctttgttcttcagcgattgaaagctagaaa

SEQ ID NO: 46375 - DNA, 120 bp, Artificial Sequence
  ENSG00000065135_144 (sequence is synthesized)
aagtccagtactagaagtagggatttcacttacaaaagttccatggccaggaacccaagggtagcaatttaaatggtaaagtaaaaaagcagaggaagctgtgagcagctttattttgta

SEQ ID NO: 46376 - DNA, 120 bp, Artificial Sequence
  ENSG00000065135_145 (sequence is synthesized)
gctcacacctgtaatctcaacactttcggagtctgaggcaggaggattgcttaaggccaggagtttgacaccagcctagacaagatggcaagaccccttctctacaaaaaaattttaaaa

SEQ ID NO: 46377 - DNA, 86 bp, Artificial Sequence
  ENSG00000065135_146 (sequence is synthesized)
ggaggattgcttaaggccaggagtttgacaccagcctagacaagatggcaagaccccttctctacaaaaaaattttaaaaaaccta

SEQ ID NO: 46378 - DNA, 120 bp, Artificial Sequence
  ENSG00000065135_147 (sequence is synthesized)
tcacaccactgcattccagcctgggtaagagaggaagaccctgtcccagtaaaaataagggtggatgttgcttacttctccaggactgcataattgtggtgtattatgaaaaatattcag

SEQ ID NO: 46379 - DNA, 120 bp, Artificial Sequence
  ENSG00000065135_148 (sequence is synthesized)
gtattatgaaaaatattcagctttgtagtcaagcagcccaatgcaaatgcagtctctgctatttatctacatgaccttgggcagttaattaacttctctgaacttcagtttttccatgtg

SEQ ID NO: 46380 - DNA, 120 bp, Artificial Sequence
  ENSG00000065135_149 (sequence is synthesized)
taaaatgaggctaattagaaaggtaccgtctaccttaaggtcttactgcgtagatgggtaaagggccttgagatggtatacacagtacacctagcagtgagatcccacccagcaggtggg

SEQ ID NO: 46381 - DNA, 120 bp, Artificial Sequence
  ENSG00000065135_150 (sequence is synthesized)
attttagttactatttttcttacccatctttccatatagtttgttggcctctggtatgtttcttcttgctagcctttctgcttccacccttaaccacataatagtaatcacataccgcac

SEQ ID NO: 46382 - DNA, 120 bp, Artificial Sequence
  ENSG00000065135_151 (sequence is synthesized)
agcttggttcagcataatcgatgcccagtgtggtcatggcccggatgatagccaggatggactgcagcacatttccatagatgatagccttgaactccaggcattcttctggtgaatagc

SEQ ID NO: 46383 - DNA, 120 bp, Artificial Sequence
  ENSG00000065135_152 (sequence is synthesized)
catcctggtgaatgatcctgcaaggggcagacactctgtctttagctggacctgagtaaccagacctaagggattaggaatttgggggtatttaaaggatcataagaatcctatctctct

SEQ ID NO: 46384 - DNA, 120 bp, Artificial Sequence
  ENSG00000065135_153 (sequence is synthesized)
gttgctactgctttctcaaagtggagggtgagggacaaggggtacagatgaggggcattggaatcagatcctttatacctgggctccttgaggctaaagagcctttcactttgaatacct

SEQ ID NO: 46385 - DNA, 120 bp, Artificial Sequence
  ENSG00000065135_154 (sequence is synthesized)
ccactggctgtactgacttcttcaccctatcttgtcttttggggctttgtttctactcacttcatctgtttgacgatggtgctctttcctgactccccagcacctggaaggaaaaatgct

SEQ ID NO: 46386 - DNA, 120 bp, Artificial Sequence
  ENSG00000065135_155 (sequence is synthesized)
tatgctttcgatttccaccagttctcctcagccttccaggagatggcctgggagaagtcagagccactgcttgcttgggggtcttgttaggggagaatacatagggatgactgctgccct

SEQ ID NO: 46387 - DNA, 120 bp, Artificial Sequence
  ENSG00000065135_156 (sequence is synthesized)
caatttctggcaggcttgagctcaggccattcaacctggatttagagcagtttcttaacttcagtactatttagtttgggctgtctcatgcatggtaggatgttcagcagcattcctggc

SEQ ID NO: 46388 - DNA, 120 bp, Artificial Sequence
  ENSG00000065135_157 (sequence is synthesized)
ctctacccactagaggccaatagcatcccacttccctagttatgacaaccaaaagtgtctccagacatttccaaatgaccactggcagtcaaaatcttcctgttgaaaaccactaacaga

SEQ ID NO: 46389 - DNA, 120 bp, Artificial Sequence
  ENSG00000065135_158 (sequence is synthesized)
ttcagggggagtcctttaacatttctcctctctgcctatttttgactcaggagagtgatcttggggtaggattggagagagctggatcatttcaccaaaataactatattttcatcacct

SEQ ID NO: 46390 - DNA, 86 bp, Artificial Sequence
  ENSG00000065135_159 (sequence is synthesized)
gctggatcatttcaccaaaataactatattttcatcaccttgctggttcccttttttttttttgagacagggtctcaggtttgtat

SEQ ID NO: 46391 - DNA, 66 bp, Artificial Sequence
  ENSG00000065135_160 (sequence is synthesized)
tgatcctcccacctcagtctcctgagtagttgggattccaggtgtgcgacatcatgcccgactaca

SEQ ID NO: 46392 - DNA, 85 bp, Artificial Sequence
  ENSG00000065135_161 (sequence is synthesized)
ctgacctcaggtagatccacccacgccactgcatccggccatttccccccgcccctccgtagaggcaggttttcaccatgttgct

SEQ ID NO: 46393 - DNA, 120 bp, Artificial Sequence
  ENSG00000065135_162 (sequence is synthesized)
cccccgcccctccgtagaggcaggttttcaccatgttgctcaacctggtcttggatggggctaagtgggttccctttattgactaatgtgtcctaatgtcctcattcacactctgctctc

SEQ ID NO: 46394 - DNA, 120 bp, Artificial Sequence
  ENSG00000065135_163 (sequence is synthesized)
tccatcaaaaactcataccttctagtactgagtttatactaccctaatgcctcgaactcctcctatttcgcttgtgcttgttccctctaagcagcttatcctgaatgtagaagaaatctg

SEQ ID NO: 46395 - DNA, 120 bp, Artificial Sequence
  ENSG00000065135_164 (sequence is synthesized)
cttaggcttaaaagatctctcagtggccccaccatctctgtttccccctgcgtaacctcctgggctccttagagtctggtccagcttacaaagatatgctcctttagtgtgtccttacga

SEQ ID NO: 46396 - DNA, 120 bp, Artificial Sequence
  ENSG00000065135_165 (sequence is synthesized)
ctgtgccacagatcagctgggggaaaagaaggtgccttagcctagtgcgtcagctcccagatcccttatgggggcttggaaacccagctcaggcatctaatcttctgctacgtagaccct

SEQ ID NO: 46397 - DNA, 120 bp, Artificial Sequence
  ENSG00000065135_166 (sequence is synthesized)
acctgctccagctaccctacttctgtggtaccagtggtttgttttcctaagccacgtgtctcaaatgttcttgtcttggttttatttacagctgtgatcaatttccctgacaaattgagg

SEQ ID NO: 46398 - DNA, 120 bp, Artificial Sequence
  ENSG00000065135_167 (sequence is synthesized)
tgcttttattttctcagcacagaccagtgatctgcttaggagctcatcaagttgatgaaccttccatctggcaggagctttgcaggcagctattgaatagagagccaggaagggactgct

SEQ ID NO: 46399 - DNA, 120 bp, Artificial Sequence
  ENSG00000065135_168 (sequence is synthesized)
gtacataaagacaccattcctccttcctcagagccccctacttccaaagtttttactgaaagcaagaaggaaccactatacttggcaaaaaccagtgggactatctctggtactgttggc

SEQ ID NO: 46400 - DNA, 120 bp, Artificial Sequence
  ENSG00000065135_169 (sequence is synthesized)
actgactgtatggtgggacttgtgagcctgttggtgagggaaggtcctgttctcttctgatttcttggcttagagttctctgcagattgggtacagtctgcaagtccagggtccttgaag

SEQ ID NO: 46401 - DNA, 120 bp, Artificial Sequence
  ENSG00000065135_170 (sequence is synthesized)
ccaaaaggatgtgttaggtttggttagatttggaaatgggtgggttcatggtggcccttgcactattcctcgctcaagagtagaaaaactctggaatagccttggcattctggatcccct

SEQ ID NO: 46402 - DNA, 120 bp, Artificial Sequence
  ENSG00000065135_171 (sequence is synthesized)
tggggtggctgtttaggccccatattaactcagctctagatctcctgatcccctagccagactgtgtagaggagaggaaaaatgacctgccacccttccttcccatggggtgaggtagaa

SEQ ID NO: 46403 - DNA, 120 bp, Artificial Sequence
  ENSG00000065135_172 (sequence is synthesized)
cccaccaacccttcaggaaagtaggaaggacccctgccttctctggctcatcttcccatctcactcacccagcagtagcagcttgacagtcttggcttccttatcagcatcctcctgcag

SEQ ID NO: 46404 - DNA, 120 bp, Artificial Sequence
  ENSG00000065135_173 (sequence is synthesized)
cttcttttctagctccttggacctcttggccagttctttgtcctcagcactggctccacttcccatatttgccgtcttgtcagctttttcaggcccctaatcctctctcgtaaggtttcc

SEQ ID NO: 46405 - DNA, 120 bp, Artificial Sequence
  ENSG00000065135_174 (sequence is synthesized)
tgtatgtgagatggaagagaaggaaaaaagttgggattgagtatcccaacttggctcccctaaaagctggtctgtacgatggcaggtgagagagcaggctgtagggtcttgtactctgcc

SEQ ID NO: 46406 - DNA, 120 bp, Artificial Sequence
  ENSG00000065135_175 (sequence is synthesized)
tacattgactgagactccctacttcaactggagacctacttcttagtctagggattgtagcctttatatctagcaatgtgataggtcaagccaattaagagctttgtcaatatggcaagg

SEQ ID NO: 46407 - DNA, 120 bp, Artificial Sequence
  ENSG00000065135_176 (sequence is synthesized)
ggtaaagactcaaatgtttctataactagggaaatgatctgctgggttctgacggaaggataggatgcacgactacttccatcctttaaggggttcatcccctgaaagtctcttgcttcc

SEQ ID NO: 46408 - DNA, 120 bp, Artificial Sequence
  ENSG00000065135_177 (sequence is synthesized)
ttagatttatttgcatcatagagctagagattactggcacatatgtagaaagcattccttatgttgagcctccagattataaggtcttgatctcaagggcttcagggtatcaaagcatac

SEQ ID NO: 46409 - DNA, 120 bp, Artificial Sequence
  ENSG00000065135_178 (sequence is synthesized)
tcgtttaccataggctggtcctggccaggaaatttgttttgggtggtgcccttccttgggaagattaggaatgtttcagctcccgcagtggctgctgctccaggaagctactagcattgt

SEQ ID NO: 46410 - DNA, 120 bp, Artificial Sequence
  ENSG00000065135_179 (sequence is synthesized)
tcctttgcattggcccctctctttgtacttctgttattagcacttatcacttcatattgtacgtcgttttacaaatcttttccctcactgcatttctccccctggagctcaacggaccaa

SEQ ID NO: 46411 - DNA, 120 bp, Artificial Sequence
  ENSG00000065135_180 (sequence is synthesized)
atctgactcatctttgaacctctcagaacttgtagtttatttgtggatcaaaaggtttggtgaatgaataaatgcaggaaaagggtgtatggtgaagagaatggggttgcttccctttgg

SEQ ID NO: 46412 - DNA, 120 bp, Artificial Sequence
  ENSG00000065135_181 (sequence is synthesized)
cccactaaagccagctgagtcccaacttcacttcataaatgaactttgctggtattcagtgtggggtttgtgctgcctcacacaaaaaactctgcttctttgggaaattggactccagac

SEQ ID NO: 46413 - DNA, 120 bp, Artificial Sequence
  ENSG00000065135_182 (sequence is synthesized)
tctggcttctcaaaggttggggcagctctctctccttctggctctcatcccagctgccctttcctgggggaaaaatgagggtgcagtctagcaactgcctcacagacatttaggactcca

SEQ ID NO: 46414 - DNA, 120 bp, Artificial Sequence
  ENSG00000065135_183 (sequence is synthesized)
caggttgtactcctctatgccaattatttcagtttacttaaatgagtgttgctggcggagcctcctcaggtggagatgttttagaattttgttgcccaaaatgtggatcaagagccagca

SEQ ID NO: 46415 - DNA, 120 bp, Artificial Sequence
  ENSG00000065135_184 (sequence is synthesized)
acatcagatcacccggaagctcattagacatgcagaatctcaggctttaatccagaacttctgattcagaatccgcagtttaacaagatctcaggtgactctaaagacattaaagattgg

SEQ ID NO: 46416 - DNA, 120 bp, Artificial Sequence
  ENSG00000065135_185 (sequence is synthesized)
gaagtactgccctagggacctgttttccgctaaacttacctaatcctaagaatcacctgggttgctggtgtctgtgtttcctcaagtcttaggtgccactgactagaagattaccctgct

SEQ ID NO: 46417 - DNA, 120 bp, Artificial Sequence
  ENSG00000065135_186 (sequence is synthesized)
ttccgagatgttaaaatagtgtatgtttttaaatggtatgttagcatcaaactccagagccagagaaaatattttaagctaatacaggtagttatcacatctgtgaagtttgaaaaaccc

SEQ ID NO: 46418 - DNA, 120 bp, Artificial Sequence
  ENSG00000065135_187 (sequence is synthesized)
tggcctgaaacagttctcaacttttagtgtacagtggcatttacctggagagctttttaaaaaatactgatttaattggtctggagtgcagtccaggcacaaggatttaaaaacgtcccc

SEQ ID NO: 46419 - DNA, 120 bp, Artificial Sequence
  ENSG00000065135_188 (sequence is synthesized)
agctgattctagtgtacagccaaggtggagaactactgaggtcgaaggatgtaatttgctctttcattttagagctggacttgtgcagcagtggccagttgggactgggaaggtcaggag

SEQ ID NO: 46420 - DNA, 120 bp, Artificial Sequence
  ENSG00000065135_189 (sequence is synthesized)
tagaatctaggtctccccgcctatcaggtaccctgagccatagctaattatcttcctccttcgcaccacctttcagtgactgtaggggctgatggagaaatatgcagctgctgaggtgct

SEQ ID NO: 46421 - DNA, 120 bp, Artificial Sequence
  ENSG00000065135_190 (sequence is synthesized)
ttccatggtagccatgttttcccaatcaaattggcaagtccttattgacttaaggaaaaacaggagagtctctttgaaattgtgactatcttggaatcttggttataaggtttcagtaat

SEQ ID NO: 46422 - DNA, 120 bp, Artificial Sequence
  ENSG00000065135_191 (sequence is synthesized)
tataccccactgctagccctgctccagcgtactcacaatactggtaactcacactgaggccagagccatgctgaaggctacactgttcaaggggctgcctggaactattaataattatta

SEQ ID NO: 46423 - DNA, 120 bp, Artificial Sequence
  ENSG00000065135_192 (sequence is synthesized)
tgttatagttattataattaataactgctgaacaatgtaagtggctcataccagttaattatcacaataactgctattgtccccaatttacagactagattaactgagacttgagagtta

SEQ ID NO: 46424 - DNA, 62 bp, Artificial Sequence
  ENSG00000065135_193 (sequence is synthesized)
ctggccaacatggtgaaatcccgtatccactaaaaatacaaaaattaggccgggcatggtgg

SEQ ID NO: 46425 - DNA, 63 bp, Artificial Sequence
  ENSG00000065135_194 (sequence is synthesized)
acctgaggtcaggagttcctggccaacatggtgaaatcccgtatccactaaaaatacaaatgg

SEQ ID NO: 46426 - DNA, 78 bp, Artificial Sequence
  ENSG00000065135_195 (sequence is synthesized)
caagattccgtccccagcatggtggcatgcacccagctacttgggagatagaggcatgagaatcgcttgaacccggga

SEQ ID NO: 46427 - DNA, 120 bp, Artificial Sequence
  ENSG00000065135_196 (sequence is synthesized)
tatggcctagtaaacagacaaaccggtgatccttctttctattacttccacataagtagccagagagagaaagcatggacaaatgcatgaactctataacagcagcccttgttaaaggaa

SEQ ID NO: 46428 - DNA, 120 bp, Artificial Sequence
  ENSG00000065135_197 (sequence is synthesized)
ccactaagttgtttcacacacagggaaagtgggcttgttcctttttctgctactacctctgcaaacttctgtgctgcttctgctttgttccctaacttactggatggaagttcccctttc

SEQ ID NO: 46429 - DNA, 120 bp, Artificial Sequence
  ENSG00000065135_198 (sequence is synthesized)
tcactgctaagctgagagagggaactgctagccctcgcctggcctgagagtacagatccattactgtgcatacatcatcctgatgtctgtgacctcctgcctctgcctctatcgtcagtt

SEQ ID NO: 46430 - DNA, 120 bp, Artificial Sequence
  ENSG00000065135_199 (sequence is synthesized)
cctgtgcctttcctgtggctgtcccactttatgatcacatttacgaacagtttcctgatgaagtaaataaggtatgtagtgctagttccattttggaggtgagtgaactgaagtacagaa

SEQ ID NO: 46431 - DNA, 120 bp, Artificial Sequence
  ENSG00000065135_200 (sequence is synthesized)
aagtgatcctcacattaataagcaagttggtatcagaagccaagccagagctcaggtgttttgattcacagccctttataaccattatcattttgaatgaaaagtaaatcactgtttctt

SEQ ID NO: 46432 - DNA, 120 bp, Artificial Sequence
  ENSG00000065135_201 (sequence is synthesized)
agtgatttgggcatgtttcctgagttaagggatctgtctgacatccgtggtaagccttgtcttaagtgaattgtgggtaaagacttgtcccagatggagtgggaggacatgaaggatgag

SEQ ID NO: 46433 - DNA, 120 bp, Artificial Sequence
  ENSG00000065135_202 (sequence is synthesized)
gaactaccttcaggaccttccagtccataggcagaggtgggggaaattcacagaaaaacaaatgagttaaagggatactgcagtagtgctgggaaattcagagctgtttaagacctagca

SEQ ID NO: 46434 - DNA, 120 bp, Artificial Sequence
  ENSG00000065135_203 (sequence is synthesized)
ttcacccctggtaggaaaggcaatcaaacacacatctgactgtcagactgacaaagttctacagcggaagaaagaaaagggtgattgtgaaatgaatagactttccacagagaagcagaa

SEQ ID NO: 46435 - DNA, 120 bp, Artificial Sequence
  ENSG00000065135_204 (sequence is synthesized)
taacagtggaagtgggagatacgcattttggggaaaggaaagagcatgaaaaaagaggtagaggcacaaagtacaaggtgtgctcagagaagactgggactttgatgtgactggactgga

SEQ ID NO: 46436 - DNA, 120 bp, Artificial Sequence
  ENSG00000065135_205 (sequence is synthesized)
gtgaaaggtgcatggagtggagggttgggaggtgaagatgaagacaagaaagggaaattggagccagccagtgaagcgccttcaatggcaaggggtttgactaaaatccactggggtctt

SEQ ID NO: 46437 - DNA, 120 bp, Artificial Sequence
  ENSG00000065135_206 (sequence is synthesized)
ataaacaagtatagatggaaacagctgtatggtgctataaacacaatgctgggtgactgaggtgagggggagagggagctggctgctgggagaagctgagaaaccagagctgaacagctt

SEQ ID NO: 46438 - DNA, 120 bp, Artificial Sequence
  ENSG00000065135_207 (sequence is synthesized)
gtttctagaagggcctaggcataaggtatggtttgggaaattgccttggccaaggacctttttggagctgcagatattctctcccaagtttagtatctgtgaagattgttctggcctagc

SEQ ID NO: 46439 - DNA, 120 bp, Artificial Sequence
  ENSG00000065135_208 (sequence is synthesized)
tagggaggcggacatcacaagtgagctgaagtccagaagcaaagaaaagcacttcttcagagaaacaggagtgcaccatctttagggagctgggattccgggagggccagttaaggagcc

SEQ ID NO: 46440 - DNA, 120 bp, Artificial Sequence
  ENSG00000065135_209 (sequence is synthesized)
atgtggggaacaggctaggaggggaggaagctgtgtttggagctagggaatatctcagaggctcaaaggcaatgaatgttaaggcctcagtgtgaaaaaagcccaggccataggatgact

SEQ ID NO: 46441 - DNA, 120 bp, Artificial Sequence
  ENSG00000065135_210 (sequence is synthesized)
cactcctttatttcccaagctctgttctgcgtagacaatgaaacctcactgagattcttgctggtatggagtgggtggagggattgatgcctaactataatcagggccgacttcctagca

SEQ ID NO: 46442 - DNA, 120 bp, Artificial Sequence
  ENSG00000065135_211 (sequence is synthesized)
gcaacaatacaccagatgacctggaaataggggagggttgtagagtgaagggtgtgttgcagatgggactaggggactagcataaagggactaatgaactggtttgcctgggctgggtgg

SEQ ID NO: 46443 - DNA, 120 bp, Artificial Sequence
  ENSG00000065135_212 (sequence is synthesized)
agggcaaggattgccacctattggctgctgaggtaggtaggtctgcattaagcaggatgctcaagagacctggcccaatgcaagatactatctttaaaactatgtcaacatttgcatctt

SEQ ID NO: 46444 - DNA, 120 bp, Artificial Sequence
  ENSG00000065135_213 (sequence is synthesized)
atcagaagatacatgacatttatgtagttacatggtgcttgatttttgagattcattttattcattcttgagagtccatcagcctcaaaatccctaagcgccccaagaccaattcagtgg

SEQ ID NO: 46445 - DNA, 120 bp, Artificial Sequence
  ENSG00000065135_214 (sequence is synthesized)
gccataaatgtaaacagaatagtttaagtctggggttaagaccccgggaaggctgggttggggggactgtggaggcaattacagatttttacagatttttgttgatttctatccccttga

SEQ ID NO: 46446 - DNA, 120 bp, Artificial Sequence
  ENSG00000065135_215 (sequence is synthesized)
ttataaaagttatgggtatgtattataatttctaaaatgcaaataaatataaagaaaataaatataacccataattccatcactacagataatcattggtaaacttgttggtgtgtttct

SEQ ID NO: 46447 - DNA, 120 bp, Artificial Sequence
  ENSG00000065135_216 (sequence is synthesized)
tttctacccatgtatatcacataagtaggaccatactgtgtatagtgttttgcatccattcttttacctaactttatattgtaaacatttccacatcattaaacatttctccaagaacaa

SEQ ID NO: 46448 - DNA, 120 bp, Artificial Sequence
  ENSG00000065150_0 (sequence is synthesized)
gatacttgctgtaagtagcaaaaagatgggaaggaaagtctacagaccaaatcatatctgaatctccccattctccctctccacaaatattggtttaggaattctccgaagtttgaaggt

SEQ ID NO: 46449 - DNA, 120 bp, Artificial Sequence
  ENSG00000065150_1 (sequence is synthesized)
tatgaatggttatcactcaaggattcagaactaagcagaggaaagaaattcctaagggaacactgctcagaaagtactgcagcatgtcttcaaatgcctgaggatcaagttggaaaacta

SEQ ID NO: 46450 - DNA, 120 bp, Artificial Sequence
  ENSG00000065150_2 (sequence is synthesized)
gaagcaacagaaaacacaataagccccaggcgtgagtcactggagagcgcgacgggaggaaggggcgccctgagtccacagccctgggggaggtcggagggtctgaaagcgagaagtccg

SEQ ID NO: 46451 - DNA, 120 bp, Artificial Sequence
  ENSG00000065150_3 (sequence is synthesized)
tgagtagaagcgcaatggcggcggccgcggcggagcagcaacagttctacctgctcctgggaaacctgctcagccccgacaatgtggtccggaaacaggcagaggaaacctatgagaata

SEQ ID NO: 46452 - DNA, 120 bp, Artificial Sequence
  ENSG00000065150_4 (sequence is synthesized)
tcccaggccagtcaaagatcacattcctcttacaagccatcagaaatacaacagctgctgaagaggctagacaaatggccgccgttctcctaagacgtctcttgtcctctgcatttgatg

SEQ ID NO: 46453 - DNA, 120 bp, Artificial Sequence
  ENSG00000065150_5 (sequence is synthesized)
aagtctatccagcacttccctctgatgttcagactgccatcaagagtgagctactcatgattattcagatggaaacacaatctagcatgaggaaaaaagtttgtgatattgcggcagaac

SEQ ID NO: 46454 - DNA, 120 bp, Artificial Sequence
  ENSG00000065150_6 (sequence is synthesized)
tggccaggaatttaatagatgaggatggcaataaccagtggcccgaaggtttgaagttcctttttgattcagtcagctctcaaaatgtgggactgcgggaagctgcccttcacattttct

SEQ ID NO: 46455 - DNA, 120 bp, Artificial Sequence
  ENSG00000065150_7 (sequence is synthesized)
ggaactttcctggaatttttgggaaccagcaacaacactatttagatgtcatcaaacgaatgttagttcagtgtatgcaagatcaggaacacccgtcgatcaggacgttatctgctagag

SEQ ID NO: 46456 - DNA, 120 bp, Artificial Sequence
  ENSG00000065150_8 (sequence is synthesized)
ctacagctgcatttatacttgcaaatgagcataatgttgctctgttcaaacattttgcagacttgctaccgggattcctacaggcggtaaatgactcgtgctaccagaatgatgattctg

SEQ ID NO: 46457 - DNA, 120 bp, Artificial Sequence
  ENSG00000065150_9 (sequence is synthesized)
tcctaaaatccctcgttgagattgcagatactgttccaaagtatttgcgtcctcacttggaagcaactctacagctaagtctaaagttgtgtggagacactagcctcaacaatatgcaac

SEQ ID NO: 46458 - DNA, 120 bp, Artificial Sequence
  ENSG00000065150_10 (sequence is synthesized)
gccagcttgcccttgaagtgatcgtcaccctctctgagactgcagctgctatgttaagaaaacataccaatattgttgcacagactattcctcagatgttagcaatgatggttgatttgg

SEQ ID NO: 46459 - DNA, 120 bp, Artificial Sequence
  ENSG00000065150_11 (sequence is synthesized)
aagaagatgaggactgggcaaatgcagatgaactagaagatgatgattttgacagcaatgcagttgcaggcgagagtgctctagatcgaatggcttgcggacttggtggaaagctcgttc

SEQ ID NO: 46460 - DNA, 120 bp, Artificial Sequence
  ENSG00000065150_12 (sequence is synthesized)
tgccgatgatcaaggaacacattatgcaaatgcttcaaaatcctgactggaaataccggcatgcaggattgatggccttatctgccattggtgaagggtgccaccagcaaatggaaggaa

SEQ ID NO: 46461 - DNA, 120 bp, Artificial Sequence
  ENSG00000065150_13 (sequence is synthesized)
ttctaaatgagatcgtaaattttgttttactttttctccaggatcctcatccaagagtaaggtatgcagcctgtaatgccgtgggacagatggctacagattttgcacctggtttccaaa

SEQ ID NO: 46462 - DNA, 120 bp, Artificial Sequence
  ENSG00000065150_14 (sequence is synthesized)
agaaatttcatgagaaggtgattgcagctctgctgcagaccatggaagaccaaggcaatcaacgtgtgcaggcccatgcagctgctgccctcattaactttactgaagactgtcccaagt

SEQ ID NO: 46463 - DNA, 120 bp, Artificial Sequence
  ENSG00000065150_15 (sequence is synthesized)
cactacttattccatacttggataatttggtgaaacatctgcattccattatggtactgaagcttcaagagctgattcagaaaggcaccaagttagttttggaacaagttgtgacatcca

SEQ ID NO: 46464 - DNA, 120 bp, Artificial Sequence
  ENSG00000065150_16 (sequence is synthesized)
ttgcatcagttgccgatactgcagaagaaaaatttgtcccctactatgatttatttatgccatcactgaagcacatcgttgagaatgcggttcaaaaagaactgagacttctgagaggaa

SEQ ID NO: 46465 - DNA, 120 bp, Artificial Sequence
  ENSG00000065150_17 (sequence is synthesized)
aaactattgaatgcattagcctcattggtctggctgttgggaaggaaaaattcatgcaggatgcatcagatgtgatgcagcttttgttaaagacccagacagacttcaatgatatggaag

SEQ ID NO: 46466 - DNA, 120 bp, Artificial Sequence
  ENSG00000065150_18 (sequence is synthesized)
tctcttacatgatctcagcatgggccagaatgtgcaaaatccttggaaaagaatttcagcaataccttccagtggttatggggcctttaatgaagacggcttcaattaagcccgaagtag

SEQ ID NO: 46467 - DNA, 120 bp, Artificial Sequence
  ENSG00000065150_19 (sequence is synthesized)
cccttttagatacccaagacatggagaatatgagtgatgatgatggttgggaatttgtgaaccttggagatcagcaaagctttggtattaaaactgcaggactagaagaaaaatcaactg

SEQ ID NO: 46468 - DNA, 120 bp, Artificial Sequence
  ENSG00000065150_20 (sequence is synthesized)
cttgccagatgttggtttgctatgctaaggagttaaaggaaggctttgtggagtacaccgaacaggttgtcaaactgatggtccctttactgaaattttatttccacgatggtgttcgag

SEQ ID NO: 46469 - DNA, 120 bp, Artificial Sequence
  ENSG00000065150_21 (sequence is synthesized)
tggcagcagcggaatccatgcctcttctcctggagtgtgcaagagtccgtggtcctgagtatctcacacagatgtggcattttatgtgtgatgctctaattaaggccattggtacagaac

SEQ ID NO: 46470 - DNA, 120 bp, Artificial Sequence
  ENSG00000065150_22 (sequence is synthesized)
cagattcagacgtcctctcagaaataatgcattcttttgcaaagtgcattgaagtaatgggagatggatgccttaataatgaacactttgaagaactgggaggtatattgaaagcaaagc

SEQ ID NO: 46471 - DNA, 120 bp, Artificial Sequence
  ENSG00000065150_23 (sequence is synthesized)
ttgaagaacattttaaaaatcaagaattacgacaagttaaaagacaagatgaagactatgatgaacaggtcgaagagtcactacaagatgaggatgataatgatgtttatattctgacca

SEQ ID NO: 46472 - DNA, 120 bp, Artificial Sequence
  ENSG00000065150_24 (sequence is synthesized)
aagtgtcagatattttacactcaatattcagtagctacaaagaaaaggtgttaccatggtttgaacagctgcttccattaattgtcaacctcatttgtccacatagaccatggccagaca

SEQ ID NO: 46473 - DNA, 120 bp, Artificial Sequence
  ENSG00000065150_25 (sequence is synthesized)
gacaatggggattatgcatctttgatgatgtcatagaacactgtagtccagcctcatttaaatacgcagaatatttcttaagaccaatgctccaatatgtatgtgacaacagcccagaag

SEQ ID NO: 46474 - DNA, 120 bp, Artificial Sequence
  ENSG00000065150_26 (sequence is synthesized)
tcaggcaagcagctgcatatggcctgggagtcatggcacagtacggtggagataattatcgccctttttgtacagaagcacttcccctgctggtaagagttattcagtctgcggattcta

SEQ ID NO: 46475 - DNA, 120 bp, Artificial Sequence
  ENSG00000065150_27 (sequence is synthesized)
agaccaaagaaaatgtcaatgctacagagaactgcatctcagcagtagggaaaatcatgaagttcaagcctgactgtgtaaacgttgaagaggtccttccacactggttgtcttggcttc

SEQ ID NO: 46476 - DNA, 120 bp, Artificial Sequence
  ENSG00000065150_28 (sequence is synthesized)
cactacatgaagataaagaagaagctgttcagactttcaattatctgtgtgacctgattgaaagtaatcatccaattgttcttggcccaaacaataccaatctgcccaaaatatttagta

SEQ ID NO: 46477 - DNA, 120 bp, Artificial Sequence
  ENSG00000065150_29 (sequence is synthesized)
taattgcggaaggagaaatgcacgaggcaattaaacatgaagatccttgtgccaaacgtctggccaatgtcgttcgccaagtacagacttctggaggactgtggactgagtgcatagcac

SEQ ID NO: 46478 - DNA, 120 bp, Artificial Sequence
  ENSG00000065150_30 (sequence is synthesized)
agctcagtcctgagcagcaggccgccattcaggagctcctgaactctgcgtgaagggccttaatgtcacccaccagaaaactaactccaaataaacgcttaccctttcctttaggtttct

SEQ ID NO: 46479 - DNA, 120 bp, Artificial Sequence
  ENSG00000065150_31 (sequence is synthesized)
ttgttttgtttttgagcaaaagagatcggtagtgttgtgtgtaggccattcttctggagagccacaagcaggaagagcagcgctgtgttgcagaatggagtttccatggatttctaccag

SEQ ID NO: 46480 - DNA, 120 bp, Artificial Sequence
  ENSG00000065150_32 (sequence is synthesized)
accactgaaggagttcctggaagccctgcggtagctagcactgaagactatttttctattggtataacccgcccacctgaaggggaaagggaaatcaaattaatttttctcgttagacat

SEQ ID NO: 46481 - DNA, 120 bp, Artificial Sequence
  ENSG00000065150_33 (sequence is synthesized)
aaggaaatttaaggaaaaacagctttaagaacagttactcagcgtagatgtgtgttcacacaaattgctctgcattcagtgttcattgtgaattgggagtgtgagtctttctgtagggta

SEQ ID NO: 46482 - DNA, 120 bp, Artificial Sequence
  ENSG00000065150_34 (sequence is synthesized)
gaaagaagcctcctacccagcaaaccagtagacccaaaagttgaaaaaaactgatgacagacaacaagcatgaagatggcatatttgatgtcactttggttctttttcccagaaggctta

SEQ ID NO: 46483 - DNA, 120 bp, Artificial Sequence
  ENSG00000065150_35 (sequence is synthesized)
tacagtgactcagtcgggaagctttccagcttccagcccttgaatgtgaagtgtcattggcatgtctggcagtagtctctcattcactcctcaataaacaacattgaatacaaaagaggc

SEQ ID NO: 46484 - DNA, 120 bp, Artificial Sequence
  ENSG00000065150_36 (sequence is synthesized)
gacctcccacaactggagcagccgggaacagctctgaccacagtggttccggggagaagcctttccaggacccatgtgtaggcacaactgttttccctgatcaggatacttgcggcactc

SEQ ID NO: 46485 - DNA, 120 bp, Artificial Sequence
  ENSG00000065150_37 (sequence is synthesized)
aaaactcagtactgtctggcttggattcatttcatgtttttaatataagaatgatctaatatttttttaaagtaatagctatcagtaatagctgagtgttttttcccctaatattttcct

SEQ ID NO: 46486 - DNA, 120 bp, Artificial Sequence
  ENSG00000065150_38 (sequence is synthesized)
tgtgcaattcagacttaagcatcgagtttttaccatcttccactttaagctaagttatgatacctattccattcacaattggtgttctttttaaggtttgcaaatttcagccaattttgt

SEQ ID NO: 46487 - DNA, 120 bp, Artificial Sequence
  ENSG00000065150_39 (sequence is synthesized)
agctaagattgttctgatcagctcaaaaagatttggcttagtgttttcattgcaaattataattgctgtagagccacacacaacttttgaacttttaattataagtgttatggctaaagt

SEQ ID NO: 46488 - DNA, 120 bp, Artificial Sequence
  ENSG00000065150_40 (sequence is synthesized)
tatttactgaaaatttcagtaaaatgtgtgaatgtttctttatgtattaacctcatagcagtaaatgacttgctgttgtttaatttttctaaggcatcttaatagacttctgttgaaaac

SEQ ID NO: 46489 - DNA, 120 bp, Artificial Sequence
  ENSG00000065150_41 (sequence is synthesized)
tctgttgaaaacttcagtgttaacatttttatagtttgtactaaatttaaccgtgatataaaaatgaattttatgcatagatcagaattttaaattaaaggttttttctttaaatgattt

SEQ ID NO: 46490 - DNA, 120 bp, Artificial Sequence
  ENSG00000065150_42 (sequence is synthesized)
taaaactaaatctgaaatggaatagaaaatagaatggattacatacagatggtttccttgttagcagatgcccttcaaatatattttacgtttgcagcacaacaccattgcccggaggct

SEQ ID NO: 46491 - DNA, 120 bp, Artificial Sequence
  ENSG00000065150_43 (sequence is synthesized)
tccgaatctagcaaagcagcatattaaatgactccacctgcgcagtccttgtgttcagtggatgaatacctgtgggctcttgtaatgtgtggtaatatttggagctttatagcctgtatt

SEQ ID NO: 46492 - DNA, 120 bp, Artificial Sequence
  ENSG00000065150_44 (sequence is synthesized)
ccttgggagaaaaaaatgggaattggagtaaaaagtgtgtcaagacaacccctttctgctttcttatgtagcatctgcaaagccgattcatgtactgatgccaatcagctagagcaatgt

SEQ ID NO: 46493 - DNA, 120 bp, Artificial Sequence
  ENSG00000065150_45 (sequence is synthesized)
aggctttttttaatttaaattattactacactttattactacacttgcagaaaagaaacatgttaaaatcatggcacacctgcagaatttcagatgacagtgtggtcagaagatgttttt

SEQ ID NO: 46494 - DNA, 120 bp, Artificial Sequence
  ENSG00000065150_46 (sequence is synthesized)
tgggagaacctagtgtttgctgggcactatgctaagcactttgggagcaagaacctcctaccttccagtttaaacactagtggtattgtcagatgccgttagtatctgagatgtacttac

SEQ ID NO: 46495 - DNA, 120 bp, Artificial Sequence
  ENSG00000065150_47 (sequence is synthesized)
agcagggttctaagagctctgaaagaagcgctctgttagatgcagactggcagcatcctccttgataaaagcagaaaagcaaagaggtaattggagttgaatcaagttaatagggaaggt

SEQ ID NO: 46496 - DNA, 120 bp, Artificial Sequence
  ENSG00000065150_48 (sequence is synthesized)
tggtagtaaatgctgttagtgtgacatgattctgaaacccagagctcagaactaactgtgagatgtaccatgaactaacaattctttgaaaggacctgcagaagcatttttaatacctca

SEQ ID NO: 46497 - DNA, 120 bp, Artificial Sequence
  ENSG00000065150_49 (sequence is synthesized)
ttctgtctatgcaagatgaaaatccatggagttttttcttggcttttgtaccaaatttaggggtcttgcatgtcagcaagtgatatatattgtttataaatgcaagctatttctggaggg

SEQ ID NO: 46498 - DNA, 120 bp, Artificial Sequence
  ENSG00000065150_50 (sequence is synthesized)
gaaaaatgtgtgtggctcttacgttttctgggaattttgtaacaagttacacgcacaagtgttagaaactttggcataactcaatttggagtattttttaaatgctgtatctttaaagaa

SEQ ID NO: 46499 - DNA, 120 bp, Artificial Sequence
  ENSG00000065150_51 (sequence is synthesized)
aagtaaaattgtcttaaatctaattgacacttctgtaatgagaggcaaccttataactctggagttgtagtttgacagaaccatcagtaaagacataagcaaataaatggtcttggtgca

SEQ ID NO: 46500 - DNA, 120 bp, Artificial Sequence
  ENSG00000065150_52 (sequence is synthesized)
aggtgtgagccaccgcgcctggcctgatacatacttttagaatcaagtagtcacgcactttttctgttcatttttctaaaaagtaaatatacaaatgttttgttttttgttttttttgtt

SEQ ID NO: 46501 - DNA, 120 bp, Artificial Sequence
  ENSG00000065150_53 (sequence is synthesized)
tgttactcttttccaaataagaacttttatacatctccctctaccagaatgacatgtttatagtgtgtaattgctattccatctgtaatttttttcggtagctgactggaaataccggca

SEQ ID NO: 46502 - DNA, 120 bp, Artificial Sequence
  ENSG00000065150_54 (sequence is synthesized)
attgttctttggtattgtgccttacgtgagctggggactaactctgtatccttaaggaggcatcacttgattagagttgcccaaaagaatgtgggttattatcctaaaggtctgtgttgc

SEQ ID NO: 46503 - DNA, 120 bp, Artificial Sequence
  ENSG00000065150_55 (sequence is synthesized)
acctttttttctttgtagtcctctatgagaagaaactagaaatctaatgagctaaggaattttatttttatattttcatagtctcttgtctccaagcctcaaatggattatacttaatgt

SEQ ID NO: 46504 - DNA, 120 bp, Artificial Sequence
  ENSG00000065150_56 (sequence is synthesized)
aatccatccgtatgtacttattatttattagaattaaaaccttcatcttaggacattttgagcttaccagttggtgcttaacacaagcttatgtgtagtttttctgcctatcttaagaaa

SEQ ID NO: 46505 - DNA, 120 bp, Artificial Sequence
  ENSG00000065150_57 (sequence is synthesized)
aataccggcatgcaggattgatggccttatctgccattggtgaagggtgccaccagcaaatggaaggaattctaaatgagatcgtaaattttgttttactttttctccaggatcctgtaa

SEQ ID NO: 46506 - DNA, 120 bp, Artificial Sequence
  ENSG00000065150_58 (sequence is synthesized)
gtaccagtaaatatttgattcaaaatgattagtgtagcttcatgtggaaaccttcttgcttttactaatgaaagggaacattttccagcatccaagagtaaggtatgcagcctgtaatgc

SEQ ID NO: 46507 - DNA, 120 bp, Artificial Sequence
  ENSG00000065150_59 (sequence is synthesized)
atgtatgtcctcacaatgcaggaggtgaaatgtgtatgtcatgtgtccaaattgtaagatacttgctatactttcccagcaacatctagactgctgtttgaccaaacaacggggctccaa

SEQ ID NO: 46508 - DNA, 120 bp, Artificial Sequence
  ENSG00000065150_60 (sequence is synthesized)
cagcctagccaagtgaaacataaaactaaccatcacagtatccttgtcaaaaatcagtctgacaacacatcagaggaaagaaattcctaagggaacactgctcagaaagtactgcagcat

SEQ ID NO: 46509 - DNA, 120 bp, Artificial Sequence
  ENSG00000065150_61 (sequence is synthesized)
acaactggagcagccgggaacagctctgaccacagtggttccggggagaagcctttccaggacccatgtgtaggcacaactgttttccctgatcaggatacttgcggcactcaagaattc

SEQ ID NO: 46510 - DNA, 120 bp, Artificial Sequence
  ENSG00000065150_62 (sequence is synthesized)
agccgggaacagctctgaccacagtaagtcatcccaaaacctcacattcagatgaaaccatttaagaatttcatctgcactgaggaacaatttagcgtgatactggagggaaagagtttc

SEQ ID NO: 46511 - DNA, 120 bp, Artificial Sequence
  ENSG00000065150_63 (sequence is synthesized)
cctgtgagatccaggaggtccctttagctcgtctcctgacgtcaccacagtcatacccaagaggaaggaaacgtcagagacaatgatttggagaacattctacacaaaaaccaagtggtt

SEQ ID NO: 46512 - DNA, 120 bp, Artificial Sequence
  ENSG00000065150_64 (sequence is synthesized)
ggaaacaggcagagacagatatgtttgaaaagtttgaaacctgtgtagcactgcataaatagaactggttgtttaatgaagtgaaacagagctttcagtaccagagagattttgaatatg

SEQ ID NO: 46513 - DNA, 120 bp, Artificial Sequence
  ENSG00000065150_65 (sequence is synthesized)
gttggccttagaggaccagagttctgtctgctattcattgtctatgatcttaggaaacctatgagaatatcccaggccagtcaaagatcacattcctcttacaagccatcagaaatacaa

SEQ ID NO: 46514 - DNA, 120 bp, Artificial Sequence
  ENSG00000065150_66 (sequence is synthesized)
aagtatgaaacaatgacgatttcatgatggctcattgttctttggtattgtgccttacgtgagctggggactaactctaaatcagtttttatttcacttaggtggttccggggagaagcc

SEQ ID NO: 46515 - DNA, 120 bp, Artificial Sequence
  ENSG00000065150_67 (sequence is synthesized)
tgaggatcaagttggaaaactagaagcaacagaaaacacaataaggtaactgatttcacctggggaaaagtcacttcctgttttgttttttttaaaagagacaaggtctcgccatgttgc

SEQ ID NO: 46516 - DNA, 120 bp, Artificial Sequence
  ENSG00000065150_68 (sequence is synthesized)
gtcagcttagcagcacaattgtcatttcacaaaagttcaaatatcgggggacgtttaaaaagaaaacatctgtaattcatctatgaggatggcaataaccagtggcccgaaggtttgaag

SEQ ID NO: 46517 - DNA, 120 bp, Artificial Sequence
  ENSG00000065150_69 (sequence is synthesized)
actgtgaccttatttccttctcctccacagtgcttcctggtttttcttgcctaacatcagtcttttaaggtttaaccacatgatctctgcacagtcctcagttgtataggtttataatag

SEQ ID NO: 46518 - DNA, 120 bp, Artificial Sequence
  ENSG00000065150_70 (sequence is synthesized)
gtgccctttctaaagcttaaattctaagatatgtttagactgttaaaaattaatctttgtctttttatcatccatatttaacccaattcatttattttaccgataaaattgtcaatccca

SEQ ID NO: 46519 - DNA, 120 bp, Artificial Sequence
  ENSG00000065150_71 (sequence is synthesized)
aagaaaatgtacagatttacttcctagccaaaagtatttagatttgaatttgaaaatgatgttattatttgaatttttatggaatattagaatgtttgaatcatatactcttctttcacc

SEQ ID NO: 46520 - DNA, 120 bp, Artificial Sequence
  ENSG00000065150_72 (sequence is synthesized)
gcggccgcggcggagcagcaacagttctacctgctcctgggaaacctgctcagccccgacaatgtggtccggaaacaggcagaggctagacaaatggccgccgttctcctaagacgtctc

SEQ ID NO: 46521 - DNA, 120 bp, Artificial Sequence
  ENSG00000065150_73 (sequence is synthesized)
aaattacgcctctaggttcctagactgagattgagataatcagccctgtaaaccagggctcctttaggaagaaaggtgtctctcttgacgttccccaatcattgcgagaacagaatccct

SEQ ID NO: 46522 - DNA, 120 bp, Artificial Sequence
  ENSG00000065150_74 (sequence is synthesized)
aaacaagggattcaagggaacagtcacagatcctggggtgggggcatgtttgctacgtgtacatccgaagacgaccgcgggctggggacgggcggcctggcgggacagccccgggctgag

SEQ ID NO: 46523 - DNA, 120 bp, Artificial Sequence
  ENSG00000065150_75 (sequence is synthesized)
aaggccagtgaggcgccggcgccggcggccgcggcgggcgcaatggcggcggccgcggcggagcagcaacagttctacctgctcctgggaaacctgctcagccccgacaatgtggtccgg

SEQ ID NO: 46524 - DNA, 120 bp, Artificial Sequence
  ENSG00000065150_76 (sequence is synthesized)
ttgggaaggaaaaaatcttcagaaaataattaccaaggaccattggccagtgtgtttctcagccaacatctcagaattgttcaagctaatgcaaaagaagtttctctgtcattgaatcct

SEQ ID NO: 46525 - DNA, 120 bp, Artificial Sequence
  ENSG00000065150_77 (sequence is synthesized)
catgttctgaccctgagaattatcaacagagaagctctgtcttgccttcttcaaaaccagcatcagtattaatttatatttggaactggtttctgtgagacgctgaccactaaaacattg

SEQ ID NO: 46526 - DNA, 120 bp, Artificial Sequence
  ENSG00000065154_0 (sequence is synthesized)
ctccggcgtcactgttgcgcttcatagacgccgcgtgtacccggttgtcctcaggcgctgtcagatctgtggtttttctacttgaaggacacaatgttttccaaactagcacatttgcag

SEQ ID NO: 46527 - DNA, 120 bp, Artificial Sequence
  ENSG00000065154_1 (sequence is synthesized)
aggtttgctgtacttagtcgcggagttcattcttcagtggcttctgctacatctgttgcaactaaaaaaacagtccaaggccctccaacctctgatgacatttttgaaagggaatataag

SEQ ID NO: 46528 - DNA, 120 bp, Artificial Sequence
  ENSG00000065154_2 (sequence is synthesized)
tatggtgcacacaactaccatcctttacctgtagccctggagagaggaaaaggtatttacttatgggatgtagaaggcagaaaatattttgacttcctgagttcttacagtgctgtcaac

SEQ ID NO: 46529 - DNA, 120 bp, Artificial Sequence
  ENSG00000065154_3 (sequence is synthesized)
caagggcattgtcaccccaagattgtgaatgctctgaagagtcaagtggacaaattgaccttaacatctagagctttctataataacgtacttggtgaatatgaggagtatattactaaa

SEQ ID NO: 46530 - DNA, 120 bp, Artificial Sequence
  ENSG00000065154_4 (sequence is synthesized)
cttttcaactaccacaaagttcttcctatgaatacaggagtggaggctggagagactgcctgtaaactagctcgtaagtggggctataccgtgaagggcattcagaaatacaaagcaaag

SEQ ID NO: 46531 - DNA, 120 bp, Artificial Sequence
  ENSG00000065154_5 (sequence is synthesized)
attgtttttgcagctgggaacttctggggtaggacgttgtctgctatctccagttccacagacccaaccagttacgatggttttggaccatttatgccgggattcgacatcattccctat

SEQ ID NO: 46532 - DNA, 120 bp, Artificial Sequence
  ENSG00000065154_6 (sequence is synthesized)
aatgatctgcccgcactggagcgtgctcttcaggatccaaatgtggctgcgttcatggtagaaccaattcagggtgaagcaggcgttgttgttccggatccaggttacctaatgggagtg

SEQ ID NO: 46533 - DNA, 120 bp, Artificial Sequence
  ENSG00000065154_7 (sequence is synthesized)
cgagagctctgcaccaggcaccaggttctctttattgctgatgaaatacagacaggattggccagaactggtagatggctggctgttgattatgaaaatgtcagacctgatatagtcctc

SEQ ID NO: 46534 - DNA, 120 bp, Artificial Sequence
  ENSG00000065154_8 (sequence is synthesized)
ggccctttctgggggcttataccctgtgtctgcagtgctgtgtgatgatgacatcatgctgaccattaagccaggggagcatgggtccacatacggtggcaatccactaggctgccgagt

SEQ ID NO: 46535 - DNA, 120 bp, Artificial Sequence
  ENSG00000065154_9 (sequence is synthesized)
ggccatcgcagcccttgaggttttagaagaagaaaaccttgctgaaaatgcagacaaattgggcattatcttgagaaatgaactcatgaagctaccttctgatgttgtaactgccgtaag

SEQ ID NO: 46536 - DNA, 120 bp, Artificial Sequence
  ENSG00000065154_10 (sequence is synthesized)
aggaaaaggattattaaacgctattgtcattaaagaaaccaaagattgggatgcttggaaggtgtgtctacgacttcgagataatggacttctggccaagccaacccatggcgacattat

SEQ ID NO: 46537 - DNA, 120 bp, Artificial Sequence
  ENSG00000065154_11 (sequence is synthesized)
caggtttgcgcctccgctggtgatcaaggaggatgagcttcgagagtccattgaaattattaacaagaccatcttgtctttctgagggtagccagctgttttcagtggtccctgggagcc

SEQ ID NO: 46538 - DNA, 120 bp, Artificial Sequence
  ENSG00000065154_12 (sequence is synthesized)
agctggagacaggtggtcctgtaaaagctttattcctaatgtgggcacattccactcccatgagtcttcaaaaactttttttttgaatatatttttttcagttgatacataatagaacaa

SEQ ID NO: 46539 - DNA, 120 bp, Artificial Sequence
  ENSG00000065154_13 (sequence is synthesized)
cgtttatgaacctgccgtttgctttgtaacgtaactaaataatgtaatggcatctatattcagttgaagtgttttgatgtgcatgtgtacttcctaaggtgaaatgcatctatatacaga

SEQ ID NO: 46540 - DNA, 120 bp, Artificial Sequence
  ENSG00000065154_14 (sequence is synthesized)
cagcctctaaatcaagtccttcagtataattgatatatgtttttataatttcctcactggtataagtgtttcatatttgaaaaagttatctctgggtattgcataaaaggcttcatctta

SEQ ID NO: 46541 - DNA, 120 bp, Artificial Sequence
  ENSG00000065154_15 (sequence is synthesized)
taaagtgaaatcattgttattgaattttaggaaggattaatggttaagtgtatataaaatactaatattaagtaaacttcatattggccaacaccagggttgtattctatggatgtcatt

SEQ ID NO: 46542 - DNA, 120 bp, Artificial Sequence
  ENSG00000065154_16 (sequence is synthesized)
gggttgtattctatggatgtcattattttgaattaagaattagtgtttaacattcctaaattgttttgagtgcttgattataatttgtaaaaaatgtttattttcaatacttctttaaat

SEQ ID NO: 46543 - DNA, 120 bp, Artificial Sequence
  ENSG00000065154_17 (sequence is synthesized)
tcaggagattttggactctctgcagactgtccctggatcttgggttaaaaatctgtattctagactgaaccgtgggaagaaaaaatagtcagtgagtctttggcaaaccggagtactgga

SEQ ID NO: 46544 - DNA, 120 bp, Artificial Sequence
  ENSG00000065154_18 (sequence is synthesized)
ttttgtttagcaattgcaaattcctgaacatactggatttactgggtagtgccaagtttaaagggaagtaagccaaactccaagtattatgttttgctaatttggcagctcgaatcaaga

SEQ ID NO: 46545 - DNA, 120 bp, Artificial Sequence
  ENSG00000065154_19 (sequence is synthesized)
tacaaaaccctcacctttgcatcagcaccttttcactatgtagagcagggcagaatgggcctctagggagatagtggcctgacaaaggaaatagttggtgagtctacaagattcttatag

SEQ ID NO: 46546 - DNA, 120 bp, Artificial Sequence
  ENSG00000065154_20 (sequence is synthesized)
gatactcttgaaattgtgtgcagttaaaacatttttacaaatttgagggcacatcagaattacacatttattgttggtggggggacagtgaaataaggatggctattttccctgtggaaa

SEQ ID NO: 46547 - DNA, 120 bp, Artificial Sequence
  ENSG00000065154_21 (sequence is synthesized)
taaatgcaccttctctagaaaacatgcattcaagacctcaattgttagggcttggttttgggttggggattattgaaagaaaagtaagttatctatcttcaggggctatatattccagtc

SEQ ID NO: 46548 - DNA, 120 bp, Artificial Sequence
  ENSG00000065154_22 (sequence is synthesized)
aagaggctcagtagagagaaatgcctaaaataggaattacaaggccagacttagtggccttgtgtcataggagccatggtgtttaatatcagactttgttttaacaattgaaagcccacc

SEQ ID NO: 46549 - DNA, 120 bp, Artificial Sequence
  ENSG00000065154_23 (sequence is synthesized)
cgctttgtagcccaggctggagtgctggtggcacagatcgtggctcactgcagcccagaactcagggctcaagagatctttccaccttagtcttagtctcctaagtaccagatactacag

SEQ ID NO: 46550 - DNA, 120 bp, Artificial Sequence
  ENSG00000065154_24 (sequence is synthesized)
gagattttggactctctgcagactgtccctggatcttgggttaaaaatctgtattctagactgaaccgtgggaagaaaaaatagtcaatctgtggtttttctacttgaaggacacaatgt

SEQ ID NO: 46551 - DNA, 120 bp, Artificial Sequence
  ENSG00000065154_25 (sequence is synthesized)
ttgggggcggggcagaatcagcctttaagttgcagtgactctccggcgtcactgttgcgcttcatagacgccgcgtgtacccggttgtcctcaggcgctgtcaggtatttacttatggga

SEQ ID NO: 46552 - DNA, 120 bp, Artificial Sequence
  ENSG00000065183_0 (sequence is synthesized)
cttgtgggcgggtccaatcggctgggagcctcgtggaggctgagattgcttcacctgtggtatcagacatcacaacatggggctcaccaagcagtacctacgctatgttgctagtgcggt

SEQ ID NO: 46553 - DNA, 120 bp, Artificial Sequence
  ENSG00000065183_1 (sequence is synthesized)
ctttggcgttatcggcagccaaaaaggtaatattgtctttgtgacacttcgtggtgagaaaggacgttatgtggcagtaccagcttgtgaacacgttttcatctgggacttaaggaaagg

SEQ ID NO: 46554 - DNA, 120 bp, Artificial Sequence
  ENSG00000065183_2 (sequence is synthesized)
agagaagattcttatccttcaggggcttaaacaagaagttacttgcttatgcccctccccagatgggctacacttagctgttgggtatgaggatgggtcgatccgaatcttcagtctcct

SEQ ID NO: 46555 - DNA, 120 bp, Artificial Sequence
  ENSG00000065183_3 (sequence is synthesized)
gagtggggaaggaaatgtgaccttcaatggtcacaaagcagctatcactaccttgaagtatgatcagctaggaggcagactggcatctgggtccaaggacacagatattattgtatggga

SEQ ID NO: 46556 - DNA, 120 bp, Artificial Sequence
  ENSG00000065183_4 (sequence is synthesized)
tgtgatcaatgaaagtggtctgtaccgtctaaaggggcacaaggatgccatcacacaagcattgtttctacgagaaaagaacctgctagttactagtgggaaagataccatggtgaaatg

SEQ ID NO: 46557 - DNA, 120 bp, Artificial Sequence
  ENSG00000065183_5 (sequence is synthesized)
gtgggaccttgatactcagcactgctttaaaacaatggttggccaccggactgaggtatgggggttggttctgttgtcagaagaaaagcgactcatcactggggcctcagacagtgaact

SEQ ID NO: 46558 - DNA, 120 bp, Artificial Sequence
  ENSG00000065183_6 (sequence is synthesized)
gagggtatgggacatagcttatctgcaagagattgaagacccggaagaaccagaccccaagaaaatcaaaggatcttctcctggaatacaagatactcttgaggcagaggatggtgcctt

SEQ ID NO: 46559 - DNA, 120 bp, Artificial Sequence
  ENSG00000065183_7 (sequence is synthesized)
tgagacggatgaagcccctgaggatcgaatcctttcatgcagaaaagctggttccataatgcgggaaggaagagacagagttgtaaaccttgcagtcgacaagacaggcaggattcttgc

SEQ ID NO: 46560 - DNA, 120 bp, Artificial Sequence
  ENSG00000065183_8 (sequence is synthesized)
ttgccatggaactgactctgtgctagaattgttttgtatcctttccaaaaaggaaattcagaagaaaatggataagaagatgaagaaagctagaaagaaagcaaaattacattctagcaa

SEQ ID NO: 46561 - DNA, 120 bp, Artificial Sequence
  ENSG00000065183_9 (sequence is synthesized)
aggagaggaggaagatcctgaggttaatgttgaaatgagtctgcaagatgaaatccagcgggtgactaatataaaaacttctgccaaaatcaagtcctttgacttgattcattcacctca

SEQ ID NO: 46562 - DNA, 120 bp, Artificial Sequence
  ENSG00000065183_10 (sequence is synthesized)
cggagagttaaaggctgtcttcctgctgcagaacaacctggtggaattgtattcactgaatccatccttgcctactcctcagcctgtcaggacaagcagaatcactattgggggtcatcg

SEQ ID NO: 46563 - DNA, 120 bp, Artificial Sequence
  ENSG00000065183_11 (sequence is synthesized)
cagtgatgtgcggactttgtcattcagctcagacaatattgctgttctttcagctgcagctgattccattaaaatatggaacaggtctacactgcagtgtattcgcacaatgacctgtga

SEQ ID NO: 46564 - DNA, 120 bp, Artificial Sequence
  ENSG00000065183_12 (sequence is synthesized)
atatgcactttgctcattctttgtacctggtgatagacaggtagtcataggaacaaagacagggaagctgcagctttatgacttggcttcagggaatctgctggagacaatagatgcaca

SEQ ID NO: 46565 - DNA, 120 bp, Artificial Sequence
  ENSG00000065183_13 (sequence is synthesized)
tgatggagctttgtggtccatgtccctctctccagatcagcgtggctttgtgacaggtggtgcagataaatctgtcaaattctgggattttgagttagtgaaagatgaaaatagtaccca

SEQ ID NO: 46566 - DNA, 120 bp, Artificial Sequence
  ENSG00000065183_14 (sequence is synthesized)
aaagagactttctgtgaagcaaacccgaactttgcaactagatgaagatgttctgtgtgtcagttactctcccaatcaaaagctattggctgtgtctttgctggactgtactgtgaaaat

SEQ ID NO: 46567 - DNA, 120 bp, Artificial Sequence
  ENSG00000065183_15 (sequence is synthesized)
tttctacgttgatactttaaagttttttctgtcactgtatggacacaaactgcctgttatatgcatggacatctctcatgatggagcactcatagcaactggctccgctgataggaatgt

SEQ ID NO: 46568 - DNA, 120 bp, Artificial Sequence
  ENSG00000065183_16 (sequence is synthesized)
gaaaatctggggtttggactttggggactgccacaagtctctctttgcacatgatgacagtgtgatgtacctacagtttgtacccaagtctcacctcttcttcactgccggaaaagatca

SEQ ID NO: 46569 - DNA, 120 bp, Artificial Sequence
  ENSG00000065183_17 (sequence is synthesized)
taagattaaacagtgggatgcagacaaatttgaacacatacagactctggagggtcatcaccaggaaatatggtgtttggctgtaagccccagtggagactatgttgtatcatcgtccca

SEQ ID NO: 46570 - DNA, 120 bp, Artificial Sequence
  ENSG00000065183_18 (sequence is synthesized)
tgacaaatctctgagactttgggagagaacaagggagcctcttattcttgaggaagaaagggagatggaaagagaagcagaatatgaggagagtgtggccaaagaagaccaaccagcagt

SEQ ID NO: 46571 - DNA, 120 bp, Artificial Sequence
  ENSG00000065183_19 (sequence is synthesized)
tccaggagagactcaaggtgacagttactttactggaaagaaaactattgaaacagtgaaagcagctgagaggattatggaggctattgagttgtaccgagaagaaactgcaaaaatgaa

SEQ ID NO: 46572 - DNA, 120 bp, Artificial Sequence
  ENSG00000065183_20 (sequence is synthesized)
ggaacacaaagccatttgtaaagctgcagggaaagaggttccacttcccagcaaccccatcctaatggcttatggcagtatctcaccttcagcttatgtattagagatttttaaagggat

SEQ ID NO: 46573 - DNA, 120 bp, Artificial Sequence
  ENSG00000065183_21 (sequence is synthesized)
caagtcgagtgagctggaagaatctctacttgtgctgcctttctcttatgtcccagacattcttaaactctttaacgaattcattcagctgggctctgatgttgaacttatatgccggtg

SEQ ID NO: 46574 - DNA, 120 bp, Artificial Sequence
  ENSG00000065183_22 (sequence is synthesized)
cctcttcttcctccttaggattcactttggacagatcactagcaatcaaatgcttgtgccagtgatagaaaaattaagggaaacaactatttcaaaagtcagccaagtccgggatgttat

SEQ ID NO: 46575 - DNA, 120 bp, Artificial Sequence
  ENSG00000065183_23 (sequence is synthesized)
cggcttcaatatggctggtcttgattatctcaagagggaatgcgaggcaaaaagtgaagttatgttttttgctgatgctactagccacttggaagagaagaagaggaagaggaaaaagag

SEQ ID NO: 46576 - DNA, 120 bp, Artificial Sequence
  ENSG00000065183_24 (sequence is synthesized)
ggagaagttgattctaacgttgacttagaactgaaatgtggtatctttttttttttcaactttttcctttaaaggactcctaaactaagcacagaagagttggcgtcatcttaaaaatac

SEQ ID NO: 46577 - DNA, 120 bp, Artificial Sequence
  ENSG00000065183_25 (sequence is synthesized)
caaataacagaagatcgcattgcagatgatatcaggatgtggtttccagctttgcctgagggaattccaacatgagattatgggctggctccatttcttggacttaaaatgcattattag

SEQ ID NO: 46578 - DNA, 120 bp, Artificial Sequence
  ENSG00000065183_26 (sequence is synthesized)
tttaaaaatctttctgtgctctcaaagcttgagccttgcagctcaagcttgttgttccctttatattctagcagggaataaataattgttttaattaggtatttgtttcattggagttga

SEQ ID NO: 46579 - DNA, 120 bp, Artificial Sequence
  ENSG00000065183_27 (sequence is synthesized)
aattaacatttcaaaagtttttcgtatttttttatggcagatgatttgtcatttatttatattaggttttactgcctattgagacaaccaggtgcataattgattgccctttggccataa

SEQ ID NO: 46580 - DNA, 120 bp, Artificial Sequence
  ENSG00000065183_28 (sequence is synthesized)
aaatgcagtgtcatggatcttagagctaaaaaggactgtaaaaattacccagaacagcgtcctcagacttaaccttctgcaagttatgtctgtatataagaagattctaattgctaactg

SEQ ID NO: 46581 - DNA, 120 bp, Artificial Sequence
  ENSG00000065183_29 (sequence is synthesized)
gctaactgtttatacttttctgaataaaatagttgtttctaattaaaaagtagccaagctaagatgcctggctgggcttctgaggaattaatacactcgtgtgtgtgtgtgtgtgtgtgt

SEQ ID NO: 46582 - DNA, 120 bp, Artificial Sequence
  ENSG00000065183_30 (sequence is synthesized)
gtgtgtgtatgtgtatgtgtatgtacacatacatatatatagttgacacttgaaaaatgcaggtggtaggggcactgacccacccctacgccccgcacagtcaaaaatctgcatataact

SEQ ID NO: 46583 - DNA, 120 bp, Artificial Sequence
  ENSG00000065183_31 (sequence is synthesized)
tttgattccccaaagtcttaagtactagtagcctgttattgactgggagcctgactgatgtattatatatattgtatactgtattcttaaagtaagctagagaaaagaaaatgttactta

SEQ ID NO: 46584 - DNA, 120 bp, Artificial Sequence
  ENSG00000065183_32 (sequence is synthesized)
gaaaatcataaggaagagaaaatatatttactgtgtttatcaatactataagtgtatgtcatctgtttataaaatgaattgtctgtctggattggcaggcaaccacagccgcagacctca

SEQ ID NO: 46585 - DNA, 120 bp, Artificial Sequence
  ENSG00000065183_33 (sequence is synthesized)
atctgtggtacttatcaagcatcagctttttcttgtaatgtcatgacttttctctgctttttgggagcactgtgatatgcagtttactggggcgatgagttgttcatgcacaggtgatta

SEQ ID NO: 46586 - DNA, 120 bp, Artificial Sequence
  ENSG00000065183_34 (sequence is synthesized)
gtgtcacagcattttaagtgcatacgcacaacacttgagctcactgcatagcaacaggaggtggctgtgaaattatttcagtaacatactgtgtattacagttcattttatgcagctatg

SEQ ID NO: 46587 - DNA, 120 bp, Artificial Sequence
  ENSG00000065183_35 (sequence is synthesized)
atttaatactgcatctttacattattttacatttctcccaaaactgtgaattgcaccatgtatgatctgtatttgtgtgtgttaatgttgataatagatttgcgtgtattttatggcagt

SEQ ID NO: 46588 - DNA, 120 bp, Artificial Sequence
  ENSG00000065183_36 (sequence is synthesized)
aaatgataaaatagtctagtatctacatatattttgtgcattcatgatataactacttttttcctaatttttttcatctgaaacttttctcattgtttcagatctccaaaaatttttcca

SEQ ID NO: 46589 - DNA, 88 bp, Artificial Sequence
  ENSG00000065183_37 (sequence is synthesized)
aaacttttctcattgtttcagatctccaaaaatttttccaatatatttattgaaaatatctgggctgcgtgggaggccgaggcaggcg

SEQ ID NO: 46590 - DNA, 120 bp, Artificial Sequence
  ENSG00000065183_38 (sequence is synthesized)
cctgggcaacacagtgagactccatctccaaaataataatagtaaaaaaaaatctgtataacagtggagccaagtggttaaaacccatgttcaacggattgtctactgtatatcttcatg

SEQ ID NO: 46591 - DNA, 120 bp, Artificial Sequence
  ENSG00000065183_39 (sequence is synthesized)
ccatgttcaacggattgtctactgtatatcttcatggtaaggatttggggaatgttctaggaaaagatattgacagatacctctgggtctgggcttttcttttggggaagtttataaatg

SEQ ID NO: 46592 - DNA, 120 bp, Artificial Sequence
  ENSG00000065183_40 (sequence is synthesized)
tcttcttgagacagttttgctttttatcttttttgttgttgttaatcccaaagatttaaaactatggtttctgtctgaatttggtcattgcaaccaagttactgtgttgtggggccacca

SEQ ID NO: 46593 - DNA, 120 bp, Artificial Sequence
  ENSG00000065183_41 (sequence is synthesized)
ttttcttctaggctcagatatgcagtccttgtggcttgccgatttgtgtcccaaaccacaagtcttaatgttcttgagcataacacaatcactgaagtgagtaagggatgcagtggtgtt

SEQ ID NO: 46594 - DNA, 120 bp, Artificial Sequence
  ENSG00000065183_42 (sequence is synthesized)
atttgttgggcagaataaataagtgaattttggcatagagtttctgaaggcataactatgaaggcaagagaataggcaggcaggataatgcattctaggtgctttccaaggagtcagtgt

SEQ ID NO: 46595 - DNA, 120 bp, Artificial Sequence
  ENSG00000065183_43 (sequence is synthesized)
tgtttaggcagctattcctgccaccagggagaggagttaattcttgaaaaaaaatttaattttttatgagaacagaagttgattcaatatccttcttagagttgctcatcagaacataaa

SEQ ID NO: 46596 - DNA, 120 bp, Artificial Sequence
  ENSG00000065183_44 (sequence is synthesized)
tgtcactttctagtaacatttttgatggtttccaaaccaaaacaagttccaggagggcattcgagatgtatacatcatcaataattactcttatgttaaaagttgctgttttcccgtagc

SEQ ID NO: 46597 - DNA, 120 bp, Artificial Sequence
  ENSG00000065183_45 (sequence is synthesized)
tttgccaccatttataactcaaaagcctgatagtgctagggaatgtaaagatgtttctgtctgctaagtgttatactaatcgaagagaaggagaacttttatgataaagtgacatgtaca

SEQ ID NO: 46598 - DNA, 120 bp, Artificial Sequence
  ENSG00000065183_46 (sequence is synthesized)
gaacctagccaagttacaatttttggtcaaaatacttgaaactctttaactctaaaagtttaaggtcaataggtgcattataaagtaaattttaagccaggcaaatttctagtcattaag

SEQ ID NO: 46599 - DNA, 120 bp, Artificial Sequence
  ENSG00000065183_47 (sequence is synthesized)
tcagtattcattgccttagtcagccattggctgtatataatccttaatataaaaaccatctaatgactaatatctcttgcatattgtgaagtaagttacctatagaaattctgtagtacc

SEQ ID NO: 46600 - DNA, 89 bp, Artificial Sequence
  ENSG00000065183_48 (sequence is synthesized)
cagactccattgaaaaaaaaaaaaaaggctcttgaatgatgtattgggagtaaaacatttaggcttatttttaaaaatgtatatatcca

SEQ ID NO: 46601 - DNA, 120 bp, Artificial Sequence
  ENSG00000065183_49 (sequence is synthesized)
gtaaaacatttaggcttatttttaaaaatgtatatatccatccacttagagaaaatatgcttaaaaattttgaaattcactggctggaagctaggtgctttgtatatttggtattaaatt

SEQ ID NO: 46602 - DNA, 120 bp, Artificial Sequence
  ENSG00000065183_50 (sequence is synthesized)
gtttctcaatggcaaatgtcataaattatatctcattctaaagatatctagcaaatctccagcagagatctaggacagtgcccaggaaagcaatggtatctgttggtaggtacaggactg

SEQ ID NO: 46603 - DNA, 120 bp, Artificial Sequence
  ENSG00000065183_51 (sequence is synthesized)
tatataggactctattcacttagctgtaaatgatgagcctgctcaatgcagccttttcaggccagattagtcttcagaaagagagggaggttgtgagcagaagcttaatgaagaaaccac

SEQ ID NO: 46604 - DNA, 120 bp, Artificial Sequence
  ENSG00000065183_52 (sequence is synthesized)
attggcttacagttactgtctgcaatccacccccattcctcacaatttaagctcctaagtttgagatggggctaaggttcttaaaggtagtatcaccatatattcaagtcctttctcttt

SEQ ID NO: 46605 - DNA, 120 bp, Artificial Sequence
  ENSG00000065183_53 (sequence is synthesized)
atttctgaggtttttgggatccaagcagccctggtatgtttttagaacacagtacacattgtgtaacagtcactgagcccaactcttacatagggcctggcagtgttgcccttgtgtatc

SEQ ID NO: 46606 - DNA, 120 bp, Artificial Sequence
  ENSG00000065183_54 (sequence is synthesized)
ccttccccttgagtatggggtcggacctagtgactggcttctagtgaacagaatacagtaaatataatgggatgtgtcttccaagattagggtataaagcactgaattctaccttgcatg

SEQ ID NO: 46607 - DNA, 120 bp, Artificial Sequence
  ENSG00000065183_55 (sequence is synthesized)
gattagggtataaagcactgaattctaccttgcatgagcattacattttataatatatataaagaagcaactagtatagttatttaaacaaatattttctttttttttttttttgagaca

SEQ ID NO: 46608 - DNA, 120 bp, Artificial Sequence
  ENSG00000065183_56 (sequence is synthesized)
taaacaaatattttcattcattcaggccaggtggcttataggtttctgactataagaagaggggaagaaacctggggtctaatacctcaaatttgaatgcttgacaatcaaattcccatt

SEQ ID NO: 46609 - DNA, 120 bp, Artificial Sequence
  ENSG00000065183_57 (sequence is synthesized)
tattacttactgtacctaatgtggagaaactttacgagacatgaagactccaagtgtggaggaataaattgtagaagttctctggaccattggattttcttttccctggggaaagtcttt

SEQ ID NO: 46610 - DNA, 120 bp, Artificial Sequence
  ENSG00000065183_58 (sequence is synthesized)
tggtcgtttatcataattgctgcttgttaaaacaggtaaaatacttgttaagggctgtgcttttcatgactaaattatttgcatatataaacctaaataacattttagaatcatagaatt

SEQ ID NO: 46611 - DNA, 120 bp, Artificial Sequence
  ENSG00000065183_59 (sequence is synthesized)
tcttctctggcaacatcagttcaattttaggtaactgtctatccaatgcaaattctgcatgctcaggcttgggggttagaggatggatatgccaatgtctagaatgtcttctgttctccc

SEQ ID NO: 46612 - DNA, 120 bp, Artificial Sequence
  ENSG00000065183_60 (sequence is synthesized)
tagtgtacatttctctcctaactgtgactggctttctataaggagccatcagtatggtcaagccccaaaccatatctacatcagatttcatgctttttttttttttttttggtggggaga

SEQ ID NO: 46613 - DNA, 120 bp, Artificial Sequence
  ENSG00000065183_61 (sequence is synthesized)
gggacagatcattgttgacactgtaagtaagtagataaaagatctgataagattttttgccctttatctgtgtctgacaggttctctctaatctataagcagggaaatagaaaatttatt

SEQ ID NO: 46614 - DNA, 120 bp, Artificial Sequence
  ENSG00000065183_62 (sequence is synthesized)
ataaatacaaatgatttcattgctatgatcagcagcagtgactcaggtatttgcatctaataacctgtgtggagagggtaagggcacttgatttagttaccagaggaaaaaactagttct

SEQ ID NO: 46615 - DNA, 120 bp, Artificial Sequence
  ENSG00000065183_63 (sequence is synthesized)
ttggctagtttccttctgtcacaatggaaaaaccctgtcattactcaaaggaagagaaaaagggaggggaggaaggtgagaggaagggagagagactttcccagtgaggactttcctttc

SEQ ID NO: 46616 - DNA, 120 bp, Artificial Sequence
  ENSG00000065183_64 (sequence is synthesized)
ctattttatattttgctccattgtacttactgccatcattgtttatggtttacttactttatgtattgtctgtcctcccactggaatgtaagctacataaaggcaggcgtttcggcatct

SEQ ID NO: 46617 - DNA, 120 bp, Artificial Sequence
  ENSG00000065183_65 (sequence is synthesized)
ttgaaagcataaatgaacaaatgaactaaacttcatttattgacatcagtgctatctgacacaagttcctttaactttctccttcacctcggaatatctgaatcatcagctatcttcagc

SEQ ID NO: 46618 - DNA, 120 bp, Artificial Sequence
  ENSG00000065183_66 (sequence is synthesized)
ttctcccttgccaagactaacccttcagctctgttttttattattcttttgccctgttttggatattgcagtttcaatcacttctactcattcatatttttaatatatatcttctgctcc

SEQ ID NO: 46619 - DNA, 120 bp, Artificial Sequence
  ENSG00000065183_67 (sequence is synthesized)
actctcttcagcctacaaacatgtaggtctacattaaactgaaaatccttcctatattctgttgcatccttgagtaacatattctcttgctctttcctttaataaattttcttgaaagaa

SEQ ID NO: 46620 - DNA, 120 bp, Artificial Sequence
  ENSG00000065183_68 (sequence is synthesized)
tatccataactaatgtttctgctttcttaatacagtcattctttaccttttgcaatttagtttttatcccaaccaaatttaacactttaaatctgaattttctttgacatctcaatagca

SEQ ID NO: 46621 - DNA, 120 bp, Artificial Sequence
  ENSG00000065183_69 (sequence is synthesized)
tccgtcaattgtgtccgtcttttccttgaaattcttcctaaggcttttgaagtatttcaccattttctaattgctgcttttgtctccactggctcttcttcctcctgctccctaaaccga

SEQ ID NO: 46622 - DNA, 120 bp, Artificial Sequence
  ENSG00000065183_70 (sequence is synthesized)
ctccagatttctgttccttgcccatacattcagccatcacctctgtgtaaacgatgcttaaaattattatatctccaattctgacttctcagttgagatctaatattacatatacatgat

SEQ ID NO: 46623 - DNA, 120 bp, Artificial Sequence
  ENSG00000065183_71 (sequence is synthesized)
tcattacctcagcccaaaactttgaagttgaactcgatgtcctctttcttccatccatcaatggcttctacctcagattttgcagtttccttcccccaccatgtctttcattcatgtccc

SEQ ID NO: 46624 - DNA, 120 bp, Artificial Sequence
  ENSG00000065183_72 (sequence is synthesized)
tcttttatgttgactgttcccccactcccagttcttgtcctcacacatggcccattcaggtagacttctaatggtacttttacacatccagttgttcccctttgacatgtcctgcacaat

SEQ ID NO: 46625 - DNA, 120 bp, Artificial Sequence
  ENSG00000065183_73 (sequence is synthesized)
aaccctggattcatcttaataaagatatgctgatcatgtcacccacagggtcaggaatctgcagtggttcactgctgcttaaataataaaattcaagccaaggatttaagatctttcata

SEQ ID NO: 46626 - DNA, 120 bp, Artificial Sequence
  ENSG00000065183_74 (sequence is synthesized)
acttgactccaacctactttcccactatattcctaatactcaagcttttggcaagttgaactccctgccaatcatcccaaacacctggagctttcctgttgccatggttttgttcattat

SEQ ID NO: 46627 - DNA, 120 bp, Artificial Sequence
  ENSG00000065183_75 (sequence is synthesized)
ttttacttaaagttcccgtcaatcaagttttcacattctataagatccagctcaaaaatcaaataaatagagaactgtaacacaagcagcacacaattcatgccactggagaaagtacaa

SEQ ID NO: 46628 - DNA, 120 bp, Artificial Sequence
  ENSG00000065183_76 (sequence is synthesized)
aatagaaataaaatgtgaagactttatttctgctacaaattatataataccttttaagacagagtccaattatccatttttatatatgataaactattttatacagtaccttggaggtaa

SEQ ID NO: 46629 - DNA, 120 bp, Artificial Sequence
  ENSG00000065183_77 (sequence is synthesized)
taggttcttgatatctatctaatatctgtttggctgaagacactgataaggaggaatgcatgcataattcagtgaatacccaacctttataataataaggtatttcctatccttccataa

SEQ ID NO: 46630 - DNA, 120 bp, Artificial Sequence
  ENSG00000065183_78 (sequence is synthesized)
aattataatttttttgtgatagatacttgctgttttattattctgtctgatattccgtagatagccaataacatttacatttattcaatctgaagttactgcacatatactatgtgtcag

SEQ ID NO: 46631 - DNA, 120 bp, Artificial Sequence
  ENSG00000065183_79 (sequence is synthesized)
gtatttttttagatttggctaggtgctttcaaagatgaatgaagatgctctttgtcttaataaatttaactctgattttgaagatagaattaataaagtagagatgcattttgacttcca

SEQ ID NO: 46632 - DNA, 120 bp, Artificial Sequence
  ENSG00000065183_80 (sequence is synthesized)
aggctgaggtgagtcctggaggtgcgtggttggggcggagagcattatctgcggctccgattttgcagattctggctgaggcgttcgtgatgtcagcagcagccgagacgggcgtgttaa

SEQ ID NO: 46633 - DNA, 120 bp, Artificial Sequence
  ENSG00000065243_0 (sequence is synthesized)
gcggccgcagcgcccgcacggagaggcttgaggcggctcctggcgtcgcccagagggagcgactagacgaacagtccggtgagggcggcgagaggaagcccgctacgagtgccctagctc

SEQ ID NO: 46634 - DNA, 120 bp, Artificial Sequence
  ENSG00000065243_1 (sequence is synthesized)
cccgccgctctcgatgaaccggacggaataagccgcgcctccagcaggggctgcgcctccatgaatccctagttgtttttttttttttctttctctcccctctcctcacccccaccccga

SEQ ID NO: 46635 - DNA, 120 bp, Artificial Sequence
  ENSG00000065243_2 (sequence is synthesized)
gccccgtcccgccttctcccttcgccagaggcggccgcgtccaggtgcggagtccataccggagcgcaatggcgtccaaccccgaacggggggagattctgctcacggaactgcaggggg

SEQ ID NO: 46636 - DNA, 120 bp, Artificial Sequence
  ENSG00000065243_3 (sequence is synthesized)
attcccgaagtcttccgttttctgagaatgtgagtgctgttcaaaaattagacttttcagatacaatggtgcagcagaaattggatgatatcaaggatcgaattaagagagaaataagga

SEQ ID NO: 46637 - DNA, 120 bp, Artificial Sequence
  ENSG00000065243_4 (sequence is synthesized)
aagaactgaaaatcaaagaaggagctgaaaatctgaggaaagtcacaacagataaaaaaagtttggcttatgtagacaacattttgaaaaaatcaaataaaaaattagaagaactacatc

SEQ ID NO: 46638 - DNA, 120 bp, Artificial Sequence
  ENSG00000065243_5 (sequence is synthesized)
acaagctgcaggaattaaatgcacatattgttgtatcagatccagaagatattacagattgcccaaggactccagatactccaaataatgaccctcgttgttctactagcaacaatagat

SEQ ID NO: 46639 - DNA, 120 bp, Artificial Sequence
  ENSG00000065243_6 (sequence is synthesized)
tgaaggccttacaaaaacaattggatatagaacttaaagtaaaacaaggtgcagagaatatgatacagatgtattcaaatggatcttcaaaggatcggaaactccatggtacagctcagc

SEQ ID NO: 46640 - DNA, 120 bp, Artificial Sequence
  ENSG00000065243_7 (sequence is synthesized)
aactgctccaggacagcaagacaaaaatagaagtcatacgaatgcagattcttcaggcagtccagactaatgaattggcttttgataatgcaaaacctgtgataagtcctcttgaacttc

SEQ ID NO: 46641 - DNA, 120 bp, Artificial Sequence
  ENSG00000065243_8 (sequence is synthesized)
ggatggaagaattaaggcatcattttaggatagagtttgcagtagcagaaggtgcaaagaatgtaatgaaattacttggctcaggaaaagtaacagacagaaaagcactttcagaagctc

SEQ ID NO: 46642 - DNA, 120 bp, Artificial Sequence
  ENSG00000065243_9 (sequence is synthesized)
aagcaagatttaatgaatcaagtcagaagttggaccttttaaagtattcattagagcaaagattaaacgaagtccccaagaatcatcccaaaagcaggattattattgaagaactttcac

SEQ ID NO: 46643 - DNA, 120 bp, Artificial Sequence
  ENSG00000065243_10 (sequence is synthesized)
ttgttgctgcatcaccaacactaagtccacgtcaaagtatgatatctacgcaaaatcaatatagtacactatccaaaccagcagcactaacaggtactttggaagttcgtcttatgggct

SEQ ID NO: 46644 - DNA, 120 bp, Artificial Sequence
  ENSG00000065243_11 (sequence is synthesized)
gccaagatatcctagagaatgtccctggacggtcaaaagcaacatcagttgcactgcctggttggagtccaagtgaaaccagatcatctttcatgagcagaacgagtaaaagtaaaagcg

SEQ ID NO: 46645 - DNA, 120 bp, Artificial Sequence
  ENSG00000065243_12 (sequence is synthesized)
gaagtagtcgaaatcttctaaaaaccgatgacttgtccaatgatgtctgtgctgttttgaagctcgataatactgtggttggccaaactagctggaaacccatttccaatcagtcatggg

SEQ ID NO: 46646 - DNA, 120 bp, Artificial Sequence
  ENSG00000065243_13 (sequence is synthesized)
accagaagtttacactggaactggacaggtcacgtgaactggaaatttcagtttattggcgtgattggcggtctctgtgtgctgtaaaatttctgaggttagaagattttttagacaacc

SEQ ID NO: 46647 - DNA, 120 bp, Artificial Sequence
  ENSG00000065243_14 (sequence is synthesized)
aacggcatggcatgtgtctctatttggaaccacagggtactttatttgcagaggttaccttttttaatccagttattgaaagaagaccaaaacttcaaagacaaaagaaaattttttcaa

SEQ ID NO: 46648 - DNA, 120 bp, Artificial Sequence
  ENSG00000065243_15 (sequence is synthesized)
agcaacaaggcaaaacatttctcagagctcctcaaatgaatattaatattgccacttggggaaggctagtaagaagagctattcctacagtaaatcattctggcaccttcagccctcaag

SEQ ID NO: 46649 - DNA, 120 bp, Artificial Sequence
  ENSG00000065243_16 (sequence is synthesized)
ctcctgtgcctactacagtgccagtggttgatgtacgcatccctcaactagcacctccagctagtgattctacagtaaccaaattggactttgatcttgagcctgaacctcctccagccc

SEQ ID NO: 46650 - DNA, 120 bp, Artificial Sequence
  ENSG00000065243_17 (sequence is synthesized)
caccacgagcttcttctcttggagaaatagatgaatcttctgaattaagagttttggatataccaggacaggattcagagactgtttttgatattcagaatgacagaaatagtatacttc

SEQ ID NO: 46651 - DNA, 120 bp, Artificial Sequence
  ENSG00000065243_18 (sequence is synthesized)
caaaatctcaatctgaatacaagcctgatactcctcagtcaggcctagaatatagtggtattcaagaacttgaggacagaagatctcagcaaaggtttcagtttaatctacaagatttca

SEQ ID NO: 46652 - DNA, 120 bp, Artificial Sequence
  ENSG00000065243_19 (sequence is synthesized)
ggtgttgtgctgtcttgggaagaggacattttggaaaggtgcttttagctgaatataaaaacacaaatgagatgtttgctataaaagccttaaagaaaggagatattgtggctcgagatg

SEQ ID NO: 46653 - DNA, 120 bp, Artificial Sequence
  ENSG00000065243_20 (sequence is synthesized)
aagtagacagcctgatgtgtgaaaaaagaatttttgaaactgtgaatagtgtaaggcatccctttttggtgaacctttttgcatgtttccaaaccaaagagcatgtttgctttgtaatgg

SEQ ID NO: 46654 - DNA, 120 bp, Artificial Sequence
  ENSG00000065243_21 (sequence is synthesized)
aatatgctgccggtggggacctaatgatgcacattcatactgatgtcttttctgaaccaagagctgtattttatgctgcttgtgtagttcttgggttgcagtatttacatgaacacaaaa

SEQ ID NO: 46655 - DNA, 120 bp, Artificial Sequence
  ENSG00000065243_22 (sequence is synthesized)
ttgtttatagagatttgaaattggataacttattgctagatacagagggctttgtgaaaattgctgattttggtctttgcaaagaaggaatgggatatggagatagaacaagcacatttt

SEQ ID NO: 46656 - DNA, 120 bp, Artificial Sequence
  ENSG00000065243_23 (sequence is synthesized)
gtggcactcctgaatttcttgccccagaagtattaacagaaacttcttatacaagggctgtagattggtggggccttggcgtgcttatatatgaaatgcttgttggtgagtctccctttc

SEQ ID NO: 46657 - DNA, 120 bp, Artificial Sequence
  ENSG00000065243_24 (sequence is synthesized)
ctggtgatgatgaagaggaagtttttgacagtattgtaaatgatgaagtaaggtatccaaggttcttatctacagaagccatttctataatgagaaggctgttaagaagaaatcctgaac

SEQ ID NO: 46658 - DNA, 120 bp, Artificial Sequence
  ENSG00000065243_25 (sequence is synthesized)
gagcgctctgatggacaaaaaagtaaagccaccatttatacctaccataagaggacgagaagatgttagtaattttgatgatgaatttacctcagaagcacctattctgactccacctcg

SEQ ID NO: 46659 - DNA, 120 bp, Artificial Sequence
  ENSG00000065243_26 (sequence is synthesized)
agaaccaaggatactttcggaagaggagcaggaaatgttcagagattttgactacattgctgattggtgttaagttgctagacactgcgaaaccaagctgactcacaagaagacctctta

SEQ ID NO: 46660 - DNA, 120 bp, Artificial Sequence
  ENSG00000065243_27 (sequence is synthesized)
aaaatagcaacccttcatttgctctctgtgccaccaatagcttctgagttttttgttgttgttgtttttattgaaacacgtgaagatttgtttaaaagtaccattctaatacttcttcaa

SEQ ID NO: 46661 - DNA, 120 bp, Artificial Sequence
  ENSG00000065243_28 (sequence is synthesized)
aagtggctcctcattgtacttcagcgtaaatatgagcactggaaacagtttcatggagtttaagttgagtgaacatcggccatgaaaatccatcacgaatacttttggatcaatagtcta

SEQ ID NO: 46662 - DNA, 120 bp, Artificial Sequence
  ENSG00000065243_29 (sequence is synthesized)
tttttaaaaagaaagaaaaaaaccacttttttatagtccctagctttgccatatgcccgccttaagtggaaggaaagttaatcacttaactatgttttataaaaagaaaaaagggcttgg

SEQ ID NO: 46663 - DNA, 120 bp, Artificial Sequence
  ENSG00000065243_30 (sequence is synthesized)
aatgctattactgttcacacaaagtatgattctgtttgaataaggcaaatgctcctttttttaaaaaaaaagacattactgtaatatcaaaaaccgtggcagtttgtatacaactcgggg

SEQ ID NO: 46664 - DNA, 120 bp, Artificial Sequence
  ENSG00000065243_31 (sequence is synthesized)
cttgattttttttaaaaaaacagaatgaattgatgtcttattttataaatgttctatatttattaggagaaaactttatattgccttttttatcaatcatgtaacaggcttatagctttc

SEQ ID NO: 46665 - DNA, 120 bp, Artificial Sequence
  ENSG00000065243_32 (sequence is synthesized)
caacagagctgcttgccaaacaattttttttgtttattaaacagtgctgaaacaaacaggatcagcatttacttaagatgttaagaatgaggacttttaatcagccgaaccaagatattg

SEQ ID NO: 46666 - DNA, 120 bp, Artificial Sequence
  ENSG00000065243_33 (sequence is synthesized)
ttacctgtatgcattcccaaagtctagatgctcagtatgttcagtcatatctttcagaatcagtgaaccgattaccctttttttggtattcactctacatctgccaacctagttcacctt

SEQ ID NO: 46667 - DNA, 120 bp, Artificial Sequence
  ENSG00000065243_34 (sequence is synthesized)
ggttttgtgtctgctgtagaagggaaccataacttggttaaaccgtagggattatcattgtatacatgctgtgaacatgtatatgtgcaagttttaatgtattctatgttgtaggcttat

SEQ ID NO: 46668 - DNA, 120 bp, Artificial Sequence
  ENSG00000065243_35 (sequence is synthesized)
tatttaattttaccacttcatcacttttgtacagtggccaagcagacacctcaaactccagcatttacattaagtgcatttgtacattttaggccactggatccagattttatattggca

SEQ ID NO: 46669 - DNA, 120 bp, Artificial Sequence
  ENSG00000065243_36 (sequence is synthesized)
gttattgagggcaaaagcaatatattgtaacagaatgtataaatatttttgataaaacagtctatattttattaaaaaatgaattataacactaaagctgtacctcaaaagtctcaaaaa

SEQ ID NO: 46670 - DNA, 120 bp, Artificial Sequence
  ENSG00000065243_37 (sequence is synthesized)
taatttgatgaaatattttatacaactcttcaaaggatccgtctgtggctttttatactcttttagggttgtctttttacaaaccatgactttccacttgcctgtagttttttgtttgtt

SEQ ID NO: 46671 - DNA, 120 bp, Artificial Sequence
  ENSG00000065243_38 (sequence is synthesized)
ttggtttggtttgattttatatttttttctcctaatctatgactttattgttttttcttagtttagtaatagcatctttgatcctgtgcttagcatgttagggtcattatacctcaggaa

SEQ ID NO: 46672 - DNA, 120 bp, Artificial Sequence
  ENSG00000065243_39 (sequence is synthesized)
tagcaagctgttaagtaaccatactgaattaactatttaattacagtgagctcatctcttaaaaattgttcaggtgtaaatcttatgagaaacatgaaaaagcacactgatttatggaga

SEQ ID NO: 46673 - DNA, 120 bp, Artificial Sequence
  ENSG00000065243_40 (sequence is synthesized)
gttgagctaaaaacatttataaatatttgctgggatgttttagcatcttttcattgtactctgagaacaattaaaattgtccagagatcatttatattaccttccaaattgtttattacc

SEQ ID NO: 46674 - DNA, 120 bp, Artificial Sequence
  ENSG00000065243_41 (sequence is synthesized)
caagatcctttgggagaaaatcttatagaatgggggaacaatatgtggtttaaagttattttaaaatgccagttaatttcctcggcaaaggacaatagaggaacttagcttaattgtctg

SEQ ID NO: 46675 - DNA, 120 bp, Artificial Sequence
  ENSG00000065243_42 (sequence is synthesized)
gctttaatttaaactgtgttaatacaacattaaaataaaacactaaatacttttgaggtacagtctgctcacttttttggttctcaaatagcaaagaaagtaatgtctaaaataggctct

SEQ ID NO: 46676 - DNA, 120 bp, Artificial Sequence
  ENSG00000065243_43 (sequence is synthesized)
tagcattaaaaactgacagcatttcgtaactacacagtgtacagaatttttttttaattgaagtcaatcactaaaaaaattagaaggcagggtctatttacacaattaagctgaagaaag

SEQ ID NO: 46677 - DNA, 120 bp, Artificial Sequence
  ENSG00000065243_44 (sequence is synthesized)
cactaattttttgtagtttaaaatatatatatattttagtcagatttaaaattttaagctttatagagtgtaaatatattttgctattactgtatgtgtatgtgactgctcaagcacttt

SEQ ID NO: 46678 - DNA, 120 bp, Artificial Sequence
  ENSG00000065243_45 (sequence is synthesized)
gtaaagaaattaggatattttagaatggtacactatgcattcaaatgaaatgtgcctttcactatgtcattctaagaaaacaagtgttttttgcagtcataaattatcacaaatgcacaa

SEQ ID NO: 46679 - DNA, 120 bp, Artificial Sequence
  ENSG00000065243_46 (sequence is synthesized)
attaaagtctatatagattgaaatttgtaactttggttttaagtattctttccttttagaaacttcctaatgattaaaatatactttaacttttctgtgttcaaaatctcaaagactaat

SEQ ID NO: 46680 - DNA, 120 bp, Artificial Sequence
  ENSG00000065243_47 (sequence is synthesized)
taactttaataaacattcttgcaagtactttttgtcctagtgaaggcttaaaaccatgaacattcagagcaaactgtccacttcattgggaataatgggaaaagtttgtattctgctcct

SEQ ID NO: 46681 - DNA, 120 bp, Artificial Sequence
  ENSG00000065243_48 (sequence is synthesized)
gtaaggtcagtagcatcttttatttgaagcatatttatggactgcttactgtgtatagatactgagaataggaagtttttttttttaaagcaacaaaatgttgatgaatgaagaacagcc

SEQ ID NO: 46682 - DNA, 120 bp, Artificial Sequence
  ENSG00000065243_49 (sequence is synthesized)
tgttttaattaagatgcaagcaccagtattgtatgtacttttctcttgtttgaggttagcttattttaatttaggacctggcttctcaaaaaggcaaatgaataaaacagaatactagta

SEQ ID NO: 46683 - DNA, 120 bp, Artificial Sequence
  ENSG00000065243_50 (sequence is synthesized)
taggtatgtgtctgagattttaagcatctcttatacaaagttattgggacattcttacgtactgattatagcaggtgtactgagtcttgcttttttcccaagtagtattttgaaagtagt

SEQ ID NO: 46684 - DNA, 120 bp, Artificial Sequence
  ENSG00000065243_51 (sequence is synthesized)
gttctgtttacttaaaaagtaaattgtttgctttaattttaaagctgtttaaaatacagactttctattactgttttggtgagttactttatcttctataagtgattctacagtaaccaa

SEQ ID NO: 46685 - DNA, 120 bp, Artificial Sequence
  ENSG00000065243_52 (sequence is synthesized)
taaaccttgcataattcctcttcactgaatgaattagcaataaaagcatcatagtgaataaggcgtgtctttccatttaaaattgccactgaactgtgaatttatggttttttgtttgtt

SEQ ID NO: 46686 - DNA, 120 bp, Artificial Sequence
  ENSG00000065243_53 (sequence is synthesized)
ctttaaaagctgtttttcagttcataaatgttgcatggcttagacaaaaaaagacaaaatatatctaagttttttaaagtaataatccttatcagtgaattttattctattggttttatt

SEQ ID NO: 46687 - DNA, 120 bp, Artificial Sequence
  ENSG00000065243_54 (sequence is synthesized)
ccgggaaactactgaagttcctggggaagcaaagtagaatttcgtaagaacaaaatggatggagagaggagaaaacctatggtagctgtgaaggccctgatgccatgtatgtcaaattga

SEQ ID NO: 46688 - DNA, 120 bp, Artificial Sequence
  ENSG00000065268_0 (sequence is synthesized)
ggggccgccgctctggcccgcgtggggcagtcgtccgcgtctcgctcatgatgacgcacgtccggggcggtggggaaggcaagatggcggcgcccatggaggtggccgtgtgtacggact

SEQ ID NO: 46689 - DNA, 120 bp, Artificial Sequence
  ENSG00000065268_1 (sequence is synthesized)
cggcggccccgatgtggagctgcatcgtgtgggaacttcactcgggcgccaacctgctcacctaccgcggcggccaggcgggaccccgcggcctggcgctgctcaatggcgagtatctgc

SEQ ID NO: 46690 - DNA, 120 bp, Artificial Sequence
  ENSG00000065268_2 (sequence is synthesized)
tggcggcgcagctgggcaagaattacatcagcgcctgggagctccagcggaaggaccagctccagcagaagatcatgtgccccgggcctgtcacctgtctgactgcatcacccaatggtc

SEQ ID NO: 46691 - DNA, 120 bp, Artificial Sequence
  ENSG00000065268_3 (sequence is synthesized)
tctacgtcctggcaggagttgcagaaagcatccacctgtgggaggtctccaccgggaaccttctggtcatcctgagtcgacactaccaggacgtctcctgccttcagttcacaggggaca

SEQ ID NO: 46692 - DNA, 120 bp, Artificial Sequence
  ENSG00000065268_4 (sequence is synthesized)
gcagccacttcatctcagggggcaaggactgcctggtgctggtttggagcctctgcagcgtgctgcaggccgacccctccaggattccggcgcccaggcacgtctggtctcaccacgcgc

SEQ ID NO: 46693 - DNA, 120 bp, Artificial Sequence
  ENSG00000065268_5 (sequence is synthesized)
tccccatcacggacctgcactgcggctttgggggccccctggcccgggtggccacctcctcactggaccagacggtgaagctatgggaggtctcctcgggggagctgctgctctccgtcc

SEQ ID NO: 46694 - DNA, 120 bp, Artificial Sequence
  ENSG00000065268_6 (sequence is synthesized)
atatgttctgcgggggcagtgagggctccatcttccaggtcgacctcttcacctggcccggacagagggagaggagcttccacccagagcaggacgccgggaaggtcttcaaagggcaca

SEQ ID NO: 46695 - DNA, 120 bp, Artificial Sequence
  ENSG00000065268_7 (sequence is synthesized)
ggaaccaggtgacttgcctgtcagtgtccactgacggcagcgtgctgctctcaggctcccacgacgagaccgtgcgcctctgggacgtgcagagcaagcagtgcatccggacggtggccc

SEQ ID NO: 46696 - DNA, 120 bp, Artificial Sequence
  ENSG00000065268_8 (sequence is synthesized)
tcaaaggcccagtcaccaatgccgccatcctgctggcgcccgtcagcatgctgagctcagacttcaggcccagcctgccgctgccccacttcaacaagcacctgctgggcgccgagcacg

SEQ ID NO: 46697 - DNA, 120 bp, Artificial Sequence
  ENSG00000065268_9 (sequence is synthesized)
gggacgagccgcgccacgggggcctcactctgcgcctgggcctccaccagcagggctcggagcccagctacctggaccgcacggagcagctgcaggccgtcctgtgcagcaccatggaga

SEQ ID NO: 46698 - DNA, 120 bp, Artificial Sequence
  ENSG00000065268_10 (sequence is synthesized)
agagcgtgctcggcggccaggaccagctgcgcgtccgtgtgacggagctggaggacgaggtgcgcaacctgcgcaagatcaatcgggacctgttcgacttctccacgcgcttcatcacgc

SEQ ID NO: 46699 - DNA, 120 bp, Artificial Sequence
  ENSG00000065268_11 (sequence is synthesized)
ggccggccaagtgaggcccggagaccccggcccgaggcgcccaggcctgagccccatgcctcccagcaaccagggcccgcgggtgtggcccccaccagcccaggcctggactctcctcag

SEQ ID NO: 46700 - DNA, 120 bp, Artificial Sequence
  ENSG00000065268_12 (sequence is synthesized)
ttctgtgtcgtgttcgggtttttcctctgtgactgggccgtcttggtgtctcgtggcacgcgtcacagtggtgctagtctgtttttaacaaaagaggatgaaaagcccctcctctccggc

SEQ ID NO: 46701 - DNA, 120 bp, Artificial Sequence
  ENSG00000065268_13 (sequence is synthesized)
gcgccttgcgcactcaggcctgcacctggaactgcacccgggctcaggcggggagaggaggcgccaaggcccctggcgggaaggggcttctctcttgggggctggagtgcagaggacgga

SEQ ID NO: 46702 - DNA, 120 bp, Artificial Sequence
  ENSG00000065268_14 (sequence is synthesized)
gtgatcatcccaggggtcctggctgcccacactggggtctggtttgttctgggggccgtgggggcccagccttgagtttactcaggtgaggcaggccaggctgctgagtggaggcaggtg

SEQ ID NO: 46703 - DNA, 120 bp, Artificial Sequence
  ENSG00000065268_15 (sequence is synthesized)
tgtgcgtgaggtgggtgctggaggcgtggactgccctgttccctccgctccccgcctgctgagcacctgccccaccccgctcagcgtgctgcaggccgacccctccaggattccggcgcc

SEQ ID NO: 46704 - DNA, 120 bp, Artificial Sequence
  ENSG00000065268_16 (sequence is synthesized)
ggtaagggctacatagcaaggagtgtgcttaatgtgcctgagctgtgcacctagaaatggccaagatggcaggtttcatgttatgactattttcccacaataaaacattttttaaaagtc

SEQ ID NO: 46705 - DNA, 120 bp, Artificial Sequence
  ENSG00000065268_17 (sequence is synthesized)
ggtcatcagccggagaccaagctccatttcagcacaggccatgtcccctggcccccaagacccacatggtgacggctttcacccaaagtcgcaagccctagggccagaggacagccgacg

SEQ ID NO: 46706 - DNA, 120 bp, Artificial Sequence
  ENSG00000065268_18 (sequence is synthesized)
cctgacctccctggtgcccctgttcccatggggtcctcgggttccccctgccgggccgagccccacgccctttgcccacccgcagctatgggaggtctcctcgggggagctgctgctctc

SEQ ID NO: 46707 - DNA, 120 bp, Artificial Sequence
  ENSG00000065268_19 (sequence is synthesized)
gggctgcaccctgccctggggctgagggcatcgggcctgcggctcacacacgtctcggccttcgcagcccggacagagggagaggagcttccacccagagcaggacgccgggaaggtctt

SEQ ID NO: 46708 - DNA, 120 bp, Artificial Sequence
  ENSG00000065308_0 (sequence is synthesized)
gaagttgttccgcgctgggcgggcgagcggctgtgggagagcgggcggcgggccggcgggcggaccgggccggtgctggagaagtttgcgctgcggttcgtgagcgcagggtgcgggccc

SEQ ID NO: 46709 - DNA, 120 bp, Artificial Sequence
  ENSG00000065308_1 (sequence is synthesized)
cgccggccgctgcgcgcccgctgccatggctttccgcaggaggacgaaaagttacccgctcttcagccaggagttcgtcatccacaaccatgcggacatcggcttctgcctggtgctctg

SEQ ID NO: 46710 - DNA, 120 bp, Artificial Sequence
  ENSG00000065308_2 (sequence is synthesized)
cgtcctcatcgggcttatgttcgaggtcacagccaagactgcctttctatttattttacctcagtataacattagcgtgcctacagcagacagtgagaccgtgcactaccactatggccc

SEQ ID NO: 46711 - DNA, 120 bp, Artificial Sequence
  ENSG00000065308_3 (sequence is synthesized)
taaggacctggtcacaatcttgttctacatcttcatcaccatcatcttgcatgctgtggttcaggagtacattttagataaaatcagcaaacggcttcatctctccaaagtcaaacacag

SEQ ID NO: 46712 - DNA, 120 bp, Artificial Sequence
  ENSG00000065308_4 (sequence is synthesized)
caagttcaatgaatctggacagctggtcgtctttcatttcacctcggtgatttggtgcttctacgtggtggtgacggaaggatacttaacaaacccaagaagcctctgggaagactaccc

SEQ ID NO: 46713 - DNA, 120 bp, Artificial Sequence
  ENSG00000065308_5 (sequence is synthesized)
gcatgtgcacctccccttccaggtgaagtttttctacctatgccagctggcctactggctgcacgcacttcctgagctatacttccagaaggtacggaaggaggaaattccccgccagct

SEQ ID NO: 46714 - DNA, 120 bp, Artificial Sequence
  ENSG00000065308_6 (sequence is synthesized)
ccagtatatttgcctgtacctggtgcatatagctggagcatacctcttaaacctgagccgcctgggcctgatcttgctgctgctgcagtactcaactgagttcctcttccacacggctag

SEQ ID NO: 46715 - DNA, 120 bp, Artificial Sequence
  ENSG00000065308_7 (sequence is synthesized)
actcttctactttgcagatgaaaacaacgagaaactgttcagtgcctgggctgctgtttttggggttacccgcctcttcatcctcacccttgccgtgctggccattggctttggactggc

SEQ ID NO: 46716 - DNA, 120 bp, Artificial Sequence
  ENSG00000065308_8 (sequence is synthesized)
tcgcatggaaaaccaggcatttgatcccgagaaagggaacttcaacactttgttttgcaggctctgcgtgctgctgctggtgtgtgccgcccaggcctggctcatgtggcgcttcatcca

SEQ ID NO: 46717 - DNA, 120 bp, Artificial Sequence
  ENSG00000065308_9 (sequence is synthesized)
ctcccagctgcggcactggcgggaatactggaatgagcagagtgcaaagcggagagtcccagccacacccagactaccagccaggctcatcaagagggaatctggttaccatgaaaatgg

SEQ ID NO: 46718 - DNA, 120 bp, Artificial Sequence
  ENSG00000065308_10 (sequence is synthesized)
agtggtgaaggcagagaacggaacctccccacggactaagaaactcaagtctccctaaggccaaagtgctaagaacaggaatcctcttggtgggggccgagcagggggcaaggagcccag

SEQ ID NO: 46719 - DNA, 120 bp, Artificial Sequence
  ENSG00000065308_11 (sequence is synthesized)
gccccctccctgcctcctccttcctgcctgtgatgctccgtctcaaacagccgaaacctgtcttgcaatggggggagggggcgtttcgctttccttcttcttggcttcctcttattcttc

SEQ ID NO: 46720 - DNA, 120 bp, Artificial Sequence
  ENSG00000065308_12 (sequence is synthesized)
cacaaaccattctcaataaagccaaaaatctttctctttctccccctcaggccacctcctgtcctcactcctgtcctgtgctggcttttctggaacgccaggcgcccatggctggcacct

SEQ ID NO: 46721 - DNA, 120 bp, Artificial Sequence
  ENSG00000065308_13 (sequence is synthesized)
ttctgcttgctctgtctcttgccttatggctgctgcttttcctttttacttcctattttcaccttatcttgcaatttttctgtctgatttttacaatgggaggggagctaagattgcagt

SEQ ID NO: 46722 - DNA, 120 bp, Artificial Sequence
  ENSG00000065308_14 (sequence is synthesized)
cctgtccttcggtcccccagggcctgccggtcagaagcctggggctggtaggcccttggtggtcctcatgtggatgggcaagaagagagcggccatctcggatcataatctccttggtgc

SEQ ID NO: 46723 - DNA, 120 bp, Artificial Sequence
  ENSG00000065308_15 (sequence is synthesized)
tgattaactgacgagatatatgattccagttctgcatgtaccatcttgaggcacagcagccactgctcgttgtaaatgccaaggcatttggctttgggacgtgacaactcaatccagaag

SEQ ID NO: 46724 - DNA, 120 bp, Artificial Sequence
  ENSG00000065308_16 (sequence is synthesized)
gatggtgtgaactcggttgggtcccgtgactcgagctcctaccagtggctggccgcggattggaagccagcctgctgtcgctctgtggggggggacacgtcttcccactgcttagagcga

SEQ ID NO: 46725 - DNA, 120 bp, Artificial Sequence
  ENSG00000065308_17 (sequence is synthesized)
gagcagagcaaactgcgcagcaggcacctccagaaaggtaatggtggcagaacccacagtggagtcgacctaggcctttctccagcagtcccagtcgccattgctttttcagccattcac

SEQ ID NO: 46726 - DNA, 120 bp, Artificial Sequence
  ENSG00000065308_18 (sequence is synthesized)
aagcattcaaaaccaaaccaaacagcagttcatatacctgcctgagataggctggtcctcacctccagagccagccagccccgtcaggggccaaacttactaccttgacttcatctctag

SEQ ID NO: 46727 - DNA, 120 bp, Artificial Sequence
  ENSG00000065308_19 (sequence is synthesized)
ctgcagaaacactaagtctcaagggcttcagccccatgctggtcccttggtgttcagggagggtcacttggaccgctgttcatctggccgcccttgttgagtgttctttggaattgtcgt

SEQ ID NO: 46728 - DNA, 120 bp, Artificial Sequence
  ENSG00000065308_20 (sequence is synthesized)
tttttgagcacaactacagcattttagactgcatgaaaccatgactgactgagagtcactctctgggtagatgataggcgcctttctggccccttccctcacagattctttcccctcccc

SEQ ID NO: 46729 - DNA, 120 bp, Artificial Sequence
  ENSG00000065308_21 (sequence is synthesized)
tccacctgaagagaaggcctccaagtccttttggtgccttgtgaggacttttagaaggggcgttcagctttaaaaagccggtcctaattacggccggacgcagtagcttacgcctgttat

SEQ ID NO: 46730 - DNA, 120 bp, Artificial Sequence
  ENSG00000065308_22 (sequence is synthesized)
aggagaatcgcttgaacctagaaggcggaggttgcagtgagcggagattgtaccatggcactccagcctggacaacaagagcgaaattctgtctaaaaaaacaaaagtcccaattaagaa

SEQ ID NO: 46731 - DNA, 120 bp, Artificial Sequence
  ENSG00000065308_23 (sequence is synthesized)
aattctgtctaaaaaaacaaaagtcccaattaagaacctccgaactctgttttgaggcaaaggggagtagttcttggtaggtgcaggaatagtagtgtcatttggaatactggtcatctt

SEQ ID NO: 46732 - DNA, 120 bp, Artificial Sequence
  ENSG00000065308_24 (sequence is synthesized)
tctgacatcacagtagaaaccaaaccttggatttagattcaaaaggggggaaatgggtcttttcatcaaggcaactccccttctccaagtcacttacatcatagataaattttagcttcc

SEQ ID NO: 46733 - DNA, 120 bp, Artificial Sequence
  ENSG00000065308_25 (sequence is synthesized)
cagtaactgagggatttgtttcctaacgccattggaggccttcatccctctctacgataaggttgcagaaatgggaagagctacccgtggttgcttttgattacccttaggaagtgagac

SEQ ID NO: 46734 - DNA, 120 bp, Artificial Sequence
  ENSG00000065308_26 (sequence is synthesized)
agtgtttttgaaaatatgtatttcccccatttctccctctccttccctgacacttctctgggctgcacagcagaaacgttggtaaaagggcagtttggtttcaacacagcagacctgata

SEQ ID NO: 46735 - DNA, 120 bp, Artificial Sequence
  ENSG00000065308_27 (sequence is synthesized)
tgggatcccttagccactttagtcaaacagccctgacagagtctataattgagttcaggccccccaccttgcctaataactgcaaatcgcatgttcagccagcagcctcctaagcccacc

SEQ ID NO: 46736 - DNA, 120 bp, Artificial Sequence
  ENSG00000065308_28 (sequence is synthesized)
tgagtccaggttaaactgttgagttgtggcttcaacagatatgtatggcatgctgggatgtgccaggtgcctgcgttgtgccagttgctggagaggtagtgtgagcagagcagctgaaat

SEQ ID NO: 46737 - DNA, 120 bp, Artificial Sequence
  ENSG00000065308_29 (sequence is synthesized)
cttgccatcaagcaaccctcattctcatgcctgtaggtttccattgctctgtcccaggacacttgcgtgccagagacgccacaacttcatgtccctgtctcttgcaagctccccgtgctg

SEQ ID NO: 46738 - DNA, 120 bp, Artificial Sequence
  ENSG00000065308_30 (sequence is synthesized)
ccagtacttcatgccttggatgtggtcccaccagcccagtggccggggtcagcttaggctctgcttcccagtggacgggtgtgctaagggtttattttatgtaaaaaaaaaaaaaaaaac

SEQ ID NO: 46739 - DNA, 120 bp, Artificial Sequence
  ENSG00000065308_31 (sequence is synthesized)
aaaaaaaaaccctgagaccatgagtggggctggcatcttgccagcctgggcttcagggatgtttggggggggtggttagagggtagttgtagggtactttgtcacccccctccccctgcc

SEQ ID NO: 46740 - DNA, 120 bp, Artificial Sequence
  ENSG00000065308_32 (sequence is synthesized)
accctccctggcacgtttatttcacagcagagccaagtctgtggcaggttgacacagactgtgttgccagagctgaaataattccacttcatcctatgagcgtgttgggctagcttgttc

SEQ ID NO: 46741 - DNA, 120 bp, Artificial Sequence
  ENSG00000065308_33 (sequence is synthesized)
taattttggccactttggctgttttcttcagttttatgcattctctcctgccccaaagtgccaagccatttgtgaaggctctgccagacacctccaagcttgagagctcagcaccatgca

SEQ ID NO: 46742 - DNA, 120 bp, Artificial Sequence
  ENSG00000065308_34 (sequence is synthesized)
ccaagagcaggagaaaagacgtaaacctaccccagcaactgtggcctctcgacagccctggctaactaacttacatttgtggggaagccaacagacacagcaggaggagagggaggtggc

SEQ ID NO: 46743 - DNA, 120 bp, Artificial Sequence
  ENSG00000065308_35 (sequence is synthesized)
gctggtggaccaaggatctgtgctacccgctcccctccttggaggtgcagtgatgatgggagttatttttaccatccgggcgctgatagctgcactattaataaattgcatgtgttcctt

SEQ ID NO: 46744 - DNA, 120 bp, Artificial Sequence
  ENSG00000065308_36 (sequence is synthesized)
ttgaaggtaggggatggttctgggtgagaggggagcaggctgagccggcgggggatctgctgtcctcccttttgagtcagttctaatcccatgtgtgtctgggccaccagaccgaaatgg

SEQ ID NO: 46745 - DNA, 120 bp, Artificial Sequence
  ENSG00000065308_37 (sequence is synthesized)
ttgctgagaaacttgtctgttcatgtcccaaggcataacttcccaacatttaagaaaccccaatagacacctctgccctggccacgttcacagatccttctcttgaccggaaaccctggg

SEQ ID NO: 46746 - DNA, 120 bp, Artificial Sequence
  ENSG00000065308_38 (sequence is synthesized)
accctaagaacccctgaagcttggggtgggtgtgtgcttctggggtctcttttgggacctcctttgtcagtaccccttcttttttctaagcagctaataagaggttgggtgaaagagtgc

SEQ ID NO: 46747 - DNA, 120 bp, Artificial Sequence
  ENSG00000065308_39 (sequence is synthesized)
atctcctcccaggattccacaacaaaattcttatcttccatggatgctttaattggaagtgggttgccgacccccttgtgcctagaaaaggccttcgcttgggtttcctttgtatgcttc

SEQ ID NO: 46748 - DNA, 120 bp, Artificial Sequence
  ENSG00000065308_40 (sequence is synthesized)
agccttcctagttggtttttctaggcctggtgtgagaggtagggaagtctgcacataactaattcttttgcttaagggcctatggcacaagtgcacaaacttcaattcttgatgttctaa

SEQ ID NO: 46749 - DNA, 120 bp, Artificial Sequence
  ENSG00000065308_41 (sequence is synthesized)
gctctctcctctaacagagggagtgctgaaagcttttgagtcaagacaatggagtgctcttcctccctcactctgccttccgagcttatggttccttttctcaggagaggattttcagga

SEQ ID NO: 46750 - DNA, 120 bp, Artificial Sequence
  ENSG00000065308_42 (sequence is synthesized)
ttattggaggattaggtcattgtcagatgactggaaaacctaaataggatctctctccagctcaaggttgtcccagtgaggaagactttaccaacttctcactctaccccactactcaca

SEQ ID NO: 46751 - DNA, 120 bp, Artificial Sequence
  ENSG00000065308_43 (sequence is synthesized)
tgagtgttagctccaccttgcaaaggctgaagaccagttctccccagtgaaagctgcctcattcttttatggagttccctggagtggcagagctataaagacgagcattgggatttgcag

SEQ ID NO: 46752 - DNA, 120 bp, Artificial Sequence
  ENSG00000065308_44 (sequence is synthesized)
tctccatgtagcctttcgtgcttggcaacccctgtagactttttgtcccaagcagattgcgtgcgtgcgcctgtgtgtgagaataagtgccttactttgctgtgtggttttcaacttgta

SEQ ID NO: 46753 - DNA, 120 bp, Artificial Sequence
  ENSG00000065308_45 (sequence is synthesized)
ctccgtggccagcccccagttgccagggctcgacggcagccaaggacaccatacctcagtatagttatatataaaagggacacggattgtgacagtttcaccccatttgtttctaacccc

SEQ ID NO: 46754 - DNA, 120 bp, Artificial Sequence
  ENSG00000065308_46 (sequence is synthesized)
gctgcccaggattagggtctgtggtgtgttctgttttgtttttggtttctcccttgtgtcagttctcttctggcccagctgggtggctgtggaagtctgtgaggtggcccaaccacaagc

SEQ ID NO: 46755 - DNA, 120 bp, Artificial Sequence
  ENSG00000065308_47 (sequence is synthesized)
atacctattaagagaagcccagagcttccagcccccacttcgaaaactctcctctggccccacatagcaaactccttctccgttattttccccacccccagattttttttaaaaggccca

SEQ ID NO: 46756 - DNA, 120 bp, Artificial Sequence
  ENSG00000065308_48 (sequence is synthesized)
cttgccgtaacctcttttggtctattttgcttcccattcagcccaaagtttatatgataaaggtgtttacttttacttcccagtctccaagtgctaacacataaacacatacatgtctga

SEQ ID NO: 46757 - DNA, 120 bp, Artificial Sequence
  ENSG00000065308_49 (sequence is synthesized)
ctgttgcagaactgttcgagctcctaattcagtgttaccttgttttagtcgcagcaaccctctcccctaccccttgcccgcccacgtttttctcactcttccgggttgtgcaataactct

SEQ ID NO: 46758 - DNA, 120 bp, Artificial Sequence
  ENSG00000065308_50 (sequence is synthesized)
cccagccagtggtcctttccacagcctttctgtcccttaaaacacctgcaactgggggagaaatgggacccatgggagggggagtcgtcatcccttacacaagaaatagccactttcctt

SEQ ID NO: 46759 - DNA, 120 bp, Artificial Sequence
  ENSG00000065308_51 (sequence is synthesized)
ttgttgtcattcttgtgatcctgggtgggtttctgtggcactcttttagaacatgtagcatcatcttagaggtctatttttaaaaaatgtgttgaagaggaaaaaaccattctcacgatg

SEQ ID NO: 46760 - DNA, 120 bp, Artificial Sequence
  ENSG00000065308_52 (sequence is synthesized)
gggcttaagtcattgtccaggaataagattggcgtggtgcccatgacatcaccgtcactctgcctaaaagcactctagagctacttgttcacgtggagaggaaggatattttgcgaagca

SEQ ID NO: 46761 - DNA, 120 bp, Artificial Sequence
  ENSG00000065308_53 (sequence is synthesized)
acagccgcaggtggagagccctgttcacctgatagggtctagctgtgacagtaaatataataccgctgtttccttgggtacagatttgagtgttcatgtgatgagactgtaaacctcatt

SEQ ID NO: 46762 - DNA, 120 bp, Artificial Sequence
  ENSG00000065308_54 (sequence is synthesized)
tttcggttcctctgtttaaaaaaacatctgaaggatgaactaaggctgctggtgccctgagcaactgataatgcaaatgtggacaaagtgtctgttttctactctagcctgttcatatgg

SEQ ID NO: 46763 - DNA, 120 bp, Artificial Sequence
  ENSG00000065308_55 (sequence is synthesized)
accaaatttcaacaaggaactcaaggaaaatttgtacctgccgtatttatgctttcatgtaaaaaagggttggggggaggggtgtctttttgcttttggtgaactttttttcaaaatcat

SEQ ID NO: 46764 - DNA, 120 bp, Artificial Sequence
  ENSG00000065308_56 (sequence is synthesized)
ttttccactgtttctgtctggttttaaaacaaattacagttttgtatggattttttaaatgtacattttggaacaaatgatcaaatattttctgaaataacaataaaaggcagaaaatta

SEQ ID NO: 46765 - DNA, 120 bp, Artificial Sequence
  ENSG00000065320_0 (sequence is synthesized)
ggcggagccttcgggggcgagcgcgcgtgtgtgtgagtgcgcgccggccagcgcgccttctgcggcaggcggacagatcctcggcgcggcagggccggggcaagctggacgcagcatgat

SEQ ID NO: 46766 - DNA, 120 bp, Artificial Sequence
  ENSG00000065320_1 (sequence is synthesized)
cttctgcggcaggcggacagatcctcggcgcggcagggccggggcaagctggacgcagcatgatgcgcgcagtgtgggaggcgctggcggcgctggcggcggtggcgtgcctggtgggcg

SEQ ID NO: 46767 - DNA, 120 bp, Artificial Sequence
  ENSG00000065320_2 (sequence is synthesized)
ggcggcgcagcccgatccctgctcggacgagaacggccacccgcgccgctgcatcccggactttgtcaatgcggccttcggcaaggacgtgcgcgtgtccagcacctgcggccggccccc

SEQ ID NO: 46768 - DNA, 120 bp, Artificial Sequence
  ENSG00000065320_3 (sequence is synthesized)
ggcgcgctactgcgtggtgagcgagcgcggcgaggagcggctgcgctcgtgccacctctgcaacgcgtccgaccccaagaaggcgcacccgcccgccttcctcaccgacctcaacaaccc

SEQ ID NO: 46769 - DNA, 120 bp, Artificial Sequence
  ENSG00000065320_4 (sequence is synthesized)
gcacaacctgacgtgctggcagtccgagaactacctgcagttcccgcacaacgtcacgctcacactgtccctcggcaagaagttcgaagtgacctacgtgagcctgcagttctgctcgcc

SEQ ID NO: 46770 - DNA, 120 bp, Artificial Sequence
  ENSG00000065320_5 (sequence is synthesized)
gcggcccgagtccatggccatctacaagtccatggactacgggcgcacgtgggtgcccttccagttctactccacgcagtgccgcaagatgtacaaccggccgcaccgcgcgcccatcac

SEQ ID NO: 46771 - DNA, 120 bp, Artificial Sequence
  ENSG00000065320_6 (sequence is synthesized)
caagcagaacgagcaggaggccgtgtgcaccgactcgcacaccgacatgcgcccgctctcgggcggcctcatcgccttcagcacgctggacgggcggccctcggcgcacgacttcgacaa

SEQ ID NO: 46772 - DNA, 120 bp, Artificial Sequence
  ENSG00000065320_7 (sequence is synthesized)
ctcgcccgtgctgcaggactgggtcacggccacagacatccgcgtggccttcagccgcctgcacacgttcggcgacgagaacgaggacgactcggagctggcgcgcgactcgtacttcta

SEQ ID NO: 46773 - DNA, 120 bp, Artificial Sequence
  ENSG00000065320_8 (sequence is synthesized)
cgcggtgtccgacctgcaggtgggcggccggtgcaagtgcaacggccacgcggcccgctgcgtgcgcgaccgcgacgacagcctggtgtgcgactgcaggcacaacacggccggcccgga

SEQ ID NO: 46774 - DNA, 120 bp, Artificial Sequence
  ENSG00000065320_9 (sequence is synthesized)
gtgcgaccgctgcaagcccttccactacgaccggccctggcagcgcgccacagcccgcgaagccaacgagtgcgtggcctgtaactgcaacctgcatgcccggcgctgccgcttcaacat

SEQ ID NO: 46775 - DNA, 120 bp, Artificial Sequence
  ENSG00000065320_10 (sequence is synthesized)
ggagctctacaagctttcggggcgcaagagcggaggtgtctgcctcaactgtcgccacaacaccgccggccgccactgccattactgcaaggagggctactaccgcgacatgggcaagcc

SEQ ID NO: 46776 - DNA, 120 bp, Artificial Sequence
  ENSG00000065320_11 (sequence is synthesized)
catcacccaccggaaggcctgcaaagcctgtgattgccaccctgtgggtgctgctggcaaaacctgcaaccaaaccaccggccagtgtccctgcaaggacggcgtgacgggtatcacctg

SEQ ID NO: 46777 - DNA, 120 bp, Artificial Sequence
  ENSG00000065320_12 (sequence is synthesized)
caaccgctgcgccaaaggctaccagcagagccgctctcccatcgccccctgcataaagatccctgtagcgccgccgacgactgcagccagcagcgtggaggagcctgaagactgcgattc

SEQ ID NO: 46778 - DNA, 120 bp, Artificial Sequence
  ENSG00000065320_13 (sequence is synthesized)
ctactgcaaggcctccaaggggaagctgaagattaacatgaaaaagtactgcaagaaggactatgccgtccagatccacatcctgaaggcggacaaggcgggggactggtggaagttcac

SEQ ID NO: 46779 - DNA, 120 bp, Artificial Sequence
  ENSG00000065320_14 (sequence is synthesized)
ggtgaacatcatctccgtgtataagcagggcacgagccgcatccgccgcggtgaccagagcctgtggatccgctcgcgggacatcgcctgcaagtgtcccaaaatcaagcccctcaagaa

SEQ ID NO: 46780 - DNA, 120 bp, Artificial Sequence
  ENSG00000065320_15 (sequence is synthesized)
gtacctgctgctgggcaacgcggaggactctccggaccagagcggcatcgtggccgataaaagcagcctggtgatccagtggcgggacacgtgggcgcggcggctgcgcaagttccagca

SEQ ID NO: 46781 - DNA, 120 bp, Artificial Sequence
  ENSG00000065320_16 (sequence is synthesized)
caagttccagcagcgtgagaagaagggcaagtgcaagaaggcctagcgccgaggcagcgggcgggcgggcgggcgggcgccagggcggggccgagcgagagcgggcgccttggcccggcc

SEQ ID NO: 46782 - DNA, 80 bp, Artificial Sequence
  ENSG00000065320_17 (sequence is synthesized)
gagcgagagcgggcgccttggcccggccgccgcggacttggcccgcgagggctttcccaggtggggggagggagggggcg

SEQ ID NO: 46783 - DNA, 120 bp, Artificial Sequence
  ENSG00000065320_18 (sequence is synthesized)
tgcacgcggggcggggtgcgccgccggccgggccctggagaaatgacgagacgtagctacctcacggggctccttccagagcagagacgcgcttccctgggcctgggcgcggccgccgtg

SEQ ID NO: 46784 - DNA, 120 bp, Artificial Sequence
  ENSG00000065320_19 (sequence is synthesized)
gaggggctgggggcagcctgccctggggcccgggggcgggcgcagaatcgcacaactggggccccaggcgcggggcgtggatggcgcggagacgtggacgggaggagaactgtgaattct

SEQ ID NO: 46785 - DNA, 120 bp, Artificial Sequence
  ENSG00000065320_20 (sequence is synthesized)
caagcccgtagtgtgggcggggcgcggagcacccaccaaaccaccacccgacacgcagccgacgggatccccccctttctccccggccccttctagcagttccccgcgggccacctggct

SEQ ID NO: 46786 - DNA, 120 bp, Artificial Sequence
  ENSG00000065320_21 (sequence is synthesized)
gtcacagcctggactcctccatctgaaggggcctggcagcatttggggagtggacagctcctgtccagccagcatgccccaggcggcctctgtctccactgctacctgctgagtgggtcc

SEQ ID NO: 46787 - DNA, 120 bp, Artificial Sequence
  ENSG00000065320_22 (sequence is synthesized)
tactgggtgggggcttggggtcggtgagtggttcacctgtggagagaggagaggaagcccctgctgctgcctgtctctgcccctgcccctgcccctgcccagcgtggggctggcccatcc

SEQ ID NO: 46788 - DNA, 120 bp, Artificial Sequence
  ENSG00000065320_23 (sequence is synthesized)
ggaaggcagtgggcccagggacacccctgagaagcccaagccgggtggtcaccgcctcatgctggagctgcctgttggaggaggcatcgcaaacgcaaaacctcccagagagtttccttt

SEQ ID NO: 46789 - DNA, 120 bp, Artificial Sequence
  ENSG00000065320_24 (sequence is synthesized)
cgcaaggcccctcagcaatgtcaacagctggaaagggcctgaacgggcttggagtctgcaggctgcgaaggcacttgggcctggcttggggccgggggcttgtttgagctgggatggggt

SEQ ID NO: 46790 - DNA, 120 bp, Artificial Sequence
  ENSG00000065320_25 (sequence is synthesized)
ttgctggctcagtgaagtaccagagtgcctgagccatgggtgggcaggggcacaggaatgaccaggttcctgggggccaaggaggccatgctggcttctccaagggaaggcacagaggct

SEQ ID NO: 46791 - DNA, 120 bp, Artificial Sequence
  ENSG00000065320_26 (sequence is synthesized)
gccggcctgccccctacagctgtcttgggtctggcctgggccacaccttgaccgtgcctttccagacggtctttgtggagtctgcccgtgccctccactgtgccccagccctccttccaa

SEQ ID NO: 46792 - DNA, 120 bp, Artificial Sequence
  ENSG00000065320_27 (sequence is synthesized)
aatctcctagagacacggtcctcaagcaggcagccccttttgttctgacctcctcacacagggtccattcctgtgccctggggcctcctggctccctgccttcctgggctctctgcactg

SEQ ID NO: 46793 - DNA, 120 bp, Artificial Sequence
  ENSG00000065320_28 (sequence is synthesized)
cccgggcctctggcccacatcctcacacccggcgcactgaattaagaggcctggctcccctcacagtcaggaaattggtttcactttcccggccagagtttggctgctcaaaagggtcat

SEQ ID NO: 46794 - DNA, 120 bp, Artificial Sequence
  ENSG00000065320_29 (sequence is synthesized)
accaagtatgaagctcggcccccggtggtctggcttccctccgccttccccacatttacccgcatcacggctgccatttattgagcacctgctgtgtgccaggcactttacccacatgct

SEQ ID NO: 46795 - DNA, 120 bp, Artificial Sequence
  ENSG00000065320_30 (sequence is synthesized)
cccagtgtgtactcatgacaaccctgtgggacagggactcattatcaccagcaaggagactggagtacacgtgcccaaggtcatgctgcaaattggtggcaggactggggctcaaactcc

SEQ ID NO: 46796 - DNA, 120 bp, Artificial Sequence
  ENSG00000065320_31 (sequence is synthesized)
agagcccgactttctgaccaggggccacgctggccctcactgcactccagctctgcagcctacccgcccaatccctgtgcaggctgggagggtgctcttgggggagtggccaccgagccc

SEQ ID NO: 46797 - DNA, 120 bp, Artificial Sequence
  ENSG00000065320_32 (sequence is synthesized)
ctggccctggttactgcctcttgaggacactggcatctgggctggagaacaggagcccggggtggggtagggcatggggacaatcacatcttcagaggaggcagcaaagtggtgcgggat

SEQ ID NO: 46798 - DNA, 120 bp, Artificial Sequence
  ENSG00000065320_33 (sequence is synthesized)
gcagggacggacttgccagatggcagctccaggttccaggaaggcaggccttggatgctccgaagaggtggtagaaaggtgtttttagaaaggtgttttggctgcctcagggtggttgga

SEQ ID NO: 46799 - DNA, 120 bp, Artificial Sequence
  ENSG00000065320_34 (sequence is synthesized)
gagactccaggagagactggcagaggtgcctcaggggcagggagcagacagacctgccctgggaaggggcatttggcttccctgaatccagcccaaggctagaagacagggcccctctcc

SEQ ID NO: 46800 - DNA, 120 bp, Artificial Sequence
  ENSG00000065320_35 (sequence is synthesized)
aagctgtcagcgcccctcggatgcccagtgtggtgtgctgggcgccatcagcatcacaaggcactacgctgctggggcggttgtcctatttctgtctatgccagtgtggtttcttcaccc

SEQ ID NO: 46801 - DNA, 120 bp, Artificial Sequence
  ENSG00000065320_36 (sequence is synthesized)
tgcccagaagggctgtggcagccccacgatatcccaccctgggtctgggtctcacgggtgtcctgtgaggggcttgcatttgtggtggtctctgaggccacctcagcaacggagctggcg

SEQ ID NO: 46802 - DNA, 120 bp, Artificial Sequence
  ENSG00000065320_37 (sequence is synthesized)
acacgccaagcaacaaggcatcttgcggaaaattcagccagtgtcctgcccctcccttcggctcagcaccccgcagggcacaggctgtccgcccggtggtctggcccttggggaatgcgt

SEQ ID NO: 46803 - DNA, 120 bp, Artificial Sequence
  ENSG00000065320_38 (sequence is synthesized)
cagggtgaccagatccaccatgctagcagccaggtcactgttgggattgcacggtcgtcacgagctgcctttcctatccacacacccagccaggacccagcccaccactcccgactgcag

SEQ ID NO: 46804 - DNA, 120 bp, Artificial Sequence
  ENSG00000065320_39 (sequence is synthesized)
ccccggcctctgcggtgagcaccatccttgggaaagcacccctcctccactccggtgccccactccaaggagcagagggaaatgggaattgaggtgtcccggtttgtacagttaggaagg

SEQ ID NO: 46805 - DNA, 120 bp, Artificial Sequence
  ENSG00000065320_40 (sequence is synthesized)
gatgtaaaacggaactagattttgattttgaagagtgtattaaccagaattgtgctatgtaggtgtttgtttgaagaaaaacataccagattagtctttgtttttgaaacagcttcccca

SEQ ID NO: 46806 - DNA, 120 bp, Artificial Sequence
  ENSG00000065320_41 (sequence is synthesized)
gttgtcctttttcttaccagctgggtggtctggtgcccctgacagctgagtgcctgctttacggacacgcagtaatgccgaagatttgcgggggaggacatagggctgtccccgggattc

SEQ ID NO: 46807 - DNA, 120 bp, Artificial Sequence
  ENSG00000065320_42 (sequence is synthesized)
acctgctggctgtggtctctgcccactgcttctgtccttggaaagcagggcaggaggcagcatccccaggggcctctatgtgggagggagggacacctggggtcacaacccagggaggga

SEQ ID NO: 46808 - DNA, 120 bp, Artificial Sequence
  ENSG00000065320_43 (sequence is synthesized)
gggtcacagcccagggaggctgggagctgctccaaggccctggaactctgcctcagtcgcggcatgctggagaggggtacggacttactttcttggagttgtcccaggttggaatgagac

SEQ ID NO: 46809 - DNA, 120 bp, Artificial Sequence
  ENSG00000065320_44 (sequence is synthesized)
tgaactcaagaagagaccctaagggactggggaatggttcctgccttcaggaaagtgaaagacgcttaggctgtcaacacttaaaggaagtccccttgaagcccagagtggacagactag

SEQ ID NO: 46810 - DNA, 120 bp, Artificial Sequence
  ENSG00000065320_45 (sequence is synthesized)
acccattgatggggccactggccatggtccgtggacaagacattcctgtgggccatggcacaccgggggggatcaaaatgtgtacttgtggggtctcgccccttgccaaaagccaaacca

SEQ ID NO: 46811 - DNA, 120 bp, Artificial Sequence
  ENSG00000065320_46 (sequence is synthesized)
gtcccactcctgtcattggacgtttcttcccattccctcctcccaaatgcacttcccctcctccctctgccccctcctgtgttttggatttctgttcactcagaattgtaaatgtttagt

SEQ ID NO: 46812 - DNA, 120 bp, Artificial Sequence
  ENSG00000065320_47 (sequence is synthesized)
tgtgaccatgacgtattgtttgggtcaatgtccctttccaatgcatactaatatattatggttattatatatgaatatatttaatgacatggaaaaagttgtggattttctttctttcct

SEQ ID NO: 46813 - DNA, 120 bp, Artificial Sequence
  ENSG00000065320_48 (sequence is synthesized)
tttttttgggggggggtggggggttggttagagttgtaatggacccagatggaacttgtaatgtgggccccacatgatagaactaaattcagatatcattaaataaactcttgtacacta

SEQ ID NO: 46814 - DNA, 120 bp, Artificial Sequence
  ENSG00000065320_49 (sequence is synthesized)
gagccagatgctggggatacagaaggaggcttgggcacagggtcgcacaagcagaatgcagggggcccaggagctgggcgtgggggagaatcacatcttcattttcattcgcctctaact

SEQ ID NO: 46815 - DNA, 120 bp, Artificial Sequence
  ENSG00000065320_50 (sequence is synthesized)
aaaaatttagcatttcctccatggcaaagagaggccgcagaccgcagcatgcggccaagcctgcaccgtggtcactggcggaagtcacagcggtttacacatcacattctagctggtgca

SEQ ID NO: 46816 - DNA, 120 bp, Artificial Sequence
  ENSG00000065320_51 (sequence is synthesized)
gatatcataaatatcgttcatgctggttattgcttctcaaaacgacagaagttactagacctgctgctagatcctgatttataatcattaataaagaagcactcgcgtaacgtaaccata

SEQ ID NO: 46817 - DNA, 120 bp, Artificial Sequence
  ENSG00000065325_0 (sequence is synthesized)
agacactctcggcgcagcgtggagaggatttgtgcaaacatttcctctgtggaccaagaggaatgcaagaggaggctgcctgcggtgcatcttggacggctagagagatgtacccctact

SEQ ID NO: 46818 - DNA, 120 bp, Artificial Sequence
  ENSG00000065325_1 (sequence is synthesized)
tgtgaaggtgcacgaggaagatgaagctgggatcgagcagggcagggcctgggagaggaagcgcgggactcctgcctggcgtccacgagctgcccatgggcatccctgccccctggggga

SEQ ID NO: 46819 - DNA, 120 bp, Artificial Sequence
  ENSG00000065325_2 (sequence is synthesized)
ccagtcctctctccttccacaggaagtgctctctctgggcccctgggaggcccttcctcactctggtcctgctggtttccatcaagcaagttacaggatccctccttgaggaaacgactc

SEQ ID NO: 46820 - DNA, 120 bp, Artificial Sequence
  ENSG00000065325_3 (sequence is synthesized)
ggaagtgggctcagtacaaacaggcatgtctgagagacttactcaaggaaccttctggcatattttgtaacgggacatttgatcagtacgtgtgttggcctcattcttctcctggaaatg

SEQ ID NO: 46821 - DNA, 120 bp, Artificial Sequence
  ENSG00000065325_4 (sequence is synthesized)
tctctgtaccctgcccttcatacttaccttggtggagtgaagagagctcaggaagggcctacagacactgcttggctcaggggacttggcagacgatagagaacgccacggatatttggc

SEQ ID NO: 46822 - DNA, 120 bp, Artificial Sequence
  ENSG00000065325_5 (sequence is synthesized)
aggatgactccgaatgctccgagaaccacagcttcaagcaaaacgtggatcgttatgccttgctgtcaaccttgcagctgatgtacaccgtgggatactccttctctcttatctccctct

SEQ ID NO: 46823 - DNA, 120 bp, Artificial Sequence
  ENSG00000065325_6 (sequence is synthesized)
tcctggctctcaccctcctcttgtttcttcgaaaactccactgcacgcgcaactacatccacatgaacttgtttgcttctttcatcctgagaaccctggctgtactggtgaaggacgtcg

SEQ ID NO: 46824 - DNA, 120 bp, Artificial Sequence
  ENSG00000065325_7 (sequence is synthesized)
tcttctacaactcttactccaagaggcctgacaatgagaatgggtggatgtcctacctgtcagagatgtccacctcctgccgctcagtccaggttctcttgcattactttgtgggtgcca

SEQ ID NO: 46825 - DNA, 120 bp, Artificial Sequence
  ENSG00000065325_8 (sequence is synthesized)
attacttatggctgctggttgaaggcctctacctccacacgctgctggagcccacagtgcttcctgagaggcggctgtggcccagatacctgctgttgggttgggccttccctgtgctat

SEQ ID NO: 46826 - DNA, 120 bp, Artificial Sequence
  ENSG00000065325_9 (sequence is synthesized)
ttgttgtaccctggggtttcgcccgtgcacacctggagaacacagggtgctggacaacaaatgggaataagaaaatctggtggatcatccgaggacccatgatgctctgtgtaacagtca

SEQ ID NO: 46827 - DNA, 120 bp, Artificial Sequence
  ENSG00000065325_10 (sequence is synthesized)
atttcttcatcttcctgaaaattctcaagcttctcatttctaagctcaaagctcatcaaatgtgcttcagagattataaatacagattggcaaaatcaacactggtcctcattcctttat

SEQ ID NO: 46828 - DNA, 120 bp, Artificial Sequence
  ENSG00000065325_11 (sequence is synthesized)
tgggcgttcatgagatcctcttctctttcatcactgatgatcaagttgaaggatttgcaaaacttatacgacttttcattcagttgacactgagctcctttcatgggttcctggtggcct

SEQ ID NO: 46829 - DNA, 120 bp, Artificial Sequence
  ENSG00000065325_12 (sequence is synthesized)
tgcagtatggttttgccaatggagaggtgaaggctgagctgcggaaatactgggtccgcttcttgctagcccgccactcaggctgcagagcctgtgtcctggggaaggacttccggttcc

SEQ ID NO: 46830 - DNA, 120 bp, Artificial Sequence
  ENSG00000065325_13 (sequence is synthesized)
taggaaaatgtcccaagaagctctcggaaggagatggcgctgagaagcttcggaagctgcagccctcacttaacagtgggcggctcctacatctagccatgcgaggtcttggggagctgg

SEQ ID NO: 46831 - DNA, 120 bp, Artificial Sequence
  ENSG00000065325_14 (sequence is synthesized)
gcgcccagccccaacaggaccatgcacgctggccccggggcagcagcctgtccgagtgcagtgagggggatgtcaccatggccaacaccatggaggagattctggaagagagtgagatct

SEQ ID NO: 46832 - DNA, 120 bp, Artificial Sequence
  ENSG00000065325_15 (sequence is synthesized)
agggtggagttccaccaccctggctctgctcccagggactcttgagggggcccaggaagaggaagcaaagcaggacacacgttgctgggcacggaatcattctcgttccattcaccatgc

SEQ ID NO: 46833 - DNA, 120 bp, Artificial Sequence
  ENSG00000065325_16 (sequence is synthesized)
cactttgatatgaaagctatcacaaggttcttcaagctctgtatgaaagaggctgtgtgtcatgctcacagcctctgcctgctcttctcatcctaataacccccaccagtgtgttttcca

SEQ ID NO: 46834 - DNA, 120 bp, Artificial Sequence
  ENSG00000065325_17 (sequence is synthesized)
gtgcatgctttccatctgaggttgggtttagggtgcgtgaaaacctcctaggaagcttttaaaatgcagaatcctagacttgtggctaagattctaagacagtgagtctgggaccatggc

SEQ ID NO: 46835 - DNA, 120 bp, Artificial Sequence
  ENSG00000065325_18 (sequence is synthesized)
caggaattggagctgtttaataagcatcccaggtaattctgctgcaagcccacccttggagaacactgggcagggtgagagggagctagaagcgcccccatgtggccatggcaggatgct

SEQ ID NO: 46836 - DNA, 120 bp, Artificial Sequence
  ENSG00000065325_19 (sequence is synthesized)
gcaagagacagtctgctctcccaggtcagctggggtgtgcctgccctccttggagagtatgtaactccacccaccagagtgccactcctctctgctcttcctctcctatcaagtcttgcc

SEQ ID NO: 46837 - DNA, 120 bp, Artificial Sequence
  ENSG00000065325_20 (sequence is synthesized)
tctctctctctttgcctcagttctctgtccctgcacagcaggagttctgcttgatcctccctttgaggattggccccagtgcctggggaccctctgaatgtcgtctttggtctgttcctc

SEQ ID NO: 46838 - DNA, 120 bp, Artificial Sequence
  ENSG00000065325_21 (sequence is synthesized)
tcctttctggctctatctacctttctgagtttggcttctaccagcctgatttacactaccattctcttggggcaaggaatgtccccaccatttttggtttgccattgatgcattgattgt

SEQ ID NO: 46839 - DNA, 120 bp, Artificial Sequence
  ENSG00000065325_22 (sequence is synthesized)
cacacctgttgtcccaggaagttgacctataactctccatggccagagtccctgctgatcagaattcaatttgcccagtgggaataaatactgaaagcaggagggcccaggtaaagcaat

SEQ ID NO: 46840 - DNA, 120 bp, Artificial Sequence
  ENSG00000065325_23 (sequence is synthesized)
aggagtttggctggatctggacatgcccagggtggctctgagagatccaagactttgcatccaccagcctgtgggatctttcctgcctactgtgacccatggaggctgaggagggcccag

SEQ ID NO: 46841 - DNA, 120 bp, Artificial Sequence
  ENSG00000065325_24 (sequence is synthesized)
gcagttggggtcaggctcaatgactgaaagtatagggcaagaggctgtaggaagatcaagggatggacatcctttggaaacagtgtgttaatgcacaggagtgtcactttcatggtatgt

SEQ ID NO: 46842 - DNA, 120 bp, Artificial Sequence
  ENSG00000065325_25 (sequence is synthesized)
aaaatgcatgtgtacgtgggtggggtatgttgctatgggactaaataccaccttgtcttcgggggagtcagtttgatactcctcaagcagggctgccatatttagcaaacaaaaacaagg

SEQ ID NO: 46843 - DNA, 120 bp, Artificial Sequence
  ENSG00000065325_26 (sequence is synthesized)
tactcaattaaatttgaatttcagacaaatagtcttcttgtataagtatatcccatgggcatatttaatctgagattggaattcaatcatgcatcttgtcttttactggcatctctgttt

SEQ ID NO: 46844 - DNA, 120 bp, Artificial Sequence
  ENSG00000065325_27 (sequence is synthesized)
tcaaggatactttgccacagggctgggactagggtgaaataatcaaggcactcatctctaaaaagctcaaagtaaatgatcaaaataaatcatattttaatgcaatattctaaaaaaaca

SEQ ID NO: 46845 - DNA, 120 bp, Artificial Sequence
  ENSG00000065325_28 (sequence is synthesized)
aattaacaaactacagcccatgagccatttatagaaatgaaatttgattggagccaggggcaggataagggtgaggcaggagaggccagctcttgcaagtgcaggctctggtcctgactt

SEQ ID NO: 46846 - DNA, 120 bp, Artificial Sequence
  ENSG00000065325_29 (sequence is synthesized)
tcaaatgttgtctatgagggacttttaatgtgaatttttatttttagacaattgcattaaaatgttatttatattgactatggggacttttggggcccccttaaattttgcacttgaaat

SEQ ID NO: 46847 - DNA, 120 bp, Artificial Sequence
  ENSG00000065325_30 (sequence is synthesized)
gggatccccacttgtgtcaccccatagtccagccctggttttaggatggggatggaggcaaaggcatcaggcaagtaatgaagcaaaggtttattttttggtgtccagattatccatagc

SEQ ID NO: 46848 - DNA, 120 bp, Artificial Sequence
  ENSG00000065325_31 (sequence is synthesized)
tcagtcatgaaaatctatgtctttctatttttctcctttctgcaaatgtccctgcctcggctcatcagccaattagctcctagaaagctggggtcatctcgtattcccagcaagtaccca

SEQ ID NO: 46849 - DNA, 120 bp, Artificial Sequence
  ENSG00000065325_32 (sequence is synthesized)
gcacagtgccggttcagagcaggtgctccacacacattcctggaatgagacagcacagaaatggctctcgggagcctcggatgctgctgggagtaagtgatccaggaccttaccgctaag

SEQ ID NO: 46850 - DNA, 120 bp, Artificial Sequence
  ENSG00000065325_33 (sequence is synthesized)
aggagaaactttttttcaaagcatttataaatactccctccacccctcactccacaaatggggtgatcaacacttactgcttgctcttgttctgctaatgattaaaacaagtttatttaa

SEQ ID NO: 46851 - DNA, 120 bp, Artificial Sequence
  ENSG00000065325_34 (sequence is synthesized)
aaagaaaaaaagaagaaagtaccttggcccgttgcctctgagcctactgaggacaatccccggctccggctgctttcagatcattttattcagaggccttgagattgacaggacactgtg

SEQ ID NO: 46852 - DNA, 120 bp, Artificial Sequence
  ENSG00000065325_35 (sequence is synthesized)
aactctccctgtctttcttcacccaaaggcagtcccaggcttcaagcccttcccagctccctttgaagacctcatgggcccaggcatattttgtaacgggacatttgatcagtacgtgtg

SEQ ID NO: 46853 - DNA, 120 bp, Artificial Sequence
  ENSG00000065325_36 (sequence is synthesized)
acatttaaccatgaacttgtaaaacactgacatataccccagagaaaggcattagatcttcatgtctatcagtttacaagaagataatctgtcctgaacaataaggagctaaacctgctg

SEQ ID NO: 46854 - DNA, 120 bp, Artificial Sequence
  ENSG00000065325_37 (sequence is synthesized)
ccctcccaatctgcacagctctaggattctaggactctgtgcattggttctagggctccccagagagtggaatttatgtgtcccaccagacatggaagggaaaagaaaggccatgcagaa

SEQ ID NO: 46855 - DNA, 120 bp, Artificial Sequence
  ENSG00000065325_38 (sequence is synthesized)
agaagtgaaagaggcaggctaggagtcaggagcctgggctctatgactgacttgtgatgtgtccttcagccaggtgagttggcctctctgggcctctgtttcttcatctatgaaatcagt

SEQ ID NO: 46856 - DNA, 120 bp, Artificial Sequence
  ENSG00000065325_39 (sequence is synthesized)
cttgaactagaccagtggttttcaaccagaggagattctgacccctggggacatttggctgtgtctggagacatttttaattgtcataaattggggatggggataggaggagaatgttgc

SEQ ID NO: 46857 - DNA, 120 bp, Artificial Sequence
  ENSG00000065325_40 (sequence is synthesized)
tactggcatctagtgggtggaggtcagggatgctgctcaacaccctacaacacacagaaccacccccagaataaataattatcctgccccaaatattaagagtgccaacattgaaaaacc

SEQ ID NO: 46858 - DNA, 120 bp, Artificial Sequence
  ENSG00000065325_41 (sequence is synthesized)
ctggactagacagtagctgcacattaaaacaacctggggaggattaaaaaaatacccagcccagacttacccagactgatggaatcaaatctcctgccatgtagagcttccttagcactg

SEQ ID NO: 46859 - DNA, 120 bp, Artificial Sequence
  ENSG00000065325_42 (sequence is synthesized)
gaatctcattcagccactctcttgtatcttcctttagcattcattgagcaccttcactgggcttggcttggtgctaggttatttcagagtttctatcctcagggaattcagaatttaata

SEQ ID NO: 46860 - DNA, 120 bp, Artificial Sequence
  ENSG00000065325_43 (sequence is synthesized)
gttatcattctgagactcatcagactatgactgaaccaatatctgccttcatttttggtcatatgaccacatgttgcaattttccactgatctgaatagacataaccccaactctaaaag

SEQ ID NO: 46861 - DNA, 120 bp, Artificial Sequence
  ENSG00000065325_44 (sequence is synthesized)
agaattccttaaaccacaacgtggaaggaacctggattcctgaatgactgtatggagcagaactccctccactgcactagactgtgacataaccaataaaataaaataagataaaataaa

SEQ ID NO: 46862 - DNA, 120 bp, Artificial Sequence
  ENSG00000065328_0 (sequence is synthesized)
gtgaacgaagaaggcgtcccggcatcggccaagattctacattgctcatctgggcatctgagcctccttcgaagtttcctgtcacaactgtcctcttgacagcatggatgaggaggaaga

SEQ ID NO: 46863 - DNA, 120 bp, Artificial Sequence
  ENSG00000065328_1 (sequence is synthesized)
caatctgtctctgctgaccgcactgctggaagaaaatgagtcagccttggattgtaattcagaagaaaataacttcttgacgcgggaaaatggcgagcccgacgcatttgatgagctctt

SEQ ID NO: 46864 - DNA, 120 bp, Artificial Sequence
  ENSG00000065328_2 (sequence is synthesized)
tgatgccgacggcgacggtgaatcttatacagaagaggctgatgatggagaaacaggagagacaagagacgaaaaggaaaatctggccactctctttggagatatggaggacttaacaga

SEQ ID NO: 46865 - DNA, 120 bp, Artificial Sequence
  ENSG00000065328_3 (sequence is synthesized)
tgaagaagaagttcccgcatcacagtcaactgaaaatagggtcctccctgctcctgcccccaggcgagagaaaacgaatgaagagttgcaagaggaattaaggaatttgcaagagcaaat

SEQ ID NO: 46866 - DNA, 120 bp, Artificial Sequence
  ENSG00000065328_4 (sequence is synthesized)
gaaggccttacaagagcagctaaaagtaacaacaattaaacagacagcaagcccagcccgtctgcaaaaatcccctgtagagaagtctccccggccacctcttaaggagaggagagttca

SEQ ID NO: 46867 - DNA, 120 bp, Artificial Sequence
  ENSG00000065328_5 (sequence is synthesized)
gagaattcaggagtcaacatgcttttctgcggagcttgatgtccctgcgctaccaagaaccaagagggtggctcgaacaccaaaggcttcacctccagatcccaaaagctcatcttcaag

SEQ ID NO: 46868 - DNA, 120 bp, Artificial Sequence
  ENSG00000065328_6 (sequence is synthesized)
gatgacaagtgcaccctcccaacccctacagacgatttctcggaacaaacctagtgggataactagaggtcaaattgtggggaccccaggaagttctggggaaacgactcaacccatctg

SEQ ID NO: 46869 - DNA, 120 bp, Artificial Sequence
  ENSG00000065328_7 (sequence is synthesized)
tgtggaagccttctctggtctgcggctcaggcggcctcgagtatcctccacagaaatgaacaagaaaatgaccggccgaaaactgatcagactgtctcagatcaaggaaaagatggccag

SEQ ID NO: 46870 - DNA, 120 bp, Artificial Sequence
  ENSG00000065328_8 (sequence is synthesized)
agagaagctggaagaaatagattgggtgacatttggggttatattgaagaaggttacgccacagagtgtgaatagtggaaaaaccttcagcatatggaaactgaatgatcttcgtgacct

SEQ ID NO: 46871 - DNA, 120 bp, Artificial Sequence
  ENSG00000065328_9 (sequence is synthesized)
gacacaatgtgtgtccttgttcttatttggagaagttcacaaagcgctctggaagacggagcaggggactgtcgtagggatcctcaatgccaaccccatgaagcccaaggatggttcaga

SEQ ID NO: 46872 - DNA, 120 bp, Artificial Sequence
  ENSG00000065328_10 (sequence is synthesized)
ggaggtgtgtttatctatcgatcatcctcagaaggtcttaattatgggtgaagctcttgacctgggaacctgtaaagccaagaagaagaatggagagccgtgcacgcagactgtgaattt

SEQ ID NO: 46873 - DNA, 120 bp, Artificial Sequence
  ENSG00000065328_11 (sequence is synthesized)
gcgtgactgtgagtactgtcagtaccatgtccaggctcagtacaagaagctcagcgcaaagcgtgcggatctgcagtccaccttctctggaggacgaattccaaagaagtttgcccgcag

SEQ ID NO: 46874 - DNA, 120 bp, Artificial Sequence
  ENSG00000065328_12 (sequence is synthesized)
aggcaccagcctcaaagaacggctgtgccaagatggcttttactacggaggggtttcttctgcctcgtatgcagcttcaattgcagcagctgtggctcctaagaagaagattcaaaccac

SEQ ID NO: 46875 - DNA, 120 bp, Artificial Sequence
  ENSG00000065328_13 (sequence is synthesized)
atccaggaaacacggcaaaaactcggaataccccagaagagcctgtcttgctctgaggagttcaaggaactgatggacctgccgacgtgtggagccaggaacttaaaacaacatttagcc

SEQ ID NO: 46876 - DNA, 120 bp, Artificial Sequence
  ENSG00000065328_14 (sequence is synthesized)
aaagccacagcttcagggattatggggagcccaaaaccagccatcaagtccatctcggcctcagcactcttgaagcaacagaagcagcggatgttggagatgaggagaaggaaatcagaa

SEQ ID NO: 46877 - DNA, 120 bp, Artificial Sequence
  ENSG00000065328_15 (sequence is synthesized)
gaaatacagaagcgatttctgcagagctcaagtgaagttgagagcccagctgtgccatcttcatcaagacagccccctgctcagcctccacggacaggatccgagttccccaggctggag

SEQ ID NO: 46878 - DNA, 120 bp, Artificial Sequence
  ENSG00000065328_16 (sequence is synthesized)
ggagccccggccacaatgacgcccaagctggggcgaggtgtcttggaaggagatgatgttctcttttatgatgagtcaccaccaccaagaccaaaactgagtgctttagcagaagccaaa

SEQ ID NO: 46879 - DNA, 120 bp, Artificial Sequence
  ENSG00000065328_17 (sequence is synthesized)
aagttagctgctatcaccaaattaagggcaaaaggccaggttcttacaaaaacaaacccaaacagcattaagaagaaacaaaaggaccctcaggacatcctggaggtgaaggaacgtgta

SEQ ID NO: 46880 - DNA, 120 bp, Artificial Sequence
  ENSG00000065328_18 (sequence is synthesized)
gaaaaaaacaccatgttttcttctcaagctgaggatgaattggagcctgccaggaaaaaaaggagagaacaacttgcctatctggaatctgaggaatttcagaaaatcctaaaagcaaaa

SEQ ID NO: 46881 - DNA, 120 bp, Artificial Sequence
  ENSG00000065328_19 (sequence is synthesized)
tcaaaacacacaggcatcctgaaagaggccgaggctgagatgcaggagcgctactttgagccactggtgaaaaaagaacaaatggaagaaaagatgagaaacatcagagaagtgaagtgc

SEQ ID NO: 46882 - DNA, 120 bp, Artificial Sequence
  ENSG00000065328_20 (sequence is synthesized)
cgtgtcgtgacatgcaagacgtgcgcctatacccacttcaagctgctggagacctgcgtcagtgagcagcatgaataccactggcatgatggtgtgaagaggtttttcaaatgtccctgt

SEQ ID NO: 46883 - DNA, 120 bp, Artificial Sequence
  ENSG00000065328_21 (sequence is synthesized)
ggaaacagaagcatctccttggacagactcccgaacaagcactgcagtaactgtggcctctacaaatgggaacgggacggaatgctaaaggaaaagactggtccaaagataggaggagaa

SEQ ID NO: 46884 - DNA, 120 bp, Artificial Sequence
  ENSG00000065328_22 (sequence is synthesized)
actctgttaccaagaggagaagaacatgctaaatttctgaacagccttaaataacccgaacttcagacattttcccacagacttcctggcctcctgtgactctggaaagcaaaggattgg

SEQ ID NO: 46885 - DNA, 120 bp, Artificial Sequence
  ENSG00000065328_23 (sequence is synthesized)
ctgtgtattgtccattgattcctgattgacgccgtcaaaaacaaatgcttgttaagcccataagctttgcctgcttactttctgccattgggttggtttgataccacatttaacattgac

SEQ ID NO: 46886 - DNA, 120 bp, Artificial Sequence
  ENSG00000065328_24 (sequence is synthesized)
atttaagtggaaaaccaagttatcattgtcttttctaagctcagtgtggatgattgcattacttcattcactgaagtttttgcccaaaaattggaaggtaaacagagagctatgtttctg

SEQ ID NO: 46887 - DNA, 120 bp, Artificial Sequence
  ENSG00000065328_25 (sequence is synthesized)
tatcttttggttatagagtgttcacttctttatcataacaaaattctagtgtttatacgaacacccagaggcaaaagaatttggcttaattctcactccaggtaagtagcttaacttctg

SEQ ID NO: 46888 - DNA, 120 bp, Artificial Sequence
  ENSG00000065328_26 (sequence is synthesized)
cctgaaatgtattttttagcactggatttctacaaataataaaactttcccatctagataatgatgatcacatagtcttgatgtacggacattaaaagccagatttcttcattcaattct

SEQ ID NO: 46889 - DNA, 120 bp, Artificial Sequence
  ENSG00000065328_27 (sequence is synthesized)
gttatctctgttttactctttgaaattgatcaagccactgaatcactttgcatttcagtttatatatatagagagaaagaaggtgtctgctcttacattattgtggagccctgtgataga

SEQ ID NO: 46890 - DNA, 120 bp, Artificial Sequence
  ENSG00000065328_28 (sequence is synthesized)
attttttttttaatttttttattttttatgacagggtctcactatgtcaccctggctggagtgcagtagtgcgatcgcggcacactgcagccttggcttccctgggctcaagcagtcctc

SEQ ID NO: 46891 - DNA, 90 bp, Artificial Sequence
  ENSG00000065328_29 (sequence is synthesized)
cacactgcagccttggctttctcccaaatagctaggactacaggcgtgcgtgaccaagcccagctaatttttgcattttttgtagagatg

SEQ ID NO: 46892 - DNA, 120 bp, Artificial Sequence
  ENSG00000065328_30 (sequence is synthesized)
ggctggtctcaaactcctgagcactagcaatccacccacctctgtttccaaaaaaaaaaaaaaaatgaaaggtcaacccctatgcaaattaccacagcaaaggtttcattcaggagattc

SEQ ID NO: 46893 - DNA, 120 bp, Artificial Sequence
  ENSG00000065328_31 (sequence is synthesized)
ttccatctgggcaacctggttttccaaatatcatttgacctaagtgaatgttgatactagctaaagattgggtaaattggttgaattattgtattgaagcttgagctgtagctaaaagta

SEQ ID NO: 46894 - DNA, 120 bp, Artificial Sequence
  ENSG00000065328_32 (sequence is synthesized)
atttaggtttcccctaagatgttattatgttagggacataacacttttgggaggttgttgtgggagatggttgatttaggttttcaaaagctagaaataaaatttacatgccttagattt

SEQ ID NO: 46895 - DNA, 120 bp, Artificial Sequence
  ENSG00000065328_33 (sequence is synthesized)
cataaaattctgctctaattgggtggaaggtgctgtatctaacttgtgttcctcctaaggttatgtcctaataactattcttttaggagtatacttctactttatagaaggttgcttttc

SEQ ID NO: 46896 - DNA, 120 bp, Artificial Sequence
  ENSG00000065328_34 (sequence is synthesized)
tttttaattttttctaacaaagaaaagaataaagtatttattaataagaaccagaaagcacttgaaactgatgtttttaatggctcatttagggtagatttatttatctcattaacttaa

SEQ ID NO: 46897 - DNA, 120 bp, Artificial Sequence
  ENSG00000065328_35 (sequence is synthesized)
aacagctatgtgtatgaaataggtcacaacagaacttgaacaccaggttggtgtctgagcaatccctttcttatgggaaaaacaatgttcttgtttgaacagagggtatcattgcagtca

SEQ ID NO: 46898 - DNA, 120 bp, Artificial Sequence
  ENSG00000065328_36 (sequence is synthesized)
gtattcacgtgtatattgttatataagttgtataatatgcttgtaaaggctgagggtgagctgtatctggatgcctttttacaatttgattttaacttttaaaataaatttaaaacataa

SEQ ID NO: 46899 - DNA, 120 bp, Artificial Sequence
  ENSG00000065328_37 (sequence is synthesized)
cgtgatgtgtcagttaattaggctggaaagcaaagggcgcaggtggcccaggacccggcttcctgcctgacctggctgctgtgctctgctgatggagtgtttgtcgaggggattcttctc

SEQ ID NO: 46900 - DNA, 120 bp, Artificial Sequence
  ENSG00000065328_38 (sequence is synthesized)
tcatttgaccacagcccccagtttggatgggtcctaacatctcttgccctggaccactgggtccgcgtggctctgactgctctttctcaggttttggcgtatcctcgctcagcgttctca

SEQ ID NO: 46901 - DNA, 120 bp, Artificial Sequence
  ENSG00000065328_39 (sequence is synthesized)
cctaatagctctttattgatcgtgatcattagagtcagtgtaatttgaaaacatggtagtgtcaacataatactaaaagaaagttagatctgttatctcaacactttttcttgtcaggct

SEQ ID NO: 46902 - DNA, 120 bp, Artificial Sequence
  ENSG00000065328_40 (sequence is synthesized)
acaagaggtagcctagaggaagatagtgttttataaccagaggcattgacagtaggaaaacaatgcttggaattgttgaggtgagactgtaaaatggtggtttaaggaatccttttttta

SEQ ID NO: 46903 - DNA, 120 bp, Artificial Sequence
  ENSG00000065328_41 (sequence is synthesized)
tcatctctttttccagagtctgtgattctgttcccttggaacgttggatgatcattccatgccttcctatagctccaggctacccttgggactcaagctgttaactgaaatccctggaag

SEQ ID NO: 46904 - DNA, 120 bp, Artificial Sequence
  ENSG00000065357_0 (sequence is synthesized)
agttcctgccagtgagtccctaggcctccatctctctcccttgctgtaccaccttcaccaccatccatgcgaccccaagagccttaatgactctagaagagactccaggcaggggaagct

SEQ ID NO: 46905 - DNA, 120 bp, Artificial Sequence
  ENSG00000065357_1 (sequence is synthesized)
gaaaggacctttcactccctacttttggccagggccttctgtgccacctgccaagaccagcaggcctaccctctgaagaggtccaagcaacggaagtactactacgaagctgcctttctg

SEQ ID NO: 46906 - DNA, 120 bp, Artificial Sequence
  ENSG00000065357_2 (sequence is synthesized)
gccatccttgagaaaaatagacagatggccaaggagaggggcctaataagccccagtgattttgcccagctgcaaaaatacatggaatactccaccaaaaaggtcagtgatgtcctaaag

SEQ ID NO: 46907 - DNA, 120 bp, Artificial Sequence
  ENSG00000065357_3 (sequence is synthesized)
ctcttcgaggatggcgagatggctaaatatgtccaaggagatgccattgggtacgagggattccagcaattcctgaaaatctatctcgaagtggataatgttcccagacacctaagcctg

SEQ ID NO: 46908 - DNA, 120 bp, Artificial Sequence
  ENSG00000065357_4 (sequence is synthesized)
gcactgtttcaatcctttgagactggtcactgcttaaatgagacaaatgtgacaaaagatgtggtgtgtctcaatgatgtttcctgctacttttcccttctggagggtggtcggccagaa

SEQ ID NO: 46909 - DNA, 120 bp, Artificial Sequence
  ENSG00000065357_5 (sequence is synthesized)
gacaagttagaattcaccttcaagctgtacgacacggacagaaatgggatcctggacagctcagaagtggacaaaattatcctacagatgatgcgagtggctgaatacctggattgggat

SEQ ID NO: 46910 - DNA, 120 bp, Artificial Sequence
  ENSG00000065357_6 (sequence is synthesized)
gtgtctgagctgaggccgattcttcaggagatgatgaaagagattgactatgatggcagtggctctgtctctcaagctgagtgggtccgggctggggccaccaccgtgccactgctagtg

SEQ ID NO: 46911 - DNA, 120 bp, Artificial Sequence
  ENSG00000065357_7 (sequence is synthesized)
ctgctgggtctggagatgactctgaaggacgacggacagcacatgtggaggcccaagaggttccccagaccagtctactgcaatctgtgcgagtcaagcattggtcttggcaaacaggga

SEQ ID NO: 46912 - DNA, 120 bp, Artificial Sequence
  ENSG00000065357_8 (sequence is synthesized)
ctgagctgtaacctctgtaagtacactgttcacgaccagtgtgccatgaaagccctgccttgtgaagtcagcacctatgccaagtctcggaaggacattggtgtccaatcacatgtgtgg

SEQ ID NO: 46913 - DNA, 120 bp, Artificial Sequence
  ENSG00000065357_9 (sequence is synthesized)
gtgcgaggaggctgtgagtccgggcgctgcgaccgctgtcagaaaaagatccggatctaccacagtctgaccgggctgcattgtgtatggtgccacctagagatccacgatgactgcctg

SEQ ID NO: 46914 - DNA, 120 bp, Artificial Sequence
  ENSG00000065357_10 (sequence is synthesized)
caagcggtgggccatgagtgtgactgtgggctgctccgggatcacatcctgcctccatcttccatctatcccagtgtcctggcctctggaccggatcgtaaaaatagcaaaacaagccag

SEQ ID NO: 46915 - DNA, 120 bp, Artificial Sequence
  ENSG00000065357_11 (sequence is synthesized)
aatcctaagagtggcgggaagcaggggcaaagggtgctctggaagttccagtatatattaaaccctcgacaggtgttcaacctcctaaaggatggtcctgagatagggctccgattattc

SEQ ID NO: 46916 - DNA, 120 bp, Artificial Sequence
  ENSG00000065357_12 (sequence is synthesized)
aaggatgttcctgatagccggattttggtgtgtggtggagacggcacagtaggctggattctagagaccattgacaaagctaacttgccagttttgcctcctgttgctgtgttgcccctg

SEQ ID NO: 46917 - DNA, 120 bp, Artificial Sequence
  ENSG00000065357_13 (sequence is synthesized)
ggtactggaaatgatctggctcgatgcctaagatggggaggaggttatgaaggacagaatctggcaaagatcctcaaggatttagagatgagtaaagtggtacatatggatcgatggtct

SEQ ID NO: 46918 - DNA, 120 bp, Artificial Sequence
  ENSG00000065357_14 (sequence is synthesized)
gtggaggtgatacctcaacaaactgaagaaaaaagtgacccagtcccctttcaaatcatcaataactacttctctattggcgtggatgcctctattgctcatcgattccacatcatgcga

SEQ ID NO: 46919 - DNA, 120 bp, Artificial Sequence
  ENSG00000065357_15 (sequence is synthesized)
gagaaatatccggagaagttcaacagcagaatgaagaacaagctatggtacttcgaatttgccacatctgaatccatcttctcaacatgcaaaaagctggaggagtctttgacagttgag

SEQ ID NO: 46920 - DNA, 120 bp, Artificial Sequence
  ENSG00000065357_16 (sequence is synthesized)
atctgtgggaaaccgctggatctgagcaacctgtccctagaaggcatcgcagtgctaaacatccctagcatgcatggtggctccaacctctggggtgataccaggagaccccatggggat

SEQ ID NO: 46921 - DNA, 120 bp, Artificial Sequence
  ENSG00000065357_17 (sequence is synthesized)
atctatgggatcaaccaggccttaggtgctacagctaaagtcatcaccgaccctgatatcctgaaaacctgtgtaccagacctaagtgacaagagactggaagtggttgggctggagggt

SEQ ID NO: 46922 - DNA, 120 bp, Artificial Sequence
  ENSG00000065357_18 (sequence is synthesized)
gcaattgagatgggccaaatctataccaagctcaagaatgctggacgtcggctggccaagtgctctgagatcaccttccacaccacaaaaacccttcccatgcaaattgacggagaaccc

SEQ ID NO: 46923 - DNA, 120 bp, Artificial Sequence
  ENSG00000065357_19 (sequence is synthesized)
tggatgcagacgccctgtacaatcaagatcacccacaagaaccagatgcccatgctcatgggcccacccccccgctccaccaatttctttggcttcttgagctaagggggacacccttgg

SEQ ID NO: 46924 - DNA, 120 bp, Artificial Sequence
  ENSG00000065357_20 (sequence is synthesized)
cctccaagccagccttgaacccacctccctgtccctggactctactcccgaggctctgtacattgctgccacatactcctgccagcttgggggagtgttccttcaccctcacagtattta

SEQ ID NO: 46925 - DNA, 120 bp, Artificial Sequence
  ENSG00000065357_21 (sequence is synthesized)
ttatcctgcaccacctcactgttccccatgcgcacacacatacacacaccccaaaacacatacattgaaagtgcctcatctgaataaaatgacttgtgtttcccctttgggatctgctaa

SEQ ID NO: 46926 - DNA, 120 bp, Artificial Sequence
  ENSG00000065357_22 (sequence is synthesized)
gcggccgcgtctgcctggcccgtcccctccagcccagctcgggctccagctccagcgccggcgcttcagctgcgaccgcgagccctctcaagcaaggtagagaccccgcgagccccccag

SEQ ID NO: 46927 - DNA, 120 bp, Artificial Sequence
  ENSG00000065357_23 (sequence is synthesized)
cgccccaccctcccccatcggaaaaggacaggggtagggaagccgaggacccacgggctgcgttcgtgctgctgggtcgggaaggaggaagcgtgacagctggagcgggcctaccctctg

SEQ ID NO: 46928 - DNA, 120 bp, Artificial Sequence
  ENSG00000065357_24 (sequence is synthesized)
agtaaggaaaaggcgtgggttttggaggtgggcacttcaccccgaacttttattctgctacaccctcaagcaagggatcacatatctgatcctgcctcaccctcaggtaagaaggaaata

SEQ ID NO: 46929 - DNA, 120 bp, Artificial Sequence
  ENSG00000065357_25 (sequence is synthesized)
ggcaaatattactgggcatctcttcagcctcagcacagacaagcccacatcccccaaccatgccagtatcgtaacttcctcctatactacgcaatgacaccctctacacacacacacaca

SEQ ID NO: 46930 - DNA, 120 bp, Artificial Sequence
  ENSG00000065357_26 (sequence is synthesized)
agtcttcagtgtttgtggaggcttaataagttttgaggcttcaagcaaatgattccctcttgagggctacctactagcagcaacggtcagggagaggaggaggatacagtctatgatgtg

SEQ ID NO: 46931 - DNA, 120 bp, Artificial Sequence
  ENSG00000065357_27 (sequence is synthesized)
attaaggaattcagaagtccagatataacttccccaagtcacacagtggtatcagagctaagaatgggacccagatatgactgatctagttctgttccaaaaccgtgctgtattatatta

SEQ ID NO: 46932 - DNA, 120 bp, Artificial Sequence
  ENSG00000065357_28 (sequence is synthesized)
acagctcagaagtggacaaaattatcctacagatgatgcgagtggctgaatacctggattgggatgtgtctgagctgaggccggtaaggcagctcttccttcatgtcccttcttgtacct

SEQ ID NO: 46933 - DNA, 120 bp, Artificial Sequence
  ENSG00000065357_29 (sequence is synthesized)
tcttccctggtgagtcctgcatctgccttacttcatctctgacaggcaacctggttcccttggctaggatggctgggctggatatcctaagaggcagtggagaggtgttgggtctgaaga

SEQ ID NO: 46934 - DNA, 120 bp, Artificial Sequence
  ENSG00000065357_30 (sequence is synthesized)
ctcctcctcattacaccccctgccccccagcttcctcagtggctttgagcagtgtgctgctcagatgtgcccatgactggaaatgggaggagtgggagatggggagatgtcagaaaaaga

SEQ ID NO: 46935 - DNA, 120 bp, Artificial Sequence
  ENSG00000065357_31 (sequence is synthesized)
tccggatctaccacagtctaactgggctgcattgtgcaaggtctcggctctctacccaccttcgctatacctggactgcttgctccagctctcagagaagaggagtaaagagtggtactg

SEQ ID NO: 46936 - DNA, 120 bp, Artificial Sequence
  ENSG00000065357_32 (sequence is synthesized)
gtcagaagcgctagaggtcgttgcgtggcgtgggtggctcggggagtgggtggctgagcggagctggggtccctggccagaggcggaacaaaatggggtcatggccaggaagacgcgcta

SEQ ID NO: 46937 - DNA, 120 bp, Artificial Sequence
  ENSG00000065357_33 (sequence is synthesized)
tagaaaagacctaggtttgaatcctgggctctgccactgactagttatgtgaccttgggaaagccacatcacttctttaagccttagtttcctcaactgaaaatgaggtaattgtgagca

SEQ ID NO: 46938 - DNA, 120 bp, Artificial Sequence
  ENSG00000065357_34 (sequence is synthesized)
ttaaaaaagttggtgcaagaaaagtgcttcagatggtgcatgcacatactataaaatgcaataaaaaatatctattatgattactgttgctgttagacctgggcctcccaagcattatcc

SEQ ID NO: 46939 - DNA, 120 bp, Artificial Sequence
  ENSG00000065357_35 (sequence is synthesized)
agacggcacagtaggctggattctagagaccattggtcagtgcagggaggggcgtggggaaggtattggggtcgtagtcttgcagagctaactcactccatccttctcttcacctgcctc

SEQ ID NO: 46940 - DNA, 120 bp, Artificial Sequence
  ENSG00000065357_36 (sequence is synthesized)
gtaggctgagaggagttgtgtaggaagggaaaggcacttagagaagaaactaggcatctggtatggaaaggattggggaagaagaggggcacagacaggtggatacaaaagtggaatgtc

SEQ ID NO: 46941 - DNA, 120 bp, Artificial Sequence
  ENSG00000065357_37 (sequence is synthesized)
caaaaagaagagagctttggaagaagcagggaccacaatctgaacctagaagggtcaagggtgatagtcccctttcctgtaaatatttttatgtttctcccaaccaactcttatggctca

SEQ ID NO: 46942 - DNA, 120 bp, Artificial Sequence
  ENSG00000065357_38 (sequence is synthesized)
gagaatcaaggaatatgggggtggggaacaatgtgtgaataaggaaggttgtataagagctaagccagatgctgaatgatggagctagcaggtcatgactcattcactcattcaaacaat

SEQ ID NO: 46943 - DNA, 120 bp, Artificial Sequence
  ENSG00000065357_39 (sequence is synthesized)
agaagcagagctgccgccggcgcgggaagaagatgaggagcgcagcaaatggagaaaatgtgtccaaagccccggacatattcgagggagggtggagcaggttatggtgaactggaaacc

SEQ ID NO: 46944 - DNA, 120 bp, Artificial Sequence
  ENSG00000065357_40 (sequence is synthesized)
tagaaacgggcctctccaacttcgaagttcccagagtcgggggcgccgggcgcgggcgcggcgggcaggctggggtggggggcgggcagctatgtcgtcaggaacggggcggccccgctg

SEQ ID NO: 46945 - DNA, 120 bp, Artificial Sequence
  ENSG00000065357_41 (sequence is synthesized)
cagatgaatcaagataggttgggggagagggagaaggatccagaaatggagagacagagatgagtcagagaaacagagacagaggacagacactgtcagggaaggtagaggcatagggaa

SEQ ID NO: 46946 - DNA, 120 bp, Artificial Sequence
  ENSG00000065357_42 (sequence is synthesized)
gagggacacagggaaaggaagatgtttagggagggactaggagagaaggaaagaacaaaaaataatagtgggagtagagacagaatggaacagacagaagaaaagacacccagacagctg

SEQ ID NO: 46947 - DNA, 120 bp, Artificial Sequence
  ENSG00000065357_43 (sequence is synthesized)
ggaggatctgaaatatttttccctctgtatttctgtgtttcttcttggaatttcttcatctcatttgaatcttttttcctgctggatttctctggcaagagaactcagctggactaataa

SEQ ID NO: 46948 - DNA, 120 bp, Artificial Sequence
  ENSG00000065357_44 (sequence is synthesized)
gagaggtgtttcccatcctcctttcccttattccttcaggattcctaaaggctgacaggtctagacaaaggtggggccagagaatgagcccatttcctgtgttctcccagactatttata

SEQ ID NO: 46949 - DNA, 120 bp, Artificial Sequence
  ENSG00000065357_45 (sequence is synthesized)
cctaatacccttcaccatagtcaccccagtacccatgtcttgtgcattcccatgtaggcggcctaggatgtccttgggatatggattatgtattgtctcccctgacacattcactgaggg

SEQ ID NO: 46950 - DNA, 120 bp, Artificial Sequence
  ENSG00000065357_46 (sequence is synthesized)
tagagtccatgcctgttttcctttcctttttgtctctctctcagtcccatcccaggctctaggcttctcacccaaaagctctctccctgtctctttgtttcccccatattctggtatgaa

SEQ ID NO: 46951 - DNA, 120 bp, Artificial Sequence
  ENSG00000065357_47 (sequence is synthesized)
ttctttgggtatctctcacaaactgaccctggcccccctaaaacaccccacagtcaccttcaagctgtacgacacggacagaaatgggatcctggacagctcagtgagttggggaccctg

SEQ ID NO: 46952 - DNA, 120 bp, Artificial Sequence
  ENSG00000065357_48 (sequence is synthesized)
tatgctgggcaagggaatatgtgttaatttgtctgcaccctcctgccccaactcttccagggtcttaagaaacagaagaggatggggggagaggttgagtcctctaggactaaatttgaa

SEQ ID NO: 46953 - DNA, 120 bp, Artificial Sequence
  ENSG00000065357_49 (sequence is synthesized)
agtaagtcccaagctcttgacccctcaaagagaatgctggatacatgaattgggtctgccttacaaacatacaaacacatttatttacttggcagacatacctgagaatgagaggtgtga

SEQ ID NO: 46954 - DNA, 120 bp, Artificial Sequence
  ENSG00000065357_50 (sequence is synthesized)
tacagggctgagagtcttgggcttcatgatgggggcaggtttttcactggagccctcatgggtgggaatgaagtgggagagcctggtggggagcggttgatgctcactctccagaaactc

SEQ ID NO: 46955 - DNA, 120 bp, Artificial Sequence
  ENSG00000065357_51 (sequence is synthesized)
caccatggtaggggagggaaggggagggaaacaggagggaggggggaaatatcttggtggaatgctagccctctgcccctgtctcctgggcccaccttaactctgacaaaatcctgcttt

SEQ ID NO: 46956 - DNA, 120 bp, Artificial Sequence
  ENSG00000065357_52 (sequence is synthesized)
ggaggttaagtgacctgtgacacagggaaattgggagtgcagtacagtgctgagttgcaagggaagatcttgggacatgctgtggggagcagcatggggacttgggaaagaggggagacc

SEQ ID NO: 46957 - DNA, 120 bp, Artificial Sequence
  ENSG00000065357_53 (sequence is synthesized)
gggaaaggagggggcagtgtgggcatacacagtgtcaggagccaggttttgaccaagtttgactcagattgctcagaagaacagtggcacctctaggaggtccccccaaccaaagccacc

SEQ ID NO: 46958 - DNA, 120 bp, Artificial Sequence
  ENSG00000065357_54 (sequence is synthesized)
cttgttccccatgggactaaagttaggaggttgatgcccttccctgtcacgtaccacccctgccagcactgtgtaacctgtccctccctactgggccttgtgttggggctgacacagaat

SEQ ID NO: 46959 - DNA, 120 bp, Artificial Sequence
  ENSG00000065357_55 (sequence is synthesized)
cgatcccagccaaaaattaaacccttgggctccatggatcctaaatccccattccacagcttctttacacccttctgatgcctgaacttcccctgcacatcattcatcctaaaccctgat

SEQ ID NO: 46960 - DNA, 120 bp, Artificial Sequence
  ENSG00000065357_56 (sequence is synthesized)
ttctcagcccctggtttccctatcgtggcctctctaggaacctagcaacccaccccaaaccccacagatttccctctaaatctctgaagccacagccccaaagtatcaggtcctgcctct

SEQ ID NO: 46961 - DNA, 120 bp, Artificial Sequence
  ENSG00000065357_57 (sequence is synthesized)
catgcctccacccccaacatcacctacatcctggccctggccctggcccttggcccattgctgccctcagcccctccctcccctaggtcctgctcagaccctgccagacaaggaactgcc

SEQ ID NO: 46962 - DNA, 120 bp, Artificial Sequence
  ENSG00000065357_58 (sequence is synthesized)
tggggcagcagaagggtcatgggaatggtggggaggggctttactagatctccctcaatgacaaaaggtctcaaagccaacctaagaagcagagttttggtattcgattggtaaggaaat

SEQ ID NO: 46963 - DNA, 120 bp, Artificial Sequence
  ENSG00000065357_59 (sequence is synthesized)
ttttaccttcctgcttatatccccactttggcttagtttaatgtccagcagtacccctggaaccagggaggaggcaggaggcctaccctctgaagaggtccaagcaacggaagtactact

SEQ ID NO: 46964 - DNA, 120 bp, Artificial Sequence
  ENSG00000065357_60 (sequence is synthesized)
cgtcttaccccgcagagctgccttctccacgggcctccggccacacctcctttacaggcacagttgcccctgctcccaagggctctttccagcccagactgccaggttgagaggagacag

SEQ ID NO: 46965 - DNA, 120 bp, Artificial Sequence
  ENSG00000065357_61 (sequence is synthesized)
agctcgggctccagctccagcgccggcgcttcagctgcgaccgcgagccctctcaagcaagatataacttccccaagtcacacagtggtatcagagctaagaatgggacccagatatgac

SEQ ID NO: 46966 - DNA, 120 bp, Artificial Sequence
  ENSG00000065357_62 (sequence is synthesized)
cccctccagcccagctcgggctccagctccagcgccggcgcttcagctgcgaccgcgagccctctcaagcaaggcctaccctctgaagaggtccaagcaacggaagtactactacgaagc

SEQ ID NO: 46967 - DNA, 120 bp, Artificial Sequence
  ENSG00000065357_63 (sequence is synthesized)
attactgagcgcttgctgcctgtaaaacagtcctcagggagccaagagaagttccgaggcacagtccctctcatccccaggaactcctcgtacgtccaggacctgcgagggaaaagggcg

SEQ ID NO: 46968 - DNA, 120 bp, Artificial Sequence
  ENSG00000065357_64 (sequence is synthesized)
caaggcccacctgcacccaaaaagggggccttataaatgaagaaaggaagaatatccaggctctggcctgcacccagatctcagagcggcttggtgacgtggagcagacaaactccagga

SEQ ID NO: 46969 - DNA, 120 bp, Artificial Sequence
  ENSG00000065357_65 (sequence is synthesized)
agagctaagaatgggacccagatatgactgatctagttctgttccaaaaccgtgctgtattatattaacgtaagatatgttattatcattactgaatcaaggaaagtcgcccactgcacc

SEQ ID NO: 46970 - DNA, 120 bp, Artificial Sequence
  ENSG00000065357_66 (sequence is synthesized)
ttggtccctggatccagtagccaaaacctggggctccctaagcactgctgacctagcggagtggaaggaagttcccaggagccgagacactagcactcggctccatcgtcccaggactgg

SEQ ID NO: 46971 - DNA, 120 bp, Artificial Sequence
  ENSG00000065357_67 (sequence is synthesized)
gaaacactagatctgttggcagcagaagttggattatagtcattgaaaagtgccagatgggtagagtcctttctctaggatgtcagtatcccagaaccctcttctgaggaagagactctg

SEQ ID NO: 46972 - DNA, 120 bp, Artificial Sequence
  ENSG00000065357_68 (sequence is synthesized)
tgggtacccagagtctcttcccctgcctcttccctaccccgcgcctagttccccacccttccctagtggagctccgcggaacgcagtccaggcggggccggggctagggaccttgccaga

SEQ ID NO: 46973 - DNA, 120 bp, Artificial Sequence
  ENSG00000065357_69 (sequence is synthesized)
tattcttgaacctatgcttctttaacctcccagctctcctaccccaattctccaagtcctcaagatacactagtccctatttccattccttgcacacctccaaatcctgccttctccagt

SEQ ID NO: 46974 - DNA, 120 bp, Artificial Sequence
  ENSG00000065357_70 (sequence is synthesized)
gaattcagaagtccaggtcttcaagtccccaggatcccacagtttgctgcccttcagctccagggatagctaaactttcagtcagagaagtcaagaaaaccactgaaaagatcccaggag

SEQ ID NO: 46975 - DNA, 120 bp, Artificial Sequence
  ENSG00000065357_71 (sequence is synthesized)
cgcacagagtggcatttagaatagagagctcatacttttaggattcaagtcagacccctctatttagggattcatgcacaatacagcttttcttccctctactttcttcccctcccaggc

SEQ ID NO: 46976 - DNA, 120 bp, Artificial Sequence
  ENSG00000065361_0 (sequence is synthesized)
attacccttccctggatctgggggctttcggaatctcgacctccccttggcctatctcctgcagaaaaattagggtgagccccatcctcgatctgctccgccaagttgcgggaccgcggg

SEQ ID NO: 46977 - DNA, 120 bp, Artificial Sequence
  ENSG00000065361_1 (sequence is synthesized)
gcgtggcacgctcggggcaggcggtccgaggctccgcaatccctactccagcctcgcgcgggagggggcgcggccgtgactcacccccttccctctgcgttcctccctccctctctctct

SEQ ID NO: 46978 - DNA, 120 bp, Artificial Sequence
  ENSG00000065361_2 (sequence is synthesized)
ctctctcacacacacacacccctcccctgccatccctccccggactccggctccggctccgattgcaatttgcaacctccgctgccgtcgccgcagcagccaccaattcgccagcggttc

SEQ ID NO: 46979 - DNA, 120 bp, Artificial Sequence
  ENSG00000065361_3 (sequence is synthesized)
aggtggctcttgcctcgatgtcctagcctaggggcccccgggccggacttggctgggctcccttcaccctctgcggagtcatgagggcgaacgacgctctgcaggtgctgggcttgcttt

SEQ ID NO: 46980 - DNA, 120 bp, Artificial Sequence
  ENSG00000065361_4 (sequence is synthesized)
tcagcctggcccggggctccgaggtgggcaactctcaggcagtgtgtcctgggactctgaatggcctgagtgtgaccggcgatgctgagaaccaataccagacactgtacaagctctacg

SEQ ID NO: 46981 - DNA, 120 bp, Artificial Sequence
  ENSG00000065361_5 (sequence is synthesized)
agaggtgtgaggtggtgatggggaaccttgagattgtgctcacgggacacaatgccgacctctccttcctgcagtggattcgagaagtgacaggctatgtcctcgtggccatgaatgaat

SEQ ID NO: 46982 - DNA, 120 bp, Artificial Sequence
  ENSG00000065361_6 (sequence is synthesized)
tctctactctaccattgcccaacctccgcgtggtgcgagggacccaggtctacgatgggaagtttgccatcttcgtcatgttgaactataacaccaactccagccacgctctgcgccagc

SEQ ID NO: 46983 - DNA, 120 bp, Artificial Sequence
  ENSG00000065361_7 (sequence is synthesized)
tccgcttgactcagctcaccgagattctgtcagggggtgtttatattgagaagaacgataagctttgtcacatggacacaattgactggagggacatcgtgagggaccgagatgctgaga

SEQ ID NO: 46984 - DNA, 120 bp, Artificial Sequence
  ENSG00000065361_8 (sequence is synthesized)
tagtggtgaaggacaatggcagaagctgtcccccctgtcatgaggtttgcaaggggcgatgctggggtcctggatcagaagactgccagacattgaccaagaccatctgtgctcctcagt

SEQ ID NO: 46985 - DNA, 120 bp, Artificial Sequence
  ENSG00000065361_9 (sequence is synthesized)
gtaatggtcactgctttgggcccaaccccaaccagtgctgccatgatgagtgtgccgggggctgctcaggccctcaggacacagactgctttgcctgccggcacttcaatgacagtggag

SEQ ID NO: 46986 - DNA, 120 bp, Artificial Sequence
  ENSG00000065361_10 (sequence is synthesized)
cctgtgtacctcgctgtccacagcctcttgtctacaacaagctaactttccagctggaacccaatccccacaccaagtatcagtatggaggagtttgtgtagccagctgtccccataact

SEQ ID NO: 46987 - DNA, 120 bp, Artificial Sequence
  ENSG00000065361_11 (sequence is synthesized)
ttgtggtggatcaaacatcctgtgtcagggcctgtcctcctgacaagatggaagtagataaaaatgggctcaagatgtgtgagccttgtgggggactatgtcccaaagcctgtgagggaa

SEQ ID NO: 46988 - DNA, 120 bp, Artificial Sequence
  ENSG00000065361_12 (sequence is synthesized)
caggctctgggagccgcttccagactgtggactcgagcaacattgatggatttgtgaactgcaccaagatcctgggcaacctggactttctgatcaccggcctcaatggagacccctggc

SEQ ID NO: 46989 - DNA, 120 bp, Artificial Sequence
  ENSG00000065361_13 (sequence is synthesized)
acaagatccctgccctggacccagagaagctcaatgtcttccggacagtacgggagatcacaggttacctgaacatccagtcctggccgccccacatgcacaacttcagtgttttttcca

SEQ ID NO: 46990 - DNA, 120 bp, Artificial Sequence
  ENSG00000065361_14 (sequence is synthesized)
atttgacaaccattggaggcagaagcctctacaaccggggcttctcattgttgatcatgaagaacttgaatgtcacatctctgggcttccgatccctgaaggaaattagtgctgggcgta

SEQ ID NO: 46991 - DNA, 120 bp, Artificial Sequence
  ENSG00000065361_15 (sequence is synthesized)
tctatataagtgccaataggcagctctgctaccaccactctttgaactggaccaaggtgcttcgggggcctacggaagagcgactagacatcaagcataatcggccgcgcagagactgcg

SEQ ID NO: 46992 - DNA, 120 bp, Artificial Sequence
  ENSG00000065361_16 (sequence is synthesized)
tggcagagggcaaagtgtgtgacccactgtgctcctctgggggatgctggggcccaggccctggtcagtgcttgtcctgtcgaaattatagccgaggaggtgtctgtgtgacccactgca

SEQ ID NO: 46993 - DNA, 120 bp, Artificial Sequence
  ENSG00000065361_17 (sequence is synthesized)
actttctgaatggggagcctcgagaatttgcccatgaggccgaatgcttctcctgccacccggaatgccaacccatggagggcactgccacatgcaatggctcgggctctgatacttgtg

SEQ ID NO: 46994 - DNA, 120 bp, Artificial Sequence
  ENSG00000065361_18 (sequence is synthesized)
ctcaatgtgcccattttcgagatgggccccactgtgtgagcagctgcccccatggagtcctaggtgccaagggcccaatctacaagtacccagatgttcagaatgaatgtcggccctgcc

SEQ ID NO: 46995 - DNA, 120 bp, Artificial Sequence
  ENSG00000065361_19 (sequence is synthesized)
atgagaactgcacccaggggtgtaaaggaccagagcttcaagactgtttaggacaaacactggtgctgatcggcaaaacccatctgacaatggctttgacagtgatagcaggattggtag

SEQ ID NO: 46996 - DNA, 120 bp, Artificial Sequence
  ENSG00000065361_20 (sequence is synthesized)
tgattttcatgatgctgggcggcacttttctctactggcgtgggcgccggattcagaataaaagggctatgaggcgatacttggaacggggtgagagcatagagcctctggaccccagtg

SEQ ID NO: 46997 - DNA, 120 bp, Artificial Sequence
  ENSG00000065361_21 (sequence is synthesized)
agaaggctaacaaagtcttggccagaatcttcaaagagacagagctaaggaagcttaaagtgcttggctcgggtgtctttggaactgtgcacaaaggagtgtggatccctgagggtgaat

SEQ ID NO: 46998 - DNA, 120 bp, Artificial Sequence
  ENSG00000065361_22 (sequence is synthesized)
caatcaagattccagtctgcattaaagtcattgaggacaagagtggacggcagagttttcaagctgtgacagatcatatgctggccattggcagcctggaccatgcccacattgtaaggc

SEQ ID NO: 46999 - DNA, 120 bp, Artificial Sequence
  ENSG00000065361_23 (sequence is synthesized)
tgctgggactatgcccagggtcatctctgcagcttgtcactcaatatttgcctctgggttctctgctggatcatgtgagacaacaccggggggcactggggccacagctgctgctcaact

SEQ ID NO: 47000 - DNA, 120 bp, Artificial Sequence
  ENSG00000065361_24 (sequence is synthesized)
aacatggtatggtgcatagaaacctggctgcccgaaacgtgctactcaagtcacccagtcaggttcaggtggcagattttggtgtggctgacctgctgcctcctgatgataagcagctgc

SEQ ID NO: 47001 - DNA, 120 bp, Artificial Sequence
  ENSG00000065361_25 (sequence is synthesized)
tatacagtgaggccaagactccaattaagtggatggcccttgagagtatccactttgggaaatacacacaccagagtgatgtctggagctatggtgtgacagtttgggagttgatgacct

SEQ ID NO: 47002 - DNA, 120 bp, Artificial Sequence
  ENSG00000065361_26 (sequence is synthesized)
tcggggcagagccctatgcagggctacgattggctgaagtaccagacctgctagagaagggggagcggttggcacagccccagatctgcacaattgatgtctacatggtgatggtcaagt

SEQ ID NO: 47003 - DNA, 120 bp, Artificial Sequence
  ENSG00000065361_27 (sequence is synthesized)
gttggatgattgatgagaacattcgcccaacctttaaagaactagccaatgagttcaccaggatggcccgagacccaccacggtatctggtcataaagagagagagtgggcctggaatag

SEQ ID NO: 47004 - DNA, 120 bp, Artificial Sequence
  ENSG00000065361_28 (sequence is synthesized)
cccctgggccagagccccatggtctgacaaacaagaagctagaggaagtagagctggagccagaactagacctagacctagacttggaagcagaggaggacaacctggcaaccaccacac

SEQ ID NO: 47005 - DNA, 120 bp, Artificial Sequence
  ENSG00000065361_29 (sequence is synthesized)
tgggctccgccctcagcctaccagttggaacacttaatcggccacgtgggagccagagccttttaagtccatcatctggatacatgcccatgaaccagggtaatcttggggagtcttgcc

SEQ ID NO: 47006 - DNA, 120 bp, Artificial Sequence
  ENSG00000065361_30 (sequence is synthesized)
aggagtctgcagtttctgggagcagtgaacggtgcccccgtccagtctctctacacccaatgccacggggatgcctggcatcagagtcatcagaggggcatgtaacaggctctgaggctg

SEQ ID NO: 47007 - DNA, 120 bp, Artificial Sequence
  ENSG00000065361_31 (sequence is synthesized)
agctccaggagaaagtgtcaatgtgtaggagccggagcaggagccggagcccacggccacgcggagatagcgcctaccattcccagcgccacagtctgctgactcctgttaccccactct

SEQ ID NO: 47008 - DNA, 120 bp, Artificial Sequence
  ENSG00000065361_32 (sequence is synthesized)
ccccacccgggttagaggaagaggatgtcaacggttatgtcatgccagatacacacctcaaaggtactccctcctcccgggaaggcaccctttcttcagtgggtctcagttctgtcctgg

SEQ ID NO: 47009 - DNA, 120 bp, Artificial Sequence
  ENSG00000065361_33 (sequence is synthesized)
gtactgaagaagaagatgaagatgaggagtatgaatacatgaaccggaggagaaggcacagtccacctcatccccctaggccaagttcccttgaggagctgggttatgagtacatggatg

SEQ ID NO: 47010 - DNA, 120 bp, Artificial Sequence
  ENSG00000065361_34 (sequence is synthesized)
tggggtcagacctcagtgcctctctgggcagcacacagagttgcccactccaccctgtacccatcatgcccactgcaggcacaactccagatgaagactatgaatatatgaatcggcaac

SEQ ID NO: 47011 - DNA, 120 bp, Artificial Sequence
  ENSG00000065361_35 (sequence is synthesized)
gagatggaggtggtcctgggggtgattatgcagccatgggggcctgcccagcatctgagcaagggtatgaagagatgagagcttttcaggggcctggacatcaggccccccatgtccatt

SEQ ID NO: 47012 - DNA, 120 bp, Artificial Sequence
  ENSG00000065361_36 (sequence is synthesized)
atgcccgcctaaaaactctacgtagcttagaggctacagactctgcctttgataaccctgattactggcatagcaggcttttccccaaggctaatgcccagagaacgtaactcctgctcc

SEQ ID NO: 47013 - DNA, 120 bp, Artificial Sequence
  ENSG00000065361_37 (sequence is synthesized)
ctgtggcactcagggagcatttaatggcagctagtgcctttagagggtaccgtcttctccctattccctctctctcccaggtcccagccccttttccccagtcccagacaattccattca

SEQ ID NO: 47014 - DNA, 120 bp, Artificial Sequence
  ENSG00000065361_38 (sequence is synthesized)
atctttggaggcttttaaacattttgacacaaaattcttatggtatgtagccagctgtgcactttcttctctttcccaaccccaggaaaggttttccttattttgtgtgctttcccagtc

SEQ ID NO: 47015 - DNA, 120 bp, Artificial Sequence
  ENSG00000065361_39 (sequence is synthesized)
ccattcctcagcttcttcacaggcactcctggagatatgaaggattactctccatatcccttcctctcaggctcttgactacttggaactaggctcttatgtgtgcctttgtttcccatc

SEQ ID NO: 47016 - DNA, 120 bp, Artificial Sequence
  ENSG00000065361_40 (sequence is synthesized)
agactgtcaagaagaggaaagggaggaaacctagcagaggaaagtgtaattttggtttatgactcttaaccccctagaaagacagaagcttaaaatctgtgaagaaagaggttaggagta

SEQ ID NO: 47017 - DNA, 120 bp, Artificial Sequence
  ENSG00000065361_41 (sequence is synthesized)
gatattgattactatcataattcagcacttaactatgagccaggcatcatactaaacttcacctacattatctcacttagtcctttatcatccttaaaacaattctgtgacatacatatt

SEQ ID NO: 47018 - DNA, 78 bp, Artificial Sequence
  ENSG00000065361_42 (sequence is synthesized)
tacctgaggcaaggagtttgagaccagcttagccaacatagtaagacccccatctctttaaaaaaaaaaaaaaaaaaa

SEQ ID NO: 47019 - DNA, 77 bp, Artificial Sequence
  ENSG00000065361_43 (sequence is synthesized)
attacctgaggcaaggagtttgagaccagcttagccaacatagtaagacccccactgggtgcagtggctcatgcctg

SEQ ID NO: 47020 - DNA, 120 bp, Artificial Sequence
  ENSG00000065361_44 (sequence is synthesized)
cacttgagcccagaattagagataagcctatggaaacatagcaagacactgtctctacaggggaaaaaaaaaaaagaaactgagccttaaagagatgaaataaattaagcagtagatcca

SEQ ID NO: 47021 - DNA, 120 bp, Artificial Sequence
  ENSG00000065361_45 (sequence is synthesized)
ggatgcaaaatcctcccaattcctgtgcatgtgctcttattgtaaggtgccaagaaaaactgatttaagttacagcccttgtttaaggggcactgtttcttgtttttgcactgaatcaag

SEQ ID NO: 47022 - DNA, 120 bp, Artificial Sequence
  ENSG00000065361_46 (sequence is synthesized)
tctaaccccaacagccacatcctcctatacctagacatctcatctcaggaagtggtggtgggggtagtcagaaggaaaaataactggacatctttgtgtaaaccataatccacatgtgcc

SEQ ID NO: 47023 - DNA, 120 bp, Artificial Sequence
  ENSG00000065361_47 (sequence is synthesized)
gtaaatgatcttcactccttatccgagggcaaattcacaaggatccccaagatccacttttagaagccattctcatccagcagtgagaagcttccaggtaggacagaaaaaagatccagc

SEQ ID NO: 47024 - DNA, 120 bp, Artificial Sequence
  ENSG00000065361_48 (sequence is synthesized)
ttcagctgcacacctctgtccccttggatggggaactaagggaaaacgtctgttgtatcactgaagttttttgttttgtttttatacgtgtctgaataaaaatgccaaagttttttttca

SEQ ID NO: 47025 - DNA, 120 bp, Artificial Sequence
  ENSG00000065361_49 (sequence is synthesized)
agaacactggtcagagaaatgggaggcatgcattctagtcctgattttgccattaatttgccacatgactttgaagaagttacttatcttctctgtgcctcggtttatgcatctatacag

SEQ ID NO: 47026 - DNA, 120 bp, Artificial Sequence
  ENSG00000065361_50 (sequence is synthesized)
aggaaataacatttgtccttccaggatggctgtaagggtaaagggggatgatgtatgtgaaagtgctttggaaagcacagagcactgtataaaaggtactcaaggtggtaatagtactac

SEQ ID NO: 47027 - DNA, 120 bp, Artificial Sequence
  ENSG00000065361_51 (sequence is synthesized)
caactctccctagctgtccccttccccactttgtgctcctccatcaaagggaaaacccaacccctttgattcctgatctcatgagcacaaataacttcctcagttctcagggtctgtacc

SEQ ID NO: 47028 - DNA, 120 bp, Artificial Sequence
  ENSG00000065361_52 (sequence is synthesized)
tcaatatgcctataatccattccaggactaacggtgcttcctcttcctgccctttcagctgtgctgcttttggcattcacctatgaggagcgggttggagtgggacatgggaatggcctt

SEQ ID NO: 47029 - DNA, 120 bp, Artificial Sequence
  ENSG00000065361_53 (sequence is synthesized)
tcctgccttccctccttagaccccagcccacgcacccctcacagttcatttcattggccaaaactttcctatgtggagctgactaggaatcaaagtcataaaattctagcctgttacaaa

SEQ ID NO: 47030 - DNA, 120 bp, Artificial Sequence
  ENSG00000065361_54 (sequence is synthesized)
cactctaagtgcctcttccaaggtgcctgtcaccttggccgctgtctaaaggtccattgctccctaagcaatagagggcccccagtagggggagctaggggcatctgctccagggaaagg

SEQ ID NO: 47031 - DNA, 120 bp, Artificial Sequence
  ENSG00000065361_55 (sequence is synthesized)
aaggaaccctgtgtccttgtggggctggagtcagagctggatctgttaaccgtttttctaatttcaaagtacagtgtaccggaggccaggcctgatggcttacacctgtaatcccagcat

SEQ ID NO: 47032 - DNA, 120 bp, Artificial Sequence
  ENSG00000065361_56 (sequence is synthesized)
tgtgggggagggtaggtaggagtggagacccttaagtagtatcagcactgttgtctgatgggagtgtgaatctgaacacatgaagctccagtctcagtagaacagtaagaaatcctaagt

SEQ ID NO: 47033 - DNA, 120 bp, Artificial Sequence
  ENSG00000065361_57 (sequence is synthesized)
gaatgtcggccctgccatgagaactgcacccaggggtgtaaaggaccagagcttcaagactgtttaggacaaacactggtgctgatcgggtatgatggggttggagattctggaaactgg

SEQ ID NO: 47034 - DNA, 120 bp, Artificial Sequence
  ENSG00000065361_58 (sequence is synthesized)
cttttatgtatgcagtccactatcactggacacttgggactcaagaatgcaggcttctggacttcccttcctaaaattaactttcagtagtctaagactggtccagatttaggttggtcc

SEQ ID NO: 47035 - DNA, 120 bp, Artificial Sequence
  ENSG00000065361_59 (sequence is synthesized)
gtctcaaaaaaaaaaaaaaaagaatttgggacttggaaatcctaagaaaatttgtggaaataaacttgtgatacctctatctttaatccgcagactccaattaagtggatggcccttgag

SEQ ID NO: 47036 - DNA, 120 bp, Artificial Sequence
  ENSG00000065361_60 (sequence is synthesized)
gccccagtttcaaatttaccttttgagaccccctcttagaatctctaagcacttcagatttttgtgttagatcaggttctgccttcccttcacttcatgcccatgtctactattttgcca

SEQ ID NO: 47037 - DNA, 120 bp, Artificial Sequence
  ENSG00000065361_61 (sequence is synthesized)
atttattccaggacctagagagaggcaggatgagggtagagaattaaccccttagtacccaaaagaagcacagaggggtcccaggttgaaaaaggaaatcttttcaccttcccattcatg

SEQ ID NO: 47038 - DNA, 120 bp, Artificial Sequence
  ENSG00000065361_62 (sequence is synthesized)
aatggtcactgctttgggcccaaccccaaccagtgctgccatgatgagtgtgccgggggctgctcaggccctcaggacacagactgctttgtatgtaccctttccattgcctgggttctg

SEQ ID NO: 47039 - DNA, 120 bp, Artificial Sequence
  ENSG00000065361_63 (sequence is synthesized)
gatatggctaaggatagcacagagaggccagataatgctagggcctgcagatagaagatcctgaatgtctgggttggtctttgctgggaggtatggaattgaccttgggatctgattctt

SEQ ID NO: 47040 - DNA, 120 bp, Artificial Sequence
  ENSG00000065361_64 (sequence is synthesized)
tgagagatttgatccctttcttcaaggaagtagtgtggtcccctagaagaacactggtcagagaaatgggaggcatgcattctagtcctgattttgccattaatttgccacatgactttg

SEQ ID NO: 47041 - DNA, 120 bp, Artificial Sequence
  ENSG00000065361_65 (sequence is synthesized)
agagatatttattccaggacctagagagaggcaggatgagggtagagaagtgagtgccctagttggagggggagaggagggtaatcaaagttgcggccttttcctaacttctcttttcta

SEQ ID NO: 47042 - DNA, 120 bp, Artificial Sequence
  ENSG00000065371_0 (sequence is synthesized)
tagcacttcatagactgctatcacgcattcatttttactagtacctattgaacactaagttccaggcactgggctaggcactgggatggtgtggtgagcaaaaactgaccagtcctgccg

SEQ ID NO: 47043 - DNA, 120 bp, Artificial Sequence
  ENSG00000065371_1 (sequence is synthesized)
tggagtttgctgggggagacacatgttactcaaagaatcacactaaggatagcaatttatctcaaagctgcaagttcctgccatctacatgtgcccagagtccccaaaattgagtgtcaa

SEQ ID NO: 47044 - DNA, 120 bp, Artificial Sequence
  ENSG00000065371_2 (sequence is synthesized)
acagaggctgggtgacctcctgtccaggattgctctcatcgtatgaatcgaagttttcatcttaacgtatttttttctcctgagaataggccaaccaatcaatggctcagacagataagc

SEQ ID NO: 47045 - DNA, 120 bp, Artificial Sequence
  ENSG00000065371_3 (sequence is synthesized)
caacatgcatcccgccggagctgccgaagatgctgaaggagtttgccaaagccgccattagggtgcagccgcaggacctcatccagtgggcagccgattattttgaggccctgtcccgtg

SEQ ID NO: 47046 - DNA, 120 bp, Artificial Sequence
  ENSG00000065371_4 (sequence is synthesized)
gagagacgcctccggtgagagagcggtctgagcgagtcgctttgtgtaaccgggcagagctaacacctgagctgttaaagatcctgcattctcaggttgctggcagactgatcatccgtg

SEQ ID NO: 47047 - DNA, 120 bp, Artificial Sequence
  ENSG00000065371_5 (sequence is synthesized)
cagaggagctggcccagatgtggaaagtggtgaatctcccaacagatctgtttaatagtgtgatgaatgtgggtcgcttcacggaggagatcgagtggctgaagtttttagcccttgctt

SEQ ID NO: 47048 - DNA, 120 bp, Artificial Sequence
  ENSG00000065371_6 (sequence is synthesized)
tatcatgtgaccataatggtgggtcgccccggatcccgttcagcaccttccagtttctctacacgtatattgccaaagtggatggggagatctctgcatcacatgtcagcaggatgctaa

SEQ ID NO: 47049 - DNA, 120 bp, Artificial Sequence
  ENSG00000065371_7 (sequence is synthesized)
actacatggaacaggaagtaattggccctgatggtataatcacagtgaatgactttacccaaaaccccagggttcagctggagtaaaagcacaattttggcaattttaaaggaagataca

SEQ ID NO: 47050 - DNA, 120 bp, Artificial Sequence
  ENSG00000065371_8 (sequence is synthesized)
gagatgattgtacttcagaatgactgaaacccatataccacccaaaatcaattttcttgtacaactggtacacactaataaacaattaaacatatgagatcagaaatgtgcagaattaag

SEQ ID NO: 47051 - DNA, 120 bp, Artificial Sequence
  ENSG00000065371_9 (sequence is synthesized)
atgtgaaattgttggaacaaaacaccttcattaccagattagtattcttcccacatggacactgagtaaaagtggctgacaaagcatggatagaaaatgcatcttcaatcaaagccagac

SEQ ID NO: 47052 - DNA, 120 bp, Artificial Sequence
  ENSG00000065371_10 (sequence is synthesized)
tgtcagattttaaaaggtagtatgttaaccagacacagtgttgttgttctgtgattgttaggcataatttagatgagtgtcttttatatggtcaattgaagtttttaccagtttatttct

SEQ ID NO: 47053 - DNA, 120 bp, Artificial Sequence
  ENSG00000065371_11 (sequence is synthesized)
ccatttgttggtactgtgctagtcattcattcatcctctcactcatcaatatttattgaggttagctatgtgccaggaatagggttgcaagaaataaatacaggacacccagttaaattt

SEQ ID NO: 47054 - DNA, 120 bp, Artificial Sequence
  ENSG00000065371_12 (sequence is synthesized)
gaatttcagacaaacaacaaatatgttttgttttggtttttgctaaacctggcagcattccaggaactatgctggcttctgagcacatacaaataaataatatcagaattctgccttcaa

SEQ ID NO: 47055 - DNA, 120 bp, Artificial Sequence
  ENSG00000065371_13 (sequence is synthesized)
gccaggcgaaggcggagcgctaacgtctaacgctaacggcggtcgtgccccgccgctgctgtcacccccggccgctgctgccctccccgccgaggttctactgctctccttcttaagaag

SEQ ID NO: 47056 - DNA, 120 bp, Artificial Sequence
  ENSG00000065371_14 (sequence is synthesized)
ggtgggaggcactcggtctctccccacacctctcgcctgaggccaggcgccaggtgtcgcctgaagccagacagccggtttgggagcgagcctgaggccaaccaatcaatggctcagaca

SEQ ID NO: 47057 - DNA, 120 bp, Artificial Sequence
  ENSG00000065371_15 (sequence is synthesized)
aaatgaacaagggctgtgtaatttttatgtaaaggacataactatttccaacaaaaagtaggggttagcagatggttttctaaccttggcgttgtgtaataatagaatgcatttgtcttg

SEQ ID NO: 47058 - DNA, 120 bp, Artificial Sequence
  ENSG00000065371_16 (sequence is synthesized)
gccgagtacgtgctcctttctcgccttcaccccttggaggacggccggagacagagggtcctgtaaaaccgcggaggttgtcatggctgcagctaggaagtccggactaactggcatcgt

SEQ ID NO: 47059 - DNA, 120 bp, Artificial Sequence
  ENSG00000065371_17 (sequence is synthesized)
ctttgttttagctcttgcattgctttgatgctttaaaatccacacataaatgctacatctagctgggcaaggatgggatgcctcccctaagggagccagattgagcagtaggacgccagg

SEQ ID NO: 47060 - DNA, 120 bp, Artificial Sequence
  ENSG00000065371_18 (sequence is synthesized)
tcaataggccgtgtcctggggcaagcagcaagttagatgaccgcgtcacaccagcgtatgcacacccacctcctccctgcacgccttttcccactcccggtggaaagaagggctgggaat

SEQ ID NO: 47061 - DNA, 120 bp, Artificial Sequence
  ENSG00000065371_19 (sequence is synthesized)
ctccgaagcttaatctgcctttcttcgttctcctgtctcaccactagatggcagcagtgcagccgggggagggaagcgacagccctgggtggatggggtgggaccagtcctgctagttca

SEQ ID NO: 47062 - DNA, 120 bp, Artificial Sequence
  ENSG00000065371_20 (sequence is synthesized)
ctcctttaaggagacacttcctcccctgctgttaaaactcatacttggacccaaccaaagaccctttatatcttgtcttggaggaaattattgttattttctttagtgtttctctgaact

SEQ ID NO: 47063 - DNA, 120 bp, Artificial Sequence
  ENSG00000065371_21 (sequence is synthesized)
cataaagatgtccgcacagtacacactgcattctggggaaaggccaagcagagtgatggggtcctcaggcatggctgaaaacagtgtgcctcaaacacgggtgccttctttcaggagaga

SEQ ID NO: 47064 - DNA, 120 bp, Artificial Sequence
  ENSG00000065371_22 (sequence is synthesized)
cctccagaggctgctcagtagatggagcttacacaacaatcgctgcgggcctggattgaagtagctttgcacagaaagcctctcagctatgaaattgctccttggacaaacttgcctgct

SEQ ID NO: 47065 - DNA, 120 bp, Artificial Sequence
  ENSG00000065371_23 (sequence is synthesized)
tgaaactggggaaccaggacttgagacaggagttggaagataactagacctcacggaccattttcaggctatttttactgtttgatgattccctgcttaggagggtttcagtgggaaagt

SEQ ID NO: 47066 - DNA, 120 bp, Artificial Sequence
  ENSG00000065371_24 (sequence is synthesized)
gagagtgagagaggccgttgagagaaagccagtgagttggggaagggaagatgtcctcaggctgaggttgtgagtgggtgtcctgggcagatggtggggagagtgtggacacctttgaga

SEQ ID NO: 47067 - DNA, 120 bp, Artificial Sequence
  ENSG00000065371_25 (sequence is synthesized)
agacacaaaatggcatctaagaggggcctttcggagtctctgggccagtgctgtgctcctggactggattaggatgtagcttttacaattggaaggaaaataagccagtggtgctcataa

SEQ ID NO: 47068 - DNA, 120 bp, Artificial Sequence
  ENSG00000065371_26 (sequence is synthesized)
aaagaaacataaatgggggttgctttgcctagtaatgagccctgtttagttctccattttaaattttatatattgcctctaagattgaactttagcttcagaagactaatttattttggc

SEQ ID NO: 47069 - DNA, 120 bp, Artificial Sequence
  ENSG00000065371_27 (sequence is synthesized)
atagtcagatagacagactttatcttatacgttagtttcaaacccatttgattgttcttgtgctgccgttttatagtaagcaaactgacattgcttagtattgtccctgacatttatgga

SEQ ID NO: 47070 - DNA, 120 bp, Artificial Sequence
  ENSG00000065371_28 (sequence is synthesized)
agaggcattccactattgtagactgcttgctctcgtattgtatcacgtgctataatttttttagacatccatgaaaacttagtttgtagtttaaccacaatgaaaaaggagggcatgacc

SEQ ID NO: 47071 - DNA, 120 bp, Artificial Sequence
  ENSG00000065371_29 (sequence is synthesized)
taagagccccctccattctatccagacatgaaaagcactgctcagatggttgtatgtgacttacttaaaacctgtagcattttagagaataaaactctgcaaagtgtttccaagacaaaa

SEQ ID NO: 47072 - DNA, 120 bp, Artificial Sequence
  ENSG00000065371_30 (sequence is synthesized)
cgccgctgctgtcacccccggccgctgctgccctccccgccgagcaatttatctcaaagctgcaagttcctgccatctacatgtgcccaggccaaccaatcaatggctcagacagataag

SEQ ID NO: 47073 - DNA, 120 bp, Artificial Sequence
  ENSG00000065371_31 (sequence is synthesized)
cttctcctcttgtccttctcctctctaaagcaaggtcatttctgtgctcgtcaggcagtggcaggggttgggaggaggagagagggaaacactgtggtcaggctctggggagagttgact

SEQ ID NO: 47074 - DNA, 120 bp, Artificial Sequence
  ENSG00000065371_32 (sequence is synthesized)
acagtgtagctcttggattatttatgaatattgccctcagatttattttcactccgctccttccattcatattcccagagacaaccaagagccgactgtagaaaaagacttccagacacc

SEQ ID NO: 47075 - DNA, 120 bp, Artificial Sequence
  ENSG00000065371_33 (sequence is synthesized)
tagaatatatatcaatagacactgtttaaaaggggtacaatcttatcgaaaactatgtaataaacagaattggatgcagaactcagacataagaaagcaaaaaaaaagagagatgaggct

SEQ ID NO: 47076 - DNA, 120 bp, Artificial Sequence
  ENSG00000065371_34 (sequence is synthesized)
atttctgaatttagtcatgacatctccatggatgcaggatgttcatacagatttatgccttttccaaatttgacttgtttgatattggaaatgcaattttactgttttgaagccaaagat

SEQ ID NO: 47077 - DNA, 120 bp, Artificial Sequence
  ENSG00000065371_35 (sequence is synthesized)
gctgaaatcagcttatatgtatagatatttaaagcttgggtatcttatatgtggacttacattgctaaacattgttaaaataacttaaaatgaatcaaaaacgtgtttttttaaaagaat

SEQ ID NO: 47078 - DNA, 120 bp, Artificial Sequence
  ENSG00000065371_36 (sequence is synthesized)
ccctgagatacatacaagtttgaaaattattgagaaaataattgcctctgccaaaaccaaatggtatgaaaaggtagtctgaatcattcagcatatctaaacataatcttgttcttctca

SEQ ID NO: 47079 - DNA, 120 bp, Artificial Sequence
  ENSG00000065413_0 (sequence is synthesized)
agtgtcagcctctcggcgggaggaggcggcggcggaggaggagcagggggagggctgtcaaattcgggagccagattttttcccttctcctggcaatcccttccgcttccccggctcccg

SEQ ID NO: 47080 - DNA, 120 bp, Artificial Sequence
  ENSG00000065413_1 (sequence is synthesized)
gcgtgacatctgcgggccggggacctgcatgtgtgtgcgcgcgaaggagcggaagaatggcagtgctcaaactcaccgaccagccaccattggttcaggcaatcttcagcggtgatccag

SEQ ID NO: 47081 - DNA, 120 bp, Artificial Sequence
  ENSG00000065413_2 (sequence is synthesized)
aggagatccggatgctcatccataaaactgaagatgtgaatactctggattctgagaaacgaacccctcttcatgtggccgcatttctgggagatgcagagatcattgaactcctgattt

SEQ ID NO: 47082 - DNA, 120 bp, Artificial Sequence
  ENSG00000065413_3 (sequence is synthesized)
tgtcaggagctcgtgtaaatgccaaggacaacatgtggctgactccactgcaccgggctgttgcttccagaagtgaagaagcagtacaggttttgattaagcactcagctgatgtcaatg

SEQ ID NO: 47083 - DNA, 120 bp, Artificial Sequence
  ENSG00000065413_4 (sequence is synthesized)
caagggacaagaactggcagacccctcttcatgtggcagcagccaacaaggctgtcaaatgtgcagaagtgatcattcccctgctgagcagtgtcaatgtctccgaccgaggggggcgca

SEQ ID NO: 47084 - DNA, 120 bp, Artificial Sequence
  ENSG00000065413_5 (sequence is synthesized)
cagccttgcaccatgcggctctgaacggccacgtggagatggtcaatttactcttggccaaaggggcaaatatcaatgcatttgacaagaaggaccggcgtgctctgcactgggcagcat

SEQ ID NO: 47085 - DNA, 120 bp, Artificial Sequence
  ENSG00000065413_6 (sequence is synthesized)
acatgggccacttggatgttgtagcattgctcattaaccatggcgcagaagtgacctgtaaggataagaagggttatacccctctgcatgctgcagcctccaatggacagattaatgttg

SEQ ID NO: 47086 - DNA, 120 bp, Artificial Sequence
  ENSG00000065413_7 (sequence is synthesized)
tcaagcatctcctgaacctgggggtggagattgatgaaatcaatgtctatggaaatacagcgcttcacatcgcctgctacaatggacaggatgctgtggttaacgagttgattgactacg

SEQ ID NO: 47087 - DNA, 120 bp, Artificial Sequence
  ENSG00000065413_8 (sequence is synthesized)
gtgctaacgtgaaccagccaaacaataatgggttcacccctttgcattttgctgctgcctccactcatggtgctttgtgtcttgaattgttagtaaacaacggggcagatgttaacattc

SEQ ID NO: 47088 - DNA, 120 bp, Artificial Sequence
  ENSG00000065413_9 (sequence is synthesized)
agagtaaagatggcaaaagtccactgcacatgacagctgtccatggaaggttcacacggtcacagaccctcattcagaatggaggtgaaattgactgtgtggataaggacggcaacactc

SEQ ID NO: 47089 - DNA, 120 bp, Artificial Sequence
  ENSG00000065413_10 (sequence is synthesized)
ctctccatgtggctgcaagatacggtcatgagcttttgattaacaccttaataaccagcggagctgacacagccaagtgtggaatccatagcatgttccctttacatttagctgccctaa

SEQ ID NO: 47090 - DNA, 120 bp, Artificial Sequence
  ENSG00000065413_11 (sequence is synthesized)
atgctcactctgactgctgcagaaagttgttatcatcgggctttgaaatagacaccccagataaatttggaagaacgtgccttcatgctgctgctgcaggaggtaatgtggaatgtataa

SEQ ID NO: 47091 - DNA, 120 bp, Artificial Sequence
  ENSG00000065413_12 (sequence is synthesized)
aactcttgcagagcagcggagcagatttccataaaaaggacaagtgtgggaggacccctttgcactatgcagctgcgaattgtcatttccactgtattgagacattagtgaccacagggg

SEQ ID NO: 47092 - DNA, 120 bp, Artificial Sequence
  ENSG00000065413_13 (sequence is synthesized)
ccaacgttaatgaaacagatgactggggacgcacagctttgcattacgccgctgcatcagacatggatagaaataagactatcttaggaaatgcccatgataattcagaagaacttgaaa

SEQ ID NO: 47093 - DNA, 120 bp, Artificial Sequence
  ENSG00000065413_14 (sequence is synthesized)
gagccagggagctgaaggaaaaggaagccacactatgtctagagtttctgcttcaaaatgatgcaaatccatctatccgggacaaggaaggttacaatagcatacattatgctgccgcct

SEQ ID NO: 47094 - DNA, 120 bp, Artificial Sequence
  ENSG00000065413_15 (sequence is synthesized)
atgggcacaggcagtgtctggaattgcttttggaaagaacaaacagtggatttgaagaatcagattctggtgctactaagagtccactccacttagctgcctacaatgggcaccatcaag

SEQ ID NO: 47095 - DNA, 120 bp, Artificial Sequence
  ENSG00000065413_16 (sequence is synthesized)
ccttggaagtccttctgcagtcgttggtggacctggacatcagggatgagaaaggccgcactgctctggatctggctgcctttaaaggacacacagaatgtgtggaagcgcttatcaatc

SEQ ID NO: 47096 - DNA, 120 bp, Artificial Sequence
  ENSG00000065413_17 (sequence is synthesized)
agggcgcatccatctttgtgaaagacaatgtaaccaaaagaaccccacttcatgcctcagtaattaatggtcacacactgtgtttacggctgttgctagaaattgcagacaacccggagg

SEQ ID NO: 47097 - DNA, 120 bp, Artificial Sequence
  ENSG00000065413_18 (sequence is synthesized)
cggtcgatgtgaaagatgccaaaggacaaacaccactgatgcttgcagtagcatatggacatattgacgctgtttcattgttacttgaaaaggaagccaacgtagacactgttgacatcc

SEQ ID NO: 47098 - DNA, 120 bp, Artificial Sequence
  ENSG00000065413_19 (sequence is synthesized)
taggatgcacagctttacacagagggattatgacaggacacgaggaatgtgtgcaaatgctgctggaacaagaagtgtcaattctctgtaaagattccagagggaggacgcccttgcact

SEQ ID NO: 47099 - DNA, 120 bp, Artificial Sequence
  ENSG00000065413_20 (sequence is synthesized)
atgcagctgctcgtggccacgccacgtggctgagcgagctgctccaaatggctctttctgaggaggactgttgtttcaaagataaccaaggctacacgccgctgcactgggcttgttaca

SEQ ID NO: 47100 - DNA, 120 bp, Artificial Sequence
  ENSG00000065413_21 (sequence is synthesized)
atggtaatgaaaactgtatagaggtacttttggagcaaaaatgttttcgcaaatttatcggtaatccctttactccactgcactgtgcaataatcaatgatcatgggaattgtgcatcat

SEQ ID NO: 47101 - DNA, 120 bp, Artificial Sequence
  ENSG00000065413_22 (sequence is synthesized)
tgctgcttggggccatagattccagtatcgtcagttgtagagatgacaaaggcaggacaccccttcatgcggcagcatttgctgatcatgtggagtgcttgcagcttcttctgagacaca

SEQ ID NO: 47102 - DNA, 120 bp, Artificial Sequence
  ENSG00000065413_23 (sequence is synthesized)
gtgctccagtgaacgcagtagataattcagggaaaacagcactgatgatggctgctgagaatgggcaggcaggcgctgtggatattttggtgaacagtgcccaggctgatctgactgtaa

SEQ ID NO: 47103 - DNA, 120 bp, Artificial Sequence
  ENSG00000065413_24 (sequence is synthesized)
aggataaggacttgaatacacccttacatttggcttgtagtaaaggtcatgaaaaatgtgccttgttaatacttgacaagatacaagacgagagccttattaatgaaaaaaataatgcac

SEQ ID NO: 47104 - DNA, 120 bp, Artificial Sequence
  ENSG00000065413_25 (sequence is synthesized)
tagatgaaaatgcttctaggtcaaatggaccccgttccacacctggaaccgctgtacaaaaagaagaatgagactctttaaaaattatgcacatacacatgcacacatatatgtgtgcgt

SEQ ID NO: 47105 - DNA, 120 bp, Artificial Sequence
  ENSG00000065413_26 (sequence is synthesized)
atatatatatatatgtgtgtgtgtgtgtagttcatcagccagctacacatgaggaccaaaatgcttcagtctaaaatggaagatacacatttttttccttcaaaatgcaagtgagaactg

SEQ ID NO: 47106 - DNA, 120 bp, Artificial Sequence
  ENSG00000065413_27 (sequence is synthesized)
actgaagtagcttttttatggagttaaatgtaatctttctgtgtaccagtctttgttgtattttatatttcttaggacacagatttctagttgaccacttaacatttgtaactgatgatg

SEQ ID NO: 47107 - DNA, 120 bp, Artificial Sequence
  ENSG00000065413_28 (sequence is synthesized)
tgctgacctttttttttttttttgccaaactagagaaaatgtccatatacttttgctgtaaatgtgtttatatttatttgaaatgaaacaaatggtgaggaaacatccattatttgttct

SEQ ID NO: 47108 - DNA, 120 bp, Artificial Sequence
  ENSG00000065413_29 (sequence is synthesized)
ctattttaattgctatgtatcttatttagaataacaaaaaaaaagtgaaaaaaaaaacacttgaccctgggctagccaaaagcccaagggccaaacctagcatttccactgctaaggttt

SEQ ID NO: 47109 - DNA, 120 bp, Artificial Sequence
  ENSG00000065413_30 (sequence is synthesized)
ccagatgaccctcaggttcttccgcgttggttagagagggctacgcatcttctactgctcagccacagtctgtagccagcttagagcttagaagacattgcagtctggatgcccttctgc

SEQ ID NO: 47110 - DNA, 120 bp, Artificial Sequence
  ENSG00000065413_31 (sequence is synthesized)
gagatgaaaactcagatgtgtagtggatcatatacacaaaggcagcacaaagaaatatctagaaattaccctaagtacactgaaaagctcacatagtctcagtaacctgatgagaaatga

SEQ ID NO: 47111 - DNA, 120 bp, Artificial Sequence
  ENSG00000065413_32 (sequence is synthesized)
tggcagtgtgtgggcacatgtgccaaaaggagaaataaaaatcaccagctcaagtgctattttctacttgaggaagagacagaaaagaaatgtgtcgaattagagcagtactctctgacg

SEQ ID NO: 47112 - DNA, 120 bp, Artificial Sequence
  ENSG00000065413_33 (sequence is synthesized)
ttttataatgagttccatttccaccctggaaattgctattttatagtgtatgtgagatatttcaaaaataatgttctatcatatctggatcaaagacagataactgtattatatttttca

SEQ ID NO: 47113 - DNA, 120 bp, Artificial Sequence
  ENSG00000065413_34 (sequence is synthesized)
tctagctataaaactttaatcttactcttaatatcctggatttaattaaaactcctgttgggttcttcacaaatgagaacttgttcaaaggatttattgaactggtattgatttcactga

SEQ ID NO: 47114 - DNA, 120 bp, Artificial Sequence
  ENSG00000065413_35 (sequence is synthesized)
aaattttccacaccaccaccattgtttttttgaattcttggtgttgtgcttcccaccttctgtccttttcgtttgtttagagaagatgaatttttaaaaagcagataaattgctaatgag

SEQ ID NO: 47115 - DNA, 120 bp, Artificial Sequence
  ENSG00000065413_36 (sequence is synthesized)
caataatgaccttatctttaccaaaacactgaaaattaagagaggttcagtgttgaagaagcacaatatgctgcggtgtctttttctagaagtgaatggaaatcttgctcagttggcatt

SEQ ID NO: 47116 - DNA, 120 bp, Artificial Sequence
  ENSG00000065413_37 (sequence is synthesized)
tcaagcaggaaatgaaatgcttgctttaatggcaaagcagcgttaacatttttcctgtcgtgtagcagagagtacaagaatcatttcagcaaagcagtgactcaccatgagacgttatct

SEQ ID NO: 47117 - DNA, 120 bp, Artificial Sequence
  ENSG00000065413_38 (sequence is synthesized)
ccatggagctgcgttttgacttttcccactctcttactcatagaaggaggacaaaggaacgaaatgaaatcatgctcacaatgaactgttcattacatcaactgatctctctctctctct

SEQ ID NO: 47118 - DNA, 120 bp, Artificial Sequence
  ENSG00000065413_39 (sequence is synthesized)
cttcctctctttctctttctcccataccccaaggcaaaatttttttaaagaaatgactttaaaaactatcatttctgtattttaattacatctcttagaaataaaattatgtttgcacca

SEQ ID NO: 47119 - DNA, 120 bp, Artificial Sequence
  ENSG00000065413_40 (sequence is synthesized)
tagctttctaagaaaaaaaaatgtgtttttaactgagtcttagttgcttagtgcttttatttgtgttatttttagactgtattttaaccacaactacaaggatcatgtttcattgcactt

SEQ ID NO: 47120 - DNA, 120 bp, Artificial Sequence
  ENSG00000065413_41 (sequence is synthesized)
acttatttgccagtgtctgcctgtctttgctaaatacattactatctccaaattgcctaaaatctgctatgattctacagtaaatagctcagggtatttctatttatcactactaaaagg

SEQ ID NO: 47121 - DNA, 120 bp, Artificial Sequence
  ENSG00000065413_42 (sequence is synthesized)
gcaccatagtatgttttggtactttaggcagtaaacactgcttggtttatcattttgttattaaattagaacaagaacatcaaatggatttgctgcactagttattctttgtactgttga

SEQ ID NO: 47122 - DNA, 120 bp, Artificial Sequence
  ENSG00000065413_43 (sequence is synthesized)
gcaacttggtgtgcttatatgttgtgttggttgaagaactcatccgttttattgtcttgtaatatgaagttagagtgcctttttatatttgtatattctgaaaatgttctgtggaatgtt

SEQ ID NO: 47123 - DNA, 120 bp, Artificial Sequence
  ENSG00000065413_44 (sequence is synthesized)
ttgtattttttcatttgagtgttatcagagcaatatgataccagtgagttttcatttcaacttttctttgaatgtataaagtgtcttttttcctatttccccttgtacttgcattgaaat

SEQ ID NO: 47124 - DNA, 120 bp, Artificial Sequence
  ENSG00000065413_45 (sequence is synthesized)
gaatatgaaaatgcttaagttttctataggaattgtttgattttgcagtgctaaaatgctttcgtcttacgaaactataaaccataggtcagtattataggggaaaagcattttaagata

SEQ ID NO: 47125 - DNA, 120 bp, Artificial Sequence
  ENSG00000065413_46 (sequence is synthesized)
gtgacaatctgagtgtttgtataaaatgtaattctatgcgtttcttatgtgatctaaaaattcaatgcaaatatcttttatttggtagttttgtctacatattttatgctctagcatgtg

SEQ ID NO: 47126 - DNA, 120 bp, Artificial Sequence
  ENSG00000065413_47 (sequence is synthesized)
caatatatctttgtaaagcacgatgatacaaatctggtgccagtgttatattttgcataacatatttgtaacagcataaaatattgtttgatgatttcagtgggattttgtctataatgt

SEQ ID NO: 47127 - DNA, 120 bp, Artificial Sequence
  ENSG00000065413_48 (sequence is synthesized)
tttcttatgtaaattggagttgaatgactctggtaaatgtcatgactgtaaaaatggggaaaatgacttttagttcagtgaatgactttgaaacaatctgaatcttctcaagcacagttt

SEQ ID NO: 47128 - DNA, 120 bp, Artificial Sequence
  ENSG00000065413_49 (sequence is synthesized)
aatacttttgcaactactgaatgctctaataacgtaatgaagtacttaactgtaatatactatggaaatgcattcagatggttatttttacaaataaaaacggtacaaatattgttggaa

SEQ ID NO: 47129 - DNA, 120 bp, Artificial Sequence
  ENSG00000065413_50 (sequence is synthesized)
cacgtcgctgcgcgcaatggcttaaaggtggtagttgaggagttgctggccaaaggggcctgtgtacttgctgtagatgaaaatggtcataccccggccctggcttgcgctcctaacaaa

SEQ ID NO: 47130 - DNA, 120 bp, Artificial Sequence
  ENSG00000065413_51 (sequence is synthesized)
gacgtggctgactgcctggccctcattttggctaccatgatgcctttttctccttccagtacaatgatggctgtcaacttcgtttgtttaaaaaaagacaatttgagcaggacgaccctc

SEQ ID NO: 47131 - DNA, 120 bp, Artificial Sequence
  ENSG00000065413_52 (sequence is synthesized)
tccaatctgggtagcatggttagcctgtgcagtaacaacgtaggctcggaggatgggtacaatgaaaatgattctgattcggaaacgttttgactttggactgtagaagcttttctttga

SEQ ID NO: 47132 - DNA, 120 bp, Artificial Sequence
  ENSG00000065413_53 (sequence is synthesized)
tcacctgtgttggaggaaaggaaagaagcttgaattccaggtttatgttgtattcaagtattatttggggcctgggcttccagaagctagtagagaaggaattaatcgagggagggcagt

SEQ ID NO: 47133 - DNA, 120 bp, Artificial Sequence
  ENSG00000065413_54 (sequence is synthesized)
gaggctgttgggtggaacagtcacacagatggccccagttttgttttgtttcacattttctttaaatctaagatacttctgtgaaagtctacctctcattttaaataaagaataaaagat

SEQ ID NO: 47134 - DNA, 120 bp, Artificial Sequence
  ENSG00000065413_55 (sequence is synthesized)
gtatttaattcctgttctttggggataatgcagcagagaggcagctgttcgctatgaataatttttcttttcatgtatttagcagtgagttctcagaagtatatcagtgtgacattcatg

SEQ ID NO: 47135 - DNA, 120 bp, Artificial Sequence
  ENSG00000065413_56 (sequence is synthesized)
aagaggcagataggaaatgcctcaaacttcttctcactttgatgtttacttcctcactagaagccaaaggtaaaggtgtccatcttcagaaataatgcctgtaataatctttttagagag

SEQ ID NO: 47136 - DNA, 120 bp, Artificial Sequence
  ENSG00000065413_57 (sequence is synthesized)
tccaactatttatatcctctctatagtaagcatttgaatatccagaacttctttctgaggatctctgttaaagttgccagatgaattgaaaaattgaacttgctttttttgtttaacaca

SEQ ID NO: 47137 - DNA, 120 bp, Artificial Sequence
  ENSG00000065413_58 (sequence is synthesized)
gtgttccctataacaagcctgtgactaattttcacttaagtgattgaacccaaatttatctaataacatttcaggtgaaaattatattgcaccaaaactttgacacaatatgcaaaaata

SEQ ID NO: 47138 - DNA, 120 bp, Artificial Sequence
  ENSG00000065413_59 (sequence is synthesized)
gtatgaaactaccctttgttaatttattcttaaatcaaaatactaacttttaaaaaacatcagaatcatcagcattgttcatcagtagtaaaatgagcttctcagtcaaggtcataccaa

SEQ ID NO: 47139 - DNA, 120 bp, Artificial Sequence
  ENSG00000065413_60 (sequence is synthesized)
gtcagtgaaaagtgtgactgcaaaaaggaacaaaaaaagtgaaagcagaaagtagaaatgggtgatttagcatgtaaaaccgattgccagttgcttgatgatgaaatcaacatagtgaat

SEQ ID NO: 47140 - DNA, 120 bp, Artificial Sequence
  ENSG00000065413_61 (sequence is synthesized)
actaactgatttttctgtctctgcaatgtttcttgtggtttaactaggacaaaagtatagcatagtatccttgtttagtaatgagcacgtgctgtctgcaggctttgaaatagacacccc

SEQ ID NO: 47141 - DNA, 120 bp, Artificial Sequence
  ENSG00000065413_62 (sequence is synthesized)
aatcacagaggcattaactgtttttttccagagttgtagctctggcttgtgtaaaaagtgggtccatgaatcaggatttcatgaattctgatttcaaaaagtgttttttctactgcacca

SEQ ID NO: 47142 - DNA, 120 bp, Artificial Sequence
  ENSG00000065413_63 (sequence is synthesized)
tgctgccttccattgcaggttagagccccaccaccacccaaggcttttaagcacagcacaaaagcatggtagtcatcgatataaggcagtaccatttctgcctcctaacaccagcattgc

SEQ ID NO: 47143 - DNA, 120 bp, Artificial Sequence
  ENSG00000065413_64 (sequence is synthesized)
ctaacaccagcattgccatggaagttggtatagacctattagcaaatatggctttgtgtttagatcccatataagaaatgctcctcacaaaatgtgtatgcgtgtgtgtgtgtgtgtgtg

SEQ ID NO: 47144 - DNA, 120 bp, Artificial Sequence
  ENSG00000065413_65 (sequence is synthesized)
tggtaatcagtggcagagtgaaggctttctactgtcactacatattatgagcctgccttccaaaatatacttaagacacagctgtctttaattggttttctctatgaaaaccatgtcata

SEQ ID NO: 47145 - DNA, 120 bp, Artificial Sequence
  ENSG00000065413_66 (sequence is synthesized)
attgtcatgataaaacaaacttttattatacagtttgttattatagtcttaataatgtgtgctgttctatagtacttttgtgagttatctttaatccttcatagtctagaaactcaggat

SEQ ID NO: 47146 - DNA, 120 bp, Artificial Sequence
  ENSG00000065413_67 (sequence is synthesized)
aattatcctaacaccttctttgtatagaaataacatatcgcatgcaatatcttcattttttcaggaagaccattttggtaccattatttctgttattcaagtaagagtttttcctgtcca

SEQ ID NO: 47147 - DNA, 120 bp, Artificial Sequence
  ENSG00000065413_68 (sequence is synthesized)
taagaaggtttcacaaattttgtctgaaaatgaaattacccccctttgattagatcaacatttgccctgtgtaatttacaaagagatgactatttgtgacaattataaaacattcaaaaa

SEQ ID NO: 47148 - DNA, 120 bp, Artificial Sequence
  ENSG00000065413_69 (sequence is synthesized)
ctaaagttggacttgaacccagggtcatagtcatttattcaataagtattaagagcctgctgtgtgccagactagctctggggagcacagtggtgaaagatgcagtcctggcttcccctg

SEQ ID NO: 47149 - DNA, 120 bp, Artificial Sequence
  ENSG00000065413_70 (sequence is synthesized)
catgaaggtgacagtcacatacctacaagtgctgaccaagctgggcagttttagttagaatccttcttttgatatgtcttcatttaattttgtgaagtctctctttttctttgctgatat

SEQ ID NO: 47150 - DNA, 120 bp, Artificial Sequence
  ENSG00000065413_71 (sequence is synthesized)
ttctggggtaatattataaatttagtgggctgttagaaaaattttatggactgacatatttggggaaactatttgtattatgtattagcattatgtattctgactggaaaatgacagttt

SEQ ID NO: 47151 - DNA, 120 bp, Artificial Sequence
  ENSG00000065413_72 (sequence is synthesized)
tgcaaatcagtttcccagaatacatttgaagagtttctaagctatttgtcttgattatattttaatataattcagtgtaacccttggtgtgaaagatctaaaagctgtttcattttccgc

SEQ ID NO: 47152 - DNA, 120 bp, Artificial Sequence
  ENSG00000065413_73 (sequence is synthesized)
tctaaaagctgtttcattttccgctttaggaaattatttatgcatttgttttaaaggcaaaggaatttttttcatttaagattcttaagccgggcgtggtggctcatgcctttaatccca

SEQ ID NO: 47153 - DNA, 60 bp, Artificial Sequence
  ENSG00000065413_74 (sequence is synthesized)
gcactttgggaggccgaggcagttggattacttgaggccaggagttcattagctgggcat

SEQ ID NO: 47154 - DNA, 120 bp, Artificial Sequence
  ENSG00000065413_75 (sequence is synthesized)
atcagaatgcactttatcccagccacagaacgcaaagggttacactctgcaggagctgcggttggggaagggaaagggagtaaccggattcgccttgcctgtctgtgattgggaagcacg

SEQ ID NO: 47155 - DNA, 120 bp, Artificial Sequence
  ENSG00000065413_76 (sequence is synthesized)
caccctttattttccaactgggaacaagatactggaaattcctctttcccttagaaaacagaaggcaagggtgttggctgtggaaattagaactgggtaatatttctagagcactttgaa

SEQ ID NO: 47156 - DNA, 120 bp, Artificial Sequence
  ENSG00000065413_77 (sequence is synthesized)
attctttcaggataagtgttatacgaacacaaatgatttctttcattgttaaattgtgttcctatcattggtaacgccccaagtaaagcctttttaattaaaaatctctggatgctataa

SEQ ID NO: 47157 - DNA, 120 bp, Artificial Sequence
  ENSG00000065413_78 (sequence is synthesized)
cagcggagctgacacagccaagtaggttaccgcaaaaatacggtggaataattgcctcaagtgggaatactgccaaaaagattcttccgtgcagtagatagttcccatttatccaggtta

SEQ ID NO: 47158 - DNA, 120 bp, Artificial Sequence
  ENSG00000065413_79 (sequence is synthesized)
aggtggatctataccattatactaaatacaaattaaattttaaataaattaagtgccttttaatgacagaggcaaagaagaaccaattttattttttagcttcatccaaatgaggtctat

SEQ ID NO: 47159 - DNA, 120 bp, Artificial Sequence
  ENSG00000065413_80 (sequence is synthesized)
ttcagtggttttaattaaggaaacttgaactttattcgtaacttttctttctaatattcttctgtccttcccaatgcttcatattaaacaggaaaaataaaacctaactgagccaattta

SEQ ID NO: 47160 - DNA, 120 bp, Artificial Sequence
  ENSG00000065413_81 (sequence is synthesized)
aaaagaaaaagtcttgctagcgaattaagaatccttactggtaagcagaaggcttttacctctaatgtaagagggttacccaaaatgaacagcttttatttgagtatctcctgtgtgcca

SEQ ID NO: 47161 - DNA, 120 bp, Artificial Sequence
  ENSG00000065413_82 (sequence is synthesized)
gacatagtgctgagtggggctggggagtatctggggtagttcaacatggacagcatgatcctgaatttcaatgagttctcagcctggggaggaggcaaagcagaaagcatatcattacaa

SEQ ID NO: 47162 - DNA, 120 bp, Artificial Sequence
  ENSG00000065413_83 (sequence is synthesized)
tatcatcattgacttgcgggagaaagcaactaactgcctgcttgaatagaggaaatcttccaagaagagatgtcagttgatctggtccttaaaggttgagtaaggacttagcaggccagg

SEQ ID NO: 47163 - DNA, 120 bp, Artificial Sequence
  ENSG00000065413_84 (sequence is synthesized)
agaaggagggaggactgaggcaaggaagtgagtgaatgggggcctcagtgaggtataactggaactcaggctatagtagaaggtaaatctgatagtggaggttgggccagatggcagagg

SEQ ID NO: 47164 - DNA, 120 bp, Artificial Sequence
  ENSG00000065413_85 (sequence is synthesized)
gcttggaatcctctgagcaatggagaatggtcacagcaggggagtggtatgctcagatctgtgtttcagagaacctttgtggtggcagcatgtgaatgggctgagggggagaggtctcag

SEQ ID NO: 47165 - DNA, 120 bp, Artificial Sequence
  ENSG00000065413_86 (sequence is synthesized)
ggaggagcgccagtaagagaccaaaagaggcctgaagcagctgggatgagggcataaagctgagtccatgatttgagagctcattagaggtaaacctggcaggatttagtacctagtagg

SEQ ID NO: 47166 - DNA, 120 bp, Artificial Sequence
  ENSG00000065413_87 (sequence is synthesized)
ggtgaggtgggaaagaagctggtaggtaaatggcgatgctgttaacagaagaggcacagagcaggggagcaggggccgggaggctggtgggtcctgtttgctaacgctgagttcagcaaa

SEQ ID NO: 47167 - DNA, 120 bp, Artificial Sequence
  ENSG00000065413_88 (sequence is synthesized)
catgtcgttggagtgggagctccatgaggacagggatctgtactttgttcctggatgtatcccaagcctggtacagtctaggcatccaagaaataatttgttgttgaatgctggaaattc

SEQ ID NO: 47168 - DNA, 120 bp, Artificial Sequence
  ENSG00000065413_89 (sequence is synthesized)
cagggaggatgatcatcaaaccatggtaaatgcatcaggtagctcaggggaagtataaaggatgagaagatcaatgtgaaggcaggggtggcagggaaccctggtgaatgtcagccttga

SEQ ID NO: 47169 - DNA, 120 bp, Artificial Sequence
  ENSG00000065413_90 (sequence is synthesized)
agcctggtcagaggagatgcccattatccagggatacaagaggttcaaaccttgcatgcacttggtgctggatgactgacctccatagctgaatttaccaaatgcagcttctcctctgct

SEQ ID NO: 47170 - DNA, 120 bp, Artificial Sequence
  ENSG00000065413_91 (sequence is synthesized)
actggagaaggtgatgttctccaggtacacctaggagcaaaaggtcttgctgagaattaatatacagaagttgcaggtgtctttggccgttattggtgtcagcttttcctctttggcaac

SEQ ID NO: 47171 - DNA, 120 bp, Artificial Sequence
  ENSG00000065413_92 (sequence is synthesized)
tatctggaaattttaatatatacttgctaggtgacagcttagtagtcatggtttttcttgctgcgctttgtgattttagtaggttttaaaaggggttggttgtgttctccttccaaatat

SEQ ID NO: 47172 - DNA, 120 bp, Artificial Sequence
  ENSG00000065413_93 (sequence is synthesized)
cccgcatggaatgagagaggtcaataatcctaaattgcctggctcagaccctggagaattcagaatcttctcatggtcccacattttatttccattttgtctgggaaaacgagggcagtg

SEQ ID NO: 47173 - DNA, 120 bp, Artificial Sequence
  ENSG00000065413_94 (sequence is synthesized)
agctgactgagtgggtattaccagcttcatgagaccaaccccttcatagaggagtatttcctggccttttaagaccacttggtctttagtaaatttaagtgtctctttaaaaatatgtat

SEQ ID NO: 47174 - DNA, 120 bp, Artificial Sequence
  ENSG00000065413_95 (sequence is synthesized)
ggatttgtttcctcttcaacaagaaccaggtctttttagttgggaaaataattcaatatgtacctcccatatgccaggcaccttttctttgtagctcatggagctacaaaaaaaaactaa

SEQ ID NO: 47175 - DNA, 120 bp, Artificial Sequence
  ENSG00000065413_96 (sequence is synthesized)
gaccgatggtctctgcccttaggaagtgtgtagtctagtggaaaagaaagacacaaaaaagatgatttcattactctgtgacctttcccaagtgatctctatctttgttagctcaactag

SEQ ID NO: 47176 - DNA, 120 bp, Artificial Sequence
  ENSG00000065413_97 (sequence is synthesized)
cttcaaagacttcaatcctcaaaacatccattttccatcaacaaccagtctgcattctgtaagtatctttagtgtgtttgaatccagtcagcctaatgatggactgaccttccaatctga

SEQ ID NO: 47177 - DNA, 120 bp, Artificial Sequence
  ENSG00000065413_98 (sequence is synthesized)
gaaaggcttttgttgcttctccaagtaaccagctccctctgtaggtttgcagggaggaaaaaagaatcactagccagataggaattaaatgcaaacaaaccctgaactgtaaataattgg

SEQ ID NO: 47178 - DNA, 120 bp, Artificial Sequence
  ENSG00000065413_99 (sequence is synthesized)
aactgtaaataattgggtcacatatgagctcatgatgtcttcatattagtatctgtcacagcaagttggacagtttcttatgaaaattggagtctcggctgggcgcagtggctcatgcct

SEQ ID NO: 47179 - DNA, 120 bp, Artificial Sequence
  ENSG00000065413_100 (sequence is synthesized)
agcagctcatgcctatttctcagaagtaagcagccatactgattatcattagctaactcttattagttttgattttgcagccccatgtatcctagcatgtaccctgctgtgtcccccacc

SEQ ID NO: 47180 - DNA, 120 bp, Artificial Sequence
  ENSG00000065427_0 (sequence is synthesized)
gtactatcctccttacttttgggtcgggccctccgggaagatggcggccgtgcaggcggccgaggtgaaagtggatggcagcgagccgaaactgagcaagaatgagctgaagagacgcct

SEQ ID NO: 47181 - DNA, 120 bp, Artificial Sequence
  ENSG00000065427_1 (sequence is synthesized)
gaaagctgagaagaaagtagcagagaaggaggccaaacagaaagagctcagtgagaaacagctaagccaagccactgctgctgccaccaaccacaccactgataatggtgtgggtcctga

SEQ ID NO: 47182 - DNA, 120 bp, Artificial Sequence
  ENSG00000065427_2 (sequence is synthesized)
ggaagagagcgtggacccaaatcaatactacaaaatccgcagtcaagcaattcatcagctgaaggtcaatggggaagacccatacccacacaagttccatgtagacatctcactcactga

SEQ ID NO: 47183 - DNA, 120 bp, Artificial Sequence
  ENSG00000065427_3 (sequence is synthesized)
cttcatccaaaaatatagtcacctgcagcctggggatcacctgactgacatcaccttaaaggtggcaggtaggatccatgccaaaagagcttctgggggaaagctcatcttctatgatct

SEQ ID NO: 47184 - DNA, 120 bp, Artificial Sequence
  ENSG00000065427_4 (sequence is synthesized)
tcgaggagagggggtgaagttgcaagtcatggccaattccagaaattataaatcagaagaagaatttattcatattaataacaaactgcgtcggggagacataattggagttcaggggaa

SEQ ID NO: 47185 - DNA, 120 bp, Artificial Sequence
  ENSG00000065427_5 (sequence is synthesized)
tcctggtaaaaccaagaagggtgagctgagcatcattccgtatgagatcacactgctgtctccctgtttgcatatgttacctcatcttcactttggcctcaaagacaaggaaacaaggta

SEQ ID NO: 47186 - DNA, 120 bp, Artificial Sequence
  ENSG00000065427_6 (sequence is synthesized)
tcgccagagatacttggacttgatcctgaatgactttgtgaggcagaaatttatcatccgctctaagatcatcacatatataagaagtttcttagatgagctgggattcctagagattga

SEQ ID NO: 47187 - DNA, 120 bp, Artificial Sequence
  ENSG00000065427_7 (sequence is synthesized)
aactcccatgatgaacatcatcccagggggagccgtggccaagcctttcatcacttatcacaacgagctggacatgaacttatatatgagaattgctccagaactctatcataagatgct

SEQ ID NO: 47188 - DNA, 120 bp, Artificial Sequence
  ENSG00000065427_8 (sequence is synthesized)
accacctgtgagttctacatggcctatgcagactatcacgatctcatggaaatcacggagaagatggtttcagggatggtgaagcatattacaggcagttacaaggtcacctaccaccca

SEQ ID NO: 47189 - DNA, 120 bp, Artificial Sequence
  ENSG00000065427_9 (sequence is synthesized)
gatggcccagagggccaagcctacgatgttgacttcaccccacccttccggcgaatcaacatggtagaagagcttgagaaagccctggggatgaagctgccagaaacgaacctctttgaa

SEQ ID NO: 47190 - DNA, 120 bp, Artificial Sequence
  ENSG00000065427_10 (sequence is synthesized)
actgaagaaactcgcaaaattcttgatgatatctgtgtggcaaaagctgttgaatgccctccacctcggaccacagccaggctccttgacaagcttgttggggagttcctggaagtgact

SEQ ID NO: 47191 - DNA, 120 bp, Artificial Sequence
  ENSG00000065427_11 (sequence is synthesized)
tgcatcaatcctacattcatctgtgatcacccacagataatgagccctttggctaaatggcaccgctctaaagagggtctgactgagcgctttgagctgtttgtcatgaagaaagagata

SEQ ID NO: 47192 - DNA, 120 bp, Artificial Sequence
  ENSG00000065427_12 (sequence is synthesized)
tgcaatgcgtatactgagctgaatgatcccatgcggcagcggcagctttttgaagaacaggccaaggccaaggctgcaggtgatgatgaggccatgttcatagatgaaaacttctgtact

SEQ ID NO: 47193 - DNA, 120 bp, Artificial Sequence
  ENSG00000065427_13 (sequence is synthesized)
gccctggaatatgggctgccccccacagctggctggggcatgggcattgatcgagtcgccatgtttctcacggactccaacaacatcaaggaagtacttctgtttcctgccatgaaaccc

SEQ ID NO: 47194 - DNA, 120 bp, Artificial Sequence
  ENSG00000065427_14 (sequence is synthesized)
gaagacaagaaggagaatgtagcaaccactgatacactggaaagcacaacagttggcacttctgtctagaaaataataattgcaagttgtataactcaggcgtctttgcatttctgcgaa

SEQ ID NO: 47195 - DNA, 120 bp, Artificial Sequence
  ENSG00000065427_15 (sequence is synthesized)
agatcaaggtctgcaagggaattcttgtgtgctgctttccatttgacaccgcagttctgttcagccatcagaagagagacaaggaattaaaaatttctttttaatcctgttaccaaataa

SEQ ID NO: 47196 - DNA, 120 bp, Artificial Sequence
  ENSG00000065427_16 (sequence is synthesized)
acttttgggtcgggccctccgggaagatggcggccgtgcaggcggccgaggtgaaagtggatggcagcgagccgaaactgagcaagaagtggtggtaatcattagttccagggtgctctg

SEQ ID NO: 47197 - DNA, 120 bp, Artificial Sequence
  ENSG00000065427_17 (sequence is synthesized)
ccatgttgacgcaagctgctgtaaggcttgttagggggtccctgcgcaaaacctcctgggcagagtggggtcacagggaactgcgactgggtcaacttgctcctttcacagcgcctcaca

SEQ ID NO: 47198 - DNA, 120 bp, Artificial Sequence
  ENSG00000065427_18 (sequence is synthesized)
tcttctctttacttttagaatatcaacttttttccccagacttctggcctaatgaatgtttaggattttaccatcttattcatttaacaaatttgtattaatgtctgccctgtgccaggc

SEQ ID NO: 47199 - DNA, 120 bp, Artificial Sequence
  ENSG00000065427_19 (sequence is synthesized)
attattctaagagattggggacacagcagggaacaaaagccaagttcctgcttttgtggaaattgtattctttctttggggtagggagaagaagtagacaaacaaaaaaacaagtaaata

SEQ ID NO: 47200 - DNA, 120 bp, Artificial Sequence
  ENSG00000065427_20 (sequence is synthesized)
cgggccctccgggaagatggcggccgtgcaggcggccgaggtgaaagtggatggcagcgagccgaaactgagcaagaagtgagtgtcgctgcgagtctttaaagcctttgcggtaggaga

SEQ ID NO: 47201 - DNA, 120 bp, Artificial Sequence
  ENSG00000065427_21 (sequence is synthesized)
agaggtaaggagagttccttgcctgacgtgatgagctgccttgcaatgcttgcctcctcctctcccttgccttccttttccaaagcgtatcctgtgtcaggatccttcatgcctaatgag

SEQ ID NO: 47202 - DNA, 120 bp, Artificial Sequence
  ENSG00000065427_22 (sequence is synthesized)
aatgtccccttttcttgccatcgtctctgttctaccttgtcctgattaggaaggcaggacctgacttccaagataatggacaaggtatagggccatccacatgctaatgatgtcacattc

SEQ ID NO: 47203 - DNA, 120 bp, Artificial Sequence
  ENSG00000065427_23 (sequence is synthesized)
aatatgtattcacgtcattttgcttttttgtagcattaagaaatattttttgattatatgagaaaggcaaacacacgtaccataaaacaaattcaaacaataaattaaatagaagcaaaa

SEQ ID NO: 47204 - DNA, 120 bp, Artificial Sequence
  ENSG00000065427_24 (sequence is synthesized)
aagatgccaagatggacgccaggcagccaggagaaagatcccaaccccacccgcgcagatatccgcgaggccccgcgctcagcctcctcacccccgctatccgcggcctccgggtcctcc

SEQ ID NO: 47205 - DNA, 120 bp, Artificial Sequence
  ENSG00000065427_25 (sequence is synthesized)
agaggaacagagagagtaaagcagccaagaaagtgttctgatgggtcaggtgtgtggatgtgagtaacacttccagaatttctctacaagattaatagagcattgtagggcagagaccaa

SEQ ID NO: 47206 - DNA, 120 bp, Artificial Sequence
  ENSG00000065427_26 (sequence is synthesized)
cctccgggaagatggcggccgtgcaggcggccgaggtgaaagtggatggcagcgagccgaaactgagcaagaagtgagaagttaattcactcgtccaagtcacataattgacaagtgtgt

SEQ ID NO: 47207 - DNA, 120 bp, Artificial Sequence
  ENSG00000065427_27 (sequence is synthesized)
taggcctgcggcttcagtagcacaagggaaggtctgggttggtcttgttctcaagtagcctgtgtctgaagctactttactaaggacagtgccattatatctatacagaaagaagcagag

SEQ ID NO: 47208 - DNA, 120 bp, Artificial Sequence
  ENSG00000065427_28 (sequence is synthesized)
cagccctgagacatggaatcatattccagatgaggtagtgctacaaagagaggggctttctctataaggattcccttcatcagcaagaatcagcggtagaagtctcaggcttctaagaat

SEQ ID NO: 47209 - DNA, 120 bp, Artificial Sequence
  ENSG00000065427_29 (sequence is synthesized)
tccagtctttggcctaagaatgctttgcactgagacagtatttctagaacattgctcttttggagttgtagtatcttgggtgagatcttcttttcctaaatttaaaaaacaaaaaaaaaa

SEQ ID NO: 47210 - DNA, 120 bp, Artificial Sequence
  ENSG00000065427_30 (sequence is synthesized)
gtcacagtctctgagaattaacctgtttggagtcccagagccccaagcagcagaagggttttctttcagagaaatttgtatgtgttctgaggtcgatttcatcagtcctgacctccaggt

SEQ ID NO: 47211 - DNA, 120 bp, Artificial Sequence
  ENSG00000065427_31 (sequence is synthesized)
ctttgaaagaaacggctgcatcttggagttactaggaaatgaattcccagcaagtcctgagtgtcaggagcatctctggaatgatggtactcccacctcggagcctggtaacatgttcac

SEQ ID NO: 47212 - DNA, 120 bp, Artificial Sequence
  ENSG00000065457_0 (sequence is synthesized)
gtgacgtcacgtccgccttaccggcggattaagctcgctttcttctaggcgcgtttcctgaaggtcgatggccaggtggtcttcataaactatactgccttgtgatgcctccctagaaat

SEQ ID NO: 47213 - DNA, 120 bp, Artificial Sequence
  ENSG00000065457_1 (sequence is synthesized)
gagaggtctcaataccagctcagaccatgtggaccgcggatgagattgctcagctatgctatgaacactatgggatcaggctgcccaagaaggggaagcctgagccaaaccatgagtgga

SEQ ID NO: 47214 - DNA, 120 bp, Artificial Sequence
  ENSG00000065457_2 (sequence is synthesized)
cattattggcagcggtggtgaagatacaatctccagctgacaaggcctgcgacacccctgataagccggtgcaagtgacaaaggaagttgtgtcaatgggaacaggaacaaaatgcatag

SEQ ID NO: 47215 - DNA, 120 bp, Artificial Sequence
  ENSG00000065457_3 (sequence is synthesized)
gacagtccaaaatgaggaagaacggagacatcctcaatgatagccatgctgaggtcatagccagaaggagtttccaaaggtaccttctccaccaactccagttggcagccaccctgaaag

SEQ ID NO: 47216 - DNA, 120 bp, Artificial Sequence
  ENSG00000065457_4 (sequence is synthesized)
aggatagcatctttgtcccaggaactcaaaaaggagtgtggaaacttagacgagacctcatttttgtgtttttctccagccatacaccctgtggggatgcctccatcattccgatgcttg

SEQ ID NO: 47217 - DNA, 120 bp, Artificial Sequence
  ENSG00000065457_5 (sequence is synthesized)
agtttgaagatcagccttgctgtcctgtcttcagaaattgggcccacaactcatcagtagaagccagtagtaacctggaagctcctggaaatgaaagaaaatgtgaagaccctgacagtc

SEQ ID NO: 47218 - DNA, 120 bp, Artificial Sequence
  ENSG00000065457_6 (sequence is synthesized)
ctgtaaccaaaaagatgaggcttgagcctgggactgcagccagggaggtcaccaacggagcagctcaccatcagagttttggcaagcagaaaagtggcccaatctcaccaggcatccaca

SEQ ID NO: 47219 - DNA, 120 bp, Artificial Sequence
  ENSG00000065457_7 (sequence is synthesized)
acgtttatagaactggagccaagtgtgtacctggagaagctggagactccggaaagccgggtgctgcgtttcaccaggtggggctgctccgagtgaagccaggccgtggagacagaacac

SEQ ID NO: 47220 - DNA, 120 bp, Artificial Sequence
  ENSG00000065457_8 (sequence is synthesized)
gctccatgtcctgtagtgacaagatggcccgatggaacgtcctcggatgccaaggggcactgttgatgcacttgctggaagagcccatctacctgtcagctgtggtcattgggaagtgcc

SEQ ID NO: 47221 - DNA, 120 bp, Artificial Sequence
  ENSG00000065457_9 (sequence is synthesized)
catacagccaggaagccatgcagagagcactgattggaaggtgtcagaatgtgtctgctttaccaaaaggcttcggagttcaagaattaaaaatactgcagtcagatttactatttgaac

SEQ ID NO: 47222 - DNA, 120 bp, Artificial Sequence
  ENSG00000065457_10 (sequence is synthesized)
agagccgcagtgcggtgcaggcaaaaagggctgatagcccaggtcgacttgttccttgtggggcagccatcagctggagtgcagttcctgagcagcctttggatgttactgccaatggct

SEQ ID NO: 47223 - DNA, 120 bp, Artificial Sequence
  ENSG00000065457_11 (sequence is synthesized)
ttccacagggaacaacaaagaaaacaattggaagccttcaggcaagatcccaaatcagcaaagtggaactcttcagatcattccagaagctgctaagcagaattgcaagggacaagtggc

SEQ ID NO: 47224 - DNA, 120 bp, Artificial Sequence
  ENSG00000065457_12 (sequence is synthesized)
cacactccctcagggtgcagaagctggatacctaccaggagtacaaggaggctgcgtcctcttaccaggaagcctggagcacactccggaagcaggtgtttggatcctggatcagaaacc

SEQ ID NO: 47225 - DNA, 120 bp, Artificial Sequence
  ENSG00000065457_13 (sequence is synthesized)
caccggattatcaccagttcaagtgagaaggaaatgtttgctctggtagcaggacccttcatcctgaactgccttcctccacgcaggacaagtcttagcttttttggtagttaaatcagg

SEQ ID NO: 47226 - DNA, 120 bp, Artificial Sequence
  ENSG00000065457_14 (sequence is synthesized)
gaacattctttctgagctttgcatctctgttgtgtaatacagatggaatctggaacttagagcaagctatacttgattgaagtagctctctgctaaaatggcatctcactaatgacctca

SEQ ID NO: 47227 - DNA, 120 bp, Artificial Sequence
  ENSG00000065457_15 (sequence is synthesized)
gtgagccaccgcacctggagacatcctcaatgatagccatgctgaggtcatagccagaaggagtttccaaaggtaccttctccaccaactccagttggcagccaccctgaaagaggatag

SEQ ID NO: 47228 - DNA, 120 bp, Artificial Sequence
  ENSG00000065457_16 (sequence is synthesized)
ttttagcttgttgaaactgttcagagatgcggtcttgtgggcaaataaatgcctgtttagctgagctgttattttcagctaagaagttcttcaagttttcaagatctaggagggggtgta

SEQ ID NO: 47229 - DNA, 120 bp, Artificial Sequence
  ENSG00000065457_17 (sequence is synthesized)
ggctcgaattataatggacccagtgtagcaaaacatttattcatttaaacaattgtgcatgctcattcagacgcactacctgagtgagatgatgccgttctgggctgcttcatcttaaag

SEQ ID NO: 47230 - DNA, 120 bp, Artificial Sequence
  ENSG00000065457_18 (sequence is synthesized)
agagtcactgtttcttctggcaacttctacctgccttgcctatcgaggtttgtgaattgcacctctggtttaatttcaggtcgatggccaggtggtcttcataaactatactgccttgtg

SEQ ID NO: 47231 - DNA, 120 bp, Artificial Sequence
  ENSG00000065457_19 (sequence is synthesized)
cagaagctgctaagcagaattgcaagggacaagtggccacactccctcagcttctgatggctcctggcagtccttggcttgtggctgcatcacttcagtttctccctccgtcttcacatg

SEQ ID NO: 47232 - DNA, 120 bp, Artificial Sequence
  ENSG00000065457_20 (sequence is synthesized)
taatccagtctgatttcatcttaactaactagatctgcaaagactctatttccaactaaagtcacattctgaggtttcaggtagacatgaagttttgggggacaccactcaacccattgc

SEQ ID NO: 47233 - DNA, 120 bp, Artificial Sequence
  ENSG00000065457_21 (sequence is synthesized)
agaacccattagcagtcacttcccgttcctcaacgccccctaccccagggcaatcagtaatctactttctgtctgtttggatttgtctattctgaacatttcatataaatggaatcatag

SEQ ID NO: 47234 - DNA, 120 bp, Artificial Sequence
  ENSG00000065457_22 (sequence is synthesized)
ccatgcaggacaaagacacttgcagaaactccaaagcttagaggctcccgggaactggtgacaaagaccaagtgaatccttcattatatgacagtggggaaactaaggagtagctagaaa

SEQ ID NO: 47235 - DNA, 120 bp, Artificial Sequence
  ENSG00000065457_23 (sequence is synthesized)
tgacttccattgtgttttattgcttctctaaaatatgaaatcagagtttggaacatgatgctttgaaagtactctgcagcagctctgttttatgggttcctacattgattcagcaaatat

SEQ ID NO: 47236 - DNA, 120 bp, Artificial Sequence
  ENSG00000065457_24 (sequence is synthesized)
gcgaatatatattttgtattcccagcctttctttcttcagggagccattcttttcccattcttcagtgatcctgctctgtgcctcagacttggctgaagctaaccttactccctggctct

SEQ ID NO: 47237 - DNA, 120 bp, Artificial Sequence
  ENSG00000065457_25 (sequence is synthesized)
aggaatagcctgtgagccagccctggactgccctggacttgttctcagaggtatcaggaaaggctttctgttttgatctggagctgtaagggtcacataatcatgggactgccggtggcc

SEQ ID NO: 47238 - DNA, 120 bp, Artificial Sequence
  ENSG00000065457_26 (sequence is synthesized)
atcttttcctactacctagagaaagccagcaaagaatgaaggcaacaaaggaaacagccaagagaatcaaagatctagtaacactgtttagatgtctcaattatgtgagacagattcctg

SEQ ID NO: 47239 - DNA, 120 bp, Artificial Sequence
  ENSG00000065457_27 (sequence is synthesized)
gacagattcctgttgttattttgattaagcctgtttgtgttggttttctgacttacaattgaaagagttctgtccaaaaagccaaaaggtggccaggcttggtggctcaggcctgtaatc

SEQ ID NO: 47240 - DNA, 120 bp, Artificial Sequence
  ENSG00000065457_28 (sequence is synthesized)
cttctaggcgcgtttcctgaaggtgggaggggagcgtccgcgaggcgctggggcgacggggcaggtttatccgggctaactttgccgagtctgtttttgagggaagaggttgtgaggatc

SEQ ID NO: 47241 - DNA, 120 bp, Artificial Sequence
  ENSG00000065457_29 (sequence is synthesized)
gtatcttccgggacgcgtttcacgtgggaaggcgctccacgcctggaactgtcagcagccggcgcctgaagagctcctggcgcggggcctctggcctggcagccgcaggacccaatggat

SEQ ID NO: 47242 - DNA, 120 bp, Artificial Sequence
  ENSG00000065457_30 (sequence is synthesized)
ccgggaaggggctctgcttccggaagtgtttaggaagggagccagcgtaaaccagagtcccttcctccaagcatcgctgaagccttttctcccctggcagccgacttccttttctttgga

SEQ ID NO: 47243 - DNA, 120 bp, Artificial Sequence
  ENSG00000065457_31 (sequence is synthesized)
aaggacgtcgatggccaggtggtcttcataaactatactgccttgtgatgcctccctagaaatgagaggtctcaataccagctcagaccatgtggaccgcggatgagattgctcagctat

SEQ ID NO: 47244 - DNA, 120 bp, Artificial Sequence
  ENSG00000065485_0 (sequence is synthesized)
agacgtggcaccgggaactcggaggcggggagcggctgggaagtggccgtggtggttggccgcggtggagctagcaggcgggcgggcgggagcgggcgccggagtggagaaaggagccag

SEQ ID NO: 47245 - DNA, 120 bp, Artificial Sequence
  ENSG00000065485_1 (sequence is synthesized)
cggtgggcagcgctgctgggatggcgcgggccgggccggcgtggctgctgctggcaatctgggtggtcctgccatcatggctgtcctctgcaaaggtctcctcgctcattgagagaatct

SEQ ID NO: 47246 - DNA, 120 bp, Artificial Sequence
  ENSG00000065485_2 (sequence is synthesized)
ctgaccccaaggacttgaaaaaactgctcagaacccggaataatgtactggtgctttactccaaatctgaggtggcagctgaaaatcatctcaggttactgtccacagtggcccaggcgg

SEQ ID NO: 47247 - DNA, 120 bp, Artificial Sequence
  ENSG00000065485_3 (sequence is synthesized)
tgaaaggacaagggaccatctgctgggtggactgtggtgatgcagagagtagaaaattgtgcaagaagatgaaagttgacctgagcccgaaggacaaaaaggttgaattattccattacc

SEQ ID NO: 47248 - DNA, 120 bp, Artificial Sequence
  ENSG00000065485_4 (sequence is synthesized)
aggatggtgcatttcatactgaatataaccgagctgtgacatttaagtccatagtggcctttttgaaggatccaaaagggcccccactgtgggaggaagatcctggagccaaagatgttg

SEQ ID NO: 47249 - DNA, 120 bp, Artificial Sequence
  ENSG00000065485_5 (sequence is synthesized)
tccaccttgacagtgaaaaggacttcagacggctcctgaagaaggaagagaagccgctcctgatcatgttttatgccccctggtgcagcatgtgcaagaggatgatgccgcatttccaga

SEQ ID NO: 47250 - DNA, 120 bp, Artificial Sequence
  ENSG00000065485_6 (sequence is synthesized)
aggctgcgactcagctgcgaggccacgccgtgctggccgggatgaatgtctactcctctgaatttgaaaacatcaaggaggagtacagcgtgcgcggcttccccaccatctgctattttg

SEQ ID NO: 47251 - DNA, 120 bp, Artificial Sequence
  ENSG00000065485_7 (sequence is synthesized)
gctgaggacattgtggagtggctgaagaatccgcagccgccacagccccaggtccctgagactccctgggcagatgagggcggctccgtttatcacctgaccgatgaagactttgaccag

SEQ ID NO: 47252 - DNA, 120 bp, Artificial Sequence
  ENSG00000065485_8 (sequence is synthesized)
tttgtgaaggaacactcctctgtcctcgtcatgttccacgccccatggtgtggccactgtaagaaaatgaagccggagtttgagaaggcagcagaagccctccatggagaagcggatagc

SEQ ID NO: 47253 - DNA, 120 bp, Artificial Sequence
  ENSG00000065485_9 (sequence is synthesized)
tctggtgtccttgcagctgtcgatgccactgtcaacaaggccctggcagaaagattccacatctcagagtttcctacgttgaagtattttaagaatggagagaaatacgcagtgcctgtg

SEQ ID NO: 47254 - DNA, 120 bp, Artificial Sequence
  ENSG00000065485_10 (sequence is synthesized)
ctcaggacaaagaagaagtttctcgagtggatgcaaaaccctgaggcccccccgcccccagagcccacgtgggaagagcagcagacaagcgtgttgcacctggtgggggacaacttccgg

SEQ ID NO: 47255 - DNA, 120 bp, Artificial Sequence
  ENSG00000065485_11 (sequence is synthesized)
gagaccctgaagaagaagaaacacaccttggtcatgttctacgccccttggtgcccacactgtaagaaggtcattccgcactttactgctactgctgatgccttcaaagatgaccgaaag

SEQ ID NO: 47256 - DNA, 120 bp, Artificial Sequence
  ENSG00000065485_12 (sequence is synthesized)
attgcctgtgccgctgttgactgtgtcaaagacaagaaccaagacctgtgccagcaggaggcggtcaagggctaccccactttccactactaccactatgggaagttcgcagaaaagtat

SEQ ID NO: 47257 - DNA, 120 bp, Artificial Sequence
  ENSG00000065485_13 (sequence is synthesized)
gacagcgaccgcacagaattgggatttaccaattatattcgagccctccgggagggagaccatgaaagactagggaaaaagaaggaagagttataattcctgcctcagaaaaagcttttc

SEQ ID NO: 47258 - DNA, 120 bp, Artificial Sequence
  ENSG00000065485_14 (sequence is synthesized)
cattacactgtgaatgatacctgttttgttgtttctgaatttccacatgttctgaagacaaattttttatagccgcttatggccattttgtacaattttgaaataaaattaaaccattta

SEQ ID NO: 47259 - DNA, 120 bp, Artificial Sequence
  ENSG00000065485_15 (sequence is synthesized)
atttacacaaagtgcttaatttctttttaatgcatcaaattttattatttctgacatcttactgtgttcatgcagctgtaagaaaagcacagagcaggctgggcgcggtggctcacgcct

SEQ ID NO: 47260 - DNA, 120 bp, Artificial Sequence
  ENSG00000065485_16 (sequence is synthesized)
gacagagcaagactctatctcaaaacaaaaaaaaaagaaagaaaaggacagagcagtttctatcccaaaaaattcccatcatgtcatatggggacaattagaatgtaattatgtcccata

SEQ ID NO: 47261 - DNA, 120 bp, Artificial Sequence
  ENSG00000065485_17 (sequence is synthesized)
cttatgcttctgtgaatttttgtgcccagctcaaggcctcagactgccttctgtccagagaagatgatgatggtgatcacagcatggtgccacaacctacacgctgcctgcagctagggc

SEQ ID NO: 47262 - DNA, 120 bp, Artificial Sequence
  ENSG00000065485_18 (sequence is synthesized)
ctctcaccagatggttgggttttcaacccagctctgtgaccatggctgtgtatatggccttgggcagtcacctgccctcttggtgcctcaattgtctaatccatagaatggagataatgt

SEQ ID NO: 47263 - DNA, 120 bp, Artificial Sequence
  ENSG00000065485_19 (sequence is synthesized)
cagttcctactttgtggggtagttatgaggctgtaaggcactggtcagtacctggcacaccagttgcccgtattatttatgcagttgttttatttttgtgtctggggtaccttcccacta

SEQ ID NO: 47264 - DNA, 120 bp, Artificial Sequence
  ENSG00000065485_20 (sequence is synthesized)
ccccaacccacttctggtggattatgcaaaatatttcttttctttgagctggtgctgctgctgcttttctcaggtgtctgggaatgggactgagctgccttacagaggcggcgcagggga

SEQ ID NO: 47265 - DNA, 120 bp, Artificial Sequence
  ENSG00000065485_21 (sequence is synthesized)
cagggaaacttccactgaggaggggcagcactgggcagcatcccagaaactgcagaagtcagctggaacactgcaccgagaggcccaggccctgggcctggctgaggcttgacattgttg

SEQ ID NO: 47266 - DNA, 120 bp, Artificial Sequence
  ENSG00000065485_22 (sequence is synthesized)
gaggagagtcccaaggggttgccacagatgtcctgtccccagaggcaggctggactccagatgccgagggttttctcacttgctggtcggggctggtgcaagccacgcagaccctctcca

SEQ ID NO: 47267 - DNA, 120 bp, Artificial Sequence
  ENSG00000065485_23 (sequence is synthesized)
ccttgcagaagtctgcccacctctccctgtcataggagtgaccccctggaggggctgggggtgtggggagagagagtgcacagccagctcagggattaaagctctttctctctctctctc

SEQ ID NO: 47268 - DNA, 120 bp, Artificial Sequence
  ENSG00000065485_24 (sequence is synthesized)
atggcatgaacccaggaggcggagcttgcgggtgtggccactgtaagaaaatgaagccggagtttgagaaggcagcagaagccctccatggagaagcggatctgtcgatgccactgtcaa

SEQ ID NO: 47269 - DNA, 120 bp, Artificial Sequence
  ENSG00000065485_25 (sequence is synthesized)
gggcactgggtgctacgcgggagacagcgggcgtcccggtgccctcgccgccaagcgctcccggacgcaggggcaggaggcagctgtggggcgccgggagatccctggcagggtgcttac

SEQ ID NO: 47270 - DNA, 120 bp, Artificial Sequence
  ENSG00000065485_26 (sequence is synthesized)
gccacggccacaactttgcggggatgcaggtcggggcacagccggtcgggcaggacgccggcgggctgcggggtgagctccgctccagactccgagccctgcacctgtgtggtcctgcca

SEQ ID NO: 47271 - DNA, 120 bp, Artificial Sequence
  ENSG00000065485_27 (sequence is synthesized)
tgttggttgaaatgtctatgattttatctgcctcagtcattcgtgtcagagatggactgccactttctgcttctactgattatgaacaaagcacaggaatgcaggagtgcagaaagtatt

SEQ ID NO: 47272 - DNA, 120 bp, Artificial Sequence
  ENSG00000065485_28 (sequence is synthesized)
aaaatgctttcgaggaaacttgctcaacttcctgatagatgtacactgaaaactggacattataacattaattttattagctctctgggagtgagctacatgatgttgtgcactgaaaat

SEQ ID NO: 47273 - DNA, 120 bp, Artificial Sequence
  ENSG00000065485_29 (sequence is synthesized)
tacccaaatgttctcgccttctctttcctggatgagcttcagaaggagttcattactacttataacatgatgaagacaaatactgctgtcagaccatactgtttcattgaatttgataac

SEQ ID NO: 47274 - DNA, 120 bp, Artificial Sequence
  ENSG00000065485_30 (sequence is synthesized)
ttcattcagaggaccaagcagcgatataataatcccaggtctctttcaacaaagataaatctttctgacatgcagacggaaatcaagctgaggcctccttatcaaatttccatgtgcgaa

SEQ ID NO: 47275 - DNA, 120 bp, Artificial Sequence
  ENSG00000065491_0 (sequence is synthesized)
acatccaagatggcgtccccaggagctgggagcgggtgaccggcggcggggaagcggcctgggttggccctcagattgcggggtctgggggcatctcgccgggcaaacccttggcccgcc

SEQ ID NO: 47276 - DNA, 120 bp, Artificial Sequence
  ENSG00000065491_1 (sequence is synthesized)
tacaaggacttcccccggccagagcaatggccgctgagaacagcaagcagttttggaagaggagcgctaagctgccggggagcattcagcctgtatatggagcacagcatcctcctcttg

SEQ ID NO: 47277 - DNA, 120 bp, Artificial Sequence
  ENSG00000065491_2 (sequence is synthesized)
acccacggctcaccaaaaatttcattaaagaacgatcaaaagtcaacacagttcctctgaagaataagaaggcctccagttttcatgagtttgcacggaataccagtgatgcttgggaca

SEQ ID NO: 47278 - DNA, 120 bp, Artificial Sequence
  ENSG00000065491_3 (sequence is synthesized)
ttggcgatgatgaggaagaggacttttcctcaccttctttccaaactctgaactcaaaagttgctttggcaactgcagcccaagttctagaaaaccacagcaagctgagagtaaaaccag

SEQ ID NO: 47279 - DNA, 120 bp, Artificial Sequence
  ENSG00000065491_4 (sequence is synthesized)
aacggtcccagtcaacgacatcggacgtccctgccaactacaaggtcataaagtccagcagtgatgcccagctgtccagaaactctagtgatacatgcctgaggaacccactccacaaac

SEQ ID NO: 47280 - DNA, 120 bp, Artificial Sequence
  ENSG00000065491_5 (sequence is synthesized)
agcaatcactccctctccggcccatcatccccctcgttgcccggatctcggatcagaacgcttctggggcccccccaatgactgtccgggagaaaacccgcctagaaaaattccgtcaac

SEQ ID NO: 47281 - DNA, 120 bp, Artificial Sequence
  ENSG00000065491_6 (sequence is synthesized)
ttctctccagccagaacactgacttagatgaactgaggaagtgtagctggccaggggttcccagggaggttcgacctataacctggagactcctgtcgggctatctcccagcaaacactg

SEQ ID NO: 47282 - DNA, 120 bp, Artificial Sequence
  ENSG00000065491_7 (sequence is synthesized)
agaggaggaagttgaccctgcagcggaagcgggaggaatattttggcttcattgaacagtattatgactctcgaaacgaggaacatcaccaggatacctacagacagattcacattgaca

SEQ ID NO: 47283 - DNA, 120 bp, Artificial Sequence
  ENSG00000065491_8 (sequence is synthesized)
ttccaaggacgaatcctctcattccgttgttccagcaaccacttgtacaggagatctttgaaagaattctatttatttgggccatccgccaccctgccagtgggtatgtccagggaatta

SEQ ID NO: 47284 - DNA, 120 bp, Artificial Sequence
  ENSG00000065491_9 (sequence is synthesized)
atgacctggtcactccattctttgtcgtcttcctctcagaatatgtggaagaggatgtggagaactttgacgtgaccaacttgtctcaagacatgctgcgaagcattgaggctgacagct

SEQ ID NO: 47285 - DNA, 120 bp, Artificial Sequence
  ENSG00000065491_10 (sequence is synthesized)
tttggtgcatgagcaagctgctggatggaatccaggataactacacctttgcacaaccaggaatccagaagaaggtgaaggcactggaagagcttgtcagccggattgatgagcaggtac

SEQ ID NO: 47286 - DNA, 120 bp, Artificial Sequence
  ENSG00000065491_11 (sequence is synthesized)
ataatcacttcaggaggtacgaggtagaatacctgcagtttgccttccgctggatgaacaacctgcttatgcgggagcttcctcttcgctgcaccatccgcctgtgggacacatatcagt

SEQ ID NO: 47287 - DNA, 120 bp, Artificial Sequence
  ENSG00000065491_12 (sequence is synthesized)
ctgaaccagaagggttctcccactttcatctctacgtgtgtgcagccttcttgatcaagtggaggaaagagatcttggatgaggaggattttcagggtctcctcatgctgctacagaacc

SEQ ID NO: 47288 - DNA, 120 bp, Artificial Sequence
  ENSG00000065491_13 (sequence is synthesized)
tacctacaatacactggggcaacgaagaaattgggctgcttctcgccgaggcatacagactcaagtacatgtttgccgatgccccaaatcactaccgccgataggtgctgtctcctccgg

SEQ ID NO: 47289 - DNA, 120 bp, Artificial Sequence
  ENSG00000065491_14 (sequence is synthesized)
cccaccgcccaggtcttaactttctggcatccaccactccatgtctctggatgtgtcacttggaccactgtcagtattccatgccgcgtggatgggcccagttctgggagaggacagaaa

SEQ ID NO: 47290 - DNA, 120 bp, Artificial Sequence
  ENSG00000065491_15 (sequence is synthesized)
aggtggtacagggttgtctgcccctttaaaagaaactggacaaagaaggggaaggctcagggtctcacctcacattgtccctacaaggacaggccccaactgataaccgttgcttttttt

SEQ ID NO: 47291 - DNA, 120 bp, Artificial Sequence
  ENSG00000065491_16 (sequence is synthesized)
tttttgtgaacatagtttgatttgatcacaggtcaaaaacgccttatattttcgaaagactcctggcccctcttccctcttcctggtttcctagccgttccccttctgccccagtctgag

SEQ ID NO: 47292 - DNA, 120 bp, Artificial Sequence
  ENSG00000065491_17 (sequence is synthesized)
ccagtgaggggtagctttttaaaaccattattctagatggaggaggcactgatgcttgtaactctggaaagaggcctacacccaagggctaggaattttatttttccttttctcaccagg

SEQ ID NO: 47293 - DNA, 120 bp, Artificial Sequence
  ENSG00000065491_18 (sequence is synthesized)
tgtctgcatgtgtgtgtgggtgtgaatgtgtatacatgcccatcagcatttagtcacatgtctgaatttctgtgtccagacgagccccatcaaactagttgggaagggccccagtgacca

SEQ ID NO: 47294 - DNA, 120 bp, Artificial Sequence
  ENSG00000065491_19 (sequence is synthesized)
agtgtataagcatcccttgaagagggattggggcaggggaggcagaaggggctctccagaccccttttccatgatgacccactccaagatattatgtgtaaattgtgttattatgtatat

SEQ ID NO: 47295 - DNA, 120 bp, Artificial Sequence
  ENSG00000065491_20 (sequence is synthesized)
gggtaaagatgtacaaatatatgtcctctttgtagcagatatgattttatatttataatgtgcatcaacatgtgaaagcaatctaggtcactagcacagaggaagttgccaggaaggtgg

SEQ ID NO: 47296 - DNA, 120 bp, Artificial Sequence
  ENSG00000065491_21 (sequence is synthesized)
cttcagcacctccaggttggttctgggtgtcctgctgtgaggggtagaacgggaggctgctgaagtgagtagctgagcagctggagccatcccaagcatcagtgtctcagagtcctcctc

SEQ ID NO: 47297 - DNA, 120 bp, Artificial Sequence
  ENSG00000065491_22 (sequence is synthesized)
gcccctttcttcaccccgccccccaacccccagactttcctggagcatctgccctttgctcctagcagcctccccaggaagggactgcagaggcgggcaagccctctctatgtgttttta

SEQ ID NO: 47298 - DNA, 120 bp, Artificial Sequence
  ENSG00000065491_23 (sequence is synthesized)
tccccaccttccccggaatctggggagggcttttgtttttacgttttcaagttcagcattgtattcggacagaagctgtgactgaagactcagtgccaaggaaaggggcttcttgtgtgt

SEQ ID NO: 47299 - DNA, 120 bp, Artificial Sequence
  ENSG00000065491_24 (sequence is synthesized)
ccctcgggtttggggctcttctcagagagcagcactccatatcccttactgtcaccttcactccccacacagctcatgagatgtgtgacccctgtttgagttttggtatttggtagtgga

SEQ ID NO: 47300 - DNA, 120 bp, Artificial Sequence
  ENSG00000065491_25 (sequence is synthesized)
gggtggggggatgggggccagcagctgtcatcctcctgggaagccgagcagtgtccctggtgggtaacaccctcaagtctctttgccagtgaggccccaccacatcggtgtgagttaggt

SEQ ID NO: 47301 - DNA, 120 bp, Artificial Sequence
  ENSG00000065491_26 (sequence is synthesized)
ttctcatctggagctgtttctcaggcattcttcccaaccctcttccttttccccttcggtgtgcctcagtggtctccttcatagagtgagagggcttgagaccctccctcaaccggacta

SEQ ID NO: 47302 - DNA, 120 bp, Artificial Sequence
  ENSG00000065491_27 (sequence is synthesized)
attaaagaaagacacttgtgttcccaagtggtggttttatttttttagtttttatgtttgtatgggaaattgtggataaagtgaaaagaattgtaaataaatggtgtatttcctcctcca

SEQ ID NO: 47303 - DNA, 120 bp, Artificial Sequence
  ENSG00000065518_0 (sequence is synthesized)
gcaattgtgccctggttcgccaagatgtcgttcccaaagtataagccgtcgagcctgcgcactctgcctgagaccctcgacccagccgaatacaacatatctccggaaacccggcgggcg

SEQ ID NO: 47304 - DNA, 120 bp, Artificial Sequence
  ENSG00000065518_1 (sequence is synthesized)
caagccgagcggttggccataagagcccagctgaaacgagagtacctgcttcagtacaacgatcccaaccgccgagggctcatcgaaaatcctgccttgcttcgttgggcctatgcaaga

SEQ ID NO: 47305 - DNA, 120 bp, Artificial Sequence
  ENSG00000065518_2 (sequence is synthesized)
ggagctctgtgtggatttgggcccctcatcttcatttattatattatcaaaactgagagggataggaaagaaaaacttatccaggaaggaaaattggatcgaacatttcacctctcatat

SEQ ID NO: 47306 - DNA, 120 bp, Artificial Sequence
  ENSG00000065518_3 (sequence is synthesized)
taagtctggcaatgatgactatatgtattcctgcctaaataaatcatctattaatcattaagtagtagtttctctttcttagtattaccttgattcaatgttaaaaactattaacaccct

SEQ ID NO: 47307 - DNA, 120 bp, Artificial Sequence
  ENSG00000065518_4 (sequence is synthesized)
aacaacacagaagcagacgcagcccgtgttgggaatctgctgtcagagtgacagcaaacatttgctgtacattgaatgaatgaacataaacttcattaaactgtgagctcttagaaagta

SEQ ID NO: 47308 - DNA, 120 bp, Artificial Sequence
  ENSG00000065518_5 (sequence is synthesized)
agagaccacgcaaagggtcggccaccgctcccgatcagtatctcagacgcaggaaaatcctgccttgcttcgttgggcctatgcaagaacaataaatgtctatcctaatttcagacccac

SEQ ID NO: 47309 - DNA, 120 bp, Artificial Sequence
  ENSG00000065518_6 (sequence is synthesized)
tagtatttgagtgataggttcactttctagggaccagctgcagctccttctcttgaagattgccaccagtgcccctcccaccttggggctgtcctctgccttcccttcctctcttctttt

SEQ ID NO: 47310 - DNA, 120 bp, Artificial Sequence
  ENSG00000065518_7 (sequence is synthesized)
atctttattcctttccagcaggagttaaaacagaaagttttcagtcacctttgtctatttttgttagttcatttgttttttaaaaagatgatgtttattgggttaagtattagcagaata

SEQ ID NO: 47311 - DNA, 120 bp, Artificial Sequence
  ENSG00000065518_8 (sequence is synthesized)
cataaatcatttagtacgtttcctgtttgcgtgaattctatttatgttggtcacattttgcaaattaatgttaaaacctattaatactctacggacagagaagcacaagctgcctgtgtg

SEQ ID NO: 47312 - DNA, 120 bp, Artificial Sequence
  ENSG00000065518_9 (sequence is synthesized)
catcgataggaaagaaaaacttatccaggaaggaaaattggatcgaacatttcacctctcatattaagtctggcaatgatgactatatgtattcctgcctaaataaatcatctattaatc

SEQ ID NO: 47313 - DNA, 120 bp, Artificial Sequence
  ENSG00000065518_10 (sequence is synthesized)
tgaaagatctttcctgaagctgtttaggaatattcatgatatacccttaactgttctagagaacaaaatgcgtctgtgctccttcacaaaagtccctatgaatttgtttctcaatgtgat

SEQ ID NO: 47314 - DNA, 120 bp, Artificial Sequence
  ENSG00000065518_11 (sequence is synthesized)
actaaaccctgagctgcagcccccaggcttgtgttgccactggagcccactcgtctagctttgtctttaactggcccatctgcattcccattagagttcgtgtattttgattatctggtg

SEQ ID NO: 47315 - DNA, 120 bp, Artificial Sequence
  ENSG00000065518_12 (sequence is synthesized)
aatgatctacttaacagaaaggtagtccacattttcccagaaagtgtttgcattttgctttcaatatatggttttatgggataatatatttctaatgactaaaatgtgagtaagatgttt

SEQ ID NO: 47316 - DNA, 120 bp, Artificial Sequence
  ENSG00000065518_13 (sequence is synthesized)
ttgaataggagcattttcttactgtgtctttagttcctcggattactgtttcttcgcacactccctgggctttagacagtgggattgcaattaggtttggagtgtttcattctgtttgtc

SEQ ID NO: 47317 - DNA, 120 bp, Artificial Sequence
  ENSG00000065518_14 (sequence is synthesized)
agttgtacggtgggttgtgccaaaatgcagtttttcttaccttttttatttatttatttttatctaatatagccaactggcagaatatattgtctttaatgtactttttttctgtcttta

SEQ ID NO: 47318 - DNA, 120 bp, Artificial Sequence
  ENSG00000065518_15 (sequence is synthesized)
caggataggaaagaaaaacttatccaggaaggaaaattggatcgaacatttcacctctcatattaagtctggcaatgatgactatatgtattcctgcctaaataaatcatctattaatca

SEQ ID NO: 47319 - DNA, 120 bp, Artificial Sequence
  ENSG00000065526_0 (sequence is synthesized)
cagctccgtcgtagtcgctgccgcccgtgtcccgctcgcccctcctcccgctcccccgcccgcccctgcccgggcgcatgcgctgccggagcgcgagggtcggcttcgggtgtgtggtgg

SEQ ID NO: 47320 - DNA, 120 bp, Artificial Sequence
  ENSG00000065526_1 (sequence is synthesized)
gcgagggtcggcttcgggtgtgtggtggcggcagagctgagctgcgaggcccgagagtcagaacctgggggagagggatggtctctgcacgggggggagccggaggagccgccgccgctg

SEQ ID NO: 47321 - DNA, 120 bp, Artificial Sequence
  ENSG00000065526_2 (sequence is synthesized)
ccgccgccgccccggcacccgcctcccggcgctgacggtctcgtacgaagccggcgagggggagccagcagcggcggtcgccggcacgccgcccagcatggtccgggaaaccaggcatct

SEQ ID NO: 47322 - DNA, 120 bp, Artificial Sequence
  ENSG00000065526_3 (sequence is synthesized)
catggtccgggaaaccaggcatctctgggtgggcaacttacccgagaacgtgcgggaagagaagatcatcgagcatttcaaacgatatggccgcgtggaaagtgtcaaaattcttcccaa

SEQ ID NO: 47323 - DNA, 120 bp, Artificial Sequence
  ENSG00000065526_4 (sequence is synthesized)
gaggggatctgaaggaggagtggctgcctttgtggattttgtggacatcaaaagtgcacagaaagctcacaactcggtcaacaaaatgggtgacagagacctacgcacggattataatga

SEQ ID NO: 47324 - DNA, 120 bp, Artificial Sequence
  ENSG00000065526_5 (sequence is synthesized)
accaggcaccatcccgagtgctgctcggggattggatgatacagtttccatagcatctcgtagtagagaggtttctgggttcagaggaggtggtggagggcctgcttatggtcccccacc

SEQ ID NO: 47325 - DNA, 120 bp, Artificial Sequence
  ENSG00000065526_6 (sequence is synthesized)
gtcacttcatgcacgagaaggacgttatgagcggagacttgatggggcttcagataacagggagcgtgcttatgaacatagtgcctatggacaccatgaacgggggacgggaggatttga

SEQ ID NO: 47326 - DNA, 120 bp, Artificial Sequence
  ENSG00000065526_7 (sequence is synthesized)
tcggacaagacattacgatcaggattactatagagatcctcgagagcggactttacaacatgggctctattacgcttctcggagtcgaagtccaaatcgctttgatgctcatgacccccg

SEQ ID NO: 47327 - DNA, 120 bp, Artificial Sequence
  ENSG00000065526_8 (sequence is synthesized)
atatgaacctagggctcgcgagcagtttacactgcccagtgtggtacacagggatatctacagggatgatattacccgggaggtacgaggcagaaggccagagcggaattaccagcacag

SEQ ID NO: 47328 - DNA, 120 bp, Artificial Sequence
  ENSG00000065526_9 (sequence is synthesized)
caggagtcggtcaccacattcatcccagtctagaaatcagtctcctcagagactggctagccaagcatctagacccacaaggtcccctagcggcagcggctctagaagtagatcctccag

SEQ ID NO: 47329 - DNA, 120 bp, Artificial Sequence
  ENSG00000065526_10 (sequence is synthesized)
tagtgattcaatcagcagcagcagtagtaccagcagtgacagcagtgattccagcagtagttcaagtgatgattctccagctcgatcagttcagtctgcagcagtccctgcacccacttc

SEQ ID NO: 47330 - DNA, 120 bp, Artificial Sequence
  ENSG00000065526_11 (sequence is synthesized)
ccagttgctttcatctctggaaaaagatgagccccgtaaaagttttggcatcaaggtccagaatcttccagtacgctctacagatacaagccttaaagatggccttttccatgaatttaa

SEQ ID NO: 47331 - DNA, 120 bp, Artificial Sequence
  ENSG00000065526_12 (sequence is synthesized)
gaaatttggaaaagtaacttcagtgcagatacatggaacttcagaagagaggtatggtctggtattctttcggcagcaagaggaccaagaaaaagccttgactgcatcaaaaggaaaact

SEQ ID NO: 47332 - DNA, 120 bp, Artificial Sequence
  ENSG00000065526_13 (sequence is synthesized)
tttctttggcatgcagattgaagtaacagcatggataggtccagaaacagaaagtgaaaatgaatttcgccccttggatgaaaggatagatgaatttcaccccaaagcaacaagaactct

SEQ ID NO: 47333 - DNA, 120 bp, Artificial Sequence
  ENSG00000065526_14 (sequence is synthesized)
ctttattggcaaccttgaaaaaaccactacttaccatgaccttcgcaacatcttccagcgctttggagaaattgtggatattgacattaagaaagtaaatggagttcctcagtatgcgtt

SEQ ID NO: 47334 - DNA, 120 bp, Artificial Sequence
  ENSG00000065526_15 (sequence is synthesized)
tctgcaatactgtgatattgctagcgtttgtaaagctattaagaagatggatggggaatatcttggaaataatcgcctcaagctgggttttggaaagagcatgcctacaaactgcgtgtg

SEQ ID NO: 47335 - DNA, 120 bp, Artificial Sequence
  ENSG00000065526_16 (sequence is synthesized)
gctagatgggctttcttcgaatgtgtcagatcagtatttaacacgacatttctgccgatatgggcctgtggtaaaggtggtgtttgaccgcttaaaaggcatggccctggttctctacaa

SEQ ID NO: 47336 - DNA, 120 bp, Artificial Sequence
  ENSG00000065526_17 (sequence is synthesized)
tgaaattgaatatgcacaagcagctgtaaaagagaccaaagggaggaaaatcggtgggaataaaattaaggtggattttgcaaatcgggaaagtcagctggctttttatcactgcatgga

SEQ ID NO: 47337 - DNA, 120 bp, Artificial Sequence
  ENSG00000065526_18 (sequence is synthesized)
gaaatctggtcaagacatcagagacttttatgaaatgttagccgaaagaagagaggaacgaagggcatcctacgactataaccaagatcgtacatattatgagagtgttcgaactccagg

SEQ ID NO: 47338 - DNA, 120 bp, Artificial Sequence
  ENSG00000065526_19 (sequence is synthesized)
cacttatcctgaggattccaggcgggactatccagctcgagggagagagttttattcagaatgggaaacttaccaaggagactactatgaatcacgatactacgatgatcctcgggaata

SEQ ID NO: 47339 - DNA, 120 bp, Artificial Sequence
  ENSG00000065526_20 (sequence is synthesized)
cagggattacaggaatgatccttatgaacaagatattagggaatatagttacaggcaaagggaacgagaaagagaacgtgaaagatttgagtctgaccgggacagagaccatgagaggag

SEQ ID NO: 47340 - DNA, 120 bp, Artificial Sequence
  ENSG00000065526_21 (sequence is synthesized)
gccgattgaacgaagtcaaagtcctgttcacttgcgacgtccacagagtcctggagcgtctccctctcaggcagagaggttgccgagtgattctgagaggaggctttacagccgatcctc

SEQ ID NO: 47341 - DNA, 120 bp, Artificial Sequence
  ENSG00000065526_22 (sequence is synthesized)
agaccggagtggaagctgtagctcactctcccctccaagatatgagaaactggacaagtctcgtttggagcgctatacaaaaaatgaaaagacagataaagaacgaacttttgatccgga

SEQ ID NO: 47342 - DNA, 120 bp, Artificial Sequence
  ENSG00000065526_23 (sequence is synthesized)
gagagtggagagagagagacgcttaatacggaaggaaaaagtggaaaaggacaaaactgacaagcagaaacgcaaaggaaaggttcactcccctagttctcagtcttcagaaacggacca

SEQ ID NO: 47343 - DNA, 120 bp, Artificial Sequence
  ENSG00000065526_24 (sequence is synthesized)
agaaaatgagcgagagcaaagccctgaaaagcccaggagttgtaataaactgagcagagagaaagctgacaaagagggaatagcgaaaaaccgcctggaactcatgccttgcgtggtttt

SEQ ID NO: 47344 - DNA, 120 bp, Artificial Sequence
  ENSG00000065526_25 (sequence is synthesized)
gactcgagtgaaagagaaagagggaaaggtcattgaccacactcctgtggaaaagttgaaagccaagcttgataatgacactgtcaaatcttctgccctggaccagaaacttcaggtctc

SEQ ID NO: 47345 - DNA, 120 bp, Artificial Sequence
  ENSG00000065526_26 (sequence is synthesized)
tcagacggagcctgcaaaatctgacttgtctaaactggaatcagttagaatgaaagtaccaaaggaaaaggggctttcaagccatgttgaagtggtggagaaggaaggcaggcttaaagc

SEQ ID NO: 47346 - DNA, 120 bp, Artificial Sequence
  ENSG00000065526_27 (sequence is synthesized)
caggaagcacctcaagcctgagcagcctgcagatggggtaagtgctgtggatctggagaagctggaagccaggaaaaggcgctttgcagattccaatttaaaagcagaaaagcaaaaacc

SEQ ID NO: 47347 - DNA, 120 bp, Artificial Sequence
  ENSG00000065526_28 (sequence is synthesized)
agaggtcaagaaaagcagtccagagatggaggatgctcgcgtgctttcaaaaaagcagcctgacgtgtcctctagagaggtcattctgctgagggaaggagaggctgaaagaaagcctgt

SEQ ID NO: 47348 - DNA, 120 bp, Artificial Sequence
  ENSG00000065526_29 (sequence is synthesized)
gaggaaagaaattcttaaaagagaatctaaaaaaatcaaactggacagacttaatactgttgccagccccaaagactgtcaggagcttgccagtatttctgttgggtctggctcaaggcc

SEQ ID NO: 47349 - DNA, 120 bp, Artificial Sequence
  ENSG00000065526_30 (sequence is synthesized)
cagctcagacctacaagcaagactgggagaactagcaggtgaatctgtggaaaatcaagaagtccaatcaaaaaagcccattccctcaaaaccacagctcaaacagctgcaggtattaga

SEQ ID NO: 47350 - DNA, 120 bp, Artificial Sequence
  ENSG00000065526_31 (sequence is synthesized)
tgatcaaggaccagagagagaagacgttaggaaaaactattgcagtcttcgtgatgaaacacctgaacgtaaatcaggccaagagaaatcacattcagtaaatactgaagaaaaaattgg

SEQ ID NO: 47351 - DNA, 120 bp, Artificial Sequence
  ENSG00000065526_32 (sequence is synthesized)
cattgacatcgatcacacgcagagttaccgaaaacaaatggaacagagtcgtaggaaacagcagatggaaatggaaatagccaagtctgagaagtttggcagtcctaaaaaagatgtaga

SEQ ID NO: 47352 - DNA, 120 bp, Artificial Sequence
  ENSG00000065526_33 (sequence is synthesized)
tgaatatgaaagacgtagcctcgttcacgaggtaggcaaaccccctcaagatgtcactgatgactctcctcctagcaaaaagaaaaggatggatcatgtcgattttgatatctgcaccaa

SEQ ID NO: 47353 - DNA, 120 bp, Artificial Sequence
  ENSG00000065526_34 (sequence is synthesized)
gcgagaacggaattacagaagttcacgccaaatcagcgaagattctgaaaggactggtggttctcccagtgtccgacatggttccttccatgaagatgaggatcccataggctcccctag

SEQ ID NO: 47354 - DNA, 120 bp, Artificial Sequence
  ENSG00000065526_35 (sequence is synthesized)
gctactgtcagtaaaagggtctcctaaagtagatgaaaaagtcctcccctattctaacataacagtcagggaagagtctttaaaatttaatccttatgattctagcaggagagaacagat

SEQ ID NO: 47355 - DNA, 120 bp, Artificial Sequence
  ENSG00000065526_36 (sequence is synthesized)
ggcagatatggccaaaataaaactatctgtcttgaattctgaagatgaactaaatcgttgggactctcagatgaaacaggatgctggcagatttgatgtgagtttcccaaacagcataat

SEQ ID NO: 47356 - DNA, 120 bp, Artificial Sequence
  ENSG00000065526_37 (sequence is synthesized)
taagagagatagccttcgaaaaaggtctgtacgagatctggaacctggtgaggtgccttctgattctgacgaagatggtgaacacaaatcccactcacccagagcctctgcattatatga

SEQ ID NO: 47357 - DNA, 120 bp, Artificial Sequence
  ENSG00000065526_38 (sequence is synthesized)
aagttctcgattgtcttttttattgagggacagagaagacaagctacgtgagcgagatgaaagactctctagttctttagaaaggaacaaattttactcttttgcattggataagacaat

SEQ ID NO: 47358 - DNA, 120 bp, Artificial Sequence
  ENSG00000065526_39 (sequence is synthesized)
cacaccagacactaaagctttgcttgaaagagctaaatccctctcttcatctcgtgaagaaaattggtcttttcttgattgggactcccgatttgcaaattttcgaaacaacaaagataa

SEQ ID NO: 47359 - DNA, 120 bp, Artificial Sequence
  ENSG00000065526_40 (sequence is synthesized)
agaaaaggttgactctgctccaagacctattccatcctggtacatgaaaaagaagaaaattaggactgattcagaagggaaaatggatgataagaaagaggaccataaagaagaagagca

SEQ ID NO: 47360 - DNA, 120 bp, Artificial Sequence
  ENSG00000065526_41 (sequence is synthesized)
agagaggcaggaattgtttgcttctcgttttttacacagctcaatctttgaacaagattccaagcgattgcagcatctagagagaaaagaggaagattctgacttcatttctggtaggat

SEQ ID NO: 47361 - DNA, 120 bp, Artificial Sequence
  ENSG00000065526_42 (sequence is synthesized)
ctatgggaagcagacatctgagggagcaaacagcacaactgattccattcaagaaccagtagttctgttccatagcagatttatggagctcacacggatgcaacagaaagaaaaagaaaa

SEQ ID NO: 47362 - DNA, 120 bp, Artificial Sequence
  ENSG00000065526_43 (sequence is synthesized)
agaccagaaacccaaagaggttgagaaacaggaagatacagagaatcatcccaagaccccagaatctgctcctgagaataaagattcagaactgaaaactccaccttccgttgggcctcc

SEQ ID NO: 47363 - DNA, 120 bp, Artificial Sequence
  ENSG00000065526_44 (sequence is synthesized)
aagtgtcacagtcgtaactctagaatcagccccatcagcactagagaagaccactggtgacaaaacggtagaggcgcctttggtaacagaagagaagactgtggagccagctaccgtctc

SEQ ID NO: 47364 - DNA, 120 bp, Artificial Sequence
  ENSG00000065526_45 (sequence is synthesized)
agaagaagcaaagcctgcatctgaacctgctcctgcccctgtggaacagctggaacaagtagacctgcccccaggagcagaccccgataaagaagctgccatgatgcctgcgggtgttga

SEQ ID NO: 47365 - DNA, 120 bp, Artificial Sequence
  ENSG00000065526_46 (sequence is synthesized)
ggaaggttcatcaggtgaccagccgccttatctggatgccaagcctccaactcccggggcctcgttttcccaggcagagagcaacgtagatccagagcctgacagtacccagccactttc

SEQ ID NO: 47366 - DNA, 120 bp, Artificial Sequence
  ENSG00000065526_47 (sequence is synthesized)
aaaaccagctcagaagtctgaggaagccaatgagccaaaggccgaaaagccagacgccactgcagatgctgagcctgatgcaaaccagaaagccgaagctgctcctgagtctcagccccc

SEQ ID NO: 47367 - DNA, 120 bp, Artificial Sequence
  ENSG00000065526_48 (sequence is synthesized)
agcttctgaagatttagaggttgatcctccagttgctgcaaaggataaaaagccaaacaaaagcaagcgttcaaagacccctgttcaggcagctgcagtgagtatcgtggagaagcccgt

SEQ ID NO: 47368 - DNA, 120 bp, Artificial Sequence
  ENSG00000065526_49 (sequence is synthesized)
cacaaggaagagtgagaggatagaccgggaaaaactcaagcggtccaattctcctcggggagaagcacagaagcttttggaattgaagatggaggcagagaagattacaaggactgcttc

SEQ ID NO: 47369 - DNA, 120 bp, Artificial Sequence
  ENSG00000065526_50 (sequence is synthesized)
taaaaactctgctgcagaccttgaacatcccgaaccaagtttgcctctcagccgaacaaggcgccggaatgtaaggagcgtctatgcaaccatgggtgaccatgaaaaccgctctcctgt

SEQ ID NO: 47370 - DNA, 120 bp, Artificial Sequence
  ENSG00000065526_51 (sequence is synthesized)
gtgaccagaaagagattggagcgagagcttcaggaggctgcagcggttcccaccacccctcggaggggaaggcctccaaagacacgccggcgagccgatgaagaggaggagaacgaggcc

SEQ ID NO: 47371 - DNA, 120 bp, Artificial Sequence
  ENSG00000065526_52 (sequence is synthesized)
aaggaacctgcagaaacactcaagccacctgagggatggcggtcgccaaggtcccagaaaactgcagctggtggtggaccccaagggaaaaagggaaaaaatgaaccgaaggtggatgct

SEQ ID NO: 47372 - DNA, 120 bp, Artificial Sequence
  ENSG00000065526_53 (sequence is synthesized)
acacgtcctgaggccaccactgaggtgggcccccaaataggcgtgaaagagagctccatggaacccaaggctgctgaggaggaggcagggagtgaacagaaacgtgacagaaaagatgct

SEQ ID NO: 47373 - DNA, 120 bp, Artificial Sequence
  ENSG00000065526_54 (sequence is synthesized)
ggcacagacaaaaacccccctgaaaccgcccctgttgaagttgtagagaaaaaaccggcccctgaaaaaaactccaaatcaaagagaggaagatctcgaaactccaggttagcagtggac

SEQ ID NO: 47374 - DNA, 120 bp, Artificial Sequence
  ENSG00000065526_55 (sequence is synthesized)
aaatctgcaagtctgaaaaatgtggatgctgctgtcagtcccaggggggctgcagcacaggcaggggagagggaatctggggtggtggcagtctcccctgagaaaagtgagagtccccaa

SEQ ID NO: 47375 - DNA, 120 bp, Artificial Sequence
  ENSG00000065526_56 (sequence is synthesized)
aaggaggatggtttatcatcccagttgaaaagtgatccagttgatccagacaaggaaccagagaaagaagacgtgtctgcctctgggccgtccccagaagccacccagttagccaagcag

SEQ ID NO: 47376 - DNA, 120 bp, Artificial Sequence
  ENSG00000065526_57 (sequence is synthesized)
atggagctggagcaggccgtggaacacatcgcaaagctcgctgaggcctctgcctctgctgcctataaggcagatgcaccagagggccttgccccagaggacagggacaagcctgcacac

SEQ ID NO: 47377 - DNA, 120 bp, Artificial Sequence
  ENSG00000065526_58 (sequence is synthesized)
caagcaagtgaaacagagctggctgcggccatcggctccatcatcaatgacatttctggggagccagaaaacttcccagcacctccaccttatcctggagaatcccagacagatctgcaa

SEQ ID NO: 47378 - DNA, 120 bp, Artificial Sequence
  ENSG00000065526_59 (sequence is synthesized)
ccccccgcaggtgcacaggcgctgcagccttctgaggaaggaatggagacagatgaggctgtatctggcatcctggaaactgaggctgctacagaatcttctaggcctccagtcaatgct

SEQ ID NO: 47379 - DNA, 120 bp, Artificial Sequence
  ENSG00000065526_60 (sequence is synthesized)
cctgacccctcagccggcccaacagataccaaggaagccagaggaaatagcagtgaaacctcacactcagtgccagaagccaaagggtctaaagaagtggaagtcactcttgttcggaaa

SEQ ID NO: 47380 - DNA, 120 bp, Artificial Sequence
  ENSG00000065526_61 (sequence is synthesized)
gacaaagggcgccagaaaacaacccgatcacgccgcaagcgaaacacaaacaagaaagtggtggctcctgtagagagccatgtccctgaatccaaccaagctcaaggtgagagtcctgct

SEQ ID NO: 47381 - DNA, 120 bp, Artificial Sequence
  ENSG00000065526_62 (sequence is synthesized)
gcaaatgaggggacaacagtacagcaccccgaagccccacaggaagaaaagcagagtgagaaaccccattccactcctcctcagtcatgtacttctgacctaagcaagattccctccaca

SEQ ID NO: 47382 - DNA, 120 bp, Artificial Sequence
  ENSG00000065526_63 (sequence is synthesized)
gagaattcgtcccaagaaatcagtgttgaggaaaggactccaaccaaagcatctgtgcccccagaccttcccccacctccccagccagcaccggtggatgaggagcctcaagccaggttc

SEQ ID NO: 47383 - DNA, 120 bp, Artificial Sequence
  ENSG00000065526_64 (sequence is synthesized)
agggtgcattccatcattgaaagtgacccggtgaccccacccagcgatccaagcatccccatacccacactgccttctgtaactgcagcaaagctctcacctcctgtcgcctctgggggg

SEQ ID NO: 47384 - DNA, 120 bp, Artificial Sequence
  ENSG00000065526_65 (sequence is synthesized)
atcccacaccagagcccccctactaaggtgacagagtggatcacaaggcaggaggagccacgggctcagtctactccatctccagctcttcccccagacacaaaggcctctgatgttgac

SEQ ID NO: 47385 - DNA, 120 bp, Artificial Sequence
  ENSG00000065526_66 (sequence is synthesized)
accagctccagcaccctgaggaagattctcatggaccccaagtatgtgtctgccacaagtgtcacttccacaagtgtcaccacagccattgcagagcctgtcagtgctgccccttgccta

SEQ ID NO: 47386 - DNA, 120 bp, Artificial Sequence
  ENSG00000065526_67 (sequence is synthesized)
catgaggccccgcccccgccagttgactctaaaaagcctttagaagaaaaaacagcacctccagtgacaaacaactctgagatacaagcctcggaggtgctggtagctgctgacaaggaa

SEQ ID NO: 47387 - DNA, 120 bp, Artificial Sequence
  ENSG00000065526_68 (sequence is synthesized)
aaggtggctccagtcattgctcccaaaattacctctgttattagccggatgcctgtcagcattgacctggaaaattcacagaagataaccttggcaaaaccagctcctcaaaccctcact

SEQ ID NO: 47388 - DNA, 120 bp, Artificial Sequence
  ENSG00000065526_69 (sequence is synthesized)
ggtctggtgagcgcactcactggcctggtgaacgtctccctggtcccggtgaatgccctgaaaggccccgtgaagggctcagtgaccacactgaaaagtttggtgagcacccctgctggg

SEQ ID NO: 47389 - DNA, 120 bp, Artificial Sequence
  ENSG00000065526_70 (sequence is synthesized)
cccgtgaacgtcctgaaagggcctgtgaatgttcttacggggccagtgaatgttctcaccactccagtgaacgccacggtgggcacagtgaatgccgccccaggcacagtcaatgccgct

SEQ ID NO: 47390 - DNA, 120 bp, Artificial Sequence
  ENSG00000065526_71 (sequence is synthesized)
gcgagtgcagtgaatgccacagcaagtgcagtgaccgtcacagcgggtgcggttactgctgcatctggtggtgtaacggccacaacaggcacggtgacaatggcaggggcagtgattgcg

SEQ ID NO: 47391 - DNA, 120 bp, Artificial Sequence
  ENSG00000065526_72 (sequence is synthesized)
ccgtcaacaaagtgcaaacagagagcgagtgctaatgaaaacagtcggttccacccagggtccatgcctgtgatcgacgatcgtccggcagacgcgggctcaggggcggggctgcgtgtg

SEQ ID NO: 47392 - DNA, 120 bp, Artificial Sequence
  ENSG00000065526_73 (sequence is synthesized)
aacacttctgaaggggttgtgctcctgagttactcagggcagaagaccgaaggcccacagcggatcagcgccaagatcagccagatccccccggccagtgcaatggacattgaatttcag

SEQ ID NO: 47393 - DNA, 120 bp, Artificial Sequence
  ENSG00000065526_74 (sequence is synthesized)
cagtcagtgtccaagtcccaggtcaaacctgattctgtcacagcatcgcagcctccatccaaaggccctcaagctcctgcaggctatgcgaacgtggccacccattccacgttggtactg

SEQ ID NO: 47394 - DNA, 120 bp, Artificial Sequence
  ENSG00000065526_75 (sequence is synthesized)
accgcccagacatataatgcctctcctgtgatttcgtctgtgaaggccgataggccatccttggagaagcccgagcccattcacctctcggtgtccacgcctgtcacccagggaggcaca

SEQ ID NO: 47395 - DNA, 120 bp, Artificial Sequence
  ENSG00000065526_76 (sequence is synthesized)
gtgaaggttctcacccaggggatcaacacaccccctgtgctggttcacaaccagctggtcctcaccccaagcattgtcaccacaaacaagaagcttgctgaccccgtcacccttaaaatc

SEQ ID NO: 47396 - DNA, 120 bp, Artificial Sequence
  ENSG00000065526_77 (sequence is synthesized)
gagaccaaggtccttcagccggccaacctggggtccacgctcacgccccaccaccctcctgctctgcccagcaaactgcctacagaagtcaaccatgtcccctcggggcccagcatccca

SEQ ID NO: 47397 - DNA, 120 bp, Artificial Sequence
  ENSG00000065526_78 (sequence is synthesized)
gcagatcgaactgtctcccatttggcagctgcaaagctagatgctcattctcctcgaccaagtggacccgggccatcctcattcccaagggcaagccaccccagcagtactgcatctacg

SEQ ID NO: 47398 - DNA, 120 bp, Artificial Sequence
  ENSG00000065526_79 (sequence is synthesized)
gcgctctccaccaacgccacagtcatgctggctgcaggcatcccagtgccccagttcatctccagcatccacccagagcagtctgtcatcatgccaccccacagcatcacccagactgtg

SEQ ID NO: 47399 - DNA, 120 bp, Artificial Sequence
  ENSG00000065526_80 (sequence is synthesized)
tccctgagccacctctcccagggcgaggtgagaatgaacactcccacgctgcccagtatcacctacagcatccggccagaagcgcttcactctcctcgggctccgctgcagccccagcaa

SEQ ID NO: 47400 - DNA, 120 bp, Artificial Sequence
  ENSG00000065526_81 (sequence is synthesized)
atagaggtcagggccccacagcgtgccagcaccccgcagccagccccagctggtgtgcctgcactggcctcccagcaccctcccgaggaggaagtgcattatcaccttcctgtcgctcga

SEQ ID NO: 47401 - DNA, 120 bp, Artificial Sequence
  ENSG00000065526_82 (sequence is synthesized)
gccacagcccctgtgcagtcagaggtactagtcatgcagtctgagtaccgactgcacccctatactgtgccacgggatgtgaggatcatggtgcatccacatgtgacggcagtcagcgag

SEQ ID NO: 47402 - DNA, 120 bp, Artificial Sequence
  ENSG00000065526_83 (sequence is synthesized)
cagcccagggccgcggatggggtggtgaaggtgccaccagccagcaaggcccctcagcagccagggaaggaagctgccaagacaccagatgccaaagctgcccccacccccacccctgcc

SEQ ID NO: 47403 - DNA, 120 bp, Artificial Sequence
  ENSG00000065526_84 (sequence is synthesized)
cccgtccctgtccctgtcccccttcctgcccctgctcctgcccctcatggtgaggcccgtatcctcacagttacccccagtaaccaactccaggggctgcctctgacccctcctgtggtg

SEQ ID NO: 47404 - DNA, 120 bp, Artificial Sequence
  ENSG00000065526_85 (sequence is synthesized)
gtgacccatggggtgcagattgtgcactccagcggggagctgtttcaagagtaccggtacggcgacatccgcacctaccaccccccggcccagctcacacacactcagtttcccgccgct

SEQ ID NO: 47405 - DNA, 120 bp, Artificial Sequence
  ENSG00000065526_86 (sequence is synthesized)
tcctctgttggcctgccttcccggaccaagacagctgctcagggccctcctcctgaaggtgagcccctgcagcctcctcagcctgtgcagtccacacagcctgcccagcctgcaccaccc

SEQ ID NO: 47406 - DNA, 120 bp, Artificial Sequence
  ENSG00000065526_87 (sequence is synthesized)
tgcccgccctcccagctcggtcagcccggccagccaccaagcagcaagatgcctcaagtgtcccaggaggcaaaggggacccagacgggagtagagcagcctcgcctcccagctggacct

SEQ ID NO: 47407 - DNA, 120 bp, Artificial Sequence
  ENSG00000065526_88 (sequence is synthesized)
gcaaacaggccacctgagcctcacacccaggttcagagggcacaagcagaaacaggcccgacttccttcccctcccctgtgtctgtctccatgaagcctgaccttccagtctctcttccc

SEQ ID NO: 47408 - DNA, 120 bp, Artificial Sequence
  ENSG00000065526_89 (sequence is synthesized)
actcagactgccccaaaacagccgttgtttgtcccaacaacctctggccccagcaccccaccaggactggttctgccacacactgaattccagccagcccccaaacaagattcctctcca

SEQ ID NO: 47409 - DNA, 120 bp, Artificial Sequence
  ENSG00000065526_90 (sequence is synthesized)
cacctgacttcccagagacccgtggatatggttcaacttctgaagaagtaccccatcgtgtggcagggcctgctggccctcaagaatgacacagctgctgtgcagctccacttcgtctct

SEQ ID NO: 47410 - DNA, 120 bp, Artificial Sequence
  ENSG00000065526_91 (sequence is synthesized)
ggcaacaacgtcctggcccatcggtccctgcccctttctgaaggagggcccccactaaggatcgcccagaggatgcggctggaggcaacgcagctggaaggggttgcccgaaggatgacg

SEQ ID NO: 47411 - DNA, 120 bp, Artificial Sequence
  ENSG00000065526_92 (sequence is synthesized)
gtggagacagattactgtctgctgctggctctgccctgtggccgtgaccaagaggatgttgtgagccagaccgagtccctcaaggctgccttcatcacttacctgcaggccaagcaggcg

SEQ ID NO: 47412 - DNA, 120 bp, Artificial Sequence
  ENSG00000065526_93 (sequence is synthesized)
gcagggatcatcaacgttcccaaccctggctccaatcagcctgcctacgtgctgcagatcttcccgccctgtgagttctctgagagtcacctgtcccgcctggcccctgacctccttgcc

SEQ ID NO: 47413 - DNA, 120 bp, Artificial Sequence
  ENSG00000065526_94 (sequence is synthesized)
agcatctccaacatctctccccacctcatgattgtcattgcctccgtgtgagccactgagtggttatcacctcagtgaatcttcccagggctctgcagtaaaaacaaaggacaacccagc

SEQ ID NO: 47414 - DNA, 120 bp, Artificial Sequence
  ENSG00000065526_95 (sequence is synthesized)
caagcagaggaagaagctgccgaaggggacagactccactgccagacggccagccgtttgctgtcctgccgcccggctcagtcggccagacttcctctaggagtggtgctgctaccttgt

SEQ ID NO: 47415 - DNA, 120 bp, Artificial Sequence
  ENSG00000065526_96 (sequence is synthesized)
atgtttacataatgctttagcccaaggacacatcaccaacccatggactcgcagacaccggggctgggtttctctttcctctttttggagaaaaggaacagggcagtggaatgaaaattt

SEQ ID NO: 47416 - DNA, 120 bp, Artificial Sequence
  ENSG00000065526_97 (sequence is synthesized)
tttgtttgtttgtttttaagaaacaagaaaacagaactgcctttgcactaaattagtgacttggacttttgcccagtgaagacaggctgtgacactctggatgtcttggtgtgtgtagac

SEQ ID NO: 47417 - DNA, 120 bp, Artificial Sequence
  ENSG00000065526_98 (sequence is synthesized)
acacattgcagactcttaacgcaggaaggacttcaaacttctgctgagaccttggggtcaaggaacatttcattggttttttttgtccacccccatctcccttgctcatttggatgcgtc

SEQ ID NO: 47418 - DNA, 120 bp, Artificial Sequence
  ENSG00000065526_99 (sequence is synthesized)
accttaattctcctgctgccaccgtctttgattcaccgggatgtacagtttacagttgaagagcaaacagaaaggttttctcttggtgggatatgcagaacttgggatgtgtgtatatat

SEQ ID NO: 47419 - DNA, 120 bp, Artificial Sequence
  ENSG00000065526_100 (sequence is synthesized)
aaatatataatatatataaatatatataatactgacttaaaaaatcaaatcccccgacatacgttttttttaatctgtgccaaaaatgtgttttcagaggaaatcttattttcatattca

SEQ ID NO: 47420 - DNA, 120 bp, Artificial Sequence
  ENSG00000065526_101 (sequence is synthesized)
gactttgtattgcccactcatttgtataagtgcgcttcggtacagcacgggtcctgctcccgcgatgtggaagtgtcacacggcacctgtacaaaaagactggctaacccctcttcctat

SEQ ID NO: 47421 - DNA, 120 bp, Artificial Sequence
  ENSG00000065526_102 (sequence is synthesized)
taccttgatctcttcccccaacttcctaacacttattaatttatgaaactgtttttctcagcgcagttttgttttgtgtgtccattggattacaaactttattaaaaaatataaaacaca

SEQ ID NO: 47422 - DNA, 120 bp, Artificial Sequence
  ENSG00000065526_103 (sequence is synthesized)
gccaagcatctagacccacaaggtcccctagcggcagcggctctagaagtagatcctccagtagtgattcaatcagcagcagcagtagtaccagcagtgacagtgattccagcagtagtt

SEQ ID NO: 47423 - DNA, 120 bp, Artificial Sequence
  ENSG00000065526_104 (sequence is synthesized)
ctatatggaatatttctggaatattagagcctacagattcttttagaagttgatatctgcctctccattttcactacataaagtgtacaaacaaattggattgtaacaaaaaatctggca

SEQ ID NO: 47424 - DNA, 120 bp, Artificial Sequence
  ENSG00000065526_105 (sequence is synthesized)
gaccataatgattcaaccacttggattctacaaacaatactttaacatggaaatgtgtacttggatgaagaagagagaaggcaatgcctgatttttccattttggatctacacaatttct

SEQ ID NO: 47425 - DNA, 120 bp, Artificial Sequence
  ENSG00000065526_106 (sequence is synthesized)
gtattgttggaattacactctttgatggaatggggaaaaattaaaatgatggatgtttcctaaatcctggaatatagccattcttttctaattgctgggatatatgggatgtcttgctgt

SEQ ID NO: 47426 - DNA, 120 bp, Artificial Sequence
  ENSG00000065526_107 (sequence is synthesized)
caagattccactagcccagggaaagaggattactatatcatttcttaagcaagttgctgtccaatcaaaggtactttagctttgaacacatggtgatgatcagttgtggatacagcaatc

SEQ ID NO: 47427 - DNA, 120 bp, Artificial Sequence
  ENSG00000065526_108 (sequence is synthesized)
aaaattgactgggctggatggctacaaaagtgaactattggcgagcaactgtgccttcctcattcgttggaattgtagaggatatttcctcttctgccagctacctgattcatacttagg

SEQ ID NO: 47428 - DNA, 120 bp, Artificial Sequence
  ENSG00000065526_109 (sequence is synthesized)
gctggaaatatttatgaatgtggataaatttctaattgtctgctatctcaagaaagaagtctgggggtttgagagttacagtttgtctgggactacttgcttccagtggaattattttgt

SEQ ID NO: 47429 - DNA, 120 bp, Artificial Sequence
  ENSG00000065526_110 (sequence is synthesized)
ctggtcactaagattttttttttcttgtggttcatctaaatatcatttgacacccttgcccattaagaaggtggattacccccataagaggggccaaaattggggaagttatgttcacaa

SEQ ID NO: 47430 - DNA, 120 bp, Artificial Sequence
  ENSG00000065526_111 (sequence is synthesized)
ttcattcaaatatcagggtagcctttaaagtcatctcagaggtgggggtttttgtggacctgatactgtgggttggatgtgggctgctgtttgactaggaggcccctgctcactggcagc

SEQ ID NO: 47431 - DNA, 120 bp, Artificial Sequence
  ENSG00000065534_0 (sequence is synthesized)
ggaaggattcttcaaaattaacagaaaccaattcgggccagctgaagagaaaaaataaaggtggctcccggctgcctctgctgcagttcagagcaacttcaggagcttcccagccgagag

SEQ ID NO: 47432 - DNA, 120 bp, Artificial Sequence
  ENSG00000065534_1 (sequence is synthesized)
cttcaggacgcctttcctgtcccactggcccagttgccacaacaaacaacagagaagacggtgaccatgggggatgtgaagctggttgcctcgtcacacatttccaaaacctccctcagt

SEQ ID NO: 47433 - DNA, 120 bp, Artificial Sequence
  ENSG00000065534_2 (sequence is synthesized)
gtggatccctcaagagttgactccatgcccctgacagaggcccctgctttcattttgccccctcggaacctctgcatcaaagaaggagccaccgccaagttcgaagggcgggtccggggt

SEQ ID NO: 47434 - DNA, 120 bp, Artificial Sequence
  ENSG00000065534_3 (sequence is synthesized)
tacccagagccccaggtgacatggcacagaaacgggcaacccatcaccagcgggggccgcttcctgctggattgcggcatccgggggactttcagccttgtgattcatgctgtccatgag

SEQ ID NO: 47435 - DNA, 120 bp, Artificial Sequence
  ENSG00000065534_4 (sequence is synthesized)
gaggacaggggaaagtatacctgtgaagccaccaatggcagtggtgctcgccaggtgacagtggagttgacagtagaaggaagttttgcgaagcagcttggtcagcctgttgtttccaaa

SEQ ID NO: 47436 - DNA, 120 bp, Artificial Sequence
  ENSG00000065534_5 (sequence is synthesized)
accttaggggatagattttcagctccagcagtggagacccgtcctagcatctggggggagtgcccaccaaagtttgctaccaagctgggccgagttgtggtcaaagaaggacagatggga

SEQ ID NO: 47437 - DNA, 120 bp, Artificial Sequence
  ENSG00000065534_6 (sequence is synthesized)
cgattctcctgcaagatcactggccggccccaaccgcaggtcacctggctcaagggaaatgttccactgcagccgagtgcccgtgtgtctgtgtctgagaagaacggcatgcaggttctg

SEQ ID NO: 47438 - DNA, 120 bp, Artificial Sequence
  ENSG00000065534_7 (sequence is synthesized)
gaaatccatggagtcaaccaagatgacgtgggagtgtacacgtgcctggtggtgaacgggtcggggaaggcctcgatgtcagctgaactttccatccaaggtttggacagtgccaatagg

SEQ ID NO: 47439 - DNA, 120 bp, Artificial Sequence
  ENSG00000065534_8 (sequence is synthesized)
tcatttgtgagagaaacaaaagccaccaattcagatgtcaggaaagaggtgaccaatgtaatctcaaaggagtcgaagctggacagtctggaggctgcagccaaaagcaagaactgctcc

SEQ ID NO: 47440 - DNA, 120 bp, Artificial Sequence
  ENSG00000065534_9 (sequence is synthesized)
agcccccagagaggtggctccccaccctgggctgcaaacagccagcctcagcccccaagggagtccaagctggagtcatgcaaggactcgcccagaacggccccgcagaccccggtcctt

SEQ ID NO: 47441 - DNA, 120 bp, Artificial Sequence
  ENSG00000065534_10 (sequence is synthesized)
cagaagacttccagctccatcaccctgcaggccgcaagagttcagccggaaccaagagcaccaggcctgggggtcctatcaccttctggagaagagaggaagaggccagctcctccccgt

SEQ ID NO: 47442 - DNA, 120 bp, Artificial Sequence
  ENSG00000065534_11 (sequence is synthesized)
ccagccaccttccccaccaggcagcctggcctggggagccaagatgttgtgagcaaggctgctaacaggagaatccccatggagggccagagggattcagcattccccaaatttgagagc

SEQ ID NO: 47443 - DNA, 120 bp, Artificial Sequence
  ENSG00000065534_12 (sequence is synthesized)
aagccccaaagccaggaggtcaaggaaaatcaaactgtcaagttcagatgtgaagtttccgggattccaaagcctgaagtggcctggttcctggaaggcacccccgtgaggagacaggaa

SEQ ID NO: 47444 - DNA, 120 bp, Artificial Sequence
  ENSG00000065534_13 (sequence is synthesized)
ggcagcattgaggtttatgaagatgctggctcccattacctctgcctgctgaaagcccggaccagggacagtgggacatacagctgcactgcttccaacgcccaaggccagctgtcctgt

SEQ ID NO: 47445 - DNA, 120 bp, Artificial Sequence
  ENSG00000065534_14 (sequence is synthesized)
agctggaccctccaagtggaaaggcttgccgtgatggaggtggccccctccttctccagtgtcctgaaggactgcgctgttattgagggccaggattttgtgctgcagtgctccgtacgg

SEQ ID NO: 47446 - DNA, 120 bp, Artificial Sequence
  ENSG00000065534_15 (sequence is synthesized)
gggaccccagtgccccggatcacttggctgctgaatgggcagcccatccagtacgctcgctccacctgcgaggccggcgtggctgagctccacatccaggatgccctgccggaggaccat

SEQ ID NO: 47447 - DNA, 120 bp, Artificial Sequence
  ENSG00000065534_16 (sequence is synthesized)
ggcacctacacctgcctagctgagaatgccttggggcaggtgtcctgcagcgcctgggtcaccgtccatgaaaagaagagtagcaggaagagtgagtaccttctgcctgtggctcccagc

SEQ ID NO: 47448 - DNA, 120 bp, Artificial Sequence
  ENSG00000065534_17 (sequence is synthesized)
aagcccactgcacccatcttcctgcagggcctctctgatctcaaagtcatggatggaagccaggtcactatgactgtccaagtgtcagggaatccaccccctgaagtcatctggctgcac

SEQ ID NO: 47449 - DNA, 120 bp, Artificial Sequence
  ENSG00000065534_18 (sequence is synthesized)
aatgggaatgagatccaagagtcagaggacttccactttgaacagagaggaactcagcacagcctttgtatccaggaagtgttcccggaggacacgggcacgtacacctgcgaggcctgg

SEQ ID NO: 47450 - DNA, 120 bp, Artificial Sequence
  ENSG00000065534_19 (sequence is synthesized)
aacagcgctggagaggtccgcacccaggccgtgctcacggtacaagagcctcacgatggcacccagccctggttcatcagtaagcctcgctcagtgacagcctccctgggccagagtgtc

SEQ ID NO: 47451 - DNA, 120 bp, Artificial Sequence
  ENSG00000065534_20 (sequence is synthesized)
ctcatctcctgcgccatagctggtgacccctttcctaccgtgcactggctcagagatggcaaagccctctgcaaagacactggccacttcgaggtgcttcagaatgaggacgtgttcacc

SEQ ID NO: 47452 - DNA, 120 bp, Artificial Sequence
  ENSG00000065534_21 (sequence is synthesized)
ctggttctaaagaaggtgcagccctggcatgccggccagtatgagatcctgctcaagaaccgggttggcgaatgcagttgccaggtgtcactgatgctacagaacagctctgccagagcc

SEQ ID NO: 47453 - DNA, 120 bp, Artificial Sequence
  ENSG00000065534_22 (sequence is synthesized)
cttccacgggggagggagcctgccagctgcgaggacctctgtggtggaggagttggtgctgatggtggtggtagtgaccgctatgggtccctgaggcctggctggccagcaagagggcag

SEQ ID NO: 47454 - DNA, 120 bp, Artificial Sequence
  ENSG00000065534_23 (sequence is synthesized)
ggttggctagaggaggaagacggcgaggacgtgcgaggggtgctgaagaggcgcgtggagacgaggcagcacactgaggaggcgatccgccagcaggaggtggagcagctggacttccga

SEQ ID NO: 47455 - DNA, 120 bp, Artificial Sequence
  ENSG00000065534_24 (sequence is synthesized)
gacctcctggggaagaaggtgagtacaaagaccctatcggaagacgacctgaaggagatcccagccgagcagatggatttccgtgccaacctgcagcggcaagtgaagccaaagactgtg

SEQ ID NO: 47456 - DNA, 120 bp, Artificial Sequence
  ENSG00000065534_25 (sequence is synthesized)
tctgaggaagagaggaaggtgcacagcccccagcaggtcgattttcgctctgtcctggccaagaaggggacttccaagacccccgtgcctgagaaggtgccaccgccaaaacctgccacc

SEQ ID NO: 47457 - DNA, 120 bp, Artificial Sequence
  ENSG00000065534_26 (sequence is synthesized)
ccggattttcgctcagtgctgggtggcaagaagaaattaccagcagagaatggcagcagcagtgccgagaccctgaatgccaaggcagtggagagttccaagcccctgagcaatgcacag

SEQ ID NO: 47458 - DNA, 120 bp, Artificial Sequence
  ENSG00000065534_27 (sequence is synthesized)
ccttcagggcccttgaaacccgtgggcaacgccaagcctgctgagaccctgaagccaatgggcaacgccaagcctgccgagaccctgaagcccatgggcaatgccaagcctgatgagaac

SEQ ID NO: 47459 - DNA, 120 bp, Artificial Sequence
  ENSG00000065534_28 (sequence is synthesized)
ctgaaatccgctagcaaagaagaactcaagaaagacgttaagaatgatgtgaactgcaagagaggccatgcagggaccacagataatgaaaagagatcagagagccaggggacagcccca

SEQ ID NO: 47460 - DNA, 120 bp, Artificial Sequence
  ENSG00000065534_29 (sequence is synthesized)
gccttcaagcagaagctgcaagatgttcatgtggcagagggcaagaagctgctgctccagtgccaggtgtcttctgaccccccagccaccatcatctggacgctgaacggaaagaccctc

SEQ ID NO: 47461 - DNA, 120 bp, Artificial Sequence
  ENSG00000065534_30 (sequence is synthesized)
aagaccaccaagttcatcatcctctcccaggaaggctcactctgctccgtctccatcgagaaggcactgcctgaggacagaggcttatacaagtgtgtagccaagaatgacgctggccag

SEQ ID NO: 47462 - DNA, 120 bp, Artificial Sequence
  ENSG00000065534_31 (sequence is synthesized)
tggatgatgctccagccagtgagaacaccaaggccccagagatgaaatcccggaggcccaagagctctcttcctcccgtgctaggaactgagagtgatgcgactgtgaaaaagaaacctg

SEQ ID NO: 47463 - DNA, 120 bp, Artificial Sequence
  ENSG00000065534_32 (sequence is synthesized)
cccccaagacacctccgaaggcagcaatgccccctcagatcatccagttccctgaggaccagaaggtacgcgcaggagagtcagtggagctgtttggcaaagtgacaggcactcagccca

SEQ ID NO: 47464 - DNA, 120 bp, Artificial Sequence
  ENSG00000065534_33 (sequence is synthesized)
tcacctgtacctggatgaagttccgaaagcagatccaggaaagcgagcacatgaaggtggagaacagcgagaatggcagcaagctcaccatcctggccgcgcgccaggagcactgcggct

SEQ ID NO: 47465 - DNA, 120 bp, Artificial Sequence
  ENSG00000065534_34 (sequence is synthesized)
gctacacactgctggtggagaacaagctgggcagcaggcaggcccaggtcaacctcactgtcgtggataagccagaccccccagctggcacaccttgtgcctctgacattcggagctcct

SEQ ID NO: 47466 - DNA, 120 bp, Artificial Sequence
  ENSG00000065534_35 (sequence is synthesized)
cactgaccctgtcctggtatggctcctcatatgatgggggcagtgctgtacagtcctacagcatcgagatctgggactcagccaacaagacgtggaaggaactagccacatgccgcagca

SEQ ID NO: 47467 - DNA, 120 bp, Artificial Sequence
  ENSG00000065534_36 (sequence is synthesized)
cctctttcaacgtccaggacctgctgcctgaccacgaatataagttccgtgtacgtgcaatcaacgtgtatggaaccagtgagccaagccaggagtctgaactcacaacggtaggagaga

SEQ ID NO: 47468 - DNA, 120 bp, Artificial Sequence
  ENSG00000065534_37 (sequence is synthesized)
aacctgaagagccgaaggatgaagtggaggtgtcagatgatgatgagaaggagcccgaggttgattaccggacagtgacaatcaatactgaacaaaaagtatctgacttctacgacattg

SEQ ID NO: 47469 - DNA, 120 bp, Artificial Sequence
  ENSG00000065534_38 (sequence is synthesized)
aggagagattaggatctgggaaatttggacaggtctttcgacttgtagaaaagaaaactcgaaaagtctgggcagggaagttcttcaaggcatattcagcaaaagagaaagagaatatcc

SEQ ID NO: 47470 - DNA, 120 bp, Artificial Sequence
  ENSG00000065534_39 (sequence is synthesized)
ggcaggagattagcatcatgaactgcctccaccaccctaagctggtccagtgtgtggatgcctttgaagaaaaggccaacatcgtcatggtcctggagatcgtgtcaggaggggagctgt

SEQ ID NO: 47471 - DNA, 120 bp, Artificial Sequence
  ENSG00000065534_40 (sequence is synthesized)
ttgagcgcatcattgacgaggactttgagctgacggagcgtgagtgcatcaagtacatgcggcagatctcggagggagtggagtacatccacaagcagggcatcgtgcacctggacctca

SEQ ID NO: 47472 - DNA, 120 bp, Artificial Sequence
  ENSG00000065534_41 (sequence is synthesized)
agccggagaacatcatgtgtgtcaacaagacgggcaccaggatcaagctcatcgactttggtctggccaggaggctggagaatgcggggtctctgaaggtcctctttggcaccccagaat

SEQ ID NO: 47473 - DNA, 120 bp, Artificial Sequence
  ENSG00000065534_42 (sequence is synthesized)
ttgtggctcctgaagtgatcaactatgagcccatcggctacgccacagacatgtggagcatcggggtcatctgctacatcctaaaccgcctggactgcacgcagtgccttcagcatccat

SEQ ID NO: 47474 - DNA, 120 bp, Artificial Sequence
  ENSG00000065534_43 (sequence is synthesized)
ggctaatgaaagataccaagaacatggaggccaagaaactctccaaggaccggatgaagaagtacatggcaagaaggaaatggcagaaaacgggcaatgctgtgagagccattggaagac

SEQ ID NO: 47475 - DNA, 120 bp, Artificial Sequence
  ENSG00000065534_44 (sequence is synthesized)
tgtcctctatggcaatgatctcagggctcagtggcaggaaatcctcaacagggtcaccaaccagcccgctcaatgcagaaaaactagaatctgaagaagatgtgtcccaagctttccttg

SEQ ID NO: 47476 - DNA, 120 bp, Artificial Sequence
  ENSG00000065534_45 (sequence is synthesized)
aggctgttgctgaggaaaagcctcatgtaaaaccctatttctctaagaccattcgcgatttagaagttgtggagggaagtgctgctagatttgactgcaagattgaaggatacccagacc

SEQ ID NO: 47477 - DNA, 120 bp, Artificial Sequence
  ENSG00000065534_46 (sequence is synthesized)
ccgaggttgtctggttcaaagatgaccagtcaatcagggagtcccgccacttccagatagactacgatgaggacgggaactgctctttaattattagtgatgtttgcggggatgacgatg

SEQ ID NO: 47478 - DNA, 120 bp, Artificial Sequence
  ENSG00000065534_47 (sequence is synthesized)
ccaagtacacctgcaaggctgtcaacagtcttggagaagccacctgcacagcagagctcattgtggaaacgatggaggaaggtgaaggggaaggggaagaggaagaagagtgaaacaaag

SEQ ID NO: 47479 - DNA, 120 bp, Artificial Sequence
  ENSG00000065534_48 (sequence is synthesized)
ccagagaaaagcagtttctaagtcatattaaaaggactatttctctaaaactcaaaaaaaaaaaaaaaactcaagatagtaaaagcacctagtgtgatagattatcggttaggtcatttg

SEQ ID NO: 47480 - DNA, 120 bp, Artificial Sequence
  ENSG00000065534_49 (sequence is synthesized)
tgggttgattcttcagaaacagcagttgatacctagcagcgttattgatgggcattaatctatgttagttggcaccttaagatactagtgcagctagatttcatttagggaaatcaccag

SEQ ID NO: 47481 - DNA, 120 bp, Artificial Sequence
  ENSG00000065534_50 (sequence is synthesized)
taacttgactgaccaattgattttagagagaaagtaaccaaaccaaatatttatctgggcaaagtcataaattctccacttgaatgcgctcatgaaaaataaggccaaaacaagagttct

SEQ ID NO: 47482 - DNA, 120 bp, Artificial Sequence
  ENSG00000065534_51 (sequence is synthesized)
gggccacagctcagcccagagggttcctggggatgggaggcctctctctccccaccccctgactctagagaactgggttttctcccagtactccagcaattcatttctgaaagcagttga

SEQ ID NO: 47483 - DNA, 120 bp, Artificial Sequence
  ENSG00000065534_52 (sequence is synthesized)
gccactttattccaaagtacactgcagatgttcaaactctccatttctctttccccttccacctgccagttttgctgactctcaacttgtcatgagtgtaagcattaaggacattatgct

SEQ ID NO: 47484 - DNA, 120 bp, Artificial Sequence
  ENSG00000065534_53 (sequence is synthesized)
tcttcgattctgaagacaggtccctgctcatggatgactctggcttccttaggaaaatatttttcttccaaaatcagtaggaaatctaaacttatcccctctttgcagatgtctagcagc

SEQ ID NO: 47485 - DNA, 120 bp, Artificial Sequence
  ENSG00000065534_54 (sequence is synthesized)
ttcagacatttggttaagaacccatgggaaaaaaaaaatccttgctaatgtggtttcctttgtaaaccaggattcttatttgtgctgttatagaatatcagctctgaacgtgtggtaaag

SEQ ID NO: 47486 - DNA, 120 bp, Artificial Sequence
  ENSG00000065534_55 (sequence is synthesized)
atttttgtgtttgaatataggagaaatcagtttgctgaaaagttagtcttaattatctattggccacgatgaaacagatttcaactgataaagagctggagaactccatgtactttggaa

SEQ ID NO: 47487 - DNA, 120 bp, Artificial Sequence
  ENSG00000065534_56 (sequence is synthesized)
tctcctccaagatagccagagtttaatacatcttcattctcaacactctccaaagaacttgacctaccttatgggttccatatttttcttcttaaatgtgcatcaatcatgccttgcccc

SEQ ID NO: 47488 - DNA, 120 bp, Artificial Sequence
  ENSG00000065534_57 (sequence is synthesized)
caacctttaaatatattcttagacctggtaaatgcactcagacttgcgtctttaggaatttttaactttctttcactacattggcacttaaattttttctttataaagctttttgaaggt

SEQ ID NO: 47489 - DNA, 120 bp, Artificial Sequence
  ENSG00000065534_58 (sequence is synthesized)
cataaacaaagaccataattgatgatagacctaatacatttcctctgtgtgtgtgtgtaacattccaaatactttttttttcttttccactgtttgtaaggtgcaacaatttaatatttt

SEQ ID NO: 47490 - DNA, 120 bp, Artificial Sequence
  ENSG00000065534_59 (sequence is synthesized)
taagggactttttaagagttccttaagaaccaatttaaaattacttcagtgcaatcctacacagtatcaacattagaattttgatattagtcttatgttatcttccattctatttttatc

SEQ ID NO: 47491 - DNA, 120 bp, Artificial Sequence
  ENSG00000065534_60 (sequence is synthesized)
tgctttttgctgctagtttcaaactgccagtatttttccttttgcttttaaaatagttacaatatttttcatgatagccacagtattgccacagtttattataataaagggtttttattt

SEQ ID NO: 47492 - DNA, 120 bp, Artificial Sequence
  ENSG00000065534_61 (sequence is synthesized)
gatttagcgcattcaaagcttttttctatcacttttgtgttcagaatataacctttgtgtgcgtgtatgttgtgtgtgtgcatgtgtggcgtatatgtgtgttacaggttaatgccttct

SEQ ID NO: 47493 - DNA, 120 bp, Artificial Sequence
  ENSG00000065534_62 (sequence is synthesized)
tggaattgtgttaatgttctcttggtttattatgccatcagaatggtaaatgagaacactacaactgtagtcagctcacaatttttaaataaaggataccacagtgcatgctgtttgttc

SEQ ID NO: 47494 - DNA, 120 bp, Artificial Sequence
  ENSG00000065534_63 (sequence is synthesized)
gggcgctgagcgagctcggagcccgcgctgtgcgcctgcggccggggcgccccgccgagcgccggtgccccggctcccgggccgccttcgccgcgcgggaaggattcttcaaaattaaca

SEQ ID NO: 47495 - DNA, 120 bp, Artificial Sequence
  ENSG00000065534_64 (sequence is synthesized)
tagatgtgaagaactggcttatgtggttgtgttttgctatggaacagaatgatttaggaagttcttgtttatataggtagccgaatttacacatttagttcaaaatttctcttgagcatc

SEQ ID NO: 47496 - DNA, 120 bp, Artificial Sequence
  ENSG00000065534_65 (sequence is synthesized)
agcttagtactatatcaatcattctagaaggatatcttatagagcaggtgtccccaacccccggtaagtagcctgttaggaaccaggtcacacataaggaggttagcagtgggcaagtga

SEQ ID NO: 47497 - DNA, 89 bp, Artificial Sequence
  ENSG00000065534_66 (sequence is synthesized)
aaccaggtcacacataaggaggttagcagtgggcaagtgagcaaagcatcatctatatttacagccgatccccattgctcgcattaccc

SEQ ID NO: 47498 - DNA, 85 bp, Artificial Sequence
  ENSG00000065534_67 (sequence is synthesized)
agcatcaggttctctcaggaacgaactctattgtgaactgctcatgtgagggatctaggtttcacgctccttatgagaatctaac

SEQ ID NO: 47499 - DNA, 120 bp, Artificial Sequence
  ENSG00000065534_68 (sequence is synthesized)
atgatgagttgtatacttattttatattataataaaatatattattacaatgtaataataatagaaataaaatgcacaatacatgtaatgtgcttgaataatcccaaaaccaccccctct

SEQ ID NO: 47500 - DNA, 120 bp, Artificial Sequence
  ENSG00000065534_69 (sequence is synthesized)
caaaaccaccccctctcctggtccatggaaaaactgtcttccatgaaagtggtccctggtgccaaaaaggttagggaccactgttacagagtatcaggtcctcaagatgctaaaatctat

SEQ ID NO: 47501 - DNA, 120 bp, Artificial Sequence
  ENSG00000065534_70 (sequence is synthesized)
atgacatttttaacatgtgacattatcatcatcatcatcatcatcatcactgatgatactatttaccagggcatggtttgaattggtgactttggtgcagttcattattggcagccaaat

SEQ ID NO: 47502 - DNA, 120 bp, Artificial Sequence
  ENSG00000065534_71 (sequence is synthesized)
gctttatccataccttcatattgaagaatttgttatcaggaaactaccagtcctgctttacaggaagtctgttatcagatatcagatggcaagttccccatgtcttcagatgttcaaaca

SEQ ID NO: 47503 - DNA, 120 bp, Artificial Sequence
  ENSG00000065534_72 (sequence is synthesized)
atattgtggatggtctagaaagagtttaagacatgctgttaaatgtagggctagataattctctgattctttgatgtagtctggaaagaaacaatccattgtccagttaataaatattta

SEQ ID NO: 47504 - DNA, 120 bp, Artificial Sequence
  ENSG00000065534_73 (sequence is synthesized)
gtgttttcatttttaagacactcacaatccacaaatgtccctaacaatttattatttttaaagaaaatgactttttattccttgctagtgaaaaatgtacaatttatatgctgcactgag

SEQ ID NO: 47505 - DNA, 120 bp, Artificial Sequence
  ENSG00000065534_74 (sequence is synthesized)
aaaaataacagatatactttcttccattcattttcatcccaaacatataaaaaataatccattgattgttccttgcattgcatatcttattaaaagatatttcctacatgcaactaataa

SEQ ID NO: 47506 - DNA, 120 bp, Artificial Sequence
  ENSG00000065534_75 (sequence is synthesized)
gacatgctgactgttgtcagctctaaatttatgtaaagattttttatttttgttaaaatgtttgaaatttgctttttgctccacacctcacctgtttttgataaatctgtgctaataagt

SEQ ID NO: 47507 - DNA, 120 bp, Artificial Sequence
  ENSG00000065534_76 (sequence is synthesized)
acataggaggtaataaataattgagttgtgagaaacccaattctccatttttcaagaaaacacaagtagcactactctctttatcccttgggactccttcctgtaatttgaaaggggggg

SEQ ID NO: 47508 - DNA, 120 bp, Artificial Sequence
  ENSG00000065534_77 (sequence is synthesized)
ctaatgttggtggcagttgttgctaaggatctctgcacagagttagggcttcactctcggcttcctggttagatggggccatgtgactagtcctagtcagtgagctgtgaccagaagtga

SEQ ID NO: 47509 - DNA, 120 bp, Artificial Sequence
  ENSG00000065534_78 (sequence is synthesized)
tgtatgtaccctcgggaccagagcatttatgtgctggtacaagcctctccataatgacgggcaacacatgagatggtggctgctgcagccatctgggtctctagccaacccaaaatgggg

SEQ ID NO: 47510 - DNA, 120 bp, Artificial Sequence
  ENSG00000065534_79 (sequence is synthesized)
acataacacaagcaagaaataaacatttgttcttataaatcaccaagattttggggttctcagtggctgcaacataacctagactatcctgatacaggcttatcaccatgttctggatgt

SEQ ID NO: 47511 - DNA, 120 bp, Artificial Sequence
  ENSG00000065534_80 (sequence is synthesized)
gtggtgaccaggatggtagccactactcacaagtggctatttaaatttaagttactttaaaaaataaaataaaaaattcagttcctcagttgtatgagttacatttcaaatgctcgacag

SEQ ID NO: 47512 - DNA, 120 bp, Artificial Sequence
  ENSG00000065534_81 (sequence is synthesized)
tcacatgtacatcacttttcaaattatgtgaaattaaaactgaaaagcttgtgtgaaagtctagagagtatggtctatagtttcatcaattgtattggataatatagtctcgatactcaa

SEQ ID NO: 47513 - DNA, 120 bp, Artificial Sequence
  ENSG00000065534_82 (sequence is synthesized)
agtggcctttcccccttcatgggagacaacgataacgaaaccttggccaacgttacctcagccacctgggacttcgacgacgaggcattcgatgagatctccgacgatgccaaggatttc

SEQ ID NO: 47514 - DNA, 120 bp, Artificial Sequence
  ENSG00000065534_83 (sequence is synthesized)
agtgctgagcagagcaaggttgggttcgctcctctggcagaacctcggctctcaggaggtccttgttccagggaacagctgcttctctggggctgggctctactccctgcagcccctcgc

SEQ ID NO: 47515 - DNA, 120 bp, Artificial Sequence
  ENSG00000065534_84 (sequence is synthesized)
caggctcactctgctccgtctccatcgagaaggcactgcctgaggacagaggcttatacaagtgtgtagccaagaatgacgctggccaggcggagtgctcctgccaagtcaccgtggatg

SEQ ID NO: 47516 - DNA, 120 bp, Artificial Sequence
  ENSG00000065534_85 (sequence is synthesized)
aaatctgagtcagctgaggtgtcagagtgctcttcctgtgggctgctcccctccctggcccctggcagcaccctccccactccctccctcaccttttatcgtgcctgccttcccctcaca

SEQ ID NO: 47517 - DNA, 120 bp, Artificial Sequence
  ENSG00000065534_86 (sequence is synthesized)
gaagtgttgagtgcccagcctatgctgatattttaatcaatttttttttcttcttgtttacggcattattagccatagggttttctggaagggcgggggaagaaaagggtagaattcaga

SEQ ID NO: 47518 - DNA, 120 bp, Artificial Sequence
  ENSG00000065534_87 (sequence is synthesized)
gaatgaaccttaattttatattttagtatagatggcgacatttggaaatgatttttccacaaaattgcacacaaaagttgtccacaaaaattccattcaacaagtagtttccctgaagag

SEQ ID NO: 47519 - DNA, 120 bp, Artificial Sequence
  ENSG00000065534_88 (sequence is synthesized)
tagcttccctggtaacagctctaaccatttcatgttacgttgctccctcaggaaaacgttttctgcattttaactgcaatcaccagggccttagctccccttggaatatgagggttccct

SEQ ID NO: 47520 - DNA, 120 bp, Artificial Sequence
  ENSG00000065534_89 (sequence is synthesized)
cttgcagcagccaaggttctgtgcagtggggtggagtgggctgtgggcgggggcagagggagaggggaagatcaggctcaggtggcccagaactctctgcagctgtgccagagaaggcac

SEQ ID NO: 47521 - DNA, 120 bp, Artificial Sequence
  ENSG00000065534_90 (sequence is synthesized)
cttcttgttattctggtgtggttttcataaaaagccctagaaggaatgaagtgacatgggaacaaatccctacaagcaaagctaggctgggtatagatgactaatcatattactcatctt

SEQ ID NO: 47522 - DNA, 120 bp, Artificial Sequence
  ENSG00000065534_91 (sequence is synthesized)
ggaatcaagttattccgaaagaaggtatattttaaatttatattaaaagaattttacaaagatatgttggaaaggtgtagcaatgggggcaggtaggttgagcagattaacagggtttcc

SEQ ID NO: 47523 - DNA, 120 bp, Artificial Sequence
  ENSG00000065534_92 (sequence is synthesized)
gcatgcacactggaagcaaaagactagacatcagaggcccttaggtagccatctttattttctgggaaccataaagaccccagcagtatggaccaagggcattaggggagaaaacactgg

SEQ ID NO: 47524 - DNA, 120 bp, Artificial Sequence
  ENSG00000065534_93 (sequence is synthesized)
actcagtatagcacggagtattcttggccatcccatttggatggtatgcactgctcaggggaaactgtagtcttggggctactggtatatatggggggctttgatgggtaaccagcttgc

SEQ ID NO: 47525 - DNA, 120 bp, Artificial Sequence
  ENSG00000065534_94 (sequence is synthesized)
tgtatgtatgtcagggaatgtcttagtattggtgccaaaagaccctaatcctgggaaactccacaagcctgcctgggcaagccaggatggctggccccacaagctctccaaggggcaggg

SEQ ID NO: 47526 - DNA, 120 bp, Artificial Sequence
  ENSG00000065534_95 (sequence is synthesized)
aatttgtgctgcatgaaggaggctggtgcagatactgctcaccagcgacacaggaacccagcctgggcaattgccctcaagcaagaaaaagggagaaattacaaaatcaaaacttggcga

SEQ ID NO: 47527 - DNA, 120 bp, Artificial Sequence
  ENSG00000065534_96 (sequence is synthesized)
tcttgatgttccaaaaatttccaaaggtctttggtcagtaaagcaacaaccaattgtcagctcaaaggcataaaactggaagactagaacatactgatatattcatttctagttctgaca

SEQ ID NO: 47528 - DNA, 120 bp, Artificial Sequence
  ENSG00000065534_97 (sequence is synthesized)
aataacttcctcggcaattttttttcacaaatcaattcccaaatatttttctatgttttagaaattatatgctggatatctccatcttttagaaaagttctccctatgtgagacatattt

SEQ ID NO: 47529 - DNA, 120 bp, Artificial Sequence
  ENSG00000065534_98 (sequence is synthesized)
atttgttaatatatttactacttcctctgaaatactataactcttttgtttcctcattctgatagcttcattttagtcattttgttatgaaataaaatctggaagaaaaaagacatcgtc

SEQ ID NO: 47530 - DNA, 120 bp, Artificial Sequence
  ENSG00000065534_99 (sequence is synthesized)
tcgccacaccacacaggtgaagacagtcctcatcagtcccaatcctgatgtctggaattggggagcccatgggctcaaggcgggtgttccttgctacacatttatggatataaaccagag

SEQ ID NO: 47531 - DNA, 120 bp, Artificial Sequence
  ENSG00000065534_100 (sequence is synthesized)
tcgttctgtagaggtctggaactgcaggaagattagaatcttctgctcccaggctactgaggcccagagaggggaactgacttgcacaaggtctcccagcaattagggttagagaactaa

SEQ ID NO: 47532 - DNA, 120 bp, Artificial Sequence
  ENSG00000065534_101 (sequence is synthesized)
cctgtcccttgttgggaatgaaccctctgggtttagaggctcctagcccaggacaaaccaatctgtgttggataaagggaatggagagcagagaagggccgagtctgagaatcgggttga

SEQ ID NO: 47533 - DNA, 120 bp, Artificial Sequence
  ENSG00000065534_102 (sequence is synthesized)
ttaggaagcaggctggtctgacattgactacgtagggagggctgccatggctggtaccacctcttacctgttcctgagggcagggtaacctcccatgggaagagctgggtctctctctct

SEQ ID NO: 47534 - DNA, 120 bp, Artificial Sequence
  ENSG00000065534_103 (sequence is synthesized)
ctacactttgtctagcacaacaaacaggttgaaccagtaacatctcccagaagagcatgaaaggttgccacgtggcctgagcctgcagaggcattctccgcagggccacacggtggttct

SEQ ID NO: 47535 - DNA, 120 bp, Artificial Sequence
  ENSG00000065534_104 (sequence is synthesized)
gcgcacagttaagttgttcagttttcatctctcaccatcttcccctcctcatcacctccacctggggctgcgtggattctgttcagcgacccagcctcactgtggtggcagaggccagaa

SEQ ID NO: 47536 - DNA, 120 bp, Artificial Sequence
  ENSG00000065534_105 (sequence is synthesized)
acatacccacaccatacagtgtgatgtgtgtgagaagggatggccaggggacagagcaaggtgaaatgtctgtccaaagtgcatgagagcagtctgcagcaaggatggcaggaggcatga

SEQ ID NO: 47537 - DNA, 120 bp, Artificial Sequence
  ENSG00000065534_106 (sequence is synthesized)
cagtaaggtcatcccgctcactgcagtaggtctcctctttaaccatacacacacgcacacaattttctgtatgtttccttagcacccagaagttattcactttcaaaatgatcagtcttt

SEQ ID NO: 47538 - DNA, 120 bp, Artificial Sequence
  ENSG00000065534_107 (sequence is synthesized)
ttactgaagcttactggctttccaactagtcctaaattgtgaggctttactgaagtacttgagcatgtgaagtgaactgaggaggaaaatggctttgccggcagagtttgagatgcaacg

SEQ ID NO: 47539 - DNA, 120 bp, Artificial Sequence
  ENSG00000065534_108 (sequence is synthesized)
agtacaagccatttgcctatgaagaggctgtttcctccctctctcagggaggacaagtagccagtctgtggtgacatctgttgtctagatgcacagcttttcgatgcctaaaaaagatgc

SEQ ID NO: 47540 - DNA, 120 bp, Artificial Sequence
  ENSG00000065534_109 (sequence is synthesized)
tttgggtgcaggggtggaaagacttggttgtgccttagttttcttatcttagtcattcctgttaaccttagaaaaaaggtgaaaaacttactgaaagataagaaacaataagacacaatt

SEQ ID NO: 47541 - DNA, 120 bp, Artificial Sequence
  ENSG00000065534_110 (sequence is synthesized)
gtacattattagggatcctatgcttggtagaattttcgcaatgtaaataaattacatctcaagttctgatccttttcagcagaaattctttcctctcccaagtctagtcactgagaagca

SEQ ID NO: 47542 - DNA, 120 bp, Artificial Sequence
  ENSG00000065534_111 (sequence is synthesized)
aagtgccgttgccttttatttcttcaatgcttctttttggtgcctgaatgcacaccaaggaagagctcctctccagagcttcactgcatcatagacttgtgcaggggccagccagagtgt

SEQ ID NO: 47543 - DNA, 120 bp, Artificial Sequence
  ENSG00000065534_112 (sequence is synthesized)
tggagatcatcttgtccagccccctcctagagaaggagactgaagctcagagtggttaagtgacttgcccaaggtcaacaggatgctgtgttattattattatgattatttttgcatcag

SEQ ID NO: 47544 - DNA, 120 bp, Artificial Sequence
  ENSG00000065534_113 (sequence is synthesized)
gacttgtgggatctgtagtaactattctcttggccaattataatcacatcactggcattgttttacgagaaatagccccgctaggcccagtcagcaataagtctttggagctgtctcagc

SEQ ID NO: 47545 - DNA, 120 bp, Artificial Sequence
  ENSG00000065534_114 (sequence is synthesized)
ctgcagttgctttatataaaccatcccttttatgggagttgaagcactgtatgaaaagggtttttgtctcatgttgaccttgtttagtcacattaacgcacacatcagttccaggcccca

SEQ ID NO: 47546 - DNA, 120 bp, Artificial Sequence
  ENSG00000065534_115 (sequence is synthesized)
gtagctgtgcttctcttcaccatgaatagggtgtggctggatggtagagtccctaccatgcaccgtgggcaagaagtcagttctgtgcagctggggacaatgaggaactgccaagctttg

SEQ ID NO: 47547 - DNA, 120 bp, Artificial Sequence
  ENSG00000065534_116 (sequence is synthesized)
ggggaaactgggtcagcaggagctgctcataaagggctatgccctgcactcccacctcctgaaggtgtgtccttcagtcacttccccagggggcacatttgaaatttcacctacttacat

SEQ ID NO: 47548 - DNA, 120 bp, Artificial Sequence
  ENSG00000065534_117 (sequence is synthesized)
cagccactagacctaagtttagaaatggccttgcatggacttacctggctttggaacatgcttagtgaaatgagctttgcaaactgctgaaaagcatgtgacttgcccatatgaggccct

SEQ ID NO: 47549 - DNA, 120 bp, Artificial Sequence
  ENSG00000065534_118 (sequence is synthesized)
caaaggaaggctggcacaaaggcataggatgtggaatcggcaggctctgctactcgtccacaggctgtgtgaccttggatggtggtccaactcccctgagttacggtccctctgctgtaa

SEQ ID NO: 47550 - DNA, 120 bp, Artificial Sequence
  ENSG00000065534_119 (sequence is synthesized)
gatgatagctaagtcacggagtggctctggggattctgtgaggggacatatgtgagaagggggaaccttttagatcttgtaaagatgtcacagagcaaagggaaaagttgtgggactggc

SEQ ID NO: 47551 - DNA, 120 bp, Artificial Sequence
  ENSG00000065534_120 (sequence is synthesized)
aggtacagagagagtgcatgcattgtgacttcagactgaggccagttgggagccaggcacccgggacaaagcactcagccggcaccatcttccccaggctgcttatctgcctgctgggaa

SEQ ID NO: 47552 - DNA, 120 bp, Artificial Sequence
  ENSG00000065534_121 (sequence is synthesized)
taatgcagccacagacctgtcagtggtcagagctcaagggaccttaaggggtcatggcatagcacctgagaaatgagcaaagttgatgacacaaagcgtttccattttcatatagattgc

SEQ ID NO: 47553 - DNA, 120 bp, Artificial Sequence
  ENSG00000065534_122 (sequence is synthesized)
aaccgtctagaaagagaagggacaagataagacaggctctttgcttcaagtctgtgactttcacctgccaaccagggtggtgggttatcacccattttggtctgaccaaataaagcacag

SEQ ID NO: 47554 - DNA, 120 bp, Artificial Sequence
  ENSG00000065534_123 (sequence is synthesized)
aagtttattaggcaactttcccgaggccgcatagcacagtacagcagtcaaaacaaactgtgcctcccactttctttgattctccagcaatgtgactagacaatgccttttgagtaaaat

SEQ ID NO: 47555 - DNA, 120 bp, Artificial Sequence
  ENSG00000065534_124 (sequence is synthesized)
aacccaaagttaggaatggaaaaaatagtttttcttctgcatctttatattatcaaagtgccttatcaatgcttcgcctaccatagtcattttcctttcctcactcaattaaaagaaagt

SEQ ID NO: 47556 - DNA, 120 bp, Artificial Sequence
  ENSG00000065534_125 (sequence is synthesized)
ggatgtgctgcctttgataatgtgaaaattctcggactggggattctgctgaaggctctggagccactgcttgcaattctcaccattaccattgcatttgggtcttctgaagtttctttt

SEQ ID NO: 47557 - DNA, 120 bp, Artificial Sequence
  ENSG00000065534_126 (sequence is synthesized)
cctttttgaatgttttaaaataacataatgattatcattttgtacttaattttctctttgggattgtttcgtacttaattttctctttggaattgtttcattgatatttatgtaactttt

SEQ ID NO: 47558 - DNA, 120 bp, Artificial Sequence
  ENSG00000065534_127 (sequence is synthesized)
gcctggggctctgatgagaaattaaagcatatggatgctgttttgataaaaacaaaattgaaacttttgcactgagggtgcagggcatgggagtggagggtactttatgaccagctcttc

SEQ ID NO: 47559 - DNA, 120 bp, Artificial Sequence
  ENSG00000065534_128 (sequence is synthesized)
ctgacccaattttcctcatggtctgggtgttcctaattacttcgaaaaaacaatttctaaaattattttgaaaaaacaacattgaaaagaacattagaattcttgatttcttatgtataa

SEQ ID NO: 47560 - DNA, 120 bp, Artificial Sequence
  ENSG00000065534_129 (sequence is synthesized)
cattgctataaaggaatacctgaggctggaaaatttataaagaaaagaagcttatttggcttggtgccagtatctgcatccagtgaggcctcaggatgcttttaatcatagcagaagcag

SEQ ID NO: 47561 - DNA, 120 bp, Artificial Sequence
  ENSG00000065534_130 (sequence is synthesized)
gaggcctcaggatgcttttaatcatagcagaagcaggcatgtcacatggcaagtgagagagcgagagagaaggacgtgccacgttttaacaaccagatccgcatgaaatgacagagcaat

SEQ ID NO: 47562 - DNA, 120 bp, Artificial Sequence
  ENSG00000065534_131 (sequence is synthesized)
acgttttaacaaccagatccgcatgaaatgacagagcaataactcacccattacctcgggaagggcaccaagacattcatgagggatcggcctccatgacccaaacacctcccaccaggc

SEQ ID NO: 47563 - DNA, 120 bp, Artificial Sequence
  ENSG00000065534_132 (sequence is synthesized)
caaggggcacaaatatccaaaccgtatcagggctacaatttttttcctataaaaatacttcaccaacatttaagagaaagtcaggtggaatatattgtatatttttaaatgtatgtatat

SEQ ID NO: 47564 - DNA, 120 bp, Artificial Sequence
  ENSG00000065534_133 (sequence is synthesized)
atatgactttaaaagcggggtacatgtatatactatgtacctgcaaacaaaatgcataatgttggtaatgcttctgtacatatatatgtacacatacacattaaatacatataatatata

SEQ ID NO: 47565 - DNA, 120 bp, Artificial Sequence
  ENSG00000065534_134 (sequence is synthesized)
agacaccccactgcaaccccacccccaccctcagttccagctctgcatttttcaggctgagtttgctcatggagagcctctgcacagcctggctcctggtccccttccacagctttgtct

SEQ ID NO: 47566 - DNA, 120 bp, Artificial Sequence
  ENSG00000065534_135 (sequence is synthesized)
taaaaacctgtgagcttccacccctggctcccccaggactccattgagagcctctgcagtggcagccagaggtttcaaaggtcaccccagctgggcggattagaacaacagatctcccgg

SEQ ID NO: 47567 - DNA, 120 bp, Artificial Sequence
  ENSG00000065534_136 (sequence is synthesized)
accgggtgaagttggctgctcagcggaaggcaaattgcaccatctgcgagcagagtcagaacaaaagccccttaactttttcggtctggccctgggctctgtggcgcccggcactccttc

SEQ ID NO: 47568 - DNA, 120 bp, Artificial Sequence
  ENSG00000065534_137 (sequence is synthesized)
ggtctccattcttggctggaccttggacaggaacctctgcagtacggtggtggtgaagtgtggctgcctcgcatcctgactcatgtgagagctgccgaggaagaagctgcggtaagacca

SEQ ID NO: 47569 - DNA, 120 bp, Artificial Sequence
  ENSG00000065534_138 (sequence is synthesized)
gctagtgcagaacgatccctgcctggtgccgcaccctcctagaggagctgcttgttcactgcgcacctgtgtgtgtatacacctggcccactcacacacccaggcactccccaggggcag

SEQ ID NO: 47570 - DNA, 120 bp, Artificial Sequence
  ENSG00000065534_139 (sequence is synthesized)
ctgagagtgagtactcgcccagcttcaccaggcagaggcagaggcaggggcaggcaccccggggactgagggcagcctcagagcccccactttctggtcactcactcttgcctgaatccc

SEQ ID NO: 47571 - DNA, 120 bp, Artificial Sequence
  ENSG00000065534_140 (sequence is synthesized)
tggaagtctgatgtctgcccacaccctgaagtgcccagtgaactcccaataacagagccagtggccttttctcaccccatcccagtgctctctccagcctgtctccagcctgggtggtgt

SEQ ID NO: 47572 - DNA, 120 bp, Artificial Sequence
  ENSG00000065534_141 (sequence is synthesized)
tgcacatctcatctgagctcctatctacctcccctgcccaacctccttcatgccctttcacttcccaccaagactctaggagagctcctcctaatttctccccagttgatcctgccctcc

SEQ ID NO: 47573 - DNA, 120 bp, Artificial Sequence
  ENSG00000065534_142 (sequence is synthesized)
caggggctctttctggattgtaactctgatctcatcactcctggttgaaatatgcagtggcccccagagcctgcaaaacccacaagcaaagctccacatgttagtgccgaggacatacct

SEQ ID NO: 47574 - DNA, 120 bp, Artificial Sequence
  ENSG00000065534_143 (sequence is synthesized)
agctcgcatgtgcacacgtggtcccacatgtggcctgccccccgcctgtctttcccggtgctgcccccagctcctttacttctattttatactcaggccaaactgagctcttcactgcac

SEQ ID NO: 47575 - DNA, 120 bp, Artificial Sequence
  ENSG00000065534_144 (sequence is synthesized)
actacacagcccccaagttccttccttcatgccttctctggcacctctctccatgggacacctttctgccaaactcctctgaaaagtctctcatccctgagttcttcctcacctcagctc

SEQ ID NO: 47576 - DNA, 120 bp, Artificial Sequence
  ENSG00000065534_145 (sequence is synthesized)
ccacagtgtcagcacctggctcctccactacctccttcccaatgtcacggagatgtgtctgggtctcatcctccctcctccattgtacagggtctgttcaagcaattacctttcagaatg

SEQ ID NO: 47577 - DNA, 120 bp, Artificial Sequence
  ENSG00000065534_146 (sequence is synthesized)
acacatgctgcgccttgctcgtggaaggcccttcccagtttctcttagagtcaaatcgcagtgtggtataaaaagccaagagagaaaggagcctctccgtgaccataggcagctacctcc

SEQ ID NO: 47578 - DNA, 120 bp, Artificial Sequence
  ENSG00000065534_147 (sequence is synthesized)
ctctttttggatctcagcttccccgtagcccacacatccattaggcaccatgcgtagggtccacagtgcttttacaggcctgccaaatgctgtaatatcttataaaattagaagaaaaaa

SEQ ID NO: 47579 - DNA, 120 bp, Artificial Sequence
  ENSG00000065534_148 (sequence is synthesized)
gggaactcttaagtcaaagaaaaggttttaattcatgacatgaatatattcatctttatacccatgcagttaaaagtgtagtttacataattcaaatataatacttgatatgtaattaaa

SEQ ID NO: 47580 - DNA, 120 bp, Artificial Sequence
  ENSG00000065534_149 (sequence is synthesized)
catgaaaggatgtaacacgcaccaagatgtataaactatccggatagttctccatagccatgggtgtgtatggatagaacggacctggtcgcaaccagagttggatgtgattatgaggaa

SEQ ID NO: 47581 - DNA, 120 bp, Artificial Sequence
  ENSG00000065534_150 (sequence is synthesized)
atgctcccaggtgcaggagtttgaattaggtgtggaacctcagtcagaatacagagaagaggactgcacaggtggaggagaaggcacagaggtgggagccggacccattccggctgggct

SEQ ID NO: 47582 - DNA, 120 bp, Artificial Sequence
  ENSG00000065534_151 (sequence is synthesized)
tggctggacaggagcagagtcttttagctggatactcaagggacccaggggcattgagactttgcctgggtggcaaagaaaagggaaatcactgtgttggaggcaactggaacactggtc

SEQ ID NO: 47583 - DNA, 120 bp, Artificial Sequence
  ENSG00000065534_152 (sequence is synthesized)
atttaccacaccaggtgactaaatcacagttgcctcagaaagtagagtgtcactcagaggttgaaagagggagcaaaggcgaatgggggccacaagtgtggagtttaagtgaccaccatc

SEQ ID NO: 47584 - DNA, 120 bp, Artificial Sequence
  ENSG00000065534_153 (sequence is synthesized)
ctgagcacatatcagctgtgctcctccaccatggaagtcagttcctggctacacccctcatgggaaggtgggtctccaggcctccctcaagtgcaaggtgagttgaaacatctgtagctg

SEQ ID NO: 47585 - DNA, 120 bp, Artificial Sequence
  ENSG00000065534_154 (sequence is synthesized)
cttaccttttggtgccactaggatctgagtagcaaatattctttttaaaaatgtgggggaggatctacaaagtcaaagtcagctgtattaataatcctgtagccagcaggtctcaaagaa

SEQ ID NO: 47586 - DNA, 120 bp, Artificial Sequence
  ENSG00000065534_155 (sequence is synthesized)
atatttctggaaaggatagggaagctgatgtcagggcggggcagtcctcagagcagtgagtctaagtggatattgcttggctgaggctataggttaaggggcagccttatcacctgggaa

SEQ ID NO: 47587 - DNA, 120 bp, Artificial Sequence
  ENSG00000065534_156 (sequence is synthesized)
catctgcagatgaactaaagccaggaggatgcctaaacccaggggctaggagcagagaagagatgaggaaacaggagaggaggcaaagggaatttttcagttaaatcagtcagggaatca

SEQ ID NO: 47588 - DNA, 120 bp, Artificial Sequence
  ENSG00000065534_157 (sequence is synthesized)
tttttttttttttaaagagacagggtctcatgctgtcacccaggctggagggcaatggtacaatcatagcttactgcagtctcaacctcgtgggctcaagcaatcttctcgactcggcct

SEQ ID NO: 47589 - DNA, 120 bp, Artificial Sequence
  ENSG00000065534_158 (sequence is synthesized)
gctgggactacaggcatatgccaccagaccggctaatatttttttttctcctttggtagaaacagggtctcactatgttgcctagactagtcttgaactcctggcctcaagcgatgctgc

SEQ ID NO: 47590 - DNA, 120 bp, Artificial Sequence
  ENSG00000065534_159 (sequence is synthesized)
tatgcttttctgtacactggtaagttacagcatttgggtttggaattttcagtagatgtttgtttgtccctggattggttttttttccttctgtttagtgaacagaaacagattccatgc

SEQ ID NO: 47591 - DNA, 120 bp, Artificial Sequence
  ENSG00000065534_160 (sequence is synthesized)
cctcagggtatggtagcaccagccactattaagaagcccaaaggacagaacctgaagctttgacaatgtactctagggctggggggagttcaaaggccaaagacgttcagcaccagggaa

SEQ ID NO: 47592 - DNA, 120 bp, Artificial Sequence
  ENSG00000065534_161 (sequence is synthesized)
gctggaaggagccagcagggtgggaccacggtgatgaggaagtgcctggggagggaaattttggtgtatacagcattctactaacagtctttccacccttccccctttttccaggtttgg

SEQ ID NO: 47593 - DNA, 120 bp, Artificial Sequence
  ENSG00000065534_162 (sequence is synthesized)
acagtgccaataggtatgtctaggctttgtgacttttacgttttccctcttgaaatgccctgcaaggatgttaccgagaaatgccctgaatttctgaatcatcttatggggcagaagaat

SEQ ID NO: 47594 - DNA, 120 bp, Artificial Sequence
  ENSG00000065534_163 (sequence is synthesized)
tggccatttggaggatgttgttttattttgggtgttttgtcttgttctcctattgtaatatgacacacgggttctatctcaggttgctgtcagtattgagactggaaaactcagtgttgc

SEQ ID NO: 47595 - DNA, 120 bp, Artificial Sequence
  ENSG00000065534_164 (sequence is synthesized)
cacctttcacagtatctacacagtctcttctctggttagcatcctgaggaagaacactgctctgagaaggccgccttcctcattccagggcggaatctgttcactcatccagcccagacc

SEQ ID NO: 47596 - DNA, 120 bp, Artificial Sequence
  ENSG00000065534_165 (sequence is synthesized)
cagcaggagcctctttcctgtgtgtgaggctcggcgctagatgctggatgtgcaggggtgggcgtagaggagggcttaaaccacacgaacgcacattaccaactgggatgcgtctgtgag

SEQ ID NO: 47597 - DNA, 120 bp, Artificial Sequence
  ENSG00000065534_166 (sequence is synthesized)
gaaggacaacaggaaggcactgattagaatagaggggcagggaagccatttcgggaacttggtatttgagctcagacctgtgcaaaggaatgttagctggtgaagaaaagctcagggagt

SEQ ID NO: 47598 - DNA, 120 bp, Artificial Sequence
  ENSG00000065534_167 (sequence is synthesized)
gtgctccaaacagcagggatagcatgtacaagctgtgaaccaagagatgggcccatggggacccagaaggacgccagtgtggccgcagcctggtgaatggcaggccaatgtctgtacgat

SEQ ID NO: 47599 - DNA, 120 bp, Artificial Sequence
  ENSG00000065534_168 (sequence is synthesized)
caggagctggcattcctgtgggccctcttgtggggctcagtttcattcttaaagtagtggaaaagctgttggaaaatccttgggcttgaaatgacataatttgattaatgtttttaaaag

SEQ ID NO: 47600 - DNA, 120 bp, Artificial Sequence
  ENSG00000065534_169 (sequence is synthesized)
atcgactatggtcgctgtatagaaaatagattagagagggcagagtggacacgggacaccggtggcagaggttgaactacggaggcactagtagagaagggaactgtagggaaagcaggg

SEQ ID NO: 47601 - DNA, 120 bp, Artificial Sequence
  ENSG00000065534_170 (sequence is synthesized)
ctctgggcagggttgtgggacaggcaagtgtcgggaatggctgcttgtgctgtggcttgggaaactgggcaaactgcagagaaagatgctcttacttgcccttaacttgtgggcttttgt

SEQ ID NO: 47602 - DNA, 120 bp, Artificial Sequence
  ENSG00000065534_171 (sequence is synthesized)
aggtctgtctctgcagctctctcttggggattaacatgaaaatggtcttggttgcaatgggtattgctctccgaggacccgctcagatccttgatccaccagaaaatcagatgggaccat

SEQ ID NO: 47603 - DNA, 120 bp, Artificial Sequence
  ENSG00000065534_172 (sequence is synthesized)
caggtgatggacccaaagaaatggagactcttgtcctctcttttctgccttctctgggtaggattttctggattcatgattaaatggtccagaggaagaagatggccatagagctagagc

SEQ ID NO: 47604 - DNA, 120 bp, Artificial Sequence
  ENSG00000065534_173 (sequence is synthesized)
gatggccatagagctagagcagtgaaagattaatttgaaaatatagtgtggccagtgtagctggaaggttttgaagactggtacaaaaccagattatgggccgggcacggtggctcacgc

SEQ ID NO: 47605 - DNA, 120 bp, Artificial Sequence
  ENSG00000065534_174 (sequence is synthesized)
tgggcaccacagggagcccccaaacgtgtctcccctactgccctaccccagccacctctgccccaagatggaaagcactgcagacaggagtgtgatatgtaagatgctcaccagccatac

SEQ ID NO: 47606 - DNA, 120 bp, Artificial Sequence
  ENSG00000065534_175 (sequence is synthesized)
agccaggcctgaccaaacagaaccgaaggtctgtgcacagtgctggccctgagcctctgagcaccagcccagctgcagccttgtgcttatttccaaaacaaaccagtagatctttgagga

SEQ ID NO: 47607 - DNA, 120 bp, Artificial Sequence
  ENSG00000065548_0 (sequence is synthesized)
gactcgctttccgtgcggtgcggcgagtgaggccccggtcttcctcctcgtcctgccgcagggccagaacccctgacggtattcagctgcgcgtaagtctggccggtgccatctgtctcc

SEQ ID NO: 47608 - DNA, 120 bp, Artificial Sequence
  ENSG00000065548_1 (sequence is synthesized)
gcaatgccccccaagaaacaggctcaggccgggggcagcaaaaaggcggagcaaaaaaagaaggagaagattatcgaagacaaaactttcggtttgaagaataagaaaggagcaaagcaa

SEQ ID NO: 47609 - DNA, 120 bp, Artificial Sequence
  ENSG00000065548_2 (sequence is synthesized)
cagaagtttatcaaggctgtcacacatcaagttaaatttggtcaacaaaatccacgtcaggtagcacagagtgaagctgaaaagaaattgaagaaggatgacaagaagaaagaattgcag

SEQ ID NO: 47610 - DNA, 120 bp, Artificial Sequence
  ENSG00000065548_3 (sequence is synthesized)
gagctaaatgagctgttcaaacctgtagttgctgctcaaaaaataagtaaaggtgcagatcccaagtctgtagtatgtgcattcttcaagcaaggacagtgtactaaaggagataagtgt

SEQ ID NO: 47611 - DNA, 120 bp, Artificial Sequence
  ENSG00000065548_4 (sequence is synthesized)
aagttctcccatgacttgactctggagagaaaatgtgaaaagcgaagtgtttacattgatgcaagagatgaagaacttgaaaaagatactatggataattgggatgagaaaaagctggaa

SEQ ID NO: 47612 - DNA, 120 bp, Artificial Sequence
  ENSG00000065548_5 (sequence is synthesized)
gaagtagtgaacaagaagcacggtgaggcggaaaagaaaaaaccaaaaactcaaatagtgtgcaagcatttcctggaagctattgaaaacaacaagtatggctggttttgggtatgccct

SEQ ID NO: 47613 - DNA, 120 bp, Artificial Sequence
  ENSG00000065548_6 (sequence is synthesized)
ggagggggtgatatttgcatgtatcgtcatgcacttcctcctggatttgtgttgaaaaaagataaaaagaaagaagagaaagaagatgaaatttcattagaagatctaattgagagagag

SEQ ID NO: 47614 - DNA, 120 bp, Artificial Sequence
  ENSG00000065548_7 (sequence is synthesized)
cgttctgccctaggtccaaatgttaccaaaatcactctagaatcttttcttgcctggaagaaaaggaaaagacaagaaaagattgataaacttgaacaagatatggaaagaaggaaagct

SEQ ID NO: 47615 - DNA, 120 bp, Artificial Sequence
  ENSG00000065548_8 (sequence is synthesized)
gaacaggtggtgatgaggttgatgattcagtgagtgtaaatgacatagatttaagcctgtacatcccaagagatgtagatgaaacaggtattactgtagccagtcttgaaagattcagca

SEQ ID NO: 47616 - DNA, 120 bp, Artificial Sequence
  ENSG00000065548_9 (sequence is synthesized)
catatacttcagataaagatgaaaacaaattaagtgaagcttctggaggtagggctgaaaatggtgaaagaagtgacttggaagaggacaacgagagggagggaacggaaaatggagcca

SEQ ID NO: 47617 - DNA, 120 bp, Artificial Sequence
  ENSG00000065548_10 (sequence is synthesized)
ttgatgctgttcctgttgatgaaaatcttttcactggagaggatttggatgaactagaagaagaattaaatacacttgatttagaagaatgacaccaaacacatcgctgaaaaaattaag

SEQ ID NO: 47618 - DNA, 120 bp, Artificial Sequence
  ENSG00000065548_11 (sequence is synthesized)
tcagctcagcacgagttgaaattgactacattaatttctttccacctagaatcaacaggatgtttatttcctatgctgattctggaggagttaacctcctgcaaaaaaggcatcttgtcc

SEQ ID NO: 47619 - DNA, 120 bp, Artificial Sequence
  ENSG00000065548_12 (sequence is synthesized)
ctacatcttctcttctgactttggctacatctcatagtaagttcagagtagttcatgataaattgaaaatataatggtcattgcagaaaatgattgatgttgtaactgtccacccaagta

SEQ ID NO: 47620 - DNA, 120 bp, Artificial Sequence
  ENSG00000065548_13 (sequence is synthesized)
agaagtgtatctgcctttccatcttttggttttcatttgggcatgtgctattaccagaaacaacaaacttatatttaaaatacccttcatttgacacagtttttaatgagtgatttaatt

SEQ ID NO: 47621 - DNA, 120 bp, Artificial Sequence
  ENSG00000065548_14 (sequence is synthesized)
tcctctgtatttgtatgtttagaagactgcctaaaacatgagcactgtacttcataaaggaaactgcgtatgcagattcagtattgtgtatctttggacaattagatggacatttaaaat

SEQ ID NO: 47622 - DNA, 120 bp, Artificial Sequence
  ENSG00000065548_15 (sequence is synthesized)
ggaacttcttttatctgacaggatcagctacaatgccctgtgttaaattgtttaaaagtttcccttttcttttttgccaataaagttgtaaataaagaccatcatacattaaaatccaaa

SEQ ID NO: 47623 - DNA, 120 bp, Artificial Sequence
  ENSG00000065548_16 (sequence is synthesized)
gctttgtgcctcatctccttatgttaattgaaagaaacaatagaaaataccacaacatggttaagagccaccaacatcagagccacagtgcctgggttcaaatccttactccaaccatgg

SEQ ID NO: 47624 - DNA, 120 bp, Artificial Sequence
  ENSG00000065548_17 (sequence is synthesized)
gaaattaatctaggcctccaccctcatctaatatggacataatgattatctctacatcatagtttgtgagaattaatcgagttcatgaattagtagttctttatacagcttaggacagtg

SEQ ID NO: 47625 - DNA, 120 bp, Artificial Sequence
  ENSG00000065548_18 (sequence is synthesized)
ggatggtactgttagttcttttgaaccaacaaattacgacttggtggctttttcgatccacctctgaaatgtttaaagtcccataaagaatggaaggactttccgtcacaacccagggtc

SEQ ID NO: 47626 - DNA, 120 bp, Artificial Sequence
  ENSG00000065548_19 (sequence is synthesized)
tttatttctcatcttctcaggaacacaaatgaaacttggatattgttatggtgctttttataatatatttattattttcagcaattgattcatgttaaaacaatttcttatgacaagtta

SEQ ID NO: 47627 - DNA, 120 bp, Artificial Sequence
  ENSG00000065548_20 (sequence is synthesized)
ctcatcttcaatggtgagaagaaatctagctcagaataatatatttttagtgtttgtatctctggatactcattttgctcattgccacgtaaagtaaaaaaatacataaattagcttatt

SEQ ID NO: 47628 - DNA, 120 bp, Artificial Sequence
  ENSG00000065548_21 (sequence is synthesized)
ccaatgtaatatcttcaggatagtcatgggcaaggaattaatcacattaagagataactgcaactaagcactatttgaggtgacttctgtggaaaaaaaattaattctttaccattgcag

SEQ ID NO: 47629 - DNA, 120 bp, Artificial Sequence
  ENSG00000065548_22 (sequence is synthesized)
gtgcacttgttttccaacaactgaattgagtttccttaaaagatgaaccatatttgacattacgtaaacataccatacagaccccaacgaggacaaaactttcggtttgaagaataagaa

SEQ ID NO: 47630 - DNA, 120 bp, Artificial Sequence
  ENSG00000065548_23 (sequence is synthesized)
tatcgaaatatttctgtgctctttctcatgtaggacaaaactttcggtttgaagaataagaaaggagcaaagcaacagaagtttatcaaggctgtcacacatcaagttaaatttggtcaa

SEQ ID NO: 47631 - DNA, 120 bp, Artificial Sequence
  ENSG00000065559_0 (sequence is synthesized)
agcggcggcggcggctccgggggcggcagcggcagcggcacccccggccccgtagggtccccggcgccaggccacccggccgtcagcagcatgcagggtaaacgcaaagcactgaagttg

SEQ ID NO: 47632 - DNA, 120 bp, Artificial Sequence
  ENSG00000065559_1 (sequence is synthesized)
gcagggtaaacgcaaagcactgaagttgaattttgcaaatccacctttcaaatctacagcaaggtttactctgaatcccaatcctacaggagttcaaaacccacacatagagagactgag

SEQ ID NO: 47633 - DNA, 120 bp, Artificial Sequence
  ENSG00000065559_2 (sequence is synthesized)
aacacacagcattgagtcatcaggaaaactgaagatctcccctgaacaacactgggatttcactgcagaggacttgaaagaccttggagaaattggacgaggagcttatggttctgtcaa

SEQ ID NO: 47634 - DNA, 120 bp, Artificial Sequence
  ENSG00000065559_3 (sequence is synthesized)
caaaatggtccacaaaccaagtgggcaaataatggcagttaaaagaattcggtcaacagtggatgaaaaagaacaaaaacaacttcttatggatttggatgtagtaatgcggagtagtga

SEQ ID NO: 47635 - DNA, 120 bp, Artificial Sequence
  ENSG00000065559_4 (sequence is synthesized)
ttgcccatacattgttcagttttatggtgcactcttcagagagggtgactgttggatctgtatggaactcatgtctacctcgtttgataagttttacaaatatgtatatagtgtattaga

SEQ ID NO: 47636 - DNA, 120 bp, Artificial Sequence
  ENSG00000065559_5 (sequence is synthesized)
tgatgttattccagaagaaattttaggcaaaatcactttagcaactgtgaaagcactaaaccacttaaaagaaaacttgaaaattattcacagagatatcaaaccttccaatattcttct

SEQ ID NO: 47637 - DNA, 120 bp, Artificial Sequence
  ENSG00000065559_6 (sequence is synthesized)
ggacagaagtggaaatattaagctctgtgacttcggcatcagtggacagcttgtggactctattgccaagacaagagatgctggctgtaggccatacatggcacctgaaagaatagaccc

SEQ ID NO: 47638 - DNA, 120 bp, Artificial Sequence
  ENSG00000065559_7 (sequence is synthesized)
aagcgcatcacgacaaggatatgatgtccgctctgatgtctggagtttggggatcacattgtatgagttggccacaggccgatttccttatccaaagtggaatagtgtatttgatcaact

SEQ ID NO: 47639 - DNA, 120 bp, Artificial Sequence
  ENSG00000065559_8 (sequence is synthesized)
aacacaagtcgtgaaaggagatcctccgcagctgagtaattctgaggaaagggaattctccccgagtttcatcaactttgtcaacttgtgccttacgaaggatgaatccaaaaggccaaa

SEQ ID NO: 47640 - DNA, 120 bp, Artificial Sequence
  ENSG00000065559_9 (sequence is synthesized)
gtataaagagcttctgaaacatccctttattttgatgtatgaagaacgtgccgttgaggtcgcatgctatgtttgtaaaatcctggatcaaatgccagctactcccagctctcccatgta

SEQ ID NO: 47641 - DNA, 120 bp, Artificial Sequence
  ENSG00000065559_10 (sequence is synthesized)
tgtcgattgatatcgctgctacatcagactctagaaaaaagggctgagaggaagcaagacgtaaagaattttcatcccgtatcacagtgtttttattgctcgcccagacaccatgtgcaa

SEQ ID NO: 47642 - DNA, 120 bp, Artificial Sequence
  ENSG00000065559_11 (sequence is synthesized)
taagattggtgttcgtttccatcatgtctgtatactcctgtcacctagaacgtgcatccttgtaatacctgattgatcacacagtgttagtgctggtcagagagacctcatcctgctctt

SEQ ID NO: 47643 - DNA, 120 bp, Artificial Sequence
  ENSG00000065559_12 (sequence is synthesized)
ttgtgatgaacatattcatgaaatgtggaagtcagtacgatcaagttgttgactgtgattagatcacatcttaaattcatttctagactcaaaacctggagatgcagctactggaatggt

SEQ ID NO: 47644 - DNA, 120 bp, Artificial Sequence
  ENSG00000065559_13 (sequence is synthesized)
gttttgtcagacttccaaatcctggaaggacacagtgatgaatgtactatgtctgaacatagaaactcgggcttgagtgagaagagcttgcacagccaacgagacacattgccttctgga

SEQ ID NO: 47645 - DNA, 120 bp, Artificial Sequence
  ENSG00000065559_14 (sequence is synthesized)
gctgggagacaaaggaggaatttactttcttcaccaagtgcaatagattactgatgtgatattctgttgctttacagttacagttgatgtttggggatcgatgtgctcagccaaatttcc

SEQ ID NO: 47646 - DNA, 120 bp, Artificial Sequence
  ENSG00000065559_15 (sequence is synthesized)
ttcaaagaggtgaacattaaaatatagagacaggacagaatgtgttcttttctcctttaccagtcctatttttcaatgggaagactcaggagtctgccacttgtcaaagaaggtgctgat

SEQ ID NO: 47647 - DNA, 120 bp, Artificial Sequence
  ENSG00000065559_16 (sequence is synthesized)
cctaagaatttttcattctcagaattcggtgtgctgccaacttgatgttccacctgccacaaaccaccaggactgaaagaagaaaacagtacagaaggcaaagtttacagatgtttttaa

SEQ ID NO: 47648 - DNA, 120 bp, Artificial Sequence
  ENSG00000065559_17 (sequence is synthesized)
ttctagtattttatctggaacaacttgtagcagctatatatttccccttggtcccaagcctgatactttagccatcataactcactaacagggagaagtagctagtagcaatgtgccttg

SEQ ID NO: 47649 - DNA, 120 bp, Artificial Sequence
  ENSG00000065559_18 (sequence is synthesized)
attgattagataaagatttctagtaggcagcaaaagaccaaatctcagttgtttgcttcttgccatcactggtccaggtcttcagtttccgaatctctttcccttcccctgtggtctatt

SEQ ID NO: 47650 - DNA, 120 bp, Artificial Sequence
  ENSG00000065559_19 (sequence is synthesized)
gtcgctatgtgacttgcgcttaatccaatattttgccttttttctatatcaaaaaacctttacagttagcagggatgttccttaccaaggatttttagccccaaatctctcatattcgct

SEQ ID NO: 47651 - DNA, 120 bp, Artificial Sequence
  ENSG00000065559_20 (sequence is synthesized)
agtgtttaaaaggctaagaatagtggggcccagccgatgtggtaggtgataaagaggcatcttttctagagacacattggaccagatgaggatccgaaacggcagcctttacgttcatca

SEQ ID NO: 47652 - DNA, 120 bp, Artificial Sequence
  ENSG00000065559_21 (sequence is synthesized)
cctgctagaacctctcgtagtccatcaccatttcttggcattggaattctactggaaaaaaatacaaaaagcaaaacaaaaccctcagcactgttacaagaggccatttaagtatcttgt

SEQ ID NO: 47653 - DNA, 120 bp, Artificial Sequence
  ENSG00000065559_22 (sequence is synthesized)
gcttcttcacttacccattagccaggttctcattaggttttgcttgggcctccctggcactgaaccttaggctttgtatgacagtgaagcagcactgtgagtggttcaagcacactggaa

SEQ ID NO: 47654 - DNA, 120 bp, Artificial Sequence
  ENSG00000065559_23 (sequence is synthesized)
tataaaacagtcatggcctgagatgcaggtgatgccattacagaaccaaatcgtggcacgtattgctgtgtctcctctcagagtgacagtcataaatactgtcaaacaataaagggagaa

SEQ ID NO: 47655 - DNA, 120 bp, Artificial Sequence
  ENSG00000065559_24 (sequence is synthesized)
tggtgctgtttaaagtcacatccctgtaaattgcagaattcaaaagtgattatctctttgatctacttgcctcatttccctatcttctcccccacggtatcctaaactttagacttccca

SEQ ID NO: 47656 - DNA, 120 bp, Artificial Sequence
  ENSG00000065559_25 (sequence is synthesized)
ctgttctgaaaggagacattgctctatgtctgccttcgaccacagcaagccatcatcctccattgctcccggggactcaagaggaatctgtttctctgctgtcaacttcccatctggctc

SEQ ID NO: 47657 - DNA, 120 bp, Artificial Sequence
  ENSG00000065559_26 (sequence is synthesized)
agcatagggtcactttgccattatgcaaatggagataaaagcaattctgactgtccaggagctaatctgaccgttctattgtgtggatgaccacataagaaggcaattttagtgtattaa

SEQ ID NO: 47658 - DNA, 120 bp, Artificial Sequence
  ENSG00000065559_27 (sequence is synthesized)
tcatagattattataaactataaacttaagggcaaggagtttattacaatgtatctttattaaaacaaaagggtgtatagtgttcacaaactgtgaaaatagtgtaagaactgtacattg

SEQ ID NO: 47659 - DNA, 120 bp, Artificial Sequence
  ENSG00000065559_28 (sequence is synthesized)
tgagctctggttatttttctcttgtaccatagaaaaatgtataaaaattatcaaaaagctaatgtgcagggatattgccttatttgtctgtaaaaaatggagctcagtaacataactgct

SEQ ID NO: 47660 - DNA, 120 bp, Artificial Sequence
  ENSG00000065559_29 (sequence is synthesized)
tcttggagctttggaatattttatcctgtattcttgtttgaattcctcctctatttaagatatatacatggaatcgaagtgtttatgtaatagttctatccttttgcctgcaggtcagtt

SEQ ID NO: 47661 - DNA, 120 bp, Artificial Sequence
  ENSG00000065559_30 (sequence is synthesized)
gtaataaatctaggatgtgatgatgactttgtaatttgattttctgaaatcagaccctgagaggggaaaatcttaaagtaaattacattaaattatctgtgcatttcacaccagggaaaa

SEQ ID NO: 47662 - DNA, 120 bp, Artificial Sequence
  ENSG00000065559_31 (sequence is synthesized)
tagatcacagcaaagatactcatttgttggtagtgccaggaagcaggcagtttccatggtaactgacagaccgagtttactgtggaaatttccggaattaacagagctgcattgcagaag

SEQ ID NO: 47663 - DNA, 120 bp, Artificial Sequence
  ENSG00000065559_32 (sequence is synthesized)
ttaaagctacatgtttaaaacatgaataattattgtatgtgataaatgaagatgttttacttcttatatatctgaatttaaggacttgaccacttatgttgtctaaggtttttcaatatt

SEQ ID NO: 47664 - DNA, 120 bp, Artificial Sequence
  ENSG00000065559_33 (sequence is synthesized)
gtaatagaaattaacttttttctcctaattggtgaaacggttattgaaaattacagtgtcactgtataaactttcctaaaatatttgtatttttagcaaaaaatgctttatgtactttaa

SEQ ID NO: 47665 - DNA, 120 bp, Artificial Sequence
  ENSG00000065559_34 (sequence is synthesized)
aactctattactgctatttttttctttgggattcaataaatttcagtctatcttagtatgttggacttagaaactgaaatagattttgctgcacattgttattagttgaaaaataattat

SEQ ID NO: 47666 - DNA, 120 bp, Artificial Sequence
  ENSG00000065559_35 (sequence is synthesized)
tcatttgcctgatagataatgtttttctgcatacaaataaggcatcgaggtggtcctgtggacattcaaagaagaatctgagggatagtaccctcaagcattttaaaggcatgctatccc

SEQ ID NO: 47667 - DNA, 120 bp, Artificial Sequence
  ENSG00000065559_36 (sequence is synthesized)
ttttcctgacacatcatttagatggtccctaatttcaaggaaatgtaaagatgttctttcacagaaattactaaaaatgatttctgcggtacataggataatatattactgtcttggcag

SEQ ID NO: 47668 - DNA, 120 bp, Artificial Sequence
  ENSG00000065559_37 (sequence is synthesized)
tgctttaatttggctacaaatgactaacagacaaatatctttacacatatgtgtagtgataaatttagcgttattgtgaagtatgggtggaataattgtgataaatttagctcttgtttt

SEQ ID NO: 47669 - DNA, 120 bp, Artificial Sequence
  ENSG00000065559_38 (sequence is synthesized)
gcttttgtgtctcaaatatattgtggtatggcctcatccaccgagcaaagtcttttaaaaatcgaagacagtcttttttgtttgtttgtcactcgttgccccaaatttgacctaattctt

SEQ ID NO: 47670 - DNA, 65 bp, Artificial Sequence
  ENSG00000065559_39 (sequence is synthesized)
tttgtttgtcactcgttgccccaaatttgacctaattctttttttaaaacctttttattttttaa

SEQ ID NO: 47671 - DNA, 120 bp, Artificial Sequence
  ENSG00000065559_40 (sequence is synthesized)
tcccaaagtgctgggattacgggcgtgcgccactgcacctggcgaccttgtaattctttatgttttccagttttcttcctttgtctccctcttccctcagcttcagctttgtaaatgctt

SEQ ID NO: 47672 - DNA, 120 bp, Artificial Sequence
  ENSG00000065559_41 (sequence is synthesized)
ctcttccctcagcttcagctttgtaaatgcttttgagtctttgaggggaatagttaaatgaattgcttagtgttctctttatggaagtagccattaagttttttgttgtttgtttttatg

SEQ ID NO: 47673 - DNA, 120 bp, Artificial Sequence
  ENSG00000065559_42 (sequence is synthesized)
ataatgatgacttcctattacttccattctgacgctagacatggattcctctaggaatatactggcattttggctgtctacccagctgttgcttccatttgcctattccttgagtgtaag

SEQ ID NO: 47674 - DNA, 120 bp, Artificial Sequence
  ENSG00000065559_43 (sequence is synthesized)
aacagagctgcattgcagaaggatgcataaagcagtattcatctagagatcgtaacagtacggacacagaagaacagttgcagtgatgtgcaggagaattcggtcaacagtggatgaaaa

SEQ ID NO: 47675 - DNA, 120 bp, Artificial Sequence
  ENSG00000065600_0 (sequence is synthesized)
acgcctggtctctgggacgcccctccggaccggtttcgcctcgcggagccggtaggtccaggtgcagcggccgcagtgctgcgtccgtgcgccgcgggctggggcggtctcaggtgtgcc

SEQ ID NO: 47676 - DNA, 120 bp, Artificial Sequence
  ENSG00000065600_1 (sequence is synthesized)
gaagctctggtcagtgccatgatccggcaggagcgctccacatcctaccaggagctgagtgaggagttggtccaggtggttgagaactcagagctggcagacgagcaggacaaggagacg

SEQ ID NO: 47677 - DNA, 120 bp, Artificial Sequence
  ENSG00000065600_2 (sequence is synthesized)
gtcagagtccaaggtccgggtatcttaccaggcctggacagcgagtccgcctccagcagcatccgcttcagcaaggcctgcctgaagaacgtcttctcggtcctactcatcttcatctac

SEQ ID NO: 47678 - DNA, 120 bp, Artificial Sequence
  ENSG00000065600_3 (sequence is synthesized)
ctgctgctcatggctgtggccgtcttcctggtctaccggaccatcacagactttcgtgagaaactcaagcaccctgtcatgtctgtgtcttacaaggaagtggatcgctatgatgcccca

SEQ ID NO: 47679 - DNA, 120 bp, Artificial Sequence
  ENSG00000065600_4 (sequence is synthesized)
ggtattgccttgtaccccggtcaggcccagttgctcagctgtaagcaccattacgaggtcattcctcctctgacaagccctggccagccgggtgacatgaattgcaccacccagaggatc

SEQ ID NO: 47680 - DNA, 120 bp, Artificial Sequence
  ENSG00000065600_5 (sequence is synthesized)
aactacacggaccccttctccaatcagactgtgaaatctgccctgattgtccaggggccccgggaagtgaaaaagcgggagctggtcttcctccagttccgcctgaacaagagtagtgag

SEQ ID NO: 47681 - DNA, 120 bp, Artificial Sequence
  ENSG00000065600_6 (sequence is synthesized)
gacttcagcgccattgattacctcctcttctcttctttccaggagttcctgcaaagcccaaacagggtaggcttcatgcaggcctgtgagagtgcctattccagctggaagttctctggg

SEQ ID NO: 47682 - DNA, 120 bp, Artificial Sequence
  ENSG00000065600_7 (sequence is synthesized)
ggcttccgcacctgggtcaagatgtcactggtaaagaccaaggaggaggatgggcgggaagcagtggagttccggcaggagacaagtgtggttaactacattgaccagaggccagctgcc

SEQ ID NO: 47683 - DNA, 120 bp, Artificial Sequence
  ENSG00000065600_8 (sequence is synthesized)
aaaaaaagtgctcaattgttttttgtggtctttgaatggaaagatcctttcatccagaaagtccaagatatagtcactgccaatccttggaacacaattgctcttctctgtggcgccttc

SEQ ID NO: 47684 - DNA, 120 bp, Artificial Sequence
  ENSG00000065600_9 (sequence is synthesized)
ttggcattatttaaagcagcagagtttgccaaactgagtataaaatggatgatcaaaattagaaagagataccttaaaagaagaggtcaggcaacgagccacataagctgaagtcacctc

SEQ ID NO: 47685 - DNA, 120 bp, Artificial Sequence
  ENSG00000065600_10 (sequence is synthesized)
ctgtactcacttgaagaaatggggccttgctgggaggaacagcatgtaaaactggaacttctaaccccgtcccaaaagaggcggtgtagagcctaatagaagagactaatggataaacct

SEQ ID NO: 47686 - DNA, 120 bp, Artificial Sequence
  ENSG00000065600_11 (sequence is synthesized)
acaagttatttaaatatttaaattattaataaactttttaaagagctggccaatgacttttgaatagggtttgtagaagatgcctttcttcctgtttggttcattgtattgtattaggtt

SEQ ID NO: 47687 - DNA, 120 bp, Artificial Sequence
  ENSG00000065600_12 (sequence is synthesized)
aagctctactagggtaatgaaggctctacttttcactttttaaaagtggacaaaagagtgtgattttctttttccaaaaattcctgagtatcaagacgtgcaggtcatgctttggagcct

SEQ ID NO: 47688 - DNA, 120 bp, Artificial Sequence
  ENSG00000065600_13 (sequence is synthesized)
atgcactgtacacaaaggcaaaaccctatgactttggcatcatctgccattgatgtccagcctctgacatgctctttgatttgttaaatgttaaatgagactttaaggctactagaaact

SEQ ID NO: 47689 - DNA, 120 bp, Artificial Sequence
  ENSG00000065600_14 (sequence is synthesized)
agtaattaagtttcttaatggactgagtagccacctacttgtccggctagaatgtttgttgatgtatgagtttagattaacactcaaaagcactaggacagatgtacatagaaggtgcct

SEQ ID NO: 47690 - DNA, 120 bp, Artificial Sequence
  ENSG00000065600_15 (sequence is synthesized)
actcattgtattttgatgatttcattaacaggtaaataaaagttaatacaaaaggaacgagtgtgacaatatgaatatctgctcaatcatcgggcacaattactttcatttggtgacttc

SEQ ID NO: 47691 - DNA, 120 bp, Artificial Sequence
  ENSG00000065600_16 (sequence is synthesized)
caaggacaaaaaggtagtatgagtctggactcccaagatggatctgactcccaaggtatgttctaactgcttccagggaagggtttgttaggcatggcaactgatggcaggtgtccagaa

SEQ ID NO: 47692 - DNA, 120 bp, Artificial Sequence
  ENSG00000065600_17 (sequence is synthesized)
agagtgacctggtgtccccgaggaagctgggttaactctttactgtgtccacaaaactacccatcatatgaggaaggggcatacgcagtgtgaccctcaaaaagcttttagcctagcctt

SEQ ID NO: 47693 - DNA, 120 bp, Artificial Sequence
  ENSG00000065600_18 (sequence is synthesized)
tgacagaaatgagtatgcattaaaaaaaagtctatttttcacattaaggttctaaaaattgtttccagagttttaaattatttatgtgcctgttgcttcaaagaggacttggtagcattt

SEQ ID NO: 47694 - DNA, 120 bp, Artificial Sequence
  ENSG00000065600_19 (sequence is synthesized)
cctaaattttgtaatctggcttccgataatccaaagggaataactcaaatgtatgaataggcattttaaatgggaagaaactgttttttggatgaatgattaaaagtgaactgtataaag

SEQ ID NO: 47695 - DNA, 120 bp, Artificial Sequence
  ENSG00000065600_20 (sequence is synthesized)
gtgaaactgctctcctcctccgcctccacttctcggcccccaaaccttggtcatctttggcaaccgtcctcttctgtgcccctccatcgtgccgcctcattggccaaagtcaggcagttc

SEQ ID NO: 47696 - DNA, 120 bp, Artificial Sequence
  ENSG00000065600_21 (sequence is synthesized)
gtcagagtccaaggtccgggtatcttaccaggatggcgtgaccaagctactctgtcactgttggaagccagatgccaagcaaaaagctttcggggcttaggatgagtgaagcatcagctg

SEQ ID NO: 47697 - DNA, 120 bp, Artificial Sequence
  ENSG00000065600_22 (sequence is synthesized)
catcactggccagaagttaggccggagaagactgtcttggacaagtgtggttaactacattgaccagaggccagctgccaaaaaaagtgctcaattgttttttgtggtctttgaatggaa

SEQ ID NO: 47698 - DNA, 120 bp, Artificial Sequence
  ENSG00000065609_0 (sequence is synthesized)
agctgaggtgggggcggggatggggacgcagctcggagcgctagagagacgcggcggcgctggcagaagaggcggcggcgggcgggtactggcttctggggccaggggccaggggcggtg

SEQ ID NO: 47699 - DNA, 80 bp, Artificial Sequence
  ENSG00000065609_1 (sequence is synthesized)
ggcgccgggaccgcggagctgaggagcggggcccggccagggctggagactttgcgcccgggggcaccggggctacgcgc

SEQ ID NO: 47700 - DNA, 120 bp, Artificial Sequence
  ENSG00000065609_2 (sequence is synthesized)
gggctccgctcatcctgcggcgggcggcgccgctcaggggcgggaagaggaggcggtagacgcgaccacagaagatgtcgggccaaacgctcacggatcggatcgccgccgctcagtaca

SEQ ID NO: 47701 - DNA, 120 bp, Artificial Sequence
  ENSG00000065609_3 (sequence is synthesized)
gcgttacaggctctgctgtagcaagagcggtctgcaaagccactactcatgaagtaatgggccccaagaaaaagcacctggactatttgatccaggctaccaacgagaccaatgttaata

SEQ ID NO: 47702 - DNA, 120 bp, Artificial Sequence
  ENSG00000065609_4 (sequence is synthesized)
ttcctcagatggccgacactctctttgagcgggcaacaaacagtagctgggtggttgtgtttaaggctttagtgacaacacatcatctcatggtgcatggaaatgagagatttattcaat

SEQ ID NO: 47703 - DNA, 120 bp, Artificial Sequence
  ENSG00000065609_5 (sequence is synthesized)
atttggcttctagaaatacactattcaatctcagcaattttttggacaaaagtggatcccatggttatgatatgtctaccttcataaggcgctatagtagatatttgaatgaaaaggctt

SEQ ID NO: 47704 - DNA, 120 bp, Artificial Sequence
  ENSG00000065609_6 (sequence is synthesized)
tttcttacagacagatggcctttgattttgccagggtgaagaaaggggccgatggtgtaatgaggacaatggctcccgaaaagctgctaaagagtatgccaatactacagggacaaattg

SEQ ID NO: 47705 - DNA, 120 bp, Artificial Sequence
  ENSG00000065609_7 (sequence is synthesized)
atgcactgcttgaatttgatgtgcatccaaatgaactaacaaatggtgtcataaatgcagcatttatgcttcttttcaaagatcttatcaaactttttgcttgctacaatgatggtgtta

SEQ ID NO: 47706 - DNA, 120 bp, Artificial Sequence
  ENSG00000065609_8 (sequence is synthesized)
ttaacttactcgaaaagttttttgaaatgaagaaaggacaatgtaaagatgctctagaaatttacaaacgatttctaactagaatgacacgagtgtctgaatttctcaaggttgcagagc

SEQ ID NO: 47707 - DNA, 120 bp, Artificial Sequence
  ENSG00000065609_9 (sequence is synthesized)
aagttggtattgataaaggtgacattcctgacctcacacaggctcccagcagtcttatggagacgcttgaacagcatctaaatacattagaaggaaagaaacctggaaacaatgaaggat

SEQ ID NO: 47708 - DNA, 120 bp, Artificial Sequence
  ENSG00000065609_10 (sequence is synthesized)
ctggtgctccctctccattaagtaagtcttctccagccacaactgttacgtctcctaattctacaccagctaaaactattgacacatccccaccggttgatttatttgcaactgcatctg

SEQ ID NO: 47709 - DNA, 120 bp, Artificial Sequence
  ENSG00000065609_11 (sequence is synthesized)
cggctgtcccagtcagcacttctaaaccatctagtgatctcctggacctccagccagacttttcctctggaggggcagcagcagccgcagcaccagcaccaccaccacctgctggaggag

SEQ ID NO: 47710 - DNA, 120 bp, Artificial Sequence
  ENSG00000065609_12 (sequence is synthesized)
ccactgcatggggagaccttttgggagaggattctttggctgcactttcctctgttccctctgaagcacagatttcagatccatttgcaccagaacctacccctcctactacaactgctg

SEQ ID NO: 47711 - DNA, 120 bp, Artificial Sequence
  ENSG00000065609_13 (sequence is synthesized)
aaattgcaactgcctcagcttctgcctccactactacaactgttactgctgtcactgctgaagtggatctctttggagatgcctttgcagcttctcctggggaggcccctgcagcatccg

SEQ ID NO: 47712 - DNA, 120 bp, Artificial Sequence
  ENSG00000065609_14 (sequence is synthesized)
aaggggccgccgcaccagctaccccaacccctgtagcagcagcacttgatgcatgttcaggaaatgacccctttgccccgtctgaaggtagtgcagaggctgcacctgagctggacctct

SEQ ID NO: 47713 - DNA, 120 bp, Artificial Sequence
  ENSG00000065609_15 (sequence is synthesized)
ttgcaatgaagccacctgagaccagtgttcctgtagttacccctacagctagcacagcccctccagttcccgcaactgctccttctcctgctcctgccgttgcagctgctgctgctgcca

SEQ ID NO: 47714 - DNA, 120 bp, Artificial Sequence
  ENSG00000065609_16 (sequence is synthesized)
ctactgctgccaccgccgctgccaccaccactaccaccacctccgctgccaccgccaccactgctcctcctgctctagatatctttggtgatttatttgagtccactcctgaagttgctg

SEQ ID NO: 47715 - DNA, 120 bp, Artificial Sequence
  ENSG00000065609_17 (sequence is synthesized)
cagcgcctaagccagatgctgctcctagcatagacctgtttagtacagatgctttctcctctccaccacaaggggcctctcctgtgcctgagagttctctcactgctgacctcttatctg

SEQ ID NO: 47716 - DNA, 120 bp, Artificial Sequence
  ENSG00000065609_18 (sequence is synthesized)
ttgcagcaccatctcctgcaaccactgcctcgccagcaaaggtggattcttcaggtgtcatagacctttttggggatgcatttggaagtagtgcttctgaaccccaacctgcatctcagg

SEQ ID NO: 47717 - DNA, 120 bp, Artificial Sequence
  ENSG00000065609_19 (sequence is synthesized)
ctgcttctagttcatcagcatcggcagacctactagctggatttgggggttctttcatggcgccttccccatctccagtgactccagctcagaataacctgctacagcccaattttgagg

SEQ ID NO: 47718 - DNA, 120 bp, Artificial Sequence
  ENSG00000065609_20 (sequence is synthesized)
cagcttttgggacaacgccttcaacttccagcagcagctcctttgatccatcagtgtttgatggtctaggtgatcttttgatgccaaccatggcaccagctgggcagcctgcacctgtct

SEQ ID NO: 47719 - DNA, 120 bp, Artificial Sequence
  ENSG00000065609_21 (sequence is synthesized)
caatggtaccacccagtcctgcaatggcagccagcaaagcccttggaagtgatcttgattcatctcttgccagcttagtaggcaatcttggaatttctggtaccacaacaaaaaagggag

SEQ ID NO: 47720 - DNA, 120 bp, Artificial Sequence
  ENSG00000065609_22 (sequence is synthesized)
atcttcagtggaatgctggagagaaaaagttgactggtggagccaactggcagcctaaagtagctccagcaacctggtcagcaggcgttccaccaagtgcacctttgcaaggagctgtac

SEQ ID NO: 47721 - DNA, 120 bp, Artificial Sequence
  ENSG00000065609_23 (sequence is synthesized)
ctccaaccagttcagttcctcctgttgccggggccccatcggttggacaacctggagcaggatttggaatgcctcctgctgggacaggcatgcccatgatgcctcagcagccggtcatgt

SEQ ID NO: 47722 - DNA, 120 bp, Artificial Sequence
  ENSG00000065609_24 (sequence is synthesized)
ttgcacagcccatgatgaggcccccctttggagctgccgctgtacctggcacgcagctttctccaagccctacacctgccagtcagagtcccaagaaacctccagcaaaggacccattag

SEQ ID NO: 47723 - DNA, 120 bp, Artificial Sequence
  ENSG00000065609_25 (sequence is synthesized)
cggatcttaacatcaaggatttcttgtaaacaatttaagctgcaatatttgtgactgaataggaaaataaatgagtttggagacttcaaataagattgatgctgagtttcaaagggagcc

SEQ ID NO: 47724 - DNA, 120 bp, Artificial Sequence
  ENSG00000065609_26 (sequence is synthesized)
accagtaccaaacccaatacttactcataacttctcttccaaaatgtgtaacacagccgtgaaagtgaacattaggaatatgtactaccttagctgttatccctactcttgaaattgtag

SEQ ID NO: 47725 - DNA, 120 bp, Artificial Sequence
  ENSG00000065609_27 (sequence is synthesized)
tgtatttggattatttgtgtattgtacgatgtaaacaatgaatggatgttactgatgccgttagtgcttttttggacttcacctgaggacagatgatgcagctgttgtgtggcgagctat

SEQ ID NO: 47726 - DNA, 120 bp, Artificial Sequence
  ENSG00000065609_28 (sequence is synthesized)
ttggaaagacgtctgtgtttttgaaggtttcaatgtacatataacttttgaacaaaccccaaactcttcccataaattatcttttcttctgtatctctgttacaagcgtagtgtgataat

SEQ ID NO: 47727 - DNA, 120 bp, Artificial Sequence
  ENSG00000065609_29 (sequence is synthesized)
accagataataaggaaaacactcataaatatacaaaactttttcagtgtggagtacatttttccaatcacaggaacttcaactgttgtgagaaatgtttatttttgtggcactgtatatg

SEQ ID NO: 47728 - DNA, 120 bp, Artificial Sequence
  ENSG00000065609_30 (sequence is synthesized)
ttaagaaattttattttaaaaaatataaaggttaacgtccataataaatacttctctttgaagctaccttatcaagaacgaaaaatcgtatgggaagaatcccctatttatcactgctat

SEQ ID NO: 47729 - DNA, 120 bp, Artificial Sequence
  ENSG00000065609_31 (sequence is synthesized)
attaaaatatatatattttaattatatttgacaggttttgcatctaaattgacctatttattcattcttgattaaatgcactgaaaagtaaagggtctgtttgtgtcatgttcatgaaaa

SEQ ID NO: 47730 - DNA, 120 bp, Artificial Sequence
  ENSG00000065609_32 (sequence is synthesized)
tgcggttagagaggtgctattcaagtgattctgaaggcaccccaaggtatatctgtaatttaaagattactgcaaatatctttactttactgtgggtttttagtacatctgttaatttag

SEQ ID NO: 47731 - DNA, 120 bp, Artificial Sequence
  ENSG00000065609_33 (sequence is synthesized)
tgtttctttgtgtgttttgtagactagtgttcttccatccttcaactgagctcaaagtaggttttgttgtaacattgtgattaggatttaaactaattcagagaattgtatcttttactg

SEQ ID NO: 47732 - DNA, 120 bp, Artificial Sequence
  ENSG00000065609_34 (sequence is synthesized)
tacatactgtattctttaagttttaatttgttgtcatactgtctgtgctgatggcttggcttaagattttgatgcataaatgaggtcactgttgatcagtgttgctagtagcttggcagc

SEQ ID NO: 47733 - DNA, 120 bp, Artificial Sequence
  ENSG00000065609_35 (sequence is synthesized)
tcttcataaaagcatattgggttggaaaggtgtttgcctatttttcaaattatttaatagatgtatggtaccatttaaaagtggttgtatctgaatttactgtggggataacatacactg

SEQ ID NO: 47734 - DNA, 120 bp, Artificial Sequence
  ENSG00000065609_36 (sequence is synthesized)
taatggggaaaaattacctaaaaccaatttcaaaatggctttctttgtatttcagtttaaaaacccagtgcatgtacgccctctgagatgcaataaacaccttgaacaaagaaatgcaaa

SEQ ID NO: 47735 - DNA, 80 bp, Artificial Sequence
  ENSG00000065609_37 (sequence is synthesized)
agcggaggggcggcccggcgcccagcggagagccgctggctgggtgggtgtcggcctccccgcctccttcttctccccgc

SEQ ID NO: 47736 - DNA, 120 bp, Artificial Sequence
  ENSG00000065609_38 (sequence is synthesized)
cggcttgccggggatgcttgcgcgaggcgccccctcgcctttaagctcccggccccggggggcggtgtgtgtgagtagctgggagggggccgcgaggcgctccgccgagggctcgtccgg

SEQ ID NO: 47737 - DNA, 120 bp, Artificial Sequence
  ENSG00000065609_39 (sequence is synthesized)
gactcgtcggaggagccacagctgaggtgggggcggggatggggacgcagctcggagcgctagagagacgcggcggcgctggcagaagaggcggcggcgggcggaagaggaggcggtaga

SEQ ID NO: 47738 - DNA, 120 bp, Artificial Sequence
  ENSG00000065609_40 (sequence is synthesized)
gagacaagcggaggagcctgaggagctgaagacgcacaggtgacggtcgcggatggccggcaggatctgacatttaaaatcgccctgctcatctgggcctcggagcctttgacaggcggg

SEQ ID NO: 47739 - DNA, 120 bp, Artificial Sequence
  ENSG00000065609_41 (sequence is synthesized)
cgtgtcagcgacagtgtggggaaggggctgggctccgccaggcagcgcgcgacgacgcccttgccttggccttcacagagtagaacccgagaagcccactcgcccgtcttggccaacgcc

SEQ ID NO: 47740 - DNA, 120 bp, Artificial Sequence
  ENSG00000065609_42 (sequence is synthesized)
agtcggcgggcaggtgtgcgtggtgcgcgagcccagtgcgtgccgggtgcggcgccagcagcggaggggcggcccggcgcccagcggagagccgctggctggaagaggaggcggtagacg

SEQ ID NO: 47741 - DNA, 120 bp, Artificial Sequence
  ENSG00000065609_43 (sequence is synthesized)
cagccagcaaagcccttggaagtgatcttgattcatctcttgccagcttagtaggcaatcttggaatttctggtaccacaacaaaaaaatgtatattttgtcgttgaaattgagacatat

SEQ ID NO: 47742 - DNA, 120 bp, Artificial Sequence
  ENSG00000065609_44 (sequence is synthesized)
ctttcagtggatggtgtcttacgatcactgtaaggcaggttgcagtcatgatacagttgtgtgaaacattctgctgaaccctctaagatccagaaagtgccatcatcagtgcatcttaaa

SEQ ID NO: 47743 - DNA, 120 bp, Artificial Sequence
  ENSG00000065609_45 (sequence is synthesized)
ttaataacaaatgaatccagttggatttttctgacatacttttctttatagaggataggaaattcctatacttattgaggtccaaactctaaatgattttttttcaaatgcttttaagct

SEQ ID NO: 47744 - DNA, 120 bp, Artificial Sequence
  ENSG00000065609_46 (sequence is synthesized)
ttcttagttacagcatggcaagattcctctgtaagttttaactgctgttcttattactataccacttgactaaataaactgcttttaaacccaaataaaataatctaaggagccacacac

SEQ ID NO: 47745 - DNA, 120 bp, Artificial Sequence
  ENSG00000065609_47 (sequence is synthesized)
aaaaagttgtgctaaaggagaaatacttcagaaatatgttacatttgttttggatcacagtattatttatttctcaagaagagatttgttcatcatagtagtattagcccggtgcaggaa

SEQ ID NO: 47746 - DNA, 120 bp, Artificial Sequence
  ENSG00000065609_48 (sequence is synthesized)
gaactcaagtaaaagacaagaaaaaacaaaaaacagtgttgattgtgggatattaaggaaggctagaatttaagcaactgaggtaaaagcagagtatgttccaggttcacaacaaacatt

SEQ ID NO: 47747 - DNA, 120 bp, Artificial Sequence
  ENSG00000065609_49 (sequence is synthesized)
gggcgggggactgggcttcgctgtcagcccggctcctctccaaagccaggaagggtgaggcgccccaagactccggcgcctccgcagagctcccgggcggcccctgcggcagggatttgg

SEQ ID NO: 47748 - DNA, 120 bp, Artificial Sequence
  ENSG00000065609_50 (sequence is synthesized)
aaccggggggaaggggcccgggcgatgggcctcggcgaggctttggagccggcggcgaggaaggaaggggaggcgagggcataacatggcgcaacgctaggataatctccttcgcgactg

SEQ ID NO: 47749 - DNA, 120 bp, Artificial Sequence
  ENSG00000065609_51 (sequence is synthesized)
agggaggacgagccctttgctgcagcagcgcgaggaggaggagggaggcagccagggcttgggtatccgatgcattccccgaagcctgcgggctgctaggaggaaagtctgctgagaaga

SEQ ID NO: 47750 - DNA, 120 bp, Artificial Sequence
  ENSG00000065609_52 (sequence is synthesized)
atgctgcgactggagcccacgctggggttccgtgacggccctactcacggccaagactccctggaccgcatcgcaggagcggggcttggcgcgttgctggctccgagagaagaggaggcg

SEQ ID NO: 47751 - DNA, 120 bp, Artificial Sequence
  ENSG00000065609_53 (sequence is synthesized)
cgccagggtctcgcggggatccgcagaggataatcccagggtgcggagaagggcagcggccgagtgacagctccgcggagcgctccagggcgggcgggggactgggcttcgctgtcagcc

SEQ ID NO: 47752 - DNA, 80 bp, Artificial Sequence
  ENSG00000065613_0 (sequence is synthesized)
ggagtcggcgtcggcgcgcgctccaggccgaggctgtgtgggctggggagggagacaggcggcggcggcggcgccccaga

SEQ ID NO: 47753 - DNA, 120 bp, Artificial Sequence
  ENSG00000065613_1 (sequence is synthesized)
gcggcggaggagaccctaggctcgcggcccgaggcgggagggctcggcttctcgactgcccgcctccgaggccgccggccgcttctctctcccagagtggccgccgcccctggagactcg

SEQ ID NO: 47754 - DNA, 120 bp, Artificial Sequence
  ENSG00000065613_2 (sequence is synthesized)
ccgtgacacgggcctaagccgccgccgcgggagtcctgaccgctcggacccgtcggatcaggccgggtgggagcgagcttgcgggcaggtgccgctcccggagggtgggccggaggcgag

SEQ ID NO: 47755 - DNA, 120 bp, Artificial Sequence
  ENSG00000065613_3 (sequence is synthesized)
gcgggggccgagggacgccgcgcccgccgccgccagccgggctcgcgcgggagagcagggaagagaaactttgccttttattgtttttagtccttaagtgcaaggaactctgtgttggga

SEQ ID NO: 47756 - DNA, 120 bp, Artificial Sequence
  ENSG00000065613_4 (sequence is synthesized)
ggaaaaatgtccttcttcaatttccgtaagatcttcaagttggggagcgagaagaagaagaagcagtacgaacacgtgaagagggacctgaaccccgaagacttttgggagattatagga

SEQ ID NO: 47757 - DNA, 120 bp, Artificial Sequence
  ENSG00000065613_5 (sequence is synthesized)
gaactgggcgacggagcctttgggaaagtgtacaaggcccagaataaagagaccagtgttttagctgctgcaaaagtgattgacactaaatctgaagaagaacttgaagattacatggta

SEQ ID NO: 47758 - DNA, 120 bp, Artificial Sequence
  ENSG00000065613_6 (sequence is synthesized)
gagattgacatattagcatcttgtgatcacccaaatatagtcaagcttctagatgccttctattatgagaacaatctttggatcctcattgaattttgtgcaggtggagcagtagatgct

SEQ ID NO: 47759 - DNA, 120 bp, Artificial Sequence
  ENSG00000065613_7 (sequence is synthesized)
gtgatgcttgaacttgagagaccattaactgagtcccaaatacaagtagtttgcaagcagactttagatgcattgaactacttacatgataataagatcatccacagagatctgaaggct

SEQ ID NO: 47760 - DNA, 120 bp, Artificial Sequence
  ENSG00000065613_8 (sequence is synthesized)
ggcaacattctctttaccttagatggagatatcaaattggcggattttggagtatcagctaaaaacacgaggacaattcaaagaagagattcctttattggtacaccatattggatggct

SEQ ID NO: 47761 - DNA, 120 bp, Artificial Sequence
  ENSG00000065613_9 (sequence is synthesized)
cctgaagtagtcatgtgtgaaacatctaaggacagaccctatgactacaaagctgatgtttggtccctgggtatcactttaatagaaatggctgagatagaaccacctcatcatgaatta

SEQ ID NO: 47762 - DNA, 120 bp, Artificial Sequence
  ENSG00000065613_10 (sequence is synthesized)
aatccaatgcgagtgctgctaaaaatagcaaaatctgagccacctacattagcacagccatccagatggtcttcaaattttaaggactttctaaagaaatgcttagaaaagaatgtggat

SEQ ID NO: 47763 - DNA, 120 bp, Artificial Sequence
  ENSG00000065613_11 (sequence is synthesized)
gccaggtggactacatctcagctgctgcagcatccctttgttactgttgattccaacaaacccatccgagaattgattgcagaggcgaaggctgaagtaacagaagaagttgaagatggc

SEQ ID NO: 47764 - DNA, 120 bp, Artificial Sequence
  ENSG00000065613_12 (sequence is synthesized)
aaagaggaagatgaagaggaggaaacagaaaattctctgccaatacctgcaagtaagcgtgcatcttctgaccttagtatcgccagctctgaagaagataaactttcacaaaatgcttgt

SEQ ID NO: 47765 - DNA, 120 bp, Artificial Sequence
  ENSG00000065613_13 (sequence is synthesized)
attttggagtctgtctcagaaaaaacagaacgtagtaactctgaagataaactcaacagcaaaattcttaatgaaaaacccaccactgatgaacctgaaaaggctgtggaggatattaat

SEQ ID NO: 47766 - DNA, 120 bp, Artificial Sequence
  ENSG00000065613_14 (sequence is synthesized)
gaacatattaccgatgctcagttagaagcaatgactgaactccatgacagaacagcagtaatcaaggagaatgaaagagagaagaggcccaagcttgaaaatctgcctgacacagaagac

SEQ ID NO: 47767 - DNA, 120 bp, Artificial Sequence
  ENSG00000065613_15 (sequence is synthesized)
caagaaactgtggacattaattcagtcagtgaaggaaaagagaataatataatgataaccttagaaacaaatattgaacataatctaaaatctgaggaagaaaaggatcaggaaaagcaa

SEQ ID NO: 47768 - DNA, 120 bp, Artificial Sequence
  ENSG00000065613_16 (sequence is synthesized)
cagatgtttgaaaataagcttataaaatctgaagaaattaaagatactattttgcaaacagtagatttagtttctcaagagactggagaaaaagaggcaaatattcaggcagttgatagt

SEQ ID NO: 47769 - DNA, 120 bp, Artificial Sequence
  ENSG00000065613_17 (sequence is synthesized)
gaagttgggcttacaaaggaagacacccaagagaaattgggggaagacgacaaaactcaaaaagatgtgatcagcaatacaagtgatgtgataggaacatgtgaggcagcagatgtggct

SEQ ID NO: 47770 - DNA, 120 bp, Artificial Sequence
  ENSG00000065613_18 (sequence is synthesized)
cagaaagtggatgaagacagtgctgaggatacgcagagtaatgatgggaaagaagtggtcgaagtaggccagaaattaattaataagcccatggtgggtcctgaggctggtggtactaag

SEQ ID NO: 47771 - DNA, 120 bp, Artificial Sequence
  ENSG00000065613_19 (sequence is synthesized)
gaagttcctattaaagaaatagttgaaatgaatgaaatagaagaaggtaaaaataaggaacaagcaataaacagttcagagaacataatggacatcaatgaggaaccaggaacaactgaa

SEQ ID NO: 47772 - DNA, 120 bp, Artificial Sequence
  ENSG00000065613_20 (sequence is synthesized)
ggtgaagaaatcactgagtcaagtagcactgaagaaatggaggtcagaagtgtggtggctgatactgaccaaaaggctttaggaagtgaagttcaggatgcttctaaagtcactactcag

SEQ ID NO: 47773 - DNA, 120 bp, Artificial Sequence
  ENSG00000065613_21 (sequence is synthesized)
atagataaagagaaaaaagaaattccagtgtcaattaaaaaagagcctgaagttactgtagtttcacagcccactgaacctcagcctgttctaatacccagtattaatatcaactctgac

SEQ ID NO: 47774 - DNA, 120 bp, Artificial Sequence
  ENSG00000065613_22 (sequence is synthesized)
agtggagaaaataaagaagaaataggttctttatcaaaaactgaaactattctgccaccagaatctgagaatccaaaggaaaatgataatgattcaggcactggttccactgctgatact

SEQ ID NO: 47775 - DNA, 120 bp, Artificial Sequence
  ENSG00000065613_23 (sequence is synthesized)
agcagtattgacttgaatttatccatctctagctttctaagtaaaactaaagacagtggatcgatatctttacaagaaacaagaagacaaaagaaaacattgaagaaaacacgcaaattt

SEQ ID NO: 47776 - DNA, 120 bp, Artificial Sequence
  ENSG00000065613_24 (sequence is synthesized)
attgttgatggtgtagaagtgagtgtaacaacatcaaagatagttacagatagtgattccaaaactgaagaattgcggtttcttagacgtcaggaacttcgggaattaagatttcttcag

SEQ ID NO: 47777 - DNA, 120 bp, Artificial Sequence
  ENSG00000065613_25 (sequence is synthesized)
aaagaagagcaaagagcccaacaacagctcaatagcaaactacagcaacaacgagaacaaattttccggcgctttgagcaggaaatgatgagtaaaaagcgacaatatgaccaggaaatt

SEQ ID NO: 47778 - DNA, 120 bp, Artificial Sequence
  ENSG00000065613_26 (sequence is synthesized)
gagaatctagaaaaacagcagaaacagactatcgaacgcctggaacaagagcacacaaatcgcttgcgagatgaagccaaacgcatcaaaggagaacaagagaaagagttgtccaaattt

SEQ ID NO: 47779 - DNA, 120 bp, Artificial Sequence
  ENSG00000065613_27 (sequence is synthesized)
cagaatatgctgaagaaccgaaagaaggaggttataaatgaagtggagaaagcacccaaagagctgagaaaagagctcatgaaacgcaggaaagaggagcttgcacaaagccagcatgct

SEQ ID NO: 47780 - DNA, 120 bp, Artificial Sequence
  ENSG00000065613_28 (sequence is synthesized)
caggaacaagagtttgttcagaaacaacagcaagaattagatggctctctgaaaaagatcatccagcagcagaaggcagagttagctaatattgagagagagtgcctgaataacaagcaa

SEQ ID NO: 47781 - DNA, 120 bp, Artificial Sequence
  ENSG00000065613_29 (sequence is synthesized)
cagctcatgagagctcgagaagctgcaatttgggagctcgaagaacgacacttacaagaaaaacaccagctgctcaaacagcagcttaaagatcagtatttcatgcaaagacatcagcta

SEQ ID NO: 47782 - DNA, 120 bp, Artificial Sequence
  ENSG00000065613_30 (sequence is synthesized)
cttaagcgccacgagaaggaaacagagcaaatgcagcgttacaatcaaagacttattgaggaattgaaaaacagacagactcaagaaagagcaagactgcccaagattcagcgcagtgaa

SEQ ID NO: 47783 - DNA, 120 bp, Artificial Sequence
  ENSG00000065613_31 (sequence is synthesized)
aagagtttgagaattaactcaacagccacaccagatcaggaccgtgataaaattaaacagtttgctgcacaagaagaaaagaggcagaaaaatgagagaatggctcagcatcagaaacat

SEQ ID NO: 47784 - DNA, 120 bp, Artificial Sequence
  ENSG00000065613_32 (sequence is synthesized)
gagaatcaaatgcgagatcttcagttgcagtgtgaagccaatgtccgcgaactgcatcagctgcagaatgaaaaatgccacttgttggttgagcatgagactcagaaactgaaggagtta

SEQ ID NO: 47785 - DNA, 120 bp, Artificial Sequence
  ENSG00000065613_33 (sequence is synthesized)
gatgaggaacatagccaagaattaaaggagtggagagagaaattgagacctaggaaaaagacactggaagaagagtttgccaggaaactacaggaacaggaagtattctttaaaatgact

SEQ ID NO: 47786 - DNA, 120 bp, Artificial Sequence
  ENSG00000065613_34 (sequence is synthesized)
ggggagtctgaatgccttaacccatcaacacagagccggatttccaaattttatcctattcccagcttgcattccaccggatcataacaaagggaagcattctgtgcgtgggtttggctc

SEQ ID NO: 47787 - DNA, 120 bp, Artificial Sequence
  ENSG00000065613_35 (sequence is synthesized)
tttggctctttcagtatgtcattctgttctcatcttctgccacagtctctcagatagctcatgaagacaatcacctgcctcaccttctaggtgttttccttttttgttttttttgttttg

SEQ ID NO: 47788 - DNA, 120 bp, Artificial Sequence
  ENSG00000065613_36 (sequence is synthesized)
ttaagcaaagatgaagggaaaacgaactaagacagacgctaggccatgttggcaaagtagcatcttggtgactaaggtgactttgtatattcatcttaaaaattatgttctttagacact

SEQ ID NO: 47789 - DNA, 120 bp, Artificial Sequence
  ENSG00000065613_37 (sequence is synthesized)
gctacctgaaaactgttggagaaataatgtttaaagttatttaagaaaaactgttacatcactaagtattaataaattcttcttacctgacgtaacttctcaatgcctaaattctgtagt

SEQ ID NO: 47790 - DNA, 120 bp, Artificial Sequence
  ENSG00000065613_38 (sequence is synthesized)
tgaagctctgctgcagagagttgggataattttcttttggtggatcagctctcataaaaaagctatgatttgctcaaatatgctgttgactcagtaaatgaatatatttttttctttaaa

SEQ ID NO: 47791 - DNA, 120 bp, Artificial Sequence
  ENSG00000065613_39 (sequence is synthesized)
taggaacaacctcttttaaaagagaaaaattatttcagtgatttgtcaaaacgaattacctcttttggcatgagctaataattgagggtgctaattttcttaagatagtgcctaaaacac

SEQ ID NO: 47792 - DNA, 120 bp, Artificial Sequence
  ENSG00000065613_40 (sequence is synthesized)
taaatttcagtcaagtcgtaagtaggattttctttttgatcaacagggacaaaaacatctttagaattaaaaacatggttgttttggaatttttgcttctcttaccgtttgatagaaatt

SEQ ID NO: 47793 - DNA, 120 bp, Artificial Sequence
  ENSG00000065613_41 (sequence is synthesized)
ttcatcctaaaatacatgtacaaagtttggaaagatgaaaaaaagaggtagcttttagattgcaaactggaaatgtaaaactcatgaaatttaagcaatataggtttagctatctgtgtt

SEQ ID NO: 47794 - DNA, 120 bp, Artificial Sequence
  ENSG00000065613_42 (sequence is synthesized)
tattttctaaaataatacctgagctggttaaatgatttctctccatcttagctaattctgtttaaaactctgtcagaggcctgcaggctgtgagttatatttataaatatatcttcagaa

SEQ ID NO: 47795 - DNA, 120 bp, Artificial Sequence
  ENSG00000065613_43 (sequence is synthesized)
attaatcttaaaagaggcattagttcagaatacttttttaaaagtttaaattaaatatttaggcacgtcaggaattacttttccttattttgaaatgaggctacttatgtcttggtttta

SEQ ID NO: 47796 - DNA, 120 bp, Artificial Sequence
  ENSG00000065613_44 (sequence is synthesized)
ttttgttccatgtttaaatcattcactttgatttgagtgggaaaagcctgaagcctttatcatgtggttgctggtgtgtgtaattattaatgaaatgttcactcctagtcccttatgagg

SEQ ID NO: 47797 - DNA, 120 bp, Artificial Sequence
  ENSG00000065613_45 (sequence is synthesized)
cttagaatttcaaccacgtgtcaggtcagacagtattataaactgtactttgctgtctgagacagcacatttgtgaatgatgcttgctgcctgccattttcaacctattctctcttaaga

SEQ ID NO: 47798 - DNA, 120 bp, Artificial Sequence
  ENSG00000065613_46 (sequence is synthesized)
gtgctaggtaccaaattgtgaaagtttgttttcagttatattacttttgaggctggtgaaaaatttaaatgtaactttgtgggaacactgattcatatttagaaaatgtaaatgtctgta

SEQ ID NO: 47799 - DNA, 120 bp, Artificial Sequence
  ENSG00000065613_47 (sequence is synthesized)
gcactttcttgcagttaatttgaaaactttggatgctgaaccttgtttgtcagtgatttagatgatttaaaaatgcatgtgtgatttgaattttataattgttttgacaagcataattta

SEQ ID NO: 47800 - DNA, 120 bp, Artificial Sequence
  ENSG00000065613_48 (sequence is synthesized)
cttggacaacttcgtaggtagccttaacttctggccaagtttgttttttatataaatatatatacatatatacatattatgtatggttgtaaattcatacacttatcacatgaatgtgtt

SEQ ID NO: 47801 - DNA, 120 bp, Artificial Sequence
  ENSG00000065613_49 (sequence is synthesized)
actgtatacaaaactcttaatgctttattctcaaatgctgggttgaaaaatgttttgaaagccttttaaaatatatatctttataaagtaatattcaggatgatgataaaaattgtttat

SEQ ID NO: 47802 - DNA, 120 bp, Artificial Sequence
  ENSG00000065613_50 (sequence is synthesized)
attgttatgataaaaatgacagtataatgttgcccagtgtatttaatgatttatttgaagagggattgggaaggaacgtcttcataccactttctcctttgaaattttcagtttattgac

SEQ ID NO: 47803 - DNA, 120 bp, Artificial Sequence
  ENSG00000065613_51 (sequence is synthesized)
ttttaaaaaatgaatacctcaggcagtagacattttttttctagtatcatttaattgataccctgtgcgctaaatagtgtgtggtgcctgattaatttggtctgaatatttgattctttc

SEQ ID NO: 47804 - DNA, 120 bp, Artificial Sequence
  ENSG00000065613_52 (sequence is synthesized)
tgttcctttcaacttgacattcagattattgactcaaggagagaggctcagagtggaatggttggcgctgtgggtaaggttggatctcccttaaaactgccttttggattcagtgtttgt

SEQ ID NO: 47805 - DNA, 120 bp, Artificial Sequence
  ENSG00000065613_53 (sequence is synthesized)
gcttgagttcgctttcaaatatgaccataatcgtgtgggtgcaagactgtacagtgatacatatgtagaggtaaagcattcattttaatacttaaagttatataaatcttttcaaaaagt

SEQ ID NO: 47806 - DNA, 120 bp, Artificial Sequence
  ENSG00000065613_54 (sequence is synthesized)
gttttgttataaaatacgctgtttgtacccataccagcccacctcttctgaggccctgtattcaaatagatgatagtgatctatctttcctgcatgaagtgtaggtggcgagtgggcgag

SEQ ID NO: 47807 - DNA, 120 bp, Artificial Sequence
  ENSG00000065613_55 (sequence is synthesized)
gggcgcagacttctttgaaatcgaagggtacagtcaaatctactgctgatttggttgttttgttgctgtggcagaatatgccatgaaacacatacagacttctccgaacgtgcaccctca

SEQ ID NO: 47808 - DNA, 120 bp, Artificial Sequence
  ENSG00000065613_56 (sequence is synthesized)
tcagccacctcctcccctctttccctgagtgctgtgaacacagcagacctgcacacttctgcagatccagctcctacagcttggggcactaggctgcctttcctagtcctgtcaacaacc

SEQ ID NO: 47809 - DNA, 120 bp, Artificial Sequence
  ENSG00000065613_57 (sequence is synthesized)
atacagtgcgaattgctgaattagctgctattctatgtggagtcacattaagctttttcttatctttttctatggggaagctatagggtgggtaaggaaaaaatgttgaatgcttttact

SEQ ID NO: 47810 - DNA, 120 bp, Artificial Sequence
  ENSG00000065613_58 (sequence is synthesized)
ttgctgaaaatattagaactctcttgtgacaggatacagcaaattataattaaatataaattaccagaaccagagctacctctaagtcatacttcctcaagcacaaagctctcaggcata

SEQ ID NO: 47811 - DNA, 120 bp, Artificial Sequence
  ENSG00000065613_59 (sequence is synthesized)
tgagacccaccttaatgaagggtctctgatttcttgagcatcagcgagtttcagaagtgactatttttttgtactcttctagtttccttgtaactatacactttttcccattccacactg

SEQ ID NO: 47812 - DNA, 120 bp, Artificial Sequence
  ENSG00000065613_60 (sequence is synthesized)
tgcttaaatgacaaagactcttctgagaagccaaattctgtccaagtattaactagagatattgttgattaaagaaaatctagaactgaagtgaaagaagagagttccagttctaatagt

SEQ ID NO: 47813 - DNA, 120 bp, Artificial Sequence
  ENSG00000065613_61 (sequence is synthesized)
cttttgattaacaattcttttctgagaaatgatttttataagaaatggggtgattctttaaatgcttttcttaagttgaaggcacaacagttaatggctgtattgttgctattccgttgc

SEQ ID NO: 47814 - DNA, 120 bp, Artificial Sequence
  ENSG00000065613_62 (sequence is synthesized)
tgacatgtttttgataaagctttaacattcctgctactaattttggcggagagtgtttgccaggtttcaatgtgggctgcagctttttgtgctccttctctggtttgcagtgtaatgagt

SEQ ID NO: 47815 - DNA, 120 bp, Artificial Sequence
  ENSG00000065613_63 (sequence is synthesized)
tcataagctaaattttcagaaagaattttgtttaagattatgcctcttatctacttgagagcaacatgtcttttcaatcatgggattgacacatgaaaaataaagttatttcttaatcaa

SEQ ID NO: 47816 - DNA, 120 bp, Artificial Sequence
  ENSG00000065613_64 (sequence is synthesized)
gaattttagatttcctttctgtcttttatcctacaatttcttggatgaagtttggagtaattaattgtatcttgatcatgattgcaaacttcttttctacaaattataaggaaagtaact

SEQ ID NO: 47817 - DNA, 120 bp, Artificial Sequence
  ENSG00000065613_65 (sequence is synthesized)
gttataaatgaagtggagaaagcacccaaagagctgagaaaagagctcatgaaacgcaggaaagaggagcttgcacaaagccagcatgctcagggtgttgctcagatcatgattcagtct

SEQ ID NO: 47818 - DNA, 120 bp, Artificial Sequence
  ENSG00000065615_0 (sequence is synthesized)
gggcttggcctctgcccggccacagagccggagctggaggtgctgtcccgtctggcggcgatccccgggcagggcccggggccggggtttgaagatgctgaacgtcccttcccagtcttt

SEQ ID NO: 47819 - DNA, 120 bp, Artificial Sequence
  ENSG00000065615_1 (sequence is synthesized)
cccggcccccaggtcgcagcagcgtgtcgcctccggggggcgtagcaaggtacctttaaaacagggcagaagccttatggattggattcgactgaccaaaagtggaaaggatctaacggg

SEQ ID NO: 47820 - DNA, 120 bp, Artificial Sequence
  ENSG00000065615_2 (sequence is synthesized)
attaaaaggcaggttaattgaagtaactgaagaagaacttaagaaacacaacaaaaaagatgattgttggatatgcataagaggtttcgtttataatgtcagcccttatatggagtatca

SEQ ID NO: 47821 - DNA, 120 bp, Artificial Sequence
  ENSG00000065615_3 (sequence is synthesized)
tcctggtggagaagatgaactaatgagagcagcaggatcagatggtactgaactttttgatcaggttcatcgttgggtcaattatgaatccatgctgaaagaatgcctggttggcagaat

SEQ ID NO: 47822 - DNA, 120 bp, Artificial Sequence
  ENSG00000065615_4 (sequence is synthesized)
ggccattaaacctgctgttctgaaagactatcgtgaggaggaaaagaaagtcttaaatggcatgcttcccaagagccaagtgacagatacacttgccaaagaaggtcctagttatccaag

SEQ ID NO: 47823 - DNA, 120 bp, Artificial Sequence
  ENSG00000065615_5 (sequence is synthesized)
ctatgattggttccaaacagactctttagtcaccattgccatatatactaaacagaaggatatcaatttagactcaataatagttgatcatcagaatgattcctttagagcagaaacaat

SEQ ID NO: 47824 - DNA, 120 bp, Artificial Sequence
  ENSG00000065615_6 (sequence is synthesized)
tattaaggattgtttatatcttatacatattgggctaagccatgaggttcaggaagatttttctgtgcgggttgttgagagtgtgggaaaaatagagattgttctacaaaaaaaagagaa

SEQ ID NO: 47825 - DNA, 120 bp, Artificial Sequence
  ENSG00000065615_7 (sequence is synthesized)
tacttcttgggactttcttggccatcccctgaagaatcataattcacttattccaaggaaagatacaggtttgtactacagaaagtgccagttaatttccaaggaagatgttactcatga

SEQ ID NO: 47826 - DNA, 120 bp, Artificial Sequence
  ENSG00000065615_8 (sequence is synthesized)
tacgaggcttttctgtttgatgctgccaccaagcactcatcttcaagtgcccattgggcaacatgtttacctcaagctacctattacaggtacagaaatagtaaagccatatacacctgt

SEQ ID NO: 47827 - DNA, 120 bp, Artificial Sequence
  ENSG00000065615_9 (sequence is synthesized)
atctggttccttactctcagagttcaaggaaccagttcttcccaacaataaatacatctactttttgataaaaatctatcccactggactcttcacaccagagcttgatcgtcttcagat

SEQ ID NO: 47828 - DNA, 120 bp, Artificial Sequence
  ENSG00000065615_10 (sequence is synthesized)
tggagattttgtttctgtaagcagtcctgagggcaattttaaaatatccaagttccaagaattagaagatctctttttgttggcagctggaacaggcttcacaccaatggttaaaatact

SEQ ID NO: 47829 - DNA, 120 bp, Artificial Sequence
  ENSG00000065615_11 (sequence is synthesized)
gaattatgctttgactgatatacccagtctcaggaaagtgaagctgatgttcttcaataaaacagaagatgatataatttggagaagccaattggagaaattagcatttaaagataaaag

SEQ ID NO: 47830 - DNA, 120 bp, Artificial Sequence
  ENSG00000065615_12 (sequence is synthesized)
actggatgttgaatttgttctctcagcacctatttctgaatggaatggcaaacagggacatatttcaccagctcttctttctgaatttttgaaaagaaatttggacaaatccaaagttct

SEQ ID NO: 47831 - DNA, 120 bp, Artificial Sequence
  ENSG00000065615_13 (sequence is synthesized)
cgtctgcatttgtggaccagtgccatttacagaacaaggagtaaggttgctgcatgatctcaacttttccaaaaatgagatccatagttttacagcataatgaagagctgtcattgtcct

SEQ ID NO: 47832 - DNA, 120 bp, Artificial Sequence
  ENSG00000065615_14 (sequence is synthesized)
ttattcaactagtttatctaaatttgtgattgcttagggttttttaagagaacatttttgtacataacaaaaggttaactagaatccagccttcagtttcttaaatgaaatcaaatgttc

SEQ ID NO: 47833 - DNA, 120 bp, Artificial Sequence
  ENSG00000065615_15 (sequence is synthesized)
cttcagtacaggtaacttcttggctttcttttgtaccacaacttattttactactgatatttgacctggaaagttaatcatggcaacaaatacatacaggattctttgttatgaatcaca

SEQ ID NO: 47834 - DNA, 120 bp, Artificial Sequence
  ENSG00000065615_16 (sequence is synthesized)
aatttccttgccatttaaattatatcactgttctacaataagcacttgtgttttatgacatgataaagtaaatgatcacttcgatcatgtttctatgctgtaaaatgtcttattagcaat

SEQ ID NO: 47835 - DNA, 120 bp, Artificial Sequence
  ENSG00000065615_17 (sequence is synthesized)
acagattaaattttaccttgcactgttaactcaggaaatgatcatttatgtccttgttattaatgttaaaacatagaatgttataacttattaagtgatccaaacatttttttgtgtgtg

SEQ ID NO: 47836 - DNA, 120 bp, Artificial Sequence
  ENSG00000065615_18 (sequence is synthesized)
tatggcattgatgcagaatagaataaaattatacttaagttctttttaatccttgtggtagaaatgtggttgaatgcaacaatattgggccagcgtctcaaggggaattttaaaaggcag

SEQ ID NO: 47837 - DNA, 120 bp, Artificial Sequence
  ENSG00000065615_19 (sequence is synthesized)
caataaaatatattagagacatgacacacatgcgcctttggactaggtgtgttaacagagcttgagagagggaaccttgacagctatttttactcttagccaaaaacaaagacattagga

SEQ ID NO: 47838 - DNA, 120 bp, Artificial Sequence
  ENSG00000065615_20 (sequence is synthesized)
aagagagtgaaagtatagtgtctagttccacagcataaagttattatttggtgctttggaatgggttgaattttaattctttagtccatctaaatcagctggaaaaatgaggaacattct

SEQ ID NO: 47839 - DNA, 120 bp, Artificial Sequence
  ENSG00000065615_21 (sequence is synthesized)
gccttgaatggttcttcccctggttggctgctttctccacaactggtggttcagcaggaagccctcttaggttcttgcatgtgggcaacttattttctcttcctgctgctttgtgcaact

SEQ ID NO: 47840 - DNA, 120 bp, Artificial Sequence
  ENSG00000065615_22 (sequence is synthesized)
gtcaaatactttcacagattcagatcagcaaagggtatcaaggatagtcattgtgagcttttcgtgaggaaactgttgaatgcataggtagctactgtataagctaactaggatttttca

SEQ ID NO: 47841 - DNA, 120 bp, Artificial Sequence
  ENSG00000065615_23 (sequence is synthesized)
gtcttagtacagctgcaatgttttcacagaaataggggattgaaagagtctccaatttctctgtaaatgattttgtaaacagctaaatctttgctgaatgaataatatactcaagaggaa

SEQ ID NO: 47842 - DNA, 120 bp, Artificial Sequence
  ENSG00000065615_24 (sequence is synthesized)
cacaatattaatattccccaaattacagacgcccagcttgtgaagcttcctatgtgcaaatggctggttgaacactatcactttttcctgtgcctctgtcttctgtagccaattccacca

SEQ ID NO: 47843 - DNA, 120 bp, Artificial Sequence
  ENSG00000065615_25 (sequence is synthesized)
tcatcattattcacaaagacaggaatctagctgtcctggactggtactgttccctggtaggtaacaagaactttttctagcttcatgccttccccctacttatttttttccatctaaggg

SEQ ID NO: 47844 - DNA, 120 bp, Artificial Sequence
  ENSG00000065615_26 (sequence is synthesized)
tgaggtgatttggctctgtgtcctcacccaaatctcctctcaaattgtaattcccacatgtcgagggagggtcttggtgggaggtgattggatcatgggagtgattgcccccatgctgtt

SEQ ID NO: 47845 - DNA, 120 bp, Artificial Sequence
  ENSG00000065615_27 (sequence is synthesized)
atctgatggtttaaaagtgtggcacttcctccccacctcctgctgtattatgaagaaggtccttgcttcttctttgctttctaccataattgtacatttcctgaggcctccccagccatg

SEQ ID NO: 47846 - DNA, 120 bp, Artificial Sequence
  ENSG00000065615_28 (sequence is synthesized)
agagactatttaccacttttttttagttcatttgcgatgtatcaaatctaacttagccaacatctttctcatcttttctaagcctcttcttttttctctctcctttcccaagcaacagaa

SEQ ID NO: 47847 - DNA, 120 bp, Artificial Sequence
  ENSG00000065615_29 (sequence is synthesized)
ttcccaagcaacagaatctcctattagtcgctatatgtaatgcttcctcattcctccttttatgttttatatttttgtttatattttatttatattttgtttatattttgttatatttta

SEQ ID NO: 47848 - DNA, 120 bp, Artificial Sequence
  ENSG00000065615_30 (sequence is synthesized)
ttatattttgtttatattttaaaacaaatccataagtgtctcctgggtaatctccactgacatgattttatcaacttacatgttaattcccaaatgggagtgactaatttgagaatcagc

SEQ ID NO: 47849 - DNA, 120 bp, Artificial Sequence
  ENSG00000065615_31 (sequence is synthesized)
tgagcttcagttttcaatatccatttacttcctgcataccaccccaccatccacctagtaagccattctagaactattaggaatcaacatcaatgtccccttctccagtctgactcttcc

SEQ ID NO: 47850 - DNA, 120 bp, Artificial Sequence
  ENSG00000065615_32 (sequence is synthesized)
ataccagctaaccctgtcctatcatccctcagctggattagtacagtagcttgataattcatcttcatgctgcagtcctgatctcctaaaattcattctccattccagggtattctagaa

SEQ ID NO: 47851 - DNA, 120 bp, Artificial Sequence
  ENSG00000065615_33 (sequence is synthesized)
ggacttggaggaaaaaatcccctaagtagagcctcagtcttccaatgaatgcaaccaaatactgaggagcacagataggagtatagtttatcactgttattctcaagcaaataactcaaa

SEQ ID NO: 47852 - DNA, 120 bp, Artificial Sequence
  ENSG00000065615_34 (sequence is synthesized)
gactcctacatcacatatttgcagtgaagaagaattacgctcaaagtcacatttgcttgcaaattctgctttttttaaaaaaaagtttattaattttctattgctgctagatcaaattac

SEQ ID NO: 47853 - DNA, 120 bp, Artificial Sequence
  ENSG00000065615_35 (sequence is synthesized)
tacaaacttagtagcttaaaacaacacccatttattatctcacagttccatggcacagaaatctaggcacaatatggctcaactgggtcctctgcttaaagcctcacaaggctgtaatca

SEQ ID NO: 47854 - DNA, 120 bp, Artificial Sequence
  ENSG00000065615_36 (sequence is synthesized)
gattgtcagctgagctgggctcttagctagaggctgtaaggggaagtccctagataagagttctttcagcctcattaggtagatttcagttccttgcagttgtaggactgagttccccat

SEQ ID NO: 47855 - DNA, 120 bp, Artificial Sequence
  ENSG00000065615_37 (sequence is synthesized)
cagcattagtggatgaatctcatgctttcagtctctctgaattcccttgtgggcttcttcagcattggtagatgaatcttatgctttcaatctctctgaattccctttctgccatatctt

SEQ ID NO: 47856 - DNA, 120 bp, Artificial Sequence
  ENSG00000065615_38 (sequence is synthesized)
tcttgccctagcaagagttcactgcttttaagatctcatgtggttagattggacctatccagatatccagggtaatcttcctattttaaaaatctataattttaattatagctgtaaagt

SEQ ID NO: 47857 - DNA, 120 bp, Artificial Sequence
  ENSG00000065615_39 (sequence is synthesized)
cccttttcctatataatatattcaaaggttgcaggcatttgggtgttgacatctttgatgggcacattgtgtctaccacaggctatagaaagaacagagaaatttgtccaagataagatg

SEQ ID NO: 47858 - DNA, 120 bp, Artificial Sequence
  ENSG00000065615_40 (sequence is synthesized)
attaggttttgtctagataggggcccttgctatgggccctcagtttttaccttaatgtaacagaacatgagaggagctttgacacccaccccaaaagagtcaacttcattatgctggcaa

SEQ ID NO: 47859 - DNA, 120 bp, Artificial Sequence
  ENSG00000065615_41 (sequence is synthesized)
aggcatgggtacaacctgctctgtgatctaccttctgaaccacacaagcttgtcctgaacgaggttggggctgagtctgttgataacagacccccatttttgggcagaaaaaacagattc

SEQ ID NO: 47860 - DNA, 120 bp, Artificial Sequence
  ENSG00000065615_42 (sequence is synthesized)
tgtatgatctacagtatttaacattgtggcaaataaattataaaggaaaaatggaatctcaagtagttacagtctcttggtgtctttcaacattggttttattttgaagtcattttcacc

SEQ ID NO: 47861 - DNA, 120 bp, Artificial Sequence
  ENSG00000065615_43 (sequence is synthesized)
cagcattgcaagtttagcagacctcaaaacagaatgccaaagtgatcttaaaattcaaaaatgagtttactttctttgttaaagttctcttttgatgcatatcccccattcatggaatgg

SEQ ID NO: 47862 - DNA, 120 bp, Artificial Sequence
  ENSG00000065615_44 (sequence is synthesized)
cttttgatgcatatcccccattcatggaatggaagcattatcttgggtgcagcattacacgtagagttaaaatgtggaaacaacccaaacatcctgatatggtttggctctgtgtcacca

SEQ ID NO: 47863 - DNA, 78 bp, Artificial Sequence
  ENSG00000065615_45 (sequence is synthesized)
caggtgttgctgcaaagataccgggaaatgtggaagcaactttggaacttggtaacaggcagagattggaacagtttg

SEQ ID NO: 47864 - DNA, 72 bp, Artificial Sequence
  ENSG00000065615_46 (sequence is synthesized)
gagggctcagaagaagacaggaaaatgggaaagtttggaacttcctaatgaaatctagactgaggtggtctc

SEQ ID NO: 47865 - DNA, 120 bp, Artificial Sequence
  ENSG00000065615_47 (sequence is synthesized)
tgatatggacaatgaaatctagactgaggtggtctcaggtggagatgaggaacctgttgagaactggagcaaaggtgactcttgttatgatttagcaaagagactggcggcattttgccc

SEQ ID NO: 47866 - DNA, 68 bp, Artificial Sequence
  ENSG00000065615_48 (sequence is synthesized)
agactggcggcattttgcccctgccctggagatttgtggaactctgaacttgagagagatgattacaa

SEQ ID NO: 47867 - DNA, 120 bp, Artificial Sequence
  ENSG00000065615_49 (sequence is synthesized)
tcaagtgttgttaaaggcattcagttttaaaagggaagcagagcattaaaattcagaaaattagcagcttgacaatgcgatagaaaagaaaatcctattttctgaggagaaattcaagct

SEQ ID NO: 47868 - DNA, 120 bp, Artificial Sequence
  ENSG00000065615_50 (sequence is synthesized)
aaatgtctccagggcatgtcagagacatttgtggcagcctcttctatcacagacctggaggtctaggaagaaaaaatggtaaaaatggttttgtgggcaaggcctagggtccttgtgctg

SEQ ID NO: 47869 - DNA, 120 bp, Artificial Sequence
  ENSG00000065615_51 (sequence is synthesized)
atggttttgtgggcaaggcctagggtccttgtgctgtgtgcagtctaaggacttggtgccctgtttcctagccactccggccatggctgaaaggggccaacatgaagctcaggccatggc

SEQ ID NO: 47870 - DNA, 120 bp, Artificial Sequence
  ENSG00000065615_52 (sequence is synthesized)
ttcagagggtgaaagccttaagccttggcaacttccatgtgatgttgagcatgtgggtgcacagaagtcaagaaatggggtttgggaacctctgtctagatttcagaagatgtatggaaa

SEQ ID NO: 47871 - DNA, 78 bp, Artificial Sequence
  ENSG00000065615_53 (sequence is synthesized)
ggggctctcatggagaacctctcacagagtccctactgggacaccgcctagtggagctgtgagaagaggaccactgtc

SEQ ID NO: 47872 - DNA, 120 bp, Artificial Sequence
  ENSG00000065615_54 (sequence is synthesized)
tgtcctccagaccccagaatggtagatcgacttacagcttgtaccaggtgcctggaaaagctgcagatactcaacaccagcccatgaaagcagccaggatggaggctgtaccctgaaagc

SEQ ID NO: 47873 - DNA, 120 bp, Artificial Sequence
  ENSG00000065615_55 (sequence is synthesized)
ctgcagatactcaacaccagcccatgaaagcagccaggatggaggctgtaccctgaaagccacagggccagagctgcccaagaccatgggaagccacctcttgcatcagcgtgacctgga

SEQ ID NO: 47874 - DNA, 120 bp, Artificial Sequence
  ENSG00000065615_56 (sequence is synthesized)
atgctgaaatgatttaagactttggggtactgttgggaatgcatgattggttttgaaatgtgaggacataagatttggaggagccaggggtgggatgatatggtttggctctgtgtcccc

SEQ ID NO: 47875 - DNA, 66 bp, Artificial Sequence
  ENSG00000065615_57 (sequence is synthesized)
gtgtccccacccaaatttcatcttgaattatactcccataattcccatgtgttatacgtgggacct

SEQ ID NO: 47876 - DNA, 120 bp, Artificial Sequence
  ENSG00000065615_58 (sequence is synthesized)
tcatgagatctgatggtttcatcagggggttccgcttttgcatcttactcatttctcttgctgccaccctgtaagaagtatttttaacctaccgccatgattctgaggcctccccagcca

SEQ ID NO: 47877 - DNA, 120 bp, Artificial Sequence
  ENSG00000065615_59 (sequence is synthesized)
tataagtccaattaaacctctttttcttggcttaatttcttgggtatgtctttatcagcagtgattctattcctatgaaatgtctagaacaggaaaatctatgagacataaagtaattaa

SEQ ID NO: 47878 - DNA, 120 bp, Artificial Sequence
  ENSG00000065615_60 (sequence is synthesized)
gtggctgttcaggggatacaggaataggggataataactaaagggttgggagggtgtttttgaaatgctaaaatattctgaagtttactgtggttatggttgcacatacttatgaatata

SEQ ID NO: 47879 - DNA, 120 bp, Artificial Sequence
  ENSG00000065615_61 (sequence is synthesized)
cctaaaaatgttgaattgtacattttaagtagatgaattgtatctaatttgaaccatatctcagtaaagatataaaaatgtttttgggtactaagactaaactagaaagaacataagagg

SEQ ID NO: 47880 - DNA, 120 bp, Artificial Sequence
  ENSG00000065615_62 (sequence is synthesized)
ctaaactagaaagaacataagaggaaatacatattatataagaagaaaagagtaaaaataaatctttaaaaaaataaaaataaaaaggaggcctgtgtgcggtggctcatgcctgtaatc

SEQ ID NO: 47881 - DNA, 64 bp, Artificial Sequence
  ENSG00000065615_63 (sequence is synthesized)
gaggttgcggtgagccgagattgcaaataaaaaggattctagaggaagtggtaaatagtgaaga

SEQ ID NO: 47882 - DNA, 120 bp, Artificial Sequence
  ENSG00000065615_64 (sequence is synthesized)
aaataaaaaggattctagaggaagtggtaaatagtgaagataggcaaagaatatccaacatatgaataatagtagtccttgaagacaaaaatcaaaggaaaagaatactaaaaactctac

SEQ ID NO: 47883 - DNA, 120 bp, Artificial Sequence
  ENSG00000065615_65 (sequence is synthesized)
ttaatgaaaaatcatcctgaaattaacaagaaaaattgaaattaatgttgaaagagcaccagagagtatacatccaaaaagaccaacattaatataaattttagtaaaattactgaacca

SEQ ID NO: 47884 - DNA, 120 bp, Artificial Sequence
  ENSG00000065615_66 (sequence is synthesized)
tgaaaagtaaatgcctttagttatctaaacaaaaactaattacttaaaagggaaagaaaattagatcatcaccagacttttcaacagcattgccttatgctttaagaaagtgttgtacca

SEQ ID NO: 47885 - DNA, 120 bp, Artificial Sequence
  ENSG00000065615_67 (sequence is synthesized)
catttgatatcctgatggaaaaaaatgtgagccaaggattttacacccaacaaaacttaatggtgaatataaaggcataaaccaatatagaatgcaaaaacttgggaaatattgttttcc

SEQ ID NO: 47886 - DNA, 120 bp, Artificial Sequence
  ENSG00000065615_68 (sequence is synthesized)
aaagcctttcctaagtaatctacaaaagaacaagctttaaacaaccagaaagactagaaagtcatcaataaaaggattggagaacattaaacttgtagaactaaaacaaaatgagagtta

SEQ ID NO: 47887 - DNA, 120 bp, Artificial Sequence
  ENSG00000065615_69 (sequence is synthesized)
aaaaagaaagagtataggtatatgctaaactatttcagtagttttggcagtggttgtattagtattgttattctgaagatgtgaaataatgcaaacgcataataaaaaatgtcatctggt

SEQ ID NO: 47888 - DNA, 120 bp, Artificial Sequence
  ENSG00000065615_70 (sequence is synthesized)
tgttctgaaaggcaaactctggcacctgtagagctgaggatggagatagacaccaggacctatagtgggctgagacattactttcaaagatttcttttactgtcacagcactgtgagcaa

SEQ ID NO: 47889 - DNA, 120 bp, Artificial Sequence
  ENSG00000065615_71 (sequence is synthesized)
ggacaagacatctattgaatgggctgcctgccagttggaagttcaacttttgtaaagtcagtcaaagttctttcttctagaagcctcagtttcctcattggtaaaatggagacaatttag

SEQ ID NO: 47890 - DNA, 120 bp, Artificial Sequence
  ENSG00000065615_72 (sequence is synthesized)
cttgtacccagcatttcagaagccatgtggggaagaaggctgggcctagcttctggtatatctaatatacttacctgaaggattcatatatcagaaagaacatcaatcagagaagagaaa

SEQ ID NO: 47891 - DNA, 120 bp, Artificial Sequence
  ENSG00000065618_0 (sequence is synthesized)
aacatttttgaaagatcactcagctttaacacaccttggctgggtctggataaaaaaaaagtgagcactgcaaatttctagaagaaaacatcaggagaagaaagagagagggggatttat

SEQ ID NO: 47892 - DNA, 120 bp, Artificial Sequence
  ENSG00000065618_1 (sequence is synthesized)
tcaaagttgtttccaattccttcaaaacctcaaaccaggtggctatggtatggatgtaaccaagaaaaacaaacgagatggaactgaagtcactgagagaattgtcactgaaacagtaac

SEQ ID NO: 47893 - DNA, 120 bp, Artificial Sequence
  ENSG00000065618_2 (sequence is synthesized)
cacaagacttacatccttaccaccaaaaggcgggaccagcaatggctatgctaaaacagcctctcttggtggagggagccggctggagaaacaaagcctgactcatggcagcagcggcta

SEQ ID NO: 47894 - DNA, 120 bp, Artificial Sequence
  ENSG00000065618_3 (sequence is synthesized)
cataaactcaactggaagcacacgaggccatgcctccacctctagttacaggagggctcactcacctgcctccactctgcccaactccccaggctcaacctttgaaaggaaaactcacgt

SEQ ID NO: 47895 - DNA, 120 bp, Artificial Sequence
  ENSG00000065618_4 (sequence is synthesized)
tacccgccatgcgtatgaagggagctccagtggcaactcttctccggagtaccctcggaaggaatttgcatcttcttcaaccagaggacggagtcaaacacgagagagtgaaattcgagt

SEQ ID NO: 47896 - DNA, 120 bp, Artificial Sequence
  ENSG00000065618_5 (sequence is synthesized)
tcgactgcagagtgcgtccccatccacccgatggacagaattggatgatgttaagcgtttgctcaaggggagtcgatcggcaagtgtgagccccacccggaattcctccaacacactccc

SEQ ID NO: 47897 - DNA, 120 bp, Artificial Sequence
  ENSG00000065618_6 (sequence is synthesized)
catccccaagaaaggcactgtggagaccaaaattgtgacagcgagctcccagtcggtgtcaggcacctacgatgcaacgatcctggatgccaaccttccctcccatgtgtggtcctccac

SEQ ID NO: 47898 - DNA, 120 bp, Artificial Sequence
  ENSG00000065618_7 (sequence is synthesized)
cctgcccgcggggtcctccatggggacctatcacaacaacatgacaacccagagctcatccctcctcaacaccaatgcctactctgcgggatcagtcttcggagttccaaacaacatggc

SEQ ID NO: 47899 - DNA, 120 bp, Artificial Sequence
  ENSG00000065618_8 (sequence is synthesized)
gtcctgctcacccactttgcaccctggactcagcacatcctcctcagtgtttggcatgcagaacaatctggcccccagcttgaccaccctgtcccatggcaccaccaccacttccacagc

SEQ ID NO: 47900 - DNA, 120 bp, Artificial Sequence
  ENSG00000065618_9 (sequence is synthesized)
atatggggtgaagaaaaacatgccccagagtcctgcggctgtgaacactggcgtttccacctccgccgcctgcaccacaagtgtgcagagcgatgaccttttgcacaaggactgcaagtt

SEQ ID NO: 47901 - DNA, 120 bp, Artificial Sequence
  ENSG00000065618_10 (sequence is synthesized)
cctgatcctagagaaagacaacacacctgccaagaaggagatggagctgctcatcatgaccaaggacagcgggaaggtctttacagcctcccctgccagcatcgctgcaacttctttttc

SEQ ID NO: 47902 - DNA, 120 bp, Artificial Sequence
  ENSG00000065618_11 (sequence is synthesized)
agaagacaccctaaaaaaagaaaagcaagctgcctacaatgctgactcaggcctaaaagccgaagctaatggagacctgaagactgtgtccacaaagggcaagaccaccactgcagatat

SEQ ID NO: 47903 - DNA, 120 bp, Artificial Sequence
  ENSG00000065618_12 (sequence is synthesized)
ccacagctacggcagcagtggtggtggtggcagtggaggaggtggcggtgttggtggcgctggcggcggcccttggggaccagcgccagcctggtgcccctgcggctcctgctgcagctg

SEQ ID NO: 47904 - DNA, 120 bp, Artificial Sequence
  ENSG00000065618_13 (sequence is synthesized)
gtggaagtggctgctgggcctgctgctcacctggctgctactcctggggctgctcttcggcctcattgctctggcggaggaggtgaggaagctgaaggcgcgtgtggatgagctggagag

SEQ ID NO: 47905 - DNA, 120 bp, Artificial Sequence
  ENSG00000065618_14 (sequence is synthesized)
gatcaggaggagcatactgccctatggggacagcatggatagaatagaaaaggaccgcctccagggcatggcacccgcggcgggagcagacctggacaaaattgggctgcacagtgacag

SEQ ID NO: 47906 - DNA, 120 bp, Artificial Sequence
  ENSG00000065618_15 (sequence is synthesized)
ccaggaggagctctggatgttcgtgaggaagaagctaatgatggaacaggaaaatggaaatctccgaggaagccctggccctaaaggtgacatgggaagtccaggccctaaaggagatcg

SEQ ID NO: 47907 - DNA, 120 bp, Artificial Sequence
  ENSG00000065618_16 (sequence is synthesized)
agggttccctgggactccaggtatccctgggcccttgggccacccaggtccacaaggaccaaagggtcaaaaaggcagcgtgggagatcctggcatggaaggccccatgggccagagagg

SEQ ID NO: 47908 - DNA, 120 bp, Artificial Sequence
  ENSG00000065618_17 (sequence is synthesized)
gcgagaaggccccatgggacctcgtggtgaggcagggcctcctggatctggagagaaaggggaaagaggggctgctggtgaaccaggtcctcatggcccacctggtgtcccaggttctgt

SEQ ID NO: 47909 - DNA, 120 bp, Artificial Sequence
  ENSG00000065618_18 (sequence is synthesized)
gggtcccaaaggttccagcggctctcctggcccacagggccctccaggtcctgtaggtctccaagggctccgaggtgaagtaggacttcctggtgtcaaaggtgacaaaggaccaatggg

SEQ ID NO: 47910 - DNA, 120 bp, Artificial Sequence
  ENSG00000065618_19 (sequence is synthesized)
accaccaggacccaaaggtgaccagggtgagaaaggacctcgaggcctcacaggcgagcctggcatgagaggtttgcctggtgctgttggtgagcccggggctaaaggagcaatgggtcc

SEQ ID NO: 47911 - DNA, 120 bp, Artificial Sequence
  ENSG00000065618_20 (sequence is synthesized)
tgctggcccagacggacaccaaggcccaagaggtgaacaaggtcttactgggatgcctggaatccgtggcccaccaggaccttctggagacccaggaaagccaggtctcacaggacccca

SEQ ID NO: 47912 - DNA, 120 bp, Artificial Sequence
  ENSG00000065618_21 (sequence is synthesized)
gggacctcagggacttcccggtacccctggccgaccaggaataaaaggtgaaccaggagctccaggcaagatcgtgacttcggaggggtcatcgatgctcactgtcccaggccccccagg

SEQ ID NO: 47913 - DNA, 120 bp, Artificial Sequence
  ENSG00000065618_22 (sequence is synthesized)
acctcctggagccatgggacccccaggacctccaggtgccccaggccctgccggcccagctggtctcccaggacatcaagaagttcttaatttacaaggtcccccaggcccacccggccc

SEQ ID NO: 47914 - DNA, 120 bp, Artificial Sequence
  ENSG00000065618_23 (sequence is synthesized)
cgttcctgtccaactcagaaaccttcctctccggccccccaggcccacctggccccccaggtcccaagggagaccaaggtcccccaggccccagaggacaccaaggcgagcaaggcctcc

SEQ ID NO: 47915 - DNA, 120 bp, Artificial Sequence
  ENSG00000065618_24 (sequence is synthesized)
caggtttctcaacctcagggtccagttctttcggactcaaccttcagggaccaccaggcccacctggcccccagggacccaaaggtgacaaaggtgatccaggtgttccaggggctcttg

SEQ ID NO: 47916 - DNA, 120 bp, Artificial Sequence
  ENSG00000065618_25 (sequence is synthesized)
gcattcctagtggtccttctgaagggggatcatcaagtaccatgtacgtgtcaggcccgccagggccccctgggccccctgggcctccgggctctatcagcagctctggccaggagattc

SEQ ID NO: 47917 - DNA, 120 bp, Artificial Sequence
  ENSG00000065618_26 (sequence is synthesized)
agcagtacatctctgagtacatgcagagtgacagtattagatcttacctatccggagttcagggtcccccaggcccacctggtcccccaggacctgtcaccaccatcacaggcgagactt

SEQ ID NO: 47918 - DNA, 120 bp, Artificial Sequence
  ENSG00000065618_27 (sequence is synthesized)
tcgactactcagagctggcaagccacgttgtgagctacttacggacttcggggtacggtgtcagcttgttctcgtcctccatctcttctgaagacattctggctgtgctgcagcgggatg

SEQ ID NO: 47919 - DNA, 120 bp, Artificial Sequence
  ENSG00000065618_28 (sequence is synthesized)
acgtgcgtcagtacctacgtcagtacttgatgggccctcggggtccgccagggccaccaggagccagtggagatgggtccctcctgtctttggactatgcagagctgagtagtcgcattc

SEQ ID NO: 47920 - DNA, 120 bp, Artificial Sequence
  ENSG00000065618_29 (sequence is synthesized)
tcagctacatgtcgagttctgggatcagcattgggcttcctggtcccccggggccccctggcttgccgggaacctcctatgaggagctcctctccttgctgcgagggtctgaattcagag

SEQ ID NO: 47921 - DNA, 120 bp, Artificial Sequence
  ENSG00000065618_30 (sequence is synthesized)
gcatcgttggacccccaggtcccccgggtccaccagggatcccaggcaatgtgtggtccagcatcagcgtggaggacctctcgtcttacttacatactgccggcttgtcattcatcccag

SEQ ID NO: 47922 - DNA, 120 bp, Artificial Sequence
  ENSG00000065618_31 (sequence is synthesized)
gccctccaggacctcctggtcccccagggcctcgagggcccccgggtgtctcaggagccctggcaacctatgcagctgaaaacagcgacagcttccggagcgagctgatcagctacctca

SEQ ID NO: 47923 - DNA, 120 bp, Artificial Sequence
  ENSG00000065618_32 (sequence is synthesized)
caagtcctgatgtgcgcagcttcattgttggccccccaggccctcctgggccgcagggaccccctggggacagccgcctcctgtccacggatgcctcccacagtcggggtagcagctcct

SEQ ID NO: 47924 - DNA, 120 bp, Artificial Sequence
  ENSG00000065618_33 (sequence is synthesized)
cctcacacagctcatctgtcaggcggggcagctcctacagctcttccatgagcacaggaggaggtggtgcaggctccctgggtgcaggcggtgcctttggtgaagctgcaggagacaggg

SEQ ID NO: 47925 - DNA, 120 bp, Artificial Sequence
  ENSG00000065618_34 (sequence is synthesized)
gtccctatggcactgacatcggcccaggcggaggctatggggcagcagcagaaggcggcatgtatgctggcaatggcggactattgggagctgactttgctggagatctggattacaatg

SEQ ID NO: 47926 - DNA, 120 bp, Artificial Sequence
  ENSG00000065618_35 (sequence is synthesized)
agctggctgtgagggtgtcagagagcatgcagcgtcagggcctactgcaagggatggcctacactgtccagggcccaccaggccagcctgggccacaggggccacccggcatcagcaagg

SEQ ID NO: 47927 - DNA, 120 bp, Artificial Sequence
  ENSG00000065618_36 (sequence is synthesized)
tcttctctgcctacagcaacgtgactgcggacctcatggacttcttccaaacttatggagccattcaaggaccccctgggcaaaaaggagagatgggcactccaggacccaaaggtgaca

SEQ ID NO: 47928 - DNA, 120 bp, Artificial Sequence
  ENSG00000065618_37 (sequence is synthesized)
ggggccctgctgggccaccaggtcatcctgggccacctggccctcgaggacacaagggagaaaaaggagacaaaggtgaccaagtctatgctgggcggagaaggagaagaagtattgctg

SEQ ID NO: 47929 - DNA, 120 bp, Artificial Sequence
  ENSG00000065618_38 (sequence is synthesized)
tcaagccgtgagctagccatggcaggacagctcctggaccaggtctcataatgcatgtggcacttaggtccaaggtctccagagggtgaaagctggagtctgtcaatgtcctactgagac

SEQ ID NO: 47930 - DNA, 120 bp, Artificial Sequence
  ENSG00000065618_39 (sequence is synthesized)
agcacagccaacctagctagcaacatttgttttagtctgaacaatatatacttatagaattcagtcaaagatacacaatctgaaacagcttcatggggtggactctaacagtagttgcaa

SEQ ID NO: 47931 - DNA, 120 bp, Artificial Sequence
  ENSG00000065618_40 (sequence is synthesized)
tgttttagaatgagacttacttctctgctatctagatctgaactccttggcttctttacttagttcaagccccagcctaggaaagccagttacataaaagttggctcaggagtcttagag

SEQ ID NO: 47932 - DNA, 120 bp, Artificial Sequence
  ENSG00000065618_41 (sequence is synthesized)
ctttacctaaatatgagcccagaaaacggaggatgggggtggggcgccttcctggaggtgacacttgatgggggtgtgttctggttactgttctaaggctgtgccatcagctccttcctc

SEQ ID NO: 47933 - DNA, 120 bp, Artificial Sequence
  ENSG00000065618_42 (sequence is synthesized)
ccctgttcattctgcattctctagtcagttggctaagaagtgactcttgcaactaaaaaaattaagaaattcacttcccctctaggaggtgatgatagggtttctaatggttatatgtat

SEQ ID NO: 47934 - DNA, 120 bp, Artificial Sequence
  ENSG00000065618_43 (sequence is synthesized)
atcacattcccatttgcttagaaagtctgattgtagctatgattgtccgtaggcccatactagagttcatggatatgttatactgaaccaggccagagcaaacagaaaaagaaggttgag

SEQ ID NO: 47935 - DNA, 120 bp, Artificial Sequence
  ENSG00000065618_44 (sequence is synthesized)
ggcaatggacaaggaaggaataaagggagaagagggaaaacagaaaacctgatgctggggacacagcatcagctcaagacgtcaccctccattctgcactcagaaaatggcacttggggg

SEQ ID NO: 47936 - DNA, 120 bp, Artificial Sequence
  ENSG00000065618_45 (sequence is synthesized)
actgggcgcagttggtctttaaccacttttcaatgtctaaaaacatttgtttgtggtctataagatgaaacatcatttcaatcgtaaaatttcccattaaagaagtttttttttctaata

SEQ ID NO: 47937 - DNA, 120 bp, Artificial Sequence
  ENSG00000065618_46 (sequence is synthesized)
cctacaatgctgactcaggcctaaaagccgaagctaatggtaagaacaaatatgattgttgtccaccttgacttcagccaggccacatttcatttcattgtcttcggagaccttgctact

SEQ ID NO: 47938 - DNA, 120 bp, Artificial Sequence
  ENSG00000065618_47 (sequence is synthesized)
caaagtgtggtccacgggccagcagcatcagccacacctgggagtgtgttataaaagcaggatcccagccctagctcagatctgctgagtcagaagctgcagttcaacaagcttcctagg

SEQ ID NO: 47939 - DNA, 120 bp, Artificial Sequence
  ENSG00000065618_48 (sequence is synthesized)
tgatttgcatttgcattactgaagcaaaagcctgcctctgccatgtctacgaaggcatttgttttctcattttactttttctccataatcttcagaactaatagaaaaatgctttgcaaa

SEQ ID NO: 47940 - DNA, 120 bp, Artificial Sequence
  ENSG00000065618_49 (sequence is synthesized)
ctttttctttgttctaaatggaaggatgaagagctgaatgatcttatggtatctgttgggaggtatctgttggttttagagtcagaatatcttagataaggcagcatctaagagaagccc

SEQ ID NO: 47941 - DNA, 120 bp, Artificial Sequence
  ENSG00000065618_50 (sequence is synthesized)
tcacccactttgcaccctggactcagcacatcctcctcaggtcagtgtcaccatcttgagatgacttttccaggctatttgcatagaagtgttaggatgcttcacccaagagcatgaagg

SEQ ID NO: 47942 - DNA, 120 bp, Artificial Sequence
  ENSG00000065618_51 (sequence is synthesized)
cctttcttccatgcatactgcagctcagaagcagaggcacagggttgcacagaacctgccttcaaccacagggagaactcagaccccaagggaaaagtctcaggcgaggggacgtgagcc

SEQ ID NO: 47943 - DNA, 120 bp, Artificial Sequence
  ENSG00000065618_52 (sequence is synthesized)
cacattgacgtgcgtattctaaggtggcgcctttattttctggaagagttggaggattggaaatgaagggtctaacggaatcatcgtgtaggacattttcagggtaaaggcattgttaat

SEQ ID NO: 47944 - DNA, 120 bp, Artificial Sequence
  ENSG00000065618_53 (sequence is synthesized)
ttagaaggattttatttcagatcttttaaagaaaaatagaattcattgagtaactactttcagatctttctataaatataacacatagtttgttggagtaactatattggggtaaataat

SEQ ID NO: 47945 - DNA, 120 bp, Artificial Sequence
  ENSG00000065618_54 (sequence is synthesized)
gttactgcttatcttccaatgcaaacataacaacaattttaaagaaatatttatttgctatgtttccacatacatcttaagagcctatatgtaaatattaccagcctacatcttttcttt

SEQ ID NO: 47946 - DNA, 120 bp, Artificial Sequence
  ENSG00000065618_55 (sequence is synthesized)
agagacctgtgccagtcacacagtggaatacaaaggaagttggagggcttcacccttgctgcggcttgatctagttcaactgctttgggagtttgacactcggagggcactgtgctcctg

SEQ ID NO: 47947 - DNA, 120 bp, Artificial Sequence
  ENSG00000065621_0 (sequence is synthesized)
ctccttgctgctgctgccgccgccaatcctggtccggttgcccgagttcccggaggtctctcgcgggacctctctcaccgccaccgctcctactctcgggcttccaaatctggggcgatg

SEQ ID NO: 47948 - DNA, 120 bp, Artificial Sequence
  ENSG00000065621_1 (sequence is synthesized)
tctccccaggttaaattaccctagctcctgctccagatcgcttccccgtgccccgccagagcccagtagttcaaaaattaaatttggggcaaggggtgcgcgccagagcgcagctgtttc

SEQ ID NO: 47949 - DNA, 120 bp, Artificial Sequence
  ENSG00000065621_2 (sequence is synthesized)
tggagcctgcggcagcggtggcgagccacagggcggcgaccgtgagctccgggagctgcgcaaaccacctggagaccatgtctggggatgcgaccaggaccctggggaaaggaagccagc

SEQ ID NO: 47950 - DNA, 120 bp, Artificial Sequence
  ENSG00000065621_3 (sequence is synthesized)
ccccagggccagtcccggaggggctgatccgcatctacagcatgaggttctgcccctattctcacaggacccgcctcgtcctcaaggccaaagacatcagacatgaagtggtcaacatta

SEQ ID NO: 47951 - DNA, 120 bp, Artificial Sequence
  ENSG00000065621_4 (sequence is synthesized)
acctgagaaacaagcctgaatggtactatacaaagcacccttttggccacattcctgtcctggagaccagccaatgtcaactgatctatgaatctgttattgcttgtgagtacctggatg

SEQ ID NO: 47952 - DNA, 120 bp, Artificial Sequence
  ENSG00000065621_5 (sequence is synthesized)
atgcttatccaggaaggaagctgtttccatatgacccttatgaacgagctcgccaaaagatgttattggagctattttgtaaggtcccacatttgaccaaggagtgcctggtagcgttga

SEQ ID NO: 47953 - DNA, 120 bp, Artificial Sequence
  ENSG00000065621_6 (sequence is synthesized)
gatgtgggagagaatgcactaatctgaaggcagccctgcgtcaggaattcagcaacctggaagagattcttgagtatcagaacaccaccttctttggtggaacctgtatatccatgattg

SEQ ID NO: 47954 - DNA, 120 bp, Artificial Sequence
  ENSG00000065621_7 (sequence is synthesized)
attacctcctctggccctggtttgagcggctggatgtgtatgggatactggactgtgtgagccacacgccagccctgcggctctggatatcagccatgaagtgggaccccacagtctgtg

SEQ ID NO: 47955 - DNA, 120 bp, Artificial Sequence
  ENSG00000065621_8 (sequence is synthesized)
ctcttctcatggataagagcattttccagggcttcttgaatctctattttcagaacaaccctaatgcctttgactttgggctgtgctgagtctcactgtccaccccttcgctgtccagaa

SEQ ID NO: 47956 - DNA, 120 bp, Artificial Sequence
  ENSG00000065621_9 (sequence is synthesized)
ttccccagcttgttgggagtctacgtcacggcttgtcttgggaaccaatccgtctctctttcttttctttgaagttcccaataaaatgaaaacaggaaatgtattcttctgataatcatt

SEQ ID NO: 47957 - DNA, 120 bp, Artificial Sequence
  ENSG00000065621_10 (sequence is synthesized)
tgtctgactcctctagcctgtagctgctgctactgctgcttttttttcctttttttttttgaggcaagatcttgcttcgttactcaggctggagtgcagtgggacagtcggctcactgca

SEQ ID NO: 47958 - DNA, 120 bp, Artificial Sequence
  ENSG00000065621_11 (sequence is synthesized)
gccttgaactcctgggctcagttgattctcccgcctcagcctcctgagaagctaggactacaggtatgtgtcaccacgcccagctaatttttaaaaaaatgttgttgagacagggtctca

SEQ ID NO: 47959 - DNA, 89 bp, Artificial Sequence
  ENSG00000065621_12 (sequence is synthesized)
catccacccaacttggtctctggcctgcctagcctgtagcttctaactattttctagaaagtgcctggtgctaatgtcagagcacattt

SEQ ID NO: 47960 - DNA, 120 bp, Artificial Sequence
  ENSG00000065621_13 (sequence is synthesized)
ttttctagaaagtgcctggtgctaatgtcagagcacattttgggagcctgtgtgcctcctaactccttggccttcagcctagtttgatctccagattattggtgcagatgctgatgctga

SEQ ID NO: 47961 - DNA, 120 bp, Artificial Sequence
  ENSG00000065621_14 (sequence is synthesized)
ggttcagggtcaacctatgactgatgcttgtcactacagaatggcaccctccaaagacctccctggtgaaagcttaagaagagggagaaggaagaagaaaacactccaaacctaaatacc

SEQ ID NO: 47962 - DNA, 120 bp, Artificial Sequence
  ENSG00000065621_15 (sequence is synthesized)
ttccatttggcaaatgaatgtcgctgtccacgtgggcgagtatgagtgtaattctccaaactttggccatgggcctggagacaccgagggtcttgtgactggaaagaattccaaagcagg

SEQ ID NO: 47963 - DNA, 120 bp, Artificial Sequence
  ENSG00000065621_16 (sequence is synthesized)
aaatgaaacaccggtttatcacccaggactaactacgtcagaatttcactggtgctgtcagggctcaggatgtctcacaaaatgttctatagccggcatcctgccttaaaaaaatacaca

SEQ ID NO: 47964 - DNA, 120 bp, Artificial Sequence
  ENSG00000065621_17 (sequence is synthesized)
cgccccaaacccagccacaagcaaaggtcattccgttggatttgcgtcacactctcttccaattcatctcaacaaatgcctctggttgcctgttgtgtaccaagcccaggggcacactgg

SEQ ID NO: 47965 - DNA, 120 bp, Artificial Sequence
  ENSG00000065621_18 (sequence is synthesized)
ggataaagttgaaaaagacattggctctgtccctgggagcccccatctctccacttatcttggttgaggttttaaacctagcgctttggagctgcttgtctgttgtagggatgcttgtct

SEQ ID NO: 47966 - DNA, 120 bp, Artificial Sequence
  ENSG00000065621_19 (sequence is synthesized)
ctgatgtggcccctctgccagcttcgccaggcagtaccaccccactgaagacagcaaagagctgaggatggctggtgccaacaggtcccttgggctgggagcatctactgcctgcactat

SEQ ID NO: 47967 - DNA, 120 bp, Artificial Sequence
  ENSG00000065621_20 (sequence is synthesized)
gggagggggaccaagtttgtccaatgctgtttcatctcagtgtctgaggatcagcctgtgatcatttcagctttgctcatgctggatcctttcccatcctcctagctgtgctgagacacc

SEQ ID NO: 47968 - DNA, 120 bp, Artificial Sequence
  ENSG00000065621_21 (sequence is synthesized)
aggcagcaacaggagcgatgttttgccttgtctgtgctccctaaggagctgtctgccacctctgcctctgagacagcccaaatcagccctcctctctccccacgtctcagtctggccctg

SEQ ID NO: 47969 - DNA, 120 bp, Artificial Sequence
  ENSG00000065621_22 (sequence is synthesized)
ccatctgctggctctgggtatattttgacccatgtaaatagttaccaggtgttactctgtgccagctggacagaaacaagcctgcttggtgaggtggccagaacttccagaagaggcagc

SEQ ID NO: 47970 - DNA, 120 bp, Artificial Sequence
  ENSG00000065621_23 (sequence is synthesized)
gcatgacaggggcagtctgccgcaccatctgctccggatgtggagccctgttgccatggcaccctagttaatgctgagtgaggtctgtgaatcaccgttttcctgggatctttgctccaa

SEQ ID NO: 47971 - DNA, 120 bp, Artificial Sequence
  ENSG00000065621_24 (sequence is synthesized)
gaagaggggaatcttctcctgtggcctctcataggacttaggagattgatcagccttttgccggtacaaatcctgcatgctagtgagtgcttgtcataagaccaaagttaccactgatgc

SEQ ID NO: 47972 - DNA, 120 bp, Artificial Sequence
  ENSG00000065621_25 (sequence is synthesized)
aacaggaaatggcatgcctctggctcaccaaaatgaaggtgttctcttttggggctccgcacactaatttagaaagcttgaagaaccaggaattatagaatggagaaaagcactcatggg

SEQ ID NO: 47973 - DNA, 120 bp, Artificial Sequence
  ENSG00000065621_26 (sequence is synthesized)
ggaggtttgcagcctggtggcctatagcccagtttgggatttgagtgcctcttggccaggcatgctccctgctgtttaccagggtcctggtcacctgcacatccttacacttcctccatc

SEQ ID NO: 47974 - DNA, 120 bp, Artificial Sequence
  ENSG00000065621_27 (sequence is synthesized)
atgaagaactttaaaaatatgcttcttaattaatacatgtggaaagaatacatatgggttaaaaatacaataatgtaaaagaatagaaaatcttccattatcttgtgtcctagagataac

SEQ ID NO: 47975 - DNA, 120 bp, Artificial Sequence
  ENSG00000065621_28 (sequence is synthesized)
ttccattatcttgtgtcctagagataaccacttttagtaattggtgtctacctttttttccccttttcttttaaataatagagatggggtttcgctatgttgaccaggctggtcttgaac

SEQ ID NO: 47976 - DNA, 120 bp, Artificial Sequence
  ENSG00000065621_29 (sequence is synthesized)
ggcatcccaaagtgctgggattataggtctgagtcatcatgcctggtgggtgtctatcttataaaaagcactaaacttaaagatttaaaggtgagagcctgtattaggccattctcatgg

SEQ ID NO: 47977 - DNA, 120 bp, Artificial Sequence
  ENSG00000065621_30 (sequence is synthesized)
acatgtccttctgcacaaggtggcagaagagagaagtacagagccaaagagggaaaaactccttataaaaccattagatctcatgagaactcactcactgtcatgagaaaagcataggga

SEQ ID NO: 47978 - DNA, 120 bp, Artificial Sequence
  ENSG00000065621_31 (sequence is synthesized)
aaacactcccacaatcgaatcacctcccttgaggtccctcccccaacatgtggggattataattcagattaaaattgaagatgagattttaggtggagcacagccaaaccatatcagagc

SEQ ID NO: 47979 - DNA, 120 bp, Artificial Sequence
  ENSG00000065621_32 (sequence is synthesized)
cattctctatcttttgcagattggaaaaataaaaaaattagtttaaaccacagcatttaaaagaaatggtcatagatgatgttaacatcagaatggaggttgtgtggagttcccctcctt

SEQ ID NO: 47980 - DNA, 120 bp, Artificial Sequence
  ENSG00000065621_33 (sequence is synthesized)
ggaggttctgagctacagcctagcctggactcagtccagttacaatctaacatggctagggggaggagggagcatgatggggcagggcttgtgtggctgggacagctggctatggtcgtg

SEQ ID NO: 47981 - DNA, 120 bp, Artificial Sequence
  ENSG00000065621_34 (sequence is synthesized)
gtgctggtgactaaatggtacttgaaatttcttttagatctaaaattctgtgatatggtttggatctgagaccccaccaaatttcgtgttgaaatgtaatccccaatgctggtgggaggt

SEQ ID NO: 47982 - DNA, 120 bp, Artificial Sequence
  ENSG00000065621_35 (sequence is synthesized)
atttcgtgttgaaatgtaatccccaatgctggtgggaggtgattggatcatgggggtagatttctcatgaatggtttagcaccattctcttggtgctgttctcatgatagtgagtgagtt

SEQ ID NO: 47983 - DNA, 120 bp, Artificial Sequence
  ENSG00000065621_36 (sequence is synthesized)
tgacccctcttgcgccagctcccaccatgggagatgcctcgctccccctttgctttttgccatgagaggaagcttcctgagggctctccagaagcagaatctactacacttctcatacag

SEQ ID NO: 47984 - DNA, 75 bp, Artificial Sequence
  ENSG00000065621_37 (sequence is synthesized)
cgttccataggtaaacatgcgtcatggggtttgttatgcagattatttcatcacctagatattaagtctagtatc

SEQ ID NO: 47985 - DNA, 79 bp, Artificial Sequence
  ENSG00000065621_38 (sequence is synthesized)
caccctctgataggcctcagtgtgtattgttaccctccacatgtccatgtgttctcatgatttagctcccacttataag

SEQ ID NO: 47986 - DNA, 120 bp, Artificial Sequence
  ENSG00000065621_39 (sequence is synthesized)
cccacttataagtgagaacatgcagtttttgtaaacctgttttctttagggaaagtttagaattttctagagactggttgtatggttgtgaccaaaatgccagtagtgatatggacagtg

SEQ ID NO: 47987 - DNA, 120 bp, Artificial Sequence
  ENSG00000065621_40 (sequence is synthesized)
caaaatgccagtagtgatatggacagtgaaggccaggctgaggaggtgatggaaatgaggaacttactgggaactggagcaaaggtcacttttgttatgctttagcaaagaacttggctg

SEQ ID NO: 47988 - DNA, 120 bp, Artificial Sequence
  ENSG00000065621_41 (sequence is synthesized)
aaaggtcacttttgttatgctttagcaaagaacttggctgcattgtgctcctggcctagggacctgtggaagtttgaacttgagagtgatgattttagggtatctggcagaaaaaatttc

SEQ ID NO: 47989 - DNA, 120 bp, Artificial Sequence
  ENSG00000065621_42 (sequence is synthesized)
acaacctatgctcatatttgtgagcaaagaaattatgttaagttggaacttatatttacaggggaagcagagcgtaaaagtttggagaatttgcagccagctatgtggtagaaaagaaga

SEQ ID NO: 47990 - DNA, 120 bp, Artificial Sequence
  ENSG00000065621_43 (sequence is synthesized)
gcccgttttcagggaaggaattcaagcaggctgcagaaatttgcataagtaaaaaggagccaagtgctaatggccaagaaaatggggaaaaggccttgaaggcatttcagagacctttgt

SEQ ID NO: 47991 - DNA, 120 bp, Artificial Sequence
  ENSG00000065621_44 (sequence is synthesized)
ggcagcccctcccatcacagactcagaggcctaggaggacagaatgactctgagtattaaagtagatttaatctaaatcataaagtacaagctagagcaatccctccagtgctgcagaaa

SEQ ID NO: 47992 - DNA, 120 bp, Artificial Sequence
  ENSG00000065621_45 (sequence is synthesized)
ctgcctgcatgtggctcccacattgtttcttggagctttggtggtggtaggggtggcaggggcaggtgttatgtttcttggtttctcaccttcaggtctccttacccatgtttcctttgt

SEQ ID NO: 47993 - DNA, 120 bp, Artificial Sequence
  ENSG00000065621_46 (sequence is synthesized)
cagagtcattggccttgatggaggggagactgggttactctgagttgagaagcaagcttgactgccctgtggtttatatcagcctagcttagtttgttttctgaagtcttcacaaataac

SEQ ID NO: 47994 - DNA, 120 bp, Artificial Sequence
  ENSG00000065621_47 (sequence is synthesized)
caaatatccagcccagtgcagttctcaatgagtagtctccagttcccatcccccaccacacacacacaccaaacactgtgcccacctgggagacccattttcatttatcttcttctttga

SEQ ID NO: 47995 - DNA, 120 bp, Artificial Sequence
  ENSG00000065621_48 (sequence is synthesized)
gtgcctggaaggctgaacatttgatcttttcaaacatttttctctcatctggcctgttagcgctcttgagcctttgaaaatgccatttcctctacatactattcttcctcagagcagccc

SEQ ID NO: 47996 - DNA, 120 bp, Artificial Sequence
  ENSG00000065621_49 (sequence is synthesized)
tctgtttttttttccaaccagtcttttctcttgcaaagttcagatcaaaattcttctttatgtaaagagaagtggcgtgccataggggttacaaacagggcttcaaggttagcactggga

SEQ ID NO: 47997 - DNA, 120 bp, Artificial Sequence
  ENSG00000065621_50 (sequence is synthesized)
tcaaattccgactttgcaacttaactttcttgagtaagttgctacacctctattagcctcagtttcttatctgtaaaatgggacggctaagtacctatttcattgggctgttgaataatg

SEQ ID NO: 47998 - DNA, 120 bp, Artificial Sequence
  ENSG00000065621_51 (sequence is synthesized)
atggtctcatctatgcaagggcttagtaccagctgggtgaaactcagtgaatggcaggcaaccctattatgactaggcttctgccaatgatcagacttgaaccctgtgctcatcccccca

SEQ ID NO: 47999 - DNA, 120 bp, Artificial Sequence
  ENSG00000065621_52 (sequence is synthesized)
tcactttgtggaactagatgtcctacgttgcacatggcttgattcatggtttggagttgttttctggttgtttcctgtgtgcaggtttaatctcaacctgtgatcccttgaaagctgcaa

SEQ ID NO: 48000 - DNA, 120 bp, Artificial Sequence
  ENSG00000065621_53 (sequence is synthesized)
ttttatccctccccgtcctcctccctctcaccccaaggccaagtttaatactgtgcattctgaaatcttgcaatgttgatgatgtaaaataaatcttctctcctgtgtttctgaagaata

SEQ ID NO: 48001 - DNA, 120 bp, Artificial Sequence
  ENSG00000065621_54 (sequence is synthesized)
aggaagaaaagaaagtttatacctggttaattcgtcactgaaaacaattttctaacacctctgttctgtaaagcagaagagctgtgtagatgttccagagtcgcttggtgtaaatttggt

SEQ ID NO: 48002 - DNA, 120 bp, Artificial Sequence
  ENSG00000065621_55 (sequence is synthesized)
ttagtgccatcctgttagcttccttgaacaaggtaatgccacctaacatgttttttcagacttccaggacaatgatcagggggacttctctatgccacactgggaggtgtgaaggtgtag

SEQ ID NO: 48003 - DNA, 120 bp, Artificial Sequence
  ENSG00000065621_56 (sequence is synthesized)
gctttagggcaacccctctgagaaggggtggcaggtggaggagcccattgatcctttctatcagggatggatttgctttctgtgggtgtcaccttcaggggcctgtgttcccactcatca

SEQ ID NO: 48004 - DNA, 120 bp, Artificial Sequence
  ENSG00000065621_57 (sequence is synthesized)
caggagctcatatttactcagtggggccagagtgttcttcatacatggtgattttactcctcaccataacctccgtggtgcgtgctaacatgaccaccattttgcagatgagaacatgga

SEQ ID NO: 48005 - DNA, 120 bp, Artificial Sequence
  ENSG00000065621_58 (sequence is synthesized)
ggcttgcaggggaggtaagttgccccaggttccatgctgaatcagaggtcaagctcagcacacagcacaggaccaagtctgctggttcccaagctcacatccttacctacaactctgaat

SEQ ID NO: 48006 - DNA, 120 bp, Artificial Sequence
  ENSG00000065621_59 (sequence is synthesized)
caccccacagcagagtcaacaagctggcctggcatgtgaagaagcaagcctgggtgtctcctggctgccagtgccatccctgccccgggaccctaatccacagtttgattctggtccttt

SEQ ID NO: 48007 - DNA, 120 bp, Artificial Sequence
  ENSG00000065621_60 (sequence is synthesized)
tgccctctgtccctcaccagaaccctgatatttccagatgaaaacacgagtatagcttatttccacaactcacctgggcccagcaatcaagatctatagctatagggaagtattgagttg

SEQ ID NO: 48008 - DNA, 120 bp, Artificial Sequence
  ENSG00000065621_61 (sequence is synthesized)
attatgagttatataggtcaaaatgagtagcttgcttgattgaagcaggtaattcgtgccatacttttctctttgggaagacctgtaccaacaataacctctgctaaacactttcgcttt

SEQ ID NO: 48009 - DNA, 120 bp, Artificial Sequence
  ENSG00000065621_62 (sequence is synthesized)
tttaaatttgcaggtacttttttggggctgtctttggctgcctgtctgttgagagtttgttttctttacagtccatctgatttacagtccctccgggttgatttgtctcatttgggaatg

SEQ ID NO: 48010 - DNA, 120 bp, Artificial Sequence
  ENSG00000065621_63 (sequence is synthesized)
agaaattttattttaatgcattaagtaatagtgttgagtggccaacaaatgtgaagtttgaaaagctcaaatgaaaaaaaaagtgtgatagaaacacagagttgggggccgggtgcagtg

SEQ ID NO: 48011 - DNA, 88 bp, Artificial Sequence
  ENSG00000065621_64 (sequence is synthesized)
cctgggcaacatggcaagaccccaagaccccatctctacaaaaaaaatgtaaaaatcagccaggggtaatcccagctacttgggaggc

SEQ ID NO: 48012 - DNA, 120 bp, Artificial Sequence
  ENSG00000065621_65 (sequence is synthesized)
aacacaggttggaatttgagggggcctgttaaataggatgctctttcctgccttagttttgaattaattgagaagataaaataataaggcatggagattagagcatcccctttctttttt

SEQ ID NO: 48013 - DNA, 69 bp, Artificial Sequence
  ENSG00000065621_66 (sequence is synthesized)
cttttttctttttttcttttttactttttgctcttcttggcgggttcaagcaattctcttgcctcagct

SEQ ID NO: 48014 - DNA, 120 bp, Artificial Sequence
  ENSG00000065621_67 (sequence is synthesized)
agtgctgggaatacaggcatgagccaccaggcccggcagcatcccctttcttattgataaagcagatcttggagaatgggagatcctgagcggggttcctaatgctagccttcaacatca

SEQ ID NO: 48015 - DNA, 120 bp, Artificial Sequence
  ENSG00000065621_68 (sequence is synthesized)
agcggggttcctaatgctagccttcaacatcaggctgaggctcaccttgtcttcaagtaatgggcagtgctggcctgaaggggagcctcctctgtccagggctcagcttatccttggaag

SEQ ID NO: 48016 - DNA, 120 bp, Artificial Sequence
  ENSG00000065621_69 (sequence is synthesized)
gcttagcacattgaggagctgctccaggctaagagggagggactggggtactctgtagaggttgttcttccagtttcttcaatcagatgagccacactgtcactctagtgttgaaaggag

SEQ ID NO: 48017 - DNA, 120 bp, Artificial Sequence
  ENSG00000065621_70 (sequence is synthesized)
ggaagggacagaggtggccaggagtgtgaccctaaaagaggcagaggagacctcagagaaagagaagaagcattctcctaaccagagggagaaggagagaggcctcagttctccctctct

SEQ ID NO: 48018 - DNA, 120 bp, Artificial Sequence
  ENSG00000065621_71 (sequence is synthesized)
gggaattaatttgagatttacatttagtgtctataaacatgtcagcagatatataaacttatttgcttttgctttgtttccatttttagattcttgagtatcagaacaccaccttctttg

SEQ ID NO: 48019 - DNA, 120 bp, Artificial Sequence
  ENSG00000065621_72 (sequence is synthesized)
aattttctgaatggaattaccagatcaaagggtataatgagcacattggaggcttggactgtatttcactaaattgcttcccaaaagacttgtgttgtttgcccctcaccagcacaagta

SEQ ID NO: 48020 - DNA, 120 bp, Artificial Sequence
  ENSG00000065621_73 (sequence is synthesized)
cagcagcccccactgggagccaccacactgtttcgagattgggggcttgggatttcttggcaatggtgtagaggatggtgaagatttcttcatcctccggttgaacgttcttggggagcc

SEQ ID NO: 48021 - DNA, 120 bp, Artificial Sequence
  ENSG00000065621_74 (sequence is synthesized)
gcggccgacgcgcctcgcactgatggccaccagggggagccccgcgcgcttcctccttccccttgtgttccagggcgcacttcaaaacgctgacgttctccttcgtccctctgggggcgc

SEQ ID NO: 48022 - DNA, 120 bp, Artificial Sequence
  ENSG00000065621_75 (sequence is synthesized)
accacctctgctgccgcgcgcctaccggagccgcttggccctagtgctttccagcggatttcccctcaggtgcggagccgggtgccggggtcccacagccaaccactaccggttcctctt

SEQ ID NO: 48023 - DNA, 120 bp, Artificial Sequence
  ENSG00000065621_76 (sequence is synthesized)
tcgtcagccaccggcgccggcaggacccgcgaatcccgatctccaggagcctgtaaggaggccgcccattggctcagccgcactgctgggcaggtacttccaaagctttgaggattggct

SEQ ID NO: 48024 - DNA, 120 bp, Artificial Sequence
  ENSG00000065665_0 (sequence is synthesized)
gcggggccggtaggatcgcgtcgggagccggtaccgaggcccgagccgcgggagtcgagcgaaggcagcgccgaggccgcggtttccccctgggcctccccagcagcagccatgggcatc

SEQ ID NO: 48025 - DNA, 120 bp, Artificial Sequence
  ENSG00000065665_1 (sequence is synthesized)
aaatttttagaagttatcaaaccattctgtgcagttctaccagaaattcagaaaccggaaaggaaaatccagtttagagagaaggttctgtggactgctataacgctcttcattttctta

SEQ ID NO: 48026 - DNA, 120 bp, Artificial Sequence
  ENSG00000065665_2 (sequence is synthesized)
gtgtgttgtcagatcccactgtttggaatcatgtcatcagattctgcagatcctttctactggatgagagttattctggcttccaatagaggaactttaatggaattgggtatctcccca

SEQ ID NO: 48027 - DNA, 120 bp, Artificial Sequence
  ENSG00000065665_3 (sequence is synthesized)
attgtaacatctggtttgattatgcagttgttagctggagccaaaatcattgaagttggagatacaccgaaagatagagctttattcaatggagcccagaaactgtttggtatgatcatt

SEQ ID NO: 48028 - DNA, 120 bp, Artificial Sequence
  ENSG00000065665_4 (sequence is synthesized)
accattgggcaagccattgtgtatgtcatgacggggatgtatggggaccctgcagaaatgggtgccggaatctgtctcctgatcatcattcagttgtttgttgctggtttgattgtgctg

SEQ ID NO: 48029 - DNA, 120 bp, Artificial Sequence
  ENSG00000065665_5 (sequence is synthesized)
ctgttagatgagctgctacagaagggttacggcttggggtctgggatttccctctttattgccaccaacatctgtgagaccattgtctggaaggcctttagtcccactaccattaacact

SEQ ID NO: 48030 - DNA, 120 bp, Artificial Sequence
  ENSG00000065665_6 (sequence is synthesized)
ggcagaggtactgagtttgagggtgcagtcatagctctgttccatttgttggccaccaggacggacaaagtccgagctttacgggaggctttttatcggcagaacttacccaatctcatg

SEQ ID NO: 48031 - DNA, 120 bp, Artificial Sequence
  ENSG00000065665_7 (sequence is synthesized)
aacctcattgctacagtttttgtgtttgctgttgttatatatttccaaggatttcgcgttgatctgcccattaagtcggcccgttaccgaggacagtacagcagctaccccatcaaactc

SEQ ID NO: 48032 - DNA, 120 bp, Artificial Sequence
  ENSG00000065665_8 (sequence is synthesized)
ttctacacctccaacatccccatcatcctccagtcggccctggtgtccaacctgtatgttatttcccagatgctgtctgttcgatttagtggcaactttttagtaaatttactaggacag

SEQ ID NO: 48033 - DNA, 120 bp, Artificial Sequence
  ENSG00000065665_9 (sequence is synthesized)
tgggccgatgtcagtgggggaggacccgcacgttcttacccagttggaggcctttgttactatctttctcctcctgagtccatgggcgccatctttgaggatcctgtccatgtcgttgtt

SEQ ID NO: 48034 - DNA, 120 bp, Artificial Sequence
  ENSG00000065665_10 (sequence is synthesized)
agaacagcagatggtaatgaggggccaccgagatacctctatggttcatgagcttaataggtacatccccaccgcagctgcgtttggcggtttgtgcattggcgccctgtcagtgctggc

SEQ ID NO: 48035 - DNA, 120 bp, Artificial Sequence
  ENSG00000065665_11 (sequence is synthesized)
tgacttcctgggggccattggatctggcactggaattctgctagcagtcactattatttaccagtattttgaaatatttgttaaagaacaggccgaagttggtgggatgggtgctttgtt

SEQ ID NO: 48036 - DNA, 120 bp, Artificial Sequence
  ENSG00000065665_12 (sequence is synthesized)
tttctaaatgttcaaatatttcattttgtgcgtgtgaaagggaaaacactttgacggatcgtttttgtcagatgacactggtggctccccttttctcccctcacagtttcttgtttcgag

SEQ ID NO: 48037 - DNA, 120 bp, Artificial Sequence
  ENSG00000065665_13 (sequence is synthesized)
tgctgactgacccgtttctgaaatgggcaccgagctaagtctgtgtgcagcattagtacccgctgccttaaaactcaagtttacattattcattaaaaaaagtacatctagtgttgcctg

SEQ ID NO: 48038 - DNA, 120 bp, Artificial Sequence
  ENSG00000065665_14 (sequence is synthesized)
taatgctggaaaccagtgtatctaccttgctgtgttaaatcatgacagtgagacggtgagatggattcgttttgcacacaacattcaaaacacttcatattgcccccacttgttgaaaaa

SEQ ID NO: 48039 - DNA, 120 bp, Artificial Sequence
  ENSG00000065665_15 (sequence is synthesized)
taaatgtagttcaaattgccactttccagtatttttgagcttatttaatgagttctggaacatttatatctaatctatattttagataattactttttatacttttttaactcatggtat

SEQ ID NO: 48040 - DNA, 120 bp, Artificial Sequence
  ENSG00000065665_16 (sequence is synthesized)
ccccactccccacccccacctcatttttatttgtcccttctcaaagcagccacttagcccacatgggcgaaatcaagtctccagttatttctgccacaactgcttctaaggcctcctcct

SEQ ID NO: 48041 - DNA, 120 bp, Artificial Sequence
  ENSG00000065665_17 (sequence is synthesized)
tctcctcctcctcttcctcttcctccttttccttctcctcctcctctcttcccagtgacagcatcatcgtgctgtttgcctgtattggctatgccttctaactccaaccagtcacttgag

SEQ ID NO: 48042 - DNA, 120 bp, Artificial Sequence
  ENSG00000065665_18 (sequence is synthesized)
aatattctttcaagattctgggccccgattcttttctgtttaaatccctaaagcaaagatctaattctcaagcaatgtctgtagttcagtgggggtgaacaatgaatatattcatgctag

SEQ ID NO: 48043 - DNA, 120 bp, Artificial Sequence
  ENSG00000065665_19 (sequence is synthesized)
gaatttgtgtctgttgttgtactcacagcagcaacatgagtgtaaacagtagacaataaacttttatttaagaaaactgattcagttgtgttggaaaaaataaagaaatctgatattaaa

SEQ ID NO: 48044 - DNA, 120 bp, Artificial Sequence
  ENSG00000065665_20 (sequence is synthesized)
tatggttcatgagcttaatagaccaaaagtgaagttaagaaggtggaagggagaaggaagacattttacaaaaaggatactcttctactaaaagataaccccgcacggcatttcacactt

SEQ ID NO: 48045 - DNA, 120 bp, Artificial Sequence
  ENSG00000065665_21 (sequence is synthesized)
gcctacgtcaccctgctttccacgcacctcctcagagggaggggctgttattgttcctgttttatgaaaaaagccgagagaggctacagaacctgtttgatgtgatagctaattatggtc

SEQ ID NO: 48046 - DNA, 120 bp, Artificial Sequence
  ENSG00000065665_22 (sequence is synthesized)
cgcggagcctcaaaccgagtcgggcctgtgactccgagctgcgctgcctcgtattgattgtcatgcctttctccaaatacgcaccagataaactattgtatctattcagtatgattgttc

SEQ ID NO: 48047 - DNA, 120 bp, Artificial Sequence
  ENSG00000065665_23 (sequence is synthesized)
taactctggctttgagctgtcgaggtggcttctaccttaggtctagtttttggaaaggtgaagcaggagtggaagctctctaagggatacgaaatctgattttatccaaagaaatcacag

SEQ ID NO: 48048 - DNA, 120 bp, Artificial Sequence
  ENSG00000065665_24 (sequence is synthesized)
cagcctttgaaagacacattcagattttcaaacaaacaacagacaattcaaaaccaggcgctctgcttattcactgaaaccgtaagctgctgaaactcagggaaaagcttaagaaactgg

SEQ ID NO: 48049 - DNA, 120 bp, Artificial Sequence
  ENSG00000065665_25 (sequence is synthesized)
tcttaaagcttcaggccaaacaatgcttcaaatcacatttgaagtaatcacttaaaaacagtagaaaaatcagttatcaattacctaaaacacttatacccaataaaatattcccatgat

SEQ ID NO: 48050 - DNA, 120 bp, Artificial Sequence
  ENSG00000065665_26 (sequence is synthesized)
gagcgtaggaatagaccctggcgtccactgtgagatgttcttcagctaccagagctgtggaaagcaaagaaaacaacttagatcatgccgttaaggaaggacaaaacatcttattcaatc

SEQ ID NO: 48051 - DNA, 120 bp, Artificial Sequence
  ENSG00000065665_27 (sequence is synthesized)
gaatctgtctcctgatcatcattcaggatcaacacagcccttagacttatcctttgatggcagtgtacatttccatcttgctattataccagaattcatctgactttttacttccttgga

SEQ ID NO: 48052 - DNA, 120 bp, Artificial Sequence
  ENSG00000065665_28 (sequence is synthesized)
cataatttttagtggccatgtaatattccattgtggatatcatcttcagtcttacattgagaagagtgaccttggctgtctttagtatatagagctttgcaaaatcattctacgaccagg

SEQ ID NO: 48053 - DNA, 120 bp, Artificial Sequence
  ENSG00000065665_29 (sequence is synthesized)
atttttaatggaatgaggtcgacattggagcatttgctgtattttcagattcacttacctatatagcagagtttagtacttatctggaagaactggtaagtgttgcagaagtaagattgc

SEQ ID NO: 48054 - DNA, 120 bp, Artificial Sequence
  ENSG00000065675_0 (sequence is synthesized)
agtccccgcgcagtccccgcgcagtcccagcgccaccgggcagcagcggcgccgtgctcgctccagggcgcaaccatgtcgccatttcttcggattggcttgtccaactttgactgcggg

SEQ ID NO: 48055 - DNA, 120 bp, Artificial Sequence
  ENSG00000065675_1 (sequence is synthesized)
tcctgccagtcttgtcagggcgaggctgttaacccttactgtgctgtgctcgtcaaagagtatgtcgaatcagagaacgggcagatgtatatccagaaaaagcctaccatgtacccaccc

SEQ ID NO: 48056 - DNA, 120 bp, Artificial Sequence
  ENSG00000065675_2 (sequence is synthesized)
tgggacagcacttttgatgcccatatcaacaagggaagagtcatgcagatcattgtgaaaggcaaaaacgtggacctcatctctgaaaccaccgtggagctctactcgctggctgagagg

SEQ ID NO: 48057 - DNA, 120 bp, Artificial Sequence
  ENSG00000065675_3 (sequence is synthesized)
tgcaggaagaacaacgggaagacagaaatatggttagagctgaaacctcaaggccgaatgctaatgaatgcaagatactttctggaaatgagtgacacaaaggacatgaatgaatttgag

SEQ ID NO: 48058 - DNA, 120 bp, Artificial Sequence
  ENSG00000065675_4 (sequence is synthesized)
acggaaggcttctttgctttgcatcagcgccggggtgccatcaagcaggcaaaggtccaccacgtcaagtgccacgagttcactgccaccttcttcccacagcccacattttgctctgtc

SEQ ID NO: 48059 - DNA, 120 bp, Artificial Sequence
  ENSG00000065675_5 (sequence is synthesized)
tgccacgagtttgtctggggcctgaacaaacagggctaccagtgccgacaatgcaatgcagcaattcacaagaagtgtattgataaagttatagcaaagtgcacaggatcagctatcaat

SEQ ID NO: 48060 - DNA, 120 bp, Artificial Sequence
  ENSG00000065675_6 (sequence is synthesized)
agccgagaaaccatgttccacaaggagagattcaaaattgacatgccacacagatttaaagtctacaattacaagagcccgaccttctgtgaacactgtgggaccctgctgtggggactg

SEQ ID NO: 48061 - DNA, 120 bp, Artificial Sequence
  ENSG00000065675_7 (sequence is synthesized)
gcacggcaaggactcaagtgtgatgcatgtggcatgaatgtgcatcatagatgccagacaaaggtggccaacctttgtggcataaaccagaagctaatggctgaagcgctggccatgatt

SEQ ID NO: 48062 - DNA, 120 bp, Artificial Sequence
  ENSG00000065675_8 (sequence is synthesized)
gagagcactcaacaggctcgctgcttaagagatactgaacagatcttcagagaaggtccggttgaaattggtctcccatgctccatcaaaaatgaagcaaggccgccatgtttaccgaca

SEQ ID NO: 48063 - DNA, 120 bp, Artificial Sequence
  ENSG00000065675_9 (sequence is synthesized)
ccgggaaaaagagagcctcagggcatttcctgggagtctccgttggatgaggtggataaaatgtgccatcttccagaacctgaactgaacaaagaaagaccatctctgcagattaaacta

SEQ ID NO: 48064 - DNA, 120 bp, Artificial Sequence
  ENSG00000065675_10 (sequence is synthesized)
aaaattgaggattttatcttgcacaaaatgttggggaaaggaagttttggcaaggtcttcctggcagaattcaagaaaaccaatcaatttttcgcaataaaggccttaaagaaagatgtg

SEQ ID NO: 48065 - DNA, 120 bp, Artificial Sequence
  ENSG00000065675_11 (sequence is synthesized)
gtcttgatggacgatgatgttgagtgcacgatggtagagaagagagttctttccttggcctgggagcatccgtttctgacgcacatgttttgtacattccagaccaaggaaaacctcttt

SEQ ID NO: 48066 - DNA, 120 bp, Artificial Sequence
  ENSG00000065675_12 (sequence is synthesized)
tttgtgatggagtacctcaacggaggggacttaatgtaccacatccaaagctgccacaagttcgacctttccagagcgacgttttatgctgctgaaatcattcttggtctgcagttcctt

SEQ ID NO: 48067 - DNA, 120 bp, Artificial Sequence
  ENSG00000065675_13 (sequence is synthesized)
gtctacagggacctgaagctagataacatcctgttagacaaagatggacatatcaagatcgcggattttggaatgtgcaaggagaacatgttaggagatgccaagacgaataccttctgt

SEQ ID NO: 48068 - DNA, 120 bp, Artificial Sequence
  ENSG00000065675_14 (sequence is synthesized)
gggacacctgactacatcgccccagagatcttgctgggtcagaaatacaaccactctgtggactggtggtccttcggggttctcctttatgaaatgctgattggtcagtcgcctttccac

SEQ ID NO: 48069 - DNA, 120 bp, Artificial Sequence
  ENSG00000065675_15 (sequence is synthesized)
gggcaggatgaggaggagctcttccactccatccgcatggacaatcccttttacccacggtggctggagaaggaagcaaaggaccttctggtgaagctcttcgtgcgagaacctgagaag

SEQ ID NO: 48070 - DNA, 120 bp, Artificial Sequence
  ENSG00000065675_16 (sequence is synthesized)
aggctgggcgtgaggggagacatccgccagcaccctttgtttcgggagatcaactgggaggaacttgaacggaaggagattgacccaccgttccggccgaaagtgaaatcaccatttgac

SEQ ID NO: 48071 - DNA, 120 bp, Artificial Sequence
  ENSG00000065675_17 (sequence is synthesized)
tgcagcaatttcgacaaagaattcttaaacgagaagccccggctgtcatttgccgacagagcactgatcaacagcatggaccagaatatgttcaggaacttttccttcatgaaccccggg

SEQ ID NO: 48072 - DNA, 120 bp, Artificial Sequence
  ENSG00000065675_18 (sequence is synthesized)
atggagcggctgatatcctgaatcttgcccctccagagacaggaaagaatttgccttctccctgggaactggttcaagagacactgcttgggttcctttttcaacttggaaaaagaaaga

SEQ ID NO: 48073 - DNA, 120 bp, Artificial Sequence
  ENSG00000065675_19 (sequence is synthesized)
aacactcaacaataaagactgagacccgttcgcccccatgtgacttttatctgtagcagaaaccaagtctacttcactaatgacgatgccgtgtgtctcgtctcctgacatgtctcacag

SEQ ID NO: 48074 - DNA, 120 bp, Artificial Sequence
  ENSG00000065675_20 (sequence is synthesized)
acgctcctgaagttaggtcattactaaccatagttatttacttgaaagatgggtctccgcacttggaaaggtttcaagacttgatactgcaataaattatggctcttcacctgggcgcca

SEQ ID NO: 48075 - DNA, 120 bp, Artificial Sequence
  ENSG00000065675_21 (sequence is synthesized)
actgctgatcaatgaaatgcttgttgaatcaggggcaaacggagtacagacgtctcaagactgaaacggccccattgcctggtctagtagcggatctcactcagccgcagacaagtaatc

SEQ ID NO: 48076 - DNA, 120 bp, Artificial Sequence
  ENSG00000065675_22 (sequence is synthesized)
actaacccgttttattctattcctatctgtggatgtgtaaatggctggggggccagccctggataggtttttatgggaattctttacaataaacatagcttgtaacttgagatctacaaa

SEQ ID NO: 48077 - DNA, 120 bp, Artificial Sequence
  ENSG00000065675_23 (sequence is synthesized)
tccattcatcctgattgggcatgaaatccatggtcaagaggacaagtggaaagtgagagggaaggtttgctagacaccttcgcttgttatcttgtcaagatagaaaagatagtatcattt

SEQ ID NO: 48078 - DNA, 120 bp, Artificial Sequence
  ENSG00000065675_24 (sequence is synthesized)
cacccttgccagtaaaaacctttccatccacccattctcagcagactccagtattggcacagtcactcactgccattctcacactataacaagaaaagaaatgaagtgcataagtctcct

SEQ ID NO: 48079 - DNA, 120 bp, Artificial Sequence
  ENSG00000065675_25 (sequence is synthesized)
gggaaaagaaccttaaccccttctcgtgccatgactggtgatttcatgactcataagcccctccgtaggcatcattcaagatcaatggcccatgcatgctgtttgcagcagtcaattgag

SEQ ID NO: 48080 - DNA, 120 bp, Artificial Sequence
  ENSG00000065675_26 (sequence is synthesized)
ttgaattagaattccaaccatacattttaaaggtatttgtgctgtgtgtatattttgataaaatgttgtgacttcatggcaaacaggtggatgtgtaaaaatggaataaaaaaaaaaaaa

SEQ ID NO: 48081 - DNA, 120 bp, Artificial Sequence
  ENSG00000065717_0 (sequence is synthesized)
ccgcgcaccccaacccggggaggggctcccacgaccccgggcgcgcgcgcttgggggcgcgccagggactccagggtcccttgccccgcgccgcttctccctcctccctctttcttcggg

SEQ ID NO: 48082 - DNA, 120 bp, Artificial Sequence
  ENSG00000065717_1 (sequence is synthesized)
ttgccccgcgccgcttctccctcctccctctttcttcgggcagcctccccaccaccccacttcagcctcccccactcttgccgcctccatatcatcaagctctggtggcgcctggggggc

SEQ ID NO: 48083 - DNA, 120 bp, Artificial Sequence
  ENSG00000065717_2 (sequence is synthesized)
ttttcggatcggcaggatgtacccccagggaaggcacccgaccccgctccagtccggccagcccttcaagttctcgatcttggagatctgcgaccgcatcaaagaagaattccagtttct

SEQ ID NO: 48084 - DNA, 120 bp, Artificial Sequence
  ENSG00000065717_3 (sequence is synthesized)
tcaggctcaataccacagcctcaagctagaatgtgagaagctggccagcgagaagacggaaatgcagcgacattatgtcatgtattatgagatgtcgtacgggctcaacattgaaatgca

SEQ ID NO: 48085 - DNA, 120 bp, Artificial Sequence
  ENSG00000065717_4 (sequence is synthesized)
taagcaggcggagattgtgaagcgtctgagcggtatctgcgctcagattatccccttcctgacccaggagcatcagcagcaggtgctccaggccgtagaacgcgccaagcaggtcaccgt

SEQ ID NO: 48086 - DNA, 120 bp, Artificial Sequence
  ENSG00000065717_5 (sequence is synthesized)
gggggagctgaacagcctcatcgggcagcagctccagccgctgtcccaccacgcaccccctgtgcccctcaccccccgcccagccgggctggtgggcggcagtgctacggggctgcttgc

SEQ ID NO: 48087 - DNA, 120 bp, Artificial Sequence
  ENSG00000065717_6 (sequence is synthesized)
tctgtctggagccctggctgcccaggctcagctggcggcggctgtcaaggaggaccgtgcgggcgtggaggccgaggggtccagagtggagagagccccgagcaggagtgcatctccctc

SEQ ID NO: 48088 - DNA, 120 bp, Artificial Sequence
  ENSG00000065717_7 (sequence is synthesized)
gccccctgagagtctcgtggaggaggagcgaccgagtggccctggtggtggcgggaagcagagagcagatgagaaggagccatcaggaccttatgaaagcgacgaagacaagagtgatta

SEQ ID NO: 48089 - DNA, 120 bp, Artificial Sequence
  ENSG00000065717_8 (sequence is synthesized)
caatctggtggtggacgaggaccaaccctcagagccccccagcccggctaccaccccctgcggaaaggtacccatctgcattcctgcccgtcgggacctggtggacagtccagcctcctt

SEQ ID NO: 48090 - DNA, 120 bp, Artificial Sequence
  ENSG00000065717_9 (sequence is synthesized)
ggcctctagccttggctcaccgctgcctagagccaaggagctcatcctgaatgaccttcccgccagcactcctgcctccaaatcctgtgactcctccccgccccaggacgcttccacccc

SEQ ID NO: 48091 - DNA, 120 bp, Artificial Sequence
  ENSG00000065717_10 (sequence is synthesized)
tccacggacagcgtcgccctgaggagccccctgactctgtccagtcccttcaccacgtccttcagcctgggctcccacagcactctcaacggagacctctccgtgcccagctcctacgtc

SEQ ID NO: 48092 - DNA, 120 bp, Artificial Sequence
  ENSG00000065717_11 (sequence is synthesized)
agcctccacctgtccccccaggtcagcagctctgtggtgtacggacgctcccccgtgatggcatttgagtctcatccccatctccgagggtcatccgtctcttcctccctacccagcatc

SEQ ID NO: 48093 - DNA, 120 bp, Artificial Sequence
  ENSG00000065717_12 (sequence is synthesized)
cctgggggaaagccggcctactccttccacgtgtctgcggacgggcagatgcagccggttcccttcccctcggatgcactggtaggcgcgggcatcccgcggcacgcccggcagctgcac

SEQ ID NO: 48094 - DNA, 120 bp, Artificial Sequence
  ENSG00000065717_13 (sequence is synthesized)
acgctggcccatggcgaggtggtctgcgcggtcaccatcagcggctccacacagcatgtgtacacgggcggcaagggctgtgtgaaggtgtgggacgtgggccagcctggggccaagacg

SEQ ID NO: 48095 - DNA, 120 bp, Artificial Sequence
  ENSG00000065717_14 (sequence is synthesized)
cccgtggcccagctcgactgcctgaaccgagacaactacattcgttcctgcaagttgctgccggatggccggagtctgatcgtgggcggtgaggccagcaccttgtccatttgggacctg

SEQ ID NO: 48096 - DNA, 120 bp, Artificial Sequence
  ENSG00000065717_15 (sequence is synthesized)
gcggcgcccaccccccgtatcaaggccgagctgacttcctcagccccagcctgctacgccctggccgtcagccccgacgccaaggtttgcttctcctgctgcagcgatggcaacattgtg

SEQ ID NO: 48097 - DNA, 120 bp, Artificial Sequence
  ENSG00000065717_16 (sequence is synthesized)
gtctgggacctgcagaatcagactatggtcaggcagttccagggccacacggacggcgccagctgcattgatatttccgattacggcactcggctctggacagggggcctggacaacacg

SEQ ID NO: 48098 - DNA, 120 bp, Artificial Sequence
  ENSG00000065717_17 (sequence is synthesized)
gtgcgctgctgggacctgcgggagggccgccagctgcagcagcatgacttcagctcccagattttctccctgggccactgccctaaccaggactggctggcggtcggaatggagagtagc

SEQ ID NO: 48099 - DNA, 120 bp, Artificial Sequence
  ENSG00000065717_18 (sequence is synthesized)
aacgtggagatcctgcacgtccgcaagccggagaaataccagctgcacctccacgagagctgcgtgctgtccctgaagtttgcctcctgcggacggtggtttgtgagcaccgggaaggac

SEQ ID NO: 48100 - DNA, 120 bp, Artificial Sequence
  ENSG00000065717_19 (sequence is synthesized)
aacctgctcaacgcctggaggacgccgtacggggccagcattttccagtccaaggagtcgtcctcagtcctgagttgtgacatctccagaaataacaaatacatcgtgacaggctcgggg

SEQ ID NO: 48101 - DNA, 120 bp, Artificial Sequence
  ENSG00000065717_20 (sequence is synthesized)
gacaagaaggccaccgtgtatgaggtggtctactgagacatgaccccccttcctgtacccgaagtccagactcccaggggaatcagcagccaggacagacatcctagcagccgcctccca

SEQ ID NO: 48102 - DNA, 120 bp, Artificial Sequence
  ENSG00000065717_21 (sequence is synthesized)
gccctgcctaggaaccgtacatcccatctgctctctggccaacggcttcacaccttcccctgctgcatgtgggggccgatgggcaggggacctcggtggaaataaaatgtatctatcaca

SEQ ID NO: 48103 - DNA, 120 bp, Artificial Sequence
  ENSG00000065717_22 (sequence is synthesized)
gaaaattgtactgagaattagaacttctgcaagggctcaagagtgtcagctagtaataataataataacaatagctgaagtgcaatggtgcaatcacggctcactgcaacctccgcctcc

SEQ ID NO: 48104 - DNA, 120 bp, Artificial Sequence
  ENSG00000065717_23 (sequence is synthesized)
gctggggtggtgtgtgggccttggctccagtggtcctgggaaccccaggggcacatgctgtgcttaggtcccatcccctgtgtctacctcttgggctggggaccgctgggctcctgccgc

SEQ ID NO: 48105 - DNA, 120 bp, Artificial Sequence
  ENSG00000065717_24 (sequence is synthesized)
agatgaaatccttcccttgagtgtggcgtgctgagatctccacctggaggcatccccagctggtagatcagtcctgggaagcggaggagaccaagaaaggggccttgcctgggacagacg

SEQ ID NO: 48106 - DNA, 120 bp, Artificial Sequence
  ENSG00000065717_25 (sequence is synthesized)
aaagaaattattgtcatgaaggtggaggagggagggtgttctgatggcagggagtgtagggggcccctggagtctgcatcagcagcaggtgctccaggccgtagaacgcgccaagcaggt

SEQ ID NO: 48107 - DNA, 120 bp, Artificial Sequence
  ENSG00000065717_26 (sequence is synthesized)
ccccccctgcctaggaaccgtacatcccatctgctctctggccaacggcttcacaccttcccctgctgcatgtgggggccgatgggcaggggacctcggtggaaataaaatgtatctatc

SEQ ID NO: 48108 - DNA, 120 bp, Artificial Sequence
  ENSG00000065717_27 (sequence is synthesized)
aaatccctggcgggtgtgcgtctggcgggtggtgtatctgtgactcgtaggacctcagccctggtcttcccagctccaggccaccctgggcctcgctcagctgagcacgcagcctggtgg

SEQ ID NO: 48109 - DNA, 87 bp, Artificial Sequence
  ENSG00000065717_28 (sequence is synthesized)
caggtgatctgcccacctcagccttccaaagccctgatttgtaactattctacctgcacttagcatcagcagcaggtgctccaggcc

SEQ ID NO: 48110 - DNA, 120 bp, Artificial Sequence
  ENSG00000065802_0 (sequence is synthesized)
gaagccgcgaccccgacgcgccccccattgccctcggcgccggaagtggtcgcgggtcgttctgcttcctgcccgaggggcgtgcgcgggtcaggggcggccgcggaggcggaagcatcc

SEQ ID NO: 48111 - DNA, 120 bp, Artificial Sequence
  ENSG00000065802_1 (sequence is synthesized)
gcggccgcggaggcggaagcatccatggcggagggcggcagcccagacgggcgggcagggccgggctccgcaggtcgtaatctgaaggagtggctgagggagcaattttgtgatcatccg

SEQ ID NO: 48112 - DNA, 120 bp, Artificial Sequence
  ENSG00000065802_2 (sequence is synthesized)
ctggagcactgtgaggacacgaggctccatgatgcagcttacgtcggggacctccagaccctcaggagcctattgcaagaggagagctaccggagccgcatcaacgagaagtctgtctgg

SEQ ID NO: 48113 - DNA, 120 bp, Artificial Sequence
  ENSG00000065802_3 (sequence is synthesized)
tgctgtggctggctcccctgcacaccgttgcgaatcgcggccactgcaggccatgggagctgtgtggacttcctcatccggaagggggccgaggtggatctggtggacgtaaaaggacag

SEQ ID NO: 48114 - DNA, 120 bp, Artificial Sequence
  ENSG00000065802_4 (sequence is synthesized)
acggccctgtatgtggctgtggtgaacgggcacctagagagtacccagatccttctcgaagctggcgcggaccccaacggaagccggcaccatcgcagcacccctgtctaccacgcctct

SEQ ID NO: 48115 - DNA, 120 bp, Artificial Sequence
  ENSG00000065802_5 (sequence is synthesized)
cgcgtgggccgggcagacatcctgaaggccctcatcaggtacggggctgatgttgacgtcaaccaccacctgactcctgatgtccagcctcgattctcccggcggctcacctccttggtg

SEQ ID NO: 48116 - DNA, 120 bp, Artificial Sequence
  ENSG00000065802_6 (sequence is synthesized)
gtctgccccttgtacatcagcgcagcctaccacaacctccagtgcttccggctgctcctcctggctggcgcgaaccctgacttcaactgcaatggtcctgtcaacacacagggattctac

SEQ ID NO: 48117 - DNA, 120 bp, Artificial Sequence
  ENSG00000065802_7 (sequence is synthesized)
aggggctcccctgggtgcgtcatggatgctgttctgcgccacggctgtgaggcagccttcgtgagcctgctggtagaatttggagccaacctgaatctagtgaagtgggaatcgctgggc

SEQ ID NO: 48118 - DNA, 120 bp, Artificial Sequence
  ENSG00000065802_8 (sequence is synthesized)
ccagagtcgagaggaagaagaaaagtggaccctgaggccttgcaggtctttaaagaggccagaagtgttcccagaaccttgctgtgtctgtgccgtgtggctgtgagaagagctcttggc

SEQ ID NO: 48119 - DNA, 120 bp, Artificial Sequence
  ENSG00000065802_9 (sequence is synthesized)
aaacaccggcttcatctgattccttcgctgcctctgccagaccccataaagaagtttctactccatgagtagactccaagtgctgcggttgattccagtgagggagaaagtgatctgcag

SEQ ID NO: 48120 - DNA, 120 bp, Artificial Sequence
  ENSG00000065802_10 (sequence is synthesized)
ggaggtggacaccgagccctgagtgctgtgctgctgctggtctcctgatggctgttgctgcagaagatgtcctcgtagactgtcattgctcctcaggtgcctgggccgctgaacagtcct

SEQ ID NO: 48121 - DNA, 120 bp, Artificial Sequence
  ENSG00000065802_11 (sequence is synthesized)
tgggtcattgtcagctgagaggcttatactaaagttattattgtttttcccaagttctctgttctggattttcagttgcatattaatgtaacgggccatggggtatgtacatgtaggggc

SEQ ID NO: 48122 - DNA, 120 bp, Artificial Sequence
  ENSG00000065802_12 (sequence is synthesized)
tgaggttggaggcctactaatttccctgtagggaagactcccagcacttctggaactgtgcttctctttatttttctacttctcaatttgatggttcgattaaagccttctagtatctca

SEQ ID NO: 48123 - DNA, 120 bp, Artificial Sequence
  ENSG00000065802_13 (sequence is synthesized)
atgaaaagggagtttcgtaagcaaaatagaggacagaaatgcagttcatgaacttgctggttggtttttcctgctcctggggtaacacatgcgcttgtcatacacgccccttccttgccc

SEQ ID NO: 48124 - DNA, 120 bp, Artificial Sequence
  ENSG00000065802_14 (sequence is synthesized)
cttcagtattctctctttgcgatggaggtctcatagtgagtgtcttcactcaagggtggtttcctggctgcacggcacctgttccaacacctactgtgcctctcatcaggtgtcacgatt

SEQ ID NO: 48125 - DNA, 120 bp, Artificial Sequence
  ENSG00000065802_15 (sequence is synthesized)
tttctgccacttcaccttagggagcttccagtgattgattttaggaggcccacaccaaactccccaggaaatgactgccttccttgggaccaaggaccgttccaacagcattcactgcca

SEQ ID NO: 48126 - DNA, 120 bp, Artificial Sequence
  ENSG00000065802_16 (sequence is synthesized)
gttctaataggcgaggaaaatgcccgaggcgctgtcttctgtcccccacacgtaccagaaagtgaaaaatgcagcgagtcctctgggtggttatgagcctccaggcgcatgctgtccagt

SEQ ID NO: 48127 - DNA, 120 bp, Artificial Sequence
  ENSG00000065802_17 (sequence is synthesized)
ggacagaacatctggcggttggttgattgctctcttttgtcttggtcgctgcttctagaatctatgcaggggatagcagtgaggtcagaagtctttcccgggagagagatggcctgggtt

SEQ ID NO: 48128 - DNA, 120 bp, Artificial Sequence
  ENSG00000065802_18 (sequence is synthesized)
atcattgctgatagctttggctgcatgagttgggcttccccttacccagggctgcacagccaggtgtgagggtcaccggcaggtgggctggtggctgcagcctcagagccctcccaggtt

SEQ ID NO: 48129 - DNA, 120 bp, Artificial Sequence
  ENSG00000065802_19 (sequence is synthesized)
gctgctgtttccagtgaatcacatttcgtcatttgaagcccatgaggaccattgtgtggatccatggtgattctagacttcagatatatttaggaaggcgcagatttcaaatctgtgttt

SEQ ID NO: 48130 - DNA, 120 bp, Artificial Sequence
  ENSG00000065802_20 (sequence is synthesized)
gattttctgtaataagagaaatccaatttgtaaaacttgaacaatgataccgttttatttacttagtagcatcactgtgtgtcttagcaggcaggcagtgtctggccattattgcgttct

SEQ ID NO: 48131 - DNA, 120 bp, Artificial Sequence
  ENSG00000065802_21 (sequence is synthesized)
acagccagaggatagaattctatacccccaaccccttgtgtcacaaatgggctctgtgtgggtcaccccagctgacccgtgtatgtgcagatgcagttccgaagggaagaacagtcctcg

SEQ ID NO: 48132 - DNA, 120 bp, Artificial Sequence
  ENSG00000065802_22 (sequence is synthesized)
ggtgattcagaggggaaaatgcaatccgggaggtgtttcctcagctgaggtgacactgttagaagctgtgatggttgtgtaaatgtgggctgtgtgctgttcccgaggggagcttgggat

SEQ ID NO: 48133 - DNA, 120 bp, Artificial Sequence
  ENSG00000065802_23 (sequence is synthesized)
tgggtcctgctgaagccaggagggtcttcccaagataggagaggaaccgcaggtggtgagcggctggggagggccaggacagccggggctgggtgctgcaggggcttcagcccgggagag

SEQ ID NO: 48134 - DNA, 120 bp, Artificial Sequence
  ENSG00000065802_24 (sequence is synthesized)
ggggtgggcgtgttctttgtggtaccaaagtgggactaggacaaaaattgggctgtggctggggcaggagctatagggagttaaggaatgatgatacggaagttggagccaccaccgtgg

SEQ ID NO: 48135 - DNA, 120 bp, Artificial Sequence
  ENSG00000065802_25 (sequence is synthesized)
actgggccttgtcactggaggtcgtaggcagtggctcatcaccctggtagggctgataggggctttcagggaggctggttagctccctgcactctggctctttactggcttactgtttag

SEQ ID NO: 48136 - DNA, 120 bp, Artificial Sequence
  ENSG00000065802_26 (sequence is synthesized)
ctcctcccacctcgaggctcttcttcctgccaccctttgggctcagaggagggtggcttttttcgaggtgagccatgttgtagacacatgatacgctctgcgtctgctctactgagtact

SEQ ID NO: 48137 - DNA, 120 bp, Artificial Sequence
  ENSG00000065802_27 (sequence is synthesized)
ttctgcaggggcctgttaaggacgaggcctccccagccctgcccggtgcaggaggtggctcagttattgaaccttttgggaagcagcacctgggaatgctgcctcgtgggagtcccatgc

SEQ ID NO: 48138 - DNA, 120 bp, Artificial Sequence
  ENSG00000065802_28 (sequence is synthesized)
tggcagcatgggcgtcatgctcctttgcacagcccagggcctgttttggagggaccaggtcactgcccctggtctctctaggaggagtggactgaatggatcgttgcagagaagactcac

SEQ ID NO: 48139 - DNA, 120 bp, Artificial Sequence
  ENSG00000065802_29 (sequence is synthesized)
ccagacctggccagggaatgatgtatctggggagagaatgagctggaggagggggcctctcatggcccttccctggcctgtggcccagcctggctggcctgcaggtgtctagggtctcag

SEQ ID NO: 48140 - DNA, 120 bp, Artificial Sequence
  ENSG00000065802_30 (sequence is synthesized)
cttttcatttgcagaggacatgttcaacttcctctctgttcaagccagcctttgccaattttttcagaatccaaacaatttggaggtttggtatcttgtttcatagctgccaaatatgaa

SEQ ID NO: 48141 - DNA, 120 bp, Artificial Sequence
  ENSG00000065802_31 (sequence is synthesized)
tctgaaaacagggtgggtagctaaggtcattcctcctgggttttagtggcattgccttccttcactaaagctcccttttttttctgttggcaaggacaggttacagaataggaagagtag

SEQ ID NO: 48142 - DNA, 120 bp, Artificial Sequence
  ENSG00000065802_32 (sequence is synthesized)
cactttccgcctaagcactttaggaaatcacctttctaagccctggggcgcccaagtcccatgggacagggaaacgtggtcctcagtgaggctgctgcctggctggcccggagtcctccc

SEQ ID NO: 48143 - DNA, 120 bp, Artificial Sequence
  ENSG00000065802_33 (sequence is synthesized)
taggagaggggctcgatgggctgggggaaggagcctgaaggttgcccctggttgcatcccagaagcatctgactgtcaccactgccagtggctgtggaacagtcctgggccctgggcctt

SEQ ID NO: 48144 - DNA, 120 bp, Artificial Sequence
  ENSG00000065802_34 (sequence is synthesized)
ggctgctgtcaacagatgggctgggctgggctgtggtggggtgggggacaacgttggtaactctgagaattcagctttggagtcccgggtgaggggttttagataaacccatcaatatca

SEQ ID NO: 48145 - DNA, 120 bp, Artificial Sequence
  ENSG00000065802_35 (sequence is synthesized)
cccacattctgtgactctttgcatcactcgtgttatttatttatttatttatattctgccttgttccagaaaagtgtttaaggcaacaatgcttgttttttggtgttttcttttgacatt

SEQ ID NO: 48146 - DNA, 120 bp, Artificial Sequence
  ENSG00000065802_36 (sequence is synthesized)
tgaaaatttagtacattgttaaaatgtacttgttaaacaggtaattttaaagagaaggaacaattgtttttagtaagttttctttttcctttttcaatgaattgattcttcaaattaaaa

SEQ ID NO: 48147 - DNA, 120 bp, Artificial Sequence
  ENSG00000065802_37 (sequence is synthesized)
gttcttgagagaaggagaggaagatacagcagacataggactgagccaaggaagagtctgcctgagagagacgcttggcctgtgctttgctgccatccgtgcggccttggccacatccct

SEQ ID NO: 48148 - DNA, 120 bp, Artificial Sequence
  ENSG00000065802_38 (sequence is synthesized)
attaacagaggcagctccacttcagacagggacaaggcttcctgctgtgcctttctggcagggttttgtggggtcacatgggaagcaatgtgttacgcaagcagtctccatgtgtgtgta

SEQ ID NO: 48149 - DNA, 120 bp, Artificial Sequence
  ENSG00000065802_39 (sequence is synthesized)
aactgctgtcctggtgacttgtccctcttcttagtggaaatgcatttgagatggtgacagggctggatgaacgtgtgaccctgggagatccgggctggactgtggaccccgatgggccag

SEQ ID NO: 48150 - DNA, 120 bp, Artificial Sequence
  ENSG00000065802_40 (sequence is synthesized)
agtccttgtggcccacagcatagcactggggacagagcgctctatgcaggtgaggcgtatgagaacagcatggtaaataattgatgaagtcacatttgttcaacttaaaggattgttctt

SEQ ID NO: 48151 - DNA, 120 bp, Artificial Sequence
  ENSG00000065802_41 (sequence is synthesized)
tattctgaagttattttcttccttatttggatgataaaatttccttttatgtaatgaaggtaaaagtagagggcaatatttttgctttttgaaatgctcttggttgcaaaacaaaatgtt

SEQ ID NO: 48152 - DNA, 120 bp, Artificial Sequence
  ENSG00000065802_42 (sequence is synthesized)
ggttgctgtttgtcagccccagaatttcttcttaagttcgcctgtctctgaaatcccaaagtcacggaaccgcagtctagctgtggtgcatgtttacgtattggtgagaaattcctcttg

SEQ ID NO: 48153 - DNA, 120 bp, Artificial Sequence
  ENSG00000065802_43 (sequence is synthesized)
ggttcttgaacagcctgtacgctggcaggcagcactgcagcatttctgctgctcatggccaagaacgagtctggagatcgctgcgtgcggttttaggaagtgccaacacccgtggtgatg

SEQ ID NO: 48154 - DNA, 120 bp, Artificial Sequence
  ENSG00000065802_44 (sequence is synthesized)
ggcctctggccacccctggatccatgggacacactcacaggaagctgatgtggccttctcggtgaggactgcaccttaacctgggcactgggagcctgtggcccccctgtatgttggtga

SEQ ID NO: 48155 - DNA, 120 bp, Artificial Sequence
  ENSG00000065802_45 (sequence is synthesized)
tgacactagtgtgggtcttctggctctggggctacagcttctgcctcctcacctggccgtcggtactcggcaagcaggcctggcctcccggggcctggatccctaccggctgggattggc

SEQ ID NO: 48156 - DNA, 120 bp, Artificial Sequence
  ENSG00000065802_46 (sequence is synthesized)
ctcctggaagtacctgtttgggccatgtgacctcctttctcacttatgcctcactcccctcctcccgctccaaacccgaacctctcagtgtggaatgaacgctccaaacccgaacctctc

SEQ ID NO: 48157 - DNA, 120 bp, Artificial Sequence
  ENSG00000065802_47 (sequence is synthesized)
agtgtggaatgaacgctccaaacccgaacctctcagtgtggaatgaaacagtttagatgtgtacatgatgcacgtgggtgggattcacatcccaggagaattccacggagaggaatgtgc

SEQ ID NO: 48158 - DNA, 120 bp, Artificial Sequence
  ENSG00000065802_48 (sequence is synthesized)
agattttgaagtgtacagtgatgtgtggaataaatactagaaattctcagcagacagtgggatggagaagtgagtgggggcaggagggggatttctgttgccttgacatgtcgttgctca

SEQ ID NO: 48159 - DNA, 120 bp, Artificial Sequence
  ENSG00000065802_49 (sequence is synthesized)
gtgcctggattgcaggcgagtctctcttttttatgttgctttgatttcaagatctcttagatatactaggtagtgtatgaatgtgcataaatccagtttgagaatggtgtttatgaagaa

SEQ ID NO: 48160 - DNA, 120 bp, Artificial Sequence
  ENSG00000065802_50 (sequence is synthesized)
gctgtttcgtgtgtacagttgctgctgtaatttagccagcagtgccctgccctgccctgcagtgtctgctcagctcccactgcttctctttgctgttgggcatgtgaggcatgacttgga

SEQ ID NO: 48161 - DNA, 120 bp, Artificial Sequence
  ENSG00000065802_51 (sequence is synthesized)
ggggggcctggtgcctggggacctgctgaagagaatgctcaccaccagctctctgtttccctttctgctttggtaatcaacacgtgtttgcctgcagtggccgggaccgtgactgtttct

SEQ ID NO: 48162 - DNA, 120 bp, Artificial Sequence
  ENSG00000065802_52 (sequence is synthesized)
gcccttgtgcctagttaagagccttcaaaagcataatgaacacttttgatatgatattgtaactttagtaaatgctttacttccctctaattgcccccaaatgccttaattttgtggact

SEQ ID NO: 48163 - DNA, 120 bp, Artificial Sequence
  ENSG00000065802_53 (sequence is synthesized)
gtttatttcaacaggtggaagtgttggtcgtgcgaaatcttggtattcgcatttcaagaagggagttcttttttctttcttctttctatggaacgtttcaagtgattggatagaaagaag

SEQ ID NO: 48164 - DNA, 120 bp, Artificial Sequence
  ENSG00000065802_54 (sequence is synthesized)
ggctctgaagcaggagttttcacctgctctgagggaacttggggctccagggacgtaccccaaatgttgcccaggttgaaactccctgacagcctgttctacgtagtggctcgtggtttc

SEQ ID NO: 48165 - DNA, 120 bp, Artificial Sequence
  ENSG00000065802_55 (sequence is synthesized)
cagtttgaagagagttgtgcccctaaaagtgtttgaaacctgtggctttcaagcaaggtaccgttgtccccacagtgttccgtggggtagggggtgatggagactgtgggcaagcctgtt

SEQ ID NO: 48166 - DNA, 120 bp, Artificial Sequence
  ENSG00000065802_56 (sequence is synthesized)
gtttttggccccctgttgttacatgggacctgttttgacggtgggagggtgagatgtgaagatgtgggatgaacctggaatgaacgaattaaataaagacatgcatccatctgtcagcga

SEQ ID NO: 48167 - DNA, 120 bp, Artificial Sequence
  ENSG00000065802_57 (sequence is synthesized)
tgacagggctggatgaacgtgtgaccctgggagatccgggctggactgtggaccccgatgggccagagtccttgtggcccacagcatagcactggggacagagcgctctatgcaggtgga

SEQ ID NO: 48168 - DNA, 120 bp, Artificial Sequence
  ENSG00000065802_58 (sequence is synthesized)
agactgctgcctcaggcaacgggctttccgactccttggcttcttatgtgaggaaaccacagcgcggccggcatccagagagtcgtgcaggtcgtaatctgaaggagtggctgagggagc

SEQ ID NO: 48169 - DNA, 76 bp, Artificial Sequence
  ENSG00000065802_59 (sequence is synthesized)
ggcctcaagtaccatgcccagcttgtgatttatttcttgagcatttgaaggtgccccgtagctgggagagggaagg

SEQ ID NO: 48170 - DNA, 120 bp, Artificial Sequence
  ENSG00000065802_60 (sequence is synthesized)
ttgagcatttgaaggtgccccgtagctgggagagggaaggctcgctgcagatggcacccccttttggttagtcttggcagggcctccatgagctaacaggagcccctctcttcagtgcag

SEQ ID NO: 48171 - DNA, 120 bp, Artificial Sequence
  ENSG00000065802_61 (sequence is synthesized)
aggggtgtagcccccgtgccaccttagtgattccttcaggccatcatttgtgcagtgttagaggttgggggcctacatagtcacctagtcctggtacggggctgatgttgacgtcaacca

SEQ ID NO: 48172 - DNA, 120 bp, Artificial Sequence
  ENSG00000065809_0 (sequence is synthesized)
acagaaggaagagcgcgaaattgcccaggatggacactttcaaaggggccccagcggctaagtgactctcagggaaggtggccttgccatcccaacttctatttaggggcaaccactagc

SEQ ID NO: 48173 - DNA, 120 bp, Artificial Sequence
  ENSG00000065809_1 (sequence is synthesized)
aagttcttctcttcgggcaattggaaagagttcctataagcaaagtggaggtgatgtggacccctggaaaatttccttgccccgtttgaactttgcaatgattcactgcaagtcatgtcc

SEQ ID NO: 48174 - DNA, 120 bp, Artificial Sequence
  ENSG00000065809_2 (sequence is synthesized)
acgtggaaagcaagactcaccaaaagactgaagtctccctctagaagcatgcatccatttccgtgctcagctctgctcgcctgttttgggaatacgagggagagtgcttccttcaatcag

SEQ ID NO: 48175 - DNA, 120 bp, Artificial Sequence
  ENSG00000065809_3 (sequence is synthesized)
tccggcgtggctgatactcattccaccgtccgtgtgcagcctgtggccaaagcaggcagacagccaagacacccaagcgcagaaggagctccagagaaaaggcaagattcgagcacccat

SEQ ID NO: 48176 - DNA, 120 bp, Artificial Sequence
  ENSG00000065809_4 (sequence is synthesized)
gcagagagaaatggcagtgcgaatcggaattcaagtcaccgcactgcggcccagcccgcggagacgcctgaagatgtgcccgggtccctggatgatggggcggactgtgaagcagtggtg

SEQ ID NO: 48177 - DNA, 120 bp, Artificial Sequence
  ENSG00000065809_5 (sequence is synthesized)
tttcacgcttccatccccagaccatcaattattgacacgcccaaggaagaagaatttcgagaagaacctaaatgcctcgagctggagcagaaaatgacatcagacagcccacctgaggat

SEQ ID NO: 48178 - DNA, 120 bp, Artificial Sequence
  ENSG00000065809_6 (sequence is synthesized)
attgaccataaggactcatatctcattacaagaagcatcatggccgagccagactacatagaagatgacaatcctgaactcattaggcctcagaaactgatcaatcctgtaaaaacctcc

SEQ ID NO: 48179 - DNA, 120 bp, Artificial Sequence
  ENSG00000065809_7 (sequence is synthesized)
cggaaccatcaagatcttcacagagaacttcttatgaatcaaaaaaggggtcttgctcctcagaacaaaccagaattgcagaaggtgatggaaaaaagaaaacgagaccaagtaataaag

SEQ ID NO: 48180 - DNA, 120 bp, Artificial Sequence
  ENSG00000065809_8 (sequence is synthesized)
cagaaggaagaagaagcacagaagaagaaatctgacttggaaatagagctattaaaacggcagcagaagttggagcagcttgaacttgagaagcagaaattgcaagaagagcaagaaaat

SEQ ID NO: 48181 - DNA, 120 bp, Artificial Sequence
  ENSG00000065809_9 (sequence is synthesized)
gcccccgagtttgtgaaggtgaaaggcaatctcaggagaacaggccaagaagtcgcccaagcccaggagtcctaggctgaggctgcaccaagacctcgtgtgtcaccccacagagctgtc

SEQ ID NO: 48182 - DNA, 120 bp, Artificial Sequence
  ENSG00000065809_10 (sequence is synthesized)
tgtgggtgccttctcaatctcagggcaaaagcccctggagaatatttcagccagcagagaattttgacttgcagtaggatttggtttgattttcctacgatctgggtggatgccttgcct

SEQ ID NO: 48183 - DNA, 120 bp, Artificial Sequence
  ENSG00000065809_11 (sequence is synthesized)
gtgacagttgcagttcctattcgccaaatgaagggcagtgccccgcacgtaagttggaatgatggacctgtgttcagagacttaacagaaccaacaagcaaaacaagtgagaacaggaaa

SEQ ID NO: 48184 - DNA, 120 bp, Artificial Sequence
  ENSG00000065809_12 (sequence is synthesized)
aaggaagaggacactggaatcaattcttgagagttgcactacttggtttttcttccattccaagtttcgtgggacccagagccttttttcttttaaaagctaaaaaacaagtgtttaatt

SEQ ID NO: 48185 - DNA, 120 bp, Artificial Sequence
  ENSG00000065809_13 (sequence is synthesized)
cctctttttgttatctgttagataattgagatcacctagaaatgcgtttaatctgttcactcactgtaaattttgaggacccagaattgtcttgtttaatttatactttcacccctgttg

SEQ ID NO: 48186 - DNA, 120 bp, Artificial Sequence
  ENSG00000065809_14 (sequence is synthesized)
cagttaacaccagagaaggaacgtgaatgtcgagcacagccactacccttgttggcacttaatttagaaatagggtgagaagtttaaaagcccatcttgattttattttcattccttttg

SEQ ID NO: 48187 - DNA, 120 bp, Artificial Sequence
  ENSG00000065809_15 (sequence is synthesized)
attcattaattgctttgattactaggagggtttctgttcagttttgtttttaaatgtcttgctgatctagttctttcagatggaataaccttccagtcccttagagagtggaactagtcc

SEQ ID NO: 48188 - DNA, 120 bp, Artificial Sequence
  ENSG00000065809_16 (sequence is synthesized)
atataacccagcttcagtagcaaaagtagaagccgccacatcttttcatttctccaagaggagagtggggaaggttcccatgaccagctgggcagtcaggatttctctaggcattctaat

SEQ ID NO: 48189 - DNA, 120 bp, Artificial Sequence
  ENSG00000065809_17 (sequence is synthesized)
gtgaaataagtgtagactgctgtcaaggaggcttcatcagaagatgtatagcatttgaatgtctaatgataatgcatatcattagaatccaagctttgaaaatttctgattaatgctcat

SEQ ID NO: 48190 - DNA, 120 bp, Artificial Sequence
  ENSG00000065809_18 (sequence is synthesized)
gtatttctttatctttgtttttccttgtgaagaaagactttcaccactgtctgagtgatgatgctgttgataaggatgatgtcgatgactactatattgcatctctcaggaacagctgat

SEQ ID NO: 48191 - DNA, 120 bp, Artificial Sequence
  ENSG00000065809_19 (sequence is synthesized)
gggaagggaggggctgctgagttcccttgttctagctagcagcacgctcctcagagagggggccgagttacagacagcagccgcattctcatgcaaaattagttttaaactgctagtgtg

SEQ ID NO: 48192 - DNA, 120 bp, Artificial Sequence
  ENSG00000065809_20 (sequence is synthesized)
ggcatcggtaccttttgcctgggtgataccgaagaattgttgaggatttagtatgctccgtagagacagttcagccagtcatttctgcattggagagacttctcatactttctttgaaga

SEQ ID NO: 48193 - DNA, 120 bp, Artificial Sequence
  ENSG00000065809_21 (sequence is synthesized)
ctcatagaaagctggatctagagcttttgaatccttaattagcacagtagaaattagctttctatgggaatgctttagtgttagcagttgacaattaggcccatattcaatctgaatggg

SEQ ID NO: 48194 - DNA, 120 bp, Artificial Sequence
  ENSG00000065809_22 (sequence is synthesized)
aacaaaagtaaatgcaatgataatatactgctagttagagaaacatgttagttgattatacctgaaatggattatttatctcatcagcaagtattatttgaataaaatgagaaatgctta

SEQ ID NO: 48195 - DNA, 120 bp, Artificial Sequence
  ENSG00000065809_23 (sequence is synthesized)
agaaaaattgttgctctacagtaatttggtttcgaagaatggaatggtaactattttttcccatcgttcttttgagagaaggaagtgtgatgactgatgatcttgaaaagcccatttctg

SEQ ID NO: 48196 - DNA, 120 bp, Artificial Sequence
  ENSG00000065809_24 (sequence is synthesized)
attgcacgttgactggaattctttctttgtgtctgtggactagcgatgctgtttgtaaaatgaagattcgggactggctcatatctttttatctaactagatgtcagatcttgaaatctg

SEQ ID NO: 48197 - DNA, 120 bp, Artificial Sequence
  ENSG00000065809_25 (sequence is synthesized)
tattctcgaagcaattctgccacttgatcgtattcacaggggccctggtaggctcctttagaaggaccatttctgttcctagagcttaactagaattcattcttcactgaaaaaaaaaaa

SEQ ID NO: 48198 - DNA, 120 bp, Artificial Sequence
  ENSG00000065809_26 (sequence is synthesized)
agttacttaagaaagcatttctttcctaatctcactcaaatctgcagaattatttgtaattagtaatacaaaatctggccaaaaggagacttgtaaatagcgtaaagtggtgtcttatgc

SEQ ID NO: 48199 - DNA, 120 bp, Artificial Sequence
  ENSG00000065809_27 (sequence is synthesized)
taaacggtggaatgtataggcagagaagctctttgaagttgtcagatgagctgggctcacaagcctgattcaaacaggctgtcggtctcctctcaccccttaatactgtgcagcccaaac

SEQ ID NO: 48200 - DNA, 120 bp, Artificial Sequence
  ENSG00000065809_28 (sequence is synthesized)
tcctaggactcttgaacatctgagcagttttgtgctttgagccactttttgacaaaaatggctccatttttccacagcgtggttttcttaaaatagtttaatgttttatagtctcatagt

SEQ ID NO: 48201 - DNA, 120 bp, Artificial Sequence
  ENSG00000065809_29 (sequence is synthesized)
agtagtgttgctttctaagctataacagtcgactttattcttctactctgaaaaatcttgacttgtttgagtgtatataatatatataaagggagccttaatggattggttttcataatt

SEQ ID NO: 48202 - DNA, 120 bp, Artificial Sequence
  ENSG00000065809_30 (sequence is synthesized)
taatattttttgtatttgctcttgtataattgtttttaacggaaagtattaaagaattgagggtggaattcttagaaccaaagttattcttaataaaaatcaccacatgcttggaccatg

SEQ ID NO: 48203 - DNA, 120 bp, Artificial Sequence
  ENSG00000065809_31 (sequence is synthesized)
attgtttgctctggcttctgtgccggatgaggtcattcagttgcatacagttcctgctttcagaagttgctagagtgtttctctttgaacttgaactgtggctcttttgatatccagaaa

SEQ ID NO: 48204 - DNA, 120 bp, Artificial Sequence
  ENSG00000065809_32 (sequence is synthesized)
gagagttctttgtggggatggttaattcttgttttgggtgcttttcttcaccgctctaaggaactaccacagtcagaaggtgcattcttactgcgatctttttatttgctaccttgggct

SEQ ID NO: 48205 - DNA, 120 bp, Artificial Sequence
  ENSG00000065809_33 (sequence is synthesized)
taaggagcctgcctatatctactgaggtgaggttaggtcagtctctgtaaccgttcgtcacttaggccttgatgggtgacatggatggggatgacttcctgggctaactcttctcttgct

SEQ ID NO: 48206 - DNA, 120 bp, Artificial Sequence
  ENSG00000065809_34 (sequence is synthesized)
aaaggatgatttttcaccaccttgaatgcccatgattaaaacataaacaagaaaatagatatctgaggagaatgcagttgaaactaattttgtggatagagaaactgttggaactgcttt

SEQ ID NO: 48207 - DNA, 120 bp, Artificial Sequence
  ENSG00000065809_35 (sequence is synthesized)
cgccgcgggcgccgggagcgagctgggagggagccgcgcgcctttgtgcgcgcgccgaggagaatgcagttgaaactaattttgtggatagagaaactgttggaactgctttacaaagta

SEQ ID NO: 48208 - DNA, 120 bp, Artificial Sequence
  ENSG00000065809_36 (sequence is synthesized)
ggcccccgggggcttctgggagtgcctgccttcgcagctggagagagccctcctcaggggctgtctctgccttcccttcttcccatgtgtatctggggcagctgaggcagggctaggaga

SEQ ID NO: 48209 - DNA, 120 bp, Artificial Sequence
  ENSG00000065809_37 (sequence is synthesized)
agagcccaggttcctcctgccacctccaagcgatgaagcagccctgggccaactccagcattctcgtgtgaactgcagaggagccctgcgcttccagctacttgcagccagacagcccac

SEQ ID NO: 48210 - DNA, 120 bp, Artificial Sequence
  ENSG00000065809_38 (sequence is synthesized)
atatcgagtattgagaagggaatgtgcttggtctgtcttctctctctgcttcgtcacctgccagtcctgagggccccaggcagcagtgcagctttaatgtggattcctatggatcagagg

SEQ ID NO: 48211 - DNA, 120 bp, Artificial Sequence
  ENSG00000065809_39 (sequence is synthesized)
attcgtgggggaggtgtgtttgtggagtaaggcagtgggagggtagaggaaaaggagataaagaaaaagcccatttctaactctctgaacaggcgaggccagcttatctgagatgcctgt

SEQ ID NO: 48212 - DNA, 120 bp, Artificial Sequence
  ENSG00000065809_40 (sequence is synthesized)
caaaaaaggattttggtctggttggaaatacattaaaaaaaaaaaaaagaaaaggcagatttcaaaatgaaatgaaaatatatctcatcttatctcttaagagttttcaaggggtcttgc

SEQ ID NO: 48213 - DNA, 120 bp, Artificial Sequence
  ENSG00000065809_41 (sequence is synthesized)
ctgcaagtttagcactggcctgtcctgattagtgaggacctctgattgcctaggccagggctcaggagaatgcagttgaaactaattttgtggatagagaaactgttggaactgctttac

SEQ ID NO: 48214 - DNA, 120 bp, Artificial Sequence
  ENSG00000065809_42 (sequence is synthesized)
acccagggctggagagtctgcgtgcatatttgcttacaagtagaggagctgatttttgtacagacaagtacatttcaccagtgctgccagcacgttctcttggtctggaaggagaatgca

SEQ ID NO: 48215 - DNA, 120 bp, Artificial Sequence
  ENSG00000065809_43 (sequence is synthesized)
gcttttcttcaccgctctaaggaactaccacagtcagaaggtgcattcttactgcgatctttttatttgctaccttgggcttaaggagcctgcctatatctactgagccagagaatcctg

SEQ ID NO: 48216 - DNA, 120 bp, Artificial Sequence
  ENSG00000065809_44 (sequence is synthesized)
aaccgggttacccctccgtgaggcagatcccctgcaggtggccatcactgtggtggccagcagtgcttccagactcctgcagtcacgggttcccttctgaaatggatgtgtatttccaaa

SEQ ID NO: 48217 - DNA, 120 bp, Artificial Sequence
  ENSG00000065809_45 (sequence is synthesized)
tgttcttaaatttaaaatctctgaattttctccttacactggggaaggtgtaggaatcatgtaattgccgcctactccggcatttgtcagtagtggggagaagtctctagaaccatatta

SEQ ID NO: 48218 - DNA, 120 bp, Artificial Sequence
  ENSG00000065809_46 (sequence is synthesized)
gacttaatagataggacactcatgtttttgtttgtttgggggtagcattttaaaagattattatcatagtctttattattaattattttggaggacaggaaagcatttaccttctatcta

SEQ ID NO: 48219 - DNA, 120 bp, Artificial Sequence
  ENSG00000065809_47 (sequence is synthesized)
ctttgcaaactccatctgtgccataaatcattatggatgttgggttgctatactctgctttttaaataatttgggcaggacaggagactaggagaactgaggatgaaaggctattttttt

SEQ ID NO: 48220 - DNA, 120 bp, Artificial Sequence
  ENSG00000065809_48 (sequence is synthesized)
caatttaagaactaggaagcttcatttaggattattttcagatctcgtaggactatagatgactcatttgcccactctttgctaagccctggtgaaaggtctcccactgaactgaaagat

SEQ ID NO: 48221 - DNA, 120 bp, Artificial Sequence
  ENSG00000065809_49 (sequence is synthesized)
aatgtgtgttagctgtggacttagaaaaaggaggccaccagaacaagctggaatcttggacagggagaatgcagttgaaactaattttgtggatagagaaactgttggaactgctttaca

SEQ ID NO: 48222 - DNA, 120 bp, Artificial Sequence
  ENSG00000065809_50 (sequence is synthesized)
gggagccgcgcgcctttgtgcgcgcgccgaggtttgcatataaccacctgtacagaagggagaagaaagaaacaggaaaaacaatgtaaatttccactttatttggaagaatgggctgac

SEQ ID NO: 48223 - DNA, 120 bp, Artificial Sequence
  ENSG00000065809_51 (sequence is synthesized)
tgaaatctttaagctttaaaaatattttaaaggtaacattgtgttctgagattcataagaaatatgtgatggaaaggaattcttgtttgtggaacaaggaatagcagtgattgtacaacc

SEQ ID NO: 48224 - DNA, 120 bp, Artificial Sequence
  ENSG00000065809_52 (sequence is synthesized)
gggtgcatgctggcttcttaaagaccttgcactgagaaagtaaaataagggttttcctgagaatcgtgagttgtgttgagtgtgtatgttcttttaaaataaaatcgttctttagccaca

SEQ ID NO: 48225 - DNA, 120 bp, Artificial Sequence
  ENSG00000065809_53 (sequence is synthesized)
agatagaatgattgctttggcattaagaaacttgttaactgactttcactatgttttttttttaaaggagaatgcagttgaaactaattttgtggatagagaaactgttggaactgcttt

SEQ ID NO: 48226 - DNA, 120 bp, Artificial Sequence
  ENSG00000065809_54 (sequence is synthesized)
ttatgtactctttggagatctcctcttgcctttctttcgtgctggtgaatttcttagatcaccatgttgcctgctgtagcctagtaggtatcatactaattttgtagaccacttttccgt

SEQ ID NO: 48227 - DNA, 120 bp, Artificial Sequence
  ENSG00000065809_55 (sequence is synthesized)
ggttgatattgtaagttaaatttctgttcataaaaaatgtagccattagattaacgttttctatttttgttaatgctctttcgcaggggtcttgctcctcagaacaaaccagaattgcag

SEQ ID NO: 48228 - DNA, 120 bp, Artificial Sequence
  ENSG00000065809_56 (sequence is synthesized)
gtgcttttcttcaccgctctaaggaactaccacagtcagaaggagaatgcagttgaaactaattttgtggatagagaaactgttggaactgctttacaaagtattttactctttcaagat

SEQ ID NO: 48229 - DNA, 120 bp, Artificial Sequence
  ENSG00000065809_57 (sequence is synthesized)
acttgtggctgagcagaggtgtatgtagtgcatttaggattttgccgaggagcacgtttttccatgggacagtgtgttgatatcaggctggctgtgatgggttccctgagtcaccctctg

SEQ ID NO: 48230 - DNA, 80 bp, Artificial Sequence
  ENSG00000065833_0 (sequence is synthesized)
agctgcagtcagcaccgtcaccccagcagcatccgccgcctgcaccgcgcgtgcggcccgccccggcctgaccccgccgc

SEQ ID NO: 48231 - DNA, 120 bp, Artificial Sequence
  ENSG00000065833_1 (sequence is synthesized)
ccgccacacccatcagcgcggctacctgctgacacggaaccctcacctcaacaaggacttggcctttaccctggaagagagacagcaattgaacattcatggattgttgccaccttcctt

SEQ ID NO: 48232 - DNA, 120 bp, Artificial Sequence
  ENSG00000065833_2 (sequence is synthesized)
caacagtcaggagatccaggttcttagagtagtaaaaaatttcgagcatctgaactctgactttgacaggtatcttctcttaatggatctccaagatagaaatgaaaaactcttttatag

SEQ ID NO: 48233 - DNA, 120 bp, Artificial Sequence
  ENSG00000065833_3 (sequence is synthesized)
agtgctgacatctgacattgagaaattcatgcctattgtttatactcccactgtgggtctggcttgccaacaatatagtttggtgtttcggaagccaagaggtctctttattactatcca

SEQ ID NO: 48234 - DNA, 120 bp, Artificial Sequence
  ENSG00000065833_4 (sequence is synthesized)
cgatcgagggcatattgcttcagttctcaatgcatggccagaagatgtcatcaaggccattgtggtgactgatggagagcgtattcttggcttgggagaccttggctgtaatggaatggg

SEQ ID NO: 48235 - DNA, 120 bp, Artificial Sequence
  ENSG00000065833_5 (sequence is synthesized)
catccctgtgggtaaattggctctatatacagcttgcggagggatgaatcctcaagaatgtctgcctgtcattctggatgtgggaaccgaaaatgaggagttacttaaagatccactcta

SEQ ID NO: 48236 - DNA, 120 bp, Artificial Sequence
  ENSG00000065833_6 (sequence is synthesized)
cattggactacggcagagaagagtaagaggttctgaatatgatgattttttggacgaattcatggaggcagtttcttccaagtatggcatgaattgccttattcagtttgaagattttgc

SEQ ID NO: 48237 - DNA, 120 bp, Artificial Sequence
  ENSG00000065833_7 (sequence is synthesized)
caatgtgaatgcatttcgtctcctgaacaagtatcgaaaccagtattgcacattcaatgatgatattcaaggaacagcatctgttgcagttgcaggtctccttgcagctcttcgaataac

SEQ ID NO: 48238 - DNA, 120 bp, Artificial Sequence
  ENSG00000065833_8 (sequence is synthesized)
caagaacaaactgtctgatcaaacaatactattccaaggagctggagaggctgccctagggattgcacacctgattgtgatggccttggaaaaagaaggtttaccaaaagagaaagccat

SEQ ID NO: 48239 - DNA, 120 bp, Artificial Sequence
  ENSG00000065833_9 (sequence is synthesized)
caaaaagatatggctggttgattcaaaaggattaatagttaagggacgtgcttccttaacacaagagaaagagaagtttgcccatgaacatgaagaaatgaagaacctagaagccattgt

SEQ ID NO: 48240 - DNA, 120 bp, Artificial Sequence
  ENSG00000065833_10 (sequence is synthesized)
tcaagaaataaaaccaactgccctcataggagttgctgcaattggtggtgcattctcagaacaaattctcaaagatatggctgccttcaatgaacggcctattatttttgctttgagtaa

SEQ ID NO: 48241 - DNA, 120 bp, Artificial Sequence
  ENSG00000065833_11 (sequence is synthesized)
tccaactagcaaagcagaatgttctgcagagcagtgctacaaaataaccaagggacgtgcaatttttgccagtggcagtccttttgatccagtcactcttccaaatggacagaccctata

SEQ ID NO: 48242 - DNA, 120 bp, Artificial Sequence
  ENSG00000065833_12 (sequence is synthesized)
tcctggccaaggcaacaattcctatgtgttccctggagttgctcttggtgttgtggcgtgtggattgaggcagatcacagataatattttcctcactactgctgaggttatagctcagca

SEQ ID NO: 48243 - DNA, 120 bp, Artificial Sequence
  ENSG00000065833_13 (sequence is synthesized)
cataccaagaaaagacagccacagtttatcctgaaccgcaaaacaaagaagcatttgtccgctcccagatgtatagtactgattatgaccagattctacctgattgttattcttggcctg

SEQ ID NO: 48244 - DNA, 120 bp, Artificial Sequence
  ENSG00000065833_14 (sequence is synthesized)
aagaggtgcagaaaatacagaccaaagttgaccagtaggataatagcaaacatttctaactctattaatgaggtctttaaacctttcataatttttaaaggttggaatcttttataatga

SEQ ID NO: 48245 - DNA, 120 bp, Artificial Sequence
  ENSG00000065833_15 (sequence is synthesized)
ttcataagacacttagattaagattttactttaacagtctaaaaattgatagaagaatatcgatataaattgggataaacatcacatgagacaattttgcttcactttgccttctggtta

SEQ ID NO: 48246 - DNA, 120 bp, Artificial Sequence
  ENSG00000065833_16 (sequence is synthesized)
tttatggtttctgtctgaattattctgcctacgttctctttaaaagctgttgtacgtactacggagaaactcatcatttttatacaggacactaatgggaagaccaaaattactaataaa

SEQ ID NO: 48247 - DNA, 120 bp, Artificial Sequence
  ENSG00000065833_17 (sequence is synthesized)
ttgacataaccaacattaaaactcataattattttgttgaccattttgttaaaatctacttttcaaaaaaaaaaagctagaaatgaatctaggcgtaggtgaacttttgctaagcagaaa

SEQ ID NO: 48248 - DNA, 120 bp, Artificial Sequence
  ENSG00000065833_18 (sequence is synthesized)
taacactactttgttgcctagagaaagataacttctcaagtatttttattccagtcctagatcatatatgttcttttgtgcaacggaattctaacagttctaagagaaagatcactgctg

SEQ ID NO: 48249 - DNA, 120 bp, Artificial Sequence
  ENSG00000065833_19 (sequence is synthesized)
tttacagcgccttgtgcagccttagattttaatattcttttgtcattgttacatctcatagagtaaagctcttattaccttgatcctgagtcagaaatcccacctgaaatcacctttttt

SEQ ID NO: 48250 - DNA, 120 bp, Artificial Sequence
  ENSG00000065833_20 (sequence is synthesized)
cccccttgatcaaacatcccatccttcagctaccatactgttgctacagggattttgtggactgtggcccctgtcccgaggttggcaccttcagttcagcacagcctgagcagtgagaag

SEQ ID NO: 48251 - DNA, 120 bp, Artificial Sequence
  ENSG00000065833_21 (sequence is synthesized)
gtctgaaaggagagtatatagttaagatccttgagaaagggctgcctgaggaactgacctcttaaagatctcaggatctttaagacaacaagttaggttcctactggagttacctgccag

SEQ ID NO: 48252 - DNA, 120 bp, Artificial Sequence
  ENSG00000065833_22 (sequence is synthesized)
aatggcctcttaattaactcaggtaatgaagagctaactgtgttataatcatcttgcttttgcctgaatttggagaaagtattataattaagttcccagtatcagaaatgtccttacata

SEQ ID NO: 48253 - DNA, 120 bp, Artificial Sequence
  ENSG00000065833_23 (sequence is synthesized)
agattaaaatatcttgatgactaataccattctatgagaaagagtagttatatgcccagactgtattaatttactttagaaactaatgtttgaagtaatggaaaaaattttaaattataa

SEQ ID NO: 48254 - DNA, 120 bp, Artificial Sequence
  ENSG00000065833_24 (sequence is synthesized)
agctaaggtgcaataacatttgctacttatttatagaattatttgaagaattttgtttttgaagtaatgctttaaggagtataagatattcaagataaattatactataaaatgatttta

SEQ ID NO: 48255 - DNA, 120 bp, Artificial Sequence
  ENSG00000065833_25 (sequence is synthesized)
ttgaaagttgaaggttacacaaattgttttaggtatgagcagaagaggttaaggtatttctaaaggtaacatatagtcaagagtttcctcaaaatagttatttggagaagaatcagaatg

SEQ ID NO: 48256 - DNA, 120 bp, Artificial Sequence
  ENSG00000065833_26 (sequence is synthesized)
tctgtgtatttcttgtctgtttctatgttgtcttatagctctgactaaatgtgtttacctatgcaaaagatttattaaagcatagaaaaggtgaatgaataaaaatataaaataattgtc

SEQ ID NO: 48257 - DNA, 120 bp, Artificial Sequence
  ENSG00000065882_0 (sequence is synthesized)
ctcctcttcggctgctgctcctggtgccgccaccgtccgccggtgcctgttgctgccgccgccgcgggacctgctgtgtcctcagctgggtggagaagaggcgggcgccgagccgagggg

SEQ ID NO: 48258 - DNA, 120 bp, Artificial Sequence
  ENSG00000065882_1 (sequence is synthesized)
agccagccgggtgcgatggactccccgcccgcccaggccgtccccaggatgcccccaagcacctgcgcgtcccggcccggccccgggctctgagcgcgccgcggcacaggtttctgcata

SEQ ID NO: 48259 - DNA, 120 bp, Artificial Sequence
  ENSG00000065882_2 (sequence is synthesized)
gggctctgagcgcgccgcggcacaggtttctgcatatgaagtgtgtaaaatagattgcttgatccaaaacagaaaaacagtgataactgttttgctgagttcccagacccttcccaagat

SEQ ID NO: 48260 - DNA, 120 bp, Artificial Sequence
  ENSG00000065882_3 (sequence is synthesized)
ggaaccaataacattcacagcaaggaaacatctgctttctaacgaggtctcggtggattttggcctgcagctggtgggctccctgcctgtgcattccctgaccaccatgcccatgctgcc

SEQ ID NO: 48261 - DNA, 120 bp, Artificial Sequence
  ENSG00000065882_4 (sequence is synthesized)
ctgggttgtggctgaggtgcgaagactcagcaggcagtccaccagaaaggaacctgtaaccaagcaagtccggctttgcgtttcaccctctggactgagatgtgaacctgagccagggag

SEQ ID NO: 48262 - DNA, 120 bp, Artificial Sequence
  ENSG00000065882_5 (sequence is synthesized)
aagtcaacagtgggatcccctgatctattccagcatctttgagtgcaagcctcagcgtgttcacaaactgattcacaacagtcatgacccaagttactttgcttgtctgattaaggaaga

SEQ ID NO: 48263 - DNA, 120 bp, Artificial Sequence
  ENSG00000065882_6 (sequence is synthesized)
cgctgtccaccggcagagtatctgctatgtgttcaaagccgatgatcaaacaaaagtgcctgagatcatcagctccatccgtcaggcggggaagatcgcccggcaggaggagctgcactg

SEQ ID NO: 48264 - DNA, 120 bp, Artificial Sequence
  ENSG00000065882_7 (sequence is synthesized)
cccgtccgagttcgacgacacgttttccaagaagttcgaggtgctcttctgcggccgcgtgacggtggcgcacaagaaggctccgccggccctgatcgacgagtgcatcgagaagttcaa

SEQ ID NO: 48265 - DNA, 120 bp, Artificial Sequence
  ENSG00000065882_8 (sequence is synthesized)
tcacgtcagcggcagccgggggtccgagagcccccgccccaacccgccccatgccgcgcccacagggagccaggagcctgtgcgcaggcccatgcgcaagtccttctcccagcccggcct

SEQ ID NO: 48266 - DNA, 120 bp, Artificial Sequence
  ENSG00000065882_9 (sequence is synthesized)
gcgctcgctggcctttaggaaggagctgcaggatgggggcctccgaagcagcggcttcttcagctccttcgaggagagcgacattgagaaccacctcattagcggacacaatattgtgca

SEQ ID NO: 48267 - DNA, 120 bp, Artificial Sequence
  ENSG00000065882_10 (sequence is synthesized)
gcccacagatatcgaggaaaatcgaactatgctcttcacgattggccagtctgaagtttacctcatcagtcctgacaccaaaaaaatagcattggagaaaaattttaaggagatatcctt

SEQ ID NO: 48268 - DNA, 120 bp, Artificial Sequence
  ENSG00000065882_11 (sequence is synthesized)
ttgctctcagggcatcagacacgtggaccactttgggtttatctgtcgggagtcttccggaggtggcggctttcattttgtctgttacgtgtttcagtgcacaaatgaggctctggttga

SEQ ID NO: 48269 - DNA, 120 bp, Artificial Sequence
  ENSG00000065882_12 (sequence is synthesized)
tgaaattatgatgaccctgaaacaggccttcacggtggccgcagtgcagcagacagctaaggcgccagcccagctgtgtgagggctgccccctgcaaagcctgcacaagctctgtgagag

SEQ ID NO: 48270 - DNA, 120 bp, Artificial Sequence
  ENSG00000065882_13 (sequence is synthesized)
gatagagggaatgaattcttccaaaacaaaactagaactgcaaaagcacctgacgacattaaccaatcaggagcaggcgactatttttgaagaggttcagaaattgagaccgagaaatga

SEQ ID NO: 48271 - DNA, 120 bp, Artificial Sequence
  ENSG00000065882_14 (sequence is synthesized)
gcagcgagagaatgaattgattatttcttttctgagatgtttatatgaagagaaacagaaagaacacatccatattggggagatgaagcagacatcgcagatggcagcagagaatattgg

SEQ ID NO: 48272 - DNA, 120 bp, Artificial Sequence
  ENSG00000065882_15 (sequence is synthesized)
aagtgaattaccacccagtgccactcgatttaggctagatatgctgaaaaacaaagcaaagagatctttaacagagtctttagaaagtattttgtcccggggtaataaagccagaggcct

SEQ ID NO: 48273 - DNA, 120 bp, Artificial Sequence
  ENSG00000065882_16 (sequence is synthesized)
gcaggaacactccatcagtgtggatctggatagctccctgtctagtacattaagtaacaccagcaaagagccatctgtgtgtgaaaaggaggccttgcccatctctgagagctcctttaa

SEQ ID NO: 48274 - DNA, 120 bp, Artificial Sequence
  ENSG00000065882_17 (sequence is synthesized)
gctcctcggctcctcggaggacctgtccagtgactcggagagtcatctcccagaagagccagctccgctgtcgccccagcaggccttcaggaggcgagcaaacaccctgagtcacttccc

SEQ ID NO: 48275 - DNA, 120 bp, Artificial Sequence
  ENSG00000065882_18 (sequence is synthesized)
catcgaatgccaggaacctccacaacctgcccgggggtccccgggggtttcgcaaaggaaacttatgaggtatcactcagtgagcacagagacgcctcatgaacgaaaggactttgaatc

SEQ ID NO: 48276 - DNA, 120 bp, Artificial Sequence
  ENSG00000065882_19 (sequence is synthesized)
caaagcaaaccatcttggtgattctggtgggactcctgtgaagacccggaggcattcctggaggcagcagatattcctccgagtagccaccccgcagaaggcgtgcgattcttccagcag

SEQ ID NO: 48277 - DNA, 120 bp, Artificial Sequence
  ENSG00000065882_20 (sequence is synthesized)
atatgaagattattcagagctgggagagcttcccccacgatctcctttagaaccagtttgtgaagatgggccctttggccccccaccagaggaaaagaaaaggacatctcgtgagctccg

SEQ ID NO: 48278 - DNA, 120 bp, Artificial Sequence
  ENSG00000065882_21 (sequence is synthesized)
agagctgtggcaaaaggctattcttcaacagatactgctgcttagaatggagaaggaaaatcagaagctccaagcctctgaaaatgatttgctgaacaagcgcctgaagctcgattatga

SEQ ID NO: 48279 - DNA, 120 bp, Artificial Sequence
  ENSG00000065882_22 (sequence is synthesized)
agaaattactccctgtcttaaagaagtaactacagtgtgggaaaagatgcttagcactccaggaagatcaaaaattaagtttgacatggaaaaaatgcactcggctgttgggcaaggtgt

SEQ ID NO: 48280 - DNA, 120 bp, Artificial Sequence
  ENSG00000065882_23 (sequence is synthesized)
gtttcccagcaaacagcagccaaaggatgtgccatacaaagaactcttaaagcagctgacttcccagcagcatgcgattcttattgaccttgggcgaacctttcctacacacccatactt

SEQ ID NO: 48281 - DNA, 120 bp, Artificial Sequence
  ENSG00000065882_24 (sequence is synthesized)
ctctgcccagcttggagcaggacagctatcgctttacaacattttgaaggcctactcacttctagaccaggaagtgggatattgccaaggtctcagctttgtagcaggcattttgcttct

SEQ ID NO: 48282 - DNA, 120 bp, Artificial Sequence
  ENSG00000065882_25 (sequence is synthesized)
tcatatgagtgaggaagaggcgtttaaaatgctcaagtttctgatgtttgacatggggctgcggaaacagtatcggccagacatgattattttacagatccagatgtaccagctctcgag

SEQ ID NO: 48283 - DNA, 120 bp, Artificial Sequence
  ENSG00000065882_26 (sequence is synthesized)
gttgcttcatgattaccacagagacctctacaatcacctggaggagcacgagatcggccccagcctctacgctgccccctggttcctcaccatgtttgcctcacagttcccgctgggatt

SEQ ID NO: 48284 - DNA, 120 bp, Artificial Sequence
  ENSG00000065882_27 (sequence is synthesized)
cgtagccagagtctttgatatgatttttcttcagggaacagaggtcatatttaaagtggctttaagtctgttgggaagccataagcccttgattctgcagcatgaaaacctagaaaccat

SEQ ID NO: 48285 - DNA, 120 bp, Artificial Sequence
  ENSG00000065882_28 (sequence is synthesized)
agttgactttataaaaagcacgctacccaaccttggcttggtacagatggaaaagaccatcaatcaggtatttgaaatggacatcgctaaacagttacaagcttatgaagttgagtacca

SEQ ID NO: 48286 - DNA, 120 bp, Artificial Sequence
  ENSG00000065882_29 (sequence is synthesized)
cgtccttcaagaagaacttatcgattcctctcctctcagtgacaaccaaagaatggataaattagagaaaaccaacagcagcttacgcaaacagaaccttgacctccttgaacagttgca

SEQ ID NO: 48287 - DNA, 120 bp, Artificial Sequence
  ENSG00000065882_30 (sequence is synthesized)
ggtggcaaatggtaggatccaaagccttgaggccaccattgagaagctcctgagcagtgagagcaagctgaagcaggccatgcttaccttagaactggagcggtcggccctgctgcagac

SEQ ID NO: 48288 - DNA, 120 bp, Artificial Sequence
  ENSG00000065882_31 (sequence is synthesized)
ggtggaggagctgcggcggcggagcgcagagcccagcgaccgggagcctgagtgcacgcagcccgagcccacgggcgactgacagctctgcaggagagattgcaacaccatcccacactg

SEQ ID NO: 48289 - DNA, 120 bp, Artificial Sequence
  ENSG00000065882_32 (sequence is synthesized)
tccaggccttaactgagagggacagaagacgctggaaggagagaaggaagcgggaagtgtgcttctcagggaggaaaccggcttgccagcaagtagattcttacgaactccaacttgcaa

SEQ ID NO: 48290 - DNA, 120 bp, Artificial Sequence
  ENSG00000065882_33 (sequence is synthesized)
ttcagggggcatgtcccagtgttttttttgttgtttttagatactaaatcgtcccttctccagtcctgattactgtacacagtagctttagatggcgtggacgtgaataaatgcaactta

SEQ ID NO: 48291 - DNA, 120 bp, Artificial Sequence
  ENSG00000065882_34 (sequence is synthesized)
tgttttcttgttggttcctttttgagtgtcactgtgtttgtaaagagcattcacaatacggtggaatttcaaaagctggaagagctcgagatcatgcctcaggcaaaggcgtgggtccat

SEQ ID NO: 48292 - DNA, 120 bp, Artificial Sequence
  ENSG00000065882_35 (sequence is synthesized)
cgttcttccgagagggtttgtgtggcgactacaccctcagcgtccctggcaaggtgcagttggctctcgcccattcttgttatggaaacctaagatgatcattgggaagatcagtgatct

SEQ ID NO: 48293 - DNA, 120 bp, Artificial Sequence
  ENSG00000065882_36 (sequence is synthesized)
tgggtcattgatccctggctcagaggatagcggtttccatcataaaccaagatgatgagttcagcctttatccctcgtggttccactagatgtaacttaaaggagttaacatttgaggac

SEQ ID NO: 48294 - DNA, 120 bp, Artificial Sequence
  ENSG00000065882_37 (sequence is synthesized)
tttgttctacatcagattttactatttgaatgtttaagatcactttattgaatttgaagatcatcaaattaaataaaatgatttatttaatttggatatcctgatcactgtcaagtgaaa

SEQ ID NO: 48295 - DNA, 120 bp, Artificial Sequence
  ENSG00000065882_38 (sequence is synthesized)
tggatctctctctttggtatttaaggaagtttgtctttaaaaaaaaaatagagtgttttcatacatttttgcttatcccataagtacagttgatcaaagtcatagtaggtaaatgcttta

SEQ ID NO: 48296 - DNA, 120 bp, Artificial Sequence
  ENSG00000065882_39 (sequence is synthesized)
tgggacagctgacaccttttagaccctaccaggtattgctagcatgtgagctgcagttgtggggtctgagatatttctttgtggtagtttcatacccatactatagagtcatgtatttat

SEQ ID NO: 48297 - DNA, 120 bp, Artificial Sequence
  ENSG00000065882_40 (sequence is synthesized)
ttttgcctgttgtgtgatgtaatgcaatcatgttcctttgagtctccatcccttggaaatctgacttcttgcagaaggagtaggcacatcaagatattcaggggtgccccaagagtctgg

SEQ ID NO: 48298 - DNA, 120 bp, Artificial Sequence
  ENSG00000065882_41 (sequence is synthesized)
gactttcaaaaaaaaaagatcaggctgaaactgcagtcagatttatgacagctgacagtttttcagaggtcgcacacagtgactctcctctctcaggatgacgaggacctgtgccttcaa

SEQ ID NO: 48299 - DNA, 120 bp, Artificial Sequence
  ENSG00000065882_42 (sequence is synthesized)
caagcaaaatgctgctcacggttgtcctgcttgcagccagtcactgtgtaaagcctctctgatgtgcacttaagagtgggttgctttctcacaaagatggggttctgtgcagtcacaggt

SEQ ID NO: 48300 - DNA, 120 bp, Artificial Sequence
  ENSG00000065882_43 (sequence is synthesized)
cacttccttgacaacacaatcatttctgatctttatcactgtaaccacgtcttctattccataggagtttcttttgattctctcagttgcggggggcatctcttaatcctggggtaaaag

SEQ ID NO: 48301 - DNA, 120 bp, Artificial Sequence
  ENSG00000065882_44 (sequence is synthesized)
gagagattgccatacttagactcactgtgagtctccccggccatttcacgaggagaccacagtgctgccaccagtgcctaaacaggtggctggcattcgagacttcctcctgttccctgg

SEQ ID NO: 48302 - DNA, 120 bp, Artificial Sequence
  ENSG00000065882_45 (sequence is synthesized)
gtcagaggatagcggtttccatcataaaccaagatgatgagttcagcctttatccctcgtggttccgctagatgtaacttataggagttaacatttgaggactttgttctgcatcagatc

SEQ ID NO: 48303 - DNA, 120 bp, Artificial Sequence
  ENSG00000065882_46 (sequence is synthesized)
ttactatttgaatgtttactgttggattttgggcatcttattactgttactcaaaaacattgactctgcatcaagaaagaaacaagaaagcaataaaacaagaaataattcatgctcaca

SEQ ID NO: 48304 - DNA, 120 bp, Artificial Sequence
  ENSG00000065882_47 (sequence is synthesized)
tcacctgtgggtgagtctaagcaccgcccaggtcagtcttcagctcctgctcctccacctcgtcttaacccctccgcctcctcgccaaacttttttaagtacctaaaacataattccagt

SEQ ID NO: 48305 - DNA, 120 bp, Artificial Sequence
  ENSG00000065882_48 (sequence is synthesized)
ccttctcttattagaggggaaacatttcctgtctctccgtggtgattcttatttttatacctgtagctcttaccagaacagggtattgtttgatagtctaagattagtcaggggtgggtt

SEQ ID NO: 48306 - DNA, 120 bp, Artificial Sequence
  ENSG00000065882_49 (sequence is synthesized)
ttgtgactttggagtcctccttaacttctgataatcacggggcttccctagatgccttcatcttgtgggatgtggatccgatccgtgtagatccgatcgctcaccatgagggtctcccta

SEQ ID NO: 48307 - DNA, 120 bp, Artificial Sequence
  ENSG00000065882_50 (sequence is synthesized)
gagcagacatttggaggacttggctgaggagccacaggtgtatgtttctcatgaattgccttcctcagccactctgggttgtgagtattgactgatgctgactgtgggcctctgggccct

SEQ ID NO: 48308 - DNA, 120 bp, Artificial Sequence
  ENSG00000065882_51 (sequence is synthesized)
ataagaactaaaaataaatttttatgtctttaaaaatgagaggttttttttttttttttggcttttggaaggtgagtatcaaaaacctgtacttaatgttaccttggaattatttctaga

SEQ ID NO: 48309 - DNA, 120 bp, Artificial Sequence
  ENSG00000065882_52 (sequence is synthesized)
tgtttcttatatccttttgtcccaagtaaaattattaccttctcagtgcgtagtttttcttatttattacttctagtaccaagtgtagagctaagcgtagaggagacgcttcacaggtgc

SEQ ID NO: 48310 - DNA, 120 bp, Artificial Sequence
  ENSG00000065882_53 (sequence is synthesized)
tgcagacgcctgcctgtacttgtggggtttttctcagttttagtacgtgatgacttttctttctataacaggtatttgaaatggacatcgctaaacagttacaagcttatgaagttgagt

SEQ ID NO: 48311 - DNA, 120 bp, Artificial Sequence
  ENSG00000065882_54 (sequence is synthesized)
tttagctccactgatttttctgtccttagggaaaaccagatggtcattgacatatcattatttgtctttagttatttacttatgactatttagtaagcagctaatacacatctgaagctt

SEQ ID NO: 48312 - DNA, 120 bp, Artificial Sequence
  ENSG00000065882_55 (sequence is synthesized)
aacccatagttgatgtatctaacctaacagaattttcagagaaaagaagtgaaataagaactaaaaataaatttttatgtctttaaaaatgagaggttttttttttttttttggcttttg

SEQ ID NO: 48313 - DNA, 120 bp, Artificial Sequence
  ENSG00000065882_56 (sequence is synthesized)
gagaaatttttccttcggctcataaatgggtaaaaagacgttaacaaacaagcagactccactttggaaatgatagcccttctattgcagagtaatttgaagctctctgaagctcactct

SEQ ID NO: 48314 - DNA, 120 bp, Artificial Sequence
  ENSG00000065882_57 (sequence is synthesized)
acagctgttccccagcctggtagtgaacccagaggcctgtcttgctgtgcagtgggacaggaagttgcatttgggagtctcatagaacacactggaagatgtgttttagcttggccagtt

SEQ ID NO: 48315 - DNA, 120 bp, Artificial Sequence
  ENSG00000065882_58 (sequence is synthesized)
agatgggctctgaatagaggaaggcaggacactcttgagatgggatggggtttctcacagcaccgtacagggaccacctgcaagatctcttgaggggcttgtgaaaaacacatccctgag

SEQ ID NO: 48316 - DNA, 120 bp, Artificial Sequence
  ENSG00000065882_59 (sequence is synthesized)
gtcaccattcttgacctgctgcttattgagtttctgatgcctgggatgtgcaggtttaacaagcccccagatgatcctaataggattcctgcctgaaaattgctgggtgaaggctcttcc

SEQ ID NO: 48317 - DNA, 120 bp, Artificial Sequence
  ENSG00000065882_60 (sequence is synthesized)
ccctccaagtgataaagaaggaaaagattgatcctggaagaacatccgttagatgagcaaaattttgtggagcacttcatgaagaggaattactaggtcatttagaaatatgtttgaatt

SEQ ID NO: 48318 - DNA, 120 bp, Artificial Sequence
  ENSG00000065882_61 (sequence is synthesized)
gtggatcatcttgtaggcctttctggcatatttctccacttagatccacaagacacatcgaatgtctttttataaaggggttttttaatgcccatgtttgaccctctccacttaacagtc

SEQ ID NO: 48319 - DNA, 80 bp, Artificial Sequence
  ENSG00000065882_62 (sequence is synthesized)
cgcgggcgcgacctctcggggcagtgacgaactgggtggagcccgccgccgccgccgccgccgccggggagagcgatgcc

SEQ ID NO: 48320 - DNA, 120 bp, Artificial Sequence
  ENSG00000065882_63 (sequence is synthesized)
ccgcgggcccacgggccggcggcgggagtgagcgggagccggcgggcgaagagccgccgcccggcccgcgatgtcaccattgttcagctgggtggccaaggtgcctgagatcatcagctc

SEQ ID NO: 48321 - DNA, 120 bp, Artificial Sequence
  ENSG00000065882_64 (sequence is synthesized)
tcatgaacgaaacatctcctaccgtaatgccctgcggaaaaaacttcattcttcttcctctgtgccaaattttctaaaatttctggctcctgtagatgaaaataacacctctgattttat

SEQ ID NO: 48322 - DNA, 120 bp, Artificial Sequence
  ENSG00000065882_65 (sequence is synthesized)
tgctatgtgttcaaagccgatgatcaaacaaaatgctcatcatcactgtaggggacctttgaaagagctgccggagaaggtgaggaagaaagccctgcctggaaagcaacagtgaaccac

SEQ ID NO: 48323 - DNA, 120 bp, Artificial Sequence
  ENSG00000065882_66 (sequence is synthesized)
cagtgtcagcaacgtgaagcttgctgcaaggcctgcagtcatgatgaacccagcagcttctagttcatcccagtggccctgagactatttatcctgtgacttcacacgcgcttggaagtt

SEQ ID NO: 48324 - DNA, 120 bp, Artificial Sequence
  ENSG00000065882_67 (sequence is synthesized)
ttgttgtgatcttcgctgagtctgtgcggaaatcacaggctagattttagattttttacttttcagcatgtgacttaaagttctgttgacttggggaaagggctgataatcttgtgctaa

SEQ ID NO: 48325 - DNA, 88 bp, Artificial Sequence
  ENSG00000065882_68 (sequence is synthesized)
ttctgttgacttggggaaagggctgataatcttgtgctaaatcactgatggaatataaattaaaatctccatctctcagtcaatccaa

SEQ ID NO: 48326 - DNA, 77 bp, Artificial Sequence
  ENSG00000065882_69 (sequence is synthesized)
gaatactatgcagccataaaaagaaacgagatcacgtcctttctaggaaggaagagaaaaccaaacaccacatgttc

SEQ ID NO: 48327 - DNA, 120 bp, Artificial Sequence
  ENSG00000065882_70 (sequence is synthesized)
aacaatgagaacacgtggacacagggaggagaacaacacacactggggcctgtcacggggcggggtgaggggagggagagcattaggaaaaacagctaatacatgctaggcttgatatct

SEQ ID NO: 48328 - DNA, 120 bp, Artificial Sequence
  ENSG00000065883_0 (sequence is synthesized)
acttccgcgttgcgctgcccgagccgagagcgcggccaaggccgctcccccacccccgggggcacttggaggactcgggactcccccgcaggtcagcgcccggcgcatctggtgttttcg

SEQ ID NO: 48329 - DNA, 120 bp, Artificial Sequence
  ENSG00000065883_1 (sequence is synthesized)
ctgccgaggataggacgacgagcgcaatcgggagctccgccgcccggattcctgcttccctggggcccggaggctgctgcgtaccccactgtgacctggaacccagggacccgagtcccg

SEQ ID NO: 48330 - DNA, 120 bp, Artificial Sequence
  ENSG00000065883_2 (sequence is synthesized)
acccggattatcgtggcgcttttcccggccggctctggtgctcggtgtccctccgccgccgctcccgtttccggcgggggagatggccaggatctgacccgggaggaggccgcacccgcg

SEQ ID NO: 48331 - DNA, 120 bp, Artificial Sequence
  ENSG00000065883_3 (sequence is synthesized)
ccgcgctctgcggctggctctaggcgatgccgagcagctcggacacggcgctggggggaggcgggggcctgagctgggcggagaagaagttggaggaacgccgcaagcggaggcgattcc

SEQ ID NO: 48332 - DNA, 120 bp, Artificial Sequence
  ENSG00000065883_4 (sequence is synthesized)
ttcctgtcccctcagcagccgccgctgctgttgccgctcctgcagccgcagctcctgcaaccgccgccgcccccgccgcctctgctcttcctggctgctcccggcacggccgccgccgca

SEQ ID NO: 48333 - DNA, 120 bp, Artificial Sequence
  ENSG00000065883_5 (sequence is synthesized)
cgcagccgccgccgccgcggcctcctcctcttgcttcagcccgggcccccctctggaggtcaagcggctggcgagaggcaagaggcgcgcaggagggcggcagaagcggcgtcgcgggcc

SEQ ID NO: 48334 - DNA, 120 bp, Artificial Sequence
  ENSG00000065883_6 (sequence is synthesized)
ggcaggaggcggagaagcgtcgggtcttctcgctgccccagccgcagcaggacggcggtggcggtgctagtagcggcgggggtgtgaccccgctggtggaatacgaggatgtgagctccc

SEQ ID NO: 48335 - DNA, 120 bp, Artificial Sequence
  ENSG00000065883_7 (sequence is synthesized)
atacgaggatgtgagctcccagtccgagcaggggctgctgctggggggggccagcgcggcaacggcggcgacggctgccgggggaacggggggcagcggcgggagtccggcctcctcctc

SEQ ID NO: 48336 - DNA, 120 bp, Artificial Sequence
  ENSG00000065883_8 (sequence is synthesized)
ccgccgcagcagcagtggccgcagcaaggagcgccaccgcgagcaccggcggcgggatgggcagcgcggtggcagcgaggcctccaagtcccgcagccgccacagccacagcggcgagga

SEQ ID NO: 48337 - DNA, 120 bp, Artificial Sequence
  ENSG00000065883_9 (sequence is synthesized)
gcagccgccacagccacagcggcgaggaacgggccgaggtcgccaagagcggcagcagcagcagcagcggcggccgccggaaaagcgcttcggccacatccagcagcagtagcagccgca

SEQ ID NO: 48338 - DNA, 120 bp, Artificial Sequence
  ENSG00000065883_10 (sequence is synthesized)
aggaccgggactcgaaggcccaccgcagccggactaagtcgtccaaggagccgccttcggcctacaaggaaccgcccaaggcctaccgggaggacaagaccgagcctaaggcctacaggc

SEQ ID NO: 48339 - DNA, 120 bp, Artificial Sequence
  ENSG00000065883_11 (sequence is synthesized)
ggcggcggtccctcagcccactgggaggccgggacgacagcccggtgtcccacagggcctctcagagcctgaggagccgcaagtcccccagcccggcaggaggtggcagcagcccctatt

SEQ ID NO: 48340 - DNA, 120 bp, Artificial Sequence
  ENSG00000065883_12 (sequence is synthesized)
ctcggcggctgccgcgctccccgagcccctacagtcgccgccgctcccccagctacagccgccacagctcctacgagcggggcggcgacgtgtcccctagtccctacagcagcagcagct

SEQ ID NO: 48341 - DNA, 120 bp, Artificial Sequence
  ENSG00000065883_13 (sequence is synthesized)
ggcgccgctctcgcagtccctacagccctgtgctcagacggtctggaaaatcccgaagcagaagcccgtattcatctaggcattcaagatctcgtagcaggcacagattgtctagatcca

SEQ ID NO: 48342 - DNA, 120 bp, Artificial Sequence
  ENSG00000065883_14 (sequence is synthesized)
gaagtcgtcattctagtatttctcctagcacactaactctgaagagtagcctggcagctgaattgaacaagaataaaaaagcacgagcagcagaggcagcaagagccgcagaagcagcga

SEQ ID NO: 48343 - DNA, 120 bp, Artificial Sequence
  ENSG00000065883_15 (sequence is synthesized)
aagctgcagaagcaactaaggctgctgaggctgctgccaaggctgcaaaagcttcaaacacttctacacctaccaaggggaacacggaaactagtgccagtgcatcacaaacaaaccatg

SEQ ID NO: 48344 - DNA, 120 bp, Artificial Sequence
  ENSG00000065883_16 (sequence is synthesized)
tgaaggatgtgaagaaaattaaaattgaacatgcaccttctccctcaagtggtggaactttaaaaaatgacaaagcaaaaacaaagccacctcttcaggtaacgaaggtggaaaataatt

SEQ ID NO: 48345 - DNA, 120 bp, Artificial Sequence
  ENSG00000065883_17 (sequence is synthesized)
tgattgtagataaagccaccaagaaagcagtcatagttggaaaggagagtaaatctgctgctacaaaggaggaatcagtatctcttaaagagaaaaccaaaccacttacaccaagcatag

SEQ ID NO: 48346 - DNA, 120 bp, Artificial Sequence
  ENSG00000065883_18 (sequence is synthesized)
gagccaaggagaaggagcaacatgtagctttagtcacctctacattaccaccgttacctttgcctcccatgctgcctgaagataaagaagctgatagcttacgaggaaatatttcagtaa

SEQ ID NO: 48347 - DNA, 120 bp, Artificial Sequence
  ENSG00000065883_19 (sequence is synthesized)
aagcagttaaaaaagaagtagaaaagaaactccgatgtcttcttgctgatttaccgctgccccctgagctaccaggaggagatgatctttcaaagagtccagaggaaaagaaaacagcaa

SEQ ID NO: 48348 - DNA, 120 bp, Artificial Sequence
  ENSG00000065883_20 (sequence is synthesized)
cacagttacatagtaaaaggaggcctaaaatatgtgggcctcgctatggtgaaaccaaagaaaaagatattgactggggaaaacgctgcgtggataaatttgatatcatcggaattattg

SEQ ID NO: 48349 - DNA, 120 bp, Artificial Sequence
  ENSG00000065883_21 (sequence is synthesized)
gagaaggtacttacggacaagtttacaaagccagggataaagacactggagaaatggtagccttaaaaaaagtacgtctggataatgaaaaggaaggctttccaattacagcaattcgag

SEQ ID NO: 48350 - DNA, 120 bp, Artificial Sequence
  ENSG00000065883_22 (sequence is synthesized)
aaattaaaattctccggcagcttacccatcagagtattatcaatatgaaggaaatagtgactgataaagaagatgctttggatttcaagaaggacaaaggtgcattttatctggtgtttg

SEQ ID NO: 48351 - DNA, 120 bp, Artificial Sequence
  ENSG00000065883_23 (sequence is synthesized)
aatatatggaccatgatctgatgggactactggaatcaggcttggttcattttaatgaaaatcacataaagtcatttatgagacagctcatggagggtctggattattgtcataagaaga

SEQ ID NO: 48352 - DNA, 120 bp, Artificial Sequence
  ENSG00000065883_24 (sequence is synthesized)
actttttgcatagagatattaaatgttccaatatccttctaaataatagagggcagataaaacttgcagactttggacttgctcgattgtatagctcagaagaaagtcggccgtatacta

SEQ ID NO: 48353 - DNA, 120 bp, Artificial Sequence
  ENSG00000065883_25 (sequence is synthesized)
acaaggtaattactttatggtaccgtccacctgaactgctactgggagaagaacgatacacaccagccattgatgtatggagctgtggctgtatccttggcgaactcttcactaaaaaac

SEQ ID NO: 48354 - DNA, 120 bp, Artificial Sequence
  ENSG00000065883_26 (sequence is synthesized)
ctatatttcaagcaaatcaggaacttgcacaactagaattaataagccgaatatgtgggagtccatgtcctgcagtgtggcctgatgtaatcaaactaccatatttcaacaccatgaaac

SEQ ID NO: 48355 - DNA, 120 bp, Artificial Sequence
  ENSG00000065883_27 (sequence is synthesized)
caaagaagcaatatcgtcgaaagttaagagaagaatttgtttttattcctgcagctgcgctagacttatttgattacatgcttgccttggatcctagtaagcgctgcactgctgaacagg

SEQ ID NO: 48356 - DNA, 120 bp, Artificial Sequence
  ENSG00000065883_28 (sequence is synthesized)
ctcttcagtgcgagttcctccgagatgtggaaccctcaaaaatgcctccaccagatctccctttatggcaagattgtcatgagttatggagtaaaaagcgaagaagacagaagcagatgg

SEQ ID NO: 48357 - DNA, 120 bp, Artificial Sequence
  ENSG00000065883_29 (sequence is synthesized)
gcatgactgatgatgtttccacaattaaagcccccaggaaggacttgtctctgggcttggatgacagcagaaccaacacaccccagggtgtgctgccatcttcacagctgaaatctcagg

SEQ ID NO: 48358 - DNA, 120 bp, Artificial Sequence
  ENSG00000065883_30 (sequence is synthesized)
gcagctcaaatgtggcacctgtaaaaacaggccctggacagcacttaaaccacagtgaattggcaattctactaaacctactacaatctaaaacaagtgttaatatggctgattttgtcc

SEQ ID NO: 48359 - DNA, 120 bp, Artificial Sequence
  ENSG00000065883_31 (sequence is synthesized)
aagtgttgaacattaaggtaaactctgagactcaacagcagctaaataaaataaaccttcctgctggaattttggcaacaggtgaaaaacagacagatccatcaacaccacaacaggagt

SEQ ID NO: 48360 - DNA, 120 bp, Artificial Sequence
  ENSG00000065883_32 (sequence is synthesized)
cttcgaaaccgttgggaggaattcagccttcttctcagaccatccagcctaaagtggagactgatgctgcccaggcggctgtgcagagtgcatttgcagttctgttgactcagttaataa

SEQ ID NO: 48361 - DNA, 120 bp, Artificial Sequence
  ENSG00000065883_33 (sequence is synthesized)
aggctcagcagtcaaagcagaaagatgtgctactagaagagagggaaaatggatcgggacatgaagcgtcattacaactcaggccacctccagaacctagcactccggtgtcgggacaag

SEQ ID NO: 48362 - DNA, 120 bp, Artificial Sequence
  ENSG00000065883_34 (sequence is synthesized)
atgacctcatccagcatcaagatatgaggatcttggagctaacgccagaaccagaccggcctcgaattctgcctcctgaccaacgacctcccgagcctcctgaaccaccaccagtcactg

SEQ ID NO: 48363 - DNA, 120 bp, Artificial Sequence
  ENSG00000065883_35 (sequence is synthesized)
aggaagatctagattatcggacagaaaaccagcatgtacccaccaccagttcttcattaactgaccctcatgccggagtgaaggcagccctgttacagctgcttgctcagcatcagcccc

SEQ ID NO: 48364 - DNA, 120 bp, Artificial Sequence
  ENSG00000065883_36 (sequence is synthesized)
aggatgaccccaaaagagaaggtgggattgattatcaagcaggagacacttacgtgtccacttcagactacaaggacaactttggatcctcttctttctcttctgctccttatgttagca

SEQ ID NO: 48365 - DNA, 120 bp, Artificial Sequence
  ENSG00000065883_37 (sequence is synthesized)
atgatggtctaggaagcagttctgctccaccactagaacgacgtagtttcattggaaattcagatattcagtctttggataactacagtactgcttcatctcattctggtggtccacctc

SEQ ID NO: 48366 - DNA, 120 bp, Artificial Sequence
  ENSG00000065883_38 (sequence is synthesized)
agccttctgccttttctgagtcatttcccagttcagtagctggatatggagacatttacctcaatgctggtcccatgttgtttagtggagacaaggaccatagatttgaatatagccatg

SEQ ID NO: 48367 - DNA, 120 bp, Artificial Sequence
  ENSG00000065883_39 (sequence is synthesized)
cagagagtactcatcctttgccagcaaagatgcacaactataactatggtggtaacttacaggaaaatccgagtggccccagcctcatgcatggacagacctggacttctcctgcccaag

SEQ ID NO: 48368 - DNA, 120 bp, Artificial Sequence
  ENSG00000065883_40 (sequence is synthesized)
gacctggatattcacaaggatacaggggacatattagcacatcaactggcagaggcagaggcagagggttaccatactgagtatctgtttttcctcaggcacatcatttttatctggaaa

SEQ ID NO: 48369 - DNA, 120 bp, Artificial Sequence
  ENSG00000065883_41 (sequence is synthesized)
gacttttctagctgcaatttaaggcagcaatccaagagacttgaataataataattcaacaacagctttatttttatgtggagaagggtcttgcatacaatagtttaaaaaagacaaaaa

SEQ ID NO: 48370 - DNA, 120 bp, Artificial Sequence
  ENSG00000065883_42 (sequence is synthesized)
aaacctttgcttaaattcatgctgttctaaaaactagatcgattgtacatcttcacaaattctagttaacaattttattttgtattcttgcagttttaagtggatgctaattttaggggc

SEQ ID NO: 48371 - DNA, 120 bp, Artificial Sequence
  ENSG00000065883_43 (sequence is synthesized)
ataagccttttatggccctcttgcagatcttctgaactatgcacatttgtgctttttttgtaagtttggaccaacttttatgtaacaaacagcccctccccacctccagttttacaacaa

SEQ ID NO: 48372 - DNA, 120 bp, Artificial Sequence
  ENSG00000065883_44 (sequence is synthesized)
tcagaaagggcactgatttatttggtatttttctttttacaaagctacctttagtcaaaggtcactgtcagtctttgcacctgctttcagtgttattgtgaaaggtgtactttgtgctca

SEQ ID NO: 48373 - DNA, 120 bp, Artificial Sequence
  ENSG00000065883_45 (sequence is synthesized)
tttcagaaaataaaacacaacctttctcttgatgcaacagttttataaaaaaaaaaatggtcaacgttatttttgttttgttttgcagattatcaaagcctagcaaaatgcatttaaatg

SEQ ID NO: 48374 - DNA, 120 bp, Artificial Sequence
  ENSG00000065883_46 (sequence is synthesized)
aaatagtgggttttatatgaaaactatgggtggggtggggagggaaagtaagtgccttaacaggtaagcttaaggtctgaaaaaaatagttaacttttacccccatttgtcttttaaagg

SEQ ID NO: 48375 - DNA, 120 bp, Artificial Sequence
  ENSG00000065883_47 (sequence is synthesized)
gaatcaatgcattaaaaaggcaagaaactctgaagtttcaggggctgcctgttcagttcctgttaggtccattccctctgcttgtcacactttctccttttctgcctgtctttgggctgt

SEQ ID NO: 48376 - DNA, 120 bp, Artificial Sequence
  ENSG00000065883_48 (sequence is synthesized)
gttgcctttcactaccaccttctcttgataggggagtgagagcaaagaaagggagtagaactgcaatcagtacatattgtttgagaagttctacaaagttttgtcatttaaatggttgaa

SEQ ID NO: 48377 - DNA, 120 bp, Artificial Sequence
  ENSG00000065883_49 (sequence is synthesized)
agtaatagctccaggagaattttagagtaccattttctttcaggctgccatattatccctgtttccatttgccatggataattggagggtcatggtatagaagcaagagttaataacaga

SEQ ID NO: 48378 - DNA, 120 bp, Artificial Sequence
  ENSG00000065883_50 (sequence is synthesized)
acttgcctaaatgtgttaaagttcatgggggaggggtggcaaataccgtattttaagttatgcaattgcccttttaagaaagtcaattctattcacttgttaactagaaacattgcttag

SEQ ID NO: 48379 - DNA, 120 bp, Artificial Sequence
  ENSG00000065883_51 (sequence is synthesized)
attgaatttattgaagcaaaaagaaaaggcaatgagagagaacttttatcttccttcctgtcacattctgtaaagttgattatgacttctgccagacttagagcaacaactttagttcat

SEQ ID NO: 48380 - DNA, 120 bp, Artificial Sequence
  ENSG00000065883_52 (sequence is synthesized)
tttaacatttttttttaatgaagagcatcaaagaatggagtagtccttatttaaactgtaatggtgtcaagtctcactgtgtgcacactctcacacatacacacacaattatactaattc

SEQ ID NO: 48381 - DNA, 120 bp, Artificial Sequence
  ENSG00000065883_53 (sequence is synthesized)
tagaaaggaaccaaaggtaaataaccagtgtttccattatcactaaatggaaaaattgactggaagttagagttgtgccaattaatcattttgttcatcaactgttctggtaacttattt

SEQ ID NO: 48382 - DNA, 120 bp, Artificial Sequence
  ENSG00000065883_54 (sequence is synthesized)
ttttttattggaatcttaaattggaacaactgttacagaatgtatattgctccagttctaaagccagttaaccctgtgccctctaacttatgaaccttcatttcaaaacagtatgtggga

SEQ ID NO: 48383 - DNA, 120 bp, Artificial Sequence
  ENSG00000065883_55 (sequence is synthesized)
agtcctgtagtttgataagagtaaaattattttaaagaggataatttaccattttactactataaaataagttgatatcagttgaccattttattttttgatggactctttttgttggga

SEQ ID NO: 48384 - DNA, 120 bp, Artificial Sequence
  ENSG00000065883_56 (sequence is synthesized)
gaaagaaatgaatggaagaaaaaaatatgttgcttttatttgaatattgattactaacaacttataaactacattgcaggaaatgaagaaatattttgaaattagcaaaatagcaacagt

SEQ ID NO: 48385 - DNA, 120 bp, Artificial Sequence
  ENSG00000065883_57 (sequence is synthesized)
attcaagtatctgaaattttaatatggtgagtcttagagctttagactttcctataagtgacagtatctaagttattcttaatagtcacacttgataattctgctgaccataagcagcta

SEQ ID NO: 48386 - DNA, 120 bp, Artificial Sequence
  ENSG00000065883_58 (sequence is synthesized)
acctacagttgaagatatttatgtgacatgaatagcctgtgttttaaaaattaaatattttatataaaattgaactgtgtttggatagtttttctaatcaaacatttcagttatatattt

SEQ ID NO: 48387 - DNA, 120 bp, Artificial Sequence
  ENSG00000065883_59 (sequence is synthesized)
atgttgggagagtggctgggaggacagggaaattgttgctttgacattgaaaatttgaactagaacttctaatattatccttacacagcactactgtgagacatactagtcttttatatg

SEQ ID NO: 48388 - DNA, 120 bp, Artificial Sequence
  ENSG00000065883_60 (sequence is synthesized)
tcacttagaagaaaaaatgttgccaattaagccacaatacaatgctaagacgtcatcaattgtaagctgcatcccagattcagacatattatatgaaaatatgtcttataattgatgaaa

SEQ ID NO: 48389 - DNA, 120 bp, Artificial Sequence
  ENSG00000065883_61 (sequence is synthesized)
tatgatagtaaaaaattttaatgcttcccttcatagcatttaatattttaattcagtgaatttggattaatagaacaaagttgggaaatcactagttctgtaggttataacagcagtcat

SEQ ID NO: 48390 - DNA, 120 bp, Artificial Sequence
  ENSG00000065883_62 (sequence is synthesized)
cgctgaaaatttgagtgaaatctaaagaacacaaaatattgcttaaattttttggaaaaaagcaggtaagtcagactgcaagttaagaagacaaaaatataaaagatttgacctgccaaa

SEQ ID NO: 48391 - DNA, 120 bp, Artificial Sequence
  ENSG00000065883_63 (sequence is synthesized)
agaagaaagtatttatcttctcccacgtgaaattcccttttgtatttactgacacagcaggtttttctgcatgcaactcagtatgtttcctacgtcttcattatttgttggagagttgca

SEQ ID NO: 48392 - DNA, 120 bp, Artificial Sequence
  ENSG00000065883_64 (sequence is synthesized)
agtcatttgtgaaaccttaaaatgccaattttaaggagttgtcatttgtggaatgtgaaataaggtaataattctagctgtgattcagagctttattctgtcagcaaatacatagtcagt

SEQ ID NO: 48393 - DNA, 120 bp, Artificial Sequence
  ENSG00000065883_65 (sequence is synthesized)
gcctacaacatgccaggtagtaatctagtccttggggtacatcaataaccgtcaacagtgttaaatcatactttcagtgtgctgacagtgagcaagatttttttaaatgtctggagaagt

SEQ ID NO: 48394 - DNA, 120 bp, Artificial Sequence
  ENSG00000065883_66 (sequence is synthesized)
tagtggtatttgctaccctcagctgtatctaaattgcacttaagtgaatgtagggcatgaaaatttgagtatctttttgaaattttaaattgaaatttggatagagatggttatggagag

SEQ ID NO: 48395 - DNA, 120 bp, Artificial Sequence
  ENSG00000065883_67 (sequence is synthesized)
aaatcaaacaactggaatagctgtttgatatcacttaaaagtgataaaattttaagttgaatctggtcagtttgcaatggcctatttgtaagaaatatcaagacttcttgagaaaaatga

SEQ ID NO: 48396 - DNA, 120 bp, Artificial Sequence
  ENSG00000065883_68 (sequence is synthesized)
aaagtgaatacataaatgcttaaaatctggtacttctgagttaaggttttgctctttgagcttaatccaatttgggatgatttttcatcctagggctttttgttttccttttttattttt

SEQ ID NO: 48397 - DNA, 120 bp, Artificial Sequence
  ENSG00000065883_69 (sequence is synthesized)
attttttctttttttaggggaaggggacttgctttcttttccaaaaaggtgaatccttcttgtaggacataggtaaaaaaaacaaagctgaaatatatgttttgaatatagatagctaat

SEQ ID NO: 48398 - DNA, 120 bp, Artificial Sequence
  ENSG00000065883_70 (sequence is synthesized)
tccctgggatataatatcctttcaattttttttttttttttggcccagtctgccttttgatgttttaaaagtctgaacgagatgtcccagtaacctaaaattatccagtcggtcttctta

SEQ ID NO: 48399 - DNA, 120 bp, Artificial Sequence
  ENSG00000065883_71 (sequence is synthesized)
ctttacaactaagaaaaataaggcttagaaagagggattgccagaaactttggcagctggattgcctgtgcttgttcctctaagccatacctaaattctgcagtaaatacttaacttttt

SEQ ID NO: 48400 - DNA, 120 bp, Artificial Sequence
  ENSG00000065883_72 (sequence is synthesized)
aatagggaaattgcttcaagataacttgaccagtgatacggtaaaataattagactattggactaatggtttaacacaagtggctttaaaaagtctgcttaaaaaacaatttttatttag

SEQ ID NO: 48401 - DNA, 120 bp, Artificial Sequence
  ENSG00000065883_73 (sequence is synthesized)
aaaaaatagaaaaataaaaacatcttcaaaatttaggagcctgaaggggctgtttgtttcatatatggataatctttgaaaaggcaagtcctgtatgtatttttcatttgttgaaagaag

SEQ ID NO: 48402 - DNA, 120 bp, Artificial Sequence
  ENSG00000065883_74 (sequence is synthesized)
attggttatcagtaggcttgcaaacataatttgcttttaagttctttcaaggttttatgcaataaaacctattgatttggaactttaaaaaaaaaaacaacaaaaaaatactttcagggt

SEQ ID NO: 48403 - DNA, 120 bp, Artificial Sequence
  ENSG00000065883_75 (sequence is synthesized)
tttgtaatttcaagtggttttttaaggggagcaatagtttgccatttaccaaaggcttctccagataatttcttaaatgtttctacttaaaaataaaagctattaataataagctgtcat

SEQ ID NO: 48404 - DNA, 120 bp, Artificial Sequence
  ENSG00000065883_76 (sequence is synthesized)
gggatccatttgaagacagggaaaatagaaaatttttattgtaaagggaagaacttatccttttaattttatggactaacagagtctgcaggtcttaactcatttcagcctgtcaaatgt

SEQ ID NO: 48405 - DNA, 120 bp, Artificial Sequence
  ENSG00000065883_77 (sequence is synthesized)
gcaattaaaaatgaattttctaattgtattcaaatgaggctctatagtgaatacagaatcactcttctaagttttttcccagttaatttgtttaaaagtgttgtactctcttgcaagaac

SEQ ID NO: 48406 - DNA, 120 bp, Artificial Sequence
  ENSG00000065883_78 (sequence is synthesized)
gtttaaaagttaagtcttgtaactgttaacatctaatgtattaatataagccatttgttttttaccatttttttaaggccgtattcaatagtctgtaaataaattgccgtaacactccca

SEQ ID NO: 48407 - DNA, 120 bp, Artificial Sequence
  ENSG00000065883_79 (sequence is synthesized)
cgccgccaccacaggaggacgacgtcgacgccgaggaggaggcggtggaggcgtgttgttgtctcgcccactcccctcccctgaacttgcacccaacgtcagggcgcgatggagtgaagc

SEQ ID NO: 48408 - DNA, 120 bp, Artificial Sequence
  ENSG00000065883_80 (sequence is synthesized)
agaattaataagacatgaagaaaatgaagtttctgataaacaaatctgactataatgaggcaacggagtataccgaaaagtgtgtggcctttagaatcttacagggttgggttctaatgc

SEQ ID NO: 48409 - DNA, 120 bp, Artificial Sequence
  ENSG00000065883_81 (sequence is synthesized)
cagctcagctacttcctgcgcttatggtttagggtcccatatgctcttaagtttttttcttcaaaagtaaaagaggactgataacatgcttagggttgtgagaattaaatgtaaataagt

SEQ ID NO: 48410 - DNA, 120 bp, Artificial Sequence
  ENSG00000065883_82 (sequence is synthesized)
tttcagtacatatttcttccctcaccttatttacagtaatgctaggttgtttataggctcaggaatgatgagacctagtgtcagtatagtacagatacatgtaaaactgatcaagagtga

SEQ ID NO: 48411 - DNA, 120 bp, Artificial Sequence
  ENSG00000065883_83 (sequence is synthesized)
taacactaatttgctttaaatggctttacaccatagtgaatgagttattttatttataatttgctttgttccagaaagtattttaggcagattacaaatattttataatagaagtagcat

SEQ ID NO: 48412 - DNA, 83 bp, Artificial Sequence
  ENSG00000065883_84 (sequence is synthesized)
ttttaggcagattacaaatattttataatagaagtagcatagattaaaaagtgatggagggaggccgggcacggtggctcata

SEQ ID NO: 48413 - DNA, 69 bp, Artificial Sequence
  ENSG00000065883_85 (sequence is synthesized)
caggtcatgaggtcatgaggtcaggagatcaagaccatccgggctaacacggtgaaaccccgtctctac

SEQ ID NO: 48414 - DNA, 69 bp, Artificial Sequence
  ENSG00000065883_86 (sequence is synthesized)
cactccatctcaaaaataaataaaaaaacaattagctgagtgtggtggcacacacctgtaatcccaggt

SEQ ID NO: 48415 - DNA, 89 bp, Artificial Sequence
  ENSG00000065883_87 (sequence is synthesized)
caagagagcgacactccatctcaaaaataaataaaaaaacaattagctgagtgtggtggcacacacctgtaatcccaggtacttgggag

SEQ ID NO: 48416 - DNA, 70 bp, Artificial Sequence
  ENSG00000065883_88 (sequence is synthesized)
tggtgaaaccccatctctacaaaaatacagaattagcgggcgtggtagctagcacctgtaatcccagccg

SEQ ID NO: 48417 - DNA, 65 bp, Artificial Sequence
  ENSG00000065883_89 (sequence is synthesized)
aaaacaaaacaaaaagtgatggaggaagagaatggaaaacacacattgggacaaaatgggatgaa

SEQ ID NO: 48418 - DNA, 120 bp, Artificial Sequence
  ENSG00000065883_90 (sequence is synthesized)
aagagaatggaaaacacacattgggacaaaatgggatgaatgaaggcagaaagctctgtgtggccatatatatatatatatatttaattgtttttaaacatgaggatcacattaccctaa

SEQ ID NO: 48419 - DNA, 120 bp, Artificial Sequence
  ENSG00000065883_91 (sequence is synthesized)
gccttctagcagtcagctgaagagcctttatatcacacaatgtacattgcttatgagataaaaaggattataatcagtgaagaaattgaaagtagattagaattaaatgaatccttttct

SEQ ID NO: 48420 - DNA, 120 bp, Artificial Sequence
  ENSG00000065883_92 (sequence is synthesized)
ctatctgccacctcacccagtacacacaaaccctcaggcctaggtggtttacacaggtgaaattttttaaactttaaaggaattagattttggttgtaccagaagataggaaaagaggga

SEQ ID NO: 48421 - DNA, 120 bp, Artificial Sequence
  ENSG00000065883_93 (sequence is synthesized)
agcttcccatattgaaagaaatgaatcatgtataccttcataaactgatggcataaaatattctgtagagttgtgcttctcaaactttttggtttcataacttctttatgctcaaattat

SEQ ID NO: 48422 - DNA, 120 bp, Artificial Sequence
  ENSG00000065883_94 (sequence is synthesized)
taaagatcccgggagtttttgtatctactgagatttaccgtattagaaattaaagatatttatgaattcattttaacataataatgttaacatgttttaaagtctataacgtctatagtt

SEQ ID NO: 48423 - DNA, 120 bp, Artificial Sequence
  ENSG00000065883_95 (sequence is synthesized)
tctaaaataaaagttgttggaatggcagatctgtctggtttaatagacatgacacttggatcctcatatctgtgatgtgctgttttcaatagcctttttggataatggtgcatattcttc

SEQ ID NO: 48424 - DNA, 120 bp, Artificial Sequence
  ENSG00000065883_96 (sequence is synthesized)
ttagaaaccacaaaaattagatgattgctagttttttacaggttgtaatgtgtaatctgaaaccatatgaaggaatattttatagtgtactatattgaaatccattgttctgtcttacac

SEQ ID NO: 48425 - DNA, 120 bp, Artificial Sequence
  ENSG00000065883_97 (sequence is synthesized)
tttgaatggatcttttatctgtgatgattttgtgatattatgcattggtcatttgaaaaatgctgcttcactgaacagatcttccaaatgtaatgttttatgttatataatttgtaccac

SEQ ID NO: 48426 - DNA, 120 bp, Artificial Sequence
  ENSG00000065883_98 (sequence is synthesized)
cactgatctcatcagaaaagcttttcagtattttgaaactgttaagctcacggtggaggatataagttttctaatattctaatttctctggaaagttccaattttataattgacaataaa

SEQ ID NO: 48427 - DNA, 120 bp, Artificial Sequence
  ENSG00000065883_99 (sequence is synthesized)
tactgttgttttccttcaagtgacaagctgactttgttcctatttgagaaaatgtctggaaaatacccaagtttggatgactgtagtttgttagttttctttgccggtaaaaatagtggt

SEQ ID NO: 48428 - DNA, 120 bp, Artificial Sequence
  ENSG00000065883_100 (sequence is synthesized)
ccatgaaaaaagcagctgcctcagttcgcaagtcaaatcattgcacatcttctcaagataactatcatattttgttgtacagtagaagtgcttatgagtatttcccatttcatcgcagag

SEQ ID NO: 48429 - DNA, 120 bp, Artificial Sequence
  ENSG00000065883_101 (sequence is synthesized)
aatattaaaaagatacatactcaaatatcagaattaaatgccattaacaatttgtactgcttcaacaagtacattctttttttgagagagtctggttctgtcacccaagctggagggcag

SEQ ID NO: 48430 - DNA, 83 bp, Artificial Sequence
  ENSG00000065883_102 (sequence is synthesized)
ctcgaactctgctggagttacaggcatgagccactgcacctcacttaacaagtacattcttaagtgaaactggcttttctccc

SEQ ID NO: 48431 - DNA, 120 bp, Artificial Sequence
  ENSG00000065883_103 (sequence is synthesized)
cttaacaagtacattcttaagtgaaactggcttttctccccaccctgaaatttgcatgataatgaagactacatcctgttaatatagtttgttgccactgagttgaatcatgttaaggtg

SEQ ID NO: 48432 - DNA, 120 bp, Artificial Sequence
  ENSG00000065883_104 (sequence is synthesized)
ctggtagttttaccactggttttgtaccattagtgcaaatcaacacatggaaaaaggcaaataatggcttagtaatagctttgacctgccagaccttgaagtgtctaggggacgctcagt

SEQ ID NO: 48433 - DNA, 120 bp, Artificial Sequence
  ENSG00000065883_105 (sequence is synthesized)
ggtccttggaccccacttgtgaaaactgttgctgtatatcagtcttacatacgaatactgatgtacaacatctaacttaacaagtggaaaatacagcattacattgaaataatagtactt

SEQ ID NO: 48434 - DNA, 120 bp, Artificial Sequence
  ENSG00000065883_106 (sequence is synthesized)
ttattaggcttggatggtattcttcctttgaatataatgatgaatatgtattaggaagtctgttgataaaattcacattaagtagcctggggagaaaatgcagatgatgatggttataga

SEQ ID NO: 48435 - DNA, 120 bp, Artificial Sequence
  ENSG00000065883_107 (sequence is synthesized)
agttctaaaaaatcaaaactgataaaactaaagcactcttagaatataaaagccacaaaaattaaaatccatagtagagaggaataaatgaatgcttccttaacaggaaatatgtgtgaa

SEQ ID NO: 48436 - DNA, 120 bp, Artificial Sequence
  ENSG00000065883_108 (sequence is synthesized)
tttgtatgtgtatatgtgagtatatttctgttatgtgtttttcaaacccaaaggcatcattcttcccagggctaaacaatgaatgtgctcccattaaaatcagaaaataaagttacccaa

SEQ ID NO: 48437 - DNA, 120 bp, Artificial Sequence
  ENSG00000065883_109 (sequence is synthesized)
cttgagcccaggagttcaagaccagactaggcaacatgacaaaaccccgtatatactaaaaacaaaaattagccgggcatggtagcacacacctgcaatcccagctccttgggaggctga

SEQ ID NO: 48438 - DNA, 120 bp, Artificial Sequence
  ENSG00000065883_110 (sequence is synthesized)
agatcgcaccactccactacagcctgggtgacagagtgagaattggtctcaaaaaataaataaataaactacataggaaataaaactacctggaatcttttcttttacaaaatcaatatg

SEQ ID NO: 48439 - DNA, 120 bp, Artificial Sequence
  ENSG00000065883_111 (sequence is synthesized)
actacctggaatcttttcttttacaaaatcaatatgacacacatatcggtacttgacaaagacaacatgaaaaattttataagatattaggccgggaacggtggctcatgcctgtaatcc

SEQ ID NO: 48440 - DNA, 120 bp, Artificial Sequence
  ENSG00000065883_112 (sequence is synthesized)
cgaggtgggagggtcacttgaggccaggagtctgaaaccatgcctggccaacatggtgaacgcccccatcccccatatctactaaaaatataaaaattaggctgggcatggtggctcatg

SEQ ID NO: 48441 - DNA, 120 bp, Artificial Sequence
  ENSG00000065883_113 (sequence is synthesized)
gagacgagacaacaccgcctgagcctcccaggaaggataggcgttttcgcgcgcgtgacacttttttagggggtcgaagggacaaagcaactgggcgaagggaacttttctcctagctgt

SEQ ID NO: 48442 - DNA, 120 bp, Artificial Sequence
  ENSG00000065883_114 (sequence is synthesized)
ggcagggaagatttctaaggaagaattaaaagtttcagacttgttgcattaatgtgttaacaggtttctctcagttgctctttgcttttctggtacaatttgggtaaacctagaggtggt

SEQ ID NO: 48443 - DNA, 120 bp, Artificial Sequence
  ENSG00000065883_115 (sequence is synthesized)
ttaagtcttaattttgaaagttctgtgaagaggtttcattgttgggaatttaggaatggactgcaacttaagatctagtattgtacaggggaataagaatcaggtactgatgtcagagtt

SEQ ID NO: 48444 - DNA, 120 bp, Artificial Sequence
  ENSG00000065883_116 (sequence is synthesized)
agatgtggattgcagatgtttcttatgattattacagaaatgggagaagcagcctttctgtaaagtttattcttttagtatgttaaaaaagcttaggtggaagccgatagttctgaatac

SEQ ID NO: 48445 - DNA, 120 bp, Artificial Sequence
  ENSG00000065883_117 (sequence is synthesized)
tgaagttaaaaaaggtatctatttagtgatattcttgtgtgggatagtttttacctgatctttcaaagtcataattatagaaggtagaaaaaatgacaagactgtggtttctttgttggt

SEQ ID NO: 48446 - DNA, 120 bp, Artificial Sequence
  ENSG00000065883_118 (sequence is synthesized)
ttgtgatgacacccagttgctaataacattataaatctgggtggtgtaacctagtgtaaccaagtgaatggctgagtacattcttatactattataagcctgtaactgcttactttaaaa

SEQ ID NO: 48447 - DNA, 120 bp, Artificial Sequence
  ENSG00000065883_119 (sequence is synthesized)
gctaagtagactttttcttagatatatacccgaaggataaaaacacaatataactagacctttaaatatcaggatctttgtccagaaatctttaaaaggtgtaatttaatttaatgaaat

SEQ ID NO: 48448 - DNA, 120 bp, Artificial Sequence
  ENSG00000065883_120 (sequence is synthesized)
tggagtaaaacttttctgtagctttcttgccttttttgttatataatattctttttaaaaagtgtgccttaaaatatacttatccactaagcaaagtgcattaaaaacaactttcgagta

SEQ ID NO: 48449 - DNA, 120 bp, Artificial Sequence
  ENSG00000065883_121 (sequence is synthesized)
ctcttagactgaaaaatcttttttttttgatgtttttcagatgatttcatccagtcataagtctaaatttgtcaataagttttatagttagatttttgttcacattctttatcaaactct

SEQ ID NO: 48450 - DNA, 120 bp, Artificial Sequence
  ENSG00000065883_122 (sequence is synthesized)
tgtttcgtaaaagtagattatatatattattgttaatggatgcaaaataaaactttctggagattggttagagaattttgactctactagtgttggtttcatcttctcactgaaaaatta

SEQ ID NO: 48451 - DNA, 120 bp, Artificial Sequence
  ENSG00000065883_123 (sequence is synthesized)
tattttatttctgaaaagccttcatacaagctctactactttttttctcagtttaaatacttgtctacagaagaagagtcagtatgtagaaatgatacctcagtttttacgataacttac

SEQ ID NO: 48452 - DNA, 120 bp, Artificial Sequence
  ENSG00000065883_124 (sequence is synthesized)
aataccaaatcagtgttacttgtttgggatagatgatgataaatactgcaagggtagggaaaaataaagaatatacaattgggtggcgagtagatattgagttattagacagtttattca

SEQ ID NO: 48453 - DNA, 120 bp, Artificial Sequence
  ENSG00000065883_125 (sequence is synthesized)
aactattgctctaatcgtgaaactatatttttaagtttggtagagttgaataatgaattgatttactttagtggtttttgagtaaacttcgtaaagggtatttgccaatattacacataa

SEQ ID NO: 48454 - DNA, 120 bp, Artificial Sequence
  ENSG00000065883_126 (sequence is synthesized)
aaggtttaaaataaaaaatgtacttattctttcaacttaaatatatgaattctattagagttttgaaaaaaatcataattgcttgcattcctattcacaatgactaataaaaccaaattt

SEQ ID NO: 48455 - DNA, 120 bp, Artificial Sequence
  ENSG00000065883_127 (sequence is synthesized)
aattttctctcgtaatttgtaatgtattaatttcctggggtattgtatatgttaaagatactttctgttattaagagattgaaataacacaaacactgaaattgggcagagtagaagtca

SEQ ID NO: 48456 - DNA, 120 bp, Artificial Sequence
  ENSG00000065883_128 (sequence is synthesized)
gaggcctaaaactatatttgatagaatatgtgggcctcgctatggtgaaaccaaagaaaaagatattgactggggaaaacgctgcgtggataaatttgatatcatcggaattattggaga

SEQ ID NO: 48457 - DNA, 120 bp, Artificial Sequence
  ENSG00000065883_129 (sequence is synthesized)
taactccattttctcccataaacaaatatattcttcactttgcaagagatggagtagaagaagttttgaaatttgtatcctaaattagcttcaaaatatgtgggcctcgctatggtgaaa

SEQ ID NO: 48458 - DNA, 69 bp, Artificial Sequence
  ENSG00000065883_130 (sequence is synthesized)
gaatatgtgggagtccatgtcctgcagtgtggcctgatgtaatcaaactaccatatttcaacaccatga

SEQ ID NO: 48459 - DNA, 70 bp, Artificial Sequence
  ENSG00000065883_131 (sequence is synthesized)
ttaagttagatctgattttagaattgcagttgaggtagtgcctagtgtgtgaatttgaggtcattttcta

SEQ ID NO: 48460 - DNA, 73 bp, Artificial Sequence
  ENSG00000065883_132 (sequence is synthesized)
ccagcactttgggaggcccaggtgggagaatcacttgagtccaggagtttgataccagcctgagcaacacagg

SEQ ID NO: 48461 - DNA, 120 bp, Artificial Sequence
  ENSG00000065883_133 (sequence is synthesized)
ctactcaggaggctaaggcaggaggatcaccagagccaaagaggtcaaggctgtaatgagctgtgatcgtgtgccactgtactccagcctgggcgacaaggcaagaccctgtttcaaaaa

SEQ ID NO: 48462 - DNA, 120 bp, Artificial Sequence
  ENSG00000065883_134 (sequence is synthesized)
gaccctgtttcaaaaaaataagataaaataaaatagctaaaaaatactctcttcttgagcactgtagttttattcttttacttgaatttctgtgatttactataatattaaaatactaca

SEQ ID NO: 48463 - DNA, 120 bp, Artificial Sequence
  ENSG00000065883_135 (sequence is synthesized)
ccttcaaatgaatattgtagatactagagtttagtattagaagctatactaagaataccttattgatagttttattttttaaaagagaagtttacttttcatggttagtacataaaacat

SEQ ID NO: 48464 - DNA, 120 bp, Artificial Sequence
  ENSG00000065883_136 (sequence is synthesized)
tataccatattgggttgattattgtaattacaatattttatacattatctcaatttaaaaattgatcttcaacaggtaaaaatgatttttttaaatgaacatctttaagtgtaactgaag

SEQ ID NO: 48465 - DNA, 120 bp, Artificial Sequence
  ENSG00000065883_137 (sequence is synthesized)
gaacatctttaagtgtaactgaagtgaacttaaatttctaatacgtattcagatattaaatattcttaatgaaaaccttttaaattgcatttttaaacttataaactttggtttcattat

SEQ ID NO: 48466 - DNA, 120 bp, Artificial Sequence
  ENSG00000065883_138 (sequence is synthesized)
tattgttatatctacagttctttgtttttttaactccctagaaccctttatttaaaccaactgttgggaggatgttcactgtataagacacaaaaatgtagaacttttctggctaaagtt

SEQ ID NO: 48467 - DNA, 120 bp, Artificial Sequence
  ENSG00000065883_139 (sequence is synthesized)
ggattatatacccaacttggctttctttgtgcctggtggtagtgaaatatgatttgtcttattaaaactaatatgggatttcaaaataaaatatttttgtgcaatagtaggttttatgta

SEQ ID NO: 48468 - DNA, 120 bp, Artificial Sequence
  ENSG00000065883_140 (sequence is synthesized)
tgtaaataaaatacggaattaatttggcttaataaatctttagtccatttaccccattccttttttgtctttatttccatatgtgtatatatatatctgaaataatatagttaaagaatt

SEQ ID NO: 48469 - DNA, 120 bp, Artificial Sequence
  ENSG00000065883_141 (sequence is synthesized)
aattattttatgacaattttgtcatttctttaatatcaccataatttaatataatgaaacatcagttgattgcagtcttaggaatagatgtttactttcatttaatctttgctttttttg

SEQ ID NO: 48470 - DNA, 120 bp, Artificial Sequence
  ENSG00000065883_142 (sequence is synthesized)
gttaaagcaataaacaaaaactctcgtttgaatttttcagagtaaaaagtcttattttgttaaatcttgcagcgcctgtgacataattctggaaagtattttccttatatagtgttctag

SEQ ID NO: 48471 - DNA, 120 bp, Artificial Sequence
  ENSG00000065883_143 (sequence is synthesized)
agtagaggtttataagtgatatgttttggatctattcaagttccatgaaacccctcagaaagtgtgcagtgggccaggcgcagtggctcatgcttgtacaaatcccagcactttgggagg

SEQ ID NO: 48472 - DNA, 69 bp, Artificial Sequence
  ENSG00000065883_144 (sequence is synthesized)
gaggcagaggcaggcggatcacttgagggtcagcacctgggcttggtggtgcacgcctataatcccagc

SEQ ID NO: 48473 - DNA, 75 bp, Artificial Sequence
  ENSG00000065883_145 (sequence is synthesized)
gtcaactaagaacggaaattttcagtgccaaggcaggaggatccctggagcccaggagttcaagaccagcttggg

SEQ ID NO: 48474 - DNA, 120 bp, Artificial Sequence
  ENSG00000065883_146 (sequence is synthesized)
agcttgggcagcagagtgagaccctgtctctacaaagttagctgggcatggtggcgcacacctgttgtcccagctactcaggaagctgaggtggaggattgctttagcccaagaagtcga

SEQ ID NO: 48475 - DNA, 120 bp, Artificial Sequence
  ENSG00000065883_147 (sequence is synthesized)
ctccagcctgggtgacagtgagaccctgtttcaaaaaaaaaaaaaaaattatctgcctatttattattttttttgaattaaaaaaattcacgaaataaaaatttaaaaaaattttgtggg

SEQ ID NO: 48476 - DNA, 73 bp, Artificial Sequence
  ENSG00000065883_148 (sequence is synthesized)
agtgcatattagtcatgtcagggtaaatggggcatccttttatcctttgtgttacaagcatttatcctttgtg

SEQ ID NO: 48477 - DNA, 120 bp, Artificial Sequence
  ENSG00000065883_149 (sequence is synthesized)
atccttttatcctttgtgttacaagcatttatcctttgtgttacagacaatccaactatcctcttatggttttttgtaaatgtacacttaaattatttttgactgttggctgggtgtggt

SEQ ID NO: 48478 - DNA, 70 bp, Artificial Sequence
  ENSG00000065883_150 (sequence is synthesized)
aaccctgtctctactaaaaatacaaatactagccaggcatggtgcaggcatgcctgtagtatataatcgc

SEQ ID NO: 48479 - DNA, 89 bp, Artificial Sequence
  ENSG00000065883_151 (sequence is synthesized)
gagactctgtgactatagtcagcctattgtgctagcaaatagtaggtcaccttcattctttgtattttttgtgcccattaaccctcccc

SEQ ID NO: 48480 - DNA, 120 bp, Artificial Sequence
  ENSG00000065883_152 (sequence is synthesized)
ccttcattctttgtattttttgtgcccattaaccctcccccgaccctccaccatgtcactacccctccagcctctggtaaccgtccttctactctctatctccatgagttgaattgtttt

SEQ ID NO: 48481 - DNA, 120 bp, Artificial Sequence
  ENSG00000065883_153 (sequence is synthesized)
ccacaaataagtgagaacatgcaaagtttgcctttctgtgcctcacttattttacgtaacatgatgacctctagttccatccatgctgttgcaagtgacgggatctcattttctttttat

SEQ ID NO: 48482 - DNA, 73 bp, Artificial Sequence
  ENSG00000065883_154 (sequence is synthesized)
ctctagttccatccatgctgttgcaagtgacgggatctcattttctttttatggctgaatagtactagattgt

SEQ ID NO: 48483 - DNA, 120 bp, Artificial Sequence
  ENSG00000065883_155 (sequence is synthesized)
aataaacatgggagtgcaggtatctctttagtattattgatttcctttctttggggtatgtacctaggagtgggattgccgaattataagatagctctagttttagctttttgaggaacc

SEQ ID NO: 48484 - DNA, 120 bp, Artificial Sequence
  ENSG00000065883_156 (sequence is synthesized)
tccaaactgttcttcacagtggttatactaatttacattcccatctacagtgtacaagggttcccttttctccacattctcgccagctagctccttggcagtgtgttaatgtgttaacct

SEQ ID NO: 48485 - DNA, 120 bp, Artificial Sequence
  ENSG00000065883_157 (sequence is synthesized)
gcctactttagagttaaaaaaaatgctgagtttcagacctgagttgtagataaaaatagaatccaactcagatcttataagagactttaatgcagggactacagaggtgccgtggattaa

SEQ ID NO: 48486 - DNA, 120 bp, Artificial Sequence
  ENSG00000065883_158 (sequence is synthesized)
gggaacccataaggcatgtttttactagcagcagagaagcccaaagggccaggaaaaatacagtgttattggagtctcttgagagctgtgaagagggtgcctcacagcaaccatggcggt

SEQ ID NO: 48487 - DNA, 120 bp, Artificial Sequence
  ENSG00000065883_159 (sequence is synthesized)
ggagggatgcagcttcttccagaaaatgtggccatgaggagggagggagctaggaagaaataatccagcctttctctgcctccttctgtcagtggcagaacagccctggaactcagaagg

SEQ ID NO: 48488 - DNA, 120 bp, Artificial Sequence
  ENSG00000065883_160 (sequence is synthesized)
catatctgttggggtcagcatcattgggcacagagtagggcagaaaggtattgggagatagggcagttgtagtaagataataagcaacacaactactaatgagttcaggtgttgacttca

SEQ ID NO: 48489 - DNA, 120 bp, Artificial Sequence
  ENSG00000065883_161 (sequence is synthesized)
ttgtgagtatattttaaaagtcttggtaatgcatggatttgaaaacctcagcttcctttcacttggtactgtgttaaatttgtgggaactttgcttgccactatacttttaaatatatgt

SEQ ID NO: 48490 - DNA, 120 bp, Artificial Sequence
  ENSG00000065883_162 (sequence is synthesized)
tttccaataatttttgagaagtgaatggcctcattattatcaagtagtttccaagatttagtttgtcattgttttatagagccagaagcctgaaaacctaagtcctagttcagactatac

SEQ ID NO: 48491 - DNA, 120 bp, Artificial Sequence
  ENSG00000065883_163 (sequence is synthesized)
tactatttgtggcatagttctttgtgggaattatttttactttgcctctctgtgcttttcctttctaagaaattgagtaataatacttaactagtaaatgtttaatattatggtaaaata

SEQ ID NO: 48492 - DNA, 120 bp, Artificial Sequence
  ENSG00000065883_164 (sequence is synthesized)
atagttgtcaagtactttgaagacttaaatgatatgtatattaacttttttactctcattcattttgaaaagtatcagagcctcagattaagagtgattggatagtttttactttgttgc

SEQ ID NO: 48493 - DNA, 120 bp, Artificial Sequence
  ENSG00000065883_165 (sequence is synthesized)
attttctgtgtgaaattatgtagctcataagctattatcttgtatatgtgtgtttacgtgagtaaagtgattatgcttatgtctattttagttactgtgtgtgaatgtaattttttaatt

SEQ ID NO: 48494 - DNA, 90 bp, Artificial Sequence
  ENSG00000065883_166 (sequence is synthesized)
aattctcctgccctagcctcctgagtggggctaatttttatagttttagtagagacggggtttcattcactatgttggccaggctggtct

SEQ ID NO: 48495 - DNA, 120 bp, Artificial Sequence
  ENSG00000065883_167 (sequence is synthesized)
ctgttcagttcttaatttgtataataacagcaaattaccgataagtaacaatatatactattgtttagaaagtggttacaaaaattatgtaaaaatgaaatatttattcaaaggaaaatt

SEQ ID NO: 48496 - DNA, 120 bp, Artificial Sequence
  ENSG00000065883_168 (sequence is synthesized)
agagctcagattgtggaatcagaatatcagattcagatctcacctctgccacttacagaatatttgcccttgggcaagttgcttggtctctttcggtgtcagtttcttcttctcagtaaa

SEQ ID NO: 48497 - DNA, 120 bp, Artificial Sequence
  ENSG00000065883_169 (sequence is synthesized)
aggaggctaataatagagtctgccttctaaggttgttgtaaggaataaaggatattaaatgcttagaaggtatgtgacactcccttagctgtcatcattatcattattcatttcccattc

SEQ ID NO: 48498 - DNA, 120 bp, Artificial Sequence
  ENSG00000065883_170 (sequence is synthesized)
acaatgtgctgtttcctggttaaatccataacatgaggttttagtagtggtcttgattttccttttgaagtatttacccctaaagatttattcaaaattgactgcagttctttttatgta

SEQ ID NO: 48499 - DNA, 120 bp, Artificial Sequence
  ENSG00000065883_171 (sequence is synthesized)
caggtacattttaaatgtacatgatatttaactagacttgaggttctctttttacagtatttcttaaatactctccctcaaatatatattttcatatggtaatacagagccattttggtg

SEQ ID NO: 48500 - DNA, 88 bp, Artificial Sequence
  ENSG00000065883_172 (sequence is synthesized)
cagtcaactactttttgtttttatcttcatatattaagggaatttttagttaaacaggttgccctcacatacattttatgatcttata

SEQ ID NO: 48501 - DNA, 120 bp, Artificial Sequence
  ENSG00000065883_173 (sequence is synthesized)
gttaaacaggttgccctcacatacattttatgatcttatattagatacctttggatgtctgtattttttagtaggcagatgaaagtgtttttagttaggattatagggattgctttagta

SEQ ID NO: 48502 - DNA, 120 bp, Artificial Sequence
  ENSG00000065883_174 (sequence is synthesized)
ctccagcgcaaaaaaaaaaaagggcgggggggctaaagcataaagaggtgagcataattttaaagaattactaagttcagtttaactagagtagctaaaatttgaaagacttgctcatta

SEQ ID NO: 48503 - DNA, 120 bp, Artificial Sequence
  ENSG00000065883_175 (sequence is synthesized)
tgtgaagataagtgattccagtaaacaagcaaaaatcactgagaaaagtacattaataatgttagaaaaacctaatcttaatttactattaaaaatattcatcttattctgtcctctttt

SEQ ID NO: 48504 - DNA, 120 bp, Artificial Sequence
  ENSG00000065883_176 (sequence is synthesized)
cacagtttttaccaaagtcaaatgtttttgctagctttggagcactgttaactatagtcctatctgtggtaatgctataatgcccaaattgatagttttataatgctagtgcttaagtta

SEQ ID NO: 48505 - DNA, 120 bp, Artificial Sequence
  ENSG00000065883_177 (sequence is synthesized)
tttggagaaatttggctggatgggggcagagcaggtcaggcagatcttacactgcctggaactgcaaatctataggtggcaagagggaattgctttctaaattgaatgctccatttcctt

SEQ ID NO: 48506 - DNA, 120 bp, Artificial Sequence
  ENSG00000065883_178 (sequence is synthesized)
aacaagactggtccaggaccaagccaagcttaggtaaatgggcttggaatacagcctttctggggaatttgctatggcttttgagtccttgtgatttggaaaacatctggatataaagag

SEQ ID NO: 48507 - DNA, 120 bp, Artificial Sequence
  ENSG00000065883_179 (sequence is synthesized)
atgtttatagctgatctgaatatatatgtgatctccctgaagtaagtaactacagatcagccgaagaacctcctctgactacttaggattctcttcaagcgtgtcaatcagctagaacgt

SEQ ID NO: 48508 - DNA, 120 bp, Artificial Sequence
  ENSG00000065883_180 (sequence is synthesized)
gaccattctctgagcgttgaacactttacattgccagataatttgtgctgttttcgtcaaacctgaccctaatataacttgactaaataatcttgtctgtggcaaataaagaggtagcag

SEQ ID NO: 48509 - DNA, 120 bp, Artificial Sequence
  ENSG00000065883_181 (sequence is synthesized)
tatatttatgtcctcttttcggaaggtgataaaggaattatttgataaagtacgatatgtattgctactttgcagagtagacctcaagtagatacttgagtagacactctgcatttgtgt

SEQ ID NO: 48510 - DNA, 120 bp, Artificial Sequence
  ENSG00000065883_182 (sequence is synthesized)
gcttttttctattcacacactacagtgggtatgtgaatcagtgaaaaattgccaaaaatatgatcaattgaaaacttttgttaggtggtctttatttgaactatatcttgtcatccatta

SEQ ID NO: 48511 - DNA, 120 bp, Artificial Sequence
  ENSG00000065883_183 (sequence is synthesized)
gtaatttagcaagatttgatcagaaccagtcaacgctctttaaatcagttaatcccattaaaggtttttatggaaaggaaaaacagtgctcaacaattgagttgatactaaagctttgct

SEQ ID NO: 48512 - DNA, 70 bp, Artificial Sequence
  ENSG00000065883_184 (sequence is synthesized)
aaacagtgctcaacaattgagttgatactaaagctttgctttgaccaaattgcagttaataccagtaaac

SEQ ID NO: 48513 - DNA, 62 bp, Artificial Sequence
  ENSG00000065883_185 (sequence is synthesized)
gctatgggcacccgtcaccacgcctggttaatttttttttagtacagatggggtttcaccgt

SEQ ID NO: 48514 - DNA, 120 bp, Artificial Sequence
  ENSG00000065883_186 (sequence is synthesized)
aatacagaattccattcagtgaatcctctgtttaaagagaaagccttggcctttgtcagaagatgggaaaacaaatgtacatttataaactttcagttaaaataaaatgtttaaattata

SEQ ID NO: 48515 - DNA, 120 bp, Artificial Sequence
  ENSG00000065911_0 (sequence is synthesized)
ctcccggcgcagtcaccggcgcggtctatggctgcgacttctctaatgtctgctttggctgcccggctgctgcagcccgcgcacagctgctcccttcgccttcgccctttccacctcgcg

SEQ ID NO: 48516 - DNA, 120 bp, Artificial Sequence
  ENSG00000065911_1 (sequence is synthesized)
gcagttcgaaatgaagctgttgtcatttctggaaggaaactggcccagcagatcaagcaggaagtgcggcaggaggtagaagagtgggtggcctcaggcaacaaacggccacacctgagt

SEQ ID NO: 48517 - DNA, 120 bp, Artificial Sequence
  ENSG00000065911_2 (sequence is synthesized)
gtgatcctggttggcgagaatcctgcaagtcactcctatgtcctcaacaaaaccagggcagctgcagttgtgggaatcaacagtgagacaattatgaaaccagcttcaatttcagaggaa

SEQ ID NO: 48518 - DNA, 120 bp, Artificial Sequence
  ENSG00000065911_3 (sequence is synthesized)
gaattgttgaatttaatcaataaactgaataatgatgataatgtagatggcctccttgttcagttgcctcttccagagcatattgatgagagaaggatctgcaatgctgtttctccagac

SEQ ID NO: 48519 - DNA, 120 bp, Artificial Sequence
  ENSG00000065911_4 (sequence is synthesized)
aaggatgttgatggctttcatgtaattaatgtaggacgaatgtgtttggatcagtattccatgttaccggctactccatggggtgtgtgggaaataatcaagcgaactggcattccaacc

SEQ ID NO: 48520 - DNA, 120 bp, Artificial Sequence
  ENSG00000065911_5 (sequence is synthesized)
ctagggaagaatgtggttgtggctggaaggtcaaaaaacgttggaatgcccattgcaatgttactgcacacagatggggcgcatgaacgtcccggaggtgatgccactgttacaatatct

SEQ ID NO: 48521 - DNA, 120 bp, Artificial Sequence
  ENSG00000065911_6 (sequence is synthesized)
catcgatatactcccaaagagcagttgaagaaacatacaattcttgcagatattgtaatatctgctgcaggtattccaaatctgatcacagcagatatgatcaaggaaggagcagcagtc

SEQ ID NO: 48522 - DNA, 120 bp, Artificial Sequence
  ENSG00000065911_7 (sequence is synthesized)
attgatgtgggaataaatagagttcacgatcctgtaactgccaaacccaagttggttggagatgtggattttgaaggagtcagacaaaaagctgggtatatcactccagttcctggaggt

SEQ ID NO: 48523 - DNA, 120 bp, Artificial Sequence
  ENSG00000065911_8 (sequence is synthesized)
gttggccccatgacagtggcaatgctaatgaagaataccattattgctgcaaaaaaggtgctgaggcttgaagagcgagaagtgctgaagtctaaagagcttggggtagccactaattaa

SEQ ID NO: 48524 - DNA, 120 bp, Artificial Sequence
  ENSG00000065911_9 (sequence is synthesized)
ctactgtgtcttctgtgtcacaaacagcactccaggccagctcaagaagcaaagcaggccaatagaaatgcaatatttttaatttattctactgaaatggtttaaaatgatgccttgtat

SEQ ID NO: 48525 - DNA, 120 bp, Artificial Sequence
  ENSG00000065911_10 (sequence is synthesized)
ttattgaaagcttaaatgggtgggtgtttctgcacatacctctgcagtacctcaccagggagcattccagtatcatgcagggtcctgtgatctagccaggagcagccattaacctagtga

SEQ ID NO: 48526 - DNA, 120 bp, Artificial Sequence
  ENSG00000065911_11 (sequence is synthesized)
ttaatatgggagacattaccatatggaggatggatgcttcactttgtcaagcacctcagttacacattcgccttttctaggattgcatttcccaagtgctattgcaataacagttgatac

SEQ ID NO: 48527 - DNA, 120 bp, Artificial Sequence
  ENSG00000065911_12 (sequence is synthesized)
tcattttaggtaccaaaccttttgagttcaactgatcaaaccaaaggaaaagtgttgctagagaaaattagggaaaaggtgaaaaagaaaaaatggtagtaattgagcagaaaaaaatta

SEQ ID NO: 48528 - DNA, 120 bp, Artificial Sequence
  ENSG00000065911_13 (sequence is synthesized)
atttatatatgtattgattggcaaccagatttatctaagtagaactgaattggctaggaaaaaagaaaaactgcatgttaatcattttcctaagctgtccttttgaggcttagtcagttt

SEQ ID NO: 48529 - DNA, 120 bp, Artificial Sequence
  ENSG00000065911_14 (sequence is synthesized)
attgggaaaatgtttaggattattccttgctattagtactcattttatgtatgttacccttcagtaagttctccccattttagttttctaggactgaaaggattcttttctacattatac

SEQ ID NO: 48530 - DNA, 120 bp, Artificial Sequence
  ENSG00000065911_15 (sequence is synthesized)
atgtgtgttgtcatatttggcttttgctatatactttaacttcattgttaaatttttgtattgtatagtttctttggtgtatcttaaaacctatttttgaaaaacaaacttggcttgata

SEQ ID NO: 48531 - DNA, 120 bp, Artificial Sequence
  ENSG00000065911_16 (sequence is synthesized)
atcatttgggcagcttgggtaagtacgcaacttacttttccaccaaagaactgtcagcagctgcctgcttttctgtgatgtatgtatcctgttgacttttccagaaattttttaagagtt

SEQ ID NO: 48532 - DNA, 120 bp, Artificial Sequence
  ENSG00000065911_17 (sequence is synthesized)
tgagttactattgaatttaatcagactttctgattaaagggttttctttcttttttaataaaacacatctgtctggtatggtatgaatttctgaaattctgtcttcctatgactcctagt

SEQ ID NO: 48533 - DNA, 120 bp, Artificial Sequence
  ENSG00000065911_18 (sequence is synthesized)
tagagatggggtcttgctatgttgcctgggctggtattgaactcctggcctcaagcaatcaatcctcttgcctcagcttcccagagggctgggattacaggcctgggccacccacaccca

SEQ ID NO: 48534 - DNA, 120 bp, Artificial Sequence
  ENSG00000065911_19 (sequence is synthesized)
agggctgggattacaggcctgggccacccacacccaaacagaggtttaaagagctttggagaaaccagcctcgtcctccagtctctttgtttgtttgttttgagactgagtcttgctctg

SEQ ID NO: 48535 - DNA, 120 bp, Artificial Sequence
  ENSG00000065911_20 (sequence is synthesized)
ggcgtgagccactgcacctggcctgtcctacagtcttatatcacaacaggttgtgccaagctaggagcttaatctgtaaaatacttgaggcagggataggtttgtctgttttggcttttg

SEQ ID NO: 48536 - DNA, 120 bp, Artificial Sequence
  ENSG00000065911_21 (sequence is synthesized)
gctttcatgcgagcagaagtagctcctgctctaggcagcttgaggcagaaagagaagaaacaattgagttgacctacctccgtcctcgttcttctgccagctggcgttattcttttgata

SEQ ID NO: 48537 - DNA, 120 bp, Artificial Sequence
  ENSG00000065911_22 (sequence is synthesized)
gttctctggagtttaaagaagtttagatagtttgctggagatgtttttgtaagtgacgtatagcttatgtctctaatccatgcctgcttacctagattattaaatgtggagcaagatgac

SEQ ID NO: 48538 - DNA, 120 bp, Artificial Sequence
  ENSG00000065911_23 (sequence is synthesized)
cagacaggattaaattttattgaattacagttacaagtggaaaaaatgactgacttactgcatggagaagtattatgtcaacctgttaaaagctatggaaattaaaatgttcatgtatat

SEQ ID NO: 48539 - DNA, 120 bp, Artificial Sequence
  ENSG00000065911_24 (sequence is synthesized)
acaaaatataaatgacatgtaaggtaaaattacagtgatcaatttacaacaaagaaattaacagtagttttccagcttgtttgattaatcaagcaggtttactcttgaatccatagcatt

SEQ ID NO: 48540 - DNA, 120 bp, Artificial Sequence
  ENSG00000065911_25 (sequence is synthesized)
tctacaatttaatttggacaaagttctattccagatcagccaggttttaaaactgaaatgtgttaagggtggattgttagcttccccaggattggtgtggatgataaatactttttttaa

SEQ ID NO: 48541 - DNA, 86 bp, Artificial Sequence
  ENSG00000065911_26 (sequence is synthesized)
cttccccaggattggtgtggatgataaatactttttttaaaaattaattattattgtttataagacatggattccagctgtctccc

SEQ ID NO: 48542 - DNA, 120 bp, Artificial Sequence
  ENSG00000065911_27 (sequence is synthesized)
ttaaacgatcctcctgcatcagcctctgaaatggctgggactacaggtgtgtgccagcatgcctagctaatttttaaacatttgtttagagatgggtctcactatgttgcccaggctggt

SEQ ID NO: 48543 - DNA, 120 bp, Artificial Sequence
  ENSG00000065911_28 (sequence is synthesized)
tgattccccccacctctgcctcccaagtagcgggattacaggtgtgagccactgtgtctgacaagaatttatacttaagcataggagatggttctggaaattctaagaaattctgctctc

SEQ ID NO: 48544 - DNA, 120 bp, Artificial Sequence
  ENSG00000065911_29 (sequence is synthesized)
agtaagagtagaggtttggagctttacctcttggcagtatcccttggaagggagctctgagattaaatgtaatcaaacacttattgagagctttctatggaccaggcactacactagacg

SEQ ID NO: 48545 - DNA, 120 bp, Artificial Sequence
  ENSG00000065911_30 (sequence is synthesized)
ctgggaattacagaggcaattacctgtcctatactcaaggtgttaatgatctagtgtcatttttctttaaaaaagaaagcacctgcatttgtcatcttgagcaaatatagtaactctaac

SEQ ID NO: 48546 - DNA, 120 bp, Artificial Sequence
  ENSG00000065911_31 (sequence is synthesized)
ctcaaggttcaagtgatttactcaaggtttaaatcatagttgttttggagaaagtaagtgtcagatgcactgtggctgtcagggtcatagtaggcattaaatcaacatggttggtgttca

SEQ ID NO: 48547 - DNA, 120 bp, Artificial Sequence
  ENSG00000065911_32 (sequence is synthesized)
ttaaatgtggattgaagataaaatgactgatcttaagtttcatgaggaataggtttgcttcattgaaactggtttttatcttcccaaatagttttcaatcattcctttaaagtactaggt

SEQ ID NO: 48548 - DNA, 120 bp, Artificial Sequence
  ENSG00000065911_33 (sequence is synthesized)
tgattaatattgcaaagttgtaatgtaaaatgtgaccttacctctgtctaacctgtattgttcacatgaatgggagtttgactttgggaataaacattgaaaatttgcagggaggaccca

SEQ ID NO: 48549 - DNA, 120 bp, Artificial Sequence
  ENSG00000065911_34 (sequence is synthesized)
tgtgattgaactgtatcccaaaactttgtcataggaaatcagactatatctttcggggtttatacagtaggacaggagatactggaatcaacagtgagacaattatgaaaccagcttcaa

SEQ ID NO: 48550 - DNA, 120 bp, Artificial Sequence
  ENSG00000065911_35 (sequence is synthesized)
gcagtttagaagcagttcaggtctggatgatggggtttgtgttctaggtctcacggtaccacagattactgtgtctctgtggacaagaggtgggtgggcaggctcagatatgcctctgcc

SEQ ID NO: 48551 - DNA, 120 bp, Artificial Sequence
  ENSG00000065911_36 (sequence is synthesized)
tgcccatctgtgggcctgtggtctgagcagcaggtggcctttccttcgaagggctgtgaaaccactcgcgtggctgggtggggttactggcctgaatcaacagtgagacaattatgaaac

SEQ ID NO: 48552 - DNA, 120 bp, Artificial Sequence
  ENSG00000065911_37 (sequence is synthesized)
taatttatgatttcttttttctgattaggaaacccaagcagaggaggctaatgtgattgaactgtatcccaaaactttgtcataggaaatcagactatatctttcggggtttatacagta

SEQ ID NO: 48553 - DNA, 80 bp, Artificial Sequence
  ENSG00000065923_0 (sequence is synthesized)
tggctcgggtcgggctaccggggcgccgccgccgcggctgctgctgctgccgctgctgctgggttgggggctgcgagtcg

SEQ ID NO: 48554 - DNA, 120 bp, Artificial Sequence
  ENSG00000065923_1 (sequence is synthesized)
ggctgcgagtcgcggccgcggcctcggcctcctcctctggggcggcggcggaggacagcagcgccatggaggagctcgctactgagaaggaggcggaggagagccaccggcaagacagcg

SEQ ID NO: 48555 - DNA, 120 bp, Artificial Sequence
  ENSG00000065923_2 (sequence is synthesized)
tgagcctgctcaccttcatcctgctgctcacgctcaccatcctcaccatctggctcttcaagcaccgccgggtgcgctttctgcacgagaccgggctggccatgatctatgggctcatcg

SEQ ID NO: 48556 - DNA, 120 bp, Artificial Sequence
  ENSG00000065923_3 (sequence is synthesized)
ttggggtgatcctgaggtatggtacccctgctaccagtggccgtgacaaatcactcagctgcactcaggaagacagggccttcagtaccttattagtgaatgtcagcggaaagttcttcg

SEQ ID NO: 48557 - DNA, 120 bp, Artificial Sequence
  ENSG00000065923_4 (sequence is synthesized)
aatacactctgaaaggagaaatcagtcctggcaagatcaacagcgtagagcagaatgatatgctacggaaggtaacattcgatccagaagtatttttcaacattcttctgcctccaatta

SEQ ID NO: 48558 - DNA, 120 bp, Artificial Sequence
  ENSG00000065923_5 (sequence is synthesized)
tttttcatgctggatacagcttaaagaagagacactttttcagaaatcttggatctatactggcctatgccttcttggggactgctgtttcatgcttcattattggaaatctcatgtatg

SEQ ID NO: 48559 - DNA, 120 bp, Artificial Sequence
  ENSG00000065923_6 (sequence is synthesized)
gtgtggtgaagctcatgaagattatgggacagctctcagataaattttactacacagattgtctcttttttggagcaatcatctctgccactgacccagtgactgtgctggcgatattta

SEQ ID NO: 48560 - DNA, 120 bp, Artificial Sequence
  ENSG00000065923_7 (sequence is synthesized)
atgaattgcatgcagacgtggatctttacgcacttctttttggagagagcgtcctaaatgatgctgttgccattgtactgtcctcgtctattgttgcctaccagccagcgggactgaaca

SEQ ID NO: 48561 - DNA, 120 bp, Artificial Sequence
  ENSG00000065923_8 (sequence is synthesized)
ctcacgcctttgatgctgctgccttttttaagtcagttggcatttttctaggtatatttagtggctcttttaccatgggagctgtgactggtgttaatgccaacgtgactaagtttacca

SEQ ID NO: 48562 - DNA, 120 bp, Artificial Sequence
  ENSG00000065923_9 (sequence is synthesized)
aactgcactgcttccccctgctggagacggcgctgttcttcctcatgtcctggagcacgtttctcttggcagaagcctgcggatttacaggtgttgtagctgtccttttctgtggaatca

SEQ ID NO: 48563 - DNA, 120 bp, Artificial Sequence
  ENSG00000065923_10 (sequence is synthesized)
cacaagctcattacacctacaacaatctgtcggtggaatcaagaagtcgaaccaagcagctctttgaggtgttacatttcctggcagagaacttcatcttctcctacatgggcctggcac

SEQ ID NO: 48564 - DNA, 120 bp, Artificial Sequence
  ENSG00000065923_11 (sequence is synthesized)
tgtttaccttccagaagcacgttttcagccccattttcatcatcggagcttttgttgccatcttcctgggcagagccgcgcacatctacccgctctccttcttcctcaacttgggcagaa

SEQ ID NO: 48565 - DNA, 120 bp, Artificial Sequence
  ENSG00000065923_12 (sequence is synthesized)
ggcataagattggctggaattttcaacacatgatgatgttttcaggcctcaggggagcaatggcatttgcgttggccatccgtgacacggcatcctatgctcgccagatgatgttcacga

SEQ ID NO: 48566 - DNA, 120 bp, Artificial Sequence
  ENSG00000065923_13 (sequence is synthesized)
ccacccttctcattgtgttcttcactgtctggatcattggaggaggcacgacacccatgttgtcatggcttaacatcagagttggcgtcgaggagccctccgaagaggaccagaatgaac

SEQ ID NO: 48567 - DNA, 120 bp, Artificial Sequence
  ENSG00000065923_14 (sequence is synthesized)
accactggcagtacttcagagttggtgttgaccccgatcaagacccaccacccaacaacgacagctttcaagtcttacaaggggacggcccagattctgccagaggaaaccggacaaaac

SEQ ID NO: 48568 - DNA, 120 bp, Artificial Sequence
  ENSG00000065923_15 (sequence is synthesized)
agctcgatgtctgaccagtccccaggtgtacgataaccaagagccactgagagaggaagactctgatttcatcctgaccgaaggcgacctgacattgacctacggggacagcacagtgac

SEQ ID NO: 48569 - DNA, 120 bp, Artificial Sequence
  ENSG00000065923_16 (sequence is synthesized)
tgcaaatggctcctcaagttcgcacaccgcctccacgagtctggagggcagccggagaacgaagagcagctcggaggaagtgctggagcgagacctgggaatgggagaccagaaggtttc

SEQ ID NO: 48570 - DNA, 120 bp, Artificial Sequence
  ENSG00000065923_17 (sequence is synthesized)
gagccggggcacccgcctagtgtttcccctggaagataatgcttgactttccccccaagccctggcgcgatggggtaggctcccgatggggtgaggacagctgcaagccctagtgttgtt

SEQ ID NO: 48571 - DNA, 120 bp, Artificial Sequence
  ENSG00000065923_18 (sequence is synthesized)
ggaggtggggcagtgactagattgaactaactcttctattttattggggtctgaagctattgtaacacttaaaatttaactcacaatgcagatggtgaggcaaaagtgtctctaaattca

SEQ ID NO: 48572 - DNA, 120 bp, Artificial Sequence
  ENSG00000065923_19 (sequence is synthesized)
gacaaacgtagacctattcccacttttttcacatagtagtgcgctgtttcagagttaaacaaacaaaaaaaaatagcatgctttaatggtctcctaattcattcacctgcagtatctgaa

SEQ ID NO: 48573 - DNA, 120 bp, Artificial Sequence
  ENSG00000065923_20 (sequence is synthesized)
caaggcgaggcaggtgctgggtggggggattcctcccatgagaggctgcatctcagtacacagcagtgcaagtcaagctgaccatagaattatcaagttaaagagaaggaaggcaattga

SEQ ID NO: 48574 - DNA, 120 bp, Artificial Sequence
  ENSG00000065923_21 (sequence is synthesized)
gatcggaactccaaggattatgggaaacttggtgttaaatgggacagaaaacatgaaaaagcaatttggaggctctggcaacgaagtctgcttgactgcaacctcatatcaggattcctg

SEQ ID NO: 48575 - DNA, 120 bp, Artificial Sequence
  ENSG00000065923_22 (sequence is synthesized)
actttatgctgcctgtgttttttctagactgaagatttgaaaatacatccacgaacatttcaacatggaacgaagaattatagttccttctctggctatatccataaagaagtagttatg

SEQ ID NO: 48576 - DNA, 120 bp, Artificial Sequence
  ENSG00000065923_23 (sequence is synthesized)
aaatgtttaaaaccaaaggcaaatagtgttatactcttattttttgattaatctgaggaaaggaggtatttagaaactgatgatggtatcactgcaaaaagcattcaacttttttttttt

SEQ ID NO: 48577 - DNA, 120 bp, Artificial Sequence
  ENSG00000065923_24 (sequence is synthesized)
aggtgtgagccactgcacctggccagcattcaacttttgagggctaccatatgagctgacagcctagggaaataatcactaggactgaagtatctactctgggtttagaaataacaccaa

SEQ ID NO: 48578 - DNA, 120 bp, Artificial Sequence
  ENSG00000065923_25 (sequence is synthesized)
gggtttagaaataacaccaaattttgtaggatgctattatctgggaaagggaaggcagcaagaaacctacaaggcaccaggctagaattcagagggaaagaaatctcaatgcaaaaaaat

SEQ ID NO: 48579 - DNA, 120 bp, Artificial Sequence
  ENSG00000065923_26 (sequence is synthesized)
tactgcaaagaaatacaagatagtagtctcaagactaggtagaattccaaactttgagccgacgaatgcatgagatttcagtggccacctgaggaatcagagggcaaacaatggaacatt

SEQ ID NO: 48580 - DNA, 120 bp, Artificial Sequence
  ENSG00000065923_27 (sequence is synthesized)
aagtattttcagcccactagaaagctctgtcttctataagcttaagagtccgagtgtctttacaccactgagtgccatgcagagaagggtcattttccttgtatctggggaggctgctgc

SEQ ID NO: 48581 - DNA, 120 bp, Artificial Sequence
  ENSG00000065923_28 (sequence is synthesized)
accagcttaacatgtgggtgtgatttgaaagttaggttttcagtttggattctttctggatgagctgttctgtctgcccacacctgtagtgctgaaatacagaaagacctctcgggaaaa

SEQ ID NO: 48582 - DNA, 72 bp, Artificial Sequence
  ENSG00000065923_29 (sequence is synthesized)
atgtctctgtgcttcagtgctagcttatttttggcaacccaatttctaaaaaatgctttcaataacgtgggc

SEQ ID NO: 48583 - DNA, 120 bp, Artificial Sequence
  ENSG00000065923_30 (sequence is synthesized)
agacggggtttcaccatactggccagtttttcttatgatggaagacaaaatattgtgtcccagtctagtccacccgtagtgaaatcagtcatttaatcttctcaattcgcatgtttaatg

SEQ ID NO: 48584 - DNA, 120 bp, Artificial Sequence
  ENSG00000065923_31 (sequence is synthesized)
cttaatttttaaataagacattgcttcacaactttgtgtttgaattgataatttgtgcaaatcaggaaaatacgtatttaattaggttgagccatatgagtttgctgatattcgaccatt

SEQ ID NO: 48585 - DNA, 120 bp, Artificial Sequence
  ENSG00000065923_32 (sequence is synthesized)
attaggttgagccatatgagtttgctgatattcgaccattttgtaaaaacaggagtggcaatttcatatggttcaataaaataaaattgagaccgggcacagtggcttatgcctgtaatc

SEQ ID NO: 48586 - DNA, 66 bp, Artificial Sequence
  ENSG00000065923_33 (sequence is synthesized)
acttgaaatacaaaaatgagccaggcatgatggcacatgcctgtagttctagctacttgggaggct

SEQ ID NO: 48587 - DNA, 84 bp, Artificial Sequence
  ENSG00000065923_34 (sequence is synthesized)
tgggaggattgcttgagcccaagaggcagaggttgcgatgagctgagatcatgccactgcaatccagtctgggcatacagttga

SEQ ID NO: 48588 - DNA, 120 bp, Artificial Sequence
  ENSG00000065923_35 (sequence is synthesized)
tttttattctcctctttcctttttatctacaataaagtccattttgattttatggtcatccatgggctttggaagtttgaaaaatgctaaacaacctatccaaacccatgagccctcagg

SEQ ID NO: 48589 - DNA, 120 bp, Artificial Sequence
  ENSG00000065923_36 (sequence is synthesized)
tagtgaaggacttaagaataagacctacaccccacagccagagaaagagctttcatagcccctggaagggaagttcttatatcctggggtgaggttgcagacagcagctaccaggcctgg

SEQ ID NO: 48590 - DNA, 120 bp, Artificial Sequence
  ENSG00000065923_37 (sequence is synthesized)
cagaggcctgtattatatgtgtgctggagtccagaaccagcacaggattttttatttagcagagttatcttagtaatgaccagtcatgccatataaatctaaaaggcaagacttgttttg

SEQ ID NO: 48591 - DNA, 120 bp, Artificial Sequence
  ENSG00000065923_38 (sequence is synthesized)
ttttcatttttgtttttgttttgcagagatggagagataggctgcttgggtctttggttgggtctttataaagctttgcttatcttatattgcttacttaattttggagggaaaaaacta

SEQ ID NO: 48592 - DNA, 120 bp, Artificial Sequence
  ENSG00000065923_39 (sequence is synthesized)
attgcttacttaattttggagggaaaaaactaacagacacaccctggtgatggttctttgttcacctcaaggctttgttgttgtgttgttgttgtttgttttttgttttgttttgttttg

SEQ ID NO: 48593 - DNA, 120 bp, Artificial Sequence
  ENSG00000065923_40 (sequence is synthesized)
caccgcccctggccattattttgagttttttttagaaagcttttacaagattacaagaaatgactctcttagggaagaaaaataaccacccagtttcccttcctagtcttagttcaattc

SEQ ID NO: 48594 - DNA, 120 bp, Artificial Sequence
  ENSG00000065923_41 (sequence is synthesized)
atagagtgttgtgtttatccccaaagggtcttgtagtcttcactgcaaacatttgattctgatctactcacatacaaggaaatgtagattgccaagaccaaaactagaggggtgggcttc

SEQ ID NO: 48595 - DNA, 120 bp, Artificial Sequence
  ENSG00000065923_42 (sequence is synthesized)
ccatcagggttttcctgtgtggagatgacaggggaaacagggaggaaatcctaattatggcttgtcctcttccctgaattgctgtctacgacagtgtagttccaatgtaaacaaggtggg

SEQ ID NO: 48596 - DNA, 120 bp, Artificial Sequence
  ENSG00000065923_43 (sequence is synthesized)
ttggggatggtttgtatagggcaggaggcccacccagaagtcctacccagggaagagagggcccagaatctagttgcagcatttgcccagtaaccctaccccggcctttctttgtgtgtt

SEQ ID NO: 48597 - DNA, 120 bp, Artificial Sequence
  ENSG00000065923_44 (sequence is synthesized)
aggaagctggaaatgcaggctggtctccctttcttgcctttgtcactaaccccgagctgtcagccatttggaatcagaactgctttccagtgttctaagtccttatttgattacaaatat

SEQ ID NO: 48598 - DNA, 120 bp, Artificial Sequence
  ENSG00000065923_45 (sequence is synthesized)
ttggtgaatcaaagtaaggcactttggtcctaatttttgacctttggtcctaatttttgtttgtaagatgtggagaataaccctgaccttaccaggggtcctgggaatgtgaatccattc

SEQ ID NO: 48599 - DNA, 120 bp, Artificial Sequence
  ENSG00000065923_46 (sequence is synthesized)
gtcaagtggttccacatctagaagaattttgcctatgccatgtcaggcatcattcaacacaaggccaactatctgctgccagtctggcataagatcagattgaaactgctaagtaatggt

SEQ ID NO: 48600 - DNA, 120 bp, Artificial Sequence
  ENSG00000065923_47 (sequence is synthesized)
acatccaaataaacaaagttcttccaagagagtaaacccaagtccatcttatacacgtatttgttctgggttggtggggacgacagttcagccgagtccgatgttctagagcagaggttc

SEQ ID NO: 48601 - DNA, 120 bp, Artificial Sequence
  ENSG00000065923_48 (sequence is synthesized)
tcaaccctggctgtgaattaggatcatctggccagtttttgtttttaaatcagtgcaagggccctcccctcagagattcagattcagtagcttcaggtgggacctggaatccatgctttg

SEQ ID NO: 48602 - DNA, 120 bp, Artificial Sequence
  ENSG00000065923_49 (sequence is synthesized)
tttggaacctcaggagtgttcttgatgtgcagccaggattgacaagagcctttagtctagagctcgcagcagacctctagactatttggaatctgattttaaagaatggcccagcagatg

SEQ ID NO: 48603 - DNA, 120 bp, Artificial Sequence
  ENSG00000065923_50 (sequence is synthesized)
aaggtgtttttttaaattgttagtcatgtgaaacgaactgagtattgatcagtaatacagacagggcagctgtgagagagtttgatgctaatctttgcagaactcaagaacatactccat

SEQ ID NO: 48604 - DNA, 120 bp, Artificial Sequence
  ENSG00000065923_51 (sequence is synthesized)
aaagtacagctgaaaagatcacgaaaaccttggagccttcgaggaaagagaagggtgacttggggtatgtatggggagaactaaaaacctgtcatcttggttcccacttgtggggaataa

SEQ ID NO: 48605 - DNA, 120 bp, Artificial Sequence
  ENSG00000065923_52 (sequence is synthesized)
agggaaggtattgtcttaactgagctgctaactaatcaagcatgaaggtttctgggaagctgttttgttttttttttttaatttcacctggaattaaattaatagtcccctctggagtca

SEQ ID NO: 48606 - DNA, 120 bp, Artificial Sequence
  ENSG00000065923_53 (sequence is synthesized)
gattttcttttccttcacctatcctcatgcctgagtccacactggattcctcagaataagggtgggcccatttactgctggagcaaagtagaaggttgtggtcctttgctatcacatggt

SEQ ID NO: 48607 - DNA, 120 bp, Artificial Sequence
  ENSG00000065923_54 (sequence is synthesized)
gatggtggtggtttccgtagcaggtaattaaggagatgcacacttttgtatagccctgacagagagaagatgaaagctgctattccttttagtacactttttgagaactaccagaaacct

SEQ ID NO: 48608 - DNA, 120 bp, Artificial Sequence
  ENSG00000065923_55 (sequence is synthesized)
gaactttctctcctagggaagaaaatttggaatttaaataaggccacatttcttcctaggacacaatcacaggaagggcatatggatccgagcatccagggtggttactggggtgatcag

SEQ ID NO: 48609 - DNA, 120 bp, Artificial Sequence
  ENSG00000065923_56 (sequence is synthesized)
acaaataagcattgatgcctggaaggcagaaatcacactgcgacatcaaatgtttcatcaagcaaacagcaaggatctcttcaggctgtgttctctagacccgaaaatgtcctctgtggt

SEQ ID NO: 48610 - DNA, 120 bp, Artificial Sequence
  ENSG00000065923_57 (sequence is synthesized)
ttggctgacaaatggaatctctttagaaaacatgcaaaagggtatctcagctatccatgaacgattcggtctaggacaaagaactaacagttccttccaaaatagaggtctgttggtctg

SEQ ID NO: 48611 - DNA, 120 bp, Artificial Sequence
  ENSG00000065923_58 (sequence is synthesized)
tttgacgtcatcccatcatcctatctctccctgtccttgtctgcagtagaagttaatgtaatcataccagatgtttaatgtgaacaagtaatttccaaatgtagaaacaccactgatgca

SEQ ID NO: 48612 - DNA, 120 bp, Artificial Sequence
  ENSG00000065923_59 (sequence is synthesized)
cttagggggaaaaacagtggcagggtgttagagcatctcatcagaggtgaaaatcacccacttggaaacctactgtgcacccgttgtgagttctaagagtgtatcagaaagctgatttta

SEQ ID NO: 48613 - DNA, 120 bp, Artificial Sequence
  ENSG00000065923_60 (sequence is synthesized)
ccatctgttgtgaaagattatctgcaatgagggctgctagaaagtcagcctgctgatctcacaagtatatgacttcttattccacttcaaaagtggggaacttgacaagtttcttgtctg

SEQ ID NO: 48614 - DNA, 120 bp, Artificial Sequence
  ENSG00000065923_61 (sequence is synthesized)
ccttttgatgttgattctatagattaattagttcaggaacaagtctttcatatacattagactggtatcattgagttctgagctattctgttgttctttaactgacactctggattgcca

SEQ ID NO: 48615 - DNA, 120 bp, Artificial Sequence
  ENSG00000065923_62 (sequence is synthesized)
gtgtcggctgctacattctgatacagtaagtcaaaggaatctagtggccaagagttgtagtttagaaacaacccatctgaatactgcttttaccactttgatacctgaaaagatcatccc

SEQ ID NO: 48616 - DNA, 120 bp, Artificial Sequence
  ENSG00000065923_63 (sequence is synthesized)
cctttctaaaacctgaaaacaacatatagagaaatactgtagaaaccattgctagtgtcttaactaggaaaagcaagtagactcatcaacaatcctttcaaaacaagacctagagataaa

SEQ ID NO: 48617 - DNA, 120 bp, Artificial Sequence
  ENSG00000065923_64 (sequence is synthesized)
cagttttttccagtgtcaattttcatagacatttttaaaaaattaaacacatcttgtcacccagtgctagcaaaaattgtaaagagcaaaaccaaagtttttgatgttagtcttattttt

SEQ ID NO: 48618 - DNA, 120 bp, Artificial Sequence
  ENSG00000065923_65 (sequence is synthesized)
gtaagcagggtatactatagtcgtggcccatatggaacacacaggcagccggttttctgctacctgagccttggagaagatgagaaggaagggctgcctgctgtgctgccctttgaaaag

SEQ ID NO: 48619 - DNA, 120 bp, Artificial Sequence
  ENSG00000065923_66 (sequence is synthesized)
gtccaaagcagacaggagcgcacacagcagaagtcaccttctccttctgatgaccacctttcaaaaggcttaacagaatcaccaagtgtcacagtcagctcttggccagtggaaaattgt

SEQ ID NO: 48620 - DNA, 120 bp, Artificial Sequence
  ENSG00000065923_67 (sequence is synthesized)
ctgggcctgtatatgttggaggaactcagatagaaaaggacttgtaaacagcatggaaacctcaacatctgctgtctcaagcacttaaaaaaggctacaattcaggtgttactggatgac

SEQ ID NO: 48621 - DNA, 120 bp, Artificial Sequence
  ENSG00000065923_68 (sequence is synthesized)
ttaactgcatggacatttaggggctgacttgtgttgtgattattccaattgtgggctttggagaagcagagggatgattttcagttgtgtgggtgttaagtctatggattgggaatttac

SEQ ID NO: 48622 - DNA, 120 bp, Artificial Sequence
  ENSG00000065923_69 (sequence is synthesized)
cactgaaattgatcgttcaaagtgtgacttcatagtagggccagctcctcctaagttgtccttttgtttttcacataaaatacatctggtactttttacttggaaagttgtactatgtcc

SEQ ID NO: 48623 - DNA, 120 bp, Artificial Sequence
  ENSG00000065923_70 (sequence is synthesized)
atgaaaatggttaaatgagaaggccataaagattcatttaatagctgaaaagcaacttttaaaatagaataggacgaatttaacatggaatgatgtgaccttctagggaactttttatag

SEQ ID NO: 48624 - DNA, 120 bp, Artificial Sequence
  ENSG00000065923_71 (sequence is synthesized)
agagcttacatagtgtaattggggagaattttgtcttctatttccattcaacagtagcaaactggtggttttataaaattaacattatagtatgttatataaataaacgttatataaaat

SEQ ID NO: 48625 - DNA, 120 bp, Artificial Sequence
  ENSG00000065923_72 (sequence is synthesized)
gacattaaagtataactgtgaaaaattaaagacttggcgttatccacaacctttatgtgcaataaggaaaactgcagtaggcccccaaagtgccgtctttccctagcattttactcaatg

SEQ ID NO: 48626 - DNA, 120 bp, Artificial Sequence
  ENSG00000065923_73 (sequence is synthesized)
tttgcctttgtgtatgtttagattgctattgtaaagctagccatgtgtgttcctgccctttactgatatttaacacattttctcaaagcttttctttttttaaaaaaacaaaactcaaaa

SEQ ID NO: 48627 - DNA, 120 bp, Artificial Sequence
  ENSG00000065923_74 (sequence is synthesized)
taaaacaactaactggctgagctaattttgttttgtattttaaagtaaagtatcatctgttggtagaaggctgtagtgtgatactattcttagtctgtttccctcactgagaggttcttt

SEQ ID NO: 48628 - DNA, 120 bp, Artificial Sequence
  ENSG00000065923_75 (sequence is synthesized)
tctgggtgtaagctattcctctccagctttctttaggcctggggttggcaaactacagctggctcctgaaccaagtccagcccactgcctttttttgtaaataaagttttattggcatga

SEQ ID NO: 48629 - DNA, 120 bp, Artificial Sequence
  ENSG00000065923_76 (sequence is synthesized)
tcccgatgggactgaagatttgaaaatacatccacgaacatttcaacatggaacgaagaattatagttccttctctggctatatccataaagaagtagttatgaaatgtttaaaaccaaa

SEQ ID NO: 48630 - DNA, 120 bp, Artificial Sequence
  ENSG00000065923_77 (sequence is synthesized)
ggaagataatgcttgactttccccccaagccctggcgcgatgggactgaagatttgaaaatacatccacgaacatttcaacatggaacgaagaattatagttccttctctggctatatcc

SEQ ID NO: 48631 - DNA, 120 bp, Artificial Sequence
  ENSG00000065923_78 (sequence is synthesized)
gattatgggacagctctcagataaattttactacacagattgtctcttttttggagcaatcatctctgccactgacccaggaagactctgatttcatcctgaccgaaggcgacctgacat

SEQ ID NO: 48632 - DNA, 120 bp, Artificial Sequence
  ENSG00000065970_0 (sequence is synthesized)
gcagcggagccgagccgagcccgagcccgcgccgagccctgacactgtctgcccgccttctggctccccgggagcccagactggtcggagcccgagcggtggcagcgcggggagccccac

SEQ ID NO: 48633 - DNA, 120 bp, Artificial Sequence
  ENSG00000065970_1 (sequence is synthesized)
gcgccgaagggagcggacccgacaggacggccctagaggaggtgctgccgccacagtagcagggaccggagtctcgagccgcggcctcccggaccgtgctgcccaggccagctcagggac

SEQ ID NO: 48634 - DNA, 120 bp, Artificial Sequence
  ENSG00000065970_2 (sequence is synthesized)
agccgggagtacgaaagccccaccctctggggcaccccgggagcggaggcgggagcggggacgcgagcaacctctccccctgttggagagaaaagacccttaccactcgggtgagggaaa

SEQ ID NO: 48635 - DNA, 120 bp, Artificial Sequence
  ENSG00000065970_3 (sequence is synthesized)
gaagagacccctggaggggacgcctctctcctgcctagaggcgaggaagacccctgtactggccggggaggagacccccagaagtggaaagaagggagctttccgtagggaagcagagtg

SEQ ID NO: 48636 - DNA, 120 bp, Artificial Sequence
  ENSG00000065970_4 (sequence is synthesized)
agaccaccctagcgcgcccccgcccctccaaacacacactctcaacagttcaggactttggaggcaaagagagacggggctgtgcctgtggagtaggcaccctcggcccaccactattca

SEQ ID NO: 48637 - DNA, 120 bp, Artificial Sequence
  ENSG00000065970_5 (sequence is synthesized)
caggagacaggagtccttacgttcagaagccactccagggaaagaagaggaatcggctttcagccttctggagaggggaagacctccccctcaacttcctcgtgcctagacagtggaacg

SEQ ID NO: 48638 - DNA, 120 bp, Artificial Sequence
  ENSG00000065970_6 (sequence is synthesized)
gggtggagcccctccgctcctatctccagcagacagaaagagccctccacctcagaaagatccagtttgggggggaggggaactcccccaagggggaggagacaactcctggttgggaga

SEQ ID NO: 48639 - DNA, 120 bp, Artificial Sequence
  ENSG00000065970_7 (sequence is synthesized)
ggctcctcccctcctcccccgggtaacaagcagggtgtggggggtgtgccaccttccccaagtaggacctccttctcctccccctccccctcctccaaccttgactcctcatcctcaggg

SEQ ID NO: 48640 - DNA, 120 bp, Artificial Sequence
  ENSG00000065970_8 (sequence is synthesized)
gacccagttcccctcaccaacttgggaggctcagcctcgtccaggaagagccactgaggatgagagccgtcacctgcctctgaagaggggaatccctccaaccccaaactccagtaccag

SEQ ID NO: 48641 - DNA, 120 bp, Artificial Sequence
  ENSG00000065970_9 (sequence is synthesized)
gtggttccctccctttgccggaggaaccttggagacagaacccagaagtaccatggcttctgacctagagagtagcctcacctccatagactggctcccccagctgaccctccgagctac

SEQ ID NO: 48642 - DNA, 120 bp, Artificial Sequence
  ENSG00000065970_10 (sequence is synthesized)
cattgagaagcttggaagtgcctcccaggctgggcctcccgggagcagccgcaagtgttcaccagggtcacccacagatcctaatgccaccctgagcaaagacgaggcagcagtgcacca

SEQ ID NO: 48643 - DNA, 120 bp, Artificial Sequence
  ENSG00000065970_11 (sequence is synthesized)
ggacggcaagccacgatacagctatgccactctcatcacctatgccatcaactcctctccagccaagaagatgaccctcagcgagatttaccgctggatctgtgataacttcccctatta

SEQ ID NO: 48644 - DNA, 120 bp, Artificial Sequence
  ENSG00000065970_12 (sequence is synthesized)
caagaatgctggcattggttggaagaattcaatacggcacaacctttctctcaacaagtgtttccggaaggtgcccagacctcgggatgaccctgggaagggttcctattggacaattga

SEQ ID NO: 48645 - DNA, 120 bp, Artificial Sequence
  ENSG00000065970_13 (sequence is synthesized)
cacctgccctgacatttcccgaaagagaagacaccctccagatgatgatctgtcccaagactcaccagaacaggaggcaagcaagagcccacggggaggcgttgcagggagtggagaagc

SEQ ID NO: 48646 - DNA, 120 bp, Artificial Sequence
  ENSG00000065970_14 (sequence is synthesized)
ctcactgcctcctgaggggaatccgcagatgtcacttcagagccccacatctatagccagctacagccagggcacaggatctgtggatggtggagcagtggcagcaggggcttcaggccg

SEQ ID NO: 48647 - DNA, 120 bp, Artificial Sequence
  ENSG00000065970_15 (sequence is synthesized)
agaaagtgctgagggtccccctcccctctataacaccaaccatgactttaaattctcctactcagagatcaactttcaggatctaagctggtccttccgcaacctctataagtccatgct

SEQ ID NO: 48648 - DNA, 120 bp, Artificial Sequence
  ENSG00000065970_16 (sequence is synthesized)
ggagaagtcctcttcctcctctcagcacggcttttcttctctcctgggggacatcccaccctcgaacaactactacatgtatcagcagcagcagccaccgccacctcaacagcagcagca

SEQ ID NO: 48649 - DNA, 120 bp, Artificial Sequence
  ENSG00000065970_17 (sequence is synthesized)
gcagcagcagccgccacagccacctccccagcagtcccagccacagcagcagcaggcacctgcccagggcccctcagctgtagggggtgctcctccactgcacaccccaagcacagatgg

SEQ ID NO: 48650 - DNA, 120 bp, Artificial Sequence
  ENSG00000065970_18 (sequence is synthesized)
ttgtaccccaccagggggaaagcaagctggggcggaaggctatgggcctccccctgtaatggccatgcatccacccccgctgcagcatggaggctaccaccctcatcagcaccatcccca

SEQ ID NO: 48651 - DNA, 120 bp, Artificial Sequence
  ENSG00000065970_19 (sequence is synthesized)
ctcccaccctgcccagcagccaccacctccacagccacaggcacaaggccaggctcccatcaacaacactggctttgcctttccttctgactggtgctctaatattgactctttaaagga

SEQ ID NO: 48652 - DNA, 120 bp, Artificial Sequence
  ENSG00000065970_20 (sequence is synthesized)
aagcttcaagatggtgaatcggctcaattggtccagcattgagcagtcacaattctcagaactgatggagagtctacgacaggcagagcagaagaactggaccctcgaccagcatcacat

SEQ ID NO: 48653 - DNA, 120 bp, Artificial Sequence
  ENSG00000065970_21 (sequence is synthesized)
tgccaatctgtgtgactccctcaaccacttccttactcagactggtcacgtgccccctcaagggggtacccaccgcccaccagcccctgcccgtattgctgactcctgtgccctcaccag

SEQ ID NO: 48654 - DNA, 120 bp, Artificial Sequence
  ENSG00000065970_22 (sequence is synthesized)
tggcaaacaggagtcagccatgagccaagtgaactcttatgggcacccacaagctccccacctctaccctggcccatcaccaatgtacccaatccccacccaggactcagcaggatacaa

SEQ ID NO: 48655 - DNA, 120 bp, Artificial Sequence
  ENSG00000065970_23 (sequence is synthesized)
ccagcacaccatatggtccctcggccatcagtgccacctcctggtgccaatgaggagatccctgatgacttcgactgggacttgatcacttagtgcatcacagagtgtggacatcagccc

SEQ ID NO: 48656 - DNA, 120 bp, Artificial Sequence
  ENSG00000065970_24 (sequence is synthesized)
agggccgcgtggtgaaatctggcagtggggaaagagcaaccccagcccgtcccttccccccgtctgtatatagacatatatcctctttttgttctttctctgtcagagaagccactgcaa

SEQ ID NO: 48657 - DNA, 120 bp, Artificial Sequence
  ENSG00000065970_25 (sequence is synthesized)
gatgctgccgaagataaccctctctttcctgcctcattcttctctcttccttcctgttttttcctagttcttttattattattcttatattattattattattattggttatatactgtc

SEQ ID NO: 48658 - DNA, 120 bp, Artificial Sequence
  ENSG00000065970_26 (sequence is synthesized)
catagtctcctgtccctacatcatggatcatgtccaccttttgctaatttaaaatcatcaggctggaagatgaagccatgatagctacagagaaaggttttagactccagtttacctttc

SEQ ID NO: 48659 - DNA, 120 bp, Artificial Sequence
  ENSG00000065970_27 (sequence is synthesized)
tcttggagaaactcaatgctaatcccaccttttggccctaaattgttttttgttcccatcagtttcaggccaggactggagaggccacattaccaagtagaaagggtctgaaacattact

SEQ ID NO: 48660 - DNA, 120 bp, Artificial Sequence
  ENSG00000065970_28 (sequence is synthesized)
tggcagccaagaatttggaggttttaaaatggtgctaattctgtcctctgaggtcttccttgtccctttataccttcaatccttacttctgccagtctgtatttcctatcaagggtgaaa

SEQ ID NO: 48661 - DNA, 120 bp, Artificial Sequence
  ENSG00000065970_29 (sequence is synthesized)
gtgatgatggtggtgcaggagggtgacaataaaatcctagtggaattggagaccattggaagggatggaatataagtcagtgtgaaactgagtatacactgccatgttacatcagtgtcc

SEQ ID NO: 48662 - DNA, 120 bp, Artificial Sequence
  ENSG00000065970_30 (sequence is synthesized)
attggcttgttttgagcctgttctctaagaagataggattggttttagcccaaactctgcttctatggtagggcatgaggacaactattcagcatggttttagcttcttggagatgattc

SEQ ID NO: 48663 - DNA, 120 bp, Artificial Sequence
  ENSG00000065970_31 (sequence is synthesized)
caacttaactattttggctttttaaacataattttctctgaaaattaattgtggctcttatttgcatttacgaatgatcttcccatccctttttcccattcagcaaatattagtttgtcc

SEQ ID NO: 48664 - DNA, 120 bp, Artificial Sequence
  ENSG00000065970_32 (sequence is synthesized)
tcctttaattgtttgcccaaatcttccacccatcttttttcttccctcattttctgggattctcaagaaagaaaaagtaacccattatcactctgagtttcgtcgtgccctgagacatga

SEQ ID NO: 48665 - DNA, 120 bp, Artificial Sequence
  ENSG00000065970_33 (sequence is synthesized)
tgggaatctcattcccacctctcatagcagagccaaacctttagtgttggtggtaggaggatggggagaggaaaaaagagctggcaaagaaatggatagggaatattttagttctttaaa

SEQ ID NO: 48666 - DNA, 120 bp, Artificial Sequence
  ENSG00000065970_34 (sequence is synthesized)
tatataggcagatgcttctcttggaatccagatcatctggctgaagcttttgcaagtaggctttgaggggtgaaggagattggtggaggagagtaaataatctagaggcaagagttcagt

SEQ ID NO: 48667 - DNA, 120 bp, Artificial Sequence
  ENSG00000065970_35 (sequence is synthesized)
gagggccaagggggacccccagaaaaaggtatggagctaactcatctcttttacaaggggtggccatgacttactgttgcaaagtactcagtgtatatttaatgttgattgttgaatttt

SEQ ID NO: 48668 - DNA, 120 bp, Artificial Sequence
  ENSG00000065970_36 (sequence is synthesized)
agttacgagagggaagaacaattttacttctgtccttatttcacttgctgaaaagctgtgggacaaaatgtatggaatagacaaggccactttctttgtgatttctgcttttcatgcata

SEQ ID NO: 48669 - DNA, 120 bp, Artificial Sequence
  ENSG00000065970_37 (sequence is synthesized)
ttattttatttacccataatttccaagaggtttggcgttccgctctcctgcttttttctttcatccacccctttcctttttttggaagggggttatatatgagagttcattgaagaagtc

SEQ ID NO: 48670 - DNA, 120 bp, Artificial Sequence
  ENSG00000065970_38 (sequence is synthesized)
cagtgaggctgaagtaaaggggcaagatagggcagttaactaaagagcactttatttctttgaagcctttctaagaaagaaatgggggtgcgagtggcttgaatctcccatgatgttgga

SEQ ID NO: 48671 - DNA, 120 bp, Artificial Sequence
  ENSG00000065970_39 (sequence is synthesized)
gggcacttagtggggttgaagtatgacataatatttcccattggggaaaggagaatttctcttagagggtggcaaaatgcctttgcccagtgtccctattttaggcatcttttccttcct

SEQ ID NO: 48672 - DNA, 120 bp, Artificial Sequence
  ENSG00000065970_40 (sequence is synthesized)
tattccttccagtcagggtgtgtcctatacaaaacttcccatcagttctcctcaatattccccatttgtaaatgatcacttctcttttctaaacccttttcctgttcagatccatacagg

SEQ ID NO: 48673 - DNA, 120 bp, Artificial Sequence
  ENSG00000065970_41 (sequence is synthesized)
atttgcaagggtaggatcatacatgcaaatgccccttgttcatctgtgtcttctgcaaactagtctcatgaagaattctggcgtgcagccagggtagctgaagtttgggtctgggactgg

SEQ ID NO: 48674 - DNA, 120 bp, Artificial Sequence
  ENSG00000065970_42 (sequence is synthesized)
agattggccattaggcctcctgagattccagctcccttccaccaagcccagtcttgctacgtggcacagggcaaacctgactccctttgggcctcagtttcccctccccttcatgaaatg

SEQ ID NO: 48675 - DNA, 120 bp, Artificial Sequence
  ENSG00000065970_43 (sequence is synthesized)
aaaagaatactactttttcttgttggtctagcattgctggacacaaagtgtagtcattattgttgtattgggtgatgtgtgcaaaactgcagaagctcactgcctataagaggaaataag

SEQ ID NO: 48676 - DNA, 120 bp, Artificial Sequence
  ENSG00000065970_44 (sequence is synthesized)
agagaaagtggaggagagggacaaaaggagtaattatttggtatagatccacccatcccaacctttctctcctcagtccctgctcctcatgtttctggtttggtgagtcctttgtgccac

SEQ ID NO: 48677 - DNA, 120 bp, Artificial Sequence
  ENSG00000065970_45 (sequence is synthesized)
cacccataatgctttgcattgctgcatcctgggaagggggtatatggtctcacaagttgttgtcattgtttttttgcatgctttcttaataaaaaaaaaaaaagaatgtttacagtttta

SEQ ID NO: 48678 - DNA, 120 bp, Artificial Sequence
  ENSG00000065970_46 (sequence is synthesized)
gcataggagaaaggcaaaagagaactgagagaaaggattttatggggcagtgacccaaattgagcagtggaactagtttatcagttgactgaatatctgttgaatcagtgaagtcctaaa

SEQ ID NO: 48679 - DNA, 120 bp, Artificial Sequence
  ENSG00000065970_47 (sequence is synthesized)
ctgaaaaatgcaaaagaaatagactgtatgattcctttttagacctcagtttgggagatcagaattgtttaagaaaagggaggagatttgttagagaaaggctgtattttaaatttgcgt

SEQ ID NO: 48680 - DNA, 120 bp, Artificial Sequence
  ENSG00000065970_48 (sequence is synthesized)
ctcagtaatccctaccgcctgggtgataccggatgaaatggtggttctatgcttatgtgatgttcaaactagtgaaatgagagagatgtcatgattatgttcctgtttcttgctttttgt

SEQ ID NO: 48681 - DNA, 68 bp, Artificial Sequence
  ENSG00000065970_49 (sequence is synthesized)
gtgtatagctggggtttcaccgtgtcgcccaggctatcttcaaactcttggactcaagggatctaccc

SEQ ID NO: 48682 - DNA, 89 bp, Artificial Sequence
  ENSG00000065970_50 (sequence is synthesized)
gcccaggctgcaaccttgacccctggagctcagctggggtttcaccgtgtcgcccaggctatcttcaaactcttggactcaagggatct

SEQ ID NO: 48683 - DNA, 120 bp, Artificial Sequence
  ENSG00000065970_51 (sequence is synthesized)
tcgcccaggctatcttcaaactcttggactcaagggatctacccacctcggctgcccaaagtgttgggattacagtggtgaggactgacagcttctgcagaaagccttcatgcctgcagg

SEQ ID NO: 48684 - DNA, 120 bp, Artificial Sequence
  ENSG00000065978_0 (sequence is synthesized)
attctcgctagttcgatcggtagcgggagcggagagcggaccccagagagccctgagcagccccaccgccgccgccggcctagttaccatcacaccccgggaggagccgcagctgccgca

SEQ ID NO: 48685 - DNA, 120 bp, Artificial Sequence
  ENSG00000065978_1 (sequence is synthesized)
cagtcaccatcaccgcaaccatgagcagcgaggccgagacccagcagccgcccgccgccccccccgccgcccccgccctcagcgccgccgacaccaagcccggcactacgggcagcggcg

SEQ ID NO: 48686 - DNA, 120 bp, Artificial Sequence
  ENSG00000065978_2 (sequence is synthesized)
cagcggcgcagggagcggtggcccgggcggcctcacatcggcggcgcctgccggcggggacaagaaggtcatcgcaacgaaggttttgggaacagtaaaatggttcaatgtaaggaacgg

SEQ ID NO: 48687 - DNA, 120 bp, Artificial Sequence
  ENSG00000065978_3 (sequence is synthesized)
atatggtttcatcaacaggaatgacaccaaggaagatgtatttgtacaccagactgccataaagaagaataaccccaggaagtaccttcgcagtgtaggagatggagagactgtggagtt

SEQ ID NO: 48688 - DNA, 120 bp, Artificial Sequence
  ENSG00000065978_4 (sequence is synthesized)
tgatgttgttgaaggagaaaagggtgcggaggcagcaaatgttacaggtcctggtggtgttccagttcaaggcagtaaatatgcagcagaccgtaaccattatagacgctatccacgtcg

SEQ ID NO: 48689 - DNA, 120 bp, Artificial Sequence
  ENSG00000065978_5 (sequence is synthesized)
taggggtcctccacgcaattaccagcaaaattaccagaatagtgagagtggggaaaagaacgagggatcggagagtgctcccgaaggccaggcccaacaacgccggccctaccgcaggcg

SEQ ID NO: 48690 - DNA, 120 bp, Artificial Sequence
  ENSG00000065978_6 (sequence is synthesized)
aaggttcccaccttactacatgcggagaccctatgggcgtcgaccacagtattccaaccctcctgtgcagggagaagtgatggagggtgctgacaaccagggtgcaggagaacaaggtag

SEQ ID NO: 48691 - DNA, 120 bp, Artificial Sequence
  ENSG00000065978_7 (sequence is synthesized)
accagtgaggcagaatatgtatcggggatatagaccacgattccgcaggggccctcctcgccaaagacagcctagagaggacggcaatgaagaagataaagaaaatcaaggagatgagac

SEQ ID NO: 48692 - DNA, 120 bp, Artificial Sequence
  ENSG00000065978_8 (sequence is synthesized)
ccaaggtcagcagccacctcaacgtcggtaccgccgcaacttcaattaccgacgcagacgcccagaaaaccctaaaccacaagatggcaaagagacaaaagcagccgatccaccagctga

SEQ ID NO: 48693 - DNA, 120 bp, Artificial Sequence
  ENSG00000065978_9 (sequence is synthesized)
gaattcgtccgctcccgaggctgagcagggcggggctgagtaaatgccggcttaccatctctaccatcatccggtttagtcatccaacaagaagaaatatgaaattccagcaataagaaa

SEQ ID NO: 48694 - DNA, 120 bp, Artificial Sequence
  ENSG00000065978_10 (sequence is synthesized)
tgaacaaaagattggagctgaagacctaaagtgcttgctttttgcccgttgaccagataaatagaactatctgcattatctatgcagcatggggtttttattatttttacctaaagacgt

SEQ ID NO: 48695 - DNA, 120 bp, Artificial Sequence
  ENSG00000065978_11 (sequence is synthesized)
ctctttttggtaataacaaacgtgttttttaaaaaagcctggtttttctcaatacgcctttaaaggtttttaaattgtttcatatctggtcaagttgagatttttaagaacttcattttt

SEQ ID NO: 48696 - DNA, 120 bp, Artificial Sequence
  ENSG00000065978_12 (sequence is synthesized)
tgtctagttttgctttagtttgtaagtatttagctatttataggacccttagcttgacccagtctacaaatagatgatgctcactggtaattccctcaggtaaaatgtctcaaaatctct

SEQ ID NO: 48697 - DNA, 120 bp, Artificial Sequence
  ENSG00000065978_13 (sequence is synthesized)
aatcctttaagtggcatgcctgtgggcccatactaaaaattagaaaatacatactctgataacctggccatttttcattgaaggatttagctcatttgtaagaaagacttgagtgtagat

SEQ ID NO: 48698 - DNA, 120 bp, Artificial Sequence
  ENSG00000065978_14 (sequence is synthesized)
tttgggtgggtccctttggctgtgaggcattgtttaaaagggcattgctctagcctagaccgaccagactctcatcctgctccacttagttttgtcaccttgggagaatttgtttcagtg

SEQ ID NO: 48699 - DNA, 120 bp, Artificial Sequence
  ENSG00000065978_15 (sequence is synthesized)
tgtcaattgaagatgccaattgaagtgttaggacaacctgtcacactgcctggtgtggtcatcaaatattggttcagctccttatgtcctagagatggaaacaagtaatataaaacccat

SEQ ID NO: 48700 - DNA, 120 bp, Artificial Sequence
  ENSG00000065978_16 (sequence is synthesized)
gggaaagctgcttaggaacatggaggttggtgagcttgtaattatgtggttctcaacaccttaaatcctaagcctagtctggctgatcttttctctttttgagacggagtcttgttctgt

SEQ ID NO: 48701 - DNA, 73 bp, Artificial Sequence
  ENSG00000065978_17 (sequence is synthesized)
aatcttggctcactgcaacctccacctctaggtttaagcgattctcctgcctcggccaccttagtagctggga

SEQ ID NO: 48702 - DNA, 120 bp, Artificial Sequence
  ENSG00000065978_18 (sequence is synthesized)
gagccaccgcacctggcctctctggcttttgttttctaatgttttgttagatgttctttggcttgctttgtgaaatagtcatgtagttgatagtgactgctgccccgaaacactccagat

SEQ ID NO: 48703 - DNA, 120 bp, Artificial Sequence
  ENSG00000065978_19 (sequence is synthesized)
catcctggccagctatcagggcccaggggaagcagacagtaggggtcgggagtaggccagagtggcacatcaggaatcctgcagtgctgtggaagtcatctcctgcttgggactaactct

SEQ ID NO: 48704 - DNA, 120 bp, Artificial Sequence
  ENSG00000065978_20 (sequence is synthesized)
ttgcagaggacttgataagagactactcaaaaaaaatttttttaaccctacttagtgtaaatatctgtactgcagaagtgagttagcctatttcttgctggtgttcatgaaaatactgtg

SEQ ID NO: 48705 - DNA, 120 bp, Artificial Sequence
  ENSG00000065978_21 (sequence is synthesized)
ttggcaagagtgcagtggacctgaaacttcaactgttggtagcatctaaactgttacttacaactgcagacgcacacagtccctgacttaaacagtggtttgacttaggggcttttagtg

SEQ ID NO: 48706 - DNA, 120 bp, Artificial Sequence
  ENSG00000065978_22 (sequence is synthesized)
gggttacggtttctactgaatcaacattgttttcatggcatcacagagttgaaaaatcataaatgaaaccattgtaagttgactgcagtgttgccaacattaaatgcagtttcaacttaa

SEQ ID NO: 48707 - DNA, 120 bp, Artificial Sequence
  ENSG00000065978_23 (sequence is synthesized)
cgcgtgtgcgacggggtcccctccccgccgaccggcctcgtgcgctcgggcccgcacgccgttgttcgcgtcacccccacccagctcccttccgcgtgtgctcggagggcgcggcgcacc

SEQ ID NO: 48708 - DNA, 120 bp, Artificial Sequence
  ENSG00000065978_24 (sequence is synthesized)
gcctacgcaggccggagcggcttccccttccctcacgtgctctccgtccgcggcctgcgcacacacccatcctggggcccgcgccccgggcctgccctggagcgccccgcgcttcagact

SEQ ID NO: 48709 - DNA, 120 bp, Artificial Sequence
  ENSG00000065978_25 (sequence is synthesized)
gactcacccacgtgtgcggcggcggcggcgactgcgtggccccgcacccgggcggtggagagaaagggctgtcaggtggccgcggcggccggcgtgcgagggaccggatgcccaagccgg

SEQ ID NO: 48710 - DNA, 80 bp, Artificial Sequence
  ENSG00000065989_0 (sequence is synthesized)
gagcgccgccgggcactgagcagagctccaggcgccgaaaggaagctgcagagcccggcccgggggcgattggcccgcag

SEQ ID NO: 48711 - DNA, 120 bp, Artificial Sequence
  ENSG00000065989_1 (sequence is synthesized)
ggggccctgggctcgctggcttgcgcgcagctgagcggggtgtaggttggaagggccagggccccctggggcgcaagtgggggccggcgccatggaacccccgaccgtcccctcggaaag

SEQ ID NO: 48712 - DNA, 120 bp, Artificial Sequence
  ENSG00000065989_2 (sequence is synthesized)
ccgtcccctcggaaaggagcctgtctctgtcactgcccgggccccgggagggccaggccaccctgaagcctcccccgcagcacctgtggcggcagcctcggacccccatccgtatccagc

SEQ ID NO: 48713 - DNA, 120 bp, Artificial Sequence
  ENSG00000065989_3 (sequence is synthesized)
agcgcggctactccgacagcgcggagcgcgccgagcgggagcggcagccgcaccggcccatagagcgcgccgatgccatggacaccagcgaccggcccggcctgcgcacgacccgcatgt

SEQ ID NO: 48714 - DNA, 120 bp, Artificial Sequence
  ENSG00000065989_4 (sequence is synthesized)
cctggccctcgtccttccatggcactggcaccggcagcggcggcgcgggcggaggcagcagcaggcgcttcgaggcagagaatgggccgacaccatctcctggccgcagccccctggact

SEQ ID NO: 48715 - DNA, 120 bp, Artificial Sequence
  ENSG00000065989_5 (sequence is synthesized)
cgcaggcgagcccaggactcgtgctgcacgccggggcggccaccagccagcgccgggagtccttcctgtaccgctcagacagcgactatgacatgtcacccaagaccatgtcccggaact

SEQ ID NO: 48716 - DNA, 120 bp, Artificial Sequence
  ENSG00000065989_6 (sequence is synthesized)
catcggtcaccagcgaggcgcacgctgaagacctcatcgtaacaccatttgctcaggtgctggccagcctccggagcgtccgtagcaacttctcactcctgaccaatgtgcccgttccca

SEQ ID NO: 48717 - DNA, 120 bp, Artificial Sequence
  ENSG00000065989_7 (sequence is synthesized)
gtaacaagcggtccccgctgggcggccccacccctgtctgcaaggccacgctgtcagaagaaacgtgtcagcagttggcccgggagactctggaggagctggactggtgtctggagcagc

SEQ ID NO: 48718 - DNA, 120 bp, Artificial Sequence
  ENSG00000065989_8 (sequence is synthesized)
tggagaccatgcagacctatcgctctgtcagcgagatggcctcgcacaagttcaaaaggatgttgaaccgtgagctcacacacctgtcagaaatgagcaggtccggaaaccaggtctcag

SEQ ID NO: 48719 - DNA, 120 bp, Artificial Sequence
  ENSG00000065989_9 (sequence is synthesized)
agtacatttccacaacattcctggacaaacagaatgaagtggagatcccatcacccacgatgaaggaacgagaaaaacagcaagcgccgcgaccaagaccctcccagccgcccccgcccc

SEQ ID NO: 48720 - DNA, 120 bp, Artificial Sequence
  ENSG00000065989_10 (sequence is synthesized)
ctgtaccacacttacagcccatgtcccaaatcacagggttgaaaaagttgatgcatagtaacagcctgaacaactctaacattccccgatttggggtgaagaccgatcaagaagagctcc

SEQ ID NO: 48721 - DNA, 120 bp, Artificial Sequence
  ENSG00000065989_11 (sequence is synthesized)
tggcccaagaactggagaacctgaacaagtggggcctgaacatcttttgcgtgtcggattacgctggaggccgctcactcacctgcatcatgtacatgatattccaggagcgggacctgc

SEQ ID NO: 48722 - DNA, 120 bp, Artificial Sequence
  ENSG00000065989_12 (sequence is synthesized)
tgaagaaattccgcatccctgtggacacgatggtgacatacatgctgacgctggaggatcactaccacgctgacgtggcctaccataacagcctgcacgcagctgacgtgctgcagtcca

SEQ ID NO: 48723 - DNA, 120 bp, Artificial Sequence
  ENSG00000065989_13 (sequence is synthesized)
cccacgtactgctggccacgcctgcactagatgcagtgttcacggacctggagattctcgccgccctcttcgcggctgccatccacgatgtggatcaccctggggtctccaaccagttcc

SEQ ID NO: 48724 - DNA, 120 bp, Artificial Sequence
  ENSG00000065989_14 (sequence is synthesized)
tcatcaacaccaattcggagctggcgctcatgtacaacgatgagtcggtgctcgagaatcaccacctggccgtgggcttcaagctgctgcaggaggacaactgcgacatcttccagaacc

SEQ ID NO: 48725 - DNA, 120 bp, Artificial Sequence
  ENSG00000065989_15 (sequence is synthesized)
tcagcaagcgccagcggcagagcctacgcaagatggtcatcgacatggtgctggccacggacatgtccaagcacatgaccctcctggctgacctgaagaccatggtggagaccaagaaag

SEQ ID NO: 48726 - DNA, 120 bp, Artificial Sequence
  ENSG00000065989_16 (sequence is synthesized)
tgaccagctcaggggtcctcctgctagataactactccgaccgcatccaggtcctccggaacatggtgcactgtgccgacctcagcaaccccaccaagccgctggagctgtaccgccagt

SEQ ID NO: 48727 - DNA, 120 bp, Artificial Sequence
  ENSG00000065989_17 (sequence is synthesized)
ggacagaccgcatcatggccgagttcttccagcagggtgaccgagagcgcgagcgtggcatggaaatcagccccatgtgtgacaagcacactgcctccgtggagaagtctcaggtgggtt

SEQ ID NO: 48728 - DNA, 120 bp, Artificial Sequence
  ENSG00000065989_18 (sequence is synthesized)
ttattgactacattgtgcacccattgtgggagacctgggcggaccttgtccacccagatgcccaggagatcttggacactttggaggacaaccgggactggtactacagcgccatccggc

SEQ ID NO: 48729 - DNA, 120 bp, Artificial Sequence
  ENSG00000065989_19 (sequence is synthesized)
agagcccatctccgccacccgaggaggagtcaagggggccaggccacccacccctgcctgacaagttccagtttgagctgacgctggaggaggaagaggaggaagaaatatcaatggccc

SEQ ID NO: 48730 - DNA, 120 bp, Artificial Sequence
  ENSG00000065989_20 (sequence is synthesized)
ccaggagtcgttggaagttatggcacaggaagcatccctggaggccgagctggaggcagtgtatttgacacagcaggcacagtccacaggcagtgcacctgtggctccggatgagttctc

SEQ ID NO: 48731 - DNA, 120 bp, Artificial Sequence
  ENSG00000065989_21 (sequence is synthesized)
gtcccgggaggaattcgtggttgctgtaagccacagcagcccctctgccctggctcttcaaagcccccttctccctgcttggaggaccctgtctgtttcagagcatgccccgggcctccc

SEQ ID NO: 48732 - DNA, 120 bp, Artificial Sequence
  ENSG00000065989_22 (sequence is synthesized)
gggcctcccctccacggcggccgaggtggaggcccaacgagagcaccaggctgccaagagggcttgcagtgcctgcgcagggacatttggggaggacacatccgcactcccagctcctgg

SEQ ID NO: 48733 - DNA, 120 bp, Artificial Sequence
  ENSG00000065989_23 (sequence is synthesized)
tggcggggggtcaggtggagaccctacctgatccccagacctctgtccctgttcccctccactcctcccctcactcccctgctcccccgaccacctcctcctctgcctcaaagactcttg

SEQ ID NO: 48734 - DNA, 120 bp, Artificial Sequence
  ENSG00000065989_24 (sequence is synthesized)
tcctcttgtccctcctgagaaaaaagaaaacgaaaagtggggtttttttctgttttctttttttcccctttccccctgcccccacccacggggcctttttttggaggtgggggctgggga

SEQ ID NO: 48735 - DNA, 120 bp, Artificial Sequence
  ENSG00000065989_25 (sequence is synthesized)
cggggcctttttttggaggtgggggctggggaatgaggggctgaggtcccggaagggattttatttttttgaattttaattgtaacatttttagaaaaagaacaaaaaaagaaaaaaaaa

SEQ ID NO: 48736 - DNA, 120 bp, Artificial Sequence
  ENSG00000065989_26 (sequence is synthesized)
ttcctggttcccgctttccacttccaaatccctcccctcaccttcccccactgccccccaagttccaggctcagtcttccagccgcctggggagtctctacctgggcccaagcaggtgtg

SEQ ID NO: 48737 - DNA, 120 bp, Artificial Sequence
  ENSG00000065989_27 (sequence is synthesized)
gggcctccttctgggcttttcttctgaatttagaggatttctagaacgtggtcaggaatagccattctaggcggggctggggccagggtggggggcagtcactgtgggaggtcccagctc

SEQ ID NO: 48738 - DNA, 120 bp, Artificial Sequence
  ENSG00000065989_28 (sequence is synthesized)
cagcccccctctggtttgctgcctcctctcccctctaaaaaagtcttccgcttgattttgcacaatcccggcgatactcctggcgatactgactagaaagtcagggagctgggggagctg

SEQ ID NO: 48739 - DNA, 120 bp, Artificial Sequence
  ENSG00000065989_29 (sequence is synthesized)
ttcactttaggatacgggggtggtatggaagggagcgttcacaccgccagcctcgggcctgggatttgaggagggccctagacctcctccactctccatcccctttcccttccactttgg

SEQ ID NO: 48740 - DNA, 120 bp, Artificial Sequence
  ENSG00000065989_30 (sequence is synthesized)
gttcactttgaattttctccgttttttggggcagtggctctgatccactcacccccccgccccccgccccacttctagctgcttctcctcttgtttctgccttaataattcccacggcca

SEQ ID NO: 48741 - DNA, 120 bp, Artificial Sequence
  ENSG00000065989_31 (sequence is synthesized)
caggcaagggggttgcagtggccgcctgcaccttggatgaggcagggccaggcgcccagaacccccatcctggccgcacccccctttccagggtcctccggaccccaccttccacactct

SEQ ID NO: 48742 - DNA, 120 bp, Artificial Sequence
  ENSG00000065989_32 (sequence is synthesized)
gatcacagcccccctaccttttgccctaggaggaagcaataatggtgtataccctcattctcattcctgggcagcccttccttccaccctggcaccaaaataatttctcctccatccgta

SEQ ID NO: 48743 - DNA, 120 bp, Artificial Sequence
  ENSG00000065989_33 (sequence is synthesized)
ccttgcctagcctctccctctcccccagctagtccctgagcaatacggcagacagatgcaagaccatttttctccaagccatgggggactgtttggaaggaaagccccctctctccctcc

SEQ ID NO: 48744 - DNA, 120 bp, Artificial Sequence
  ENSG00000065989_34 (sequence is synthesized)
tcccctcgccctcggcctggttctgcagctggaccgacctcattcatcgcctgccccctacccaattctgagcacacggtactgtagcccccagttcctccctagccttccatccctctg

SEQ ID NO: 48745 - DNA, 120 bp, Artificial Sequence
  ENSG00000065989_35 (sequence is synthesized)
tccaccccagggggaggtaaccccgcactcacactcccttgatgctgtctgtacagggttcatattttgtagcgaaagtcgtttttgtcccagccggcgatcggagtgggccttttcttt

SEQ ID NO: 48746 - DNA, 120 bp, Artificial Sequence
  ENSG00000065989_36 (sequence is synthesized)
ctttttgttcattctttacctttttttcttttctttctttcttttttgtacatactgtaaggttggtttgtaaattattctacggaggcaaaaagggaaaataaaaacttgcccttccct

SEQ ID NO: 48747 - DNA, 120 bp, Artificial Sequence
  ENSG00000065989_37 (sequence is synthesized)
ggctgacccagtcgggaaggtagggaaggaggtctcccgttgggagagtctctgttcctgctgtattatacaaactgtaccatagtcctgggaaaagggtggactcaccgctgttgtttt

SEQ ID NO: 48748 - DNA, 120 bp, Artificial Sequence
  ENSG00000065989_38 (sequence is synthesized)
atgggaagtcgtgtcatcctaggggttggggctgggcagagcctgtcccctccccccttctccaggagccagggggtgactggagagacagacccacccccaagcagggctcctctcccc

SEQ ID NO: 48749 - DNA, 120 bp, Artificial Sequence
  ENSG00000065989_39 (sequence is synthesized)
agggtgagcacaggacctctgtaagctgcttgtgtattgtccactttgacgatcagtcattcggtccgttgatcaataatccttcgatcttgtctccaattaaaccgaggctttcaccga

SEQ ID NO: 48750 - DNA, 120 bp, Artificial Sequence
  ENSG00000065989_40 (sequence is synthesized)
ctgcaactggtggccttcccggtggcggtggcggctgaggacgaggcgttcctgcccgagcccctggccccgcgcgcgccccgccgcccgcgttcgccgccctcctcgcccgtcttcttc

SEQ ID NO: 48751 - DNA, 120 bp, Artificial Sequence
  ENSG00000065989_41 (sequence is synthesized)
cgcccgcgttcgccgccctcctcgcccgtcttcttcgccagcccgtccccaactttccgcagacgccttcggcttctccgcagctgccaggatttgggccgccaggcttgggctggggct

SEQ ID NO: 48752 - DNA, 120 bp, Artificial Sequence
  ENSG00000065989_42 (sequence is synthesized)
gcagcgccccgggcccggccccggccccctgccctggcactgccccccacgggccccgagtccctgacccacttccccttcagcgatgaggacacccgtcggcaccctccgggcagatct

SEQ ID NO: 48753 - DNA, 120 bp, Artificial Sequence
  ENSG00000065989_43 (sequence is synthesized)
cgtcacgccccaggagaggcaataggaggccctggccctgccgacatggccaccgcagtcccaacggcgcgctaggttggcgagatgaagaggagtcgcagtgccctgtccgtggcaggg

SEQ ID NO: 48754 - DNA, 120 bp, Artificial Sequence
  ENSG00000065989_44 (sequence is synthesized)
accggggacgagaggtcgagggagacccccgaatccgaccgtgccaacatgctgggggccgacctgcgtcgccctcgccgccgcctctcgtccggtcctggcctgggctgggcccagcct

SEQ ID NO: 48755 - DNA, 120 bp, Artificial Sequence
  ENSG00000065989_45 (sequence is synthesized)
gagccctcggaccctggggtccctctgccgccacggcccaccaccctgccgctgctgatcccaccgcggatttccatcaccagggccgagaacgacagcttcgaggcagagaatgggccg

SEQ ID NO: 48756 - DNA, 120 bp, Artificial Sequence
  ENSG00000065989_46 (sequence is synthesized)
ctcccatgggcacggaccccccaccgcctccacccactgccgcgggggggcccgttggggcccagggctggcgggccatgtaaccagggctgctgctgggagcgcggaggggaagggagc

SEQ ID NO: 48757 - DNA, 120 bp, Artificial Sequence
  ENSG00000065989_47 (sequence is synthesized)
gctgctgctgggagcgcggaggggaagggagcccccagccctgctgggccggcccaggcccctccgcggctcccccttccactacccacctgcccggcaccccctccccagtggttgtta

SEQ ID NO: 48758 - DNA, 120 bp, Artificial Sequence
  ENSG00000065989_48 (sequence is synthesized)
gttaaccccgggactccccaagcccagcctctgtgtgcagcagccccaggcgggctaagtctccaagatgcccttggtggatttcttctgcgagacctgctctaagccttggctggtggg

SEQ ID NO: 48759 - DNA, 120 bp, Artificial Sequence
  ENSG00000065989_49 (sequence is synthesized)
tggtgggcggggctggggcgggacggagcgggaaaggaagcctaggagtcgagggctttggggaggagtgggtctgagtcccagaggaaccctcaacctggacagagcgggcggcttcta

SEQ ID NO: 48760 - DNA, 120 bp, Artificial Sequence
  ENSG00000065989_50 (sequence is synthesized)
ggagagacatggaaaataagcccttcttcctttctcccctggggctcgtgaacagcttagctaagaggctgagctgtgctggggccagtcgtgctgggttcctatcctagctttgccact

SEQ ID NO: 48761 - DNA, 120 bp, Artificial Sequence
  ENSG00000065989_51 (sequence is synthesized)
tatgagctgcatgatcttggagaagtcacatcgcctctctgagccttggtgccttcacctgccaaacgagatcaagtgcttagagcaatacttggcagatcataagtactcaaaagacag

SEQ ID NO: 48762 - DNA, 120 bp, Artificial Sequence
  ENSG00000065989_52 (sequence is synthesized)
tggctgtgattgctttcgctattttgcagcccagtaggacgagggcagtacattctgtgctgttgaacctgtcacccactgggtgagcaataatggtgcttccttcagaccaaggcttca

SEQ ID NO: 48763 - DNA, 120 bp, Artificial Sequence
  ENSG00000066027_0 (sequence is synthesized)
agtcgcctgtaccaaccaccttctcaagttgtagcggtcgctcgcctggggttctccgtgggcggccgacgggcgcgtgggggagggggttcgggccgcccagcgcggcaaggagcgagt

SEQ ID NO: 48764 - DNA, 120 bp, Artificial Sequence
  ENSG00000066027_1 (sequence is synthesized)
gagtgtgtgcacgcagagggccggggctacggggcagcgccccgggcgatgaggggccggcgttgaccgggaagagcgggcaccgcggcagtggctccgaggggacccgcgatggcagcg

SEQ ID NO: 48765 - DNA, 120 bp, Artificial Sequence
  ENSG00000066027_2 (sequence is synthesized)
gcgatggcagcgccctgagaggaggctccaggcagggcgggctgcgctggcagcggccgctgaggtgctggccggccggctggctggcgacgggggcagaagcgacgagaggcgcgctcg

SEQ ID NO: 48766 - DNA, 120 bp, Artificial Sequence
  ENSG00000066027_3 (sequence is synthesized)
gcccccgcctcagttgtctaaacttcgggctctcttccacccgctctgcgcgcccagagtcaacaacttcttcacccccctccgcccccgcccttccctccgtcagccccgggagctcgc

SEQ ID NO: 48767 - DNA, 120 bp, Artificial Sequence
  ENSG00000066027_4 (sequence is synthesized)
cgtcagccccgggagctcgccgcgcgccggggaccaggaacctccagcgctgagatgtggccgtgaggcgttggcgggcggcgaggagaagctcggcggcgtcccggggccggagggccg

SEQ ID NO: 48768 - DNA, 120 bp, Artificial Sequence
  ENSG00000066027_5 (sequence is synthesized)
gcgagcaccccgcgcctctcccccgcctcctcctgccgtctccgccgctgcccgtgccttgcaagcagcagccggagctgccaagcgtcagggccgcggagatgtcgtcgtcgtcgccgc

SEQ ID NO: 48769 - DNA, 120 bp, Artificial Sequence
  ENSG00000066027_6 (sequence is synthesized)
cggcgggggctgccagcgccgccatctcggcctcggagaaagtggacggcttcacccggaaatcggtccgcaaggcgcagaggcagaagcgctcccagggctcgtcgcagtttcgcagcc

SEQ ID NO: 48770 - DNA, 120 bp, Artificial Sequence
  ENSG00000066027_7 (sequence is synthesized)
agggcagccaggcagagctgcacccgctgccccagctcaaagatgccacttcaaatgaacaacaagagcttttctgtcagaagttgcagcagtgttgtatactgtttgatttcatggact

SEQ ID NO: 48771 - DNA, 120 bp, Artificial Sequence
  ENSG00000066027_8 (sequence is synthesized)
ctgtttcagacttgaagagcaaagaaattaaaagagcaacactgaatgaactggttgagtatgtttcaactaatcgtggtgtaattgttgaatcagcgtattctgatatagtaaaaatga

SEQ ID NO: 48772 - DNA, 120 bp, Artificial Sequence
  ENSG00000066027_9 (sequence is synthesized)
tcagtgctaacatcttccgtacacttcctccaagtgataatccagattttgatccagaagaggatgaacccacgcttgaggcctcttggcctcacatacagttggtatatgaattcttct

SEQ ID NO: 48773 - DNA, 120 bp, Artificial Sequence
  ENSG00000066027_10 (sequence is synthesized)
tgagatttttggagagccctgatttccagcctagcattgcaaaacgatacattgatcagaaattcgtacaacagctcctggagctttttgatagtgaagatcccagagaacgtgacttcc

SEQ ID NO: 48774 - DNA, 120 bp, Artificial Sequence
  ENSG00000066027_11 (sequence is synthesized)
tgaagactgttctgcaccgaatttatgggaaatttcttggattaagagcattcatcagaaaacaaattaacaacattttcctcaggtttatatatgaaacagaacatttcaatggtgttg

SEQ ID NO: 48775 - DNA, 120 bp, Artificial Sequence
  ENSG00000066027_12 (sequence is synthesized)
ctgaacttcttgaaatattaggaagtattatcaatggctttgcattgccactgaaagcagaacataaacaatttctaatgaaggttcttattcctatgcatactgcaaaaggattagctt

SEQ ID NO: 48776 - DNA, 120 bp, Artificial Sequence
  ENSG00000066027_13 (sequence is synthesized)
catgctcagctagcatattgtgttgtacagttcctggagaaagatacaacactaacagagccagtgatcagaggactgctgaaattttggccaaaaacctgcagtcagaaagaggtgatg

SEQ ID NO: 48777 - DNA, 120 bp, Artificial Sequence
  ENSG00000066027_14 (sequence is synthesized)
tttttaggagaaattgaagaaatcttagatgtcattgaaccaacacagttcaaaaaaattgaagagccacttttcaagcagatatccaagtgtgtatccagttctcattttcaggttgca

SEQ ID NO: 48778 - DNA, 120 bp, Artificial Sequence
  ENSG00000066027_15 (sequence is synthesized)
gaaagggcattgtacttctggaataacgaatatattcttagtttgattgaggagaacattgataaaattctgccaattatgtttgccagtttgtacaaaatttccaaagaacactggaat

SEQ ID NO: 48779 - DNA, 120 bp, Artificial Sequence
  ENSG00000066027_16 (sequence is synthesized)
ccgaccattgtagcactggtatacaatgtgctgaaaaccctaatggaaatgaatggcaagcttttcgatgaccttactagctcatacaaagctgaaagacagagagagaaaaagaaggaa

SEQ ID NO: 48780 - DNA, 120 bp, Artificial Sequence
  ENSG00000066027_17 (sequence is synthesized)
ttggaacgtgaagaattatggaaaaaattagaggagctaaagctaaagaaagctctagaaaaacagaatagtgcttacaacatgcacagtattctcagcaatacaagtgccgaataaaaa

SEQ ID NO: 48781 - DNA, 120 bp, Artificial Sequence
  ENSG00000066027_18 (sequence is synthesized)
aaaagcctcccacctctgccggataggcagagttttgtatgcttttttgaaatatgtaaaaattacaaaacaaacctcatcagtataatataattaaaaggccaattttttctggcaact

SEQ ID NO: 48782 - DNA, 120 bp, Artificial Sequence
  ENSG00000066027_19 (sequence is synthesized)
gtaaatggaaaaatatatggactaaacgtagccctgtgctgtatcatggccatagtatattgtaacctttgtctaatcattggatttattgtgtcacttctgaagtttcacagaaatgaa

SEQ ID NO: 48783 - DNA, 120 bp, Artificial Sequence
  ENSG00000066027_20 (sequence is synthesized)
tgaattttatcatctatgatatgagtgagataattatgggagtggtaagaattatgacttgaattcttctttgattgtgttgcacatagatatggtagtctgctctgtatatttttccct

SEQ ID NO: 48784 - DNA, 120 bp, Artificial Sequence
  ENSG00000066027_21 (sequence is synthesized)
tttataatgtgcttttcacactgctgcaaaccttagttacatcctaggaaaaaatacttcctaaaataaaactaaggtatcatccttacccttctctttgtctcacccagaaatatgatg

SEQ ID NO: 48785 - DNA, 120 bp, Artificial Sequence
  ENSG00000066027_22 (sequence is synthesized)
gggggaattacctgccctaacccctccctcaataaatacattactgtactctggaatttaggcaaaaccttaaatctccaggctttttaaagcacaaaatataaataaaagctgggaaag

SEQ ID NO: 48786 - DNA, 120 bp, Artificial Sequence
  ENSG00000066027_23 (sequence is synthesized)
taaaccaaaattcttcagattgttcctcatgaatatcccccttcctctgcaattctccagagtggtaacagatgggtagaggcagctcaggtgaattacccagcttgcctctcaattcat

SEQ ID NO: 48787 - DNA, 120 bp, Artificial Sequence
  ENSG00000066027_24 (sequence is synthesized)
tcctcctcttcctctcaaaggctgaaggcagggcctttccagtcctcacaacctgtccttcacctagtccctcctgacccagggatggaggctttgagtcccacagtgtggtgatacaga

SEQ ID NO: 48788 - DNA, 120 bp, Artificial Sequence
  ENSG00000066027_25 (sequence is synthesized)
gcactagttgtcactgcctggctttatttaaaggaactgcagtaggcttcctctgtagagctctgaaaaggttgactatatagaggtcttgtatgtttttacttggtcaagtatttctca

SEQ ID NO: 48789 - DNA, 120 bp, Artificial Sequence
  ENSG00000066027_26 (sequence is synthesized)
catcttttgttatcagagtaccattccaatctcttaacttgcagttgtgtggaaaactgttttgtaatgaaagatcttcattgggggattgagcagcatttaataaagtctatgtttgta

SEQ ID NO: 48790 - DNA, 120 bp, Artificial Sequence
  ENSG00000066027_27 (sequence is synthesized)
agatttcaagtatgttagcagcagtaattagggatgttttcctctaaggaaaattatagttataaaattattatttgttagaaatgattcctgctacttcaaattatttatccttaaatg

SEQ ID NO: 48791 - DNA, 120 bp, Artificial Sequence
  ENSG00000066027_28 (sequence is synthesized)
tagaggattaacaatgaacaacttgaaataacttggttatcacctcagaagtttagtttatcactgatttaatgaagaagggcaagaagaggaaggctttatgataatgatggtctgtga

SEQ ID NO: 48792 - DNA, 120 bp, Artificial Sequence
  ENSG00000066027_29 (sequence is synthesized)
ttggatacttcatataagtgaaattatttggtatatgaattcttcttgagatttttggagagccctgatttccagcctagcattgcaaaacgatacattgatcagaaattcgtacaacag

SEQ ID NO: 48793 - DNA, 120 bp, Artificial Sequence
  ENSG00000066027_30 (sequence is synthesized)
tatcatccgtagtgagaatggcaaatggataatcaacatcagcccaattgccagactaaaacatcattatgacagacttcatttgcaagaattcttaaaacggagaagctgaagaataaa

SEQ ID NO: 48794 - DNA, 90 bp, Artificial Sequence
  ENSG00000066027_31 (sequence is synthesized)
ggcaagaagaggaaggctttatgataatgaaatcttcctcggtcacccaggatggagtgttgctgccagggttcaagcaattctcctgcc

SEQ ID NO: 48795 - DNA, 120 bp, Artificial Sequence
  ENSG00000066032_0 (sequence is synthesized)
gctgaaggaagctacaatcatccaagtgggaagtaatgtctaccgatgttctgatttaagtgaatgaaggtcttctttccacctcgggaaatcttgagggttatgtaacagcagctttga

SEQ ID NO: 48796 - DNA, 120 bp, Artificial Sequence
  ENSG00000066032_1 (sequence is synthesized)
aaggcttgtgagatgtactttgtgctagtccatctcaaatcttcaccggctgtaccaagaacagaaaaaaaaaggaatttgagacgggatctcagcatgtttgccaggatggtctcagtc

SEQ ID NO: 48797 - DNA, 89 bp, Artificial Sequence
  ENSG00000066032_2 (sequence is synthesized)
ttggacagaacaaaatatacagctggatgtttgtcacaattctaatgtccctgcaaagatgagatgcatgaatcacacagcaatctcat

SEQ ID NO: 48798 - DNA, 120 bp, Artificial Sequence
  ENSG00000066032_3 (sequence is synthesized)
cctgcaaagatgagatgcatgaatcacacagcaatctcatcaaaaagataagaaaattgagactcagagcatttaagcagccagcctggagtcacagagatttaagtctcagagccagca

SEQ ID NO: 48799 - DNA, 120 bp, Artificial Sequence
  ENSG00000066032_4 (sequence is synthesized)
ctcaggatgagtgccaatggaagcctgtccttggagtccagaatgaacgtcagaagcaacccagccacagcaggagactgtccatgaatgtcatctggctgaacctaaagcacctctgga

SEQ ID NO: 48800 - DNA, 120 bp, Artificial Sequence
  ENSG00000066032_5 (sequence is synthesized)
tttagatgcactccttcaaggaccatgggttctgcaacagtaccccctctccattgttccagctctgactcagatgggccctccttgatggcactcccagcagcacagccttagcactgg

SEQ ID NO: 48801 - DNA, 120 bp, Artificial Sequence
  ENSG00000066032_6 (sequence is synthesized)
gagcatgacttcggcaacttcacctatcattctgaaatgggaccccaaaagtttggaaatccggacgctaacagtggaaaggctgttggagccacttgttacacaggtgactacacttgt

SEQ ID NO: 48802 - DNA, 120 bp, Artificial Sequence
  ENSG00000066032_7 (sequence is synthesized)
caacacaagcaacaaaggcccatctggtaaaaagaaagggaggtcaaagaaagcccatgtactagctgcctctgtagagcaagccactcagaatttcctggaaaagggtgaacagatcgc

SEQ ID NO: 48803 - DNA, 120 bp, Artificial Sequence
  ENSG00000066032_8 (sequence is synthesized)
taaggagagtcaagatctcaaagaagagttggtggctgctgtagaggatgtgcgcaaacaaggtgagacgatgcggatcgcctcctccgagtttgcagatgacccttgctcgtcggtaaa

SEQ ID NO: 48804 - DNA, 120 bp, Artificial Sequence
  ENSG00000066032_9 (sequence is synthesized)
gcgcggcaccatggtacgggcggcaagggctttgctctccgcggtgacacgcttactcatcctggcggacatggcagatgtcatgagacttttatcccatctgaaaattgtggaagaggc

SEQ ID NO: 48805 - DNA, 120 bp, Artificial Sequence
  ENSG00000066032_10 (sequence is synthesized)
cctggaagctgtcaaaaatgctacaaatgagcaagaccttgcaaaccgttttaaagagtttgggaaagagatggtgaaacttaactatgtagcagcaagaagacaacaggagctgaagga

SEQ ID NO: 48806 - DNA, 120 bp, Artificial Sequence
  ENSG00000066032_11 (sequence is synthesized)
tcctcactgtcgggatgagatggcagccgcccgaggggctctgaagaagaatgccacaatgctgtacacggcctctcaagcatttctccgccacccagatgtcgccgctacgagagccaa

SEQ ID NO: 48807 - DNA, 120 bp, Artificial Sequence
  ENSG00000066032_12 (sequence is synthesized)
ccgagattatgtgttcaaacaagtccaggaggccatcgccggcatctccaatgctgctcaagctacctcgcccactgacgaagccaagggccacacgggcatcggcgagctggctgcggc

SEQ ID NO: 48808 - DNA, 120 bp, Artificial Sequence
  ENSG00000066032_13 (sequence is synthesized)
tcttaatgagtttgacaataagattatcctggaccccatgacgttcagcgaggccaggttccggccgtccctggaggagaggctggagagcatcatcagcggcgcagcgctgatggccga

SEQ ID NO: 48809 - DNA, 120 bp, Artificial Sequence
  ENSG00000066032_14 (sequence is synthesized)
ctcctcctgcacgcgagacgaccggcgcgagaggatcgtggcggagtgcaacgccgtgcggcaggcgctccaggacctgctcagcgagtacatgaataatactggaaggaaagaaaaagg

SEQ ID NO: 48810 - DNA, 120 bp, Artificial Sequence
  ENSG00000066032_15 (sequence is synthesized)
agatcctctcaacattgcgattgataagatgactaagaaaacaagagatctaaggagacagcttcggaaagcagtgatggatcacatatctgactctttcctggaaaccaatgttccttt

SEQ ID NO: 48811 - DNA, 120 bp, Artificial Sequence
  ENSG00000066032_16 (sequence is synthesized)
gctagttctcattgaggctgcaaagagcggaaatgaaaaggaagtgaaagaatatgcccaagttttccgtgagcatgccaacaaactggtagaggttgccaatttggcctgttccatctc

SEQ ID NO: 48812 - DNA, 120 bp, Artificial Sequence
  ENSG00000066032_17 (sequence is synthesized)
caacaatgaagaaggggtgaaattagttcggatggcagccacccagattgacagcctgtgtccccaggtcatcaatgccgctctgacactggctgcccggccacagagcaaagttgctca

SEQ ID NO: 48813 - DNA, 120 bp, Artificial Sequence
  ENSG00000066032_18 (sequence is synthesized)
gggagaagcaggtccgagtgttgacagaggccgtggatgacatcacctcagtggatgacttcctctctgtctcagaaaatcacatcttggaggatgtgaacaagtgtgtgatagccctcc

SEQ ID NO: 48814 - DNA, 120 bp, Artificial Sequence
  ENSG00000066032_19 (sequence is synthesized)
aagagggcgatgtggacactctggaccggactgcaggggccatcaggggccgggcagctcgagtcatacacatcatcaatgctgagatggagaactatgaagctggggtttatactgaga

SEQ ID NO: 48815 - DNA, 120 bp, Artificial Sequence
  ENSG00000066032_20 (sequence is synthesized)
aggtgttggaagctacaaaattgctttctgaaacagtgatgccacgcttcgctgaacaagtagaggttgccattgaagccctgagtgccaacgttcctcaaccgtttgaggagaatgagt

SEQ ID NO: 48816 - DNA, 120 bp, Artificial Sequence
  ENSG00000066032_21 (sequence is synthesized)
tcatcgatgcctctcgcctggtgtatgatggcgttcgggacatcagaaaggctgtgctgatgatcaggaccccagaagaactagaggatgattctgactttgagcaggaagattatgatg

SEQ ID NO: 48817 - DNA, 120 bp, Artificial Sequence
  ENSG00000066032_22 (sequence is synthesized)
tgcgtagcaggacaagtgttcagactgaggatgaccagctcattgcagggcagagcgcacgggccatcatggcgcaactaccgcaggaggagaaggcaaaaatagctgagcaggtggaga

SEQ ID NO: 48818 - DNA, 120 bp, Artificial Sequence
  ENSG00000066032_23 (sequence is synthesized)
tattccatcaagagaaaagcaagctggatgcagaagtggccaaatgggacgacagcggcaatgatatcattgtactggccaagcagatgtgtatgatcatgatggaaatgacagacttca

SEQ ID NO: 48819 - DNA, 120 bp, Artificial Sequence
  ENSG00000066032_24 (sequence is synthesized)
caagaggcaaaggcccattgaaaaatacatctgatgtcattaatgctgccaagaaaattgccgaagcaggttctcgaatggacaaattagctcgtgctgtggctgatcagtgtcctgatt

SEQ ID NO: 48820 - DNA, 120 bp, Artificial Sequence
  ENSG00000066032_25 (sequence is synthesized)
cagcatgtaagcaggatttattagcctaccttcaacgaattgccttgtattgccatcagcttaatatctgcagcaaggtgaaggcagaagtgcagaatctgggaggagagctcattgtgt

SEQ ID NO: 48821 - DNA, 120 bp, Artificial Sequence
  ENSG00000066032_26 (sequence is synthesized)
cagggctggacagtgccacatcgcttatccaggcagctaaaaacctgatgaatgctgttgtcctcacggtgaaagcatcctatgtggcctcaaccaaataccagaaggtctatgggacag

SEQ ID NO: 48822 - DNA, 120 bp, Artificial Sequence
  ENSG00000066032_27 (sequence is synthesized)
cagctgtcaactcacctgttgtgtcttggaagatgaaggctccagagaagaagccccttgtgaagagagaaaagcctgaagaattccagacacgagttcgacgaggttctcagaagaaac

SEQ ID NO: 48823 - DNA, 120 bp, Artificial Sequence
  ENSG00000066032_28 (sequence is synthesized)
acatttcgcctgtacaggctttaagtgaattcaaagcaatggattccttctaggacgataggttttaacaagaaagctttttctttcttttctttctttctttttctttttaattccatt

SEQ ID NO: 48824 - DNA, 120 bp, Artificial Sequence
  ENSG00000066032_29 (sequence is synthesized)
tttgtatgcatacctgccagctcgtatgcctctggcatggggaaattaagggaacagtgtctgtttgcatgtaagatgagatgagatcaatactactgatccatctgtagcctgggaagg

SEQ ID NO: 48825 - DNA, 120 bp, Artificial Sequence
  ENSG00000066032_30 (sequence is synthesized)
agacaggacattcctgtactaaggtggcacagagctgtcctttgcaacattctcataaaattgggcacagagttcgcattggcgcaatatttatgggagtgggagggatggggaaaataa

SEQ ID NO: 48826 - DNA, 120 bp, Artificial Sequence
  ENSG00000066032_31 (sequence is synthesized)
acttaactctacaaaagcaaactctaatgcatgcaagaatcattaggttggcaggtatatgcataagtgaaaaatctggaagtgtaatggtagaacataaaacttgtattgcttctgttt

SEQ ID NO: 48827 - DNA, 120 bp, Artificial Sequence
  ENSG00000066032_32 (sequence is synthesized)
cagtgcaaaaatgtactagccaatacgcttaagtgtgtggcccatgaattgaacaatttaaccttgaagtctatatccgtgatattatgtcgatttttaactgaggggaaattaactagt

SEQ ID NO: 48828 - DNA, 120 bp, Artificial Sequence
  ENSG00000066032_33 (sequence is synthesized)
ccagcctaaaatgcttcttttaatctgcattctgtttcctcttctagttgtgccattactagtgatcatgtttttttcccccctttaatgaaaacaataaacatctatttgagacaatta

SEQ ID NO: 48829 - DNA, 120 bp, Artificial Sequence
  ENSG00000066032_34 (sequence is synthesized)
aaatccttctgggggcactggaagcacaatacggtgaccaatcttgctttcatttttttttctttttaatttgaaccatgattttgctagaaatagaaggcccagtggtggaatattaga

SEQ ID NO: 48830 - DNA, 120 bp, Artificial Sequence
  ENSG00000066032_35 (sequence is synthesized)
gggaaggaaactgacaacgtgtgaaagttagaggcaaatacataggtgtagcttggagtgctggtatctaatataccattgtattcactaactaactcaaaataaacacatttaatcttg

SEQ ID NO: 48831 - DNA, 120 bp, Artificial Sequence
  ENSG00000066032_36 (sequence is synthesized)
gagcggcttcgcttccagccccgagtgaggcggagacccaggcgggcgggcagagcaggcggcaccgcacctcggccagaggcggctgcagcagctgctgcccttgtccctgccgccgcc

SEQ ID NO: 48832 - DNA, 120 bp, Artificial Sequence
  ENSG00000066032_37 (sequence is synthesized)
acaaaatatacagctggatgtttgtcacaattctaatgtccctgcaaagatgagatgcatgaatcacacagcaatctcatcaaaaagccctagcactacctctcagtatcttcatatcct

SEQ ID NO: 48833 - DNA, 120 bp, Artificial Sequence
  ENSG00000066032_38 (sequence is synthesized)
tcaatgatgaaactgtggcccagaaagtttaagggatgtgtcaaatgtcacacagctcacagatccagggacatggcttaaatccagatatcttgattctaacttcagttgaggaagaga

SEQ ID NO: 48834 - DNA, 120 bp, Artificial Sequence
  ENSG00000066032_39 (sequence is synthesized)
ctcaaactcatacaaggggtcatctgagtctgcagataggcttgctttatgctgctccgtcagatctcttctaaagattagtgcgcaattctggacattacattttaatggtaacatgga

SEQ ID NO: 48835 - DNA, 120 bp, Artificial Sequence
  ENSG00000066032_40 (sequence is synthesized)
ttcaactaaagggtaagcaaaggacaccgacaggaatagggagggtgccatttatagagaaaagactgagaggtccatattgttattttacctgaaagatataataaacagaggatgctg

SEQ ID NO: 48836 - DNA, 120 bp, Artificial Sequence
  ENSG00000066032_41 (sequence is synthesized)
ggacctttgctttagaaaagcaacttgagagaagacacaggaaggcaatgatttggggcttggctaagatttttggggttttttccccctcttgcgggtactggaattctgcagtcagcc

SEQ ID NO: 48837 - DNA, 120 bp, Artificial Sequence
  ENSG00000066032_42 (sequence is synthesized)
attctgcagccacccatatgtcaccacctacctgctttatctctttgtcacattttcatctctttctacttcaactttcctttgattcatccccaaaagctttcccctaggccacttggc

SEQ ID NO: 48838 - DNA, 120 bp, Artificial Sequence
  ENSG00000066032_43 (sequence is synthesized)
agtattccctcactagtcaaaatctggtgggtctttcttgagtgagctctcagagctgacctccttttttaagacatctatttgcatgcaggtggccatcgatgacatcaatggttttgc

SEQ ID NO: 48839 - DNA, 120 bp, Artificial Sequence
  ENSG00000066032_44 (sequence is synthesized)
attctaatgtccctgcaaagatgagatgcatgaatcacacagcaatctcatcaaaaaggaatttctggaaggtaagaataaaacacaatggacactaaaacttttctgcccacgaaagta

SEQ ID NO: 48840 - DNA, 120 bp, Artificial Sequence
  ENSG00000066032_45 (sequence is synthesized)
agaggcatttgagaattgttcactttatcttatgaggcataggagaagagaatcctggaaaaagcaagaagcaggaagataagaggcaaagaagaagagagccccacccactggggcaag

SEQ ID NO: 48841 - DNA, 120 bp, Artificial Sequence
  ENSG00000066032_46 (sequence is synthesized)
tttttacatggcgggacagccatgcctcagaatgtttagcatatttatcatctcagaagggtccaacagtatttagtgtgaatgagacactgttcagattggaaatacactgtctatact

SEQ ID NO: 48842 - DNA, 120 bp, Artificial Sequence
  ENSG00000066032_47 (sequence is synthesized)
agaagcagagttagataaaatgtggtgcctaccctgtgtgttcacagttctggagtggagatgatgagtaacaaaccaatattattcatgctatggcagagatgtaaacaagagctgtgg

SEQ ID NO: 48843 - DNA, 120 bp, Artificial Sequence
  ENSG00000066032_48 (sequence is synthesized)
ttgaagagatttttctagctaattgagcaagaccaggtagaggaaggaagacgaattgaccagatggatggatggagaaggccactccagtcagtaggcaaagtctgtgaaaaaaatatg

SEQ ID NO: 48844 - DNA, 120 bp, Artificial Sequence
  ENSG00000066032_49 (sequence is synthesized)
agttgcttgtgattaaataaccccaactgacgtggaaatcaaataaagcaacaaagaactgctttttcaactaacaaaatatacagctggatgtttgtcacaattctaatgtccctgcaa

SEQ ID NO: 48845 - DNA, 120 bp, Artificial Sequence
  ENSG00000066032_50 (sequence is synthesized)
agatgagatgcatgaatcacacagcaatctcatcaaaaaggaatttctggaaggcataggagaagagaatcctggaaaaagcaagaagcaggaagataagaggcaaagaagaagagagcc

SEQ ID NO: 48846 - DNA, 120 bp, Artificial Sequence
  ENSG00000066032_51 (sequence is synthesized)
ctgggaacgggcgagaaagaggaggaggcgagaaactcccaccgacccacagagctagtcaaaggaagcgtttcattccacctatctttggtcagaggagagggaggagtgtagaccagc

SEQ ID NO: 48847 - DNA, 120 bp, Artificial Sequence
  ENSG00000066032_52 (sequence is synthesized)
aggcaaacattcttggcaacagtactgctaaaaacaccaaactacagtgatttatagggagggctttttttaaataaatgttatcaccattattccagaccttacaataactcacaaaga

SEQ ID NO: 48848 - DNA, 120 bp, Artificial Sequence
  ENSG00000066032_53 (sequence is synthesized)
caaggttggccgactcgtgtatgtgagacctgcttgggctccagctgcggttaaacatgtctgtgggaccagtagcctgactttccaatcagagctttgttgctgtgactgctgctgtgg

SEQ ID NO: 48849 - DNA, 120 bp, Artificial Sequence
  ENSG00000066032_54 (sequence is synthesized)
gttctaagtattctagtgtgaaagagaatgagccgaacaattaaagtagagtgagatttatggcacagtcgagggaagcattatgtcctcttaagatcgagggtgacactgaacaggtca

SEQ ID NO: 48850 - DNA, 120 bp, Artificial Sequence
  ENSG00000066032_55 (sequence is synthesized)
tgaaatgggaccccaaaagtttggaaatccggacgctaacagtggaaaggctgttggagccacttgttacacagtgcatttttttttccaccggatatttcaaatgaaaatcacataaat

SEQ ID NO: 48851 - DNA, 120 bp, Artificial Sequence
  ENSG00000066032_56 (sequence is synthesized)
ctgtattgctgactgtcatcttgaaaaaggatacctgttgaattgggtaactcttttcatgaaaataacttaaaaaactggatgaaatataaaagcatcttttgaatgtattgtgacttt

SEQ ID NO: 48852 - DNA, 120 bp, Artificial Sequence
  ENSG00000066044_0 (sequence is synthesized)
cgccaccgccgccaccgctaccgaggccgagcggagccgttagcgccgcgccgccgccgcctcccgcccgccccggagcagccccgggcccgcccgcccgcatccagatttttgaaaaat

SEQ ID NO: 48853 - DNA, 120 bp, Artificial Sequence
  ENSG00000066044_1 (sequence is synthesized)
gccccgggcccgcccgcccgcatccagatttttgaaaaatacaatgtctaatggttatgaagaccacatggccgaagactgcaggggtgacatcgggagaacgaatttgatcgtcaacta

SEQ ID NO: 48854 - DNA, 120 bp, Artificial Sequence
  ENSG00000066044_2 (sequence is synthesized)
cctccctcagaacatgacccaggatgagttacgaagcctgttcagcagcattggtgaagttgaatctgcaaaacttattcgggataaagtagcaggacacagcttgggctatggctttgt

SEQ ID NO: 48855 - DNA, 120 bp, Artificial Sequence
  ENSG00000066044_3 (sequence is synthesized)
gaactacgtgaccgcgaaggatgcagagagagcgatcaacacgctgaacggcttgaggctccagtcaaaaaccattaaggtgtcgtatgctcgcccgagctcagaggtgatcaaagacgc

SEQ ID NO: 48856 - DNA, 120 bp, Artificial Sequence
  ENSG00000066044_4 (sequence is synthesized)
caacttgtacatcagcgggctcccgcggaccatgacccagaaggacgtagaagacatgttctctcggtttgggcggatcatcaactcgcgggtcctcgtggatcagactacaggtttgtc

SEQ ID NO: 48857 - DNA, 120 bp, Artificial Sequence
  ENSG00000066044_5 (sequence is synthesized)
cagaggggttgcgtttatccggtttgacaaacggtcggaggcagaagaggcaattaccagtttcaatggtcataaacccccaggttcctctgagcccatcacagtgaagtttgcagccaa

SEQ ID NO: 48858 - DNA, 120 bp, Artificial Sequence
  ENSG00000066044_6 (sequence is synthesized)
ccccaaccagaacaaaaacgtggcactcctctcgcagctgtaccactcgccagcgcgacggttcggaggccccgttcaccaccaggcgcagagattcaggttctcccccatgggcgtcga

SEQ ID NO: 48859 - DNA, 120 bp, Artificial Sequence
  ENSG00000066044_7 (sequence is synthesized)
tcacatgagcgggctctctggcgtcaacgtgccaggaaacgcctcctccggctggtgcattttcatctacaacctggggcaggatgccgacgaggggatcctctggcagatgtttgggcc

SEQ ID NO: 48860 - DNA, 120 bp, Artificial Sequence
  ENSG00000066044_8 (sequence is synthesized)
gtttggtgccgtcaccaatgtgaaagtgatccgcgacttcaacaccaacaagtgcaaagggtttggctttgtgaccatgacaaactatgaagaagccgcgatggccatagccagcctgaa

SEQ ID NO: 48861 - DNA, 120 bp, Artificial Sequence
  ENSG00000066044_9 (sequence is synthesized)
cggctaccgcctgggggacaaaatcttacaggtttccttcaaaaccaacaagtcccacaaataactcgctcatgcttttttttgtacggaatagataattaagagtgaaggagttgaaac

SEQ ID NO: 48862 - DNA, 120 bp, Artificial Sequence
  ENSG00000066044_10 (sequence is synthesized)
ttttcttgttagtgtacaactcattttgcgccaattttcacaagtgtttgtctttgtctgaatgagaagtgagaaggtttttatactctgggatgcaaccgacatgttcaaatgtttgaa

SEQ ID NO: 48863 - DNA, 120 bp, Artificial Sequence
  ENSG00000066044_11 (sequence is synthesized)
atcccacaatgttagaccaatcttaagtttcgtaagttatttcctttaagatatatattaaacagaaatctaagtagaactgcattgactaaccagtccctctggatggtggtgaacctg

SEQ ID NO: 48864 - DNA, 120 bp, Artificial Sequence
  ENSG00000066044_12 (sequence is synthesized)
aagcatgctttaacctctaagactgtctaacacgcgtttcattcaatgtctccacagactgggtagcaaaaaaatcaccttttagttttagtttttaatctaaagatgttagacagatgc

SEQ ID NO: 48865 - DNA, 120 bp, Artificial Sequence
  ENSG00000066044_13 (sequence is synthesized)
tgagtgtgcgttttctcaaccgcttcaacattgtaagcgatgtatgctttggttgacaggaagttccttttccaggcaggtcccgttgccacctcctgctcactcagtcccgggctctgc

SEQ ID NO: 48866 - DNA, 120 bp, Artificial Sequence
  ENSG00000066044_14 (sequence is synthesized)
cgagtggtcctgggaatggcggcgggcccgtccagcgtgggccaccactggggccgggggccacgggctgcatgctgggcgggccctccagagaaggacacaaacgtgtttcgtaagccc

SEQ ID NO: 48867 - DNA, 120 bp, Artificial Sequence
  ENSG00000066044_15 (sequence is synthesized)
aggcaccaatgggaatggaccaaagagtttcagggaaactccagtatattccagagtcagatctaagctccaggcacgcctgaagatgtgttgctactctgacatcccgagtttctgtcc

SEQ ID NO: 48868 - DNA, 120 bp, Artificial Sequence
  ENSG00000066044_16 (sequence is synthesized)
acacattgcatgcacagcgccccacacattggatactgttgttcacgataatttctcccgttttccagagcatttaacatagcttggaggcgtaaaatggctctgtattttaataacaca

SEQ ID NO: 48869 - DNA, 120 bp, Artificial Sequence
  ENSG00000066044_17 (sequence is synthesized)
gaaacatttgagcattgtatttctcgcatcccttctcgtgagcgcttagacctttttctattttagtcggattttgttttggaattttgcttttgtatgaacactcagcagaaaagtact

SEQ ID NO: 48870 - DNA, 120 bp, Artificial Sequence
  ENSG00000066044_18 (sequence is synthesized)
tacttcttgccagttatctattaaccaaaacctttgatttgtagttttaaagattaaccctcaaagttctcttcataactgccttgacattttgggttgttctgttctgttaattttctt

SEQ ID NO: 48871 - DNA, 120 bp, Artificial Sequence
  ENSG00000066044_19 (sequence is synthesized)
ttgcttttttgtgttttttgtttgtttttacttttgcatttaagaccattaaatttgattttgttttgctcgaattttgttttgttttttattttaccttttctttctttttggctaggg

SEQ ID NO: 48872 - DNA, 120 bp, Artificial Sequence
  ENSG00000066044_20 (sequence is synthesized)
aaggtgcaggtggcccagcattcagggaggagtcgtaagatcttaagaaaccaatccttgcctcaagcaaaagcatttctgaatctgtgacgcaagaatgtgcagttacaggctggtggc

SEQ ID NO: 48873 - DNA, 120 bp, Artificial Sequence
  ENSG00000066044_21 (sequence is synthesized)
ttttaaaccaggagcccggaggaagggtgaaagagaaagcctgtgaaataggcagggccagatcacccaaaactcctcaggactgggatctggcgtttataaataactagtttacagaga

SEQ ID NO: 48874 - DNA, 120 bp, Artificial Sequence
  ENSG00000066044_22 (sequence is synthesized)
gaatcacaaacaggataacttagtaccagcagtttttaaccttgacgtgagactaaaacgtgaccgtaggctgttttttagttattgctctcatgagatgatggctgtatttatctgttt

SEQ ID NO: 48875 - DNA, 120 bp, Artificial Sequence
  ENSG00000066044_23 (sequence is synthesized)
atttatacctatttatgtatttatttattgaagtgtgaaattgagcaataggcaggcaccaccgtccccagagcaggtcagcgtctcgagaggcccctggacaattgaggatgcccatcc

SEQ ID NO: 48876 - DNA, 120 bp, Artificial Sequence
  ENSG00000066044_24 (sequence is synthesized)
cctcccctttccctgatcttttactgaggggctgtgtgcgcgatccttgcaaattgatgatgttgccatccgtacccaggctgtgtctcataaaagtcggcctggtgccagagaggacct

SEQ ID NO: 48877 - DNA, 120 bp, Artificial Sequence
  ENSG00000066044_25 (sequence is synthesized)
gcccggattcgacacaaaagagggtccctgctctgttgcccgagagcagtctgcatcctgggaccagaatgctttcctggaaaaagaagcctttcaggtttccctgggccagcatcttct

SEQ ID NO: 48878 - DNA, 120 bp, Artificial Sequence
  ENSG00000066044_26 (sequence is synthesized)
gatggaaggtgggagccaacacccttctgatggaaggtgggagccaacacccttctgatggaaggtgggagccaacacccttctgatggaaggtgggagccaacacccttctgatggaag

SEQ ID NO: 48879 - DNA, 120 bp, Artificial Sequence
  ENSG00000066044_27 (sequence is synthesized)
gtgggagccaacacccttctgatggaaggcgggattcccgcttctgaaactccccctggagtctcactcccacacatgcccatagctagcattcaacagagaactctgtcttaagcttca

SEQ ID NO: 48880 - DNA, 120 bp, Artificial Sequence
  ENSG00000066044_28 (sequence is synthesized)
actgtgaaaatgatgacgggcttgtagcacctcagcttctttcctcgcccccttttatctgaatcctatcaattattctgatgctgggacaggtgagaagaaactgtgaagtatatgagc

SEQ ID NO: 48881 - DNA, 120 bp, Artificial Sequence
  ENSG00000066044_29 (sequence is synthesized)
ctttgaaagttccctgaagtttctcagttcaggaacattctcattgtatgtggtctccgctgtttgaacagccttctagctaaaaaattccaaagcctttatttgggagtcttagcttgc

SEQ ID NO: 48882 - DNA, 120 bp, Artificial Sequence
  ENSG00000066044_30 (sequence is synthesized)
aagcttgtggaaggatttagcttaacaactgtcactcctgaaaagcaatctctgttccatcaaggttctagttgctggccctgtgtcctcaaagttcattacatcttatcaaggcctgtt

SEQ ID NO: 48883 - DNA, 120 bp, Artificial Sequence
  ENSG00000066044_31 (sequence is synthesized)
tgcaaaggggagatcccttttcttaaaaaaggctcaacccaaaagaaaccatttcttaaaaaattttacatagatcagttgtatttctatttagcaaaaatgagtgctctgcttttattt

SEQ ID NO: 48884 - DNA, 120 bp, Artificial Sequence
  ENSG00000066044_32 (sequence is synthesized)
gggaatttcgatgaaaaagcgttcagagtagataatgttcatttatcaaaaatctggtttgggaaataccaaagaggctttgattgaattcccttttgacccgtgtgtaacttcctctgg

SEQ ID NO: 48885 - DNA, 120 bp, Artificial Sequence
  ENSG00000066044_33 (sequence is synthesized)
tagttagaccccaggcagctccgaatttgtgaacctgcttcctgatgaattctcccttgttcccccttggctctgccattatttcgttttcagtgtaatttgccaagccgcagttttctg

SEQ ID NO: 48886 - DNA, 120 bp, Artificial Sequence
  ENSG00000066044_34 (sequence is synthesized)
tgctggctgtgcctctagtcgcagctctgtgactgattccctcccgggtgctgagtcccctccccggccaccatcctgcgtgaatatcctgaaattcatgggcttcctcgggggcccgcc

SEQ ID NO: 48887 - DNA, 120 bp, Artificial Sequence
  ENSG00000066044_35 (sequence is synthesized)
cgcaggtggtgctgggtgggttccgccaccttctcctggaaggtgagccttttcctggccaagggcagctgccttaacctctgagagtctgcgcttggccttagtcctggagacccagcc

SEQ ID NO: 48888 - DNA, 120 bp, Artificial Sequence
  ENSG00000066044_36 (sequence is synthesized)
tccagggactgaaccgtgctgctgttgggagccaagaccggccctttggagccggcagcccaggggtccctgctggatcagagaaatagaagcacccgaagacggttagtggcaattcct

SEQ ID NO: 48889 - DNA, 120 bp, Artificial Sequence
  ENSG00000066044_37 (sequence is synthesized)
tgacccggtttgcttccaaatgaaggccatttgtccaccaggcattgaaaagacatgacttacccagtccggcatcggacttgaaaaatcgaaattgacatcactcagctgttacatttc

SEQ ID NO: 48890 - DNA, 120 bp, Artificial Sequence
  ENSG00000066044_38 (sequence is synthesized)
acatccgattcagcccccttttatttccatgtgcttttcgcagccttcctgtgttggatgaaagagaataagaattcagctgacaggaggcctctatcctgtccctccaccccaccctcc

SEQ ID NO: 48891 - DNA, 120 bp, Artificial Sequence
  ENSG00000066044_39 (sequence is synthesized)
acctcaatcccctcccatcttccccagacctacctcacctactaggacctgaggcagctccttagcagagacccctggggtttagctgactctgggggtcaggggttcctgtccccaaac

SEQ ID NO: 48892 - DNA, 120 bp, Artificial Sequence
  ENSG00000066044_40 (sequence is synthesized)
ttcgcaagacagccctgaagtcacaagtgctttcttttaagtggcattggcaattggcgtgtaatgatggcagtagaatctgaatctcggatcccaggcagggttcacatttccaaacct

SEQ ID NO: 48893 - DNA, 120 bp, Artificial Sequence
  ENSG00000066044_41 (sequence is synthesized)
ttttgatttcccctgacctctaatggctggatcctatttttctacaacctttcagtgacatcgttcaggtttctttcttggccatttaaaaaaacaaattttttttttctcacttgtaag

SEQ ID NO: 48894 - DNA, 120 bp, Artificial Sequence
  ENSG00000066044_42 (sequence is synthesized)
tcaccgccagtacctaagttaggctaacggagactttgacaggactggatttttcttccaccagaagagaagccttttccgttggtttggggccacctctttgaccatgaccatgtgatg

SEQ ID NO: 48895 - DNA, 120 bp, Artificial Sequence
  ENSG00000066044_43 (sequence is synthesized)
ttccgtttacagtgacttgctttgggggaggggaggctctcttaaccgattcccatgttgtacagtagatggttagaccttttgtatattagtgtgttttaagttattgatttgttttat

SEQ ID NO: 48896 - DNA, 120 bp, Artificial Sequence
  ENSG00000066044_44 (sequence is synthesized)
ataaaataatttatttttcaggtgccatttttcattttaactttgtttttacatgggtttgttttcaataaagtctgacactggtgtccaaaagtcaacaataaaatgaatcccattgtg

SEQ ID NO: 48897 - DNA, 120 bp, Artificial Sequence
  ENSG00000066044_45 (sequence is synthesized)
ttcttttgaagatgcctatgtaacttttaagctttttaaattattttcagaaaaaaaaaaagaaaagcccttatcagttttccatcagcccattgcctttttattttttttttttaatcc

SEQ ID NO: 48898 - DNA, 120 bp, Artificial Sequence
  ENSG00000066044_46 (sequence is synthesized)
ttgtgaataaatgttctttagtgttttaggaggaaaaagcaaacctagattttgataacccagaagacttcagattaataaagaagctttgaaagaagaccatttttcaaaattttagtg

SEQ ID NO: 48899 - DNA, 120 bp, Artificial Sequence
  ENSG00000066044_47 (sequence is synthesized)
aagtgtgaatattttttgtcaatggctttctcaaagagaatgaaacttttgcaccattttcagagtttttatagagatgccaaattgatatatttacatgtaatggaaacatgaaaaagt

SEQ ID NO: 48900 - DNA, 120 bp, Artificial Sequence
  ENSG00000066044_48 (sequence is synthesized)
tttattaaacaattgttcatagctgtgtagacattttaattcagtttccaaagctctcaaaaaatcgtatttttgaagtacggagtgatgcggtttggggcgtggcttacagttccaacg

SEQ ID NO: 48901 - DNA, 120 bp, Artificial Sequence
  ENSG00000066044_49 (sequence is synthesized)
actcaattgtcccgatactcagttctttctacaggtatcaggttcgtgttaaacgctgtatgttaactatgactggaattctgtgatattttggtaataaatgaagtgggatcattgcga

SEQ ID NO: 48902 - DNA, 120 bp, Artificial Sequence
  ENSG00000066044_50 (sequence is synthesized)
aagcccggaggtgggaacatcgcagtgttcagagaacatcgtgtgttcaaagaaccacgtgggttctttagggacaagaaggctgagatgggtagtggtggcaggagtgctcaggtgtcc

SEQ ID NO: 48903 - DNA, 78 bp, Artificial Sequence
  ENSG00000066044_51 (sequence is synthesized)
agcaccaaaatgagaagacgttggctttggtttgaggaggctgaggaggtaagatggcattaaaagaagctggggata

SEQ ID NO: 48904 - DNA, 120 bp, Artificial Sequence
  ENSG00000066044_52 (sequence is synthesized)
aaaaaaaaaaaaaaaaaagctggggattaggccagcatttcatgtacagtgaaaacgccaagagattctagcaccttccctcaggcacccaaatgtgctggccttgcccatgaatggggt

SEQ ID NO: 48905 - DNA, 120 bp, Artificial Sequence
  ENSG00000066056_0 (sequence is synthesized)
acactgaccaacacaggctgagcagtcaggcccacagcatctgaccccaggcccagctcgtcctggctggcctgggtcggcctctggagtatggtctggcgggtgccccctttcttgctc

SEQ ID NO: 48906 - DNA, 120 bp, Artificial Sequence
  ENSG00000066056_1 (sequence is synthesized)
cccatcctcttcttggcttctcatgtgggcgcggcggtggacctgacgctgctggccaacctgcggctcacggacccccagcgcttcttcctgacttgcgtgtctggggaggccggggcg

SEQ ID NO: 48907 - DNA, 120 bp, Artificial Sequence
  ENSG00000066056_2 (sequence is synthesized)
gggaggggctcggacgcctggggcccgcccctgctgctggagaaggacgaccgtatcgtgcgcaccccgcccgggccacccctgcgcctggcgcgcaacggttcgcaccaggtcacgctt

SEQ ID NO: 48908 - DNA, 120 bp, Artificial Sequence
  ENSG00000066056_3 (sequence is synthesized)
cgcggcttctccaagccctcggacctcgtgggcgtcttctcctgcgtgggcggtgctggggcgcggcgcacgcgcgtcatctacgtgcacaacagccctggagcccacctgcttccagac

SEQ ID NO: 48909 - DNA, 120 bp, Artificial Sequence
  ENSG00000066056_4 (sequence is synthesized)
aaggtcacacacactgtgaacaaaggtgacaccgctgtactttctgcacgtgtgcacaaggagaagcagacagacgtgatctggaagagcaacggatcctacttctacaccctggactgg

SEQ ID NO: 48910 - DNA, 120 bp, Artificial Sequence
  ENSG00000066056_5 (sequence is synthesized)
catgaagcccaggatgggcggttcctgctgcagctcccaaatgtgcagccaccatcgagcggcatctacagtgccacttacctggaagccagccccctgggcagcgccttctttcggctc

SEQ ID NO: 48911 - DNA, 120 bp, Artificial Sequence
  ENSG00000066056_6 (sequence is synthesized)
atcgtgcggggttgtggggctgggcgctgggggccaggctgtaccaaggagtgcccaggttgcctacatggaggtgtctgccacgaccatgacggcgaatgtgtatgcccccctggcttc

SEQ ID NO: 48912 - DNA, 120 bp, Artificial Sequence
  ENSG00000066056_7 (sequence is synthesized)
actggcacccgctgtgaacaggcctgcagagagggccgttttgggcagagctgccaggagcagtgcccaggcatatcaggctgccggggcctcaccttctgcctcccagacccctatggc

SEQ ID NO: 48913 - DNA, 120 bp, Artificial Sequence
  ENSG00000066056_8 (sequence is synthesized)
tgctcttgtggatctggctggagaggaagccagtgccaagaagcttgtgcccctggtcattttggggctgattgccgactccagtgccagtgtcagaatggtggcacttgtgaccggttc

SEQ ID NO: 48914 - DNA, 120 bp, Artificial Sequence
  ENSG00000066056_9 (sequence is synthesized)
agtggttgtgtctgcccctctgggtggcatggagtgcactgtgagaagtcagaccggatcccccagatcctcaacatggcctcagaactggagttcaacttagagacgatgccccggatc

SEQ ID NO: 48915 - DNA, 120 bp, Artificial Sequence
  ENSG00000066056_10 (sequence is synthesized)
aactgtgcagctgcagggaaccccttccccgtgcggggcagcatagagctacgcaagccagacggcactgtgctcctgtccaccaaggccattgtggagccagagaagaccacagctgag

SEQ ID NO: 48916 - DNA, 120 bp, Artificial Sequence
  ENSG00000066056_11 (sequence is synthesized)
ttcgaggtgccccgcttggttcttgcggacagtgggttctgggagtgccgtgtgtccacatctggcggccaagacagccggcgcttcaaggtcaatgtgaaagtgccccccgtgcccctg

SEQ ID NO: 48917 - DNA, 120 bp, Artificial Sequence
  ENSG00000066056_12 (sequence is synthesized)
gctgcacctcggctcctgaccaagcagagccgccagcttgtggtctccccgctggtctcgttctctggggatggacccatctccactgtccgcctgcactaccggccccaggacagtacc

SEQ ID NO: 48918 - DNA, 120 bp, Artificial Sequence
  ENSG00000066056_13 (sequence is synthesized)
atggactggtcgaccattgtggtggaccccagtgagaacgtgacgttaatgaacctgaggccaaagacaggatacagtgttcgtgtgcagctgagccggccaggggaaggaggagagggg

SEQ ID NO: 48919 - DNA, 120 bp, Artificial Sequence
  ENSG00000066056_14 (sequence is synthesized)
gcctgggggcctcccaccctcatgaccacagactgtcctgagcctttgttgcagccgtggttggagggctggcatgtggaaggcactgaccggctgcgagtgagctggtccttgcccttg

SEQ ID NO: 48920 - DNA, 120 bp, Artificial Sequence
  ENSG00000066056_15 (sequence is synthesized)
gtgcccgggccactggtgggcgacggtttcctgctgcgcctgtgggacgggacacgggggcaggagcggcgggagaacgtctcatccccccaggcccgcactgccctcctgacgggactc

SEQ ID NO: 48921 - DNA, 120 bp, Artificial Sequence
  ENSG00000066056_16 (sequence is synthesized)
gggcccggcctcgccccctgcacacgtgcttctgccccccagtgggcctccagccccccgacacctccacgcccaggccctctcagactccgagatccagctgacatggaagcacccgga

SEQ ID NO: 48922 - DNA, 120 bp, Artificial Sequence
  ENSG00000066056_17 (sequence is synthesized)
ggctctgcctgggccaatatccaagtacgttgtggaggtgcaggtggctgggggtgcaggagacccactgtggatagacgtggacaggcctgaggagacaagcaccatcatccgtggcct

SEQ ID NO: 48923 - DNA, 120 bp, Artificial Sequence
  ENSG00000066056_18 (sequence is synthesized)
caacgccagcacgcgctacctcttccgcatgcgggccagcattcaggggctcggggactggagcaacacagtagaagagtccaccctgggcaacgggctgcaggctgagggcccagtcca

SEQ ID NO: 48924 - DNA, 120 bp, Artificial Sequence
  ENSG00000066056_19 (sequence is synthesized)
agagagccgggcagctgaagagggcctggatcagcagctgatcctggcggtggtgggctccgtgtctgccacctgcctcaccatcctggctgcccttttaaccctggtgtgcatccgcag

SEQ ID NO: 48925 - DNA, 120 bp, Artificial Sequence
  ENSG00000066056_20 (sequence is synthesized)
aagctgcctgcatcggagacgcaccttcacctaccagtcaggctcgggcgaggagaccatcctgcagttcagctcagggaccttgacacttacccggcggccaaaactgcagcccgagcc

SEQ ID NO: 48926 - DNA, 120 bp, Artificial Sequence
  ENSG00000066056_21 (sequence is synthesized)
cctgagctacccagtgctagagtgggaggacatcacctttgaggacctcatcggggaggggaacttcggccaggtcatccgggccatgatcaagaaggacgggctgaagatgaacgcagc

SEQ ID NO: 48927 - DNA, 120 bp, Artificial Sequence
  ENSG00000066056_22 (sequence is synthesized)
catcaaaatgctgaaagagtatgcctctgaaaatgaccatcgtgactttgcgggagaactggaagttctgtgcaaattggggcatcaccccaacatcatcaacctcctgggggcctgtaa

SEQ ID NO: 48928 - DNA, 120 bp, Artificial Sequence
  ENSG00000066056_23 (sequence is synthesized)
gaaccgaggttacttgtatatcgctattgaatatgccccctacgggaacctgctagattttctgcggaaaagccgggtcctagagactgacccagcttttgctcgagagcatgggacagc

SEQ ID NO: 48929 - DNA, 120 bp, Artificial Sequence
  ENSG00000066056_24 (sequence is synthesized)
ctctacccttagctcccggcagctgctgcgtttcgccagtgatgcggccaatggcatgcagtacctgagtgagaagcagttcatccacagggacctggctgcccggaatgtgctggtcgg

SEQ ID NO: 48930 - DNA, 120 bp, Artificial Sequence
  ENSG00000066056_25 (sequence is synthesized)
agagaacctagcctccaagattgcagacttcggcctttctcggggagaggaggtttatgtgaagaagacgatggggcgtctccctgtgcgctggatggccattgagtccctgaactacag

SEQ ID NO: 48931 - DNA, 120 bp, Artificial Sequence
  ENSG00000066056_26 (sequence is synthesized)
tgtctataccaccaagagtgatgtctggtcctttggagtccttctttgggagatagtgagccttggaggtacaccctactgtggcatgacctgtgccgagctctatgaaaagctgcccca

SEQ ID NO: 48932 - DNA, 120 bp, Artificial Sequence
  ENSG00000066056_27 (sequence is synthesized)
gggctaccgcatggagcagcctcgaaactgtgacgatgaagtgtacgagctgatgcgtcagtgctggcgggaccgtccctatgagcgacccccctttgcccagattgcgctacagctagg

SEQ ID NO: 48933 - DNA, 120 bp, Artificial Sequence
  ENSG00000066056_28 (sequence is synthesized)
ccgcatgctggaagccaggaaggcctatgtgaacatgtcgctgtttgagaacttcacttacgcgggcattgatgccacagctgaggaggcctgagctgccatccagccagaacgtggctc

SEQ ID NO: 48934 - DNA, 120 bp, Artificial Sequence
  ENSG00000066056_29 (sequence is synthesized)
tgctggccggagcaaactctgctgtctaacctgtgaccagtctgacccttacagcctctgacttaagctgcctcaaggaatttttttaacttaagggagaaaaaaagggatctggggatg

SEQ ID NO: 48935 - DNA, 120 bp, Artificial Sequence
  ENSG00000066056_30 (sequence is synthesized)
gggtgggcttaggggaactgggttcccatgctttgtaggtgtctcatagctatcctgggcatccttctttctagttcagctgccccacaggtgtgtttcccatcccactgctcccccaac

SEQ ID NO: 48936 - DNA, 120 bp, Artificial Sequence
  ENSG00000066056_31 (sequence is synthesized)
acaaacccccactccagctccttcgcttaagccagcactcacaccactaacatgccctgttcagctactcccactcccggcctgtcattcagaaaaaaataaatgttctaataagctcca

SEQ ID NO: 48937 - DNA, 120 bp, Artificial Sequence
  ENSG00000066056_32 (sequence is synthesized)
ggagtgcactgtgagaagtcaggctggagggactgggtagatacctccactgagaaacagaacacggatgaggggcgctttggtggtcacgtgtctgcccctgtgggagctccaggatga

SEQ ID NO: 48938 - DNA, 120 bp, Artificial Sequence
  ENSG00000066056_33 (sequence is synthesized)
tacacacaataccttgtacaccttgtgtgtgtgtgtgtgtgtgtgtttatgttgcaggtataagattacactcaacaatgttcaagggtacaaaatataattttctttatttctctaaaa

SEQ ID NO: 48939 - DNA, 120 bp, Artificial Sequence
  ENSG00000066056_34 (sequence is synthesized)
caccctgggcaacggtgagagggcagggcccacaggaccccccgggctctgagcggggagagctcagcacgctctccttccacatcaccccctactgtggagctagggcatcccaggccc

SEQ ID NO: 48940 - DNA, 120 bp, Artificial Sequence
  ENSG00000066056_35 (sequence is synthesized)
ctcctgacaaagagtcagccccagtcctggggactcagccttccattctcatgatccactgtcccagggctgggaaaatcatgtcgcccctctgacacccctcatcccttccttcatgtg

SEQ ID NO: 48941 - DNA, 120 bp, Artificial Sequence
  ENSG00000066056_36 (sequence is synthesized)
gcccaagtgatttcctgacagtcctggcactgggatctttcacctctccctctgtgtaaccccatggtggcctctgggttccctgacccaggtgtccccacaatctgcccctctcactgt

SEQ ID NO: 48942 - DNA, 120 bp, Artificial Sequence
  ENSG00000066056_37 (sequence is synthesized)
tcctccagcaattgaccccagcccttgccagccctttctccagagttatttctggcaaaataatattggattctttacacagagtatgcctctgaaaatgaccatcgtgactttgcggga

SEQ ID NO: 48943 - DNA, 120 bp, Artificial Sequence
  ENSG00000066056_38 (sequence is synthesized)
gaactggaagttctgtgcaaattggggcatcaccccaacatcatcaacctcctgggggcctgtaagaaccgaggtgagcccccagctcatcacctaccccttcttccaaacccccatcct

SEQ ID NO: 48944 - DNA, 120 bp, Artificial Sequence
  ENSG00000066056_39 (sequence is synthesized)
cagccatcacctccaccacatgagtagcttgccaggggctgctggtgacctgtgcaccacccttgatcctccttcatccctgtctgttaccatcgggtgcctgctcccaccctaggttgc

SEQ ID NO: 48945 - DNA, 120 bp, Artificial Sequence
  ENSG00000066056_40 (sequence is synthesized)
ttggcccccaagaatcacccaggcctgacctagacatatctcagaaatgtcataggtggtctaaggcatgacctgggctgtgttccaggtgtgacacaggtgtgtcttgggtataaagta

SEQ ID NO: 48946 - DNA, 120 bp, Artificial Sequence
  ENSG00000066056_41 (sequence is synthesized)
cctagccaaggtggggcttgctggaaggagtcttggaaggtgtttcaggaataggactggggtaaaggtagtttcggattatgtttgtgtaagtgacgggggatgccttggagaggtttg

SEQ ID NO: 48947 - DNA, 120 bp, Artificial Sequence
  ENSG00000066056_42 (sequence is synthesized)
ggaatgctggcggatgcttcctgaggtagatggagaggccactcaggaattgctctcatcttcctccctgaagggcaaggtcatgcccacctgaggatcttaccagagcatgacccccaa

SEQ ID NO: 48948 - DNA, 120 bp, Artificial Sequence
  ENSG00000066056_43 (sequence is synthesized)
gactccctctctgtgccccctcccctgcagacagccctcttggcacactcctcctgtctctccagggatgtccatcttgatctgaacctaccccttgccccaagccctttggccttgcct

SEQ ID NO: 48949 - DNA, 120 bp, Artificial Sequence
  ENSG00000066056_44 (sequence is synthesized)
gcatggctcactgcttaccacactgatcactcctctgaccactacatgcctacttcgtgcttctgccccaacactcccttgattccctccaccccctttgaactctctcccctggtctca

SEQ ID NO: 48950 - DNA, 120 bp, Artificial Sequence
  ENSG00000066056_45 (sequence is synthesized)
gggctgatgcacactacacagaggctgttaaagtgtgagatgcagtcaagagtaagagctttggagcctgagttggaacgcttgctctgccactaactagctgtatggccttgggcaatc

SEQ ID NO: 48951 - DNA, 120 bp, Artificial Sequence
  ENSG00000066056_46 (sequence is synthesized)
tagctaacctctcagtgcctcagtgtcttcatctgtaaaatggcaagactaatagaacctgtatcatagggttggtgtgagggttaaatgaattaacatgtctgttaaatgaccagggcc

SEQ ID NO: 48952 - DNA, 120 bp, Artificial Sequence
  ENSG00000066056_47 (sequence is synthesized)
tgaattaacatgtctgttaaatgaccagggcctggaccacggtaagtgctcaataaaaatgttagctcggctggctgtggtggcccacatgtgtaatcccagcactttgggaggccaggc

SEQ ID NO: 48953 - DNA, 120 bp, Artificial Sequence
  ENSG00000066056_48 (sequence is synthesized)
ccagtcaggctcggccttcctgggctcgggagccagcctctgtctgcacacatctttggctgatgttcttagccctgctgtggccacctgccagtaggccagtcatgctgtcctgtctcc

SEQ ID NO: 48954 - DNA, 120 bp, Artificial Sequence
  ENSG00000066056_49 (sequence is synthesized)
tctgagggcttcttcattgtcgtcacttaggatctgaactctgtccttggccttccaggcctggactcttgatatttagagctaagctttggcatttcaaataaaaaataaaaaaagaaa

SEQ ID NO: 48955 - DNA, 120 bp, Artificial Sequence
  ENSG00000066056_50 (sequence is synthesized)
accccgcagcccacctgcttccagacaaggtcacacacactgtgaacaaaggtgacaccgctgtactttctgcacgtgtgcacaaggagaagcagacagacgtgatctggaagagcaacg

SEQ ID NO: 48956 - DNA, 120 bp, Artificial Sequence
  ENSG00000066056_51 (sequence is synthesized)
accctcacccttagggcttgtgcctggccctgccccacaggagcctcaaacaggcccttcctccacactcagcccctcaaacccattctctcctaggggcgtctccctgtgcgctggatg

SEQ ID NO: 48957 - DNA, 120 bp, Artificial Sequence
  ENSG00000066084_0 (sequence is synthesized)
acgtgacctttgctcatggcggcggcggcggcggcggcggtgctggtggtgctcggcggccggagccggatcctgtagccgggtgtgggcccgtgtctgtccgtccctccttcggccccc

SEQ ID NO: 48958 - DNA, 120 bp, Artificial Sequence
  ENSG00000066084_1 (sequence is synthesized)
tctcttgtcttccggagtgtggctggcggagctgggatggcggaacgaggcctggagccgtcgccggccgcggtggcggcgctgccgcctgaagtgcgggcgcagctggcggagctggag

SEQ ID NO: 48959 - DNA, 120 bp, Artificial Sequence
  ENSG00000066084_2 (sequence is synthesized)
ctggagctctcggagggggacatcacccagaagggctatgaaaagaaaaggtccaaactcctatctccttacagcccgcagacacaagaaactgattcagcagtacagaaagaacttaga

SEQ ID NO: 48960 - DNA, 120 bp, Artificial Sequence
  ENSG00000066084_3 (sequence is synthesized)
aaccagacacctgctccatctgcagctcaaacttctgctccctctaagtaccaccgaactcgatctgggggagccagggatgaacgatatcgatcagatatccacacagaagcagttcag

SEQ ID NO: 48961 - DNA, 120 bp, Artificial Sequence
  ENSG00000066084_4 (sequence is synthesized)
gctgcactggcaaagcataaagaacagaagatggctttgcccatgccaaccaaaaggcgatccacatttgttcagtctcctgcagatgcctgcacacctcctgacacatcttcggcctct

SEQ ID NO: 48962 - DNA, 120 bp, Artificial Sequence
  ENSG00000066084_5 (sequence is synthesized)
gaggatgagggctctctgagacgccaagctgcgctctctgctgccttgcaacagagcttacagaatgctgagtcctggatcaaccgttcaattcagggatcgtccacttcttcatccgca

SEQ ID NO: 48963 - DNA, 120 bp, Artificial Sequence
  ENSG00000066084_6 (sequence is synthesized)
tcttctacgctgtcccacggagaggtcaaaggaaccagtgggtctctagctgatgtatttgccaatactcgaatagagaatttctctgctcctcctgatgtcactacaactacctcttcc

SEQ ID NO: 48964 - DNA, 120 bp, Artificial Sequence
  ENSG00000066084_7 (sequence is synthesized)
tcctcatcatcttcctcaattcgcccagcaaacattgacctgcccccctcggggatagttaaaggcatgcacaaaggatccaacaggtccagccttatggatacagctgatggtgttcct

SEQ ID NO: 48965 - DNA, 120 bp, Artificial Sequence
  ENSG00000066084_8 (sequence is synthesized)
gtcagtagcagagtatctacaaaaatccagcagcttctgaacactctgaaacgacccaaaaggcctcccttaaaggaattttttgtggatgactctgaagaaattgtggaagtacctcag

SEQ ID NO: 48966 - DNA, 120 bp, Artificial Sequence
  ENSG00000066084_9 (sequence is synthesized)
ccagaccccaaccagcccaagccggagggacggcagatgacccctgtgaaaggagagcctttaggagtcatctgtaactggcctcctgctcttgaatctgccctgcagcgctggggtacc

SEQ ID NO: 48967 - DNA, 120 bp, Artificial Sequence
  ENSG00000066084_10 (sequence is synthesized)
actcaagcaaaatgctcctgtctgactgcactggacatgacagggaaaccagtttacactcttacatatggaaagttgtggagcagaagtttaaagttggcctacacacttcttaataaa

SEQ ID NO: 48968 - DNA, 120 bp, Artificial Sequence
  ENSG00000066084_11 (sequence is synthesized)
ctggggaccaaaaatgaacctgtgttaaaacctggagacagggtagccctggtttaccccaacaatgatccagtcatgtttatggtggctttctatggatgcctcctggcagaagtgatt

SEQ ID NO: 48969 - DNA, 120 bp, Artificial Sequence
  ENSG00000066084_12 (sequence is synthesized)
ccagtgcctatagaggtacctcttaccagaaaggatgctggaggtcagcagattggcttcttgctaggaagctgtggtattgccttagctcttaccagtgaagtttgtctaaaaggactg

SEQ ID NO: 48970 - DNA, 120 bp, Artificial Sequence
  ENSG00000066084_13 (sequence is synthesized)
ccaaaaacccagaatggagaaattgtacagtttaaaggttggccccggctcaaatgggttgtaacagattccaagtacctttcaaagccaccgaaagactggcagccacacatctcacct

SEQ ID NO: 48971 - DNA, 120 bp, Artificial Sequence
  ENSG00000066084_14 (sequence is synthesized)
gctgggacagaaccggcatacattgagtataaaacaagcaaagaagggagtgtaatgggagttacagtatcccggcttgcaatgttgtctcactgccaagctctgtcgcaggcctgcaat

SEQ ID NO: 48972 - DNA, 120 bp, Artificial Sequence
  ENSG00000066084_15 (sequence is synthesized)
tattctgaaggggaaacaatagtaaatgtcttagactttaagaaggatgctgggctgtggcacggcatgtttgcgaatgtaatgaataagatgcacacaatcagcgtaccctactctgtt

SEQ ID NO: 48973 - DNA, 120 bp, Artificial Sequence
  ENSG00000066084_16 (sequence is synthesized)
atgaaaacctgtcctctctcttgggtccaaagagtacatgctcacaaagccaaggtagctttagtaaaatgtcgggacttgcactgggctatgatggcacatcgggaccaaagagacgtg

SEQ ID NO: 48974 - DNA, 120 bp, Artificial Sequence
  ENSG00000066084_17 (sequence is synthesized)
agcttgagttccctccgaatgttaattgtgactgatggagctaacccctggtccgtgtcatcctgtgatgccttcctgagtctgttccaaagtcatggactgaagcctgaggccatctgt

SEQ ID NO: 48975 - DNA, 120 bp, Artificial Sequence
  ENSG00000066084_18 (sequence is synthesized)
ccgtgcgccacgtctgctgaagccatgactgtagcaatccgcaggcctggagttccaggagcccctttgccaggaagagccattctctcaatgaatggattgagctatggggtaatacgg

SEQ ID NO: 48976 - DNA, 120 bp, Artificial Sequence
  ENSG00000066084_19 (sequence is synthesized)
gtcaatactgaagataaaaattcagcactgacggtccaggatgtagggcatgtaatgcctggtgggatgatgtgcattgtgaaaccagatggacctccccagctctgcaaaacagatgaa

SEQ ID NO: 48977 - DNA, 120 bp, Artificial Sequence
  ENSG00000066084_20 (sequence is synthesized)
attggagaaatctgtgttagctccagaactggaggcatgatgtactttgggcttgctggtgtgacaaaaaatacatttgaggtaattccagtgaattctgcaggctctcctgttggggat

SEQ ID NO: 48978 - DNA, 120 bp, Artificial Sequence
  ENSG00000066084_21 (sequence is synthesized)
gtgccattcatccgatcaggattgctggggtttgtagggccgggtagtttggtgttcgtggttgggaaaatggatggcttactgatggttagtggtcgaagacataatgctgatgacatt

SEQ ID NO: 48979 - DNA, 120 bp, Artificial Sequence
  ENSG00000066084_22 (sequence is synthesized)
gttgctactggattggctgtagaatcaataaagactgtttatagaggaagaattgctgtgttttctgtgtctgtattttatgatgagcgcattgtggtggttgcggaacaaagacctgat

SEQ ID NO: 48980 - DNA, 120 bp, Artificial Sequence
  ENSG00000066084_23 (sequence is synthesized)
gcttctgaggaagatagtttccagtggatgagccgcgtgctgcaggcgatcgatagcattcatcaagtgggggtttattgtcttgctctggtgccagccaatacattgccaaaaactcca

SEQ ID NO: 48981 - DNA, 120 bp, Artificial Sequence
  ENSG00000066084_24 (sequence is synthesized)
ctaggaggaatccatatatctcagacgaaacaactctttctggagggatcactgcatccttgcaacatcctcatgtgcccccatacatgtgtgacaaacttgccaaagccccggcaaaaa

SEQ ID NO: 48982 - DNA, 120 bp, Artificial Sequence
  ENSG00000066084_25 (sequence is synthesized)
caaccaggtgtaggccctgcttccgtgatggttgggaatctggttgctggaaaacgtatagcacaagctgctggaagggatctgggacaaatagaagagaatgatttggtgaggaagcac

SEQ ID NO: 48983 - DNA, 120 bp, Artificial Sequence
  ENSG00000066084_26 (sequence is synthesized)
cagtttctggcagagatcctacagtggcgagcccaggcgactcctgaccatgtactcttcatgctgttaaatgccaagggaaccactgtatgcacagccagctgccttcagcttcataag

SEQ ID NO: 48984 - DNA, 120 bp, Artificial Sequence
  ENSG00000066084_27 (sequence is synthesized)
cgagcagagaggattgcatctgttcttggtgataagggacatctaaatgcaggagataatgtggtgttgctctatccacctggcattgagttaatcgccgccttctatggctgcctgtat

SEQ ID NO: 48985 - DNA, 120 bp, Artificial Sequence
  ENSG00000066084_28 (sequence is synthesized)
gcgggctgtatacctgtgaccgtcagacctccacatgctcagaacctcacggccacgctgcccactgtccgaatgattgttgatgtcagcaaagcagcctgtattctcaccagtcagacc

SEQ ID NO: 48986 - DNA, 120 bp, Artificial Sequence
  ENSG00000066084_29 (sequence is synthesized)
ctaatgaggctactgaggtcccgagaggcagcagcagctgtggatgtgaaaacctggccaaccatcattgacacagatgatttacccaggaaaaggttacctcagctgtataaaccgccc

SEQ ID NO: 48987 - DNA, 120 bp, Artificial Sequence
  ENSG00000066084_30 (sequence is synthesized)
actcctgagatgttggcatatcttgattttagtgtctccacaactggcatgcttacaggagtgaagatgtcccactctgcagtgaacgctctgtgtcgagccatcaagctccagtgtgag

SEQ ID NO: 48988 - DNA, 120 bp, Artificial Sequence
  ENSG00000066084_31 (sequence is synthesized)
ttgtactcttctcggcagatcgccatctgccttgacccttactgtggacttggcttcgcgctctggtgtctctgcagtgtctattcaggccaccagtctgtcttaattcctcctatggag

SEQ ID NO: 48989 - DNA, 120 bp, Artificial Sequence
  ENSG00000066084_32 (sequence is synthesized)
ttagagaacaaccttttcctctggctctccacagtcaaccagtacaaaataagggacactttctgctcctattcagtgatggagctctgcaccaaaggtcttgggaaccaagtggaagtg

SEQ ID NO: 48990 - DNA, 120 bp, Artificial Sequence
  ENSG00000066084_33 (sequence is synthesized)
ctaaagaccagagggatcaacctctcctgcgtccggacctgtgtggtggtggcggaggagaggccccgcgttgcactccagcagtccttctctaagctcttcaaagacatcgggctgtcc

SEQ ID NO: 48991 - DNA, 120 bp, Artificial Sequence
  ENSG00000066084_34 (sequence is synthesized)
ccgcgggctgtcagcaccacttttggatcaagagtcaatgtagcaatatgtttacagggaacctcagggcctgatccgactactgtgtatgtggatctgaaatcactaagacatgacagg

SEQ ID NO: 48992 - DNA, 120 bp, Artificial Sequence
  ENSG00000066084_35 (sequence is synthesized)
gttcgtctcgtggaacgtggcgcccctcagagtttgcttctctcagagtctggaaagattttacctggagtgaaagtggttattgttaatcctgagaccaaagggccggttggagactct

SEQ ID NO: 48993 - DNA, 120 bp, Artificial Sequence
  ENSG00000066084_36 (sequence is synthesized)
cgagactcttcaagctgatcatttcaacactcgcctcagctttggagatgcagctcagacactctgggctcggacaggataccttggttttgtccgccggaccgagctcacagcggccac

SEQ ID NO: 48994 - DNA, 120 bp, Artificial Sequence
  ENSG00000066084_37 (sequence is synthesized)
tggagagcgtcatgatgcattgtatgtggtgggagcgctggatgaaacactggagctgagaggattacgataccacccaattgatattgagacctcggtgtcccggatccacagaagcat

SEQ ID NO: 48995 - DNA, 120 bp, Artificial Sequence
  ENSG00000066084_38 (sequence is synthesized)
tgctgaatgtgccgtgttcacatggaccaacttgcttgtggtggttgtggaactgtgcggctctgaacaggaagccctagatctggtcccattagtgaccaacgtggtcctggaagagca

SEQ ID NO: 48996 - DNA, 120 bp, Artificial Sequence
  ENSG00000066084_39 (sequence is synthesized)
ttacctcatcgttggcgtcgtggttgtggtggacccaggtgtcatcccgatcaactccagaggagagaagcagaggatgcacctccgtgatagcttcctagctgaccagttagaccccat

SEQ ID NO: 48997 - DNA, 120 bp, Artificial Sequence
  ENSG00000066084_40 (sequence is synthesized)
ctacgtggcttataacatgtaaccagccttgtggggactgcagtgggccattctgaagaatcacaaagacagaagacctctggctaagagcaggcttcaaacgatgtgaaataagctgag

SEQ ID NO: 48998 - DNA, 120 bp, Artificial Sequence
  ENSG00000066084_41 (sequence is synthesized)
atggctacatgatattcttcatctcatcctgtgggattctgcaatcataaaacacaggaaaggggaattctgtgatggcaaatgaaaaaaatgttaacatttggtagacatgtgctttga

SEQ ID NO: 48999 - DNA, 120 bp, Artificial Sequence
  ENSG00000066084_42 (sequence is synthesized)
catagcgtgagcagcacattactaaagcaattacatgcatgttgcatttttttcatctgttgtacatagttgtatttttatctaatgccattttagaattttctaagggaatttaatgaa

SEQ ID NO: 49000 - DNA, 120 bp, Artificial Sequence
  ENSG00000066084_43 (sequence is synthesized)
ttcacatgaaaggggtagtctgagtgacacagttccccactccgtactgtattttgccattctgccgtagctagatgttctgtggggtttgttaacatggaactactcagctttctttca

SEQ ID NO: 49001 - DNA, 120 bp, Artificial Sequence
  ENSG00000066084_44 (sequence is synthesized)
gtcaacccataagcaaatcagataacccactgactatgagaattactttatatagataattcttgactgtaaaacattttgaccagtgttttacaacatgtacataagaatacacataat

SEQ ID NO: 49002 - DNA, 120 bp, Artificial Sequence
  ENSG00000066084_45 (sequence is synthesized)
tcaactagagatttgaagaattggcttgtatagttataacaaccacagtagaaacatttctactttgagagaatttcaatattctcttaatgttgtgtaattgattaggtaactaaaaag

SEQ ID NO: 49003 - DNA, 120 bp, Artificial Sequence
  ENSG00000066084_46 (sequence is synthesized)
cgcaaattgttggcaggttttgctgcacattgttctatgtctttgttggctggtgtattttataaactaaagctgcctatgtttctttttaaagctcgcattcccagaatcagcttaggc

SEQ ID NO: 49004 - DNA, 120 bp, Artificial Sequence
  ENSG00000066084_47 (sequence is synthesized)
ttctatgaattcagcctgtttctaaaagctgaaaatctcagtttaaaaatcaaaatgttaacacaaagctaagattcatcagagcccaccctattctaaggaaccacaataacttactct

SEQ ID NO: 49005 - DNA, 120 bp, Artificial Sequence
  ENSG00000066084_48 (sequence is synthesized)
ggccccagtgttaaaacgatctttcagatttagagtgactatgtaagaatttaggatttcctcttttccaggcacattgtaaactgtgtctacagtttatccatataacttctcttctga

SEQ ID NO: 49006 - DNA, 120 bp, Artificial Sequence
  ENSG00000066084_49 (sequence is synthesized)
aaactgaggagtgtcctctgttcttccagttcacgagggcagggggtttaaaacaagaatgataggccaggaaggcagtggggatccaccatcacatggaactgtaaggccatataacta

SEQ ID NO: 49007 - DNA, 120 bp, Artificial Sequence
  ENSG00000066084_50 (sequence is synthesized)
cacaaaactgaccaatctgggttgccaaagcagccaggcttatgctgaaaccggggaagtctgacatatgcaggaaactcttttgaaataactttggtgcccaggccaagtagaatgaga

SEQ ID NO: 49008 - DNA, 120 bp, Artificial Sequence
  ENSG00000066084_51 (sequence is synthesized)
tgagactgagtttggcctctggctcggtttcctttctttggtctgatacttcatgtatttgaatatagttaaatcgtattatttttttcttaacagaaatatttttaaaaatgaaaaagt

SEQ ID NO: 49009 - DNA, 120 bp, Artificial Sequence
  ENSG00000066084_52 (sequence is synthesized)
actcaaaagtgagaagagttaacttgtcaaagcagaatggttctctttgacccactctggtctattgtgtaaatatttatttagactattttaataatacatattatttaccccactgta

SEQ ID NO: 49010 - DNA, 120 bp, Artificial Sequence
  ENSG00000066084_53 (sequence is synthesized)
acatcatgtaaactaagtatgtttttaaacaatttttaagacttgtaattaccctgaaaataaggtttataatgcaaagaccagctcctttgcggtggcagtgctctagggctgccatta

SEQ ID NO: 49011 - DNA, 120 bp, Artificial Sequence
  ENSG00000066084_54 (sequence is synthesized)
cacggtcttgtgatgtgactaaaagccactttgtgactcccttcatgtaatcctcttttcctccccactcctccacagagggcagagctcaggacatttgccagttccagatctcttttt

SEQ ID NO: 49012 - DNA, 120 bp, Artificial Sequence
  ENSG00000066084_55 (sequence is synthesized)
cagcattttcatggaattaatttacacgtaatgagggaagtcctaggatggatagaaaaaaagcacttacattggggcacacaggaaatcccagtgtctagcaatggtttggtttgcaga

SEQ ID NO: 49013 - DNA, 120 bp, Artificial Sequence
  ENSG00000066084_56 (sequence is synthesized)
gaacacagcctgatacttaattttcttaaaactatttttaatgatccactaaacaaagcaggggatcctgaagctgatataaataagtctagctctataatccccaagttctaaaagtta

SEQ ID NO: 49014 - DNA, 120 bp, Artificial Sequence
  ENSG00000066084_57 (sequence is synthesized)
tggttagatgctattctgtgggttgctttgataattcttactaacacagattagggtataggcatctagagatgcactgtccactgtaaatactataatgagagccacatctgtaattta

SEQ ID NO: 49015 - DNA, 120 bp, Artificial Sequence
  ENSG00000066084_58 (sequence is synthesized)
aatgtttctagtaaccacatttttttaaaagtaaaaagaaacccatggtattgatttaaatatattttatttaacccaatagctcaaaaacactatcatttcaacataggatcaatataa

SEQ ID NO: 49016 - DNA, 120 bp, Artificial Sequence
  ENSG00000066084_59 (sequence is synthesized)
aaattattaatgagttattttactttttttcatattaggcctttgaaattcagtgtgtattaaacacatctcaattcaaaccatcaccatatttcaagtctttgtagccaaatgtgacta

SEQ ID NO: 49017 - DNA, 120 bp, Artificial Sequence
  ENSG00000066084_60 (sequence is synthesized)
gtggctaccatattagacagtgcagatctatactcattccttcaaatacattactctgttaatctcaaagtgtggccaactcccatttacttagaggctgattatctagttttgtagttc

SEQ ID NO: 49018 - DNA, 120 bp, Artificial Sequence
  ENSG00000066084_61 (sequence is synthesized)
ctcaggcctctaatttattttttgctttctgctttattgatcttttgcatgtcccccaaagccagaatctgctcatggaggaaggaaggctaagaactgtccttgaggaacttcatcagt

SEQ ID NO: 49019 - DNA, 120 bp, Artificial Sequence
  ENSG00000066084_62 (sequence is synthesized)
aactctggtaaagcatcctgtggagggagaggagagcccagtcatttgcttagatggtgtttgtgggatcacctgcagatttaaagcctactctgccacagactcgagtaagaaaatgtt

SEQ ID NO: 49020 - DNA, 120 bp, Artificial Sequence
  ENSG00000066084_63 (sequence is synthesized)
ctcttgatgacacagtgctcctactctatccacattaagtagcacttttgtggtagaactgattcttaaggcaggcctgaaaggccattactaatagaaacacagcctttccaatcctct

SEQ ID NO: 49021 - DNA, 120 bp, Artificial Sequence
  ENSG00000066084_64 (sequence is synthesized)
ggaacatattctgtctgggtttttaatgtctgtggaaaaaaactaaacaagtctctgtctcagttaagagaaatctattggtctgaaggtttctgaacctctttctggttctcagcagaa

SEQ ID NO: 49022 - DNA, 120 bp, Artificial Sequence
  ENSG00000066084_65 (sequence is synthesized)
gtaactgaagtagatcaggaaggggctgcctcaggaaaattcctagatcctaggaattcagtgagaccctgggaaggaccagcatgctaatcagtgtcagtgaatccacagtctttactt

SEQ ID NO: 49023 - DNA, 120 bp, Artificial Sequence
  ENSG00000066084_66 (sequence is synthesized)
cctgcctcataaagggccaggtctccccagtaccaagtcctttcctcatgaagttgtgttgcctcaggctgtttagggaccattgcctgtcttggtcacatgagtctgtctccttacttt

SEQ ID NO: 49024 - DNA, 120 bp, Artificial Sequence
  ENSG00000066084_67 (sequence is synthesized)
agtccctgggcaatccttgcttaatgcttttgttgactcaacaagggcccgaggccttaggttttctattaaggtctctgccccaggcatggtgctctatatcttggccaaataaattac

SEQ ID NO: 49025 - DNA, 120 bp, Artificial Sequence
  ENSG00000066084_68 (sequence is synthesized)
tttccttgaatatccaggaatcttttagtctaaagcaatgaggagttatcacctcatcctcaaactccaacaagatctatgccttagtgttgtttttgttgtctgctttgatgtaaaagc

SEQ ID NO: 49026 - DNA, 120 bp, Artificial Sequence
  ENSG00000066084_69 (sequence is synthesized)
aagagtatttggagcaagaagctgcaatgcgccaaatacacaataggccttttctttatcattcatacgacatttctggtttaggtgtatgtagttgggccatgttacttgtccagagga

SEQ ID NO: 49027 - DNA, 120 bp, Artificial Sequence
  ENSG00000066084_70 (sequence is synthesized)
agagactaaagatataagaataattttttagtcctaaatgctgttttgtttactttctgtcaagatatttacccgtgtcaaattcaaactacagtactgtgtaattatgtataaagtttt

SEQ ID NO: 49028 - DNA, 120 bp, Artificial Sequence
  ENSG00000066084_71 (sequence is synthesized)
tttatttatttgaagttagactagatatacgtttttaaatttaacatctggctggacagtgttctattaactcattgaatgtgtttcctttgtcttgtgttaataaatattgatgcctga

SEQ ID NO: 49029 - DNA, 120 bp, Artificial Sequence
  ENSG00000066084_72 (sequence is synthesized)
gctggccattatgtttcagtagattttttcaataatttaaaaggatcctaagctctaagtaaagctattgccaaatattttcatttgctaaagcaacatttgcaagccagctaatattta

SEQ ID NO: 49030 - DNA, 120 bp, Artificial Sequence
  ENSG00000066084_73 (sequence is synthesized)
aaagacagcaaaaagaagagagactttgtacatccatagatgttttaacattacaagaggattttagaaaaacatttggtattgatgtatggtgaaaatcagatggttttatctaacagt

SEQ ID NO: 49031 - DNA, 120 bp, Artificial Sequence
  ENSG00000066084_74 (sequence is synthesized)
tgaaactgattacttgttaaatctttattccatcctgcttcttgattataataggcacaaaattctgtaatgaacaaagaatgagtacttttccgtttaattttgcatactagctaaaat

SEQ ID NO: 49032 - DNA, 120 bp, Artificial Sequence
  ENSG00000066084_75 (sequence is synthesized)
ttttctttttaaaataacttcaaggaaaaatggggtcaaccctgggctatgagattttgtactagtttattcaaacagattccttttctcctttgcaagtggagcacagtgtccatagac

SEQ ID NO: 49033 - DNA, 120 bp, Artificial Sequence
  ENSG00000066084_76 (sequence is synthesized)
ctagatggaaaataatctttgaggaaaaacaaggttttatttaaagaattacgcaggttgacatagtttaaactttggatgcccctctgaataaattgtatgtaaaataacgtagctatt

SEQ ID NO: 49034 - DNA, 120 bp, Artificial Sequence
  ENSG00000066084_77 (sequence is synthesized)
taaaataacatgatttcccttatctcataatctaaaataagaatttctaagagtggttgagggaagggagtaggaaaagaaaagcattttttgtttgtttttgtcaaaattgttttaaca

SEQ ID NO: 49035 - DNA, 120 bp, Artificial Sequence
  ENSG00000066084_78 (sequence is synthesized)
ttcacctcagaagctgtatatacatttcattcatataacccttaaagaaagcatttagctggccaaatctttgcatgtttatttaacatctatgaatacatccatatgttcatacagata

SEQ ID NO: 49036 - DNA, 120 bp, Artificial Sequence
  ENSG00000066084_79 (sequence is synthesized)
atttccattttaatgtttgtttttactaaattacagcagtatggaatgtttaatcatttgagtcatgtttttgctttgcagtttcctcaagtgtctgataccacctatgtaagtggtttt

SEQ ID NO: 49037 - DNA, 120 bp, Artificial Sequence
  ENSG00000066084_80 (sequence is synthesized)
gtctgataccacctatgtaagtggtttttcagaaaaagcttacaacatttctgaagatatttgtaaattttttaaaaaactggccgggcacagttggctcatgcctgtaatcccaacact

SEQ ID NO: 49038 - DNA, 73 bp, Artificial Sequence
  ENSG00000066084_81 (sequence is synthesized)
gaggctgagacaggtggatcacctgaggccaggaatttgagaccagcccagacaacatggccacacacctgta

SEQ ID NO: 49039 - DNA, 120 bp, Artificial Sequence
  ENSG00000066084_82 (sequence is synthesized)
taatgttagaagatcctcctgctttgtgagatttccatcttttggcttgtaaaatgccttgtagtggatcttctatcctaattattttgatcataagtatacattcaagagaatgacggc

SEQ ID NO: 49040 - DNA, 120 bp, Artificial Sequence
  ENSG00000066117_0 (sequence is synthesized)
gcatcggcggctccgggaagatggcggcccgggcgggtttccagtctgtggctccaagcggcggcgccggagcctcaggaggggcgggcgcggctgctgccttgggcccgggcggaactc

SEQ ID NO: 49041 - DNA, 120 bp, Artificial Sequence
  ENSG00000066117_1 (sequence is synthesized)
cggaactccggggcctcctgtgcgaatgggcccggctccgggtcaagggctgtaccgctccccgatgcccggagcggcctatccgagaccaggtatgttgccaggcagccgaatgacacc

SEQ ID NO: 49042 - DNA, 120 bp, Artificial Sequence
  ENSG00000066117_2 (sequence is synthesized)
tcagggaccttccatgggaccccctggctatggggggaacccttcagtccgacctggcctggcccagtcagggatggatcagtcccgcaagagacctgcccctcagcagatccagcaggt

SEQ ID NO: 49043 - DNA, 120 bp, Artificial Sequence
  ENSG00000066117_3 (sequence is synthesized)
ccagcagcaggcggtccaaaatcgaaaccacaatgcaaagaaaaagaagatggctgacaaaattctacctcaaaggattcgtgaactggtaccagaatcccaggcctatatggatctctt

SEQ ID NO: 49044 - DNA, 120 bp, Artificial Sequence
  ENSG00000066117_4 (sequence is synthesized)
ggcttttgaaaggaaactggaccagactatcatgaggaaacggctagatatccaagaggccttgaaacgtcccatcaagcaaaaacggaagctgcgaattttcatttctaacactttcaa

SEQ ID NO: 49045 - DNA, 120 bp, Artificial Sequence
  ENSG00000066117_5 (sequence is synthesized)
tccggctaagtcagatgccgaggatggggaagggacggtggcttcctgggagcttcgggtagaaggacggctcctggaggattcagccttgtccaaatatgatgccactaaacaaaagag

SEQ ID NO: 49046 - DNA, 120 bp, Artificial Sequence
  ENSG00000066117_6 (sequence is synthesized)
gaagttctcttccttttttaagtccttggtgattgaactggacaaagacctgtatgggccagacaaccatctggtagaatggcacaggaccgccactacccaggagaccgatggctttca

SEQ ID NO: 49047 - DNA, 120 bp, Artificial Sequence
  ENSG00000066117_7 (sequence is synthesized)
ggtgaagcggccgggagacgtgaatgtacggtgtactgtcctactgatgctggattaccagcctccccagtttaaattagacccccgcctagctcgactcctgggcatccatacccagac

SEQ ID NO: 49048 - DNA, 120 bp, Artificial Sequence
  ENSG00000066117_8 (sequence is synthesized)
tcgtccagtgatcatccaagcactgtggcaatatattaagacacataagctccaggaccctcacgagcgggagtttgtcatctgtgacaagtacctgcagcagatctttgagtctcaacg

SEQ ID NO: 49049 - DNA, 120 bp, Artificial Sequence
  ENSG00000066117_9 (sequence is synthesized)
tatgaagttttcagagatccctcagcggctccatgccttgcttatgccaccagaacctatcatcattaatcatgtcatcagtgttgacccgaatgatcagaaaaagacagcttgttatga

SEQ ID NO: 49050 - DNA, 120 bp, Artificial Sequence
  ENSG00000066117_10 (sequence is synthesized)
cattgatgttgaagtggatgacaccttgaagacccagatgaattcttttctgctgtccactgccagccaacaggagattgctactctagacaacaagatccatgagacaatagaaaccat

SEQ ID NO: 49051 - DNA, 120 bp, Artificial Sequence
  ENSG00000066117_11 (sequence is synthesized)
caaccagctgaagactcagcgggagttcatgctgagctttgccagagaccctcagggtttcatcaatgactggcttcagtcccagtgcagggacctcaagacaatgactgatgtggtggg

SEQ ID NO: 49052 - DNA, 120 bp, Artificial Sequence
  ENSG00000066117_12 (sequence is synthesized)
taacccagaggaggagcgccgagctgagttctacttccagccctgggctcaggaggctgtgtgccgatacttctactccaaggtgcagcagagacgacaagaattagagcaagccctggg

SEQ ID NO: 49053 - DNA, 120 bp, Artificial Sequence
  ENSG00000066117_13 (sequence is synthesized)
gcaccaattcttgatttgggccctgtgctgcctgcctcatagtatctgccttggtcttgcttggggcgttccaggggatgctgttggttcaaggacaacaccagaatgaagagggtctca

SEQ ID NO: 49054 - DNA, 120 bp, Artificial Sequence
  ENSG00000066117_14 (sequence is synthesized)
caagacacctgttatcctcttctttcaccctatctcttcccacccccagcttccctttgccccacaaagttcccatgtgcctgtaccctcccctggtctacataggacctctagatagtg

SEQ ID NO: 49055 - DNA, 120 bp, Artificial Sequence
  ENSG00000066117_15 (sequence is synthesized)
ttagagagagaacatgtagtggtaatgagtgcttggaatggattgggcctcaggccaggtggtcttcaaggggaccagctaactgatcctgcccttcagagacccaggagttgggagctt

SEQ ID NO: 49056 - DNA, 120 bp, Artificial Sequence
  ENSG00000066117_16 (sequence is synthesized)
tcgctccttctccaagactcaggcctgtgggcactctataagctagttgatcttggctctcctgataacagaatccaatttccttccttccctccacaggtttggaacaaactctccctt

SEQ ID NO: 49057 - DNA, 120 bp, Artificial Sequence
  ENSG00000066117_17 (sequence is synthesized)
cacttgttgccctgtagcactacagaaaccctggttcttgggctccactgagccccaggtcagtccccagccctctgggttggcctgctgtcagtgcttctctcactccttagttggggt

SEQ ID NO: 49058 - DNA, 120 bp, Artificial Sequence
  ENSG00000066117_18 (sequence is synthesized)
ccacatcagtattggagttttgttctttattgctccctcccagacactccctgtggctgccctttgtgattccctcagatctgccctaatcccgggcatttgggtgggggaatcttgcct

SEQ ID NO: 49059 - DNA, 120 bp, Artificial Sequence
  ENSG00000066117_19 (sequence is synthesized)
ttccctttcagagccccagggatctcatctggggaactgtcattgccagcagaggctgttccttcctgctgtttggagatgtgactcattcattcactcactccaccctgcctctgcatc

SEQ ID NO: 49060 - DNA, 120 bp, Artificial Sequence
  ENSG00000066117_20 (sequence is synthesized)
ccttaatggagaaacgggcctaaaaccaaacgggtaaaaagccctgggccatccctgtcttcctgtcccttgtctgcccagttgacacctactggtgacttctagggcactgaggagtga

SEQ ID NO: 49061 - DNA, 120 bp, Artificial Sequence
  ENSG00000066117_21 (sequence is synthesized)
aagcgcctagggctggagaatagcgctgagttgggtttgtgactcttccctctccctgcctcacaggattgtgactccccagcccctgccctcaaagcttcagacccctcaggtagcagc

SEQ ID NO: 49062 - DNA, 120 bp, Artificial Sequence
  ENSG00000066117_22 (sequence is synthesized)
aggaccttgtgatcttggccccttggatctgagatggtttttgcatctttccaggagagcctcacattcttcttccaggttgtatcacccccgagttagcatatcccaggctcgcagact

SEQ ID NO: 49063 - DNA, 120 bp, Artificial Sequence
  ENSG00000066117_23 (sequence is synthesized)
caacacagcaagggtgggagacagctgggcacaaagggggaattccgttcagcatgggctctaaacccacagaactgacaaagcccctgcttccccaccccctcctcaggctcctgcgag

SEQ ID NO: 49064 - DNA, 120 bp, Artificial Sequence
  ENSG00000066117_24 (sequence is synthesized)
cacacccccacccccaaatccctccctgttctacactggggacagcagaattttctccccgtcttccccttcctgccattttccctcccttgaaaggttgacactggacaaccttggggc

SEQ ID NO: 49065 - DNA, 120 bp, Artificial Sequence
  ENSG00000066117_25 (sequence is synthesized)
agctgagccctggccgcctcctggctggaaccatgagaaggaagctcagtacttcccacagtgtccctgttgataactgtttttattaactgaattgtttttttcatggaccaaactttt

SEQ ID NO: 49066 - DNA, 120 bp, Artificial Sequence
  ENSG00000066117_26 (sequence is synthesized)
ttttgtactgtccccttattgatgttacccagttttaataaaagaatcttctgaaggatgggtcctcctacctactgtgagagagctcttccctgagctcttcttccttcaataccatta

SEQ ID NO: 49067 - DNA, 120 bp, Artificial Sequence
  ENSG00000066117_27 (sequence is synthesized)
agcacgccttttccgctagtcgccccgctctatcccatagtctcgctgccctgagcctcccgtgccggccggccggccgggggaacaggcgggcgctcggggggcgctcggggggcgggg

SEQ ID NO: 49068 - DNA, 120 bp, Artificial Sequence
  ENSG00000066117_28 (sequence is synthesized)
agtgcgcagaaagagagggggaggcagttacacacctgctcctaggggcattgtttccctggggagtcggtagagaacctgggtgggtgaagtgggtccagggatacctgtatgagggcc

SEQ ID NO: 49069 - DNA, 120 bp, Artificial Sequence
  ENSG00000066117_29 (sequence is synthesized)
gaaacaagggcaaattacttgctgaaagaatgccaagggtcggagcagttggagctctatatgatggtgccagctgtgggcagcatggtgactaggttggaagtggcatgtggagttgtc

SEQ ID NO: 49070 - DNA, 120 bp, Artificial Sequence
  ENSG00000066117_30 (sequence is synthesized)
taatgtctaaggagatggggaggtataaagtagtcactctaggtgtacacagtaccgctccaggtgtacagtttgcacattgacctctaggtggcactagcatgtttagttaggaccaag

SEQ ID NO: 49071 - DNA, 120 bp, Artificial Sequence
  ENSG00000066117_31 (sequence is synthesized)
ggctcttgtaacctaacttgtcccatctttttaatgttactatcctggtcactgccacctctttcaagggaaagtctactggtggcctcttgtatgtgccaggccatctctgtatcttgc

SEQ ID NO: 49072 - DNA, 120 bp, Artificial Sequence
  ENSG00000066117_32 (sequence is synthesized)
ttgttaataatggtgagatgtagttatccatttttcctggcagcagttgctgtaattagagtgattgactgatagggtactagtacttgccaaggttaccattatagatctgggacttcc

SEQ ID NO: 49073 - DNA, 120 bp, Artificial Sequence
  ENSG00000066117_33 (sequence is synthesized)
tcttggtctctgctctgtttacatttacattccaattcaccaaaaatcctttattatgatgcctgattgcacaacgttttgaagcccatgttagcaacagtattctttgggaaacaggca

SEQ ID NO: 49074 - DNA, 120 bp, Artificial Sequence
  ENSG00000066117_34 (sequence is synthesized)
aaaccagaatgacagtccagccagcactccaagtgaacctaacctgctcctttctttgccagtgtagctgcagccccttaacctcaaccactaagagacatggggaggtctttaccatct

SEQ ID NO: 49075 - DNA, 120 bp, Artificial Sequence
  ENSG00000066117_35 (sequence is synthesized)
aataagggaagtaagtcatagaatcaatagaaacttgtaaatatatttaattttatagcagtagagtatagtggctaagaatgtggactgtagaatcagacacatcagagctcaaatggt

SEQ ID NO: 49076 - DNA, 120 bp, Artificial Sequence
  ENSG00000066117_36 (sequence is synthesized)
ggaacaaactctcccttcacttgttgccctgtagcactacagaaaccctggttcttgggctccactgagccccagaggctgttccttcctgctgtttggagatgtgactcattcattcac

SEQ ID NO: 49077 - DNA, 120 bp, Artificial Sequence
  ENSG00000066117_37 (sequence is synthesized)
acctaccggtcatattagggggtactctaatgacctcatcttaacttgagcatctgtagagaccctatttccaaataaggtcacattcacaggtactaggggttggttagacttcaacat

SEQ ID NO: 49078 - DNA, 120 bp, Artificial Sequence
  ENSG00000066135_0 (sequence is synthesized)
agaggaggcggagtttcggccttcgcctgctggaaaagcagtaggatcggccagtggcgacagcaggagctgagcctaagccctggcggggctttgggctgtagattcctgtctgactaa

SEQ ID NO: 49079 - DNA, 120 bp, Artificial Sequence
  ENSG00000066135_1 (sequence is synthesized)
agggacctcaaaaaggagggaaaatggcttctgagtctgaaactctgaatcccagtgctaggataatgaccttttatccaactatggaagagttccgaaacttcagtagatacattgcct

SEQ ID NO: 49080 - DNA, 120 bp, Artificial Sequence
  ENSG00000066135_2 (sequence is synthesized)
acattgaatcccaaggagctcatcgggcagggctagccaaggttgttcctccaaaagagtggaagccacgagcatcctatgatgacattgatgatttggtcattcctgcccccattcaac

SEQ ID NO: 49081 - DNA, 120 bp, Artificial Sequence
  ENSG00000066135_3 (sequence is synthesized)
agctggtgacggggcagtctggcctctttactcagtacaacatacagaagaaagccatgactgttcgagagttccgcaagatagccaatagcgataagtactgtaccccacgctatagtg

SEQ ID NO: 49082 - DNA, 120 bp, Artificial Sequence
  ENSG00000066135_4 (sequence is synthesized)
agtttgaagagctcgagcggaaatactggaaaaatcttacattcaatcctccaatctatggtgcagatgtgaatggtaccctctatgaaaagcatgttgatgagtggaatattggccggc

SEQ ID NO: 49083 - DNA, 120 bp, Artificial Sequence
  ENSG00000066135_5 (sequence is synthesized)
tgagaacaatcctggacttggtggaaaaggagagtgggatcaccattgagggtgtgaacaccccatacctgtactttggcatgtggaagacatcctttgcttggcacactgaagacatgg

SEQ ID NO: 49084 - DNA, 120 bp, Artificial Sequence
  ENSG00000066135_6 (sequence is synthesized)
acctctacagcatcaactacctgcactttggagaaccaaagtcctggtactctgttccacctgagcatggaaagcggttggaacgcctcgccaaaggctttttcccaggaagtgctcaaa

SEQ ID NO: 49085 - DNA, 120 bp, Artificial Sequence
  ENSG00000066135_7 (sequence is synthesized)
gctgtgaggcatttctccgccacaagatgaccctgatttccccgttaatgctgaagaaatatggaattccctttgacaaggtgactcaagaggctggagagtttatgatcactttccctt

SEQ ID NO: 49086 - DNA, 120 bp, Artificial Sequence
  ENSG00000066135_8 (sequence is synthesized)
atggttaccatgccggctttaaccatggttttaactgtgcggagtctaccaattttgctacccgtcggtggattgagtacggcaagcaagctgtgctgtgctcctgtagaaaggacatgg

SEQ ID NO: 49087 - DNA, 120 bp, Artificial Sequence
  ENSG00000066135_9 (sequence is synthesized)
tgaagatctccatggatgtgtttgtgagaaagttccagccagaaaggtacaaactttggaaagctgggaaggacaacacagttattgaccatactctgcccacgccagaagcagctgagt

SEQ ID NO: 49088 - DNA, 120 bp, Artificial Sequence
  ENSG00000066135_10 (sequence is synthesized)
ttcttaaggagagtgaactgcctccaagagctggcaacgaggaggagtgcccagaggaggacatggaaggggtggaggatggagaggaaggagacctgaagacaagcctggccaagcacc

SEQ ID NO: 49089 - DNA, 120 bp, Artificial Sequence
  ENSG00000066135_11 (sequence is synthesized)
gaatagggacaaagaggcaccgagtttgtcttgaaataccacaggaggtgagtcagagtgagctcttccccaaggaggatctgagttctgagcagtatgagatgacggagtgcccggcag

SEQ ID NO: 49090 - DNA, 120 bp, Artificial Sequence
  ENSG00000066135_12 (sequence is synthesized)
ccctcgcccctgtgaggcccacccatagctctgtgcggcaagttgaggatggtcttaccttcccagattattctgactccactgaagtcaaatttgaagagcttaaaaatgtcaaactag

SEQ ID NO: 49091 - DNA, 120 bp, Artificial Sequence
  ENSG00000066135_13 (sequence is synthesized)
aagaggaggatgaggaggaagaacaagcagcagctgccttggatctttctgtgaatcctgcgtctgtagggggacgccttgtcttctcaggctccaaaaagaaatcatcttctagcctgg

SEQ ID NO: 49092 - DNA, 120 bp, Artificial Sequence
  ENSG00000066135_14 (sequence is synthesized)
gctctggctcttcacgggattctatctcttctgattcagaaactagtgagcctctctcctgccgagcccaagggcaaacgggagttctcactgtgcacagttatgccaaaggggatggca

SEQ ID NO: 49093 - DNA, 120 bp, Artificial Sequence
  ENSG00000066135_15 (sequence is synthesized)
gggtcactgtgggagagccatgcacgaggaagaaaggaagcgccgctagaagtttcagtgagcgggagctggcagaggttgcagatgaatacatgttttccctagaagagaataagaagt

SEQ ID NO: 49094 - DNA, 120 bp, Artificial Sequence
  ENSG00000066135_16 (sequence is synthesized)
ccaagggacgccgtcagcctttaagcaagctcccccgccatcacccacttgtgctgcaggagtgtgtcagtgatgatgagacatctgaacagctgacccctgaggaagaggctgaggaga

SEQ ID NO: 49095 - DNA, 120 bp, Artificial Sequence
  ENSG00000066135_17 (sequence is synthesized)
cagaggcctgggccaagcctctgagccaactgtggcagaaccgacctccaaactttgaggctgagaaggaattcaatgagaccatggcccaacaggcccctcactgcgctgtctgtatga

SEQ ID NO: 49096 - DNA, 120 bp, Artificial Sequence
  ENSG00000066135_18 (sequence is synthesized)
ctgtggaaatgcttcagatttagccccccagaagcagaggaccaagccattgattccagaaatgtgcttcacttcgactggctgcagcacggacatcaacctttctactccttatcttga

SEQ ID NO: 49097 - DNA, 120 bp, Artificial Sequence
  ENSG00000066135_19 (sequence is synthesized)
ggaggatggcaccagcatactcgtttcctgcaagaagtgcagcgtccgggtccatgccagttgctatggggtcccccctgcaaaggcttctgaagactggatgtgttctcggtgttcagc

SEQ ID NO: 49098 - DNA, 120 bp, Artificial Sequence
  ENSG00000066135_20 (sequence is synthesized)
caatgccctagaggaggactgctgtttatgctcattacgaggaggggccctgcagagagcaaatgatgacaggtgggtccacgtttcatgtgctgtggcaattctggaagcaaggtttgt

SEQ ID NO: 49099 - DNA, 120 bp, Artificial Sequence
  ENSG00000066135_21 (sequence is synthesized)
caacattgcagaaagaagtccggtggatgtgagcaaaatccccctgccccgcttcaaactgaaatgtatcttctgtaagaagcggaggaaaagaactgctggctgctgtgtgcagtgttc

SEQ ID NO: 49100 - DNA, 120 bp, Artificial Sequence
  ENSG00000066135_22 (sequence is synthesized)
tcacggccgctgcccaactgccttccatgtgagctgcgcccaggctgccggtgtgatgatgcagcctgacgactggccttttgtggtcttcattacctgctttcggcacaagattcctaa

SEQ ID NO: 49101 - DNA, 120 bp, Artificial Sequence
  ENSG00000066135_23 (sequence is synthesized)
tttggagcgtgccaagggggccttgcaaagcatcactgcaggccagaaagtcattagcaagcataagaacgggcgcttctaccagtgtgaagtggtcaggctcaccaccgagaccttcta

SEQ ID NO: 49102 - DNA, 120 bp, Artificial Sequence
  ENSG00000066135_24 (sequence is synthesized)
tgaagtcaactttgatgatggctccttcagcgacaatctttatcctgaggacatagtgagccaggactgtctccagtttggtcctcctgctgaaggggaagtggtccaagtgagatggac

SEQ ID NO: 49103 - DNA, 120 bp, Artificial Sequence
  ENSG00000066135_25 (sequence is synthesized)
agacggccaagtctatggagccaagtttgtggcctcccaccctatccaaatgtaccaggtggagtttgaggatggctcacaacttgtggttaagagagatgatgtatacacactggatga

SEQ ID NO: 49104 - DNA, 120 bp, Artificial Sequence
  ENSG00000066135_26 (sequence is synthesized)
agagcttcccaagagagtcaaatctagactgtcagtagcctcagacatgcgcttcaatgagattttcacagagaaagaggttaagcaagaaaagaaacggcaacgagttatcaactcaag

SEQ ID NO: 49105 - DNA, 120 bp, Artificial Sequence
  ENSG00000066135_27 (sequence is synthesized)
ataccgggaagattatattgagcctgcactataccgggccatcatggagtaggtgcttccagggtccaagggattctcagccatccaggcaagagcactctgggttccacagcacagcag

SEQ ID NO: 49106 - DNA, 120 bp, Artificial Sequence
  ENSG00000066135_28 (sequence is synthesized)
acatggaacgctgaagtctctgaaagtgaagttgtaaaaagaaaaggaatgaaataaccgacccatcatcttctcacccaccctcattgcattccgctgtagtgaaaggacgagccattt

SEQ ID NO: 49107 - DNA, 120 bp, Artificial Sequence
  ENSG00000066135_29 (sequence is synthesized)
ctgggcacgtggcagcagtcgctgatctcccagctgaggggctgagcactggaatgctgtggctgcactggccccagtccatagaggggtcaactatgctggctggactggctgccttgt

SEQ ID NO: 49108 - DNA, 120 bp, Artificial Sequence
  ENSG00000066135_30 (sequence is synthesized)
tcctggcctaggacttagcttcataactatcacctgcaccgactaggctgaggtgctggtacttgccccaacccctacttttgtatttatatgtgtgtgtgtgtgtgcgtgcgtgcgtgc

SEQ ID NO: 49109 - DNA, 120 bp, Artificial Sequence
  ENSG00000066135_31 (sequence is synthesized)
gtgcgtgtatgtttggtctggaccagcttctgccagcccctggcctttactttcttccttgcctatgcagggcaaacaaaatgtgaaattctgccctcagctgagctgagtaagggctcc

SEQ ID NO: 49110 - DNA, 120 bp, Artificial Sequence
  ENSG00000066135_32 (sequence is synthesized)
tgggggttggctggagatgggtgtggcatctgtccaggcctggaaccgtctcaagacagtgctggcaaagctgcagtattgagatgctaaggagctgatgccacctctttgtcttcccct

SEQ ID NO: 49111 - DNA, 120 bp, Artificial Sequence
  ENSG00000066135_33 (sequence is synthesized)
aaaggagaacatggggataacatgggtgtgtgcccacaacactctaggtgcagagcccctgtggcaaagtattacagggtgtgggtggggattaccctgaatcggggattttaatgatgg

SEQ ID NO: 49112 - DNA, 120 bp, Artificial Sequence
  ENSG00000066135_34 (sequence is synthesized)
aagcaggcagagcctggtgggtgattctgtcaacagaaaattgcaatcatgcaggggctgggagggttaggatgaaaaaactggggccattggaggcccactgtaggtgggagggagctg

SEQ ID NO: 49113 - DNA, 120 bp, Artificial Sequence
  ENSG00000066135_35 (sequence is synthesized)
attttggggtggggggtgggactagagggcaatactgaaggggttaaacaggtttttgctcctcaagaatttgtttgcctgggcccaggattggagggcttcacaccaataccctgtgta

SEQ ID NO: 49114 - DNA, 120 bp, Artificial Sequence
  ENSG00000066135_36 (sequence is synthesized)
tacaagaatcagatttataatacttccccttttttgttacgtatgaacactataaaccaaattattttgaaaactggtgcatcaccttgtccttagcaataaaatgtgttgagcagagga

SEQ ID NO: 49115 - DNA, 120 bp, Artificial Sequence
  ENSG00000066135_37 (sequence is synthesized)
atcccagttgcctcttaccttgctcccttttctcagttgtcccctaggggcctttgtatgatgctgctgtgagaaactgaatttgagtcattacaggtaacttcaattagcagctccggg

SEQ ID NO: 49116 - DNA, 120 bp, Artificial Sequence
  ENSG00000066135_38 (sequence is synthesized)
ataatggctgtgcacccgggagctgtagccatagtcagatcggtaagagagccagctttctgctgatagagcaggtggaaagctaagagcataggcacgtgctcactgaggtgtacactt

SEQ ID NO: 49117 - DNA, 120 bp, Artificial Sequence
  ENSG00000066135_39 (sequence is synthesized)
tagccaagtctcatccagcactctagtagcaatttggcttcccatgtggactttcttcaaggggagagaatgcactggccagccaacatgagtattctggtccttgtaatttgaaattgg

SEQ ID NO: 49118 - DNA, 120 bp, Artificial Sequence
  ENSG00000066135_40 (sequence is synthesized)
tcattgcagaatcttagaattggtgcggagctataaggatcctcagaggtcacattggtgatgcatcctctttatcattccgatgagaagcacaggtgtgaagtgactccaggattgcgg

SEQ ID NO: 49119 - DNA, 120 bp, Artificial Sequence
  ENSG00000066135_41 (sequence is synthesized)
cgaacctgtgcgcggtgaggttcggggacggtggggagcagggtgcgctgcctttggagtgatgctcgcgggagcggctgcgagggaagggtgcgggagtccgagggggttgttagcaac

SEQ ID NO: 49120 - DNA, 120 bp, Artificial Sequence
  ENSG00000066136_0 (sequence is synthesized)
gggataggagtgacttaaattctcccagtcggtggaggtataaataactacatgtaaaattaatgcagttcccgttgtcgagatgtccacagaaggaggatttggtggtactagcagcag

SEQ ID NO: 49121 - DNA, 120 bp, Artificial Sequence
  ENSG00000066136_1 (sequence is synthesized)
tgatgcccagcaaagcctacagtcgttctggcctcgggtcatggaagaaatccggaatttaacagtgaaagacttccgagtgcaggaactcccactggctcgtattaagaagattatgaa

SEQ ID NO: 49122 - DNA, 120 bp, Artificial Sequence
  ENSG00000066136_2 (sequence is synthesized)
actggatgaagatgtgaagatgatcagtgcagaagcgcctgtactctttgccaaggcagcccagatttttatcacagagttgactcttcgagcctggattcacacagaagataacaagcg

SEQ ID NO: 49123 - DNA, 120 bp, Artificial Sequence
  ENSG00000066136_3 (sequence is synthesized)
ccggactctacagagaaatgatatcgccatggcaattacaaaatttgatcagtttgattttctcatcgatattgttccaagagatgaactgaaacctccaaagcgtcaggaggaggtgcg

SEQ ID NO: 49124 - DNA, 120 bp, Artificial Sequence
  ENSG00000066136_4 (sequence is synthesized)
ccagtctgtaactcctgccgagccagtccagtactatttcacgctggctcagcaacccaccgctgtccaagtccagggccagcagcaaggccagcagaccaccagctccacgaccaccat

SEQ ID NO: 49125 - DNA, 120 bp, Artificial Sequence
  ENSG00000066136_5 (sequence is synthesized)
agcctgggcagatcatcatcgcacagcctcagcagggccagaccacacctgtgacaatgcaggttggagaaggtcagcaggtgcagattgtccaggctcagccacagggtcaagcccaac

SEQ ID NO: 49126 - DNA, 120 bp, Artificial Sequence
  ENSG00000066136_6 (sequence is synthesized)
aggcccagagtggcactggacagaccatgcaggtgatgcagcagatcatcactaacacaggagagatccagcagatcccggtgcagctgaatgccggccagctgcagtatatccgcttag

SEQ ID NO: 49127 - DNA, 120 bp, Artificial Sequence
  ENSG00000066136_7 (sequence is synthesized)
cccagcctgtatcaggcactcaagttgtgcagggacagatccagacacttgccaccaatgctcaacagattacacagacagaggtccagcaaggacagcagcagttcagccagttcacag

SEQ ID NO: 49128 - DNA, 120 bp, Artificial Sequence
  ENSG00000066136_8 (sequence is synthesized)
atggacagcagctctaccagatccagcaagtcaccatgcctgcgggccaggacctcgcccagcccatgttcatccagtcagccaaccagccctccgacgggcaggccccccaggtgaccg

SEQ ID NO: 49129 - DNA, 120 bp, Artificial Sequence
  ENSG00000066136_9 (sequence is synthesized)
gcgactgagggcctgagctggcaaggccaaggacacccaacacaatttttgccatacagccccaggcaatgggcacagccttcctccccagaggacccggccgacctcagcgcctcctgc

SEQ ID NO: 49130 - DNA, 120 bp, Artificial Sequence
  ENSG00000066136_10 (sequence is synthesized)
ctcctgctcttcctggactcctgagcagagacgaggtctcgctctgttgccaaggctggtgtgccaggctggagtgccgtggcatgatcatgactcactgcagcctccacctcctgggct

SEQ ID NO: 49131 - DNA, 120 bp, Artificial Sequence
  ENSG00000066136_11 (sequence is synthesized)
agattctccagcagaaagatgcaatattttttgtttcctttttttccatttttttctctaaggaatcaatatttcaatatgttgagtgtgtgtccaatgctatgaaattaaaatattaaa

SEQ ID NO: 49132 - DNA, 120 bp, Artificial Sequence
  ENSG00000066136_12 (sequence is synthesized)
ttaatacattttcagttccaaaaaaatttgataacttctgttttgtacctaacttccactactacagtatgtggctctgagccagccaaagattcatgatctgttgactacacagatgtt

SEQ ID NO: 49133 - DNA, 120 bp, Artificial Sequence
  ENSG00000066136_13 (sequence is synthesized)
tgcgggctgatcatgcctgcacatctgtagttgggacagttcaaaatttaaaagcagactgcacagatggttctagacgtgctttttgaattgtgtacctttgtaatgttttggggggat

SEQ ID NO: 49134 - DNA, 120 bp, Artificial Sequence
  ENSG00000066136_14 (sequence is synthesized)
atcagaggacagccagaatttgttaccagacttttaaatcgtacaggtctttgtactccaactaaacctacccatccattagcaagtgtacagagatatcgtcctggcaattgtgcatct

SEQ ID NO: 49135 - DNA, 120 bp, Artificial Sequence
  ENSG00000066136_15 (sequence is synthesized)
ttctcctttgaccttagcagtttgcatggcagattgtgccaagatgaggcctgtccagggacccatgcaataaaagttgtcgagatgtccacagaaggaggatttggtggtactagcagc

SEQ ID NO: 49136 - DNA, 120 bp, Artificial Sequence
  ENSG00000066136_16 (sequence is synthesized)
cggcgtggccgccatcttgcttgtgcccccgcttcgcgcgcgctccgttctccgtgacgcacacttccccctcccctccgccgcgcctgggcctctgcattgcccgactccgtaggagcg

SEQ ID NO: 49137 - DNA, 120 bp, Artificial Sequence
  ENSG00000066136_17 (sequence is synthesized)
ttgaagagtgtggttgaagaaatatttctccttttgtttttcttttttttttgtttgttactgccacttctttttaggagcaaatctccccaggggtgtacggtatttcttgactctggg

SEQ ID NO: 49138 - DNA, 120 bp, Artificial Sequence
  ENSG00000066136_18 (sequence is synthesized)
aacagctgctacccccaagacttgccacgttgttctgccctcagatggaattaggtgaatgtgtgtagctgctttttcactcgtggtcctctccccatcccttgctctgaccccagagct

SEQ ID NO: 49139 - DNA, 120 bp, Artificial Sequence
  ENSG00000066136_19 (sequence is synthesized)
ctgtgtatttgcatccagaggccatggaaacattctttgcatttaagagacagatttattccctgtggagagtgggtggattcattgccacactcttttctcccagggacccaggaaact

SEQ ID NO: 49140 - DNA, 120 bp, Artificial Sequence
  ENSG00000066136_20 (sequence is synthesized)
aggactttgtgtgtttgctgcccacctcccttttattttttaaatgcattaaaaactgtgctagtctcctttgcatggacttcaagctgcatgaaatgcaataaatctcattttagataa

SEQ ID NO: 49141 - DNA, 120 bp, Artificial Sequence
  ENSG00000066136_21 (sequence is synthesized)
agtccagcttttgcctccaaaatgtgcagcatggggcagggcagtgtgagggctatgatgcggaatgatggctgtttgctttgggatcctggcagatgctggatctctttacagatggga

SEQ ID NO: 49142 - DNA, 120 bp, Artificial Sequence
  ENSG00000066136_22 (sequence is synthesized)
cagggcttcattggagcctcggagtttttcactgaggcaggggtcagctgaaagacaaagaaaaatggcgaatagtttgttggggggtgggaggacagctgttcgggttttcagtggagt

SEQ ID NO: 49143 - DNA, 120 bp, Artificial Sequence
  ENSG00000066136_23 (sequence is synthesized)
gcgtgcagcaagctcgagtctctgagctaacgggagaggcagagcccagagaagtgaaagccacaggaaattcaactccctgcacctcttccctgcccaccacacaccccccctcacacc

SEQ ID NO: 49144 - DNA, 120 bp, Artificial Sequence
  ENSG00000066136_24 (sequence is synthesized)
gggctggtgcctcctgtgtctgctgctcccaaccccagcagagctccacttcccctcctccttctgacgccttgcagtgggtggtggttgaggtatctgggacccccaaccagctcgaga

SEQ ID NO: 49145 - DNA, 120 bp, Artificial Sequence
  ENSG00000066136_25 (sequence is synthesized)
gtgctcttgcctggcccgctgctgtcgccgccgccgcgctcgtggggtccgtgtgcctcgtcggcccggcccgcgggctttctcccattggcggaaggcgacggcgggggggctcgctcg

SEQ ID NO: 49146 - DNA, 120 bp, Artificial Sequence
  ENSG00000066136_26 (sequence is synthesized)
ctcgtgattggtcggtggcggggaggccgcggacctggcaccttattggacgcgccagctccggtctaggggacacgggcttccaccatgttagccaggctggtcttcaactcctgacct

SEQ ID NO: 49147 - DNA, 120 bp, Artificial Sequence
  ENSG00000066136_27 (sequence is synthesized)
tataggcgtgagccaccgtgcccagccaggctatgctgggtgtctttttgagatttaggaacctctcagaataaaatctggaagcctgttccatttgcattatgagatttgcattacaat

SEQ ID NO: 49148 - DNA, 120 bp, Artificial Sequence
  ENSG00000066136_28 (sequence is synthesized)
cctgttccatttgcattatgagatttgcattacaatgcaggctgaagtgcagtagtgcaatcatggctcattgcagtctcccagctcctcggctcaagtgatcctcctgccccagcctcc

SEQ ID NO: 49149 - DNA, 120 bp, Artificial Sequence
  ENSG00000066136_29 (sequence is synthesized)
tgagtagcgggagctacagacacacaaacacaggatactgccagaaactgggcaagaggctgtttgtgaatctcagaaggcacccggatcttgctctgctgttcctgctcaggctggagt

SEQ ID NO: 49150 - DNA, 120 bp, Artificial Sequence
  ENSG00000066136_30 (sequence is synthesized)
gttgtctttgttccactcccggtccctccccttttctcctcccctcctttggcccagagggctgcacagtgcctctctcggaaaaagtacttcataggtttgccatgaggactgctggga

SEQ ID NO: 49151 - DNA, 120 bp, Artificial Sequence
  ENSG00000066136_31 (sequence is synthesized)
ccaaggccacttgctcgccagggtgtttcatattccagtcagatgatctgggtgatacgggtttggtttggagcccaccttccaagaatgaaagaggccacttaccactttgtctgacac

SEQ ID NO: 49152 - DNA, 120 bp, Artificial Sequence
  ENSG00000066136_32 (sequence is synthesized)
tttgcagtccgccttcactggctgaaagactgactcttaggacttctaccccaaaccatagcacctagggtccatgtgttctgtttgagcctcagagtttgagatgagtgggtggttgag

SEQ ID NO: 49153 - DNA, 120 bp, Artificial Sequence
  ENSG00000066136_33 (sequence is synthesized)
ggagtaggcattcattagagagatgggtgtgggaactatctattatgtgctccaggattctcgatgtcactttgtgctgccaactcttgacgtagccatcagtgctagattaggaggggt

SEQ ID NO: 49154 - DNA, 120 bp, Artificial Sequence
  ENSG00000066136_34 (sequence is synthesized)
gcttgcttgcttactacccattgagcacctgctgggcactttatatgcattgtctcatttgatctttatgaccctcttttgggtggtgggctggtggatcagaccctgcagctgacatac

SEQ ID NO: 49155 - DNA, 120 bp, Artificial Sequence
  ENSG00000066136_35 (sequence is synthesized)
caactctaccatcttgattcttacagattacacagacagaggtccagcaaggacagcagcagttcagccagttcacagatggacagattaccaagagttggggaaatgctgacttccaag

SEQ ID NO: 49156 - DNA, 120 bp, Artificial Sequence
  ENSG00000066136_36 (sequence is synthesized)
agcataactggtctctttgaattccactttcctttggcttcaaatgtggagagctcagcattcagcaggcaactgcacatagcctgtttgggggaagagtggaaattcactgtggcggct

SEQ ID NO: 49157 - DNA, 120 bp, Artificial Sequence
  ENSG00000066136_37 (sequence is synthesized)
cagatcatcactaacacaggagagatccagcagatcccgctgaatgccggccagctgcagtatatccgcttagcccagcctgtatcaggcactcaagttgtgcagggacagatccagaca

SEQ ID NO: 49158 - DNA, 120 bp, Artificial Sequence
  ENSG00000066136_38 (sequence is synthesized)
ctttttctcttttttcctggtgagaagaacttgtgtccttcaaaagaagattacctttgtctttcgaagtcaggaatttataaaaagagtttgctggatggaaaaatcataaaggccata

SEQ ID NO: 49159 - DNA, 120 bp, Artificial Sequence
  ENSG00000066136_39 (sequence is synthesized)
gaaaggagcgctcagcacacagctgtcttgccacctcatccttcaaccagaagcaccacccccacaccctccatatccttctgcacccaagaggcatgggtggtaattggaacattagat

SEQ ID NO: 49160 - DNA, 120 bp, Artificial Sequence
  ENSG00000066136_40 (sequence is synthesized)
tcaaagtgttttctcttaccatcttgttctcaaggggcaaagaaatgcaagtcaggggaagcctcgaaggtgcctgaaagaaaccttacaggtgtgcacacccatcagacctgggaaatg

SEQ ID NO: 49161 - DNA, 120 bp, Artificial Sequence
  ENSG00000066136_41 (sequence is synthesized)
ttcgacagatcgcctgatcgtcaggctgtttccatctttaaacccaagtggctgttgtgttctggcacctcctgtgctctttggaaagcttacttagattttacccctacctcctcttgc

SEQ ID NO: 49162 - DNA, 120 bp, Artificial Sequence
  ENSG00000066136_42 (sequence is synthesized)
atccctaaccagaaaaattgcccttctcctctcctctcgtgccctacaatattgatggctatgagtcacagatggtgagggggctgcctccctgggcttgggggtgttgagggacatggg

SEQ ID NO: 49163 - DNA, 120 bp, Artificial Sequence
  ENSG00000066136_43 (sequence is synthesized)
acagtgccccttaggtttttggatgggcagagcttgatgagggcagagaggcagccagatcattatagagcactggatttaaagtctggaaactggaacttttccccagattcagctact

SEQ ID NO: 49164 - DNA, 120 bp, Artificial Sequence
  ENSG00000066136_44 (sequence is synthesized)
ttgtcgagatgtccacagaaggaggatttggtggtactagcagcagtgatgcccagcaaagcctacagtcgttctggcctcgggtcatggaagaaatccggaatttaacagtgatgatca

SEQ ID NO: 49165 - DNA, 120 bp, Artificial Sequence
  ENSG00000066136_45 (sequence is synthesized)
accatgcaggtgatgcagcagatcatcactaacacaggagagatccagcagatcccggagacaggtcttgctgtgtcactcagactgatgaagtgcagtggcttgatctcagctcactgc

SEQ ID NO: 49166 - DNA, 87 bp, Artificial Sequence
  ENSG00000066136_46 (sequence is synthesized)
gctgaatgccggccagctgcagtatatccgcttagcccagcctgtatcaggcactcaagttgtgcagggacagatccagacacttgc

SEQ ID NO: 49167 - DNA, 120 bp, Artificial Sequence
  ENSG00000066136_47 (sequence is synthesized)
cactcaagttgtgcagggacagatccagacacttgccaccaatgctcaacaggggcaaagaaatgcaagtcaggggaagcctcgaaggtgcctgaaagaaaccttacagattacacagac

SEQ ID NO: 49168 - DNA, 120 bp, Artificial Sequence
  ENSG00000066185_0 (sequence is synthesized)
agagaccagcactgctggctgcaccatgaatgtgatctacccactggcagtccccaaggggcgcagactctgctgtgaggtgtgcgaagccccagccgagcgggtgtgcgcggcctgcac

SEQ ID NO: 49169 - DNA, 120 bp, Artificial Sequence
  ENSG00000066185_1 (sequence is synthesized)
agtcacttattactgtggggtggtacatcagaaggctgactgggacagcatccatgagaaaatatgtcagctcttgattccactgcgcacttccatgcccttctacaattcagaggaaga

SEQ ID NO: 49170 - DNA, 120 bp, Artificial Sequence
  ENSG00000066185_2 (sequence is synthesized)
acggcagcatggcctgcagcagctgcagcagcggcagaagtatttgattgaattctgctacaccatagcccagaaatacctctttgaagggaaacacgaagatgctgtaccagcagcttt

SEQ ID NO: 49171 - DNA, 120 bp, Artificial Sequence
  ENSG00000066185_3 (sequence is synthesized)
gcagtcccttcgcttccgtgtgaagctgtatggcctgagctccgtagagcttgtgcctgcttacctgctgttggccgaggccagccttggtctgggccgaatcgttcaggctgaagaata

SEQ ID NO: 49172 - DNA, 120 bp, Artificial Sequence
  ENSG00000066185_4 (sequence is synthesized)
tctattccaagcccagtggacagtcctcaaatcaactgactgtagtaatgccacccactctttactgcatcggaatctgggacttctctatatagctaagaaaaactatgaagaggcccg

SEQ ID NO: 49173 - DNA, 120 bp, Artificial Sequence
  ENSG00000066185_5 (sequence is synthesized)
ttatcatctggccaatgatatttattttgccagttgtgcatttggaacagaggacattaggacttcaggaggctacttccacctggctaatatattctatgaccttaaaaagttggacct

SEQ ID NO: 49174 - DNA, 120 bp, Artificial Sequence
  ENSG00000066185_6 (sequence is synthesized)
aatggatttactgggcaaactatttgagaatgacactggcttggatgaagcccaagaagcagaagccattcgcatcctgacttcaatcttgaacattcgagaatctacatctgacaaagc

SEQ ID NO: 49175 - DNA, 120 bp, Artificial Sequence
  ENSG00000066185_7 (sequence is synthesized)
cccccaaaaaaccatctttgttctgaagatcctggtcatgttttactacctgatgatgaattcttcaaaggcacaggaatatggcatgagggccctcagtctagccaaagaacaacagct

SEQ ID NO: 49176 - DNA, 120 bp, Artificial Sequence
  ENSG00000066185_8 (sequence is synthesized)
tgatgtccatgagcaaagcaccattcaagagttattaagtctcatttcaactgaagaccatcccattacttagtgacccatgagctctgcatcaagggttattccaggggctactgaaga

SEQ ID NO: 49177 - DNA, 120 bp, Artificial Sequence
  ENSG00000066185_9 (sequence is synthesized)
tctaatatattccagccttgcacaactgctttgaggtactgtagactgctgaagtttccaccctcttcccctgggattgcacacatagctgttatttttttcttacacagcatattaagg

SEQ ID NO: 49178 - DNA, 120 bp, Artificial Sequence
  ENSG00000066185_10 (sequence is synthesized)
gaatataaagctttaggcatagaaatcactaaaaactgtgtttgtcatgacctttgtacttgatttatcatgactttgtatgactgagtaatatgtagtcagatcactaatatggtattt

SEQ ID NO: 49179 - DNA, 120 bp, Artificial Sequence
  ENSG00000066185_11 (sequence is synthesized)
gtaattaaactacaaatagtttgtcatttcccagaagtcttccaacgatgcatgtttcatacacttttgctaaaggaggggtaaaggagggggtagggaataaagctatattggaacaaa

SEQ ID NO: 49180 - DNA, 120 bp, Artificial Sequence
  ENSG00000066185_12 (sequence is synthesized)
tctggacttggactccttgggagtcgtttctcggccatttgacccgtgggacttgtgggttttgtgctgctttttctttctttcttccccttttccaacttcagcaatacacccagatgt

SEQ ID NO: 49181 - DNA, 120 bp, Artificial Sequence
  ENSG00000066185_13 (sequence is synthesized)
tctgcctccaggcacagtaagagagagaacctccaggttgtccagaagcccggccaaatgcgctactctcctcacctgcctggtccgacggctgaggtctggcctgcttgttgtattacc

SEQ ID NO: 49182 - DNA, 120 bp, Artificial Sequence
  ENSG00000066185_14 (sequence is synthesized)
aattcaactagttgaactcaaaatttgtgttttgcccaattccaatagcttttgccctcagagcaagccctcactccaaagaggttcagatgctcacgatgtttctcctgtgttgagtct

SEQ ID NO: 49183 - DNA, 120 bp, Artificial Sequence
  ENSG00000066185_15 (sequence is synthesized)
agcctgcataatggaaattggattgtcttcttcccccgagggttcccagtcttgcatagataaagagagtctgaggcagtgctgggaagcctgcagggcaggaaggctctggggagcctt

SEQ ID NO: 49184 - DNA, 80 bp, Artificial Sequence
  ENSG00000066230_0 (sequence is synthesized)
ggactgtagccggtaccggcaccggagcgcgccgggtcctcgccgggtcccagccccgcgcgtcggcccagcccagccgg

SEQ ID NO: 49185 - DNA, 80 bp, Artificial Sequence
  ENSG00000066230_1 (sequence is synthesized)
ctgcgctgagcaggcggcaatgtggggactcggggcccggggccccgaccgggggctgctgctggcgctggcgctgggcg

SEQ ID NO: 49186 - DNA, 120 bp, Artificial Sequence
  ENSG00000066230_2 (sequence is synthesized)
gagcgggggcttccaggtggtcaccttcgagtgggcccacgtgcaggatccctacgtcatcgcgctctggatcctcgtggccagcttggccaagatcgggttccacctgtcccacaaggt

SEQ ID NO: 49187 - DNA, 120 bp, Artificial Sequence
  ENSG00000066230_3 (sequence is synthesized)
caccagcgtggttcccgagagcgccctgctcatcgtgctgggcctggtgctgggcggcatcgtctgggcggccgaccacatcgcgtccttcacactgacgcccaccgtcttcttcttcta

SEQ ID NO: 49188 - DNA, 120 bp, Artificial Sequence
  ENSG00000066230_4 (sequence is synthesized)
cctgctgccccccatcgtgctggacgccggctacttcatgcccaaccgcctcttcttcggcaacctggggaccatcctgttgtacgccgtcgtgggtaccgtgtggaacgcggccaccac

SEQ ID NO: 49189 - DNA, 120 bp, Artificial Sequence
  ENSG00000066230_5 (sequence is synthesized)
cgggctgtccctctacggcgtcttcctcagtgggctcatgggcgacctgcagattgggctgctggacttcctcctgtttggcagcctcatggcggctgtggacccggtggccgtcctggc

SEQ ID NO: 49190 - DNA, 120 bp, Artificial Sequence
  ENSG00000066230_6 (sequence is synthesized)
cgtgtttgaggaggtccatgtcaacgaggtcctgttcatcatcgtcttcggggagtcgctgctgaacgacgcagtcaccgtggttctgtacaatgtgtttgaatctttcgtggcgctggg

SEQ ID NO: 49191 - DNA, 120 bp, Artificial Sequence
  ENSG00000066230_7 (sequence is synthesized)
aggtgacaacgtgactggcgtggactgcgtgaagggcatagtgtccttcttcgtggtgagcctggggggcacgctggtgggggtggtcttcgccttcctgctgtcgctggtgacgcgctt

SEQ ID NO: 49192 - DNA, 120 bp, Artificial Sequence
  ENSG00000066230_8 (sequence is synthesized)
caccaagcatgtgcgtatcatcgagcccggcttcgtgttcatcatctcctacctgtcctacctgacgtccgagatgctgtcgctgtcggccatcctcgccatcaccttctgtggcatctg

SEQ ID NO: 49193 - DNA, 120 bp, Artificial Sequence
  ENSG00000066230_9 (sequence is synthesized)
ctgtcagaagtatgtgaaggccaacatctcggagcagtcggccaccaccgtgcgctacaccatgaagatgctggccagcagcgccgagaccatcatcttcatgttcctgggtatctcggc

SEQ ID NO: 49194 - DNA, 120 bp, Artificial Sequence
  ENSG00000066230_10 (sequence is synthesized)
cgtgaacccgttcatctggacctggaacacggccttcgtgctcctgacgctggtcttcatctccgtgtaccgggccatcggtgtggtcctgcagacctggcttctgaaccgctaccgcat

SEQ ID NO: 49195 - DNA, 120 bp, Artificial Sequence
  ENSG00000066230_11 (sequence is synthesized)
ggtgcagctggagcccattgaccaggtggtcctgtcctacgggggcctgcgcggggccgtggcctttgccctggtggtgcttctggatggagacaaggtcaaggagaagaacctgttcgt

SEQ ID NO: 49196 - DNA, 120 bp, Artificial Sequence
  ENSG00000066230_12 (sequence is synthesized)
cagcaccaccatcatcgtagtgttcttcaccgtcatcttccagggcctgaccatcaagcctctggtgcagtggctgaaggtgaagaggagcgagcaccgggaacctcggctcaacgagaa

SEQ ID NO: 49197 - DNA, 120 bp, Artificial Sequence
  ENSG00000066230_13 (sequence is synthesized)
gctgcacgggcgcgctttcgaccacatcctctcggccatcgaggacatatccggacagatcgggcacaattatctcagagacaagtggtcccacttcgacaggaagttcctcagcagggt

SEQ ID NO: 49198 - DNA, 120 bp, Artificial Sequence
  ENSG00000066230_14 (sequence is synthesized)
cctcatgagacggtcggcccagaagtctcgagaccggatcctgaatgtcttccacgagctgaacctgaaggatgccatcagctacgtggctgagggagagcgccgcgggtccctggcctt

SEQ ID NO: 49199 - DNA, 120 bp, Artificial Sequence
  ENSG00000066230_15 (sequence is synthesized)
catccgctcccccagcaccgacaacgtggtcaacgtggacttcacgccacgatcgtccaccgtggaggcctctgtctcctacctcctgagagaaaatgtcagcgctgtctgcctggacat

SEQ ID NO: 49200 - DNA, 120 bp, Artificial Sequence
  ENSG00000066230_16 (sequence is synthesized)
gcagtctctggagcagcgacggcggagcatccgggacgcggaggacatggtcacgcaccacacgctacagcagtacctgtacaagccgcggcaggagtacaagcatctgtacagccgaca

SEQ ID NO: 49201 - DNA, 120 bp, Artificial Sequence
  ENSG00000066230_17 (sequence is synthesized)
cgagctcacgcccacggaggacgagaaacaggaccgggaaatcttccacaggaccatgcggaagcgcctggagtccttcaagtcgaccaagctggggctcaaccagaacaagaaggcggc

SEQ ID NO: 49202 - DNA, 120 bp, Artificial Sequence
  ENSG00000066230_18 (sequence is synthesized)
caagctgtacaagcgggagcgtgcccagaagcggagaaacagcagcatccccaatgggaagctgcccatggagagccctgcgcagaatttcaccatcaaggagaaagacttggaactttc

SEQ ID NO: 49203 - DNA, 120 bp, Artificial Sequence
  ENSG00000066230_19 (sequence is synthesized)
agacaccgaggagccccccaactatgatgaggagatgagtggggggatcgagttcctggctagtgtcaccaaggacacagcgtccgactcccctgcaggaattgacaaccctgtgttttc

SEQ ID NO: 49204 - DNA, 120 bp, Artificial Sequence
  ENSG00000066230_20 (sequence is synthesized)
tccggacgaggccctggaccgcagcctcctggccaggctgccgccctggctgtctcccggggagacggtggtcccctcgcagagggcccgcacgcagattccctactctcccggcacctt

SEQ ID NO: 49205 - DNA, 120 bp, Artificial Sequence
  ENSG00000066230_21 (sequence is synthesized)
ctgccgcctgatgcccttccgcctcagcagcaagtccgtggactccttcctgcaggcagacggccccgaggagcggccccccgccgccctccccgagtccacacacatgtgacaccggct

SEQ ID NO: 49206 - DNA, 120 bp, Artificial Sequence
  ENSG00000066230_22 (sequence is synthesized)
ccgacacgccgctaaccggccgctcgtccccgcgccacggtccgcccaccgccgccgccgctgtcccagagaaaccccagatccccgcgcggctacagcgaccgcgagccccgagccccg

SEQ ID NO: 49207 - DNA, 80 bp, Artificial Sequence
  ENSG00000066230_23 (sequence is synthesized)
ccagcgcctgcgcagaactccgagagtgccgcgcctgcgcccgcagagccgcccgagggcgagccgggggcggggcctgc

SEQ ID NO: 49208 - DNA, 120 bp, Artificial Sequence
  ENSG00000066230_24 (sequence is synthesized)
gctcgttccagcggcctcgcgcgcgccgccgccccgcgctgctgaagctggcgtcgctgccgccctcgtgccacgcaccgccgcacgcgctggagcaggaggagacgccgctgtgacgcc

SEQ ID NO: 49209 - DNA, 120 bp, Artificial Sequence
  ENSG00000066230_25 (sequence is synthesized)
acgccgctgtgacgccgccggcgggaagggtccgcgcgccatggctggccgctcgcgccctttcccaccgctgccgggaaaccgaggctcgccccaaacggatttgcgtgaaaccagccc

SEQ ID NO: 49210 - DNA, 120 bp, Artificial Sequence
  ENSG00000066230_26 (sequence is synthesized)
aaggttccgggcccccccaaccgagccccgcgcccggggactgactcggggaccgactcagggacctcccgagcgccaggactcagggcccgacctgcagcggctgcaggcccagcgccc

SEQ ID NO: 49211 - DNA, 120 bp, Artificial Sequence
  ENSG00000066230_27 (sequence is synthesized)
gcaagcggcctgggccgagcgccgtttccaggccctcgccaggtctttgaactgcaggtaaagtggcaggaacgtcttccgtctgctcagcgtttggggatttagactcctaaagccagt

SEQ ID NO: 49212 - DNA, 120 bp, Artificial Sequence
  ENSG00000066230_28 (sequence is synthesized)
acctgccccgtttcccccccaggttccgtcctgcccgcgcccggtctcagggtggcggccccggacacggcccgtccccacagacgaggtctccggcctgagctgtcgcacctggcgcgg

SEQ ID NO: 49213 - DNA, 120 bp, Artificial Sequence
  ENSG00000066230_29 (sequence is synthesized)
aggtcgcccggggtgccctggctgggtgagaggtggcctggcgggcggagcttgccaagaatcacggccagtccttaagtggatggtggggcccagcagctgctctgtcccccttaacaa

SEQ ID NO: 49214 - DNA, 120 bp, Artificial Sequence
  ENSG00000066230_30 (sequence is synthesized)
accagggggcatggaggggcccagggcaccgcccccctaccaggctcaggccctccaaggagaacctgctgagacccctgagcctgtcctagaccccggacccctgacccttcccacccc

SEQ ID NO: 49215 - DNA, 120 bp, Artificial Sequence
  ENSG00000066230_31 (sequence is synthesized)
ttccagcgtcccagggcgaggccttggacagagctcctggtcctctgcagggagaccatccagcccaagctctgggaggcacagtccattgagtgggcggaggccgcgggtgctgagccg

SEQ ID NO: 49216 - DNA, 120 bp, Artificial Sequence
  ENSG00000066230_32 (sequence is synthesized)
gggagggtgctcggagtccatccatccctcagacggcaagtcccacagggtccaacccacctgaaacctgcctgcacggtggaagtggtggaggtggacactcctaggggcttttctaaa

SEQ ID NO: 49217 - DNA, 120 bp, Artificial Sequence
  ENSG00000066230_33 (sequence is synthesized)
gctagactcgcagctccttgctcaggaaaattaaactattcacgtttcagatcaagtgttgacagtcaccagtcaggaggagttcttaaagagttttatgttgactgaatattgcacatt

SEQ ID NO: 49218 - DNA, 120 bp, Artificial Sequence
  ENSG00000066230_34 (sequence is synthesized)
gagtccccattgagtccctggtgggaaaagtccacaatttcccattgatagctttttactgttgtgaaaaagggaagcgtcagccacacaaaagcctgcatgaccgctgcttcggagaag

SEQ ID NO: 49219 - DNA, 120 bp, Artificial Sequence
  ENSG00000066230_35 (sequence is synthesized)
ctctcgaccctaactgcagtcactgttacttggatcagatcaagcgcagtgactttttgggattcagtggttattctccacacttcgtagccatttcaaccaactctgagcacaaaatgc

SEQ ID NO: 49220 - DNA, 120 bp, Artificial Sequence
  ENSG00000066230_36 (sequence is synthesized)
agccatcctctatgcagcaagccctgcccagtcagtgaccctactggacagatccaaggccagccctggttccctgctgcagccaccgtcctgacgttcatcggagcaggccggggcctg

SEQ ID NO: 49221 - DNA, 120 bp, Artificial Sequence
  ENSG00000066230_37 (sequence is synthesized)
gccttcccggcacaagtggctgttctgacaggcccccagtttgtcccatctgaactgctgggaggtttccgggtggccagaggagcaaagctgccttccaagtgcctgtctgtgcctggg

SEQ ID NO: 49222 - DNA, 120 bp, Artificial Sequence
  ENSG00000066230_38 (sequence is synthesized)
agaacagagcaggagcgtcgtgcggtccaccgcgcaatgcatggcgattccaggcgctgaacaactcccctggacccttgggcctgcatctgactcccagctgcagagtcagaagctgag

SEQ ID NO: 49223 - DNA, 120 bp, Artificial Sequence
  ENSG00000066230_39 (sequence is synthesized)
tccaggcaactgcttggccactcccgatcgctcctccctggacacccggttaccaaagtcagcaaagaagatgcggtaatcgccgcctgatctccacatggtgaacacaacactcccacc

SEQ ID NO: 49224 - DNA, 120 bp, Artificial Sequence
  ENSG00000066230_40 (sequence is synthesized)
aacacctccttgactggtcggtcttcagcaccgggggtgggcaggcaggtgttctgtgttgacgagaattgcacaggctaaacacaaacacggaaccagagtgagaacacctcactcacg

SEQ ID NO: 49225 - DNA, 120 bp, Artificial Sequence
  ENSG00000066230_41 (sequence is synthesized)
gcagcccaggctgctccctaccaggtgacggagcgcgccggggctgtgggtgccaggggctgagtgctagggactcgtcatgagtggggatccccacgttcctgtcactgctgtcaaaca

SEQ ID NO: 49226 - DNA, 120 bp, Artificial Sequence
  ENSG00000066230_42 (sequence is synthesized)
gaaggtaaacagtcttatgaatgtatttccttaggaaaacttgtaaaaacttttattaggatatctatttaatactgaactttggcctactttgtgatagactataaacaaattgaggaa

SEQ ID NO: 49227 - DNA, 120 bp, Artificial Sequence
  ENSG00000066230_43 (sequence is synthesized)
atcactatttctcacttctgtattttctcaaaaataattttgttacagagttcaatatactgtgtaccattgatcttctattgtgaaagcaaagaatttcatcaaaatattttaaattat

SEQ ID NO: 49228 - DNA, 120 bp, Artificial Sequence
  ENSG00000066230_44 (sequence is synthesized)
gagtgaaaattgtgtatgttaattttgcagctataatattaatcaaatttcgtgtaattctaatcacaaaatgacgtgccttaagtgcccctccagctgtgggttggcagtgtccagaca

SEQ ID NO: 49229 - DNA, 120 bp, Artificial Sequence
  ENSG00000066230_45 (sequence is synthesized)
gggagggcccatcaccgaaatcctgaacgattactagaccaattctattaaaaacatttcaaggcattttgggtgcaaactttgtttataaaagagaaatatccacctatgagaatttaa

SEQ ID NO: 49230 - DNA, 120 bp, Artificial Sequence
  ENSG00000066230_46 (sequence is synthesized)
agaggcccctgcacccgcgtcccaaggccaggcccaccccagcagttcacgggaggctgatgggccttctgatgccctgggaatcccaggggctctcgtggggtaaactgagtcacagag

SEQ ID NO: 49231 - DNA, 80 bp, Artificial Sequence
  ENSG00000066248_0 (sequence is synthesized)
ggagtgctcggcagcggtggcggcggcggctgcagctccggtcgagccgcgcgcgctgcgaccccgctccgcagcccgct

SEQ ID NO: 49232 - DNA, 120 bp, Artificial Sequence
  ENSG00000066248_1 (sequence is synthesized)
gacccggcccccgcacccgccccgccgccgaccctatggagctgctggccgctgccttcagcgccgcctgcgccgtggaccacgacagttccacctcggaaagcgacgcgcgcgactcgg

SEQ ID NO: 49233 - DNA, 120 bp, Artificial Sequence
  ENSG00000066248_2 (sequence is synthesized)
cggcgggacacctgcccggcagtgagtcgtcctccaccccgggaaatggggccacgcccgaggagtggccggccctggccgacagccccaccacgctcaccgaggccctgcggatgatcc

SEQ ID NO: 49234 - DNA, 120 bp, Artificial Sequence
  ENSG00000066248_3 (sequence is synthesized)
accccattcccgccgactcctggagaaacctcattgaacaaatagggctcctgtatcaggaataccgagataaatcgactctccaagaaatcgaaaccaggaggcaacaggatgcagaaa

SEQ ID NO: 49235 - DNA, 120 bp, Artificial Sequence
  ENSG00000066248_4 (sequence is synthesized)
tagaagacaataccaatgggtccccggccagtgaggacaccccggaggaggaagaagaagaggaggaggaggaggagccggccagcccaccagagaggaagactctgccccagatctgcc

SEQ ID NO: 49236 - DNA, 120 bp, Artificial Sequence
  ENSG00000066248_5 (sequence is synthesized)
tgctcagtaacccccactcaaggttcaacctctggcaggatcttcccgagatccggagcagcggggtgcttgagatcctacagcccgaggagattaagctgcaggaggccatgttcgagc

SEQ ID NO: 49237 - DNA, 120 bp, Artificial Sequence
  ENSG00000066248_6 (sequence is synthesized)
tggtcacttccgaggcgtcctactacaagagtctgaacctgctcgtgtcccacttcatggagaacgagcggataaggaagatcctgcacccgtccgaggcgcacatcctcttctccaacg

SEQ ID NO: 49238 - DNA, 120 bp, Artificial Sequence
  ENSG00000066248_7 (sequence is synthesized)
tcctggacgtgctggctgtcagtgagcggttcctcctggagctggagcaccggatggaggagaacatcgtcatctctgacgtgtgtgacattgtgtaccgttatgcggccgaccacttct

SEQ ID NO: 49239 - DNA, 120 bp, Artificial Sequence
  ENSG00000066248_8 (sequence is synthesized)
ctgtctacatcacctacgtcagcaatcagacctaccaggagcggacctataagcagctgctccaggagaaggcagctttccgggagctgatcgcgcagctagagctcgaccccaagtgca

SEQ ID NO: 49240 - DNA, 120 bp, Artificial Sequence
  ENSG00000066248_9 (sequence is synthesized)
tgcccttctcctccttcctcatcctgcctttccagaggatcacacgcctcaagctgttggtccagaacatcctgaagagggtagaagagaggtctgagcgggagtgcactgctttggatg

SEQ ID NO: 49241 - DNA, 120 bp, Artificial Sequence
  ENSG00000066248_10 (sequence is synthesized)
ctcacaaggagctggaaatggtggtgaaggcatgcaacgagggcgtcaggaaaatgagccgcacggaacagatgatcagcattcagaagaagatggagttcaagatcaagtcggtgccca

SEQ ID NO: 49242 - DNA, 120 bp, Artificial Sequence
  ENSG00000066248_11 (sequence is synthesized)
tcatctcccactcccgctggctgctgaagcagggtgagctgcagcagatgtcaggccccaagacctcccggaccctgaggaccaagaagctcttccacgaaatttacctcttcctgttca

SEQ ID NO: 49243 - DNA, 120 bp, Artificial Sequence
  ENSG00000066248_12 (sequence is synthesized)
acgacctgctggtgatctgccggcagattccaggagacaagtaccaggtatttgactcagctccgcggggactgctgcgtgtggaggagctggaggaccagggccagacgctggccaacg

SEQ ID NO: 49244 - DNA, 120 bp, Artificial Sequence
  ENSG00000066248_13 (sequence is synthesized)
tgttcatcctgcggctgctggagaacgcagatgaccgggaggccacctacatgctaaaggcgtcctctcagagtgagatgaagcgttggatgacctcactggcccccaacaggaggacca

SEQ ID NO: 49245 - DNA, 120 bp, Artificial Sequence
  ENSG00000066248_14 (sequence is synthesized)
agtttgtttcgttcacatcccggctgctggactgcccccaggtccagtgcgtgcacccatacgtggctcagcagccagacgagctgacgctggagctcgccgacatcctcaacatcctgg

SEQ ID NO: 49246 - DNA, 120 bp, Artificial Sequence
  ENSG00000066248_15 (sequence is synthesized)
acaagactgacgacgggtggatctttggcgagcgtctgcacgaccaggagagaggctggttccccagctccatgactgaggagatcttgaatcccaagatccggtcccagaacctcaagg

SEQ ID NO: 49247 - DNA, 120 bp, Artificial Sequence
  ENSG00000066248_16 (sequence is synthesized)
aatgtttccgtgtccacaagatggatgaccctcagcgcagccagaacaaggaccgcaggaagctgggcagccggaatcggcaatgacccccacccagggggccagcgggagcagggcctg

SEQ ID NO: 49248 - DNA, 120 bp, Artificial Sequence
  ENSG00000066248_17 (sequence is synthesized)
catgagaccccgacagaaggtgggggggggggggctctgggaagcacaggccagcacctccccaggtggcaggatctggcttggggtgcccggccctcatccctgcccacgcagtgagtg

SEQ ID NO: 49249 - DNA, 120 bp, Artificial Sequence
  ENSG00000066248_18 (sequence is synthesized)
ctcatgtgtcttggccccttgctcgcaaactggataaagggtgcccaagcctctcctgatgcatttgtaaacaagaaggtttcagcagtattacaccacctccctcatgcctccgagggg

SEQ ID NO: 49250 - DNA, 120 bp, Artificial Sequence
  ENSG00000066248_19 (sequence is synthesized)
tagaaagaggagctccagtccgactgagactggccagccagcctcagctgtgggcacagtgtctggtcacggtggtcactcagccctgtctgtggcctgaccgagctggaggaaggggcc

SEQ ID NO: 49251 - DNA, 120 bp, Artificial Sequence
  ENSG00000066248_20 (sequence is synthesized)
cttaggatcccctctgccccctgacctccccagctgaagccaccccgcctgccaccaggcgtcagacaccaccacggtggtccggatctgtctcctgggagacgggagtgcggggctagt

SEQ ID NO: 49252 - DNA, 120 bp, Artificial Sequence
  ENSG00000066248_21 (sequence is synthesized)
gtgcggcccagacccacgcagggtgtggaccctgctctcacctgcccgctgcgtggccttgagcagtcagtttacatggaggatgtggggggtgctgctccagggattctcaaaccagga

SEQ ID NO: 49253 - DNA, 120 bp, Artificial Sequence
  ENSG00000066248_22 (sequence is synthesized)
aatgcttaccagtgaagcttttccaggacaggacgaagtttttggctgtgggctctctgggacagagtggagcgcctgtggatttagccggggacacaccatcctgctcgcaggtgcctg

SEQ ID NO: 49254 - DNA, 120 bp, Artificial Sequence
  ENSG00000066248_23 (sequence is synthesized)
gacaggacaggggacgagggaggaacactctctgaggaagcccaactcctatgagctcctctctggcagcactcaaaccagtgaagcttgggaaagtcattgacctccagtcgttctgct

SEQ ID NO: 49255 - DNA, 120 bp, Artificial Sequence
  ENSG00000066248_24 (sequence is synthesized)
gagaaacatctggctctatttccatggagaccagggaatctgaagatttggaaaagacccggaggaaatcagcaagtgatcaatggaacactgataatgaaccagccaaggtgaaacctg

SEQ ID NO: 49256 - DNA, 120 bp, Artificial Sequence
  ENSG00000066248_25 (sequence is synthesized)
agttactcccagaaaaagaggagacttctcaagctgaccaggatatccaagacaaagagcctcattgccacatcccaattaagagaaattccatcttcaatcgctccataagacgcaaaa

SEQ ID NO: 49257 - DNA, 120 bp, Artificial Sequence
  ENSG00000066248_26 (sequence is synthesized)
gcaaagccaaggccagagacaaccccgaacggaacgccagctgcctggcagattcacaggacaatggaaaatctgtaaatgagcccctgaccttgaatatcccctggagcagaatgcctc

SEQ ID NO: 49258 - DNA, 120 bp, Artificial Sequence
  ENSG00000066248_27 (sequence is synthesized)
tgcccctggcccccagggactggaagaggctcccaacccagagtgtccctgtgggaggcaggcagaaggtgacaattgacacgatttcctgcacgcgtcctcctctaccttggaagcagt

SEQ ID NO: 49259 - DNA, 120 bp, Artificial Sequence
  ENSG00000066248_28 (sequence is synthesized)
tagaatctaccaggcacagatgaggccgcccttgcctgacggagcttgatgagcagcccttggtctccggttccaggactgagagcccagctgcctctgcccacccttccccaggcctct

SEQ ID NO: 49260 - DNA, 120 bp, Artificial Sequence
  ENSG00000066248_29 (sequence is synthesized)
gccagcctctggctgcacggtcaggccctgccccatggcaggcctgccagagcttggctggggacccctcccgcctctggctccctgatgggctggatgtaacttgtgtcttctagcccc

SEQ ID NO: 49261 - DNA, 120 bp, Artificial Sequence
  ENSG00000066248_30 (sequence is synthesized)
ttaaggagcccaggtgttttaaggaatgaattggtcactgcatcttgtatcgattatggttctgagaaaagcaaatatcacttttggctgcattaaaagaagcatcatatataaaataaa

SEQ ID NO: 49262 - DNA, 120 bp, Artificial Sequence
  ENSG00000066248_31 (sequence is synthesized)
cccttcttcatccccagggcacatgcttgagacactgatgacaagtgctcgatactggcttctctacttccagatgtttggaatgttccataataaaatataaataaatgaagaactaaa

SEQ ID NO: 49263 - DNA, 120 bp, Artificial Sequence
  ENSG00000066248_32 (sequence is synthesized)
ggtcattgctgcaaagacttgacagggttacgagggtgtcatgttaaaaaaaataataataacttttggttgcccgtgctaaaaaaataaataaataaaaactccataatttaaaaaaaa

SEQ ID NO: 49264 - DNA, 120 bp, Artificial Sequence
  ENSG00000066279_0 (sequence is synthesized)
agagtcaaaacgccatacttgtttggctcctctttttaatttgcgagtttattgggcttgttttctgttttctagggagtaggttagtggaaaagaaaaagggccgaattcactcccacg

SEQ ID NO: 49265 - DNA, 120 bp, Artificial Sequence
  ENSG00000066279_1 (sequence is synthesized)
acctctacagccgcccctgaggggaagcggtcagcgtaagtcccggatccccgctccggagccgcctcgtgggagcggggcaaggagatccaggaggggtctcgaatctgccatggcgaa

SEQ ID NO: 49266 - DNA, 120 bp, Artificial Sequence
  ENSG00000066279_2 (sequence is synthesized)
cgaaccggcgagtggggcgaggctgctgggaagtgagcccgaccgagcggaggccgcccgcggggctgcggggccccgcggccgaggaggaggcgtcttccccgccggtcctgtctctca

SEQ ID NO: 49267 - DNA, 120 bp, Artificial Sequence
  ENSG00000066279_3 (sequence is synthesized)
cttctgcaggtctcctttcctttgcttcggggacgttctcctgggagcctcacggacgctgtctctggccctagacaaccctaacgaggaggtggcagaagtgaagatctcccacttccc

SEQ ID NO: 49268 - DNA, 120 bp, Artificial Sequence
  ENSG00000066279_4 (sequence is synthesized)
ggccgcggacctgggcttcagtgtgtcgcagcgctgtttcgtgttgcagcctaaagagaaaattgttatttctgttaactggacaccactcaaagaaggccgagtaagagagattatgac

SEQ ID NO: 49269 - DNA, 120 bp, Artificial Sequence
  ENSG00000066279_5 (sequence is synthesized)
atttcttgtaaatgatgttctgaaacaccaagctatattactaggaaatgcagaagagcagaaaaagaaaaagaggagtctttgggataccattaaaaagaagaaaatttcagcctctac

SEQ ID NO: 49270 - DNA, 120 bp, Artificial Sequence
  ENSG00000066279_6 (sequence is synthesized)
aagtcacaacagaagggtttcaaatattcagaatgttaataaaacatttagtgtttcccaaaaagttgacagagttaggagcccactacaagcttgtgaaaacttggctatgaatgaagg

SEQ ID NO: 49271 - DNA, 120 bp, Artificial Sequence
  ENSG00000066279_7 (sequence is synthesized)
cggtcccccaacagaaaacaattctttaatacttgaagaaaataaaatacccatatcacctattagccctgctttcaatgaatgccatggtgcaacttgcttgccactctctgtacgtcg

SEQ ID NO: 49272 - DNA, 120 bp, Artificial Sequence
  ENSG00000066279_8 (sequence is synthesized)
atctactacctactcatctcttcatgcatcagaaaatagggaactattaaatgtacacagtgccaacgtttcaaaagtttcttttaatgagaaagctgtaactgaaacttcctttaattc

SEQ ID NO: 49273 - DNA, 120 bp, Artificial Sequence
  ENSG00000066279_9 (sequence is synthesized)
cgtaaatgttaatggccaaagaggagagaatagtaaacttagtcttacccccaactgttcttcaactttgaacattacacaaagccaaatacattttctaagtccagattcttttgtaaa

SEQ ID NO: 49274 - DNA, 120 bp, Artificial Sequence
  ENSG00000066279_10 (sequence is synthesized)
taatagtcatggagctaataatgaactagaattagtaacatgtctttcatcagatatgtttatgaaagataattcacagcctgtgcatttggaatcaacaattgcacatgaaatttatca

SEQ ID NO: 49275 - DNA, 120 bp, Artificial Sequence
  ENSG00000066279_11 (sequence is synthesized)
gaaaattttaagtccagattctttcataaaagataattatggactaaatcaggatctagaatcagagtcagttaatcctattttatcccctaatcaatttttaaaagataacatggcata

SEQ ID NO: 49276 - DNA, 120 bp, Artificial Sequence
  ENSG00000066279_12 (sequence is synthesized)
tatgtgtacatctcagcaaacatgtaaagtaccattatcaaatgaaaattctcaagtcccacagtctcctgaagattggagaaaaagtgaagtttcgccacgtattcctgaatgtcaggg

SEQ ID NO: 49277 - DNA, 120 bp, Artificial Sequence
  ENSG00000066279_13 (sequence is synthesized)
ttcaaaatctcccaaagctatttttgaagaactagtagaaatgaagtcaaattactacagttttataaaacaaaataatcctaaattttctgcagttcaggatatttctagtcatagcca

SEQ ID NO: 49278 - DNA, 120 bp, Artificial Sequence
  ENSG00000066279_14 (sequence is synthesized)
caataaacaacctaagagacgtccaatactttctgccactgttactaaaaggaaggccacctgtaccagagaaaaccaaactgagattaataaaccaaaagcaaaaagatgtctcaacag

SEQ ID NO: 49279 - DNA, 120 bp, Artificial Sequence
  ENSG00000066279_15 (sequence is synthesized)
tgcagtgggtgaacatgaaaaagtaataaataatcaaaaggaaaaagaagattttcattcttatcttccaattatagatccaatattaagtaaatctaagagttataaaaacgaggtaac

SEQ ID NO: 49280 - DNA, 120 bp, Artificial Sequence
  ENSG00000066279_16 (sequence is synthesized)
accctcttcgacaacagcttcagttgctcggaaaagaaagagcgatggaagcatggaagatgcaaatgtgagagttgcaattacagaacatacagaagtgcgagaaatcaaaagaatcca

SEQ ID NO: 49281 - DNA, 120 bp, Artificial Sequence
  ENSG00000066279_17 (sequence is synthesized)
tttttctccctcagagcctaaaacatcagctgttaagaaaacaaaaaatgtgacaacacccatctcaaaacgtattagcaacagagagaaattaaacctgaagaagaaaactgatttatc

SEQ ID NO: 49282 - DNA, 120 bp, Artificial Sequence
  ENSG00000066279_18 (sequence is synthesized)
aatattcagaactccaatttctaaaacaaacaaaaggacaaaacccattatcgctgtggcacagtccagtttgaccttcataaaaccattaaaaacagatattcccagacacccgatgcc

SEQ ID NO: 49283 - DNA, 120 bp, Artificial Sequence
  ENSG00000066279_19 (sequence is synthesized)
atttgctgcaaaaaacatgttttatgatgaacgctggaaggaaaagcaggaacagggcttcacttggtggttaaattttatattaacccctgatgacttcactgtaaaaacaaatatttc

SEQ ID NO: 49284 - DNA, 120 bp, Artificial Sequence
  ENSG00000066279_20 (sequence is synthesized)
tgaagtaaatgctgctactcttcttttgggaatagagaatcaacataaaataagtgttcctagagcacctacaaaagaggaaatgtctctcagagcttatactgctcggtgtaggttaaa

SEQ ID NO: 49285 - DNA, 120 bp, Artificial Sequence
  ENSG00000066279_21 (sequence is synthesized)
cagactacgtcgtgcagcatgccgtttgtttacttctgaaaaaatggttaaagctattaaaaagcttgaaattgaaattgaagctaggcggttaattgttcgaaaagatagacacctatg

SEQ ID NO: 49286 - DNA, 120 bp, Artificial Sequence
  ENSG00000066279_22 (sequence is synthesized)
gaaagatgtgggagaacgtcagaaagtcctgaattggctgttgtcctacaatcctttgtggcttcgaattggtctagagacaacttatggagaactcatatctttggaagataacagtga

SEQ ID NO: 49287 - DNA, 120 bp, Artificial Sequence
  ENSG00000066279_23 (sequence is synthesized)
tgtcacagggttggctatgtttattctgaatcgcctactttggaatcctgatatagcagctgagtatagacaccccactgttcctcacctgtatagagatggtcatgaagaagctttgtc

SEQ ID NO: 49288 - DNA, 120 bp, Artificial Sequence
  ENSG00000066279_24 (sequence is synthesized)
caagtttacattgaaaaagttattgttgttggtctgttttcttgattatgctaaaatttccagactcattgatcatgatccttgtctcttctgtaaagatgccgaattcaaggctagtaa

SEQ ID NO: 49289 - DNA, 120 bp, Artificial Sequence
  ENSG00000066279_25 (sequence is synthesized)
agaaatccttttggctttttcacgagatttcctaagtggtgaaggtgacctttcccgtcaccttggcttattgggattacctgttaaccatgttcagacaccatttgatgaatttgattt

SEQ ID NO: 49290 - DNA, 120 bp, Artificial Sequence
  ENSG00000066279_26 (sequence is synthesized)
tgccgttacaaatcttgccgtagacttgcaatgtggagtgcgccttgtgcgaaccatggaacttctcacacagaactgggacctctcaaagaaactcaggattccggcaataagtcgtct

SEQ ID NO: 49291 - DNA, 120 bp, Artificial Sequence
  ENSG00000066279_27 (sequence is synthesized)
tcaaaagatgcacaatgttgacattgttcttcaagttcttaaatcacgaggaattgaattaagtgatgagcatggaaatacaattctatctaaggatattgtggataggcacagagaaaa

SEQ ID NO: 49292 - DNA, 120 bp, Artificial Sequence
  ENSG00000066279_28 (sequence is synthesized)
aactctcaggttgctttggaaaatagcgtttgcttttcaggtggatatttcccttaacttagatcaattaaaggaagaaattgcctttctaaaacacacaaagagtataaagaaaacaat

SEQ ID NO: 49293 - DNA, 120 bp, Artificial Sequence
  ENSG00000066279_29 (sequence is synthesized)
atctctactatcatgccattctgatgatcttattaataagaaaaaaggcaaaagggatagtggttcctttgaacaatatagtgaaaacataaagttattgatggattgggtaaatgctgt

SEQ ID NO: 49294 - DNA, 120 bp, Artificial Sequence
  ENSG00000066279_30 (sequence is synthesized)
ttgtgccttctataataaaaaggtggagaattttacagtgtctttctcagacggccgtgtgttatgttacctgatccaccattaccatccttgctatgtgccatttgacgctatatgtca

SEQ ID NO: 49295 - DNA, 120 bp, Artificial Sequence
  ENSG00000066279_31 (sequence is synthesized)
gcgtactactcaaactgtggaatgtacgcaaactggttcagtggtattaaattcatcatctgaatctgatgacagttctctggatatgtctcttaaagcatttgatcatgaaaatacttc

SEQ ID NO: 49296 - DNA, 120 bp, Artificial Sequence
  ENSG00000066279_32 (sequence is synthesized)
agagctatacaaagagctcctagaaaatgaaaagaaaaattttcacttggttaggtctgcagttagagaccttggtggaatacctgctatgattaatcattcagatatgtcaaatacaat

SEQ ID NO: 49297 - DNA, 120 bp, Artificial Sequence
  ENSG00000066279_33 (sequence is synthesized)
tccagatgaaaaggtggttattacctatttgtcatttctttgtgcaaggcttttggatcttcgtaaagaaataagagctgctcgactcatacaaacaacatggagaaaatataaactaaa

SEQ ID NO: 49298 - DNA, 120 bp, Artificial Sequence
  ENSG00000066279_34 (sequence is synthesized)
aacagatctcaaacgccatcaggagagagagaaagctgcaagaattattcaattggctgtaatcaattttctagcaaaacaaagattgagaaaaagagttaatgcagcactcgtcattca

SEQ ID NO: 49299 - DNA, 120 bp, Artificial Sequence
  ENSG00000066279_35 (sequence is synthesized)
gaaatattggcgaagagtcttagcacagagaaaattattaatgttaaaaaaggaaaagctggaaaaagttcaaaataaagcagcatcacttattcagggatattggagaagatattccac

SEQ ID NO: 49300 - DNA, 120 bp, Artificial Sequence
  ENSG00000066279_36 (sequence is synthesized)
tagacaaagatttctgaaattgaaatattattcaatcatcctgcaatctaggataagaatgataattgctgttacatcttataaacgatatctttgggctacagttacaattcagaggca

SEQ ID NO: 49301 - DNA, 120 bp, Artificial Sequence
  ENSG00000066279_37 (sequence is synthesized)
ttggcgtgcttatttaagaagaaaacaagatcaacaaagatatgaaatgctaaaatcatcaactcttataatccaatctatgttcagaaaatggaagcaacgtaaaatgcaatcacaagt

SEQ ID NO: 49302 - DNA, 120 bp, Artificial Sequence
  ENSG00000066279_38 (sequence is synthesized)
aaaagctacagtaatattgcaaagagcttttagagaatggcatttaagaaaacaagctaaagaagaaaattctgctattatcatacaatcatggtatagaatgcataaagaattacggaa

SEQ ID NO: 49303 - DNA, 120 bp, Artificial Sequence
  ENSG00000066279_39 (sequence is synthesized)
atatatttatattagatcttgtgttgttatcattcagaaaagatttcggtgctttcaagcccaaaagttatataaaagaagaaaagagtccatactaaccatccagaagtactacaaagc

SEQ ID NO: 49304 - DNA, 120 bp, Artificial Sequence
  ENSG00000066279_40 (sequence is synthesized)
atatctgaaaggaaagattgagcgcaccaactatttgcagaaacgagctgcagccattcaattacaagctgcttttaggagactgaaagctcataatttatgtagacaaattagagctgc

SEQ ID NO: 49305 - DNA, 120 bp, Artificial Sequence
  ENSG00000066279_41 (sequence is synthesized)
ttgtgttattcagtcatactggagaatgagacaagacagagttcgatttttaaaccttaagaagactattatcaaatttcaggcacatgtaagaaaacatcaacaacgacagaaatataa

SEQ ID NO: 49306 - DNA, 120 bp, Artificial Sequence
  ENSG00000066279_42 (sequence is synthesized)
gaagatgaagaaagcagctgttataattcagactcatttccgagcttatatttttgccatgaaagttctagcatcttaccagaaaacacgctctgctgtcattgtgctgcagtctgcata

SEQ ID NO: 49307 - DNA, 120 bp, Artificial Sequence
  ENSG00000066279_43 (sequence is synthesized)
tagagggatgcaagccaggaaaatgtatattcacatcctcacatctgttataaagattcaatcatattatcgtgcttatgtttctaaaaaggaatttttgagcctaaaaaatgctacaat

SEQ ID NO: 49308 - DNA, 120 bp, Artificial Sequence
  ENSG00000066279_44 (sequence is synthesized)
aaaattgcagtcaactgttaagatgaaacaaacacgtaaacaatatttgcatttaagagcagctgcactatttatccagcaatgttaccgttccaaaaaaatagctgcacaaaagagaga

SEQ ID NO: 49309 - DNA, 120 bp, Artificial Sequence
  ENSG00000066279_45 (sequence is synthesized)
ccgaaagcagatgaggttacaaagaaaagctgttatttcactacagtcttatttcagaatgagaaaggctcggcagtattatctgaaaatgtataaagcaattattgtcattcagaatta

SEQ ID NO: 49310 - DNA, 120 bp, Artificial Sequence
  ENSG00000066279_46 (sequence is synthesized)
ctatcatgcatacaaagcacaggtcaatcagaggaagaacttcttgcaagtcaaaaaagcagctacttgcttgcaagcagcttacagaggttataaagtacgccagctaatcaaacaaca

SEQ ID NO: 49311 - DNA, 120 bp, Artificial Sequence
  ENSG00000066279_47 (sequence is synthesized)
atctatagctgctcttaaaattcagtctgcttttagaggctataataaaagggtaaaatatcaatctgtgcttcaatctataataaagattcagagatggtacagggcgtacaagactct

SEQ ID NO: 49312 - DNA, 120 bp, Artificial Sequence
  ENSG00000066279_48 (sequence is synthesized)
tcatgatacaagaacacattttttgaagacaaaggcagctgtgatttccctccagtctgcttatcgtggctggaaggttcggaaacagattagaagggaacatcaagctgccttgaagat

SEQ ID NO: 49313 - DNA, 120 bp, Artificial Sequence
  ENSG00000066279_49 (sequence is synthesized)
tcagtctgcttttagaatggccaaggcccagaaacagtttagattgtttaaaacagcagcattagtcatccagcaaaatttcagagcatggactgcaggaaggaagcaatgtatggagta

SEQ ID NO: 49314 - DNA, 120 bp, Artificial Sequence
  ENSG00000066279_50 (sequence is synthesized)
tattgaactccgtcatgcggtactggtgcttcaatctatgtggaagggaaaaacactgagaagacagcttcaaaggcaacataaatgtgctatcatcatacagtcatactatagaatgca

SEQ ID NO: 49315 - DNA, 120 bp, Artificial Sequence
  ENSG00000066279_51 (sequence is synthesized)
tgtgcaacaaaagaagtggaaaatcatgaaaaaagctgctcttctgattcaaaagtattatagggcttacagtattggaagagaacagaatcatttatatttgaaaacaaaagcagctgt

SEQ ID NO: 49316 - DNA, 120 bp, Artificial Sequence
  ENSG00000066279_52 (sequence is synthesized)
agtaactttacagtcagcttatcgtggtatgaaagtgagaaaaagaataaaggattgcaacaaagcagcagtcactatacagtctaaatacagagcttacaaaaccaaaaagaaatatgc

SEQ ID NO: 49317 - DNA, 120 bp, Artificial Sequence
  ENSG00000066279_53 (sequence is synthesized)
aacctatagagcttcagctattataattcagagatggtatcgaggtattaaaattacaaaccatcagcataaggagtatcttaatttgaagaagacagcaattaaaatccaatctgttta

SEQ ID NO: 49318 - DNA, 120 bp, Artificial Sequence
  ENSG00000066279_54 (sequence is synthesized)
tagaggtattagagttagaagacatattcaacacatgcacagggcagccacttttattaaagccatgtttaaaatgcatcagtcaagaataagttaccatacaatgagaaaagcagctat

SEQ ID NO: 49319 - DNA, 120 bp, Artificial Sequence
  ENSG00000066279_55 (sequence is synthesized)
tgttattcaagtaagatgtagagcatattatcaaggtaaaatgcagcgtgaaaagtacctgacaattttgaaagctgttaaagtccttcaggcaagttttagaggagtaagagttagacg

SEQ ID NO: 49320 - DNA, 120 bp, Artificial Sequence
  ENSG00000066279_56 (sequence is synthesized)
gactcttagaaagatgcagactgcagcaacactcattcagtcaaactacagaagatacagacagcaaacatactttaataagttaaagaaaataacaaaaacagtacagcaaagatactg

SEQ ID NO: 49321 - DNA, 120 bp, Artificial Sequence
  ENSG00000066279_57 (sequence is synthesized)
ggcaatgaaagaaagaaacatacaatttcaaaggtataacaaactgaggcattctgtaatatacattcaggctatttttaggggaaagaaagctagaagacatttaaaaatgatgcatat

SEQ ID NO: 49322 - DNA, 120 bp, Artificial Sequence
  ENSG00000066279_58 (sequence is synthesized)
agccgcaactctcattcagaggagatttagaactctaatgatgagaagaagattcctctctctcaagaaaactgctattttgattcagagaaaatatcgggcacatctttgtacaaagca

SEQ ID NO: 49323 - DNA, 120 bp, Artificial Sequence
  ENSG00000066279_59 (sequence is synthesized)
tcacttacagttccttcaggtacaaaatgcagttattaaaatccagtcatcatacagaagatggatgataaggaaaaggatgcgagagatgcacagggctgctactttcatccagtctac

SEQ ID NO: 49324 - DNA, 120 bp, Artificial Sequence
  ENSG00000066279_60 (sequence is synthesized)
tttcagaatgcacagattacatatgagatatcaggctttgaaacaggcctccgttgtgatccaacagcaataccaagcaaatagagctgcaaaactgcagaggcagcattatctcagaca

SEQ ID NO: 49325 - DNA, 120 bp, Artificial Sequence
  ENSG00000066279_61 (sequence is synthesized)
aagacactctgctgtgatccttcaggctgcattcaggggtatgaaaactagaagacatttgaagagtatgcattcctctgcaacccttattcagagtaggtttagatcattactggtgag

SEQ ID NO: 49326 - DNA, 120 bp, Artificial Sequence
  ENSG00000066279_62 (sequence is synthesized)
gagaagattcatttccctcaaaaaagctactatttttgttcagaggaaatatcgagccaccatttgtgccaaacataaattgtaccaattcttgcacttaagaaaggcagccattacaat

SEQ ID NO: 49327 - DNA, 120 bp, Artificial Sequence
  ENSG00000066279_63 (sequence is synthesized)
acagtcatcttacagaagactgatggtaaagaagaagttacaagaaatgcaaagggctgcagttctcattcaggctactttcaggatgtacagaacatatattacatttcagacttggaa

SEQ ID NO: 49328 - DNA, 120 bp, Artificial Sequence
  ENSG00000066279_64 (sequence is synthesized)
acatgcttcaattctaattcagcaacattatcgaacatatagagctgcaaaattacaaagagaaaattatatcagacaatggcattctgctgtggttattcaggctgcatataaaggaat

SEQ ID NO: 49329 - DNA, 120 bp, Artificial Sequence
  ENSG00000066279_65 (sequence is synthesized)
gaaagcaagacaacttttaagggaaaaacacaaagcttctatcgtaatacaaagcacctacagaatgtataggcagtattgtttctaccaaaagcttcagtgggctacaaaaatcataca

SEQ ID NO: 49330 - DNA, 120 bp, Artificial Sequence
  ENSG00000066279_66 (sequence is synthesized)
agaaaaatatagagcaaataaaaagaaacagaaagtatttcaacacaatgaacttaagaaagagacttgtgttcaggcaggttttcaggacatgaacataaaaaaacagattcaggaaca

SEQ ID NO: 49331 - DNA, 120 bp, Artificial Sequence
  ENSG00000066279_67 (sequence is synthesized)
gcaccaggctgccattattattcagaagcattgtaaagcctttaaaataaggaagcattatctccaccttagagcaacagtagtttctattcaaagaagatacagaaaactaactgcagt

SEQ ID NO: 49332 - DNA, 120 bp, Artificial Sequence
  ENSG00000066279_68 (sequence is synthesized)
gcgtacccaagcagttatttgtatacagtcttattacagaggctttaaagtacgaaaggatattcaaaatatgcaccgggctgccacactaattcagtcattctatcgaatgcacagggc

SEQ ID NO: 49333 - DNA, 120 bp, Artificial Sequence
  ENSG00000066279_69 (sequence is synthesized)
caaagttgattatgaaacaaagaaaactgcaattgtggttatacagaattattataggttgtatgttagagtaaaaacagaaagaaaaaactttttagcagttcagaaatctgtacgaac

SEQ ID NO: 49334 - DNA, 120 bp, Artificial Sequence
  ENSG00000066279_70 (sequence is synthesized)
tattcaggctgcttttagaggcatgaaagttagacaaaaattgaaaaatgtatcagaggaaaagatggcagccattgttaaccaatctgcactctgctgttacagaagtaaaactcagta

SEQ ID NO: 49335 - DNA, 120 bp, Artificial Sequence
  ENSG00000066279_71 (sequence is synthesized)
tgaagctgttcaaagtgaaggtgttatgattcaagagtggtataaagcttctggccttgcttgttcacaggaagcagagtatcattctcaaagtagggctgcagtaacaattcaaaaagc

SEQ ID NO: 49336 - DNA, 120 bp, Artificial Sequence
  ENSG00000066279_72 (sequence is synthesized)
tttttgtagaatggtcacaagaaaactggaaacacagaaatgtgctgccctacggattcagttcttccttcagatggctgtgtatcggagaagatttgttcagcagaaaagagctgctat

SEQ ID NO: 49337 - DNA, 120 bp, Artificial Sequence
  ENSG00000066279_73 (sequence is synthesized)
cactttacagcattattttaggacgtggcaaaccagaaaacagtttttactatatagaaaagcagcagtggttttacaaaatcactacagagcatttctgtctgcaaaacatcaaagaca

SEQ ID NO: 49338 - DNA, 120 bp, Artificial Sequence
  ENSG00000066279_74 (sequence is synthesized)
agtctatttacagatcagaagcagtgttatcattattcaagctagaagtaaaggatttatacagaaacggaagtttcaggaaattaaaaatagcaccataaaaattcaggctatgtggag

SEQ ID NO: 49339 - DNA, 120 bp, Artificial Sequence
  ENSG00000066279_75 (sequence is synthesized)
gagatatagagccaagaaatatttatgtaaagtgaaagctgcctgcaagattcaagcctggtatagatgttggagagcacacaaagaatatctagctatattaaaagctgttaaaattat

SEQ ID NO: 49340 - DNA, 120 bp, Artificial Sequence
  ENSG00000066279_76 (sequence is synthesized)
tcaaggttgcttctataccaaactagagagaacacggtttttgaatgtgagagcatcagcaattatcattcagagaaaatggagagctatacttcctgcaaagatagctcatgaacactt

SEQ ID NO: 49341 - DNA, 120 bp, Artificial Sequence
  ENSG00000066279_77 (sequence is synthesized)
cttaatgataaaaagacatcgagctgcttgtttgatccaagcacattatagaggatataaaggaaggcaggtctttcttcggcagaaatctgctgctttgatcatacaaaaatatatacg

SEQ ID NO: 49342 - DNA, 120 bp, Artificial Sequence
  ENSG00000066279_78 (sequence is synthesized)
agccagggaggctggaaagcatgaaaggataaaatatattgaatttaaaaaatctacagttatcctacaagcactggtgcgtggttggctagtacgaaaaagatttttagaacagagagc

SEQ ID NO: 49343 - DNA, 120 bp, Artificial Sequence
  ENSG00000066279_79 (sequence is synthesized)
caaaattcgacttcttcacttcactgcagctgcatattatcacctgaatgctgttagaattcaaagagcctataaactttacctggctgtgaagaatgctaacaagcaggttaattcagt

SEQ ID NO: 49344 - DNA, 120 bp, Artificial Sequence
  ENSG00000066279_80 (sequence is synthesized)
catctgtattcagagatggtttcgagcaagattacaagaaaagagatttattcagaaatatcatagcatcaaaaagattgagcatgaaggtcaagaatgtctgagccagcgaaatagggc

SEQ ID NO: 49345 - DNA, 120 bp, Artificial Sequence
  ENSG00000066279_81 (sequence is synthesized)
tgcatcagtaatacagaaagcagtgcgccattttctcctccgtaaaaagcaggaaaaattcactagtggaatcattaaaattcaggcattatggagaggctattcttggaggaagaaaaa

SEQ ID NO: 49346 - DNA, 120 bp, Artificial Sequence
  ENSG00000066279_82 (sequence is synthesized)
tgattgtacaaaaattaaagctatacgactaagtcttcaagttgttaatagggagattcgagaagaaaacaaactctacaaaagaactgcacttgcacttcattaccttttgacatataa

SEQ ID NO: 49347 - DNA, 120 bp, Artificial Sequence
  ENSG00000066279_83 (sequence is synthesized)
gcacctttctgccattcttgaggccttaaaacacctagaggtagttactagattgtctccactttgttgtgagaacatggcccagagtggagcaatttctaaaatatttgttttgatccg

SEQ ID NO: 49348 - DNA, 120 bp, Artificial Sequence
  ENSG00000066279_84 (sequence is synthesized)
aagttgtaatcgcagtattccttgtatggaagtcatcagatatgctgtgcaagtcttgcttaatgtatctaagtatgagaaaactacttcagcagtttatgatgtagaaaattgtataga

SEQ ID NO: 49349 - DNA, 120 bp, Artificial Sequence
  ENSG00000066279_85 (sequence is synthesized)
tatactattggagcttttgcagatataccgagaaaagcctggtaataaagttgcagacaaaggcggaagcatttttacaaaaacttgttgtttgttggctattttactgaagacaacaaa

SEQ ID NO: 49350 - DNA, 120 bp, Artificial Sequence
  ENSG00000066279_86 (sequence is synthesized)
tagagcctctgatgtacgaagtaggtccaaagttgttgaccgtatttacagtctctacaaacttacagctcataaacataaaatgaatactgaaagaatactttacaagcaaaagaagaa

SEQ ID NO: 49351 - DNA, 120 bp, Artificial Sequence
  ENSG00000066279_87 (sequence is synthesized)
ttcttctataagcattccttttatcccagaaacacctgtaaggaccagaatagtttcaagacttaagccagattgggttttgagaagagataacatggaagaaatcacaaatcccctgca

SEQ ID NO: 49352 - DNA, 120 bp, Artificial Sequence
  ENSG00000066279_88 (sequence is synthesized)
agctattcaaatggtgatggatacgcttggcattccttattagtaaatgtaaacattttcagtatgtatagtgtaaagaaatattaaagccaatcatgagtacgtaaagtgatttttgct

SEQ ID NO: 49353 - DNA, 120 bp, Artificial Sequence
  ENSG00000066279_89 (sequence is synthesized)
ctccgtgtacaacttttaaaatctgactttgttttaaaaaaacataaactgttcattacattcttcatttttatcatttatagttttatgcatgtaataaactaatatgtcataagatga

SEQ ID NO: 49354 - DNA, 120 bp, Artificial Sequence
  ENSG00000066294_0 (sequence is synthesized)
ccgtgcttttccacagaaggttagaccctgaaagagatggctcagcaccacctatggatcttgctcctttgcctgcaaacctggccggaagcagctggaaaagactcagaaatcttcaca

SEQ ID NO: 49355 - DNA, 120 bp, Artificial Sequence
  ENSG00000066294_1 (sequence is synthesized)
gtgaatgggattctgggagagtcagtcactttccctgtaaatatccaagaaccacggcaagttaaaatcattgcttggacttctaaaacatctgttgcttatgtaacaccaggagactca

SEQ ID NO: 49356 - DNA, 120 bp, Artificial Sequence
  ENSG00000066294_2 (sequence is synthesized)
gaaacagcacccgtagttactgtgacccacagaaattattatgaacggatacatgccttaggtccgaactacaatctggtcattagcgatctgaggatggaagacgcaggagactacaaa

SEQ ID NO: 49357 - DNA, 120 bp, Artificial Sequence
  ENSG00000066294_3 (sequence is synthesized)
gcagacataaatacacaggctgatccctacaccaccaccaagcgctacaacctgcaaatctatcgtcggcttgggaaaccaaaaattacacagagtttaatggcatctgtgaacagcacc

SEQ ID NO: 49358 - DNA, 120 bp, Artificial Sequence
  ENSG00000066294_4 (sequence is synthesized)
tgtaatgtcacactgacatgctctgtagagaaagaagaaaagaatgtgacatacaattggagtcccctgggagaagagggtaatgtccttcaaatcttccagactcctgaggaccaagag

SEQ ID NO: 49359 - DNA, 120 bp, Artificial Sequence
  ENSG00000066294_5 (sequence is synthesized)
ctgacttacacgtgtacagcccagaaccctgtcagcaacaattctgactccatctctgcccggcagctctgtgcagacatcgcaatgggcttccgtactcaccacaccgggttgctgagc

SEQ ID NO: 49360 - DNA, 120 bp, Artificial Sequence
  ENSG00000066294_6 (sequence is synthesized)
gtgctggctatgttctttctgcttgttctcattctgtcttcagtgtttttgttccgtttgttcaagagaagacaagatgctgcctcaaagaaaaccatatacacatatatcatggcttca

SEQ ID NO: 49361 - DNA, 120 bp, Artificial Sequence
  ENSG00000066294_7 (sequence is synthesized)
aggaacacccagccagcagagtccagaatctatgatgaaatcctgcagtccaaggtgcttccctccaaggaagagccagtgaacacagtttattccgaagtgcagtttgctgataagatg

SEQ ID NO: 49362 - DNA, 120 bp, Artificial Sequence
  ENSG00000066294_8 (sequence is synthesized)
gggaaagccagcacacaggacagtaaacctcctgggacttcaagctatgaaattgtgatctaggctgctgggctgaattctccctctggaaactgagttacaaccaccaatactggcagg

SEQ ID NO: 49363 - DNA, 120 bp, Artificial Sequence
  ENSG00000066294_9 (sequence is synthesized)
ttccctggatccagatcttctctgcccaactcttactgggagattgcaaactgccacatctcagcctgtaagcaaagcaggaaaccttctgctgggcatagcttgtgcctaaatggacaa

SEQ ID NO: 49364 - DNA, 120 bp, Artificial Sequence
  ENSG00000066294_10 (sequence is synthesized)
atggatgcatacccttcctgaaatgactcccttctgaatgaatgacaaagcaggttacctagtatagttttcccaaacttcttcccatcatagcacatgtagaaaataatatttttatgg

SEQ ID NO: 49365 - DNA, 120 bp, Artificial Sequence
  ENSG00000066294_11 (sequence is synthesized)
cacactgggataaacaagcaagattgctcacttctggaagctgcatatgactagaggcctcttgtgactggaggtaacaaccctgcccagtaactgtgggagaaggggatcaatattttg

SEQ ID NO: 49366 - DNA, 120 bp, Artificial Sequence
  ENSG00000066294_12 (sequence is synthesized)
cacacctgtaataggccatggcacaccagccaagatgctctgctcacagtcagtatgtgtgaagatccctggtgcgtggccttcaccacgcatcttgagcaaattaggaaaatgtaccct

SEQ ID NO: 49367 - DNA, 120 bp, Artificial Sequence
  ENSG00000066294_13 (sequence is synthesized)
tcgcttgaggcagatgcagcccttcccccgagtgcatggcttggagagcagaatgtgggctgcatataagcacactcatccctttgtctgggaatctttgtgcagggcataacaggctta

SEQ ID NO: 49368 - DNA, 120 bp, Artificial Sequence
  ENSG00000066294_14 (sequence is synthesized)
gtaagtccaaacacagatgacagtgctgtgtgggtctctgtcagagttgtggctctcagccatgtagacacactctccaaatggagtgttggaaaatgttctttctgcagggtctagaga

SEQ ID NO: 49369 - DNA, 120 bp, Artificial Sequence
  ENSG00000066294_15 (sequence is synthesized)
ctgctgggacacttttcttggagtgctacttcagaagccttataggattttctttctggccaagatttccttctgtatcactccaagcagcctcagcagaagaagcagccatgcccagta

SEQ ID NO: 49370 - DNA, 120 bp, Artificial Sequence
  ENSG00000066294_16 (sequence is synthesized)
ttcccactctccaaaaggaactgaccagcttatatttctcacacttctggggaactgggtataatccaaccatcaaaatagaagaccttgcaagaagcagagtcattctccagaaggaac

SEQ ID NO: 49371 - DNA, 120 bp, Artificial Sequence
  ENSG00000066294_17 (sequence is synthesized)
ttgggagatgatggtgcagatgatgaaactgggttcatcccagttccaaagactcagagaactagagtttaagctgaggcagagtgccgccaccctggcatgccccacaaacagatcacc

SEQ ID NO: 49372 - DNA, 120 bp, Artificial Sequence
  ENSG00000066294_18 (sequence is synthesized)
agccagcttacacaggcattaactctcctcaatgaggaagaatcattcacaactgagcaagacattcatatgatcatttaaggaagtgtttcccttatgtgttagcaagtataatcggct

SEQ ID NO: 49373 - DNA, 120 bp, Artificial Sequence
  ENSG00000066294_19 (sequence is synthesized)
aactcctaaatcccaatgaatagtcctaggctggacagcaatgggctgcaattaggcagataaagacatcagtcccagtaaatgaatccatagactcatctagcaccaactaccattagc

SEQ ID NO: 49374 - DNA, 120 bp, Artificial Sequence
  ENSG00000066294_20 (sequence is synthesized)
actatgttaggagctgcaaggccccaaagtagaagatgtgcataatgtctgctcttgtgtagctcaggagacaattccagcacagacactacagttaacgctgaactgcagctgcaagta

SEQ ID NO: 49375 - DNA, 120 bp, Artificial Sequence
  ENSG00000066294_21 (sequence is synthesized)
atagcatgaacagtcagaaaaataccttatgagggggcagggctgaagctgggccttgaaggatggatgaaatttggatagagaatgaggaagacagagggcctccaagtgagagaagca

SEQ ID NO: 49376 - DNA, 120 bp, Artificial Sequence
  ENSG00000066294_22 (sequence is synthesized)
tgaaaaatgagcaggggcctggatcagtggggtgtattcagagcacctctccagatgcaccatgcatgctcacagtcccttgcctatgtgtggcagagtgtcccagccagatgtgtgccc

SEQ ID NO: 49377 - DNA, 120 bp, Artificial Sequence
  ENSG00000066294_23 (sequence is synthesized)
tcaccccatgtccatttacatgtccttcaatgcccacctcaaaaggtacctcttctgtaaagctttccctggtatcaggaatcaaaattaatcagggatcttttcacactgctgtttttt

SEQ ID NO: 49378 - DNA, 120 bp, Artificial Sequence
  ENSG00000066294_24 (sequence is synthesized)
cctctttggtccttctatcactaaaactcatctcattcagccttacagcataactaattatttgttttcctcactacattgtacatgtgggaattacagataaacggaagccggctgggg

SEQ ID NO: 49379 - DNA, 88 bp, Artificial Sequence
  ENSG00000066294_25 (sequence is synthesized)
agagtgagactccatctcgaaaaaaaaaaaaagatagaagccaataagcatggtgcaatcaaattctggcaagcattaaatatcagga

SEQ ID NO: 49380 - DNA, 65 bp, Artificial Sequence
  ENSG00000066294_26 (sequence is synthesized)
ggatcctggccagcatggcaaaaccccatctgtacttaaaatacaaaaaaattagctgggcgtgg

SEQ ID NO: 49381 - DNA, 120 bp, Artificial Sequence
  ENSG00000066294_27 (sequence is synthesized)
caggctgggcaacagagtgagaccatgtctcaaaaaataaaaataaaataaaataatatcaggatgcatacatcagaggctgttcctagtgtaaaggcactttggagggagaagactttc

SEQ ID NO: 49382 - DNA, 120 bp, Artificial Sequence
  ENSG00000066294_28 (sequence is synthesized)
agagttaggcagaccaactaagaggtcagctgaagcacctaaccagttgtaaggaggtgaaagacagcaccccaagaagagacgtgcaggaaggaggaaagaggcttggtcataaaggat

SEQ ID NO: 49383 - DNA, 120 bp, Artificial Sequence
  ENSG00000066294_29 (sequence is synthesized)
ggaggaattccaaagtgacactgaacaggctgcgtttatcctaaaataaaaccactcctcactctgtggatgcgttgaagactcattcccaaacatctttattctctaacttgccctctt

SEQ ID NO: 49384 - DNA, 120 bp, Artificial Sequence
  ENSG00000066294_30 (sequence is synthesized)
cctcttcctaatatgctcactcaagtaaaattactagtgtcctaatgcccctatgcatattgtcaaaaataaaaatcagaagcaggttagatctgttaggtcttccagaagagcaaacct

SEQ ID NO: 49385 - DNA, 120 bp, Artificial Sequence
  ENSG00000066294_31 (sequence is synthesized)
aattctgaaggtagcctttggactcaggacaccctactcttgtctctcctctcagtttctctgctatgaatctcctgattcatgaacacgttatctgttcacccttctctctaggtctta

SEQ ID NO: 49386 - DNA, 120 bp, Artificial Sequence
  ENSG00000066294_32 (sequence is synthesized)
gttcttagattttccttctgtaaaatgcatgtgatcttattttcccctccacaactttccagatgaactagactgtgaccaagaggtctataaaatcaaagcatcatggaacaggatctt

SEQ ID NO: 49387 - DNA, 120 bp, Artificial Sequence
  ENSG00000066294_33 (sequence is synthesized)
gtatcagaccaaagtgtgccagtttttaaaaatgtgcatcaaaatggaagtctcagagacagagccctctggtggaaagttctagtaggttaggacagtcctgcctgcagacaccttggg

SEQ ID NO: 49388 - DNA, 120 bp, Artificial Sequence
  ENSG00000066294_34 (sequence is synthesized)
ctttactgagggactcaactgagaaaatgaggaatgttgcagctcatgattcttagaagaagaaagtgaagcttgtttaaaatatgatttaaaaaatctgtagaacactgtaaactacac

SEQ ID NO: 49389 - DNA, 120 bp, Artificial Sequence
  ENSG00000066294_35 (sequence is synthesized)
aggctatgagggaatagcctggttgggccagcttggaaatcgggcacaggcaggaaggggcctgtctggtttgggccgtgtccacagagagcacttcttaggtcctgcctggagagaagg

SEQ ID NO: 49390 - DNA, 120 bp, Artificial Sequence
  ENSG00000066294_36 (sequence is synthesized)
aatggctgggctatattttcttccagactcattatttttcttctgtttgacttttctctgaatttcccttgatttgtataaattttctcaataattagtgacagtgtctactgattgtaa

SEQ ID NO: 49391 - DNA, 84 bp, Artificial Sequence
  ENSG00000066294_37 (sequence is synthesized)
gaagaacaaagacaataagaggaaatataatgagtggtcataaatgtgggctctgacagtagagtgcctgggtctgcatcctgg

SEQ ID NO: 49392 - DNA, 120 bp, Artificial Sequence
  ENSG00000066294_38 (sequence is synthesized)
tgtgggctctgacagtagagtgcctgggtctgcatcctggtttcttagtcatgtgaccttaggcaagttactttaacctcgctgtacctcaggttgtccatctgtaaaatggggataata

SEQ ID NO: 49393 - DNA, 120 bp, Artificial Sequence
  ENSG00000066294_39 (sequence is synthesized)
atagtgcctaccttttaaggttgatgtggggattaaatgaggtgttgctcatacaggaatgtgcctgtgcatggcaaagttcgggaaattttttataagctgttctaggcctgaaatctt

SEQ ID NO: 49394 - DNA, 120 bp, Artificial Sequence
  ENSG00000066294_40 (sequence is synthesized)
cagaagatgctaatctaaattcatgaaataagcttcttacaacagaaatgctgctagtattatgcaaaattaatgttgtatatcaaacttttaactctcatccctccttattcagatata

SEQ ID NO: 49395 - DNA, 120 bp, Artificial Sequence
  ENSG00000066294_41 (sequence is synthesized)
ttttgttataagcaatgtttgttcccctcgttattataccacagtctacttacctgatgctatatctgcctccccagttagactgagagaacaggggatatacctaaataataataataa

SEQ ID NO: 49396 - DNA, 120 bp, Artificial Sequence
  ENSG00000066294_42 (sequence is synthesized)
taataataataataaataataatggagagctccttgaagatagggagcctgtaagaatcattgagggcttattttgtataccaactgctaaactagatgcttcatacattgttgtcaata

SEQ ID NO: 49397 - DNA, 120 bp, Artificial Sequence
  ENSG00000066294_43 (sequence is synthesized)
ctcatgacagccttgtaaagtagaaattaattcttccagttaacactaaggctgacatatgaataccttggcaaatctggaaagctgggaagacagtatttgaattcaagacttcttgtc

SEQ ID NO: 49398 - DNA, 120 bp, Artificial Sequence
  ENSG00000066294_44 (sequence is synthesized)
accaagggccatgcacttgtactctgccatgtggcccttttttacctcctgtggattctccctacctggtacttggccttaggtgtacacacacctggcactttgcttgacacataatag

SEQ ID NO: 49399 - DNA, 120 bp, Artificial Sequence
  ENSG00000066294_45 (sequence is synthesized)
gtggaccacaaatatctactaaatgaatatttgcatatagtaatattttaaggtactaaaagcagctcaaagtaaatatattaatatattaattccattgctatctggataaccactcaa

SEQ ID NO: 49400 - DNA, 120 bp, Artificial Sequence
  ENSG00000066294_46 (sequence is synthesized)
ctttcctgctgaaaatgcccatttaattaaagaaggttggatagagctctctatatgcattttggacaggcaggggtttcaggtcataaacattctgatgagttaatataaaataagaga

SEQ ID NO: 49401 - DNA, 120 bp, Artificial Sequence
  ENSG00000066294_47 (sequence is synthesized)
aactgtaaatttccactactaaaaatcacaaaaataacagaaacaaaagaagagataagaatttggggaattgtgctgaacaatttagtggttaaaaaaaacaactgtgcatgtttagac

SEQ ID NO: 49402 - DNA, 120 bp, Artificial Sequence
  ENSG00000066294_48 (sequence is synthesized)
ttaaataagcccccatccaagtgtgaggggtccagtaatttttcaaaacatatgaaagtgttaatacatttcgacaaaggaccattaaaaaagtcctgaattctgacttgagggaggaaa

SEQ ID NO: 49403 - DNA, 120 bp, Artificial Sequence
  ENSG00000066294_49 (sequence is synthesized)
gtaatgactaatacattctctagagacttgcagactttgggaattcataaaggaatggatgataattattaactgttgctggctgattgcccagacagttctcaacagccctgtacaagt

SEQ ID NO: 49404 - DNA, 120 bp, Artificial Sequence
  ENSG00000066294_50 (sequence is synthesized)
ctctgggtttgggatggatcaattctgagactggaaaatggccaaatctttgcaaatgagaaatatttttcttataagttcttattgtaggcaaataattacatagattattcatcagag

SEQ ID NO: 49405 - DNA, 120 bp, Artificial Sequence
  ENSG00000066294_51 (sequence is synthesized)
aatttttaaatgctcataatctcaactctttcatttacaacttgtatttccaatagtttatgggtcatctctgcatagatgtcagaagtcacctcaagtttagcgtgtccaaaatctaac

SEQ ID NO: 49406 - DNA, 120 bp, Artificial Sequence
  ENSG00000066294_52 (sequence is synthesized)
tcacaggtctgtttctgacctcccaacttgctttccttgtgtttttcctatgctaatgatccaccataatcaaaataattaacatttatccagtgcctactatgtactattccctgtcct

SEQ ID NO: 49407 - DNA, 120 bp, Artificial Sequence
  ENSG00000066294_53 (sequence is synthesized)
gttttacatttactcatttaaagtccataagaaacattaaatctcatctgccttctgaagaagatacaaccatgctctcttttacaaagtaggaaactgggtcacagaaaggtgaagtct

SEQ ID NO: 49408 - DNA, 120 bp, Artificial Sequence
  ENSG00000066294_54 (sequence is synthesized)
ttaaggctgaatcacagtagctcatcctagtaaatagaaaagccaggattcaactccaggggctgggtgcagaactgctattcttcactgcttcaccaatcagcagctacccaaggcaga

SEQ ID NO: 49409 - DNA, 120 bp, Artificial Sequence
  ENSG00000066294_55 (sequence is synthesized)
aaactttttcatccttggctccttcattctccctgtcaccccagatcccctctacatctagtcagagaataggtcctgtcaattccaacttctctatatggctcctctcaggcatgtgcc

SEQ ID NO: 49410 - DNA, 120 bp, Artificial Sequence
  ENSG00000066294_56 (sequence is synthesized)
cttaattggcctaattctctaatacaccttccctctacatgctcactccctcagatcattgctttatcacgtgttacctgggttgctattacataaagagcaatctttctaaaatgagga

SEQ ID NO: 49411 - DNA, 120 bp, Artificial Sequence
  ENSG00000066294_57 (sequence is synthesized)
tcttatcacttcacttccacactaaaatgtttttcctggggaaccacactccttagcaatctgacccatcagaccttccaggctgtctcctgcctgctccctaaggctccagccacacag

SEQ ID NO: 49412 - DNA, 120 bp, Artificial Sequence
  ENSG00000066294_58 (sequence is synthesized)
aattatcatgggcccacacacccaccaaatcctcccatgcctttgcccatgttgtctgggatgcccttctctcccttctgtctacatcaagcatcagactgaatatccctcttgtgcggc

SEQ ID NO: 49413 - DNA, 120 bp, Artificial Sequence
  ENSG00000066294_59 (sequence is synthesized)
cttctaaaacctcccgtccaaagcgaaatatattgccctctatttatacttttacagcatttggcacacaagtacagagtagtagctttttatcacattctctgataattatatagatat

SEQ ID NO: 49414 - DNA, 120 bp, Artificial Sequence
  ENSG00000066294_60 (sequence is synthesized)
ggtatttcttagctctctctccaactggctaataagttgctttttgtctgagtgcctaattttgtgttttgtgtctgagtgcctcagttcctcaaaaaaaggttttttgattagttcatt

SEQ ID NO: 49415 - DNA, 120 bp, Artificial Sequence
  ENSG00000066294_61 (sequence is synthesized)
attcatttgaacatggaaattatgctcactagtggcaaatgccactaaccgtattccagaagctaggtgtcatgtttgcaataagatatattatcccttctacaagtcaccttttatttc

SEQ ID NO: 49416 - DNA, 120 bp, Artificial Sequence
  ENSG00000066294_62 (sequence is synthesized)
aggcatttgtaaatgcccattaataaagtatggttcataaattttaccttgtaagtgcctaagaaatgagactacaagctccatttcagcaggacacaataaatattattttataatgca

SEQ ID NO: 49417 - DNA, 120 bp, Artificial Sequence
  ENSG00000066294_63 (sequence is synthesized)
ggaggaagaaaactcaagtgaaactgactctgctagaacagtgccgtgcttttccacagaaggttagaccctgaaagagatggctcagcaccacctatggatcttgctcctttgcctgca

SEQ ID NO: 49418 - DNA, 120 bp, Artificial Sequence
  ENSG00000066294_64 (sequence is synthesized)
gaagacaaggtaggattttcccagaaggtaaaatgtggaaactcaccttctctcctcctgggactgaagccatttatccaaggtttagctgaaaggcccattgttccagggaatctgcct

SEQ ID NO: 49419 - DNA, 120 bp, Artificial Sequence
  ENSG00000066294_65 (sequence is synthesized)
ttttccgatctccaccccaccacctcccagaatgatggctctgaggatggtatgacattaccctgaatggtcttcagaatccattcctgagatcaccagtagctggtgggcccagaacat

SEQ ID NO: 49420 - DNA, 120 bp, Artificial Sequence
  ENSG00000066294_66 (sequence is synthesized)
gggttcgagcttagtacatacatgaacaagctgtgcttcactgtacgagtgtgttcacctttccagctcagggccctcacatgtgaaatgtttggactagaggatctccagggtcacttc

SEQ ID NO: 49421 - DNA, 120 bp, Artificial Sequence
  ENSG00000066294_67 (sequence is synthesized)
caatttcattgtattttgattatgactattggagagtcattgagaaacatatactaatcctgtactccatggttgtcactatgtccctctgaatccctctggatcattctgtagttgtgc

SEQ ID NO: 49422 - DNA, 120 bp, Artificial Sequence
  ENSG00000066294_68 (sequence is synthesized)
agtctcagagatcactctgaggagctgcaaggtctgaacgtgggccacattctctagggagatgtgcttcctttatctttggcctggtcactgagggcatcacctcccaagaagcctact

SEQ ID NO: 49423 - DNA, 120 bp, Artificial Sequence
  ENSG00000066294_69 (sequence is synthesized)
gttaaaaaactaagaccgtgacatggaaagtcaactagccatgcaagacagtcagtggtaagtgtcagaaacatgaagggagatcctgggtagaagagctacatttgactggccacacag

SEQ ID NO: 49424 - DNA, 120 bp, Artificial Sequence
  ENSG00000066294_70 (sequence is synthesized)
ggaggggttggggaaattgtctttggcctaatctggactctagagtagaagagaattcccattgacctgtgggtgaggcctcagccaagtgactcctgagacattctgaggatccaagca

SEQ ID NO: 49425 - DNA, 120 bp, Artificial Sequence
  ENSG00000066294_71 (sequence is synthesized)
tccatttcaaaggatggcagccatttaatccctgggggcttcctttcttcatcttaaaaagagaacattggaatagatcattgctaaaaaaaccacctttcacagactgtgggtctatat

SEQ ID NO: 49426 - DNA, 120 bp, Artificial Sequence
  ENSG00000066322_0 (sequence is synthesized)
agatgaggaagtggcaggcaggcaggctggccccggggacttctctctggccctgctccctccgagcgctccgccgttgcccgcctggcccctacggagtccttagccaggatggaggct

SEQ ID NO: 49427 - DNA, 120 bp, Artificial Sequence
  ENSG00000066322_1 (sequence is synthesized)
gttgtgaacttgtaccaagaggtgatgaagcacgcagatccccggatccagggctaccctctgatggggtcccccttgctaatgacctccattctcctgacctacgtgtacttcgttctc

SEQ ID NO: 49428 - DNA, 120 bp, Artificial Sequence
  ENSG00000066322_2 (sequence is synthesized)
tcacttgggcctcgcatcatggctaatcggaagcccttccagctccgtggcttcatgattgtctacaacttctcactggtggcactctccctctacattgtctatgagttcctgatgtcg

SEQ ID NO: 49429 - DNA, 120 bp, Artificial Sequence
  ENSG00000066322_3 (sequence is synthesized)
ggctggctgagcacctatacctggcgctgtgaccctgtggactattccaacagccctgaggcacttaggatggttcgggtggcctggctcttcctcttctccaagttcattgagctgatg

SEQ ID NO: 49430 - DNA, 120 bp, Artificial Sequence
  ENSG00000066322_4 (sequence is synthesized)
gacacagtgatctttattctccgaaagaaagacgggcaggtgaccttcctacatgtcttccatcactctgtgcttccctggagctggtggtggggggtaaagattgccccgggaggaatg

SEQ ID NO: 49431 - DNA, 120 bp, Artificial Sequence
  ENSG00000066322_5 (sequence is synthesized)
ggctctttccatgccatgataaactcttccgtgcatgtcataatgtacctgtactacggattatctgcctttggccctgtggcacaaccctacctttggtggaaaaagcacatgacagcc

SEQ ID NO: 49432 - DNA, 120 bp, Artificial Sequence
  ENSG00000066322_6 (sequence is synthesized)
ctcactgcacatctcccagtactactttatgtccagctgtaactaccagtacccagtcattattcacctcatctggatgtatggcaccatcttcttcatgctgttctccaacttctggta

SEQ ID NO: 49433 - DNA, 120 bp, Artificial Sequence
  ENSG00000066322_7 (sequence is synthesized)
tcactcttataccaagggcaagcggctgccccgtgcacttcagcaaaatggagctccaggtattgccaaggtcaaggccaactgagaagcatggcctagataggcgcccacctaagtgcc

SEQ ID NO: 49434 - DNA, 120 bp, Artificial Sequence
  ENSG00000066322_8 (sequence is synthesized)
tcaggactgcaccttagggcagtgtccgtcagtgccctctccacctacacctgtgaccaaggcttatgtggtcaggactgagcaggggactggccctcccctccccacagctgctctaca

SEQ ID NO: 49435 - DNA, 120 bp, Artificial Sequence
  ENSG00000066322_9 (sequence is synthesized)
gggaccacggctttggttcctcacccacttcccccgggcagctccagggatgtggcctcattgctgtctgccactccagagctgggggctaaaagggctgtacagttatttccccctccc

SEQ ID NO: 49436 - DNA, 120 bp, Artificial Sequence
  ENSG00000066322_10 (sequence is synthesized)
tgccttaaaacttgggagaggagcactcagggctggccccacaaagggtctcgtggcctttttcctcacacagaagaggtcagcaataatgtcactgtggacccagtctcactcctccac

SEQ ID NO: 49437 - DNA, 120 bp, Artificial Sequence
  ENSG00000066322_11 (sequence is synthesized)
cccacacactgaagcagtagcttctgggccaaaggtcagggtgggcgggggcctgggaatacagcctgtggaggctgcttactcaacttgtgtcttaattaaaagtgacagaggaaacca

SEQ ID NO: 49438 - DNA, 120 bp, Artificial Sequence
  ENSG00000066322_12 (sequence is synthesized)
ccccacacccccgtctctggcccccatttgcctacacccgggccttcctccaccacccctgcatttacctctctccctcctcctctcccctccctccccccgctaccctaactttgccag

SEQ ID NO: 49439 - DNA, 120 bp, Artificial Sequence
  ENSG00000066322_13 (sequence is synthesized)
gcaccttttcccttccatccatcttaaaggaaggaagggacgggctgagttccccgacgagagacacacccagattttcctgcagcttggggagaggtcctcccaggagccttggtccct

SEQ ID NO: 49440 - DNA, 120 bp, Artificial Sequence
  ENSG00000066322_14 (sequence is synthesized)
ggtggagaagcccaggttctgaatccccttccctcactcttctctcaggtgatctttattctccgaaagaaagacgggcaggtgaccttcctacatgtcttccatcactctgtgcttccc

SEQ ID NO: 49441 - DNA, 120 bp, Artificial Sequence
  ENSG00000066322_15 (sequence is synthesized)
ggaacctgtgttggcgccctcgccccggcctgggccctgccggcgatgggcggccagcaagcccgatggtgggggagcaatacagcaggggcgggcagagggcggggctgctgccagatc

SEQ ID NO: 49442 - DNA, 120 bp, Artificial Sequence
  ENSG00000066322_16 (sequence is synthesized)
tagtcagacaggtggagccgccggggcaggagtctcaaagagccaggctccaggagaggaagggctctgcgagaggagagaggagagcgctggagaggagaggctggagagtccttagcc

SEQ ID NO: 49443 - DNA, 120 bp, Artificial Sequence
  ENSG00000066322_17 (sequence is synthesized)
ggcaggcaggcaggctggccccggggacttctctctggccctgctccctccgagcgctccgccgttgcccgcctggcccctacggcaggggcgggcagagggcggggctgctgccagatc

SEQ ID NO: 49444 - DNA, 120 bp, Artificial Sequence
  ENSG00000066322_18 (sequence is synthesized)
ggtcagaggaggtttctggctcagaatctaggaccttagctcatcaggctggtcccacgtgggtgggtgggtggcgagtctggggctttacttggctttcccaatcctggtgggtcctgc

SEQ ID NO: 49445 - DNA, 120 bp, Artificial Sequence
  ENSG00000066336_0 (sequence is synthesized)
gactatctcccagcggcaggcccttcgataaaatcaggaacttgtgctggccctgcaatgtcaagggagggggctcacccagggctcctgtagctcagggggcaggcctgagccctgcac

SEQ ID NO: 49446 - DNA, 120 bp, Artificial Sequence
  ENSG00000066336_1 (sequence is synthesized)
ccgccccacgaccgtccagcccctgacggggcaccccatcctgaggggctctgcattggcccccaccgaggcaggggatctgaccgactcggagcccggctggatgttacaggcgtgcaa

SEQ ID NO: 49447 - DNA, 120 bp, Artificial Sequence
  ENSG00000066336_2 (sequence is synthesized)
aatggaagggtttcccctcgtcccccctccatcagaagacctggtgccctatgacacggatctataccaacgccaaacgcacgagtattacccctatctcagcagtgatggggagagcca

SEQ ID NO: 49448 - DNA, 120 bp, Artificial Sequence
  ENSG00000066336_3 (sequence is synthesized)
tagcgaccattactgggacttccacccccaccacgtgcacagcgagttcgagagcttcgccgagaacaacttcacggagctccagagcgtgcagcccccgcagctgcagcagctctaccg

SEQ ID NO: 49449 - DNA, 120 bp, Artificial Sequence
  ENSG00000066336_4 (sequence is synthesized)
ccacatggagctggagcagatgcacgtcctcgatacccccatggtgccaccccatcccagtcttggccaccaggtctcctacctgccccggatgtgcctccagtacccatccctgtcccc

SEQ ID NO: 49450 - DNA, 120 bp, Artificial Sequence
  ENSG00000066336_5 (sequence is synthesized)
agcccgggcctgggctcctgcctggggagacaggcagcaagaagaagatccgcctgtaccagttcctgttggacctgctccgcagcggcgacatgaaggacagcatctggtgggtggaca

SEQ ID NO: 49451 - DNA, 120 bp, Artificial Sequence
  ENSG00000066336_6 (sequence is synthesized)
aggacaagggcaccttccagttctcgtccaagcacaaggaggcgctggcgcaccgctggggcatccagaagggcaaccgcaagaagatgacctaccagaagatggcgcgcgcgctgcgca

SEQ ID NO: 49452 - DNA, 120 bp, Artificial Sequence
  ENSG00000066336_7 (sequence is synthesized)
actacggcaagacgggcgaggtcaagaaggtgaagaagaagctcacctaccagttcagcggcgaagtgctgggccgcgggggcctggccgagcggcgccacccgccccactgagcccgca

SEQ ID NO: 49453 - DNA, 120 bp, Artificial Sequence
  ENSG00000066336_8 (sequence is synthesized)
cgggccccgccaggcctccccgctggccatagcattaagccctcgcccggcccggacacagggaggacgctcccggggcccagaggcaggactgtggcgggccgggcctcgcctcacccg

SEQ ID NO: 49454 - DNA, 120 bp, Artificial Sequence
  ENSG00000066336_9 (sequence is synthesized)
ctcacccgccccctccccccactccaggccccctccacatcccgcttcgcctccctccaggactccaccccggctcccggacgccagctgggcgtcagaccccaccggggcaaccttgca

SEQ ID NO: 49455 - DNA, 120 bp, Artificial Sequence
  ENSG00000066336_10 (sequence is synthesized)
gaggacgacccggggtactgccttgggagtctcaagtccgtatgtaaatcagatctcccctctcacccctcccacccattaacctcctcccaaaaaacaagtaaagttattctcaatcca

SEQ ID NO: 49456 - DNA, 120 bp, Artificial Sequence
  ENSG00000066336_11 (sequence is synthesized)
agccaggccaactgacccagcagccacgccaccgagtcgcgtgtgtgtgtgtgtgcatgtttgccagtgtgtgtgttttgtggggctgtctgtggctgtctctgtgtgtgtgtatctgct

SEQ ID NO: 49457 - DNA, 120 bp, Artificial Sequence
  ENSG00000066336_12 (sequence is synthesized)
gtgtagtgcatacgggcatctccatgaagtgtgccaggtgtgtgtgtctctctgtgccatgagtgtgtgtacatctgggtgtgtgtgagcaagtgtgcagagggtgcgtgtgcacaggta

SEQ ID NO: 49458 - DNA, 120 bp, Artificial Sequence
  ENSG00000066336_13 (sequence is synthesized)
cgggcaggtgcatgtgtgcgagtggctgtgtgagtgggtgtgtgagaaggtgaatgtgagagctggtgtggctgagagtgggtgtggccatgtttgtgtgtctgtcaacacatgaatgta

SEQ ID NO: 49459 - DNA, 120 bp, Artificial Sequence
  ENSG00000066336_14 (sequence is synthesized)
tttcagtgcgtgtgagcagctgtgcacgtatgatgtcagtgggtgtcagcagtgtgtgggtgtgcctgtgtgagcagggatgtgagcatggtatatgtgagtggctgtaagcaggcatgt

SEQ ID NO: 49460 - DNA, 120 bp, Artificial Sequence
  ENSG00000066336_15 (sequence is synthesized)
gtgagtgatatgtgtgagtgggggtgtgacagcaggtgtgtgagcaagtgtatatgtgtgaatgtgtatgtaagcagggatgtgtgtgatataagtgtgtgtgaatgggcataggtgtgt

SEQ ID NO: 49461 - DNA, 120 bp, Artificial Sequence
  ENSG00000066379_0 (sequence is synthesized)
agagctggcgctctagcccacggagttggttaactcctctcaccggcccctggaaagggttccaagtcctttagtacccgacgctgtctgggaattccgggcgtttcggctccttggtcg

SEQ ID NO: 49462 - DNA, 120 bp, Artificial Sequence
  ENSG00000066379_1 (sequence is synthesized)
cagaggcaggaggcgtgcgtggcaggagggttcgggttatatactcctaggtcctgggacagaatagttacgacctctgggacaggaactcttctctcttttgttaataaacttccaact

SEQ ID NO: 49463 - DNA, 120 bp, Artificial Sequence
  ENSG00000066379_2 (sequence is synthesized)
ccctcctcagacccgaccgcatgtctgtcatggacctcgccaatacttgctccagctttcagtcggacctggatttctgttcagattgcggctcggtcctgcctctgcccggggctcagg

SEQ ID NO: 49464 - DNA, 120 bp, Artificial Sequence
  ENSG00000066379_3 (sequence is synthesized)
tgtattcgctgtggcttcaacatcaacgttcgggactttgaggggaaggttgtgaagacttcggttgtgttccaccaactggggacagccatgcctatgtcggtggaggaagggcctgag

SEQ ID NO: 49465 - DNA, 120 bp, Artificial Sequence
  ENSG00000066379_4 (sequence is synthesized)
tgccagggacctgtggttgacaggcgctgccctcgatgtggtcatgaaggaatggcataccacaccagacagatgcgttcagccgatgaagggcaaactgtcttctacacctgtaccaac

SEQ ID NO: 49466 - DNA, 120 bp, Artificial Sequence
  ENSG00000066379_5 (sequence is synthesized)
tgcaagttccaggagaaggaagactcttgacctttttcctgggcaactctacagtccctccctcctttcggaaggtgaaggatactgggtttttagatgccttgtccatcctgtctggtt

SEQ ID NO: 49467 - DNA, 120 bp, Artificial Sequence
  ENSG00000066379_6 (sequence is synthesized)
gcaatgttttgctcccagaagagaatcagatcatcatgtggggattaccattgttcctggagtactcctacccttagttgaatttccttattaaagttatatttttctataagaccctga

SEQ ID NO: 49468 - DNA, 120 bp, Artificial Sequence
  ENSG00000066379_7 (sequence is synthesized)
gtcttttataccatttagagttcaaaggatggtctttacagtctgacagagctagatctgaaatctaattctaccacttcctaggtgtgtgactcagggcaagtaacttctgtcagcttt

SEQ ID NO: 49469 - DNA, 120 bp, Artificial Sequence
  ENSG00000066379_8 (sequence is synthesized)
ctcatctataaaatggagatgtaagacaaaaatctgcctctcagggttataaagaacaaatatgaattagatgtaaagagcttggtaagttctcaataaattctatctatctgtccttca

SEQ ID NO: 49470 - DNA, 120 bp, Artificial Sequence
  ENSG00000066379_9 (sequence is synthesized)
caggtcaagctcctgattataaagtctttccagtctactctgtcagtgatcttcccttcctctaaatacttgacatattttaattctacaactcatttgaaaattaatcgtggtttacac

SEQ ID NO: 49471 - DNA, 120 bp, Artificial Sequence
  ENSG00000066379_10 (sequence is synthesized)
tgtgatatctgtattcacatatcacttttaacattttgatgctgaaatttaggctcataaggaatgaaaactgtaatttatatctacaaatatgatgcctctatattgttggaaaggatc

SEQ ID NO: 49472 - DNA, 120 bp, Artificial Sequence
  ENSG00000066379_11 (sequence is synthesized)
tgatatcaaatatttggtctcactgacctcttaggaacattcttatttgtctacgtaagcttattttgagattgtaaacgtatgatcatcttacttttacttctctgtacatggcttcta

SEQ ID NO: 49473 - DNA, 120 bp, Artificial Sequence
  ENSG00000066379_12 (sequence is synthesized)
gcacaatacttaacattagagtctgtgatcccaagttctcaaaattaatgatttgctgattgctgatgatccttgacacataatatctgagcatcttttttaaatatctgccataacatt

SEQ ID NO: 49474 - DNA, 120 bp, Artificial Sequence
  ENSG00000066379_13 (sequence is synthesized)
gtatctatttttattaagccatttcccagtcttccttgaagtttacagatatgtttcctttatatgcatgttctgggctctcacattttgtacctactagcacagttttattatattcta

SEQ ID NO: 49475 - DNA, 120 bp, Artificial Sequence
  ENSG00000066379_14 (sequence is synthesized)
attattcattcatgttccttgaggtcagagaacacagatttcaactttgcaggctcagcctcagctcaaaacctggcatagttgctcaataaatctttactgattagactgtgagctttt

SEQ ID NO: 49476 - DNA, 120 bp, Artificial Sequence
  ENSG00000066379_15 (sequence is synthesized)
gttgggaaaaggatatgccttttaatgctttgttcctttactgcaattcacaggggatgttggctgtttttcaaattaaaaacagaaaactgaggagggtagaatttcaagttccatttt

SEQ ID NO: 49477 - DNA, 120 bp, Artificial Sequence
  ENSG00000066379_16 (sequence is synthesized)
caaaggagacacacagataagtgagaataaaaactgtctacgacaatcagctcaacaacacgtctccctttgtaagacagaataacaagcaatttcacagttaaatgatagggcttgtca

SEQ ID NO: 49478 - DNA, 120 bp, Artificial Sequence
  ENSG00000066379_17 (sequence is synthesized)
ctcttcagcagtttgctgagttttaaccctttcactatggcgttctctccattattacagagaaaggcagatgggagcctctcccagcgaaaagactacagcttgtgtccttcataggag

SEQ ID NO: 49479 - DNA, 120 bp, Artificial Sequence
  ENSG00000066379_18 (sequence is synthesized)
aaaacagtgatggctccagaacttttatatgaatgaacttagcacagctatcagagtggatggtggtgggagggctagcaggaaactagtaaacaactacaagctgccccttcagggaaa

SEQ ID NO: 49480 - DNA, 120 bp, Artificial Sequence
  ENSG00000066379_19 (sequence is synthesized)
gtttctacttggaatataagttacagattaatgaaaatagaaagatttcccaaagatacttattctcatgttttataaaagatcagggaaatgtcagctgtccacttaacggatgacata

SEQ ID NO: 49481 - DNA, 120 bp, Artificial Sequence
  ENSG00000066379_20 (sequence is synthesized)
atgaattaagagttcgataggcggcaggcacaactaaaagccaaactcgacctaagtcttatgaaatcctacttaatgagctttcttgactactgctagcctcacttatctggcaggagt

SEQ ID NO: 49482 - DNA, 120 bp, Artificial Sequence
  ENSG00000066379_21 (sequence is synthesized)
cgaaggagaggaagccccaagctcctctgttccaccacctccaaagtcctgaaccccttctcaagtgtaccacttcatccctgcttcctttcgtcccgtgggactaagcattcctcgggc

SEQ ID NO: 49483 - DNA, 120 bp, Artificial Sequence
  ENSG00000066379_22 (sequence is synthesized)
agcacgaggccggttgcgagctgcagaaagcccacgctcgccagcgggacccaaggaacgctagaactatacgtcccagaacacttagctttgtttttaactacggtgcagccgcaaaag

SEQ ID NO: 49484 - DNA, 120 bp, Artificial Sequence
  ENSG00000066379_23 (sequence is synthesized)
ggaaataccggctcaggacccaggggagttgtagttctctaatccaaagaaatcattatttggcaacgtacggttttcagggggatataccccgcgactgcgttcctgtaggatgtgaga

SEQ ID NO: 49485 - DNA, 120 bp, Artificial Sequence
  ENSG00000066379_24 (sequence is synthesized)
caaagagaataaatatcccaggattgggtgctggtgggaaaatttgctggaagcgcagcattggttaccaattttgtgctcaacctctcagtaccagggtgaaagtggagacgcaatctc

SEQ ID NO: 49486 - DNA, 120 bp, Artificial Sequence
  ENSG00000066379_25 (sequence is synthesized)
ccttggaagacgttagtctccatctctaacgctcccgagacacggttcgcaattaattatgacgtcacagccaatcgtcaacgcgaaagcctgacgctctagccggctctatctcgctgc

SEQ ID NO: 49487 - DNA, 120 bp, Artificial Sequence
  ENSG00000066379_26 (sequence is synthesized)
aagatcggttgggttgaggaggggatcctagagcaggacatcaggcggttgtacatttggtctagcgatgaaaactgagggaaaggatgtagggcctcctggcctaaccagccaggggaa

SEQ ID NO: 49488 - DNA, 120 bp, Artificial Sequence
  ENSG00000066379_27 (sequence is synthesized)
aggggaggtttccggtgtcagctctctctggttgtctccataaccagttcttacttgcctgtgcagactttgaggggaaggttgtgaagacttcggttgtgttccaccaactggggacag

SEQ ID NO: 49489 - DNA, 120 bp, Artificial Sequence
  ENSG00000066379_28 (sequence is synthesized)
ccatgcctatgtcggtggaggaagggcctgagtgccagggacctgtggtaagctaatgagatcaagaactggctccataaggtgggtaggaaagaaatggaggagtgattgcaaagctct

SEQ ID NO: 49490 - DNA, 120 bp, Artificial Sequence
  ENSG00000066379_29 (sequence is synthesized)
ggagagttttgtgcccaattccaagagggaaaagagatgtaaaccatcgacgtttgagaggcgtgatcgcctgattcctgtgggaagtaaggggatatgaccaggcctccctaacccacc

SEQ ID NO: 49491 - DNA, 120 bp, Artificial Sequence
  ENSG00000066382_0 (sequence is synthesized)
agaaatgcacagcggtattgatgagtagatccttggattcagaggttggctgaaacgcaccatgcctgcttccatcttttgctctgtaaagttgtgaattgctcatgcctatagggagga

SEQ ID NO: 49492 - DNA, 120 bp, Artificial Sequence
  ENSG00000066382_1 (sequence is synthesized)
aggatggcacatgggattccttctcaaggcaaagttaccataacggtggatgagtacagctcaaaccccacccaggcattcacgcactacaacatcaaccagagcagattccagcctcca

SEQ ID NO: 49493 - DNA, 120 bp, Artificial Sequence
  ENSG00000066382_2 (sequence is synthesized)
catgtacatatggtcgaccccatcccatatgacactccaaaaccagcgggccacacgcggtttgtctgcatctcagacacacactccagaacagatggtatccagatgccttatggggac

SEQ ID NO: 49494 - DNA, 120 bp, Artificial Sequence
  ENSG00000066382_3 (sequence is synthesized)
atccttctccacacaggcgatttcaccgagctgggactgccctcagaggttaagaagtttaatgactggttaggaaacctgccatatgaatataaaatagtgattgctgggaatcatgaa

SEQ ID NO: 49495 - DNA, 120 bp, Artificial Sequence
  ENSG00000066382_4 (sequence is synthesized)
ctgacatttgataaggaattcatggcagaccttgttaaacaggactactaccgtttcccctctgtgtccaaattgaaaccagaggactttgacaatgttcagtccctcctgacaaacagt

SEQ ID NO: 49496 - DNA, 120 bp, Artificial Sequence
  ENSG00000066382_5 (sequence is synthesized)
atttacttacaagattcggaggtaacagtgaagggattcaggatatacggtgcaccttggaccccgtggtttaatggatggggctttaacctacccagaggtcagtctctgctggacaag

SEQ ID NO: 49497 - DNA, 120 bp, Artificial Sequence
  ENSG00000066382_6 (sequence is synthesized)
tggaacctcatccctgagggcattgacatactcatgacacatggacctcctctaggttttcgagactgggttccaaaggagcttcaaagagtgggctgtgtggagctgttaaacacggtt

SEQ ID NO: 49498 - DNA, 120 bp, Artificial Sequence
  ENSG00000066382_7 (sequence is synthesized)
cagaggcgagtccggcccaagctccatgtgtttggtggaatccatgaaggttatggcatcatgaccgacggttacacaacgtacatcaatgcctcgacgtgtacagtcagctttcaaccg

SEQ ID NO: 49499 - DNA, 120 bp, Artificial Sequence
  ENSG00000066382_8 (sequence is synthesized)
accaaccctccaattatatttgaccttccaaacccacagggttcctgaagctctaaatgccctattggaatgtgagggaaggtctataaactgccatttttctaattataaacttacatt

SEQ ID NO: 49500 - DNA, 120 bp, Artificial Sequence
  ENSG00000066382_9 (sequence is synthesized)
ctcttacttatttacaaaccctgtgagttctttttgtaaattgttggaacacaaatgatgctagaggttgtgcttcttattttattttattttaaatggggcatccatttgaaatcagag

SEQ ID NO: 49501 - DNA, 120 bp, Artificial Sequence
  ENSG00000066382_10 (sequence is synthesized)
ttgtgaatttgtaaaatgacttctgttttctcaaaggccatgccattgtaaattgttagtgttcgccaaaggacagccaagctttcttttaaaaagtgataaaagtcttattttaatatg

SEQ ID NO: 49502 - DNA, 120 bp, Artificial Sequence
  ENSG00000066382_11 (sequence is synthesized)
ctttaagctgaaagaaaaaaaaataagaaacaggcagtgttttaaaaaccaacacagatttgcacaactgtttaagagtattgtttgaaatattttaattttcaatgttttgttgttgtt

SEQ ID NO: 49503 - DNA, 120 bp, Artificial Sequence
  ENSG00000066382_12 (sequence is synthesized)
gttttcttggtaatgcttcttttttgcagatgtggtcccaatttatagcaatcttctcaacagaagtaggcatggaaaagacttcttttcatactctcactataaagaaagctgcattga

SEQ ID NO: 49504 - DNA, 120 bp, Artificial Sequence
  ENSG00000066382_13 (sequence is synthesized)
gaagaaaatggctgtcatttaaaggatggtttaactagtgagattcctattgtggttatacaaggtctcattgtttgtttgtttcttttaaattatttcagctttaaaaatacagaaatg

SEQ ID NO: 49505 - DNA, 120 bp, Artificial Sequence
  ENSG00000066382_14 (sequence is synthesized)
gaatctgtcaagagcaggtatttcatacggttaaaaaaatgaacatgcagactccttttcaatatgggtttatatatataagtattttttgtgtattatgactacgttaggagtttatta

SEQ ID NO: 49506 - DNA, 120 bp, Artificial Sequence
  ENSG00000066382_15 (sequence is synthesized)
ttgtcaaggacagtacaactgcaaagggatgctgtatagcaacacatcagaagtcggaaggaactgacacattctctcagagctcaaggtcttaaagagcttgagttaaatctaggtaca

SEQ ID NO: 49507 - DNA, 120 bp, Artificial Sequence
  ENSG00000066382_16 (sequence is synthesized)
gttacaggcatgtatagacttaaatggatgcaatggaagctaactaaaataaggcttagttgtcctttctatttaaataccccaagttgtcttcttacttcctctcccctctcccatttt

SEQ ID NO: 49508 - DNA, 120 bp, Artificial Sequence
  ENSG00000066382_17 (sequence is synthesized)
gcactgtgtgtcgatgcaatcttcgctagcacaaaatattgtcgctaatagtcatttctgttttcccattgtaaatgctgttgagctttattctattttatgttactttgttaatgaaat

SEQ ID NO: 49509 - DNA, 120 bp, Artificial Sequence
  ENSG00000066382_18 (sequence is synthesized)
ttaggaaagcagttgtttctttaaatttattgtgatattctatatctagcggcctttatatgcaaataaaattgcaagatttttaaattcgtgctgtttagagggttggatggtggagga

SEQ ID NO: 49510 - DNA, 120 bp, Artificial Sequence
  ENSG00000066382_19 (sequence is synthesized)
tggtagtttcgtcctggggaaggagggatttattcatatgcaacatcagtaatgcctttcagaagaattagaataagtgatttttttccctaattttcaataaatttttattacccacca

SEQ ID NO: 49511 - DNA, 120 bp, Artificial Sequence
  ENSG00000066382_20 (sequence is synthesized)
agatcagcagatgggagggaacctagggtcgccttcctaggtctgagcgaagtgtcccagccgctccccttacccctgcggtgagccctgcgtcctggaacggtgccaggactcctgaca

SEQ ID NO: 49512 - DNA, 120 bp, Artificial Sequence
  ENSG00000066382_21 (sequence is synthesized)
gctcagtaccaagaaaacacagctcagatttagatgctttaaatgaaaatgattaggatgaaaggaaaccttattgctgtatttccaacaaaatacatactgtactgctgcaaaatgcaa

SEQ ID NO: 49513 - DNA, 120 bp, Artificial Sequence
  ENSG00000066382_22 (sequence is synthesized)
aggaaatgggaatcgttttacggctccctcctacttcccacatttctttgaggccgaattaattggtgtgattccattctcaatttaagaaatcaaggttaaatgacttgcccacaattg

SEQ ID NO: 49514 - DNA, 120 bp, Artificial Sequence
  ENSG00000066382_23 (sequence is synthesized)
cattgagctggaactagggcataggtctgctgtctccagatctccagctgacttcccaccgcagcctgtcagtcagtgaaattaatctgcagtcattcgcagacacctgaaaatgtcccc

SEQ ID NO: 49515 - DNA, 120 bp, Artificial Sequence
  ENSG00000066382_24 (sequence is synthesized)
tcccacccctcaaattgcataataatgagtcctacagcagaaaacagttgtattctttcaaaagtttctctaatgtttttgaaatacacaaggaaatagtaaaagttaagtgaacatttg

SEQ ID NO: 49516 - DNA, 120 bp, Artificial Sequence
  ENSG00000066382_25 (sequence is synthesized)
cccagatcgaggctgctcgggtcctttctccccccgcctccctctagcgccgcgccccctggcccccagccccagcctgcggcgggacctccggggtcgaaggttctggcccgctcgcgc

SEQ ID NO: 49517 - DNA, 120 bp, Artificial Sequence
  ENSG00000066382_26 (sequence is synthesized)
gaggcgagtccggcccaagctccatgtgtttggtggaatccatgaagtaaaccctgtgagcatctccaaggcactgaggacaaaaatatgttctctgccttcaaaaacttcctagtctag

SEQ ID NO: 49518 - DNA, 120 bp, Artificial Sequence
  ENSG00000066382_27 (sequence is synthesized)
aggaaactggcatagacacaattaattgatgatctgatgaattagcattgtgtgagctacaatcctggcatgaatcaagaactagagaggcacacaggaaggaaggaagatgcctctcct

SEQ ID NO: 49519 - DNA, 120 bp, Artificial Sequence
  ENSG00000066382_28 (sequence is synthesized)
tggtgaagacaaagaaggcatgaggaggaggcgacagggaagctcacctggtggacaacaggaaagactgcggaggagggctctgctggaagaggaaacagactggggaggtggggccag

SEQ ID NO: 49520 - DNA, 120 bp, Artificial Sequence
  ENSG00000066382_29 (sequence is synthesized)
tgcataaagggccactgcaggaaggggttgtaggagaaaaggaaagacagatcagtcactgatgaccccctccaccccaggtctgcagacagagctgattccttctctaagcctcggcat

SEQ ID NO: 49521 - DNA, 120 bp, Artificial Sequence
  ENSG00000066382_30 (sequence is synthesized)
cccctaccaacagtccctcctgctccttctctcccaagtcctctaaacagcttcatgcccaaaccacaaagagaacattctcaggcctaaggcaggccttcccagcacagaatgtttgga

SEQ ID NO: 49522 - DNA, 120 bp, Artificial Sequence
  ENSG00000066382_31 (sequence is synthesized)
gccctctgtgggagagcggctggcccccttaactgtcccccttccctccgggagccaaggcaggcactgtgcacctgcccctgaattgtgtgcggcagttgccggcctggagctgagtga

SEQ ID NO: 49523 - DNA, 120 bp, Artificial Sequence
  ENSG00000066382_32 (sequence is synthesized)
cacagcaggtgcctccagcctgaagacaattccatatttcaatggagcgtcgccaccaaagcttattatctagggcaataaagtttaggattagggggattcaggatgattgtgtgattc

SEQ ID NO: 49524 - DNA, 120 bp, Artificial Sequence
  ENSG00000066382_33 (sequence is synthesized)
tccacaaagcttatcttctaatagaccagctgctttattaggccgcccccacccgcaccaggcccttcccaaagcatcccaagtcccaggcagccgacgggggccttgaaggcggcagtg

SEQ ID NO: 49525 - DNA, 120 bp, Artificial Sequence
  ENSG00000066382_34 (sequence is synthesized)
gtagacagctgggggtatcatatcaccctcagtctccatctgcgattattaaattacgggcggcttccagctgggcacaccccagctcccaccttcctcctacaaagccagcatcatcgt

SEQ ID NO: 49526 - DNA, 120 bp, Artificial Sequence
  ENSG00000066382_35 (sequence is synthesized)
caggcatctgccaaggacacgatgtggctgcctctcccctgctgatccctactgttgaactctaaaagggccaggtctgggtatttacttgctattagggctgtcactgtcacagtgtgg

SEQ ID NO: 49527 - DNA, 120 bp, Artificial Sequence
  ENSG00000066382_36 (sequence is synthesized)
aatgcagtggagtggaggcctggagagagggggggaccatggaaatttctgttgcaaatggggctttgctgggactgttcactataaacaaaaaaagaagatggaatcatgcaccacaga

SEQ ID NO: 49528 - DNA, 120 bp, Artificial Sequence
  ENSG00000066382_37 (sequence is synthesized)
acctcaaagaagctggcatgcttaccaagctcccacatatttctcccaaaatgaaattcattaacgttgagtgttctagggaccacctccacatgctccctgatcccattgctccgttcc

SEQ ID NO: 49529 - DNA, 120 bp, Artificial Sequence
  ENSG00000066382_38 (sequence is synthesized)
ttttctgatgggagcagagcatgggatggtgtctctccaaccccgtgtggtcagcagcactgaggctactctcgtttcctatccctccctgacagtctcctttatcctcagcccctgaca

SEQ ID NO: 49530 - DNA, 120 bp, Artificial Sequence
  ENSG00000066382_39 (sequence is synthesized)
gactatctgttcagagtaggaatttatcaataagtactgataagcatgctgaaaggaatatgggggactgggaatatgcctgaaacataatgaatgtttcaaagaaatgaaacgttctga

SEQ ID NO: 49531 - DNA, 120 bp, Artificial Sequence
  ENSG00000066382_40 (sequence is synthesized)
aattattcagagttcacatttcagccatggggatgttgtgtgcctgttgacagcagaggtccctgtagacgtttgttttttactgtgtctatgtgtgattcactaatgagagagtggctt

SEQ ID NO: 49532 - DNA, 120 bp, Artificial Sequence
  ENSG00000066382_41 (sequence is synthesized)
agatgctcagagtaattaattgtagtattgagataatagtggctttgaaatccagctgtgcttatatgcgtgcacgctgtgcagttagatgctcccaggttcagatctgcttccatcact

SEQ ID NO: 49533 - DNA, 120 bp, Artificial Sequence
  ENSG00000066382_42 (sequence is synthesized)
actaactatgtggccttgttttctgatctgcaagccatggattgtattgcttactttgcgggactgtggtaaacgttaggcatatatgaggcaagtgcaatgcccaacatttggcagatg

SEQ ID NO: 49534 - DNA, 120 bp, Artificial Sequence
  ENSG00000066382_43 (sequence is synthesized)
cttaataagtgttggctattattattactactactactactattgcttttgctattgctattatgtgtgacctgtataataatcctactaatatgagtgaaggcaagaatcatggactat

SEQ ID NO: 49535 - DNA, 120 bp, Artificial Sequence
  ENSG00000066382_44 (sequence is synthesized)
gcacccagcataatcaggagggtttgactgttgtgaatgaattcaagggcaggacaagcagcgacaagagttactgaagttcatctgatttgagttctgttcattcatttatttgggatc

SEQ ID NO: 49536 - DNA, 120 bp, Artificial Sequence
  ENSG00000066382_45 (sequence is synthesized)
caaattctgaaccccagctctgtgctagacactgttctaggtgctgggaaaacagtcatgtgttagtctgtttttgctgccataaaggaatccctgagactgggtattttataaagaaaa

SEQ ID NO: 49537 - DNA, 120 bp, Artificial Sequence
  ENSG00000066382_46 (sequence is synthesized)
gaggtttatttaaatcacagttctgcaagcctaacacctggtggaagctgccaaggcttacagcttataccctctcaagcagcaccctaatctataccttgagccaagactggaattgga

SEQ ID NO: 49538 - DNA, 120 bp, Artificial Sequence
  ENSG00000066382_47 (sequence is synthesized)
gctgccatgatgcaggaagcagtgtcccaaggatgtgcagagcagtggggtcctgaatgtggccccccaaaccattcttttctcctaggcctctaggcctgtgatgggggggtggccttg

SEQ ID NO: 49539 - DNA, 120 bp, Artificial Sequence
  ENSG00000066382_48 (sequence is synthesized)
cttcaaggcctttttcccattgtcttggttattagcacttggctcccctttagccatgctaatctgtctagcaagtggttgctccacagcctgctcatatttcactcctgaaaatgttct

SEQ ID NO: 49540 - DNA, 88 bp, Artificial Sequence
  ENSG00000066382_49 (sequence is synthesized)
tgtctagcaagtggttgctccacagcctgctcatatttcactcctgaaaatgttctttccttctccaccacacaaccagtttgtgtta

SEQ ID NO: 49541 - DNA, 120 bp, Artificial Sequence
  ENSG00000066382_50 (sequence is synthesized)
gcaaatggactaacagaagcaatgaataagaaggggtcctggcccctctacaactcatcttctattgagaaagaaagaagaaaaaatgaaaataagttaaaaaaactcaaattttgataa

SEQ ID NO: 49542 - DNA, 120 bp, Artificial Sequence
  ENSG00000066382_51 (sequence is synthesized)
accctatgaagaaaataagaaatgggatagaagttagctggcatggcagggtggagtgggtgagtgacattaaggagggtgacaacagagaaactttctgataaaaaacccagtaagtaa

SEQ ID NO: 49543 - DNA, 120 bp, Artificial Sequence
  ENSG00000066382_52 (sequence is synthesized)
aggtctaagtgatgtggatgaggcagccacttgaagacctgggacaaaagtgttcaggcagagaatatagcaggtacagagctttttgtataagaaggtagcaaaaaggccagtatagcc

SEQ ID NO: 49544 - DNA, 120 bp, Artificial Sequence
  ENSG00000066382_53 (sequence is synthesized)
agagaacagaggaggtaaggagaaagataggggatgaggcaggtgctaactcatcaacatccttgcaggccttgatgagagttaagatttcattataattgcaataagaagacagtggaa

SEQ ID NO: 49545 - DNA, 120 bp, Artificial Sequence
  ENSG00000066382_54 (sequence is synthesized)
ggttttttggcgggggtgggggtggtcaatgacatgattggattgatatgttggaaaagcccatctggcgactgtgttcagtaacagtgtgcttgcatgaagatccctcacagcagcaga

SEQ ID NO: 49546 - DNA, 120 bp, Artificial Sequence
  ENSG00000066382_55 (sequence is synthesized)
caacacaaatgccccctcccacccatcatgaaaatttggaaagccaagccaataggaaactgaagctacaaagacccagcccctagaaagcaatataaacaagaccagaaaaagcatgtg

SEQ ID NO: 49547 - DNA, 120 bp, Artificial Sequence
  ENSG00000066382_56 (sequence is synthesized)
ttcaggacaagttcacattgaagtaaaaccatattgacattgattgcattccctacctgcttaggggttttgcttcacctaaactagtaccttgagaatctgtaaaagcttacaatttga

SEQ ID NO: 49548 - DNA, 120 bp, Artificial Sequence
  ENSG00000066382_57 (sequence is synthesized)
gaaaagcaagagatgacacctgattatcctttgaattggcttccatgtctgtggctgttttccctaagttcctgtcccttacacacacgttacaaaactttgtctcaattctttgctttt

SEQ ID NO: 49549 - DNA, 120 bp, Artificial Sequence
  ENSG00000066382_58 (sequence is synthesized)
aaaggatttgactttaacaaattcacattgggtacttgcttagtaggaaaggaaataatgactctcaccccctatgttataaaacttttaggagtattacacacaggcacatacagggca

SEQ ID NO: 49550 - DNA, 120 bp, Artificial Sequence
  ENSG00000066382_59 (sequence is synthesized)
cactggtatggcttgtcattttgtgacaaattcttgtcagtttgtggtctggtggaaagcatatggaattagcaatcaagaaaggtgagatttagttctggctctgcttctaactagcaa

SEQ ID NO: 49551 - DNA, 120 bp, Artificial Sequence
  ENSG00000066382_60 (sequence is synthesized)
tgcaatcttggacaagagatttattctttcaagtctcagtttcatcttgtcatatggacatagagtgatacttccttttaaaagaacctgggtatcctggccaggcgcggtggctcatgc

SEQ ID NO: 49552 - DNA, 82 bp, Artificial Sequence
  ENSG00000066382_61 (sequence is synthesized)
gtcttgaaccctggaggcggaggtagcagtgagccccgaggtcgtgccactgaactccagcctggcaacagagcgagactct

SEQ ID NO: 49553 - DNA, 120 bp, Artificial Sequence
  ENSG00000066382_62 (sequence is synthesized)
gatgatcttgattgtgtcatggtcaacccagaattatgacagtctgggaagattaggaggagaataaactgctacttaaaccttttctcagcagcattggaaagcatgtgtttccagcaa

SEQ ID NO: 49554 - DNA, 120 bp, Artificial Sequence
  ENSG00000066382_63 (sequence is synthesized)
agaggttaagaagtttaatgactggttagacctggtttcccattgcaagcatggaagaaaccctaatgcatgagtttcagaggagaaggtagcagtctgaacctgctgtgtggctccatc

SEQ ID NO: 49555 - DNA, 120 bp, Artificial Sequence
  ENSG00000066405_0 (sequence is synthesized)
acaccttcggcagcaggagggcggcagcttctcgcaggcggcagggcgggcggccaggatcatgtccaccaccacatgccaagtggtggcgttcctcctgtccatcctggggctggccgg

SEQ ID NO: 49556 - DNA, 120 bp, Artificial Sequence
  ENSG00000066405_1 (sequence is synthesized)
ctgcatcgcggccaccgggatggacatgtggagcacccaggacctgtacgacaaccccgtcacctccgtgttccagtacgaagggctctggaggagctgcgtgaggcagagttcaggctt

SEQ ID NO: 49557 - DNA, 120 bp, Artificial Sequence
  ENSG00000066405_2 (sequence is synthesized)
caccgaatgcaggccctatttcaccatcctgggacttccagccatgctgcaggcagtgcgagccctgatgatcgtaggcatcgtcctgggtgccattggcctcctggtatccatctttgc

SEQ ID NO: 49558 - DNA, 120 bp, Artificial Sequence
  ENSG00000066405_3 (sequence is synthesized)
cctgaaatgcatccgcattggcagcatggaggactctgccaaagccaacatgacactgacctccgggatcatgttcattgtctcaggtctttgtgcaattgctggagtgtctgtgtttgc

SEQ ID NO: 49559 - DNA, 120 bp, Artificial Sequence
  ENSG00000066405_4 (sequence is synthesized)
caacatgctggtgactaacttctggatgtccacagctaacatgtacaccggcatgggtgggatggtgcagactgttcagaccaggtacacatttggtgcggctctgttcgtgggctgggt

SEQ ID NO: 49560 - DNA, 120 bp, Artificial Sequence
  ENSG00000066405_5 (sequence is synthesized)
cgctggaggcctcacactaattgggggtgtgatgatgtgcatcgcctgccggggcctggcaccagaagaaaccaactacaaagccgtttcttatcatgcctcaggccacagtgttgccta

SEQ ID NO: 49561 - DNA, 120 bp, Artificial Sequence
  ENSG00000066405_6 (sequence is synthesized)
caagcctggaggcttcaaggccagcactggctttgggtccaacaccaaaaacaagaagatatacgatggaggtgcccgcacagaggacgaggtacaatcttatccttccaagcacgacta

SEQ ID NO: 49562 - DNA, 120 bp, Artificial Sequence
  ENSG00000066405_7 (sequence is synthesized)
tgtgtaatgctctaagacctctcagcacgggcggaagaaactcccggagagctcacccaaaaaacaaggagatcccatctagatttcttcttgcttttgactcacagctggaagttagaa

SEQ ID NO: 49563 - DNA, 120 bp, Artificial Sequence
  ENSG00000066405_8 (sequence is synthesized)
aagcctcgatttcatctttggagaggccaaatggtcttagcctcagtctctgtctctaaatattccaccataaaacagctgagttatttatgaattagaggctatagctcacattttcaa

SEQ ID NO: 49564 - DNA, 120 bp, Artificial Sequence
  ENSG00000066405_9 (sequence is synthesized)
tcctctatttctttttttaaatataactttctactctgatgagagaatgtggttttaatctctctctcacattttgatgatttagacagactccccctcttcctcctagtcaataaaccc

SEQ ID NO: 49565 - DNA, 120 bp, Artificial Sequence
  ENSG00000066405_10 (sequence is synthesized)
attgatgatctatttcccagcttatccccaagaaaacttttgaaaggaaagagtagacccaaagatgttattttctgctgtttgaattttgtctccccacccccaacttggctagtaata

SEQ ID NO: 49566 - DNA, 120 bp, Artificial Sequence
  ENSG00000066405_11 (sequence is synthesized)
aacacttactgaagaagaagcaataagagaaagatatttgtaatctctccagcccatgatctcggttttcttacactgtgatcttaaaagttaccaaaccaaagtcattttcagtttgag

SEQ ID NO: 49567 - DNA, 120 bp, Artificial Sequence
  ENSG00000066405_12 (sequence is synthesized)
gcaaccaaacctttctactgctgttgacatcttcttattacagcaacaccattctaggagtttcctgagctctccactggagtcctctttctgtcgcgggtcagaaattgtccctagatg

SEQ ID NO: 49568 - DNA, 120 bp, Artificial Sequence
  ENSG00000066405_13 (sequence is synthesized)
ggaaatgaaaaaataattgctttgacattgtctatatggtactttgtaaagtcatgcttaagtacaaattccatgaaaagctcactgatcctaattctttccctttgaggtctctatggc

SEQ ID NO: 49569 - DNA, 88 bp, Artificial Sequence
  ENSG00000066405_14 (sequence is synthesized)
ctcactgatcctaattctttccctttgaggtctctatggctctgattgtacatgatagtaagtgtaagccatgtaaaaagtaaataat

SEQ ID NO: 49570 - DNA, 120 bp, Artificial Sequence
  ENSG00000066405_15 (sequence is synthesized)
agaagttcgagactagcctgggcaacatggagaagccctgtctctacaaaatacagagagaaaaaatcagccagtcatggtggcctacacctgtagtcccagcattccgggaggctgagg

SEQ ID NO: 49571 - DNA, 90 bp, Artificial Sequence
  ENSG00000066405_16 (sequence is synthesized)
aggtgacatagcgagatcctgtctaaaaaaataaaaaataaataatggaacacagcaagtcctaggaagtaggttaaaactaattcttta

SEQ ID NO: 49572 - DNA, 120 bp, Artificial Sequence
  ENSG00000066405_17 (sequence is synthesized)
cacagcaagtcctaggaagtaggttaaaactaattctttaaaaaaaaaaaaaagttgagcctgaattaaatgtaatgtttccaagtgacaggtatccacatttgcatggttacaagccac

SEQ ID NO: 49573 - DNA, 120 bp, Artificial Sequence
  ENSG00000066405_18 (sequence is synthesized)
tgccagttagcagtagcactttcctggcactgtggtcggttttgttttgttttgctttgtttagagacggggtctcactttccaggctggcctcaaactcctgcactcaagcaattcttc

SEQ ID NO: 49574 - DNA, 120 bp, Artificial Sequence
  ENSG00000066405_19 (sequence is synthesized)
ccaagtagctggaattacaggtgtgcgccatcacaactagctggtggtcagttttgttactctgagagctgttcacttctctgaattcacctagagtggttggaccatcagatgtttggg

SEQ ID NO: 49575 - DNA, 120 bp, Artificial Sequence
  ENSG00000066405_20 (sequence is synthesized)
cagatgtttgggcaaaactgaaagctctttgcaaccacacaccttccctgagcttacatcactgcccttttgagcagaaagtctaaattccttccaagacagtagaattccatcccagta

SEQ ID NO: 49576 - DNA, 120 bp, Artificial Sequence
  ENSG00000066405_21 (sequence is synthesized)
ccaaagccagataggccccctaggaaactgaggtaagagcagtctctaaaaactacccacagcagcattggtgcaggggaacttggccattaggttattatttgagaggaaagtcctcac

SEQ ID NO: 49577 - DNA, 120 bp, Artificial Sequence
  ENSG00000066405_22 (sequence is synthesized)
atcaatagtacatatgaaagtgacctccaaggggattggtgaatactcataaggatcttcaggctgaacagactatgtctggggaaagaacggattatgccccattaaataacaagttgt

SEQ ID NO: 49578 - DNA, 120 bp, Artificial Sequence
  ENSG00000066405_23 (sequence is synthesized)
gttcaagagtcagagcagtgagctcagaggcccttctcactgagacagcaacatttaaaccaaaccagaggaagtatttgtggaactcactgcctcagtttgggtaaaggatgagcagac

SEQ ID NO: 49579 - DNA, 120 bp, Artificial Sequence
  ENSG00000066405_24 (sequence is synthesized)
aagtcaactaaagaaaaaagaaaagcaaggaggagggttgagcaatctagagcatggagtttgttaagtgctctctggatttgagttgaagagcatccatttgagttgaaggccacaggg

SEQ ID NO: 49580 - DNA, 120 bp, Artificial Sequence
  ENSG00000066405_25 (sequence is synthesized)
cacaatgagctctcccttctaccaccagaaagtccctggtcaggtctcaggtagtgcggtgtggctcagctgggtttttaattagcgcattctctatccaacatttaattgtttgaaagc

SEQ ID NO: 49581 - DNA, 120 bp, Artificial Sequence
  ENSG00000066405_26 (sequence is synthesized)
ctccatatagttagattgtgctttgtaattttgttgttgttgctctatcttattgtatatgcattgagtattaacctgaatgttttgttacttaaatattaaaaacactgttatcctaca

SEQ ID NO: 49582 - DNA, 120 bp, Artificial Sequence
  ENSG00000066405_27 (sequence is synthesized)
aaccgcctccattacatggtccgttcctgacgtgtacaccagcctctcagagaaaactccatccctacactcggtagtctcagaattgcgctgtccacttgtcgtgtggctctgtgtcga

SEQ ID NO: 49583 - DNA, 120 bp, Artificial Sequence
  ENSG00000066405_28 (sequence is synthesized)
cactgtgcgccaccatggccgtgactgcctgtcagggcttggggttcgtggtttcactgattgggattgcgggcatcattgctgccacctgcatggaccagtggagcacccaagacttgt

SEQ ID NO: 49584 - DNA, 120 bp, Artificial Sequence
  ENSG00000066405_29 (sequence is synthesized)
acaacaaccccgtaacagctgttttcaactaccaggggctgtggcgctcctgtgtccgagagagctctggcttcaccgagtgccggggctacttcaccctgctggggctgccagccatgc

SEQ ID NO: 49585 - DNA, 120 bp, Artificial Sequence
  ENSG00000066422_0 (sequence is synthesized)
agtcgccagcggatcccgcgcgctggagaagtgcagttccccctggttaccaactcgcccgcttttccttcggactaagggagccgtcgaagagcgctcgccaaaggcgcagccgtttct

SEQ ID NO: 49586 - DNA, 120 bp, Artificial Sequence
  ENSG00000066422_1 (sequence is synthesized)
ccctacggtgccgccgctcctcctgcagccgcccgtaggtagcgggccgttttcctcacctgtccctgacaggcgccctcagggagccgcggtccgcgatgtcaagcgaggaaagctacc

SEQ ID NO: 49587 - DNA, 120 bp, Artificial Sequence
  ENSG00000066422_2 (sequence is synthesized)
gggccatcctgcgttacctgacgaacgagcgcgagccgtatgcgccgggcaccgagggcaatgtcaagcgtaaaatccgaaaagctgccgcctgctacgtggtgcgcggcgggactctgt

SEQ ID NO: 49588 - DNA, 120 bp, Artificial Sequence
  ENSG00000066422_3 (sequence is synthesized)
attaccagcggcggcagcggcaccgcaagaccttcgcggagctggaggtggtgctgcagccggagcgacgccgggacctcatcgaggcggcgcacctgggtcccggcggcactcaccaca

SEQ ID NO: 49589 - DNA, 120 bp, Artificial Sequence
  ENSG00000066422_4 (sequence is synthesized)
cccggcatcagacctggcactacttgtccaagacgtactggtggcgaggtatattgaagcaagtcaaagattacattaaacagtgtagcaaatgccaggagaaactagatcgatcccgtc

SEQ ID NO: 49590 - DNA, 120 bp, Artificial Sequence
  ENSG00000066422_5 (sequence is synthesized)
caatatcagatgtttcagaaatgttggaagaattgggactagaccttgaatctggagaagaaagtaatgaatcggaagatgacctgagcaactttacttcatctccaactacagcatcca

SEQ ID NO: 49591 - DNA, 120 bp, Artificial Sequence
  ENSG00000066422_6 (sequence is synthesized)
agcctgcaaaaaagaagccagtatccaaacatgaacttgtgtttgttgacaccaaaggagtggtaaaacgttcttctccaaaacattgtcaggctgtcttaaaacagctgaacgaacaga

SEQ ID NO: 49592 - DNA, 120 bp, Artificial Sequence
  ENSG00000066422_7 (sequence is synthesized)
gactttccaaccagttctgtgatgttactttgttaattgaaggagaagagtacaaagctcataaatctgttttgtcagcaaatagcgagtattttcgagatctttttattgagaaaggag

SEQ ID NO: 49593 - DNA, 120 bp, Artificial Sequence
  ENSG00000066422_8 (sequence is synthesized)
ctgtttccagtcatgaggctgtggtggatctttctggtttttgtaaggccagcttccttcctttactggaatttgcctatacttctgtactaagttttgatttctgtagcatggctgatg

SEQ ID NO: 49594 - DNA, 120 bp, Artificial Sequence
  ENSG00000066422_9 (sequence is synthesized)
tagccatcttagctcgtcatcttttcatgtcagaagtcttagagatttgtgaaagtgtacataagctaatggaagagaagcagctaacagtatataagaagggcgaagtacaaacagttg

SEQ ID NO: 49595 - DNA, 120 bp, Artificial Sequence
  ENSG00000066422_10 (sequence is synthesized)
catccacccaggacttacgagtacagaatggaggtacagcacctcctgttgctagcagtgagggaaccacaacaagtttacctactgaacttggggattgtgaaattgtactactggtaa

SEQ ID NO: 49596 - DNA, 120 bp, Artificial Sequence
  ENSG00000066422_11 (sequence is synthesized)
atggagaattgccagaagctgagcagaatggagaggtaggacgacagcctgagccccaggtttcttcagaggctgaatctgccctgtcatcagtaggatgtatagctgattcccatcctg

SEQ ID NO: 49597 - DNA, 120 bp, Artificial Sequence
  ENSG00000066422_12 (sequence is synthesized)
aaatggagtctgttgatttaataacaaaaaacaaccagacagaactagaaacttcaaacaacagagaaaataacacagtttctaatatacaccctaaactttcaaaagagaatgtaatta

SEQ ID NO: 49598 - DNA, 120 bp, Artificial Sequence
  ENSG00000066422_13 (sequence is synthesized)
gtagctcgccagaggatagtggtatgggaaatgatatatcagctgaggatatttgtgccgaagacattccaaaacataggcagaaagttgaccaacctttaaaagatcaggaaaatctag

SEQ ID NO: 49599 - DNA, 120 bp, Artificial Sequence
  ENSG00000066422_14 (sequence is synthesized)
ttgcatcaacagcaaagacagactttggccctgatgatgatacttatagaagcaggcttcgacaacgttctgttaatgaaggggcatatattcgactacacaagggaatggagaaaaagc

SEQ ID NO: 49600 - DNA, 120 bp, Artificial Sequence
  ENSG00000066422_15 (sequence is synthesized)
tgcagaaacggaaagccgttcccaagtcagcagttcaacaggtggctcagaagttagttcaaagaggaaaaaagatgaaacagccaaaaagagatgctaaagagaacacagaagaagcat

SEQ ID NO: 49601 - DNA, 120 bp, Artificial Sequence
  ENSG00000066422_16 (sequence is synthesized)
ctcataaatgtggggaatgtggaatggtttttcagagacgatacgcccttataatgcacaaactgaaacatgaaagagctagagattacaaatgtccattgtgtaaaaaacagtttcagt

SEQ ID NO: 49602 - DNA, 120 bp, Artificial Sequence
  ENSG00000066422_17 (sequence is synthesized)
acagtgcctctttgcgagcacatcttattcgtcataccagaaaagatgcaccctcttcatcctcgtccaattccacgtctaatgaagcatcgggaacatcatctgagaagggcagaacca

SEQ ID NO: 49603 - DNA, 120 bp, Artificial Sequence
  ENSG00000066422_18 (sequence is synthesized)
agcgggaatttatatgttccatatgtggaagaacattacctaaattatattctctccgaatacatatgttaaagcacacaggtgtaaagccacatgcatgccaggtctgtggaaagactt

SEQ ID NO: 49604 - DNA, 120 bp, Artificial Sequence
  ENSG00000066422_19 (sequence is synthesized)
ttatctataagcatggtctaaaattacatcagagtcttcatcaatcacagaagcagttccagtgtgaactgtgtgttaagtcatttgttaccaaacggagtcttcaagaacatatgagta

SEQ ID NO: 49605 - DNA, 120 bp, Artificial Sequence
  ENSG00000066422_20 (sequence is synthesized)
ttcacacaggagagtccaagtacctttgctcagtttgtggaaagtcttttcataggggctctggactcagcaagcacttcaagaaacaccaaccaaagcctgaggttcgaggctatcatt

SEQ ID NO: 49606 - DNA, 120 bp, Artificial Sequence
  ENSG00000066422_21 (sequence is synthesized)
gtactcaatgtgaaaaaagtttctttgaagctagagatcttcgccagcacatgaacaaacatcttggtgtgaagccattccagtgccaattttgtgataagtgctatagttggaagaaag

SEQ ID NO: 49607 - DNA, 120 bp, Artificial Sequence
  ENSG00000066422_22 (sequence is synthesized)
attggtattcccatgtgaagtctcattctgtcactgagccttataggtgtaatatatgtggcaaagaattttatgaaaaagctttgttcagaaggcatgtaaagaaagctacccatggga

SEQ ID NO: 49608 - DNA, 120 bp, Artificial Sequence
  ENSG00000066422_23 (sequence is synthesized)
caaaacctggaacgggtgtgtgaaaaatgtggaagaaaattcactcagctaagagagtataggagacacatgaacaaccatgaaggagttaagccatttgagtgcttaacatgtggagta

SEQ ID NO: 49609 - DNA, 120 bp, Artificial Sequence
  ENSG00000066422_24 (sequence is synthesized)
gcttgggctgatgcccgatctctaaaacgccatgtcagaacacatactggtgaacggccctatgtctgtcctgtatgtagcgaagcctacatagatgctcgaacactccgtaaacatatg

SEQ ID NO: 49610 - DNA, 120 bp, Artificial Sequence
  ENSG00000066422_25 (sequence is synthesized)
actaaattccacagagactatgtgccttgcaaaattatgctggaaaaagacacccttcagtttcataaccaaggaactcaagtggcacatgctgttagcatcttaacagcaggcatgcag

SEQ ID NO: 49611 - DNA, 120 bp, Artificial Sequence
  ENSG00000066422_26 (sequence is synthesized)
gaacaagaaagcagtggtcctcaagaacttgagactgtggtagtgacaggagaaactatggaagctctggaagctgttgcagctactgaagagtatccatcggtatctacactttctgac

SEQ ID NO: 49612 - DNA, 120 bp, Artificial Sequence
  ENSG00000066422_27 (sequence is synthesized)
caaagtattatgcaagtggttaattatgtattagcacaacagcaaggacagaagctatctgaagttgcagaagctattcaaactgttaaagtagaggtagcacatatttcaggaggagaa

SEQ ID NO: 49613 - DNA, 120 bp, Artificial Sequence
  ENSG00000066422_28 (sequence is synthesized)
tgagtatgttaatgaagataaaaagaagtgacatctcttgtacactgaactcacagaacatttgtttacaattctgtgtgactgtctgcttggagtttacatatcaaagttctgggctgt

SEQ ID NO: 49614 - DNA, 120 bp, Artificial Sequence
  ENSG00000066422_29 (sequence is synthesized)
ttggtaacgtaacgtttccaaacattttgtctggccaatgggttctatagaaaagtccgtttagtgtagagaaattgaaaacagatctattaggttggtgcaattgcttttgcaccaacc

SEQ ID NO: 49615 - DNA, 120 bp, Artificial Sequence
  ENSG00000066422_30 (sequence is synthesized)
taatatttgatggcagtggtttatcatgatataccttttatgaattaatgtttataaatgactgtactgaatttaaaaccgtacagtttcatttgcattttgacattactttattataca

SEQ ID NO: 49616 - DNA, 120 bp, Artificial Sequence
  ENSG00000066422_31 (sequence is synthesized)
ttttgcatttaaaaggctgcaccagttggcttttcttctgttttattctcaaaatatagagattctgtgatttatttgccctgtttatggattaaaaagaaaattctaatataaagcatt

SEQ ID NO: 49617 - DNA, 120 bp, Artificial Sequence
  ENSG00000066422_32 (sequence is synthesized)
tcaataggatgcataggtatattacgttttttaaatgctttagatctgtgattcttgacttactatttattttatccccttttaagtcagggatgctttattctattttaaagcacttat

SEQ ID NO: 49618 - DNA, 120 bp, Artificial Sequence
  ENSG00000066422_33 (sequence is synthesized)
gagttacatgttgtaatcaagtttgcacaatatatttatctatatgaggaacccataaatgaatagctaatttttaaaatgccattaaaatgcatgaaatgcttattaaaaccttactat

SEQ ID NO: 49619 - DNA, 120 bp, Artificial Sequence
  ENSG00000066422_34 (sequence is synthesized)
actatttcttcaaggcaagtaaattgaccatgagaaaagaacacagttattaaacactgttgacaggaaaattctccttgataacataggacaattaatggaaaaaaaaattctcattat

SEQ ID NO: 49620 - DNA, 120 bp, Artificial Sequence
  ENSG00000066422_35 (sequence is synthesized)
ttgcaaagaatgaacaagttaatgaacaaacaaactagatttggtatgttttcagcttttgtatcatgtttaattgtttaatttggttgaaaaactgcagttgagaaatcagatagcaat

SEQ ID NO: 49621 - DNA, 120 bp, Artificial Sequence
  ENSG00000066422_36 (sequence is synthesized)
atagacattcacagcagctctgtggataccatgtaattgtcaggtaatttcagaatgttgaaaattattcagtgcagccctcatagtatcatacttgaagaaattgattacagttccact

SEQ ID NO: 49622 - DNA, 120 bp, Artificial Sequence
  ENSG00000066422_37 (sequence is synthesized)
aaattgttgaagataaattatttttaaaggttatgaaaactaagttatattaattcatatgtttgatttttaaatcccacctcctcaagctatccaattttctgactttgaaaataacca

SEQ ID NO: 49623 - DNA, 120 bp, Artificial Sequence
  ENSG00000066422_38 (sequence is synthesized)
tgagagatgccacatttctctctgggaaactaccactcaaagaataattgttaaaaattaagcttttaggtattagaagctgttataaagtataaaattaagatataagcagatcacatg

SEQ ID NO: 49624 - DNA, 120 bp, Artificial Sequence
  ENSG00000066422_39 (sequence is synthesized)
taaatcattcctaaagcacaagaaaagaatgtgccttgatgtacatatattactaagttgcctctcccagtttactttaaaaatggctttaaggataaagaataaatgtgatagctgtgc

SEQ ID NO: 49625 - DNA, 120 bp, Artificial Sequence
  ENSG00000066422_40 (sequence is synthesized)
atgcattatatatttgcatttgcaaatttcccattgttttaacagctgtgtggctgactttcaattttaagacgtgaattgacatacagcccataactttataatggctgctcatttatc

SEQ ID NO: 49626 - DNA, 120 bp, Artificial Sequence
  ENSG00000066422_41 (sequence is synthesized)
ttatctttcagttagtggaaaaacatttcaacctgactaaaatttggaattgtgtcttttatgttccatcctctgttgttactagatttagtttaaaaattgtgtatgaccattaatgta

SEQ ID NO: 49627 - DNA, 120 bp, Artificial Sequence
  ENSG00000066422_42 (sequence is synthesized)
tgtcataaacatgtaaataaaagatgttgaatcttgttgaaaagcatgaactttggagttgagcttgttactattttcagttcataaatcagttgttacttgatgtgttattaagttaat

SEQ ID NO: 49628 - DNA, 120 bp, Artificial Sequence
  ENSG00000066422_43 (sequence is synthesized)
ttatttttaaagggaaaggaaataaaacactaaaaaataacgattggaggaacacaatattaaaacttcttactcttacatataattgatatggacaagaggcaaggaaataatgggtag

SEQ ID NO: 49629 - DNA, 120 bp, Artificial Sequence
  ENSG00000066422_44 (sequence is synthesized)
tggccctaaatgggaacaggcattcctgttttcatgcccaaatgttgccttttggcccaccacgccctcctatcctgtatccatataaaccctaaaccccaggctccatgagcagaagag

SEQ ID NO: 49630 - DNA, 120 bp, Artificial Sequence
  ENSG00000066422_45 (sequence is synthesized)
ataaaccctaaaccccaggctccatgagcagaagagtgttgcggcagaggagagaagagaggagcatctaaacgtccagaggagttcagctggggacggttggagaggagatcatcttcc

SEQ ID NO: 49631 - DNA, 72 bp, Artificial Sequence
  ENSG00000066422_46 (sequence is synthesized)
ttatccagcaataaaatcccctgcatttaccatccttcaatttgtccatgtgacctgattcttcctggacgc

SEQ ID NO: 49632 - DNA, 120 bp, Artificial Sequence
  ENSG00000066422_47 (sequence is synthesized)
aagccagtatccaaacatgaacttgtgtttgtaagtggtactctccagtcagctttaagatttgtaactagtgtactagtatttgcagccttggtgacttatttttctcaaaccactaag

SEQ ID NO: 49633 - DNA, 120 bp, Artificial Sequence
  ENSG00000066422_48 (sequence is synthesized)
actgcttattgaataagacaaaatggcagtgtactgtgttatataagctgaactgcctcttcatttatcataaatgttcctgttattttttcagaatgaacttaataattacctgttggt

SEQ ID NO: 49634 - DNA, 120 bp, Artificial Sequence
  ENSG00000066422_49 (sequence is synthesized)
gcagtctctgagtttacgccccaaggtaaaattaatctggccaggtctttgtttttcacctgcatcagtttcatacatcatcatatttctgattagtaagaagaggcagccagaagtgag

SEQ ID NO: 49635 - DNA, 120 bp, Artificial Sequence
  ENSG00000066422_50 (sequence is synthesized)
atacagattttcattaggtgaggtagaatgaacatggcagaaaataggataggacaacatatctttttatttaaatacataggtaacaaagaaaatatcaaattattcatacctggtaaa

SEQ ID NO: 49636 - DNA, 120 bp, Artificial Sequence
  ENSG00000066422_51 (sequence is synthesized)
aggtaatatgtaatgtgtcttgttttaaagcttgttaagggtaaaaaatacaggtaatatgttactcttgctctcaaacttattttgacaggttgacaccaaaggagtggtaaaacgttc

SEQ ID NO: 49637 - DNA, 120 bp, Artificial Sequence
  ENSG00000066422_52 (sequence is synthesized)
tgacattctagaagagggggatatgtatgtcttccacacacggactttatgccaaagtaagagaagcccactaacaacagtagactaagctgtactgaaaaggttctttttagcaagatt

SEQ ID NO: 49638 - DNA, 120 bp, Artificial Sequence
  ENSG00000066422_53 (sequence is synthesized)
tctgtggtagagttatggaaaagggtgtcatttcctttcactacgtcttaagtgagacaattatagcagaaaaagaatttctaggatttaaactgttaaaaacagtttgagtgaaatcca

SEQ ID NO: 49639 - DNA, 120 bp, Artificial Sequence
  ENSG00000066422_54 (sequence is synthesized)
gtttgagtgaaatccataagtgcaacaaaattattacattaaatgaatatgttatttaaaaattgattgtttaagctaggtgtggtggtgcccgcctgtagtcccacctacttgggaggc

SEQ ID NO: 49640 - DNA, 120 bp, Artificial Sequence
  ENSG00000066422_55 (sequence is synthesized)
gcttaaggtcaggagttccaggctgtggtgtgtcattgtacctgtgaatacccactgctctccagacggggcaatataacaagaccctgcctctaaaaataaaaagcaaataaaaattga

SEQ ID NO: 49641 - DNA, 120 bp, Artificial Sequence
  ENSG00000066422_56 (sequence is synthesized)
tagttacatttcataaactattaatgattatgctttaattataccagaaattatattgataaactgatagtcgtgtgtgctcaattttgtattgagacagtattttaaattaaaagtgca

SEQ ID NO: 49642 - DNA, 120 bp, Artificial Sequence
  ENSG00000066427_0 (sequence is synthesized)
gtgggggccgttggctccagacaaataaacatggagtccatcttccacgagaaacaagaaggctcactttgtgctcaacattgcctgaataacttattgcaaggagaatattttagccct

SEQ ID NO: 49643 - DNA, 120 bp, Artificial Sequence
  ENSG00000066427_1 (sequence is synthesized)
gtggaattatcctcaattgcacatcagctggatgaggaggagaggatgagaatggcagaaggaggagttactagtgaagattatcgcacgtttttacagcagccttctggaaatatggat

SEQ ID NO: 49644 - DNA, 120 bp, Artificial Sequence
  ENSG00000066427_2 (sequence is synthesized)
gacagtggttttttctctattcaggttataagcaatgccttgaaagtttggggtttagaactaatcctgttcaacagtccagagtatcagaggctcaggatcgatcctataaatgaaaga

SEQ ID NO: 49645 - DNA, 120 bp, Artificial Sequence
  ENSG00000066427_3 (sequence is synthesized)
tcatttatatgcaattataaggaacactggtttacagttagaaaattaggaaaacagtggtttaacttgaattctctcttgacgggtccagaattaatatcagatacatatcttgcactt

SEQ ID NO: 49646 - DNA, 120 bp, Artificial Sequence
  ENSG00000066427_4 (sequence is synthesized)
ttcttggctcaattacaacaggaaggttattctatatttgtcgttaagggtgatctgccagattgcgaagctgaccaactcctgcagatgattagggtccaacagatgcatcgaccaaaa

SEQ ID NO: 49647 - DNA, 120 bp, Artificial Sequence
  ENSG00000066427_5 (sequence is synthesized)
cttattggagaagaattagcacaactaaaagagcaaagagtccataaaacagacctggaacgagtgttagaagcaaatgatggctcaggaatgttagacgaagatgaggaggatttgcag

SEQ ID NO: 49648 - DNA, 120 bp, Artificial Sequence
  ENSG00000066427_6 (sequence is synthesized)
agggctctggcactaagtcgccaagaaattgacatggaagatgaggaagcagatctccgcagggctattcagctaagtatgcaaggtagttccagaaacatatctcaagatatgacacag

SEQ ID NO: 49649 - DNA, 120 bp, Artificial Sequence
  ENSG00000066427_7 (sequence is synthesized)
acatcaggtacaaatcttacttcagaagagcttcggaagagacgagaagcctactttgaaaaacagcagcaaaagcagcaacagcagcagcagcagcagcagcagggggacctatcagga

SEQ ID NO: 49650 - DNA, 120 bp, Artificial Sequence
  ENSG00000066427_8 (sequence is synthesized)
cagagttcacatccatgtgaaaggccagccaccagttcaggagcacttgggagtgatctaggtgatgctatgagtgaagaagacatgcttcaggcagctgtgaccatgtctttagaaact

SEQ ID NO: 49651 - DNA, 120 bp, Artificial Sequence
  ENSG00000066427_9 (sequence is synthesized)
gtcagaaatgatttgaaaacagaaggaaaaaaataatacctttaaaaaataatttagatattcatactttccaacattatcctgtgtgattacagcatagggtccactttggtaatgtgt

SEQ ID NO: 49652 - DNA, 120 bp, Artificial Sequence
  ENSG00000066427_10 (sequence is synthesized)
caaagagatgaggaaataagacttttagcggtttgcaaacaaaatgatgggaaagtggaacaatgcgtcggttgtaggactaaataatgatcttccaaatattagccaaagaggcattca

SEQ ID NO: 49653 - DNA, 120 bp, Artificial Sequence
  ENSG00000066427_11 (sequence is synthesized)
gcaattaaagacatttaaaatagttttctaaatgtttctttttcttttttgagtgtgcaatatgtaacatgtctaaagttagggcatttttcttggatctttttgcagactagctaatta

SEQ ID NO: 49654 - DNA, 120 bp, Artificial Sequence
  ENSG00000066427_12 (sequence is synthesized)
gctctcgcctcaggctttttccatatagtttgttttctttttctgtcttgtaggtaagttggctcacatcatgtaatagtggctttcatttcttattaaccaaattaacctttcaggaaa

SEQ ID NO: 49655 - DNA, 120 bp, Artificial Sequence
  ENSG00000066427_13 (sequence is synthesized)
gtatctctactttcctgatgttgataatagtaatggttctagaaggatgaacagttctcccttcaactgtataccgtgtgctccagtgttttcttgtgttgttttctctgatcacaactt

SEQ ID NO: 49656 - DNA, 120 bp, Artificial Sequence
  ENSG00000066427_14 (sequence is synthesized)
ttctgctacctggttttcattattttcccacaattcttttgaaagatggtaatcttttctgaggtttagcgttttaagccctacgatgggatcattatttcatgactggtgcgttcctaa

SEQ ID NO: 49657 - DNA, 120 bp, Artificial Sequence
  ENSG00000066427_15 (sequence is synthesized)
actctgaaatcagccttgcacaagtacttgagaataaatgagcattttttaaaatgtgtgagcatgtgctttcccagatgctttatgaatgtcttttcacttatatcaaaaccttacagc

SEQ ID NO: 49658 - DNA, 120 bp, Artificial Sequence
  ENSG00000066427_16 (sequence is synthesized)
tttgttgcaaccccttcttcctgcgccttattttttcctttcttctccaattgagaaaactaggagaagcatagtatgcaggcaagtctccttctgttagaagactaaacatacgtaccc

SEQ ID NO: 49659 - DNA, 120 bp, Artificial Sequence
  ENSG00000066427_17 (sequence is synthesized)
accatgaatgtatgatacatgaaatttggccttcaattttaatagcagttttattttattttttctcctatgactggagctttgtgttctctttacagttgagtcatggaatgtaggtgt

SEQ ID NO: 49660 - DNA, 120 bp, Artificial Sequence
  ENSG00000066427_18 (sequence is synthesized)
ctgcttcacatcttttagtaggtatagcttgtcaaagatggtgatctggaacatgaaaataatttactaatgaaaatatgtttaaatttatactgtgatttgacacttgcatcatgttta

SEQ ID NO: 49661 - DNA, 120 bp, Artificial Sequence
  ENSG00000066427_19 (sequence is synthesized)
gatagcttaagaacaatggaagtcacagtacttagtggatctataaataagaaagtccatagttttgataaatattctctttaattgagatgtacagagagtttcttgctgggtcaatag

SEQ ID NO: 49662 - DNA, 120 bp, Artificial Sequence
  ENSG00000066427_20 (sequence is synthesized)
gatagtatcattttggtgaaaaccatgtctctgaaattgatgttttagtttcagtgttccctatccctcattctccatctccttttgaagctcttttgaatgttgaattgttcataagct

SEQ ID NO: 49663 - DNA, 120 bp, Artificial Sequence
  ENSG00000066427_21 (sequence is synthesized)
aaaatccaagaaatttcagctgacaacttcgaaaattataatatggtatattgccctcctggtgtgtggctgcacacattttatcagggaaagttttttgatctaggatttattgctaac

SEQ ID NO: 49664 - DNA, 120 bp, Artificial Sequence
  ENSG00000066427_22 (sequence is synthesized)
taactgaaaagagaagaaaaaatatcttttatttatgattataaaatagctttttcttcgatataacagattttttaagtcattattttgtgccaatcagttttctgaagtttcccttac

SEQ ID NO: 49665 - DNA, 120 bp, Artificial Sequence
  ENSG00000066427_23 (sequence is synthesized)
acaaaaggatagctttattttaaaatctaaagtttcttttaatagttaaaaatgtttcagaagaattataaaactttaaaactgcaagggatgttggagtttagtactactccctcaaga

SEQ ID NO: 49666 - DNA, 120 bp, Artificial Sequence
  ENSG00000066427_24 (sequence is synthesized)
tttaaaaagctaaatattttaagactgaacatttatgttaattattaccagtgtgtttgtcatattttccatggatatttgttcattacctttttccattgaaaagttacattaaacttt

SEQ ID NO: 49667 - DNA, 120 bp, Artificial Sequence
  ENSG00000066427_25 (sequence is synthesized)
tcatacacttgaattgatgagctacctaatataaaaatgagaaaaccaatatgcattttaaagttttaactttagagtttataaagttcatatataccctagttaaagcacttaagaaaa

SEQ ID NO: 49668 - DNA, 80 bp, Artificial Sequence
  ENSG00000066427_26 (sequence is synthesized)
ataaagttcatatataccctagttaaagcacttaagaaaatatggcatgtttgacttttagttcctagagatgctatgtc

SEQ ID NO: 49669 - DNA, 67 bp, Artificial Sequence
  ENSG00000066427_27 (sequence is synthesized)
agatttttgtatttttggtagagacgcggtttcatcatgtttggccaggctggtctcgaactcctga

SEQ ID NO: 49670 - DNA, 120 bp, Artificial Sequence
  ENSG00000066427_28 (sequence is synthesized)
acaggcatgagccactgcgcctggccagctagagagtttttaaagcagagctgagcacacactggatgcgtttgaatgtgtttgtgtagtttgttgtgaaattgttacatttagcaggca

SEQ ID NO: 49671 - DNA, 120 bp, Artificial Sequence
  ENSG00000066427_29 (sequence is synthesized)
gtttgttgtgaaattgttacatttagcaggcagatccagaagcactagtgaactgtcatcttggtggggttggcttaaatttaattgactgtttagattccatttcttaattgattggcc

SEQ ID NO: 49672 - DNA, 120 bp, Artificial Sequence
  ENSG00000066427_30 (sequence is synthesized)
agtatgaaaagatgccagtgcaagtaaccatagtatcaaaaaagttaaaaattattcaaagctatagtttatacatcaggtactgccatttactgtaaaccacctgcaagaaagtcagga

SEQ ID NO: 49673 - DNA, 120 bp, Artificial Sequence
  ENSG00000066427_31 (sequence is synthesized)
acaactaaattcacaagaactgtcctgctaagaagtgtattaaagatttccattttgttttactaattgggaacatcttaatgtttaatatttaaactattggtatcatttttctaatgt

SEQ ID NO: 49674 - DNA, 120 bp, Artificial Sequence
  ENSG00000066427_32 (sequence is synthesized)
ataatttgtattactgggatcaagtatgtacagtggtgatgctagtagaagtttaagccttggaaataccactttcatattttcagatgtcatggatttaatgagtaatttatgttttta

SEQ ID NO: 49675 - DNA, 120 bp, Artificial Sequence
  ENSG00000066427_33 (sequence is synthesized)
aaattcagaatagttaatctctgatctaaaaccatcaatctatgttttttacggtaatcatgtaaatatttcagtaatataaactgtttgaaaaggctgctgcaggtaaactctatacta

SEQ ID NO: 49676 - DNA, 120 bp, Artificial Sequence
  ENSG00000066427_34 (sequence is synthesized)
ggatcttggccaaataatttacaattcacagaatattttatttaaggtggtgctttttttttttgtccttaaaacttgatttttcttaactttattcatgatgccaaagtaaatgaggaa

SEQ ID NO: 49677 - DNA, 120 bp, Artificial Sequence
  ENSG00000066427_35 (sequence is synthesized)
aaaaactcaaaaccagttgagtatcattgcagacaaaactaccagtagtccatattgtttaatattaagttgaataaaataaattttatttcagtcagagcctaaatcacattttgattg

SEQ ID NO: 49678 - DNA, 80 bp, Artificial Sequence
  ENSG00000066427_36 (sequence is synthesized)
aaattttatttcagtcagagcctaaatcacattttgattgtctgaatttttgatactatttttaaaatcatgctagtggc

SEQ ID NO: 49679 - DNA, 70 bp, Artificial Sequence
  ENSG00000066427_37 (sequence is synthesized)
tcacgaggtcgggagttcgagaccagcttggccaaaatggtgaaaccccatctgtactaaaaatgggagt

SEQ ID NO: 49680 - DNA, 65 bp, Artificial Sequence
  ENSG00000066427_38 (sequence is synthesized)
cactgtgctagtgccaagagctactaaattcttaaaaccggcccattggacctgtacagataaaa

SEQ ID NO: 49681 - DNA, 120 bp, Artificial Sequence
  ENSG00000066427_39 (sequence is synthesized)
aaattcttaaaaccggcccattggacctgtacagataaaaaatagattcagtgcataatcaaaatatgataattttaaaatcttaagtagaaaaataaatcttgatgttttaaattctta

SEQ ID NO: 49682 - DNA, 77 bp, Artificial Sequence
  ENSG00000066427_40 (sequence is synthesized)
tcttaagtagaaaaataaatcttgatgttttaaattcttacgaggattcaatagttaatattgatgatcctggaggc

SEQ ID NO: 49683 - DNA, 83 bp, Artificial Sequence
  ENSG00000066427_41 (sequence is synthesized)
caaaaattagccgggcgtggttaatcgcatgagcctaggaggcagaggttgcagagtgccaagggctcaccactgcattccag

SEQ ID NO: 49684 - DNA, 120 bp, Artificial Sequence
  ENSG00000066427_42 (sequence is synthesized)
aagaatcgcatgagcctaggaggcagaggttgcagagtgccaagggctcaccactgcattccagcctgcccaacagagtgagacactgtttctgaaaaaaaaaaatatatatatatatat

SEQ ID NO: 49685 - DNA, 86 bp, Artificial Sequence
  ENSG00000066427_43 (sequence is synthesized)
tgcataaaggtttgtttgtttttttttaatccggaaacgaagaggcgttgggccgctattttctttttctttctttctttctttct

SEQ ID NO: 49686 - DNA, 77 bp, Artificial Sequence
  ENSG00000066427_44 (sequence is synthesized)
ggccgctgagacggagtctagctctgctgcccaggctggagtacaatgacacgatgttggctcactgcaacctccac

SEQ ID NO: 49687 - DNA, 74 bp, Artificial Sequence
  ENSG00000066427_45 (sequence is synthesized)
tacacctggcgaatatttgttttttttagtagagacgggcttttaccatgttaggctggtctcaaactcctgac

SEQ ID NO: 49688 - DNA, 84 bp, Artificial Sequence
  ENSG00000066427_46 (sequence is synthesized)
ggccaccacacccggccttgggccactgttttcaaagtgaattgtttgttgtatcgagtccttaagtatggatatatatgtgac

SEQ ID NO: 49689 - DNA, 120 bp, Artificial Sequence
  ENSG00000066427_47 (sequence is synthesized)
tttgttgtatcgagtccttaagtatggatatatatgtgaccctaattaagaactaccagattggatcaactaatcatgtcagcaatgtaaataactttatttttcatattcaaaataaaa

SEQ ID NO: 49690 - DNA, 120 bp, Artificial Sequence
  ENSG00000066427_48 (sequence is synthesized)
actttcttttatttctggcccctttataaccagcatctttttgctttaaaaaatgacctggctttgtatttttttagtcttaaacataataaaaatatttttgttctaatttgctttcat

SEQ ID NO: 49691 - DNA, 120 bp, Artificial Sequence
  ENSG00000066427_49 (sequence is synthesized)
gagtgaagattattgacatcgttggtaaattctagaattttgattttgttttttaatttgaagaaaatctttgctattattattttttccaagtggtctggcattttaagaattagtgct

SEQ ID NO: 49692 - DNA, 120 bp, Artificial Sequence
  ENSG00000066427_50 (sequence is synthesized)
aataacgtaacttctaaatttgtcgtaattggcatgtttaatagcatatcaaaaaacattttaagcctgtggattcatagacaaagcaatgagaaacattagtaaaatataaatggatat

SEQ ID NO: 49693 - DNA, 120 bp, Artificial Sequence
  ENSG00000066427_51 (sequence is synthesized)
tcctgatgcatttaggaagctctcaattgtctcttgcatagttcaaggaatgttttctgaatttttttaatgctttttttttttttgaaagaggaaaacatacatttttaaatgtgatta

SEQ ID NO: 49694 - DNA, 120 bp, Artificial Sequence
  ENSG00000066427_52 (sequence is synthesized)
tctaatttttacaacactgggctattaggaataactttttaaaaattactgttctgtataaatatttgaaattcaagtacagaaaatatctgaaacaaaaagcattgttgtttggccatg

SEQ ID NO: 49695 - DNA, 120 bp, Artificial Sequence
  ENSG00000066427_53 (sequence is synthesized)
atacaagtgcactgtggcagtgccgcttgctcaggacccagccctgcagcccttctgtgtgtgctccctcgttaagttcatttgctgttattacacacacaggccttcctgtctggtcgt

SEQ ID NO: 49696 - DNA, 120 bp, Artificial Sequence
  ENSG00000066427_54 (sequence is synthesized)
tagaaaagccgggcttccaaagcactgttgaacacaggattctgttgttagtgtggatgttcaatgagttgtattttaaatatcaaagattattaaataaagataatgtttgcttttcta

SEQ ID NO: 49697 - DNA, 120 bp, Artificial Sequence
  ENSG00000066427_55 (sequence is synthesized)
tccatgtgaaaggccagccaccagttcaggagcacttgggagtgatctaggtaaggcctgctcaccattcatcatgttcgctaccttcacactttatctgacatacgagctccatgtgat

SEQ ID NO: 49698 - DNA, 120 bp, Artificial Sequence
  ENSG00000066427_56 (sequence is synthesized)
ttttgctttacattattcttcattccctctttaatcatattaagaatcttaagtaaatttgtaatctactaaatttccctggattaaggagcagttaccaaaagaaaaaaaaaaaaaaaa

SEQ ID NO: 49699 - DNA, 64 bp, Artificial Sequence
  ENSG00000066427_57 (sequence is synthesized)
tcccaagtagctgggattacaggcacacggcactatgcccggctaattttttgtatctatgatc

SEQ ID NO: 49700 - DNA, 67 bp, Artificial Sequence
  ENSG00000066427_58 (sequence is synthesized)
ttacatttcttttaaaaatgtggataccatttagaaaaggatgggccattcttcctatagggatctg

SEQ ID NO: 49701 - DNA, 120 bp, Artificial Sequence
  ENSG00000066427_59 (sequence is synthesized)
taatacagcagcaaaagcagcaacagcagcagcagcagcagcagcagggggacctatcaggacagagttcacatccatgtgaaaggccagccaccagttcaggagcacttgggagtgatc

SEQ ID NO: 49702 - DNA, 120 bp, Artificial Sequence
  ENSG00000066427_60 (sequence is synthesized)
catggacgcgtgtgacatttggtgctgaagacccgggacaggaggactccttcaggagacgggtcccctgtccttgccctcactccgtgaggagatccacctacgacctcgggtcctcag

SEQ ID NO: 49703 - DNA, 120 bp, Artificial Sequence
  ENSG00000066427_61 (sequence is synthesized)
gactgatgctgcctgatcgccttggaagccccctggaccattacggatgctgagctttggataactcttacagtagaggattcccaactatatgaagacaccctagctggacgatcagtt

SEQ ID NO: 49704 - DNA, 120 bp, Artificial Sequence
  ENSG00000066427_62 (sequence is synthesized)
ccctagctggacgatcagttcttattaagaacctgacccctcaaactctacaacctcgatggactggaccctacttagtcatctatagtaccccaactgccgtccgcctgcaggatcctc

SEQ ID NO: 49705 - DNA, 120 bp, Artificial Sequence
  ENSG00000066427_63 (sequence is synthesized)
tctgttttgcatttcatacatttcttttcccaaatttgatttttaaagttgtaatttcttaaagaagagaaatacattttgaatacttttgttttgatgttccctgtttcattcactcag

SEQ ID NO: 49706 - DNA, 120 bp, Artificial Sequence
  ENSG00000066427_64 (sequence is synthesized)
actttcctatttcacctttgtgatgtccatgagcatctgccctgtagccttcctggcaccccagtgtctgtggcagcacagagctgaccccataagtggtgcatgaggccatcttgtggc

SEQ ID NO: 49707 - DNA, 120 bp, Artificial Sequence
  ENSG00000066427_65 (sequence is synthesized)
acagcatcactaagctgctgcagagacgttcatatggttgtgtgatcttttaaaaacatcagtgacacttaactataaatataatcttaaattatcacaaattttatataatatttgcca

SEQ ID NO: 49708 - DNA, 120 bp, Artificial Sequence
  ENSG00000066427_66 (sequence is synthesized)
gttgacagcagcaaaagcagcaacagcagcagcagcagcagcagcagggggacctatcaggacagagttcacatccatgtgaaaggccagccaccagttcaggagcacttgggagtgatc

SEQ ID NO: 49709 - DNA, 120 bp, Artificial Sequence
  ENSG00000066427_67 (sequence is synthesized)
aactgttttcctttgaggaatattgatgatcccactgcttgagtaatggaaaccagcttgcagctgatagttattttttgtcttttttcctgttctatccactgtcctaggtttggaatt

SEQ ID NO: 49710 - DNA, 120 bp, Artificial Sequence
  ENSG00000066427_68 (sequence is synthesized)
tcagctgggcagcttcgatcccaccacctgtagccactgaggttcacaggctctgtttgaggtgttgtgttagattgtgctgggttggttttgctgcttattgagtgatgaagagcaaca

SEQ ID NO: 49711 - DNA, 120 bp, Artificial Sequence
  ENSG00000066427_69 (sequence is synthesized)
tcagacagcagcaaaagcagcaacagcagcagcagcagcagcagcagggggacctatcaggacagagttcacatccatgtgaaaggccagccaccagttcaggagcacttgggagtgatc

SEQ ID NO: 49712 - DNA, 120 bp, Artificial Sequence
  ENSG00000066427_70 (sequence is synthesized)
atatgcaattataaggaacactggtttacagttagaaaattaggaaaacaggtccctgtataatgaaaaagaaggctggaaaaagtattaacattgtcaaaatccaggaaaagtagttgg

SEQ ID NO: 49713 - DNA, 120 bp, Artificial Sequence
  ENSG00000066427_71 (sequence is synthesized)
tcatgatattgatcgttaactttagaaactttttgtatcttgtgggttaaattaggattactatgtggtagtgataaatgatgttaattagggccgagtgcagtggctaacacctgtaat

SEQ ID NO: 49714 - DNA, 120 bp, Artificial Sequence
  ENSG00000066427_72 (sequence is synthesized)
acagacagcagcaaaagcagcaacagcagcagcagcagcagcagcagggggacctatcaggacagagttcacatccatgtgaaaggccagccaccagttcaggagcacttgggagtgatc

SEQ ID NO: 49715 - DNA, 120 bp, Artificial Sequence
  ENSG00000066427_73 (sequence is synthesized)
gaagcctactttgaaaagccgaggcaggcagattacgaaagacaacagcagcaaaagcagcaacagcagcagcagcagcagcagcaggggcctatcaggacagagttcacatccatgtga

SEQ ID NO: 49716 - DNA, 120 bp, Artificial Sequence
  ENSG00000066427_74 (sequence is synthesized)
caggacagagttcacatccatgtgaaaggccagccaccagttcaggagcacttgggagtgatctagttccagctacccaggaggcagaagcaggaggattgcttgagcctaggagttcga

SEQ ID NO: 49717 - DNA, 72 bp, Artificial Sequence
  ENSG00000066427_75 (sequence is synthesized)
acaaccagcctaatctctcttcttcctcctggaagtcacaagtactccccactacttcccttaaagtcactc

SEQ ID NO: 49718 - DNA, 120 bp, Artificial Sequence
  ENSG00000066427_76 (sequence is synthesized)
acagggctttacacagtcaccccccctacttggactgaaccccaaaaacttgtcatccctactatcttctgtttactcatactcccattcactattctcaactactcataaatgccctaa

SEQ ID NO: 49719 - DNA, 120 bp, Artificial Sequence
  ENSG00000066427_77 (sequence is synthesized)
cgttggctccagacaaataaacatggagtccatcttccacgagaaacagccttctggaaatatggatgacagtggttttttctctattcagtggtttaacttgaattctctcttgacggg

SEQ ID NO: 49720 - DNA, 120 bp, Artificial Sequence
  ENSG00000066455_0 (sequence is synthesized)
gcttcccttccacgtctcccggaagcggtagcagggccccggcgggtcggggaggaggtttactcagcttgggccccctccgggccagccgccgagggggcgcggcccaggacggcggct

SEQ ID NO: 49721 - DNA, 120 bp, Artificial Sequence
  ENSG00000066455_1 (sequence is synthesized)
aggccgtagtgcagcctctccggagtcctcaggtttgccaataggattatcctgctgccatcatgtcttggtttgttgatcttgctggaaaggcagaagatcttttaaaccgagttgatc

SEQ ID NO: 49722 - DNA, 120 bp, Artificial Sequence
  ENSG00000066455_2 (sequence is synthesized)
aaggggctgcaacagctctcagtaggaaagacaatgccagcaacatatatagcaaaaatactgactatactgaacttcaccagcaaaatacagatttgatatatcagactggacctaaat

SEQ ID NO: 49723 - DNA, 120 bp, Artificial Sequence
  ENSG00000066455_3 (sequence is synthesized)
ctacgtatatttcatcagcagctgataacattcgaaatcaaaaagccaccatcttagctggcactgcaaatgtgaaagtaggatctcggacaccagtagaggcctctcatcctgttgaaa

SEQ ID NO: 49724 - DNA, 120 bp, Artificial Sequence
  ENSG00000066455_4 (sequence is synthesized)
atgcatctgttcctaggccttcatcccattttgtgcgaagaaaaaagtcagaacctgatgatgagctgctgtttgattttcttaatagttcacagaaggagcctaccgggagggtggaaa

SEQ ID NO: 49725 - DNA, 120 bp, Artificial Sequence
  ENSG00000066455_5 (sequence is synthesized)
tcagaaaggaaaaaggcaagacacctgtctttcagagctctcagacatcaagtgtcagttctgtgaaccccagtgtaaccaccatcaaaaccattgaagaaaattcttttgggagccaaa

SEQ ID NO: 49726 - DNA, 120 bp, Artificial Sequence
  ENSG00000066455_6 (sequence is synthesized)
cccacgaagctgccagtaactcagattctagccatgaaggtcaagaggaatcttcaaaggaaaatgtgtcatcaaatgctgcctgccctgaccacaccccaacacctaatgatgatggca

SEQ ID NO: 49727 - DNA, 120 bp, Artificial Sequence
  ENSG00000066455_7 (sequence is synthesized)
aatcacatgaactgtctaaccttcgactggagaatcagctgctgaggaatgaagttcagtctttaaatcaagaaatggcctcgttactccaaagatccaaagagactcaagaagaattaa

SEQ ID NO: 49728 - DNA, 120 bp, Artificial Sequence
  ENSG00000066455_8 (sequence is synthesized)
acaaagcaagagcaagagttgaaaagtggaatgctgaccattcaaagagtgatcgaatgactcgaggactccgagcccaagtagatgacctgactgaagctgtggctgcaaaggattccc

SEQ ID NO: 49729 - DNA, 120 bp, Artificial Sequence
  ENSG00000066455_9 (sequence is synthesized)
agctggctgtactgaaagtgagactccaggaagctgaccagctactgagtactcgcacagaagcattagaagccttacagagtgaaaaatcacgaataatgcaggatcaaagtgaaggta

SEQ ID NO: 49730 - DNA, 120 bp, Artificial Sequence
  ENSG00000066455_10 (sequence is synthesized)
acagcctgcagaatcaagctctgcagacttttcaggagagactgcatgaagcggatgccactctgaagagagagcaggagagctataaacagatgcagagcgagtttgctgcacgcctta

SEQ ID NO: 49731 - DNA, 120 bp, Artificial Sequence
  ENSG00000066455_11 (sequence is synthesized)
aacttggagtcctctaagcaggaattaattgactacaagcaaaaagctactagaatactgcaatctaaggaaaaattgattaacagcttgaaagaaggctctggttttgaaggcctagat

SEQ ID NO: 49732 - DNA, 120 bp, Artificial Sequence
  ENSG00000066455_12 (sequence is synthesized)
agcagcactgccagtagcatggagctggaagaacttcggcatgagaaagagatgcagagggaggaaatacagaagctgatgggccagatacatcagctcagatccgaattacaggatatg

SEQ ID NO: 49733 - DNA, 120 bp, Artificial Sequence
  ENSG00000066455_13 (sequence is synthesized)
gaggcacagcaagttaatgaagcagaatcagcaagagaacagttacaggatctgcatgaccaaatagctgggcagaaagcatccaaacaagaactagagacagaactggagcgactgaag

SEQ ID NO: 49734 - DNA, 120 bp, Artificial Sequence
  ENSG00000066455_14 (sequence is synthesized)
caggagttccactatatagaagaagatctttatcgaacaaagaacacattgcaaagcagaattaaagatcgagacgaagaaattcaaaaactcaggaatcagcttaccaataaaacttta

SEQ ID NO: 49735 - DNA, 120 bp, Artificial Sequence
  ENSG00000066455_15 (sequence is synthesized)
agcaatagcagtcagtctgagttagaaaatcgactccatcagctaacagagactctcatccagaaacagaccatgctggagagtctcagcacagaaaagaactccctggtctttcaactg

SEQ ID NO: 49736 - DNA, 120 bp, Artificial Sequence
  ENSG00000066455_16 (sequence is synthesized)
gagcgcctcgaacagcagatgaactccgcctctggaagtagtagtaatgggtcttcgattaatatgtctggaattgacaatggtgaaggcactcgtctgcgaaatgttcctgttcttttt

SEQ ID NO: 49737 - DNA, 120 bp, Artificial Sequence
  ENSG00000066455_17 (sequence is synthesized)
aatgacacagaaactaatctggcaggaatgtacggaaaagttcgcaaagctgctagttcaattgatcagtttagtattcgcctgggaatttttctccgaagataccccatagcgcgagtt

SEQ ID NO: 49738 - DNA, 120 bp, Artificial Sequence
  ENSG00000066455_18 (sequence is synthesized)
tttgtaattatatatatggctttgcttcacctctgggtcatgattgttctgttgacttacacaccagaaatgcaccacgaccaaccatatggcaaatgaaccaagcccagttgttgcagt

SEQ ID NO: 49739 - DNA, 120 bp, Artificial Sequence
  ENSG00000066455_19 (sequence is synthesized)
gattggttgtctttttctagacttgggatctgcaagaaggccaattgcctaaaatttctgagaacagtgcacaagattattttatcactacaagcttttaactttttaagttattgtaca

SEQ ID NO: 49740 - DNA, 120 bp, Artificial Sequence
  ENSG00000066455_20 (sequence is synthesized)
agtattctacctaaatcttccaatttcctttaaatggtaagagtttctaaaacagacaataatttaacaagctcagctctgctttatctgagtttagtggtcctaatatatatgtagaga

SEQ ID NO: 49741 - DNA, 120 bp, Artificial Sequence
  ENSG00000066455_21 (sequence is synthesized)
aagatggtggggttgttcacctctgtacagaccatctgtatgttaggtgacattgattatgggttataatcagggaaactaattgtatttagtgacaaaaataaaaagtttttttttata

SEQ ID NO: 49742 - DNA, 120 bp, Artificial Sequence
  ENSG00000066455_22 (sequence is synthesized)
attcagtctgcttttggattttcatatatttaactttgcaaaaagatttactttgtacatgttacaggcttgattggtgtaaatctttttataaatacataaataaaagaaaaatatgca

SEQ ID NO: 49743 - DNA, 120 bp, Artificial Sequence
  ENSG00000066455_23 (sequence is synthesized)
atataattctgcaatgcatttcagaaaattctgtttctgtgacaaaaatcagatatttgaaaatttagcttgatccttgctaaatgtatttaattttatgtgttgagagacaattaaaat

SEQ ID NO: 49744 - DNA, 120 bp, Artificial Sequence
  ENSG00000066455_24 (sequence is synthesized)
agttaatgtgcattagagatatacatcttttacttaatttttgcaacaatcattgtcattatttgattaaatgctaatggttgggggatcgtatttgttttttattaatttaagtttttc

SEQ ID NO: 49745 - DNA, 80 bp, Artificial Sequence
  ENSG00000066468_0 (sequence is synthesized)
gagggagcgcgcgcggccgccacaaagctcgggcgccgcggggctgcatgcggcgtacctggcccggcgcggcgactgct

SEQ ID NO: 49746 - DNA, 120 bp, Artificial Sequence
  ENSG00000066468_1 (sequence is synthesized)
gggggccccgaggccgcagcttgcctgcgcgctctgagccttcgcaactcgcgagcaaagtttggtggaggcaacgccaagcctgagtcctttcttcctctcgttccccaaatccgaggg

SEQ ID NO: 49747 - DNA, 120 bp, Artificial Sequence
  ENSG00000066468_2 (sequence is synthesized)
cagcccgcgggcgtcatgcccgcgctcctccgcagcctggggtacgcgtgaagcccgggaggcttggcgccggcgaagacccaaggaccactcttctgcgtttggagttgctccccgcaa

SEQ ID NO: 49748 - DNA, 120 bp, Artificial Sequence
  ENSG00000066468_3 (sequence is synthesized)
ccccgggctcgtcgctttctccatcccgacccacgcggggcgcggggacaacacaggtcgcggaggagcgttgccattcaagtgactgcagcagcagcggcagcgcctcggttcctgagc

SEQ ID NO: 49749 - DNA, 120 bp, Artificial Sequence
  ENSG00000066468_4 (sequence is synthesized)
ccaccgcaggctgaaggcattgcgcgtagtccatgcccgtagaggaagtgtgcagatgggattaacgtccacatggagatatggaagaggaccggggattggtaccgtaaccatggtcag

SEQ ID NO: 49750 - DNA, 120 bp, Artificial Sequence
  ENSG00000066468_5 (sequence is synthesized)
ctggggtcgtttcatctgcctggtcgtggtcaccatggcaaccttgtccctggcccggccctccttcagtttagttgaggataccacattagagccagaagagccaccaaccaaatacca

SEQ ID NO: 49751 - DNA, 120 bp, Artificial Sequence
  ENSG00000066468_6 (sequence is synthesized)
aatctctcaaccagaagtgtacgtggctgcgccaggggagtcgctagaggtgcgctgcctgttgaaagatgccgccgtgatcagttggactaaggatggggtgcacttggggcccaacaa

SEQ ID NO: 49752 - DNA, 120 bp, Artificial Sequence
  ENSG00000066468_7 (sequence is synthesized)
taggacagtgcttattggggagtacttgcagataaagggcgccacgcctagagactccggcctctatgcttgtactgccagtaggactgtagacagtgaaacttggtacttcatggtgaa

SEQ ID NO: 49753 - DNA, 120 bp, Artificial Sequence
  ENSG00000066468_8 (sequence is synthesized)
tgtcacagatgccatctcatccggagatgatgaggatgacaccgatggtgcggaagattttgtcagtgagaacagtaacaacaagagagcaccatactggaccaacacagaaaagatgga

SEQ ID NO: 49754 - DNA, 120 bp, Artificial Sequence
  ENSG00000066468_9 (sequence is synthesized)
aaagcggctccatgctgtgcctgcggccaacactgtcaagtttcgctgcccagccggggggaacccaatgccaaccatgcggtggctgaaaaacgggaaggagtttaagcaggagcatcg

SEQ ID NO: 49755 - DNA, 120 bp, Artificial Sequence
  ENSG00000066468_10 (sequence is synthesized)
cattggaggctacaaggtacgaaaccagcactggagcctcattatggaaagtgtggtcccatctgacaagggaaattatacctgtgtagtggagaatgaatacgggtccatcaatcacac

SEQ ID NO: 49756 - DNA, 120 bp, Artificial Sequence
  ENSG00000066468_11 (sequence is synthesized)
gtaccacctggatgttgtggagcgatcgcctcaccggcccatcctccaagccggactgccggcaaatgcctccacagtggtcggaggagacgtagagtttgtctgcaaggtttacagtga

SEQ ID NO: 49757 - DNA, 120 bp, Artificial Sequence
  ENSG00000066468_12 (sequence is synthesized)
gacgggctgccctacctcaaggttctcaagcactcggggataaatagttccaatgcagaagtgctggctctgttcaatgtgaccgaggcggatgctggggaatatatatgtaaggtctcc

SEQ ID NO: 49758 - DNA, 120 bp, Artificial Sequence
  ENSG00000066468_13 (sequence is synthesized)
aattatatagggcaggccaaccagtctgcctggctcactgtcctgccaaaacagcaagcgcctggaagagaaaaggagattacagcttccccagactacctggagatagccatttactgc

SEQ ID NO: 49759 - DNA, 120 bp, Artificial Sequence
  ENSG00000066468_14 (sequence is synthesized)
ataggggtcttcttaatcgcctgtatggtggtaacagtcatcctgtgccgaatgaagaacacgaccaagaagccagacttcagcagccagccggctgtgcacaagctgaccaaacgtatc

SEQ ID NO: 49760 - DNA, 120 bp, Artificial Sequence
  ENSG00000066468_15 (sequence is synthesized)
cccctgcggagacaggtaacagtttcggctgagtccagctcctccatgaactccaacaccccgctggtgaggataacaacacgcctctcttcaacggcagacacccccatgctggcaggg

SEQ ID NO: 49761 - DNA, 120 bp, Artificial Sequence
  ENSG00000066468_16 (sequence is synthesized)
gtctccgagtatgaacttccagaggacccaaaatgggagtttccaagagataagctgacactgggcaagcccctgggagaaggttgctttgggcaagtggtcatggcggaagcagtggga

SEQ ID NO: 49762 - DNA, 120 bp, Artificial Sequence
  ENSG00000066468_17 (sequence is synthesized)
attgacaaagacaagcccaaggaggcggtcaccgtggccgtgaagatgttgaaagatgatgccacagagaaagacctttctgatctggtgtcagagatggagatgatgaagatgattggg

SEQ ID NO: 49763 - DNA, 120 bp, Artificial Sequence
  ENSG00000066468_18 (sequence is synthesized)
aaacacaagaatatcataaatcttcttggagcctgcacacaggatgggcctctctatgtcatagttgagtatgcctctaaaggcaacctccgagaatacctccgagcccggaggccaccc

SEQ ID NO: 49764 - DNA, 120 bp, Artificial Sequence
  ENSG00000066468_19 (sequence is synthesized)
gggatggagtactcctatgacattaaccgtgttcctgaggagcagatgaccttcaaggacttggtgtcatgcacctaccagctggccagaggcatggagtacttggcttcccaaaaatgt

SEQ ID NO: 49765 - DNA, 120 bp, Artificial Sequence
  ENSG00000066468_20 (sequence is synthesized)
attcatcgagatttagcagccagaaatgttttggtaacagaaaacaatgtgatgaaaatagcagactttggactcgccagagatatcaacaatatagactattacaaaaagaccaccaat

SEQ ID NO: 49766 - DNA, 120 bp, Artificial Sequence
  ENSG00000066468_21 (sequence is synthesized)
gggcggcttccagtcaagtggatggctccagaagccctgtttgatagagtatacactcatcagagtgatgtctggtccttcggggtgttaatgtgggagatcttcactttagggggctcg

SEQ ID NO: 49767 - DNA, 120 bp, Artificial Sequence
  ENSG00000066468_22 (sequence is synthesized)
ccctacccagggattcccgtggaggaactttttaagctgctgaaggaaggacacagaatggataagccagccaactgcaccaacgaactgtacatgatgatgagggactgttggcatgca

SEQ ID NO: 49768 - DNA, 120 bp, Artificial Sequence
  ENSG00000066468_23 (sequence is synthesized)
gtgccctcccagagaccaacgttcaagcagttggtagaagacttggatcgaattctcactctcacaaccaatgaggaatacttggacctcagccaacctctcgaacagtattcacctagt

SEQ ID NO: 49769 - DNA, 120 bp, Artificial Sequence
  ENSG00000066468_24 (sequence is synthesized)
taccctgacacaagaagttcttgttcttcaggagatgattctgttttttctccagaccccatgccttacgaaccatgccttcctcagtatccacacataaacggcagtgttaaaacatga

SEQ ID NO: 49770 - DNA, 120 bp, Artificial Sequence
  ENSG00000066468_25 (sequence is synthesized)
gttaacaccacggacaaagagattgaggttctctatattcggaatgtaacttttgaggacgctggggaatatacgtgcttggcgggtaattctattgggatatcctttcactctgcatgg

SEQ ID NO: 49771 - DNA, 120 bp, Artificial Sequence
  ENSG00000066468_26 (sequence is synthesized)
agagcttgttgtctccacttgtatatatggatcagaggagtaaataattggaaaagtaatcagcatatgtgtaaagatttatacagttgaaaacttgtaatcttccccaggaggagaaga

SEQ ID NO: 49772 - DNA, 120 bp, Artificial Sequence
  ENSG00000066468_27 (sequence is synthesized)
aggtttctggagcagtggactgccacaagccaccatgtaacccctctcacctgccgtgcgtactggctgtggaccagtaggactcaaggtggacgtgcgttctgccttccttgttaattt

SEQ ID NO: 49773 - DNA, 120 bp, Artificial Sequence
  ENSG00000066468_28 (sequence is synthesized)
tgtaataattggagaagatttatgtcagcacacacttacagagcacaaatgcagtatataggtgctggatgtatgtaaatatattcaaattatgtataaatatatattatatatttacaa

SEQ ID NO: 49774 - DNA, 120 bp, Artificial Sequence
  ENSG00000066468_29 (sequence is synthesized)
ggagttattttttgtattgattttaaatggatgtcccaatgcacctagaaaattggtctctctttttttaatagctatttgctaaatgctgttcttacacataatttcttaattttcacc

SEQ ID NO: 49775 - DNA, 120 bp, Artificial Sequence
  ENSG00000066468_30 (sequence is synthesized)
gagcagaggtggaaaaatacttttgctttcagggaaaatggtataacgttaatttattaataaattggtaatatacaaaacaattaatcatttatagttttttttgtaatttaagtggca

SEQ ID NO: 49776 - DNA, 120 bp, Artificial Sequence
  ENSG00000066468_31 (sequence is synthesized)
tttctatgcaggcagcacagcagactagttaatctattgcttggacttaactagttatcagatcctttgaaaagagaatatttacaatatatgactaatttggggaaaatgaagttttga

SEQ ID NO: 49777 - DNA, 120 bp, Artificial Sequence
  ENSG00000066468_32 (sequence is synthesized)
tttatttgtgtttaaatgctgctgtcagacgattgttcttagacctcctaaatgccccatattaaaagaactcattcataggaaggtgtttcattttggtgtgcaaccctgtcattacgt

SEQ ID NO: 49778 - DNA, 120 bp, Artificial Sequence
  ENSG00000066468_33 (sequence is synthesized)
caacgcaacgtctaactggacttcccaagataaatggtaccagcgtcctcttaaaagatgccttaatccattccttgaggacagaccttagttgaaatgatagcagaatgtgcttctctc

SEQ ID NO: 49779 - DNA, 120 bp, Artificial Sequence
  ENSG00000066468_34 (sequence is synthesized)
tggcagctggccttctgcttctgagttgcacattaatcagattagcctgtattctcttcagtgaattttgataatggcttccagactctttggcgttggagacgcctgttaggatcttca

SEQ ID NO: 49780 - DNA, 120 bp, Artificial Sequence
  ENSG00000066468_35 (sequence is synthesized)
agtcccatcatagaaaattgaaacacagagttgttctgctgatagttttggggatacgtccatctttttaagggattgctttcatctaattctggcaggacctcaccaaaagatccagcc

SEQ ID NO: 49781 - DNA, 120 bp, Artificial Sequence
  ENSG00000066468_36 (sequence is synthesized)
tcatacctacatcagacaaaatatcgccgttgttccttctgtactaaagtattgtgttttgctttggaaacacccactcactttgcaatagccgtgcaagatgaatgcagattacactga

SEQ ID NO: 49782 - DNA, 120 bp, Artificial Sequence
  ENSG00000066468_37 (sequence is synthesized)
tcttatgtgttacaaaattggagaaagtatttaataaaacctgttaatttttatactgacaataaaaatgtttctacagatattaatgttaacaagacaaaataaatgtcacgcaactta

SEQ ID NO: 49783 - DNA, 120 bp, Artificial Sequence
  ENSG00000066468_38 (sequence is synthesized)
ttcaagcagttggtagaagacttggatcgaattctcactctcacaaccaatgagatctgaaagtttatggcttcattgagaaactgggaaaagttggtcaggcgcagtggctcatgcctg

SEQ ID NO: 49784 - DNA, 120 bp, Artificial Sequence
  ENSG00000066468_39 (sequence is synthesized)
cctgtcacctgtcttcttgtcgactcttctgcgccatgctgtgtcccgcggcccttgcctttccccgctgtgtctactttcctgactttcaaacctgagaataaaccagtgttgctgcac

SEQ ID NO: 49785 - DNA, 120 bp, Artificial Sequence
  ENSG00000066468_40 (sequence is synthesized)
ggggacccacaacatgttaccggttttcattttgctggggctcgcatttgaagcaagggctctagtgaggaggtggtgtagactcagcgggttatttaggtccgtgtgaagccgagttgc

SEQ ID NO: 49786 - DNA, 120 bp, Artificial Sequence
  ENSG00000066468_41 (sequence is synthesized)
ctgcccagcacctatagctcaactaggttttattgttctctacctgtcaatagttgatttatgatggattccaagagaaaagctaaggacagcctggggtacatcagacgtggtctcagg

SEQ ID NO: 49787 - DNA, 120 bp, Artificial Sequence
  ENSG00000066468_42 (sequence is synthesized)
aatttgttgaggaatttccccctagccttgaccccttgacagctcccgctcctactcagtgctggggagaagtagggaggccttaagcgaagagatgggtctgcactttggaggagccgg

SEQ ID NO: 49788 - DNA, 88 bp, Artificial Sequence
  ENSG00000066468_43 (sequence is synthesized)
acagactctcccgcagaactgaccccagcaagaagcctttgggagcagtagagatggagtttcactatgttgcccaggctagcgcagg

SEQ ID NO: 49789 - DNA, 120 bp, Artificial Sequence
  ENSG00000066468_44 (sequence is synthesized)
acaggcatgagccaccgcacctggcctgccaactcttgttaagatctcgaaggaaacattttcttcccctgaaggaaacccagctatgcagacaccagctgataatcttgcattcctgaa

SEQ ID NO: 49790 - DNA, 120 bp, Artificial Sequence
  ENSG00000066468_45 (sequence is synthesized)
gataatcttgcattcctgaaagatgttgcacccctatggcaagtggcggctgctgaggctctgacgtgactcccaggcatgaacgctctcagctgtgtttacctcagctcctcgggaggg

SEQ ID NO: 49791 - DNA, 120 bp, Artificial Sequence
  ENSG00000066468_46 (sequence is synthesized)
agcctgggagactgacgcctgagttttacatcagtgtcaaaacccaagcacaacctagggagggacctcctgcctagtgtgtgtgggtcaggagatagaaaagctctcactgagtaaact

SEQ ID NO: 49792 - DNA, 120 bp, Artificial Sequence
  ENSG00000066468_47 (sequence is synthesized)
ggacaaggtcaatatacctcgctgattgagaagacttcactctctctgcaaagagacgtgtgtgttttagaggaagtgggagccccagccgattctgcaagacttccgagagtcagatat

SEQ ID NO: 49793 - DNA, 120 bp, Artificial Sequence
  ENSG00000066468_48 (sequence is synthesized)
ccagacagaagatgcggacacctgggtgaccagacagcgaagaggaaagaacaaaacgagcatgtgccaagcctgtgagggagaaagggcaacaaaccagtgaccttccacagaaatgtg

SEQ ID NO: 49794 - DNA, 120 bp, Artificial Sequence
  ENSG00000066468_49 (sequence is synthesized)
attttggaagctgagattactctgaaaatgttaattgggcaggtgaaaagggtacagatgtgctgtagcagacctttggttttaaaagagaagcatcatttccccaacagggcaactgta

SEQ ID NO: 49795 - DNA, 120 bp, Artificial Sequence
  ENSG00000066468_50 (sequence is synthesized)
gaaggccagctgaagagtaaaggaaaaggtctgaggactgagcctgtggctggctggaaaaaggtgaatgttgagggcccttcacttccatcacaagaaagtcattagacggtaccaatt

SEQ ID NO: 49796 - DNA, 120 bp, Artificial Sequence
  ENSG00000066468_51 (sequence is synthesized)
cagtgtctgttcctggcatctatttcctctgtgcaaagggaaccatgtatatgagcttataaatacatttttgtcagagtgcacagataagtaggccattttaattaaacattgaagacc

SEQ ID NO: 49797 - DNA, 120 bp, Artificial Sequence
  ENSG00000066468_52 (sequence is synthesized)
gattttctgggggtatcctctggttgctcttccagatacttcctgacttcctggggcttggggagaggtggatgcctgctggggccatttgcagagcaagaacagcttctcctgggaata

SEQ ID NO: 49798 - DNA, 120 bp, Artificial Sequence
  ENSG00000066468_53 (sequence is synthesized)
gaggctaaccctgactgctgccaaggagaccaatgggagactgggtcccagttggtggtccaggctgcgccacaccgtaggagtccataacaagaagggctggcctctgttgcccgttga

SEQ ID NO: 49799 - DNA, 120 bp, Artificial Sequence
  ENSG00000066468_54 (sequence is synthesized)
tgcatgagccatctcagcagagcaggccgtccccagttattccttgtcccagatgcctctgctggtttgtcctagtgcctgctaaccctcagctgttgccacttggatattatgtcaagc

SEQ ID NO: 49800 - DNA, 120 bp, Artificial Sequence
  ENSG00000066557_0 (sequence is synthesized)
acgggtggggctgcagcttctggacctaggactttgaacatgtcgcgcctgaagcggatagcggggcaggatctccgcgctggtttcaaagcaggtggaagagactgcggtacctcggta

SEQ ID NO: 49801 - DNA, 120 bp, Artificial Sequence
  ENSG00000066557_1 (sequence is synthesized)
ccccaagggctgttgaaggcagcgaggaagagcggccagttaaacctgtcgggtagaaacctcagtgaagtgccgcagtgtgtctggagaataaatgtggatatccctgaggaagctaat

SEQ ID NO: 49802 - DNA, 120 bp, Artificial Sequence
  ENSG00000066557_2 (sequence is synthesized)
cagaatctttcgtttggtgctactgaaagatggtgggagcagacagatttgaccaaactaataatatcaaacaataaacttcagtcacttacagatgacctgcgactcttgcctgcactg

SEQ ID NO: 49803 - DNA, 120 bp, Artificial Sequence
  ENSG00000066557_3 (sequence is synthesized)
actgttcttgatatacatgataatcagttgacatcccttccttctgctataagagagctagaaaatcttcagaaacttaatgtcagccataataaactgaaaatactccctgaagaaatt

SEQ ID NO: 49804 - DNA, 120 bp, Artificial Sequence
  ENSG00000066557_4 (sequence is synthesized)
acaaacctaagaaacctgaagtgcctgtatctccagcataatgaattaacctgcatatcagagggatttgaacaactttccaatttagaagatttagatctttcaaacaatcatcttaca

SEQ ID NO: 49805 - DNA, 120 bp, Artificial Sequence
  ENSG00000066557_5 (sequence is synthesized)
actgttcctgctagtttttcttctctgtccagtctggtgcgactcaatctttctagtaatgaactgaagagtttgccagcagaaataaatagaatgaaaaggttgaagcatttggattgt

SEQ ID NO: 49806 - DNA, 120 bp, Artificial Sequence
  ENSG00000066557_6 (sequence is synthesized)
aattcaaatctcttggaaactatacctcctgaattggctggcatggaatcactagaattgctttatttgcggaggaataaattacgttttctaccagaatttccttcttgtagtctattg

SEQ ID NO: 49807 - DNA, 120 bp, Artificial Sequence
  ENSG00000066557_7 (sequence is synthesized)
aaggaattgcacgtaggtgaaaaccagattgaaatgttagaggcagaacatcttaaacatctgaattcaattcttgtgctagacctgagggataacaagttaaaatctgttccagatgaa

SEQ ID NO: 49808 - DNA, 120 bp, Artificial Sequence
  ENSG00000066557_8 (sequence is synthesized)
attatactactacggtccttggaaaggcttgacctaagcaacaatgatattagtagtcttccctattcattggggaaccttcatttgaaatttttggcattagaaggaaatcctttgaga

SEQ ID NO: 49809 - DNA, 120 bp, Artificial Sequence
  ENSG00000066557_9 (sequence is synthesized)
acaattcgaagagaaattataagtaaaggaacacaagaagtcctaaaatatctacgaagcaagatcaaagatgatggacctagccaaagtgagtctgctactgagactgccatgacacta

SEQ ID NO: 49810 - DNA, 120 bp, Artificial Sequence
  ENSG00000066557_10 (sequence is synthesized)
ccaagtgaatccagagtcaatatacatgccatcattacattaaaaatattagactatagtgataaacaagcaactttgattcctgatgaggtgtttgatgcagtaaaaagcaacatcgtc

SEQ ID NO: 49811 - DNA, 120 bp, Artificial Sequence
  ENSG00000066557_11 (sequence is synthesized)
tctcagttttaataaactttcctttatatccttggagttatgtgtgcttcagaaattgacttttttagatctcaggaacaattttttaaattctttgccagaagaaatggaatcactggt

SEQ ID NO: 49812 - DNA, 120 bp, Artificial Sequence
  ENSG00000066557_12 (sequence is synthesized)
aagactgcaaacgatcaatctttcctttaataggtttaaaatgctacctgaagttctatatcgtatcttcacacttgaaacaattctgattagtaataatcaggttggatctgtggaccc

SEQ ID NO: 49813 - DNA, 120 bp, Artificial Sequence
  ENSG00000066557_13 (sequence is synthesized)
tcagaaaatgaagatgatggaaaatctgaccacgttggaccttcaaaataatgacctcttacaaattccaccagagctcggtaattgtgtaaacttaagaacattactactggatggaaa

SEQ ID NO: 49814 - DNA, 120 bp, Artificial Sequence
  ENSG00000066557_14 (sequence is synthesized)
tccattccgagttcctcgagcagccatattaatgaaaggaacagctgctatacttgaatatttgagagaccgaattcctacttaacatggagttgctttataacccttgtcatgtattat

SEQ ID NO: 49815 - DNA, 120 bp, Artificial Sequence
  ENSG00000066557_15 (sequence is synthesized)
taaccctggttaattctaaggaggatgtaacatttgttttagtatcatcttaaaaggtgattattgtaattgatcttgtagtttcccagtatcacctacctgttggtataattagcctgg

SEQ ID NO: 49816 - DNA, 120 bp, Artificial Sequence
  ENSG00000066557_16 (sequence is synthesized)
gccatattcactgccagtaaatatttttacatttttatttaagatttttgtaaggtgttgtatacatttgtaatggtgataaccacaatgtgttcatacatttgttctaaatgttttgct

SEQ ID NO: 49817 - DNA, 120 bp, Artificial Sequence
  ENSG00000066557_17 (sequence is synthesized)
tatgatttatcctgctaactttcattttcttatagcaagcagttttttcaaaaatgaatttttatttaatgtggttcagtattataataacaaagcatttttgtagaactggtttttttt

SEQ ID NO: 49818 - DNA, 120 bp, Artificial Sequence
  ENSG00000066557_18 (sequence is synthesized)
ctcatttatttttgtattccatacaatgtgaccaattgacttgaatatgactagccagtttctatgtttttgttagatataaaattaaatcgaattttgttgaatactgttctttggcat

SEQ ID NO: 49819 - DNA, 120 bp, Artificial Sequence
  ENSG00000066557_19 (sequence is synthesized)
ttaaaaaataagaccttcttatcttgggccacatgtcaaaagaaaaaggaaacaaaaatatattaaaaataagacttttcattacccatgataggacttttgtgatatggctaatctcag

SEQ ID NO: 49820 - DNA, 120 bp, Artificial Sequence
  ENSG00000066557_20 (sequence is synthesized)
tacacatttcaacttaaaacctttttatttacagcaccataattttaaaatttacttgcaatcttggtaagactaaacttgcagtgtttttctaaaagggaatttgataggtaaacttga

SEQ ID NO: 49821 - DNA, 120 bp, Artificial Sequence
  ENSG00000066557_21 (sequence is synthesized)
tttaataaaaattaaatatcatttttgtttacaccaaaattatcagaagtaggttgattagtcattataacacttaccatatgattctattaagaagtcaattcagtagcatgtatatca

SEQ ID NO: 49822 - DNA, 120 bp, Artificial Sequence
  ENSG00000066557_22 (sequence is synthesized)
atttatatagataggtagatagcttttggatgattgaggcatgcttatattatgaaaaaaattgctaataaagataaatactacatgttcagaataaaagttacatttttcaaatattga

SEQ ID NO: 49823 - DNA, 120 bp, Artificial Sequence
  ENSG00000066583_0 (sequence is synthesized)
gcagacgctcgggggaacatggcggctgcggagccggcggtccttgcgctccccaacagcggcgccgggggcgcgggggcgccgtcgggcacagtcccggtgctcttctgtttctcagtc

SEQ ID NO: 49824 - DNA, 120 bp, Artificial Sequence
  ENSG00000066583_1 (sequence is synthesized)
ttcgcgcgaccctcgtcggtgccacacggggcgggctacgagctgctcatccagaagttcctcagcctgtacggcgaccagatcgacatgcaccgcaaattcgtggtgcagctgttcgcc

SEQ ID NO: 49825 - DNA, 120 bp, Artificial Sequence
  ENSG00000066583_2 (sequence is synthesized)
gaggagtggggccagtacgtggacttgcccaagggcttcgcggtgagcgagcgctgcaaggtgcgcctcgtgccgttgcagatccagctcactaccctgggaaatcttacaccttcaagc

SEQ ID NO: 49826 - DNA, 120 bp, Artificial Sequence
  ENSG00000066583_3 (sequence is synthesized)
actgtgtttttctgctgtgatatgcaggaaaggttcagaccagccatcaagtattttggggatattattagcgtgggacagagattgttgcaaggggcccggattttaggaattcctgtt

SEQ ID NO: 49827 - DNA, 120 bp, Artificial Sequence
  ENSG00000066583_4 (sequence is synthesized)
attgtaacagaacaataccctaaaggtcttgggagcacggttcaagaaattgatttaacaggtgtaaaactggtacttccaaagaccaagttttcaatggtattaccagaagtagaagcg

SEQ ID NO: 49828 - DNA, 120 bp, Artificial Sequence
  ENSG00000066583_5 (sequence is synthesized)
gcattagcagagattcccggagtcaggagtgttgtattatttggagtagaaactcatgtgtgcatccaacaaactgccctggagctagttggccgaggagtcgaggttcacattgttgct

SEQ ID NO: 49829 - DNA, 120 bp, Artificial Sequence
  ENSG00000066583_6 (sequence is synthesized)
gatgccacctcatcaagaagcatgatggacaggatgtttgccctcgagcgtctcgctcgaaccgggatcatagtgaccacgagtgaggctgttctgcttcagctggtagctgataaggac

SEQ ID NO: 49830 - DNA, 120 bp, Artificial Sequence
  ENSG00000066583_7 (sequence is synthesized)
catccaaaattcaaggaaattcagaatctaattaaggcgagtgctccagagtcgggtctgctttccaaagtataggacatttgaagaactggtatgctactcactggtgaaggacagtca

SEQ ID NO: 49831 - DNA, 120 bp, Artificial Sequence
  ENSG00000066583_8 (sequence is synthesized)
caagctcttcttatctctactagaattaaaatgttaagtcaaaaacggctccttttttgcgcctcctagtgaaacttaaccagctagaccatttgagtaccagcatttagttacaaacgt

SEQ ID NO: 49832 - DNA, 120 bp, Artificial Sequence
  ENSG00000066583_9 (sequence is synthesized)
caaaggcttccggtgctgcttaccttccttttttgttaatgtgcttttatttattaaaaaaaattacaatgaagatgcctgttttgtctctactgtgtactctgatcgtatctttccaaa

SEQ ID NO: 49833 - DNA, 120 bp, Artificial Sequence
  ENSG00000066583_10 (sequence is synthesized)
gtgcagactcttgtgaagttttcttaaattgttcactttaaagaaaatgacgtaccaacaatgatttggcttttatattactgtaagatgttataatgttaatgtggatgtagtgctttt

SEQ ID NO: 49834 - DNA, 120 bp, Artificial Sequence
  ENSG00000066583_11 (sequence is synthesized)
actttacagattgattggaataagattattgcatatgaatttacccacaggactctgaatcatgttacccactcccctcacaatgttgtccacttagtgagttgcattgatctatccgta

SEQ ID NO: 49835 - DNA, 120 bp, Artificial Sequence
  ENSG00000066583_12 (sequence is synthesized)
ccaaatgatgttgaataattacatatctttcttgactatactgatttcttattttggtcactattactaaatctctgttaatattctctcttttaactgaaaagggatgggatagaaggg

SEQ ID NO: 49836 - DNA, 120 bp, Artificial Sequence
  ENSG00000066583_13 (sequence is synthesized)
tttgcaatgccatattattggtggagggctgttttaacatctttgaagtatggcttgctgaatatctttaccaacatcttgaatatatattctagtgtccacaagatttagcaaaaagat

SEQ ID NO: 49837 - DNA, 120 bp, Artificial Sequence
  ENSG00000066583_14 (sequence is synthesized)
aaagcttgggtggaatatcattttaaaatgttcatgttctgttctatattttcttcacctactctccaaatattgtaatgcaaaaagtctcagtaatgatttggtagtattaattttgtg

SEQ ID NO: 49838 - DNA, 120 bp, Artificial Sequence
  ENSG00000066583_15 (sequence is synthesized)
gtcattgtttctcttcgataaatttattttcattaaatacttgttagagggttttgaaatgtttttcaaatatgtgaaatgtgaaactgctgtcttttatattaaagtaattaaagaaaa

SEQ ID NO: 49839 - DNA, 120 bp, Artificial Sequence
  ENSG00000066629_0 (sequence is synthesized)
gccagcgccggtcgcggtcgggctcagctcagtgtgtggtgagcggcggcggcgcggccgggccggggagcgggcgcggcccggcggcctcagcatggaggacggcttctccagctacag

SEQ ID NO: 49840 - DNA, 120 bp, Artificial Sequence
  ENSG00000066629_1 (sequence is synthesized)
ccggcggcctcagcatggaggacggcttctccagctacagcagcctgtacgacacgtcctcgctgctccagttctgcaacgatgacagcgcttctgctgcaagtagcatggaggtgacag

SEQ ID NO: 49841 - DNA, 120 bp, Artificial Sequence
  ENSG00000066629_2 (sequence is synthesized)
accgcattgcttcactggagcagagagtccagatgcaagaagacgacatccagctgctcaaatcagctctagctgatgtggttcggcggctgaacattactgaggaacagcaggccgtgc

SEQ ID NO: 49842 - DNA, 120 bp, Artificial Sequence
  ENSG00000066629_3 (sequence is synthesized)
ttaacaggaaaggacctaccaaagcaagaccactgatgcagaccctgcctttaagaaccacggtcaacaatggcactgtgttaccaaagaaacctactggctctctaccatccccctccg

SEQ ID NO: 49843 - DNA, 120 bp, Artificial Sequence
  ENSG00000066629_4 (sequence is synthesized)
gggtcaggaaagaaactgctgtgccagcaaccaaaagattaaacagatctgtgagtcttctcaatgcttgcaaactgaatagatcgacaccaagtaacatcaagaggaccagctcttctg

SEQ ID NO: 49844 - DNA, 120 bp, Artificial Sequence
  ENSG00000066629_5 (sequence is synthesized)
aacgagtgtctcctgggggtcgaagggaaagcaatggggattccagaggaaaccggaatcgcacaggctccaccagcagctcttccagtggcaaaaagaacagtgaaagcaaacccaagg

SEQ ID NO: 49845 - DNA, 120 bp, Artificial Sequence
  ENSG00000066629_6 (sequence is synthesized)
agcctgtattcagtgcagaagaaggctatgtaaaaatgtttcttcgtggacgccctgttaccatgtacatgcccaaagatcaagtggattcttacagcttggaagcaaaagtagaacttc

SEQ ID NO: 49846 - DNA, 120 bp, Artificial Sequence
  ENSG00000066629_7 (sequence is synthesized)
caaccaagagactcaagctggaatgggtctatgggtacaggggtcgagactgccgtaacaacctgtacttgcttccgacgggagagaccgtctacttcatcgcatccgtggtggtgttat

SEQ ID NO: 49847 - DNA, 120 bp, Artificial Sequence
  ENSG00000066629_8 (sequence is synthesized)
acaacgtggaggagcaactgcagaggcattacgctggccacaacgatgacgtgaagtgcctagcagttcatcctgatcggatcacgatagcaacaggacaagttgcgggcacatcgaagg

SEQ ID NO: 49848 - DNA, 120 bp, Artificial Sequence
  ENSG00000066629_9 (sequence is synthesized)
atggaaaacaattgcccccacatgtgcgcatctgggattctgtgacattgaatactctccacgtcattggaataggtttttttgaccgagcagtcacctgtattgcattctcaaaatcta

SEQ ID NO: 49849 - DNA, 120 bp, Artificial Sequence
  ENSG00000066629_10 (sequence is synthesized)
atggaggaaccaatctctgtgctgtggatgactccaacgaccatgtgctctctgtatgggactggcagaaagaagaaaaactagcagatgtgaagtgctctaatgaagctgtgtttgctg

SEQ ID NO: 49850 - DNA, 120 bp, Artificial Sequence
  ENSG00000066629_11 (sequence is synthesized)
cggatttccaccccacggacaccaacatcatagttacttgtggaaaatcacatctctacttttggacactagaaggaagctcccttaataagaagcaaggattattcgagaaacaagaaa

SEQ ID NO: 49851 - DNA, 120 bp, Artificial Sequence
  ENSG00000066629_12 (sequence is synthesized)
agccaaagtttgtcctctgtgtgactttctctgaaaacggtgacaccattactggagattcaagtggcaacatcttagtatggggaaaaggtacaaatcgaataagctatgcagttcagg

SEQ ID NO: 49852 - DNA, 120 bp, Artificial Sequence
  ENSG00000066629_13 (sequence is synthesized)
gggcccatgagggtggcatttttgcactttgtatgttaagagatggcacactggtgtcgggaggtgggaaagaccgaaagctcatttcttggagcggaaactatcaaaaacttcgtaaaa

SEQ ID NO: 49853 - DNA, 120 bp, Artificial Sequence
  ENSG00000066629_14 (sequence is synthesized)
cggagattccagaacagtttggtccaatacggacagtggccgaggggaaaggcgatgtgatcttgattggcacaactcgaaactttgtcctgcagggcactctgtcaggggacttcacac

SEQ ID NO: 49854 - DNA, 120 bp, Artificial Sequence
  ENSG00000066629_15 (sequence is synthesized)
ccattactcagggtcacactgatgagctctggggactggccatccatgcctcaaaatctcagttcttgacctgtgggcatgacaagcatgccactctctgggacgctgtgggtcaccgtc

SEQ ID NO: 49855 - DNA, 120 bp, Artificial Sequence
  ENSG00000066629_16 (sequence is synthesized)
gacacagaaacaaaagacttggtcaccgttcacacagatggaaacgaacagctctctgtaatgcgatactcaccagatgggaatttcttagccataggctcacatgacaactgcatctat

SEQ ID NO: 49856 - DNA, 120 bp, Artificial Sequence
  ENSG00000066629_17 (sequence is synthesized)
atatatggcgttagtgacaacgggaggaagtacacgcgagtgggcaagtgctcgggtcattccagcttcattactcacctggactggtctgtaaactcacagttcctcgtgtcaaattcc

SEQ ID NO: 49857 - DNA, 120 bp, Artificial Sequence
  ENSG00000066629_18 (sequence is synthesized)
ggagactacgaaatcctctactgggttccctctgcctgtaagcaagtcgtaagtgtggaaactacaagagacattgaatgggctacctatacctgcactttgggattccatgtttttgga

SEQ ID NO: 49858 - DNA, 120 bp, Artificial Sequence
  ENSG00000066629_19 (sequence is synthesized)
gtgtggccagaaggctcggacggaaccgacatcaatgccgtctgtcgggcccatgagaagaaactcctgtcaacaggcgacgactttggcaaagtgcacctcttctcatacccctgctcg

SEQ ID NO: 49859 - DNA, 120 bp, Artificial Sequence
  ENSG00000066629_20 (sequence is synthesized)
cagttcagggctccaagccacatctacggcgggcacagcagccatgtcaccaatgtcgatttcctctgtgaagacagccacctcatctccacgggcgggaaagacacaagcatcatgcag

SEQ ID NO: 49860 - DNA, 120 bp, Artificial Sequence
  ENSG00000066629_21 (sequence is synthesized)
tggcgcgtcatttagtacccaccgagagctgtggggagcagcatgggcaaggaagacacagactcgcattacccttggtcactgtgatttctgttttgtttaaaaaattcttacaaacct

SEQ ID NO: 49861 - DNA, 120 bp, Artificial Sequence
  ENSG00000066629_22 (sequence is synthesized)
caggaaaactgtgccctccgccggctaccttagcttagcgtgtcagcgggcgccacagcggatcagcggttccgtgttcacttttgttgtacaatatatgacacagtgcacattgaatac

SEQ ID NO: 49862 - DNA, 120 bp, Artificial Sequence
  ENSG00000066629_23 (sequence is synthesized)
caacaaggttgcaacgtttacattatagccacatcaacagaagtaactggtatattcttagtaacttttctatgaactcttcaaaaatggtcacagaatgccttttaaaacattgtatat

SEQ ID NO: 49863 - DNA, 120 bp, Artificial Sequence
  ENSG00000066629_24 (sequence is synthesized)
aatcttcactgtttcaccatctagcttgctaagtcaaatatttatgatgataatgaggtactgaaccacgatggctgttgaggaattggtcctaaaaggacagatcacttcagaagagtg

SEQ ID NO: 49864 - DNA, 120 bp, Artificial Sequence
  ENSG00000066629_25 (sequence is synthesized)
aataactgatttgcacagctgaatcaggagacacaaagatgagactgtgtttggttacattttccaaagtttcattgcattctcccttggggaggctgtgagagagggcttgtatccctc

SEQ ID NO: 49865 - DNA, 120 bp, Artificial Sequence
  ENSG00000066629_26 (sequence is synthesized)
ttgtgctaagcagactctactcctaactgacttcaatatttcagcagggtacacaggcgtttccaagtttcagtgacaccgtcctgcctaaccagatgcggtcagcctcttcacacccac

SEQ ID NO: 49866 - DNA, 120 bp, Artificial Sequence
  ENSG00000066629_27 (sequence is synthesized)
ctggcttgcatcccccatcccttgttcacacgccctgattcacggtgagacattttgccaccttcttgtgtatattacttggcatgagatgatattgtacttgtataggattctagcaat

SEQ ID NO: 49867 - DNA, 120 bp, Artificial Sequence
  ENSG00000066629_28 (sequence is synthesized)
tcataataaatatgtaagactaggctttactgtcttatgcttatggacattgtatatttgtattttatgaccaagtagaccaagtcagaaagatctctctcgagcgtaccataaacctgc

SEQ ID NO: 49868 - DNA, 120 bp, Artificial Sequence
  ENSG00000066629_29 (sequence is synthesized)
agagagaagtctcgaaaggctccaccaggtaccaagggcagctgcttttcctgtcttttgtgcatgggcgacccattacagtatgagataagattgagttctgatgcgttaaacggaggt

SEQ ID NO: 49869 - DNA, 120 bp, Artificial Sequence
  ENSG00000066629_30 (sequence is synthesized)
ggcagaaatttgtcaagaaggccttatccatttcgattgtgtgacagattgaaatttattgtttacattggggaatgtatctcaaatttttaaatagaagagtaataaacagactttaaa

SEQ ID NO: 49870 - DNA, 120 bp, Artificial Sequence
  ENSG00000066629_31 (sequence is synthesized)
gcaaatattaagatttttactcattcaaggcaagtaaatgaatggaattatctgagctctatggcactggttgtttagagtgactgatgaagtgcaactttcaaaaacatttttgatgac

SEQ ID NO: 49871 - DNA, 120 bp, Artificial Sequence
  ENSG00000066629_32 (sequence is synthesized)
atcaccagcctactgcagaagtgcagggcaccagtaaacaccatgtattattgaagatgaatctgtttgtatgtatccttgtcaaatatattctataatgaaataaaatctgaaaagtgg

SEQ ID NO: 49872 - DNA, 120 bp, Artificial Sequence
  ENSG00000066629_33 (sequence is synthesized)
atttaaaattagatatgattcacactatattctgtttcatatgcagattttattctcacctgggccatttgcagatgagactgtagtttgcagatgagactgtagtttgcagatggcgtg

SEQ ID NO: 49873 - DNA, 120 bp, Artificial Sequence
  ENSG00000066629_34 (sequence is synthesized)
gaagcattcatcaggggagataaccataaaggatttggcctaattaccatactcaattgtcagtttacgtggttttgtgaatactggcaaaagcaattgtttttaaattaacaatggaga

SEQ ID NO: 49874 - DNA, 120 bp, Artificial Sequence
  ENSG00000066629_35 (sequence is synthesized)
gaatgataagatgagggaaggaaaaggcattcattattgacttacatgtcagtaaggtctgcttttatttctatgtactcctgtttgccaagctcaataatggacaaaggatacaaacac

SEQ ID NO: 49875 - DNA, 120 bp, Artificial Sequence
  ENSG00000066629_36 (sequence is synthesized)
acacacacacatctactattttagataaatgtactgttatatatatatgtaaactactattgctctctttataatgattaatcactttattatgaatgaatgaatgaatttgatggattt

SEQ ID NO: 49876 - DNA, 120 bp, Artificial Sequence
  ENSG00000066629_37 (sequence is synthesized)
aagccctgctgggtgggtgacagccgctgaggctctgagtgaccctgcaggctggtggccagccggccgcccatcttccacaccatgtcggacggcgagggcccctccgccgatgacagc

SEQ ID NO: 49877 - DNA, 120 bp, Artificial Sequence
  ENSG00000066629_38 (sequence is synthesized)
cgcggccgggccggggagcgggcgcggcccggcggcctcagcatggaggacggcttctccagctacagcagcctgtacgacacatgacagcgcttctgctgcaagtagcatggaggtgac

SEQ ID NO: 49878 - DNA, 120 bp, Artificial Sequence
  ENSG00000066629_39 (sequence is synthesized)
attctggctgaagtaagggatgagacagcatgcccagaagctgtgtccagcacttggacaggcgccctggtcggcaccctgggaacctcggccgtgcactgccagctttctgggtccatc

SEQ ID NO: 49879 - DNA, 120 bp, Artificial Sequence
  ENSG00000066629_40 (sequence is synthesized)
ccagccctgggtgtatggcagatgccttgagatttaacagcccttgagtcaggcctgcaacgtcttatctgcgatttcaacatccagaaagctgtgaaacccagatgttttttgatgaca

SEQ ID NO: 49880 - DNA, 120 bp, Artificial Sequence
  ENSG00000066629_41 (sequence is synthesized)
cacttcagaaacccatattcacacacatgtgcacgtgttcacatgaaaagacccccttgcactcaggcccccagagccgaggcattgtgcagccccacagcagccaccttcacagctgct

SEQ ID NO: 49881 - DNA, 120 bp, Artificial Sequence
  ENSG00000066629_42 (sequence is synthesized)
aacagcccctgtgccatgcctgctgcaggcactgtctgctctaggaggggctcttgttttcatggaacccagtggtgaagagacaccccactggcccttctcttccccaattcctgtttc

SEQ ID NO: 49882 - DNA, 120 bp, Artificial Sequence
  ENSG00000066629_43 (sequence is synthesized)
ttcattccccatcatttacctgctctttctgtctggtcaagaaagcatgtctcagccaggcccagtggctcagccaggcacagtggctcacaccttctaaccagcactttaggagtctga

SEQ ID NO: 49883 - DNA, 88 bp, Artificial Sequence
  ENSG00000066629_44 (sequence is synthesized)
taataataataaagagtagctgggagtggtggtacacacccgcggtcccagctacatgggaggctggggtaggaggattgcttgagcc

SEQ ID NO: 49884 - DNA, 120 bp, Artificial Sequence
  ENSG00000066629_45 (sequence is synthesized)
gaggattgcttgagcctgggaggtcaagggtgcagagagcaatgattgcaccactgcactgtgacctggatgacagagcaaaaccctgtctccagaaaaagaaagaaagaaagaaagcag

SEQ ID NO: 49885 - DNA, 120 bp, Artificial Sequence
  ENSG00000066629_46 (sequence is synthesized)
aaaagaaagaaagaaagaaagcaggtctcaaaagcaatggatgagtattctttaactacaatgtagcagactctttattaaaaatgaaatttgatgtttatttttaatcatgttcaaccc

SEQ ID NO: 49886 - DNA, 120 bp, Artificial Sequence
  ENSG00000066629_47 (sequence is synthesized)
tagaggtaaacatgcacattacatttccatttttcttacagaaattcatctggaacatgtttatttattttttgcatgaaatcaacagtgatacaaagttgtcccaaagcaaatgttatt

SEQ ID NO: 49887 - DNA, 120 bp, Artificial Sequence
  ENSG00000066629_48 (sequence is synthesized)
tatctatttagagttgccttaacattgcaattgcatttaacagtgttacttttaacattgcctcgtggcctcagccatgtaattttgaagtttactgttgaaattttctgacaagaagtt

SEQ ID NO: 49888 - DNA, 120 bp, Artificial Sequence
  ENSG00000066629_49 (sequence is synthesized)
gttctttctgagttcattgtcagattttctgagtacagtctctcaaccatcctaagagctgaaaaatacttgttatgagcctgcattctatttacagtgtaccctttgaatgggaattta

SEQ ID NO: 49889 - DNA, 120 bp, Artificial Sequence
  ENSG00000066629_50 (sequence is synthesized)
accctttgaatgggaatttacaagctgtactaaacacacgattgaatatatctctacattttgagtttgatggtaaagtgaactttcgtttgaaagtcagctgggcacggtggctcatgc

SEQ ID NO: 49890 - DNA, 120 bp, Artificial Sequence
  ENSG00000066629_51 (sequence is synthesized)
gatgttttagctgcgtcgagtcctcaacacgggggacttccagcctggtaccaggatagcctctctggcccagtgtgagcgaaggttcgagctgacttgccagtcccgtgctaagtctca

SEQ ID NO: 49891 - DNA, 120 bp, Artificial Sequence
  ENSG00000066629_52 (sequence is synthesized)
ctgaggcagggccttgctgccgcggaaaaacgtgtggacagaggaacgcgccggtcggatgtgggccacagtgagccgcggcgtggaaacggccgaaatatgacagcgcttctgctgcaa

SEQ ID NO: 49892 - DNA, 120 bp, Artificial Sequence
  ENSG00000066629_53 (sequence is synthesized)
aaatgagagtccaggataggtcaagataagaggcagagttttgtcatgttgcctaggctgatatcaaactcctgcgctcaagcagtctgcctacctcagcctcccaaagtgttctctgtg

SEQ ID NO: 49893 - DNA, 120 bp, Artificial Sequence
  ENSG00000066629_54 (sequence is synthesized)
ttctctggttggagcacagtaagtgaagggaagaatgatgtacaatgagattggagaggcgaagaagatcacggagaggtttatagaccctgataaggagttggaaattatgattctgaa

SEQ ID NO: 49894 - DNA, 120 bp, Artificial Sequence
  ENSG00000066629_55 (sequence is synthesized)
agaaagcaggagcctggatgggaagaggagcagccaggccgaggtgggcgccgctccccctccccggccctgcccaggtcctcagagagctgggacctgagactcattagtgcctgcata

SEQ ID NO: 49895 - DNA, 120 bp, Artificial Sequence
  ENSG00000066629_56 (sequence is synthesized)
atggatgcctccttctctcttcttggaaatccccagcccatcttgcttaatggccacgagggaagtgggataccggcgctctgctcgtaaagccggcctctgccccccgcatctcccctt

SEQ ID NO: 49896 - DNA, 75 bp, Artificial Sequence
  ENSG00000066629_57 (sequence is synthesized)
gtgttggcacatacctgtagtcccacctacttgagaggctgatgtgggaggattgctcgagcctgggaggctgag

SEQ ID NO: 49897 - DNA, 120 bp, Artificial Sequence
  ENSG00000066629_58 (sequence is synthesized)
aggctgatgtgggaggattgctcgagcctgggaggctgagactacagtgagctgcgatcataccactgtactccggactgagcaatgggaatgagacccttcctcaaaaaaaaaaaaaaa

SEQ ID NO: 49898 - DNA, 120 bp, Artificial Sequence
  ENSG00000066629_59 (sequence is synthesized)
aaacttttgtttcaaactgtttatttttatgttacttttttccctaggatatcaattagaatgacagaagggtaaaagtttctcttttatactgaaaggctagagaggataaagcatttg

SEQ ID NO: 49899 - DNA, 120 bp, Artificial Sequence
  ENSG00000066629_60 (sequence is synthesized)
tccatggcttagaaggctttgcatcttgaacatcctggatgcagagcggtcacaggccatccccacagataggttcctacagatggggtgtgtgaccatgttctctcctcctccacaccc

SEQ ID NO: 49900 - DNA, 120 bp, Artificial Sequence
  ENSG00000066629_61 (sequence is synthesized)
ctctggggcttacagctaccaaagcccaaaatccttcagggctcaggcctcagggctaaacagtgattcacagactttcacacttccccacacacccccgcgcatgccaactttttgttt

SEQ ID NO: 49901 - DNA, 120 bp, Artificial Sequence
  ENSG00000066629_62 (sequence is synthesized)
cggtaaataaagacattcaaaagtaatgaccatctactctggccctcatttcataaaagcaaggctactttatcaccaatgtcagatgaacaatctcagaataaggctaagttctaaaat

SEQ ID NO: 49902 - DNA, 120 bp, Artificial Sequence
  ENSG00000066629_63 (sequence is synthesized)
taaaatacattttatttcatgacaaactccctctacattttcctcactattctgtagacaggcactggggagcctcccacacagctagggcccctggagcacaggctgcaaagaccccag

SEQ ID NO: 49903 - DNA, 120 bp, Artificial Sequence
  ENSG00000066629_64 (sequence is synthesized)
gaggtcccagaatctacctgccttaggcccagagaggggtggacgttgcccaggaccatgccgctggaacaggaaaaaggttttccagttttaccccaggcaattctccatcaaaatgcc

SEQ ID NO: 49904 - DNA, 120 bp, Artificial Sequence
  ENSG00000066629_65 (sequence is synthesized)
atctgactacaaagaggcaggcacttgcttccggatcccctctctgctctgcagaactcccaggccacggagctgatttcactaactgcagccgtccccctggggcgccccgtctgccct

SEQ ID NO: 49905 - DNA, 120 bp, Artificial Sequence
  ENSG00000066629_66 (sequence is synthesized)
gtgaaagattaaggaggttaagctggtggaggtgaagcccctcacccaagccctagaacacggatccagctggcctcaaaatctgtgctccttccaccatgttaagctgggaagtattgg

SEQ ID NO: 49906 - DNA, 120 bp, Artificial Sequence
  ENSG00000066629_67 (sequence is synthesized)
ttggaaatgtctatgaagcagtcgcttttgtcccaaataaagtctccagcaacttctaaacattttgaatagatggttcttaaatgaccctatttctaataaaaagctgcttaaggacaa

SEQ ID NO: 49907 - DNA, 120 bp, Artificial Sequence
  ENSG00000066629_68 (sequence is synthesized)
gtatagtttaactaccgtggaacagtgttggcagggacttctaaggccaatgaaatgaagacagtgttttaccctcccagggtcattccagcttcattactcacctggactggtctgtaa

SEQ ID NO: 49908 - DNA, 120 bp, Artificial Sequence
  ENSG00000066651_0 (sequence is synthesized)
gggcagctgcaatggcgctgtcgtgtacccttaacaggtatctgctcctcatggcgcaggagcatctggagttccgcctgccggaaataaagtctttgcttttgctttttggaggtcagt

SEQ ID NO: 49909 - DNA, 120 bp, Artificial Sequence
  ENSG00000066651_1 (sequence is synthesized)
ttgccagcagtcaagaaacttatggaaagtcaccattttggattcttagcattccctctgaagatattgcaagaaatttgatgaaacggacagtgtgtgccaagtctatatttgaactat

SEQ ID NO: 49910 - DNA, 120 bp, Artificial Sequence
  ENSG00000066651_2 (sequence is synthesized)
ggggtcatggacaatctcctgaggagctgtacagttctcttaaaaactaccctgtggagaagatggttccatttctacattcggactctacatataaaataaagattcacacttttaata

SEQ ID NO: 49911 - DNA, 120 bp, Artificial Sequence
  ENSG00000066651_3 (sequence is synthesized)
agacattgacacaagaagagaaaatcaagcgaatagatgcacttgaatttctgccatttgaaggaaaagtgaatttaaagaaaccgcaacatgtattttctgttttggaggattatggtt

SEQ ID NO: 49912 - DNA, 120 bp, Artificial Sequence
  ENSG00000066651_4 (sequence is synthesized)
tagacccaaactgcatccctgagaatccacataatatttattttggtagatggattgcagatggacagagagagcttattgagtcatacagtgtcaaaaagagacactttattggaaata

SEQ ID NO: 49913 - DNA, 120 bp, Artificial Sequence
  ENSG00000066651_5 (sequence is synthesized)
caagtatggatgctggtttgtcattcattatggctaaccatggaaaagtgaaagaaaatgatattgtctttgatccatttgttggaacaggtggcctgctgatagcatgtgctcattttg

SEQ ID NO: 49914 - DNA, 120 bp, Artificial Sequence
  ENSG00000066651_6 (sequence is synthesized)
gtgcatatgtgtatgggacagacatagactacaacacagttcatggcttgggaaaggctactaggaaaaaccagaagtggagaggaccagatgaaaacattagggccaatcttcgtcaat

SEQ ID NO: 49915 - DNA, 120 bp, Artificial Sequence
  ENSG00000066651_7 (sequence is synthesized)
atctaaaccttcctggaggaagggcacatattttgatgcaatcattactgatcctccatatggtatcagagaatctacaagaagaacaggttcacagaaggagataccaaaggggataga

SEQ ID NO: 49916 - DNA, 120 bp, Artificial Sequence
  ENSG00000066651_8 (sequence is synthesized)
aaaatgggaaaaatgtccagaaagccatgttcctgtttccttgagttatcatctgagtgatatgtttcttgacctgttaaacttcgcagctgagaccctcgttttaggtggaagactagt

SEQ ID NO: 49917 - DNA, 120 bp, Artificial Sequence
  ENSG00000066651_9 (sequence is synthesized)
ctattggttaccggtgtatacgccagaatacactgaagagatggtgccttggcacccttgcctggaactcgttagcaactgcgagcagaagctttccagtcacacatcaaggcgcttgat

SEQ ID NO: 49918 - DNA, 120 bp, Artificial Sequence
  ENSG00000066651_10 (sequence is synthesized)
cacaatggaaaaggtgaagaaatttgagaatcgggaccagtattcacatctgctaagtgatcattttctgccataccaaggtcataattccttccgtgagaaatattttagtggggtaac

SEQ ID NO: 49919 - DNA, 120 bp, Artificial Sequence
  ENSG00000066651_11 (sequence is synthesized)
aaaaagaattgccaaggaagaaaaatccacccaggaatgaaaattaagattttgacaatgaagaaagaataagaatttgatttaaaaagacatctggatgtgaactttcatgtatgatcc

SEQ ID NO: 49920 - DNA, 120 bp, Artificial Sequence
  ENSG00000066651_12 (sequence is synthesized)
agaaaataggtacggttttaaaatattttatatagaaaagctacaaagtaaattgagcaatgcttttaaagttatctttgttttatagacttttttgttgtatgtattacagtctttata

SEQ ID NO: 49921 - DNA, 120 bp, Artificial Sequence
  ENSG00000066651_13 (sequence is synthesized)
atcttatttaatgtatatttgtactttcaagtactgatggagatagactcaaaacagttatttttttacaattaatctacaaagggaattaatattgttgacttttaaaacatctgctgg

SEQ ID NO: 49922 - DNA, 120 bp, Artificial Sequence
  ENSG00000066651_14 (sequence is synthesized)
atatattatatgcaattaatagtagttaagaatttattcatttggtagatatgtttatttggtttttggttgtcatcgatttacattgccactaataaaccatattgagaatttctaaaa

SEQ ID NO: 49923 - DNA, 120 bp, Artificial Sequence
  ENSG00000066651_15 (sequence is synthesized)
aagacctttatgatgatccacttccacttcatgaatagtaaatctatttttactgaataaagtaattatggaaaatattttaaactctagaagcttcaataatgatgtgtgattggatgg

SEQ ID NO: 49924 - DNA, 120 bp, Artificial Sequence
  ENSG00000066651_16 (sequence is synthesized)
ggcgctgtcgtgtacccttaacaggtatctgctcctcatggcgcaggagcatctggagttccgcctgccggtgagtccgtagcgccctccggaacttccgacggaagaggacgctggagt

SEQ ID NO: 49925 - DNA, 120 bp, Artificial Sequence
  ENSG00000066651_17 (sequence is synthesized)
ggagtggagtgggtggaggtgatctgcatagcccgaggaagctgggattcgggggtcttcgctggtctgcgcgggtcacgcgtccccagtcctcgggcggggaaataaagtctttgcttt

SEQ ID NO: 49926 - DNA, 120 bp, Artificial Sequence
  ENSG00000066651_18 (sequence is synthesized)
ggtatcataaaatatgcttgaacttgggttaattcctcttggactgaattgtagtgccataaaccaagcttttcaaaaagattggatgcaaaactattatggcaacaggaatttttatca

SEQ ID NO: 49927 - DNA, 120 bp, Artificial Sequence
  ENSG00000066651_19 (sequence is synthesized)
acataaagcaggatttaatgcagggtgaaggatttctactgtaaatgcttcaaatcatcatcatgggggagaagagcacagcagtatttccttccaaaataatcccaagctacattggtt

SEQ ID NO: 49928 - DNA, 120 bp, Artificial Sequence
  ENSG00000066651_20 (sequence is synthesized)
atggagaacagatacaccttggaaccagagtccaccacggagaagatgccctatacgtgtatgtaaaatgctgaattaaataacattgtttaaccattttgccagccacagaaataaact

SEQ ID NO: 49929 - DNA, 120 bp, Artificial Sequence
  ENSG00000066651_21 (sequence is synthesized)
aacttaaactcatatgtagccctggtacataatgcagtgtctggtatatagtaggtgctcaataaaggtctgtttaataataataataaatgtctgatggataaagtaaagataagcatt

SEQ ID NO: 49930 - DNA, 120 bp, Artificial Sequence
  ENSG00000066651_22 (sequence is synthesized)
cagtgtacttgtaaattgggtcttctcaaaactcactctaaccaaatggataaggttctgttaaggaagcacaggaaagcttttctgttccccttgacaactagttcttctaggtggcct

SEQ ID NO: 49931 - DNA, 120 bp, Artificial Sequence
  ENSG00000066651_23 (sequence is synthesized)
aatatcgaatgagtgttttaaggcagttttacttggaagttgacagaacaagataagttagacatcagtacattttactgttatgttgaaattaaaataactatttacttgtatacataa

SEQ ID NO: 49932 - DNA, 120 bp, Artificial Sequence
  ENSG00000066651_24 (sequence is synthesized)
aattaagattttaaatgaaagcaaattttgaataaatgtaggtttcagtgagttaaaacattacttttcctaaatgacagaaaataagaatactctgtttaatactttctctcttccttt

SEQ ID NO: 49933 - DNA, 120 bp, Artificial Sequence
  ENSG00000066651_25 (sequence is synthesized)
tctagagatggcagatattcagttgcagttcaaaccaatgaagtcagaatctctggaggtgggacaaaggtatttgtagtttttaggcttctcagatgattccaatgtgcagtgaagatt

SEQ ID NO: 49934 - DNA, 120 bp, Artificial Sequence
  ENSG00000066651_26 (sequence is synthesized)
gaatgctattgcttagaggaaaattcagtcacctgatatttgaagtttagctcttaggtggcactagaagaggaccacaagcctgccagagggaggagagtattgcttcttcctgttccc

SEQ ID NO: 49935 - DNA, 120 bp, Artificial Sequence
  ENSG00000066651_27 (sequence is synthesized)
attagtgtcacctcagcagtgacttttcaccctggagtggcagaggaaaagacagtgagagagcaagagcagattgagaagcagaagagtgagtcgcaaaaagagaaaatgacagaaatg

SEQ ID NO: 49936 - DNA, 120 bp, Artificial Sequence
  ENSG00000066651_28 (sequence is synthesized)
aacatattgttgccaacataaacatattttctgtgtttcttaggttgatgtacccatattttggagcaaactggtttacttgtaaagattattaagaactcaatgggttagtcagaattt

SEQ ID NO: 49937 - DNA, 120 bp, Artificial Sequence
  ENSG00000066651_29 (sequence is synthesized)
catccagtttctaaggcttgcatgtgcctcacaaatattttaagtcaacatgtcttctgactacctatctgcctttctttctacttcttttccccctgtagctaagaccacaaaaagctt

SEQ ID NO: 49938 - DNA, 120 bp, Artificial Sequence
  ENSG00000066651_30 (sequence is synthesized)
tggcttgcagaaaatatacatttccatagaaaccaaaccaaaagcaatagaaaagggagagattgaatataaaatgtcttttggttgccaaatttcagcccatcgcctgatttcttttag

SEQ ID NO: 49939 - DNA, 120 bp, Artificial Sequence
  ENSG00000066651_31 (sequence is synthesized)
ttttgtgttgatttctttaattcaatgttaacagctagaccaaggcttttcaaattaaaaaaaaactttaaaaattaaagtttatatgttggctgagttaaaacagatagttataaacat

SEQ ID NO: 49940 - DNA, 120 bp, Artificial Sequence
  ENSG00000066651_32 (sequence is synthesized)
gcacaaacttgaagaatttggaaaaataaccttcatgaatgaggtttttgtttcaatgtgatttctatgggggcgtcatctttgctgggttaagcaaagacggtgtttgctgtaaattta

SEQ ID NO: 49941 - DNA, 120 bp, Artificial Sequence
  ENSG00000066651_33 (sequence is synthesized)
aactgttctctgacagctgatgacctcattcatttatagaattaggatgattttttttcccttttatatgaagtgtaaggaaagtgtggttggatatagatagtgggaagtaacaaatgg

SEQ ID NO: 49942 - DNA, 120 bp, Artificial Sequence
  ENSG00000066651_34 (sequence is synthesized)
ttacatcagcagttgcataaagggtgtttcttgctcttcagcaaagtatgaatttctgagaaataaagcagtaggtctgacaactggctgtggcttaccaagtaatcatggcaggtagct

SEQ ID NO: 49943 - DNA, 120 bp, Artificial Sequence
  ENSG00000066651_35 (sequence is synthesized)
tgtgagtgagcatgagactagcaccactttctgtacctgggagctgtgtggtcgcacagggccctgagctcagaaggccccatgttttgtttaatgctctgctgttgctgtcttgacagt

SEQ ID NO: 49944 - DNA, 120 bp, Artificial Sequence
  ENSG00000066651_36 (sequence is synthesized)
ctcagtaatttttgaacaatttaatcttttcacattttcattttgcagtgagccctgcaaattactcagctggtctactgcatgggacttatctttcataacattttcaaagttggaaga

SEQ ID NO: 49945 - DNA, 120 bp, Artificial Sequence
  ENSG00000066651_37 (sequence is synthesized)
gaccacttagatttttttccaaccacttaaaaagtagaagacagattcaaaacactgagcagaaatatcagtaaatttgtacccttccatttgagatcctccaaatgtaccaggagtctg

SEQ ID NO: 49946 - DNA, 120 bp, Artificial Sequence
  ENSG00000066651_38 (sequence is synthesized)
ttttatgacttcagcctaccctggtcaccagcagattgagtgcaataaatttgggggcagtgaaaagcattttatattgtgataagtaaagatgacttcaaagccagcttgtactagtgt

SEQ ID NO: 49947 - DNA, 120 bp, Artificial Sequence
  ENSG00000066651_39 (sequence is synthesized)
atctcaaaagccttgaaatatgtatttgtgttaatttagcaattcagccccaggacaaagtatgcaaagctgttacgtacaagcatgtttattataatgttatttgtgatagtcaaaaat

SEQ ID NO: 49948 - DNA, 120 bp, Artificial Sequence
  ENSG00000066651_40 (sequence is synthesized)
tggagataatctaaatgtgattagttaaataaattataatctacttgatggcatatcaggcagccattaaaatgacattttaggtgtgtactactacatattaaaaataatattagaata

SEQ ID NO: 49949 - DNA, 120 bp, Artificial Sequence
  ENSG00000066651_41 (sequence is synthesized)
ttcgtctagcggagaatagagacagctaacaaatgctcaggctggtgtttgaagtattggaatctgcggatcaagctcagtggaggggatggtggtggggattagatgatggagaagttg

SEQ ID NO: 49950 - DNA, 120 bp, Artificial Sequence
  ENSG00000066654_0 (sequence is synthesized)
aggaacaggtaccaaggttgggtggaagaagctatatggctggagccagcttcaagggcttgaggagccaccgacaccacttccagaatggctgctatgctgcctctactggattcaggt

SEQ ID NO: 49951 - DNA, 120 bp, Artificial Sequence
  ENSG00000066654_1 (sequence is synthesized)
tgcagtcgggaggcggggcaggaggcggggcttgggcgggtatcactccacccctttcacgattgcagaccggccttaggacctggcgcagcacggaatgaggcttcgaggccggctagg

SEQ ID NO: 49952 - DNA, 120 bp, Artificial Sequence
  ENSG00000066654_2 (sequence is synthesized)
ggaggccgtcgctcatatccgacgtcaccagttcgcgccggcgatagacgaggacgccaacagcagcggagaaacgtttctctttcctctcagtttgcgcacaccatggcggcccctgcc

SEQ ID NO: 49953 - DNA, 120 bp, Artificial Sequence
  ENSG00000066654_3 (sequence is synthesized)
cagcagactactcagcctggcggcgggaagcgcaaaggcaaggctcagtatgtgctggccaagcgcgctcggcgctgcgacgctggcgggccccgtcagctagagcccgggctacagggc

SEQ ID NO: 49954 - DNA, 120 bp, Artificial Sequence
  ENSG00000066654_4 (sequence is synthesized)
atcctcatcacctgcaatatgaacgagcgcaagtgcgtggaggaggcctacagcctcctcaacgaatacggcgacgacatgtatgggccagaaaagtttacagacaaggatcagcagccc

SEQ ID NO: 49955 - DNA, 120 bp, Artificial Sequence
  ENSG00000066654_5 (sequence is synthesized)
tctggaagtgagggagaggatgatgatgcggaggctgccttgaagaaagaagttggtgacattaaggcatctacagagatgaggttaagaagattccagtcagtggaaagtggagcaaat

SEQ ID NO: 49956 - DNA, 120 bp, Artificial Sequence
  ENSG00000066654_6 (sequence is synthesized)
aacgttgtcttcatcaggacacttgggatagagcctgagaaattggtgcatcatattctccaggatatgtacaaaaccaagaaaaagaagactcgagttattttgcgaatgttacccatc

SEQ ID NO: 49957 - DNA, 120 bp, Artificial Sequence
  ENSG00000066654_7 (sequence is synthesized)
tcaggcacatgcaaggcttttttagaagatatgaaaaaatatgcagaaacatttttggaaccctggtttaaagctccaaacaaagggacatttcagattgtgtacaaatctcgaaataac

SEQ ID NO: 49958 - DNA, 120 bp, Artificial Sequence
  ENSG00000066654_8 (sequence is synthesized)
agtcatgtgaatagagaagaagttatcagagaattggcaggaatagtgtgcaccctcaattcagaaaataaagtggatctcaccaatccacagtacacagtggtagtagaaatcatcaaa

SEQ ID NO: 49959 - DNA, 120 bp, Artificial Sequence
  ENSG00000066654_9 (sequence is synthesized)
gctgtctgttgcctgagtgttgtgaaagattacatgttgtttagaaaatacaatctccaggaggtggtgaagagccctaaggatccgtcacagcttaactcaaagcagggaaatgggaaa

SEQ ID NO: 49960 - DNA, 120 bp, Artificial Sequence
  ENSG00000066654_10 (sequence is synthesized)
gaagctaaactggaatctgcggacaaatcagaccaaaacaacacagcagaaggaaaaaataaccagcaggtaccagagaatactgaggagctggggcagacaaaaccaacgtctaatcca

SEQ ID NO: 49961 - DNA, 120 bp, Artificial Sequence
  ENSG00000066654_11 (sequence is synthesized)
caggtggtaaatgagggaggagccaaacctgaacttgcaagtcaagccacagaaggatccaagtcaaatgaaaatgacttctcataggaagtcatttggtgttggagctgacagtccagt

SEQ ID NO: 49962 - DNA, 120 bp, Artificial Sequence
  ENSG00000066654_12 (sequence is synthesized)
gtcgcaattttggaaggcaagatgtgagagagacgagaaccattttaggcatagaactacagacatttctgaaaaggttggtgatgaagaacttcagtcttctgagtatacttcagtata

SEQ ID NO: 49963 - DNA, 120 bp, Artificial Sequence
  ENSG00000066654_13 (sequence is synthesized)
ctagtgcaacaagggacacaaagaaattctgtcttaataaagaaagctacttctcaagggtattatgtggactcagtccaagctctcctgtcccattgtgcattgtctgtgacatgcaac

SEQ ID NO: 49964 - DNA, 120 bp, Artificial Sequence
  ENSG00000066654_14 (sequence is synthesized)
ttacaaaactagcaattgtaacaataaatcacagccacttgacaagaaaggatattcattattttcaaatggcttttggactatcaaaaacagtaaggcttttgttcagaaatcaccttt

SEQ ID NO: 49965 - DNA, 120 bp, Artificial Sequence
  ENSG00000066654_15 (sequence is synthesized)
agtcaaaaggtttaagaagcaaattatttagtagcagaacttatctcaggaaaggaaaatatgcatggttggtgagaatctaataacattaaaatgctggggcaagatgcagtacaaagt

SEQ ID NO: 49966 - DNA, 120 bp, Artificial Sequence
  ENSG00000066654_16 (sequence is synthesized)
tgaagagactttattctcaataagttgatttactgatgatatgtcatatgatgcaaaaaaggttttgtgtcattaactgaaaagtagcagcttctctatccaggatgatgagtcaacagg

SEQ ID NO: 49967 - DNA, 120 bp, Artificial Sequence
  ENSG00000066654_17 (sequence is synthesized)
aaatgatgaaattcaaagaaaactttttctattgctaggagcctgccagaacaaaggccaatatataatgttgtgacatcatatctgataaccagaggtctggtatctacactcctggtg

SEQ ID NO: 49968 - DNA, 120 bp, Artificial Sequence
  ENSG00000066654_18 (sequence is synthesized)
ccccatcagtggttgtctccataagtcattttgcgttattaaaaaaaaaaaaagaaatcctgatgttgacattatagcacactgctttctccacagagatgctgatatcaaaaacttgaa

SEQ ID NO: 49969 - DNA, 120 bp, Artificial Sequence
  ENSG00000066654_19 (sequence is synthesized)
gctgatatcaaaaacttgaagatacagtgaagttctgaataatgttacaaaactggttacctgtatcaaagacccatttatgcaaaaatgttaaaaaaaaaaaaaaacacccaaaacaaa

SEQ ID NO: 49970 - DNA, 120 bp, Artificial Sequence
  ENSG00000066654_20 (sequence is synthesized)
aaacctcctgcaccatacagacatccagtggcttctcagaggaagcgttctctacaggatatttgaattgaaaggtgaattgccagagtacttacaataaaacagccagcttttgctgag

SEQ ID NO: 49971 - DNA, 120 bp, Artificial Sequence
  ENSG00000066654_21 (sequence is synthesized)
tgctttggaaatgaaaaatgactacagaaagtagcctattttgcagacgtttttcatcacatgaacaaatggacaagtctctgaaaggttctggggaaaaaaatttttcttaaagcgaca

SEQ ID NO: 49972 - DNA, 120 bp, Artificial Sequence
  ENSG00000066654_22 (sequence is synthesized)
agactcttagatctaaaaggaaactgacttgccaccttgccagaggaattcttgaaatgtttctgcagccacttggccttgaaaataaagggtgcaactctcaaatcttgttctaacccg

SEQ ID NO: 49973 - DNA, 120 bp, Artificial Sequence
  ENSG00000066654_23 (sequence is synthesized)
gctggaggaaccacaagacccaatgaaatagcattttctctccttttcccagcactagtatataacctatgaggaacccttgtctctgaatctgctcagcttgaaattttgtctctgaag

SEQ ID NO: 49974 - DNA, 120 bp, Artificial Sequence
  ENSG00000066654_24 (sequence is synthesized)
gaagagaatgaactcagccctagtctgacagtcctagatttctgtgaaataagagtattcttcaacttagtgctcacactcacataccatgagggttctctgcaggggtttaggggtttc

SEQ ID NO: 49975 - DNA, 120 bp, Artificial Sequence
  ENSG00000066654_25 (sequence is synthesized)
ctgaatttgaaagttttttcaaggcctctttttgggtaaaacaattgaaaaggcagacaccaacaaagtctgcaaaattaactgtccagattaagaatattaaggagctgtaaaattagc

SEQ ID NO: 49976 - DNA, 120 bp, Artificial Sequence
  ENSG00000066654_26 (sequence is synthesized)
ttgtagaaatggacttatccttaagttttaaaaagttaggaaatcctaaaaatgttaggcttcctgcacaagtggctatgttcatttaatggctagtgaacatgggaatgtatttttatc

SEQ ID NO: 49977 - DNA, 120 bp, Artificial Sequence
  ENSG00000066654_27 (sequence is synthesized)
ctcctagctggtggttctgtttggtaaaccagactagaatgatttgagaggggcaaagagaataggcaggaccttccttctatagctttacatatttagaatgttaatacttaatgacat

SEQ ID NO: 49978 - DNA, 120 bp, Artificial Sequence
  ENSG00000066654_28 (sequence is synthesized)
tgaagttaccttgcaatgattgataagaggattattaatatcagttaggggaatagggaggataggattttggtgccttcttcagcagacttgctccaagacaaagattctattttgata

SEQ ID NO: 49979 - DNA, 120 bp, Artificial Sequence
  ENSG00000066654_29 (sequence is synthesized)
gtgcaagacaaaaggactcggaagaaaattggccatatgcctacagagcatacaactctgtggaactaaattgtttttactttgtgaaagctgctattttacggaaagattttgattata

SEQ ID NO: 49980 - DNA, 120 bp, Artificial Sequence
  ENSG00000066654_30 (sequence is synthesized)
cagtttgtttttaaattgtcttttatatttatttgtatttggtaagaatcggttgttacacaagctgttctttcccagttacaaaatcctgtgttcggttgtaacctgaactcattaaaa

SEQ ID NO: 49981 - DNA, 120 bp, Artificial Sequence
  ENSG00000066654_31 (sequence is synthesized)
gacttgttttcaggtttatcaactgtttattttcactgacatttgagcatgttattttataaatgacgggattccagggtaggaagtgctttttattccccttttgttttttcttttaaa

SEQ ID NO: 49982 - DNA, 120 bp, Artificial Sequence
  ENSG00000066654_32 (sequence is synthesized)
aaattacgtcagttaaaaaaataaaaaaactgcagtcttatggtttagaaaacttgtttagctccatagaggaaagaatgttaaactttgtattttaaaacatgattctctgaggttaaa

SEQ ID NO: 49983 - DNA, 120 bp, Artificial Sequence
  ENSG00000066654_33 (sequence is synthesized)
cttggttttcaaatgttatttttacttgtattttgcttttggtacggccagaaatcgagcttgttttttcatagttcctgatattttcagaaaaatcaaaataaatttgttccctaaaaa

SEQ ID NO: 49984 - DNA, 120 bp, Artificial Sequence
  ENSG00000066654_34 (sequence is synthesized)
gctccaccttaaattgtgactaaaaacagttttttatttgtgtgctgcattatgctgttctcacagtagtgagcaatgattgcgcagccctgttaacagtttttttagggatctttcagc

SEQ ID NO: 49985 - DNA, 120 bp, Artificial Sequence
  ENSG00000066654_35 (sequence is synthesized)
ctttatggtattacgtagaggcagacccatgtgctgctgttgcaaagaggggaggataggagggggatgttggcctctcccaggctcctcttctgcagtgccagctgacttaagggagtg

SEQ ID NO: 49986 - DNA, 120 bp, Artificial Sequence
  ENSG00000066654_36 (sequence is synthesized)
aactacctgtgaagtagaaaatcagagggaagttttcattctaaggaaggagtttttacatgccacagctcagctgtctgcctgccactttgttgtaaacattgcaaaaatgtggatcat

SEQ ID NO: 49987 - DNA, 120 bp, Artificial Sequence
  ENSG00000066654_37 (sequence is synthesized)
attcaagcctcgcccctcacttcctcctcccttgtgatcggcaatctcgcacttacagacggtgaacccaatgctgaagctgctctgagagtgctgggccatcttaggagagcctgtcgt

SEQ ID NO: 49988 - DNA, 120 bp, Artificial Sequence
  ENSG00000066654_38 (sequence is synthesized)
cccactggtgaaataaatggccactggttcttgacttcctgtttccacacagctgtgctcttcagaggcggatctgcaaaatatggatggaccccaagatggtggtatgaagaaatagaa

SEQ ID NO: 49989 - DNA, 120 bp, Artificial Sequence
  ENSG00000066654_39 (sequence is synthesized)
aaatagaagaagagcattgcaataactatcaatatttgtgtggcctaatattaataactggtaggacaataattccagttctggccagacattgtggctaatgcctataatcccagcact

SEQ ID NO: 49990 - DNA, 79 bp, Artificial Sequence
  ENSG00000066654_40 (sequence is synthesized)
aaattagccaggtatgatggcatgtttttcagacccaggaggcaggggtgacagtgagctgagatcatgccactgaact

SEQ ID NO: 49991 - DNA, 72 bp, Artificial Sequence
  ENSG00000066654_41 (sequence is synthesized)
acagaatgagactgtctcaaaaaaaaaaatctgcgaaggacatcttcaaggagaaaaacatttcatgctcat

SEQ ID NO: 49992 - DNA, 120 bp, Artificial Sequence
  ENSG00000066654_42 (sequence is synthesized)
tagccatatgcagaaaactaaaactggactccttcattacacctgatacaaacattaactcaagatggattaaagacctaaatgtaaaacccaaaaccataaaagccctggaagaaaacc

SEQ ID NO: 49993 - DNA, 120 bp, Artificial Sequence
  ENSG00000066654_43 (sequence is synthesized)
aagacctaaatgtaaaacccaaaaccataaaagccctggaagaaaacctgggcaatgccattcaggacacaggcgtgggcaaagacttcatgagtaaaacaccaaaagcaattgcaacaa

SEQ ID NO: 49994 - DNA, 120 bp, Artificial Sequence
  ENSG00000066654_44 (sequence is synthesized)
taactcaggacatcacaaaaatgttaacaacggtgtctacctaaacagtcatttctagtgcaagcagtaataatgatgaaaagttaaaatatattagatacattatagtacgtattaggc

SEQ ID NO: 49995 - DNA, 120 bp, Artificial Sequence
  ENSG00000066654_45 (sequence is synthesized)
ataacatctgggtatcttcctgtctcagggaatactgcttacaaaatggcttcttgggcatgactcagttaatcatttgatggcagcttctgtacactgtattagcagttggcctgtgga

SEQ ID NO: 49996 - DNA, 120 bp, Artificial Sequence
  ENSG00000066697_0 (sequence is synthesized)
gccctgcttgcgagaggagcccaggccgcccgccctcgcgcctcgccggcccctcccccggtcgccgcggctgccgcgccgccgctgcaggatagctagcggccaggagaaatacagtgg

SEQ ID NO: 49997 - DNA, 120 bp, Artificial Sequence
  ENSG00000066697_1 (sequence is synthesized)
tagctagcggccaggagaaatacagtggaaaatgcaaaacaacgaaattataaagcctgccaaatacttctcagaattggaaaagagcatcctgctggctttagtagaaaagtataaata

SEQ ID NO: 49998 - DNA, 120 bp, Artificial Sequence
  ENSG00000066697_2 (sequence is synthesized)
tgtgctggaatgtaagaaaagtgatgcgcgaactattgcccttaagcagcgtacctggcaggcgctggcccacgaatacaactctcagcccagcgtgtccctgcgggatttcaaacagct

SEQ ID NO: 49999 - DNA, 120 bp, Artificial Sequence
  ENSG00000066697_3 (sequence is synthesized)
gaagaagtgctgggagaacatcaaggctcggaccaaaaaaattatggcccatgaaaggagagagaaagtgaaacggagcgtcagccctctcctgagtacccacgtcctagggaaggagaa

SEQ ID NO: 50000 - DNA, 120 bp, Artificial Sequence
  ENSG00000066697_4 (sequence is synthesized)
ccccccggaggaggagcccgaataccaccccgacgcctcagcccaagaatcatttgctgtttcaaatagagaactgtgcgatgatgagaaagagttcatacattttccagtatgtgaggg

SEQ ID NO: 50001 - DNA, 120 bp, Artificial Sequence
  ENSG00000066697_5 (sequence is synthesized)
gacctctcaacctgaaccctcgtgttcagctgtcagaataacagccaataaaaactacaggagcaaaacctctcaggaaggtgctttaaaaaagatgcatgaggaagaacaccatcaaca

SEQ ID NO: 50002 - DNA, 120 bp, Artificial Sequence
  ENSG00000066697_6 (sequence is synthesized)
aatgtccatcttacaactgcaactgatacaaatgaatgaggtgcatgtggccaaaatccagcagatagagcgagagtgtgagatggcagaggaggaacacaggataaaaatggaagttct

SEQ ID NO: 50003 - DNA, 120 bp, Artificial Sequence
  ENSG00000066697_7 (sequence is synthesized)
caataaaaagaagatgtattgggaaagaaaactacaaacttttaccaaggaatggcctgtttcctcatttaaccggccctttcccaattcgccctaagactttgggggtggctctcttgt

SEQ ID NO: 50004 - DNA, 120 bp, Artificial Sequence
  ENSG00000066697_8 (sequence is synthesized)
aattaatctgtgttggcaaagaatgtctggaacatggacttggcggtcagtaacctgtaacagagctacaactaggaaaattagagtggtagtagtcacttatttaagaattcattcagg

SEQ ID NO: 50005 - DNA, 120 bp, Artificial Sequence
  ENSG00000066697_9 (sequence is synthesized)
taaacagctgcaccctctgtaccccttaagtggcaaagaagctgttatagtcttctgaaaattatcactatgagtgctataattctgaatataatgtctcttaattagaattcatacaag

SEQ ID NO: 50006 - DNA, 120 bp, Artificial Sequence
  ENSG00000066697_10 (sequence is synthesized)
cagtccagtgtgggagatggacgcaaagagcaaattgcaaaaaatatgggaagtgctacagtacagtcatgtacaactgtcagtgagctcatagaagagtaactcattctgagccagtgg

SEQ ID NO: 50007 - DNA, 120 bp, Artificial Sequence
  ENSG00000066697_11 (sequence is synthesized)
tcttaattagaattcatacaagaaccacgtgtgagtgttgttgttgttgtttttttttttaatcaaatgcaagtgtgactataaaggagtgtggctgatttttttttttttcttttttct

SEQ ID NO: 50008 - DNA, 120 bp, Artificial Sequence
  ENSG00000066697_12 (sequence is synthesized)
ctatccaaatgaatgccgtcccatggaaagtggctgtcctgggaggctacacgtttctccaatggtgatgctgttgctcagaacttgctagaggtctttagggaacctccgtgagagctg

SEQ ID NO: 50009 - DNA, 120 bp, Artificial Sequence
  ENSG00000066697_13 (sequence is synthesized)
cagcacctttttaattttctcggtgtcatcctctgagtatggattttctgtttttaaacagcccaaagtttagaagggtattttctaatgtggctcataaaccaccttttaaggcctttc

SEQ ID NO: 50010 - DNA, 120 bp, Artificial Sequence
  ENSG00000066697_14 (sequence is synthesized)
ctcaaacaggagttctaaataagtctccaacaatagtagttttgttggagctaaggatgtaactactttgaggaagaaatgttcgtttagatttctacattctgttatgttggttttatt

SEQ ID NO: 50011 - DNA, 120 bp, Artificial Sequence
  ENSG00000066697_15 (sequence is synthesized)
gtagagggggccgggggccggcatggagggttttcgggccgagccgctgcgaccccggccttgcaggctgggcgccgggcggccgcctctgcgcgccgcgatgggactcggatagctagc

SEQ ID NO: 50012 - DNA, 120 bp, Artificial Sequence
  ENSG00000066697_16 (sequence is synthesized)
caccccgacgcctcagcccaagttttctttcaagaaagaaaaagaagcctggaattgtcaatcatcctttctgggacttggtaggaaaaagaatcatttgctgtttcaaatagagaactg

SEQ ID NO: 50013 - DNA, 120 bp, Artificial Sequence
  ENSG00000066697_17 (sequence is synthesized)
aaagtttgcttactgatcatttgaccaaggttaagtccaggaagccagttgcgtaaccatagtggtttatgttatgaacctcatgcatcgatttccagtgtgggaacctcatacatcgat

SEQ ID NO: 50014 - DNA, 120 bp, Artificial Sequence
  ENSG00000066697_18 (sequence is synthesized)
ttccagtgtgggaatgttgtgtctgagttttgatccctgagttcccaagccagggtacctcctagcagacagtttatgggggctctgtcagctctctctcttatcactcctcattgctgc

SEQ ID NO: 50015 - DNA, 120 bp, Artificial Sequence
  ENSG00000066697_19 (sequence is synthesized)
ttctgtagtgcatgggcccccacagctaattaatggtgtccttgttttggagatgtttatagctttagccagttactctgttcctctccatcttgctggcttcagagccattcagcttct

SEQ ID NO: 50016 - DNA, 120 bp, Artificial Sequence
  ENSG00000066697_20 (sequence is synthesized)
gtgaggttgtggaggagtgtgctgggggagggaaggaatggatcagcagggctgctctttacattgcttatgttccctgggagatattgctgaggaccatgctggtgtgagctgccttct

SEQ ID NO: 50017 - DNA, 120 bp, Artificial Sequence
  ENSG00000066697_21 (sequence is synthesized)
gttcattttgcaaacctgtgatctagattattgtgtattgaatacatagggttattcttagggggcctggacagtcttgtttccccattttcaaattctggggtgggatctagggaagtt

SEQ ID NO: 50018 - DNA, 120 bp, Artificial Sequence
  ENSG00000066697_22 (sequence is synthesized)
catcccacagagttttttctctttctctttggaagaaatgatgtaattcatttactcataaacgtaatttataaattttcagcaagaagggaataaaggtacattctcagtgtttttctt

SEQ ID NO: 50019 - DNA, 120 bp, Artificial Sequence
  ENSG00000066697_23 (sequence is synthesized)
ctggggacttccctttttgctggtgattattaaagcatagccaaatgctccttgctcctgtgtccaggtcccatctggagggtggtggagaaccttggtgctttgtcatttgggaagtgt

SEQ ID NO: 50020 - DNA, 80 bp, Artificial Sequence
  ENSG00000066735_0 (sequence is synthesized)
gagggcggcccggcccgcgagccgccgccgctgctggaggtgtccccccgaaagaggctacccgccgggcccgaccagga

SEQ ID NO: 50021 - DNA, 120 bp, Artificial Sequence
  ENSG00000066735_1 (sequence is synthesized)
gaccaggacccatgcggcagccgccctgctcccgaaggcgccggggccggcccagagcagggccactcggccggcggaggcggctggtgccgccactgccacacgaagctggtggagctc

SEQ ID NO: 50022 - DNA, 120 bp, Artificial Sequence
  ENSG00000066735_2 (sequence is synthesized)
aagcgacaggcgtggaagctggtcagcgggcccgggaccaccctccgggatccttgcctctctgccctgcttctcgacaagctaccagcacctggggccctgccagcctgtcgcccagag

SEQ ID NO: 50023 - DNA, 120 bp, Artificial Sequence
  ENSG00000066735_3 (sequence is synthesized)
gccgagcgccgctgtgacgtctgcgccacacacctgcagcagctcacacgggaggccatgcacctgctgcaggcccctgccagccatgaggaccttgacgccccccatggaggccccagc

SEQ ID NO: 50024 - DNA, 120 bp, Artificial Sequence
  ENSG00000066735_4 (sequence is synthesized)
ctcgcaccccccagcaccacgaccagctcgagggacacgccaggaccagcgggtcctgcagggaggcagccaggacgagctgggccagacaggaccaaggggctggcctggtcccccggg

SEQ ID NO: 50025 - DNA, 120 bp, Artificial Sequence
  ENSG00000066735_5 (sequence is synthesized)
cccagtgtccaggtgtctgtagcacctgcgggtcttggaggggcgctgagcacggtcaccatccaggcccagcagtgcctggagggcatgtggagtgtctcgcgggtcaacagcttcctc

SEQ ID NO: 50026 - DNA, 120 bp, Artificial Sequence
  ENSG00000066735_6 (sequence is synthesized)
ccgccggcgtgcctggccgaggcagcggtggcggccgtggcggtggcagacacggtccgagaatgcccccccgtggccggccctgatggcttgtcgaaggcctggggccgtggtggagtc

SEQ ID NO: 50027 - DNA, 120 bp, Artificial Sequence
  ENSG00000066735_7 (sequence is synthesized)
tgcacgtcagccctggtcacccccaccccgggctcggtggggggctccacaggcccctcagctgcagcctccttcttcataagggctatgcagaagctcagcctggcctccaagaggaag

SEQ ID NO: 50028 - DNA, 120 bp, Artificial Sequence
  ENSG00000066735_8 (sequence is synthesized)
gaagaagccccacccgccaccgcctccagccacccgcggcacctccacctaccccaccgacttcagcggggtcctgcagctgtggccgcccccggcgcccccctgcctgctcagggccgc

SEQ ID NO: 50029 - DNA, 120 bp, Artificial Sequence
  ENSG00000066735_9 (sequence is synthesized)
aagaccaaggacaaccctggcagcatcgggaaggtgaaggttatgctgcggatctggcccgcacagggggcccagcgctcggccgaggccatgtccttcctgaaggtggaccctcggaag

SEQ ID NO: 50030 - DNA, 120 bp, Artificial Sequence
  ENSG00000066735_10 (sequence is synthesized)
aagcaggtgatcctctacgatcccgccgccggtcccccaggcagcgcaggcccccggcgagccgccactgctgcagttcccaagatgtttgccttcgatgccgtcttcccccaggactcc

SEQ ID NO: 50031 - DNA, 120 bp, Artificial Sequence
  ENSG00000066735_11 (sequence is synthesized)
gagcaggccgaagtctgctcggggaccgtggccgacgtgctccagtcggtggtcagtggggctgatggctgcattttttcctttggccacatgagcctgggcaagtcgtacaccatgatc

SEQ ID NO: 50032 - DNA, 120 bp, Artificial Sequence
  ENSG00000066735_12 (sequence is synthesized)
gggaaggacagctcaccccagagcctgggcatcgtgccctgcgccatctcctggctcttcaggctcatcgaggagcgcagggagaggacgggcacccgcttctccgtccgggtctcagcc

SEQ ID NO: 50033 - DNA, 120 bp, Artificial Sequence
  ENSG00000066735_13 (sequence is synthesized)
gtggaggtgtgcgggcgcgaccagagcctgcgggacctgctggccgaggtggcccctggcagcctccaggacacccagtctccgggagtgtacctgcgggaggaccccgtgtgtggggcg

SEQ ID NO: 50034 - DNA, 120 bp, Artificial Sequence
  ENSG00000066735_14 (sequence is synthesized)
cagctccagaaccaaagcgagctgcgggcacccacggccgagaaggcggctttctacctggatgcggccctggcggcccgcagcaccagccgagcgggctgtggcgaggacgcccgacgc

SEQ ID NO: 50035 - DNA, 120 bp, Artificial Sequence
  ENSG00000066735_15 (sequence is synthesized)
agctcccacatgttgttcacgctgcacgtctaccagtaccgcatggagaagtgcggccggggaggaatgtccggaggccgcagccgcctgcacctcatcgacctgggcagctgtgaggcg

SEQ ID NO: 50036 - DNA, 120 bp, Artificial Sequence
  ENSG00000066735_16 (sequence is synthesized)
gcggctggcagggccggggaggctgctgggggtcccctgtgtctgtccctgtcggccctgggcagcgtcatcttggccctggtcaacggagccaagcatgtgccgtatcgggaccacagg

SEQ ID NO: 50037 - DNA, 120 bp, Artificial Sequence
  ENSG00000066735_17 (sequence is synthesized)
ctcaccatgctgctgcgtgaatccctggccaccgctggctgccgcaccaccatgatcgcccacgtgtcggatgcgccagcccagcacgcagagacactcagcaccgtgcagctcgccgcc

SEQ ID NO: 50038 - DNA, 120 bp, Artificial Sequence
  ENSG00000066735_18 (sequence is synthesized)
cgcatccaccgcctgcgcaggaagaaggccaagtacgcctccagctcctctggcggggagagctcctgtgaggaaggccgggcccgtcggcccccgcacctgcggcccttccacccacgc

SEQ ID NO: 50039 - DNA, 120 bp, Artificial Sequence
  ENSG00000066735_19 (sequence is synthesized)
actgtggccctggaccccgaccgcacgcctccctgcctgcccggtgaccccgattactcctccagcagcgagcagtcctgtgacacggtcatctacgtggggcccggtggggcggcgctg

SEQ ID NO: 50040 - DNA, 120 bp, Artificial Sequence
  ENSG00000066735_20 (sequence is synthesized)
tcagaccgggagctcaccgacaacgaaggtccgcctgacttcgtgcccatcatccctgccctgagccgccaccggccctccaagggtccccgagacgcagaccacttccgctgcagcacc

SEQ ID NO: 50041 - DNA, 120 bp, Artificial Sequence
  ENSG00000066735_21 (sequence is synthesized)
ttcgcggagctgcaggagcggctggaatgcatggacggcaacgagggtccctcaggaggtccaggtggcaccgacggagctcaggccagccccgcccgagggggccggaagccctcgcca

SEQ ID NO: 50042 - DNA, 120 bp, Artificial Sequence
  ENSG00000066735_22 (sequence is synthesized)
ccagaggctgcatcccccaggaaggccgtgggcaccccgatggctgccagcacccctcgaggcagttctggtccagacacccaccagggtacccctgagccctgcaaggccattgtctgg

SEQ ID NO: 50043 - DNA, 120 bp, Artificial Sequence
  ENSG00000066735_23 (sequence is synthesized)
agagaggacagcagcgcttggcctgagctgctggtcccggaaaaggctgcagtgagtggaggcaggaggccactgcccagcccggctcccccacctcctcagttgctggaagcctgcaga

SEQ ID NO: 50044 - DNA, 120 bp, Artificial Sequence
  ENSG00000066735_24 (sequence is synthesized)
gccccagaagagcctgggggagggggcactgatggagtggcacggacccctcccgtgggcatgagtgggcaggtggctgggtccccgatgcttcctggggccacctgcccccgcctggct

SEQ ID NO: 50045 - DNA, 120 bp, Artificial Sequence
  ENSG00000066735_25 (sequence is synthesized)
gctggcagtcgctgtccggagcggggcctgctcaccaccacagtgaccctgcagcggccagtggagctcaacggcgaggacgagctggtgttcacggtggtggaggagctgtccctgggg

SEQ ID NO: 50046 - DNA, 120 bp, Artificial Sequence
  ENSG00000066735_26 (sequence is synthesized)
gcgcttgccggagctgggcggcccaccagcctggctagcttcgacagtgactgctccctgcgggccctggcctcggggtcccggccagtcagcatcatcagcagcatcaatgatgagttt

SEQ ID NO: 50047 - DNA, 120 bp, Artificial Sequence
  ENSG00000066735_27 (sequence is synthesized)
gacgcctacacctctcaggcccctgagggggggcccctggagggggcagcctgggccggcagcagtcacggctcctccatcagctcctggctcagcgaggtcagcgtctgcactgccgac

SEQ ID NO: 50048 - DNA, 120 bp, Artificial Sequence
  ENSG00000066735_28 (sequence is synthesized)
agccgtgaccccacgccgcagccccgcttcagccccgactcgctggcagggcttgaccctgggggcccccctgccctggatggttccctgggggatggaagctctgggttcctggggcca

SEQ ID NO: 50049 - DNA, 120 bp, Artificial Sequence
  ENSG00000066735_29 (sequence is synthesized)
gacagacctgacagtcctgggccaacctggggtccgtgccctggggaagtggctgcagtggccccatcccgacccggcagggagccccaggccgggccctcgcggtgggcatccgcagcc

SEQ ID NO: 50050 - DNA, 120 bp, Artificial Sequence
  ENSG00000066735_30 (sequence is synthesized)
cagaccatccactccagcctcccccggaaaccgaggactgcctctgccaccacccgtgtgggctgtgctcgcctgggccagagcccacctggccgtggaggcctgtttgaggacccatgg

SEQ ID NO: 50051 - DNA, 120 bp, Artificial Sequence
  ENSG00000066735_31 (sequence is synthesized)
ctgctccgggtaggggagtgtgatacccaggcagcttctgctggcagggcccccagccccacacttggctccccccggctgcctgaggcccaggtgatgctagcctgtgcccagagagtg

SEQ ID NO: 50052 - DNA, 120 bp, Artificial Sequence
  ENSG00000066735_32 (sequence is synthesized)
gtggacgggtgtgaggtggcagccagggcggcccgcaggccagaggctgtggctcggatcccaccgctgcggaggggtgccaccacgctgggtgtgacaacgccagctgtgtcctgggga

SEQ ID NO: 50053 - DNA, 120 bp, Artificial Sequence
  ENSG00000066735_33 (sequence is synthesized)
gatgctcccacggaggtggtggcctgctcggggagcctgaaggcctcccccaccagcaagaagggtctggctcccaaggcgggcttcctcccgaggcccagtggggcggcccccccggcc

SEQ ID NO: 50054 - DNA, 120 bp, Artificial Sequence
  ENSG00000066735_34 (sequence is synthesized)
ccacccacgcggaagtccagcctggagcagaggagcagcccggcctcggcccctccgcatgctgtgaacccggcgcgggtcggggctgctgctgtccttcgaggggaggaggagcccaga

SEQ ID NO: 50055 - DNA, 120 bp, Artificial Sequence
  ENSG00000066735_35 (sequence is synthesized)
cccagcagccgggctgaccactctgtccccagggccacgtccagcctgaaggcccgggccagcaaggtagaagcagcacaccgtcttgccggacacgcgtctctggagcggtacgaaggc

SEQ ID NO: 50056 - DNA, 120 bp, Artificial Sequence
  ENSG00000066735_36 (sequence is synthesized)
ctggcgcacagcagcagcaagggccgggaagcccctgggcggcctccccgggctgtacccaagctgggtgtgccaccctccagccccacacacggtccagctcccgcctgtaggagcggc

SEQ ID NO: 50057 - DNA, 120 bp, Artificial Sequence
  ENSG00000066735_37 (sequence is synthesized)
gcagccaaggctgtgggggcccccaagccccctgttggtggaggcaagggccgtggcctagtggctggtgggtcgcgggctctggggccttcggtgaagctgtctacggcctctgtgacg

SEQ ID NO: 50058 - DNA, 120 bp, Artificial Sequence
  ENSG00000066735_38 (sequence is synthesized)
ggcaggagccctggcggccctgtggccggtcccagagcagccccacgggccgggcccagtgtcggggcgaaggctggccggggtaccgtcatgggcacaaagcaggcgctccgggctgct

SEQ ID NO: 50059 - DNA, 120 bp, Artificial Sequence
  ENSG00000066735_39 (sequence is synthesized)
cacagccgcgtccatgagctgtcagccagtggagccccgggccgaggtggctcctcgtggggctcggcggactcagacagcggccatgacagcggcgtgaacgtgggggaggagcggcca

SEQ ID NO: 50060 - DNA, 120 bp, Artificial Sequence
  ENSG00000066735_40 (sequence is synthesized)
cccacgggcccggccctgccctccccctacagcaaggtgaccgccccacggcggccccagcgctacagcagcggccatggcagcgacaacagcagcgtgctgagtggagagctgccgccc

SEQ ID NO: 50061 - DNA, 120 bp, Artificial Sequence
  ENSG00000066735_41 (sequence is synthesized)
gccatgggccgcaccgcccttttccaccacagcggtggcagcagtggctatgagagcctgcggcgcgacagcgaggccaccggcagcgcctcctccgcccctgactccatgagcgagagt

SEQ ID NO: 50062 - DNA, 120 bp, Artificial Sequence
  ENSG00000066735_42 (sequence is synthesized)
ggggctgcctccccaggcgcccgcacccgcagcctcaagtcccccaagaagagggccacaggtctgcagcggcggcgcctgattcccgccccactgcccgacaccactgccctgggccgt

SEQ ID NO: 50063 - DNA, 120 bp, Artificial Sequence
  ENSG00000066735_43 (sequence is synthesized)
aagcccagcctccccgggcagtgggtggacctgcccccgcccctggctggctccctgaaggagccgttcgagatcaaggtgtacgagatcgatgacgtggagcgccttcagcggccccgc

SEQ ID NO: 50064 - DNA, 120 bp, Artificial Sequence
  ENSG00000066735_44 (sequence is synthesized)
cccaccccgagggaggcccccacccagggtctggcgtgcgtcagtacaaggctgcggctggcggagcgcaggcagcagcggctgcgggaggtgcaggccaagcacaagcacctgtgtgag

SEQ ID NO: 50065 - DNA, 120 bp, Artificial Sequence
  ENSG00000066735_45 (sequence is synthesized)
gagctggccgagacccagggccggctgatgctggagcctggccgctggctggagcagtttgaggtggacccggagctggagcccgagtcggccgagtacctggcggccctggagcgagcc

SEQ ID NO: 50066 - DNA, 120 bp, Artificial Sequence
  ENSG00000066735_46 (sequence is synthesized)
acggcggccctggagcagtgcgtgaacctgtgcaaggcgcacgtcatgatggtcacctgcttcgacatcagcgttgcagccagtgctgccatcccggggccgcaggaggtggacgtctga

SEQ ID NO: 50067 - DNA, 120 bp, Artificial Sequence
  ENSG00000066735_47 (sequence is synthesized)
gggcgtgcagcgggctggaggacgggacgtgggacggagcgaggatgtggtgggggctgcggggggaggatgcggaggggtttctgtgcaggacgggagtctcagagaggagacggagtg

SEQ ID NO: 50068 - DNA, 120 bp, Artificial Sequence
  ENSG00000066735_48 (sequence is synthesized)
tgggggagggagggccggccacgcggtggacagagcgagggtgccagggtgaccagaagaccgtcaccacccgacagcaacgcaagtgcctttgaccttgatttggacttttctcccttt

SEQ ID NO: 50069 - DNA, 120 bp, Artificial Sequence
  ENSG00000066735_49 (sequence is synthesized)
tgcatttggtgctacagacttgagacaccagcagaagttgtgttcagcccggccccgctgcgcctgtccgggccggggctggcgccggttgtgtttgtgtccaccttgccttctttgcag

SEQ ID NO: 50070 - DNA, 120 bp, Artificial Sequence
  ENSG00000066735_50 (sequence is synthesized)
ccaagcagtttttgtggagtggagtgggacttacctgcacgccccaggggtctttcaggattcaggatgacttttcttttacaatggtttcctctcggcagagcccgggttgtgggggat

SEQ ID NO: 50071 - DNA, 120 bp, Artificial Sequence
  ENSG00000066735_51 (sequence is synthesized)
ctgtgtggggttctcaacgcagatccatcctggggtctcccgggcagggatggctgacctcgagtcccctcccttcccgagaacccgctctgtcccgagggcagctaacaagggctgagc

SEQ ID NO: 50072 - DNA, 120 bp, Artificial Sequence
  ENSG00000066735_52 (sequence is synthesized)
cccaggtacaggttgcctcttccacggcaggaatttttaccaaaaccacaagcaaaaaacaaaacagaccaccacgaccaacaacaaagatggggggtagggttttgtaaaggttctgtt

SEQ ID NO: 50073 - DNA, 120 bp, Artificial Sequence
  ENSG00000066735_53 (sequence is synthesized)
aggttcatatttttatatcattttgcccataaatgcggaatttgccgtgggaatttgaagacaaatgatctatgtttttatggttttctagggaaggtgttctgggggccgggctctctc

SEQ ID NO: 50074 - DNA, 120 bp, Artificial Sequence
  ENSG00000066735_54 (sequence is synthesized)
cagctgtgggaggcctgctccctctggggggcaccctgggcagggtgggggggccttgggaggcgcttcttgccaaatgcagacgaggggtgagcctgccagcgtttgcgacgtccccgc

SEQ ID NO: 50075 - DNA, 120 bp, Artificial Sequence
  ENSG00000066735_55 (sequence is synthesized)
acgacaggctcatactttctgaggatcgtgcatagcataggacgtctgaacctttgtacaaatgtgtagatgacatcttgctacagcttttatttgtgaattaaagatgcatcgatggtt

SEQ ID NO: 50076 - DNA, 120 bp, Artificial Sequence
  ENSG00000066739_0 (sequence is synthesized)
acagccgggaacgcgcctcgcggatgacaacaaattcgtcgcgcggcggcagtggcggtggctgcctcagcccctgccgcctcctctcgcgctctcttgcactctctccgagccggttgg

SEQ ID NO: 50077 - DNA, 120 bp, Artificial Sequence
  ENSG00000066739_1 (sequence is synthesized)
gaccctcctcggaagtcccctggcctggggccaggaggacccctctgcgtcttgcctccgccaggcccagcgcgagcggtgcggcgccggcgatggggtctccctgagggactcccggca

SEQ ID NO: 50078 - DNA, 120 bp, Artificial Sequence
  ENSG00000066739_2 (sequence is synthesized)
ccaaatagggatggaggggccgccccaggcttaggccccgccgcggcctggagccggagtcgctaccccgaggccggagccgtcgcaacccgcagccgcagtcagcccagctgccagcag

SEQ ID NO: 50079 - DNA, 120 bp, Artificial Sequence
  ENSG00000066739_3 (sequence is synthesized)
tcactatgccttggccgttttcggagtccatcaagaagagggcctgccggtacctcctgcagaggtacctgggccactttctgcaggagaagctgagcctggagcagctcagcctggacc

SEQ ID NO: 50080 - DNA, 120 bp, Artificial Sequence
  ENSG00000066739_4 (sequence is synthesized)
tgtaccaaggcaccgggtccctcgcccaggtccccttggacaaatggtgtctcaatgagatcttggagtcagcagatgcacccttagaagtcactgaaggattcattcagtcaatttccc

SEQ ID NO: 50081 - DNA, 120 bp, Artificial Sequence
  ENSG00000066739_5 (sequence is synthesized)
tgtcagttccatggggctctttactgcaggataattgtgcactggaagtgagaggattagaaatggtcttccggcctagacctcgcccagcaactggttctgagcctatgtattggtcaa

SEQ ID NO: 50082 - DNA, 120 bp, Artificial Sequence
  ENSG00000066739_6 (sequence is synthesized)
gttttatgaccagcagtatgcaattggcaaaagaatgtcttagccagaaactaacagatgaacaaggagaaggatcccagccttttgaaggacttgaaaagtttgctgaaaccattgaaa

SEQ ID NO: 50083 - DNA, 120 bp, Artificial Sequence
  ENSG00000066739_7 (sequence is synthesized)
cagtactaagaagagtaaaagtcacttttatagatactgttttgagaattgaacatgtgccagaaaattccaaaactggaactgcacttgaaattcgaatagaaagaactgtgtactgtg

SEQ ID NO: 50084 - DNA, 120 bp, Artificial Sequence
  ENSG00000066739_8 (sequence is synthesized)
atgaaactgctgacgaatcctcaggaattaatgtgcatcaacccactgcttttgctcacaagttacttcagctctctggagtgtctctcttctgggatgagttttctgcatcagccaaat

SEQ ID NO: 50085 - DNA, 120 bp, Artificial Sequence
  ENSG00000066739_9 (sequence is synthesized)
cttccccagtgtgttcaactgcaccagtggaaactgagccaaagctctcacctagctggaaccccaaaattatttatgagccacacccacagctaactagaaatttaccagagatagcac

SEQ ID NO: 50086 - DNA, 120 bp, Artificial Sequence
  ENSG00000066739_10 (sequence is synthesized)
cttctgacccagtgcagattggacggttaattggtaggttggagttgagtctcacgttgaaacagaatgaagtgcttcctggagctaagttggatgttgatggacagatagactctattc

SEQ ID NO: 50087 - DNA, 120 bp, Artificial Sequence
  ENSG00000066739_11 (sequence is synthesized)
atctactcctgtcaccaagacaggtgcacttgcttttggatatgttggcagctattgctggaccagaaaattctagcaaaatagggttagctaataaagataggaaaaatcgacccatgc

SEQ ID NO: 50088 - DNA, 120 bp, Artificial Sequence
  ENSG00000066739_12 (sequence is synthesized)
agcaggaagacgagtatcgaattcagatggaattaaaccggtattatttgagaaaagattccctctctgtgggtgtatcttcagagcaaagcttttatgagacagaaacagctcgtacac

SEQ ID NO: 50089 - DNA, 120 bp, Artificial Sequence
  ENSG00000066739_13 (sequence is synthesized)
cttctagccgtgaagaagaagtattcttctccatggctgatatggacatgtctcatagtctctcttctcttccaccccttggggaccccccaaacatggaccttgagttatcattaacta

SEQ ID NO: 50090 - DNA, 120 bp, Artificial Sequence
  ENSG00000066739_14 (sequence is synthesized)
gtacatatacaaataccccagcaggatctccattaagtgctactgtgcttcagcccacttggggagagttccttgatcatcataaagaacagccagtaagagggtcaacatttccatcca

SEQ ID NO: 50091 - DNA, 120 bp, Artificial Sequence
  ENSG00000066739_15 (sequence is synthesized)
acctagttcacccaacacctttacagaagacatctctcccatctagatctgtttcagtggatgaatcaaggcctgaacttatttttagactagctgtgggaactttttcaatctctgtgc

SEQ ID NO: 50092 - DNA, 120 bp, Artificial Sequence
  ENSG00000066739_16 (sequence is synthesized)
ttcacattgatcctttatctccacctgaaacgtcacagaaccttaatccattgacacctatggcagtagctttctttacttgtatagaaaagattgatccagcaagattttcaacagaag

SEQ ID NO: 50093 - DNA, 120 bp, Artificial Sequence
  ENSG00000066739_17 (sequence is synthesized)
attttaagtctttccgagcagtgtttgcagaagcttgctcacacgatcaccttagatttataggtactggcattaaagtatcctatgaacaaagacaaagatcagcttcccgatatttta

SEQ ID NO: 50094 - DNA, 120 bp, Artificial Sequence
  ENSG00000066739_18 (sequence is synthesized)
gtactgatatgtccattgggcaaatggaatttttggagtgcctatttccaactgattttcattctgttcctcctcactatacagagcttttaacgttccattccaaagaagaaactggtt

SEQ ID NO: 50095 - DNA, 120 bp, Artificial Sequence
  ENSG00000066739_19 (sequence is synthesized)
cccattcccctgtgtgtcttcagcttcattataagcattctgagaatagagggccccagggtaatcaagcaagacttagttcagttcctcacaaggcagaattgcaaattaaattaaatc

SEQ ID NO: 50096 - DNA, 120 bp, Artificial Sequence
  ENSG00000066739_20 (sequence is synthesized)
cagtgtgttgtgagctggatatcagtattgtggacaggttaaattccttgcttcaaccacagaaacttgccacagtagagatgatggcatcccacatgtatacttcatataataaacata

SEQ ID NO: 50097 - DNA, 120 bp, Artificial Sequence
  ENSG00000066739_21 (sequence is synthesized)
ttagtctgcacaaggctttcactgaagtgtttctagatgattcacatagtcctgcaaattgtcggatatcagtacaagttgccacaccagcattaaacctttctgttcgcttcccaatac

SEQ ID NO: 50098 - DNA, 120 bp, Artificial Sequence
  ENSG00000066739_22 (sequence is synthesized)
ctgatcttcgatctgatcaagaaagaggaccatggtttaagaagtcacttcagaaggagatcctttatttagccttcacagatctagaatttaagactgaatttataggaggatcaaccc

SEQ ID NO: 50099 - DNA, 120 bp, Artificial Sequence
  ENSG00000066739_23 (sequence is synthesized)
cagaacaaattaaattggaacttacctttagagaactaattggatcgttccaggaagagaaaggagatccatctattaagtttttccatgtgtctagtggagtagatggagatacaacat

SEQ ID NO: 50100 - DNA, 120 bp, Artificial Sequence
  ENSG00000066739_24 (sequence is synthesized)
cgtcagatgactttgactggccacgaattgtactgaaaataaatccaccagccatgcattccattttggagagaattgcagctgaagaagaagaggagaatgatggtcactaccaggagg

SEQ ID NO: 50101 - DNA, 120 bp, Artificial Sequence
  ENSG00000066739_25 (sequence is synthesized)
aagaggaaggaggtgctcattccttgaaagatgtttgtgatctaagaagaccagccccatctcctttttcttctcgtagagtaatgtttgaaaatgaacagatggtgatgccaggagacc

SEQ ID NO: 50102 - DNA, 120 bp, Artificial Sequence
  ENSG00000066739_26 (sequence is synthesized)
ctgtagaaatgacagaatttcaggataaagcaatcagcaattctcactatgtgctggaacttacgttaccaaatatttatgtaacactacctaataagagcttttatgagaagctttata

SEQ ID NO: 50103 - DNA, 120 bp, Artificial Sequence
  ENSG00000066739_27 (sequence is synthesized)
ataggatctttaatgacttgctactgtgggaaccaacagctccttcaccagtggagacattcgagaatatttcctatggcattgggctttcagtagccagtcagctcattaatactttca

SEQ ID NO: 50104 - DNA, 120 bp, Artificial Sequence
  ENSG00000066739_28 (sequence is synthesized)
acaaagatagttttagtgcatttaaatctgcagttcactatgatgaggaaagtggatctgaggaggagactttgcagtatttttccactgttgatcccaactatcgttctcgcaggaaaa

SEQ ID NO: 50105 - DNA, 120 bp, Artificial Sequence
  ENSG00000066739_29 (sequence is synthesized)
aaaaattagactctcagaacaagaactctcagagttttctctcagttcttctgaatattaatcatggattaatagcagtgttcacagatgtgaagcaagataatggagatctgttggaaa

SEQ ID NO: 50106 - DNA, 120 bp, Artificial Sequence
  ENSG00000066739_30 (sequence is synthesized)
acaagcatggtgaattctggttagagttcaatagtggttcattattttgtgtgacaaaatatgaaggttttgatgacaagcactacatttgccttcattctagcagtttcagtctgtacc

SEQ ID NO: 50107 - DNA, 120 bp, Artificial Sequence
  ENSG00000066739_31 (sequence is synthesized)
ataaaggcatagtgaatggagtgattctcccgacagaaacacgacttcccagctcaacccgcccacactggttggaacctactatttattcctctgaagaagatggcctcagtaaaactt

SEQ ID NO: 50108 - DNA, 120 bp, Artificial Sequence
  ENSG00000066739_32 (sequence is synthesized)
cttcagatggagttggaggagacagtttgaatatgctgtctgttgccgttaaaatattgtctgataaatcagagtccaatacaaaggaatttctcattgccgtaggactgaaaggagcca

SEQ ID NO: 50109 - DNA, 120 bp, Artificial Sequence
  ENSG00000066739_33 (sequence is synthesized)
ctctccagcatagaatgcttccttctgggcttagctggcatgagcagattttatacttcttgaatattgctgatgaacctgttttgggatataatcctccaacttcatttacaacttttc

SEQ ID NO: 50110 - DNA, 120 bp, Artificial Sequence
  ENSG00000066739_34 (sequence is synthesized)
atgttcatctttggagctgtgcacttgattatagacccctttatttgccaatccgatctcttcttaccgtggaaacattcagtgtttccagtagcgttgcattggataaatcttcctcta

SEQ ID NO: 50111 - DNA, 120 bp, Artificial Sequence
  ENSG00000066739_35 (sequence is synthesized)
ctctcagaataatcttggatgaagctgctttacatctatctgacaaatgcaatactgtcactataaatctgagtagagattatgttcgtgtgatggatatggggcttttggagttaacca

SEQ ID NO: 50112 - DNA, 120 bp, Artificial Sequence
  ENSG00000066739_36 (sequence is synthesized)
taactgcagtgaagtctgattctgatggagagcaaactgagccccgctttgagttacactgttccagcgatgttgtccatatcagaacgtgctcagactcttgtgctgcgttaatgaatc

SEQ ID NO: 50113 - DNA, 120 bp, Artificial Sequence
  ENSG00000066739_37 (sequence is synthesized)
tcattcagtacattgcaagctatggtgacttgcagacacctaacaaggcagatatgaagcctggagcctttcaaagaaggtctaaggtagattccagtggtcgatcatcctcacgtggtc

SEQ ID NO: 50114 - DNA, 120 bp, Artificial Sequence
  ENSG00000066739_38 (sequence is synthesized)
cagtacttcctgaagcagatcaacaaatgttacgagatctgatgagtgatgctatggaggagatcgacatgcaacaaggcacctcgtcagtaaaaccacaggctaatggtgttttggatg

SEQ ID NO: 50115 - DNA, 120 bp, Artificial Sequence
  ENSG00000066739_39 (sequence is synthesized)
aaaaatctcaaattcaggagccatgttgttcagacctcttcctgtttcctgacgagagtgggaatgtatcccaggagtccggccccacctatgcctcattctctcaccatttcatcagtg

SEQ ID NO: 50116 - DNA, 120 bp, Artificial Sequence
  ENSG00000066739_40 (sequence is synthesized)
atgcaatgacaggtgtgcccactgagaatgatgacttttgcattctttttgcaccaaaagcagccatgcaggagaaggaagaagaaccagttataaaaatcatggttgatgatgcaattg

SEQ ID NO: 50117 - DNA, 120 bp, Artificial Sequence
  ENSG00000066739_41 (sequence is synthesized)
tgataagagacaattatttcagtctgcccgttaataagaccgatacgagcaaagcccccttacactttcccattcctgtgattcgctatgtggtgaaggaggtctctcttgtctggcatc

SEQ ID NO: 50118 - DNA, 120 bp, Artificial Sequence
  ENSG00000066739_42 (sequence is synthesized)
tttatggaggaaaggattttggaatagtccctcccacttctccggctaaaagttatattagtccccacagttcgccttctcacacacccacgagacatggacgtaatacagtatgtgggg

SEQ ID NO: 50119 - DNA, 120 bp, Artificial Sequence
  ENSG00000066739_43 (sequence is synthesized)
gaaaaggaaggaaccatgactttttaatggaaatacagctaagcaaggtgaagtttcagcatgaagtctacccgccatgcaaacctgattgtgattccagcctctcagaacacccagtct

SEQ ID NO: 50120 - DNA, 120 bp, Artificial Sequence
  ENSG00000066739_44 (sequence is synthesized)
cccggcaggtgttcattgttcaggatcttgagattcgagatcgtttggcaacatcacaaatgaataaatttttatacctgtattgcagtaaagaaatgcctcgaaaagctcactccaaca

SEQ ID NO: 50121 - DNA, 120 bp, Artificial Sequence
  ENSG00000066739_45 (sequence is synthesized)
tgttgacagtgaaagccttacacgtgtgtccagaatctggcaggtccccacaggagtgctgcttgagagtgtcgctgatgccgctccgcctcaatattgaccaggatgctttgttcttcc

SEQ ID NO: 50122 - DNA, 120 bp, Artificial Sequence
  ENSG00000066739_46 (sequence is synthesized)
tgaaggatttcttcacaagtctttctgcagaagtagagcttcaaatgactccagatccagaagttaaaaagtctcctggagctgatgtcacctgcagtttgccaaggcatttgagtacct

SEQ ID NO: 50123 - DNA, 120 bp, Artificial Sequence
  ENSG00000066739_47 (sequence is synthesized)
caaaggagccaaatctggttatttctttctctgggccaaaacagccttcccaaaatgatagtgccaattcagtggaagtggttaatggcatggaagagaagaacttctctgctgaagaag

SEQ ID NO: 50124 - DNA, 120 bp, Artificial Sequence
  ENSG00000066739_48 (sequence is synthesized)
catcttttagggatcagcctgtgttttttagagaatttagattcacgtcagaagttcccattcgacttgattatcatggcaaacatgtatcaatggatcagggtacgctagctgggattt

SEQ ID NO: 50125 - DNA, 120 bp, Artificial Sequence
  ENSG00000066739_49 (sequence is synthesized)
tgattggtctggctcagttaaactgctctgaactaaagctcaagaggctttcctatcgacatggtttactaggcgttgacaaattattctcatatgcaatcactgagtggcttaatgaca

SEQ ID NO: 50126 - DNA, 120 bp, Artificial Sequence
  ENSG00000066739_50 (sequence is synthesized)
ttaagaagaaccagctaccaggaatcctgggaggtgttggacctatgcattcactagtacaattagtacaaggcctaaaggacttggtctggctcccaatagagcagtaccggaaggatg

SEQ ID NO: 50127 - DNA, 120 bp, Artificial Sequence
  ENSG00000066739_51 (sequence is synthesized)
gccgcattgtcagagggtttcagagaggcgctgcttcctttggtacctcgacagcgatggctgctctagaactcacaaacagaatggttcaaaccatacaggcagctgcagagactgctt

SEQ ID NO: 50128 - DNA, 120 bp, Artificial Sequence
  ENSG00000066739_52 (sequence is synthesized)
atgatatggtgtctcctggtaccctttctatcgagcccaagaagaccaaaaggtttcctcatcaccggttagcccaccagccagtagacctgagggaaggtgtggccaaggcctacagtg

SEQ ID NO: 50129 - DNA, 120 bp, Artificial Sequence
  ENSG00000066739_53 (sequence is synthesized)
ttgtgaaagagggaatcacagacacggctcagaccatttatgaaactgcggctcgagaacacgagagcagaggggtgactggtgccgtgggcgaggttctgcgccagattcctccggcag

SEQ ID NO: 50130 - DNA, 120 bp, Artificial Sequence
  ENSG00000066739_54 (sequence is synthesized)
gcaagacgagtcacagaaatggcgccacggggatgactgatggcttggaactgacagtgtgaagataaggagagtggaaccaggagctcagagtcctgacagcagcttcagaggaagctc

SEQ ID NO: 50131 - DNA, 120 bp, Artificial Sequence
  ENSG00000066739_55 (sequence is synthesized)
gtttaattttattgtgctcatctcaggaacaaaagcattttttagttaaataatttaacatcaaaacaacatgcaaccaaaaacttctgacatttatagttgatacttgcctatagaaat

SEQ ID NO: 50132 - DNA, 120 bp, Artificial Sequence
  ENSG00000066739_56 (sequence is synthesized)
gtttggtggctggtgtcaaaggtccttaaagcatttgctgccaagttagtggaaggctcacttttgttaagatgactgtaattctccttgttaccgacgagagatcattggaagctgcct

SEQ ID NO: 50133 - DNA, 120 bp, Artificial Sequence
  ENSG00000066739_57 (sequence is synthesized)
tctaacactttgtgtagctctgtggagttggattttcttaaggtttaaaaagaatcacagcttcggaacttttaactgaaaatgagagacagaagccacaggggaagcaaagcaaatagg

SEQ ID NO: 50134 - DNA, 120 bp, Artificial Sequence
  ENSG00000066739_58 (sequence is synthesized)
attttcaatataaatatcagtgtggaaaaataacctattctgttgaatttagtgttcatgcacttgagaacaacattatttccatttactccgaaaatccttctgtgggggtttgagaaa

SEQ ID NO: 50135 - DNA, 120 bp, Artificial Sequence
  ENSG00000066739_59 (sequence is synthesized)
gtgaatgttgcagacatgttctgttgtgttgcactttatcctgtgtttatgtgtatgtgtttttagattaattcaagttgtgtgctatatttcttgtataatttacaaagttacacaaaa

SEQ ID NO: 50136 - DNA, 120 bp, Artificial Sequence
  ENSG00000066739_60 (sequence is synthesized)
tataaagagcagtaaacttgtctgaaagtttttggcaaaggaaggtaacttcaatgtaatagcttcctttaagagtacaggaaaatgcattctgtaatgaagtggggcccatgtaattgt

SEQ ID NO: 50137 - DNA, 120 bp, Artificial Sequence
  ENSG00000066739_61 (sequence is synthesized)
ttatattttcagttttaagcaggtatagtgcaggcttgttaggaatgtgtggaagggaagattggaagtgatttttcctcttttaaaagtaaacaaaattcttcaaatatgccctagtta

SEQ ID NO: 50138 - DNA, 120 bp, Artificial Sequence
  ENSG00000066739_62 (sequence is synthesized)
actatttcagcataccatttttacttggttaacagtgtacattttgataacctatcaggaatgaataaagtatttttatttaaaggtgatattgttttatgcttccatgaatattttgct

SEQ ID NO: 50139 - DNA, 120 bp, Artificial Sequence
  ENSG00000066739_63 (sequence is synthesized)
tttcttagagcatattcatagatgcagtactgtgatttaccacaagataattgggaacactttctcaaaatcgattttggttaatatcaggtaaatcattacctaggagtaagagggaaa

SEQ ID NO: 50140 - DNA, 120 bp, Artificial Sequence
  ENSG00000066739_64 (sequence is synthesized)
ttgttgtcaattcctgactttagattgatccagcagaaagaaaaggtggaactttgtatatatccactgttgaaagttgcatgacctgacttcctgttttctaaagttgggggaatatta

SEQ ID NO: 50141 - DNA, 120 bp, Artificial Sequence
  ENSG00000066739_65 (sequence is synthesized)
ttgaacttcaatttcagaactgcatttcaatttggggcttggaaaatgtagttaaatcaatttcgttctctaaattttctaagcaggaaagcaatgtaaaccaaaaatcaaaatgtttag

SEQ ID NO: 50142 - DNA, 120 bp, Artificial Sequence
  ENSG00000066739_66 (sequence is synthesized)
aatttataaaaatggggttatatagcttttaattttagtttcctttttactgccaaaaaacttaaaaagacaacagcgtaaccacctgtttaagcaccgtgggaccatctcttattcggg

SEQ ID NO: 50143 - DNA, 120 bp, Artificial Sequence
  ENSG00000066739_67 (sequence is synthesized)
tagagcctggtcctggcgacacactaacaggaaggcgtgctgtgttaccgggaaggcgcctctggctgtggggtgcgttctgaccaccccgctcagatgccagcattttccatttgccct

SEQ ID NO: 50144 - DNA, 120 bp, Artificial Sequence
  ENSG00000066739_68 (sequence is synthesized)
taaggaaacttgctatgtgtgttaacccagttatgattagtcaaactggaaaacacttgatcaaacttaaaattgtaaaatctgtctaacttttaaatatactttccacagttgtactta

SEQ ID NO: 50145 - DNA, 120 bp, Artificial Sequence
  ENSG00000066739_69 (sequence is synthesized)
agttcaattaactacagtatagagaaaaataattattctcttctttgcacccggagttgcaaacaaattaagtttacaaatctcatttaaacatatatctttgtaatgtaatctccgcgg

SEQ ID NO: 50146 - DNA, 120 bp, Artificial Sequence
  ENSG00000066739_70 (sequence is synthesized)
ttctttctttgttctaccctcctgcacctgttgtcgatgtaatcattttgggaacagaaacgttgtgtctcaaaaagattcgttgtcagttcagccaagatgttctttacctgagattct

SEQ ID NO: 50147 - DNA, 120 bp, Artificial Sequence
  ENSG00000066739_71 (sequence is synthesized)
ggaaagatgtttatctatatcggaacacttctacattattaaatgtccttaagctttttcttttttacaagtgtcttttcagactttggtgttgtgatgacacagtagaaagagcgtggc

SEQ ID NO: 50148 - DNA, 120 bp, Artificial Sequence
  ENSG00000066739_72 (sequence is synthesized)
tagaatccgtggtttgccacatctgcagcttaccaaacggatgacttgtccaggacatctgatccctgtaagcctcagcatccctcctggtaaatggagggttttttacgacaaagccca

SEQ ID NO: 50149 - DNA, 120 bp, Artificial Sequence
  ENSG00000066739_73 (sequence is synthesized)
aagggaggttttggatgattaggctgtgtgtgcgtgtgagaatgatcacatgtggcgtcatgctttgtacagagcctcagaccactgggcctcgtccagtgagagtcctctctggcgaca

SEQ ID NO: 50150 - DNA, 120 bp, Artificial Sequence
  ENSG00000066739_74 (sequence is synthesized)
tcacacgcggagcagccaggggccaccttagatctcagatctctcagagcaatacttttctgaactgccactgtgcctgggtggttgggttggtgtcatgcttctgactagagtagatcg

SEQ ID NO: 50151 - DNA, 120 bp, Artificial Sequence
  ENSG00000066739_75 (sequence is synthesized)
cgcatgtccaccagtgatacgttgagtccttacagttccccccatggagtcccataagcagctccatcgagatctgtcagcaagttgcaggaccccacaatgttctgacatgttaagacc

SEQ ID NO: 50152 - DNA, 120 bp, Artificial Sequence
  ENSG00000066739_76 (sequence is synthesized)
cccttacatgacgagtagagaggcagctgaggccacaaccgtgtcttcctcttgaatggagctaactcggaaccccccgttttctcttcctttctgcccaccactgaacattgcctttta

SEQ ID NO: 50153 - DNA, 120 bp, Artificial Sequence
  ENSG00000066739_77 (sequence is synthesized)
gataactcagtgtttcttctagatgtcatagcaatagactttcactttcatgaagtttgggtacgatttggattctcgcttaagtacatatatttatcaatatttttataaggcaaagtt

SEQ ID NO: 50154 - DNA, 120 bp, Artificial Sequence
  ENSG00000066739_78 (sequence is synthesized)
cacttaaaaaatctttccaagtagcagtgtgcctaagatggcaaaatactaaaaactggtgtttcctgctcctgttgtgtgtcacttttcaagccgattgaaatatttctggcttttagg

SEQ ID NO: 50155 - DNA, 120 bp, Artificial Sequence
  ENSG00000066739_79 (sequence is synthesized)
gcattactttttaactatctcctttaaaaacgatgttctgtaggtttagtgtctttgttcatttccaaaagagtccagacaactgtgtctgcccctgcagaggctgtttgtccaaaggca

SEQ ID NO: 50156 - DNA, 120 bp, Artificial Sequence
  ENSG00000066739_80 (sequence is synthesized)
gcatgccgcttccaccggaatgcagacagcaggggagcggaattctaaagcagcgacttaaaatgaggaatccccaattgcactaaatggtttcaggattgactaatcattgtcttaaca

SEQ ID NO: 50157 - DNA, 120 bp, Artificial Sequence
  ENSG00000066739_81 (sequence is synthesized)
ttaactcagattttcaatgtgtaaagagctgtgtgacttggcgtctgagagatccctctgctttgctttgcttcagagtcctcgcacccgcatcctcagaactgtggggcatggtgggct

SEQ ID NO: 50158 - DNA, 120 bp, Artificial Sequence
  ENSG00000066739_82 (sequence is synthesized)
ctaacgagcactccccttctgttttccttcattacttttgacctccttaagacttcagagagaatgtccgtcaagttcttttctccatcaagttctttaagttccttgaaaggaagggac

SEQ ID NO: 50159 - DNA, 120 bp, Artificial Sequence
  ENSG00000066739_83 (sequence is synthesized)
tgtgcaaacacaaagcaatattcttttgtatctgcaaatgcatcagctggacataccaattggtatcaaatagaataaaatcaaatataaatgtttgagtcttaggttaaaaaggaaggt

SEQ ID NO: 50160 - DNA, 120 bp, Artificial Sequence
  ENSG00000066739_84 (sequence is synthesized)
tatttgtatagtttatagataatgaaggaaaaatttctttttcattgcaggaaatcttgtttactggaagatagagtcactcttttcatataagacaaatagtgctttaatgccaacttc

SEQ ID NO: 50161 - DNA, 120 bp, Artificial Sequence
  ENSG00000066739_85 (sequence is synthesized)
tttttatctcaacatttcaggatcatgctaggcacactgcccccttgaatagacattatatgcacagttgcaagtcagccaatgtttttattcagaagtatttccccccattatagtgcc

SEQ ID NO: 50162 - DNA, 120 bp, Artificial Sequence
  ENSG00000066739_86 (sequence is synthesized)
tgcatatcagagatacaaaaagcatccaacacactaccgtaataggcttctttggggatgagaaatttgagtctcaacaactcagagtttgagatgtcagcttttttggtaaacgtaggt

SEQ ID NO: 50163 - DNA, 120 bp, Artificial Sequence
  ENSG00000066739_87 (sequence is synthesized)
gttagaggtatattttgctttcctacaacaattgttggcccttgatttcaagcatgttgcttcataggaagcaccagagtgccatctgctgcatttcaagagattgtaaatgtcatctca

SEQ ID NO: 50164 - DNA, 120 bp, Artificial Sequence
  ENSG00000066739_88 (sequence is synthesized)
gctggctcagttatatctctaatgtcccgggtagcagcacctccctctaaaaatatgtttacttcactgtttcacttgtattttgtgtatacgaaatggcagcttccgatttctagttgg

SEQ ID NO: 50165 - DNA, 120 bp, Artificial Sequence
  ENSG00000066739_89 (sequence is synthesized)
atttgtcttgcattgtttgtataacttgctggtcacccagggctatttgctttttcattgagaaatttggtaggggtgtctagttcagcttttatgttgatccatcctgacttattttag

SEQ ID NO: 50166 - DNA, 120 bp, Artificial Sequence
  ENSG00000066739_90 (sequence is synthesized)
acattgaatttatctcaccacaagtaaaagaacatgtgtattgactgtctttgctaagtttcctaatttttcctaattatggcaattatggatgtgaataagaatactgatgctgtacaa

SEQ ID NO: 50167 - DNA, 120 bp, Artificial Sequence
  ENSG00000066739_91 (sequence is synthesized)
atatttttgtggaaatgtaccttgttaatgtgactatttaaataatatgaaaataagaatactcttgaagaaaaaattaaaatatttactctttggattttgctttaaacacttgtcttt

SEQ ID NO: 50168 - DNA, 120 bp, Artificial Sequence
  ENSG00000066739_92 (sequence is synthesized)
caccaagaagtgttcccaaaacttgtgtaaaatacttattggggtggggtgtacatctgcctcagaccttgttattgggaaatgatgttccagtgcccctgatgcttctgatagcagatc

SEQ ID NO: 50169 - DNA, 120 bp, Artificial Sequence
  ENSG00000066739_93 (sequence is synthesized)
ttgggtctgtctgctactgattgctgagctgtatggagttttaacagttcttccctccctgctttggattttagtccctctattagttatcctatccctgcaataaggacttgcagcaaa

SEQ ID NO: 50170 - DNA, 120 bp, Artificial Sequence
  ENSG00000066739_94 (sequence is synthesized)
cacacctcctagtttgatatcacgaaactgataactatttggaggagtatttttacttatgaagggaatatttaaaagacatacttatttttattttatttatttattttttcagacgga

SEQ ID NO: 50171 - DNA, 82 bp, Artificial Sequence
  ENSG00000066739_95 (sequence is synthesized)
gccaccacgccccacaaattttttgtttaacctcagcctggtctcgaactcttgacctcagcctccaaaaatgctgggatta

SEQ ID NO: 50172 - DNA, 120 bp, Artificial Sequence
  ENSG00000066739_96 (sequence is synthesized)
caggcatgagccaccgtgcctggccagacatacttatttttaagggcaatttactttaaaagattttgttgtgacagatgtgactatataacatccactttgaacaattagggaaaaaat

SEQ ID NO: 50173 - DNA, 120 bp, Artificial Sequence
  ENSG00000066739_97 (sequence is synthesized)
aaatgacaagtcacacttcacccatggctcttgttgaaaaaagggatggggacaattgtgagatgcttactgtgtgccaagtatcctactgtctttttataatttcacagcccccactca

SEQ ID NO: 50174 - DNA, 120 bp, Artificial Sequence
  ENSG00000066739_98 (sequence is synthesized)
gaggcagttactagagtccctgttttccagatgaggagacaggttcagagaggtcaagaaacttgctcaccgtcacatggtttgacttccagacctcatgctcttcccaggacttcattt

SEQ ID NO: 50175 - DNA, 120 bp, Artificial Sequence
  ENSG00000066739_99 (sequence is synthesized)
aagaaaagcttggagcagttacctaacttagcaaaaagtcttcactaattgggaaaccacagaattttgctagaagattgagattaaaggctcttagaatatttgagcaagaaaatgtgc

SEQ ID NO: 50176 - DNA, 120 bp, Artificial Sequence
  ENSG00000066739_100 (sequence is synthesized)
ttgatctcttcctggcgtctccagcccctctcccctcttctggctgtgcttagccaccccagcggttcagttctgcatgcccgtgagtaggggttagcaccacctggaagatttctttct

SEQ ID NO: 50177 - DNA, 120 bp, Artificial Sequence
  ENSG00000066739_101 (sequence is synthesized)
ataaatgctgcaccacaggccacagtcaacactgattaaagcaaaatctcagaatggggctaaagtcgggtttctccacctcagcagttgacatttgggaccagcctgtgcattgtagga

SEQ ID NO: 50178 - DNA, 120 bp, Artificial Sequence
  ENSG00000066739_102 (sequence is synthesized)
tgcaggggatgttgccaccctcccaccccccgctggcctctggccactggatgccagtaacaaactcccctcccccagttgtgacagccaaagacgtctccagacatggccaaatatgcc

SEQ ID NO: 50179 - DNA, 120 bp, Artificial Sequence
  ENSG00000066739_103 (sequence is synthesized)
aaatatgacaaaaatcccctgttaaaaatcactgggctaagagctctcctggggaaaatcatgcacagcctggggcaagaacgcgctatggccgccccaactcggatgctctgtcgggat

SEQ ID NO: 50180 - DNA, 120 bp, Artificial Sequence
  ENSG00000066739_104 (sequence is synthesized)
ctctggctgctcctgctgtctcagcccggaggctccacttcaggcagcctggccaccctcccttcctctctgtttcccactatagcatgctttccttttttttgtttgttaaactttgcg

SEQ ID NO: 50181 - DNA, 120 bp, Artificial Sequence
  ENSG00000066739_105 (sequence is synthesized)
gcactccccgcatactgtagatccacgtctgtttccctgtttgacttccttcaggagggcaagggacttagggacccggtgcctagcacagtgccttgcccagagtcagggatcagcaaa

SEQ ID NO: 50182 - DNA, 120 bp, Artificial Sequence
  ENSG00000066739_106 (sequence is synthesized)
tggtgaatgagtgaatgaatgaatgaatgagtgagtgaacccgagtggtcatctagtcctgtctgcaggtgaggaaatcgaagcccggagaggggaaattctttgcccaagatcacatga

SEQ ID NO: 50183 - DNA, 120 bp, Artificial Sequence
  ENSG00000066739_107 (sequence is synthesized)
ttactacttacagatgtcctttattcaatgtaagctcacgttttcttgattttagcaatacttgtaataatttttaaaatataaatatatatgaaataaaagttcatcattgattgacta

SEQ ID NO: 50184 - DNA, 120 bp, Artificial Sequence
  ENSG00000066739_108 (sequence is synthesized)
gctaggtcttaaacttcaaaattgaataatacctattttttcttggtgtatattttctctagttaaatgtttcatgcttatttatttctcacataccaagtcctatggataggctaagaa

SEQ ID NO: 50185 - DNA, 120 bp, Artificial Sequence
  ENSG00000066739_109 (sequence is synthesized)
aaatgtattctgtagaaatccctgggagcagaatggcaactgccactaataacatgtgcccatatctgtgtgaggtgatggaaaagggccagtctgggaccaataggctgacaggaatac

SEQ ID NO: 50186 - DNA, 120 bp, Artificial Sequence
  ENSG00000066739_110 (sequence is synthesized)
tgtttgaaatgaagtgcaaggtttttaaatttaattgtttttaatgtaaatatttacttaagtaccatgagtaaaatttggtataaattgggtcatatgtattgtaagatatatattttt

SEQ ID NO: 50187 - DNA, 120 bp, Artificial Sequence
  ENSG00000066739_111 (sequence is synthesized)
atatttttactgtaaatattttaagtgttttagtatcaataatgactactgctttgactttcaaaataacaattattttagatgttgagtctcttaatttacagtaaggttaatttggcc

SEQ ID NO: 50188 - DNA, 120 bp, Artificial Sequence
  ENSG00000066739_112 (sequence is synthesized)
aatctttaatttattggctcattctgtctaccacacgtgcacatgaaaccagaacaactgaaaaatgctgtagaacttaaggatcgttccaggaagagaaaggagatccatctattaagt

SEQ ID NO: 50189 - DNA, 120 bp, Artificial Sequence
  ENSG00000066739_113 (sequence is synthesized)
aaaatgatagtgccaattcagtggaagtggttaatggcatggaagagaagaacttctctgctgaagaagcatcttttagggatcagcctgtgttttttaggcgcagtggactttggtgag

SEQ ID NO: 50190 - DNA, 120 bp, Artificial Sequence
  ENSG00000066739_114 (sequence is synthesized)
cattttgttagatgtgtaccatcagtgtacaaccagccctctatatctggaattctacatctgagattcaaccaaaatattaattaaaaaaggcaataaaaataatacaaattaaaaata

SEQ ID NO: 50191 - DNA, 120 bp, Artificial Sequence
  ENSG00000066777_0 (sequence is synthesized)
gtttcctcccaacatggcggccggggcaggtcggcggtgatgggggccagttcgcggccgcggcgggtgctaatccccacagtagccagggtagcccttctctcgcggtgcctctgagag

SEQ ID NO: 50192 - DNA, 120 bp, Artificial Sequence
  ENSG00000066777_1 (sequence is synthesized)
cgccacctcgtccctcagttcccggcagacagccgcccgggccgggctccctcaccgccaccagggccggagggacgagtgagaggggcggccgggacgcgacccccgggccgggagaag

SEQ ID NO: 50193 - DNA, 120 bp, Artificial Sequence
  ENSG00000066777_2 (sequence is synthesized)
gaagcggaggcccgacgggcgcggccctcgaggtacggcttcttgggggcggcgaggacctcgacgcccttcgccgacaccgcggctggtcccgctcgcccgccccttcctgatcctgcc

SEQ ID NO: 50194 - DNA, 120 bp, Artificial Sequence
  ENSG00000066777_3 (sequence is synthesized)
gctgccctccacgcctccaatcccccacctccaccccctctcctttctctcttctcttccttcctctcctcctcctcccctccagccgctgggagccgcgggtcggacgagccgccgcct

SEQ ID NO: 50195 - DNA, 120 bp, Artificial Sequence
  ENSG00000066777_4 (sequence is synthesized)
ccttctctgcgtccatgtatgaggggaagaagacgaagaacatgttcctgacccgggctctggagaagatattggccgacaaggaagtgaagaaggcgcatcactcccagctgcgcaaag

SEQ ID NO: 50196 - DNA, 120 bp, Artificial Sequence
  ENSG00000066777_5 (sequence is synthesized)
cttgcgaggtggcgttagaggaaataaaagcggaaactgaaaaacagagtcctcctcatggagaagcaaaagctggatcaagcacccttccaccagtgaaatcaaagacaaattttattg

SEQ ID NO: 50197 - DNA, 120 bp, Artificial Sequence
  ENSG00000066777_6 (sequence is synthesized)
aagcagacaagtacttcttgccttttgagttggcatgccagtccaaatgtcctcgcatagttagtacatctctagattgcttacagaaacttattgcttatgggcacttgactggcaatg

SEQ ID NO: 50198 - DNA, 120 bp, Artificial Sequence
  ENSG00000066777_7 (sequence is synthesized)
ctccagatagtacaacaccaggcaaaaaattaattgatagaattattgaaacaatatgtggctgctttcagggccctcagacagatgaaggagttcagctgcagataataaaggctttac

SEQ ID NO: 50199 - DNA, 120 bp, Artificial Sequence
  ENSG00000066777_8 (sequence is synthesized)
ttactgcagtaacatcacaacacatagaaattcatgaagggactgtactgcaagctgtgagaacatgttacaatatctacttagcaagcaaaaatctcatcaatcagacaacagccaaag

SEQ ID NO: 50200 - DNA, 120 bp, Artificial Sequence
  ENSG00000066777_9 (sequence is synthesized)
ctactctcactcagatgctaaatgttatctttgcacgcatggaaaaccaagcattacaggaagcaaaacaaatggaaaaagaaaggcatcggcagcatcatcatctgttacagtctccag

SEQ ID NO: 50201 - DNA, 120 bp, Artificial Sequence
  ENSG00000066777_10 (sequence is synthesized)
taagccatcacgagcctgaatcacctcaacttagatatttgccacctcagactgttgatcatatatcccaagaacacgaaggggaccttgacctccatacaaatgatgtagataaaagtc

SEQ ID NO: 50202 - DNA, 120 bp, Artificial Sequence
  ENSG00000066777_11 (sequence is synthesized)
ttcaggatgacacagagcctgaaaatggatctgatatttccagtgcagaaaatgaacagactgaagctgatcaggcaactgcagctgaaacattatctaaaaatgaagtgttatatgacg

SEQ ID NO: 50203 - DNA, 120 bp, Artificial Sequence
  ENSG00000066777_12 (sequence is synthesized)
gagaaaaccatgattgtgaggaaaagccacaagacattgtacagaacattgtagaagaaatggtgaacattgttgttggagatatgggagaagggactactataaatgcaagtgcagatg

SEQ ID NO: 50204 - DNA, 120 bp, Artificial Sequence
  ENSG00000066777_13 (sequence is synthesized)
gcaacattggaactatagaggatggtagtgacagtgaaaatattcaagcaaatggaattccaggaacaccaatttctgttgcatatacaccatccttacctgatgatagattgtcagtct

SEQ ID NO: 50205 - DNA, 120 bp, Artificial Sequence
  ENSG00000066777_14 (sequence is synthesized)
cttccaatgatactcaggaatctggaaattcttcaggaccttcacctggtgctaagttttcccacattttacaaaaggatgcctttctagtattcaggtcattgtgtaaactgtcaatga

SEQ ID NO: 50206 - DNA, 120 bp, Artificial Sequence
  ENSG00000066777_15 (sequence is synthesized)
aaccactgtcagatggaccaccagatccaaagtctcatgaactacgatccaagattctttcattgcagttacttctatccattctgcagaatgcaggacctattttcaggacaaatgaga

SEQ ID NO: 50207 - DNA, 120 bp, Artificial Sequence
  ENSG00000066777_16 (sequence is synthesized)
tgtttattaatgctattaagcagtatctttgtgttgcactctcaaaaaatggagtctcatctgttccagaggtttttgagctttctctttctatatttcttactttgttgtcaaatttca

SEQ ID NO: 50208 - DNA, 120 bp, Artificial Sequence
  ENSG00000066777_17 (sequence is synthesized)
agacacatctgaagatgcaaattgaggtgttctttaaagaaattttcttatacattttggaaacttctaccagctcatttgatcacaaatggatggttattcagacactgacgaggattt

SEQ ID NO: 50209 - DNA, 120 bp, Artificial Sequence
  ENSG00000066777_18 (sequence is synthesized)
gtgcagatgctcagagtgtagtggatatttatgtaaactatgactgtgacttaaatgcagccaatatatttgaaagactagtaaatgatctatcaaaaattgctcaaggaaggggcagtc

SEQ ID NO: 50210 - DNA, 120 bp, Artificial Sequence
  ENSG00000066777_19 (sequence is synthesized)
aagaacttggtatgagtaatgttcaggaattgagcctgaggaaaaaaggtttagaatgcttagtgtcgattttgaagtgtatggttgaatggagtaaggatcagtatgtgaatcccaact

SEQ ID NO: 50211 - DNA, 120 bp, Artificial Sequence
  ENSG00000066777_20 (sequence is synthesized)
cccagacaactcttggtcaggaaaaaccctcagagcaagagatgagtgaaatcaaacaccctgagacaataaacagatacggaagtttaaattccctggagtcaacatcatcatcaggaa

SEQ ID NO: 50212 - DNA, 120 bp, Artificial Sequence
  ENSG00000066777_21 (sequence is synthesized)
taggcagctacagtacacagatgtctggcactgataatccagaacaatttgaggtcctaaagcaacaaaaagaaataatagaacaagggatagatttatttaataagaaaccaaagagag

SEQ ID NO: 50213 - DNA, 120 bp, Artificial Sequence
  ENSG00000066777_22 (sequence is synthesized)
gaatacagtacctccaagaacaagggatgcttggcaccacacctgaagatattgcccaattcttacatcaagaggaaagattagactctactcaagtgggtgagttcctgggagataatg

SEQ ID NO: 50214 - DNA, 120 bp, Artificial Sequence
  ENSG00000066777_23 (sequence is synthesized)
ataaatttaacaaagaagtcatgtatgcatatgtggaccaacatgacttttcaggaaaagacttcgtttcagcccttcgtatgtttctagaaggatttcgtcttccaggggaagctcaga

SEQ ID NO: 50215 - DNA, 120 bp, Artificial Sequence
  ENSG00000066777_24 (sequence is synthesized)
aaatcgatcgattaatggaaaaatttgctgcaagatacctagaatgcaaccaaggacaaactctctttgctagtgcggatacagcttatgttttggcttattcaattatcatgttgacca

SEQ ID NO: 50216 - DNA, 120 bp, Artificial Sequence
  ENSG00000066777_25 (sequence is synthesized)
cagaccttcacagtccacaggtgaaaaataaaatgacaaaggaacaatacattaagatgaatagaggtatcaatgacagtaaagaccttcctgaagagtatctatcagccatctataatg

SEQ ID NO: 50217 - DNA, 120 bp, Artificial Sequence
  ENSG00000066777_26 (sequence is synthesized)
aaatagctgggaaaaagatatcaatgaaagaaacaaaagaactaacaatccctacaaaatcaagtaaacagaatgtagccagtgaaaaacaaagaagacttctgtataacttagaaatgg

SEQ ID NO: 50218 - DNA, 120 bp, Artificial Sequence
  ENSG00000066777_27 (sequence is synthesized)
agcagatggccaagacagctaaagcactcatggaggccgtgagccatgttcaggcaccctttacaagtgcaacacatttggagcatgtgaggcccatgtttaagttggcttggacgcctt

SEQ ID NO: 50219 - DNA, 120 bp, Artificial Sequence
  ENSG00000066777_28 (sequence is synthesized)
ttctggctgcattcagtgtgggtctacaagattgtgatgatactgaagtagcctctctttgcctggaaggtataagatgtgcaatcagaattgcatgcattttcagcattcagctggaga

SEQ ID NO: 50220 - DNA, 120 bp, Artificial Sequence
  ENSG00000066777_29 (sequence is synthesized)
gagatgcatatgtccaggcactagcaagatttaccttactcacagtgagttccggtattactgaaatgaaacagaagaacattgacacaataaaaacacttatcacagtggctcatacag

SEQ ID NO: 50221 - DNA, 120 bp, Artificial Sequence
  ENSG00000066777_30 (sequence is synthesized)
atggaaattatttaggaaattcatggcatgagattctgaagtgcatcagtcagttggagctggcacagcttataggaactggagtgaaacctcgatacatttctggaacagtgcgaggca

SEQ ID NO: 50222 - DNA, 120 bp, Artificial Sequence
  ENSG00000066777_31 (sequence is synthesized)
gagaaggatctcttactggaacaaaagatcaggctcctgatgaatttgtgggtttagggctagttggaggaaatgtggactggaaacagatagcaagtattcaggaatccattggagaaa

SEQ ID NO: 50223 - DNA, 120 bp, Artificial Sequence
  ENSG00000066777_32 (sequence is synthesized)
ccagttctcagagtgttgttgttgctgtagatagaatattcacaggatctacaaggctagatggaaatgccattgtggattttgtccgttggctctgtgctgtgtctatggatgaattac

SEQ ID NO: 50224 - DNA, 120 bp, Artificial Sequence
  ENSG00000066777_33 (sequence is synthesized)
tttccacgacacacccaagaatgtttagtctacaaaaaatagtagaaatatcatattacaacatgggaagaataagattacagtggtctcgaatttgggaagttattggagatcatttta

SEQ ID NO: 50225 - DNA, 120 bp, Artificial Sequence
  ENSG00000066777_34 (sequence is synthesized)
ataaggttgggtgtaatcctaatgaagatgtagctatttttgcagtagactccttgaggcagttgtcaatgaagttcttagagaaaggggagcttgctaacttcagattccagaaggatt

SEQ ID NO: 50226 - DNA, 120 bp, Artificial Sequence
  ENSG00000066777_35 (sequence is synthesized)
tcttaagaccttttgaacatataatgaaacggaacaggtctccaacaattcgagatatggttgtacggtgtatagcacagatggttaattctcaagctgctaacattcgatctggatgga

SEQ ID NO: 50227 - DNA, 120 bp, Artificial Sequence
  ENSG00000066777_36 (sequence is synthesized)
agaacattttctctgtatttcatctagctgcatctgatcaagatgaaagcatagtggaacttgcattccaaacaaccgggcacattgtcacccttgtatttgaaaaacactttccagcga

SEQ ID NO: 50228 - DNA, 120 bp, Artificial Sequence
  ENSG00000066777_37 (sequence is synthesized)
ccattgattctttccaggatgcagtgaagtgtttgtctgaatttgcgtgcaatgcagctttcccagacacaagtatggaagcaattcgacttattcgccattgtgcaaaatatgtgtctg

SEQ ID NO: 50229 - DNA, 120 bp, Artificial Sequence
  ENSG00000066777_38 (sequence is synthesized)
atagacctcaggctttcaaggaatacacaagcgatgatatgaacgtagcacctgaagacagggtgtgggtgagaggatggttcccaattctctttgagttatcctgtatcatcaatagat

SEQ ID NO: 50230 - DNA, 120 bp, Artificial Sequence
  ENSG00000066777_39 (sequence is synthesized)
gcaaattagatgtaagaaccaggggtttaacagtaatgtttgaaataatgaaaacatatggccacacttatgagaaacactggtggcaggatttatttagaattgttttcagaatctttg

SEQ ID NO: 50231 - DNA, 120 bp, Artificial Sequence
  ENSG00000066777_40 (sequence is synthesized)
acaatatgaaattgccagaacaacagacagagaaagctgaatggatgacaacaacttgcaatcatgcactttatgcaatctgtgatgtattcactcagtatttagaagtactcagtgatg

SEQ ID NO: 50232 - DNA, 120 bp, Artificial Sequence
  ENSG00000066777_41 (sequence is synthesized)
tacttttggatgacatttttgctcagctctactggtgtgtgcagcaagacaatgagcagttagcgcgatctggtacaaactgtttagagaatgttgttattctgaatggtgaaaaattta

SEQ ID NO: 50233 - DNA, 120 bp, Artificial Sequence
  ENSG00000066777_42 (sequence is synthesized)
ccctagaaatctgggataaaacttgcaactgcacactggatatcttcaaaaccacaatcccacatgcgctgttgacctggcgacccaattctggagaaactgcccccccacctccatctc

SEQ ID NO: 50234 - DNA, 120 bp, Artificial Sequence
  ENSG00000066777_43 (sequence is synthesized)
ctgtaagtgaaaagccattggatacaatatcacagaagtctgtagatattcatgattctattcaaccaaggtctgtggataacagaccacaagcaccactggtttctgcgtctgctgtta

SEQ ID NO: 50235 - DNA, 120 bp, Artificial Sequence
  ENSG00000066777_44 (sequence is synthesized)
atgaagaagtcagcaaaattaaatctacagcaaaatttccagaacaaaaattgtttgctgccctgttgattaaatgtgttgtgcagctggaactcatccagactatcgacaacattgtct

SEQ ID NO: 50236 - DNA, 120 bp, Artificial Sequence
  ENSG00000066777_45 (sequence is synthesized)
tcttcccagccacaagtaagaaagaagatgcagaaaacttagctgcagcacagagagatgcggtggactttgatgttcgcgttgatactcaagaccaaggaatgtaccgctttttaacat

SEQ ID NO: 50237 - DNA, 120 bp, Artificial Sequence
  ENSG00000066777_46 (sequence is synthesized)
cacaacaactttttaagctactggactgcttattagagtcacatagatttgcaaaagcgtttaattccaacaacgaacagaggactgccctgtggaaagcaggattcaaaggcaaatcca

SEQ ID NO: 50238 - DNA, 120 bp, Artificial Sequence
  ENSG00000066777_47 (sequence is synthesized)
agcccaaccttctgaagcaggagaccagcagcctggcctgtgggctgcgcattctcttccggatgtacatggatgagagccgcgttagtgcctgggaggaggtccagcagaggcttttga

SEQ ID NO: 50239 - DNA, 120 bp, Artificial Sequence
  ENSG00000066777_48 (sequence is synthesized)
atgtctgcagtgaagcactaagttacttcctcactctaacatcagaaagtcatcgagaagcctggactaacttactgcttttgtttctaactaaagttctaaagataagtgataataggt

SEQ ID NO: 50240 - DNA, 120 bp, Artificial Sequence
  ENSG00000066777_49 (sequence is synthesized)
ttaaagctcatgcatcattctactaccctctcttatgtgaaattatgcaatttgacttgattcctgaacttcgtgctgttcttagaagattttttctgcgaatcggagtagtttttcaga

SEQ ID NO: 50241 - DNA, 120 bp, Artificial Sequence
  ENSG00000066777_50 (sequence is synthesized)
tatcacaaccacctgaacaggaacttggaataaacaagcaatgatgggaacttaatatttttgttggcatttacatccctctgctctttaaaaggacgctggagctgaggtttcctacct

SEQ ID NO: 50242 - DNA, 120 bp, Artificial Sequence
  ENSG00000066777_51 (sequence is synthesized)
gaaaaatgatttctctggattgcagtgtctgagttactggtaaagatgcttagaagtcttactcaaacttgcaacactccagtcccttttagtgctggtggattttgtgtgttatattgg

SEQ ID NO: 50243 - DNA, 120 bp, Artificial Sequence
  ENSG00000066777_52 (sequence is synthesized)
cctcatgttgagcagaaagcctgtttaaacagtgtcagctcatgctcacgggtccttccctgtcttccacggcaggaaaagccccacgtttttggcaggtgtggaagtgaaacttaccca

SEQ ID NO: 50244 - DNA, 120 bp, Artificial Sequence
  ENSG00000066777_53 (sequence is synthesized)
aagaactatagatgtaaagattgaacttctacaagaagtacaactcaggagagctgtattttgaaggataaaatgtttataattggggagtggggagagaagaagaaattattgttcatg

SEQ ID NO: 50245 - DNA, 120 bp, Artificial Sequence
  ENSG00000066777_54 (sequence is synthesized)
gtaaaagatatttagcaactatggtattcttattctgaagatttttgcacactcaggctatctgagatactggtaatcatcctgtgaaaaatgtacagagatgcaggtctgtaatataaa

SEQ ID NO: 50246 - DNA, 120 bp, Artificial Sequence
  ENSG00000066777_55 (sequence is synthesized)
aatcttaaaacattatatagttcttcctgcactgttttctttattttcttattcatttgctaaatacccataatattttgtcaaatgcactaaacatttgggtggaactttcttttttat

SEQ ID NO: 50247 - DNA, 120 bp, Artificial Sequence
  ENSG00000066777_56 (sequence is synthesized)
tttatagggatttttagttttgccctttttggtaggtggtgattttgaggctgtaacatgcccagaagctgttgtggccgacacttcaacaatagggaaaaaaaggtagaaaatatccct

SEQ ID NO: 50248 - DNA, 120 bp, Artificial Sequence
  ENSG00000066777_57 (sequence is synthesized)
actgacagtaactacctgtcacatatttctcttaggacttttaaagatgagccattaaaatagaatgatcctttatggaccaaaacttgaatcactgcaaaatgaatccagattgctgtc

SEQ ID NO: 50249 - DNA, 120 bp, Artificial Sequence
  ENSG00000066777_58 (sequence is synthesized)
attttcttttcttttgggtggtggggcttgatgtagattttactctatgtacagaatttaacgttgaatatattaaaataacaaatctggcatggtttgcggaggttagatttactggaa

SEQ ID NO: 50250 - DNA, 120 bp, Artificial Sequence
  ENSG00000066777_59 (sequence is synthesized)
atgtattcatactgtgaattgtgctctgatggttaaaagacaagattgtcaagcattccgtattaacagtggatgtagaaaattttttcagatggacaaaatgtatatggtacagatgta

SEQ ID NO: 50251 - DNA, 120 bp, Artificial Sequence
  ENSG00000066777_60 (sequence is synthesized)
aagttttctatgtaaaaaattctgtacaactttctgtacaatattgattcccatctggcatattctaatcaggttataggtcaataaagtttttgaattatttcatcagtgcaatcaaaa

SEQ ID NO: 50252 - DNA, 120 bp, Artificial Sequence
  ENSG00000066777_61 (sequence is synthesized)
gagggagtgaatggatgactgcccatgccgctgtcactgtaataaaggactaagaagacaagatttaagaggaagagataaccgtaggacttacagaatttccagaacaaaaattgtttg

SEQ ID NO: 50253 - DNA, 120 bp, Artificial Sequence
  ENSG00000066777_62 (sequence is synthesized)
agagcacatggccccttccacagctttggggattcaagtgcagtttcatgtgaagggttccaccttcccaggccacaagtttttttatatctcatatccccagcttgaatagggagggaa

SEQ ID NO: 50254 - DNA, 120 bp, Artificial Sequence
  ENSG00000066777_63 (sequence is synthesized)
ttctggacatggaaatcaccttcacatcaggctgctgtggctccgttttgtaagcagcagatgctgatggctgagcacaaacaaaatgtgcctccatacgggctgtttcacctttacata

SEQ ID NO: 50255 - DNA, 120 bp, Artificial Sequence
  ENSG00000066777_64 (sequence is synthesized)
gccccacatttctagcccaattcgcattgggatgcggggtcccagagccgccgtgcaagagctctcagagatgaatcaagcagtgcccaggctgcactgctgcttgtgcaaagccaccag

SEQ ID NO: 50256 - DNA, 120 bp, Artificial Sequence
  ENSG00000066777_65 (sequence is synthesized)
tggccttgctgtatcttcctcagtccttgcttttctccccccttacccagctttgttcactaattagcagttctctaggggattcagtaggcgagggatcagaatcccttgggatacctt

SEQ ID NO: 50257 - DNA, 120 bp, Artificial Sequence
  ENSG00000066777_66 (sequence is synthesized)
gacaagttcccattatgaccccaggaatctccccctttgccccattttgaaaactgctgtccaaccacctcatggccttgtactctgcctactactcaagactacatctggttcctgggc

SEQ ID NO: 50258 - DNA, 120 bp, Artificial Sequence
  ENSG00000066777_67 (sequence is synthesized)
ctgtgctctgggctgcagctgttcctttggcatatttagtggttccaggtaacccagagtccctagtgaatgggcctcatctaagaattttaaaccagtagaaataaagataaaatacac

SEQ ID NO: 50259 - DNA, 120 bp, Artificial Sequence
  ENSG00000066777_68 (sequence is synthesized)
atatatgactgtaaatataagtgcatatttaaggttttcaaaaatgtacactctattcttagaaaaaaaaatagcaacttacagctcacacatacaggctgctttgctgtgaccctagaa

SEQ ID NO: 50260 - DNA, 120 bp, Artificial Sequence
  ENSG00000066777_69 (sequence is synthesized)
taggtttaaaaatgcctagtgatgtggcccactacttgaaaggccaagggctctaaatcccagcctctgttactccacagctggcttttttttttttggtcataatatgtctcactgctt

SEQ ID NO: 50261 - DNA, 120 bp, Artificial Sequence
  ENSG00000066777_70 (sequence is synthesized)
ccctggatctggaggggtacagaaggggtaggaaaggaggctgcagactagagttcagagatgaaggaactactgtgaagatacagccaaagtatagcaattgaactgtacatgtgaaac

SEQ ID NO: 50262 - DNA, 120 bp, Artificial Sequence
  ENSG00000066777_71 (sequence is synthesized)
gtatgtagctttgcctgaagaactgtttagattttatattgcagtgttgggtagaattttccccaaaacttaaaatttttatgtaacaaaagataaaatttcagtaacccatagcttata

SEQ ID NO: 50263 - DNA, 120 bp, Artificial Sequence
  ENSG00000066777_72 (sequence is synthesized)
aaatctcaactctagtttgtactcacttgcctgctgcttattacccaggaaaaacagtgctaaattactaaaagtttgtcaaagatatacagacaaatgtttttcaaaataaggatatgt

SEQ ID NO: 50264 - DNA, 120 bp, Artificial Sequence
  ENSG00000066777_73 (sequence is synthesized)
aaccagagtcactgcctgctgtggaccctgctttcctggctcctgtgatggagccccagagtagtttgactctaggcagtttaaggctctgcagtttgcaatcactactaatggagaaat

SEQ ID NO: 50265 - DNA, 120 bp, Artificial Sequence
  ENSG00000066777_74 (sequence is synthesized)
ggggctgccagtgaaaggaggatgcctgggaatgaaatcaatagaagagatgcagaaagcctacggaaaaacagcgtgctgatactatttgacacagcaatgattatttcttacctttgg

SEQ ID NO: 50266 - DNA, 120 bp, Artificial Sequence
  ENSG00000066777_75 (sequence is synthesized)
caccttcctgcatttttattctgttcagcctcttctgctgctctcttagcagggcttgctgctgaatctctaaggtgtgatgatctcttggaggatccaggtacataaatttcagatcaa

SEQ ID NO: 50267 - DNA, 120 bp, Artificial Sequence
  ENSG00000066777_76 (sequence is synthesized)
ctcgtgtttctgaatctggtataaaaaatatgttatataactaagttaaatgttgttttcaaatgggattttgtaaaacttcactgtaagtaacatgagtaacctaatttcaaaatcaag

SEQ ID NO: 50268 - DNA, 120 bp, Artificial Sequence
  ENSG00000066777_77 (sequence is synthesized)
gaaatgatagaaatagtgaaacatcactaaagtcaaaggacagtaaaatagccacaaaactaaagaatatgaaattaatattctttaataagtgtcttttcacaaacttaccaacataag

SEQ ID NO: 50269 - DNA, 120 bp, Artificial Sequence
  ENSG00000066777_78 (sequence is synthesized)
gaataccccagaacaagcagtggatgttgcattgtccatctctacctgtcctagccctgccaggatgccacccagaacacagactacgtgcaggtatatccaagcagatggtcacatggc

SEQ ID NO: 50270 - DNA, 120 bp, Artificial Sequence
  ENSG00000066777_79 (sequence is synthesized)
tatgactaaggcagccatgagacactgtaatcacggctgatctctaaaatatactggaaacgtgaaaaaataatgttactggccaattaatattttagtccttacaaatatcatgcagaa

SEQ ID NO: 50271 - DNA, 87 bp, Artificial Sequence
  ENSG00000066777_80 (sequence is synthesized)
ggccaattaatattttagtccttacaaatatcatgcagaaagcaagataaatgtagactggctggaacttgagggggaatgccattt

SEQ ID NO: 50272 - DNA, 60 bp, Artificial Sequence
  ENSG00000066777_81 (sequence is synthesized)
cacccaccactatgcccggctaatttttcttgtagtttttagtagagacgaggtttcact

SEQ ID NO: 50273 - DNA, 66 bp, Artificial Sequence
  ENSG00000066777_82 (sequence is synthesized)
gacctcgtgatccacaaagaataaaaattttttaatcttgagaagaaacatacagttcatacatat

SEQ ID NO: 50274 - DNA, 120 bp, Artificial Sequence
  ENSG00000066777_83 (sequence is synthesized)
attttttaatcttgagaagaaacatacagttcatacatataaaaagccttgaaaatattattccctttgactcactaattacactgctggaatataaagaaatgatcctaaatatatatg

SEQ ID NO: 50275 - DNA, 120 bp, Artificial Sequence
  ENSG00000066777_84 (sequence is synthesized)
tagttttatggtcctaaatatgtataaagctttatgatcagaaattatcaaaagaacaaaatagtgaaaatggttaacagccattttcagaagttaacagaagtttctggacacataaac

SEQ ID NO: 50276 - DNA, 120 bp, Artificial Sequence
  ENSG00000066777_85 (sequence is synthesized)
ttggattggtccctggcttcactgcttccaaactcattaaaaaaacaataccaaccaccaagtcatgggtgaatgagggcaagatgtagtaacacagggaaatgaacagcccaattctat

SEQ ID NO: 50277 - DNA, 120 bp, Artificial Sequence
  ENSG00000066777_86 (sequence is synthesized)
ggcttaaacctttttggtctcaagatcttttttacactcttaaaaattgaggaccccaaagagctttacttatgtatgtcacacacacacacgccatattagaaattaaaactaagagat

SEQ ID NO: 50278 - DNA, 120 bp, Artificial Sequence
  ENSG00000066777_87 (sequence is synthesized)
tcctaaaacacaagaatacacaaggacacattttgctagcttcaaagagatgaaatcattacatgtcatgtagtctctggccaatctatatacacatgagagaatgagaatgaaaaagac

SEQ ID NO: 50279 - DNA, 120 bp, Artificial Sequence
  ENSG00000066777_88 (sequence is synthesized)
aaataatgtcttagtttataatacaaacagttttgacttcagaccaaactcctcatgagacccactgggttaacacaatgcctggcagatagtaagtaatcaatatttgatagcataaaa

SEQ ID NO: 50280 - DNA, 120 bp, Artificial Sequence
  ENSG00000066777_89 (sequence is synthesized)
aataacagtatacgtaattgataatacgtgtaaatctaggtgaaaaacaatagagaaaattaaataaataacacaatttatctttttttttcttttaattatgctcagaaagactagaaa

SEQ ID NO: 50281 - DNA, 120 bp, Artificial Sequence
  ENSG00000066777_90 (sequence is synthesized)
acatccaaaatgataatggtacttacatataggtagtttgactaaagtgatttttccttcttactatctttctgtattttgaaaatttgctataataaacagatagtattttcaaaagga

SEQ ID NO: 50282 - DNA, 120 bp, Artificial Sequence
  ENSG00000066813_0 (sequence is synthesized)
aatgattagctgagctctctttccgacagtgcagggattctgaagctgtctgcttgagttactgtgctctcttccaaggctgtaggagttctggagctgctggctggagaggagggtgga

SEQ ID NO: 50283 - DNA, 120 bp, Artificial Sequence
  ENSG00000066813_1 (sequence is synthesized)
cgaagctctctccagaaagacatcctgagaggacttggcaggcctgaacatgcattggctgcgaaaagttcagggactttgcaccctgtggggtactcagatgtccagccgcactctcta

SEQ ID NO: 50284 - DNA, 120 bp, Artificial Sequence
  ENSG00000066813_2 (sequence is synthesized)
cattaatagtaggcaactggtgtccctgcagtggggccaccaggaagtgccggccaagtttaactttgctagtgatgtgttggatcactgggctgacatggagaaggctggcaagcgact

SEQ ID NO: 50285 - DNA, 120 bp, Artificial Sequence
  ENSG00000066813_3 (sequence is synthesized)
cccaagcccagccctgtggtgggtgaatgggaaggggaaggaattaatgtggaatttcagagaactgagtgaaaacagccagcaggcagccaacatcctctcgggagcctgtggcctgca

SEQ ID NO: 50286 - DNA, 120 bp, Artificial Sequence
  ENSG00000066813_4 (sequence is synthesized)
gcgtggggatcgtgtggcagtgatgctgccccgagtgcctgagtggtggctggtgatcctgggctgcattcgagcaggtctcatctttatgcctggaaccatccagatgaaatccactga

SEQ ID NO: 50287 - DNA, 120 bp, Artificial Sequence
  ENSG00000066813_5 (sequence is synthesized)
catactgtataggttgcagatgtctaaggccaaggctattgttgctggggatgaagtcatccaagaagtggacacagtggcatctgaatgtccttctctgagaattaagctactggtgtc

SEQ ID NO: 50288 - DNA, 120 bp, Artificial Sequence
  ENSG00000066813_6 (sequence is synthesized)
tgagaaaagctgcgatgggtggctgaacttcaagaaactactaaatgaggcatccaccactcatcactgtgtggagactggaagccaggaagcatctgccatctacttcactagtgggac

SEQ ID NO: 50289 - DNA, 120 bp, Artificial Sequence
  ENSG00000066813_7 (sequence is synthesized)
cagtggtcttcccaagatggcagaacattcctactcgagcctgggcctcaaggccaagatggatgctggttggacaggcctgcaagcctctgatataatgtggaccatatcagacacagg

SEQ ID NO: 50290 - DNA, 120 bp, Artificial Sequence
  ENSG00000066813_8 (sequence is synthesized)
ttggatactgaacatcttgggctcacttttggaatcttggacattaggagcatgcacatttgttcatctcttgccaaagtttgacccactggttattctaaagacactctccagttatcc

SEQ ID NO: 50291 - DNA, 120 bp, Artificial Sequence
  ENSG00000066813_9 (sequence is synthesized)
aatcaagagtatgatgggtgcccctattgtttaccggatgttgctacagcaggatctttccagttacaagttcccccatctacagaactgcctcgctggaggggagtcccttcttccaga

SEQ ID NO: 50292 - DNA, 120 bp, Artificial Sequence
  ENSG00000066813_10 (sequence is synthesized)
aactctggagaactggagggcccagacaggactggacatccgagaattctatggccagacagaaacgggattaacttgcatggtttccaagacaatgaaaatcaaaccaggatacatggg

SEQ ID NO: 50293 - DNA, 120 bp, Artificial Sequence
  ENSG00000066813_11 (sequence is synthesized)
aacggctgcttcctgttatgatgtacaggttatagatgataagggcaacgtcctgccccccggcacagaaggagacattggcatcagggtcaaacccatcaggcctataggcatcttctc

SEQ ID NO: 50294 - DNA, 120 bp, Artificial Sequence
  ENSG00000066813_12 (sequence is synthesized)
ctccttggagaccggggaatcaaagatgaagatgggtatttccagtttatgggacgggcagatgatatcattaactccagcgggtaccggattggaccctcggaggtagagaatgcactg

SEQ ID NO: 50295 - DNA, 120 bp, Artificial Sequence
  ENSG00000066813_13 (sequence is synthesized)
atgaagcaccctgctgtggttgagacggctgtgatcagcagcccagaccccgtccgaggagaggtggtgaaggcatttgtgatcctggcctcgcagttcctatcccatgacccagaacag

SEQ ID NO: 50296 - DNA, 120 bp, Artificial Sequence
  ENSG00000066813_14 (sequence is synthesized)
ctcaccaaggagctgcagcagcatgtgaagtcagtgacagccccatacaagtacccaagaaagatagagtttgtcttgaacctgcccaagactgtcacagggaaaattcaacgaaccaaa

SEQ ID NO: 50297 - DNA, 120 bp, Artificial Sequence
  ENSG00000066813_15 (sequence is synthesized)
cttcgagacaaggagtggaagatgtccggaaaagcccgtgcgcagtgaggcgtctaggagacattcatttggattcccctcttctttctctttcttttccctttgggcccttggccttac

SEQ ID NO: 50298 - DNA, 120 bp, Artificial Sequence
  ENSG00000066813_16 (sequence is synthesized)
tatgatgatatgagattctttatgaaagaacatgaatgtaagttttgtcttgccctggttattagcacaaaacattactatgttagatattgaaataagaaagggaaggaatgagagaga

SEQ ID NO: 50299 - DNA, 120 bp, Artificial Sequence
  ENSG00000066813_17 (sequence is synthesized)
gtgaaaaggagagggtaacagaaaaagaggaaagaaaagtaagtcagggaaatgttaaaaactgcaagagaaagcaattgaaaaagaaataaagtagggagggaaggcgagaggaagcaa

SEQ ID NO: 50300 - DNA, 120 bp, Artificial Sequence
  ENSG00000066813_18 (sequence is synthesized)
gggaaggaggaagaaaggaaagaggagatgaaagggggagaaaagatagaagaaaaataattgaagggagaatcagaaaaataaagagaagaaaggaaagaaataaagagagaaagagaa

SEQ ID NO: 50301 - DNA, 120 bp, Artificial Sequence
  ENSG00000066813_19 (sequence is synthesized)
agaagaaagagcaaaagaacacaagaaagaaagagagggagaaagagagggagaaagggagagaaaaaaattgtaaaaataaaaatagtaaaagaaactgataaagaaaagtcatggaag

SEQ ID NO: 50302 - DNA, 120 bp, Artificial Sequence
  ENSG00000066813_20 (sequence is synthesized)
acaggaagaaaggaagagagggaagtaaagaggaaaacctataaatattcccacagatagacaaagtcaagcataaaactggagcttgagaaggaaatgaaaggaaaagaagtggtactt

SEQ ID NO: 50303 - DNA, 120 bp, Artificial Sequence
  ENSG00000066813_21 (sequence is synthesized)
tcttttaccctaggagaagacctccatacaggaagacttgtgtgtggggctgggacattagaatcatccgcaagtcactccaaaccttgaaactgtcagggtcagaggggaaccaccatt

SEQ ID NO: 50304 - DNA, 120 bp, Artificial Sequence
  ENSG00000066813_22 (sequence is synthesized)
tattaagcatttgccatgtgccaggcactgacccagacacattataaataccacattgtttcacctgtgtgtggcatctacagaccttagatcatagctgtgagaacaaagtaagcactg

SEQ ID NO: 50305 - DNA, 120 bp, Artificial Sequence
  ENSG00000066813_23 (sequence is synthesized)
ccaaagttatcagctacccatacctcatgtttttggtgttatctactcttcctagaatcaaatattaaaataattttaaaaccaagatcctgacaatagtctttaggaaaaacaaaaaaa

SEQ ID NO: 50306 - DNA, 120 bp, Artificial Sequence
  ENSG00000066813_24 (sequence is synthesized)
gtaggagttctggagctgctggctggagaggagggtggacgaagctctctccagaaagacatcctgagaggacttggcagaaaaaaaggagacagaaatgtcagacactgtgatggttaa

SEQ ID NO: 50307 - DNA, 120 bp, Artificial Sequence
  ENSG00000066813_25 (sequence is synthesized)
tgatcctgggtgtgtctgtgagggtgttgtcaaaagagattaacatttgagtcggtgggctgggagaggcagacccacccttaatctgggtaggcaccacctaatccagcatgactagaa

SEQ ID NO: 50308 - DNA, 120 bp, Artificial Sequence
  ENSG00000066813_26 (sequence is synthesized)
ttaatctgggtaggcaccacctaatccagcatgactagaatataaggaggcagaaaaatatgaaaagagagactggcctagcttcccagcctagatctttcttccgtactggatgcttcc

SEQ ID NO: 50309 - DNA, 77 bp, Artificial Sequence
  ENSG00000066813_27 (sequence is synthesized)
ctcaaactggctctccttgccctgaacatgcattggctgcgaaaagttcagggactttgcaccctgtggggtactca

SEQ ID NO: 50310 - DNA, 120 bp, Artificial Sequence
  ENSG00000066813_28 (sequence is synthesized)
gtgctctcttccaaggctgtaggagttctggagctgctggctggagaggagggtggacgaagctctctccagaaagacatcctgagaggacttggcagcctgcagatggcctattgtggg

SEQ ID NO: 50311 - DNA, 62 bp, Artificial Sequence
  ENSG00000066813_29 (sequence is synthesized)
gttcccaattaacactcttatagtttcttatgcctatctttactttaatctcttaatcctgt

SEQ ID NO: 50312 - DNA, 79 bp, Artificial Sequence
  ENSG00000066813_30 (sequence is synthesized)
gtttcttatgcctcagaatgtaattcacctcaggactactattgcacaaatggattgtaaaacatgtgtgtttgaacaa

SEQ ID NO: 50313 - DNA, 120 bp, Artificial Sequence
  ENSG00000066813_31 (sequence is synthesized)
accagaaaaaatttaaatctacctataagctggaagcccccgcttcaagttgccccacctttctggaccaaaccaatgtattttttaaatgtgtttgattgatgtcttatgtctccctaa

SEQ ID NO: 50314 - DNA, 120 bp, Artificial Sequence
  ENSG00000066813_32 (sequence is synthesized)
ctaaaatgtataaaaccaaagtgcaccctgaccaccttgggcacgtgttctcaggacctcctgagggctctgtcatggccatggttactcatgtttggctcagaataaatctcttcaaat

SEQ ID NO: 50315 - DNA, 120 bp, Artificial Sequence
  ENSG00000066813_33 (sequence is synthesized)
gcttgagttactgtgctctcttccaaggctgtaggagttctggagctgctggctggagaggagggtggacgaagctctctccagaaagacatcctgagaggacttggcaggctggcaagc

SEQ ID NO: 50316 - DNA, 120 bp, Artificial Sequence
  ENSG00000066813_34 (sequence is synthesized)
ccgtccgaggagaggtgatggggaagcagtagcctgggggtgaacagatatgaacacaagggcagtgtagtatgatggtttaagaacagggactgtggggctgaacactctgagacccaa

SEQ ID NO: 50317 - DNA, 120 bp, Artificial Sequence
  ENSG00000066813_35 (sequence is synthesized)
tcttggccctgccacttactagctatgtgaccttgggtaagctacttggcctctctgtttctcagtttcttcatctgtaagatgagggattgttatgagggttaaatgtgctaatatttg

SEQ ID NO: 50318 - DNA, 120 bp, Artificial Sequence
  ENSG00000066813_36 (sequence is synthesized)
tacgttgagacttcaccatctagttggaggaatccctatcttcagatcttgggaaggtaaagacagataatccttgaatctggccacctcacttgacaggtgaggatggtggagccagag

SEQ ID NO: 50319 - DNA, 120 bp, Artificial Sequence
  ENSG00000066813_37 (sequence is synthesized)
attacaagacttgctcaagctcacaaccattagaaagtggacagagaagaacccaagggcatgccttctgatccctgagataattgactaataaactaaataaataataaatcaaataat

SEQ ID NO: 50320 - DNA, 120 bp, Artificial Sequence
  ENSG00000066813_38 (sequence is synthesized)
ctccagttatccaatcaagagtatgatgggtgcccctattgtttaccggatgttgctacagcaggatctttccaggtgatggggctttgaggattggtaagagagtctggccccatcccc

SEQ ID NO: 50321 - DNA, 120 bp, Artificial Sequence
  ENSG00000066813_39 (sequence is synthesized)
ctgactccctcacatacattcatgcctatctatctgaatctctcgcacacagagagccccatgaagccatttgcatcatcaaagcacccagaaaccaagtctaggcctgagtggactttg

SEQ ID NO: 50322 - DNA, 120 bp, Artificial Sequence
  ENSG00000066813_40 (sequence is synthesized)
cccagacaggactggacatccgagaattctatggccagacagaaacggtacctgttcccaggggaaccatgggctgtgtgcactttttgggcttcaaaattctctttgacaataaaacat

SEQ ID NO: 50323 - DNA, 120 bp, Artificial Sequence
  ENSG00000066813_41 (sequence is synthesized)
gttagccaccatgtatcattcatttatttgagaaatatttattgagcctctgtgaagggacaggtactgagtattgaaaattcagcacagaacaaaaaaggcaaagttcctgttttctgg

SEQ ID NO: 50324 - DNA, 120 bp, Artificial Sequence
  ENSG00000066813_42 (sequence is synthesized)
gagattacattccagtgagatttggggagagagacaataaactaagaaatatctagcatggcaggtggtgagaaatgcgatggaaaaagtaaagtagatgagatggggtgagaagttggt

SEQ ID NO: 50325 - DNA, 120 bp, Artificial Sequence
  ENSG00000066813_43 (sequence is synthesized)
aaatcacatatggtagtcagaaagttcctctgtgatggggaaacattttagcagagaccaaagtttatcaaacatgtcaagcactgtacaaagctgcttagactgaagtgaggaatggga

SEQ ID NO: 50326 - DNA, 120 bp, Artificial Sequence
  ENSG00000066813_44 (sequence is synthesized)
agaagaacccaccatggctttactgcacctcctgacatatcttcttggaactcttgaggtctcatgtgcacaatgtggatttatgctattctatactattttacttatcaaaactacatg

SEQ ID NO: 50327 - DNA, 120 bp, Artificial Sequence
  ENSG00000066813_45 (sequence is synthesized)
gggaatacttttccccaactcttcttctcctttttccagtgcctcttacttgtgactctcagcacttcttgcctcttcctctccactctcttaccctgcatccttctttagctaatgagt

SEQ ID NO: 50328 - DNA, 120 bp, Artificial Sequence
  ENSG00000066813_46 (sequence is synthesized)
acccttggtagaacttttgcagagtgttgatggcagctctgtggtatgaaagagccaggaagagctctgcaaatatgaataaggacaatggagttgtggcaagcataccctggcaggggc

SEQ ID NO: 50329 - DNA, 120 bp, Artificial Sequence
  ENSG00000066813_47 (sequence is synthesized)
aaagtgccaaacttgagtagttttcaaacccaactctgattgactcaggctcccatgatcttaatcactcagcagcctctcttgtgagtgaggcatccaccactcatcactgtgtggaga

SEQ ID NO: 50330 - DNA, 120 bp, Artificial Sequence
  ENSG00000066813_48 (sequence is synthesized)
cactatcatacctctggtacgtacagaacacatcacacagaaaattatgggaaccactgagcagtgaggccaagggtgatcccctgctgagaaaaccctgtgtgcccagctctgagctag

SEQ ID NO: 50331 - DNA, 120 bp, Artificial Sequence
  ENSG00000066813_49 (sequence is synthesized)
ccctgctgtatatgatttcattttagttaccataagttgaatttggctattttatccccattttgcagacgggaacactgaagtttggagaagttaacacattgtttagggttatggttt

SEQ ID NO: 50332 - DNA, 120 bp, Artificial Sequence
  ENSG00000066813_50 (sequence is synthesized)
tcagtctatttttctcttttctccccctgtatcttctttctcctcatctgtctctgttgtccttggagcatgaggtgagcctggtctcaatctattgtccacctgctcctccaataaacg

SEQ ID NO: 50333 - DNA, 120 bp, Artificial Sequence
  ENSG00000066813_51 (sequence is synthesized)
tggaacctcattcttgtccccagtttctccctttcccttgacctggatcaccgggggtgcaaatgagtagatacaagggtgatgcaagtcttaatgctaatttcacattattccaggaga

SEQ ID NO: 50334 - DNA, 120 bp, Artificial Sequence
  ENSG00000066813_52 (sequence is synthesized)
ctcagcagcctctcttctgaggtgggtcaatcaacttgccctttccagcacagtgggtggcgggaaaagatgggtcattgtgacatctggtgtccaggctagatctgagaaaatgacaat

SEQ ID NO: 50335 - DNA, 120 bp, Artificial Sequence
  ENSG00000066813_53 (sequence is synthesized)
ctgtgtctctgtcagtgaggcatccaccactcatctgttattctgttgggaaggttcatttcagggttcaagcagaactggtgctgccatgggagatactttaaaaagtatattttactg

SEQ ID NO: 50336 - DNA, 89 bp, Artificial Sequence
  ENSG00000066813_54 (sequence is synthesized)
gtgctgccatgggagatactttaaaaagtatattttactgcttgaggaaatggatacctcagtcttcatgatgtgattatttcattccc

SEQ ID NO: 50337 - DNA, 120 bp, Artificial Sequence
  ENSG00000066813_55 (sequence is synthesized)
gtaagtatattttaggtcttacagattgcatattggtgattccatatagtttgcaagggctttgggtatccatagcgtcgtattaaaatgtgactccccctaaaagagattataatgtga

SEQ ID NO: 50338 - DNA, 120 bp, Artificial Sequence
  ENSG00000066813_56 (sequence is synthesized)
ttgttaggtcctcttcctggggagtggtagatgggttgcttcctgaacaaacaatttagtgaggcccctaggattgtgattccagtaatggggagagagccagggaatgaggagcagggg

SEQ ID NO: 50339 - DNA, 120 bp, Artificial Sequence
  ENSG00000066813_57 (sequence is synthesized)
gagccaccaagtgcaggccaagttcaggacagtgtcaggacccgctctgcagaaattttttctttttctgtgaccttgtacctcctcctgaggtttgctgatctgtctgcttctttccac

SEQ ID NO: 50340 - DNA, 90 bp, Artificial Sequence
  ENSG00000066813_58 (sequence is synthesized)
tcagcatatcaaaaagatgtctacactcccatgttaattgcagcactattcacaatacgaagatatgggatcaacctaagtatccaatgg

SEQ ID NO: 50341 - DNA, 120 bp, Artificial Sequence
  ENSG00000066813_59 (sequence is synthesized)
agatgtctacactcccatgttaattgcagcactattcacaatacgaagatatgggatcaacctaagtatccaatggatgaaaggataaataatatgtggtatatatacacaatggaatac

SEQ ID NO: 50342 - DNA, 120 bp, Artificial Sequence
  ENSG00000066813_60 (sequence is synthesized)
gcagcaacatggagagaactggaggtcattatgttaactgaagtaagccaggcacagaaaataaatatcacgtgtttgcactcataagtaagagctaaaatagctgatctcatggagata

SEQ ID NO: 50343 - DNA, 120 bp, Artificial Sequence
  ENSG00000066813_61 (sequence is synthesized)
aagagtagagtgatagataccagaggctgggaagggtgtgtgggtggggaagtgggggatgaagggaggttggtgaatgggtagaagcatacagttagcagcaataagttcgaatgttca

SEQ ID NO: 50344 - DNA, 120 bp, Artificial Sequence
  ENSG00000066813_62 (sequence is synthesized)
atagcagagtagggtgactatagttaacaaccatgtattgtatatttcaaaatagctagaagagaggacttgaaatgttctcaacacacacaaattataaatactcaaggtgatggacac

SEQ ID NO: 50345 - DNA, 120 bp, Artificial Sequence
  ENSG00000066813_63 (sequence is synthesized)
cccaagtatcctaacttgataattaccatatttgcgtgtaacaaaatgtcacttgtacccaatacatatgtacaaatattatgaaatgataaaaacttttagaaagtaaagtgcttggtt

SEQ ID NO: 50346 - DNA, 80 bp, Artificial Sequence
  ENSG00000066813_64 (sequence is synthesized)
caggcatctgtaatcccagctactcaagaggctgcggcaggagaatcacatgaacccggggtagcctgggtgacagagtg

SEQ ID NO: 50347 - DNA, 120 bp, Artificial Sequence
  ENSG00000066813_65 (sequence is synthesized)
tctctggctatgtggaaaatcccgacaagacagcagccaacattcgaggagacttttggctccttggagaccggggaatcaaagatgaagatgggtatttccagtttatgggacgggcat

SEQ ID NO: 50348 - DNA, 120 bp, Artificial Sequence
  ENSG00000066827_0 (sequence is synthesized)
gtgcaggagtctgagaagaaagggtgtagatggagaggcggtggcctcacctctgcatgctccgtgggaagcggcggaggcgcccagcatccctcctactctgcccttggtggaggttta

SEQ ID NO: 50349 - DNA, 120 bp, Artificial Sequence
  ENSG00000066827_1 (sequence is synthesized)
cgagaaaacacggccatctttatgtgtaaatgttgtaacctcttctcaccaaatcagtcggaactcctctcccacgtttcagagaagcacatggaagaaggggttaatgttgatgagatt

SEQ ID NO: 50350 - DNA, 120 bp, Artificial Sequence
  ENSG00000066827_2 (sequence is synthesized)
attattccccttaggcctctgagtacacctgaaccccccaactcaagcaaaaccggagatgagtttttggtcatgaagaggaagagaggcaggcctaaggggtccacgaagaagtccagc

SEQ ID NO: 50351 - DNA, 120 bp, Artificial Sequence
  ENSG00000066827_3 (sequence is synthesized)
acagaagaggagctggcagaaaacatcgtgagtccgactgaggacagcccgctggctccggaggaagggaacagcctgcctccaagcagcttggagtgtagcaagtgctgtcggaagttc

SEQ ID NO: 50352 - DNA, 120 bp, Artificial Sequence
  ENSG00000066827_4 (sequence is synthesized)
tccaacacgcgccagctgcggaagcacatctgcattatcgtgctgaatttgggtgaggaggaaggagaagcaggtaacgagtctgaccttgaactagaaaagaagtgtaaggaagatgat

SEQ ID NO: 50353 - DNA, 120 bp, Artificial Sequence
  ENSG00000066827_5 (sequence is synthesized)
cgggaaaaagcctcgaaaagaccacggtcacagaaaacagagaaagtccagaagatctcaggaaaggaggccagacagctttctggggcgaagaaacccatcataagtgtggttttaact

SEQ ID NO: 50354 - DNA, 120 bp, Artificial Sequence
  ENSG00000066827_6 (sequence is synthesized)
gcacacgaagcaattccaggtgctaccaagattgtgccagtggaggctgggccccctgaaacaggagctacaaattctgagaccacttcagcagacctggtgcctcggagaggctaccag

SEQ ID NO: 50355 - DNA, 120 bp, Artificial Sequence
  ENSG00000066827_7 (sequence is synthesized)
gaatacgccattcagcagacaccttatgagcaaccaatgaagtcaagcaggctaggtcccactcagctcaaaatcttcacttgtgaatactgcaacaaggtcttcaagttcaagcactcg

SEQ ID NO: 50356 - DNA, 120 bp, Artificial Sequence
  ENSG00000066827_8 (sequence is synthesized)
ctgcaggcccacctgaggatccacaccaatgaaaagccatacaagtgcccccagtgcagctatgccagtgccatcaaggccaacctcaatgtgcacctgcgcaagcacactggagagaag

SEQ ID NO: 50357 - DNA, 120 bp, Artificial Sequence
  ENSG00000066827_9 (sequence is synthesized)
ttcgcctgcgactattgctcgttcacctgcctgagcaagggccacctcaaggtgcacatcgagcgagtgcacaagaagatcaagcagcactgccgcttctgcaagaagaagtactctgac

SEQ ID NO: 50358 - DNA, 120 bp, Artificial Sequence
  ENSG00000066827_10 (sequence is synthesized)
gtcaagaacctcatcaagcacatccgagacgcgcatgacccacaggacaagaaggtcaaagaggccttggacgagctctgcctgatgacgagggagggcaagcggcagctgctctatgac

SEQ ID NO: 50359 - DNA, 120 bp, Artificial Sequence
  ENSG00000066827_11 (sequence is synthesized)
tgccacatctgtgagcgcaagttcaagaacgagctggaccgtgaccgccatatgctggtccacggagacaagtggccttttgcctgtgagctctgtggccatggggccaccaagtaccag

SEQ ID NO: 50360 - DNA, 120 bp, Artificial Sequence
  ENSG00000066827_12 (sequence is synthesized)
gcgctggaactgcatgtcaggaagcaccccttcgtgtacgtctgtgccgtctgccgcaagaagttcgtcagctccatcaggctgcgcacccacatcaaagaggtgcacggggctgcccag

SEQ ID NO: 50361 - DNA, 120 bp, Artificial Sequence
  ENSG00000066827_13 (sequence is synthesized)
gaggccttggtcttcaccagttccatcaaccagagcttctgcctcctggaacctggtggggacatccagcaagaagctctgggggaccagctacagctggtggaagaggagtttgccctc

SEQ ID NO: 50362 - DNA, 120 bp, Artificial Sequence
  ENSG00000066827_14 (sequence is synthesized)
cagggcgtgaatgcactcaaggaagaggcctgtcctggggacactcagctggaggagggccggaaggagccggaggcccctggggaaatgcctgccccagctgtgcacctggcctccccg

SEQ ID NO: 50363 - DNA, 120 bp, Artificial Sequence
  ENSG00000066827_15 (sequence is synthesized)
caggccgaaagcacagccctgccaccctgtgagctggaaaccaccgtggtctcctcctcagacctgcattctcaagaggtggtttcagatgattttttgttgaaaaatgatacctcctcc

SEQ ID NO: 50364 - DNA, 120 bp, Artificial Sequence
  ENSG00000066827_16 (sequence is synthesized)
gcagaggctcatgctgctcctgagaagcccccagacatgcagcacagaagctcagtccagacgcaaggtgaagtgatcacactactgctgtccaaggcccagagtgctgggtcagatcag

SEQ ID NO: 50365 - DNA, 120 bp, Artificial Sequence
  ENSG00000066827_17 (sequence is synthesized)
acccagctgaggcctcagacctcctccctccagtagctggtggtggggacaccatcacacatcagcctgactcttgcaaagctgcccctgagcaccggtcaggcatcaccgctttcatga

SEQ ID NO: 50366 - DNA, 120 bp, Artificial Sequence
  ENSG00000066827_18 (sequence is synthesized)
aggtcctgaacagtttacagaagaagcaaatgaacaccagcttgtgtgagcggatccggaaggtttatggagacctggagtgtgaatactgtggcaaacttttttggtaccaagtgcatt

SEQ ID NO: 50367 - DNA, 120 bp, Artificial Sequence
  ENSG00000066827_19 (sequence is synthesized)
ttgatatgcatgtccgcacccacacccgggaacatctgtattattgctctcagtgtcattattcttccatcaccaaaaactgccttaaacgccacgtaattcagaaacacagtaacatct

SEQ ID NO: 50368 - DNA, 120 bp, Artificial Sequence
  ENSG00000066827_20 (sequence is synthesized)
tgctgaagtgtcccaccgatggctgtgactactcaactccagataaatataagctacaggcacatcttaaagttcacacagcactggacaaaaggagttattcttgtcctgtttgtgaaa

SEQ ID NO: 50369 - DNA, 120 bp, Artificial Sequence
  ENSG00000066827_21 (sequence is synthesized)
agtctttttcagaggatcgattgataaagtcacatatcaagaccaaccatcctgaggtctccatgagcaccatttctgaggttctcgggaggagggttcagctgaaagggctaattggaa

SEQ ID NO: 50370 - DNA, 120 bp, Artificial Sequence
  ENSG00000066827_22 (sequence is synthesized)
agagagccatgaaatgcccatattgtgacttttatttcatgaagaatggctcagaccttcagcgtcatatttgggctcatgaaggtgtgaagcccttcaagtgttctttgtgtgagtatg

SEQ ID NO: 50371 - DNA, 120 bp, Artificial Sequence
  ENSG00000066827_23 (sequence is synthesized)
caactcgtagcaagagtaacctcaaggctcatatgaatcgtcacagcactgagaaaacccacctatgtgacatgtgtggcaagaaattcaaatcaaaagggacactgaaaagtcacaaac

SEQ ID NO: 50372 - DNA, 120 bp, Artificial Sequence
  ENSG00000066827_24 (sequence is synthesized)
tccttcacactgcagatgggaagcagtttaagtgcacggtgtgtgactacacagcggcccagaagccacagctgctgcggcacatggaacagcatgtctccttcaagcctttccgctgtg

SEQ ID NO: 50373 - DNA, 120 bp, Artificial Sequence
  ENSG00000066827_25 (sequence is synthesized)
cccattgccattactcctgcaacatatctggctctctgaagcggcactacaacaggaagcaccctaatgaggagtatgccaacgtgggcaccggggagctggcagcggaggtgctcatcc

SEQ ID NO: 50374 - DNA, 120 bp, Artificial Sequence
  ENSG00000066827_26 (sequence is synthesized)
agcaaggtggtttgaagtgtcctgtttgcagctttgtatatggcaccaaatgggagttcaataggcacttgaagaacaaacatggcttgaaggtggtggaaattgatggagaccccaagt

SEQ ID NO: 50375 - DNA, 120 bp, Artificial Sequence
  ENSG00000066827_27 (sequence is synthesized)
gggagacagcaacagaagctcctgaggagccctccacccagtatctccacatcacagaggccgaagaagacgttcaagggacacaggcagcggtggccgcgctccaggacctgagataca

SEQ ID NO: 50376 - DNA, 120 bp, Artificial Sequence
  ENSG00000066827_28 (sequence is synthesized)
cctctgagagtggcgaccgactggaccccacggccgtgaacatcctgcagcagatcattgagctgggcgccgagacccatgacgccactgcccttgcctcggtggttgccatggcaccag

SEQ ID NO: 50377 - DNA, 120 bp, Artificial Sequence
  ENSG00000066827_29 (sequence is synthesized)
ggacggtgactgtggttaagcaggtcaccgaggaggagcccagctccaaccacacggtcatgatccaggagacggtccagcaagcgtccgtggagcttgccgagcagcaccacctggtgg

SEQ ID NO: 50378 - DNA, 120 bp, Artificial Sequence
  ENSG00000066827_30 (sequence is synthesized)
tgtcctccgacgacgtggagggcattgagacggtgactgtctacacgcagggcggggaggcctcggagttcatcgtctacgtgcaggaggccatgcagcctgtggaggagcaggctgtgg

SEQ ID NO: 50379 - DNA, 120 bp, Artificial Sequence
  ENSG00000066827_31 (sequence is synthesized)
agcagccggcccaggaactctagaggacatgtggcatcggatggccacagggcggggctgccaggctctgcaggcacccagggtggggaggccacccttcctgccctacccgcagaatgg

SEQ ID NO: 50380 - DNA, 120 bp, Artificial Sequence
  ENSG00000066827_32 (sequence is synthesized)
tgctctcctttgccctccctgcccagcagcctgataggactctcctagtccaacttggggtgggcaaggcagtcagcatcaccagcaataccacaggaccctcaccccagcatagacaca

SEQ ID NO: 50381 - DNA, 120 bp, Artificial Sequence
  ENSG00000066827_33 (sequence is synthesized)
caccccctgacccttaccatctgcttcctgaaagacttcagtgtcagctcccctacacacaccccacaccttcaccccttgcttcaagattcaaacagagactcccagtccccctcagca

SEQ ID NO: 50382 - DNA, 120 bp, Artificial Sequence
  ENSG00000066827_34 (sequence is synthesized)
tcttccctgaatcacagccccagctccttgacccccatctaggtgccaaatgttcatctgcaaccgctatgcagtctggtgagagggagacagccatcacatagaaagtgaccgtacggg

SEQ ID NO: 50383 - DNA, 79 bp, Artificial Sequence
  ENSG00000066827_35 (sequence is synthesized)
cgcccagcatccctcctactctgcccttggtggaggtttacgaggtctgctggagtttgctggaggtccgctccataca

SEQ ID NO: 50384 - DNA, 120 bp, Artificial Sequence
  ENSG00000066827_36 (sequence is synthesized)
catcacagggtctcgccctaccatcctggaattatttcacttttaagataaatgcactatttcactgttcgcctcccattctaaggaggtgaggtggttggaataaaaacagttcctgtc

SEQ ID NO: 50385 - DNA, 120 bp, Artificial Sequence
  ENSG00000066827_37 (sequence is synthesized)
atccgccatgttggatgccgcagattcgccataacctcgccggctcttttcttaaaaaaataaaaataaaaagcgaagcgtcagcagggcgccccgccccctcggtcggcacgggagggg

SEQ ID NO: 50386 - DNA, 120 bp, Artificial Sequence
  ENSG00000066827_38 (sequence is synthesized)
ctctgccagatttgcagctctcagaagggacacacgctccagtgctccctggggtatggcctggtttcttctccctcacagcctttttctgccaaactcatcctcatcttcagtactcag

SEQ ID NO: 50387 - DNA, 120 bp, Artificial Sequence
  ENSG00000066827_39 (sequence is synthesized)
aggtgctgtaaggatttgcttacagtctggcttaggaggttgtgagccctgggaggagtcggggggtgagggggaaggggtagggctttgtctttattcttagcaggagcaataatgcta

SEQ ID NO: 50388 - DNA, 120 bp, Artificial Sequence
  ENSG00000066827_40 (sequence is synthesized)
gggcttgataaagggtcattaagggagtccatggatgcggaattagaacctcgcctcagtaagttgcacaggcgaccgactggaccccacggccgtgaacatcctgcagcagatcattga

SEQ ID NO: 50389 - DNA, 120 bp, Artificial Sequence
  ENSG00000066827_41 (sequence is synthesized)
ttgctcatggggcctccccaggtggagctggctgtgcctctccctccctggggagtgcctctccactcccacctgttgaagactgagcatgctgcattgtgcctgtgcacctcgtcgctg

SEQ ID NO: 50390 - DNA, 120 bp, Artificial Sequence
  ENSG00000066827_42 (sequence is synthesized)
ttcccttctgagattctgatcctcacatggcaaggaacacctttgtgtacctggctccatgcctggcacttcattcacagtgggagctgttggcctggcgacgctcatcttgtcctccgc

SEQ ID NO: 50391 - DNA, 120 bp, Artificial Sequence
  ENSG00000066827_43 (sequence is synthesized)
tgtgtctgcgggatggcagagtctgtcactgggtttagacctgggccgcaggcttcagtaaactcttaggcaccctgtttctggaactcagctgacatgacacgagagtttttggtcatg

SEQ ID NO: 50392 - DNA, 120 bp, Artificial Sequence
  ENSG00000066827_44 (sequence is synthesized)
ctgtgcacgtggcagaggcttcccaggttcctttcacagcaagagtctctaatacgttgaaaaaagagattagatggaataaattgtttcctgtgcaaatttttttagcatcagataaag

SEQ ID NO: 50393 - DNA, 120 bp, Artificial Sequence
  ENSG00000066827_45 (sequence is synthesized)
tctacagaagagatatctatagagtagaagtaaagtcagaatttctcaaatgacattttaaagaataattaatagcagagataacagtaatagctcctactgaacgtggttgagaggttg

SEQ ID NO: 50394 - DNA, 120 bp, Artificial Sequence
  ENSG00000066827_46 (sequence is synthesized)
aattagataatgctgtacagtgatgagaacagtatttggttcagagtaagagcatagtagatgttgatgaccactgttgtcacagttttgtgttatttattttagtctctgggagagaat

SEQ ID NO: 50395 - DNA, 120 bp, Artificial Sequence
  ENSG00000066827_47 (sequence is synthesized)
gtctttgaagcacgtttattttaaaaaagtgaaatgttaattcaatatgctgttaatattcacaaaggtaaatttctttaggtctttggtggaggatcttgtaacacaatgaatgaatgc

SEQ ID NO: 50396 - DNA, 120 bp, Artificial Sequence
  ENSG00000066827_48 (sequence is synthesized)
ttatttttgcaaattctaatctaactcaagaggctgacacctgagagtgatttgagacttcttcaagttataaaggaagcacatctggccccaggtgtggttctgttttaattgaatgcc

SEQ ID NO: 50397 - DNA, 120 bp, Artificial Sequence
  ENSG00000066827_49 (sequence is synthesized)
tttttatgctacagacagcaaaaagtgaagcttcagacatttgatgtgctaccatggtttcctggcataaaaatcataacagtttgtcactaagggtaaagtcaggtgtttgggtgtggt

SEQ ID NO: 50398 - DNA, 120 bp, Artificial Sequence
  ENSG00000066827_50 (sequence is synthesized)
gagtaggtcagagcatgggctttggggttggatacctggattcaaacactgtctccaacactctcacaggccctgtggccttgggcaagtcacttgtcttccctgagacctgtatgaaat

SEQ ID NO: 50399 - DNA, 120 bp, Artificial Sequence
  ENSG00000066827_51 (sequence is synthesized)
agccttctgtataagatacatatttttaaaaaatctattttatatacatccacacacatatgcatatacacacatatacagatgtgtatatacatgtatttatacacgtgcttatacaca

SEQ ID NO: 50400 - DNA, 120 bp, Artificial Sequence
  ENSG00000066827_52 (sequence is synthesized)
cctacacacatacacttatatgcatgcgcgcgcacacacacacacatatgtacagtactctaaagaacttggcacagtccttgtcatgtaattgactgtgtaccggctatcgcatgtcat

SEQ ID NO: 50401 - DNA, 120 bp, Artificial Sequence
  ENSG00000066827_53 (sequence is synthesized)
ttggcacttctcattacacattctctgtccttccttttctttctgtctctctctctttgagtagcatgtgaaggcatgttgtttgtaattcttcatggaaccgctgttacatagatactg

SEQ ID NO: 50402 - DNA, 120 bp, Artificial Sequence
  ENSG00000066827_54 (sequence is synthesized)
attccagtacgctattatggccgggaaaagtgaggtggcagaattcattaaagtgattttgctggaaactcatatgaagtcgggagggagtgaagccaatatgagaacaagttcttggga

SEQ ID NO: 50403 - DNA, 120 bp, Artificial Sequence
  ENSG00000066827_55 (sequence is synthesized)
gaagcctttgaatatggcaataaaaactaggaagcagactgctgggttttcaccctggctccctatttaccacgtgtttagccttgggaaaagtcatgtgacctatttgcctcagtttac

SEQ ID NO: 50404 - DNA, 120 bp, Artificial Sequence
  ENSG00000066827_56 (sequence is synthesized)
ccatccttggatgaggatgaagtgagagaatagatgtaaatgtcttagaacagtgcctggcatggagcaagcactgtgtgtcatggactattatcattattgattctacttctccttttg

SEQ ID NO: 50405 - DNA, 120 bp, Artificial Sequence
  ENSG00000066827_57 (sequence is synthesized)
gaacttgctgctctggatttagagattttgaaacataggctgaaaaaatgacaagaaaagggaagttgtaattgagctttaccacctgggactgtatgtatttttccatgcccaaatctt

SEQ ID NO: 50406 - DNA, 120 bp, Artificial Sequence
  ENSG00000066827_58 (sequence is synthesized)
gcctgcctgttgtgagggacccatggttcagcccagtgattttcttaccccagctgctgatgctcggcctcctggccacatccttgggcctcatgatcagtgggggagtgtcaggaatgt

SEQ ID NO: 50407 - DNA, 120 bp, Artificial Sequence
  ENSG00000066827_59 (sequence is synthesized)
gcactgagatctttggccccagtcacatctgccttcattcttcttaataaaccagcatctaaagaggtttctcttttcaactttctatggttatcttccttctgagaggcttatctcttc

SEQ ID NO: 50408 - DNA, 120 bp, Artificial Sequence
  ENSG00000066827_60 (sequence is synthesized)
aatgtgaacatgtaggatggcatctggggaaatacatgttgggggaaagggaaggaacagctgctgtctttatcctgtgggtcagctccttgtgcagtcttaattctcatattacttcta

SEQ ID NO: 50409 - DNA, 120 bp, Artificial Sequence
  ENSG00000066827_61 (sequence is synthesized)
ggagttggagtatttcctccactgggcagattaggggcctggcattacagagtcgtttggtaacttgctcatggttgtgccattggtaagggacagagacagaattcaagcccacattct

SEQ ID NO: 50410 - DNA, 120 bp, Artificial Sequence
  ENSG00000066827_62 (sequence is synthesized)
caccactgcctggggttgcccattttgttgtagttggtcattaacagcaaccacatggttcttggtaggtctcttggacacttgtccgtcatctgaaggaatgtggttgaggcagatgtt

SEQ ID NO: 50411 - DNA, 120 bp, Artificial Sequence
  ENSG00000066827_63 (sequence is synthesized)
gtgccgtgagggcagggattgtgctgattctttctgtgctgttaagtggcagttgtgctttatgctacgataataaaatttctgtgcaactaactgcaggagaagagcagtgtgctgaat

SEQ ID NO: 50412 - DNA, 120 bp, Artificial Sequence
  ENSG00000066827_64 (sequence is synthesized)
aagggggtgtgactcagttgaccttacaaaagagatatgctagcctgcttctcattagctctcacgttttcttagaagttgtaagtttaacttcaatcttttcccttactgatatttgca

SEQ ID NO: 50413 - DNA, 120 bp, Artificial Sequence
  ENSG00000066827_65 (sequence is synthesized)
gttcttccagcagaaacgcttttaaaggtgaatgtgttgccgctgcttccaaagccagccagcgctggctggaggccccctcctctacgtgtcgggcattgagattttcaagtaggatct

SEQ ID NO: 50414 - DNA, 120 bp, Artificial Sequence
  ENSG00000066827_66 (sequence is synthesized)
ggtccctgccttcagggtgctcttggttttgtgaagggggagctaaacaataaacagtaatggcaaaatggcaacgtgagagggacagtgacgtcaatacaacaatgtactctccgccca

SEQ ID NO: 50415 - DNA, 120 bp, Artificial Sequence
  ENSG00000066827_67 (sequence is synthesized)
aacttgtggaatttcttggcacacactttcattgagtctgcggctgaacgggcttgctgggtgctcccaggagttcagcttcgagggcagccacatgtccgcatgttaggactcagagca

SEQ ID NO: 50416 - DNA, 120 bp, Artificial Sequence
  ENSG00000066827_68 (sequence is synthesized)
atgcagacagaagaaaaggcacgatctttgcataaaagcactggagtgatttagaggaaggcttgcaggctttagggacacgtatttttgctttcagatcctggattgctgcagcctttc

SEQ ID NO: 50417 - DNA, 120 bp, Artificial Sequence
  ENSG00000066855_0 (sequence is synthesized)
aagctagaagcctgaggagccggagagggtgctggctgccgcgcggccgagtgtgttttatggaccatgtgctgctatgtatgcctgaagaagtacttgaaatgcaaatttggggagact

SEQ ID NO: 50418 - DNA, 120 bp, Artificial Sequence
  ENSG00000066855_1 (sequence is synthesized)
ttgccatataaatgcttggctggattaagcgcctaattaggatggtttttcaacaagttggagtaagcatgcaatcggtactttggtctaggaagccatatggttcgtctcgaagtatcg

SEQ ID NO: 50419 - DNA, 120 bp, Artificial Sequence
  ENSG00000066855_2 (sequence is synthesized)
taaggaaaattggtactaatttgtctctgattcagtgtccaagagttcagtttcagattaacagccatgcaacagaatggagtcccagccacccaggagaggatgcagtggcgtcttttg

SEQ ID NO: 50420 - DNA, 120 bp, Artificial Sequence
  ENSG00000066855_3 (sequence is synthesized)
ctgatgttggatgggtagccaaagaagaaggagagtgttcagcaagactaaggacagaggtcagatcaaggccaccccttcaggatgaccttcttttctttgagaaggccccaagcagac

SEQ ID NO: 50421 - DNA, 120 bp, Artificial Sequence
  ENSG00000066855_4 (sequence is synthesized)
agatttccttaccagacttgtctcaagaagagcctcagctgaagaccccagcgctggcaaatgaggaagcactgcagaagatttgcgctctcgaaaatgaacttgctgctctcagagctc

SEQ ID NO: 50422 - DNA, 120 bp, Artificial Sequence
  ENSG00000066855_5 (sequence is synthesized)
agattgccaaaattgtgacccagcaggagcagcaaaatctcactgcaggtgacttagattctaccacatttggtaccataccaccacaccctccacctcccccaccgcccctgcctcccc

SEQ ID NO: 50423 - DNA, 120 bp, Artificial Sequence
  ENSG00000066855_6 (sequence is synthesized)
ctgcactggggctccaccaaagtacatctgctgttgatctgattaaagaacgaagagagaaaagagccaatgctggaaagactttggttaagaacaatccaaagaaacctgaaatgccaa

SEQ ID NO: 50424 - DNA, 120 bp, Artificial Sequence
  ENSG00000066855_7 (sequence is synthesized)
atatgctagagatccttaaagagatgaacagtgtaaaacttcggtcagtgaagaggtcagagcaagatgtgaagcccaagccagtggatgctactgaccctgctgccctcatagcagagg

SEQ ID NO: 50425 - DNA, 120 bp, Artificial Sequence
  ENSG00000066855_8 (sequence is synthesized)
ctctgaaaaagaaatttgcttatcggtatcgaagtgatagccaagatgaagttgaaaaaggaattccaaagtctgaatcagaggccacctcagagagagtgttgtttgggccacacatgt

SEQ ID NO: 50426 - DNA, 120 bp, Artificial Sequence
  ENSG00000066855_9 (sequence is synthesized)
tgaagccaacaggaaaaatgaaggctttaattgaaaatgtatcagactcctaatagacaatgagctgcgaaaagactcctggttcccctgttgatttgtgagggccaagtttgctagtag

SEQ ID NO: 50427 - DNA, 120 bp, Artificial Sequence
  ENSG00000066855_10 (sequence is synthesized)
aaatcgacactgtttagtaaatacctctttagtattcagtggtcttcttttcaggctaattagtggattaagcaataatgaaagcactaagtttggttttgcttttgtgagatggtcagc

SEQ ID NO: 50428 - DNA, 120 bp, Artificial Sequence
  ENSG00000066855_11 (sequence is synthesized)
ccacaacatgtgtgttctgacatgtttctaatatgtggccagggcgttcagatttccagttttgaaaacaattgtatagatttcacaacacaaaaaggacatttgtggatgttactgcac

SEQ ID NO: 50429 - DNA, 120 bp, Artificial Sequence
  ENSG00000066855_12 (sequence is synthesized)
attttaaattcttaacactaatttatctgtataagtgttttatatgcatatttttggacataaacagtttatgtaaaattagtaatgaatgatggcaacgagggcactgttatcttcgtt

SEQ ID NO: 50430 - DNA, 120 bp, Artificial Sequence
  ENSG00000066855_13 (sequence is synthesized)
tgttttcaatgatcatttagcattcaatgatggaacagctggtataacataagttgttggcatgaaatatttgagattggaaacttcttgccttgaacagaacttatatcttagattctc

SEQ ID NO: 50431 - DNA, 120 bp, Artificial Sequence
  ENSG00000066855_14 (sequence is synthesized)
tctcacattttcttggagctggggtttgaataggaaccagatgatgttcactgctgaaattccataatgcttcccattgaagggaagttgagaaccaggaaagctgctttcacgtcattg

SEQ ID NO: 50432 - DNA, 120 bp, Artificial Sequence
  ENSG00000066855_15 (sequence is synthesized)
ccatccagtactgacagggaagaaagatgtagttttccagtagtgatgaatcaaattattgaattaaatttcttcttaagaagtaaaaactcagaatgtaccatcttgtttcctttcagt

SEQ ID NO: 50433 - DNA, 120 bp, Artificial Sequence
  ENSG00000066855_16 (sequence is synthesized)
ttattaaatggcatcataaagatgactttgctaagttaatagagttaaaaatttttttaatataagccaaaatattaactttaatgaaacattgacttggcaaatgaatttcctataaat

SEQ ID NO: 50434 - DNA, 120 bp, Artificial Sequence
  ENSG00000066855_17 (sequence is synthesized)
tatcattggtcagaatgctgttttgtttaataatattacgcaacataaaccataggtgttattagaagtggagaactgcctttttcatctggggcttttaaggacttgctataaatgatt

SEQ ID NO: 50435 - DNA, 120 bp, Artificial Sequence
  ENSG00000066855_18 (sequence is synthesized)
attttttaaatgctttataaatcttcatggtttttctatttctgatacactcagctatagttaataccagagtatcctaccaggagtaatatttggaatatttaaatctagtaaaagaag

SEQ ID NO: 50436 - DNA, 120 bp, Artificial Sequence
  ENSG00000066855_19 (sequence is synthesized)
aaagttgtacttcctggctgggagtattaggagatgggagtagagattcacttttaagttcttgaaaatatatgcattctcctaaatattaacaaaaatgatttggggaaatgacatggc

SEQ ID NO: 50437 - DNA, 120 bp, Artificial Sequence
  ENSG00000066855_20 (sequence is synthesized)
ttgattgttctgtttaaatttgtactgtggcttatgttacacatgttcatgttcacctctcattcacctgttttatatggtttaaaattctctttaacaaaattcagaaaattcacctga

SEQ ID NO: 50438 - DNA, 120 bp, Artificial Sequence
  ENSG00000066855_21 (sequence is synthesized)
aacgtattttgacctaaaagaaacatatttttgtatcagtattgaattttggacagtgcccccatataaggaagttactgttttaaaataaagcaaactaactgttttattttccttgga

SEQ ID NO: 50439 - DNA, 120 bp, Artificial Sequence
  ENSG00000066855_22 (sequence is synthesized)
tgtattggaaaacctggcccattctgtaaataaaggctccactagaaaagactcgttaaagtcagaacctgctggacaagaaggcctatggcaaatcctactgaagataaatttataagc

SEQ ID NO: 50440 - DNA, 120 bp, Artificial Sequence
  ENSG00000066855_23 (sequence is synthesized)
cttaagagaataaggactatgacaaaaacaatccaaaccacaataattcatggtaggaaatattgtggcatctacataataaaatggttgaggtccttcttttgttaattttgaggccta

SEQ ID NO: 50441 - DNA, 120 bp, Artificial Sequence
  ENSG00000066855_24 (sequence is synthesized)
taattgctccttaactggtcaggtatcttagatatcagctggctcacaggagaatgtatcttcataatataaacccaaacgttgcttataataaactgtacatataaaaaatcttaaaag

SEQ ID NO: 50442 - DNA, 120 bp, Artificial Sequence
  ENSG00000066855_25 (sequence is synthesized)
gagaaaaagttattaacatatatgctgaaactctatctttaaaacatcatctatacaacattaaccttcctacatcctactccagtattacccagatcttattcttcaaaagattcctgt

SEQ ID NO: 50443 - DNA, 120 bp, Artificial Sequence
  ENSG00000066855_26 (sequence is synthesized)
gtatgtgtaggtgacagagtctgtaatgtacatatccactttgaagaactgatttcttaagtaactcaatggaaatttgagtaaaagtgaactgacaaatatatctaaccttttctggtt

SEQ ID NO: 50444 - DNA, 120 bp, Artificial Sequence
  ENSG00000066855_27 (sequence is synthesized)
tcatctgtaagttccaaagggaggtgatacaggatttggtccctgccttacaagtagatcacggctggttgggaaaaggatgacatctttgcttagcatttacacttttacttttctaac

SEQ ID NO: 50445 - DNA, 120 bp, Artificial Sequence
  ENSG00000066855_28 (sequence is synthesized)
tatgaaaataatagttgttcatttggaaatttgaaacttgtagaagagcagaaagaagaaagccaaagttaacccctgagctcactactaagtaatctccaatgttacattttctatgca

SEQ ID NO: 50446 - DNA, 78 bp, Artificial Sequence
  ENSG00000066855_29 (sequence is synthesized)
tgaagcaggagaatcacttgaacctggagggggcagaggttgcagggagccgagattgctccacttaaatacataata

SEQ ID NO: 50447 - DNA, 120 bp, Artificial Sequence
  ENSG00000066855_30 (sequence is synthesized)
agaaagaataatggcccattcaacagctgactcctacagacattctgactaagatgcctgttgcaattcccctgagcaacttaataactgtgttttcaaggttaaactcaagaaccaatc

SEQ ID NO: 50448 - DNA, 120 bp, Artificial Sequence
  ENSG00000066855_31 (sequence is synthesized)
gaatcaatcatctctttctactccctgtgttaagttcatctcagtcagagaaatcactgtctgagggcttgaatctcctggaaaactgtaagctacctggaagcagagatgcatattatt

SEQ ID NO: 50449 - DNA, 120 bp, Artificial Sequence
  ENSG00000066855_32 (sequence is synthesized)
tatttttgtatcgcatataattagtacacggagaaggtcaatgaataggagaagatgaagaaaattatttcctctttaggatatacaaaagcattgaaaaaataaagcattctaaagcgc

SEQ ID NO: 50450 - DNA, 120 bp, Artificial Sequence
  ENSG00000066855_33 (sequence is synthesized)
cttgtattggaaaacctggcccattctgtaaataaaggctccactagactctcgttgcagcaaaagaccatgtggaccacagacaacataggttccatttatccaacataagaatctcac

SEQ ID NO: 50451 - DNA, 120 bp, Artificial Sequence
  ENSG00000066855_34 (sequence is synthesized)
cagaattaaagcaaccagcatccactacttttaatcaggaaagttatatatggtctgatggctgaattttttaagtgtatataattatggtatctgaaatattaattatgtacaatatgt

SEQ ID NO: 50452 - DNA, 120 bp, Artificial Sequence
  ENSG00000066855_35 (sequence is synthesized)
ttgtctctgattcagtgtccaagagttcagtttcagctgtagtaggacaggaccttgctgggaaccttcaattaacagccatgcaacagaatggagtcccagccacccaggagaggatgc

SEQ ID NO: 50453 - DNA, 120 bp, Artificial Sequence
  ENSG00000066855_36 (sequence is synthesized)
aaatgaatatccaacttttctgaaaggaaaaaggtaacatgttaatataaacagcaaatacatacatcatttataaaactgcctcagatcaattaacaagataaacatacttaaaaaaaa

SEQ ID NO: 50454 - DNA, 120 bp, Artificial Sequence
  ENSG00000066923_0 (sequence is synthesized)
gcgcttttctggaatctttcgcccccggaagggcagcggcgggcgcctgtgtggaaggtggggtggccagagacacccgagggacctgagctggatcgccatacctaccctgtggtcctc

SEQ ID NO: 50455 - DNA, 120 bp, Artificial Sequence
  ENSG00000066923_1 (sequence is synthesized)
atcttcctggcctcatagctcctcctctccaagcatgtcttccccgttgcaaagagctgtgggagataccaagagggccttgtctgcatcttctagttcctctgccagtctaccctttga

SEQ ID NO: 50456 - DNA, 120 bp, Artificial Sequence
  ENSG00000066923_2 (sequence is synthesized)
tgacagggactcaaaccatacctcagaggggaatggcgactctttgttagctgatgaagacactgactttgaagacagcttgaatcgcaatgtgaagaagagagcagcaaaacgaccacc

SEQ ID NO: 50457 - DNA, 120 bp, Artificial Sequence
  ENSG00000066923_3 (sequence is synthesized)
gaaaacaacaccggtggcaaaacatccaaagaaagggtcccgagtggtacatcgtcatagccggaaacagtcagagccaccagccaatgatcttttcaatgctgtgaaagccgccaaaag

SEQ ID NO: 50458 - DNA, 120 bp, Artificial Sequence
  ENSG00000066923_4 (sequence is synthesized)
tgacatgcagtctttggtagatgagtggctggatagctacaagcaagaccaggatgcaggatttctggagcttgttaactttttcatccaatcttgcggatgtaaaggcattgtgacccc

SEQ ID NO: 50459 - DNA, 120 bp, Artificial Sequence
  ENSG00000066923_5 (sequence is synthesized)
tgagatgttcaagaagatgtccaactcagagatcatccagcacctaacagagcagtttaatgaggactcgggggactaccctctcatagctccaggtccatcctggaagaagttccaggg

SEQ ID NO: 50460 - DNA, 120 bp, Artificial Sequence
  ENSG00000066923_6 (sequence is synthesized)
cagcttctgtgaatttgtgaggacattggtctgtcagtgccagtacagcctcctctatgatggcttccctatggacgacctcatctccctgctcactggcctctcagactcacaagtccg

SEQ ID NO: 50461 - DNA, 120 bp, Artificial Sequence
  ENSG00000066923_7 (sequence is synthesized)
cgccttccgtcacactagcaccctggctgctatgaaactgatgacctccctggtaaaagttgccctccaactgagtgtgcaccaagataacaatcagcgtcagtatgaggctgaaagaaa

SEQ ID NO: 50462 - DNA, 120 bp, Artificial Sequence
  ENSG00000066923_8 (sequence is synthesized)
caaggggccagggcagagggcacctgagcggctggagagcctgttggagaaacgcaaagagctccaagagcatcaagaggagattgaggggatgatgaatgccctcttcaggggtgtctt

SEQ ID NO: 50463 - DNA, 120 bp, Artificial Sequence
  ENSG00000066923_9 (sequence is synthesized)
tgttcatcggtacagggatgtccttcctgagatccgtgctatctgcattgaggaaattgggtgttggatgcaaagctacagcacgtctttcctcaccgacagctatttaaaatatattgg

SEQ ID NO: 50464 - DNA, 120 bp, Artificial Sequence
  ENSG00000066923_10 (sequence is synthesized)
ttggactctgcatgataagcaccgagaagtccgcctgaagtgtgtgaaggccctgaaagggctgtacggtaaccgggacctgaccacacgcctggagctcttcaccagccgcttcaagga

SEQ ID NO: 50465 - DNA, 120 bp, Artificial Sequence
  ENSG00000066923_11 (sequence is synthesized)
ccggatggtttccatggtcatggacagagagtatgatgtggcagtggaggctgtcagattactgatacttatccttaagaacatggaaggggtgctgacggacgcggattgtgagagcgt

SEQ ID NO: 50466 - DNA, 120 bp, Artificial Sequence
  ENSG00000066923_12 (sequence is synthesized)
ctacccagttgtgtatgcctctcatcgaggcctggcctctgccgcaggcgaatttctgtactggaaactcttctaccctgagtgcgagataagaatgatgggtggaagagagcaacgcca

SEQ ID NO: 50467 - DNA, 120 bp, Artificial Sequence
  ENSG00000066923_13 (sequence is synthesized)
gagcccaggcgcccagaggactttcttccagcttctgctgtccttctttgtggagagcgagctccatgaccacgctgcttacttagtagacagtctgtgggactgtgcaggggctcggct

SEQ ID NO: 50468 - DNA, 120 bp, Artificial Sequence
  ENSG00000066923_14 (sequence is synthesized)
gaaggactgggagggtctgacaagcctgctgctggagaaggaccagaacctgggtgatgtgcaggagagcacactgatagaaatccttgtgtccagtgcccggcaagcttcagaggggca

SEQ ID NO: 50469 - DNA, 120 bp, Artificial Sequence
  ENSG00000066923_15 (sequence is synthesized)
cccgcctgtgggccgggtcactgggaggaagggcttaacctctaaggagcgcaagacccaagccgatgacagggtgaagttgactgagcacctcatccccctgctgccccagctcctggc

SEQ ID NO: 50470 - DNA, 120 bp, Artificial Sequence
  ENSG00000066923_16 (sequence is synthesized)
caagttctcagctgatgcagagaaggtcactcccctgctccagcttctcagctgctttgacctccacatctactgcactgggcgcttggagaagcacctggagctgttcctgcagcaact

SEQ ID NO: 50471 - DNA, 120 bp, Artificial Sequence
  ENSG00000066923_17 (sequence is synthesized)
cagctagtagatttgctgactgaccgcttccagcaggagcttgaagagctgttacagtcgtccttcctagatgaggatgaggtatataatctggcagccactctgaaacgcctctctgcc

SEQ ID NO: 50472 - DNA, 120 bp, Artificial Sequence
  ENSG00000066923_18 (sequence is synthesized)
ttctacaacactcatgacctgactcgctgggagctctatgagccatgttgccaactcctgcagaaggctgtggacacaggagaggttcctcaccaggttatcctgccagccttgactctt

SEQ ID NO: 50473 - DNA, 120 bp, Artificial Sequence
  ENSG00000066923_19 (sequence is synthesized)
gtctatttttccattctctggacactaacccacatttctaaatcagatgcttcccagaagcagctgtcgagtttgagggacagaatggtggccttctgtgaactctgccagagttgcctc

SEQ ID NO: 50474 - DNA, 120 bp, Artificial Sequence
  ENSG00000066923_20 (sequence is synthesized)
tcagatgtggatactgagatccaggagcaggcttttgtcttattaagtgatctacttctcatctttagccctcagatgattgttgggggccgtgatttccttaggccacttgtctttttt

SEQ ID NO: 50475 - DNA, 120 bp, Artificial Sequence
  ENSG00000066923_21 (sequence is synthesized)
cctgaagctactctccagtctgagctagccagcttcctcatggaccacgtcttcatccagccgggagacctgggcagtggtgattcccaggaggatcatttacagatagagcggctacac

SEQ ID NO: 50476 - DNA, 120 bp, Artificial Sequence
  ENSG00000066923_22 (sequence is synthesized)
cagcggcgccgcctcctagccgggttctgcaagctgttgctttatggggtgctggagatggatgcagcctcagatgttttcaaacactacaacaagttctacaatgactatggtgacatt

SEQ ID NO: 50477 - DNA, 120 bp, Artificial Sequence
  ENSG00000066923_23 (sequence is synthesized)
atcaaggaaacattaactagagcaaggcagattgaccgaagtcattgttcccgaatcctgctgctgagcctcaagcagctgtacacagaactgctgcaggagcatgggccccagggcctg

SEQ ID NO: 50478 - DNA, 120 bp, Artificial Sequence
  ENSG00000066923_24 (sequence is synthesized)
aatgagcttcctgccttcatcgagatgagggacctggcccggaggtttgccttgagttttggaccccagcagctgcagaaccgtgacctcgtggtcatgctacacaaggaaggcatccag

SEQ ID NO: 50479 - DNA, 120 bp, Artificial Sequence
  ENSG00000066923_25 (sequence is synthesized)
ttctccttgtctgagcttcctccagctggctcctccaatcagcctccaaatctggcattcctggagctcctttcagagttttccccccgactcttccatcaggacaagcagcttttactg

SEQ ID NO: 50480 - DNA, 120 bp, Artificial Sequence
  ENSG00000066923_26 (sequence is synthesized)
tcctatctagaaaagtgcctgcagcatgtctcccaggcacctggccatccctggggcccagtcaccacctactgccactccctcagccctgtggagaacacagcagagaccagccctcag

SEQ ID NO: 50481 - DNA, 120 bp, Artificial Sequence
  ENSG00000066923_27 (sequence is synthesized)
gtcctccccagctccaagaggaggcgcgttgaagggcctgccaagcctaacagagaggacgtctcctcgtcccaggaagaaagtctgcagctgaacagcatcccgcccacgcccaccctc

SEQ ID NO: 50482 - DNA, 120 bp, Artificial Sequence
  ENSG00000066923_28 (sequence is synthesized)
acctccacagctgtgaagagcaggcagcccctgtgggggttgaaagagatggaggaagaagatggctcagagttggattttgcccagggtcagcccgtcgcaggcaccgagaggtcaagg

SEQ ID NO: 50483 - DNA, 120 bp, Artificial Sequence
  ENSG00000066923_29 (sequence is synthesized)
ttcttgggtccacaatatttccagactccacacaacccttcaggtcctggcctgggcaaccagctgatgcgactcagccttatggaagaggacgaggaagaagagttagaaatccaggat

SEQ ID NO: 50484 - DNA, 120 bp, Artificial Sequence
  ENSG00000066923_30 (sequence is synthesized)
gagtcaaatgaagaacggcaggatacagacatgcaagcaagtagctactcttccaccagtgagcgcgggctggacctcttagattctacagagctggatattgaggatttctgacaggac

SEQ ID NO: 50485 - DNA, 120 bp, Artificial Sequence
  ENSG00000066923_31 (sequence is synthesized)
tctgggcccctccccagctccactccctacctcaagaatgtgaccatttggaaaaggcaaagagaaaaggagcaaaatgaagcattcccccaggcttcagccctgggctctgaggggaaa

SEQ ID NO: 50486 - DNA, 120 bp, Artificial Sequence
  ENSG00000066923_32 (sequence is synthesized)
gagttgggcattgtttttctaacctaacctttccctctggggtagagaagccgagagaccctgtcctccctaatgcactgtggcccagtccccttgcctttttcctgttctgtttggagt

SEQ ID NO: 50487 - DNA, 120 bp, Artificial Sequence
  ENSG00000066923_33 (sequence is synthesized)
ggagaagggcagcacctctgtgtttaatggaaatagcccatagtctcctggatttttggaacatctttctcagcctattttgtgtcctaatgattcgctcaataaacatgtttgaatcca

SEQ ID NO: 50488 - DNA, 120 bp, Artificial Sequence
  ENSG00000066923_34 (sequence is synthesized)
gtggcgatccggctcaaaaggcggggcctgggtggaacctagcctatggcaattgagaagccagattaaaggggttactagcagtctggtccaaaacccgcccaatggagtaggagattg

SEQ ID NO: 50489 - DNA, 120 bp, Artificial Sequence
  ENSG00000066923_35 (sequence is synthesized)
agggtagcgggggtgggacctgggtgggggcggggctaaagcgggccgcccgcgtgcccaagcccacgtgagagggcaggacgcctgagagcttgaggccacacgaggctgtggagcggc

SEQ ID NO: 50490 - DNA, 120 bp, Artificial Sequence
  ENSG00000066923_36 (sequence is synthesized)
gtgactcaaacgtggcgcgcatcagctcgcacacttccaaacctcgcgatagctactggccctgggcgagccgttgggattgcgcttgcgcacagcgtgtcttctggatcgccataccta

SEQ ID NO: 50491 - DNA, 120 bp, Artificial Sequence
  ENSG00000066923_37 (sequence is synthesized)
aaccatacctcagaggggtaagtagatgttgcattgtgtggccacttcctgtgtccctggcagccttccccctcgttttcccacattgatgataatatgcgtgggactgtgtgaaaacac

SEQ ID NO: 50492 - DNA, 120 bp, Artificial Sequence
  ENSG00000066923_38 (sequence is synthesized)
cagaagtgctatactcgttcagcacagtgacaccctccctccagctccaggtgttttttttggcggtcctagatgttgtagacatcaaaatagtagtacatcctgttttttttttttttt

SEQ ID NO: 50493 - DNA, 120 bp, Artificial Sequence
  ENSG00000066923_39 (sequence is synthesized)
ccagagtacgtgtcacacggagccagggacagggaccttccaccccctagggtgaaactgggagggattgcttgcttcacttgtacaaggcagcaacggtggcatcgggtggggggagct

SEQ ID NO: 50494 - DNA, 120 bp, Artificial Sequence
  ENSG00000066923_40 (sequence is synthesized)
tggagttggaaggtggctaatctttgattctatgtttttgatcctcctggcactccagacctgggtgatgtgcaggagagcacactgatagaaatccttgtgtccagtgcccggcaagct

SEQ ID NO: 50495 - DNA, 120 bp, Artificial Sequence
  ENSG00000066923_41 (sequence is synthesized)
tccaactcagagatcatccagcacctaacagagcagtttaatgaggtggaagaagatgaccaggatcctcttacccctcttatttcaaaacacaatgcctattatccccttctttttgat

SEQ ID NO: 50496 - DNA, 120 bp, Artificial Sequence
  ENSG00000066923_42 (sequence is synthesized)
tctgtgaaatagggtagcttttagaaggaggaattcagtctcttgggggtaaaagagatctgaatatgcctctcaaattggggagaataccaggaaatgaggtataacagatatttttac

SEQ ID NO: 50497 - DNA, 120 bp, Artificial Sequence
  ENSG00000066923_43 (sequence is synthesized)
tggactgttgagttttgacatccaagcccctatgacttcatggacctggtaataactttcccatccttttcatacatccttttgtaggactcgggggactaccctctcatagctccaggt

SEQ ID NO: 50498 - DNA, 120 bp, Artificial Sequence
  ENSG00000066923_44 (sequence is synthesized)
cttctaggcagataaggtcatggggaggaggactgcacacaccccctgcaccagtgtttctttacacctcccccacccccaagtgactctcattccagggcttaacctctaaggagcgca

SEQ ID NO: 50499 - DNA, 120 bp, Artificial Sequence
  ENSG00000066923_45 (sequence is synthesized)
ttactaggtaagtcaccgcatccttataactccaggtgacactgactggggtttatgggatgaaagaggagtgtgtgcttggatgatggggtgtgatagtgaaggggtgaaaggtttctt

SEQ ID NO: 50500 - DNA, 120 bp, Artificial Sequence
  ENSG00000066923_46 (sequence is synthesized)
ctcacacatagacatcgtgaggtcttccttgagctctttagagccttccctcgggataggatgaaatactgagatcctagaaaggattcacaaaacgtgtcactcatcagcgcagattca

SEQ ID NO: 50501 - DNA, 120 bp, Artificial Sequence
  ENSG00000066923_47 (sequence is synthesized)
ccgattcacccctagatgtgtgtgggatttggatggcagagagaaacaggcactgaagatttttggtcaggacagggcagagaaataagaagagttgaaaattcaccaaaggatagataa

SEQ ID NO: 50502 - DNA, 120 bp, Artificial Sequence
  ENSG00000066923_48 (sequence is synthesized)
acccagggcgtttagagaaaacctgtagtgtgcaaaggagcccagaatcctggggcaacttggagggaaatatacttaatttgattcactaagttaggcccagtgaagggattgggtggc

SEQ ID NO: 50503 - DNA, 120 bp, Artificial Sequence
  ENSG00000066923_49 (sequence is synthesized)
ataggtagaagccgaaaaataaagtatcttgtattgctggagtagcctctgtttctgaggtcacatccaaacttagcgaggcagcttaacctggtgagagacatgggttcaactcctggc

SEQ ID NO: 50504 - DNA, 120 bp, Artificial Sequence
  ENSG00000066923_50 (sequence is synthesized)
ttctgcactgctagggcagaggactgctgtttgctgacacaatcttggtgcgttggaagtgaaagggaagaggcactggtggctgtgctttgggcccgagcagccagaagccagttgcca

SEQ ID NO: 50505 - DNA, 120 bp, Artificial Sequence
  ENSG00000066923_51 (sequence is synthesized)
tcacctatgacgaggagacagcgcctggggcagagcccagtatggggtgcgttcagggtagatcaggaggtatgagtgggtagtgggcgagccaggctgggggttgtgggggaggcctgc

SEQ ID NO: 50506 - DNA, 120 bp, Artificial Sequence
  ENSG00000066923_52 (sequence is synthesized)
attgcaggtgtaagcgtgggacccacatcagattggtagtgggtcatgcatgctgggctggctctcaggtcctccctgctggcttcccactcccaggggctttctcctccgattccttag

SEQ ID NO: 50507 - DNA, 120 bp, Artificial Sequence
  ENSG00000066923_53 (sequence is synthesized)
ccagggaaggggagtccttctagcccctgacagcttctctgcccctcccctggcctccccaggcctagccagggctgggttctcacccacctgtgccgccctgccttgttacctggaagc

SEQ ID NO: 50508 - DNA, 120 bp, Artificial Sequence
  ENSG00000066923_54 (sequence is synthesized)
acagccttggggactgagcaggccctcactgtcactttaagaagggaatcagccactttgtgctcaccacctctggggaaggtgtgagaggagagaaggaagtggctgtttggctgctga

SEQ ID NO: 50509 - DNA, 120 bp, Artificial Sequence
  ENSG00000066923_55 (sequence is synthesized)
caacatgaagacttcctgcgatgagaacagaggcacaggtgccggccctgcagcccccagaacctggactggagggggccatggggcaccggaccctggtcctgccctgggtgctgctga

SEQ ID NO: 50510 - DNA, 120 bp, Artificial Sequence
  ENSG00000066923_56 (sequence is synthesized)
ccttgtgtgtcactgcggggaccccggaggtgtgggttcaagttcggatggaggccaccgagctctcgtccttcaccatccgttgtgggttcctggggtctggctccatctccctggtga

SEQ ID NO: 50511 - DNA, 120 bp, Artificial Sequence
  ENSG00000066923_57 (sequence is synthesized)
ctgtgagctgggggggccccaacggtgctggggggaccacgctggctgtgttgcacccagaacgtggcatccggcaatgggcccctgctcgccaggcccgctgggaaacccagagcagca

SEQ ID NO: 50512 - DNA, 120 bp, Artificial Sequence
  ENSG00000066923_58 (sequence is synthesized)
tctctctcatcctggaaggctctggggccagcagcccctgcgccaacaccaccttctgctgcaagtttgcgtccttccctgagggctcctgggaggcctgtgggagcctcccgcccagct

SEQ ID NO: 50513 - DNA, 120 bp, Artificial Sequence
  ENSG00000066923_59 (sequence is synthesized)
cagacccaggtggggccggggcgaggggtccaggagggcagggaggggctcgggaactggccacccatctgattcttgtctccgtgcccagggctctctgccccgccgactcctgccccc

SEQ ID NO: 50514 - DNA, 120 bp, Artificial Sequence
  ENSG00000066923_60 (sequence is synthesized)
attctgcgggcagacctggccgggatcttgggggtctcaggagtcctcctctttggctgtgtctacctccttcatctgctgcgccgacataagcaccgccctgcccctaggctccagccg

SEQ ID NO: 50515 - DNA, 120 bp, Artificial Sequence
  ENSG00000066923_61 (sequence is synthesized)
tcccgcaccagcccccaggcaccgagagcacgagcatgggcaccaagccaggcctcccaggctgctcttcacgtcccttatgccactatcaacaccagctgccgcccagctactttggac

SEQ ID NO: 50516 - DNA, 120 bp, Artificial Sequence
  ENSG00000066923_62 (sequence is synthesized)
acagctcacccccatggggggccgtcctggtgggcgtcactccccacccacgctgcacaccggccccagggccctgccgcctgggcctccacacccatccctgcacgtggcagctttgtc

SEQ ID NO: 50517 - DNA, 120 bp, Artificial Sequence
  ENSG00000066923_63 (sequence is synthesized)
tctgttgagaatggactctacgctcaggcaggggagaggcctcctcacactggtcccggcctcactcttttccctgaccctcgggggcccagggccatggaaggacccttaggagttcga

SEQ ID NO: 50518 - DNA, 120 bp, Artificial Sequence
  ENSG00000066923_64 (sequence is synthesized)
tgagagagaccatgaggccactgggctttccccctcccaggcctcctgggtgtcacccccttactttaattcttgggcctccaataagtgtcccataggtgtctggccaggcccacctgc

SEQ ID NO: 50519 - DNA, 120 bp, Artificial Sequence
  ENSG00000066923_65 (sequence is synthesized)
tgcggatgtggtctctgtgtgtgcgtgtgtgggcacaggtgtgagtgtgtgagtgacagttaccccatttcagtcatttcctgctgcaactaagtcagcaacacagtttctctgatgtcg

SEQ ID NO: 50520 - DNA, 120 bp, Artificial Sequence
  ENSG00000066923_66 (sequence is synthesized)
aaagttataaacttgaattgataagacatgtggtttatgtttcaagggggtgaaatttaactctagatacatattactctcccatttatggatgaatgatagatgacttcctgagccatg

SEQ ID NO: 50521 - DNA, 120 bp, Artificial Sequence
  ENSG00000066923_67 (sequence is synthesized)
atctttcgcccccggaagggcagcggcgggcgcctgtgtggaaggtggggtggccagagacacccgagggacctgaggtggggaccttccctgaaccctgctcggccagaagtcactctt

SEQ ID NO: 50522 - DNA, 120 bp, Artificial Sequence
  ENSG00000066923_68 (sequence is synthesized)
acttcctgtcagcacaatcgggaaactactatgctgtacttactgctccccacttcccccaccccgggtgtctgagaaactctcaggggtcctcaaagaacagtttgaaaagccagtctc

SEQ ID NO: 50523 - DNA, 120 bp, Artificial Sequence
  ENSG00000066923_69 (sequence is synthesized)
gaaatgactcaaaacctgaggtacggggagagagactttcccatggaagagagttattgatggatggtaatgcaggtgctaaggggcagccaaaggatccttctcatcatgagtactgct

SEQ ID NO: 50524 - DNA, 120 bp, Artificial Sequence
  ENSG00000066926_0 (sequence is synthesized)
acccggctcggccactgctgggcggacacctgggcgcgccgccgcgggaggagcccggactcgggccgaggctgcccaggcaatgcgttcactcggcgcaaacatggctgcggccctgcg

SEQ ID NO: 50525 - DNA, 120 bp, Artificial Sequence
  ENSG00000066926_1 (sequence is synthesized)
cgccgcgggcgtcctgctccgcgatccgctggcatccagcagctggagggtctgtcagccatggaggtggaagtcaggtgcagctgcagcggccgtcaccacagaaacagcccagcatgc

SEQ ID NO: 50526 - DNA, 120 bp, Artificial Sequence
  ENSG00000066926_2 (sequence is synthesized)
ccagggtgcaaaacctcaagttcaaccgcagaagaggaagccgaaaactggaatattaatgctaaacatgggaggccctgaaactcttggagatgttcacgacttccttctgagactctt

SEQ ID NO: 50527 - DNA, 120 bp, Artificial Sequence
  ENSG00000066926_3 (sequence is synthesized)
cttggaccgagacctcatgacacttcctattcagaataagctggcaccattcatcgccaaacgccgaacccccaagattcaagagcagtaccgcaggattggaggcggatcccccatcaa

SEQ ID NO: 50528 - DNA, 120 bp, Artificial Sequence
  ENSG00000066926_4 (sequence is synthesized)
gatatggacttccaagcagggagagggcatggtgaagctgctggatgaattgtcccccaacacagcccctcacaaatactatattggatttcggtacgtccatcctttaacagaagaagc

SEQ ID NO: 50529 - DNA, 120 bp, Artificial Sequence
  ENSG00000066926_5 (sequence is synthesized)
aattgaagagatggagagagatggcctagaaagggctattgctttcacacagtatccacagtacagctgctccaccacaggcagcagcttaaatgccatttacagatactataatcaagt

SEQ ID NO: 50530 - DNA, 120 bp, Artificial Sequence
  ENSG00000066926_6 (sequence is synthesized)
gggacggaagcccacgatgaagtggagcactattgacaggtggcccacacatcacctcctcatccagtgctttgcagatcatattctaaaggaactggaccattttccacttgagaagag

SEQ ID NO: 50531 - DNA, 120 bp, Artificial Sequence
  ENSG00000066926_7 (sequence is synthesized)
aagcgaggtggtcattctgttttctgctcactcactgcccatgtctgtggtcaacagaggcgacccatatcctcaggaggtaagcgccactgtccaaaaagtcatggaaaggctggagta

SEQ ID NO: 50532 - DNA, 120 bp, Artificial Sequence
  ENSG00000066926_8 (sequence is synthesized)
ctgcaacccctaccgactggtgtggcaatccaaggttggtccaatgccctggttgggtcctcaaacagacgaatctatcaaagggctttgtgagagggggaggaagaatatcctcttggt

SEQ ID NO: 50533 - DNA, 120 bp, Artificial Sequence
  ENSG00000066926_9 (sequence is synthesized)
tccgatagcatttaccagtgaccatattgaaacgctgtatgagctggacatcgagtactctcaagttttagccaaggagtgtggagttgaaaacatcagaagagctgagtctcttaatgg

SEQ ID NO: 50534 - DNA, 120 bp, Artificial Sequence
  ENSG00000066926_10 (sequence is synthesized)
aaatccattgttctctaaggccctggccgacttggtgcattcacacatccagtcaaacgagctgtgttccaagcagctgaccctgagctgtccgctctgtgtcaatcctgtctgcaggga

SEQ ID NO: 50535 - DNA, 120 bp, Artificial Sequence
  ENSG00000066926_11 (sequence is synthesized)
gactaaatccttcttcaccagccagcagctgtgacccccgccggtggaccccgtggcgttaggcaaatgcccaacctccagatacctccgatgtggagagggtgttatttagagatcaag

SEQ ID NO: 50536 - DNA, 120 bp, Artificial Sequence
  ENSG00000066926_12 (sequence is synthesized)
gaaggaagtcatccttccttgatatatatacagcctttgggtacaaattgtgtggtttcttgaggattggactcttgatggatttctatttttatataactatacagtaagcatttgtat

SEQ ID NO: 50537 - DNA, 120 bp, Artificial Sequence
  ENSG00000066926_13 (sequence is synthesized)
tttctctctctaggtataagttactagtttggaatgtccatcaggacctttaataaatgagttaaaaatttgtcttatgagacacacctatttaagtacagattttggctttattgccca

SEQ ID NO: 50538 - DNA, 120 bp, Artificial Sequence
  ENSG00000066926_14 (sequence is synthesized)
aaaccctcctgaaagggtacggagagtcccctctgtgggctggcagtgtgaatgagatctgtttagtctcgtgcatatagttgctgttttttaaatgaacacagttgagtatttgaagtg

SEQ ID NO: 50539 - DNA, 120 bp, Artificial Sequence
  ENSG00000066926_15 (sequence is synthesized)
aatttgaaaaagaaatgttacttaatctttccctaagcccatgggttacagaatgctagggaggcaatttggttacctgcaatggctgcttttgccagcgaggccaccattcattggtca

SEQ ID NO: 50540 - DNA, 120 bp, Artificial Sequence
  ENSG00000066926_16 (sequence is synthesized)
tcttggtatttgtgtgtgaatctcactttcctcaatgtaaaaaggaatcaagtatggatttcagaggtgctcttagattccccatacacccaagggtaataaacgtgtacaagtacagtg

SEQ ID NO: 50541 - DNA, 120 bp, Artificial Sequence
  ENSG00000066926_17 (sequence is synthesized)
ttcatgatacgtgccttggtgggagtccgtggtgccacagggaaggggctcccactgcttctggtctccagggacagtgctgctggaaaggctagtgatgagcttcaccctggagctcct

SEQ ID NO: 50542 - DNA, 120 bp, Artificial Sequence
  ENSG00000066926_18 (sequence is synthesized)
cccgggaccttgcaagcctctccatccagcatcttctctatcttagttgaatgccttctttctgaacatttgttttaagaattattttataaagtcaacaatactttgcttgaattcttt

SEQ ID NO: 50543 - DNA, 120 bp, Artificial Sequence
  ENSG00000066926_19 (sequence is synthesized)
cttaatttacgattttttattataaaaatgtatagtgatacaatgggacatgtgaagaatacagaaaagtaaccactttaatgcaataactgttatcataatattgtatttcgtggtagt

SEQ ID NO: 50544 - DNA, 120 bp, Artificial Sequence
  ENSG00000066926_20 (sequence is synthesized)
cctttcctgtagatatttttaatgccatttaatgccattgtcaccttggatttatgagtgaaaagtgtttctaaaaatatagaaataatgtcagatcagagtctgatcttctatgtttgt

SEQ ID NO: 50545 - DNA, 120 bp, Artificial Sequence
  ENSG00000066926_21 (sequence is synthesized)
atttaaatggattaaaagatccccggtggttccatgaagaatttgtaaagatcactttctctttcctccaagccctgaaactttgttcttcaaaagagcgtttctttttttttttttttt

SEQ ID NO: 50546 - DNA, 120 bp, Artificial Sequence
  ENSG00000066926_22 (sequence is synthesized)
tagccagtttataaagtggaagtattaggagattcataaatcttctatattgagaattggctatgttaataaatattacaacatcattaaggttttagctaagtttgattcatgctgtct

SEQ ID NO: 50547 - DNA, 120 bp, Artificial Sequence
  ENSG00000066926_23 (sequence is synthesized)
gttaaatcaaaactgatctaaatcagaattattaaatgtgaggagcttttttaatacaggaaaagaaacatgtcatccacttgagttaatagttttcctacgttgatgacagccctcatg

SEQ ID NO: 50548 - DNA, 120 bp, Artificial Sequence
  ENSG00000066926_24 (sequence is synthesized)
agtagcatccacatttttaaaatttcaaattggtttttctactagtagattgtgtttctagagaaagatacaaggcataggtgattgtttaggattttcctctagcctttgccattacct

SEQ ID NO: 50549 - DNA, 120 bp, Artificial Sequence
  ENSG00000066926_25 (sequence is synthesized)
ttttggggatgaggttcacagtagactttgagtgaccgtcccaccgtgaagtgaattctctgagctggtggtgtggtgctggaaggaaggttatttttggagccactctctccccttaag

SEQ ID NO: 50550 - DNA, 120 bp, Artificial Sequence
  ENSG00000066926_26 (sequence is synthesized)
gatatttcccaagggcctgcttcaattctttgatgactttagaggtgaaaaaatatttttatggagatgatgcagaaaactccaattcaggagcccttgcgagtatatctgaagcactta

SEQ ID NO: 50551 - DNA, 120 bp, Artificial Sequence
  ENSG00000066926_27 (sequence is synthesized)
tttgctaaggaaacctgaattgatagcagtactgtgctgtctggaataatgtccttgatactgagttgggaccagactggcttttatagtgacaggcaaagaggaatttattgagatcac

SEQ ID NO: 50552 - DNA, 120 bp, Artificial Sequence
  ENSG00000066926_28 (sequence is synthesized)
tgctcatggcatttgttgctgtaagaagtgttgcctttgattgttactaaccacggatgggtaacggtcatacattaggctagtgtttggtaggacaaaatctttttagagctttgagaa

SEQ ID NO: 50553 - DNA, 120 bp, Artificial Sequence
  ENSG00000066926_29 (sequence is synthesized)
ttgtcatcctgttggtcaactttgaaatacaaatgtttgccctggtaattagcaatgaactgctggcagtttcttcagctgtgtatatacggatctggcttttaattgatgaatcaactt

SEQ ID NO: 50554 - DNA, 120 bp, Artificial Sequence
  ENSG00000066926_30 (sequence is synthesized)
ctacagaaacttttgcagggacagtgttgatgaggcagtttagcttgccagggtgatgataaagcccaggtccctgcatgtatagtgctcttctaaagaatatgcattcttgaactactt

SEQ ID NO: 50555 - DNA, 120 bp, Artificial Sequence
  ENSG00000066926_31 (sequence is synthesized)
atgagcctctgcacctggccctgaactcattattaaaagccctttaaatgtgaggctgggtgccgtgccttacatgtgtaattccaatactttggaaggccaaggttggaggattgcttg

SEQ ID NO: 50556 - DNA, 120 bp, Artificial Sequence
  ENSG00000066926_32 (sequence is synthesized)
accagcctgggcaacatagggagaccctgactctacaaaaaataaagtaaaaattaactgggtgtagtgtcacatgcctgtagttccagctacttaggaggctgaggtggtaggattgct

SEQ ID NO: 50557 - DNA, 86 bp, Artificial Sequence
  ENSG00000066926_33 (sequence is synthesized)
tagtgtcacatgcctgtagttccagctacttaggaggctgaggtggtaggattgcttgagcccagcagtttgaggttgcagtgagg

SEQ ID NO: 50558 - DNA, 120 bp, Artificial Sequence
  ENSG00000066926_34 (sequence is synthesized)
atacagagactgggtcatttacaaaggaaagaggtttaattgactcggttcggctttctgaggaagccttaggaaattgacaatcatggcagaaggggaagcagatgtcttacatggcag

SEQ ID NO: 50559 - DNA, 120 bp, Artificial Sequence
  ENSG00000066926_35 (sequence is synthesized)
ttataaaaccatcagatctcgtgagaactggctgtcacaagaacagcatgggggaactgtctccatgttccaatctccttccaccaggtccctccctcaacacgtggggattatggggat

SEQ ID NO: 50560 - DNA, 120 bp, Artificial Sequence
  ENSG00000066926_36 (sequence is synthesized)
tccctccctcaacacgtggggattatggggattacaatttgaaatgagatttgggtggggaacagagccaaatcatatcattccaccctggcccctcccaaatcacatgtcctttttaca

SEQ ID NO: 50561 - DNA, 84 bp, Artificial Sequence
  ENSG00000066926_37 (sequence is synthesized)
tcaaagtctcatccaagacaaggcaagtcccttctgcctgtgagcctgtaacattaaaagcaagttagtgacttccaagataca

SEQ ID NO: 50562 - DNA, 120 bp, Artificial Sequence
  ENSG00000066926_38 (sequence is synthesized)
tcatccaagacaaggcaagtcccttctgcctgtgagcctgtaacattaaaagcaagttagtgacttccaagatacaatgggagtacagacattggtaaatgttcccattccaaatgggag

SEQ ID NO: 50563 - DNA, 88 bp, Artificial Sequence
  ENSG00000066926_39 (sequence is synthesized)
ggagaaattggccaaaacacaggggctacaggccccatgcaccactgcactccactgtgcaagtctgaaacccggcagggcactcctt

SEQ ID NO: 50564 - DNA, 67 bp, Artificial Sequence
  ENSG00000066926_40 (sequence is synthesized)
cactgcaacctccgcctcttgggttcaaaggatcatcctgcctcagcctccggagtagctgggctac

SEQ ID NO: 50565 - DNA, 64 bp, Artificial Sequence
  ENSG00000066926_41 (sequence is synthesized)
gacctcccccggcctactcaataaatcttaaagttccggaataatctcctttgactccatgtct

SEQ ID NO: 50566 - DNA, 120 bp, Artificial Sequence
  ENSG00000066926_42 (sequence is synthesized)
atcttaaagttccggaataatctcctttgactccatgtctcacctccaggtcacgctgatgcaagaggtgggctaatctttctagtaaattccatatttaattcaagaaaccataactta

SEQ ID NO: 50567 - DNA, 120 bp, Artificial Sequence
  ENSG00000066926_43 (sequence is synthesized)
aggcatgtaaaagagatcctttgctcaatgtgatgccattgtgcttatccaaagtatattattattacccacaaagggtgagagattaggctgcagccataccccaagtggagtgagcag

SEQ ID NO: 50568 - DNA, 120 bp, Artificial Sequence
  ENSG00000066926_44 (sequence is synthesized)
caagacctgccccctgctcagagtgtagatgactgggggcacctgcattcctaggggctctgccgtatgagctcctgtcgatgcggcaaaggaccaccttgcccaacgacagcgggaagg

SEQ ID NO: 50569 - DNA, 120 bp, Artificial Sequence
  ENSG00000066926_45 (sequence is synthesized)
cagaatttaaagctggcagctgtaagcgaacgtctatgtgtgcgcacgggggcacgtgaaggcacaggtgcatcagccaagaacctccaattcacctcttaaccttctcacctcacctga

SEQ ID NO: 50570 - DNA, 120 bp, Artificial Sequence
  ENSG00000066926_46 (sequence is synthesized)
aaccccttctgccagaatcctgaaggtggcccaggaacagggctcctaacgttaggtggaaatgggaaattcattgagatgtcacaagctggaataagaaaattctgagctcacccggaa

SEQ ID NO: 50571 - DNA, 120 bp, Artificial Sequence
  ENSG00000066926_47 (sequence is synthesized)
actaatgccctaaattaagattattcagcttctcaatttttaatagcaaaatggagacctgagtgtggataacttttagtatctgtgggggatcctggaaccaattccctgccaatatag

SEQ ID NO: 50572 - DNA, 120 bp, Artificial Sequence
  ENSG00000066926_48 (sequence is synthesized)
aaggacaactgtctacagtacttgaagtattattaactacattcgccatgctgtatgttagatccccagaacatatttatcctgcatatctaaaattttgatcattttacaaactttcta

SEQ ID NO: 50573 - DNA, 120 bp, Artificial Sequence
  ENSG00000066926_49 (sequence is synthesized)
ttttttttgtcaattttctccagctagacacttgtgcaatacggctattatctgatctttgccttaaatgttgtgcttcttttccatatgcacgtattttgcaaaatataaagtgtgtag

SEQ ID NO: 50574 - DNA, 120 bp, Artificial Sequence
  ENSG00000066926_50 (sequence is synthesized)
agctatatagcactcagccaagtggtgggtacctgcaggtgcttcagagaagtaaattgatgctgctaatatttgttgaatggcacgaatatgatgagcaatagcaggtggtgcccttca

SEQ ID NO: 50575 - DNA, 120 bp, Artificial Sequence
  ENSG00000066926_51 (sequence is synthesized)
gccagaccatcgctccgtgcgtctgatgcatcttgccaaagagtagttctgggaggtggttgcctctagagaacacattcctcctattctggggtcccgtgagagaaagaaatgcttttg

SEQ ID NO: 50576 - DNA, 120 bp, Artificial Sequence
  ENSG00000066926_52 (sequence is synthesized)
cttttgatgtgggactcttactaagcctttcttcagagaaaaggaagtgaaaaatgcaccccatgataatcagtttcttacaacatactgtgatagtaccggcttcgttgtttttagctg

SEQ ID NO: 50577 - DNA, 120 bp, Artificial Sequence
  ENSG00000066926_53 (sequence is synthesized)
gaatcattagcttccatttttagaataacagctattggctaaattaggctacagtaggccattaagatggatgttggaattaaaaacatttttggaaaaaagcctgctttgagcctttgt

SEQ ID NO: 50578 - DNA, 120 bp, Artificial Sequence
  ENSG00000066926_54 (sequence is synthesized)
tataagcccttgggtagagatctgggtcctgtttctgatttcttgtgagccttcactctgacagttttgtttccagaaacacactcttagcctgctcctgaaatgggaacagacaggcca

SEQ ID NO: 50579 - DNA, 120 bp, Artificial Sequence
  ENSG00000066926_55 (sequence is synthesized)
acttcccctctccagtctcccctgcgggtcaaagctttactttcctgtcatgttaagaaagaatagatttaaccttgataatccatgtagtattctgtatttttaccttttccttatctg

SEQ ID NO: 50580 - DNA, 120 bp, Artificial Sequence
  ENSG00000066926_56 (sequence is synthesized)
aaaaaaagtgtatatatggcatggaattgattgcacaggcacatggcatgttggcttgtgaaccaattgttaaaatttcaagttaatcattaaaataatatctttcaaattaagttatat

SEQ ID NO: 50581 - DNA, 120 bp, Artificial Sequence
  ENSG00000066926_57 (sequence is synthesized)
taaaaacaaaggtaacattctaaattcattactttctaattatttcgcccttttttttgtcgttgattatttagacttaagaaagtgatgggaaaaacgttaataacacagtacataagt

SEQ ID NO: 50582 - DNA, 120 bp, Artificial Sequence
  ENSG00000066926_58 (sequence is synthesized)
tgtttctgtagccattacactgtgattttcacaaacacttgaacacttgaatagtcttccattatttgaaaactattattcaacttatccaagtgaagtattggcatacaaagaagttgt

SEQ ID NO: 50583 - DNA, 120 bp, Artificial Sequence
  ENSG00000066926_59 (sequence is synthesized)
ttcatatttgcattgctcatgaatgtaaacaaaatgtcgatatgtgtgaactatacttgttgatcaattgcaaccataggttggctgcagatgcgagagcttggtaaacatcaacaaaag

SEQ ID NO: 50584 - DNA, 120 bp, Artificial Sequence
  ENSG00000066926_60 (sequence is synthesized)
cattctctgagaatgaattgactatatggaatttgtaggaaagtgtattgtgtattttattattatttgtaaattgtgtattccacatcttttagattagtaaaatttatagtaaacata

SEQ ID NO: 50585 - DNA, 120 bp, Artificial Sequence
  ENSG00000066926_61 (sequence is synthesized)
cgtcctgctccgcgatccgcgttgtgaccacaggatgagctgatgggactgtggatctcacacacctggctgggacagcatttccaactgtgacaccttgaacaaggcacctaacctcgc

SEQ ID NO: 50586 - DNA, 120 bp, Artificial Sequence
  ENSG00000066926_62 (sequence is synthesized)
gttttagtagaacataccagagagtaatcctctgagaaactcttgcagaatattggtttttctcacatattagaacatttggagttccaattaattacaaaaataaaatcgaattcctta

SEQ ID NO: 50587 - DNA, 120 bp, Artificial Sequence
  ENSG00000066926_63 (sequence is synthesized)
tgagatatatataaacacctcaattataaccttggcactacattgacatgtgtctctcaattctgtagtttcaaaccagtaaatagttttaatgcgtatctggtaatggttaaacagcag

SEQ ID NO: 50588 - DNA, 120 bp, Artificial Sequence
  ENSG00000066926_64 (sequence is synthesized)
cattgttttctgttggatatcagaaggatatgatatcagaaaattgcagggggagagagcaaataagttagtggggattctccttgagccctttgctccccagagccctggaaattgcag

SEQ ID NO: 50589 - DNA, 120 bp, Artificial Sequence
  ENSG00000066926_65 (sequence is synthesized)
gagggcagcactcagggctcgggaggccgcggggagggcgcccggatccaggaggcgcaggttcaagtcccatcggtcggctgggtggcttggagcagtggctggaatttcccagagcct

SEQ ID NO: 50590 - DNA, 120 bp, Artificial Sequence
  ENSG00000066926_66 (sequence is synthesized)
ttggaccgagacctcatgacacttcctattcagaaaaaacatttctcaggttgctaagctggaataaaatccacttacctgtatgttaaatgatttagtaagctggcaccattcatcgcc

SEQ ID NO: 50591 - DNA, 120 bp, Artificial Sequence
  ENSG00000066926_67 (sequence is synthesized)
ggaagtgtgccctgtccttcccgaggggaagcagatccacagcgcgcatttgcagtgagccattagcgagctttagaagtttcccagcaaattccctaggcccctgaaactgttatgatc

SEQ ID NO: 50592 - DNA, 120 bp, Artificial Sequence
  ENSG00000066926_68 (sequence is synthesized)
cattttgatgataaaccaatgctgagaggctggactgtttgcaattttttaaaaaagagagttcggatttttgagggttgctctgagatttttggtgtaggcttcattttaaaattattt

SEQ ID NO: 50593 - DNA, 120 bp, Artificial Sequence
  ENSG00000066933_0 (sequence is synthesized)
gcgcgcctgctcgcctgcagccggggagtcgcgcggggcggggccgcgtgcgcggggtcgggggcgcgcgaccgaagcggataagggacgcggcggcggttggctgtgtctgttgagaga

SEQ ID NO: 50594 - DNA, 120 bp, Artificial Sequence
  ENSG00000066933_1 (sequence is synthesized)
gagagtacaggacagcccggactgcgagaggcggcggcggaggcagtagttgcaccggcagaggcggccgctggcagcggttgaggcggcggtccaacgcgtgctctctgggcggggtgc

SEQ ID NO: 50595 - DNA, 120 bp, Artificial Sequence
  ENSG00000066933_2 (sequence is synthesized)
ggcgggggatgtgcctgctcaggccgggcggagtctctctgacagggcgggggatgcgccgcggccgctcgcccggaccctgaggctgctgggcccaccctcccggaaccgtccgaccct

SEQ ID NO: 50596 - DNA, 120 bp, Artificial Sequence
  ENSG00000066933_3 (sequence is synthesized)
cggtggcctcggcctcttctgccatctccggtcctaccctggggcggagggtggaaggcagcttccgtcgaagaggagggggctgcggtggccaccgcggcggagcccgagttattttac

SEQ ID NO: 50597 - DNA, 120 bp, Artificial Sequence
  ENSG00000066933_4 (sequence is synthesized)
caagaaaatggtttgcacgactttgaacatatactatccatgctgatgggacaggatccaatatgaatataaatgatggaggaagacgacgctttgaagataatgaacatacattacgga

SEQ ID NO: 50598 - DNA, 120 bp, Artificial Sequence
  ENSG00000066933_5 (sequence is synthesized)
tatatcctggggctatttcagaagggacaatctactgtccgattcctgccagaaaaaactccacagctgctgaggtgattgagtctcttataaacaaacttcatcttgacaaaacaaaat

SEQ ID NO: 50599 - DNA, 120 bp, Artificial Sequence
  ENSG00000066933_6 (sequence is synthesized)
gttatgttctagcagaggtaaaggaatttggtggagaagaatggattctcaatccaacagattgtccagttcagcgaatgatgctgtggccccgaatggctctggaaaatcgcttaagtg

SEQ ID NO: 50600 - DNA, 120 bp, Artificial Sequence
  ENSG00000066933_7 (sequence is synthesized)
gagaggactaccgcttccttctgagagagaaaaaccttgatggatcaatccattatggtagcctgcagtcatggctacgggtaacagaagaacgtcgcaggatgatggaacggggttttc

SEQ ID NO: 50601 - DNA, 120 bp, Artificial Sequence
  ENSG00000066933_8 (sequence is synthesized)
ttccacagcctcaacagaaagactttgatgatttatgtagtttacctgatttgaatgagaaaactctcttagaaaacctacgaaatcgctttaagcatgaaaaaatttatacctatgttg

SEQ ID NO: 50602 - DNA, 120 bp, Artificial Sequence
  ENSG00000066933_9 (sequence is synthesized)
gcagtattctaatagttattaacccattcaagtttcttcctatttataaccccaaatatgtcaaaatgtatgataaccaccaactgggaaaacttgagccccacatttatgctgtggctg

SEQ ID NO: 50603 - DNA, 120 bp, Artificial Sequence
  ENSG00000066933_10 (sequence is synthesized)
atgtagcttatcatgccatgcttcagcgcaaaaagaatcagtgcatcgtgatttcaggagagagtggttctgggaagactcaaagcacaaactttcttattcaccaccttactgctctca

SEQ ID NO: 50604 - DNA, 120 bp, Artificial Sequence
  ENSG00000066933_11 (sequence is synthesized)
gtcagaaaggatttgccagtggagtagaacagattattcttggagctggaccagtacttgaggcctttggaaatgcaaagacagctcataataacaattcaagtcgttttgggaagttta

SEQ ID NO: 50605 - DNA, 120 bp, Artificial Sequence
  ENSG00000066933_12 (sequence is synthesized)
ttcaagtaaattaccaggaaacaggcactgtacttggtgcctatgttgaaaaatatctactggagaagtccagactcgtttatcaggagcataatgaacggaactatcatgtattctatt

SEQ ID NO: 50606 - DNA, 120 bp, Artificial Sequence
  ENSG00000066933_13 (sequence is synthesized)
acctcctggcaggagcaagtgaagatgagagatcagcattccatcttaagcaaccagaggaatatcattatctcaatcagataacaaagaaacccctcagacagagctgggatgattatt

SEQ ID NO: 50607 - DNA, 120 bp, Artificial Sequence
  ENSG00000066933_14 (sequence is synthesized)
gctatgactctgagccggattgcttcacggtggaaggagaagatttgagacatgactttgagcgcctacaacttgccatggaaatggtaggatttcttcccaagacacgaagacagattt

SEQ ID NO: 50608 - DNA, 120 bp, Artificial Sequence
  ENSG00000066933_15 (sequence is synthesized)
tctctcttctctcagccatactacatttgggtaatatctgttacaaaaagaagacataccgggatgactccattgatatctgtaatcctgaagttctgcctattgtctcagaattattag

SEQ ID NO: 50609 - DNA, 120 bp, Artificial Sequence
  ENSG00000066933_16 (sequence is synthesized)
aggttaaagaagagatgctatttgaagcattagttacaaggaagacggtgacagtgggagaaaagcttattttgccatacaagttggcagaggctgtgacagtgaggaactccatggcta

SEQ ID NO: 50610 - DNA, 120 bp, Artificial Sequence
  ENSG00000066933_17 (sequence is synthesized)
agtctctgtatagtgccctgtttgactggatagtttttcgaattaatcatgcacttctgaatagtaaagatttagagcataataccaagacattgtctattggtgttcttgatatttttg

SEQ ID NO: 50611 - DNA, 120 bp, Artificial Sequence
  ENSG00000066933_18 (sequence is synthesized)
ggtttgaagattatgaaaataacagctttgaacagttctgtattaattttgctaatgaacgtttacagcactactttaatcagcatatctttaaattggaacaagaggaatatagaactg

SEQ ID NO: 50612 - DNA, 120 bp, Artificial Sequence
  ENSG00000066933_19 (sequence is synthesized)
aaggtatcagctggcacaacatagattacattgataatacctgctgcataaatcttattagcaaaaaaccaacaggactgcttcatcttttggatgaagaaagcaactttccacaggcta

SEQ ID NO: 50613 - DNA, 120 bp, Artificial Sequence
  ENSG00000066933_20 (sequence is synthesized)
caaatcaaacattgctagacaagtttaagcatcaacatgaagataattcttacatcgaatttccagccgtgatggagcctgctttcattataaaacattatgctggaaaagtaaaatatg

SEQ ID NO: 50614 - DNA, 120 bp, Artificial Sequence
  ENSG00000066933_21 (sequence is synthesized)
gggtaaaggatttccgggaaaaaaatacagatcatatgcgcccagacattgtagctcttctgagaagcagcaagaatgcatttatctctgggatgattggaattgatcctgtagctgttt

SEQ ID NO: 50615 - DNA, 120 bp, Artificial Sequence
  ENSG00000066933_22 (sequence is synthesized)
tccgatgggcaattctccgagcttttttcagagccatggttgctttcagggaagctgggaaaagaaacattcacagaaaaactggacatgatgatacagcgccatgtgcaattttgaaaa

SEQ ID NO: 50616 - DNA, 120 bp, Artificial Sequence
  ENSG00000066933_23 (sequence is synthesized)
gtatggatagttttagctttctccaacacccagtccaccagaggagcttagagattctgcagagatgcaaggaagagaagtacagtataacccggaaaaatcccagaacacctctttctg

SEQ ID NO: 50617 - DNA, 120 bp, Artificial Sequence
  ENSG00000066933_24 (sequence is synthesized)
atctccagggcatgaatgctctaaatgaaaaaaaccaacatgatacatttgatattgcctggaatggcagaactgggattcgccagagcagactatcaagtggcacctccttgcttgata

SEQ ID NO: 50618 - DNA, 120 bp, Artificial Sequence
  ENSG00000066933_25 (sequence is synthesized)
aagatggaatatttgctaattcaactagcagcaaactcctggagagagcccatggaattctcacgagaaacaaaaatttcaaatccaagcctgcccttccaaagcacttgctagaagtaa

SEQ ID NO: 50619 - DNA, 120 bp, Artificial Sequence
  ENSG00000066933_26 (sequence is synthesized)
attctttaaagcacctgacaagactgacactacaagatcgcattaccaagtctcttcttcatttacacaagaagaaaaaacctcccagcatcagtgcccagtttcaggcatcattaagca

SEQ ID NO: 50620 - DNA, 120 bp, Artificial Sequence
  ENSG00000066933_27 (sequence is synthesized)
agctaatggaaacacttggtcaagcagaaccatattttgtaaaatgcattcgctctaatgctgaaaagctgcccttaaggttcagtgatgtcttggtacttagacagcttcgatacaccg

SEQ ID NO: 50621 - DNA, 120 bp, Artificial Sequence
  ENSG00000066933_28 (sequence is synthesized)
ggatgctggaaacagttcgaattcgccaatcaggatacagctccaaatattctttccaggattttgtgagccacttccatgtacttcttccccgaaatattattccatccaaatttaaca

SEQ ID NO: 50622 - DNA, 120 bp, Artificial Sequence
  ENSG00000066933_29 (sequence is synthesized)
ttcaggatttcttcaggaaaataaatcttaatccagataattatcaagttggaaaaaccatggtctttctaaaggagcaggaacgacagcacttacaagatctgcttcaccaagaggtgc

SEQ ID NO: 50623 - DNA, 120 bp, Artificial Sequence
  ENSG00000066933_30 (sequence is synthesized)
tccgcagaatcatattgttgcagcgatggttcagggtcttgctgtgtaggcagcatttcctccatctgagacaagcatctgttattatccagagattctggaggaattacctaaatcaga

SEQ ID NO: 50624 - DNA, 120 bp, Artificial Sequence
  ENSG00000066933_31 (sequence is synthesized)
agcaagtcagagatgcagctgtgcagaaggatgcttttgttatggctagtgcagctgctcttctccaagcttcctggcgtgctcacttagagaggcagcggtacttggagttacgggctg

SEQ ID NO: 50625 - DNA, 120 bp, Artificial Sequence
  ENSG00000066933_32 (sequence is synthesized)
cagccatcgttatccagcagaaatggagagattactataggcgcaggcacatggctgctatttgcatacaagcaagatggaaagcctacagggaaagtaaaaggtaccaagaacaaagga

SEQ ID NO: 50626 - DNA, 120 bp, Artificial Sequence
  ENSG00000066933_33 (sequence is synthesized)
aaaaaattatccttttgcaatcaacatgtagaggattcagagcaagacaaagatttaaagctttaaaagaacaaaggctaagagaaacaaagccagaagttggattggtgaatattaagg

SEQ ID NO: 50627 - DNA, 120 bp, Artificial Sequence
  ENSG00000066933_34 (sequence is synthesized)
gatatggatctctggaaattcagggttcagacccttcaggatgggaggattgttcttttgacaacagaataaaagccatagaggaatgtaaatctgtaatagagagtaatcgaattagcc

SEQ ID NO: 50628 - DNA, 120 bp, Artificial Sequence
  ENSG00000066933_35 (sequence is synthesized)
gtgaaagttcagtggactgcttgaaggagtcaccaaacaagcagcaggagagagcccaaagccagagtggtgtggacttgcaggaagatgtgcttgtaagagagagacccagatccttgg

SEQ ID NO: 50629 - DNA, 120 bp, Artificial Sequence
  ENSG00000066933_36 (sequence is synthesized)
aggatctccatcagaaaaaagtaggccgggctaagagagaaagtaggagaatgagagaactagagcaagctatatttagcttagaattgctgaaagttcgttctcttggtggtatttctc

SEQ ID NO: 50630 - DNA, 120 bp, Artificial Sequence
  ENSG00000066933_37 (sequence is synthesized)
cttcagaggatcgcagatggtctacagaattggtgcctgaaggccttcagtctccacggggtacacctgatagtgagagctctcaaggaagcttggaacttctgagctatgaggaaagcc

SEQ ID NO: 50631 - DNA, 120 bp, Artificial Sequence
  ENSG00000066933_38 (sequence is synthesized)
aaaagagcaaactagagtctgtcatttcagatgaaggagacttgcagtttccatcacctaagatatccagcagtccaaaatttgattcacgggacaatgccctcagtgcctcaaatgaga

SEQ ID NO: 50632 - DNA, 120 bp, Artificial Sequence
  ENSG00000066933_39 (sequence is synthesized)
ctagcagtgcagagcatttgaaggatggaactatgaaggaaatggtggtctgcagttctgagtctattacctgtaaaccacagctgaaagactccttcatttcaaatagtctacctactt

SEQ ID NO: 50633 - DNA, 120 bp, Artificial Sequence
  ENSG00000066933_40 (sequence is synthesized)
ttttttatatcccccaacaagacccactgaaaacaaattcccaactagacacaagtatccaaagaaacaaactattggaaaatgaagacacagcgggggaagctcttactttggatatca

SEQ ID NO: 50634 - DNA, 120 bp, Artificial Sequence
  ENSG00000066933_41 (sequence is synthesized)
acagggaaactagaaggtatcactgctcaggaaaagatcagattgttccttctttgaatacagagtcttctaatcctgtgcttaagaagttagaaaagctaaacactgagaaggaagaaa

SEQ ID NO: 50635 - DNA, 120 bp, Artificial Sequence
  ENSG00000066933_42 (sequence is synthesized)
ggcaaaaacagttgcagcaacagaatgaaaaagagatgatggaacagattcgccagcaaacagatattttagagaaggagcgcaaagccttcaagacaattgaaaagccaagaattggag

SEQ ID NO: 50636 - DNA, 120 bp, Artificial Sequence
  ENSG00000066933_43 (sequence is synthesized)
agtgtttggtggcaccatcttcctatcagtcaaagcaaagagtagagaggccatcctctctcctcagcttaaatacctcaaataagggagaacttaatgtactggggtccctatcattaa

SEQ ID NO: 50637 - DNA, 120 bp, Artificial Sequence
  ENSG00000066933_44 (sequence is synthesized)
aagatgcagctcttgcccaaaaagacagttcctctgctcacttacccccaaaggaccgacctgtcaccgtgttctttgaaagaaaaggaagtccatgccaatctagtactgtcaaggaat

SEQ ID NO: 50638 - DNA, 120 bp, Artificial Sequence
  ENSG00000066933_45 (sequence is synthesized)
tatccaagacagacagaatgggcacccagctgaatgtagcctgtaaactctcaaataatcgcatttcaaaaagagaacactttaggccaactcagtcttacagccacaattctgatgacc

SEQ ID NO: 50639 - DNA, 120 bp, Artificial Sequence
  ENSG00000066933_46 (sequence is synthesized)
tttccagagagggaaatgctaggcccattttcttcactccaaaggacaatatgagtattccccttgtcagcaaagaagccttaaacagtaaaaatcctcaactccataaagaagatgaac

SEQ ID NO: 50640 - DNA, 120 bp, Artificial Sequence
  ENSG00000066933_47 (sequence is synthesized)
cagcatggaaacctgtgaagttagctgggccaggccaaagagagacatcacagcgattttcgtcagttgatgaacaagcaaaacttcataagactatgtctcaaggagagattaccaagt

SEQ ID NO: 50641 - DNA, 120 bp, Artificial Sequence
  ENSG00000066933_48 (sequence is synthesized)
tggcagtgagacagaaggcttcagattcagatataagacctcagagagctaagatgagattctgggccaaagggaaacaaggggagaagaagactaccagagtgaaacctactacccagt

SEQ ID NO: 50642 - DNA, 120 bp, Artificial Sequence
  ENSG00000066933_49 (sequence is synthesized)
cagaggtttcgccactctttgcaggcacagatgtgattccagctcatcagtttccagatgaattagctgcatatcacccaacacctcctttgagcccagaactgcccggcagttgccgga

SEQ ID NO: 50643 - DNA, 120 bp, Artificial Sequence
  ENSG00000066933_50 (sequence is synthesized)
aggaattcaaagagaacaaagaaccttctccaaaggctaagcgcaagcgaagtgtgaagattagcaacgtggctttggattctatgcattggcaaaatgactctgtccagatcatagcaa

SEQ ID NO: 50644 - DNA, 120 bp, Artificial Sequence
  ENSG00000066933_51 (sequence is synthesized)
atttcggcagaatatcttcagcttttattcatctgcattggcgatggatgatgggaaaagcatacggtataaagacctctatgcactatttgaacagattctggaaaagacgatgaggct

SEQ ID NO: 50645 - DNA, 120 bp, Artificial Sequence
  ENSG00000066933_52 (sequence is synthesized)
tgagcagcgtgattcactgggtgaatctccagtgagagtttgggtcaacacttttaaagtgtttttagatgaatatatgaatgaattcaagacttcagattgcacagccacaaaggtgcc

SEQ ID NO: 50646 - DNA, 120 bp, Artificial Sequence
  ENSG00000066933_53 (sequence is synthesized)
aaaaacagaaagaaagaaaagaaggaaaaaggaaactgatttggtggaagaacacaatggtcacatctttaaagccacccaatatagcatccctacatactgtgaatactgttcttcttt

SEQ ID NO: 50647 - DNA, 120 bp, Artificial Sequence
  ENSG00000066933_54 (sequence is synthesized)
gatatggataatggaccgagcctctgtttgcaaattatgcaagtatgcttgccataagaagtgctgtctgaaaaccacagccaagtgctctaaaaagtatgatccagagctgtcatctcg

SEQ ID NO: 50648 - DNA, 120 bp, Artificial Sequence
  ENSG00000066933_55 (sequence is synthesized)
acaatttggggttgaactgtcccgtttgaccagtgaagaccgaactgttcctttagtagtggaaaagctcataaactacattgaaatgcatggactgtatacagaaggtatttatcgaaa

SEQ ID NO: 50649 - DNA, 120 bp, Artificial Sequence
  ENSG00000066933_56 (sequence is synthesized)
gtctggttcgactaataaaatcaaggagcttcggcagggtctagatacagatgctgagagtgtaaatctagatgactataacatacacgtcattgcaagtgtattcaaacaatggcttcg

SEQ ID NO: 50650 - DNA, 120 bp, Artificial Sequence
  ENSG00000066933_57 (sequence is synthesized)
agatttgcccaatcctctcatgacctttgaactctatgaggaatttcttcgagctatgggccttcaggagaggaaggagacaatccgtggtgtatactctgtgattgatcaactctcccg

SEQ ID NO: 50651 - DNA, 120 bp, Artificial Sequence
  ENSG00000066933_58 (sequence is synthesized)
aactcatctcaatacactggaacgcctcatctttcatctagtcaggattgctctgcaggaagacactaatcgaatgtctgctaatgctttggccattgtgtttgcgccctgcattctccg

SEQ ID NO: 50652 - DNA, 120 bp, Artificial Sequence
  ENSG00000066933_59 (sequence is synthesized)
ctgccctgacaccactgacccactacaaagtgtacaggacatcagtaagactaccacttgtgtggaactgattgttgtggaacaaatgaataaatacaaggctcgtctcaaagatatcag

SEQ ID NO: 50653 - DNA, 120 bp, Artificial Sequence
  ENSG00000066933_60 (sequence is synthesized)
tagcttggaatttgctgagaataaggcaaagaccaggttgtcactgattcgtagatcaatgggaaaggggcgtattcgtcgaggaaactatccaggtccatcgtctcctgttgtagttcg

SEQ ID NO: 50654 - DNA, 120 bp, Artificial Sequence
  ENSG00000066933_61 (sequence is synthesized)
gttgccttctgtgtctgatgtctcagaggagaccttgactagtgaggcagccatggagactgacatcacagaacagcagcaagcagctatgcagcaggaggagagagtactgactgagca

SEQ ID NO: 50655 - DNA, 120 bp, Artificial Sequence
  ENSG00000066933_62 (sequence is synthesized)
gattgagaacctacagaaggagaaggaggagctaacatttgagatgcttgtactggaaccccgtgcctctgatgatgaaacccttgagtctgaggcctccattgggactgctgatagctc

SEQ ID NO: 50656 - DNA, 120 bp, Artificial Sequence
  ENSG00000066933_63 (sequence is synthesized)
agagaatttgaatatggagtctgaatatgctatctctgagaaatcagaaagaagcttagcccttagctccctgaagacagctggcaagtctgaaccttccagcaagttgcgaaagcaact

SEQ ID NO: 50657 - DNA, 120 bp, Artificial Sequence
  ENSG00000066933_64 (sequence is synthesized)
taaaaagcagcaagactctttagatgtcgtggactcttcggtctcctctttatgtctgtctaacacggcatcatctcatgggaccagaaaactatttcagatttattccaaatctccatt

SEQ ID NO: 50658 - DNA, 120 bp, Artificial Sequence
  ENSG00000066933_65 (sequence is synthesized)
ctaccgagctgcctcaggtaatgaggccctgggaatggaaggaccattgggccagaccaaattcctggaagacaagcctcagttcatcagcagaggaaccttcaacccggaaaagggcaa

SEQ ID NO: 50659 - DNA, 120 bp, Artificial Sequence
  ENSG00000066933_66 (sequence is synthesized)
acaaaaattaaagaatgtgaaaaactcacctcagaaaaccaaagagaccccagaggggacagtcatgtctggccgcagaaaaactgtggacccagactgcacctccaaccaacagctagc

SEQ ID NO: 50660 - DNA, 120 bp, Artificial Sequence
  ENSG00000066933_67 (sequence is synthesized)
actctttggaaataatgaatttatggtctgaaccggcagatgtgtgtccctccgtggctacagagtggtaaacaaatctcacctttggggctgcgtttcatcacctcgtccacaatagtc

SEQ ID NO: 50661 - DNA, 120 bp, Artificial Sequence
  ENSG00000066933_68 (sequence is synthesized)
aatcctaattgtggtcctgcctcttttctaagcatatggctaagactgtatgtgctgaattcctgggcctcctgcagaagcagaaagcctgctggggatggtgccagctgtgccttggct

SEQ ID NO: 50662 - DNA, 120 bp, Artificial Sequence
  ENSG00000066933_69 (sequence is synthesized)
gttgtatttgaattgagatttttactatacaaagccacctagggcctggggatttgggtcagttgtagttgcctctcccccaccctcttttcccttcccaaaggtgggtgttgaactagg

SEQ ID NO: 50663 - DNA, 120 bp, Artificial Sequence
  ENSG00000066933_70 (sequence is synthesized)
ggggatattgctgtcctgagggaccctctcatttctgacatttgaagaaaacgtataaatctttcttaaccgtgaaagcaaaagcctttgggtttattttgggatagttaggagctaggg

SEQ ID NO: 50664 - DNA, 120 bp, Artificial Sequence
  ENSG00000066933_71 (sequence is synthesized)
tagaatataatttttttccaaaaacttacttacaaacaaaaagcctaatccctctattttaagatttctgaaaaaacactccatgttatattctggggaaagcaaaaacaaaaaaaaaaa

SEQ ID NO: 50665 - DNA, 120 bp, Artificial Sequence
  ENSG00000066933_72 (sequence is synthesized)
acaaaaaaaaaaaaacaaaaaaaaaccgtgattgtttccattaagccatcagagcgtgtctcagatatcttgttatacagtgaagaagagaatacctattttttttgatgatgtttgatg

SEQ ID NO: 50666 - DNA, 120 bp, Artificial Sequence
  ENSG00000066933_73 (sequence is synthesized)
tcatagtaatcagtgctggtttaactcctgtttagttcctgccaaatacattgcatgggctgaagtgtcagtagccatactgttctcatgtttcttggtcctaggatcagattcttctac

SEQ ID NO: 50667 - DNA, 120 bp, Artificial Sequence
  ENSG00000066933_74 (sequence is synthesized)
attattttttagtttcccagagacatggtgatccctaaacttatgaaggtttcatcctaagccattcaggcttttctctttgtatagattaaaccgaaaaccgcatatgagcctgttcat

SEQ ID NO: 50668 - DNA, 120 bp, Artificial Sequence
  ENSG00000066933_75 (sequence is synthesized)
ctgctggtggattcccaccacagactcagactcaaacaaacaaacaaataatgtgaccgtttagttagtttccaaaaacattcacatacaatattgcatgaataagtaagtaagtgttac

SEQ ID NO: 50669 - DNA, 120 bp, Artificial Sequence
  ENSG00000066933_76 (sequence is synthesized)
agaaagctgccaaaaaataaaaaggtttttaatatgacctatctaactaactaacttttatcttccttttctcagactatcagtattaaatagatggaaaaaaatcaaggactacttgaa

SEQ ID NO: 50670 - DNA, 120 bp, Artificial Sequence
  ENSG00000066933_77 (sequence is synthesized)
gctatttttgttaatattctggttactgaagtttattgtaaatatgtatgtatagtaggcatatttctttttaaccttgtgcttccctccttcccatggaatttcttcccacagatgagg

SEQ ID NO: 50671 - DNA, 120 bp, Artificial Sequence
  ENSG00000066933_78 (sequence is synthesized)
ggccactggacagggggatgagagccattcgtccctgggttgagggaattagtaagacatcattttcaccactgggtggtcttcatacacatgagttataatagcattttaagtatctta

SEQ ID NO: 50672 - DNA, 120 bp, Artificial Sequence
  ENSG00000066933_79 (sequence is synthesized)
gcatttgtgggattagaaatctgtttttgctatttataatatataaaaaatgaaacatgatagcctttcttgagataagtatgtgaaatgtttatttttaaagttactaaatgcatcttg

SEQ ID NO: 50673 - DNA, 120 bp, Artificial Sequence
  ENSG00000066933_80 (sequence is synthesized)
tcttgctactacatgcactgctctgaaaaagagcctttaccatctataacctgtattttgggtattcttccttttcatacttctttgaagttgtggaaatattaagtcttttgttaaggc

SEQ ID NO: 50674 - DNA, 120 bp, Artificial Sequence
  ENSG00000066933_81 (sequence is synthesized)
agagtctctctctcctgttacacaacactgaacctcacgccactgcctcagtggttattggccagccccagaggttagacttggagcataattctgagtggcagctaaaggtagcaggag

SEQ ID NO: 50675 - DNA, 120 bp, Artificial Sequence
  ENSG00000066933_82 (sequence is synthesized)
tcttacctctccctactttgggttcagaattgagccagagaaaggaagccattaaaatctccagaataatgatagttaatgagcaaatgttatgctttatatcccacagacatctgccac

SEQ ID NO: 50676 - DNA, 120 bp, Artificial Sequence
  ENSG00000066933_83 (sequence is synthesized)
cttgttcatcttgtcctgaggagtaataaataatgttaagcttttaaaaatctgaatttcagagaatctcctagaggatagaggaaaacccctcagcatggtgtgttagagtgggattgc

SEQ ID NO: 50677 - DNA, 120 bp, Artificial Sequence
  ENSG00000066933_84 (sequence is synthesized)
tggttcctcagccccgtgccaggttgcacagtctgtgtttcagtgttcttgggagagtagtgtactgctgggcattaattgttactctgcacttgctccagaatgttggttaaatcctgt

SEQ ID NO: 50678 - DNA, 120 bp, Artificial Sequence
  ENSG00000066933_85 (sequence is synthesized)
atgaaaaaaagagattgcccttatggaataatttcctgtggcccagaggaatggccagaagaacatatgttggcacatgttcttccttctaaatctttgtggggcttttttggcaaaata

SEQ ID NO: 50679 - DNA, 120 bp, Artificial Sequence
  ENSG00000066933_86 (sequence is synthesized)
agttttttggcagttaaaaaacgactgatgtaggtcactttaaaggaactaggtgatggatgttaagagactttataatttttctcagggacctgaaactccagtttggataaaattcaa

SEQ ID NO: 50680 - DNA, 120 bp, Artificial Sequence
  ENSG00000066933_87 (sequence is synthesized)
ttaaaaaaacttgttttttcagttgctagatttgtggatttctagtaatttaatctgccaggattggggtgggtgggtgaggaggagagagccacaaaatgataagagtggagagcagtg

SEQ ID NO: 50681 - DNA, 120 bp, Artificial Sequence
  ENSG00000066933_88 (sequence is synthesized)
tggggccctccctttgagggaaagccgttgtttacatagggtagtaggccttgttggcctgatcaagagatgaagccataactcttaaaaaccttcagaaccaaacgctgtgtctgcatc

SEQ ID NO: 50682 - DNA, 120 bp, Artificial Sequence
  ENSG00000066933_89 (sequence is synthesized)
catctgttctcactggccctctgcatggtaaagttatgtcaccacaaagtgatgccgcattacaatcacttatgaaactgttagcccttaatatgcatcacatttgtggttccatagtgc

SEQ ID NO: 50683 - DNA, 120 bp, Artificial Sequence
  ENSG00000066933_90 (sequence is synthesized)
ttctcctttgcttgtttgatctctgcatggcagcagtggggcagctccacatttggagcccatactccaaaatgcagagcactcttctcacagcacacattcccagccccaaacaaaacc

SEQ ID NO: 50684 - DNA, 120 bp, Artificial Sequence
  ENSG00000066933_91 (sequence is synthesized)
tgaattttcaactctgcccattaaagtgaatgtatccctgtaatttagtatgtacttattatggaaaatgtaacaaaagcagagaagtgtgatttcattctgtatcacaaattgaagcaa

SEQ ID NO: 50685 - DNA, 120 bp, Artificial Sequence
  ENSG00000066933_92 (sequence is synthesized)
atcaacagcaaatacagcaggattcagggaggcttagtttacaacgtactttgtacctcctgccatttaaattattttgccactctgggcttctgaaaacacaaagggagatacagccct

SEQ ID NO: 50686 - DNA, 120 bp, Artificial Sequence
  ENSG00000066933_93 (sequence is synthesized)
ccaactatgagccttgcagagagagacaaaagggccagaggtcctgggatggaatactagagcccccaccttctcatgctttggaaacctgccagagcacttaccctgctggaagattaa

SEQ ID NO: 50687 - DNA, 120 bp, Artificial Sequence
  ENSG00000066933_94 (sequence is synthesized)
tgaagactccattctgtgtttcataacagtagcgttgttttctccatcaaaaacagagggtcacagaaatgtgctgaaaagatgtggtccagcaaggttctgtagtcccacctcagtgcc

SEQ ID NO: 50688 - DNA, 120 bp, Artificial Sequence
  ENSG00000066933_95 (sequence is synthesized)
tgtgggctgtgtttttcactgtaacaagcactttggtaaactagaaagaagaaaggattctcaggatgtgttcaaagctaagagagttttcattttaaaaagaaacatacatactcactc

SEQ ID NO: 50689 - DNA, 120 bp, Artificial Sequence
  ENSG00000066933_96 (sequence is synthesized)
catggctttcctcatcctcctctcttttttcttcttggtgggaagctggatgcggggcatgcatcattctgtatggacaaatgtgttatgtccacccatactcttgtgacaactccccag

SEQ ID NO: 50690 - DNA, 120 bp, Artificial Sequence
  ENSG00000066933_97 (sequence is synthesized)
cactgtcctgcaataccatgctggccttggtagtaaaactccttggtatctgtgagagtcctctttttctatgccctagactacttttaaccacttttctctggaatgactcccacattt

SEQ ID NO: 50691 - DNA, 120 bp, Artificial Sequence
  ENSG00000066933_98 (sequence is synthesized)
gattgggtattgaaagggtaacagcaaaatgatgattgtggagatggatctattaggtctcatgttggtcccctggttgaaactattttcaaaaaagccccaacaatgggcctgtcacct

SEQ ID NO: 50692 - DNA, 120 bp, Artificial Sequence
  ENSG00000066933_99 (sequence is synthesized)
tgctagtcatccattcttaatgcctatttatcagccctctgaggtcatataaaagttgcaccttttgaaccaagtatttgtatttactatgggaaaggtgtggactacagattcgtatta

SEQ ID NO: 50693 - DNA, 120 bp, Artificial Sequence
  ENSG00000066933_100 (sequence is synthesized)
ggtgtggactacagattcgtattatattattttaatggattttaagtaatttataagtatgctgagtgtaaattttttttaaaaactgtattataaaaggacatatcctgtgaaatataa

SEQ ID NO: 50694 - DNA, 120 bp, Artificial Sequence
  ENSG00000066933_101 (sequence is synthesized)
tctataagaagaatgatttatctcacccacggaactgattacattccggatgcaatcaataggcactttgtaatttcctttttgtttttttttctttgctggggggttgaggggtaacaa

SEQ ID NO: 50695 - DNA, 120 bp, Artificial Sequence
  ENSG00000066933_102 (sequence is synthesized)
gataccatctgtataaagtgcagtttgtgtcactcaaaatatgcactgtatggctacacaaaagcagcttgatgaacaaatcaccccatggctcattaaagaacaaagcttccagaagca

SEQ ID NO: 50696 - DNA, 120 bp, Artificial Sequence
  ENSG00000066933_103 (sequence is synthesized)
tgaagccttcctttaatgatgatagtttctaaagtgaattatttgaatctctttgcatgttttggctctgttaatctaactcttgtctctaaatagatgctgagagtgtaaatctagatg

SEQ ID NO: 50697 - DNA, 120 bp, Artificial Sequence
  ENSG00000066933_104 (sequence is synthesized)
gaattcttgctatgagattctcaaggacaaaaatcctgcttctgtagtcaatctagtgtcatctcttaactgatttgtgactatgaacagtttttcttttctgtaaaagagttatactgc

SEQ ID NO: 50698 - DNA, 120 bp, Artificial Sequence
  ENSG00000066933_105 (sequence is synthesized)
ctttaaaataatgaggataaagtcagagcatctgttcatgaagtgttcattttcttttcctttactcttagttcatggatttttaaaaactttgaaatttagaaatagataaagcaggat

SEQ ID NO: 50699 - DNA, 120 bp, Artificial Sequence
  ENSG00000066933_106 (sequence is synthesized)
actttttctgtatgcctcccccttcaatcataaaatctctcatctcattttctgtgggagggcaacttcataagcacttttggcctactggaaaccaaactattgtttgctgtagctcta

SEQ ID NO: 50700 - DNA, 120 bp, Artificial Sequence
  ENSG00000066933_107 (sequence is synthesized)
gtcttagatagggccattgctgcatagagaagattttgtgatacatatgcagttgagatttatgcctttcagtagaaatgttatagggctcacctgtgctttcaggactcccaaagtgat

SEQ ID NO: 50701 - DNA, 120 bp, Artificial Sequence
  ENSG00000066933_108 (sequence is synthesized)
ttacgtggctttttgggatgtgcactagtagtaaaacttttaagtttagcttttaaatgtttgagacaaatagatatatttgagagagtgtatttctaaaaatacatgtaaaataattga

SEQ ID NO: 50702 - DNA, 120 bp, Artificial Sequence
  ENSG00000066933_109 (sequence is synthesized)
acctagtttccattttttagattgtaaagtatttgaactggtctttgtagatgtatagggagaattatagtttattagagaaataaaaggactatctcaaacctgctttgccttttacaa

SEQ ID NO: 50703 - DNA, 120 bp, Artificial Sequence
  ENSG00000066933_110 (sequence is synthesized)
agtgatttctaagaggttatctttgtaaaaagctttaaggaaaattttttttctttaagatgctttcttgtttattatgacaaacttctaatcaagaaaaccactcaaaattgattagca

SEQ ID NO: 50704 - DNA, 120 bp, Artificial Sequence
  ENSG00000066933_111 (sequence is synthesized)
tcctgctaagacataattgagtaagagaagaaacttttcttgtatttactgtcaaagcctatttactttattcacattatctgtatattcctttggcatttaaaatctattatttgtgaa

SEQ ID NO: 50705 - DNA, 120 bp, Artificial Sequence
  ENSG00000066933_112 (sequence is synthesized)
agctagttgttacatatctgttattatcaatatcggcaatgacatgcaatgttattaatgataaacaacctgtattttctctaccttgataaagtctagattccttattttctaatcttg

SEQ ID NO: 50706 - DNA, 120 bp, Artificial Sequence
  ENSG00000066933_113 (sequence is synthesized)
ttttcccttctggctagtacagagcttccatataataatctctttttgaaaatttgtattcaacataacatgcatatacaaaagtacacaaagcaaaaatgtatagttcagtggagtacc

SEQ ID NO: 50707 - DNA, 120 bp, Artificial Sequence
  ENSG00000066933_114 (sequence is synthesized)
acaaagtaaacacaaccctggaactaccacctaggttaagaaacacaacattccagccacccaaaatttctccttggaaaaaactttaaaatttttactttttataaaggaaaagaaaaa

SEQ ID NO: 50708 - DNA, 120 bp, Artificial Sequence
  ENSG00000066933_115 (sequence is synthesized)
caggccaaagagaggttgccagaccggcccataaaaagaaagctcgaatggcgcggacgcgctccgatttcttgactagaggtacttttgccgatggggagggggatacagaggaagatg

SEQ ID NO: 50709 - DNA, 120 bp, Artificial Sequence
  ENSG00000066933_116 (sequence is synthesized)
attacgatgacattattgagccccttctctcccttgaccaagcttctcactgtgagctagggcctgcacccagcctgggtcaggcctctcacagtgactccgaaatggtaattttacagc

SEQ ID NO: 50710 - DNA, 120 bp, Artificial Sequence
  ENSG00000066933_117 (sequence is synthesized)
aatataagaaaaatagcaagcaaatctgatggaaatagtctttgctaatctaaagctaaccttcacagcttcttcccatgtaatggtttgtgcatgggaaacctcagtgaacacagcaac

SEQ ID NO: 50711 - DNA, 120 bp, Artificial Sequence
  ENSG00000066933_118 (sequence is synthesized)
taagctaaaccttaatttaatagaactcaaataaagggcactttaaaaagccacaaattaggcaaaattaagattatttgacttggcactaatgtagaaattttccatgttgtatcctaa

SEQ ID NO: 50712 - DNA, 120 bp, Artificial Sequence
  ENSG00000066933_119 (sequence is synthesized)
aaggtctagagcagtggtccttacattttttctgtaaacggccagataacaaatattttagactttgtgggtcatatagtctctattgcaactacctaacttaactacttaactcaccca

SEQ ID NO: 50713 - DNA, 120 bp, Artificial Sequence
  ENSG00000066933_120 (sequence is synthesized)
ctgtagtgtgaaagcagccatagacactaagtaaacaaatgggcatgaccgtcttgtaataaaactgcaaaaacagacagtggattgtatttgacctgttggccatagtttactgatccg

SEQ ID NO: 50714 - DNA, 120 bp, Artificial Sequence
  ENSG00000066933_121 (sequence is synthesized)
tggtttagtttactgatccttggtctaaaataatccagtagcttttagctacaatgcacttttacattttttgcctgtaaactttcttcctccacctcactttccactaataagaaataa

SEQ ID NO: 50715 - DNA, 120 bp, Artificial Sequence
  ENSG00000066933_122 (sequence is synthesized)
acatgaattttaaaacatatagtgagcaaaaagtgtcttcctggaccaacccagccaaatagaaggctatatgtaatgtgaatttgtattaatcacacaatataacattggtgttgtgtt

SEQ ID NO: 50716 - DNA, 120 bp, Artificial Sequence
  ENSG00000066933_123 (sequence is synthesized)
tgaataaagctgcaccattttaagctaagaatataactatatcatcttctcagcccaaatcaggtgtatatgtggtttgacaagtattatagtatattgatgggtatattaatgcaaaga

SEQ ID NO: 50717 - DNA, 120 bp, Artificial Sequence
  ENSG00000066933_124 (sequence is synthesized)
attttattttggaattgtcctagaaatatataagataaagaccgtatgtctaatatgaaccagaacatcactgatgaagtagagtgaaataacattttatttccatacatatctgtaact

SEQ ID NO: 50718 - DNA, 120 bp, Artificial Sequence
  ENSG00000066933_125 (sequence is synthesized)
gagctctctaatattctttagtgtctgtcaattatcagagaaaaattttagaatggtctttatttgactcattaaatattctatctttgaactgttttaagctgtttgaattgtcaaaga

SEQ ID NO: 50719 - DNA, 120 bp, Artificial Sequence
  ENSG00000066933_126 (sequence is synthesized)
tctaattaattgaaatttctcctattgtccagaatactctcgttgtcttttatcttttgttggaggtagacccagtttttaagtgacaaaagtgatgttttatgaaggcaaaaacaacaa

SEQ ID NO: 50720 - DNA, 120 bp, Artificial Sequence
  ENSG00000066933_127 (sequence is synthesized)
caacaaaaagagaaaaatgcaaaacaagtcccctgattagataaatgagtcattaacctgagccgaactgtaggattatagaaattggaaacattctgtgtatctgataatatgtataat

SEQ ID NO: 50721 - DNA, 120 bp, Artificial Sequence
  ENSG00000066933_128 (sequence is synthesized)
tagagccaaaatcttcagtgtagaataaaataatagcattttggaggtgccctgtatttgagttataaataaggaaatatactgtgttatctgattaacagttaaatacgaaattatgta

SEQ ID NO: 50722 - DNA, 120 bp, Artificial Sequence
  ENSG00000066933_129 (sequence is synthesized)
atggaacaaactaattttgatgaaaagtcctgctttgtctagtatacatagatttattgtttgcagaaaaactttggcattatgactgctgttttgtttctgagagtttcctttgtaaca

SEQ ID NO: 50723 - DNA, 120 bp, Artificial Sequence
  ENSG00000066933_130 (sequence is synthesized)
acccttagtccttttggtgatagacttcttttacactgggaacttttactgagatgaaccaggaagttgggctttctgcttggagcattcagctcctttcagtgttctagcctctgttca

SEQ ID NO: 50724 - DNA, 120 bp, Artificial Sequence
  ENSG00000066933_131 (sequence is synthesized)
cctgcttgacggtcactgcatgccagtagttgtagagcacttccctgcacagtgtgttagtcacgtcgccagctttctcattttcttctctttcaccacgagctattttaggaacaggtg

SEQ ID NO: 50725 - DNA, 120 bp, Artificial Sequence
  ENSG00000066933_132 (sequence is synthesized)
gtggtgcttgtttctggtggacactgcatgaagaagctttgctttgtagaatatgtggatagttacttaccagggttggggatggggtgggtaggaacaatttttaaatgtgtttctctt

SEQ ID NO: 50726 - DNA, 120 bp, Artificial Sequence
  ENSG00000066933_133 (sequence is synthesized)
tttatttatcttgagaatattccacgttctaacattatctgatattgtgaagatgaagatgtattgtgtctaaataaaatctactacaatctcacagtattttctggattttaaatgtat

SEQ ID NO: 50727 - DNA, 120 bp, Artificial Sequence
  ENSG00000066933_134 (sequence is synthesized)
ttgattttctaggtacatggagttttaaaagctggattttttttttctggacaaactgattttattactctgaagtgtgtcattaaatcttggaagaaattgctgtatgacctttctaat

SEQ ID NO: 50728 - DNA, 120 bp, Artificial Sequence
  ENSG00000066933_135 (sequence is synthesized)
tgtgaagtaacccaatctaatgggataaagacattcacaaatgaattgaaggagatttgagtttttaaattattaatcagttgttacctgctgtgggaggggaaacaagtgtagtagttt

SEQ ID NO: 50729 - DNA, 120 bp, Artificial Sequence
  ENSG00000066933_136 (sequence is synthesized)
ccctccttagtgactttggtgttttttaacctcttacttcaaacgctgccgtttgaataactgtttagtctctatgtgctgctctcactccatttttatacacaccacattggcatttac

SEQ ID NO: 50730 - DNA, 120 bp, Artificial Sequence
  ENSG00000066933_137 (sequence is synthesized)
tcaagaagaatggcgttttctgctaagcagttgtttttaagatagtttttttttagtttctgtcttctgaatggtaagcgggttagtaaaatcatttctattccttatttataggattag

SEQ ID NO: 50731 - DNA, 120 bp, Artificial Sequence
  ENSG00000066933_138 (sequence is synthesized)
tataggaaacattatacttttctctgtacagttttcttttatcatcccccagatttaaagcagtcatctctatggatatgacttctgaatggctctccagaatttcaatcttcattactt

SEQ ID NO: 50732 - DNA, 120 bp, Artificial Sequence
  ENSG00000066933_139 (sequence is synthesized)
ctagcatagtaaaactaaatttctcattattccccccaaactgctgtcacttcttatattcctatttctgctattctctgagatactctctgatccttgtctgtgttgaattttctttct

SEQ ID NO: 50733 - DNA, 120 bp, Artificial Sequence
  ENSG00000066933_140 (sequence is synthesized)
ctctgatgtctactccatagactgccagaaaaacctgttgatcaaacaaagctgtttattagcttattacagtaagagaaaacccactttgactgtgtcttagtaatatctcacaaggga

SEQ ID NO: 50734 - DNA, 120 bp, Artificial Sequence
  ENSG00000066933_141 (sequence is synthesized)
gaagtcaggagaggatattcataaagttttaggacctgggctaggtgattttgaggttggtcttgcgtggtagaaaactggttgttattgaacaaagttcattacttaagagttttggat

SEQ ID NO: 50735 - DNA, 120 bp, Artificial Sequence
  ENSG00000066933_142 (sequence is synthesized)
tggcagccttaagacagcagccacactgttgactatacacttagtatttatatgtgtattttatttctctaaaaaaagtcaggaccagtttatagcattgcagctatctgttctttgaag

SEQ ID NO: 50736 - DNA, 120 bp, Artificial Sequence
  ENSG00000066933_143 (sequence is synthesized)
atttggcagaatttttctatgaaaccacctgggattggtacttttttgtggtgtagttcctggataagtttttctttttttcttctagggaaatcagtcttttttaaaccttttatctaa

SEQ ID NO: 50737 - DNA, 120 bp, Artificial Sequence
  ENSG00000066933_144 (sequence is synthesized)
cagggtcaattttggtaaacccttttttcttataaaattatcaatttcatctaacttttcaatttatttgcacagaggtctggaaagtaagatctgggcacagagccatgtgcctgtagt

SEQ ID NO: 50738 - DNA, 73 bp, Artificial Sequence
  ENSG00000066933_145 (sequence is synthesized)
tggaaagtaagatctgggcacagagaactggggcccaggagtgcagggctgcagtgagctgtgattgtaccac

SEQ ID NO: 50739 - DNA, 120 bp, Artificial Sequence
  ENSG00000066933_146 (sequence is synthesized)
actccaaaggacaatatgagtattcccctgtaagtgaaatgtttatttatgtataaatgggaaacttcttggagtatttttattaaggtgccttgttctgctccaactatttgtgtaaag

SEQ ID NO: 50740 - DNA, 120 bp, Artificial Sequence
  ENSG00000066933_147 (sequence is synthesized)
tggctgctcaacttggccattttctctttgtaaaaatattccctaattgttgactctaccatcacctgaagttggatgtagttatatcctaggaatccttgactgatcatgaatagcaga

SEQ ID NO: 50741 - DNA, 120 bp, Artificial Sequence
  ENSG00000066933_148 (sequence is synthesized)
gtaaatactgggttcctccccattaagtgagaagcatttgtgaagggcagtacagtgcctataaacatagtaggcattcaccgaatactggttgctttacagctgtgaagtttagtagtt

SEQ ID NO: 50742 - DNA, 120 bp, Artificial Sequence
  ENSG00000066933_149 (sequence is synthesized)
gaaggttgtttgtttcaggctttaaagaagttaatttgttttgttacagctgttggcctatttatggtcatcattacgttcattatacttctttgtatgtgataaacacataacataaaa

SEQ ID NO: 50743 - DNA, 120 bp, Artificial Sequence
  ENSG00000066933_150 (sequence is synthesized)
tttcccatcttaaccatttttaaataatatagtacagtagtgttaactgtatatacattgttttgcaaaagatctctagaactttttcttcttgtaaaataaaactctgtacccattgaa

SEQ ID NO: 50744 - DNA, 120 bp, Artificial Sequence
  ENSG00000066933_151 (sequence is synthesized)
ccttccaaaggcatcattaagcaagctaatggaaacacttggtcaagcagaaccatattttgtaaaatgcattcgctctaatgctgaaaagctgcccttaaggttcagtgatgtcttggt

SEQ ID NO: 50745 - DNA, 120 bp, Artificial Sequence
  ENSG00000066933_152 (sequence is synthesized)
ctgagaataaggcaaagaccaggttgtcactgattcgtagatcaatgaaacctgtactaattgcagttagattcatgaacattacccgcaattcagtctcgggaaaggggcgtattcgtc

SEQ ID NO: 50746 - DNA, 120 bp, Artificial Sequence
  ENSG00000066933_153 (sequence is synthesized)
aggtataacccggaaaaatcccagaacacctctttctgatctccagggcatgaatgctctaaatgaaaaaaaccaacatgatacatttgatattgcctggaatggcagaactgggattcg

SEQ ID NO: 50747 - DNA, 120 bp, Artificial Sequence
  ENSG00000066933_154 (sequence is synthesized)
gcgctgagaatccaggtccagaatcgggagggagcacggatacgccagaatctgagtgggtgggagagcgatccactgccgagacaaaccgaagtggggaggaggcttcttacctgcctc

SEQ ID NO: 50748 - DNA, 120 bp, Artificial Sequence
  ENSG00000066933_155 (sequence is synthesized)
gggcctcaccaccccaaccagccttcaggcacctctgtgttggccggaaagcgacagctacggtcgcaaactcagaggtttcgtccccaaccttgcgacatccctttccagtacagggag

SEQ ID NO: 50749 - DNA, 120 bp, Artificial Sequence
  ENSG00000066933_156 (sequence is synthesized)
tcagcataggctgcatgaagaaattgtgtgtctatgtgtgttcacttgcaaatttctacttttgtggacgttggagctcttccattattttatgtataacccggaaaaatcccagaacac

SEQ ID NO: 50750 - DNA, 120 bp, Artificial Sequence
  ENSG00000066933_157 (sequence is synthesized)
tagcagcaaactcctggagagagcccatggaattctcacgtcagtactaatcagtaatgtaaattgttttttgttttttgttttttgtctggtttaaaatttctggcagaaaaaaatgaa

SEQ ID NO: 50751 - DNA, 120 bp, Artificial Sequence
  ENSG00000066933_158 (sequence is synthesized)
gaaggaagatggtgaaatgttattttcatgggaagaattttgactgaaacaagactcaaagttatttaggtagcgtttacagccatgaatctcatgtgttataaagcttgtgtttttgtt

SEQ ID NO: 50752 - DNA, 120 bp, Artificial Sequence
  ENSG00000066933_159 (sequence is synthesized)
catgtgtcacatggcaagagagagggaacgagatggagaagtaggagtgccacacttttaaataaccagattttggtgaattcagaacaaaaactcattcattactttgaagagagcccc

SEQ ID NO: 50753 - DNA, 120 bp, Artificial Sequence
  ENSG00000066933_160 (sequence is synthesized)
aatccattcatgagggatctgcctccatgacccaaacacctcctaccaggccccatctccaccatgggggaatcacatttcaatatgaggtttggagggacaagcatccaaagtatgtta

SEQ ID NO: 50754 - DNA, 120 bp, Artificial Sequence
  ENSG00000066933_161 (sequence is synthesized)
tagctgggccaggccaaagagaggtaagttttgagtttttgtttatctatcttctatacaaaagagatgtacattattttggaaattattattcttgtaggtagagcacctcatctaccc

SEQ ID NO: 50755 - DNA, 120 bp, Artificial Sequence
  ENSG00000066933_162 (sequence is synthesized)
atttactcccaagtgtttttagagaaagaagccatgagcggagattgttataattatgaaggtgtactccaggcagggaatggtgcctaaaaacccagttgctaagaaaaagaaggcaat

SEQ ID NO: 50756 - DNA, 120 bp, Artificial Sequence
  ENSG00000066933_163 (sequence is synthesized)
gcatgaatgctctaaatgaaaaaaaccaacagtaagtgtgtttggtttatgttttcaaggacgtatagaagaaataactaacattcttattgatatttttgtgactttaaaagtttgaag

SEQ ID NO: 50757 - DNA, 120 bp, Artificial Sequence
  ENSG00000066933_164 (sequence is synthesized)
gagcctttatcctgtcatcttttggctctttaaaaatcattgcatattccatctcttttaaattattgattagatatatgaagaacttataatagcaagttaagccatgaaagtaataac

SEQ ID NO: 50758 - DNA, 120 bp, Artificial Sequence
  ENSG00000066933_165 (sequence is synthesized)
caccttttgggataaataaaaggagatttgaaaaacaatacttagcgttctagatttattagatcctgcatcttttgtctctatctttaaatggttttcactttcttgcctttccacttg

SEQ ID NO: 50759 - DNA, 120 bp, Artificial Sequence
  ENSG00000066933_166 (sequence is synthesized)
tcctgtttattttcattgaccaagtcatctttatttcagattactttatatagagttttcagtaggctctattatttcaatgaatctctgaataatatcaatgttttgtgtgtttttaaa

SEQ ID NO: 50760 - DNA, 120 bp, Artificial Sequence
  ENSG00000066933_167 (sequence is synthesized)
tagctcaagtaattctgtaacctgaatttaaattacagtgctatcatatatttacttggcattaaatctttcacatatgtaattattacagacatcacagcgattttcgtcagttgatga

SEQ ID NO: 50761 - DNA, 120 bp, Artificial Sequence
  ENSG00000067048_0 (sequence is synthesized)
agtgtaagagttccgctattcggtctcacacctacagtggactacccgatttttcgcttctcttcagggatgagtcatgtggtggtgaaaaatgaccctgaactggaccagcagcttgct

SEQ ID NO: 50762 - DNA, 120 bp, Artificial Sequence
  ENSG00000067048_1 (sequence is synthesized)
aatctggacctgaactctgaaaaacagagtggaggagcaagtacagcgagcaaagggcgctatatacctcctcacttaaggaacagagaagcatctaaaggattccatgataaagacagt

SEQ ID NO: 50763 - DNA, 120 bp, Artificial Sequence
  ENSG00000067048_2 (sequence is synthesized)
tcaggttggagttgcagcaaagataaggatgcatatagcagttttgggtctcgagattctagaggaaagcctggttatttcagtgaacgtggaagtggatcaaggggaagatttgatgat

SEQ ID NO: 50764 - DNA, 120 bp, Artificial Sequence
  ENSG00000067048_3 (sequence is synthesized)
cgtggacggagtgactatgatggtattggcaatcgtgaaagacctggctttggcagatttgaacggagtggacatagtcgttggtgtgacaagtcagttgaagatgattggtcaaaacca

SEQ ID NO: 50765 - DNA, 120 bp, Artificial Sequence
  ENSG00000067048_4 (sequence is synthesized)
cttccaccaagtgaacgcttggagcaagaactgttttctggaggaaacacggggattaactttgagaaatatgatgatataccagtagaggcaaccggcagtaactgtcctccacatatt

SEQ ID NO: 50766 - DNA, 120 bp, Artificial Sequence
  ENSG00000067048_5 (sequence is synthesized)
gagaattttagcgatattgacatgggagaaattatcatggggaacattgaacttactcgctatactcgtcctactccagtgcaaaaacatgccattcctattattaagggaaaaagagac

SEQ ID NO: 50767 - DNA, 120 bp, Artificial Sequence
  ENSG00000067048_6 (sequence is synthesized)
ttaatggcttgtgcccaaacaggatctgggaaaactgcagcatttcttttacccatactgagtcagatatatacagatggtccaggagaagctttgaaggctgtgaaggaaaatggaagg

SEQ ID NO: 50768 - DNA, 120 bp, Artificial Sequence
  ENSG00000067048_7 (sequence is synthesized)
tatgggcgccgcaaacaatatccaatatccttggttttagccccaacaagagaattggctgtacagatctatgaggaagccagaaaattttcctaccgatctagagttcgtccttgtgta

SEQ ID NO: 50769 - DNA, 120 bp, Artificial Sequence
  ENSG00000067048_8 (sequence is synthesized)
gtttatggtggtgctgatattggtcagcagattcgggacttagaacgtggatgccacttgttagtagccactccaggacgtctagtggatatgatggaaagaggaaagattggattagac

SEQ ID NO: 50770 - DNA, 120 bp, Artificial Sequence
  ENSG00000067048_9 (sequence is synthesized)
ttctgcaagtacttagtgttggatgaagctgataggatgctggatatgggatttgaacctcagatacgtcgtatagttgaacaagatactatgccaccaaagggcgttcgtcacaccatg

SEQ ID NO: 50771 - DNA, 120 bp, Artificial Sequence
  ENSG00000067048_10 (sequence is synthesized)
atgtttagtgctacttttcctaaggaaatacagatgcttgctcgtgactttttggatgaatatatctttttggctgtaggcagagtaggctctacctctgagaacatcacacagaaagta

SEQ ID NO: 50772 - DNA, 120 bp, Artificial Sequence
  ENSG00000067048_11 (sequence is synthesized)
gtttgggtggaagacttagataaacggtcatttctactggacattttaggtgcaacagggagtgattcacttactttagtgtttgtggagaccaaaaagggagcagattccctggaggat

SEQ ID NO: 50773 - DNA, 120 bp, Artificial Sequence
  ENSG00000067048_12 (sequence is synthesized)
ttcttataccatgaaggatatgcttgtactagtattcatggagaccggtcacagagagatcgagaggaggcccttcaccagtttcgctcaggaaaaagcccaattctagtggctacagct

SEQ ID NO: 50774 - DNA, 120 bp, Artificial Sequence
  ENSG00000067048_13 (sequence is synthesized)
gtggcagcacgaggactagacatttcaaatgtgagacatgttatcaattttgatttgccaagtgatattgaagaatatgtgcatcgtattggccgtacaggacgtgtaggaaacctgggc

SEQ ID NO: 50775 - DNA, 120 bp, Artificial Sequence
  ENSG00000067048_14 (sequence is synthesized)
cttgccacctcattctttaatgaaaaaaatatgaatattacaaaggatttgttggatcttcttgtagaagctaaacaagaagtgccttcttggttggaaaatatggcttatgaacaccac

SEQ ID NO: 50776 - DNA, 120 bp, Artificial Sequence
  ENSG00000067048_15 (sequence is synthesized)
tacaagggtggcagtcgtggacgatctaaaagtaatagattcagtggaggatttggtgccagagactatcgacaaagtagtggttccagcagttctggctttggtgctagtcgcggaagc

SEQ ID NO: 50777 - DNA, 120 bp, Artificial Sequence
  ENSG00000067048_16 (sequence is synthesized)
agcagccgcagtggtggaggtggttacggcaacagcagaggatttggtggaggtggctatggaggcttctacaatagtgatggatatggaggaaattataactcccagggggttgactgg

SEQ ID NO: 50778 - DNA, 120 bp, Artificial Sequence
  ENSG00000067048_17 (sequence is synthesized)
tggggcaactgaatctgctttgcagcaaagtcacccttacaaagaagctaatatggaaaccacatgtaacttagccagactatattgtgtagcttcaagaacttgcagtacattaccagc

SEQ ID NO: 50779 - DNA, 120 bp, Artificial Sequence
  ENSG00000067048_18 (sequence is synthesized)
gaagatgtaattgctctagtttggattaaactcttcccctcctgctttagtgccaccccaaactgcatttataattttgtgactgaggatcgtttgtttgttaacgtactgtgactttaa

SEQ ID NO: 50780 - DNA, 120 bp, Artificial Sequence
  ENSG00000067048_19 (sequence is synthesized)
ctttagacaacttactactttgatgtcctgttggctcagtaatgctcacgataccaattgttttgacaaaataaatttactaaacttggcctaaaatcaaaccttggcacagaggtatga

SEQ ID NO: 50781 - DNA, 120 bp, Artificial Sequence
  ENSG00000067048_20 (sequence is synthesized)
tacaactttaacaggagtcatcaattcatccataaatataaaaagggaaaaaaacttaaggcagtagtctgcattaggactgtttgagttttgcagacttggggttgggagaacatctta

SEQ ID NO: 50782 - DNA, 120 bp, Artificial Sequence
  ENSG00000067048_21 (sequence is synthesized)
aagcattaaagcatagttttttgtatggccaaccttactaaattaagttctgacttgctcactctatcctggataggcacttgggaacttacactctttaagccattccagtcatgatga

SEQ ID NO: 50783 - DNA, 120 bp, Artificial Sequence
  ENSG00000067048_22 (sequence is synthesized)
ggtggaatgtatcagtataccaattaatatttttgaaagagctcttttaggttaatttaagtacagcaatttctcatgtaatgtttagggagtttattctaacctaggcaaacggcatgc

SEQ ID NO: 50784 - DNA, 120 bp, Artificial Sequence
  ENSG00000067048_23 (sequence is synthesized)
tatcacaagaaaggtttaaagctttgataaaatgggggagatttaatcagtttttttaatgcctgctataaaaatttgaaatattagaatggccgaccatggcagtgaccaggcctcact

SEQ ID NO: 50785 - DNA, 120 bp, Artificial Sequence
  ENSG00000067048_24 (sequence is synthesized)
acaggcctggttggattctggtctttaatgcatgctagtgttgatgttttttggtcaagaacggtttaaacaggaaggattgtgcagcaggctttaatttaatgtagattcatactgctc

SEQ ID NO: 50786 - DNA, 120 bp, Artificial Sequence
  ENSG00000067048_25 (sequence is synthesized)
tgttaaagctgcattgaaatgttaaaatggcttacacttgcagactttgcaaatcttaagactaacaaatccttgaaatcacacagcttgcaaatacgtactaaactgcacaaggtgtgt

SEQ ID NO: 50787 - DNA, 120 bp, Artificial Sequence
  ENSG00000067048_26 (sequence is synthesized)
gttctatatgtgcagttttagcgtattttagttgcataggtttccatggtatttatagtctcttgtgctaaatttggccaaagatgattgtccaccactaaaaatgcctctcccacttgg

SEQ ID NO: 50788 - DNA, 120 bp, Artificial Sequence
  ENSG00000067048_27 (sequence is synthesized)
aattctgtactgattttgtggccagatgcaatgatctttaaaaacaaatcttttcaatggcataagaagttgacaaaaatttcttaaagtgcaatagattttcaagtgtattgtgccttg

SEQ ID NO: 50789 - DNA, 120 bp, Artificial Sequence
  ENSG00000067048_28 (sequence is synthesized)
ttctaaaacttttaagtaggtgcacttgacagtattgaggtcatttgttaaggtgctatttcaattagtgtaggtttagactcttgtacatttctcccataactttttacaaagtatttt

SEQ ID NO: 50790 - DNA, 120 bp, Artificial Sequence
  ENSG00000067048_29 (sequence is synthesized)
gttgcacattcagagaattttatatatatatgtcttgtgtgggtgtcctcgaccttccaatcttatttcgtctcttggagattgttgaatgcagccagtgaagaagtagattcctaaatt

SEQ ID NO: 50791 - DNA, 120 bp, Artificial Sequence
  ENSG00000067048_30 (sequence is synthesized)
ttattggggaccatggaatggtagttgagaagaaaactatttgcacacaacagattttagatactttttgctgctagttgtgtaatatttattgaacattttgacaaatatttatttttg

SEQ ID NO: 50792 - DNA, 120 bp, Artificial Sequence
  ENSG00000067048_31 (sequence is synthesized)
taagcctaaaaatgattctttgaaagtttaaagaaacttgaccaaaagacagtacaaaaaacactggcacttgaatgttgaatgtcaccgtatgtgaaataatatattttggggtagtgt

SEQ ID NO: 50793 - DNA, 120 bp, Artificial Sequence
  ENSG00000067048_32 (sequence is synthesized)
gagcttttaatgttaagtctgttaaacttgagtcaaattaagcagacccggcattggcaatgtagctgtaattttctgacaaaatttaagacaaaattgtcaacttgaaactaaaacatg

SEQ ID NO: 50794 - DNA, 120 bp, Artificial Sequence
  ENSG00000067048_33 (sequence is synthesized)
ccaaggttttgatatacttgtcttaagatattaatgaaacacttctgaacactgataggaagtgtccacatccacaaagtttctcttgagttttgttatgtgttttgttgtgtttgattt

SEQ ID NO: 50795 - DNA, 120 bp, Artificial Sequence
  ENSG00000067048_34 (sequence is synthesized)
tcagtgattgtctggtatatttacagtcctcaaacatggttatttctgtcagtgacttaacattcggttttatcagccagcagtattcttcagtaaataaagaatggaattgctgaatgt

SEQ ID NO: 50796 - DNA, 120 bp, Artificial Sequence
  ENSG00000067048_35 (sequence is synthesized)
aatcattgaacctcgagtcactgtaaaagttcagtaattgcttattgtattagttttagatgctggcactgcatgtgctctgtttattctgattttactaaaataaaaagttcaaaagtc

SEQ ID NO: 50797 - DNA, 120 bp, Artificial Sequence
  ENSG00000067048_36 (sequence is synthesized)
agaggggtctggagttcctaggtgaaccccagcagcctaaccctgtcaagtctgtcgagcctctggctggtcacacgtgctgcggaatccactcagctttcctcaggtgcagtcaggtcc

SEQ ID NO: 50798 - DNA, 120 bp, Artificial Sequence
  ENSG00000067048_37 (sequence is synthesized)
atcctgcagagggaccttctgcggacctgttctttcacctccctaacctgaagattgtattcaaaccaccgtggatcgctcacgtaaaatggtcactgcgcctaacacctgggatcccgt

SEQ ID NO: 50799 - DNA, 120 bp, Artificial Sequence
  ENSG00000067048_38 (sequence is synthesized)
aacccttatctatcttggcttcagagagttttttgactagttccaactttgctgaagcttgtcaaagggatgagtcatgtggtggtgaaaaatgaccctgaactggaccagcagcttgct

SEQ ID NO: 50800 - DNA, 120 bp, Artificial Sequence
  ENSG00000067048_39 (sequence is synthesized)
gtatatgtcaaattgtgacactgcaatagttactacttgagttactatattagtgcaattaattacacaactatatatagtaattagtttctcagatctaataatccagtatcaactgag

SEQ ID NO: 50801 - DNA, 120 bp, Artificial Sequence
  ENSG00000067048_40 (sequence is synthesized)
agcctagggaagaaagtaactttaggaggtctataaatgttttttgtcccctcctgtgcctctttcagactgtctttaagaactagcactttctgtttttggaacagtttgtataatgtt

SEQ ID NO: 50802 - DNA, 120 bp, Artificial Sequence
  ENSG00000067048_41 (sequence is synthesized)
gaatgatggatagttgtttcctttggcaaactgagcccaaagaatctgagttttgtatagtggtttatctgtttgtaaacatttatgttttgaaatttgaaaccagtgtatttgtggaaa

SEQ ID NO: 50803 - DNA, 120 bp, Artificial Sequence
  ENSG00000067048_42 (sequence is synthesized)
tgttataaaatcagacatttttgttttaaaaagctttgcaaagccctgttgacttttctaacggatgccagatacaccttattttcatttttttttttttacccctttcacccactgaaa

SEQ ID NO: 50804 - DNA, 120 bp, Artificial Sequence
  ENSG00000067048_43 (sequence is synthesized)
ataagtttgtagatgtaatctgcaaattataaagagaaagtgatgaatttttaaaaacaattgaagttttgggttatgaatttaaaattatatttatgttttaggaaaatggaaggtatg

SEQ ID NO: 50805 - DNA, 120 bp, Artificial Sequence
  ENSG00000067057_0 (sequence is synthesized)
attgcctgctgcgcacccggacgtgcggctcccctcggcctcctcgccatggacgcggacgactcccgggcccccaagggctccttgcggaagttcctggagcacctctccggggccggc

SEQ ID NO: 50806 - DNA, 120 bp, Artificial Sequence
  ENSG00000067057_1 (sequence is synthesized)
aaggccatcggcgtgctgaccagcggcggggatgctcaaggtatgaacgctgccgtccgtgccgtggtgcgcatgggtatctacgtgggggccaaggtgtacttcatctacgagggctac

SEQ ID NO: 50807 - DNA, 120 bp, Artificial Sequence
  ENSG00000067057_2 (sequence is synthesized)
cagggcatggtggacggaggctcaaacatcgcagaggccgactgggagagtgtctccagcatcctgcaagtgggcgggacgatcattggcagtgcgcggtgccaggccttccgcacgcgg

SEQ ID NO: 50808 - DNA, 120 bp, Artificial Sequence
  ENSG00000067057_3 (sequence is synthesized)
gaaggccgcctgaaggctgcttgcaacctgctgcagcgcggcatcaccaacctgtgtgtgatcggcggggacgggagcctcaccggggccaacctcttccggaaggagtggagtgggctg

SEQ ID NO: 50809 - DNA, 120 bp, Artificial Sequence
  ENSG00000067057_4 (sequence is synthesized)
ctggaggagctggccaggaacggccagatcgataaggaggccgtgcagaagtacgcctacctcaacgtggtgggcatggtgggctccatcgacaatgatttctgcggcaccgacatgacc

SEQ ID NO: 50810 - DNA, 120 bp, Artificial Sequence
  ENSG00000067057_5 (sequence is synthesized)
atcggcacggactccgccctgcacaggatcatcgaggtcgtcgacgccatcatgaccacggcccagagccaccagaggaccttcgttctggaggtgatgggacgacactgtgggtacctg

SEQ ID NO: 50811 - DNA, 120 bp, Artificial Sequence
  ENSG00000067057_6 (sequence is synthesized)
gccctggtgagtgccttggcctgcggtgcggactgggtgttccttccagaatctccaccagaggaaggctgggaggagcagatgtgtgtcaaactctcggagaaccgtgcccggaaaaaa

SEQ ID NO: 50812 - DNA, 120 bp, Artificial Sequence
  ENSG00000067057_7 (sequence is synthesized)
aggctgaatattattattgtggctgaaggagcaattgatacccaaaataaacccatcacctctgagaaaatcaaagagcttgtcgtcacgcagctgggctatgacacacgtgtgaccatc

SEQ ID NO: 50813 - DNA, 120 bp, Artificial Sequence
  ENSG00000067057_8 (sequence is synthesized)
ctcgggcacgtgcagagaggagggaccccttcggcattcgacaggatcttggccagccgcatgggagtggaggcagtcatcgccttgctagaggccaccccggacaccccagcttgcgtc

SEQ ID NO: 50814 - DNA, 120 bp, Artificial Sequence
  ENSG00000067057_9 (sequence is synthesized)
gtgtcactgaacgggaaccacgccgtgcgcctgccgctgatggagtgcgtgcagatgactcaggatgtgcagaaggcgatggacgagaggagatttcaagatgcggttcgactccgaggg

SEQ ID NO: 50815 - DNA, 120 bp, Artificial Sequence
  ENSG00000067057_10 (sequence is synthesized)
cacccgcggctgggatgaacgcagccgtacgctcagctgtgcgcgtgggcattgccgacggccacaggatgctcgccatctatgatggctttgacggcttcgccaagggccagatcaaag

SEQ ID NO: 50816 - DNA, 120 bp, Artificial Sequence
  ENSG00000067057_11 (sequence is synthesized)
aaatcggctggacagatgtcgggggctggaccggccaaggaggctccattcttgggacaaaacgcgttctcccggggaagtacttggaagagatcgccacacagatgcgcacgcacagca

SEQ ID NO: 50817 - DNA, 120 bp, Artificial Sequence
  ENSG00000067057_12 (sequence is synthesized)
tcaacgcgctgctgatcatcggtggattcgaggcctacctgggactcctggagctgtcagccgcccgggagaagcacgaggagttctgtgtccccatggtcatggttcccgctactgtgt

SEQ ID NO: 50818 - DNA, 120 bp, Artificial Sequence
  ENSG00000067057_13 (sequence is synthesized)
ccaacaatgtgccgggttccgatttcagcatcggggcagacaccgccctgaacactatcaccgacacctgcgaccgcatcaagcagtccgccagcggaaccaagcggcgcgtgttcatca

SEQ ID NO: 50819 - DNA, 120 bp, Artificial Sequence
  ENSG00000067057_14 (sequence is synthesized)
tcgagaccatgggcggctactgtggctacctggccaacatgggggggctcgcggccggagctgatgccgcatacattttcgaagagcccttcgacatcagggatctgcagtccaacgtgg

SEQ ID NO: 50820 - DNA, 120 bp, Artificial Sequence
  ENSG00000067057_15 (sequence is synthesized)
agcacctgacggagaaaatgaagaccaccatccagagaggccttgtgctcagaaatgagagctgcagtgaaaactacaccaccgacttcatttaccagctgtattcagaagagggcaaag

SEQ ID NO: 50821 - DNA, 120 bp, Artificial Sequence
  ENSG00000067057_16 (sequence is synthesized)
gcgtgtttgactgcaggaagaacgtgctgggtcacatgcagcagggtggggcaccctctccatttgatagaaactttggaaccaaaatctctgccagagctatggagtggatcactgcaa

SEQ ID NO: 50822 - DNA, 120 bp, Artificial Sequence
  ENSG00000067057_17 (sequence is synthesized)
aactcaaggaggcccggggcagaggaaaaaaatttaccaccgatgattccatttgtgtgctgggaataagcaaaagaaacgttatttttcaacctgtggcagagctgaagaagcaaacgg

SEQ ID NO: 50823 - DNA, 120 bp, Artificial Sequence
  ENSG00000067057_18 (sequence is synthesized)
attttgagcacaggattcccaaagaacagtggtggctcaagctacggcccctcatgaaaatcctggccaagtacaaggccagctatgacgtgtcggactcaggccagctggaacatgtgc

SEQ ID NO: 50824 - DNA, 120 bp, Artificial Sequence
  ENSG00000067057_19 (sequence is synthesized)
agccctggagtgtctgacccagtcccgcctgcatgtgcctgcagccaccgtggactgtctgtttttgtaacacttaagttattttatcagcactttatgcacgtattattgacattaata

SEQ ID NO: 50825 - DNA, 120 bp, Artificial Sequence
  ENSG00000067057_20 (sequence is synthesized)
cctaatcggcgagtgcccatctgccccacctgctccagtgcgtgctgtctgtggagtgtgtctcatgctttcagatgtgcatatgagcagaattaattaaacatttgcctatgactccaa

SEQ ID NO: 50826 - DNA, 120 bp, Artificial Sequence
  ENSG00000067057_21 (sequence is synthesized)
agggcctcggtgtgatggagtttcctgaatcagcgcaggcagacgtgggacacccttgtgcaccttttcattttacttctgtttttaaataaaggccctaaatgctgcttaaaataatga

SEQ ID NO: 50827 - DNA, 120 bp, Artificial Sequence
  ENSG00000067057_22 (sequence is synthesized)
ggccgccaccaggagctttgcatccccctgtgtgtggtgccggccacgattagcaacaatgtcccaggcacagaaataagcctgggctccgacactggcctgaatgctgttgttgagacc

SEQ ID NO: 50828 - DNA, 120 bp, Artificial Sequence
  ENSG00000067057_23 (sequence is synthesized)
attccagtaaaaggaccccagcatcaacgttcttcctgcagggctgggttctcagagaaagaaaacgtgatgcagcagaggatgggattgaagaaacaggagagtgaagtggaaatagcc

SEQ ID NO: 50829 - DNA, 120 bp, Artificial Sequence
  ENSG00000067057_24 (sequence is synthesized)
cgcagaggtggctcaagtccccttcctcgcaggagtctggaaggctactgcatagcgtttgccttagtagaaaatggaccatttttgaagcctaggtccctgcaggcctcctggctaact

SEQ ID NO: 50830 - DNA, 120 bp, Artificial Sequence
  ENSG00000067057_25 (sequence is synthesized)
cggctgtcaaagccccttttctctgctttctgagctgtttccaggactgagtgggtgctccctctgtttctctgctttctgagctgtgtccggggctccctctgtttctcttccagccac

SEQ ID NO: 50831 - DNA, 120 bp, Artificial Sequence
  ENSG00000067057_26 (sequence is synthesized)
gtttccgtgggagagatccagccgtggctgtcgacagcagctgccgactgtgcccaatagagaaggtatctgggaaagagcccagcacggggccggggagtgtgagtgtgtcctggcaca

SEQ ID NO: 50832 - DNA, 120 bp, Artificial Sequence
  ENSG00000067057_27 (sequence is synthesized)
ttgtgggcaaagattagcaaaatatttttatagggatcactgaactatgcacacgtcatacaaggagaacaaagccaggagttcacacaggccaaggggaaggccacgtttactcaccat

SEQ ID NO: 50833 - DNA, 120 bp, Artificial Sequence
  ENSG00000067057_28 (sequence is synthesized)
tccatatctgccatgtgtcagtttccatccacagcagcaggccgggaccctgggcctcgaccccaggctcctgctctcctttgaaagtaaaacatgaatcttagttacttgtcctcttga

SEQ ID NO: 50834 - DNA, 120 bp, Artificial Sequence
  ENSG00000067057_29 (sequence is synthesized)
ttgcaatcctagctgcatgttaaaaccaccaaggggtgggtggggcggaggtgggttcaaaaatctgatagccagcttctcctccaggccaagccacagtcctcgctgggacctaggttg

SEQ ID NO: 50835 - DNA, 120 bp, Artificial Sequence
  ENSG00000067057_30 (sequence is synthesized)
gaactctccggaagactcctgccagagtagacacggctgctgggatgacagccctgctgccctggtgggcccccctcctgtagggacagcgtttctgcctcttagctctagtctgcaaga

SEQ ID NO: 50836 - DNA, 120 bp, Artificial Sequence
  ENSG00000067057_31 (sequence is synthesized)
gagaacagctgcgcctcagaaatgggggcagagagctgggtggagggagaggagaggccaaaaacaaactctgtttgggaaatcagagtccgacagccaagaaagagctagcgcggaggc

SEQ ID NO: 50837 - DNA, 120 bp, Artificial Sequence
  ENSG00000067057_32 (sequence is synthesized)
gcttctatgggggctgccccctctcccatcgcagggtaactggcaccaggctgttaagctgtggatgggcaaccgcacagtgcattggatgtatgaacgctgccgtccgtgccgtggtgc

SEQ ID NO: 50838 - DNA, 120 bp, Artificial Sequence
  ENSG00000067057_33 (sequence is synthesized)
ggggatgctcaagggctgggttctcagagaaagaaaacgtgatgcagcagaggatgggattgaagaaacaggagagtgaagtggaaatagcctggcccgcgtgacttaaaccggcccgga

SEQ ID NO: 50839 - DNA, 120 bp, Artificial Sequence
  ENSG00000067057_34 (sequence is synthesized)
atttaacattgaagagcggaaggtggcggagactcggcgcgccccaggccccgggtgcacgtgggggcgccggtgcccggatgatggagtgtcccgatccgtgcaatccctggcggggct

SEQ ID NO: 50840 - DNA, 120 bp, Artificial Sequence
  ENSG00000067057_35 (sequence is synthesized)
agtgtctccagcatcctgcaagtggtgctgtaaggggtgactggagggagaagcctggctgctggtcacaccgcttcccttgtcctggccggcatgctctggtgggcgggacgatcattg

SEQ ID NO: 50841 - DNA, 120 bp, Artificial Sequence
  ENSG00000067057_36 (sequence is synthesized)
gaactggatcagatttatgttttttatagatggggtcctttctgtgtgaacggattggagggtcccggggtgggagctgaggcccaggaagagggcgttgcagccggactgatgtatggg

SEQ ID NO: 50842 - DNA, 120 bp, Artificial Sequence
  ENSG00000067057_37 (sequence is synthesized)
tgggaaggcggccgatgcatttctttgccatttttctccccgccgagcttgggtcctcatggagggcggatggcagacatttcactctgggatccgatgcctgtgcatctggaagacttc

SEQ ID NO: 50843 - DNA, 120 bp, Artificial Sequence
  ENSG00000067057_38 (sequence is synthesized)
cccaggtgcctgggtctaagaaccaccatctgcctttgagtagagtttccataaatgtaacattcgccaatggatggaagatggccgcacctctaaaatcacagggagcttttcagaaga

SEQ ID NO: 50844 - DNA, 120 bp, Artificial Sequence
  ENSG00000067057_39 (sequence is synthesized)
aaatagaatagcacagcggttctcacggactaagctggcaggggacagtcccctaacatctcagctaacacctaacggtgtctgtgtccggtgaaagcggcttcagcagggacagtcaca

SEQ ID NO: 50845 - DNA, 120 bp, Artificial Sequence
  ENSG00000067057_40 (sequence is synthesized)
gagcagcgtggagtgagctggcttgtggggtcgtcttttccgtccccttctatggggcctgggagaagggagcggcagatggccaggcccccaaaacgggacatcgaggtcacctccagg

SEQ ID NO: 50846 - DNA, 120 bp, Artificial Sequence
  ENSG00000067057_41 (sequence is synthesized)
tggctgccatggtggggttgcgggggaccacgttcacacccactccgagggcacatcctggctgctgcacacccttcacctctgcgggatgctgggaccgcatgtttgggcgcggtgggg

SEQ ID NO: 50847 - DNA, 120 bp, Artificial Sequence
  ENSG00000067057_42 (sequence is synthesized)
gggccttgctgcactcactcttgggggagctctgggatggtgggcgcgccccgggcctgggctggagtgactgatcgcttctctgtgaccagacctgcgaccgcatcaagcagtccgcca

SEQ ID NO: 50848 - DNA, 120 bp, Artificial Sequence
  ENSG00000067064_0 (sequence is synthesized)
tgtggccggaggctgatcaggtactgtggacgggcggcggagttcgggagacaggggcagggcggcatcggggagctgcgggacggggcggggaggaggcccgaggtctgagccacccgt

SEQ ID NO: 50849 - DNA, 120 bp, Artificial Sequence
  ENSG00000067064_1 (sequence is synthesized)
gaggtctcggcgcggaggcctggacagctgggggtggcggcgttggtctcccgaactggagggaggccgggccttcccgggctgtggtgggcgcccgcgccccgtggaaggcggaggcgt

SEQ ID NO: 50850 - DNA, 120 bp, Artificial Sequence
  ENSG00000067064_2 (sequence is synthesized)
gagtcggggcgtcagagacgttgccattctttgtcagcggaaaagatcgtcgtctgcgcacagtcacctgaggtttaggaactcgtggaactggaaaccgagtcgcaggagactaagagt

SEQ ID NO: 50851 - DNA, 120 bp, Artificial Sequence
  ENSG00000067064_3 (sequence is synthesized)
tgcgagtctccccttagagaattcagaaacaagcgtagacagcatcgtcagaaacacgagcgtgacgacaccggcctccccgtgccgagtccacgcgtgtgacgcgggtgcatacacctg

SEQ ID NO: 50852 - DNA, 120 bp, Artificial Sequence
  ENSG00000067064_4 (sequence is synthesized)
cgtccgtgcaagagggtgacagcaacacactcaaggcgcttctcctgggaatggagcaggagaagagatggggagcatcgcatagatggaactagacctttttcttgggttggatgatgt

SEQ ID NO: 50853 - DNA, 120 bp, Artificial Sequence
  ENSG00000067064_5 (sequence is synthesized)
gttcccgcgtctactacatgtgttctagaacagatcagacattttgtaatgatgcctgaaataaacactaaccacctcgacaagcaacaggttcaactcctggcagagatgtgtatcctt

SEQ ID NO: 50854 - DNA, 120 bp, Artificial Sequence
  ENSG00000067064_6 (sequence is synthesized)
attgatgaaaatgacaataaaattggagctgagaccaagaagaattgtcacctgaacgagaacattgagaaaggattattgcatcgagcttttagtgtcttcttattcaacaccgaaaat

SEQ ID NO: 50855 - DNA, 120 bp, Artificial Sequence
  ENSG00000067064_7 (sequence is synthesized)
aagcttctgctacagcaaagatcagatgctaagattacctttccaggttgttttacgaatacgtgttgtagtcatccattaagcaatccagccgagcttgaggaaagtgacgcccttgga

SEQ ID NO: 50856 - DNA, 120 bp, Artificial Sequence
  ENSG00000067064_8 (sequence is synthesized)
gtgaggcgagcagcacagagacggctgaaagctgagctaggaattcccttggaagaggttcctccagaagaaattaattatttaacacgaattcactacaaagctcagtctgatggtatc

SEQ ID NO: 50857 - DNA, 120 bp, Artificial Sequence
  ENSG00000067064_9 (sequence is synthesized)
tggggtgaacatgaaattgattacattttgttggtgaggaagaatgtaactttgaatccagatcccaatgagattaaaagctattgttatgtgtcaaaggaagaactaaaagaacttctg

SEQ ID NO: 50858 - DNA, 120 bp, Artificial Sequence
  ENSG00000067064_10 (sequence is synthesized)
aaaaaagcagccagtggtgaaattaagataacgccatggtttaaaattattgcagcgacttttctctttaaatggtgggataacttaaatcatttgaatcagtttgttgaccatgagaaa

SEQ ID NO: 50859 - DNA, 120 bp, Artificial Sequence
  ENSG00000067064_11 (sequence is synthesized)
acagaatgtgaatatgtaggtaaatgattacagaaaaatttatctgcttaacaaacttagaatgactttttccttttaaatttagttctatcattaatttatcattaaatttagttctat

SEQ ID NO: 50860 - DNA, 120 bp, Artificial Sequence
  ENSG00000067064_12 (sequence is synthesized)
ctatcatttggtactatcattaatgtattatatacactgatactttaaaacttgtgtggaaaaaactaacttataattttgtatcacacaccctggatatgtgttctgtttctaagcgac

SEQ ID NO: 50861 - DNA, 120 bp, Artificial Sequence
  ENSG00000067064_13 (sequence is synthesized)
atttgtgagagattattgtaaaatgagagcgagcaaataaaacttaatttaatctttgcagatacatacttatgggaaatttgaacaaatgagtgaaactctgtttttagtaggctgtga

SEQ ID NO: 50862 - DNA, 120 bp, Artificial Sequence
  ENSG00000067064_14 (sequence is synthesized)
cggagcacttgcagaggacttgctatttgccaggtgctttatgtatcattaaatttttctcatagttcagaaaaatgtgcaaaggaaactattgtctcgctccttcaaaacagtcttaat

SEQ ID NO: 50863 - DNA, 120 bp, Artificial Sequence
  ENSG00000067064_15 (sequence is synthesized)
taactttcatattagcagattaaactagcagagcaggttcaagggaaattaaatgatatggaccctaatttgtatcattctgagttgattgtgtggtttattcattctggaaacatgttg

SEQ ID NO: 50864 - DNA, 120 bp, Artificial Sequence
  ENSG00000067064_16 (sequence is synthesized)
atacttacagtcagccactgcttttgataagtgatattgattaggttgaatcttcttgtaaatagtatttaccagttagcaaagtctgtgttttcagaattacagtgagcacagaggtgt

SEQ ID NO: 50865 - DNA, 120 bp, Artificial Sequence
  ENSG00000067064_17 (sequence is synthesized)
tcataaaatgggaattgagtcccactcggtaagagttgcttaaacttgacactgttgacatttgggctggataaaacccctgtggtggggtctgtgctgtgcattgcaggatggtgagca

SEQ ID NO: 50866 - DNA, 120 bp, Artificial Sequence
  ENSG00000067064_18 (sequence is synthesized)
gcgtccctctcatgtgacacccacagttatgccggatgttgccagatgcccctaggggacagagtcaacccccaactgaggaccactgtcctacagagtcaggaaatattgtagggagaa

SEQ ID NO: 50867 - DNA, 120 bp, Artificial Sequence
  ENSG00000067064_19 (sequence is synthesized)
aaaaataacaacaacaaaggcctgtgttaatgttaaatagatgagattatggaatgtgtatattaatgttaaaaattgtaccttgatcaatgtactttttataaacttgccatagatatc

SEQ ID NO: 50868 - DNA, 120 bp, Artificial Sequence
  ENSG00000067064_20 (sequence is synthesized)
tcagatttgaaacctcaagacagatttattattcttaaatgctgtatgataatgaagaaaaataaaaatttatttcttgcaaagttaaatgtttgttaaattcaatagaatgactcattt

SEQ ID NO: 50869 - DNA, 120 bp, Artificial Sequence
  ENSG00000067064_21 (sequence is synthesized)
atggttaactttgggcaatttataatttcagacaagactgtttagcaagtattttattgaaaagtaaaaaaaattgcaatttaatactgtgtttagtttgttaaaattttgatacactaa

SEQ ID NO: 50870 - DNA, 120 bp, Artificial Sequence
  ENSG00000067064_22 (sequence is synthesized)
taggatattgcctgtatagtttccgttgcatttataatattgtttctaatttttttagttttattttctaggaagttttaggctgaaagccacatataattagttatgtgataactatga

SEQ ID NO: 50871 - DNA, 120 bp, Artificial Sequence
  ENSG00000067064_23 (sequence is synthesized)
gttgccatggctactgaattggacatgggacccttagactgctacccagcaccttgttaagtacttagcaagagttagatactactgttgtaatattactaggatgccatccagaaaatg

SEQ ID NO: 50872 - DNA, 120 bp, Artificial Sequence
  ENSG00000067064_24 (sequence is synthesized)
taaggaatgtcttttgacctgataaactccttagaactccttcatcttttataaagaggagtatccctctcctagatatagctgcttctgaccccaaaggcagatgtgttggttttcaac

SEQ ID NO: 50873 - DNA, 120 bp, Artificial Sequence
  ENSG00000067064_25 (sequence is synthesized)
tagaaagctaaatggtacctataaattttttttttcttaaactgttttaaactcttaatcttcaaaatatatacttctttgattctggtcaaaccattgccaactcctttaaggacaaag

SEQ ID NO: 50874 - DNA, 120 bp, Artificial Sequence
  ENSG00000067064_26 (sequence is synthesized)
tagaggtggccttctaataattgctgattctgtttccctacctatattatcaagagaacaagaccaaaacagaaaatggtataataggaaggaaggcacattttcttcttacttggccct

SEQ ID NO: 50875 - DNA, 120 bp, Artificial Sequence
  ENSG00000067064_27 (sequence is synthesized)
ggcacctggggacaagtccaggtcgtacccgcagtgcatccctgtgggaactgccctccacctgctccctggggacacgtccaggtcgtacccgcagtgcgtccctgtgggaactgccct

SEQ ID NO: 50876 - DNA, 120 bp, Artificial Sequence
  ENSG00000067064_28 (sequence is synthesized)
acggctgaaagctgagctaggaattcccttggaagaggtaaccagctctcctacacaaccatacaagctgaaacctaaacatactataaaaaggtttttaataaaatttttaaattcaaa

SEQ ID NO: 50877 - DNA, 120 bp, Artificial Sequence
  ENSG00000067064_29 (sequence is synthesized)
cgcgcgtctgccgttgtcacaggccagggaggtggcaccaccaggcgaagcttggcgagattgtgtcgtcaagcgcgtacgggcgccaattggccgggcgatgtggcgtggactggcgct

SEQ ID NO: 50878 - DNA, 120 bp, Artificial Sequence
  ENSG00000067064_30 (sequence is synthesized)
ggcgcgagcgattggctgcgcggcccgggggcggggccagtgggcggtgcgcgccgcagactgtgctcaaagcgggcgccatccgggaccggcggttgtctgtggccggaggctgatcag

SEQ ID NO: 50879 - DNA, 120 bp, Artificial Sequence
  ENSG00000067064_31 (sequence is synthesized)
gaaaggtgctgctttgaaacagtctttcttgtaaagcgatttgtgtaggcatttccgatttgctgagaagagcactctgttcaaggaagtgcagtcttcagtaataccgtattttctcgt

SEQ ID NO: 50880 - DNA, 120 bp, Artificial Sequence
  ENSG00000067064_32 (sequence is synthesized)
tggttccagttcgttaaatagtgtggtcattagcatctgctttgctgtcttcctgttacagcgatttctcttcacttcatgcctgttactcggcttcttcagagttattctggattcata

SEQ ID NO: 50881 - DNA, 120 bp, Artificial Sequence
  ENSG00000067064_33 (sequence is synthesized)
ggcaccatgcagggaagcatgtgccttcaccactttccgagaactgaatgtccttgatagggaacttgactgccggaaaggggccaccagcatcaccatttccttcactcgacggccaac

SEQ ID NO: 50882 - DNA, 120 bp, Artificial Sequence
  ENSG00000067064_34 (sequence is synthesized)
ttccttgcccagtgcagagctcttcctcaccatagccatgcagagactatgcatgtggataaaccatgggaaaaagcaaaagcagcagcaagttactaatgttattctgaactgcaggga

SEQ ID NO: 50883 - DNA, 120 bp, Artificial Sequence
  ENSG00000067066_0 (sequence is synthesized)
gcttggggcctgggcagccacactgcacgcaggctgggccgactgaggggctcagaggccaggctctgaggcccacgcagggcctagggtgggaagatggcaggtgggggcggcgacctg

SEQ ID NO: 50884 - DNA, 120 bp, Artificial Sequence
  ENSG00000067066_1 (sequence is synthesized)
agcaccaggaggctgaatgaatgtatttcaccagtagcaaatgagatgaaccatcttcctgcacacagccacgatttgcaaaggatgttcacggaagaccagggtgtagatgacaggctg

SEQ ID NO: 50885 - DNA, 120 bp, Artificial Sequence
  ENSG00000067066_2 (sequence is synthesized)
ctctatgacattgtattcaagcacttcaaaagaaataaggtggagatttcaaatgcaataaaaaagacatttccattcctcgagggcctccgtgatcgtgatctcatcacaaataaaatg

SEQ ID NO: 50886 - DNA, 120 bp, Artificial Sequence
  ENSG00000067066_3 (sequence is synthesized)
tttgaagattctcaagattcttgtagaaacctggtccctgtacagagagtggtgtacaatgttcttagtgaactggagaagacatttaacctgccagttctggaagcactgttcagcgat

SEQ ID NO: 50887 - DNA, 120 bp, Artificial Sequence
  ENSG00000067066_4 (sequence is synthesized)
gtcaacatgcaggaataccccgatttaattcacatttataaaggctttgaaaatgtaatccatgacaaattgcctctccaagaaagtgaagaagaagagagggaggagaggtctggcctc

SEQ ID NO: 50888 - DNA, 120 bp, Artificial Sequence
  ENSG00000067066_5 (sequence is synthesized)
caactaagtcttgaacaaggaactggtgaaaactcttttcgaagcctgacttggccaccttcgggttccccatctcatgctggtacaaccccacctgaaaatggactctcagagcacccc

SEQ ID NO: 50889 - DNA, 120 bp, Artificial Sequence
  ENSG00000067066_6 (sequence is synthesized)
tgtgaaacagaacagataaatgcaaagagaaaagatacaaccagtgacaaagatgattcgctaggaagccaacaaacaaatgaacaatgtgctcaaaaggctgagccaacagagtcctgc

SEQ ID NO: 50890 - DNA, 120 bp, Artificial Sequence
  ENSG00000067066_7 (sequence is synthesized)
gaacaaattgctgtccaagtgaataatggggatgctggaagggagatgccctgcccgttgccctgtgatgaagaaagcccagaggcagagctacacaaccatggaatccaaattaattcc

SEQ ID NO: 50891 - DNA, 120 bp, Artificial Sequence
  ENSG00000067066_8 (sequence is synthesized)
tgttctgtgcgactggtggatataaaaaaggaaaagccattttctaattcaaaagttgagtgccaagcccaagcaagaactcatcataaccaggcatctgacataatagtcatcagcagt

SEQ ID NO: 50892 - DNA, 120 bp, Artificial Sequence
  ENSG00000067066_9 (sequence is synthesized)
gaggactctgaaggatccactgacgttgatgagcccttagaagtcttcatctcagcaccgagaagtgagcctgtgatcaataatgacaaccctttagaatcaaatgatgaaaaggagggc

SEQ ID NO: 50893 - DNA, 120 bp, Artificial Sequence
  ENSG00000067066_10 (sequence is synthesized)
caagaagccacttgctcacgaccccagattgtaccagagcccatggatttcagaaaattatctacattcagagaaagttttaagaaaagagtgataggacaagaccacgacttttcagaa

SEQ ID NO: 50894 - DNA, 120 bp, Artificial Sequence
  ENSG00000067066_11 (sequence is synthesized)
tccagtgaggaggaggcgcccgcagaagcctcgagcggggcactgagaagcaagcatggtgagaaggctcctatgacttctagaagtacatctacttggagaatacccagcaggaagaga

SEQ ID NO: 50895 - DNA, 120 bp, Artificial Sequence
  ENSG00000067066_12 (sequence is synthesized)
cgtttcagcagtagtgacttttcagacctgagtaatggagaagagcttcaggaaacctgcagctcatccctaagaagagggtcaggatcacagccacaagaacctgaaaataagaagtgc

SEQ ID NO: 50896 - DNA, 120 bp, Artificial Sequence
  ENSG00000067066_13 (sequence is synthesized)
tcctgtgtcatgtgttttccaaaaggtgtgccaagaagccaagaagcaaggactgaaagtagtcaagcatctgacatgatggataccatggatgttgaaaacaattctactttggaaaaa

SEQ ID NO: 50897 - DNA, 120 bp, Artificial Sequence
  ENSG00000067066_14 (sequence is synthesized)
cacagtgggaaaagaagaaaaaagagaaggcatagatctaaagtaaatggtctccaaagagggagaaagaaagacagacctagaaaacatttaactctgaataacaaagtccaaaagaaa

SEQ ID NO: 50898 - DNA, 120 bp, Artificial Sequence
  ENSG00000067066_15 (sequence is synthesized)
agatggcaacaaagaggaagaaaagccaacactagacctttgaaaagaagaagaaaaagaggtccaagaattcccaaagatgaaaatattaattttaaacaatctgaacttcctgtgacc

SEQ ID NO: 50899 - DNA, 120 bp, Artificial Sequence
  ENSG00000067066_16 (sequence is synthesized)
tgtggtgaggtgaagggcactctatataaggagcgattcaaacaaggaacctcaaagaagtgtatacagagtgaggataaaaagtggttcactcccagggaatttgaaattgaaggagac

SEQ ID NO: 50900 - DNA, 120 bp, Artificial Sequence
  ENSG00000067066_17 (sequence is synthesized)
cgcggagcatccaagaactggaagctaagtatacgctgcggtggatataccctgaaagtcctgatggagaacaaatttctgccagaaccaccaagcacaagaaaaaagagaatactggaa

SEQ ID NO: 50901 - DNA, 120 bp, Artificial Sequence
  ENSG00000067066_18 (sequence is synthesized)
tctcacaacaataccttagttgacccttgtccggaaaactcaaatatatgtgaggtgtgcaacaaatggggacggctgttctgctgcgacacttgtccaagatcctttcatgagcactgc

SEQ ID NO: 50902 - DNA, 120 bp, Artificial Sequence
  ENSG00000067066_19 (sequence is synthesized)
cacatcccatccgtggaagctaacaagaacccgtggagttgcatcttctgcaggataaagactattcaggaaagatgcccagaaagccaatcaggtcatcaggaatctgaagtcctgatg

SEQ ID NO: 50903 - DNA, 120 bp, Artificial Sequence
  ENSG00000067066_20 (sequence is synthesized)
aggcagatgctgcctgaggagcagttgaaatgtgaattcctcctcttgaaggtctactgtgattcgaaaagctgctttttcgcctcagaaccgtattataacagagaggggtctcagggc

SEQ ID NO: 50904 - DNA, 120 bp, Artificial Sequence
  ENSG00000067066_21 (sequence is synthesized)
ccacagaagcccatgtggttaaacaaagtcaagacaagtttgaatgagcagatgtacacccgagtagaagggtttgtgcaggacatgcgtctcatctttcataaccacaaggaattttac

SEQ ID NO: 50905 - DNA, 120 bp, Artificial Sequence
  ENSG00000067066_22 (sequence is synthesized)
caccagactgggaattcaagtacaggacatctttgagaagaatttcagaaacatttttgcaattcaggaaacaagcaagaacattataatgtttatttagccattcttatctcctccctt

SEQ ID NO: 50906 - DNA, 120 bp, Artificial Sequence
  ENSG00000067066_23 (sequence is synthesized)
cagatcctctggcagctagctacgcaatgtgcctgtggtcccactaatctgtgactgctcctgtggaaactccacatcacaattctccaaaatttatcattgccattttaaaaccgtctt

SEQ ID NO: 50907 - DNA, 120 bp, Artificial Sequence
  ENSG00000067066_24 (sequence is synthesized)
ttcagctttcaataaaattcaacaccccttcatgttaaaaattctcaataagctaggtattgaggaacatatcccaaaataataagagccatttatgacaaacccacagacaacattata

SEQ ID NO: 50908 - DNA, 81 bp, Artificial Sequence
  ENSG00000067066_25 (sequence is synthesized)
agtattggaagtcctggtcagagcagtcaggaagcagaaaaaaataaagggtatctaaataggcaaagaggaagtcaaact

SEQ ID NO: 50909 - DNA, 120 bp, Artificial Sequence
  ENSG00000067066_26 (sequence is synthesized)
aaataaagggtatctaaataggcaaagaggaagtcaaactatccctgtttgcacacaacattgattctatatctagaaaaccccctagtctcagcccagaagctccttctgctgataaac

SEQ ID NO: 50910 - DNA, 120 bp, Artificial Sequence
  ENSG00000067066_27 (sequence is synthesized)
aatttcagagatgtttcagaatacaaaattagtatatgaaaattactagtattcctatacaccagcaatagccaagccaagagccaaatcaggaaggcaatctcattcacaattgccact

SEQ ID NO: 50911 - DNA, 83 bp, Artificial Sequence
  ENSG00000067066_28 (sequence is synthesized)
tacctaggaatacagctaatcagggaggtgagagagttctacaatgagaattacgaaacactgctcaaagagattgctgtgta

SEQ ID NO: 50912 - DNA, 120 bp, Artificial Sequence
  ENSG00000067066_29 (sequence is synthesized)
tgctcctgtgtagaaacagtcaatatcattaaaatgaccatactgcccaaagcagtttacaggttcaatgttattcctatcaaaccaccaatgacattcttcacagaactagataaaact

SEQ ID NO: 50913 - DNA, 120 bp, Artificial Sequence
  ENSG00000067066_30 (sequence is synthesized)
aaacagcatggtactggtaccaaaaaaaaagccacatagaccaatggaacagaacgaagagcacagaataagaccacactcctatgaccatctgatcgtcgataaaaacaagcaatggga

SEQ ID NO: 50914 - DNA, 120 bp, Artificial Sequence
  ENSG00000067066_31 (sequence is synthesized)
gggaaaaagactccctattttataaatggtgctgggataactgggatagaagattgaagctagacctcttccttacaccatatacaaaaatcaactcaagatcaattaaagacttaatgt

SEQ ID NO: 50915 - DNA, 61 bp, Artificial Sequence
  ENSG00000067066_32 (sequence is synthesized)
tcaaaaactatgaagactaaagacaaaagcaatagcaacaaaagcaaaatttgacaaatgg

SEQ ID NO: 50916 - DNA, 66 bp, Artificial Sequence
  ENSG00000067066_33 (sequence is synthesized)
cactatgcatctgacaaaggtctaatagccagcttctatagggaacttaaacaaatttacaagaca

SEQ ID NO: 50917 - DNA, 89 bp, Artificial Sequence
  ENSG00000067066_34 (sequence is synthesized)
agaaaatatttgcacactatgcatctgacaaaggtctaatagccagcttctatagggaacttaaacaaatttacaagacaaaaagaaat

SEQ ID NO: 50918 - DNA, 120 bp, Artificial Sequence
  ENSG00000067066_35 (sequence is synthesized)
caccatgcccggatgaaaagacactttccaaaagaagatacacatgcggccaacaagcatgttttaaaagctcaatatcactgatcgttagagacatgcaaattaaaactacaatgagac

SEQ ID NO: 50919 - DNA, 120 bp, Artificial Sequence
  ENSG00000067066_36 (sequence is synthesized)
accatctcacaccagtcaaaatgcctctttctaaaaagtcaaaaaataacagctagtaaggttgtggagaaaagggaacatttatacactattgatgggagtgtaaattagttcaaccac

SEQ ID NO: 50920 - DNA, 120 bp, Artificial Sequence
  ENSG00000067066_37 (sequence is synthesized)
aaattagttcaaccactgtggaaagcagtgtggcaactcctcatagtgctaaaagcagaactgccattccacccagcaatcccattactgggtacatacccagaggaatataaatcattc

SEQ ID NO: 50921 - DNA, 120 bp, Artificial Sequence
  ENSG00000067066_38 (sequence is synthesized)
gcatgcaaatgtccactgcagcactattcacaatagcaaagatacagaatcaacctaagtgcccatcagtaacagattggataaagaaaatatggtacacatacaccatggaatagtatg

SEQ ID NO: 50922 - DNA, 88 bp, Artificial Sequence
  ENSG00000067066_39 (sequence is synthesized)
ataaagaaaatatggtacacatacaccatggaatagtatgcagccataagaaacaatgagatcatgtctcaggaacatggatatcagg

SEQ ID NO: 50923 - DNA, 120 bp, Artificial Sequence
  ENSG00000067066_40 (sequence is synthesized)
taaatgatgagaactcatgaacacaatgaagggaacagacactagggtctacttgagggtggaggatgggaagagggagaggagcagaaaaagtacctattggtgatgaagtactctgta

SEQ ID NO: 50924 - DNA, 120 bp, Artificial Sequence
  ENSG00000067066_41 (sequence is synthesized)
tgtacaacaaacccgtgacaagagtttccctatataacaaaccttcacatatacccctgaacctaaaagtttttttaattgtaaataaatggatcattaaaaaaaattttaataataaaa

SEQ ID NO: 50925 - DNA, 120 bp, Artificial Sequence
  ENSG00000067066_42 (sequence is synthesized)
agacgctgtggtctcacctgtcctggcaaggggcctctgccggctgttcccatgactggctcagggtctgagttcttattccatcaaccttgatcaaaagaaggaaagggaagaaaaagg

SEQ ID NO: 50926 - DNA, 120 bp, Artificial Sequence
  ENSG00000067066_43 (sequence is synthesized)
cccagggaggctgaatgaatgtatttcaccagtagcaaatgagatgaaccatcttcctgcacacagccacgatttgcaaaggtttttggagaggaataaatttaatgaaagatgtacatg

SEQ ID NO: 50927 - DNA, 120 bp, Artificial Sequence
  ENSG00000067066_44 (sequence is synthesized)
gacgctttttattctgagcaccttcactaccttgtatccagttcatctgggaactcctttttgcattttagaaaatggaaagaggcaggaaattatgataaactcatgtttaacagaaag

SEQ ID NO: 50928 - DNA, 120 bp, Artificial Sequence
  ENSG00000067066_45 (sequence is synthesized)
agtttcactgactaaatgtatgtaattatattttgttgttgtagaagaaataaatagcaaatttgtggtattcttttttttaaacctgctctcattcctattaacactaagatcttagat

SEQ ID NO: 50929 - DNA, 120 bp, Artificial Sequence
  ENSG00000067066_46 (sequence is synthesized)
ttttatagtgataaatgggttgacatcattgtcatttgtaattgtaaagcctcaaaagacaactgttcctactatgtaattatagacagaaataaaaacttcagatcaaacactctcaaa

SEQ ID NO: 50930 - DNA, 120 bp, Artificial Sequence
  ENSG00000067066_47 (sequence is synthesized)
gccgctgagcctggtcgttttacccatgtgcctgcttcaccattttctgcctgcatctgcttgaatctggctgttgccttggtgccttgaccttacgtccatcagtggcccgtgctgtag

SEQ ID NO: 50931 - DNA, 120 bp, Artificial Sequence
  ENSG00000067066_48 (sequence is synthesized)
accactttgtaatgtgggttttcaaccttggctgcacgttgcaatcacctggggatcccccgcaaccgcctgacaaagattctgatgttattggtctgaggtgctgcctgagaattggtg

SEQ ID NO: 50932 - DNA, 120 bp, Artificial Sequence
  ENSG00000067066_49 (sequence is synthesized)
tttccaaagctcctctggtgttttgtgtttttctagcacaagaaaagttgtgagtcactgtagtgcaatacagttcgatcacaattgccacaattgtgtagggtccatcagaaccacctg

SEQ ID NO: 50933 - DNA, 120 bp, Artificial Sequence
  ENSG00000067066_50 (sequence is synthesized)
aagggcttcatagaccacagctggctaggagctacccctaggcttctgattcagcaagtgagaggcagagcccaaggctgtatatttctaacaagttccaggtgctgctgctgctggtcc

SEQ ID NO: 50934 - DNA, 120 bp, Artificial Sequence
  ENSG00000067066_51 (sequence is synthesized)
agagaccactgcattagaggccagagttctcaactattgactgcacattagaaccatctggacaatatttaagacatactgatgcctatacaccaacccagactaactgaatcaaaatct

SEQ ID NO: 50935 - DNA, 120 bp, Artificial Sequence
  ENSG00000067066_52 (sequence is synthesized)
ctggtaatggggctccagagatgttttttaatgctcccaggggattctactgtagagcaagttgagaaccacttgtaagcaaaagaaaaaaattcttactaaaaaggttaaagagacata

SEQ ID NO: 50936 - DNA, 120 bp, Artificial Sequence
  ENSG00000067066_53 (sequence is synthesized)
caccaagtttgcaggctttctagacaatggaacttcaaacataggatttgcctgtggtatttattctttcttggggcccacttgcagtgtactttataggatgatgtatcagaaaccttg

SEQ ID NO: 50937 - DNA, 120 bp, Artificial Sequence
  ENSG00000067066_54 (sequence is synthesized)
acccagcagcctaaaaatagtggtcagcatcgatgagtctcatctgttacaacaaaaaggaaaaacagttacaaggccccactccaggggaagctcaggcaccccccttggagatgtgcc

SEQ ID NO: 50938 - DNA, 120 bp, Artificial Sequence
  ENSG00000067066_55 (sequence is synthesized)
caagaaatggctcctaataggccactcaaattctgccattgaaagggaacacatgggcaagatatatcttgcagcctagaattgtttttatttatgtgactttagtctcttctttgtata

SEQ ID NO: 50939 - DNA, 120 bp, Artificial Sequence
  ENSG00000067066_56 (sequence is synthesized)
gtgactttgtagaggaagagaaattacaacaccttacatgcctaagtcatggggactcttcctccaggttcccagagcaaaaagcaaaaagccctgtactccctggtgcccacctggtca

SEQ ID NO: 50940 - DNA, 120 bp, Artificial Sequence
  ENSG00000067066_57 (sequence is synthesized)
tcttgcccacggtttttccatcccagaggtactgctgcaggcccagagccctccaggaaaagaactgacatctaggaactcctcccccaagccctttcttcaactcattcttgctatgac

SEQ ID NO: 50941 - DNA, 120 bp, Artificial Sequence
  ENSG00000067066_58 (sequence is synthesized)
aagagtgtgggttgcagtgatatctcagaagtttattccatcatattaaattctcagtaaatcaccctttggcaagtcagtttaaaggatacgatgtagacagctagaaaagacactatt

SEQ ID NO: 50942 - DNA, 120 bp, Artificial Sequence
  ENSG00000067066_59 (sequence is synthesized)
tctgggccaggttttcccagctgtttaataaattgctcaaaaaatctctaattcatcctatttttgtcactagtcatcatgtcagaatctctggtttcataaagaaaacttttctggcct

SEQ ID NO: 50943 - DNA, 120 bp, Artificial Sequence
  ENSG00000067066_60 (sequence is synthesized)
gacacacagccactatctactgaactttgccgcagaccaaaatgtcttctgagatctccactcagcaatctttaatattttgaggacagaaatttacaagtgtgcccttgatacataaaa

SEQ ID NO: 50944 - DNA, 120 bp, Artificial Sequence
  ENSG00000067066_61 (sequence is synthesized)
aaaaaaaaaagtcattgattttgcaattagggctaaaggattgtgggtctgtgctccatttgatagtaatctctttcccttagatgggaagagacagaaatgatcctcatagaatattta

SEQ ID NO: 50945 - DNA, 120 bp, Artificial Sequence
  ENSG00000067066_62 (sequence is synthesized)
tagtccaaattctgtcaacagtgtaagcagtcataagatttatagatcttttagttagatattattgatttggttttcctttactttctagctcctatgacttctagaagtacatctact

SEQ ID NO: 50946 - DNA, 120 bp, Artificial Sequence
  ENSG00000067066_63 (sequence is synthesized)
aaaaggtgatgatcaagtgatcttctgccaatgtctcgtctattatgttgttgattttctatctctgtggacttacagtctttaaattgacccatcatcataaaatttgattttataata

SEQ ID NO: 50947 - DNA, 120 bp, Artificial Sequence
  ENSG00000067066_64 (sequence is synthesized)
ccctttatttcaagatgaaattctcagggttatttatgaacagaagggaaaaatacagtgaggaaccacaaaagaaaaagagatttcagatgtagagcccatcccttaatttagctgtgg

SEQ ID NO: 50948 - DNA, 120 bp, Artificial Sequence
  ENSG00000067066_65 (sequence is synthesized)
ggagtgggcagtcactaatgttggggggaaggagaatctttgaaggggagtgggcacaaataaaaatgtttacaaatcacaatttaggatcacagccacaagaacctgaaaataagaagt

SEQ ID NO: 50949 - DNA, 120 bp, Artificial Sequence
  ENSG00000067066_66 (sequence is synthesized)
agtgggaaaagaaacggagtcttgctccgtggcccagactgaaagtgcagtggtgtcatcacagctcactgcaatctccttccaggttcaagcaattgtcctgcctcagactcccaagta

SEQ ID NO: 50950 - DNA, 120 bp, Artificial Sequence
  ENSG00000067066_67 (sequence is synthesized)
gcagggactacaggaaaaaagagaaggcatagatctaaagtaaatggtctccaaagagggagaaagaaagacagacctagaaaacatttaactctgaataacaaagtccaaaagaaaaga

SEQ ID NO: 50951 - DNA, 120 bp, Artificial Sequence
  ENSG00000067066_68 (sequence is synthesized)
atgatgcttttgcagttgctgctttcaaacattattcaatgtataagtccagggctcctttgaacatcaaaacgtttgagatagaggtgggaacaatcctcagaaatagattaaaagaca

SEQ ID NO: 50952 - DNA, 120 bp, Artificial Sequence
  ENSG00000067066_69 (sequence is synthesized)
cagaaatagattaaaagacagaactgaattgtatgtgttttttagtaaaggagctaaatgccatacttttttttttttttttttttaagagaaagagtctcactctgtcgcccaagctgg

SEQ ID NO: 50953 - DNA, 64 bp, Artificial Sequence
  ENSG00000067066_70 (sequence is synthesized)
ggtgtgatctaggctcactgcaaccttcacctccctgcatgatgcccggctattttttttgtat

SEQ ID NO: 50954 - DNA, 85 bp, Artificial Sequence
  ENSG00000067066_71 (sequence is synthesized)
caggcttgtctcaaactcctgacctcatgtgatttgcccgcctcagcctcccaaaagccatactttctttaaatataaaagatag

SEQ ID NO: 50955 - DNA, 120 bp, Artificial Sequence
  ENSG00000067066_72 (sequence is synthesized)
tctttaaatataaaagatagagctggcattggaaaaataagcatgagtttgaaatgcacaaaacagtgtgcctttgcaacctcaacataaacactggttgtttttcactggtttttctgg

SEQ ID NO: 50956 - DNA, 120 bp, Artificial Sequence
  ENSG00000067066_73 (sequence is synthesized)
attctatattttagaaataaatatgaagcaaaagttcccctagaaacatcccatggtcactacacatgacctaatggagaattccccctaaaatgtatatataggcatatgtcacccagg

SEQ ID NO: 50957 - DNA, 87 bp, Artificial Sequence
  ENSG00000067066_74 (sequence is synthesized)
attccccctaaaatgtatatataggcatatgtcacccagggaagcaaacaacaaaaaacattctctccttttcttttatcttttacc

SEQ ID NO: 50958 - DNA, 120 bp, Artificial Sequence
  ENSG00000067066_75 (sequence is synthesized)
agttcttcaggtgaaaattttggactgggaggcagagtgccctgtgaggctgctgacctagaaaatcttttcctttgtggagaggccctttggccccagtaaaagggctgcacagacctc

SEQ ID NO: 50959 - DNA, 120 bp, Artificial Sequence
  ENSG00000067066_76 (sequence is synthesized)
acttctatctgtgaaggtgaaattctccctctgtggaggtagtatgtggagttcatagaccagtggtcttcatactatatgtattctatggaaaaatggtgagatcactgatgccttcca

SEQ ID NO: 50960 - DNA, 120 bp, Artificial Sequence
  ENSG00000067066_77 (sequence is synthesized)
tggcctctccaaggctgggtataagagagaacctggtgaaggaaggagatggaagaacttccattttcctaagctctgacatgggtgaccttggatatttctgccataccaggaagtcac

SEQ ID NO: 50961 - DNA, 120 bp, Artificial Sequence
  ENSG00000067066_78 (sequence is synthesized)
aatctttacaaagctggctcctggggctacctgctccactggctttatgactagagattcagtgactaggctctgtatccactgggttttctggagaaagacattatttgatataattat

SEQ ID NO: 50962 - DNA, 120 bp, Artificial Sequence
  ENSG00000067066_79 (sequence is synthesized)
taaaatcaaacatgtctacccactgccagacagtcaaggctgatgcagtctgggctaatcaattgagctggccatctcccatcccttcatcacaggcaccctctctccattccctgaggg

SEQ ID NO: 50963 - DNA, 120 bp, Artificial Sequence
  ENSG00000067066_80 (sequence is synthesized)
cccacagctctagaggtgaaattgcctcggttctcagaggatctccccggagggtctatcttccctcctctcccctcggtttctaatgcttgtgtcactctcagcaccgcgtggtaactg

SEQ ID NO: 50964 - DNA, 120 bp, Artificial Sequence
  ENSG00000067066_81 (sequence is synthesized)
ctattgttgccagctttcctgcttataagttttttgttaaacctgctggtgatagctgagataccccaggataataagtcataaaagtccaagctaatcgtttactggctgctaagaaac

SEQ ID NO: 50965 - DNA, 120 bp, Artificial Sequence
  ENSG00000067066_82 (sequence is synthesized)
ctcttctcccaagtgacaattgtgttcacttgttcatgcacttatgtatccattaaacaaacaactgtggagccactacaaagctccaggtgatgggcttggccaatgaaataatgcaaa

SEQ ID NO: 50966 - DNA, 120 bp, Artificial Sequence
  ENSG00000067066_83 (sequence is synthesized)
ccttattgtcttacctgggtgaataactcatgggatggagtgggagattctaggccactaagctgctatactttatcttagccaaaaggcccagattgcttctggcaggtggtaatatgg

SEQ ID NO: 50967 - DNA, 120 bp, Artificial Sequence
  ENSG00000067066_84 (sequence is synthesized)
ccacctcttctatcatcatgccttggatcccactgagtggtttgtctaaggcctctctgccttgagctacaggtaaaagctttagcagtcattgtttcattccacagataccctaggtca

SEQ ID NO: 50968 - DNA, 120 bp, Artificial Sequence
  ENSG00000067066_85 (sequence is synthesized)
aagcaagctctcaagattcaggagaaagtggagaggtgcttaccttcaggagaagagctacagtactggggatcttggaggcattttgtcttcaaagatgtgttcctggagagctgcaga

SEQ ID NO: 50969 - DNA, 120 bp, Artificial Sequence
  ENSG00000067066_86 (sequence is synthesized)
aagggttagagttattcctgggacacctgcatggtgtccaagactctgggccctgtggtcactgggagctgtggaggaagagtcggccgattccctttgcagcttctctggatggaatga

SEQ ID NO: 50970 - DNA, 72 bp, Artificial Sequence
  ENSG00000067066_87 (sequence is synthesized)
acttccaaatttagacaaacatgcctgcaggccccttgaagtaggaggaccgatagagttgctccagctcag

SEQ ID NO: 50971 - DNA, 120 bp, Artificial Sequence
  ENSG00000067066_88 (sequence is synthesized)
cccttgaagtaggaggaccgatagagttgctccagctcagtctccctgaatggtttcacgaaggcctgccttgggtgtgagagccaggaaatggcacttgcattgggccaaactgtcact

SEQ ID NO: 50972 - DNA, 120 bp, Artificial Sequence
  ENSG00000067066_89 (sequence is synthesized)
gacacataatttagtgcttttttattcttcagttagatgtacaggtccataaaagcagacatgaaacaaaagaagggctgtggcatgaatcccttaaaaataaagaagtctgttcaaatg

SEQ ID NO: 50973 - DNA, 120 bp, Artificial Sequence
  ENSG00000067066_90 (sequence is synthesized)
gtgagcctggtaaggaagtttgggagagcaaggcttgggctgtgggaatctgatttaagagctactatttcctgaggcattttattctgagctcattctgtacaatggatccagtttatc

SEQ ID NO: 50974 - DNA, 120 bp, Artificial Sequence
  ENSG00000067066_91 (sequence is synthesized)
gcccagaaattcatcatgacttcctctgcccaggtctccatgcatatgttattactaacgttctcacctgaacattacgttggctggcttatattacagcttaatcctctaagtacttta

SEQ ID NO: 50975 - DNA, 120 bp, Artificial Sequence
  ENSG00000067066_92 (sequence is synthesized)
tttcttacccttttgaaggttggacagtaaattgtggccttgactctgccattaataaactgtgcaatttggtcacatgaaagtaacttaagttggaggggaggtcttaaattttcgggg

SEQ ID NO: 50976 - DNA, 120 bp, Artificial Sequence
  ENSG00000067066_93 (sequence is synthesized)
gtattgcacaaacaagtggacacccgggagctggccctgctcgtcccctgggccctccttccctggtcctgcaggtcttgctgcttgtcaggcctctcctccaaccctctgccacatttc

SEQ ID NO: 50977 - DNA, 120 bp, Artificial Sequence
  ENSG00000067066_94 (sequence is synthesized)
agaaaagctgagaatcccttggagtgaaaaaggaggagaaacacagtgtccgtagcccagaaggaggttaaatactttcacttctcttttccccatttgggcggagccctttctgagtca

SEQ ID NO: 50978 - DNA, 120 bp, Artificial Sequence
  ENSG00000067066_95 (sequence is synthesized)
cccttgtgaggagcataagaagaagaacccagatgcttcagtcaagttctcagagtttttaaagaagtgctcagagacatggaagaccatttttgctaaagagaaaggaaaatttgaaga

SEQ ID NO: 50979 - DNA, 120 bp, Artificial Sequence
  ENSG00000067066_96 (sequence is synthesized)
tatggcaaaggcggacaaggcccattatgaaagagaaatgaaaacctatatccctcctaaaggggagaaaaaaaagaagttcaaggatcccaatgcacccaagaggcctcctttggcctt

SEQ ID NO: 50980 - DNA, 120 bp, Artificial Sequence
  ENSG00000067066_97 (sequence is synthesized)
tttcctgttctgctctgagtatcgcccaaaaatcaaaggagaacatcctggcctgtccattgatgatgttgtgaagaaactggcagggatgtggaataacaccgctgcagctgacaagca

SEQ ID NO: 50981 - DNA, 120 bp, Artificial Sequence
  ENSG00000067066_98 (sequence is synthesized)
gttttatgaaaagaaggctgcaaagctgaaggaaaaatacaaaaaggatattgctgcatatcgagctaaaggaaagcctaattcagcaaaaaagagagttgtcaaggctgaaaaaagcaa

SEQ ID NO: 50982 - DNA, 120 bp, Artificial Sequence
  ENSG00000067066_99 (sequence is synthesized)
gaaaaagaaggaagaggaagaagatgaagaggatgaacaagaggaggaaaatgaagaagatgatgataaataagttgcttctagtgcagtttttttcttgtctataaagcatttaagctg

SEQ ID NO: 50983 - DNA, 120 bp, Artificial Sequence
  ENSG00000067066_100 (sequence is synthesized)
cctgtacacaactcactccttttaaagaaaaaaacttcaacgtaagactgtgtaagatttgtttttaaaccgtacactgtgtttttttgtatagttaaccactaccgaatgtgtcttcag

SEQ ID NO: 50984 - DNA, 120 bp, Artificial Sequence
  ENSG00000067066_101 (sequence is synthesized)
atagccctgtcctggtggtatttagccactaacctttgcctggtacagtatgggggttgtaaattggcatggaaatttaaagcaggttcttgttagtgcacagcacaaattagttgtata

SEQ ID NO: 50985 - DNA, 120 bp, Artificial Sequence
  ENSG00000067066_102 (sequence is synthesized)
tgaggatggtagttttttcaccttcagttgtctctgatgtagcttatacaaaacatttgttgttctgttaactgaatgccactctgtaattgcaaaaaaaaaaaacagttgcagctgttt

SEQ ID NO: 50986 - DNA, 120 bp, Artificial Sequence
  ENSG00000067066_103 (sequence is synthesized)
tgttgacattctgaatgcttctaagtaaatacaatttttaaaaaaccgtatgagggaactgtgtagacaaggtaccaggtcagtcttcttccatgtctattagctccacaaagccaatct

SEQ ID NO: 50987 - DNA, 120 bp, Artificial Sequence
  ENSG00000067066_104 (sequence is synthesized)
caatccctcaaaacaatcttgtcatacttgaaaatatgacactctagtcaaagccttggtaaaataatcagtgtttccaatctgtcctgttacaaaagaaacagattattattgaactta

SEQ ID NO: 50988 - DNA, 120 bp, Artificial Sequence
  ENSG00000067066_105 (sequence is synthesized)
tgcaaataaccattgtcataagaatgtttatgaatagtttccaaattatggcaaattcatgtagagagagaaaagtaactgttttggttttgctcacaaaagtctactttacctaagggc

SEQ ID NO: 50989 - DNA, 120 bp, Artificial Sequence
  ENSG00000067066_106 (sequence is synthesized)
tgtcagatataagtaacttaaaagaaagagaagttttcttgacttttgaaaacaaaatatgaaaagaatcggcaatgtttcaaacaaaaagtcataaaagtcactttattcctccatcaa

SEQ ID NO: 50990 - DNA, 120 bp, Artificial Sequence
  ENSG00000067066_107 (sequence is synthesized)
gctgtaaaaaatagtcccaaaatatgtctttggctcaaatacatgaggagattatttctcagccttgtaaacaattcagcaaggcactgggttggtgggaggtagaaaaagctcacgaat

SEQ ID NO: 50991 - DNA, 120 bp, Artificial Sequence
  ENSG00000067066_108 (sequence is synthesized)
ttaacagaagatcttcaaggtccccctgcatgaaaaatagaagcagaaacaaaggaaatgtggaatggcaagcagaagggataagaagtaaaagaagcgtgggaaagcaaaggccaagca

SEQ ID NO: 50992 - DNA, 120 bp, Artificial Sequence
  ENSG00000067066_109 (sequence is synthesized)
ctggggacaagaatggagtatcactaacccacaatgaaggttagttgaaaggcaagacaagcatggcctgtgtacaggcgaggacttgcacggattttcaaggttttccaggttttctta

SEQ ID NO: 50993 - DNA, 120 bp, Artificial Sequence
  ENSG00000067066_110 (sequence is synthesized)
ttagggaatttcctactgaactgattccttggtcacacactgagacctctaaagaatcccattcttttgtgcagtgatcaataatgacaaccctttagaatcaaatgatgaaaaggaggg

SEQ ID NO: 50994 - DNA, 120 bp, Artificial Sequence
  ENSG00000067082_0 (sequence is synthesized)
gcagtcagtccggtgtttgcaaatattgtgtgggctccgcgcgctgcgggctgcgggagggtccggccgggcgtctctgcgagcctggagtttgcatgaaactttcacctgcgctccggg

SEQ ID NO: 50995 - DNA, 120 bp, Artificial Sequence
  ENSG00000067082_1 (sequence is synthesized)
gagactttcggctccggctcccaccgcgcgcctcgccgccctcgcgaccgcgggctccgtccaacccggcccgacatggacgtgctccccatgtgcagcatcttccaggagctccagatc

SEQ ID NO: 50996 - DNA, 120 bp, Artificial Sequence
  ENSG00000067082_2 (sequence is synthesized)
gtgcacgagaccggctacttctcggcgctgccgtctctggaggagtactggcaacagacctgcctagagctggaacgttacctccagagcgagccctgctatgtttcagcctcagaaatc

SEQ ID NO: 50997 - DNA, 120 bp, Artificial Sequence
  ENSG00000067082_3 (sequence is synthesized)
aaatttgacagccaggaagatctgtggaccaaaatcattctggctcgggagaaaaaggaggaatccgaactgaagatatcttccagtcctccagaggacactctcatcagcccgagcttt

SEQ ID NO: 50998 - DNA, 120 bp, Artificial Sequence
  ENSG00000067082_4 (sequence is synthesized)
tgttacaacttagagaccaacagcctgaactcagatgtcagcagcgaatcctctgacagctccgaggaactttctcccacggccaagtttacctccgaccccattggcgaagttttggtc

SEQ ID NO: 50999 - DNA, 120 bp, Artificial Sequence
  ENSG00000067082_5 (sequence is synthesized)
agctcgggaaaattgagctcctctgtcacctccacgcctccatcttctccggaactgagcagggaaccttctcaactgtggggttgcgtgcccggggagctgccctcgccagggaaggtg

SEQ ID NO: 51000 - DNA, 120 bp, Artificial Sequence
  ENSG00000067082_6 (sequence is synthesized)
cgcagcgggacttcggggaagccaggtgacaagggaaatggcgatgcctcccccgacggcaggaggagggtgcaccggtgccactttaacggctgcaggaaagtttacaccaaaagctcc

SEQ ID NO: 51001 - DNA, 120 bp, Artificial Sequence
  ENSG00000067082_7 (sequence is synthesized)
cacttgaaagcacaccagcggacgcacacaggagaaaagccttacagatgctcatgggaagggtgtgagtggcgttttgcaagaagtgatgagttaaccaggcacttccgaaagcacacc

SEQ ID NO: 51002 - DNA, 120 bp, Artificial Sequence
  ENSG00000067082_8 (sequence is synthesized)
ggggccaagccttttaaatgctcccactgtgacaggtgtttttccaggtctgaccacctggccctgcacatgaagaggcacctctgagggagcagagaggtggatcctgtaggctaaaag

SEQ ID NO: 51003 - DNA, 120 bp, Artificial Sequence
  ENSG00000067082_9 (sequence is synthesized)
gcttccaggctgagagccggccgtggaaggagggatgcgtgttccagccaaagcatgccgttctgcaccctacccagttgcctccagggcctctccttggaaggtcttttgagggctaaa

SEQ ID NO: 51004 - DNA, 120 bp, Artificial Sequence
  ENSG00000067082_10 (sequence is synthesized)
aaggtcctgtaagaagcggcatagcacccgtggtgcatggtatgtgggtgaccctggactcgccactggtacccgcccttccgagcggcgcctaagcctttgccgtgagcatgcacactg

SEQ ID NO: 51005 - DNA, 120 bp, Artificial Sequence
  ENSG00000067082_11 (sequence is synthesized)
agaatgctaatggttgggttgattgtatgttgaggatctattactgaccgtatgatgaggccaactttttttccttgtggttagcaagactgcaagagatggaaaaaaagtagtttgaat

SEQ ID NO: 51006 - DNA, 120 bp, Artificial Sequence
  ENSG00000067082_12 (sequence is synthesized)
aaaaagtagtttgaatgttttgtgtgtaaggagtataccatgagatgagatgaccaccaatcatttccttggggggagggggtgtctgcaccttagaaaaaaaaagaaaaatcaaaaaaa

SEQ ID NO: 51007 - DNA, 120 bp, Artificial Sequence
  ENSG00000067082_13 (sequence is synthesized)
aaaaaagaaggaaaatcttggagggtgggcgtgggaactcaggaccccagagtggcgagtggtgtggggagggagagcctctctcccccttttctgtgtgagaggaactcttagtgtctg

SEQ ID NO: 51008 - DNA, 120 bp, Artificial Sequence
  ENSG00000067082_14 (sequence is synthesized)
gtgcagctattaaatgtgcaatgtgtcaagtagcttgttttacacgctacaacatagctcatttgtaacccattgtataagctgtgtatttacaaatataacacaacaatttaacttttc

SEQ ID NO: 51009 - DNA, 120 bp, Artificial Sequence
  ENSG00000067082_15 (sequence is synthesized)
cttagaatacaaaaagtcatgcatggtctggggaactatatgcttttccatttttaagtcaggactgcaatactgattccagttaatgagcagctaagatccaatctgtctaatacagtg

SEQ ID NO: 51010 - DNA, 120 bp, Artificial Sequence
  ENSG00000067082_16 (sequence is synthesized)
accccctagccatccgggcctggcaatatacaattttttttcccctccaagtttgtaacactccccttccagaaaggcattgtgcaacacaggattatttttaaatgattctgaatttga

SEQ ID NO: 51011 - DNA, 120 bp, Artificial Sequence
  ENSG00000067082_17 (sequence is synthesized)
attaactttttggagaattctgtgatgcccttagaagaaattggacacgtattgagtgtcacaaagctggggctgggaattgctggtctaatgtttcattagacttaagaacctaaaatt

SEQ ID NO: 51012 - DNA, 120 bp, Artificial Sequence
  ENSG00000067082_18 (sequence is synthesized)
tttctcagttgggtggataaaaccactaacgcttagaaactgttttctcatgcagctatgtttctcttatttatgccttgaggactaatttctggttttctagctgttaatgcactgttg

SEQ ID NO: 51013 - DNA, 120 bp, Artificial Sequence
  ENSG00000067082_19 (sequence is synthesized)
cccttctgtgggggtctcatacaggggtgtgggcgatgcatgctttattaaggctcttgtttcacctggcagtgtactgtatcaacgtataatacagaaaaaaaatctctttaaggtcct

SEQ ID NO: 51014 - DNA, 120 bp, Artificial Sequence
  ENSG00000067082_20 (sequence is synthesized)
ccttcacaaagacatagagtgaaactccctttacatgtcagtatttgttcaacactttaggcaacttgactgtcagtgttaaaatggaaaacaggaaaatggaaaaatctgaccaattct

SEQ ID NO: 51015 - DNA, 120 bp, Artificial Sequence
  ENSG00000067082_21 (sequence is synthesized)
gccaccttgagactttcatatagaccttgcacaacaattgtatagatcacacaccggctgtatttaatatgtaacattttcacacatattaaagatacagaagtattaaaaaacccccaa

SEQ ID NO: 51016 - DNA, 120 bp, Artificial Sequence
  ENSG00000067082_22 (sequence is synthesized)
tgttaatgtatttgcttaaaaggcacaagtttcacatatctgtctagctatctgttggtaatacagaaagtatactacttttttaaaaaagtgggcagaattcttgtgtatgtatatttg

SEQ ID NO: 51017 - DNA, 120 bp, Artificial Sequence
  ENSG00000067082_23 (sequence is synthesized)
atatatattatatatatagataatatataaatattttttttaaggagaaactagaatgtttagctagaaaattccacagcctgtgaagaaatatttcaaaatggccataaaggaggtaaa

SEQ ID NO: 51018 - DNA, 120 bp, Artificial Sequence
  ENSG00000067082_24 (sequence is synthesized)
atttcaaaatggccataaaggaggtaaaaatgaaaaccataacctaacttttatagaggctttatctttaatttaacgatgtgcggaggactttcttgcttgaatctgttccgggctgtc

SEQ ID NO: 51019 - DNA, 120 bp, Artificial Sequence
  ENSG00000067082_25 (sequence is synthesized)
tgctctgtccatcaaatgggcaggtctggaatggggcaccttcggccgttcagaagtggcctgaacagaatgctggaacccaggctggactcggacacactaaggttttgattttgaatt

SEQ ID NO: 51020 - DNA, 120 bp, Artificial Sequence
  ENSG00000067082_26 (sequence is synthesized)
tcagccttattagaagatctaacctaagagtaagctaaccacagggattcttttgtagaacactttttatgcagatgaagctattttttccagcaagtagattcttccagtttttccaag

SEQ ID NO: 51021 - DNA, 120 bp, Artificial Sequence
  ENSG00000067082_27 (sequence is synthesized)
gagtaatttccccgaattggcataccacggcgtggacagctgatatttcacccagctgctggcttgtgggtgtggctctttgctttatatatatatacacacatgtgagtctggctgggc

SEQ ID NO: 51022 - DNA, 120 bp, Artificial Sequence
  ENSG00000067082_28 (sequence is synthesized)
tggtattttgtttgatcttcctggaaatgagcagtgactaacgctcacataactggttttttttttatctgggctgatgaatacatttacctaagaaactcatttcgttttacttaagag

SEQ ID NO: 51023 - DNA, 120 bp, Artificial Sequence
  ENSG00000067082_29 (sequence is synthesized)
gggaagtgcagttttcttttggcagttcagaatccaagcacttgatttgctgggtttggaaaactccttttttggccttctatgtgcttagccataacaattccattaagcaagaaggta

SEQ ID NO: 51024 - DNA, 120 bp, Artificial Sequence
  ENSG00000067082_30 (sequence is synthesized)
aaaaaaaaaaaggaaaaaaaaaaacttgcactggcttgtctcacttacgaaacatgtcggagctgtttgcctgggtggggctgggtaccgtacctgtcaatgcctgtgattttcataatt

SEQ ID NO: 51025 - DNA, 120 bp, Artificial Sequence
  ENSG00000067082_31 (sequence is synthesized)
attttcataattagcacgtacataaagaagtacattctgttcaggtgataactgagcctcaatcaagcagaaactttttgcttgaaattaaaaaaaaatttctattagtgaaatttcttt

SEQ ID NO: 51026 - DNA, 120 bp, Artificial Sequence
  ENSG00000067082_32 (sequence is synthesized)
tttttttttttttggaagcaccctgttatctaaagaatctttgtaagatttttgtaaaattttgttttacaagattttatttgaaattgttttttgcaagattgttatatttctgtatga

SEQ ID NO: 51027 - DNA, 120 bp, Artificial Sequence
  ENSG00000067082_33 (sequence is synthesized)
atgtattttttattggaataacataaaagaattcttatcagcatcttgagtctggttgttttttttgggggaagggggttgttggaacagattcctcctgcattcatcaccctggcttcc

SEQ ID NO: 51028 - DNA, 120 bp, Artificial Sequence
  ENSG00000067082_34 (sequence is synthesized)
tcctgggggcaaatcttcattgagcaaccctgagaacaactcaccgacctcagccccttcctctttccacagcctgtcctgggagctggagaggatgtcagcgagcctgacattgccctc

SEQ ID NO: 51029 - DNA, 120 bp, Artificial Sequence
  ENSG00000067082_35 (sequence is synthesized)
cctgaatgcatcaaatactcttctccaaggactgacaaaaacaaccccccggctgtgggcacagtagggaaccatgccggtttgatcttccattgctcaagccagggaatgcattgcaga

SEQ ID NO: 51030 - DNA, 120 bp, Artificial Sequence
  ENSG00000067082_36 (sequence is synthesized)
ggcacctgcacaacgacaaacttgagtgtttccctgccacttctgtgcctccacagcctgctccagttccgcagctagagctgggcctaccttccccagccagccctgccacacacctgg

SEQ ID NO: 51031 - DNA, 120 bp, Artificial Sequence
  ENSG00000067082_37 (sequence is synthesized)
ctgaggcatgtctgggaggggtggaggaggcagagggactccaggccagagggctgttctcacaacctcagcccactctcagtcaaggagggcagaaaataaaagatgacatcactgcca

SEQ ID NO: 51032 - DNA, 120 bp, Artificial Sequence
  ENSG00000067082_38 (sequence is synthesized)
agcggacgcacacaggtcagtgcccacgcgggccccggagggcggccgctggtgggcgccactgcattgcaccagccctggagggagccgggcctggctgcacaggatgtggtcagggca

SEQ ID NO: 51033 - DNA, 120 bp, Artificial Sequence
  ENSG00000067082_39 (sequence is synthesized)
gacaaatcctcacttcctcagatgttttccaccaaagcattaggtctttttggagttcagagtagaatcctaaagactggacttttgagttggataaatgtgtaacaattttcagattaa

SEQ ID NO: 51034 - DNA, 120 bp, Artificial Sequence
  ENSG00000067082_40 (sequence is synthesized)
agactagatccttttctccacggacacccaaacctccaccccccaccccttagtagtgctggggatccgaggccactgccccttcaccagtgcactcgcacgaggctacctcgagcggcc

SEQ ID NO: 51035 - DNA, 120 bp, Artificial Sequence
  ENSG00000067082_41 (sequence is synthesized)
ctggggtttcctaaatgaaactcaagggtcaggacagagggttgctgggcagcgtggagtgtgtgggtttgatgctgacggcccgaggcccgagtgggaccggcctgctctgtaagcagc

SEQ ID NO: 51036 - DNA, 120 bp, Artificial Sequence
  ENSG00000067082_42 (sequence is synthesized)
agcattgatcagcgagtgtttcctgagaacttctccgtgtctcatgcagcctttgtttctgataccgcttgaaacagtttcttaatgaaatgccatacctaggtgaaagtgctatttaaa

SEQ ID NO: 51037 - DNA, 120 bp, Artificial Sequence
  ENSG00000067082_43 (sequence is synthesized)
aataccttgacatgttctaggataattggtgaggaatcacagaacatttagaactgggaagggtcttagtgatcacgtgatgcaggctcttctcttatcagtaggagagcaaattgctga

SEQ ID NO: 51038 - DNA, 120 bp, Artificial Sequence
  ENSG00000067082_44 (sequence is synthesized)
gagtcagtcccagacaggcttggtgacagctgagattgagatccgggtggcccaatatccaggcccaggcctgtctcaacataccctgagattggcttgacaactttgttttctcaggta

SEQ ID NO: 51039 - DNA, 120 bp, Artificial Sequence
  ENSG00000067082_45 (sequence is synthesized)
gcacttgtagtaaattcatatttatgatttgaccaaggaatgaagtgaacccagttgttcaattgccatttagagaatgattccggggccctgtactggggctttccagaagctcgtaac

SEQ ID NO: 51040 - DNA, 120 bp, Artificial Sequence
  ENSG00000067082_46 (sequence is synthesized)
ttcagctttgtagaaaggtagaacgtccctgaggaaactgcagaggcacattccatagggaagtgaggatggaacagaagtgtgtttgggagaaacagttgccatgaagaaagcaatagc

SEQ ID NO: 51041 - DNA, 120 bp, Artificial Sequence
  ENSG00000067082_47 (sequence is synthesized)
tctgcctttgccggggctgtgggtccggcaggctgacacctcatcccgcaagcattttgctggtctgagtcgtggtcgttcttccacgttaactttgatgacagcaccatgggcttggct

SEQ ID NO: 51042 - DNA, 120 bp, Artificial Sequence
  ENSG00000067082_48 (sequence is synthesized)
gaagctgtgtcccttggacagcagtgggaggcctgagactgggtcaggagagagctgctgttgtctctctgaggctgccagttgttgtgtgttaccgatgccagaagccactgggtccct

SEQ ID NO: 51043 - DNA, 120 bp, Artificial Sequence
  ENSG00000067082_49 (sequence is synthesized)
gctgccgtctctggaggagtactggcaacagtggctagaaagtttgaaatggtggggagaggggatgctgatctcggcagttgtagcttcttgaaagacctgcctagagctggaacgtta

SEQ ID NO: 51044 - DNA, 120 bp, Artificial Sequence
  ENSG00000067113_0 (sequence is synthesized)
cctgtgggagagagcgccgggatccggacggggagcaaccggggcaggccgtgccggctgaggaggtcctgaggctacagagctgccgcggctggcacacgagcgcctcggcactaaccg

SEQ ID NO: 51045 - DNA, 120 bp, Artificial Sequence
  ENSG00000067113_1 (sequence is synthesized)
agtgttcgcgggggctgtgaggggagggccccgggcgccattgctggcggtgggagcgccgcccggtctcagcccgccctcggctgctctcctcctccggctgggaggggccgtagctcg

SEQ ID NO: 51046 - DNA, 120 bp, Artificial Sequence
  ENSG00000067113_2 (sequence is synthesized)
gggccgtcgccagccccggcccgggctcgagaatcaagggcctcggccgccgtcccgcagctcagtccatcgcccttgccgggcagcccgggcagagaccatgtttgacaagacgcggct

SEQ ID NO: 51047 - DNA, 120 bp, Artificial Sequence
  ENSG00000067113_3 (sequence is synthesized)
gccgtacgtggccctcgatgtgctctgcgtgttgctggcttccatgcctatggctgttctaaaattgggccaaatatatccatttcagagaggctttttctgtaaagacaacagcatcaa

SEQ ID NO: 51048 - DNA, 120 bp, Artificial Sequence
  ENSG00000067113_4 (sequence is synthesized)
ctatccgtaccatgacagtaccgtcacatccactgtcctcatcctagtgggggttggcttgcccatttcctctattattcttggagaaaccctgtctgtttactgtaaccttttgcactc

SEQ ID NO: 51049 - DNA, 120 bp, Artificial Sequence
  ENSG00000067113_5 (sequence is synthesized)
aaattcctttatcaggaataactacatagccactatttacaaagccattggaacctttttatttggtgcagctgctagtcagtccctgactgacattgccaagtattcaataggcagact

SEQ ID NO: 51050 - DNA, 120 bp, Artificial Sequence
  ENSG00000067113_6 (sequence is synthesized)
gcaggttgtccttctattcaggccactcttcgttttccatgtactgcatgctgtttgtggcactttatcttcaagccaggatgaagggagactgggcaagactcttacgccccacactgc

SEQ ID NO: 51051 - DNA, 120 bp, Artificial Sequence
  ENSG00000067113_7 (sequence is synthesized)
aatttggtcttgttgccgtatccatttatgtgggcctttctcgagtttctgattataaacaccactggagcgatgtgttgactggactcattcagggagctctggttgcaatattagttg

SEQ ID NO: 51052 - DNA, 120 bp, Artificial Sequence
  ENSG00000067113_8 (sequence is synthesized)
ctgtatatgtatcggatttcttcaaagaaagaacttcttttaaagaaagaaaagaggaggactctcatacaactctgcatgaaacaccaacaactgggaatcactatccgagcaatcacc

SEQ ID NO: 51053 - DNA, 120 bp, Artificial Sequence
  ENSG00000067113_9 (sequence is synthesized)
agccttgaaaggcagcagggtgcccaggtgaagctggcctgttttctaaaggaaaatgattgccacaaggcaagaggatgcatctttcttcctggtgtacaagcctttaaagacttctgc

SEQ ID NO: 51054 - DNA, 120 bp, Artificial Sequence
  ENSG00000067113_10 (sequence is synthesized)
tgctgctatgcctcttggatgcacactttgtgtgtacatagttacctttaactcagtggttatctaatagctctaaactcattaaaaaaactccaagccttccaccaaaacagtgcccca

SEQ ID NO: 51055 - DNA, 120 bp, Artificial Sequence
  ENSG00000067113_11 (sequence is synthesized)
cccacctgtatacatttttattaaaaaaatgtaatgcttatgtataaacatgtatgtaatatgctttctatgaatgatgtttgatttaaatataatacatattaaaatgtatgggagaac

SEQ ID NO: 51056 - DNA, 120 bp, Artificial Sequence
  ENSG00000067113_12 (sequence is synthesized)
acgtggccctcgatgtgctctgcgtgttgctggctggattgccttttgcaattcttacttcaaggcatacccccttccaacgaggagtattctgtaatgatgagtccatcaagtaccctt

SEQ ID NO: 51057 - DNA, 120 bp, Artificial Sequence
  ENSG00000067113_13 (sequence is synthesized)
gtaaagaaaaaaggggctgggactgtttttgaaacaaagatatttttgcgatttaccatttccttttttccccctatgttttgttttgtttaaagtgcctgcttgctactttaacatgtt

SEQ ID NO: 51058 - DNA, 120 bp, Artificial Sequence
  ENSG00000067113_14 (sequence is synthesized)
gccctcgatgtgctctgcgtgttgctggatctctgaagattcagtagggaacagcaataggagtgaaacatccacatctgataacacagaaacttaccaagagaatacaagttcttctgg

SEQ ID NO: 51059 - DNA, 80 bp, Artificial Sequence
  ENSG00000067141_0 (sequence is synthesized)
cccctccccgcccccttgcaggagggaggcgccctggagtctcccctccagcgagaggggctgcgcgggccgggccgggc

SEQ ID NO: 51060 - DNA, 120 bp, Artificial Sequence
  ENSG00000067141_1 (sequence is synthesized)
tgcagcgagggaccggctgaggcgcgcgggagggaaggaggcaagggctccgcggcgctgtcgccgccgctgccgctcactctcggggaagagatggcggcggagcggggagcccggcga

SEQ ID NO: 51061 - DNA, 120 bp, Artificial Sequence
  ENSG00000067141_2 (sequence is synthesized)
ctcctcagcaccccctccttctggctctactgcctgctgctgctcgggcgccgggcgccgggcgccgcggccgccaggagcggctccgcgccgcagtccccaggagccagcattcgaacg

SEQ ID NO: 51062 - DNA, 120 bp, Artificial Sequence
  ENSG00000067141_3 (sequence is synthesized)
ttcactccattttattttctggtggagccggtggatacactctcagttagaggctcttctgttatattaaactgttcagcatattctgagccttctccaaaaattgaatggaaaaaagat

SEQ ID NO: 51063 - DNA, 120 bp, Artificial Sequence
  ENSG00000067141_4 (sequence is synthesized)
ggaacttttttaaacttagtatcagatgatcgacgccagcttctcccggatggatctttatttatcagcaatgtggtgcattccaaacacaataaacctgatgaaggttattatcagtgt

SEQ ID NO: 51064 - DNA, 120 bp, Artificial Sequence
  ENSG00000067141_5 (sequence is synthesized)
gtggccactgttgagagtcttggaactattatcagtagaacagcgaagctcatagtagcaggtcttccaagatttaccagccaaccagaaccttcctcagtttatgctgggaacaatgca

SEQ ID NO: 51065 - DNA, 120 bp, Artificial Sequence
  ENSG00000067141_6 (sequence is synthesized)
attctgaattgtgaagttaatgcagatttggtcccatttgtgaggtgggaacagaacagacaaccccttcttctggatgatagagttatcaaacttccaagtggaatgctggttatcagc

SEQ ID NO: 51066 - DNA, 120 bp, Artificial Sequence
  ENSG00000067141_7 (sequence is synthesized)
aatgcaactgaaggagatggcgggctttatcgctgcgtagtggaaagtggtgggccaccaaagtatagtgatgaagttgaattgaaggttcttccagatcctgaggtgatatcagacttg

SEQ ID NO: 51067 - DNA, 120 bp, Artificial Sequence
  ENSG00000067141_8 (sequence is synthesized)
gtatttttgaaacagccttctcccttagtcagagtcattggtcaggatgtagtgttgccatgtgttgcttcaggacttcctactccaaccattaaatggatgaaaaatgaggaggcactt

SEQ ID NO: 51068 - DNA, 120 bp, Artificial Sequence
  ENSG00000067141_9 (sequence is synthesized)
gacacagaaagctctgaaagattggtattgctggcaggtggtagcctggagatcagtgatgttactgaggatgatgctgggacttatttttgtatagctgataatggaaatgagacaatt

SEQ ID NO: 51069 - DNA, 120 bp, Artificial Sequence
  ENSG00000067141_10 (sequence is synthesized)
gaagctcaagcagagcttacagtgcaagctcaacctgaattcctgaagcagcctactaatatatatgctcacgaatctatggatattgtatttgaatgtgaagtgactggaaaaccaact

SEQ ID NO: 51070 - DNA, 120 bp, Artificial Sequence
  ENSG00000067141_11 (sequence is synthesized)
ccaactgtgaagtgggtcaaaaatggggatatggttatcccaagtgattattttaagattgtaaaggaacataatcttcaagttttgggtctggtgaaatcagatgaagggttctatcag

SEQ ID NO: 51071 - DNA, 120 bp, Artificial Sequence
  ENSG00000067141_12 (sequence is synthesized)
tgcattgctgaaaatgatgttggaaatgcacaagctggagcccaactgataatccttgaacatgcaccagccacaacgggaccactgccttcagctcctcgggatgtcgtggcctccctg

SEQ ID NO: 51072 - DNA, 120 bp, Artificial Sequence
  ENSG00000067141_13 (sequence is synthesized)
gtctctacccgcttcatcaaattgacgtggcggacacctgcatcagatcctcacggagacaaccttacctactctgtgttctacaccaaggaagggattgctagggaacgtgttgagaat

SEQ ID NO: 51073 - DNA, 120 bp, Artificial Sequence
  ENSG00000067141_14 (sequence is synthesized)
accagtcacccaggagagatgcaagtaaccattcaaaacctaatgccagcgaccgtgtacatctttagagttatggctcaaaataagcatggctcaggagagagttcagctccactgcga

SEQ ID NO: 51074 - DNA, 120 bp, Artificial Sequence
  ENSG00000067141_15 (sequence is synthesized)
gtagaaacacaacctgaggttcagctccctggcccagcacctaaccttcgtgcatatgcagcttcgcctacctccatcactgttacgtgggaaacaccagtgtctggcaatggggaaatt

SEQ ID NO: 51075 - DNA, 120 bp, Artificial Sequence
  ENSG00000067141_16 (sequence is synthesized)
cagaattataaattgtactacatggaaaaggggactgataaagaacaggatgttgatgtttcaagtcactcttacaccattaatgggttgaaaaaatatacagagtatagtttccgagtg

SEQ ID NO: 51076 - DNA, 120 bp, Artificial Sequence
  ENSG00000067141_17 (sequence is synthesized)
gtggcctacaataaacatggtcctggagtttccacaccagatgttgctgttcgaacattgtcagatgttcccagtgctgctcctcagaatctgtccttggaagtgagaaattcaaagagt

SEQ ID NO: 51077 - DNA, 120 bp, Artificial Sequence
  ENSG00000067141_18 (sequence is synthesized)
attatgattcactggcagccacctgctccagccacacaaaatgggcagattactggctacaagattcgctaccgaaaggcctcccgaaagagtgatgtcactgagaccttggtaagcggg

SEQ ID NO: 51078 - DNA, 120 bp, Artificial Sequence
  ENSG00000067141_19 (sequence is synthesized)
acacagctgtctcagctgattgaaggtcttgatcgggggactgagtataatttccgagtggctgctctaacaatcaatggtacaggcccggcaactgactggctgtctgctgaaactttt

SEQ ID NO: 51079 - DNA, 120 bp, Artificial Sequence
  ENSG00000067141_20 (sequence is synthesized)
gaaagtgacctagatgaaactcgtgttcctgaagtgcctagctctcttcacgtacgcccgctcgttactagcatcgtagtgagctggactcctccagagaatcagaacattgtggtcaga

SEQ ID NO: 51080 - DNA, 120 bp, Artificial Sequence
  ENSG00000067141_21 (sequence is synthesized)
ggttacgccattggttatggcattggcagccctcatgcccagaccatcaaagtggactataaacagcgctattacaccattgaaaatctggatcccagctctcactatgtgattaccctg

SEQ ID NO: 51081 - DNA, 120 bp, Artificial Sequence
  ENSG00000067141_22 (sequence is synthesized)
aaagcatttaataacgtgggtgaaggcatccccctgtatgagagtgctgtgaccaggcctcacacagacacttctgaagttgatttatttgttattaatgctccatacactccagtgcca

SEQ ID NO: 51082 - DNA, 120 bp, Artificial Sequence
  ENSG00000067141_23 (sequence is synthesized)
gatcccactcccatgatgccaccagtgggagttcaggcttccattctgagtcatgacaccatcaggattacgtgggcagacaactcgctgcccaagcaccagaagattacagactcccga

SEQ ID NO: 51083 - DNA, 120 bp, Artificial Sequence
  ENSG00000067141_24 (sequence is synthesized)
tactacaccgtccgatggaaaaccaacatcccagcaaacaccaagtacaagaatgcaaatgcaaccactttgagttatttggtgactggtttaaagccgaatacactctatgaattctct

SEQ ID NO: 51084 - DNA, 120 bp, Artificial Sequence
  ENSG00000067141_25 (sequence is synthesized)
gtgatggtgaccaaaggtcgaagatcaagtacatggagtatgacagcccatgggaccacctttgaattagttccgacttctccacccaaggatgtgactgttgtgagtaaagaggggaaa

SEQ ID NO: 51085 - DNA, 120 bp, Artificial Sequence
  ENSG00000067141_26 (sequence is synthesized)
cctaagaccataattgtgaattggcagcctccctccgaagccaatggcaaaattacaggttacatcatatattacagtacagatgtgaatgcagagatacatgactgggttattgagcct

SEQ ID NO: 51086 - DNA, 120 bp, Artificial Sequence
  ENSG00000067141_27 (sequence is synthesized)
gttgtgggaaacagactgactcaccagatacaagagttaactcttgacacaccatactacttcaaaatccaggcacggaactcaaagggcatgggacccatgtctgaagctgtccaattc

SEQ ID NO: 51087 - DNA, 120 bp, Artificial Sequence
  ENSG00000067141_28 (sequence is synthesized)
agaacacctaaagcggactcctctgataaaatgcctaatgatcaagcctcagggtctggagggaaaggaagccggctgccagacctaggatccgactacaaacctccaatgagcggcagt

SEQ ID NO: 51088 - DNA, 120 bp, Artificial Sequence
  ENSG00000067141_29 (sequence is synthesized)
ctctggacagtaatatgctgctggtcataattgtttctgttggcgtcatcaccatcgtggtggttgtgattatcgctgtcttttgtacccgtcgtaccacctctcaccagaaaaagaaac

SEQ ID NO: 51089 - DNA, 120 bp, Artificial Sequence
  ENSG00000067141_30 (sequence is synthesized)
gagctgcctgcaaatcagtgaatggctctcataagtacaaagggaattccaaagatgtgaaacctccagatctctggatccatcatgagagactggagctgaaacccattgataagtctc

SEQ ID NO: 51090 - DNA, 120 bp, Artificial Sequence
  ENSG00000067141_31 (sequence is synthesized)
cagacccaaaccccatcatgactgatactccaattcctcgcaactctcaagatatcacaccagttgacaactccatggacagcaatatccatcaaaggcgaaattcatacagagggcatg

SEQ ID NO: 51091 - DNA, 120 bp, Artificial Sequence
  ENSG00000067141_32 (sequence is synthesized)
agtcagaggacagcatgtctacactggctggaaggcgaggaatgagaccaaaaatgatgatgccctttgactcccagccaccccagcctgtgattagtgcccatcccatccattccctcg

SEQ ID NO: 51092 - DNA, 120 bp, Artificial Sequence
  ENSG00000067141_33 (sequence is synthesized)
ataaccctcaccatcatttccactccagcagcctcgcttctccagctcgcagtcatctctaccacccgggcagcccatggcccattggcacatccatgtccctttcagacagggccaatt

SEQ ID NO: 51093 - DNA, 120 bp, Artificial Sequence
  ENSG00000067141_34 (sequence is synthesized)
ccacagaatccgttcgaaatacccccagcactgacaccatgccagcctcttcgtctcaaacatgctgcactgatcaccaggaccctgaaggtgctaccagctcctcttacttggccagct

SEQ ID NO: 51094 - DNA, 120 bp, Artificial Sequence
  ENSG00000067141_35 (sequence is synthesized)
cccaagaggaagattcaggccagagtcttcccactgcccatgttcgcccttcccacccattgaagagcttcgccgtgccagcaatcccgcctccaggacctcccacctatgatcctgcat

SEQ ID NO: 51095 - DNA, 120 bp, Artificial Sequence
  ENSG00000067141_36 (sequence is synthesized)
tgccaagcacaccattactgtcccagcaagctctgaaccatcacattcactcagtgaagacagcctccatcgggactctaggaaggagccggcctcctatgccagtggttgttcccagtg

SEQ ID NO: 51096 - DNA, 120 bp, Artificial Sequence
  ENSG00000067141_37 (sequence is synthesized)
cccctgaagtgcaggagaccacaaggatgttggaagactccgagagtagctatgaaccagatgagctgaccaaagagatggcccacctggaaggactaatgaaggacctaaacgctatca

SEQ ID NO: 51097 - DNA, 120 bp, Artificial Sequence
  ENSG00000067141_38 (sequence is synthesized)
caacagcatgacgaccttcaccaggacctgacttcaaacctgagtctggaagtcttggaacttacccttgaaaacaaggaattgtacagagtacgagaggacagcacttgagaacacaga

SEQ ID NO: 51098 - DNA, 120 bp, Artificial Sequence
  ENSG00000067141_39 (sequence is synthesized)
atgagccagcagactggccagcgcctctgtgtagggctggctccaggcatggccacctgccttcccctggtcagcctggaagaagcctgtgtcgaggcagcttccctttgcctgctgata

SEQ ID NO: 51099 - DNA, 120 bp, Artificial Sequence
  ENSG00000067141_40 (sequence is synthesized)
ttctgcaggactgggcaccatgggccaaaattttgtgtccagggaagaggcgagaagtgcaacctgcatttcactttgtggtcaggccgtgtctttgtgctgtgactgcatcacctttat

SEQ ID NO: 51100 - DNA, 120 bp, Artificial Sequence
  ENSG00000067141_41 (sequence is synthesized)
ggagtgtagacattggcatttatgtacaattttatttgtgtcttattttattttaccttcaaaaacaaaaacgccatccaaaaccaaggaagtccttggtgttctccacaagtggttgac

SEQ ID NO: 51101 - DNA, 120 bp, Artificial Sequence
  ENSG00000067141_42 (sequence is synthesized)
atttgactgcttgttccaattatgtatggaaagtctttgacagtgtgggtcgttcctggggttggcttgttttttggtttcatttttattttttaattctgagtcattgcatcctctacc

SEQ ID NO: 51102 - DNA, 120 bp, Artificial Sequence
  ENSG00000067141_43 (sequence is synthesized)
agctgttaatccatcactctgagggggaggaaatgttgcattgctgtttgtaagctttttttattatttttttattataattattaaaggcctgactctttcctctcatcactgtgagat

SEQ ID NO: 51103 - DNA, 120 bp, Artificial Sequence
  ENSG00000067141_44 (sequence is synthesized)
tacagatctatttgaattgaatgaaatgtaacattgaaaagacttgtttgttgctttctgtgcagtttcagtattggggcgggtggggggctgggggttggtaataggaaatggaggggc

SEQ ID NO: 51104 - DNA, 120 bp, Artificial Sequence
  ENSG00000067141_45 (sequence is synthesized)
tgctgaggtcctgtgaatgtttctgtcattgtactttcttccagaagcctgcagagaatggaagcatcttctttattgtcctttcctggcatgtccatccttattgtcactacgttgcaa

SEQ ID NO: 51105 - DNA, 120 bp, Artificial Sequence
  ENSG00000067141_46 (sequence is synthesized)
ctggagtttgatttggatctggttttaaaattcttctgtgcaatagatgggtttgaggatttagcggccctgatgtcttggtcatagcctggtaagaatgtccatgctgaggagccagat

SEQ ID NO: 51106 - DNA, 120 bp, Artificial Sequence
  ENSG00000067141_47 (sequence is synthesized)
gttgtatttctaactgcctgagtcacacagaatagggtaagagcctgaccccattctgtaaatcagaaagcaaggatggagaccctttcctgctgctattattggctctctttgaggaag

SEQ ID NO: 51107 - DNA, 120 bp, Artificial Sequence
  ENSG00000067141_48 (sequence is synthesized)
ttggaggttaaggaaggaacttgtttgtttccgtatacgactccttcttctctctagttcagtcttcagccagtccagcgctctcttccacacttcagagccccttcagagaaagcatta

SEQ ID NO: 51108 - DNA, 120 bp, Artificial Sequence
  ENSG00000067141_49 (sequence is synthesized)
gcaggaatgagacaaggcagagctgcagtgccccctgaggcttccacacatctttctgaatattatttttcaagtaacaagggcagggacagcggaaacagctgcccaccccccccatcc

SEQ ID NO: 51109 - DNA, 120 bp, Artificial Sequence
  ENSG00000067141_50 (sequence is synthesized)
cagcagctcagctaagccctgatgagaatgaagccacaggagttgtctgaggtgaacccagccgctcagccacacatggaagccattgcctttgcacatagttcttgggttctttttcct

SEQ ID NO: 51110 - DNA, 120 bp, Artificial Sequence
  ENSG00000067141_51 (sequence is synthesized)
aaaaaggtaaggagctgaggtgtgtggttttttaatattaagaatatataatggaaaacacacgactgacgctcaggcatcttcccctactccccaacagatccccagaagacagcgtgg

SEQ ID NO: 51111 - DNA, 120 bp, Artificial Sequence
  ENSG00000067141_52 (sequence is synthesized)
aaggcagtgtagacagtaaatcgggcttcagttctatagccaagaagagatcagctgctgaaaccaccagtgggtaccccaggccacctgcctttgaacttggggatttgccatgtttga

SEQ ID NO: 51112 - DNA, 120 bp, Artificial Sequence
  ENSG00000067141_53 (sequence is synthesized)
tcttgtcacatacttgcttttttacaagatgaactctttgtatttatgatttggggggcaatgaaaggtgcaatgcaggaactgctgctgccgagctcgctggtcacatgggggtgccag

SEQ ID NO: 51113 - DNA, 120 bp, Artificial Sequence
  ENSG00000067141_54 (sequence is synthesized)
gcgggattctggaaaaccagtgcacttaaactgatcctgaagagagctgtcccagcactctggccaccaggagggccagattccccagaaactaccttttgcccaaagaacatgctcagt

SEQ ID NO: 51114 - DNA, 120 bp, Artificial Sequence
  ENSG00000067141_55 (sequence is synthesized)
atttggggcatttcctcccacaaaccctgactgcttctgttacctcagggccttggtacctggatactgccacagaattggggcgggtgggggaggggcctatttttaaataaaataact

SEQ ID NO: 51115 - DNA, 120 bp, Artificial Sequence
  ENSG00000067141_56 (sequence is synthesized)
gttcaaagttgggggttttttaaaaaattaagaaaaaggaaagctattctgtattgcaccttttcacaatttaatacattttcttacattttcctgtgattttcgaaactaaaccattgt

SEQ ID NO: 51116 - DNA, 120 bp, Artificial Sequence
  ENSG00000067141_57 (sequence is synthesized)
gtgtcctgtagtgtcctggttgagctgccgctcagcagcttcctcggggggatttggaacacctgtgtctgtcgccgcactgcctgtgggaggggcccagagggctgctgggactggcgt

SEQ ID NO: 51117 - DNA, 120 bp, Artificial Sequence
  ENSG00000067141_58 (sequence is synthesized)
ctgtacacacttgtttggccttttctgtagttgatgctgtaaactctatggctttttaaaaacgatttcatgtttttatttagtattggaaatccaatacacttttttaatccaatcaaa

SEQ ID NO: 51118 - DNA, 120 bp, Artificial Sequence
  ENSG00000067141_59 (sequence is synthesized)
ggtcagcggctgcgcggccggccccctcccacgggagccgcgccagggcccagcaagagtcgggcgggatcgctattgtttttggcgagcacataaatccccgggccgacccactgcgca

SEQ ID NO: 51119 - DNA, 120 bp, Artificial Sequence
  ENSG00000067141_60 (sequence is synthesized)
cccaggtttcctcccggaggcctttcggtttcctctgaggccctatatagaggctccaggcccggactgtgcagaggtgcgcgcccacgccggcctcccggaccagcctgagctcggagc

SEQ ID NO: 51120 - DNA, 120 bp, Artificial Sequence
  ENSG00000067141_61 (sequence is synthesized)
agatggtaagaataacaattggcaagactggaacacaatagatactagctgtagtcaaatgagtcaaactggaaagccacagacttggggtggatatggctcaagtctgtgaactttagt

SEQ ID NO: 51121 - DNA, 120 bp, Artificial Sequence
  ENSG00000067141_62 (sequence is synthesized)
gcatcacgctgctgttgttcctgtattgcatcgaggctgctggaatggattttttgcagtgccttgtagagaactgtcctttcaagcagaactagagcaaataaaaatgtgtatgtgcta

SEQ ID NO: 51122 - DNA, 120 bp, Artificial Sequence
  ENSG00000067141_63 (sequence is synthesized)
acaaggatgttggaagactccgagagtgtaagttcgtggggccatcagtccagccagattgcctgggaacatgccccagggcctgagactgctggtcaagctgataatctgtgcatacca

SEQ ID NO: 51123 - DNA, 120 bp, Artificial Sequence
  ENSG00000067167_0 (sequence is synthesized)
atgctcgcccccgctgcgggctagctgttgtgtttttttttttcccccgggcggcccggcggctgcgtactggctgtgggatgggaagtgaagccccagcgagcggctgcagcggggccg

SEQ ID NO: 51124 - DNA, 120 bp, Artificial Sequence
  ENSG00000067167_1 (sequence is synthesized)
tgaggagcagccagcgggaggcggcggcgagtcggtgagcagctgggaagagcagaaccggggcggagcacctgcaggcgcgggcggcggccccaccatggcgattcgcaagaaaagcac

SEQ ID NO: 51125 - DNA, 120 bp, Artificial Sequence
  ENSG00000067167_2 (sequence is synthesized)
caagagccccccagtgctgagccacgaattcgtcctgcagaatcacgcggacatcgtctcctgtgtggcgatggtcttcctgctggggctcatgtttgagataacggcaaaagcttctat

SEQ ID NO: 51126 - DNA, 120 bp, Artificial Sequence
  ENSG00000067167_3 (sequence is synthesized)
catttttgttactcttcagtacaatgtcaccctcccagcaacagaagaacaagctactgaatcagtgtccctttattactatggcatcaaagatttggctactgttttcttctacatgct

SEQ ID NO: 51127 - DNA, 120 bp, Artificial Sequence
  ENSG00000067167_4 (sequence is synthesized)
agtggcgataattattcatgccgtaattcaagagtatatgttggataaaattaacaggcgaatgcacttctccaaaacaaaacacagcaagtttaatgaatctggtcagcttagtgcgtt

SEQ ID NO: 51128 - DNA, 120 bp, Artificial Sequence
  ENSG00000067167_5 (sequence is synthesized)
ctacctttttgcctgtgtttggggcacattcattctcatctctgaaaactacatctcagacccaactatcttatggagggcttatccccataacctgatgacatttcaaatgaagttttt

SEQ ID NO: 51129 - DNA, 120 bp, Artificial Sequence
  ENSG00000067167_6 (sequence is synthesized)
ctacatatcacagctggcttactggcttcatgcttttcctgaactctacttccagaaaaccaaaaaagaagatattcctcgtcagcttgtctacattggtctttacctcttccacattgc

SEQ ID NO: 51130 - DNA, 120 bp, Artificial Sequence
  ENSG00000067167_7 (sequence is synthesized)
tggagcttaccttttgaacttgaatcatctaggacttgttcttctggtgctacattattttgttgaatttcttttccacatttcccgcctgttttattttagcaatgaaaagtatcagaa

SEQ ID NO: 51131 - DNA, 120 bp, Artificial Sequence
  ENSG00000067167_8 (sequence is synthesized)
aggattttctctgtgggcagttctttttgttttgggaagacttctgactttaattctttcagtactgactgttggttttggccttgcaagagcagaaaatcagaagctggatttcagtac

SEQ ID NO: 51132 - DNA, 120 bp, Artificial Sequence
  ENSG00000067167_9 (sequence is synthesized)
tggaaacttcaatgtgttagctgttagaatcgctgttctggcatccatttgcgttactcaggcatttatgatgtggaagttcattaattttcagcttcgaaggtggagggaacattctgc

SEQ ID NO: 51133 - DNA, 120 bp, Artificial Sequence
  ENSG00000067167_10 (sequence is synthesized)
ttttcaggcaccagctgtgaagaagaaaccaacagtaactaaaggcagatcttctaaaaaaggaacagaaaatggtgtgaatggaacattaacttcaaatgtagcagactctccccggaa

SEQ ID NO: 51134 - DNA, 120 bp, Artificial Sequence
  ENSG00000067167_11 (sequence is synthesized)
taaaaaagagaaatcttcataatgaattataaactaattgattaatgtccccaaagaaatctgctttctactatatctttcagcattagagatttttctgttcttgaaaatacagtctgt

SEQ ID NO: 51135 - DNA, 120 bp, Artificial Sequence
  ENSG00000067167_12 (sequence is synthesized)
gggaggattattgctatgaatgaaaaaaatattttagcttagactaagctacctgccttcaaaatagtttagggaccaccaccatattttattttgtttttatttttgaacatttttcta

SEQ ID NO: 51136 - DNA, 120 bp, Artificial Sequence
  ENSG00000067167_13 (sequence is synthesized)
atgatttggagagaaaactatttacaaaaattccacatatcagtgatacaatttcttgctgtcaccaattttttataatagcagagtggcctgttctaagaaggccatattttttaagtt

SEQ ID NO: 51137 - DNA, 120 bp, Artificial Sequence
  ENSG00000067167_14 (sequence is synthesized)
atctttcagggtaacatggaaatactataaagttggatgtcaaactttaatatgttttcagtgttctctaattttttggaatttttgtagactttacacctggaaaaaaagatttgtaaa

SEQ ID NO: 51138 - DNA, 120 bp, Artificial Sequence
  ENSG00000067167_15 (sequence is synthesized)
atcaccggaacaattgtgtgctttattttataggtagtggttattagtattacatccccattttaaaaacaaaaacataataatcgttacaacacgtggagttttactaacatacatatt

SEQ ID NO: 51139 - DNA, 120 bp, Artificial Sequence
  ENSG00000067167_16 (sequence is synthesized)
aaatcaaagtatattcttaaaagtacttgtgaagtaaaatctttcttgtgcattttcaatacttgtaaactggaaatcagaaaatatttactatgaacaggaaaatctgacatatagccc

SEQ ID NO: 51140 - DNA, 120 bp, Artificial Sequence
  ENSG00000067167_17 (sequence is synthesized)
tttttgatatgtttattaataatgattcttaatggggctcataataagtttaatatgcacagcatcttagaaaagtttaacctgcaaacacttttaaaacataatgcctacttgatttat

SEQ ID NO: 51141 - DNA, 120 bp, Artificial Sequence
  ENSG00000067167_18 (sequence is synthesized)
atctataaaaagactgacaggtaattatatttggaaaacatttaatgcactaactttaaagaaattgaaaattcaggtggataaatagtcttacaaaagacaatgtgctttatgttatac

SEQ ID NO: 51142 - DNA, 120 bp, Artificial Sequence
  ENSG00000067167_19 (sequence is synthesized)
ctatagctttggtcccatctttaattgagaaacatttatctgtataaaacatatttttggataaatatatatatatatatttgtatctctacagaaaggctctaaaaagcatttgaggaa

SEQ ID NO: 51143 - DNA, 120 bp, Artificial Sequence
  ENSG00000067167_20 (sequence is synthesized)
aatatttggttcccttttctataatcatcctttaagattcttatagctacatttggtttattcatcatatttacagtatatatattgttcttttcagtgttcacatcttgttccccattt

SEQ ID NO: 51144 - DNA, 120 bp, Artificial Sequence
  ENSG00000067167_21 (sequence is synthesized)
ctcacttgtgtcaccagctgtttgtgccatttttagtgtaaaagttgcagacctattagatctgcagtttaagttgccatgctgctaggaaattgtcctttttctttctagctgttaacc

SEQ ID NO: 51145 - DNA, 120 bp, Artificial Sequence
  ENSG00000067167_22 (sequence is synthesized)
tacttcctggaaaaagtagtagctctctgtagcattatggagtttcagtggaaccaaatttttgccattaaaaactggcattatactgaactatacattgagaaatcaatcaaaataaaa

SEQ ID NO: 51146 - DNA, 120 bp, Artificial Sequence
  ENSG00000067167_23 (sequence is synthesized)
atttttactttcacaagttgtatcctggatgtttctgtcattgttggtgtttaggctattttggtatataacctcattaaaatgtaccatatttaaaacacttcatagacattcagaata

SEQ ID NO: 51147 - DNA, 120 bp, Artificial Sequence
  ENSG00000067167_24 (sequence is synthesized)
acccttttcaaaattgtgttctgcaaataaacagatttgttccacagaatattggtgaggactactggggggatagatggtcataaccaaataaatctgggaatcactggattaaactaa

SEQ ID NO: 51148 - DNA, 120 bp, Artificial Sequence
  ENSG00000067167_25 (sequence is synthesized)
tagtgcgttctacctttttgcctgtgtttggggcacattcattctcatctcttgtctctactactatgaacataacaattttaatattagaggaacatcaaattgtcagcatgtaactat

SEQ ID NO: 51149 - DNA, 120 bp, Artificial Sequence
  ENSG00000067167_26 (sequence is synthesized)
gattaatattgtgtcatttaatacacattagaaaaaagagccatagatcttagctctaaaagggattttgagtttatctgattgaagcaaatctaagaagatattcctcgtcagcttgtc

SEQ ID NO: 51150 - DNA, 80 bp, Artificial Sequence
  ENSG00000067167_27 (sequence is synthesized)
cgcagttcctggttcccgcgaagggttacgtggcagccggcgaggggcctgcgggcgggggcggcccctgcgctgccgag

SEQ ID NO: 51151 - DNA, 120 bp, Artificial Sequence
  ENSG00000067167_28 (sequence is synthesized)
cctcggccgcggtgagcgtcagccccgcgagggccggggaaggccgaggcccggcccccgggtctgaggagtgccggcctggagaccacaggccccgagtgacaggggagcccccggtag

SEQ ID NO: 51152 - DNA, 120 bp, Artificial Sequence
  ENSG00000067167_29 (sequence is synthesized)
ctccgagattggggtgagcgagaaaccggagtcaggcatctgctttcgacttgaagggcggtggccgccgggcaccggcgcagtggaggcgcgccagattgttttcatttttgtctttta

SEQ ID NO: 51153 - DNA, 120 bp, Artificial Sequence
  ENSG00000067167_30 (sequence is synthesized)
aactgatattattaccagttaacgaactttttgccctgacgctttaaagaaacaaggtctgatggataaatcgaggttctgaacagcggtgccaaggaatcgagtaattttgtttcttga

SEQ ID NO: 51154 - DNA, 120 bp, Artificial Sequence
  ENSG00000067167_31 (sequence is synthesized)
agtaggagaggatgggaatgtcaggagtgtgtaaattctcttcccacgtatctagtattttgatgacttatttaacagctgttgaatgtggatgataaactttgcaaggtgaacgagtaa

SEQ ID NO: 51155 - DNA, 120 bp, Artificial Sequence
  ENSG00000067167_32 (sequence is synthesized)
catcctacgtttttcccctcgctccccaatacacacgctcattcctttgcttttttccctttttaatttttctctggagcctttatgtctcagtaaatatacaaattattttgctcctgc

SEQ ID NO: 51156 - DNA, 120 bp, Artificial Sequence
  ENSG00000067167_33 (sequence is synthesized)
cttgttttgtctcctctctcctgcatgtaacaagtgagagtagagattttggagtatttttacgagtctgtatttccagagtctaggatagtgcctgggacataggagtgcttaaaaaaa

SEQ ID NO: 51157 - DNA, 120 bp, Artificial Sequence
  ENSG00000067177_0 (sequence is synthesized)
gcctcccgctcgcgtctcccgcaaggtggaggcggcgcagcggtcgttgacctgttggcggcggccgggcgggaggctgtgggccgcggcggtctcccggggttgaggggaggatgcagg

SEQ ID NO: 51158 - DNA, 120 bp, Artificial Sequence
  ENSG00000067177_1 (sequence is synthesized)
agtcacacgcggaggccggactggactaagggggcaggagcggcgcctggggcgctgcggcggggctctagaccgcgggaagccagtgctagcgctggcgcgtggtgggcccctgaggcc

SEQ ID NO: 51159 - DNA, 120 bp, Artificial Sequence
  ENSG00000067177_2 (sequence is synthesized)
gccggagtccggagaggtacgcggaatccgcggcgccaggcctgagcggtgggagggctctgcggggcctggtgttcaggcgtcccaccacgagggtggagcagcgttggatacttgttc

SEQ ID NO: 51160 - DNA, 120 bp, Artificial Sequence
  ENSG00000067177_3 (sequence is synthesized)
cttagggaccgaaggctccggtggcacccgggctatttctcagaggacaattagtaacgtgtcgccatgaggagccggagtaactccggggtccggctggacggctacgctcgactggtg

SEQ ID NO: 51161 - DNA, 120 bp, Artificial Sequence
  ENSG00000067177_4 (sequence is synthesized)
caacagaccatcctgtgccatcagaatccagtgactggcttgcttccagccagctatgatcagaaagatgcttgggtccgagataatgtgtacagcatcttggctgtgtggggtttgggc

SEQ ID NO: 51162 - DNA, 120 bp, Artificial Sequence
  ENSG00000067177_5 (sequence is synthesized)
ctggcctatcggaagaatgcagaccgggatgaggataaggcaaaggcctatgaattggagcagagtgtagtgaagctgatgagaggactactgcactgcatgatcagacaggtggataaa

SEQ ID NO: 51163 - DNA, 120 bp, Artificial Sequence
  ENSG00000067177_6 (sequence is synthesized)
gtagaatccttcaaatatagtcagagtactaaggatagcctccatgcaaagtacaacaccaaaacctgtgccactgtagtgggtgatgatcaatggggacacctgcagttggatgctacc

SEQ ID NO: 51164 - DNA, 120 bp, Artificial Sequence
  ENSG00000067177_7 (sequence is synthesized)
tctgtgtacctgctcttcttagcccaaatgactgcctcaggactccatatcatccacagcctagatgaagtcaatttcatacagaaccttgtgttttacattgaagctgcatataaaact

SEQ ID NO: 51165 - DNA, 120 bp, Artificial Sequence
  ENSG00000067177_8 (sequence is synthesized)
gctgacttcgggatatgggaacgtggagacaagaccaaccaagggatctcagagttgaatgccagttcagttggaatggcaaaggcagccctggaagcattagatgaactggatctgttt

SEQ ID NO: 51166 - DNA, 120 bp, Artificial Sequence
  ENSG00000067177_9 (sequence is synthesized)
ggtgtgaaaggtgggcctcaatcagttatccatgtcctggctgatgaagtacagcactgccagtctatcctaaattcactactgccccgtgcttcaacatcaaaagaggttgatgctagt

SEQ ID NO: 51167 - DNA, 120 bp, Artificial Sequence
  ENSG00000067177_10 (sequence is synthesized)
ctactctcagtggtttccttccctgcctttgcagtagaggatagccagttggtggagctcacaaaacaggaaatcatcaccaagcttcagggtcgttatggttgctgtcgctttctacga

SEQ ID NO: 51168 - DNA, 120 bp, Artificial Sequence
  ENSG00000067177_11 (sequence is synthesized)
gatggatataaaactcctaaagaggatcccaatcgtctgtactatgaaccagctgagctgaagctatttgaaaacattgagtgtgaatggccattgttctggacatactttattcttgat

SEQ ID NO: 51169 - DNA, 120 bp, Artificial Sequence
  ENSG00000067177_12 (sequence is synthesized)
ggggtcttcagtggcaatgcagaacaggttcaagaatataaagaggctcttgaagcagtcctcatcaagggcaaaaatggagtcccacttctgccagagctgtacagtgttcctcctgac

SEQ ID NO: 51170 - DNA, 120 bp, Artificial Sequence
  ENSG00000067177_13 (sequence is synthesized)
agggtcgatgaagaatatcagaatcctcacactgtggaccgagtccccatggggaaattgcctcacatgtggggtcagtctctatacattttaggaagcttgatggcagagggattttta

SEQ ID NO: 51171 - DNA, 120 bp, Artificial Sequence
  ENSG00000067177_14 (sequence is synthesized)
gcccctggagaaattgatcccctgaatcgcaggttttctactgtaccgaagcccgatgttgtggttcaagtctccattctagctgaaacagaagaaatcaagaccattttgaaggacaag

SEQ ID NO: 51172 - DNA, 120 bp, Artificial Sequence
  ENSG00000067177_15 (sequence is synthesized)
ggaatttacgtggagaccattgctgaggtataccccatcagagtacaaccagctcgtattctcagccacatttattccagcctaggatgcaacaatagaatgaaactcagtggacgaccc

SEQ ID NO: 51173 - DNA, 120 bp, Artificial Sequence
  ENSG00000067177_16 (sequence is synthesized)
tacagacacatgggagtgcttggaacttcaaaactctatgacattcggaaaactatctttactttcactccacagtttatagaccagcaacagttctacctggctctggacaacaagatg

SEQ ID NO: 51174 - DNA, 120 bp, Artificial Sequence
  ENSG00000067177_17 (sequence is synthesized)
atagtggaaatgcttagaacagacctctcctacctctgtagccgctggcggatgacaggccagcccaccatcaccttccccatctcacacagcatgcttgatgaagatggaacaagcttg

SEQ ID NO: 51175 - DNA, 120 bp, Artificial Sequence
  ENSG00000067177_18 (sequence is synthesized)
aattcaagtatcctggcagcactccgaaaaatgcaagatgggtattttggtggggcaagggttcaaacaggtaaattgtcagagtttttgacaacatcttgttgcacacacttgagcttc

SEQ ID NO: 51176 - DNA, 120 bp, Artificial Sequence
  ENSG00000067177_19 (sequence is synthesized)
atggaccctggacctgagggtaagctgtacagtgaagattatgatgacaactatgattacctggaatctggcaactggatgaatgattatgattcaaccagtcatgctcgctgtggtgat

SEQ ID NO: 51177 - DNA, 120 bp, Artificial Sequence
  ENSG00000067177_20 (sequence is synthesized)
gaagttgctcgttatttagatcaccttttggcgcacactgctccccatcctaaactagcccctacctcacagaagggagggctagatcggttccaagctgctgtgcaaacaacctgcgac

SEQ ID NO: 51178 - DNA, 120 bp, Artificial Sequence
  ENSG00000067177_21 (sequence is synthesized)
ttaatgtccttggtgaccaaggccaaggaactgcatgtacagaatgttcacatgtatcttcctacgaagttatttcaggcttcccggccttcattcaacttacttgattcacctcatccc

SEQ ID NO: 51179 - DNA, 120 bp, Artificial Sequence
  ENSG00000067177_22 (sequence is synthesized)
cgacaggagaaccaggttccctctgttcgtgtagaaatacatcttcctagagaccagtctggggaggtggactttaaagcactggttttacagttgaaggagacctcaagcttacaggaa

SEQ ID NO: 51180 - DNA, 120 bp, Artificial Sequence
  ENSG00000067177_23 (sequence is synthesized)
caagctgatatcctctatatgctgtatactatgaaaggacctgactggaacactgaattgtataatgaacggagtgctacagtgagagagcttcttaccgagctgtatggcaaagtggga

SEQ ID NO: 51181 - DNA, 120 bp, Artificial Sequence
  ENSG00000067177_24 (sequence is synthesized)
gaaattcgtcactggggcctgatccgatacatttctgggatcttaaggaagaaagtggaagcacttgatgaggcctgcacagaccttctctcccaccagaaacatttgacagtaggactt

SEQ ID NO: 51182 - DNA, 120 bp, Artificial Sequence
  ENSG00000067177_25 (sequence is synthesized)
cctccagaacctcgagaaaagactatctctgcacctctgccctatgaggcgctcactcagctgatagatgaagccagtgaaggggatatgagcatttcaatccttacacaggaaataatg

SEQ ID NO: 51183 - DNA, 120 bp, Artificial Sequence
  ENSG00000067177_26 (sequence is synthesized)
aaatgtttcgacttcgaattggtctgatcatacaagttatggcaacagaactggcccactcccttcgatgctcagctgaggaagccacagagggcctgatgaatctcagtccttcggcca

SEQ ID NO: 51184 - DNA, 120 bp, Artificial Sequence
  ENSG00000067177_27 (sequence is synthesized)
tgaagaatctcctgcatcacattctcagcggcaaggagtttggagtggaacgaagcgttcgtcccactgattcaaatgtcagtcctgctatttctatccacgagattggtgctgttggag

SEQ ID NO: 51185 - DNA, 120 bp, Artificial Sequence
  ENSG00000067177_28 (sequence is synthesized)
caaccaaaacagaacgaactgggatcatgcagttaaaaagtgagataaagcaggtggaatttcgtagactgtcaatctcagctgagagtcagtcacctggaacctctatgactccaagta

SEQ ID NO: 51186 - DNA, 120 bp, Artificial Sequence
  ENSG00000067177_29 (sequence is synthesized)
gtgggtcctttcctagtgcatatgatcagcagtcatctaaagatagtcgtcaaggtcaatggcaacgccgaagaaggctggatggggcactgaatagagttccagttggattttatcaga

SEQ ID NO: 51187 - DNA, 120 bp, Artificial Sequence
  ENSG00000067177_30 (sequence is synthesized)
aagtatggaaagttttgcagaagtgtcacggactttctgttgaagggtttgtccttccttcctctaccactagagagatgactccaggtgagattaaattctctgttcatgtggagtctg

SEQ ID NO: 51188 - DNA, 120 bp, Artificial Sequence
  ENSG00000067177_31 (sequence is synthesized)
tcctgaatcgtgtacctcagccagagtaccgtcagctgctggttgaagccatccttgtcctcaccatgctggcagatattgaaattcatagcatcggaagcatcattgctgtggaaaaaa

SEQ ID NO: 51189 - DNA, 120 bp, Artificial Sequence
  ENSG00000067177_32 (sequence is synthesized)
tagtgcatattgccaatgacttgttccttcaagaacagaaaacccttggcgcagatgataccatgttggcaaaggatcccgcatctggcatctgtactcttctgtatgacagtgcaccca

SEQ ID NO: 51190 - DNA, 120 bp, Artificial Sequence
  ENSG00000067177_33 (sequence is synthesized)
gtggcaggtttggcaccatgacctacctctccaaggcagccgccacctacgtgcaggagttcctgccccacagcatctgtgccatgcaatgagggctttggttcctggcttctgggagcc

SEQ ID NO: 51191 - DNA, 120 bp, Artificial Sequence
  ENSG00000067177_34 (sequence is synthesized)
ttttgacagctggtccctgcctcggttgattgtgcatggaactaaaatgttattgcctaatcactccaaccctgcccctttctgtcccatccttcccaagaagagagaactttttcgata

SEQ ID NO: 51192 - DNA, 120 bp, Artificial Sequence
  ENSG00000067177_35 (sequence is synthesized)
aactaactactgtagaagaagtgaacacttacctggaggctcaccttgcagaaccagtgacaatcttatgagtataatgaacactcagccaggcctgtcatgattggctttatttctttc

SEQ ID NO: 51193 - DNA, 120 bp, Artificial Sequence
  ENSG00000067177_36 (sequence is synthesized)
atcattcataaaagtttgcatgtgtttttattctctagatctgttaccaatatagttttctaactcctgtttggggagcaagtgttaataataacttattcctaaagcttggtttttctt

SEQ ID NO: 51194 - DNA, 120 bp, Artificial Sequence
  ENSG00000067177_37 (sequence is synthesized)
ttttgtgattttattgtgtatatgagtggtgggtactttgggacattatttcaaatgagtaaactctaaattgttaaatatttatgctgctataaattagaattacctattctacgtgcc

SEQ ID NO: 51195 - DNA, 120 bp, Artificial Sequence
  ENSG00000067177_38 (sequence is synthesized)
ttttcttaggaaaagagagtactggatcatggttttcttccttacttacaggttgcttcacactgagtgataatttaaaattgtttctatgtagaatcattgtctctactgttgccctct

SEQ ID NO: 51196 - DNA, 120 bp, Artificial Sequence
  ENSG00000067177_39 (sequence is synthesized)
ctgtgtctgcacacataatgcctctctcactttggtgaaatatcaaaaaaatgcaagtacagcatgcatatttaagaatttctgaactaacacttgaaatcacattttataaagattgtt

SEQ ID NO: 51197 - DNA, 120 bp, Artificial Sequence
  ENSG00000067177_40 (sequence is synthesized)
ggtactcagagttgtatttgcagcagaaaatgcagaataacccagaaatggagcccggagcccaattccagagaggaagggaaagaagagacgatgcctggacaatgtcttatacatagg

SEQ ID NO: 51198 - DNA, 120 bp, Artificial Sequence
  ENSG00000067177_41 (sequence is synthesized)
gaacagagagggaatcagaggtggcttagttccctgaagacagccttatgcgcttaatccctgcctttgaaaaatgggccaatacacaacacagacaataatttgaagcgtctgtattca

SEQ ID NO: 51199 - DNA, 120 bp, Artificial Sequence
  ENSG00000067177_42 (sequence is synthesized)
gcaaagataaatacagcagtccagtctataggtgctctacttagcattcttttcatgtgctcctggtctctgtctcactcacctactttctactacatccaactcaactccctgacaccc

SEQ ID NO: 51200 - DNA, 120 bp, Artificial Sequence
  ENSG00000067177_43 (sequence is synthesized)
tatccccccatctattcttaaactctttcatatatattttcacttcctaattctagtgtacatatccctgtatatcatggtatctgtgggcatatgtctgtttcttataaagacacatat

SEQ ID NO: 51201 - DNA, 120 bp, Artificial Sequence
  ENSG00000067177_44 (sequence is synthesized)
gtgtgtgtgtgtgtgtgtgtgtgtataagcatacatgggaatttttctgaatgtaagcagttttgatgtgtctgtatatcaatctgtatctacatttgatggactgagtaagaatgttgc

SEQ ID NO: 51202 - DNA, 120 bp, Artificial Sequence
  ENSG00000067177_45 (sequence is synthesized)
taagaatgttgcatgtgagagaagggatgtgactgtggactcagattgacacacacagattggtggaagaatagcttcagtcctcttccttcatcccatatgtaggtagccttgcttgac

SEQ ID NO: 51203 - DNA, 120 bp, Artificial Sequence
  ENSG00000067177_46 (sequence is synthesized)
aaatgtttcttctaactctccttcttctgaattgtgcagagactctgttaacttccctttttgcacttagataacttcctacttcaaccccctcctttatcttggatttctaaagttttt

SEQ ID NO: 51204 - DNA, 120 bp, Artificial Sequence
  ENSG00000067177_47 (sequence is synthesized)
ccccaatattgggaatggtgagggtggggatgagagactctctgaacaattcttgcagaaccagtgacaatcttatgaatataatgaataagtaagcatatagtagggtgatagaataca

SEQ ID NO: 51205 - DNA, 120 bp, Artificial Sequence
  ENSG00000067177_48 (sequence is synthesized)
gatagtagaaacaaagagaggacagcaaaccttttcagcacttctctcagagcaaatggaaacacacagtaagtagctttctgactacattattttctggtcacttttaaagaaagttta

SEQ ID NO: 51206 - DNA, 120 bp, Artificial Sequence
  ENSG00000067177_49 (sequence is synthesized)
caacctgttctgaaactatttgtcttttcactggttgtaagtgtaccccaatctcagggagtatatctgtagtgccacaggcaaaagatccactccttcccacactcatttgcctgaact

SEQ ID NO: 51207 - DNA, 120 bp, Artificial Sequence
  ENSG00000067177_50 (sequence is synthesized)
tactcgaagggctgcatttctctgagtttacgaaattgtgtcattatggtccccatacagtggtatttaacttttaaagcaacttttaagaaaactcgacttgttttttgttcattttaa

SEQ ID NO: 51208 - DNA, 120 bp, Artificial Sequence
  ENSG00000067177_51 (sequence is synthesized)
gtgtgtggtactaaaaagacatgttagactttttttaaaaaagcacttatgttttgaaaatagaataaataataagaatttccaattaaatcatgtctggtgccaatgtgcaaaacttca

SEQ ID NO: 51209 - DNA, 120 bp, Artificial Sequence
  ENSG00000067182_0 (sequence is synthesized)
ctccagctcttcctgtcccgctgttgcaacactgcctcactcttcccctcccaccttctctcccctcctctctgctttaattttctcagaattctctggactgaggctccagttctggcc

SEQ ID NO: 51210 - DNA, 120 bp, Artificial Sequence
  ENSG00000067182_1 (sequence is synthesized)
tttggggttcaagatcactgggaccaggccgtgatctctatgcccgagtctcaaccctcaactgtcaccccaaggcacttgggacgtcctggacagaccgagtcccgggaagccccagca

SEQ ID NO: 51211 - DNA, 120 bp, Artificial Sequence
  ENSG00000067182_2 (sequence is synthesized)
ctgccgctgccacactgccctgagcccaaatgggggagtgagaggccatagctgtctggcatgggcctctccaccgtgcctgacctgctgctgccactggtgctcctggagctgttggtg

SEQ ID NO: 51212 - DNA, 120 bp, Artificial Sequence
  ENSG00000067182_3 (sequence is synthesized)
ggaatatacccctcaggggttattggactggtccctcacctaggggacagggagaagagagatagtgtgtgtccccaaggaaaatatatccaccctcaaaataattcgatttgctgtacc

SEQ ID NO: 51213 - DNA, 120 bp, Artificial Sequence
  ENSG00000067182_4 (sequence is synthesized)
aagtgccacaaaggaacctacttgtacaatgactgtccaggcccggggcaggatacggactgcagggagtgtgagagcggctccttcaccgcttcagaaaaccacctcagacactgcctc

SEQ ID NO: 51214 - DNA, 120 bp, Artificial Sequence
  ENSG00000067182_5 (sequence is synthesized)
agctgctccaaatgccgaaaggaaatgggtcaggtggagatctcttcttgcacagtggaccgggacaccgtgtgtggctgcaggaagaaccagtaccggcattattggagtgaaaacctt

SEQ ID NO: 51215 - DNA, 120 bp, Artificial Sequence
  ENSG00000067182_6 (sequence is synthesized)
ttccagtgcttcaattgcagcctctgcctcaatgggaccgtgcacctctcctgccaggagaaacagaacaccgtgtgcacctgccatgcaggtttctttctaagagaaaacgagtgtgtc

SEQ ID NO: 51216 - DNA, 120 bp, Artificial Sequence
  ENSG00000067182_7 (sequence is synthesized)
tcctgtagtaactgtaagaaaagcctggagtgcacgaagttgtgcctaccccagattgagaatgttaagggcactgaggactcaggcaccacagtgctgttgcccctggtcattttcttt

SEQ ID NO: 51217 - DNA, 120 bp, Artificial Sequence
  ENSG00000067182_8 (sequence is synthesized)
ggtctttgccttttatccctcctcttcattggtttaatgtatcgctaccaacggtggaagtccaagctctactccattgtttgtgggaaatcgacacctgaaaaagagggggagcttgaa

SEQ ID NO: 51218 - DNA, 120 bp, Artificial Sequence
  ENSG00000067182_9 (sequence is synthesized)
accctgggcttcagtcccgtgcccagttccaccttcacctccagctccacctatacccccggtgactgtcccaactttgcggctccccgcagagaggtggcaccaccctatcagggggct

SEQ ID NO: 51219 - DNA, 120 bp, Artificial Sequence
  ENSG00000067182_10 (sequence is synthesized)
gaccccatccttgcgacagccctcgcctccgaccccatccccaacccccttcagaagtgggaggacagcgcccacaagccacagagcctagacactgatgaccccgcgacgctgtacgcc

SEQ ID NO: 51220 - DNA, 120 bp, Artificial Sequence
  ENSG00000067182_11 (sequence is synthesized)
gtggtggagaacgtgcccccgttgcgctggaaggaattcgtgcggcgcctagggctgagcgaccacgagatcgatcggctggagctgcagaacgggcgctgcctgcgcgaggcgcaatac

SEQ ID NO: 51221 - DNA, 120 bp, Artificial Sequence
  ENSG00000067182_12 (sequence is synthesized)
agcatgctggcgacctggaggcggcgcacgccgcggcgcgaggccacgctggagctgctgggacgcgtgctccgcgacatggacctgctgggctgcctggaggacatcgaggaggcgctt

SEQ ID NO: 51222 - DNA, 120 bp, Artificial Sequence
  ENSG00000067182_13 (sequence is synthesized)
tgcggccccgccgccctcccgcccgcgcccagtcttctcagatgaggctgcgcccctgcgggcagctctaaggaccgtcctgcgagatcgccttccaaccccacttttttctggaaagga

SEQ ID NO: 51223 - DNA, 120 bp, Artificial Sequence
  ENSG00000067182_14 (sequence is synthesized)
ggggtcctgcaggggcaagcaggagctagcagccgcctacttggtgctaacccctcgatgtacatagcttttctcagctgcctgcgcgccgccgacagtcagcgctgtgcgcgcggagag

SEQ ID NO: 51224 - DNA, 120 bp, Artificial Sequence
  ENSG00000067182_15 (sequence is synthesized)
aggtgcgccgtgggctcaagagcctgagtgggtggtttgcgaggatgagggacgctatgcctcatgcccgttttgggtgtcctcaccagcaaggctgctcgggggcccctggttcgtccc

SEQ ID NO: 51225 - DNA, 120 bp, Artificial Sequence
  ENSG00000067182_16 (sequence is synthesized)
tttttgttttgttttgttttgtttttaaatcaatcatgttacactaatagaaacttggcactcctgtgccctctgcctggacaagcacatagcaagctgaactgtcctaaggcaggggcg

SEQ ID NO: 51226 - DNA, 120 bp, Artificial Sequence
  ENSG00000067182_17 (sequence is synthesized)
gcacatagcaagctgaactgtcctaaggcaggggcgagcacggaacaatggggccttcagctggagctgtggacttttgtacatacactaaaattctgaagttaaagctctgctcttgga

SEQ ID NO: 51227 - DNA, 120 bp, Artificial Sequence
  ENSG00000067182_18 (sequence is synthesized)
ggggtgagggaggacatgggtgggtgcgatggacatgtgtggagggaggtgaggagtgtcccctcagttcataccgctggggactctgggcagaaggtggccctggatggctggggagat

SEQ ID NO: 51228 - DNA, 120 bp, Artificial Sequence
  ENSG00000067182_19 (sequence is synthesized)
atctcttcttgaaatcacttttataccattctatgtggttctcaccatgagcttgagtggtgggctaaagtgcctctccctgctttcagcttcctgctgggaactcactctctcaagttc

SEQ ID NO: 51229 - DNA, 120 bp, Artificial Sequence
  ENSG00000067182_20 (sequence is synthesized)
cttccagcaccaccccatagagttcccatcactccacactgtccagtgacaactcccaacatggaagatctgctagttctacagggtgctctctggctgccccagtaacatgtgttttta

SEQ ID NO: 51230 - DNA, 120 bp, Artificial Sequence
  ENSG00000067182_21 (sequence is synthesized)
aatttttcacatgcatgtttgaccccgactccccgaagtcaggtactgtaactagcagtgtcatttaagaaaaagccctttaacctctctttgccaaaggattcttatcagcaaaacagt

SEQ ID NO: 51231 - DNA, 120 bp, Artificial Sequence
  ENSG00000067182_22 (sequence is synthesized)
gatgaaacaacaatcccataacagctagctggctaccttctcaagcacttattaaatgaggcataatgattttgcttaatcctcaatcctgagaggtgggcgatccctgtggtgatgagg

SEQ ID NO: 51232 - DNA, 120 bp, Artificial Sequence
  ENSG00000067182_23 (sequence is synthesized)
tctacacagccttttcaagatccctgccaattctaaaattaaatgattctatgattaactgtgtttcattcttctgcatcagttcccaaaacaaattatatcaagagacagcaaaaatat

SEQ ID NO: 51233 - DNA, 120 bp, Artificial Sequence
  ENSG00000067182_24 (sequence is synthesized)
cccttccccatgcggtggcacttcctttccttccccctcctgtattctgtgggtctgacaaccaactcctctctggccgcccccaccctgtccctcgtcacttcctctgtcctgtggggt

SEQ ID NO: 51234 - DNA, 120 bp, Artificial Sequence
  ENSG00000067182_25 (sequence is synthesized)
gggggtgcaggcgcttctcctttagctgtgccgcacttctccctacaggccaggagaaacagaacaccgtgtgcacctgccatgcaggtttctttctaagagaaaacgagtgtgtctcct

SEQ ID NO: 51235 - DNA, 120 bp, Artificial Sequence
  ENSG00000067182_26 (sequence is synthesized)
ttctctgcttcttccagttgttcttccctaactttgctgtctctcctgggctgggattttctccctccctcctctcctagagacttcagggaatcggccctggctgttgtccctagcatg

SEQ ID NO: 51236 - DNA, 120 bp, Artificial Sequence
  ENSG00000067182_27 (sequence is synthesized)
ctcttcttgcccccacccgtccatccatcccacccatccatctatccctgcggcccccctctgcccgctcctctgaccaacacctgctttgtctgcaggcaccacagtgctgttgcccct

SEQ ID NO: 51237 - DNA, 120 bp, Artificial Sequence
  ENSG00000067191_0 (sequence is synthesized)
agtggagagagcgggaggagcgagggaaggcaggaaggaggcagccgaaggccgagctgggtggctggaccgggtgctggctgcgccgcgctgctttcggctcccacggcctctcccatg

SEQ ID NO: 51238 - DNA, 120 bp, Artificial Sequence
  ENSG00000067191_1 (sequence is synthesized)
cgctgagggagcccggctgggccgggccggcggcgggaggggaggctcctctccatggtccagaagaccagcatgtcccggggcccttacccaccctcccaggagatccccatggaggtc

SEQ ID NO: 51239 - DNA, 120 bp, Artificial Sequence
  ENSG00000067191_2 (sequence is synthesized)
ttcgaccccagcccgcagggcaaatacagcaagaggaaagggcgattcaaacggtcagatgggagcacgtcctcggataccacatccaacagctttgtccgccagggctcagcggagtcc

SEQ ID NO: 51240 - DNA, 120 bp, Artificial Sequence
  ENSG00000067191_3 (sequence is synthesized)
tacaccagccgtccatcagactctgatgtatctctggaggaggaccgggaagccttaaggaaggaagcagagcgccaggcattagcgcagctcgagaaggccaagaccaagccagtggca

SEQ ID NO: 51241 - DNA, 120 bp, Artificial Sequence
  ENSG00000067191_4 (sequence is synthesized)
tttgctgtgcggacaaatgttggctacaatccgtctccaggggatgaggtgcctgtgcagggagtggccatcaccttcgagcccaaagacttcctgcacatcaaggagaaatacaataat

SEQ ID NO: 51242 - DNA, 120 bp, Artificial Sequence
  ENSG00000067191_5 (sequence is synthesized)
gactggtggatcgggcggctggtgaaggagggctgtgaggttggcttcattcccagccccgtcaaactggacagccttcgcctgctgcaggaacagaagctgcgccagaaccgcctcggc

SEQ ID NO: 51243 - DNA, 120 bp, Artificial Sequence
  ENSG00000067191_6 (sequence is synthesized)
tccagcaaatcaggcgataactccagttccagtctgggagatgtggtgactggcacccgccgccccacaccccctgccagtgccaaacagaagcagaagtcgacagagcatgtgcccccc

SEQ ID NO: 51244 - DNA, 120 bp, Artificial Sequence
  ENSG00000067191_7 (sequence is synthesized)
tatgacgtggtgccttccatgaggcccatcatcctggtgggaccgtcgctcaagggctacgaggttacagacatgatgcagaaagctttatttgacttcttgaagcatcggtttgatggc

SEQ ID NO: 51245 - DNA, 120 bp, Artificial Sequence
  ENSG00000067191_8 (sequence is synthesized)
aggatctccatcactcgtgtgacggcagatatttccctggctaagcgctcagttctcaacaaccccagcaaacacatcatcattgagcgctccaacacacgctccagcctggctgaggtg

SEQ ID NO: 51246 - DNA, 120 bp, Artificial Sequence
  ENSG00000067191_9 (sequence is synthesized)
cagagtgaaatcgagcgaatcttcgagctggcccggacccttcagttggtcgctctggatgctgacaccatcaatcacccagcccagctgtccaagacctcgctggcccccatcattgtt

SEQ ID NO: 51247 - DNA, 120 bp, Artificial Sequence
  ENSG00000067191_10 (sequence is synthesized)
tacatcaagatcacctctcccaaggtacttcaaaggctcatcaagtcccgaggaaagtctcagtccaaacacctcaatgtccaaatagcggcctcggaaaagctggcacagtgcccccct

SEQ ID NO: 51248 - DNA, 120 bp, Artificial Sequence
  ENSG00000067191_11 (sequence is synthesized)
gaaatgtttgacatcatcctggatgagaaccaattggaggatgcctgcgagcatctggcggagtacttggaagcctattggaaggccacacacccgcccagcagcacgccacccaatccg

SEQ ID NO: 51249 - DNA, 120 bp, Artificial Sequence
  ENSG00000067191_12 (sequence is synthesized)
ctgctgaaccgcaccatggctaccgcagccctggctgccagccctgcccctgtctccaacctccagggaccctaccttgcttccggggaccagccactggaacgggccaccggggagcac

SEQ ID NO: 51250 - DNA, 120 bp, Artificial Sequence
  ENSG00000067191_13 (sequence is synthesized)
gccagcatgcacgagtacccaggggagctgggccagcccccaggcctttaccccagcagccacccaccaggccgggcaggcacgctacgggcactgtcccgccaagacacttttgatgcc

SEQ ID NO: 51251 - DNA, 120 bp, Artificial Sequence
  ENSG00000067191_14 (sequence is synthesized)
gacacccccggcagccgaaactctgcctacacggagctgggagactcatgtgtggacatggagactgacccctcagaggggccagggcttggagaccctgcagggggcggcacgccccca

SEQ ID NO: 51252 - DNA, 120 bp, Artificial Sequence
  ENSG00000067191_15 (sequence is synthesized)
gttttggggcgcaacaagaatgagctggagggctggggacgaggcgtctacattcgctgagaggcaggggccacacggcgggaggaagggctctgagcccaggggaggggagggagcgag

SEQ ID NO: 51253 - DNA, 120 bp, Artificial Sequence
  ENSG00000067191_16 (sequence is synthesized)
gggctcacacctgacatgtattcgcctccagggggcgctgtctccctcctttcagatgcctttgctcaaagcttggggtttctttggtgttaccatcccagctcccgggaggcccttaag

SEQ ID NO: 51254 - DNA, 120 bp, Artificial Sequence
  ENSG00000067191_17 (sequence is synthesized)
ccccagctgtcggtttttacctgcctgttgtggatggatgggggatacccacctttctgaagtgtcccctttctcccatcttaaggggctctcctccctcaccctcctagagaaaaggtg

SEQ ID NO: 51255 - DNA, 120 bp, Artificial Sequence
  ENSG00000067191_18 (sequence is synthesized)
cacttccttaactctttctactcggggccctaagtgacggtcctaagtgggatggctctccttctcccaagctgcagtactggggaagggctgggcgcttttcctggaaagggaggccac

SEQ ID NO: 51256 - DNA, 120 bp, Artificial Sequence
  ENSG00000067191_19 (sequence is synthesized)
agattctttcccatgggggctctcttccccagaccccagatccaaggtccctcaccctgcctgccccttcctcccagcttcctggcagcatcgtctggtcggtgaaagccatagcatgga

SEQ ID NO: 51257 - DNA, 120 bp, Artificial Sequence
  ENSG00000067191_20 (sequence is synthesized)
caccccatggggagcttgtcttggggagggttctgggtggaagctggcaggcatacagcaccctctaccctccgtggccatggcaacgtccagggcccagaaccctgaggagtgagcggc

SEQ ID NO: 51258 - DNA, 120 bp, Artificial Sequence
  ENSG00000067191_21 (sequence is synthesized)
cgagacgctgctccccaccccccacctccatgcctcagcctttgcctaccccaggaatgagcttggcctccaacatcccttgcctgctgccattagtagagggggcccctctgcatctga

SEQ ID NO: 51259 - DNA, 120 bp, Artificial Sequence
  ENSG00000067191_22 (sequence is synthesized)
gccccccatccctgtgccacctgggtgtggagcccatggaacactctggtccgcctcattttaaaccaaaaaactgctccttcaccctcaccctgaggccccaggggagaggacccgtgg

SEQ ID NO: 51260 - DNA, 120 bp, Artificial Sequence
  ENSG00000067191_23 (sequence is synthesized)
gatggtgcccaggggttgccttgggacctcggatctcctctggggggcttggctgctgctgttgctgctctgtatttgcctctcgtgattctgtttgttacccatgttcacttcccccag

SEQ ID NO: 51261 - DNA, 120 bp, Artificial Sequence
  ENSG00000067191_24 (sequence is synthesized)
gagaggccttggtaccccctctcccctggggcatccctttgccttggcatccctgtagcccagcaaccctgcccctccccagcatcccagctgggccagagagagccgagtgtgccaaca

SEQ ID NO: 51262 - DNA, 120 bp, Artificial Sequence
  ENSG00000067191_25 (sequence is synthesized)
aggactggggcctgcccggctgcccgcctcagggatgggcacctcatgcctgtctcgccacctcctgtgccaatgtcccaccctccacctgggggtggggtgcagcttccacttactgat

SEQ ID NO: 51263 - DNA, 120 bp, Artificial Sequence
  ENSG00000067191_26 (sequence is synthesized)
tagaagacaccactgccctcccttcccccctccctgtctggtgtcctgtgcccccatctgtctgtctatatttgtctgtactcccctaggagaagtattttgccatatataaaaccactg

SEQ ID NO: 51264 - DNA, 120 bp, Artificial Sequence
  ENSG00000067191_27 (sequence is synthesized)
tcctgtcctttgtggctgcctcccaagcctgcttctttgtcctcgccacatagtcgtcagcgtaggcacctgggagctgctgatatgcacggggagttgaaagggtgggtgcctgaagat

SEQ ID NO: 51265 - DNA, 120 bp, Artificial Sequence
  ENSG00000067191_28 (sequence is synthesized)
gttgtgccctgagtcattgactcaaaagaaaagatgatcctttgattttggccctctgatgtattgtgcccaagccaggagctgcttgggcagtcccagctccacactggccctgagccc

SEQ ID NO: 51266 - DNA, 120 bp, Artificial Sequence
  ENSG00000067191_29 (sequence is synthesized)
cttcacttacctgtctctccacaagtagagccaaaggcaatgggaagctcaatgttgctcagtgggtgagatccagacccactggtgcaatgtcttaaatacacatgactgtttttctgc

SEQ ID NO: 51267 - DNA, 120 bp, Artificial Sequence
  ENSG00000067191_30 (sequence is synthesized)
gccctgcccctgtctccaacctccaggtacaggtgctcacctcgctcaggagaaacctcggcttctggggcgggctggagtcctcacagcggggcagtgtggtgccccaggagcaggaac

SEQ ID NO: 51268 - DNA, 120 bp, Artificial Sequence
  ENSG00000067191_31 (sequence is synthesized)
atgccatgtagtgggcgccctgcccgtcttccctcctgctctggggtcggaactggagtgcagggaacatggaggaggaagggaagagctttattttgtaaaaaaataagatgagcggca

SEQ ID NO: 51269 - DNA, 120 bp, Artificial Sequence
  ENSG00000067191_32 (sequence is synthesized)
actgagggtgccgggatggaggcgcccagccggaccgtggtggtgaagctggcaaaatctgtggtggccccatcctgcggagcaggccgtccacggctgatagtgcagagagctcaggcc

SEQ ID NO: 51270 - DNA, 120 bp, Artificial Sequence
  ENSG00000067191_33 (sequence is synthesized)
gaagctggtggctgcagtccctggaatggatgccactggacctcagctgagtctatctcagcgggtgctgggggcaggggagggaaggagcagtgggagtagagactcgtccctggcatt

SEQ ID NO: 51271 - DNA, 120 bp, Artificial Sequence
  ENSG00000067191_34 (sequence is synthesized)
ccccaagcagctgtccttgggcctgccttcatctcctgcttgctgctgtcaccctcactagggccacactttccccaggggcctgagaaatctcagctcctggtcccttccacctaatac

SEQ ID NO: 51272 - DNA, 120 bp, Artificial Sequence
  ENSG00000067191_35 (sequence is synthesized)
caccttgtcttagcccttgtggtgtcatgctgggctggctggggctcgaggcatccatgatgggtggcacctccatgccttcccaggcccaggagctgggaggggcagcaatggccctga

SEQ ID NO: 51273 - DNA, 120 bp, Artificial Sequence
  ENSG00000067191_36 (sequence is synthesized)
atcaccccctcatccctcctgttgcaggacatggccagggctgggaagaatgacgctgtgcttttattgcccctcttggcagaaaaggaccttggctccttcagtgtttgccaacccagg

SEQ ID NO: 51274 - DNA, 120 bp, Artificial Sequence
  ENSG00000067191_37 (sequence is synthesized)
agacaggcagccagagtgctagtggacaaaaggcttctgagccaagcagagccaggctgaatctgctgtgtgaccttagacaaatctctccacctctctgagcctcttaattttctactg

SEQ ID NO: 51275 - DNA, 120 bp, Artificial Sequence
  ENSG00000067191_38 (sequence is synthesized)
gtggtggggagtggtggaggggggcagtccttgccacatctctgagctaaatataccctagcagtctgcacatgtagcaactctgcttgtaacccgagcccccaagggaacgggcagttt

SEQ ID NO: 51276 - DNA, 120 bp, Artificial Sequence
  ENSG00000067191_39 (sequence is synthesized)
gggccaccccctaggccagcagggccaggcactgagggtgccgggatggaggcgcccagccggaccgtggtggtggtgagctggggatggagtggggtggcagcgggtagaacagcctct

SEQ ID NO: 51277 - DNA, 120 bp, Artificial Sequence
  ENSG00000067191_40 (sequence is synthesized)
caggaaagctgacggagggcagcctttactccagcgtgtctccatgcctcctcactgtttcctgtcttctgccatttctgatgtgtgcgtgtgtatgcgcgtacatgtgtctgcatatgt

SEQ ID NO: 51278 - DNA, 120 bp, Artificial Sequence
  ENSG00000067191_41 (sequence is synthesized)
gtgtgtatgtgtgcgcatgcctacatgtgtgtctgtgtgcacctgtgtgtctgcatatgtgtgtgtgtctgcccgcacatgtgcgtctgcatgtgtgtctgtgtgtgtgcatgtaactgt

SEQ ID NO: 51279 - DNA, 120 bp, Artificial Sequence
  ENSG00000067191_42 (sequence is synthesized)
gtgtgtatgtgtacacgtgcgcgtgcctgcatgtgtgttggggtcagtgagtgtgtgcgcgcgtatgcctgcatttgtgttggggttggtgagtgtgtgtgtgcacgcgcatgcccgcgt

SEQ ID NO: 51280 - DNA, 120 bp, Artificial Sequence
  ENSG00000067191_43 (sequence is synthesized)
gtgtgttggggtcggtgagtgcctctctgctagtctgtctccctgtctgtttccctggctctttgactctgcgtgctcccatcaggggggagagggggagctacgctggttttctctcct

SEQ ID NO: 51281 - DNA, 120 bp, Artificial Sequence
  ENSG00000067191_44 (sequence is synthesized)
tctctccttcatgcctctttccccacttctgttagtgacccccgctccaccccaacccttcctccgcgggtctcccattttcattatttgtctgggaaagagatgggcagctgcaccagc

SEQ ID NO: 51282 - DNA, 120 bp, Artificial Sequence
  ENSG00000067191_45 (sequence is synthesized)
taatgacctgaggcccctggggagaggtgggactttgtttctgtctttcccaggtcccctccatgccaaacttatggaccttcctggccaagtgacccttttctgccctcaggaaagaac

SEQ ID NO: 51283 - DNA, 120 bp, Artificial Sequence
  ENSG00000067191_46 (sequence is synthesized)
ccctacatccctgcagtcctcctcttttgccacataacctcctatgccttgtccaacaccacccctgcatagtcacacaaatccacacctcttgcctcctgccctcacatgtcccccaac

SEQ ID NO: 51284 - DNA, 120 bp, Artificial Sequence
  ENSG00000067191_47 (sequence is synthesized)
ctcagggtcacagatgtctgggagctcccccccagtacactcacatgtggctgtacacacacagtcatatgcagccaactatagagcacaccctcctccacacacttgtacttgcacatc

SEQ ID NO: 51285 - DNA, 120 bp, Artificial Sequence
  ENSG00000067191_48 (sequence is synthesized)
cacacacacacatgaagaagcacgtgcattcccactaccaggtctgtacgggcaacatgtgtcttacacatatgtgtgcatccctaaaggagtcccttgtgctctgggttggtcattgtg

SEQ ID NO: 51286 - DNA, 120 bp, Artificial Sequence
  ENSG00000067191_49 (sequence is synthesized)
gtcaaagccagctgtctggcacccagcagccctcatttcagggaaagccctgtcccatatcctgctcttaacttgcctcttcggtctgtaccagcctggaactcttgggttctcttgtgt

SEQ ID NO: 51287 - DNA, 120 bp, Artificial Sequence
  ENSG00000067191_50 (sequence is synthesized)
cctaggagagcctgaggactggggctgtaagtagtgaagtttgattctggcagtaccagttaagaggagcaggggaggtaggagtctgtctccctctacccttgaacagaagctggcaaa

SEQ ID NO: 51288 - DNA, 120 bp, Artificial Sequence
  ENSG00000067191_51 (sequence is synthesized)
agcttctccgcgcctccccccttcccagcctctctggcttggtttggtggtttccgtgtgggtcttctggggctctcttgcactggtccccactcctggctgtgctctgggccctctccg

SEQ ID NO: 51289 - DNA, 120 bp, Artificial Sequence
  ENSG00000067191_52 (sequence is synthesized)
ccccagcctccaattcttcctccttttagctccccagctctgatccccgaagctggcaaaatctgtggtggccccatcctgcggagcaggccgtccacggctgatagtgcagagagctca

SEQ ID NO: 51290 - DNA, 120 bp, Artificial Sequence
  ENSG00000067191_53 (sequence is synthesized)
gagctttgcatagggtagacacagggctgctgaggtcctttctgcagaggtgcccagggctgagagttatggagcattcaagggtcttgacactggctctccatgctgatccaaccagga

SEQ ID NO: 51291 - DNA, 120 bp, Artificial Sequence
  ENSG00000067208_0 (sequence is synthesized)
tctgcttatcatggttaccaacaaaatgactgctgcctttagaaaccctagtgggaaacaggtggcgacagacaaagttgcagaaaagctgagctctactctctcatgggtgaagaacac

SEQ ID NO: 51292 - DNA, 120 bp, Artificial Sequence
  ENSG00000067208_1 (sequence is synthesized)
agtatcgcatacagtcagtcagatggccagtcaggtggcaagtccatctacttcattacataccacatcctcatctaccacactatcaacaccagccctttcaccatcttccccatcaca

SEQ ID NO: 51293 - DNA, 120 bp, Artificial Sequence
  ENSG00000067208_2 (sequence is synthesized)
gttgagtccagacgacttagaactcctggctaaactggaagaacagaatagattgttagaaacggatagtaagtctttaagatctgtaaatgggtcaagaagaaacagtggctcttctct

SEQ ID NO: 51294 - DNA, 120 bp, Artificial Sequence
  ENSG00000067208_3 (sequence is synthesized)
tgtgtcgagttcatcagcctctagcaacctcagtcaccttgaagaagattcttggattctttggggaagaattgttaatgaatgggaagatgtacgcaaaaagaaggaaaagcaagttaa

SEQ ID NO: 51295 - DNA, 120 bp, Artificial Sequence
  ENSG00000067208_4 (sequence is synthesized)
ggaacttgttcataaagggataccccatcactttagagcaatagtttggcaacttttatgcagtgcacaaagtatgccaattaaggatcagtattcagaactcctgaaaatgacctcgcc

SEQ ID NO: 51296 - DNA, 120 bp, Artificial Sequence
  ENSG00000067208_5 (sequence is synthesized)
ttgtgaaaaattgatccgaagggacattgctagaacttaccctgaacacaacttttttaaggaaaaagatagccttggacaggaggttttatttaatgtaatgaaggcttactctttagt

SEQ ID NO: 51297 - DNA, 120 bp, Artificial Sequence
  ENSG00000067208_6 (sequence is synthesized)
agatcgtgaggttggttactgtcaaggaagtgcttttatagttggattgttgcttatgcagatgccagaagaagaagctttctgtgtatttgttaaattaatgcaagattatagacttcg

SEQ ID NO: 51298 - DNA, 120 bp, Artificial Sequence
  ENSG00000067208_7 (sequence is synthesized)
tgaactttttaaaccaagtatggcagaattgggcctttgtatgtaccagtttgaatgtatgatacaggagcatcttccagagctctttgtacattttcaatctcagagttttcatacctc

SEQ ID NO: 51299 - DNA, 120 bp, Artificial Sequence
  ENSG00000067208_8 (sequence is synthesized)
aatgtatgcatcatcctggtttctgactatctttcttacaacttttccactaccaattgcaacaaggatatttgatatctttatgtctgagggtttagaaatagtgtttcgtgtaggatt

SEQ ID NO: 51300 - DNA, 120 bp, Artificial Sequence
  ENSG00000067208_9 (sequence is synthesized)
agcacttcttcagatgaatcaggcagaactgatgcaacttgacatggaagggatgttacagcactttcaaaaggtcattccacatcagtttgatggtgtcccagacaagctaatccaagc

SEQ ID NO: 51301 - DNA, 120 bp, Artificial Sequence
  ENSG00000067208_10 (sequence is synthesized)
agcttaccaagtcaaatacaattcaaaaaaaatgaaaaagcttgaaaaggaatacactacaataaaaacgaaagaaatggaagagcaagttgaaattaaaaggttacgcacagaaaatag

SEQ ID NO: 51302 - DNA, 120 bp, Artificial Sequence
  ENSG00000067208_11 (sequence is synthesized)
acttttaaaacagcgcatcgagacattagaaaaacataaatgcagttccaactacaacgaagattttgtgctacagctagagaaggaattggtccaagcccgactgagtgaagctgagtc

SEQ ID NO: 51303 - DNA, 120 bp, Artificial Sequence
  ENSG00000067208_12 (sequence is synthesized)
tcagtgtgcattaaaagagatgcaggataaagtcttggatatagagaagaggaataactcccttcctgatgagaataatattgcaaggcttcaggaagaactcattgctgtgaaacttag

SEQ ID NO: 51304 - DNA, 120 bp, Artificial Sequence
  ENSG00000067208_13 (sequence is synthesized)
agaagcagaagccattatgggtttgaaagaacttagacagcaagtcaaggatttagaggaacactggcagcgccacttagctcgtactactgggagatggaaagacccacccaagaaaaa

SEQ ID NO: 51305 - DNA, 120 bp, Artificial Sequence
  ENSG00000067208_14 (sequence is synthesized)
tgctatgaatgagttacaagatgaactgatgaccattcgacttagagaagctgaaacacaagcagaaataagagaaataaaacaaaggatgatggaaatggaaacacagaaccagatcaa

SEQ ID NO: 51306 - DNA, 120 bp, Artificial Sequence
  ENSG00000067208_15 (sequence is synthesized)
tagtaaccatcttcgaagagcagaacaagaggtgattagcctacaggagaaagtgcagtatctttctgcacagaacaaaggactccttactcaattaagtgaagcaaagcgtaaacaagc

SEQ ID NO: 51307 - DNA, 120 bp, Artificial Sequence
  ENSG00000067208_16 (sequence is synthesized)
agagattgaatgcaagaataaggaagaagtgatggctgtgaggcttcgggaagcagatagcatagctgctgtggctgaactacgacaacacattgctgagcttgaaatccagaaagaaga

SEQ ID NO: 51308 - DNA, 120 bp, Artificial Sequence
  ENSG00000067208_17 (sequence is synthesized)
aggaaagcttcaaggacagcttaacaagtctgattctaaccagtatattggggaactgaaagatcagatagcagagctgaatcatgagctcaggtgcctaaaaggccagaggggcttctc

SEQ ID NO: 51309 - DNA, 120 bp, Artificial Sequence
  ENSG00000067208_18 (sequence is synthesized)
aggccaacctccttttgatggaatccacattgtcaaccatttaataggagatgatgaatcattccattcctccgatgaagattttatagataattccttacaggaaactggtgttggttt

SEQ ID NO: 51310 - DNA, 120 bp, Artificial Sequence
  ENSG00000067208_19 (sequence is synthesized)
tcctttgcacggaaaatctggttcgatgtctttggaccccgcagtggcagatggtagtgagagcgaaacagaagacagtgtgctggagaccagagagagcaaccaagtggttcaaaagga

SEQ ID NO: 51311 - DNA, 120 bp, Artificial Sequence
  ENSG00000067208_20 (sequence is synthesized)
gcggcccccgagaagaagagagtcgtattcaaccactgtctgaccatcactgtgacctagactatggatttatttaagggatcagttatcatatgattagggctttttggaaataatttg

SEQ ID NO: 51312 - DNA, 87 bp, Artificial Sequence
  ENSG00000067208_21 (sequence is synthesized)
agtcttatctgcctttttatctttgccaaatctttaccactgatttaccattgccataaagtagactggtatatggttaatgtgtaa

SEQ ID NO: 51313 - DNA, 120 bp, Artificial Sequence
  ENSG00000067208_22 (sequence is synthesized)
ccattgccataaagtagactggtatatggttaatgtgtaaaacaaggttctaacagtattactgaatattaatgtttcttgtttagaaaatgcaactatatctatatgtgggaaccattc

SEQ ID NO: 51314 - DNA, 120 bp, Artificial Sequence
  ENSG00000067208_23 (sequence is synthesized)
tgaagttcaaaactatggaaaattgaattttcttcagacaaaactgctcttgtgcaatattttatgctcagtgagcaaattgtgtatttatgtttatcaatttgttctcaaggtggctgt

SEQ ID NO: 51315 - DNA, 84 bp, Artificial Sequence
  ENSG00000067208_24 (sequence is synthesized)
tgtgtatttatgtttatcaatttgttctcaaggtggctgtctacagacatttgaccaagacatacatctgatttaccgacagag

SEQ ID NO: 51316 - DNA, 120 bp, Artificial Sequence
  ENSG00000067208_25 (sequence is synthesized)
gtctgtttgtgtctgggaggttttttttttctatttttattttttcatgaaaattattggtgggccactgaaagtccccacacacaaagcctttattctatataattttataaacacaaa

SEQ ID NO: 51317 - DNA, 120 bp, Artificial Sequence
  ENSG00000067208_26 (sequence is synthesized)
ttcatgattatctgttttgagagttttaagttttgttttaatgtttaacttttatgtgcatatgatgcttccatgtgttggttactagagtagtaggttaactacagacatactgttttg

SEQ ID NO: 51318 - DNA, 120 bp, Artificial Sequence
  ENSG00000067208_27 (sequence is synthesized)
tttgtacatatttataaatctgtaccacctaacattgaacatcattttatatgaagaacatacatgttgcaaaatgactgctttcagcatctaacaggacttctgtaaataataggttaa

SEQ ID NO: 51319 - DNA, 120 bp, Artificial Sequence
  ENSG00000067208_28 (sequence is synthesized)
gttcaaaaacactgttggtggaatcttttatttcatgtgtatgtaactactaaatttttcatgactgaagaggttatagcacatattagttagtgctaatattctactgaatataattta

SEQ ID NO: 51320 - DNA, 120 bp, Artificial Sequence
  ENSG00000067208_29 (sequence is synthesized)
agcaatgggctaaggtccaagaaacatagcaattatatctacaaataatctattaacatgatcttcagaatctctagtttttgttctatagataaagccataagaatcctttcctaccag

SEQ ID NO: 51321 - DNA, 120 bp, Artificial Sequence
  ENSG00000067208_30 (sequence is synthesized)
tttttcctatatcatttagatattatttcctagaaaacaggatgcctgtcactgataagttagagaaaacacccaaattatacttgcactatggaaagacgacatgaatatgttgactgg

SEQ ID NO: 51322 - DNA, 120 bp, Artificial Sequence
  ENSG00000067208_31 (sequence is synthesized)
gtactttctactctcatttttgttagcctatgaaaaaaaaaacattttgttaacctatggaaaaagccttggaagagaaaagtagaattcagtatgtatggaggcacagttttgcacagt

SEQ ID NO: 51323 - DNA, 120 bp, Artificial Sequence
  ENSG00000067208_32 (sequence is synthesized)
atgttgcatgcggcaaaaaaaaaaatatgaaatagagtagaagagataaaagtagttttctgtcaaaaactaggagttaagccttcaggtacgttgtggactaggctttccagcaaggtt

SEQ ID NO: 51324 - DNA, 120 bp, Artificial Sequence
  ENSG00000067208_33 (sequence is synthesized)
tttgtagctatttgcttgcctgagaaatgaaattgaaaacatacccctgcgtgtctgtccttaacaccaggctaaattctggtggttaaataacttatctgtggttacaagctagtaagt

SEQ ID NO: 51325 - DNA, 76 bp, Artificial Sequence
  ENSG00000067208_34 (sequence is synthesized)
ggtggttaaataacttatctgtggttacaagctagtaagtagcagagccaagattttttttaatatagagacaggt

SEQ ID NO: 51326 - DNA, 120 bp, Artificial Sequence
  ENSG00000067208_35 (sequence is synthesized)
aggtgcgagctactgctcccagcaagagccaagattttaacctagatctccctaacaccaaagcttttgaaagggttcagctgaagaatttctcaattctctgttttgttttgtttttat

SEQ ID NO: 51327 - DNA, 120 bp, Artificial Sequence
  ENSG00000067208_36 (sequence is synthesized)
tgacctcccaaagtgctgggattactagacgtaagccaccacacctggcaattccctgcttttttgacaacataatttaaatgaatttgatttaaatgtttcctgaatatatatacagat

SEQ ID NO: 51328 - DNA, 120 bp, Artificial Sequence
  ENSG00000067208_37 (sequence is synthesized)
agatagatgagtatcaacacttacaagctctacacagtctgtgagtgtagatactacttactcgtaggattgtcttgtgctttggggatttttgttcggagttctatactatcagcccag

SEQ ID NO: 51329 - DNA, 120 bp, Artificial Sequence
  ENSG00000067208_38 (sequence is synthesized)
aaagctatcaatgtccaagtgaagtgagatgatgcatggccacattattgctttgaccctcacatcaagaaatctgaatgatctggaccaggggtcagcaaagtgcagcctacaagctat

SEQ ID NO: 51330 - DNA, 120 bp, Artificial Sequence
  ENSG00000067208_39 (sequence is synthesized)
tgcagtcagctgccagtttttacttttttaaatagttgggaaaaaaattccaaagactgatattttgtgtcacatgaaaattatatgaaattcaaattgcagtgtccataagtaaagttt

SEQ ID NO: 51331 - DNA, 120 bp, Artificial Sequence
  ENSG00000067208_40 (sequence is synthesized)
tattggggcacacccatgctcacccttttaaatattgtgtatggccgctttgtgctacagtagcagagttgagtcattgcaagggagaccatatggcccaggtagcctaaaatatttatc

SEQ ID NO: 51332 - DNA, 120 bp, Artificial Sequence
  ENSG00000067208_41 (sequence is synthesized)
tgatcctttacagaaaaagtttgctaacccttgataacagatactctaaaatgcaggtttttcttcttcaatttagctcagtggtaggtcaaattgtttgcttttgctattaagcttatg

SEQ ID NO: 51333 - DNA, 120 bp, Artificial Sequence
  ENSG00000067208_42 (sequence is synthesized)
atttggaaacgtaaaatttcatggtggatattataatcagaactattcaaaagggaaaacatgccagccattttatatgatgaagtctcttattccatagaaaactgtagaaagatatct

SEQ ID NO: 51334 - DNA, 120 bp, Artificial Sequence
  ENSG00000067208_43 (sequence is synthesized)
gtatctttggagaaggagaaagaaaggaaagaactccagaatcccatcactgttctttaaagcatgcatcacagacctttaagagtatgctttattgagtaaaggttatagtttgacttt

SEQ ID NO: 51335 - DNA, 120 bp, Artificial Sequence
  ENSG00000067208_44 (sequence is synthesized)
aagataagaaattttctagaatcatgtttgaattctaaacgttgatattcttaagtaccatttctgattaggaattaggtgttaaaagaatcatggtaaggaaaccttaatccgttgaaa

SEQ ID NO: 51336 - DNA, 120 bp, Artificial Sequence
  ENSG00000067208_45 (sequence is synthesized)
ctcttgtaatttggacaacaaaaaactagaaataacactcttttctttgaagatctgattcaaatacaccttagaagagtttaaaatctcccaggcctttaggatgcaataggatattat

SEQ ID NO: 51337 - DNA, 120 bp, Artificial Sequence
  ENSG00000067208_46 (sequence is synthesized)
gccttggtttgactccttttcattcaaattaatgtaagtatgttgttcaagactttgaagcattgaacaatgttctcgatgaattttatttaattactgacattttgtgatatttgaatg

SEQ ID NO: 51338 - DNA, 120 bp, Artificial Sequence
  ENSG00000067208_47 (sequence is synthesized)
ttattaagttaaacacttagagttgagtatattcaggggagaaaagtgaatgaaatgactcataataagaaagcttgctcccttgggacagttaccttcctggtgtcattgccatcctgg

SEQ ID NO: 51339 - DNA, 120 bp, Artificial Sequence
  ENSG00000067208_48 (sequence is synthesized)
gttgacaagctgagagtagaggatacaagtgatgtgaataaaatggaaattgcattgagttaatgaaacagacacttttagatcaagaaaacacttcaacagcctttttagaaattggca

SEQ ID NO: 51340 - DNA, 120 bp, Artificial Sequence
  ENSG00000067208_49 (sequence is synthesized)
ctcaagaggctgaggcaggaggatcactagagtacaggagtttggggctgtagtgtgtaatgatcacacctgtgaaagaataaccactgcactccaacctgggcaacatggcaagaccct

SEQ ID NO: 51341 - DNA, 90 bp, Artificial Sequence
  ENSG00000067208_50 (sequence is synthesized)
aacatggctcctgggaaaagaagtcaaagatgtaattttacacaatttctgcccccaccgtcttttttgtttgtttgtttgtttgtttgt

SEQ ID NO: 51342 - DNA, 120 bp, Artificial Sequence
  ENSG00000067208_51 (sequence is synthesized)
ttgttttttggctagatactaggtattcagtgtttgctgagatgacaggtttctactaatcagccagttatttgggaaggagaaaaactttttctcaattctgaacatgatgcagcttgt

SEQ ID NO: 51343 - DNA, 120 bp, Artificial Sequence
  ENSG00000067208_52 (sequence is synthesized)
taactctccagatagtgcctttgattgaaaataaggtctacacctttttaagtatattatttctgacatcgtaagaaataatttagttccttattctcatttatcttttatataatgtac

SEQ ID NO: 51344 - DNA, 120 bp, Artificial Sequence
  ENSG00000067208_53 (sequence is synthesized)
tgtaatattcaggtttaaagtaaaataagtatatgaattatattttggtaaaactgtttcatgaccagcttgattaatgtatattaacataccagacattgacagcgaacatttcatgaa

SEQ ID NO: 51345 - DNA, 120 bp, Artificial Sequence
  ENSG00000067208_54 (sequence is synthesized)
atcagttatttacttaccaaaacaatgagttttagcttgaaagttactgctgctctattattaacaaaactaagttttaaaaattaattttaattctactgaagtttaatttctggttaa

SEQ ID NO: 51346 - DNA, 120 bp, Artificial Sequence
  ENSG00000067208_55 (sequence is synthesized)
aggtatagtggatgctatttatgatccaagtttttacatcacatccattgatctgcctatcccttctttttactccaaagaggagatgatagaataatacattcagtatactaccaagaa

SEQ ID NO: 51347 - DNA, 120 bp, Artificial Sequence
  ENSG00000067208_56 (sequence is synthesized)
gcaaagttataatgtgtttcattttgctattggaattttttattgtaacattgtatgataacctgaaatgtttacttgtgccttttctttaaacaattaaagttttccattttataagaa

SEQ ID NO: 51348 - DNA, 120 bp, Artificial Sequence
  ENSG00000067208_57 (sequence is synthesized)
gctctcctgacgcggccgggccggaccccggaggaaccagctggccagctggcaaggggctggctgcagttccgacagcggcggtgccgggaggggtaggtgagggtcgcgaggcggccc

SEQ ID NO: 51349 - DNA, 120 bp, Artificial Sequence
  ENSG00000067208_58 (sequence is synthesized)
tgagcttctgagtgagcgtggtgcttttgggaactcgggacgggcgacccgtggagccaggagcggggccgaggcgctgagacgcggcggcgcggctgccggctggatgggaagttaatg

SEQ ID NO: 51350 - DNA, 120 bp, Artificial Sequence
  ENSG00000067208_59 (sequence is synthesized)
tcgagacattagaaaaagaaagtgcttccttggcagatagattgatacagggacaagtgacaagagcccaggaggctgaggaaaactacctcataaaacgggagttggccaccatcaaac

SEQ ID NO: 51351 - DNA, 120 bp, Artificial Sequence
  ENSG00000067208_60 (sequence is synthesized)
agaggaacactggcaggtatattaatatattttgtgtgcttttttaaaagagagtaaaaccgaaatatccaatttgtaagagtttgaagtacctgatgacctatagtagatgagtttaaa

SEQ ID NO: 51352 - DNA, 63 bp, Artificial Sequence
  ENSG00000067208_61 (sequence is synthesized)
gacagacaaagttgcagaaaagctgagctctactctctcatgggtgaagaacacagtatcgca

SEQ ID NO: 51353 - DNA, 120 bp, Artificial Sequence
  ENSG00000067208_62 (sequence is synthesized)
actaactgattttgttttttgtcaatataataatgccttttttttgtttgttttatcgtgattagattatcttaaaaacaaaacaaaaaagctcgtcctattttctacttttcctgaact

SEQ ID NO: 51354 - DNA, 120 bp, Artificial Sequence
  ENSG00000067221_0 (sequence is synthesized)
ggggccgcgtagggcccactggccagggagggcgccgcgcggaggcgcggggcgtgtctcctgtcaaaagccatgctcggcaggtctgggtaccgggcgctgcccctgggtgattttgac

SEQ ID NO: 51355 - DNA, 120 bp, Artificial Sequence
  ENSG00000067221_1 (sequence is synthesized)
cgcttccagcagtcgagcttcggctttctgggctcgcagaagggctgcttgtccccggagcggggcggcgtggggacaggggccgatgtaccccagagctggccctcctgcctctgtcat

SEQ ID NO: 51356 - DNA, 120 bp, Artificial Sequence
  ENSG00000067221_2 (sequence is synthesized)
ggcctcatcagtttcctggggttcttgctgctgttggtcaccttccccatttctggctggtttgccctgaagattgtgcccacctacgagcggatgattgtgttccgcctgggccggatc

SEQ ID NO: 51357 - DNA, 120 bp, Artificial Sequence
  ENSG00000067221_3 (sequence is synthesized)
cgcaccccccagggacctggcatggttctgctcttgcccttcattgactcctttcagagggtggatctgaggacacgagccttcaacgtccctccctgcaagctggcctctaaggacggg

SEQ ID NO: 51358 - DNA, 120 bp, Artificial Sequence
  ENSG00000067221_4 (sequence is synthesized)
gctgtgctgtccgtgggagccgatgtccagtttcgcatctgggacccggtgctgtcggtgatgactgtgaaagacctgaacacagccacacgcatgacagcccagaacgccatgaccaag

SEQ ID NO: 51359 - DNA, 120 bp, Artificial Sequence
  ENSG00000067221_5 (sequence is synthesized)
gccctgctcaagaggccgctgcgggagatccagatggagaagctcaagatcagcgaccagcttctgctggagatcaacgatgtgaccagggcctgggggctggaggtagaccgcgtggag

SEQ ID NO: 51360 - DNA, 120 bp, Artificial Sequence
  ENSG00000067221_6 (sequence is synthesized)
ctggcagtggaggccgtgctccagccgccccaggacagcccagctgggcccaacctggacagcaccctccagcagctggccctgcacttcctgggaggaagcatgaactcaatggcagga

SEQ ID NO: 51361 - DNA, 120 bp, Artificial Sequence
  ENSG00000067221_7 (sequence is synthesized)
ggtgccccgtccccggggccagcagacaccgtggagatggtgagtgaagttgagccacctgcccctcaagttggtgccaggtccagtccgaagcagcctctggcggaggggctactgact

SEQ ID NO: 51362 - DNA, 120 bp, Artificial Sequence
  ENSG00000067221_8 (sequence is synthesized)
gctctacagcccttcctgtctgaggccctggtcagccaagtcggggcctgctaccagttcaatgtcgtcctgcccagcggcacccaaagcgcctacttcctggacctcactacaggacga

SEQ ID NO: 51363 - DNA, 120 bp, Artificial Sequence
  ENSG00000067221_9 (sequence is synthesized)
ggaagagtgggacacggggtgcctgatggcatccctgatgtggtggtggagatggccgaggcagacctgcgggccctgctatgcagagagctgcggcccctgggggcctacatgagtgga

SEQ ID NO: 51364 - DNA, 120 bp, Artificial Sequence
  ENSG00000067221_10 (sequence is synthesized)
cggctgaaggtgaagggcgacctggctatggccatgaagctggaggctgtcctcagggccttgaagtagcagccttggctgactttccagagcccagtcccaagcctggcaccaagcctg

SEQ ID NO: 51365 - DNA, 120 bp, Artificial Sequence
  ENSG00000067221_11 (sequence is synthesized)
aggggcctcttggaggaggaggtgttcatctgcaccacagagagttgaggccctaacaaatttcaggcccagccaagagcccatgaatggaggctgcaggaggctgagtccggctgccat

SEQ ID NO: 51366 - DNA, 120 bp, Artificial Sequence
  ENSG00000067221_12 (sequence is synthesized)
gcacgtctcccctacagtggttctctggacaaggctttgtccatcccggtccccagctgagtgcccagcgctgagctgggtgcacggtgtgattccaggaggagagccaggcctgccctg

SEQ ID NO: 51367 - DNA, 120 bp, Artificial Sequence
  ENSG00000067221_13 (sequence is synthesized)
ccctgctggcttcctgactggagagacaggacccacagaaacagcctgacagcagctggtttggtccttgtgtgagggaccaagcatgtggcccaggctctaagctctgcggggattgga

SEQ ID NO: 51368 - DNA, 120 bp, Artificial Sequence
  ENSG00000067221_14 (sequence is synthesized)
gagggatggggagggaagggaaggcagctccaagaagaggtccctgtggcgaagttacctggggatcctggctggcccaccttcctggctgcagtccaggcccgtgctggcgggattggg

SEQ ID NO: 51369 - DNA, 120 bp, Artificial Sequence
  ENSG00000067221_15 (sequence is synthesized)
catgggaaggagcagggcctgctgcttccctggcgctgctcccaaagatttctgactcatctgccagctctgtcctgcatgcctggcgagctggggcccagggcagcatgaaggagagcc

SEQ ID NO: 51370 - DNA, 120 bp, Artificial Sequence
  ENSG00000067221_16 (sequence is synthesized)
ctgcgttctgtgcttcttaccagaggtttgcaagcctcagacaaataaatgtggtgtttacaatgtataaaagagaagaagccaagcggggctcctgggggcatggggtgggctaggagg

SEQ ID NO: 51371 - DNA, 120 bp, Artificial Sequence
  ENSG00000067221_17 (sequence is synthesized)
gtccacaaggtccatgctgccagcccaggcagggattgacatcctggtggctgacacagacagaccctcacaatatttgaagctccttctcctgagtgtctcaaagcccctggaagcaag

SEQ ID NO: 51372 - DNA, 120 bp, Artificial Sequence
  ENSG00000067221_18 (sequence is synthesized)
ggtggggctgggtggggagttctgttcctctttgtagtgggatacaggttcaccaggaaaggaaggcatgagtgtgccagagtgtcctgcaaacactgaggggcaggtggggtggtcata

SEQ ID NO: 51373 - DNA, 120 bp, Artificial Sequence
  ENSG00000067221_19 (sequence is synthesized)
tcccattcaagagaggagttggggccaccgtcagcttcccctcctggtacactctgtcactgcttctccgctcgctgacgggaaggaaacagtcattgaggtctggccccaggcccagcc

SEQ ID NO: 51374 - DNA, 120 bp, Artificial Sequence
  ENSG00000067221_20 (sequence is synthesized)
cagccctgctttctgctccagtactctcgcccaaaccccaggggccccagagaagggggcctctgacttcttgagtcctaagaaaggaatcttactccttggagagacttctgggaaaaa

SEQ ID NO: 51375 - DNA, 120 bp, Artificial Sequence
  ENSG00000067221_21 (sequence is synthesized)
caaaaccacaaaaatcaaagcctccccttaagaacagcccccagcctgtcctgtggcaccgcaacttccctctcccccaaggggtctctgcccttcctgggtgcctggctctgtcttgtt

SEQ ID NO: 51376 - DNA, 120 bp, Artificial Sequence
  ENSG00000067221_22 (sequence is synthesized)
tgctgtctgtccctgcctttgccagacactgccttgtcccgcctcctggaggtcctccacattgcctgaggcacctccctaaagcccagcacagacccctctgtcactgccatggccatt

SEQ ID NO: 51377 - DNA, 120 bp, Artificial Sequence
  ENSG00000067221_23 (sequence is synthesized)
gaggttcaggtttccagggccccttcctagagtcccaggctgctgcacctgctgttgcccctttgcctacttggaggcctctcatgggccctcccagggctttctagctgaggctgtctg

SEQ ID NO: 51378 - DNA, 120 bp, Artificial Sequence
  ENSG00000067221_24 (sequence is synthesized)
ttccaaagcctgccctccaatccccgcagccacactgtggccaccctttgaggcccagtgagacttgtcctctgtgcccttgcctggctctctgcacccattccacattgtgtgtttctg

SEQ ID NO: 51379 - DNA, 120 bp, Artificial Sequence
  ENSG00000067221_25 (sequence is synthesized)
ctccttgcatatatggctgccctccctgctggactgggagcttcctgcatcagcattcacctgtggattccttccattgctattacacagtatatgaagggctgcccaggaaaccccagg

SEQ ID NO: 51380 - DNA, 120 bp, Artificial Sequence
  ENSG00000067221_26 (sequence is synthesized)
tagggctggagggtagggaagacaggaaaaatgagatcacaacttaggggaaacccaaactcttctttgtgagcatgggaagatcaacataacgtttaggggaaaccgaaacttttctgg

SEQ ID NO: 51381 - DNA, 120 bp, Artificial Sequence
  ENSG00000067221_27 (sequence is synthesized)
atgtctgtgtaggtggagagtaaggcctgcccctgccatgaatccccaccctgtggaggggagctcgatccttggccagcactccaggactacagaggactgagcagaccctgcagtcca

SEQ ID NO: 51382 - DNA, 120 bp, Artificial Sequence
  ENSG00000067221_28 (sequence is synthesized)
caggggaggaaggacaagggccacctaaagggtcggtgtgaagagggaggaggagggtgtgtgtcaatcagagaaggctttcctgaggaggtgatgtcctccacatcccagctaccaagt

SEQ ID NO: 51383 - DNA, 120 bp, Artificial Sequence
  ENSG00000067221_29 (sequence is synthesized)
aggtggacaataagaagagatggggaaaatcattcagcagaggagaagtccctgcaagggcacagctggaagaggcagtcaggcaactgggcttcggggaactagaacctgaagtaccag

SEQ ID NO: 51384 - DNA, 120 bp, Artificial Sequence
  ENSG00000067221_30 (sequence is synthesized)
acaggttgtgtgcgggcatttgaggggcagggtatagaaatagtaaccattactgtgtgccaaatatgtccttataccggactagacacttcttattatatttttcttcaagataacctg

SEQ ID NO: 51385 - DNA, 120 bp, Artificial Sequence
  ENSG00000067221_31 (sequence is synthesized)
tgataatagtttaagtatcctagttaatatattaatatataatgtgttattttgatgttattgaaaagtattttatttttttttgaaacaagagtcttactctgttgcccatgttagagt

SEQ ID NO: 51386 - DNA, 62 bp, Artificial Sequence
  ENSG00000067221_32 (sequence is synthesized)
acagtacacctgagtagccaggattataggcgcataccaccacacctggttaatttttgtat

SEQ ID NO: 51387 - DNA, 86 bp, Artificial Sequence
  ENSG00000067221_33 (sequence is synthesized)
tgtgccaccacaaccggctaatttttaaaatctcttttgtagagataaggatgtctccccatgttgctcaggctggtcttgaactc

SEQ ID NO: 51388 - DNA, 72 bp, Artificial Sequence
  ENSG00000067221_34 (sequence is synthesized)
tatttaaattttggttggctaaacatttaaaaagataggaaagcatattatgaaaattctccctccacacat

SEQ ID NO: 51389 - DNA, 120 bp, Artificial Sequence
  ENSG00000067221_35 (sequence is synthesized)
agataggaaagcatattatgaaaattctccctccacacatatttcccatgccttcccccatcccctgcgattagtttcttggtaattcttcctgaaggttttgttttttaaaaaaaaata

SEQ ID NO: 51390 - DNA, 120 bp, Artificial Sequence
  ENSG00000067221_36 (sequence is synthesized)
tatgcaagaaaatccaaatatgtatcttctgggtttttgttgttcctgtttttatacaaatggcaacatagaaacacaatgttgcctttttcacttaacattacccactgaggatctttc

SEQ ID NO: 51391 - DNA, 120 bp, Artificial Sequence
  ENSG00000067221_37 (sequence is synthesized)
catgttaccacagacagcctttccctgtgctttcttgtacttacataggattccacagtatggatgtatcataaattattcaacctgtcgtggaccgatagacattttgattatttcttg

SEQ ID NO: 51392 - DNA, 120 bp, Artificial Sequence
  ENSG00000067221_38 (sequence is synthesized)
tgttttgctattttaaatacttttgcaatgaataacctttaacatgtgctatttgtggtagagtttatctataagataaaatcctagaagtggaattgctaaatcaaagcatttataatt

SEQ ID NO: 51393 - DNA, 120 bp, Artificial Sequence
  ENSG00000067221_39 (sequence is synthesized)
tagtaaatattgccagaataccttctctggggattataccaatttacactcccattgtcagtggtgtttttttctcatagtcatgtcaatacactgtgttattaaacttttgggtctttt

SEQ ID NO: 51394 - DNA, 120 bp, Artificial Sequence
  ENSG00000067221_40 (sequence is synthesized)
gtcaatacactgtgttattaaacttttgggtcttttgacattctggaaagtgaaaatttgtatctcagtgtaatttttttgtttattgttcaagttatttttttgttttttgtttgtttg

SEQ ID NO: 51395 - DNA, 87 bp, Artificial Sequence
  ENSG00000067221_41 (sequence is synthesized)
gctcactgcagcctcaacctcccaggcttaaaggatcaccatgcctggcccttctcaagctggtctctaactcctggcctcaagtga

SEQ ID NO: 51396 - DNA, 120 bp, Artificial Sequence
  ENSG00000067221_42 (sequence is synthesized)
tcctggcctcaagtgatcctcccacctggccctggcccgctaactgctaggattacaggcatgagccatctagcccagcctgtttattgtccaattgtttattgctttgtaagtcttgga

SEQ ID NO: 51397 - DNA, 120 bp, Artificial Sequence
  ENSG00000067221_43 (sequence is synthesized)
tggatttctagctccagcaaagaacagggtttggtttggtttggtttctcttcccctagcatttacatattttttaaaggtgtaatttacatacaacaaacacccttttaaaatgtatta

SEQ ID NO: 51398 - DNA, 120 bp, Artificial Sequence
  ENSG00000067221_44 (sequence is synthesized)
ggcaacagagtgagactccatctcaaaattaaataaataaagataaaataaaaagtgtcatctgaggtgctttgacaaatgtgaacacctgagtaaccaccaccccctacaatcaaatac

SEQ ID NO: 51399 - DNA, 120 bp, Artificial Sequence
  ENSG00000067221_45 (sequence is synthesized)
acaatcaaatacaaaacattcccatccactcacaaagttctccacgtcacttcccgtcagtgcttgccacctccagctttgagcagccactgacctttccataaccgctgatcacatttc

SEQ ID NO: 51400 - DNA, 120 bp, Artificial Sequence
  ENSG00000067221_46 (sequence is synthesized)
acttttctagcatttcatatgaatgaaatgagtgcacagtactcttctgtgtctagctttttccccctcactgtaatggttttgagagtaatacatgttattctgtgtatctgtagtttg

SEQ ID NO: 51401 - DNA, 120 bp, Artificial Sequence
  ENSG00000067221_47 (sequence is synthesized)
ttgtattgccaacacattccattgtctagatagaggcacaatgtattcattcatccattgatgaacatttgagtagttttcaggtttggttattaaataaagctcctccagacatctgtg

SEQ ID NO: 51402 - DNA, 120 bp, Artificial Sequence
  ENSG00000067221_48 (sequence is synthesized)
gcgtggggacaggggccggctaaggcatcatcttcataaggactcctggaaagcacacttctggggctgatggtataggaggaatgtgttttgccagcagtattcagtgcatgtttacag

SEQ ID NO: 51403 - DNA, 120 bp, Artificial Sequence
  ENSG00000067221_49 (sequence is synthesized)
ccagaatgtactgtggtgccaggacctcagcctgtgagtcaccatctgaggggggaagggggaagaagagaccagaaaattgatggaagctaggaggacatccttgcttcatacacctaa

SEQ ID NO: 51404 - DNA, 120 bp, Artificial Sequence
  ENSG00000067221_50 (sequence is synthesized)
ccctacatacttggtgacaccatttgcccttgaggagctagctgccaagcaggtggttcaagctgggtggccccagtgggcctgacctccctgcacccccagccccttgagtgtctctct

SEQ ID NO: 51405 - DNA, 120 bp, Artificial Sequence
  ENSG00000067221_51 (sequence is synthesized)
aagacggagcttgaggggtggcaccggcctggctccacctgccaggtcactttgagaaaagagtcagaccactctgggcctcagtttaccatatgtcccaatagtgtaaccacctttgaa

SEQ ID NO: 51406 - DNA, 120 bp, Artificial Sequence
  ENSG00000067221_52 (sequence is synthesized)
gagccagtgcctgggtggggccatgagttgaggaatggcaggtgggcgtagaccataacgatcctgggcaaacttgtccctgagaagaggaagtggccccggcagacattcttggggtct

SEQ ID NO: 51407 - DNA, 120 bp, Artificial Sequence
  ENSG00000067221_53 (sequence is synthesized)
gccccttagtttttacccctcactgctctgccatgatgacactggcttctacagctctcattccgggcctgactcatggggcaggcagatgggtgatggagcagggaccctcccagccca

SEQ ID NO: 51408 - DNA, 120 bp, Artificial Sequence
  ENSG00000067221_54 (sequence is synthesized)
gtcacctgctggggaattccaggctcaccatgcagcgtgtgcatgcttgtgatttttgtttccttgtttggaacagaacaaaggaacatgaggacatttggatctttttcctgcctcttc

SEQ ID NO: 51409 - DNA, 120 bp, Artificial Sequence
  ENSG00000067221_55 (sequence is synthesized)
tccatgtgtatattggagtttgccctaaatctcttctgctacaagatggggtagaaataaatacacatgcagagttgtgtcccctgcagccacactcaacttgtgcttcctcttgtgtcc

SEQ ID NO: 51410 - DNA, 120 bp, Artificial Sequence
  ENSG00000067221_56 (sequence is synthesized)
aatcaaggttagaggacagtcgggggaatgggataaatgccagtcctggaggtcccactggaagcagcgaggggaaattcctgaggaaatactatttgagatcctaacagtagctcttac

SEQ ID NO: 51411 - DNA, 120 bp, Artificial Sequence
  ENSG00000067221_57 (sequence is synthesized)
gtgcttagcagtttatggtttacaaagtccttttgtctggcccagcatttctgagcttgacattttttgctgcaagtcggtactactgttttattttggagggaggaagctaaggctaag

SEQ ID NO: 51412 - DNA, 120 bp, Artificial Sequence
  ENSG00000067221_58 (sequence is synthesized)
aaataatttgacttgcctctgagagctatggtcaagggcagagctgagccatagctagaccacctgcctccatcccaccatcgcccctcaatccagtgcttgatctaacacaactcagat

SEQ ID NO: 51413 - DNA, 120 bp, Artificial Sequence
  ENSG00000067221_59 (sequence is synthesized)
agcaagtggataacaacttttattcataaaaccatgccccgtgttaattcacctttaggaagagaaaactgatctcagtcttgttgcacattgttttgatgtgagacaggcagtttgggg

SEQ ID NO: 51414 - DNA, 120 bp, Artificial Sequence
  ENSG00000067221_60 (sequence is synthesized)
aggtcagttccacaccaggatgtgagagtcctttaagtcccatttcccagactgagtgagcacctggtagagtgagagctgtgcctgtggttgagacagaacctcaggaggtccagcaca

SEQ ID NO: 51415 - DNA, 120 bp, Artificial Sequence
  ENSG00000067221_61 (sequence is synthesized)
ccgccctcaggccctggttcaggcgtacacttattcacatgcccctttttgcctgattttcttctagagaaatcagagtccccacctctcacttgctggaccttccttagccagttacca

SEQ ID NO: 51416 - DNA, 120 bp, Artificial Sequence
  ENSG00000067221_62 (sequence is synthesized)
ctccttacctgccagtgctccaggccagctgcctcagcccttcactgccctcctccagccccaccactgctcattgctctctgcagcaggccttgcctcctaacactcaggagaaaaact

SEQ ID NO: 51417 - DNA, 120 bp, Artificial Sequence
  ENSG00000067221_63 (sequence is synthesized)
ctaggatgagcactctgcttcctccagtttcaccccttcaaacccacctgcctctgtgctgctttcctgcctccttgcccttctgcctcccctctctgaggctcatccctgtactgcgca

SEQ ID NO: 51418 - DNA, 120 bp, Artificial Sequence
  ENSG00000067221_64 (sequence is synthesized)
gtgctgtgggccccctgctatcccaggatgccttccctccactccatgcactctctctctgtcacctctcctttctgtgtagaaatgtgccctccctttgccacagtgccctctagctcc

SEQ ID NO: 51419 - DNA, 120 bp, Artificial Sequence
  ENSG00000067221_65 (sequence is synthesized)
cactccctttctccccttttcttctgcaagactttcatccatgctcccagcccctgcccctacatccttcatcctggcctccttgggctcccaagacagcgctggccaacatcacagtga

SEQ ID NO: 51420 - DNA, 120 bp, Artificial Sequence
  ENSG00000067221_66 (sequence is synthesized)
cctcccacatgccagcccagtgggcacctctcagcccttcccttacatcacctggtggcagcatttgacatggtcgacccagcccccagcccccagaaccccctgtacttcctccttccc

SEQ ID NO: 51421 - DNA, 120 bp, Artificial Sequence
  ENSG00000067221_67 (sequence is synthesized)
tgtcatccctggttactgccacttattctcctgcccttgagtttccagggtttcatcactggcctcttctcatctgtgacctccctgggagagctcatccatctgggctgtctgctgcct

SEQ ID NO: 51422 - DNA, 120 bp, Artificial Sequence
  ENSG00000067221_68 (sequence is synthesized)
gtggatgctgattattcacaatgtcctgccctagccctgatgcttctgtaccctgggccatttctccagctgcctactggacaattgactgccccacagacacctcaagcttacagtagt

SEQ ID NO: 51423 - DNA, 120 bp, Artificial Sequence
  ENSG00000067221_69 (sequence is synthesized)
atttgtcctcggctcttatcagccctttaggcctgggaagacgtttcaggtttctatttcgcatagaagaaaccgaggtctaggcagaggaggccaccagcaccctaaaggcacctgctg

SEQ ID NO: 51424 - DNA, 120 bp, Artificial Sequence
  ENSG00000067221_70 (sequence is synthesized)
cagggaaatggaagaattttcgccctagggggcacctctagaagcccgggaactaggcatctcctggatgtgcaggccaaaatgacagatgtaccccagagctggccctcctgcctctgt

SEQ ID NO: 51425 - DNA, 120 bp, Artificial Sequence
  ENSG00000067221_71 (sequence is synthesized)
ccggaagcagcagccaggagggcggggccgcgtagggcccactggccagggagggcgccgcgcggaggcgcggggcgtgtctcctgtcaaaagccatgctcggcagatgtaccccagagc

SEQ ID NO: 51426 - DNA, 120 bp, Artificial Sequence
  ENSG00000067221_72 (sequence is synthesized)
ccgccccctctcatatcattgcacacatcgaggcagccccgagcctggtgcttgcacttctctagtgccctgttgtggctcagtacagttgatagaggcatgcctccctcagtggatctt

SEQ ID NO: 51427 - DNA, 120 bp, Artificial Sequence
  ENSG00000067221_73 (sequence is synthesized)
ggcttcacagctcccctccaccctcgccagagctgcatcattccttggctgtattttgaaacaatgtcttccttggtctccatccctcccctcagccccctataatccagcatccacagc

SEQ ID NO: 51428 - DNA, 120 bp, Artificial Sequence
  ENSG00000067221_74 (sequence is synthesized)
agccaggaggatcttgccttaaagcaagtctgctgtatcacctccctgctcaaactcctccctggggctctttgttgcctcagaataaatcaaagtaagcagaaacaccccacctctgac

SEQ ID NO: 51429 - DNA, 120 bp, Artificial Sequence
  ENSG00000067221_75 (sequence is synthesized)
ccctcagctgtctccagtcctcagccgacatgtgagggtccagctaaatggaactctggttcctcgcagctccacgaacatgccaggttttcttgtctggggttttgcacatgctgttcc

SEQ ID NO: 51430 - DNA, 120 bp, Artificial Sequence
  ENSG00000067221_76 (sequence is synthesized)
tgttgctggaagggtcctcctccacctgaggactccctcctgctggcaccaccctcctctgctgggggctcaccacaggccttgcttctgtcttggcacttaccacagctgaaaggtcat

SEQ ID NO: 51431 - DNA, 120 bp, Artificial Sequence
  ENSG00000067221_77 (sequence is synthesized)
tgccctctgcctgtgttcccaggctaggagtgtctcaagggcggtgtggtgcctccatgtccatgcacggccacacagtctgcccaaagaaggtgctcaggaaaggtttgttgaattaat

SEQ ID NO: 51432 - DNA, 120 bp, Artificial Sequence
  ENSG00000067221_78 (sequence is synthesized)
cccctttccctaaatattattacccctttgtgtaatgggctaggcaagaaccattcattcacattggtcaggggaggaaactaaggcttgggcttgtctaaagtcatactgggagccagt

SEQ ID NO: 51433 - DNA, 120 bp, Artificial Sequence
  ENSG00000067221_79 (sequence is synthesized)
agggggtagaagcaagtcccaaactcctaagtcctgggatctggacactggctttaaggtacacgcagatgtctttgccaaattatcttctctttgggttagaataaattagaaatgaaa

SEQ ID NO: 51434 - DNA, 80 bp, Artificial Sequence
  ENSG00000067225_0 (sequence is synthesized)
agtcccaccgaaagggcaacctgcccgcgcgttccgccgccgccgccgcgcttcctcctgaaggtgactgcgcccgcggg

SEQ ID NO: 51435 - DNA, 120 bp, Artificial Sequence
  ENSG00000067225_1 (sequence is synthesized)
gggcagagggcggggcggcggagggattgcggcggcccgcagcgggataaccttgaggctgaggcagtggctccttgcacagcagctgcacgcgccgtggctccggatctcttcgtcttt

SEQ ID NO: 51436 - DNA, 120 bp, Artificial Sequence
  ENSG00000067225_2 (sequence is synthesized)
gcagcgtagcccgagtcggtcagcgccggaggtgagcggtgcaggaggctacgccatcagtccccaccaagggccagtcgcccggctagtgcggaatcccggcgcgccggccggccccgg

SEQ ID NO: 51437 - DNA, 120 bp, Artificial Sequence
  ENSG00000067225_3 (sequence is synthesized)
gcacgcaggcagggcggcgcaggatccagggcgtctgggatgcagtggagctcagagagaggagaacggctcctcacgcctggggcctgctcttcagaagtccccagcgccgttccttcc

SEQ ID NO: 51438 - DNA, 120 bp, Artificial Sequence
  ENSG00000067225_4 (sequence is synthesized)
agatcaggacctcagcagccatgtcgaagccccatagtgaagccgggactgccttcattcagacccagcagctgcacgcagccatggctgacacattcctggagcacatgtgccgcctgg

SEQ ID NO: 51439 - DNA, 120 bp, Artificial Sequence
  ENSG00000067225_5 (sequence is synthesized)
acattgattcaccacccatcacagcccggaacactggcatcatctgtaccattggcccagcttcccgatcagtggagacgttgaaggagatgattaagtctggaatgaatgtggctcgtc

SEQ ID NO: 51440 - DNA, 120 bp, Artificial Sequence
  ENSG00000067225_6 (sequence is synthesized)
tgaacttctctcatggaactcatgagtaccatgcggagaccatcaagaatgtgcgcacagccacggaaagctttgcttctgaccccatcctctaccggcccgttgctgtggctctagaca

SEQ ID NO: 51441 - DNA, 120 bp, Artificial Sequence
  ENSG00000067225_7 (sequence is synthesized)
ctaaaggacctgagatccgaactgggctcatcaagggcagcggcactgcagaggtggagctgaagaagggagccactctcaaaatcacgctggataacgcctacatggaaaagtgtgacg

SEQ ID NO: 51442 - DNA, 120 bp, Artificial Sequence
  ENSG00000067225_8 (sequence is synthesized)
agaacatcctgtggctggactacaagaacatctgcaaggtggtggaagtgggcagcaagatctacgtggatgatgggcttatttctctccaggtgaagcagaaaggtgccgacttcctgg

SEQ ID NO: 51443 - DNA, 120 bp, Artificial Sequence
  ENSG00000067225_9 (sequence is synthesized)
tgacggaggtggaaaatggtggctccttgggcagcaagaagggtgtgaaccttcctggggctgctgtggacttgcctgctgtgtcggagaaggacatccaggatctgaagtttggggtcg

SEQ ID NO: 51444 - DNA, 120 bp, Artificial Sequence
  ENSG00000067225_10 (sequence is synthesized)
agcaggatgttgatatggtgtttgcgtcattcatccgcaaggcatctgatgtccatgaagttaggaaggtcctgggagagaagggaaagaacatcaagattatcagcaaaatcgagaatc

SEQ ID NO: 51445 - DNA, 120 bp, Artificial Sequence
  ENSG00000067225_11 (sequence is synthesized)
gagattcctgcagagaaggtcttccttgctcagaagatgatgattggacggtgcaaccgagctgggaagcctgtcatctgtgctactcagatgctggagagcatgatcaagaagccccgc

SEQ ID NO: 51446 - DNA, 120 bp, Artificial Sequence
  ENSG00000067225_12 (sequence is synthesized)
cccactcgggctgaaggcagtgatgtggccaatgcagtcctggatggagccgactgcatcatgctgtctggagaaacagccaaaggggactatcctctggaggctgtgcgcatgcagcac

SEQ ID NO: 51447 - DNA, 120 bp, Artificial Sequence
  ENSG00000067225_13 (sequence is synthesized)
ctgatagctcgtgaggctgaggcagccatgttccaccgcaagctgtttgaagaacttgtgcgagcctcaagtcactccacagacctcatggaagccatggccatgggcagcgtggaggct

SEQ ID NO: 51448 - DNA, 120 bp, Artificial Sequence
  ENSG00000067225_14 (sequence is synthesized)
tcttataagtgtttagcagcagctttgatagttctgacggagtctggcaggtctgctcaccaggtggccagataccgcccacgtgcccccatcattgctgtgacccggaatccccagaca

SEQ ID NO: 51449 - DNA, 120 bp, Artificial Sequence
  ENSG00000067225_15 (sequence is synthesized)
gctcgtcaggcccacctgtaccgtggcatcttccctgtgctgtgcaaggacccagtccaggaggcctgggctgaggacgtggacctccgggtgaactttgccatgaatgttggcaaggcc

SEQ ID NO: 51450 - DNA, 120 bp, Artificial Sequence
  ENSG00000067225_16 (sequence is synthesized)
cgaggcttcttcaagaagggagatgtggtcattgtgctgaccggatggcgccctggctccggcttcaccaacaccatgcgtgttgttcctgtgccgtgatggaccccagagcccctcctc

SEQ ID NO: 51451 - DNA, 120 bp, Artificial Sequence
  ENSG00000067225_17 (sequence is synthesized)
cagcccctgtcccacccccttcccccagcccatccattaggccagcaacgcttgtagaactcactctgggctgtaacgtggcactggtaggttgggacaccagggaagaagatcaacgcc

SEQ ID NO: 51452 - DNA, 120 bp, Artificial Sequence
  ENSG00000067225_18 (sequence is synthesized)
tcactgaaacatggctgtgtttgcagcctgctctagtgggacagcccagagcctggctgcccatcatgtggccccacccaatcaagggaagaaggaggaatgctggactggaggcccctg

SEQ ID NO: 51453 - DNA, 120 bp, Artificial Sequence
  ENSG00000067225_19 (sequence is synthesized)
gagccagatggcaagagggtgacagcttcctttcctgtgtgtactctgtccagttcctttagaaaaaatggatgcccagaggactcccaaccctggcttggggtcaagaaacagccagca

SEQ ID NO: 51454 - DNA, 120 bp, Artificial Sequence
  ENSG00000067225_20 (sequence is synthesized)
agagttaggggccttagggcactgggctgttgttccattgaagccgactctggccctggcccttacttgcttctctagctctctaggcctctccagtttgcacctgtccccaccctccac

SEQ ID NO: 51455 - DNA, 120 bp, Artificial Sequence
  ENSG00000067225_21 (sequence is synthesized)
tcagctgtcctgcagcaaacactccaccctccaccttccattttcccccactactgcagcacctccaggcctgttgctatagagcctacctgtatgtcaataaacaacagctgaagcacc

SEQ ID NO: 51456 - DNA, 120 bp, Artificial Sequence
  ENSG00000067225_22 (sequence is synthesized)
ctgattgcccgtgaggcagaggctgccatctaccacttgcaattatttgaggaactccgccgcctggcgcccattaccagcgaccccacagaagccaccgccgtgggtgccgtggaggcc

SEQ ID NO: 51457 - DNA, 120 bp, Artificial Sequence
  ENSG00000067225_23 (sequence is synthesized)
gagctcacaatcttaaaatgtatctcctgtaatgctgggagtggggtacgagcttcctgctgtgggagggagggggacaggaagcctcgtaaggtctcaccaggtggcaagcacactgga

SEQ ID NO: 51458 - DNA, 120 bp, Artificial Sequence
  ENSG00000067225_24 (sequence is synthesized)
gcccacttcgcagtccctagttctccctactgccgctccagtgccagagcccctccgaaggcggccaggacctccaaccacgcacaagtctgcagctctccccaactttccgttcagctc

SEQ ID NO: 51459 - DNA, 120 bp, Artificial Sequence
  ENSG00000067225_25 (sequence is synthesized)
gcagcgtagcccgagtcggtcagcgccggagctctccagggcacaccgtattcagctctgagcggtctttgctagtgaggccaaggagccaccctgagccaaaaggggagcattatgtca

SEQ ID NO: 51460 - DNA, 120 bp, Artificial Sequence
  ENSG00000067225_26 (sequence is synthesized)
atctaggtctactgcctccaaagccagtcttctctcctgcaacatcatgctctgtctagcaggagatgagaacaggtctccatttggagcctgtcagtggggtcagagactaagattcag

SEQ ID NO: 51461 - DNA, 120 bp, Artificial Sequence
  ENSG00000067225_27 (sequence is synthesized)
gctcagggtctaaattccatatcctttcttccataccctggtgtttcctatgaacagatagatactttagggctgcaaggtttggattgcatggcactgctcagaagataagttacaggt

SEQ ID NO: 51462 - DNA, 120 bp, Artificial Sequence
  ENSG00000067225_28 (sequence is synthesized)
ctgggctaggctgtagctgcccctccaggtggctagacctttcctttctgtgtcaccagttaacactggccaacagttccttccattaactgttcactgctttctcctgtgtctaactga

SEQ ID NO: 51463 - DNA, 120 bp, Artificial Sequence
  ENSG00000067225_29 (sequence is synthesized)
tgcagtttatgacccataactaagagcagtaccaggtatggctctgtttcctgttcatgtcccctgtcctctgggctgcatgcattccgttcttacagaaagaatacctttaacctagta

SEQ ID NO: 51464 - DNA, 120 bp, Artificial Sequence
  ENSG00000067225_30 (sequence is synthesized)
catcctgccacacatctgcttctactgtgaaattgatgagggggtattaccgattcttccctcacccatcatttactgagatgctggtgattgcattataatcctctaaagcttacattg

SEQ ID NO: 51465 - DNA, 120 bp, Artificial Sequence
  ENSG00000067225_31 (sequence is synthesized)
tctttctgattcttggtcttatctgagcaagtgatctataaataactcagtggctttctcatgactgttttaattattagattttaatcaagtgtcttattaaatatatctgcatgcttc

SEQ ID NO: 51466 - DNA, 120 bp, Artificial Sequence
  ENSG00000067225_32 (sequence is synthesized)
cacaggcatctgtctcttcacatggctgttcagtgtgcctctcacaagttagcccacgttttctgttctcctgcttcaaactcagttgagctgccttgctttggctttgatcccagcttt

SEQ ID NO: 51467 - DNA, 120 bp, Artificial Sequence
  ENSG00000067225_33 (sequence is synthesized)
ccagcgctgctcaatctgttgccatggcaggccattggaaaggctcagtgcatccccgtgcctgaagccaagtgagcgctcactccatgcatgcatggaggctgggcaggagcctgccta

SEQ ID NO: 51468 - DNA, 120 bp, Artificial Sequence
  ENSG00000067225_34 (sequence is synthesized)
atcaaccagccatgtgaggagggagggcctgttccttcctgtaagctatgtcatgaggcagcgtggtcaagtcctctgccagggagtggcctgggcccagcctgggcatgttttcatgcc

SEQ ID NO: 51469 - DNA, 120 bp, Artificial Sequence
  ENSG00000067225_35 (sequence is synthesized)
agggtgctagagcctactgccagattgtctccctccacccccaatgaaaaaatccttccagaagggaagagccaatttcccctgtattggaggggaagtggcagcacctcctgaagcagt

SEQ ID NO: 51470 - DNA, 120 bp, Artificial Sequence
  ENSG00000067225_36 (sequence is synthesized)
tggactttcatcaccctacctctgcatctgcctgaaggacagatttagccaattaacctaaggttaccttcctctctgataaattccccattctgtcttcccatgtgttgtgtctcgttt

SEQ ID NO: 51471 - DNA, 120 bp, Artificial Sequence
  ENSG00000067225_37 (sequence is synthesized)
agcctcttgctccacctgctctaggagaagacagccaggcccaacctggcatctgggcacagagcctcttctcgtctgtaggaacaccgccagggaggtcatggcagggcaggaccaaag

SEQ ID NO: 51472 - DNA, 120 bp, Artificial Sequence
  ENSG00000067225_38 (sequence is synthesized)
ggtcctgtggctcagtaggcacagtagatgtcacaggcacttggtgaaggactggtttctgtggagtcttgatcttggctcagctcagaatctccagtgattgggctcctcttggccttt

SEQ ID NO: 51473 - DNA, 120 bp, Artificial Sequence
  ENSG00000067225_39 (sequence is synthesized)
gttcccaggaacatgttcctcaccagctgtccggtgactcttcccctccctctccttttgtgacaaagctctgacaaagctctgtccccctctcgtccctctggacggatgttgctcccc

SEQ ID NO: 51474 - DNA, 120 bp, Artificial Sequence
  ENSG00000067225_40 (sequence is synthesized)
ctaaacttccttgacacaaggaagatgggaaggttggttgcctggcagtgagattgagtctgtgtgttctcaggaatcccttttataactcatttatcctcaaagataggctttaatcca

SEQ ID NO: 51475 - DNA, 120 bp, Artificial Sequence
  ENSG00000067225_41 (sequence is synthesized)
ttcattatcctccaagttacagcagcaagagggtgggggtggaagtggaggtggcttttttttttctcctgttctgcattcctgcccacacccccacccctccatttccttctgctctgg

SEQ ID NO: 51476 - DNA, 120 bp, Artificial Sequence
  ENSG00000067225_42 (sequence is synthesized)
aggcatcctccttcattggacaccacacagtttatttcacttctgacttcaaggttgtgaattcttcccatggcttaagtcctgggatacttctgcagtgaaaggaggtcttgtacctct

SEQ ID NO: 51477 - DNA, 120 bp, Artificial Sequence
  ENSG00000067225_43 (sequence is synthesized)
tcctcagagtcagaagttctgagtacctttgccctattctgaaaagggctaggggctcctgctcccagctgccctcttcctttggcttccaattcagttccctctgccccgcatcctgca

SEQ ID NO: 51478 - DNA, 120 bp, Artificial Sequence
  ENSG00000067225_44 (sequence is synthesized)
aggaggcggcagcggctccctggaatgccctgctcagtggtacctcaccttgggggtcctgggagcagtccattgaacaatgctcaggtggcactgagccaaggtaagacccctctgcct

SEQ ID NO: 51479 - DNA, 120 bp, Artificial Sequence
  ENSG00000067225_45 (sequence is synthesized)
aatttatgctggagatttattacataacagtgcacaggctgactacaaatggttatttgatattgaaaatttagtcctctaaaattgtaaaagataaccacttttgcttattccagttac

SEQ ID NO: 51480 - DNA, 120 bp, Artificial Sequence
  ENSG00000067225_46 (sequence is synthesized)
tatgtgctctttaaaaatttcagttgggaaatgaatttatttaaatgctgtttactgtgcctccatttggcacactagtccctgctgtttttgagccctaaagacaaattgggttccagc

SEQ ID NO: 51481 - DNA, 120 bp, Artificial Sequence
  ENSG00000067225_47 (sequence is synthesized)
tcaggagaggttgctgtgctatcttggctgacattctgtggggcctggcagccaggctgaggactgtgtggcctatgctgggcctccaacttgggatcccttccttggcccaggacattg

SEQ ID NO: 51482 - DNA, 120 bp, Artificial Sequence
  ENSG00000067225_48 (sequence is synthesized)
aacccataaatctgggccctgcccaggtaggccgggacagctggggtggcctgggccgagagccaagaaaagacaccccatctggcagcccaacttggcggcaacaggtggcccggcgcc

SEQ ID NO: 51483 - DNA, 120 bp, Artificial Sequence
  ENSG00000067225_49 (sequence is synthesized)
cgggggtctgggaggaaagtcgctccgggggcgggccccgttgccccgccgcgtccccattggtcatcaggtttcttaaaatgtgactctgaatctgtgtccttccgccgcagaatttag

SEQ ID NO: 51484 - DNA, 120 bp, Artificial Sequence
  ENSG00000067225_50 (sequence is synthesized)
tatttccgtgaagtatacagagttagagaataagagcaaaaaactgtattacttttagcagtgacttgagcattgttcccgggaggaaagagcttttccattccttctgaggtgatgctg

SEQ ID NO: 51485 - DNA, 120 bp, Artificial Sequence
  ENSG00000067225_51 (sequence is synthesized)
cccagagacatgtcctccaaagcgctgggttgccatgtttcttcccagtactatgaaggactgcagaggagttgaggtctacaaatgaggatttattcatcactgtaaacaatgttgatt

SEQ ID NO: 51486 - DNA, 120 bp, Artificial Sequence
  ENSG00000067225_52 (sequence is synthesized)
tgatctactttgctaggaaatggtaccacaaaggaaccttttttttttaccctaaaaacctaaactttaggctttctaacttggagaaccatctctttgtatctttttccccatcattaa

SEQ ID NO: 51487 - DNA, 120 bp, Artificial Sequence
  ENSG00000067225_53 (sequence is synthesized)
cagggcagcaagggtttcctggaagaggggagcaaacaggcagtgcccatgcactgaggagcagcagatgggcgtgggcagcccagagaaccaggacacaagctctgtgcagatgccctc

SEQ ID NO: 51488 - DNA, 120 bp, Artificial Sequence
  ENSG00000067225_54 (sequence is synthesized)
agcagagggctccagcctcccactcttggctgaacagctccaacccgtagggttgacctttcttaaaaggtccagttcttgctgtttggctattttaagctctagtcttctggggtttca

SEQ ID NO: 51489 - DNA, 120 bp, Artificial Sequence
  ENSG00000067225_55 (sequence is synthesized)
ctcagctggtcctggcttcagcaattgcttccctctgaaggccttgcatagaggccaagcgtgaagtgcagggacttctctgctgtgatgtggcttaagtttccctgacacctgttgagt

SEQ ID NO: 51490 - DNA, 120 bp, Artificial Sequence
  ENSG00000067225_56 (sequence is synthesized)
gtcctcataacttcccttctggtgcccctccccagctcctgagacacagctgcagctacaagtgtgcagtgtcagtgttcaagaaagtgcctggcagaggggctttagaagggtcccctg

SEQ ID NO: 51491 - DNA, 120 bp, Artificial Sequence
  ENSG00000067225_57 (sequence is synthesized)
ccttccaaaggagctttggcaggcagagctgctcctgcagcaacactcccatttcctgttcttgcctgctgagtagcacctagatttctaagcctcatctagatactcagatttgattct

SEQ ID NO: 51492 - DNA, 120 bp, Artificial Sequence
  ENSG00000067225_58 (sequence is synthesized)
gggcctttatagcccagttgctgggactgtttcaggagctaggggccatgtggggcagggagagggcacaaaagtagagaagcctgatgttgattcccagggggctggtcagctctgcta

SEQ ID NO: 51493 - DNA, 120 bp, Artificial Sequence
  ENSG00000067225_59 (sequence is synthesized)
ctgctccttgcagatgtcaagagtcaggtgctagtcacgtgctgcttggcttgtcactgtcattggcagcgagaggaatgggtgctggtgacattgggccagggctgcctctctgtgtca

SEQ ID NO: 51494 - DNA, 120 bp, Artificial Sequence
  ENSG00000067225_60 (sequence is synthesized)
ttctgccaaccatgggctgtgtggggtaagtgggtgaggctgatcttgctgggtcaaggtgatcctgagcccttggcctgtggaatgggggtagagggcaaatggtaacctagcatgctg

SEQ ID NO: 51495 - DNA, 120 bp, Artificial Sequence
  ENSG00000067225_61 (sequence is synthesized)
tgggggatataggatgaggggctgcccgagcctcgggaggggtcctagggagcagatgttgaagaggccagagccctcagtgagctggatgagagggtgagctgtttgaacgccctgagg

SEQ ID NO: 51496 - DNA, 120 bp, Artificial Sequence
  ENSG00000067248_0 (sequence is synthesized)
gagaagcccggatcgaagcgcagggtggcagccccggagccggggaatgtgaagagctctcggctgtgcagtggtaccgtcggggcctgggccgcgaaggatcttctgccacagctgcaa

SEQ ID NO: 51497 - DNA, 120 bp, Artificial Sequence
  ENSG00000067248_1 (sequence is synthesized)
catgggcggcaagaacaagaaacacaaggctccagcggccgcggtggtccgggccgccgtgtctgcttccagagccaaatctgccgaggctggaattgccggggaggcccaaagcaagaa

SEQ ID NO: 51498 - DNA, 120 bp, Artificial Sequence
  ENSG00000067248_2 (sequence is synthesized)
gccagtgtccaggccggccaccgctgccgctgccgctgccggctccagggagccccgtgtcaagcaaggtccaaaaatttatagttttaattctacaaatgattctagtggtcctgcaaa

SEQ ID NO: 51499 - DNA, 120 bp, Artificial Sequence
  ENSG00000067248_3 (sequence is synthesized)
tctggataaatctattttgaaagtggtaattaataacaaactagagcaaagaattattggagtgatcaatgagcataaaaagcaaaataatgacaaaggaatgatttctggaagacttac

SEQ ID NO: 51500 - DNA, 120 bp, Artificial Sequence
  ENSG00000067248_4 (sequence is synthesized)
tgccaaaaaattgcaggatttatacatggctttacaagcattttcatttaagacaaaggacattgaagatgccatgaccaatacactcttatatggaggtgaccttcattctgccttgga

SEQ ID NO: 51501 - DNA, 120 bp, Artificial Sequence
  ENSG00000067248_5 (sequence is synthesized)
ttggctctgtttaaacctttcagatgatgcacttcctgaaggattcagtcaggaatttgaagagcagcaacctaaaagtaggcctaaatttcagtctcctcaaatacaagccactatttc

SEQ ID NO: 51502 - DNA, 120 bp, Artificial Sequence
  ENSG00000067248_6 (sequence is synthesized)
acctccattgcaacctaaaacaaaaacatatgaagaggaccctaagagtaagccaaaaaaggaagaaaaaaatatggaagtaaatatgaaagagtggattttacgatatgctgaacaaca

SEQ ID NO: 51503 - DNA, 120 bp, Artificial Sequence
  ENSG00000067248_7 (sequence is synthesized)
aaatgaagaagaaaagaatgagaattctaaaagtttagaagaggaggaaaaatttgaccctaatgaaaggtacttacatcttgcagcaaaactgctggatgcaaaagaacaagcagctac

SEQ ID NO: 51504 - DNA, 120 bp, Artificial Sequence
  ENSG00000067248_8 (sequence is synthesized)
ctttaaactagaaaaaaacaagcaaggccaaaaagaggctcaggaaaaaataaggaaatttcaaagagaaatggaaactttagaagaccatccagtatttaacccagccatgaagatttc

SEQ ID NO: 51505 - DNA, 120 bp, Artificial Sequence
  ENSG00000067248_9 (sequence is synthesized)
acatcaacaaaatgaaaggaaaaagcctcctgtagccacagaaggagaaagtgcattgaattttaatttatttgaaaaatctgcagctgctactgaagaagagaaagataaaaagaaaga

SEQ ID NO: 51506 - DNA, 120 bp, Artificial Sequence
  ENSG00000067248_10 (sequence is synthesized)
acctcatgatgtaagaaattttgactatactgctcgaagttggactggaaaatctcccaaacaatttctgattgattgggtcaggaagaatcttcccaagagtccaaatccttcctttga

SEQ ID NO: 51507 - DNA, 120 bp, Artificial Sequence
  ENSG00000067248_11 (sequence is synthesized)
aaaagttccagtaggtagatactggaaatgtagggttagggtaatcaagtctgaagatgatgtcctggtagtatgccctacaatcttaacagaagatggcatgcaagctcagcacctggg

SEQ ID NO: 51508 - DNA, 120 bp, Artificial Sequence
  ENSG00000067248_12 (sequence is synthesized)
agctactttagccctttaccgtttagttaaagggcagtcagttcatcagttacttcctcccacttaccgagatgtttggctggagtggagtgatgcagaaaagaaaagggaagaattaaa

SEQ ID NO: 51509 - DNA, 120 bp, Artificial Sequence
  ENSG00000067248_13 (sequence is synthesized)
taaaatggaaaccaataaaccacgtgatctttttattgccaaacttctgaataaactgaaacagcagcaacagcagcaacaacagcattctgaaaataagagagaaaactctgaagatcc

SEQ ID NO: 51510 - DNA, 120 bp, Artificial Sequence
  ENSG00000067248_14 (sequence is synthesized)
cgaggaatcttgggaaaatttagtttcggatgaggatttttctgcactgtccttggaatcagcaaatgtggaagatttggaacctgttagaaacctctttagaaagttgcaaagcacacc

SEQ ID NO: 51511 - DNA, 120 bp, Artificial Sequence
  ENSG00000067248_15 (sequence is synthesized)
taagtatcagaaacttctaaaggaaagacaacagctacctgtatttaaacatcgggactcaattgttgaaactcttaaaaggcatcgggtagtggttgtggcaggtgaaacagggagtgg

SEQ ID NO: 51512 - DNA, 120 bp, Artificial Sequence
  ENSG00000067248_16 (sequence is synthesized)
taaaagtactcaggtaccacattttctattggaagatttgcttctaaatgagtgggaagcaagtaaatgtaacattgtctgtacccaaccccgaagaatctcagcagttagtttagccaa

SEQ ID NO: 51513 - DNA, 120 bp, Artificial Sequence
  ENSG00000067248_17 (sequence is synthesized)
cagagtatgtgatgaattgggctgtgaaaatggacctggaggaaggaattccttgtgtggatatcagatccggatggaatctcgagcttgtgaatctaccaggttactctattgtacaac

SEQ ID NO: 51514 - DNA, 120 bp, Artificial Sequence
  ENSG00000067248_18 (sequence is synthesized)
aggggttttgctaaggaaacttcaagaagatggtcttctaagtaatgtgtctcatgttattgtagatgaggttcatgaaagaagtgtccagtcagacttcctactaattatcttgaagga

SEQ ID NO: 51515 - DNA, 120 bp, Artificial Sequence
  ENSG00000067248_19 (sequence is synthesized)
caggaagaagttatcctgttgaggtttttcatcttgaagatataatagaagaaacaggctttgtactggaaaaagactcagaatattgtcagaaatttctggaagaggaagaagaagtaa

SEQ ID NO: 51516 - DNA, 120 bp, Artificial Sequence
  ENSG00000067248_20 (sequence is synthesized)
ccattaatgttacaagcaaagcagggggaataaaaaaatatcaggaatacatcccagttcagactggagcacatgctgatttaaatccattttaccaaaagtacagcagccgcactcagc

SEQ ID NO: 51517 - DNA, 120 bp, Artificial Sequence
  ENSG00000067248_21 (sequence is synthesized)
atgctattctatacatgaatcctcataaaatcaacctggatctcattttggaacttcttgcatacttagataaaagtccccaattcagaaatattgaaggagcagtattgatctttttac

SEQ ID NO: 51518 - DNA, 120 bp, Artificial Sequence
  ENSG00000067248_22 (sequence is synthesized)
caggacttgctcatattcagcagttgtatgatcttctatcaaatgatagaagattttattctgaacgatataaagtgatagctctgcattctattctttcaacccaagatcaagctgcag

SEQ ID NO: 51519 - DNA, 120 bp, Artificial Sequence
  ENSG00000067248_23 (sequence is synthesized)
cattcacacttccccctccaggagtcaggaagattgttttagcaaccaatattgcagagacgggtatcactattcctgatgttgtatttgtaattgatactggaagaacaaaagaaaata

SEQ ID NO: 51520 - DNA, 120 bp, Artificial Sequence
  ENSG00000067248_24 (sequence is synthesized)
agtaccatgaaagcagtcagatgagttctttggtggagacgtttgtcagtaaagccagtgctttgcagcgccagggaagagctgggcgggtcagagatggcttctgtttccgaatgtaca

SEQ ID NO: 51521 - DNA, 120 bp, Artificial Sequence
  ENSG00000067248_25 (sequence is synthesized)
caagagaaagatttgaaggctttatggattattctgttcctgaaatcttacgtgtacctttggaggaattatgccttcatattatgaaatgtaatcttggttctcctgaagatttcctct

SEQ ID NO: 51522 - DNA, 120 bp, Artificial Sequence
  ENSG00000067248_26 (sequence is synthesized)
ccaaagccttagatcctcctcagctccaagtgatcagcaatgcaatgaatttgctccgaaaaattggagcttgtgaattaaatgagcctaaactgactccgttgggccaacaccttgcag

SEQ ID NO: 51523 - DNA, 120 bp, Artificial Sequence
  ENSG00000067248_27 (sequence is synthesized)
ctttacctgtgaatgtcaagattggcaagatgcttatttttggtgccatatttggctgccttgacccagtggcaacactagctgcagttatgacagagaagtctccttttaccacaccaa

SEQ ID NO: 51524 - DNA, 120 bp, Artificial Sequence
  ENSG00000067248_28 (sequence is synthesized)
ttggtcgaaaagatgaagcagatcttgcaaaatcagctttggccatggcggattcagaccacctgacgatctacaatgcatatctaggatggaagaaagcacgacaagaaggaggttatc

SEQ ID NO: 51525 - DNA, 120 bp, Artificial Sequence
  ENSG00000067248_29 (sequence is synthesized)
gttctgaaatcacatactgccggaggaactttcttaatagaacatcactgttaaccctagaggatgtaaagcaggagttaataaagttggttaaggcagcaggattttcatcttccacaa

SEQ ID NO: 51526 - DNA, 120 bp, Artificial Sequence
  ENSG00000067248_30 (sequence is synthesized)
cttctaccagctgggaaggaaacagagcctcacagaccctctcattccaagaaattgcccttcttaaagctgtactggtggctggactgtatgacaatgtggggaagataatctatacaa

SEQ ID NO: 51527 - DNA, 120 bp, Artificial Sequence
  ENSG00000067248_31 (sequence is synthesized)
agtcagtggatgttacagaaaaattggcttgcattgtggagacggcccaaggcaaagcacaagtacacccatcctcagtaaatcgagatttgcaaactcatggatggctcttataccagg

SEQ ID NO: 51528 - DNA, 120 bp, Artificial Sequence
  ENSG00000067248_32 (sequence is synthesized)
agaagataaggtatgccagagtgtatttgagagaaactaccctaataaccccttttccagttttactttttggtggtgatatagaagttcagcaccgagaacgtcttctttctattgatg

SEQ ID NO: 51529 - DNA, 120 bp, Artificial Sequence
  ENSG00000067248_33 (sequence is synthesized)
gctggatctattttcaggcccctgtaaagatagctgtcattttcaagcagctgagagttctcattgattcagttttaagaaaaaagcttgaaaatccaaagatgtcccttgaaaatgaca

SEQ ID NO: 51530 - DNA, 120 bp, Artificial Sequence
  ENSG00000067248_34 (sequence is synthesized)
agattctgcagatcattacggaattgataaaaacagagaataactgaaactgaaattcatggtcaactgctttaaaaattaagatgaagatacagtcatgaaattatctgaaaatgggtc

SEQ ID NO: 51531 - DNA, 120 bp, Artificial Sequence
  ENSG00000067248_35 (sequence is synthesized)
atcacattaagtatttcattacttaaaatgttggtactagccattaacttaaaggtggtgggaaaaaagcacatactttaaacatgtataattttctagttcctttttaatgatgattat

SEQ ID NO: 51532 - DNA, 120 bp, Artificial Sequence
  ENSG00000067248_36 (sequence is synthesized)
tctgaatgtatttgccactacatttacaataaattctttggtattatgcatgttttgctcatcgttgtgttaataagggcaaggcctatgtctgtggtatctgtagcttaatgttgtgat

SEQ ID NO: 51533 - DNA, 120 bp, Artificial Sequence
  ENSG00000067248_37 (sequence is synthesized)
tccctgtgtagctgcctcatcccctatcagtccttgatgtctgcagaatttaaaccctatagacccagaagggaaaataatctccaaaaccaattataattaaatttccatgaaaaggaa

SEQ ID NO: 51534 - DNA, 120 bp, Artificial Sequence
  ENSG00000067248_38 (sequence is synthesized)
cagagtatgtgatgaattgggctgtgaaaatggacctggaggaagggtaagctgtcattcaactccacctcagtgaatgatggtgacattactcacctttgcttttgtgatccaaatgga

SEQ ID NO: 51535 - DNA, 120 bp, Artificial Sequence
  ENSG00000067248_39 (sequence is synthesized)
tggaaatgtaaaacacataaaccagtattgtgtgacatttctgataatatgtatttagtattactttatttttcagatttgaaggctttatggattattctgttcctgaaatcttacgtg

SEQ ID NO: 51536 - DNA, 120 bp, Artificial Sequence
  ENSG00000067334_0 (sequence is synthesized)
gcatttccggagcgccagggaagagggaagtcgtggtggtcgcgagggagccggaaagatggtggttaccagatctgcacgggctaaggccagcatccaagccgcgtcggctgaaagttc

SEQ ID NO: 51537 - DNA, 120 bp, Artificial Sequence
  ENSG00000067334_1 (sequence is synthesized)
cgggcaaaagagttttgctgctaatgggattcaagcgcatccagaaagtagtactggatctgatgcccgaactactgctgaatcacagaccactgggaagcaaagtttaatccctagaac

SEQ ID NO: 51538 - DNA, 120 bp, Artificial Sequence
  ENSG00000067334_2 (sequence is synthesized)
tcctaaagctagaaagaggaagagcagaactacaggctcactaccaaaggggactgaaccatctacggatggagaaacctctgaggcagagtcaaattattctgtgtctgagcaccatga

SEQ ID NO: 51539 - DNA, 120 bp, Artificial Sequence
  ENSG00000067334_3 (sequence is synthesized)
taccattttaagggtaactaggagaaggcagatcttaattgcatgctccccagtgtccagtgttaggaaaaagccgaaagtaactccaacaaaggagtcttacactgaagaaatagtgtc

SEQ ID NO: 51540 - DNA, 120 bp, Artificial Sequence
  ENSG00000067334_4 (sequence is synthesized)
tgaagcagaatctcatgtttcaggtatttctagaattgtgcttcctacagaaaaaactacaggagccagaagaagtaaggctaaatctctgacagatccaagccaagaatctcatacaga

SEQ ID NO: 51541 - DNA, 120 bp, Artificial Sequence
  ENSG00000067334_5 (sequence is synthesized)
agctatatctgatgctgagacatcaagctcagacatttcattctctggaattgcaactagaagaaccaggagtatgcagaggaaattaaaggcacaaactgaaaagaaagatagtaagat

SEQ ID NO: 51542 - DNA, 120 bp, Artificial Sequence
  ENSG00000067334_6 (sequence is synthesized)
tgtaccaggaaatgagaaacagatcgtgggtacacctgtgaattcagaggattcagataccagacaaacttcccatttacaagcaagatctctttctgagataaataagccaaatttcta

SEQ ID NO: 51543 - DNA, 120 bp, Artificial Sequence
  ENSG00000067334_7 (sequence is synthesized)
taataatgactttgatgatgatttctcccacagaagttcagaaaatatattaacagtgcacgaacaggccaatgttgaatctcttaaagaaacaaaacagaattgtaaggatttggatga

SEQ ID NO: 51544 - DNA, 120 bp, Artificial Sequence
  ENSG00000067334_8 (sequence is synthesized)
agatgccaatggaataacagatgaggggaaagaaattaatgagaaaagttctcagctgaagaatctttctgaacttcaggacactagccttcaacagttagtttctcagagacattcaac

SEQ ID NO: 51545 - DNA, 120 bp, Artificial Sequence
  ENSG00000067334_9 (sequence is synthesized)
cccccaaaataaaaatgctgtatcagtgcactctaatctgaactctgaggctgtaatgaaatcattaactcaaacatttgcaactgtggaagtaggcagatggaataacaacaaaaagag

SEQ ID NO: 51546 - DNA, 120 bp, Artificial Sequence
  ENSG00000067334_10 (sequence is synthesized)
ccccataaaagcaagtgacttgacaaagtttggtgattgtggtggtagtgatgatgaagaagagtccacagttataagtgtcagtgaagacatgaacagtgaagggaatgtagattttga

SEQ ID NO: 51547 - DNA, 120 bp, Artificial Sequence
  ENSG00000067334_11 (sequence is synthesized)
atgtgataccaaactatacacgtctgcgcccaacacatctcagggtaaagataattctgtcttactagttctcagcagtgatgaaagccaacagtctgaaaacagtgagaatgaagagga

SEQ ID NO: 51548 - DNA, 120 bp, Artificial Sequence
  ENSG00000067334_12 (sequence is synthesized)
tactttatgttttgttgaaaatagtggccaaagggagtcattaagtggagacacaggaagtctgtcatgtgacaatgcattgtttgtaattgacacaactcctggaatgagtgctgataa

SEQ ID NO: 51549 - DNA, 120 bp, Artificial Sequence
  ENSG00000067334_13 (sequence is synthesized)
aaatttttacttggaagaggaagacaaggcaagtgaggttgccattgaggaagaaaaagaagaggaagaggatgaaaaaagtgaagaagattcatcagaccatgacgaaaatgaagatga

SEQ ID NO: 51550 - DNA, 120 bp, Artificial Sequence
  ENSG00000067334_14 (sequence is synthesized)
gtttagtgatgaagaagacttcctaaatagcacaaaggctaaacttctgaagttgacaagcagcagcatagaccctggtctgagtatcaagcagttgggtggtttgtatattaattttaa

SEQ ID NO: 51551 - DNA, 120 bp, Artificial Sequence
  ENSG00000067334_15 (sequence is synthesized)
tgcagataaactacagtctaacaagagaaccctaacacagatcaaggagaaaaagaaaaatgagcttctgcagaaagccgtcattacacctgattttgaaaaaaaccactgtgttccacc

SEQ ID NO: 51552 - DNA, 120 bp, Artificial Sequence
  ENSG00000067334_16 (sequence is synthesized)
atatagtgaatcaaagtatcaacttcagaaaaaacgcagaaaagaacgacaaaaaacagcaggggatggctggtttggtatgaaagctccagaaatgacaaatgaactgaaaaatgatct

SEQ ID NO: 51553 - DNA, 120 bp, Artificial Sequence
  ENSG00000067334_17 (sequence is synthesized)
caaagcactgaagatgagagccagcatggacccgaaaagattttacaagaaaaatgatagagatggcttccccaagtacttccagattggaaccattgttgacaatccagctgatttcta

SEQ ID NO: 51554 - DNA, 120 bp, Artificial Sequence
  ENSG00000067334_18 (sequence is synthesized)
ccattcacgaattcccaagaagcaaaggaaaagaactattgtggaagaactgctggctgattctgaattcagaagatacaaccgaaggaagtactcagagatcatggctgaaaaagcagc

SEQ ID NO: 51555 - DNA, 120 bp, Artificial Sequence
  ENSG00000067334_19 (sequence is synthesized)
aaatgcagcaggaaaaaagttccgaaagaagaagaaatttcgcaattaagatttaccaagcaaactgcaacattttacattgctcctttatttacttattaaagacgtttggaaaactaa

SEQ ID NO: 51556 - DNA, 120 bp, Artificial Sequence
  ENSG00000067334_20 (sequence is synthesized)
caccatcatctaaattaatttaccatagactggccctgttcatacaggaatttgtatttggaaaaagttgatttgagaatcgattacatgcccttagaaaataggggtgtctaaaagacc

SEQ ID NO: 51557 - DNA, 120 bp, Artificial Sequence
  ENSG00000067334_21 (sequence is synthesized)
caccctggtgtagactctttatgggaaaaaaggaaaaaaaatctcaaccattttaagataactgatggtttgtaaagttttcaatgcttagttatttaaagaaaatttaattaaaagata

SEQ ID NO: 51558 - DNA, 120 bp, Artificial Sequence
  ENSG00000067334_22 (sequence is synthesized)
ggaagtataaagtttgctaacatgttcaaagaactttaaaaaatgatcaaagatatataaacattattgtaattaataggtagttttatgtgtgtatgtgtgtgtgtgtctgtgtagggg

SEQ ID NO: 51559 - DNA, 120 bp, Artificial Sequence
  ENSG00000067334_23 (sequence is synthesized)
acgggagatggtagagaggcaatgccctatagttagctataaaattcagatccagaaagttgggatacaaagatatgaagaatatgacctagaaagcttgggcagaggagctgttttcct

SEQ ID NO: 51560 - DNA, 120 bp, Artificial Sequence
  ENSG00000067334_24 (sequence is synthesized)
cagggaggaataattggtttttatctagatttaagtgttgtggtccaagtaaaacaggattaaactataatttaagttggccagggtttcttcgaagttaacccagcttacctcttctcc

SEQ ID NO: 51561 - DNA, 120 bp, Artificial Sequence
  ENSG00000067334_25 (sequence is synthesized)
agtggtacagtatgcaccctggctaagctggtttctggcacccaaggagtgttggtcatttctgttgatacttggtgagttgtagcttcctttatgttactattcactttacctctattt

SEQ ID NO: 51562 - DNA, 120 bp, Artificial Sequence
  ENSG00000067334_26 (sequence is synthesized)
atttttccagcatactgcttccttgagatatcagcaaatatgaaatcttttttttttttaataatagttttggggtacatgtgtagaacatgcaggttacataggtatacacgtgccatg

SEQ ID NO: 51563 - DNA, 76 bp, Artificial Sequence
  ENSG00000067334_27 (sequence is synthesized)
acctcccacttacgtctgttcttgctgagatgatttccagcttcagccatgtccctgcaaaggacatgaactcatg

SEQ ID NO: 51564 - DNA, 120 bp, Artificial Sequence
  ENSG00000067334_28 (sequence is synthesized)
ttagtcatgcagtctgcccatacctatgtccaaaatctcatatttactgcttggagtcaaaagctagtaatagcagaactgacaataacattcatagttggagttagggaagcatctatg

SEQ ID NO: 51565 - DNA, 120 bp, Artificial Sequence
  ENSG00000067334_29 (sequence is synthesized)
tctgttctcttttattttaaaaaaaaactacttttgtttctggaatactatgttttgccttctactggataaaataaggacccagtatgagagaattgtatcctttagtgcttctggcct

SEQ ID NO: 51566 - DNA, 120 bp, Artificial Sequence
  ENSG00000067334_30 (sequence is synthesized)
tctacaaatacctggatatttaaataatggatgaagttatgttttgctttttaataagcaagtcttttgagaaacaggttttactgactttggcctgtgtcactaaactcagttcaccta

SEQ ID NO: 51567 - DNA, 81 bp, Artificial Sequence
  ENSG00000067334_31 (sequence is synthesized)
ttactgactttggcctgtgtcactaaactcagttcacctactggaacttttttttttttttttgagacgtctcactccatc

SEQ ID NO: 51568 - DNA, 75 bp, Artificial Sequence
  ENSG00000067334_32 (sequence is synthesized)
caacctccgcctcccaagttcaagcgattatcatacctcagcctgccaagtagctgggactactgggcatgccat

SEQ ID NO: 51569 - DNA, 120 bp, Artificial Sequence
  ENSG00000067334_33 (sequence is synthesized)
acaggtgtgagccaccatgcccagccaactggaactatttgaaggctttataccagaaaagtataaagaatccaaagggctgccacagtcaggtgtgctggtgaaagagaccttcaagat

SEQ ID NO: 51570 - DNA, 120 bp, Artificial Sequence
  ENSG00000067334_34 (sequence is synthesized)
gaccttcaagatacccctgagaagatcttgaaagatttcgaaaagaatgctgtatttatacaccatctggctccaagatgctttttttttttttttttttgagagacggactctcgctct

SEQ ID NO: 51571 - DNA, 120 bp, Artificial Sequence
  ENSG00000067334_35 (sequence is synthesized)
gcaggagccaccacgtctggcccaaaatgttcttaaaacaaagtagatgctgtaagactacagttgataaagttgggctctgggctaggttcttagcatccaacacaatcagttctgtgt

SEQ ID NO: 51572 - DNA, 120 bp, Artificial Sequence
  ENSG00000067334_36 (sequence is synthesized)
tcagtgttctgctgtatgataaaccaactgctctagagaaacaccaatattcctcttctgaaacctgggaaaatgtcttttttgggtcccataactagatgtcacaaaaggagtggggag

SEQ ID NO: 51573 - DNA, 120 bp, Artificial Sequence
  ENSG00000067334_37 (sequence is synthesized)
tggggaggctatataaaaaagttcaacaaaaccttagtaactggtatacattaataggatcccattcttagaaacagcaagttaaagaaaataccataatgggaaaaaaaagttaacatt

SEQ ID NO: 51574 - DNA, 120 bp, Artificial Sequence
  ENSG00000067334_38 (sequence is synthesized)
tctgagagatgtaccaggtattcagtctctcaggcagtgacaacttgttcagaataattacctacaatagatcccaaaccattgaaaaatgcctaattgtttacttaatggaatttgtac

SEQ ID NO: 51575 - DNA, 120 bp, Artificial Sequence
  ENSG00000067334_39 (sequence is synthesized)
ttactatttaattagatgaatatctttattgaaagttttcagtaagggttgcaacaaaaagggctttctaattaaccaattccccaagcatctgtctaattaaaatgtaaagtgcaatta

SEQ ID NO: 51576 - DNA, 120 bp, Artificial Sequence
  ENSG00000067334_40 (sequence is synthesized)
tcctcctcccttggcctcctcaaagcactaggattataggtgtgagccactttgccaggctgactaaaaattttaaaacttacagaagtttaaactgttgaaaaacttatataacattct

SEQ ID NO: 51577 - DNA, 120 bp, Artificial Sequence
  ENSG00000067334_41 (sequence is synthesized)
tactataaactactgaagaaacataatagcaccactatgctacttttttttttttgctttaaataaatggcaaaatttacattactattagtgtaatgtaagcttgttctttccattcct

SEQ ID NO: 51578 - DNA, 120 bp, Artificial Sequence
  ENSG00000067334_42 (sequence is synthesized)
ttctctaaatataattagagctacactgaagtatgaaagcatcttggcactcaatgcatgacttatttcaatcaattgttcacagattggaaccattgttgacaatccagctgatttcta

SEQ ID NO: 51579 - DNA, 120 bp, Artificial Sequence
  ENSG00000067334_43 (sequence is synthesized)
tttcaaccccttcccatcccctcaaacatagttctctaccttttatctcaaaagataaccaaagaaacctcttgattctggtcatactcttcctttcactgtgacaataacaacaacaac

SEQ ID NO: 51580 - DNA, 120 bp, Artificial Sequence
  ENSG00000067334_44 (sequence is synthesized)
aacaacaacaaaaccttattcttctcctttacaatttctttaacgtttttttcttttctgctattcccaatccctaaacaccatctcacgtttagattatacagctttccacttcgtctc

SEQ ID NO: 51581 - DNA, 120 bp, Artificial Sequence
  ENSG00000067334_45 (sequence is synthesized)
ccagttcctgcgagcaccttatatcccttttaccccaaccaagtccttaaattttatttatagttagcgtcacaatacacgagtaaatattgtctttctttaaaaagcacaaatatctca

SEQ ID NO: 51582 - DNA, 120 bp, Artificial Sequence
  ENSG00000067334_46 (sequence is synthesized)
aacttctcccttggacataccaatggctacattaagctctttagaacgtagaaatgaaagaacgcctcccgggttcaaacgattctactaaacaaatgaaagaacgaatggcatgtaagt

SEQ ID NO: 51583 - DNA, 120 bp, Artificial Sequence
  ENSG00000067334_47 (sequence is synthesized)
gcgtttttacaattcatgtgaacgggtacgctaagaccctctgtcactgcgggcttcgccgccccgatgaaggtctttcccagcaaaaatctggcttgccttctacagctctgaaatgca

SEQ ID NO: 51584 - DNA, 120 bp, Artificial Sequence
  ENSG00000067334_48 (sequence is synthesized)
aggtaggaaatccagtcttccctacttctcgccgcttcgcagagccgcgctcaggcaggcggggcggcgcaagggtccggttaagggtgaggacctgccgacagagaggacccgagcttg

SEQ ID NO: 51585 - DNA, 120 bp, Artificial Sequence
  ENSG00000067334_49 (sequence is synthesized)
ccgcgcgcttgggtctcccaggccccgtgctaagcctgtcacggaaactgtttagccttcaccactgtctcttaaggcaatttttagtatggaagagaggttagataactttatttgggt

SEQ ID NO: 51586 - DNA, 120 bp, Artificial Sequence
  ENSG00000067334_50 (sequence is synthesized)
cgttcaactccttaatgcagaagcacagttcgaacttttaaaccttactgttaacacggtaccaaggagggttaatttcggccaccatgcacaagccccatttaggggggctggaaaaaa

SEQ ID NO: 51587 - DNA, 120 bp, Artificial Sequence
  ENSG00000067334_51 (sequence is synthesized)
agcttcgttttcacgtggggaggctggcagctgtccagcatcacctccttaaggcgtgaggagggctgtggtgtcgtcgcctggtgactcttagtggcgttagtcggctgtctcattctg

SEQ ID NO: 51588 - DNA, 120 bp, Artificial Sequence
  ENSG00000067365_0 (sequence is synthesized)
gcgcctgcgcagaccgcctgttatggcggccgcctaagtcccacagagacgggagtcgggtgggatcccaggctgggccccgcggcggctggattctcttccctggccaagtctctgaga

SEQ ID NO: 51589 - DNA, 120 bp, Artificial Sequence
  ENSG00000067365_1 (sequence is synthesized)
tcttctcccagggcgatgcaaagctactcgctaccagcttggacctgtctgcagtatctcctctgggacctgccatgctgaggacccattctcacctctgagggactcctgtcctaggac

SEQ ID NO: 51590 - DNA, 120 bp, Artificial Sequence
  ENSG00000067365_2 (sequence is synthesized)
taaggtggagcctgggccatggtacagctggctcctgcggcagccatggacgaggtcacctttaggagcgacactgtgctgtcagatgtccacctctataccccgaaccatagacatctc

SEQ ID NO: 51591 - DNA, 120 bp, Artificial Sequence
  ENSG00000067365_3 (sequence is synthesized)
atggtacggctgaacagcgtggggcagccagttttcctgtcccaattcaagcttctatggagccaagactcttggacagattcaggagccaagggtggcagtcacagagatgttcacaca

SEQ ID NO: 51592 - DNA, 120 bp, Artificial Sequence
  ENSG00000067365_4 (sequence is synthesized)
aaggagcctccttctgctgagacaggcagcacagggtcccctccaggaagtggccatggtaatgagggtttctccctccaggccgggactgacaccactggccaggaagtggctgaagct

SEQ ID NO: 51593 - DNA, 120 bp, Artificial Sequence
  ENSG00000067365_5 (sequence is synthesized)
cagctggatgaggatggggatttggacgtggtgagaagaccacgagccgcctctgattccaacccagcagggcctctgagagacaaggtacatcccatgattctagcacaggaagaagac

SEQ ID NO: 51594 - DNA, 120 bp, Artificial Sequence
  ENSG00000067365_6 (sequence is synthesized)
gacgtcctgggagaggaagcacaaggcagcccgcacgatatcatcagaatagagcacaccatggccacgcccctggaggatgttggcaagcaggtgtggcggggcgccctgctcctggca

SEQ ID NO: 51595 - DNA, 120 bp, Artificial Sequence
  ENSG00000067365_7 (sequence is synthesized)
gactacatcctgttccgacaggacctcttccgaggatgtacagcgctggagctcggggccggcacggggctcgctagcatcatcgcagccaccatggcacggaccgtttattgtacagat

SEQ ID NO: 51596 - DNA, 120 bp, Artificial Sequence
  ENSG00000067365_8 (sequence is synthesized)
gtcggtgcagatctcttgtccatgtgccagcgaaacattgccctcaacagccacctggctgccactggaggtggtatagttagggtcaaagaactggactggctgaaggacgacctctgc

SEQ ID NO: 51597 - DNA, 120 bp, Artificial Sequence
  ENSG00000067365_9 (sequence is synthesized)
acagatcccaaggtccccttcagttggtcacaagaggaaatttctgacttgtacgatcacaccaccatcctgtttgcagccgaagtgttttacgacgacgacttgactgatgctgtgttt

SEQ ID NO: 51598 - DNA, 120 bp, Artificial Sequence
  ENSG00000067365_10 (sequence is synthesized)
aaaacgctctcccgactcgcccacagattgaaaaatgcctgcacagccatactgtcggtggagaagaggctcaacttcacattgagacacttggacgtcacatgtgaagcctacgatcac

SEQ ID NO: 51599 - DNA, 120 bp, Artificial Sequence
  ENSG00000067365_11 (sequence is synthesized)
ttccgctcctgcctgcacgcgctggagcagctcgcagatggcaagctgcgcttcgtggtggagcccgtggaggcctccttcccacagctcctggtttacgagcgcctccagcaactggag

SEQ ID NO: 51600 - DNA, 120 bp, Artificial Sequence
  ENSG00000067365_12 (sequence is synthesized)
ctctggaagatcatcgcagaaccagtaacatgacccatcgcctccacaaggcgcggcgtctcgactgttcttagagtgtatttctagtaaaatcagaagctcaccaaagcaacatgcttg

SEQ ID NO: 51601 - DNA, 120 bp, Artificial Sequence
  ENSG00000067365_13 (sequence is synthesized)
agattttgtcattttaaaaatatggttacacgtaccttagatgacccaagatggttttctggggtctgtccctgcctcccagttgtagccagagaaggttgttgctgtgggctggaggtc

SEQ ID NO: 51602 - DNA, 120 bp, Artificial Sequence
  ENSG00000067365_14 (sequence is synthesized)
actttagttgcctgtttctcatggttgtgatgtgtgctccagggtcaagccgagccacgttccttctcagctcagttccacccacgtcagtcatttcagctgtgtgctttacttgcggtt

SEQ ID NO: 51603 - DNA, 120 bp, Artificial Sequence
  ENSG00000067365_15 (sequence is synthesized)
gcggccctggctgtgaggtggattcttgtactgccctctgtcagctgtttacagatgggttgactaccactgccagtattgccatcatattgccgctcggcacaaaagcctcatttcctc

SEQ ID NO: 51604 - DNA, 120 bp, Artificial Sequence
  ENSG00000067365_16 (sequence is synthesized)
ccagggttgggtatgctccaccccatcactctggtgagggccccatgagaaggaagaggcaggagctggcgccaggaatggactggcattggcctttgtatttaattttaactctttatc

SEQ ID NO: 51605 - DNA, 120 bp, Artificial Sequence
  ENSG00000067365_17 (sequence is synthesized)
acccaaatcaggtacgtttggaataaacctaagagccactctttggggtcatgtgcagctgaccagggtttgtgcagtgatcttcctcagaggtgttcccttccgcctggactcattttc

SEQ ID NO: 51606 - DNA, 120 bp, Artificial Sequence
  ENSG00000067365_18 (sequence is synthesized)
cctccgccccttggtctctctgtcttatcacgtgtgtacatgtctgtctgtctggttttttatcttctccatctgtgcctctctcctcccatctccaccccttcctgtcatcctctatgt

SEQ ID NO: 51607 - DNA, 120 bp, Artificial Sequence
  ENSG00000067365_19 (sequence is synthesized)
cccactgtctctctccttctctccagttttggtcccatcttcctgctacccttggccctccctgcagcccctttcccctgccttgctgctgccgcacactttgcaccagggcctttcatg

SEQ ID NO: 51608 - DNA, 120 bp, Artificial Sequence
  ENSG00000067365_20 (sequence is synthesized)
ctcgcttctccccaagctcccaggttccatccctaggcccatcatacccctggcattggctaatccctcatgccaggggccaggcacttgcaagtctaacttcatcttcccaacaaattt

SEQ ID NO: 51609 - DNA, 120 bp, Artificial Sequence
  ENSG00000067365_21 (sequence is synthesized)
aggaggtccgcagccttgtgatacccacattacagcggagaagactgaggtccaaaaaggaaaaagtctccatgaggtcagggaccttgtttgtcttaaatatcactacatccctgctgt

SEQ ID NO: 51610 - DNA, 120 bp, Artificial Sequence
  ENSG00000067365_22 (sequence is synthesized)
atggtctggcaaacagtagatgctcaacacatattgttgaatgaattgctaatgtaagttactaattaggtcattatttcctatttgtgagtgattttgcctccaggaacatttggcagt

SEQ ID NO: 51611 - DNA, 120 bp, Artificial Sequence
  ENSG00000067365_23 (sequence is synthesized)
gcctggagacattttcggtggtcacaagtaggggagacgggtgccaccagtatccagtgggtgaggccagagatgctgctgaacgttctataatgcggtaatcacggagcatcccccaca

SEQ ID NO: 51612 - DNA, 120 bp, Artificial Sequence
  ENSG00000067365_24 (sequence is synthesized)
acacaaaatgatccagcccaaaatgtgagtagcgccgaggcggagaaatcctgacttggaagaagaaagccaagtactttagagaagaaaaacggtctcagctgaacctgtagtgagagc

SEQ ID NO: 51613 - DNA, 120 bp, Artificial Sequence
  ENSG00000067365_25 (sequence is synthesized)
atgcaggagagtgacctcaccctgcccctctgggagcaagaagaaaacctatgcatgtacgttattataaatcttcaaagaacctaaaaggcagaagtgatccctattttgcacatgaga

SEQ ID NO: 51614 - DNA, 120 bp, Artificial Sequence
  ENSG00000067365_26 (sequence is synthesized)
aatccaaaattcagagaggttcagcaacttgcccaacatcacacagcaaccaagggcagagtcaggtttagagcccatgtccacccatgtccatctgactcctgagcctgtgcttttccc

SEQ ID NO: 51615 - DNA, 120 bp, Artificial Sequence
  ENSG00000067365_27 (sequence is synthesized)
acattcccgctggagcagcagcagcatctgtggcatcacgtggatgctggttagaaatgcaacatcaggctgagcatgttggctcactcctgcaatcccgatactttgggaggccaaggc

SEQ ID NO: 51616 - DNA, 120 bp, Artificial Sequence
  ENSG00000067365_28 (sequence is synthesized)
aggaggatcaattaaggccaggagttcaaccagcctggacaacaaagcaagaccccatctctattaaaaattaaacagccaattagtctggcatggtggtttgcgcctgcagtcccagct

SEQ ID NO: 51617 - DNA, 120 bp, Artificial Sequence
  ENSG00000067365_29 (sequence is synthesized)
ggcgaaggttgcagtgagccaagatcgcaacactgccctccagcctgggcaacagagccagacatctcaaaaattaaaaagccaggcgaggtgccgggcatggtggctcatgcctgtcat

SEQ ID NO: 51618 - DNA, 120 bp, Artificial Sequence
  ENSG00000067365_30 (sequence is synthesized)
aaaactccatctcaaaaaaaaaaaaaagccaggcgtagtggctaacgcctgtagtcccaactactcagaaggcaaggtgagaggattgcttgagcctaagaatttgaggctgcagtgagc

SEQ ID NO: 51619 - DNA, 120 bp, Artificial Sequence
  ENSG00000067365_31 (sequence is synthesized)
gaggattgcttgagcctaagaatttgaggctgcagtgagccatgactgcaccattgcactctggcctgggcaacagagagagatcctgtctccaaaaaagaagaaaagtatcaagcctca

SEQ ID NO: 51620 - DNA, 120 bp, Artificial Sequence
  ENSG00000067365_32 (sequence is synthesized)
gctcaggacgtgattccgaatctgcatctcaacgagaccctgggtgatttgtgtgcacagtagtttgagaagctctggggcctaccacatagccctcaacctattgctgttttctaaaat

SEQ ID NO: 51621 - DNA, 120 bp, Artificial Sequence
  ENSG00000067365_33 (sequence is synthesized)
tcctacacaaactccgttcctgacagacttgccataatggagcagcattgcagatcactacagggaatattaataatgagtcttcaaatcagaaccccactagacagagccaacaactgg

SEQ ID NO: 51622 - DNA, 120 bp, Artificial Sequence
  ENSG00000067365_34 (sequence is synthesized)
cagtacgtcagcactaatggtgacaatttcctagcactcctgggtacaagtccataaatgtaattggcaccaagcaatagagttgtcacagctttcacctgccgcattagggcaaactgc

SEQ ID NO: 51623 - DNA, 120 bp, Artificial Sequence
  ENSG00000067365_35 (sequence is synthesized)
ttttatgtctaaaccactgggcctgaaagcttcctctaagtagagcctggaattaatcttgatccactgtaattcaaagtatcgtcagattttcatttcccagagtgggagcgcgccccc

SEQ ID NO: 51624 - DNA, 120 bp, Artificial Sequence
  ENSG00000067365_36 (sequence is synthesized)
attgccatgttttatggccttgtttgagcctctacaagtgcttgtttggcagcgatattcagaatcaccaaaccatggggatgttctgctaggtaattagcccaggccagtggactcaat

SEQ ID NO: 51625 - DNA, 120 bp, Artificial Sequence
  ENSG00000067365_37 (sequence is synthesized)
ttttttataacattttcagaaaaatatgtgacccaaggaggggacttggctgttcagctgcagcctgcatgggaaagaactgttaaaaccaacaaagccaggcacagtggctcacacctg

SEQ ID NO: 51626 - DNA, 120 bp, Artificial Sequence
  ENSG00000067365_38 (sequence is synthesized)
atggcggccgcctaagtcccacagagacgggagtcgggtgggatcccaggctgggccccgcggcggttgaagaagtgggggccctgaagatttcatgacatctacccaggtaggaacagc

SEQ ID NO: 51627 - DNA, 120 bp, Artificial Sequence
  ENSG00000067365_39 (sequence is synthesized)
tcctataggcagtcaggggttacaggcaggtttgggtcaaatacctgaaaccaaccccaggacaaggaggttgctggtgttttattaacacctactgtgagccaaggactctgctcagca

SEQ ID NO: 51628 - DNA, 120 bp, Artificial Sequence
  ENSG00000067365_40 (sequence is synthesized)
aagccctccaagcacaggctccaccctagtcctgcagggggtgaagcctgcgtgcctggcaccatctgtagtggaacctgttgggggagctacatcctgttcttagcagccaccatgtct

SEQ ID NO: 51629 - DNA, 120 bp, Artificial Sequence
  ENSG00000067365_41 (sequence is synthesized)
ggagacgggcctacaggcgaaccttgtcttttactttatagcacatattccccccgttggacagttcagactccagaggaggcaagaccgaggcagaggttgtttggggaacaggaagtc

SEQ ID NO: 51630 - DNA, 120 bp, Artificial Sequence
  ENSG00000067365_42 (sequence is synthesized)
agtaaaagcccgtccaggggatatgagatcagtgagggataggaaagcaaggtgggcagaaacagcaaaacccttcccattgatgatggcagtttgtgcgtccgactggctggtttgcag

SEQ ID NO: 51631 - DNA, 120 bp, Artificial Sequence
  ENSG00000067365_43 (sequence is synthesized)
gggattgacaaaaccttaaaaagtttatccagggatctgccaggaatccacagacccaggattcaaaagaaattatgttcaattcccccactgtagaaataaagtgagaccccaagagaa

SEQ ID NO: 51632 - DNA, 120 bp, Artificial Sequence
  ENSG00000067365_44 (sequence is synthesized)
ctcgagaaaggcagggctggaactcaggccgtcagattctgagtcccgtgccttcctgctggagaatcgggcaagtcgcttagcctctctgagttcagtttccttgtctgtacaaggggt

SEQ ID NO: 51633 - DNA, 120 bp, Artificial Sequence
  ENSG00000067365_45 (sequence is synthesized)
acaacctcctccagttgtaaggaattcagagagacagcacatacaaagctcttagcgtaatgcctggcacggattcagtgttccgtaaatgtaagcctctgtcctggggactggcccaag

SEQ ID NO: 51634 - DNA, 120 bp, Artificial Sequence
  ENSG00000067365_46 (sequence is synthesized)
ctgggaggagggagactggctgacgaacagtctaggttcctgcaggtctagagacccagtttgcaaatgagataagacgtaattctagaatctgataaggacaggtgagattctaacact

SEQ ID NO: 51635 - DNA, 120 bp, Artificial Sequence
  ENSG00000067365_47 (sequence is synthesized)
gtctcatcccattgctagccctagagtttctcatggggatagttcctcaggctggtcttttatgttctcatgatacctttgggattatttaaatataaactctgacttttcacaggagtg

SEQ ID NO: 51636 - DNA, 120 bp, Artificial Sequence
  ENSG00000067365_48 (sequence is synthesized)
ggagccccaagatggccctgggtagggaggtccctaagtcacctgggcctccacccctagactgaatccttcttcctcacccctatgcagccacctggaccgcgcccggcccagggctga

SEQ ID NO: 51637 - DNA, 120 bp, Artificial Sequence
  ENSG00000067365_49 (sequence is synthesized)
gggccgcgcctgcgcagaccgcctgttatggcggccgcctaagtcccacagagacgggagtcgggtgggatcccaggctgggccccgcggcggcttttgctgccccacagcaaccactta

SEQ ID NO: 51638 - DNA, 120 bp, Artificial Sequence
  ENSG00000067365_50 (sequence is synthesized)
aatgtaggaactccagcagtgtactgggatcattaggacagcctgagtcatgatgacctcattttgcagttgaagaagtgggggccctgaagatttcatgacatctacccagctggattc

SEQ ID NO: 51639 - DNA, 120 bp, Artificial Sequence
  ENSG00000067365_51 (sequence is synthesized)
aatgacaccatgaaattctgcattgatttgccagattcacagactttctttacaacccacttgcattttgatggctttatggtgttgagtaggaaagctagcatggagatgaataaggaa

SEQ ID NO: 51640 - DNA, 120 bp, Artificial Sequence
  ENSG00000067365_52 (sequence is synthesized)
catgacattgggaggcagggctccgtctgtgtcccttgcagcaggtgagtaaggggagcaggcgtcgtctgggcatcacagagcttcagagcattgaggacgctccttgggtcacctcct

SEQ ID NO: 51641 - DNA, 120 bp, Artificial Sequence
  ENSG00000067365_53 (sequence is synthesized)
cattcccagatccactgcgtcatcctactccagctctttctctcccggacactggcggcggcccctgagctggtctccccagctccttagttgacccgtccaagatgtcctcatgaaaca

SEQ ID NO: 51642 - DNA, 120 bp, Artificial Sequence
  ENSG00000067365_54 (sequence is synthesized)
acttgctgctgaaaacctcccaggggcgtcatcacctgtggggtgaagtctgagctccttgaattcccaggcctccctggcccagccccggcctgctctccttgcctcctcctgacagtc

SEQ ID NO: 51643 - DNA, 120 bp, Artificial Sequence
  ENSG00000067365_55 (sequence is synthesized)
tcctttccagccctgcatccagcacggccaggactcactcacaggtggtatagttagggtcaaagaactggactggctgaaggacgacctctgcacagatcccaaggtccccttcagttg

SEQ ID NO: 51644 - DNA, 120 bp, Artificial Sequence
  ENSG00000067365_56 (sequence is synthesized)
ctttctttgtataaagatgtctttttttttttccctgtcagatggcagatgggaaaagtcgttccttgagtactggtcacctgcctagcactttgcgcaccgtaggcccttcggccctcc

SEQ ID NO: 51645 - DNA, 120 bp, Artificial Sequence
  ENSG00000067365_57 (sequence is synthesized)
cctctctgccacagtaaaatagaacagcccagagcaacaaagaaaggaggaagccgcccgtccgctcctgccccagctcgcctgctccgtggctgacgtgttgtctaactactctccttg

SEQ ID NO: 51646 - DNA, 120 bp, Artificial Sequence
  ENSG00000067365_58 (sequence is synthesized)
gagctttgcgccacgggaaccgtgctgacgtcccgagtgtcagcggaactctcacctcctaattgtgtccttgtcagtgtcattatgattgttactcagtgccacttattgagcacctac

SEQ ID NO: 51647 - DNA, 120 bp, Artificial Sequence
  ENSG00000067365_59 (sequence is synthesized)
tatgtgccaggtctgtgctcatcctttgtgtacgttactgcactgaatctgcatcctagccctgtgtgcaggcgctgctgtcccacttgactgatgaagagaggaaggctgggaagcatc

SEQ ID NO: 51648 - DNA, 120 bp, Artificial Sequence
  ENSG00000067365_60 (sequence is synthesized)
aggggccttggccagggcacggctagttagtgatagacaaggacttgaatgcagactgtactggaacctcaacgcttggccagcacacactgttgagagcttctcttcctgaatgttctc

SEQ ID NO: 51649 - DNA, 120 bp, Artificial Sequence
  ENSG00000067365_61 (sequence is synthesized)
tcgcccacagattgaaaaatgcctgcacagccatactgtcggtggagaagagtttgtgcgtccgactggctggtttgcaggctcaacttcacattgagacacttggacgtcacatgtgaa

SEQ ID NO: 51650 - DNA, 120 bp, Artificial Sequence
  ENSG00000067365_62 (sequence is synthesized)
ctgaaatccgcccgctgctcactggctagagcagacactcagcagaaaaggcacctcttccaccatgactctgcacccgggcagcagtgggcctgaagcagggagtctggtctgcctggt

SEQ ID NO: 51651 - DNA, 120 bp, Artificial Sequence
  ENSG00000067369_0 (sequence is synthesized)
gaggggagccatcttgtccctctctgcctccgagtttgtatcgttgcctccatctgtgtctgtgtgtctgtattatcgttgtttggcgtgtttttttttttttttgttttttgtcactgc

SEQ ID NO: 51652 - DNA, 120 bp, Artificial Sequence
  ENSG00000067369_1 (sequence is synthesized)
ctgcctgggtcctgcccgaggtctccatcctcggtttccctgtccttgccccgggccctgggagtgctctggaaggctgcgcagtattggaggggacagaatgaccttccggccttgagt

SEQ ID NO: 51653 - DNA, 120 bp, Artificial Sequence
  ENSG00000067369_2 (sequence is synthesized)
ccctggggagcagatggaccctactggaagtcagttggattcagatttctctcagcaagatactccttgcctgataattgaagattctcagcctgaaagccaggttctagaggatgattc

SEQ ID NO: 51654 - DNA, 120 bp, Artificial Sequence
  ENSG00000067369_3 (sequence is synthesized)
tggttctcacttcagtatgctatctcgacaccttcctaatctccagacgcacaaagaaaatcctgtgttggatgttgtgtccaatcctgaacaaacagctggagaagaacgaggagacgg

SEQ ID NO: 51655 - DNA, 120 bp, Artificial Sequence
  ENSG00000067369_4 (sequence is synthesized)
taatagtgggttcaatgaacatttgaaagaaaacaaggttgcagaccctgtggattcttctaacttggacacatgtggttccatcagtcaggtcattgagcagttacctcagccaaacag

SEQ ID NO: 51656 - DNA, 120 bp, Artificial Sequence
  ENSG00000067369_5 (sequence is synthesized)
gacaagcagtgttctgggaatgtcagtggaatctgctcctgctgtggaggaagagaagggagaagagttggaacagaaggagaaagagaaggaagaagatacttcaggcaatactacaca

SEQ ID NO: 51657 - DNA, 120 bp, Artificial Sequence
  ENSG00000067369_6 (sequence is synthesized)
ttcccttggtgctgaagatactgcctcatcacagttgggttttggggttctggaactctcccagagccaggatgttgaggaaaatactgtgccatatgaagtggacaaagagcagctaca

SEQ ID NO: 51658 - DNA, 120 bp, Artificial Sequence
  ENSG00000067369_7 (sequence is synthesized)
atcagtaaccaccaactctggttataccaggctgtctgatgtggatgctaatactgcaattaagcatgaagaacagtccaacgaagatatccccatagcagaacagtccagcaaggacat

SEQ ID NO: 51659 - DNA, 120 bp, Artificial Sequence
  ENSG00000067369_8 (sequence is synthesized)
ccctgtgacagcacagcccagtaaggatgtacatgttgtaaaagagcaaaatccaccacctgcaaggtcagaggacatgccttttagccccaaagcatctgttgctgctatggaagcaaa

SEQ ID NO: 51660 - DNA, 120 bp, Artificial Sequence
  ENSG00000067369_9 (sequence is synthesized)
agaacagttgtctgcacaagaacttatggaaagtggactgcagattcagaagtcaccagagcctgaggttttgtcaactcaggaagacttgtttgaccagagcaataaaacagtatcttc

SEQ ID NO: 51661 - DNA, 120 bp, Artificial Sequence
  ENSG00000067369_10 (sequence is synthesized)
tgatggttgctctactccttcaagggaggaaggtgggtgttctttggcttccactcctgccaccactctgcatctcctgcagctctctggtcagaggtcccttgttcaggacagtctttc

SEQ ID NO: 51662 - DNA, 120 bp, Artificial Sequence
  ENSG00000067369_11 (sequence is synthesized)
cacgaattcttcagatcttgttgctccttctcctgatgctttccgatctactccttttatcgttcctagcagtcccacagagcaagaagggagacaagataagccaatggacacgtcagt

SEQ ID NO: 51663 - DNA, 120 bp, Artificial Sequence
  ENSG00000067369_12 (sequence is synthesized)
gttatctgaagaaggaggagagccttttcagaagaaacttcaaagtggtgaaccagtggagttagaaaacccccctctcctgcctgagtccactgtatcaccacaagcctcaacaccaat

SEQ ID NO: 51664 - DNA, 120 bp, Artificial Sequence
  ENSG00000067369_13 (sequence is synthesized)
atctcagagcacaccagtcttccctcctgggtcacttcctatcccatcccagcctcagttttctcatgacatttttattccttccccaagtctggaagaacaatcaaatgatgggaagaa

SEQ ID NO: 51665 - DNA, 120 bp, Artificial Sequence
  ENSG00000067369_14 (sequence is synthesized)
agatggagatatgcatagttcatctttgacagttgagtgttctaaaacttcagagattgaaccaaagaattcccctgaggatcttgggctatctttgacaggggattcttgcaagttgat

SEQ ID NO: 51666 - DNA, 120 bp, Artificial Sequence
  ENSG00000067369_15 (sequence is synthesized)
gctttctacaagtgaatatagtcagtccccaaagatggagagcttgagttctcacagaattgatgaagatggagaaaacacacagattgaggatacggaacccatgtctccagttctcaa

SEQ ID NO: 51667 - DNA, 120 bp, Artificial Sequence
  ENSG00000067369_16 (sequence is synthesized)
ttctaaatttgttcctgctgaaaatgatagtatcctgatgaatccagcacaggatggtgaagtacaactgagtcagaatgatgacaaaacaaagggagatgatacagacaccagggatga

SEQ ID NO: 51668 - DNA, 120 bp, Artificial Sequence
  ENSG00000067369_17 (sequence is synthesized)
cattagtattttagccactggttgcaagggcagagaagaaacggtagcagaagatgtttgtattgatctcacttgtgattcggggagtcaggcagttccgtcaccagctactcgatctga

SEQ ID NO: 51669 - DNA, 120 bp, Artificial Sequence
  ENSG00000067369_18 (sequence is synthesized)
ggcactttctagtgtgttagatcaggaggaagctatggaaattaaagaacaccatccagaggaggggtcttcagggtctgaggtggaagaaatccctgagacaccttgtgaaagtcaagg

SEQ ID NO: 51670 - DNA, 120 bp, Artificial Sequence
  ENSG00000067369_19 (sequence is synthesized)
agaggaactcaaagaagaaaatatggagagtgttccgttgcacctttctctgactgaaactcagtcccaagggttgtgtcttcaaaaggaaatgccaaaaaaagaatgctcagaagctat

SEQ ID NO: 51671 - DNA, 120 bp, Artificial Sequence
  ENSG00000067369_20 (sequence is synthesized)
ggaagttgaaaccagtgtgattagtattgattcccctcaaaagttggcaatacttgaccaagaattggaacataaggaacaggaagcttgggaagaagctacttcagaggactccagtgt

SEQ ID NO: 51672 - DNA, 120 bp, Artificial Sequence
  ENSG00000067369_21 (sequence is synthesized)
tgtcattgtagatgtgaaagagccatctcccagagttgatgtttcttgtgaacctttggagggagtggagaagtgctcagattcccagtcatgggaggatattgctccagaaatagaacc

SEQ ID NO: 51673 - DNA, 120 bp, Artificial Sequence
  ENSG00000067369_22 (sequence is synthesized)
atgtgctgagaatagattagacaccaaggaagaaaagagtgtagaatatgaaggagatctgaaatcagggactgcagaaacagaacctgtagagcaagattcttcacagccttccttacc

SEQ ID NO: 51674 - DNA, 120 bp, Artificial Sequence
  ENSG00000067369_23 (sequence is synthesized)
tttagtgagagcagatgatcctttaagacttgaccaggagttgcagcagccccaaactcaggagaaaacaagtaattcattaacagaagactcaaaaatggctaatgcaaagcagctaag

SEQ ID NO: 51675 - DNA, 120 bp, Artificial Sequence
  ENSG00000067369_24 (sequence is synthesized)
ctcagatgcagaggcccagaagctggggaagccctctgcccatgcctcacaaagcttctgtgaaagttctagtgaaaccccatttcatttcactttgcctaaagaaggtgatatcatccc

SEQ ID NO: 51676 - DNA, 120 bp, Artificial Sequence
  ENSG00000067369_25 (sequence is synthesized)
accattgactggtgcaaccccacctcttattgggcacctaaaattggagcccaagagacacagtactcctattggtattagcaactatccagaaagcaccatagcaaccagtgatgtcat

SEQ ID NO: 51677 - DNA, 120 bp, Artificial Sequence
  ENSG00000067369_26 (sequence is synthesized)
gttagtcctgagactgaggcgagtgaagagtctttgcagttcaacctggaaaagcctgcaactggtgaaagaaaaaatggatctactgctgttgctgagtctgttgccagtccccagaag

SEQ ID NO: 51678 - DNA, 120 bp, Artificial Sequence
  ENSG00000067369_27 (sequence is synthesized)
accatgtctgtgttgagctgtatctgtgaagccaggcaagagaatgaggctcgaagtgaggatccccccaccacacccatcagggggaacttgctccactttccaagttctcaaggagaa

SEQ ID NO: 51679 - DNA, 120 bp, Artificial Sequence
  ENSG00000067369_28 (sequence is synthesized)
gaggagaaagaaaaattggagggtgaccatacaatcaggcagagtcaacagcctatgaagcccattagtcctgtcaaggaccctgtttctcctgcttcccagaagatggtcatacaaggg

SEQ ID NO: 51680 - DNA, 120 bp, Artificial Sequence
  ENSG00000067369_29 (sequence is synthesized)
ccatccagtcctcaaggagaggcaatggtgacagatgtgctagaagaccagaaagaaggacggagtactaataaggaaaatcctagtaaggccttgattgaaaggcccagccaaaataac

SEQ ID NO: 51681 - DNA, 120 bp, Artificial Sequence
  ENSG00000067369_30 (sequence is synthesized)
ataggaatccaaaccatggagtgttccttgagggtcccagaaactgtttcagcagcaacccagactataaagaatgtgtgtgagcaggggaccagtacagtggaccagaactttggaaag

SEQ ID NO: 51682 - DNA, 120 bp, Artificial Sequence
  ENSG00000067369_31 (sequence is synthesized)
caagatgccacagttcagactgagagggggagtggtgagaaaccagtcagtgctcctggggatgatacagagtcgctccatagccagggagaagaagagtttgatatgcctcagcctcca

SEQ ID NO: 51683 - DNA, 120 bp, Artificial Sequence
  ENSG00000067369_32 (sequence is synthesized)
catggccatgtcttacatcgtcacatgagaacaatccgggaagtacgcacacttgtcactcgtgtcattacagatgtgtattatgtggatggaacagaagtagaaagaaaagtaactgag

SEQ ID NO: 51684 - DNA, 120 bp, Artificial Sequence
  ENSG00000067369_33 (sequence is synthesized)
gagactgaagagccaattgtagagtgtcaggagtgtgaaactgaagtttccccttcacagactgggggctcctcaggtgacctgggggatatcagctccttctcctccaaggcatccagc

SEQ ID NO: 51685 - DNA, 120 bp, Artificial Sequence
  ENSG00000067369_34 (sequence is synthesized)
ttacaccgcacatcaagtgggacaagtctctcagctatgcacagcagtggaagctcagggaaaggagccggaccactcagagggaaaaccagcgggacagaacccgcagattttgcctta

SEQ ID NO: 51686 - DNA, 120 bp, Artificial Sequence
  ENSG00000067369_35 (sequence is synthesized)
cccagctcccgaggaggcccaggaaaactgagtcctagaaaaggggtcagtcagacagggacgccagtgtgtgaggaggatggtgatgcaggccttggcatcagacagggagggaaggct

SEQ ID NO: 51687 - DNA, 120 bp, Artificial Sequence
  ENSG00000067369_36 (sequence is synthesized)
ccagtcacgcctcgtgggcgtgggcgaaggggccgcccaccttctcggaccactggaaccagagaaacagctgtgcctggccccttgggcatagaggacatttcacctaacttgtcacca

SEQ ID NO: 51688 - DNA, 120 bp, Artificial Sequence
  ENSG00000067369_37 (sequence is synthesized)
gatgataaatccttcagccgtgtcgtgccccgagtgccagactccaccagacgaacagatgtgggtgctggtgctttgcgtcgtagtgactctccagaaattcctttccaggctgctgct

SEQ ID NO: 51689 - DNA, 120 bp, Artificial Sequence
  ENSG00000067369_38 (sequence is synthesized)
ggcccttctgatggcttagatgcctcctctccaggaaatagctttgtagggctccgtgttgtagccaagtggtcatccaatggctacttttactctgggaaaatcacacgagatgtcgga

SEQ ID NO: 51690 - DNA, 120 bp, Artificial Sequence
  ENSG00000067369_39 (sequence is synthesized)
gctgggaagtataaattgctctttgatgatgggtacgaatgtgatgtgttgggcaaagacattctgttatgtgaccccatcccgctggacactgaagtgacggccctctcggaggatgag

SEQ ID NO: 51691 - DNA, 120 bp, Artificial Sequence
  ENSG00000067369_40 (sequence is synthesized)
tatttcagtgcaggagtggtgaaaggacataggaaggagtctggggaactgtactacagcattgaaaaagaaggccaaagaaagtggtataagcgaatggctgtcatcctgtccttggag

SEQ ID NO: 51692 - DNA, 120 bp, Artificial Sequence
  ENSG00000067369_41 (sequence is synthesized)
caaggaaacagactgagagagcagtatgggcttggcccctatgaagcagtaacacctcttacaaaggcagcagatatcagcttagacaatttggtggaagggaagcggaaacggcgcagt

SEQ ID NO: 51693 - DNA, 120 bp, Artificial Sequence
  ENSG00000067369_42 (sequence is synthesized)
aacgtcagctccccagccacccctactgcctccagtagcagcagcacaacccctacccgaaagatcacagaaagtcctcgtgcctccatgggagttctctcaggcaaaagaaaacttatc

SEQ ID NO: 51694 - DNA, 120 bp, Artificial Sequence
  ENSG00000067369_43 (sequence is synthesized)
acttctgaagaggaacggtcccctgccaagcgaggtcgcaagtctgccacagtaaaacctggtgcagtaggggcaggagagtttgtgagcccctgtgagagtggagacaacaccggtgaa

SEQ ID NO: 51695 - DNA, 120 bp, Artificial Sequence
  ENSG00000067369_44 (sequence is synthesized)
ccctctgccctggaagagcagagagggcctttgcctctcaacaagaccttgtttctgggctacgcatttctccttaccatggccacaaccagtgacaagttggccagccgctccaaactg

SEQ ID NO: 51696 - DNA, 120 bp, Artificial Sequence
  ENSG00000067369_45 (sequence is synthesized)
ccagatggtcctacaggaagcagtgaagaagaggaggaatttttggaaattcctcctttcaacaagcagtatacagaatcccagcttcgagcaggagctggctatatccttgaagatttc

SEQ ID NO: 51697 - DNA, 120 bp, Artificial Sequence
  ENSG00000067369_46 (sequence is synthesized)
aatgaagcccagtgtaacacagcttaccagtgtcttctaattgcggatcagcattgtcgaacccggaagtacttcctgtgccttgccagtgggattccttgtgtgtctcatgtctgggtc

SEQ ID NO: 51698 - DNA, 120 bp, Artificial Sequence
  ENSG00000067369_47 (sequence is synthesized)
catgatagttgccatgccaaccagctccagaactaccgtaattatctgttgccagctgggtacagccttgaggagcaaagaattctggactggcaaccccgtgaaaatcctttccagaat

SEQ ID NO: 51699 - DNA, 120 bp, Artificial Sequence
  ENSG00000067369_48 (sequence is synthesized)
ctgaaggtactcttggtatcagaccaacagcagaacttcctggagctctggtctgagatcctcatgactggtggtgcagcctctgtgaagcagcaccattcaagtgcccataacaaagat

SEQ ID NO: 51700 - DNA, 120 bp, Artificial Sequence
  ENSG00000067369_49 (sequence is synthesized)
attgctttaggggtatttgatgtggtggtgacggacccctcatgcccagcctcggtgctgaagtgtgctgaagcattgcagctgcctgtggtgtcacaagagtgggtgatccagtgcctc

SEQ ID NO: 51701 - DNA, 120 bp, Artificial Sequence
  ENSG00000067369_50 (sequence is synthesized)
attgttggggagagaattggattcaagcagcatccaaaatataaacacgattatgtttctcactaaagatacttggtcttactggttttattccctgctatcgtggagattgtgttttaa

SEQ ID NO: 51702 - DNA, 120 bp, Artificial Sequence
  ENSG00000067369_51 (sequence is synthesized)
ccaggttttaaatgtgtcttgtgtgtaactggattccttgcatggatcttgtatatagttttatttgctgaacttttatgataaaataaatgttgaatctctttggttgtagtaactggg

SEQ ID NO: 51703 - DNA, 120 bp, Artificial Sequence
  ENSG00000067369_52 (sequence is synthesized)
gtgacgggaaagggggagttcgcggccggtggcggcggtggcgacagcggcgacctagggatcgatctggagggacttggggagcgtgcagagacctctagctcgagcgcgagggacctc

SEQ ID NO: 51704 - DNA, 120 bp, Artificial Sequence
  ENSG00000067369_53 (sequence is synthesized)
tttcaacaggcttattcacttacggaggacagctggccaaggaaattgaaaagttaagagtgaactttattctgtggcatcattcccaaaaggttattccagggtgtctaaaatgctatg

SEQ ID NO: 51705 - DNA, 120 bp, Artificial Sequence
  ENSG00000067369_54 (sequence is synthesized)
cttgcagaaactcagtttaaggtaggtgaaggcccagattaacagttgtgccaaaagttgagtggaattgggcacagctctgtttcctgacagttaaaaaagacctcatgctctctctct

SEQ ID NO: 51706 - DNA, 120 bp, Artificial Sequence
  ENSG00000067369_55 (sequence is synthesized)
gagctgagatcacagctcacctgtgggtactccccaactcttagagctaaagggagaacgaaaggaccaactgccatgaagggacagtgaccataagcttgatggaatgaccttccgtaa

SEQ ID NO: 51707 - DNA, 120 bp, Artificial Sequence
  ENSG00000067369_56 (sequence is synthesized)
gataaacatgggaagcacaagtgagaacacctggaaatgttacacgttctagtcaaagacccaatattattattattattattgtcacaatagctggaagcagttccttcccttcctctg

SEQ ID NO: 51708 - DNA, 120 bp, Artificial Sequence
  ENSG00000067369_57 (sequence is synthesized)
gcatcactgatccctgcatggcttctcattctctaaagcaggggtcaacaaggtttttttctgtaaagggtcaaagagtaaatatttcaggctttgtgggccatttgatccatcacaact

SEQ ID NO: 51709 - DNA, 120 bp, Artificial Sequence
  ENSG00000067369_58 (sequence is synthesized)
actcgcctttgctgtgagggcatgaaagcaaccatagacaatgagtaaacaaatgggcatggctgtgtttcagtaaaactgtacaaaaacagacagcaggccatagtttgccagctcctg

SEQ ID NO: 51710 - DNA, 120 bp, Artificial Sequence
  ENSG00000067369_59 (sequence is synthesized)
ctccagagacagcagtagaaagggtgatctttagttgataatagcagggaataagttgtcagagcttcccagtgtgtgtagaatatgtagtgatgaaaaccagatgcagtgactataacc

SEQ ID NO: 51711 - DNA, 120 bp, Artificial Sequence
  ENSG00000067369_60 (sequence is synthesized)
tgatgccagaacactgcattctttttcagtttggagggcgttgttcagtgaatatttctttttacttacactgatatgaatattgattaccagtgatggctgggccatattaagataact

SEQ ID NO: 51712 - DNA, 120 bp, Artificial Sequence
  ENSG00000067369_61 (sequence is synthesized)
tcaacccctatggtttgtgtaagatgggtaattgggcctgcaatcttcagtatttaaaaatctaacaacttgatctcaattttttcttaaggacctttttcttggagaataatacttttt

SEQ ID NO: 51713 - DNA, 120 bp, Artificial Sequence
  ENSG00000067369_62 (sequence is synthesized)
ggtgtgagccaccatgcccggcctaagaaatacttttaagtatattttcattagctagaattgcccaatctgtgtaggtataaattacttggtatagggagagagaaagcctatcttacc

SEQ ID NO: 51714 - DNA, 120 bp, Artificial Sequence
  ENSG00000067369_63 (sequence is synthesized)
taaattacttggtatagggagagagaaagcctatcttacctgttgctttcttacttggtggtaacatccagcagttagtctatttataaacataattactttttcacatatgaaccataa

SEQ ID NO: 51715 - DNA, 120 bp, Artificial Sequence
  ENSG00000067369_64 (sequence is synthesized)
aatatttaactttctgctctatattgtttgtttaccgctgtatctcccacagcttgaacagtaccaaggtacgtagtaggtgctcaataaatgactattgaataaatgaacatatccaac

SEQ ID NO: 51716 - DNA, 120 bp, Artificial Sequence
  ENSG00000067369_65 (sequence is synthesized)
aaatgttctcaatgtaaaggatcagagatgccacatgttctccttgatgggagagacccttccacatgggaatgatgggaaggagttgtactcctggatgttcagtaactgcttctagga

SEQ ID NO: 51717 - DNA, 120 bp, Artificial Sequence
  ENSG00000067369_66 (sequence is synthesized)
gaaaaggtagagtcctatcactaagccgcagatatttatttgtgtgtggctagaatgggatgttttgaatcttctgttacaaccttgggaacgtggctgttatttcaatttatgagccag

SEQ ID NO: 51718 - DNA, 120 bp, Artificial Sequence
  ENSG00000067369_67 (sequence is synthesized)
aaattttcacatcccgaaactacaaaagagaaaaagagccttattaagtgtcatgctttcccaagactaccttcaaagaaatatgaatcaggataacctgtgatctaaataatgtcatct

SEQ ID NO: 51719 - DNA, 120 bp, Artificial Sequence
  ENSG00000067369_68 (sequence is synthesized)
taaaactgaagagtttcttttgactcttctgctacaatagcttagaaaaaaatctgcttgcagacattttagagagaaaggacaatgaagtgattttctgaatgggaatgacagacctct

SEQ ID NO: 51720 - DNA, 120 bp, Artificial Sequence
  ENSG00000067369_69 (sequence is synthesized)
gggaagccagctaccactgaatctcggtatcagttttttttaaagtttagagttagaaggggtggtcgcctcctttcacagatgcggaagctagggaccagcaaggcggggtgcccacgg

SEQ ID NO: 51721 - DNA, 120 bp, Artificial Sequence
  ENSG00000067369_70 (sequence is synthesized)
ctgcacagctagttcatatcagaattgggagtggaaggcccactgcctcccagcatagcaatacataacctagcaaaggacttaacacctatctcactgtcaggttttttagtattttat

SEQ ID NO: 51722 - DNA, 120 bp, Artificial Sequence
  ENSG00000067369_71 (sequence is synthesized)
gatgatgatgacttctactagaaaataacctccattaaaattattaaagatggtcacacctctatctctaagccttacttataaaatgagggtatttggactaaagtcttcttccagttc

SEQ ID NO: 51723 - DNA, 120 bp, Artificial Sequence
  ENSG00000067369_72 (sequence is synthesized)
tagaattctacaactcattaaaaagccaccttaaaaagtctactgagttacccaagggttgctcctacctgcccagagttccaccagcctgggtatagtatttgttataatctagtcgta

SEQ ID NO: 51724 - DNA, 120 bp, Artificial Sequence
  ENSG00000067369_73 (sequence is synthesized)
acagtagttgagccaaatctgagttgatctgatgattccgaacactggagagaatcttgaacaggagtgaagactggcggctaaagccctgcagagagaaggactcagctgtcattccac

SEQ ID NO: 51725 - DNA, 120 bp, Artificial Sequence
  ENSG00000067369_74 (sequence is synthesized)
ttcagctcaccaactctccatatggaggatgggggcggagggaggagtttcttggaaaagccttgttcaaaattctacagaaccacctggccttcccacattcctatttctattagttcc

SEQ ID NO: 51726 - DNA, 120 bp, Artificial Sequence
  ENSG00000067369_75 (sequence is synthesized)
taaaatgacttgtaccaaatccatacatgcatgacttcctatgaaagtactctttcatcagtaggaatttagtagctggtttccagttaatgtattttgtcaagtactggggttggggag

SEQ ID NO: 51727 - DNA, 120 bp, Artificial Sequence
  ENSG00000067369_76 (sequence is synthesized)
aacccgttttgattacaagcagataattatctcagtgagatgggggttagttcaaggaagtaaggaggggggaggatgtgaggaagttagaacaacccaatgcttatttgatgggctgaa

SEQ ID NO: 51728 - DNA, 120 bp, Artificial Sequence
  ENSG00000067369_77 (sequence is synthesized)
taaactattcaggactgaactatttttgagcactgtgaggtggcacagtattacctgcttcaaaatcaactgataccaacatttttatctttgtatcttatctctgtacgtgtgtgtatt

SEQ ID NO: 51729 - DNA, 120 bp, Artificial Sequence
  ENSG00000067369_78 (sequence is synthesized)
gaggaaatgctttactgactcagaggaaagatcatgaattctccattggcaaaaccacctctgtcctttcggcaaggctgcatacttccaggcagacgcaccttcacgagaatgctcagc

SEQ ID NO: 51730 - DNA, 120 bp, Artificial Sequence
  ENSG00000067369_79 (sequence is synthesized)
tgggcggctccacgctcatccagtgggcctaggttctgactgaccagcgaacaaaaactgtgacagagatctaggatttcattcaggcagtgaaacacctacccgggaaacagagttggc

SEQ ID NO: 51731 - DNA, 120 bp, Artificial Sequence
  ENSG00000067369_80 (sequence is synthesized)
attaggaaaggaaggaaggtacatccatgaagttaaagtgttaggagaacagtctgattaatagctgatctaattaatagctgacctcccaaatctgacaggatagacactgccacgtgc

SEQ ID NO: 51732 - DNA, 120 bp, Artificial Sequence
  ENSG00000067369_81 (sequence is synthesized)
aaggcctgccagcccctcagacgcacaaaatgcgtaaaacaaatgcatcctttcctggctaagcgagtattactctcttagccctgcaccaaacctccaatctagccacatttaactctt

SEQ ID NO: 51733 - DNA, 120 bp, Artificial Sequence
  ENSG00000067369_82 (sequence is synthesized)
catttcttagacccgcagagtgtcttcctgcctctgagctgtgagtgttgttccctttgcccgggatgctcttgtttttaataccagttcaagtcccactctctcagtgaagcactccct

SEQ ID NO: 51734 - DNA, 120 bp, Artificial Sequence
  ENSG00000067369_83 (sequence is synthesized)
tccccactatagcctttagtgaaccctcgtttcttgcttctttattatctgtactgttgtccacttggcaattgttcaggcctctgtgttgttactgatttttgtatgtatatatatata

SEQ ID NO: 51735 - DNA, 120 bp, Artificial Sequence
  ENSG00000067369_84 (sequence is synthesized)
tatgtcttgtttttccaactagattgtgagctccttaagggcagagccatgaattatacctctttgtatccccagtgccttgcatacagtaagcactcaataaatatttaatgatgatga

SEQ ID NO: 51736 - DNA, 120 bp, Artificial Sequence
  ENSG00000067369_85 (sequence is synthesized)
ctaaaattggagcccaagagacacagtactcctattgtgctgggaggtaacaatcatgccgtctggagtctcctgctacctatgcctgatgctggcagatgtgggttggctgagggctca

SEQ ID NO: 51737 - DNA, 120 bp, Artificial Sequence
  ENSG00000067369_86 (sequence is synthesized)
tgcagcatcctttgtccagatgcagaagtggaactgaatcctgttgctcctcttaagaccaggtattagcaactatccagaaagcaccatagcaaccagtgatgtcatgtctgaaagcat

SEQ ID NO: 51738 - DNA, 120 bp, Artificial Sequence
  ENSG00000067369_87 (sequence is synthesized)
ttttgcctcattcttccttcagaccatggcagaatgcagggtcagctgctggaaaaatggagcttaatatgtggcagtggcccttctgtcctgctataaagtcggggtcctgcccaagcc

SEQ ID NO: 51739 - DNA, 120 bp, Artificial Sequence
  ENSG00000067369_88 (sequence is synthesized)
cacaggtgatattcagggacagctcactgtatccctcctcccccatcccctacagactctagtgcgggtagatagcaaggccagaattagctgagtgtggtggcgggcgcctgtaatacc

SEQ ID NO: 51740 - DNA, 120 bp, Artificial Sequence
  ENSG00000067369_89 (sequence is synthesized)
attgtatatgtgtgtgggggtgggggggtgtgtatctatagctatagtatgtgtgtgtgttgtaaattgtttattcattgataggaagaagtgttctttttcacaggcttagtaatgggt

SEQ ID NO: 51741 - DNA, 120 bp, Artificial Sequence
  ENSG00000067369_90 (sequence is synthesized)
cctgcccaagatcacacagcttggtggcagcagaattaggcctaggctcagttctcctgaattatagcttagtttccttttacatcccacattttgttccttttaacataaaggccttat

SEQ ID NO: 51742 - DNA, 120 bp, Artificial Sequence
  ENSG00000067369_91 (sequence is synthesized)
caggttttgaatcagagcaggaaagtagataatagagaggaagattaggtaggagaggcaggatctgttttttcctttctttgctctctaattttgctacacacacagagagaaaacaca

SEQ ID NO: 51743 - DNA, 120 bp, Artificial Sequence
  ENSG00000067369_92 (sequence is synthesized)
cacatgctgtctctcttagaatgatgtcatttttcacctacagcttaactcaagacttactactcagcctcccagggaaccaagaaggaaatgtttagaagttataatggaattgttagg

SEQ ID NO: 51744 - DNA, 120 bp, Artificial Sequence
  ENSG00000067369_93 (sequence is synthesized)
aaaccacatgccatttcacttcacggaaatcatttgaaccaccagcaatccacaatggctgtctttgggaagctttattttataactaaaggctaccttctgtcaagaaactttccttgt

SEQ ID NO: 51745 - DNA, 120 bp, Artificial Sequence
  ENSG00000067369_94 (sequence is synthesized)
cctaatcccagtgtagtagctacatatatcctaagtgttactgtttgggattgacaactggaattttgttaagtcctaacttcagtccactgttggatctctaaattccctaactcaggc

SEQ ID NO: 51746 - DNA, 120 bp, Artificial Sequence
  ENSG00000067369_95 (sequence is synthesized)
ggagcccaagagacacagtactcctattggtgagtgaataaaaagtaatgatatttaaggcagaatttctgagatatcattctctacacaagtgatattttagatctgaggagttgggtc

SEQ ID NO: 51747 - DNA, 120 bp, Artificial Sequence
  ENSG00000067369_96 (sequence is synthesized)
tggctggtaaggttgatttttgttttagggaaaatagggttatgaagtctggttctgtgattttactactaggagatgaggggtaaagagaggaaggaaagaaagggtggagggaagtaa

SEQ ID NO: 51748 - DNA, 120 bp, Artificial Sequence
  ENSG00000067369_97 (sequence is synthesized)
tttaatacacagctactggtgatgagggtagatggtttatcaacaaaggaaaaaagttaaaatgagaaagttaaaatgagactctttcataaaggatttagcaatgttttgaatggatca

SEQ ID NO: 51749 - DNA, 120 bp, Artificial Sequence
  ENSG00000067369_98 (sequence is synthesized)
tagactttttagttaatacttttttaagttcagtgaagcttttttctacacctagaactaagataattgaaatgtctttacttttgttcatgtgagagttcctttccccccttttttctg

SEQ ID NO: 51750 - DNA, 120 bp, Artificial Sequence
  ENSG00000067369_99 (sequence is synthesized)
tcacaggaaaaggggagtaatgggaaatcccccatcctccattaaagataaatcaactacccctcttcactatttgctctcttcctgttttgggtttgtgtgggaagtagggtggagccc

SEQ ID NO: 51751 - DNA, 120 bp, Artificial Sequence
  ENSG00000067369_100 (sequence is synthesized)
ctgtctgtcatcttagcctcctaatgaacctacgattcagcttctccaggtcaggtgcagtaggggcaggagagtttgtgagcccctgtgagagtggagacaacaccggtgaaccctctg

SEQ ID NO: 51752 - DNA, 120 bp, Artificial Sequence
  ENSG00000067445_0 (sequence is synthesized)
agacacaaggagaggcttggagagagcagacgccttctggattcaagaagacgaggcccattcccctcaggctcacctgttactcggcctcccagaaagatggataggagaaatgactac

SEQ ID NO: 51753 - DNA, 120 bp, Artificial Sequence
  ENSG00000067445_1 (sequence is synthesized)
ggatatagggtgcctctatttcagggccctctgcctcccccggggagcctggggcttcccttccctccagatatacagactgagaccacagaagaggacagtgtcctgctgatgcatacc

SEQ ID NO: 51754 - DNA, 120 bp, Artificial Sequence
  ENSG00000067445_2 (sequence is synthesized)
ctgttggcggcaaccaaggactccctggccatggacccaccagttgtcaaccggcctaagaaaagcaagaccaagaaggcccctataaagactattactaaggctgcacctgctgcccct

SEQ ID NO: 51755 - DNA, 120 bp, Artificial Sequence
  ENSG00000067445_3 (sequence is synthesized)
ccagtcccagctgccaatgagattgccaccaacaagcccaaaataacttggcaggctttaaacctgccagtcattacccagatcagccaggctttacctaccactgaggtaaccaatact

SEQ ID NO: 51756 - DNA, 120 bp, Artificial Sequence
  ENSG00000067445_4 (sequence is synthesized)
caggcttcttcagtcactgctcagcctaagaaagccaacaagatgaagagagttactgccaaggcagcccaaggctcccaatccccaactggccatgagggtggcactatacagctgaag

SEQ ID NO: 51757 - DNA, 120 bp, Artificial Sequence
  ENSG00000067445_5 (sequence is synthesized)
tcacccttgcaggtcctaaagctaccagtcatctcacagaatattcacgctccaattgccaatgagtcagccagttcccaagccttgataacctctatcaagcctaagaaagcttccaag

SEQ ID NO: 51758 - DNA, 120 bp, Artificial Sequence
  ENSG00000067445_6 (sequence is synthesized)
gctaagaaggctgcaaataaggccatagctagtgccaccgaggtctcgctggctgcaactgccacccatacagctaccacccaaggccaaattaccaatgagacagccagtatccacacc

SEQ ID NO: 51759 - DNA, 120 bp, Artificial Sequence
  ENSG00000067445_7 (sequence is synthesized)
acagcagcctccatccgaaccaagaaagcctccaaagccaggaagacaattgctaaggtcataaatactgacactgagcatatagaggctctaaatgtcactgacgcagctaccaggcag

SEQ ID NO: 51760 - DNA, 120 bp, Artificial Sequence
  ENSG00000067445_8 (sequence is synthesized)
attgaggcctcagtagtggctatcaggcccaaaaaatccaagggcaagaaggctgccagcaggggcccaaattctgtctctgagatctctgaggccccacttgccactcagatagtcaca

SEQ ID NO: 51761 - DNA, 120 bp, Artificial Sequence
  ENSG00000067445_9 (sequence is synthesized)
aaccaagccctggcagccaccctgcgggtcaagagagggtctagggctcggaaggctgccactaaggctcgggcaactgaaagccagactccaaatgctgaccaaggggcccaggccaag

SEQ ID NO: 51762 - DNA, 120 bp, Artificial Sequence
  ENSG00000067445_10 (sequence is synthesized)
atagcctctgctcagaccaacgtaagtgcccttgagactcaggttgctgctgctgtccaggccctggcagatgactatctggctcagttgagcctggagcccacaaccaggacccggggc

SEQ ID NO: 51763 - DNA, 120 bp, Artificial Sequence
  ENSG00000067445_11 (sequence is synthesized)
aaaagaaaccgaaagtccaagcatctgaatggggatgagagaagtggcagtaattacaggcggatcccatggggccggaggcctgcaccaccgcgagatgtggccattttacaagaaagg

SEQ ID NO: 51764 - DNA, 120 bp, Artificial Sequence
  ENSG00000067445_12 (sequence is synthesized)
gctaataagttggtgaaatacctgttggttaaggaccagacaaagatccccatcaaacgctcagacatgctgagggatgtcatccaagaatatgatgaatatttcccagaaatcattgaa

SEQ ID NO: 51765 - DNA, 120 bp, Artificial Sequence
  ENSG00000067445_13 (sequence is synthesized)
cgagcaagctacactctggagaagatgtttcgagtcaatctgaaagaaattgataagcaaagtagcttgtatattctcatcagcactcaggaatcctctgcaggcatactgggaacgacc

SEQ ID NO: 51766 - DNA, 120 bp, Artificial Sequence
  ENSG00000067445_14 (sequence is synthesized)
aaggacacacccaagctgggtctcctcatggtgattctgagtgtcatttttatgaatggcaacaaggccagtgaggctgtcatctgggaggtgctgcgcaagttggggctgcgccctggg

SEQ ID NO: 51767 - DNA, 120 bp, Artificial Sequence
  ENSG00000067445_15 (sequence is synthesized)
gtgaggcattcactctttggggaagtgaggaagctcatcacagacgagtttgtgaagcagaagtacctggagtacaagagggtccctaacagcagaccacctgaatatgagttcttctgg

SEQ ID NO: 51768 - DNA, 120 bp, Artificial Sequence
  ENSG00000067445_16 (sequence is synthesized)
ggcttgcgctcctaccacgagactagcaagatgaaagtcctcaagtttgcatgcagggtgcagaagaaagaccccaaggactgggctgtgcagtaccgcgaggcagtggagatggaagtc

SEQ ID NO: 51769 - DNA, 120 bp, Artificial Sequence
  ENSG00000067445_17 (sequence is synthesized)
caagctgcagctgtggctgtggctgaggctgaagccagggctgaggcaagagcccaaatggggattggagaggaagctgtggctgggccctggaattgggatgacatggatatcgactgc

SEQ ID NO: 51770 - DNA, 120 bp, Artificial Sequence
  ENSG00000067445_18 (sequence is synthesized)
ctaacaagggaagagttaggcgatgatgctcaggcctggagcagattttcatttgaaattgaggccagagcccaagaaaatgcagatgccagcaccaacgtcaacttcagcagaggagct

SEQ ID NO: 51771 - DNA, 120 bp, Artificial Sequence
  ENSG00000067445_19 (sequence is synthesized)
tggtggacctggcattacctttggtgttgcacccagcaccagtgccagcttcagcaatacagccagcattagctttggtggtacactgagcactagctccagcttcagcagcgcagccag

SEQ ID NO: 51772 - DNA, 120 bp, Artificial Sequence
  ENSG00000067445_20 (sequence is synthesized)
cattagctttggttgtgcacacagcaccagcactagtttcagcagtgaagccagcattagctttggtggcatgccttgtaccagtgccagctttagtggtggagtcagctctagttttag

SEQ ID NO: 51773 - DNA, 120 bp, Artificial Sequence
  ENSG00000067445_21 (sequence is synthesized)
tggcccactcagcaccagtgccactttcagtggtggagccagctctggctttggaggcacactcagcaccacggctggctttagtggtgtactcagcactagcaccagctttggcagtgc

SEQ ID NO: 51774 - DNA, 120 bp, Artificial Sequence
  ENSG00000067445_22 (sequence is synthesized)
acccacaacgagcacagtcttcagtagtgcgcttagcaccagcactggctttggaggcatactcagcaccagtgtctgttttggtggctctcccagctccagtggtagctttggtggtac

SEQ ID NO: 51775 - DNA, 120 bp, Artificial Sequence
  ENSG00000067445_23 (sequence is synthesized)
actcagtaccagtatctgcttcggtggctctccctgcaccagcactggctttggaggcacacttagcaccagtgtctcctttggtggctcttccagcaccagtgccaattttggtggtac

SEQ ID NO: 51776 - DNA, 120 bp, Artificial Sequence
  ENSG00000067445_24 (sequence is synthesized)
actaagtaccagcatctgctttgatggctctcccagcactggtgctggctttggtggtgctctcaacaccagtgccagctttggcagtgtgctcaacaccagtactggttttggtggtgc

SEQ ID NO: 51777 - DNA, 120 bp, Artificial Sequence
  ENSG00000067445_25 (sequence is synthesized)
tatgagcaccagtgctgactttggcggtacactaagcaccagtgtctgctttggtggctctcctggcaccagtgtcagctttggcagtgcactcaacaccaatgctggttatggtggtgc

SEQ ID NO: 51778 - DNA, 120 bp, Artificial Sequence
  ENSG00000067445_26 (sequence is synthesized)
tgtcagcaccaacactgactttggtggtacactaagcaccagcgtctgttttggtggctctcccagcaccagtgctggctttggtggtgcactcaacaccaatgccagctttggctgtgc

SEQ ID NO: 51779 - DNA, 120 bp, Artificial Sequence
  ENSG00000067445_27 (sequence is synthesized)
cgtcagcaccagtgccagcttcagtggtgctgtcagcaccagtgcttgcttcagtggtgcaccaatcaccaaccctggctttggcggtgcatttagcaccagtgctggcttcggtggggc

SEQ ID NO: 51780 - DNA, 120 bp, Artificial Sequence
  ENSG00000067445_28 (sequence is synthesized)
acttagtaccgctgctgacttcggtggtactcccagcaacagcattggctttggtgctgctcccagcaccagtgtcagctttggtggtgctcatggcaccagcctctgttttggtggagc

SEQ ID NO: 51781 - DNA, 120 bp, Artificial Sequence
  ENSG00000067445_29 (sequence is synthesized)
tcccagcaccagcctctgctttggcagtgcatctaatactaacctatgctttggtggccctcctagcaccagtgcctgctttagtggtgctaccagccctagtttttgtgatggacccag

SEQ ID NO: 51782 - DNA, 120 bp, Artificial Sequence
  ENSG00000067445_30 (sequence is synthesized)
caccagtaccggtttcagctttggcaatgggttaagcaccaatgctggatttggtggtggactgaacaccagtgctggctttggtggtggcctaggcaccagtgctggcttcagtggtgg

SEQ ID NO: 51783 - DNA, 120 bp, Artificial Sequence
  ENSG00000067445_31 (sequence is synthesized)
cctaagcacaagttctggctttgatggtgggctaggtaccagcgctggcttcggtggaggaccaggcaccagcactggttttggtggtggactgggcaccagtgctggcttcagtggcgg

SEQ ID NO: 51784 - DNA, 120 bp, Artificial Sequence
  ENSG00000067445_32 (sequence is synthesized)
actgggcaccagtgctggctttggtggtggactggtcactagtgatggctttggtggtggactgggcaccaatgctagtttcggcagcacacttggcaccagtgctggctttagtggtgg

SEQ ID NO: 51785 - DNA, 120 bp, Artificial Sequence
  ENSG00000067445_33 (sequence is synthesized)
cctcagcaccagcgatggctttggcagtaggcctaatgccagcttcgacagaggactgagtaccatcattggctttggcagtggttccaacaccagcactggctttactggcgaacccag

SEQ ID NO: 51786 - DNA, 120 bp, Artificial Sequence
  ENSG00000067445_34 (sequence is synthesized)
caccagcacgggcttcagtagtggacccagttctattgttggcttcagcggtggaccaagcactggtgttggcttctgcagtggaccaagcaccagtggcttcagcggtggaccgagcac

SEQ ID NO: 51787 - DNA, 120 bp, Artificial Sequence
  ENSG00000067445_35 (sequence is synthesized)
aggagctggcttcggcggtggaccaaacactggtgctggctttggtggtggaccgagcaccagtgctggctttggcagtggagccgccagtcttggtgcctgtggcttctcgtatggcta

SEQ ID NO: 51788 - DNA, 120 bp, Artificial Sequence
  ENSG00000067445_36 (sequence is synthesized)
gtgaggtttcagatttattccccatgtttacagataccgctaataaattgcagtagtccttcccatggagccaaagtacatccttggaatctttgtccacacagcagtcaaggcagttat

SEQ ID NO: 51789 - DNA, 120 bp, Artificial Sequence
  ENSG00000067445_37 (sequence is synthesized)
ggccaatcagctgagggtgtcatgtgatggaaaaatctgtttgctgttcctgctttattgtttgctttctgtgtgctgtcatattttggtatcagagttacattaaatttgcaaaatgaa

SEQ ID NO: 51790 - DNA, 120 bp, Artificial Sequence
  ENSG00000067445_38 (sequence is synthesized)
agacgccttctggattcaagaagacgaggtgagctgaggtacctggctttagtgaagaccctgtgggggcttcctggctgcggcttcgacgtgcctgactccacacgcccctaaggctca

SEQ ID NO: 51791 - DNA, 120 bp, Artificial Sequence
  ENSG00000067445_39 (sequence is synthesized)
agagaactacattcctcctaggggaaacaggagaatcaaataggaacggagatacagagtggggaatagagaagtcaaatggagaataagagggagtgataactgaataggggtagtaag

SEQ ID NO: 51792 - DNA, 120 bp, Artificial Sequence
  ENSG00000067445_40 (sequence is synthesized)
aagaaaaagggagctacattgaggagaatggaaagttgaaagtaggtatggaggggaggagactgacaggcaggaacggagacccccctctggaggcggaaagaggcaggaccacttccg

SEQ ID NO: 51793 - DNA, 120 bp, Artificial Sequence
  ENSG00000067445_41 (sequence is synthesized)
caacacaaggcccttgcagtggggtgcgctcagagcagagggccttaagaatggctcctctgtttacaacacacccaacaggaatctgggcttactcctcacaggtggcatgatactttg

SEQ ID NO: 51794 - DNA, 120 bp, Artificial Sequence
  ENSG00000067445_42 (sequence is synthesized)
gccttcctgtgacatcatgccctatacatgtctcccctggagaagcccaagggactgctttgcacagggccagtgggaaatggctcagtattggaggccaagaccataaactgtgtttgg

SEQ ID NO: 51795 - DNA, 120 bp, Artificial Sequence
  ENSG00000067445_43 (sequence is synthesized)
tagtgagtctggggctggagggtcttagaaatccctctccaggggctgtttgtatttgtttggaggaggttgccacctggtgtctagtgcttagacagcagggttgcttggttagaaaca

SEQ ID NO: 51796 - DNA, 120 bp, Artificial Sequence
  ENSG00000067445_44 (sequence is synthesized)
ggatggtcctaggattgcatcagtctggtggtctggtggagcgggtggggtgctggactgggtagagggcccagggttctgacctgggtggatgacgggcaaatggtcctgaactctctg

SEQ ID NO: 51797 - DNA, 120 bp, Artificial Sequence
  ENSG00000067445_45 (sequence is synthesized)
ctgtctctctccttaatgtcctctgtctgttctaagctgagatgttagatagaccttcagggatccctgacaaagaggcatctggtcttaactgcttgcttctagtggccatgtgctcat

SEQ ID NO: 51798 - DNA, 120 bp, Artificial Sequence
  ENSG00000067445_46 (sequence is synthesized)
tactttcttcacttcattgagactgccccatgtgctagagaggtctcttccatgttgggaaatgcctctgccctcatctgggcagttctgatctgtgttcatgggttatttttcccattg

SEQ ID NO: 51799 - DNA, 120 bp, Artificial Sequence
  ENSG00000067445_47 (sequence is synthesized)
gcgcactatcgagttgcggagggggcgtgtaaaggggtggggtcgtagaactgactctctcggaggcaaaaggagctgggccttggaaaccagatggcctgggttttttagggccctctg

SEQ ID NO: 51800 - DNA, 120 bp, Artificial Sequence
  ENSG00000067445_48 (sequence is synthesized)
gaaaacctgcctgactctattccttccttgctccctaccccattttaattaaccactgctcagaggaagggaaggcctttgtggaaagggatgggctttagcgaggccaaatggcccaga

SEQ ID NO: 51801 - DNA, 120 bp, Artificial Sequence
  ENSG00000067445_49 (sequence is synthesized)
acttccggccagggagggggataggctcagacacaaggagaggcttggagagagcagacgccttctggattcaagaagacgaggtttgaagaaaacctgctggaggtttgggacctaacc

SEQ ID NO: 51802 - DNA, 120 bp, Artificial Sequence
  ENSG00000067445_50 (sequence is synthesized)
gcatcaaagtcgcctttagcggtgcctggacccagttcgcacgggaggaagtaggaggctcacctgttactcggcctcccagaaagatggataggagaaatgactacggatatagggtgc

SEQ ID NO: 51803 - DNA, 120 bp, Artificial Sequence
  ENSG00000067445_51 (sequence is synthesized)
acttccggccagggagggggataggctcagacacaaggagaggcttggagagagcagacgccttctggattcaagaagacgaggtgagctgaggctcacctgttactcggcctcccagaa

SEQ ID NO: 51804 - DNA, 120 bp, Artificial Sequence
  ENSG00000067445_52 (sequence is synthesized)
aagtaacgatctggactcggttcgggccgtgaaagggagggatgcagacctagttgggaccgcagaaaggaaggatcgagaaatccttcagacggctcacctgttactcggcctcccaga

SEQ ID NO: 51805 - DNA, 120 bp, Artificial Sequence
  ENSG00000067445_53 (sequence is synthesized)
gccagggagggggataggctcagacacaaggagaggcttggagagagcagacgccttctggattcaagaagacgaggctcacctgttactcggcctcccagaaagatggataggagaaat

SEQ ID NO: 51806 - DNA, 120 bp, Artificial Sequence
  ENSG00000067533_0 (sequence is synthesized)
aggtgacgcttccggcgcagaaaaatggcagccgccgctccggactcacgtgtgagtgaggaagaaaacctgaaaaagaccccaaagaagaagatgaaaatggtaactggagccgtagcg

SEQ ID NO: 51807 - DNA, 120 bp, Artificial Sequence
  ENSG00000067533_1 (sequence is synthesized)
tcggtgctggaagacgaggccacagacacttctgatagtgaaggaagctgtggatcggaaaaggaccacttttattctgatgatgacgcaatagaagctgacagtgagggtgatgctgag

SEQ ID NO: 51808 - DNA, 120 bp, Artificial Sequence
  ENSG00000067533_2 (sequence is synthesized)
ccctgtgacaaagaaaatgaaaatgatggagaatcaagtgttgggactaatatgggctgggcagatgctatggctaaagtcctcaacaagaaaactcctgaaagtaaacctactattctg

SEQ ID NO: 51809 - DNA, 120 bp, Artificial Sequence
  ENSG00000067533_3 (sequence is synthesized)
gtcaaaaataagaagctggaaaaggaaaaagaaaagttaaagcaagaaagactagagaaaataaaacagcgtgataagaggctggagtgggaaatgatgtgcagagtaaagccagatgtt

SEQ ID NO: 51810 - DNA, 120 bp, Artificial Sequence
  ENSG00000067533_4 (sequence is synthesized)
gtccaagacaaagagacagagagaaatcttcagagaattgcaacaaggggtgtggtgcaattatttaatgctgttcagaaacatcaaaagaatgttgatgaaaaggttaaggaagctgga

SEQ ID NO: 51811 - DNA, 120 bp, Artificial Sequence
  ENSG00000067533_5 (sequence is synthesized)
agttctatgagaaagcgtgctaagttgatatcaactgtttccaagaaagatttcatcagtgttttgagagggatggatggaagtacaaatgagactgcttcaagcaggaagaaaccaaaa

SEQ ID NO: 51812 - DNA, 120 bp, Artificial Sequence
  ENSG00000067533_6 (sequence is synthesized)
gccaaacagactgaagtgaaatcagaagaaggcccaggttggacgatcctacgtgatgatttcatgatgggagcatctatgaaagactgggacaaggaaagtgatgggccagatgacagc

SEQ ID NO: 51813 - DNA, 120 bp, Artificial Sequence
  ENSG00000067533_7 (sequence is synthesized)
agaccagaatctgcaagtgactctgatacataaagcatcataggaaatacaattgcagtcgttttattttttctagaaaaatatgtcatcctctgatagttggggaattataaggatacc

SEQ ID NO: 51814 - DNA, 120 bp, Artificial Sequence
  ENSG00000067533_8 (sequence is synthesized)
atttgtaagaaagccaaaagacttttgccagatttcatatttccccttttcatgtacactttatatatacttcattaaaattatattttaaacccttgtataattttaagcattgttcct

SEQ ID NO: 51815 - DNA, 120 bp, Artificial Sequence
  ENSG00000067533_9 (sequence is synthesized)
cagaacatttgtaaaaggatatatttctgcttgaccagcgagatgtgcattttgccaggatcatattggtcatgtctattggtgtattatttcagtatcaccaatgttttcagaaataca

SEQ ID NO: 51816 - DNA, 120 bp, Artificial Sequence
  ENSG00000067533_10 (sequence is synthesized)
gtactaattcatcattaaactctttgaagttaatatttttctgccttctaacttatagactcaactatgtatctgtagtttttgggaatggttggtgttttttgctttgtgttgggaagt

SEQ ID NO: 51817 - DNA, 120 bp, Artificial Sequence
  ENSG00000067533_11 (sequence is synthesized)
tattgagaaaacctatataataaaatttaaaattatagtttttcagattttgggtcgtgattttagttttaggtaatctggaagatatgatttaagaaacaacagatttcaacttttttt

SEQ ID NO: 51818 - DNA, 84 bp, Artificial Sequence
  ENSG00000067533_12 (sequence is synthesized)
gtcttgctctgtggccccggaaccgcctcccaggttcacgccattctcccacctcaacctctcaagtagctgggactacaggtg

SEQ ID NO: 51819 - DNA, 64 bp, Artificial Sequence
  ENSG00000067533_13 (sequence is synthesized)
ctcggctcactgcaagcaccgcctcccaggttcacgccattctcccacctcaattttgtatttt

SEQ ID NO: 51820 - DNA, 120 bp, Artificial Sequence
  ENSG00000067533_14 (sequence is synthesized)
aatataaataatgacagatttattttaggtgttagcctatttttgcatgagagatttacagaggtggaaattctcatgcttaacttatgcaatgagacaatttctcaggaagcaagtttg

SEQ ID NO: 51821 - DNA, 120 bp, Artificial Sequence
  ENSG00000067533_15 (sequence is synthesized)
acatgctttagtctctctcttcttttttttcctcccaaatatttgagttagcttaaattcttttttatggactgcccaaccagtgaattgatgcacttagacaacaagtaatctgcagca

SEQ ID NO: 51822 - DNA, 120 bp, Artificial Sequence
  ENSG00000067533_16 (sequence is synthesized)
gaatattgcatccaatttgagacttgattccatattattgccttaaaggctattaaattgggtgacttttagtatccagctgttaaaaagaggaaagactgtttaatatcattccaaaat

SEQ ID NO: 51823 - DNA, 120 bp, Artificial Sequence
  ENSG00000067533_17 (sequence is synthesized)
ttttgtgaaatgtggcccaagatctaaagtttttaagggaattatttttaataaatatgatctgtccctttttgaaaaggatccatcccttttcataataaaaataattccctcctacca

SEQ ID NO: 51824 - DNA, 120 bp, Artificial Sequence
  ENSG00000067533_18 (sequence is synthesized)
cccagttgcacatacttgcatctgttatgtattgaaggataatcccccccaaaaaaactatccaagagcagagatgtttatattttgaaacccatttgagtgttacagtattatatgact

SEQ ID NO: 51825 - DNA, 120 bp, Artificial Sequence
  ENSG00000067533_19 (sequence is synthesized)
aaagctgaatcagtctgtggcctggtatttgttatcataaaggaagatgtacacctaaggtatcaagtggttaaaacagcaaagtacaagatgcatttttgtatttattctaacttttga

SEQ ID NO: 51826 - DNA, 120 bp, Artificial Sequence
  ENSG00000067533_20 (sequence is synthesized)
acattagtgtctttcagtataaataaatgtgaacaaatatacctcagtagtaatacaggagaactaaatatcctgctataacttaatacagatacatatttcaatatgacttaacaaaca

SEQ ID NO: 51827 - DNA, 120 bp, Artificial Sequence
  ENSG00000067533_21 (sequence is synthesized)
cacaattttgaaaaaaaaaaaaaaaaagtgcagcaacttaaacacatttttctccccagaactaagattacacttaatttaatttaatgtgtttctgcgttatactagagttttgcagga

SEQ ID NO: 51828 - DNA, 120 bp, Artificial Sequence
  ENSG00000067533_22 (sequence is synthesized)
atttttctgaatagtacattcacatgatagatacggataaataccttatttactaaaatgttttgaaacatattttatagtccctcatttgatttgaaaaaatttgacaagatcttcaca

SEQ ID NO: 51829 - DNA, 120 bp, Artificial Sequence
  ENSG00000067533_23 (sequence is synthesized)
ttgaaagtaaggacgagaatatttgcagatttccttcgttccaaaattattttattccaaagaaaaattgagttgccactatcaggaaaaaaaaaatgtatcacttctgttagaaggcta

SEQ ID NO: 51830 - DNA, 120 bp, Artificial Sequence
  ENSG00000067533_24 (sequence is synthesized)
tgaagtatatataaattatatgacaatttttatcatatagatttgatatcttctatgtattcgtatttttgcatcttgggtattaagcaaaataccatatgtataaatatgaaaccagga

SEQ ID NO: 51831 - DNA, 120 bp, Artificial Sequence
  ENSG00000067533_25 (sequence is synthesized)
atgtgcatattttagaaactaattgtgtatcttaagtgaatgttttgagtagttctgtcacccctattctaaatattttacctacaacatttaaattattctgatatcaatcagataaat

SEQ ID NO: 51832 - DNA, 120 bp, Artificial Sequence
  ENSG00000067533_26 (sequence is synthesized)
aaattattctgatatcaatcagataaataatccgagtgtatttcatctttctacattgtctttgtggtttttgtttgtttgtttttgagacggtctcacactgtcacccaggctggagtg

SEQ ID NO: 51833 - DNA, 67 bp, Artificial Sequence
  ENSG00000067533_27 (sequence is synthesized)
ctttttgatgtagatggggttaccccatgttgcccaggctggttgtgaactcctgagctcaagggat

SEQ ID NO: 51834 - DNA, 120 bp, Artificial Sequence
  ENSG00000067533_28 (sequence is synthesized)
gctaattttttgtctttttgatgtagatggggttaccccatgttgcccaggctggttgtgaactcctgagctcaagggatccccccgcctcttgcctcccaaagtgcttggattacaggt

SEQ ID NO: 51835 - DNA, 120 bp, Artificial Sequence
  ENSG00000067533_29 (sequence is synthesized)
gggaaagaaaactgcaattcctgcctccccatttatttaaacataacacctaggattttatttttggtaactacttagaataatatagtaggttacttatcttcggttagaaagaactat

SEQ ID NO: 51836 - DNA, 120 bp, Artificial Sequence
  ENSG00000067533_30 (sequence is synthesized)
ggaaaataggaaccaataatttggaagtattatttccttatttcatatatagaaataattatcttatttccttatttcatatatagaatattctagatacttggatggctggggttgatg

SEQ ID NO: 51837 - DNA, 120 bp, Artificial Sequence
  ENSG00000067533_31 (sequence is synthesized)
gaaaatagaattatcttagtagtttagcactttttataatggagttggagcactgaatttattttcaaattacctagaattctgcattgctcaaacattattcaattgattgcaaaatat

SEQ ID NO: 51838 - DNA, 120 bp, Artificial Sequence
  ENSG00000067533_32 (sequence is synthesized)
accttggaaaccctttggatagaacagttcagagggttaccactagtacttagagcctaaagtcactcagtaggaggttctcaaaggtctatttgaaggcaatccaatttctttaaaata

SEQ ID NO: 51839 - DNA, 120 bp, Artificial Sequence
  ENSG00000067533_33 (sequence is synthesized)
aaatattttttgccttttaaaacagatgggtgaagaaagggacgtataaattctgggaaacctcttatgttttcctcccatttccttctatgtctccattaatgtgctaacttgaaggaa

SEQ ID NO: 51840 - DNA, 120 bp, Artificial Sequence
  ENSG00000067533_34 (sequence is synthesized)
tttaacttcaaggaaagttgactgatgaagtttatgtagagctgtgaatattataatttgtcaatactttattgataatgttaactttgtttttatttggaaacattttttccagttgac

SEQ ID NO: 51841 - DNA, 120 bp, Artificial Sequence
  ENSG00000067533_35 (sequence is synthesized)
caaagcagaattcattctgttcttccctcaaattcatctattaggatcaatgtgattgacatttatctccactctgcatgtcactgatatggtatagacgctataagccctgtagatatt

SEQ ID NO: 51842 - DNA, 120 bp, Artificial Sequence
  ENSG00000067533_36 (sequence is synthesized)
atgggtatgaagactatttgaggtgaattggcagtgagagcaaattttggaaacaggagagagaactacttcgtgcctataaaaagctctctcactccttccccaagaaaacaggagtct

SEQ ID NO: 51843 - DNA, 120 bp, Artificial Sequence
  ENSG00000067533_37 (sequence is synthesized)
gaattttggccagctgggtatttgaatcttactgactgttgcagcactggtagtcctggtaaattttttcagtgggcgagcttttctgaaatttgattaaacatattagtcaagggaatc

SEQ ID NO: 51844 - DNA, 120 bp, Artificial Sequence
  ENSG00000067533_38 (sequence is synthesized)
tgtgaatagatttagaagtagaatgtttgaggtggttgacaagacatttagaattgtgattaatgttttaataaaatgctaagttagaatgaataatcataattatatagatggaagata

SEQ ID NO: 51845 - DNA, 120 bp, Artificial Sequence
  ENSG00000067533_39 (sequence is synthesized)
tattctaacagttcttaaataattttagattctctaaatttagagtgttttctagcttagagagcaatattaatattttttacctagtctactgaacataatttcagggagttagtattt

SEQ ID NO: 51846 - DNA, 120 bp, Artificial Sequence
  ENSG00000067533_40 (sequence is synthesized)
aggactttttacctagagatgcggtaaaccttttaaatttaaatttgctttcttaaaatacctgttccaacattgctcacctttcttctccctcctttttgccctctccttcagtgggag

SEQ ID NO: 51847 - DNA, 120 bp, Artificial Sequence
  ENSG00000067533_41 (sequence is synthesized)
gagcacatattcagctttctgttaaacactctttggttttcaactgagtaaggcaagcaaggatatatgttagaagagtgggcataatactttatattaaaattatagggactaaaagtc

SEQ ID NO: 51848 - DNA, 120 bp, Artificial Sequence
  ENSG00000067533_42 (sequence is synthesized)
taaatcattgctgtcaataggactttttttgatgatggaaataatttatgtctgtgctgttcaatatggtagccactcgcagaggtgactactgagcatttcacgtgtggcttgtgatac

SEQ ID NO: 51849 - DNA, 120 bp, Artificial Sequence
  ENSG00000067533_43 (sequence is synthesized)
agaggaactaaatttttaattttacttaattactttaaattttaaaagttacacgtggctagtgggtctatcccaactatgaagagaataaagctacagagcatctatctagtctaatga

SEQ ID NO: 51850 - DNA, 120 bp, Artificial Sequence
  ENSG00000067533_44 (sequence is synthesized)
aacaacagtgaatttgggaattgtaaatctgtcttaagctttttccataaacttttattgatataatttaggcatatacaaatactggtgaaattttattgattgaattattgttgactt

SEQ ID NO: 51851 - DNA, 120 bp, Artificial Sequence
  ENSG00000067533_45 (sequence is synthesized)
ttttttcagtatttatatttttaaaaagatatgtttctttataattaacttgtattgtagggtaaccattgtccttaaatgttaagccacttagttaataacaaatagcatttggttttt

SEQ ID NO: 51852 - DNA, 120 bp, Artificial Sequence
  ENSG00000067533_46 (sequence is synthesized)
tagcattatttatcatctgaggctttcagaattaatgcaccaaaccttaaatatttttgttgttctctaaaagaatgggtttatgatgcaccaaaaggacattttgagaactgccggagc

SEQ ID NO: 51853 - DNA, 120 bp, Artificial Sequence
  ENSG00000067533_47 (sequence is synthesized)
aacagataccaccatgtaaggagtgaattcccatgtttttcacttatatctagaggcctacttatttaggaggtttcctaagtaagtgtatttagttgtaggaccttagagttgcctagg

SEQ ID NO: 51854 - DNA, 120 bp, Artificial Sequence
  ENSG00000067533_48 (sequence is synthesized)
tccattctattctagcatatactcaacatactgccagagcaaatgtaggttgcagattcaggcaaaacacacacacacacacacacaaaaccctgaagagcacaatgagcattattagca

SEQ ID NO: 51855 - DNA, 120 bp, Artificial Sequence
  ENSG00000067533_49 (sequence is synthesized)
cagccaatttaaaatgatgaggtgttaaccacatttgtataaataatagtttctctaaccctgaatcattatcctgcatttttaatgcaatcggttcataaacatcaaagtgaaaacacc

SEQ ID NO: 51856 - DNA, 120 bp, Artificial Sequence
  ENSG00000067533_50 (sequence is synthesized)
aaatttgtaagaggtcaggaccaactggggctctaaatggagagacagctgagagctgtgtccctatgcgtgggtggccttgcagctgttgattcaccctcaggctaccagacagttgcc

SEQ ID NO: 51857 - DNA, 120 bp, Artificial Sequence
  ENSG00000067533_51 (sequence is synthesized)
tctttgcatttgcagaaccagacttcaatcttaggtaaaaatgtatccctcccatggacaggacataaacaatagattgacatcagctctgaaaacagtgcagcagccagactcagcagt

SEQ ID NO: 51858 - DNA, 120 bp, Artificial Sequence
  ENSG00000067533_52 (sequence is synthesized)
tgccctgaaatactgagaagtaccaagcataacatcaagactgtttctacacaataatatttgtctttgtacagcaacactgggttctcttaagtatattataaatataaaagctcaaag

SEQ ID NO: 51859 - DNA, 120 bp, Artificial Sequence
  ENSG00000067533_53 (sequence is synthesized)
tccaaaaggttcaatgtgatgatatccttctctacaaatgccaggaacaccagggtagattgcatgagacatgactgccgtatcttggtccttactaggattcccaaatatactccttaa

SEQ ID NO: 51860 - DNA, 120 bp, Artificial Sequence
  ENSG00000067533_54 (sequence is synthesized)
taaccagtaaagttatatttacactggacattttaagaaataccagtgttcgttgttagatgagagacagcataattttggaatcacaactgagttcagagttcagttttgagtcctact

SEQ ID NO: 51861 - DNA, 120 bp, Artificial Sequence
  ENSG00000067533_55 (sequence is synthesized)
agttttgtttccttgtgtaagtttcttaacctttgtaaggctagcatgtaaatcagatacaataatatatagttcagggtgtaaagattggattaatgtatgcagtgtctatctagcaca

SEQ ID NO: 51862 - DNA, 120 bp, Artificial Sequence
  ENSG00000067533_56 (sequence is synthesized)
gtgcctgttatgtagtagcgtgtcaagagatgttctctcttatgcatttggaggattaggtgctgcacctataggtttccattcatttctcatctatgtaattctgagtcttccttttct

SEQ ID NO: 51863 - DNA, 120 bp, Artificial Sequence
  ENSG00000067533_57 (sequence is synthesized)
agatagaattccccccaacaaaaatttaaagtctaacaggtggtaggtgcttattgaggcccagcaattctacttctggaaaccttcctcaggaaaagattctgatgacagaaaatgctg

SEQ ID NO: 51864 - DNA, 120 bp, Artificial Sequence
  ENSG00000067533_58 (sequence is synthesized)
tgtgaacagtattatatagaattgtttttaatagcaagaaattttttaaaacttacaagttcagtgatatgaggacatttacataaactatcgaaccaccagtcttctgtcaattccttt

SEQ ID NO: 51865 - DNA, 120 bp, Artificial Sequence
  ENSG00000067533_59 (sequence is synthesized)
taaaatgatggttgtgaagactgatgaaaacacagtgtcaatgatatgttaactgaaaaagtaagattaaaaacattatggatagtataagtttcttaaatgccaacaatgcatgaggtg

SEQ ID NO: 51866 - DNA, 120 bp, Artificial Sequence
  ENSG00000067533_60 (sequence is synthesized)
aatagaataagacttttttttaaagaatgtaatttttgacagtctgaaaagacaggccttatatttatattgagaaaaatgatcctgacatttaatgagacactaaaacagtttttattt

SEQ ID NO: 51867 - DNA, 120 bp, Artificial Sequence
  ENSG00000067533_61 (sequence is synthesized)
tttgcttacttattctgttctagaatccaaactctacatactgtttaatagagcattattgatattagctgtattagatgactgtatgaagagtcctgtttgctagaatcctactttatc

SEQ ID NO: 51868 - DNA, 120 bp, Artificial Sequence
  ENSG00000067533_62 (sequence is synthesized)
ttttaagttttgctaattaccctgcaatgaatgttgaacataaaaaatttgactccctttccatgtgtccactgtttccttgtgccttttgattaataaaactttatttttaagtgagaa

SEQ ID NO: 51869 - DNA, 120 bp, Artificial Sequence
  ENSG00000067533_63 (sequence is synthesized)
taaaacaggtatgttccaccagttctcttgtagattagattgtttgtctaggctagctcttatcttgaccgaactgtttcttgcagtgtttgaccaattaacgttccagtttttaacttg

SEQ ID NO: 51870 - DNA, 120 bp, Artificial Sequence
  ENSG00000067560_0 (sequence is synthesized)
gctctctcgcgctaccctcccgccgcccgcggtcctccgtcggttctctcgttagtccacggtctggtcttcagctacccgccttcgtctccgagtttgcgactcgcggaccggcgtccc

SEQ ID NO: 51871 - DNA, 120 bp, Artificial Sequence
  ENSG00000067560_1 (sequence is synthesized)
cggcgcgaagaggctggactcggattcgttgcctgagcaatggctgccatccggaagaaactggtgattgttggtgatggagcctgtggaaagacatgcttgctcatagtcttcagcaag

SEQ ID NO: 51872 - DNA, 120 bp, Artificial Sequence
  ENSG00000067560_2 (sequence is synthesized)
gaccagttcccagaggtgtatgtgcccacagtgtttgagaactatgtggcagatatcgaggtggatggaaagcaggtagagttggctttgtgggacacagctgggcaggaagattatgat

SEQ ID NO: 51873 - DNA, 120 bp, Artificial Sequence
  ENSG00000067560_3 (sequence is synthesized)
cgcctgaggcccctctcctacccagataccgatgttatactgatgtgtttttccatcgacagccctgatagtttagaaaacatcccagaaaagtggaccccagaagtcaagcatttctgt

SEQ ID NO: 51874 - DNA, 120 bp, Artificial Sequence
  ENSG00000067560_4 (sequence is synthesized)
cccaacgtgcccatcatcctggttgggaataagaaggatcttcggaatgatgagcacacaaggcgggagctagccaagatgaagcaggagccggtgaaacctgaagaaggcagagatatg

SEQ ID NO: 51875 - DNA, 120 bp, Artificial Sequence
  ENSG00000067560_5 (sequence is synthesized)
gcaaacaggattggcgcttttgggtacatggagtgttcagcaaagaccaaagatggagtgagagaggtttttgaaatggctacgagagctgctctgcaagctagacgtgggaagaaaaaa

SEQ ID NO: 51876 - DNA, 120 bp, Artificial Sequence
  ENSG00000067560_6 (sequence is synthesized)
tctgggtgccttgtcttgtgaaaccttgctgcaagcacagcccttatgcggttaattttgaagtgctgtttattaatcttagtgtatgattactggcctttttcatttatctataattta

SEQ ID NO: 51877 - DNA, 120 bp, Artificial Sequence
  ENSG00000067560_7 (sequence is synthesized)
gattacaaatcagaagtcatcttgctaccagtatttagaagccaactatgattattaacgatgtccaacccgtctggcccaccagggtccttttgacactgctctaacagccctcctctg

SEQ ID NO: 51878 - DNA, 120 bp, Artificial Sequence
  ENSG00000067560_8 (sequence is synthesized)
cactcccacctgacacaccaggcgctaattcaaggaatttcttaacttcttgcttctttctagaaagagaaacagttggtaacttttgtgaattaggctgtaactactttataactaaca

SEQ ID NO: 51879 - DNA, 120 bp, Artificial Sequence
  ENSG00000067560_9 (sequence is synthesized)
tgtcctgcctattatctgtcagctgcaaggtactctggtgagtcaccacttcagggctttactccgtaacagattttgttggcatagctctggggtgggcagttttttgaaaatgggctc

SEQ ID NO: 51880 - DNA, 120 bp, Artificial Sequence
  ENSG00000067560_10 (sequence is synthesized)
aaccagaaaagcccaagttcatgcagctgtggcagagttacagttctgtggtttcatgttagttaccttatagttactgtgtaattagtgccacttaatgtatgttaccaaaaataaata

SEQ ID NO: 51881 - DNA, 120 bp, Artificial Sequence
  ENSG00000067560_11 (sequence is synthesized)
tatctaccccagactagatgtagtattttttgtataattggatttcctaatactgtcatcctcaaagaaagtgtattggttttttaaaaaagaaagtgtatttggaaataaagtcagatg

SEQ ID NO: 51882 - DNA, 120 bp, Artificial Sequence
  ENSG00000067560_12 (sequence is synthesized)
gaaaattcattttttaaattcccgttttgtcactttttctgataaaagatggccatattaccccttttcggccccatgtatctcagtaccccatggagctgggctaagtaaataggaatt

SEQ ID NO: 51883 - DNA, 120 bp, Artificial Sequence
  ENSG00000067560_13 (sequence is synthesized)
ggtttcacgcctgaggcaattagacactttggaagatggcataacctgtctcacctggacttaagcatctggctctaattcacagtgctcttttctcctcactgtatccaggttccctcc

SEQ ID NO: 51884 - DNA, 120 bp, Artificial Sequence
  ENSG00000067560_14 (sequence is synthesized)
cagaggagccaccagttctcatgggtggcactcagtctctcttctctccagctgactaaactttttttctgtaccagttaatttttccaactactaatagaataaaggcagttttctaaa

SEQ ID NO: 51885 - DNA, 120 bp, Artificial Sequence
  ENSG00000067560_15 (sequence is synthesized)
aatagtggatgagctgtgagtgcgcgcgcgtgcgcggggccgcgacctgtgccggctcgagcccgctgggcactcggaggcgcgcacgtcgttccccgccctcccgccgccgcccgccct

SEQ ID NO: 51886 - DNA, 89 bp, Artificial Sequence
  ENSG00000067560_16 (sequence is synthesized)
tatgtgcccacagtgtttgagaactatgtggcagatatcgaggtggatggaaagcagagacagagtctccctctatggtttacaacaac

SEQ ID NO: 51887 - DNA, 120 bp, Artificial Sequence
  ENSG00000067560_17 (sequence is synthesized)
cggcgcgaagaggctggactcggattcgttgcctgagagatggtgtcttgctatgttgcccagacagatcttgtactcctgggctcaagttgtcctcctgcctcagcctcccaaagtgct

SEQ ID NO: 51888 - DNA, 120 bp, Artificial Sequence
  ENSG00000067560_18 (sequence is synthesized)
atcagcccaggtcagaacccccacgccagctggatgcccaggagacttaacaccaaccacagcagcagcagcttgaagagggtcacgcgcatgtcctgcgcctcccactcccgcaagaac

SEQ ID NO: 51889 - DNA, 75 bp, Artificial Sequence
  ENSG00000067560_19 (sequence is synthesized)
actaccacacccaggagccggtgaaacctgaagaaggcagagatatggcaaacaggattggcgcttttgggtaca

SEQ ID NO: 51890 - DNA, 120 bp, Artificial Sequence
  ENSG00000067596_0 (sequence is synthesized)
aacccggccggagtagctctgagcgccggctgtgaggaaggaggttctgggcaagctatagccatggctgtggctgtagccatggcgggagccttaatcgggtcggagccaggccccgcg

SEQ ID NO: 51891 - DNA, 120 bp, Artificial Sequence
  ENSG00000067596_1 (sequence is synthesized)
gaagaacttgccaaactcgagtacctgtctttggtgtcaaaggtttgcactgagctggacaatcacttggggatcaacgacaaggaccttgctgaatttgtgatcagtcttgctgagaaa

SEQ ID NO: 51892 - DNA, 120 bp, Artificial Sequence
  ENSG00000067596_2 (sequence is synthesized)
aataccacctttgatacttttaaggcttctctcgtcaaaaatggtgcagaatttacggattctcttattagtaacttgctgcgtctcatacaaaccatgcggcctccagcgaagccttcc

SEQ ID NO: 51893 - DNA, 120 bp, Artificial Sequence
  ENSG00000067596_3 (sequence is synthesized)
actagcaaagatccagttgttaaacctaaaacagaaaaagaaaagctgaaggaactcttcccagtcctttgccaaccggacaacccttctgttcggaccatgttggatgaagatgatgtg

SEQ ID NO: 51894 - DNA, 120 bp, Artificial Sequence
  ENSG00000067596_4 (sequence is synthesized)
aaagttgctgtggatgtcctgaaagaactggaagctttaatgcccagcgcagcaggccaggagaagcaaagagatgctgaacaccgggacaggacaaagaagaagaagcggagtcgaagc

SEQ ID NO: 51895 - DNA, 120 bp, Artificial Sequence
  ENSG00000067596_5 (sequence is synthesized)
cgagatcgaaaccgagatcgagacagagatagggaacgaaaccgagatagagaccacaagcggagacaccgatcccgctctcgatcacgttccaggacccgggagaggaataaagtgaag

SEQ ID NO: 51896 - DNA, 120 bp, Artificial Sequence
  ENSG00000067596_6 (sequence is synthesized)
tctagatatcggtccaggagcaggagtcagagtccccccaaagaccggaaggaccgggacaaatatggagagcggaatctggatagatggcgggataagcatgtggaccgccctcctcca

SEQ ID NO: 51897 - DNA, 120 bp, Artificial Sequence
  ENSG00000067596_7 (sequence is synthesized)
gaagagcccaccattggtgacatttataatggcaaagttaccagcatcatgcagtttggttgctttgtgcagctggaaggactaaggaagcggtgggaaggcctggtgcacatctctgag

SEQ ID NO: 51898 - DNA, 120 bp, Artificial Sequence
  ENSG00000067596_8 (sequence is synthesized)
ctccggcgggagggtcgtgtggccaatgtagctgatgtcgtgagcaaaggccagagggtcaaagtcaaagtgctgtccttcactgggaccaagaccagcctgagcatgaaggatgtggat

SEQ ID NO: 51899 - DNA, 120 bp, Artificial Sequence
  ENSG00000067596_9 (sequence is synthesized)
caagagactggagaagatctaaacccaaatagacggcgaaatcttgtcggggagaccaatgaggagacctcaatgcggaatcctgatagacccactcacttgtcccttgtcagtgctcct

SEQ ID NO: 51900 - DNA, 120 bp, Artificial Sequence
  ENSG00000067596_10 (sequence is synthesized)
gaagtagaggacgactcactggaacgcaagcgcctcacccgaatctctgacccagagaagtgggagatcaaacagatgattgctgccaatgtcctttccaaagaagaatttccagacttt

SEQ ID NO: 51901 - DNA, 120 bp, Artificial Sequence
  ENSG00000067596_11 (sequence is synthesized)
gatgaagagactggcattctccctaaggtggatgatgaagaagatgaggaccttgagattgaattggttgaggaagagcctccattcctgagagggcacactaagcaaagcatggacatg

SEQ ID NO: 51902 - DNA, 120 bp, Artificial Sequence
  ENSG00000067596_12 (sequence is synthesized)
agccccattaaaattgtcaagaacccagacggctccctctcccaagcagcaatgatgcagagtgccttggccaaagaaaggcgggaactcaaacaggcccagcgggaagctgagatggat

SEQ ID NO: 51903 - DNA, 120 bp, Artificial Sequence
  ENSG00000067596_13 (sequence is synthesized)
tctattcccatgggactcaacaaacactgggttgaccctctgcctgatgcggaaggcagacagattgctgccaacatgaggggtattgggatgatgcccaatgatattcctgagtggaag

SEQ ID NO: 51904 - DNA, 120 bp, Artificial Sequence
  ENSG00000067596_14 (sequence is synthesized)
aagcatgcctttgggggcaacaaagcctcttacggaaaaaagacccagatgtcaatccttgagcagagggagagcctgcccatctacaaactgaaggagcaattggtccaggccgtccat

SEQ ID NO: 51905 - DNA, 120 bp, Artificial Sequence
  ENSG00000067596_15 (sequence is synthesized)
gacaatcagatcctgattgtcattggtgagacaggatctggaaagacaacacagatcacccagtacctggcggaggcaggctacacttccaggggcaagattgggtgtacccagcccaga

SEQ ID NO: 51906 - DNA, 120 bp, Artificial Sequence
  ENSG00000067596_16 (sequence is synthesized)
agagtggcagctatgtcggtggccaaaagagtgtcagaggagtttggttgttgcttaggccaagaggtgggctacaccattcgatttgaggactgcactagccctgaaacagtcatcaag

SEQ ID NO: 51907 - DNA, 120 bp, Artificial Sequence
  ENSG00000067596_17 (sequence is synthesized)
tacatgacagatgggatgttgcttagagagtgcttgattgaccctgacctcactcagtacgcgatcatcatgttggacgaggcacatgagaggacaattcacactgatgtgctctttgga

SEQ ID NO: 51908 - DNA, 120 bp, Artificial Sequence
  ENSG00000067596_18 (sequence is synthesized)
ttgttgaaaaagacagttcagaaacggcaggacatgaagctgattgtcacctcagccaccttggatgcagtgaagttttctcaatacttctatgaagctcccattttcaccatcccaggt

SEQ ID NO: 51909 - DNA, 120 bp, Artificial Sequence
  ENSG00000067596_19 (sequence is synthesized)
cgaacatatccagtggaaatactgtacacaaaggaacctgagacagattatctggatgccagcctgattactgttatgcagattcatttaacagaaccaccaggtgatatcctggtcttc

SEQ ID NO: 51910 - DNA, 120 bp, Artificial Sequence
  ENSG00000067596_20 (sequence is synthesized)
ctgactggtcaggaagaaattgatactgcttgtgagatcctgtatgaaagaatgaaatccctgggacctgatgttccagagttaattatcctcccagtgtactctgctcttcccagtgag

SEQ ID NO: 51911 - DNA, 120 bp, Artificial Sequence
  ENSG00000067596_21 (sequence is synthesized)
atgcagacccgaatctttgacccagctccaccaggcagcagaaaggttgtgattgccaccaatatcgcagagacatcgctgactattgatggtatctactatgtggtggacccaggattc

SEQ ID NO: 51912 - DNA, 120 bp, Artificial Sequence
  ENSG00000067596_22 (sequence is synthesized)
gtgaaacagaaagtttacaattccaagacagggattgaccagctcgtggtgacgcctatttctcaggctcaggcaaagcaacgagctggcagagctgggagaacaggcccagggaagtgt

SEQ ID NO: 51913 - DNA, 120 bp, Artificial Sequence
  ENSG00000067596_23 (sequence is synthesized)
agatgaaatgctgaccaccaacgtgccggaaatccagagaaccaacttagcaagcacagtgctgtcactcaaggccatgggtatcaatgatctgctgtcctttgatttcatggatgcccc

SEQ ID NO: 51914 - DNA, 120 bp, Artificial Sequence
  ENSG00000067596_24 (sequence is synthesized)
acctatggaaactttgatcacagccatggagcagctgtacacactgggggccctggatgacgagggcctgctcactcgcttgggccgccggatggcagagttccctctggagccaatgct

SEQ ID NO: 51915 - DNA, 120 bp, Artificial Sequence
  ENSG00000067596_25 (sequence is synthesized)
atgcaaaatgctcatcatgtctgtgcatctgggctgcagtgaggaaatgctgaccattgtatccatgctgtctgtgcagaacgtcttctataggcccaaggataaacaagcccttgcaga

SEQ ID NO: 51916 - DNA, 120 bp, Artificial Sequence
  ENSG00000067596_26 (sequence is synthesized)
tcagaagaaggccaaattccaccagactgaaggggaccacctcaccctgctagctgtgtacaactcctggaagaacaacaagttctccaacccatggtgctatgagaactttatccaggc

SEQ ID NO: 51917 - DNA, 120 bp, Artificial Sequence
  ENSG00000067596_27 (sequence is synthesized)
tcgttccctgcgccgggcccaggacattcgcaagcagatgttaggcataatggacagacacaagctggatgttgtttcctgtggcaagtccacagtccgagtgcagaaggccatctgcag

SEQ ID NO: 51918 - DNA, 120 bp, Artificial Sequence
  ENSG00000067596_28 (sequence is synthesized)
tgggttcttccgtaatgctgccaagaaagacccgcaggagggttaccggacactgatcgaccagcaggtggtctatatccatccttccagtgccctcttcaacagacagccagaatgggt

SEQ ID NO: 51919 - DNA, 120 bp, Artificial Sequence
  ENSG00000067596_29 (sequence is synthesized)
ggtgtaccatgagctggtgctcaccaccaaggaatacatgcgtgaagttaccaccatcgaccctcggtggcttgtggagtttgccccagccttcttcaaggtctcagacccaactaagct

SEQ ID NO: 51920 - DNA, 120 bp, Artificial Sequence
  ENSG00000067596_30 (sequence is synthesized)
aagcaaacagaagaagcaacagcgtcttgaacccttgtacaaccgctatgaggaacccaatgcctggagaatatctcgagctttccgacggcgctgaaaggcaagattgttcctttgcct

SEQ ID NO: 51921 - DNA, 120 bp, Artificial Sequence
  ENSG00000067596_31 (sequence is synthesized)
ctccagcagcagtagccagggcttggacttatcgatgacaggctggtcctgaggatacagctgtcccgtgactgactgtcttaactgagcattttctcaactcgactctcatttcttccc

SEQ ID NO: 51922 - DNA, 120 bp, Artificial Sequence
  ENSG00000067596_32 (sequence is synthesized)
tgctggtaaaatagaaacagggatttaaacctggctttggcaagagcctgcagcctccatcaccccaagtccttgggcccagttgggagctcatatctaacacagagacacattgcatca

SEQ ID NO: 51923 - DNA, 120 bp, Artificial Sequence
  ENSG00000067596_33 (sequence is synthesized)
acttcaagaaagggacaatttgtgcagctccaggatgggaaggtggagtgggtgagcatcttgtgcagggacatggtgagtgccctgatgccccagctagcaggagctactgtgctcatc

SEQ ID NO: 51924 - DNA, 120 bp, Artificial Sequence
  ENSG00000067596_34 (sequence is synthesized)
taaagtgtttgccccacttcccaccccgtctccagcccctgtactttggcttgacctcgtggaaatatttattttcttaaggaaacaaaaatggttttctgtgactgttttcttttagcc

SEQ ID NO: 51925 - DNA, 120 bp, Artificial Sequence
  ENSG00000067596_35 (sequence is synthesized)
gaaaggttaggatattggcctgggctcagggtgagggagatttagtatctgtgctctggcacacatgatgagaatcccctgaatcccctgaaaccagaacgcagggcctctttgcgctcg

SEQ ID NO: 51926 - DNA, 120 bp, Artificial Sequence
  ENSG00000067596_36 (sequence is synthesized)
gaaacgacgtacaacccagacttccagccttgtctttcagcatcagcactagccgggccgtgctgggggatcacccgatgatcaaccatgtcctctccacagagcacttcagtctggagg

SEQ ID NO: 51927 - DNA, 120 bp, Artificial Sequence
  ENSG00000067596_37 (sequence is synthesized)
cctgagtggctacagatggcacatattaaatacagaaggtttccccttgctccctccacctcccacattcgcaatgtgcagcatgtcccatttccttttgaaacatactaagtaacaaca

SEQ ID NO: 51928 - DNA, 120 bp, Artificial Sequence
  ENSG00000067596_38 (sequence is synthesized)
cagcttttattttattttgtttttatttttttcccctgaggtcctggatggactttaacaaagggattttatggtcaaaacctccctttccccactccaaacagaaaacaaacataacac

SEQ ID NO: 51929 - DNA, 120 bp, Artificial Sequence
  ENSG00000067596_39 (sequence is synthesized)
ctctcctctcagctggtttgtgctgccagtatctgtgctgcagggcttgttcttagtggttttttcctagcacttgcttggagaatagccacctccttgtgccctcctcacagctcctga

SEQ ID NO: 51930 - DNA, 120 bp, Artificial Sequence
  ENSG00000067596_40 (sequence is synthesized)
ggagggttttttttttttcttcccatagagatgggttcccactgtgctgcccaggctgctctccaatccctggcgtcaagcaatcctcctgcctctgcctcccaaagcgctgggattaca

SEQ ID NO: 51931 - DNA, 120 bp, Artificial Sequence
  ENSG00000067596_41 (sequence is synthesized)
gttgagagccactgtcctctgcactgaggaggctccttacctggcggaacatcaggcaggtcttgccaggccaggtttcggaacttacggaaagctggtctggatgtagtgcttgtagag

SEQ ID NO: 51932 - DNA, 120 bp, Artificial Sequence
  ENSG00000067596_42 (sequence is synthesized)
aagcttctgagagattgggcacatcctgttacgttgctgcttctcctgtccttatgttattagtaagttctgaagtgatgtaaatgctagaactactgtagaactgtatgccagacacta

SEQ ID NO: 51933 - DNA, 120 bp, Artificial Sequence
  ENSG00000067596_43 (sequence is synthesized)
agagagactatgtaacattccaggatataaaggaatgtatgttgtcactgggcagcaaaccacaccctaaagacaattcagaaagagtccgagggagaggaatataggccaggcaatctg

SEQ ID NO: 51934 - DNA, 120 bp, Artificial Sequence
  ENSG00000067596_44 (sequence is synthesized)
ctggctgcagatccctgccccttcattaagctgagtgcctcctgattctgtctgagtattcgcctttgtaagcccaggccagtaatcaaggggcagggcattgttgtgtgttaaccttga

SEQ ID NO: 51935 - DNA, 120 bp, Artificial Sequence
  ENSG00000067596_45 (sequence is synthesized)
aggccttctggggagagacagtacagggacctcaaatgaaaccaaaggggaaacggggactgggcacccacctccccaatctcgttttgtttttgtttttgttaagacaggatcttgcca

SEQ ID NO: 51936 - DNA, 120 bp, Artificial Sequence
  ENSG00000067596_46 (sequence is synthesized)
atcaatataagtgtccacgctgggtgctgggaacaaattgcctccctgagtcggaccagctgcccgtggatcctacgctgcagtcacaccagactcctcatgttgtgggaggcctgaact

SEQ ID NO: 51937 - DNA, 120 bp, Artificial Sequence
  ENSG00000067596_47 (sequence is synthesized)
tcttttcctgaggaaggaactcagataaaaacaaatgtaagtttcaagctttaagaccagaaggggcaatatctatgtttatccaaaaaaactgtctgtttattgggtaggtctcaccac

SEQ ID NO: 51938 - DNA, 120 bp, Artificial Sequence
  ENSG00000067596_48 (sequence is synthesized)
agtaaatgcccaataagcattggttgttattgtgaaagagcagtaactgattcacagctgcttccatagcacttcctggactccagcactcactccggaccaggctcaagtttctggatg

SEQ ID NO: 51939 - DNA, 120 bp, Artificial Sequence
  ENSG00000067596_49 (sequence is synthesized)
ggtaggagggctggctgggaacaaaagaaaacaaaggaaagctgatttggttctttgttctgtgtagccctgtgctaagcttccccgtcctccagcagcttgcacagaccctggttccag

SEQ ID NO: 51940 - DNA, 120 bp, Artificial Sequence
  ENSG00000067596_50 (sequence is synthesized)
cctctccaagtttgaggatttgaacaaagaactgggactggtgacttgttaatgaacagttcagagggcagagggccatcatctcagcttgtggagacctttctttccctggatgctgct

SEQ ID NO: 51941 - DNA, 120 bp, Artificial Sequence
  ENSG00000067596_51 (sequence is synthesized)
tctcagctaactccctctctcttcgtgtgtgtactcggccttcagggtttccaccgatttttacaccttcttcccaccacgatagcttggctttaatgtggaattaaattatatattttt

SEQ ID NO: 51942 - DNA, 120 bp, Artificial Sequence
  ENSG00000067596_52 (sequence is synthesized)
tgaatggaaatcaggaacaaactgctcatcactgtctggtacctgagctgcagagagaagtcagagaacaaattgcctccctgagtcggaccagctgcccgtggatcctacgctgcagtc

SEQ ID NO: 51943 - DNA, 120 bp, Artificial Sequence
  ENSG00000067596_53 (sequence is synthesized)
acaccagactcctcatgttgtggggtaagtgtgtcccctttctttcctgcttctgtctttatacacacagtccctttcctttgatacgttttctcctctcgtctgcctctgagccagccc

SEQ ID NO: 51944 - DNA, 120 bp, Artificial Sequence
  ENSG00000067596_54 (sequence is synthesized)
caagagtcttctccgtgcttcctgactcctctctgcttagctgttaccccatttgttcctctgcaccatagttaaacctatttacaggtctgtgtcccccaccaaactgtgagctccttg

SEQ ID NO: 51945 - DNA, 120 bp, Artificial Sequence
  ENSG00000067596_55 (sequence is synthesized)
aaggcaggcgatgtccattttgtatccccccgaaaaccatccccctacccccagtacagactctggcacaaaataggcattaagtaaatgaatgaaggaatgaatggatggaaaggatgc

SEQ ID NO: 51946 - DNA, 120 bp, Artificial Sequence
  ENSG00000067596_56 (sequence is synthesized)
cattgtaggggggaaagagtaatatctattacttttatttaaaaaaaacttttaatttccacttctaggcatatatcttttccttatctgtcacaaagttcatggcttgagatccctata

SEQ ID NO: 51947 - DNA, 120 bp, Artificial Sequence
  ENSG00000067596_57 (sequence is synthesized)
acaaaagatagattaacaagagaaaagcatacacatttatataataagtttccgtgacatgggagatgaagacccagggaaatagggaatactgtgtatattttatgcttaggtttaatg

SEQ ID NO: 51948 - DNA, 120 bp, Artificial Sequence
  ENSG00000067596_58 (sequence is synthesized)
taaatgaatttcagttttatgaaccttgttaaatactttagtaacctcatgaaagcagtccctttgagtgaaatgcaaatggctgtgataacagcctctcacggcaggtctggggctaag

SEQ ID NO: 51949 - DNA, 120 bp, Artificial Sequence
  ENSG00000067596_59 (sequence is synthesized)
ttggcatgtctgctgtgaacacacattttttcttaccataacaaccagcaggatattaggttgtaaaaggttctagttaggagcattttctaaaaggaaattagaaaaatataatcaatg

SEQ ID NO: 51950 - DNA, 120 bp, Artificial Sequence
  ENSG00000067596_60 (sequence is synthesized)
ccaaactgtggacacacacacctaacctcaaccactttagcgctcagatccaattctgttcttttagaacgagagaaaaccccctgttcaaaaactttgcaagggaactgtcagtacaga

SEQ ID NO: 51951 - DNA, 120 bp, Artificial Sequence
  ENSG00000067596_61 (sequence is synthesized)
tttcagactggctctcaggggcttggttttcattctgaatcattgttcttcctctctcagtccccagtgaggacttcattctcttttggcaggaggagctgtatgagtaatttcccagct

SEQ ID NO: 51952 - DNA, 120 bp, Artificial Sequence
  ENSG00000067596_62 (sequence is synthesized)
gaggctaaaacagagctttggaaagaaaaaagaaacctactccagtctctgaagtgccaacagagaggcatctgtggcttggacttcagctccaaactgcgactttgggcaagtttattt

SEQ ID NO: 51953 - DNA, 120 bp, Artificial Sequence
  ENSG00000067596_63 (sequence is synthesized)
actttgccctctgctctgtgttctgctctgaaaaaggggctgttaatagtatttgttggaaagataagtgagataatgtaggtaaaggcacttggcacagtgcttgatgattgctaacat

SEQ ID NO: 51954 - DNA, 120 bp, Artificial Sequence
  ENSG00000067596_64 (sequence is synthesized)
aattcatcatagttattattcacacaataaacatttattgaacacctgctgtgtttatggtcacaatcactttatgagaaagaaatagaaagcttaggtcctaccacatcacactttata

SEQ ID NO: 51955 - DNA, 120 bp, Artificial Sequence
  ENSG00000067596_65 (sequence is synthesized)
tacacttgaatcgtgcatcattcagtcgtttcttttattcatcgaattagctaatgtattgaacacatgctacatgccaggcatgtagattgcactgtggtggttttgtgaacatagttt

SEQ ID NO: 51956 - DNA, 120 bp, Artificial Sequence
  ENSG00000067596_66 (sequence is synthesized)
ttacccagtgtgaactctctgaaagcaggggccatatcctggccatctttatatccctcccacctaacatggtatgagatccctcatagatatatagtagaaatgatgtatgcaagagac

SEQ ID NO: 51957 - DNA, 120 bp, Artificial Sequence
  ENSG00000067596_67 (sequence is synthesized)
aggacaagttggtagactatattattattattattattgtaaaatacataacaacatttactattgtaagctttttaaagtatacaattcagtggcattaaatacattcaagatgttgta

SEQ ID NO: 51958 - DNA, 120 bp, Artificial Sequence
  ENSG00000067596_68 (sequence is synthesized)
caaccatcaccaacatccatttccagaactttttcattgtcccaaacagaaactctgtacccattaaacagtaactcccctttcccccttcctctatcccttggtaactactcttctact

SEQ ID NO: 51959 - DNA, 120 bp, Artificial Sequence
  ENSG00000067596_69 (sequence is synthesized)
ttttacctctctgaatttgtctattctagatagcctcatttaagtggaatcatacaatattcttttgtatctgacctgtttctcttagaataatgttttcaagatttattcatgttattt

SEQ ID NO: 51960 - DNA, 120 bp, Artificial Sequence
  ENSG00000067596_70 (sequence is synthesized)
tcaaggtttatccatttatttcattcctttctaagggtgaatagtattctgttgtatgtatataccacattttgtttatccattcatcagcagatggacatttggattgtttctaccttt

SEQ ID NO: 51961 - DNA, 120 bp, Artificial Sequence
  ENSG00000067596_71 (sequence is synthesized)
tggctattatcaataatgctgctgtgaacattagtgtgcaggtatctgtttgagtctgctttcagttcttttggatatatacctagaagtgtaattgctgggtcatgtgctaattctgta

SEQ ID NO: 51962 - DNA, 120 bp, Artificial Sequence
  ENSG00000067596_72 (sequence is synthesized)
tttagcctattaaggaaccaccaaacttttctacagtggctgcaacatcttacattcccaccagcaatgcatgaggtttctgatacctcccgtcctcactgacatttgttagtttctgtt

SEQ ID NO: 51963 - DNA, 120 bp, Artificial Sequence
  ENSG00000067596_73 (sequence is synthesized)
ttttaaaaaaattatagccatcctagtgggtatgaagtgatatttcattgtagttttgatttgcatttccctaattactactgatgttgtgcatctgtgcatctttttatgtgcttgttg

SEQ ID NO: 51964 - DNA, 120 bp, Artificial Sequence
  ENSG00000067596_74 (sequence is synthesized)
gccatttgtatatcttctttgaagaaatgtctattcaagctctgtgcctattttttaaattgagttgtttgtccttttgctgttgagttgtacatattgtcattttgagagagtgttagg

SEQ ID NO: 51965 - DNA, 120 bp, Artificial Sequence
  ENSG00000067596_75 (sequence is synthesized)
gtgttagggttttttgtttttttttttcttggaagacgttttatcatgttgcctaggctggtctcaactcccggactcaagcgattctccctccttggcctcccaaactgctgagattac

SEQ ID NO: 51966 - DNA, 76 bp, Artificial Sequence
  ENSG00000067596_76 (sequence is synthesized)
gagattacaggtgtgagccaccatgcccaactgagagaatattttcaaaaagtttcctgagaaattatgtgctttc

SEQ ID NO: 51967 - DNA, 120 bp, Artificial Sequence
  ENSG00000067596_77 (sequence is synthesized)
tgggtgacagagtgagactctgtctcaagtatgtgctttctattataatagtctgagttttatgtggcccagccctggaagttaccgccagtctcaccggtggcttcctaattgcaattg

SEQ ID NO: 51968 - DNA, 120 bp, Artificial Sequence
  ENSG00000067596_78 (sequence is synthesized)
gttaccgccagtctcaccggtggcttcctaattgcaattgaagaaatgggaaataaagtaacaagtagcttccccacatgctgacactggctagactgaccctcttatcacatgccttct

SEQ ID NO: 51969 - DNA, 120 bp, Artificial Sequence
  ENSG00000067596_79 (sequence is synthesized)
aatcaggaacaaactgctcatcactgtctggtacctgagctgcagagagaagtcagagccccaccagcgacaccctcaggccccaccaaaacgcactgaagaatccaaccaggaaacctc

SEQ ID NO: 51970 - DNA, 120 bp, Artificial Sequence
  ENSG00000067596_80 (sequence is synthesized)
ctgaacacaccacttccccatcagacccagccacggacccagccacggaccccaccccagccagctcacagctaactccccagcacacaggaaggggggaatttgcctggaggcagaggt

SEQ ID NO: 51971 - DNA, 120 bp, Artificial Sequence
  ENSG00000067596_81 (sequence is synthesized)
attcaagcgggatggaagagggaggaacacttgctattagaattacaatcaaggctatttggggagggagccctgggctctctgtgccaaaggactgccgaaaagaattatttaaacttt

SEQ ID NO: 51972 - DNA, 120 bp, Artificial Sequence
  ENSG00000067596_82 (sequence is synthesized)
ttaccggacactgatcgaccagcaggtggtctatatccatccttccagtgccctcttcaacagacagccagaatggaccgtccctatggggcatgtgtgagctccgcagctgggtcaggc

SEQ ID NO: 51973 - DNA, 80 bp, Artificial Sequence
  ENSG00000067606_0 (sequence is synthesized)
gcgccccccgctcccgccccgcgcgccgccggagttccgcggagttgaccgggtcggcgccgtcggtcctgagcgctgcc

SEQ ID NO: 51974 - DNA, 80 bp, Artificial Sequence
  ENSG00000067606_1 (sequence is synthesized)
catggccggagctcccggggcgcagcgctgacggcggcggggggagcgcgccatgcccagcaggaccggccccaagatgg

SEQ ID NO: 51975 - DNA, 120 bp, Artificial Sequence
  ENSG00000067606_2 (sequence is synthesized)
caagatggaagggagcggcggccgcgtccgcctcaaggcgcattacgggggggacatcttcatcaccagcgtggacgccgccacgaccttcgaggagctctgtgaggaagtgagagacat

SEQ ID NO: 51976 - DNA, 120 bp, Artificial Sequence
  ENSG00000067606_3 (sequence is synthesized)
gtgtcgtctgcaccagcagcacccgctcaccctcaagtgggtggacagcgaaggtgacccttgcacggtgtcctcccagatggagctggaagaggctttccgcctggcccgtcagtgcag

SEQ ID NO: 51977 - DNA, 120 bp, Artificial Sequence
  ENSG00000067606_4 (sequence is synthesized)
ggatgaaggcctcatcattcatgttttcccgagcacccctgagcagcctggcctgccatgtccgggagaagacaaatctatctaccgccggggagccagaagatggaggaagctgtaccg

SEQ ID NO: 51978 - DNA, 120 bp, Artificial Sequence
  ENSG00000067606_5 (sequence is synthesized)
tgccaacggccacctcttccaagccaagcgctttaacaggagagcgtactgcggtcagtgcagcgagaggatatggggcctcgcgaggcaaggctacaggtgcatcaactgcaaactgct

SEQ ID NO: 51979 - DNA, 120 bp, Artificial Sequence
  ENSG00000067606_6 (sequence is synthesized)
ggtccataagcgctgccacggcctcgtcccgctgacctgcaggaagcatatggattctgtcatgccttcccaagagcctccagtagacgacaagaacgaggacgccgaccttccttccga

SEQ ID NO: 51980 - DNA, 120 bp, Artificial Sequence
  ENSG00000067606_7 (sequence is synthesized)
ggagacagatggaattgcttacatttcctcatcccggaagcatgacagcattaaagacgactcggaggaccttaagccagttatcgatgggatggatggaatcaaaatctctcaggggct

SEQ ID NO: 51981 - DNA, 120 bp, Artificial Sequence
  ENSG00000067606_8 (sequence is synthesized)
tgggctgcaggactttgacctaatcagagtcatcgggcgcgggagctacgccaaggttctcctggtgcggttgaagaagaatgaccaaatttacgccatgaaagtggtgaagaaagagct

SEQ ID NO: 51982 - DNA, 120 bp, Artificial Sequence
  ENSG00000067606_9 (sequence is synthesized)
gacaagtcggttgttcctggtcattgagtacgtcaacggcggggacctgatgttccacatgcagaggcagaggaagctccctgaggagcacgccaggttctacgcggccgagatctgcat

SEQ ID NO: 51983 - DNA, 120 bp, Artificial Sequence
  ENSG00000067606_10 (sequence is synthesized)
cgccctcaacttcctgcacgagagggggatcatctacagggacctgaagctggacaacgtcctcctggatgcggacgggcacatcaagctcacagactacggcatgtgcaaggaaggcct

SEQ ID NO: 51984 - DNA, 120 bp, Artificial Sequence
  ENSG00000067606_11 (sequence is synthesized)
gggccctggtgacacaacgagcactttctgcggaaccccgaattacatcgcccccgaaatcctgcggggagaggagtacgggttcagcgtggactggtgggcgctgggagtcctcatgtt

SEQ ID NO: 51985 - DNA, 120 bp, Artificial Sequence
  ENSG00000067606_12 (sequence is synthesized)
tgagatgatggccgggcgctccccgttcgacatcatcaccgacaacccggacatgaacacagaggactaccttttccaagtgatcctggagaagcccatccggatcccccggttcctgtc

SEQ ID NO: 51986 - DNA, 120 bp, Artificial Sequence
  ENSG00000067606_13 (sequence is synthesized)
cgtcaaagcctcccatgttttaaaaggatttttaaataaggaccccaaagagaggctcggctgccggccacagactggattttctgacatcaagtcccacgcgttcttccgcagcataga

SEQ ID NO: 51987 - DNA, 120 bp, Artificial Sequence
  ENSG00000067606_14 (sequence is synthesized)
ctgggacttgctggagaagaagcaggcgctccctccattccagccacagatcacagacgactacggtctggacaactttgacacacagttcaccagcgagcccgtgcagctgaccccaga

SEQ ID NO: 51988 - DNA, 120 bp, Artificial Sequence
  ENSG00000067606_15 (sequence is synthesized)
cgatgaggatgccataaagaggatcgaccagtcagagttcgaaggctttgagtatatcaacccattattgctgtccaccgaggagtcggtgtgaggccgcgtgcgtctctgtcgtggaca

SEQ ID NO: 51989 - DNA, 120 bp, Artificial Sequence
  ENSG00000067606_16 (sequence is synthesized)
cgcgtgattgaccctttaactgtatccttaaccaccgcatatgcatgccaggctgggcacggctccgagggcggccagggacagacgcttgcgccgagaccgcagagggaagcgtcagcg

SEQ ID NO: 51990 - DNA, 120 bp, Artificial Sequence
  ENSG00000067606_17 (sequence is synthesized)
ggcgctgctgggagcagaacagtccctcacacctgggcccgggcaggccagcttcgtgctggaggaacttgctgctgtgcctgcgtcgcggcggatccgcggggaccctgccgagggggc

SEQ ID NO: 51991 - DNA, 120 bp, Artificial Sequence
  ENSG00000067606_18 (sequence is synthesized)
tgtcatgcggtttccaaggtgcacattttccacggaaacagaactcgatgcactgacctgctccgccaggaaagtgagcgtgtagcgtcctgaggaataaaatgttccgatgatgtggaa

SEQ ID NO: 51992 - DNA, 120 bp, Artificial Sequence
  ENSG00000067606_19 (sequence is synthesized)
tttcgtgtgagcccacgctggccatgcacagctggcacgatcccttgcggtgtgaatacactgctggggtgggagcgccgtggccagggtcaggattcgagcggttactggcttttggtc

SEQ ID NO: 51993 - DNA, 120 bp, Artificial Sequence
  ENSG00000067606_20 (sequence is synthesized)
ggtcgctgcgggcccggggctgtcgcgggaggtcctcggtccccgcccgtgagcgtcacccgcggacacgtcgtggacagcgcgggctccttccccgggaccgggtttccctggggtcgg

SEQ ID NO: 51994 - DNA, 120 bp, Artificial Sequence
  ENSG00000067606_21 (sequence is synthesized)
gtggtgccgtcctagctctgggctgcagcgtgagactcaggcggcagtcttggataggacccatcttcctgagcccccacaagcccccggcacactctgctcattggggcatgaggctca

SEQ ID NO: 51995 - DNA, 120 bp, Artificial Sequence
  ENSG00000067606_22 (sequence is synthesized)
atttggcaagagggaggctccgtggcacgatcacacgtgcaggagctgggggctgccagagcggctgttcaagatggacttggcaaatcacctctttcaagttgccggctacccggctgc

SEQ ID NO: 51996 - DNA, 120 bp, Artificial Sequence
  ENSG00000067606_23 (sequence is synthesized)
cgtagacagagtgaagtctggtagtttgtgtttatttatttatcttggccagcagagagaattgagtttgcatggagactgtaatttcattctaatctatctaccgccggggagccagaa

SEQ ID NO: 51997 - DNA, 120 bp, Artificial Sequence
  ENSG00000067606_24 (sequence is synthesized)
gaattcccgatgcacctccttccagcacatggactgtcagagccctgcgttgtcgccagcacagcagatctgaaaggcactaggctgtggcctcgcgacggctgagaatctatctaccgc

SEQ ID NO: 51998 - DNA, 120 bp, Artificial Sequence
  ENSG00000067606_25 (sequence is synthesized)
aattttgaaaattgagtctcatgaaatgtaggaaaagatcttattaggaagagaaaccatgtggcccagtccctgagacgggaagggcctgcgtggtcctgatgacatctgcggatcttt

SEQ ID NO: 51999 - DNA, 120 bp, Artificial Sequence
  ENSG00000067606_26 (sequence is synthesized)
taaaatcatacgatcatgtctgcgaaaccgggatgccacttcccacctggcttctccctgaccccagcttgttcccttggagggccggtggactcctcagccttgcagcaatgaaatcag

SEQ ID NO: 52000 - DNA, 120 bp, Artificial Sequence
  ENSG00000067606_27 (sequence is synthesized)
gccttgaggccaccccacccgtgacctgcggtgctgtccccatgcaagaaactgcctcgctccagcccccagcagatcctgtcccagcccccagccctggtccaagccacctccactccc

SEQ ID NO: 52001 - DNA, 120 bp, Artificial Sequence
  ENSG00000067606_28 (sequence is synthesized)
acctggtgacgggccacctccttcattccggggcccacccacacttcccaagtccacacacagtggccaagagtgaaggccggcgaggcccccgcatgactccctcacctgcacccttca

SEQ ID NO: 52002 - DNA, 120 bp, Artificial Sequence
  ENSG00000067606_29 (sequence is synthesized)
cgagcggccccgcagcccgtccccaccagcccctctctgctgccagggtgctcctgctgctctttgctctttgcaagactgaacctgcgggagggttcgggcccacgaaggccgcttctg

SEQ ID NO: 52003 - DNA, 120 bp, Artificial Sequence
  ENSG00000067606_30 (sequence is synthesized)
aaacttgttggcgccaacttttccccagtggggatggtgggaaagaggttggccacagatgcttatcaaggacctgggcccagatgcccctaggaagggctctggtcttgaactgcctgc

SEQ ID NO: 52004 - DNA, 120 bp, Artificial Sequence
  ENSG00000067606_31 (sequence is synthesized)
gtgctgcaggccctgtgcgtgcggaggacggtgcccgagtcagcattttgggtctgagtcccggcgttgccgctgcctgtgcgctgcacagatgctccgggcagcaacacggctggtgcc

SEQ ID NO: 52005 - DNA, 120 bp, Artificial Sequence
  ENSG00000067606_32 (sequence is synthesized)
acggcccggggaaggcgtgcggctgcagcagctcccagcaatgtcaggggaaacgcagtgagaggctgttgttttgcgggtgacagatttttagaaaaataaggctgtggagggaccttc

SEQ ID NO: 52006 - DNA, 120 bp, Artificial Sequence
  ENSG00000067606_33 (sequence is synthesized)
gtccgtccctcggttccgcccccggctgcgcgtctgtccctcgactcggcccctcagctgtgcgccactttctctgtggcccacagtacctccgtctccgccgcttcacacccttctctt

SEQ ID NO: 52007 - DNA, 120 bp, Artificial Sequence
  ENSG00000067606_34 (sequence is synthesized)
tctttctctcttcagagagggttgttgggcaggcagagcatcccccgaggggacaagtcaggcctacggactcctggagccaggacctgccgtaggctggttagggcaggatgcgccctg

SEQ ID NO: 52008 - DNA, 120 bp, Artificial Sequence
  ENSG00000067606_35 (sequence is synthesized)
aaaaaaacaacaaaaaaccaaaacaacaaccagcctccccagtcaggcttgtggggagccgtgggcctggggagactgggctgctgaaggtggggactgggctgctgggggaggcggctt

SEQ ID NO: 52009 - DNA, 120 bp, Artificial Sequence
  ENSG00000067606_36 (sequence is synthesized)
gggaggcggctttccctctcggggggtgctggctgctggggaggctggcagcgcgcccctcccccaggtgcgaagggacctcagcagacgcagggctgctccgcacagccagcttgggcc

SEQ ID NO: 52010 - DNA, 120 bp, Artificial Sequence
  ENSG00000067606_37 (sequence is synthesized)
ctggcaggccaacctgcaggaccccgggcttagctgggttctgttctgatgtcgcattttcaaggtccgctgagtccgagccctgcctgggtctggctgctgcccgcccgctctctggac

SEQ ID NO: 52011 - DNA, 120 bp, Artificial Sequence
  ENSG00000067606_38 (sequence is synthesized)
tgtgctgatgcagagatgcttgttttcctgtgacgtcagcgtcagctcctgcacatccatgccgtgttttagtttgtgcctcagctgctggctacagcttcccgggggagccgggtacca

SEQ ID NO: 52012 - DNA, 120 bp, Artificial Sequence
  ENSG00000067606_39 (sequence is synthesized)
cccgggcctggagacatgaggaggcagggatgtgaggggcgggggacaggacagccggccttccgttaaatatctgctcctcgcgctcgagcctccctgcctattgtcggggccggaggc

SEQ ID NO: 52013 - DNA, 120 bp, Artificial Sequence
  ENSG00000067606_40 (sequence is synthesized)
gagccgacgcagcatcagctcgtcaacgggaaggaagatgcctccctgcacgcccgccgcgcacagagcataaagaatctgcgctgaggaggcaggagaagaaagccgaatctatctacc

SEQ ID NO: 52014 - DNA, 120 bp, Artificial Sequence
  ENSG00000067606_41 (sequence is synthesized)
agaacatcgctcggtgccagacaggcaggacgcagcgggctggcctgcggggctcactgctgccccccggggccgagcacgaaagggagagttggagggcgcttcctcgccgggtgttgc

SEQ ID NO: 52015 - DNA, 120 bp, Artificial Sequence
  ENSG00000067606_42 (sequence is synthesized)
agaatggccccctgatgcttggttactgacaggatgcagctttgggacaggggagatgaccaagcattgtgcaaaatatcccgttgtataaagcacttggtggaaaggtcatggcctgca

SEQ ID NO: 52016 - DNA, 120 bp, Artificial Sequence
  ENSG00000067606_43 (sequence is synthesized)
atattgactgggtacagacagagaagcacgtgtttgagcaggcatccagcaaccccttcctggtcggattacactcctgcttccagacgacaagtcggtaagaaaaagaagggtatttct

SEQ ID NO: 52017 - DNA, 120 bp, Artificial Sequence
  ENSG00000067606_44 (sequence is synthesized)
tttcagatgtgaactgcacagaagctaagtctggtgtgatgtgtcaactgtcacctgtaaggttctcccagttgctgtacgggtgttttcaggccagcagactctctttgttgttctcct

SEQ ID NO: 52018 - DNA, 120 bp, Artificial Sequence
  ENSG00000067606_45 (sequence is synthesized)
tggttggtgtcatattaagtacatttcatgatctgaagttatttaattccatttacgaaatacttactggaggtatcccactgagtgcaggcattgggtcaggtgctggggctacaaaag

SEQ ID NO: 52019 - DNA, 120 bp, Artificial Sequence
  ENSG00000067606_46 (sequence is synthesized)
taagcaaaagaggtggatttctgtgcttattaaaatatgtacagcttcaccttcaagctttatatatactggaattctgtggctttgaatacatttgaaagctgatgatctaggatatta

SEQ ID NO: 52020 - DNA, 120 bp, Artificial Sequence
  ENSG00000067606_47 (sequence is synthesized)
aatgtatgccctgtttaaaattttgggggccagttgactttgacctacctgatttgtttatttgaagagttattaagtatgttctgcattgagtcctcaagaccatccccaggttcgatg

SEQ ID NO: 52021 - DNA, 120 bp, Artificial Sequence
  ENSG00000067606_48 (sequence is synthesized)
attggctaggaggactgctgggatcaatcatggccgcactgggggccacagctggcatactgcactggggagataaaggagacttggccaaggaaaaaggcacatggggaaaattccaga

SEQ ID NO: 52022 - DNA, 120 bp, Artificial Sequence
  ENSG00000067606_49 (sequence is synthesized)
ggccaccccacccgtgacctgcggttgttcctggtcattgagtacgtcaacggcggggacctgatgttccacatgcagaggcagaggaagctccctgaggagcacgccagagacggagtt

SEQ ID NO: 52023 - DNA, 120 bp, Artificial Sequence
  ENSG00000067606_50 (sequence is synthesized)
gtcatgtgtaaatattgaggcccgtttgaactatccctgtgcggaaaaaaaggcctgtttttcacagggctgcctggggaggaggggggtggaaaggaaaacaggcaggggacagacgga

SEQ ID NO: 52024 - DNA, 120 bp, Artificial Sequence
  ENSG00000067606_51 (sequence is synthesized)
cccggcctgcgttggcctggggtgacttcacggctccactgtcagcaagcggccgtcccgtggtggatcctgtccgccctgcgaggacacctggctccatccacacctgggcctctgtct

SEQ ID NO: 52025 - DNA, 120 bp, Artificial Sequence
  ENSG00000067606_52 (sequence is synthesized)
accagcagcacccgctcaccctcaagtgggtggacagcgaaggtagcccttgtcccatgttggccagaatcctcagcctcaggggacttcgccagggcagcctctgtgtgcggagtgtgc

SEQ ID NO: 52026 - DNA, 120 bp, Artificial Sequence
  ENSG00000067606_53 (sequence is synthesized)
tcagccaattctgtggggagacttaaagctgtggaattaaacttgttggcgccaacttttccccagtggggatggtgggaaagaggttggccacagatgcttatcaaggacctgggccca

SEQ ID NO: 52027 - DNA, 120 bp, Artificial Sequence
  ENSG00000067606_54 (sequence is synthesized)
caggagggtcaagtgggaagagagcggccccaccgagtgtgttccaggccccggcggcgtctgagaggaggcggccaaacctagtggggctgcgcgaccgcctgtggaacagtggggacg

SEQ ID NO: 52028 - DNA, 120 bp, Artificial Sequence
  ENSG00000067606_55 (sequence is synthesized)
ctgctggtgtcctccaggcctgggtgggcgggttaccacggaagcctatcaacggatgcctgtgattccctggtatttataggtatgtctattgttttattaaaaaatccagtttcattc

SEQ ID NO: 52029 - DNA, 120 bp, Artificial Sequence
  ENSG00000067606_56 (sequence is synthesized)
ggcggggctgctgccggcctggactcaggaccctcaccctccagcccgcaccctcgactccccaccagccagaccctctgtcctggtgtggacagcacccacatcctggctccacccttg

SEQ ID NO: 52030 - DNA, 120 bp, Artificial Sequence
  ENSG00000067606_57 (sequence is synthesized)
gtcctgaagtggcctggagactgctgagttacttctggaatctgcaccgtgaaagtgaaacctggaccatgatgtgaggctgaatctatctaccgccggggagccagaagatggaggaag

SEQ ID NO: 52031 - DNA, 120 bp, Artificial Sequence
  ENSG00000067606_58 (sequence is synthesized)
ggctcactccatcggggtcctcggatggtggcgaggagcggggctgcggcgtcctgttttctattctgaaatggttggagaatctatctaccgccggggagccagaagatggaggaagct

SEQ ID NO: 52032 - DNA, 120 bp, Artificial Sequence
  ENSG00000067646_0 (sequence is synthesized)
agtgctccagagaaaggccgtcctgcagcacccgccgctgtcgccgaccgcccgcacatccgtcgggtgagtcccgcgtgcccccgcggccgcggggcctagtgcgcgcgcagtaacctg

SEQ ID NO: 52033 - DNA, 120 bp, Artificial Sequence
  ENSG00000067646_1 (sequence is synthesized)
tttgtggcctggtcggcgtcccgtagggcgccctcccgcgctaggccggccggcgtggcgctcggcgccgaacaggccccgaggaggccgcagttaggcctagtgattatccagttgccc

SEQ ID NO: 52034 - DNA, 120 bp, Artificial Sequence
  ENSG00000067646_2 (sequence is synthesized)
tgagcggctgcggaggtgcgctccataagcgggcagggtgggaaaagttcgcccgtttgtccggaaggcagttgatggacctggggtcgacaccactgcggacgcagggcacggcacggg

SEQ ID NO: 52035 - DNA, 120 bp, Artificial Sequence
  ENSG00000067646_3 (sequence is synthesized)
ggcgagaaggcgaaggctgcaggcgtgaggagctgtgactaatgagaattaaaggccatggatgaagatgaatttgaattgcagccacaagagccaaactcattttttgatggaatagga

SEQ ID NO: 52036 - DNA, 120 bp, Artificial Sequence
  ENSG00000067646_4 (sequence is synthesized)
gctgatgctacacacatggatggtgatcagattgttgtggaaatacaagaagcagtttttgtttctaatattgtggattctgacataactgtgcataactttgttcctgatgacccagac

SEQ ID NO: 52037 - DNA, 120 bp, Artificial Sequence
  ENSG00000067646_5 (sequence is synthesized)
tcagttgtaatccaagatgttgttgaagatgttgtcatagaggaggatgttcagtgctcagatatcttagaagaggcagatgtatctgaaaatgtcatcattcctgagcaagtgctggac

SEQ ID NO: 52038 - DNA, 120 bp, Artificial Sequence
  ENSG00000067646_6 (sequence is synthesized)
tcagatgtaactgaagaagtttctttaccacactgcacagtcccagatgatgttttagcttctgacattacttcaacctcaatgtctatgccagaacatgttttaacgagtgaatccatg

SEQ ID NO: 52039 - DNA, 120 bp, Artificial Sequence
  ENSG00000067646_7 (sequence is synthesized)
catgtgtgtgacattggacatgttgaacatatggtgcatgatagtgtagtggaagcagaaatcattactgatcctctgacgagtgacatagtttcagaagaagtattggtagcagactgt

SEQ ID NO: 52040 - DNA, 120 bp, Artificial Sequence
  ENSG00000067646_8 (sequence is synthesized)
gcccctgaagcagtcatagatgccagcgggatctcagtggaccagcaagataatgacaaagccagctgtgaggactacctaatgatttcgttggatgatgctggcaaaatagaacatgat

SEQ ID NO: 52041 - DNA, 120 bp, Artificial Sequence
  ENSG00000067646_9 (sequence is synthesized)
ggttccactggagtgaccatcgatgcagaatcagaaatggatccttgtaaagtggatagcacttgtcctgaagtcatcaaggtgtacatttttaaagctgaccctggagaagatgactta

SEQ ID NO: 52042 - DNA, 120 bp, Artificial Sequence
  ENSG00000067646_10 (sequence is synthesized)
ggtggaactgtagacattgtggagagtgaacctgaaaatgatcatggagttgaactacttgatcagaacagcagtattcgtgttcccagggaaaagatggtttatatgactgtcaatgac

SEQ ID NO: 52043 - DNA, 120 bp, Artificial Sequence
  ENSG00000067646_11 (sequence is synthesized)
tctcaacaagaagatgaagatttaaatgttgctgaaattgctgatgaagtttatatggaagtgatcgtaggagaggaggatgctgctgttgcagcagcagcagctgctgtgcatgagcag

SEQ ID NO: 52044 - DNA, 120 bp, Artificial Sequence
  ENSG00000067646_12 (sequence is synthesized)
caaattgatgaggatgaaatgaaaaccttcgtaccaattgcatgggcagcagcttatggtaataattctgatggaattgaaaaccggaatggcactgcaagtgccctcttgcacatagat

SEQ ID NO: 52045 - DNA, 120 bp, Artificial Sequence
  ENSG00000067646_13 (sequence is synthesized)
gagtctgctggccttggcagactggctaaacagaaaccaaagaaaaagagaagacctgattccaggcagtaccaaacagcaataattattggccctgatggtcatcctttgactgtctat

SEQ ID NO: 52046 - DNA, 120 bp, Artificial Sequence
  ENSG00000067646_14 (sequence is synthesized)
ccttgcatgatttgtgggaagaagtttaagtcgaggggttttttgaaaagacacatgaaaaaccatcctgaacaccttgccaagaagaagtaccactgtactgactgtgattacactacc

SEQ ID NO: 52047 - DNA, 120 bp, Artificial Sequence
  ENSG00000067646_15 (sequence is synthesized)
aataagaagataagtttacataaccacctggagagccacaagctgaccagcaaggcagagaaggccattgaatgtgatgagtgtgggaagcatttttctcatgcaggggctttgtttact

SEQ ID NO: 52048 - DNA, 120 bp, Artificial Sequence
  ENSG00000067646_16 (sequence is synthesized)
cacaaaatggtgcataaggaaaaaggggccaacaaaatgcacaagtgtaaattctgtgaatatgagacagctgaacaggggttattgaatcgccacctcttggcagtccacagcaagaac

SEQ ID NO: 52049 - DNA, 120 bp, Artificial Sequence
  ENSG00000067646_17 (sequence is synthesized)
tttcctcatatttgtgtggagtgtggtaaaggtttccgacacccgtcggaactgagaaagcacatgcgaatccataccggcgagaagccataccaatgccagtactgtgaatataggtct

SEQ ID NO: 52050 - DNA, 120 bp, Artificial Sequence
  ENSG00000067646_18 (sequence is synthesized)
gcagactcttctaacttgaaaacacatataaaaacaaagcatagtaaagagatgccattcaagtgtgacatttgtcttctgactttctcagataccaaagaagtgcagcaacatactctt

SEQ ID NO: 52051 - DNA, 120 bp, Artificial Sequence
  ENSG00000067646_19 (sequence is synthesized)
gtccaccaagaaagcaaaacacatcagtgtttgcattgcgaccacaagagttcaaactcaagtgatttgaaacgacatgtaatttcagttcatacgaaagactatcctcataagtgtgag

SEQ ID NO: 52052 - DNA, 120 bp, Artificial Sequence
  ENSG00000067646_20 (sequence is synthesized)
atgtgcgagaaaggctttcacaggccttcagaacttaagaaacatgtggctgtccacaaaggtaaaaaaatgcaccaatgtagacattgtgactttaagattgcagacccatttgttcta

SEQ ID NO: 52053 - DNA, 120 bp, Artificial Sequence
  ENSG00000067646_21 (sequence is synthesized)
agtcgccatattctctcagttcacacaaaggatcttccatttaggtgtaagagatgtagaaagggatttaggcaacaaaatgagcttaaaaagcatatgaagacacacagtggcaggaaa

SEQ ID NO: 52054 - DNA, 120 bp, Artificial Sequence
  ENSG00000067646_22 (sequence is synthesized)
gcacgttatttccattcatacaaaagactatcctcatcggtgtgagtactgcaagaaaggcttccgaagaccttcagaaaagaaccagcacataatgagacaccataaagaagttggtct

SEQ ID NO: 52055 - DNA, 120 bp, Artificial Sequence
  ENSG00000067646_23 (sequence is synthesized)
gccctaacagtgtgtctacaagcttgtaaagatgttggccttgaagcagaaaattcattttttaaagccagtcttgttcacatccattactatacattgaattatgctgtgtaaaaatag

SEQ ID NO: 52056 - DNA, 120 bp, Artificial Sequence
  ENSG00000067646_24 (sequence is synthesized)
aattattgcttctagtccacttttctttacattttattcaatacgctgtcctgaatcctattcagtttctttaatagatgaggaaaaatagcaacaagcaagttgcttataataaaataa

SEQ ID NO: 52057 - DNA, 120 bp, Artificial Sequence
  ENSG00000067646_25 (sequence is synthesized)
tttgtgattctatactgaattttcagtcataaaagctttactatttatttacatatttattcatgttcatggtactcttctaagacaaaatcagattgataactatgaaagtaacatttt

SEQ ID NO: 52058 - DNA, 120 bp, Artificial Sequence
  ENSG00000067646_26 (sequence is synthesized)
tgacccatttcctcctacacaagtgtttcacattggagacatctgctaatataaatgggaggttttactgtcaagtccaattagcaaaacgtggtaataatttttttgtcagtattttca

SEQ ID NO: 52059 - DNA, 120 bp, Artificial Sequence
  ENSG00000067646_27 (sequence is synthesized)
gattacatgataaaattttacatttgagcttctagcattgattaatataggatattgaccacgtttatgtttaaatttcattttgttcagcagacaaaatgtacttcccttaactttcat

SEQ ID NO: 52060 - DNA, 120 bp, Artificial Sequence
  ENSG00000067646_28 (sequence is synthesized)
taatagtgtttacatcttttgtcagcacagcaaacttttagaaagtaatagttttacttatttttatcttctgttttctctttgtactgctttgtcttgcattgtgttccaacacatgag

SEQ ID NO: 52061 - DNA, 120 bp, Artificial Sequence
  ENSG00000067646_29 (sequence is synthesized)
acttactgctcactgaattttggagtcttttagaggtaaattgtggactcaggattttttgaaacttggtgtgtaactctaaatcttgtatatgcatctttgttgcttattacatattta

SEQ ID NO: 52062 - DNA, 120 bp, Artificial Sequence
  ENSG00000067646_30 (sequence is synthesized)
cacacacaaccacaaattttaaacttatgatgaaaatttacaataacctgaaagatccagagatgtatgagagcattttgtaacttgttattcagttactaaatttgaggtgaataatta

SEQ ID NO: 52063 - DNA, 120 bp, Artificial Sequence
  ENSG00000067646_31 (sequence is synthesized)
aaaagaaaaggacattaggagagtgaaaatcttctcttcaaataatctttgatagataaaaatggaaggtaagatgtttctagatagaatgttttcatacaatttcagcttcatatcata

SEQ ID NO: 52064 - DNA, 120 bp, Artificial Sequence
  ENSG00000067646_32 (sequence is synthesized)
aatttttctggaaagctatttcagacatagatttcatagtatttttctgagaatcctgtgaaggaacgctgtctctttgcaaagtaaggaggactaagggaaaatgatggtaccatgtaa

SEQ ID NO: 52065 - DNA, 120 bp, Artificial Sequence
  ENSG00000067646_33 (sequence is synthesized)
cagaatgagagctaattccaaattagcaacttcatcctgctttctattttacattgagtaaagttttaaaaagacaacagtcaagttgattttgattagaagataaaagtacataatgaa

SEQ ID NO: 52066 - DNA, 120 bp, Artificial Sequence
  ENSG00000067646_34 (sequence is synthesized)
attttgattagaagataaaagtacataatgaaaatccatggccttatttggaatatatatcactttccaaattttattatttatttgagagttaataagttaatgttattaagcagttaa

SEQ ID NO: 52067 - DNA, 120 bp, Artificial Sequence
  ENSG00000067646_35 (sequence is synthesized)
attcatataattaaaaagaatttggttaataagaatttggagaatggaaaatacatttttaggttccttaatttggctgttggtacctgtgtatttggaatattttaggggattcgaatt

SEQ ID NO: 52068 - DNA, 120 bp, Artificial Sequence
  ENSG00000067646_36 (sequence is synthesized)
ttttttaacccacattacagctaccttctagctttagtatggtagtgcttcattcaacttttgctgtcaggtttttattttcacctttttctgtgccaccaattcaaaagttataggatt

SEQ ID NO: 52069 - DNA, 120 bp, Artificial Sequence
  ENSG00000067646_37 (sequence is synthesized)
aggaaatataaatttatatttggtgattggcagcctctgaaatgttagattaatttgatctagttctaaagtgctttagtcatatatgaatttaaacctagtaccatccaaaaccatgta

SEQ ID NO: 52070 - DNA, 120 bp, Artificial Sequence
  ENSG00000067646_38 (sequence is synthesized)
atggattttaagaatctgttaggccttcttagcctttatacatgtccctacctgatttttactgtccttcatgatcctgttcttgaaaacttcagtttgtatttgagaatcctttaaatc

SEQ ID NO: 52071 - DNA, 120 bp, Artificial Sequence
  ENSG00000067646_39 (sequence is synthesized)
tccttccaatttgttttctccctgaagtaatataaaaggaagtatttaagtgaaagtttaagagttttaaaacattctttaaaattaatacagatagttagctatttatcttttaaaaat

SEQ ID NO: 52072 - DNA, 120 bp, Artificial Sequence
  ENSG00000067646_40 (sequence is synthesized)
aaactaaggtaaaaaacgtgacactttacatatttcatatttttcatatagtctggaggtatacacagttgttttgtttttaaccacggtattgaaacctttaaaaggtaattaagcatt

SEQ ID NO: 52073 - DNA, 120 bp, Artificial Sequence
  ENSG00000067646_41 (sequence is synthesized)
tggtcaagtaaatatagaacatttgtataaagaaagaaatgaaattgtgcttaatgttatatactgttattatttgcaggctggttttaattcttaatttgattagcaaagctaaaaaag

SEQ ID NO: 52074 - DNA, 120 bp, Artificial Sequence
  ENSG00000067646_42 (sequence is synthesized)
tggatgttgaagttgaaagttttaaagaggtacaaaatcttacaaggacataaattattatttggttgaaaaatagcctattagatattgtatgtcccttcctctgtacaaattgtaaaa

SEQ ID NO: 52075 - DNA, 120 bp, Artificial Sequence
  ENSG00000067646_43 (sequence is synthesized)
ccttcctctgtacaaattgtaaaatacttaaaataactatgaagaattcatataggaagtgtgatactattgtaaatgtgtatttgagaatatgcaaaaataaaaataatattttactgt

SEQ ID NO: 52076 - DNA, 120 bp, Artificial Sequence
  ENSG00000067646_44 (sequence is synthesized)
gacggcgggcccgtgccggggagctgggccgctttttgtcagctccgaactcggcccctcctccctccctccgcccgccctaccagccggagcccggcccagtgctccagagaaaggccg

SEQ ID NO: 52077 - DNA, 120 bp, Artificial Sequence
  ENSG00000067646_45 (sequence is synthesized)
aaataaagtaaggactttctgtcattcatgagtgtcaggacttcttgttgttaataaagaattcgtaattctttagaatttataatgttgtgtaattctgtgttttaatgcacattgtta

SEQ ID NO: 52078 - DNA, 120 bp, Artificial Sequence
  ENSG00000067704_0 (sequence is synthesized)
actcggctccccttggtttcctggggtcctgccccttcaagctggggcgggagcggaggaccccgctctcaggggttgccggaccatgcgttgggggctgcgccctcgcgggccgggcgc

SEQ ID NO: 52079 - DNA, 120 bp, Artificial Sequence
  ENSG00000067704_1 (sequence is synthesized)
ggccgccctggccactgcccgaagtttgtgggggacgccccgccttccctgcagcccgggatggcaaggggcgacgaagaggcttctggtgcggtcggtctccggggccagtaaccacca

SEQ ID NO: 52080 - DNA, 120 bp, Artificial Sequence
  ENSG00000067704_2 (sequence is synthesized)
gccgaactcgaatagtggcagataccgggacacggtgctgctgccgcagacgagcttccccatgaagctgctgggccgccagcagccggacacggagctggagatccagcagaaatgtgg

SEQ ID NO: 52081 - DNA, 120 bp, Artificial Sequence
  ENSG00000067704_3 (sequence is synthesized)
attttcagaactttattcatggcaaagagaaagaaaagtaaagacagaattttgccttcatgatggacctccttatgcaaacggtgaccctcatgttggacatgctttaaataagatttt

SEQ ID NO: 52082 - DNA, 120 bp, Artificial Sequence
  ENSG00000067704_4 (sequence is synthesized)
gaaagacatagccaatcgattccatatgatgaatggctccaaaatacattttgtgcccggctgggattgtcatgggttgcccattgaaataaaagtattatcagaacttggtagagaagc

SEQ ID NO: 52083 - DNA, 120 bp, Artificial Sequence
  ENSG00000067704_5 (sequence is synthesized)
tcagaatctttcagctatggaaattagaaagaaagctagatcatttgctaaagcagccattgagaaacagaaatcagcatttattcgttggggaataatggcagattggaataattgcta

SEQ ID NO: 52084 - DNA, 120 bp, Artificial Sequence
  ENSG00000067704_6 (sequence is synthesized)
ctatacatttgatgggaagtatgaagccaaacagttgagaactttttaccaaatgtatgataagggcttggtttatcgatcttacaaacctgtgttttggtctccgtcatctaggactgc

SEQ ID NO: 52085 - DNA, 120 bp, Artificial Sequence
  ENSG00000067704_7 (sequence is synthesized)
attggctgaagcagaacttgaatataatcctgagcatgtcagtcgttcaatatatgtaaaatttcctctcttaaagccttctccaaaattggcatctcttatagatggttcatctcctgt

SEQ ID NO: 52086 - DNA, 120 bp, Artificial Sequence
  ENSG00000067704_8 (sequence is synthesized)
tagtattttggtctggaccacacaaccttggacgattccagccaatgaagctgtttgctatatgcctgaatcaaagtatgctgttgtgaaatgttctaagtctggagacctctacgtact

SEQ ID NO: 52087 - DNA, 120 bp, Artificial Sequence
  ENSG00000067704_9 (sequence is synthesized)
ggcggcagataaagtagcatctgttgcttctactttggaaacaacatttgagactatttcaacactttcaggtgtagatttggaaaatggtacttgcagtcatccattaattcctgataa

SEQ ID NO: 52088 - DNA, 120 bp, Artificial Sequence
  ENSG00000067704_10 (sequence is synthesized)
agcctctcctcttttacctgcaaatcatgtgaccatggcaaaaggaacgggattggttcacacagccccagctcatggtatggaagactacggtgtagcgtctcagcacaacctgcccat

SEQ ID NO: 52089 - DNA, 120 bp, Artificial Sequence
  ENSG00000067704_11 (sequence is synthesized)
ggattgtctagtggacgaagatggagttttcacagatgttgcaggtcctgaacttcaaaacaaggctgtccttgaagagggaactgatgtggttataaagatgcttcagactgcaaagaa

SEQ ID NO: 52090 - DNA, 120 bp, Artificial Sequence
  ENSG00000067704_12 (sequence is synthesized)
tttgttgaaagaggagaaattggtgcatagctatccgtatgactggaggaccaagaaacctgtggttattcgtgccagcaagcagtggtttataaacatcacggatattaagactgcagc

SEQ ID NO: 52091 - DNA, 120 bp, Artificial Sequence
  ENSG00000067704_13 (sequence is synthesized)
caaggaattgttaaaaaaggtgaaatttattcctggatcagcactgaatggcatggttgaaatgatggacaggcggccatattggtgtatatcaaggcaaagagtttggggtgttccaat

SEQ ID NO: 52092 - DNA, 120 bp, Artificial Sequence
  ENSG00000067704_14 (sequence is synthesized)
ccactgagcatattgttaaactagtggaacaacacggcagtgatatctggtggactcttccccctgaacaacttcttccaaaagaagtcttatctgaggttggtggccctgatgccttgg

SEQ ID NO: 52093 - DNA, 120 bp, Artificial Sequence
  ENSG00000067704_15 (sequence is synthesized)
aatatgtgccaggtcaggatattttggacatctggtttgatagcggaacttcatggtcttatgttcttccaggtcctgaccaaagagcagatttgtacttggaaggaaaagaccagctcg

SEQ ID NO: 52094 - DNA, 120 bp, Artificial Sequence
  ENSG00000067704_16 (sequence is synthesized)
ggggttggtttcagtcatccttattaacaagtgtggcagcaaggaagagagcaccttataagacagtgattgttcatggatttacccttggagaaaagggagaaaagatgtccaagtctc

SEQ ID NO: 52095 - DNA, 120 bp, Artificial Sequence
  ENSG00000067704_17 (sequence is synthesized)
ttgggaatgtcattcatcctgatgttgtcgttaatggaggacaagatcaaagcaaagagcctccgtatggtgctgatgtccttcgctggtgggtagctgattccaatgtcttcaccgaag

SEQ ID NO: 52096 - DNA, 120 bp, Artificial Sequence
  ENSG00000067704_18 (sequence is synthesized)
ttgcaattggcccatccgtgctcaatgctgccagagatgatattagcaagcttaggaatacacttcgctttcttttgggaaatgtggctgatttcaacccagaaacagattccatccctg

SEQ ID NO: 52097 - DNA, 120 bp, Artificial Sequence
  ENSG00000067704_19 (sequence is synthesized)
taaacgatatgtatgtcatagaccagtacatgctacacttactgcaggatttggcaaacaagattaccgaattatacaaacaatatgattttggaaaagttgttcggctgttacggacgt

SEQ ID NO: 52098 - DNA, 120 bp, Artificial Sequence
  ENSG00000067704_20 (sequence is synthesized)
tttataccagagagctctctaacttttatttcagtataatcaaagataggctctattgtgaaaaggaaaatgaccccaaacgacgctcttgtcagactgcattagttgaaattttggatg

SEQ ID NO: 52099 - DNA, 120 bp, Artificial Sequence
  ENSG00000067704_21 (sequence is synthesized)
taatagttcgttcttttgctcccattcttcctcacctggctgaagaggtgttccagcacataccttatattaaagagcccaagagtgttttccgtactgggtggattagtactagttcta

SEQ ID NO: 52100 - DNA, 120 bp, Artificial Sequence
  ENSG00000067704_22 (sequence is synthesized)
tctggaaaaagcccgggttggaagaagctgtggagagtgcgtgtgcaatgcgagactcatttcttggaagcatccctggcaaaaatgcagctgagtacaaggttatcactgtgatagaac

SEQ ID NO: 52101 - DNA, 120 bp, Artificial Sequence
  ENSG00000067704_23 (sequence is synthesized)
ctggactgctttttgagataatagagatgctgcagtctgaagagacttccagcacctctcagttgaatgaattaatgatggcttctgagtcaactttactggctcaggaaccacgagaga

SEQ ID NO: 52102 - DNA, 120 bp, Artificial Sequence
  ENSG00000067704_24 (sequence is synthesized)
tgactgcagatgtaatcgagcttaaagggaaattcctcatcaacttagaaggtggtgatattcgtgaagagtcttcctataaagtaattgtcatgccgactacgaaagaaaaatgccccc

SEQ ID NO: 52103 - DNA, 120 bp, Artificial Sequence
  ENSG00000067704_25 (sequence is synthesized)
gttgttggaagtatacagcggagtcttcagatacactgtgtcctcgatgtgcagaagttgtcagtggaaaatagtattaacagctcactcgagcaagaaccctcctgacagtactggcta

SEQ ID NO: 52104 - DNA, 120 bp, Artificial Sequence
  ENSG00000067704_26 (sequence is synthesized)
gaagtttggatggattatttacaatataggaaagaaagccaagatttaggtaatgagtggatgagtaaatggtggaggatgggagtcaaaatcagaattatagaagaagtatttcctgta

SEQ ID NO: 52105 - DNA, 120 bp, Artificial Sequence
  ENSG00000067704_27 (sequence is synthesized)
actatagaaagaattatgtatatatacatgcagaaatatatatgtgtgtgtgtatctgtggatggatatatgtatatctcttcctatatatatccatagtggacttattcagaacataga

SEQ ID NO: 52106 - DNA, 120 bp, Artificial Sequence
  ENSG00000067704_28 (sequence is synthesized)
tatgtattcagcttgtcttcaaatacggccaagcagaaaatgttttatattttataaatcatcttttgactctgtatttaaattctatgatactgaaaataaaggcattctggaaaaata

SEQ ID NO: 52107 - DNA, 120 bp, Artificial Sequence
  ENSG00000067704_29 (sequence is synthesized)
ggaagagagcaccttataatgtcctgtaagaatttgaagtaaaaaaagagaaaggaaaaaggagacaacaccaaggtgtcttgatcgcattcagtcacccaggctggagtgcaatggtgt

SEQ ID NO: 52108 - DNA, 120 bp, Artificial Sequence
  ENSG00000067704_30 (sequence is synthesized)
taacattgggttatgtgtaactttactatgcaattattctattatgttccttttcacatactttttcacttttaaatatcttttaataaattaagcaaagtcatgcacatttaaaaaaaa

SEQ ID NO: 52109 - DNA, 120 bp, Artificial Sequence
  ENSG00000067704_31 (sequence is synthesized)
agctgtaatagaggaaacagacatgaccagggaagagattaggtatgagcatttgtgcattgaacaagattgcagagcacgctctttctttttccagttttgtttttagatacagtctaa

SEQ ID NO: 52110 - DNA, 120 bp, Artificial Sequence
  ENSG00000067704_32 (sequence is synthesized)
tttgagattgttagcccgcatttcattacagtgctagtatagtttgtacttacattgtgctcaaaaatatctgaataggagctttacctaaaacatttgttcggctaattggaattgaaa

SEQ ID NO: 52111 - DNA, 120 bp, Artificial Sequence
  ENSG00000067715_0 (sequence is synthesized)
agtgtctttccacctcctcctgcagcagcggcagcggcagcagcagttagcagcggcaacttgaggctgcaccccgggcaagtccccagggtggtgctcagccgagaggggggcttggcg

SEQ ID NO: 52112 - DNA, 120 bp, Artificial Sequence
  ENSG00000067715_1 (sequence is synthesized)
ccccgaaggggtgtgtgtagggtgggggcgaccacgtgggaccagctggtggccctggaaaacctcccacacacccacacccacacaccccttttgtgttgcaggctgcccctccaagag

SEQ ID NO: 52113 - DNA, 120 bp, Artificial Sequence
  ENSG00000067715_2 (sequence is synthesized)
cggaggcagcgagagtacgcgtgtgcctcgcgccggtccacgcggggagagcactggggaccgagacccggcaccacctcccggtccgccctccagggaaaacgggaaaactagcaagag

SEQ ID NO: 52114 - DNA, 120 bp, Artificial Sequence
  ENSG00000067715_3 (sequence is synthesized)
ctagcaagaactagcaagagcttgaacaaacgcctggactcagattggaagactgctcatttgtctactgcctcattcctggaaattgcactggaactgtctgattaagaaaaacagaat

SEQ ID NO: 52115 - DNA, 120 bp, Artificial Sequence
  ENSG00000067715_4 (sequence is synthesized)
aattctgaaagaaagaaaacaaagaaaaacatactccagaattcctaatagaacacttcacctgaacctaaaatggtgagcgagagtcaccatgaggccctggcagccccgcctgtcacc

SEQ ID NO: 52116 - DNA, 120 bp, Artificial Sequence
  ENSG00000067715_5 (sequence is synthesized)
actgtcgcgactgttctgccaagcaacgccacagagccagccagtcctggagaaggaaaggaagatgcattttctaagctgaaggagaagtttatgaatgagttgcataaaattccattg

SEQ ID NO: 52117 - DNA, 120 bp, Artificial Sequence
  ENSG00000067715_6 (sequence is synthesized)
ccaccgtgggccttaattgcaatagccatagtcgcagtccttttagtcctgacctgctgcttttgtatctgtaagaaatgtttgttcaaaaagaaaaacaagaagaagggaaaggaaaaa

SEQ ID NO: 52118 - DNA, 120 bp, Artificial Sequence
  ENSG00000067715_7 (sequence is synthesized)
ggagggaagaatgccattaacatgaaagatgtaaaagacttagggaagacgatgaaagatcaggccctcaaggatgatgatgctgaaactggattgacagatggagaagaaaaagaagaa

SEQ ID NO: 52119 - DNA, 120 bp, Artificial Sequence
  ENSG00000067715_8 (sequence is synthesized)
cccaaagaagaggagaaactgggaaaacttcagtattcactggattatgatttccaaaataaccagctgctggtagggatcattcaggctgccgaactgcccgccttggacatggggggc

SEQ ID NO: 52120 - DNA, 120 bp, Artificial Sequence
  ENSG00000067715_9 (sequence is synthesized)
acatctgatccttacgtgaaagtgtttctgctacctgataagaagaagaaatttgagacaaaagtccaccgaaaaacccttaatcctgtcttcaatgagcaatttactttcaaggtacca

SEQ ID NO: 52121 - DNA, 120 bp, Artificial Sequence
  ENSG00000067715_10 (sequence is synthesized)
tactcggaattgggtggcaaaaccctagtgatggctgtatatgattttgatcgtttctctaagcatgacatcattggagaatttaaagtccctatgaacacagtggattttggccatgta

SEQ ID NO: 52122 - DNA, 120 bp, Artificial Sequence
  ENSG00000067715_11 (sequence is synthesized)
actgaggaatggcgtgacctgcaaagtgctgagaaggaagagcaagagaaattgggtgatatctgcttctcccttcgctacgtacctactgctggtaagctgactgttgtcattctggag

SEQ ID NO: 52123 - DNA, 120 bp, Artificial Sequence
  ENSG00000067715_12 (sequence is synthesized)
gcaaagaacctgaagaagatggatgtgggtggcttatccgatccttatgtgaagattcatctgatgcagaatggtaagaggctgaagaagaaaaagacaacaattaaaaagaacacactt

SEQ ID NO: 52124 - DNA, 120 bp, Artificial Sequence
  ENSG00000067715_13 (sequence is synthesized)
aacccctactacaatgagtcattcagctttgaagtaccttttgaacaaatccagaaagtgcaggtggtggtaactgttttggactatgacaagattggcaagaacgatgccatcggcaaa

SEQ ID NO: 52125 - DNA, 120 bp, Artificial Sequence
  ENSG00000067715_14 (sequence is synthesized)
gtctttgtgggctacaacagcaccggcgcggagctgcgacactggtcagacatgctggccaaccccaggcgacctattgcccagtggcacaccctgcaggtagaggaggaagttgatgcc

SEQ ID NO: 52126 - DNA, 120 bp, Artificial Sequence
  ENSG00000067715_15 (sequence is synthesized)
atgctggccgtcaagaagtaaaggaaagaagaagcctttctgcatttgcccatatagtgctctttagccagtatctgtaaatacctcagtaatatgggtcctttcatttttccagccatg

SEQ ID NO: 52127 - DNA, 120 bp, Artificial Sequence
  ENSG00000067715_16 (sequence is synthesized)
cattcctaacacaattcagtggtacttggaatcctgttttaatttgcacaaatttaaatgtagagagcccctaagtccttcatcataccactgccctccaaatctactcttcttttaagc

SEQ ID NO: 52128 - DNA, 120 bp, Artificial Sequence
  ENSG00000067715_17 (sequence is synthesized)
aatatgatgtgtagatagagcatgaatgaaattatttattgtatcacactgttgtatataccagtatgctaaagatttatttctagtttgtgtatttgtatgttgtaagcgtttcctaat

SEQ ID NO: 52129 - DNA, 120 bp, Artificial Sequence
  ENSG00000067715_18 (sequence is synthesized)
ctgtgtatatctagatgtttttaataagatgttctattttaaactatgtaaattgactgagatataggagagctgataatatattatacggtaaatatagtatcgtctgcattccagcaa

SEQ ID NO: 52130 - DNA, 120 bp, Artificial Sequence
  ENSG00000067715_19 (sequence is synthesized)
acagttaaactgacatcttaaaggacaacttaaacctgagctttctattgaatcatttgagtaccaagataaacttacaccacatacttggtgggtgaatccaattttgtagaattccta

SEQ ID NO: 52131 - DNA, 120 bp, Artificial Sequence
  ENSG00000067715_20 (sequence is synthesized)
cacaggcaaaatagcatgatctgagcagcagcatccaggctgacctcaaggaagcatagccacaaaacagaatagcacctgtctgtacatatttacaaagctaaaataatggcttcactc

SEQ ID NO: 52132 - DNA, 120 bp, Artificial Sequence
  ENSG00000067715_21 (sequence is synthesized)
aaagctaaaataatggcttcactcttatatttgaggaagcaactgaacaggagtcaatgatttcatattactgcatatagaataacaacaaggtgttccgtgtgtgtgtgtgtgtgtgtg

SEQ ID NO: 52133 - DNA, 120 bp, Artificial Sequence
  ENSG00000067715_22 (sequence is synthesized)
tggggatgggggagaagaagctaaggggagaagtcaacatttatgaaatattgcctgactatttaaaaagaaaaaagtagctctccattatcacctttatacaaaatgtacatcctgtga

SEQ ID NO: 52134 - DNA, 120 bp, Artificial Sequence
  ENSG00000067715_23 (sequence is synthesized)
attctgttccagatttcacacctacaataattccaaaaggtttgcacattagagtttgtaacaaaatattttattatataaaaccaggttagaaggaatgcaggatatttttaacacaac

SEQ ID NO: 52135 - DNA, 120 bp, Artificial Sequence
  ENSG00000067715_24 (sequence is synthesized)
aatctgtgcttattacacaaaattactttgtggtaaacagacagtattgtaatcccatcaaaagatgaaagaaaaacaaaaacaaaaaccaacaacaattagccatagttctgaatgcac

SEQ ID NO: 52136 - DNA, 120 bp, Artificial Sequence
  ENSG00000067715_25 (sequence is synthesized)
ttcaattaagccaaaacagacagctagtgatctttttatatgctctttttacttaagttttaatttgtcctttaaaaaaaggtgaaacaaaccaagaacaagttctagaaaactgaagca

SEQ ID NO: 52137 - DNA, 120 bp, Artificial Sequence
  ENSG00000067715_26 (sequence is synthesized)
acctcttatgtatactagatgcttgatttaggaggagtttttaaacgttttcaatgttattatgtagtaaatgacactattatgaagctactagtcattccataagagtcttaaaggact

SEQ ID NO: 52138 - DNA, 120 bp, Artificial Sequence
  ENSG00000067715_27 (sequence is synthesized)
gctctgtgtaacactgtgactgccgtgtgtgcttagacccgtagtttcctcagtggatagcactcaatttattccgtagtgatattgtaacaatactgccattcccttctactgcactgc

SEQ ID NO: 52139 - DNA, 120 bp, Artificial Sequence
  ENSG00000067715_28 (sequence is synthesized)
ccaaggtgtgtgtagcacaaacagttctcattacaaaggaccaattcagaactgaaaagctatgcataggacaaggaagatacatagaatggggtggaacacagcattttgtcaagcact

SEQ ID NO: 52140 - DNA, 120 bp, Artificial Sequence
  ENSG00000067715_29 (sequence is synthesized)
gtgcaatattccatatttttccccactatggtagacaaccatttcgtggaagggcagcctattatcccacactgcatctagccttttgtcccattcacttctgtgatccattttaatttc

SEQ ID NO: 52141 - DNA, 120 bp, Artificial Sequence
  ENSG00000067715_30 (sequence is synthesized)
caggccacaagacagtagtgatgctctgaaatgaaagtttgtcttcacaaatatcaaaacaaaatggaggaaaactaagcattggcctcatgttcagtcttcaggatatcacaccacgtc

SEQ ID NO: 52142 - DNA, 120 bp, Artificial Sequence
  ENSG00000067715_31 (sequence is synthesized)
ttttcaaaaactaaagagaattcaaaaagggctgatggtaggctttgaacatggggttggctgtttcccagtaaaactggaattcctgtcgttactgtttccttatcaaagaaggggcaa

SEQ ID NO: 52143 - DNA, 120 bp, Artificial Sequence
  ENSG00000067715_32 (sequence is synthesized)
gctcttttgccttttaggccagacatagcaaacgctttataattggcatagacataaaggataaaaggaaaataaccgtctgccgatggtccgtacttcttaaaaaacataggtaataga

SEQ ID NO: 52144 - DNA, 120 bp, Artificial Sequence
  ENSG00000067715_33 (sequence is synthesized)
aaatatacacaagtcagaatgtgaaattaaataatggtttgaacagaaaattcaaacaagactctttccaatttaaagggccaaaccctaccaaagagagggagttgactggcttttaaa

SEQ ID NO: 52145 - DNA, 120 bp, Artificial Sequence
  ENSG00000067715_34 (sequence is synthesized)
aagtatttaaataccacaaatgacatttaatttcactgtattcagctttaagttgttcacaatgaaaccacactttcaaacaagcaggttcaagctgctgaatagacattatttcttgca

SEQ ID NO: 52146 - DNA, 120 bp, Artificial Sequence
  ENSG00000067715_35 (sequence is synthesized)
ttaaaataccactaatgcattctcttgcaacactgccagacatgggattgtcaccatagaattagttggtactatgccatctttcactctttcacaagtcagtgatggaacctgctttat

SEQ ID NO: 52147 - DNA, 120 bp, Artificial Sequence
  ENSG00000067715_36 (sequence is synthesized)
gaccaagattcatcctcaaataagccacatgtacccttctgacaaagctgtgtaaagtattagaatctgatgctctagaaagatcctagttgcctttgtgtatatttactgcctgcttga

SEQ ID NO: 52148 - DNA, 120 bp, Artificial Sequence
  ENSG00000067715_37 (sequence is synthesized)
gtgtttctatgtgtgggttttccctgtatcttgtagaaatgttggggtgttttcctctgccatatggctcgtggcctgcgagccaactatttcagctgtattttaccttcatttttgatg

SEQ ID NO: 52149 - DNA, 120 bp, Artificial Sequence
  ENSG00000067715_38 (sequence is synthesized)
aggtgatttaaattttgtttcactttgtgtagtgaattccacagtagttttctgattgttgttaaaaatgacttaacatattacacagatattcaataaaaatgttttatttcctgttga

SEQ ID NO: 52150 - DNA, 120 bp, Artificial Sequence
  ENSG00000067715_39 (sequence is synthesized)
atctcggctccaccgcacccttcgcgggaagtccccaggcttccagcaaagctcagcttatcccgcccccgcttccaacccggaaccccagaagaacagcatgatgagcctccggcagcc

SEQ ID NO: 52151 - DNA, 120 bp, Artificial Sequence
  ENSG00000067715_40 (sequence is synthesized)
aggtgggccacctccccgcggctcagtttgaggacacttgtgcggaaccctttcacatccccaccctacccagctttcacaactccgccgggttaaatggccaaagacaaacttctacct

SEQ ID NO: 52152 - DNA, 120 bp, Artificial Sequence
  ENSG00000067715_41 (sequence is synthesized)
atcttggctcctccctgattctaccaccaagaataaaatagttgtttgtcccctacagtagaacaagtttgcccattcatccttgtgatagatatgcatgcaaaaccaaaatgaaatcaa

SEQ ID NO: 52153 - DNA, 120 bp, Artificial Sequence
  ENSG00000067715_42 (sequence is synthesized)
aatactcagagataatattaatgagagcctagagtttttttcttttaaaatggggttccatggctttgggcagaaatgatttttatatgtatcatgattgaaaaaactctcagtacaaga

SEQ ID NO: 52154 - DNA, 120 bp, Artificial Sequence
  ENSG00000067715_43 (sequence is synthesized)
tgatgcacttctttatacaggaatggaataaaccaaaaaaaaagtatacttagaaaactcttaaatgacaatacaactatgaatcttaaacatttttgggaagcaaatagagatgacata

SEQ ID NO: 52155 - DNA, 120 bp, Artificial Sequence
  ENSG00000067715_44 (sequence is synthesized)
attttggaggaatctttggcattctgaatcatcctcctataacactttcccatccaggccccacccaactaatttttaatcataatttagatctcaacacaaaggctggcacaaagggaa

SEQ ID NO: 52156 - DNA, 120 bp, Artificial Sequence
  ENSG00000067715_45 (sequence is synthesized)
agatgccatgagaactcttaaaaacagagtaacatacttattataagacctattttaaatatttcattctttcctcattttcatgatacctaaattttttgaagactgaaaatgatgaga

SEQ ID NO: 52157 - DNA, 120 bp, Artificial Sequence
  ENSG00000067715_46 (sequence is synthesized)
aacagaagatgtcagaatgatatgaaaaagttgctcttttgaaatgtttgttcttctagatttttttaaaatgtcagcatgattcatacctattggttcttagcctggagcacccagcac

SEQ ID NO: 52158 - DNA, 120 bp, Artificial Sequence
  ENSG00000067715_47 (sequence is synthesized)
aaccaggaattgaggaagctagagcaggatgtgaataacgaatgggctgcataagcagaagtctatacccagtcaataagcagaagtctatacccagtcagtgtgcagagttgcaggcta

SEQ ID NO: 52159 - DNA, 120 bp, Artificial Sequence
  ENSG00000067798_0 (sequence is synthesized)
agatgcagggaagttttgcctcttcctgaaaattatattattagctttttaaaaatcaggatgactgctagttttgtttaaagtatttgttctggaaatactaaagttggagtctaccag

SEQ ID NO: 52160 - DNA, 120 bp, Artificial Sequence
  ENSG00000067798_1 (sequence is synthesized)
actgaggttagaagcattttctttggcagcaagaagataattttatagaagccatgcctgttcttggggttgcctcaaaactgaggcagccagctgttgggtcaaagcctgtgcatactg

SEQ ID NO: 52161 - DNA, 120 bp, Artificial Sequence
  ENSG00000067798_2 (sequence is synthesized)
ctcttccgataccaaatcttggcactactgggtcacagcactgttcttcaagacctttggaacttactgaaacagagagctccatgctttcttgtcagcttgcgttaaaatcaacctgtg

SEQ ID NO: 52162 - DNA, 120 bp, Artificial Sequence
  ENSG00000067798_3 (sequence is synthesized)
aatttggagagaagaaacccctccaaggaaaagccaaggagaaagaagacagcaagatttacactgactgggccaaccactacctagcaaaatcaggccacaagcggctgatcaaggact

SEQ ID NO: 52163 - DNA, 120 bp, Artificial Sequence
  ENSG00000067798_4 (sequence is synthesized)
tgcaacaagacattgcagatggagtactcctagcagaaatcatccagattattgcaaatgaaaaagttgaagatatcaatggatgtcctagaagtcagtctcagatgattgaaaatgttg

SEQ ID NO: 52164 - DNA, 120 bp, Artificial Sequence
  ENSG00000067798_5 (sequence is synthesized)
atgtctgccttagttttctagcagccagaggggtaaatgttcaaggtctatctgctgaagaaataagaaatggaaacttaaaagccattctagggctgtttttcagtttatctcgctaca

SEQ ID NO: 52165 - DNA, 120 bp, Artificial Sequence
  ENSG00000067798_6 (sequence is synthesized)
agcagcaacaacaccatcaacaacagtactatcagtccttggtggaacttcagcagcgagttactcacgcttcccctccatcggaagccagccaggccaaaacccagcaagatatgcagt

SEQ ID NO: 52166 - DNA, 120 bp, Artificial Sequence
  ENSG00000067798_7 (sequence is synthesized)
ccagtctggcagccagatatgcaactcagtctaatcacagtggaattgcaaccagtcaaaaaaagcctactaggcttccagggccctctagggtgcctgctgcaggaagcagcagcaagg

SEQ ID NO: 52167 - DNA, 120 bp, Artificial Sequence
  ENSG00000067798_8 (sequence is synthesized)
tccagggagcctctaatttaaataggagaagtcagagctttaacagcattgacaaaaacaagcctccaaattatgcaaatggaaacgaaaaagattcctccaaaggacctcaatcgtctt

SEQ ID NO: 52168 - DNA, 120 bp, Artificial Sequence
  ENSG00000067798_9 (sequence is synthesized)
caggtgtaaatggtaacgtgcagcctcccagtactgctgggcagcctcctgcctctgccatcccttctccaagtgccagcaagccctggcgcagcaagtccatgaatgtcaaacacagtg

SEQ ID NO: 52169 - DNA, 120 bp, Artificial Sequence
  ENSG00000067798_10 (sequence is synthesized)
ccacctccaccatgttgactgtaaagcagtcaagtacagccacctcccccacaccatcttcagacagactgaagccacctgtctcagaaggggtcaaaactgctccctcaggacagaaat

SEQ ID NO: 52170 - DNA, 120 bp, Artificial Sequence
  ENSG00000067798_11 (sequence is synthesized)
ccatgcttgagaaattcaagctagtcaatgcccggactgctttacgccccccgcagcctcccagttcaggacctagtgatggtgggaaggatgatgatgccttttctgaatctggtgaaa

SEQ ID NO: 52171 - DNA, 120 bp, Artificial Sequence
  ENSG00000067798_12 (sequence is synthesized)
tggaaggttttaacagtggtctgaatagtggtggctcaacaaatagcagtcccaaagtgtcacctaagttggcccctccaaaagctggaagcaaaaatctcagcaataaaaagtctttgc

SEQ ID NO: 52172 - DNA, 120 bp, Artificial Sequence
  ENSG00000067798_13 (sequence is synthesized)
tacagccaaaggaaaaagaagaaaagaacagggacaaaaataaagtttgcactgaaaaaccagtcaaagaagagaaggatcaggtgacagagatggctccaaaaaagacctccaaaattg

SEQ ID NO: 52173 - DNA, 120 bp, Artificial Sequence
  ENSG00000067798_14 (sequence is synthesized)
caagcttgatccctaagggcagcaagacaacagcagctaagaaggaaagcttaattccgtcttccagtggtattccaaaaccaggctctaaagttccaacagtaaagcaaaccatttcac

SEQ ID NO: 52174 - DNA, 120 bp, Artificial Sequence
  ENSG00000067798_15 (sequence is synthesized)
ctggcagcacagcaagcaaagagtctgagaaattcaggactaccaaggggagcccttcccagtccttatctaagcctataaccatggagaaagcaagtgcttctagttgtcctgcccctt

SEQ ID NO: 52175 - DNA, 120 bp, Artificial Sequence
  ENSG00000067798_16 (sequence is synthesized)
tggaaggaagggaagctggccaagcttctccttctggttcctgtaccatgacagtggcacaaagcagtgggcagagcacaggaaatggtgctgtccaactccctcaacagcagcaacata

SEQ ID NO: 52176 - DNA, 120 bp, Artificial Sequence
  ENSG00000067798_17 (sequence is synthesized)
gccacccgaataccgcgacagtggcaccattcatttacagggcacattcagaaaatgaaggtaccgctttaccatcggctgactcctgtaccagtcctacaaagatggacttatcatata

SEQ ID NO: 52177 - DNA, 120 bp, Artificial Sequence
  ENSG00000067798_18 (sequence is synthesized)
gtaagactgctaagcagtgcctggaggagatatctggtgaagaccctgaaacaagaagaatgagaacagttaaaaacatagcagacttgaggcagaatttagaagagactatgtccagtc

SEQ ID NO: 52178 - DNA, 120 bp, Artificial Sequence
  ENSG00000067798_19 (sequence is synthesized)
ttcgtgggactcagataagccacagcaccctggagacaacatttgacagcactgtgacaacagaagttaatggaaggaccatacccaacttgacaagtcgacccacccccatgacctgga

SEQ ID NO: 52179 - DNA, 120 bp, Artificial Sequence
  ENSG00000067798_20 (sequence is synthesized)
ggttgggccaggcatgtccgcgacttcaggcgggagatgctccctccctgggtgctggctatcctcgcagtggtaccagtcgattcatccacacagacccctcgaggttcatgtatacca

SEQ ID NO: 52180 - DNA, 120 bp, Artificial Sequence
  ENSG00000067798_21 (sequence is synthesized)
cgcctctccgtcgagctgctgtctctaggctgggaaacatgtcacagattgacatgagtgagaaagcaagcagtgacctggacatgtcttctgaggtcgatgtgggtggatatatgagtg

SEQ ID NO: 52181 - DNA, 120 bp, Artificial Sequence
  ENSG00000067798_22 (sequence is synthesized)
atggtgatatccttgggaaaagtctcaggactgatgacatcaacagtgggtacatgacagatggaggacttaacctatatactagaagtctgaaccgaataccagacacagcaacttccc

SEQ ID NO: 52182 - DNA, 120 bp, Artificial Sequence
  ENSG00000067798_23 (sequence is synthesized)
gggacatcatccagagaggggttcacgatgtgacagtggatgcagacagctgggatgacagcagttcagtgagcagtggtctcagtgacacccttgataacatcagcactgatgacctga

SEQ ID NO: 52183 - DNA, 120 bp, Artificial Sequence
  ENSG00000067798_24 (sequence is synthesized)
acaccacatcctctgtcagctcttactccaacatcaccgtcccctctaggaagaatactcagctgaggacagattcagagaaacgctccaccacagacgagacctgggatagtcctgagg

SEQ ID NO: 52184 - DNA, 120 bp, Artificial Sequence
  ENSG00000067798_25 (sequence is synthesized)
aactgaaaaaaccagaagaagattttgacagccatggggatgctggtggcaagtggaagactgtgtcctctggacttcctgaagaccccgagaaggcagggcagaaagcttccctgtctg

SEQ ID NO: 52185 - DNA, 120 bp, Artificial Sequence
  ENSG00000067798_26 (sequence is synthesized)
tttcacagacaggttcctggagaagaggcatgtctgcccaaggaggggcgccatctaggcagaaagctggaacaagtgcactcaaaacacccgggaaaaccgatgatgccaaagcttctg

SEQ ID NO: 52186 - DNA, 120 bp, Artificial Sequence
  ENSG00000067798_27 (sequence is synthesized)
agaaaggaaaagctcccctaaaaggatcatctctacaaagatctccttcagatgcaggaaaaagcagtggagatgaagggaaaaagcccccctcaggcattggaagatcgactgccacca

SEQ ID NO: 52187 - DNA, 120 bp, Artificial Sequence
  ENSG00000067798_28 (sequence is synthesized)
gctcctttggctttaagaaaccaagtggagtagggtcatctgccatgatcaccagcagtggagcaaccataacaagtggctctgcaacactgggtaaaattccaaaatctgctgccattg

SEQ ID NO: 52188 - DNA, 120 bp, Artificial Sequence
  ENSG00000067798_29 (sequence is synthesized)
gcgggaagtcaaatgcagggagaaaaaccagtttggacggttcacagaatcaggatgatgttgtgctgcatgttagctcaaagactaccctacaatatcgcagcttgccccgcccttcaa

SEQ ID NO: 52189 - DNA, 120 bp, Artificial Sequence
  ENSG00000067798_30 (sequence is synthesized)
acgtcagcagcaagtctgctggggccaccacctcgaaactgagagaaccaactaaaattgggtcagggcgctcgagtcctgtcaccgtcaaccaaacagacaaggaaaaggaaaaagtag

SEQ ID NO: 52190 - DNA, 120 bp, Artificial Sequence
  ENSG00000067798_31 (sequence is synthesized)
cagtctcagattcagaaagtgtttctttgtcaggttcccccaaatccagccccacctctgccagcgcctgtggtgcacaaggtctcaggcagccaggatccaagtatccagatattgcct

SEQ ID NO: 52191 - DNA, 120 bp, Artificial Sequence
  ENSG00000067798_32 (sequence is synthesized)
cacccacatttcgaaggttgtttggtgccaaggcaggtggcaaatctgcctctgcacctaatactgagggtgtgaaatcttcctcagtaatgcccagccctagtaccacattagcgcggc

SEQ ID NO: 52192 - DNA, 120 bp, Artificial Sequence
  ENSG00000067798_33 (sequence is synthesized)
aaggcagtctggagtcaccgtcgtccggtacgggcagcatgggcagtgctggtgggctaagcggcagcagcagccctctcttcaataaaccctcagacttaactacagatgttataagct

SEQ ID NO: 52193 - DNA, 120 bp, Artificial Sequence
  ENSG00000067798_34 (sequence is synthesized)
taagtcactcgttggcctccagcccagcatcggttcactctttcacatcaggtggtctcgtgtgggctgccaatatgagcagttcctctgcaggcagcaaggatactccgagctaccagt

SEQ ID NO: 52194 - DNA, 120 bp, Artificial Sequence
  ENSG00000067798_35 (sequence is synthesized)
ccatgactagcctccacacgagctctgagtccattgacctccccctcagccatcatggctccttgtctggactgaccacaggcactcacgaggtccagagcctgctcatgagaacgggta

SEQ ID NO: 52195 - DNA, 120 bp, Artificial Sequence
  ENSG00000067798_36 (sequence is synthesized)
gtgtgagatctactctctcagaaagcatgcagcttgacagaaatacactacccaaaaagggactaagatataccccatcatctcggcaggccaaccaagaagagggcaaagagtggttgc

SEQ ID NO: 52196 - DNA, 120 bp, Artificial Sequence
  ENSG00000067798_37 (sequence is synthesized)
gttctcattctactggagggcttcaggacactggcaaccagtcacctctggtttccccttctgccatgtcatcttctgcagctggaaaataccacttttctaacttggtgagcccaacaa

SEQ ID NO: 52197 - DNA, 120 bp, Artificial Sequence
  ENSG00000067798_38 (sequence is synthesized)
atttgtctcagtttaaccttcccgggcccagcatgatgcgctcaaacagcatcccagcccaagactcttccttcgatctctatgatgactcccagctttgtgggagtgccacttctctgg

SEQ ID NO: 52198 - DNA, 120 bp, Artificial Sequence
  ENSG00000067798_39 (sequence is synthesized)
aggaaagacctcgtgccatcagtcattcgggctcattcagagacagcatggaagaagttcatggctcttcattatcactggtgtccagcacttcttctctttactctacagctgaagaaa

SEQ ID NO: 52199 - DNA, 120 bp, Artificial Sequence
  ENSG00000067798_40 (sequence is synthesized)
aggctcattcagagcaaatccataaactgcggagagagctggttgcatcacaagaaaaagttgctaccctcacatctcagctttcagcaaatgctcaccttgtagcagcttttgaaaaga

SEQ ID NO: 52200 - DNA, 120 bp, Artificial Sequence
  ENSG00000067798_41 (sequence is synthesized)
gcttagggaatatgactggccgattgcaaagtctaactatgacagcggaacaaaaggaatctgaacttatagaactaagagaaaccattgaaatgctgaaggctcagaattctgctgccc

SEQ ID NO: 52201 - DNA, 120 bp, Artificial Sequence
  ENSG00000067798_42 (sequence is synthesized)
aggcggctattcagggagcactgaatggtccagaccatcctcccaaagatcttcgcatcagaagacagcattcctctgaaagtgtttctagtatcaacagtgccacaagccattccagta

SEQ ID NO: 52202 - DNA, 120 bp, Artificial Sequence
  ENSG00000067798_43 (sequence is synthesized)
ttggcagtggtaatgatgccgactccaagaagaagaaaaagaaaaactgggtgaactctagaggaagtgagctgagaagttctttcaaacaagcctttgggaagaaaaagtccaccaagc

SEQ ID NO: 52203 - DNA, 120 bp, Artificial Sequence
  ENSG00000067798_44 (sequence is synthesized)
ctccttcatcacattctgacattgaagagcttactgattcatcccttccggcatcccccaagttaccccataatgctggtgactgtggctcagcatccatgaagccctcacaatctgctt

SEQ ID NO: 52204 - DNA, 120 bp, Artificial Sequence
  ENSG00000067798_45 (sequence is synthesized)
cagcgatctgtgaatgcacagaagctgaggcagagataattctgcagctgaagagcgagctcagagaaaaggaattaaaattaacggatattcggctggaggccctcagctctgctcatc

SEQ ID NO: 52205 - DNA, 120 bp, Artificial Sequence
  ENSG00000067798_46 (sequence is synthesized)
atcttgatcagatccgggaagccatgaaccggatgcagaatgaaattgaaatactgaaagctgaaaatgaccggttgaaggcagaaactggtaacacagctaagcctactcggccaccgt

SEQ ID NO: 52206 - DNA, 120 bp, Artificial Sequence
  ENSG00000067798_47 (sequence is synthesized)
cagaatcctcaagcagcacctcctcttcatcttccaggcagtcattaggactttctctaaacaatttgaacatcacagaggctgttagctcagatattttgctagatgatgctggtgatg

SEQ ID NO: 52207 - DNA, 120 bp, Artificial Sequence
  ENSG00000067798_48 (sequence is synthesized)
caactggacataaagatggccgcagtgtgaaaattatagtctccataagcaagggctatggtcgagcaaaggaccaaaaatctcaggcatatttgataggatccattggtgttagtggaa

SEQ ID NO: 52208 - DNA, 120 bp, Artificial Sequence
  ENSG00000067798_49 (sequence is synthesized)
aaaccaagtgggatgtcttagatggtgtaataagacgtctctttaaggaatatgtattccgaattgatacatccactagccttggtctgagctctgactgcattgctagctactgtatag

SEQ ID NO: 52209 - DNA, 120 bp, Artificial Sequence
  ENSG00000067798_50 (sequence is synthesized)
gagacttaattagatcccataacctagaagtgcctgaattgctgccttgtggataccttgttggagataataacatcatcactgtgaacctcaaaggggtagaagaaaatagtttggaca

SEQ ID NO: 52210 - DNA, 120 bp, Artificial Sequence
  ENSG00000067798_51 (sequence is synthesized)
gttttgtttttgatacgctgattcctaaaccaattacccaaaggtactttaacttgttgatggagcatcacagaattatactctcaggaccgagtggtactggaaagacctatttggcaa

SEQ ID NO: 52211 - DNA, 120 bp, Artificial Sequence
  ENSG00000067798_52 (sequence is synthesized)
acaaacttgctgaatatgtaataaccaaatctggaaggaaaaaaacagaggatgcaattgccacttttaatgtggaccacaagtcaagtaaggaattgcaacaatatctagctaacctgg

SEQ ID NO: 52212 - DNA, 120 bp, Artificial Sequence
  ENSG00000067798_53 (sequence is synthesized)
ctgaacagtgcagtgctgataataatggagtggagctcccagttgtaataattcttgataatcttcatcatgtgggctctctgagtgatatcttcaatggttttctcaattgtaaataca

SEQ ID NO: 52213 - DNA, 120 bp, Artificial Sequence
  ENSG00000067798_54 (sequence is synthesized)
acaaatgtccatatattattggaacaatgaatcagggagtttcttcatcaccaaatctagagctgcatcacaatttcaggtgggtattatgtgcaaatcatacagaaccagtgaaaggct

SEQ ID NO: 52214 - DNA, 120 bp, Artificial Sequence
  ENSG00000067798_55 (sequence is synthesized)
ttttaggcagatatcttcgaagaaaactcatagagatagaaattgaaaggaacattcgcaataatgacctagtcaaaattatagattggattccgaagacgtggcatcatctcaacagtt

SEQ ID NO: 52215 - DNA, 120 bp, Artificial Sequence
  ENSG00000067798_56 (sequence is synthesized)
ttttggaaacacacagttcttctgacgttaccattggtccccgactattccttccttgccccatggatgtagaaggttctagagtatggttcatggatctctggaactattctttagtac

SEQ ID NO: 52216 - DNA, 120 bp, Artificial Sequence
  ENSG00000067798_57 (sequence is synthesized)
cttatattctggaggcagtgagagagggtcttcagatgtatgggaaacgcacaccatgggaagatccttcaaagtgggtgcttgacacatatccatggagctcagcaactctgcctcagg

SEQ ID NO: 52217 - DNA, 120 bp, Artificial Sequence
  ENSG00000067798_58 (sequence is synthesized)
agagcccagccttacttcagctgcgaccagaagatgttgggtatgaaagctgcacatccactaaggaagccacaacctcaaagcacattccgcaaactgacacagaaggagatcccctga

SEQ ID NO: 52218 - DNA, 120 bp, Artificial Sequence
  ENSG00000067798_59 (sequence is synthesized)
tgaatatgctaatgaaactccaagaagcagccaattactcgagcacacaaagctgcgacagcgaaagcaccagccaccatgaagacattttggattcatctcttgaatctaccctctaga

SEQ ID NO: 52219 - DNA, 120 bp, Artificial Sequence
  ENSG00000067798_60 (sequence is synthesized)
gggtgaaaaaagttaagggaaaagactttgcttttaaaaaaatgtttcaaaagaaaggtattttcactaaaccactgccagtataaaagcaccctgtcaagggccctgacccagagttgt

SEQ ID NO: 52220 - DNA, 120 bp, Artificial Sequence
  ENSG00000067798_61 (sequence is synthesized)
gaaatcaggaagaacccctgtccttccactgttgtggtcttttggctgctctgacagttggactgaagggcttttccttttgattttttcctctttttcaatctcaaagttcagactcag

SEQ ID NO: 52221 - DNA, 120 bp, Artificial Sequence
  ENSG00000067798_62 (sequence is synthesized)
actgctttagtgagaaaaaaaaataagcaaaactaagagctctttaatcctaagaaggagctttgtagcagttaccttgaagaagagtttactccccaaaggagtatttagtattactta

SEQ ID NO: 52222 - DNA, 120 bp, Artificial Sequence
  ENSG00000067798_63 (sequence is synthesized)
atatctgtggagtaatagaaagctccattactcaactggaaaggaccctaatgacagggcaactgaacagattgcacatgggatagccaaactggactttctttgtttcctctttaaaag

SEQ ID NO: 52223 - DNA, 120 bp, Artificial Sequence
  ENSG00000067798_64 (sequence is synthesized)
tttacaatgcagaccattttttgtcccttccttttgtttcctctgaggggctgttcgccccaggcagggtccatctttctgatctgtccaacctcctttgtgccacacggtgctggtcac

SEQ ID NO: 52224 - DNA, 120 bp, Artificial Sequence
  ENSG00000067798_65 (sequence is synthesized)
agggcttcagtagtgtttgtgttgtgcgctcaccccattccagaacaaatccaagaggccagtcctccataagcacaaatggaattgtgcaaccaccagaaaaacactactgtggcaaac

SEQ ID NO: 52225 - DNA, 120 bp, Artificial Sequence
  ENSG00000067798_66 (sequence is synthesized)
tggagaagtgccaatttaattctaactgccacgttctcatgatgtgctccaccaactttttagtatatgagtcactggttttataaggttgtttttaccacagtggtctttttaaaccac

SEQ ID NO: 52226 - DNA, 120 bp, Artificial Sequence
  ENSG00000067798_67 (sequence is synthesized)
ctgcccactcccttaacaagagttttataccaattattagtcaacactgataaaaggcttttttagggctttatttgtttgagccttttcagtgaaagaaggaacatttcctatggtgct

SEQ ID NO: 52227 - DNA, 120 bp, Artificial Sequence
  ENSG00000067798_68 (sequence is synthesized)
gtctcactgccttaaaacagatttctatgacagtttaacagttggtttaaatcctaaaccattggtaatttccactgtcttttcatttacaaccaagcaacaccagttaacatagtagcc

SEQ ID NO: 52228 - DNA, 120 bp, Artificial Sequence
  ENSG00000067798_69 (sequence is synthesized)
tcatctctatatatctttctcttttttttttttttgaagaaatggataggagaaagatcagtatttttagccttgtgaatagatcgctttgcctatcctccaaaatattaaaataaccca

SEQ ID NO: 52229 - DNA, 120 bp, Artificial Sequence
  ENSG00000067798_70 (sequence is synthesized)
gaaatgctctttgaccgtcacttaaaacctaagacatgtggcgaaattccatccagttctaagtgaaagagtttcagaaggcagaagattttgaattattatccagcagggctggaagca

SEQ ID NO: 52230 - DNA, 120 bp, Artificial Sequence
  ENSG00000067798_71 (sequence is synthesized)
ctagatgcagcatgagcacaactattcggctttccttccctattgtttttgtttttttaatgagttttgacgcatgttgttttgattgctattgttgtacatgagaaattcagcattaaa

SEQ ID NO: 52231 - DNA, 120 bp, Artificial Sequence
  ENSG00000067798_72 (sequence is synthesized)
gaacactgaagcggtaaggtcactgtggaagaggaagcgtttatactgtaaaagaaggttagatttgcacagtctactgggtaggtattgtaaataataatttttaaaacttgcacaaat

SEQ ID NO: 52232 - DNA, 120 bp, Artificial Sequence
  ENSG00000067798_73 (sequence is synthesized)
caaaacaaacacaaacaaaattgtattttatcctgttggtgttaagaggtgtttcacttgctgagatttcctgtacattgcaaacaaatacagaatgcaaaccctcaaagctgtattatc

SEQ ID NO: 52233 - DNA, 120 bp, Artificial Sequence
  ENSG00000067798_74 (sequence is synthesized)
tggtgtgtttgtcctgtatttacagttgtttttgactatgcaggagctatcagtgctagagtgagcatgcttcaaaactgtacatgaagccaatatatttttggataagtaaaactgtct

SEQ ID NO: 52234 - DNA, 120 bp, Artificial Sequence
  ENSG00000067798_75 (sequence is synthesized)
gaaagtacatctgtcatggcaggctttaaagagagtgcatgaaaactgatcagtcattggagaagttaccaccacacacaaaggacaggttttaagtttatgaaacccaagggctaggcc

SEQ ID NO: 52235 - DNA, 120 bp, Artificial Sequence
  ENSG00000067798_76 (sequence is synthesized)
atggtatagacttcttctatgagtgtgtgaaaatgtgttacttttaggacgtgtatttggtgctactctctgtgaccaccaatgggtcagttgctatagaacaacaacaccacgaaacat

SEQ ID NO: 52236 - DNA, 120 bp, Artificial Sequence
  ENSG00000067798_77 (sequence is synthesized)
ctgtgcagttttcagagtgtcacaaagtcaataggtccttacacggtgctattgccctaagggaaatccgaactgaatttatgcacatagaattgtcaccctgactttgaagcctcaaac

SEQ ID NO: 52237 - DNA, 120 bp, Artificial Sequence
  ENSG00000067798_78 (sequence is synthesized)
atggatcaaatctgttgtgaaacatcaatatatgtagctggatgagtgactagtttcccttgtataatatgtgatctaagaaaattgctaatctttccctgccattttgagaaacacagt

SEQ ID NO: 52238 - DNA, 120 bp, Artificial Sequence
  ENSG00000067798_79 (sequence is synthesized)
ccaaacatgagcataaacagaatttcctgcaatacatcccagtaggtccacctagtttacaacttaaactagtttgtgaaacatttgtctgtatacattttatattttgtacattttgat

SEQ ID NO: 52239 - DNA, 120 bp, Artificial Sequence
  ENSG00000067798_80 (sequence is synthesized)
gtaacatatcatgtaaataggcagaaacagtgaaataaatcatctgaaaagttttgtagtctttgtaaagccccaacaataagtacttggtgtcaatggacttaactggatgatgtattt

SEQ ID NO: 52240 - DNA, 120 bp, Artificial Sequence
  ENSG00000067798_81 (sequence is synthesized)
tctattggtttattgttcctctagcttgtaaaccagcttgcatatatttttttgcaaatgtgcaccctgtatctgtctaaattattactttgccattaaagtggaattatttattgacaa

SEQ ID NO: 52241 - DNA, 68 bp, Artificial Sequence
  ENSG00000067798_82 (sequence is synthesized)
atgagaatgaatatgaatcccagccagcaagaaagaaaagatacttaactaaagatgcagggaagttt

SEQ ID NO: 52242 - DNA, 120 bp, Artificial Sequence
  ENSG00000067798_83 (sequence is synthesized)
tcctagtagacctcctaacacctttgatcatgaaaaggtggccaccaattgaaatgggaacattattactttctattggaaagtaataatgaataaataaataataatgataaagaatca

SEQ ID NO: 52243 - DNA, 120 bp, Artificial Sequence
  ENSG00000067798_84 (sequence is synthesized)
attctggagaggaagctgaggctggtcctcaggcgctcctcccgccgttcccgcaggaaacttttctcgcagggcccgctccgtccatcccgcgcggttccaagacggtgggcctcccgt

SEQ ID NO: 52244 - DNA, 120 bp, Artificial Sequence
  ENSG00000067798_85 (sequence is synthesized)
gggctcctctcctgggcaagggcccagaccccgcgacgcgcctgtctctttaaattccagctgcgcggctgggaaacagcgccactcgccgcccaggccggctggaggctgagagcgagc

SEQ ID NO: 52245 - DNA, 80 bp, Artificial Sequence
  ENSG00000067798_86 (sequence is synthesized)
ctcggcccgcgggctgctaggtggcggcggcgcggggcggggaggcgcggcccggcggaggagggaagaaagagcgagcc

SEQ ID NO: 52246 - DNA, 120 bp, Artificial Sequence
  ENSG00000067798_87 (sequence is synthesized)
gggccgggagaggcgccgcgcccggtcccgcgcccggtcccgcacccgctctcagcggcccaagcagtttctttctgggtgacaagaatgtgcctcggttggtttttcttttttttctcc

SEQ ID NO: 52247 - DNA, 120 bp, Artificial Sequence
  ENSG00000067798_88 (sequence is synthesized)
atctccttaagacgatttccatagtaacctgatcaagtggctcaaaatcgcaaacctgaggatttccgcggcccgccggcaagacctcggccaggtttacaggaaatctgtcatttttta

SEQ ID NO: 52248 - DNA, 120 bp, Artificial Sequence
  ENSG00000067798_89 (sequence is synthesized)
ttaaaatggaaaactgtgaagaaagaaaaagatagcagttgaagtcaaaattctcggatgactattttgcttttgaggagtcagcatttaaaaacgatatgctgatttggaaggtcctgg

SEQ ID NO: 52249 - DNA, 120 bp, Artificial Sequence
  ENSG00000067798_90 (sequence is synthesized)
gagtaaactgcaaactttattttttccattcaatcaatggattttttaatcattccttggagtcgatgaagttcggaaacggtgtgtgatggggaacgtggcgggccagtgtgttcctag

SEQ ID NO: 52250 - DNA, 120 bp, Artificial Sequence
  ENSG00000067798_91 (sequence is synthesized)
aaattgcatcttggattagtttgctgcttttttgaagagattccattttgaagggcaagaacctaatgtgatggatttatcttcagaaatgaacagacatgggaagaatccagtgagtca

SEQ ID NO: 52251 - DNA, 120 bp, Artificial Sequence
  ENSG00000067798_92 (sequence is synthesized)
agcatttagactcccactcacttctgacgcacatgagcttctttttagctcaaaaagtagagttagctacattatagctctcatcctagtagacctcctaacacctttgatcatgaaaag

SEQ ID NO: 52252 - DNA, 120 bp, Artificial Sequence
  ENSG00000067798_93 (sequence is synthesized)
tgagaagatgaggttcttaaccaaatagggaagagataaaatactggaatgctcttaaaggtttaataaaatcttatatatggcatactgcaaaattgtagcactatgactcagaggagt

SEQ ID NO: 52253 - DNA, 120 bp, Artificial Sequence
  ENSG00000067798_94 (sequence is synthesized)
gagaatgcaggtggaatactaaaatgtaagaggcttgtgcagggctgggcgtcagtgcttaattcctgctcttcctgggctcctatgagcaggctgtacttgctgcactgtgtcagctcg

SEQ ID NO: 52254 - DNA, 120 bp, Artificial Sequence
  ENSG00000067798_95 (sequence is synthesized)
ttagagtaaagggttacagacctaggtcagttaagggctggtgaaaggcaggggaaagaaaaaaaaaagcaaaaagcaagagacctcagctcgtgcttcacctcctggcgtttcgggaca

SEQ ID NO: 52255 - DNA, 120 bp, Artificial Sequence
  ENSG00000067798_96 (sequence is synthesized)
cagaagcaacagagggaaatgtggacccatcctcctgctgagacatgtgattggatgaagacgggcaaacgtagttggcttcctggactacttttcagctggaggagagtctttggtgaa

SEQ ID NO: 52256 - DNA, 120 bp, Artificial Sequence
  ENSG00000067798_97 (sequence is synthesized)
ctcttttctgcttcagatatattcgagcaaaatatttgtaagtactgctgattagtaaagtgatgtgtcaagctaaattgggggcaaataattatatatactatatctctagaatcttct

SEQ ID NO: 52257 - DNA, 120 bp, Artificial Sequence
  ENSG00000067798_98 (sequence is synthesized)
gtgaatgtgtgagcttgagcttttattgaagtgcatgtgataatcaaaatcaaatggatcagttacaatcacagtgtaacaagacaatatgaagtccaattgaaaggaaggagccactgg

SEQ ID NO: 52258 - DNA, 120 bp, Artificial Sequence
  ENSG00000067798_99 (sequence is synthesized)
aagaatcatgcagcggcctgctgaactctctgtgttccggagcaaagaagtaaggagaaagggagcttgccttcagaaacaaaagtctctgaccaatctttccctcaccagtgatgggga

SEQ ID NO: 52259 - DNA, 120 bp, Artificial Sequence
  ENSG00000067798_100 (sequence is synthesized)
gaggagacccacggtgcgcatttccaactggtttggaaatgctgccaaggccagccagagagaagccaactatgcagagcggcgctcactgtccaagtttctctcgcggtctgtgcagtc

SEQ ID NO: 52260 - DNA, 120 bp, Artificial Sequence
  ENSG00000067798_101 (sequence is synthesized)
cctgtatcacaccagcagctcagcctggaacctcctgcctgctgggggcagccagtcagacagtgaagacttagaggaattgtctgcaagaagaggcttggaaggtgagagtgatgaaga

SEQ ID NO: 52261 - DNA, 120 bp, Artificial Sequence
  ENSG00000067798_102 (sequence is synthesized)
tagtaggtctgaagatgaaaacgtgtcctccaagccaagcagcatcagcagaagctgggctgaagaggagggagaaagctgtttgcgggaagggacagctcatctggatgaggaggtgat

SEQ ID NO: 52262 - DNA, 120 bp, Artificial Sequence
  ENSG00000067829_0 (sequence is synthesized)
gagagcggtatctgcgtgtcgggacgtgcggaggctctcactttccgtcatggcgctgaaggtagcgaccgtcgccggcagcgccgcgaaggcggtgctcgggccagcccttctctgccg

SEQ ID NO: 52263 - DNA, 120 bp, Artificial Sequence
  ENSG00000067829_1 (sequence is synthesized)
tccctgggaggttctaggcgcccacgaggtcccctcgaggaacatcttttcagaacaaacaattcctccgtccgctaagtatggcgggcggcacacggtgaccatgatcccaggggatgg

SEQ ID NO: 52264 - DNA, 120 bp, Artificial Sequence
  ENSG00000067829_2 (sequence is synthesized)
catcgggccagagctcatgctgcatgtcaagtccgtcttcaggcacgcatgtgtaccagtggactttgaagaggtgcacgtgagttccaatgctgatgaagaggacattcgcaatgccat

SEQ ID NO: 52265 - DNA, 120 bp, Artificial Sequence
  ENSG00000067829_3 (sequence is synthesized)
catggccatccgccggaaccgcgtggccctgaagggcaacatcgaaaccaaccataacctgccaccgtcgcacaaatctcgaaacaacatccttcgcaccagcctggacctctatgccaa

SEQ ID NO: 52266 - DNA, 120 bp, Artificial Sequence
  ENSG00000067829_4 (sequence is synthesized)
cgtcatccactgtaagagccttccaggcgtggtgacccggcacaaggacatagacatcctcattgtccgggagaacacagagggcgagtacagcagcctggagcatgagagtgtggcggg

SEQ ID NO: 52267 - DNA, 120 bp, Artificial Sequence
  ENSG00000067829_5 (sequence is synthesized)
gaagatcatcaccaaggccaagtccctgcgcattgccgagtatgccttcaagctggcgcaggagagcgggcgcaagaaagtgacggccgtgcacaaggccaacatcatgaaactgggcga

SEQ ID NO: 52268 - DNA, 120 bp, Artificial Sequence
  ENSG00000067829_6 (sequence is synthesized)
tgggcttttcctccagtgctgcagggaggtggcagcccgctaccctcagatcaccttcgagaacatgattgtggataacaccaccatgcagctggtgtcccggccccagcagtttgatgt

SEQ ID NO: 52269 - DNA, 120 bp, Artificial Sequence
  ENSG00000067829_7 (sequence is synthesized)
catggtgatgcccaatctctatggcaacatcgtcaacaatgtctgcgcgggactggtcgggggcccaggccttgtggctggggccaactatggccatgtgtacgcggtgtttgaaacagc

SEQ ID NO: 52270 - DNA, 120 bp, Artificial Sequence
  ENSG00000067829_8 (sequence is synthesized)
tacgaggaacaccggcaagagtatcgccaataagaacatcgccaaccccacggccaccctgctggccagctgcatgatgctggaccacctcaagctgcactcctatgccacctccatccg

SEQ ID NO: 52271 - DNA, 120 bp, Artificial Sequence
  ENSG00000067829_9 (sequence is synthesized)
taaggctgtcctggcatccatggacaatgagaatatgcacactccggacatcgggggccagggcacaacatctgaagccatccaggacgtcatccgccacatccgcgtcatcaacggccg

SEQ ID NO: 52272 - DNA, 120 bp, Artificial Sequence
  ENSG00000067829_10 (sequence is synthesized)
ggccgtggaggcctaggctggccctaggaccttcttggtttgctccttggattccccttcccactccagcaccccagccagcctggtacgcagatcccagaataaagcaccttctcccta

SEQ ID NO: 52273 - DNA, 120 bp, Artificial Sequence
  ENSG00000067829_11 (sequence is synthesized)
cacgtgagttccaatgctgatgaagaggacattcgcaatgccatcatggccatccgccggaaccgcgtggccctgaaggggcttgtctggctagagaggaccctcgtgcttggagactgg

SEQ ID NO: 52274 - DNA, 120 bp, Artificial Sequence
  ENSG00000067829_12 (sequence is synthesized)
ctcctgtagcccgcctcatgcactgaccacagcccccaggggaggatggtactggatctggccccatcttctggcccttagctggtgccacttccctcctgtggcaatcccagtcctgca

SEQ ID NO: 52275 - DNA, 120 bp, Artificial Sequence
  ENSG00000067829_13 (sequence is synthesized)
ggggcccagctggtcgcggtccccccctcaacatggcggcagcggtgctctaggcgccggaagggggcgtgaatcggtgcgaccgcgcgcgtgcgcagtaccgggtccgcgcctgtcccc

SEQ ID NO: 52276 - DNA, 120 bp, Artificial Sequence
  ENSG00000067829_14 (sequence is synthesized)
ggaggctctcactttccgtcatggcgctgaaggtagcgaccgtcgccggcagcgccgcgaaggcggtgctcgggccagcccttctctgccgtccctgggagatgaggccatgaagccatc

SEQ ID NO: 52277 - DNA, 120 bp, Artificial Sequence
  ENSG00000067829_15 (sequence is synthesized)
tcaagaagagtggatggtggatttggaccgaggcctccctagtctccagatcttttttcattttctgatgtgcttgttcactcaggaaatgttccttatgtgccagctctgggccagcga

SEQ ID NO: 52278 - DNA, 120 bp, Artificial Sequence
  ENSG00000067829_16 (sequence is synthesized)
ccacatgctgcttttgtaataagaaaaagtgatcggcgaagtgataacgtgactgttgtcatggatctgtggtttgttgtaatgatttccctgctgtaccagggttagtttgccacctcc

SEQ ID NO: 52279 - DNA, 120 bp, Artificial Sequence
  ENSG00000067829_17 (sequence is synthesized)
cccaggccttgcgtcccatggcctgtgatcccgccagactggcctgggctcggggaaggtggcaccagtcctgccacagtgtgcattgtggagttcaagcgtgtccccatcagtcagtga

SEQ ID NO: 52280 - DNA, 120 bp, Artificial Sequence
  ENSG00000067829_18 (sequence is synthesized)
aggtgggcccagtcccttctcagtcagagccaggtcagggcaggtagcaacaggagagaggtagcctgggcaggcttcctggaggaggtgcgggggggtctgggccagcctccctgaccc

SEQ ID NO: 52281 - DNA, 120 bp, Artificial Sequence
  ENSG00000067829_19 (sequence is synthesized)
ggaccacctcaagtgagtggctcccagtgccccgcaagcccctggccagccctccgggccccagggactgaaggctggctgtcccatcctctaggctgcactcctatgccacctccatcc

SEQ ID NO: 52282 - DNA, 120 bp, Artificial Sequence
  ENSG00000067829_20 (sequence is synthesized)
cgggacgtgcggaggctctcactttccgtcatggcgctgaaggtagcgaccgtcgccggcagcgccgcgaaggcggtgctcgggccagcccttctctgccgtccctgggagtgggccatg

SEQ ID NO: 52283 - DNA, 120 bp, Artificial Sequence
  ENSG00000067836_0 (sequence is synthesized)
cccaggctggtgccggccgcgtccctggccagccggagcaagcctgactcgtgcagccgccggccgcgtccctggccaggcggagcgagcctcactcccgcagccgccagtctggttcca

SEQ ID NO: 52284 - DNA, 120 bp, Artificial Sequence
  ENSG00000067836_1 (sequence is synthesized)
cggagcgagcctcactcccgcagccgccagtctggttccagggctcccgcaggtttcgggggccgaggcggaccgacaggcgccagccaatcgcgagcacggagccggcctgggggcggg

SEQ ID NO: 52285 - DNA, 120 bp, Artificial Sequence
  ENSG00000067836_2 (sequence is synthesized)
gtggtacccgctccgccaatcgggtgggggcggagccagacgccgggggcggacgggaggaccggaggaccgaggacagaaagattggtggacaggagcagcggccggtggggagggcgc

SEQ ID NO: 52286 - DNA, 120 bp, Artificial Sequence
  ENSG00000067836_3 (sequence is synthesized)
tcggcggcggcctgcggccatggccaccgtgatggcagcgacggcggcggagcgggcggtgctggaggaggagttccgctggctgctgcacgacgaggtgcacgctgtgttgaagcagct

SEQ ID NO: 52287 - DNA, 120 bp, Artificial Sequence
  ENSG00000067836_4 (sequence is synthesized)
gcaggacatcctcaaggaggcctctctgcgcttcactctgccgggctccggcactgaggggcccgccaagcaagagaacttcatcctaggcagctgtggcacagaccaggtgaagggtgt

SEQ ID NO: 52288 - DNA, 120 bp, Artificial Sequence
  ENSG00000067836_5 (sequence is synthesized)
gctgactctgcagggggatgccctcagccaggcggatgtgaacctgaagatgccccggaacaaccagctgctgcacttcgccttccgggaggacaagcagtggaagctgcagcagatcca

SEQ ID NO: 52289 - DNA, 120 bp, Artificial Sequence
  ENSG00000067836_6 (sequence is synthesized)
ggatgccagaaaccatgtgagccaagccatttacctgcttaccagccgggaccagagctaccagttcaagacgggcgctgaggtcctcaagctgatggacgcagtgatgctgcagctgac

SEQ ID NO: 52290 - DNA, 120 bp, Artificial Sequence
  ENSG00000067836_7 (sequence is synthesized)
gccagcggcctcacgcggatgttcgcccctgccctgccgtccgacctgctggtcaacgtctacatcaacctcaacaagctctgcctcacggtgtaccagctgcatgccctgcagcccaac

SEQ ID NO: 52291 - DNA, 120 bp, Artificial Sequence
  ENSG00000067836_8 (sequence is synthesized)
tccaccaagaacttccgcccagctgggggcgcggtgctgcatagccctggggccatgttcgagtggggctctcagcgcctggaggtgagccacgtgcacaaagtggagtgcgtgatcccc

SEQ ID NO: 52292 - DNA, 120 bp, Artificial Sequence
  ENSG00000067836_9 (sequence is synthesized)
tggctcaacgacgccctggtctacttcaccgtctccctgcagctctgccagcagctcaaggacaagatctccgtgttctccagctactggagctacagacccttctgatcacagcaccca

SEQ ID NO: 52293 - DNA, 120 bp, Artificial Sequence
  ENSG00000067836_10 (sequence is synthesized)
ggagcttgtctccaggaaggcggccccgtcccctactcatacccaccacagagcaccagccagtgccaacgccaggctgctatttatctccctatcccaccccctaccccacctaacaca

SEQ ID NO: 52294 - DNA, 120 bp, Artificial Sequence
  ENSG00000067836_11 (sequence is synthesized)
tttgcactgccgggaatggacactggaagtgccaggaggaaggaaggctggtttggtggggtagtggggaggtcagggaggcggggccaagggtgtcccacattcccaacaccgccctct

SEQ ID NO: 52295 - DNA, 120 bp, Artificial Sequence
  ENSG00000067836_12 (sequence is synthesized)
gatcaccatgggaatctttggactcaggacagggccaggcgcagggctctccctcctctccccttcgctgtcccctccccctggagggcatggtgtcggggggtggcactgagctatgag

SEQ ID NO: 52296 - DNA, 120 bp, Artificial Sequence
  ENSG00000067836_13 (sequence is synthesized)
tcccggggatggtgaggaacgccacagacagagccaccctaggagtgagtatagtgctggtgactgtgtttcatagccccagtccagggctgtctaagaaataaagatcatcagactcca

SEQ ID NO: 52297 - DNA, 120 bp, Artificial Sequence
  ENSG00000067836_14 (sequence is synthesized)
tgagcgcctacagtgtgcggctgccgcggctttcaggcagggccccgcctccgcgaactcgagccgacctcattatataagtacctgtgtgcgggcaggggcgggtcccgacgagggtgc

SEQ ID NO: 52298 - DNA, 120 bp, Artificial Sequence
  ENSG00000067836_15 (sequence is synthesized)
tagcaagggcctgagtcccgcccggcctcgggtcggggaaggccgccttgggagcagcggcatccaatctgggagccgaagaattctgcctctgcctggcagtgtgacttcagccaagtc

SEQ ID NO: 52299 - DNA, 120 bp, Artificial Sequence
  ENSG00000067836_16 (sequence is synthesized)
actgaacctccctgggcctcccttttctcattggcaaaagggagataacagtacccgcttcgcgaggctggggtgtagataaatgagccaggcagctcacagaagtaaccggcgtagtgc

SEQ ID NO: 52300 - DNA, 120 bp, Artificial Sequence
  ENSG00000067836_17 (sequence is synthesized)
ttgctgtggcccaggaccgcgggttaccataactactgccttgttccctgactctgccccttgcccctttccccctcaaccaagctgggaggctgcccctgtctgttttgtattccccga

SEQ ID NO: 52301 - DNA, 120 bp, Artificial Sequence
  ENSG00000067836_18 (sequence is synthesized)
ctgtgggtgagcctgggctaggcggaaaccggggaaatgggtaccttggggggtaggaggcatggccatagccctgtcctgcagaccagctggttgtgcgatgggacaggaggggcagcc

SEQ ID NO: 52302 - DNA, 120 bp, Artificial Sequence
  ENSG00000067836_19 (sequence is synthesized)
cgccgggagggagggctgggtggtgggggggtgaccacaggcaccgctctgacgccacatgttacagcacagaccaggtgaagggtgtgctgactctgcagggggatgccctcagccagg

SEQ ID NO: 52303 - DNA, 120 bp, Artificial Sequence
  ENSG00000067836_20 (sequence is synthesized)
cggtgagtcccccggccctgtcccctcccatcctgccaatggggaagagcatgggagctcccactttctctctgtacaagccctgcgactctgggcgggacccttgatctctctggcctc

SEQ ID NO: 52304 - DNA, 120 bp, Artificial Sequence
  ENSG00000067836_21 (sequence is synthesized)
agttttctcctttggaaaatgacagcaaccctcacaccttctcccgggatcggtgtgcagattcagtaagaggtgcaggagaggggttctttgcacacggcctggcctggcgtccggacc

SEQ ID NO: 52305 - DNA, 120 bp, Artificial Sequence
  ENSG00000067836_22 (sequence is synthesized)
gaggtgttcagggaatgtggtataagcagagatcgggctcacggttaggtgccctgggggcttgggcagggtcttcccaccccagctgaacccaggtgaggccaggccacgttgttcctt

SEQ ID NO: 52306 - DNA, 120 bp, Artificial Sequence
  ENSG00000067836_23 (sequence is synthesized)
ctccagtctgcacccgactctgtgccaggcaccaaggcgtggggggaggcccccctcctgggctccatctgttgccctttgtagacactagatgcaccccgttcgcacagagcctcacag

SEQ ID NO: 52307 - DNA, 120 bp, Artificial Sequence
  ENSG00000067836_24 (sequence is synthesized)
atttcacttctttgtggctcttcttgggcctggtttcctgtttcctgacctccctgttcaacccccaaacggccaaggcattgggagaccctctgccctatacagcggccaaggcctgaa

SEQ ID NO: 52308 - DNA, 120 bp, Artificial Sequence
  ENSG00000067836_25 (sequence is synthesized)
ccaccacacaccccatttctgccctgggcttaagggctcagagtggctgtggcaggaggtgcccccccactgcccagctcaccccactcttgcctgtcaggatgtgaacctgaagatgcc

SEQ ID NO: 52309 - DNA, 120 bp, Artificial Sequence
  ENSG00000067836_26 (sequence is synthesized)
gctcaccacccccgccaccctcaccctccccgagatcgccgccagcggcctcacggtcagtgcccctgccagcccctgctgcaggagaggggtcccacagtgggtcccagcttgccctca

SEQ ID NO: 52310 - DNA, 120 bp, Artificial Sequence
  ENSG00000067836_27 (sequence is synthesized)
tgtttggggctctcagcgcctggaggtgagccacgtgcacaaagtggagtgcgtgatcccctggctcaacgacgccctggtctacttcaccgtctccctgcagctctgccagcagctcaa

SEQ ID NO: 52311 - DNA, 120 bp, Artificial Sequence
  ENSG00000067836_28 (sequence is synthesized)
gagctaccatgtctgttgttccttaatgcatggggacacgggaggacgcagagccaaccccgcctctccctgcagctgatggacgcagtgatgctgcagctgaccagagcccgaaaccgg

SEQ ID NO: 52312 - DNA, 120 bp, Artificial Sequence
  ENSG00000067836_29 (sequence is synthesized)
gccagcgggcgggccggcggggcggcggggccgggcgcgaccgccgggtctgtcccgcaggaggaggagttccgctggctgctgcacgacgaggtgcacgctgtgttgaagcagctgcag

SEQ ID NO: 52313 - DNA, 80 bp, Artificial Sequence
  ENSG00000067840_0 (sequence is synthesized)
agcgaagagttaacctgaggggcgagccgctgcccccacctcgggggcgtgcccccctcccccgctaggcggcccgcccc

SEQ ID NO: 52314 - DNA, 120 bp, Artificial Sequence
  ENSG00000067840_1 (sequence is synthesized)
aggtcccgcgcccgggtcagtgaaaggcgtcttcccgttcccgccctccgcctcctctcgccggccagcaacatgggatgtaatatgtgcgtggtccagaaaccggaggagcagtacaaa

SEQ ID NO: 52315 - DNA, 120 bp, Artificial Sequence
  ENSG00000067840_2 (sequence is synthesized)
gtgatgctgcaggtgaacgggaaggagctctccaagctgtctcaggagcaaactctgcaggccctgcgctcctccaaggagcccctggtgatccaggtgctgagacgcagcccccgcctc

SEQ ID NO: 52316 - DNA, 120 bp, Artificial Sequence
  ENSG00000067840_3 (sequence is synthesized)
cggggggacagctcctgtcacgacctgcagctggtggacagtggcactcagaccgacatcaccttcgagcatatcatggcgctgggcaagctgcgtccgcccaccccgcccatggtcatc

SEQ ID NO: 52317 - DNA, 120 bp, Artificial Sequence
  ENSG00000067840_4 (sequence is synthesized)
ctggagccccccccaatcagccatgagtattatgacccggcggagtttatggagggcggcccgcaggaggcagaccgcttggatgagctggagtatgaggaggtggagctgtataaaagc

SEQ ID NO: 52318 - DNA, 120 bp, Artificial Sequence
  ENSG00000067840_5 (sequence is synthesized)
agccaccgggacaagctgggcctgatggtttgctaccgcacggacgacgaggaggacctgggcatttatgtcggagaggtaaatcccaacagcattgcagccaaagacggccggatccgt

SEQ ID NO: 52319 - DNA, 120 bp, Artificial Sequence
  ENSG00000067840_6 (sequence is synthesized)
gagggagaccgcatcatccagattaacggtgtagacgtccagaaccgggaagaggcggtggccatcctgagccaggaagagaacaccaacatctccctgctggtggcccgacctgagagt

SEQ ID NO: 52320 - DNA, 120 bp, Artificial Sequence
  ENSG00000067840_7 (sequence is synthesized)
cagctggcgaaaaggtggaaggacagcgaccgggatgacttcctggatgactttggctctgagaatgagggggagctgcgtgctcgtaaactgaaatcaccccctgcccagcagcccgga

SEQ ID NO: 52321 - DNA, 120 bp, Artificial Sequence
  ENSG00000067840_8 (sequence is synthesized)
aacgaagaggagaagggggctcccgatgccggcccaggcctgagcaacagccaggagctggacagcggggtgggccggactgacgagagcacccggaacgaagagagctctgagcacgac

SEQ ID NO: 52322 - DNA, 120 bp, Artificial Sequence
  ENSG00000067840_9 (sequence is synthesized)
ctgctgggggacgaacccccgagctccaccaacaccccgggaagcctgcgcaagtttggcctgcaaggggacgccctgcagagccgggacttccatttcagcatggactctctgctggcc

SEQ ID NO: 52323 - DNA, 120 bp, Artificial Sequence
  ENSG00000067840_10 (sequence is synthesized)
gagggggcggggctgggagggggcgacgtcccgggcctcacggatgaggagtatgagcgctaccgtgagctcctggagatcaagtgccacctggagaacggcaaccagctgggcctcctc

SEQ ID NO: 52324 - DNA, 120 bp, Artificial Sequence
  ENSG00000067840_11 (sequence is synthesized)
tttccccgggcctccggaggcaacagcgccctggacgtcaaccgcaacgagagcctgggccacgagatggccatgctggaggaggagctaaggcacctggaattcaagtgccgcaacata

SEQ ID NO: 52325 - DNA, 120 bp, Artificial Sequence
  ENSG00000067840_12 (sequence is synthesized)
ctgcgggcgcagaagatgcagcagctgcgtgagcgctgcatgaaggcctggctgctggaggaggagagcctctacgacctggcggccagcgagcccaagaagcacgagctgtccgacatc

SEQ ID NO: 52326 - DNA, 120 bp, Artificial Sequence
  ENSG00000067840_13 (sequence is synthesized)
tccgagctgcccgagaagtcggacaaggacagcaccagcgcctacaacactggggagagctgccgcagcaccccgctgcttgtggagcccctgcccgagagccccctgcggcgggccatg

SEQ ID NO: 52327 - DNA, 120 bp, Artificial Sequence
  ENSG00000067840_14 (sequence is synthesized)
gccggcaactccaacttgaaccggacccctcccggccccgctgttgccacccccgccaaggcagctcctccaccggggagccccgccaagttccggtccctctcccgggatcctgaggcc

SEQ ID NO: 52328 - DNA, 120 bp, Artificial Sequence
  ENSG00000067840_15 (sequence is synthesized)
cctctcgcggcgccaccgcggccagggccaggagggcgagcactaccacagctgcgtgcagctggccccgacgcgaggcctggaggagctgggccacggccccctgagcttggccggtgg

SEQ ID NO: 52329 - DNA, 120 bp, Artificial Sequence
  ENSG00000067840_16 (sequence is synthesized)
ccctcgggtgggcggggtggcggccgcggccactgaagcaccgcgcatggagtggaaagtgaaggtgcgcagcgacggaacccgctacgtggccaagcggcccgtgcgagatcggctgct

SEQ ID NO: 52330 - DNA, 120 bp, Artificial Sequence
  ENSG00000067840_17 (sequence is synthesized)
gaaagcccgtgccctgaagatccgggaggagcgcagcggtatgacgaccgacgacgacgcggtgagcgagatgaagatgggccgctactggagcaaggaggagcggaagcagcacctgat

SEQ ID NO: 52331 - DNA, 120 bp, Artificial Sequence
  ENSG00000067840_18 (sequence is synthesized)
ccgggcccgtgagcagcggaagcggcgcgagttcatgatgcagagccggctggagtgcctgcgggagcagcagaatggcgacagcaagcccgagctcaacatcattgccctgagccaccg

SEQ ID NO: 52332 - DNA, 120 bp, Artificial Sequence
  ENSG00000067840_19 (sequence is synthesized)
caaaaccatgaagaagcggaacaagaagatcctggacaactggatcaccatccaggagatgctggcccacggcgcgcgctccgccgatggcaagcgggtctacaaccctcttctctcagt

SEQ ID NO: 52333 - DNA, 120 bp, Artificial Sequence
  ENSG00000067840_20 (sequence is synthesized)
ctctcagtcaccaccgtgtgagctgcccgggcgggtacacggcccaggcccagggaaccccctggggccccggccctcactctcctatagagattgtgtgtgtgtgtgtgtgcgcgcgcg

SEQ ID NO: 52334 - DNA, 120 bp, Artificial Sequence
  ENSG00000067840_21 (sequence is synthesized)
ctgtgcgcacgcacacatctcctcgtctgggtgtgcgcacagggctttgttagcagagagaagcccctgaggagaagggacgcttttcttccttctgcccaagtaaagtgaccatgccag

SEQ ID NO: 52335 - DNA, 120 bp, Artificial Sequence
  ENSG00000067840_22 (sequence is synthesized)
tggccagcactgggggcacacctgtgatgggcaccccttcagctgtgcgtgtgcattccccatcccccatgctcttgcgtgtgcttgcacgtgcacgcacacacacacccagtgctctct

SEQ ID NO: 52336 - DNA, 120 bp, Artificial Sequence
  ENSG00000067840_23 (sequence is synthesized)
ccacccgacccgtgtacttgcagacagggaagctgagctgaaaggagcacaagagagtgtccggcttcgctgctgagcgcggcctctccccgccgctgcgcactgcagttatttgtagac

SEQ ID NO: 52337 - DNA, 120 bp, Artificial Sequence
  ENSG00000067840_24 (sequence is synthesized)
aaaggcacccctgatttttgtggtttttctccctttctgtgcttgccaatagttgttttgttttgtggacctgccctgggggctggcagctccttcaggcagcctggcagaagtggaact

SEQ ID NO: 52338 - DNA, 120 bp, Artificial Sequence
  ENSG00000067840_25 (sequence is synthesized)
cccctctccactgatggctgggaagggagttggggaggaagagtgggagggagggctggggatggatgggagggaaggggagggaaaggtgggaggaatgggaagcagctgttctggtgg

SEQ ID NO: 52339 - DNA, 120 bp, Artificial Sequence
  ENSG00000067840_26 (sequence is synthesized)
cttccactctgaggtgtgggaacggggagcctctggggggcacctgtttccccagtgactcagagagagcaagactgcaggaacggaggggtcctgcagggtgtccaccaagaagtcaca

SEQ ID NO: 52340 - DNA, 120 bp, Artificial Sequence
  ENSG00000067840_27 (sequence is synthesized)
gagcccgttctgcgccccacaccatctggagcaggggcttctcttctgagtgaactgaggaaggtgcttagatggtgagggctctagaaaccaagccccatgagcagcagtggaagacct

SEQ ID NO: 52341 - DNA, 120 bp, Artificial Sequence
  ENSG00000067840_28 (sequence is synthesized)
cgggccatgcggcctggggaggacttggtggcgatccgcaacctggaccccagtgagaggcggtgggctgactgggaaggagaggcccccaacctcctcaggatttgcacgtgtgaacta

SEQ ID NO: 52342 - DNA, 120 bp, Artificial Sequence
  ENSG00000067840_29 (sequence is synthesized)
ggctgcctgtggggtgccccttaggcttggagagccccagattggaggcagacagactgcaccaccccttccccccctgcatctcaagaataaagcaagctgcctttgtacttggttgaa

SEQ ID NO: 52343 - DNA, 120 bp, Artificial Sequence
  ENSG00000067840_30 (sequence is synthesized)
ggccgagggaggaccctcctgtccgggacgtcgctgccggaagtgccagggttgagggcctcagctcctcctcctccatcctctctcctctgccgcctcacaagcatcactccttgaatc

SEQ ID NO: 52344 - DNA, 120 bp, Artificial Sequence
  ENSG00000067840_31 (sequence is synthesized)
ttcttgcatcccttgtctgtctcattcctctacctgctctgaatttcctccatctcttcagcttctttctttggcccgaccggaagaagggcctttcatccaggcctggtggctcatgac

SEQ ID NO: 52345 - DNA, 120 bp, Artificial Sequence
  ENSG00000067840_32 (sequence is synthesized)
cgtgggagtgcgtgggcgtccccgggcgcggtccaagtccgtccgggggctgggtgcccaccccgacacccactcccgcctggccctgcccgaacgatgggctcccgggccttaggcgtc

SEQ ID NO: 52346 - DNA, 120 bp, Artificial Sequence
  ENSG00000067840_33 (sequence is synthesized)
ctttgcggggcgtggaccagcagggccccgcggggagggaaggagacgcggggcccggagctcggacctggagcccagccccgcggcccggaacggggcttcttgcctgtgcgtggcgtg

SEQ ID NO: 52347 - DNA, 120 bp, Artificial Sequence
  ENSG00000067842_0 (sequence is synthesized)
gtgtccacgcttagcagctttctcaccgccgccaaaccttgcctgggcactgggaccgtgggtggccgcctgtccctagctgtggctgagccaagattgcacttgtgagaaggcctgaca

SEQ ID NO: 52348 - DNA, 120 bp, Artificial Sequence
  ENSG00000067842_1 (sequence is synthesized)
ggcagcatgggcgacatggccaatagttccatcgagttccaccccaagccccagcagcagcgggatgtcccccaggctggaggctttgggtgcacgctggcggagctgcgcaccctcatg

SEQ ID NO: 52349 - DNA, 120 bp, Artificial Sequence
  ENSG00000067842_2 (sequence is synthesized)
gagctgcgaggggccgaggcgctgcagaagatcgaggaggcctacggggatgtcagcgggctctgccggaggctgaagacctcacccacagagggcctggcggacaacaccaatgacctg

SEQ ID NO: 52350 - DNA, 120 bp, Artificial Sequence
  ENSG00000067842_3 (sequence is synthesized)
gagaagcgcaggcagatctacgggcagaacttcatccccccaaagcaacccaagaccttcctgcagctggtgtgggaggccctgcaggacgtgaccctcatcatcctggaggtggctgcc

SEQ ID NO: 52351 - DNA, 120 bp, Artificial Sequence
  ENSG00000067842_4 (sequence is synthesized)
atcgtctctctgggcctctcgttctatgcgccgccaggagaggagagtgaagcctgtgggaatgtgtcgggaggcgcagaagatgagggcgaggccgaagctggctggatcgagggggct

SEQ ID NO: 52352 - DNA, 120 bp, Artificial Sequence
  ENSG00000067842_5 (sequence is synthesized)
gccatcctgctgtccgtcatctgtgtggtgctggtcacggccttcaatgactggagcaaggagaagcagttccgaggcctgcagagccgaattgagcaggagcagaagttcacggtcatc

SEQ ID NO: 52353 - DNA, 120 bp, Artificial Sequence
  ENSG00000067842_6 (sequence is synthesized)
cggaacgggcagctcctccaggtccccgtggctgcgctggtggtgggggacattgcccaggtcaagtacggcgacctgctgccagccgacggcgtgctcatccaggccaatgacctcaag

SEQ ID NO: 52354 - DNA, 120 bp, Artificial Sequence
  ENSG00000067842_7 (sequence is synthesized)
atcgacgagagctccctgacgggcgagtctgaccacgtgcgcaagtcagctgacaaagatcccatgctgctctcaggcactcatgtcatggaaggttctggaagaatggtggtgaccgcc

SEQ ID NO: 52355 - DNA, 120 bp, Artificial Sequence
  ENSG00000067842_8 (sequence is synthesized)
gttggcgtgaattcccagacaggcatcatcttcacgctgcttggagctggcggagaggaggaagagaagaaagataagaaaggcaagcagcaggatggggccatggagagtagccagacc

SEQ ID NO: 52356 - DNA, 120 bp, Artificial Sequence
  ENSG00000067842_9 (sequence is synthesized)
aaagctaagaagcaggatggtgcagtggccatggagatgcagcccctgaagagcgcggagggtggggagatggaggagcgggagaagaagaaagccaacgcacccaaaaaggagaagtct

SEQ ID NO: 52357 - DNA, 120 bp, Artificial Sequence
  ENSG00000067842_10 (sequence is synthesized)
gtccttcaggggaagctcacaaagctagccgtgcagatcgggaaagcagggctggtgatgtctgccatcaccgtcatcatcctggtcctctactttgtgattgagacgtttgtcgtggaa

SEQ ID NO: 52358 - DNA, 120 bp, Artificial Sequence
  ENSG00000067842_11 (sequence is synthesized)
ggccggacatggctggcagagtgcacgccggtctatgtacaatacttcgtgaagttcttcatcattggtgtcactgtgctggtcgtggctgtcccagagggcctgcctcttgctgtcacc

SEQ ID NO: 52359 - DNA, 120 bp, Artificial Sequence
  ENSG00000067842_12 (sequence is synthesized)
atctccttagcttactctgtcaagaaaatgatgaaagacaacaacctggtgcgccacctggatgcctgcgagaccatgggcaacgccacagccatctgctccgacaagacgggcacgctc

SEQ ID NO: 52360 - DNA, 120 bp, Artificial Sequence
  ENSG00000067842_13 (sequence is synthesized)
accaccaaccgtatgaccgtggtccagtcctacctaggagacacccactacaaagagattccggcccccagcgccctgacccctaagatcctcgacctcctggtccatgccatctccatc

SEQ ID NO: 52361 - DNA, 120 bp, Artificial Sequence
  ENSG00000067842_14 (sequence is synthesized)
aacagtgcctataccaccaaaatactacctcctgagaaggaaggcgccctcccacgccaggtgggcaataagacggagtgcgccctgctgggcttcgtcttggacctgaagcgggacttc

SEQ ID NO: 52362 - DNA, 120 bp, Artificial Sequence
  ENSG00000067842_15 (sequence is synthesized)
cagcccgtgcgcgagcagatcccggaagacaagctttacaaagtgtacaccttcaactcggtccgcaagtccatgagcacagtcatccgcatgcccgacggtggcttccgcctcttcagc

SEQ ID NO: 52363 - DNA, 120 bp, Artificial Sequence
  ENSG00000067842_16 (sequence is synthesized)
aagggggcctcagagatcctcttgaaaaagtgcaccaacatcttgaacagcaatggcgaactccggggctttcggcctcgggaccgggacgacatggtgaggaagatcatcgagccgatg

SEQ ID NO: 52364 - DNA, 120 bp, Artificial Sequence
  ENSG00000067842_17 (sequence is synthesized)
accgggacttctctgcaggccaggagcccgactgggacaacgagaatgaggtcgtgggtgacctcacctgcatagctgtcgtgggcattgaggaccctgtgcggcccgaggtccctgaag

SEQ ID NO: 52365 - DNA, 120 bp, Artificial Sequence
  ENSG00000067842_18 (sequence is synthesized)
ctatccgaaaatgccagcgtgctggcatcacagtccgcatggtgactggggacaacatcaacacggcccgggccatcgcagccaaatgcggcatcatccagcccggggaggacttcctgt

SEQ ID NO: 52366 - DNA, 120 bp, Artificial Sequence
  ENSG00000067842_19 (sequence is synthesized)
gcctagaagggaaggagttcaaccggcggatccgcaatgagaaaggcgagatagaacaggagcggctggacaaggtgtggcccaagctgagggtgctggcccggtcgtctcccaccgaca

SEQ ID NO: 52367 - DNA, 120 bp, Artificial Sequence
  ENSG00000067842_20 (sequence is synthesized)
agcacacactggtcaaagggattatcgacagcaccactggtgagcagcggcaggtggtggctgtgacaggggatggcaccaacgatgggccggccctcaagaaggcggacgtgggcttcg

SEQ ID NO: 52368 - DNA, 120 bp, Artificial Sequence
  ENSG00000067842_21 (sequence is synthesized)
ccatgggcatcgcagggaccgacgtggccaaggaggcctccgacatcatcctgaccgatgacaacttcaccagcatcgtcaaggcagtcatgtggggccgtaacgtctatgacagcatct

SEQ ID NO: 52369 - DNA, 120 bp, Artificial Sequence
  ENSG00000067842_22 (sequence is synthesized)
ccaagttcctgcagtttcaactgacggtcaatgtggtggctgtgatcgtggccttcacaggtgcctgcattactcaggactctcctctcaaagccgtgcagatgttgtgggtgaacttga

SEQ ID NO: 52370 - DNA, 120 bp, Artificial Sequence
  ENSG00000067842_23 (sequence is synthesized)
tcatggacacatttgcctctctggccctggcgacggagccacccacagagtcgctgctgctgcggaagccgtacggccgcgacaagcccctcatctcccgcaccatgatgaagaacattc

SEQ ID NO: 52371 - DNA, 120 bp, Artificial Sequence
  ENSG00000067842_24 (sequence is synthesized)
tgggccacgccgtgtaccagctcgccatcatcttcaccctgctgtttgtcggggagctcttcttcgacatcgacagcgggaggaatgcgcccctgcactcgccaccctcagagcactaca

SEQ ID NO: 52372 - DNA, 120 bp, Artificial Sequence
  ENSG00000067842_25 (sequence is synthesized)
ccatcatcttcaacacgttcgtcatgatgcagctctttaacgagatcaacgcccgcaagatccacggcgagaggaacgtgttcgacggcatcttcagcaaccccatcttctgcaccatcg

SEQ ID NO: 52373 - DNA, 120 bp, Artificial Sequence
  ENSG00000067842_26 (sequence is synthesized)
ttttgggcactttcgggattcagattgtcatcgtccagtttggcgggaagcccttcagctgctccccactatccacagaacagtggctctggtgcctgtttgttggtgttggggagctgg

SEQ ID NO: 52374 - DNA, 120 bp, Artificial Sequence
  ENSG00000067842_27 (sequence is synthesized)
tctggggacaggtcattgccaccatccccaccagccagctcaagtgcctgaaggaagccgggcacgggcccgggaaggacgagatgaccgacgaggagctggccgaaggcgaggaagaga

SEQ ID NO: 52375 - DNA, 120 bp, Artificial Sequence
  ENSG00000067842_28 (sequence is synthesized)
tcgaccatgccgagcgggagctccgcaggggccagatcctctggttccggggcctgaaccggattcagacgcagatggaggtagtgagtaccttcaagagaagcggttcagttcagggtg

SEQ ID NO: 52376 - DNA, 120 bp, Artificial Sequence
  ENSG00000067842_29 (sequence is synthesized)
ctgtgcgccggcggtcttcggtcctcagccagcttcatgacgtaaccaatctttctacccctactcacgcaattctctctgctgccaatcctaccagtgctgctgggaatccgggtggtg

SEQ ID NO: 52377 - DNA, 120 bp, Artificial Sequence
  ENSG00000067842_30 (sequence is synthesized)
aaagcgttccgtagctcgctctatgaaggcctggagaaaccagaatccaagacctccattcacaacttcatggccacgcccgagtttctgatcaatgactacacccacaacatcccgctc

SEQ ID NO: 52378 - DNA, 120 bp, Artificial Sequence
  ENSG00000067842_31 (sequence is synthesized)
attgacgacacggacgtggacgagaacgaggagcgcctccgggcccccccgcccccgtcccccaaccagaacaacaacgccatagacagcggcatctacctgaccacgcatgtcaccaag

SEQ ID NO: 52379 - DNA, 120 bp, Artificial Sequence
  ENSG00000067842_32 (sequence is synthesized)
tcagctacctcttcagtgttttcctccagtcccgggagcccgctccacagcgtggagacgtccctctaacaagaacttgtctcagcacatgcgcacacgcacactcggactcacacgaag

SEQ ID NO: 52380 - DNA, 120 bp, Artificial Sequence
  ENSG00000067842_33 (sequence is synthesized)
tcacacgcacacatgcacgcacacacacatatggggacctgcacacctgcaaaacgagggaacaactaaggtggctgaagacctttctggcagggcatttgcaaggacccaaatccattc

SEQ ID NO: 52381 - DNA, 120 bp, Artificial Sequence
  ENSG00000067842_34 (sequence is synthesized)
aacaagggtgcagcctgccacaggctcctcatccggactgaggaagacgaggacagggaggaggaaaaggaggaagaggaggacaaaaagggggaggagaaggttcttcgtccaaaggag

SEQ ID NO: 52382 - DNA, 120 bp, Artificial Sequence
  ENSG00000067842_35 (sequence is synthesized)
ttcttttttaacaaactacagttttaccgtgtgtttgccatttgagctgtgtggtgggcagggggctggtttgggtttatggggagcttttgttgcacccatgcaggggcaatcagatca

SEQ ID NO: 52383 - DNA, 120 bp, Artificial Sequence
  ENSG00000067842_36 (sequence is synthesized)
gcatcttcatgcaaaaaaaaaaaaaaagttgagtgctctgcaggcctgtgaagggtgccacctgagggagccgcctgcaagcggccctgcagccacaaagcaacccgccctctgcaaaaa

SEQ ID NO: 52384 - DNA, 120 bp, Artificial Sequence
  ENSG00000067842_37 (sequence is synthesized)
ctaggcacatccgcagtgcgcatgtgtgtgcgtgcatgcacatatgtgtatgtgtgtggatctgtacacacacacgtatatatggccagatgcgtatttcaataaggaactatttactgg

SEQ ID NO: 52385 - DNA, 120 bp, Artificial Sequence
  ENSG00000067842_38 (sequence is synthesized)
catgatatttgcattcctcttatcaggcattttcatttggaaatttcattattgaatgtagcaaggttgtagttgtttttttttttttttcagggaactagactgcaagaatatctttct

SEQ ID NO: 52386 - DNA, 120 bp, Artificial Sequence
  ENSG00000067842_39 (sequence is synthesized)
ggtcaacccatttttgtccctcatcaccccgcccccacctttcgctcctgccctctgcccggccctactgagattcccaaggagaaggccgagagggggcgctccaggtctggagcaggt

SEQ ID NO: 52387 - DNA, 120 bp, Artificial Sequence
  ENSG00000067842_40 (sequence is synthesized)
ataattggagcatttgcactgagacccctgccagagaggagaaaaccctttcaagggaaattttaatctaaaaggaaaaaaccaaaatattgatgagaaggagtcctccagttagtgaaa

SEQ ID NO: 52388 - DNA, 120 bp, Artificial Sequence
  ENSG00000067842_41 (sequence is synthesized)
ggggagtttcgttttcagctttctttggttcctactccaattccacatccttcatcctggccatgcccccaccttcaagagcatgaagcactcttggagttgtgggtcctgcccagagtc

SEQ ID NO: 52389 - DNA, 120 bp, Artificial Sequence
  ENSG00000067842_42 (sequence is synthesized)
cagagagcagcctcagctgagcacaggtccgagggggcgggggcagggccaagagttcaaaagaagccaatggagggagagggagcgtcagaagcccggaggagctggtggtgggagaat

SEQ ID NO: 52390 - DNA, 120 bp, Artificial Sequence
  ENSG00000067842_43 (sequence is synthesized)
gacggcagggacgcagccacagttcagaccctgtcccctcagcacctggatggactcccactgtttgctttggcaaatgccgaggagtcctcggtagaccaccttgatgtctgctgtgac

SEQ ID NO: 52391 - DNA, 120 bp, Artificial Sequence
  ENSG00000067842_44 (sequence is synthesized)
atcagaggtgccaccaccaaagcactcttcccaccctagtctttgtgtccagcggccaagcttaagccatgaagtcatggatttgtggctcagcaccaggtcctgaggggagcgtatcct

SEQ ID NO: 52392 - DNA, 120 bp, Artificial Sequence
  ENSG00000067842_45 (sequence is synthesized)
ggcagtgtgggcacctggtggccaagcctcagtttcccccaaatgagcaaaggggataaagaggggcccgacttttgccaccctcctgaggaagcccctaggtccacacagtgatgccat

SEQ ID NO: 52393 - DNA, 120 bp, Artificial Sequence
  ENSG00000067842_46 (sequence is synthesized)
gggggacccttgccttccacacttgcaggtgtcacgttttgcagggaggtgtttgggccttgggctcagccactgggagacagttgggacctgagggacagaggatcggaatggaaacca

SEQ ID NO: 52394 - DNA, 120 bp, Artificial Sequence
  ENSG00000067842_47 (sequence is synthesized)
ccaacgtgcactggcaccctcagaaggcttgtctcacctccaccggcatccacacaaaaccaaacaggagcaggcgtcatccccactattcccatgaatgccatgtcacccctgagcaga

SEQ ID NO: 52395 - DNA, 120 bp, Artificial Sequence
  ENSG00000067842_48 (sequence is synthesized)
agcagtcaaatcttgggcaaaagaatttcggttagaaaagaaaatcccactttaaaatgccagctgcagataactcaaagccatcccttttttctaaagggcacattgagaatgtcaccc

SEQ ID NO: 52396 - DNA, 120 bp, Artificial Sequence
  ENSG00000067842_49 (sequence is synthesized)
atttgtaaactgttccctgatgtccttgtttaaacgataataagaaaaagggcaactccatttgttgagggtctttgtgttcttcaatgagaaatcaaatttgagacgttgaaattggag

SEQ ID NO: 52397 - DNA, 120 bp, Artificial Sequence
  ENSG00000067842_50 (sequence is synthesized)
ctgcgtgctgctgcactcaccggcttcttctcactctctgtcgtagacacaccgataggaccaatggccaatagatattaaaagcaaaccctcactgctgctgtataaagttgcctaatg

SEQ ID NO: 52398 - DNA, 120 bp, Artificial Sequence
  ENSG00000067842_51 (sequence is synthesized)
taaatgtctattgtttagtccctaggtcacctttgtgctgtgctgtggagttcagaaacggggtaccatgacctggaatcttttgctcttgtttttgcagtcttcaaggctgggggccct

SEQ ID NO: 52399 - DNA, 120 bp, Artificial Sequence
  ENSG00000067842_52 (sequence is synthesized)
gtctcattgggaagcccctctttataaagcattatattacttggaatggcttggtcaactgtgttcagttcataaatatgttttacatttttatctgcctgttataaagatgaacaaaaa

SEQ ID NO: 52400 - DNA, 120 bp, Artificial Sequence
  ENSG00000067842_53 (sequence is synthesized)
aacttaatgagaaagatcacagatacgtaataatttaaagtctgtagttgaatttcctaacttaaagaatagaccaaaatttctgtgtataaaaaaaaatgaaaggctccttacatcctg

SEQ ID NO: 52401 - DNA, 120 bp, Artificial Sequence
  ENSG00000067842_54 (sequence is synthesized)
ggtgcagagcgtggggagcactcggccgcagccctcgcccgccgcagagggtcgcgtcccgcgccgccggccaggccgccccgtgcccaggcctttccatccttggagcggatcgttgcc

SEQ ID NO: 52402 - DNA, 120 bp, Artificial Sequence
  ENSG00000067842_55 (sequence is synthesized)
gtggccttcacaggtgcctgcattactcagttctggaagtttcctatgaatggaatcagacagtacgtggccttgtgtgtctggcttctgtgaggctgatttttaacgaacaactcagag

SEQ ID NO: 52403 - DNA, 120 bp, Artificial Sequence
  ENSG00000067842_56 (sequence is synthesized)
agacaaggagagcagccctcactctgttgccccaaatggcagaccccatcgtcgggctgttttgtggtctggggtttttcacctcctgcgagggatttggagcacacctgctgccaggac

SEQ ID NO: 52404 - DNA, 120 bp, Artificial Sequence
  ENSG00000067842_57 (sequence is synthesized)
cagccaacagtcgctctaaatgggccttactctaactgatggatcctgtctgccctatagcctgttgcattcatgaagacagtgagggttagcagagcaccccgaccccaccctgtcctc

SEQ ID NO: 52405 - DNA, 120 bp, Artificial Sequence
  ENSG00000067842_58 (sequence is synthesized)
caggatggagactccacctcccaggactccaagttcctcccctgtgggccaggcccccattcactcattcctccaggcccccggccacatgcgggactgaccacgcggtagacttcctgc

SEQ ID NO: 52406 - DNA, 120 bp, Artificial Sequence
  ENSG00000067842_59 (sequence is synthesized)
cttgcattccgctcaccgtggcttttctgttctttctttaccgccctgtccagtccttcccgcccagacggtgtctctcgaaagccatattcttttatgaaacgtattcaacccatggca

SEQ ID NO: 52407 - DNA, 120 bp, Artificial Sequence
  ENSG00000067900_0 (sequence is synthesized)
agtctgccccggcggtctccgtttgtttgaacaggaaggcggacatattagtccctctcagcccccctcgccccaccccccaggcattcgccgccgcgactcgccctttccccggctggg

SEQ ID NO: 52408 - DNA, 120 bp, Artificial Sequence
  ENSG00000067900_1 (sequence is synthesized)
accgcagcccctcccagaagctcccccatcagcagccgccgggacccaactatcgtcttcctcttcgcccgctctccagcctttcctctgctaagtctccatcgggcatcgacctcgccc

SEQ ID NO: 52409 - DNA, 120 bp, Artificial Sequence
  ENSG00000067900_2 (sequence is synthesized)
tgccccaccggacaccgtagcagcagccccagcagcgacgggacaaaatgggagagtgaggctgtcctgcgtggaccagctcgtggccgagactgatcggtgcgtcgggccgggccgagt

SEQ ID NO: 52410 - DNA, 120 bp, Artificial Sequence
  ENSG00000067900_3 (sequence is synthesized)
agagccggggacgcggggctagaccgtctacagcgcctctgagcggagcgggcccggcccgtggcccgagcggcggccgcagctggcacagctcctcacccgccctttgctttcgccttt

SEQ ID NO: 52411 - DNA, 120 bp, Artificial Sequence
  ENSG00000067900_4 (sequence is synthesized)
cctcttctccctcccttgttgcccggagggagtctccaccctgcttctctttctctacccgctcctgcccatctcgggacggggacccctccatggcgacggcggccggggcccgctaga

SEQ ID NO: 52412 - DNA, 120 bp, Artificial Sequence
  ENSG00000067900_5 (sequence is synthesized)
ctgaagcacctcgccggagcgacgaggctggtggcgacggcgctgtcggctgtcgtgaggggctgccgggtgggatgcgactttgggcgtccgagcggctgtgggtcgctgttgcccccg

SEQ ID NO: 52413 - DNA, 120 bp, Artificial Sequence
  ENSG00000067900_6 (sequence is synthesized)
gcccggggtctggagagcggaggtcccctcagtgaggggaagacgggggaaccgggcgcacctggtgaccctgaggttccggctcctccgccccgcggctgcgaacccaccgcggaggaa

SEQ ID NO: 52414 - DNA, 120 bp, Artificial Sequence
  ENSG00000067900_7 (sequence is synthesized)
gttggttgaaattgctttccgctgctggtgctggtaagagggcattgtcacagcagcagcaacatgtcgactggggacagttttgagactcgatttgaaaaaatggacaacctgctgcgg

SEQ ID NO: 52415 - DNA, 120 bp, Artificial Sequence
  ENSG00000067900_8 (sequence is synthesized)
gatcccaaatcggaagtgaattcggattgtttgctggatggattggatgctttggtatatgatttggattttcctgccttaagaaaaaacaaaaatattgacaactttttaagcagatat

SEQ ID NO: 52416 - DNA, 120 bp, Artificial Sequence
  ENSG00000067900_9 (sequence is synthesized)
aaagacacaataaataaaatcagagatttacgaatgaaagctgaagattatgaagtagtgaaggtgattggtagaggtgcatttggagaagttcaattggtaaggcataaatccaccagg

SEQ ID NO: 52417 - DNA, 120 bp, Artificial Sequence
  ENSG00000067900_10 (sequence is synthesized)
aaggtatatgctatgaagcttctcagcaaatttgaaatgataaagagatctgattctgcttttttctgggaagaaagggacatcatggcttttgccaacagtccttgggttgttcagctt

SEQ ID NO: 52418 - DNA, 120 bp, Artificial Sequence
  ENSG00000067900_11 (sequence is synthesized)
ttttatgcattccaagatgatcgttatctctacatggtgatggaatacatgcctggtggagatcttgtaaacttaatgagcaactatgatgtgcctgaaaaatgggcacgattctatact

SEQ ID NO: 52419 - DNA, 120 bp, Artificial Sequence
  ENSG00000067900_12 (sequence is synthesized)
gcagaagtagttcttgcattggatgcaatccattccatgggttttattcacagagatgtgaagcctgataacatgctgctggataaatctggacatttgaagttagcagattttggtact

SEQ ID NO: 52420 - DNA, 120 bp, Artificial Sequence
  ENSG00000067900_13 (sequence is synthesized)
tgtatgaagatgaataaggaaggcatggtacgatgtgatacagcggttggaacacctgattatatttcccctgaagtattaaaatcccaaggtggtgatggttattatggaagagaatgt

SEQ ID NO: 52421 - DNA, 120 bp, Artificial Sequence
  ENSG00000067900_14 (sequence is synthesized)
gactggtggtcggttggggtatttttatacgaaatgcttgtaggtgatacacctttttatgcagattctttggttggaacttacagtaaaattatgaaccataaaaattcacttaccttt

SEQ ID NO: 52422 - DNA, 120 bp, Artificial Sequence
  ENSG00000067900_15 (sequence is synthesized)
cctgatgataatgacatatcaaaagaagcaaaaaaccttatttgtgccttccttactgacagggaagtgaggttagggcgaaatggtgtagaagaaatcaaacgacatctcttcttcaaa

SEQ ID NO: 52423 - DNA, 120 bp, Artificial Sequence
  ENSG00000067900_16 (sequence is synthesized)
aatgaccagtgggcttgggaaacgctccgagacactgtagcaccagttgtacccgatttaagtagtgacattgatactagtaattttgatgacttggaagaagataaaggagaggaagaa

SEQ ID NO: 52424 - DNA, 120 bp, Artificial Sequence
  ENSG00000067900_17 (sequence is synthesized)
acattccctattcctaaagctttcgttggcaatcaactaccttttgtaggatttacatattatagcaatcgtagatacttatcttcagcaaatcctaatgataacagaactagctccaat

SEQ ID NO: 52425 - DNA, 120 bp, Artificial Sequence
  ENSG00000067900_18 (sequence is synthesized)
gcagataaaagcttgcaggaaagtttgcaaaaaacaatctataagctggaagaacagctgcataatgaaatgcagttaaaagatgaaatggagcagaagtgcagaacctcaaacataaaa

SEQ ID NO: 52426 - DNA, 120 bp, Artificial Sequence
  ENSG00000067900_19 (sequence is synthesized)
ctagacaagataatgaaagaattggatgaagagggaaatcaaagaagaaatctagaatctacagtgtctcagattgagaaggagaaaatgttgctacagcatagaattaatgagtaccaa

SEQ ID NO: 52427 - DNA, 120 bp, Artificial Sequence
  ENSG00000067900_20 (sequence is synthesized)
agaaaagctgaacaggaaaatgagaagagaagaaatgtagaaaatgaagtttctacattaaaggatcagttggaagacttaaagaaagtcagtcagaattcacagcttgctaatgagaag

SEQ ID NO: 52428 - DNA, 120 bp, Artificial Sequence
  ENSG00000067900_21 (sequence is synthesized)
ctgtcccagttacaaaagcagctagaagaagccaatgacttacttaggacagaatcggacacagctgtaagattgaggaagagtcacacagagatgagcaagtcaattagtcagttagag

SEQ ID NO: 52429 - DNA, 120 bp, Artificial Sequence
  ENSG00000067900_22 (sequence is synthesized)
tccctgaacagagagttgcaagagagaaatcgaattttagagaattctaagtcacaaacagacaaagattattaccagctgcaagctatattagaagctgaacgaagagacagaggtcat

SEQ ID NO: 52430 - DNA, 120 bp, Artificial Sequence
  ENSG00000067900_23 (sequence is synthesized)
gattctgagatgattggagaccttcaagctcgaattacatctttacaagaggaggtgaagcatctcaaacataatctcgaaaaagtggaaggagaaagaaaagaggctcaagacatgctt

SEQ ID NO: 52431 - DNA, 120 bp, Artificial Sequence
  ENSG00000067900_24 (sequence is synthesized)
aatcactcagaaaaggaaaagaataatttagagatagatttaaactacaaacttaaatcattacaacaacggttagaacaagaggtaaatgaacacaaagtaaccaaagctcgtttaact

SEQ ID NO: 52432 - DNA, 120 bp, Artificial Sequence
  ENSG00000067900_25 (sequence is synthesized)
gacaaacatcaatctattgaagaggcaaagtctgtggcaatgtgtgagatggaaaaaaagctgaaagaagaaagagaagctcgagagaaggctgaaaatcgggttgttcagattgagaaa

SEQ ID NO: 52433 - DNA, 120 bp, Artificial Sequence
  ENSG00000067900_26 (sequence is synthesized)
cagtgttccatgctagacgttgatctgaagcaatctcagcagaaactagaacatttgactggaaataaagaaaggatggaggatgaagttaagaatctaaccctgcaactggagcaggaa

SEQ ID NO: 52434 - DNA, 120 bp, Artificial Sequence
  ENSG00000067900_27 (sequence is synthesized)
tcaaataagcggctgttgttacaaaatgaattgaagactcaagcatttgaggcagacaatttaaaaggtttagaaaagcagatgaaacaggaaataaatactttattggaagcaaagaga

SEQ ID NO: 52435 - DNA, 120 bp, Artificial Sequence
  ENSG00000067900_28 (sequence is synthesized)
ttattagaatttgagttagctcagcttacgaaacagtatagaggaaatgaaggacagatgcgggagctacaagatcagcttgaagctgagcaatatttctcgacactttataaaacccag

SEQ ID NO: 52436 - DNA, 120 bp, Artificial Sequence
  ENSG00000067900_29 (sequence is synthesized)
gtaaaggaacttaaagaagaaattgaagaaaaaaacagagaaaatttaaagaaaatacaggaactacaaaatgaaaaagaaactcttgctactcagttggatctagcagaaacaaaagct

SEQ ID NO: 52437 - DNA, 120 bp, Artificial Sequence
  ENSG00000067900_30 (sequence is synthesized)
gagtctgagcagttggcgcgaggccttctggaagaacagtattttgaattgacgcaagaaagcaagaaagctgcttcaagaaatagacaagagattacagataaagatcacactgttagt

SEQ ID NO: 52438 - DNA, 120 bp, Artificial Sequence
  ENSG00000067900_31 (sequence is synthesized)
cggcttgaagaagcaaacagcatgctaaccaaagatattgaaatattaagaagagagaatgaagagctaacagagaaaatgaagaaggcagaggaagaatataaactggagaaggaggag

SEQ ID NO: 52439 - DNA, 120 bp, Artificial Sequence
  ENSG00000067900_32 (sequence is synthesized)
gagatcagtaatcttaaggctgcctttgaaaagaatatcaacactgaacgaacccttaaaacacaggctgttaacaaattggcagaaataatgaatcgaaaagattttaaaattgataga

SEQ ID NO: 52440 - DNA, 120 bp, Artificial Sequence
  ENSG00000067900_33 (sequence is synthesized)
aagaaagctaatacacaagatttgagaaagaaagaaaaggaaaatcgaaagctgcaactggaactcaaccaagaaagagagaaattcaaccagatggtagtgaaacatcagaaggaactg

SEQ ID NO: 52441 - DNA, 120 bp, Artificial Sequence
  ENSG00000067900_34 (sequence is synthesized)
aatgacatgcaagcgcaattggtagaagaatgtgcacataggaatgagcttcagatgcagttggccagcaaagagagtgatattgagcaattgcgtgctaaacttttggacctctcggat

SEQ ID NO: 52442 - DNA, 120 bp, Artificial Sequence
  ENSG00000067900_35 (sequence is synthesized)
tctacaagtgttgctagttttcctagtgctgatgaaactgatggtaacctcccagagtcaagaattgaaggttggctttcagtaccaaatagaggaaatatcaaacgatatggctggaag

SEQ ID NO: 52443 - DNA, 120 bp, Artificial Sequence
  ENSG00000067900_36 (sequence is synthesized)
aaacagtatgttgtggtaagcagcaaaaaaattttgttctataatgacgaacaagataaggagcaatccaatccatctatggtattggacatagataaactgtttcacgttagacctgta

SEQ ID NO: 52444 - DNA, 120 bp, Artificial Sequence
  ENSG00000067900_37 (sequence is synthesized)
acccaaggagatgtgtatagagctgaaactgaagaaattcctaaaatattccagatactatatgcaaatgaaggtgaatgtagaaaagatgtagagatggaaccagtacaacaagctgaa

SEQ ID NO: 52445 - DNA, 120 bp, Artificial Sequence
  ENSG00000067900_38 (sequence is synthesized)
aaaactaatttccaaaatcacaaaggccatgagtttattcctacactctaccactttcctgccaattgtgatgcctgtgccaaacctctctggcatgtttttaagccaccccctgcccta

SEQ ID NO: 52446 - DNA, 120 bp, Artificial Sequence
  ENSG00000067900_39 (sequence is synthesized)
tgtaacatcagcaagagatatgctgctgttagcatgttctcaggatgaacaaaaaaaatgggtaactcatttagtaaagaaaatccctaagaatccaccatctggttttgttcgtgcttc

SEQ ID NO: 52447 - DNA, 120 bp, Artificial Sequence
  ENSG00000067900_40 (sequence is synthesized)
ccctcgaacgctttctacaagatccactgcaaatcagtctttccggaaagtggtcaaaaatacatctggaaaaactagttaaccatgtgactgagtgccctgtggaatcgtgtgggatgc

SEQ ID NO: 52448 - DNA, 120 bp, Artificial Sequence
  ENSG00000067900_41 (sequence is synthesized)
tacctgataaaccaggcttctttaaccatgcagagcagacaggctgtttctttgacacaaatatcacaggcttcagggttaagattgctgtttttctgtccttgctttggcacaacacac

SEQ ID NO: 52449 - DNA, 120 bp, Artificial Sequence
  ENSG00000067900_42 (sequence is synthesized)
tgagggttttttttattgcgggtttgcctacaggtagattagattaattattactatgtaatgcaagtacagttgggggaaagcttaggtagatatattttttttaaaaggtgctgcctt

SEQ ID NO: 52450 - DNA, 120 bp, Artificial Sequence
  ENSG00000067900_43 (sequence is synthesized)
tttggatttataagaaaatgcctgtcagtcgtgatagaacagagttttcctcatatgagtaagaggaagggactttcactttcaagtggaacagccatcactatcaagatcagctcatgg

SEQ ID NO: 52451 - DNA, 120 bp, Artificial Sequence
  ENSG00000067900_44 (sequence is synthesized)
aaggagtaaagaaaatatctcaaaatgagacaaactgaagttttgttttttttttaatgacttaagtttttgtgctcttgcaagactatacaaaactattttaagaaagcagtgatatca

SEQ ID NO: 52452 - DNA, 120 bp, Artificial Sequence
  ENSG00000067900_45 (sequence is synthesized)
cttgaacttcagtgccctcactgtagaatttaaaagccttactgttgattgcccatgttggacttgatggagaaattaaatatctttcattatgctttacaaaatactgtatatgtttca

SEQ ID NO: 52453 - DNA, 120 bp, Artificial Sequence
  ENSG00000067900_46 (sequence is synthesized)
gcaagtttggggaatgggagaggacaaaaaaaagttacatttaatctatgcatttttgccaagccatattgagttattttactactagagacattaggaaactaactgtacaaaagaacc

SEQ ID NO: 52454 - DNA, 120 bp, Artificial Sequence
  ENSG00000067900_47 (sequence is synthesized)
aagtttaaaagcattttgtggggtacatcatttctataattgtataatgtatttctttgtggttttaaatgataaagacattaagttaacaaacatataagaaatgtatgcactgtttga

SEQ ID NO: 52455 - DNA, 120 bp, Artificial Sequence
  ENSG00000067900_48 (sequence is synthesized)
aatgtaaattattcttagaacactttcaatgggggttgcattgtccttttagtgccttaatttgagataattattttactgccatgagtaagtatagaaatttcaaaaaatgtattttca

SEQ ID NO: 52456 - DNA, 120 bp, Artificial Sequence
  ENSG00000067900_49 (sequence is synthesized)
aaaaattatgtgtgtcagtgagtttttcattgataattggtttaatttaaaatatttagaggtttgttggactttcataaattgagtacaatctttgcatcaaactacctgctacaataa

SEQ ID NO: 52457 - DNA, 120 bp, Artificial Sequence
  ENSG00000067900_50 (sequence is synthesized)
tgactttataaaactgcaaaaaatgtagaaggttgcaccaacataaaaaggaaatatggcaatacatccatgatgttttccagttaacataggaattaccagataaatactgttaaactc

SEQ ID NO: 52458 - DNA, 120 bp, Artificial Sequence
  ENSG00000067900_51 (sequence is synthesized)
ttgtccagtaacaagagttgattcatatggacagtatgatttattgtttatttttttaaccaaatacctcctcagtaatttataatggctttgcagtaatgtgtatcagataagaagcac

SEQ ID NO: 52459 - DNA, 120 bp, Artificial Sequence
  ENSG00000067900_52 (sequence is synthesized)
tggaaaaccgatcgtctctaggatgatatgcatgtttcaagtggtattgaaagccgcactgatggatatgtaataataaacatatctgttattaatatactaatgactctgtgctcattt

SEQ ID NO: 52460 - DNA, 120 bp, Artificial Sequence
  ENSG00000067900_53 (sequence is synthesized)
aatgagaaataaaagtaatttatggatgggtatctttaatttttactgcaatgtgttttctcatggctgaaatgaatggaaaacatacttcaaattagtctctgattgtatataaatgtt

SEQ ID NO: 52461 - DNA, 120 bp, Artificial Sequence
  ENSG00000067900_54 (sequence is synthesized)
tgtgaaattccatggttagattaaagtgtatttttaaaagataaaacgtggtcttgggctctaaaacaagagtgggaatagttcacatgaaaagctggctaaagtgtgttggaaaacaat

SEQ ID NO: 52462 - DNA, 120 bp, Artificial Sequence
  ENSG00000067900_55 (sequence is synthesized)
tctccatgggtctcttgcatttctacacatcagggaagcagaggctctgacaacctttcttttgactatcttttccaaggatatttatgtagtaaacagccttggaagatagagttctcc

SEQ ID NO: 52463 - DNA, 120 bp, Artificial Sequence
  ENSG00000067900_56 (sequence is synthesized)
cttgtgaggatgtcgggttcttttactgtccagtataataaagataacgtctcccacctatgatgcaaacccactgtgtgctcagcacccacctgggccactctgcattgcccacatggg

SEQ ID NO: 52464 - DNA, 120 bp, Artificial Sequence
  ENSG00000067900_57 (sequence is synthesized)
gcttggagggcaaagggaactgatggaacgtgaaacttatgctgcttttgctgtgctgtgaatgaagtcatctgactctgacccaggggtctcatctcttttgtcaggatccatgaaact

SEQ ID NO: 52465 - DNA, 120 bp, Artificial Sequence
  ENSG00000067900_58 (sequence is synthesized)
gtgactggcagcatgcaaacaggataaaatctcagcacagttcctgacggtgtccttactaccttctcagactcatcaccattacctaatattttaaggtccagttgcagagaacagagt

SEQ ID NO: 52466 - DNA, 120 bp, Artificial Sequence
  ENSG00000067900_59 (sequence is synthesized)
taattctaattagtttaagcaagagaagactttccaaatgacatactaatctgaacttagaattgttgagaactgagagagctttgaggaatcactcccaatgccacattacagaactgg

SEQ ID NO: 52467 - DNA, 120 bp, Artificial Sequence
  ENSG00000067900_60 (sequence is synthesized)
gtcaaccaggagagctgcttcctcttctaagttcaggaaaccactcactcccaagtataccaatattgagagggtccagatagtgccataatcaggaatccacactaccactgctggttc

SEQ ID NO: 52468 - DNA, 120 bp, Artificial Sequence
  ENSG00000067900_61 (sequence is synthesized)
tctgcaacacttgtcaggcttgctacaatctacctccagttagatgttttgtaccattcctcttgccacttaagaacctcatgtctgcacactgcctcagaaaaggcacttccatgaccc

SEQ ID NO: 52469 - DNA, 120 bp, Artificial Sequence
  ENSG00000067900_62 (sequence is synthesized)
tgcttgctggcatttagcacagcctgcatctcacgtctgccttctctaggtgcatctacgtggccaaaattaaatcacatccagacccctagctgcaagaaagtctgagaaatatagcct

SEQ ID NO: 52470 - DNA, 120 bp, Artificial Sequence
  ENSG00000067900_63 (sequence is synthesized)
ctagctttctctctaatttgttacaggaggacacactaggagtgtggaatgaaggttcagcattgagttagcccatgcacccacacctgtaagcttctctgagatcaggaactccagctt

SEQ ID NO: 52471 - DNA, 120 bp, Artificial Sequence
  ENSG00000067900_64 (sequence is synthesized)
tgggcaacaaagaaaacatagccactgtcattattcacaggttcactcatgacctgtcatttggggtttcagcttaaattaacccattcacccttcatttaaagtaaaaaaaataagtaa

SEQ ID NO: 52472 - DNA, 120 bp, Artificial Sequence
  ENSG00000067900_65 (sequence is synthesized)
aagaacttaaatgacaaactcatagttacttgagtttgtaattcatagttaactttcacagttctataatcaatctggaattcagagtgaggtagagatcaagcagtatttctcccatat

SEQ ID NO: 52473 - DNA, 120 bp, Artificial Sequence
  ENSG00000067900_66 (sequence is synthesized)
ggatattcagttgatactgcagtattcattgaaaatacttctttcctgcatcgtaattcaggtgaacaatccattggtgttatttctgtgtccttgccaatatcacacttttaattactg

SEQ ID NO: 52474 - DNA, 120 bp, Artificial Sequence
  ENSG00000067900_67 (sequence is synthesized)
taactttataataagattttatatctgtagtagaagtccaactttgtaatccctcccaattggcttggctattcttggccttttgcatttccatataattttttatttttgttttgaaac

SEQ ID NO: 52475 - DNA, 120 bp, Artificial Sequence
  ENSG00000067900_68 (sequence is synthesized)
ttacaggcatgagccaccgcgcctggttgcattcccatataaatttaaaaacaatctactgaaagatgtatacgacctccaccaagaaaattgtaagacatttggagaagtttaaaaaga

SEQ ID NO: 52476 - DNA, 120 bp, Artificial Sequence
  ENSG00000067900_69 (sequence is synthesized)
agtttaaaaagacatgaataaacggaaatggtttttttaaataaacaaatgatttttaaagttgatcattaggttaataaatagtcatataatgacaatccgatgagattatgttgccca

SEQ ID NO: 52477 - DNA, 120 bp, Artificial Sequence
  ENSG00000067900_70 (sequence is synthesized)
gggtggtctctaactcctagcctcaagcagttttactctctcattacaggtgtaggccaccgtgcctggcctgacacttggaaatcttaatcacaattattctttgtttttataatgttt

SEQ ID NO: 52478 - DNA, 120 bp, Artificial Sequence
  ENSG00000067900_71 (sequence is synthesized)
actgttcaaatcaatttctggttggatagtatgtatatataaagccatgctcaatggcctagatatatttactgccaaatcttttatgcttttagtgttttttttctggacaagatctat

SEQ ID NO: 52479 - DNA, 120 bp, Artificial Sequence
  ENSG00000067900_72 (sequence is synthesized)
gcttattgcaataaattaaatgcaaagaatattctagtagaaagtcagtctgcacttcctaaaccccaccccaccccaccaattccttcataactgttattaacagttagctgtgttttc

SEQ ID NO: 52480 - DNA, 120 bp, Artificial Sequence
  ENSG00000067900_73 (sequence is synthesized)
taatggattatctccaaagtatatgtaactcagatttttgtgaggtaggaaaagaataacattaattccacttcacatattgaaagtctaacatacaaagagattaaatatctcctttct

SEQ ID NO: 52481 - DNA, 120 bp, Artificial Sequence
  ENSG00000067900_74 (sequence is synthesized)
tttgccaaatgttaatgaattgtcttatgagaattaagatatgatactttctcccaagctatactgtttcccataaagtatttgagatgttggagattcaagggaaaaaatataaatgct

SEQ ID NO: 52482 - DNA, 120 bp, Artificial Sequence
  ENSG00000067900_75 (sequence is synthesized)
tagaaataaagtgtataatgcaaagattgtgaataaagtgacacttgtatgttaatcctataaattggtttcttgtaccatgtaggatggtttggctattaaattgaattaagtggttca

SEQ ID NO: 52483 - DNA, 89 bp, Artificial Sequence
  ENSG00000067900_76 (sequence is synthesized)
ctgcattctcacaagcatttgatgttactactgtttttattttttttaactctgatagatgtgtagtgacacttctgatgatgttgaat

SEQ ID NO: 52484 - DNA, 120 bp, Artificial Sequence
  ENSG00000067900_77 (sequence is synthesized)
atctttttgtgtgcttatttatcacccatatgtcctctttagtgaaatgtcttttacaataaatgagtttttgtaaatggcctgtatttattttcattttagtaaactgtttcacgttag

SEQ ID NO: 52485 - DNA, 120 bp, Artificial Sequence
  ENSG00000067900_78 (sequence is synthesized)
tacatattttaagctggaaaccagacatttgctgtagttcagcagtgtctgacctgtctttatctagcagtatatttaaaggttactgcctgaaatacgagaatagcaaagaggctggag

SEQ ID NO: 52486 - DNA, 120 bp, Artificial Sequence
  ENSG00000067900_79 (sequence is synthesized)
attgctctttatgcactttttcctaaaaccaaggcttataaggttcaagcttttcatcagaacaaataaattctctccccgctaactataaaaaacttatttgtgaaatagaatttcaag

SEQ ID NO: 52487 - DNA, 68 bp, Artificial Sequence
  ENSG00000067900_80 (sequence is synthesized)
cagcagaacacttaaggccaggagttcgagagcagcctggctgacatcgaaaccccagtctctactaa

SEQ ID NO: 52488 - DNA, 120 bp, Artificial Sequence
  ENSG00000067900_81 (sequence is synthesized)
aatttatttaaatcacaataggtcacatcttaaaatattagggtaagtgtgtgtgcaagtgtatttacttctatgttaatacatagtggtcattctgtactcatgtataaaatagtttgt

SEQ ID NO: 52489 - DNA, 120 bp, Artificial Sequence
  ENSG00000067900_82 (sequence is synthesized)
ataataccaaacatttgttaattattgaaattcttgttcaagatattgggcttttgtttgtataggcacagaaccaatgcaatattgggctgtttttctggctgtagatcttattagtta

SEQ ID NO: 52490 - DNA, 120 bp, Artificial Sequence
  ENSG00000067900_83 (sequence is synthesized)
tatttcatatgaagtaatggcttagcttaaattcatttgttgttctcttaatacattgcaactgattttatgggccagaattctgtgaaatatagagaaaccatttgggaatgaggaatt

SEQ ID NO: 52491 - DNA, 120 bp, Artificial Sequence
  ENSG00000067900_84 (sequence is synthesized)
taaaagtgctttaaattttctcatttgttgagggaaatagctaaaaataactttaacatttcttactctcagttcacccattcttcttccgtatgacataagtgacctttcagaactcaa

SEQ ID NO: 52492 - DNA, 120 bp, Artificial Sequence
  ENSG00000067900_85 (sequence is synthesized)
gactctggccaggcgctgcctcacgcctgtaatcccagagctttgggaggccgaggcaggcagatctcttgagctcaggagtttgacaccagcctggacaacatggtgaaacccatctct

SEQ ID NO: 52493 - DNA, 120 bp, Artificial Sequence
  ENSG00000067900_86 (sequence is synthesized)
taacagctattaaaatcagaaatctaattgtgcttttcaccacagagggcatcatttttaggtatttgtatgtgaattgcagtgactttataaattagtttaacttattcttgttagagt

SEQ ID NO: 52494 - DNA, 120 bp, Artificial Sequence
  ENSG00000067900_87 (sequence is synthesized)
ttaataataataatacatgcaatattatatttatttagttctgtgtctaattttattgtcataagttgctgtacatggcatagttttagcccttaatgctttaaccaacttaattttttt

SEQ ID NO: 52495 - DNA, 80 bp, Artificial Sequence
  ENSG00000067955_0 (sequence is synthesized)
cggcgtgggttgggctcgagcgggcggcggcgcctcagactccccggaacgggagcccacgcgggcgggcgcctgaaaca

SEQ ID NO: 52496 - DNA, 120 bp, Artificial Sequence
  ENSG00000067955_1 (sequence is synthesized)
cctcagactccccggaacgggagcccacgcgggcgggcgcctgaaacaaagggaagcgggcgtccgggcgccgcgggtgggcggtcagtcggtcagcgcggagccagccagcgggtgccc

SEQ ID NO: 52497 - DNA, 120 bp, Artificial Sequence
  ENSG00000067955_2 (sequence is synthesized)
gcggcctcagggcgggaagatgccgcgcgtcgtgcccgaccagagaagcaagttcgagaacgaggagttttttaggaagctgagccgcgagtgtgagattaagtacacgggcttcaggga

SEQ ID NO: 52498 - DNA, 120 bp, Artificial Sequence
  ENSG00000067955_3 (sequence is synthesized)
ccggccccacgaggaacgccaggcacgcttccagaacgcctgccgcgacggccgctcggaaatcgcttttgtggccacaggaaccaatctgtctctccagttttttccggccagctggca

SEQ ID NO: 52499 - DNA, 120 bp, Artificial Sequence
  ENSG00000067955_4 (sequence is synthesized)
gggagaacagcgacaaacacctagccgagagtatgtcgacttagaaagagaagcaggcaaggtatatttgaaggctcccatgattctgaatggagtctgtgttatctggaaaggctggat

SEQ ID NO: 52500 - DNA, 120 bp, Artificial Sequence
  ENSG00000067955_5 (sequence is synthesized)
tgatctccaaagactggatggtatgggctgtctggagtttgatgaggagcgagcccagcaggaggatgcattagcacaacaggcctttgaagaggctcggagaaggacacgcgaatttga

SEQ ID NO: 52501 - DNA, 120 bp, Artificial Sequence
  ENSG00000067955_6 (sequence is synthesized)
agatagagacaggtctcatcgggaggaaatggaggtgagagtttcacagctgctggcagtaactggcaagaagacaacaagaccctagtcctggttccaatttaggtggtggtgatgacc

SEQ ID NO: 52502 - DNA, 120 bp, Artificial Sequence
  ENSG00000067955_7 (sequence is synthesized)
tcaaacttcgttaattaatagcacagcagatgtgtgctgcccatctttacatacacattgcttctagttggcagaaataattgattaaaagaccagaaactgtgataactggaggtacta

SEQ ID NO: 52503 - DNA, 120 bp, Artificial Sequence
  ENSG00000067955_8 (sequence is synthesized)
cggtctatttctcaaccttaggcagtaatagacatcacaaactgccatggttttgcactatgattataatacctgcatttctaattttttaagcatgtagccagtaataatttgaagttt

SEQ ID NO: 52504 - DNA, 120 bp, Artificial Sequence
  ENSG00000067955_9 (sequence is synthesized)
tttttctatgcaagcttaccttgttggcattattttagggagttgaaactatcaactgtaaagctccttttcttccactttaatttaaaagttcatgtcatttaaaaacaagtcaagaaa

SEQ ID NO: 52505 - DNA, 120 bp, Artificial Sequence
  ENSG00000067955_10 (sequence is synthesized)
ttaaaattgtatcagagggttttctctaatcattttttctatttttttttttgtacttctagatgttttggttatacagcttcattttagatgagcattcttattttttgttttgtttgc

SEQ ID NO: 52506 - DNA, 120 bp, Artificial Sequence
  ENSG00000067955_11 (sequence is synthesized)
cccatttccttttgtgtttttatagtctatagcattttaaaactgctgatgttgtttgcattatttacaggctaaaaacttagtagcatagagctgtctgccacagccttctgacaaagt

SEQ ID NO: 52507 - DNA, 120 bp, Artificial Sequence
  ENSG00000067955_12 (sequence is synthesized)
aagtttacagttattaaagttgcagtatccttttaaatgctagtaatcagcactctttcttttttttttttttaatagagacagggtctcgcagtgttgcccaggctggtctcgaactcc

SEQ ID NO: 52508 - DNA, 120 bp, Artificial Sequence
  ENSG00000067955_13 (sequence is synthesized)
ctgccttagcctcccagagtactgggattacaggctctttctttttaaacataaaagttttaaattggtattaactctgtactctgccctagattgttttagcttctgttctgtaatcat

SEQ ID NO: 52509 - DNA, 120 bp, Artificial Sequence
  ENSG00000067955_14 (sequence is synthesized)
gagtttggttggagatattctccatagatgatcttctactgaaatgcctaaagaagtcacaggctggcttctgttttattcagggatttttttaaaaagtcaatcagaaaagggatactg

SEQ ID NO: 52510 - DNA, 120 bp, Artificial Sequence
  ENSG00000067955_15 (sequence is synthesized)
gagcttcttcatgtatgtaacagcatattaaactggagacagtgatgaatcagctacaaaggtaatattgtattaaaatcatgtttaagatagctgcttttatgtgtattttatattgca

SEQ ID NO: 52511 - DNA, 120 bp, Artificial Sequence
  ENSG00000067955_16 (sequence is synthesized)
tgcttttgtaaaaacatgctgggtgatgaaagattagttttagagagaaaatgttcatctgtgcagaggatgcattttcttccattaattctggaaaaaacgttcacagttatatatatg

SEQ ID NO: 52512 - DNA, 120 bp, Artificial Sequence
  ENSG00000067955_17 (sequence is synthesized)
gtattttgcaaaaggactattaatagaaccttttgagatgaattaatgtaagaatattttttaaataggcttactgtcaaattgcaactttttttttagatacagagtggaaaacagtgc

SEQ ID NO: 52513 - DNA, 120 bp, Artificial Sequence
  ENSG00000067955_18 (sequence is synthesized)
taagtcatttggcacctccttacaaatatttttcatggtcacatttattaaatgttactacatttctgaatttttgaaaaatgtattttatcattaaatggcattattttaaagggtgaa

SEQ ID NO: 52514 - DNA, 120 bp, Artificial Sequence
  ENSG00000067955_19 (sequence is synthesized)
aaactgacacagtcaattcagaaaatggactgaagtctgaataaggtcattgcatttaaaaagcatataactgtacttgactgatgagggaggtgttactttcattgtatataggtctta

SEQ ID NO: 52515 - DNA, 120 bp, Artificial Sequence
  ENSG00000067955_20 (sequence is synthesized)
tttcataaacagatatcctgtatcaaataaaagtatttgttatatatttgaagttatgcatggaaaggagtgtgtttaaattgttacaaacaataatgcgtcattaaaggccatgctgat

SEQ ID NO: 52516 - DNA, 120 bp, Artificial Sequence
  ENSG00000067955_21 (sequence is synthesized)
cttgcataactataagtactatgaatgaatttggttggttttggtgttgtacagctcacatgtttacacactcagtgccctaatttcccctgagggaatcgctttttaagtgatccttac

SEQ ID NO: 52517 - DNA, 120 bp, Artificial Sequence
  ENSG00000067955_22 (sequence is synthesized)
agtggtgttttatgttactttattacagagctccttggttttttacttctgcacttaaatttttttaaataacatgatgatggtacattttcctctattgtctagctaagggctttcggt

SEQ ID NO: 52518 - DNA, 120 bp, Artificial Sequence
  ENSG00000067955_23 (sequence is synthesized)
ccaccagtaaataagatcaaatgctcttaaatgttcctgttaccatcctaatgtaaatactggatttttctgtcatttagcaccatgctgcttctgtctgtcttaatgctggcattaaga

SEQ ID NO: 52519 - DNA, 120 bp, Artificial Sequence
  ENSG00000067955_24 (sequence is synthesized)
tcatgagccctttttctccagtagtacaggctttgaaaactacttctattaagttattgatgcaatttgatattttttcataatctatatttaaacaaaattacatcattgcatcatctt

SEQ ID NO: 52520 - DNA, 120 bp, Artificial Sequence
  ENSG00000067955_25 (sequence is synthesized)
ttctaaattcatctccattaaaacttgccttaagctaccagattgcttttgccaccattggccatactgtgtgtttgtttgtttaatttactttcacaataaacttctgtgtagtaaaaa

SEQ ID NO: 52521 - DNA, 120 bp, Artificial Sequence
  ENSG00000067955_26 (sequence is synthesized)
ctctcaatattaaaagaatggagatcaaccaggaaattttcttcattctggataccccctcctcgtggctgtttctgcatagctctgaccagtagggaaaactcaagctgctggtgtgtg

SEQ ID NO: 52522 - DNA, 120 bp, Artificial Sequence
  ENSG00000067955_27 (sequence is synthesized)
ttctttcgtctcatttggagtcatctcatgactgcctcctagcaactctatttgccttgttcctgggagatgatatactgagagaaaacaggagagcaactggtagtaagaggcaagaag

SEQ ID NO: 52523 - DNA, 120 bp, Artificial Sequence
  ENSG00000067955_28 (sequence is synthesized)
cgcttccagaacgcctgccgcgacggccgctcggaaatcgtaagtcggctggcccggggcgcgcgcgggtcacttgttgcgcggggccgcggcggcccaggccggttccggacggcggcg

SEQ ID NO: 52524 - DNA, 120 bp, Artificial Sequence
  ENSG00000067955_29 (sequence is synthesized)
gcggctcccggaactgagtgggcgccgtctcacttcctactcgggattcaaaatgcgaaaccagatgccgcgggccggtactcgcggggagacgcttttcctggggctcgccgcggtggc

SEQ ID NO: 52525 - DNA, 120 bp, Artificial Sequence
  ENSG00000067955_30 (sequence is synthesized)
gcgtgtcggccaacggagcaccgcgagtggagctcgaacccgagccagactaaacaagcgaagggcattgtttaggcggcgacaccgaagaagggttcagggtatttgtagcaagcaaac

SEQ ID NO: 52526 - DNA, 120 bp, Artificial Sequence
  ENSG00000067955_31 (sequence is synthesized)
taggaagctgagccgcgagtgtgagattaagtacacgggcttcagggaccggccccacgaggaacgccaggcacgcttccagaacgcctgccgcgacggccgctcggaaatcgcaagaag

SEQ ID NO: 52527 - DNA, 120 bp, Artificial Sequence
  ENSG00000067955_32 (sequence is synthesized)
cttaagcagccaatggcaaatgtcctcaaaatggaatcagatgtttgtaacttaatacttaagaaaaatgatgagtgcatgtttttttttacttttaagtattctctgtgctgcctggct

SEQ ID NO: 52528 - DNA, 120 bp, Artificial Sequence
  ENSG00000067955_33 (sequence is synthesized)
taagacataaactgatgtaaaaataaatgactgcttgcataatttatgtaatgtcctgctcctgatcctgtttgtattgatttttctaaaaggcttttgtggccacaggaaccaatctgt

SEQ ID NO: 52529 - DNA, 120 bp, Artificial Sequence
  ENSG00000067955_34 (sequence is synthesized)
taatcttgcctttgcctggggacctattttacccaatttttaagagtaagtatagaaagtattgtgttgaagcaatattgaggaatcctgaaaatgttgatactcaaattctgatcctga

SEQ ID NO: 52530 - DNA, 120 bp, Artificial Sequence
  ENSG00000067955_35 (sequence is synthesized)
gcgtgagccactgcgcccggccactgtttcaggaaaaaaaaaaaaaaaacaaaacccaaatattgtattttttttataaatcaaaattaaaataggtatttcatgtattctgacagcagg

SEQ ID NO: 52531 - DNA, 120 bp, Artificial Sequence
  ENSG00000067955_36 (sequence is synthesized)
cttttaatcttgctgctgtaccatgctcattgtgtgactgtgtcctcattattatgtttgcaagatggctgctgcatctctgagcactgcatcagttcctaagaaggtggaatggtgaaa

SEQ ID NO: 52532 - DNA, 120 bp, Artificial Sequence
  ENSG00000067955_37 (sequence is synthesized)
tgtctcaaactttcttggaagccccattaggtgacttgtgtttctgtctcattggctacaactgagttacgtggccaccccttgctgcagtgaatctaggaaacaggaggatgcattagc

SEQ ID NO: 52533 - DNA, 63 bp, Artificial Sequence
  ENSG00000067955_38 (sequence is synthesized)
gcgccaccatgcccaggtatatttgaaggctcccatgattctgaatggagtctgtgttatctg

SEQ ID NO: 52534 - DNA, 120 bp, Artificial Sequence
  ENSG00000067992_0 (sequence is synthesized)
gctgtcctggagctgctgctgctgctgcggcggctgcaccggcggcgccgaggccgagatcgaggccggggtgcgcgcttcgcaaacgtgccctatccgtgcggcttggctgcgccagcc

SEQ ID NO: 52535 - DNA, 120 bp, Artificial Sequence
  ENSG00000067992_1 (sequence is synthesized)
cttgcggccacccgggcgtctaggcgggtctgtgcgccgcccgggcgaggatgcggctgttccggtggctgctgaagcagccggtgcccaagcagatcgagcgctactcgcgcttttcgc

SEQ ID NO: 52536 - DNA, 120 bp, Artificial Sequence
  ENSG00000067992_2 (sequence is synthesized)
cgtcgccgctctccatcaaacaattcctggacttcgggagagataatgcatgtgagaaaacttcatatatgtttctacgaaaggaacttcctgtgcggctggctaacacaatgagagaag

SEQ ID NO: 52537 - DNA, 120 bp, Artificial Sequence
  ENSG00000067992_3 (sequence is synthesized)
ttaatcttctgccggataatttacttaaccgcccttcagtgggattggttcagagttggtatatgcagagttttcttgaacttttagaatatgaaaataagagccctgaggatccacagg

SEQ ID NO: 52538 - DNA, 120 bp, Artificial Sequence
  ENSG00000067992_4 (sequence is synthesized)
tcttggataactttctacaagttctgattaaagtcagaaatagacacaatgatgtggttcctacaatggcacaaggagtgattgaatacaaggagaagtttgggtttgatcctttcatta

SEQ ID NO: 52539 - DNA, 120 bp, Artificial Sequence
  ENSG00000067992_5 (sequence is synthesized)
gcactaacatccaatattttctggatcggttttataccaaccgcatctctttccgcatgcttattaatcagcacacacttctgtttgggggtgacactaatcctgttcatcctaaacaca

SEQ ID NO: 52540 - DNA, 120 bp, Artificial Sequence
  ENSG00000067992_6 (sequence is synthesized)
taggaagtatcgatcccacctgtaacgtggcggatgtggtgaaagatgcatatgaaacagccaagatgctgtgtgaacagtattacctggtagctccagagctggaagttgaagaattca

SEQ ID NO: 52541 - DNA, 120 bp, Artificial Sequence
  ENSG00000067992_7 (sequence is synthesized)
atgccaaagcgccagacaaacctattcaggtggtttatgtgccctcacatctgtttcatatgctatttgagttgttcaagaactcaatgagagcgacagttgaactctatgaagacagaa

SEQ ID NO: 52542 - DNA, 120 bp, Artificial Sequence
  ENSG00000067992_8 (sequence is synthesized)
aagagggctaccctgctgttaaaaccctcgttactttgggtaaagaagacttatccattaagatcagtgacctaggtggtggtgtcccacttcgaaaaatagatcgtctttttaactaca

SEQ ID NO: 52543 - DNA, 120 bp, Artificial Sequence
  ENSG00000067992_9 (sequence is synthesized)
tgtattctactgctcctagacccagcctggagcctaccagagctgcccctttggctggatttggttatggtttgccaatttcccgtctgtatgctagatattttcaaggagatctgaaac

SEQ ID NO: 52544 - DNA, 120 bp, Artificial Sequence
  ENSG00000067992_10 (sequence is synthesized)
tgtattccatggaaggagtgggtactgatgctgtcatttatttgaaggctctttcaagtgagtcatttgagagacttccagtttttaataagtccgcatggcgccattacaagaccacgc

SEQ ID NO: 52545 - DNA, 120 bp, Artificial Sequence
  ENSG00000067992_11 (sequence is synthesized)
ctgaagccgatgattggagcaatcccagcagtgaacccagggatgcttcaaaatacaaagcaaaacaagacaagatcaagactaatagaactttctagaggactgaatgctgtggtcctc

SEQ ID NO: 52546 - DNA, 120 bp, Artificial Sequence
  ENSG00000067992_12 (sequence is synthesized)
tctgtgaagaaagattgccttctgcaagtcaaacagagagaactgctttctcccacctgctctgagcgtggcatcacagttattcctagtgcttaaatgtgtattttctctctaccacct

SEQ ID NO: 52547 - DNA, 120 bp, Artificial Sequence
  ENSG00000067992_13 (sequence is synthesized)
ggactttcccaaagagtttttcctgtagctactccagatcttccactaaagtagtaactttttaatgacatcttgctgtggtgtgattgatgcctgtcaccgaagagcacagagcctcct

SEQ ID NO: 52548 - DNA, 120 bp, Artificial Sequence
  ENSG00000067992_14 (sequence is synthesized)
tacagctcttgtgccctcgtactctccatcttgttatcatagcatctgatgtcttcagtccttccaggattctgtgcgcctttcccattccagatacagcagatcgtactgttgctcctt

SEQ ID NO: 52549 - DNA, 120 bp, Artificial Sequence
  ENSG00000067992_15 (sequence is synthesized)
gtgaccaaataccatatttgtcccaaacctccacctagggccctgggaccctgaaagtggaagacatcaggtggccatgccctgatgatttagtcccagagccctccgtctctcccgtgc

SEQ ID NO: 52550 - DNA, 120 bp, Artificial Sequence
  ENSG00000067992_16 (sequence is synthesized)
ctccctccgccactctatgatttagacttttgccttcttccatctgatcggattctcattgtgagatgtggtgactttcatgttagatcttcttcattgatgccttggttttattttaaa

SEQ ID NO: 52551 - DNA, 120 bp, Artificial Sequence
  ENSG00000067992_17 (sequence is synthesized)
attcatttgtatatgtctgttgattaaagcattcgaaatgttatcttagaatttttcacccaactgcttggtttcaaagatcttaagtgaaaaactgcctcctggtcaataccaaatttg

SEQ ID NO: 52552 - DNA, 120 bp, Artificial Sequence
  ENSG00000067992_18 (sequence is synthesized)
tacagagtgtgaagtggagtttttatgcttctgtcaaacttccatccatctaatactgtacctgtgtcatattttattcctttgtagtcttctaaggaattggaagtttctgtatgatgc

SEQ ID NO: 52553 - DNA, 120 bp, Artificial Sequence
  ENSG00000067992_19 (sequence is synthesized)
gctttactagttgtaaaatagactatcagagggaaaaggcctctctagtttatttttgaaaaatgctccaggtcttaataattttcattttcattcatcttagttttagaattgtcacct

SEQ ID NO: 52554 - DNA, 120 bp, Artificial Sequence
  ENSG00000067992_20 (sequence is synthesized)
cagtctgattttcacaatcctttttgctaaaagttggaagtgggaattagcagacgatttgggataaggaaagaggaatgatgttatatttacccttaggaatagaagtgaccgaagaat

SEQ ID NO: 52555 - DNA, 120 bp, Artificial Sequence
  ENSG00000067992_21 (sequence is synthesized)
ccggattgaaaccagcatcctatatacagctccacaggatgtgcttctcttcatggtaattttccatatatatcatctactttgatttctgccccgttttaatgtccatataaatgtttc

SEQ ID NO: 52556 - DNA, 120 bp, Artificial Sequence
  ENSG00000067992_22 (sequence is synthesized)
agtccaatttgtaagtgttgagtccactgatgtagaagttctgacttgtaaaccattcatcctgctttagtcatatgatagtaccgatgcaattagctcctctcccaccaccgtggggga

SEQ ID NO: 52557 - DNA, 120 bp, Artificial Sequence
  ENSG00000067992_23 (sequence is synthesized)
tttctccctgagatgaggtgtgctttgaccagctgcatgtggcttgattgcattcctgtttctcttagttccactggatcttgttttcttttatttcgttatattacctgagctcagggt

SEQ ID NO: 52558 - DNA, 120 bp, Artificial Sequence
  ENSG00000067992_24 (sequence is synthesized)
agttccgttcatctttagaaagagctcatctcttccatccttagaaggatctcatcagagaactcatatgtaatcaatcaggtaaaagaaatactgatgtacttctgagagactggtgag

SEQ ID NO: 52559 - DNA, 120 bp, Artificial Sequence
  ENSG00000067992_25 (sequence is synthesized)
aggtgggtcataggaagcccataggtctgaggaccgagtcagtgtcttggggatggggctgttccatatgattatttttgtgtggcataaaagatgtaaaaaaaaaaaaaaatggtcctt

SEQ ID NO: 52560 - DNA, 83 bp, Artificial Sequence
  ENSG00000067992_26 (sequence is synthesized)
gtgaccttcgagccactgcgcccagccgaccctagcttccttataaacatgagataatatcttcctaggcctcaatttccaac

SEQ ID NO: 52561 - DNA, 120 bp, Artificial Sequence
  ENSG00000067992_27 (sequence is synthesized)
taaacatgagataatatcttcctaggcctcaatttccaacgatactcctttatgctttcaagtgtgatacactgtaggagagaggaggcagcagtttagggggtgctgcctactgcctga

SEQ ID NO: 52562 - DNA, 120 bp, Artificial Sequence
  ENSG00000067992_28 (sequence is synthesized)
ctctgacagcgtttctcttgtttgaggaaggcccatcgatcaccacatcctcacaagcagtaccatgtaaggggccgaatatggataatatggtgtagaaaaatctcatcacattcttcc

SEQ ID NO: 52563 - DNA, 120 bp, Artificial Sequence
  ENSG00000067992_29 (sequence is synthesized)
ctttacaagtgtttttcaaaagtaaagattgatttcagtgtcttcatgacttaatcggtagttctttactagcacgctttttggcttactcacatccatctgaccccagtacaaccttgc

SEQ ID NO: 52564 - DNA, 120 bp, Artificial Sequence
  ENSG00000067992_30 (sequence is synthesized)
ttctcctgtctttgttttcttcattaagaatttatctttaaccctaaagcaactgcaagaagagtttcaggaacatctgtgttcttctggcttactagcctctttacccaagtattcatt

SEQ ID NO: 52565 - DNA, 120 bp, Artificial Sequence
  ENSG00000067992_31 (sequence is synthesized)
tatcctgtttgtcaactgtacatgattcttttaatttaggcagagaatctggctgtttactgggtttgcctataagcaaatggtcagatttcccccatataggttgtaacacaaatagac

SEQ ID NO: 52566 - DNA, 120 bp, Artificial Sequence
  ENSG00000067992_32 (sequence is synthesized)
atggaccctttttcagctaaattctttcccattcctctgtactgctctttcatttactctattttattttaagtggggactgtgtctatttaaaatagtgcctgacacatagtaggtgct

SEQ ID NO: 52567 - DNA, 120 bp, Artificial Sequence
  ENSG00000067992_33 (sequence is synthesized)
taataaacaatgttaataaataatattaaaataatgaataatattcataaatagtaggtgaatcaaagatagaaaactgtcagacattttccttgggtggtagggcaacatctttctaag

SEQ ID NO: 52568 - DNA, 120 bp, Artificial Sequence
  ENSG00000067992_34 (sequence is synthesized)
ttcttaaaccatccttgtctctaaattaaaaatatggaagttcaagtcaggagctgtgaaagtgctgaatttcctttttatagtgctaagagatgactttaaaatgtagagaaatgcaag

SEQ ID NO: 52569 - DNA, 120 bp, Artificial Sequence
  ENSG00000067992_35 (sequence is synthesized)
gaagtggagggatagatccgcaggagccatctcttcctttttttgtctctgaatatctgattttggctcctgaatacagaattctttccatccaaacagtgtgacatagttttacagcct

SEQ ID NO: 52570 - DNA, 120 bp, Artificial Sequence
  ENSG00000067992_36 (sequence is synthesized)
tgtgtatagattccaaagaccttttgcatacagcatgccatttgatccttacaatgccatgagctggactacacaggtatatcggttttttgtatgaatcccaaagcaattaaggagttt

SEQ ID NO: 52571 - DNA, 120 bp, Artificial Sequence
  ENSG00000067992_37 (sequence is synthesized)
gccaaggtggcatggtaagtcaatggaagggccaaagcaagcacttgggtgcttggaacagtacgccaggtgatttgtattatctcttttgaggaatttcttcagtatactattcctcaa

SEQ ID NO: 52572 - DNA, 120 bp, Artificial Sequence
  ENSG00000067992_38 (sequence is synthesized)
agggtaagctctaaaccccaaattatctgtagagcaagttaattccgttcaggagagggtttcttttgtgtgtttccattttggcatagttagaggagataatcagatggatttggcagc

SEQ ID NO: 52573 - DNA, 120 bp, Artificial Sequence
  ENSG00000067992_39 (sequence is synthesized)
ttttaccaaaaatgacaggcaacttaaagtggatagctgtaggtaattactagagttatttagacttaattctgtgtctgaatgaattcagtgcttactgccagccctttcatacaaaga

SEQ ID NO: 52574 - DNA, 120 bp, Artificial Sequence
  ENSG00000067992_40 (sequence is synthesized)
ctccacatttgagagctgatgtttttatcttttttgcagactggattacagcttcggttgggttttcttgcatatttacaaatgtattcctgttgctgttacttacgaacaataacttgg

SEQ ID NO: 52575 - DNA, 120 bp, Artificial Sequence
  ENSG00000067992_41 (sequence is synthesized)
ctggctatcggattcttggatcacagcctttttccttgaattctctggagacaggatgttattgctactttatggttgtccatatctggtggtgctgacaggtctgagtcctgatggatt

SEQ ID NO: 52576 - DNA, 120 bp, Artificial Sequence
  ENSG00000067992_42 (sequence is synthesized)
tttcttccccttttgtagatgacctgattgtttgccctggatacttgaattctttgtttatccttgaaatttagtaacttcgttggagtatatctcaggattgactgttgtctgttgcct

SEQ ID NO: 52577 - DNA, 120 bp, Artificial Sequence
  ENSG00000067992_43 (sequence is synthesized)
ttttctggaatgcagtgagcattagatatggtcatttcaagcctcactgcgttttgtatcagtttagtctgttctcttcttgaaaacttcatttttatattggctctctgtcatctgtcc

SEQ ID NO: 52578 - DNA, 120 bp, Artificial Sequence
  ENSG00000067992_44 (sequence is synthesized)
ttcacagttatctttccttagatggcactcatctcatctttcttcattcatgctgtatgatttttttctcaagtcttatcctccatttcactgactgactcagttttctgtactgttgat

SEQ ID NO: 52579 - DNA, 89 bp, Artificial Sequence
  ENSG00000067992_45 (sequence is synthesized)
ctccatttcactgactgactcagttttctgtactgttgattctagggcttgttccttgtaatgtggcttccacttctgttacagtttta

SEQ ID NO: 52580 - DNA, 88 bp, Artificial Sequence
  ENSG00000067992_46 (sequence is synthesized)
tcaaactcccgacctcaagtgatccaccagtctcagcctcccaaagttcttagtttcattttttatctctttctttcctgagctcatt

SEQ ID NO: 52581 - DNA, 120 bp, Artificial Sequence
  ENSG00000067992_47 (sequence is synthesized)
cctagtttcattttttatctctttctttcctgagctcattatgttgtcctctttgattgcgtatttcttccagtgctgaacaattttgtctacagttttagtggtttatgagctcattct

SEQ ID NO: 52582 - DNA, 120 bp, Artificial Sequence
  ENSG00000067992_48 (sequence is synthesized)
ttttctagagtgtatttatctatcctttgcatctttcattccttttcttgtattgttttgcttttatcttgatgcacaagtatcatgatgaccccttctgcttattatttatctttgcat

SEQ ID NO: 52583 - DNA, 120 bp, Artificial Sequence
  ENSG00000067992_49 (sequence is synthesized)
ggtaccagttttacctgtccaagaagagtgtgggtaaatcctccttgactccttctcttttgagcgagacatgtttgaaggataaccttagcacttgaaccctaaggctagctcttgatg

SEQ ID NO: 52584 - DNA, 120 bp, Artificial Sequence
  ENSG00000067992_50 (sequence is synthesized)
ggttgtagtggtggagggtgtttttggttttcattctgtttggatttgggggaataaggagtgacacgaagcctccttggaacatgttgtctgtgagtgccttccatagacactgttgaa

SEQ ID NO: 52585 - DNA, 120 bp, Artificial Sequence
  ENSG00000067992_51 (sequence is synthesized)
tcctctgccctgggggtggccgggtcccattgggagacagatcctctttgcatttccccattcccactagtcgtcatcctagcaggaacatggtgggtttgtacttctgccctcctggat

SEQ ID NO: 52586 - DNA, 120 bp, Artificial Sequence
  ENSG00000067992_52 (sequence is synthesized)
tccatgtagcccacatttgtgagatcggctccagagttggtttctctcctctggtcctgcttctcgccgctcttcctcttttggataccggaggggatgaacacacatggttcatctgag

SEQ ID NO: 52587 - DNA, 120 bp, Artificial Sequence
  ENSG00000067992_53 (sequence is synthesized)
atctcaaccgcctgtcctcgtttttctggaaacatgcacgcgcagagtgtgcccagcttctcccgactgttgccagtcctgttttgccaagttaacaaatgatcagtagagtcttgggaa

SEQ ID NO: 52588 - DNA, 120 bp, Artificial Sequence
  ENSG00000067992_54 (sequence is synthesized)
tcttctcattaactgcccagcagttgtggctgctggagactcggagaaatgcctggcaaatgcaagaactcttcttcgattcatccccaacttggttgtatctgtcagacattgccctgg

SEQ ID NO: 52589 - DNA, 120 bp, Artificial Sequence
  ENSG00000067992_55 (sequence is synthesized)
agtccgtggtatggagttgtagcttttactagtttcattatagacagcttgttgttcaacttttggatgtgtgggtcagagggcaggagcacttatataaacatgcatttattctgccat

SEQ ID NO: 52590 - DNA, 120 bp, Artificial Sequence
  ENSG00000067992_56 (sequence is synthesized)
cttttcagcagtccagatgcttaaacattgactttgaagctaatgtccttcataatctacatttgagcaaacagaaggaagcaatattgccagcaagaaaggacgattaacttaatcaat

SEQ ID NO: 52591 - DNA, 120 bp, Artificial Sequence
  ENSG00000067992_57 (sequence is synthesized)
acgggatttttgtttactgttctgtgtggaaagataacttttaagtcaagttcctgtctcattgattagagatatcagtaccttctggtttgaaaatagaggacatatgacattttaatg

SEQ ID NO: 52592 - DNA, 120 bp, Artificial Sequence
  ENSG00000067992_58 (sequence is synthesized)
aacttaagttatcagccattgacaattattagttagctgattaaatatgatagaatactccaaactagcacatcaccagagttaccaagagacgcctaagctcttctttatgaacaggtt

SEQ ID NO: 52593 - DNA, 120 bp, Artificial Sequence
  ENSG00000067992_59 (sequence is synthesized)
gttggtggagctgtgccactgagggggttaacatctctgacaccttaactgtgccacaggttttcttacctgtcttttcaatcaacccattttaaaatttagttcatcaagaaagagaaa

SEQ ID NO: 52594 - DNA, 120 bp, Artificial Sequence
  ENSG00000067992_60 (sequence is synthesized)
ggtgttaagtcttcatcaggattccttttggtttctcatgaatacatattcacatggtttggagacctggagcccaccaccaaagcacactgagttaatgttttgaaagtgcatttgtag

SEQ ID NO: 52595 - DNA, 120 bp, Artificial Sequence
  ENSG00000067992_61 (sequence is synthesized)
gtagatcctggggctggggttttatttggcctgtttgtagaattgaagcctctttgcctcagtggtcagcacatcccaccagacatccggcagcaagctttcgtcaccttcagagctcta

SEQ ID NO: 52596 - DNA, 120 bp, Artificial Sequence
  ENSG00000067992_62 (sequence is synthesized)
gcataatgataaaggagcactagtgacagccttgctgtatgcaccaagctccaccctgggcagtgcctttccctaatgtctgtcctggtgtgaaatggagacttgaagaccggtacccac

SEQ ID NO: 52597 - DNA, 120 bp, Artificial Sequence
  ENSG00000067992_63 (sequence is synthesized)
atgtaagagaggttaacgaagggagggtggcagagagaggagtcatgtgaaggaaagctacctttagtcctccatcgcaatactgtccagtgtctccagcgtgctagaaactgtgctgaa

SEQ ID NO: 52598 - DNA, 120 bp, Artificial Sequence
  ENSG00000067992_64 (sequence is synthesized)
tgctgggcacatggcaggggtcaaagcagacagaaatccctgcctcatgaacccactttctattaggggagacagactagaaacacaaaaaggacattgaatagtacgattgagagatga

SEQ ID NO: 52599 - DNA, 120 bp, Artificial Sequence
  ENSG00000067992_65 (sequence is synthesized)
gtgctatggagaaaaatccagccagaaagggagatgcagaagatagcaccagatcttctcaatgttgttttcatcatggacaggtgcgttccttagaagatgaagtgttagtgattcctg

SEQ ID NO: 52600 - DNA, 120 bp, Artificial Sequence
  ENSG00000067992_66 (sequence is synthesized)
agtttttctcaccttcacgtcgattgatctgaatttggagagtctgttttctgtgtctggctctgcactcaactttgtaggggaccctgtcgaggtccccacactgtggcttcaggtaga

SEQ ID NO: 52601 - DNA, 120 bp, Artificial Sequence
  ENSG00000067992_67 (sequence is synthesized)
cagagcagatgggagcccatttcagttcattgtcttgctgaccaatggggaactgtggtcaggtgagaggaggcagcttttacaatcagacttcattgaatagtgtgggctgctgtttcc

SEQ ID NO: 52602 - DNA, 120 bp, Artificial Sequence
  ENSG00000067992_68 (sequence is synthesized)
ttgtaacaaaaccccataatgatggcagtttccggatgtgtctttttaggacttcagaacttattatttgaatagaagtttaaagcatctggatgatgatgctgtagctaaaacagctgc

SEQ ID NO: 52603 - DNA, 120 bp, Artificial Sequence
  ENSG00000067992_69 (sequence is synthesized)
ttgtcagaagagaccctatttaacacttctaaacttgtttcagaggtggaggaaaggataatctgggaaggcctccctctcaagtccacaggttggtatcagctgtgttcatcccccaaa

SEQ ID NO: 52604 - DNA, 120 bp, Artificial Sequence
  ENSG00000067992_70 (sequence is synthesized)
aggaaaataaaatgacaacaatattttggtcacagaattcctgagaaacctctgtttctatcttcatgtctttaagatagggacatgaattccccatgatctgggtgatagggttagggt

SEQ ID NO: 52605 - DNA, 120 bp, Artificial Sequence
  ENSG00000067992_71 (sequence is synthesized)
ggccaggacactgttactttgtgtgtgacacaggtggctcctcatgacagttcctccatgccttagaacatgttgtctgtctggtcatccctgggggtagagctgagtgacccagcagtg

SEQ ID NO: 52606 - DNA, 120 bp, Artificial Sequence
  ENSG00000067992_72 (sequence is synthesized)
ggagatttaacaactggagaagaagatgggatgtgtttaattatccccagaggtagggccaatttgtcaccctttaaatagacttatttgcatataaactaaagcaccttagggcatcat

SEQ ID NO: 52607 - DNA, 120 bp, Artificial Sequence
  ENSG00000067992_73 (sequence is synthesized)
taccgaaagtgtctaagcaaatgtctgatatagttacgtgcctgcattaaaagaaagcagcccccttatcttgccttaatatccttacagtgttttaataagttcataatgcatcctgta

SEQ ID NO: 52608 - DNA, 120 bp, Artificial Sequence
  ENSG00000067992_74 (sequence is synthesized)
tgtgcattttttggtataaaacaccgaaaggtggagaattgacttcagttctctccatcctttccccttaagtgttggtggcgctgcaggggcaacgtgcctcccattggaagtggtgac

SEQ ID NO: 52609 - DNA, 120 bp, Artificial Sequence
  ENSG00000067992_75 (sequence is synthesized)
ttcctctttgatagaggtttgcctgtctcttgaaaatgaaaagaagcggagattgatctctggagtcccatggtccagtttggactattgggaatattttttatgggatgttaaaaacaa

SEQ ID NO: 52610 - DNA, 120 bp, Artificial Sequence
  ENSG00000067992_76 (sequence is synthesized)
tattagagacgtgagatagtaaatttgtggtaataccggatccaggaagcttacagtgaagagtatgaacttaacctgaaaagtatttctctgttctataaatctctcagtgacatttgg

SEQ ID NO: 52611 - DNA, 120 bp, Artificial Sequence
  ENSG00000067992_77 (sequence is synthesized)
attaatcaagcataattaaatgtagttagatttttgtcagattgtagttcaaaataatattcatctatggagagggtaatatattatgtagaaattttattaagcactttagttaagcaa

SEQ ID NO: 52612 - DNA, 120 bp, Artificial Sequence
  ENSG00000067992_78 (sequence is synthesized)
acactaaggagaacaaaatcaacctcaggaaggttaattactaaaaaaatcacaaagtatagtagattatgtaaatcattttaattttgaataccatggcttgagctttaatttacatag

SEQ ID NO: 52613 - DNA, 120 bp, Artificial Sequence
  ENSG00000067992_79 (sequence is synthesized)
agacgtattttggatttgtttttcacattatattttctagtacaggattgcaattgcattcttgaaaagttctactcattttaggattccattaagtttgcttaacttttttcatgttat

SEQ ID NO: 52614 - DNA, 120 bp, Artificial Sequence
  ENSG00000067992_80 (sequence is synthesized)
aatttccaaaagcaaagaattacaattgtattctagctaattattttaatgtttcactaactttgtgtgtattgtaagaccatatttttatttctatacaaatgatgattttaagagaag

SEQ ID NO: 52615 - DNA, 120 bp, Artificial Sequence
  ENSG00000067992_81 (sequence is synthesized)
tatcaggagagagaatgtatatgaaagcatcgcgtccacgcctggctttgcaataagtgttcatttaaaagaaagacatttacaaaggtaaaacataagagtttagactatagcgataaa

SEQ ID NO: 52616 - DNA, 120 bp, Artificial Sequence
  ENSG00000067992_82 (sequence is synthesized)
tctttttattttagtaatttctttaaagggaaaagtaaagagatcaaaatgattttatatgtattttttttgtactcagagaattacattttcactacccccgcctgtctcagggaatag

SEQ ID NO: 52617 - DNA, 120 bp, Artificial Sequence
  ENSG00000067992_83 (sequence is synthesized)
cctttgataagaatcccatggagatctctggaactctattacagtgtgttcagatttgttagttcatatgtaaatttcagagctagagcttcaaaactagagtattgtaatctcaggaac

SEQ ID NO: 52618 - DNA, 120 bp, Artificial Sequence
  ENSG00000067992_84 (sequence is synthesized)
ataagattatccaagaagcctgaaccttgctcttttcatgataaatgacatccaaatttcctttgtctaggagataagcatagatcccttttatcatgcttctctgagattttcacagaa

SEQ ID NO: 52619 - DNA, 120 bp, Artificial Sequence
  ENSG00000067992_85 (sequence is synthesized)
caaccctgcaatttgattttgtttgataattttgctttttggcttttcagtgaggactctattttccattggaactgactcctttggggataataagctttcacttaaaagaacattcca

SEQ ID NO: 52620 - DNA, 120 bp, Artificial Sequence
  ENSG00000067992_86 (sequence is synthesized)
ttagatagttctaacttcaatgaacctaaaagtggcttcttaatttgaataatctggataacttttgcaaatgggtcaaaacagcacaagtatcaacaatcacgtatgtactgagtaata

SEQ ID NO: 52621 - DNA, 120 bp, Artificial Sequence
  ENSG00000067992_87 (sequence is synthesized)
tttgccctccagttagcaaagtcaagaaatgtctaactctggcacacagcactggttttaactactctttagttcatctttgccttccaaattggttgaaaatggcaagcttagaatgga

SEQ ID NO: 52622 - DNA, 120 bp, Artificial Sequence
  ENSG00000067992_88 (sequence is synthesized)
atgcatattaataacagaaccacttaatgttttaaaatattcataccttgagattctttttgagagaaaaaagaaatcttaacatccaattctagttgttttggcttttcacatatgcta

SEQ ID NO: 52623 - DNA, 120 bp, Artificial Sequence
  ENSG00000067992_89 (sequence is synthesized)
gacatgaaaaaggcagttacaaaagtgaaatccgattggaagtcagtggtgtccgccattgagccgtgctaaatgtcgtgtcacaaaaggagtttgtgaaaacaggatgagtagaaaatg

SEQ ID NO: 52624 - DNA, 120 bp, Artificial Sequence
  ENSG00000067992_90 (sequence is synthesized)
ttatactgttgtttctatcgtggcaccgctttcttataaattccatttgctttttgtcatctgaactgttacaaccatgggaaacctcagtccatatttttaaaagcactatatacttac

SEQ ID NO: 52625 - DNA, 120 bp, Artificial Sequence
  ENSG00000067992_91 (sequence is synthesized)
aggaaaaaccgacttatgccttcattgaaaaaatgttgaagttaatatcccaaatgtttaatgagcatgttttagaatatttacagctaaagtctgtcactttagggatttgacaaaact

SEQ ID NO: 52626 - DNA, 120 bp, Artificial Sequence
  ENSG00000067992_92 (sequence is synthesized)
tgagactgcctgccaccgaagagggaccaggcagaatcttctcagccttgtaaccagcgttaaaaaaatataaggggcttgatgagatcctagatctgctccttttctcctaggtgcctg

SEQ ID NO: 52627 - DNA, 120 bp, Artificial Sequence
  ENSG00000067992_93 (sequence is synthesized)
ggtaactcctggggaaagcatcatattaagtccttttcaagcaaggtgtgtgattttgaccaatgaattgagctgatatgtgattttgaccaatgaattgtgcatctatttaaaaattac

SEQ ID NO: 52628 - DNA, 120 bp, Artificial Sequence
  ENSG00000067992_94 (sequence is synthesized)
caagtgtatcttgactcttgagtggacagtcaaggcaaagtttacttaggaaatgtaaagtatggagtgttttaaaaaattcaaattgagtttattcactgttggaggaattgaattcta

SEQ ID NO: 52629 - DNA, 120 bp, Artificial Sequence
  ENSG00000067992_95 (sequence is synthesized)
ttgcctccctcatttccattatgttcattgttacaattgtgctgctctgttctcattgtgatgcttagttctcgtgtagaactgagtgctacattgtgattagaaactggagttgtgctt

SEQ ID NO: 52630 - DNA, 120 bp, Artificial Sequence
  ENSG00000067992_96 (sequence is synthesized)
gagtcagtcctggaaaacaggacccatttttaagaagaacggaacataccactttggcattctggctgaccctaatttctgcagagttccttggtgttaaaatcatttgaggtcatagtt

SEQ ID NO: 52631 - DNA, 120 bp, Artificial Sequence
  ENSG00000067992_97 (sequence is synthesized)
gctgcttatggtttatatacacaccatctgctgctctaagttcacatcctctcaaaagcatgcaagtgcttgaaatttaaatatttcccagatctaaaacaacttgtgactacctaagaa

SEQ ID NO: 52632 - DNA, 120 bp, Artificial Sequence
  ENSG00000067992_98 (sequence is synthesized)
atgcttgaaccaaataagaaacagcactgtggaataaaatataccattgtgaacatatctgatgctgcaatgaaatgtaaagttccttactttgctgatttttcatcataactccttgac

SEQ ID NO: 52633 - DNA, 120 bp, Artificial Sequence
  ENSG00000067992_99 (sequence is synthesized)
tcataaaagcggtgtctaaactgggaacagctgctaatagggtaaaagtattatacatcaaataaaagttcattacaatatttgtactcataagtcaaaatctgacctggttcgctttgt

SEQ ID NO: 52634 - DNA, 120 bp, Artificial Sequence
  ENSG00000067992_100 (sequence is synthesized)
gcctctgtcagcctacttacagtgataaatgtacacacaagtccagtgttgccaaggagctttgtttatagaaagaagcttggtcccctcagttctatgctgttgtgtggcctggttggt

SEQ ID NO: 52635 - DNA, 120 bp, Artificial Sequence
  ENSG00000067992_101 (sequence is synthesized)
acatgccgtcatgatgaaggatgactttggtttgagataatttgtcactccacattccatggagaaaagtgtttcattttgatgttggaaaaacatgaccagagaagcatgtgactcaga

SEQ ID NO: 52636 - DNA, 120 bp, Artificial Sequence
  ENSG00000067992_102 (sequence is synthesized)
taatgttccccggaagttgcagagcaatctgtggtgtctgtcatagcccaactagtcctggagcacatggacaattctgtaccccaataatcagaacaataaaatggtagttgtgattca

SEQ ID NO: 52637 - DNA, 120 bp, Artificial Sequence
  ENSG00000067992_103 (sequence is synthesized)
atttgtctgaataaaggtgtcccactcactgttccaggaattcttgcagtgtagaggtattcacaacagcaagcagggatttggcctgccatcaattttatttaaaaagcaattaagttt

SEQ ID NO: 52638 - DNA, 120 bp, Artificial Sequence
  ENSG00000067992_104 (sequence is synthesized)
gcagtttgtcctcataaacgttgtaggttgaaactgaaaaataagttaaaatgatcaatcaagataaaaggtgatctatccatccaatggaatattatttggccttaaaaaggaaggaca

SEQ ID NO: 52639 - DNA, 120 bp, Artificial Sequence
  ENSG00000067992_105 (sequence is synthesized)
ttctgatatgtgctgcaacatgggtgaatcttgaagtcattatgctaagtgaaataaaccagacataaaaggacaaatactatgattccacttatgtgaagtacctagagtagtcaaatg

SEQ ID NO: 52640 - DNA, 120 bp, Artificial Sequence
  ENSG00000067992_106 (sequence is synthesized)
cagagacacaaagtggaagggaggttgccaggggctagcgacgaagatggaatggggaggcattgtttcatgggtacaaagtttcaggtggaaagatgaaaaacttctggagatggatgg

SEQ ID NO: 52641 - DNA, 120 bp, Artificial Sequence
  ENSG00000067992_107 (sequence is synthesized)
tggtgatgcttgcacaacagcgtgaatgtactcaatgccactgaactgtacatgtagcaatggttaagatgagacaagatcaagactaatagaactttctagaggactgaatgctgtggt

SEQ ID NO: 52642 - DNA, 120 bp, Artificial Sequence
  ENSG00000067992_108 (sequence is synthesized)
gtaattcaagtcattaagactcaaggagtatgaatgtggacaaaagcgttcattttcttaatgagtagtgactcaacattgagttttttttttttaattcgagctaagaatgtaacacaa

SEQ ID NO: 52643 - DNA, 120 bp, Artificial Sequence
  ENSG00000068001_0 (sequence is synthesized)
gggcagcagctggcgcaagtagcctagctggagaggctcaccccaggaaggagggaggccaccgacctactgggccgacggactcccacacagttcctgagctggtgccaggcaggtgac

SEQ ID NO: 52644 - DNA, 120 bp, Artificial Sequence
  ENSG00000068001_1 (sequence is synthesized)
acctcctgcagcccccagcatgcgggcaggcccaggccccaccgttacattggccctggtgctggcggtgtcatgggccatggagctcaagcccacagcaccacccatcttcactggccg

SEQ ID NO: 52645 - DNA, 120 bp, Artificial Sequence
  ENSG00000068001_2 (sequence is synthesized)
gccctttgtggtagcgtgggacgtgcccacacaggactgtggcccacgcctcaaggtgccactggacctgaatgcctttgatgtgcaggcctcacctaatgagggttttgtgaaccagaa

SEQ ID NO: 52646 - DNA, 120 bp, Artificial Sequence
  ENSG00000068001_3 (sequence is synthesized)
tattaccatcttctaccgcgaccgtctaggcctgtatccacgcttcgattctgccggaaggtctgtgcatggtggtgtgccacagaatgtcagcctttgggcacaccggaagatgctgca

SEQ ID NO: 52647 - DNA, 120 bp, Artificial Sequence
  ENSG00000068001_4 (sequence is synthesized)
gaaacgtgtggagcactacattcggacacaggagtctgcggggctggcggtcatcgactgggaggactggcgacctgtgtgggtgcgcaactggcaggacaaagatgtgtatcgccggtt

SEQ ID NO: 52648 - DNA, 120 bp, Artificial Sequence
  ENSG00000068001_5 (sequence is synthesized)
atcacgccagctagtggccagtcgtcaccctgactggcctccagaccgcatagtcaaacaggcacaatatgagtttgagttcgcagcacagcagttcatgctggagacactgcgttatgt

SEQ ID NO: 52649 - DNA, 120 bp, Artificial Sequence
  ENSG00000068001_6 (sequence is synthesized)
caaggcagtgcggccccggcacctctggggcttctacctctttcctgactgctacaatcatgattatgtgcagaactgggagagctacacaggccgctgccctgatgttgaggtggcccg

SEQ ID NO: 52650 - DNA, 120 bp, Artificial Sequence
  ENSG00000068001_7 (sequence is synthesized)
cgccatggccgcaactttgtgagcttccgtgttcaggaggcccttcgtgtggctcgcacccaccatgccaaccatgcactcccagtctacgtcttcacacgacccacctacagccgcagg

SEQ ID NO: 52651 - DNA, 120 bp, Artificial Sequence
  ENSG00000068001_8 (sequence is synthesized)
ctcacggggcttagtgagatggacctcatctctaccattggcgagagtgcggccctgggcgcagctggtgtcatcctctggggtgacgcggggtacaccacaagcacggagacctgccag

SEQ ID NO: 52652 - DNA, 120 bp, Artificial Sequence
  ENSG00000068001_9 (sequence is synthesized)
tacctcaaagattacctgacacggctgctggtcccctacgtggtcaatgtgtcctgggccacccaatattgcagccgggcccagtgccatggccatgggcgctgtgtgcgccgcaacccc

SEQ ID NO: 52653 - DNA, 120 bp, Artificial Sequence
  ENSG00000068001_10 (sequence is synthesized)
agtgccagtaccttcctgcatctcagcaccaacagtttccgcctagtgcctggccatgcacctggtgaaccccagctgcgacctgtgggggagctcagttgggccgacattgaccacctg

SEQ ID NO: 52654 - DNA, 120 bp, Artificial Sequence
  ENSG00000068001_11 (sequence is synthesized)
cagacacacttccgctgccagtgctacttgggctggagtggtgagcaatgccagtgggaccataggcaggcagctggaggtgccagcgaggcctgggctgggtcccacctcaccagtctg

SEQ ID NO: 52655 - DNA, 120 bp, Artificial Sequence
  ENSG00000068001_12 (sequence is synthesized)
ctggctctggcagccctggcctttacctggaccttgtaggggtctcctgcctagctgcctagcaagctggcctctaccacaagggctctcttaggcatgtaggaccctgcagggggtgga

SEQ ID NO: 52656 - DNA, 120 bp, Artificial Sequence
  ENSG00000068001_13 (sequence is synthesized)
caaactggagtctggagtgggcagagcccccaggaagcccaggagggcatccataccagctcgcacccccctgttctaagggggaggggaagtccctgggaggccccttctctccctgcc

SEQ ID NO: 52657 - DNA, 120 bp, Artificial Sequence
  ENSG00000068001_14 (sequence is synthesized)
agaggggaaggagggtacagctgggctggggaggacctgaccctactcccttgccctagatagtttattattattattattttggggtctcttttgtaaattaaacataaaacaattgct

SEQ ID NO: 52658 - DNA, 120 bp, Artificial Sequence
  ENSG00000068001_15 (sequence is synthesized)
atttcaggctgactggcgctcgtggctgagactcccatagaaagcccggctcagaggggcattagggtcctaaatgggcggccacgtccctctgcagaggacctggggctcttcgagccc

SEQ ID NO: 52659 - DNA, 120 bp, Artificial Sequence
  ENSG00000068001_16 (sequence is synthesized)
gaaacgaggcaccggcaccgagaaaggtggaccacaccttcccgccccgtccgcaagtccaatcccgggcccacctccgcactggagtcttaaagggccagcgtgcctgggggcggagcc

SEQ ID NO: 52660 - DNA, 80 bp, Artificial Sequence
  ENSG00000068001_17 (sequence is synthesized)
ggagcgggctgggctgggcccgggatggcggtggccctggcgccggtcccggtggcgccccgcgcgagttcctgagctgg

SEQ ID NO: 52661 - DNA, 120 bp, Artificial Sequence
  ENSG00000068001_18 (sequence is synthesized)
gggtttatcaagtcctcggcgagctgcccaacgggcagcagctggcgcaagtagcctagctggagaggctcaccccaggaaggagggaggccaccgacctactgggccgacggactccca

SEQ ID NO: 52662 - DNA, 120 bp, Artificial Sequence
  ENSG00000068001_19 (sequence is synthesized)
cccttttgggagttgagtctcgcacaagggagcggacctaggaagagccgaggtggtttcgcacggggctcgccagggtctaagcctgccccccaccgggagaggcctgtggagcgtagg

SEQ ID NO: 52663 - DNA, 120 bp, Artificial Sequence
  ENSG00000068001_20 (sequence is synthesized)
gggcgctggatacgggatggaggccctgggagacccctcttgctggctttctcggaggtccagccagaaactgctgcaaggaatggaggcctcctcggggttgagagggagccgggctcc

SEQ ID NO: 52664 - DNA, 120 bp, Artificial Sequence
  ENSG00000068001_21 (sequence is synthesized)
caaaggacctcagagactgggcagaaaaggacgggatctcagggatgactgtcccgccctgatgcgagtcagggagaggggcggccaacctcctagacccctctgagcttccctgacccc

SEQ ID NO: 52665 - DNA, 120 bp, Artificial Sequence
  ENSG00000068001_22 (sequence is synthesized)
aaccctgcggccacgccgcgacccagagccgggctgccaggataacgactgcctcggcccttcctgggccggctaagaagcggtgcttggccccttccctcagtctggcagggggcgggg

SEQ ID NO: 52666 - DNA, 120 bp, Artificial Sequence
  ENSG00000068001_23 (sequence is synthesized)
cctccctttagacggcggaccagagaagggggcccctgattcgtgggaggcggggcactactctccaggagaccagaggtcgcctcaggtcaaagtccctttttccacacaaaggggacc

SEQ ID NO: 52667 - DNA, 120 bp, Artificial Sequence
  ENSG00000068001_24 (sequence is synthesized)
cacggctggcgtctacgttagggggtgcagagccagatctggtgctgccccctgccaacctcggagtaccacagcacctcctgatggccgaacggggcaacgcctcctcctattcccccc

SEQ ID NO: 52668 - DNA, 120 bp, Artificial Sequence
  ENSG00000068001_25 (sequence is synthesized)
ggcggctctctccccttgggctggggtctgaatccccgggggtgctcgcggagaggcgtcccagaaaccccacccccacccgaccgggcgcaggccccacgtgtggggcgggggcggggt

SEQ ID NO: 52669 - DNA, 80 bp, Artificial Sequence
  ENSG00000068001_26 (sequence is synthesized)
cccgcacaaagacccggcggagcgcgctctagccctgagcggccgggcgggggaggcgagcgcgcgcattcccggtggcg

SEQ ID NO: 52670 - DNA, 120 bp, Artificial Sequence
  ENSG00000068001_27 (sequence is synthesized)
tccgctgcccctttgtccctacggggcctcctccaagccgggagagtgtcagcgctcgagagaaagtccggagagcctcactcttctgccgggcgagtgttacacggatagaagcctccc

SEQ ID NO: 52671 - DNA, 120 bp, Artificial Sequence
  ENSG00000068001_28 (sequence is synthesized)
ggcagcgttccttccagtttcgtagcctcttgacgagctgttccctgctttacccaaatgctgtcgtttctctggatcaagggttcttcacggtgtacagggtgggcatcagctgttcag

SEQ ID NO: 52672 - DNA, 120 bp, Artificial Sequence
  ENSG00000068001_29 (sequence is synthesized)
tagagatttgtgccgagccacaggctacctgctccagaaaagagccctgtgcttctggcagtgagttcccagggtgccttgtctgccctgcagtggcctgtggtctctcaaacctattac

SEQ ID NO: 52673 - DNA, 120 bp, Artificial Sequence
  ENSG00000068001_30 (sequence is synthesized)
agccatgagcacagtgcccccacacagcatgggctttgggagcatagatgggcttgaggtgggcacttccagtattccctagactgacttgttctccccaacccttcttccagttcctga

SEQ ID NO: 52674 - DNA, 120 bp, Artificial Sequence
  ENSG00000068001_31 (sequence is synthesized)
agacccagcctgccagagctcagtctatgggacagacagagagttagggcctttggctaccaacctcaggtgggcaatcctagtctggtccccttgtctgtctcccacccgaggcatccc

SEQ ID NO: 52675 - DNA, 120 bp, Artificial Sequence
  ENSG00000068001_32 (sequence is synthesized)
tggtggcaacaggaggaggtcaccccggccctgctctcaggaaagaggaaatgctgtcctgaacagctgttgagttccgcccttccccatctgcccaactgggttccggtctgtaccccc

SEQ ID NO: 52676 - DNA, 120 bp, Artificial Sequence
  ENSG00000068001_33 (sequence is synthesized)
acccacttctcagcaggagcagggactgtgtggctcaggtgcagattgaatgtatgaatgtgtgcagttaaaataaggtatagtcatcacagtgtggacacagtttccatctgggcctgt

SEQ ID NO: 52677 - DNA, 120 bp, Artificial Sequence
  ENSG00000068001_34 (sequence is synthesized)
ggtggcggtggagggaagggccgggcggccggcgccgccgtgggaggtccgctgcccctttgtccctacggggcctcctccaagccgggagagtgtcagcgctcgagagaaattcctgag

SEQ ID NO: 52678 - DNA, 80 bp, Artificial Sequence
  ENSG00000068024_0 (sequence is synthesized)
agcccgagcccgcgcgccggcgggtggcggcgcaggctgaggagatgcggcgcggagcgccggagcagggctagagccgg

SEQ ID NO: 52679 - DNA, 80 bp, Artificial Sequence
  ENSG00000068024_1 (sequence is synthesized)
cgcgcgccgtgggacccgccggtccccagggccgcccggccccttctggacctttccacccgcgccgcgaggcggcttcg

SEQ ID NO: 52680 - DNA, 120 bp, Artificial Sequence
  ENSG00000068024_2 (sequence is synthesized)
ccggggcgggggcgcgggggtgggcacggcaggcagcggcgccgtctcccggtgcggggcccgcgccccccgagcaggttcatctgcagaagccagcggacgcctctgttcaacttgtgg

SEQ ID NO: 52681 - DNA, 120 bp, Artificial Sequence
  ENSG00000068024_3 (sequence is synthesized)
tctgttcaacttgtgggttacctggctcatgagaccttgccggcgaggctcggcgcttgaacgtctgtgacccagccctcaccgtcccggtacttgtatgtgttggtgggagtttggagc

SEQ ID NO: 52682 - DNA, 120 bp, Artificial Sequence
  ENSG00000068024_4 (sequence is synthesized)
tcgttggagctatcgtttccgtggaaattttgagccatttcgaatcacttaaaggagtggacattgctagcaatgagctcccaaagccatccagatggactttctggccgagaccagcca

SEQ ID NO: 52683 - DNA, 120 bp, Artificial Sequence
  ENSG00000068024_5 (sequence is synthesized)
gtggagctgctgaatcctgcccgcgtgaaccacatgcccagcacggtggatgtggccacggcgctgcctctgcaagtggccccctcggcagtgcccatggacctgcgcctggaccaccag

SEQ ID NO: 52684 - DNA, 120 bp, Artificial Sequence
  ENSG00000068024_6 (sequence is synthesized)
ttctcactgcctgtggcagagccggccctgcgggagcagcagctgcagcaggagctcctggcgctcaagcagaagcagcagatccagaggcagatcctcatcgctgagttccagaggcag

SEQ ID NO: 52685 - DNA, 120 bp, Artificial Sequence
  ENSG00000068024_7 (sequence is synthesized)
cacgagcagctctcccggcagcacgaggcgcagctccacgagcacatcaagcaacaacaggagatgctggccatgaagcaccagcaggagctgctggaacaccagcggaagctggagagg

SEQ ID NO: 52686 - DNA, 120 bp, Artificial Sequence
  ENSG00000068024_8 (sequence is synthesized)
caccgccaggagcaggagctggagaagcagcaccgggagcagaagctgcagcagctcaagaacaaggagaagggcaaagagagtgccgtggccagcacagaagtgaagatgaagttacaa

SEQ ID NO: 52687 - DNA, 120 bp, Artificial Sequence
  ENSG00000068024_9 (sequence is synthesized)
gaatttgtcctcaataaaaagaaggcgctggcccaccggaatctgaaccactgcatttccagcgaccctcgctactggtacgggaaaacgcagcacagttcccttgaccagagttctcca

SEQ ID NO: 52688 - DNA, 120 bp, Artificial Sequence
  ENSG00000068024_10 (sequence is synthesized)
ccccagagcggagtgtcgacctcctataaccacccggtcctgggaatgtacgacgccaaagatgacttccctcttaggaaaacagcttctgaaccgaatctgaaattacggtccaggcta

SEQ ID NO: 52689 - DNA, 120 bp, Artificial Sequence
  ENSG00000068024_11 (sequence is synthesized)
aagcagaaagtggccgaaagacggagcagccccctgttacgcaggaaagacgggccagtggtcactgctctaaaaaagcgtccgttggatgtcacagactccgcgtgcagcagcgcccca

SEQ ID NO: 52690 - DNA, 120 bp, Artificial Sequence
  ENSG00000068024_12 (sequence is synthesized)
ggctccggacccagctcacccaacaacagctccgggagcgtcagcgcggagaacggtatcgcgcccgccgtccccagcatcccggcggagacgagtttggcgcacagacttgtggcacga

SEQ ID NO: 52691 - DNA, 120 bp, Artificial Sequence
  ENSG00000068024_13 (sequence is synthesized)
gaaggctcggccgctccacttcccctctacacatcgccatccttgcccaacatcacgctgggcctgcctgccaccggcccctctgcgggcacggcgggccagcaggacgccgagagactc

SEQ ID NO: 52692 - DNA, 120 bp, Artificial Sequence
  ENSG00000068024_14 (sequence is synthesized)
acccttcccgccctccagcagaggctctcccttttccccggcacccacctcactccctacctgagcacctcgcccttggagcgggacggaggggcagcgcacagccctcttctgcagcac

SEQ ID NO: 52693 - DNA, 120 bp, Artificial Sequence
  ENSG00000068024_15 (sequence is synthesized)
atggtcttactggagcagccgccggcacaagcacccctcgtcacaggcctgggagcactgcccctccacgcacagtccttggttggtgcagaccgggtgtccccctccatccacaagctg

SEQ ID NO: 52694 - DNA, 120 bp, Artificial Sequence
  ENSG00000068024_16 (sequence is synthesized)
cggcagcaccgcccactggggcggacccagtcggccccgctgccccagaacgcccaggctctgcagcacctggtcatccagcagcagcatcagcagtttctggagaaacacaagcagcag

SEQ ID NO: 52695 - DNA, 120 bp, Artificial Sequence
  ENSG00000068024_17 (sequence is synthesized)
ttccagcagcagcaactgcagatgaacaagatcatccccaagccaagcgagccagcccggcagccggagagccacccggaggagacggaggaggagctccgtgagcaccaggctctgctg

SEQ ID NO: 52696 - DNA, 120 bp, Artificial Sequence
  ENSG00000068024_18 (sequence is synthesized)
gacgagccctacctggaccggctgccggggcagaaggaggcgcacgcacaggccggcgtgcaggtgaagcaggagcccattgagagcgatgaggaagaggcagagcccccacgggaggtg

SEQ ID NO: 52697 - DNA, 120 bp, Artificial Sequence
  ENSG00000068024_19 (sequence is synthesized)
gagccgggccagcgccagcccagtgagcaggagctgctcttcagacagcaagccctcctgctggagcagcagcggatccaccagctgaggaactaccaggcgtccatggaggccgccggc

SEQ ID NO: 52698 - DNA, 120 bp, Artificial Sequence
  ENSG00000068024_20 (sequence is synthesized)
atccccgtgtccttcggcggccacaggcctctgtcccgggcgcagtcctcacccgcgtctgccaccttccccgtgtctgtgcaggagccccccaccaagccgaggttcacgacaggcctc

SEQ ID NO: 52699 - DNA, 120 bp, Artificial Sequence
  ENSG00000068024_21 (sequence is synthesized)
gtgtatgacacgctgatgctgaagcaccagtgcacctgcgggagtagcagcagccaccccgagcacgccgggaggatccagagcatctggtcccgcctgcaggagacgggcctccggggc

SEQ ID NO: 52700 - DNA, 120 bp, Artificial Sequence
  ENSG00000068024_22 (sequence is synthesized)
aaatgcgagtgcatccgcggacgcaaggccaccctggaggagctacagacggtgcactcggaagcccacaccctcctgtatggcacgaaccccctcaaccggcagaaactggacagtaag

SEQ ID NO: 52701 - DNA, 120 bp, Artificial Sequence
  ENSG00000068024_23 (sequence is synthesized)
aaacttctaggctcgctcgcctccgtgttcgtccggctcccttgcggtggtgttggggtggacagtgacaccatatggaacgaggtgcactcggcgggggcagcccgcctggctgtgggc

SEQ ID NO: 52702 - DNA, 120 bp, Artificial Sequence
  ENSG00000068024_24 (sequence is synthesized)
tgcgtggtagagctggtcttcaaggtggccacaggggagctgaagaatggctttgctgtggtccgcccccctggacaccatgcggaggagagcacgcccatgggcttttgctacttcaac

SEQ ID NO: 52703 - DNA, 120 bp, Artificial Sequence
  ENSG00000068024_25 (sequence is synthesized)
tccgtggccgtggcagccaagcttctgcagcagaggttgagcgtgagcaagatcctcatcgtggactgggacgtgcaccatggaaacgggacccagcaggctttctacagcgaccccagc

SEQ ID NO: 52704 - DNA, 120 bp, Artificial Sequence
  ENSG00000068024_26 (sequence is synthesized)
gtcctgtacatgtccctccaccgctacgacgatgggaacttcttcccaggcagcggggctcctgatgaggtgggcacagggcccggcgtgggtttcaacgtcaacatggctttcaccggc

SEQ ID NO: 52705 - DNA, 120 bp, Artificial Sequence
  ENSG00000068024_27 (sequence is synthesized)
ggcctggacccccccatgggagacgctgagtacttggcggccttcagaacggtggtcatgccgatcgccagcgagtttgccccggatgtggtgctggtgtcatcaggcttcgatgccgtg

SEQ ID NO: 52706 - DNA, 120 bp, Artificial Sequence
  ENSG00000068024_28 (sequence is synthesized)
gagggccaccccacccctcttgggggctacaacctctccgccagatgcttcgggtacctgacgaagcagctgatgggcctggctggcggccggattgtcctggccctcgagggaggccac

SEQ ID NO: 52707 - DNA, 120 bp, Artificial Sequence
  ENSG00000068024_29 (sequence is synthesized)
gacctgaccgccatttgcgacgcctcggaagcatgtgtttctgccttgctgggaaacgagcttgatcctctcccagaaaaggttttacagcaaagacccaatgcaaacgctgtccgttcc

SEQ ID NO: 52708 - DNA, 120 bp, Artificial Sequence
  ENSG00000068024_30 (sequence is synthesized)
atggagaaagtcatggagatccacagcaagtactggcgctgcctgcagcgcacaacctccacagcggggcgttctctgatcgaggctcagacttgcgagaacgaagaagccgagacggtc

SEQ ID NO: 52709 - DNA, 120 bp, Artificial Sequence
  ENSG00000068024_31 (sequence is synthesized)
accgccatggcctcgctgtccgtgggcgtgaagcccgccgaaaagagaccagatgaggagcccatggaagaggagccgcccctgtagcactccctcgaagctgctgttctcttgtctgtc

SEQ ID NO: 52710 - DNA, 120 bp, Artificial Sequence
  ENSG00000068024_32 (sequence is synthesized)
tgtctctgtcttgaagctcagccaagaaactttcccgtgtcacgcctgcgtcccaccgtggggctctcttggagcacccagggacacccagcgtgcaacagccacgggaagcctttctgc

SEQ ID NO: 52711 - DNA, 120 bp, Artificial Sequence
  ENSG00000068024_33 (sequence is synthesized)
cgcccaggcccacaggtctcgagacgcacatgcacgcctgggcgtggcagcctcacagggaacacgggacagacgccggcgacgcgcagacacacggacacgcggaagccaagcacactc

SEQ ID NO: 52712 - DNA, 120 bp, Artificial Sequence
  ENSG00000068024_34 (sequence is synthesized)
tggcgggtcccgcaagggacgccgtggaagaaaggagcctgtggcaacaggcggccgagctgccgaattcagttgacacgaggcacagaaaacaaatatcaaagatctaataatacaaaa

SEQ ID NO: 52713 - DNA, 120 bp, Artificial Sequence
  ENSG00000068024_35 (sequence is synthesized)
aagaggacgttttctacggctgtggcccgcctctgtgaaccatagcggtgtgcggcggggggtctgcacccgggtgggggacagagggacctttaaagaaaacaaaactggacagaaaca

SEQ ID NO: 52714 - DNA, 120 bp, Artificial Sequence
  ENSG00000068024_36 (sequence is synthesized)
ggaatgtgagctgggggagctggcttgagtttctcaaaagccatcggaagatgcgagtttgtgcctttttttttattgctctggtggatttttgtggctgggttttctgaagtctgagga

SEQ ID NO: 52715 - DNA, 120 bp, Artificial Sequence
  ENSG00000068024_37 (sequence is synthesized)
acaatgccttaagaaaaaacaaacagcaggaatcggtgggacagtttcctgtggccagccgagcctggcagtgctggcaccgcgagctggcctgacgcctcaagcacgggcaccagccgt

SEQ ID NO: 52716 - DNA, 120 bp, Artificial Sequence
  ENSG00000068024_38 (sequence is synthesized)
catctccggggccaggggctgcagcccggcggtccctgttttgctttattgctgtttaagaaaaatggaggtagttccaaaaaagtggcaaatcccgttggaggttttgaagtccaacaa

SEQ ID NO: 52717 - DNA, 120 bp, Artificial Sequence
  ENSG00000068024_39 (sequence is synthesized)
attttaaacgaatccaaagtgttctcacacgtcacatacgattgagcatctccatctggtcgtgaagcatgtggtaggcacacttgcagtgttacgatcggaatgctttttattaaaagc

SEQ ID NO: 52718 - DNA, 120 bp, Artificial Sequence
  ENSG00000068024_40 (sequence is synthesized)
atcggaatgctttttattaaaagcaagtagcatgaagtattgcttaaattttaggtataaataaatatatatatgtataatatatattccaatgtattccaagctaagaaacttacttga

SEQ ID NO: 52719 - DNA, 120 bp, Artificial Sequence
  ENSG00000068024_41 (sequence is synthesized)
tttataatgcatttatagaaaaagtatatatatatatataaaatgaatgcagattgcgaaggtccctgcaaatggatggcttgtgaatttgctctcaaggtgcttatggaaagggatcct

SEQ ID NO: 52720 - DNA, 120 bp, Artificial Sequence
  ENSG00000068024_42 (sequence is synthesized)
gattgattgaaattcatgttttctcaagctccagattggctagatttcagatcgccaacacattcgccactgggcaactaccctacaagtttgtactttcattttaattattttctaaca

SEQ ID NO: 52721 - DNA, 120 bp, Artificial Sequence
  ENSG00000068024_43 (sequence is synthesized)
gaaccgctcccgtctccaagccttcatgcacatatgtacctaatgagtttttatagcaaagaatataaatttgctgttgatttttgtatgaattttttcacaaaaagatcctgaataagc

SEQ ID NO: 52722 - DNA, 120 bp, Artificial Sequence
  ENSG00000068024_44 (sequence is synthesized)
attgttttatgaattttacatttttcctcaccatttagcaattttctgaatggtaataatgtctaaatctttttcctttctgaattcttgcttgtacatttttttttacctttcaaaggt

SEQ ID NO: 52723 - DNA, 120 bp, Artificial Sequence
  ENSG00000068024_45 (sequence is synthesized)
ttttaattatttttgtttttatttttgtacgatgagttttctgcagcgtacagaattgttgctgtcagattctattttcagaaagtgagaggagggaccgtaggtcttttcggagtgaca

SEQ ID NO: 52724 - DNA, 120 bp, Artificial Sequence
  ENSG00000068024_46 (sequence is synthesized)
ccaacgattgtgtctttcctggtctgtcctaggagctgtataaagaagcccaggggctctttttaactttcaacactagtagtattacgaggggtggtgtgtttttcccctccgtggcaa

SEQ ID NO: 52725 - DNA, 120 bp, Artificial Sequence
  ENSG00000068024_47 (sequence is synthesized)
gggcagggagggttgcttaggatgcccggccaccctgggaggcttgccagatgccgggggcagtcagcattaatgaaactcatgtttaaacttctctgaccacatcgtcaggatagaatt

SEQ ID NO: 52726 - DNA, 120 bp, Artificial Sequence
  ENSG00000068024_48 (sequence is synthesized)
ctaacttgagttttccaaagaccttttgagcatgtcagcaatgcatggggcacacgtggggctctttacccacttgggtttttccactgcagccacgtggccagccctggattttggagc

SEQ ID NO: 52727 - DNA, 120 bp, Artificial Sequence
  ENSG00000068024_49 (sequence is synthesized)
ctgtggctgcaaggaacccagggacccttgttgcctggtgaacctgcagggagggtatgattgcctgaccaggacagccagtctttactctttttctcttcaacagtaactgacagtcac

SEQ ID NO: 52728 - DNA, 120 bp, Artificial Sequence
  ENSG00000068024_50 (sequence is synthesized)
gttttactggtaacttattttccagcacatgaagccaccagtttcattccaaagtgtatattgggttcagacttgggggcagaagttcagacacaccgtgctcaggagggacccagagcc

SEQ ID NO: 52729 - DNA, 120 bp, Artificial Sequence
  ENSG00000068024_51 (sequence is synthesized)
gagtttcggagtttggtaaagtttacagggtagcttctgaaattaactcaaacttttgaccaaatgagtgcagattcttggattcacttggtcactgggctgctgatggtcagctctgag

SEQ ID NO: 52730 - DNA, 120 bp, Artificial Sequence
  ENSG00000068024_52 (sequence is synthesized)
acagtggtttgagagcaggcagaacggtcttgggacttgtttgactttcccctccctggtggccactctttgctctgaagcccagattggcaagaggagctggtccattccccattcatg

SEQ ID NO: 52731 - DNA, 120 bp, Artificial Sequence
  ENSG00000068024_53 (sequence is synthesized)
gcacagagcagtggcagggcccagctagcaggctcttctggcctccttggcctcattctctgcatagccctctggggatcctgccacctgccctcttaccccgccgtggcttatggggag

SEQ ID NO: 52732 - DNA, 120 bp, Artificial Sequence
  ENSG00000068024_54 (sequence is synthesized)
gaatgcatcatctcactttttttttttaagcagatgatgggataacatggactgctcagtggccaggttatcagtggggggacttaattctaatctcattcaaatggagacgccctctgc

SEQ ID NO: 52733 - DNA, 120 bp, Artificial Sequence
  ENSG00000068024_55 (sequence is synthesized)
aaaggcctggcagggggaggcacgtttcatctgtcagctcactccagcttcacaaatgtgctgagagcattactgtgtagccttttctttgaagacacactcggctcttctccacagcaa

SEQ ID NO: 52734 - DNA, 120 bp, Artificial Sequence
  ENSG00000068024_56 (sequence is synthesized)
gcgtccagggcagatggcagaggatctgcctcggcgtctgcaggcgggaccacgtcagggagggttccttcatgtgttctccctgtgggtccttggacctttagcctttttcttcctttg

SEQ ID NO: 52735 - DNA, 120 bp, Artificial Sequence
  ENSG00000068024_57 (sequence is synthesized)
caaaggccttgggggcactggctgggagtcagcaagcgagcactttatatccctttgagggaaaccctgatgacgccactgggcctcttggcgtctgccctgccctcgcggcttcccgcc

SEQ ID NO: 52736 - DNA, 120 bp, Artificial Sequence
  ENSG00000068024_58 (sequence is synthesized)
cgcagcgtgcccacgtgcccacgccccaccagcaggcggctgtcccggaggccgtggcccgctgggactggccgcccctccccagcgtcccagggctctggttctggagggccactttgt

SEQ ID NO: 52737 - DNA, 120 bp, Artificial Sequence
  ENSG00000068024_59 (sequence is synthesized)
ttgtcaaggtgtttcagtttttctttacttcttttgaaaatctgtttgcaaggggaaggaccatttcgtaatggtctgacacaaaagcaagtttgatttttgcagcactagcaatggact

SEQ ID NO: 52738 - DNA, 120 bp, Artificial Sequence
  ENSG00000068024_60 (sequence is synthesized)
ttgttgtttttctttttgatcagaacattccttctttactggtcacagccacgtgctcattccattcttctttttgtagactttgggcccacgtgttttatgggcattgatacatatata

SEQ ID NO: 52739 - DNA, 120 bp, Artificial Sequence
  ENSG00000068024_61 (sequence is synthesized)
aatatatagatataaatatatatgaatatatttttttaagtttcctacacctggaggttgcatggactgtacgaccggcatgactttatattgtatacagattttgcacgccaaactcgg

SEQ ID NO: 52740 - DNA, 120 bp, Artificial Sequence
  ENSG00000068024_62 (sequence is synthesized)
cagctttggggaagaagaaaaatgcctttctgttcccctctcatgacatttgcagatacaaaagatggaaatttttctgtaaaacaaaaccttgaaggagaggagggcggggaagtttgc

SEQ ID NO: 52741 - DNA, 120 bp, Artificial Sequence
  ENSG00000068024_63 (sequence is synthesized)
gtcttattgaacttattcttaagaaattgtactttttattgtaagaaaaataaaaaggactacttaaacatttgtcatattaagaaaaaaagtttatctagcacttgtgacataccaata

SEQ ID NO: 52742 - DNA, 120 bp, Artificial Sequence
  ENSG00000068024_64 (sequence is synthesized)
atagagtttattgtatttatgtggaaacagtgttttagggaaactactcagaattcacagtgaactgcctgtctctctcgagttgatttggaggaattttgttttgttttgttttgtttg

SEQ ID NO: 52743 - DNA, 120 bp, Artificial Sequence
  ENSG00000068024_65 (sequence is synthesized)
tttccttttatctccttccacgggccaggcgagcgccgcccgccctcactggccttgtgacggtttattctgattgagaactgggcggactcgaaagagtccccttttccgcacagctgt

SEQ ID NO: 52744 - DNA, 120 bp, Artificial Sequence
  ENSG00000068024_66 (sequence is synthesized)
gttgactttttaattacttttaggtgatgtatggctaagatttcactttaagcagtcgtgaactgtgcgagcactgtggtttacaattatactttgcatcgaaaggaaaccatttcttca

SEQ ID NO: 52745 - DNA, 120 bp, Artificial Sequence
  ENSG00000068024_67 (sequence is synthesized)
ttgtaacgaagctgagcgtgttcttagctcggcctcactttgtctctggcattgattaaaagtctgctattgaaagaaaaagaaagcgaacagtttttgtttgttttttttgccgtgtgt

SEQ ID NO: 52746 - DNA, 120 bp, Artificial Sequence
  ENSG00000068024_68 (sequence is synthesized)
agaaagcgaacagtttttgtttgttttttttgccgtgtgtgctccatagtggaggcgctattttccaattgatgagaatgacaaacatatataatctatctatctatctatctatctatc

SEQ ID NO: 52747 - DNA, 120 bp, Artificial Sequence
  ENSG00000068024_69 (sequence is synthesized)
tcttacggaatgtggtagaaaaccaagttgtaacgacactgtaacctacctgatgcctgttcgcgcccgccgtgagctgcgcactggccgtggccaccattcacctctgtaatttaatcc

SEQ ID NO: 52748 - DNA, 120 bp, Artificial Sequence
  ENSG00000068024_70 (sequence is synthesized)
gtttctcttggattgtctggacgtgcccgatggttctttcttttgctcagtggagttggaggttttgtgtttggttttctcattcttgtcttgttttgtgtgggtggattttcaccgacc

SEQ ID NO: 52749 - DNA, 120 bp, Artificial Sequence
  ENSG00000068024_71 (sequence is synthesized)
aatgatatcctcttctgacggtcaccttctttccacttcactggagtccagtattctgtaccacatcacgcaacgtgttatcttgtggtgtaaataaagactgcgttacttgccctccca

SEQ ID NO: 52750 - DNA, 120 bp, Artificial Sequence
  ENSG00000068024_72 (sequence is synthesized)
cccacaccctcctgtatggcacgaaccccctcaaccggcagaaactggacagctcgctcgcctccgtgttcgtccggctcccttgcggtggtgttgggtagagacggggtttcaccgtgt

SEQ ID NO: 52751 - DNA, 63 bp, Artificial Sequence
  ENSG00000068024_73 (sequence is synthesized)
atctggctaattttttgaaaagaaaaccatcaccgaatacacttcaggaaatgtcttcagccc

SEQ ID NO: 52752 - DNA, 120 bp, Artificial Sequence
  ENSG00000068024_74 (sequence is synthesized)
aaaccatcaccgaatacacttcaggaaatgtcttcagccccttgaaaatgcattttaactcaccttgctttgatgatgaagcttcaagaccgcctggaaagaaatcctccctccccacat

SEQ ID NO: 52753 - DNA, 120 bp, Artificial Sequence
  ENSG00000068024_75 (sequence is synthesized)
tgtctatcaagtggcaagtctgcctggtggtggacaggagccctcgagggcctggtctggggaagggagaggcagggtggacacgcctggctcctgcttaggagccccaaagcactcggc

SEQ ID NO: 52754 - DNA, 120 bp, Artificial Sequence
  ENSG00000068024_76 (sequence is synthesized)
gctcagaggggctcagtttgagaaggaggcgtcctgcaatggacctgcaatcgccctggtcagcaccgtgtggaagctgagcaacctatgacacggcttctaagacctccaccgggctgg

SEQ ID NO: 52755 - DNA, 120 bp, Artificial Sequence
  ENSG00000068024_77 (sequence is synthesized)
gcacccccaagtccccggtgtgttaccccacagcagcttgcaggcaagggacacacttggggacagatgctcaggttccctggggccagcccaagggctgtgtatttcatcttaacacct

SEQ ID NO: 52756 - DNA, 120 bp, Artificial Sequence
  ENSG00000068024_78 (sequence is synthesized)
ccctcccctggccagactcccataggagactgctctgtgcagaactggctgtccaggtctctgtctgtcgactttcctcctgaattgagccagggctgtaagaaatttctggtgtgccta

SEQ ID NO: 52757 - DNA, 120 bp, Artificial Sequence
  ENSG00000068024_79 (sequence is synthesized)
agagatctgactacttcttccatttcatctcccccgaccccaccttccgctgccctggaagaaaaccaagatcaggggatattcagacattcttacttattaataaaagacaaaggaaag

SEQ ID NO: 52758 - DNA, 120 bp, Artificial Sequence
  ENSG00000068024_80 (sequence is synthesized)
gaggttgtgtttccagctctcaaccccttgtgtctggggcacctgtgggtgtcgcctgccaggttataaggtaaagggcctgaaagggaacctttcaccctctgttcacaagccactggt

SEQ ID NO: 52759 - DNA, 120 bp, Artificial Sequence
  ENSG00000068024_81 (sequence is synthesized)
aaatgaggaggcccctgtagagtgcacagcgttcacccagtgacagtgtgattgtaatagctggggttgctgggaccctagagtatccacggtgtgcatgcacttgaacttcaggatacc

SEQ ID NO: 52760 - DNA, 120 bp, Artificial Sequence
  ENSG00000068024_82 (sequence is synthesized)
ctgtttccctctgaggtgcaagagctctggcgattccggatccctactgtgtgtcaggttctggaagcatcttctctcatctccacgtgatgcccaggggctcccccagcttctggaagc

SEQ ID NO: 52761 - DNA, 120 bp, Artificial Sequence
  ENSG00000068024_83 (sequence is synthesized)
caccgcttgtccagggcaccagcccagtctgtcgtcaagcctggatttgatcttaggtctggctgcttccggaataccgagacgggcctctgctgttccctgagcttgctgtcagcaaat

SEQ ID NO: 52762 - DNA, 120 bp, Artificial Sequence
  ENSG00000068024_84 (sequence is synthesized)
gtaagtgttcctttaatgtgtaaataatgtcctgtttcttctcgagtcccagtggtcacagaaatcgcagccttgcttccctcaaagtgaataattgctgccaggtgttttccatacgca

SEQ ID NO: 52763 - DNA, 120 bp, Artificial Sequence
  ENSG00000068024_85 (sequence is synthesized)
agttttcggcagagtcgcgtgtctgagaagtgacgctgggatgtccctgggctgtgccaggagcagtgctggctcagatggatgtggccacggcgctgcctctgcaagtggccccctcgg

SEQ ID NO: 52764 - DNA, 120 bp, Artificial Sequence
  ENSG00000068024_86 (sequence is synthesized)
ttccaggaagcacttgttggagatgagcgtgtctgaaactggtctgtggctgaacggggctgtggggtccggaggagctgtctcagttcattcttcagtgccaagcgtggaatcttggcg

SEQ ID NO: 52765 - DNA, 120 bp, Artificial Sequence
  ENSG00000068024_87 (sequence is synthesized)
atcgggctggtggagaccctgctggagtgggccatatcagcacggccatgtcctctccaagtcaagaaccctgcaaacatgggcgcatttccatttgggccataaacctttattgggaaa

SEQ ID NO: 52766 - DNA, 120 bp, Artificial Sequence
  ENSG00000068024_88 (sequence is synthesized)
agtgaacctagagcttctgctgctttgtttcatgggtgtgagcctgtggttcttactgatgcttctactgagaatggtcctggatttcacctggagagcgccctaaagcttgacagaaag

SEQ ID NO: 52767 - DNA, 120 bp, Artificial Sequence
  ENSG00000068024_89 (sequence is synthesized)
aacggatttagagatcagtattttttccagaaagatgtgcccagtagtatcaggagagaatctgtgggctgattcttacaaatcgccctccaggttccctttctggggactgatgctatt

SEQ ID NO: 52768 - DNA, 120 bp, Artificial Sequence
  ENSG00000068024_90 (sequence is synthesized)
atatcaggccagctgtgaccctagaggagtaggccatatcagccagccacatccctggagccgtgggctgtattggtccagctgtgaccctagagcttctgaaccgaatctgaaattacg

SEQ ID NO: 52769 - DNA, 120 bp, Artificial Sequence
  ENSG00000068024_91 (sequence is synthesized)
cctgctgaattccatttttcctgttgtcactgcaccctggtgagccctgcagtccttgccgttgatccacctggagcattcacagtgcatgattaggaccccaccccgaagccgccatgg

SEQ ID NO: 52770 - DNA, 120 bp, Artificial Sequence
  ENSG00000068024_92 (sequence is synthesized)
gctgatgtctcattccgtgctggttgaatttgtagcttttacaagaagacgacgtagatgagaagctgagaagtaagcctaagccccgtgtgtttgactggggctcctcaaggtagtcct

SEQ ID NO: 52771 - DNA, 120 bp, Artificial Sequence
  ENSG00000068024_93 (sequence is synthesized)
aggaggccagaagacataaagaagacacttgagttggggtcagtgctgccatctcagggtgaggccaggtctcacctccagaacccctctgcctctcctcttctggtgccccaggagctg

SEQ ID NO: 52772 - DNA, 120 bp, Artificial Sequence
  ENSG00000068024_94 (sequence is synthesized)
gcttcactgcttggaagagagcaccccgaccccagtcctcacgtcgctcctacaggccaggccttcaggccatgctcctcattcctggaggggtccctgggaaagcccaccccatcaccc

SEQ ID NO: 52773 - DNA, 120 bp, Artificial Sequence
  ENSG00000068024_95 (sequence is synthesized)
tctgagagatggccagagaccttagaaccatggctctggagccagtctctgggccagggtctcaaaagcacagaaagaagttcaaggttgcctttctctttgcattttaatcatttattt

SEQ ID NO: 52774 - DNA, 120 bp, Artificial Sequence
  ENSG00000068024_96 (sequence is synthesized)
ttcaaggtggccacaggggagctgaaggtcagtcggggcctggacagtggtggccctccaggaggcctgccatagattcccagtgtggggaggggccgcccactccgtctccctctcatc

SEQ ID NO: 52775 - DNA, 120 bp, Artificial Sequence
  ENSG00000068024_97 (sequence is synthesized)
aggctgggaggcggctgtgatggggaggcgtggaccccactctgtcagcacagcctcgctattgaatcaaagagacattgcccacatttgtgatagggtatgtgcatagtacagagattc

SEQ ID NO: 52776 - DNA, 120 bp, Artificial Sequence
  ENSG00000068024_98 (sequence is synthesized)
tcaatgatttgggtcttaagaaccctttatactcttaaaaatttatactcttaaaaaaaaaaaaaaagctccaaagagcttctgtttacatgagttatatccacaatattgactctatta

SEQ ID NO: 52777 - DNA, 120 bp, Artificial Sequence
  ENSG00000068024_99 (sequence is synthesized)
cggcctggccatgtgtctcgacaccccagcccccagtcttcttacgatgccatgagacgcgtttctgggctgtgctggctgcggtcctcccccgttcacactgcagtctcccgtttcccg

SEQ ID NO: 52778 - DNA, 120 bp, Artificial Sequence
  ENSG00000068024_100 (sequence is synthesized)
gaattcttccccagcgaggccgccgggagagcaggacttgggtttctcctgagttacggcgccgaacgccctgagaaaaacgcctttggagcagtttccgggattaagcgaaagtctggg

SEQ ID NO: 52779 - DNA, 120 bp, Artificial Sequence
  ENSG00000068024_101 (sequence is synthesized)
ccactgccagtatccaagatggacgccgcggcgaggcctggccggctccccgcgttagcctgcaccccattgtgtgccctctaagcgcgaattaggctcgcagacatgcggtgctgaccg

SEQ ID NO: 52780 - DNA, 120 bp, Artificial Sequence
  ENSG00000068024_102 (sequence is synthesized)
ctaggcagccatgcgggctaccgagtgcgaccggacacggccggggcccgtgtttacggccactactggcccccggtccctgcgcctcctcaaccgcgaagcacccagcggctggcgcct

SEQ ID NO: 52781 - DNA, 120 bp, Artificial Sequence
  ENSG00000068024_103 (sequence is synthesized)
gggaaggttgtctggcgcaggtggctggggctctggggtgcagtggctctcgctttaagaaacaggatcctgtatgcagccagcatctcatccccttcgaagtctgtggcagtaatctgc

SEQ ID NO: 52782 - DNA, 120 bp, Artificial Sequence
  ENSG00000068024_104 (sequence is synthesized)
tcacatcaggccacgagtatggtgcgggtaggatgcgtgcttctgtattctgtacctagtttccacccgaagctacaggtggggctcccagtgcagtgaccgtgatactcatgggccacg

SEQ ID NO: 52783 - DNA, 120 bp, Artificial Sequence
  ENSG00000068028_0 (sequence is synthesized)
cagtctggatcctgggggaggcgctgaagtcggggcccgccctgtggccccgcccggcccgcgcttgctagcgcccaaagccagcgaagcacgggcccaaccgggccatgtcgggggagc

SEQ ID NO: 52784 - DNA, 120 bp, Artificial Sequence
  ENSG00000068028_1 (sequence is synthesized)
ctgagctcattgagctgcgggagctggcacccgctgggcgcgctgggaagggccgcacccggctggagcgtgccaacgcgctgcgcatcgcgcggggcaccgcgtgcaaccccacacggc

SEQ ID NO: 52785 - DNA, 120 bp, Artificial Sequence
  ENSG00000068028_2 (sequence is synthesized)
agctggtccctggccgtggccaccgcttccagcccgcggggcccgccacgcacacgtggtgcgacctctgtggcgacttcatctggggcgtcgtgcgcaaaggcctgcagtgcgcgcatt

SEQ ID NO: 52786 - DNA, 120 bp, Artificial Sequence
  ENSG00000068028_3 (sequence is synthesized)
gcaagttcacctgccactaccgctgccgcgcgctcgtctgcctggactgttgcgggccccgggacctgggctgggaacccgcggtggagcgggacacgaacgtggacgagcctgtggagt

SEQ ID NO: 52787 - DNA, 120 bp, Artificial Sequence
  ENSG00000068028_4 (sequence is synthesized)
gggagacacctgacctttctcaagctgagattgagcagaagatcaaggagtacaatgcccagatcaacagcaacctcttcatgagcttgaacaaggacggttcttacacaggcttcatca

SEQ ID NO: 52788 - DNA, 120 bp, Artificial Sequence
  ENSG00000068028_5 (sequence is synthesized)
aggttcagctgaagctggtgcgccctgtctctgtgccctccagcaagaagccaccctccttgcaggatgcccggcggggcccaggacggggcacaagtgtcaggcgccgcacttcctttt

SEQ ID NO: 52789 - DNA, 120 bp, Artificial Sequence
  ENSG00000068028_6 (sequence is synthesized)
acctgcccaaggatgctgtcaagcacctgcatgtgctgtcacgcacaagggcacgtgaagtcattgaggccctgctgcgaaagttcttggtggtggatgacccccgcaagtttgcactct

SEQ ID NO: 52790 - DNA, 120 bp, Artificial Sequence
  ENSG00000068028_7 (sequence is synthesized)
ttgagcgcgctgagcgtcacggccaagtgtacttgcggaagctgttggatgatgagcagcccctgcggctgcggctcctggcagggcccagtgacaaggccctgagctttgtcctgaagg

SEQ ID NO: 52791 - DNA, 120 bp, Artificial Sequence
  ENSG00000068028_8 (sequence is synthesized)
atgactctggggaggtgaactgggacgccttcagcatgcctgaactacataacttcctacgtatcctgcagcgggaggaggaggagcacctccgccagatcctgcagaagtactcctatt

SEQ ID NO: 52792 - DNA, 120 bp, Artificial Sequence
  ENSG00000068028_9 (sequence is synthesized)
gccgccagaagatccaagaggccctgcacgcctgcccccttgggtgacctcttgtacccccaggtggaaggcagacagcaggcagcgccaagtgcgtgccgtgtgagtgtgacagggcca

SEQ ID NO: 52793 - DNA, 120 bp, Artificial Sequence
  ENSG00000068028_10 (sequence is synthesized)
gtggggcctgtggaatgagtgtgcatggaggccctcctgtgctgggggaatgagcccagagaacagcgaagtagcttgctccctgtgtccacctgtgggtgtagccaggtatggctctgc

SEQ ID NO: 52794 - DNA, 120 bp, Artificial Sequence
  ENSG00000068028_11 (sequence is synthesized)
acccctctgccctcattactgggccttagtgggccagggctgccctgagaagctgctccaggcctgcagcaggagtggtgcagacagaagtctcctcaatttttgtctcagaagtgaaaa

SEQ ID NO: 52795 - DNA, 120 bp, Artificial Sequence
  ENSG00000068028_12 (sequence is synthesized)
tcttggagaccctgcaaacagaacagggtcatgtttgcaggggtgacggccctcatctatgaggaaaggttttggatcttgaatgtggtctcaggatatccttatcagagctaagggtgg

SEQ ID NO: 52796 - DNA, 120 bp, Artificial Sequence
  ENSG00000068028_13 (sequence is synthesized)
gtgctcagaataaggcaggcattgaggaagagtcttggtttctctctacagtgccaactcctcacacaccctgaggtcagggagtgctggctcacagtacagcatgtgccttaatgcttc

SEQ ID NO: 52797 - DNA, 120 bp, Artificial Sequence
  ENSG00000068028_14 (sequence is synthesized)
atatgaggaggatgtccctgggccagggtctgtgtgaatgtgggcactggcccaggttcataccttatttgctaatcaaagccagggtctctccctcaggtgttttttatgaagtgcgtg

SEQ ID NO: 52798 - DNA, 120 bp, Artificial Sequence
  ENSG00000068028_15 (sequence is synthesized)
aatgtatgtaatgtgtggtggcctcagctgaatgcctcctgtggggaaaggggttggggtgacagtcatcatcagggcctggggcctgagagaattggctcaataaagatttcaagatcc

SEQ ID NO: 52799 - DNA, 120 bp, Artificial Sequence
  ENSG00000068028_16 (sequence is synthesized)
ggctgcctgggtgccgcgcgcaaggagcgttctaattgccgatttcccggcggcacagagaggctaattctgcgcgggggctgggaggggagcctggattgccggctccgcaagtactcc

SEQ ID NO: 52800 - DNA, 120 bp, Artificial Sequence
  ENSG00000068028_17 (sequence is synthesized)
acccgctgcaagcggacccgggcccaggctgacccaggctccgcgcacgcgcacttcccgcaccttcccgccctcgcctccggccagaggccactcttgtgcgcttgcccggacgctggc

SEQ ID NO: 52801 - DNA, 120 bp, Artificial Sequence
  ENSG00000068028_18 (sequence is synthesized)
acccgcccccgttccctgtggtaggtggggtctgtgagtggagctccggagcgatgaggtcattcctgggggcgaagcgtgcgtgtccccgccccggcgttcctgccccaatgagacaag

SEQ ID NO: 52802 - DNA, 120 bp, Artificial Sequence
  ENSG00000068028_19 (sequence is synthesized)
cgtttcagtcttaacggttgcggcgcggctctggcccgggcgcacgcgcacactgacacgcgtacacgcacgcacgcgaccggggcggtggttggcggctacggacgcgcaggactgggg

SEQ ID NO: 52803 - DNA, 120 bp, Artificial Sequence
  ENSG00000068028_20 (sequence is synthesized)
gacgggcgggtacggctatgggcgaggcggaggcgccttctttcgaaatgacctggagcagcacgacgagcagtggctactgcagccaagaggactcggactcggagctcgagcagtact

SEQ ID NO: 52804 - DNA, 120 bp, Artificial Sequence
  ENSG00000068028_21 (sequence is synthesized)
tacttcaccgcgcgaacctcgctagctcgcaggccgcgccgggaccaggtgggagccagggggtgccggcgggcgggaggggaagcggtcgctggagctccgccctccccggtccgttgc

SEQ ID NO: 52805 - DNA, 120 bp, Artificial Sequence
  ENSG00000068028_22 (sequence is synthesized)
tcctgggtcggtgggcagccccaccctcctggctacgtggctccccgcgggtcctggccggggacctgcccgcggaaccgtgcgtaagaccccgattccaccgcctagatgctgggtgcc

SEQ ID NO: 52806 - DNA, 120 bp, Artificial Sequence
  ENSG00000068028_23 (sequence is synthesized)
ggggcccccttggtttctgtcacagacaggttgaacacggaaaaagcagctgtatggcttgtggtagacctgagccgggcattatccagctatgactaaagccgaccgagcagtttggac

SEQ ID NO: 52807 - DNA, 120 bp, Artificial Sequence
  ENSG00000068028_24 (sequence is synthesized)
tagcacctcgatttccgcgttcgaatgctcctgctccctccttggggagactaggggaggatgtggagagggaagagtcctcgccaggaattgagaagtatgtttaggaaaacttgagag

SEQ ID NO: 52808 - DNA, 120 bp, Artificial Sequence
  ENSG00000068028_25 (sequence is synthesized)
gcagagagagatcctgctcctccatctgcactcctgtatggagccagctgagccctcacctcttccctgttctggcctgtcaccagctgctggaatgtggaagattctgttcccttcctc

SEQ ID NO: 52809 - DNA, 120 bp, Artificial Sequence
  ENSG00000068028_26 (sequence is synthesized)
tagggtggatctggagaaagatttgggaatagataggaaagaagtcttgttttggaccataagcattcaggagcactttacccacaggaagggggaaagctagattataaaatgcctaaa

SEQ ID NO: 52810 - DNA, 120 bp, Artificial Sequence
  ENSG00000068028_27 (sequence is synthesized)
gaggtggaaaaagagatccaggttactaacccaggactgtaaggtgtctcggaacctcctaggtatccccattatcggagaactgtgtgccagatgccattggtgtgaccaccaggctca

SEQ ID NO: 52811 - DNA, 120 bp, Artificial Sequence
  ENSG00000068028_28 (sequence is synthesized)
gtttttttaattgccaatgaggaaaggggaagttctgtgctaggcgatagagatccaactgttgagcaggcctctctgcctgtggccttccggccggtttccagacgcccaggtggccaa

SEQ ID NO: 52812 - DNA, 80 bp, Artificial Sequence
  ENSG00000068078_0 (sequence is synthesized)
ggacagcgagccggagcgggagccgcgcgtagcgagccgggctccggcgctcgccagtctcccgagcggcgcccgcctcc

SEQ ID NO: 52813 - DNA, 120 bp, Artificial Sequence
  ENSG00000068078_1 (sequence is synthesized)
ccccgccatgggcgcccctgcctgcgccctcgcgctctgcgtggccgtggccatcgtggccggcgcctcctcggagtccttggggacggagcagcgcgtcgtggggcgagcggcagaagt

SEQ ID NO: 52814 - DNA, 120 bp, Artificial Sequence
  ENSG00000068078_2 (sequence is synthesized)
agcgcgtcgtggggcgagcggcagaagtcccgggcccagagcccggccagcaggagcagttggtcttcggcagcggggatgctgtggagctgagctgtcccccgcccgggggtggtccca

SEQ ID NO: 52815 - DNA, 120 bp, Artificial Sequence
  ENSG00000068078_3 (sequence is synthesized)
tggggcccactgtctgggtcaaggatggcacagggctggtgccctcggagcgtgtcctggtggggccccagcggctgcaggtgctgaatgcctcccacgaggactccggggcctacagct

SEQ ID NO: 52816 - DNA, 120 bp, Artificial Sequence
  ENSG00000068078_4 (sequence is synthesized)
gccggcagcggctcacgcagcgcgtactgtgccacttcagtgtgcgggtgacagacgctccatcctcgggagatgacgaagacggggaggacgaggctgaggacacaggtgtggacacag

SEQ ID NO: 52817 - DNA, 120 bp, Artificial Sequence
  ENSG00000068078_5 (sequence is synthesized)
gggccccttactggacacggcccgagcggatggacaagaagctgctggccgtgccggccgccaacaccgtccgcttccgctgcccagccgctggcaaccccactccctccatctcctggc

SEQ ID NO: 52818 - DNA, 120 bp, Artificial Sequence
  ENSG00000068078_6 (sequence is synthesized)
tgaagaacggcagggagttccgcggcgagcaccgcattggaggcatcaagctgcggcatcagcagtggagcctggtcatggaaagcgtggtgccctcggaccgcggcaactacacctgcg

SEQ ID NO: 52819 - DNA, 120 bp, Artificial Sequence
  ENSG00000068078_7 (sequence is synthesized)
tcgtggagaacaagtttggcagcatccggcagacgtacacgctggacgtgctggagcgctccccgcaccggcccatcctgcaggcggggctgccggccaaccagacggcggtgctgggca

SEQ ID NO: 52820 - DNA, 120 bp, Artificial Sequence
  ENSG00000068078_8 (sequence is synthesized)
gcgacgtggagttccactgcaaggtgtacagtgacgcacagccccacatccagtggctcaagcacgtggaggtgaatggcagcaaggtgggcccggacggcacaccctacgttaccgtgc

SEQ ID NO: 52821 - DNA, 120 bp, Artificial Sequence
  ENSG00000068078_9 (sequence is synthesized)
tcaagacggcgggcgctaacaccaccgacaaggagctagaggttctctccttgcacaacgtcacctttgaggacgccggggagtacacctgcctggcgggcaattctattgggttttctc

SEQ ID NO: 52822 - DNA, 120 bp, Artificial Sequence
  ENSG00000068078_10 (sequence is synthesized)
atcactctgcgtggctggtggtgctgccagccgaggaggagctggtggaggctgacgaggcgggcagtgtgtatgcaggcatcctcagctacggggtgggcttcttcctgttcatcctgg

SEQ ID NO: 52823 - DNA, 120 bp, Artificial Sequence
  ENSG00000068078_11 (sequence is synthesized)
tggtggcggctgtgacgctctgccgcctgcgcagcccccccaagaaaggcctgggctcccccaccgtgcacaagatctcccgcttcccgctcaagcgacaggtgtccctggagtccaacg

SEQ ID NO: 52824 - DNA, 120 bp, Artificial Sequence
  ENSG00000068078_12 (sequence is synthesized)
cgtccatgagctccaacacaccactggtgcgcatcgcaaggctgtcctcaggggagggccccacgctggccaatgtctccgagctcgagctgcctgccgaccccaaatgggagctgtctc

SEQ ID NO: 52825 - DNA, 120 bp, Artificial Sequence
  ENSG00000068078_13 (sequence is synthesized)
gggcccggctgaccctgggcaagccccttggggagggctgcttcggccaggtggtcatggcggaggccatcggcattgacaaggaccgggccgccaagcctgtcaccgtagccgtgaaga

SEQ ID NO: 52826 - DNA, 120 bp, Artificial Sequence
  ENSG00000068078_14 (sequence is synthesized)
tgctgaaagacgatgccactgacaaggacctgtcggacctggtgtctgagatggagatgatgaagatgatcgggaaacacaaaaacatcatcaacctgctgggcgcctgcacgcagggcg

SEQ ID NO: 52827 - DNA, 120 bp, Artificial Sequence
  ENSG00000068078_15 (sequence is synthesized)
ggcccctgtacgtgctggtggagtacgcggccaagggtaacctgcgggagtttctgcgggcgcggcggcccccgggcctggactactccttcgacacctgcaagccgcccgaggagcagc

SEQ ID NO: 52828 - DNA, 120 bp, Artificial Sequence
  ENSG00000068078_16 (sequence is synthesized)
ggtgaccgaggacaacgtgatgaagatcgcagacttcgggctggcccgggacgtgcacaacctcgactactacaagaagacgaccaacggccggctgcccgtgaagtggatggcgcctga

SEQ ID NO: 52829 - DNA, 120 bp, Artificial Sequence
  ENSG00000068078_17 (sequence is synthesized)
ggccttgtttgaccgagtctacactcaccagagtgacgtctggtcctttggggtcctgctctgggagatcttcacgctggggggctccccgtaccccggcatccctgtggaggagctctt

SEQ ID NO: 52830 - DNA, 120 bp, Artificial Sequence
  ENSG00000068078_18 (sequence is synthesized)
caagctgctgaaggagggccaccgcatggacaagcccgccaactgcacacacgacctgtacatgatcatgcgggagtgctggcatgccgcgccctcccagaggcccaccttcaagcagct

SEQ ID NO: 52831 - DNA, 120 bp, Artificial Sequence
  ENSG00000068078_19 (sequence is synthesized)
ggtggaggacctggaccgtgtccttaccgtgacgtccaccgacgagtacctggacctgtcggcgcctttcgagcagtactccccgggtggccaggacacccccagctccagctcctcagg

SEQ ID NO: 52832 - DNA, 120 bp, Artificial Sequence
  ENSG00000068078_20 (sequence is synthesized)
ggacgactccgtgtttgcccacgacctgctgcccccggccccacccagcagtgggggctcgcggacgtgaagggccactggtccccaacaatgtgaggggtccctagcagcccaccctgc

SEQ ID NO: 52833 - DNA, 120 bp, Artificial Sequence
  ENSG00000068078_21 (sequence is synthesized)
tccctagcagcccaccctgctgctggtgcacagccactccccggcatgagactcagtgcagatggagagacagctacacagagctttggtctgtgtgtgtgtgtgtgcgtgtgtgtgtgt

SEQ ID NO: 52834 - DNA, 120 bp, Artificial Sequence
  ENSG00000068078_22 (sequence is synthesized)
gcctgtgtgcgtgcgcatcttgcctccaggtgcagaggtaccctgggtgtccccgctgctgtgcaacggtctcctgactggtgctgcagcaccgaggggcctttgttctggggggaccca

SEQ ID NO: 52835 - DNA, 120 bp, Artificial Sequence
  ENSG00000068078_23 (sequence is synthesized)
gtgcagaatgtaagtgggcccacccggtgggacccccgtggggcagggagctgggcccgacatggctccggcctctgcctttgcaccacgggacatcacagggtgggcctcggcccctcc

SEQ ID NO: 52836 - DNA, 120 bp, Artificial Sequence
  ENSG00000068078_24 (sequence is synthesized)
cacacccaaagctgagcctgcagggaagccccacatgtccagcaccttgtgcctggggtgttagtggcaccgcctccccacctccaggctttcccacttcccaccctgcccctcagagac

SEQ ID NO: 52837 - DNA, 120 bp, Artificial Sequence
  ENSG00000068078_25 (sequence is synthesized)
tgaaattacgggtacctgaagatgggagcctttaccttttatgcaaaaggtttattccggaaactagtgtacatttctataaatagatgctgtgtatatggtatatatacatatatatat

SEQ ID NO: 52838 - DNA, 120 bp, Artificial Sequence
  ENSG00000068078_26 (sequence is synthesized)
ataacatatatggaagaggaaaaggctggtacaacggaggcctgcgaccctgggggcacaggaggcaggcatggccctgggcggggcgtgggggggcgtggagggaggccccagggggtc

SEQ ID NO: 52839 - DNA, 120 bp, Artificial Sequence
  ENSG00000068078_27 (sequence is synthesized)
tcacccatgcaagcagaggaccagggccttttctggcaccgcagttttgttttaaaactggacctgtatatttgtaaagctatttatgggcccctggcactcttgttcccacaccccaac

SEQ ID NO: 52840 - DNA, 120 bp, Artificial Sequence
  ENSG00000068078_28 (sequence is synthesized)
acttccagcatttagctggccacatggcggagagttttaatttttaacttattgacaaccgagaaggtttatcccgccgatagagggacggccaagaatgtacgtccagcctgccccgga

SEQ ID NO: 52841 - DNA, 120 bp, Artificial Sequence
  ENSG00000068078_29 (sequence is synthesized)
gctggaggatcccctccaagcctaaaaggttgttaatagttggaggtgattccagtgaagatattttatttcctttgtcctttttcaggagaattagatttctataggatttttctttag

SEQ ID NO: 52842 - DNA, 120 bp, Artificial Sequence
  ENSG00000068078_30 (sequence is synthesized)
gagatttattttttggacttcaaagcaagctggtattttcatacaaattcttctaattgctgtgtgtcccaggcagggagacggtttccagggaggggccggccctgtgtgcaggttccg

SEQ ID NO: 52843 - DNA, 120 bp, Artificial Sequence
  ENSG00000068078_31 (sequence is synthesized)
atgttattagatgttacaagtttatatatatctatatatataatttattgagtttttacaagatgtatttgttgtagacttaacacttcttacgcaatgcttctagagttttatagcctg

SEQ ID NO: 52844 - DNA, 120 bp, Artificial Sequence
  ENSG00000068078_32 (sequence is synthesized)
gactgctacctttcaaagcttggagggaagccgtgaattcagttggttcgttctgtactgttactgggccctgagtctgggcagctgtcccttgcttgcctgcagggccatggctcaggg

SEQ ID NO: 52845 - DNA, 120 bp, Artificial Sequence
  ENSG00000068078_33 (sequence is synthesized)
tggtctcttcttggggcccagtgcatggtggccagaggtgtcacccaaaccggcaggtgcgattttgttaacccagcgacgaactttccgaaaaataaagacacctggttgctaacctgg

SEQ ID NO: 52846 - DNA, 120 bp, Artificial Sequence
  ENSG00000068078_34 (sequence is synthesized)
gagtgtggaggccgacgtgcgcctccgcctggccaatgtgtcggagcgggacgggggcgagtacctctgtcgagccaccaatttcataggcgtggccgagaaggccttttggctgagcgt

SEQ ID NO: 52847 - DNA, 120 bp, Artificial Sequence
  ENSG00000068078_35 (sequence is synthesized)
agatctcccgcttcccgctcaagcgacaggtaacagaaagtagataccaggttctgagctgcctgcccgccaggcctcctggagccccacctcggcccacgctggtcctgggctgtgtga

SEQ ID NO: 52848 - DNA, 120 bp, Artificial Sequence
  ENSG00000068078_36 (sequence is synthesized)
gccctctctgcagccaggcgggctcccctctcctcgtctctgctcaccatgtagagcctagggtactttggggcacgaaacattctaaaaatcttcattcaatgctggtggaagtcagaa

SEQ ID NO: 52849 - DNA, 120 bp, Artificial Sequence
  ENSG00000068079_0 (sequence is synthesized)
gtgagcgccagaaggcagggatttcacggaaatgaaagtggaagcaaacagcctgcgagcagagcctcctgaggtgtatttcgggtcttgctggggctgagagagaccacagccctttgg

SEQ ID NO: 52850 - DNA, 120 bp, Artificial Sequence
  ENSG00000068079_1 (sequence is synthesized)
ggggtacaaacaagagttcagttgctgtgaattctgccactgtgcccagctctgaagcctcagctcttgccaaacagacccgagacccatgtcagccccactggatgccgccctccacgc

SEQ ID NO: 52851 - DNA, 120 bp, Artificial Sequence
  ENSG00000068079_2 (sequence is synthesized)
ccttcaggaggagcaggccagactcaagatgaggctgtgggacctgcagcagctgagaaaggagctcggggactcccccaaagacaaggtcccattttcagtgcccaagatccccctggt

SEQ ID NO: 52852 - DNA, 120 bp, Artificial Sequence
  ENSG00000068079_3 (sequence is synthesized)
attccgaggacacacccagcaggacccggaagtgcctaagtctttagtttccaatttgcggatccactgccctctgcttgcgggctctgctctgatcacctttgatgaccccaaagtggc

SEQ ID NO: 52853 - DNA, 120 bp, Artificial Sequence
  ENSG00000068079_4 (sequence is synthesized)
tgagcaggtgctgcaacaaaaggagcacacgatcaacatggaggagtgccggctgcgggtgcaggtccagcccttggagctgcccatggtcaccaccatccaggtgatgatgtccagcca

SEQ ID NO: 52854 - DNA, 120 bp, Artificial Sequence
  ENSG00000068079_5 (sequence is synthesized)
ttcctgccagcctcaggctgagtgaggaggagctgctggacaagctagagatcttctttggcaagactaggaacggaggtggcgatgtggacgttcgggagctactgccagggagtgtca

SEQ ID NO: 52855 - DNA, 120 bp, Artificial Sequence
  ENSG00000068079_6 (sequence is synthesized)
tgctggggtttgctagggatggagtggctcagcgtctgtgccaaatcggccagttcacagtgccactgggtgggcagcaagtccctctgagagtctctccgtatgtgaacggggagatcc

SEQ ID NO: 52856 - DNA, 120 bp, Artificial Sequence
  ENSG00000068079_7 (sequence is synthesized)
agaaggctgagatcaggtcgcagccagttccccgctcggtactggtgctcaacattcctgatatcttggatggcccggagctgcatgacgtcctggagatccacttccagaagcccaccc

SEQ ID NO: 52857 - DNA, 120 bp, Artificial Sequence
  ENSG00000068079_8 (sequence is synthesized)
gcgggggcggggaggtagaggccctgacagtcgtaccccaaggacagcagggcctagcagtcttcacctctgagtcaggctaggggcctccccttctcatcctccccacccccccgccaa

SEQ ID NO: 52858 - DNA, 120 bp, Artificial Sequence
  ENSG00000068079_9 (sequence is synthesized)
ggttctcacactggcctgggcttgggtgcccatataggaggtctgtatgttcaccaacagtgcggaggggtcacacattgcaaaacactgcccagaacagtaaaaagagcctgcatgcca

SEQ ID NO: 52859 - DNA, 120 bp, Artificial Sequence
  ENSG00000068079_10 (sequence is synthesized)
cttgagcttagcatcaactctgcttttggagcgtccagaataggccccacttcccctgggcttgttgattctctggaagggcgggtagaagtcttgttgtttccttctgccccaacaggc

SEQ ID NO: 52860 - DNA, 120 bp, Artificial Sequence
  ENSG00000068079_11 (sequence is synthesized)
actcccccaaagacaagtaaatgtatttatctccggcactcagcatcaatggaatggaatcggagatgccttcctcctaggtgggagtgaggaacactcctactcccctcccctacttcc

SEQ ID NO: 52861 - DNA, 120 bp, Artificial Sequence
  ENSG00000068079_12 (sequence is synthesized)
tgtctccccctagatgtccagccagttgagtggccggagggtgttggtcactggatttcctgccagcctcaggctgagtgaggaggagctgctggacaagctagagatcttctttggcaa

SEQ ID NO: 52862 - DNA, 120 bp, Artificial Sequence
  ENSG00000068079_13 (sequence is synthesized)
tttatctccggcactcagcatcaatggaatggaatcggagatgccttcctcctaggtgggagtgaggaacactcctactcccctcccctacttccaggtcccattttcagtgcccaagat

SEQ ID NO: 52863 - DNA, 120 bp, Artificial Sequence
  ENSG00000068097_0 (sequence is synthesized)
ccccgcccgtagaaaagatggctgctgtgcaagttgtcggttcgtggccttccgtgcagccgcgggaggcaccgcgggaagcaatccctgagcgaggcaatgggtttcgcctcttgtctg

SEQ ID NO: 52864 - DNA, 120 bp, Artificial Sequence
  ENSG00000068097_1 (sequence is synthesized)
ccaggctctgcgccctgcgcccggatgacagcagctccgcccgcaccgagatccacctgctcttcgatcagctcatctccgagaactacagcgagggcagtggcgtggccccggaggacg

SEQ ID NO: 52865 - DNA, 120 bp, Artificial Sequence
  ENSG00000068097_2 (sequence is synthesized)
ttagtgctcttcttgtccaggcttgccgactggtacctcttaatcagaatcatcttgtcagcaaagtgagccagcttatccaccatttacttaacagattacaggtaattgttgatgaac

SEQ ID NO: 52866 - DNA, 120 bp, Artificial Sequence
  ENSG00000068097_3 (sequence is synthesized)
agcacttggatttcctgttggcatatactatttcggctattcatcagtgtagttcctggacacacagggaaattcttcaagccctggcagctctggtgtactgcaatggctccaaatgtc

SEQ ID NO: 52867 - DNA, 120 bp, Artificial Sequence
  ENSG00000068097_4 (sequence is synthesized)
aaaagtacctcccagagctgctaggcaacaccggactcttaatgaagttgagtgacttggctcagtctgatcctgaagtcaggagagctgcagtacattgtatggcaaacttatgtctca

SEQ ID NO: 52868 - DNA, 120 bp, Artificial Sequence
  ENSG00000068097_5 (sequence is synthesized)
gtgtgccaggacagccgtatttggaggagccctaccaaaatgtctgtttccaagcttttctgactattttacagtctccaaaatcatctgatatggatgatatcacattttgcatgttat

SEQ ID NO: 52869 - DNA, 120 bp, Artificial Sequence
  ENSG00000068097_6 (sequence is synthesized)
tgcaaaatgcattaaaaggtatacagtcacttctaaatggtgggagaatgaaactaacacagactgatgaacttggagcacttttagctgtgctaaagaaattcatgtttcacggactcc

SEQ ID NO: 52870 - DNA, 120 bp, Artificial Sequence
  ENSG00000068097_7 (sequence is synthesized)
ctggactaaacatagagatgcccacggtgttatacccaactccgcttcctcagtatgatgggcgaacacctatcaaaccacagcaatcagaatccagtgcttctcgaccaactttgaata

SEQ ID NO: 52871 - DNA, 120 bp, Artificial Sequence
  ENSG00000068097_8 (sequence is synthesized)
aaaagaaaaaatccaaagtaaaaccaaagaaaatccagcaaggagaggaggaggaaaaggaatccagtggtgaaatagaggcagccccagtcactggcacaggcagagtgaacctgcatg

SEQ ID NO: 52872 - DNA, 120 bp, Artificial Sequence
  ENSG00000068097_9 (sequence is synthesized)
aagggaacacttggtgtccctcctccctgggtgtccagagtttgcctttagatggaagtggagctgcagaaaaagatggagtctcctcatccttcagttcttccagttggaaaagggtca

SEQ ID NO: 52873 - DNA, 120 bp, Artificial Sequence
  ENSG00000068097_10 (sequence is synthesized)
gcagtagtgagtcagacttttctgatgctgaaggaggcatgcagagtaaaatgaggtcttaccaagctaaagttcgccaaggagccttagtttgttttctttctactataaaatcgatag

SEQ ID NO: 52874 - DNA, 120 bp, Artificial Sequence
  ENSG00000068097_11 (sequence is synthesized)
aaaaaaaagttctttatggctactggtcagcttttattcctgatacgcctgaacttggcagcccacagtcagtgtccttgatgactcttacattgaaagacccttctccaaagacacgtg

SEQ ID NO: 52875 - DNA, 120 bp, Artificial Sequence
  ENSG00000068097_12 (sequence is synthesized)
cctgtgctctgcaagttttatctgccatcttggaaggctcaaagcagtttctttctgttgctgaagataccagtgaccacagaagggcttttacccccttctccgtaatgatcgcttgca

SEQ ID NO: 52876 - DNA, 120 bp, Artificial Sequence
  ENSG00000068097_13 (sequence is synthesized)
gcattagagagttgcacagatgtcttttgttagctttggtggcggagtcatcctcacagaccgttactcagataattaagtgccttgcaaatttagtatcaaatgcaccttatgatcgtc

SEQ ID NO: 52877 - DNA, 120 bp, Artificial Sequence
  ENSG00000068097_14 (sequence is synthesized)
taaaactcagcctgctgaccaaagtctggaaccagataaagccttatattcgccacaaagatgttaatgttcgtgtgtcaagtctcacactcttgggagctatagtgtccacccacgcac

SEQ ID NO: 52878 - DNA, 120 bp, Artificial Sequence
  ENSG00000068097_15 (sequence is synthesized)
ctttacctgaagtccaactacttctgcaacagccatgttcttctggactcggtaatagcaattcagcaacccctcacctcagccctcctgattggtggaagaaagcccctgcaggaccct

SEQ ID NO: 52879 - DNA, 120 bp, Artificial Sequence
  ENSG00000068097_16 (sequence is synthesized)
gaggattcctgttcaggtagcgatgctggctctgcagcaggaagcacctacgaaccatcccccatgcgactggaggccttacaggtattgactcttctggcaaggggctacttttcaatg

SEQ ID NO: 52880 - DNA, 120 bp, Artificial Sequence
  ENSG00000068097_17 (sequence is synthesized)
actcaagcctacttgatggagcttggagaggtgatttgcaagtgcatgggggaagcagatccatccattcagcttcatggagcaaagcttctggaagaactgggcacaggcttaatacag

SEQ ID NO: 52881 - DNA, 120 bp, Artificial Sequence
  ENSG00000068097_18 (sequence is synthesized)
cagtataaaccagactccactgcagcacctgatcagagagcaccagtcttcttggtggtgatgttctggactatgatgctgaacggtcctttacccagagccctgcagaattcagaacac

SEQ ID NO: 52882 - DNA, 120 bp, Artificial Sequence
  ENSG00000068097_19 (sequence is synthesized)
ccaactctccaggcgagcgcctgtgatgccctgtcttccatcttgccagaggccttcagcaatctgccgaatgacaggcagatgctgtgcatcacagtgctgctcgggctgaatgacagc

SEQ ID NO: 52883 - DNA, 120 bp, Artificial Sequence
  ENSG00000068097_20 (sequence is synthesized)
aagaatcgcttagtgaaagctgcaacttcacgggccctgggagtctatgtgctttttccctgtctcagacaggatgtcatatttgttgcagacgcagcaaatgcaatattgatgtcactt

SEQ ID NO: 52884 - DNA, 120 bp, Artificial Sequence
  ENSG00000068097_21 (sequence is synthesized)
gaagacaagtctctgaatgttcgagccaaagcagcctggtccctgggcaacctgacagacactctgattgtcaacatggaaacaccagacccaagtttccaggaagagttctctggtctc

SEQ ID NO: 52885 - DNA, 120 bp, Artificial Sequence
  ENSG00000068097_22 (sequence is synthesized)
ctgctcttgaaaatgttacgatcagctatagaagcatccaaggataaagacaaggtaaaaagcaatgcagtccgggcccttggaaatttgcttcattttctgcaaccctctcatatagaa

SEQ ID NO: 52886 - DNA, 120 bp, Artificial Sequence
  ENSG00000068097_23 (sequence is synthesized)
aaacccacatttgcagaaatcattgaggagtctatccaggccctaatttctactgttctaacagaagctgccatgaaagtccgatggaatgcttgttatgcaatgggaaatgtatttaaa

SEQ ID NO: 52887 - DNA, 120 bp, Artificial Sequence
  ENSG00000068097_24 (sequence is synthesized)
aatcctgcccttcctttagggacagccccatggacctcccaggcctacaatgccctgacatcggtcgtgacatcatgcaagaacttcaaagtgcgcatcagatctgcagctgccctttcc

SEQ ID NO: 52888 - DNA, 120 bp, Artificial Sequence
  ENSG00000068097_25 (sequence is synthesized)
gtcccggggaagagagagcagtacgggtctgttgaccagtatgctcggatctggaatgcattggtcaccgctttacagaagagtgaagacaccatagactttttggaattcaagtactgt

SEQ ID NO: 52889 - DNA, 120 bp, Artificial Sequence
  ENSG00000068097_26 (sequence is synthesized)
gtcagcctacggacccaaatctgccaggcactgattcacctcttgagcttggccagtgcctcggacctcccttgtatgaaagaaacccttgaactgagtgggaatatggtccagtcctat

SEQ ID NO: 52890 - DNA, 120 bp, Artificial Sequence
  ENSG00000068097_27 (sequence is synthesized)
attctacagtttttaaaatcaggagcagagggagatgacactggagcaccccacagcccacaggaaagagaccagatggtcagaatggcccttaaacacatgggcagcatccaggcacca

SEQ ID NO: 52891 - DNA, 120 bp, Artificial Sequence
  ENSG00000068097_28 (sequence is synthesized)
actggagacacagccagaagggccatcatgggctttttagaagagatcctggccgtttgttttgactcatctggatcacaaggggcactcccagggttaacaaatcagtgaagatcccac

SEQ ID NO: 52892 - DNA, 120 bp, Artificial Sequence
  ENSG00000068097_29 (sequence is synthesized)
catactttctagatgtcgaaggcggcagtaggaagacctgagcttgagcataagatctgtgggatttcatcttaggggcagaaacaatccgttcactatttatttagaatgacttagcag

SEQ ID NO: 52893 - DNA, 120 bp, Artificial Sequence
  ENSG00000068097_30 (sequence is synthesized)
ccatttaaattttcacagagggctcaaccacctttggagtgactccatagcactggccatggtcagggttgttggaacatctgacctgtgcatccaggagccgaggagtcaggttgtaat

SEQ ID NO: 52894 - DNA, 120 bp, Artificial Sequence
  ENSG00000068097_31 (sequence is synthesized)
acaggccaagcagacgggctttgagggcatttagtctcagaaaaaaaaaatgtagaaggatttcggaattagaattttgtgtattgtatctgtagttttgtaataaactaacgaaaaata

SEQ ID NO: 52895 - DNA, 120 bp, Artificial Sequence
  ENSG00000068097_32 (sequence is synthesized)
gctgccaatgtctggttagttcaaggaaaagttacaaggacttcatcaagttctactttactaaagaggaagaagtgagcaagaccttggggtggggagaaggcccctacgttgatcaaa

SEQ ID NO: 52896 - DNA, 120 bp, Artificial Sequence
  ENSG00000068097_33 (sequence is synthesized)
ctttcaggccctttagaggtgatccttttgacacataaacgacagacacacactctctcttttatacagcttgattcaggtaattgttgatgaacagcacttggatttcctgttggcata

SEQ ID NO: 52897 - DNA, 77 bp, Artificial Sequence
  ENSG00000068097_34 (sequence is synthesized)
ataatttcttatggaagatatatttgaacaaaatatatctaagaataaattgaaataatcccctgcctctttcccac

SEQ ID NO: 52898 - DNA, 90 bp, Artificial Sequence
  ENSG00000068097_35 (sequence is synthesized)
acctcagcctcccaagaagctgggactacataccaccatatccagctaatttttttaaaaaagttttttcagctggtcttggactcctgg

SEQ ID NO: 52899 - DNA, 120 bp, Artificial Sequence
  ENSG00000068097_36 (sequence is synthesized)
cccaagctggtcttggactcctgggctcaagcagtcctcccgctttgacctccggaagaactgggattaggtgtgagccactgtgcctggctttttccttcttttttagcacatgctgtt

SEQ ID NO: 52900 - DNA, 120 bp, Artificial Sequence
  ENSG00000068097_37 (sequence is synthesized)
tttgtgctatcacttcatttttttccttcctgcctcacattttctttccccattttgaatgtgaatatttacttttattttcccatttggctgtgttttgaggatcttcacttgactaat

SEQ ID NO: 52901 - DNA, 120 bp, Artificial Sequence
  ENSG00000068120_0 (sequence is synthesized)
gttagtgcttccgggttgcagccagggaagcctccgcggtggtgcaagtggaacccaagccttgaggtttcagtgagtagggggccgacgtgagctttagcgtccccctttagcctccct

SEQ ID NO: 52902 - DNA, 120 bp, Artificial Sequence
  ENSG00000068120_1 (sequence is synthesized)
cttcgattccttgaagaccctggtgcagcttagcaagagggcccaggatttttggatccccagccctgtgacaagggttcctgtccagtttccccctcccaggatttcgactcagttcag

SEQ ID NO: 52903 - DNA, 120 bp, Artificial Sequence
  ENSG00000068120_2 (sequence is synthesized)
cgaagtcaccgccccgtctgagaaatgaggacaccaaggcttagagcacagccccgaggcgccgtctaccaggccccgtcccctcccccggctcctgtcggtcagcactgaaaccccgtc

SEQ ID NO: 52904 - DNA, 120 bp, Artificial Sequence
  ENSG00000068120_3 (sequence is synthesized)
cctgctccaggcctccttctctggggtccaaggtcccatacaggcctctgcctcggccgcaggcccttcagtcaccgtcgcctcgtctccctgactgtccgcaggcctgggcagcatggc

SEQ ID NO: 52905 - DNA, 120 bp, Artificial Sequence
  ENSG00000068120_4 (sequence is synthesized)
cgtattccggtcgggtctcctggtgctgacgacgccgctggcctccctagcccctcgcctggcctccatcctgacctcggcggcccggctggtgaatcacacactctatgttcacctgca

SEQ ID NO: 52906 - DNA, 120 bp, Artificial Sequence
  ENSG00000068120_5 (sequence is synthesized)
gccgggcatgagcctggagggcccggctcagccccagtccagccccgtgcaggccacgtttgaggttcttgatttcatcacgcacctctatgctggcgccgacgtccacaggcacttgga

SEQ ID NO: 52907 - DNA, 120 bp, Artificial Sequence
  ENSG00000068120_6 (sequence is synthesized)
cgtcagaatcctactgaccaatatccgaaccaagagcacctttctccctcccctgcccacctcagtccagaatctcgcccacccgccagaagtcgtgttgacagatttccagaccctgga

SEQ ID NO: 52908 - DNA, 120 bp, Artificial Sequence
  ENSG00000068120_7 (sequence is synthesized)
tggaagccagtacaacccggtcaaacagcagctagtgcgttacgccaccagctgttacagctgttgtccgcgactggcctcggtgctgctatactccgattatgggataggagaagtgcc

SEQ ID NO: 52909 - DNA, 120 bp, Artificial Sequence
  ENSG00000068120_8 (sequence is synthesized)
cgtggagcccctggatgtccccttaccctccacgatcaggccagcttcccccgtggccgggtctccaaagcagccggtgcgtggctactaccgtggcgctgtcggtggcacgtttgaccg

SEQ ID NO: 52910 - DNA, 120 bp, Artificial Sequence
  ENSG00000068120_9 (sequence is synthesized)
cctgcacaacgcccacaaggtgttgctcagtgtcgcgtgcatcctggcccaggagcagcttgtggtgggagtagcagacaaagatctgttgaagagcaagttgctccctgagctgctcca

SEQ ID NO: 52911 - DNA, 120 bp, Artificial Sequence
  ENSG00000068120_10 (sequence is synthesized)
ctgctggacccctatgggcccgctggctctgacccctccctggagttcctggtggtcagcgaggagacctatcgtggggggatggccatcaaccgcttccgccttgagaatgacctggag

SEQ ID NO: 52912 - DNA, 120 bp, Artificial Sequence
  ENSG00000068120_11 (sequence is synthesized)
gaacttgctttgtaccagatccagctgctgaaggacctcagacatacagagaatgaagaggacaaagtcagctcctccagcttccgccagcgaatgttggggaacctgcttcggcctcca

SEQ ID NO: 52913 - DNA, 120 bp, Artificial Sequence
  ENSG00000068120_12 (sequence is synthesized)
tatgaaaggccagagctccccacatgtctctatgtaattgggctgactggcatcagtggctctgggaagagctcaatagctcagcgactgaagggcctgggggcgtttgtcattgacagt

SEQ ID NO: 52914 - DNA, 120 bp, Artificial Sequence
  ENSG00000068120_13 (sequence is synthesized)
gaccacctgggtcatcgggcctatgccccaggtggccctgcctaccagcctgtggtggaggcctttggaacagatattctccataaagatggcatcatcaacaggaaggtcctaggcagc

SEQ ID NO: 52915 - DNA, 120 bp, Artificial Sequence
  ENSG00000068120_14 (sequence is synthesized)
cgggtgtttgggaataagaagcagctgaagatactcacggacattatgtggccaattatcgcaaagctggcccgagaggagatggatcgggctgtggctgagggaaagcgtgtgtgtgtg

SEQ ID NO: 52916 - DNA, 120 bp, Artificial Sequence
  ENSG00000068120_15 (sequence is synthesized)
attgatgccgctgtgttgcttgaagccggctggcagaacctggtccatgaggtgtggactgctgtcatcccagagactgaggctgtaagacgcattgtggagagggatggcctcagtgaa

SEQ ID NO: 52917 - DNA, 120 bp, Artificial Sequence
  ENSG00000068120_16 (sequence is synthesized)
gccgcggctcaaagccggctgcagagccagatgagcgggcagcagcttgtggaacagagccacgtggtgctcagcaccttgtgggagccgcatatcacccaacgccaggtggagaaagcc

SEQ ID NO: 52918 - DNA, 120 bp, Artificial Sequence
  ENSG00000068120_17 (sequence is synthesized)
tgggccctcttgcagaagcgcattcccaagactcatcaggccctcgactgaaaagttctcagtggggccagactggctcctggagctgacaagcgaccccgtggtgaggagaaatggggg

SEQ ID NO: 52919 - DNA, 120 bp, Artificial Sequence
  ENSG00000068120_18 (sequence is synthesized)
ccttgatgctcaccctggttcaggcccagaggtccaagctatactgtgcaggacatggccaggcctggtggacacaggaagcctacccaacacgctggtatttggccaacactgaggatg

SEQ ID NO: 52920 - DNA, 120 bp, Artificial Sequence
  ENSG00000068120_19 (sequence is synthesized)
tggttcatgggggagcagtcccctccccactcttgcccatgggtgactcttacccacagctgactagggccagcgcaaatactggaacctgtaacagaattaaaggtgaatgttctgaga

SEQ ID NO: 52921 - DNA, 61 bp, Artificial Sequence
  ENSG00000068120_20 (sequence is synthesized)
tctcgaactcccgacctcagatgtcagcctttgcctttttctcctgtccacagagaccccg

SEQ ID NO: 52922 - DNA, 120 bp, Artificial Sequence
  ENSG00000068120_21 (sequence is synthesized)
aatcagcctttgcctttttctcctgtccacagagaccccgcaaacaagcgcatcagaggatctgggtggtgcgagagcctcctacagcagccaggccagaagggaatctgtgaaatgggc

SEQ ID NO: 52923 - DNA, 120 bp, Artificial Sequence
  ENSG00000068120_22 (sequence is synthesized)
gttagtgcttccgggttgcagccagggaagcctccgcggtggtgcaagtggaacccaagccttgaggtttcatccagaatctcgcccacccgccagaagtcgtgttgacagatttccaga

SEQ ID NO: 52924 - DNA, 120 bp, Artificial Sequence
  ENSG00000068120_23 (sequence is synthesized)
tccccacaggaaagcgtgtgtgtgtgattgatgccgctgtgttgcttgaagccggctggcagaacctggtccatgaggtgtggactgctgtcatcccagagactgaggtatctcgcccca

SEQ ID NO: 52925 - DNA, 120 bp, Artificial Sequence
  ENSG00000068120_24 (sequence is synthesized)
aaagatctgttgaagagtgagtaagagggaccctggactagggtggaggatccccaaatctccccacccccgacccttatgccgagatcaaggaagggtagggccattcattacttccca

SEQ ID NO: 52926 - DNA, 120 bp, Artificial Sequence
  ENSG00000068120_25 (sequence is synthesized)
cccttcccaaatgtcacagtggttgacactcaattggtgctaaggccattttgtcaaatgaacagctttctcagcatgtggtccagtcaccactcaatcagaataccccaaatgtgaagc

SEQ ID NO: 52927 - DNA, 120 bp, Artificial Sequence
  ENSG00000068120_26 (sequence is synthesized)
aaagggatctgcattttagcaagttttccaggtgatacaccctaatgagacactgggaatgaatgggtgagtgagctgcaggtagcagtgccacagacaggaggaggaaactcaagcatg

SEQ ID NO: 52928 - DNA, 120 bp, Artificial Sequence
  ENSG00000068120_27 (sequence is synthesized)
gcatgggtcttggaattttccatctgcctctgatgccctctggcactgctcgttctctggagtggtttcctggtggcttattctctggacacatgccagcccttggagtgactattgtgc

SEQ ID NO: 52929 - DNA, 120 bp, Artificial Sequence
  ENSG00000068120_28 (sequence is synthesized)
ttgcctgtttcttcaccttcatgctcccctcaccatcaccataggccttaccagttgaaccctttctgccaccccctctggggatactgtacttagggacactttttcccaaactggccc

SEQ ID NO: 52930 - DNA, 120 bp, Artificial Sequence
  ENSG00000068120_29 (sequence is synthesized)
atactctcctccccaataaaaagatctcactgttcttctgggctccttccccaggcaagttgctccctgagctgctccaaccttatacagaacgtgtggaacatctgagtgaattcctgg

SEQ ID NO: 52931 - DNA, 120 bp, Artificial Sequence
  ENSG00000068120_30 (sequence is synthesized)
agagaagtgggggctcagggtggtgggaagaagcaaggaggaactggttctcagtttgcccgctgagtcggaggaggaggagcctgggtaggaaggggaggatgggggggcaggttggat

SEQ ID NO: 52932 - DNA, 120 bp, Artificial Sequence
  ENSG00000068137_0 (sequence is synthesized)
agtcccggggctgcagggagcgcagcgcgcgcggcccgggccccggccaccggacgccctaccggacacgaccctccctggagcttggacaactgcccacctcggacgctgcaccggaca

SEQ ID NO: 52933 - DNA, 120 bp, Artificial Sequence
  ENSG00000068137_1 (sequence is synthesized)
ctgccccccacagggctggacactccaacggacactacttcccagctccggacattgctccctcctctcccggggccctggacgcttttccccctcccccctccgggggcccagacactg

SEQ ID NO: 52934 - DNA, 120 bp, Artificial Sequence
  ENSG00000068137_2 (sequence is synthesized)
agcccccctcagcgtctggctagcgtccccttgcaccccagcccaggacactgcctcctccctgtcctcttctcccttctgctcctcccacctcatctttcccctgctcgggtcggagcc

SEQ ID NO: 52935 - DNA, 120 bp, Artificial Sequence
  ENSG00000068137_3 (sequence is synthesized)
ccgccagttcctccgaccccctactgctcggccgcggctgcccgcgcccccatccgcagctcctcgcccggatgcctctccccgggggactatggtggcttctctgctgccgtcgaggct

SEQ ID NO: 52936 - DNA, 120 bp, Artificial Sequence
  ENSG00000068137_4 (sequence is synthesized)
tcactcttctgcaccgggactacggggacggcgagcttagcggggacggggacgaggacgaggacgaggaaacctttgagctgcggaccccgagtccagcgggcggcgggaggggtcccc

SEQ ID NO: 52937 - DNA, 120 bp, Artificial Sequence
  ENSG00000068137_5 (sequence is synthesized)
tggaagtgacgctgactcagccagtgaggagcgggcctgtctccaacaggctgcagagctgggaggagacttggagcctcatcccggagaaagggctgccggaggacgacccggacatcg

SEQ ID NO: 52938 - DNA, 120 bp, Artificial Sequence
  ENSG00000068137_6 (sequence is synthesized)
ttgtgaaaggttggctgtaccgggagccccgcggaggaggggcgcggccctggctgcccccgcgccgagcctggtttgtgctcacgcgggactccctggatcagttcagcagcagcggga

SEQ ID NO: 52939 - DNA, 120 bp, Artificial Sequence
  ENSG00000068137_7 (sequence is synthesized)
aaggggcgcggcgtctcgggagcctcgtgctcaccagcctgtgctcggtgaccggcccagagcgcaggcgtaaggagacaggtctgtggtcagtgactgtgtctggtcggaaacacagtg

SEQ ID NO: 52940 - DNA, 120 bp, Artificial Sequence
  ENSG00000068137_8 (sequence is synthesized)
tccgcctctgctccccacgccaggcagaggctgagcgctggggggtggcattgcgggaagtgatcgcctccaaggcacccctggagacccccacccagctactgctcagggacatacagg

SEQ ID NO: 52941 - DNA, 120 bp, Artificial Sequence
  ENSG00000068137_9 (sequence is synthesized)
aaagttgcggggacccagaggccgttgccctcatttacctgaggaacccgattctgagacacactagtggagccttgtatgccccactcctgcccctgccctatggagtcagcgccccag

SEQ ID NO: 52942 - DNA, 120 bp, Artificial Sequence
  ENSG00000068137_10 (sequence is synthesized)
gtccgggctatgcacccctgcgcgaggaggcggtgcggctgttcttggcgctgcaggcgctggagggggcgcggcgccccgggcccttgatgcagggtgtgctccaaacctgccgggact

SEQ ID NO: 52943 - DNA, 120 bp, Artificial Sequence
  ENSG00000068137_11 (sequence is synthesized)
tgcccgcgctccgggatgaactcttcctgcagctggctaagcagacctcgggccctgcaggtccccccgggctcccggctacccaagaccctgcggccctgcggtactggcaactcctca

SEQ ID NO: 52944 - DNA, 120 bp, Artificial Sequence
  ENSG00000068137_12 (sequence is synthesized)
gggggagctgtgcgggggcacctcctggggcacttggagaggaccgagcaggcactcccggactcggaactggcggaatatgcgcgcttcatccggaaagcgctgggccggacgcgcggc

SEQ ID NO: 52945 - DNA, 120 bp, Artificial Sequence
  ENSG00000068137_13 (sequence is synthesized)
agagagctggtgccctcgctggcggagatttccgcgttgagccaacggcaggagctgctgtgtaccgtgcactgtccgggggctggtgcctgtgctgtggccatcgactcccacaccacg

SEQ ID NO: 52946 - DNA, 120 bp, Artificial Sequence
  ENSG00000068137_14 (sequence is synthesized)
gcgggggaggtggctcgagagctggtggggcggctgggcttggcccggagccgcaacgcattcgcgctgtacgagcagcgaggggcccaggagcgagccctggctggggggaccctcgtg

SEQ ID NO: 52947 - DNA, 120 bp, Artificial Sequence
  ENSG00000068137_15 (sequence is synthesized)
gccgacgtgctcaccaggtttgagaacttggccgcggaggaagctgggttggaggactcgcccgactccgggtggagactatgtctgcgtcttcacggacctctgcaccctgaggggctg

SEQ ID NO: 52948 - DNA, 120 bp, Artificial Sequence
  ENSG00000068137_16 (sequence is synthesized)
tccccagacggtcacgaactgcctttcctctttgagcaggctcacgctctgctgctgcggggccggccgcccccacccgacgacacgctgcgcgccctggcggcgctgcgcctgcagagc

SEQ ID NO: 52949 - DNA, 80 bp, Artificial Sequence
  ENSG00000068137_17 (sequence is synthesized)
ctgcagcgggacttctctccgcgggtgcccctgccccgcctggaccgcctgctcccgcccccggccccgccgcgcgaaga

SEQ ID NO: 52950 - DNA, 80 bp, Artificial Sequence
  ENSG00000068137_18 (sequence is synthesized)
ggccggccgcactgcgggaagcattgcccgcgagggaggaggcggcgccggcacggcagctgccgtgctgggcggctgga

SEQ ID NO: 52951 - DNA, 120 bp, Artificial Sequence
  ENSG00000068137_19 (sequence is synthesized)
acggcagctgccgtgctgggcggctggaagcggctacggggcatgggccgagctgaggccatggccgcctacctggccctggcggcgcagtgtccggggttcggcgctgctcggtatgac

SEQ ID NO: 52952 - DNA, 120 bp, Artificial Sequence
  ENSG00000068137_20 (sequence is synthesized)
gttctggagctgagcacggagcctggtcggggtgctccacagaagctgtgcctgggcttgggagccaaggccatgtccctctcccggccaggggagacggagcccatccacagtgtcagc

SEQ ID NO: 52953 - DNA, 120 bp, Artificial Sequence
  ENSG00000068137_21 (sequence is synthesized)
tatggccatgtggccgcctgccagctaatgggcccccacaccctggccttgagggtgggagagagccagctcctcctgcagagcccccaggtggaagagatcatgcagctggtgaatgcc

SEQ ID NO: 52954 - DNA, 120 bp, Artificial Sequence
  ENSG00000068137_22 (sequence is synthesized)
tacttggccaacccctcccccgagaggccctgcagcagctcttctcctccatgccaagacctgccagacacctcccctcccagccagcgcccgggcctggacgagccccagggacagtct

SEQ ID NO: 52955 - DNA, 120 bp, Artificial Sequence
  ENSG00000068137_23 (sequence is synthesized)
ggctgcttggggcagctgcaggactgagcctgccaagaggtcacgacttccctcctgcctgcagcctgggccaggactgctctgagatttgagggaaacatggacccttttggccctgca

SEQ ID NO: 52956 - DNA, 120 bp, Artificial Sequence
  ENSG00000068137_24 (sequence is synthesized)
gggacagggcacatcccacacccaagggctacaatgggtgtgggtaattttctagtttgtttcttaatttatttgtagaagagaagcaaaaaaaaaaaaaaagtttcttatttacacaaa

SEQ ID NO: 52957 - DNA, 120 bp, Artificial Sequence
  ENSG00000068137_25 (sequence is synthesized)
tccttccgcctccgccagcgccgaggaatgtggcgaggccggctgggcggctcgaacgcctgggtccccctccgctcccagttcgcaagtgcggaggccagatgcgagagctcccgctgc

SEQ ID NO: 52958 - DNA, 120 bp, Artificial Sequence
  ENSG00000068137_26 (sequence is synthesized)
cacgtaattccccacatccagaacagctacccatctcaaaccccaggagtcaccagcccttgggccctcacatccctggagcctcagccccctccacacacgtgctgtgaatcatagggg

SEQ ID NO: 52959 - DNA, 120 bp, Artificial Sequence
  ENSG00000068137_27 (sequence is synthesized)
cctgggccaggtagagctctaagcactggggatccagcagtgatcacagacaagctgaaggagcttacactagagtggagtcagacaataaacaaggaatcccaggctatgaagacagtg

SEQ ID NO: 52960 - DNA, 120 bp, Artificial Sequence
  ENSG00000068137_28 (sequence is synthesized)
agaaatgctacaaaggaaagagtgatgtgacaggaagccagggaagggttctcaaaaagggtgccatttaagctagccagggaagacctgggagaacagcattccaggtagaaagaattg

SEQ ID NO: 52961 - DNA, 84 bp, Artificial Sequence
  ENSG00000068137_29 (sequence is synthesized)
acaacaacaacaacaacaacaaaaaaaaatgttagaagagcagaaagaaccaagtataactggcacatagaaatgaaggagaga

SEQ ID NO: 52962 - DNA, 120 bp, Artificial Sequence
  ENSG00000068137_30 (sequence is synthesized)
gacacagcgagactccgtctcaaaaaacaaaaaagaaatgaaggagagagtggtgataaggaaggaaaggttgcagggccagagcacgtaggaccctggtggggaagctggagccctaga

SEQ ID NO: 52963 - DNA, 120 bp, Artificial Sequence
  ENSG00000068137_31 (sequence is synthesized)
ggggaagctggagccctagagcctggagaaaggatgagaaaaagaagagaacctggcagcccctgttgcacactgacctctgccctctcttaggtggaagagatcatgcagctggtgaat

SEQ ID NO: 52964 - DNA, 120 bp, Artificial Sequence
  ENSG00000068305_0 (sequence is synthesized)
atagtccgcccccacgtccttgtggaatagcgcccgcttccaagcaccgtgactctctttgccctacccttgtctttcccattccaattactctagaacccaccgagaggataattcagt

SEQ ID NO: 52965 - DNA, 120 bp, Artificial Sequence
  ENSG00000068305_1 (sequence is synthesized)
cctgaaaagaaactgatggggagaagcgaggaagggaacccaggagggaggggaggcagggctgcggagggacaccgaggcggcggaggtagtgcgcacgcgcagcacagaacgagttcc

SEQ ID NO: 52966 - DNA, 120 bp, Artificial Sequence
  ENSG00000068305_2 (sequence is synthesized)
ggtctggccgaggcttgtctcctaaaaatagccccggtgtggggatccgtgcgcggatgtcccggcgagtcccgggctgaaagaggcggctccgggcggcgcgaagcgctggtggcgggc

SEQ ID NO: 52967 - DNA, 120 bp, Artificial Sequence
  ENSG00000068305_3 (sequence is synthesized)
ccgggctgcggcgtgtgcgcgcccgccagctgctccggagatacggaattgcattttgtgaaaaaagaacaagaattttctgcaaggatcatatctaagtgcactttttgctgatacttc

SEQ ID NO: 52968 - DNA, 120 bp, Artificial Sequence
  ENSG00000068305_4 (sequence is synthesized)
atttctaatcttgtagaaaatttcagctgtagcccttggactagaagctgaaataacagaagctgtgtacgatgcattagggtattgaagaaaattaacttttgaattaaatatttggaa

SEQ ID NO: 52969 - DNA, 120 bp, Artificial Sequence
  ENSG00000068305_5 (sequence is synthesized)
tataaggaaataaggaaagttgactgaaaatggggcggaagaaaatacaaatcacacgcataatggatgaaaggaaccgacaggtcacttttacaaagagaaagtttggattaatgaaga

SEQ ID NO: 52970 - DNA, 120 bp, Artificial Sequence
  ENSG00000068305_6 (sequence is synthesized)
aagcctatgaacttagtgtgctctgtgactgtgaaatagcactcatcattttcaacagctctaacaaactgtttcaatatgctagcactgatatggacaaagttcttctcaagtatacag

SEQ ID NO: 52971 - DNA, 120 bp, Artificial Sequence
  ENSG00000068305_7 (sequence is synthesized)
aatataatgaacctcatgaaagcagaaccaactcggatattgttgaggctctgaacaagaaggaacacagagggtgcgacagcccagaccctgatacttcatatgtgctaactccacata

SEQ ID NO: 52972 - DNA, 120 bp, Artificial Sequence
  ENSG00000068305_8 (sequence is synthesized)
cagaagaaaaatataaaaaaattaatgaggaatttgataatatgatgcggaatcataaaatcgcacctggtctgccacctcagaacttttcaatgtctgtcacagttccagtgaccagcc

SEQ ID NO: 52973 - DNA, 120 bp, Artificial Sequence
  ENSG00000068305_9 (sequence is synthesized)
ccaatgctttgtcctacactaacccagggagttcactggtgtccccatctttggcagccagctcaacgttaacagattcaagcatgctctctccacctcaaaccacattacatagaaatg

SEQ ID NO: 52974 - DNA, 120 bp, Artificial Sequence
  ENSG00000068305_10 (sequence is synthesized)
tgtctcctggagctcctcagagaccaccaagtactggcaatgcaggtgggatgttgagcactacagacctcacagtgccaaatggagctggaagcagtccagtggggaatggatttgtaa

SEQ ID NO: 52975 - DNA, 120 bp, Artificial Sequence
  ENSG00000068305_11 (sequence is synthesized)
actcaagagcttctccaaatttgattggagctactggtgcaaatagcttaggcaaagtcatgcctacaaagtctccccctccaccaggtggtggtaatcttggaatgaacagtaggaaac

SEQ ID NO: 52976 - DNA, 120 bp, Artificial Sequence
  ENSG00000068305_12 (sequence is synthesized)
cagatcttcgagttgtcatccccccttcaagcaagggcatgatgcctccactaaatacccagaggatcagtagttctcaagccactcaacctcttgctaccccagtcgtgtctgtgacaa

SEQ ID NO: 52977 - DNA, 120 bp, Artificial Sequence
  ENSG00000068305_13 (sequence is synthesized)
ccccaagcttgcctccgcaaggacttgtgtactcagcaatgccgactgcctacaacactgattattcactgaccagcgctgacctgtcagcccttcaaggcttcaactcgccaggaatgc

SEQ ID NO: 52978 - DNA, 120 bp, Artificial Sequence
  ENSG00000068305_14 (sequence is synthesized)
tgtcgctgggacaggtgtcggcctggcagcagcaccacctaggacaagcagccctcagctctcttgttgctggagggcagttatctcagggttccaatttatccattaataccaaccaaa

SEQ ID NO: 52979 - DNA, 120 bp, Artificial Sequence
  ENSG00000068305_15 (sequence is synthesized)
gggttccaatttatccattaataccaaccaaaacatcagcatcaagtccgaaccgatttcacctcctcgggatcgtatgaccccatcgggcttccagcagcagcagcagcagcagcagca

SEQ ID NO: 52980 - DNA, 120 bp, Artificial Sequence
  ENSG00000068305_16 (sequence is synthesized)
cacaacccccgcagccccagccccgacaggaaatggggcgctcccctgtggacagtctgagcagctctagtagctcctatgatggcagtgatcgggaggatccacggggcgacttccatt

SEQ ID NO: 52981 - DNA, 120 bp, Artificial Sequence
  ENSG00000068305_17 (sequence is synthesized)
ctccaattgtgcttggccgacccccaaacactgaggacagagaaagcccttctgtaaagcgaatgaggatggacgcgtgggtgacctaaggcttccaagctgatgtttgtacttttgtgt

SEQ ID NO: 52982 - DNA, 120 bp, Artificial Sequence
  ENSG00000068305_18 (sequence is synthesized)
tactgcagtgacctgccctacatatctaaatcggtaaataaggacatgagttaaatatatttatatgtacatacatatatatatccctttacatatatatgtatgtgggtgtgagtgtgt

SEQ ID NO: 52983 - DNA, 120 bp, Artificial Sequence
  ENSG00000068305_19 (sequence is synthesized)
atgtgtgggtgtgtgttacatacacagaatcaggcacttacctgcaaactccttgtaggtctgcagatgtgtgtcccatggcagacaaagcaccctgtaggcacagacaagtctggcact

SEQ ID NO: 52984 - DNA, 120 bp, Artificial Sequence
  ENSG00000068305_20 (sequence is synthesized)
tccttggactacttgtttcgtaaagataaccagtttttgcagagaaacgtgtacccatatataattctcccacactagcttgcagaaacctagagggccccctacttgttttatttaact

SEQ ID NO: 52985 - DNA, 120 bp, Artificial Sequence
  ENSG00000068305_21 (sequence is synthesized)
gtgcagtgactgtagttacttaagagaaaatgctttgtagaacagagcagtagaaaagcaggaaccaagaaagcaatactgtacataaaatgtcatttatattttccaacctggcatggg

SEQ ID NO: 52986 - DNA, 120 bp, Artificial Sequence
  ENSG00000068305_22 (sequence is synthesized)
tgtctgttgcaaaggggtgcatgggaaagggctgttgatattaaaaacaaacaaaacaaaaaagccccacacataactgttttgcacgtgcaaaaatgtattgggtcaagaagtgatctt

SEQ ID NO: 52987 - DNA, 120 bp, Artificial Sequence
  ENSG00000068305_23 (sequence is synthesized)
tagctaataaagaaagagaatagaaaacacgcatgagatattcagaaaatactagcctagaaatatagagcattaacaaagtaaaattaatatattaagttataattggaatatgtcaga

SEQ ID NO: 52988 - DNA, 120 bp, Artificial Sequence
  ENSG00000068305_24 (sequence is synthesized)
atgaaagaaaacacccttatgaattgatgactatatataaaattatattcactacttttgaacacattctgctatgaattatttatataagccaaagctatatgttgtaactttttttta

SEQ ID NO: 52989 - DNA, 120 bp, Artificial Sequence
  ENSG00000068305_25 (sequence is synthesized)
gagaatagctttatcttggtttaactctttagttttattttaagaggggaaaacaaaaatatcttgcaagcagaaccttggaaaaaaaaagccatgaacacttattctaaatgtaaatta

SEQ ID NO: 52990 - DNA, 120 bp, Artificial Sequence
  ENSG00000068305_26 (sequence is synthesized)
aaagttgagccaaactctttgtgtatatagcatcttaaatatattatcacctttgatgtaagtacctatgtattgtatggtcaccagattaaaaagtatatttttgtggattgccgccaa

SEQ ID NO: 52991 - DNA, 120 bp, Artificial Sequence
  ENSG00000068305_27 (sequence is synthesized)
tctggggggaaaaggcgaggtcctttattaagtattcactgtttaatatttactattttgttaaatatactgtactttggattttaattattagcccagttttttcagaggattgtataa

SEQ ID NO: 52992 - DNA, 120 bp, Artificial Sequence
  ENSG00000068305_28 (sequence is synthesized)
aggggtttctcccctcactggtggtgaatgtgtgatgttacattgtaatctttgtgctgtatgggttgagcatcattatatattttgtatgtgtacataaatagcaaagtggcaaaaaaa

SEQ ID NO: 52993 - DNA, 120 bp, Artificial Sequence
  ENSG00000068305_29 (sequence is synthesized)
attggtgttaagttcatcctgcataagtataaaatgtgttgtaacagattttgtaaggcattatttaaaacttgccttttgtgaggaaaaaatgtagtagaaaaagctgacctaatttaa

SEQ ID NO: 52994 - DNA, 120 bp, Artificial Sequence
  ENSG00000068305_30 (sequence is synthesized)
ttaatattagagaaaatggcaaaatagtagatgagcacaaaggttttataagtggtaaatgattaggggaaaataatcatggggaaagggatcttttttccttgaccctctgaaaacaga

SEQ ID NO: 52995 - DNA, 120 bp, Artificial Sequence
  ENSG00000068305_31 (sequence is synthesized)
acgatgcagctggttacaaaatcctaccgttatcagctcttctgcacattgcagtgatgctttggtatgcggggagaaacactcttagggtgctggtccttggcatgactcttgccattc

SEQ ID NO: 52996 - DNA, 120 bp, Artificial Sequence
  ENSG00000068305_32 (sequence is synthesized)
taattggaattagtgccaccctcagcttggattttgaacaaggccttattctttcaggaagacaactaatggatgatagcaagttcatccacttactgggcttgtgccatgagcaaaatt

SEQ ID NO: 52997 - DNA, 120 bp, Artificial Sequence
  ENSG00000068305_33 (sequence is synthesized)
caaagtcctgtatatctttcattgtagatttttaaatactccttttcctaaaaaactcaagggtttaaaaattgctattttatattttaaatgatattgagcagctacctacaatttcta

SEQ ID NO: 52998 - DNA, 120 bp, Artificial Sequence
  ENSG00000068305_34 (sequence is synthesized)
tgtacattttgttcccccccccccaccccccccccaaattacgttccttttgacattttcctcatctgctgtttgtgacaagtcatcagccagatttcctgactgacacataggtatgat

SEQ ID NO: 52999 - DNA, 120 bp, Artificial Sequence
  ENSG00000068305_35 (sequence is synthesized)
cagtgcaggagagacctgcgcaccacaggctgcaaactggaggttctgttctcatggcagtttgggcagtaacttttgagagaggccaaaaaaaggaggatgacatgctgtctcctctct

SEQ ID NO: 53000 - DNA, 120 bp, Artificial Sequence
  ENSG00000068305_36 (sequence is synthesized)
tcagtatagacattaggctcttattcagaaaggatttttctttaaaaatgtacttactttactgaactacttacaggcacatttcttcataaggccacacctaatccaaacaagacagtc

SEQ ID NO: 53001 - DNA, 120 bp, Artificial Sequence
  ENSG00000068305_37 (sequence is synthesized)
tcccaacactgaagttccaaaataatccttaccactttgtaaaccatttatagctttgaaagtgttaagtgattccttcgttattatttatgcatgttcatgaacttctgctgtacattg

SEQ ID NO: 53002 - DNA, 120 bp, Artificial Sequence
  ENSG00000068305_38 (sequence is synthesized)
gaataggagttaacacattcacatttactgtctattttcttgtgtgccttatgagatggcttttctgactgtatctcaatagtctttctttctatgcaggtttataatcagtacaactac

SEQ ID NO: 53003 - DNA, 120 bp, Artificial Sequence
  ENSG00000068305_39 (sequence is synthesized)
tgttttctaaaatactactactcaaggctcggagtttgtatttaaattacactgaccaagtaacaatgtattccatttcaggaactgaatatttgactgttaacctttttcccatacgtc

SEQ ID NO: 53004 - DNA, 120 bp, Artificial Sequence
  ENSG00000068305_40 (sequence is synthesized)
cagtgtggcatggagcatatggacttgacagacatctctcacccagacgcccacgtgtgaacacacccacatccacatctctgggtggaaaccagcctagagaggggacgacgctaatgg

SEQ ID NO: 53005 - DNA, 120 bp, Artificial Sequence
  ENSG00000068305_41 (sequence is synthesized)
tgttgctttagaaccgtcttttcttacccttttagactcgtgttttgtatgagacaccattgcaagaaaattttatccctccagaagtattttattactaaagaacaaaagcaaaaaaag

SEQ ID NO: 53006 - DNA, 120 bp, Artificial Sequence
  ENSG00000068305_42 (sequence is synthesized)
cttaaattgcactggttaaagtacagtttccaacagctgtccttcctcagtactctaatggccactccaccgcgagtggaagtcactgttgtgtgtacacaggtggtcccaatcaaaact

SEQ ID NO: 53007 - DNA, 120 bp, Artificial Sequence
  ENSG00000068305_43 (sequence is synthesized)
ccatcttttgagcccaattatgtccattttgttatagactaaatcaggggtttgttctacaagaacaatacatgttttaccctttcctttaactagaaggataactagtaatgcatcaac

SEQ ID NO: 53008 - DNA, 120 bp, Artificial Sequence
  ENSG00000068305_44 (sequence is synthesized)
ataatttctgtattaaccatcatgcgcacaagaaatacatagtaaataaggaagctgaaaactcctggcattggatcttaagctagatgattagaatgtgaaaaagattttacaaatgta

SEQ ID NO: 53009 - DNA, 120 bp, Artificial Sequence
  ENSG00000068305_45 (sequence is synthesized)
aaacttctatttctctgtagaaactttcttcactttgctgtgcaagaagacactgctttgctatatttaaaatggcttttttaaaagagatttatgtatttggtaaatgtttgtagtcaa

SEQ ID NO: 53010 - DNA, 120 bp, Artificial Sequence
  ENSG00000068305_46 (sequence is synthesized)
cagttcacacaagaagctgtacacggtttgatcatgtaaaaccgtttggcggcacaagctggactttgttgccatccttgagatgaaccttttaagaaaaataagttaatctcaattttt

SEQ ID NO: 53011 - DNA, 120 bp, Artificial Sequence
  ENSG00000068305_47 (sequence is synthesized)
ccctgaatgtgttgtttttcttcattatacaataaatataatagtgaactttttatcaaatggtgaagacaatgctaaaggttgttgtaaactgtttgtctcccgcactcactccagtaa

SEQ ID NO: 53012 - DNA, 120 bp, Artificial Sequence
  ENSG00000068305_48 (sequence is synthesized)
agtcgcgcgggctggtggcgagcagcctccccgggcgcgcaccccttggggccggggggcggtggtggacgtcgcctccttgaaagttgaaggagttctcgggagaccccggagaaggaa

SEQ ID NO: 53013 - DNA, 120 bp, Artificial Sequence
  ENSG00000068305_49 (sequence is synthesized)
tggttgtgagagccctgatgctgacgattactttgagcacagtccactctcggaggacagattcagcaaactaaatgaagatagtgattttattttcaaacgaggccctcctggtctgcc

SEQ ID NO: 53014 - DNA, 80 bp, Artificial Sequence
  ENSG00000068305_50 (sequence is synthesized)
gatttgccacgcgccgcgtcaccgggccgctcccggcctgggctcccgggggctggtcagggaggtggcggcggctgagc

SEQ ID NO: 53015 - DNA, 120 bp, Artificial Sequence
  ENSG00000068305_51 (sequence is synthesized)
cccgccctgggaggcgcccgggccctcatcaagtgaccagtatcccttccaggggaacacggtccttcagaggaaagcgagctccaacccgcggccccggcgccaagccgccgtcatctt

SEQ ID NO: 53016 - DNA, 120 bp, Artificial Sequence
  ENSG00000068305_52 (sequence is synthesized)
agttttcacatcatcagtgcttcagaaaatgacattcatatgaaactgtgaaaaatgtcacttaaattgaaagtgatttttaagtcaacataaataccacatcagaacacattttctctt

SEQ ID NO: 53017 - DNA, 120 bp, Artificial Sequence
  ENSG00000068305_53 (sequence is synthesized)
cgtgcgcggatgtcccggcgagtcccgggctgaaagaggcggctccgggcggcgcgaagcgctggtggcgggcccgggctgcggcgtgtgcgcgcccgccagctgctccggagatacggc

SEQ ID NO: 53018 - DNA, 77 bp, Artificial Sequence
  ENSG00000068305_54 (sequence is synthesized)
gcggcgtgtgcgcgcccgccagctgctccggagatacggctgaggttcaagtgattctcgtacctcagcctcccgag

SEQ ID NO: 53019 - DNA, 120 bp, Artificial Sequence
  ENSG00000068305_55 (sequence is synthesized)
ggttatctggatcaactcttctgttgaagacatctaaaaactagataaactgtaaaaacagaacaaaaaaacttttttacgttatcaaagagctcaaggaatatgccaggccaaaattta

SEQ ID NO: 53020 - DNA, 120 bp, Artificial Sequence
  ENSG00000068308_0 (sequence is synthesized)
tttgttggggggtactcggcagtgcagccatgactatactccccaaaaagaagccgccgcctcccgacgccgaccccgccaacgagccgccgccgcccgggccgatgcccccggcgccgc

SEQ ID NO: 53021 - DNA, 120 bp, Artificial Sequence
  ENSG00000068308_1 (sequence is synthesized)
cggcggcacgggcgtgggcggcggcgatcgcgaccgtgactccggcgtcgtgggggcccgtccgcgagcttcgccaccgcctcaaggcccgctaccaggaccgccgggcgctcttcatcg

SEQ ID NO: 53022 - DNA, 120 bp, Artificial Sequence
  ENSG00000068308_2 (sequence is synthesized)
taccaggaccgccgggcgctcttcatcgctgggcgctggccgtgccgcctggtgcagtggcgggtccccggccacaacaggcttctccacctccttgcgggggcccaggtggtcccggcg

SEQ ID NO: 53023 - DNA, 120 bp, Artificial Sequence
  ENSG00000068308_3 (sequence is synthesized)
gctgggcgcagcggcggcgggtgtgggtgccgcgggcgtggtggtgggtgtgggtggtgccgtaggcgtgggcggctgctgctccgggcctgggcacagcaagcggcgacgtcaagctcc

SEQ ID NO: 53024 - DNA, 120 bp, Artificial Sequence
  ENSG00000068308_4 (sequence is synthesized)
ggcgacgtcaagctcccggggttggcgcggttggcgggggcagtcccgagcgtgaggaggtcggcgcaggctacaacagtgaggacgagtatgaggcggctgcagcacgcatcgaggcta

SEQ ID NO: 53025 - DNA, 120 bp, Artificial Sequence
  ENSG00000068308_5 (sequence is synthesized)
tggaccctgccactgtcgagcagcaggagcattggtttgaaaaggccctacgagacaagaagggcttcatcatcaagcagatgaaggaggatggcgcctgtctcttccgggctgtagctg

SEQ ID NO: 53026 - DNA, 120 bp, Artificial Sequence
  ENSG00000068308_6 (sequence is synthesized)
accaggtgtatggagaccaggacatgcatgaggttgtgcgaaagcattgcatggactatctgatgaagaatgccgactacttctccaactatgtcacagaggactttaccacctacatta

SEQ ID NO: 53027 - DNA, 120 bp, Artificial Sequence
  ENSG00000068308_7 (sequence is synthesized)
acaggaagcggaaaaacaattgccatggcaaccacattgagatgcaggccatggcagagatgtacaaccgtcctgtggaggtgtaccagtacagcacagaacccatcaacacattccatg

SEQ ID NO: 53028 - DNA, 120 bp, Artificial Sequence
  ENSG00000068308_8 (sequence is synthesized)
ggatacatcaaaacgaggacgaacccattcgtgttagctaccatcggaatatccactataattcagtggtgaatcctaacaaggccaccattggtgtggggctgggcctgccatcattca

SEQ ID NO: 53029 - DNA, 120 bp, Artificial Sequence
  ENSG00000068308_9 (sequence is synthesized)
aaccagggtttgcagagcagtctctgatgaagaatgccataaaaacatcggaggagtcatggattgaacagcagatgctagaagacaagaaacgggccacagactgggaggccacaaatg

SEQ ID NO: 53030 - DNA, 120 bp, Artificial Sequence
  ENSG00000068308_10 (sequence is synthesized)
aagccatcgaggagcaggtggctcgggaatcctacctgcagtggttgcgggatcaggagaaacaggctcgccaggtccgaggccccagccagccccggaaagccagcgccacatgcagtt

SEQ ID NO: 53031 - DNA, 120 bp, Artificial Sequence
  ENSG00000068308_11 (sequence is synthesized)
gcggcagcggagttcagcctcgtcacctgagcaccctgagctgcatgctgaattgggcatgaagcccccttccccaggcactgttttagctcttgccaaacctccttcgccctgtgcgcc

SEQ ID NO: 53032 - DNA, 120 bp, Artificial Sequence
  ENSG00000068308_12 (sequence is synthesized)
aggtacaagcagtcagttctcggcaggggccgaccgggcaacttccccccttgtgtccctctaccctgctttggagtgccgggccctcattcagcagatgtccccctctgcctttggtct

SEQ ID NO: 53033 - DNA, 120 bp, Artificial Sequence
  ENSG00000068308_13 (sequence is synthesized)
gaatgactgggatgatgatgagatcctagcttcggtgctggcagtgtcccaacaggaatacctagacagtatgaagaaaaacaaagtgcacagagacccgcccccagacaagagttgatg

SEQ ID NO: 53034 - DNA, 120 bp, Artificial Sequence
  ENSG00000068308_14 (sequence is synthesized)
gagacccagggattggacaccatctcccaaccccagtactcctgctctccggtgccacctcaccttctttggcttcttccctcttgcctccttctgttctttctgctctcccctcttttc

SEQ ID NO: 53035 - DNA, 120 bp, Artificial Sequence
  ENSG00000068308_15 (sequence is synthesized)
cctcctcctcacttccctctggctagcccacccctgcactctctctcattgccgctgccactatcacctgtctctctgccagctgatgtgccctgttgccccccaccccatcccgcacag

SEQ ID NO: 53036 - DNA, 120 bp, Artificial Sequence
  ENSG00000068308_16 (sequence is synthesized)
aaccatccctgcattccacaggggactcgggcaagggtgccgaagatagacaagaggcacacagagacagaccaactggcagccaggcagccccagaggagagagacattcagacagagg

SEQ ID NO: 53037 - DNA, 120 bp, Artificial Sequence
  ENSG00000068308_17 (sequence is synthesized)
aaagtctccctgcccctcattccttccaagatgagaaaaacttgccgccaccccccgacactgatgccagggaggtgggaggaagaagtgggaaatttcccttcccagtacccccaagaa

SEQ ID NO: 53038 - DNA, 120 bp, Artificial Sequence
  ENSG00000068308_18 (sequence is synthesized)
cgtctgagccttcaatgttgaattttttctttattaaaattacttttatcttataaaatcaactaatcaaaaatgatatagacgacagcactggctctgtgaaggtggcatctttctggg

SEQ ID NO: 53039 - DNA, 120 bp, Artificial Sequence
  ENSG00000068308_19 (sequence is synthesized)
caggcaggccatggggcatggaggagggtgcaaagatatgggttgctgtcttctggcctccagctgcatggaggccggcccagggtctagggtgtgcactgggcaagggcagggcggcag

SEQ ID NO: 53040 - DNA, 120 bp, Artificial Sequence
  ENSG00000068308_20 (sequence is synthesized)
gtgtcaggccggcttggacaatgaaaccctgaccttgctgcattccttttgcttccaccaccactagcttctttggaatcttggggtgggggtcatctttggggattatggctgccaccc

SEQ ID NO: 53041 - DNA, 120 bp, Artificial Sequence
  ENSG00000068308_21 (sequence is synthesized)
gggatttgagtgtagggagtgtgggagcagccttggcagatggggcacccgtgccctgcaggtgttgacaagatccgccatctgtaatgtccttggcacaataaaaccaaatgtcagttt

SEQ ID NO: 53042 - DNA, 120 bp, Artificial Sequence
  ENSG00000068308_22 (sequence is synthesized)
gcacggaccttggcttgacctcagaggtgtgaatgctctccagcagggtctgtctgggggcctggagtttgtatttgatttgctgcttattaaacctccttctggacctattgccactgg

SEQ ID NO: 53043 - DNA, 120 bp, Artificial Sequence
  ENSG00000068308_23 (sequence is synthesized)
gtttcctttgaagcagaaggccggaacaagcgtagcaataaacttgctggacttggagagaaggctaagacaaactcgccgcactgccttcatcttggactttacatccgggttctcctc

SEQ ID NO: 53044 - DNA, 120 bp, Artificial Sequence
  ENSG00000068308_24 (sequence is synthesized)
tcggcgtgacccgcgcgccgccaccgccgccgccgccgccgccgcctcctccgccgccgagggttctcgaaccggtgccgcgatccctttatccgggtctcgccgttcccgtcgtgcctc

SEQ ID NO: 53045 - DNA, 120 bp, Artificial Sequence
  ENSG00000068308_25 (sequence is synthesized)
gcgcactacactagccccctcatccgggttctctcccggcgtgccccgcgccgggtttgttggggggtactcggcagtgcagccatgactatactccccaaaaagaagccgccgcctccc

SEQ ID NO: 53046 - DNA, 120 bp, Artificial Sequence
  ENSG00000068308_26 (sequence is synthesized)
gtgacgctacaggggccagctatgctcccgggagtgttgatgttttccagtcattccggctgacagcgttcaagttggaatcctggaggggaggtgtttttcctgtcgtacgtgggacag

SEQ ID NO: 53047 - DNA, 120 bp, Artificial Sequence
  ENSG00000068308_27 (sequence is synthesized)
gaaggagcgtcctgaagagaaggaacggcatgtgtgaagatcctcaagcgaagcagagggagtgtgtttccttctcgccttagtttgaccaaatctcacgacgcctggactattcgggcc

SEQ ID NO: 53048 - DNA, 120 bp, Artificial Sequence
  ENSG00000068308_28 (sequence is synthesized)
gcgcaggctacaacagtgaggacgagtatgaggcggctgcagcacgcatcgaggctatggaccctgccactgtcgacaggagcattggtttgaaaaggccctacgagacaagaagggctt

SEQ ID NO: 53049 - DNA, 120 bp, Artificial Sequence
  ENSG00000068323_0 (sequence is synthesized)
gcagtgctagctccatggcttagcggaggaggcggcggtggcgagctggggggaggggggactcttattttgttagggggaccgggccgaggcccgaccggcctggcagggctcgcccgg

SEQ ID NO: 53050 - DNA, 120 bp, Artificial Sequence
  ENSG00000068323_1 (sequence is synthesized)
ggccgggcgtcatgtctcatgcggccgaaccagctcgggatggcgtagaggccagcgcggagggccctcgagccgtgttcgtgctgttggaggagcgcaggccggccgactcggctcagc

SEQ ID NO: 53051 - DNA, 120 bp, Artificial Sequence
  ENSG00000068323_2 (sequence is synthesized)
tgctcagcctgaactctttgcttccggaatccgggattgttgctgacatagaattagaaaacgtccttgatcctgacagcttctacgagctcaaaagccaacccttaccccttcgctcaa

SEQ ID NO: 53052 - DNA, 120 bp, Artificial Sequence
  ENSG00000068323_3 (sequence is synthesized)
gcctcccaatatcactgcaggccacaccagccaccccagctacactctctgcatcgtcttctgcagggggctccaggacccctgccatgtcgtcatcttcttcatcgagggtcttgctgc

SEQ ID NO: 53053 - DNA, 120 bp, Artificial Sequence
  ENSG00000068323_4 (sequence is synthesized)
ggcagcagctaatgcgggcccaggcgcaggagcaggagaggcgtgagcgtcgggaacaggccgccgcggctcccttccccagtcctgcacctgcctctcctgccatctctgtggttggcg

SEQ ID NO: 53054 - DNA, 120 bp, Artificial Sequence
  ENSG00000068323_5 (sequence is synthesized)
tctctgctgggggccacacattgagccgtccaccccctgctcaggtgcccagggaggtgctcaaggtgcagacccatctggagaacccaacgcgctaccacctgcagcaggcgcgccggc

SEQ ID NO: 53055 - DNA, 120 bp, Artificial Sequence
  ENSG00000068323_6 (sequence is synthesized)
agcaggtgaaacagtacctgtccaccacactcgggcccaagctggcttcccaggccctcaccccaccgccggggcccgcaagtgcccagccactgcctgcccctgaggctgcccacacta

SEQ ID NO: 53056 - DNA, 120 bp, Artificial Sequence
  ENSG00000068323_7 (sequence is synthesized)
ccggccccacaggcagtgcgcccaacagccccatggcgctgctcaccatcgggtccagctcagagaaggagattgatgatgtcattgatgagatcatcagcctggagtccagttacaatg

SEQ ID NO: 53057 - DNA, 120 bp, Artificial Sequence
  ENSG00000068323_8 (sequence is synthesized)
atgaaatgctcagctatctgcccggaggcaccacaggactgcagctccccagcacgctgcctgtgtcagggaatctgcttgatgtgtacagtagtcaaggcgtggccacaccagccatca

SEQ ID NO: 53058 - DNA, 120 bp, Artificial Sequence
  ENSG00000068323_9 (sequence is synthesized)
ctgtcagcaactcctgcccagctgagctgcccaacatcaaacgggagatctctgagaccgaggcaaaggcccttttgaaggaacggcagaagaaagacaatcacaacctaattgagcgtc

SEQ ID NO: 53059 - DNA, 120 bp, Artificial Sequence
  ENSG00000068323_10 (sequence is synthesized)
gcaggcgattcaacattaacgacaggatcaaggaactgggcactctcatccctaagtccagtgacccggagatgcgctggaacaagggcaccatcctgaaggcctctgtggattatatcc

SEQ ID NO: 53060 - DNA, 120 bp, Artificial Sequence
  ENSG00000068323_11 (sequence is synthesized)
gcaagctgcagaaggagcagcagcgctccaaagacctggagagccggcagcgatccctggagcaggccaaccgcagcctgcagctccgaattcaggaactagaactgcaggcccagatcc

SEQ ID NO: 53061 - DNA, 120 bp, Artificial Sequence
  ENSG00000068323_12 (sequence is synthesized)
atggcctgccagtacctcccactccagggctgctttccttggccacgacttcggcttctgacagcctcaagccagagcagctggacattgaggaggagggcaggccaggcgcagcaacgt

SEQ ID NO: 53062 - DNA, 120 bp, Artificial Sequence
  ENSG00000068323_13 (sequence is synthesized)
caccgccctcagatgcccttctggacctgcactttcccagcgaccacctgggggacctgggagaccccttccacctggggctggaggacattctgatggaggaggaggagggggtggtgg

SEQ ID NO: 53063 - DNA, 120 bp, Artificial Sequence
  ENSG00000068323_14 (sequence is synthesized)
gaggactgtcggggggtgccctgtccccactgcgggctgcctccgatcccctgctctcttcagtgtcccctgctgtctccaaggccagcagccgccgcagcagcttcagcatggaagagg

SEQ ID NO: 53064 - DNA, 120 bp, Artificial Sequence
  ENSG00000068323_15 (sequence is synthesized)
agtcctgatcaggcctcacccctcccctgggactttcccacccaggaaaggaggaccagtcaggatgaggccccgccttttcccccaccctcccatgagactgccctgcccaggtatcct

SEQ ID NO: 53065 - DNA, 120 bp, Artificial Sequence
  ENSG00000068323_16 (sequence is synthesized)
gggggaagaggagatgtgatcaggccccacccctgtaatcaggcaaggaggaggagtcagatgaggccctgcaccttccccaaaggaaccgcccagtgcaggtatttcagaaggagaagg

SEQ ID NO: 53066 - DNA, 120 bp, Artificial Sequence
  ENSG00000068323_17 (sequence is synthesized)
ctggagaaggacatgagatcagggcctgccccctggggatcacagcctcacccctgcccctgtgggactcatccttgcccaggtgagggaaggagacaggatgaggtctcgaccctgtcc

SEQ ID NO: 53067 - DNA, 120 bp, Artificial Sequence
  ENSG00000068323_18 (sequence is synthesized)
cctagggactgtcctagccaggtctcctgggaaagggagatgtcaggatgttgctccatcctttgtcttggaaccaccagtctagtccgtcctggcacagaagaggagtcaagtaatgga

SEQ ID NO: 53068 - DNA, 120 bp, Artificial Sequence
  ENSG00000068323_19 (sequence is synthesized)
ggtcccagccctgggggtttaagctctgccccttccccatgaaccctgccctgctctgcccaggcaaggaacagaagtgaggatgagacccagccccttcccctgggaactctcctggcc

SEQ ID NO: 53069 - DNA, 120 bp, Artificial Sequence
  ENSG00000068323_20 (sequence is synthesized)
ttctaggaatggaggagccaggccccaccccttccctataggaacagcccagcacaggtatttcaggtgtgaaagaatcagtaggaccaggccaccgctagtgcttgtggagatcacagc

SEQ ID NO: 53070 - DNA, 120 bp, Artificial Sequence
  ENSG00000068323_21 (sequence is synthesized)
cccacccttgtccctcagcaacatcccatctaagcattccacactgcagggaggagtggtacttaagctcccctgccttaacctgggaccaacctgacctaacctaggagggctctgagc

SEQ ID NO: 53071 - DNA, 120 bp, Artificial Sequence
  ENSG00000068323_22 (sequence is synthesized)
caaccttgctcttggggaaggggacagattatgaaatttcatggatgaattttccagacctatatctggagtgagaggcccccacccttgggcagagtcctgccttcttccttgaggggc

SEQ ID NO: 53072 - DNA, 120 bp, Artificial Sequence
  ENSG00000068323_23 (sequence is synthesized)
agtttgggaaggtgatgggtattagtgggggactgagttcaggttaccagaaccagtacctcagtattctttttcaacatgtagggcaagaggatgaaggaaggggctatcctgggacct

SEQ ID NO: 53073 - DNA, 120 bp, Artificial Sequence
  ENSG00000068323_24 (sequence is synthesized)
ccccagcccaggaaaaactggaagccttcccccagcaaggcagaagcttggaggagggttgtaaaagcatattgtaccccctcatttgtttatctgatttttttattgctccgcatactg

SEQ ID NO: 53074 - DNA, 120 bp, Artificial Sequence
  ENSG00000068323_25 (sequence is synthesized)
agaatctaggccaccccaacctctgttccccacccagttcttcatttggaggaatcaccccatttcagagttatcaagagacactcccccctccattcccacccctcatacctacaccca

SEQ ID NO: 53075 - DNA, 120 bp, Artificial Sequence
  ENSG00000068323_26 (sequence is synthesized)
aggttgtcagctttggattgctggggccaggccccatggagggtatactgaggggtctataggtttgtgattaaaataataaaagctaggcgtgtttgatgcgcttttaactttggcaaa

SEQ ID NO: 53076 - DNA, 120 bp, Artificial Sequence
  ENSG00000068323_27 (sequence is synthesized)
aattagggcatttctgtatcaccaagaccatactcagtctggctgtgtgtataggagacccttgccttgattgtgctaagatagagagggaggccttatgacgagaacagggtatgtcaa

SEQ ID NO: 53077 - DNA, 120 bp, Artificial Sequence
  ENSG00000068323_28 (sequence is synthesized)
caatgcctttggaccttgttggactgtgttgagaggtggaccatgtagactgtgagagatacaggtggggagttcactgagacagtagggcatatcaaagtgcttgggctttgctgtgag

SEQ ID NO: 53078 - DNA, 120 bp, Artificial Sequence
  ENSG00000068323_29 (sequence is synthesized)
ttgggcttaggagccctctgtatccacattctgctgccaaagcctcaattctgcttcttctgctctcctggggctccaggacccctgccatgtcgtcatcttcttcatcgagggtcttgc

SEQ ID NO: 53079 - DNA, 120 bp, Artificial Sequence
  ENSG00000068323_30 (sequence is synthesized)
gttatgagaagaataaagactggaaggaaaatgggagaatgttggggagggttagtttgggataaggaaggtgaggacagggcaggccccaactgacaaggaaacgtttgaataaagagc

SEQ ID NO: 53080 - DNA, 120 bp, Artificial Sequence
  ENSG00000068323_31 (sequence is synthesized)
ctaaggaggcaaggcggggagccgcatgggtgtctgggggtaagagtattcaaggcagagggcacggctgggattgatgccctgagatgggagtggttttccatattctaggagcactga

SEQ ID NO: 53081 - DNA, 120 bp, Artificial Sequence
  ENSG00000068323_32 (sequence is synthesized)
gagaccaatgtggctgtagtgagatcaatcggagggacatagggaagagaggaatcctaaggggtcaggtcagagacggcttccagggtttggagtgtgatggggcaccattgtaagatt

SEQ ID NO: 53082 - DNA, 120 bp, Artificial Sequence
  ENSG00000068323_33 (sequence is synthesized)
gaaagaccccagcctcaagttctaagcatgtggtgggaggctcccacctggtgcaatccccgcctcagctcctgagaaactcctcatgtggcatttcctgcttgcctcccacttgggccc

SEQ ID NO: 53083 - DNA, 120 bp, Artificial Sequence
  ENSG00000068354_0 (sequence is synthesized)
ggggcggcgggcgtcagtacagtagagtgtgcgccggggtggggggcaacggtcagccgtcaccctgagacgggcggcggcgggatggcaacagcctccggggcctcggacttgtctggc

SEQ ID NO: 53084 - DNA, 120 bp, Artificial Sequence
  ENSG00000068354_1 (sequence is synthesized)
tccggagcgcccccgcccggtgtgggagctcaggcggcggcggccgctgaggaggaggagcgagaggtggtgcgggtccgagtcaagaaatgtgagagcttcttgccgccagagttccgc

SEQ ID NO: 53085 - DNA, 120 bp, Artificial Sequence
  ENSG00000068354_2 (sequence is synthesized)
tcttttgctgtagatccccagatcacctcgctcgacgtgttgcagcacatcctcatccgagcctttgatttgagtgggaagaagaactttggcatcagctacctgggccgggaccggcta

SEQ ID NO: 53086 - DNA, 120 bp, Artificial Sequence
  ENSG00000068354_3 (sequence is synthesized)
ggacaggaagtttacctctcacttctatctgactgggacctcagcacagcctttgccactgcctccaaaccttacctgcaattgcgtgtagatattcggccctcggaggacagcccattg

SEQ ID NO: 53087 - DNA, 120 bp, Artificial Sequence
  ENSG00000068354_4 (sequence is synthesized)
ctagaagactgggacataatcagccccaaagatgtcattggctccgacgtgttgctggctgagaaacggtcatcactgacgactgccgccctgccctttacacagtccatcctcactcag

SEQ ID NO: 53088 - DNA, 120 bp, Artificial Sequence
  ENSG00000068354_5 (sequence is synthesized)
gtgggccgtaccttgtctaaggtccaacaagtgctgagctggtcgtatggggaagatgtcaagcccttcaagccacccctgagcgatgctgagtttcacacgtacctgaaccacgagggc

SEQ ID NO: 53089 - DNA, 120 bp, Artificial Sequence
  ENSG00000068354_6 (sequence is synthesized)
cagctctcccgacccgaggagttgcgcctgcggatctatcatggcggtgtggagccctcgctgcgaaaggtggtgtggcggtacctgctgaacgtgtatccagatggactgacaggccga

SEQ ID NO: 53090 - DNA, 120 bp, Artificial Sequence
  ENSG00000068354_7 (sequence is synthesized)
gagcggatggactacatgaaacgcaagagccgcgagtatgagcagctcaagagcgagtgggcccagcgagcgaaccctgaggacctggaattcatccgcagcacggtcctcaaggatgta

SEQ ID NO: 53091 - DNA, 120 bp, Artificial Sequence
  ENSG00000068354_8 (sequence is synthesized)
ctgcgcactgaccgggcccacccctactatgcggggcctgaggatggcccacatctacgggcgctgcacgacctgctcaccacctatgccgttacccacccacaggtgtcctactgccag

SEQ ID NO: 53092 - DNA, 120 bp, Artificial Sequence
  ENSG00000068354_9 (sequence is synthesized)
ggcatgagtgaccttgcctcacccatcctcgctgtcatggaccatgagggccatgcctttgtttgcttttgtggcatcatgaaacgcctggccgccaacttccaccctgacggccgcgcc

SEQ ID NO: 53093 - DNA, 120 bp, Artificial Sequence
  ENSG00000068354_10 (sequence is synthesized)
atggccaccaagtttgcacacttgaagctgttgctgcgacacgctgaccctgacttttatcaatacctgcaagaggcaggcgctgatgacctcttcttctgttaccgctggctgctgctg

SEQ ID NO: 53094 - DNA, 120 bp, Artificial Sequence
  ENSG00000068354_11 (sequence is synthesized)
gaactcaagcgtgagttcgccttcgacgatgccctccgcatgcttgaggtcacttggagttcgctgccccctgatcctcctgaacatgaggtagagctggttggaccccccagccaagtg

SEQ ID NO: 53095 - DNA, 120 bp, Artificial Sequence
  ENSG00000068354_12 (sequence is synthesized)
gcagacgctggttttggtggccacagggggtggcccgtgcgacagaggcacatgctgaggcctgctggtggaggaggtagtacctttgaagatgctgttgaccacctggccacagccagt

SEQ ID NO: 53096 - DNA, 120 bp, Artificial Sequence
  ENSG00000068354_13 (sequence is synthesized)
caggggcctggtggtggggggcgtctcctgagacaggccagcttggatggcctccagcaactcagggataacatgggctccaggagggaccctctggtccagctgccccacccagctgcc

SEQ ID NO: 53097 - DNA, 120 bp, Artificial Sequence
  ENSG00000068354_14 (sequence is synthesized)
cttatcagctccaagtccctctctgagcctttattgaactccccagacccactgctctcctccttttcccaccctgattccccatcttcctcatctccaccatccacccaggaggcctct

SEQ ID NO: 53098 - DNA, 120 bp, Artificial Sequence
  ENSG00000068354_15 (sequence is synthesized)
aaagtccctgccacctgtaccaccaatgggcctgcccccaccccaggagtttggccgggggaacccattcatgctgttcctctgcctggccatcctgctggagcaccgcgaccacatcat

SEQ ID NO: 53099 - DNA, 120 bp, Artificial Sequence
  ENSG00000068354_16 (sequence is synthesized)
gcgcaatgggctggattataatgagctggccatgcactttgaccgccttgtgcgaaaacaccacctggggcgcgtcctgcgccgggctagggctctctttgctgattacctgcagtcaga

SEQ ID NO: 53100 - DNA, 120 bp, Artificial Sequence
  ENSG00000068354_17 (sequence is synthesized)
ggtgtgggactcagaggagggggctgaggccacagccgcatcttgatcaggctttctcaagccctccatcggccccaccagatctccattctttgccatgagggccaacacatgagaccc

SEQ ID NO: 53101 - DNA, 120 bp, Artificial Sequence
  ENSG00000068354_18 (sequence is synthesized)
cacctccctccctgcctgccagccctagacttgttggagcatagagcccttcctccccaggcctaagtatgtggagctctgctttggcactgccccgcagaggccacgcctatttattct

SEQ ID NO: 53102 - DNA, 120 bp, Artificial Sequence
  ENSG00000068354_19 (sequence is synthesized)
gtttctgttgttttgtttttaacaactatactttgcacacatgaaggtcactgtggtttgtgtgtttctctgcctcctccctgggttttgctgtagatggagtcctcaggggccctttac

SEQ ID NO: 53103 - DNA, 120 bp, Artificial Sequence
  ENSG00000068354_20 (sequence is synthesized)
ctgatggaggggaaatacttcacttggtggagagaggctccagcttcccccttgtgatggggagagtggatgctgacaatcagttcccaaaggtgagcccaggtggagcactgcttgagg

SEQ ID NO: 53104 - DNA, 120 bp, Artificial Sequence
  ENSG00000068354_21 (sequence is synthesized)
aaggcctgagtctgtttttttggtacatccatcggcctgtaagggtctgtattatggctgtgaatatatgttttcaggacagccccctggatgagagataagagagttcctggctcaaaa

SEQ ID NO: 53105 - DNA, 120 bp, Artificial Sequence
  ENSG00000068354_22 (sequence is synthesized)
aaggacaagattctttactgagattgggaagtatgggctacttagaaacgttggagcagccacccctggcattccacatgtcaccatttctaggatcttggcctctctgtgaggtttatg

SEQ ID NO: 53106 - DNA, 120 bp, Artificial Sequence
  ENSG00000068354_23 (sequence is synthesized)
caccaatgctggcagccctgggcaggggcctcggcctcctttttgttttccacttcagacaggtaccgtgcagatgttaacaaggtttgagcgaggtgcatctcacacaagtgtgaaagc

SEQ ID NO: 53107 - DNA, 120 bp, Artificial Sequence
  ENSG00000068354_24 (sequence is synthesized)
ccaatcatcacattgttgaattacaaaaggatctagggctcctattcttgtcacttgctttggagccagtttgaaagactggcctagcccatgcctagcggccctaaactgggattccag

SEQ ID NO: 53108 - DNA, 120 bp, Artificial Sequence
  ENSG00000068354_25 (sequence is synthesized)
ctcacagcacctgtcttaaccatttcagcagtagaaaccacttatttaccttctccatctcactaatatggacaaacaacaagcactgataaaacgcaggccctaatagaattcacttcg

SEQ ID NO: 53109 - DNA, 120 bp, Artificial Sequence
  ENSG00000068354_26 (sequence is synthesized)
ttatttggaggataatgatcaaaaaaaggtcctttttcccactgacatgctcagagggtgggattctctcacaggccaggtgctgtcatccacaaaggatgggtgaaataactggggtcc

SEQ ID NO: 53110 - DNA, 120 bp, Artificial Sequence
  ENSG00000068354_27 (sequence is synthesized)
tcaggtcacggtctagccacaccagcttctcccaagtactaaccaggcttgaccctgcttagcttcagaggtcagacaagatctggcatgttcaggatggtatggctgtagaccaggctg

SEQ ID NO: 53111 - DNA, 120 bp, Artificial Sequence
  ENSG00000068354_28 (sequence is synthesized)
ggttctggccagagctgttgcactaggcaatgctgccagagatgaggaggcatcagggcagtcatcccttctgctgtttgccccaagaatgccatacaaacctggggatgacccttaaaa

SEQ ID NO: 53112 - DNA, 120 bp, Artificial Sequence
  ENSG00000068354_29 (sequence is synthesized)
gtctcccgtcacccccagtattggggggaagctgactattcctcagatgatagcccagtcacttgaagaacaggacaagactattctgtgtctagggggctcaagcactgtgtgtgggtc

SEQ ID NO: 53113 - DNA, 120 bp, Artificial Sequence
  ENSG00000068354_30 (sequence is synthesized)
taacgaatgcattttgtggaaatgggctcagactccccaaagggccatccaacctatgggagtgtctggccttctgaggtcctgaaatgtctcttttgtcagtaaacagctaataccctc

SEQ ID NO: 53114 - DNA, 80 bp, Artificial Sequence
  ENSG00000068366_0 (sequence is synthesized)
gcgattcggctggctctgccacaccaccgcgcgcccccgctccgcccgcccctccgggcgcgtcttttccgggctcgcgc

SEQ ID NO: 53115 - DNA, 120 bp, Artificial Sequence
  ENSG00000068366_1 (sequence is synthesized)
gctgcggctttttctctggcctccgccgcgcgctcctcctcgtcccagcgctagcgggcacgcggttcctttttgcgagctttccgagtgccaggcgccggccggctgcgaagacgcggt

SEQ ID NO: 53116 - DNA, 120 bp, Artificial Sequence
  ENSG00000068366_2 (sequence is synthesized)
gggccgcccctccgattgaaatcacagaagatattcgtgttcttcttaagagaaaaagaggacattttagctttctcagttgaaggcgtactttattgtcggcttccaaagattactaac

SEQ ID NO: 53117 - DNA, 120 bp, Artificial Sequence
  ENSG00000068366_3 (sequence is synthesized)
ttttatctgtatcactaagattgaactgccttggctgtactgctattcttactgctgcttctattattgccttcttcagcacaataaggctttcaaaagccaaagaataacaagaaataa

SEQ ID NO: 53118 - DNA, 120 bp, Artificial Sequence
  ENSG00000068366_4 (sequence is synthesized)
gcaccattttagaagcctttccactatgaaacttaagctaaatgtgctcaccattattttgctgcctgtccacttgttaataacaatatacagtgcccttatatttattccatggtattt

SEQ ID NO: 53119 - DNA, 120 bp, Artificial Sequence
  ENSG00000068366_5 (sequence is synthesized)
tcttaccaatgccaagaagaaaaacgctatggcaaagagaataaaagctaagcccacttcagacaaacctggaagtccatatcgctctgtcacacacttcgactcactagctgtaataga

SEQ ID NO: 53120 - DNA, 120 bp, Artificial Sequence
  ENSG00000068366_6 (sequence is synthesized)
catccctggagcagatactctggataaattatttgaccatgctgtatccaagtttgggaagaaggacagccttgggaccagggaaatcctaagtgaagaaaatgaaatgcagccaaatgg

SEQ ID NO: 53121 - DNA, 120 bp, Artificial Sequence
  ENSG00000068366_7 (sequence is synthesized)
aaaagtttttaagaagttaattcttgggaattataaatggatgaactatcttgaagtgaatcgcagagtgaataactttggtagtggactcactgcactgggactaaaaccaaagaacac

SEQ ID NO: 53122 - DNA, 120 bp, Artificial Sequence
  ENSG00000068366_8 (sequence is synthesized)
cattgccatcttctgtgagaccagggccgaatggatgattgcagcacagacctgctttaagtacaactttcctcttgtgactttatatgccacacttggcaaagaagcagtagttcatgg

SEQ ID NO: 53123 - DNA, 120 bp, Artificial Sequence
  ENSG00000068366_9 (sequence is synthesized)
gctaaatgaatctgaggcttcctatctgattaccagtgttgaacttctggaaagtaaacttaagactgcattgttagatatcagttgtgttaaacatatcatttatgtggacaataaggc

SEQ ID NO: 53124 - DNA, 120 bp, Artificial Sequence
  ENSG00000068366_10 (sequence is synthesized)
tatcaataaagcagagtaccctgaaggatttgagattcacagcatgcaatcagtagaagagttgggatctaacccagaaaacttgggcattcctccaagtagaccaacgccttcagacat

SEQ ID NO: 53125 - DNA, 120 bp, Artificial Sequence
  ENSG00000068366_11 (sequence is synthesized)
ggccattgttatgtatactagtggttctactggccgacctaagggagtgatgatgcatcatagcaatttgatagctggaatgacaggccagtgtgaaagaatacctggactgggaccgaa

SEQ ID NO: 53126 - DNA, 120 bp, Artificial Sequence
  ENSG00000068366_12 (sequence is synthesized)
ggacacatatattggctacttgcctttggctcatgtgctagaactgacagcagagatatcttgctttacctatggctgcaggattggatattcttctccgcttacactctctgaccagtc

SEQ ID NO: 53127 - DNA, 120 bp, Artificial Sequence
  ENSG00000068366_13 (sequence is synthesized)
cagcaaaattaaaaaaggaagcaaaggagactgtactgtactgaagcccacacttatggctgctgttccggaaatcatggatagaatttataagaatgttatgagcaaagtccaagagat

SEQ ID NO: 53128 - DNA, 120 bp, Artificial Sequence
  ENSG00000068366_14 (sequence is synthesized)
gaattatattcagaaaactctgttcaagatagggtatgattacaaattggaacagatcaaaaagggatatgatgcacctctttgcaatctgttactgtttaaaaaggtcaaggccctgct

SEQ ID NO: 53129 - DNA, 120 bp, Artificial Sequence
  ENSG00000068366_15 (sequence is synthesized)
gggagggaatgtccgcatgatgctgtctggaggggccccgctatctcctcagacacaccgattcatgaatgtctgcttctgctgcccaattggccagggttatggactgacagaatcatg

SEQ ID NO: 53130 - DNA, 120 bp, Artificial Sequence
  ENSG00000068366_16 (sequence is synthesized)
tggtgctgggacagttactgaagtaactgactatactactggcagagttggagcacctcttatttgctgtgaaattaagctaaaagactggcaagaaggcggttatacaattaatgacaa

SEQ ID NO: 53131 - DNA, 120 bp, Artificial Sequence
  ENSG00000068366_17 (sequence is synthesized)
gccaaaccccagaggtgaaatcgtaattggtggacagaacatctccatgggatattttaaaaatgaagagaaaacagcagaagattattctgtggatgaaaatggacaaaggtggttttg

SEQ ID NO: 53132 - DNA, 120 bp, Artificial Sequence
  ENSG00000068366_18 (sequence is synthesized)
cactggtgatattggagaattccatcccgatggatgtttacagattatagatcgtaagaaagatctagtgaagttacaagcaggagagtatgtatctcttgggaaagtagaagctgcact

SEQ ID NO: 53133 - DNA, 120 bp, Artificial Sequence
  ENSG00000068366_19 (sequence is synthesized)
gaagaattgtccacttattgacaacatctgtgcttttgccaaaagtgatcagtcctatgtgatcagttttgtggttcctaaccagaaaaggttgacacttttggcacaacagaaaggggt

SEQ ID NO: 53134 - DNA, 120 bp, Artificial Sequence
  ENSG00000068366_20 (sequence is synthesized)
agaaggaacttgggttgatatctgcaataatcctgctatggaagctgaaatactgaaagaaattcgagaagctgcaaatgccatgaaattggagcgatttgaaattccaatcaaggttcg

SEQ ID NO: 53135 - DNA, 120 bp, Artificial Sequence
  ENSG00000068366_21 (sequence is synthesized)
attaagcccagagccatggacccctgaaactggtttggtaactgatgctttcaaactgaaaaggaaggagctgaggaaccattacctcaaagacattgaacgaatgtatgggggcaaata

SEQ ID NO: 53136 - DNA, 120 bp, Artificial Sequence
  ENSG00000068366_22 (sequence is synthesized)
cctctagaattttaagcctttgttgaactgttagaatgtaaggtatatcattctaaagatagagtaaaaagaaaacaaaaccaaaagttattaaaattgttgtccggtttactttaactt

SEQ ID NO: 53137 - DNA, 120 bp, Artificial Sequence
  ENSG00000068366_23 (sequence is synthesized)
agttttgcatagttctagtgcagctgaaattgaaaagttatttccctttagctgtgttattatagagcagaaattctgtttttaaaaattagcctaagatatacttgtttttgtaaagaa

SEQ ID NO: 53138 - DNA, 120 bp, Artificial Sequence
  ENSG00000068366_24 (sequence is synthesized)
aaatatttaatgttgaacaaaataaattggagttggagtagaatgtagtttgaggaaatttgcagcttccaatgcctcttgtcttcctatttcagaagtttaaatattaagcatgacaga

SEQ ID NO: 53139 - DNA, 120 bp, Artificial Sequence
  ENSG00000068366_25 (sequence is synthesized)
aaatatgtattaacactactcaaagcaaaagtgctgcagggctttaaaattctcttccaaccatttatcttgaaggaaaaattcaatagtaatataatacacaaaatcaaataatacctt

SEQ ID NO: 53140 - DNA, 120 bp, Artificial Sequence
  ENSG00000068366_26 (sequence is synthesized)
agaaggtattaagattataattgttgcataggttagatatagagtcattgtaatgttgtgaataattacagtgcctaaaataagaatagaacaacatatacaacaccaaaaaatatctag

SEQ ID NO: 53141 - DNA, 120 bp, Artificial Sequence
  ENSG00000068366_27 (sequence is synthesized)
taatatatttaaagggaaattgagctgctttttttgaaactttgagatctaaaaataactgtaattatttgaatgactaagaggaaagtacattttttgaaatgctgaaaattgcctttc

SEQ ID NO: 53142 - DNA, 120 bp, Artificial Sequence
  ENSG00000068366_28 (sequence is synthesized)
tgtgtttattcaaactgaaaagctgagaccaagagcaaggaaggtaaaaagttaacaggcaaacattttctcttagaaaaggtgataaaatcataagtatttggaattagaacccttgca

SEQ ID NO: 53143 - DNA, 120 bp, Artificial Sequence
  ENSG00000068366_29 (sequence is synthesized)
cagcactgaacctgggaaagagatttaaactctgaatttatctttgataacagggattgattttaaaatgtacatgtattaaattacatttgtaatttaaggtctgtttgctgttgctga

SEQ ID NO: 53144 - DNA, 120 bp, Artificial Sequence
  ENSG00000068366_30 (sequence is synthesized)
ttttattcttgatcagtagtttgcatttcagaaagcctttcattttgctttaattttagcaaagcgggttataatgaatgacttccccaatatcttgcttgaacttacaggtgattaact

SEQ ID NO: 53145 - DNA, 120 bp, Artificial Sequence
  ENSG00000068366_31 (sequence is synthesized)
tggatgagttttgggaagttaaagggaagaaaacactgttatcattttttcctgtttgggaagagcttagaaactggaaatactagatttgggagaagggcagagttacttgataaggga

SEQ ID NO: 53146 - DNA, 120 bp, Artificial Sequence
  ENSG00000068366_32 (sequence is synthesized)
ctgatgtttgtgcagtaacttgggagtgtggtttctttttgaatctttaattaaaacctgggattatatatccctgataaatattcacacttgaaccatagttactgtaaaatgcaaaaa

SEQ ID NO: 53147 - DNA, 120 bp, Artificial Sequence
  ENSG00000068366_33 (sequence is synthesized)
atcttaatactgttattctttgcactttttcttaatcattttttatatatatgcatatatatatgtgtgtgtgtgtgttgcttatgttgttttgtacagatgtgggccaccattgcaaca

SEQ ID NO: 53148 - DNA, 120 bp, Artificial Sequence
  ENSG00000068366_34 (sequence is synthesized)
aaatacattctttttgctctaaaatatttatgaagaaaatacttaaatgttatgtatatggtggtaataagggaaaaatcaagtattataaacaagaatgaaggtttttgtaaagatttc

SEQ ID NO: 53149 - DNA, 120 bp, Artificial Sequence
  ENSG00000068366_35 (sequence is synthesized)
tgttcagcgttttgcaaggtaaaattttaggcaagttttccctgaagttatgtgtatgtgagtattctcattcttcccaacttgcctttgaagagtgaaataccattattatcaagtaga

SEQ ID NO: 53150 - DNA, 120 bp, Artificial Sequence
  ENSG00000068366_36 (sequence is synthesized)
ctactgttcagcttttattcctgccctgctgtttatcccttaagaatgagtttcttagacttttccaatatgtgattttttttcccatttagaatggtgattttaaatgtgtgagtgcat

SEQ ID NO: 53151 - DNA, 120 bp, Artificial Sequence
  ENSG00000068366_37 (sequence is synthesized)
gtactatcttatctcagatatttgcacccccaatctgcccccaactcccaaaagctagaacactgccaactgatctgttataggtcctttagaaacacataattaacacttaaggttggg

SEQ ID NO: 53152 - DNA, 120 bp, Artificial Sequence
  ENSG00000068366_38 (sequence is synthesized)
tgctgctaattctttgcaaaaatccaaatattgttaagggaccagggagatgccactaccccttgattttccatctaaaaatatacatgtttatgtaaacaaatctttccatatccatag

SEQ ID NO: 53153 - DNA, 120 bp, Artificial Sequence
  ENSG00000068366_39 (sequence is synthesized)
tgacttttcaagtatttaagcctaaagattttgatctcacatttttatacctgtttaaattgctcacagttattacatacacatcagccatcaactaaagttgtactttaaaaatttact

SEQ ID NO: 53154 - DNA, 120 bp, Artificial Sequence
  ENSG00000068366_40 (sequence is synthesized)
acaatatgtacatttctaagtcaaacacttgtgacttttgctttaattccatgaatgttcctgcctccttgatatttgtatttattctttttttctctagagtagaggtataattgtgtg

SEQ ID NO: 53155 - DNA, 120 bp, Artificial Sequence
  ENSG00000068366_41 (sequence is synthesized)
atatttcagaaatacagataaatgattcaaaaagtcacagttaaggagaatcatgtttctttgatcatgaataactgattagtaagtcttgcctatattttcctgatagcatatgacaaa

SEQ ID NO: 53156 - DNA, 120 bp, Artificial Sequence
  ENSG00000068366_42 (sequence is synthesized)
tgtttctaaggtaacaagatgagaacagataaagattgtgtggtgttttggatttggagagaaatattttaatttttaaatgcagttacaaattataatgtattcatatttgtactttct

SEQ ID NO: 53157 - DNA, 120 bp, Artificial Sequence
  ENSG00000068366_43 (sequence is synthesized)
gttaaaatgcatgattgcagaattgtttagattttgtgtttattcttgatgaaaagctttgtttgttcttgtttttaagtttgcactcaaatcttaagaaataaatccacccatgttatc

SEQ ID NO: 53158 - DNA, 120 bp, Artificial Sequence
  ENSG00000068366_44 (sequence is synthesized)
agttgcctgagaaggcctccagtctgagcctactactgaagagagcccactgtggctttgccagccttctggactccgacagtgcttaccatctgtgtctgtcctttggcaactagccaa

SEQ ID NO: 53159 - DNA, 120 bp, Artificial Sequence
  ENSG00000068366_45 (sequence is synthesized)
caattgtacttttaaaacaaacttggcatggaagagaacctttcccgagactctttgaaagtctaaatacatgattgtaaattacttccctttgtcaacacccttgattaccattttgga

SEQ ID NO: 53160 - DNA, 120 bp, Artificial Sequence
  ENSG00000068366_46 (sequence is synthesized)
aatgagttccaggtgatggataaacagatgattatttgacagacagccctgacagcacgctccagccctctgggaactgaatccaacacgtccaacacttggcactgaactgaagcaatg

SEQ ID NO: 53161 - DNA, 120 bp, Artificial Sequence
  ENSG00000068366_47 (sequence is synthesized)
aaaaaggcagtattttatagagcaaaataggaaaacattttaccctgtgcagcttctaaaatttaaaccatttgccactcatttgtaaaagaacaagtggtaattaaaattcaaacaacg

SEQ ID NO: 53162 - DNA, 120 bp, Artificial Sequence
  ENSG00000068366_48 (sequence is synthesized)
tctttctatttgagtcatacccaaaactggagtcagggattggagttctggttctgactactgaggcttatagaatatgtgtctttggtaaactacttagtctctcattatctcagtttc

SEQ ID NO: 53163 - DNA, 80 bp, Artificial Sequence
  ENSG00000068366_49 (sequence is synthesized)
gtctttggtaaactacttagtctctcattatctcagtttccttatctttaaaatgggtttaacagtaagtgcacagacag

SEQ ID NO: 53164 - DNA, 120 bp, Artificial Sequence
  ENSG00000068366_50 (sequence is synthesized)
actctagagcattaaaagtgtcttcaacatggcagctgaggtgctttctttgctgggaaaagctgcaaagagactggcagaatggcgacttcaggagttaatacctctccagaagaaaaa

SEQ ID NO: 53165 - DNA, 120 bp, Artificial Sequence
  ENSG00000068366_51 (sequence is synthesized)
gcgagctttccgagtgccaggcgccggccggctgcgaagacgcggtgggccgcccctccgattgaaatcacagaagatattcgtgttcttcttaagagaaaaagaggacatttatgcatg

SEQ ID NO: 53166 - DNA, 120 bp, Artificial Sequence
  ENSG00000068366_52 (sequence is synthesized)
gatccttgcttggtttagttcattttctaaaacttttgaaaaaatatcttggcattaaccaactgcagttcagtagtttttctctttcattctcaaattggtgttgtgtcacatgcttct

SEQ ID NO: 53167 - DNA, 120 bp, Artificial Sequence
  ENSG00000068383_0 (sequence is synthesized)
acttgccctcagcctgagtcggcggcggctgcgggaactttcccagcggatctaatggctgcgcgcgggccgctgtgaggcgcggcggcgagcgacgggcgcggggccgcggagcagcga

SEQ ID NO: 53168 - DNA, 120 bp, Artificial Sequence
  ENSG00000068383_1 (sequence is synthesized)
ccagcccagcgcccgcgccgcccgggcaccatggcggggaaggcggccgccccgggcaccgcggtgctgctggtcacggccaacgtgggctcgctcttcgacgacccagaaaacctgcag

SEQ ID NO: 53169 - DNA, 120 bp, Artificial Sequence
  ENSG00000068383_2 (sequence is synthesized)
caacgtgggctcgctcttcgacgacccagaaaacctgcagaagaactggcttcgggaattttaccaggtcgtgcacacacacaagccgcacttcatggccttgcactgtcaggagtttgg

SEQ ID NO: 53170 - DNA, 120 bp, Artificial Sequence
  ENSG00000068383_3 (sequence is synthesized)
agggaagaactacgaggcctccatgtcccacgtggacaagttcgtcaaagaactattgtcgagtgatgcgatgaaagaatataacagggctcgagtctacctggatgaaaactacaaatc

SEQ ID NO: 53171 - DNA, 120 bp, Artificial Sequence
  ENSG00000068383_4 (sequence is synthesized)
ccaggagcacttcacggcactaggaagcttttattttcttcatgagtccttaaaaaacatctaccagtttgactttaaagctaagaagtatagaaaggtcgctggcaaagagatctactc

SEQ ID NO: 53172 - DNA, 120 bp, Artificial Sequence
  ENSG00000068383_5 (sequence is synthesized)
ggataccttagagagcacgcccatgctggagaaggagaagtttccgcaggactacttccccgagtgcaaatggtcaagaaaaggcttcatccggacgaggtggtgcattgcagactgtgc

SEQ ID NO: 53173 - DNA, 120 bp, Artificial Sequence
  ENSG00000068383_6 (sequence is synthesized)
ctttgacttggtgaatatccatcttttccatgatgcttccaatctggtcgcctgggaaacaagcccttccgtgtactcgggaatccggcacaaggcactgggctacgtgctggacagaat

SEQ ID NO: 53174 - DNA, 120 bp, Artificial Sequence
  ENSG00000068383_7 (sequence is synthesized)
cattgatcagcgattcgagaaggtttcctactttgtatttggtgatttcaacttccggctggattccaagtccgtcgtggagacgctctgcacaaaagccaccatgcagacggtccgggc

SEQ ID NO: 53175 - DNA, 120 bp, Artificial Sequence
  ENSG00000068383_8 (sequence is synthesized)
cgccgacaccaatgaagtggtgaagctcatatttcgtgagtcggacaacgaccggaaggttatgctccagttagaaaagaaactcttcgactacttcaaccaggaggttttccgagacaa

SEQ ID NO: 53176 - DNA, 120 bp, Artificial Sequence
  ENSG00000068383_9 (sequence is synthesized)
caacggcaccgcgctcttggagtttgacaaggagttgtctgtctttaaggacagactgtatgaactggacatctcgttccctcccagctacccgtacagtgaggacgcccgccagggtga

SEQ ID NO: 53177 - DNA, 120 bp, Artificial Sequence
  ENSG00000068383_10 (sequence is synthesized)
gcagtacatgaacacccggtgcccagcctggtgtgaccgcatcctcatgtccccgtctgccaaggagctggtgctgcggtcggagagcgaggagaaggttgtcacctatgaccacattgg

SEQ ID NO: 53178 - DNA, 120 bp, Artificial Sequence
  ENSG00000068383_11 (sequence is synthesized)
gcccaacgtctgcatgggagaccacaagcccgtgttcctggccttccgaatcatgcccggggcaggtaaacctcatgcccatgtgcacaagtgttgtgtcgtgcagtgacgtggtgggaa

SEQ ID NO: 53179 - DNA, 120 bp, Artificial Sequence
  ENSG00000068383_12 (sequence is synthesized)
gagatgccagcgccacgagaggacacttcgtgagcctccctgtagccgtggaccgaatacgcactcttgaaagctgcatcgagaacccgcccaagcgccacctgctagacggccagcccc

SEQ ID NO: 53180 - DNA, 120 bp, Artificial Sequence
  ENSG00000068383_13 (sequence is synthesized)
acacttcgcttcagcctccggaccattccggagcagcctcacatacctcactgtctcgtctgtctatgtgacattaagtagaaatattggttttttttttttttttttaaataagtcaca

SEQ ID NO: 53181 - DNA, 120 bp, Artificial Sequence
  ENSG00000068383_14 (sequence is synthesized)
gtcctgttgtcaaaactctaatagacagcaaagagggtctgtaccgtagacttcacagttttcagtttttaatgattgccagtggaggggcttcttcagcacagagaccccccactgtgt

SEQ ID NO: 53182 - DNA, 120 bp, Artificial Sequence
  ENSG00000068383_15 (sequence is synthesized)
ccagggaccccctctgccaggtggaggtgtgtccaggggctggggaagccgagacgggcactccctctgccggccggcagcgtggccctgagcatggcaagggggtctgtctctgccgat

SEQ ID NO: 53183 - DNA, 120 bp, Artificial Sequence
  ENSG00000068383_16 (sequence is synthesized)
gctccttccgcggcactgactctgcgccgtgtcacatggtttttgaatcacactgcagctgctttccatttttatatatatataaatatatataaatatatactttttaaaaataattta

SEQ ID NO: 53184 - DNA, 120 bp, Artificial Sequence
  ENSG00000068383_17 (sequence is synthesized)
taaatcttaccaaaacttatgctaaatatactttccagtatgaacgcacaggagagtcccatcagcaggcggcattggagtctaggagctcagctgtgtgtccatcaacacacaaattcg

SEQ ID NO: 53185 - DNA, 120 bp, Artificial Sequence
  ENSG00000068383_18 (sequence is synthesized)
taaaaaacacacatggcctcgccatcgtgggtaaaatcggccccacagcacgtctgcaccagcgggccgttactcccatgccgttcttctgtgtaatattaagaactgaatgtgaagttt

SEQ ID NO: 53186 - DNA, 120 bp, Artificial Sequence
  ENSG00000068383_19 (sequence is synthesized)
atagctagcctgggtgtaccttttaagaattttgtaaaccgtttgtctgtcttttgttactgttttatggtgccaagtatcctacgttacaacaataatatcatgggagaaatagaaata

SEQ ID NO: 53187 - DNA, 120 bp, Artificial Sequence
  ENSG00000068383_20 (sequence is synthesized)
gcctagtttgcttccaatagaaactgcttttaacatgggctgtatataaaaatattaaagagaaacaaaactgtacatttcctcattgctccgctacagacaacccatgtcataaccttg

SEQ ID NO: 53188 - DNA, 120 bp, Artificial Sequence
  ENSG00000068383_21 (sequence is synthesized)
ttgcaaatatttttctcctatagcagtaagtacagcattagaaggtgattagagagtctgttgatgaaacacaaatgtatgttttattgattttactttagaacactacagagttcctgg

SEQ ID NO: 53189 - DNA, 120 bp, Artificial Sequence
  ENSG00000068383_22 (sequence is synthesized)
accgggtgaaggcattagctgggtgtttgtgtgggataaatactaccactgcaagtgactgctgtccgctgcggaatctgttcttggtggaagcacaggtccgtgtcgctgctgtggttg

SEQ ID NO: 53190 - DNA, 120 bp, Artificial Sequence
  ENSG00000068383_23 (sequence is synthesized)
ccgctgtccgcggttcaacacggagtccgccccgcgggtttcagctgttggtcgttctgaggggcctttggaagtgaccggtctggttcctaagcaataaaattgaccgtggtgaaaata

SEQ ID NO: 53191 - DNA, 120 bp, Artificial Sequence
  ENSG00000068383_24 (sequence is synthesized)
ttcaacttccggctggattccaagtccgtcgtggaggtaggcgctggcttccctcccgccctggtctcatgccttgctctgtgttgaggaaaacagtggaaggagcgtggccccttactg

SEQ ID NO: 53192 - DNA, 120 bp, Artificial Sequence
  ENSG00000068383_25 (sequence is synthesized)
gcactttcaatgccatccgcctcccgggatgcactttttaaggcaaaacctttcaatgaagaagcatgttttgctgtcggcagagggatccgtgttggaatccggggtgcgcgggccctc

SEQ ID NO: 53193 - DNA, 120 bp, Artificial Sequence
  ENSG00000068383_26 (sequence is synthesized)
aaggttgccccggatggcgggtgacagtgctgtggggctttgccctgtggcttccgccgtcggcacacaaggagctgctggagtgccgtcacagcgccaccccctcgatgcccacagagc

SEQ ID NO: 53194 - DNA, 120 bp, Artificial Sequence
  ENSG00000068383_27 (sequence is synthesized)
tgcagcctctgcagagtgtcagctccttcacactgtccaacttgatctcagcgattttttgtcataacacgtagaaactgtcagagcccgttttaaacattgtgcttttctgtctgcaaa

SEQ ID NO: 53195 - DNA, 120 bp, Artificial Sequence
  ENSG00000068383_28 (sequence is synthesized)
gtctgccaaggagctggtgctgcgggtgagtgtgtgctgccccagccctgggcacagagggatgtggagcgctgggtctggtctggcccagccctggtgacagggccccaggggtggggg

SEQ ID NO: 53196 - DNA, 120 bp, Artificial Sequence
  ENSG00000068383_29 (sequence is synthesized)
cattgtccacacggccctgcctgccttcactttgtaatcaagaagaatgtgggagaccatgcgaaattggtgatcatgtttgtgaaaaatctcagagagatacaaattatcaattcaaca

SEQ ID NO: 53197 - DNA, 120 bp, Artificial Sequence
  ENSG00000068394_0 (sequence is synthesized)
gaaaaggagcaagatggctgactccaaagagggtgttttgccgctgacggctgcttccactgccccaatttcattcggcttcactcgcacgtccgcacggaggcggctggccgactcggg

SEQ ID NO: 53198 - DNA, 120 bp, Artificial Sequence
  ENSG00000068394_1 (sequence is synthesized)
agacggcgcggggccatctccggaggagaaggatttcttgaaaaccgtggaagggagggagctgcagagtgtgaagccccaggaggcccccaaggaactcgtcatccctttgatccagaa

SEQ ID NO: 53199 - DNA, 120 bp, Artificial Sequence
  ENSG00000068394_2 (sequence is synthesized)
tggccatcgcaggcagccaccagcccggccccctgggccatccacagatactggggccttggcggatggggtggtgtcccaggctgtgaaggagctcattgcggaatccaagaagtctct

SEQ ID NO: 53200 - DNA, 120 bp, Artificial Sequence
  ENSG00000068394_3 (sequence is synthesized)
ggaagagagagagaatgcgggtgtcgaccccacgctcgctatccccatgatccagaaaggatgcacccccagcggggaaggggcagacagcgaaccccgggcagagacagtgccagagga

SEQ ID NO: 53201 - DNA, 120 bp, Artificial Sequence
  ENSG00000068394_4 (sequence is synthesized)
ggctaattatgaggcggtccccgtggaggcctatgggctggccatgctgcggggcatgggctggaaacctggcgagggcatcggccgcaccttcaatcaagtagtgaagccccgtgtcaa

SEQ ID NO: 53202 - DNA, 120 bp, Artificial Sequence
  ENSG00000068394_5 (sequence is synthesized)
ctcactgaggcccaaggggttagggctgggtgccaacctgaccgaggcccaggccttgacccccactggcccctcccgcatgccaagaccagatgaggagcaagagaaagataaggaaga

SEQ ID NO: 53203 - DNA, 120 bp, Artificial Sequence
  ENSG00000068394_6 (sequence is synthesized)
ttcgggccatggttcgtctggctgtggggagccgggtggtgactgttagtgagtactacctgcggcctgtctcccagcaggagtttgacaagaacaccttggatctcaggcaacagaacg

SEQ ID NO: 53204 - DNA, 120 bp, Artificial Sequence
  ENSG00000068394_7 (sequence is synthesized)
gaactgcctcatcacggaagaccctctggaatcaagaactctacatccagcaggacaactcagagaggaagcggaaacaccttccagaccgacaggatgggcctgcagccaagagtgaga

SEQ ID NO: 53205 - DNA, 120 bp, Artificial Sequence
  ENSG00000068394_8 (sequence is synthesized)
aagcagcccccagaagtcagcactggttgcacagggacctgcgtgtgcggtttgtggacaacatgtacaaaggaggccaatattacaacaccaagatgataattgaagatgtcctaagcc

SEQ ID NO: 53206 - DNA, 120 bp, Artificial Sequence
  ENSG00000068394_9 (sequence is synthesized)
cagatacctgtgtatgtcggacagatgaaggccgagtcctggaaggcctgagggaagacatgctggagaccctggttcccaaggcagagggtgaccgtgtgatggtggtgctgggcccac

SEQ ID NO: 53207 - DNA, 120 bp, Artificial Sequence
  ENSG00000068394_10 (sequence is synthesized)
agactggaagggtgggacatttgctgagccgggacagagcacggagccgggctttggtgcaactgccaagagaaaatcaggtggtggagcttcactacgatgccatctgccagtacatgg

SEQ ID NO: 53208 - DNA, 120 bp, Artificial Sequence
  ENSG00000068394_11 (sequence is synthesized)
gccctagtgacacagatgatgactgacccatgggactcctcccatcccccaggctggtaccagttctgtaccatatgagaaagttgccttcagaaggtgggaagatcattgttccatcct

SEQ ID NO: 53209 - DNA, 120 bp, Artificial Sequence
  ENSG00000068394_12 (sequence is synthesized)
ctacttctggtgcagtcctgggacaaggacaagggaaagggatgggtgaaccagtagggaagctagaaacaaacccaatatttaccaaaatttagggtataataaaaaccatttcaagta

SEQ ID NO: 53210 - DNA, 120 bp, Artificial Sequence
  ENSG00000068400_0 (sequence is synthesized)
gcgcagaaagctggcgggggggtggggggaggaacatggcgcaagctctgtctgaggaggagtttcagcggatgcaggctcagctcctggaactccggacaaacaactaccagctttcag

SEQ ID NO: 53211 - DNA, 120 bp, Artificial Sequence
  ENSG00000068400_1 (sequence is synthesized)
atgaactacgcaagaatggtgttgaactcaccagtcttcgacagaaggtcgcctacttggataaggagttcagcaaagctcagaaggcactgagcaagagcaagaaagctcaggaagtcg

SEQ ID NO: 53212 - DNA, 120 bp, Artificial Sequence
  ENSG00000068400_2 (sequence is synthesized)
aggtattgctgagtgaaaatgagatgctgcaggcaaagctgcacagccaggaggaggacttccgtttgcagaacagcacactaatggccgagttcagcaagctctgcagccagatggaac

SEQ ID NO: 53213 - DNA, 120 bp, Artificial Sequence
  ENSG00000068400_3 (sequence is synthesized)
agctggagcaagagaaccagcaactgaaggagggggctgcaggagcaggggttgcccaagctgggcccctcgtggatggggagctgctgaggctacaggctgaaaacacagccttgcaga

SEQ ID NO: 53214 - DNA, 120 bp, Artificial Sequence
  ENSG00000068400_4 (sequence is synthesized)
agaacgtggcagccctgcaggaacgctatgggaaagaagccgggaagttctcagctgtcagtgagggccagggggatcccccagggggcctggcccccaccgtcctggcccccatgccgt

SEQ ID NO: 53215 - DNA, 120 bp, Artificial Sequence
  ENSG00000068400_5 (sequence is synthesized)
tggcagaggtggagctgaaatgggaaatggagaaagaggagaagagattgctctgggaacagctgcaaggcttagagagctcaaagcaggccgaaacatccaggctgcaggaggaacttg

SEQ ID NO: 53216 - DNA, 120 bp, Artificial Sequence
  ENSG00000068400_6 (sequence is synthesized)
ctaagctctccgagaaactgaaaaagaaacaagaaagtttttgccgtctgcagacagaaaaggagactctgtttaatgacagcaggaacaagattgaggaattacaacaacggaaggaag

SEQ ID NO: 53217 - DNA, 120 bp, Artificial Sequence
  ENSG00000068400_7 (sequence is synthesized)
ctgatcacaaagcccagttggctcgaacccagaagctgcagcaggaacttgaggctgccaatcagagcttggcagagctgagagatcagcggcagggggagcgcctggaacatgcagcag

SEQ ID NO: 53218 - DNA, 120 bp, Artificial Sequence
  ENSG00000068400_8 (sequence is synthesized)
ctttgcgggccctacaagatcaggtatccatccagagtgcagatgcacaggaacaagtggaagggcttttggctgagaacaatgccttgaggactagcctggctgccctggagcagatcc

SEQ ID NO: 53219 - DNA, 120 bp, Artificial Sequence
  ENSG00000068400_9 (sequence is synthesized)
aaacagcaaagacccaagaactgaatatgctccgggaacagaccactgggctggcagctgagttgcagcagcagcaggctgagtacgaggaccttatgggacagaaagatgacctcaact

SEQ ID NO: 53220 - DNA, 120 bp, Artificial Sequence
  ENSG00000068400_10 (sequence is synthesized)
cccagctccaggagtcattacgggccaatagtcgactgctggaacaacttcaagaaatagggcaggagaaggagcagttgacccaggaattacaggaggctcggaagagtgcggagaagc

SEQ ID NO: 53221 - DNA, 120 bp, Artificial Sequence
  ENSG00000068400_11 (sequence is synthesized)
ggaaggccatgctggatgagctagcaatggaaacgctgcaagagaagtcccagcacaaggaagagctgggagcagttcgtctacggcatgagaaggaggtgctgggggtgcgtgcccgct

SEQ ID NO: 53222 - DNA, 120 bp, Artificial Sequence
  ENSG00000068400_12 (sequence is synthesized)
caagaagcgtcaggaggaggagctccgtgggcagatccgggaggagaaggcccggacacgggagctggagactctccagcagacagtggaagaacttcaagctcaggtacattccatgga

SEQ ID NO: 53223 - DNA, 120 bp, Artificial Sequence
  ENSG00000068400_13 (sequence is synthesized)
tggagccaagggctggtttgaacggcgcttgaaggaagccgaggaatccctgcagcagcagcagcaggaacaagaggaagccctcaagcagtgtcgggagcagcacgctgccgagctgaa

SEQ ID NO: 53224 - DNA, 120 bp, Artificial Sequence
  ENSG00000068400_14 (sequence is synthesized)
gggcaaggaggaggagctacaggatgtacgggatcagctcgagcaggcccaggaggagcgggactgccacctgaagaccattagcagcctgaagcaggaggtgaaggacacagtggatgg

SEQ ID NO: 53225 - DNA, 120 bp, Artificial Sequence
  ENSG00000068400_15 (sequence is synthesized)
gcagaggatcctggagaagaagggcagtgctgcgctcaaggacctcaagcggcagctgcatttggagcggaaacgggcagataagctgcaggagcgactgcaggacatcctcactaacag

SEQ ID NO: 53226 - DNA, 120 bp, Artificial Sequence
  ENSG00000068400_16 (sequence is synthesized)
caagagccgctcaggccttgaggagctggttctctcagagatgaactcaccaagccggacccagacaggggacagcagtagcatctcctccttcagctaccgggagatcttgcgggaaaa

SEQ ID NO: 53227 - DNA, 120 bp, Artificial Sequence
  ENSG00000068400_17 (sequence is synthesized)
ggagagctcggctgttccagccaggtccttatccagcagccctcaagcccagccccctcggccagcagagctgtcagatgaggaagtggctgagctctttcagcggctggcagagacaca

SEQ ID NO: 53228 - DNA, 120 bp, Artificial Sequence
  ENSG00000068400_18 (sequence is synthesized)
gcaggagaaatggatgctggaggagaaggtgaagcacctggaagtgagcagtgcttccatggcagaggacctctgccggaagagcgccatcattgagacctacgtcatggacagccggat

SEQ ID NO: 53229 - DNA, 120 bp, Artificial Sequence
  ENSG00000068400_19 (sequence is synthesized)
cgatgtgtctgtggcagcaggccacacagaccgcagcgggctgggcagcgtcctgagagacctagtgaagccaggtgacgagaaccttcgggagatgaacaagaagctgcagaacatgct

SEQ ID NO: 53230 - DNA, 120 bp, Artificial Sequence
  ENSG00000068400_20 (sequence is synthesized)
ggaggagcagctcaccaagaatatgcacttgcacaaggatatggaagttctgtcccaggaaattgtgcggctcagcaaggagtgcgtggggcctcctgacccagacctagagccaggaga

SEQ ID NO: 53231 - DNA, 120 bp, Artificial Sequence
  ENSG00000068400_21 (sequence is synthesized)
aaccagctaaagacctgcaggctgcacccacctcctccccttcctaccccctaggatgctattcccttgggctgtggtggaaaaatgagggctggagccaaaatcaaatagcttgggaga

SEQ ID NO: 53232 - DNA, 120 bp, Artificial Sequence
  ENSG00000068400_22 (sequence is synthesized)
ctggacattaaaggggctagaggcctgatggttagtgttaatgatcctgtcttagggcagaggccaccagggagtggggatcctgagggaaggggcagggatttctccttcttcttggtc

SEQ ID NO: 53233 - DNA, 120 bp, Artificial Sequence
  ENSG00000068400_23 (sequence is synthesized)
ctggctcccaagggcttctgtcttcatctctgcatgagctctccttcccagagaccaactctttttattttattttattttattttttaatttatgtctggagcctggctactctgcatt

SEQ ID NO: 53234 - DNA, 120 bp, Artificial Sequence
  ENSG00000068400_24 (sequence is synthesized)
tgggattggggatgctgggtgggtgtgtggtccatgttcagcgttctagcaacacgtgtgtgtgtgtgtgtgtaaaggctatgcagccaaaataccatctggccagacgggcccacccac

SEQ ID NO: 53235 - DNA, 120 bp, Artificial Sequence
  ENSG00000068400_25 (sequence is synthesized)
atattttcttgtcaacttttccccaagcccaccaacttggattcagattgcgacatgcaggacaggccagtcattctctctctctgactttctgtttaatcatctgtgggctaattcccc

SEQ ID NO: 53236 - DNA, 120 bp, Artificial Sequence
  ENSG00000068400_26 (sequence is synthesized)
cttctctggtgccataaattatgtggctcatagtaggtgcaccatccaaggagaaggtccctttttccaacttgtaatgatcactaattattattgccggctgtcatgtcagcctcctta

SEQ ID NO: 53237 - DNA, 120 bp, Artificial Sequence
  ENSG00000068400_27 (sequence is synthesized)
ccagccactttcctttggaaataacttttttattgttccacaaatagtatgtgctcattgtagtacattttttaaaaaccacaaatgagcaaagatttttttaaaaccttaaatgtctgg

SEQ ID NO: 53238 - DNA, 120 bp, Artificial Sequence
  ENSG00000068400_28 (sequence is synthesized)
tgggaaacgtggtaaaactccgactctatttaaaaaaaaaacaaaaacaaaaaaaccttaaatgtcaaaaaaaaataatattttcaccatccagacgtcaccattataaattcttagttc

SEQ ID NO: 53239 - DNA, 120 bp, Artificial Sequence
  ENSG00000068400_29 (sequence is synthesized)
catctcaaaaaataaataaataaaataaattcttagttcatacccttccagaattctctctctttttaaaacctagatgagattaacctgttttttattcaactgttgtctctaccttcc

SEQ ID NO: 53240 - DNA, 120 bp, Artificial Sequence
  ENSG00000068400_30 (sequence is synthesized)
ctagatgagattaacctgttttttattcaactgttgtctctaccttcccaatttgatcaattttcatgtcattggctgggtgcggtggctcctgcctataatcccagtactttgggaggc

SEQ ID NO: 53241 - DNA, 120 bp, Artificial Sequence
  ENSG00000068400_31 (sequence is synthesized)
catccccacttgaagtgcccttgtgggtgtggggtctgcccgggcccgcctcatgtgtgaacatgtacagtagaggggtctcaggtgggctgggccatcttgcaggtgaagcacctggaa

SEQ ID NO: 53242 - DNA, 120 bp, Artificial Sequence
  ENSG00000068400_32 (sequence is synthesized)
cagccggatcggtcagtgtcccctccccggccctcagccctggtccagccttcacctggccctccctctccattctgtgctgcggcttctctcctctcctctcggaactcagcgaagcta

SEQ ID NO: 53243 - DNA, 120 bp, Artificial Sequence
  ENSG00000068400_33 (sequence is synthesized)
ctgacaagaccatggcctgtggaggggagaacaggaaagcactgtctcttgatctcgcctcctccctcttctctctttctctgtcatctctccactctccattctccattgtgtctctct

SEQ ID NO: 53244 - DNA, 120 bp, Artificial Sequence
  ENSG00000068400_34 (sequence is synthesized)
gtccactttctcctttcctctccctgtgcctcatcttcctctcctctctctctcccttctctcttctccgtttctctttttcaccccactccttcatcttgtctcgctgtctatattgtt

SEQ ID NO: 53245 - DNA, 120 bp, Artificial Sequence
  ENSG00000068400_35 (sequence is synthesized)
ttccttctctgtatcttcattgcttttgctttctttcaaactttctccttcacagatttttctttattaatcagaatcatactgaccaacatgtgctgaggactttctgtgtgctctgtg

SEQ ID NO: 53246 - DNA, 120 bp, Artificial Sequence
  ENSG00000068400_36 (sequence is synthesized)
cttcacatacagtcatgtgcatctttccagttccacaagttagttatcctcatttctcggggccatagagctagtgagtgacagagctaggttttgtatgtcaaagcctctgtcctacat

SEQ ID NO: 53247 - DNA, 86 bp, Artificial Sequence
  ENSG00000068400_37 (sequence is synthesized)
gatcattcctgtctcaaaaaaaaaaagaaaaaaatgtgagaggcatggatagagctgaaccttcgtcttttaggcatgtggtcatt

SEQ ID NO: 53248 - DNA, 120 bp, Artificial Sequence
  ENSG00000068400_38 (sequence is synthesized)
ggatagagctgaaccttcgtcttttaggcatgtggtcatttggcacagggactctgccacctgaggggttgaaggccagttctccctctattcgaggcatggcaagggacttcagagacc

SEQ ID NO: 53249 - DNA, 120 bp, Artificial Sequence
  ENSG00000068400_39 (sequence is synthesized)
ggaatggtgtccgaggttttccctcagaggcctggcaggaaggcctttcagtttcttgccactggctgaggctgagtttccctgctttcccgacaccagaactcaccagtcttcgacaga

SEQ ID NO: 53250 - DNA, 120 bp, Artificial Sequence
  ENSG00000068400_40 (sequence is synthesized)
tcagaaggcactgagcaagagcaagaaagctcaggtaaggggatcccttgtgggtgagtgtgactgggagatgtcttggtgggctatttctgtatgctgatatttccttgtactggcctt

SEQ ID NO: 53251 - DNA, 120 bp, Artificial Sequence
  ENSG00000068400_41 (sequence is synthesized)
tctttctttgtgtgcctttacatctgctactacctcactgccatgtgttgctgtatctgtccttgtttccctgtatttgtcctaactctgtgtctctttccttctctctctttccattct

SEQ ID NO: 53252 - DNA, 120 bp, Artificial Sequence
  ENSG00000068400_42 (sequence is synthesized)
acctacccatccacccttgcttctacctatctgactcattcatccctccagtgagcacctacagtgaaccagacctaatgttgcatgctgttttcacgtagtcatttaaaggattctcaa

SEQ ID NO: 53253 - DNA, 120 bp, Artificial Sequence
  ENSG00000068400_43 (sequence is synthesized)
tggaattctctttagttgctaattttacctaatcctgcttaatttagtgattaattttaatttacttttaattcatttctaatttcagttactcattctcattcactgacttttaattaa

SEQ ID NO: 53254 - DNA, 120 bp, Artificial Sequence
  ENSG00000068400_44 (sequence is synthesized)
gcagaaagctggcgggggggtggggggaggaacatggcgcaagctctgtctgaggaggagtttcagcggatgcagtacttggagagacagatcactgggtcctggagaggacaggagtag

SEQ ID NO: 53255 - DNA, 120 bp, Artificial Sequence
  ENSG00000068400_45 (sequence is synthesized)
aggagtaggaaagattctgtgaaggccaagccctctgaccttgagcagactaccagagaacaacagagtctttctctgtcacccaggctatagtgtgcagtggcacgatctcagctcact

SEQ ID NO: 53256 - DNA, 120 bp, Artificial Sequence
  ENSG00000068400_46 (sequence is synthesized)
gggaagtagggacgtgggagatgagtgtgtctgaaacccctggtggttgggattgggaggctgggtgaaactgtcatccttgggtgctgactacatctgagatccatggggctgactgtg

SEQ ID NO: 53257 - DNA, 120 bp, Artificial Sequence
  ENSG00000068400_47 (sequence is synthesized)
tctgagaatcctggagctcccaagctagaatctgggtgagcatgagacttcttatggatgggagctgagtgagtttgaaccgcgtagcagctagggccaggagtctagtcgtgcctgaga

SEQ ID NO: 53258 - DNA, 120 bp, Artificial Sequence
  ENSG00000068400_48 (sequence is synthesized)
tcttgtacgctgggatagaggggttgactgtgtctgaggcccctgagggtagtgacctggcgtctgggtgaacctgagattgctgttggctggatagtctgagacccacaggtgctgaga

SEQ ID NO: 53259 - DNA, 120 bp, Artificial Sequence
  ENSG00000068438_0 (sequence is synthesized)
gttcacatcaggtcccggcccgccggaacctgggcgatccacgatgccgagtttgccacgctgcgacagcccataggcttgcccccccgggcattcgggtggactacgaacacaaactga

SEQ ID NO: 53260 - DNA, 120 bp, Artificial Sequence
  ENSG00000068438_1 (sequence is synthesized)
agccctaggacttgtcgcccgtttgcgctctcgccgaggcacaggctgctcgcggaccaccctgctccgaaaactaagaggtaggtggtagcccattcatctggttactgatactggccg

SEQ ID NO: 53261 - DNA, 120 bp, Artificial Sequence
  ENSG00000068438_2 (sequence is synthesized)
gcatcagtggactgtcggcaggtccttgagcaactggtgtgtgaaatgggacggacgtcaaaggacaagcgggatgtctactaccgcctggccaaggagaatggctggcgtgctcgcagc

SEQ ID NO: 53262 - DNA, 120 bp, Artificial Sequence
  ENSG00000068438_3 (sequence is synthesized)
gccttcaaactgctacaactggataaggaattccaactcttccaaggcgtgacacgggcagttgacctgtgtgcagccccaggcagctggagccaggtgctgagccagaagatcgggggc

SEQ ID NO: 53263 - DNA, 120 bp, Artificial Sequence
  ENSG00000068438_4 (sequence is synthesized)
caagggtccggccacgtggtggctgtggacctgcaggctatggctccactaccaggtgtggtacagatccagggggacatcacccagctgtccactgccaaggagatcatccagcacttt

SEQ ID NO: 53264 - DNA, 120 bp, Artificial Sequence
  ENSG00000068438_5 (sequence is synthesized)
aagggctgccctgcggacctagtggtgtgtgacggggctcctgatgtaaccggtctccatgatgttgatgagtatatgcaggcccagctcctcctagctgctctgaacattgctacacat

SEQ ID NO: 53265 - DNA, 120 bp, Artificial Sequence
  ENSG00000068438_6 (sequence is synthesized)
gtcctgaagccagggggctgctttgtggccaagatattccgaggccgggatgtgacgctcctctacagccagctgcaggtcttcttctccagcgtgctgtgtgccaagcccaggagcagc

SEQ ID NO: 53266 - DNA, 120 bp, Artificial Sequence
  ENSG00000068438_7 (sequence is synthesized)
gacccagatttcaaccagctggatggtcccacccgcatcattgtgccttttgtgacctgtggggacctgagctcctatgattcggaccgcagttacccactggacctagagggcggctca

SEQ ID NO: 53267 - DNA, 120 bp, Artificial Sequence
  ENSG00000068438_8 (sequence is synthesized)
gagtacaagtacactccacccacacagccccccatctcgccaccataccaggaggcctgcacgttgaagaggaaggggcagctggccaaggagatccgcccccaggactgccccatcagc

SEQ ID NO: 53268 - DNA, 120 bp, Artificial Sequence
  ENSG00000068438_9 (sequence is synthesized)
agagtggacacgtttccccagcccctggccgcccctcagtgccacaccctgctggcccctgagatggaagacaatgaaatgagttgttcaccttaacccattacgctggcaaactgatac

SEQ ID NO: 53269 - DNA, 120 bp, Artificial Sequence
  ENSG00000068438_10 (sequence is synthesized)
aactcagaaactgctcaatgtcaggaaaaccggaacttgttgatgaacttgttttcaaaatatcatctcatcaacgaggcctggacaaacaagccctgaggagggatctgcaacaaccct

SEQ ID NO: 53270 - DNA, 120 bp, Artificial Sequence
  ENSG00000068438_11 (sequence is synthesized)
gaagacaacaaggaaagaaaccatgaaagtctgtctgtactgcagtgggaattcttgagtgaggtcttacctcttctttaaacctcttcaggagtgtcctgattatgtccagaattttcc

SEQ ID NO: 53271 - DNA, 120 bp, Artificial Sequence
  ENSG00000068438_12 (sequence is synthesized)
ctaaaggcagggattcttaacctggatagaagccaggggtaaccatgaacttgatggaagaaaatgttacatctttattttcagcaatgaaactgaaatttagccttactcccaagttat

SEQ ID NO: 53272 - DNA, 120 bp, Artificial Sequence
  ENSG00000068438_13 (sequence is synthesized)
aaatgctggcaacaaatcacagtagtaaaagcagtacctgggattttcccaccaatacaaaccagttacagcaactgtaatgtaacataaaaagggcatcttgaagtattgttcatattt

SEQ ID NO: 53273 - DNA, 120 bp, Artificial Sequence
  ENSG00000068438_14 (sequence is synthesized)
gtcacctcttggaatgatagcagatcctgtaagttgatgtattaattaaaaagcccatatattactgcatctcaattttgtttcaatttaatatatagtaataattgtaattcaatgtaa

SEQ ID NO: 53274 - DNA, 120 bp, Artificial Sequence
  ENSG00000068438_15 (sequence is synthesized)
ggaccagtagacggggtggattcgaggtggggacatgggacgcagcggtcggagccgcctggaggggtacccggtggtcccgatggagctatcatctttgagaggtaggtggtagcccat

SEQ ID NO: 53275 - DNA, 120 bp, Artificial Sequence
  ENSG00000068438_16 (sequence is synthesized)
gataggcagaataccggagaggagttgggcacctgggcaatggagatatgtgggtgctccccaggggagaggggtgaattttgcaagggtctccaggttggagaagtgggtgcagctgat

SEQ ID NO: 53276 - DNA, 120 bp, Artificial Sequence
  ENSG00000068438_17 (sequence is synthesized)
tggctgtggacctgcaggctatggctccactaccaggtgtgctgtccactgccaaggagatcatccagcactttaagggctgccctgcggacctagtggtgtgtgacggggctcctgatg

SEQ ID NO: 53277 - DNA, 120 bp, Artificial Sequence
  ENSG00000068438_18 (sequence is synthesized)
aaatcgatcttggcctcggaagaaaaagaacaaagaatcgctggcaacttgcgcgtcgcgtcgctgcagccacgcagtgcgtggattcagccgctttggccgtgcccgttgcatgccggg

SEQ ID NO: 53278 - DNA, 120 bp, Artificial Sequence
  ENSG00000068438_19 (sequence is synthesized)
cgtgtgcctttttctgacccaaatctcatggtttctggggccaaaattccctttcctgcctcccaatagctataaaaaattggtaaagccaagcataatgaatggaaaagtttcgccaaa

SEQ ID NO: 53279 - DNA, 120 bp, Artificial Sequence
  ENSG00000068438_20 (sequence is synthesized)
aggaggaagcggcagtcatgcctcactccaccttcccctggcagaggccttcgctgtctgtcagggctatgaccctcccgagggcttcatcccggacctgagcaaacccctgctggacca

SEQ ID NO: 53280 - DNA, 120 bp, Artificial Sequence
  ENSG00000068438_21 (sequence is synthesized)
acccattacggtgttgttctaggtttggagatagagcagggagcaaaacagaaatatcttggctctcacagtacttccagtttggaaaagaggcaacaatcaaaacagtctctggcaaac

SEQ ID NO: 53281 - DNA, 120 bp, Artificial Sequence
  ENSG00000068489_0 (sequence is synthesized)
accagagcttccaccgacagcagaggggacgtaacacaccttctttcccctccggctttccttccccttctctcccgccttctccttattcataccagaagcgcctcagctctgattggc

SEQ ID NO: 53282 - DNA, 120 bp, Artificial Sequence
  ENSG00000068489_1 (sequence is synthesized)
tggagctctgtgctatctcagccaatcacaagccgggctgtgctcctacaccatccgaagagcgaatcgtgcagagaccgtgtctacgattggcctctccctgacaaggatttaattttg

SEQ ID NO: 53283 - DNA, 120 bp, Artificial Sequence
  ENSG00000068489_2 (sequence is synthesized)
aatttttctttatggcgtgggagaggccacagcccggactccatcgactcccccggctcttagactaaaatcatgcccaagttcaaacaacgaagacgaaagctaaaagccaaagccgaa

SEQ ID NO: 53284 - DNA, 120 bp, Artificial Sequence
  ENSG00000068489_3 (sequence is synthesized)
agattattcaaaaaaaaagaagcctctcactttcagtccaagctaattacacctcctcctccaccaccctcaccagaaagagtcggtatttcttcaatagatatatctcaaagcagaagc

SEQ ID NO: 53285 - DNA, 120 bp, Artificial Sequence
  ENSG00000068489_4 (sequence is synthesized)
tggctaacatcatcctggaacttcaattttcctaacatcagagatgcaataaaactttggacaaatagagtatggtctatatacagctggtgccagaactgcataacccagagtttagaa

SEQ ID NO: 53286 - DNA, 120 bp, Artificial Sequence
  ENSG00000068489_5 (sequence is synthesized)
gtattgaaagacaccatctttccatctcgtatctgccaccgagaactttacagtgtaaaacaacagttttgcattttggaaagtaaattatgcaagctccaggaagcactgaagaccatc

SEQ ID NO: 53287 - DNA, 120 bp, Artificial Sequence
  ENSG00000068489_6 (sequence is synthesized)
tcagaaagttcttcctgtccaagctgtggtcaaacatgtcacatgagtggtaaacttacaaatgtgcctgcctgcgttctgatcacccctggagactccaaagctgtgcttcctcccaca

SEQ ID NO: 53288 - DNA, 120 bp, Artificial Sequence
  ENSG00000068489_7 (sequence is synthesized)
ctgccacagccagccagccattttcctcctcctcctccacctccacctctgccacctcctccaccaccactagcacctgtgttgctcagaaaacccagtctcgctaaagcacttcaggct

SEQ ID NO: 53289 - DNA, 120 bp, Artificial Sequence
  ENSG00000068489_8 (sequence is synthesized)
ggaccattaaaaaaagatggacccatgcagataacagttaaagatctgctgactgtaaaattaaagaagacacagagtttagatgaaaagaggaagcttataccatcgccgaaagcacgg

SEQ ID NO: 53290 - DNA, 120 bp, Artificial Sequence
  ENSG00000068489_9 (sequence is synthesized)
ccaaagtgttatcgactcgagttacaaacgtcttaatcactcctggaaaaagtcagatggatctgcggaaactgcttagaaaagtcgatgtagagaggagcccaggtggaacccctctta

SEQ ID NO: 53291 - DNA, 120 bp, Artificial Sequence
  ENSG00000068489_10 (sequence is synthesized)
ccaataaggaaaatatggaaacaggaacaggactgactccagtgatgacgcaggccttaaggagaaagtttcagctggctcaccctagaagcccaactccaactctgccactttctacaa

SEQ ID NO: 53292 - DNA, 120 bp, Artificial Sequence
  ENSG00000068489_11 (sequence is synthesized)
ctgccactttctacaagcagctttgatgaacaaaactgatgccaactctgcctcactccatgagatgatccataacaaatacagataaaaacacccagctgggtgcagtggctcacacct

SEQ ID NO: 53293 - DNA, 120 bp, Artificial Sequence
  ENSG00000068489_12 (sequence is synthesized)
caaacaaacaaacaaaaaaaacccacccaaatccttttttttaatgtagtagggtttatatagatatactaatataattgcatttggagaattagagtatgtatggagcccacacatact

SEQ ID NO: 53294 - DNA, 120 bp, Artificial Sequence
  ENSG00000068489_13 (sequence is synthesized)
gtgatataaagtgtatatacagatatttggatattttctagtttgcatgatgattaagagaaccagatgggaaaatacaatctccaaagtgatgtttatcctggaattacccaatttaga

SEQ ID NO: 53295 - DNA, 120 bp, Artificial Sequence
  ENSG00000068489_14 (sequence is synthesized)
tagattagagaggttgttcaaatttaactagataactctagtttgtactgtataggtgcagttatgacagtaaaaaaatagcctcttggctcatacctgtaatcccaccactttgggagg

SEQ ID NO: 53296 - DNA, 120 bp, Artificial Sequence
  ENSG00000068489_15 (sequence is synthesized)
ggtgggaggattgcttgagcccaggaattcaagactagcctgggcaacataatacagggagaccccgtttctattaaaaatacaaaaatcagccagctgtggtgacacatgcctatagtc

SEQ ID NO: 53297 - DNA, 120 bp, Artificial Sequence
  ENSG00000068489_16 (sequence is synthesized)
atgcctatagtcccagctacttaggaagctgagaagggaggatcacttgaggctgtagtgcactataattatgcctgtgaatagccactctactccagcctgggcaacatagcaagaccc

SEQ ID NO: 53298 - DNA, 120 bp, Artificial Sequence
  ENSG00000068489_17 (sequence is synthesized)
acaggcgtgagccaccacgcccggccagagatccacatctatatttataacacatttatggatgaaaattaaacaggtgtccgggtgcggttactcatgcctgtaatccgagcacttgtg

SEQ ID NO: 53299 - DNA, 120 bp, Artificial Sequence
  ENSG00000068489_18 (sequence is synthesized)
aaaattaaacaggtgtccgggtgcggttactcatgcctgtaatccgagcacttgtggaggccgaggcaggcggattacttgaggtcaggacttcgaaaccagcctggccaacatggtgaa

SEQ ID NO: 53300 - DNA, 67 bp, Artificial Sequence
  ENSG00000068489_19 (sequence is synthesized)
aaatacaaaattagccaggtgtggtgtcacgcacctgtagtcccacactccagcctgggtgacagag

SEQ ID NO: 53301 - DNA, 120 bp, Artificial Sequence
  ENSG00000068489_20 (sequence is synthesized)
gacgttaagagatatatatcagcttctagtaaaagtttttttttttaaacctgctagctacatttacattatgtaaaaataaagggaataatcactgagaataaagcagttgagtattta

SEQ ID NO: 53302 - DNA, 120 bp, Artificial Sequence
  ENSG00000068489_21 (sequence is synthesized)
taacaataatattttatggggcgcttataatgtttataatattgtaaaccactgtgtactctattcatttaatgctaaatgacttgaccattcttgtgggataagagatcattaaaaaaa

SEQ ID NO: 53303 - DNA, 120 bp, Artificial Sequence
  ENSG00000068489_22 (sequence is synthesized)
tgggataagagatcattaaaaaaatgctagggccgggcaccatggctcacgcctgtaatcccaggactttaggaggccaaggcaggtggatgacttgagctcaggagtttgagaccagcc

SEQ ID NO: 53304 - DNA, 79 bp, Artificial Sequence
  ENSG00000068489_23 (sequence is synthesized)
ttgagaccagcctgggcaacatgatgaaaactccgtctctaccaaaaatcaaaaaaattagccaggtgtgatgttgtgt

SEQ ID NO: 53305 - DNA, 75 bp, Artificial Sequence
  ENSG00000068489_24 (sequence is synthesized)
taaaaattatccaggcgtggtggcatgtgcctatagccccagctactcaggaagctaaagcacgagaattatgtg

SEQ ID NO: 53306 - DNA, 88 bp, Artificial Sequence
  ENSG00000068489_25 (sequence is synthesized)
aaaaataaaaattatccaggcgtggtggcatgtgcctatagccccagctactcaggaagctaaagcacgagaattatgtgcatcctcc

SEQ ID NO: 53307 - DNA, 120 bp, Artificial Sequence
  ENSG00000068489_26 (sequence is synthesized)
ctttatggcgtgggagaggccacagcccggactccatcgactcccccggctcttagactatttctcgctctgtgttccaggctggagtacagtggcgcagtcatgggtcactgcagcctc

SEQ ID NO: 53308 - DNA, 120 bp, Artificial Sequence
  ENSG00000068489_27 (sequence is synthesized)
aggtatggatgtgacatccctgttttcagtgctatagtttttctacacacttggtgtttatatacatatgtgctcaagtcagtccaaccctcaagctaaacttagataagatgaaattat

SEQ ID NO: 53309 - DNA, 120 bp, Artificial Sequence
  ENSG00000068489_28 (sequence is synthesized)
tgagtcaagtctgcctttgcttctataaaaacatacatcaagtcactttctggttcctgttttcttgtccttatcatattactcataggactcagaattgtttattattaatttcagagt

SEQ ID NO: 53310 - DNA, 120 bp, Artificial Sequence
  ENSG00000068489_29 (sequence is synthesized)
ccagtgatgacgcaggccttaaggagaaagtttcaggtaaccctttaggaaaagaatattggttcctttgcttgaaaataatttggcctggtgtggtggctcatgactgtaatcctaaca

SEQ ID NO: 53311 - DNA, 120 bp, Artificial Sequence
  ENSG00000068615_0 (sequence is synthesized)
gctgccgtgagctgactgacgttccgggaacgccgcagcagcccgcgccgcccgcagcctagccgagccgcgccgcccgggcctcgcccgcccgcctgcccgccatggtgtcatggatca

SEQ ID NO: 53312 - DNA, 120 bp, Artificial Sequence
  ENSG00000068615_1 (sequence is synthesized)
gcctcgcccgcccgcctgcccgccatggtgtcatggatcatctccaggctggtggtgcttatatttggcaccctttaccctgcgtattattcctacaaggctgtgaaatcaaaggacatt

SEQ ID NO: 53313 - DNA, 120 bp, Artificial Sequence
  ENSG00000068615_2 (sequence is synthesized)
aaggaatatgtcaaatggatgatgtactggattatatttgcacttttcaccacagcagagacattcacagacatcttcctttgttggtttccattctattatgaactaaaaatagcattt

SEQ ID NO: 53314 - DNA, 120 bp, Artificial Sequence
  ENSG00000068615_3 (sequence is synthesized)
gtagcctggctgctgtctccctacacaaaaggctccagcctcctgtacaggaagtttgtacatcccacgctatcttcaaaagaaaaggaaatcgatgattgtctggtccaagcaaaagac

SEQ ID NO: 53315 - DNA, 120 bp, Artificial Sequence
  ENSG00000068615_4 (sequence is synthesized)
cgaagttacgatgcccttgtgcacttcgggaagcggggcttgaacgtggccgccacagcggctgtgatggctgcttccaagggacagggtgccttatcggagagactgcggagcttcagc

SEQ ID NO: 53316 - DNA, 120 bp, Artificial Sequence
  ENSG00000068615_5 (sequence is synthesized)
atgcaggacctcaccaccatcaggggagacggcgcccctgctccctcgggccccccaccaccggggtctgggcgggccagcggcaaacacggccagcctaagatgtccaggagtgcttct

SEQ ID NO: 53317 - DNA, 120 bp, Artificial Sequence
  ENSG00000068615_6 (sequence is synthesized)
gagagcgctagcagctcaggcaccgcctagaatccttcgatctcgcttcaggaagaaaagtacctcatcctcggccaccgaaaccacgtgagtgagatgagccaacagcaccggatccac

SEQ ID NO: 53318 - DNA, 120 bp, Artificial Sequence
  ENSG00000068615_7 (sequence is synthesized)
agaatgtttcttctctgccttaaagagctattcactaataacatagaaatccgcaagctgggtgtgctttgagtgtgcagcctcacaaacatggccttttctctctccccttccactttt

SEQ ID NO: 53319 - DNA, 120 bp, Artificial Sequence
  ENSG00000068615_8 (sequence is synthesized)
aaggatttatttttttcccccttttctttattttgctggggagaggctaaagggaaaggtagtaggggcgggggtggtgacctttaagtcttctgaggttggtaattttccacaattgga

SEQ ID NO: 53320 - DNA, 120 bp, Artificial Sequence
  ENSG00000068615_9 (sequence is synthesized)
ttgtcattatagacagcagtgtgttttttagaaagataagagaatcacccctatgctgctgagatgtacatttgtaatttatctgttgcatacttagtttttagtcctgtaaatgcaaac

SEQ ID NO: 53321 - DNA, 120 bp, Artificial Sequence
  ENSG00000068615_10 (sequence is synthesized)
acagcattttttacaactttctttgttcttggtacttatactttgaactatgatgtacatatttatggcttttggcttttaatataatggacttgcaagggctgccagaggttctgatat

SEQ ID NO: 53322 - DNA, 120 bp, Artificial Sequence
  ENSG00000068615_11 (sequence is synthesized)
gtaagaaaactgcaaaaacaaatatagacaaatattttgattctagagaacgtctcagatgtgcttataaagcttccaaatacaactccagtaagacatccctttccctgcaggagtgtg

SEQ ID NO: 53323 - DNA, 120 bp, Artificial Sequence
  ENSG00000068615_12 (sequence is synthesized)
gtctatattctttagatagttgtttagtcaaaagaccagacaagttacaaactaagagaaacaatatttcacaacacagtaaagtgtgatgagaggtcaggggaacatcccagtaaaaga

SEQ ID NO: 53324 - DNA, 120 bp, Artificial Sequence
  ENSG00000068615_13 (sequence is synthesized)
gaagagtcacaggaagctcatctcctccctggattctggattaggagcttctgaatcttttccagggataggcaggtagctcactcttggtgcaatttcttgaggatgggaacatgtaga

SEQ ID NO: 53325 - DNA, 120 bp, Artificial Sequence
  ENSG00000068615_14 (sequence is synthesized)
gctgctggaaggagtaattctgtgcttgacaaaggacgatttctcctttatcgtgaccagtgctgccgatttcctgacagaggagcttacactctgagcaccttgttttagcgaactcta

SEQ ID NO: 53326 - DNA, 120 bp, Artificial Sequence
  ENSG00000068615_15 (sequence is synthesized)
gcaaaacttgtttagcttagcaaaaacaaacacacaaaaaactgagaactctgctgtttcagatatgccataacatacatctgaaacacatgtgtaacaatcaaaatggtgggctctaga

SEQ ID NO: 53327 - DNA, 120 bp, Artificial Sequence
  ENSG00000068615_16 (sequence is synthesized)
gatcttcatgggttagacttgctggtcagacccaggagcacctgtggctcacaccttctgttcccctcctggcctgtgcagaatgtaaacagcagactcatactcaatgggcactacagg

SEQ ID NO: 53328 - DNA, 120 bp, Artificial Sequence
  ENSG00000068615_17 (sequence is synthesized)
ccttatcagacgttttatacaagcctggattgcttagtaggggaataaggcattctctgagggggctttccacttagattgagaattttatttgaaaagaatctggtttaaatggcattg

SEQ ID NO: 53329 - DNA, 120 bp, Artificial Sequence
  ENSG00000068615_18 (sequence is synthesized)
tggtccgaggtagctgctctccccactgagagctgagccgaaatataagaataatatatttgtgcttcgagttggtgtttctttcagtgtaatgcatgcagtggtcacaacccagttact

SEQ ID NO: 53330 - DNA, 120 bp, Artificial Sequence
  ENSG00000068615_19 (sequence is synthesized)
cataatatttggattgtatttgttcgtagatatgcccagaagactagagaattagtgttatataccatatagaacttactgtcagtcaactataaacaggcccaattaaaaactgttcca

SEQ ID NO: 53331 - DNA, 120 bp, Artificial Sequence
  ENSG00000068615_20 (sequence is synthesized)
ttactacgcaaacacatattagaggcctttgctgatgacacattagctggatcttagccaccccagaaagggtttgatttgaagctgattgttgccagatatgcatattggaatcccatc

SEQ ID NO: 53332 - DNA, 120 bp, Artificial Sequence
  ENSG00000068615_21 (sequence is synthesized)
tacccatagttcctctgaaggtgattttgtaatttgcaaaagggtataggaaaatatacctaaaagcgaatttgtggctgagaggataaacagaagctgtttgctcatgttctgtgcccc

SEQ ID NO: 53333 - DNA, 120 bp, Artificial Sequence
  ENSG00000068615_22 (sequence is synthesized)
acacccaccaatacctaaatctgttaaggaagacagaaaatgttttctttgtgctcattgagtagttccagacagaagaagaatatactctttaaaatgtatttacctgttagttggaag

SEQ ID NO: 53334 - DNA, 120 bp, Artificial Sequence
  ENSG00000068615_23 (sequence is synthesized)
aaaaaaaaaaaaaaaaaaaaagcttacacagcttcttagcaatttttttttttttgccgaaacaataaattgcctttagcagcagtttaaaatcctatcgtgaacaacctatattttcgc

SEQ ID NO: 53335 - DNA, 120 bp, Artificial Sequence
  ENSG00000068615_24 (sequence is synthesized)
tcctatcgtgaacaacctatattttcgccattttacaatggagagttgtgacaagtacaggttatcaagtttgcacttaactatgccaaaaaaagtttgaagcgctctattctcagacat

SEQ ID NO: 53336 - DNA, 120 bp, Artificial Sequence
  ENSG00000068615_25 (sequence is synthesized)
gctgtattattacttctcattcaagattgaaaaatataaaggtatccaaactctgtcttaatgtaaatgtaactatttttccttcaagtgttgactagggagtcggtttctctcttaaag

SEQ ID NO: 53337 - DNA, 120 bp, Artificial Sequence
  ENSG00000068615_26 (sequence is synthesized)
acactcactgtacaactgaaagcagctgtcatatttctggcaaaatgtgtttacgtatctgacaagttgtacatttgtgtatgaactgacataaaatgtgaaagcctgtaagtgtacatg

SEQ ID NO: 53338 - DNA, 120 bp, Artificial Sequence
  ENSG00000068615_27 (sequence is synthesized)
tagtggtgtggtgttctgtctagaggatacaactgaatgtttttaatttgctgacttacagacacaggctgtttacaaaatgctagctggaaagtctgtaatgttcatgtcataactttt

SEQ ID NO: 53339 - DNA, 120 bp, Artificial Sequence
  ENSG00000068615_28 (sequence is synthesized)
agttaattgccattgagcacctgttctgaggaggtgagatgtggacttgtgcttataaactggagagtttagtcataatccctcctggctttgtgtgaatagcttgctcactttgctggc

SEQ ID NO: 53340 - DNA, 120 bp, Artificial Sequence
  ENSG00000068615_29 (sequence is synthesized)
ctttgaaatgtgttctccgtgataagctatccatgtgtttgtgataagagtgcttgtcaaccatgaccatctttgagccttcctagtcctccacctggcacagtatttgaaatggcaaag

SEQ ID NO: 53341 - DNA, 120 bp, Artificial Sequence
  ENSG00000068615_30 (sequence is synthesized)
gatgtgcttcatcctctaacagtgtacactcccagagctgatattctggattttgactgtgcacatttcctctagttcatgtctgtagtccctatagaatgatctgtaataaaatagtat

SEQ ID NO: 53342 - DNA, 120 bp, Artificial Sequence
  ENSG00000068615_31 (sequence is synthesized)
actggactgtgcatcaaagggatgtaaaattacagtattccaaaggttgaagttctgctgttttgttataatgcctgatacacatcttgaataaagtcttaacatttttcttttaaaaaa

SEQ ID NO: 53343 - DNA, 120 bp, Artificial Sequence
  ENSG00000068615_32 (sequence is synthesized)
gttttcaaagagaggcgttggggttgtactgtgtgtgtgcaagtgtgtgccctcaccttcataggtggaggacagaggaatctgggaaacttgcagccacatgcaagcaggagaggcgtc

SEQ ID NO: 53344 - DNA, 120 bp, Artificial Sequence
  ENSG00000068615_33 (sequence is synthesized)
caccaggtccaaaacccattggcgttttctgacgacgaggaggaagacctgctggatttcatgtacaagtataaagcacctcgaaggatggaattgcccctggaggcaccgcctagaatc

SEQ ID NO: 53345 - DNA, 120 bp, Artificial Sequence
  ENSG00000068615_34 (sequence is synthesized)
ttttgaaaatctgatggaaaaaaatgctgaatcttgccccagaaaattctcaccccccaacacacatgcccacatacttgcaatatcaagaggttcccagagcccctgaagctcatctgt

SEQ ID NO: 53346 - DNA, 120 bp, Artificial Sequence
  ENSG00000068615_35 (sequence is synthesized)
gcgtcccaggttaagaatttctaacttatccaaccccactggaaacaagaaaataatagaatttctaacttacttggcacttaggcctgggagaaacagaagagggcaggggagagaggg

SEQ ID NO: 53347 - DNA, 120 bp, Artificial Sequence
  ENSG00000068615_36 (sequence is synthesized)
agagagtgcttctctgcagtttcctagggtgcactgggagagtcgcctaaatgcagtggacaggtggagagactacctgagcaagcgggtggactcactcacgatcatgtggcccagcag

SEQ ID NO: 53348 - DNA, 120 bp, Artificial Sequence
  ENSG00000068615_37 (sequence is synthesized)
atccaggggaaggaacccaggtcctagaataagttgagtggtccagacatggaggtcagtaatgtgccaagccataacaactgaagtggaggaggtttgaaataaacaccagtctgtggg

SEQ ID NO: 53349 - DNA, 120 bp, Artificial Sequence
  ENSG00000068615_38 (sequence is synthesized)
agcttttgtcaggtggaaaggacagcgcagacgaaccaggggcgctgcctggagggtcagcgcggaacgggtggagaggcagaggcggggctcccagtggggttggaaaaatcctccttt

SEQ ID NO: 53350 - DNA, 120 bp, Artificial Sequence
  ENSG00000068615_39 (sequence is synthesized)
ggattgagagacaggggcaggtacctccaggaatgcacgggaaattttcaagtgacagccacccgcatggtggcgatgacacctcccaggccttgcaggagagcgcagagtcatctaggg

SEQ ID NO: 53351 - DNA, 120 bp, Artificial Sequence
  ENSG00000068615_40 (sequence is synthesized)
cttctcccccgcgcccctccgtcccctccctccccgcccccggccccgggctgcgcgcgcccctacagcgcccggtcccagtggctcgggctattaatacccggcgcagctaaatttagc

SEQ ID NO: 53352 - DNA, 120 bp, Artificial Sequence
  ENSG00000068615_41 (sequence is synthesized)
atggctgcttccaaggtggctcgactctttcattttatcttctctttggacctgagagaagggcaggtaaccctgttgagaggtgtgactaactccaaactgatccagttgggcagcgag

SEQ ID NO: 53353 - DNA, 120 bp, Artificial Sequence
  ENSG00000068615_42 (sequence is synthesized)
gagagagagagagagagagagagagaattgcattttgagtgtggcctctgggcagtgtccttctgattatagcaggaggagctgcctgaggtttagagcatgggaagtgagtgagcatgt

SEQ ID NO: 53354 - DNA, 120 bp, Artificial Sequence
  ENSG00000068615_43 (sequence is synthesized)
agcatgggaagtgagtgagcatgtgtgtgtctacatgtgtgtatgtgagtgtgtctgtgtgtgagtgtgtgtggatggggatgtgtgcatggtgcacacgtgtgagttttagtgccaaag

SEQ ID NO: 53355 - DNA, 120 bp, Artificial Sequence
  ENSG00000068615_44 (sequence is synthesized)
acccttctctaacggaatgttcttttctctctcctcggtgctgttggggacgtggatattgtaaatggacattaagtggttgagggagatgtgaatgagggtggtatgaaggcatgggag

SEQ ID NO: 53356 - DNA, 120 bp, Artificial Sequence
  ENSG00000068650_0 (sequence is synthesized)
gcggccgcactagtaccccggagcccatgggcgcgccgagccgggcgcgggggcgctgaacggcggagcgggagcggccggaggagccatggactgcagcctcgtgcggacgctcgtgca

SEQ ID NO: 53357 - DNA, 120 bp, Artificial Sequence
  ENSG00000068650_1 (sequence is synthesized)
cagatactgtgcaggagaagagaattgggtggacagcaggaccatctacgtgggacacagggagccacctccgggcgcagaggcctacatcccacagagatacccagacaacaggatcgt

SEQ ID NO: 53358 - DNA, 120 bp, Artificial Sequence
  ENSG00000068650_2 (sequence is synthesized)
ctcgtccaagtacacattttggaactttatacccaagaatttatttgaacaattcagaagagtagccaacttttatttccttatcatatttctggtgcagttgattattgatacacccac

SEQ ID NO: 53359 - DNA, 120 bp, Artificial Sequence
  ENSG00000068650_3 (sequence is synthesized)
aagtccagtgacaagcggacttccactcttctttgtcattactgtgacggctatcaaacagggttatgaagactggcttcgacataaagcagacaatgccatgaaccagtgtcctgttca

SEQ ID NO: 53360 - DNA, 120 bp, Artificial Sequence
  ENSG00000068650_4 (sequence is synthesized)
tttcattcagcacggcaagctcgttcggaaacaaagtcgaaagctgcgagttggggacattgtcatggttaaggaggacgagacctttccctgcgacttgatcttcctttccagcaaccg

SEQ ID NO: 53361 - DNA, 120 bp, Artificial Sequence
  ENSG00000068650_5 (sequence is synthesized)
gggagatgggacgtgccacgtcaccaccgccagcttggatggagaatccagccataaaacgcattacgcggtccaggacaccaaaggcttccacacagaggaggatatcggcggacttca

SEQ ID NO: 53362 - DNA, 120 bp, Artificial Sequence
  ENSG00000068650_6 (sequence is synthesized)
cgccaccatcgagtgtgagcagccccagcccgacctctacaagttcgtgggtcgcatcaacgtttacagtgacctgaatgaccccgtggtgaggcccttaggatcggaaaacctgctgct

SEQ ID NO: 53363 - DNA, 120 bp, Artificial Sequence
  ENSG00000068650_7 (sequence is synthesized)
tagaggagctacactgaagaacactgagaaaatctttggtgtggctatttacacgggaatggaaaccaagatggcattaaattatcaatcaaaatctcagaagcgatctgccgtggaaaa

SEQ ID NO: 53364 - DNA, 120 bp, Artificial Sequence
  ENSG00000068650_8 (sequence is synthesized)
atcgatgaatgcgttcctcattgtgtatctctgcattctgatcagcaaagccctgataaacactgtgctgaaatacatgtggcagagtgagccctttcgggatgagccgtggtataatca

SEQ ID NO: 53365 - DNA, 120 bp, Artificial Sequence
  ENSG00000068650_9 (sequence is synthesized)
gaaaacggagtcggaaaggcagaggaatctgttcctcaaggcattcacggacttcctggccttcatggtcctctttaactacatcatccctgtgtccatgtacgtcacggtcgagatgca

SEQ ID NO: 53366 - DNA, 120 bp, Artificial Sequence
  ENSG00000068650_10 (sequence is synthesized)
gaagttcctcggctcttacttcatcacctgggacgaagacatgtttgacgaggagactggcgaggggcctctggtgaacacgtcggacctcaatgaagagctgggacaggtggagtacat

SEQ ID NO: 53367 - DNA, 120 bp, Artificial Sequence
  ENSG00000068650_11 (sequence is synthesized)
cttcacagacaagaccggcaccctcacggaaaacaacatggagttcaaggagtgctgcatcgaaggccatgtctacgtgccccacgtcatctgcaacgggcaggtcctcccagagtcgtc

SEQ ID NO: 53368 - DNA, 120 bp, Artificial Sequence
  ENSG00000068650_12 (sequence is synthesized)
aggaatcgacatgattgactcgtcccccagcgtcaacgggagggagcgcgaggagctgtttttccgggccctctgtctctgccacaccgtccaggtgaaagacgatgacagcgtagacgg

SEQ ID NO: 53369 - DNA, 120 bp, Artificial Sequence
  ENSG00000068650_13 (sequence is synthesized)
ccccaggaaatcgccggacggggggaaatcctgtgtgtacatctcatcctcgcccgacgaggtggcgctggtcgaaggtgtccagagacttggctttacctacctaaggctgaaggacaa

SEQ ID NO: 53370 - DNA, 120 bp, Artificial Sequence
  ENSG00000068650_14 (sequence is synthesized)
ttacatggagatattaaacagggagaaccacatcgaaaggtttgaattgctggaaattttgagttttgactcagtcagaaggagaatgagtgtaattgtaaaatctgctacaggagaaat

SEQ ID NO: 53371 - DNA, 120 bp, Artificial Sequence
  ENSG00000068650_15 (sequence is synthesized)
ttatctgttttgcaaaggagcagattcttcgatattcccccgagtgatagaaggcaaagttgaccagatccgagccagagtggagcgtaacgcagtggaggggctccgaactttgtgtgt

SEQ ID NO: 53372 - DNA, 120 bp, Artificial Sequence
  ENSG00000068650_16 (sequence is synthesized)
tgcttataaaaggctgatccaagaagaatatgaaggcatttgtaagctgctgcaggctgccaaagtggcccttcaagatcgagagaaaaagttagcagaagcctatgagcaaatagagaa

SEQ ID NO: 53373 - DNA, 120 bp, Artificial Sequence
  ENSG00000068650_17 (sequence is synthesized)
agatcttactctgcttggtgctacagctgttgaggaccggctgcaggagaaagctgcagacaccatcgaggccctgcagaaggccgggatcaaagtctgggttctcacgggagacaagat

SEQ ID NO: 53374 - DNA, 120 bp, Artificial Sequence
  ENSG00000068650_18 (sequence is synthesized)
ggagacggccgcggccacgtgctacgcctgcaagctcttccgcaggaacacgcagctgctggagctgaccaccaagaggatcgaggagcagagcctgcacgacgtcctgttcgagctgag

SEQ ID NO: 53375 - DNA, 120 bp, Artificial Sequence
  ENSG00000068650_19 (sequence is synthesized)
caagacggtcctgcgccacagcgggagcctgaccagagacaacctgtccggactttcagcagatatgcaggactacggtttaattatcgacggagctgcactgtctctgataatgaagcc

SEQ ID NO: 53376 - DNA, 120 bp, Artificial Sequence
  ENSG00000068650_20 (sequence is synthesized)
tcgagaagacgggagttccggcaactacagggagctcttcctggaaatctgccggagctgcagcgcggtgctctgctgccgcatggcgcccttgcagaaggctcagattgttaaattaat

SEQ ID NO: 53377 - DNA, 120 bp, Artificial Sequence
  ENSG00000068650_21 (sequence is synthesized)
caaattttcaaaagagcacccaatcacgttagcaattggcgatggtgcaaatgatgtcagcatgattctggaagcgcacgtgggcataggtgtcatcggcaaggaaggccgccaggctgc

SEQ ID NO: 53378 - DNA, 120 bp, Artificial Sequence
  ENSG00000068650_22 (sequence is synthesized)
caggaacagcgactatgcaatcccaaagtttaagcatttgaagaagatgctgcttgttcacgggcatttttattacattaggatctctgagctcgtgcagtacttcttctataagaacgt

SEQ ID NO: 53379 - DNA, 120 bp, Artificial Sequence
  ENSG00000068650_23 (sequence is synthesized)
ctgcttcatcttccctcagtttttataccagttcttctgtgggttttcacaacagactttgtacgacaccgcgtatctgaccctctacaacatcagcttcacctccctccccatcctcct

SEQ ID NO: 53380 - DNA, 120 bp, Artificial Sequence
  ENSG00000068650_24 (sequence is synthesized)
gtacagcctcatggagcagcatgttggcattgacgtgctcaagagagacccgaccctgtacagggacgtcgccaagaatgccctgctgcgctggcgcgtgttcatctactggacgctcct

SEQ ID NO: 53381 - DNA, 120 bp, Artificial Sequence
  ENSG00000068650_25 (sequence is synthesized)
gggactgtttgacgcactggtgttcttctttggtgcttatttcgtgtttgaaaatacaactgtgacaagcaacgggcagatatttggaaactggacgtttggaacgctggtattcaccgt

SEQ ID NO: 53382 - DNA, 120 bp, Artificial Sequence
  ENSG00000068650_26 (sequence is synthesized)
gatggtgttcacagttacactaaagcttgcattggacacacactactggacttggatcaaccattttgtcatctgggggtcgctgctgttctacgttgtcttttcgcttctctggggagg

SEQ ID NO: 53383 - DNA, 120 bp, Artificial Sequence
  ENSG00000068650_27 (sequence is synthesized)
agtgatctggccgttcctcaactaccagaggatgtactacgtgttcatccagatgctgtccagcgggcccgcctggctggccatcgtgctgctggtgaccatcagcctccttcccgacgt

SEQ ID NO: 53384 - DNA, 120 bp, Artificial Sequence
  ENSG00000068650_28 (sequence is synthesized)
cctcaagaaagtcctgtgccggcagctgtggccaacagcaacagagagagtccagactaagagccagtgcctttctgtcgagcagtcaaccatctttatgctttctcagacttccagcag

SEQ ID NO: 53385 - DNA, 120 bp, Artificial Sequence
  ENSG00000068650_29 (sequence is synthesized)
cctgagtttctgatggaacaagagcccaggctaccagagcacctgtccctcggccgcctggtacagctcccactctcagcaggtgacactcgcggcctggaaggagaaggtgtccacgga

SEQ ID NO: 53386 - DNA, 120 bp, Artificial Sequence
  ENSG00000068650_30 (sequence is synthesized)
gcccccacccatcctcggcggttcccatcaccactgcagttccatcccaagtcacagctgccctaggtcccgtgtgggaatgctcgtgtgatggatggtcctaagcctgtggagactgtg

SEQ ID NO: 53387 - DNA, 120 bp, Artificial Sequence
  ENSG00000068650_31 (sequence is synthesized)
cacgtgcctcttcctggcccccagcaggcaaggaggggggtcacaggccttgccctcgagcatggcaccctggccgcctggacccagcactgtggttgttgagccacaccagtggcctct

SEQ ID NO: 53388 - DNA, 120 bp, Artificial Sequence
  ENSG00000068650_32 (sequence is synthesized)
gggcattcggctcaacgcaggagggacattctgctggcccaccctgcgcgctgtcatgcagaggccattcccccaggcctgtgtcttcacccacctgccatcattggcctttgctgtcac

SEQ ID NO: 53389 - DNA, 120 bp, Artificial Sequence
  ENSG00000068650_33 (sequence is synthesized)
tgggagagaagagccgtccagggacccatggtggcccacatgtggatgccacatgctgctgtttcctgcttgcccggccaccacccatgccctccatagggtgaggtggagccatggtgg

SEQ ID NO: 53390 - DNA, 120 bp, Artificial Sequence
  ENSG00000068650_34 (sequence is synthesized)
tgcgtcctttactcaacaaccctccaatccggatgctgtgggaagggccgggtcactcggataccatcatccctgcggatgcaccgccgtaccctgctcatctgggagtggtttccctgc

SEQ ID NO: 53391 - DNA, 120 bp, Artificial Sequence
  ENSG00000068650_35 (sequence is synthesized)
ggttacgtccaagcccgcctgccctgtgtgttggggctggctgagtttcggtctccccatcaccggccgcctcgtggagaaggcagtgccacgtgggaggacaaggccacgccggcagct

SEQ ID NO: 53392 - DNA, 120 bp, Artificial Sequence
  ENSG00000068650_36 (sequence is synthesized)
agccactcgccagggcacggagccgtcagtccactgttacgggagaatgttgatttcgcgggtgcgagggccgggagacagatacttggctgtgatgagcagacatcctctgtccccgtg

SEQ ID NO: 53393 - DNA, 120 bp, Artificial Sequence
  ENSG00000068650_37 (sequence is synthesized)
gaggggtcaacaccaaggtggtgttcgtgcaccagaacctgtctcgggctgacgggggtggcacacaggacacgggtggatcccaacaggcagcaccgcacctctgcccgcctcccgcac

SEQ ID NO: 53394 - DNA, 120 bp, Artificial Sequence
  ENSG00000068650_38 (sequence is synthesized)
tgcagctccgcccgccgggctctgcgtccccacgtcccctcgtcccatccccacgtcccctcatcccgtcacctcgtccccacatccccttgccccgtcacctcgtcctcatgtcccctt

SEQ ID NO: 53395 - DNA, 120 bp, Artificial Sequence
  ENSG00000068650_39 (sequence is synthesized)
gtcctgtcacctcgtccccacgtcccctcgtctcctcatccccacgtcctctcgtccccttgtcccgtccccacataccctcgtccccatgtccccacgcagggctctccttcgtcttag

SEQ ID NO: 53396 - DNA, 120 bp, Artificial Sequence
  ENSG00000068650_40 (sequence is synthesized)
gatctgtccagcgctgctctgggtgggttagcaaccccagggctgctgtgataggaagtccctgttgttctccgtactggcatttctatttctagaaataatatttgacatagccttaat

SEQ ID NO: 53397 - DNA, 120 bp, Artificial Sequence
  ENSG00000068650_41 (sequence is synthesized)
ggtccttaaagaagacatttcagtgtgagattcagacttcagacgctgaaactgctgcctttcaggaaagcaccaccaacgctggaggaggagccggccctcacgcccgccccgcgccac

SEQ ID NO: 53398 - DNA, 120 bp, Artificial Sequence
  ENSG00000068650_42 (sequence is synthesized)
gctgtggaacggggctccggcaagtgaaacccagagggtgtttccgaggtgctcgacagtaggtatttttggaagctcagatttcaccatttgattgtataatcttttacctataaaata

SEQ ID NO: 53399 - DNA, 120 bp, Artificial Sequence
  ENSG00000068650_43 (sequence is synthesized)
tttatttgaagtagagggtaaatcagcggtaagaacagtgaacacagtggttgggataaaataaggtgacaaacatcacaccaaagatgagggtagcgagcaactggcttgagcagacag

SEQ ID NO: 53400 - DNA, 120 bp, Artificial Sequence
  ENSG00000068650_44 (sequence is synthesized)
aacggggaagactccactctgtcccgaggggccagccgcaggcgtccccagggccaccctgccctgaggtccttgtgtggccgccctggcttggcagccctgcccacgctgcccccgcaa

SEQ ID NO: 53401 - DNA, 120 bp, Artificial Sequence
  ENSG00000068650_45 (sequence is synthesized)
acaatggtgtgtgcgtttttacagccctttttaggaacccaatatgggcataaatgtaacacctgtagcgggggcagattctctgtatgttcagttaacaaattatttgtaatgtatttt

SEQ ID NO: 53402 - DNA, 120 bp, Artificial Sequence
  ENSG00000068650_46 (sequence is synthesized)
tttagaaatcttaaaattgcctttgcactgaagtattttcatagctgtttatatctcttttattcatttatttaacatactgtctaattttaaaaataggtttttaaagctttcattttt

SEQ ID NO: 53403 - DNA, 120 bp, Artificial Sequence
  ENSG00000068650_47 (sequence is synthesized)
aagtttatgaaattttggccactttacatttagattctggtgagagttttgactgaatgttccaatctctgatgaatgcgaattttcagatttgattttattctctacacacacctcttc

SEQ ID NO: 53404 - DNA, 120 bp, Artificial Sequence
  ENSG00000068650_48 (sequence is synthesized)
ttttcttggtatttctggtggcagtgattagttgaacagcacatttaaggcacgataatttgctacactttttctttacaatttgttgcaatttcatctgctttctatgtttcattgtta

SEQ ID NO: 53405 - DNA, 120 bp, Artificial Sequence
  ENSG00000068650_49 (sequence is synthesized)
attgccatccttcagccttaaaaatagaagattctcacgtgaaggtttagtaagttgggtcccagctctgcctgtgtggagatagtcaccatgtacctctgacaacaagttttagtgtga

SEQ ID NO: 53406 - DNA, 120 bp, Artificial Sequence
  ENSG00000068650_50 (sequence is synthesized)
aagtcactaaacttttacacactcccaaacgtctttttaaaaattgcttgggaaattattaaatgaatgtgcctgatgatttgaaatagacaaggggcacgagataaaaaagaaaaggat

SEQ ID NO: 53407 - DNA, 120 bp, Artificial Sequence
  ENSG00000068650_51 (sequence is synthesized)
gagaagatcctcagtgaatgacgttgcagggtcttcatgcaattttccacctcgcagtagttagtatttacttgccttaaactaactttgaagcaagtaatgtcaactttgagcactttg

SEQ ID NO: 53408 - DNA, 120 bp, Artificial Sequence
  ENSG00000068650_52 (sequence is synthesized)
ttgagttttgaaaaatcttatttgttgctgcacaggttaataaattatcaatttgtaattcagcatgttggtcagagacacggtcactgattcacacccagtccctgccacagaccgtct

SEQ ID NO: 53409 - DNA, 120 bp, Artificial Sequence
  ENSG00000068650_53 (sequence is synthesized)
cagacacgcacagtgggcctgctgcatgattcacacccagtccctgccacagaccgtctcagacacgcacagtgggcctgctgcatgattcacacccagtccctgccacagaccgtctca

SEQ ID NO: 53410 - DNA, 120 bp, Artificial Sequence
  ENSG00000068650_54 (sequence is synthesized)
gacacgcacagtgggcctgctgcatgcgtgttacctggcttttggctccacgctcactcatagccatgtccacatgggggcttgcacacaggatcactcacatatgtacatgtacccacc

SEQ ID NO: 53411 - DNA, 120 bp, Artificial Sequence
  ENSG00000068650_55 (sequence is synthesized)
acaaacgtgcaagctcctgcacacatgcatgcacacaaacgtgtacacaagtgtgagctcctacacgcatacacacacacacgtgtacatgcaccaaagcatgtgtgacctacagacatg

SEQ ID NO: 53412 - DNA, 120 bp, Artificial Sequence
  ENSG00000068650_56 (sequence is synthesized)
cagaacatgcacgtgtacacataccacagacacgcgtgtgcatgctcctacacaatacatatgcacatatcatgaacagcgtaagttcctacacacggacgtgtgatacacacatgcatg

SEQ ID NO: 53413 - DNA, 120 bp, Artificial Sequence
  ENSG00000068650_57 (sequence is synthesized)
tacaggtaagcacacatgtacaagctcctacaggcttgctctcacacacgtgtatgcacagcagagagacgtatgagcttctactgcacacatgcacacacacacgcacacgtacattca

SEQ ID NO: 53414 - DNA, 120 bp, Artificial Sequence
  ENSG00000068650_58 (sequence is synthesized)
ctacaaacgtgcagcctcctgcacacgtgcacattcatgtgtacaccacaaatgagttcccagacgtgtaaacacacgtgcacacatcgtacacatgtgagctcccacacgtacacacag

SEQ ID NO: 53415 - DNA, 120 bp, Artificial Sequence
  ENSG00000068650_59 (sequence is synthesized)
atgcacatggacacaccccaaacacgcacaggctcctacacacatgcacacacgtgtacaccacaaacgagctcccagacatgtaaacacacgtctcccacacgtgagctcccacacgta

SEQ ID NO: 53416 - DNA, 120 bp, Artificial Sequence
  ENSG00000068650_60 (sequence is synthesized)
cacatgcacatgtacgcaccacaaacacatgcgcaggctcctgcaggcgtgaatacacacatgcacacacatatacacacatgtgccacaaacaagtgcacactgtcctggtgtcctgca

SEQ ID NO: 53417 - DNA, 120 bp, Artificial Sequence
  ENSG00000068650_61 (sequence is synthesized)
ctgcatcctgcctccttgctgaggggcccctgtgagaggcctctggatgggcatgggaagatgggctccctggcccccagcccatgcctccctgggatgaagagtccccctcctggcaga

SEQ ID NO: 53418 - DNA, 120 bp, Artificial Sequence
  ENSG00000068650_62 (sequence is synthesized)
atgtctgggctttgcagagcaggccccgggggtgaagtcgcagcttcacttacaccagctgctctgtgagcaaggcttggtgccctggacaaggcccttcccctttagggaggtccagcc

SEQ ID NO: 53419 - DNA, 120 bp, Artificial Sequence
  ENSG00000068650_63 (sequence is synthesized)
tcgcaagctgaaacctcccctcggctcagccctataccaggcggccacagcaggactggccacacccacgccgcacctcatccgtgcacgcgtcggagcacggccagccttccgccacga

SEQ ID NO: 53420 - DNA, 120 bp, Artificial Sequence
  ENSG00000068650_64 (sequence is synthesized)
gccagctgggaagggccgcggccgcctaaagccccagtcaacccagcctgtgtctgagcagacagggcgaacaagcaggccacaccgtctcgagggaggaggccagatgcggccagcgtc

SEQ ID NO: 53421 - DNA, 120 bp, Artificial Sequence
  ENSG00000068650_65 (sequence is synthesized)
tccaacagggtgaccatccgctcggcttgctgagcgtttaaacaaatgtttagacaggctgtggggactcccctgagttgagccttggccaggggtccggtgctgtcgcgggaaacctcc

SEQ ID NO: 53422 - DNA, 120 bp, Artificial Sequence
  ENSG00000068650_66 (sequence is synthesized)
agccttgttcttcaaaccactcagctcatgtgttttgcactgactagtactgaataatacaaccactcttatttaatgttagtattatttatttgacaactcagtgtctaacagcttgat

SEQ ID NO: 53423 - DNA, 120 bp, Artificial Sequence
  ENSG00000068650_67 (sequence is synthesized)
atgcaggtccttgcatcctacatttctttaggaagttacccatttgtaactttaaaaacaggaaaaatatcagttggcaaatgcaatcttttttttttttaagctaaaggtgggtgaact

SEQ ID NO: 53424 - DNA, 120 bp, Artificial Sequence
  ENSG00000068650_68 (sequence is synthesized)
ggaatgaaaatctttctgatgttgtgtctataagcagccttgatgggatatgttagaagtgtcatgaaagtgtgattctacttttgcagaaaaatctaaagatcaatttatatagcttta

SEQ ID NO: 53425 - DNA, 120 bp, Artificial Sequence
  ENSG00000068650_69 (sequence is synthesized)
ttttttactttatcaaagtatacagaattttaatatgcatatattgtgtctgacttaaaattataatgtctgcgtcaccatttaaaatgtctgttcattatgtaatgtaataaaagaagg

SEQ ID NO: 53426 - DNA, 120 bp, Artificial Sequence
  ENSG00000068650_70 (sequence is synthesized)
tcttcaaaaatgtatttaacatgaatggtatccatagttgtcatcatcataaatactggagtttatttttaaattattaaacatagtaggtgcattaacataaatcagtctccacacagt

SEQ ID NO: 53427 - DNA, 120 bp, Artificial Sequence
  ENSG00000068650_71 (sequence is synthesized)
aacatttaactgataattcattaatcagctttgaaaaattaaattgttaattaaaccaatctaacatttcagtaaagtttattttgtatgcttctgtttttaacttttatttctgtagat

SEQ ID NO: 53428 - DNA, 120 bp, Artificial Sequence
  ENSG00000068650_72 (sequence is synthesized)
aaactgactggataatattatattggacttttctctagattatctaagcaggagacctgaatctgcttgcaataaagaataaaagtctgcttcagtttctttataaagaaactcacacaa

SEQ ID NO: 53429 - DNA, 120 bp, Artificial Sequence
  ENSG00000068650_73 (sequence is synthesized)
cctcaagaaagtcctgtgccggcagctgtggccaacagcaacagagagagtccagaatgggtgcgcacagcctcgggaccgcgactcagaattcacccctcttgcctctctgcagagccc

SEQ ID NO: 53430 - DNA, 120 bp, Artificial Sequence
  ENSG00000068650_74 (sequence is synthesized)
ctgagagcagagagagtaactaggcagcactctggcagttccttccaatagccacctggcagacctcagttgagggccagaagcattcggcatctgctgatattcttgcttgatcaggag

SEQ ID NO: 53431 - DNA, 120 bp, Artificial Sequence
  ENSG00000068650_75 (sequence is synthesized)
cttgtttaaactggaagcaacatagctcaaatggagattcttcaagtcttgctggatggtttatgctgcatttggaacatctgtgtggagccagtttgcactttcctgtgctttctgaca

SEQ ID NO: 53432 - DNA, 120 bp, Artificial Sequence
  ENSG00000068650_76 (sequence is synthesized)
gtcctgagggagctggggtacaagcgtcttcctcgttgtgaccctagggaatctgtggcctaagttatcctttaaaaccatgtgtgttccattcagtgagaaaaaacaaaaattaacagc

SEQ ID NO: 53433 - DNA, 120 bp, Artificial Sequence
  ENSG00000068650_77 (sequence is synthesized)
cctcagattgttaaacaatctagcagggtaccacctgttaaaaatagaagcaaccgtgatagagatttaaaacgcagatcttgttttgcttgtcgggccagcttctgtgattagtgggtg

SEQ ID NO: 53434 - DNA, 120 bp, Artificial Sequence
  ENSG00000068650_78 (sequence is synthesized)
agctgccctggctgacttctgttaaaaaaaaaaaaaaaagctatctcaatcactcctgagaatctacactaaaggtgtaagggaagggagctgacattactgagcacctagtgtgtgcct

SEQ ID NO: 53435 - DNA, 120 bp, Artificial Sequence
  ENSG00000068650_79 (sequence is synthesized)
cctacagatacgaatgcatttagtctcaaaataaccctctcagacaaatgagggcaccagctttacaaatgggaataatttgccgaaaaggctgcagatgggaaatgccacgaggattca

SEQ ID NO: 53436 - DNA, 120 bp, Artificial Sequence
  ENSG00000068650_80 (sequence is synthesized)
acttgtcttgtccatcaaactccaaacgtctcacgcggccatgttcttgtgggaaacgcacacctgaagttttttctttaaatagttttgaaagcactatggaatgtattgtaaacatgg

SEQ ID NO: 53437 - DNA, 120 bp, Artificial Sequence
  ENSG00000068650_81 (sequence is synthesized)
atgtctttctggtatcaggaagcctagaaaagttctgactttgttataccacattttagatatgataggccaatttctcttgaactgttcatgaataaatccatcattggtcagagcaaa

SEQ ID NO: 53438 - DNA, 120 bp, Artificial Sequence
  ENSG00000068650_82 (sequence is synthesized)
tgagccgggaaggacagagacccaagtcccatccctctggggcccccttggaatgggggaggcgaacaggaaaccaccacaaacatgcccccccgccatcccaggagaagcagcagctct

SEQ ID NO: 53439 - DNA, 120 bp, Artificial Sequence
  ENSG00000068650_83 (sequence is synthesized)
acacatttttagaaagcacccttttaacaactgaacatgatttggttgaaaataaacatccccgggtactcttgtggtacatgtttatgattttgatgcttctggtctgaatgtacaacc

SEQ ID NO: 53440 - DNA, 120 bp, Artificial Sequence
  ENSG00000068650_84 (sequence is synthesized)
ttcacattgtacattacaaacactactgtcaagtttatagattttcattttatttgctaattcatttttcagttctctgcactgcttgtaaatcaggcaaacctgataaactgtctaaac

SEQ ID NO: 53441 - DNA, 120 bp, Artificial Sequence
  ENSG00000068650_85 (sequence is synthesized)
agagagagtccagaggggtgtgaagcacaaggctccagtccaggccgcacagagcagcgatgggcccctcctgaaggacctcctacggcggccaaggcgcagttagctccacgctagagc

SEQ ID NO: 53442 - DNA, 120 bp, Artificial Sequence
  ENSG00000068650_86 (sequence is synthesized)
catcaggaaggaccgtgctttgaaatcaaacgtggttattgcatggtttgtgtggaactggggcccaggcaggtgtgagtgcaggtcttctgtgtgccagccggagcacatagcttgtcg

SEQ ID NO: 53443 - DNA, 120 bp, Artificial Sequence
  ENSG00000068650_87 (sequence is synthesized)
cctctccaacagacatggaggccatgaagacatctgctcctgccagcatccgccgctgccccctggtctaaaagtgggctgacctggggacggcccctcatcagacagatgcgtgctgcc

SEQ ID NO: 53444 - DNA, 120 bp, Artificial Sequence
  ENSG00000068650_88 (sequence is synthesized)
ggcctcctgccgctccccttgctggtcagacccacagggcccgtgcacatccggggccccagtgggctgtcagaagccatgcaggccccatccgtatggtgacatcctaggcaacatgtc

SEQ ID NO: 53445 - DNA, 120 bp, Artificial Sequence
  ENSG00000068650_89 (sequence is synthesized)
aaggggatgcaagctgggcacgtccagtactaaatcaacccggtccctgtggggtggggcctgccttccctggggcagtgagttcgccttttgttcaagggtctctgggtaccggtatgg

SEQ ID NO: 53446 - DNA, 120 bp, Artificial Sequence
  ENSG00000068650_90 (sequence is synthesized)
cgttcgagctcactgcacaggaagccagctacagggaggaagctcgtaggtttcccgtccatggcctgtatccctggggcccctgggttcttccctgggatggtgggacagggggacggt

SEQ ID NO: 53447 - DNA, 120 bp, Artificial Sequence
  ENSG00000068650_91 (sequence is synthesized)
cactctgttggtactgaaaaggagaggccctcattcctagacagagacccctcgcctccatatggcttctctggtggggtggatcccgcccggcctgccctcaggacgagggtgtgtcct

SEQ ID NO: 53448 - DNA, 120 bp, Artificial Sequence
  ENSG00000068650_92 (sequence is synthesized)
gagttgagtctagcagttcctgcaggaggcgatggtagtgagtgcatcccagagtggctcaggtcaccccaggcagccccgtgggtatccctgagactgaccatgtgtctcgttctctca

SEQ ID NO: 53449 - DNA, 120 bp, Artificial Sequence
  ENSG00000068650_93 (sequence is synthesized)
ttttgcaggcattgagtcgtcattgctgggtcttgcgtttggtttagtttctcgtcaccccccggctctctgtcctgcccatcacgatcattctcactgctcagatgacaccgttaactg

SEQ ID NO: 53450 - DNA, 120 bp, Artificial Sequence
  ENSG00000068650_94 (sequence is synthesized)
tcagggccctggccttaggattgggagatgaccgttttgaaagacagtgtgaaaggtttggatttcatgaaacgtgatcagttcaggtatcactaatgagtgtcctgacggtgcatgatg

SEQ ID NO: 53451 - DNA, 120 bp, Artificial Sequence
  ENSG00000068650_95 (sequence is synthesized)
agacacggggcagcagggccatgcccatcaccagagccctgagtccacgtgctctgacgcagcgtccaccaggcgctgggtacagcagcctcacgtcgggaagtcccgccaccacttaca

SEQ ID NO: 53452 - DNA, 120 bp, Artificial Sequence
  ENSG00000068650_96 (sequence is synthesized)
ctgctacaggagaaatttatctgttttgcaaaggagcagattcttcgatattcccccgagtgatagaaggcaaagttgaccagatccgagccagagtggagcgtaacgcagtggctgcag

SEQ ID NO: 53453 - DNA, 120 bp, Artificial Sequence
  ENSG00000068650_97 (sequence is synthesized)
gcttcgtccttgctgctggcacatcctggtggccaggtcaccccttcgctagacaaaggcccatggcagcacgcaggtgcattcaggacacccccgtcaccaccctcgtgtgtgaccggg

SEQ ID NO: 53454 - DNA, 120 bp, Artificial Sequence
  ENSG00000068650_98 (sequence is synthesized)
aaggctcatgatgatggtttcatccgttcttctccccgtccctgccctgtgtgtggtgtgcagaaagcatttcttcagctccttcacctccgtcttctaggtgtcatcggcaaggaaggc

SEQ ID NO: 53455 - DNA, 120 bp, Artificial Sequence
  ENSG00000068650_99 (sequence is synthesized)
caactgtcagaaaggaaggggtgaatctgattgcagtcatctcttgcttagctgtgactttgctttttacagtttccattacctacagtcaacccatgcccaaaaatatcaaacgcaaaa

SEQ ID NO: 53456 - DNA, 120 bp, Artificial Sequence
  ENSG00000068650_100 (sequence is synthesized)
ttgcagaaataaacagttcctcaggtttaaattgcatgccattccgagcagcgtgatgaagtctcacgccgtcctgctgtctccttcctgggatgtggcttgtccctttgtccggtgtgc

SEQ ID NO: 53457 - DNA, 120 bp, Artificial Sequence
  ENSG00000068650_101 (sequence is synthesized)
cgatgctgtgtgtacactacctgcccctcagtcactctgtagctgtcttggtgatgaggttgacagatcacaagaagaagggtgaatatgacacaataatatattttaagaggaggaggg

SEQ ID NO: 53458 - DNA, 120 bp, Artificial Sequence
  ENSG00000068650_102 (sequence is synthesized)
agagaccaaattcatgtaactttgattacggtatattattatagttattctatgttttgttgttactctttcactgcacctactttataaattaaactttatcatgggtgtgtatgtata

SEQ ID NO: 53459 - DNA, 120 bp, Artificial Sequence
  ENSG00000068650_103 (sequence is synthesized)
cgaacacacatacccatctagagcatagacagggttcaggaccatccgcagactctgcatccccccagggtctgggaatgtacccctgaggatgaggagggcctgccgtgccgcgggagg

SEQ ID NO: 53460 - DNA, 120 bp, Artificial Sequence
  ENSG00000068650_104 (sequence is synthesized)
agacccccagcccttttctccccccacagaattgagtgtggaaccagtgagaacctttcaggtggaaatgtttgaggaaggattccttattcactgtgcagttcgattctttcccgttta

SEQ ID NO: 53461 - DNA, 120 bp, Artificial Sequence
  ENSG00000068650_105 (sequence is synthesized)
tactgatacctgcattgccttcttgtttctcttggagctgacaaatttcctctatacgttgtctgtcctgagtggccaaaacgtggtcacatgtgcatttcagttgcccctgaaataaga

SEQ ID NO: 53462 - DNA, 120 bp, Artificial Sequence
  ENSG00000068650_106 (sequence is synthesized)
gaaagctttctagaacccattagtgctgttctgccgcacgctgggtgcacgtggatccctcctcccatgtggggtgggccacgtcggtaggtggcggctgcctccctctgtcccgtcacc

SEQ ID NO: 53463 - DNA, 83 bp, Artificial Sequence
  ENSG00000068650_107 (sequence is synthesized)
gatggcatcttggactcactgcagtctaaaactcctaggctcaagctgtcctcccttctcagcctcctgagtagctagaactt

SEQ ID NO: 53464 - DNA, 65 bp, Artificial Sequence
  ENSG00000068650_108 (sequence is synthesized)
ctaaattgcaggcatgagcagtcatgcctgactgtaattactctttagaatggaatcaacaacta

SEQ ID NO: 53465 - DNA, 120 bp, Artificial Sequence
  ENSG00000068650_109 (sequence is synthesized)
ccctgagcctgtcgctgtctcagttctgggctcgggcccctcatgggagcggccctgctgggacagtgttttcccaagacgccccaagccctcgccctggcagctccatgacaccccatg

SEQ ID NO: 53466 - DNA, 120 bp, Artificial Sequence
  ENSG00000068650_110 (sequence is synthesized)
cagactccaacaggggcttcgagcctcttcctgctggggtcccacggatggtgcaggcagaggcccgagcactcctggtggccccgtgtggcccacgtcgctcagtatctttcctcgcct

SEQ ID NO: 53467 - DNA, 120 bp, Artificial Sequence
  ENSG00000068654_0 (sequence is synthesized)
aagcgcacgttgaatcgcgtggtgactccgggcttgaggttgaattaagaatagtcaggtggtgagtggaacgtctcttggggtgtcggaattcaaaacggacctggaggatgttgatct

SEQ ID NO: 53468 - DNA, 120 bp, Artificial Sequence
  ENSG00000068654_1 (sequence is synthesized)
ccaagaacatgccctggcggcggctgcagggcatttccttcgggatgtattcggctgaagagctcaagaaattaagtgttaaatccattacgaaccctcgatacctggacagcctgggga

SEQ ID NO: 53469 - DNA, 120 bp, Artificial Sequence
  ENSG00000068654_2 (sequence is synthesized)
acccatcggcaaacggcctgtacgatttagctttgggccctgcagattccaaagaggtgtgctccacctgcgtgcaggacttcagcaactgttctgggcacctgggccacattgagctcc

SEQ ID NO: 53470 - DNA, 120 bp, Artificial Sequence
  ENSG00000068654_3 (sequence is synthesized)
cactcacagtgtataaccctctcctcttcgataagctgtacctgctgcttcggggctcttgtttaaactgccacatgctgacttgtccccgggccgtgattcacctcttactctgccagc

SEQ ID NO: 53471 - DNA, 120 bp, Artificial Sequence
  ENSG00000068654_4 (sequence is synthesized)
tgagggttctggaagtcggggccctacaagcagtctacgagcttgagagaattctgaacaggtttctggaagaaaatcccgatccctctgcctctgaaattcgggaggaattagaacaat

SEQ ID NO: 53472 - DNA, 120 bp, Artificial Sequence
  ENSG00000068654_5 (sequence is synthesized)
acacaactgaaattgtgcagaacaacctcctggggtcccagggcgcacatgtaaagaacgtgtgtgagagcaagagcaagctcattgctctcttctggaaggcacatatgaatgctaagc

SEQ ID NO: 53473 - DNA, 120 bp, Artificial Sequence
  ENSG00000068654_6 (sequence is synthesized)
gctgtccccactgcaagaccgggcgatccgttgtccgaaaggaacacaacagcaagttgactatcacgtttccagccatggtgcacaggacagctggccagaaggactctgagcccctgg

SEQ ID NO: 53474 - DNA, 120 bp, Artificial Sequence
  ENSG00000068654_7 (sequence is synthesized)
gaattgaggaagctcagataggaaaacgaggatacttaacacccaccagtgcccgcgaacacctttctgccctgtggaagaatgaaggattctttctgaactaccttttttcgggaatgg

SEQ ID NO: 53475 - DNA, 120 bp, Artificial Sequence
  ENSG00000068654_8 (sequence is synthesized)
atgatgatggtatggaatccagattcaatcccagtgtgttctttctagatttcttggtggtgccgccctcaaggtatcgcccagtcagtcgcctaggagaccagatgtttactaatggcc

SEQ ID NO: 53476 - DNA, 120 bp, Artificial Sequence
  ENSG00000068654_9 (sequence is synthesized)
agacggtgaacttgcaggctgtcatgaaggatgtagttctgattcgaaaacttctggcattgatggcccaagaacagaagttgccagaggaagtggccacacccactacagatgaggaaa

SEQ ID NO: 53477 - DNA, 120 bp, Artificial Sequence
  ENSG00000068654_10 (sequence is synthesized)
aagactctttgattgctattgaccgatcctttttgagtacacttccaggccagtccctcatagacaaactttacaacatttggattcgccttcagagccacgtcaatattgtgtttgata

SEQ ID NO: 53478 - DNA, 120 bp, Artificial Sequence
  ENSG00000068654_11 (sequence is synthesized)
gcgagatggacaaactaatgatggacaagtacccaggcattaggcagatcctggagaagaaagaaggcctgttccgaaaacacatgatgggaaagcgagtggactacgctgcgcgctcag

SEQ ID NO: 53479 - DNA, 120 bp, Artificial Sequence
  ENSG00000068654_12 (sequence is synthesized)
tcatctgcccagacatgtacatcaacaccaacgaaattggaattcccatggtgtttgccacaaaactgacctacccacagccagttaccccatggaatgttcaggaacttaggcaagcgg

SEQ ID NO: 53480 - DNA, 120 bp, Artificial Sequence
  ENSG00000068654_13 (sequence is synthesized)
tcatcaacggccctaatgtgcacccaggagcctccatggtcatcaatgaggacggcagccgcacagccctgagcgctgtggacatgacccagcgagaggccgtggccaagcagcttctga

SEQ ID NO: 53481 - DNA, 120 bp, Artificial Sequence
  ENSG00000068654_14 (sequence is synthesized)
ccccagccacgggggcacctaagccccaggggacaaaaattgtgtgccggcatgtgaagaatggggacattctgctactgaaccgacagcccacactgcacagaccctccatccaggccc

SEQ ID NO: 53482 - DNA, 120 bp, Artificial Sequence
  ENSG00000068654_15 (sequence is synthesized)
accgtgcccgcatcctgcctgaagagaaagtgctgcggctccactatgccaactgcaaggcctataatgccgactttgatggagacgagatgaatgcccatttcccccagagtgagctgg

SEQ ID NO: 53483 - DNA, 120 bp, Artificial Sequence
  ENSG00000068654_16 (sequence is synthesized)
gccgggccgaggcctacgtcctggcctgcactgatcagcagtaccttgttcccaaggatggccaaccattggcgggactgatccaggatcacatggtttcaggggcaagcatgactactc

SEQ ID NO: 53484 - DNA, 120 bp, Artificial Sequence
  ENSG00000068654_17 (sequence is synthesized)
ggggttgctttttcacccgggagcactatatggagctggtgtaccgaggactcacggacaaagtggggcgcgtgaagctcctttctccttccatcctgaagccctttccgctgtggacag

SEQ ID NO: 53485 - DNA, 120 bp, Artificial Sequence
  ENSG00000068654_18 (sequence is synthesized)
gaaaacaggttgtgtcaacgctgctcataaatataatcccagaggaccacatcccactgaacttatctggaaaggcgaaaatcactgggaaagcctgggtgaaggaaactcctcgatccg

SEQ ID NO: 53486 - DNA, 120 bp, Artificial Sequence
  ENSG00000068654_19 (sequence is synthesized)
ttcctggctttaaccctgactcgatgtgcgagtcccaggtgatcatcagggaaggggagctgctctgcggagtgctggacaaggcgcactatgggagctccgcctacggcctggtccact

SEQ ID NO: 53487 - DNA, 120 bp, Artificial Sequence
  ENSG00000068654_20 (sequence is synthesized)
gctgctatgagatctatggaggcgagaccagcggcaaggttctaacctgcctggcccgcctcttcaccgcctacctgcagctctacagaggcttcaccttgggcgtggaagacattttgg

SEQ ID NO: 53488 - DNA, 120 bp, Artificial Sequence
  ENSG00000068654_21 (sequence is synthesized)
tgaagccaaaggcagatgtcaagaggcaacgtatcattgaagaatccacccactgcgggccccaggctgtcagggctgcattaaacctgccagaagccgcatcatatgatgaggtccgag

SEQ ID NO: 53489 - DNA, 120 bp, Artificial Sequence
  ENSG00000068654_22 (sequence is synthesized)
gaaaatggcaggatgcccatctgggcaaggaccagagggattttaacatgattgatctgaagttcaaggaggaagtgaaccattacagcaatgagattaacaaggcatgcatgccttttg

SEQ ID NO: 53490 - DNA, 120 bp, Artificial Sequence
  ENSG00000068654_23 (sequence is synthesized)
gcctacacagacagttcccagagaacagcctgcagatgatggtgcagtcgggagccaaaggttcaactgtgaacacgatgcagatctcgtgcctgctgggccagattgaactggaaggtc

SEQ ID NO: 53491 - DNA, 120 bp, Artificial Sequence
  ENSG00000068654_24 (sequence is synthesized)
ggagacccccgctgatggcgtctggcaagtcactgccctgctttgagccttatgagttcacccccagggctggtggctttgtcactggcaggttcctcaccggcatcaaacctcctgagt

SEQ ID NO: 53492 - DNA, 120 bp, Artificial Sequence
  ENSG00000068654_25 (sequence is synthesized)
tcttcttccactgcatggcaggacgagagggcctggtggacactgctgtgaaaaccagccgctcaggctatctccaaaggtgcatcatcaagcacctagaggggctggtcgtgcagtatg

SEQ ID NO: 53493 - DNA, 120 bp, Artificial Sequence
  ENSG00000068654_26 (sequence is synthesized)
atctcacggtccgtgacagtgacggcagtgtggtgcagttcctgtatggggaggatggcctggacatccccaagacacagttcctgcagcccaagcagttccccttcctggccagcaact

SEQ ID NO: 53494 - DNA, 120 bp, Artificial Sequence
  ENSG00000068654_27 (sequence is synthesized)
acgaggtgataatgaaatcacagcatctccatgaagttttatccagagcagatcccaaaaaagctctccaccacttcagagctatcaaaaaatggcaaagcaagcaccccaacaccctgc

SEQ ID NO: 53495 - DNA, 120 bp, Artificial Sequence
  ENSG00000068654_28 (sequence is synthesized)
tgagaagaggcgccttcttgagttattcccagaaaattcaggaagctgtgaaagccctgaaacttgagagtgaaaaccgcaatggccgcagccctgggactcaggagatgctgaggatgt

SEQ ID NO: 53496 - DNA, 120 bp, Artificial Sequence
  ENSG00000068654_29 (sequence is synthesized)
ggtatgagttggatgaggaaagccgaaggaaataccagaagaaggcggccgcttgtcctgaccccagtctgtctgtctggcgtcctgacatctactttgcatcagtgtcagaaacatttg

SEQ ID NO: 53497 - DNA, 120 bp, Artificial Sequence
  ENSG00000068654_30 (sequence is synthesized)
aaacaaaggttgatgactacagtcaagagtgggcagctcaaacagagaagagttatgagaaatcagagctttctctcgacaggttgaggaccttgctgcagctgaagtggcagcgctcac

SEQ ID NO: 53498 - DNA, 120 bp, Artificial Sequence
  ENSG00000068654_31 (sequence is synthesized)
tgtgtgagccgggcgaggctgtgggcctgctggctgcccagagcatcggagagccctccacccagatgaccctcaacaccttccactttgcaggcagaggcgagatgaacgtcaccctgg

SEQ ID NO: 53499 - DNA, 120 bp, Artificial Sequence
  ENSG00000068654_32 (sequence is synthesized)
gcattccaaggttgcgggagattctcatggtggccagcgccaacatcaagacacccatgatgagcgtgcccgtgctcaacaccaagaaagccctgaagagagtgaaaagcctgaagaagc

SEQ ID NO: 53500 - DNA, 120 bp, Artificial Sequence
  ENSG00000068654_33 (sequence is synthesized)
aactcaccagggtgtgcttgggggaggtgttgcagaaaattgacgtccaggagtccttctgtatggaagaaaaacagaacaaattccaggtgtaccagctgcggtttcagttcctgccac

SEQ ID NO: 53501 - DNA, 120 bp, Artificial Sequence
  ENSG00000068654_34 (sequence is synthesized)
atgcatattaccagcaggagaagtgcctgagacccgaggacatcctgcgcttcatggaaacaagattctttaaacttctgatggaatccatcaaaaagaagaataataaagcatcagctt

SEQ ID NO: 53502 - DNA, 120 bp, Artificial Sequence
  ENSG00000068654_35 (sequence is synthesized)
tcaggaacgtaaacactcgaagagctacacagcgggatctggacaacgctggggagttggggaggagtcggggagagcaggagggtgatgaggaagaggaggggcacattgtggatgctg

SEQ ID NO: 53503 - DNA, 120 bp, Artificial Sequence
  ENSG00000068654_36 (sequence is synthesized)
aagctgaggagggggacgccgatgcctctgatgccaaacgcaaggagaagcaggaggaggaggttgattatgagagtgaggaagaggaggagagggagggcgaggagaacgacgatgaag

SEQ ID NO: 53504 - DNA, 120 bp, Artificial Sequence
  ENSG00000068654_37 (sequence is synthesized)
acatgcaggaggaacgaaatccccacagggaaggtgctcgaaagacccaagagcaagatgaagaggtgggcttaggcactgaggaggacccgtcccttcccgccctcctgacgcagcccc

SEQ ID NO: 53505 - DNA, 120 bp, Artificial Sequence
  ENSG00000068654_38 (sequence is synthesized)
ggaaacccacccacagccaggagccccaggggcccgaggccatggagcgccgggtccaggctgtgcgtgagatccacccgttcatagatgactaccagtacgacaccgaggagagcctgt

SEQ ID NO: 53506 - DNA, 120 bp, Artificial Sequence
  ENSG00000068654_39 (sequence is synthesized)
ggtgccaggtgacagtgaagctccctctgatgaagatcaactttgacatgagctccctggtagtatctttggcccatggtgccgtcatctatgcgaccaagggcatcactcggtgcctcc

SEQ ID NO: 53507 - DNA, 120 bp, Artificial Sequence
  ENSG00000068654_40 (sequence is synthesized)
tgaatgaaacaaccaacaataagaacgagaaggagcttgtgctaaacacagaaggaatcaacctcccagagctattcaagtatgcagaggtcctggatctgcgccgcctctactccaacg

SEQ ID NO: 53508 - DNA, 120 bp, Artificial Sequence
  ENSG00000068654_41 (sequence is synthesized)
acatccacgccatagccaacacgtatggcattgaggccgcgctgcgggtgatcgagaaggagatcaaggatgtgtttgccgtgtatggcatcgcggtcgaccctcgccatctctccctgg

SEQ ID NO: 53509 - DNA, 120 bp, Artificial Sequence
  ENSG00000068654_42 (sequence is synthesized)
ttgctgattatatgtgcttcgagggtgtttacaagccactgaatcgctttgggatccggtcaaactcttccccgctacagcagatgacatttgaaaccagcttccagtttctgaagcaag

SEQ ID NO: 53510 - DNA, 120 bp, Artificial Sequence
  ENSG00000068654_43 (sequence is synthesized)
ccaccatgctgggatcccacgatgagctgaggtctccttctgcctgccttgtggtcgggaaggtcgtcaggggcgggacaggcctgttcgagctcaagcagcctctgagatagcagctac

SEQ ID NO: 53511 - DNA, 120 bp, Artificial Sequence
  ENSG00000068654_44 (sequence is synthesized)
cccggcaccatctgcccagctccaaggacccttggtgagggcgtggcccagcctgccttctgcatgagaggaccaggagactggaatccagggcagttccaagtgacagtacagagcaca

SEQ ID NO: 53512 - DNA, 120 bp, Artificial Sequence
  ENSG00000068654_45 (sequence is synthesized)
gcagcgaccttgggcctgaaagcagtgggcctctgagctgggccagcttcacctggaaagtgacagagttgctcatccttgcccctccctgtctctggatttttatcaaggtttaccaag

SEQ ID NO: 53513 - DNA, 120 bp, Artificial Sequence
  ENSG00000068654_46 (sequence is synthesized)
tcttctgagtccccctgagatggctggggcctcacctgtgctgcaggaggcctctgtggcataacccctaaggagaagtcctgattcacgattcactgagaagaccaaggggaagccatg

SEQ ID NO: 53514 - DNA, 120 bp, Artificial Sequence
  ENSG00000068654_47 (sequence is synthesized)
ctttgctgctggggaccccaggcacctccagagtagggaagcggggttcttttgctgtgagtggccagggacaacagacaagattcctgggggctcccgatgagcaggaacgtggagcct

SEQ ID NO: 53515 - DNA, 120 bp, Artificial Sequence
  ENSG00000068654_48 (sequence is synthesized)
gctgcccaaggcctgctccttccggctgctccagcccctgggggcagagtccacaaagagtccccatcaagacttcttccctgagtcaagtacagcgtagcatagtcctccacccaccca

SEQ ID NO: 53516 - DNA, 120 bp, Artificial Sequence
  ENSG00000068654_49 (sequence is synthesized)
acctctctgcctggccagggtcctggccctgccactgtgtggcgaggtgtccttctagaccacatcagccccaaggctgggagcagtcgctccagggccgcagcagttcactcccacaca

SEQ ID NO: 53517 - DNA, 120 bp, Artificial Sequence
  ENSG00000068654_50 (sequence is synthesized)
tagaacccaggtcactgctggggcgattgaacaggttgcctggcttttctctgctgtcagtttggtgtggaggcctatgttctgccccatacaccccacaggccctgcttatgggaagga

SEQ ID NO: 53518 - DNA, 120 bp, Artificial Sequence
  ENSG00000068654_51 (sequence is synthesized)
acacaggcctccagcccagaggactgtgccgccctgttcttggccgtccacgtttcctctccctctagcaccagcaatacatttccctggcatggacagaaaagacagagaggacttata

SEQ ID NO: 53519 - DNA, 120 bp, Artificial Sequence
  ENSG00000068654_52 (sequence is synthesized)
caaaggctttgtaaaaccagaggctagcttctatctttgtctactgttatttcagctcagggcgggtaattaacatcattggaactagctattaggaaagaaaaaaaacttggttttttt

SEQ ID NO: 53520 - DNA, 120 bp, Artificial Sequence
  ENSG00000068654_53 (sequence is synthesized)
tacaacaattttttcccttggtttgcagtttctgcatttggatttgagaacccagggcggggattttcttggcacagtcaggtcttgggtccctcttcctgtgctttcttgtctgaggcc

SEQ ID NO: 53521 - DNA, 120 bp, Artificial Sequence
  ENSG00000068654_54 (sequence is synthesized)
ttagggggaagagctcagcctctgcagcctcctccacctctgcccctggcctgcctctgctgtgacctccttccagagctagctgctggccctgtggccaggagaagcagaggggagaag

SEQ ID NO: 53522 - DNA, 120 bp, Artificial Sequence
  ENSG00000068654_55 (sequence is synthesized)
cctttatgcagaagctgtgctagccttggtctggggtggggaggctgctgctgtgaccttaggggtagggttggggatcaagggaggctttgtcaagggagagtgaccatgttgctccct

SEQ ID NO: 53523 - DNA, 120 bp, Artificial Sequence
  ENSG00000068654_56 (sequence is synthesized)
acatccatgcaataggacccagcctgcacctcctaggcctacactggggaaagcctgacagaaatcagtacctcctaacggggtctgccaggttcaccaaggcatgggcacagaggaata

SEQ ID NO: 53524 - DNA, 120 bp, Artificial Sequence
  ENSG00000068654_57 (sequence is synthesized)
tgacagttttgaggcaggcaggaagggcccagcctgcagggtaagacattcattctttgagttaaaggccatattcacttgatgatttctacacacactagaattgtgagagtgtccttg

SEQ ID NO: 53525 - DNA, 120 bp, Artificial Sequence
  ENSG00000068654_58 (sequence is synthesized)
aaggagatcacaaagtaacctggtgactgtggcacagggtccgtggattccatctctcccaggcactgagggcgcagaggcgaaggagcaagccctgcatattggcagggctgtgaccat

SEQ ID NO: 53526 - DNA, 120 bp, Artificial Sequence
  ENSG00000068654_59 (sequence is synthesized)
cgcacttagatcagacccccgacctgtgttgggatgtgagggatgccctcctgccccacccatccacatggttcctgggcagctctgttttattcctgtgtctttcctgatggatgagta

SEQ ID NO: 53527 - DNA, 120 bp, Artificial Sequence
  ENSG00000068654_60 (sequence is synthesized)
ttaagacagcatgtctggtttttaaacagacatttgggagcttgcacatcctgatgagcagggactcactgtggtggccttagggaattacacgctcactttggtggttctctatgctcg

SEQ ID NO: 53528 - DNA, 120 bp, Artificial Sequence
  ENSG00000068654_61 (sequence is synthesized)
gaagcctctgagagtggccttggcagcttaagatggcagaggctttggagtcttcttaggactgtaagtgcccattgaggatgcatttgagttttggaaagtaggcccaagtcaaatctg

SEQ ID NO: 53529 - DNA, 120 bp, Artificial Sequence
  ENSG00000068654_62 (sequence is synthesized)
atggatggattcaagaacatggactaatctgcgttgtcatttttaatcaaaatgtaatggagattgatcatctggtggggttcacaaacttttcatgagagctgtgagttctttttttga

SEQ ID NO: 53530 - DNA, 120 bp, Artificial Sequence
  ENSG00000068654_63 (sequence is synthesized)
ttcacaaacttttcatgagagctgtgagttctttttttgagatgcacttttgcacttgttacccaggctgagtgcaatggcgcaatctcggctccactgcaacctccatctcccgagttc

SEQ ID NO: 53531 - DNA, 120 bp, Artificial Sequence
  ENSG00000068654_64 (sequence is synthesized)
caaagtgctgggtttacaggcgtgagctactgtgccggccagagctatgagttctttcagaatcctcagatgccattagctagccactgtttggacatccttctcaccttgccctttggg

SEQ ID NO: 53532 - DNA, 120 bp, Artificial Sequence
  ENSG00000068654_65 (sequence is synthesized)
gtgatatccatacctacttgcttgcttctaacagtttttttatttgttttgtagagacgggttttggtttattgctcaggctggtttcaaactcctaggctcaagcggtcctcccactgt

SEQ ID NO: 53533 - DNA, 120 bp, Artificial Sequence
  ENSG00000068654_66 (sequence is synthesized)
ggcctcccaaagtgctgggtggtgtgagccaccgtgcctggccagttaattttttttagtgtctcttttttgggttctcaccagaaacactatcagcattcccacagatattcctgtgag

SEQ ID NO: 53534 - DNA, 120 bp, Artificial Sequence
  ENSG00000068654_67 (sequence is synthesized)
tctttgaaacattttctatcctgcattgagtaagaataaaaccgaggaaggggtgaagcaccttgtctcatccccagtctggaacttgaaccttcttttctcttcactttgccctacccc

SEQ ID NO: 53535 - DNA, 120 bp, Artificial Sequence
  ENSG00000068654_68 (sequence is synthesized)
caaataatatgtacaaatgtctgtatccattgagcactaactccctattccttccacctccccagcccctggcaaccactgttctacgttctgtctctacgaatttgacttctctaggtc

SEQ ID NO: 53536 - DNA, 80 bp, Artificial Sequence
  ENSG00000068654_69 (sequence is synthesized)
gttctacgttctgtctctacgaatttgacttctctaggtccctcatacaagtggaaaagtacagcatgtctttttgtgac

SEQ ID NO: 53537 - DNA, 120 bp, Artificial Sequence
  ENSG00000068654_70 (sequence is synthesized)
tgctgatacctcctcatgtgtatataccgtattttgtttaatcactcatctgttggtggacacttgggttgcctccacctcttggctgttgcaaataacgctgtgaacatggatatacag

SEQ ID NO: 53538 - DNA, 85 bp, Artificial Sequence
  ENSG00000068654_71 (sequence is synthesized)
cttggctgttgcaaataacgctgtgaacatggatatacagatatctgaggccaggccaggcgttcacacctgtaatcccaatacg

SEQ ID NO: 53539 - DNA, 120 bp, Artificial Sequence
  ENSG00000068654_72 (sequence is synthesized)
tgagattccgtctcaaaaaaaaaaaaaaacaaaaactcagaccctgctttcctttgaatatatactagaagtggaattgctggatcatatggtaattctttaatttttctgggggaactg

SEQ ID NO: 53540 - DNA, 120 bp, Artificial Sequence
  ENSG00000068654_73 (sequence is synthesized)
atggtaattctttaatttttctgggggaactgctgtcccattttccacagcagctacaccattttatgttcccaccaacggtgtacaacaatttcaatttctccacatccttgttcttgt

SEQ ID NO: 53541 - DNA, 120 bp, Artificial Sequence
  ENSG00000068654_74 (sequence is synthesized)
taatagtagccaccctaatgtgtatgaggtgccatctcgtggtttggtgtgggctgtgtttcaatcagatgttgggacccttaagtgttctgcacctggggagagttaggaaccacttaa

SEQ ID NO: 53542 - DNA, 120 bp, Artificial Sequence
  ENSG00000068654_75 (sequence is synthesized)
ggagtgtctgttgcttgccaatcttaaaatttttagtttgcacctgaatcaggggctgtcagagtccagactgctcttgaaatagaaaagactggtcgttaaaggctggttcgttgagtc

SEQ ID NO: 53543 - DNA, 120 bp, Artificial Sequence
  ENSG00000068654_76 (sequence is synthesized)
tttcatcgttgagtgataccacctctgcagatggctcagtggggcagccccgtaccacagcctgcccttgaggttgtgtagtttagataggtcacagagttgctgggcctaccgcaggtc

SEQ ID NO: 53544 - DNA, 120 bp, Artificial Sequence
  ENSG00000068654_77 (sequence is synthesized)
tcctgaccctggtgcagttttacttcaattacaaccaccaaaatagctacagtcaaaaattccaaagttcctacaccatcaacctccaccccacttccgtccaaagtccacttagaggct

SEQ ID NO: 53545 - DNA, 88 bp, Artificial Sequence
  ENSG00000068654_78 (sequence is synthesized)
aacctccaccccacttccgtccaaagtccacttagaggctctcagttttggaccttagaaacacttagggagctttttaaaaagatcg

SEQ ID NO: 53546 - DNA, 88 bp, Artificial Sequence
  ENSG00000068654_79 (sequence is synthesized)
aggaaaaaaaaaaagattgattctggccgggcacagtggctcacgcttacagtcccagcactttaagagactcaggcaggaggatcac

SEQ ID NO: 53547 - DNA, 120 bp, Artificial Sequence
  ENSG00000068654_80 (sequence is synthesized)
acagtcccagcactttaagagactcaggcaggaggatcacttgagcttaggagtttgagactagcctgggcaacccagtgagaccccgtatctacaaaaattagccaggtgttgtgacat

SEQ ID NO: 53548 - DNA, 65 bp, Artificial Sequence
  ENSG00000068654_81 (sequence is synthesized)
gagcaagtcgggtgacaagagtgagaccccgtctgaaaaaaagattgatcccaaggccttgccca

SEQ ID NO: 53549 - DNA, 120 bp, Artificial Sequence
  ENSG00000068654_82 (sequence is synthesized)
accccgtctgaaaaaaagattgatcccaaggccttgcccagattctgattttattggcctggagtgtggcctaggcattagaaaatcttcaagagagtctaaggtgcagcggaattgaga

SEQ ID NO: 53550 - DNA, 120 bp, Artificial Sequence
  ENSG00000068654_83 (sequence is synthesized)
gccacggacagaaaaagccctaaattgtggaaatgcacagccaccgtcaccacctatcggtacgatgacatctcaaggagtcactggccctaggtttctgcagtaggatcttaagatctg

SEQ ID NO: 53551 - DNA, 120 bp, Artificial Sequence
  ENSG00000068654_84 (sequence is synthesized)
atctctgccctcaagtgagtgcacgtgcagtaaagctgtcatcgtgccatgacagatgtctgcaaggactttacagtggggtccaaaggatgccaccatcagctccacctggggctcaac

SEQ ID NO: 53552 - DNA, 120 bp, Artificial Sequence
  ENSG00000068654_85 (sequence is synthesized)
aaagcctgaaagaagaaagggatgatgcttccagcagaaacctggaggcctgcagctctgccagcccagcacagcaagcgaggccatttgtccagcaggggcagaaggagggaactcagc

SEQ ID NO: 53553 - DNA, 120 bp, Artificial Sequence
  ENSG00000068654_86 (sequence is synthesized)
cagccagcgtttcctacaagcagctccatgagaggtttccacttaaaatgctaaatcataattatttaatcagattcgttccttaagttctttaagcagcatcgctgtcctaccacgagt

SEQ ID NO: 53554 - DNA, 120 bp, Artificial Sequence
  ENSG00000068654_87 (sequence is synthesized)
ggtcatcaaggagcagggtttaactcaactctgagttacccggcagggtacctgggtaactgcctgggttgaggtacccagcaggcttcatgtgcatgtgcacactgccccctgatagga

SEQ ID NO: 53555 - DNA, 120 bp, Artificial Sequence
  ENSG00000068654_88 (sequence is synthesized)
cctggtttattcacaggctcaggtgtcactgcagctccccagtgactatcttcgcgcaagttggactcaatggcctgggaggtttgtcccagccgacagatacctgaccatgcccatcct

SEQ ID NO: 53556 - DNA, 120 bp, Artificial Sequence
  ENSG00000068654_89 (sequence is synthesized)
caccattccctcccccatgctgcatccatccaaccttgatctccactgtgtcccaggcaccctaagatgcacaagctatgtgggccctgccctcacagaacttgtagtcttctgccccaa

SEQ ID NO: 53557 - DNA, 120 bp, Artificial Sequence
  ENSG00000068654_90 (sequence is synthesized)
acaagccagttcaccgtcttcatgatcaggccaaaggttgaggtacccagcaggcttcatatgcacatgcacactgtcccctataggaccatgccttgcccagctggctgcactctagag

SEQ ID NO: 53558 - DNA, 120 bp, Artificial Sequence
  ENSG00000068654_91 (sequence is synthesized)
ggtgctttgtaggaaggacagagtggagaggacagtggggaggtacttgggtgttcaacagccagaagggagggaaactgaaaaagaatcaggagtccagccatcccctccccacctcct

SEQ ID NO: 53559 - DNA, 120 bp, Artificial Sequence
  ENSG00000068654_92 (sequence is synthesized)
gcccccacttccaccctggctgctggccctttgcccttgaatatgggtgatataggtgtggctattcagttccagtcacagtgctgcctctatgtcttttgcaagctggggtcttcctta

SEQ ID NO: 53560 - DNA, 120 bp, Artificial Sequence
  ENSG00000068654_93 (sequence is synthesized)
ctcagaaggcctggaggccctgccagatgctgccttccggactggctgcccgctgcagtgttttcacgggagccaagccagccccgggcctgtagcctcccatgtgacaaagtttcagac

SEQ ID NO: 53561 - DNA, 120 bp, Artificial Sequence
  ENSG00000068654_94 (sequence is synthesized)
accacagtcctcagctggaccacagtaaacacttgccttccccaacccatgattcttgcttggaaacatgaacctgatgttccacgtgcgttcagccaatcaaacctcaagaatgtgatt

SEQ ID NO: 53562 - DNA, 120 bp, Artificial Sequence
  ENSG00000068654_95 (sequence is synthesized)
gagcagtgaggctgcgttttgggcaagacactgagctctgaaataagacttttcttggaatctcaagccctcaacttacagtgggaccctaagaaatgcacttcagtttccttttatgta

SEQ ID NO: 53563 - DNA, 120 bp, Artificial Sequence
  ENSG00000068654_96 (sequence is synthesized)
aaatggtggtaaaattaattgtgttcattaaattgcacacaactatacatgtttacctatacactaagtggttctcaacttggggcaatttgccccccaggggacattcagcagtgtctg

SEQ ID NO: 53564 - DNA, 120 bp, Artificial Sequence
  ENSG00000068654_97 (sequence is synthesized)
cggacattttttgttgctactggagggaggtgctactggcatctagggagtggaggctagagatgctgctaaactacagtccacaggacagtctccacagcaaagaattgtccagcccca

SEQ ID NO: 53565 - DNA, 120 bp, Artificial Sequence
  ENSG00000068654_98 (sequence is synthesized)
aatatcaataatgccgaggttgaggaaaccctgccacatacacatagatgcgggttaacattgtttattttacaaagtggaatcatttacattttagccattctgatagatgaagcagtg

SEQ ID NO: 53566 - DNA, 120 bp, Artificial Sequence
  ENSG00000068654_99 (sequence is synthesized)
cactctgttgcccaggctggagtgcagggttgcaatcacggctcacagcagcctcgaagtcccaggaccaagcaaccctcccaccgcagccttccaagtaactgggactacaggcacaca

SEQ ID NO: 53567 - DNA, 120 bp, Artificial Sequence
  ENSG00000068654_100 (sequence is synthesized)
ctcgaagtcccaggaccaagcaaccctcccaccgcagccttccaagtaactgggactacaggcacacaacaccatgcccagctaattttttaatttttttgtagagacggggtttcacca

SEQ ID NO: 53568 - DNA, 84 bp, Artificial Sequence
  ENSG00000068654_101 (sequence is synthesized)
acacgatctgctgccttcaatgcccagcctcatttgtacttcagtttgcaattctctattaataaatctaagcatcttttcaca

SEQ ID NO: 53569 - DNA, 120 bp, Artificial Sequence
  ENSG00000068654_102 (sequence is synthesized)
attggctgaagcggaagaagacgaaagcaatcataaaatgggaggttgcaagctcatggtttgaaagacttcgtcacggaagctaaaagctctatacacccgatttgcctcggaggaatt

SEQ ID NO: 53570 - DNA, 120 bp, Artificial Sequence
  ENSG00000068654_103 (sequence is synthesized)
ttcctaaatgattattttgatgtcttatatatctttgattgttttcaaaacaaaagagcgagcagagagtcgtacaactatttgttccccccccatgtagaagtgatctcatccacgtaa

SEQ ID NO: 53571 - DNA, 120 bp, Artificial Sequence
  ENSG00000068654_104 (sequence is synthesized)
agatttcatggcctctagagaataactaagggtggacggagttagatgttttgccccagttctgttcacaggaggcccaggccagcccagcagattctttaaacttctgatggaatccat

SEQ ID NO: 53572 - DNA, 120 bp, Artificial Sequence
  ENSG00000068654_105 (sequence is synthesized)
gcgagatggacaaactaatgatggacaagtacccaggcattaggcaggtgagcaaaaaactggattcccattgctagctacagaagataaataataaacattgtgtattgaaacaagaaa

SEQ ID NO: 53573 - DNA, 120 bp, Artificial Sequence
  ENSG00000068654_106 (sequence is synthesized)
gagtttgaagcagtcttgatataggatagtgggcaaatggcaaacgtagaagccagtgctaaaccctggtcatgtgctttgggaagcagttggctcccaagcaagaacatagtgaggatg

SEQ ID NO: 53574 - DNA, 120 bp, Artificial Sequence
  ENSG00000068654_107 (sequence is synthesized)
tgggcaagacaagacagggatataagaagggctcttgatagaaagtggcttccaggcaggcgattagggattagagtttgacttaagatttattttcattcttcttgtgttgtctgtttt

SEQ ID NO: 53575 - DNA, 120 bp, Artificial Sequence
  ENSG00000068697_0 (sequence is synthesized)
gaagacgcgtcgttgggttttggaggccgtgaaacagccgtttgagtttggctgcgggtggagaacgtttgtcaggggcccggccaagaaggaggcccgcctgttacgatggtgtccatg

SEQ ID NO: 53576 - DNA, 120 bp, Artificial Sequence
  ENSG00000068697_1 (sequence is synthesized)
agtttcaagcggaaccgcagtgaccggttctacagcacccggtgctgcggctgttgccatgtccgcaccgggacgatcatcctggggacctggtacatggtagtaaacctattgatggca

SEQ ID NO: 53577 - DNA, 120 bp, Artificial Sequence
  ENSG00000068697_2 (sequence is synthesized)
attttgctgactgtggaagtgactcatccaaactccatgccagctgtcaacattcagtatgaagtcatcggtaattactattcgtctgagagaatggctgataatgcctgtgttcttttt

SEQ ID NO: 53578 - DNA, 120 bp, Artificial Sequence
  ENSG00000068697_3 (sequence is synthesized)
gccgtctctgttcttatgtttataatcagttcaatgctggtttatggagcaatttcttatcaagtgggttggctgattccattcttctgttaccgactttttgacttcgtcctcagttgc

SEQ ID NO: 53579 - DNA, 120 bp, Artificial Sequence
  ENSG00000068697_4 (sequence is synthesized)
ctggttgctattagttctctcacctatttgccaagaatcaaagaatatctggatcaactacctgattttccctacaaagatgacctcctggccttggactccagctgcctcctgttcatt

SEQ ID NO: 53580 - DNA, 120 bp, Artificial Sequence
  ENSG00000068697_5 (sequence is synthesized)
attaactgtgtttggaactgctataaatacatcaacaaccgaaacgtgccggagattgctgtgtaccctgcctttgaagcacctcctcagtacgttttgccaacctatgaaatggccgtg

SEQ ID NO: 53581 - DNA, 120 bp, Artificial Sequence
  ENSG00000068697_6 (sequence is synthesized)
aaaatgcctgaaaaagaaccaccacctccttacttacctgcctgaagaaattctgcctttgacaataaatcctataccagctttttgtttgtttatgttacagaatgctgcaattcaggg

SEQ ID NO: 53582 - DNA, 120 bp, Artificial Sequence
  ENSG00000068697_7 (sequence is synthesized)
ctcttcaaacttgtttgatataaaatatgttgtcttttgtttaagcatttattttcaaacactaaggagctttttgacatctgttaaacgtctttttgtttttttgttaagtcttttaca

SEQ ID NO: 53583 - DNA, 120 bp, Artificial Sequence
  ENSG00000068697_8 (sequence is synthesized)
ttttaatagtttttgaagacaatctaggttaagcaagagcaaagtgccattgtttgcctttaattggggggtgggaagggaaagagggtacttgccacatagtttcctttttaactgcac

SEQ ID NO: 53584 - DNA, 120 bp, Artificial Sequence
  ENSG00000068697_9 (sequence is synthesized)
tttctttatataatcgtttgcattttgttacttgctaccctgagtactttcaggaagactgacttaaatattcggggtgagtaagtagttgggtataagatctgaacttttcatctgcag

SEQ ID NO: 53585 - DNA, 120 bp, Artificial Sequence
  ENSG00000068697_10 (sequence is synthesized)
aggcaagaaaaatatttgacattgtgacttgactgtggaagatgatggttgcatgtttctagtttgtatatgtttccatctttgtgataagatgatttaataaatctctttaaatactta

SEQ ID NO: 53586 - DNA, 120 bp, Artificial Sequence
  ENSG00000068697_11 (sequence is synthesized)
catgcattaatggtgataaggcttaaaatttaaaagcactttgaattaaattctgcttatacatttttattaaatatcacttttgactttggtgcctttgtattcttcagatgctcttca

SEQ ID NO: 53587 - DNA, 120 bp, Artificial Sequence
  ENSG00000068697_12 (sequence is synthesized)
ggttatcagcaagtgctagtgcgatggctgacttgtaaatgtgtgtgtgtttctttaatagcctgattttccctacaaagatgacctcctggccttggactccagctgcctcctgttcat

SEQ ID NO: 53588 - DNA, 120 bp, Artificial Sequence
  ENSG00000068724_0 (sequence is synthesized)
gtggcagcagctgcagcggcggcggcggcggcagcgccaggagctgctacagcagaggcggaggttgctcctgtacgcgtacgggccgctcggccggagccgcagcccggaggcgccggg

SEQ ID NO: 53589 - DNA, 80 bp, Artificial Sequence
  ENSG00000068724_1 (sequence is synthesized)
cgcagcccggaggcgccgggcggtgcgctgggagctgctggtgctgctgctgctgctgctgcccaccctccgccgcccgg

SEQ ID NO: 53590 - DNA, 120 bp, Artificial Sequence
  ENSG00000068724_2 (sequence is synthesized)
tgcgccccagccaggacgccgcccccggccgggtctccacttcttggccgcaccttccatgacagcgcccgcgagaagatggctgcgaagggcgcgcacggctcctacctgaaggtggag

SEQ ID NO: 53591 - DNA, 120 bp, Artificial Sequence
  ENSG00000068724_3 (sequence is synthesized)
agcgagctggagcgctgccgcgccgagggccactgggaccgcatgccggagctggtccggcagctgcagacgctgagcatgcccggcggcggaggtaacaggcgaggcagcccgagcgca

SEQ ID NO: 53592 - DNA, 120 bp, Artificial Sequence
  ENSG00000068724_4 (sequence is synthesized)
gcgttcacctttccggacaccgatgactttgggaaattgctgctggctgaggccctcctggagcagtgtttgaaggagaaccatgccaaaataaaagactccatgcctttgctggagaag

SEQ ID NO: 53593 - DNA, 120 bp, Artificial Sequence
  ENSG00000068724_5 (sequence is synthesized)
aatgagccgaagatgagcgaagccaaaaattatctaagcagtatccttaaccatgggaggctctcgccacagtacatgtgtgaggccatgctgatcctgggcaaactgcattacgtggag

SEQ ID NO: 53594 - DNA, 120 bp, Artificial Sequence
  ENSG00000068724_6 (sequence is synthesized)
ggctcataccgagatgccatcagcatgtacgcacgggccgggattgatgacatgtccatggagaacaagcccctgtatcagatgcggctgctgtcggaggcttttgtcatcaaaggcctc

SEQ ID NO: 53595 - DNA, 120 bp, Artificial Sequence
  ENSG00000068724_7 (sequence is synthesized)
tctctggaacgcctacccaactccatcgcctcccgcttccgcctgacagagagggaggaggaagtgatcacctgttttgagagggcctcctggatcgctcaggtgttcctgcaggaattg

SEQ ID NO: 53596 - DNA, 120 bp, Artificial Sequence
  ENSG00000068724_8 (sequence is synthesized)
gagaagaccacaaataacagcacgtcgaggcatctgaaaggctgtcacccgcttgactatgagctcacctacttcctggaagctgccctccagagcgcctatgtgaaaaacctgaagaag

SEQ ID NO: 53597 - DNA, 120 bp, Artificial Sequence
  ENSG00000068724_9 (sequence is synthesized)
gggaacatcgtgaagggcatgagagagctccgggaggtgctgcggactgtggagaccaaagcaactcagaacttcaaagtgatggcggccaagcacctggcgggggtcctgctgcactcc

SEQ ID NO: 53598 - DNA, 120 bp, Artificial Sequence
  ENSG00000068724_10 (sequence is synthesized)
ctgagtgaggagtgctactggagccccctgtcccaccctctgcctgagttcatgggcaaggaggagagttctttcgccactcaggccctgcggaaacctcacctctatgaaggagacaac

SEQ ID NO: 53599 - DNA, 120 bp, Artificial Sequence
  ENSG00000068724_11 (sequence is synthesized)
ctctactgccccaaggacaacatcgaggaagccctcctgctcctcctcatcagcgaatccatggcaactcgagatgtggtgctgagccgggtgccggagcaggaggaggaccggacagtg

SEQ ID NO: 53600 - DNA, 120 bp, Artificial Sequence
  ENSG00000068724_12 (sequence is synthesized)
agcttgcagaatgccgcagccatctatgacctcctgagcatcacgttgggcagaaggggacagtacgtcatgctctcggagtgcctggagcgagccatgaagtttgcgtttggagaattt

SEQ ID NO: 53601 - DNA, 120 bp, Artificial Sequence
  ENSG00000068724_13 (sequence is synthesized)
cacctttggtaccaggtggccctctccatggtggcttgtgggaagtcagcctacgctgtgtccctgctgcgggagtgtgtgaagttgcggccctcggaccccaccgtgcccctgatggcc

SEQ ID NO: 53602 - DNA, 120 bp, Artificial Sequence
  ENSG00000068724_14 (sequence is synthesized)
gcgaaggtctgcatcgggtcccttcgctggctagaggaagcagagcactttgccatgatggtgatcagcctcggagaggaagccggggagttcctccccaagggctacctggctctgggt

SEQ ID NO: 53603 - DNA, 120 bp, Artificial Sequence
  ENSG00000068724_15 (sequence is synthesized)
ctcacctatagcctgcaggccaccgacgccaccctgaagtccaagcaagatgaattgcaccggaaggcactgcagacgctggagagggctcagcagctggcgcccagtgacccccaggtc

SEQ ID NO: 53604 - DNA, 120 bp, Artificial Sequence
  ENSG00000068724_16 (sequence is synthesized)
atcctctatgtctcgctgcagctggccctcgtccgacagatctccagtgccatggagcagctgcaggaggccctgaaggtacgcaaggatgatgcccacgccctccacctgctggcactg

SEQ ID NO: 53605 - DNA, 120 bp, Artificial Sequence
  ENSG00000068724_17 (sequence is synthesized)
ctcttctctgcccagaagcaccaccagcatgccctggatgttgtcaacatggccatcaccgagcaccctgagaacttcaacctgatgttcaccaaggtgaagctggagcaggtgctgaaa

SEQ ID NO: 53606 - DNA, 120 bp, Artificial Sequence
  ENSG00000068724_18 (sequence is synthesized)
ggcccagaggaagccctcgtgacctgcagacaagtgctgaggctgtggcagaccctgtacagcttctcccagctgggaggcctagaaaaggatggcagcttcggtgagggcctcaccatg

SEQ ID NO: 53607 - DNA, 120 bp, Artificial Sequence
  ENSG00000068724_19 (sequence is synthesized)
aagaagcagagtggcatgcacctgactttgcctgatgcccatgatgcagactctggctcccggcgggcttcgtccatcgccgcctcccggctggaggaggccatgtcagagctgactatg

SEQ ID NO: 53608 - DNA, 120 bp, Artificial Sequence
  ENSG00000068724_20 (sequence is synthesized)
ccctcttcggtcctgaagcagggccccatgcagctgtggaccacgctggaacagatctggctgcaggctgctgagctgttcatggagcagcagcacctcaaggaagcaggtttctgcatc

SEQ ID NO: 53609 - DNA, 120 bp, Artificial Sequence
  ENSG00000068724_21 (sequence is synthesized)
ggctggctgaggtgaagggcaacctggaggaggccaagcagctgtacaaggaggcgctcacggtgaacccagatggcgtgcgcatcatgcatagcctgggtctgatgctgagtcggctgg

SEQ ID NO: 53610 - DNA, 120 bp, Artificial Sequence
  ENSG00000068724_22 (sequence is synthesized)
gccacaagagcttggcccagaaggtgcttcgtgatgccgtggagaggcagagtacgtgccacgaggcgtggcagggcctgggcgaggtgctgcaggcccagggccagaacgaggctgccg

SEQ ID NO: 53611 - DNA, 120 bp, Artificial Sequence
  ENSG00000068724_23 (sequence is synthesized)
ttgactgcttcctcaccgcccttgagctggaggccagcagccctgtactgcccttctccatcatccccagagagctctgacgacgctgcagccgcagggagggaggggctggccagaggg

SEQ ID NO: 53612 - DNA, 120 bp, Artificial Sequence
  ENSG00000068724_24 (sequence is synthesized)
agaggcagcagggaacgtgggtcagggtggggcaacagtggcatcaggtgcggggcctcagggaaatacatctttagtgaacgcctctgcagctgcagccctcgttctcttggctgggcc

SEQ ID NO: 53613 - DNA, 120 bp, Artificial Sequence
  ENSG00000068724_25 (sequence is synthesized)
aagagggccttcctggatttctttgttggtgccttgggaaacagtctgacttgaaccctaagtgcctttggagagttttgtggtgaccagacttgctccccaagagctgggcagcgggga

SEQ ID NO: 53614 - DNA, 120 bp, Artificial Sequence
  ENSG00000068724_26 (sequence is synthesized)
gcctcacagctgtccttcaccctcacccatgcctctggcttggagtctgggtggggggttctcactccccactctcagcacagtacagacttctggatctctctcaggtcttgcccaggg

SEQ ID NO: 53615 - DNA, 120 bp, Artificial Sequence
  ENSG00000068724_27 (sequence is synthesized)
cggtcacaatgtgaagaaactgcgggcaagtgggaagactatgagatttctgggttcccttctcagacttggagttagtagatgattcctgcattgcccctgcttgccctctgagaccag

SEQ ID NO: 53616 - DNA, 120 bp, Artificial Sequence
  ENSG00000068724_28 (sequence is synthesized)
ctgggccccaccttgctctttccccctgctaccaagtgcctttggggtctgaccaggggtactgagcaccggccctaacacttccatctccacccaccccatctccctggcgatgtgctc

SEQ ID NO: 53617 - DNA, 120 bp, Artificial Sequence
  ENSG00000068724_29 (sequence is synthesized)
cagcccaagcagcctccgtaggctttagatcctgtggttgctagatccagtcctttctaataccctgagtcaacacattactcctgcaggtcttaggctacaatgcaggtcccttgaggg

SEQ ID NO: 53618 - DNA, 120 bp, Artificial Sequence
  ENSG00000068724_30 (sequence is synthesized)
ccaccaacatggaggtaggcagtttctaggactgtccccagtacatctcaccacccacagccctttttttgccttgattcgagcctcaccctggccttttggcttcccctgcctgagaga

SEQ ID NO: 53619 - DNA, 120 bp, Artificial Sequence
  ENSG00000068724_31 (sequence is synthesized)
gacctgaggaggggacagagcccagcccctctcctgtggctgagcaggcctctgtgtccatgacacctgtcttccgggcctgggggctgtgggtgtatgtcctccctactggcttccccg

SEQ ID NO: 53620 - DNA, 120 bp, Artificial Sequence
  ENSG00000068724_32 (sequence is synthesized)
gcccctgctgcatgatgctcttggaactcttctccaaggagtcagtcccccaggcctatcaggggatccttttgtatctgcactttgggttttagtttcaaagctccatcaggtacagct

SEQ ID NO: 53621 - DNA, 120 bp, Artificial Sequence
  ENSG00000068724_33 (sequence is synthesized)
tgcatttcaggatgtgtggaaagctcgggtgagggctgccctggttcatcatagctccaccttcctcggaaggagtgggctgttggagaccccccatccatggcacactagctcagcact

SEQ ID NO: 53622 - DNA, 120 bp, Artificial Sequence
  ENSG00000068724_34 (sequence is synthesized)
gcatttcccgagatgattcccaagacagctggtgcctcctggctttcctgtgccaggccaaggggcaccacagaggaccctggatcctttgcctcttcttggttgaaggatctctatgta

SEQ ID NO: 53623 - DNA, 120 bp, Artificial Sequence
  ENSG00000068724_35 (sequence is synthesized)
tgtgtgtatataaatatagttttttatctatatatataaaatagagatctattttttttctggaattctgttagaaaagtaaagaaaaagcaaatgctgttggtttatctcagggtgccc

SEQ ID NO: 53624 - DNA, 120 bp, Artificial Sequence
  ENSG00000068724_36 (sequence is synthesized)
aaagtggttatagtcaatttttggtactaggaaaggcacccaatgcatttcctgacttttaagcatttccttgttggaagcagcagagggccaggccaagttgctgacagtgactttgca

SEQ ID NO: 53625 - DNA, 120 bp, Artificial Sequence
  ENSG00000068724_37 (sequence is synthesized)
ggttgaataaagaaacccttggaggggaagcaggcttgtctgaagcagcatgtatattcactgggcatgtagctcccacaccagccttgagccaggccctggacaggaggggctgttgca

SEQ ID NO: 53626 - DNA, 120 bp, Artificial Sequence
  ENSG00000068724_38 (sequence is synthesized)
ggatgagggaggccagagaaggcatcgaagccaagacctgggcccacctggggagggatgtgggaaaggaaggatgggagggaggaccctctgggaaaatgtggatttgagctggtgaga

SEQ ID NO: 53627 - DNA, 120 bp, Artificial Sequence
  ENSG00000068724_39 (sequence is synthesized)
gtgttgctaaggctgggctaaagcctggagagggtaggaggaggcaagaggggtccaggcagggctgatcctggcctctgacctgtccagggcgacccctgaagcccctgctgcctctgg

SEQ ID NO: 53628 - DNA, 120 bp, Artificial Sequence
  ENSG00000068724_40 (sequence is synthesized)
gcattgctgggagaggccaaggcaggactcacgtctgaacagagatcccctcgggcattgctgatgggccaccttcagctgcagggaagaagcctaggagaggaggcatgggagggacct

SEQ ID NO: 53629 - DNA, 120 bp, Artificial Sequence
  ENSG00000068724_41 (sequence is synthesized)
gggccttgttcagattggccacctctgctgagaagtccataccagtacacccctaataagttatgccacataccaacgtactgtggatattataacctgcattaaaacaactctaaagaa

SEQ ID NO: 53630 - DNA, 120 bp, Artificial Sequence
  ENSG00000068724_42 (sequence is synthesized)
cagaccctgtacagcttctcccagctgggagactttaggagcccagaaggcttccagactccccagaggaacatctgtaacagtgaaatttacagaggaggaggcctagaaaaggatggc

SEQ ID NO: 53631 - DNA, 120 bp, Artificial Sequence
  ENSG00000068724_43 (sequence is synthesized)
ctcctatacagggctcttggttcaggtctcttggttcgtcctgctgcaagttgggaagaaagataataggaatgctaattccttcttgatgaaacgaccacaacacgctggagccggcct

SEQ ID NO: 53632 - DNA, 120 bp, Artificial Sequence
  ENSG00000068724_44 (sequence is synthesized)
tggaccctacgtttcaagattggcctgcttccagcgtctgccagctccactgcacaagctgcggcagccgctgtccccgttcgcttccacgggagtcccagcaagactatgcgacccagt

SEQ ID NO: 53633 - DNA, 120 bp, Artificial Sequence
  ENSG00000068724_45 (sequence is synthesized)
tcaaataccatcttccatgtaccgttcgtgaaatcagcagcttttgacattcaagagaggacagattacttaaaaacagactcatgaacaaatagggaaacgaatacatcatccctgtat

SEQ ID NO: 53634 - DNA, 120 bp, Artificial Sequence
  ENSG00000068724_46 (sequence is synthesized)
cgaattcatccctgtataatcctgcccttacacctgtgctcctatacaagattaacattcaaaaagagtctccatggtgcccagctcgtctcgaactcctgggttcaagcaatcctccca

SEQ ID NO: 53635 - DNA, 120 bp, Artificial Sequence
  ENSG00000068724_47 (sequence is synthesized)
ccatggcttgtgaaattcaaatgagttcaggaactgcagacttaacattttttaactgaggacctgcttaaagcagaacaccttcatcaaaaacacaagaattagtcatgggaaagaagg

SEQ ID NO: 53636 - DNA, 120 bp, Artificial Sequence
  ENSG00000068724_48 (sequence is synthesized)
tgtgagtggagttgtatttagtggaattgctcagttttttcacttctgtagacatgagcctttctgtggacaaagccttgcacctttgttgtcaaatgacagagttgatttcagaagcca

SEQ ID NO: 53637 - DNA, 120 bp, Artificial Sequence
  ENSG00000068724_49 (sequence is synthesized)
aacctagcacccaactttagaggcacatctcaggggtgtatggctgtatgcagagcttctgtctcccaggagggaatggttaagggaggggagaatggtagctcccttgcaattaaagaa

SEQ ID NO: 53638 - DNA, 120 bp, Artificial Sequence
  ENSG00000068724_50 (sequence is synthesized)
acacagaacagggaagcagtgctgcgtgaagcggtctctctaccatgtgctcaggcagtgagtgctgtctggttgaagagtgagtgctcagcatggttctggacagacagagaagtcctc

SEQ ID NO: 53639 - DNA, 120 bp, Artificial Sequence
  ENSG00000068724_51 (sequence is synthesized)
aaacctcgcacggtgggaaccagacaccccgagcagcttcctgaaatcctgtgggcttctgactaagccctggacacatgtgccagccgggctgtccctggccaagaggccaggcctgca

SEQ ID NO: 53640 - DNA, 120 bp, Artificial Sequence
  ENSG00000068724_52 (sequence is synthesized)
gggggcctcagggggcagcagctccctatccaggcctgggtttcgggccaagccgcggaatgtgaaaggtcccgtgcacgcttggagatgcctgtcctgatgttcaccaaggtgaagctg

SEQ ID NO: 53641 - DNA, 120 bp, Artificial Sequence
  ENSG00000068724_53 (sequence is synthesized)
ccatgccaaaataaaagactccatgcctttgctggagaagaatgagccgaagatgagcgaagccaaaaattatctaagcagtatccttaaccatgggaggctctcgggtctcgctgtgtt

SEQ ID NO: 53642 - DNA, 120 bp, Artificial Sequence
  ENSG00000068724_54 (sequence is synthesized)
aactcctgggctcaagcgatcctcctacttcagcctcccgaagcgttgggattacaggagtgaggcactgcgcccagctgatttttaaagagctattccaaaccacagtacatgtgtgag

SEQ ID NO: 53643 - DNA, 120 bp, Artificial Sequence
  ENSG00000068724_55 (sequence is synthesized)
gtttacccaaagggccgcacattgcaagcggggcagatttagctgggatgggcagagggcgttctaggtcatgctggggtagagctgacaactgtgcctgggtccgagtgcttccctctc

SEQ ID NO: 53644 - DNA, 120 bp, Artificial Sequence
  ENSG00000068724_56 (sequence is synthesized)
attggccagttgcccatgcatgaggcttcatgggctggagacactgtgtgttcggtgcagcaggagattgttctggaaagcattctccaccccccttgggaaccctgcccaccaaatcag

SEQ ID NO: 53645 - DNA, 120 bp, Artificial Sequence
  ENSG00000068724_57 (sequence is synthesized)
tctgcctgattgtcccaggcagccctcaagagtggccagaccttgcctttgctgaaagcctaaggtggaatcaagggcctgtatctgtgattatgcccgaaaggccttccagaagtcagc

SEQ ID NO: 53646 - DNA, 120 bp, Artificial Sequence
  ENSG00000068745_0 (sequence is synthesized)
gcagccattttggtgcgagagaaacaataggacggaaacgccgaggaacccggctgaggcggcagcagagcatcctggccagaacaagccaaggagccaagacgagagggacacacggac

SEQ ID NO: 53647 - DNA, 120 bp, Artificial Sequence
  ENSG00000068745_1 (sequence is synthesized)
aaacaacagacagaagacgtactggccgctggactccgctgcctcccccatctccccgccatctgcgcccggaggatgagcccagccttcagggccatggatgtggagccccgcgccaaa

SEQ ID NO: 53648 - DNA, 120 bp, Artificial Sequence
  ENSG00000068745_2 (sequence is synthesized)
ggcgtccttctggagccctttgtccaccaggtcggggggcactcatgcgtgctccgcttcaatgagacaaccctgtgcaagcccctggtcccaagggaacatcagttctacgagaccctc

SEQ ID NO: 53649 - DNA, 120 bp, Artificial Sequence
  ENSG00000068745_3 (sequence is synthesized)
cctgctgagatgcgcaaattcactccccagtacaaaggtgtggtatctgtgcgctttgaagaagatgaagacaggaacttgtgtctaatagcatatccattgaaaggggaccatggaatt

SEQ ID NO: 53650 - DNA, 120 bp, Artificial Sequence
  ENSG00000068745_4 (sequence is synthesized)
gtggacattgtagataattcagactgtgaaccaaaaagtaagctcctaaggtggacaacaaacaaaaaacatcatgtcttagaaacagaaaagacccctaaggactgggtgcgtcagcac

SEQ ID NO: 53651 - DNA, 120 bp, Artificial Sequence
  ENSG00000068745_5 (sequence is synthesized)
cgtaaagaggagaaaatgaagagccataagttagaagaagaatttgagtggctaaagaaatctgaagtcttgtactacactgtagagaagaaggggaatataagttcccagcttaaacac

SEQ ID NO: 53652 - DNA, 120 bp, Artificial Sequence
  ENSG00000068745_6 (sequence is synthesized)
tataacccttggagcatgaaatgtcaccagcaacagttacagagaatgaaggagaatgcaaagcatcggaaccagtacaaatttatcttactggaaaacctgacttcccgctacgaggtg

SEQ ID NO: 53653 - DNA, 120 bp, Artificial Sequence
  ENSG00000068745_7 (sequence is synthesized)
gccaaccagatccgaaaatgtcagcagagcacatctgcagtcattggtgtgcgtgtgtgtggcatgcaggtgtaccaagcaggcagtgggcagctcatgttcatgaacaagtaccatgga

SEQ ID NO: 53654 - DNA, 120 bp, Artificial Sequence
  ENSG00000068745_8 (sequence is synthesized)
cggaagctatcggtgcagggcttcaaggaggcacttttccagttcttccacaatgggcggtacctgcgccgtgaactcctgggccctgtgctcaagaagctgactgagctcaaggcagtg

SEQ ID NO: 53655 - DNA, 120 bp, Artificial Sequence
  ENSG00000068745_9 (sequence is synthesized)
ttggagcgacaggagtcctaccgcttctactcaagctccctgctggtcatttatgatggcaaggagcggcccgaagtggtcctggactcagatgctgaggatttggaggacctgtcagag

SEQ ID NO: 53656 - DNA, 120 bp, Artificial Sequence
  ENSG00000068745_10 (sequence is synthesized)
gaatcagctgatgagtctgctggtgcctatgcctacaaacccatcggcgccagctctgtagatgtgcgcatgatcgactttgcacacaccacctgcaggctgtatggcgaggacaccgtg

SEQ ID NO: 53657 - DNA, 120 bp, Artificial Sequence
  ENSG00000068745_11 (sequence is synthesized)
gtgcatgagggccaggatgctggctatatcttcgggctccagagcctgatagacattgtcacagagataagtgaggagagtggggagtgagcttgctagctgctccagtacttgagagcg

SEQ ID NO: 53658 - DNA, 120 bp, Artificial Sequence
  ENSG00000068745_12 (sequence is synthesized)
actctgtgtcccaggcacagctgtgctgcgtcagggaggaagccagtatggccaggtggtggctcctgcagcctggagctgatgtgcagtggcctctgtgagccccagcctgagccagtc

SEQ ID NO: 53659 - DNA, 120 bp, Artificial Sequence
  ENSG00000068745_13 (sequence is synthesized)
ccagctgtgcttggagtctttatttattttaactatttcttcaacattccacatttgatgatgatacctctttcttccctgagtgtatatgttctaatacaaatctttttgtttattgta

SEQ ID NO: 53660 - DNA, 84 bp, Artificial Sequence
  ENSG00000068745_14 (sequence is synthesized)
ttttggtgcgagagaaacaataggacggaaacgccgaggaacccggctgaggcggcatgtgatcacggctcactgcagccttga

SEQ ID NO: 53661 - DNA, 120 bp, Artificial Sequence
  ENSG00000068745_15 (sequence is synthesized)
cattttggtgcgagagaaacaataggacggaaacgccgaggaacccggctgaggcggcagcttcctaggtgacagacaggtacactgtatgctagccctgtatctgtctgagcagtggaa

SEQ ID NO: 53662 - DNA, 120 bp, Artificial Sequence
  ENSG00000068745_16 (sequence is synthesized)
tgtgccaggaaagaaggagcaaccactgactgatgaacctttgccagtctcccttccaagagggatgccagagccttctgtaagctcctgagatgtcactggtatctaggcaacagggat

SEQ ID NO: 53663 - DNA, 120 bp, Artificial Sequence
  ENSG00000068745_17 (sequence is synthesized)
caaaggtaagtcccagctgctggaggggttgccacactggcgaggagatgtgagagatcgtggccatggaaggccctggcagccatccctggagccctcactccctcccactctgtgctt

SEQ ID NO: 53664 - DNA, 120 bp, Artificial Sequence
  ENSG00000068745_18 (sequence is synthesized)
tccctccctctcctccttctcctcctcctggccctcagcccagcatctcacaccctcagttttcaatccctggtaagattgctcaattctgttttgttgtgtggatttgagtttgatttt

SEQ ID NO: 53665 - DNA, 120 bp, Artificial Sequence
  ENSG00000068745_19 (sequence is synthesized)
ggtagaagtgtagttgtgttttatgttcaggtgtctcttgatcacagtaacccatagtcccccactggggggacggtgggggaagactttgggaggattttacccagaatacttgccgcc

SEQ ID NO: 53666 - DNA, 120 bp, Artificial Sequence
  ENSG00000068745_20 (sequence is synthesized)
tgctttttgtcctccaggaaaccagaagcccgggtaattaggtaggccggggagcagcgttgagtcagatggaatgcaggagtgggaggcctgtgctgattagcccaagccctttgctgt

SEQ ID NO: 53667 - DNA, 120 bp, Artificial Sequence
  ENSG00000068745_21 (sequence is synthesized)
aaaattgctatatgaaagcaacccttcgattcacatatgataattttttatttctttttataatgtattttataggggacatcagcagccaccagcatggtggggtctttgttggggagt

SEQ ID NO: 53668 - DNA, 120 bp, Artificial Sequence
  ENSG00000068745_22 (sequence is synthesized)
gggggagtcttttgtaaatcaagtaagaatccattaaagaaattaattttaaatgtgcattacctggttacataaaggactctagaacaacttaggttcttttgggactgttgaaacatt

SEQ ID NO: 53669 - DNA, 120 bp, Artificial Sequence
  ENSG00000068745_23 (sequence is synthesized)
gtctttaaggacagaatgtactgggtgcctttctctgtactctgaatatgcatgtgtattgcggtggggatgggggagttgggggccctcacttggtccttctctgttgtttttttccag

SEQ ID NO: 53670 - DNA, 120 bp, Artificial Sequence
  ENSG00000068745_24 (sequence is synthesized)
gacaaagccaaaggccccttgttagctggccatccctgccccattttttcccctggtcctttcccctgtggccacagggaagtgtggcctgaataccccaccccggctcctctgcaccca

SEQ ID NO: 53671 - DNA, 120 bp, Artificial Sequence
  ENSG00000068745_25 (sequence is synthesized)
gagctgggggccacctcagaagtgtcatctctctctgagcacgcattcccctgcagcagtcgaggactgagcagattgagtgatgctggggcagagaggcctgggaggaaaggtgttcag

SEQ ID NO: 53672 - DNA, 120 bp, Artificial Sequence
  ENSG00000068745_26 (sequence is synthesized)
ccagtcgtttgtaaggcgctcgtcggcacctgctgaaacgcccccacctgacagccccatcctcaaagactgtcttaattactcatggcaggttctagagacttaaggggaaaagctgct

SEQ ID NO: 53673 - DNA, 120 bp, Artificial Sequence
  ENSG00000068745_27 (sequence is synthesized)
ttcaaggccaccacatgtctgtgctccccaaccagctctatctgccttgtgttcattttgttattttgtgacgtgagactgcaaagaccaataaaaacatattttataagaacaaaaggc

SEQ ID NO: 53674 - DNA, 120 bp, Artificial Sequence
  ENSG00000068745_28 (sequence is synthesized)
ctgggtgcctacccgtgtgggggcactgtgggaagcctttgctagggtgtcttgtgctgtgtggtttgttttgtttgcccctttattttgctttgcttacccagtcttcccttactcttg

SEQ ID NO: 53675 - DNA, 120 bp, Artificial Sequence
  ENSG00000068745_29 (sequence is synthesized)
gatgcttcttaaccctcaggcaaacctgtgttccccctgtattcaggctctgctttaaagcaagccatgaggctgttggagtttctgtttagggcattaaaaattcccgcaaactataaa

SEQ ID NO: 53676 - DNA, 120 bp, Artificial Sequence
  ENSG00000068745_30 (sequence is synthesized)
attttggtgcgagagaaacaataggacggaaacgccgaggaacccggctgaggcggcaggattgtattcgttctcatatatcaactaagctacactagcagaaaacttcctaggtgacag

SEQ ID NO: 53677 - DNA, 120 bp, Artificial Sequence
  ENSG00000068745_31 (sequence is synthesized)
agataagcaaaccagcactttagagtataacatccagtgatggtcaaactgttcactttcattctgaaactgctggcgtgggcacgagtggacagctgcagtacacactcccatgtctgc

SEQ ID NO: 53678 - DNA, 120 bp, Artificial Sequence
  ENSG00000068745_32 (sequence is synthesized)
tgtgagctgagtcttggcctgtggccagctgtgtacgaagatggcaggcttatgggaggatgtccactcccactgaccctggcattgcctgagtcccttgcctacctgggctgggccaag

SEQ ID NO: 53679 - DNA, 120 bp, Artificial Sequence
  ENSG00000068745_33 (sequence is synthesized)
acccaactgcaatcaattgtctggggtccactcgctgctgtggtctctgcctttgtgctcacctcaagactcttgccccctccacctttggaggtcctctttggggatcagaggcccatc

SEQ ID NO: 53680 - DNA, 76 bp, Artificial Sequence
  ENSG00000068745_34 (sequence is synthesized)
tccacctttggaggtcctctttggggatcagaggcccatctctgccaggggcctgaagacctacatcctggagggt

SEQ ID NO: 53681 - DNA, 120 bp, Artificial Sequence
  ENSG00000068745_35 (sequence is synthesized)
accagcccaaggaacatctcaccgattttaaatcgggctgatgtgtgcagaacagactgaaggcatcaggggcagcaagaggagaccaggaggcagctgtgacattgcactcaagagaaa

SEQ ID NO: 53682 - DNA, 120 bp, Artificial Sequence
  ENSG00000068745_36 (sequence is synthesized)
tggtggcagtttggactcagtgaaagctatgctgacattcactcaggtatcctgctgtccatcggcccgcagctagtctatccacccaaccgcccgtcagacctccggcccaccctccca

SEQ ID NO: 53683 - DNA, 120 bp, Artificial Sequence
  ENSG00000068745_37 (sequence is synthesized)
gacggaggacaatgctccgccctctctggccccgcccccagtcaccgccttttccggaagctgctgcagcgaatcctggcaccctagcaacagcgcctttcaggctgtccagtccgcgtg

SEQ ID NO: 53684 - DNA, 120 bp, Artificial Sequence
  ENSG00000068745_38 (sequence is synthesized)
aggacggaaacgccgaggaacccggctgaggcggcagaccgtaaaacgaacccaaagggagccatggacttggagtctttctccacgctattgagtagcagaactggtactaaaatgtgg

SEQ ID NO: 53685 - DNA, 120 bp, Artificial Sequence
  ENSG00000068745_39 (sequence is synthesized)
tctttctacccaaaatgatgatgattttcccaagagcagcaacctatggaccgccagagatggatgcaagaggaagggtgataaggtggcacatcatgcccagcagctaattaacactct

SEQ ID NO: 53686 - DNA, 89 bp, Artificial Sequence
  ENSG00000068745_40 (sequence is synthesized)
ataaggtggcacatcatgcccagcagctaattaacactctggagaagagaagttggagaccctcactgggccttttggcctccagctac

SEQ ID NO: 53687 - DNA, 120 bp, Artificial Sequence
  ENSG00000068745_41 (sequence is synthesized)
ttttgatatttgttaagtttgcagatgagtttggggcctctggcaacatagagactaaggaactgggtaagaaaaaaacaaatgttacaatcatgttacttacaacgcttcttcctgcta

SEQ ID NO: 53688 - DNA, 120 bp, Artificial Sequence
  ENSG00000068745_42 (sequence is synthesized)
attttggtgcgagagaaacaataggacggaaacgccgaggaacccggctgaggcggcaggtctttgggctgcctctgcccttcgtagattctctgctgggcctttggaactaacacagca

SEQ ID NO: 53689 - DNA, 120 bp, Artificial Sequence
  ENSG00000068745_43 (sequence is synthesized)
gtttttctgccggagaaggcgggggccaaggtgggtggcatgggcggagtcccgcaagaactcagactgtttgtctttgtctttctgctgaaggagcagggtgagcagctctaaggcact

SEQ ID NO: 53690 - DNA, 120 bp, Artificial Sequence
  ENSG00000068745_44 (sequence is synthesized)
gaggcggcaggtaaagctcgcgtcctatggccctagtgcccgaggagctttgagggagattttttcaggctactgggaaacgggatctctgatcattggagtctcccagcagagcatcct

SEQ ID NO: 53691 - DNA, 120 bp, Artificial Sequence
  ENSG00000068781_0 (sequence is synthesized)
ggactttgggactggacagacctggtcacagtctaggttctacatcttactggtcgagcaactttagagtcaacctatttgatttcttgacaagaccacaatctgatcccaaagatgtgc

SEQ ID NO: 53692 - DNA, 120 bp, Artificial Sequence
  ENSG00000068781_1 (sequence is synthesized)
tccacaaatccaggcaaatgggtcacctttgatgatgatcctgctgttcaatcttctcaaaagtcaaagaattttcctctggagaatcaaggtgtctgtagaccaaatggactgaagctg

SEQ ID NO: 53693 - DNA, 120 bp, Artificial Sequence
  ENSG00000068781_2 (sequence is synthesized)
aaccttcctggcctcagggaatttcccagtggatcttcctccaccagcagcactcctctctcctcccccattgtagatttttatttcagtccaggacctccaagtaactctcctctttct

SEQ ID NO: 53694 - DNA, 120 bp, Artificial Sequence
  ENSG00000068781_3 (sequence is synthesized)
acacctaccaaagacttcccaggttttcctggcatccccaaagcagggactcatgtgctttatcctattccagaatcatcttcagacagcccactcgcaatatcaggaggagaatcttcc

SEQ ID NO: 53695 - DNA, 120 bp, Artificial Sequence
  ENSG00000068781_4 (sequence is synthesized)
ttactgcctaccagaccaacatgtttatcccatgccttgttacccagtgaccactcatgtacacatccaactcccaaagtaggtcttccagatgaagttaatcctcaacaggctgaaagc

SEQ ID NO: 53696 - DNA, 120 bp, Artificial Sequence
  ENSG00000068781_5 (sequence is synthesized)
ctaggattccaaagtgatgatctcccccagtttcagtattttcgagaggactgtgctttttcaagtccattttggaaagatgaaggcagtgattcccatttcacccttgacccaccagga

SEQ ID NO: 53697 - DNA, 120 bp, Artificial Sequence
  ENSG00000068781_6 (sequence is synthesized)
agcaaaaagatgttctcatcaagaaacaaggagatgcctattgaccaaaaaagcctaaataagtgttcactcaactatatctgtgagaagcttgaacatctccagtcagctgagaaccaa

SEQ ID NO: 53698 - DNA, 120 bp, Artificial Sequence
  ENSG00000068781_7 (sequence is synthesized)
gactcacttagaagtttgtctatgcactgtctatgtgctgaagaaaatgcctcttcctttgtcccccacacactcttcaggagtcagccaaaatccggatggtctttcatgctgagaatt

SEQ ID NO: 53699 - DNA, 120 bp, Artificial Sequence
  ENSG00000068781_8 (sequence is synthesized)
cctgagaagaagaatatgatgtcttcccggcaatggggaccaatttttctgaaagttttgcctggaggaattttgcagatgtattatgaacagggattagaaaaaccatttaaagagata

SEQ ID NO: 53700 - DNA, 120 bp, Artificial Sequence
  ENSG00000068781_9 (sequence is synthesized)
cagcttgatccatattgtaggctttctgaacccaaggttgagaacttcagtgtagcaggaaaaatccacactgtgaagattgaacatgtgtcttacacagaaaaaaggaaataccattct

SEQ ID NO: 53701 - DNA, 120 bp, Artificial Sequence
  ENSG00000068781_10 (sequence is synthesized)
aagacagaagtagttcatgaacctgacatagagcagatgctgaagttggggtccacatcgtaccatgacttccttgactttctgactactgtggaggaggagctgatgaagttgccagct

SEQ ID NO: 53702 - DNA, 120 bp, Artificial Sequence
  ENSG00000068781_11 (sequence is synthesized)
gtttcaaaaccaaaaaagaactacgaggagcaagaaatttccttggaaattgtggacaacttttggggtaaagtcacaaaagaaggaaaatttgttgaaagtgctgtgataactcaaatt

SEQ ID NO: 53703 - DNA, 120 bp, Artificial Sequence
  ENSG00000068781_12 (sequence is synthesized)
tattgcctctgctttgtgaatgggaacctggaatgctttttaaccttgaatgaccttgagttgccgaagcgagatgaatcctattatgagaaggactcagaaaaaaaggggattgatatt

SEQ ID NO: 53704 - DNA, 120 bp, Artificial Sequence
  ENSG00000068781_13 (sequence is synthesized)
cttgactaccattttcataagtgtgtgaatgtacaagaatttgagcaatcaagaatcattaagtttgtacctctggatgcctgccggtttgagctgatgcgtttcaagactttgtataat

SEQ ID NO: 53705 - DNA, 120 bp, Artificial Sequence
  ENSG00000068781_14 (sequence is synthesized)
ggggataatcttcccttttccttgaagtctgtagtggttgtccagggagcatacgtggaacttcaggcttttgtcaacatggcctcattggcgcagaggtcatcctatgctggttcctta

SEQ ID NO: 53706 - DNA, 120 bp, Artificial Sequence
  ENSG00000068781_15 (sequence is synthesized)
gaaccgccgagcatgtctggggagtttacaggaacttgaatctgaacctgtcattcaagtcactgtggggtcagcaaaatatgagagtgcctaccaggcagtggtatggaagatagatcg

SEQ ID NO: 53707 - DNA, 120 bp, Artificial Sequence
  ENSG00000068781_16 (sequence is synthesized)
gcttccagacaaaaattcaagtctagatcatccccattgtctgtcatacaaattagagcttggatcagaccaagaaattccctctgattggtatccatttgctactgttcagttttccgt

SEQ ID NO: 53708 - DNA, 120 bp, Artificial Sequence
  ENSG00000068781_17 (sequence is synthesized)
gcctgacacctgtgcctcaaggacagaggtcaggtctctgggagtggagagtgatgtccagccacagaaacatgttcagcagcgagcttgctacaacatccagcctaaactctacagatc

SEQ ID NO: 53709 - DNA, 120 bp, Artificial Sequence
  ENSG00000068781_18 (sequence is synthesized)
tgtaattgaagatgtaattgaaggagttcggaatctatttgctgaagaaggtatagaggaacaagttttaaaagacttgaagcagctctgggaaaccaaggttttgcagtctaaagcaac

SEQ ID NO: 53710 - DNA, 120 bp, Artificial Sequence
  ENSG00000068781_19 (sequence is synthesized)
agaagacttcttcagaaatagcatccaatcacctctgtttactcttcagttgccgcacagcttgcaccaaacattgcaatcgtcaacagcatcattagttattcctgctggtagaactct

SEQ ID NO: 53711 - DNA, 120 bp, Artificial Sequence
  ENSG00000068781_20 (sequence is synthesized)
tccaagttttaccacagcagaactgggcacttcaaactccagtgcaaactttacttttcctggttatcccattcatgtaccagcaggtgtgacactacagactgtatctggtcaccttta

SEQ ID NO: 53712 - DNA, 120 bp, Artificial Sequence
  ENSG00000068781_21 (sequence is synthesized)
taaagtcaatgtaccaattatggtgacagagacttctggaagagcaggtattcttcagcatccaattcagcaagtatttcaacagcttggccagccttcagtaatacaaactagtgttcc

SEQ ID NO: 53713 - DNA, 120 bp, Artificial Sequence
  ENSG00000068781_22 (sequence is synthesized)
acaattgaatccatggtctcttcaagcaactactgaaaaatcacagagaattgaaaccgtgctacagcaacccgcaattctaccttctgggccagtagataggaaacacttagaaaatgc

SEQ ID NO: 53714 - DNA, 120 bp, Artificial Sequence
  ENSG00000068781_23 (sequence is synthesized)
caccagtgatatacttgtatctcctggaaatgagcataaaatcgtgcctgaagctttgttgtgtcatcaggaaagttctcactatatcagtcttccaggtgttgtattttctccacaggt

SEQ ID NO: 53715 - DNA, 120 bp, Artificial Sequence
  ENSG00000068781_24 (sequence is synthesized)
ctctcaaacaaattctaatgtggagtcagtgctcagtggttcagctagcatggctcaaaatctgcatgatgagtccctctccacaagccctcatggggctctccaccagcacgtgactga

SEQ ID NO: 53716 - DNA, 120 bp, Artificial Sequence
  ENSG00000068781_25 (sequence is synthesized)
tattcagcttcatattcttaaaaataggatgtatggatgtgattctgtaaagcaaccaagaaatatagaggaacccagcaacatacctgtatcagagaaggattctaattctcaggtgga

SEQ ID NO: 53717 - DNA, 120 bp, Artificial Sequence
  ENSG00000068781_26 (sequence is synthesized)
tttaagcattcgggttactgatgatgatattggtgaaataattcaagtagatggaagcggtgatacatcttccaatgaagaaataggaagtacaagagatgcagatgagaatgaatttct

SEQ ID NO: 53718 - DNA, 120 bp, Artificial Sequence
  ENSG00000068781_27 (sequence is synthesized)
agggaatattgacgggggagatctgaaggtacctgaagaagaagctgacagtatttcaaatgaggattcagccacaaacagtagtgataatgaagaccctcaagtaaacattgtagaaga

SEQ ID NO: 53719 - DNA, 120 bp, Artificial Sequence
  ENSG00000068781_28 (sequence is synthesized)
ggaccctttaaattctggagatgatgttagtgaacaggatgtgccagacctgtttgacacggataatgttattgtctgtcagtatgataagattcatcgaagcaagaacaaatggaaatt

SEQ ID NO: 53720 - DNA, 120 bp, Artificial Sequence
  ENSG00000068781_29 (sequence is synthesized)
ctatttgaaagatggtgttatgtgttttggagggagagactatgtatttgcaaaagccattggtgatgcagagtggtaaaccttgtgagctcagtacatctattttgtgaacatcagttg

SEQ ID NO: 53721 - DNA, 120 bp, Artificial Sequence
  ENSG00000068781_30 (sequence is synthesized)
gattatattgcatattgtgaattcatttttattttgaatatagtccagcacagagctgttcaaatttttagttcactgtatggaatttaataaaattataattcagatgcagatacaatt

SEQ ID NO: 53722 - DNA, 120 bp, Artificial Sequence
  ENSG00000068781_31 (sequence is synthesized)
agcagggagataccagggttcgtcatgggcagcaatgactacgatggacaagaagatagaggccctaatcctaattttctgagcaccatggaagccccctggattctagggagaccttga

SEQ ID NO: 53723 - DNA, 120 bp, Artificial Sequence
  ENSG00000068781_32 (sequence is synthesized)
ggagaaagaagactcctgtaaatgcctgacattgaaattcctgcaagtctaggagcatgtgaactcaaaatggaaattaatttgatttaataaaaataaagaagaagaattgttttggca

SEQ ID NO: 53724 - DNA, 120 bp, Artificial Sequence
  ENSG00000068781_33 (sequence is synthesized)
ttttcaggaaatgagaattctttcggcaaaaggagaagctgatttgcagaagtgctgagcatgcctgagagagatgggagtgatcaagaccaagagtgccatttggatgtgcagagttga

SEQ ID NO: 53725 - DNA, 120 bp, Artificial Sequence
  ENSG00000068784_0 (sequence is synthesized)
gcggtggcactcacggaatctcgggtcttctgacgtgccgggcgggaagatgtcatcattgccaagaagagcgaaagtacaggtccaggatgtggtactgaaagatgaattttcttcatt

SEQ ID NO: 53726 - DNA, 120 bp, Artificial Sequence
  ENSG00000068784_1 (sequence is synthesized)
ctctgagttatcatctgcctctgaagaagatgacaaggaagatagtgcctgggagccccaaaagaaagttcccagaagccgtaaacagccccctcccaaggaatccaaaccaaagaggat

SEQ ID NO: 53727 - DNA, 120 bp, Artificial Sequence
  ENSG00000068784_2 (sequence is synthesized)
gcctcgggtgaagaagaatgccccacagatcagtgatggctcagaagtcgttgttgttaaggaggagctgaatagctctgtggctattgctgatactgctttagaagacagaaaaaataa

SEQ ID NO: 53728 - DNA, 120 bp, Artificial Sequence
  ENSG00000068784_3 (sequence is synthesized)
attggatactgtacagactctgaaaacagccaagacaaaacagaaatgtgcagcgcagccacatacagttcgaaggactaaaaagctgaaagttgaagaagaaaccagcaaagccagcaa

SEQ ID NO: 53729 - DNA, 120 bp, Artificial Sequence
  ENSG00000068784_4 (sequence is synthesized)
cttagagggtgagagtaatagttcagagacaccatccacaagcactgtgtggggaggtacatgcaagaaggaagagaatgacgatgactttacatttggtcagtccgctttaaagaaaat

SEQ ID NO: 53730 - DNA, 120 bp, Artificial Sequence
  ENSG00000068784_5 (sequence is synthesized)
caagactgagacatatcctcaggggcagcctgtcaagtttccagcaaatgccaatagtactaaagaggaggtggaaatgaattgggacatggtacaggttttatctgagagaactaatat

SEQ ID NO: 53731 - DNA, 120 bp, Artificial Sequence
  ENSG00000068784_6 (sequence is synthesized)
tgaaccttgggtttgtgccaacatcattcgtctctttaatgatgataacacaattcccttcattatacgttatagaaaagagctcattaataaccttgatgctgattccttgagagaagt

SEQ ID NO: 53732 - DNA, 120 bp, Artificial Sequence
  ENSG00000068784_7 (sequence is synthesized)
tcagcaaaccctagaagagctacgggctgttgcaaagaaagttcatagtacaatccagaaaattaagaaggaagggaagatgtctgagtgcttgttaaaagccatgctgaattgtaaaac

SEQ ID NO: 53733 - DNA, 120 bp, Artificial Sequence
  ENSG00000068784_8 (sequence is synthesized)
ttttgaagaactagaacacgtgtctgctccatataaaactggaagcaaagggactaaagcccagagagcaagacagttgggcttagaaggagcagccagggcactgcttgagaaaccagg

SEQ ID NO: 53734 - DNA, 120 bp, Artificial Sequence
  ENSG00000068784_9 (sequence is synthesized)
ggagctcagtctgctatcgtacattaggcctgacgttaaagggctttcaacgcttcaggatattgaaataggagtgcagcatattttagcagatatgattgctaaagacaaagacacgct

SEQ ID NO: 53735 - DNA, 120 bp, Artificial Sequence
  ENSG00000068784_10 (sequence is synthesized)
tgacttcattcggaacttgtgccagaagagacatgtttgtatccagtcatctctggcaaaagtatcctcaaaaaaggtaaatgagaaagatgttgataagtttctgctctaccagcattt

SEQ ID NO: 53736 - DNA, 120 bp, Artificial Sequence
  ENSG00000068784_11 (sequence is synthesized)
ttcctgcaacataagaaacattcaccatcatcagattctggcaattaaccgtggagaaaatttgaaggtactgacggttaaggtcaatatttctgatggagtgaaggatgaattctgtag

SEQ ID NO: 53737 - DNA, 120 bp, Artificial Sequence
  ENSG00000068784_12 (sequence is synthesized)
gtggtgcatccaaaacaggtggagaccacgtagctttgcaaggccagagttaatgaagatcttatataattcactgaatgattcctttaaacgccttatttatcctcttctctgtagaga

SEQ ID NO: 53738 - DNA, 120 bp, Artificial Sequence
  ENSG00000068784_13 (sequence is synthesized)
attcagagccaaactaacatcagatgcagagaaggaatcagtaatgatgtttggacggaaccttcgtcagctccttttaacaagccctgttccagggcgcaccttaatgggagtggatcc

SEQ ID NO: 53739 - DNA, 120 bp, Artificial Sequence
  ENSG00000068784_14 (sequence is synthesized)
tggttataaacatggttgcaaattagctataatttctcctactagtcagatacttcatactgatgtggtttacttgcattgtggacaaggcttccgagaggcggagaaaataaagacact

SEQ ID NO: 53740 - DNA, 120 bp, Artificial Sequence
  ENSG00000068784_15 (sequence is synthesized)
tactttgctgacctgataatgaagaattattttgcaccactggatgttgtttactgtatcgtcagtgaagcaggagcatcaatctacagtgtcagccctgaagctaacaaagagatgcca

SEQ ID NO: 53741 - DNA, 120 bp, Artificial Sequence
  ENSG00000068784_16 (sequence is synthesized)
gggctggaccctaatttgagaagtgcagtttccatagcaaggcgtgtacaagatccattagctgagctagtgaaaattgagccaaagcacattggagttggaatgtatcagcatgacgta

SEQ ID NO: 53742 - DNA, 120 bp, Artificial Sequence
  ENSG00000068784_17 (sequence is synthesized)
tcccagactttactcaaggcaacactggacagtgttgtagaagaatgtgtcagctttgtgggagtggatattaacatctgttcagaagttttgttaaggcatattgcaggactcaatgcc

SEQ ID NO: 53743 - DNA, 120 bp, Artificial Sequence
  ENSG00000068784_18 (sequence is synthesized)
aacagggccaaaaatattattgaatggcgagagaaaaatggaccctttatcaaccgagaacagctgaagaaagtgaaagggctgggcccaaaatccttccaacagtgtgctggcttcatc

SEQ ID NO: 53744 - DNA, 120 bp, Artificial Sequence
  ENSG00000068784_19 (sequence is synthesized)
agaatcaaccaggattatatccgaacgttttgcagtcagcaaactgaaacttcaggccaaattcaaggagttgctgtgacatcttcagcagacgttgaggtcacaaatgagaagcagggc

SEQ ID NO: 53745 - DNA, 120 bp, Artificial Sequence
  ENSG00000068784_20 (sequence is synthesized)
aaaaagaagagcaaaactgcagtgaatgttttactgaagccaaatcctttggaccaaacttgtattcatccagaatcatatgacatagcaatgaggtttttgtcatccattggagggaca

SEQ ID NO: 53746 - DNA, 120 bp, Artificial Sequence
  ENSG00000068784_21 (sequence is synthesized)
ctgtatgaggttggaaagcctgaaatgcaacaaaaaataaattcattccttgaaaaggaaggaatggagaaaattgcagaaagattgcaaacaacagtacacaccttacaggtcatcata

SEQ ID NO: 53747 - DNA, 120 bp, Artificial Sequence
  ENSG00000068784_22 (sequence is synthesized)
gatggtctcagccagcctgaaagctttgactttcgaacagattttgataaacctgatttcaagagaagcatagtatgcctggaagatctgcagattgggacagttcttacaggcaaagtt

SEQ ID NO: 53748 - DNA, 120 bp, Artificial Sequence
  ENSG00000068784_23 (sequence is synthesized)
gagaatgccactctctttggaatttttgtggatataggagtggggaaatctgggctgattcccatacgaaatgtaacagaagcaaaactttcaaaaacaaagaagagaagaagccttgga

SEQ ID NO: 53749 - DNA, 120 bp, Artificial Sequence
  ENSG00000068784_24 (sequence is synthesized)
ctgggccccggagaaagagtggaagtccaagtactcaacattgacatcccccgatctaggattactctggacctcattcgggtgttatgagtatcccacgaaggccagacgctgatttta

SEQ ID NO: 53750 - DNA, 120 bp, Artificial Sequence
  ENSG00000068784_25 (sequence is synthesized)
ttttctcatttccacagattgacaaggataagtcagttgtttgtaaactctaggtagcagatgagaaataattcacttaatatcagaaatattttccaaacactttcctttattttttct

SEQ ID NO: 53751 - DNA, 120 bp, Artificial Sequence
  ENSG00000068784_26 (sequence is synthesized)
tctgaataaatagaaaaccaacagtttgatttccttttcccttaaaggaaacaactaatacacattcttatatggctttatgtagtaatagttttctgactaaaattttgttttttattt

SEQ ID NO: 53752 - DNA, 120 bp, Artificial Sequence
  ENSG00000068784_27 (sequence is synthesized)
tttgtaatttatctttaactccttttgcattttgtataacagattgcttaacttctacttgccaacatctgccttgctggacttgtatgggattgtcttcttgatttgaattgtaccgtc

SEQ ID NO: 53753 - DNA, 120 bp, Artificial Sequence
  ENSG00000068784_28 (sequence is synthesized)
tttgttgacacagtagggctgggcagtgtttaatccttccattttatagatttttttttaatcaggccttttggacttcattcataattttgcaataatctcttttcccttgtcatgcaa

SEQ ID NO: 53754 - DNA, 120 bp, Artificial Sequence
  ENSG00000068784_29 (sequence is synthesized)
gccaaaaatataccagtaaaacagattctgacgtgtttgtagttatcaaatgaatggctcgaaacacttctcaaaaggatatacgtattgaccccaacaataaatgtttgtggctagtga

SEQ ID NO: 53755 - DNA, 120 bp, Artificial Sequence
  ENSG00000068784_30 (sequence is synthesized)
agaagtactggatcccctttgtgctgaatctctctcagtttcagctcctgttctcaaactgactgttgagatttccagggaagtcagatacttcatactgatgtggtttacttgcattgt

SEQ ID NO: 53756 - DNA, 120 bp, Artificial Sequence
  ENSG00000068784_31 (sequence is synthesized)
ataaatctaccagtctatggtatttggttacagcagcagaaaattgaccaagacaaccccttaccataaacctgagtagcaaatgcaacatcaaaaccccaccccggcgctccctcggga

SEQ ID NO: 53757 - DNA, 120 bp, Artificial Sequence
  ENSG00000068784_32 (sequence is synthesized)
tcctcgctctagccccgcctccgtccagcctggctccgccccgttcggtagcgccgcgccttggaggtctgtggctaacttggtccggaagaagcgaggcggaccttctggcgtttgaaa

SEQ ID NO: 53758 - DNA, 120 bp, Artificial Sequence
  ENSG00000068784_33 (sequence is synthesized)
aatttcagtttctgtcccaagctttattatttctgttaccttattcccttctccaccatgggtcttcctgtgtgtcaggattttttattctggcaattaaccgtggagaaaatttgaagg

SEQ ID NO: 53759 - DNA, 120 bp, Artificial Sequence
  ENSG00000068784_34 (sequence is synthesized)
ataatcttatcttattgaagagaggactcagtaacaattgcttttcctgtttctgtatgtcataaacgacatggtattatttaatactctcattaaacaacaaattattaaaaatgcatc

SEQ ID NO: 53760 - DNA, 120 bp, Artificial Sequence
  ENSG00000068784_35 (sequence is synthesized)
ctttaatactcttattaaacaataagccatgttattttaaatgtatagtagttgtatgttgtatgttaagatatggagagaaaatactgtttactatggaaacttgatgtaaatattctc

SEQ ID NO: 53761 - DNA, 120 bp, Artificial Sequence
  ENSG00000068784_36 (sequence is synthesized)
tgccccaaggaatggtacacttatataaaattatattagcttaaaatgtgtaattctgatatactcagcttttgttacgtaacatattcaggaatataacccctacaataactatctaag

SEQ ID NO: 53762 - DNA, 120 bp, Artificial Sequence
  ENSG00000068784_37 (sequence is synthesized)
tgtataaaaagaaagctgtctgttaaataatttgatattcaactttcatggttttatatgcctaatggctattcttcaaatatatgttttggtttaccttttggttctattttggcaaaa

SEQ ID NO: 53763 - DNA, 120 bp, Artificial Sequence
  ENSG00000068784_38 (sequence is synthesized)
gaaaccaatttgggagattctgattagaggcagaaaattgccttctatatggaacagaaaataatgtgttccaaaatttttaatacccttatgagggttaaatcacttaactctttgtat

SEQ ID NO: 53764 - DNA, 120 bp, Artificial Sequence
  ENSG00000068784_39 (sequence is synthesized)
aactctttgtatctgacccatttaggaaatgtgacatgccttttcttttttttttgtttttgagatagagcctcgctctgtcgccaggctggaatgcagtggcgcaatctcgactcactg

SEQ ID NO: 53765 - DNA, 120 bp, Artificial Sequence
  ENSG00000068796_0 (sequence is synthesized)
cggtgcgggccctcccactctaccccgcgccgtctcacggccccggccctagcttcaccccgactacccggcgtgcgcgtcctcctgccggcctgcaggcccggggcctccgcctgcttc

SEQ ID NO: 53766 - DNA, 120 bp, Artificial Sequence
  ENSG00000068796_1 (sequence is synthesized)
cctgcttccccacagctgctccttgcggccccgcttgcgttcacgctgtcgcccgggccggcgcggccgcgggcaaccgctccccctcccacacctaccccgccccctccccgccttttc

SEQ ID NO: 53767 - DNA, 120 bp, Artificial Sequence
  ENSG00000068796_2 (sequence is synthesized)
cgccccctccccgccttttccgccctccggtccccctccctcggcccgctgctgctgctccagatgaggtgatggcaacggccaacttcggcaagatccagatcgggatttacgtggaga

SEQ ID NO: 53768 - DNA, 120 bp, Artificial Sequence
  ENSG00000068796_3 (sequence is synthesized)
tcaagcgcagcgatggccgaatacatcaagcaatggtaacatctttaaatgaagataatgaaagtgtaactgttgaatggatagaaaatggagatacaaaaggcaaagagattgacctgg

SEQ ID NO: 53769 - DNA, 120 bp, Artificial Sequence
  ENSG00000068796_4 (sequence is synthesized)
agagcatcttttcacttaaccctgaccttgttcctgatgaagaaattgaacccagtccagaaacacctccacctccagcatcctcagccaaagtaaacaaaattgtaaagaatcgacgga

SEQ ID NO: 53770 - DNA, 120 bp, Artificial Sequence
  ENSG00000068796_5 (sequence is synthesized)
ctgtagcttctattaagaatgaccctccttcaagagataatagagtggttggttcagcacgtgcacggcccagtcaatttcctgaacagtcttcctctgcacaacagaatggtagtgttt

SEQ ID NO: 53771 - DNA, 120 bp, Artificial Sequence
  ENSG00000068796_6 (sequence is synthesized)
cagatatatctccagttcaagctgcaaaaaaggaatttggacccccttcacgtagaaaatctaattgtgtgaaagaagtagaaaaactgcaagaaaaacgagagaaaaggagattgcaac

SEQ ID NO: 53772 - DNA, 120 bp, Artificial Sequence
  ENSG00000068796_7 (sequence is synthesized)
agcaagaacttagagaaaaaagagcccaggacgttgatgctacaaacccaaattatgaaattatgtgtatgatcagagactttagaggaagtttggattatagaccattaacaacagcag

SEQ ID NO: 53773 - DNA, 120 bp, Artificial Sequence
  ENSG00000068796_8 (sequence is synthesized)
atcctattgatgaacataggatatgtgtgtgtgtaagaaaacgaccactcaataaaaaagaaactcaaatgaaagatcttgatgtaatcacaattcctagtaaagatgttgtgatggtac

SEQ ID NO: 53774 - DNA, 120 bp, Artificial Sequence
  ENSG00000068796_9 (sequence is synthesized)
atgaaccaaaacaaaaagtagatttaacaaggtacctagaaaaccaaacatttcgttttgattatgcctttgatgactcagctcctaatgaaatggtttacaggtttactgctagaccac

SEQ ID NO: 53775 - DNA, 120 bp, Artificial Sequence
  ENSG00000068796_10 (sequence is synthesized)
aaggggaatggctacatgctttgcttatgggcagactggaagtggaaaaactcatactatgggtggtgacttttcaggaaagaaccaagattgttctaaaggaatttatgcattagcagc

SEQ ID NO: 53776 - DNA, 120 bp, Artificial Sequence
  ENSG00000068796_11 (sequence is synthesized)
tcgagatgtctttttaatgctaaagaagccaaactataagaagctagaacttcaagtatatgcaaccttctttgaaatttatagtggaaaggtgtttgacttgctaaacaggaaaacaaa

SEQ ID NO: 53777 - DNA, 120 bp, Artificial Sequence
  ENSG00000068796_12 (sequence is synthesized)
attaagagttctagaagatggaaaacagcaggttcaagtggtgggattacaggaacgggaggtcaaatgtgttgaagatgtactgaaactcattgacataggcaacagttgcagaacatc

SEQ ID NO: 53778 - DNA, 120 bp, Artificial Sequence
  ENSG00000068796_13 (sequence is synthesized)
cggtcaaacatctgcaaatgcacattcatctcggagccatgcagtgtttcagattattcttagaaggaaaggaaaactacatggcaaattttctctcattgatttggctggaaatgaaag

SEQ ID NO: 53779 - DNA, 120 bp, Artificial Sequence
  ENSG00000068796_14 (sequence is synthesized)
aggagctgatacttccagtgcggacaggcaaactaggcttgaaggtgctgaaattaataaaagccttttagcactcaaggagtgcatcagagccttaggtagaaataaacctcatactcc

SEQ ID NO: 53780 - DNA, 120 bp, Artificial Sequence
  ENSG00000068796_15 (sequence is synthesized)
tttccgtgcaagtaaactcactcaggtgttaagagattctttcataggtgaaaactctcgtacctgcatgattgccacaatctctccaggaatggcatcctgtgaaaatactcttaatac

SEQ ID NO: 53781 - DNA, 120 bp, Artificial Sequence
  ENSG00000068796_16 (sequence is synthesized)
attaagatatgcaaatagggtcaaagaattgactgtagatccaactgctgctggtgatgttcgtccaataatgcaccatccaccaaaccagattgatgacttagagacacagtggggtgt

SEQ ID NO: 53782 - DNA, 120 bp, Artificial Sequence
  ENSG00000068796_17 (sequence is synthesized)
ggggagttcccctcagagagatgatctaaaacttctttgtgaacaaaatgaagaagaagtctctccacagttgtttactttccacgaagctgtttcacaaatggtagaaatggaagaaca

SEQ ID NO: 53783 - DNA, 120 bp, Artificial Sequence
  ENSG00000068796_18 (sequence is synthesized)
agttgtagaagatcacagggcagtgttccaggaatctattcggtggttagaagatgaaaaggccctcttagagatgactgaagaagtagattatgatgtcgattcatatgctacacaact

SEQ ID NO: 53784 - DNA, 120 bp, Artificial Sequence
  ENSG00000068796_19 (sequence is synthesized)
tgaagctattcttgagcaaaaaatagacattttaactgaactgcgggataaagtgaaatctttccgtgcagctctacaagaggaggaacaagccagcaagcaaatcaacccgaagagacc

SEQ ID NO: 53785 - DNA, 120 bp, Artificial Sequence
  ENSG00000068796_20 (sequence is synthesized)
ccgtgccctttaaaccggcatttgctgctaaaggatacccagaaccctcactactgtaacatacaacggttcagctgtaagggccatttgaaagtttggaattttaagtgtctgtggaaa

SEQ ID NO: 53786 - DNA, 120 bp, Artificial Sequence
  ENSG00000068796_21 (sequence is synthesized)
tatgttgagatgtgctattttgacaacacttattcatcttgttcagggattaggagcagacagcaagaacctgtaccctttcctgctcccagttattcaactgagtacagatgtttcaca

SEQ ID NO: 53787 - DNA, 120 bp, Artificial Sequence
  ENSG00000068796_22 (sequence is synthesized)
gcctccacatgtttatcttctggaagatggtttagaattatggttagtaactttggaaaacagtccatgtattacaccagagttgcttcgtatatttcagaatatgtcaccacttcttga

SEQ ID NO: 53788 - DNA, 120 bp, Artificial Sequence
  ENSG00000068796_23 (sequence is synthesized)
actaagttcagaaaatcttagaacttgctttaagatcatcaatggttatatctttttatcatcaacagaatttttacagacatacgcagtaggtctatgccagtccttttgtgaactttt

SEQ ID NO: 53789 - DNA, 120 bp, Artificial Sequence
  ENSG00000068796_24 (sequence is synthesized)
gcattttaccggcttggcctctgacggggatggggatgggggtgggggagcgggaagaccagcgatttcacatttagagaaccgactgctggtcggaggccgagatggggggaaagagcc

SEQ ID NO: 53790 - DNA, 120 bp, Artificial Sequence
  ENSG00000068796_25 (sequence is synthesized)
agttccgtcgccttaaactgccgtctggttgtcaggcctccccggtttcgtcgtcgaccatgctgctttcttttttgccacttcttgggagaaaaatgtggagaatatcgcgctgagcca

SEQ ID NO: 53791 - DNA, 120 bp, Artificial Sequence
  ENSG00000068796_26 (sequence is synthesized)
cacctgtccctggtatacacccaagggagaggaaatcaccaccttgtgaagatatctgcactctcgcgttcattgcagcattattcacagtagccaagatagggaagcaacctaaatgtc

SEQ ID NO: 53792 - DNA, 120 bp, Artificial Sequence
  ENSG00000068796_27 (sequence is synthesized)
attttgtttcatttacacaaatagtgatttacttttggagatccttgtcagttttattttctatttgatgaagtaagactgtggactcaatccagagccagatagtagggggaagccaca

SEQ ID NO: 53793 - DNA, 120 bp, Artificial Sequence
  ENSG00000068796_28 (sequence is synthesized)
gcatttccttttaactcagttcaatttttgtagtgagactgagcagttttaaatcctttgcgtgcatgcatacctcatcagtgattgtacataccttgcccactcctagagacagctgtg

SEQ ID NO: 53794 - DNA, 120 bp, Artificial Sequence
  ENSG00000068796_29 (sequence is synthesized)
ctcaccttttcctgctttgtgccttgattaaggctactgaccctaaatttctgaagcacagccaagaaaaattacattccttgtcattgtaaattacctttgtgtgtacatttttactgt

SEQ ID NO: 53795 - DNA, 120 bp, Artificial Sequence
  ENSG00000068796_30 (sequence is synthesized)
atttgagacattttttgtgtgtgactagttaattttgcaggatgtgccatatcattgaacggaactaaagtctgtgacagtggatatagctgctggaccattccatcttatatgtaaaga

SEQ ID NO: 53796 - DNA, 120 bp, Artificial Sequence
  ENSG00000068796_31 (sequence is synthesized)
accattccatcttatatgtaaagaaatctggaattattattttaaaaccatataacatgtgattataatttttcttagcattttctttgtaaagaactacaatataaactagttggtgta

SEQ ID NO: 53797 - DNA, 120 bp, Artificial Sequence
  ENSG00000068796_32 (sequence is synthesized)
gtcctcaaagagtaaacactctaaatacaagcttgattgcagatttcattttaccactgtggaaaatttaacttcttcttattagtctgttaattgggttttttaaagtatattttggag

SEQ ID NO: 53798 - DNA, 120 bp, Artificial Sequence
  ENSG00000068796_33 (sequence is synthesized)
caaaaatttttttgtgaaattatagcaatgtttcagtttgagtttaaaattctgggcagatgataatttgtcagatgttacagaagaatgtgttgggctccttgattctttgaattaaaa

SEQ ID NO: 53799 - DNA, 120 bp, Artificial Sequence
  ENSG00000068831_0 (sequence is synthesized)
cgatttcattcctcgctccccacaggtccctctccccaaaatattcccatcttgtcctagcccatcccccagactatctcaaggaccagctgtccccacgcccccgacctccactaggcc

SEQ ID NO: 53800 - DNA, 120 bp, Artificial Sequence
  ENSG00000068831_1 (sequence is synthesized)
tgtgccacccgctgcctgcaggaagacgcccggtcccgggccgggttagccccatgggaacggggttcggtccgagcccggtgggaggctcccggagcgcagcctgggcccagcccaccc

SEQ ID NO: 53801 - DNA, 120 bp, Artificial Sequence
  ENSG00000068831_2 (sequence is synthesized)
cgcgccggcggccatggcaggcaccctggacctggacaagggctgcacggtggaggagctgctccgcgggtgcatcgaagccttcgatgactccgggaaggtgcgggacccgcagctggt

SEQ ID NO: 53802 - DNA, 120 bp, Artificial Sequence
  ENSG00000068831_3 (sequence is synthesized)
gcgcatgttcctcatgatgcacccctggtacatcccctcctctcagctggcggccaagctgctccacatctaccaacaatcccggaaggacaactccaattccctgcaggtgaaaacgtg

SEQ ID NO: 53803 - DNA, 120 bp, Artificial Sequence
  ENSG00000068831_4 (sequence is synthesized)
ccacctggtcaggtactggatctccgccttcccagcggagtttgacttgaacccggagttggctgagcagatcaaggagctgaaggctctgctagaccaagaagggaaccgacggcacag

SEQ ID NO: 53804 - DNA, 120 bp, Artificial Sequence
  ENSG00000068831_5 (sequence is synthesized)
cagcctaatcgacatagacagcgtccctacctacaagtggaagcggcaggtgactcagcggaaccctgtgggacagaaaaagcgcaagatgtccctgttgtttgaccacctggagcccat

SEQ ID NO: 53805 - DNA, 120 bp, Artificial Sequence
  ENSG00000068831_6 (sequence is synthesized)
ggagctggcggagcatctcacctacttggagtatcgctccttctgcaagatcctgtttcaggactatcacagtttcgtgactcatggctgcactgtggacaaccccgtcctggagcggtt

SEQ ID NO: 53806 - DNA, 120 bp, Artificial Sequence
  ENSG00000068831_7 (sequence is synthesized)
catctccctcttcaacagcgtctcacagtgggtgcagctcatgatcctcagcaaacccacagccccgcagcgggccctggtcatcacacactttgtccacgtggcggagaagctgctaca

SEQ ID NO: 53807 - DNA, 120 bp, Artificial Sequence
  ENSG00000068831_8 (sequence is synthesized)
gctgcagaacttcaacacgctgatggcagtggtcgggggcctgagccacagctccatctcccgcctcaaggagacccacagccacgttagccctgagaccatcaagctctgggagggtct

SEQ ID NO: 53808 - DNA, 120 bp, Artificial Sequence
  ENSG00000068831_9 (sequence is synthesized)
tggcaactaccggcgtcggctggcagcctgtgtgggcttccgcttcccgatcctgggtgtgcacctcaaggacctggtggccctgcagctggcactgcctgactggctggacccagcccg

SEQ ID NO: 53809 - DNA, 120 bp, Artificial Sequence
  ENSG00000068831_10 (sequence is synthesized)
gacccggctcaacggggccaagatgaagcagctctttagcatcctggaggagctggccatggtgaccagcctgcggccaccagtacaggccaaccccgacctgctgagcctgctcacggt

SEQ ID NO: 53810 - DNA, 120 bp, Artificial Sequence
  ENSG00000068831_11 (sequence is synthesized)
gtctctggatcagtatcagacggaggatgagctgtaccagctgtccctgcagcgggagccgcgctccaagtcctcgccaaccagccccacgagttgcaccccaccaccccggcccccggt

SEQ ID NO: 53811 - DNA, 120 bp, Artificial Sequence
  ENSG00000068831_12 (sequence is synthesized)
actggaggagtggacctcggctgccaaacccaagctggatcaggccctcgtggtggagcacatcgagaagatggtggagtctgtgttccggaactttgacgtcgatggggatggccacat

SEQ ID NO: 53812 - DNA, 120 bp, Artificial Sequence
  ENSG00000068831_13 (sequence is synthesized)
ctcacaggaagaattccagatcatccgtgggaacttcccttacctcagcgcctttggggacctcgaccagaaccaggatggctgcatcagcagggaggagatggtttcctatttcctgcg

SEQ ID NO: 53813 - DNA, 120 bp, Artificial Sequence
  ENSG00000068831_14 (sequence is synthesized)
ctccagctctgtgttgggggggcgcatgggcttcgtacacaacttccaggagagcaactccttgcgccccgtcgcctgccgccactgcaaagccctgatcctgggcatctacaagcaggg

SEQ ID NO: 53814 - DNA, 120 bp, Artificial Sequence
  ENSG00000068831_15 (sequence is synthesized)
cctcaaatgccgagcctgtggagtgaactgccacaagcagtgcaaggatcgcctgtcagttgagtgtcggcgcagggcccagagtgtgagcctggaggggtctgcaccctcaccctcacc

SEQ ID NO: 53815 - DNA, 120 bp, Artificial Sequence
  ENSG00000068831_16 (sequence is synthesized)
catgcacagccaccatcaccgcgccttcagcttctctctgccccgccctggcaggcgaggctccaggcctccagagatccgtgaggaggaggtacagacggtggaggatggggtgtttga

SEQ ID NO: 53816 - DNA, 120 bp, Artificial Sequence
  ENSG00000068831_17 (sequence is synthesized)
catccacttgtaatagatgctgtggttggatcaaggactcattcctgccttggagaaaatacttcaaccagagcagggagcctgggggtgtcggggcaggaggctggggatgggggtggg

SEQ ID NO: 53817 - DNA, 120 bp, Artificial Sequence
  ENSG00000068831_18 (sequence is synthesized)
atatgagggtggcatgcagctgagggcagggccagggctggtgtccctaaggttgtacagactcttgtgaatatttgtattttccagatggaataaaaaggcccgtgtaattaaccttca

SEQ ID NO: 53818 - DNA, 120 bp, Artificial Sequence
  ENSG00000068831_19 (sequence is synthesized)
gggagcgcacggaggtggggtcggccaggccggtgcgggctccttgcggcaggtcccaagagggttcggtccgagcccggtgggaggctcccggagcgcagcctgggcccagcccacccc

SEQ ID NO: 53819 - DNA, 120 bp, Artificial Sequence
  ENSG00000068831_20 (sequence is synthesized)
actgccttgcgtgtgtgcacacgtgtgaggatgtcagcgcctgtgtggccgcgggactcaaggctggcctggctcaagtgaacagcacgtccaggaggcgacctcgtccgcgggtttgca

SEQ ID NO: 53820 - DNA, 120 bp, Artificial Sequence
  ENSG00000068831_21 (sequence is synthesized)
gttgctaatggtgtcatgcacccaccggccacccttggcgcgagcgcccccctctggacaccctgctccgtgcgcgctcacagttcgcctgtgcggggccggggccagggtcaggagccg

SEQ ID NO: 53821 - DNA, 120 bp, Artificial Sequence
  ENSG00000068831_22 (sequence is synthesized)
gggatagggaggaagagggcctgtggacaagctgagccgggacccctgggacctttgcggaggtggcctgggagcgctcagttcccaggctcaggcttcccgctgacgcctcctggccgc

SEQ ID NO: 53822 - DNA, 120 bp, Artificial Sequence
  ENSG00000068831_23 (sequence is synthesized)
agcgggctccccccgccccaggaatgttcctctcccatccagtccgcctcccctagggcaggccccctgggggctgccgcagccccgcctcgccttcctgggctcccgggagggggcgag

SEQ ID NO: 53823 - DNA, 120 bp, Artificial Sequence
  ENSG00000068831_24 (sequence is synthesized)
gcgggcaggacgcctgggttctctccccccacctcccataccagggagaaattcctccgaggtcccctcaggctctgggttcccaaaataaccctgcgggggaagggaggctgtggaggg

SEQ ID NO: 53824 - DNA, 120 bp, Artificial Sequence
  ENSG00000068831_25 (sequence is synthesized)
agggaagcgggaggggcgcagagccgagctgcggggtgctgcaggtgcctctggggagagggcgcgaggagaaggcgccctgcggggggctgggcgccagccagtcctgggatcttggtt

SEQ ID NO: 53825 - DNA, 120 bp, Artificial Sequence
  ENSG00000068831_26 (sequence is synthesized)
cgtccccatcctcgtgaagcccctcggccttcccgcgactccgagggtgggccggaagcctctctgcgggtccgtttcccaactggcgggttgcaccatcccgggccagaccgtttaacc

SEQ ID NO: 53826 - DNA, 120 bp, Artificial Sequence
  ENSG00000068831_27 (sequence is synthesized)
ggttgcaccatcccgggccagaccgtttaaccccgggagtggccgcgggggacaactccgcccctgtccagcagggggcgtgcccgccccgccccgtttctgcccgcggggccgctcccc

SEQ ID NO: 53827 - DNA, 120 bp, Artificial Sequence
  ENSG00000068831_28 (sequence is synthesized)
ggtgcttttggcagtgagtattgccttgaattcatggcaatgaattcaatccccaggggctgagagagccagtcgtgggggacagtaagggaggtttttactctttcacctgtccctgac

SEQ ID NO: 53828 - DNA, 120 bp, Artificial Sequence
  ENSG00000068831_29 (sequence is synthesized)
cctgactcctcctcaccccctcctacatttccagggctgaggtagggaggatagttgtgggggtatgactcctctgtcctttgtccccagctctgggagggtctcacggaactagtgacg

SEQ ID NO: 53829 - DNA, 120 bp, Artificial Sequence
  ENSG00000068831_30 (sequence is synthesized)
cggagcactgccctggaagccagcacgagtgtcctgttcaagacccagcactcagcccctaggagtcacagggcctggcaggccagctgcacggggctgaagtgcccctgggtagggtgg

SEQ ID NO: 53830 - DNA, 120 bp, Artificial Sequence
  ENSG00000068831_31 (sequence is synthesized)
agtctgagcccgggtccctgcctcccaggcacagtccagggcacagccctgacccggacccaccctgctccgcagcgtgcagtctctttaacgaaagcctcctccgcaacgcagggcaga

SEQ ID NO: 53831 - DNA, 120 bp, Artificial Sequence
  ENSG00000068831_32 (sequence is synthesized)
gagatgcacgcccttcagacagatgaggtttcccttctctagccttccccagcggcggcgaagggagggccgggtcccggactctgacacttgaggggcattatctgtctcccggggaat

SEQ ID NO: 53832 - DNA, 80 bp, Artificial Sequence
  ENSG00000068831_33 (sequence is synthesized)
gtgcggggcgagagggagcccccggtgggggtggcgcagccggcggggttcggtccgagcccggtgggaggctcccggag

SEQ ID NO: 53833 - DNA, 120 bp, Artificial Sequence
  ENSG00000068831_34 (sequence is synthesized)
aatgtctgttgaactgaatgagtgagggtcatgttgctctctcgcttaaaaaccttccatggctccctattgccttcaacatgcctcctctgggcagcttggcgttcctgcctcatcttc

SEQ ID NO: 53834 - DNA, 120 bp, Artificial Sequence
  ENSG00000068831_35 (sequence is synthesized)
cactgccaccacccatcccacacacctcctcctgtagctgcgctgggtcggctccccgtcggctgagctctcgagtcctttctcatcatggtgctctgctcatatcatcccccttgctgc

SEQ ID NO: 53835 - DNA, 120 bp, Artificial Sequence
  ENSG00000068831_36 (sequence is synthesized)
ctcctccgtgttaccaagactcagttcaggcatgaagtctccgtgggctctgagggttcggggctcttccggggtagaatttgtcgttcccacctctgttttccatggcactttgtacag

SEQ ID NO: 53836 - DNA, 120 bp, Artificial Sequence
  ENSG00000068831_37 (sequence is synthesized)
actcctgtacaaagacctctgtacatgtgtcacgctgttttgtgatcatgtgtttctgtgtctgtctccctcagtagactgtgagctcctcgagggcaggaaccgtgtcttactcatctc

SEQ ID NO: 53837 - DNA, 120 bp, Artificial Sequence
  ENSG00000068831_38 (sequence is synthesized)
tgtattcccagcgcctagcacagtgcctggcacagagtacgttgttcataaatgtgtgttgagtgcatgacggggtcgggggagatgaggaggagttgctgggactgggaacattcgtgc

SEQ ID NO: 53838 - DNA, 120 bp, Artificial Sequence
  ENSG00000068831_39 (sequence is synthesized)
ctaggacagtgcctcgcattatgtaggttctcagtaagcgtgaatggtgtgtctgtgtgagtggggggccacgagtcatgcgcatgtccagcaaagggctcactacccctgcccccccag

SEQ ID NO: 53839 - DNA, 120 bp, Artificial Sequence
  ENSG00000068831_40 (sequence is synthesized)
agctaaggcgcgctggatccccggagggcggaggacctccacggtgcacccagcttttcccagccaccttccagcggggccctcccccgcgtacccccatttggcagatgagaaaattga

SEQ ID NO: 53840 - DNA, 120 bp, Artificial Sequence
  ENSG00000068831_41 (sequence is synthesized)
ggctcccagaggccaagtgattctcaaggtcacacgaggaagcggtagagccaggcggggacggctctgggtggctcttaggaaaagtccgcctgagaactccgtacaggagctcccctg

SEQ ID NO: 53841 - DNA, 120 bp, Artificial Sequence
  ENSG00000068831_42 (sequence is synthesized)
tcctccagcctgggggagtgagtatgtgtagggccggggtacctttccgtggggcaaggctctgccaaaatctgggagtgaggggagtcagggagctggggccgcagggcgggccctgca

SEQ ID NO: 53842 - DNA, 120 bp, Artificial Sequence
  ENSG00000068831_43 (sequence is synthesized)
agggtttcttcgtgcaggtgtgcacagggtgtgggtgccattgtgtgtgagagacggaggatgggaggccggtgcctgtggcccggtgcgtgtaagtgcggacgcctgcacctccactta

SEQ ID NO: 53843 - DNA, 120 bp, Artificial Sequence
  ENSG00000068831_44 (sequence is synthesized)
gtgaggatgtcagcgcctgtgtggccgcgggactcaaggctggcctggctcaagtgaacagcacgtccaggaggcgacctcgtccgcgggtttgcattctggggtggacgagctgggtcc

SEQ ID NO: 53844 - DNA, 120 bp, Artificial Sequence
  ENSG00000068831_45 (sequence is synthesized)
ctccctcctctccactctgcccttccctcctgagaatcccaggatgtgaggatgggaagagctcttagcagccacctcacccatccatcttgtaggacagaggcatcctgggggtagggc

SEQ ID NO: 53845 - DNA, 120 bp, Artificial Sequence
  ENSG00000068831_46 (sequence is synthesized)
agtagtgttgggcagacttccctctcccagggattcccctctctgttccccggggctctgggcttcccctgcctctggccctagctcaggcccgaccatttccatagccaaccagcccca

SEQ ID NO: 53846 - DNA, 120 bp, Artificial Sequence
  ENSG00000068831_47 (sequence is synthesized)
gcggcgtggagagcgggcgggagccgcagccgcagcgaggccggcgggcgggagcgcacggaggtggggtcggccaggccggtgcgggctccttgcggcaggtcccaagaatgagaaaat

SEQ ID NO: 53847 - DNA, 120 bp, Artificial Sequence
  ENSG00000068831_48 (sequence is synthesized)
cgtactgtgagctcctcgagggcaggaaccgtgtcttactcatctctgtattcccagcgcctagcacagtgcctggcacagaccctacctacaagtggaagcggcaggtgactcagcgga

SEQ ID NO: 53848 - DNA, 120 bp, Artificial Sequence
  ENSG00000068831_49 (sequence is synthesized)
gtaatagatggtgagtcctcccacagctggcaccagagctccccactgagggctgggggggagctggggagtatcagggaaatgggtgctttatccaaatggctccaagccaggtgggct

SEQ ID NO: 53849 - DNA, 120 bp, Artificial Sequence
  ENSG00000068878_0 (sequence is synthesized)
cgctgccgccgccaacgaactgagagccgcgtggggcccagcagcacgccggccagggaagggggcctagcgatcggtccgagggcgacgggccgccagcggccgcagggcgacgaagac

SEQ ID NO: 53850 - DNA, 120 bp, Artificial Sequence
  ENSG00000068878_1 (sequence is synthesized)
acgaagacgcggaggaggcggagcccggagaggggtgggggccggggagggttcgggtgggagggggtggggggggtgtccctgggctcatggagccggccgagcgggcgggagtcggag

SEQ ID NO: 53851 - DNA, 120 bp, Artificial Sequence
  ENSG00000068878_2 (sequence is synthesized)
agcccccggagccgggcgggcgtcccgagccgggcccgcggggcttcgtcccgcagaaggagatcgtctacaacaagctgctgccctacgcggagcggctagacgccgagtccgacttgc

SEQ ID NO: 53852 - DNA, 120 bp, Artificial Sequence
  ENSG00000068878_3 (sequence is synthesized)
agctggcccagatcaaatgcaacctgggccgggccgtgcagctccaagagctgtggcccgggggcctcttctggaccaggaaactctccacatatattcgactttatgggagaaaattta

SEQ ID NO: 53853 - DNA, 120 bp, Artificial Sequence
  ENSG00000068878_4 (sequence is synthesized)
gcaaagaagatcatgttctttttattaagttattgtatgagctggtatcaattccaaaactggaaatcagcatgatgcagggatttgcccgccttttgatcaacttgttaaagaaaaagg

SEQ ID NO: 53854 - DNA, 120 bp, Artificial Sequence
  ENSG00000068878_5 (sequence is synthesized)
aacttctttcaagagctgatttggagttaccctggagaccactttatgacatggtagaaagaatattatattccaagacagagcacctaggattaaattggtttcctaattctgtagaaa

SEQ ID NO: 53855 - DNA, 120 bp, Artificial Sequence
  ENSG00000068878_6 (sequence is synthesized)
atattctcaaaacactcgtgaaaagctgccgaccatattttccagcagatgccaccgctgagatgctagaagaatggcgacctttaatgtgcccttttgatgtaaccatgcaaaaggcca

SEQ ID NO: 53856 - DNA, 120 bp, Artificial Sequence
  ENSG00000068878_7 (sequence is synthesized)
tcacttattttgaaatatttcttcctacctcccttcctccagaacttcatcataaaggttttaaactttggtttgatgaattaattggcctttgggtttcagtgcaaaatctcccacaat

SEQ ID NO: 53857 - DNA, 120 bp, Artificial Sequence
  ENSG00000068878_8 (sequence is synthesized)
gggaggggcaactagtaaatctctttgctcgattggctacagataatatagggtacatagattgggatccatatgtaccaaagatatttacaagaattctgagaagcttgaacctcccag

SEQ ID NO: 53858 - DNA, 120 bp, Artificial Sequence
  ENSG00000068878_9 (sequence is synthesized)
tgggaagcagtcaagtgttagtcccaagatttttaacaaatgcttatgatataggacatgctgtaatatggatcaccgccatgatgggtggaccaagtaagctagtgcaaaaacacttag

SEQ ID NO: 53859 - DNA, 120 bp, Artificial Sequence
  ENSG00000068878_10 (sequence is synthesized)
ctggtttgtttaacagcatcacatctttttaccatccttcaaataatgggcgctggctgaacaagttaatgaaactacttcagcggttgccaaacagtgttgttagaagattgcatcgtg

SEQ ID NO: 53860 - DNA, 120 bp, Artificial Sequence
  ENSG00000068878_11 (sequence is synthesized)
aaagatacaagaagccctcttggttaactcctgtgcctgatagccacaagcttactgatcaagatgttacagactttgtacaatgcattattcagcctgtcctcttggctatgtttagca

SEQ ID NO: 53861 - DNA, 120 bp, Artificial Sequence
  ENSG00000068878_12 (sequence is synthesized)
aaaccggtagtctagaagcagcccaggctttgcagaatcttgcactcatgagacctgaattggtaataccccctgtacttgaaagaacatatcctgcattagagacattaacagaacctc

SEQ ID NO: 53862 - DNA, 120 bp, Artificial Sequence
  ENSG00000068878_13 (sequence is synthesized)
accagctcacagctactttaagttgtgtaattggagtagcccgcagtttggtatcaggaggcagatggtttcctgaaggtcctacacatatgctacctctgttgatgagagcattgcctg

SEQ ID NO: 53863 - DNA, 120 bp, Artificial Sequence
  ENSG00000068878_14 (sequence is synthesized)
gggtggatccaaatgactttagtaaatgcatgatcacattccagttcatagcaacattttctactctggtgcctttagtagattgttcatctgtactacaagaaagaaatgacctcacag

SEQ ID NO: 53864 - DNA, 120 bp, Artificial Sequence
  ENSG00000068878_15 (sequence is synthesized)
aagtggaacgagaactttgttcagccacagctgaatttgaggatttcgtcttacagtttatggacagatgttttggacttatagaaagtagcacattggagcaaacaagagaagagacag

SEQ ID NO: 53865 - DNA, 120 bp, Artificial Sequence
  ENSG00000068878_16 (sequence is synthesized)
aaactgagaaaatgacacacttggagagtttggtcgaattaggtctgtcttctacgtttagtacaatcctcacccaatgttccaaagaaatatttatggtggcccttcagaaggttttta

SEQ ID NO: 53866 - DNA, 120 bp, Artificial Sequence
  ENSG00000068878_17 (sequence is synthesized)
atttttctacttcacatatatttgaaacaagagtagcaggtcgcatggtggcagacatgtgccgcgctgctgtaaagtgctgcccagaagaatctttgaagctctttgttccccactgct

SEQ ID NO: 53867 - DNA, 120 bp, Artificial Sequence
  ENSG00000068878_18 (sequence is synthesized)
gcagtgttataactcagcttacaatgaatgatgatgtattaaatgatgaagagctagacaaggaattactatggaatcttcaacttttgtctgagattactcgagtggatggaaggaagt

SEQ ID NO: 53868 - DNA, 120 bp, Artificial Sequence
  ENSG00000068878_19 (sequence is synthesized)
tgcttctttatagggagcagcttgtaaagattctccaaagaaccctacatttaacctgtaagcagggttacactctgtcttgtaaccttttgcatcatcttctccgttctaccacactta

SEQ ID NO: 53869 - DNA, 120 bp, Artificial Sequence
  ENSG00000068878_20 (sequence is synthesized)
tctaccctacagaatactgcagtgtgccaggtggctttgacaagcctccttctgaatactttcctatcaaggactggggcaaacccggggacttgtggaatctgggaatccagtggcatg

SEQ ID NO: 53870 - DNA, 120 bp, Artificial Sequence
  ENSG00000068878_21 (sequence is synthesized)
ttccttcttcagaagaagtgtcttttgccttttatcttttggactcctttcttcagcctgagctcgtcaaactccagcattgtggggatggaaaacttgaaatgtctagagatgatattc

SEQ ID NO: 53871 - DNA, 120 bp, Artificial Sequence
  ENSG00000068878_22 (sequence is synthesized)
tacagagtctgactatagtgcacaactgtttaattggctctggaaacctcctacctccgttgaaaggagagccagttactaacttagtaccaagtatggtgtccttggaagagacaaagt

SEQ ID NO: 53872 - DNA, 120 bp, Artificial Sequence
  ENSG00000068878_23 (sequence is synthesized)
tgtatactggacttgaatatgatctgtctcgagagaaccaccgagaagtaattgctacagttataaggaaacttcttaaccacatacttgataattcagaagatgatactaagtcattgt

SEQ ID NO: 53873 - DNA, 120 bp, Artificial Sequence
  ENSG00000068878_24 (sequence is synthesized)
ttcttattataaagattattggagaccttttacaattccaaggatctcacaagcatgaatttgactcccgatggaaaagcttcaacttagtaaagaaatcaatggaaaatcggctccatg

SEQ ID NO: 53874 - DNA, 120 bp, Artificial Sequence
  ENSG00000068878_25 (sequence is synthesized)
ggaaaaaacaacatatcagagcactgttgattgatagagtaatgttacagcatgagctacggacactaactgttgagggttgtgaatacaaaaagatacatcaagatatgatcagagatc

SEQ ID NO: 53875 - DNA, 120 bp, Artificial Sequence
  ENSG00000068878_26 (sequence is synthesized)
ttcttcgtttatctacaagttcatacagtcaggtgagaaataaggctcagcaaacattttttgctgccttgggagcatataacttctgttgcagagatatcattcccttggttttggagt

SEQ ID NO: 53876 - DNA, 120 bp, Artificial Sequence
  ENSG00000068878_27 (sequence is synthesized)
tcttaaggcctgatagacaaggtgttacacagcaacaattcaagggtgccttgtactgtctccttggaaatcacagtggtgtgtgcttggcaaaccttcatgattgggactgtattgtac

SEQ ID NO: 53877 - DNA, 120 bp, Artificial Sequence
  ENSG00000068878_28 (sequence is synthesized)
agacgtggccagcgattgtttcttcagggcttagccaagcaatgtccctggaaaagccatcaatagtgagattgtttgatgatcttgcagaaaagattcataggcagtatgaaacaattg

SEQ ID NO: 53878 - DNA, 120 bp, Artificial Sequence
  ENSG00000068878_29 (sequence is synthesized)
gcttggacttcacaattccaaagtcatgtgttgaaatagcggaattacttcaacagtcaaaaaacccctctatcaaccagatattgcttagcccagaaaaaattaaggaaggaattaaac

SEQ ID NO: 53879 - DNA, 120 bp, Artificial Sequence
  ENSG00000068878_30 (sequence is synthesized)
gacaccttgctagatggtgtggagcaaagaaacctgccctggaaatttgaacatataggcattgggcttctgtctctactgctgagagatgaccgagtgttgcctcttcgtgccatacgg

SEQ ID NO: 53880 - DNA, 120 bp, Artificial Sequence
  ENSG00000068878_31 (sequence is synthesized)
ttttttgttgagaatctcaaccatgatgcaattgtagttcgaaagatggctatctcagctgttgctggtatccttaaacagctaaaaagaacccacaaaaagctgaccattaacccctgt

SEQ ID NO: 53881 - DNA, 120 bp, Artificial Sequence
  ENSG00000068878_32 (sequence is synthesized)
gaaatcagtggatgccctaaacccacccaaattattgctggtgataggcctgataatcattggttgcattatgacagcaaaactataccaagaactaaaaaagaatgggagtcaagttgc

SEQ ID NO: 53882 - DNA, 120 bp, Artificial Sequence
  ENSG00000068878_33 (sequence is synthesized)
tttgtggaaaaaactcactggggatactacacctggccaaagaatatggttgtttatgctggtgtggaagagcagcctaagcttggcagaagcagggaggatatgacagaggcagaacag

SEQ ID NO: 53883 - DNA, 120 bp, Artificial Sequence
  ENSG00000068878_34 (sequence is synthesized)
attatatttgatcatttttctgatcctaaatttgttgagcagttaattacttttctatcattagaagacagaaaaggaaaagataagtttaatccacgacgtttttgcctctttaagggt

SEQ ID NO: 53884 - DNA, 120 bp, Artificial Sequence
  ENSG00000068878_35 (sequence is synthesized)
atattcaggaattttgatgatgccttcctgccagttctgaagccccatttagaacatttggttgcagattcacatgaaagcacccagcgatgtgttgcagaaattatagctggtttaatc

SEQ ID NO: 53885 - DNA, 120 bp, Artificial Sequence
  ENSG00000068878_36 (sequence is synthesized)
agaggttctaagcactggacatttgaaaaggtggagaagctttgggagcttctgtgccctctgcttagaacagcactgtccaatattaccgtagaaacttataatgactggggagcttgt

SEQ ID NO: 53886 - DNA, 120 bp, Artificial Sequence
  ENSG00000068878_37 (sequence is synthesized)
atagcaacatcctgtgaaagcagagatccccggaaacttcactggctttttgaactgctgttggaatcaccattgagtggtgaaggaggatcctttgtagatgcatgtcgactttatgta

SEQ ID NO: 53887 - DNA, 120 bp, Artificial Sequence
  ENSG00000068878_38 (sequence is synthesized)
ctacaaggtggccttgcccagcaagaatggagagtgcctgaactattgcacagactactgaagtacttggaacccaaactcacccaggtttacaaaaatgtcagagaaagaataggaagt

SEQ ID NO: 53888 - DNA, 120 bp, Artificial Sequence
  ENSG00000068878_39 (sequence is synthesized)
gtgctgacctacatattcatgatagatgtatctttgccaaataccacaccaaccatatcgcctcatgtccctgagtttactgctcgaattctggagaaattgaaacctctcatggatgtg

SEQ ID NO: 53889 - DNA, 120 bp, Artificial Sequence
  ENSG00000068878_40 (sequence is synthesized)
gatgaagaaattcagaaccatgttatggaagaaaatggaattggtgaagaagatgagcgaactcagggcattaaactcttgaaaaccatattgaaatggctgatggcaagtgcaggaaga

SEQ ID NO: 53890 - DNA, 120 bp, Artificial Sequence
  ENSG00000068878_41 (sequence is synthesized)
tccttttctacagcagttacagaacaacttcagcttctacctttgtttttcaagattgccccagtggaaaatgacaatagctacgatgaactgaaaagagatgcaaagttatgtttatca

SEQ ID NO: 53891 - DNA, 120 bp, Artificial Sequence
  ENSG00000068878_42 (sequence is synthesized)
ttaatgtctcaggggttgctttaccctcatcaagtgcctttggtacttcaggtgctaaaacaaacagcaagaagcagttcttggcatgcacgatacacagtactgacctacctccagacc

SEQ ID NO: 53892 - DNA, 120 bp, Artificial Sequence
  ENSG00000068878_43 (sequence is synthesized)
atggtattttataacctctttattttcctaaacaatgaagatgcagttaaagatatcaggtggctggttataagtcttttggaggacgaacaactggaggttcgagaaatggctgctact

SEQ ID NO: 53893 - DNA, 120 bp, Artificial Sequence
  ENSG00000068878_44 (sequence is synthesized)
accttaagcggtctgctacagtgtaactttcttaccatggacagtcctatgcagattcattttgagcaactttgcaaaacaaaactacctaagaaaagaaagcgagaccctggttctgta

SEQ ID NO: 53894 - DNA, 120 bp, Artificial Sequence
  ENSG00000068878_45 (sequence is synthesized)
ggagataccattccttctgcagagttggtcaaacgccatgctggggtgctaggacttggtgcatgtgttctttctagtccttacgatgttcccacctggatgccccagctcctcatgaat

SEQ ID NO: 53895 - DNA, 120 bp, Artificial Sequence
  ENSG00000068878_46 (sequence is synthesized)
ctcagtgcacatctaaatgatcctcagcctattgagatgactgtaaaaaaaaccttatccaatttccgaaggactcaccatgacaactggcaggaacataaacagcaattcactgatgac

SEQ ID NO: 53896 - DNA, 120 bp, Artificial Sequence
  ENSG00000068878_47 (sequence is synthesized)
caactgcttgttctcaccgatcttcttgtgtcaccatgctattatgcatagaaagatgactagtcctcacttcaggctcttttcatcaaaaattccacaccctcaggtaccatctgtggt

SEQ ID NO: 53897 - DNA, 120 bp, Artificial Sequence
  ENSG00000068878_48 (sequence is synthesized)
ggctctctgcaagttttaaaactgcctctgctgagctctcatcattttggtggtttctgtgttagatctcgttagtctgcattccacagcttctcagttgccatttgatttcccaacttg

SEQ ID NO: 53898 - DNA, 120 bp, Artificial Sequence
  ENSG00000068878_49 (sequence is synthesized)
tccggaagtgtttccagaatactgatcactttttttttttgaggcatctgacaaagtcacaaagtctcagactagaaataattacccagtatgatcatggcatccaagaccagagtctca

SEQ ID NO: 53899 - DNA, 120 bp, Artificial Sequence
  ENSG00000068878_50 (sequence is synthesized)
gaactcattaagaaacagtttacttggaatggagaatacccatctgtaatacaggtcctgtcatttcattcatctcaaattattttgaattcttcccaaatggctgctggatttaggtgg

SEQ ID NO: 53900 - DNA, 120 bp, Artificial Sequence
  ENSG00000068878_51 (sequence is synthesized)
taataggggctgtgggccataaatctgaagccttgagaaccttgggtctggagagccatgaagagggaaggaaaagagggcaagtcctgaacctaaccaatgacctgatggattgctcga

SEQ ID NO: 53901 - DNA, 120 bp, Artificial Sequence
  ENSG00000068878_52 (sequence is synthesized)
ccaagacacagaagtgaagtctgtgtctgtgcacttcccacagactggagtttttggtgctgaatagagccagttgctaaaaaattgggggtttggtgaagaaatctgattgttgtgtgt

SEQ ID NO: 53902 - DNA, 120 bp, Artificial Sequence
  ENSG00000068878_53 (sequence is synthesized)
attcaatgtgtgattttaaaaataaacagcaacaacaataaaaaccctgactggctgttttttccctgtattctttacaactattttttgaccctctgaaaattattatacttcacctaa

SEQ ID NO: 53903 - DNA, 120 bp, Artificial Sequence
  ENSG00000068878_54 (sequence is synthesized)
atggaagactgctgtgtttgtggaaattttgtaattttttaatttattttattctctctccctttttattttgcctgcagaatcgttgagagactaataaggcttaatatttaattgatt

SEQ ID NO: 53904 - DNA, 120 bp, Artificial Sequence
  ENSG00000068878_55 (sequence is synthesized)
tgtttaatatgttatataaatgtaaaagagtgtataaactgtagagatagcattggcaagacattgtacagatgcaaccttttacacaacatcattgtgtaatttgtaaagattcacgtg

SEQ ID NO: 53905 - DNA, 120 bp, Artificial Sequence
  ENSG00000068878_56 (sequence is synthesized)
tagttctttattatagtgattttgggctttgtacccactgaatgccattttttgtgtttttaaattattttctttatcttgttacaaaaactgagatgtggggttttttttttttcagtt

SEQ ID NO: 53906 - DNA, 120 bp, Artificial Sequence
  ENSG00000068878_57 (sequence is synthesized)
cacttatcattagaatgtctgaacttttatgtaacatttttgtgtgcatctctcaatgctaacaccacatgtttgcctatgacaagtttatagagtgaaaggtatcttctgggttgaaat

SEQ ID NO: 53907 - DNA, 120 bp, Artificial Sequence
  ENSG00000068878_58 (sequence is synthesized)
aattcacaaattggtgaatgtcatcttgcaacacaccctgtacagtcttccttaaaggaacactacagtatatttttagtatctacatgctgaatgactgaatacagacctaagcacagc

SEQ ID NO: 53908 - DNA, 120 bp, Artificial Sequence
  ENSG00000068878_59 (sequence is synthesized)
agtggtcctggtacagtatttaagtgtcggcatacacaggcgtaatccctgtataaagtagtgccaaactgatttcagttgtgtaactagtttaaaacccaataaatggattctttttaa

SEQ ID NO: 53909 - DNA, 62 bp, Artificial Sequence
  ENSG00000068878_60 (sequence is synthesized)
cgagttggagatcagcctgggcaacaaaaaaaaaagtgagacctgtgtctacaaaaaataaa

SEQ ID NO: 53910 - DNA, 120 bp, Artificial Sequence
  ENSG00000068878_61 (sequence is synthesized)
aacaaaaaaaaaagtgagacctgtgtctacaaaaaataaaaaaataaaaatggagtatattgaaaatatatactgtaatatgaaaagttacacaaattaagaatatagcatagtactgag

SEQ ID NO: 53911 - DNA, 90 bp, Artificial Sequence
  ENSG00000068878_62 (sequence is synthesized)
tgaaaagttacacaaattaagaatatagcatagtactgagaatatgaaagcaatctagtcagtatttatgaaaataaactttggtgcagc

SEQ ID NO: 53912 - DNA, 120 bp, Artificial Sequence
  ENSG00000068878_63 (sequence is synthesized)
aattgtggcatataagctttataggaaatagtgcaaccagtaaaacattttatgatgtatttcatatgctagtgtaatgaacgcagcaaagaacatgttacgtactcgacagacgatgat

SEQ ID NO: 53913 - DNA, 120 bp, Artificial Sequence
  ENSG00000068878_64 (sequence is synthesized)
aaaattatgagaaaccttttgaaggaatacaacagagcaaaacatctgttttttaaaattatcattgtgtattatgaatattaaacaaatgtttgtgatttatatgtgaaacaatgtctt

SEQ ID NO: 53914 - DNA, 120 bp, Artificial Sequence
  ENSG00000068878_65 (sequence is synthesized)
tttaccgcttttttgttttcccaaaagttgagttaccattccaatttgaaatggactgtgtacacgcttcatttagtacttttgtaaactgtgtttgtgatctgacagcagcctgtgaaa

SEQ ID NO: 53915 - DNA, 120 bp, Artificial Sequence
  ENSG00000068878_66 (sequence is synthesized)
ttcataagaatcacataggatgtaagtctccatgatgtatgccaattacagaaattaggttggtctgtgtctttgttactaacaaaaatagctatagcagtggccttcagagatgtagag

SEQ ID NO: 53916 - DNA, 120 bp, Artificial Sequence
  ENSG00000068878_67 (sequence is synthesized)
tctggaaaaacttgatcttaatgtcaggttctggcactgcttttacagttatagccctgatgagagctatcagtagggaaaataatttatggagaaatttaattttgctaaaagagataa

SEQ ID NO: 53917 - DNA, 120 bp, Artificial Sequence
  ENSG00000068878_68 (sequence is synthesized)
aagtttatgctcataaccctaatgtagtttttatccattatgaggccacaaactctttgagaatctgctgaaatctctattaagaaactgccaaagagcatacacaaaatttgcatgcaa

SEQ ID NO: 53918 - DNA, 120 bp, Artificial Sequence
  ENSG00000068878_69 (sequence is synthesized)
tttcagggaaggtcttcaccccagttcccacactaccccctatcctccattattccctcagacttagaatgtcagtcctaatagaaattattatatctacaggttcgagaaatggctgct

SEQ ID NO: 53919 - DNA, 120 bp, Artificial Sequence
  ENSG00000068878_70 (sequence is synthesized)
tctgaatttacattggtttggtgactgagaactagatatttattgttttttttctttttgctgacattcttagatgtcagtgtttagataaagttggatggcggggattgtttgttttta

SEQ ID NO: 53920 - DNA, 120 bp, Artificial Sequence
  ENSG00000068878_71 (sequence is synthesized)
aacatggcttttgctacggccattggaaatgagaattttgctgtgcctccttgctttaggtttaaagcagagaaaatgtgtgactgcttttggacctttgtagatgagtggtgtcagcct

SEQ ID NO: 53921 - DNA, 120 bp, Artificial Sequence
  ENSG00000068878_72 (sequence is synthesized)
gggaatagttagataaaggaaaatacatcttattcttggttgcctcctgggtggggctgggacattttgtgtggccctgaggactctgggttctaaaagttgtgagaacttgatctggat

SEQ ID NO: 53922 - DNA, 120 bp, Artificial Sequence
  ENSG00000068878_73 (sequence is synthesized)
tcttacacccattctgttaaagagggagtacccagaagcctttctactggaataggaagaataaaaatttcatttattaggcttttagagttggatgtcttgttacctaattgaaatttt

SEQ ID NO: 53923 - DNA, 120 bp, Artificial Sequence
  ENSG00000068878_74 (sequence is synthesized)
atagtaatatggataatttcattaaaaagaagaagcacttaattaatgagaaaacttgaattgtgatgtttaaatattagtcagtgagtattcttaagtcagtatttctttcagttttct

SEQ ID NO: 53924 - DNA, 120 bp, Artificial Sequence
  ENSG00000068878_75 (sequence is synthesized)
agtagtgtggatgaaatgcaaatacagagaaaatgatataggaaaaataaaatcttcataaagaggctattttgagttgtggatattgtagtatttattaagtgaaaaaacgaaaaagct

SEQ ID NO: 53925 - DNA, 120 bp, Artificial Sequence
  ENSG00000068878_76 (sequence is synthesized)
atagtagatttaaaagtatgtaaaagttaaaaacatcatggtagaaatcaaatggatcctagcaaaaaatatatttttcttatacagaatcttctgcctgtttccatgacagtctctaaa

SEQ ID NO: 53926 - DNA, 120 bp, Artificial Sequence
  ENSG00000068878_77 (sequence is synthesized)
ctctcaatgggaatttggacaatagcattgagactaccttgtaagaacttgaaggaatttaaaaataggaggaattatctatgggcatgaatttaaagcattacactttatgtagatctg

SEQ ID NO: 53927 - DNA, 120 bp, Artificial Sequence
  ENSG00000068878_78 (sequence is synthesized)
ctgacctcaagtgacctgcccgcctcagccttacatcaggttttttatgcctgatgttagcattcttggtaattttaagatgataatcttagtgataaattttagtatccaggttattta

SEQ ID NO: 53928 - DNA, 120 bp, Artificial Sequence
  ENSG00000068878_79 (sequence is synthesized)
ctgcagaacagtaaagtacgctgtttgttatcctaagttgacaggtatttttttagttttttatgttggttcaagtaagctgcccttatttgcagtagaatattttgagttggtttgcat

SEQ ID NO: 53929 - DNA, 120 bp, Artificial Sequence
  ENSG00000068878_80 (sequence is synthesized)
ctataaactgtattagtgatttacgtataggcttgggcctgttgacctctgtttttacagtatgatgtgggtactgacatttttactcttttatctggacagggtggaccaagtaagcta

SEQ ID NO: 53930 - DNA, 120 bp, Artificial Sequence
  ENSG00000068885_0 (sequence is synthesized)
gtaactcttagaagtcactatggtgacggggaggtaccaggtatttgagagcaatcgccaccgctttcctggaacttgagtaaatacaatcaagtggcatcttaaatttttgctggaagt

SEQ ID NO: 53931 - DNA, 120 bp, Artificial Sequence
  ENSG00000068885_1 (sequence is synthesized)
ggagtcatgagactaaagatatctcttttaaaagaaccaaagcatcaagaattagtaagctgtgtgggctggactactgctgaagagctgtattcatgtagtgatgatcaccagatagtg

SEQ ID NO: 53932 - DNA, 120 bp, Artificial Sequence
  ENSG00000068885_2 (sequence is synthesized)
aagtggaacttgttaaccagtgaaacaactcaaatagtaaagcttcctgatgatatttaccctattgattttcactggtttccaaaaagtttgggtgtaaagaaacaaacccaggcagaa

SEQ ID NO: 53933 - DNA, 120 bp, Artificial Sequence
  ENSG00000068885_3 (sequence is synthesized)
agctttgtcctcacaagttctgatggtaaatttcatctgatttccaagttaggaagagtggaaaaaagtgtagaagctcactgtggagcagtacttgcaggaagatggaattatgaagga

SEQ ID NO: 53934 - DNA, 120 bp, Artificial Sequence
  ENSG00000068885_4 (sequence is synthesized)
acagcattagttacagttggagaagatggacaaataaaaatttggtcaaagactgggatgcttagatcaactttagctcagcaaggaacaccagtgtattcagtagcgtggggccctgat

SEQ ID NO: 53935 - DNA, 120 bp, Artificial Sequence
  ENSG00000068885_5 (sequence is synthesized)
tcagaaaaggttctttatacagcaggcaagcagctaatcattaaacctcttcaaccaaatgctaaagttttgcagtggaaagctcatgatggcattattttaaaagtagattggaactcg

SEQ ID NO: 53936 - DNA, 120 bp, Artificial Sequence
  ENSG00000068885_6 (sequence is synthesized)
gtcaatgatcttattttatctgctggtgaagactgtaaatataaggtatgggatagttacggccgcccactgtacaattcacaacctcatgagcatcccattacttcagttgcctgggct

SEQ ID NO: 53937 - DNA, 120 bp, Artificial Sequence
  ENSG00000068885_7 (sequence is synthesized)
ccagatggagaattatttgctgttggatcgtttcatactttacgcttgtgtgataaaactgggtggtcatatgcattagaaaaacccaacactggcagcatatttaatattgcatggtct

SEQ ID NO: 53938 - DNA, 120 bp, Artificial Sequence
  ENSG00000068885_8 (sequence is synthesized)
atcgatggcactcagattgctggagcctgtggaaatggacatgtcgtttttgcacatgtggtggaacaacattgggagtggaaaaattttcaagtaacattaacgaaaagaagagccatg

SEQ ID NO: 53939 - DNA, 120 bp, Artificial Sequence
  ENSG00000068885_9 (sequence is synthesized)
caggttcgtaatgttcttaatgatgcagtggatttactggaattccgtgatagagtcattaaagcatctttgaactatgcacacttagttgtttcaacgtctcttcaatgttacgtgttc

SEQ ID NO: 53940 - DNA, 120 bp, Artificial Sequence
  ENSG00000068885_10 (sequence is synthesized)
tccacgaagaactggaacacaccaattatatttgatctcaaagaaggaactgttagtttgattctgcaggcagaaagacattttcttcttgtagatggtagtagtatctatttatattca

SEQ ID NO: 53941 - DNA, 120 bp, Artificial Sequence
  ENSG00000068885_11 (sequence is synthesized)
tatgaagggcgctttatttcatctccaaaatttcctggaatgagaacagatattctgaatgcacagactgtgtctttgagtaatgataccatagcaataagagacaaagctgatgaaaaa

SEQ ID NO: 53942 - DNA, 120 bp, Artificial Sequence
  ENSG00000068885_12 (sequence is synthesized)
ataatcttcctctttgaggcatcaaccggaaagccgttaggtgatggaaagtttctttctcataagaatgaaatcttggaaattgctctggatcaaaaaggacttaccaatgatagaaaa

SEQ ID NO: 53943 - DNA, 120 bp, Artificial Sequence
  ENSG00000068885_13 (sequence is synthesized)
attgctttcattgataaaaatagagatctctgtatcacttctgtgaaacgatttgggaaggaagaacaaattatcaagcttggaacaatggtgcatactttggcatggaacgatacatgc

SEQ ID NO: 53944 - DNA, 120 bp, Artificial Sequence
  ENSG00000068885_14 (sequence is synthesized)
aatatcctttgtggacttcaagatactcgatttatagtgtggtattaccccaatacagtttatgtggacagagacattttgcctaaaacattatatgaaagggatgcaagtgaatttagt

SEQ ID NO: 53945 - DNA, 120 bp, Artificial Sequence
  ENSG00000068885_15 (sequence is synthesized)
aaaaatccccatattgtgagttttgttggaaatcaagtaactattagaagagctgatggctccctggttcacatcagcataacaccatatcctgctattctccatgaatatgtaagcagt

SEQ ID NO: 53946 - DNA, 120 bp, Artificial Sequence
  ENSG00000068885_16 (sequence is synthesized)
aaggagcaaaccatgtgggcttgtctagctgctatggcagttgctaatcgagatatgactactgcagaaatagcctatgcagcaattggtgaaattgataaggttcagtacatcaattct

SEQ ID NO: 53947 - DNA, 120 bp, Artificial Sequence
  ENSG00000068885_17 (sequence is synthesized)
ataaaaaatcttccatctaaagaatcaaaaatggcccacatactactgtttagtgggaacatacaggaggctgaaatagtacttcttcaggctggccttgtttatcaagcaatccagatc

SEQ ID NO: 53948 - DNA, 120 bp, Artificial Sequence
  ENSG00000068885_18 (sequence is synthesized)
aatattaatctctacaactgggaaagggcactggaattggctgtaaaatacaaaacacatgttgatacagttcttgcttaccgtcaaaagtttttggagacatttggtaaacaggaaact

SEQ ID NO: 53949 - DNA, 120 bp, Artificial Sequence
  ENSG00000068885_19 (sequence is synthesized)
aataaacgatacttgcattatgcagaaggtctccaaatagattgggagaaaatcaaagccaaaattgagatggaaattacaaaagaaagagagcaatcatcaagcagccaatccagcaag

SEQ ID NO: 53950 - DNA, 120 bp, Artificial Sequence
  ENSG00000068885_20 (sequence is synthesized)
agtataggtttaaagccctaaatgccatgcgtatctttaagaaattttatcttttgaaacacgttctgattaaccaagggtaagcatgttttggttgctaaagaaaaaagcataatcttt

SEQ ID NO: 53951 - DNA, 120 bp, Artificial Sequence
  ENSG00000068885_21 (sequence is synthesized)
aaccgagtataagtacttgctgtgtatttagtgtaaaagtacatgcagaaagatgaaacacaaagtaattgatgtatttctatcttttatattttttagtccaataattagcaaaatatt

SEQ ID NO: 53952 - DNA, 120 bp, Artificial Sequence
  ENSG00000068885_22 (sequence is synthesized)
actatgtacttaagagatacctgtgtagtgtcgattatatgtcagttttttgcccattacttcatccctaaatcttcagcatgaacaaatattaatgtcgataataaaacattggactct

SEQ ID NO: 53953 - DNA, 120 bp, Artificial Sequence
  ENSG00000068885_23 (sequence is synthesized)
ttgaaatgtatgttaccattaatttctatttgacctctaaattgtaaaatgcctccaaaagtttatttatagaacaaaaatacatgaggatggatttgtacaaatgtataaaatgccact

SEQ ID NO: 53954 - DNA, 120 bp, Artificial Sequence
  ENSG00000068885_24 (sequence is synthesized)
atttatacaccaagttcatagcagcattactggaatagcaaaagatggaaacagctcaagtgtctatcatgaatggataaacaaatgtgctataatacatacaatggaatattatttagc

SEQ ID NO: 53955 - DNA, 120 bp, Artificial Sequence
  ENSG00000068885_25 (sequence is synthesized)
tttaaaaaggaatgaaattctgataaatactacctcaggataaaccttgaaaacactatgctaagtgaaataagccagacacaaaaggccaaatatgatgccacttttatgaggtaccag

SEQ ID NO: 53956 - DNA, 120 bp, Artificial Sequence
  ENSG00000068885_26 (sequence is synthesized)
cataggcaagttcacagaaacagaaaggagaatagtggttgccagggactgcagggaggaggaaatggggggtggggttattgtttaacgagtacatagtttctgtttgggatgaacaaa

SEQ ID NO: 53957 - DNA, 120 bp, Artificial Sequence
  ENSG00000068885_27 (sequence is synthesized)
ttctggaaatggatagcgatgatggttgctcaacattttgaatgttaatgccactaaattgtacccataaaaatggttaaaatggtaaattttgttatgtatattttatcataatttaaa

SEQ ID NO: 53958 - DNA, 120 bp, Artificial Sequence
  ENSG00000068885_28 (sequence is synthesized)
aaatatatctagaatgggcaagaaggattctcctcattcctctcttgacttgagaatgatcagtcaataggccctgaagtctgaatttgtgaaaatttccttgggtgacaaacttgtttg

SEQ ID NO: 53959 - DNA, 120 bp, Artificial Sequence
  ENSG00000068885_29 (sequence is synthesized)
attactctatttagtgtatcccaaagttattaccacataatcttttaaacaataaaacaaataccccttagaaagtcttctgcaaacccatttctgaaaatggtacattatagggtgggt

SEQ ID NO: 53960 - DNA, 120 bp, Artificial Sequence
  ENSG00000068885_30 (sequence is synthesized)
atagatgcatagatatgggattatgtatgatatatatatatatacacacacacacaaagggatagagagattacctctcttaacccccattttaattactatgtctaggttttttaaata

SEQ ID NO: 53961 - DNA, 120 bp, Artificial Sequence
  ENSG00000068885_31 (sequence is synthesized)
aaaatcttttctttttaacatgtttcttttcttttccggaatattggaatattctgttcttgatccagatgaaatctgattgagcagtgtacttacaagttgtactgtgtatgtgtttcc

SEQ ID NO: 53962 - DNA, 120 bp, Artificial Sequence
  ENSG00000068885_32 (sequence is synthesized)
gtgtttcctatattgttatatttcaataagaagcttaaaatgtttaaaaataaatggttaaaaggttttatgttatgtatattttaccacaataaatgcaaaaaataaaaagtctgtgtt

SEQ ID NO: 53963 - DNA, 120 bp, Artificial Sequence
  ENSG00000068885_33 (sequence is synthesized)
gagaaatctcccagcggcagcttcaagcccggacttcgccgctcgggctcaaggcctctattttccaggcgctcgcggacaaggcaggaagtaagagcgtgacaacctgaccaggaagag

SEQ ID NO: 53964 - DNA, 120 bp, Artificial Sequence
  ENSG00000068885_34 (sequence is synthesized)
aagtactttacctgcaggacagtccactcagaccaaggctggagacggttgtgtagtacccacctccccgctcctaccggtgtttcggctccgggtccttcactcgaaaatggcgcctaa

SEQ ID NO: 53965 - DNA, 120 bp, Artificial Sequence
  ENSG00000068885_35 (sequence is synthesized)
gattatcaccgccatcttattgtcgctcctgcgcatgcgcgaactcctggcgggacctacgcggtagaagtttctactaagtgaaaaggaagagcgagggattcttttctctgtggtcta

SEQ ID NO: 53966 - DNA, 120 bp, Artificial Sequence
  ENSG00000068885_36 (sequence is synthesized)
cagcagcagcactattattaaaaatatttggaaagacaacctggcaagttttgaaaaagatttttttaaaaacgtaaatacaatcaagtggcatcttaaatttttgctggaagtggagtc

SEQ ID NO: 53967 - DNA, 120 bp, Artificial Sequence
  ENSG00000068885_37 (sequence is synthesized)
ggattttcttaattatagtattgttaaaagtttctctattttatatcctagttgaagaatagattttttttttcattcctttagtggctgtttacctaaattgttttaaagtatttaaga

SEQ ID NO: 53968 - DNA, 120 bp, Artificial Sequence
  ENSG00000068885_38 (sequence is synthesized)
tcatgtgttaaaaatctggtccttcatcagaactaggaaagcactgatttaaacatttggtcagacattttaaattgaattagtaagctgtgtgggctggactactgctgaagagctgta

SEQ ID NO: 53969 - DNA, 120 bp, Artificial Sequence
  ENSG00000068885_39 (sequence is synthesized)
tgaagtggaacttgttaaccagtgaaacaactcaaatattaggaagagtggaaaaaagtgtagaagctcactgtggagcagtacttgcaggaagatggaattatgaaggaacagcattag

SEQ ID NO: 53970 - DNA, 90 bp, Artificial Sequence
  ENSG00000068885_40 (sequence is synthesized)
gaagtcactatggtgacggggaggtaccaggtatttgagagcaatcgccaccgctttcctggaacttgtactgcaacctccacctcctga

SEQ ID NO: 53971 - DNA, 120 bp, Artificial Sequence
  ENSG00000068885_41 (sequence is synthesized)
tcagcctcctgagtagctgggattacagtaaatacaatcaagtggcatcttaaatttttgctggaagtggagtcatgagactaaagatatctcttttaaaagaaccaaagcacatcaaga

SEQ ID NO: 53972 - DNA, 66 bp, Artificial Sequence
  ENSG00000068885_42 (sequence is synthesized)
aaataaatgtaatgcccttgaattatcctgaaccacccctacctggtccatggaaaaattgtcttc

SEQ ID NO: 53973 - DNA, 120 bp, Artificial Sequence
  ENSG00000068885_43 (sequence is synthesized)
ctgttttagcatgatgttctactgtggacttcaacaattacatctgtattttccattcagtacactataattttattaagaaaaataataattccagaatagacattcttttaaaaatga

SEQ ID NO: 53974 - DNA, 120 bp, Artificial Sequence
  ENSG00000068885_44 (sequence is synthesized)
tcttattacgttgtcatgtgcctgatttaaaacttcctaaaaattttttttcagtaagtccatctttttcttgttttttctcccccagtggtcatatgcattagaaaaacccaacactgg

SEQ ID NO: 53975 - DNA, 120 bp, Artificial Sequence
  ENSG00000068885_45 (sequence is synthesized)
ttcttactgacgtttttcttactctacttaagtactatacttaaatacttaaaaagcagtttttgtttactttagtaggatcttaaaaagaagctttttttttttttttttgagacagag

SEQ ID NO: 53976 - DNA, 68 bp, Artificial Sequence
  ENSG00000068885_46 (sequence is synthesized)
agtggtgtgatctcaactcactgcaaccagattataggcacccgccaacatgcccggctaatttttgt

SEQ ID NO: 53977 - DNA, 120 bp, Artificial Sequence
  ENSG00000068885_47 (sequence is synthesized)
tgcaggtctgtgaaagaataggtaaataaattgaaagtaagggctgagaaatttttgtagcaatttgacattgttataatgtccaatttttctaatattttatttttattgtatcttacg

SEQ ID NO: 53978 - DNA, 120 bp, Artificial Sequence
  ENSG00000068885_48 (sequence is synthesized)
ctggccaaaatgaagcattttttaaaccaaactgtttctttgctagtgtgatctagcatgtattcattccactgtgctctatttctttacattcatgataaagtgaaggacaagttgggg

SEQ ID NO: 53979 - DNA, 120 bp, Artificial Sequence
  ENSG00000068885_49 (sequence is synthesized)
aaatctgagcagtcagatcctcattatttcacatgggaaggtggcaattaataatattttctcaaacacatgaccctatattttgtcagcaagagtccccagttatgtgtcaaggagata

SEQ ID NO: 53980 - DNA, 120 bp, Artificial Sequence
  ENSG00000068885_50 (sequence is synthesized)
tttatttctacaagaagagctggtcagggagaagaggccatgtttgatctgggccctgaagtatataagtaggaatttgcaagatggatgaggtagaaaatggtatttcatattgtggaa

SEQ ID NO: 53981 - DNA, 120 bp, Artificial Sequence
  ENSG00000068885_51 (sequence is synthesized)
taaacagagggaagagccatttgtcttatccccaactccagaactctactactcatggagtctgacacaaacaatgttaataatctgttttatttctcattatagggcactggaattggc

SEQ ID NO: 53982 - DNA, 78 bp, Artificial Sequence
  ENSG00000068885_52 (sequence is synthesized)
tccaatgtggcctagggaagccgaaagattggacacccctgataaagtaaacggccatactgtttgctgtggctaagc

SEQ ID NO: 53983 - DNA, 120 bp, Artificial Sequence
  ENSG00000068885_53 (sequence is synthesized)
tggaataatatagtatccagatggcagacagaattaagataactataaattgtgaaaataatagtaatttggaagccagatttttgttttcaataaacttaagattgaaagtccctgtga

SEQ ID NO: 53984 - DNA, 120 bp, Artificial Sequence
  ENSG00000068885_54 (sequence is synthesized)
atactttacgcttgtgtgataaaactgggtttttattccatcagatgaaagactataaacaagcaaaagtaacatattttaaatggtaatgagtgctataaaaattaagctgggcgaagg

SEQ ID NO: 53985 - DNA, 120 bp, Artificial Sequence
  ENSG00000068903_0 (sequence is synthesized)
agtcggtgacaggacagagcagtcggtgacgggacacagtggttggtgacgggacagagcggtcggtgacagcctcaagggcttcagcaccgcgcccatggcagagccagacccctctca

SEQ ID NO: 53986 - DNA, 120 bp, Artificial Sequence
  ENSG00000068903_1 (sequence is synthesized)
ccctctggagacccaggcagggaaggtgcaggaggctcaggactcagattcagactctgagggaggagccgctggtggagaagcagacatggacttcctgcggaacttattctcccagac

SEQ ID NO: 53987 - DNA, 120 bp, Artificial Sequence
  ENSG00000068903_2 (sequence is synthesized)
gctcagcctgggcagccagaaggagcgtctgctggacgagctgaccttggaaggggtggcccggtacatgcagagcgaacgctgtcgcagagtcatctgtttggtgggagctggaatctc

SEQ ID NO: 53988 - DNA, 120 bp, Artificial Sequence
  ENSG00000068903_3 (sequence is synthesized)
cacatccgcaggcatccccgactttcgctctccatccaccggcctctatgacaacctagagaagtaccatcttccctacccagaggccatctttgagatcagctatttcaagaaacatcc

SEQ ID NO: 53989 - DNA, 120 bp, Artificial Sequence
  ENSG00000068903_4 (sequence is synthesized)
ggaacccttcttcgccctcgccaaggaactctatcctgggcagttcaagccaaccatctgtcactacttcatgcgcctgctgaaggacaaggggctactcctgcgctgctacacgcagaa

SEQ ID NO: 53990 - DNA, 120 bp, Artificial Sequence
  ENSG00000068903_5 (sequence is synthesized)
catagataccctggagcgaatagccgggctggaacaggaggacttggtggaggcgcacggcaccttctacacatcacactgcgtcagcgccagctgccggcacgaatacccgctaagctg

SEQ ID NO: 53991 - DNA, 120 bp, Artificial Sequence
  ENSG00000068903_6 (sequence is synthesized)
gatgaaagagaagatcttctctgaggtgacgcccaagtgtgaagactgtcagagcctggtgaagcctgatatcgtcttttttggtgagagcctcccagcgcgtttcttctcctgtatgca

SEQ ID NO: 53992 - DNA, 120 bp, Artificial Sequence
  ENSG00000068903_7 (sequence is synthesized)
ttgcctccctcatcagcaaggcacccctctccacccctcgcctgctcatcaacaaggagaaagctggccagtcggaccctttcctggggatgattatgggcctcggaggaggcatggact

SEQ ID NO: 53993 - DNA, 120 bp, Artificial Sequence
  ENSG00000068903_8 (sequence is synthesized)
ttgactccaagaaggcctacagggacgtggcctggctgggtgaatgcgaccagggctgcctggcccttgctgagctccttggatggaagaaggagctggaggaccttgtccggagggagc

SEQ ID NO: 53994 - DNA, 120 bp, Artificial Sequence
  ENSG00000068903_9 (sequence is synthesized)
acgccagcatagatgcccagtcgggggcgggggtccccaaccccagcacttcagcttcccccaagaagtccccgccacctgccaaggacgaggccaggacaacagagagggagaaacccc

SEQ ID NO: 53995 - DNA, 120 bp, Artificial Sequence
  ENSG00000068903_10 (sequence is synthesized)
agtgacagctgcatctcccaggcgggatgccgagctcctcagggacagctgagccccaaccgggcctggccccctcttaaccagcagttcttgtctggggagctcagaacatcccccaat

SEQ ID NO: 53996 - DNA, 120 bp, Artificial Sequence
  ENSG00000068903_11 (sequence is synthesized)
ctcttacagctccctccccaaaactggggtcccagcaaccctggcccccaaccccagcaaatctctaacacctcctagaggccaaggcttaaacaggcatctctaccagccccactgtct

SEQ ID NO: 53997 - DNA, 120 bp, Artificial Sequence
  ENSG00000068903_12 (sequence is synthesized)
ctaaccactcctgggctaaggagtaacctccctcatctctaactgcccccacggggccagggctaccccagaacttttaactcttccaggacagggagcttcgggcccccactctgtctc

SEQ ID NO: 53998 - DNA, 120 bp, Artificial Sequence
  ENSG00000068903_13 (sequence is synthesized)
ctgcccccgggggcctgtggctaagtaaaccatacctaacctaccccagtgtgggtgtgggcctctgaatataacccacacccagcgtagggggagtctgagccgggagggctcccgagt

SEQ ID NO: 53999 - DNA, 120 bp, Artificial Sequence
  ENSG00000068903_14 (sequence is synthesized)
ctctgccttcagctcccaaagtgggtggtgggcccccttcacgtgggacccacttcccatgctggatgggcagaagacattgcttattggagacaaattaaaaacaaaaacaactaacaa

SEQ ID NO: 54000 - DNA, 120 bp, Artificial Sequence
  ENSG00000068903_15 (sequence is synthesized)
agagtattcgggaggactacaactctctagccgttcccacattttccgggcgccctttaccaacatggctgctgacgccacgccttctgggactcgtagtccggtcctcgcgcgctttct

SEQ ID NO: 54001 - DNA, 120 bp, Artificial Sequence
  ENSG00000068903_16 (sequence is synthesized)
tacctaactggggcgctctgggtgttgtacgaaagcgcgtctgcggccgcaatgtctgctgagagttgtagttctgtgccctatcacggccactcccatttctggtgccgtcacgggaca

SEQ ID NO: 54002 - DNA, 120 bp, Artificial Sequence
  ENSG00000068903_17 (sequence is synthesized)
atttgaggctgcagtgagctatgatcgcactattgcactccaacctgggtgacatgagcgagaccctttctctaaaaagtaaaaaagaaagaaagactcagattcagactctgagggagg

SEQ ID NO: 54003 - DNA, 120 bp, Artificial Sequence
  ENSG00000068903_18 (sequence is synthesized)
gcaggaggctcaggccaccttcctgccacagccttttccccaaacctggtatcaccccctctcctccctccctaatcccacctctcgggcctggccactccaccccaccccttccaggac

SEQ ID NO: 54004 - DNA, 120 bp, Artificial Sequence
  ENSG00000068903_19 (sequence is synthesized)
ctccccgacgcggctgctgtgacggttccctgggggtaaaacagtcacagtgcctagaacagttcctggcatgcggcagtggcctgtggctgttccctgcagtcgtcagcagtgctgtcg

SEQ ID NO: 54005 - DNA, 120 bp, Artificial Sequence
  ENSG00000068903_20 (sequence is synthesized)
gcaacagagcgagacactgtctcaaaaaagaaaagcaaagcaaagccactcacatgaggtcttgctcctggggacgggcatggccaggactccaaccccggcagcctgtcccagagccct

SEQ ID NO: 54006 - DNA, 120 bp, Artificial Sequence
  ENSG00000068903_21 (sequence is synthesized)
ggggcgtctgtgaggggtggggatggggtcacctggctccaaccctcacgctacctggggcatctggccctctggctgtctctcctacagaaacatccggaacccttcttcgccctcgcc

SEQ ID NO: 54007 - DNA, 84 bp, Artificial Sequence
  ENSG00000068903_22 (sequence is synthesized)
tgggaggccgaggcaggagacttggaggaagacctcgtctctacaaagcaaacaaacaaacaaacaaaaaatgagcctggcatg

SEQ ID NO: 54008 - DNA, 73 bp, Artificial Sequence
  ENSG00000068903_23 (sequence is synthesized)
caagaccaccctgggcaacagaggaagacctcgtctctacaaagcaaacaaacaaacaaacaaaaaatgagcc

SEQ ID NO: 54009 - DNA, 120 bp, Artificial Sequence
  ENSG00000068903_24 (sequence is synthesized)
cttcctggagggacagggagcagggttctggggggcggggggatttcagggcaggggtgtgggtgatacctcctcaactccatcaggagtgacatccaaagtatgtagcagtgggttggg

SEQ ID NO: 54010 - DNA, 120 bp, Artificial Sequence
  ENSG00000068903_25 (sequence is synthesized)
taccagtgccagagcaggctcctggaggccgctggctgggccgggccttgtgcctttagatgtggggaggccgggaaccccagggctggggccagggtgccggagacatccatgcccctg

SEQ ID NO: 54011 - DNA, 120 bp, Artificial Sequence
  ENSG00000068903_26 (sequence is synthesized)
tgcagccatcttttagcctgggcaggccccaaagacaacacaggcagtggctacaaagcatttgttccttgtgtcctcctgcacctggattctggggtcgcagagtcatctgtttggtgg

SEQ ID NO: 54012 - DNA, 120 bp, Artificial Sequence
  ENSG00000068903_27 (sequence is synthesized)
ggagttcaagaccagcctgggcaaaagcccctactttctccctgtccccctaaatcttcctctccagcctctctgcccctcactaatcacctctcccggcatcactttgcatgtagataa

SEQ ID NO: 54013 - DNA, 120 bp, Artificial Sequence
  ENSG00000068903_28 (sequence is synthesized)
ctcccggcatcactttgcatgtagataagatcttttctccgtcccctccctccctctgctccatttttaccaccatcccatcccagtgtaactaggttggtgggtgttcttgccccctca

SEQ ID NO: 54014 - DNA, 120 bp, Artificial Sequence
  ENSG00000068903_29 (sequence is synthesized)
ctgaccatttgaacccctttattccccccttaatcgttctccccactgtaaccacctctgctcccctcccccagcctctcaccctctggagacccaggcagggaaggtgcaggaggctca

SEQ ID NO: 54015 - DNA, 120 bp, Artificial Sequence
  ENSG00000068903_30 (sequence is synthesized)
cacgcatgagaagccccgccaaggccctgcagacaaatattatgtagccattaagtacatgggtgctgggcccagactgcctcggttcaagtcctggttcctcgtgtcttcatcttacga

SEQ ID NO: 54016 - DNA, 120 bp, Artificial Sequence
  ENSG00000068903_31 (sequence is synthesized)
ccttgagcctccgatttgcctcctgtgaagtgaagctaatggtactgtctgaagagggctgctgcgaggcttagctgactaatgatgccgttgagagcccgggaccctgcagccgggctg

SEQ ID NO: 54017 - DNA, 120 bp, Artificial Sequence
  ENSG00000068903_32 (sequence is synthesized)
ctgtcagagcctggtgaagcctggtgagcctctggccagggacctgcccaggtggatttgggtgggggtcccctcctccccctgaccccctcccaaaggccacacccgcacacatctggc

SEQ ID NO: 54018 - DNA, 120 bp, Artificial Sequence
  ENSG00000068903_33 (sequence is synthesized)
cacctctgtctctctgaacagtgccccagatccatcctggggagaatggggtctgtgcccctggccggtccccactgctcccaactcccactgtggcctccgggtctgccattgctccca

SEQ ID NO: 54019 - DNA, 120 bp, Artificial Sequence
  ENSG00000068903_34 (sequence is synthesized)
cctgtcctctctgcctccccatgtcactgtctctgtccgtccatctgtctccacctcagatatcgtcttttttggtgagagcctcccagcgcgtttcttctcctgtatgcagtcagtaag

SEQ ID NO: 54020 - DNA, 120 bp, Artificial Sequence
  ENSG00000068903_35 (sequence is synthesized)
catgggggcagcctgggccctgcctcaggaaaggtcacctccccagctatggggggcggcagggaggtttgctgctgggggcgggggagggagcggtggcgcagcctgggcggaggctcc

SEQ ID NO: 54021 - DNA, 120 bp, Artificial Sequence
  ENSG00000068903_36 (sequence is synthesized)
gcctgctcatcaacaaggagaaagctggccaggtaagagcccttcttcaagcccccgtcgtcacaggctcccccttccctctcacccttttcctcagagggaacccccactgtggaaccc

SEQ ID NO: 54022 - DNA, 120 bp, Artificial Sequence
  ENSG00000068903_37 (sequence is synthesized)
cagcactttgcattcctcagctcagaacctggggctctagaatccagaggggtcgggttccaggcctctgggacattcactgcccttttgagcaagtgatagaattccaactcaaaccag

SEQ ID NO: 54023 - DNA, 120 bp, Artificial Sequence
  ENSG00000068903_38 (sequence is synthesized)
ctgaagccagataggaaggccgggcttccagggactgaggaggtgggagggggtgcaggggtcaggagagacagtgcggggggcggggttgggtccacgctctgggtctctcaggtctgt

SEQ ID NO: 54024 - DNA, 120 bp, Artificial Sequence
  ENSG00000068903_39 (sequence is synthesized)
ttttcctgggcagcctcactctagggcaggtgctccctcctaggtgttcccctcaggggaagtaggcagggtcaccgggcaagcagcgcacgctgtgggcagacactgtcccaagtctta

SEQ ID NO: 54025 - DNA, 120 bp, Artificial Sequence
  ENSG00000068903_40 (sequence is synthesized)
gcctgcgtgaactcactggcgccacaaccccatcgcggttttgtgatcacccctattctacaggaaactaagacacagagaggacaagtcacttgaccaaagtcactgagctggctgggc

SEQ ID NO: 54026 - DNA, 76 bp, Artificial Sequence
  ENSG00000068903_41 (sequence is synthesized)
aaaccccgtctctactaataatacaaaattagccgggcatggtgctgggcacctgtcatccaggctactcgggagg

SEQ ID NO: 54027 - DNA, 120 bp, Artificial Sequence
  ENSG00000068903_42 (sequence is synthesized)
aaccaaaaaaacaacaacaaaaaaaaaacaaagtcacagagctaggatacaaacccaggccacctggctccagggtctgtgctcttagctctcccttccctgctcctgcccctgacccac

SEQ ID NO: 54028 - DNA, 120 bp, Artificial Sequence
  ENSG00000068903_43 (sequence is synthesized)
tacaggtgaggccccgccgggggttggggcagcctggaagggacagggtgaggtgggagcgggggcacgaaggcagatgagaggagcaggcaggggcgagcccgcctgggaactctgatc

SEQ ID NO: 54029 - DNA, 120 bp, Artificial Sequence
  ENSG00000068903_44 (sequence is synthesized)
tcctgctgcaccgcagggacgtggcctggctgggtgaatgcgaccagggctgcctggcccttgctgagctccttggatggaaggtgaggagctgagcaaccccagcctgtcctgagcccc

SEQ ID NO: 54030 - DNA, 120 bp, Artificial Sequence
  ENSG00000068912_0 (sequence is synthesized)
ggaggcggcgttgccgggctctccggaaggagacgtggcggcggttgggccggtgatacccgggcgctttatagtcccgccgcctcctcctccacctcctcctcctcctcctctcctcct

SEQ ID NO: 54031 - DNA, 120 bp, Artificial Sequence
  ENSG00000068912_1 (sequence is synthesized)
ggagcagaggaggttgtggcggtggctggagaaagcggcggcggaggatggaggaaggaggcggcggcgtacggagtctggtcccgggcgggccggtgttactggtcctctgcggcctcc

SEQ ID NO: 54032 - DNA, 120 bp, Artificial Sequence
  ENSG00000068912_2 (sequence is synthesized)
tggaggcgtccggcggcggccgagcccttcctcaactcagcgatgacatccctttccgagtcaactggcccggcaccgagttctctctgcccacaactggagttttatataaagaagata

SEQ ID NO: 54033 - DNA, 120 bp, Artificial Sequence
  ENSG00000068912_3 (sequence is synthesized)
attatgtcatcatgacaactgcacataaagaaaaatataaatgcatacttccccttgtgacaagtggggatgaggaagaagaaaaggattataaaggccctaatccaagagagcttttgg

SEQ ID NO: 54034 - DNA, 120 bp, Artificial Sequence
  ENSG00000068912_4 (sequence is synthesized)
agccactatttaaacaaagcagttgttcctacagaattgagtcttattggacttacgaagtatgtcatggaaaacacattcggcagtaccatgaagagaaagaaactggtcagaaaataa

SEQ ID NO: 54035 - DNA, 120 bp, Artificial Sequence
  ENSG00000068912_5 (sequence is synthesized)
atattcacgagtactaccttgggaatatgttggccaagaaccttctatttgaaaaagaacgagaagcagaagaaaaggaaaaatcaaatgagattcccactaaaaatatcgaaggtcaga

SEQ ID NO: 54036 - DNA, 120 bp, Artificial Sequence
  ENSG00000068912_6 (sequence is synthesized)
tgacaccatactatcctgtgggaatgggaaatggtacaccttgtagtttgaaacagaaccggcccagatcaagtactgtgatgtacatatgtcatcctgaatctaagcatgaaattcttt

SEQ ID NO: 54037 - DNA, 120 bp, Artificial Sequence
  ENSG00000068912_7 (sequence is synthesized)
cagtagctgaagttacaacttgtgaatatgaagttgtcattttgacaccactcttgtgcagtcatcctaaatataggttcagagcatctcctgtgaatgacatattttgtcaatcactgc

SEQ ID NO: 54038 - DNA, 120 bp, Artificial Sequence
  ENSG00000068912_8 (sequence is synthesized)
caggatctccatttaagcccctcaccctgaggcagctggagcagcaggaagaaatactaagggtgccttttaggagaaataaagaggaagatttgcaatcaactaaagaagagagatttc

SEQ ID NO: 54039 - DNA, 120 bp, Artificial Sequence
  ENSG00000068912_9 (sequence is synthesized)
cagcgatccacaagtcgattgctattggctctcagccagtgctcactgttgggacaacccacatatccaaattgacagatgaccaactcataaaagagtttcttagtggttcttactgct

SEQ ID NO: 54040 - DNA, 120 bp, Artificial Sequence
  ENSG00000068912_10 (sequence is synthesized)
acatgtacatcaataccatgaggacaaggatagtgggaaaacctctgtggttgtcgggacatggaaccaagaagagcatattgaatgggctaagaagaatactgctagagcttatcatct

SEQ ID NO: 54041 - DNA, 120 bp, Artificial Sequence
  ENSG00000068912_11 (sequence is synthesized)
tcaagacgatggtacccagacagtcaggatggtgtcacatttttatggaaatggagatatttgtgatataactgacaaaccaagacaggtgactgtaaaactaaagtgcaaagaatcaga

SEQ ID NO: 54042 - DNA, 120 bp, Artificial Sequence
  ENSG00000068912_12 (sequence is synthesized)
ttcacctcatgctgttactgtatatatgctagagcctcactcctgtcaatatattcttggggttgaatctccagtgatctgtaaaatcttagatacagcagatgaaaatggacttctttc

SEQ ID NO: 54043 - DNA, 120 bp, Artificial Sequence
  ENSG00000068912_13 (sequence is synthesized)
tctccccaactaaaggatattaaagttaggggaaagaaaagatcattgaaagtcatgataatttctgtcccactgtgtctcattatagagttctcagccattggacctcttctaaaggat

SEQ ID NO: 54044 - DNA, 120 bp, Artificial Sequence
  ENSG00000068912_14 (sequence is synthesized)
ggtataaaatgactctcaaccactttgtgaatacatatgtgtatataagaggttattgataaacttctgaggcagacatttgtctcgctttttttcatttttgttgtgtcttataaactg

SEQ ID NO: 54045 - DNA, 120 bp, Artificial Sequence
  ENSG00000068912_15 (sequence is synthesized)
actgtttttctttgcttggatactgtgattccaaaataaatctcatccaagcaagttagagtccagcctaatcaaatgtcataattgttgtacctattgaaagtttttaaataatagatt

SEQ ID NO: 54046 - DNA, 120 bp, Artificial Sequence
  ENSG00000068912_16 (sequence is synthesized)
tattatgtaaattatagtatatgtaagtagctaatgaagtaaagatcatgaagaaagaaattgataggtgtaaatgagagaccatgtaaaatatgtaaattctagtacctgaaatccttt

SEQ ID NO: 54047 - DNA, 120 bp, Artificial Sequence
  ENSG00000068912_17 (sequence is synthesized)
caacagatttttatatagcaactgctctctgcaagtagttaaactagaaactgggcacatggtagaggctcacatgggagttgtcctcacccttgttaatctcaagaaactcttatttat

SEQ ID NO: 54048 - DNA, 120 bp, Artificial Sequence
  ENSG00000068912_18 (sequence is synthesized)
aataggttgcttctctctcagaacttttatctattacttttttcttcttatgagtatgtttactctcagagtatctatctgatgtagacagttggtgatgcttctgagactcagaatggt

SEQ ID NO: 54049 - DNA, 120 bp, Artificial Sequence
  ENSG00000068912_19 (sequence is synthesized)
ttactctaacaaaacactgtgctgtctatcccttgtacttgcctactgtaatatggatttcacttctgaacagtttacagcacaatatttattttaaagtgaataaaatgtccacaagca

SEQ ID NO: 54050 - DNA, 120 bp, Artificial Sequence
  ENSG00000068912_20 (sequence is synthesized)
aactcctgggctcaagcaatcctcgtgcctgagcctcccagaatactgggattacatgtgtgaaccaaatgttctgaatttatctagcccacaactggagttttatataaagaagataat

SEQ ID NO: 54051 - DNA, 120 bp, Artificial Sequence
  ENSG00000068971_0 (sequence is synthesized)
gatgtcatcctgagcagctgggcggcgggtgccggtgcgcacggagccgagccggggctcccgttgcgctgcaccgcgttgggtcggagtcccaggacttcagcggagatccgcgcgctg

SEQ ID NO: 54052 - DNA, 120 bp, Artificial Sequence
  ENSG00000068971_1 (sequence is synthesized)
ggagatccgcgcgctgcgacggccggtgcagagcccgccgagcgcccagtcccggcccggggctgagttgggggcatgctctagccgcccccccggagcccgggagagaacccaggagcg

SEQ ID NO: 54053 - DNA, 120 bp, Artificial Sequence
  ENSG00000068971_2 (sequence is synthesized)
gcgccccgagcggaaccgctgcgaaggggccctgaacggccgtcgccctccctacgggcagcccccgggggttggcgaccgaagtctaggttttcgagaaagccagggtgggaaccctaa

SEQ ID NO: 54054 - DNA, 120 bp, Artificial Sequence
  ENSG00000068971_3 (sequence is synthesized)
ctggactcttcgggacccccaggaaggatctgaggcctgagccatcctcctttctaccctgtctgccccccaggactgggcagttgcaggaggccctgggggggggcccaggactgtggt

SEQ ID NO: 54055 - DNA, 120 bp, Artificial Sequence
  ENSG00000068971_4 (sequence is synthesized)
tgtgccccccccccaaaggccggacaggatgggaccaagttagtctgtccagtctcacccagcacctcccaggcccagagagaacccccggggctctgaaagcttgccctgccgcctgac

SEQ ID NO: 54056 - DNA, 120 bp, Artificial Sequence
  ENSG00000068971_5 (sequence is synthesized)
cgccatggagacgaagctgccccctgcaagcacccccactagcccctcctcccccgggctgtcgcctgtgcccccacccgacaaggtggacggcttctcccgccgttccctccgcagagc

SEQ ID NO: 54057 - DNA, 120 bp, Artificial Sequence
  ENSG00000068971_6 (sequence is synthesized)
ccggccccgccgctcccacagctcctctcagttccgctatcagagcaaccagcaagagctcacaccgctgcccctgctcaaagatgtgccggcttccgagctgcacgagctgctgagccg

SEQ ID NO: 54058 - DNA, 120 bp, Artificial Sequence
  ENSG00000068971_7 (sequence is synthesized)
gaagctggcccagtgtggggtgatgtttgacttcttggactgtgtggccgacctcaaggggaaggaggtgaagcgggcagccctcaacgagctggtggagtgtgtggggagcacccgggg

SEQ ID NO: 54059 - DNA, 120 bp, Artificial Sequence
  ENSG00000068971_8 (sequence is synthesized)
tgtcctcatcgagcccgtctacccagacatcatccgcatgatctcagtgaatatcttccggactctgccgcccagtgagaaccctgaatttgaccctgaagaggatgagcccaatcttga

SEQ ID NO: 54060 - DNA, 120 bp, Artificial Sequence
  ENSG00000068971_9 (sequence is synthesized)
gccttcgtggccacacctgcagctggtatatgagtttttcctgcgtttcttggagagcccagacttccagccctccgtggccaagagatatgtggatcaaaagtttgtcctgatgctcct

SEQ ID NO: 54061 - DNA, 120 bp, Artificial Sequence
  ENSG00000068971_10 (sequence is synthesized)
ggagctatttgatagtgaggatccccgggagcgtgagtacctcaagaccatcctgcaccgggtctatggcaagttcctgggtctccgggcctacatccgcaaacagtgcaaccacatctt

SEQ ID NO: 54062 - DNA, 120 bp, Artificial Sequence
  ENSG00000068971_11 (sequence is synthesized)
ccctgaagacggagcacaagcagttcctggttcgcgtcctgatccccctgcactctgtcaagtcgctgtctgtcttccatgcccagctggcatactgtgtggtgcagttcctggagaagg

SEQ ID NO: 54063 - DNA, 120 bp, Artificial Sequence
  ENSG00000068971_12 (sequence is synthesized)
atgccactctgacagagcacgtgatccgggggctgctcaaatactggccaaaaacctgcacccagaaggaggtgatgtttctgggggagatggaagagattcttgatgtcatcgagccct

SEQ ID NO: 54064 - DNA, 120 bp, Artificial Sequence
  ENSG00000068971_13 (sequence is synthesized)
cccagtttgtgaagatccaggagcccctttttaagcaggtggctcgctgtgtttccagcccccatttccaggttgcagagcgggctctgtatttctggaacaatgagtatatcctaagcc

SEQ ID NO: 54065 - DNA, 120 bp, Artificial Sequence
  ENSG00000068971_14 (sequence is synthesized)
tcattgaggacaactgccacactgtgctgcctgctgtgtttgggaccctctaccaagtctccaaggagcactggaaccaaaccatcgtatcactgatctacaatgtgctcaagaccttca

SEQ ID NO: 54066 - DNA, 120 bp, Artificial Sequence
  ENSG00000068971_15 (sequence is synthesized)
tggagatgaatgggaagctgtttgatgagctcacagcctcctacaagctggaaaagcagcaggagcagcagaaggcccaggagcgtcaggagttatggcaaggtctggaggagctgcggc

SEQ ID NO: 54067 - DNA, 120 bp, Artificial Sequence
  ENSG00000068971_16 (sequence is synthesized)
tacgccggctacaggggacccagggggccaaggaggcccccctccagcggcttacaccccaggtggccgccagtgggggtcagagctagacagcacctcagaaggggaaaagctaaaccc

SEQ ID NO: 54068 - DNA, 120 bp, Artificial Sequence
  ENSG00000068971_17 (sequence is synthesized)
agagctgtcagtccctctatcccttctcctgtccaggggcccagagagaaacacacctacccctggccttgccagagtggcttctgaggactccctgcccagcccagctttcactggggg

SEQ ID NO: 54069 - DNA, 120 bp, Artificial Sequence
  ENSG00000068971_18 (sequence is synthesized)
gagacgaggagaggcaatggtggtcttggcaacagaatgctcagcccctcgtggcaggacttgacaagggcaagcttgaccaggaagctgccatcagggatcttcccctgccccgcaaag

SEQ ID NO: 54070 - DNA, 120 bp, Artificial Sequence
  ENSG00000068971_19 (sequence is synthesized)
ctaggctccagctgcaggcgggctcccaccctctgctcctggccttgggcaagggcactcagcgcctcgcctgcccctgccttggccaatgcgaggtccttccttatccccaccatgggg

SEQ ID NO: 54071 - DNA, 120 bp, Artificial Sequence
  ENSG00000068971_20 (sequence is synthesized)
tccatggtctatttattctcgcccagctcaccctctacacagacactgtcctgggtgcacactcctcccttccctcgctgtgtacttccttgtcccctttttatttattgggcaggggga

SEQ ID NO: 54072 - DNA, 120 bp, Artificial Sequence
  ENSG00000068971_21 (sequence is synthesized)
gggggagggcacaggcaagaagagattcacagtgtcctggggtaagggggggttcacagtaatcatggtctactcctctttccgtggctgggggtagacttaataaagagagaaattcaa

SEQ ID NO: 54073 - DNA, 120 bp, Artificial Sequence
  ENSG00000068971_22 (sequence is synthesized)
acagtgtcccatcaaacttcgtagaagccttccccagaggagtaaactcagtgcgcgatcttaagcgcgcatctgtggaaacaattaaaaaaagtttgccaaccgctgctctgtaggggg

SEQ ID NO: 54074 - DNA, 120 bp, Artificial Sequence
  ENSG00000068971_23 (sequence is synthesized)
cagccacacaaaacctcttacatcatgggcgacttcaggaacagccatagacagggtctctgtcacccaggctggaatgcgacagcacaatcacagcttactgcagcctctaactcctgg

SEQ ID NO: 54075 - DNA, 120 bp, Artificial Sequence
  ENSG00000068971_24 (sequence is synthesized)
ctgactcatcgcagacttttaactagtccagtgctggtttccaaggggtttctgaagtgtctggtggttctggggtaagggtgaggttcctggggggatggcctagggcatagaaggccc

SEQ ID NO: 54076 - DNA, 120 bp, Artificial Sequence
  ENSG00000068971_25 (sequence is synthesized)
aggccaaatctgtgggcctagcgtagcttgctgcgactccttcctgtcagtgtcctggcatcaccctactttcctggtgcaaactcctaagccctcctctttccctatgcagcctccctt

SEQ ID NO: 54077 - DNA, 120 bp, Artificial Sequence
  ENSG00000068976_0 (sequence is synthesized)
actccttggctggaggcagtgctgaggccgccgtcccctctaccatcagtccagtccggcccgccctcctgcagccatgtcccggcccctgtcagaccaagagaaaagaaagcaaatcag

SEQ ID NO: 54078 - DNA, 120 bp, Artificial Sequence
  ENSG00000068976_1 (sequence is synthesized)
tgtgcgtggcctggccggcgtggagaacgtgactgagctgaaaaagaacttcaaccggcacctgcatttcacactcgtaaaggaccgcaatgtggccaccccacgagactactactttgc

SEQ ID NO: 54079 - DNA, 120 bp, Artificial Sequence
  ENSG00000068976_2 (sequence is synthesized)
tctggcccataccgtgcgcgaccacctcgtggggcgctggatccgcacgcagcagcactactatgagaaggaccccaagaggatctactacctgtctttagagttctatatgggacggac

SEQ ID NO: 54080 - DNA, 120 bp, Artificial Sequence
  ENSG00000068976_3 (sequence is synthesized)
gctacagaacaccatggtgaacctggccttagagaatgcctgtgacgaggccacctaccagctgggcctggacatggaggagctggaggaaattgaggaggatgcggggctgggcaacgg

SEQ ID NO: 54081 - DNA, 120 bp, Artificial Sequence
  ENSG00000068976_4 (sequence is synthesized)
gggcctgggccggctggcagcctgctttcttgactccatggcaacactgggcctggccgcctatggctacgggattcgctatgagtttgggatttttaaccagaagatctccgggggctg

SEQ ID NO: 54082 - DNA, 120 bp, Artificial Sequence
  ENSG00000068976_5 (sequence is synthesized)
gcagatggaggaggccgatgactggcttcgctacggcaacccctgggagaaggcccggcccgagttcacgctacctgtgcacttctacggccatgtggagcacaccagccagggtgccaa

SEQ ID NO: 54083 - DNA, 120 bp, Artificial Sequence
  ENSG00000068976_6 (sequence is synthesized)
gtgggtggacacacaggtggtactggccatgccctacgatacgcccgtgcctggctatcgcaacaatgttgtcaacaccatgcgcctctggtctgccaaggctcccaatgacttcaacct

SEQ ID NO: 54084 - DNA, 120 bp, Artificial Sequence
  ENSG00000068976_7 (sequence is synthesized)
caaggacttcaatgtcggtggctacatccaggctgtgttggaccgaaacctggcggagaacatctctcgtgtcctgtaccccaatgataatttcttcgaagggaaggagctgcggctgaa

SEQ ID NO: 54085 - DNA, 120 bp, Artificial Sequence
  ENSG00000068976_8 (sequence is synthesized)
gcaggagtatttcgtggtggctgccaccctccaggacatcatccgtcgcttcaagtcttccaagttcggctgccgtgatcccgtgcgcacgaacttcgatgccttcccagataaggtggc

SEQ ID NO: 54086 - DNA, 120 bp, Artificial Sequence
  ENSG00000068976_9 (sequence is synthesized)
catccagctcaatgacacccacccctccctggccatccccgagctgatgaggatcctggtggacctggaacggatggactgggacaaggcgtgggatgtgacagtgaggacctgtgccta

SEQ ID NO: 54087 - DNA, 120 bp, Artificial Sequence
  ENSG00000068976_10 (sequence is synthesized)
caccaaccacacggtgctgcccgaggccctggagcgctggccggtgcacctcttggagacgctgctgccgcggcacctccagatcatctacgagatcaaccagcgcttcctcaaccgggt

SEQ ID NO: 54088 - DNA, 120 bp, Artificial Sequence
  ENSG00000068976_11 (sequence is synthesized)
cacgccgtcaacggcgtggcgcgcatccactccgagatcctcaagaagaccatcttcaaagacttctatgagctggagcctcataagttccagaataagaccaacggcatcacccctcgg

SEQ ID NO: 54089 - DNA, 120 bp, Artificial Sequence
  ENSG00000068976_12 (sequence is synthesized)
cgctggctggttctgtgtaaccccgggctggcagaggtcattgctgagcgcatcggggaggacttcatctctgacctggaccagctgcgcaaactgctctcctttgtggatgatgaagct

SEQ ID NO: 54090 - DNA, 120 bp, Artificial Sequence
  ENSG00000068976_13 (sequence is synthesized)
ttcattcgggatgtggccaaagtgaagcaggaaaacaagttgaagtttgctgcctacctagagagggaatacaaagtccacatcaaccccaactcactcttcgacatccaggtgaagcgg

SEQ ID NO: 54091 - DNA, 120 bp, Artificial Sequence
  ENSG00000068976_14 (sequence is synthesized)
attcacgaatataaacgacagctcctcaactgcctccatgtcatcaccctgtacaaccgcatcaagagggagcccaataagttttttgtgcctcggactgtgatgattggagggaaggct

SEQ ID NO: 54092 - DNA, 120 bp, Artificial Sequence
  ENSG00000068976_15 (sequence is synthesized)
gcacctgggtaccacatggccaagatgatcatcagactcgtcacagccatcggggatgtggtcaaccatgacccggcagtgggtgaccgcctccgtgtcatcttcctggagaactaccga

SEQ ID NO: 54093 - DNA, 120 bp, Artificial Sequence
  ENSG00000068976_16 (sequence is synthesized)
gtctcactggccgagaaagtgatcccagctgcagacctctctgagcagatctccactgcgggcactgaagcctcaggcaccggcaacatgaagttcatgctcaacggggctctgaccatt

SEQ ID NO: 54094 - DNA, 120 bp, Artificial Sequence
  ENSG00000068976_17 (sequence is synthesized)
ggcaccatggacggggccaatgtggagatggcagaagaggcgggagaggaaaacttcttcatctttggcatgcgggtggaggatgtggataagcttgaccaaagagggtacaatgcccag

SEQ ID NO: 54095 - DNA, 120 bp, Artificial Sequence
  ENSG00000068976_18 (sequence is synthesized)
gagtactacgatcgcattcctgagcttcggcaggtcattgagcagctgagcagtggcttcttctcccccaaacagcccgacctgttcaaggacattgtcaatatgctcatgcaccatgac

SEQ ID NO: 54096 - DNA, 120 bp, Artificial Sequence
  ENSG00000068976_19 (sequence is synthesized)
cggtttaaagtcttcgcagattatgaagactacattaaatgccaggagaaagtcagcgccttgtacaagaacccaagagagtggacgcggatggtgatccggaacatagccacctctggc

SEQ ID NO: 54097 - DNA, 120 bp, Artificial Sequence
  ENSG00000068976_20 (sequence is synthesized)
aagttctccagtgaccgcaccattgcccagtatgcccgggagatctggggtgtggagccttcccgccagcgcctgccagccccggatgaggccatctgagcctccagaccagaccccaaa

SEQ ID NO: 54098 - DNA, 120 bp, Artificial Sequence
  ENSG00000068976_21 (sequence is synthesized)
ccagcccttgagtctgtcacactctcttgggccagccccagcacctcatgcagagggtggggtactggagttagatctctaagcccctcctggaaccctcattttccccactctcaatgt

SEQ ID NO: 54099 - DNA, 120 bp, Artificial Sequence
  ENSG00000068976_22 (sequence is synthesized)
cccagtgtccagcgtgactaaggacacgggcccccttccgtcctcgggctcccggtcccctcctatttatggggtctgaccaactgcacccactccctaataaattcattctccttggga

SEQ ID NO: 54100 - DNA, 120 bp, Artificial Sequence
  ENSG00000068976_23 (sequence is synthesized)
ttgaatcctgatatcttagcattggagagagattttccatgttattagtcttcaaaaatattttaaatgtttgtataacattccatcctatgagcatgtcacaacttatttaatcaattc

SEQ ID NO: 54101 - DNA, 120 bp, Artificial Sequence
  ENSG00000068976_24 (sequence is synthesized)
catgtggctggacactaaggttaatttccggtttgttaaatattactgtgatgagcaaccttttaatgtctacgtccacatctgatgatttccttaagataattatcagaagggtgatat

SEQ ID NO: 54102 - DNA, 120 bp, Artificial Sequence
  ENSG00000068976_25 (sequence is synthesized)
ttctgagttaaaaagtatgagttcttaaggctcttgatacagattgccaaactgctttccagaaagtttctcccagtttacactcccacaacagcttcccagagttggcattaaacactg

SEQ ID NO: 54103 - DNA, 120 bp, Artificial Sequence
  ENSG00000068976_26 (sequence is synthesized)
aaagaagtgtctcctgtgaggcttcactagaaagctggctgtcccatgggcaggagggagctgtgagatgttgtgagcatggtcccgcatgctcagaacgaggcctggaagaaccctctg

SEQ ID NO: 54104 - DNA, 120 bp, Artificial Sequence
  ENSG00000068976_27 (sequence is synthesized)
gctgcaggatggagacagtgctggagggggcaggtgggggaccactgtgggggctgacaccataatgcagggagagttgcctgagagtcgcacaagggactagagagtcgcacgagggat

SEQ ID NO: 54105 - DNA, 120 bp, Artificial Sequence
  ENSG00000068976_28 (sequence is synthesized)
tagagattttgtggggagcgctggtttctggttggaacggttaggttttgagactggcctgtggagcgctttgagccgtggtgggggcgctgagggtcagctgaagggttatcttttttt

SEQ ID NO: 54106 - DNA, 120 bp, Artificial Sequence
  ENSG00000068976_29 (sequence is synthesized)
aggcgtgagccaccatgcctggcccagttgaagggttgtacctgttagctgctcttgctgccccagggcaaggccggatatggacttgggctactggaggagaaaagccattttggagca

SEQ ID NO: 54107 - DNA, 120 bp, Artificial Sequence
  ENSG00000068976_30 (sequence is synthesized)
cttgggctactggaggagaaaagccattttggagcaaacaaactggttaagagacagcagtggcgtgtgggagaaaagagcttgtttgggggccttggctctaacacttagctttctgta

SEQ ID NO: 54108 - DNA, 120 bp, Artificial Sequence
  ENSG00000068976_31 (sequence is synthesized)
tcctccgggcctcagtttcttcattcacaaaggagggatgaaaagctgagcagagaaggggagttgcagggaggccctgcaggggcgatgtggcagccctggggagcagcaggctggacc

SEQ ID NO: 54109 - DNA, 120 bp, Artificial Sequence
  ENSG00000068976_32 (sequence is synthesized)
ttcagtctcaggaagaggtatcagtcgtctcttcctgggatacttgtacttgaaagaagaatctggagagggcaatgcttaaaccatgaggaggccaggcgcagtggcccatgcctgtaa

SEQ ID NO: 54110 - DNA, 120 bp, Artificial Sequence
  ENSG00000068985_0 (sequence is synthesized)
gagaacgccagggagctgtgagagtgtgcagtcgcgttcctgctgtccggacacttttttcctctactgagactcatctggtagatccgcaggccagtcctcccaggggctgaagttgtg

SEQ ID NO: 54111 - DNA, 120 bp, Artificial Sequence
  ENSG00000068985_1 (sequence is synthesized)
aaatatgggttttctaagaagattaatctatcggcgtagaccaatgatctatgtagaatcttctgaggagtccagtgatgagcaacctgacgaagtggaatcaccaactcaaagtcagga

SEQ ID NO: 54112 - DNA, 120 bp, Artificial Sequence
  ENSG00000068985_2 (sequence is synthesized)
ctgaagctgatagccaggaactggttcagccaaagactgggtgtgagcttggagatggtcctgataccaagagggtgtgcctgcgaaatgaagagcagatgaaactgcccgcagaagggc

SEQ ID NO: 54113 - DNA, 120 bp, Artificial Sequence
  ENSG00000068985_3 (sequence is synthesized)
cagagcctgaagcggatagccaggaacaggttcacccgaagactgggtgtgagcgcggagatggtcctgatgtccaggagttgggcctgccaaatccagaggaggtgaaaacacctgagg

SEQ ID NO: 54114 - DNA, 120 bp, Artificial Sequence
  ENSG00000068985_4 (sequence is synthesized)
gtgaaaacacctgaggaagatgaagggcaatcacagccttaaaagaagacacgctgaaatggttcaggctgctcctgtgttggaaatttgaccattaaaattctcccaataaagctttac

SEQ ID NO: 54115 - DNA, 120 bp, Artificial Sequence
  ENSG00000069011_0 (sequence is synthesized)
aagacagactctgccggcgccgtccggagccttagaaaccggccccggatcgcgagccggagccggagccggagccggggccggccgggctgctgaggcccgagcggcaggagcgcagcg

SEQ ID NO: 54116 - DNA, 80 bp, Artificial Sequence
  ENSG00000069011_1 (sequence is synthesized)
gcgctgagccaggcgcccagtcgcgagaagctgccgccgcctctgcccgcccggcgccgcagccccgggcggtccatggg

SEQ ID NO: 54117 - DNA, 80 bp, Artificial Sequence
  ENSG00000069011_2 (sequence is synthesized)
gagggcagccgcttaggcgctgcgctcttgtccccgcaggtcgcagccagggcggcggggcgcgcccagccccggcccct

SEQ ID NO: 54118 - DNA, 120 bp, Artificial Sequence
  ENSG00000069011_3 (sequence is synthesized)
gcggtccccacctccatggacgccttcaaggggggcatgagcctggagcggctgccggaggggctccggccgccgccgccgccaccccatgacatggggcccgccttccacctggcccgg

SEQ ID NO: 54119 - DNA, 120 bp, Artificial Sequence
  ENSG00000069011_4 (sequence is synthesized)
actccgccagcgagtcgtctgacacggagctgccagagaaggagcgcggcggggaacccaaggggcccgaggacagtggtgcgggaggcacgggctgcggcggcgcagacgacccagcca

SEQ ID NO: 54120 - DNA, 120 bp, Artificial Sequence
  ENSG00000069011_5 (sequence is synthesized)
agaagaagaagcagcggcggcaacgtacgcacttcacaagccagcagttgcaagagctagaggccacgttccagaggaaccgctaccccgacatgagcatgagggaggagatcgccgtgt

SEQ ID NO: 54121 - DNA, 120 bp, Artificial Sequence
  ENSG00000069011_6 (sequence is synthesized)
ggaccaacctcaccgagccgcgcgtgcgggtctggttcaagaaccggcgagccaagtggcgtaagcgcgagcgtaaccagcagctggacctgtgcaagggtggctacgtgccgcagttca

SEQ ID NO: 54122 - DNA, 120 bp, Artificial Sequence
  ENSG00000069011_7 (sequence is synthesized)
gcggcctagtgcagccctacgaggacgtgtacgccgccggctactcctacaacaactgggccgccaagagcctggcgccagcgccgctctccaccaagagcttcaccttcttcaactcca

SEQ ID NO: 54123 - DNA, 120 bp, Artificial Sequence
  ENSG00000069011_8 (sequence is synthesized)
tgagcccgctgtcgtcgcagtccatgttctcagcacccagctccatctcctccatgaccatgccgtccagcatgggcccaggcgccgtgcctggcatgcccaactcgggcctcaacaaca

SEQ ID NO: 54124 - DNA, 120 bp, Artificial Sequence
  ENSG00000069011_9 (sequence is synthesized)
acggcactcccgcctcgccctacagcgtctaccgggacacgtgcaactcgagcctagccagcctgcggctcaagtccaaacagcactcgtcgtttggctacggcggcctgcagggcccgg

SEQ ID NO: 54125 - DNA, 120 bp, Artificial Sequence
  ENSG00000069011_10 (sequence is synthesized)
actcgtcgtttggctacggcggcctgcagggcccggcctcgggcctcaacgcgtgccagtacaacagctgaccgccccgccgcaccacgcgggccggcggccggagcggggaagggcgcg

SEQ ID NO: 54126 - DNA, 120 bp, Artificial Sequence
  ENSG00000069011_11 (sequence is synthesized)
cgcaagccccagctcaccgcgccgcggacctcacacctgcgcagccccctcctcccacttcccactccgggttggttttgtgtttgcttttccggaccccactctgccctccaaaaagac

SEQ ID NO: 54127 - DNA, 120 bp, Artificial Sequence
  ENSG00000069011_12 (sequence is synthesized)
aaaaaaaaaaaaaaaagcaaaaagacgtcggagaaaagtgccgcgaaaaaatggatgagttgcaatttctctcgggatggcgcgggtggtgtgtgtgttcccacgggccccggaggccca

SEQ ID NO: 54128 - DNA, 120 bp, Artificial Sequence
  ENSG00000069011_13 (sequence is synthesized)
gaggcccactccgcggagggcacgcggcgcggtaggcgagcgccgaggcccagcggccgggggaggacgacctcgtatcccgcgtccccgccgcgctggatccggactgagtggccgggc

SEQ ID NO: 54129 - DNA, 120 bp, Artificial Sequence
  ENSG00000069011_14 (sequence is synthesized)
ctgcggactggatgtgcggggcctggacttgcctaggatttcccgaccccgtacaaaccaagttgccctctccgagctaggcccggccgagagcgccttagctcgagtcggatccgtgtt

SEQ ID NO: 54130 - DNA, 120 bp, Artificial Sequence
  ENSG00000069011_15 (sequence is synthesized)
cgggcgttgggtttggggggacggtgcccccagcccaggatcgggcactcagtggagccgcacacggccccggcgcgcctggtagagcctcgctggccccgcgccccggagccctatatt

SEQ ID NO: 54131 - DNA, 120 bp, Artificial Sequence
  ENSG00000069011_16 (sequence is synthesized)
tattaaggccacggagcgacagcgggcagtgcgggcctggcgggaggtgggggaggtccatctcagaacaccccagccttgagcttagctgcaggcccaggccctctgctctgctcccgg

SEQ ID NO: 54132 - DNA, 120 bp, Artificial Sequence
  ENSG00000069011_17 (sequence is synthesized)
gctaggaggtggccctctgtctgggcgaacagccccctcctcaccgcccgccgtgcaagagtcgagccggcagagcaaggggcgcggccccagggccctgcgcccactttgcacacccgc

SEQ ID NO: 54133 - DNA, 120 bp, Artificial Sequence
  ENSG00000069011_18 (sequence is synthesized)
tctccggcccgcgcccctgtttacagcgtccctgtgtatgttggactgactgtaataaatctgtctatatcgacttgtccatgtacgtctattaaaaccatagtccgagcgtgctaagca

SEQ ID NO: 54134 - DNA, 120 bp, Artificial Sequence
  ENSG00000069011_19 (sequence is synthesized)
ggaggcctggaagcaaggccgagaacccggctgtgttgtgcctgcccagtggggctcccatacacccctgaggagaagaaagtggagggactttaggctggagagatctgatcctagttc

SEQ ID NO: 54135 - DNA, 120 bp, Artificial Sequence
  ENSG00000069011_20 (sequence is synthesized)
agaaaagcagagaccccctcagatttagaccccctaagagttcgcaaaacaaacaaacaaaaagcatacatttgctgggaacatcagcagcagggtcagaatctgagccgagctaagggt

SEQ ID NO: 54136 - DNA, 120 bp, Artificial Sequence
  ENSG00000069011_21 (sequence is synthesized)
gcaggccctgcccagccaggaacgcaggcccgcggctccagctccgattcttgggctcttctccgcggcacaccagactagaggtgcctactgacgaccagcacccggcgggcgctttcc

SEQ ID NO: 54137 - DNA, 120 bp, Artificial Sequence
  ENSG00000069011_22 (sequence is synthesized)
ccagcgctggtggcgagcggttcggtggagccgggacggggtgcaacggggcgtaagcccaggtgacccgctccccgtcctgcctactgcagagaaggagcgcggcggggaacccaaggg

SEQ ID NO: 54138 - DNA, 120 bp, Artificial Sequence
  ENSG00000069011_23 (sequence is synthesized)
agttcccgggagaagaggctggagaaggaggggcaggcggcccctcgacgaggacaccgctgggagctgccggaacgggccccgggctctgcccccgccccggcgctggctcgaaggcgc

SEQ ID NO: 54139 - DNA, 120 bp, Artificial Sequence
  ENSG00000069011_24 (sequence is synthesized)
ccgctgggagctgccggaacgggccccgggctctgcccccgccccggcgctggctcgaaggcgcccgctcggtgcgatcctgttcggcaaacattcactcatcctgggctgttctcgcca

SEQ ID NO: 54140 - DNA, 120 bp, Artificial Sequence
  ENSG00000069011_25 (sequence is synthesized)
gggctggggacttcgaggcggccgagacgggagttgattctaggcgaaacaagtcatttgaggcctgaggtgtgcacgagccgcccgggactcgcaggccagatgcgtttcttttgtgag

SEQ ID NO: 54141 - DNA, 120 bp, Artificial Sequence
  ENSG00000069011_26 (sequence is synthesized)
gccgatcaagggatccggcccacgtgcgcggccgaagcccggagcagcccggctctggcccccgccccggctcctgcgcgtctccctccgcgctgcctttttttgtccgagctggagctt

SEQ ID NO: 54142 - DNA, 120 bp, Artificial Sequence
  ENSG00000069011_27 (sequence is synthesized)
gcttttttccagcagcgaactgggcccgcgggtggccggcgcgggcagtggggcagcgaatccgctgcccagcgcagccggccgggttccggaggggctccgagctccccggtgtgggcg

SEQ ID NO: 54143 - DNA, 120 bp, Artificial Sequence
  ENSG00000069018_0 (sequence is synthesized)
acagatgcttctccgtcatgttctctgggaaatttccccccgattaggaaaaggacggtaacacggttctgcctcggaaggcgagtttttaccactgcaacacaaagaacagaggagcgc

SEQ ID NO: 54144 - DNA, 120 bp, Artificial Sequence
  ENSG00000069018_1 (sequence is synthesized)
gctttcacatcgttgcaacttaactcacttgaccagctctatacttcagcaccacggagagcggtacatccttggctaccacccatggggagccagcttctggcgactcaacaccggatt

SEQ ID NO: 54145 - DNA, 120 bp, Artificial Sequence
  ENSG00000069018_2 (sequence is synthesized)
ccggtcatctagaggaggaacaagcctgcgtattacaccctcaatgttgaggaacagcaccttcaaaaacatgcagcgccggcacacaacgctgagggagaagggccgtcgccaggccat

SEQ ID NO: 54146 - DNA, 120 bp, Artificial Sequence
  ENSG00000069018_3 (sequence is synthesized)
ccggggtcccgcctacatgttcaacgagaagggcaccagtctgacgcccgaggaggagcgcttcctggactcggctgagtatggcaacatcccggtggtccggaaaatgctggaggagtc

SEQ ID NO: 54147 - DNA, 120 bp, Artificial Sequence
  ENSG00000069018_4 (sequence is synthesized)
caagacccttaacttcaactgtgtggactacatggggcagaacgctctgcagctggccgtgggcaacgagcacctagaggtcacggagctgctgctgaagaaggagaacctggcacgggt

SEQ ID NO: 54148 - DNA, 120 bp, Artificial Sequence
  ENSG00000069018_5 (sequence is synthesized)
gggggacgcgctgctgctggccatcagcaagggctatgtgcgcatcgtggaggccatcctcaaccacccggccttcgcgcagggccagcgcctgacgctcagcccgctggaacaggagct

SEQ ID NO: 54149 - DNA, 120 bp, Artificial Sequence
  ENSG00000069018_6 (sequence is synthesized)
gcgcgacgacgacttctatgcctacgacgaggacggcacgcgcttctcccacgacatcacgcccatcatcctggcggcgcactgccaggagtatgagatcgtgcacatcctgctgctcaa

SEQ ID NO: 54150 - DNA, 120 bp, Artificial Sequence
  ENSG00000069018_7 (sequence is synthesized)
gggcgcccgcatcgagcggccccacgactacttctgcaagtgcaatgagtgcaccgagaaacagcggaaagactccttcagccactcgcgctcgcgcatgaacgcctacaaaggactggc

SEQ ID NO: 54151 - DNA, 120 bp, Artificial Sequence
  ENSG00000069018_8 (sequence is synthesized)
gagtgctgcctacttgtccctgtccagcgaagaccctgtcctcaccgccctggagctcagcaacgagttagccagactagccaacattgagactgaatttaagaacgattacaggaagtt

SEQ ID NO: 54152 - DNA, 120 bp, Artificial Sequence
  ENSG00000069018_9 (sequence is synthesized)
atctatgcaatgcaaggattttgtagtgggcgtgctggacctgtgccgagacacagaagaggtggaagcaattttaaacggtgatgtgaacttccaagtctggtccgaccaccaccgtcc

SEQ ID NO: 54153 - DNA, 120 bp, Artificial Sequence
  ENSG00000069018_10 (sequence is synthesized)
aagtctgagccggatcaaactcgccattaaatatgaagtcaagaagttcgttgctcatcctaactgtcagcagcaattgcttaccatgtggtatgaaaatctctcaggcttacgtcaaca

SEQ ID NO: 54154 - DNA, 120 bp, Artificial Sequence
  ENSG00000069018_11 (sequence is synthesized)
gtctatcgctgtgaaattcctggctgtctttggagtctccataggcctcccttttctcgccatagcctattggattgctccgtgcagcaagctaggacgaaccctgaggagccctttcat

SEQ ID NO: 54155 - DNA, 120 bp, Artificial Sequence
  ENSG00000069018_12 (sequence is synthesized)
cagactacccaaaacaaatcttcagagtgaaaaccacacagttctcctggacagaaatgctcattatgaagtgggtcttaggaatgatttggtccgaatgcaaggaaatctgggaggagg

SEQ ID NO: 54156 - DNA, 120 bp, Artificial Sequence
  ENSG00000069018_13 (sequence is synthesized)
ggccacgggagtacgtgctgcacttgtggaacctgctagatttcgggatgctgtccatcttcgtggcctccttcacagcacgcttcatggccttcctgaaggccacggaggcacagctgt

SEQ ID NO: 54157 - DNA, 120 bp, Artificial Sequence
  ENSG00000069018_14 (sequence is synthesized)
acgtggaccagcacgtgcaggacgacacgctgcacaatgtctcgcttccgccggaagtggcatacttcacctacgccagggacaagtggtggccttcagaccctcagatcatatcggaag

SEQ ID NO: 54158 - DNA, 120 bp, Artificial Sequence
  ENSG00000069018_15 (sequence is synthesized)
ggctctacgcgatagccgtcgtgctgagcttctctcgcattgcatacattctgccagccaacgagagttttgggcccctgcagatctcgctagggagaactgtgaaagatatcttcaagt

SEQ ID NO: 54159 - DNA, 120 bp, Artificial Sequence
  ENSG00000069018_16 (sequence is synthesized)
tcatggtcattttcatcatggtatttgtggccttcatgattgggatgttcaacctgtactcttactaccgaggtgccaaatacaacccagcgtttacaacggttgaagaaagttttaaaa

SEQ ID NO: 54160 - DNA, 120 bp, Artificial Sequence
  ENSG00000069018_17 (sequence is synthesized)
ctttgttttggtccatattcggcttatctgaagtaatctcagtggtgctgaaatacgaccacaaattcatcgagaacattggctacgttctctacggcgtttataacgtcaccatggtgg

SEQ ID NO: 54161 - DNA, 120 bp, Artificial Sequence
  ENSG00000069018_18 (sequence is synthesized)
tagtgttgctcaacatgctaatagccatgataaacaactcctatcaggaaattgaggaggatgcagatgtggaatggaagttcgcccgagcaaaactctggctgtcttactttgatgaag

SEQ ID NO: 54162 - DNA, 120 bp, Artificial Sequence
  ENSG00000069018_19 (sequence is synthesized)
gaagaactctacctgctccttttaatctagtgccaagtcctaaatcattttattatctcataatgagaatcaagatgtgcctcataaaactctgcaaatctaaggccaaaagctgtgaaa

SEQ ID NO: 54163 - DNA, 120 bp, Artificial Sequence
  ENSG00000069018_20 (sequence is synthesized)
atgaccttgaaatgggcatgctgaattccaaattcaagaagactcgctaccaggctggcatgaggaattctgaaaatctgacagcaaataacactttgagcaagcccaccagataccaga

SEQ ID NO: 54164 - DNA, 120 bp, Artificial Sequence
  ENSG00000069018_21 (sequence is synthesized)
aaatcatgaaacggctcataaaaagatacgtcctgaaagcccaggtggacagagaaaatgacgaagtcaatgaaggcgagctgaaggaaatcaagcaagatatctccagcctgcgctatg

SEQ ID NO: 54165 - DNA, 120 bp, Artificial Sequence
  ENSG00000069018_22 (sequence is synthesized)
agcttcttgaggaaaaatctcaagctactggtgagctggcagacctgattcaacaactcagcgagaagtttggaaagaacttaaacaaagaccacctgagggtgaacaagggcaaagaca

SEQ ID NO: 54166 - DNA, 120 bp, Artificial Sequence
  ENSG00000069018_23 (sequence is synthesized)
tttagcagcccacatcggcgtctgtgacttctaccagcattccaaggccaggttggatgccctcgcccccatccttggtggggaggggtccccagcccactcctctaggacacgaagggg

SEQ ID NO: 54167 - DNA, 120 bp, Artificial Sequence
  ENSG00000069018_24 (sequence is synthesized)
aagtctgagccggatcaaactcgccattaaatatgaagtcaagaagctaggacgaaccctgaggagccctttcatgaagtttgtagctcatgcagtttcttttacaatcttcttgggatt

SEQ ID NO: 54168 - DNA, 120 bp, Artificial Sequence
  ENSG00000069018_25 (sequence is synthesized)
attgtgcatggttttagtgagagcaaactccccttctctgtgccatctgtagaaaaactacaccaagtcctgcttagaagtctgctttccgaatgttggggctgtgtctctgctcctcag

SEQ ID NO: 54169 - DNA, 120 bp, Artificial Sequence
  ENSG00000069020_0 (sequence is synthesized)
gtgctgaagtagaggtagtacagcatggctagactgttgtgagaggctcagagaaagcagagggtgagatggatgagtccagcattctaagacgaagagggctccagaaggagctgagtc

SEQ ID NO: 54170 - DNA, 120 bp, Artificial Sequence
  ENSG00000069020_1 (sequence is synthesized)
tccccagaagaggaagtttgatagattcccagaagtggaattgcttggtcaaacgttgccgaacaagcaaccggaaaagcttaataggcaatgggcagtcaccagcattgcctcgaccac

SEQ ID NO: 54171 - DNA, 120 bp, Artificial Sequence
  ENSG00000069020_2 (sequence is synthesized)
actcacctctctctgctcatgcaggaaatagccctcaagatagtccaagaaatttctcccccagtgcctcagcccatttttcatttgcacggaggactgatggacgccgctggtcgttgg

SEQ ID NO: 54172 - DNA, 120 bp, Artificial Sequence
  ENSG00000069020_3 (sequence is synthesized)
cttctctcccttcctctggctatgggacaaacacacccagctctacggtctcttcatcctgttcctcccaggagaagttgcatcagttaccataccaaccaacaccagacgagttacact

SEQ ID NO: 54173 - DNA, 120 bp, Artificial Sequence
  ENSG00000069020_4 (sequence is synthesized)
tcttatcaaaacatttctgtaccaccgaaagcatcgccactgagaacagatgcaggaacacgccgatgcgcccccgttcccgaagtctgagccctggacgttctcccgcctgctgtgacc

SEQ ID NO: 54174 - DNA, 120 bp, Artificial Sequence
  ENSG00000069020_5 (sequence is synthesized)
atgaaataattatgatgaaccatgtctacaaagaaaggttcccaaaggctacagctcagatggaagaacgtctaaaggaaattatcaccagctactctcctgacaacgttctacccttag

SEQ ID NO: 54175 - DNA, 120 bp, Artificial Sequence
  ENSG00000069020_6 (sequence is synthesized)
cagatggagtgcttagtttcactcaccaccagattattgaactggctcgagattgcttggataaatcccaccagggcctcatcacctcacgatacttccttgaattacagcacaaattag

SEQ ID NO: 54176 - DNA, 120 bp, Artificial Sequence
  ENSG00000069020_7 (sequence is synthesized)
ataagttgctacaggaggctcatgatcgttcagaaagtggagaattggcatttattaaacaactagttcgaaagatcctaattgttattgcccgccctgctcggttattagagtgcctgg

SEQ ID NO: 54177 - DNA, 120 bp, Artificial Sequence
  ENSG00000069020_8 (sequence is synthesized)
aatttgatccggaagaattttactacctattggaagcagcagaaggccatgccaaagaaggacagggtattaaaaccgacattcccaggtacatcattagccaactgggactcaataagg

SEQ ID NO: 54178 - DNA, 120 bp, Artificial Sequence
  ENSG00000069020_9 (sequence is synthesized)
atcccttggaagaaatggctcatttgggaaactacgatagtgggacagcagaaacaccagaaacagatgaatcagtgagtagctctaatgcctccctgaaacttcgaaggaaacctcggg

SEQ ID NO: 54179 - DNA, 120 bp, Artificial Sequence
  ENSG00000069020_10 (sequence is synthesized)
aaagtgattttgaaacgattaaattgattagcaatggagcctatggggcagtctactttgttcggcataaagaatcccggcagaggtttgccatgaagaagattaataaacagaacctca

SEQ ID NO: 54180 - DNA, 120 bp, Artificial Sequence
  ENSG00000069020_11 (sequence is synthesized)
tccttcgaaaccagatccagcaggcctttgtggagcgggatatcctgacttttgcagaaaacccctttgttgtcagcatgtattgctcctttgaaacaaggcgccacttgtgcatggtca

SEQ ID NO: 54181 - DNA, 120 bp, Artificial Sequence
  ENSG00000069020_12 (sequence is synthesized)
tggaatatgtggaagggggagactgtgctactttaatgaaaaacatgggtcctctccctgttgatatggccagaatgtactttgctgagacggtcttggccttggaatatttacataatt

SEQ ID NO: 54182 - DNA, 120 bp, Artificial Sequence
  ENSG00000069020_13 (sequence is synthesized)
atggaattgtacacagggatttgaaaccagacaacttgttggttacctccatggggcacataaagctgacagattttggattatctaaggtgggactaatgagcatgactaccaaccttt

SEQ ID NO: 54183 - DNA, 120 bp, Artificial Sequence
  ENSG00000069020_14 (sequence is synthesized)
acgagggtcatattgagaaggatgctagagagttcctggataaacaggtctgtggcacacctgaatacattgcaccagaagtgattctgaggcagggttatggaaagccggtggactggt

SEQ ID NO: 54184 - DNA, 120 bp, Artificial Sequence
  ENSG00000069020_15 (sequence is synthesized)
gggccatggggattatcctctatgaatttctggttggatgcgtgccattctttggggatactccagaggagctatttggacaagtcatcagtgatgagatcaactggcctgagaaggatg

SEQ ID NO: 54185 - DNA, 120 bp, Artificial Sequence
  ENSG00000069020_16 (sequence is synthesized)
aggcacccccacctgatgcccaggatctgattaccttactcctcaggcagaatcccctggagaggctgggaacaggtggtgcatatgaagtcaaacagcatcgattcttccgttctttag

SEQ ID NO: 54186 - DNA, 120 bp, Artificial Sequence
  ENSG00000069020_17 (sequence is synthesized)
actggaacagtttgctgagacagaaggcagaatttattccccaactggaatctgaggatgacacaagttattttgatactcggtctgagaagtatcatcatatggaaacggaggaagaag

SEQ ID NO: 54187 - DNA, 120 bp, Artificial Sequence
  ENSG00000069020_18 (sequence is synthesized)
atgacacaaatgatgaagactttaatgtggaaataaggcagttttcttcatgttcacacaggttttcaaaagttttcagcagtatagatcgaatcactcagaattcagcagaagagaagg

SEQ ID NO: 54188 - DNA, 120 bp, Artificial Sequence
  ENSG00000069020_19 (sequence is synthesized)
aagactctgtggacaaaaccaaaagcaccaccttgccatccacagaaacactgagctggagttcagaatattctgaaatgcaacagctatcaacatccaactcttcagatactgaaagca

SEQ ID NO: 54189 - DNA, 120 bp, Artificial Sequence
  ENSG00000069020_20 (sequence is synthesized)
acagacataaactcagttctggcctacttcccaaactggctatttcaacagagggagagcaagatgaagctgcctcctgccctggagacccccatgaggagccaggaaagccagcccttc

SEQ ID NO: 54190 - DNA, 120 bp, Artificial Sequence
  ENSG00000069020_21 (sequence is synthesized)
ctcctgaagagtgtgcccaggaggagcctgaggtcaccaccccagccagcaccatcagcagctccaccctgtcagttggcagtttttcagagcacttggatcagataaatggacgaagcg

SEQ ID NO: 54191 - DNA, 120 bp, Artificial Sequence
  ENSG00000069020_22 (sequence is synthesized)
agtgtgtggacagtacagataattcctcaaagccatccagtgaacccgcttctcacatggctcggcagcgattagaaagcacagaaaaaaagaaaatctcggggaaagtcacaaagtccc

SEQ ID NO: 54192 - DNA, 120 bp, Artificial Sequence
  ENSG00000069020_23 (sequence is synthesized)
tctctgccagtgctctttccctcatgatcccaggagatatgtttgctgtttcccctctgggaagtccaatgtctccccattccctgtcctcggacccttcttcttcacgagattcctctc

SEQ ID NO: 54193 - DNA, 120 bp, Artificial Sequence
  ENSG00000069020_24 (sequence is synthesized)
ccagccgagattcctcagcagcttctgccagtccacatcagccgattgtgatccacagttcggggaagaactacggctttaccatccgagccatccgggtgtatgtgggagacagtgaca

SEQ ID NO: 54194 - DNA, 120 bp, Artificial Sequence
  ENSG00000069020_25 (sequence is synthesized)
tctatacagtgcaccatatcgtctggaatgtagaagaaggaagtccggcatgccaggcaggactgaaggctggagatcttatcactcacatcaatggagaaccagtgcatggacttgtcc

SEQ ID NO: 54195 - DNA, 120 bp, Artificial Sequence
  ENSG00000069020_26 (sequence is synthesized)
acacagaagttatagaactcctactgaagagtgggaataaggtgtcaatcactactaccccatttgaaaacacatcaatcaaaactggaccagccaggagaaacagctataagagccgga

SEQ ID NO: 54196 - DNA, 120 bp, Artificial Sequence
  ENSG00000069020_27 (sequence is synthesized)
tggtgaggcggagcaagaaatccaagaagaaagaaagtctcgaaaggaggagatctcttttcaaaaagctagccaagcagccttctcctttactccacaccagccgaagtttctcctgct

SEQ ID NO: 54197 - DNA, 120 bp, Artificial Sequence
  ENSG00000069020_28 (sequence is synthesized)
tgaacagatccctgtcatcgggtgagagcctcccaggttcccccactcatagcttgtctccccggtctccaacaccaagctaccgctccacccctgacttcccatctggtactaattcct

SEQ ID NO: 54198 - DNA, 120 bp, Artificial Sequence
  ENSG00000069020_29 (sequence is synthesized)
cccagagcagctcccctagttctagtgcccccaattccccagcagggtccgggcacatccggcccagcactctccacggtcttgcacccaaactcggcgggcagcggtaccggtccggaa

SEQ ID NO: 54199 - DNA, 120 bp, Artificial Sequence
  ENSG00000069020_30 (sequence is synthesized)
ggcgaaagtccgccggcaacatcccactgtccccgctggcccggacgccctctccaaccccgcaacccacctccccgcagcggtcaccatcccctcttctgggacactcactgggcaatt

SEQ ID NO: 54200 - DNA, 120 bp, Artificial Sequence
  ENSG00000069020_31 (sequence is synthesized)
aagatgcactccccgcccaccatcgtcagacacatcgtgaggcccaagagtgcggagccccccaggtccccgctgctcaagcgcgtgcagtccgaggagaagctgtcgccctcttacggc

SEQ ID NO: 54201 - DNA, 120 bp, Artificial Sequence
  ENSG00000069020_32 (sequence is synthesized)
agtgacaagaagcacctgtgctcccgcaagcacagcctggaggtgacccaagaggaggtgcagcgggagcagtcccagcgggaggcgccgctgcagagcctggatgagaacgtgtgcgac

SEQ ID NO: 54202 - DNA, 120 bp, Artificial Sequence
  ENSG00000069020_33 (sequence is synthesized)
gtgccgccgctcagccgcgcccggccagtggagcaaggctgcctgaaacgcccagtctcccggaaggtgggccgccaggagtctgtggacgacctggaccgcgacaagctgaaggccaag

SEQ ID NO: 54203 - DNA, 120 bp, Artificial Sequence
  ENSG00000069020_34 (sequence is synthesized)
gtggtggtgaagaaagcagacggcttcccagagaaacaggaatcccaccagaaatcccatggacccgggagtgatttggaaaactttgctctgtttaagctggaagagagagagaagaaa

SEQ ID NO: 54204 - DNA, 120 bp, Artificial Sequence
  ENSG00000069020_35 (sequence is synthesized)
gtctatccgaaggctgtggaaaggtcaagtacttttgaaaacaaagcgtctatgcaggaggcgccaccgctgggcagcctgctgaaggatgctcttcacaagcaggccagcgtgcgcgcc

SEQ ID NO: 54205 - DNA, 120 bp, Artificial Sequence
  ENSG00000069020_36 (sequence is synthesized)
agcgagggtgcgatgtcggatggccgggtgcctgcggagcaccgccagggtggcggggacttcagacgggcccccgctcctggcaccctccaggatggtctctgccactccctcgacagg

SEQ ID NO: 54206 - DNA, 120 bp, Artificial Sequence
  ENSG00000069020_37 (sequence is synthesized)
ggcatctctgggaagggggaaggcacggagaagtcctcccaggccaaggagcttctccgatgtgaaaagttagacagcaagctggccaacatcgattacctccgaaagaaaatgtcactt

SEQ ID NO: 54207 - DNA, 120 bp, Artificial Sequence
  ENSG00000069020_38 (sequence is synthesized)
gaggacaaagaggacaacctctgccctgtgctgaagcccaagatgacagctggctcccacgaatgcctgccagggaacccagtccgacccacgggtgggcagcaggagcccccgccggct

SEQ ID NO: 54208 - DNA, 120 bp, Artificial Sequence
  ENSG00000069020_39 (sequence is synthesized)
tctgagagccgagcttttgtcagcagcacccatgcagctcagatgagtgccgtctcttttgttcccctcaaggccttaacaggccgggtggacagtggaacggagaagcctggcttggtt

SEQ ID NO: 54209 - DNA, 120 bp, Artificial Sequence
  ENSG00000069020_40 (sequence is synthesized)
gctcctgagtcccctgttaggaagagcccctccgagtataagctggaaggtaggtctgtctcatgcctgaagccgatcgagggcactctggacattgctctcctgtccggacctcaggcc

SEQ ID NO: 54210 - DNA, 120 bp, Artificial Sequence
  ENSG00000069020_41 (sequence is synthesized)
tccaagacagaactgccttccccagagtctgcacagagccccagcccaagtggtgacgtgagggcctctgtgccaccagttctccccagcagcagtgggaaaaagaacgataccaccagt

SEQ ID NO: 54211 - DNA, 120 bp, Artificial Sequence
  ENSG00000069020_42 (sequence is synthesized)
gcaagagagctttctccttccagcttaaagatgaataaatcctacctgctggagccttggttcctgccccccagccgaggtctccagaattcaccagcagtttccctgcctgacccagag

SEQ ID NO: 54212 - DNA, 120 bp, Artificial Sequence
  ENSG00000069020_43 (sequence is synthesized)
ttcaagagggacaggaaaggtccccatcctactgccaggagccctggaacagtcatggaaagcaatccccaacagagagagggcagctcccctaaacaccaagaccacaccactgacccc

SEQ ID NO: 54213 - DNA, 120 bp, Artificial Sequence
  ENSG00000069020_44 (sequence is synthesized)
aagcttctgacctgcctggggcagaacctccacagccctgacctggccaggccacgctgcccgctcccacctgaagcttccccctcaagggagaagccaggcctgagggaatcgtctgaa

SEQ ID NO: 54214 - DNA, 120 bp, Artificial Sequence
  ENSG00000069020_45 (sequence is synthesized)
agaggccctcccacagccagaagcgagcgctctgctgcgagggctgacacatgcagagagccctccatggaactgtgctttccagaaactgcgaaaaccagtgacaactccaaaaatctc

SEQ ID NO: 54215 - DNA, 120 bp, Artificial Sequence
  ENSG00000069020_46 (sequence is synthesized)
ctctctgtgggaaggacccacccagatttctatacacagacccaggccatggagaaagcatgggcgccgggtgggaaaacgaaccacaaagatggcccaggtgaggcgaggcccccgccc

SEQ ID NO: 54216 - DNA, 120 bp, Artificial Sequence
  ENSG00000069020_47 (sequence is synthesized)
agagacaactcctctctgcactcagctggaattccctgtgagaaggagctgggcaaggtgaggcgtggcgtggaacccaagcccgaagcgcttcttgccaggcggtctctgcagccacct

SEQ ID NO: 54217 - DNA, 120 bp, Artificial Sequence
  ENSG00000069020_48 (sequence is synthesized)
ggaattgagagtgagaagagtgaaaagctctccagtttcccatctttgcagaaagatggtgccaaggaacctgaaaggaaggagcagcctctacaaaggcatcccagcagcatccctccg

SEQ ID NO: 54218 - DNA, 120 bp, Artificial Sequence
  ENSG00000069020_49 (sequence is synthesized)
ccccctctgacggccaaagacctgtccagcccggctgccaggcagcattgcagttccccaagccacgcttctggcagagagccgggggccaagcccagcactgcagagcccagctcgagc

SEQ ID NO: 54219 - DNA, 120 bp, Artificial Sequence
  ENSG00000069020_50 (sequence is synthesized)
ccccaggaccctcccaagcctgttgctgcgcacagtgaaagcagcagccacaagccccggcctggccctgacccgggccctccaaagactaagcaccccgaccggtccctctcctctcag

SEQ ID NO: 54220 - DNA, 120 bp, Artificial Sequence
  ENSG00000069020_51 (sequence is synthesized)
aaaccaagtgtcggggccacaaagggcaaagagcctgccactcagtccctcggtggctctagcagagaggggaagggccacagtaagagtgggccggatgtgtttcctgctaccccaggc

SEQ ID NO: 54221 - DNA, 120 bp, Artificial Sequence
  ENSG00000069020_52 (sequence is synthesized)
tcccagaacaaagccagcgatgggattggccagggagaaggtgggccctctgtcccactgcacactgacagggctcctctagacgccaagccacaacccaccagtggtgggcggcccctg

SEQ ID NO: 54222 - DNA, 120 bp, Artificial Sequence
  ENSG00000069020_53 (sequence is synthesized)
gaggtgctggagaagcctgtgcatttgccaaggccgggacacccagggcctagtgagccagcggaccagaaactgtccgctgttggtgaaaagcaaaccctgtctccaaagcaccccaaa

SEQ ID NO: 54223 - DNA, 120 bp, Artificial Sequence
  ENSG00000069020_54 (sequence is synthesized)
ccatccactgtgaaagattgccccaccctgtgcaaacagacagacaacagacagacagacaaaagcccgagtcagccggccgccaacaccgacagaagggcggaagggaagaaatgcact

SEQ ID NO: 54224 - DNA, 120 bp, Artificial Sequence
  ENSG00000069020_55 (sequence is synthesized)
gaagcactttatgctccagcagagggcgacaagctcgaggccggcctttcctttgtgcatagcgagaaccggttgaaaggcgcggagcggccagccgcgggggtggggaagggcttccct

SEQ ID NO: 54225 - DNA, 120 bp, Artificial Sequence
  ENSG00000069020_56 (sequence is synthesized)
gaggccagagggaaagggcccggtccccagaagccaccgacggaggcagacaagcccaatggcatgaaacggtccccctcagccactgggcagagttctttccgatccacggccctcccg

SEQ ID NO: 54226 - DNA, 120 bp, Artificial Sequence
  ENSG00000069020_57 (sequence is synthesized)
gaaaagtctctgagctgctcctccagcttccctgaaaccagggccggagttagagaggcctctgcagccagcagcgacacctcttctgccaaggccgccgggggcatgctggagcttcca

SEQ ID NO: 54227 - DNA, 120 bp, Artificial Sequence
  ENSG00000069020_58 (sequence is synthesized)
gcccccagcaacagggaccataggaaggctcagcctgccggggagggccgaacccacatgacaaagagtgactccctgccctccttccgggtctccaccctgcctctggagtcacaccac

SEQ ID NO: 54228 - DNA, 120 bp, Artificial Sequence
  ENSG00000069020_59 (sequence is synthesized)
cccgacccaaacaccatgggcggggccagccaccgggacagggctctctcggtgactgccaccgtaggggaaaccaaagggaaggaccctgccccagcccagcctcccccagctaggaaa

SEQ ID NO: 54229 - DNA, 120 bp, Artificial Sequence
  ENSG00000069020_60 (sequence is synthesized)
cagaacgtgggcagagacgtgaccaagccatccccagccccaaacactgaccgccccatctctctttctaatgagaaggactttgtggtacggcagaggcgggggaaagagagtttgcgt

SEQ ID NO: 54230 - DNA, 120 bp, Artificial Sequence
  ENSG00000069020_61 (sequence is synthesized)
agcagccctcacaaaaaggccttgtaacggggagggcccaggggcaggactgtggagacccgtcctgaacgggcgactgtgtcttgactacctttcaaaaccagcactgtgtgggaatgt

SEQ ID NO: 54231 - DNA, 120 bp, Artificial Sequence
  ENSG00000069020_62 (sequence is synthesized)
ccgccaggcagagctcggagcctcattgagacaggggagagagaaagacaaagaggggaccttcttccagatgccttcccagttgtaaccggtaaaactgttaccagatagtgtttgtac

SEQ ID NO: 54232 - DNA, 120 bp, Artificial Sequence
  ENSG00000069020_63 (sequence is synthesized)
aaacagatgacaaagtacctccgactgaatcccacagacagcgctttgagcagaacgcacggctcaactcatgtaattactgtttatagctggccgagcctgactaggagagggcagacc

SEQ ID NO: 54233 - DNA, 120 bp, Artificial Sequence
  ENSG00000069020_64 (sequence is synthesized)
cgagaggaaatcagtttcccggacctttgagaggaggctgtgtgttaattaaaggctaggacgggacgggtacttctcagacatgctccaagttgttcttgagatcacagttcccatcac

SEQ ID NO: 54234 - DNA, 120 bp, Artificial Sequence
  ENSG00000069020_65 (sequence is synthesized)
attttctctggagggagtgagtagataattgggattttttttttatttttggccttgtctttcttccttttttttacctctccccattttagtcatatggccttgaacccacagtgaatt

SEQ ID NO: 54235 - DNA, 120 bp, Artificial Sequence
  ENSG00000069020_66 (sequence is synthesized)
gaagagagaaagaaatggatatgtctgaccccaatttttggactgtgctctcaaactttactttgcctcatttgaggagtgggaacaggcttcggcgaacacaaagttgccgaacaagca

SEQ ID NO: 54236 - DNA, 120 bp, Artificial Sequence
  ENSG00000069020_67 (sequence is synthesized)
cagtacccgcggctcgggtgcagcgcgggagcacagtggagcgcagatcgcggacccgagcgggcatgtccccgcgcgcgggagcctccgtttgcggccgggcccgggcggctgtgaact

SEQ ID NO: 54237 - DNA, 120 bp, Artificial Sequence
  ENSG00000069020_68 (sequence is synthesized)
tagcagcgggctcctgcggccccgtcactgccatgtagtcgctggcggggctccctgcagcccgggagcggcagtgccagtgagcctgagcccaggagcccgcgtcttccccgggaggcg

SEQ ID NO: 54238 - DNA, 120 bp, Artificial Sequence
  ENSG00000069020_69 (sequence is synthesized)
ctgagtgcgcgccgcgcccccgccgctcgggaggcactttgggccagacagggaaatgggggagaaagtttcggaggcgccagagccggtgccccgcggctgcagtggccacggcagccg

SEQ ID NO: 54239 - DNA, 120 bp, Artificial Sequence
  ENSG00000069020_70 (sequence is synthesized)
gactccagcctctgcgctggtcgccgcgtcctctccgggtgcttcctcggccgagtcctcctcgggctcagaaactctgtcggaggaaggggagcccggcggcttctccagagagcatca

SEQ ID NO: 54240 - DNA, 120 bp, Artificial Sequence
  ENSG00000069020_71 (sequence is synthesized)
ggcttctccagagagcatcagccgccgccgccgccgccgttgggaggcaccctgggcgcccgggcgcccgccgcgtgggctccggcaagcgtgctgctggagcgcggagtccttgcgctg

SEQ ID NO: 54241 - DNA, 120 bp, Artificial Sequence
  ENSG00000069020_72 (sequence is synthesized)
agctgtgccgcccgcgccccggggcagcagcgcgtcccaggaggagcaggacgaggagcttgaccacatattatcccctccacccatgccgtttcggaaatgcagcaacccagatgtggc

SEQ ID NO: 54242 - DNA, 120 bp, Artificial Sequence
  ENSG00000069020_73 (sequence is synthesized)
ttctggccctggaaaatcactgaagtataaaagacagctgagtgaggatggaagacagctaaggcgagggagcctgggaggagccctgactgggaggtaccttcttccaaacccggtggc

SEQ ID NO: 54243 - DNA, 120 bp, Artificial Sequence
  ENSG00000069020_74 (sequence is synthesized)
gggacaggcctggccggcctctgcagagacgtccaacctcgtgcgcatgcgcagccaggccctgggccagtcggcgccctcgctcaccgccagcctgaaggagctgagtctccccagaag

SEQ ID NO: 54244 - DNA, 120 bp, Artificial Sequence
  ENSG00000069020_75 (sequence is synthesized)
ttgaggaaaatgattttctttgtaaatatatagcatcgtgtttggtttgggatgtagagtctatacctggctgctgattgcgtcgtttactacagctttttttaaataagatttttgctt

SEQ ID NO: 54245 - DNA, 120 bp, Artificial Sequence
  ENSG00000069020_76 (sequence is synthesized)
taccatttatcataatgtagtaatgaagcaaaatggtcaaaactgggtgtgtgtgaacagagatacacccatattcgtgtatatacacatccacctacatgttttggtctgtggtttaag

SEQ ID NO: 54246 - DNA, 120 bp, Artificial Sequence
  ENSG00000069020_77 (sequence is synthesized)
agactatttcaaggttccatttttataagctaaaacattctaagttaagatggaagaaagccctaaacacagtagattctgagtttttatgtgtattttaaccagagtttctgatagtac

SEQ ID NO: 54247 - DNA, 120 bp, Artificial Sequence
  ENSG00000069020_78 (sequence is synthesized)
tgtatctggctacctatatttccagatctaaagcaagaactactctaagtactgcatttggaatcctcctccattaggaatggccaggacaagtggagctagccattttcattacacggc

SEQ ID NO: 54248 - DNA, 120 bp, Artificial Sequence
  ENSG00000069020_79 (sequence is synthesized)
catcccaatggacactggatccctggtccaactgtctaaaaggccagttgttcctttctgtggatgtggatgtctggccttcacctgaggtagagcggggactataaacacacatcaact

SEQ ID NO: 54249 - DNA, 120 bp, Artificial Sequence
  ENSG00000069020_80 (sequence is synthesized)
ttctttctgtttgctttcttttccttcttttcaaactcttaaactcaggcctttatgctgtgagtgactagtccaagaagcacacattttgtagtagtcctgcaccagccctgctcttga

SEQ ID NO: 54250 - DNA, 120 bp, Artificial Sequence
  ENSG00000069020_81 (sequence is synthesized)
ataaaaaggaaaattactggctgcacccaaatcttctagtacttgagtaataagcatcaggcattggaagaggttttaaatttgcttttttgaggaaaagaactgggggtggattttggc

SEQ ID NO: 54251 - DNA, 120 bp, Artificial Sequence
  ENSG00000069020_82 (sequence is synthesized)
atcgtagcatatcgattaaagaataatcaggacatcagatacattttaatacatagctggggccttatgttgtagatgaagcttgctgtttttagcaagttcctgggtttcacattcatt

SEQ ID NO: 54252 - DNA, 120 bp, Artificial Sequence
  ENSG00000069020_83 (sequence is synthesized)
tctgctgcatctagtagctccacacatttcataacctgatctctttatttgtatgcaaaaaatactgtcttaatacagagcagcatttttgtaacaaagagactcgctggagctatttgg

SEQ ID NO: 54253 - DNA, 120 bp, Artificial Sequence
  ENSG00000069020_84 (sequence is synthesized)
tgcttgaatgtgaccatcctttttacttttgctaagccttatttaaattttgtataccgtggaatatgtagaatttgtcaaatcattttagtgctgaaggtttttgatttcttgtttttg

SEQ ID NO: 54254 - DNA, 120 bp, Artificial Sequence
  ENSG00000069020_85 (sequence is synthesized)
tttctgttgttgcagtttctttggtggcttgttttgtattgtaagatggcacttgctgatataaatactaaggcactaagagaaaatacagataagtatttataagttgcttgggaacca

SEQ ID NO: 54255 - DNA, 120 bp, Artificial Sequence
  ENSG00000069020_86 (sequence is synthesized)
tagcagaattttttgtttggttttgtaagagaaaaaaaattaccaataaataactgatctagcacccaaactctcttgggggatgtcttagtatcttcacgctataaaattgttcatcta

SEQ ID NO: 54256 - DNA, 120 bp, Artificial Sequence
  ENSG00000069020_87 (sequence is synthesized)
agcacagcatcatcttatggccttatggattgtaaatcttctagtgaggctataaactccactctgaaaacaaaggcataacttaaccgactgctcagttgtccttcgttgtaaaatgaa

SEQ ID NO: 54257 - DNA, 120 bp, Artificial Sequence
  ENSG00000069020_88 (sequence is synthesized)
acaaacaaaaaaagaaaaagaaaaaagcctcctccttgcccctaatttttttttcccatatggttttagccattccccatcactatattgtgaagctgtaaaaatatatatatatacttt

SEQ ID NO: 54258 - DNA, 120 bp, Artificial Sequence
  ENSG00000069020_89 (sequence is synthesized)
tgtaaaaatatatatatatactttacaagagtttactaatggatttcaaaactggtctcaacgtttataatacatatctgtgtttggcagttgtcataacccaatcctacattcagccat

SEQ ID NO: 54259 - DNA, 120 bp, Artificial Sequence
  ENSG00000069020_90 (sequence is synthesized)
cgggacaagtctgtcggggaggtagttcatggtttacaagcctttgctttttaactgtccaatttcctttaaagcacaactagctatttgtttacaaatgatatttttatgtatattttg

SEQ ID NO: 54260 - DNA, 120 bp, Artificial Sequence
  ENSG00000069020_91 (sequence is synthesized)
tatagtgtatcatcatttttgccaaatatgtttttcattataaatgagtaaagagtacttaaggttgcattcatgtattacatgtttgttgttgtaaacctctccaatcagctggtagaa

SEQ ID NO: 54261 - DNA, 120 bp, Artificial Sequence
  ENSG00000069020_92 (sequence is synthesized)
attctcctcattgtgttctatttggtcagtctctgtgtgattgtaggatgtgctccttggtagtactcccagctgtagatttaccagcttaaaagtttgttaggatctgtgcaataaagt

SEQ ID NO: 54262 - DNA, 120 bp, Artificial Sequence
  ENSG00000069020_93 (sequence is synthesized)
gtttgcagtcttattttctctaagaaattccttatggacgtcataattgttgtatattgaacaaaatatttatacttatgcagttgcataacattgaaataaaaatttagcatgaaaaga

SEQ ID NO: 54263 - DNA, 120 bp, Artificial Sequence
  ENSG00000069020_94 (sequence is synthesized)
ttatttttttgccccagtctgcagggtgaaaaggacttttcatttcactgaggtgaaaagtgggtctgtgagtagagcgactttctttaaaaaaaaaaaaaaaaatcagaaaccaattac

SEQ ID NO: 54264 - DNA, 120 bp, Artificial Sequence
  ENSG00000069020_95 (sequence is synthesized)
ttgatatgcagagctgcaagcctcgttcctttaacaaaatcagtgcagtgtgcactgccgttaacctgaggaaagcagctgacatctcttgattacggctagaggtggaaggacccaaac

SEQ ID NO: 54265 - DNA, 120 bp, Artificial Sequence
  ENSG00000069020_96 (sequence is synthesized)
ttgcagcctccccctccccctcgagagagtgttagtccagtcctttagagaggttcggtttggctctctgtcatcaccgggacgctggcagggagtgtgtgtcatggttacaatagagtg

SEQ ID NO: 54266 - DNA, 120 bp, Artificial Sequence
  ENSG00000069020_97 (sequence is synthesized)
tgctaacatataacaaccatgaaagcccagcgggaaaggctacagattccggggctgaccttggatctcactcccaggagcctgagtccaaccccatccagcccaggcagtccttgtagt

SEQ ID NO: 54267 - DNA, 120 bp, Artificial Sequence
  ENSG00000069020_98 (sequence is synthesized)
gtgcaaagagagctgacaaattcaaccacagatttttactgaatgcctaccctatcagttgggaagggtgatgacaacccatgacataaagcacaaaagtgtatttcttactcgtgcttt

SEQ ID NO: 54268 - DNA, 120 bp, Artificial Sequence
  ENSG00000069020_99 (sequence is synthesized)
gtttgatagattcccagaagtggaattgcttggtcaaacgccctgtgtgtccaaatgctgggagaacatcaccccttggatgaattgccaccacattaaataaaacatatccaaagctca

SEQ ID NO: 54269 - DNA, 120 bp, Artificial Sequence
  ENSG00000069020_100 (sequence is synthesized)
tccccagaagaggaagtttgatagattcccagaagtggaattgcttggtcaaacggtatgtgtatttctaattttaatagctatcactttacccaaaagaatagaaaatcaccttcaccc

SEQ ID NO: 54270 - DNA, 120 bp, Artificial Sequence
  ENSG00000069020_101 (sequence is synthesized)
ttaattctttccaatcttattacccctggtcattactttaaattgcatttccttcactaccactgatgttgagtatattttcatatgtttactcttcatttacatttctcttttcttcac

SEQ ID NO: 54271 - DNA, 120 bp, Artificial Sequence
  ENSG00000069020_102 (sequence is synthesized)
ttcatgcttattttcactgcccatttttccatttagtagtgtttttctttttcagtttctacaaactattatgtgaaagtattaatccgttgtggtatgtgtgcaaatgtctttgcagtt

SEQ ID NO: 54272 - DNA, 120 bp, Artificial Sequence
  ENSG00000069020_103 (sequence is synthesized)
tcaccgccagcctggaagggcagcctccgaagagccatttcaactcagcccgacatcgccagagactagtggacccagctgcttcaaaaaaggagctgagtctccccagaagaggaagtt

SEQ ID NO: 54273 - DNA, 120 bp, Artificial Sequence
  ENSG00000069020_104 (sequence is synthesized)
aaactgctttctaggcaagatgctgttatgagattgtcagccctgtgtgtccaaatgctgggagaacatcaccccttggatgaattgccaccacattaaataaaacatatccaaagctca

SEQ ID NO: 54274 - DNA, 120 bp, Artificial Sequence
  ENSG00000069020_105 (sequence is synthesized)
aggagaagcagagatggatagaattgttgtggcagaactgagcttgtatacttggtcctgtggagggtatctactcttcttccagctgcgtagggtaaataaaggtttttgtaaagcttc

SEQ ID NO: 54275 - DNA, 120 bp, Artificial Sequence
  ENSG00000069020_106 (sequence is synthesized)
aacccggtggcgggacaggcctggccggcctctgcagagacgtccaacctcgtgcgcatgcgcagccaggccctgggccagtcggcgccctcgctcaccgccagcctgctttctcttttc

SEQ ID NO: 54276 - DNA, 120 bp, Artificial Sequence
  ENSG00000069020_107 (sequence is synthesized)
cctgtcgtagagctgtaagccatccttcccccgactccgcctgacatgtatcatggcacaccttcgtttttgttctttgtgtttatgtcgaatacctccctgctagactgcaagcccctt

SEQ ID NO: 54277 - DNA, 120 bp, Artificial Sequence
  ENSG00000069020_108 (sequence is synthesized)
gagggcagaattcttgtctgatttttactttctacttttcactgctctcaggacaatgccttgcacatagaaagcattcagtaaataatgttgaaggaataaataattatttatggaaaa

SEQ ID NO: 54278 - DNA, 120 bp, Artificial Sequence
  ENSG00000069020_109 (sequence is synthesized)
ttttgttgaagaaaagtgacctcctcaacttatagtctgtccctatcccctaggcctttagactgccattttaccttctctctttcctgtgagacaacagagattcagatagctgagacc

SEQ ID NO: 54279 - DNA, 120 bp, Artificial Sequence
  ENSG00000069020_110 (sequence is synthesized)
ttgggcttacctgagctctgatccccttcaggaaccccggcaccaatatatttctctctccacaaattaagatattgttttcttagaggcatagccttgcacccacagtcttgtttttgg

SEQ ID NO: 54280 - DNA, 120 bp, Artificial Sequence
  ENSG00000069020_111 (sequence is synthesized)
agtgtgtgactgctacttatatgatgaccttgccttgaacgtctctcacctggctcaatgccaggctgcagaggtatcactcattgctttcaactcaggatgaagagcgcgagcttcact

SEQ ID NO: 54281 - DNA, 120 bp, Artificial Sequence
  ENSG00000069020_112 (sequence is synthesized)
ttcctacctttgactttgcttatgcactgtcgcctcatagaagaaatctaagtggcaagtctttatttttcctcatgttttggctctatctattgataagtccatatttggggactggtt

SEQ ID NO: 54282 - DNA, 120 bp, Artificial Sequence
  ENSG00000069020_113 (sequence is synthesized)
gctatttgaaggaaatagccataaaatgggtcctgagacacgaatgagcatgacccattttgtgtctacctagagcgtgggtcaggccttgacatcctagaagcatgtcagcctgagaat

SEQ ID NO: 54283 - DNA, 120 bp, Artificial Sequence
  ENSG00000069020_114 (sequence is synthesized)
gccagagtgtcccagaagggttgcaatttcagtcttcactgagtagtttttctcttgcagagctcagttgggctcttgagagtacttctaatttttaaaatgttgctaaagaaattatca

SEQ ID NO: 54284 - DNA, 120 bp, Artificial Sequence
  ENSG00000069020_115 (sequence is synthesized)
actgacatttaaatttaatttggaagtaatgcaattgatggtagattactttaaattgagtacagtattcataggtatattcttgtttacttaaaatataaaacatagtaatatacagga

SEQ ID NO: 54285 - DNA, 66 bp, Artificial Sequence
  ENSG00000069020_116 (sequence is synthesized)
ggtgaaaccctgtctctactaaaaatgcagaaattagctgggcatggtgatgtgcacctgtagtcc

SEQ ID NO: 54286 - DNA, 120 bp, Artificial Sequence
  ENSG00000069020_117 (sequence is synthesized)
ctaagacgaagagggctccagaaggagctgagtctccccagaagaggaagtttgatagattcccagaagtggaattgcttggtcaaacgtctcactcccaggagcctgagtccaacccca

SEQ ID NO: 54287 - DNA, 120 bp, Artificial Sequence
  ENSG00000069020_118 (sequence is synthesized)
ggcctttcacttttggagggaatgatctgcactgaattctccctgtgtgtccaaatgctgggagaacatcaccccttggatgaattgccaccacattaaataaaacatatccaaagctca

SEQ ID NO: 54288 - DNA, 120 bp, Artificial Sequence
  ENSG00000069122_0 (sequence is synthesized)
agagaacagaaggcagttcacctctgctcccgacagcctgggaacccgcaagagccccagcatttgaagtctggtcttgtgaaaccccaccctcctctggctgtgtgattgaatgggatg

SEQ ID NO: 54289 - DNA, 120 bp, Artificial Sequence
  ENSG00000069122_1 (sequence is synthesized)
ccctcgaggttcacctcacctgagagggttttgggcagatcagcagtaaggtgttaaattttagaagcctgaaaactccagaagagaaaggccaaccaactcaaacttgaagacatgaaa

SEQ ID NO: 54290 - DNA, 120 bp, Artificial Sequence
  ENSG00000069122_2 (sequence is synthesized)
tccccaaggagaaccactttgtgcctcatgtttattgtgatttattcttccaaagctgcactgaactggaattacgagtctactattcatcctttgagtcttcatgaacatgaaccagct

SEQ ID NO: 54291 - DNA, 120 bp, Artificial Sequence
  ENSG00000069122_3 (sequence is synthesized)
ggtgaagaggcactgaggcaaaaacgagccgttgccacaaaaagtcctacggctgaagaatacactgttaatattgagatcagttttgaaaatgcatccttcctggatcctatcaaagcc

SEQ ID NO: 54292 - DNA, 120 bp, Artificial Sequence
  ENSG00000069122_4 (sequence is synthesized)
tacttgaacagcctcagttttccaattcatgggaataacactgaccaaattaccgacattttgagcataaatgtgacaacagtctgcagacctgctggaaatgaaatctggtgctcctgc

SEQ ID NO: 54293 - DNA, 120 bp, Artificial Sequence
  ENSG00000069122_5 (sequence is synthesized)
gagacaggttatgggtggcctcgggaaaggtgtcttcacaatctcatttgtcaagagcgtgacgtcttcctcccagggcaccattgcagttgccttaaagaactgcctcccaatggacct

SEQ ID NO: 54294 - DNA, 120 bp, Artificial Sequence
  ENSG00000069122_6 (sequence is synthesized)
ttttgcctgcttcaggaagatgttaccctgaacatgagagtcagactaaatgtaggctttcaagaagacctcatgaacacttcctccgccctctataggtcctacaagaccgacttggaa

SEQ ID NO: 54295 - DNA, 120 bp, Artificial Sequence
  ENSG00000069122_7 (sequence is synthesized)
acagcgttccggaagggttacggaattttaccaggcttcaagggcgtgactgtgacagggttcaagtctggaagtgtggttgtgacatatgaagtcaagactacaccaccatcacttgag

SEQ ID NO: 54296 - DNA, 120 bp, Artificial Sequence
  ENSG00000069122_8 (sequence is synthesized)
ttaatacataaagccaatgaacaagttgtacagagcctcaatcagacctacaaaatggactacaactcctttcaagcagttactatcaatgaaagcaatttctttgtcacaccagaaatc

SEQ ID NO: 54297 - DNA, 120 bp, Artificial Sequence
  ENSG00000069122_9 (sequence is synthesized)
atctttgaaggggacacagtcagtctggtgtgtgaaaaggaagttttgtcctccaatgtgtcttggcgctatgaagaacagcagttggaaatccagaacagcagcagattctcgatttac

SEQ ID NO: 54298 - DNA, 120 bp, Artificial Sequence
  ENSG00000069122_10 (sequence is synthesized)
accgcacttttcaacaacatgacttcggtgtccaagctcaccatccacaacatcactccaggtgatgcaggtgaatatgtttgcaaactgatattagacatttttgaatatgagtgcaag

SEQ ID NO: 54299 - DNA, 120 bp, Artificial Sequence
  ENSG00000069122_11 (sequence is synthesized)
aagaaaatagatgttatgcccatccaaattttggcaaatgaagaaatgaaggtgatgtgcgacaacaatcctgtatctttgaactgctgcagtcagggtaatgttaattggagcaaagta

SEQ ID NO: 54300 - DNA, 120 bp, Artificial Sequence
  ENSG00000069122_12 (sequence is synthesized)
gaatggaagcaggaaggaaaaataaatattccaggaacccctgagacagacatagattctagctgcagcagatacaccctcaaggctgatggaacccagtgcccaagcgggtcgtctgga

SEQ ID NO: 54301 - DNA, 120 bp, Artificial Sequence
  ENSG00000069122_13 (sequence is synthesized)
acaacagtcatctacacttgtgagttcatcagtgcctatggagccagaggcagtgcaaacataaaagtgacattcatctctgtggccaatctaacaataaccccggacccaatttctgtt

SEQ ID NO: 54302 - DNA, 120 bp, Artificial Sequence
  ENSG00000069122_14 (sequence is synthesized)
tctgagggacaaaacttttctataaaatgcatcagtgatgtgagtaactatgatgaggtttattggaacacttctgctggaattaaaatataccaaagattttataccacgaggaggtat

SEQ ID NO: 54303 - DNA, 120 bp, Artificial Sequence
  ENSG00000069122_15 (sequence is synthesized)
cttgatggagcagaatcagtactgacagtcaagacctcgaccagggagtggaatggaacctatcactgcatatttagatataagaattcatacagtattgcaaccaaagacgtcattgtt

SEQ ID NO: 54304 - DNA, 120 bp, Artificial Sequence
  ENSG00000069122_16 (sequence is synthesized)
cacccgctgcctctaaagctgaacatcatggttgatcctttggaagctactgtttcatgcagtggttcccatcacatcaagtgctgcatagaggaggatggagactacaaagttactttc

SEQ ID NO: 54305 - DNA, 120 bp, Artificial Sequence
  ENSG00000069122_17 (sequence is synthesized)
catacgggttcctcatcccttcctgctgcaaaagaagttaacaaaaaacaagtgtgctacaaacacaatttcaatgcaagctcagtttcctggtgttcaaaaactgttgatgtgtgttgt

SEQ ID NO: 54306 - DNA, 120 bp, Artificial Sequence
  ENSG00000069122_18 (sequence is synthesized)
cactttaccaatgctgctaataattcagtctggagcccatctatgaagctgaatctggttcctggggaaaacatcacatgccaggatcccgtaataggtgtcggagagccggggaaagtc

SEQ ID NO: 54307 - DNA, 120 bp, Artificial Sequence
  ENSG00000069122_19 (sequence is synthesized)
atccagaagctatgccggttctcaaacgttcccagcagccctgagagtcccattggcgggaccatcacttacaaatgtgtaggctcccagtgggaggagaagagaaatgactgcatctct

SEQ ID NO: 54308 - DNA, 120 bp, Artificial Sequence
  ENSG00000069122_20 (sequence is synthesized)
gccccaataaacagtctgctccagatggctaaggctttgatcaagagcccctctcaggatgagatgctccctacatacctgaaggatctttctattagcatagacaaagcggaacatgaa

SEQ ID NO: 54309 - DNA, 120 bp, Artificial Sequence
  ENSG00000069122_21 (sequence is synthesized)
atcagctcttctcctgggagtctgggagccattattaacatccttgatctgctctcaacagttccaacccaagtaaattcagaaatgatgacgcacgtgctctctacggttaatgtcatc

SEQ ID NO: 54310 - DNA, 120 bp, Artificial Sequence
  ENSG00000069122_22 (sequence is synthesized)
cttggcaagcccgtcttgaacacctggaaggttttacaacagcaatggaccaatcagagttcacagctactacattcagtggaaagattttcccaagcattacagtcgggagatagccct

SEQ ID NO: 54311 - DNA, 120 bp, Artificial Sequence
  ENSG00000069122_23 (sequence is synthesized)
agatgagcagcatggtaatcaagtccagccacccagaaacctatcaacagaggtttgttttcccatactttgacctctggggcaatgtggtcattgacaagagctatctagaaaacttgc

SEQ ID NO: 54312 - DNA, 120 bp, Artificial Sequence
  ENSG00000069122_24 (sequence is synthesized)
agtcggattcgtctattgtcaccatggctttcccaactctccaagccatccttgcccaggatatccaggaaaataactttgcagagagcttagtgatgacaaccactgtcagccacaata

SEQ ID NO: 54313 - DNA, 120 bp, Artificial Sequence
  ENSG00000069122_25 (sequence is synthesized)
caactatgccattcaggatttcaatgacttttaagaacaatagcccttcaggcggcgaaacgaagtgtgtcttctggaacttcaggcttgccaacaacacaggggggtgggacagcagtg

SEQ ID NO: 54314 - DNA, 120 bp, Artificial Sequence
  ENSG00000069122_26 (sequence is synthesized)
ggtgctatgtagaagaaggtgatggggacaatgtcacctgtatctgtgaccacctaacatcattctccatcctcatgtcccctgactccccagatcctagttctctcctgggaatactcc

SEQ ID NO: 54315 - DNA, 120 bp, Artificial Sequence
  ENSG00000069122_27 (sequence is synthesized)
tggatattatttcttatgttggggtgggcttttccatcttgagcttggcagcctgtctagttgtggaagctgtggtgtggaaatcggtgaccaagaaccggacttcttatatgcgccaca

SEQ ID NO: 54316 - DNA, 120 bp, Artificial Sequence
  ENSG00000069122_28 (sequence is synthesized)
cctgcatagtgaatatcgctgcctcccttctggtcgccaacacctggttcattgtggtcgctgccatccaggacaatcgctacatactctgcaagacagcctgtgtggctgccaccttct

SEQ ID NO: 54317 - DNA, 120 bp, Artificial Sequence
  ENSG00000069122_29 (sequence is synthesized)
tcatccacttcttctacctcagcgtcttcttctggatgctgacactgggcctcatgctgttctatcgcctggttttcattctgcatgaaacaagcaggtccactcagaaagccattgcct

SEQ ID NO: 54318 - DNA, 120 bp, Artificial Sequence
  ENSG00000069122_30 (sequence is synthesized)
tctgtcttggctatggctgcccacttgccatctcggtcatcacgctgggagccacccagccccgggaagtctatacgaggaagaatgtctgttggctcaactgggaggacaccaaggccc

SEQ ID NO: 54319 - DNA, 120 bp, Artificial Sequence
  ENSG00000069122_31 (sequence is synthesized)
tgctggctttcgccatcccagcactgatcattgtggtggtgaacataaccatcactattgtggtcatcaccaagatcctgaggccttccattggagacaagccatgcaagcaggagaaga

SEQ ID NO: 54320 - DNA, 120 bp, Artificial Sequence
  ENSG00000069122_32 (sequence is synthesized)
gcagcctgtttcagatcagcaagagcattggggtcctcacaccactcttgggcctcacttggggttttggtctcaccactgtgttcccagggaccaaccttgtgttccatatcatatttg

SEQ ID NO: 54321 - DNA, 120 bp, Artificial Sequence
  ENSG00000069122_33 (sequence is synthesized)
ccatcctcaatgtcttccagggattattcattttactctttggatgcctctgggatctgaaggtacaggaagctttgctgaataagttttcattgtcgagatggtcttcacagcactcaa

SEQ ID NO: 54322 - DNA, 120 bp, Artificial Sequence
  ENSG00000069122_34 (sequence is synthesized)
agtcaacatccctgggttcatccacacctgtgttttctatgagttctccaatatcaaggagatttaacaatttgtttggtaaaacaggaacgtataatgtttccaccccagaagcaacca

SEQ ID NO: 54323 - DNA, 120 bp, Artificial Sequence
  ENSG00000069122_35 (sequence is synthesized)
gctcatccctggaaaactcatccagtgcttcttcgttgctcaactaagaacaggataatccaacctacgtgacctcccggggacagtggctgtgcttttaaaaagagatgcttgcaaagc

SEQ ID NO: 54324 - DNA, 120 bp, Artificial Sequence
  ENSG00000069122_36 (sequence is synthesized)
aatggggaacgtgttctcggggcaggtttccgggagcagatgccaaaaagactttttcatagagaagaggctttcttttgtaaagacagaataaaaataattgttatgtttctgtttgtt

SEQ ID NO: 54325 - DNA, 120 bp, Artificial Sequence
  ENSG00000069122_37 (sequence is synthesized)
ccctccccctcccccttgtgtgataccacatgtgtatagtatttaagtgaaactcaagccctcaaggcccaacttctctgtctatattgtaatatagaatttcgaagagacattttcact

SEQ ID NO: 54326 - DNA, 120 bp, Artificial Sequence
  ENSG00000069122_38 (sequence is synthesized)
ttttacacattgggcacaaagataagctttgattaaagtagtaagtaaaaggctacctaggaaatacttcagtgaattctaagaaggaaggaaggaagaaaggaaggaaagaagggaggg

SEQ ID NO: 54327 - DNA, 120 bp, Artificial Sequence
  ENSG00000069122_39 (sequence is synthesized)
aaacagggagaaagggaaaaagaagaaaaagagaaagatgaaaataggaacaaataaagacaaacaacattaagggccatattgtaagatttccatgttaatgatctaatataatcactc

SEQ ID NO: 54328 - DNA, 120 bp, Artificial Sequence
  ENSG00000069122_40 (sequence is synthesized)
agtgcaacattgagaatttttttttaatggctcaaaaatggaaactgaaagcaagtcatggggaatgaatactttgggcagtatcttcctgatgtcttcttagctaagaggaggaaaaaa

SEQ ID NO: 54329 - DNA, 120 bp, Artificial Sequence
  ENSG00000069122_41 (sequence is synthesized)
aggctgaaaaaatagggaggaaattccttcatcagaacgacttcaagtggataacaatatttataagaaatgaatggaaggaaatatgatcctcctgagactaactttgtatgttaaggt

SEQ ID NO: 54330 - DNA, 120 bp, Artificial Sequence
  ENSG00000069122_42 (sequence is synthesized)
ttgaactaagtgaatgtatctgcagaggaagtattacaaagatatgtcattagatccaagtgctgattaaatttttatagtttatcagaaaagccttatattttagtttgttccacattt

SEQ ID NO: 54331 - DNA, 120 bp, Artificial Sequence
  ENSG00000069122_43 (sequence is synthesized)
tgaaagcaaaaaatatatatttgatatacccttcaattgccaaatttgatatgttgcactgaagacagaccctgtcatatatttaatggcttcaagcaggtacttctctgtgcattatag

SEQ ID NO: 54332 - DNA, 120 bp, Artificial Sequence
  ENSG00000069122_44 (sequence is synthesized)
aatagattttaataatcttatagcattgtatattattattgctgttgtcactgttattattattgtggatactggcccttggtgtgttgcatagctccctatgtattctctgtttccatc

SEQ ID NO: 54333 - DNA, 120 bp, Artificial Sequence
  ENSG00000069122_45 (sequence is synthesized)
tttaagttcccagaccaatatacattaagagttttgcatggtctaaattgtgtttattccaaccacgtggaaagctcctggaaagaaattttacattcggttgttctgtgctcctaatga

SEQ ID NO: 54334 - DNA, 120 bp, Artificial Sequence
  ENSG00000069122_46 (sequence is synthesized)
cacttgaccttgttgaacaaatggcagagcctttcccaaggatttgattgtttgtgaattatctgcatgtgtgcttttttttggtgtgtatttcattaaaaaatataaatatttatgaaa

SEQ ID NO: 54335 - DNA, 120 bp, Artificial Sequence
  ENSG00000069122_47 (sequence is synthesized)
gactctgtgagactgggaggatcatagctgggggaggctgagcgtgggagcggtgctgccagtcctgcctgaaaacgcgaaatgagtcttgcttggttctccctccactgggcgtgagag

SEQ ID NO: 54336 - DNA, 120 bp, Artificial Sequence
  ENSG00000069122_48 (sequence is synthesized)
cccctgcccaggaggcccaggacaaatggccccatagtggaaactgggaagcttttaggcatctgatcagagcgggagccagccgggggaccacagtgctggacaggccaaccaactcaa

SEQ ID NO: 54337 - DNA, 120 bp, Artificial Sequence
  ENSG00000069122_49 (sequence is synthesized)
tacttgaacagcctcagttttccaattcatgggaataacactgaccaaattaccgacattttgagcataaatgtgacaacagataaactactgggtcctcttccctgtgtcctcctccct

SEQ ID NO: 54338 - DNA, 120 bp, Artificial Sequence
  ENSG00000069122_50 (sequence is synthesized)
tggtatatcaatggacacaacaaggactggttcaagatattaagatgggatgacttcaagaggcttcaccatcttaaaaacttgggttaacaagcttctcaattaaaatgcaattgacct

SEQ ID NO: 54339 - DNA, 120 bp, Artificial Sequence
  ENSG00000069122_51 (sequence is synthesized)
taatttatccttccagaaagactggtcattcacacatagagggggtgaatcttttctgatagtgatctatgaaacaggtttgacaaaagtggatacttcaatgtggcagagaaagcctca

SEQ ID NO: 54340 - DNA, 120 bp, Artificial Sequence
  ENSG00000069122_52 (sequence is synthesized)
ggctcatggacctcaggaccagcagggaacagctaagaggagttggcctaaaagaggaagtgaatgggatgggtgggcaatgaaggttaggcctactgaccatggcactaatgtctaagc

SEQ ID NO: 54341 - DNA, 120 bp, Artificial Sequence
  ENSG00000069122_53 (sequence is synthesized)
atccaaactttcaccatcttcctttttccatccttccctcgcctcattcttccaacagcctaccttatgatccttttttagtaatggcaaataaaactgaggatatttaaaaccggacaa

SEQ ID NO: 54342 - DNA, 120 bp, Artificial Sequence
  ENSG00000069122_54 (sequence is synthesized)
gattacagaagtcaggttcatgtggaaagcagagaggggctttggaaaatcaagggcaaaattaagaaattgggtagttctgaaaaggtgacggaaagtaaaggggaaaacatcacatgc

SEQ ID NO: 54343 - DNA, 120 bp, Artificial Sequence
  ENSG00000069188_0 (sequence is synthesized)
attccggagctcggccggcgacccggccggatcgcagaggccgccctgtttgggagaagtcggagttggggtgctaagggagagaggcgccctagtccgagagggcggcctggcctcttt

SEQ ID NO: 54344 - DNA, 120 bp, Artificial Sequence
  ENSG00000069188_1 (sequence is synthesized)
ctccctgctcgcccctcgccttccgggcgcgctgccgggctcggactagtacagaagaggaggaagggttggggtagccaagcgctgcccctcccgggcatattacaccccggggcacgg

SEQ ID NO: 54345 - DNA, 120 bp, Artificial Sequence
  ENSG00000069188_2 (sequence is synthesized)
agccgcgtagactgactgtttcctgggactaagccacggggtatcggaccccaccaggattataaaacagggcggagggaagggagaccccgaggacccctctccaggctggtcaccatg

SEQ ID NO: 54346 - DNA, 120 bp, Artificial Sequence
  ENSG00000069188_3 (sequence is synthesized)
tgggggcttttgatctggacactgctagctctgcatcagatccgcgcggccagagcccaagatgatgtgtccccgtatttcaagacagagcctgtgcggacacaggtgcacttggaagga

SEQ ID NO: 54347 - DNA, 120 bp, Artificial Sequence
  ENSG00000069188_4 (sequence is synthesized)
aaccgcctggtgcttacatgcatggccgagggcagctggccactggagttcaagtggctccacaacaacagggagctgaccaagttctccctggaatacagatacatgatcaccagcctg

SEQ ID NO: 54348 - DNA, 120 bp, Artificial Sequence
  ENSG00000069188_5 (sequence is synthesized)
gaccgcacccacgctggcttttaccgttgcatcgtgcggaaccgaatgggggccctgctgcagcggcaaaccgaggtccaggtggcctacatggggagctttgaggaaggtgagaagcac

SEQ ID NO: 54349 - DNA, 120 bp, Artificial Sequence
  ENSG00000069188_6 (sequence is synthesized)
cagagcgtctcccacggagaagcagctgtcatccgtgccccgcgcatcgccagcttcccccagccacaggtgacctggttccgggacggccgcaagatcccgcccagcagccgcatagcc

SEQ ID NO: 54350 - DNA, 120 bp, Artificial Sequence
  ENSG00000069188_7 (sequence is synthesized)
atcacgctggagaacacccttgtcatcctgtcaacggtggcccctgacgcaggtcgctactatgtgcaggctgttaacgacaaaaacggggataacaagaccagccagcccatcacgctc

SEQ ID NO: 54351 - DNA, 120 bp, Artificial Sequence
  ENSG00000069188_8 (sequence is synthesized)
accgtggagaatgtaggggggcctgcagaccccatcgcacccaccatcatcatcccacctaaaaacaccagcgtggtggccggcacctcagaggttaccttggagtgtgtggccaatgcc

SEQ ID NO: 54352 - DNA, 120 bp, Artificial Sequence
  ENSG00000069188_9 (sequence is synthesized)
aggcccctgatcaagctacatatcatttggaagaaggacggggtattgctgtcgggcggcatcagtgaccacaaccgccggctcaccatccccaaccccaccggcagtgacgccggctac

SEQ ID NO: 54353 - DNA, 120 bp, Artificial Sequence
  ENSG00000069188_10 (sequence is synthesized)
tacgagtgtgaggctgtcctgcgcagcagcagcgtcccctctgttgtccggggcgcctacctctcagtgctggaaccgcctcagtttgtcaaggagccagaaagacacatcactgcggag

SEQ ID NO: 54354 - DNA, 120 bp, Artificial Sequence
  ENSG00000069188_11 (sequence is synthesized)
atggagaaggtggtggacatcccctgtcaggccaaaggtgtgccgccgccctccatcacctggtacaaggacgcagccgtggtggaggtggagaagttgacccgcttccggcagcgcaac

SEQ ID NO: 54355 - DNA, 120 bp, Artificial Sequence
  ENSG00000069188_12 (sequence is synthesized)
gacgggggcctgcagatcagcggcctggtgcccgatgataccggcatgttccagtgcttcgcccgcaatgcagccggcgaggtgcaaacttccacctacctggctgtcaccagcatcgcc

SEQ ID NO: 54356 - DNA, 120 bp, Artificial Sequence
  ENSG00000069188_13 (sequence is synthesized)
cctaacatcaccagaggccccctggacagcacggtgatcgatggcatgtcagtggtgctagcatgtgagacctcgggggcgccccgaccagctatcacttggcagaaaggggagcgcatc

SEQ ID NO: 54357 - DNA, 120 bp, Artificial Sequence
  ENSG00000069188_14 (sequence is synthesized)
ttggccagtggctctgtgcagctgcctcgcttcacacccctggagtcgggcagcctcctcatcagccccacacacatctccgatgcggggacctacacctgcctggccaccaactctcgg

SEQ ID NO: 54358 - DNA, 120 bp, Artificial Sequence
  ENSG00000069188_15 (sequence is synthesized)
ggggtcgatgaggcctcagcagacctagtcgtttgggctcggacccgcatcaccaagcccccccaggatcagagtgtcatcaagggcacccaggcctccatggtgtgcggagtgacccac

SEQ ID NO: 54359 - DNA, 120 bp, Artificial Sequence
  ENSG00000069188_16 (sequence is synthesized)
gacccccgagtaaccatcaggtacatctgggagaaggacggggccaccctgggcacggagagccatcctcgtatccgcctggacagaaacggctccctgcacatctcacagacgtggtcg

SEQ ID NO: 54360 - DNA, 120 bp, Artificial Sequence
  ENSG00000069188_17 (sequence is synthesized)
ggagacatcggcacgtacacctgccgggtgatctcagcaggaggcaacgactctcgcagtgcccacctgcgagtcaggcaactgccccacgcgcccgagcacccagtggccactctcagc

SEQ ID NO: 54361 - DNA, 120 bp, Artificial Sequence
  ENSG00000069188_18 (sequence is synthesized)
accgtggaaaggcgagccatcaacctgacgtggaccaagccctttgatggcaacagccccctgatccgctacattctggagatgtcggagaacaatgccccctggactgtactcctggcc

SEQ ID NO: 54362 - DNA, 120 bp, Artificial Sequence
  ENSG00000069188_19 (sequence is synthesized)
agtgtggaccccaaagctacctcagtgacagtcaagggcctggttcctgcacgctcctaccagttccgtctttgtgccgtcaacgacgtggggaaaggacagttcagcaaagacaccgag

SEQ ID NO: 54363 - DNA, 120 bp, Artificial Sequence
  ENSG00000069188_20 (sequence is synthesized)
agggtctccctccccgaggagccccccacggcccctccacagaacgtcatcgccagcggtcgaaccaaccagtccatcatgatccagtggcagccgcctcctgagagccaccagaatgga

SEQ ID NO: 54364 - DNA, 120 bp, Artificial Sequence
  ENSG00000069188_21 (sequence is synthesized)
attctcaagggttacatcatcaggtactgcctggccgggctgcccgtggggtaccagtttaagaacatcacggatgctgatgtgaacaacctgctgctggaggatctcatcatttggacc

SEQ ID NO: 54365 - DNA, 120 bp, Artificial Sequence
  ENSG00000069188_22 (sequence is synthesized)
aactacgagatcgaggtggctgcttacaacagcgctgggctgggggtctacagcagtaaagtcaccgagtggacgctgcagggagttcccacggtccctccgggcaatgtgcacgcggaa

SEQ ID NO: 54366 - DNA, 120 bp, Artificial Sequence
  ENSG00000069188_23 (sequence is synthesized)
gccaccaattccacgaccatccgcttcacctggaacgcccccagcccccagttcatcaacggcatcaaccagggctacaagctgatcgcctgggagccggaacaggaagaggaggttacc

SEQ ID NO: 54367 - DNA, 120 bp, Artificial Sequence
  ENSG00000069188_24 (sequence is synthesized)
atggtgaccgcccggcctaactttcaagacagcatccacgtgggcttcgtgtctggcctgaagaagttcaccgagtacttcacctcagtgctgtgtttcaccacccccggggacgggcca

SEQ ID NO: 54368 - DNA, 120 bp, Artificial Sequence
  ENSG00000069188_25 (sequence is synthesized)
cgcagcaccccgcagctggtgcgcacccatgaggatgtgcctgggcccgtgggacacctgagcttcagtgagatcctggacacatcgctgaaggtcagctggcaagagccgggagagaaa

SEQ ID NO: 54369 - DNA, 120 bp, Artificial Sequence
  ENSG00000069188_26 (sequence is synthesized)
aatggcatcctcacagggtaccggatctcctgggaggagtacaatcgaaccaacacccgtgtgacccactacctgcccaacgtgaccctggagtaccgtgtcacgggcctcaccgcgctc

SEQ ID NO: 54370 - DNA, 120 bp, Artificial Sequence
  ENSG00000069188_27 (sequence is synthesized)
accacctacaccatcgaggtggccgccatgacctcaaagggccagggccaagtgtccgcctccaccatctcctctggggtgcccccagaactcccagggccccccaccaacctgggcatt

SEQ ID NO: 54371 - DNA, 120 bp, Artificial Sequence
  ENSG00000069188_28 (sequence is synthesized)
tccaacatcggcccccgctctgtgaccttgcagttcaggccaggctacgatgggaaaacctccatctcccgctggctggtggaagcccaggtaggcgtggttggggagggagaggagtgg

SEQ ID NO: 54372 - DNA, 120 bp, Artificial Sequence
  ENSG00000069188_29 (sequence is synthesized)
ttgctgatccaccagctctccaatgagcccgatgcccgctccatggaggtgcccgacctcaaccccttcacctgctacagcttccgcatgcgccaggtgaacatcgtgggcaccagcccc

SEQ ID NO: 54373 - DNA, 120 bp, Artificial Sequence
  ENSG00000069188_30 (sequence is synthesized)
cccagtcagccttctagaaagatccagaccctgcaggcaccccctgacatggccccagccaatgtgtctctgcgcacagccagtgagaccagcctgtggctgcgctggatgcctctcccg

SEQ ID NO: 54374 - DNA, 120 bp, Artificial Sequence
  ENSG00000069188_31 (sequence is synthesized)
gagatggaatacaatgggaaccctgagtccgtgggctataagatcaagtacagccggtcagacgggcatggcaagacgctgagccacgtggtgcaggaccgtgtggagcgggactacacc

SEQ ID NO: 54375 - DNA, 120 bp, Artificial Sequence
  ENSG00000069188_32 (sequence is synthesized)
atcgaggacctggaggagtggacagagtaccgcgtccaggtccaggccttcaacgccatcgggagcgggccctggagccagacggtggtgggcaggacccgggagtcagttccctcttcc

SEQ ID NO: 54376 - DNA, 120 bp, Artificial Sequence
  ENSG00000069188_33 (sequence is synthesized)
ggccccaccaatgtgtctgcactggccaccacctccagcagcatgctggtgcgctggagcgaggtccccgaggctgatcgcaacgggctcgtgctgggctataaggtgatgtataaggag

SEQ ID NO: 54377 - DNA, 120 bp, Artificial Sequence
  ENSG00000069188_34 (sequence is synthesized)
aaggactcggacacccagccccgattctggctggtggaaggcaactcgtctcgcagtgcccagctcaccggcttgggcaaatacgtgctctatgaagtccaggtgctggccttcacacgc

SEQ ID NO: 54378 - DNA, 120 bp, Artificial Sequence
  ENSG00000069188_35 (sequence is synthesized)
atcggggacggcagccccagccaccctcccatcctggagcggacgctggatgatgtcccaggaccacccatgggcatcctgttcccagaggtgcggaccacgtctgtgcggctgatctgg

SEQ ID NO: 54379 - DNA, 120 bp, Artificial Sequence
  ENSG00000069188_36 (sequence is synthesized)
cagccccctgccgcccccaatggcatcattcttgcttaccagatcacacaccggctcaacaccaccacggccaacaccgccactgtggaggtgctggcacccagcgcccggcagtacaca

SEQ ID NO: 54380 - DNA, 120 bp, Artificial Sequence
  ENSG00000069188_37 (sequence is synthesized)
gccacgggcctcaagccagagtctgtctacctgttccgcatcacggcccagacccgcaagggctggggagaagctgccgaggccttggtggtgaccaccgagaagagagaccgtccgcag

SEQ ID NO: 54381 - DNA, 120 bp, Artificial Sequence
  ENSG00000069188_38 (sequence is synthesized)
ccccccagcaggccgatggtgcagcaggaggatgtgagagcacgcagcgtgctgctgtcctgggagccagggagcgacgggctctcccctgtgcgctactacaccatccagacccgcgag

SEQ ID NO: 54382 - DNA, 120 bp, Artificial Sequence
  ENSG00000069188_39 (sequence is synthesized)
ctgcccagcggcaggtgggcactgcactcggcctccgtgagccacaatgcctccagcttcattgtggacaggctgaagcccttcacgtcctacaagttccgagtgaaggcgaccaatgac

SEQ ID NO: 54383 - DNA, 120 bp, Artificial Sequence
  ENSG00000069188_40 (sequence is synthesized)
attggcgacagcgagttcagcgaggagtcggagtcactgaccaccctgcaggctgcccccgatgaagcacccaccatcctctccgtgacgccccacaccaccacctccgtgctaatccga

SEQ ID NO: 54384 - DNA, 120 bp, Artificial Sequence
  ENSG00000069188_41 (sequence is synthesized)
tggcagccgccagcagaggacaagatcaatggcatcctcctgggcttccggatccgataccgggagctgctctatgaaggactgaggggcttcacgcttcgaggcatcaacaacccaggg

SEQ ID NO: 54385 - DNA, 120 bp, Artificial Sequence
  ENSG00000069188_42 (sequence is synthesized)
gccacatgggctgagcttacctccatgtactccatgcggaacctgagccggcccagcctcacgcagtacgagctggacaacctgaacaagcacaggcggtacgagatacggatgagcgtg

SEQ ID NO: 54386 - DNA, 120 bp, Artificial Sequence
  ENSG00000069188_43 (sequence is synthesized)
tacaacgctgtgggtgaggggccctccagccccccgcaggaggtctttgttggggaggcagtgcccacagcagcacctcgtaacgtggtcgtccacggcgccacggccacacagctggac

SEQ ID NO: 54387 - DNA, 120 bp, Artificial Sequence
  ENSG00000069188_44 (sequence is synthesized)
gtgacttgggagccacctccgctggacagccagaatggagacatccaggggtacaagatttatttctgggaagcccagcgggggaacctcacagagcgagtgaagacgcttttcctggct

SEQ ID NO: 54388 - DNA, 120 bp, Artificial Sequence
  ENSG00000069188_45 (sequence is synthesized)
gagaacagcgtgaagctcaagaacttgactggctacacggcctacatggtcagcgtggccgccttcaacgccgctggggatgggcctcggagcacccccacccaaggccagacccagcaa

SEQ ID NO: 54389 - DNA, 120 bp, Artificial Sequence
  ENSG00000069188_46 (sequence is synthesized)
ctgaccacaacctcagtgaatgtgtcctgggaagccccgcagttccccaatggcatcctggagggctacaggctggtgtacgagccctgcagccccgtggatggagtcagcaagatcgtg

SEQ ID NO: 54390 - DNA, 120 bp, Artificial Sequence
  ENSG00000069188_47 (sequence is synthesized)
accgtggacgtgaaggggaacagccccctgtggctgaaggtgaaggacctggcggagggggtgacctacaggttccgcatcagagccaagaccttcacctacgggccggagatcgaagcc

SEQ ID NO: 54391 - DNA, 120 bp, Artificial Sequence
  ENSG00000069188_48 (sequence is synthesized)
aacgtcaccacgggccccggagaaggtgccccaggaccgcctggcgtgcccatcatcgtgcggtacagctctgccatcgccattcactggtccagcggagacccgggcaaagggcccatc

SEQ ID NO: 54392 - DNA, 120 bp, Artificial Sequence
  ENSG00000069188_49 (sequence is synthesized)
acccgctacgtcatcgaggccagaccttcagacgagggactatgggacatcctcatcaaagacatccccaaggaggtgagctcctacacgttcagcatggacatcctgaagccgggcgtg

SEQ ID NO: 54393 - DNA, 120 bp, Artificial Sequence
  ENSG00000069188_50 (sequence is synthesized)
agctatgacttccgggtcatcgcggtcaacgactatggtttcggcacccccagcagcccctcccagtctgtgccagcccagaaagccaaccccttctatgaggagtggtggttcttggtg

SEQ ID NO: 54394 - DNA, 120 bp, Artificial Sequence
  ENSG00000069188_51 (sequence is synthesized)
gtcattgccctggtcggcctcatcttcatcctgcttctggtcttcgtgctcatcatccggggccagagcaagaagtacgccaagaagacagactcggggaacagtgccaagtctggagcc

SEQ ID NO: 54395 - DNA, 120 bp, Artificial Sequence
  ENSG00000069188_52 (sequence is synthesized)
ctaggccacagcgagatgatgagcttggatgaaagcagcttccctgccctggaactcaacaacaggcggctctccgtcaagaactctttctgccgaaagaacggcctgtacaccaggtct

SEQ ID NO: 54396 - DNA, 120 bp, Artificial Sequence
  ENSG00000069188_53 (sequence is synthesized)
ccccccaggcccagcccaggcagcctgcactactcggatgaggatgtcaccaaatacaacgacctcatccctgcagagagcagcagcctgacggagaagccctcagaaatctccgactct

SEQ ID NO: 54397 - DNA, 120 bp, Artificial Sequence
  ENSG00000069188_54 (sequence is synthesized)
cagggaagtgacagcgagtacgaggtcgactcaaaccaccagaaggcccactcctttgtcaaccactacatcagtgaccccacatactacaactcgtggcggcgacagcagaagggcatc

SEQ ID NO: 54398 - DNA, 120 bp, Artificial Sequence
  ENSG00000069188_55 (sequence is synthesized)
tcgagggcacaggcctacagctacacggagagcgactcgggtgagccagaccacaccaccgtcaccaacagcaccagcacccagcagggcagcctctttcggcccaaggccagtcggact

SEQ ID NO: 54399 - DNA, 120 bp, Artificial Sequence
  ENSG00000069188_56 (sequence is synthesized)
ccaacgccccagaacccccctaaccccccaagtcagcagagcaccctctaccgtccccccagcagcctggccccaggctcccgggctcccatagcaggattttcatcatttgtttgacat

SEQ ID NO: 54400 - DNA, 120 bp, Artificial Sequence
  ENSG00000069188_57 (sequence is synthesized)
cagaagaggaaaaagcagaaagagaaatggcaccaaactcctccttcacccctcctctcactgcctgccagaaaacaaaaacaccaagaaaccaagtcaacttttcacctcctgagttta

SEQ ID NO: 54401 - DNA, 120 bp, Artificial Sequence
  ENSG00000069188_58 (sequence is synthesized)
tttttccagagattccagggccagcaaagccggcgttcagaaggagggagaaaaccgtgagaggatgtgtgtggccagcagctcttcagctttgagatggtggggttcactgctcccttg

SEQ ID NO: 54402 - DNA, 120 bp, Artificial Sequence
  ENSG00000069188_59 (sequence is synthesized)
ggaattacacggagctggggaagtggctgtgtcactgctatggacacggagtggggcgggcatctggagagagagagggagcggaggctaaggactggaggccgccaggcaggcgtggcc

SEQ ID NO: 54403 - DNA, 120 bp, Artificial Sequence
  ENSG00000069188_60 (sequence is synthesized)
gagggaagaaaaagcttctggatgtccagccagctgcccccttccagcccctccaggacccctggacccactgccgctgctctctgcaaaaagaatgggcatcccggaggccacgcctat

SEQ ID NO: 54404 - DNA, 120 bp, Artificial Sequence
  ENSG00000069188_61 (sequence is synthesized)
cttctctctctgctcctccttccctccatgcaccatcactgtggctggcaggcatcggacagcctcatccagaccccctgccctgtcttggcaacctctactgcccatctcccctgctca

SEQ ID NO: 54405 - DNA, 120 bp, Artificial Sequence
  ENSG00000069188_62 (sequence is synthesized)
acttctccaccaagcatttggtttatttagaaaaaggaagaaaaacaaaaaacaaaaaactaaagggtgagaatttgcttagcgccttccttgttcctgcatattttttaaaatattgaa

SEQ ID NO: 54406 - DNA, 120 bp, Artificial Sequence
  ENSG00000069188_63 (sequence is synthesized)
tccaaggaagagagcccaagggtaggggagaaaccccccacaactgacccctgcctccctgtgctggaattgactttcctgagcatggacaaggaaaggtgaagtctggggagcagaggt

SEQ ID NO: 54407 - DNA, 120 bp, Artificial Sequence
  ENSG00000069188_64 (sequence is synthesized)
gtaaataaggcgactggccttggcactgtgggatgattaggtttaacgcattgtgggcaagataagaatgacactttgactgttctctttcttccaatccaggttccatccgtcctctct

SEQ ID NO: 54408 - DNA, 120 bp, Artificial Sequence
  ENSG00000069188_65 (sequence is synthesized)
ttaaaggggtagtcagcttcccaaggctggggagtggggcacagctgagggatctccctctgggcagacacgtcactctccactggatagatcctcaccacacacacacacacacacaca

SEQ ID NO: 54409 - DNA, 120 bp, Artificial Sequence
  ENSG00000069188_66 (sequence is synthesized)
tctcccatgcacttacaaggaacagggtctagggatcctctccagaacaaactcatctgggccctcctagccagacagcacactcactttcagatctgtgtccctctcactgccacccgg

SEQ ID NO: 54410 - DNA, 120 bp, Artificial Sequence
  ENSG00000069188_67 (sequence is synthesized)
cagcctcctaagcacagaggcacaggagcccagaggggtggcccaagtccctggtccagaggctggaatacccagagtttgctcagtcagcctagcacccagtttacaggcaaaaaggca

SEQ ID NO: 54411 - DNA, 120 bp, Artificial Sequence
  ENSG00000069188_68 (sequence is synthesized)
aagacaccctaacccccagtaacagcttccaggctgggctccgcctggccagggcggggaggggaaggggcaggtcaggaagctcagtccaaagtggacccagcatttgaattgcacgcc

SEQ ID NO: 54412 - DNA, 120 bp, Artificial Sequence
  ENSG00000069188_69 (sequence is synthesized)
cagtccaaagtggacccagcatttgaattgcacgcccagcaggggcaggtcagatgggaccaagtgacaagaatagctgatgggagggaatgcttttacacacacacacacacacacaca

SEQ ID NO: 54413 - DNA, 120 bp, Artificial Sequence
  ENSG00000069188_70 (sequence is synthesized)
tctgcaaaaagccacatccagtggccaggatcttcccgtccacttggtacttacggatgccagggtttagggagaagcctttctatctaactccatacattgtccaaggccctctgtgcc

SEQ ID NO: 54414 - DNA, 120 bp, Artificial Sequence
  ENSG00000069188_71 (sequence is synthesized)
ctcagccagccctgtaaggccagcccaacacctgccccaccgctgagatgggtggcagatggcccacaggggcctgtctgattcagcgtgagccccttcgtggagcagggctccctctgt

SEQ ID NO: 54415 - DNA, 120 bp, Artificial Sequence
  ENSG00000069188_72 (sequence is synthesized)
gcactgtgtacaggcgctgctggccctgcccaagagatgatgctctgttggggtgggtgagcagagttcaaggaagcccaagtaggagatttgggaaacatgccaaggtaagagagagcc

SEQ ID NO: 54416 - DNA, 120 bp, Artificial Sequence
  ENSG00000069188_73 (sequence is synthesized)
tggaccactctcctacagccccaagtcagtcactgtgctaatggtgaccgggaagggaagtcagggtctggggcccaaagaacgggcacacccagccatgagtttttcctgaagcacttg

SEQ ID NO: 54417 - DNA, 120 bp, Artificial Sequence
  ENSG00000069188_74 (sequence is synthesized)
acccctgggaaatgtgaacggggagatgctggaagatggctcagcagacaggccagcccagctccagtgtccaaaaagcggtttctccaataaggaggcctgggaagggaagcacaatct

SEQ ID NO: 54418 - DNA, 120 bp, Artificial Sequence
  ENSG00000069188_75 (sequence is synthesized)
tccccaaaggagaaccaagggctgaggttctgcccctccaggaagtaaggtgctctcggggcctccttggacttgtctgggggctgcagtggagtcagctggacacctgctccacccctg

SEQ ID NO: 54419 - DNA, 120 bp, Artificial Sequence
  ENSG00000069188_76 (sequence is synthesized)
ccacctccgcccccaccctctgcagcatctggcatctccatggcagcacatctgcagctgccggcctgtgatcgtgccgcacagctttcttttctttcctctcatctttttttttttttt

SEQ ID NO: 54420 - DNA, 120 bp, Artificial Sequence
  ENSG00000069188_77 (sequence is synthesized)
ttttttaaataacttcatccctttccctctctgctgagcatttaaccatttaaggaagttcccagtttgcattagggaattatttaagcccagcccagtgagggattatttgggaggaag

SEQ ID NO: 54421 - DNA, 120 bp, Artificial Sequence
  ENSG00000069188_78 (sequence is synthesized)
caggagtgagtaaaaacattgtgtctgtgtatatattgcacatgaggtcaattttcctttgcctttaatgaatcacctggtgcactaagatattccacccccccactccccacacgctca

SEQ ID NO: 54422 - DNA, 120 bp, Artificial Sequence
  ENSG00000069188_79 (sequence is synthesized)
ttcgcacccatgctgacacctacgtgtacatgcgggatggtgcccatgcacgcctgtgcttacacacatgcacacacaaatatgcacagaacacacatctgtatgtgtgttagcaaagag

SEQ ID NO: 54423 - DNA, 120 bp, Artificial Sequence
  ENSG00000069188_80 (sequence is synthesized)
actcctgaactccctctgatggctgaagccatctctcccctgtgaggcacaggtggcctgggttgcttgcacttggggcgtggctgggatctattgtctgagagggtgaggacaccacgc

SEQ ID NO: 54424 - DNA, 120 bp, Artificial Sequence
  ENSG00000069188_81 (sequence is synthesized)
aaatttagacaagcccatgagatcaggctgggcccatggtgaaagtcccacacttagtcaatacccactcatctggaatattgtctccacagccccagccacagctggaagcccaggcct

SEQ ID NO: 54425 - DNA, 120 bp, Artificial Sequence
  ENSG00000069188_82 (sequence is synthesized)
gcagctgtggaactctagattttttcaggacacgtctctttgcccttgtttacatatctactggcacagccgaggctcccaaccgtcctcccagaaacctggccacattagaaaggggtg

SEQ ID NO: 54426 - DNA, 120 bp, Artificial Sequence
  ENSG00000069188_83 (sequence is synthesized)
gtgggccctgccctttgtagaaagagtgggaccctttctggcctgtgattttccgtgccagtgatgccagggcccctgcctgtgggactccacccaaagcaggttcacaccaggacacac

SEQ ID NO: 54427 - DNA, 120 bp, Artificial Sequence
  ENSG00000069188_84 (sequence is synthesized)
ctggcacctttggcattgcctccttgtgccctaagcaatctcccagtgttgcacccaggagcccatgctgggcacaccagggctttccccttcctggctgcgcctccagagttgacgtca

SEQ ID NO: 54428 - DNA, 120 bp, Artificial Sequence
  ENSG00000069188_85 (sequence is synthesized)
gctccacacccacactgccaagacaaaccaaaaagatgctctgggctccagaaccaccatcctcctagggctccagagagtttgcaaacccaggctgcctccccttctgtccatccctca

SEQ ID NO: 54429 - DNA, 120 bp, Artificial Sequence
  ENSG00000069188_86 (sequence is synthesized)
ccccccggcccccaaaactcctacccccaaacctggcactgccgtgatttagaggaaacaaggacacagcgggggctgcccccacctggtgcacgctgcctcaaggccttctgttgctgc

SEQ ID NO: 54430 - DNA, 120 bp, Artificial Sequence
  ENSG00000069188_87 (sequence is synthesized)
ccacgcctccctgggcagtgcttctaaaggtgccagagcctcaccacagtgccactctggctgggcaggggcttccctcagcttcccagagtgcacatctgaaggtgcctaccctgggtg

SEQ ID NO: 54431 - DNA, 120 bp, Artificial Sequence
  ENSG00000069188_88 (sequence is synthesized)
aggggctggtgggcaggaaggtaaaggggagaccatctgagcagccgccacccgctccccagtgcctctgtatggccctatccagggacacccatgggcatgcgcacatggcaatcctga

SEQ ID NO: 54432 - DNA, 120 bp, Artificial Sequence
  ENSG00000069188_89 (sequence is synthesized)
ccaccacctgagcacaggtgccccctcgggaccaccccccttctctttgtttccatcagaataaccaaaagcatttaaacgtgttacctttctccatccatctagactccagaaacaaaa

SEQ ID NO: 54433 - DNA, 120 bp, Artificial Sequence
  ENSG00000069188_90 (sequence is synthesized)
atcaacacaaatctttattttttgatttaaaagatataacaaaaaattatggggagagtattcattatggcaggtgtctgtctgtaagaaaaaaatatatatctctatgtcatatagcgt

SEQ ID NO: 54434 - DNA, 120 bp, Artificial Sequence
  ENSG00000069188_91 (sequence is synthesized)
gttagcaggtttattttttaaatgaaaggtaagaaagaaattgatttgaaatatataccacaagaagtcccgtgtcctgtcaaactgtcagtattttataaataaacttttttttttgga

SEQ ID NO: 54435 - DNA, 120 bp, Artificial Sequence
  ENSG00000069188_92 (sequence is synthesized)
cagaccttcaggtgcgccccgccctgctgggctgagaccccacagctcattatctcccttcttcctgggtccctccacttggggcacttgcctctgtcctccgcctgagaaggcgcttgt

SEQ ID NO: 54436 - DNA, 120 bp, Artificial Sequence
  ENSG00000069188_93 (sequence is synthesized)
gctactacaggtgaagtcacctggccctgttgaggagtgggaaactgggttggggggctcctagagctggactcctagctaagtaacccccaggaggcccccagagaacggctgttagtg

SEQ ID NO: 54437 - DNA, 120 bp, Artificial Sequence
  ENSG00000069188_94 (sequence is synthesized)
ctaactgaggaccagcttgggttgaggattgctcaggaagccggaagcctgagcacgtggctcacgtgggtcacacaccgaatcctccacacgaccccactgatgggtgccccataacta

SEQ ID NO: 54438 - DNA, 120 bp, Artificial Sequence
  ENSG00000069188_95 (sequence is synthesized)
agaagaccctggctgcctctcgaagccctgtctctgccatcatggctgtctcagtggctgctataatcgtaccagcctctcctgtcaagcctgaaattgaatcacaagaacttccaaagc

SEQ ID NO: 54439 - DNA, 120 bp, Artificial Sequence
  ENSG00000069188_96 (sequence is synthesized)
catcaggagatgagtgacagataagtcagtcggggggctgctccccactgctccggtttcacccatcctgacacccgcttgctgggctctgcttactctcaggagcttgcagccactgcc

SEQ ID NO: 54440 - DNA, 120 bp, Artificial Sequence
  ENSG00000069188_97 (sequence is synthesized)
agctccctgcgttgctaggtttccaagttaatcagaggtgccagagtcagcaagagcaggaggcctgttctctgtatcccatggatccgcggttaggtgattaaaattgagaaggaaaac

SEQ ID NO: 54441 - DNA, 120 bp, Artificial Sequence
  ENSG00000069206_0 (sequence is synthesized)
atccctgcagtggaagtgaggaggaagaaaggtgaactccttttctcaagcacttctgctctcctctaccagaatcactcagaatgcttcccgggtgtatattcttgatgattttactca

SEQ ID NO: 54442 - DNA, 120 bp, Artificial Sequence
  ENSG00000069206_1 (sequence is synthesized)
ttcctcaggttaaagaaaagttcatccttggagtagagggtcaacaactggttcgtcctaaaaagcttcctctgatacagaagcgagatactggacacacccatgatgatgacatactga

SEQ ID NO: 54443 - DNA, 120 bp, Artificial Sequence
  ENSG00000069206_2 (sequence is synthesized)
aaacgtatgaagaagaattgttgtatgaaataaaactaaatagaaaaaccttagtccttcatcttctaagatccagggagttcctaggctcaaattacagtgaaacattctactccatga

SEQ ID NO: 54444 - DNA, 120 bp, Artificial Sequence
  ENSG00000069206_3 (sequence is synthesized)
aaggagaagcgttcaccaggcatcctcagatcatggatcattgtttttaccaaggatccatagtacacgaatatgattcagctgccagtatcagtacgtgtaatggtctaaggggattct

SEQ ID NO: 54445 - DNA, 120 bp, Artificial Sequence
  ENSG00000069206_4 (sequence is synthesized)
tcagaataaacgaccaaagatacctcattgaaccagtgaaatactcagatgagggagaacatttggtgttcaaatataacctgagggtgccgtatggtgccaattattcctgtacagagc

SEQ ID NO: 54446 - DNA, 120 bp, Artificial Sequence
  ENSG00000069206_5 (sequence is synthesized)
ttaattttaccagaaaaactgttccaggggataatgaatctgaagaagactccaaaataaaaggcatccatgatgaaaagtatgttgaattgttcattgttgctgatgatactgtgtatc

SEQ ID NO: 54447 - DNA, 120 bp, Artificial Sequence
  ENSG00000069206_6 (sequence is synthesized)
gcagaaatggtcatcctcacaataaactaaggaaccgaatttggggaatggtcaattttgtcaacatgatttataaaaccttaaacatccatgtgacgttggttggcattgaaatatgga

SEQ ID NO: 54448 - DNA, 120 bp, Artificial Sequence
  ENSG00000069206_7 (sequence is synthesized)
cacatgaagataaaatagaactatattcaaatatagaaactaccttattgcgtttttcattttggcaagaaaagatccttaaaacacggaaggattttgatcatgttgtattactcagtg

SEQ ID NO: 54449 - DNA, 120 bp, Artificial Sequence
  ENSG00000069206_8 (sequence is synthesized)
ggaagtggctctactcacatgtgcaaggaatttcttatccagggggtatgtgcctgccctattattccaccagtatcattaaggatcttttacctgacacaaacataattgcaaacagaa

SEQ ID NO: 54450 - DNA, 120 bp, Artificial Sequence
  ENSG00000069206_9 (sequence is synthesized)
tggcacatcaactggggcataaccttgggatgcagcatgacgagttcccatgcacctgtccttcaggaaaatgcgtgatggacagtgatggaagcattcctgcactgaaattcagtaaat

SEQ ID NO: 54451 - DNA, 120 bp, Artificial Sequence
  ENSG00000069206_10 (sequence is synthesized)
gcagccaaaaccaataccaccagtacttgaaggattataagccaacatgcatgctcaacattccatttccttacaattttcatgatttccaattttgtggaaacaagaagttggatgagg

SEQ ID NO: 54452 - DNA, 120 bp, Artificial Sequence
  ENSG00000069206_11 (sequence is synthesized)
gtgaagagtgtgactgtggccctgctcaggagtgtactaatccttgctgtgatgcacacacatgtgtactgaagccaggatttacttgtgcagaaggagaatgctgtgaatcttgtcaga

SEQ ID NO: 54453 - DNA, 120 bp, Artificial Sequence
  ENSG00000069206_12 (sequence is synthesized)
taaaaaaagcagggtccatatgcagaccggcgaaagatgaatgtgattttcctgagatgtgcactggccactcgcctgcctgtcctaaggaccagttcagggtcaatggatttccttgca

SEQ ID NO: 54454 - DNA, 120 bp, Artificial Sequence
  ENSG00000069206_13 (sequence is synthesized)
agaactcagaaggctactgtttcatggggaaatgtccaactcgtgaggatcagtgctctgaactatttgatgatgaggcaatagagagtcatgatatctgctacaagatgaatacaaaag

SEQ ID NO: 54455 - DNA, 120 bp, Artificial Sequence
  ENSG00000069206_14 (sequence is synthesized)
atttggatactgcaaaaacaaggaaaacagatttcttccctgtgaggagaaagatgtcagatgtggaaagatctactgcactggaggggagctttcctctctccttggagaagacaagac

SEQ ID NO: 54456 - DNA, 120 bp, Artificial Sequence
  ENSG00000069206_15 (sequence is synthesized)
ttatcaccttaaggatccccagaagaatgctactgtcaaatgcaaaactatttttttataccatgattctacagacattggcctggtggcgtcaggaacaaaatgtggagagggaatggt

SEQ ID NO: 54457 - DNA, 120 bp, Artificial Sequence
  ENSG00000069206_16 (sequence is synthesized)
gtgcaacaatggtgaatgtctaaacatggaaaaggtctatatctcaaccaattgcccctctcagtgcaatgaaaatcctgtggatggccacggactccagtgccactgtgaggaaggaca

SEQ ID NO: 54458 - DNA, 120 bp, Artificial Sequence
  ENSG00000069206_17 (sequence is synthesized)
ggcacctgtagcctgtgaagaaaccttacatgttaccaatatcaccatcttggttgttgtgcttgtcctggttattgtcggtatcggagttcttatactattagttcgttaccgaaaatg

SEQ ID NO: 54459 - DNA, 120 bp, Artificial Sequence
  ENSG00000069206_18 (sequence is synthesized)
tatcaagttgaagcaagttcagagcccacctacagaaaccctgggagtggagaacaaaggatactttggtgatgagcagcagataaggactgagccaatcctgccagaaattcatttcct

SEQ ID NO: 54460 - DNA, 120 bp, Artificial Sequence
  ENSG00000069206_19 (sequence is synthesized)
aaataaacctgcaagtaaagattcaagaggaatcgcagatcccaatcaaagtgccaagtgagcttgaagttggatatccaaaatggccgtgcaagcttaggctggggattctggatgcaa

SEQ ID NO: 54461 - DNA, 120 bp, Artificial Sequence
  ENSG00000069206_20 (sequence is synthesized)
cgtctttacaaccttacctagatatctgctactcacatttttggtagtgtttcaaacgttctttatccagacagacaatgtttaagagaaacaacttatttctgttaatatttaccggta

SEQ ID NO: 54462 - DNA, 120 bp, Artificial Sequence
  ENSG00000069206_21 (sequence is synthesized)
gaattcacaccctctatcataaacatatgctgcagaaaaaaaatgtcttgtggtctttcaaatgctctttagcacaatataaaaattcgtaaccttgctgtagtattttcctacaaaatg

SEQ ID NO: 54463 - DNA, 120 bp, Artificial Sequence
  ENSG00000069206_22 (sequence is synthesized)
ttactctgctttcttttaagaatccaaactttaaggatgataacttacagtctaagaagaaaacattgcatataaaaagttacttttttggaaacataaaagtacgttttaaaacttgaa

SEQ ID NO: 54464 - DNA, 120 bp, Artificial Sequence
  ENSG00000069206_23 (sequence is synthesized)
catgacatcattagcactaattctggtttaaatgaaagtcctgcagaaatgccaaagaaggcagggcagagcggcacggattctaggtaattaaaagtgaaagaggcagaagaatagtgg

SEQ ID NO: 54465 - DNA, 120 bp, Artificial Sequence
  ENSG00000069206_24 (sequence is synthesized)
acagaactgcaggatagtccttaaaataatggtggtgggaaaggaaaacacagaatgctcctggcaattctaaattcctaggtttgcctttctagaattccttaagaagctgacagagaa

SEQ ID NO: 54466 - DNA, 120 bp, Artificial Sequence
  ENSG00000069206_25 (sequence is synthesized)
atcagagggttacaagaatttcagaaaatttactccaagtgagaggacatactcacaactcctatgaagggtttctaaggtctttgtcctgtgcaatttgacaatgtgccatttctgtgc

SEQ ID NO: 54467 - DNA, 120 bp, Artificial Sequence
  ENSG00000069206_26 (sequence is synthesized)
tgtctctgccctctccctatccgtttgttatgggatgggggattaccctgggaatgatttcagctgcttcttacacagatgcctctcaaggtgttcttttgtgtcctctattttcttctt

SEQ ID NO: 54468 - DNA, 120 bp, Artificial Sequence
  ENSG00000069206_27 (sequence is synthesized)
gtgaactgttaaagctacatgcattattttttttccatttactgaaataaagttttcaagttctaaataaaaatattctgactcgatgaaataaataaaggctacaaaagaaggaagaaa

SEQ ID NO: 54469 - DNA, 120 bp, Artificial Sequence
  ENSG00000069206_28 (sequence is synthesized)
gaaatgctattgatcttccaaagttgtatattcgatagtgaatattgtatgtttaaagtaaccttgcaaaatgtgtcatgtcaaatgtaataaattgtatgttctgacgaaggaatggaa

SEQ ID NO: 54470 - DNA, 120 bp, Artificial Sequence
  ENSG00000069206_29 (sequence is synthesized)
tctagggataaagtatgagtccagttactgaaatatatgtgctactttcagtctggcacttcatctgatatttgaaattggaaaattttttcttgtctatgtaaaaagtgtttatttcat

SEQ ID NO: 54471 - DNA, 120 bp, Artificial Sequence
  ENSG00000069206_30 (sequence is synthesized)
agagtttgtttaatcagtttcaagaaaggatgattctacaattctatgtatagattgataacattggggctatgagtagttggaaatcatgaaattttcaatgtcctaaaacctaatcta

SEQ ID NO: 54472 - DNA, 120 bp, Artificial Sequence
  ENSG00000069206_31 (sequence is synthesized)
gagatagtgtctttccttttcttccctgccatttttttttgcagagttattgatgacaagctatgttctcccctttttatcattcaaatgttttaatggttaaggatgattaaggataaa

SEQ ID NO: 54473 - DNA, 120 bp, Artificial Sequence
  ENSG00000069206_32 (sequence is synthesized)
acaagttcagtttttggtgggatggttgtataaaagtagtccttggagctttaggcttttctatacaactaatccatatccccttaaattcccagtggatgttagtctgtaagctacttg

SEQ ID NO: 54474 - DNA, 120 bp, Artificial Sequence
  ENSG00000069206_33 (sequence is synthesized)
gttgtttttcttcttcgtatgtccatgatttgtatagtgtctgacacatactgtatgcctaatggatgtttcctgattgaataaatcaacaaataaatgattacttagtccatagaaaaa

SEQ ID NO: 54475 - DNA, 120 bp, Artificial Sequence
  ENSG00000069248_0 (sequence is synthesized)
ctcttcccttaggtgtttaagttccgcgcgcaggccaggctgcaacctgacggccagatccctcgctgtcctagtcgctgctccttggagtcatgttcccagccgccccttctccgcgga

SEQ ID NO: 54476 - DNA, 120 bp, Artificial Sequence
  ENSG00000069248_1 (sequence is synthesized)
ccccgggtaccgggtcccgaaggggcccgctggccggactcgggcccggctccacgccccggacggctagcaggaagggtctgcccctggggtctgcagtcagctccccagtgctcttct

SEQ ID NO: 54477 - DNA, 120 bp, Artificial Sequence
  ENSG00000069248_2 (sequence is synthesized)
cgccggtcggccggcgtagctcgctaagctcgcggggaacaccaacacgaatgttcccacaccactccataactgagtctgtgaactatgatgtgaaaacgtttggatcttctcttcctg

SEQ ID NO: 54478 - DNA, 120 bp, Artificial Sequence
  ENSG00000069248_3 (sequence is synthesized)
ttaaagtcatggaagccctaacattggctgaagtcgatgaccagctgaccattaacatagatgaaggtggatgggcttgtctggtgtgcaaagagaagctcattatttggaagattgctc

SEQ ID NO: 54479 - DNA, 120 bp, Artificial Sequence
  ENSG00000069248_4 (sequence is synthesized)
tgtcacctattactaagttatccgtttgcaaagaacttcagctgccacctagtgatttccactggagtgccgacttagtggctctttcttactcttctccctcaggtgaagcacattcta

SEQ ID NO: 54480 - DNA, 120 bp, Artificial Sequence
  ENSG00000069248_5 (sequence is synthesized)
ctcaggctgttgctgtcatggttgccaccagagaaggatctatccgctattggccaagccttgctggtgaagatacctacacagaggcttttgtagattcgggaggtgataagacttaca

SEQ ID NO: 54481 - DNA, 120 bp, Artificial Sequence
  ENSG00000069248_6 (sequence is synthesized)
gtttcctaacagcagtgcagggaggaagttttattttgtcttcatcaggaagccaactaattcggttgatacctgagagctcaggaaagattcatcagcatatcctgcctcaggggcaag

SEQ ID NO: 54482 - DNA, 120 bp, Artificial Sequence
  ENSG00000069248_7 (sequence is synthesized)
gcatgctttcaggaattggtcgaaaagtttcttctctttttggaattttatctcctagtagtgatctcacactttcaagtgttctctgggatagagagagatcaagcttttatagcctga

SEQ ID NO: 54483 - DNA, 120 bp, Artificial Sequence
  ENSG00000069248_8 (sequence is synthesized)
cgagttcaaacatcagtaaatgggaattagatgattcttcagaaaagcatgcatacagttgggatataaatagagccctgaaggaaaacattaccgatgctatttggggatctgaaagta

SEQ ID NO: 54484 - DNA, 120 bp, Artificial Sequence
  ENSG00000069248_9 (sequence is synthesized)
actatgaagctattaaagaaggagtcaacattcgatatttggacttgaagcaaaactgtgatgggctggtgattttggcagcagcatggcactcagcagacaatccatgtctcatctatt

SEQ ID NO: 54485 - DNA, 120 bp, Artificial Sequence
  ENSG00000069248_10 (sequence is synthesized)
actctctgataacaatagaagataatggttgccaaatgtcagatgcagttactgtagaagtcactcaatataatccaccttttcagtctgaagacctgattttgtgtcagttgacggtcc

SEQ ID NO: 54486 - DNA, 120 bp, Artificial Sequence
  ENSG00000069248_11 (sequence is synthesized)
caaacttttcaaaccagactgcctatctgtataacgaaagtgctgtctatgtgtgctccacaggaactgggaaattttctcttccccaggagaaaattgtctttaatgcacaaggagata

SEQ ID NO: 54487 - DNA, 120 bp, Artificial Sequence
  ENSG00000069248_12 (sequence is synthesized)
gtgttttaggtgctggtgcctgtggtggtgttcctatcattttttctagaaacagtggactggtgtctattacttcaagggaaaatgtgtctatattggcagaagacttggaagggtctt

SEQ ID NO: 54488 - DNA, 120 bp, Artificial Sequence
  ENSG00000069248_13 (sequence is synthesized)
tagcatcttcagttgctggaccaaacagtgagagtatgatttttgagaccactacaaagaatgaaactatagcccaggaagataaaatcaagttgctgaaagctgcctttctgcaatact

SEQ ID NO: 54489 - DNA, 120 bp, Artificial Sequence
  ENSG00000069248_14 (sequence is synthesized)
gcagaaaagatttaggtcatgctcaaatggtggttgatgagctcttttcctctcactctgatttggattctgattctgaactagacagggcagttacccaaatcagtgtagacctgatgg

SEQ ID NO: 54490 - DNA, 120 bp, Artificial Sequence
  ENSG00000069248_15 (sequence is synthesized)
atgactacccagcatctgacccacggtgggctgagtctgtccctgaggaagcacctgggttcagcaatacgtcactgattatccttcaccagctagaagacaagatgaaagctcactctt

SEQ ID NO: 54491 - DNA, 120 bp, Artificial Sequence
  ENSG00000069248_16 (sequence is synthesized)
ttcttatggactttattcatcaagttggcttatttggacgtctaggcagttttccagttagagggacaccgatggccactcgactgttgctctgtgagcatgccgaaaagctgtcagccg

SEQ ID NO: 54492 - DNA, 120 bp, Artificial Sequence
  ENSG00000069248_17 (sequence is synthesized)
ccattgttctcaagaaccaccactcccggctttctgaccttgtcaacacagccatattgattgctttgaacaagagggagtatgaaatcccatccaacctgactcctgcagatgtctttt

SEQ ID NO: 54493 - DNA, 120 bp, Artificial Sequence
  ENSG00000069248_18 (sequence is synthesized)
tcagggaggtatcccaagtagataccatctgtgagtgcttactggagcatgaggagcaagtcttgagggatgcacctatggattccattgaatgggctgaagtggtgatcaatgtgaaca

SEQ ID NO: 54494 - DNA, 120 bp, Artificial Sequence
  ENSG00000069248_19 (sequence is synthesized)
atattctcaaggatatgctgcaggctgctagtcattatcgccaaaatagaaactctttgtatagaagagaagaatcactagaaaaagaacctgaatatgttccatggacggcaacaagtg

SEQ ID NO: 54495 - DNA, 120 bp, Artificial Sequence
  ENSG00000069248_20 (sequence is synthesized)
gtcctggtggcatccgaacggtaataatacgccagcatgagattgtcctgaaggtggcttatccacaggcagacagcaacctccgaaacatcgtgaccgagcagctggtagccctgatcg

SEQ ID NO: 54496 - DNA, 120 bp, Artificial Sequence
  ENSG00000069248_21 (sequence is synthesized)
ccagtaatcgggaaagatatgacaatctggagatggaatacctacagaaaagatcagatctcttatctcctcttctttcactaggccagtacctgtgggctgcttctctagcagagaaat

SEQ ID NO: 54497 - DNA, 120 bp, Artificial Sequence
  ENSG00000069248_22 (sequence is synthesized)
actgtgactttgatatattggtacaaatgtgtgagcagactgacaaccagagccgactccagcgctacatgacccagtttgctgatcagaatttttcagactttctcttccgttggtatc

SEQ ID NO: 54498 - DNA, 120 bp, Artificial Sequence
  ENSG00000069248_23 (sequence is synthesized)
tggagaaaggaaagcgaggcaaattattatctcagcccatttctcagcatggacagttggcaaattttttgcaagctcatgaacatctcagctggttacatgaaattaatagccaagaat

SEQ ID NO: 54499 - DNA, 120 bp, Artificial Sequence
  ENSG00000069248_24 (sequence is synthesized)
tagaaaaggctcatgcaacacttctgggtttggcaaatatggaaactcgttactttgcaaagaagaaaacccttcttggcttgagtaaattggctgcattagcttcagacttttcagagg

SEQ ID NO: 54500 - DNA, 120 bp, Artificial Sequence
  ENSG00000069248_25 (sequence is synthesized)
atatgctacaagaaaaaattgaagaaatggctgagcaggagcgctttctactgcatcaggagaccctacctgaacagctgctggcggagaaacagctaaatctcagtgcgatgccagtat

SEQ ID NO: 54501 - DNA, 120 bp, Artificial Sequence
  ENSG00000069248_26 (sequence is synthesized)
tgactgcaccacaactcattggtctatatatctgtgaagaaaatagaagagctaatgaatatgatttcaagaaagctttggacttgttggaatatattgatgaggaagaagatataaata

SEQ ID NO: 54502 - DNA, 120 bp, Artificial Sequence
  ENSG00000069248_27 (sequence is synthesized)
taaatgatctaaaactggaaatcctttgcaaagctcttcagagagataactggtccagttctgatggcaaagatgatccaattgaagtatctaaagacagtatatttgtgaagatcttac

SEQ ID NO: 54503 - DNA, 120 bp, Artificial Sequence
  ENSG00000069248_28 (sequence is synthesized)
agaaacttttaaaagatggcattcagctcagtgagtacttaccggaggtgaaagacctgctacaagcggatcagcttggaagcttaaagtccaatccttacttcgagtttgttttgaaag

SEQ ID NO: 54504 - DNA, 120 bp, Artificial Sequence
  ENSG00000069248_29 (sequence is synthesized)
caaattatgaatattatgttcagggacaaatataactttttctaaaaatggccattgtttatgaaatctgtataagtgtgtccttatacaaattttaggccataaacaagtgtaagtttg

SEQ ID NO: 54505 - DNA, 120 bp, Artificial Sequence
  ENSG00000069248_30 (sequence is synthesized)
tacaatttcataacatgtatagctgagtttttatactttatatgtaggaagctaatataaaatagttatgtaactgtgattttggttttcagttatgtgacttgttttttccacctgaaa

SEQ ID NO: 54506 - DNA, 120 bp, Artificial Sequence
  ENSG00000069248_31 (sequence is synthesized)
tgtgtcagttgttgttcctgtactcggtgccctttctttttactctcacgtggtcccaggttctggagttcttgtcctggttctagctgctcacatgtacaaatcacttctaggcctcag

SEQ ID NO: 54507 - DNA, 120 bp, Artificial Sequence
  ENSG00000069248_32 (sequence is synthesized)
tttctgcgactatgaaaattactagattgcactagcttgtctctaaaattgctgtgactccagatactttgcactgaagagaatctagggtgtttgatatctgtttcagttagggctaat

SEQ ID NO: 54508 - DNA, 120 bp, Artificial Sequence
  ENSG00000069248_33 (sequence is synthesized)
gggaaatgtctagtaagataaatgtcaacttttgctgacttattatgagatgaaaaaccaaaggagagtgggcctaactcatgtgagcttgataactgatgaactcattgggagcatttt

SEQ ID NO: 54509 - DNA, 120 bp, Artificial Sequence
  ENSG00000069248_34 (sequence is synthesized)
aaacttttctacataaataataaatgagcactaatgaaagtattttagtgaatgaaacgtttatgtggttttctaacctatctagaaattactgttgatgtttagttctaatctttcagt

SEQ ID NO: 54510 - DNA, 120 bp, Artificial Sequence
  ENSG00000069248_35 (sequence is synthesized)
gtggggattcagccagcctcatgtattttcagaatgactcatgaatctttaccacagtctgcctagctagtcaaaagcatgaatgatactagaaaccattataggttttcctaatatggc

SEQ ID NO: 54511 - DNA, 120 bp, Artificial Sequence
  ENSG00000069248_36 (sequence is synthesized)
aattgatgtgactgaaaggtactgtactctcagagctttgtcctgaccagtgtcatcactcactcaatgtttatctgggttttaaataaaggccagaggttggacagggagttgctggca

SEQ ID NO: 54512 - DNA, 120 bp, Artificial Sequence
  ENSG00000069248_37 (sequence is synthesized)
tgtccgcggcttggcccagtagaatgcccactaaccatcttgctccagcagctgaaaaggtcagaagttaaacatggtgaagagtccggttcctggattcacagagcccagcatcaggcc

SEQ ID NO: 54513 - DNA, 120 bp, Artificial Sequence
  ENSG00000069248_38 (sequence is synthesized)
gtctcccccgcaggctgcaaggccagcccttgagtatgtttggaagagcaggttaatggagctgtttgtaaatcaaagggaagaaattagcagcctgttctttttctctttgcagcttgt

SEQ ID NO: 54514 - DNA, 120 bp, Artificial Sequence
  ENSG00000069248_39 (sequence is synthesized)
atgttaggacagcattagggtctgggttaggaacatgttggaaggtactaagagaagttaggaagagcagcttgtcagatggccagtaagaaaccgctgagtacttgtatcgtaagatga

SEQ ID NO: 54515 - DNA, 120 bp, Artificial Sequence
  ENSG00000069248_40 (sequence is synthesized)
ggctttgcttttacgtggaggtcagctgtcagtgttcacgtctcacctgtaggaccctgtcgggtgataatgtgctgcgagacacacaggctcccatctccctcccgtgctgctgcaaac

SEQ ID NO: 54516 - DNA, 120 bp, Artificial Sequence
  ENSG00000069248_41 (sequence is synthesized)
ctggtgatccctggtgtatgggacagtaccgcaggaaagcccatctgatcatgccccagaacccactgatcgcgtggacgtagaacgactgctcttaccgtgtgaagtagagtcatcctg

SEQ ID NO: 54517 - DNA, 120 bp, Artificial Sequence
  ENSG00000069248_42 (sequence is synthesized)
ttcaagggaagaaaaagctccctcttttaatcctgtttctctctaagttagtagctattacacccaaatggttgagtttttaaaaattattttaacagtaaaaatgaaattaagacctag

SEQ ID NO: 54518 - DNA, 120 bp, Artificial Sequence
  ENSG00000069248_43 (sequence is synthesized)
caaacaaacaaacaaacaaaaaacaaactacaacttccttacaagacataatgacttcttttctccataaatgtctctagtattagttacatgattgtataatcttctaccttattttaa

SEQ ID NO: 54519 - DNA, 120 bp, Artificial Sequence
  ENSG00000069248_44 (sequence is synthesized)
aatacagtttccaaatatgagactgtttttactataaaaatacaactggccaggtgcagtggctcacgcctaaaatcccagctctttggatggccaaggcaggcggatcacttgaagtca

SEQ ID NO: 54520 - DNA, 120 bp, Artificial Sequence
  ENSG00000069248_45 (sequence is synthesized)
agataagtaagtgctcgtggcattgcttctttggaaagtatagaaactgcttttcctctgctctcaccacatgacagtcaataacagaagacttctgtgaccagacgtgttgggatttcc

SEQ ID NO: 54521 - DNA, 120 bp, Artificial Sequence
  ENSG00000069248_46 (sequence is synthesized)
cacctcctacactgggcaaccagtgagttctgttggtgggcaccagctgaatgtcctttaatttagttcagtcctgatacaatctacaaccacaggttgagggctcagactgcccctgac

SEQ ID NO: 54522 - DNA, 120 bp, Artificial Sequence
  ENSG00000069248_47 (sequence is synthesized)
tttgatgccaatttaagcaccagggggttttgcctgtgttcctcaccgaccagctataaattggggttcccacaaccccctccttgggtttgattaatttgctagagcagctcatagaac

SEQ ID NO: 54523 - DNA, 120 bp, Artificial Sequence
  ENSG00000069275_0 (sequence is synthesized)
atccattttgaagagacgggggagcggggggctcgtctgttccaggagccctgaaccaaagagcagcggagtttgagaagccagcagctcggggttcggcagcagcggtcccatcggctg

SEQ ID NO: 54524 - DNA, 120 bp, Artificial Sequence
  ENSG00000069275_1 (sequence is synthesized)
aagttcggggggggtggggcgccgagcgcgcggggtggggggggtcctggtctttggcttctcgactcggtcctgtttcgacagcgaacatgtcgcggcctgtcagaaataggaaggttg

SEQ ID NO: 54525 - DNA, 120 bp, Artificial Sequence
  ENSG00000069275_2 (sequence is synthesized)
ttgattactcacagtttcaggaatctgatgatgcagatgaagattatggaagagattcgggccctcccactaagaaaattcgatcatctccccgagaagctaaaaataagaggcgatctg

SEQ ID NO: 54526 - DNA, 120 bp, Artificial Sequence
  ENSG00000069275_3 (sequence is synthesized)
gaaagaattcacaggaagatagtgaggactcagaagacaaagatgtgaagaccaagaaggatgattctcactcagcagaggatagtgaagatgaaaaagaagatcataaaaatgtgcgcc

SEQ ID NO: 54527 - DNA, 120 bp, Artificial Sequence
  ENSG00000069275_4 (sequence is synthesized)
aacaacggcaggcggcatctaaagcagcttctaaacagagagagatgctcatggaagatgtgggcagtgaggaagaacaagaagaggaggatgaggcaccattccaggagaaagattccg

SEQ ID NO: 54528 - DNA, 120 bp, Artificial Sequence
  ENSG00000069275_5 (sequence is synthesized)
gcagcgatgaagatttcctaatggaagatgatgacgatagtgactatggcagttcgaaaaagaaaaacaaaaagatggttaagaagtccaaacctgaaagaaaagaaaagaaaatgccca

SEQ ID NO: 54529 - DNA, 120 bp, Artificial Sequence
  ENSG00000069275_6 (sequence is synthesized)
aacccagactaaaggctacagtgacgccaagtccagtgaaaggcaaagggaaagtgggtcgccccacagcttcaaaggcatcaaaggaaaagactccttctcccaaagaagaagatgagg

SEQ ID NO: 54530 - DNA, 120 bp, Artificial Sequence
  ENSG00000069275_7 (sequence is synthesized)
aaccggaaagcccgccagaaaagaaaacatctacaagccccccacccgagaaatctggggatgaagggtctgaagatgaagccccttctggggaggattaaaagtgatgatggtctgggg

SEQ ID NO: 54531 - DNA, 120 bp, Artificial Sequence
  ENSG00000069275_8 (sequence is synthesized)
aaaaaaagaaaaaaaaagaaaaaagagggaggaaaaaaaagaacctacttaagatagaacatggttttggctatggcttgactcatgggctttcagtgcttttttccatttgttgaaagt

SEQ ID NO: 54532 - DNA, 120 bp, Artificial Sequence
  ENSG00000069275_9 (sequence is synthesized)
tctctctctttttttttttttttttttaaagcaaaccattgtatgtgtaagtgtttaagttacctttttgtctattggtctctttgccagccctcccctttcccaatgaaagccatgtca

SEQ ID NO: 54533 - DNA, 120 bp, Artificial Sequence
  ENSG00000069275_10 (sequence is synthesized)
ctcccctttcccaatgaaagccatgtcaaattaatcactggattgactgcttcatctttttatttttaatgaaaggtgtaccacggttgtaaagcaataagatttgagatgaacactatt

SEQ ID NO: 54534 - DNA, 120 bp, Artificial Sequence
  ENSG00000069275_11 (sequence is synthesized)
gaaacttcgctttttgctaaaaaatagcaagttgaatagtaatcaaaaaacatagaaagattttagttcaaaatgattgctcctttctctacctggacttttaaaaaatcaattgtcatc

SEQ ID NO: 54535 - DNA, 120 bp, Artificial Sequence
  ENSG00000069275_12 (sequence is synthesized)
taatatgagtttatttgtctatagacacaagtatcaatgtctaaaaaaaatcatgactttaaacttccaccgatgaggcaggtaggagataaagatgaattctgaactgttactaaaagt

SEQ ID NO: 54536 - DNA, 120 bp, Artificial Sequence
  ENSG00000069275_13 (sequence is synthesized)
actcattttttaccttgtagggagggtgggcaatggggttacctgaccttatttgagggtatgggctttcttttttatttcatcacttgttatctcaaagagactcggagccagtgatcc

SEQ ID NO: 54537 - DNA, 120 bp, Artificial Sequence
  ENSG00000069275_14 (sequence is synthesized)
ttttatcctgctacagtctttagggagctaaaaaaaaaaaaaaagcaggggctgccaaaactcttgatttcatatttccttctctaaatatatatgtatcctgttttttggataaaattt

SEQ ID NO: 54538 - DNA, 120 bp, Artificial Sequence
  ENSG00000069275_15 (sequence is synthesized)
taccaagaatccaaaaaaaaaaaaaccctagaatttaatcaacaagatcagtctacaggtcacagtggatttcttttcaaactgacaatgtttaggttttaagcaaataaagttccagtt

SEQ ID NO: 54539 - DNA, 120 bp, Artificial Sequence
  ENSG00000069275_16 (sequence is synthesized)
aatgtgaaactcagtcacaaagagttgagatttttcctttatgaaatagaattgacattcttttatgctataaatgtgcattcaggtcccattaaccatgctctgcttttatttggggat

SEQ ID NO: 54540 - DNA, 120 bp, Artificial Sequence
  ENSG00000069275_17 (sequence is synthesized)
agaacattttctttttcatatcccgatcttcccatttcttcatagaaatgtgataagaagtacatccctgtgatcctgctgcttcgtagagcaccactgcacaccctaccccgagtgcca

SEQ ID NO: 54541 - DNA, 120 bp, Artificial Sequence
  ENSG00000069275_18 (sequence is synthesized)
accacctctgctataggacactattttcctggccctattcttcacttacttcccatcctgtccttgactaggaatatgttaaatgctgctcccatacaattcagttagctcttgtctttt

SEQ ID NO: 54542 - DNA, 120 bp, Artificial Sequence
  ENSG00000069275_19 (sequence is synthesized)
tatttggtccaacccctgctttactgctcatgctgcttaaagcaggagggactagagaaacaaggcattttaggaggcctgtgtgcagttgaaaaccgacttttacacgccttataaaag

SEQ ID NO: 54543 - DNA, 120 bp, Artificial Sequence
  ENSG00000069275_20 (sequence is synthesized)
cagtcaggagatagatccgtaggtttgatccttcacatctaataccaggcgctaatgggaacaaggtttaaagggtcctggtatgctaataaattgaaaaattagtgaaatttaaacttc

SEQ ID NO: 54544 - DNA, 120 bp, Artificial Sequence
  ENSG00000069275_21 (sequence is synthesized)
tgcctttttttcctgccttttaatctagatttgcttcctcaatatcctactttgtggtttactaggaacatgcttactctgatctttttttaaaaaacacacagtggcagagtcatttca

SEQ ID NO: 54545 - DNA, 120 bp, Artificial Sequence
  ENSG00000069275_22 (sequence is synthesized)
ctattgcactgtgtgttaaagaatgaataaggagttttcagttacatggccaaaaatacaggacttgaacataaatagcagttggatcattctctttcatgacggttaaattcagaggtg

SEQ ID NO: 54546 - DNA, 120 bp, Artificial Sequence
  ENSG00000069275_23 (sequence is synthesized)
tgaactttgtaatgagggtgttaaagattaatctatttgcctaaatgggtttgttcaggtatccatttttaacaaagaagtttgtgttcatatagtaaaagacctatcagtgtttccacc

SEQ ID NO: 54547 - DNA, 120 bp, Artificial Sequence
  ENSG00000069275_24 (sequence is synthesized)
atgcacttctattttttaggagtttataattttaagtcttacattcctagtaacatttgggcttttcttaggttatgtttcgtgaagatttggggggagggctcttttaaaacttcagcc

SEQ ID NO: 54548 - DNA, 120 bp, Artificial Sequence
  ENSG00000069275_25 (sequence is synthesized)
tcagttgtttaacagtctctttaatatattaatctgcactaacatctctgtgatatatgcacatattttagaggtaatcatgtcttctagattacttgtgtgcatttgattgggcttctt

SEQ ID NO: 54549 - DNA, 120 bp, Artificial Sequence
  ENSG00000069275_26 (sequence is synthesized)
aatgtattctatatttctgatagactggacagaaggatctgtgtccccaagtgagacaggctctgaataacctttgttttctccactttttattgatgatttaaaacactctagtcttcc

SEQ ID NO: 54550 - DNA, 120 bp, Artificial Sequence
  ENSG00000069275_27 (sequence is synthesized)
cctcaaatcatgcatgcaaataggaggacagtggtggtgactcaactggatacaggtgctcaatagtcaggcttgatagtgatgtcaggacgcattacaagctgtaagccgatactgact

SEQ ID NO: 54551 - DNA, 120 bp, Artificial Sequence
  ENSG00000069275_28 (sequence is synthesized)
ggccattggcaccatccttgactaaccttcctctttttctctagtgtgcctatggtgaaatggcaatagcattcactgtcgtattttgcagtgctcaggaagtgggacgttaactttgaa

SEQ ID NO: 54552 - DNA, 120 bp, Artificial Sequence
  ENSG00000069275_29 (sequence is synthesized)
ggtgcttgtttgtattagctctgctaggtttacctctacaacgtagatttcagcagctatgctgactgacactacattctagttcttaagattttttttccagatccccccttccccagc

SEQ ID NO: 54553 - DNA, 120 bp, Artificial Sequence
  ENSG00000069275_30 (sequence is synthesized)
tagacatacgtagcatactttcatcttattcagtctttctgtaacctgctgctgcttttagtcctcctcacctcagatcggaatcaatggagtgggcccagaggatacattttaattcca

SEQ ID NO: 54554 - DNA, 120 bp, Artificial Sequence
  ENSG00000069275_31 (sequence is synthesized)
gtaatggtaggtagatttgtcctgctttctaaaacatctcctcatttcatatttccactccatattgattccataagggaaaattaatgggtgtttcctcctttagggaggtaatgcaaa

SEQ ID NO: 54555 - DNA, 120 bp, Artificial Sequence
  ENSG00000069275_32 (sequence is synthesized)
gagtgtggacatcttctaatcttgaggaacagtagttgatttcccttgaaggagcttacatattgactgttttcacaataacctgtttgccccagttcaatcctcattttaatacttaat

SEQ ID NO: 54556 - DNA, 120 bp, Artificial Sequence
  ENSG00000069275_33 (sequence is synthesized)
ttggtactggctcaaatagcattttcttacagataacaaatcaagagtgaaatttgaggttatactccagtaaagtttttaacacttgtgaatatggtcagctagactaaacttgactct

SEQ ID NO: 54557 - DNA, 120 bp, Artificial Sequence
  ENSG00000069275_34 (sequence is synthesized)
tttttttaatggcttttttatctgtgaacattcagataagtggattttcaagtactggttggggatgggaatcgtgcttttctttaaacttcagtttacgagatgctttgagagcgttag

SEQ ID NO: 54558 - DNA, 120 bp, Artificial Sequence
  ENSG00000069275_35 (sequence is synthesized)
gcaaaagcagaaataaatatcaggagcaacggggaaagctttataaaagatcatggtggccactgttgcagctttgaagaatgagtgctggcttgaacagttctttgcctgcatcattgg

SEQ ID NO: 54559 - DNA, 120 bp, Artificial Sequence
  ENSG00000069275_36 (sequence is synthesized)
tagctgcactgaaaggaaaaaactttcaccttaagaatttgaaaaggaagaaacctgggctctggtcttcatggcatttagactgagatgcttaaacagaacagaagtaatacgcatttc

SEQ ID NO: 54560 - DNA, 120 bp, Artificial Sequence
  ENSG00000069275_37 (sequence is synthesized)
ctgccataggatagggaaaatgtaacaagctggttgctcttgaggttagaaaattgtctgtttctctgtggatgaagctggatttacttgaaaatggagagttggcttattgtttgaata

SEQ ID NO: 54561 - DNA, 120 bp, Artificial Sequence
  ENSG00000069275_38 (sequence is synthesized)
ttgggacatcaagctatctatagccaagtttcagtcgcaaccagttttccctttgtctggggtaaattcgatacaaaatgattctttttgaatcctgaatccataaattacacttttttt

SEQ ID NO: 54562 - DNA, 120 bp, Artificial Sequence
  ENSG00000069275_39 (sequence is synthesized)
tttcaaattcacaaaattcacagtggtgctgactgtgtaataaccactattgggaaacatcccgtaaacctgcctgttgccatgccaatggagtgactgaactggtgacatctgtttgag

SEQ ID NO: 54563 - DNA, 120 bp, Artificial Sequence
  ENSG00000069275_40 (sequence is synthesized)
catgctttgtgtggctggtagaatgccaccgttgtgcatacactttgtacatcaggggtgaagggagggttttctagattattgggggagggtaaaattgggatttttttgttgttcctt

SEQ ID NO: 54564 - DNA, 120 bp, Artificial Sequence
  ENSG00000069275_41 (sequence is synthesized)
ttttgatggggtgtgggggtatagtactcagcttatgccctaaaataacatgtataaaaacccctgaagtattgtgtgggtgtgtacgtgtgagtgtgtgtttgtatacatctggcaatt

SEQ ID NO: 54565 - DNA, 120 bp, Artificial Sequence
  ENSG00000069275_42 (sequence is synthesized)
aaagctttgtcttctggaacttagtgaattcttttctctttttcctccagaagtatttgttacaagatttgtaaataagagctctacttagtttgtttaccatgaacatgttgcagcaaa

SEQ ID NO: 54566 - DNA, 120 bp, Artificial Sequence
  ENSG00000069275_43 (sequence is synthesized)
ccttatgcatctaattcctacaaggttaaagaaaggcttttagacttgccaggttaagcaacagccaagttctcagtaattgtttgccttgatttatcttttagacttcattttgccagc

SEQ ID NO: 54567 - DNA, 120 bp, Artificial Sequence
  ENSG00000069275_44 (sequence is synthesized)
tctaaaactcccagtcttccttgattttagtccttaatcttttatgttctgagcaggaagggtaaaagacaggaacctgcttcactgtattaactagtccatgggctgagaccggggcat

SEQ ID NO: 54568 - DNA, 120 bp, Artificial Sequence
  ENSG00000069275_45 (sequence is synthesized)
ctcttttcttcatactgcaatgttgctagatacatgatcagacaccagagggttgggcattcttgcaataccttaacagtgctgaaatctgcagcatggtactaaggaagttaaagtttg

SEQ ID NO: 54569 - DNA, 120 bp, Artificial Sequence
  ENSG00000069275_46 (sequence is synthesized)
aatgtaaccactttatttaaaaggtttttttctttaatttaaatgaaatggggttgaagtgaacatgattttgttgaccatgttcgtgaattacagatgcaacatgcattggtagaatcg

SEQ ID NO: 54570 - DNA, 120 bp, Artificial Sequence
  ENSG00000069275_47 (sequence is synthesized)
tgtgatggtcttttgtgatacttaatttttacatatcccagtctctgtatgtatctgcatagacaaagaaaaaacaaactcctgctttgcttttattgaagggtttccaggactgcgtgt

SEQ ID NO: 54571 - DNA, 120 bp, Artificial Sequence
  ENSG00000069275_48 (sequence is synthesized)
ctgctcctgagctctgttttaagtatgtgtatcctttgcttgtattttgtattaaaaaaataagaaaaagaagcctttattgttgagcatgttggcattgtcccctttatttttttctct

SEQ ID NO: 54572 - DNA, 120 bp, Artificial Sequence
  ENSG00000069275_49 (sequence is synthesized)
ttttgggacatatgaagcaagttattctttttctgtatctttttttcttttgtaaactttttttttgttttgtttaaaaatggctttataaaagggcttttataacccagatgtgtgctc

SEQ ID NO: 54573 - DNA, 120 bp, Artificial Sequence
  ENSG00000069275_50 (sequence is synthesized)
tgtgtacttcttgtaataccttaaagcaaacacactaacttacacagctttgttaatcagctcccagttcagcctgactttgtgggaacttatttccctaataaattatttagaaacttt

SEQ ID NO: 54574 - DNA, 120 bp, Artificial Sequence
  ENSG00000069275_51 (sequence is synthesized)
aacagtgaccatccctgttgttggtaaaagataaacatgtcttggttcaaaagttaatacctcaggatggaatcaagaagcagtagacttaccagtttgattaattaagggagcactgga

SEQ ID NO: 54575 - DNA, 120 bp, Artificial Sequence
  ENSG00000069275_52 (sequence is synthesized)
ctgggtgcgtaaggattcttaattagcattttttctcatgtttacatccaaggttatgaagtgttgtggaaagcaaagtttaacaatcatatataataaaagataatgtttatactcaca

SEQ ID NO: 54576 - DNA, 120 bp, Artificial Sequence
  ENSG00000069329_0 (sequence is synthesized)
acgcgcggggcgggtgctgcttgctgcaggctctggggagtcgccatgcctacaacacagcagtcccctcaggatgagcaggaaaagctcttggatgaagccatacaggctgtgaaggtc

SEQ ID NO: 54577 - DNA, 120 bp, Artificial Sequence
  ENSG00000069329_1 (sequence is synthesized)
cagtcattccaaatgaagagatgcctggacaaaaacaagcttatggatgctctaaaacatgcttctaatatgcttggtgaactccggacttctatgttatcaccaaagagttactatgaa

SEQ ID NO: 54578 - DNA, 120 bp, Artificial Sequence
  ENSG00000069329_2 (sequence is synthesized)
ctttatatggccatttctgatgaactgcactacttggaggtctacctgacagatgagtttgctaaaggaaggaaagtggcagatctctacgaacttgtacagtatgctggaaacattatc

SEQ ID NO: 54579 - DNA, 120 bp, Artificial Sequence
  ENSG00000069329_3 (sequence is synthesized)
ccaaggctttaccttttgatcacagttggagttgtatatgtcaagtcatttcctcagtccaggaaggatattttgaaagatttggtagaaatgtgccgtggtgtgcaacatcccttgagg

SEQ ID NO: 54580 - DNA, 120 bp, Artificial Sequence
  ENSG00000069329_4 (sequence is synthesized)
ggtctgtttcttcgaaattaccttcttcagtgtaccagaaatatcttacctgatgaaggagagccaacagatgaagaaacaactggtgacatcagtgattccatggattttgtactgctc

SEQ ID NO: 54581 - DNA, 120 bp, Artificial Sequence
  ENSG00000069329_5 (sequence is synthesized)
aactttgcagaaatgaacaagctctgggtgcgaatgcagcatcagggacatagccgagatagagaaaaaagagaacgagaaagacaagaactgagaattttagtgggaacaaatttggtg

SEQ ID NO: 54582 - DNA, 120 bp, Artificial Sequence
  ENSG00000069329_6 (sequence is synthesized)
cgcctcagtcagttggaaggtgtaaatgtggaacgttacaaacagattgttttgactggcatattggagcaagttgtaaactgtagggatgctttggctcaagaatatctcatggagtgt

SEQ ID NO: 54583 - DNA, 120 bp, Artificial Sequence
  ENSG00000069329_7 (sequence is synthesized)
attattcaggttttccctgatgaatttcacctccagactttgaatccttttcttcgggcctgtgctgagttacaccagaatgtaaatgtgaagaacataatcattgctttaattgataga

SEQ ID NO: 54584 - DNA, 120 bp, Artificial Sequence
  ENSG00000069329_8 (sequence is synthesized)
ttagctttatttgctcaccgtgaagatggacctggaatcccagcggatattaaactttttgatatattttcacagcaggtggctacagtgatacagtctagacaagacatgccttcagag

SEQ ID NO: 54585 - DNA, 120 bp, Artificial Sequence
  ENSG00000069329_9 (sequence is synthesized)
gatgttgtatctttacaagtctctctgattaatcttgccatgaaatgttaccctgatcgtgtggactatgttgataaagttctagaaacaacagtggagatattcaataagctcaacctt

SEQ ID NO: 54586 - DNA, 120 bp, Artificial Sequence
  ENSG00000069329_10 (sequence is synthesized)
gaacatattgctaccagtagtgcagtttcaaaggaactcaccagacttttgaaaataccagttgacacttacaacaatattttaacagtcttgaaattaaaacattttcacccactcttt

SEQ ID NO: 54587 - DNA, 120 bp, Artificial Sequence
  ENSG00000069329_11 (sequence is synthesized)
gagtactttgactacgagtccagaaagagcatgagttgttatgtgcttagtaatgttctggattataacacagaaattgtctctcaagaccaggtggattccataatgaatttggtatcc

SEQ ID NO: 54588 - DNA, 120 bp, Artificial Sequence
  ENSG00000069329_12 (sequence is synthesized)
acgttgattcaagatcagccagatcaacctgtagaagaccctgatccagaagattttgctgatgagcagagccttgtgggccgcttcattcatctgctgcgctctgaggaccctgaccag

SEQ ID NO: 54589 - DNA, 120 bp, Artificial Sequence
  ENSG00000069329_13 (sequence is synthesized)
cagtacttgattttgaacacagcacgaaaacattttggagctggtggaaatcagcggattcgcttcacactgccacctttggtatttgcagcttaccagctggcttttcgatataaagag

SEQ ID NO: 54590 - DNA, 120 bp, Artificial Sequence
  ENSG00000069329_14 (sequence is synthesized)
aattctaaagtggatgacaaatgggaaaagaaatgccagaagattttttcatttgcccaccagactatcagtgctttgatcaaagcagagctggcagaattgcccttaagactttttctt

SEQ ID NO: 54591 - DNA, 120 bp, Artificial Sequence
  ENSG00000069329_15 (sequence is synthesized)
caaggagcactagctgctggggaaattggttttgaaaatcatgagacagtcgcatatgaattcatgtcccaggcattttctctgtatgaagatgaaatcagcgattccaaagcacagcta

SEQ ID NO: 54592 - DNA, 120 bp, Artificial Sequence
  ENSG00000069329_16 (sequence is synthesized)
gctgccatcaccttgatcattggcacttttgaaaggatgaagtgcttcagtgaagagaatcacgaacctctgaggactcagtgtgcccttgctgcatccaaacttctaaagaaacctgat

SEQ ID NO: 54593 - DNA, 120 bp, Artificial Sequence
  ENSG00000069329_17 (sequence is synthesized)
cagggccgagctgtgagcacctgtgcacatctcttctggtctggcagaaacacggacaaaaatggggaggagcttcacggaggcaagagggtaatggagtgcctaaaaaaagctctaaaa

SEQ ID NO: 54594 - DNA, 120 bp, Artificial Sequence
  ENSG00000069329_18 (sequence is synthesized)
atagcaaatcagtgcatggacccctctctacaagtgcagctttttatagaaattctgaacagatatatctatttttatgaaaaggaaaatgatgcggtaacaattcaggttttaaaccag

SEQ ID NO: 54595 - DNA, 120 bp, Artificial Sequence
  ENSG00000069329_19 (sequence is synthesized)
cttatccaaaagattcgagaagacctcccgaatcttgaatccagtgaagaaacagagcagattaacaaacattttcataacacactggagcatttgcgcttgcggcgggaatcaccagaa

SEQ ID NO: 54596 - DNA, 120 bp, Artificial Sequence
  ENSG00000069329_20 (sequence is synthesized)
tccgaggggccaatttatgaaggtctcatcctttaaaaaggaaatagctcaccatactcctttccatgtacatccagtgagggttttattacgctaggtttcccttccatagattgtgcc

SEQ ID NO: 54597 - DNA, 120 bp, Artificial Sequence
  ENSG00000069329_21 (sequence is synthesized)
tttcagaaatgctgaggtaggtttcccatttcttacctgtgatgtgttttacccagcacctccggacactcaccttcaggaccttaataaaattattcacttggtaagtgttcaagtctt

SEQ ID NO: 54598 - DNA, 120 bp, Artificial Sequence
  ENSG00000069329_22 (sequence is synthesized)
accttaataaaattattcacttggtaagtgttcaagtctttctgatcaccccaagtagcatgactgatctgcaatttaaaattcctgtgatctgtaaaaaaaaaaaaaaaaaaaaacaca

SEQ ID NO: 54599 - DNA, 120 bp, Artificial Sequence
  ENSG00000069329_23 (sequence is synthesized)
cttttttttgtttgtttgtttgcttcattgttgattgtgtattttcttcattcctggggagtactaacccaaaagcgtctgtctcttgttttctagtccagtttgagattaatttagaag

SEQ ID NO: 54600 - DNA, 120 bp, Artificial Sequence
  ENSG00000069329_24 (sequence is synthesized)
aaaggaatactgtatgtgaaattcatcttgggctttcccctaaattgcaagataaggccatgtgtaagattttccctaaaactagaatatattaatgcatgtttgagaattttaaagcac

SEQ ID NO: 54601 - DNA, 120 bp, Artificial Sequence
  ENSG00000069329_25 (sequence is synthesized)
catggtcaaaaccagaagctatattttgcatatttggactcagccatccattaagaacccatgttgtcctctggacatatttatcaatataattgggttttaaatagtataaaagaaaac

SEQ ID NO: 54602 - DNA, 120 bp, Artificial Sequence
  ENSG00000069329_26 (sequence is synthesized)
ttgtgatctatataatttatgtatcaccttcattgtaaatttagcaggaaatgcatcacaattatgatttttttttttgcaccagtgaaacaataaagatgctattaacaattttggagc

SEQ ID NO: 54603 - DNA, 120 bp, Artificial Sequence
  ENSG00000069329_27 (sequence is synthesized)
tttttttcccctttcatactatctttaattgataaaaagtactagtagtatggctatagagtttaatagtcattctcatatattcacagagctcacttaactctagttttaagcacttgt

SEQ ID NO: 54604 - DNA, 120 bp, Artificial Sequence
  ENSG00000069329_28 (sequence is synthesized)
ttaccctgcttttcccaaggcatgatgaattcacataaaccccccaaaggctcaccaccgatactagttacctactatataataaaccatcccaaaacttactgtcttaaaacagcaaac

SEQ ID NO: 54605 - DNA, 120 bp, Artificial Sequence
  ENSG00000069329_29 (sequence is synthesized)
atttatctcacaggtctctggatcaggaatttgggagcagcttagctggtggttctggcaaagagtgtggtgtaaggttgcaaacaagatactggttggggctgcagtcatctgatgctt

SEQ ID NO: 54606 - DNA, 120 bp, Artificial Sequence
  ENSG00000069329_30 (sequence is synthesized)
tgactggggctgacttttctgctcactgacctggctgttaggcagaggccccagttcctcttcttgagggcagaggccccagttcctctccttgagggcagaggcctaagttcctttcct

SEQ ID NO: 54607 - DNA, 120 bp, Artificial Sequence
  ENSG00000069329_31 (sequence is synthesized)
tgagggcagaggccccagttcctctccttgacggcccttccatagagtgtcctcacagcatggtggctggctttcccctgagtatgaaagcaagaaggaaaccacagtgcctttcagtgg

SEQ ID NO: 54608 - DNA, 120 bp, Artificial Sequence
  ENSG00000069329_32 (sequence is synthesized)
cctccctgtggaagtgacatgctcatttttgccttattctgtaagtggggagtcactaagtctagcctatattcaagggtaaggagaattaagctccacctcttaaagggaaaatttata

SEQ ID NO: 54609 - DNA, 120 bp, Artificial Sequence
  ENSG00000069329_33 (sequence is synthesized)
gacattttcaaatgactacatcacttaacccctcaccatctgccctcccattgctagcacttgatgactagcccttgctgggctttacatgaacagatgtttcccaaagttataaaatta

SEQ ID NO: 54610 - DNA, 120 bp, Artificial Sequence
  ENSG00000069329_34 (sequence is synthesized)
gtaccactaaaatgtatcaaatgttaagccattctgtggtatgtcatagtccagcaaaccctttctgttctttgtaggtgttagtttaccccgtataaacctgattatggcttgacatgt

SEQ ID NO: 54611 - DNA, 120 bp, Artificial Sequence
  ENSG00000069329_35 (sequence is synthesized)
ccatattatttacatgttttgtgaaatacaactggaatagtagaaaagacatgagtcaagaacacttgagttggagagcttggtttgcaagtaaggtaatgtcagtacagtgtgtaaatt

SEQ ID NO: 54612 - DNA, 120 bp, Artificial Sequence
  ENSG00000069329_36 (sequence is synthesized)
atctcttattttctgggttgaggtaaacccaattttaaaaataataaaccaacaaaagtaaataaaagtgaaacaaaagcactgctagtatccttaacttacagattttttttgttgaac

SEQ ID NO: 54613 - DNA, 120 bp, Artificial Sequence
  ENSG00000069329_37 (sequence is synthesized)
aaaaactgggtaccagatatagttaggcactgaatctaaaggtgaagaagatcatagcctctagcttcaagaacgttagtctgctgtgaagacagacctgtagttacagaagatggtaag

SEQ ID NO: 54614 - DNA, 120 bp, Artificial Sequence
  ENSG00000069329_38 (sequence is synthesized)
ggtttgtgcaggagagcagtgaagaagagctttgagggattggggatggggaagttctgcagagggttgtatgaattctcatggaacatcaagtccaatagtttatttagccttctgagg

SEQ ID NO: 54615 - DNA, 120 bp, Artificial Sequence
  ENSG00000069329_39 (sequence is synthesized)
ccagtgctttggcctgcagtcccaggctcctcagacccatgggctgaagcaagttatactcttggctgcctgtagtgaaatagatatttagaaattgacttagcatttaaaaccctttat

SEQ ID NO: 54616 - DNA, 120 bp, Artificial Sequence
  ENSG00000069329_40 (sequence is synthesized)
agcaatttgacagagtaattttatgtctattggatgtaataaatatttggctttgtgctttgtgtgtctgctattccctgttctccttttttagtaatttttattgtgtcttacaaaaaa

SEQ ID NO: 54617 - DNA, 120 bp, Artificial Sequence
  ENSG00000069329_41 (sequence is synthesized)
gtacctgtccttaattggggtgtggtggggaatccctcacaggtggatggaaacgctgaaccagggcaggcttggtgctgaatggcattaaattccaagactaggggatagtttgggggg

SEQ ID NO: 54618 - DNA, 120 bp, Artificial Sequence
  ENSG00000069329_42 (sequence is synthesized)
acacatctaggaagatgctgtgactggatgagagatgcctgccgtgttagactttcctaccctccctttcctgcctctacccaggaaaccagtgattcttagagtccagatgatcccttc

SEQ ID NO: 54619 - DNA, 120 bp, Artificial Sequence
  ENSG00000069329_43 (sequence is synthesized)
tttgcctagaaattcatgtttctgactcatcctcaagcctgaaattggtggtcatcaggttaatgaactgcaaaaacagcccctgctgatagacactgctcaaagagagaggcgtttgag

SEQ ID NO: 54620 - DNA, 120 bp, Artificial Sequence
  ENSG00000069329_44 (sequence is synthesized)
ttgatcaggcaccagagcacctagaaggagaatgatgagcacttgtgtacagttcgtgtgcagctctcaaaggcattgagaaatgtgacagacctcaaggaataaatgcaccaccacagg

SEQ ID NO: 54621 - DNA, 120 bp, Artificial Sequence
  ENSG00000069329_45 (sequence is synthesized)
cactgaggggatttaaacacaaagtctaggttccagaggggtcttctgttaacatttgctctctcattcagagacctcaaggtaataagctcaagcagaaaggatttcccaacagaattg

SEQ ID NO: 54622 - DNA, 120 bp, Artificial Sequence
  ENSG00000069329_46 (sequence is synthesized)
tctttgacaatgggaattccagactgcatattgtaaatgaaaggtagagaaatctgtgcaggagaccttcctgtttgctggggtttgtcctatggggatgctgtaggcatggacaacaga

SEQ ID NO: 54623 - DNA, 120 bp, Artificial Sequence
  ENSG00000069329_47 (sequence is synthesized)
cactgattcaggtgccagtatctacacatttaccatacacttgaattcccaagagtagtgacttgccttaggtttgattaaagacaaatgtttcctggcttgtggtcttgtattgctgat

SEQ ID NO: 54624 - DNA, 120 bp, Artificial Sequence
  ENSG00000069329_48 (sequence is synthesized)
tgtggtcttgtattgctgattactccagtagggcaccctgcattgtccaacaaaatggtccatgcttccaaaatctctggagagggactgtatattttatttttttgagacggagtcttg

SEQ ID NO: 54625 - DNA, 74 bp, Artificial Sequence
  ENSG00000069329_49 (sequence is synthesized)
catgttggccaggctggtcacgaacttctgaccttgtgatccacctggcagccagattgtatattgtaccactc

SEQ ID NO: 54626 - DNA, 120 bp, Artificial Sequence
  ENSG00000069329_50 (sequence is synthesized)
cccagccagattgtatattgtaccactcattgctgtgttcaggcttgcatcagtagtgtcttcaaataagtaaaatcttaggctgtgacttaaatccattttcacttagagaaatagaaa

SEQ ID NO: 54627 - DNA, 120 bp, Artificial Sequence
  ENSG00000069329_51 (sequence is synthesized)
cacaaggaaacctttggacgcttcataactgctgggaaaggggtattatcaattgtgtttgagagtcaaactataaattacttcccaaggttagttctacctatgcccaggaatgaacaa

SEQ ID NO: 54628 - DNA, 120 bp, Artificial Sequence
  ENSG00000069329_52 (sequence is synthesized)
taaaggttagaagcaagatggagtcatttgggtctgatctctttcactgtcataatttcctcagttacaatttttgtaaaggtggtttcaaatgctttgctgacctcccataaacaagga

SEQ ID NO: 54629 - DNA, 120 bp, Artificial Sequence
  ENSG00000069329_53 (sequence is synthesized)
aacaaggatgtgccaattgtaacttcagttctgcaattcaagtctgctcccaaaactaaagtccattgaattgcatactgattgataatgttcattacgagtttatcttcccatgtgcag

SEQ ID NO: 54630 - DNA, 120 bp, Artificial Sequence
  ENSG00000069329_54 (sequence is synthesized)
agcaaagacaagaggagatcagccattcctccacctacccagagacgttgcattggaaaggagccgtatcttctagtatggttttgcaaatgtaaaatgtaaaatctatgcacgctcaca

SEQ ID NO: 54631 - DNA, 120 bp, Artificial Sequence
  ENSG00000069329_55 (sequence is synthesized)
tttctggagttatcttattcttcgttatctgagtcacatggcactccttctccatgcagatgtgctaagtgagaaaaacactttgagagtactcctttcctatgcttaaacatctttaaa

SEQ ID NO: 54632 - DNA, 120 bp, Artificial Sequence
  ENSG00000069329_56 (sequence is synthesized)
tgtgttgtcggtgcatctcaattttcagacccttcatgaggatatttaggctatgacacagttggttctttaatacttagattttgttatgcagcagtctcaaatggacaggaatttaat

SEQ ID NO: 54633 - DNA, 120 bp, Artificial Sequence
  ENSG00000069329_57 (sequence is synthesized)
aatcgccaacgcagatgcggtgaacgtggacttgtcggctccccctccttccattccttcttgacaaactcatcacacactgcctttccctcctgttgtctcctgcctgccgccgggcga

SEQ ID NO: 54634 - DNA, 120 bp, Artificial Sequence
  ENSG00000069329_58 (sequence is synthesized)
tccccactgccctgcactgctccgcccactctcgcacgctgtggtgagattggctggcgctcagcctacaacacagcagtcccctcaggatgagcaggaaaagctcttggatgaagccat

SEQ ID NO: 54635 - DNA, 120 bp, Artificial Sequence
  ENSG00000069329_59 (sequence is synthesized)
gcaagaggaaagcaaacttacatggatagtcatttcagacagctctgaagagtctttaacccatgacaaagccatgtcaggatagtatcttccttcacctgaatcagtatgccagttctc

SEQ ID NO: 54636 - DNA, 120 bp, Artificial Sequence
  ENSG00000069329_60 (sequence is synthesized)
tctggggagtcgccatggtgagtgctgagggggcagtggcacctgggtcgaccctccttgtagcccctgctctctcccaccgccccgcactccagcgagtggagaaggggccccacagac

SEQ ID NO: 54637 - DNA, 120 bp, Artificial Sequence
  ENSG00000069329_61 (sequence is synthesized)
cgttcgggattaagaccagcccgatttggcctgcgggataggggacagcaggaggaaggccgcgggcaggctgatccgggccggggtgggcggcggctcttggctgcggccgttgctgag

SEQ ID NO: 54638 - DNA, 120 bp, Artificial Sequence
  ENSG00000069329_62 (sequence is synthesized)
agacggggcggcctctctgtggggttgacttggcatgtaggctttggggtccatgaaggcctgcggcctcctttaagtggaatcggtcacctgcctaccacgaggggaccggtagtccta

SEQ ID NO: 54639 - DNA, 120 bp, Artificial Sequence
  ENSG00000069329_63 (sequence is synthesized)
ggtctgagcgtctggcccccggggcgcgtggaggccctgagactcggaggtggcgccgggacccgcccagatgttgcgtttctacctttgtgcctagttgtgctcggccgtccccacgcc

SEQ ID NO: 54640 - DNA, 120 bp, Artificial Sequence
  ENSG00000069329_64 (sequence is synthesized)
ctcctggaggggtcgcagtgattccttggcctttcttggcctcatacccgccttcggctgcagtgtttgtcagcgagttctggggacctgcttacatgaatttcctggaaggactcaggc

SEQ ID NO: 54641 - DNA, 120 bp, Artificial Sequence
  ENSG00000069329_65 (sequence is synthesized)
tgtcttctaatcctgacggtcgcaaaggagactgattgtttactttagcatttgtgcattgggcgcaccttgcctcttttgtctcgccattgataaaatccaagtatttgacttgctgga

SEQ ID NO: 54642 - DNA, 120 bp, Artificial Sequence
  ENSG00000069329_66 (sequence is synthesized)
agcagtacttctccttagggcccgtctatgacggcagcaaatcgtggtgtggctgttggccggtaaacttgaacttcctcaaaatgtgaatctttgtgtctggttcccacaaagcctaca

SEQ ID NO: 54643 - DNA, 90 bp, Artificial Sequence
  ENSG00000069329_67 (sequence is synthesized)
gaacgtacctgtagtcccagcactcaggaggcttgaggtgggaggatgacttgagcctaggaggtggatgttgcattgagtgaaccgaac

SEQ ID NO: 54644 - DNA, 120 bp, Artificial Sequence
  ENSG00000069329_68 (sequence is synthesized)
aagaccttgtctcaaaaagaaaaaagcttttaaagtttagaagtgaagtcttggtgagaaaaatctcaaatacgattttcaagttagtagttcaaatgcgttactagaggaatagcttaa

SEQ ID NO: 54645 - DNA, 120 bp, Artificial Sequence
  ENSG00000069329_69 (sequence is synthesized)
atctaatcttcaccgtttaccagcatctatcttcagtctcatctccctcaagcactttgtggagcaatttcaacaaagagccctgtttactcacatgtatatttatggtttgggattgtc

SEQ ID NO: 54646 - DNA, 120 bp, Artificial Sequence
  ENSG00000069329_70 (sequence is synthesized)
acacattactgtattattaccacaccagtgtctgaccagaattactagcctccttggttctatacctcagacctgaggaatatttaacatataataggtactcagtaaatatttgttgaa

SEQ ID NO: 54647 - DNA, 120 bp, Artificial Sequence
  ENSG00000069329_71 (sequence is synthesized)
tgaatggatttaaatgctttgcatttgaattattcagctttttttctaaatatcttgaaaactttaatttctttgctgaatagatatatttattgtagaagctagcttaaaaattatact

SEQ ID NO: 54648 - DNA, 120 bp, Artificial Sequence
  ENSG00000069329_72 (sequence is synthesized)
taacacttatttacatatttttatattctaaaagataaagtaagagataatctgtgtagatacttttgattctctggattaaaatgtaaggaattgagccaaattggttagtactttaaa

SEQ ID NO: 54649 - DNA, 120 bp, Artificial Sequence
  ENSG00000069329_73 (sequence is synthesized)
gacaacttgaggagataagaaatatgtaaattgcctaccataaagtatggtacattgtatatattcacaaaatgttagcaatgatgattagagcccacatttatttcacaaatgattaat

SEQ ID NO: 54650 - DNA, 120 bp, Artificial Sequence
  ENSG00000069329_74 (sequence is synthesized)
accattgtatttactgctttgcttgaccacacatgctttaaaacccttattttaaagtaagaaaagtccggctaaaattcatccttcgcttgaacactttcttaaaggactaaaacttaa

SEQ ID NO: 54651 - DNA, 120 bp, Artificial Sequence
  ENSG00000069345_0 (sequence is synthesized)
gctgtctccctcggcctgtgccgccgccgacgccgcttgtgggcccgactccgctctgtctgcttcgccaccttctccccgagcactgcccggccggccgccatggctaacgtggctgac

SEQ ID NO: 54652 - DNA, 120 bp, Artificial Sequence
  ENSG00000069345_1 (sequence is synthesized)
acgaagctgtacgacatcctgggcgtcccgcccggcgccagcgagaacgagctgaagaaggcatacagaaagttagccaaggaatatcatcctgataagaatccaaatgcaggagacaaa

SEQ ID NO: 54653 - DNA, 120 bp, Artificial Sequence
  ENSG00000069345_2 (sequence is synthesized)
tttaaagaaataagttttgcatatgaagtactatcaaatcctgagaagcgtgagttatatgacagatacggagagcaaggtcttcgggaaggcagcggcggaggtggtggcatggatgat

SEQ ID NO: 54654 - DNA, 120 bp, Artificial Sequence
  ENSG00000069345_3 (sequence is synthesized)
attttctctcacatttttggtgggggattgttcggcttcatgggcaatcagagtagaagtcgaaatggcagaagaagaggagaggacatgatgcatccactcaaagtatctttagaagat

SEQ ID NO: 54655 - DNA, 120 bp, Artificial Sequence
  ENSG00000069345_4 (sequence is synthesized)
ctgtataatggcaagacaaccaaactacaacttagcaagaatgtgctctgtagtgcatgcagtggccaaggcggaaagtctggagctgtccaaaagtgtagtgcttgtcgaggtcgaggt

SEQ ID NO: 54656 - DNA, 120 bp, Artificial Sequence
  ENSG00000069345_5 (sequence is synthesized)
gtgcgcatcatgatcagacagctggctccagggatggtacaacagatgcagtctgtgtgctctgattgtaatggagaaggagaggtaattaatgaaaaagaccgctgtaaaaaatgtgaa

SEQ ID NO: 54657 - DNA, 120 bp, Artificial Sequence
  ENSG00000069345_6 (sequence is synthesized)
gggaagaaggtgattaaagaagtcaagattcttgaagtccacgtagacaaaggcatgaaacatggacagagaattacattcactggggaagcagaccaggccccaggagtggaacccgga

SEQ ID NO: 54658 - DNA, 120 bp, Artificial Sequence
  ENSG00000069345_7 (sequence is synthesized)
gacattgttcttttgctacaggagaaagaacatgaggtatttcagagagatgggaatgatttgcacatgacatataaaataggacttgttgaagctctatgtggatttcagttcacattt

SEQ ID NO: 54659 - DNA, 120 bp, Artificial Sequence
  ENSG00000069345_8 (sequence is synthesized)
aagcaccttgatggacgtcagattgtggtgaaatacccccctggcaaagtaattgaaccagggtgtgttcgtgtagttcgaggtgaagggatgccgcagtatcgtaatccctttgaaaaa

SEQ ID NO: 54660 - DNA, 120 bp, Artificial Sequence
  ENSG00000069345_9 (sequence is synthesized)
ggtgatctttacataaagtttgatgtgcagtttcctgaaaacaactggatcaacccagacaagctttctgaactagaagatcttctgccatctagaccggaagttcctaacataattgga

SEQ ID NO: 54661 - DNA, 120 bp, Artificial Sequence
  ENSG00000069345_10 (sequence is synthesized)
gaaacagaggaggtagagcttcaggaatttgatagcactcgaggctcaggaggtggtcagaggcgtgaagcctataatgatagctctgatgaagaaagcagcagccatcatggacctgga

SEQ ID NO: 54662 - DNA, 120 bp, Artificial Sequence
  ENSG00000069345_11 (sequence is synthesized)
gtgcagtgtgcccatcagtaaactctgcaaacaaattgcacaggtggattttctttccacatttgcctgatttgttctcagcaatccagctggagtgtcttatcaatccagatgaactga

SEQ ID NO: 54663 - DNA, 120 bp, Artificial Sequence
  ENSG00000069345_12 (sequence is synthesized)
tgttggtctatgtataacttttaaaattggtatagtatctacagagtgtataatttaaactaaccacaaagctttacatcttcattttgactgttccatagcagaataaagcacttgaaa

SEQ ID NO: 54664 - DNA, 120 bp, Artificial Sequence
  ENSG00000069345_13 (sequence is synthesized)
ggaaacaagactccctttcacacatggattattataagtttcaatcctggtatctgtgcttgatttttatcagttttgtgtagatttttatgtttcatattttaaatttaaatcccacat

SEQ ID NO: 54665 - DNA, 120 bp, Artificial Sequence
  ENSG00000069345_14 (sequence is synthesized)
tgtaaagtttgtacaatttgtcctgaagctttgtgtttggctgcacctgcataagctgctacaaatagaataaagaatttcatagcctgtatctatcatttagatgcatggaaaaaaatg

SEQ ID NO: 54666 - DNA, 120 bp, Artificial Sequence
  ENSG00000069345_15 (sequence is synthesized)
catttagatgcatggaaaaaaatgggctttgcacacaatgggtttggagctgactgggaacaatggaaaaaattacattagctgtggttgtaaagtttttttgtttttggttttgttttt

SEQ ID NO: 54667 - DNA, 120 bp, Artificial Sequence
  ENSG00000069345_16 (sequence is synthesized)
ttttaccatcttgtgaaaggtttctgaaactcgataataaaaagcggttggtgtaaattattcttttgtgtcacatttttagaaggaaaaacataaaagaatgtatccttagtactggtt

SEQ ID NO: 54668 - DNA, 120 bp, Artificial Sequence
  ENSG00000069345_17 (sequence is synthesized)
cttaaacagcccataaaaacccattggcctgaagcttatatctcaggcctatgcccatcttatagtcttggaagacaaaaggctggtagagacagtcttcagtggcttcagtgatgctct

SEQ ID NO: 54669 - DNA, 120 bp, Artificial Sequence
  ENSG00000069345_18 (sequence is synthesized)
gtagaggccagggtgtcttgagtgctgtaactcccaagcactgggctagcctgacttctgtatctccctaccaccacccccttaaaaaaataaggtaacagcaaatctatagtaaaacca

SEQ ID NO: 54670 - DNA, 120 bp, Artificial Sequence
  ENSG00000069345_19 (sequence is synthesized)
tgtctgcatagaacgtgttcaaatcctctgttttcattaaatgtaaaagatgctgtctccattaagttgaatatttggaattggagaagccattgattattattttgagtttctgtaatg

SEQ ID NO: 54671 - DNA, 120 bp, Artificial Sequence
  ENSG00000069345_20 (sequence is synthesized)
ttttatagaaaagtaagatgcttattcagaatttaagaatgaaggcaactgaaatatgcattgttgtagttatttatatttcaaactaaaaataagcaaaaaaaaaaggctggtttgaga

SEQ ID NO: 54672 - DNA, 120 bp, Artificial Sequence
  ENSG00000069345_21 (sequence is synthesized)
aaaatcaggtaaaattgatgaaacggatgttgtgtttctctttccatcatctggtttttaccatttcactcagtaggtatttttagaacacacttatttgaggaaagagacatcagatgc

SEQ ID NO: 54673 - DNA, 120 bp, Artificial Sequence
  ENSG00000069345_22 (sequence is synthesized)
acaattttacatttataaaggaacaaatggggaaaactgaaaactaaaaattttaaatgtattaaatgccatccctgagcctaaatctagtatttgtagtttatttctaggtctgctaga

SEQ ID NO: 54674 - DNA, 120 bp, Artificial Sequence
  ENSG00000069345_23 (sequence is synthesized)
acctgaaaacctgaatgaaaaaaggtgtgctgacactaatcaagtcctgtgaggtttaaattattgacctatccactctacctccattgtacaaaaaatattttacaacaagcctgggta

SEQ ID NO: 54675 - DNA, 120 bp, Artificial Sequence
  ENSG00000069345_24 (sequence is synthesized)
agattcaacagcatagtagttttgtatccaaggttacttccccacaaccactttaaacataagaaatgtggtggcaatataaagtttgtagcctttccaataaaggtttataaaacagtt

SEQ ID NO: 54676 - DNA, 120 bp, Artificial Sequence
  ENSG00000069345_25 (sequence is synthesized)
tctctgcgtccctcgcccattgacccggaggtagctgggtctgtgtttggatgcattgttctttgggcaggtaatgctaatgtcctgtacctgcttaggaataagccgtggtcccagcca

SEQ ID NO: 54677 - DNA, 120 bp, Artificial Sequence
  ENSG00000069345_26 (sequence is synthesized)
aacgcctgagtgtacagtaaacataaatagaaggccttattattgctatttgcaatgctgcgatatctttcatctcaggatttcaaagcacacgaggcatttaagccccacagcatcctc

SEQ ID NO: 54678 - DNA, 120 bp, Artificial Sequence
  ENSG00000069345_27 (sequence is synthesized)
accaggctaagagcatccagatttgtaagccgagaaaaatgagaatgctccttaggcagtgagaagagtacagtggacttcctgttaccttaccggaaatgctagtctgtattatataat

SEQ ID NO: 54679 - DNA, 120 bp, Artificial Sequence
  ENSG00000069345_28 (sequence is synthesized)
tcacgagcctccgtgaatgaagatttaagtgctttaggacccaaacacctcgttgagagtgtgtgcaacttctctaccaccgaagttgccaccacgaccccagttaaccaccacgtgcaa

SEQ ID NO: 54680 - DNA, 120 bp, Artificial Sequence
  ENSG00000069345_29 (sequence is synthesized)
ataaaacaccaaaagacgctaactaggaccacctttactttttcatgatgttacagttagaaggaaggcgtgagccatcgggagcaggaattgtgactttagcttgatttatagtaatgt

SEQ ID NO: 54681 - DNA, 120 bp, Artificial Sequence
  ENSG00000069345_30 (sequence is synthesized)
tttgcagtccgcaaagcttaacagtcatttatctcgaatttattagggtcgtcttggtctggttacttggccatcaaagacacttgacaatagggaaaatatggataatgtttgaacgtt

SEQ ID NO: 54682 - DNA, 120 bp, Artificial Sequence
  ENSG00000069345_31 (sequence is synthesized)
ttgtttttccctgtggcattgcttcattgttttatctggttttcacgtcactgtaacctgttttcaagtatagctgctgtctacttggttatattacattagtaaacagtatcgcgagaa

SEQ ID NO: 54683 - DNA, 120 bp, Artificial Sequence
  ENSG00000069345_32 (sequence is synthesized)
ttattacaaaacttttaactggtgtttagttataaccttttttgtttttatccattttcaaaggcatacagaaagttagccaaggaatatcatcctgataagaatccaaatgcaggagac

SEQ ID NO: 54684 - DNA, 120 bp, Artificial Sequence
  ENSG00000069345_33 (sequence is synthesized)
aaagtaagttatttgcaccttttttattccgggggttttagctttaacttaaattgccctccttgaaaaagaggaatgttgcaggaaaaaaatccaactatgcccacacagccacatttt

SEQ ID NO: 54685 - DNA, 120 bp, Artificial Sequence
  ENSG00000069345_34 (sequence is synthesized)
cataatgtcaagagtattttagttttagaataagagtactaccattctgaggagcggtgggtggtaaatagaaccagaatcaagtcaaaggtaacttgtccctttttttttttttttaga

SEQ ID NO: 54686 - DNA, 120 bp, Artificial Sequence
  ENSG00000069345_35 (sequence is synthesized)
ggaagtttctcacatactacttgggaatagctagctttcctaatgcggtttagggcactagggacagtggcactttggatttgcagtgagtggtagaaataaggttttgaaattaagtca

SEQ ID NO: 54687 - DNA, 120 bp, Artificial Sequence
  ENSG00000069345_36 (sequence is synthesized)
gtttcctgaaaacaactggatcaacccagacaagctttctgtaagtgttctttaaattaaacaacagttgacttccaagtttggagttcggtttttggttttttagacagggtctctgtc

SEQ ID NO: 54688 - DNA, 120 bp, Artificial Sequence
  ENSG00000069345_37 (sequence is synthesized)
ctcactgcagcctcgacctcctgggctgaagcgatcctctcacctcagcccccaaggagctgggactacaggtgtgtgttgccatgcctggctaatttaaaaaaaattttttgagacaca

SEQ ID NO: 54689 - DNA, 120 bp, Artificial Sequence
  ENSG00000069345_38 (sequence is synthesized)
tgcctggctaatttaaaaaaaattttttgagacacagtctcactgtgtcacccaagctggagtgcagtggtgtagtctcggctcactgtaccccccgcctcccaggttcaagtgattctc

SEQ ID NO: 54690 - DNA, 88 bp, Artificial Sequence
  ENSG00000069345_39 (sequence is synthesized)
tctcatgccttagccagatgcctggtaagtttgttgttgttgttgtttgtttgtttatggggtttttttgtttgtttgtttttgtttt

SEQ ID NO: 54691 - DNA, 80 bp, Artificial Sequence
  ENSG00000069399_0 (sequence is synthesized)
aggggaagtcccggcgcccggcgaaaccaccctcccgtgcagccgagcccagccgctctccggccgccgtccccggcggc

SEQ ID NO: 54692 - DNA, 80 bp, Artificial Sequence
  ENSG00000069399_1 (sequence is synthesized)
gccatggacgaggggcccgtggacctgcgcacccggcccaaggccgccggactcccgggcgccgcgctgccgctccgcaa

SEQ ID NO: 54693 - DNA, 120 bp, Artificial Sequence
  ENSG00000069399_2 (sequence is synthesized)
ttgtcgtccccctggaccctctgcgcggcggctgcgacctgccggcggtccccgggcccccccacggcctggcccggccggaggcgctttactaccccggagccttactgcctttgtacc

SEQ ID NO: 54694 - DNA, 120 bp, Artificial Sequence
  ENSG00000069399_3 (sequence is synthesized)
ccactcgggccatgggctccccgtttcctctggtgaacctgcctacacccctataccccatgatgtgccccatggaacaccccctttctgctgacatcgccatggccacccgtgcagatg

SEQ ID NO: 54695 - DNA, 120 bp, Artificial Sequence
  ENSG00000069399_4 (sequence is synthesized)
aggacggagacacgcctctccatattgctgtggtgcagggtaacctgccagctgtgcaccggctggtcaacctcttccagcaggggggccgggagctcgacatctacaacaacctacggc

SEQ ID NO: 54696 - DNA, 120 bp, Artificial Sequence
  ENSG00000069399_5 (sequence is synthesized)
agacaccgctccacctggctgtgatcaccacattaccgtctgtggtccggctcctggtgacagctggtgccagccccatggcgctggaccgccatggccagacggccgctcacctggcgt

SEQ ID NO: 54697 - DNA, 120 bp, Artificial Sequence
  ENSG00000069399_6 (sequence is synthesized)
gcgagcaccgcagcccgacctgcctgcgagccctgctggacagcgcagctccgggcacgttggacctggaggcccgcaattatgacgggctcaccgccctgcacgtggcagtgaacaccg

SEQ ID NO: 54698 - DNA, 120 bp, Artificial Sequence
  ENSG00000069399_7 (sequence is synthesized)
ccgctcatccacgccgtggaaaacaacagccttagcatggtgcagctgctgctgcagcacggcgccaacgtgaacgcgcaaatgtactccggcagctccgccctgcactcagcgtccggc

SEQ ID NO: 54699 - DNA, 120 bp, Artificial Sequence
  ENSG00000069399_8 (sequence is synthesized)
cgcgggctcctcccgctggtgcgcacgctggtccgcagcggcgctgacagcagcctcaagaactgccacaacgacacgccgctcatggtggcgcgcagccgcagggtcatcgacatcctg

SEQ ID NO: 54700 - DNA, 120 bp, Artificial Sequence
  ENSG00000069399_9 (sequence is synthesized)
agggggaaggccacccggcctgcttccacctcccagccagacccctcccctgaccggagcgccaacacctcccccgagagcagcagccgcctcagctccaatggtcttctctccgcatca

SEQ ID NO: 54701 - DNA, 120 bp, Artificial Sequence
  ENSG00000069399_10 (sequence is synthesized)
ccatcctcctcaccctcccagtctccccccagggacccccctggattccccatggctcctcccaatttcttccttccttccccatctccacccgccttcctgccctttgctggggtcctc

SEQ ID NO: 54702 - DNA, 120 bp, Artificial Sequence
  ENSG00000069399_11 (sequence is synthesized)
cgaggccctggccggccggtgcccccctccccagctccaggaggcagctgagggggatgggggggcagatcttggactcatgaggaggggcccccctgccctgtggggtcaacccttctg

SEQ ID NO: 54703 - DNA, 120 bp, Artificial Sequence
  ENSG00000069399_12 (sequence is synthesized)
gaaactgtgaagatctcactctgccccccccccccatcttcgggaccaggatttgcacagaagcacatgcacctacccatacaccccctcttctgagcacagatgttcccccatctcgct

SEQ ID NO: 54704 - DNA, 120 bp, Artificial Sequence
  ENSG00000069399_13 (sequence is synthesized)
ccctcccaggactctgaccccagcattctcaggcaccagtccctgtccggaatgccacccacatcttccatttccatgtcccctcccagagctggtggacccagggaacagccactcccc

SEQ ID NO: 54705 - DNA, 120 bp, Artificial Sequence
  ENSG00000069399_14 (sequence is synthesized)
tccactctctaccagataactgaggaggggagaggtgggccgtaacgggcacggatcacgatgtaaattattaagcattttggttggatttcttttgtaataaactatttttgtaccata

SEQ ID NO: 54706 - DNA, 120 bp, Artificial Sequence
  ENSG00000069399_15 (sequence is synthesized)
aggattttccgagcacccaccccggtgccccgcgggccccggctgggggcagggcccccaacgagtgcagagacacaatcagtggagcgctccccaccctcaccccacccccagcccctt

SEQ ID NO: 54707 - DNA, 120 bp, Artificial Sequence
  ENSG00000069399_16 (sequence is synthesized)
tagacccacagctgatgaggcacgtggagtggcagagatggaagaggggagggagaggaatcgttcctggccgcctgccgagtgccagtccctgccccgggtgcgtctcttcactcccac

SEQ ID NO: 54708 - DNA, 120 bp, Artificial Sequence
  ENSG00000069399_17 (sequence is synthesized)
gagtgggtgagcctctgaaagcgcgggtgtgagttccagaaatgaggagagactggcaccaagaaaaaaagtgccttgcccatcttttcatactgagaagtggagaggccaccacctgga

SEQ ID NO: 54709 - DNA, 120 bp, Artificial Sequence
  ENSG00000069399_18 (sequence is synthesized)
atgcacacacaccagtctctgaatagctgttctaggttggggtctctggaaactgagcaggaagtttattggaaatgctctccatcaacacctgtgggatgaaggaagcccatctgggca

SEQ ID NO: 54710 - DNA, 120 bp, Artificial Sequence
  ENSG00000069399_19 (sequence is synthesized)
gagggagaagttgagctgctgtgtcgcctccacacggcctcagctgtcccacagggaatattgaagctggaatggccttcagcattggggtcaggaggctaggccttctatgctggcatt

SEQ ID NO: 54711 - DNA, 120 bp, Artificial Sequence
  ENSG00000069399_20 (sequence is synthesized)
aaactgctccccgctcctgcagcaccggcctcggtcgcgctgactctggcctggtgtccgtgtctcttgctatctctctttctctcaagatctctgcgcctgtctccatgtctctttctc

SEQ ID NO: 54712 - DNA, 120 bp, Artificial Sequence
  ENSG00000069424_0 (sequence is synthesized)
gaaatgcaaagcaggggctgtggggaaatctcaccaacccctcctcccctgggaggtggcaaaggtggtggactgggctgctgggaccctggggaggaatgaaacagaggctgtgttgat

SEQ ID NO: 54713 - DNA, 120 bp, Artificial Sequence
  ENSG00000069424_1 (sequence is synthesized)
ggcctgcagttccttgtaatgtggtcatcaaacggtgtacagttcccgtctgtggctgcaggctggagagctgactgctggcacagatacagcctgacctcgggtcaacacttctcggag

SEQ ID NO: 54714 - DNA, 120 bp, Artificial Sequence
  ENSG00000069424_2 (sequence is synthesized)
tccagaggggttgggagtgggacaggtggcctcccagggacgcctccctgagtggccagtggtgccgcttgtccctgcacctgtagctgccctgagcacccccactggacacagtgggca

SEQ ID NO: 54715 - DNA, 120 bp, Artificial Sequence
  ENSG00000069424_3 (sequence is synthesized)
ttgcaccctccggagaaagctgcccttgttccacgtgcgagccctgtccccagcgccatgggctgtgctacctgcagtaacgcagactgcgagccccggctgcctctccagtgctctctc

SEQ ID NO: 54716 - DNA, 120 bp, Artificial Sequence
  ENSG00000069424_4 (sequence is synthesized)
tcctctggccttcagcaggctgggtcacagagaattttcccactgtaaaaaaccgagcaagtctggataagtgaggctggctccatgtatccagaatcaacgacgggctccccggctcgg

SEQ ID NO: 54717 - DNA, 120 bp, Artificial Sequence
  ENSG00000069424_5 (sequence is synthesized)
ctctcgctgcggcagacgggctcccccgggatgatctacagtactcggtatgggagtcccaaaagacagctccagttttacaggaacctgggcaagtctggcctgcgggtctcctgcctg

SEQ ID NO: 54718 - DNA, 120 bp, Artificial Sequence
  ENSG00000069424_6 (sequence is synthesized)
ggacttggaacatgggtgaccttcggaggccagatcaccgatgagatggcagagcagctcatgaccttggcctatgataatggcatcaacctcttcgatacagcagaagtctacgcagcc

SEQ ID NO: 54719 - DNA, 120 bp, Artificial Sequence
  ENSG00000069424_7 (sequence is synthesized)
ggcaaggctgaagtggtactgggaaacatcattaagaagaaaggatggaggcggtccagcctcgtcatcaccaccaagatcttctggggcggaaaggcggagacggagcggggcctgtcc

SEQ ID NO: 54720 - DNA, 120 bp, Artificial Sequence
  ENSG00000069424_8 (sequence is synthesized)
aggaagcacataatcgaaggtctgaaagcttccctggagcgactgcagctggagtacgtggatgtggtgtttgccaaccgcccggaccccaacaccccgatggaagagaccgtccgcgcc

SEQ ID NO: 54721 - DNA, 120 bp, Artificial Sequence
  ENSG00000069424_9 (sequence is synthesized)
atgacccacgtcatcaaccaggggatggccatgtactggggcacgtcacgctggagctccatggagatcatggaggcctactccgtggcccggcagttcaacctgaccccgcccatctgc

SEQ ID NO: 54722 - DNA, 120 bp, Artificial Sequence
  ENSG00000069424_10 (sequence is synthesized)
gagcaggctgagtaccacatgttccagcgtgagaaagtggaggtgcagctgccggagctgttccacaagataggagtgggcgccatgacctggtcccctctggcctgtggcattgtttct

SEQ ID NO: 54723 - DNA, 120 bp, Artificial Sequence
  ENSG00000069424_11 (sequence is synthesized)
ggcaagtacgacagtggcatcccaccctactcaagagcctccttgaagggctaccagtggctgaaggacaagatcctcagtgaggagggccggcgccagcaagccaagctgaaggagctg

SEQ ID NO: 54724 - DNA, 120 bp, Artificial Sequence
  ENSG00000069424_12 (sequence is synthesized)
caggccatcgccgagcgcctgggctgcaccctgccccagctggccatagcctggtgcctgaggaatgagggagtcagctccgtgctcctgggggcctccaatgcggaccagctcatggag

SEQ ID NO: 54725 - DNA, 120 bp, Artificial Sequence
  ENSG00000069424_13 (sequence is synthesized)
aacattggggcaatacaggtccttccgaaactgtcatcttccattatccacgagattgatagtattttgggcaataaaccctacagcaaaaaggactacagatcctaagccgcccccgcc

SEQ ID NO: 54726 - DNA, 120 bp, Artificial Sequence
  ENSG00000069424_14 (sequence is synthesized)
cgcctgctcggacagtttccgttccctcctagtctctgttcgctcgcttaagctgttttgaagccaagtgaagagtgtggtttgcatccaagagaaaacaccacactgtgatgtcatcgg

SEQ ID NO: 54727 - DNA, 120 bp, Artificial Sequence
  ENSG00000069424_15 (sequence is synthesized)
gaaatgatctcccaagtcgctgccagacaccacccactgcttcgccggacaatgtcgaagtccagtctgtgccggggaaggcactggttaggaaggatgttcaaacggtcccacccaagc

SEQ ID NO: 54728 - DNA, 120 bp, Artificial Sequence
  ENSG00000069424_16 (sequence is synthesized)
ctgtcacctctgctcatcctccaagaccacccagctttctcccagccacagccaagattcccaaagtcaaggcccaaagatttccaaggttcccaaagtcaaggccaggccaaggcctgg

SEQ ID NO: 54729 - DNA, 120 bp, Artificial Sequence
  ENSG00000069424_17 (sequence is synthesized)
aaggggtctggcccatcgaggggccccttctgccagggccttggttgctggggcagggcctccccactgggggtcttcctccacctcccactttccaagggctccaggaatctggggcct

SEQ ID NO: 54730 - DNA, 120 bp, Artificial Sequence
  ENSG00000069424_18 (sequence is synthesized)
gaccacagattcctctcccatccttttctgctccaacctgccccactgggtcccggcaggggccatgcctaccaagctcgagctggcccttgacccccacccacccccacccttgctggc

SEQ ID NO: 54731 - DNA, 120 bp, Artificial Sequence
  ENSG00000069424_19 (sequence is synthesized)
aggggcagggaccccagggggattgactctgcagtttgggagccacaaaaagcgtagcggtgtgatttctagctcagcctcccaccgtcttcctcctacacaccaatgatgagcctcatg

SEQ ID NO: 54732 - DNA, 120 bp, Artificial Sequence
  ENSG00000069424_20 (sequence is synthesized)
ccagtgaggcccggagcgcttgggaggggtcccagtggggcaggcccctctgtctggccacccctctgtcctggccccggaaggccctgtggtcatgtgctcctagctgcacggtggctg

SEQ ID NO: 54733 - DNA, 120 bp, Artificial Sequence
  ENSG00000069424_21 (sequence is synthesized)
ctggccacaccacggcaagtggcagcaggggccggccctgtgcacaaggatgcactcctctcggcccctgtagactttctctaaagccgcccgccagcccaggccgctgctctgcaccga

SEQ ID NO: 54734 - DNA, 120 bp, Artificial Sequence
  ENSG00000069424_22 (sequence is synthesized)
gctggtgggcttgggttttgtggagcgcatgcttggaccctttcagtaaggaagggtctttggggttttctgtgcccatgacttgggggctgcacccccacagcacccccacaatgtagg

SEQ ID NO: 54735 - DNA, 120 bp, Artificial Sequence
  ENSG00000069424_23 (sequence is synthesized)
aaaagacctcagggaacctctccctggaaagacgggcagggctggttagcccctcccactgcctgacacctgggacaggctgggcagaggggagagagggcaggacaggccagagtgacg

SEQ ID NO: 54736 - DNA, 120 bp, Artificial Sequence
  ENSG00000069424_24 (sequence is synthesized)
cccccgtgcagcttgggccggagggcaagggatgccagtaagtctgcaggtgcggggtgccacctacaggcccaggcctgtgtcccaagcagtacccaggctttgcagaccacgcggggc

SEQ ID NO: 54737 - DNA, 120 bp, Artificial Sequence
  ENSG00000069424_25 (sequence is synthesized)
agggctccactgaagccacccccacccctcgccagctagctccatagggaagcctgtgtctcctgcccccagggcgcaccctcagtgcaggcacctctgttcccgctttgcccctggagg

SEQ ID NO: 54738 - DNA, 120 bp, Artificial Sequence
  ENSG00000069424_26 (sequence is synthesized)
agccactattccagaaggctccaccctgccgtcctgcgggagcctgctgtccagtcctggccgggccaaggcctgggaaactgtgaaagtcagaaaggccagcggggagaggctggggcg

SEQ ID NO: 54739 - DNA, 120 bp, Artificial Sequence
  ENSG00000069424_27 (sequence is synthesized)
aggggaggagggggatcagcttctgctattaccgaccccccttcatgctgcccctggcgcctagaacccttgcccctcctcatagaccaagtcccgggggtctccactcagtcctgctgc

SEQ ID NO: 54740 - DNA, 120 bp, Artificial Sequence
  ENSG00000069424_28 (sequence is synthesized)
ctgcttcaccagaagcagccctgtgagtgtggggtggggaagtcccttcccaacggaggtcccagcctatggccctgggcccaggtgggggtcgcctgcttccttcccggacagggtcct

SEQ ID NO: 54741 - DNA, 120 bp, Artificial Sequence
  ENSG00000069424_29 (sequence is synthesized)
gcagtggccaatggtgccagagggcaggtggcccaccctcgccatcagggagggtggctggccccatccccactgccacccagccccacccactgttggaagagggaccagcgcgaggtg

SEQ ID NO: 54742 - DNA, 120 bp, Artificial Sequence
  ENSG00000069424_30 (sequence is synthesized)
gtgcccagggtgggcactgctgcttaatgcgaggcacacctggggcagctgagcccccaaaggctgcgggtttgccaaacacagagaggccaggccccagtgtcaggatgcagtcagcct

SEQ ID NO: 54743 - DNA, 120 bp, Artificial Sequence
  ENSG00000069424_31 (sequence is synthesized)
ctggcgcagctctttccacgacctggttcctggatgtcctgcttgctccacacccatctacagggaggatgtgagggggctctgcctcctagggccaggtcccccctctcgggaggaggt

SEQ ID NO: 54744 - DNA, 120 bp, Artificial Sequence
  ENSG00000069424_32 (sequence is synthesized)
attgggtaggaccatccaagaaagggcagaagaccaagggcagtcggggtctagaaaggagggcgctggccctgctggacgcttcggagcccccactgtttcccactcagctttgtgctc

SEQ ID NO: 54745 - DNA, 120 bp, Artificial Sequence
  ENSG00000069424_33 (sequence is synthesized)
agatcccaggtcccaaggagtgacaggggcttcctcccaccttctgtccttgtccagtcatgtaaataatgtgctttttctctccccgagtctttttttttaaacctaccgtggttcctc

SEQ ID NO: 54746 - DNA, 120 bp, Artificial Sequence
  ENSG00000069424_34 (sequence is synthesized)
agctaactgcattccctacccaggcagagactgtcctatgcctcgagcttccaaacgagactcagaccgcgacacagccaccgtatttatggaatgacaaaataaataaagcccaaaccc

SEQ ID NO: 54747 - DNA, 120 bp, Artificial Sequence
  ENSG00000069424_35 (sequence is synthesized)
gcggccgcgccggaggccacggagcccacgcttttcagagagtctccactcgacggacccagaggcccggcggccggtgctcaacggagccacaagcctgaggaccgaggactggccgag

SEQ ID NO: 54748 - DNA, 120 bp, Artificial Sequence
  ENSG00000069424_36 (sequence is synthesized)
gggcgcgccccgtccgctgccacccgcgggaggagcctcggaaggcggcgcaccgcgccgcacactcagtccaagaacccgcctcgcgtcactgtcgccgtcagggccgcggagccaatc

SEQ ID NO: 54749 - DNA, 120 bp, Artificial Sequence
  ENSG00000069424_37 (sequence is synthesized)
agagcccaagtcgagggctgcgctttgcgagcgccagccaatcggtgcggcggcgggcccatcctgatttgcatgtccgacgacccctcaaccaatggtaatgtgactggcgtgaacaat

SEQ ID NO: 54750 - DNA, 120 bp, Artificial Sequence
  ENSG00000069424_38 (sequence is synthesized)
agccaatcagaagctggaagaggcgtggccccgggcgtcccacgaggtgaagatgctgctggcggaacctgcaggagctagcgggattcgggggcgctaaagtcgcaggggcagggcggg

SEQ ID NO: 54751 - DNA, 120 bp, Artificial Sequence
  ENSG00000069424_39 (sequence is synthesized)
gccgctgctcatccaggaaggtcggagatgtcgggccctcccacctgggtcacgcgctaggcatgcctgagagcaaaggccacgccccgacaccccacggggccctggcgcgccaggctt

SEQ ID NO: 54752 - DNA, 120 bp, Artificial Sequence
  ENSG00000069424_40 (sequence is synthesized)
ctcagccctgcggcggcagtgcatagctctggcacgcgctgcaccaacttcctgttgggtgctgtggtcccaaggcgcgtgctttgcagcagatgtgtgacctggcgttcccctgagtgc

SEQ ID NO: 54753 - DNA, 120 bp, Artificial Sequence
  ENSG00000069424_41 (sequence is synthesized)
agaaacagcccaggggagggaccagggagtgtgggggagacggggactgcgatgaaagggaggcgtccagggaagacctccatgagaaggtgaccttggcataaagaggcaaacgtggga

SEQ ID NO: 54754 - DNA, 120 bp, Artificial Sequence
  ENSG00000069424_42 (sequence is synthesized)
acagaggaaggacctgcagagacgagagatgtgaggggaggagaaaatgcgcaccccccaacctccagccgcgcttccagcaggtcttctgtacctcgggcctggaaatgtgactccctc

SEQ ID NO: 54755 - DNA, 120 bp, Artificial Sequence
  ENSG00000069424_43 (sequence is synthesized)
cctcagagctgtgcagccttcttccccaccgttgccttcggaaatcctcactcctcaaggaatgcctgcagcttccttggcttctggataaagtctcgtcctggtcgggggagaagagtt

SEQ ID NO: 54756 - DNA, 120 bp, Artificial Sequence
  ENSG00000069424_44 (sequence is synthesized)
tcttggggacagatggctcctgagcccaaggggacaggggacgcagccaggatctgagcacccggcctcagcatgcaggtgtccttcgtttgctcggagcacagcctcaagggccggggc

SEQ ID NO: 54757 - DNA, 120 bp, Artificial Sequence
  ENSG00000069424_45 (sequence is synthesized)
cctgaggatcggctgggccgaccggcggccagcagtcccagcctgggctcccgaggccgcttccgcgccgtggccatggtggcccggagcctgggacagctgtcggtgcagagcctcccg

SEQ ID NO: 54758 - DNA, 120 bp, Artificial Sequence
  ENSG00000069424_46 (sequence is synthesized)
cagaggcctcacgacaggactagtgccttggtaagaagaggaaaaggccagagctccctccctaccctgtgtggacccagcaggaaggaattctgtctgcaagagagagccctcacctgg

SEQ ID NO: 54759 - DNA, 120 bp, Artificial Sequence
  ENSG00000069424_47 (sequence is synthesized)
ggggcctgggtgtgcggctatggggactgaactgtcgagggctcctgctgcctctgcaggggacaggccctgccagctactgagtgagcagcctgcggcagccctgactcactgcgggtc

SEQ ID NO: 54760 - DNA, 120 bp, Artificial Sequence
  ENSG00000069424_48 (sequence is synthesized)
accccaaagctctggcggggtctgtgcctttggtcccaactgcaccgatgcctgggtgctaagggagggacaggatggtggagtgtggtggttatgtctgtaggccttgcagacggggat

SEQ ID NO: 54761 - DNA, 120 bp, Artificial Sequence
  ENSG00000069424_49 (sequence is synthesized)
tctgcatggatcccagcgctgtgtggccctggacaaatggcttaacgtctctgagcttgtttccccacctgtagaacacatctgctaggtgagcccccatggggccattctaaggagtcc

SEQ ID NO: 54762 - DNA, 120 bp, Artificial Sequence
  ENSG00000069424_50 (sequence is synthesized)
ctgagagagccagtgtgaagctcttagcagatgccctggagctcagcaagcactctggggtgacaacaccgtcagctgtttccactgggctcctgagacgtgcccggtgctgttagggtc

SEQ ID NO: 54763 - DNA, 120 bp, Artificial Sequence
  ENSG00000069424_51 (sequence is synthesized)
aagggttccacagggaccctctcacatgcaatcctcaccggtgcctttaccaggtgagtgccgcaggcagcccatttttcagatgtggacactgtggcacagagaggttcagtaacatgc

SEQ ID NO: 54764 - DNA, 120 bp, Artificial Sequence
  ENSG00000069424_52 (sequence is synthesized)
caaggtcacacagcttgggccaagattaacatccaggctgtgtggttcagagcctgggctgctcataactggaccctccggcctgggggtcccaccacccacctccttttcccagctcac

SEQ ID NO: 54765 - DNA, 120 bp, Artificial Sequence
  ENSG00000069424_53 (sequence is synthesized)
cagggcctgcctggctcccagggaagctatgagtgtgagcagtggggagcccgggctgcagctgctgggccagcctgctccggggacaccttggtgccctctccatggctgccccggcag

SEQ ID NO: 54766 - DNA, 120 bp, Artificial Sequence
  ENSG00000069424_54 (sequence is synthesized)
tttggacgggtgggacctttgggccgactgctttggtgctgggcaggggttccgggagctgcagctgttcccacctcggtctgctgggggcgggctccttggcgtgagaacatggagccc

SEQ ID NO: 54767 - DNA, 120 bp, Artificial Sequence
  ENSG00000069424_55 (sequence is synthesized)
ctcctggcctgatcccatgtgtagaggggctgcccagcctgtggcacaggcccaagtggagaggccctttcacatccccccccctgcccccaccacatccccccatctctaccccctacc

SEQ ID NO: 54768 - DNA, 120 bp, Artificial Sequence
  ENSG00000069424_56 (sequence is synthesized)
acatcccccacctctgccccccaccacagcccagcattcagaactctgagacccctgggcctgggctccgagatgggggctgcaaagccacatggaggtgaccctgggagaggcgcccct

SEQ ID NO: 54769 - DNA, 120 bp, Artificial Sequence
  ENSG00000069424_57 (sequence is synthesized)
ccccaccacacaacctctgagtggggactcaggagggtccccagactgcaggatctggagaacaaggagcaggccaagaaagtctgcccagccagcagtctcagcactggggcccacagc

SEQ ID NO: 54770 - DNA, 120 bp, Artificial Sequence
  ENSG00000069424_58 (sequence is synthesized)
cctgggttccagggcaacgtggcctggcccccgactcctcccatcccatggcaaggtcagggcccccctccaggaggccctgcaatcctctgggggggatggccaggggagagagcactc

SEQ ID NO: 54771 - DNA, 120 bp, Artificial Sequence
  ENSG00000069424_59 (sequence is synthesized)
ccctagggccaggaggttcttctgggccacgggtggcagccgagaccccaggctgccaagtttcctaagagaaggaaggccagcacctcgcctccttgtcctgacttggggttgggccag

SEQ ID NO: 54772 - DNA, 120 bp, Artificial Sequence
  ENSG00000069424_60 (sequence is synthesized)
caccacagtctttgcacttcagagcctggacaggccccgctcatccaccagcccgtgcccggcccactgcccactctcccctacttgagaggcctggggcaggggcactgccctggcttc

SEQ ID NO: 54773 - DNA, 120 bp, Artificial Sequence
  ENSG00000069424_61 (sequence is synthesized)
aagatgagaagagcccctatgagggagaagggtccagaaggaatgagcccatcggccccctgcacgtgggggtccaggtgacctgctctcatctgtagctgtgctgctcccctcccccgc

SEQ ID NO: 54774 - DNA, 120 bp, Artificial Sequence
  ENSG00000069424_62 (sequence is synthesized)
gcccgagccccgtccagtgcatcctcccaggctcgtcctgcgtgccaggctctgttctaggcactcaggatgcgcccgtgaaccatcagagttgtgctcctggagagcttgctttccagc

SEQ ID NO: 54775 - DNA, 120 bp, Artificial Sequence
  ENSG00000069424_63 (sequence is synthesized)
aggaacagacatgaacactaactgcacgaaacaaggaggttagaatgtgtgtcagggtggacgagcgctgtaggagagaagccagagataaagggagggagctggggccagggacggtgg

SEQ ID NO: 54776 - DNA, 120 bp, Artificial Sequence
  ENSG00000069424_64 (sequence is synthesized)
cgctgcagactcaggttcaagggggcctgtcaggtgggcttgttgagaaggtggtgcttgagcagtcttgagagatgcggagtaagtcacgcaaatgcctgcgggaagaaccttccacca

SEQ ID NO: 54777 - DNA, 120 bp, Artificial Sequence
  ENSG00000069424_65 (sequence is synthesized)
gcaggaagagttgatgcaaaggcccaaaaaggcctggagcagaggggcagatcctgagaggcacgaaacacctccagggacttctgagtgagacgggagccgtggcaaaattgtgggcag

SEQ ID NO: 54778 - DNA, 120 bp, Artificial Sequence
  ENSG00000069424_66 (sequence is synthesized)
aggagggcgagctgcagctcagcctggaaagggaggctgctctccggctgctccatcggggaggctttgggaagcaaaagtcgaagcagagagccctggtgggaagtggcagctgcgggt

SEQ ID NO: 54779 - DNA, 120 bp, Artificial Sequence
  ENSG00000069424_67 (sequence is synthesized)
ccgagacgggagtggtggttggatcctggatgtttgggaaggtggggcccccgggactggctgacaaactggatgtgggggtgagaaggcgaggtggaagtcggtccccgggtgtgtcac

SEQ ID NO: 54780 - DNA, 120 bp, Artificial Sequence
  ENSG00000069424_68 (sequence is synthesized)
ggtggcggtgctgtatgctgaggcaggcgcagctggaaaaagcagtcacggacatggaagtccagcatttggcctggagtttccattttatgtcactgctgccaccacccttcaggaagg

SEQ ID NO: 54781 - DNA, 120 bp, Artificial Sequence
  ENSG00000069424_69 (sequence is synthesized)
ttctagggcaccttgacatttgagagggagtgcacagacccaggcatgcttcctctctgccccaaaccttctgaaacacaaaagcagcgtggcctccatctgcctcagatggagcccaga

SEQ ID NO: 54782 - DNA, 120 bp, Artificial Sequence
  ENSG00000069424_70 (sequence is synthesized)
tgtgatggggcaacccgggcctggccagccgaccatctggaagagcctggccccacctcctccccaggccaggcccgtcttgttggtgggattctgatttgttgttgttcttgcacgcag

SEQ ID NO: 54783 - DNA, 120 bp, Artificial Sequence
  ENSG00000069424_71 (sequence is synthesized)
tccggagctcactgttcccatctgtaagagggcggtccagcctcgtcatcaccaccaagatcttctggggcggaaaggcggagacggagcggggcctgtccaggaagcacataatcgaag

SEQ ID NO: 54784 - DNA, 120 bp, Artificial Sequence
  ENSG00000069424_72 (sequence is synthesized)
gtgcgagccctgtccccagcgccatgggctgtgctacctgcagtaacgcagactgcgagccccggctgcctctccagtgctctctctcctctggccttcagcaggctgggtcacagaggt

SEQ ID NO: 54785 - DNA, 120 bp, Artificial Sequence
  ENSG00000069424_73 (sequence is synthesized)
atccatccactcattcattcactcaacaaatatctgttccatgtctactaggtgccaggcacagctgggaaccagcagacaaaactccctgctttcccggagccggcatcttggtgggca

SEQ ID NO: 54786 - DNA, 120 bp, Artificial Sequence
  ENSG00000069424_74 (sequence is synthesized)
gttccagtgcataagaaggctgtcaaatgtgctgtcttcaagcatctagaaagccagtgggggagaaagacaagaaagtgactgtgagcagcaacaggcccccgggagggtgcagagaat

SEQ ID NO: 54787 - DNA, 120 bp, Artificial Sequence
  ENSG00000069424_75 (sequence is synthesized)
gtgctttgcagcagatgtgtgacctggcgttcccctgagtgctcggaaaatggccttgtctccggtcgttcccgttcaggagcaggggacaggccctgccagctactgagtgagcagcct

SEQ ID NO: 54788 - DNA, 120 bp, Artificial Sequence
  ENSG00000069424_76 (sequence is synthesized)
cctctccggagctcactgttcccatctgtaagaggaaacatcagaagcagttataaagttgggcctccctcctccctcccctcgaaatgccactcagaatcccagtgccaaggggagccc

SEQ ID NO: 54789 - DNA, 120 bp, Artificial Sequence
  ENSG00000069424_77 (sequence is synthesized)
ccgccccctcccccatggattcctgacaccccttcctcttgtcccatcaaatttgttttttggcaactctgatcccaaaacaaattcctcctcaccctgtaattaaacgaaattgcacgt

SEQ ID NO: 54790 - DNA, 120 bp, Artificial Sequence
  ENSG00000069424_78 (sequence is synthesized)
tggaggatcttcgcggcgtctcagcctctccggagctcactgttcccatctgtaagagggtgtgtgtgggaccgttccggcagggctatcctgagggtcagtggccccaagtctgtaaat

SEQ ID NO: 54791 - DNA, 120 bp, Artificial Sequence
  ENSG00000069424_79 (sequence is synthesized)
ctgggaagtggtcccctccagcacagaccggggagcggtccccgggtgtgatggagcccaaaggtcgcagatcgggggccatccacccttctctcccaggagcctatgggcccttcccag

SEQ ID NO: 54792 - DNA, 120 bp, Artificial Sequence
  ENSG00000069424_80 (sequence is synthesized)
gccaaggtcctcacccaccttgggaccaactgggctgagcacttgcctacattttgaggctccccagacccctggacacagctttatctcaaggtgctgacaagccccggggccctgttc

SEQ ID NO: 54793 - DNA, 120 bp, Artificial Sequence
  ENSG00000069424_81 (sequence is synthesized)
ggcgaactatcccagggtcagcctcgtcggcctgtcgtgcagtgtcgtaaggcccgcaagtccccacatctttcttgctgggaagtggagaggaaaattcagttctccaagagtaggagg

SEQ ID NO: 54794 - DNA, 120 bp, Artificial Sequence
  ENSG00000069424_82 (sequence is synthesized)
tgactctgcttgagaaagaagttgaagggaggccgaatacactgtccacccccaccctagcctgcccactccgcctctgtcccaactcatccacagagacccagagcaccagggtccctg

SEQ ID NO: 54795 - DNA, 120 bp, Artificial Sequence
  ENSG00000069424_83 (sequence is synthesized)
cgcagtgtggggactccaactgcggtgttctctccaatcaccatccattgggaagcttggggggacttttttgctctgggggataaattactacatagaggagaagaagcgttcagcgct

SEQ ID NO: 54796 - DNA, 120 bp, Artificial Sequence
  ENSG00000069424_84 (sequence is synthesized)
ttgaaaatcggttttggttactttggcgttttttattctttctactcctgcgatctcagccccctccgctcccccatcctcctgctacaggcgtctttccatgtgtgctttgctgctgca

SEQ ID NO: 54797 - DNA, 120 bp, Artificial Sequence
  ENSG00000069424_85 (sequence is synthesized)
gggacttgaaagttaaattgtgttccagttattgttttttatttgttcatatacagcacgcacgtgcgtgtgttgatatatttttttcctttttaactaaacgcgtgttctgcacggtga

SEQ ID NO: 54798 - DNA, 120 bp, Artificial Sequence
  ENSG00000069424_86 (sequence is synthesized)
atcaccagaaccctctgccctgagaaaggggctcctgggccgacagggaaggtctgcctcctactctggaggggccgcttggggacaggcccgggctgtctcctcacagccacctgcttc

SEQ ID NO: 54799 - DNA, 120 bp, Artificial Sequence
  ENSG00000069424_87 (sequence is synthesized)
agagtgtctggtgatccctaataaaccagactgtggcctttttaacgagcagacgcccccacgaaggcaggtgagtcctcccttcagccgctaccttcctagtggagatgccgcttgggg

SEQ ID NO: 54800 - DNA, 120 bp, Artificial Sequence
  ENSG00000069424_88 (sequence is synthesized)
gcacgcatccgcgggaatgaaaaataacagaggagaccatattttggggtggttttgtctgatccggaattagaccctccgtgtttttgcaaagcagaagaccttaaaaaagagccagcc

SEQ ID NO: 54801 - DNA, 120 bp, Artificial Sequence
  ENSG00000069424_89 (sequence is synthesized)
agttttacagtggcagctcccaagccaggcggcaccatgctgtccatgacgtacagcgagagtctgcggagcgtgagcagcaggtgccactctgaatgggccctgcaccccgtccgccag

SEQ ID NO: 54802 - DNA, 120 bp, Artificial Sequence
  ENSG00000069424_90 (sequence is synthesized)
acggacacgctggaactgcagcggctgcgggaggtgcgggcggctgcccaggccaggaacatggagagcttcctccgcatgcacggcctttccctggacggctgcaccgcccagcgcaca

SEQ ID NO: 54803 - DNA, 120 bp, Artificial Sequence
  ENSG00000069424_91 (sequence is synthesized)
acttcccgagcttttaggggaagaggcactcgtgaataattcagcctctttcactgagatgaaaacgccctaatagaactaatggactcgctgcctcaaaactcgactctggtgggactc

SEQ ID NO: 54804 - DNA, 120 bp, Artificial Sequence
  ENSG00000069424_92 (sequence is synthesized)
atctcattcaccaattgcttctgacgtcctgcagtgacactccctaatgaaaaagccgctgtgccagatccttagagtgtctggtgatccctaataaaccagactgtggcctttttaacg

SEQ ID NO: 54805 - DNA, 120 bp, Artificial Sequence
  ENSG00000069424_93 (sequence is synthesized)
aatcctcacctctgcaggagtgagtctcccaagaggccctggaggcccaggcccagaccctgggggatatggaagcactcctttgtcgtggcgtgggaagccccacactgctctttcctt

SEQ ID NO: 54806 - DNA, 120 bp, Artificial Sequence
  ENSG00000069424_94 (sequence is synthesized)
atttcattatggcattcccaagctcactaagataacaagatagcttggctacctggcaataaaactttatttatggatgctgagattgggaactttatataaattttgtgtgttatgaaa

SEQ ID NO: 54807 - DNA, 120 bp, Artificial Sequence
  ENSG00000069424_95 (sequence is synthesized)
ccagagcacatggttaagtctgccgcgtggaccagtgagcacgtgctcccgggagccagcgcagcagcctccctccctctttctgttttgtgagggcgccctgccccaggggagagtaga

SEQ ID NO: 54808 - DNA, 120 bp, Artificial Sequence
  ENSG00000069424_96 (sequence is synthesized)
aaggtgagccaggtggccatggccagaggggatgccgagtctggtgccatcacccagcagtggatgcctcgggcctcagcatgtcccttaagctccccaggactcagatttcccacacgc

SEQ ID NO: 54809 - DNA, 120 bp, Artificial Sequence
  ENSG00000069424_97 (sequence is synthesized)
agttaacgaggagaattcagggtgcacacgcttcccaaattctgaagccggatgcaggtcctagctgcccccatggaggctccagtaactgtctgtcttggtcattgggaatgcagcccc

SEQ ID NO: 54810 - DNA, 120 bp, Artificial Sequence
  ENSG00000069424_98 (sequence is synthesized)
tgcagtgtcacaagctgaagaacctgagatctgcatttcacccaacatccactgtccatttcccagctgccgcgaaccgtgcggatcgcagtcagatgtatttgctggggctcatgtccc

SEQ ID NO: 54811 - DNA, 120 bp, Artificial Sequence
  ENSG00000069424_99 (sequence is synthesized)
cacaattggaacaagaaagtgaacactaacaaaaagccagcttgtatgccgccagcgcctctgggtctctcggaaggacagggacggcacacgcccagacatgtgtgcttctggacagtg

SEQ ID NO: 54812 - DNA, 120 bp, Artificial Sequence
  ENSG00000069424_100 (sequence is synthesized)
aggcagcatctcagaaatgagagcagtggcatttgctcagacagctctgggcatctgcacaagaagcagttttcacatttatcctacttagcactagaaaggttgcgtttaaaaattgat

SEQ ID NO: 54813 - DNA, 120 bp, Artificial Sequence
  ENSG00000069424_101 (sequence is synthesized)
cagcgaattgatgtgagaccttgttagctgcgattgctcagtttccaagggaaagctttgcttctatcaaaatttaaatgcgtacagtttgtgtttgaggtcacttttatctttaagaca

SEQ ID NO: 54814 - DNA, 120 bp, Artificial Sequence
  ENSG00000069424_102 (sequence is synthesized)
cagtttgtgtttgaggtcacttttatctttaagacactagctggccgggcgcggtgactcacacctgtaaccccagcactttggaaggctggggcgggcggatcacctgaggtcaggagt

SEQ ID NO: 54815 - DNA, 120 bp, Artificial Sequence
  ENSG00000069424_103 (sequence is synthesized)
aaagacacaagtgtgacctacggaaactgcacagaggaggtgcaacgaacggagccctgggttaggaccgggaggcgctgcccaccatcaacagaaatactcctccttttgccaactaca

SEQ ID NO: 54816 - DNA, 120 bp, Artificial Sequence
  ENSG00000069424_104 (sequence is synthesized)
cacgcgagaggctggatttccttcacagacgtccaccaaagccacacatcgcgacacacggaggcagaaagcagcggtctcctaagaagttagacacgaggaatctcgggcagcgagaat

SEQ ID NO: 54817 - DNA, 120 bp, Artificial Sequence
  ENSG00000069424_105 (sequence is synthesized)
agaaggagtggctggagggatgagaggggagcgtggagtcctgggagctggggaagccgcaggcagcacctctgtcaccccgatacgatgggcaccgctggacctagcaacgaagaggtc

SEQ ID NO: 54818 - DNA, 120 bp, Artificial Sequence
  ENSG00000069424_106 (sequence is synthesized)
ctcccccgggatgatctacagccctgggtgtttctgtctgcaccataaacagcgctgaacatcagcgacagctgcggagggcgttcagtgagagctgagcctctggggacagagcataga

SEQ ID NO: 54819 - DNA, 120 bp, Artificial Sequence
  ENSG00000069424_107 (sequence is synthesized)
ggcacaggcagtaccccagcagcccatcagtcttgggaagccagacctttccggataatcactggggcctgagccagagcccgtgtctgtgacagccacagggaaaggcagtgtctgtcc

SEQ ID NO: 54820 - DNA, 120 bp, Artificial Sequence
  ENSG00000069424_108 (sequence is synthesized)
taagaagagccaggcgggcaggtgcgggtttgccagcacgcgggtgctctgcacgtctgggttggagggttttcagccattgcccacaagcatattgcaaagcaagtcctgaagcacatt

SEQ ID NO: 54821 - DNA, 120 bp, Artificial Sequence
  ENSG00000069424_109 (sequence is synthesized)
caatccaaaccaaccctcactcggaggttcaccacggaaaacagggcctggcatggaaggagcccttggtgtccaggaaactggctccgggtctctgccccgtggccaccgggtggcgct

SEQ ID NO: 54822 - DNA, 120 bp, Artificial Sequence
  ENSG00000069424_110 (sequence is synthesized)
gctgcagagcacttggcaccggctgcgcttcctcagagactgccctgagcaggcgactggtgggggcccgggggcatgggacattggtggttctttctgacctgcacctgctggggttga

SEQ ID NO: 54823 - DNA, 120 bp, Artificial Sequence
  ENSG00000069424_111 (sequence is synthesized)
tggcctctggccacgcacagtctctctgccctccccacagctaacggccccaggaccccaccccaagggcaggtgtcgatctccctgggcctgggcccctgtctgccaactggtgctgcc

SEQ ID NO: 54824 - DNA, 120 bp, Artificial Sequence
  ENSG00000069424_112 (sequence is synthesized)
acctgaacccccatgtattatttgtgatgcggcaggagatgctgtgagttttggcagcagctagaaggattcagtcttcctacttccgttcaaccccattaaatattgaggtgaaggaca

SEQ ID NO: 54825 - DNA, 120 bp, Artificial Sequence
  ENSG00000069424_113 (sequence is synthesized)
ggattcctgccgctcgcgttcccaagagtgctcacaaatgcaccttgcaccctgctttcatttttaaactctgaatggctttaggaggtgctattttcatggggctggaattgcagaaca

SEQ ID NO: 54826 - DNA, 120 bp, Artificial Sequence
  ENSG00000069424_114 (sequence is synthesized)
cttggacactgatcacttgctgaactccccgtggagccaccagggggaccacagtccctctggtgccaaagatgctgtgctgggtgagaggcgcgatggagctgctgtcctgggctctcc

SEQ ID NO: 54827 - DNA, 120 bp, Artificial Sequence
  ENSG00000069424_115 (sequence is synthesized)
tgatgtgcctgacattttgacatttcatgtctcacttgtgcaactagggctgcagggcctcagagctggggagggcaggctccggccaagtgctgtggggagcacttcccatcttggcgg

SEQ ID NO: 54828 - DNA, 120 bp, Artificial Sequence
  ENSG00000069424_116 (sequence is synthesized)
tgaactttcctgctcaattatgtaaaagctcagccttcttcagccaggctgttggcttcaattttaaagactggctgtaatcaaatcatccactctcctgcatcgggtttccagaagtca

SEQ ID NO: 54829 - DNA, 120 bp, Artificial Sequence
  ENSG00000069424_117 (sequence is synthesized)
atttcttgcggcatgtccttggaactagagctgcctcagtacagctctgaccagcatttcaaaagccccagacctcctggacccatagccagcagcccgctctagagacttttgtcccct

SEQ ID NO: 54830 - DNA, 120 bp, Artificial Sequence
  ENSG00000069424_118 (sequence is synthesized)
cagtttattgaccccaggagagcaggactttctctgaaggccagctgtccacacacactaaggacaccctggccacagagcagcacagagggacacctgtggctgccccctgtgccctac

SEQ ID NO: 54831 - DNA, 120 bp, Artificial Sequence
  ENSG00000069424_119 (sequence is synthesized)
aagtaggtgcaacagctggcgatgcttccagccccggcccagcagccacggccccgtgctccccagagacccctgacctagaaggctcctggggtggcgggaggacagtcctccttgaga

SEQ ID NO: 54832 - DNA, 120 bp, Artificial Sequence
  ENSG00000069424_120 (sequence is synthesized)
agggagagtggtcggggtctgtcctggacaggccccggcccagtgccatttcctgtccccagcaggggcagagctggtgtttctgcagccatcagctatgcctggtgcctgtccctgtta

SEQ ID NO: 54833 - DNA, 120 bp, Artificial Sequence
  ENSG00000069424_121 (sequence is synthesized)
agggacgtcaaatccagaaaagaagctgtggccgagtttgccttttacaaaaacctcgcttaactttcctttttactcacatggattattttttcctggtcactatggtaacatcataaa

SEQ ID NO: 54834 - DNA, 120 bp, Artificial Sequence
  ENSG00000069424_122 (sequence is synthesized)
aattatagagaaaacagaaaatttgtgaactgcccaaacccccaaagcactccaaattccctgggccgcctgtcacccctgcaggtctccaagtgtctagctccatagtttctgggctgg

SEQ ID NO: 54835 - DNA, 85 bp, Artificial Sequence
  ENSG00000069424_123 (sequence is synthesized)
gcaggtctccaagtgtctagctccatagtttctgggctggacacacttgggctcataggaattataactacgattcattcattca

SEQ ID NO: 54836 - DNA, 120 bp, Artificial Sequence
  ENSG00000069424_124 (sequence is synthesized)
agcgcagtgccacaatcacagctcactgtagcttcaaactcctgggctcgagcgagcctcccacctcagcctacagggatgagccaccatgcctgactaatttgtcctttttctctctct

SEQ ID NO: 54837 - DNA, 83 bp, Artificial Sequence
  ENSG00000069424_125 (sequence is synthesized)
cacccaggctggagtacagtggcgtagtccccttcctgcctcaagtagctggttctacaggcacatgccaccatgcccagcta

SEQ ID NO: 54838 - DNA, 120 bp, Artificial Sequence
  ENSG00000069424_126 (sequence is synthesized)
actcctgagttcaagtaatctgcccacctcagcttcccaaagcactaggattgcaggcgtgagccaccacgcctggcattaatttgtccttttttaagatatggggtctcactatgttgc

SEQ ID NO: 54839 - DNA, 120 bp, Artificial Sequence
  ENSG00000069424_127 (sequence is synthesized)
aataataataataataataataagtccaaatcaaacagacgggttaggttgaaaatcaaagccccccaccccctgctgctgcccccctcccctctgagccctgtgaccaggcctctccct

SEQ ID NO: 54840 - DNA, 120 bp, Artificial Sequence
  ENSG00000069424_128 (sequence is synthesized)
gggcctctgggagttcagccctgtagcctcgggtccctacccccaaagtggaatccgactccacacggcatttgctgaccctgtttttgcgtctaacattgcatcgtaaacgttttttgg

SEQ ID NO: 54841 - DNA, 120 bp, Artificial Sequence
  ENSG00000069424_129 (sequence is synthesized)
ctcctggtctatcttcgggaagccgaggcagcagcttggagccagagccggaggcagagcggctccatccgtggggagccgcgccacctctgcgcctcctccgcgcctcctctgcgcccc

SEQ ID NO: 54842 - DNA, 120 bp, Artificial Sequence
  ENSG00000069424_130 (sequence is synthesized)
gcgccgtgctgagtcaggctctgaaacgcagtcatcatccggaagtggttcttgctgtggccccatccccctgtgtgattttcctaccttggctcacttaaaatttcaatctggctctga

SEQ ID NO: 54843 - DNA, 120 bp, Artificial Sequence
  ENSG00000069424_131 (sequence is synthesized)
cctgcctgtatttgcagaatgtcccgaggctggccctgagccctggctgccccccacctgcggtttccctttctctcacgacagagaccgtccgcgccatgacccacgtcatcaaccagg

SEQ ID NO: 54844 - DNA, 120 bp, Artificial Sequence
  ENSG00000069431_0 (sequence is synthesized)
atgagcctttcattttgtggtaacaacatttcttcatataatatcaacgatggtgtactacaaaattcctgctttgtggatgccctcaacctggtccctcatgtctttctgttgtttatc

SEQ ID NO: 54845 - DNA, 120 bp, Artificial Sequence
  ENSG00000069431_1 (sequence is synthesized)
acttttccaatattgtttattgggtgggggagccaaagctcaaaagtacaaattcaccacaacacatggcttcattttccgggacataacctgagatggattcttacattcgctctcctg

SEQ ID NO: 54846 - DNA, 120 bp, Artificial Sequence
  ENSG00000069431_2 (sequence is synthesized)
tttgtgcatgtctgtgaaatagcagaaggcattgtttcagactcgcggcgggaatcaaggcacctccacctctttatgccagccgtgatgggattcgttgccactacaacatcgatagtg

SEQ ID NO: 54847 - DNA, 120 bp, Artificial Sequence
  ENSG00000069431_3 (sequence is synthesized)
tattatcataatatcgaaacatcaaattttcctaaattacttttagccctgttcctgtattgggtaatggcctttattacaaaaacaataaaattggttaagtactgtcagtctggcttg

SEQ ID NO: 54848 - DNA, 120 bp, Artificial Sequence
  ENSG00000069431_4 (sequence is synthesized)
gacatatcaaacctgcgtttctgcatcacaggcatgatggtcatcttgaatgggctcttgatggctgtggagatcaatgtcattcgagtcaggagatatgtatttttcatgaatcctcag

SEQ ID NO: 54849 - DNA, 120 bp, Artificial Sequence
  ENSG00000069431_5 (sequence is synthesized)
aaagtaaagcctcctgaagacctccaggatctgggagtgagatttcttcaaccatttgtgaatttgctgtcaaaagcaacatactggtggatgaacacacttattatatctgctcacaaa

SEQ ID NO: 54850 - DNA, 120 bp, Artificial Sequence
  ENSG00000069431_6 (sequence is synthesized)
aagcctattgatctgaaggcaattggaaaattgccaatagcaatgagagcagtaacaaattatgtttgcctgaaagatgcatatgaagaacaaaagaaaaaagttgcagatcatccaaat

SEQ ID NO: 54851 - DNA, 120 bp, Artificial Sequence
  ENSG00000069431_7 (sequence is synthesized)
cggactccatctatatggcttgcaatgtacagagcttttgggcgaccaattctacttagtagcacattccgctatctggctgatttactgggttttgctggacctctttgtatttctgga

SEQ ID NO: 54852 - DNA, 120 bp, Artificial Sequence
  ENSG00000069431_8 (sequence is synthesized)
atagttcagcgtgtgaatgaaacccagaatgggacaaataacacaactggaatttcagaaaccctctcatcaaaggaatttcttgaaaacgcttacgttctagcagttcttctcttcttg

SEQ ID NO: 54853 - DNA, 120 bp, Artificial Sequence
  ENSG00000069431_9 (sequence is synthesized)
gctcttattctgcaaaggacatttttgcaggcttcctactatgtaaccatagagactggcattaacctccgtggagctctgctggccatgatttataataaaatccttaggctctctacg

SEQ ID NO: 54854 - DNA, 120 bp, Artificial Sequence
  ENSG00000069431_10 (sequence is synthesized)
tctaacttatccatgggggagatgactctggggcagatcaacaacttagtcgccattgaaactaatcaactcatgtggtttttgttcctgtgtcccaatctatgggctatgcctgttcag

SEQ ID NO: 54855 - DNA, 120 bp, Artificial Sequence
  ENSG00000069431_11 (sequence is synthesized)
atcataatgggcgtgattctgctctataatttacttggatcaagtgcattggtcggtgcagctgtcattgtgctccttgcgccaattcagtactttattgctacaaagttggcagaggct

SEQ ID NO: 54856 - DNA, 120 bp, Artificial Sequence
  ENSG00000069431_12 (sequence is synthesized)
cagaaaagtacacttgattattccactgagagactcaagaaaacaaatgaaatattgaaaggcatcaaacttctaaaattgtatgcctgggaacacattttctgcaaaagtgtggaggaa

SEQ ID NO: 54857 - DNA, 120 bp, Artificial Sequence
  ENSG00000069431_13 (sequence is synthesized)
acaagaatgaaagaactatctagtctcaaaacctttgcactatatacatcactctccatcttcatgaatgcagcaattcccatagcagctgttcttgctacatttgtgacccatgcgtat

SEQ ID NO: 54858 - DNA, 120 bp, Artificial Sequence
  ENSG00000069431_14 (sequence is synthesized)
gccagtggaaacaatctgaaacctgcagaggcctttgcttcactgtctctcttccatatcctggtcacaccactgttcctgctctccacggtggtcagatttgcagtcaaagccatcata

SEQ ID NO: 54859 - DNA, 120 bp, Artificial Sequence
  ENSG00000069431_15 (sequence is synthesized)
agtgttcaaaagctgaatgagtttctcttgagtgatgagattggtgacgacagttggcgaactggtgaaagttcgcttccttttgagtcctgtaagaagcacactggagttcagccaaaa

SEQ ID NO: 54860 - DNA, 120 bp, Artificial Sequence
  ENSG00000069431_16 (sequence is synthesized)
actataaacaggaaacagcctggaagatatcacctggacagctatgagcaatcaacacggcgtctacgtcccgcagaaacagaggacattgcaataaaggtcacaaatggatacttttca

SEQ ID NO: 54861 - DNA, 120 bp, Artificial Sequence
  ENSG00000069431_17 (sequence is synthesized)
tggggcagtggtttagctacattatccaatatagatattcgaattccaacaggtcagttaaccatgattgtgggccaagtaggatgtgggaagtcctctcttctccttgccatcctcggt

SEQ ID NO: 54862 - DNA, 120 bp, Artificial Sequence
  ENSG00000069431_18 (sequence is synthesized)
gagatgcagacattggaaggaaaagttcactggagcaatgtaaatgaatctgagccttcttttgaagcaaccagaagtaggaacaggtactctgtggcatatgcagctcaaaagccttgg

SEQ ID NO: 54863 - DNA, 120 bp, Artificial Sequence
  ENSG00000069431_19 (sequence is synthesized)
ctattaaatgctacagtagaagaaaatattacttttggaagtccttttaacaaacagaggtacaaagctgtcacagatgcctgttctcttcagccagatattgacttattaccatttgga

SEQ ID NO: 54864 - DNA, 120 bp, Artificial Sequence
  ENSG00000069431_20 (sequence is synthesized)
gatcaaactgaaattggagagaggggcatcaacctgagtgggggacagaggcagagaatctgtgtggcacgagcgctgtatcaaaacaccaacattgtctttttggatgatccattctca

SEQ ID NO: 54865 - DNA, 120 bp, Artificial Sequence
  ENSG00000069431_21 (sequence is synthesized)
gccctggacattcacttgagtgatcatttaatgcaggaggggattttgaaattcctgcaagatgacaaaaggacactcgttcttgtgactcacaaattacagtatctgacgcatgctgac

SEQ ID NO: 54866 - DNA, 120 bp, Artificial Sequence
  ENSG00000069431_22 (sequence is synthesized)
tggatcatagccatgaaagatggaagtgtcctaagagaaggaactttgaaggacattcaaaccaaagatgttgagctttatgaacactggaaaacacttatgaatcggcaagatcaagaa

SEQ ID NO: 54867 - DNA, 120 bp, Artificial Sequence
  ENSG00000069431_23 (sequence is synthesized)
ttagaaaaggatatggaagctgaccaaactactttagagaggaaaactctccgacgggccatgtattcaagagaagccaaagcccagatggaggacgaagacgaagaggaagaagaggag

SEQ ID NO: 54868 - DNA, 120 bp, Artificial Sequence
  ENSG00000069431_24 (sequence is synthesized)
gaagatgaggatgataacatgtccactgtaatgaggctcaggactaaaatgccatggaaaacctgctggcgctacctgacatctggaggattcttcctgctcatcctgatgattttctct

SEQ ID NO: 54869 - DNA, 120 bp, Artificial Sequence
  ENSG00000069431_25 (sequence is synthesized)
aagcttttgaagcattcggtcattgtagctatagactattggctggccacatggacatcggagtacagtataaacaatactggaaaagctgatcagacctactatgtggctggctttagc

SEQ ID NO: 54870 - DNA, 120 bp, Artificial Sequence
  ENSG00000069431_26 (sequence is synthesized)
atactctgtggagcaggcattttcctttgccttgttacatccctcactgtagaatggatgggtctcacagctgccaaaaatcttcaccacaaccttctcaataagataatccttggacca

SEQ ID NO: 54871 - DNA, 120 bp, Artificial Sequence
  ENSG00000069431_27 (sequence is synthesized)
ataaggttttttgataccacacccctgggactgattctcaatcgcttttcagctgatactaatatcattgatcagcacatccctccaaccttggaatctctaactcgctcaacactgctc

SEQ ID NO: 54872 - DNA, 120 bp, Artificial Sequence
  ENSG00000069431_28 (sequence is synthesized)
tgcctgtctgccattgggatgatttcttatgctactcctgtgttcctggttgctctcctgccccttggtgttgccttttattttatccagaaatactttcgggttgcctctaaggacctc

SEQ ID NO: 54873 - DNA, 120 bp, Artificial Sequence
  ENSG00000069431_29 (sequence is synthesized)
caggaacttgacgatagtacccagctccctctgctctgtcacttctcagaaacagcagaaggactcaccaccattcgggcctttaggcatgaaaccagatttaaacaacgtatgctggaa

SEQ ID NO: 54874 - DNA, 120 bp, Artificial Sequence
  ENSG00000069431_30 (sequence is synthesized)
ctgacggatacaaacaacattgcctacttatttctctcagctgccaacagatggctggaggtcaggacggattatctgggagcttgcattgtcctcactgcatctatagcatccattagt

SEQ ID NO: 54875 - DNA, 120 bp, Artificial Sequence
  ENSG00000069431_31 (sequence is synthesized)
gggtcttcgaattctggattggtaggcttgggtcttctgtatgcacttacgataaccaattatttgaattgggttgtgaggaacttggctgacctggaggtccagatgggtgcagtgaag

SEQ ID NO: 54876 - DNA, 120 bp, Artificial Sequence
  ENSG00000069431_32 (sequence is synthesized)
aaggtgaacagtttcctgactatggagtcagagaactatgaaggcacaatggatccttctcaagttccagaacattggccacaagaaggggagatcaagatacatgatctgtgtgtcaga

SEQ ID NO: 54877 - DNA, 120 bp, Artificial Sequence
  ENSG00000069431_33 (sequence is synthesized)
tatgaaaataatctgaaacctgttcttaagcacgtcaaggcttacatcaaacctggacaaaaggtgggcatatgtggtcgcactggcagtgggaaatcatcgttatctctggctttcttc

SEQ ID NO: 54878 - DNA, 120 bp, Artificial Sequence
  ENSG00000069431_34 (sequence is synthesized)
tatttgatggaaaaattgtcattgatgggatagacatttccaaattaccactgcacacactacgttctagactttcaatcattctgcaggatccaatactattcagtggttccattagat

SEQ ID NO: 54879 - DNA, 120 bp, Artificial Sequence
  ENSG00000069431_35 (sequence is synthesized)
ttaatttagatccagagtgcaaatgcacagatgacagactctgggaagccttagaaattgctcagctgaagaatatggtcaaatctctacctggaggtctagatgcggttgtcactgaag

SEQ ID NO: 54880 - DNA, 120 bp, Artificial Sequence
  ENSG00000069431_36 (sequence is synthesized)
gtggggagaattttagcgttggacagagacagctattttgccttgccagggcctttgtccgcaaaagcagcattcttattatggatgaggcaacagcttccattgacatggccacagaga

SEQ ID NO: 54881 - DNA, 120 bp, Artificial Sequence
  ENSG00000069431_37 (sequence is synthesized)
atattttgcaaaaagtagtaatgacagcctttgcagaccggaccgtggtgacaatagctcatcgagtacacactattctgacggcagacctggttattgtgatgaagcgaggaaatattt

SEQ ID NO: 54882 - DNA, 120 bp, Artificial Sequence
  ENSG00000069431_38 (sequence is synthesized)
tagaatatgacactccagaaagcctcttggctcaggaaaatggagtatttgcttcttttgttcgcgcagacatgtgaaggagtgtcttaaaacaatacatgtatttaaaataatgcagtc

SEQ ID NO: 54883 - DNA, 120 bp, Artificial Sequence
  ENSG00000069431_39 (sequence is synthesized)
ataacctaattaatggatcatcagcttgacctctgtaaagtggcatcttaaaacttttacagatttttgcacaaaaagtggacatttatttttcctgtttttaaaacagtttttcaagat

SEQ ID NO: 54884 - DNA, 120 bp, Artificial Sequence
  ENSG00000069431_40 (sequence is synthesized)
attattgcttaatatgttcattattgatgtttttatagtgatccagccactctagctttaagaatagctaggttgtattaaaacatgtaagctactttaagtgataaatcaatagctaaa

SEQ ID NO: 54885 - DNA, 120 bp, Artificial Sequence
  ENSG00000069431_41 (sequence is synthesized)
gttttctcctaactttaagtctggtaaatatctctcaggaatggaagtgtcaatgagtagtcagtattactatactcttgtttgtaagaatatattttccttattgttggagtctccaga

SEQ ID NO: 54886 - DNA, 120 bp, Artificial Sequence
  ENSG00000069431_42 (sequence is synthesized)
ggttattggaaggaataaaaaaggacatgttttctaacgaaactctcaaattcattatctacttcatgagaatttatttgtattcattaacattagtaatacctatttttcttaagagcc

SEQ ID NO: 54887 - DNA, 120 bp, Artificial Sequence
  ENSG00000069431_43 (sequence is synthesized)
ttcttttttcccttttgtttcttgtcaccaagaagttatcacacttatacttattctataaggccaaagccttatctagaaagatcatgaagagtttggatatttttaaaactatactcg

SEQ ID NO: 54888 - DNA, 120 bp, Artificial Sequence
  ENSG00000069431_44 (sequence is synthesized)
aattttcattttttcctgtcctgtaaagagagaattcttaagatatcaggcataatgtatgtaccttttccagactgaagttcaaagaatgattaggttcaatctttcagtggcaggcca

SEQ ID NO: 54889 - DNA, 120 bp, Artificial Sequence
  ENSG00000069431_45 (sequence is synthesized)
gctaaactttctatagtttaatgattagctgtggttatgatcttgagccctaacatgccacattactcaagatttacacaggcaagtgacttcatttggcactgctaataatggcaggtg

SEQ ID NO: 54890 - DNA, 120 bp, Artificial Sequence
  ENSG00000069431_46 (sequence is synthesized)
aacattcctctcaggtgtgagatatttcctatgaaacagtccactggcaggctggagatatcttacactttgaagttatatatatataaaacaagtgtctatttctagctgaaagagttt

SEQ ID NO: 54891 - DNA, 120 bp, Artificial Sequence
  ENSG00000069431_47 (sequence is synthesized)
acctcttctagacatttatgcccaatggtgtcacacatgatcatttgctcctgctctaattttaatgtgcatacaaaaaatataccaaaaatgttattgtaattttaatgagcatgtaaa

SEQ ID NO: 54892 - DNA, 120 bp, Artificial Sequence
  ENSG00000069431_48 (sequence is synthesized)
gagtgtatcaaaaattgatgggatattagtgttaggttttgcttaaatgaaaattaataaattcaaaaatactaaaagtcaccttctttgtcacgttagcaaccagtttctactattctg

SEQ ID NO: 54893 - DNA, 120 bp, Artificial Sequence
  ENSG00000069431_49 (sequence is synthesized)
tgcccatccagtgtcaatatcattgatttctttttcatatgaagatccacatgcattgtaagattgtgaagatatataaaattgatgaattaagagaaattatgccactttcctatagtt

SEQ ID NO: 54894 - DNA, 120 bp, Artificial Sequence
  ENSG00000069431_50 (sequence is synthesized)
tctgtgttctgtttattgtatggtgtattcactcttggaaaatatgtaatagttgtgtatccagaatatgtgtcttcacctgaatatttaatctttatatttacaaaaaaataagttcca

SEQ ID NO: 54895 - DNA, 120 bp, Artificial Sequence
  ENSG00000069431_51 (sequence is synthesized)
caagatggacaaaaatggtccatgatatttagcttaaattgtaaccttttgttgtgtatataaaacttccttggaagaaaataaccttattgttttcttaaagctaaacagaataggatt

SEQ ID NO: 54896 - DNA, 120 bp, Artificial Sequence
  ENSG00000069431_52 (sequence is synthesized)
ggtactcattaattatgtcttgcaaatattttctaaaaattcaaccactctcctaaaatggtgtttaaatattttgtagggcagaatatgcatattgcctgttagcaagtaataattcat

SEQ ID NO: 54897 - DNA, 79 bp, Artificial Sequence
  ENSG00000069431_53 (sequence is synthesized)
gcagaatatgcatattgcctgttagcaagtaataattcattctcatagagaaatgggtttttacccatggaagtaatac

SEQ ID NO: 54898 - DNA, 120 bp, Artificial Sequence
  ENSG00000069431_54 (sequence is synthesized)
atcttttaatgatattttcttattatattgctacaggcaacatcagtagaagcctatctagttacactaaactaaagatcacattcaccattcttacagccaagtggttgctggtcccct

SEQ ID NO: 54899 - DNA, 120 bp, Artificial Sequence
  ENSG00000069431_55 (sequence is synthesized)
ccctcataacttttagttacttaagttgagtaaatgtctaattgtttacaaactaaattgactaaataaggtcaaggataatgtttttcattgattaaccatttattatacatataatct

SEQ ID NO: 54900 - DNA, 120 bp, Artificial Sequence
  ENSG00000069431_56 (sequence is synthesized)
aggtacatatctgtaaaagatgaccaccttaactaaatcagattttacatttataaattttatatttaattagtcaaatcaatttttaaatcataactccttaatctcataagaagcaat

SEQ ID NO: 54901 - DNA, 120 bp, Artificial Sequence
  ENSG00000069431_57 (sequence is synthesized)
aatttttaaatcataactccttaatctcataagaagcaataaatgcataaagcattatattaaaataccagggttacttatgtcattgacagggaaaagactttgtataaacaattatgc

SEQ ID NO: 54902 - DNA, 120 bp, Artificial Sequence
  ENSG00000069431_58 (sequence is synthesized)
accatctatttttgtactcttactcatgatccatttaaaagtctactcagctctagattagataccagaagaccctctaagtaactgataactgagattcgggaccatgtcttgtttgcc

SEQ ID NO: 54903 - DNA, 120 bp, Artificial Sequence
  ENSG00000069431_59 (sequence is synthesized)
attgtgcccttggaatttaatacaagtgcctaacccacagtagggttgattgattcactgattagttttactgccatgtgcctataactataggttattctctttccttttctatgttgt

SEQ ID NO: 54904 - DNA, 120 bp, Artificial Sequence
  ENSG00000069431_60 (sequence is synthesized)
atggatgcaggccttgttttagtcttttctgagggtattttagtggagtgtgatactgtcccaaatttgctcgcccacaagaatggcctcttttccactttggtgatgaccaacaagtag

SEQ ID NO: 54905 - DNA, 120 bp, Artificial Sequence
  ENSG00000069431_61 (sequence is synthesized)
gcatccatagtaccaggatcctcactgttgaaacgctctcttatttccctgcgccgctgcagacagctccagggtaaagttgtcaagcgttcaaaggccacaggaacggagtcttcggac

SEQ ID NO: 54906 - DNA, 120 bp, Artificial Sequence
  ENSG00000069431_62 (sequence is synthesized)
cctcccaggtttcggccccatatggcctcgcagattcctagcggccgcgggttcaagtcccagccgctgacgcaggagttctgcgtccgggtttgaaatttacatcttaagacagtgtag

SEQ ID NO: 54907 - DNA, 120 bp, Artificial Sequence
  ENSG00000069431_63 (sequence is synthesized)
attttgtggctatatgcatttatttctcctaggtaaatacctaagagtgaaatctctgggtcatacaataagtgggtaaatgttcatattttaagaaactgacatcttttcccaaaatgt

SEQ ID NO: 54908 - DNA, 120 bp, Artificial Sequence
  ENSG00000069431_64 (sequence is synthesized)
ttgtatcattttttatactcactaacaaggtgtaagagttccagttccacatgttcatcatttggtgatcttggtctaatttagtcatgctagtgggtgtgtactggtaatacattgcgg

SEQ ID NO: 54909 - DNA, 120 bp, Artificial Sequence
  ENSG00000069431_65 (sequence is synthesized)
tggagtccaaggacattttcccaaggttcaagcctttcactgatgctgtgggaatgccacattttactagaattactatgtagcagagtatgtttctagcataatgaaaagtatgctgtc

SEQ ID NO: 54910 - DNA, 120 bp, Artificial Sequence
  ENSG00000069431_66 (sequence is synthesized)
ctgaggagcagctgccattacatcacggcctttcgcacctgcattgtgactaaaattgttttattagcctctcttgcttccttgttctgtggaaatcagaggctctctaaaatattccta

SEQ ID NO: 54911 - DNA, 120 bp, Artificial Sequence
  ENSG00000069431_67 (sequence is synthesized)
attttatttttgccttgggtcaaaattatataacgcatctatatgagttatgttcaatactctgacccatcactgtattccttggagtatactttctttcttaaagagataaaggtatgg

SEQ ID NO: 54912 - DNA, 120 bp, Artificial Sequence
  ENSG00000069431_68 (sequence is synthesized)
aacaagaatcacagatgggctatgaacctcctgaaattgtagttcgaattatgtgtttgtgtgaatgatgcttactgtttctgattttatttgattgttgtataatgaaaatgatgttgg

SEQ ID NO: 54913 - DNA, 120 bp, Artificial Sequence
  ENSG00000069431_69 (sequence is synthesized)
ctaatgatatagaaattaggagaagaaatattgaaaacacacacacagtattttattcatttgtccagaggacatgaaaatttaaaatggatgcatgaaagatattgattatttaattat

SEQ ID NO: 54914 - DNA, 120 bp, Artificial Sequence
  ENSG00000069431_70 (sequence is synthesized)
atgttgtgtcacattatatgattgttaaaggcaatctaataaaaaaggtagagagggttaaatattaatttaaaaggctgtcacattttgaattatcttaatagaaaggtcttttgtgca

SEQ ID NO: 54915 - DNA, 120 bp, Artificial Sequence
  ENSG00000069431_71 (sequence is synthesized)
caaaaaaagagaaagaaatttccaacaagtagctgcaaaaaaatatgtgaaattgagaatttaataagctaaatatctatttttgaaaagttgatggtaaaaagaaaggttataactaga

SEQ ID NO: 54916 - DNA, 120 bp, Artificial Sequence
  ENSG00000069431_72 (sequence is synthesized)
aaggaatttagatattaataatgttttgatggaaatgcaatcagaagaggcctattattgttatttaggtgcaagacagcacaatttgatcatattgctggaaggacatggagataaaat

SEQ ID NO: 54917 - DNA, 120 bp, Artificial Sequence
  ENSG00000069431_73 (sequence is synthesized)
ataatatttcttgttattttaacagagaaaaatttggacctaggaaagttactcattttaagaccacaaagatagtaattttgtctcaacatttcattatgaaaatcaccaaatgtacag

SEQ ID NO: 54918 - DNA, 120 bp, Artificial Sequence
  ENSG00000069431_74 (sequence is synthesized)
aaagttgaaagaatcatgtgaattcccacttacccaacatctgaattcttcaaattacattttttctgtttgttttatcacatatctacatcttttcatccttctattcatacctctctc

SEQ ID NO: 54919 - DNA, 120 bp, Artificial Sequence
  ENSG00000069431_75 (sequence is synthesized)
catcttagttttgatgcattttaaggtaagttgtagacattagtatactttacctctgaacgcttcatgcgtatctttttgtgagacaaaatttatatacatgaaacacagcgatcttaa

SEQ ID NO: 54920 - DNA, 120 bp, Artificial Sequence
  ENSG00000069431_76 (sequence is synthesized)
tttgctaaatgcatgtacctatataacactatcatgacataactatcatccatgcaaattttcttatactcaatttcacctttacagaagcaatatctgttctgatttttacccccacca

SEQ ID NO: 54921 - DNA, 120 bp, Artificial Sequence
  ENSG00000069431_77 (sequence is synthesized)
tggattaggtttgcctgttctagaacttcatgtaaattgaatgacacagtatagacttttaagtaaggcttctttttctaagcatgattttttgatgctcatccgtaatgtagcatagat

SEQ ID NO: 54922 - DNA, 120 bp, Artificial Sequence
  ENSG00000069431_78 (sequence is synthesized)
caatattttcttattgttgcatttcattgtataactatatcatagttttttcaatcccttgttaatagacatctgtactatttccaggttttagccatcatgagagtaaaagctgctatc

SEQ ID NO: 54923 - DNA, 120 bp, Artificial Sequence
  ENSG00000069431_79 (sequence is synthesized)
ggggaaggtctccggccccaggcgcggcgcgcggggcttctgcccagtttcctgcttctcagccgcggtgtctgccccggcccagagcagtctgtgcaatttagaaactcgataggaggc

SEQ ID NO: 54924 - DNA, 120 bp, Artificial Sequence
  ENSG00000069431_80 (sequence is synthesized)
agcagctggtctcccaccaccctaaaaataatccgttccggcgcactgcgtgcttcgcctaggggaggaaaactgtcatcggagagttctgcgtccgggtttgaaatttacatcttaaga

SEQ ID NO: 54925 - DNA, 120 bp, Artificial Sequence
  ENSG00000069431_81 (sequence is synthesized)
cagtgtaggaagtcggtgttttgaaggtagctcaagtgcaccggcaggggtttgaagcagcgtgaagctattgcccaaggaaaagtattgtttgtgaccattgctaaatcaattatcaat

SEQ ID NO: 54926 - DNA, 120 bp, Artificial Sequence
  ENSG00000069431_82 (sequence is synthesized)
ttaatttgcatttatctgattgctaattatgttgaacactctttgatgagtttattggccatttttaatctttgggatgtggctattcatatcttttgcccatgtttcattgggttgcac

SEQ ID NO: 54927 - DNA, 120 bp, Artificial Sequence
  ENSG00000069431_83 (sequence is synthesized)
ttttattattgcgttgtaggaatattttgtgcatactagatattagtatgtcatcagttacatgttttgataatgttttccttctagtctgtggcatacatattcatttatttaataggg

SEQ ID NO: 54928 - DNA, 120 bp, Artificial Sequence
  ENSG00000069431_84 (sequence is synthesized)
tcttttaatgagcagaagattttaaatttcgatgtagtataatttatcatttcttctagtccttagttactgctttctgtgtcttaagacatctttgtcttccctctaaatatgtttccc

SEQ ID NO: 54929 - DNA, 120 bp, Artificial Sequence
  ENSG00000069431_85 (sequence is synthesized)
tcttattctcctgtttgcttttagatgctttatggtttccatttttatttttaggactacgattctttctaaattaattgtgtatatggtgtaagataggtgtcaaagttcttttttttt

SEQ ID NO: 54930 - DNA, 120 bp, Artificial Sequence
  ENSG00000069431_86 (sequence is synthesized)
tttttccaagtggatatcaatgtgttccagcaccatttgtgggatagactttctgtttctcaagagattgcattggcacttatgtaaaaaaaaataaatcaaatgactatttaaatttaa

SEQ ID NO: 54931 - DNA, 80 bp, Artificial Sequence
  ENSG00000069482_0 (sequence is synthesized)
acaccgggcggcggacacgtggagggacccggcccgcgccttctgcccctgctgccggccgcgccatgcggtgagcgccc

SEQ ID NO: 54932 - DNA, 120 bp, Artificial Sequence
  ENSG00000069482_1 (sequence is synthesized)
cctgccgcccagacccgccaccgcacccggaccccgacgctccgaacccgggcgcagccgcagctcaagatggcccgaggcagcgccctcctgctcgcctccctcctcctcgccgcggcc

SEQ ID NO: 54933 - DNA, 120 bp, Artificial Sequence
  ENSG00000069482_2 (sequence is synthesized)
ctttctgcctctgcggggctctggtcgccggccaaggaaaaacgaggctggaccctgaacagcgcgggctacctgctgggcccacatgccgttggcaaccacaggtcattcagcgacaag

SEQ ID NO: 54934 - DNA, 120 bp, Artificial Sequence
  ENSG00000069482_3 (sequence is synthesized)
gcccgaagatgacatgaaaccaggaagctttgacaggtccatacctgaaaacaatatcatgcgcacaatcattgagtttctgtctttcttgcatctcaaagaggccggtgccctcgaccg

SEQ ID NO: 54935 - DNA, 120 bp, Artificial Sequence
  ENSG00000069482_4 (sequence is synthesized)
cctcctggatctccccgccgcagcctcctcagaagacatcgagcggtcctgagagcctcctgggcatgtttgtctgtgtgctgtaacctgaagtcaaaccttaagataatggataatctt

SEQ ID NO: 54936 - DNA, 120 bp, Artificial Sequence
  ENSG00000069482_5 (sequence is synthesized)
cggccaatttatgcagagtcagccattcctgttctctttgccttgatgttgtgttgttatcatttaagattttttttttttggtaattattttgagtggcaaaataaagaatagcaatta

SEQ ID NO: 54937 - DNA, 120 bp, Artificial Sequence
  ENSG00000069482_6 (sequence is synthesized)
cgagcttctgagctggtgcctgtggatgctcgacggtcccgcagctcccacaatgggatggccaagcagaccctgagatccacagcccccctttagtgaaacaggagggaggtcgctggg

SEQ ID NO: 54938 - DNA, 120 bp, Artificial Sequence
  ENSG00000069482_7 (sequence is synthesized)
cacagggagccgggaacgcctgccctccccgccatcgacggctcccgaggcctgaaccttcgctccagccccagcacaagccggccagggcgcagggccaagtgttgcccgccattcccc

SEQ ID NO: 54939 - DNA, 120 bp, Artificial Sequence
  ENSG00000069482_8 (sequence is synthesized)
cgtccctgcccgtcaccctctggggtctccagtgctgcggagctcagctggcttttgcagcgatttgggggagtctctcccgcgggatgagggggggctctccgccgcacccgcctatga

SEQ ID NO: 54940 - DNA, 120 bp, Artificial Sequence
  ENSG00000069482_9 (sequence is synthesized)
tggcccagaggacccgagctcgggtcactcccgtcgccctcggggctcggcgagggtgcaggaggcgggcgctgagccggtgacgcgactccgggcggctcccgggtgcgccgcatatat

SEQ ID NO: 54941 - DNA, 120 bp, Artificial Sequence
  ENSG00000069482_10 (sequence is synthesized)
tgacgcgactccgggcggctcccgggtgcgccgcatatatagcagcggcggcggtggcggcggccacaccgggcggcggacacgtggagggacccggcccgcgccttctgcccctgctgc

SEQ ID NO: 54942 - DNA, 120 bp, Artificial Sequence
  ENSG00000069493_0 (sequence is synthesized)
actcatagaaactggaggcaaaatgcatgacagtaacaatgtggagaaagacattacaccatctgaattgcctgcaaacccaggttgtctgcattcaaaagagcattctattaaagctac

SEQ ID NO: 54943 - DNA, 120 bp, Artificial Sequence
  ENSG00000069493_1 (sequence is synthesized)
cttaatttggcgcttatttttcttaatcatgtttctgacaatcatagtgtgtggaatggttgctgctttaagcgcaataagagctaactgccatcaagagccatcagtatgtcttcaagc

SEQ ID NO: 54944 - DNA, 120 bp, Artificial Sequence
  ENSG00000069493_2 (sequence is synthesized)
tgcatgcccagaaagctggattggttttcaaagaaagtgtttctatttttctgatgacaccaagaactggacatcaagtcagaggttttgtgactcacaagatgctgatcttgctcaggt

SEQ ID NO: 54945 - DNA, 120 bp, Artificial Sequence
  ENSG00000069493_3 (sequence is synthesized)
tgaaagcttccaggaactgaatttcctgttgagatataaaggcccatctgatcactggattgggctgagcagagaacaaggccaaccatggaaatggataaatggtactgaatggacaag

SEQ ID NO: 54946 - DNA, 120 bp, Artificial Sequence
  ENSG00000069493_4 (sequence is synthesized)
acagtttcctatcctgggagcaggagagtgtgcctatttgaatgacaaaggtgccagtagtgccaggcactacacagagaggaagtggatttgttccaaatcagatatacatgtctagat

SEQ ID NO: 54947 - DNA, 120 bp, Artificial Sequence
  ENSG00000069493_5 (sequence is synthesized)
gttacagcaaagccccaactaatctttagaagcatattggaactgataactccattttaaaatgagcaaagaatttatttcttataccaacaggtatatgaaaatatgctcaatatcact

SEQ ID NO: 54948 - DNA, 120 bp, Artificial Sequence
  ENSG00000069493_6 (sequence is synthesized)
aataactgggaaaatacaaatcaaaatcatagtaaaatattacctgttttcatggtgctaatattacctgttctcccactgctaatgacatacccgagactgagtaatttataaataaaa

SEQ ID NO: 54949 - DNA, 120 bp, Artificial Sequence
  ENSG00000069493_7 (sequence is synthesized)
actcatagttccacatggctggggaggtcttgcaatcatgacagaaggcaaatgggaagcaaagtcatgtcttatgtggtggcaggcagggggacttgtgcacaggaactcctatttata

SEQ ID NO: 54950 - DNA, 120 bp, Artificial Sequence
  ENSG00000069493_8 (sequence is synthesized)
ctcctatttatacaaccatcagatatcttgagacaagaacagtatggggctccctggtgtgattccgtcctgcgcggctgttctctggagcagcattcatttatcttcgtctgccttgtc

SEQ ID NO: 54951 - DNA, 120 bp, Artificial Sequence
  ENSG00000069493_9 (sequence is synthesized)
tcctacctaagtgtgtgtcgccacccgatggaagattcgatggacatggacatgagccccctgaggccccagaactatcttttcagttgtgaactaaaggccgacaaagatgatcacttt

SEQ ID NO: 54952 - DNA, 120 bp, Artificial Sequence
  ENSG00000069493_10 (sequence is synthesized)
aaggtggataatgatgaaaatgagaccagttatctttaagaacggtcagctcaggggctggtgcaaaggatgaactgcacattgttgaagcagaggccatgaatgacgaaggcagtccaa

SEQ ID NO: 54953 - DNA, 77 bp, Artificial Sequence
  ENSG00000069493_11 (sequence is synthesized)
ggtttctcttgggggctttgaaataacaccaccagtggacttaaggttgaagtgtggttcagggccagtgcatatta

SEQ ID NO: 54954 - DNA, 120 bp, Artificial Sequence
  ENSG00000069493_12 (sequence is synthesized)
gtggacagcacttagtagctgtgaaggaaggtgcagagtcagaagatgaagaagaggaggatgtgaaactcttaagtatatctggaaagcagtctgcccctggaggtgggcagaaaaaag

SEQ ID NO: 54955 - DNA, 120 bp, Artificial Sequence
  ENSG00000069493_13 (sequence is synthesized)
taaaacttgctgctgctgctgatgatgatgatgatgaagatgatgatgatgatgatgacgaggaagctgaagaaaaagcgccagtgaagaaatctatacgagatactccagccaaaaatg

SEQ ID NO: 54956 - DNA, 78 bp, Artificial Sequence
  ENSG00000069493_14 (sequence is synthesized)
gaatggaaaagactcaaaaccataggaaaaatctcctaaaacaccaaaaggatctagttctgtagaagacattaaagc

SEQ ID NO: 54957 - DNA, 120 bp, Artificial Sequence
  ENSG00000069493_15 (sequence is synthesized)
aagcaaaaatgcaagcaagtatagaaaaacgtggttctcttcccaaagtggaaaccaagttcatcaattatgtgaagaatttcttctggatgactgaccaagaggctattcaagatctct

SEQ ID NO: 54958 - DNA, 120 bp, Artificial Sequence
  ENSG00000069493_16 (sequence is synthesized)
gtggaggaagtctctttaagaaaatagtttaaacaatttgttaaaaattttccatcttatttcatttctgtaacagttgatatctggctgtcctttttatagtgcagagtgagaactttc

SEQ ID NO: 54959 - DNA, 120 bp, Artificial Sequence
  ENSG00000069493_17 (sequence is synthesized)
tttctgtaacagttgatatctggctgtcctttttatagtgcagagtgagaactttccctaccatgtttgataaatgttgtccaggttctattgccaagaatgtgttgtccaaaatgcctg

SEQ ID NO: 54960 - DNA, 120 bp, Artificial Sequence
  ENSG00000069493_18 (sequence is synthesized)
taagtatgtatgggatgctatgataggacatagtagtagcagtggtcagacatggaaatggtggggagacaaaagtatacacgtgaaataaaactcagtattttaataaagtaaaaaaaa

SEQ ID NO: 54961 - DNA, 120 bp, Artificial Sequence
  ENSG00000069493_19 (sequence is synthesized)
aaaaaaaggtatggggaaaactgcccccataaagcaattgtctccacctggccctgccctttgcatgtggagattattacaattcaaggtgaaatttgggtggagacacaaccaaaccat

SEQ ID NO: 54962 - DNA, 120 bp, Artificial Sequence
  ENSG00000069493_20 (sequence is synthesized)
atcagatggctatatcaaaaagacaagaaataacaagcattggtgagagtgtggagaagacggaacccttgtacacagttggtgggaacacagtttggtgcagccattatagaaaacgtc

SEQ ID NO: 54963 - DNA, 120 bp, Artificial Sequence
  ENSG00000069493_21 (sequence is synthesized)
ttattataacacatctttattcataatagccaagatacggaactaactgaagtgaccattaacagatgaatggataaagaaattgtcatatatataaaacacacacattatatacataca

SEQ ID NO: 54964 - DNA, 120 bp, Artificial Sequence
  ENSG00000069493_22 (sequence is synthesized)
tacatatatatatatatataaaaaatagaatattattcagccttgtaaaaagaaatcctgttatgttgggaacaagccccccaaaatctggccataaactcaccccaaaactggccataa

SEQ ID NO: 54965 - DNA, 120 bp, Artificial Sequence
  ENSG00000069493_23 (sequence is synthesized)
cctctatatttctgtgtgtgtgtctttagttcctctggcgctgctgggttaggatctacccgactgagctggtctcagcactgttatttgaaacaatgtaaataaacctatagggtttat

SEQ ID NO: 54966 - DNA, 120 bp, Artificial Sequence
  ENSG00000069493_24 (sequence is synthesized)
aacctatagggtttattatatatactaagtgaaataagccagacacagaaaaaaaatgttgcatgatctcacttatagtgaaacttaaaaaaaaaacccaaatacatagaaatagagtag

SEQ ID NO: 54967 - DNA, 120 bp, Artificial Sequence
  ENSG00000069493_25 (sequence is synthesized)
aatggtggttaccagagatgaggaaaatacagagacacaggtcaaaagatacagagttgcagttacaaagggtgagtatgtctagatatctaacatacagtatgaggactataatagtat

SEQ ID NO: 54968 - DNA, 120 bp, Artificial Sequence
  ENSG00000069493_26 (sequence is synthesized)
tgcactgtgtactgaaaacttgatgacagattttagatattcttaccacacagacaaaaagaaatgtaagtatgtgagatgaagcttatgttaattagattaagtgtatgtacataaaaa

SEQ ID NO: 54969 - DNA, 120 bp, Artificial Sequence
  ENSG00000069493_27 (sequence is synthesized)
catcacattatacacatcaaatatatacaataaaaaagcacattgggagatacatgataaatttctatctgcagttgctatttgcatttttaaaggatatttttattttttaaattttta

SEQ ID NO: 54970 - DNA, 120 bp, Artificial Sequence
  ENSG00000069493_28 (sequence is synthesized)
gctgacaactgtataattatggaatacaatgtgatgttctgatatatgtgtacactatggaatgattaaatcaaactaacatttcatcatctcacatacttatcattttctgtggtgaga

SEQ ID NO: 54971 - DNA, 120 bp, Artificial Sequence
  ENSG00000069493_29 (sequence is synthesized)
acatttgaaatttattctcttgacaattttgaaagatccaatacactattattaactatagtcactatgctgtgcaatagatctcaaaagcttattcctcttaactgaaacctactaccc

SEQ ID NO: 54972 - DNA, 120 bp, Artificial Sequence
  ENSG00000069493_30 (sequence is synthesized)
tgtgacatgtggggaacatctctctattccccagccccagtccctaaatgttgaatacacaatggggaaaaaatagtcttcaatgaatggtggtgggaaaattgtatatccacatgcaga

SEQ ID NO: 54973 - DNA, 120 bp, Artificial Sequence
  ENSG00000069493_31 (sequence is synthesized)
agaataaaattggacccttacctcctaccatatataaaaaccaactgaaaatcgattaaagacttaaactgtaaaactactaaaagaaaatatagggagaaagcttcacaacgttggtct

SEQ ID NO: 54974 - DNA, 120 bp, Artificial Sequence
  ENSG00000069493_32 (sequence is synthesized)
gggcaataatttttggatttgacctcaaaagtagatgcaaccacagtgaaaataaacaaatgaaattgcataaaataaaaaatgtttctgcacagcaaaggaaataattaatggagtaaa

SEQ ID NO: 54975 - DNA, 120 bp, Artificial Sequence
  ENSG00000069493_33 (sequence is synthesized)
gagacaacttacagattgggagaatatatttccaaactattgttggggctcagaaacggataccctaacatatagtgatttgacaggtggaactaaagaagactcgaggtctctctgacc

SEQ ID NO: 54976 - DNA, 120 bp, Artificial Sequence
  ENSG00000069493_34 (sequence is synthesized)
tcctcctcaacctctgtttcttaatcctctgttttcccagagcacaggaggaagttctctgaagttcctttatctgctttaagttcagactcaccaaataagaaaacagttaattctggt

SEQ ID NO: 54977 - DNA, 120 bp, Artificial Sequence
  ENSG00000069493_35 (sequence is synthesized)
gccttccatgggttttcattaactgaagtcatattgtaggaaaaagaatgaagtctcttaacccacctggatagatttttctcacaaaccattgtcttctctgcaagcccagtagacttt

SEQ ID NO: 54978 - DNA, 120 bp, Artificial Sequence
  ENSG00000069493_36 (sequence is synthesized)
gtcccaggccatttatgtgatcttcaccccattaagttctccccaaattatttactcttcccccaaaatcacccacacttccccatctccctctcccctaaggacaagggtatatcacca

SEQ ID NO: 54979 - DNA, 120 bp, Artificial Sequence
  ENSG00000069493_37 (sequence is synthesized)
tctataccccattgcttggtggggtgatcactctgattctctgcatgcatttttatagatttgtttgccatttatcctattaatctgcattctgtcaattgtggcaagttatcagcatat

SEQ ID NO: 54980 - DNA, 120 bp, Artificial Sequence
  ENSG00000069493_38 (sequence is synthesized)
tttttaacttttaattattcttaatggaaagacacttctgtatacactggaaatctcaggaaatttcttttttccttaagcttaattgaaatgtttacttttcagtaaaatttcaagctt

SEQ ID NO: 54981 - DNA, 120 bp, Artificial Sequence
  ENSG00000069493_39 (sequence is synthesized)
gagtaatgttcatgcctgcttttcattgaaatagaatgaaaaggttgcacaatattattttcatgaaattacttctagtataattctgaataaacactttgaaaggcagtgaactgtaaa

SEQ ID NO: 54982 - DNA, 120 bp, Artificial Sequence
  ENSG00000069493_40 (sequence is synthesized)
atagaaactggaggcaaaatgcatgacagtaacaatgtggagaaagacattacaccatctgaattgcctgcaaacccaggcacttctgtctcctgctgccatgtgaagaagaacacgttt

SEQ ID NO: 54983 - DNA, 120 bp, Artificial Sequence
  ENSG00000069493_41 (sequence is synthesized)
aatctggcagtaatatttgtatttgaatttactttgcattaaatctgaagtgttctctagttacatgctttaaaaaattctcattttaaggttagtcatgaaagaagatggtgccaactt

SEQ ID NO: 54984 - DNA, 120 bp, Artificial Sequence
  ENSG00000069493_42 (sequence is synthesized)
gtatgttgcaaaggtttcacaagttcctcgaatgaatccaagacctgtcatggtgaggtagactgactgtgaacttggctccaggcttatctatgtcattttcaaacactttcattttaa

SEQ ID NO: 54985 - DNA, 120 bp, Artificial Sequence
  ENSG00000069493_43 (sequence is synthesized)
gcaaaccatacaatatctttaagtctgttccttacctccacaacaaaattaaattgcacttgtcctcctgatttcacagggttgatgtgaggaacagaggttttgatgtatcagggaaag

SEQ ID NO: 54986 - DNA, 120 bp, Artificial Sequence
  ENSG00000069493_44 (sequence is synthesized)
ttttaaaatgggtaaagtttggcactagaaaatttaatctcaattgtatatttataggatcttcagattactaaaaagatttgagataatgctggaaaaattggattcacacaatttcac

SEQ ID NO: 54987 - DNA, 120 bp, Artificial Sequence
  ENSG00000069493_45 (sequence is synthesized)
tcaatgtttgtctgagagatgagacagttttgaaaagctactttattgtaatacattcatcaatattggaaatataactttatttaataaaaagagccccagactggacattggcaggtt

SEQ ID NO: 54988 - DNA, 120 bp, Artificial Sequence
  ENSG00000069493_46 (sequence is synthesized)
tgaaatgagttttttctcattagcttttgaccttggatgggatggtaagttttagaaatcagagaacatgtacatttatacattgttgtatctacactgccttgcacattgtgactgctt

SEQ ID NO: 54989 - DNA, 120 bp, Artificial Sequence
  ENSG00000069493_47 (sequence is synthesized)
cataaatatctagaattaacttttatttcttattttacaatacggaagtagtaaattttctctacctaattcttaaaatggttttttgtttgtttgtatttttgagagacagggtcttac

SEQ ID NO: 54990 - DNA, 120 bp, Artificial Sequence
  ENSG00000069493_48 (sequence is synthesized)
ccaggaactggtttcctatcctgggagcaggagagtgtgcctatttgaatgacaaaggtgccagtagtgccaggcactacacagagaggaagtggatttgttccaaatcagatatacatg

SEQ ID NO: 54991 - DNA, 120 bp, Artificial Sequence
  ENSG00000069493_49 (sequence is synthesized)
caaaaggggcccaccaaagctgccttgttccttctactatgtgaggacacatctagaagttaccatcaatgaaccagaaagtgggcccttaccaggcaccaaatctgccagcactctgat

SEQ ID NO: 54992 - DNA, 120 bp, Artificial Sequence
  ENSG00000069493_50 (sequence is synthesized)
agcttgcagggatccatgggagtagaacctactgattgagactgctgggctctcctccttggcttcagccccctttccatgggactggatggttctcgtgcctcactggagttccaggca

SEQ ID NO: 54993 - DNA, 120 bp, Artificial Sequence
  ENSG00000069493_51 (sequence is synthesized)
ccactggagtatgtaaaaactcctgcagctcagtgcctgcctaaacagccaccaatgggagtggctgtcattggtttgcccaggttgtctgcattcaaaagagcattctattaaagctac

SEQ ID NO: 54994 - DNA, 120 bp, Artificial Sequence
  ENSG00000069493_52 (sequence is synthesized)
agaaggctttatcataggtcctaggacaaactagaaatgatgaaatagtaaagaaaaagatatataaaatcttacagaaactggaactcagtcctaatgcaacttcatttctatttgata

SEQ ID NO: 54995 - DNA, 120 bp, Artificial Sequence
  ENSG00000069493_53 (sequence is synthesized)
cattcaaaagagcattctattaaagctaccttaatttggcgcttatttttcttaatcatgtttctgacaatcatagtgtgtggaatggttgctgctttaagcggtaagtgaactgtaatc

SEQ ID NO: 54996 - DNA, 120 bp, Artificial Sequence
  ENSG00000069509_0 (sequence is synthesized)
actccagaattggccgctggcggtatcatggcgacccggaacccccctccccaagactatgaaagtgatgacgactcttatgaagtgttggatttaactgagtatgcaagaagacaccag

SEQ ID NO: 54997 - DNA, 120 bp, Artificial Sequence
  ENSG00000069509_1 (sequence is synthesized)
tggtggaatcgagtgtttggccacagttcgggacctatggtagaaaaatactcagtagctacccagattgtaatgggtggcgttactggctggtgtgcaggatttctgttccagaaagtt

SEQ ID NO: 54998 - DNA, 120 bp, Artificial Sequence
  ENSG00000069509_2 (sequence is synthesized)
ggaaaacttgcagcaactgcagtaggtggtggctttcttcttcttcagattgctagtcatagtggctatgtgcagattgactggaagagagttgaaaaagatgtaaataaagcaaaaaga

SEQ ID NO: 54999 - DNA, 120 bp, Artificial Sequence
  ENSG00000069509_3 (sequence is synthesized)
cagattaagaaacgagcgaacaaagcagcacctgaaatcaacaatttaattgaagaagcaacagaatttatcaagcagaacattgtgatatccagtggatttgtgggaggctttttgctc

SEQ ID NO: 55000 - DNA, 120 bp, Artificial Sequence
  ENSG00000069509_4 (sequence is synthesized)
ctgccagagtctctagggcaaggagaaacaactagctggacaatactcaattcacaacttagcattttgccatctgaagcttggcaaactagtatctgctgtaaaacaacctatatggta

SEQ ID NO: 55001 - DNA, 120 bp, Artificial Sequence
  ENSG00000069509_5 (sequence is synthesized)
tgtgaaccgtagtattcctgagcaaaacgtggctttcatcgctttgtaaaaatttgcatctgtttagaaactagcctataaaatatcaccattggatgtagatatggagagaaaagaaat

SEQ ID NO: 55002 - DNA, 120 bp, Artificial Sequence
  ENSG00000069509_6 (sequence is synthesized)
atgttgggtttattgcttagcgaaatattctctttttatttaaataaaatgttcttcattgtgttttatggtatgtgtccataatttaaaattcatgttatagtttcagtattaaggctg

SEQ ID NO: 55003 - DNA, 120 bp, Artificial Sequence
  ENSG00000069509_7 (sequence is synthesized)
actttttttttttaagatatgtttgcaataagttaaaaaactgtaatacccttttgtggaaagctttagaaatgatataattattaaagatattaaacagactctgctgatgtaatatga

SEQ ID NO: 55004 - DNA, 120 bp, Artificial Sequence
  ENSG00000069509_8 (sequence is synthesized)
atgggggtcattgttgcagggtcctttactcttgaggccctggtctcaagaattgagttaaataaagtcagtagtttctatgtgggcatttttagctgtaggccagaactaatgagttgt

SEQ ID NO: 55005 - DNA, 120 bp, Artificial Sequence
  ENSG00000069509_9 (sequence is synthesized)
aacagatttttaaaaagatgtatagaacatttctgacttttgattgactctacatttattttttgcattttgctattttgaagactatgaaagtgatgacgactcttatgaagtgttgga

SEQ ID NO: 55006 - DNA, 120 bp, Artificial Sequence
  ENSG00000069535_0 (sequence is synthesized)
aatatagcggctcgccgaggcgctggtgcacgggggcagcgcgcagcaggccggcgggcaggcgggcgggctggctggcaggcaggactgggatcgaggcccagaaaacggagcagcggg

SEQ ID NO: 55007 - DNA, 120 bp, Artificial Sequence
  ENSG00000069535_1 (sequence is synthesized)
caccagggaggcctggaacggggcgagcgccatgagcaacaaatgcgacgtggtcgtggtggggggcggcatctcaggtatggcagcagccaaacttctgcatgactctggactgaatgt

SEQ ID NO: 55008 - DNA, 120 bp, Artificial Sequence
  ENSG00000069535_2 (sequence is synthesized)
ggttgttctggaagcccgggaccgtgtgggaggcaggacttacactcttaggaaccaaaaggttaaatatgtggaccttggaggatcctatgttggaccaacccagaatcgtatcttgag

SEQ ID NO: 55009 - DNA, 120 bp, Artificial Sequence
  ENSG00000069535_3 (sequence is synthesized)
attagccaaggagctaggattggagacctacaaagtgaatgaggttgagcgtctgatccaccatgtaaagggcaaatcataccccttcagggggccattcccacctgtatggaatccaat

SEQ ID NO: 55010 - DNA, 120 bp, Artificial Sequence
  ENSG00000069535_4 (sequence is synthesized)
tacctacttagatcataacaacttttggaggacaatggatgacatggggcgagagattccgagtgatgccccatggaaggctccccttgcagaagagtgggacaacatgacaatgaagga

SEQ ID NO: 55011 - DNA, 120 bp, Artificial Sequence
  ENSG00000069535_5 (sequence is synthesized)
gctactggacaagctctgctggactgaatctgcaaagcagcttgccactctctttgtgaacctgtgtgtcactgcagagacccatgaggtctctgctctctggttcctgtggtatgtgaa

SEQ ID NO: 55012 - DNA, 120 bp, Artificial Sequence
  ENSG00000069535_6 (sequence is synthesized)
gcagtgtggaggcacaacaagaatcatctcgacaacaaatggaggacaggagaggaaatttgtgggcggatctggtcaagtgagtgagcggataatggacctccttggagaccgagtgaa

SEQ ID NO: 55013 - DNA, 120 bp, Artificial Sequence
  ENSG00000069535_7 (sequence is synthesized)
gctggagaggcctgtgatctacattgaccagacaagagaaaatgtccttgtggagaccctaaaccatgagatgtatgaggctaaatatgtgattagtgctattcctcctactctgggcat

SEQ ID NO: 55014 - DNA, 120 bp, Artificial Sequence
  ENSG00000069535_8 (sequence is synthesized)
gaagattcacttcaatccccctctgccaatgatgagaaaccagatgatcactcgtgtgcctttgggttcagtcatcaagtgtatagtttattataaagagcctttctggaggaaaaagga

SEQ ID NO: 55015 - DNA, 120 bp, Artificial Sequence
  ENSG00000069535_9 (sequence is synthesized)
ttactgtggaaccatgattattgatggagaagaagctccagttgcctacacgttggatgataccaaacctgaaggcaactatgctgccataatgggatttatcctggcccacaaagccag

SEQ ID NO: 55016 - DNA, 120 bp, Artificial Sequence
  ENSG00000069535_10 (sequence is synthesized)
tctatgccaaggttctgggttccctagaagctctggagccagtgcattatgaagaaaagaactggtgtgaggagcagtactctgggggctgctacacaacttatttcccccctgggatcc

SEQ ID NO: 55017 - DNA, 120 bp, Artificial Sequence
  ENSG00000069535_11 (sequence is synthesized)
tgactcaatatggaagggttctacgccagccagtggacaggatttactttgcaggcaccgagactgccacacactggagcggctacatggagggggctgtagaggccggggagagagcag

SEQ ID NO: 55018 - DNA, 120 bp, Artificial Sequence
  ENSG00000069535_12 (sequence is synthesized)
cccgagagatcctgcatgccatggggaagattccagaggatgaaatctggcagtcagaaccagagtctgtggatgtccctgcacagcccatcaccaccacctttttggagagacatttgc

SEQ ID NO: 55019 - DNA, 120 bp, Artificial Sequence
  ENSG00000069535_13 (sequence is synthesized)
cctccgtgccaggcctgctcaggctgattggattgaccaccatcttttcagcaacggctcttggcttcctggcccacaaaagggggctacttgtgagagtctaaagagagagggtgtctg

SEQ ID NO: 55020 - DNA, 120 bp, Artificial Sequence
  ENSG00000069535_14 (sequence is synthesized)
taatcacactctcttcttactgtatttgggatatgagtttggggaaagagttgcagtaaagttccatgaagacaaatagtgtggagtgaggcggggagcatgaagataaatccaactctg

SEQ ID NO: 55021 - DNA, 120 bp, Artificial Sequence
  ENSG00000069535_15 (sequence is synthesized)
actgtaaaatacatggtatctctttctccgttgtggcccctgcttagtgtcccttacctggcttagcgttctgtttcaccagtttccaagtttattgccctcaaaatctttagaatagtt

SEQ ID NO: 55022 - DNA, 120 bp, Artificial Sequence
  ENSG00000069535_16 (sequence is synthesized)
aaattggcttgtttaaggttcttgctgccccacaacacaccttgcccatgcacaaggaatgaattttttcctaccattatggctttgtgcttgttcttcctcttacctgtaatagcctca

SEQ ID NO: 55023 - DNA, 120 bp, Artificial Sequence
  ENSG00000069535_17 (sequence is synthesized)
ccttccctagttctttgcattcgtccttagaatactgtattgttacagctgaaagacagtaaagaccatttagtcctcaccttctgttttagagttgagcaaactgaagcccacagaggt

SEQ ID NO: 55024 - DNA, 120 bp, Artificial Sequence
  ENSG00000069535_18 (sequence is synthesized)
ggaacttaattacctaagagccacaataagccactggtatctgggggactagaacacaaatccaacgcttttcccacctctttggatgttttccccaattatcctccttcactccctgtc

SEQ ID NO: 55025 - DNA, 120 bp, Artificial Sequence
  ENSG00000069535_19 (sequence is synthesized)
atagttaccgatggtgtcccgttgtgtgggtttactctgtgctaagttgtcttacacttctcaaatgctactcagtatatagccttaagtcttactgttttgtgcggtgtgtctccagct

SEQ ID NO: 55026 - DNA, 120 bp, Artificial Sequence
  ENSG00000069535_20 (sequence is synthesized)
gattttaacttttttgatggtagaaattttatctcttcttccttttgtatcctccattgtatcttcatacaaaggacagtacacacttgggtaattaaaaataaaagttgattgaccata

SEQ ID NO: 55027 - DNA, 120 bp, Artificial Sequence
  ENSG00000069535_21 (sequence is synthesized)
ggcctctattgacaaaccgtatccacttgtaagttgaatgtaacaataggcggtgcacgtgagccagcatggacttttctcattggctgttagcatgaggagcttgtctggcatccttgt

SEQ ID NO: 55028 - DNA, 120 bp, Artificial Sequence
  ENSG00000069535_22 (sequence is synthesized)
cagtctgccaactcccatgccagtttcttctggaaacaccctcacagggacacccagaaacaatgcttcacctgccatctaggtatcccaccatccagtcaagttgacacctaaaattaa

SEQ ID NO: 55029 - DNA, 120 bp, Artificial Sequence
  ENSG00000069667_0 (sequence is synthesized)
gtaccatagagttgctctgaaaacagaagatagagggagtctcggagctcgccatctccagcgatctctacattgggaaaaaacatggagtcagctccggcagcccccgaccccgccgcc

SEQ ID NO: 55030 - DNA, 120 bp, Artificial Sequence
  ENSG00000069667_1 (sequence is synthesized)
agcgagccaggcagcagcggcgcggacgcggccgccggctccagggagaccccgctgaaccaggaatccgcccgcaagagcgagccgcctgccccggtgcgcagacagagctattccagc

SEQ ID NO: 55031 - DNA, 120 bp, Artificial Sequence
  ENSG00000069667_2 (sequence is synthesized)
accagcagaggtatctcagtaacgaagaagacacatacatctcaaattgaaattattccatgcaagatctgtggagacaaatcatcaggaatccattatggtgtcattacatgtgaaggc

SEQ ID NO: 55032 - DNA, 120 bp, Artificial Sequence
  ENSG00000069667_3 (sequence is synthesized)
tgcaagggctttttcaggagaagtcagcaaagcaatgccacctactcctgtcctcgtcagaagaactgtttgattgatcgaaccagtagaaaccgctgccaacactgtcgattacagaaa

SEQ ID NO: 55033 - DNA, 120 bp, Artificial Sequence
  ENSG00000069667_4 (sequence is synthesized)
tgccttgccgtagggatgtctcgagatgctgtaaaatttggccgaatgtcaaaaaagcagagagacagcttgtatgcagaagtacagaaacaccggatgcagcagcagcagcgcgaccac

SEQ ID NO: 55034 - DNA, 120 bp, Artificial Sequence
  ENSG00000069667_5 (sequence is synthesized)
cagcagcagcctggagaggctgagccgctgacgcccacctacaacatctcggccaacgggctgacggaacttcacgacgacctcagtaactacattgacgggcacacccctgaggggagt

SEQ ID NO: 55035 - DNA, 120 bp, Artificial Sequence
  ENSG00000069667_6 (sequence is synthesized)
aaggcagactccgccgtcagcagcttctacctggacatacagccttccccagaccagtcaggtcttgatatcaatggaatcaaaccagaaccaatatgtgactacacaccagcatcaggc

SEQ ID NO: 55036 - DNA, 120 bp, Artificial Sequence
  ENSG00000069667_7 (sequence is synthesized)
ttctttccctactgttcgttcaccaacggcgagacttccccaactgtgtccatggcagaattagaacaccttgcacagaatatatctaaatcgcatctggaaacctgccaatacttgaga

SEQ ID NO: 55037 - DNA, 120 bp, Artificial Sequence
  ENSG00000069667_8 (sequence is synthesized)
gaagagctccagcagataacgtggcagacctttttacaggaagaaattgagaactatcaaaacaagcagcgggaggtgatgtggcaattgtgtgccatcaaaattacagaagctatacag

SEQ ID NO: 55038 - DNA, 120 bp, Artificial Sequence
  ENSG00000069667_9 (sequence is synthesized)
tatgtggtggagtttgccaaacgcattgatggatttatggaactgtgtcaaaatgatcaaattgtgcttctaaaagcaggttctctagaggtggtgtttatcagaatgtgccgtgccttt

SEQ ID NO: 55039 - DNA, 120 bp, Artificial Sequence
  ENSG00000069667_10 (sequence is synthesized)
gactctcagaacaacaccgtgtactttgatgggaagtatgccagccccgacgtcttcaaatccttaggttgtgaagactttattagctttgtgtttgaatttggaaagagtttatgttct

SEQ ID NO: 55040 - DNA, 120 bp, Artificial Sequence
  ENSG00000069667_11 (sequence is synthesized)
atgcacctgactgaagatgaaattgcattattttctgcatttgtactgatgtcagcagatcgctcatggctgcaagaaaaggtaaaaattgaaaaactgcaacagaaaattcagctagct

SEQ ID NO: 55041 - DNA, 120 bp, Artificial Sequence
  ENSG00000069667_12 (sequence is synthesized)
cttcaacacgtcctacagaagaatcaccgagaagatggaatactaacaaagttaatatgcaaggtgtctaccttaagagccttatgtggacgacatacagaaaagctaatggcatttaaa

SEQ ID NO: 55042 - DNA, 120 bp, Artificial Sequence
  ENSG00000069667_13 (sequence is synthesized)
gcaatatacccagacattgtgcgacttcattttcctccattatacaaggagttgttcacttcagaatttgagccagcaatgcaaattgatgggtaaatgttatcacctaagcacttctag

SEQ ID NO: 55043 - DNA, 120 bp, Artificial Sequence
  ENSG00000069667_14 (sequence is synthesized)
aatgtctgaagtacaaacatgaaaaacaaacaaaaaaattaaccgagacactttatatggccctgcacagacctggagcgccacacactgcacatcttttggtgatcggggtcaggcaaa

SEQ ID NO: 55044 - DNA, 120 bp, Artificial Sequence
  ENSG00000069667_15 (sequence is synthesized)
ggaggggaaacaatgaaaacaaataaaagttgaacttgtttttctcatgcatatgatttccattatgcctacagatatggaccctttttctgtcttgacttcttgatcattgacctctgt

SEQ ID NO: 55045 - DNA, 120 bp, Artificial Sequence
  ENSG00000069667_16 (sequence is synthesized)
ttacaacaggaggagggtactaaagtcggaggatttccttttcttgtagctcactgcccacagactttctacagagtcaccaatctgtcagtaacaacagagagtccagcaataatcggt

SEQ ID NO: 55046 - DNA, 120 bp, Artificial Sequence
  ENSG00000069667_17 (sequence is synthesized)
gactggtgtgcatagcggaggttgcggcattactttgcacaactagctctttgtttcatgaaggaagtttttattttttcaccgattattgccagtccgcaggatggcatgaaaagggtc

SEQ ID NO: 55047 - DNA, 120 bp, Artificial Sequence
  ENSG00000069667_18 (sequence is synthesized)
catagcagtagcaacaatagcattataatatattacagggtaaatgggcatgaagactatatatagctaaaagagatattgtttatatattgttttaagtaatataaaatgtagttactg

SEQ ID NO: 55048 - DNA, 120 bp, Artificial Sequence
  ENSG00000069667_19 (sequence is synthesized)
gtgtagcttttcctgttgaattgataaggcactttcattttgcacctttttctttaaattaaatgctagcgtgttcactgtcgtgtcgcatgtgcaccagaaacacaagtttaactgaga

SEQ ID NO: 55049 - DNA, 120 bp, Artificial Sequence
  ENSG00000069667_20 (sequence is synthesized)
aggcttggaaggtacgttgggaggtatttatgctgctgtttacaaaattatttttaagagactggctggtcatatctagaaatcaccacgttggattttttttttaacatgtgaatttgg

SEQ ID NO: 55050 - DNA, 120 bp, Artificial Sequence
  ENSG00000069667_21 (sequence is synthesized)
aattagaaacggaactctccctaaattatactttgctttttggtaagtttaatgatagatgtgtttatgcttcatacaaagttgaatgattgattggcgtggtggacatataccatcatg

SEQ ID NO: 55051 - DNA, 120 bp, Artificial Sequence
  ENSG00000069667_22 (sequence is synthesized)
ctcattttttttttttaaagctttttaaaatgccacctcatggaggcgagggggaggagaagctcattttacacaattcagtagttaaatatggactcggtctcaacttggaattcttat

SEQ ID NO: 55052 - DNA, 120 bp, Artificial Sequence
  ENSG00000069667_23 (sequence is synthesized)
gctttgagaacaaatcaacaaccagaatatttattggaatctagcttttattataagaaggacccaaagattatatcctgagcaaatgcacactccccatgtgaggacatgaagtattta

SEQ ID NO: 55053 - DNA, 120 bp, Artificial Sequence
  ENSG00000069667_24 (sequence is synthesized)
ctttgtgaatgtttatgttcttggtataatctaggaaccctatgagtttatctcagagtgaactaattctagatttgttgtcaatagatgctataattcaagaatgttgctctccatatt

SEQ ID NO: 55054 - DNA, 120 bp, Artificial Sequence
  ENSG00000069667_25 (sequence is synthesized)
tgaaaaacgatggataggagggtgagggaagcatacaatgttgaaccagtttctcttatttaaatattaaatactttaagcctttaaagtgaagttgatgctagctgcaaacatttactc

SEQ ID NO: 55055 - DNA, 120 bp, Artificial Sequence
  ENSG00000069667_26 (sequence is synthesized)
ttgtatttatcttcactaggaaactgtggactgtaatttattttattaaatatttagaagattatttggcttgtgtgttcaggtgagaaatactgagttgtttttgtttaatttcatggt

SEQ ID NO: 55056 - DNA, 120 bp, Artificial Sequence
  ENSG00000069667_27 (sequence is synthesized)
ttttttttttttaatgatccctagtgggggaaggggaaaggaatagtctgataaacagatgtgcatattttaaaaacaagtgaccttttgggaatgtaggcatttagacgatgattttag

SEQ ID NO: 55057 - DNA, 120 bp, Artificial Sequence
  ENSG00000069667_28 (sequence is synthesized)
tcgcactaggggtgggattcaaactactggtcaaagaccattttgtacagaaaagggaacatctccgatgggtgttaaggtaggagtttccatgcagccctttatgtctgagaaatagtc

SEQ ID NO: 55058 - DNA, 120 bp, Artificial Sequence
  ENSG00000069667_29 (sequence is synthesized)
tcctctgccattggggtccctgcggaatcttctacaggaattgcagctcttcacgtcatgctaggttaccagcatgggcttcccagagcacttcactctgtttctaactccactgacttt

SEQ ID NO: 55059 - DNA, 120 bp, Artificial Sequence
  ENSG00000069667_30 (sequence is synthesized)
tctgacttgtttcttgagggacttggaaaaggggaaggtattattcacacagatgtgtgtatgaagcctaaataacatccaactttttttccaaaaacatagtaagagtttaaccataaa

SEQ ID NO: 55060 - DNA, 120 bp, Artificial Sequence
  ENSG00000069667_31 (sequence is synthesized)
tagaagagtaatattcctttaaatttcttacaggcatgtaaaattttatgtgtttatagagagatgctaactgtcagcatatagtatttatattggggcaagaagggttaaatcaaatct

SEQ ID NO: 55061 - DNA, 120 bp, Artificial Sequence
  ENSG00000069667_32 (sequence is synthesized)
ttaatttaagtaagcatagttcctttaaagatcagtagtatttatactctgaaaagagtaccaagcttagttcagttatttattcatccattttttttctattgtttctcctctgggggg

SEQ ID NO: 55062 - DNA, 120 bp, Artificial Sequence
  ENSG00000069667_33 (sequence is synthesized)
aaatggtgttttgtttttgtttgagttttgtgttttagttttttggttttggttttgttttgtttttttgtcattcagattcactaaatttggggatggttttattaaagtatattaact

SEQ ID NO: 55063 - DNA, 120 bp, Artificial Sequence
  ENSG00000069667_34 (sequence is synthesized)
tctttttaaccaaagctttctgaatatgaccagcctcaggtgctagcgcattaaagagcaactaaacctaattccagtgtcgatttgtgaaataataaaagctaattgaatttctctaag

SEQ ID NO: 55064 - DNA, 120 bp, Artificial Sequence
  ENSG00000069667_35 (sequence is synthesized)
ggtgagagagaacataatgatgaacttaaaaagaaattccttttcccagaagggattctgcatgtacctacaaacaatcatgctctaaccacagtaatagtcatgccatggtgacattgc

SEQ ID NO: 55065 - DNA, 120 bp, Artificial Sequence
  ENSG00000069667_36 (sequence is synthesized)
ttttacggtaaaccaagataggtaatatgatgcttcttcccaggtgtttctgaaagaaaagcagcggtggagcttaagagccaagtccactgattgacataataggatggaattgtagac

SEQ ID NO: 55066 - DNA, 120 bp, Artificial Sequence
  ENSG00000069667_37 (sequence is synthesized)
agagacatgctccatgaaacaaggaaacaactgactactatttggatctaagttgggatctgatgttaaacaataaattcagtttaaaaaaaatatggagctcagaaaaggatgtgaaaa

SEQ ID NO: 55067 - DNA, 120 bp, Artificial Sequence
  ENSG00000069667_38 (sequence is synthesized)
actttgcattttcctttcttcattattacaaaaacacctatgtgatgacataaaatacttgggtgatatcagaacaattatccttaatagtttttataattaaagtttcctaaacttcag

SEQ ID NO: 55068 - DNA, 120 bp, Artificial Sequence
  ENSG00000069667_39 (sequence is synthesized)
tctccaatagtcttttaaggattggaaccacatcactgtcagccccgctgctacaatgcctttgtacaatttttttacataaggcaaataaggcttttgtacaaagcctgaataccttct

SEQ ID NO: 55069 - DNA, 120 bp, Artificial Sequence
  ENSG00000069667_40 (sequence is synthesized)
gttccaatggtgtccaaatggttattatattgtgaaaaacctggccttggtcacaatgcaaacaaaagtacagatgaaagtgctttttggacagtttgcaaattgtgttaaagctacgga

SEQ ID NO: 55070 - DNA, 120 bp, Artificial Sequence
  ENSG00000069667_41 (sequence is synthesized)
ttttttttaaagtgttcagcatcttaacgtgtattaaagctatggatttttttttaaagtcttcagcatcctaattcaccctttctaacttaagaaaaacatgacttaagacactgcttc

SEQ ID NO: 55071 - DNA, 120 bp, Artificial Sequence
  ENSG00000069667_42 (sequence is synthesized)
cttaagacactgcttctaagtttggttgttctttatagtgtggatacccagttatctgtgagcgtatgggggtgggctgagggtcaggtgaggaaggagtgtgtgtgtgtgtgtgtgtgt

SEQ ID NO: 55072 - DNA, 120 bp, Artificial Sequence
  ENSG00000069667_43 (sequence is synthesized)
gatttgcatgtgtatgatgtgtgtgcgtcggaccgcttctaggctactaagtgtcaatggaaaagaaaatgtattcaaaatacttaaatcaaaactagaagatggggaaaaaaagattta

SEQ ID NO: 55073 - DNA, 120 bp, Artificial Sequence
  ENSG00000069667_44 (sequence is synthesized)
ttctatacaaagccttgtctggaccactttagagagacttctatttttttaacccttctataaatatttgatggcacttgaaatattcctgcaataaaatgtgatttgtgtaaagaaaaa

SEQ ID NO: 55074 - DNA, 120 bp, Artificial Sequence
  ENSG00000069667_45 (sequence is synthesized)
gaaagtaatgtaattttctaaaaaaaaaaatacaaacaaacaaactttgtattattttcttgatggaatttgtctatctgtctttggaaaactttttatttcattgaatgtgccatagta

SEQ ID NO: 55075 - DNA, 120 bp, Artificial Sequence
  ENSG00000069667_46 (sequence is synthesized)
gaaatgtgtgtttttagttttagactaaggaatagctagttgttgtgttccgacattccaaaatgcaaaacaacctagtagtatctttcatgaaaaggtttaagtagtatgtaagcttct

SEQ ID NO: 55076 - DNA, 120 bp, Artificial Sequence
  ENSG00000069667_47 (sequence is synthesized)
ctcattgttgcttttttgcacatgttcttcattcctctctagtgcaatatgtacatagagcacttgcgggtgtaccttgatccctcagggaaaaatacatatttgtacagttttttgggg

SEQ ID NO: 55077 - DNA, 120 bp, Artificial Sequence
  ENSG00000069667_48 (sequence is synthesized)
tttgttttttggttttttttgttttgccttttgtttttggctaaggaatgtcgatcgaatcacttgttattgttgaggggcagccagataataatcctaaagccactgtttccaacattg

SEQ ID NO: 55078 - DNA, 120 bp, Artificial Sequence
  ENSG00000069667_49 (sequence is synthesized)
attgattgtttaaatcatatgtccttccaatgctattattttaagataataataaaaagttattttctgacagttctttgtgctgactggtgaaaaacaagggtaaataagcaccttata

SEQ ID NO: 55079 - DNA, 120 bp, Artificial Sequence
  ENSG00000069667_50 (sequence is synthesized)
attgacttactgtgaatgacaatccatcttggtatcaacgatagaagccctatcattttggagttggggttaagagtcagaaacaatgtgctcagggatctcctaaaactcttaaaacag

SEQ ID NO: 55080 - DNA, 120 bp, Artificial Sequence
  ENSG00000069667_51 (sequence is synthesized)
ggtggccagtactactgggacaaattgtgttttttattattaataataatgataataatactatccctccaaggcacaagtgaactatatagaactgcgtgtgtgtaaactctttactct

SEQ ID NO: 55081 - DNA, 120 bp, Artificial Sequence
  ENSG00000069667_52 (sequence is synthesized)
cgtctcattttgttgagtttagaacttgatgtgctcgtcagtcttgtgtttcaaaacactgaataacttccaaagcaaagttatgccagtgtgttcaaaagataaattaataatgtacca

SEQ ID NO: 55082 - DNA, 120 bp, Artificial Sequence
  ENSG00000069667_53 (sequence is synthesized)
gcaaagagcatcattcaaagtatagtccttgcatattccagttaccatttctctaataattaaaatattcatgataaatatatatatagcatcatatgttaaaaactatttcaaattcta

SEQ ID NO: 55083 - DNA, 120 bp, Artificial Sequence
  ENSG00000069667_54 (sequence is synthesized)
catattaaggatgaaaattttaaaatccagtaataagaggagagacctgcctatcagtacagtgatataggtaaaagatgaaatatgtttttaaaataccagcaattaactattgttttc

SEQ ID NO: 55084 - DNA, 120 bp, Artificial Sequence
  ENSG00000069667_55 (sequence is synthesized)
atgggttctcctctagaagcaaaccaaaaattccttcatggaaaacaattcttacttctacatgtgtagtttatatctgatgcattacaagagctaatgtttaaagacaaaacaaaacct

SEQ ID NO: 55085 - DNA, 120 bp, Artificial Sequence
  ENSG00000069667_56 (sequence is synthesized)
gcctgtatgacagcagcaactcgagccaacatttagtgttacatgttatatttttgaaataccgttttgttatcatattccacatattactttccataaagtcagagaagttcaatgtaa

SEQ ID NO: 55086 - DNA, 120 bp, Artificial Sequence
  ENSG00000069667_57 (sequence is synthesized)
ttgttggctctgattcttccaccttgggatacacattcacaagaagatttatatattttcttactatgatagaggaacataatctgggaaaacttcccatgtctgtaagatgaaaaggat

SEQ ID NO: 55087 - DNA, 120 bp, Artificial Sequence
  ENSG00000069667_58 (sequence is synthesized)
acctttaccatgttgtttttgataataaagaatatggaaaatggtagaaatctctcctctctatgtgtatttgtatatgtgtgtatacacacacacgttgacatttttacataacatgtg

SEQ ID NO: 55088 - DNA, 120 bp, Artificial Sequence
  ENSG00000069667_59 (sequence is synthesized)
attgccacttcttataaagttatgatatagaaccccatgaaaacaactttatattatagatcaaataatgtgcccagaaacgcaattgcaacagtaaatcttgatctattggtaagagtc

SEQ ID NO: 55089 - DNA, 120 bp, Artificial Sequence
  ENSG00000069667_60 (sequence is synthesized)
tatgatacaggtcttcattctatccctaaacataatgttagtaaagaggttccatcagattgtattatagagaccttcctattgctatttatttttaagagatgagaagactgactagca

SEQ ID NO: 55090 - DNA, 120 bp, Artificial Sequence
  ENSG00000069667_61 (sequence is synthesized)
atgtctccacagtgcaattggtttcacttctgggtctgtctgtctgtttgtgtaggtgagatcagtgttgtcaggctctcagaataatttttaaaagaatccagaagcctgacttcacac

SEQ ID NO: 55091 - DNA, 120 bp, Artificial Sequence
  ENSG00000069667_62 (sequence is synthesized)
caagtagccatcctagatgggcgggggggatctccatgttcaaccaaaccctcagaacttagagcaataaatacattcagtcatttatttataaatgaatgacagaatattcaatccaaa

SEQ ID NO: 55092 - DNA, 120 bp, Artificial Sequence
  ENSG00000069667_63 (sequence is synthesized)
tagaaacaaccttttgtcagtgatgcaacataacatggagtcttatattgagaaagtgaatatgaatattttaaatagatgcctaggaaatctgtgtttgctgtttacatttaatgtact

SEQ ID NO: 55093 - DNA, 120 bp, Artificial Sequence
  ENSG00000069667_64 (sequence is synthesized)
ttgccacattagcagtaccacacttcttttactttcatccttctaagaactaatgaaagatagcttgctattagctttgacatgttgcacatgccattatgttgttctctaagaacaact

SEQ ID NO: 55094 - DNA, 120 bp, Artificial Sequence
  ENSG00000069667_65 (sequence is synthesized)
aaattctctccagtgttcatgtgtgattcctttttcatcattattactttaatgtggatgaatactatttctaggaacttgattatcactgaacagattgcatatgtaaatgcagataat

SEQ ID NO: 55095 - DNA, 120 bp, Artificial Sequence
  ENSG00000069667_66 (sequence is synthesized)
tcttgagcaatatagtgaaaatgatttcacaaaaaaaatccatatgtactgtatacatcttcctgaatccaaaattctcctgttatccacacagtttgaaatctcatattaaacagtggt

SEQ ID NO: 55096 - DNA, 120 bp, Artificial Sequence
  ENSG00000069667_67 (sequence is synthesized)
aaatttttaaacattaggacattagctggctgcttctataaatgtacctgtattgtctgcctgctccttttgtggagatgtgtttttgtattggatgtttgggccaatgggaggcttcaa

SEQ ID NO: 55097 - DNA, 120 bp, Artificial Sequence
  ENSG00000069667_68 (sequence is synthesized)
gctacaacatattttcccactttaaataatatttaacatatgacaaaccccagacaaggcttttaatatgtataaagaactgcagtgttaggtggtttatttgcaaactgttttcagtgt

SEQ ID NO: 55098 - DNA, 120 bp, Artificial Sequence
  ENSG00000069667_69 (sequence is synthesized)
tgtccatttttatggcacctttaacaatattcttgtttccaaagtacaaaaaaaataggttaaataatctagccataactgaatgtcaagcaataaaacaaatgacttttgtgcatagac

SEQ ID NO: 55099 - DNA, 120 bp, Artificial Sequence
  ENSG00000069667_70 (sequence is synthesized)
ttaaaaaatacaaattttagacatctgcatgtaaatgcaatctcttgtttactgctttcttcaacttgagcaatcgattccttatttactattaacttaagaacttgtaacggcctgtaa

SEQ ID NO: 55100 - DNA, 120 bp, Artificial Sequence
  ENSG00000069667_71 (sequence is synthesized)
acattttctctcttactcttctttcaaatttacctgtccctgcttttgagtcataatatttaatgttgttctgcacatctctatacagttaactttttggctttcattctgtatagataa

SEQ ID NO: 55101 - DNA, 120 bp, Artificial Sequence
  ENSG00000069667_72 (sequence is synthesized)
gaaaatgttatattataaacagcctactcagtgcaaatatttatctgtttatcaaatccacaatatgctgtataataccggttttactatataatctattttagacatagctgtttagaa

SEQ ID NO: 55102 - DNA, 120 bp, Artificial Sequence
  ENSG00000069667_73 (sequence is synthesized)
ctagagtgtgctatttttgtgtttttctgatgtgtggtgctagacaagttacttttgtgaacaacaaaaattatcccttttattcctagacaataccacctttgggtcttgttaatttca

SEQ ID NO: 55103 - DNA, 120 bp, Artificial Sequence
  ENSG00000069667_74 (sequence is synthesized)
ctgagtataactatatatttgtatatatatacatatatatatatatctacctatgcccaactggcagctgtatcagagtgctggatttgggacatgcttttctctttaaatacataatat

SEQ ID NO: 55104 - DNA, 120 bp, Artificial Sequence
  ENSG00000069667_75 (sequence is synthesized)
cattatataaattattctagagtgtatttaattaggataaaattacttccttagtatggatatttgacatctatagggtgaatttgtttataaatatggctatatggaaacttattagca

SEQ ID NO: 55105 - DNA, 120 bp, Artificial Sequence
  ENSG00000069667_76 (sequence is synthesized)
tttactttatgtttgctacttggctttacagcatatctcctaagctgaaaaataatttgccaggccttcaagatcctaaagaaacttgtttaatggagtaatatacttttttttcttatt

SEQ ID NO: 55106 - DNA, 120 bp, Artificial Sequence
  ENSG00000069667_77 (sequence is synthesized)
aaggaattgtattactggcacctaacacagttgtattcttagctcctattatagataatgggcatttacataaaatatcctagatggcttgatggcagaataaacctttcccctcctacc

SEQ ID NO: 55107 - DNA, 120 bp, Artificial Sequence
  ENSG00000069667_78 (sequence is synthesized)
tgagtcatgagaaggatggagacgtcctctgccataacatgggccataaagcaaattcgacatgggatgttctgtttcagtatgacctcaaccagttccatgaactgagtgaaggacctt

SEQ ID NO: 55108 - DNA, 120 bp, Artificial Sequence
  ENSG00000069667_79 (sequence is synthesized)
cattttcaaagttatttaataagtagcttaattaagcctttctacccattctcccaagatctactggcattattgaaaagcaaagtttatcaaatatctaactaaggatgtagttaacct

SEQ ID NO: 55109 - DNA, 120 bp, Artificial Sequence
  ENSG00000069667_80 (sequence is synthesized)
tattaaatattgattagaattgttctgtaatattactgaatttgtaagatctttagcaaagatttttgagcaatttataaatgtagagcaaatgtttctgtttactgcactttttgtaac

SEQ ID NO: 55110 - DNA, 120 bp, Artificial Sequence
  ENSG00000069667_81 (sequence is synthesized)
tgaaggtgataaattctcaagccatgattattggcttccatgcactgcaatatttatccacaattctagacattttccatttttgtggaagagttgctgttaccttaattataaatgcaa

SEQ ID NO: 55111 - DNA, 120 bp, Artificial Sequence
  ENSG00000069667_82 (sequence is synthesized)
ttgtgtggttaatgagagctaatgctagtagttaaccttttaaagtggattggctacagttgagggagaaatctcttttaatataaatcacatcattccttaactgcctctcttggaaag

SEQ ID NO: 55112 - DNA, 120 bp, Artificial Sequence
  ENSG00000069667_83 (sequence is synthesized)
agattgaaaccttttttttaaagcacgatttagcatcctaagcttcctgagggtagagattgtatctttttgcgtctgcacaatggctagcacatgtcagcatttgacaattgttaaatg

SEQ ID NO: 55113 - DNA, 120 bp, Artificial Sequence
  ENSG00000069667_84 (sequence is synthesized)
ataacaagtgtgccccaattaaaacgtttttcctgggttgttttgttaaatttacaaagtaagccaagccttacggttaacattctcctctacaaccaagtattaaagccacatttaaaa

SEQ ID NO: 55114 - DNA, 120 bp, Artificial Sequence
  ENSG00000069667_85 (sequence is synthesized)
agaccacatgaaatgctgattctaattgtgtgtaggtcttgaggattaagcacacaaatttcacaaacttctgtttgagtaaacaaactcagccttctgtaaatatacatgcaagtttgg

SEQ ID NO: 55115 - DNA, 120 bp, Artificial Sequence
  ENSG00000069667_86 (sequence is synthesized)
aaacagtaatactgtacctataaatatatgctgtctgttttgtgtacagtatgtaaaaactccttttctgccacactaaaaatgcaagccatttatgggaatcctaaaactagtattgaa

SEQ ID NO: 55116 - DNA, 120 bp, Artificial Sequence
  ENSG00000069667_87 (sequence is synthesized)
ctaaaactttgctaatgatctttattagaggatcgtccaacttttcacttaccttgggttttcttttcaattcactcttacactagtctgcttatttccagctgtttattttattgagtc

SEQ ID NO: 55117 - DNA, 120 bp, Artificial Sequence
  ENSG00000069667_88 (sequence is synthesized)
agtcctgaatttaaaaaaaaaatattttgattcattttgtaaatacaagctgtacaaaaaagagagatttaatgttgtcttttaaatactccaattttcattctaatatgaatgttgtta

SEQ ID NO: 55118 - DNA, 120 bp, Artificial Sequence
  ENSG00000069667_89 (sequence is synthesized)
gtacttagaaactgtacctttaatattacattacctttattaaaagtgcattgaacacatcaattttagatgtgctttatgtactgttatcctataataaaacttcagcttctaatggaa

SEQ ID NO: 55119 - DNA, 120 bp, Artificial Sequence
  ENSG00000069667_90 (sequence is synthesized)
ggcgggcagctgcggcagctgctgctgtggctcgggcggcggcggcgcggcggcggcagagggggctccggggtcggaccatccgctctccctgcgctctccgcaccgcggcttaaatga

SEQ ID NO: 55120 - DNA, 120 bp, Artificial Sequence
  ENSG00000069667_91 (sequence is synthesized)
ccatctgtctgatcaccttggactccatagtacactggggcaaagcacagccccagtttctggaggcagatgggtaaccaggaaaaggcatgaatgagggggccccaggagacagtgact

SEQ ID NO: 55121 - DNA, 120 bp, Artificial Sequence
  ENSG00000069667_92 (sequence is synthesized)
tagagactgaggcaagagtgccgtggtcaatcatgggtcattgtcttcgaactggacaggccagaatgtctgccacacccacacctgcaggtgaaggagccagaagggatgaactttttg

SEQ ID NO: 55122 - DNA, 120 bp, Artificial Sequence
  ENSG00000069667_93 (sequence is synthesized)
ggattctccaaatactccatcagtgtatcctgtcttcaggtgatgcttttgttcttactggcgtctgttgttcctggaggcagaatggcaagccaccatattcacaaaaggaagataagg

SEQ ID NO: 55123 - DNA, 120 bp, Artificial Sequence
  ENSG00000069667_94 (sequence is synthesized)
ctccaaagcacaagcctcacaaatatcccgtgagtctcccacaggcttggggctctctgtttagaattagaacctaatcttcaaatatccctttaccctcttgcctcaaaaaggaaggca

SEQ ID NO: 55124 - DNA, 120 bp, Artificial Sequence
  ENSG00000069667_95 (sequence is synthesized)
gtgaagagcagcagcaaggcatcctggatgagcactggaaggggagaatgctcatgttttagtcgtgggctttccaccagttagctgtgcagctttgggcagatacttgaacttctctgg

SEQ ID NO: 55125 - DNA, 120 bp, Artificial Sequence
  ENSG00000069667_96 (sequence is synthesized)
tccctggcccggagggacccactctagaggtgggaccaacagaaaattgcaaactcctgagtggaaaccttcacgagggctccgcaaattggtgctctcttctcctggtttcatcccgca

SEQ ID NO: 55126 - DNA, 120 bp, Artificial Sequence
  ENSG00000069667_97 (sequence is synthesized)
aggtaagcctttttaattgttgttgtttctattaatgtttgttagaatatatctttgtgatttgtatgtctccacttatgtcttaaaattcaactccttagaattttgaatgataagaaa

SEQ ID NO: 55127 - DNA, 120 bp, Artificial Sequence
  ENSG00000069667_98 (sequence is synthesized)
ttacaggatagaagaaatattttggtgttaaattacaattaaagaagttatatatatttttactccttccttcaaaataataggagattacaaaaaggtatttgagcattgcttgtttat

SEQ ID NO: 55128 - DNA, 120 bp, Artificial Sequence
  ENSG00000069667_99 (sequence is synthesized)
ctctccagaaagacttcggaggagcttactccactccccggacggtcccagtggcttcgttctccacggcccagaagtgggccgtaccttccgattagagctggggcactctaggaaatg

SEQ ID NO: 55129 - DNA, 120 bp, Artificial Sequence
  ENSG00000069667_100 (sequence is synthesized)
cgggtgaccgtagctccccagaccaaacctgtcttttccaccaacgagctggcgcatttatcgcccccgagtgctccggcaagccagcgggagagtggcgtcgggttgcgagcctcttgc

SEQ ID NO: 55130 - DNA, 120 bp, Artificial Sequence
  ENSG00000069667_101 (sequence is synthesized)
atgagcaatctctgtggcaatcttttttaaaaaagagctaactccagacttctacaatgtccctgtcataagcttataaaaagacatctccagtaagtttaattggaatgtcactgagtt

SEQ ID NO: 55131 - DNA, 120 bp, Artificial Sequence
  ENSG00000069667_102 (sequence is synthesized)
gagtcttattgttagcacacataatgttaacacatctggcaaaattgtgggaaagctatcaggaagacctgagttccagtcctattgcctccacttgtccatattgttttgaatgtgtct

SEQ ID NO: 55132 - DNA, 120 bp, Artificial Sequence
  ENSG00000069667_103 (sequence is synthesized)
taatctctttgtcactcagttgcttcatttttaaagtgggtataacacctgatctttctactggttaggactattccaagaatagaaggagaacctgtacataaaaaagtccttacaaac

SEQ ID NO: 55133 - DNA, 120 bp, Artificial Sequence
  ENSG00000069667_104 (sequence is synthesized)
agaaaagtgctatttaactctaaatattatcagtattatttctgctatgactattttattatttctgaccttggtcatggggcaatgtgtacagcacatgcataatgtgcagatgagaaa

SEQ ID NO: 55134 - DNA, 120 bp, Artificial Sequence
  ENSG00000069667_105 (sequence is synthesized)
cagagatgtttatcccaataattcaagaccccccaagcccagattacctctgttattcaaatctcaatttattaagatttaaatcctcatgcttatattggaagggcctcgagacagctt

SEQ ID NO: 55135 - DNA, 120 bp, Artificial Sequence
  ENSG00000069667_106 (sequence is synthesized)
acaggataaaacagtgcaaaataaacaggagagaagctatttaaacatgcaggaggcctttgagacagccgattgctacaaccaggcctgaatcagccctaaggctttttgaggctgagg

SEQ ID NO: 55136 - DNA, 120 bp, Artificial Sequence
  ENSG00000069667_107 (sequence is synthesized)
caaaaaataaaatccacgaatttggttagctttcctttcatgaaattagaaaatacaatgttgtaaaatacaaaatcacctatagacacaaatgactactgagagacttcaaggaaatta

SEQ ID NO: 55137 - DNA, 120 bp, Artificial Sequence
  ENSG00000069667_108 (sequence is synthesized)
accttataatttccttaattcttcattttactgttagtcatggtaacatttgctaatttgtacatgtacagatgcttcatgttgatcccatcttagcaaagcttcagatttccgcatact

SEQ ID NO: 55138 - DNA, 120 bp, Artificial Sequence
  ENSG00000069667_109 (sequence is synthesized)
acagaaccatctatgccctttacttccaaaatctgccctccctcaaaattagttgactaattaaataaattaagcaaaatgagaggcccggtgtagtggtgtgtacctgtagtcccagct

SEQ ID NO: 55139 - DNA, 83 bp, Artificial Sequence
  ENSG00000069667_110 (sequence is synthesized)
gactccagcctgggcaatggagtgagaccctctctccaaaaaagtaaataaaaataatgaaaaaacaaaatgaaataatctgt

SEQ ID NO: 55140 - DNA, 120 bp, Artificial Sequence
  ENSG00000069667_111 (sequence is synthesized)
gtaaataaaaataatgaaaaaacaaaatgaaataatctgtctggtctgtgccatcccaggttataaggtgagagtgatctgcctgtgaccactgtcatcgcattgatttttggagctgat

SEQ ID NO: 55141 - DNA, 120 bp, Artificial Sequence
  ENSG00000069667_112 (sequence is synthesized)
ttggctgacgtggccaggtagccattgcttttcaccctcaccctgtcttgtgttctgcctcccaaatctgtgtccctggtagacatgtcatggcctttctcaatagagggtttatagact

SEQ ID NO: 55142 - DNA, 120 bp, Artificial Sequence
  ENSG00000069667_113 (sequence is synthesized)
gacagggttctaggcagcatcccggataccagttcaccatttgtcccttcattctgcccaaaaaactgatggcttcctctgaatctgtcagtaaggcaagtgattatctaggaattgaca

SEQ ID NO: 55143 - DNA, 120 bp, Artificial Sequence
  ENSG00000069667_114 (sequence is synthesized)
gaagtgattatctaggaatggagtctggggaaaggacaaggtgggggtaggggctacttcatatgaaataccccaacaatttggaagattaattaacaacatgctattgagtaaaaccta

SEQ ID NO: 55144 - DNA, 120 bp, Artificial Sequence
  ENSG00000069667_115 (sequence is synthesized)
agttgactgagtaccatggcacaaacaatgtgaattttctttttactcttaatatttatcatgacaaaaataaaagcgataagaaaacaaaaggtatctattattccaaagttgccattt

SEQ ID NO: 55145 - DNA, 120 bp, Artificial Sequence
  ENSG00000069667_116 (sequence is synthesized)
ttctagattcccttccagatcttgtctgcatacctcctcagtgccaaagtggttttcagttatctgtggctctgttcctctgctctgttgactttatccaatgaaaaccacaaaataaat

SEQ ID NO: 55146 - DNA, 120 bp, Artificial Sequence
  ENSG00000069667_117 (sequence is synthesized)
aaaacataattttattaacagattgggcctatgcctagccagggacttgaacaatgtttcatgtttatatttgatacatatactctttgttctccattataatttctctctgctataact

SEQ ID NO: 55147 - DNA, 120 bp, Artificial Sequence
  ENSG00000069667_118 (sequence is synthesized)
aacacttttattcctagttataaaaatagaagtcaaaagacttctatttttgccattttatgttaattatttatcatgttctaaccaggtaaaggtggttctatcatgatcaattgtaaa

SEQ ID NO: 55148 - DNA, 120 bp, Artificial Sequence
  ENSG00000069667_119 (sequence is synthesized)
taactttgctgagatagtgtaattaaacataagaaaaatttcacattagacatatcaaatagatatctaatgagagaagaaaggtgatcagtcatcttctgagctaatcattttgtgaac

SEQ ID NO: 55149 - DNA, 120 bp, Artificial Sequence
  ENSG00000069667_120 (sequence is synthesized)
gtattttaaattgcatttttaaattaacaagctgacaccataagaaactagaggacctgtttaattgctgaaataattattttggcacatagttgctaagcattgcacatgaacagcaaa

SEQ ID NO: 55150 - DNA, 120 bp, Artificial Sequence
  ENSG00000069667_121 (sequence is synthesized)
aatggtagaagctttagtagctctttctgtcatttctggctcttcctagttcatcctctccccaacccctttgctgtctgtagagagacagcaggtgccatgcttctgctctgactctgg

SEQ ID NO: 55151 - DNA, 120 bp, Artificial Sequence
  ENSG00000069667_122 (sequence is synthesized)
aaccagactgcccgagttgaaatcccagctctgctatttaccagcttgagcacctataccactgctctgtgcctcagttcccccatctgtaaaatgaggactgtaattgtaataacttca

SEQ ID NO: 55152 - DNA, 120 bp, Artificial Sequence
  ENSG00000069667_123 (sequence is synthesized)
tagggttgtcacatgcatttaaggaaagtacctggaagaatgccagatgcatcacaagcacttactaagtgttagctgttgttatcattgtcattactaggcagacttcttggtggcttg

SEQ ID NO: 55153 - DNA, 120 bp, Artificial Sequence
  ENSG00000069667_124 (sequence is synthesized)
gtaatgctgctctgtatagtcagatattatttctgggacatctatggatatagtcttgattgttgtgaccatttgcaatgtgttatgtagaatctgccaataaaaaagaatactatgagc

SEQ ID NO: 55154 - DNA, 120 bp, Artificial Sequence
  ENSG00000069667_125 (sequence is synthesized)
actcccttgggaccaagcactatgtaagcactgtaagggatccaaagacatagaagaccacatctttccctcaagcagtttatggtctagttgtagagatgaggcctgtgtagggaaagc

SEQ ID NO: 55155 - DNA, 120 bp, Artificial Sequence
  ENSG00000069667_126 (sequence is synthesized)
taaatagcaatgcaagaactaatatagagtaaggccacaatctatgatatacataagaagcacatataggctgggcacagtggctcacacctgtagccccagcagtttgggaggctgagc

SEQ ID NO: 55156 - DNA, 120 bp, Artificial Sequence
  ENSG00000069667_127 (sequence is synthesized)
tgagaggaagatgtgagcacaagagttcaagaccagcctgagcaacacagcaagactctgtctctacaaaaaaattaaaaataaaaaaaactggctaggcatggtggtgtttgcctgaag

SEQ ID NO: 55157 - DNA, 76 bp, Artificial Sequence
  ENSG00000069667_128 (sequence is synthesized)
tcccaactactcggcctggtgagctatgatggtgccactgcattccagcctggcaacagagcaagacccctgtctc

SEQ ID NO: 55158 - DNA, 120 bp, Artificial Sequence
  ENSG00000069667_129 (sequence is synthesized)
aaccacagccacatggctgatgtgctgcttgagggtgctgtgtcaagcagcaaatgggaaactgaagcaatccgtactacccatgctgtccttctgaagaagccaccaggctggaagtca

SEQ ID NO: 55159 - DNA, 120 bp, Artificial Sequence
  ENSG00000069667_130 (sequence is synthesized)
ccttcaagtatatactaatgtttcagctgtgatccatggtcaacagaggtcattttttttcaatctgtagtggtcggaagtggcacatctccacctgtttgtactgagtgtgtgttgaag

SEQ ID NO: 55160 - DNA, 120 bp, Artificial Sequence
  ENSG00000069667_131 (sequence is synthesized)
agagaggctagagacatattctgatgaattccagtgtttccagccatgaagctttagaaaaatcatgaaatctagccaggaggatcaattacttactgatcacccttatcctagatcctt

SEQ ID NO: 55161 - DNA, 120 bp, Artificial Sequence
  ENSG00000069667_132 (sequence is synthesized)
cttagaagagctggtatgtttctaggaaacatcaccttgatttcttttaagctttggtctccttttcctcaccactagttcacaaattaggccgtttcgtactcatgtctgtggagcaga

SEQ ID NO: 55162 - DNA, 120 bp, Artificial Sequence
  ENSG00000069667_133 (sequence is synthesized)
gcggccgccggctccagggagaccccgctgaaccaggaatccgcccgcaagagcgagccgcctgccccggtgcgcagacagagctattccagcaccagcagagattggcatgcttaaagg

SEQ ID NO: 55163 - DNA, 120 bp, Artificial Sequence
  ENSG00000069667_134 (sequence is synthesized)
gctgaccatctgatgtacaggaaatggaaactactctctgaaaagcaagtgatctcccagccgcacccatttaggagaccaggattttattttgatccacaggagactaaatgagttaga

SEQ ID NO: 55164 - DNA, 120 bp, Artificial Sequence
  ENSG00000069667_135 (sequence is synthesized)
atcaacagagtttgttacttaaatgacagtagggcggttcgcagaaggaacaccaaatagtctgactatctaccaagaagagagtgtttgaacacatgtgcaacctcttgactgtggtgt

SEQ ID NO: 55165 - DNA, 120 bp, Artificial Sequence
  ENSG00000069667_136 (sequence is synthesized)
gtggggcagcatttaataagaaagagctaaatctgcttgatgtgggaatatattcaacacatgttaagtgctaaaatattcaaagtaaataaatgtctatgtactccatattgttaaaga

SEQ ID NO: 55166 - DNA, 120 bp, Artificial Sequence
  ENSG00000069667_137 (sequence is synthesized)
ctggtctcaacttgagcacataaactgggatggagccacagccaagaactttattaatttaagggagttcttctcttttctgctccctgcattgagaaaagctcaaattgaaattattcc

SEQ ID NO: 55167 - DNA, 80 bp, Artificial Sequence
  ENSG00000069696_0 (sequence is synthesized)
gttgtccgcggtgctcagcgcccgcccgggcgcgccatggggaaccgcagcaccgcggacgcggacgggctgctggctgg

SEQ ID NO: 55168 - DNA, 120 bp, Artificial Sequence
  ENSG00000069696_1 (sequence is synthesized)
catctgcggggctggctgggcagggcgcggcggcgctggtggggggcgtgctgctcatcggcgcggtgctcgcggggaactcgctcgtgtgcgtgagcgtggccaccgagcgcgccctgc

SEQ ID NO: 55169 - DNA, 120 bp, Artificial Sequence
  ENSG00000069696_2 (sequence is synthesized)
accaactccttcatcgtgagcctggcggccgccgacctcctcctcgctctcctggtgctgccgctcttcgtctactccgaggtccagggtggcgcgtggctgctgagcccccgcctgtgc

SEQ ID NO: 55170 - DNA, 120 bp, Artificial Sequence
  ENSG00000069696_3 (sequence is synthesized)
gacgccctcatggccatggacgtcatgctgtgcaccgcctccatcttcaacctgtgcgccatcagcgtggacaggttcgtggccgtggccgtgccgctgcgctacaaccggcagggtggg

SEQ ID NO: 55171 - DNA, 120 bp, Artificial Sequence
  ENSG00000069696_4 (sequence is synthesized)
agccgccggcagctgctgctcatcggcgccacgtggctgctgtccgcggcggtggcggcgcccgtactgtgcggcctcaacgacgtgcgcggccgcgaccccgccgtgtgccgcctggag

SEQ ID NO: 55172 - DNA, 120 bp, Artificial Sequence
  ENSG00000069696_5 (sequence is synthesized)
tcatgctgctgctctactgggccacgttccgcggcctgcagcgctgggaggtggcacgtcgcgccaagctgcacggccgcgcgccccgccgacccagcggccctggcccgccttccccca

SEQ ID NO: 55173 - DNA, 80 bp, Artificial Sequence
  ENSG00000069696_6 (sequence is synthesized)
ccttccccggggtccctgcggccccgactgtgcgcccgccgcgcccagcctcccccaggacccctgcggccccgactgtg

SEQ ID NO: 55174 - DNA, 120 bp, Artificial Sequence
  ENSG00000069696_7 (sequence is synthesized)
cgactgtgcgccccccgcgcccggcctccccccggacccctgcggctccaactgtgctccccccgacgccgtcagagccgccgcgctcccaccccagactccaccgcagacccgcaggag

SEQ ID NO: 55175 - DNA, 120 bp, Artificial Sequence
  ENSG00000069696_8 (sequence is synthesized)
ccaagatcaccggccgggagcgcaaggccatgagggtcctgccggtggtggtcggggccttcctgctgtgctggacgcccttcttcgtggtgcacatcacgcaggcgctgtgtcctgcct

SEQ ID NO: 55176 - DNA, 120 bp, Artificial Sequence
  ENSG00000069696_9 (sequence is synthesized)
gctccgtgcccccgcggctggtcagcgccgtcacctggctgggctacgtcaacagcgccctcaaccccgtcatctacactgtcttcaacgccgagttccgcaacgtcttccgcaaggccc

SEQ ID NO: 55177 - DNA, 120 bp, Artificial Sequence
  ENSG00000069696_10 (sequence is synthesized)
tgcgtgcctgctgctgagccgggcacccccggacgccccccggcctgatggccaggcctcagggaccaaggagatggggagggcgcttttgtacgttaattaaacaaattccttcccaaa

SEQ ID NO: 55178 - DNA, 90 bp, Artificial Sequence
  ENSG00000069696_11 (sequence is synthesized)
gcgaaactccgtctcaaaaaacaaaaagaaaaacaaatcagccgggggtggtggcgcgcggtccagggtggcgcgtggctgctgagcccc

SEQ ID NO: 55179 - DNA, 120 bp, Artificial Sequence
  ENSG00000069702_0 (sequence is synthesized)
aatcgagggtttcggggacgccgagcggcactttcctcttcccagcgagtgaaggagggcagtcggcggctctcgcgccccggccactttccctgcgcgattcccggagctccctgcagg

SEQ ID NO: 55180 - DNA, 120 bp, Artificial Sequence
  ENSG00000069702_1 (sequence is synthesized)
aggtgagagtccccagcgggtccggatggcgtagttttgccgcggcgcagcagctgccggagctcgccgccgccgagcgctgggcggggaaacttgccgccgctttcctccaacttgctg

SEQ ID NO: 55181 - DNA, 120 bp, Artificial Sequence
  ENSG00000069702_2 (sequence is synthesized)
cgggtggatctccgctggacacaccgcctccgaggcagtttgaaaattgcaaggagggactttaagactacttctgatttgcaaagattgtctgtgctctgagcaggctgaagtgactgg

SEQ ID NO: 55182 - DNA, 120 bp, Artificial Sequence
  ENSG00000069702_3 (sequence is synthesized)
acgagacgcactgttggagaaataaaaatgacttcccattatgtgattgccatctttgccctgatgagctcctgtttagccactgcaggtccagagcctggtgcactgtgtgaactgtca

SEQ ID NO: 55183 - DNA, 120 bp, Artificial Sequence
  ENSG00000069702_4 (sequence is synthesized)
cctgtcagtgcctcccatcctgtccaggccttgatggagagcttcactgttttgtcaggctgtgccagcagaggcacaactgggctgccacaggaggtgcatgtcctgaatctccgcact

SEQ ID NO: 55184 - DNA, 120 bp, Artificial Sequence
  ENSG00000069702_5 (sequence is synthesized)
gcaggccaggggcctggccagctacagagagaggtcacacttcacctgaatcccatctcctcagtccacatccaccacaagtctgttgtgttcctgctcaactccccacaccccctggtg

SEQ ID NO: 55185 - DNA, 120 bp, Artificial Sequence
  ENSG00000069702_6 (sequence is synthesized)
tggcatctgaagacagagagacttgccactggggtctccagactgtttttggtgtctgagggttctgtggtccagttttcatcagcaaacttctccttgacagcagaaacagaagaaagg

SEQ ID NO: 55186 - DNA, 120 bp, Artificial Sequence
  ENSG00000069702_7 (sequence is synthesized)
aacttcccccatggaaatgaacatctgttaaattgggcccgaaaagagtatggagcagttacttcattcaccgaactcaagatagcaagaaacatttatattaaagtgggggaagatcaa

SEQ ID NO: 55187 - DNA, 120 bp, Artificial Sequence
  ENSG00000069702_8 (sequence is synthesized)
gtgttccctccaaagtgcaacatagggaagaattttctctcactcaattaccttgctgagtaccttcaacccaaagcagcagaagggtgtgtgatgtccagccagccccagaatgaggaa

SEQ ID NO: 55188 - DNA, 120 bp, Artificial Sequence
  ENSG00000069702_9 (sequence is synthesized)
gtacacatcatcgagctaatcacccccaactctaacccctacagtgctttccaggtggatataacaattgatataagaccttctcaagaggatcttgaagtggtcaaaaatctcatcctg

SEQ ID NO: 55189 - DNA, 120 bp, Artificial Sequence
  ENSG00000069702_10 (sequence is synthesized)
atcttgaagtgcaaaaagtctgtcaactgggtgatcaaatcttttgatgttaagggaagcctgaaaattattgctcctaacagtattggctttggaaaagagagtgaaagatctatgaca

SEQ ID NO: 55190 - DNA, 120 bp, Artificial Sequence
  ENSG00000069702_11 (sequence is synthesized)
atgaccaaatcaataagagatgacattccttcaacccaagggaatctggtgaagtgggctttggacaatggctatagtccaataacttcatacacaatggctcctgtggctaatagattt

SEQ ID NO: 55191 - DNA, 120 bp, Artificial Sequence
  ENSG00000069702_12 (sequence is synthesized)
catcttcggcttgaaaataatgcagaggagatgggagatgaggaagtccacactattcctcctgagctacggatcctgctggaccctggtgccctgcctgccctgcagaacccgcccatc

SEQ ID NO: 55192 - DNA, 120 bp, Artificial Sequence
  ENSG00000069702_13 (sequence is synthesized)
cggggaggggaaggccaaaatggaggccttccgtttcctttcccagatatttccaggagagtctggaatgaagagggagaagatgggctccctcggccaaaggaccctgtcattcccagc

SEQ ID NO: 55193 - DNA, 120 bp, Artificial Sequence
  ENSG00000069702_14 (sequence is synthesized)
atacaactgtttcctggtctcagagagccagaagaggtgcaagggagcgtggatattgccctgtctgtcaaatgtgacaatgagaagatgatcgtggctgtagaaaaagattcttttcag

SEQ ID NO: 55194 - DNA, 120 bp, Artificial Sequence
  ENSG00000069702_15 (sequence is synthesized)
gccagtggctactcggggatggacgtcaccctgttggatcctacctgcaaggccaagatgaatggcacacactttgttttggagtctcctctgaatggctgcggtactcggccccggtgg

SEQ ID NO: 55195 - DNA, 120 bp, Artificial Sequence
  ENSG00000069702_16 (sequence is synthesized)
tcagcccttgatggtgtggtctactataactccattgtgatacaggttccagcccttggggacagtagtggttggccagatggttatgaagatctggagtcaggtgataatggatttccg

SEQ ID NO: 55196 - DNA, 120 bp, Artificial Sequence
  ENSG00000069702_17 (sequence is synthesized)
ggagatatggatgaaggagatgcttccctgttcacccgacctgaaatcgtggtgtttaattgcagccttcagcaggtgaggaaccccagcagcttccaggaacagccccacggaaacatc

SEQ ID NO: 55197 - DNA, 120 bp, Artificial Sequence
  ENSG00000069702_18 (sequence is synthesized)
accttcaacatggagctatacaacactgacctctttttggtgccctcccagggcgtcttctctgtgccagagaatggacacgtttatgttgaggtatctgttactaaggctgaacaagaa

SEQ ID NO: 55198 - DNA, 120 bp, Artificial Sequence
  ENSG00000069702_19 (sequence is synthesized)
ctgggatttgccatccaaacgtgctttatctctccatattcgaaccctgataggatgtctcattacaccattattgagaatatttgtcctaaagatgaatctgtgaaattctacagtccc

SEQ ID NO: 55199 - DNA, 120 bp, Artificial Sequence
  ENSG00000069702_20 (sequence is synthesized)
aagagagtgcactttcctatcccgcaagctgacatggataagaagcgattcagctttgtcttcaagcctgtcttcaacacctcactgctctttctacagtgtgagctgacgctgtgtacg

SEQ ID NO: 55200 - DNA, 120 bp, Artificial Sequence
  ENSG00000069702_21 (sequence is synthesized)
aagatggagaagcacccccagaagttgcctaagtgtgtgcctcctgacgaagcctgcacctcgctggacgcctcgataatctgggccatgatgcagaataagaagacgttcactaagccc

SEQ ID NO: 55201 - DNA, 120 bp, Artificial Sequence
  ENSG00000069702_22 (sequence is synthesized)
cttgctgtgatccaccatgaagcagaatctaaagaaaaaggtccaagcatgaaggaaccaaatccaatttctccaccaattttccatggtctggacaccctaaccgtgatgggcattgcg

SEQ ID NO: 55202 - DNA, 120 bp, Artificial Sequence
  ENSG00000069702_23 (sequence is synthesized)
tttgcagcctttgtgatcggagcactcctgacgggggccttgtggtacatctattctcacacaggggagacagcaggaaggcagcaagtccccacctccccgccagcctcggaaaacagc

SEQ ID NO: 55203 - DNA, 120 bp, Artificial Sequence
  ENSG00000069702_24 (sequence is synthesized)
agtgctgcccacagcatcggcagcacgcagagcacgccttgctccagcagcagcacggcctagcccaacccagcccaacccggcccaacccagcccagcccagctcagctcagctactgc

SEQ ID NO: 55204 - DNA, 120 bp, Artificial Sequence
  ENSG00000069702_25 (sequence is synthesized)
caagggcaggaccaatggctgagcctcgtgtccagactcagagggctggattttggttcccttgtaaagacagagtgaatttcagtataaagatcacccgttgtattcaccccacaccca

SEQ ID NO: 55205 - DNA, 120 bp, Artificial Sequence
  ENSG00000069702_26 (sequence is synthesized)
gggttttcaatgtgaaacacatgccagtttttaaaatgctgctttgtccaggtgagaacatccataatttggggccctgagttttacccagactcaaggagttggtaaagggttaatagc

SEQ ID NO: 55206 - DNA, 120 bp, Artificial Sequence
  ENSG00000069702_27 (sequence is synthesized)
cagatagtagaaccagtgaggagatgcggccaaagattctttatatctgaaccaagatgtaaaacaagaaatgctttgaggctttctaagcgatcctcctgtctaatttgcacctttgtc

SEQ ID NO: 55207 - DNA, 120 bp, Artificial Sequence
  ENSG00000069702_28 (sequence is synthesized)
tggatgcacacttctgaccttgctgccacaacctgtggggtctgatgtgtcccttgatgggtgctgccctcagggactgcaccctgacaagtgttaaggcaacattcctttcttgtgccc

SEQ ID NO: 55208 - DNA, 120 bp, Artificial Sequence
  ENSG00000069702_29 (sequence is synthesized)
tgggccaaaaccaatgctgatgaccttatcagcttcctgtttcttcccatacttgcatacaccactgcaaaatgtcttaatgcaaattttgtatttcttacaggcctacagaaattgaaa

SEQ ID NO: 55209 - DNA, 120 bp, Artificial Sequence
  ENSG00000069702_30 (sequence is synthesized)
atgaccaaaatcaggaaccacagatttgtgcccattcctaatattttgttctgcaaattaatgtataatttgaggtgaaattcagttataaagtcaaggacgaatttgcacagtgatata

SEQ ID NO: 55210 - DNA, 120 bp, Artificial Sequence
  ENSG00000069702_31 (sequence is synthesized)
tttctatgtgtatgcaagtacaagtatataatatgtcacctggcacattcattttctcagttgaagaagagaaaatttgaaaatgtccttatgcttttagagttgcaacttaagtatatt

SEQ ID NO: 55211 - DNA, 120 bp, Artificial Sequence
  ENSG00000069702_32 (sequence is synthesized)
tggtagggtgagtgtttccactcaaaatatgtcaacttaaaaaaaaataggccctttcataaaaaccaaactgtagcaagatgcaaatgcatggcaaatcctgtcggtctccagttggtt

SEQ ID NO: 55212 - DNA, 120 bp, Artificial Sequence
  ENSG00000069702_33 (sequence is synthesized)
atctgaatagtgtcaccaattccaccaagacagtgctgagattggaaaagggcactcatttggattgccttacttctcttgccttaaatatatcccatatatttaatatgtcaaaaaggg

SEQ ID NO: 55213 - DNA, 120 bp, Artificial Sequence
  ENSG00000069702_34 (sequence is synthesized)
cttgaggtgaatttcattaaatggaataatatgatgccactttgcagctaaaataagctcagtgatacctccttgttaaaaaaaaaaaaaaaaaaaaagaatgccaggggggaattatca

SEQ ID NO: 55214 - DNA, 120 bp, Artificial Sequence
  ENSG00000069702_35 (sequence is synthesized)
tgctaaattattttactgctgaagatagcttcattgcaaattattctttttccagaatttcccccaaacaacttagaattccataagtagaacaagatagattctacccccaaaatattc

SEQ ID NO: 55215 - DNA, 120 bp, Artificial Sequence
  ENSG00000069702_36 (sequence is synthesized)
ataagcaaatcccactgcccttaaaataaggaagttatgcctggttgtctgtgaatggaacctcagtaggtaatcctgatgaagcttaaaaccttagggcagtgtctacatgggaaacaa

SEQ ID NO: 55216 - DNA, 120 bp, Artificial Sequence
  ENSG00000069702_37 (sequence is synthesized)
gtatgtggaaattgacaatcatttttaccaaatcgttgagtaataatatgacttacctgatagatatacacattcaataaggaacatttttttttttcaataaggaacattttaactaaa

SEQ ID NO: 55217 - DNA, 120 bp, Artificial Sequence
  ENSG00000069702_38 (sequence is synthesized)
acattactttagggctgagatttccaggctatctacattgatctactgaaaaatttctagatttccatatacaaacgaagaagacatgagtttagagaatttttttcctttaattttttt

SEQ ID NO: 55218 - DNA, 120 bp, Artificial Sequence
  ENSG00000069702_39 (sequence is synthesized)
ttaacagaagggtatcagagtggaggacctagattacgctacctgtgtttgaaaatattgcgctttgcctaaccttcggtggaatgtattgtttcagcatattctatgtataaaaaagtt

SEQ ID NO: 55219 - DNA, 120 bp, Artificial Sequence
  ENSG00000069702_40 (sequence is synthesized)
taaagatgtcttcaaagaagactagagtctttaagtcacttatagctatattttactacaaaatttgtgtataaagatatatttaagtgttttagataaatttaagttactccatatgaa

SEQ ID NO: 55220 - DNA, 120 bp, Artificial Sequence
  ENSG00000069702_41 (sequence is synthesized)
atgtttaatttcagctactgtgaattctttcgatcagtcctttgcttttttaaaaaatcttttccatcgtgttaaaaagaaaattagctattaggagatattaaaagattgatgtcttag

SEQ ID NO: 55221 - DNA, 120 bp, Artificial Sequence
  ENSG00000069702_42 (sequence is synthesized)
aaggacagggttaaaaccttctgtaatatatttaaatatatatttttaagagagatgctacattgccaatgattttataaataatttaaaattaatttacaaatttatagatgcaaacca

SEQ ID NO: 55222 - DNA, 120 bp, Artificial Sequence
  ENSG00000069702_43 (sequence is synthesized)
aaagatctttttaaaagagagagagaggaaaaaaatcaccttttatttgtttgggtctcattgtcagaattattattcagatcaagaaatctgtgtcgataaaacctaatctcatattgg

SEQ ID NO: 55223 - DNA, 120 bp, Artificial Sequence
  ENSG00000069702_44 (sequence is synthesized)
agagtgaatgtcgttaagtatttctgaaatgtttctaaaaaatgaacatgaaaaaaataaggtattttctccctagcttctcattacagtatttctaattgcttcacactttacagtttt

SEQ ID NO: 55224 - DNA, 120 bp, Artificial Sequence
  ENSG00000069702_45 (sequence is synthesized)
aatacaaagtacaagctctacttttataacgtgtactacaagtttctttaaaagtattgttgtatttcagctgaactcttgtatctgcagtcttttgttatttctgcaggctacaccctt

SEQ ID NO: 55225 - DNA, 120 bp, Artificial Sequence
  ENSG00000069702_46 (sequence is synthesized)
aatttgcagaggccattttgttgtttgtttgatgctgaagctgttgttaaaatgccccaaactccaaggcagattgtctgtataatacgctatagcttttcaccatgtggtgtttaccag

SEQ ID NO: 55226 - DNA, 120 bp, Artificial Sequence
  ENSG00000069702_47 (sequence is synthesized)
ctgttactctgtattttaaaaagccagagatttcttctgtctaaactgtttctatagcattttctaaacaaaaaaaatggtttttttctttgccttgtaataagattgtaaatccatttc

SEQ ID NO: 55227 - DNA, 120 bp, Artificial Sequence
  ENSG00000069702_48 (sequence is synthesized)
ctgcttgtgttcttagtgggcatgattgtgagtgtgtgtggggtgctcacacgcgtgccagtctttttgtactgtaactacctcatggtttgaatgatgattgtactgctggttgtgtta

SEQ ID NO: 55228 - DNA, 120 bp, Artificial Sequence
  ENSG00000069702_49 (sequence is synthesized)
acagagcacattttgttgggtgagtcctatgtgatttttttcatgtttgttttatctgggggttgttcatgaaactgacagatgtttttctaaaaaggactattatcagtttccaaatac

SEQ ID NO: 55229 - DNA, 120 bp, Artificial Sequence
  ENSG00000069702_50 (sequence is synthesized)
aatacttctctcttctggtttttcctgaatgagcctgattttgttgctggttttcatcatctatgagggtaaaacgagtacccttaaaatccctgtggccagtttgaacacccctgttgt

SEQ ID NO: 55230 - DNA, 120 bp, Artificial Sequence
  ENSG00000069702_51 (sequence is synthesized)
attcttttctctgttcagtgtgtcagctattttgtgaagatgcttagatgtatagttttgataaccacagttttaaatcttttatctgtgcataataaaaagatatatatcagttattaa

SEQ ID NO: 55231 - DNA, 75 bp, Artificial Sequence
  ENSG00000069702_52 (sequence is synthesized)
gtagctgggactacaggcgcacgccactacacccggccaatttttgtatttatttattttattttcagtctcgat

SEQ ID NO: 55232 - DNA, 90 bp, Artificial Sequence
  ENSG00000069702_53 (sequence is synthesized)
aagaattatctttaaaatttatttctttaagatttgtagctactaagaaagaaaggagctttttttccttgggccttcaaactgaaagaa

SEQ ID NO: 55233 - DNA, 120 bp, Artificial Sequence
  ENSG00000069702_54 (sequence is synthesized)
gaaaggagctttttttccttgggccttcaaactgaaagaaccgcatgagcctgaagctgcgcatggtcttaacatcaggctgtgcaggaagaagctatctgcagatggatgccagcacac

SEQ ID NO: 55234 - DNA, 120 bp, Artificial Sequence
  ENSG00000069702_55 (sequence is synthesized)
acaaggaagcagagctctggcaacattgagtcaaagcaaggacacaacatcagagggacggcagagaatccttgtgtgtagatctttggtggcagtttgaaaattgcaaggagggacttt

SEQ ID NO: 55235 - DNA, 120 bp, Artificial Sequence
  ENSG00000069702_56 (sequence is synthesized)
agactctatctcaaaaaaaaaaaaaaaaagccaataacaaatatgtcatttgcaaaagtatttgctataaaaatctttattagatagtcactgccctcagtctagtttgcttgagtgcta

SEQ ID NO: 55236 - DNA, 120 bp, Artificial Sequence
  ENSG00000069702_57 (sequence is synthesized)
tagatagtcactgccctcagtctagtttgcttgagtgctattttgcatcttttaagataaatttcttacattacgcttttcagaaattctctgtttaattttagtgtctgtttgtttatg

SEQ ID NO: 55237 - DNA, 120 bp, Artificial Sequence
  ENSG00000069702_58 (sequence is synthesized)
gaggatgaggggcaaattacagagtccctgctgacttactgagtgagcctctgctgaaactccagaaattgtgtaagtggaccccttccccacaaaagattcagaaagcagcgcactata

SEQ ID NO: 55238 - DNA, 120 bp, Artificial Sequence
  ENSG00000069702_59 (sequence is synthesized)
gcatctgaagacagagagacttgccactggggtctccagactgtttttggttacccagggagcctaaaggagctgtggaaagcgaatgggtctcttgactctcagtccacgatgcataag

SEQ ID NO: 55239 - DNA, 120 bp, Artificial Sequence
  ENSG00000069702_60 (sequence is synthesized)
aggtttgttcagacctggcttaagcccctggattaacgcagcacagaccctcagacccactgcagctgtgggcagggtgacgcaagctcattaaatattcccacaagcctcgtgccgctt

SEQ ID NO: 55240 - DNA, 120 bp, Artificial Sequence
  ENSG00000069702_61 (sequence is synthesized)
ctttaacatttgctgaaatagcatattgtttcagagaggtttttccttatcaaaattattatataggcaggaggcactatagttcttgtgaaccaattcactaatttagggaatctaata

SEQ ID NO: 55241 - DNA, 120 bp, Artificial Sequence
  ENSG00000069702_62 (sequence is synthesized)
tttcgaagggaaaaaaatagagacagatcctctttgtggtggttgaatttttaagttaacggagaagatttccatatgatcagagttgatgtggaattatggtgacagaaatgttcgact

SEQ ID NO: 55242 - DNA, 120 bp, Artificial Sequence
  ENSG00000069702_63 (sequence is synthesized)
agctttttaatcaactggccagacactagaaacatgaagacttggaagaggggagatagttgcaactttctggcatgtaggtcttaactttgcctttgtcttccattcacagtgctttcc

SEQ ID NO: 55243 - DNA, 120 bp, Artificial Sequence
  ENSG00000069702_64 (sequence is synthesized)
tcagtgttttgttggatgaaataacgaatgaaagagaaagttcattcctactatttttacatttacatatttggtataaattgggtttcacaaaagtataatttgccataaacagtggaa

SEQ ID NO: 55244 - DNA, 120 bp, Artificial Sequence
  ENSG00000069764_0 (sequence is synthesized)
aggcgtgagtcaccgcgcccggccaaataaaataaaatgttaaagcaaattcaggactacccctcctccaagtcttctgttccctttgggcgcccaggtgagcgggggaggggctggggg

SEQ ID NO: 55245 - DNA, 120 bp, Artificial Sequence
  ENSG00000069764_1 (sequence is synthesized)
ggtgagcgggggaggggctgggggagtaataacatcaaaagagcgccttttcctcccttattccgaggagacttccctgggcctgactcccggtcctgtccccagcgccccgcggcctct

SEQ ID NO: 55246 - DNA, 120 bp, Artificial Sequence
  ENSG00000069764_2 (sequence is synthesized)
ggagccccttcagtgaccaagatacagagatcaggacgcctttgcgccgccccaggtgcccgcccctagctggctctgcttgggccgcgagggaaggtgaggtcgggggcggagccgggg

SEQ ID NO: 55247 - DNA, 120 bp, Artificial Sequence
  ENSG00000069764_3 (sequence is synthesized)
cgtgacagccggggtgtgtgtccgccgggcttggtgcctccggtggccctgcagcaccgtcccacctctgccaccctccgatggggccgctacctgtgtgcctgccaatcatgctgctcc

SEQ ID NO: 55248 - DNA, 120 bp, Artificial Sequence
  ENSG00000069764_4 (sequence is synthesized)
ccccgggtccggcgaggcctccaggatattacgtgtgcaccggcgtgggatcctggaactggcaggaactgtgggttgtgttggtccccgaacccccatcgcctatatgaaatatggttg

SEQ ID NO: 55249 - DNA, 86 bp, Artificial Sequence
  ENSG00000069764_5 (sequence is synthesized)
ttggtccccgaacccccatcgcctatatgaaatatggttgcttttgtggcttgggaggccatggccagccccgcgatgccattgac

SEQ ID NO: 55250 - DNA, 120 bp, Artificial Sequence
  ENSG00000069764_6 (sequence is synthesized)
agtgcgtcaatcagagcgtcctgtgcggaccggcagagaacaaatgccaagaactgttgtgcaagtgtgaccaggagattgctaactgcttagcccaaactgagtacaacttaaagtacc

SEQ ID NO: 55251 - DNA, 120 bp, Artificial Sequence
  ENSG00000069764_7 (sequence is synthesized)
aaagtacctcttctacccccagttcctatgtgagccggactcgcccaagtgtgactgactaccttgacttgaaatgctcttttgcacaaggaaataaagcgtcctctcagtaatgaacaa

SEQ ID NO: 55252 - DNA, 120 bp, Artificial Sequence
  ENSG00000069764_8 (sequence is synthesized)
tgggctcaagcgatcctcgcacctcagcctcctgagtagctggaatcacaggaccggcagagaacaaatgccaagaactgttgtgcaagtgtgaccaggagattgctaactgcttagccc

SEQ ID NO: 55253 - DNA, 120 bp, Artificial Sequence
  ENSG00000069812_0 (sequence is synthesized)
actcgtctggcaccagcccgggccgcgcccgggacctcatttcggacctcggtttccctttgcgtggggctcgcagctgccaccgcttccccgcggagcatggggctgcctcgccgggca

SEQ ID NO: 55254 - DNA, 120 bp, Artificial Sequence
  ENSG00000069812_1 (sequence is synthesized)
ggggacgcggcggagctgcgcaagagcctgaagccgctgctggagaagcgccggcgcgcgcgcatcaaccagagcctgagccagcttaaggggctcatcctgccgctgctgggccgggag

SEQ ID NO: 55255 - DNA, 120 bp, Artificial Sequence
  ENSG00000069812_2 (sequence is synthesized)
aactccaactgctcgaagctagagaaggcagacgtcctggaaatgaccgtgcgcttcctgcaggagctgcctgcgtcctcatggcccacggcagcgcccctgccttgcgacagctaccgc

SEQ ID NO: 55256 - DNA, 120 bp, Artificial Sequence
  ENSG00000069812_3 (sequence is synthesized)
gagggctacagcgcctgtgtggcgcgcctggcccgcgtgctgcccgcctgccgtgtcctggagcccgccgtgagcgcgcgcctgctggagcacctgtggcggagagcggccagcgccacc

SEQ ID NO: 55257 - DNA, 120 bp, Artificial Sequence
  ENSG00000069812_4 (sequence is synthesized)
cctgctggagcacctgtggcggagagcggccagcgccaccctggacggcgggcgcgctggggattccagtggcccgtctgcccccgccccagcgcccgcgtctgccccagagcccgcatc

SEQ ID NO: 55258 - DNA, 120 bp, Artificial Sequence
  ENSG00000069812_5 (sequence is synthesized)
ggcctctggcggccgtggtagcccctcggccgatccacagaccctgccgactgcttgggaccttggggcactggacaggttgaagctcttggtggcggctgctgttcccatcattagggg

SEQ ID NO: 55259 - DNA, 120 bp, Artificial Sequence
  ENSG00000069812_6 (sequence is synthesized)
ccagcccagtacccacacccaggccggaagccggctgtttgtgactggcgtggcagactgaaagccctggggctggggctcggctcagggaataaaaggagcgtccctgcttcaccccca

SEQ ID NO: 55260 - DNA, 120 bp, Artificial Sequence
  ENSG00000069812_7 (sequence is synthesized)
acttggctggagaagaaaggacaagaggcagcagggtgaagaagaagccccccatcccagctggtggagatagttctggaactggaccccgcagctgcgtgggcagccgacacacccacc

SEQ ID NO: 55261 - DNA, 120 bp, Artificial Sequence
  ENSG00000069812_8 (sequence is synthesized)
ccagcactggcaccagaccagagccagagccaggacctgggcaaagtgcagccgtgcaccctgcctggtcactgctctcccagccctgcctgggcctacctcctgcccagctctgcttgg

SEQ ID NO: 55262 - DNA, 120 bp, Artificial Sequence
  ENSG00000069812_9 (sequence is synthesized)
gaccctctgggcatgcagcagcagtagcctaagggctctggtcacttccagggctctacagggcagcagagcagagcaaaagggtgcatatgctgggagctgtcacctccactcctaggc

SEQ ID NO: 55263 - DNA, 120 bp, Artificial Sequence
  ENSG00000069812_10 (sequence is synthesized)
ttttctgcctagagcagaattataggggcagtatacatccaggggtctgtgcggtggggctgggggattccttaagtgactttgggaaggatttgttttcccgagcatcaatttcacacc

SEQ ID NO: 55264 - DNA, 120 bp, Artificial Sequence
  ENSG00000069812_11 (sequence is synthesized)
tgggcattgcaccccaggctatgcagtctttcagtgtgaggaaggggcagaacaagaatgaggcggccccgtggcctcaaggaagcttgtggctttggaggatctgactccagcagagtc

SEQ ID NO: 55265 - DNA, 120 bp, Artificial Sequence
  ENSG00000069812_12 (sequence is synthesized)
tgtgccaatgtggggtgagcagggcccctgccatggagcagcaggaatttgagggatggagcaggttaaagaatgggaaacatcttcacttgtttttttttcttgcaaactactccctgc

SEQ ID NO: 55266 - DNA, 89 bp, Artificial Sequence
  ENSG00000069812_13 (sequence is synthesized)
catcttcacttgtttttttttcttgcaaactactccctgctactcattgagactggttactggaagcaacttgttaagatttttctttc

SEQ ID NO: 55267 - DNA, 77 bp, Artificial Sequence
  ENSG00000069812_14 (sequence is synthesized)
gccattgcttttttatttctttcttttccatggaggcctagagtccctgtgaaggctaggaaggggctgctgatccc

SEQ ID NO: 55268 - DNA, 120 bp, Artificial Sequence
  ENSG00000069812_15 (sequence is synthesized)
ctagagtccctgtgaaggctaggaaggggctgctgatcccaggagtgcccacgaggagtggggggcactgttggcccataatcaggcaaacacccatcatttcatgggggattcatgaaa

SEQ ID NO: 55269 - DNA, 120 bp, Artificial Sequence
  ENSG00000069812_16 (sequence is synthesized)
ccccgagtccccaaatcagcagcctgtgctagggaccagagcaccgggggcaagaagacagaaccaatgtgggagtggggatggtcactaaatctgactgtgccacacaagcccatgatg

SEQ ID NO: 55270 - DNA, 120 bp, Artificial Sequence
  ENSG00000069812_17 (sequence is synthesized)
accttggcactggtttgggtggcaggatatgaaggaagctgtaggcattattgaaaaaatcattgttcagccaacagggtgaggctcccagcaaggccgtgccatcttcccacctccctg

SEQ ID NO: 55271 - DNA, 120 bp, Artificial Sequence
  ENSG00000069812_18 (sequence is synthesized)
tgcccagagggttagactgtaagctcccggagggcgaggctggggctgagcgtgcctccacgtccccaaggcacagggtgcacagtgggtgctcactgaatatagtggactagtgagcag

SEQ ID NO: 55272 - DNA, 120 bp, Artificial Sequence
  ENSG00000069812_19 (sequence is synthesized)
aggatgagaggactaccctgtaatgagccttggacagtctggcatttgccttaactcccactcccatgccctgggatcactgttggatatttactccatgaggacaaatactggggaggt

SEQ ID NO: 55273 - DNA, 120 bp, Artificial Sequence
  ENSG00000069812_20 (sequence is synthesized)
gtggagaggagggagggcaggttcctcttactttcacccattgctgagaatgagcgcctgttggcactgcctttgtgagcctccgggagcaggtaacctgcggcccaagcccgcctagga

SEQ ID NO: 55274 - DNA, 120 bp, Artificial Sequence
  ENSG00000069812_21 (sequence is synthesized)
ctccacatcaggcaggcacaggactggccccttgtcctcataaaaactctcagtacagcttaaactctgtaagatctaaccagccaggaggaccctcgcttcctctccgccatgcttgcc

SEQ ID NO: 55275 - DNA, 120 bp, Artificial Sequence
  ENSG00000069812_22 (sequence is synthesized)
acctcttgcttctgagagtccatctcagttcgcagttctgtgacttgcattgacctggctccaatcaagctacaactcaagcagtcacggggagaaggattgtagatgggccagtgactc

SEQ ID NO: 55276 - DNA, 120 bp, Artificial Sequence
  ENSG00000069812_23 (sequence is synthesized)
acagggtcaggcactcgggggagcctgagtcaggaggtcagtgggccctggaagggagggggcaagcctgggtgggtaaggttctgggccccaggcaagaaggcagagtttctccgcagg

SEQ ID NO: 55277 - DNA, 120 bp, Artificial Sequence
  ENSG00000069812_24 (sequence is synthesized)
ggtgtgtgcaagagctagctgcgcagaaggtctccgctggctctccaagccgggcttgtgaaataggaacgccaacatcctcctccacaggcagtggcaggcacctcctcctcaggtgcc

SEQ ID NO: 55278 - DNA, 120 bp, Artificial Sequence
  ENSG00000069812_25 (sequence is synthesized)
ccccaagccctatctgatgggcaaaggtgaacgcagggcggtgggcttttcctgtgcagagggagactgattcaaagggtcatttatgacctttcacaagtcccacatcctgcccaatgg

SEQ ID NO: 55279 - DNA, 120 bp, Artificial Sequence
  ENSG00000069812_26 (sequence is synthesized)
ccaggtcttgggatgctgttgcaagatggttctgtgactccatgtgactgtctgatgattgccccagctggggaaaaggctcccatgtctctttctcataaaaccagtgggcaaggccgg

SEQ ID NO: 55280 - DNA, 73 bp, Artificial Sequence
  ENSG00000069812_27 (sequence is synthesized)
tcccatgtctctttctcataaaaccagtgggcaaggccgggcgcagtggctcacgtctgtaatgccagcactt

SEQ ID NO: 55281 - DNA, 80 bp, Artificial Sequence
  ENSG00000069812_28 (sequence is synthesized)
atggtgaaaccccgtctctacaaaaatatggaaattagctgggcatgacgggataatcagttgaacccaggaggtggagg

SEQ ID NO: 55282 - DNA, 120 bp, Artificial Sequence
  ENSG00000069812_29 (sequence is synthesized)
ccatctcaaaaacaaacaaacaaaaaactagcgggtgaaatgattcagtgacctaaggacagccagagcactaagctgctgggaacccatctgtgctgaaatgtagatttcccaggaaac

SEQ ID NO: 55283 - DNA, 120 bp, Artificial Sequence
  ENSG00000069812_30 (sequence is synthesized)
gtgctgaaatgtagatttcccaggaaactcaggcttgggacaggcgcctacctgctcctcgggcaccaggtgattaggagaggtcgaatctcatttccacgtgagtgaggataaagactg

SEQ ID NO: 55284 - DNA, 120 bp, Artificial Sequence
  ENSG00000069812_31 (sequence is synthesized)
ggctgccaaggaggactcctcataaacattgacaaattgctctgccccgcctgtgatcccagacgactcctgcagtctgggatcctgagtgtcctgtgggttcatctcggatgggcgctg

SEQ ID NO: 55285 - DNA, 120 bp, Artificial Sequence
  ENSG00000069812_32 (sequence is synthesized)
cataaacagcctgcagggaacgtctgggagaaccagcttcacaacagatataataaggaagaagtttgaaatattgcaagaattgcgaaagtgtgacacacagatacaaagtgggcacat

SEQ ID NO: 55286 - DNA, 120 bp, Artificial Sequence
  ENSG00000069812_33 (sequence is synthesized)
gctcgtgggaaaatgttgccaatagacttgcttgactctggagttaccccgaaccttcaatttgtttaaaaaaaaaaaaaggcaatatcttgacgtgcaataaagtgaactgcaataaaa

SEQ ID NO: 55287 - DNA, 120 bp, Artificial Sequence
  ENSG00000069812_34 (sequence is synthesized)
tgacttgcattgacctggctccaatcaagctacaactcaagcagtcacggggagaaggattgtagatgggccagtgactcacagggtcaggcactcgggggagcctgagtcaggaggatg

SEQ ID NO: 55288 - DNA, 120 bp, Artificial Sequence
  ENSG00000069812_35 (sequence is synthesized)
ccatctccgcccagagctgactccggatctgccccagtgacaataacaagataaatgccttccattctcttcgtacttacaggatgtaatccacatatttacacagtgtttcatttgcgg

SEQ ID NO: 55289 - DNA, 120 bp, Artificial Sequence
  ENSG00000069812_36 (sequence is synthesized)
cgcggggacactcgtgcgactggggcaaggtgcccaggggcttctctcctaatttgcctcacgtaacagttgagaccccagagggcagcaaaactgggttcgaattggagagccgtccag

SEQ ID NO: 55290 - DNA, 120 bp, Artificial Sequence
  ENSG00000069812_37 (sequence is synthesized)
ctatctgggaagcctgtgcaattcagatgtccaggcccacttccagaagttctcattccctgtgcttgagtcaatggccgcagaccatacacctgagagcaagttaatctgctctaacaa

SEQ ID NO: 55291 - DNA, 120 bp, Artificial Sequence
  ENSG00000069812_38 (sequence is synthesized)
agatatcacatctaagaatggtggttggcaggggctggggggtgggaagaatggggagttggtgcttcatgggtacagagattcagttttgcaagaggaaaagagctctggagatggatg

SEQ ID NO: 55292 - DNA, 120 bp, Artificial Sequence
  ENSG00000069812_39 (sequence is synthesized)
attcagttttgcaagaggaaaagagctctggagatggatgctgctgatggctacaccgcaatgtgaatgtgcatgatgcttaaatatggttaagatgggccgggcgcggtggctcacgcc

SEQ ID NO: 55293 - DNA, 120 bp, Artificial Sequence
  ENSG00000069849_0 (sequence is synthesized)
agtcggctcgagtactccccgtaacgaggaggtgttctcggccgtcccacccttcactgccgtctccgggctgcgccgccggagccgggacgcgcctccgcagccctcgccgcctccatc

SEQ ID NO: 55294 - DNA, 120 bp, Artificial Sequence
  ENSG00000069849_1 (sequence is synthesized)
cccgcggccgcagctcctctcgccgtccgcgcgcacaccatgacgaagaacgagaagaagtccctcaaccagagcctggccgagtggaagctcttcatctacaacccgaccaccggagaa

SEQ ID NO: 55295 - DNA, 120 bp, Artificial Sequence
  ENSG00000069849_2 (sequence is synthesized)
ttcctggggcgcaccgccaagagctggggtttgatcttgctcttctacctagttttttatgggttcctggctgcactcttctcattcacgatgtgggttatgcttcagactctcaacgat

SEQ ID NO: 55296 - DNA, 120 bp, Artificial Sequence
  ENSG00000069849_3 (sequence is synthesized)
gaggttccaaaataccgtgaccagattcctagcccaggactcatggtttttccaaaaccagtgaccgcattggaatatacattcagtaggtctgatccaacttcgtatgcagggtacatt

SEQ ID NO: 55297 - DNA, 120 bp, Artificial Sequence
  ENSG00000069849_4 (sequence is synthesized)
gaagaccttaagaagtttctaaaaccatatactttagaagaacagaagaacctcacagtctgtcctgatggagcactttttgaacagaagggtccagtttatgttgcatgtcagtttcct

SEQ ID NO: 55298 - DNA, 120 bp, Artificial Sequence
  ENSG00000069849_5 (sequence is synthesized)
atttcattacttcaagcatgcagtggtatgaatgatcctgattttggctattctcaaggaaacccttgtattcttgtgaaaatgaacagaataattggattaaagcctgaaggagtgcca

SEQ ID NO: 55299 - DNA, 120 bp, Artificial Sequence
  ENSG00000069849_6 (sequence is synthesized)
aggatagattgtgtttcaaagaatgaagatataccaaatgtagcagtttatcctcataatggaatgatagacttaaaatatttcccatattatgggaaaaaactgcatgttgggtatcta

SEQ ID NO: 55300 - DNA, 120 bp, Artificial Sequence
  ENSG00000069849_7 (sequence is synthesized)
gaaagaagtaacagttgagtgcaagattgatggatcagccaacctaaaaagtcaggatgatcgtgacaagtttttgggacgagttatgttcaaaatcacagcacgtgcatagtatgagta

SEQ ID NO: 55301 - DNA, 120 bp, Artificial Sequence
  ENSG00000069849_8 (sequence is synthesized)
ggatatctccacagagtaaatgttgtgttgtctgtcttcattttgtaacagctggaccttccattctagaattatgagaccaccttggagaaaggtgtgtggtacatgacattgggttac

SEQ ID NO: 55302 - DNA, 120 bp, Artificial Sequence
  ENSG00000069849_9 (sequence is synthesized)
atcataacgtgcttccagatcatagtgttcagtgtcctctgaagtaactgcctgttgcctctgctgccctttgaaccagtgtacagtcgccagatagggaccggtgaacacctgattcca

SEQ ID NO: 55303 - DNA, 120 bp, Artificial Sequence
  ENSG00000069849_10 (sequence is synthesized)
aacatgtaggatgggggtcttgtcctctttttatgtggtttaattgccaagtgtctaaagcttaatatgccgtgctatgtaaatattttatggatataacaactgtcatattttgatgtc

SEQ ID NO: 55304 - DNA, 120 bp, Artificial Sequence
  ENSG00000069849_11 (sequence is synthesized)
aacagagttttagggataaaatggtacccggccaacatcaagtgactttatagctgcaagaaatgtggtatgtggagaagttctgtatgtgaggaaggaaaaaaagaaaataaaagtgtg

SEQ ID NO: 55305 - DNA, 120 bp, Artificial Sequence
  ENSG00000069849_12 (sequence is synthesized)
tttgaaaaatattatcttgggttctttgtaaaatttattttttacatgctgaattagcctcgatctttttgattaagagcacaaacttttttttgtaaaacatgtaaaaaaaaaaactgg

SEQ ID NO: 55306 - DNA, 120 bp, Artificial Sequence
  ENSG00000069849_13 (sequence is synthesized)
gattaatttttagtgttggaactgcctcttattttaggctgtagataaaatagcatttttaggttagccagtgtgactatgcacctaattttttatgagattaaattcataagacttaat

SEQ ID NO: 55307 - DNA, 120 bp, Artificial Sequence
  ENSG00000069849_14 (sequence is synthesized)
ttgtacaatagtttgtgaaatatcttgttactgcttttatttagcagactgtggactgtaataaagtatataaattgtgaaatataaaaacttggaacttattcaaagcttcaaagcaaa

SEQ ID NO: 55308 - DNA, 120 bp, Artificial Sequence
  ENSG00000069849_15 (sequence is synthesized)
ataattggattaaagcctgaaggagtgccaaggatagattgtgtttcaaagttagttggcgtgctagtcatcagtgctatctgagatttaatgaaatatggtgcattttccttaagacaa

SEQ ID NO: 55309 - DNA, 120 bp, Artificial Sequence
  ENSG00000069849_16 (sequence is synthesized)
cttgaatttggacagtgaaaaggcccttaaaaaggatcgcagtatgtggtagggaagtgatgctgtctgaaggtgacatcctgttctcctctcttctgtcctctccatccttattttggc

SEQ ID NO: 55310 - DNA, 120 bp, Artificial Sequence
  ENSG00000069849_17 (sequence is synthesized)
gtcacagagcccagagagcgtcctgtaggaacgtcacagagcccagagaacgcctggggacggtcggggaggcagttcggggaggggacgattaagttccctcagagaggaagccgcggg

SEQ ID NO: 55311 - DNA, 120 bp, Artificial Sequence
  ENSG00000069849_18 (sequence is synthesized)
ccgactggagtcgttttcgtgctctccgcacccgcccgccgcgggtagcatcttctcagcgccccggcgcccaggaacgcccaggaaacccagtcctcctcctaagcaacctgcggcgcg

SEQ ID NO: 55312 - DNA, 120 bp, Artificial Sequence
  ENSG00000069849_19 (sequence is synthesized)
catgtaagtattgagaagttcttatgtggtgattactcttttgggaagctggagcatgtgttgacgtaccacttgtctggggtaggtagacgccagccctgtttaatttgtgcgtcatct

SEQ ID NO: 55313 - DNA, 120 bp, Artificial Sequence
  ENSG00000069849_20 (sequence is synthesized)
attctaggttggcaccttgtggtggctgttgctttccagtctggaagcacagcattttattcatttcaggaaaacatcggtcctaaacctgctggtgcattcctgctgttagtagaatga

SEQ ID NO: 55314 - DNA, 120 bp, Artificial Sequence
  ENSG00000069869_0 (sequence is synthesized)
ggccttttcccgccgcgctgccgggtgccgctagtgcccgctcgccgcgggaggcgctgctgtcgctgagggagcgcctcctcctcttcctccaactcttccccgcctcctcccgcttct

SEQ ID NO: 55315 - DNA, 120 bp, Artificial Sequence
  ENSG00000069869_1 (sequence is synthesized)
cctcctcctcctccacagttgcctgccctgggcgggggcgagcgcgtccggtttgctggaagcgttcggaaatggcaacttgcgcggtggaggtgttcgggctcctggaggacgaggaaa

SEQ ID NO: 55316 - DNA, 120 bp, Artificial Sequence
  ENSG00000069869_2 (sequence is synthesized)
attcacgaattgtgagagtaagagttatagccggaataggccttgccaagaaggatatattgggagctagtgatccttacgtgagagtgacgttatatgacccaatgaatggagttctta

SEQ ID NO: 55317 - DNA, 120 bp, Artificial Sequence
  ENSG00000069869_3 (sequence is synthesized)
caagtgtgcaaacaaaaaccattaaaaagagtttgaatccaaagtggaatgaagaaatattattcagagttcatcctcagcagcaccggcttctttttgaagtgtttgacgaaaaccgat

SEQ ID NO: 55318 - DNA, 120 bp, Artificial Sequence
  ENSG00000069869_4 (sequence is synthesized)
tgacaagagatgatttcctaggtcaagtggatgttccactttatccattaccgacagaaaatccaagattggagagaccatatacatttaaggattttgttcttcatccaagaagtcaca

SEQ ID NO: 55319 - DNA, 120 bp, Artificial Sequence
  ENSG00000069869_5 (sequence is synthesized)
aatcaagagttaaaggttatctgagactaaaaatgacttatttacctaaaaccagtggctcagaagatgataatgcagaacaggctgaggaattagagcctggctgggttgttttggacc

SEQ ID NO: 55320 - DNA, 120 bp, Artificial Sequence
  ENSG00000069869_6 (sequence is synthesized)
aaccagatgctgcttgccatttgcagcaacaacaagaaccttctcctctacctccagggtgggaagagaggcaggatatccttggaaggacctattatgtaaaccatgaatctagaagaa

SEQ ID NO: 55321 - DNA, 120 bp, Artificial Sequence
  ENSG00000069869_7 (sequence is synthesized)
cacagtggaaaagaccaacccctcaggacaacctaacagatgctgagaatggcaacattcaactgcaagcacaacgtgcatttaccaccaggcggcagatatccgaggaaacagaaagtg

SEQ ID NO: 55322 - DNA, 120 bp, Artificial Sequence
  ENSG00000069869_8 (sequence is synthesized)
ttgacaaccgagagtcttccgagaactgggaaattataagagaagatgaagccaccatgtatagcaaccaggccttcccatcacctccaccgtcaagtaacttggatgttccaactcatc

SEQ ID NO: 55323 - DNA, 120 bp, Artificial Sequence
  ENSG00000069869_9 (sequence is synthesized)
ttgcagaagaattgaatgccagactcaccatttttggaaattcagccgtgagccagccagcatcgagctcaaatcattccagcagaagaggcagcttacaagcctatacttttgaggaac

SEQ ID NO: 55324 - DNA, 120 bp, Artificial Sequence
  ENSG00000069869_10 (sequence is synthesized)
aacctacacttcctgtgcttttgcctacttcatctggattaccaccaggttgggaagaaaaacaagatgaaagaggaagatcatattatgtagatcacaattccagaacgactacttgga

SEQ ID NO: 55325 - DNA, 120 bp, Artificial Sequence
  ENSG00000069869_11 (sequence is synthesized)
caaagcccactgtacaggccacagtggagaccagtcagctgacctcaagccagagttctgcaggccctcaatcacaagcctccaccagtgattcaggccagcaggtgacccagccatctg

SEQ ID NO: 55326 - DNA, 120 bp, Artificial Sequence
  ENSG00000069869_12 (sequence is synthesized)
aaattgagcaaggattccttcctaaaggctgggaagtccggcatgcaccaaatgggaggcctttctttattgaccacaacactaaaaccaccacctgggaagatccaagattgaaaattc

SEQ ID NO: 55327 - DNA, 120 bp, Artificial Sequence
  ENSG00000069869_13 (sequence is synthesized)
cagcccatctgagaggaaagacatcacttgatacttccaatgatctagggcctttacctccaggatgggaagagagaactcacacagatggaagaatcttctacataaatcacaatataa

SEQ ID NO: 55328 - DNA, 120 bp, Artificial Sequence
  ENSG00000069869_14 (sequence is synthesized)
aaagaacacaatgggaagatcctcggttggagaatgtagcaataactggaccagcagtgccctactccagggattacaaaagaaagtatgagttcttccgaagaaagttgaagaagcaga

SEQ ID NO: 55329 - DNA, 120 bp, Artificial Sequence
  ENSG00000069869_15 (sequence is synthesized)
atgacattccaaacaaatttgaaatgaaacttcgccgagcaactgttcttgaagactcttaccggagaattatgggtgtcaagagagcagacttcctgaaggctcgactgtggattgagt

SEQ ID NO: 55330 - DNA, 120 bp, Artificial Sequence
  ENSG00000069869_16 (sequence is synthesized)
ttgatggtgaaaagggattggattatggaggagttgccagagaatggttcttcctgatctcaaaggaaatgtttaacccttattatgggttgtttgaatattctgctacggacaattata

SEQ ID NO: 55331 - DNA, 120 bp, Artificial Sequence
  ENSG00000069869_17 (sequence is synthesized)
ccctacagataaatccaaactctggattgtgtaacgaagatcacctctcttacttcaagtttattggtcgggtagctggaatggcagtttatcatggcaaactgttggatggttttttca

SEQ ID NO: 55332 - DNA, 120 bp, Artificial Sequence
  ENSG00000069869_18 (sequence is synthesized)
tccgcccattttacaagatgatgcttcacaaaccaataacccttcatgatatggaatctgtggatagtgaatattacaattccctaagatggattcttgaaaatgacccaacagaattgg

SEQ ID NO: 55333 - DNA, 120 bp, Artificial Sequence
  ENSG00000069869_19 (sequence is synthesized)
acctcaggtttatcatagatgaagaactttttggacagacacatcaacatgagctgaaaaatggtggatcagaaatagttgtcaccaataagaacaaaaaggaatatatttatcttgtaa

SEQ ID NO: 55334 - DNA, 120 bp, Artificial Sequence
  ENSG00000069869_20 (sequence is synthesized)
tacaatggcgatttgtaaaccgaatccagaagcaaatggctgcttttaaagagggattctttgaactaataccacaggatctcatcaaaatttttgatgaaaatgaactagagcttctta

SEQ ID NO: 55335 - DNA, 120 bp, Artificial Sequence
  ENSG00000069869_21 (sequence is synthesized)
tgtgtggactgggagatgttgatgtgaatgactggagggaacatacaaagtataaaaatggctacagtgcaaatcatcaggttatacagtggttttggaaggctgttttaatgatggatt

SEQ ID NO: 55336 - DNA, 120 bp, Artificial Sequence
  ENSG00000069869_22 (sequence is synthesized)
cagaaaaaagaataagattacttcagtttgtcactggcacatctcgggtgcctatgaatggatttgctgaactatacggttcaaatggaccacagtcatttacagttgaacagtggggta

SEQ ID NO: 55337 - DNA, 120 bp, Artificial Sequence
  ENSG00000069869_23 (sequence is synthesized)
ctcctgaaaagctgccaagagctcatacctgttttaatcgcctggacttgccaccttatgaatcatttgaagaattatgggataaacttcagatggcaattgaaaacacccagggctttg

SEQ ID NO: 55338 - DNA, 120 bp, Artificial Sequence
  ENSG00000069869_24 (sequence is synthesized)
tgagtcttcccagatcttgaagaaaatcatataaaaagcatttgaagaaatagtacgacaacttatttttaatcacttttaaataatgtgttgcatttacacagttgtttcatgctgtct

SEQ ID NO: 55339 - DNA, 120 bp, Artificial Sequence
  ENSG00000069869_25 (sequence is synthesized)
ttagagttaggtgcctgcctaaagccaggcaccaccacacctggctttagagttcacacaataggatataagtcctgtatgacttaaatagtgaattttgtccttaacatttacctcttg

SEQ ID NO: 55340 - DNA, 120 bp, Artificial Sequence
  ENSG00000069869_26 (sequence is synthesized)
tatagtatctgccaggcagttttttcttaaactactgagatgataactgtgaaatatttgtgatacgtgtcatgtgtgaaaagtttgatgcattttgagatggaaaactgaaatttggaa

SEQ ID NO: 55341 - DNA, 120 bp, Artificial Sequence
  ENSG00000069869_27 (sequence is synthesized)
aaagaaatactttactattgagtaaactacaatatatttagtgctactcgcagctatttattattttgtagacctgccttatgcaccttactgcctagatttttgggaaaaaactttgga

SEQ ID NO: 55342 - DNA, 120 bp, Artificial Sequence
  ENSG00000069869_28 (sequence is synthesized)
aagtgtgttacctatatttctagccaactaactcacagaaaaactgtttacttcttcactttcgaagtatttggcttttgttaatatgcagttttactaaacagatggttcataagacat

SEQ ID NO: 55343 - DNA, 120 bp, Artificial Sequence
  ENSG00000069869_29 (sequence is synthesized)
gtgaagcaaattcatatttgcaatgggtaaaaagtattaaagcctttctcttgcctgcatatcctattgaccattggtatagtcatcactttttcatattttagtgtagttagaagaatt

SEQ ID NO: 55344 - DNA, 120 bp, Artificial Sequence
  ENSG00000069869_30 (sequence is synthesized)
ccttcttcaaacattaaagatccacaaagcagtatttctaaatatgccttgaagaactaaatgaagtgtatagcacttgcctttactagatattctttacacttgtacaattatgtagta

SEQ ID NO: 55345 - DNA, 120 bp, Artificial Sequence
  ENSG00000069869_31 (sequence is synthesized)
aatgtatgtttacagggtttatcatgtttacagattaagctaatttctgtagtcgcatttttatatttttagtatcactctagtaaaaaaaccaaataatttgtttaaaataaccaaaga

SEQ ID NO: 55346 - DNA, 120 bp, Artificial Sequence
  ENSG00000069869_32 (sequence is synthesized)
gttgttataatgcataatttgtattaaatttattactatttcttatgccttttaaaatactgtttactatgaagacaatgtttttaattacaaatccagaattctgtaggcaaaatgcta

SEQ ID NO: 55347 - DNA, 120 bp, Artificial Sequence
  ENSG00000069869_33 (sequence is synthesized)
cagttcatatcttcctttaaccaaactgaagtacataaagaccatgtacatgtattcatcaaacgtttattgaatgctgcgtgcctagcgctgtgctatgctctggggtaagagttgtca

SEQ ID NO: 55348 - DNA, 120 bp, Artificial Sequence
  ENSG00000069869_34 (sequence is synthesized)
gcttcagagaagctgagtcctgatcctcaaggaacttgcaaatgtgtctatgaatttgtaaaacaatcaaaagtaggcgtaagcagaataaggcaaaagggaaagtgttctaggttccag

SEQ ID NO: 55349 - DNA, 120 bp, Artificial Sequence
  ENSG00000069869_35 (sequence is synthesized)
cacacctgcaaagataaagtgtgccaagactgtatttatatttcatacttatattgtttcatccttatattggaatgattatatagaaaatgctcttaaaaagattaaacctatttctca

SEQ ID NO: 55350 - DNA, 120 bp, Artificial Sequence
  ENSG00000069869_36 (sequence is synthesized)
gtatggtatcttggtgatttaggaataattgtaaatatatgttacgaatcttcttaaatatatatatatacacaccctgtgagaactgtaaaaagtacctctggttcttggtttaagttt

SEQ ID NO: 55351 - DNA, 120 bp, Artificial Sequence
  ENSG00000069869_37 (sequence is synthesized)
gttggggtataacatgatgagtactcattagcacctgatagaaatctgaaatgtgacagtagcaaaaccactttctactttccaaacaccacagcatcagcatggtttaggggaagcaat

SEQ ID NO: 55352 - DNA, 120 bp, Artificial Sequence
  ENSG00000069869_38 (sequence is synthesized)
tcacagattaatgtaccctgcgttttgtcttcaccattgtcaaccagcagtcaaggatgagcaccaggtatagtcctggtttgatatctcaccagccatgtgaactgaagcagcttactt

SEQ ID NO: 55353 - DNA, 120 bp, Artificial Sequence
  ENSG00000069869_39 (sequence is synthesized)
aacctctctggattcatatttcttcatctgtcaaatgagagtaatcatgcccaccctcattgtcatgccagattgtcagaagttccagacagatgagaaagcaaaaagtactttgtaaag

SEQ ID NO: 55354 - DNA, 120 bp, Artificial Sequence
  ENSG00000069869_40 (sequence is synthesized)
tgttatacaatcagaaggtgctttgtgctgaccgtcagattgtgtcaagtcaggtgtgcaaattgaccacactcccaaagaatcatttaaaagtaaagtgacttctaagagacaaggaag

SEQ ID NO: 55355 - DNA, 120 bp, Artificial Sequence
  ENSG00000069869_41 (sequence is synthesized)
taggaacatttctgatattaaatatataaataatatggatacacatgtgtatatctgtatatggatcttaccatcataattcattttcttcatatcagcaaagtaatagtaatgtgggcc

SEQ ID NO: 55356 - DNA, 120 bp, Artificial Sequence
  ENSG00000069869_42 (sequence is synthesized)
aatgcattttggaaatgtcctcattatgtagaatggaatgtgaaaattatttttgttaaaacaggattttgccacaattatttaaatattatgtttgtgaactatctaagcatgagaaaa

SEQ ID NO: 55357 - DNA, 120 bp, Artificial Sequence
  ENSG00000069869_43 (sequence is synthesized)
tacaaagctttctttgtatctggctgatactcatttggatgattctgtgactcatagaacatgatgttaaatgagaccagactcaactgccaccagtccccagctgcagaccttcatccc

SEQ ID NO: 55358 - DNA, 120 bp, Artificial Sequence
  ENSG00000069869_44 (sequence is synthesized)
cttcatctcccactaggggctcgtggtctggaagaaacatctatcaagcaacacagccccttatcccagatagaaaagtgtctcaaatgcattctactgcgggacagtcagtaggatcat

SEQ ID NO: 55359 - DNA, 120 bp, Artificial Sequence
  ENSG00000069869_45 (sequence is synthesized)
tttcataaagcaaggacatcatatgtttctagaaattacaagcatataactttagcctacaatctcttattaaaaatttttaacaaaattgtattacaaatgcatttcatcagaactcaa

SEQ ID NO: 55360 - DNA, 120 bp, Artificial Sequence
  ENSG00000069869_46 (sequence is synthesized)
atttaaatggtgtttgttttgggtttttatttataatgctgaagttattccatataagtatcaagttaaacacaattcattttgattataaactatttgactttttaaaatcttctgaca

SEQ ID NO: 55361 - DNA, 120 bp, Artificial Sequence
  ENSG00000069869_47 (sequence is synthesized)
gacacagtaaatatatatatcaagattgatgtatcaaaatttattgcacactttaaagtgtaaaatcattttttaaaatcttgaatccacaaataaagttctattctgattttaaaaaac

SEQ ID NO: 55362 - DNA, 120 bp, Artificial Sequence
  ENSG00000069869_48 (sequence is synthesized)
cttgcgcggtggaggtgttcgggctcctggaggacgaggaaaattcacgaattgtgagagtaagagttatagccggaataggccttgccaagaaggatatattgggagctagagtttgaa

SEQ ID NO: 55363 - DNA, 120 bp, Artificial Sequence
  ENSG00000069869_49 (sequence is synthesized)
caaatggtgattgtaaaccagaaatgtcagaaattaagcttaattctgattcagagtatattaagctcatgcataggacatctgcatgtttgccatcctcccaaaatgtagattgtcaaa

SEQ ID NO: 55364 - DNA, 120 bp, Artificial Sequence
  ENSG00000069869_50 (sequence is synthesized)
taaatatcaatggagaattggaaagaccacattcacagatgaacaaaaaccatggtattttacgaagaagtatttcattgggaggagcttatccaaatatttcctgtctatccagcctta

SEQ ID NO: 55365 - DNA, 120 bp, Artificial Sequence
  ENSG00000069869_51 (sequence is synthesized)
agcacaattgttctaaagggggaccatctcagttactcataaagtttgcatctggaaatgaaggtaaagtggataatttatcaagagacagcaacagagattgcacaaatgaactgtcta

SEQ ID NO: 55366 - DNA, 120 bp, Artificial Sequence
  ENSG00000069869_52 (sequence is synthesized)
gccctgggcgggggcgagcgcgtccggtttgctggaagcgttcggaaatggcaacttgcgcggtggaggtgttcgggctcctggaggacgaggtaggccctgctaattgcagatttctca

SEQ ID NO: 55367 - DNA, 86 bp, Artificial Sequence
  ENSG00000069869_53 (sequence is synthesized)
ctggaggacgaggtaggccctgctaattgcagatttctcatctcaccgccttccagcagagccagttgatcttaaagaaaatagtg

SEQ ID NO: 55368 - DNA, 120 bp, Artificial Sequence
  ENSG00000069869_54 (sequence is synthesized)
gctgcagctgagctcagcttaaaggtcgctggaaatcaagtgctttgtaagtgaaggcattttgactacaagcgattcaagacattttggaaacgtcagtctctggaatgggtcgtcttt

SEQ ID NO: 55369 - DNA, 120 bp, Artificial Sequence
  ENSG00000069869_55 (sequence is synthesized)
ttctttctatgatatctggtatctaatgttttacttaggataaagactactacttaatagctcttttaggcaccacaaatgattttttcttttgatgcagtgcagctgcttctagcctgt

SEQ ID NO: 55370 - DNA, 120 bp, Artificial Sequence
  ENSG00000069869_56 (sequence is synthesized)
ctacggacagagatctttgttatgactttcagcccttaacatgtttggaaatgagaacaaatggcacaaagcttacgattgcactttgcagccagaagaagcaatacttaccctttgtca

SEQ ID NO: 55371 - DNA, 120 bp, Artificial Sequence
  ENSG00000069869_57 (sequence is synthesized)
gaaacctccggagatgacttggatagccatgttcacatgtgcttcaaaagaccaacacggatttcaacgtctaacgttgttcaaatgaagctgactcccagacagactgcactagctccg

SEQ ID NO: 55372 - DNA, 120 bp, Artificial Sequence
  ENSG00000069869_58 (sequence is synthesized)
ttaataaaggaaaacgttcagtctcaagaaagatcatctgttccctcatctgaaaatgttaataaaaagagcagctgtctacagatttcactacagccaacaaggtacagtggatatctt

SEQ ID NO: 55373 - DNA, 120 bp, Artificial Sequence
  ENSG00000069869_59 (sequence is synthesized)
cagtctagcaatgtcttagctgatagtgatgatgcttcgtttacttgtatcttgaaggatggtatttacagtagtgctgtggtcgataatgaattgaatgctgtgaatgatggtcacctt

SEQ ID NO: 55374 - DNA, 120 bp, Artificial Sequence
  ENSG00000069869_60 (sequence is synthesized)
gtaagcagtccagccatttgtagtggtagccttagtaacttttcaaccagtgataatgggtcttacagcagcaacggtagtgattttgggtcatgtgcaagtatcacaagtggaggttca

SEQ ID NO: 55375 - DNA, 120 bp, Artificial Sequence
  ENSG00000069869_61 (sequence is synthesized)
tatactaacagtgtcatcagtgacagtagtagttatacttttccaccaagtgatgatacttttttgggtggaaacttaccttctgacagcacctccaatagaagtgtgccaaacaggaat

SEQ ID NO: 55376 - DNA, 120 bp, Artificial Sequence
  ENSG00000069869_62 (sequence is synthesized)
actactccttgtgaaattttttcaagaagtacaagtacagatccttttgtccaggatgacttggaacatggattagagattatgaaattgccagtgagcaggaacacaaaaattccacta

SEQ ID NO: 55377 - DNA, 120 bp, Artificial Sequence
  ENSG00000069869_63 (sequence is synthesized)
aaacgttactcctccttagtcatttttcctaggagtccttcaactacccgaccgacttctccaacaagtctgtgtactcttctgagcaaaggatcctatcaaacttcacaccagtttatt

SEQ ID NO: 55378 - DNA, 120 bp, Artificial Sequence
  ENSG00000069869_64 (sequence is synthesized)
atttctcctagtgaaattgcacataatgaggatggcactagtgctaaaggatttctttcaacagctgtcaatggacttcggttatctaaaacaatttgtacccccggagaagtaagagac

SEQ ID NO: 55379 - DNA, 120 bp, Artificial Sequence
  ENSG00000069869_65 (sequence is synthesized)
atacggccgcttcacaggaagggctcgttacagaagaaaattgttctttcgaataatactcccagacagactgtctgtgaaaagtcatctgaaggatattcttgtgtttcagtgcatttc

SEQ ID NO: 55380 - DNA, 120 bp, Artificial Sequence
  ENSG00000069869_66 (sequence is synthesized)
gtggaatgaagaaatattattcagagttcatcctcagcagcaccggcttctttttgaagtgtttgacgaaaaccgattgccatggttagtgacaaatcaggagtgaaggtgattccttta

SEQ ID NO: 55381 - DNA, 120 bp, Artificial Sequence
  ENSG00000069869_67 (sequence is synthesized)
gagaacagatgacgcaaggctccaaagttcagagaactgaacaagggggatgagactcaaaacaagaggactcctgactcactaggttagggtgatccttacgtgagagtgacgttatat

SEQ ID NO: 55382 - DNA, 120 bp, Artificial Sequence
  ENSG00000069869_68 (sequence is synthesized)
cacagttgcctgccctgggcgggggcgagcgcgtccggtttgctggaagcgttcggaaatggcaacttgcgcggtggaggtgttcgggctcctggaggacgagaattggaaaaaactact

SEQ ID NO: 55383 - DNA, 120 bp, Artificial Sequence
  ENSG00000069869_69 (sequence is synthesized)
tttcagtggagcagccaggggaagtgggtaagcagtctgggatttgagtgatggcttgggggtggttatggagactctgggcaaaatggtgagggagatagaatttgttttcttcctcct

SEQ ID NO: 55384 - DNA, 120 bp, Artificial Sequence
  ENSG00000069869_70 (sequence is synthesized)
ggtcctactcgctccctttccattctcctcccaagcacctcttctgattgccaacatattataaggtcttactcaagacctcttgtgacaggagaggacagaaaaccaacctctttgtcc

SEQ ID NO: 55385 - DNA, 120 bp, Artificial Sequence
  ENSG00000069943_0 (sequence is synthesized)
cttccgccttaggaaggtggcggccagggatgaggaggcccctaagcaagtgcggaatggagccggggggcggagatgccagcctcactttgcatggtctccagaaccgctcccacggca

SEQ ID NO: 55386 - DNA, 120 bp, Artificial Sequence
  ENSG00000069943_1 (sequence is synthesized)
agataaagctgcgaaagagaaagtctaccttgtacttcaacacccaggagaagagcgccaggcgccgcggggatcttcttggagaaaatatttatctgctcttgtttaccatagctttac

SEQ ID NO: 55387 - DNA, 120 bp, Artificial Sequence
  ENSG00000069943_2 (sequence is synthesized)
gaatattaaactgctttttagtgcagacaagttttgttccagatgaatactggcagtctcttgaagtttcacatcacatggttttcaattatggttatttgacttgggaatggacagaga

SEQ ID NO: 55388 - DNA, 120 bp, Artificial Sequence
  ENSG00000069943_3 (sequence is synthesized)
gactgaggagttacacttatcccttaatctttgcaagcatttacaagattcttcatcttttagggaaagatagtgttcagttgctgatttggattcctagacttgcccaagcacttctgt

SEQ ID NO: 55389 - DNA, 120 bp, Artificial Sequence
  ENSG00000069943_4 (sequence is synthesized)
ctgctgtagcagatgtgagactttactcattaatgaagcaactagaaaatcaggaagtggcaagatgggtgtttttttgccagttgtgctcctggttcacatggtattgctgtaccagaa

SEQ ID NO: 55390 - DNA, 120 bp, Artificial Sequence
  ENSG00000069943_5 (sequence is synthesized)
cccttacaaacaccatggaaactgttctcactataattgctcttttctactatcctttggaaggttcaaagtctatgaacagtgtcaaatactcatccctggtggcacttgccttcataa

SEQ ID NO: 55391 - DNA, 120 bp, Artificial Sequence
  ENSG00000069943_6 (sequence is synthesized)
ttcgtcccacagctgtcattctgtggacacctttgctcttcagacatttctgtcaagaaccaagaaagcttgatcttattctacatcattttttacctgtaggctttgttactttgagtt

SEQ ID NO: 55392 - DNA, 120 bp, Artificial Sequence
  ENSG00000069943_7 (sequence is synthesized)
tggcactggtacttcagtcaaggatttccagttatcttgggtactcacttacccttctttattcatggctgctatctagcaccaaagagataccggatacttttggtgactgtgctgtgg

SEQ ID NO: 55393 - DNA, 120 bp, Artificial Sequence
  ENSG00000069943_8 (sequence is synthesized)
acactgcttgtttatagcatgttgagccacaaagaattcaggtttatttatccagttttaccattctgtatggtgttctgtggatactcattaacccacctgaaaacatggaagaaacca

SEQ ID NO: 55394 - DNA, 120 bp, Artificial Sequence
  ENSG00000069943_9 (sequence is synthesized)
gctctaagtttcctgtttttatcaaatttgttcctcgccctttatactggtttagttcatcaacgaggtactcttgatgtcatgagtcatattcaaaaagtttgttacaacaatcccaat

SEQ ID NO: 55395 - DNA, 120 bp, Artificial Sequence
  ENSG00000069943_10 (sequence is synthesized)
aaatcttcagcttcaatatttataatgatgccttgccactctactccttattacagccatgttcactgcccacttcccatgagatttctccagtgcccgccagacctgactggaaaaagt

SEQ ID NO: 55396 - DNA, 120 bp, Artificial Sequence
  ENSG00000069943_11 (sequence is synthesized)
cattatcttgatgaagcagatgtattttacctaaatcccttaaactggttacatagagagtttcatgatgatgcatcattgcctactcacttgatcaccttcagcattttggaagaggaa

SEQ ID NO: 55397 - DNA, 120 bp, Artificial Sequence
  ENSG00000069943_12 (sequence is synthesized)
ataagcgctttcctaatttcaagcaattataaaagaactgctgttttcttccacactcacttgccagagggtcgaattggaagtcacatatatgtctatgaacggaagttaaaagggaaa

SEQ ID NO: 55398 - DNA, 120 bp, Artificial Sequence
  ENSG00000069943_13 (sequence is synthesized)
ttcaacatgaagatgaaattctgaactttcctagataaattaacattgctgggtggaaatattcagatgctgcttaaatacttcggtaaacactgggtaagattcatggaacttagaaaa

SEQ ID NO: 55399 - DNA, 120 bp, Artificial Sequence
  ENSG00000069943_14 (sequence is synthesized)
aagctgtatgaactgctttaccaaatatcactactgaggaaatgtataaaataccacatagtataaaattacatgttaatacaatgccagattttaaataaagacctttagttttcctca

SEQ ID NO: 55400 - DNA, 120 bp, Artificial Sequence
  ENSG00000069943_15 (sequence is synthesized)
actaaactcgctaccgcctgctcccctccagagaccgggggccttccagcagttttcggacccccgagcacagagaccgccaagccaaaggcgagtagcaatccctcggttcggaaacgg

SEQ ID NO: 55401 - DNA, 120 bp, Artificial Sequence
  ENSG00000069943_16 (sequence is synthesized)
cgaaaggaaaccgcaaggaggccaccacgtcgggtgggagctacgaagttgcccgttcccggttacttccgggcttgcgagcgacgactgctctcaaaggccaaacttaatggatggacg

SEQ ID NO: 55402 - DNA, 120 bp, Artificial Sequence
  ENSG00000069943_17 (sequence is synthesized)
taatattgtttggaggattaagtgagatgcatgtgaagaaattaacacagtgcctggcatatataatagtaatcatcaatatatatgtacagaggaccattttatattgcacatatacaa

SEQ ID NO: 55403 - DNA, 120 bp, Artificial Sequence
  ENSG00000069943_18 (sequence is synthesized)
agggctgcttcccaaattagtaatttgttagctggtttctttcattagatacacacatagtatgacctaattaattagcctaaggccttagttaacccactcttttttttttgtatttat

SEQ ID NO: 55404 - DNA, 120 bp, Artificial Sequence
  ENSG00000069943_19 (sequence is synthesized)
gttatactgctgctgctgcataggtacatggtataagaatcatgttttttttatctttgagaaaatgagttaaaggcttgcttcttcacttaactgcaacacagtttacagattcagatt

SEQ ID NO: 55405 - DNA, 120 bp, Artificial Sequence
  ENSG00000069943_20 (sequence is synthesized)
tcacattttgctaagtataaatgacatatcttaagactaatgaaaactttcatgttttacttgtatttattatggtaacttttcttttcatagccatgttcactgcccacttcccatgag

SEQ ID NO: 55406 - DNA, 120 bp, Artificial Sequence
  ENSG00000069943_21 (sequence is synthesized)
ttgcctggtttttagacttcaattctgatttaatgtcaaaattgtatcaatcccctaatgccaaagattactacttggcactaacacatttctatttatttttccttcaacggtgccagt

SEQ ID NO: 55407 - DNA, 120 bp, Artificial Sequence
  ENSG00000069943_22 (sequence is synthesized)
agatttaagtgataggcttagttttcttaatcttgctacatttttcaccacaccacttttcagattattctttaatcagaactatttcaagtagattaaaaaatactaggtgacatggac

SEQ ID NO: 55408 - DNA, 120 bp, Artificial Sequence
  ENSG00000069943_23 (sequence is synthesized)
atgtgatattccaactcatgaggtatgaactgtggatgatattaacatattcataggaggaacaaaataaaaaacactgccttggtcccattcagtattgtactaacattttgggcaaac

SEQ ID NO: 55409 - DNA, 120 bp, Artificial Sequence
  ENSG00000069943_24 (sequence is synthesized)
caaggtttggatgaagaatacccaagttcaaaaagaactattatctagttctataaaaagagtgtatgtaaattatgaacaaaatgtcatgcttactaataagcttaatcttttccagtg

SEQ ID NO: 55410 - DNA, 120 bp, Artificial Sequence
  ENSG00000069943_25 (sequence is synthesized)
gaaaggcctgttctttgtattctcagtagatcctaatatgtccattaatagtggctgttgctgaagaaaaggactatcagaggggagagagacttttacttatccttttatacccgtcta

SEQ ID NO: 55411 - DNA, 120 bp, Artificial Sequence
  ENSG00000069943_26 (sequence is synthesized)
ttcattctacttggttttttcctttggttttttgttttgttttgccccacagaataatccctttcataaatcaaaaaagaaaaattgttcagcatctccaaattgcctgactgtagtggg

SEQ ID NO: 55412 - DNA, 120 bp, Artificial Sequence
  ENSG00000069943_27 (sequence is synthesized)
aaaacaaaatttcccactgttgtgggaaaaaaaatgtaagacatagcaccttttcttccactcatatacttacggaaaatctcccaggtgcccaatggcttattttcctaagaggacaca

SEQ ID NO: 55413 - DNA, 120 bp, Artificial Sequence
  ENSG00000069943_28 (sequence is synthesized)
ttattgaaactcgtattacacactaaaataccaattattagtgcttgggagattaaagaggtaggtaaatggaataattaaaagtcctatttatttagcaactactatgtaccagggcag

SEQ ID NO: 55414 - DNA, 120 bp, Artificial Sequence
  ENSG00000069943_29 (sequence is synthesized)
tcactggacattttttctaacacttgaataaggtactattatcccaatgaccagcaaagtaaaacgacttgtgctagaactggaattcaaatctggacctgttggactccataaccatca

SEQ ID NO: 55415 - DNA, 120 bp, Artificial Sequence
  ENSG00000069943_30 (sequence is synthesized)
aataccttttactagaaaaagtcaagacctagatgacagtagtgaatggtgaatggtcagagatatgacttattgcttatttcttatttgtctataacagtattacagtttttgctattt

SEQ ID NO: 55416 - DNA, 120 bp, Artificial Sequence
  ENSG00000069943_31 (sequence is synthesized)
ccattaaaaattacagatgtatttgcagttaacataacaaaagattgtcagtgttaaggttcaatatgtctatcttcatataggatactcattaacccacctgaaaacatggaagaaacc

SEQ ID NO: 55417 - DNA, 120 bp, Artificial Sequence
  ENSG00000069943_32 (sequence is synthesized)
cagagtaaacagaagatttggattcctagacttgcccaagcacttctgtctgctgtagcagatgtgagactttactcattaatgaagcaactagaaaatcaggaagtggcaagatgggtg

SEQ ID NO: 55418 - DNA, 120 bp, Artificial Sequence
  ENSG00000069956_0 (sequence is synthesized)
cttcctcgccctctctcgcgggtcggggttacatggcggcgactgcggcaaagcgagagcctcggagacgccgctgccgccagcacagccggagacctgagccgacactgggggcagtcc

SEQ ID NO: 55419 - DNA, 120 bp, Artificial Sequence
  ENSG00000069956_1 (sequence is synthesized)
gcgagccccgcactctctcgatgagtcggagaagtcccgttgtatcagagtaagatggacggtagctttgattgtgattgtggtgagctggagccacctgatcactaacaaaagacatct

SEQ ID NO: 55420 - DNA, 120 bp, Artificial Sequence
  ENSG00000069956_2 (sequence is synthesized)
tctgttaaccaacagccgccagggcttcctgttgaaataaatatatagcaacaaaggaaaaaaagaagcaaaacggaaatagtgcttaccagcaccttagaatgatgctgctcaggacca

SEQ ID NO: 55421 - DNA, 120 bp, Artificial Sequence
  ENSG00000069956_3 (sequence is synthesized)
gtccaacactgaatgtatctgcactgtgaggagaatgttcatagaagcctgttgtgtgcatatttattcacatttttgttaaatgttaaatcgtttagcacggtaatctgagtgcacagt

SEQ ID NO: 55422 - DNA, 120 bp, Artificial Sequence
  ENSG00000069956_4 (sequence is synthesized)
atgtcatttcattccgtttgagtttcttgttttcgttaaatgtctgcagagttgctgcccctttcttgaactatgagtactgcaatctttttaattctcaatatgaatagagctttttga

SEQ ID NO: 55423 - DNA, 120 bp, Artificial Sequence
  ENSG00000069956_5 (sequence is synthesized)
gctttaaatctaaggggaactcgacaggcctgtttggcatatgcaatgaacatcaagaaaccatcttgctgtggaagcataattatttttcttctccctttttgaaagatctttcctttt

SEQ ID NO: 55424 - DNA, 120 bp, Artificial Sequence
  ENSG00000069956_6 (sequence is synthesized)
gatgccagttttcttccttgtttacacaagttcaatttgaaaggaaaaggcaatagtaagggtttcaaaatggcagagaaatttgaaagtctcatgaacattcatggttttgatctgggt

SEQ ID NO: 55425 - DNA, 120 bp, Artificial Sequence
  ENSG00000069956_7 (sequence is synthesized)
tctaggtatatggacttaaaaccattgggttgtggaggcaatggcttggttttttctgctgtagacaatgactgtgacaaaagagtagccatcaagaaaattgtccttactgatccccag

SEQ ID NO: 55426 - DNA, 120 bp, Artificial Sequence
  ENSG00000069956_8 (sequence is synthesized)
agtgtcaaacatgctctacgtgaaatcaaaattattagaagacttgaccatgataacattgtgaaagtgtttgagattcttggtcccagtggaagccaattaacagacgatgtgggctct

SEQ ID NO: 55427 - DNA, 120 bp, Artificial Sequence
  ENSG00000069956_9 (sequence is synthesized)
cttacggaactgaacagtgtttacattgttcaggagtacatggagacagacttggctaatgtgctggagcagggccctttactggaagagcatgccaggcttttcatgtatcagctgcta

SEQ ID NO: 55428 - DNA, 120 bp, Artificial Sequence
  ENSG00000069956_10 (sequence is synthesized)
cgggggctcaagtatattcactctgcaaatgtactgcacagagatctcaaaccagctaatcttttcattaatacggaagacttggtgctgaagataggtgactttggtcttgcacggatc

SEQ ID NO: 55429 - DNA, 120 bp, Artificial Sequence
  ENSG00000069956_11 (sequence is synthesized)
atggatcctcattattcccataagggtcatctttctgaaggattggttactaaatggtacagatctccacgtcttttactttctcctaataattatactaaagccattgacatgtgggct

SEQ ID NO: 55430 - DNA, 120 bp, Artificial Sequence
  ENSG00000069956_12 (sequence is synthesized)
gcaggctgcatctttgctgaaatgctgactggtaaaaccctttttgcaggtgcacatgaacttgaacagatgcagctgattttagaatctattcctgttgtacatgaggaagatcgtcag

SEQ ID NO: 55431 - DNA, 120 bp, Artificial Sequence
  ENSG00000069956_13 (sequence is synthesized)
gagcttctcagcgtaattccagtttacattagaaatgacatgactgagccacacaaacctttaactcagctgcttccaggaattagtcgagaagcactggatttcctggaacaaattttg

SEQ ID NO: 55432 - DNA, 120 bp, Artificial Sequence
  ENSG00000069956_14 (sequence is synthesized)
acatttagccccatggatcggttaacagcagaagaagcactctcccatccttacatgagcatatattcttttccaatggatgagccaatttcaagccatccttttcatattgaagatgaa

SEQ ID NO: 55433 - DNA, 120 bp, Artificial Sequence
  ENSG00000069956_15 (sequence is synthesized)
gttgatgatattttgcttatggatgaaactcacagtcacatttataactgggaaaggtatcatgattgtcagttttcagagcatgattggcctgtacataacaactttgatattgatgaa

SEQ ID NO: 55434 - DNA, 120 bp, Artificial Sequence
  ENSG00000069956_16 (sequence is synthesized)
gttcagcttgatccaagagctctgtccgatgtcactgatgaagaagaagtacaagttgatccccgaaaatatttggatggagatcgggaaaagtatctggaggatcctgcttttgatacc

SEQ ID NO: 55435 - DNA, 120 bp, Artificial Sequence
  ENSG00000069956_17 (sequence is synthesized)
aattactctactgagccttgttggcaatactcagatcatcatgaaaacaaatattgtgatctggagtgtagccatacttgtaactacaaaacgaggtcatcatcatatttagataactta

SEQ ID NO: 55436 - DNA, 120 bp, Artificial Sequence
  ENSG00000069956_18 (sequence is synthesized)
gtttggagagagagtgaagttaaccattactatgaacccaagcttattatagatctttccaattggaaagaacaaagcaaagaaaaatctgataagaaaggcaaatcaaaatgtgaaagg

SEQ ID NO: 55437 - DNA, 120 bp, Artificial Sequence
  ENSG00000069956_19 (sequence is synthesized)
aatggattggttaaagcccagatagcgctagaggaagcatcacagcaactggctggaaaagaaagggaaaagaatcagggatttgattttgattcctttattgcaggaactattcagctt

SEQ ID NO: 55438 - DNA, 120 bp, Artificial Sequence
  ENSG00000069956_20 (sequence is synthesized)
agttcccagcatgagcctactgatgttgttgataaattaaatgacttgaatagctcagtgtcccaactagaattgaaaagtttgatatcaaagtcagtaagccaagaaaaacaggaaaaa

SEQ ID NO: 55439 - DNA, 120 bp, Artificial Sequence
  ENSG00000069956_21 (sequence is synthesized)
ggaatggcaaatctggctcaattagaagccttgtaccagtcttcttgggacagccagtttgtgagtggtggggaggactgttttttcataaatcagttttgtgaggtaaggaaggatgaa

SEQ ID NO: 55440 - DNA, 120 bp, Artificial Sequence
  ENSG00000069956_22 (sequence is synthesized)
caggaaagaagatactgaaatgctagaaactgagccagtagaggatgggaagcttggggagagaggacatgaggaaggatttctgaacaacagtggggagttcctctttaacaagcagct

SEQ ID NO: 55441 - DNA, 120 bp, Artificial Sequence
  ENSG00000069956_23 (sequence is synthesized)
cgagtccataggcatcccacagtttcacagtccagttgggtcaccacttaagtcaatacaggccacattaacaccttctgctatgaaatcttcccctcaaattcctcatcaaacatacag

SEQ ID NO: 55442 - DNA, 120 bp, Artificial Sequence
  ENSG00000069956_24 (sequence is synthesized)
cagcattctgaaacatctgaactaaaacactcagcagacatttatctttgtattcttcatgaaatgtgttttgtctttttttattactagtgtttaagtcattttttacttgaatcagat

SEQ ID NO: 55443 - DNA, 120 bp, Artificial Sequence
  ENSG00000069956_25 (sequence is synthesized)
ggtgtcatttagtaaggattttatgagttcttgttttttaaaatccagactttctttttctacatgtgagatagttttcattttaactggcatgtcatttgcacacaaaaataaagacta

SEQ ID NO: 55444 - DNA, 120 bp, Artificial Sequence
  ENSG00000069956_26 (sequence is synthesized)
gagcaaaataatgcaacgcaggaggagaaaagaaatgcactaagacaagaacattctctcatagaacattgatctgttttacaggaaacaaaccttgccttgaaatttacacagtgagac

SEQ ID NO: 55445 - DNA, 120 bp, Artificial Sequence
  ENSG00000069956_27 (sequence is synthesized)
tgtacataattgcatgaaaatagctatttttttcctaagacatttttcattcatgaatattttcaagtttttcatactgtacacatttcttaaaacacatgataccagcagcaactgaaa

SEQ ID NO: 55446 - DNA, 120 bp, Artificial Sequence
  ENSG00000069956_28 (sequence is synthesized)
atgaatgccgaatttggtacacatgtgttatctacctcaaggtaacaagagtatgtggcaaaacatataccacccatagtgcttcacaaaatgcacttctatttagccagcgtttattgt

SEQ ID NO: 55447 - DNA, 120 bp, Artificial Sequence
  ENSG00000069956_29 (sequence is synthesized)
agtaaactattcttaataaaactcactcactgtttataaatgttctggtatgcattctttatagtgaagtgttaatacatcacatcttatttattttagcaaatcagtatattttctgta

SEQ ID NO: 55448 - DNA, 120 bp, Artificial Sequence
  ENSG00000069956_30 (sequence is synthesized)
tttaattataaaaaattaacttagtttttaaaatttatttgcaaatatactttactttttccatttggcactatggtttgttgcctacctagctgcatctataatgtcagcttatcctaa

SEQ ID NO: 55449 - DNA, 120 bp, Artificial Sequence
  ENSG00000069956_31 (sequence is synthesized)
ggctgtccacgtacttaatttacttaagtgttcattttaagtaacgtgctcactgtgtataggaatttgtattttggaggtgcttgatctatctacaaagaaaaattaattaggaattac

SEQ ID NO: 55450 - DNA, 120 bp, Artificial Sequence
  ENSG00000069956_32 (sequence is synthesized)
tttattataaaatgctcctagaagtcttaattgtgtttattttttaaaaaaacaaatgttagacttgtgtgcatggaagtaattaaggtacatcattattgtagtttgaaagttgtacat

SEQ ID NO: 55451 - DNA, 120 bp, Artificial Sequence
  ENSG00000069956_33 (sequence is synthesized)
gataagacattttgtttttactgtatgtttttactgaatgatctattccccatcccaaggcaagcatgaataaaattaggttaaacgtagcatgtggcatcgcagtctcttagaatttgt

SEQ ID NO: 55452 - DNA, 120 bp, Artificial Sequence
  ENSG00000069956_34 (sequence is synthesized)
ttcatctattttattttattgaatactgtctgtatctttggttatcctgtttgaagaaaaaggacaaataaaacatggccagcaaatacagctcctgtttcactcttgggttaatgaaaa

SEQ ID NO: 55453 - DNA, 120 bp, Artificial Sequence
  ENSG00000069956_35 (sequence is synthesized)
ttttctgctagaatgaaaattactaccagaatcactttgaattatggccataaattgctagtctgaaaggctgagaaggttcaagtcttttgacttaaaccatcacatattagaatggaa

SEQ ID NO: 55454 - DNA, 120 bp, Artificial Sequence
  ENSG00000069956_36 (sequence is synthesized)
taaagctttataatatttcaaaactgttaggtaaaatgtgtagttgaaactttgaactgtgcagtcagaaaacttgagatttgctctgtaatacatctttgcgtaagaacttaccctttt

SEQ ID NO: 55455 - DNA, 120 bp, Artificial Sequence
  ENSG00000069956_37 (sequence is synthesized)
acctatccagctacaaaaccatcctcttcacctcacttttctttcatccttgttttgtacaacaccaattctattaatatctgcccacctaccttctcaacaactccatcctcttcacct

SEQ ID NO: 55456 - DNA, 120 bp, Artificial Sequence
  ENSG00000069956_38 (sequence is synthesized)
cacttttctttcatccttgttttgtacaacaccaattctattaatatctgcccacctaccttctcaacaactgacttcatctggattcacaaagccatatatatacacgtgtgtgtgtgt

SEQ ID NO: 55457 - DNA, 120 bp, Artificial Sequence
  ENSG00000069956_39 (sequence is synthesized)
gtgtgtgtgtgtgtgtgtatatatattcatttatttattttctggttgaatactgtcacgttattaatttaaacatactcaaattaccttaagaggacaagctctgaagtgcagtcatga

SEQ ID NO: 55458 - DNA, 120 bp, Artificial Sequence
  ENSG00000069956_40 (sequence is synthesized)
gaattgatttgtggggaaaaaaaaaatgggacacttttagttggagctgggtggggtgacaagtgcagaggctttgagtgtcatgagagcatcagacaggatgtaaaggaagcaacgggc

SEQ ID NO: 55459 - DNA, 120 bp, Artificial Sequence
  ENSG00000069956_41 (sequence is synthesized)
agcagacattggtccctgatcctccattataaccaattttttgcaaacgtatgttgattttgagaataattagctttgactctaaaatgctgtcttccctgaaggagacctaggattttt

SEQ ID NO: 55460 - DNA, 120 bp, Artificial Sequence
  ENSG00000069956_42 (sequence is synthesized)
cttactgggaaacttggctcctggacttaatccacattcgttaaactgtcaccttggcagtttagtggccatctacacaatgatctgacttgttggcattaaaaagtccaaacatagtca

SEQ ID NO: 55461 - DNA, 120 bp, Artificial Sequence
  ENSG00000069956_43 (sequence is synthesized)
tcaaaggaagaagaaagtaaaactgaaaccccttatataaaatatgcttgctttagggtgacccaggctgagtactaagttgtaaagtcaatttccaataaaaattttatgtgccaatta

SEQ ID NO: 55462 - DNA, 120 bp, Artificial Sequence
  ENSG00000069956_44 (sequence is synthesized)
actcgactgaatataccaaggtggaagattgtgagttttcttcattctgtggctcactgagacattcttattccacaaatgaaaaacagaaggttggagtaaaaaagattgtatggcatg

SEQ ID NO: 55463 - DNA, 120 bp, Artificial Sequence
  ENSG00000069956_45 (sequence is synthesized)
atcaccttctagaagcaataaatggatacgctcaagcaacattaattagatactacaggaatgctttgccttttatctttcctttggaagcagtatccataagccttcatcagaagcttc

SEQ ID NO: 55464 - DNA, 120 bp, Artificial Sequence
  ENSG00000069956_46 (sequence is synthesized)
acagcagtttctctaaaaaagtaatggcttcttaaattgcattttaaaaggatatcatataccctacaggtggaattgtgtaacatttgctgagaggaaaggttgtatcagagtaagatg

SEQ ID NO: 55465 - DNA, 88 bp, Artificial Sequence
  ENSG00000069956_47 (sequence is synthesized)
atccgcccgcccgcccagcactcccaaagtgctgggattacaggcggggtctccctgtgttgcccaggctgggctcaagcaatcatcc

SEQ ID NO: 55466 - DNA, 120 bp, Artificial Sequence
  ENSG00000069956_48 (sequence is synthesized)
gcccgcccagcactcccaaagtgctgggattacaggcggggtctccctgtgttgcccaggctgggctcaagcaatcatcctgactcggcctcaaaaagtgctgggattacaggcatgagc

SEQ ID NO: 55467 - DNA, 120 bp, Artificial Sequence
  ENSG00000069956_49 (sequence is synthesized)
attttaatcttttccttttcactccttcataacctgctgtacagctaaatcattttacaaatacgtctttcctccttttccctaggaatgctttgccttttatctttcctttggaagcag

SEQ ID NO: 55468 - DNA, 120 bp, Artificial Sequence
  ENSG00000069956_50 (sequence is synthesized)
gatgagtcggagaagtcccaactgactttacagtgtacatttatcagaaatgtaaaacatgactgagctttaaggaattgtctacgttaaggcaagaaggttgtatcagagtaagatgga

SEQ ID NO: 55469 - DNA, 120 bp, Artificial Sequence
  ENSG00000069956_51 (sequence is synthesized)
ctcagctgactccggccgggcaaagtctccagtggcgtagcgcgcagcgctcacccggctcgtctcagagccctgaagtccgcccaagttttgagtcttgccatgaatgaggttgtatca

SEQ ID NO: 55470 - DNA, 120 bp, Artificial Sequence
  ENSG00000069966_0 (sequence is synthesized)
ctcacctctcaccatctgctctgtggctcccagtgctgactctggaagctttatcttgggtaaaagatgtgtgatcagacctttctcgttaatgtatttggctcatgtgacaaatgtttc

SEQ ID NO: 55471 - DNA, 120 bp, Artificial Sequence
  ENSG00000069966_1 (sequence is synthesized)
aaacaacgagctctgagaccagttttcaagaagtctcaacaactcagctactgttcaacatgtgcagaaattatggcaaccgaggggctgcacgagaacgagacgctggcgtcgctgaag

SEQ ID NO: 55472 - DNA, 120 bp, Artificial Sequence
  ENSG00000069966_2 (sequence is synthesized)
agcgaggccgagagcctcaagggcaagctggaggaggagcgagccaagctgcacgatgtggagctgcaccaggtggcggagcgggtggaggccctggggcagtttgtcatgaagaccaga

SEQ ID NO: 55473 - DNA, 120 bp, Artificial Sequence
  ENSG00000069966_3 (sequence is synthesized)
aggaccctcaaaggccacgggaacaaagtcctgtgcatggactggtgcaaagataagaggaggatcgtgagctcgtcacaggatgggaaggtgatcgtgtgggattccttcaccacaaac

SEQ ID NO: 55474 - DNA, 120 bp, Artificial Sequence
  ENSG00000069966_4 (sequence is synthesized)
aaggagcacgcggtcaccatgccctgcacgtgggtgatggcatgtgcttatgccccatcgggatgtgccattgcttgtggtggtttggataataagtgttctgtgtaccccttgacgttt

SEQ ID NO: 55475 - DNA, 120 bp, Artificial Sequence
  ENSG00000069966_5 (sequence is synthesized)
gacaaaaatgaaaacatggctgccaaaaagaagtctgttgctatgcacaccaactacctgtcggcctgcagcttcaccaactctgacatgcagatcctgacagcgagcggcgatggcaca

SEQ ID NO: 55476 - DNA, 120 bp, Artificial Sequence
  ENSG00000069966_6 (sequence is synthesized)
tgtgccctgtgggacgtggagagcgggcagctgctgcagagcttccacggacatggggctgacgtcctctgcttggacctggccccctcagaaactggaaacaccttcgtgtctggggga

SEQ ID NO: 55477 - DNA, 120 bp, Artificial Sequence
  ENSG00000069966_7 (sequence is synthesized)
tgtgacaagaaagccatggtgtgggacatgcgctccggccagtgcgtgcaggcctttgaaacacatgaatctgacatcaacagtgtccggtactaccccagtggagatgcctttgcttca

SEQ ID NO: 55478 - DNA, 120 bp, Artificial Sequence
  ENSG00000069966_8 (sequence is synthesized)
gggtcagatgacgctacgtgtcgcctctatgacctgcgggcagatagggaggttgccatctattccaaagaaagcatcatatttggagcatccagcgtggacttctccctcagtggtcgc

SEQ ID NO: 55479 - DNA, 120 bp, Artificial Sequence
  ENSG00000069966_9 (sequence is synthesized)
ctgctgtttgctggatacaatgattacactatcaacgtctgggatgttctcaaagggtcccgggtctccatcctgtttggacatgaaaaccgcgttagcactctacgagtttcccccgat

SEQ ID NO: 55480 - DNA, 120 bp, Artificial Sequence
  ENSG00000069966_10 (sequence is synthesized)
gggactgctttctgctctggatcatgggatcataccctcagagtctgggcctaatcatcttctgacagtgcactcatgtatacctgagaatttgaaatcttcacatgtaaatagatatta

SEQ ID NO: 55481 - DNA, 120 bp, Artificial Sequence
  ENSG00000069966_11 (sequence is synthesized)
cttctagaggagcttagagtttattgcagtgtagcttaggggagcaacccatggctcacaggtcactaagcgtctccaatatgactattaaaactgtcacctctggaaatacactagtgt

SEQ ID NO: 55482 - DNA, 120 bp, Artificial Sequence
  ENSG00000069966_12 (sequence is synthesized)
gagccttcagcactgcgagaataccttcaagtacagtatttttcttttggaacactttttaaaatgtatctgtttttaaggttattctaaattatagtagcctcaactcattctgtcacc

SEQ ID NO: 55483 - DNA, 120 bp, Artificial Sequence
  ENSG00000069966_13 (sequence is synthesized)
agtagaattcagcagttaatatattccatattatttctttgaatcaattcattttcagagcactttaaagtctgatatttctcgatgtgcactgtgatgcctggaaccttcctctggaag

SEQ ID NO: 55484 - DNA, 120 bp, Artificial Sequence
  ENSG00000069966_14 (sequence is synthesized)
tgctgattttatggactgaggactggtgactggtctgtgatagaagcaaattccaattccaaatgtaattagacaaaaatcatttttttagaatgtgtttttattgtaaaagtatctttt

SEQ ID NO: 55485 - DNA, 120 bp, Artificial Sequence
  ENSG00000069966_15 (sequence is synthesized)
tcagcttcctgttctattgtcttttttcagatacaacatttttgtctatggtgaactgctgtaaatgacgcagagaaatgcctaaaaaggacaggtggtttgactcatggatgatgatga

SEQ ID NO: 55486 - DNA, 120 bp, Artificial Sequence
  ENSG00000069966_16 (sequence is synthesized)
tgtcactgtgccacttggacagggcgttttctctgaattgaagggaaagccaatggtgtttgtaaacaaatgcttctgagagcaaagaaaagtcttctgtgtgggaacacaagatagtaa

SEQ ID NO: 55487 - DNA, 120 bp, Artificial Sequence
  ENSG00000069966_17 (sequence is synthesized)
gaacacaagatagtaaacttatttaaaaacctattagtagaattagtggaaacacttaggttaaagtgaatcttgtccatataaattatattcatggccgggcgcggtggctcacgcttg

SEQ ID NO: 55488 - DNA, 69 bp, Artificial Sequence
  ENSG00000069966_18 (sequence is synthesized)
gtggagcttgcagtgagccgaggtcgagccactattcatatgtattgcattgcaattataattacatat

SEQ ID NO: 55489 - DNA, 120 bp, Artificial Sequence
  ENSG00000069966_19 (sequence is synthesized)
ttatattcatatgtattgcattgcaattataattacatatgcagattgattgatagtcatgaataataacgtctgctcctcttacatagaaaaacgatattaaaagaagatcttctcttt

SEQ ID NO: 55490 - DNA, 120 bp, Artificial Sequence
  ENSG00000069966_20 (sequence is synthesized)
atttgagactcagaattccttctagaagaaggaagtgctttttgttataggatcccttcttttcctttttttgtttttttgtaagatgtagatgcttattctttgctttagaaaacttct

SEQ ID NO: 55491 - DNA, 120 bp, Artificial Sequence
  ENSG00000069966_21 (sequence is synthesized)
cacttaaaaagatggcatgcacctaggggaataaaaggtcacctcagacaccaggtgtcattcctggtgaggcctgcctcgtcggtggcctggggtctgccggcaggttctggctgcacc

SEQ ID NO: 55492 - DNA, 120 bp, Artificial Sequence
  ENSG00000069966_22 (sequence is synthesized)
tgaaggctgcgtgcaccttgtcccctggacaggtctcctttcctggccctgctccagcccagcccttcttctagtggtagctctggctttgcaggcccagctccaggccctgctcctcag

SEQ ID NO: 55493 - DNA, 120 bp, Artificial Sequence
  ENSG00000069966_23 (sequence is synthesized)
agagactcttccagagctggagctgggcacagccataagacaggactggaccagatgctcctgtaaacatccaggggtgtgccaggcccaccctcacaactgcttgttcaggtatcgtga

SEQ ID NO: 55494 - DNA, 120 bp, Artificial Sequence
  ENSG00000069966_24 (sequence is synthesized)
tgggccactcggtccaaaatcagccaggccatcttttccatcatctcacttcaaataaacataataattatatttgatcatttgcagagcagttactggtggttttattgtacactgggg

SEQ ID NO: 55495 - DNA, 120 bp, Artificial Sequence
  ENSG00000069966_25 (sequence is synthesized)
tctggggtagagagagaaaaatgaagggcctctgccttcctccagggagcccagagagagtgctttttagtcccagtagattccagtctgggcaggggctcaggaaatgggcccagtgtc

SEQ ID NO: 55496 - DNA, 120 bp, Artificial Sequence
  ENSG00000069966_26 (sequence is synthesized)
tggccagctcctgccaggtgctgaaggggtcagggcaccatgggattcctgagctctgctccagaatgtcccacagtggcccctggtgcagctggcctccttgtggtggcatccccaacc

SEQ ID NO: 55497 - DNA, 120 bp, Artificial Sequence
  ENSG00000069966_27 (sequence is synthesized)
ctctctcccacagccatttttttttttgtctctgcactgtgccttccggctcccagaagtgcaggaaggcacgagaaaggaaggaaaggtggcccagggaagcacattccaggttccatg

SEQ ID NO: 55498 - DNA, 120 bp, Artificial Sequence
  ENSG00000069966_28 (sequence is synthesized)
tttggagaggtggagagcatcttcaggatatgtgcaaagtagactgtgactttccaatccaaaaagccactttaagggcccagggaaagtattccagagaatgcttccactccccgcatg

SEQ ID NO: 55499 - DNA, 120 bp, Artificial Sequence
  ENSG00000069966_29 (sequence is synthesized)
ggcaggaagcctccttcgctgtgagcatgcgctctcgcagtgggtgctgtcgggatttgctgatgagatacttgatttggactatgtgacagcatgtggagactcaggggtaagctccat

SEQ ID NO: 55500 - DNA, 120 bp, Artificial Sequence
  ENSG00000069966_30 (sequence is synthesized)
gggatagattgtattttgcagattgaaaataatgctgagtgcattttataatcagcttttcttttttccagaggacttggggataaacctaccaaaccaattgtggtgaaggggccaaac

SEQ ID NO: 55501 - DNA, 120 bp, Artificial Sequence
  ENSG00000069966_31 (sequence is synthesized)
agatgggcccccaggggtgtagagccttgggcagccccctcctgggccagaaaaaagaaagttcaggcagaaaggtgtgggtgatgggtatttatgggaaatatctgtgacatgaagcca

SEQ ID NO: 55502 - DNA, 120 bp, Artificial Sequence
  ENSG00000069966_32 (sequence is synthesized)
agtccagtgctttagaatgcgcggtcagcctctcaccggtggggccctggcagccgtccctcttctcccaggcgagccagaggtgggcatcccgttgccactgccctcttcccgctcttc

SEQ ID NO: 55503 - DNA, 120 bp, Artificial Sequence
  ENSG00000069966_33 (sequence is synthesized)
tacctcctttgcacccttctctaggttataagtggcttaaaacagcacagggttgtaagggcctttgtgtcccgggctctcatagttgccaggccagctggctgaaaggtggcaccaccg

SEQ ID NO: 55504 - DNA, 120 bp, Artificial Sequence
  ENSG00000069966_34 (sequence is synthesized)
atactgggactcctctgtgagttagagggatgccttggtgacataagagggctggccttcattcacacccacctctgtcacggtcacagaatatatgataatatctgagtttttctcagc

SEQ ID NO: 55505 - DNA, 120 bp, Artificial Sequence
  ENSG00000069966_35 (sequence is synthesized)
ctcagtttccccatttgtaacatgggatgggactaaaatatgtaaagtgcctacctcagcctttagcacatcttcaggaagggttagttcccagcttctccctgtgtcctcctcagtccc

SEQ ID NO: 55506 - DNA, 120 bp, Artificial Sequence
  ENSG00000069966_36 (sequence is synthesized)
cctccacctatcttccctctttctcttcccttcccctcctcctccctctctcctccctctctcccatttccccctccctccctcccatctcctcctccctccctcccatctcctcctcct

SEQ ID NO: 55507 - DNA, 120 bp, Artificial Sequence
  ENSG00000069966_37 (sequence is synthesized)
ccctcccatctcctccctcccatctcctcctccctcccatctcctcctccctcccatctcctcctccctcccatctcctcctcccttcctcctgtcacccctcctccctccctctcatca

SEQ ID NO: 55508 - DNA, 120 bp, Artificial Sequence
  ENSG00000069966_38 (sequence is synthesized)
cctcctccctccctcccatcgcctcctctctccttcctatctcctctttcctcttctctgccccctccccctctcctcattcatccggactcctttttctaacccttctcaatcttcccc

SEQ ID NO: 55509 - DNA, 120 bp, Artificial Sequence
  ENSG00000069966_39 (sequence is synthesized)
cattcctcatctcctcttcctctgtctccctgttccacctctctcctggtctccttccttccccttctgctgtttctccctccctcctcctcccttcccattccccttcccccagcactt

SEQ ID NO: 55510 - DNA, 120 bp, Artificial Sequence
  ENSG00000069966_40 (sequence is synthesized)
ccttttctccccatctcctccccattccccttcccccagctctttcttttctccccatctcctccccatccataggcagcccccactcatatagcaaattagtaattctcatcagttaga

SEQ ID NO: 55511 - DNA, 120 bp, Artificial Sequence
  ENSG00000069966_41 (sequence is synthesized)
attctcatcagttagagcttcgtctgggctagtggttctcaaactttttggtcttaggatctctgtacactttttttttttttttttttttacgtggagttttgctcttgttgcccaggc

SEQ ID NO: 55512 - DNA, 120 bp, Artificial Sequence
  ENSG00000069966_42 (sequence is synthesized)
cacccttaaaagttattgaggaccccaaataacttgctcattgtggattgtatctatccatatttattgtattagaaattaagactgagaaaaagttataaaacacaagaatacagatgc

SEQ ID NO: 55513 - DNA, 120 bp, Artificial Sequence
  ENSG00000069966_43 (sequence is synthesized)
acacgttccattagccatcaaggtgatctttctcccatgccagtagtctctggaaaattcctgagaggatgaaaataaaaaaatcacccatacaaaaaaaaaaagtgtcaatattattat

SEQ ID NO: 55514 - DNA, 120 bp, Artificial Sequence
  ENSG00000069966_44 (sequence is synthesized)
gaaaatagttttgaccgtgaggaccccctgaaagggtctcagggaccctcgggggccctggatcttgctttgagaacagctgatctgggctaatgagcccttttccagcccctctgtgtg

SEQ ID NO: 55515 - DNA, 120 bp, Artificial Sequence
  ENSG00000069966_45 (sequence is synthesized)
agacctcccagaaaccactaagggccttggaagagcttggcaaagaaagaggtgacaggatgattgaggagagccaccctagggaaagccttcagaggaggctttgggacagccccggtc

SEQ ID NO: 55516 - DNA, 120 bp, Artificial Sequence
  ENSG00000069966_46 (sequence is synthesized)
ggtggaggaagtcccagagaggcagtcggaagggctagggaccagctgaggcctgtgacctgaaaatcctttcaaaagaggacgcctggaagcctggggaaggcacagtgggtggggtag

SEQ ID NO: 55517 - DNA, 120 bp, Artificial Sequence
  ENSG00000069966_47 (sequence is synthesized)
aagactggggctgaggcccaggccattcccaagcctggaagagctgattgagtggggatttgtagatcttcatttcccaaacttgcctgctgagaagaatcgtcccacccatggcaggtt

SEQ ID NO: 55518 - DNA, 120 bp, Artificial Sequence
  ENSG00000069966_48 (sequence is synthesized)
cctgcactgcgccttcagggccctgccctgagatctggactgggcgggcctgaggtgggccaggaaatctgagccggaggcccactggggaggccgcgagtgaatcttgtctctgtggat

SEQ ID NO: 55519 - DNA, 120 bp, Artificial Sequence
  ENSG00000069966_49 (sequence is synthesized)
cctttgtaaggattgccatgctaaaccacttgccctctcatccgtgaccggagagaattgggtcactcttccagacataccacagactcctgcttctagacagcacttggctggagccag

SEQ ID NO: 55520 - DNA, 120 bp, Artificial Sequence
  ENSG00000069966_50 (sequence is synthesized)
gctggccttcagggttggtcagtctccacaggggactctggcctcccgtgggctgccacagggccaaccccagtgaaagaaatgaaatgactgaatatgttcatgtcattagaaaaagga

SEQ ID NO: 55521 - DNA, 120 bp, Artificial Sequence
  ENSG00000069966_51 (sequence is synthesized)
tgcagcagggggtggggaggagttggttaatggaatcaaatttgcagcaagataggagtctagtgtttggcggcactgtagggtgactatcgctaacaataatttactgtgtattttcaa

SEQ ID NO: 55522 - DNA, 120 bp, Artificial Sequence
  ENSG00000069966_52 (sequence is synthesized)
gtagctagaagagagaattttgaatgttcctgtcaacctaaataacaaagacaggctcgctaaagatatttaatcaaaagtagggcattgcaacaggaatatgtgtgctgtagtaaactg

SEQ ID NO: 55523 - DNA, 73 bp, Artificial Sequence
  ENSG00000069966_53 (sequence is synthesized)
tagggcattgcaacaggaatatgtgtgctgtagtaaactgtgtgcatattccaggaggtaaagaaaaacaaag

SEQ ID NO: 55524 - DNA, 120 bp, Artificial Sequence
  ENSG00000069966_54 (sequence is synthesized)
tttaaaggaaaaaatgaggaggattacataatggttttgaaataattatccttggctacaaatatcaataacaaaggtcacaccagtccgaggttggacaggcagttgctaggcagatgt

SEQ ID NO: 55525 - DNA, 120 bp, Artificial Sequence
  ENSG00000069966_55 (sequence is synthesized)
ctttgcagaagtaatttttgtgtgaggttgcagcagcctatgtgcaaggttgtaatttttgcagaatcttttgtgatcatttttggtattaggcatacaagcatgagaatcccctcttca

SEQ ID NO: 55526 - DNA, 120 bp, Artificial Sequence
  ENSG00000069966_56 (sequence is synthesized)
tggcctccccagctctatttgtcatggtttgtttttttaaaacactagtgactctatttgaattctaacaactttcacattcccaacacaaatgatagacatttaagggattaatatgct

SEQ ID NO: 55527 - DNA, 120 bp, Artificial Sequence
  ENSG00000069966_57 (sequence is synthesized)
aattaccctgatcattacacattgtatacatgtatcaaaataacacactgtaccccataaatacatacaattatgtgtcaattaaagatcattatttttaaaaataggaccagaaaaaaa

SEQ ID NO: 55528 - DNA, 120 bp, Artificial Sequence
  ENSG00000069966_58 (sequence is synthesized)
gatgcagaccctctagtaaggagatgggatcaggagtgattccatggttaatttaacccacataaacaactaatcgtaagtatggtatgagcgtttatgtaaagactgtgacaacaggaa

SEQ ID NO: 55529 - DNA, 120 bp, Artificial Sequence
  ENSG00000069966_59 (sequence is synthesized)
atgtctgtctttgaacccaaggttatctaaccagcacaccaatggtgaaagattaactttgtcagaaaccaggaaccatgaagcagaggtcactgtttccaacctgtgtgttttccacgg

SEQ ID NO: 55530 - DNA, 120 bp, Artificial Sequence
  ENSG00000069966_60 (sequence is synthesized)
taattggcagcctccccaagggaaattaaaacatatgtccacacagaaatttgaatgcaaatgttcatagcagcattactcataatagcccaaagctgaaacagccccaatgttccacag

SEQ ID NO: 55531 - DNA, 120 bp, Artificial Sequence
  ENSG00000069966_61 (sequence is synthesized)
tggatgaatcgatgaacaaaatatggcgcatccacagaatggaatacaaagaaagaaagcgtggacacatgctgcaacatggatgaaccttgaaaatattgtgccaggggaaagaaacca

SEQ ID NO: 55532 - DNA, 120 bp, Artificial Sequence
  ENSG00000069966_62 (sequence is synthesized)
gagacaaagagccacatgttgtaggattccatgtatatgaaaggtcctaataagcaaactcataaagacaaaaagcagattggtggtcacttagggctagggtgaggagtgacggttagt

SEQ ID NO: 55533 - DNA, 120 bp, Artificial Sequence
  ENSG00000069966_63 (sequence is synthesized)
gggcactgagtttctccggggggaactgaattagatggtggtgattgcacaattctgtgaatagactaaaaaccactggactgtaagagggtgaattttttggtatatgaattacatctc

SEQ ID NO: 55534 - DNA, 120 bp, Artificial Sequence
  ENSG00000069966_64 (sequence is synthesized)
aataaagctgttacttaaaacgtggaaaaaataataagcagtcactagctattctcaataaaacagaaaccacataggtaagaccaatattgtcacattttggttttggctgataatggg

SEQ ID NO: 55535 - DNA, 120 bp, Artificial Sequence
  ENSG00000069966_65 (sequence is synthesized)
gcaagtgagcatagtcaccgttgccagaggatttaccatttacaaataaaagtttctgtggagtgacaaccttttactgtgtgccaggtactgtgctaagcactttgtatataccgattc

SEQ ID NO: 55536 - DNA, 120 bp, Artificial Sequence
  ENSG00000069966_66 (sequence is synthesized)
atgtaatccttgtgacagccccgtgatgccccatttttagatggggagattgaggttaggagagttgaataacttgcccatagctgcacagcttccaagttgcagagacaggattttcac

SEQ ID NO: 55537 - DNA, 120 bp, Artificial Sequence
  ENSG00000069966_67 (sequence is synthesized)
cgagtcttattacaaactgcctcatattgtgtggactggaaattctatgttgaggttaatttattcatttgttgtttagttcttttcatcattgttgagttaccaatggcagttccagag

SEQ ID NO: 55538 - DNA, 120 bp, Artificial Sequence
  ENSG00000069966_68 (sequence is synthesized)
gatttatcatttaccccaaagctactgcaaatctaagagaaaacaatgttcttgctgctaaagtttaatgtacaaaaaggtaaaatcatgactgtcttgcaaataaaacatgaacatgta

SEQ ID NO: 55539 - DNA, 120 bp, Artificial Sequence
  ENSG00000069966_69 (sequence is synthesized)
ccgcggggcggtgctcggggccggggacggctgctggagcggcgcccgccgcggctcagcgcattcccgctctccgcttccctctccgctgcgtccccgcgcgaagatggcaaccgaggg

SEQ ID NO: 55540 - DNA, 120 bp, Artificial Sequence
  ENSG00000069966_70 (sequence is synthesized)
aacagaggacatttaggctggatgaaggcaggctcagggggctaccacgaccatcaggcatctgaagcccctctgtggagacccatcagactcgctctgtgttgccccggggcagggttg

SEQ ID NO: 55541 - DNA, 120 bp, Artificial Sequence
  ENSG00000069966_71 (sequence is synthesized)
gggatgaaagggggcaccagtagccatcagtaatcatccgcaaagggctctcttgtggacacttatgctgcaagagccacttcctccacggtcttatcacctcacccaggccctgtggag

SEQ ID NO: 55542 - DNA, 120 bp, Artificial Sequence
  ENSG00000069966_72 (sequence is synthesized)
cagccagaaggcagggagagcttctcccttgcaggtcccctccattgctgtcagtacccagctggctccagggctctgtgatgccgccagctgggcctatgagggccccgaaccctgagt

SEQ ID NO: 55543 - DNA, 120 bp, Artificial Sequence
  ENSG00000069966_73 (sequence is synthesized)
cctcactgcctttctcccaatcccaggaaggtatgctcagccagagcccaggcctcatacacactggcagtgacaaaaagtaaaattccagccctgtccccatgtctttccctgggcacc

SEQ ID NO: 55544 - DNA, 120 bp, Artificial Sequence
  ENSG00000069966_74 (sequence is synthesized)
cctgtgtgcctttactctatggctgacctttgtacttgtaagctatccagaggctctttgggcctctgccagagtttcctaaaacatacgtttgcttttctcattctcctgcccagaagc

SEQ ID NO: 55545 - DNA, 120 bp, Artificial Sequence
  ENSG00000069966_75 (sequence is synthesized)
ttccagagtgctctcttggcttcagactgagtccccacctgtgaacgggctcacctttcatttagtgcagacataggcccccctggagtttgtctctccccttcccttctttcacctggc

SEQ ID NO: 55546 - DNA, 120 bp, Artificial Sequence
  ENSG00000069966_76 (sequence is synthesized)
cagctctcactcttccttgaagaccaactcagatatcaccacactgggtttgggaccctcctgtgtgcacacctggatcccagcacttctcatgctgttgtcattgatccttgtctactg

SEQ ID NO: 55547 - DNA, 120 bp, Artificial Sequence
  ENSG00000069966_77 (sequence is synthesized)
gtgatgtcaactccccaagcgaacatcagaaatacttgcaaccaagcaaagctaaggttatctgacctgccacagtaagggagaacctccacttggcagaatcttagtaggttctgaaaa

SEQ ID NO: 55548 - DNA, 120 bp, Artificial Sequence
  ENSG00000069966_78 (sequence is synthesized)
tggaggaattagggaagggtacttagaggatttcagggtccaggcttggtgattttaaggtgggtcttgcaaggccgttttagctttggattggtgagcccagcaagcgaacagtctttg

SEQ ID NO: 55549 - DNA, 120 bp, Artificial Sequence
  ENSG00000069966_79 (sequence is synthesized)
cggatggaaaccccaagaaggcctatccgtgtttgaacagctcagccagcccattgcagcatttattcccctctcgccccaagaggacaattagagccaccataggggctgccaatacca

SEQ ID NO: 55550 - DNA, 120 bp, Artificial Sequence
  ENSG00000069966_80 (sequence is synthesized)
acatggaaatgggcaaagcatggaaaacttgcaaccacatgtgcaactgcatgtactatttgtcttctgagtgataagaggcaccaaaattctccattctctctcccctctctttgacca

SEQ ID NO: 55551 - DNA, 120 bp, Artificial Sequence
  ENSG00000069966_81 (sequence is synthesized)
gactccatagccctgtgggaatgaacacgtggagggtggggaagatgaggctgcagtgggactgggcagagctaccctgtgatgcagtctgatccccttgcaagtctggcttgggcatgc

SEQ ID NO: 55552 - DNA, 120 bp, Artificial Sequence
  ENSG00000069966_82 (sequence is synthesized)
acagctcaacttagatttaaattttagctcttaatgaaaataagaccaaaacctatgtgcaggtatgctggaacacctgcattgcattggcatttacaataaagagtattgtgtattaaa

SEQ ID NO: 55553 - DNA, 120 bp, Artificial Sequence
  ENSG00000069966_83 (sequence is synthesized)
tccacatttttttatatcctagggtaatatgtttctagttggacatgaattttagcagatgcatagagctggatgtgttacataatctgtcaatatccaatattgaaatattagatatgc

SEQ ID NO: 55554 - DNA, 120 bp, Artificial Sequence
  ENSG00000069966_84 (sequence is synthesized)
agttctaaattacagaaagaatatattgggtaggcccttctgcaatgtgtagtgaatatgataacagtgaacaatgtcttcaacagtagtttaggaaatgatgctgtggctgtttcttaa

SEQ ID NO: 55555 - DNA, 120 bp, Artificial Sequence
  ENSG00000069966_85 (sequence is synthesized)
ggaagagagcagccttaccaggcccggatagatagctttctggtgactcagcgtggtgcagaacagaattcagagtggagggatggctggcgccctgatctttgtcatctctgtttcccc

SEQ ID NO: 55556 - DNA, 120 bp, Artificial Sequence
  ENSG00000069966_86 (sequence is synthesized)
accctggcatgtgggaggtgctagcacctttcctggctgcctcactggctgttacgagggccaaacagaggaagttcaaggcatgaacatttgtgaaggcatttttcaaaatgtggcggt

SEQ ID NO: 55557 - DNA, 120 bp, Artificial Sequence
  ENSG00000069966_87 (sequence is synthesized)
ctagtggatgagagagcgtcaaagacgaaactaatactgactccttatcgcagtggtttggataataagtgttctgtgtaccccttgacgtttgacaaaaatgaaaacatggctgccaaa

SEQ ID NO: 55558 - DNA, 120 bp, Artificial Sequence
  ENSG00000069966_88 (sequence is synthesized)
gaatccttgaggcaaagcacagtgcctaggactcagtgcgcctgaatcactgcttactgaatgagtgagtaacagtcatgtaatgagaaacaggaagcaaggaactggcttaacagctat

SEQ ID NO: 55559 - DNA, 120 bp, Artificial Sequence
  ENSG00000069966_89 (sequence is synthesized)
catctcaccctgcttcaaggtcgcctgctgtttgctggatacaatgattacactatcaacgtctgggatgttctcaaagggtcccgggtctccatcctgtttggacatgaaaaccgcgtt

SEQ ID NO: 55560 - DNA, 120 bp, Artificial Sequence
  ENSG00000069966_90 (sequence is synthesized)
catcatcgctcagttccttttcatcaactgagcttcctgtggaccagtatgcgaaatcatccatatttgcaccagttttcctcctctgagcttctgacctcccactttgtcctgccccag

SEQ ID NO: 55561 - DNA, 120 bp, Artificial Sequence
  ENSG00000069966_91 (sequence is synthesized)
gcaacttcactccagggggaaatgaaggctgtgtacccacctaatgctgtccttcaaggcaatgaagtgtcagaaattcacttccacaatgctctcaggcattttctccccagcctttgc

SEQ ID NO: 55562 - DNA, 69 bp, Artificial Sequence
  ENSG00000069966_92 (sequence is synthesized)
tttctgtaaggtggaggtgaagcaagagtcccttcttggtgggaatcacttgaggtcaggagttcaaaa

SEQ ID NO: 55563 - DNA, 120 bp, Artificial Sequence
  ENSG00000069966_93 (sequence is synthesized)
tgggcaacagagcgagactctgactcaaagggaaaaaaaaaatgagtcccttctcagtgccttgaagctcatggctcctttgtgggaagctgctggtgaaaaagcatagctccagaagga

SEQ ID NO: 55564 - DNA, 90 bp, Artificial Sequence
  ENSG00000069966_94 (sequence is synthesized)
tcatggctcctttgtgggaagctgctggtgaaaaagcatagctccagaaggatcatgtcaaaaaaagaaagaaaaatagaaagttaaagc

SEQ ID NO: 55565 - DNA, 120 bp, Artificial Sequence
  ENSG00000069966_95 (sequence is synthesized)
gttctcttggcaaaaacaaacaaacaagaactcacagtttttgttgtttaattgtttagcagtatgctaaatccttccctgaacttgatcaaagaagaaaccataagccagcacagtggt

SEQ ID NO: 55566 - DNA, 72 bp, Artificial Sequence
  ENSG00000069966_96 (sequence is synthesized)
gaacttgatcaaagaagaaaccataagccagcacagtggtgcctgcttgtaatcccagctccaccctggcaa

SEQ ID NO: 55567 - DNA, 120 bp, Artificial Sequence
  ENSG00000069966_97 (sequence is synthesized)
attgaatgtgatttaattggcaccatgccagattctttgcatggactgtcttatgtaatcttcacagcagaaaatatgcattattactctcacttttcagatgaggaaactgaggctggg

SEQ ID NO: 55568 - DNA, 120 bp, Artificial Sequence
  ENSG00000069966_98 (sequence is synthesized)
caagaggaagtcatttgccaaaagtatcgcaggtagtaaatggtcagtgcagacatccaatgtggctttgtgcgtctgattcagtgtctgtgctcataaccactttcttatccctgagct

SEQ ID NO: 55569 - DNA, 120 bp, Artificial Sequence
  ENSG00000069966_99 (sequence is synthesized)
ctgggccaagtcttaggaattagatatgtgattgagggaaactatatttatagggggtctactctgtgttctgtgcctgatatcaacacatattatctcactctgcaaggccagtgtcac

SEQ ID NO: 55570 - DNA, 120 bp, Artificial Sequence
  ENSG00000069966_100 (sequence is synthesized)
tgtcccccactaacagggaagaaaactagagatcagtgggcctgacataggagcttcctcttccgtcttctgctgcaaatgttccttgagtccctagaaatagagattctgattccaagg

SEQ ID NO: 55571 - DNA, 120 bp, Artificial Sequence
  ENSG00000069974_0 (sequence is synthesized)
ggaaaatacccgccaacgacccaaaaaaggccggcggcgggtggacgcggcgcgcgaggacccgagccaggcggggacaggacggcggggcgagccagacaaaaagtaaccttcctgaag

SEQ ID NO: 55572 - DNA, 120 bp, Artificial Sequence
  ENSG00000069974_1 (sequence is synthesized)
aggacatgtgattggaagttgtcaattgttgaagcattggtaactccagtctctaacgttttagaaaatcataacaagcggttctctaccctgtaaaggtgaactactgagttcttcatt

SEQ ID NO: 55573 - DNA, 120 bp, Artificial Sequence
  ENSG00000069974_2 (sequence is synthesized)
atgtctgatggagattatgattacctcatcaagtttttagctttgggagactctggtgtagggaagaccagtgtactttaccaatatacagatggtaaatttaactccaaatttatcaca

SEQ ID NO: 55574 - DNA, 120 bp, Artificial Sequence
  ENSG00000069974_3 (sequence is synthesized)
acagtgggcattgatttcagggaaaaaagagtggtgtacagagccagtgggccggatggagccactggcagaggccagagaatccacctgcagttatgggacacagcagggcaggagagg

SEQ ID NO: 55575 - DNA, 120 bp, Artificial Sequence
  ENSG00000069974_4 (sequence is synthesized)
tttcgtagcttaacgacagcgttcttcagagatgctatgggttttcttctactttttgatctgacaaatgagcaaagtttcctcaatgtcagaaactggataagccagctacagatgcat

SEQ ID NO: 55576 - DNA, 120 bp, Artificial Sequence
  ENSG00000069974_5 (sequence is synthesized)
gcatattgtgaaaacccagatatagtgctgtgtggaaacaagagtgatctggaggaccagagagtagtgaaagaggaggaagccatagcactcgcagagaaatatggaatcccctacttt

SEQ ID NO: 55577 - DNA, 120 bp, Artificial Sequence
  ENSG00000069974_6 (sequence is synthesized)
gaaactagtgctgccaatgggacaaacataagccaagcaattgagatgcttctggacctgataatgaagcgaatggaacggtgtgtggacaagtcctggattcctgaaggagtggtgcga

SEQ ID NO: 55578 - DNA, 120 bp, Artificial Sequence
  ENSG00000069974_7 (sequence is synthesized)
tcaaatggtcatgcctctacggatcagttaagtgaagaaaaggagaaaggggcatgtggctgttgagaagtcaagtaagcgacatagtagttcaggtggcccatgcctgggatcttctct

SEQ ID NO: 55579 - DNA, 120 bp, Artificial Sequence
  ENSG00000069974_8 (sequence is synthesized)
atgattgatacatggcacagtgagagattaatgggcattgtgtacaaattgcttctcaccatccccattagacctacgaataaagcatccggttctaaaattaatttgttgcagctttgt

SEQ ID NO: 55580 - DNA, 120 bp, Artificial Sequence
  ENSG00000069974_9 (sequence is synthesized)
aaatatttctttaagattcagcctgagagttaggagaaatatttcagagccaaaagtgccttatacaaccttagcctattatagtaaatcattcaaggattcagaattttgcagtcacag

SEQ ID NO: 55581 - DNA, 120 bp, Artificial Sequence
  ENSG00000069974_10 (sequence is synthesized)
aagagtgtatttattatgtagaatgaatgagggtactgtcacctgccttaatgtaggtaggcccagagtcttacatttaagatcttacatgcagttataaaaccgccacagtcttcaatc

SEQ ID NO: 55582 - DNA, 120 bp, Artificial Sequence
  ENSG00000069974_11 (sequence is synthesized)
cagatttgaagactcatgccataggtgacattctaaaataccattaaagccacttaaatgttaaataagaatatacatgcacatcagctcaatgtctttgagtattaattttatgtaagc

SEQ ID NO: 55583 - DNA, 120 bp, Artificial Sequence
  ENSG00000069974_12 (sequence is synthesized)
attctatttaacatgaatataggacaaatcatggctatatctatagaccttggataaactggattgaccaattatacactcacggtgacttttttattggtgggaaggggattggggtgg

SEQ ID NO: 55584 - DNA, 120 bp, Artificial Sequence
  ENSG00000069974_13 (sequence is synthesized)
ggcaggctggcttaatgtaatatgagcaaccaaagtgggacttctgtctccccgctatattcccattgctctgaatggttgattgaagggtcagggaactagattttatggctttagttc

SEQ ID NO: 55585 - DNA, 120 bp, Artificial Sequence
  ENSG00000069974_14 (sequence is synthesized)
atatttagtttctttttcttcatatttataatgttgatctggcatcctcaggctgcagctttattagcttataacttactcatctctatctttaccagcaggctctgtattgttgatatt

SEQ ID NO: 55586 - DNA, 120 bp, Artificial Sequence
  ENSG00000069974_15 (sequence is synthesized)
tgcaacttgttttgcttttccattggtggaattgaaataattagtttttaattacataagatgcctgtttgctatttggtggaagatagatgttcatattgaagcagtcacatttgtact

SEQ ID NO: 55587 - DNA, 120 bp, Artificial Sequence
  ENSG00000069974_16 (sequence is synthesized)
gtagttcaataaaagaaaaatgaagtattctgtagcctatatttttcatagagctcatgagcatttactgtacttgctgggtcttgccaagatcatttattccgctgcattgccaaagtg

SEQ ID NO: 55588 - DNA, 120 bp, Artificial Sequence
  ENSG00000069974_17 (sequence is synthesized)
tcttcataccaaattaaaggtggttttaatatatgtttcatggaagttgtttataaaattcaaaggtatttcatttaggtgaaaagtcttatttattaaagtggtttgaataaagtagat

SEQ ID NO: 55589 - DNA, 120 bp, Artificial Sequence
  ENSG00000069974_18 (sequence is synthesized)
caaaacttccagagatcttaatggctatataggaagaaatatcactcaccataatttaaataaagaataaaaatacttgtattttgtggtggcaaatgtttggtagaactgtaattagaa

SEQ ID NO: 55590 - DNA, 120 bp, Artificial Sequence
  ENSG00000069974_19 (sequence is synthesized)
aaatacaagtatatttgcgtgatggttacactagaagcccagactttacgactacacaatatattcatgtatctaaactgtacttgtaccccctaaatttatttttaaaaaaggaaaaat

SEQ ID NO: 55591 - DNA, 120 bp, Artificial Sequence
  ENSG00000069974_20 (sequence is synthesized)
aaaagtatcatgaaaaaacctatttttttttccactgtccttccactactcccataacaaacttatccatggttggtaaaattttacatatttctatccttgaaatgaaggcttctttta

SEQ ID NO: 55592 - DNA, 120 bp, Artificial Sequence
  ENSG00000069974_21 (sequence is synthesized)
aggcttcttttaaattccaaagaagtcatggaggcctgtgcatttgaattgtatatgctagtgaggaaaagatttagacatttcaagagcagggttggccaggcgcggtggctcacacct

SEQ ID NO: 55593 - DNA, 120 bp, Artificial Sequence
  ENSG00000069974_22 (sequence is synthesized)
tctcaaaaaaaaaaaaaaaaaaaaagagcagggtcataatcacacagcagtgccttatatagttgccataagacttcagtgcagtacaacataattttacagctacatatcagggcatat

SEQ ID NO: 55594 - DNA, 120 bp, Artificial Sequence
  ENSG00000069974_23 (sequence is synthesized)
gggcatattctatatggtgtatttgtgttagaataacacattaaatgtctttaaacataaaaataagaatgtttgcatgtttcagttttcaagaaccaaatgagtaattagctatagatt

SEQ ID NO: 55595 - DNA, 120 bp, Artificial Sequence
  ENSG00000069974_24 (sequence is synthesized)
ccactggccttaaacatacaattaagtgtatacatgatatagtgcacacacaaaagccacctttaattattgaaataacctgtattctttttggaaatcatttaagtttggtattgaagt

SEQ ID NO: 55596 - DNA, 120 bp, Artificial Sequence
  ENSG00000069974_25 (sequence is synthesized)
actatattttttgtgcatcaatgtatttttctatttacaagcctatgtaaaagtgaagtgtatcttcagtgaaccatgtgccaattaagctgtaataaaaaagtggtctagtctgtcaaa

SEQ ID NO: 55597 - DNA, 120 bp, Artificial Sequence
  ENSG00000069974_26 (sequence is synthesized)
gatgcctgttttgaaagttgatggagcgaactgcttttccaaagactcttttgaaaaactttttaagtaggccattctgactttaacatttctctttgtcttaacattagacaaaaagta

SEQ ID NO: 55598 - DNA, 120 bp, Artificial Sequence
  ENSG00000069974_27 (sequence is synthesized)
cccgacgtggtggcctccttgcggtttcctttcgccgtttccgaaccgagggattgctactcgcctttggcttggcggtctctgtgctcgggggtccgaaaactgctggaaggcccccgg

SEQ ID NO: 55599 - DNA, 120 bp, Artificial Sequence
  ENSG00000069974_28 (sequence is synthesized)
gaaggcccccggtctctggaggggagcaggcggtagcgagtttagtgacgtggagcaggcgcagaacagtcggagatacagtctcgctgtgatgcccaggctggagtgcaatggcgtgat

SEQ ID NO: 55600 - DNA, 90 bp, Artificial Sequence
  ENSG00000069974_29 (sequence is synthesized)
taccacacccggaatcctgggcattcccttgccccggaaacgccgtgtccaggccgacctaagccaggagccgcaggggcgggaagccgg

SEQ ID NO: 55601 - DNA, 120 bp, Artificial Sequence
  ENSG00000069974_30 (sequence is synthesized)
gagtacgcccggcacctccggctgctacggtggcgaccgcgaactgatgccgtggaaaacacccttagaacatggctttttggggaggtgaataggggagagtccccaaacgacacctcg

SEQ ID NO: 55602 - DNA, 120 bp, Artificial Sequence
  ENSG00000069974_31 (sequence is synthesized)
ccgcgcaccggtccttggtgcagtttgtaaatgtccctcctgtgtcccaaaacgaaaacactcctatattttgtagcgccttccagaatggggcagcggaaactagtgttgggacaaagg

SEQ ID NO: 55603 - DNA, 120 bp, Artificial Sequence
  ENSG00000069974_32 (sequence is synthesized)
aactagtgttgggacaaaggaggcgagcggggccttttcggggctcacagaggacccctcggaggcgcggccgccggggagagcgcgacagcaccccgccccccgccagccgggcggggg

SEQ ID NO: 55604 - DNA, 120 bp, Artificial Sequence
  ENSG00000069974_33 (sequence is synthesized)
ttaatgatgtctactaaatttcttgggattagtttgaaaagtgcattttcagtgaccacggagtgggtatgaatactgaccgcattcttcctttcttttctgtacttgaataaagaaaca

SEQ ID NO: 55605 - DNA, 120 bp, Artificial Sequence
  ENSG00000069974_34 (sequence is synthesized)
taggtttttactttcaggaaattgttgaatatgagagctgattaggaaattgaattattctgagagtcttgcttatcctctgagggttgtttgacaaaaattcaagcttattggtgtttt

SEQ ID NO: 55606 - DNA, 120 bp, Artificial Sequence
  ENSG00000069974_35 (sequence is synthesized)
cactttaaagcccaatgtgcatttataacaaaaatgaataatggatatgaagcttggggtagaataggcattggacttggagctaggagatctagattctagatcgtgcaaatcagtcta

SEQ ID NO: 55607 - DNA, 120 bp, Artificial Sequence
  ENSG00000069974_36 (sequence is synthesized)
cctctctgggttctgttttaccctttagaaaactgaacccagagagtggaaggtctgaacatttattttcagatcaagaaagcagataattgtcttaaagatacaatctgaaaagtgcaa

SEQ ID NO: 55608 - DNA, 120 bp, Artificial Sequence
  ENSG00000069974_37 (sequence is synthesized)
gagaaaagcaaaggaggtgagtacgggacatgctggatttgagatgccagcaagatatctgggtggactcccttgtaggcagttttacttatgaaattggaggccagctgcaaggtctga

SEQ ID NO: 55609 - DNA, 120 bp, Artificial Sequence
  ENSG00000069974_38 (sequence is synthesized)
tgtgattggaagttgtcaattgttgaagcattggtaactccagtctctaacgttttagaaaatcataacaagcggttctctaccctgtaaagatttatgtgatcccaatgcaatgcaatg

SEQ ID NO: 55610 - DNA, 120 bp, Artificial Sequence
  ENSG00000069974_39 (sequence is synthesized)
ctgcttgacttgaggctctgcccttatccacgggctagccatacctgaaacgtgaggttgcagatctgcactgaagcactctgaggaaacacactgcagtggcttttggggctcagcatt

SEQ ID NO: 55611 - DNA, 120 bp, Artificial Sequence
  ENSG00000069998_0 (sequence is synthesized)
ctggtggaccagctggctcctaaagaggagaggggactaaatcatgtatgcttggttctttcttcccagcttctctcagagcccacccacctttgggttcctgttggacatcgatggagt

SEQ ID NO: 55612 - DNA, 120 bp, Artificial Sequence
  ENSG00000069998_1 (sequence is synthesized)
gcttgtgcggggccacagagtgatccctgctgctctgaaagccttccgaaggctggtgaactcccaggggcagctgcgggtgcccgtggtttttgttacaaatgctgggaacatcttaca

SEQ ID NO: 55613 - DNA, 120 bp, Artificial Sequence
  ENSG00000069998_2 (sequence is synthesized)
acacagcaaagcccaggagctgtcagccctgctggggtgcgaggtggatgcagaccaagttatcctctctcacagccccatgaagctcttctccgagtaccatgagaagcggatgctggt

SEQ ID NO: 55614 - DNA, 120 bp, Artificial Sequence
  ENSG00000069998_3 (sequence is synthesized)
gtctggacaggggcccgtgatggaaaatgcccagggactgggcttccgaaatgtcgtcaccgtggatgagctgcggatggcctttcctctgcttgacatggtggacctggagcggcggct

SEQ ID NO: 55615 - DNA, 120 bp, Artificial Sequence
  ENSG00000069998_4 (sequence is synthesized)
aaagaccacgcccctcccgaggaatgacttcccccgcattgaaggggtgctcctcctaggggagccggtccgctgggagaccagcctgcagctgatcatggatgtcctcctcagcaatgg

SEQ ID NO: 55616 - DNA, 120 bp, Artificial Sequence
  ENSG00000069998_5 (sequence is synthesized)
gagccctggggctggcctggcaacacccccctacccccacctccccgtcctagccagcaacatggatctcctgtggatggctgaagccaagatgcccaggtttggacatggcacctttct

SEQ ID NO: 55617 - DNA, 120 bp, Artificial Sequence
  ENSG00000069998_6 (sequence is synthesized)
gctgtgcctggaaaccatttaccagaaagtgacgggcaaggagctgagatacgagggcctgatgggcaaacccagcatcctcacttaccagtatgccgaggacctgatcaggcgacaggc

SEQ ID NO: 55618 - DNA, 120 bp, Artificial Sequence
  ENSG00000069998_7 (sequence is synthesized)
cctatgtctgacgtatacggcgccaacctgttccaccagtacctgcagaaggcaacgcatgatggggcgccagaactaggggccgggggcacacggcagcaacagccctcagcaagccag

SEQ ID NO: 55619 - DNA, 120 bp, Artificial Sequence
  ENSG00000069998_8 (sequence is synthesized)
agctgcatctccatcctggtgtgtacaggcgtctacaatcccaggaacccacagtccacggagcctgtccttggaggaggggagcctccattccacgggcaccgagacttatgcttcagt

SEQ ID NO: 55620 - DNA, 120 bp, Artificial Sequence
  ENSG00000069998_9 (sequence is synthesized)
ccagggctcatggaggcctcccacgtggtgaatgacgtgaatgaggctgtgcagctggtcttccgcaaggagggctgggctttggagtgagggcagtgcggtggaggtgagggggtgagc

SEQ ID NO: 55621 - DNA, 120 bp, Artificial Sequence
  ENSG00000069998_10 (sequence is synthesized)
ctggacctgtgggcgagtcccattggctgggctctggcctgatcactgggctcaggtcagggcttggttcccttgccacccttcttgctgccccatgagtgtggcattactggtcacttg

SEQ ID NO: 55622 - DNA, 120 bp, Artificial Sequence
  ENSG00000069998_11 (sequence is synthesized)
gaagaagacagtgactctttttccctgctgggtagcattttgtatggaacggttggaattttctgggcccagttcccacgtgcctttcgtggcagtctaacctcaggccattctcttccc

SEQ ID NO: 55623 - DNA, 120 bp, Artificial Sequence
  ENSG00000069998_12 (sequence is synthesized)
ctgtgtgcctcagtgtccttctcatttcagtagggacttctgaaatgggggaggcagtgtggaatactgtggatgtctgtgcagagcctttgccggcactgaaggcatgcagcctgtcgg

SEQ ID NO: 55624 - DNA, 120 bp, Artificial Sequence
  ENSG00000069998_13 (sequence is synthesized)
cagagtgtcttaacaccagatgctactttttactgtattgtagtttattgcccggagatgtggggctttttttttaaataaaataatcataataaatgttcatgatgctgactcttgtga

SEQ ID NO: 55625 - DNA, 80 bp, Artificial Sequence
  ENSG00000069998_14 (sequence is synthesized)
gtgcacgtgcgcacggcgacggccggatggctgcgtggggctgtgtggctgcgctcggcgcggcgcgtgggctttgctgg

SEQ ID NO: 55626 - DNA, 120 bp, Artificial Sequence
  ENSG00000069998_15 (sequence is synthesized)
tgcttactgtgtgtctagtcctgggctgtttaccgatgatgtagctcatttttatcctcacaatagctaagtgctgttgctgttatgtagttgcagttgaggaaactgaggcttagagaa

SEQ ID NO: 55627 - DNA, 120 bp, Artificial Sequence
  ENSG00000069998_16 (sequence is synthesized)
gagaagttacttggccacagtcatacaggagaatcggtggagtccaggttgggtttcaagtctctatcactccacaccccctgtcctggctgttaggttctgccagtccctggggctcag

SEQ ID NO: 55628 - DNA, 120 bp, Artificial Sequence
  ENSG00000069998_17 (sequence is synthesized)
agagaagcgactgagggaacaggagcccttgctaagtcatgtgagggagaatgtggtggcagagtcccagccagcaaggagaagtagccctgagacatgctgcttttgttttgtaacctc

SEQ ID NO: 55629 - DNA, 120 bp, Artificial Sequence
  ENSG00000069998_18 (sequence is synthesized)
ttctgtgaagcactggtggactgaagtcagaatgggagccctcaggaatctccttcctgggccctgggccttgtgcacccagggtggatgggggtgctcctcctaggggagccggtccgc

SEQ ID NO: 55630 - DNA, 120 bp, Artificial Sequence
  ENSG00000069998_19 (sequence is synthesized)
gggccgccccgcccgcaggtgctatgctgtgggccccgctcaggtgaggacgtccgggttctggccgagccactcgccactcagggccggaggcggggcggggagccgcggggaaggagg

SEQ ID NO: 55631 - DNA, 120 bp, Artificial Sequence
  ENSG00000069998_20 (sequence is synthesized)
ggcggccgggctggtatcccagcctcctgggaactgcctggaccgtcgtcgcgcccgagtgcatcgcgttcttgctggagggcggatgcgccctgccttcctctgactcgctggcggcct

SEQ ID NO: 55632 - DNA, 120 bp, Artificial Sequence
  ENSG00000069998_21 (sequence is synthesized)
cggaaacgctactcccgcgggagagcgctcgtgggacggcctgggccaggctgcttgtcagcccctgcgcttcccggcagtttccgcgtccctgttttccctgcgcgtcttctgatttcc

SEQ ID NO: 55633 - DNA, 120 bp, Artificial Sequence
  ENSG00000069998_22 (sequence is synthesized)
accatgaggacgtttgggtcgtgattttcatctgcatgtggaggaaactgggccgcgcgccgggagccgcgcctgcgggtgctccgcccccaagtgcctgtgggtttggtgcgggccttg

SEQ ID NO: 55634 - DNA, 120 bp, Artificial Sequence
  ENSG00000069998_23 (sequence is synthesized)
gagccggcgcctgctgtgtgcccggcgcggtagtgatgtgtgagcctccccgcaacttctgagaaggtgtgaccttgtgtggtcaggaagccgaagcttgacgagttttcaagtacgttt

SEQ ID NO: 55635 - DNA, 120 bp, Artificial Sequence
  ENSG00000069998_24 (sequence is synthesized)
aaaccaggtggatgcagaccaagttatcctctctcacagccccatgaagctcttctccgagtaccatgagaagcggatgctggtgtctggacaggggcccgtgatggaaaatgcccaggg

SEQ ID NO: 55636 - DNA, 120 bp, Artificial Sequence
  ENSG00000069998_25 (sequence is synthesized)
agctcagagacagccccacacaggggagtgacctgtcccgggtcacatagttgtttagtggcagagccaagactaccatggcctggggatggagtggaccctcgaggctggtcgagtgaa

SEQ ID NO: 55637 - DNA, 120 bp, Artificial Sequence
  ENSG00000069998_26 (sequence is synthesized)
gctgcctgctcaagaaccgacatgaggagaaatggcccatcaggcgtgatgccgccttcgtctccacggcctcaccttagctgcctgattttagactcttgcttggctatatcttgtgtc

SEQ ID NO: 55638 - DNA, 120 bp, Artificial Sequence
  ENSG00000069998_27 (sequence is synthesized)
ctctcccaccagagaaagacagctgaccacccttcctcctggtgacttcacccatggtgtcctgcctgttctgtggccccacctggccattgtcttttcgcctttcttgcatctttctca

SEQ ID NO: 55639 - DNA, 120 bp, Artificial Sequence
  ENSG00000069998_28 (sequence is synthesized)
gtcctctccagctttcccttggcttgggcttgaccacgggtgtggggtctgtggagtgtgtctcccctcccctcccagcaccctggaggtggggttgtggttctcctggagtggaaggcg

SEQ ID NO: 55640 - DNA, 120 bp, Artificial Sequence
  ENSG00000069998_29 (sequence is synthesized)
acttgtgttgatagcctctcctttgtctctctgcagcccctcccgaggaatgacttcccccgcattgaaggtaagagaggtcctctttgatgagttgtgaggtcttttctccgtctcctc

SEQ ID NO: 55641 - DNA, 120 bp, Artificial Sequence
  ENSG00000069998_30 (sequence is synthesized)
tctggccctcaggctgtctcagtgtgactgcctgcagcctggttcagcagcaaggggccttggagtcaggacacctgggctctggtctggatctgccacttaccacctctgagactgttg

SEQ ID NO: 55642 - DNA, 120 bp, Artificial Sequence
  ENSG00000069998_31 (sequence is synthesized)
ttagtctttccttccccatgccactcactattccaggaaaaccgtaagcttagagaattttagtggtggaaagacacctagaggtgatctagtctagtgtttctcaacttttaaacccag

SEQ ID NO: 55643 - DNA, 120 bp, Artificial Sequence
  ENSG00000069998_32 (sequence is synthesized)
ttctcccctttttataccaagaacattggaatatcccctttattatcctgaagtgaaattcttaggtaatataacttctgtacacacatattaaaaattagttcagtataaagccctaac

SEQ ID NO: 55644 - DNA, 120 bp, Artificial Sequence
  ENSG00000069998_33 (sequence is synthesized)
tgtaatagggggatataaaaggaaacatttttagtaagaagataatgtatttcagtatgtagtagttatccaagaagtaaaatggttgcactaaacagaatcaccatgaatgttaacagc

SEQ ID NO: 55645 - DNA, 120 bp, Artificial Sequence
  ENSG00000069998_34 (sequence is synthesized)
tacaaatgcaggctgatgtgtgtttataggtgtgacaggcgtgttttaccggtgactcagaaattaggggcagcattgccgttggtcaagtgattttccaaaataggtaacagttcttgg

SEQ ID NO: 55646 - DNA, 120 bp, Artificial Sequence
  ENSG00000069998_35 (sequence is synthesized)
tagagttttgaaaaggcaaagtacagtcttctcttgacttacacgatagttgtatttttggaaaaattgatgtttattgaagctgtacaaaaatgctttgtgattgtatgtaaaatagaa

SEQ ID NO: 55647 - DNA, 120 bp, Artificial Sequence
  ENSG00000069998_36 (sequence is synthesized)
tcgttcaagtaattctgaaaaggttgttcacctgtgtggataccaggatatcaggtgggacattcaaatgttatgaggacatgggaaagttttttctttttcttcttgttgttttgtaga

SEQ ID NO: 55648 - DNA, 86 bp, Artificial Sequence
  ENSG00000069998_37 (sequence is synthesized)
ctgagctcaagcaatcctacacaagccaccgcacgcagccatgggatggtttttttaaaaattaattttagtgtgggatagttttt

SEQ ID NO: 55649 - DNA, 120 bp, Artificial Sequence
  ENSG00000069998_38 (sequence is synthesized)
tggtttttttaaaaattaattttagtgtgggatagtttttgattgcacaggattgtcctgagtatgtagcgtccctggccccctcccacaaccttcacttgctaggttctagtcattgtg

SEQ ID NO: 55650 - DNA, 120 bp, Artificial Sequence
  ENSG00000069998_39 (sequence is synthesized)
acaactaaaattgcctctgatttgtaaagcacctcagcaggggcggtgctgccccatggagaatcactggtctggtgcagttcaccggccctgtaccttagtgtcagcagtgttctttgc

SEQ ID NO: 55651 - DNA, 120 bp, Artificial Sequence
  ENSG00000069998_40 (sequence is synthesized)
tgcccagctgggtgcaccatgggtggagggcttgtggatgggtagccctagctggcatcctgagggcctgccgcctgccatctgccctgcagccctcacctgcgcctctgttctttaaag

SEQ ID NO: 55652 - DNA, 120 bp, Artificial Sequence
  ENSG00000070010_0 (sequence is synthesized)
gtaccggcttggcgcggcggcagcggcagcggcggctgggagagcggtcggcggggtttcttcgttgcattgcctgagaggagcggagtctgccaggtggtgtccatcatgttctctttc

SEQ ID NO: 55653 - DNA, 120 bp, Artificial Sequence
  ENSG00000070010_1 (sequence is synthesized)
aacatgttcgaccaccctattcccagggtcttccaaaaccgcttctccacacagtaccgctgcttctctgtgtccatgctagcagggcctaatgacaggtcagatgtggagaaaggaggg

SEQ ID NO: 55654 - DNA, 120 bp, Artificial Sequence
  ENSG00000070010_2 (sequence is synthesized)
aagataattatgccaccctcggccctggaccaactcagccgacttaacattacctatcccatgctgttcaaactgaccaataagaattcggaccgcatgacgcattgtggcgtgctggag

SEQ ID NO: 55655 - DNA, 120 bp, Artificial Sequence
  ENSG00000070010_3 (sequence is synthesized)
tttgtggctgatgagggcatctgctacctcccacactggatgatgcagaacttactcttggaagaaggcggcctggtccaggtggagagcgtcaaccttcaagtggccacctactccaaa

SEQ ID NO: 55656 - DNA, 120 bp, Artificial Sequence
  ENSG00000070010_4 (sequence is synthesized)
ttccaacctcagagccctgacttcctggacatcaccaaccccaaagccgtattagaaaacgcacttaggaactttgcctgtctgaccaccggggatgtgattgccatcaactataatgaa

SEQ ID NO: 55657 - DNA, 120 bp, Artificial Sequence
  ENSG00000070010_5 (sequence is synthesized)
aagatctacgaactgcgtgtgatggagaccaaacccgacaaggcagtgtccatcattgagtgtgacatgaacgtggactttgatgctcccctgggctacaaagaacccgaaagacaagtc

SEQ ID NO: 55658 - DNA, 120 bp, Artificial Sequence
  ENSG00000070010_6 (sequence is synthesized)
cagcatgaggagtcgacagaaggtgaagccgaccacagtggctatgctggagagctgggcttccgcgctttctctggatctggcaatagactggatggaaagaagaaaggggtagagccc

SEQ ID NO: 55659 - DNA, 120 bp, Artificial Sequence
  ENSG00000070010_7 (sequence is synthesized)
gaagaggatgaagctggaggcagattcgtcgctttctctggagaaggacagtcattgcgtaaaaagggaagaaagccctaagtgaggactgttggctgattggaaaataataaaagaatc

SEQ ID NO: 55660 - DNA, 120 bp, Artificial Sequence
  ENSG00000070010_8 (sequence is synthesized)
atttgcaacatcttggcttttagttactggcactgacagggacgagcctcatcagagaatactctgttacttaagatttatttagagttacctaagaattattaagtttgacttggaagt

SEQ ID NO: 55661 - DNA, 120 bp, Artificial Sequence
  ENSG00000070010_9 (sequence is synthesized)
ggagcagcaggactttgtagttgtatgcttgatttggggaaagacaaagagctgtccctgagggcctgtagatagctgcctcctcacctcttcacgctttcagcttgaggggagctccca

SEQ ID NO: 55662 - DNA, 120 bp, Artificial Sequence
  ENSG00000070010_10 (sequence is synthesized)
ctgcctcagcaggagcaattctgcatccctaattctgtcaaaacctatgaaggtgactaaattgtctaacatgaagtgttctttctttttcttcatttatcctttcttttcctacatcaa

SEQ ID NO: 55663 - DNA, 120 bp, Artificial Sequence
  ENSG00000070010_11 (sequence is synthesized)
ttgcataggtgtcagtctttggcctaaaaaaaggctttaaatagacatgtgttctataagtagtggctgtcccactactgtggctgcaatttaagtatttgacaaagaatgtttctattt

SEQ ID NO: 55664 - DNA, 120 bp, Artificial Sequence
  ENSG00000070010_12 (sequence is synthesized)
ttattttacatatttttttcaaaaacaccactcagaagaacctgatctgaatgagtttgcacttttattctcatttcatatggacataactggctccttagtgaacctgttcatagtgaa

SEQ ID NO: 55665 - DNA, 120 bp, Artificial Sequence
  ENSG00000070010_13 (sequence is synthesized)
acaactccatggagaagcaaacatgtgaatgttagaatgaacaaatgctaaagagatgttcctctccttcttccctactccccaactcccaattttaatttattaaatcatccaagcttc

SEQ ID NO: 55666 - DNA, 80 bp, Artificial Sequence
  ENSG00000070010_14 (sequence is synthesized)
ctgaggtagggcccggcggggcagggcggggcgggacggcggcggaggtgccgagtcacccgggcctgagtccggcctgc

SEQ ID NO: 55667 - DNA, 120 bp, Artificial Sequence
  ENSG00000070010_15 (sequence is synthesized)
cggcctgcaggctcatcggccgcaccgggcacaagcaggacccttgaccactaaccgcctgtggtcgcgtccgccggtcctgaacgtggctcgcattctgtctcagccggacttgccctc

SEQ ID NO: 55668 - DNA, 120 bp, Artificial Sequence
  ENSG00000070010_16 (sequence is synthesized)
ctctggggcgtaccggcttggcgcggcggcagcggcagcggcggctgggagagcggtcggcggggtttcttcgttgcattgcctgagaggagcggagtctgccaggtggtgtccatcatg

SEQ ID NO: 55669 - DNA, 120 bp, Artificial Sequence
  ENSG00000070010_17 (sequence is synthesized)
aagcaggacccttgaccactaaccgcctgtggtcgcgtccgccggtcctgaacgtggctcgcattctgtctcagccggacttgccctccttgacgaaagaaaggaaggtttgtgtccatt

SEQ ID NO: 55670 - DNA, 120 bp, Artificial Sequence
  ENSG00000070010_18 (sequence is synthesized)
ctgcgtggccctggccaagtgcactgggtgctgtctgggccacctctgtcactttccagacacttcatggagaccacaatgaagcccttctttcagttggtctgtgtcacctggcacaaa

SEQ ID NO: 55671 - DNA, 120 bp, Artificial Sequence
  ENSG00000070010_19 (sequence is synthesized)
gccaggatgcacagtatgtccagtggaaggagggagcagcttatctgccttcagctccagccccttctgtggctccctagtacctccgcccagctgtgcactggcccgtcaacctcactg

SEQ ID NO: 55672 - DNA, 120 bp, Artificial Sequence
  ENSG00000070010_20 (sequence is synthesized)
catgccagcctgagagctgattcactccaggccaataggtagcaatgactgcagtttctatgtcaccaagcagaaagcaaaggtatcaggttctagtggattctttttgttcacctctga

SEQ ID NO: 55673 - DNA, 120 bp, Artificial Sequence
  ENSG00000070010_21 (sequence is synthesized)
acttaagccaggtgtatgtgttgacagcatcaggaagtaggcagtgcaggtacgggacggtgctgtgtgcaccaatcaagatctctagctccatggccctgatttttcctgttacgatca

SEQ ID NO: 55674 - DNA, 120 bp, Artificial Sequence
  ENSG00000070010_22 (sequence is synthesized)
tggcataagagtggccactccattctacttctttttttttatttttttttaatgcatacttgaaaaaaaaaacaaacagtcaaacaacacagacagataggaagttaagaaaagctgcct

SEQ ID NO: 55675 - DNA, 120 bp, Artificial Sequence
  ENSG00000070010_23 (sequence is synthesized)
cctttcccagtagcgctctctccgcatgttttcttaggagcaaggcactgctgggtgtgctctggatgcatatgggccatgtatattctttgctgcctatgttctggacacgatggcctt

SEQ ID NO: 55676 - DNA, 120 bp, Artificial Sequence
  ENSG00000070010_24 (sequence is synthesized)
gttgagcctcctgtcccacaggcagggggatgtcctatgggaagagctagttaacttgtccttcagagctctgacctagacatgcttgtttggctgtcagtgaccaggaatgggccatgc

SEQ ID NO: 55677 - DNA, 120 bp, Artificial Sequence
  ENSG00000070010_25 (sequence is synthesized)
ccattttctcagggtttttacatgtgttgcaatgcagacttttttttgagacggagtctcactctgctgctcaggttggagtgcagtggcacggtctcagctcactgcaaactctgcctc

SEQ ID NO: 55678 - DNA, 120 bp, Artificial Sequence
  ENSG00000070010_26 (sequence is synthesized)
cagcctcccaaagtgctgggattacgtgcatgagccaccgcgccctgccccaatgcagacttatcaggttgatctcagatgctgttttgtcagcacaattaacttgttagtgtgtggaga

SEQ ID NO: 55679 - DNA, 120 bp, Artificial Sequence
  ENSG00000070010_27 (sequence is synthesized)
gctgttttgtcagcacaattaacttgttagtgtgtggagaaagggcgtcacttccatcagttgagagcctggtgttttctggtctggctgaggtctggatgaaagcagtcttggcaccga

SEQ ID NO: 55680 - DNA, 120 bp, Artificial Sequence
  ENSG00000070010_28 (sequence is synthesized)
gcagagaaagtgggaagctggtgctgcagcaggtgccagagtacgcagaggccatatggggagcccgccctgcctgcagaggcctcgtgttctcagcctgagggctctggctctgctcct

SEQ ID NO: 55681 - DNA, 120 bp, Artificial Sequence
  ENSG00000070010_29 (sequence is synthesized)
ggaagggcacttcgtaccgtggcacttcatatttgggagcaaagaaagcatccaccacataaggcgcttttcacaaagttgctctggttctggaaagctgtttgaccaagcgaggtgaac

SEQ ID NO: 55682 - DNA, 120 bp, Artificial Sequence
  ENSG00000070010_30 (sequence is synthesized)
ctagatagcctcaccctttcaccctcaagttggactcacagtggcaggctctggagccacatttcatgtgacctttttatgtaaagtccttcagcaaattgatgaggaagacatggcaaa

SEQ ID NO: 55683 - DNA, 120 bp, Artificial Sequence
  ENSG00000070010_31 (sequence is synthesized)
atattccacatgaatagacatttccttgtgtgggcatttgggttctacagttttactgttataaaaagtatttgctggtttctttattttaatttctattaactaaagttatcagctcaa

SEQ ID NO: 55684 - DNA, 120 bp, Artificial Sequence
  ENSG00000070010_32 (sequence is synthesized)
aagatagaaacaacagaagtataaatgaaagcatctttgattttgaggaacttttgagaggacctatctgactcattaaatcttttttgttctttagtactcccacaggattttttaaaa

SEQ ID NO: 55685 - DNA, 120 bp, Artificial Sequence
  ENSG00000070010_33 (sequence is synthesized)
tcccatggtataatttgtatacaataaaatgcacacagttcagccagtttgaaaatgtatacacccatgtaatcagaacatttccatgtccccaaaaggtcctttcctgtcagtccccac

SEQ ID NO: 55686 - DNA, 120 bp, Artificial Sequence
  ENSG00000070010_34 (sequence is synthesized)
ctgatcccctggcccagaaacctctcagctacctcccatcctcatagatctgtctttctcagggttccatgtggatggaatctcactgcccttttgtggttggttatttccccttccccc

SEQ ID NO: 55687 - DNA, 120 bp, Artificial Sequence
  ENSG00000070010_35 (sequence is synthesized)
agcttggcatttgttaccccagcttggcatttcatccatattattgcatattaggagttccatccttctttattgccaagtagtactttattgtattaaaagcttcgtgtttcaagtacc

SEQ ID NO: 55688 - DNA, 120 bp, Artificial Sequence
  ENSG00000070010_36 (sequence is synthesized)
atcatggtacagtctctacctaccagtaatcatctaacatggaaacttgtttcagattaaggtatccatcttgccatgttgccttgacagaatgtgtctgcagattagaaaacgcactta

SEQ ID NO: 55689 - DNA, 120 bp, Artificial Sequence
  ENSG00000070010_37 (sequence is synthesized)
gctcctaggaggtgttcctcactaaaatgaaggaataaggtagaaataagaaagtcatagaatccaggaaataaggagcccccactaacatgtacggcacctagagaaaggccagtccag

SEQ ID NO: 55690 - DNA, 120 bp, Artificial Sequence
  ENSG00000070010_38 (sequence is synthesized)
ccaaagccgtgtatctttttcaaataagcggagttcttctagacaaaggagagtgtgctggcggttgttaaacatcatgtactgtattgaatctgtgcctgctttggggatcacacattt

SEQ ID NO: 55691 - DNA, 120 bp, Artificial Sequence
  ENSG00000070010_39 (sequence is synthesized)
ttatgaatttaaacttggtaagataactttcatcagaaattcacgtccccttgtcaaaaaggttgaagaggtgagtgtatttccttgtatttccttggttggtaatgaggagatttattt

SEQ ID NO: 55692 - DNA, 120 bp, Artificial Sequence
  ENSG00000070010_40 (sequence is synthesized)
atgaggagatttatttgctagtgatgactgaagttcttggcattctgagtaggggtgtgcattagtctgtttccaagctgctggtaaagatgtacccgagactgggcaatttacaaaaga

SEQ ID NO: 55693 - DNA, 120 bp, Artificial Sequence
  ENSG00000070010_41 (sequence is synthesized)
ctcatgagacttattcactatcatgataacagcacggaaaagacccgccctcatgactcagttacctcccaccgactcagttacctcccacctggtccctcccacaacacgtggtaattc

SEQ ID NO: 55694 - DNA, 120 bp, Artificial Sequence
  ENSG00000070010_42 (sequence is synthesized)
atttgggtggggacgcagccaaaccacatgagggtgtctgtcatgttttccctttcctagggtccctctgctccctggtgtcctgtttttttctgtagagctggtgtagggtgtatgaaa

SEQ ID NO: 55695 - DNA, 120 bp, Artificial Sequence
  ENSG00000070010_43 (sequence is synthesized)
gggtgtatgaaacagaagacttgcagcatgggggtcaggagctctgtcttgctctagagccgactccaggctctgttatcacagaactgtgtgccctgggtgggcttcgtcttccaacag

SEQ ID NO: 55696 - DNA, 120 bp, Artificial Sequence
  ENSG00000070010_44 (sequence is synthesized)
agaccttgaacttcaaatataggcagcaccttctagctgagcagggtggtggcgggacagaggaaggcaagggctgagcatcctgtagacatgggcactttgtgggaatatggccaggcc

SEQ ID NO: 55697 - DNA, 120 bp, Artificial Sequence
  ENSG00000070010_45 (sequence is synthesized)
tggcagcaactggaacgcagtcacctctttgtgatgaggatttctacaacaccagcgcttcagacccatcgctctcctggttccttttctcaaaggattggacccttgaggatccaggat

SEQ ID NO: 55698 - DNA, 120 bp, Artificial Sequence
  ENSG00000070010_46 (sequence is synthesized)
cagggcagagggcagatgtactgagccacccattcaggaccagctgctacatgggagccatcccaattactgaactcttttctctagcacttggggtggttggggacagagaccactgtg

SEQ ID NO: 55699 - DNA, 120 bp, Artificial Sequence
  ENSG00000070010_47 (sequence is synthesized)
aagtttgcacacctggtcctactcacaaccacttctgggctcaatgttcaagttgaaacagcattgggcattgggacctttcaggctcagaggagcaaacatagtggccagtcagacctc

SEQ ID NO: 55700 - DNA, 120 bp, Artificial Sequence
  ENSG00000070010_48 (sequence is synthesized)
accctccagctcctccttcaggcaccatccaggcttcaccagctacaggctgcctttctcactaaaagccagtgcctgactccgacctaagaccttagcatgggacgtcccccaggctga

SEQ ID NO: 55701 - DNA, 120 bp, Artificial Sequence
  ENSG00000070010_49 (sequence is synthesized)
ctgtgacctgactgttgcaaatttacagaaggcaggggaggccagtgggcacagcaggcctgtttgaccataaatatgtatttaagaagtatatgtttaaagatgggattgaagacatat

SEQ ID NO: 55702 - DNA, 120 bp, Artificial Sequence
  ENSG00000070010_50 (sequence is synthesized)
ttagctctattccatcctgcagccccactaaggctgtggctaaaggtcatgaggtaagaaagacagtggaagaggaggcaactacaaggctttggaagccccaggtaccttagtagacca

SEQ ID NO: 55703 - DNA, 120 bp, Artificial Sequence
  ENSG00000070010_51 (sequence is synthesized)
ccccatcccagaaggctggaggctcgactccagtaggtctctagactactatctctgaagtgaaggccacagtcagaaagctttccattccagcatctaaataatagaggatttgtggga

SEQ ID NO: 55704 - DNA, 120 bp, Artificial Sequence
  ENSG00000070010_52 (sequence is synthesized)
agaacagccacagaaaccaaaggagcagaaatcatcagggaaatagtttccccaaagatgggcacaattttgcagatttgaagggctcactgagttccagcaaaatgaatgaaaatagcc

SEQ ID NO: 55705 - DNA, 120 bp, Artificial Sequence
  ENSG00000070010_53 (sequence is synthesized)
aaatagccccactttgaggcaaagaaagatcctaaagcttctagagagagaacagaggtatcaccatgcattaaggacatcatcagccaagcgccatggctcacacctgtaatcccaaca

SEQ ID NO: 55706 - DNA, 86 bp, Artificial Sequence
  ENSG00000070010_54 (sequence is synthesized)
ccagcctgggcaatatagggagaccctgtctctacagaaaattttaaaaattagccaataatgctgagttgggagcatcacttgag

SEQ ID NO: 55707 - DNA, 86 bp, Artificial Sequence
  ENSG00000070010_55 (sequence is synthesized)
taaaaattagccaataatgctgagttgggagcatcacttgagcctgggaggtggaggctgctgtgagctgagatcacaccactgca

SEQ ID NO: 55708 - DNA, 120 bp, Artificial Sequence
  ENSG00000070010_56 (sequence is synthesized)
aaaaagggacatcatcttagcaggacacagaggaaactagaagatagtggagcaatatactcaaaattctgaggggaaattttttccaacctaaaattctgtaccaactcttatgagctg

SEQ ID NO: 55709 - DNA, 120 bp, Artificial Sequence
  ENSG00000070010_57 (sequence is synthesized)
gattgtgtccctccagtgtttctgtgttgaagccctaacccccagtaactcagatagggccatttaaagaagcaattaagttaaaataagaccattagagttggccataattcaatctgg

SEQ ID NO: 55710 - DNA, 120 bp, Artificial Sequence
  ENSG00000070010_58 (sequence is synthesized)
tgtccttttaagaagaggaaatttggacataggaagggccatgtgaggacacagcaagaaggcagccatctgcaagccaaggaaaagggtgtcagaggaaaccaaacctgctgacacctt

SEQ ID NO: 55711 - DNA, 120 bp, Artificial Sequence
  ENSG00000070010_59 (sequence is synthesized)
gatcctgcacttctagcctccaaaactatgaagaataaatttctgttgtttgagccaccctatctttggcattttatatggcagccctagcagactaacataccaaccagcctatcaatg

SEQ ID NO: 55712 - DNA, 120 bp, Artificial Sequence
  ENSG00000070010_60 (sequence is synthesized)
caatgcaggctgtgattgaatagaggaagaagccaaacacagctattgacaccaggatgaatggaaggctgtgcggcaaaggaagactaaatgcagctgtgactcaaatttacatgaatg

SEQ ID NO: 55713 - DNA, 120 bp, Artificial Sequence
  ENSG00000070010_61 (sequence is synthesized)
tgaccacataaatactaaacagtgctctattgcaggtataacatgctacagttagtggggagccaggtgcagggatgtgtgttgaacattccagaatcctcttcttcctagggaaaagtt

SEQ ID NO: 55714 - DNA, 120 bp, Artificial Sequence
  ENSG00000070010_62 (sequence is synthesized)
gagataatgcctcagactgactagcaataaaagcatgtgaaaaaaaatatgtgcagttttcaaaggtttgggaaaaaacaatccctctttctgctgatggaaggatagcttagtggaatg

SEQ ID NO: 55715 - DNA, 120 bp, Artificial Sequence
  ENSG00000070010_63 (sequence is synthesized)
tttctgagggctggttggtctctatatgttaaaagcattaaaagtgtgtacacactttgacccaggaatttgagctctaaaaaaaatcagagttgtgtgcaaatacattaagctgcttac

SEQ ID NO: 55716 - DNA, 120 bp, Artificial Sequence
  ENSG00000070010_64 (sequence is synthesized)
cacaacaatgtccactggtagaaaactggccctcctacatcatggaattcttttttacagaattcagttctgtagccttgggagtatactagacaggaagtttattggcatgagatttca

SEQ ID NO: 55717 - DNA, 120 bp, Artificial Sequence
  ENSG00000070010_65 (sequence is synthesized)
ttggcatgagatttcagaattaagtgggaaaacaattctttaagcatgtacagaaaagtgacctgaaatgtttttgggtgatgaacttacagacttttttttttttttttttttttgagg

SEQ ID NO: 55718 - DNA, 89 bp, Artificial Sequence
  ENSG00000070010_66 (sequence is synthesized)
tctgccatccaggctggagcagtggcacaatcatagctcactatggccctggctcaaaccatcctcccgtctcagcctcccaagtagct

SEQ ID NO: 55719 - DNA, 120 bp, Artificial Sequence
  ENSG00000070018_0 (sequence is synthesized)
gtatccctgcgccgctgcgcgaggcagaggctgaatgaggagctgcgcgggggaagcggggcgccgggggaggaggcggcgggatggaagcagacgctggcgtcgcgcgagcccggggcc

SEQ ID NO: 55720 - DNA, 120 bp, Artificial Sequence
  ENSG00000070018_1 (sequence is synthesized)
gagcggcgcggtagagagggcggcggcggcgcgcgcggaaccttgacgtgcccctttctttcttctctcgctgggaagctgggaagtatgagcgtgcagccctgccgctgcggcggccgc

SEQ ID NO: 55721 - DNA, 120 bp, Artificial Sequence
  ENSG00000070018_2 (sequence is synthesized)
cccggctcctcgcctcccccacttctggccacccctcgccggtgagagaagagaacgcgagaagggaagatgggggccgtcctgaggagcctcctggcctgcagcttctgtgtgctcctg

SEQ ID NO: 55722 - DNA, 120 bp, Artificial Sequence
  ENSG00000070018_3 (sequence is synthesized)
agagcggcccctttgttgctttatgcaaacagacgggacttgcgattggttgatgctacaaatggcaaagagaatgctacgattgtagttggaggcttggaggatgcagctgcggtggac

SEQ ID NO: 55723 - DNA, 120 bp, Artificial Sequence
  ENSG00000070018_4 (sequence is synthesized)
tttgtgtttagtcatggcttgatatactggagtgatgtcagcgaagaagccattaaacgaacagaatttaacaaaactgagagtgtgcagaatgttgttgtttctggattattgtccccc

SEQ ID NO: 55724 - DNA, 120 bp, Artificial Sequence
  ENSG00000070018_5 (sequence is synthesized)
gatgggctggcatgtgattggcttggagaaaaattgtactggacagattctgaaactaatcggattgaagtttctaatttagatggatctttacgaaaagttttattttggcaagagttg

SEQ ID NO: 55725 - DNA, 120 bp, Artificial Sequence
  ENSG00000070018_6 (sequence is synthesized)
gatcaacccagagctattgccttagatccttcaagtgggttcatgtactggacagactggggagaagtgccaaagatagaacgtgctggaatggatggttcaagtcgcttcattataata

SEQ ID NO: 55726 - DNA, 120 bp, Artificial Sequence
  ENSG00000070018_7 (sequence is synthesized)
aacagtgaaatttactggccaaatggactgactttggattatgaagaacaaaagctttattgggcagatgcaaaacttaatttcatccacaaatcaaatctggatggaacaaatcggcag

SEQ ID NO: 55727 - DNA, 120 bp, Artificial Sequence
  ENSG00000070018_8 (sequence is synthesized)
gcagtggttaaaggttcccttccacatccttttgccttgacgttatttgaggacatattgtactggactgactggagcacacactccattttggcttgcaacaagtatactggtgagggt

SEQ ID NO: 55728 - DNA, 120 bp, Artificial Sequence
  ENSG00000070018_9 (sequence is synthesized)
ctgcgtgaaatccattctgacatcttctctcccatggatatacatgccttcagccaacagaggcagccaaatgccacaaatccatgtggaattgacaatgggggttgttcccatttgtgt

SEQ ID NO: 55729 - DNA, 120 bp, Artificial Sequence
  ENSG00000070018_10 (sequence is synthesized)
ttgatgtctccagtcaagcctttttatcagtgtgcttgccccactggggtcaaactcctggagaatggaaaaacctgcaaagatggtgccacagaattattgcttttagctcgaaggaca

SEQ ID NO: 55730 - DNA, 120 bp, Artificial Sequence
  ENSG00000070018_11 (sequence is synthesized)
gacttgagacgcatttctttggatacaccagattttacagacattgttctgcagttagaagacatccgtcatgccattgccatagattacgatcctgtggaaggctacatctactggact

SEQ ID NO: 55731 - DNA, 120 bp, Artificial Sequence
  ENSG00000070018_12 (sequence is synthesized)
gatgatgaagtgagggccatacgccgttcatttatagatggatctggcagtcagtttgtggtcactgctcaaattgcccatcctgatggtattgctgtggactgggttgcacgaaatctt

SEQ ID NO: 55732 - DNA, 120 bp, Artificial Sequence
  ENSG00000070018_13 (sequence is synthesized)
tattggacagacactggcactgatcgaatagaagtgacaaggctcaatgggaccatgaggaagatcttgatttcagaggacttagaggaaccccgggctattgtgttagatcccatggtt

SEQ ID NO: 55733 - DNA, 120 bp, Artificial Sequence
  ENSG00000070018_14 (sequence is synthesized)
gggtacatgtattggactgactggggagaaattccgaaaattgagcgagcagctctggatggttctgaccgtgtagtattggttaacacttctcttggttggccaaatggtttagccttg

SEQ ID NO: 55734 - DNA, 120 bp, Artificial Sequence
  ENSG00000070018_15 (sequence is synthesized)
gattatgatgaaggcaaaatatactggggagatgccaaaacagacaagattgaggttatgaatactgatggcactgggagacgagtactagtggaagacaaaattcctcacatatttgga

SEQ ID NO: 55735 - DNA, 120 bp, Artificial Sequence
  ENSG00000070018_16 (sequence is synthesized)
tttactttgttgggtgactatgtttactggactgactggcagaggcgtagcattgaaagagttcataaacgaagtgcagagagggaagtgatcatagatcagctgcctgacctcatgggc

SEQ ID NO: 55736 - DNA, 120 bp, Artificial Sequence
  ENSG00000070018_17 (sequence is synthesized)
ctaaaggctacaaatgttcatcgagtgattggttccaacccctgtgctgaggaaaacgggggatgtagccatctctgcctctatagacctcagggccttcgctgtgcttgccctattggc

SEQ ID NO: 55737 - DNA, 120 bp, Artificial Sequence
  ENSG00000070018_18 (sequence is synthesized)
tttgaactcatcagtgacatgaagacctgcattgtcccagaggctttccttttgttttcacggagagcagatatcagacgaatttctctggaaacaaacaataataatgtggctattcca

SEQ ID NO: 55738 - DNA, 120 bp, Artificial Sequence
  ENSG00000070018_19 (sequence is synthesized)
ctcactggtgtcaaagaagcttctgctttggattttgatgtgacagacaaccgaatttattggactgatatatcactcaagaccatcagcagagcctttatgaatggcagtgcactggaa

SEQ ID NO: 55739 - DNA, 120 bp, Artificial Sequence
  ENSG00000070018_20 (sequence is synthesized)
catgtggtagaattcggcttagattatccagaaggcatggcagtagactggcttgggaagaacttgtactgggcagacacaggaacgaatcgaattgaggtgtcaaagttggatgggcag

SEQ ID NO: 55740 - DNA, 120 bp, Artificial Sequence
  ENSG00000070018_21 (sequence is synthesized)
caccgacaagttttggtgtggaaagacctagatagtcccagagctctcgcgttggaccctgccgaaggatttatgtattggactgaatggggtggaaaacctaagatagacagagctgca

SEQ ID NO: 55741 - DNA, 120 bp, Artificial Sequence
  ENSG00000070018_22 (sequence is synthesized)
atggatggaagtgaacgtactaccttagttccaaatgtggggcgggcaaacggcctaactattgattatgctaaaaggaggctttattggacagacctggacaccaacttaatagaatct

SEQ ID NO: 55742 - DNA, 120 bp, Artificial Sequence
  ENSG00000070018_23 (sequence is synthesized)
tcaaatatgcttgggctcaaccgtgaagttatagcagatgacttgcctcatccttttggcttaactcagtaccaagattatatctactggacggactggagccgacgcagcattgagcgt

SEQ ID NO: 55743 - DNA, 120 bp, Artificial Sequence
  ENSG00000070018_24 (sequence is synthesized)
gccaacaaaaccagtggccaaaaccgcaccatcattcagggccatttggattatgtgatggacatcctcgtctttcactcatctcgacagtcagggtggaatgaatgtgcttccagcaat

SEQ ID NO: 55744 - DNA, 120 bp, Artificial Sequence
  ENSG00000070018_25 (sequence is synthesized)
gggcactgctcccacctctgcttggctgtgccagttgggggttttgtttgtggatgccctgcccactactctcttaatgctgacaacaggacttgtagtgctcctacgactttcctgctc

SEQ ID NO: 55745 - DNA, 120 bp, Artificial Sequence
  ENSG00000070018_26 (sequence is synthesized)
ttcagtcaaaagagtgccatcaaccgcatggtgattgatgaacaacagagccccgacatcatccttcccatccacagccttcggaatgtccgggccattgactatgacccactggacaag

SEQ ID NO: 55746 - DNA, 120 bp, Artificial Sequence
  ENSG00000070018_27 (sequence is synthesized)
caactctattggattgactcacgacaaaacatgatccgaaaggcacaagaagatggcagccagggctttactgtggttgtgagctcagttccgagtcagaacctggaaatacaaccctat

SEQ ID NO: 55747 - DNA, 120 bp, Artificial Sequence
  ENSG00000070018_28 (sequence is synthesized)
gacctcagcattgatatttacagccgctacatctactggacttgtgaggctaccaatgtcattaatgtgacaagattagatgggagatcagttggagtggtgctgaaaggcgagcaggac

SEQ ID NO: 55748 - DNA, 120 bp, Artificial Sequence
  ENSG00000070018_29 (sequence is synthesized)
agacctcgagccgttgtggtaaacccagagaaagggtatatgtattttaccaatcttcaggaaaggtctcctaaaattgaacgggctgctttggatgggacagaacgggaggtcctcttt

SEQ ID NO: 55749 - DNA, 120 bp, Artificial Sequence
  ENSG00000070018_30 (sequence is synthesized)
ttcagtggcttaagtaaaccaattgctttagcccttgatagcaggctgggcaagctcttttgggctgattcagatctccggcgaattgaaagcagtgatctctcaggtgctaaccggata

SEQ ID NO: 55750 - DNA, 120 bp, Artificial Sequence
  ENSG00000070018_31 (sequence is synthesized)
gtattagaagactccaatatcttgcagcctgtgggacttactgtgtttgaaaactggctctattggattgataaacagcagcaaatgattgaaaaaattgacatgacaggtcgagagggt

SEQ ID NO: 55751 - DNA, 120 bp, Artificial Sequence
  ENSG00000070018_32 (sequence is synthesized)
agaaccaaagtccaagctcgaattgcccagcttagtgacattcatgcagtaaaggagctgaaccttcaagaatacagacagcacccttgtgctcaggataatggtggctgttcacatatt

SEQ ID NO: 55752 - DNA, 120 bp, Artificial Sequence
  ENSG00000070018_33 (sequence is synthesized)
tgtcttgtaaagggggatggtactacaaggtgttcttgccccatgcacctggttctacttcaagatgagctatcatgtggagaacctccaacatgttctcctcagcagtttacttgtttc

SEQ ID NO: 55753 - DNA, 120 bp, Artificial Sequence
  ENSG00000070018_34 (sequence is synthesized)
acgggggaaattgactgtatccctgtggcttggcggtgcgatgggtttactgaatgtgaagaccacagtgatgaactcaattgtcctgtatgctcagagtcccagttccagtgtgccagt

SEQ ID NO: 55754 - DNA, 120 bp, Artificial Sequence
  ENSG00000070018_35 (sequence is synthesized)
gggcagtgtattgatggtgccctccgatgcaatggagatgcaaactgccaggacaaatcagatgagaagaactgtgaagtgctttgtttaattgatcagttccgctgtgccaatggtcag

SEQ ID NO: 55755 - DNA, 120 bp, Artificial Sequence
  ENSG00000070018_36 (sequence is synthesized)
tgcattggaaagcacaagaagtgtgatcataatgtggattgcagtgacaagtcagatgaactggattgttatccgactgaagaaccagcaccacaggccaccaatacagttggttctgtt

SEQ ID NO: 55756 - DNA, 120 bp, Artificial Sequence
  ENSG00000070018_37 (sequence is synthesized)
attggcgtaattgtcaccatttttgtgtctggaactgtatactttatctgccagaggatgttgtgtccacgtatgaagggagatggggaaactatgactaatgactatgtagttcatgga

SEQ ID NO: 55757 - DNA, 120 bp, Artificial Sequence
  ENSG00000070018_38 (sequence is synthesized)
ccagcttctgtgcctcttggttatgtgccacacccaagttctttgtcaggatctcttccaggaatgtctcgaggtaaatcaatgatcagctccctcagtatcatggggggaagcagtgga

SEQ ID NO: 55758 - DNA, 120 bp, Artificial Sequence
  ENSG00000070018_39 (sequence is synthesized)
cccccctatgaccgagcccatgttacaggagcatcatcaagtagttcttcaagcaccaaaggcacttacttccctgcaattttgaaccctccaccatccccagccacagagcgatcacat

SEQ ID NO: 55759 - DNA, 120 bp, Artificial Sequence
  ENSG00000070018_40 (sequence is synthesized)
tacactatggaatttggatattcttcaaacagtccttccactcataggtcatacagctacaggccatatagctaccggcactttgcaccccccaccacaccctgcagcacagatgtttgt

SEQ ID NO: 55760 - DNA, 120 bp, Artificial Sequence
  ENSG00000070018_41 (sequence is synthesized)
gacagtgactatgctcctagtcggagaatgacctcagtggcaacagccaagggctataccagtgacttgaactatgattcagaacctgtgcccccacctcccacaccccgaagccaatac

SEQ ID NO: 55761 - DNA, 120 bp, Artificial Sequence
  ENSG00000070018_42 (sequence is synthesized)
ggagctattctcatcacctctacccaccgccaccctctccctgtacagactcctcctgaggaggggccctcctcctctgactgcctccaacgtaaaaatgtaaatataaatttggttgag

SEQ ID NO: 55762 - DNA, 120 bp, Artificial Sequence
  ENSG00000070018_43 (sequence is synthesized)
atctggagggggggagggagctattagagaaggatgaggcagaccatgtacagttaaaattataaaatggggtagggaatactggagatatttgtacagaagaaaaggatatttatatat

SEQ ID NO: 55763 - DNA, 120 bp, Artificial Sequence
  ENSG00000070018_44 (sequence is synthesized)
tttcttaaaacagcagatttgctgcttgtgccataaaagtttgtataaaaaaaatttgtactaaaagttttatttttgcaaactaaatacacaaagcatgccttaaacccagtgaagcaa

SEQ ID NO: 55764 - DNA, 120 bp, Artificial Sequence
  ENSG00000070018_45 (sequence is synthesized)
ctgagtacaaaggaaacaggaataataaaggcatcactgaccaggaatatctgggctttattgataccaaaaataaaaaagaggaagaagaaaaattaagtccatctcagagcagcaaac

SEQ ID NO: 55765 - DNA, 120 bp, Artificial Sequence
  ENSG00000070018_46 (sequence is synthesized)
catagatacatggatgtagccagatagccttcagttaactaacatttgagggccaacaagtaagaaatgatgaaaggaaaaaaatgcaattaatactaaccttggacgaagggctttgtt

SEQ ID NO: 55766 - DNA, 120 bp, Artificial Sequence
  ENSG00000070018_47 (sequence is synthesized)
ttctctaggaatccaacagtgctagtgaggaaagtagatatttctaaaaacccattctgggtgttgctgttgtaggagagatcagccctctggtaagatgccatgaagctgtgtgtgtgt

SEQ ID NO: 55767 - DNA, 120 bp, Artificial Sequence
  ENSG00000070018_48 (sequence is synthesized)
gcaagtctctgtccctacctttagaatccatacctctgtcaaaatgaatttttttctctaggtatgtttaccttgctgcctcctccagcaacttggtaagtcattttgctaagataccat

SEQ ID NO: 55768 - DNA, 120 bp, Artificial Sequence
  ENSG00000070018_49 (sequence is synthesized)
gatttttttaagctgaagcattgactaaatggaattttctaaattaaacttgattttaatatttcttctagctccattccccagtaggcttagctcttcaatttgactgctgtttttgca

SEQ ID NO: 55769 - DNA, 120 bp, Artificial Sequence
  ENSG00000070018_50 (sequence is synthesized)
taatgatcaaaagttagacatattatttctcttcttccaagattgttttaatgctcattaaaatgtctttttacaacacatatagacaatgtttaagaattaaaaatttaaccattatgt

SEQ ID NO: 55770 - DNA, 80 bp, Artificial Sequence
  ENSG00000070018_51 (sequence is synthesized)
taaccattatgtttttgttgtaaatctcatatccttgcactactttcagcatatatcacagtacgaaatcatttatatat

SEQ ID NO: 55771 - DNA, 120 bp, Artificial Sequence
  ENSG00000070018_52 (sequence is synthesized)
tgtttgtttgttttctgagtaaaacatttaaatatgttctggttagagacaatctatttaaaaagatttttttcttattaggattttccctatattaacagtttgtgatgttttcatgtt

SEQ ID NO: 55772 - DNA, 120 bp, Artificial Sequence
  ENSG00000070018_53 (sequence is synthesized)
ctttagaccggtttttctcagaataatgtctacatacatacctcttctaatgtgtgacatgaatttaatatctttctgttacccactgtgaatgttaggctgttttcaaattatccacaa

SEQ ID NO: 55773 - DNA, 120 bp, Artificial Sequence
  ENSG00000070018_54 (sequence is synthesized)
attattcttgtaatcacccaatatttttatgtgggtcctctcttacccattatggattaagatagtttaacaaatttaacaatgaggattaaatgagaaggcaaactgttaacttctcag

SEQ ID NO: 55774 - DNA, 120 bp, Artificial Sequence
  ENSG00000070018_55 (sequence is synthesized)
ctgtcagaatttgggtggaagggaataatggaagcctcttttgtgatctgcctgacctgctgtcatgtatggtactggggctgctacatcttgagctatcagggctgacctgtggaatga

SEQ ID NO: 55775 - DNA, 120 bp, Artificial Sequence
  ENSG00000070018_56 (sequence is synthesized)
ttctagcacttgctctgccaccttgccagaagttcgtttcctgctttttacacatgtgtagcacttctctgctaaaattgaatggttttaaactaatgtatttttagcttaagaggtgtt

SEQ ID NO: 55776 - DNA, 120 bp, Artificial Sequence
  ENSG00000070018_57 (sequence is synthesized)
ggtcagttaattattgaattttttttttttcttttttaattctgtcttgccaaggcctctctgggtttcagggcccaagagaaaacagtggaagaaaggattcagaatttgggcaagggt

SEQ ID NO: 55777 - DNA, 120 bp, Artificial Sequence
  ENSG00000070018_58 (sequence is synthesized)
gaagtaactgttcatgcaagttaaaaatacctaagtaaagtttttgaagataaaattgtggtttcagaataatgctgattgttggagactgtaagaatcaggtgcacttgattttgcata

SEQ ID NO: 55778 - DNA, 120 bp, Artificial Sequence
  ENSG00000070018_59 (sequence is synthesized)
taagcaaatggtaaatctatcagaatcctaaaacagacaagcatgaactcttcccattgctggaactaagtgcccacagtgtcagacaaaatggacattgaacttggattctgtgataca

SEQ ID NO: 55779 - DNA, 120 bp, Artificial Sequence
  ENSG00000070018_60 (sequence is synthesized)
cagggcacttgatgcttaaatgaagatggaaaggttagcaatacctgggtgtcagttagaatttgagaattctatatgtttacatatttaaatgtgcatcttgatctggtgggcttccca

SEQ ID NO: 55780 - DNA, 120 bp, Artificial Sequence
  ENSG00000070018_61 (sequence is synthesized)
tgtggagacttgcactctaattaactaagaagaatattgccttgttggatctcagtccacgtgcttgcactgcgatggcaatggcctcttcttcaaaatactaatttgtgtgccaatttg

SEQ ID NO: 55781 - DNA, 120 bp, Artificial Sequence
  ENSG00000070018_62 (sequence is synthesized)
tttaaaattatttgaaggcagttcagcctaatctcagtgttctctttctggggtagatgagatggattcttaatatttctgggagtactttttaatgagagaattgtcaaatttggaaag

SEQ ID NO: 55782 - DNA, 120 bp, Artificial Sequence
  ENSG00000070018_63 (sequence is synthesized)
atttattgagccttaggttacatggacagttaagcttaagtaaactgtatattgattatcaaacacaagctgtaattggaaaagttgagaggaaaagcatgagatcacaaattaggggga

SEQ ID NO: 55783 - DNA, 120 bp, Artificial Sequence
  ENSG00000070018_64 (sequence is synthesized)
aaaaagaaaagggatttttaaatttggtgtattaaattcattgtccaagggggaaaatgaataatgtttcattagattccttatatgcaaaagtatttattttgaacatgtgtcctaaaa

SEQ ID NO: 55784 - DNA, 120 bp, Artificial Sequence
  ENSG00000070018_65 (sequence is synthesized)
tatatgcactaactgatgtgattaaaattgtccaagaaataaacttgagcataacatactttgtgtgcaccacagtaagctattctgcattgaagtggtcttttataactaaggcctgga

SEQ ID NO: 55785 - DNA, 120 bp, Artificial Sequence
  ENSG00000070018_66 (sequence is synthesized)
ctttgctccaacagagtcgtggtcttctgaatagtgacttaaggagttttgtttgcttaagtcagataatagcacattcacagggaaacaaagagagttggtggatagaattttctgact

SEQ ID NO: 55786 - DNA, 120 bp, Artificial Sequence
  ENSG00000070018_67 (sequence is synthesized)
attaatttttcttccatgaaattttattatgcctttggcactttctgccactcttacagcatatcacaagatatctgtttagcagaagattatgtagttactttaattttaatataaaag

SEQ ID NO: 55787 - DNA, 120 bp, Artificial Sequence
  ENSG00000070018_68 (sequence is synthesized)
tagcttgtgatacattaccaagagatctctgattctttagtaagtttgagaacacctattctacagagatgataggtacttagaaatgaagactttaaagtacattttaatctaatatag

SEQ ID NO: 55788 - DNA, 120 bp, Artificial Sequence
  ENSG00000070018_69 (sequence is synthesized)
gccagtaattgggggaaggggctttgagcagtacaattttaagatgattttgagggttgtatttctttatcatttaaaaatatcctaaagtcagtaatttatatgaaggaaactcattca

SEQ ID NO: 55789 - DNA, 120 bp, Artificial Sequence
  ENSG00000070018_70 (sequence is synthesized)
ttattgaaggtattaaaaatagccatcatctgtattaggtagcagttttggaggatcatctttttcttttgctataaagccctattaatgaagaatacttccagtagagttaatagctgt

SEQ ID NO: 55790 - DNA, 120 bp, Artificial Sequence
  ENSG00000070018_71 (sequence is synthesized)
agcttacctagtgtgttaatgaagtgtgtttatttatgtgacttgataccagtagtcataatagagactgaagaggtatgcgttaagcacgcctacttctatgcagtaaacaggctgcag

SEQ ID NO: 55791 - DNA, 120 bp, Artificial Sequence
  ENSG00000070018_72 (sequence is synthesized)
ctgcctagattagattcttagaaatgtcatattttgaattgttttatttcttgtaggggaagctttgtcccacttcattcatttgcatgccataggaattacatattggttatcattacg

SEQ ID NO: 55792 - DNA, 120 bp, Artificial Sequence
  ENSG00000070018_73 (sequence is synthesized)
tatctaacaagattcagaaacaaaaatcttggacttttcacatccgaaatatgtcagctcttaataaatgtgtggtgcttaagtctacatatggcatccatagttgatttagagtatgga

SEQ ID NO: 55793 - DNA, 120 bp, Artificial Sequence
  ENSG00000070018_74 (sequence is synthesized)
tatgagtgtgttgaccagttatcagtaggtggacaaatatttgggcatctacagatgagactatgcactaagtgtggactgagtcctaaagaagcttatagtcaggtgttgtttaaaaca

SEQ ID NO: 55794 - DNA, 120 bp, Artificial Sequence
  ENSG00000070018_75 (sequence is synthesized)
ttatcagaattcttaaacccaaggaatttaattttatttggtatttcttaagcctaaaatgaaccaagagaaagatgattttagaaagtacttgtagtgaaagatgattttagaaagtac

SEQ ID NO: 55795 - DNA, 120 bp, Artificial Sequence
  ENSG00000070018_76 (sequence is synthesized)
ttgtagtgcatgtgtggcttctgacttttgggatggcaccattttataatagtttcaaaatttagcttttgaaattctcaacattttatggtagaagactttggacctcaagtataaaat

SEQ ID NO: 55796 - DNA, 120 bp, Artificial Sequence
  ENSG00000070018_77 (sequence is synthesized)
tatacgtttataatttttttaaaatttaaattataagtattgtgaattcacactctcaggctattgtctgacttgatctacgtctcataaagcctgtacctgagtggagtggaaggtgga

SEQ ID NO: 55797 - DNA, 120 bp, Artificial Sequence
  ENSG00000070018_78 (sequence is synthesized)
gtcttaggttaatcagttactgactctaccctcaccctctttcaattgaggtaaactttgctgtttttctttttcataaagcattctcaaattgttgagtttattgctgaaaaaaatctc

SEQ ID NO: 55798 - DNA, 120 bp, Artificial Sequence
  ENSG00000070018_79 (sequence is synthesized)
catgactttacagatagaattacaaactaaatgatgtcttgtatttagaagcagagtacagacctaacgaactgttagattctccaccatcacttagggtttgcccagaagcaacaccag

SEQ ID NO: 55799 - DNA, 120 bp, Artificial Sequence
  ENSG00000070018_80 (sequence is synthesized)
agaattacagacaacgcgcttttgctgaactgtccattttggtggttgtgtttttcagtcaaatataagcaggatgggcgatagagatatatttatatatagatacatattctatatatc

SEQ ID NO: 55800 - DNA, 120 bp, Artificial Sequence
  ENSG00000070018_81 (sequence is synthesized)
taatgcctaaatatgggtattaaagggaaaatttttaaagtctgattaaatccaatatgacatgaaattaaatatatggattagtaaggaaaaatgttaaaaagtagagaggataccaag

SEQ ID NO: 55801 - DNA, 120 bp, Artificial Sequence
  ENSG00000070018_82 (sequence is synthesized)
aagattaaactggactagccttatttgcaagtgaaggatctggtgctgctttcagatgtttatcttttatttttttcccttaagctttaatcttcgtcattgtcttaaagtcaactggtg

SEQ ID NO: 55802 - DNA, 120 bp, Artificial Sequence
  ENSG00000070018_83 (sequence is synthesized)
tttcttgttcattgactttggtacgatggtgctttgcaaggatgtatttatgttataatggccaacatttggtcagcccttgtccacttattcacttccctccttttgtaaaataagtgc

SEQ ID NO: 55803 - DNA, 120 bp, Artificial Sequence
  ENSG00000070018_84 (sequence is synthesized)
tttaattataaactgtataaaaataccttgtataaaccccttttttgattattacaataaataagctgaattgtaacaaatgaaatttgatttttgtaataaaacagtggaaaagtaaaa

SEQ ID NO: 55804 - DNA, 120 bp, Artificial Sequence
  ENSG00000070018_85 (sequence is synthesized)
atggtaagtgatccttgatttttaaattgcaagttggaacagctttgtagcactctaatgtctggctttagtgaggatcaggaggagggagggcatatccaaagatagttggcgggaata

SEQ ID NO: 55805 - DNA, 120 bp, Artificial Sequence
  ENSG00000070018_86 (sequence is synthesized)
tgtgatcataatgtggattgcagtgacaagtcagatgaactggattgttgaatgtctcgaggtaaatcaatgatcagctccctcagtatcatggggggaagcagtggacccccctatgac

SEQ ID NO: 55806 - DNA, 120 bp, Artificial Sequence
  ENSG00000070019_0 (sequence is synthesized)
gaccagttgggcatgaccagagagaagcgtggggaagagtgggctgagggactccactagaggctgtccatctggattccctgcctccctaggagcccaacagagcaaagcaagtgggca

SEQ ID NO: 55807 - DNA, 120 bp, Artificial Sequence
  ENSG00000070019_1 (sequence is synthesized)
caaggagtatggttctaacgtgattggggtcatgaagacgttgctgttggacttggctttgtggtcactgctcttccagcccgggtggctgtcctttagttcccaggtgagtcagaactg

SEQ ID NO: 55808 - DNA, 120 bp, Artificial Sequence
  ENSG00000070019_2 (sequence is synthesized)
ccacaatggcagctatgaaatcagcgtcctgatgatgggcaactcagcctttgcagagcccctgaaaaacttggaagatgcggtgaatgaggggctggaaatagtgagaggacgtctgca

SEQ ID NO: 55809 - DNA, 120 bp, Artificial Sequence
  ENSG00000070019_3 (sequence is synthesized)
aaatgctggcctaaatgtgactgtgaacgctactttcatgtattcggatggtctgattcataactcaggcgactgccggagtagcacctgtgaaggcctcgacctactcaggaaaatttc

SEQ ID NO: 55810 - DNA, 120 bp, Artificial Sequence
  ENSG00000070019_4 (sequence is synthesized)
aaatgcacaacggatgggctgtgtcctcatagggccctcatgtacatactccaccttccagatgtaccttgacacagaattgagctaccccatgatctcagctggaagttttggattgtc

SEQ ID NO: 55811 - DNA, 120 bp, Artificial Sequence
  ENSG00000070019_5 (sequence is synthesized)
atgtgactataaagaaaccttaaccaggctgatgtctccagctagaaagttgatgtacttcttggttaacttttggaaaaccaacgatctgcccttcaaaacttattcctggagcacttc

SEQ ID NO: 55812 - DNA, 120 bp, Artificial Sequence
  ENSG00000070019_6 (sequence is synthesized)
gtatgtttacaagaatggtacagaaactgaggactgtttctggtaccttaatgctctggaggctagcgtttcctatttctcccacgaactcggctttaaggtggtgttaagacaagataa

SEQ ID NO: 55813 - DNA, 120 bp, Artificial Sequence
  ENSG00000070019_7 (sequence is synthesized)
ggagtttcaggatatcttaatggaccacaacaggaaaagcaatgtgattattatgtgtggtggtccagagttcctctacaagctgaagggtgaccgagcagtggctgaagacattgtcat

SEQ ID NO: 55814 - DNA, 120 bp, Artificial Sequence
  ENSG00000070019_8 (sequence is synthesized)
tattctagtggatcttttcaatgaccagtactttgaggacaatgtcacagcccctgactatatgaaaaatgtccttgttctgacgctgtctcctgggaattcccttctaaatagctcttt

SEQ ID NO: 55815 - DNA, 120 bp, Artificial Sequence
  ENSG00000070019_9 (sequence is synthesized)
ctccaggaatctatcaccaacaaaacgagactttgctcttgcctatttgaatggaatcctgctctttggacatatgctgaagatatttcttgaaaatggagaaaatattaccacccccaa

SEQ ID NO: 55816 - DNA, 120 bp, Artificial Sequence
  ENSG00000070019_10 (sequence is synthesized)
atttgctcatgctttcaggaatctcacttttgaagggtatgacggtccagtgaccttggatgactggggggatgttgacagtaccatggtgcttctgtatacctctgtggacaccaagaa

SEQ ID NO: 55817 - DNA, 120 bp, Artificial Sequence
  ENSG00000070019_11 (sequence is synthesized)
atacaaggttcttttgacctatgatacccacgtaaataagacctatcctgtggatatgagccccacattcacttggaagaactctaaacttcctaatgatattacaggccggggccctca

SEQ ID NO: 55818 - DNA, 120 bp, Artificial Sequence
  ENSG00000070019_12 (sequence is synthesized)
gatcctgatgattgcagtcttcaccctcactggagctgtggtgctgctcctgctcgtcgctctcctgatgctcagaaaatatagaaaagattatgaacttcgtcagaaaaaatggtccca

SEQ ID NO: 55819 - DNA, 120 bp, Artificial Sequence
  ENSG00000070019_13 (sequence is synthesized)
cattcctcctgaaaatatctttcctctggagaccaatgagaccaatcatgttagcctcaagatcgatgatgacaaaagacgagatacaatccagagactacgacagtgcaaatacgacaa

SEQ ID NO: 55820 - DNA, 120 bp, Artificial Sequence
  ENSG00000070019_14 (sequence is synthesized)
aaagcgagtgattctcaaagatctcaagcacaatgatggtaatttcactgaaaaacagaagatagaattgaacaagttgcttcagattgactattacaacctgaccaagttctacggcac

SEQ ID NO: 55821 - DNA, 120 bp, Artificial Sequence
  ENSG00000070019_15 (sequence is synthesized)
agtgaaacttgataccatgatcttcggggtgatagaatactgtgagagaggatccctccgggaagttttaaatgacacaatttcctaccctgatggcacattcatggattgggagtttaa

SEQ ID NO: 55822 - DNA, 120 bp, Artificial Sequence
  ENSG00000070019_16 (sequence is synthesized)
cattgctaagggaatgtcatatctgcactccagtaagacagaagtccatggtcgtctgaaatctaccaactgcgtagtggacagtagaatggtggtgaagatcactgattttggctgcaa

SEQ ID NO: 55823 - DNA, 120 bp, Artificial Sequence
  ENSG00000070019_17 (sequence is synthesized)
ttccattttacctccaaaaaaggacctgtggacagctccagagcacctccgccaagccaacatctctcagaaaggagatgtgtacagctatgggatcatcgcacaggagatcatcctgcg

SEQ ID NO: 55824 - DNA, 120 bp, Artificial Sequence
  ENSG00000070019_18 (sequence is synthesized)
gaaagaaaccttctacactttgagctgtcgggaccggaatgagaagattttcagagtggaaaattccaatggaatgaaacccttccgcccagatttattcttggaaacagcagaggaaaa

SEQ ID NO: 55825 - DNA, 120 bp, Artificial Sequence
  ENSG00000070019_19 (sequence is synthesized)
agagctagaagtgtacctacttgtaaaaaactgttgggaggaagatccagaaaagagaccagatttcaaaaaaattgagactacacttgccaagatatttggactttttcatgaccaaaa

SEQ ID NO: 55826 - DNA, 120 bp, Artificial Sequence
  ENSG00000070019_20 (sequence is synthesized)
aaatgaaagctatatggataccttgatccgacgtctacagctatattctcgaaacctggaacatctggtagaggaaaggacacagctgtacaaggcagagagggacagggctgacagact

SEQ ID NO: 55827 - DNA, 120 bp, Artificial Sequence
  ENSG00000070019_21 (sequence is synthesized)
taactttatgttgcttccaaggctagtggtaaagtctctgaaggagaaaggctttgtggagccggaactatatgaggaagttacaatctacttcagtgacattgtaggtttcactactat

SEQ ID NO: 55828 - DNA, 120 bp, Artificial Sequence
  ENSG00000070019_22 (sequence is synthesized)
ctgcaaatacagcacccccatggaagtggtggacatgcttaatgacatctataagagttttgaccacattgttgatcatcatgatgtctacaaggtggaaaccatcggtgatgcgtacat

SEQ ID NO: 55829 - DNA, 120 bp, Artificial Sequence
  ENSG00000070019_23 (sequence is synthesized)
ggtggctagtggtttgcctaagagaaatggcaatcggcatgcaatagacattgccaagatggccttggaaatcctcagcttcatggggacctttgagctggagcatcttcctggcctccc

SEQ ID NO: 55830 - DNA, 120 bp, Artificial Sequence
  ENSG00000070019_24 (sequence is synthesized)
aatatggattcgcattggagttcactctggtccctgtgctgctggagttgtgggaatcaagatgcctcgttattgtctatttggagatacggtcaacacagcctctaggatggaatccac

SEQ ID NO: 55831 - DNA, 120 bp, Artificial Sequence
  ENSG00000070019_25 (sequence is synthesized)
tggcctccctttgagaattcacgtgagtggctccaccatagccatcctgaagagaactgagtgccagttcctttatgaagtgagaggagaaacatacttaaagggaagaggaaatgagac

SEQ ID NO: 55832 - DNA, 120 bp, Artificial Sequence
  ENSG00000070019_26 (sequence is synthesized)
tacctactggctgactgggatgaaggaccagaaattcaacctgccaacccctcctactgtggagaatcaacagcgtttgcaagcagaattttcagacatgattgccaactctttacagaa

SEQ ID NO: 55833 - DNA, 120 bp, Artificial Sequence
  ENSG00000070019_27 (sequence is synthesized)
aagacaggcagcagggataagaagccaaaaacccagacgggtagccagctataaaaaaggcactctggaatacttgcagctgaataccacagacaaggagagcacctatttttaaaccta

SEQ ID NO: 55834 - DNA, 120 bp, Artificial Sequence
  ENSG00000070019_28 (sequence is synthesized)
aatgaggtataaggactcacacaaattaaaatacagctgcactgaggcagcgacctcaagtgtcctgaaagcttacattttcctgagacctcaatgaagcagaaatgtacttaggcttgg

SEQ ID NO: 55835 - DNA, 120 bp, Artificial Sequence
  ENSG00000070019_29 (sequence is synthesized)
ctgccctgtctggaacatggactttcttgcatgaatcagatgtgtgttctcagtgaaataactaccttccactctggaaccttattccagcagttgttccagggagcttctacctggaaa

SEQ ID NO: 55836 - DNA, 120 bp, Artificial Sequence
  ENSG00000070019_30 (sequence is synthesized)
agaaaagaaatgaatagactatctagaacttgagaagattttattcttatttcatttattttttgtttgtttatttttatcgtttttgtttactggctttccttctgtattcataagatt

SEQ ID NO: 55837 - DNA, 120 bp, Artificial Sequence
  ENSG00000070019_31 (sequence is synthesized)
ttttaaattgtcataattatattttaaatacccatcttcattaaagtatatttaactcataatttttgcagaaaatatgctatatattaggcaagaataaaagctaaaggtttcccaaaa

SEQ ID NO: 55838 - DNA, 120 bp, Artificial Sequence
  ENSG00000070019_32 (sequence is synthesized)
atgctttcaggaatctcacttttgaaggtactggtctactaagagcaaataaccccaaggtgaagaaatgtaggctttctgagtggatttggggcaacaaagaaggtttagcaatagatg

SEQ ID NO: 55839 - DNA, 120 bp, Artificial Sequence
  ENSG00000070019_33 (sequence is synthesized)
attccacagctaaatccctttgaactcaactggatgcaaacatcattacataaactttgagggtgctgttattgataactgaactccggtttatgtttcagtcttttagaatctttggat

SEQ ID NO: 55840 - DNA, 120 bp, Artificial Sequence
  ENSG00000070019_34 (sequence is synthesized)
gtcacagaaaagggcaggtagcgcaggttctgtacttatgaacaagctcatcataaggcattttgagcagtaatgtcctgactgtgcttggagactaacaagaggataaacatttgcagt

SEQ ID NO: 55841 - DNA, 80 bp, Artificial Sequence
  ENSG00000070031_0 (sequence is synthesized)
gtggccgcagcgctcagctcctgcgccccgaccccgccatggccccccggcccctcctgctgctgctgctgctcctcggg

SEQ ID NO: 55842 - DNA, 120 bp, Artificial Sequence
  ENSG00000070031_1 (sequence is synthesized)
actcagacgggacgttcaccagcgagctcagccgcctgcgggagggcgcgcggctccagcggctgctacagggcctggtggggaagcgcagcgagcaggacgcagagaacagcatggcct

SEQ ID NO: 55843 - DNA, 120 bp, Artificial Sequence
  ENSG00000070031_2 (sequence is synthesized)
gcccatcctgcaggcctggatgcccctggacgggacctggtctccctggctgccccctgggcctatggtttcagaaccagctggcgctgctgcagaaggaaccttgcggcccagatgagg

SEQ ID NO: 55844 - DNA, 120 bp, Artificial Sequence
  ENSG00000070031_3 (sequence is synthesized)
aaggaaccccctcaccacctgcccggcccaggagcgcagctgcatttggggtggggggcaggatgggggagagggggaggggtggtacttggcaccaataaaggaggaatcagacccaga

SEQ ID NO: 55845 - DNA, 120 bp, Artificial Sequence
  ENSG00000070047_0 (sequence is synthesized)
gcctaggagcgactctcggtcgtgcagcggcggcgagcgctcgcgagcggctgcgggacgcgaggtttccggagctgagctcaatgtgcagcaatggatgacgacagcctggatgagctt

SEQ ID NO: 55846 - DNA, 120 bp, Artificial Sequence
  ENSG00000070047_1 (sequence is synthesized)
gtggcccggagcccagggccggatggacacccacaggtcggccctgcggacccggcaggtgactttgaagaaagcagcgtgggcagcagtggggactctggggacgacagtgacagcgag

SEQ ID NO: 55847 - DNA, 120 bp, Artificial Sequence
  ENSG00000070047_2 (sequence is synthesized)
catggagatggcacagacggagaagacgagggggcgtctgaggaggaagacctggaagacagatctggttccgaggattctgaagacgacggggagacattgctggaggtagcgggtact

SEQ ID NO: 55848 - DNA, 120 bp, Artificial Sequence
  ENSG00000070047_3 (sequence is synthesized)
caggggaaactggaagccgctggctctttcaattctgatgatgatgcagagagctgcccaatctgtctcaacgcattcagagaccaggccgtggggacgccggagaactgtgcccattac

SEQ ID NO: 55849 - DNA, 120 bp, Artificial Sequence
  ENSG00000070047_4 (sequence is synthesized)
ttctgcctggactgcattgtcgaatggtccaagaatgccaattcctgtccagttgatcgaactctatttaagtgcatttgtattcgagctcaatttggtggtaaaatcttaagaaagatc

SEQ ID NO: 55850 - DNA, 120 bp, Artificial Sequence
  ENSG00000070047_5 (sequence is synthesized)
ccagtggagaacaccaaagcgagcgaggaggaggaggacccgaccttctgtgaggtgtgcggcaggagcgaccgtgaggacaggcttttgctctgcgacggctgcgatgcggggtaccac

SEQ ID NO: 55851 - DNA, 120 bp, Artificial Sequence
  ENSG00000070047_6 (sequence is synthesized)
atggaatgcttggacccccctctccaggaggtgccggtggacgagtggttctgcccggaatgtgctgcgcctggtgttgtccttgccgctgatgcgggtcccgtgagtgaggaggaggtc

SEQ ID NO: 55852 - DNA, 120 bp, Artificial Sequence
  ENSG00000070047_7 (sequence is synthesized)
tccctgctcttggctgatgtggtgcccaccaccagcaggcttcggcctcgagcaggtaggacccgggcgatagccaggacacggcagagtgagagagtgagagcaaccgtgaaccggaac

SEQ ID NO: 55853 - DNA, 120 bp, Artificial Sequence
  ENSG00000070047_8 (sequence is synthesized)
cggatctccacggccaggagggtccagcacacaccagggcgcctcgggtcttccctgctggatgaagccatcgaggctgtggcgactggcctgagcactgccgtgtatcagcgccccctg

SEQ ID NO: 55854 - DNA, 120 bp, Artificial Sequence
  ENSG00000070047_9 (sequence is synthesized)
acgccgcgcactcccgcccgacggaagaggaagacaagaagacggaagaaagtgccgggaagaaagaaaaccccgtccggaccatccgcaaaaagtaagagctcagcgacaagatctaag

SEQ ID NO: 55855 - DNA, 120 bp, Artificial Sequence
  ENSG00000070047_10 (sequence is synthesized)
aaacgccaacatcgagtgaagaagagaagagggaagaaggtaaagagtgaagccaccactcgctctcgaatcgcgcggacgctgggcctgcgcaggcctgttcacagcagctgcatcccg

SEQ ID NO: 55856 - DNA, 120 bp, Artificial Sequence
  ENSG00000070047_11 (sequence is synthesized)
tcagtgttgaagccagtggagccctctttggggctgctgagagcggatattggagctgcctctctgtctctgtttggagatccttatgagctggatcccttcgacagtgaagagctttct

SEQ ID NO: 55857 - DNA, 120 bp, Artificial Sequence
  ENSG00000070047_12 (sequence is synthesized)
gcaaaccctctttcccctctgagtgccaagagacgggctctgtcccggtcagccctgcagtcccaccagcccgtggccaggcccgtctccgtggggctttccaggaggcgcctccctgcc

SEQ ID NO: 55858 - DNA, 120 bp, Artificial Sequence
  ENSG00000070047_13 (sequence is synthesized)
gcggtgccagagccagacttggaggaggagccagtgcctgacctgctgggcagcatcctgtcgggccagagcctcctgatgctgggcagcagtgatgtcatcatccaccgcgacggctcc

SEQ ID NO: 55859 - DNA, 120 bp, Artificial Sequence
  ENSG00000070047_14 (sequence is synthesized)
ctcagcgccaagagggcggctccagtttcttttcagcgaaactcaggcagtctgtccagaggggaagaaggattcaagggctgcctgcagccccgagcactgccctccgggagcccggcc

SEQ ID NO: 55860 - DNA, 120 bp, Artificial Sequence
  ENSG00000070047_15 (sequence is synthesized)
caaggcccgtcaggaaacaggccacagagcacagggctcagctgtcaaggcaggtcccgcacccccgcccgcaccgcgggggcgcctgtgaggctggacttgccagcagcccctggggcg

SEQ ID NO: 55861 - DNA, 120 bp, Artificial Sequence
  ENSG00000070047_16 (sequence is synthesized)
gttcaggctcggaacttgtcaaatgggagtgtgcctggcttcagacagagccacagcccctggttcaacggcaccaacaagcacaccttgccccttgcctctgccgcgtctaagatctca

SEQ ID NO: 55862 - DNA, 120 bp, Artificial Sequence
  ENSG00000070047_17 (sequence is synthesized)
agcagagattctaagcccccatgtcgcagtgtggtgccggggcctcccctgaagccagcgcccagaagaacagacatctctgagctacccaggataccaaagatcaggagagatgacggt

SEQ ID NO: 55863 - DNA, 120 bp, Artificial Sequence
  ENSG00000070047_18 (sequence is synthesized)
ggtggcagacgggatgcggccccggcccacgggcagagcattgagatccccagtgcctgcatcagccgactgactggcagggagggcaccgggcagccagggcgaggcacacgggcagag

SEQ ID NO: 55864 - DNA, 120 bp, Artificial Sequence
  ENSG00000070047_19 (sequence is synthesized)
agcgaggccagcagcagggtgccccgggagcccggggtgcacacgggcagctcccggcccccagcccccagctcccatggcagtttggccccactgggaccatcaagagggaaaggggtc

SEQ ID NO: 55865 - DNA, 120 bp, Artificial Sequence
  ENSG00000070047_20 (sequence is synthesized)
gggtcgacctttgagagcttccggatcaatattcctggaaacatggcacattccagccagctctccagccctggcttctgtaacacgttccggcctgtggacgataaggagcagaggaag

SEQ ID NO: 55866 - DNA, 120 bp, Artificial Sequence
  ENSG00000070047_21 (sequence is synthesized)
ccgaccccaccggctccgactccagcgcccctggcagcagccccgagaggtctggccccggcctcctgccctctgagatcacacgaaccatctccatcaacagcccgaaggcccagacgg

SEQ ID NO: 55867 - DNA, 120 bp, Artificial Sequence
  ENSG00000070047_22 (sequence is synthesized)
tgcaggctgtgcgctgcgtcacctcctacacggtggagagcatctttggtacagagcccgaaccccctctcggaccgtcctccgccatgtccaagctccggggtgcagtggctgccgagg

SEQ ID NO: 55868 - DNA, 120 bp, Artificial Sequence
  ENSG00000070047_23 (sequence is synthesized)
gggcctctgacacggagcgagaggagcccacagagagccagggcctggctgcccggctgcggaggccatcccccccagagccctgggatgaggaggatggggcgtcttgcagcaccttct

SEQ ID NO: 55869 - DNA, 120 bp, Artificial Sequence
  ENSG00000070047_24 (sequence is synthesized)
ttggctctgaggagcggacggtgacctgtgtgactgtcgtggagccggaagccccacccagcccggacgtgctgcaggctgccacccacagagtcgtggagctcaggcccccttcccggt

SEQ ID NO: 55870 - DNA, 120 bp, Artificial Sequence
  ENSG00000070047_25 (sequence is synthesized)
cccgctccacatccagctcccgcagcaggaagaaggccaagaggaagagggtgtccagggagcacggacggacgcgctctgggacgcgctctgaatccagggacaggagctcgaggtcag

SEQ ID NO: 55871 - DNA, 120 bp, Artificial Sequence
  ENSG00000070047_26 (sequence is synthesized)
cgtcaccatcagtgggtgaggagcgccccaggaggcagcggtccaaggccaagagccggcggtcctccagtgaccgctccagcagccgagagcgagctaagaggaagaaagccaaggaca

SEQ ID NO: 55872 - DNA, 120 bp, Artificial Sequence
  ENSG00000070047_27 (sequence is synthesized)
agagcagggagcacaggcggggcccctggggccacagccggaggacgtcccggtcgcggtcggggagccctggcagctcttcctatgagcactatgagagtaggaagaagaagaaaagga

SEQ ID NO: 55873 - DNA, 120 bp, Artificial Sequence
  ENSG00000070047_28 (sequence is synthesized)
gatcagcgtccagacctcggggaagggagtgctcccccaccagcagcctggagaggctctgcaggcacaagcatcagcgggaacgcagccacgagcggccagacaggaaggagagtgtgg

SEQ ID NO: 55874 - DNA, 120 bp, Artificial Sequence
  ENSG00000070047_29 (sequence is synthesized)
cgtggccccgagaccggaggaagcggaggtcccggtccccaagctcggagcacagggcacgggagcacaggcggcctcggtcccgtgagaagtggccgcagacccggtcccattccccag

SEQ ID NO: 55875 - DNA, 120 bp, Artificial Sequence
  ENSG00000070047_30 (sequence is synthesized)
agaggaagggggctgtgagggaggcttccccagcgccccttgcacagggggagccagggcgggaagacctccccaccaggttgccagccttgggggaagcacatgtctcgccggaggtgg

SEQ ID NO: 55876 - DNA, 120 bp, Artificial Sequence
  ENSG00000070047_31 (sequence is synthesized)
ctacggccgacaaggcccccctgcaggctccccctgtcctggaggtggcagctgagtgtgagccggacgacctggacctggattatggcgactccgtggaggccggacacgtctttgatg

SEQ ID NO: 55877 - DNA, 120 bp, Artificial Sequence
  ENSG00000070047_32 (sequence is synthesized)
atttctcaagcgacgccgttttcatccagctcgatgacatgagctcgccaccttctcccgaaagcacagactcttccccggagcgagacttcccactgaagcctgcgttgcccccagcca

SEQ ID NO: 55878 - DNA, 120 bp, Artificial Sequence
  ENSG00000070047_33 (sequence is synthesized)
gcctggccgtggccgccatccagagggaggtgtcattgatgcacgatgaagacccttcgcagcccccacccctgccagagggcacccaggagccacatttgctcaggccggacgcggctg

SEQ ID NO: 55879 - DNA, 120 bp, Artificial Sequence
  ENSG00000070047_34 (sequence is synthesized)
agaaggctgaggcacccagttccccggatgtggcgcctgcggggaaggaagacagcccctctgcgagtgggagggtacaggaggcagcccggcctgaggaggtggtttcgcagacccccc

SEQ ID NO: 55880 - DNA, 120 bp, Artificial Sequence
  ENSG00000070047_35 (sequence is synthesized)
tgctgcggtccagagccctggtgaagcgggtcacctggaacctgcaggagtcggagagcagcgcccccgccgaggacagagccccccgggcaccacttcacaggccacagaagccccgag

SEQ ID NO: 55881 - DNA, 120 bp, Artificial Sequence
  ENSG00000070047_36 (sequence is synthesized)
aaggagcctgggacatggaggatgtggcccccacaggggtcaggcaggtgttctccgagctgccctttcccagtcacgtgcttccggaacccgggttcccagacacagacccctctcagg

SEQ ID NO: 55882 - DNA, 120 bp, Artificial Sequence
  ENSG00000070047_37 (sequence is synthesized)
tttacagccccggcctgccgcctgccccggcccagccctcaagcatcccaccctgcgcactggtcagccagcccacggtccagttcatccttcaggggagcctgccgctagtgggctgtg

SEQ ID NO: 55883 - DNA, 120 bp, Artificial Sequence
  ENSG00000070047_38 (sequence is synthesized)
gggcagcacagaccctggccccagtgcccgctgccctgaccccagcctcagagccagccagtcaagccactgcagccagcaactcggaggagaagaccccggcccccaggctagctgcgg

SEQ ID NO: 55884 - DNA, 120 bp, Artificial Sequence
  ENSG00000070047_39 (sequence is synthesized)
agaaaaccaagaaggaggagtacatgaagaagctgcacatgcaggagcgtgctgtggaggaggtgaagctggccatcaagcccttctaccagaagagggaggtgaccaaggaggagtaca

SEQ ID NO: 55885 - DNA, 120 bp, Artificial Sequence
  ENSG00000070047_40 (sequence is synthesized)
aggacatcctgcgcaaggccgtgcagaagatctgccacagcaagagtggagagatcaaccccgtgaaggtggccaacctggtgaaggcgtacgtggacaagtacaggcacatgcgcaggc

SEQ ID NO: 55886 - DNA, 120 bp, Artificial Sequence
  ENSG00000070047_41 (sequence is synthesized)
acaagaaaccagaggccggggaggagccgcccacgcagggggccgagggctgaggccaggcaatcacgggctatgcccggggagctgtcgggagtggcgggaatcggggccatgcccggg

SEQ ID NO: 55887 - DNA, 120 bp, Artificial Sequence
  ENSG00000070047_42 (sequence is synthesized)
gagctgtcgggagtggcgggaatcggggccatgcccggggagctgtcgggagtggcgggaaatggggggcatcaccatgcctgccgtcgggttcctgcgctgacacctggtctgtgcacc

SEQ ID NO: 55888 - DNA, 120 bp, Artificial Sequence
  ENSG00000070047_43 (sequence is synthesized)
aaactggacacttttgtatgtatattatagagacactgtttccattctaatttatcaaaaatggattatctttagaaacctcttgattgacttactacttggaagataaagcacttggtg

SEQ ID NO: 55889 - DNA, 120 bp, Artificial Sequence
  ENSG00000070047_44 (sequence is synthesized)
atcaagaggggctcctggtggggtggcgcgtccttgataaatctctaggtggcctcccgccaacagctgctgtgtacctttggctctgaattaggaatatctttactttctcttttccaa

SEQ ID NO: 55890 - DNA, 120 bp, Artificial Sequence
  ENSG00000070047_45 (sequence is synthesized)
gccttccctgccacggccccttcctctgtgggctgctggtcctcaggctgttcgcaagcactcagcccatgtctcagtcacggaagatgtagctgaagttggggggaccattcctcagcc

SEQ ID NO: 55891 - DNA, 120 bp, Artificial Sequence
  ENSG00000070047_46 (sequence is synthesized)
atttttctgcattgatttcccttcttgagcagtttctcagttagctccgagttcttacccagccccacagcttcatgttcataagaacatgtcctgatggggtactgcccccgcccctgg

SEQ ID NO: 55892 - DNA, 120 bp, Artificial Sequence
  ENSG00000070061_0 (sequence is synthesized)
gcactcccagtgctgcggctgcctagttgacgcacccattgagtcgctggcttctttgcagcgcttcagcgttttcccctggagggcgcctccatccttggaggcctagtgccgtcggag

SEQ ID NO: 55893 - DNA, 120 bp, Artificial Sequence
  ENSG00000070061_1 (sequence is synthesized)
agagagcgggagccgcggacagagacgcgtgcgcaattcggagccgactctgggtgcggactgtgggagctgactctgggtagccggctgcgcgtggctggggaggcgaggccggacgca

SEQ ID NO: 55894 - DNA, 120 bp, Artificial Sequence
  ENSG00000070061_2 (sequence is synthesized)
cctctgtttgggggtcctcagagattaatgattcatcaagggatagttgtacttgtctcgtgggaatcacttcatcatgcgaaatctgaaattatttcggaccctggagttcagggatat

SEQ ID NO: 55895 - DNA, 120 bp, Artificial Sequence
  ENSG00000070061_3 (sequence is synthesized)
tcaaggtccagggaatcctcagtgcttctctctccgaactgaacaggggacggtgctcattggttcagaacatggcctgatagaagtagaccctgtctcaagagaagtgaaaaatgaagt

SEQ ID NO: 55896 - DNA, 120 bp, Artificial Sequence
  ENSG00000070061_4 (sequence is synthesized)
ttctttggtggcagaaggctttctcccagaggatggaagtggccgcattgttggtgttcaggacttgctggatcaggagtctgtgtgtgtggccacagcctctggagacgtcatactctg

SEQ ID NO: 55897 - DNA, 120 bp, Artificial Sequence
  ENSG00000070061_5 (sequence is synthesized)
cagtctcagcacacaacagctggagtgtgttgggagtgtagccagtggtatctctgttatgagttggagtcctgaccaagagctggtgcttcttgccacaggtcaacagaccctgattat

SEQ ID NO: 55898 - DNA, 120 bp, Artificial Sequence
  ENSG00000070061_6 (sequence is synthesized)
gatgacaaaagattttgagccaatcctggagcagcagatccatcaggatgattttggtgaaagcaagtttatcactgttggatggggtaggaaggagacacagttccatggatcagaagg

SEQ ID NO: 55899 - DNA, 120 bp, Artificial Sequence
  ENSG00000070061_7 (sequence is synthesized)
cagacaagcagcttttcagatgcaaatgcatgagtctgctttgccctgggatgaccatagaccacaagttacctggcggggggatggacagttttttgctgtgagtgttgtttgcccaga

SEQ ID NO: 55900 - DNA, 120 bp, Artificial Sequence
  ENSG00000070061_8 (sequence is synthesized)
aacaggggctcggaaggtcagagtgtggaaccgagagtttgctttgcagtcaaccagtgagcctgtggcaggactgggaccagccctggcttggaaaccctcaggcagtttgattgcatc

SEQ ID NO: 55901 - DNA, 120 bp, Artificial Sequence
  ENSG00000070061_9 (sequence is synthesized)
tacacaagataaacccaaccagcaggatattgtgttttttgagaaaaatggactccttcatggacactttacacttcccttccttaaagatgaggttaaggtaaatgacttgctctggaa

SEQ ID NO: 55902 - DNA, 120 bp, Artificial Sequence
  ENSG00000070061_10 (sequence is synthesized)
tgcagattcctctgtgcttgcagtctggctggaagaccttcagagagaagaaagctccattccgaaaacctgtgttcagctctggactgttggaaactatcactggtatctcaagcaaag

SEQ ID NO: 55903 - DNA, 120 bp, Artificial Sequence
  ENSG00000070061_11 (sequence is synthesized)
tttatccttcagcacctgtgggaagagcaagattgtgtctctgatgtgggaccctgtgaccccataccggctgcatgttctctgtcagggctggcattacctcgcctatgattggcactg

SEQ ID NO: 55904 - DNA, 120 bp, Artificial Sequence
  ENSG00000070061_12 (sequence is synthesized)
gacgactgaccggagcgtgggagataattcaagtgacttgtccaatgtggctgtcattgatggaaacagggtgttggtgacagtcttccggcagactgtggttccgcctcccatgtgcac

SEQ ID NO: 55905 - DNA, 120 bp, Artificial Sequence
  ENSG00000070061_13 (sequence is synthesized)
ctaccaactgctgttcccacaccctgtgaatcaagtcacattcttagcacaccctcaaaagagtaatgaccttgctgttctagatgccagtaaccagatttctgtttataaatgtggtga

SEQ ID NO: 55906 - DNA, 120 bp, Artificial Sequence
  ENSG00000070061_14 (sequence is synthesized)
ttgtccaagtgctgaccctacagtgaaactgggagctgtgggtggaagtggatttaaagtttgccttagaactcctcatttggaaaagagatacaaaatccagtttgagaataatgaaga

SEQ ID NO: 55907 - DNA, 120 bp, Artificial Sequence
  ENSG00000070061_15 (sequence is synthesized)
tcaagatgtaaacccgctgaaactaggccttctcacttggattgaagaagacgtcttcctggctgtaagccacagtgagttcagcccccggtctgtcattcaccatttgactgcagcttc

SEQ ID NO: 55908 - DNA, 120 bp, Artificial Sequence
  ENSG00000070061_16 (sequence is synthesized)
ttctgagatggatgaagagcatggacagctcaatgtcagttcatctgcagcggtggatggggtcataatcagtctatgttgcaattccaagaccaagtcagtagtattacagctggctga

SEQ ID NO: 55909 - DNA, 120 bp, Artificial Sequence
  ENSG00000070061_17 (sequence is synthesized)
tggccagatatttaagtacctttgggagtcaccttctctggctattaaaccatggaagaactctggtggatttcctgttcggtttccttatccatgcacccagaccgaattggccatgat

SEQ ID NO: 55910 - DNA, 120 bp, Artificial Sequence
  ENSG00000070061_18 (sequence is synthesized)
tggagaagaggaatgtgtccttggtctgactgacaggtgtcgctttttcatcaatgacattgaggttgcgtcaaatatcacgtcatttgcagtatatgatgagtttttattgttgacaac

SEQ ID NO: 55911 - DNA, 120 bp, Artificial Sequence
  ENSG00000070061_19 (sequence is synthesized)
ccattcccatacctgccagtgtttttgcctgagggatgcttcatttaaaacattacaggccggcctgagcagcaatcatgtgtcccatggggaagttctgcggaaagtggagaggggttc

SEQ ID NO: 55912 - DNA, 120 bp, Artificial Sequence
  ENSG00000070061_20 (sequence is synthesized)
acggattgtcactgttgtgccccaggacacaaagcttgtattacagatgccaaggggaaacttagaagttgttcatcatcgagccctggttttagctcagattcggaagtggttggacaa

SEQ ID NO: 55913 - DNA, 120 bp, Artificial Sequence
  ENSG00000070061_21 (sequence is synthesized)
acttatgtttaaagaggcatttgaatgcatgagaaagctgagaatcaatctcaatctgatttatgatcataaccctaaggtgtttcttggaaatgtggaaaccttcattaaacagataga

SEQ ID NO: 55914 - DNA, 120 bp, Artificial Sequence
  ENSG00000070061_22 (sequence is synthesized)
ttctgtgaatcatattaacttgttttttacagaattgaaagaagaagatgtcacgaagaccatgtaccctgcaccagttaccagcagtgtctacctgtccagggatcctgacgggaataa

SEQ ID NO: 55915 - DNA, 120 bp, Artificial Sequence
  ENSG00000070061_23 (sequence is synthesized)
aatagaccttgtctgcgatgctatgagagcagtcatggagagcataaatcctcataaatactgcctatccatacttacatctcatgtaaagaagacaaccccagaactggaaattgtact

SEQ ID NO: 55916 - DNA, 120 bp, Artificial Sequence
  ENSG00000070061_24 (sequence is synthesized)
ctctgatcctgatgctgtgagtgctgaagaggccttgaaatatttgctgcatctggtagatgttaatgaattatatgatcattctcttggcacctatgactttgatttggtcctcatggt

SEQ ID NO: 55917 - DNA, 120 bp, Artificial Sequence
  ENSG00000070061_25 (sequence is synthesized)
agctgagaagtcacagaaggatcccaaagaatatcttccatttcttaatacacttaagaaaatggaaactaattatcagcggtttactatagacaaatacttgaaacgatatgaaaaagc

SEQ ID NO: 55918 - DNA, 120 bp, Artificial Sequence
  ENSG00000070061_26 (sequence is synthesized)
cattggccacctcagcaaatgtggacctgagtacttcccagaatgcttaaacttgataaaagataaaaacttgtataacgaagctctgaagttatattcaccaagctcacaacagtacca

SEQ ID NO: 55919 - DNA, 120 bp, Artificial Sequence
  ENSG00000070061_27 (sequence is synthesized)
ggatatcagcattgcttatggggagcacctgatgcaggagcacatgtatgagccagcggggctcatgtttgcccgttgcggtgcccacgagaaagctctctcagcctttctgacatgtgg

SEQ ID NO: 55920 - DNA, 120 bp, Artificial Sequence
  ENSG00000070061_28 (sequence is synthesized)
caactggaagcaagccctctgtgtggcagcccagcttaactttaccaaagaccagctggtgggcctcggcagaactctggcaggaaagctggttgagcagaggaagcacattgatgcggc

SEQ ID NO: 55921 - DNA, 120 bp, Artificial Sequence
  ENSG00000070061_29 (sequence is synthesized)
catggttttggaagagtgtgcccaggattatgaagaagctgtgctcttgctgttagaaggagctgcctgggaagaagctttgaggctggtatacaaatataacagactggatattataga

SEQ ID NO: 55922 - DNA, 120 bp, Artificial Sequence
  ENSG00000070061_30 (sequence is synthesized)
aaccaacgtaaagccttccattttagaagcccagaaaaattatatggcatttctggactctcagacagccacattcagtcgccacaagaaacgtttattggtagttcgagagctcaagga

SEQ ID NO: 55923 - DNA, 120 bp, Artificial Sequence
  ENSG00000070061_31 (sequence is synthesized)
gcaagcccagcaggcaggtctggatgatgaggtaccccacgggcaagagtcagacctcttctctgaaactagcagtgtcgtgagtggcagtgagatgagtggcaaatactcccatagtaa

SEQ ID NO: 55924 - DNA, 120 bp, Artificial Sequence
  ENSG00000070061_32 (sequence is synthesized)
ctccaggatatcagcgagatcatccaagaatcgccgaaaagcggagcggaagaagcacagcctcaaagaaggcagtccgctggaggacctggccctcctggaggcactgagtgaagtggt

SEQ ID NO: 55925 - DNA, 120 bp, Artificial Sequence
  ENSG00000070061_33 (sequence is synthesized)
gcagaacactgaaaacctgaaagatgaagtataccatattttaaaggtactctttctctttgagtttgatgaacaaggaagggaattacagaaggcctttgaagatacgctgcagttgat

SEQ ID NO: 55926 - DNA, 120 bp, Artificial Sequence
  ENSG00000070061_34 (sequence is synthesized)
ggaaaggtcacttccagaaatttggactcttacttaccagcagaattcagctaccccggttctaggtcccaattctactgcaaatagtatcatggcatcttatcagcaacagaagacttc

SEQ ID NO: 55927 - DNA, 120 bp, Artificial Sequence
  ENSG00000070061_35 (sequence is synthesized)
ggttcctgttcttgatgctgagctttttataccaccaaagatcaacagaagaacccagtggaagctgagcctgctagactgagtgactgcagttaggagggatccgacagagaagaccat

SEQ ID NO: 55928 - DNA, 120 bp, Artificial Sequence
  ENSG00000070061_36 (sequence is synthesized)
ttccactcattcctgttgtcctaccaccccttgctctttgagggctggctattgagaactggaaagagtaaaatgataacttaccttagcattgccaagaacttcagcagacaacaagca

SEQ ID NO: 55929 - DNA, 120 bp, Artificial Sequence
  ENSG00000070061_37 (sequence is synthesized)
attctatttattttatgttgtgtatacatcttgatcattagcaagacattaagctttaaccattatggcaccattttgtgagaatgattgttctttcacttgggctgtttgagagcataa

SEQ ID NO: 55930 - DNA, 120 bp, Artificial Sequence
  ENSG00000070061_38 (sequence is synthesized)
ttatggtaatcatgagattaatgtttcatgatttctacctccaaagtgtgaagacaagtaaaacaatgtttctaaattgtcttattttgttggcggagaagattacaatggctattagtg

SEQ ID NO: 55931 - DNA, 120 bp, Artificial Sequence
  ENSG00000070061_39 (sequence is synthesized)
ctacatttggtcaaatgtaatcacttaaatagcttcttgtcaccttaaactaaagcagaataaaaagtatcctttgaaattataagccctcctttgctgacagctattattttgtaacat

SEQ ID NO: 55932 - DNA, 120 bp, Artificial Sequence
  ENSG00000070061_40 (sequence is synthesized)
cttaccaggtcatgtgctttcagttataactgggctgagcctcctataattacaatgtctatagggactgttttactgcctgtgtattttctgctagagagttagcaatgttagagctag

SEQ ID NO: 55933 - DNA, 120 bp, Artificial Sequence
  ENSG00000070061_41 (sequence is synthesized)
aacagattagaatttctaaacagtatcatgcacagttggtgtgagtgatcagtgtgcattgtatggcatgcatggttgtgaattattctctgttctccaaatactgtttctttaactcag

SEQ ID NO: 55934 - DNA, 120 bp, Artificial Sequence
  ENSG00000070061_42 (sequence is synthesized)
atatttttgttagtgtctaggccacttcatttatttttcgtcatggtactttactgacttctctttattcaattctccacgccctcaccaaaaaaaactgtctcaaaatgagaatatttt

SEQ ID NO: 55935 - DNA, 120 bp, Artificial Sequence
  ENSG00000070061_43 (sequence is synthesized)
attttcatggtgagtctagaaaacgcccacttcattctgattaaaaattcttccatgttttaaatatcagaaccagacctttcttactgtgtatcttagcccatttgtgtctctataaca

SEQ ID NO: 55936 - DNA, 120 bp, Artificial Sequence
  ENSG00000070061_44 (sequence is synthesized)
acaaccagctttcaaaggaactaatagagtgaaaactcactcattaccacgaggatggcacaagcgattcacgtaggatctgcccctgtgaccaaaacacctcccattgggccccacttc

SEQ ID NO: 55937 - DNA, 120 bp, Artificial Sequence
  ENSG00000070061_45 (sequence is synthesized)
caacactggtgatcacatttcaacatgaggtttagggaaacaaatgcctaaactacagcactgtacataaactaacaggaaatgctgcttttgatcctcaaagaagtgatatagccaaaa

SEQ ID NO: 55938 - DNA, 120 bp, Artificial Sequence
  ENSG00000070061_46 (sequence is synthesized)
ttgtaatttaagaagcctttcccagtatagcaagatgttaactatagaatcaatctaggagtattcactgtaaaattcaacttttctgtatgtttgaacattttcacaatctcataggag

SEQ ID NO: 55939 - DNA, 120 bp, Artificial Sequence
  ENSG00000070061_47 (sequence is synthesized)
tttttaaaaagaagagaaagaagatatactttgctttggagaaatctactttttgacttacatgggtttgctgtaattaagtgcccaatattgaaaggctgcaagtactttgtaatcact

SEQ ID NO: 55940 - DNA, 120 bp, Artificial Sequence
  ENSG00000070061_48 (sequence is synthesized)
ctttggcatgggtaaataagcatggtaacttatattgaaatatagtgctcttgctttggataactgtaaagggacccatgctgatagactggaaatagaagtaaatgtgtttattgataa

SEQ ID NO: 55941 - DNA, 120 bp, Artificial Sequence
  ENSG00000070061_49 (sequence is synthesized)
cgctgcagttgatggaaaggtcacttccagaaatttggactcttacttaccagcagaattcagctaccccgacatggggagagggagtcttgctgtgttgcccaagctggtcttgaactc

SEQ ID NO: 55942 - DNA, 120 bp, Artificial Sequence
  ENSG00000070081_0 (sequence is synthesized)
agagcggagcggtgggccgggggctggaggacaggtttgtgcgctggacgcaagcaccaggcgcagcctcgctcgccgagacccggccagaacgtgttacgagtcagtttttagtgaaaa

SEQ ID NO: 55943 - DNA, 120 bp, Artificial Sequence
  ENSG00000070081_1 (sequence is synthesized)
aacattgagctaggagccaagacccatctcttcactattttggtattgtgcaagtcatcttacctctctggatctcagttgtctcatctgtaaaaaggagataaaaattatttacctgcc

SEQ ID NO: 55944 - DNA, 120 bp, Artificial Sequence
  ENSG00000070081_2 (sequence is synthesized)
tgaacatgaggtggaggaccatcctgctacagtattgctttctcttgattacatgtttacttactgctcttgaagctgtgcctattgacatagacaagacaaaagtacaaaatattcacc

SEQ ID NO: 55945 - DNA, 120 bp, Artificial Sequence
  ENSG00000070081_3 (sequence is synthesized)
ctgtggaaagtgcgaagatagaaccaccagatactggactttattatgatgaatatctcaagcaagtgattgatgtgctggaaacagataaacacttcagagaaaagctccagaaagcag

SEQ ID NO: 55946 - DNA, 120 bp, Artificial Sequence
  ENSG00000070081_4 (sequence is synthesized)
acatagaggaaataaagagtgggaggctaagcaaagaactggatttagtaagtcaccatgtgaggacaaaacttgatgaactgaaaaggcaagaagtaggaaggttaagaatgttaatta

SEQ ID NO: 55947 - DNA, 120 bp, Artificial Sequence
  ENSG00000070081_5 (sequence is synthesized)
aagctaagttggattcccttcaagatataggcatggaccaccaagctcttctaaaacaatttgatcacctaaaccacctgaatcctgacaagtttgaatccacagatttagatatgctaa

SEQ ID NO: 55948 - DNA, 120 bp, Artificial Sequence
  ENSG00000070081_6 (sequence is synthesized)
tcaaagcggcaacaagtgatctggaacactatgacaagactcgtcatgaagaatttaaaaaatatgaaatgatgaaggaacatgaaaggagagaatatttaaaaacattgaatgaagaaa

SEQ ID NO: 55949 - DNA, 120 bp, Artificial Sequence
  ENSG00000070081_7 (sequence is synthesized)
agagaaaagaagaagagtctaaatttgaagaaatgaagaaaaagcatgaaaatcaccctaaagttaatcacccaggaagcaaagatcaactaaaagaggtatgggaagagactgatggat

SEQ ID NO: 55950 - DNA, 120 bp, Artificial Sequence
  ENSG00000070081_8 (sequence is synthesized)
tggatcctaatgactttgaccccaagacatttttcaaattacatgatgtcaatagtgatggattcctggatgaacaagaattagaagccctatttactaaagagttggagaaagtatatg

SEQ ID NO: 55951 - DNA, 120 bp, Artificial Sequence
  ENSG00000070081_9 (sequence is synthesized)
gatatggtagaaatggaagaagaaaggcttagaatgagggaacatgtaatgaatgaggttgatactaacaaagacagattggtgactctggaggagtttttgaaagccacagaaaaaaaa

SEQ ID NO: 55952 - DNA, 120 bp, Artificial Sequence
  ENSG00000070081_10 (sequence is synthesized)
gaattcttggagccagatagctgggagacattagatcagcaacagttcttcacagaggaagaactaaaagaatatgaaaatattattgctttacaagaaaatgaacttaagaagaaggca

SEQ ID NO: 55953 - DNA, 120 bp, Artificial Sequence
  ENSG00000070081_11 (sequence is synthesized)
gatgagcttcagaaacaaaaagaagagctacaacgtcagcatgatcaactggaggctcagaagctggaatatcatcaggtcatacagcagatggaacaaaaaaaattacaacaaggaatt

SEQ ID NO: 55954 - DNA, 120 bp, Artificial Sequence
  ENSG00000070081_12 (sequence is synthesized)
cctccatcagggccagctggagaattgaagtttgagccacacatttaaagtctgaagtccaccagaacttggaagaaagctgttaactcaacatctatttcatctttttagctcccttcc

SEQ ID NO: 55955 - DNA, 120 bp, Artificial Sequence
  ENSG00000070081_13 (sequence is synthesized)
tttttctctgctcaataaatattttaaaagcatatttgaaataaagggagatactttttaaatgaaaacactttttttgggacacagatattaaaggattgaagtttatcagaaccagga

SEQ ID NO: 55956 - DNA, 120 bp, Artificial Sequence
  ENSG00000070081_14 (sequence is synthesized)
agaaaacaaactcactgtctgctctctgctctcacattcacacggctcttttatttatttttttgttctcctttaatgatttaattaagtggctttatgccataatttagtgaaactatt

SEQ ID NO: 55957 - DNA, 120 bp, Artificial Sequence
  ENSG00000070081_15 (sequence is synthesized)
aggaactatttaagtgagaaaactctgcctcttgcttttaaattagattgctctcacttactcgtaaacataggtattcttttatgggtgcttatcattccttctttcaataaatgtctg

SEQ ID NO: 55958 - DNA, 120 bp, Artificial Sequence
  ENSG00000070081_16 (sequence is synthesized)
tttgatattaacaattctggaaaggccacagtatttccctgtgtttcctggtaacgtttttctagttttggcaacctcaactgctagaaattcttcacctgaatcacttttgctaccact

SEQ ID NO: 55959 - DNA, 120 bp, Artificial Sequence
  ENSG00000070081_17 (sequence is synthesized)
tcaggtcatttttcattcttttttattttgctctatactttatcatttaagattaggttatgttacatataacagaaaaaacaaagataacagtggtttaaactaaataggagtttttct

SEQ ID NO: 55960 - DNA, 120 bp, Artificial Sequence
  ENSG00000070081_18 (sequence is synthesized)
tcttacataagtctagaagtaggtggtgtccaggttcctatctttctgctctgctatcctcagtgcatgatttttatcctcagattacctcactctcactgttcaagtttgctcctggag

SEQ ID NO: 55961 - DNA, 120 bp, Artificial Sequence
  ENSG00000070081_19 (sequence is synthesized)
tcaattgaaatccacatttattacaaatataatttcaaatcattaagatgttatgttattttttgtgtattttttgtggtattagagcaatttagattatagaaaaatgaaaatgcctcc

SEQ ID NO: 55962 - DNA, 120 bp, Artificial Sequence
  ENSG00000070081_20 (sequence is synthesized)
ctccaaaagttttatgtagcagcaaattttaagtgctgtatcatttgtataatttgataaccatatttatggtaaaatgatttatttcaactttatttgtaattctttctaattatatta

SEQ ID NO: 55963 - DNA, 120 bp, Artificial Sequence
  ENSG00000070081_21 (sequence is synthesized)
taccagagaatatgttttttaaaattgtgatctatgattagctaagcatattttttaaaacaagtatatttgtatatgaaggaacatttagaataaaggaagatacttttaaaataagaa

SEQ ID NO: 55964 - DNA, 120 bp, Artificial Sequence
  ENSG00000070081_22 (sequence is synthesized)
ggggcagagcggagcggtgggccgggggctggaggacaggtttgtgcgctggacgcaagcaccaggcgcagcctcgctcgccgagacccggccaggtaaggccggtggccgcgcgaacgt

SEQ ID NO: 55965 - DNA, 120 bp, Artificial Sequence
  ENSG00000070081_23 (sequence is synthesized)
ggaggggcagagcggagcggtgggccgggggctggaggacaggtttgtgcgctggacgcaagcaccaggcgcagcctcgctcgccgagacccggccagagacgaagtttcaccatgttgg

SEQ ID NO: 55966 - DNA, 120 bp, Artificial Sequence
  ENSG00000070081_24 (sequence is synthesized)
ctgtctatgttgtgtttacctttctttgctctcccaagaacgtgttacgagtcagtttttagtgaaaaaacattgagctaggagccaagacccatctcttcactattttggtattgtgca

SEQ ID NO: 55967 - DNA, 120 bp, Artificial Sequence
  ENSG00000070081_25 (sequence is synthesized)
agtttctcagctgagccaaaggaaatcaagaaatctcctggaatcaaggaaatcaaggaatcaattacttacaccaagctgagcaagagacaacatgaaggcagaggtagcagtaatcag

SEQ ID NO: 55968 - DNA, 120 bp, Artificial Sequence
  ENSG00000070081_26 (sequence is synthesized)
tcccagcgcgagccggaggcgctgggttccctctgctccactcgcagctgggcacccgagctttcttcggggtcgaggagggtggctggctcttggcggggagcaggagaggaacgtgtt

SEQ ID NO: 55969 - DNA, 120 bp, Artificial Sequence
  ENSG00000070081_27 (sequence is synthesized)
gccatggcagagatataagtctgactattaactacagaaggaaataatcttcatgtccgtatctctcttatgaaagaagagggtgataaaggaaaggagaaggccattcttactgacctg

SEQ ID NO: 55970 - DNA, 120 bp, Artificial Sequence
  ENSG00000070081_28 (sequence is synthesized)
aacaacttattcctccatattattgcaagcctttgcacatctctttgtatcatccccctatgacatcatgtgttaatctcatctcaggactgcaacccaagattgcagtgagtgggaaga

SEQ ID NO: 55971 - DNA, 120 bp, Artificial Sequence
  ENSG00000070081_29 (sequence is synthesized)
aaaagcttctggaaggctcaagctacccatgtgcatctttgagcctcagtttccccatctttaaaatgaggggtttggaatagatgtctgttctctggggcaggatgcagaggaaagagc

SEQ ID NO: 55972 - DNA, 120 bp, Artificial Sequence
  ENSG00000070081_30 (sequence is synthesized)
attgaagtttgagccacccatgaagtacaatcaagaagaaattgaaaaacagtcagagttagatgatgagcttcatcgtttgtcatgcaggatttttatcccctgaagaacctgctagag

SEQ ID NO: 55973 - DNA, 120 bp, Artificial Sequence
  ENSG00000070081_31 (sequence is synthesized)
aagtccaccttcacccttaaccactggtgcctcaacttaatacttttaaaattcatttgtttctgttggaattgggatactaaggtccagaggtgtccttctaaagctggtagaggtttc

SEQ ID NO: 55974 - DNA, 120 bp, Artificial Sequence
  ENSG00000070081_32 (sequence is synthesized)
acgagtcatcagggacccagaacccttctcttttgctgtccctttgtcctagtgcatggtttccacactgtggtgcaagatgtctcctcaagctctaggcattacatctgctatcctgct

SEQ ID NO: 55975 - DNA, 120 bp, Artificial Sequence
  ENSG00000070081_33 (sequence is synthesized)
gtcagaaagaaggaaggggaaaagaagatcatttccttctctttaaggacatttcccagaagtcacacagaacatttccatttatattactttggccagaacttggtcatatggccacat

SEQ ID NO: 55976 - DNA, 120 bp, Artificial Sequence
  ENSG00000070081_34 (sequence is synthesized)
ttagttccagaatgattaggaaatgcagtcttttattgatccctgtgcccaggaaaatattggaggcctttttcaaggaaaaaggggaaaacagatattggttgacaaatagcagtctct

SEQ ID NO: 55977 - DNA, 120 bp, Artificial Sequence
  ENSG00000070081_35 (sequence is synthesized)
gccatactgtccctggatacatgtctttgagtgaatgtcccttatttaccattctgattacttgttggatattttcaatatgtgttacaatatggttccaaaattgtatgtgatattcca

SEQ ID NO: 55978 - DNA, 120 bp, Artificial Sequence
  ENSG00000070081_36 (sequence is synthesized)
acagcaagttggatgcaatgtgtcataaaaatgacctcagtgtcaaccagcatttgaataccgtgtctcaatgctgtgcaccaataaagaacacagaaagtcagagttttccataaataa

SEQ ID NO: 55979 - DNA, 120 bp, Artificial Sequence
  ENSG00000070081_37 (sequence is synthesized)
aaatgggaggaattataactaaatgaaatgaattataattgtaactaaatgaggtggaatgaggtgaaactataactaaatgaaatgagaggaattataacaaaaatattgctaatattt

SEQ ID NO: 55980 - DNA, 83 bp, Artificial Sequence
  ENSG00000070081_38 (sequence is synthesized)
gtgtgccctccttgatcctagaagtttgaggctatagtgcacaataatcacatctgtgaattgccattgtattccaacctggg

SEQ ID NO: 55981 - DNA, 120 bp, Artificial Sequence
  ENSG00000070081_39 (sequence is synthesized)
ataatcacatctgtgaattgccattgtattccaacctgggcaatatagtgagactctctctctcaaaaaaagaaaaaaaagtcataatagttgatttttttttttttttgagatggagtc

SEQ ID NO: 55982 - DNA, 120 bp, Artificial Sequence
  ENSG00000070081_40 (sequence is synthesized)
taggcgtgagccactgcgcccagccaaaaattgatgattatatgtgatttagattgttttagagtgaataaaaaatgtaaactcagttttccaagtatttcagggcattttttttttttt

SEQ ID NO: 55983 - DNA, 120 bp, Artificial Sequence
  ENSG00000070081_41 (sequence is synthesized)
tctgtcccccaggctggagtgcaatggcataatcacagctcactgcagcctaaacctgggctcaagtgatccttccacttcaacctcctgggtagctgggactataggcatacaccacca

SEQ ID NO: 55984 - DNA, 120 bp, Artificial Sequence
  ENSG00000070081_42 (sequence is synthesized)
aagtgatccttccacttcaacctcctgggtagctgggactataggcatacaccaccacgtccagctaattttttgattagccgaggcctcactttgttgtccaggctggtctcaaactcc

SEQ ID NO: 55985 - DNA, 120 bp, Artificial Sequence
  ENSG00000070081_43 (sequence is synthesized)
caaagtgttagaattacaggcctgagcagctgcgcccggaccaacttttatcatagtgaataattataggaattatctgaagagactgctcacttagagacgaggtttcaccgtgttagc

SEQ ID NO: 55986 - DNA, 86 bp, Artificial Sequence
  ENSG00000070081_44 (sequence is synthesized)
aatttatattttaataagttcccgaagtgacttatatgcacattaaagattgagaagccatgcattacaggatttgatgaagcaaa

SEQ ID NO: 55987 - DNA, 120 bp, Artificial Sequence
  ENSG00000070081_45 (sequence is synthesized)
tcctgagtagctgggactacagatgtgcgacacagcacctggcaaatttttaagtattttcttcagactgaaacatcattgtgttaaagataaaaaagtaaaaaatattcttgtagagat

SEQ ID NO: 55988 - DNA, 120 bp, Artificial Sequence
  ENSG00000070081_46 (sequence is synthesized)
tgaaacatcattgtgttaaagataaaaaagtaaaaaatattcttgtagagataggatctcactgttgtccagattggtctcaaatttttgagctcaagccatcctcctgccttggcctcc

SEQ ID NO: 55989 - DNA, 120 bp, Artificial Sequence
  ENSG00000070081_47 (sequence is synthesized)
ctctcccgaggaatgctgagcaggctctggacgcctctccgtgcacaccccagacctggggaggggagctctccggacaccccagctggccgcccctcgggccctgagtccgaagacccg

SEQ ID NO: 55990 - DNA, 120 bp, Artificial Sequence
  ENSG00000070081_48 (sequence is synthesized)
ctaaacagggcccgggcactgaagtaccctattgttctcatcccctctcccgggaccccgcaccctcctccatctaggctgaggttcccagatttgtgtcttggcccctggcggcgccga

SEQ ID NO: 55991 - DNA, 120 bp, Artificial Sequence
  ENSG00000070081_49 (sequence is synthesized)
atctgaaacaatcaagaggacagactattatgttgtacaatgtcccttgaataccacagaagagatgctcagtgtatcctattagaaggcacatgttgacgatccccataactgacatta

SEQ ID NO: 55992 - DNA, 120 bp, Artificial Sequence
  ENSG00000070081_50 (sequence is synthesized)
tcaccaaaaaggataaggttatttggagatggggacttgctatgttgctcaggctggtttcgaactcttggcctcaagtgattttcctgccttggcctctcaaaacacaggaatgcaggt

SEQ ID NO: 55993 - DNA, 61 bp, Artificial Sequence
  ENSG00000070081_51 (sequence is synthesized)
gagaaggccattcttactgacctgatagtggaagaaaaatttctccttaaaaatatcagtc

SEQ ID NO: 55994 - DNA, 120 bp, Artificial Sequence
  ENSG00000070081_52 (sequence is synthesized)
cagcagcacctgaacttatgtttcgaccagaactgggtcacactgatggccacacctagctgctagggaggctgagaagtcaatgtggcaatgtgaccagctaaaagttggattctttta

SEQ ID NO: 55995 - DNA, 120 bp, Artificial Sequence
  ENSG00000070081_53 (sequence is synthesized)
ctaaggaagaagggaagagggaatgtttggtaggcaactttggattttaaactcagccagccttgttggctacctaaattctgtgtaccttcttcttccgagagagaaaacactcacccc

SEQ ID NO: 55996 - DNA, 120 bp, Artificial Sequence
  ENSG00000070081_54 (sequence is synthesized)
tctctccctgaagagaaaccaccagaaatccagcccattattgcatactagatgaaagaccatgctatctggagacagtcccctccatcatgttagggtgtggctccttgtgttctggcc

SEQ ID NO: 55997 - DNA, 120 bp, Artificial Sequence
  ENSG00000070081_55 (sequence is synthesized)
acctacaaactgaaagacaagttttctgccctgagagcaccagatgcataatgcaaaggtgcaggaaaactgaccttttaaattttttagagacagggtcttactctgttgtccagtcta

SEQ ID NO: 55998 - DNA, 120 bp, Artificial Sequence
  ENSG00000070081_56 (sequence is synthesized)
ccttgaacttctgggctcaagtgatccttccacctcagtccccctagtagctaggactacaggcacatgccacgaacgcctggctaaacatttttttttgtagagatggagtattgctat

SEQ ID NO: 55999 - DNA, 120 bp, Artificial Sequence
  ENSG00000070081_57 (sequence is synthesized)
catttttttttgtagagatggagtattgctatgttgctcaggctggtcttaaactcctggtctcaagcaatcttctcacctcagcctcccaaagcactgggatcactggtgtgagccacc

SEQ ID NO: 56000 - DNA, 120 bp, Artificial Sequence
  ENSG00000070081_58 (sequence is synthesized)
atgcccaagatccctaaaattgaccttttagaaaaagggagaaatagaaatatagtggccactgatccatagcaatttgaaagtaccacttggcaaaaataattaaatctctctgctata

SEQ ID NO: 56001 - DNA, 120 bp, Artificial Sequence
  ENSG00000070081_59 (sequence is synthesized)
gttcatgaatatattccttggtttgcctatcaggcaacccctgattcacctttctgagaggaattcctttacctaatgtcctcagggggccttggttttactttcttggaggtttttatt

SEQ ID NO: 56002 - DNA, 120 bp, Artificial Sequence
  ENSG00000070081_60 (sequence is synthesized)
gtacattaattttcagacacaatctgaatgggcattggaaagtatacccttcttggaggctgggcagccttagcagtttacttcctataattgtgagtctgggggcaggcttgggaatta

SEQ ID NO: 56003 - DNA, 120 bp, Artificial Sequence
  ENSG00000070081_61 (sequence is synthesized)
gagtatagatccgtaacagctacagtctattgcaggccaggtttgggtttttgttgttgttttgttctgtttcttggccaagtggattcctaaaactttagtaagtttctggtctgttgt

SEQ ID NO: 56004 - DNA, 120 bp, Artificial Sequence
  ENSG00000070081_62 (sequence is synthesized)
cttcagtcatttacatggacagtattaaccaaggtaaaatacattgtttttaacaaagaacctcatcatttacttgctggcctctgtgtgctctccatcccctttgttcttacaggaatg

SEQ ID NO: 56005 - DNA, 120 bp, Artificial Sequence
  ENSG00000070081_63 (sequence is synthesized)
gactgtaggcttgcatggaatggcaacagtcttaatctgatctcttcccctaggatggctcctattatttggcagaaaattcttaagggaaggttcttaaaaaaggttgagaaagtttta

SEQ ID NO: 56006 - DNA, 120 bp, Artificial Sequence
  ENSG00000070081_64 (sequence is synthesized)
gtagctccctcagagcctttacttataaatgtttcagtttggagtacagttttcaattcttcagggctccagatttgggacttggtcaatttatatggtagacaaagagcaattctctca

SEQ ID NO: 56007 - DNA, 120 bp, Artificial Sequence
  ENSG00000070081_65 (sequence is synthesized)
gcaaagctatttttcccttgcgtcactgcagacttgttaatcttagtccaagtcacatatctcttgtagggctttgctgaaaagaggcaagaagcagccaacacatgctagcactctgaa

SEQ ID NO: 56008 - DNA, 120 bp, Artificial Sequence
  ENSG00000070081_66 (sequence is synthesized)
gttctaccaccttcgtctctgtggcaggaagtctcaacctcaccttgacttctgttggcaagaagtctcactgcccaaagccctacctcctcaactaagccaaccccagatttagggcct

SEQ ID NO: 56009 - DNA, 120 bp, Artificial Sequence
  ENSG00000070081_67 (sequence is synthesized)
tcgacttgctgtgctttacttctagctgccaaattctgtataggtcaagattcttggctgtaagcaatgaaatcttctttagctattaaacagaagggaattgatgaatgagtatatata

SEQ ID NO: 56010 - DNA, 120 bp, Artificial Sequence
  ENSG00000070081_68 (sequence is synthesized)
ggtcacagaatcaatgggagggttgaagaaacagatctaggctgagcttctaggaattatgtcacaagagtaggctgctgaaagagctgctgcttttagaacaatcaagaagctgcctgc

SEQ ID NO: 56011 - DNA, 120 bp, Artificial Sequence
  ENSG00000070081_69 (sequence is synthesized)
tggattaggaagctgcctgctgaacagttgccagttccagagccacaccacctctgccatgctttatgccagcaaaaatagatacatctcttcctgcctctgtccccacgttacttggct

SEQ ID NO: 56012 - DNA, 120 bp, Artificial Sequence
  ENSG00000070087_0 (sequence is synthesized)
gccgctggtttgtcagccccgcggctgcgggcggccgggcggccgagcgcgctctgaggttcgtccctcatcgctgaacccgcgtcctcccgccgcagctcctcggggaggggggcggtc

SEQ ID NO: 56013 - DNA, 120 bp, Artificial Sequence
  ENSG00000070087_1 (sequence is synthesized)
cctccccccgcgccgccgccgcccgctaccgccgccgccgccgctgcgcctgctgctcctcgccgtccgcgctgcagtgcgaagggctcgaagatggccggttggcagagctacgtggat

SEQ ID NO: 56014 - DNA, 120 bp, Artificial Sequence
  ENSG00000070087_2 (sequence is synthesized)
gaagggctcgaagatggccggttggcagagctacgtggataacctgatgtgcgatggctgctgccaggaggccgccattgtcggctactgcgacgccaaatacgtctgggcagccacggc

SEQ ID NO: 56015 - DNA, 120 bp, Artificial Sequence
  ENSG00000070087_3 (sequence is synthesized)
cgggggcgtctttcagagcattacgccaatagaaatagatatgattgtaggaaaagaccgggaaggtttctttaccaacggtttgactcttggcgcgaagaaatgctcagtgatcagaga

SEQ ID NO: 56016 - DNA, 120 bp, Artificial Sequence
  ENSG00000070087_4 (sequence is synthesized)
tagtctatacgtcgatggtgactgcacaatggacatccggacaaagagtcaaggtggggagccaacatacaatgtggctgtcggcagagctggtagagtcttggtctttgtaatgggaaa

SEQ ID NO: 56017 - DNA, 120 bp, Artificial Sequence
  ENSG00000070087_5 (sequence is synthesized)
agaaggggtccatggaggcggattgaataagaaggcatactcaatggcaaaatacttgagagactctgggttctagctgctaggcagactgttaagtattaggggaaaattgctcttaaa

SEQ ID NO: 56018 - DNA, 120 bp, Artificial Sequence
  ENSG00000070087_6 (sequence is synthesized)
ctttcctagctataagcttaagtcttaattctggaaattttattagcaatgcagggtgatggggtatgaacctgtgtctcctttgtatccctctgttggtggggaaaggtgtctttcttt

SEQ ID NO: 56019 - DNA, 120 bp, Artificial Sequence
  ENSG00000070087_7 (sequence is synthesized)
ctgccctccccccccaaaataattctgttcacttttgttttgtttccttgtgtactccagcattggttatagtcatgggaaaggaaggtgtccacggaggcacacttaacaagaaagcat

SEQ ID NO: 56020 - DNA, 120 bp, Artificial Sequence
  ENSG00000070087_8 (sequence is synthesized)
atgaactcgctttatacctgaggaggtctgatgtgtaagcagcctctccccatctacctagcaactgtcttcatcaacaaccctaattatggtcacaatgctaccaaactgtagatggta

SEQ ID NO: 56021 - DNA, 120 bp, Artificial Sequence
  ENSG00000070087_9 (sequence is synthesized)
ataattgcagcacaataatgatttgcatgataccttgaaattggggggagggggcatgccaagttgggcatcactttgtcttagcaattaatgggatattgattactaaaataagttaat

SEQ ID NO: 56022 - DNA, 120 bp, Artificial Sequence
  ENSG00000070087_10 (sequence is synthesized)
attaagcaaggtgccggttgtacaatctctgatcagtgtcttttcagcactttgagcatttacttggctcatttagtcttccttttgtagcgcatggttgggaggaaaaagtgcatgcat

SEQ ID NO: 56023 - DNA, 120 bp, Artificial Sequence
  ENSG00000070087_11 (sequence is synthesized)
cattccttcactcttctctttttcccgccccccctcccttcgcacataggcatttggtttgcttccatctttttttatgcagtgcctgtttttttttaaccaattaaaatcccttttgtt

SEQ ID NO: 56024 - DNA, 120 bp, Artificial Sequence
  ENSG00000070087_12 (sequence is synthesized)
gatgagctattgagagctgcagtagtttgcttttagtattgttgttgcacttgagcagagacaaacctttattcatagtgtctacaggacatatgaagagtgcaatggcaaaacaagagc

SEQ ID NO: 56025 - DNA, 120 bp, Artificial Sequence
  ENSG00000070087_13 (sequence is synthesized)
aaaaagcacttcctcccatgaccttacagtaaccatactgattgaatccccagggacattccatcattgcaatagctcagatttttcttcctttttctttgcacaccagctctactcttt

SEQ ID NO: 56026 - DNA, 120 bp, Artificial Sequence
  ENSG00000070087_14 (sequence is synthesized)
agtaaaattgtaaaaggctgccattatggacattaggtatcccaacataaccatctggagtgtgtccagtttgttcttcataggaccaatttttatttgcagcttgagtttttatatgaa

SEQ ID NO: 56027 - DNA, 120 bp, Artificial Sequence
  ENSG00000070087_15 (sequence is synthesized)
gttgcattattgtggacttggctgtcttgtgatgaatttttttcatatgtattctgtgccatactattgttaaaatgaactgttgctattgtgagatggattttaactgacctattaagg

SEQ ID NO: 56028 - DNA, 120 bp, Artificial Sequence
  ENSG00000070087_16 (sequence is synthesized)
gtttctttcgaatggcactactttagggacattctagtatttgcttctattgtttgggccttgtggataatgtacagatttaaaaacaaatcttgttgctgatttgtccatttctttccc

SEQ ID NO: 56029 - DNA, 120 bp, Artificial Sequence
  ENSG00000070087_17 (sequence is synthesized)
tgcactttgttacatctgggatacagtctaactcatctgatttaatatgcatttaaaaaaatgccataactattaaacaccttgtttacagacagatgaaataaatttattccaaccaaa

SEQ ID NO: 56030 - DNA, 120 bp, Artificial Sequence
  ENSG00000070087_18 (sequence is synthesized)
cgccgcggaaggatcgcacgcacgcgcgcgcgcacgcccagccgtgtccgcggaaaacggagggcgctgcggtaaggagcagccgccacaggcacagccgcttcgcagcctcccgccgct

SEQ ID NO: 56031 - DNA, 120 bp, Artificial Sequence
  ENSG00000070087_19 (sequence is synthesized)
gtcttccacggagaatgcatccgcgtctcaagagtcggagtcccccgccgccgccgccgccatcttgaggagggtgtgagcgtgtattgagggggagagctagcgaagagttagcgcggc

SEQ ID NO: 56032 - DNA, 120 bp, Artificial Sequence
  ENSG00000070087_20 (sequence is synthesized)
gtgagtaaggcattcttttggttaaagttgcatgccacattacaacttattaagcagtttcttttaacattttgaataaaagttagtccataatggctattaaggtggtttttgtgaact

SEQ ID NO: 56033 - DNA, 120 bp, Artificial Sequence
  ENSG00000070087_21 (sequence is synthesized)
gcccagcactatggagaagcactgctttagttttacctactctacagcatctatgacctggcctcttagatcctgattttgtttctacgatagaatattcgtatgaactcactttcagct

SEQ ID NO: 56034 - DNA, 120 bp, Artificial Sequence
  ENSG00000070087_22 (sequence is synthesized)
gtgaacactttcaggcaccagctgacttaatacagtttataaataactctttaagtttgcactttgtctagtgtcaactgtcaactctttacagtttctttgtatagactggtcttggtt

SEQ ID NO: 56035 - DNA, 120 bp, Artificial Sequence
  ENSG00000070087_23 (sequence is synthesized)
aagagacgacatcattaactgaagtcaaatcaactcatgtaaaatatgtgattatataggattaaataattatttagaaaagactgaatcttggttttacattagtgaaatgtggctatc

SEQ ID NO: 56036 - DNA, 120 bp, Artificial Sequence
  ENSG00000070087_24 (sequence is synthesized)
tggcagtggtagcataagcctagctacagcccttcctgttacatcaagccctaaaaggagttaactacaacttaatgtgtgtgtgttttttttttttctttttggtggggggcagccaat

SEQ ID NO: 56037 - DNA, 120 bp, Artificial Sequence
  ENSG00000070087_25 (sequence is synthesized)
agagcattacggtgaggaccagtggcggccggtaccctggtccctgcaccggagcggggtggccggccgcgggggcaccgcagcgcggggctggaacactgagggccgagcccgcagcca

SEQ ID NO: 56038 - DNA, 120 bp, Artificial Sequence
  ENSG00000070087_26 (sequence is synthesized)
gccctgcaacagcaccaagtctatttctaggcagcccatgaccagggctgagaacttgccccagaccatgagcctcccggctgagaaaacaagttaactcacagtttttcagcatctcag

SEQ ID NO: 56039 - DNA, 120 bp, Artificial Sequence
  ENSG00000070087_27 (sequence is synthesized)
cctgcagcagtgatccagttccttcaaactgtctgtggattctctcggctttcctggtatgtgcctgagaaagcaagttgactcagtttttcagcatctcagggagcctgaagcagtgat

SEQ ID NO: 56040 - DNA, 120 bp, Artificial Sequence
  ENSG00000070087_28 (sequence is synthesized)
tgatccagttgcttcaaacgtctgtggattccctcggctttcctgctactcagaaggctgaggcacaagaatcgctcgaacctgggagacagacgttgcagtgagccgagatcacgccat

SEQ ID NO: 56041 - DNA, 120 bp, Artificial Sequence
  ENSG00000070159_0 (sequence is synthesized)
agacggcggccaggtcgcgccgcgagcgagcttccgcgccgcccgcacgcgcgacctacctgggcgctccgcgcccccggatgctgcaggttattcagcgatagttatgacctcccggtt

SEQ ID NO: 56042 - DNA, 120 bp, Artificial Sequence
  ENSG00000070159_1 (sequence is synthesized)
acgtgcgttgggtggaagaattaataatatacgcacctcggagttacccaaagagaaaactcgatcagaagtcatttgcagcatccactttttagatggcgtggtacagacctttaaagt

SEQ ID NO: 56043 - DNA, 120 bp, Artificial Sequence
  ENSG00000070159_2 (sequence is synthesized)
tactaaacaagacactggccaggttcttctggatatggtgcacaaccacctgggtgtgactgaaaaggaatattttggtttacagcatgatgacgactccgtggactctcctagatggct

SEQ ID NO: 56044 - DNA, 120 bp, Artificial Sequence
  ENSG00000070159_3 (sequence is synthesized)
ggaagcaagcaaagccatcaggaagcagttaaaaggaggtttcccctgtaccctgcattttcgagtaagattttttatacctgatcccaacacactgcagcaagaacaaaccaggcactt

SEQ ID NO: 56045 - DNA, 120 bp, Artificial Sequence
  ENSG00000070159_4 (sequence is synthesized)
gtatttcttacaactgaagatggatatttgcgaaggaaggttaacctgccctcttaactcagcagtggttctagcgtcctatgccgtacaatctcattttggagactataattcttccat

SEQ ID NO: 56046 - DNA, 120 bp, Artificial Sequence
  ENSG00000070159_5 (sequence is synthesized)
acatcatccaggctatctttccgatagtcactttatacccgatcaaaatgaggactttttaacaaaagtcgaatctctgcatgagcagcacagtgggctaaaacaatcagaagcagaatc

SEQ ID NO: 56047 - DNA, 120 bp, Artificial Sequence
  ENSG00000070159_6 (sequence is synthesized)
ctgctatatcaacatagcgcggaccctcgacttctatggagtagaactgcacagtggtagggatctgcacaatttagacctaatgattggaattgcttccgcgggtgttgctgtgtaccg

SEQ ID NO: 56048 - DNA, 120 bp, Artificial Sequence
  ENSG00000070159_7 (sequence is synthesized)
aaaatacatttgcacaagtttctatccttgggtgaacattctcaaaatttctttcaaaaggaaaaagttcttcatacatcagcgacagaaacaggctgaatccagggaacatattgtggc

SEQ ID NO: 56049 - DNA, 120 bp, Artificial Sequence
  ENSG00000070159_8 (sequence is synthesized)
cttcaacatgctgaattaccgatcttgcaaaaacttgtggaaatcctgtgttgagcaccatacgttctttcaggcaaagaagctactacctcaggaaaagaatgttctgtctcagtactg

SEQ ID NO: 56050 - DNA, 120 bp, Artificial Sequence
  ENSG00000070159_9 (sequence is synthesized)
gactatgggctctcggaacaccaaaaagtcggtaaataaccaatattgcaaaaaggtgattggcgggatggtgtggaacccagccatgcggagatccttatcagtggagcacttagaaac

SEQ ID NO: 56051 - DNA, 120 bp, Artificial Sequence
  ENSG00000070159_10 (sequence is synthesized)
caagagtctgccttctcgttcccctcccattactcccaactggcgaagtcctcggctccggcacgaaatccgaaagccacgccactcttctgcagataaccttgcaaatgaaatgaccta

SEQ ID NO: 56052 - DNA, 120 bp, Artificial Sequence
  ENSG00000070159_11 (sequence is synthesized)
catcacggaaacggaagatgtattttacacgtacaagggctctctggcccctcaagacagcgattctgaagtttctcagaaccgaagcccgcaccaagagagtttatccgagaacaatcc

SEQ ID NO: 56053 - DNA, 120 bp, Artificial Sequence
  ENSG00000070159_12 (sequence is synthesized)
ggcacaaagctacctgacccagaagtcatccagttctgtgtctccatcttcaaatgctccaggctcctgctcacctgacggcgttgatcagcagctcttagatgacttccacagggtgac

SEQ ID NO: 56054 - DNA, 120 bp, Artificial Sequence
  ENSG00000070159_13 (sequence is synthesized)
caaagggggctccaccgaggacgccagccagtactactgtgacaagaatgataatggtgacagctacttagtcttgatccgtatcacaccagatgaagatggaaaatttggatttaatct

SEQ ID NO: 56055 - DNA, 120 bp, Artificial Sequence
  ENSG00000070159_14 (sequence is synthesized)
taagggaggagtggatcaaaagatgcctcttgtggtatcaaggataaacccagagtcacctgcggacacctgcattcctaagctgaacgaaggggatcaaatcgtgttaatcaatggccg

SEQ ID NO: 56056 - DNA, 120 bp, Artificial Sequence
  ENSG00000070159_15 (sequence is synthesized)
ggacatctcagaacacacgcatgaccaagtggtgatgttcatcaaagccagccgggagtcccactcacgggagctggccctggtgatcaggaggagagctgtccgctcatttgctgactt

SEQ ID NO: 56057 - DNA, 120 bp, Artificial Sequence
  ENSG00000070159_16 (sequence is synthesized)
caagtctgaagatgaactgaaccagcttttccccgaagccattttccccatgtgtccggagggtggggacactttggagggatccatggcacagctaaagaagggcctcgaaagcgggac

SEQ ID NO: 56058 - DNA, 120 bp, Artificial Sequence
  ENSG00000070159_17 (sequence is synthesized)
ggtgctgatccagtttgagcaactctacagaaaaaagccaggtttggccatcacgtttgcaaagctgcctcaaaatttggacaaaaaccgatataaagatgtgctgccttatgacaccac

SEQ ID NO: 56059 - DNA, 120 bp, Artificial Sequence
  ENSG00000070159_18 (sequence is synthesized)
ccgggtattattgcagggaaatgaagattatattaatgcaagttacgtgaacatggaaattcctgctgctaaccttgtgaacaagtacatcgccactcaggggcccctgccgcatacctg

SEQ ID NO: 56060 - DNA, 120 bp, Artificial Sequence
  ENSG00000070159_19 (sequence is synthesized)
tgcacagttttggcaggttgtctgggatcagaagttgtcactcattgtcatgttgacgactctcacagaacgagggcggaccaaatgtcaccagtactggccagatccccccgacgtcat

SEQ ID NO: 56061 - DNA, 120 bp, Artificial Sequence
  ENSG00000070159_20 (sequence is synthesized)
gaaccacggcggctttcacatccagtgtcagtcagaggactgcaccatcgcctatgtgtcccgagaaatgctggtcacaaacacccagaccggggaagaacacacagtgacacatctcca

SEQ ID NO: 56062 - DNA, 120 bp, Artificial Sequence
  ENSG00000070159_21 (sequence is synthesized)
gtacgtcgcatggcctgaccacggtgtgcccgatgactcctccgactttctggaatttgtaaactatgtgaggtctctgagagtggacagcgagcccgtcctagttcactgcagtgctgg

SEQ ID NO: 56063 - DNA, 120 bp, Artificial Sequence
  ENSG00000070159_22 (sequence is synthesized)
aataggtcgaaccggtgtgttggtcactatggaaacagccatgtgcctaactgagaggaacctgcccatttacccactggatattgtccgaaaaatgcgagaccagcgcgccatgatggt

SEQ ID NO: 56064 - DNA, 120 bp, Artificial Sequence
  ENSG00000070159_23 (sequence is synthesized)
gcagacatcaagccagtacaagtttgtgtgtgaagcgattcttcgtgtgtatgaagaaggtttagtccaaatgctggatcctagttaagacaactgtgaaaaagttcattcctctttccc

SEQ ID NO: 56065 - DNA, 120 bp, Artificial Sequence
  ENSG00000070159_24 (sequence is synthesized)
aagggcatcctccttgaaagaggaggacagacctctctggaagcagcaagaggaaccagtagctgtgggaaaggaatgggcacctctgaacccaggcactttaaacttctatagaaaaga

SEQ ID NO: 56066 - DNA, 120 bp, Artificial Sequence
  ENSG00000070159_25 (sequence is synthesized)
tatcgtgtacataggaactggtgtagataagcatgcaattatggcatcatttaggcctgtatttctatggaaagatacaaaaaggatctcagtttggggcctgtcctaatgccttcttcc

SEQ ID NO: 56067 - DNA, 120 bp, Artificial Sequence
  ENSG00000070159_26 (sequence is synthesized)
ctaacatcaccacacacacccctgtcggcatcctggagcaattgagaccggacacccacagagctgttgtcctcccagcaacaagatggtgtggttatcttgggtcatttggatgttttg

SEQ ID NO: 56068 - DNA, 120 bp, Artificial Sequence
  ENSG00000070159_27 (sequence is synthesized)
atgtactagatggcagggcactgggggtcaggctgaaggctgagcaacacctctctgccctccctccctttgtcccatctcccagcgacttccaatattcatgtttctgagaattgtgtc

SEQ ID NO: 56069 - DNA, 120 bp, Artificial Sequence
  ENSG00000070159_28 (sequence is synthesized)
cctcttcaggttccctcttggtgcctaacctggattagtaatgtgcattcaggtgaattttcagctgaggctctgagaactggtactctcagtgtgttctggtcatcttgtggcttagtt

SEQ ID NO: 56070 - DNA, 120 bp, Artificial Sequence
  ENSG00000070159_29 (sequence is synthesized)
gtagaagcaggtgtgtctcttgcctctgcttgcctcctactgcacactcagcacccaggactggaatcaccgactactgaatctcctacatgtattgctgctacttcaagctcctccact

SEQ ID NO: 56071 - DNA, 120 bp, Artificial Sequence
  ENSG00000070159_30 (sequence is synthesized)
tgaaaccttatgattttcccaaggggagatgggacagtgtcatctaaatattccgaatgtttggccttctgagaaaagagcttctagtaattgaaccatgggaaacccagcttctggagg

SEQ ID NO: 56072 - DNA, 120 bp, Artificial Sequence
  ENSG00000070159_31 (sequence is synthesized)
gttggccgtggggctgtgtacatgtgtgtgcccaggggtgagtgtttctcaggattcctaacgattcaaattaccgttgagtatatataaagaatgagtctctgtatggaagaacaaatg

SEQ ID NO: 56073 - DNA, 120 bp, Artificial Sequence
  ENSG00000070159_32 (sequence is synthesized)
tgtgcattcacccccagtcacaatggtctccattgcatttcaaaggagaggatcagactatctgaatataaacacaatctgatgttaatttattctaagaacaccatcattttgattgtc

SEQ ID NO: 56074 - DNA, 120 bp, Artificial Sequence
  ENSG00000070159_33 (sequence is synthesized)
ctaaagaattctgcctttgtgaataccgtgttaaatttttttaaatttgtgacaggattgtagcaaattattatttaaggaaaataaattgtgtaaacatttaatgtggtatttttgaac

SEQ ID NO: 56075 - DNA, 120 bp, Artificial Sequence
  ENSG00000070159_34 (sequence is synthesized)
agcggtttttatgtactcagaagaggaagtaaagccaggttcttaatggtatttatagaaaagatgttttcatattataatgcacataaatgaagccattttgatattcagcaaattcgg

SEQ ID NO: 56076 - DNA, 120 bp, Artificial Sequence
  ENSG00000070159_35 (sequence is synthesized)
tgccaattgaatagtttgctggtagcaagacggatgaagacctatatgggagattctttatctctagagctagcatatttacttgcatactttgtttcttttccacatggatattttact

SEQ ID NO: 56077 - DNA, 120 bp, Artificial Sequence
  ENSG00000070159_36 (sequence is synthesized)
gctaaatggcagaggtgggagggagatgtcacacagtaccataaccccatattgaaaacaagaaaccaccagaaagtttgcagctaaggggcaggggattcagttcctacgcccactcag

SEQ ID NO: 56078 - DNA, 120 bp, Artificial Sequence
  ENSG00000070159_37 (sequence is synthesized)
cactaactacttgcgggcctggttgcttagaagctctacctctctttcattatctgtaaaatagaaacaatacttaggactttagttggaacatgaggattgaataagatcacgctattc

SEQ ID NO: 56079 - DNA, 120 bp, Artificial Sequence
  ENSG00000070159_38 (sequence is synthesized)
atgtgactttttatcggctagaacagcaacagacactgctgtgggtgagttacttagaaaagtttagttatcagtgattagcccaaaaacacatcagtcaaaaatagaatccactggatt

SEQ ID NO: 56080 - DNA, 89 bp, Artificial Sequence
  ENSG00000070159_39 (sequence is synthesized)
ggctggagtacagtggcatgatcattgtaatcctcgcacctcagcctcctgagtagccgggactataggcacatgccacctcacctggc

SEQ ID NO: 56081 - DNA, 74 bp, Artificial Sequence
  ENSG00000070159_40 (sequence is synthesized)
caaattcctgggctcaagcaatcctcgcacctcagcctcctgagtagccgggactataggcacatgccacctca

SEQ ID NO: 56082 - DNA, 86 bp, Artificial Sequence
  ENSG00000070159_41 (sequence is synthesized)
atcttcccacctcagcctccaaaactgtaactgggtttttatgagaggaaaatagaaaatgctcttctagaagagagagaacaaga

SEQ ID NO: 56083 - DNA, 120 bp, Artificial Sequence
  ENSG00000070159_42 (sequence is synthesized)
ggaaaatagaaaatgctcttctagaagagagagaacaagagcacaaaataatctggactcacaaaaattcagcaagctccaagaaagggggatggagggaacgctggcaaaaatttaaat

SEQ ID NO: 56084 - DNA, 120 bp, Artificial Sequence
  ENSG00000070159_43 (sequence is synthesized)
gccattaggatatttagcaagttattactgtttggtaaaaatgcatcatcaccctgtgtgcaaaatgcttgcaaagtagtctaaatgtctttggagatgggtgttttactgcttttttcc

SEQ ID NO: 56085 - DNA, 120 bp, Artificial Sequence
  ENSG00000070159_44 (sequence is synthesized)
aaaaacaaattgtttattatggttgcagaaatgcagccattacggtcacataaatttctaaaaagcctaccaaaggttgcaagcagtcttctgccactgggcaggccagcagttcagacc

SEQ ID NO: 56086 - DNA, 120 bp, Artificial Sequence
  ENSG00000070159_45 (sequence is synthesized)
cagcgaggttgccaggaacaaatccaggaaatactgggaagaacaagacaagagaattacctaaaagagcaaacaattcaagtaaatcctgtagctattaccacttaaaatccgtagctc

SEQ ID NO: 56087 - DNA, 120 bp, Artificial Sequence
  ENSG00000070159_46 (sequence is synthesized)
aagattcctgtttcaccaccttatacacttaagcaattatacttaagcctttttttagtcctaagtgaagaactacatcagaatcaggataagtattttgcctgggaaatttggctgcat

SEQ ID NO: 56088 - DNA, 120 bp, Artificial Sequence
  ENSG00000070159_47 (sequence is synthesized)
atgaatggagaagacatttacatcctatgttctggcactttctgaaagatctaattaaacatgttgatgtgccaatttaatcaagatgagagatccctgctggtgtcaccctctagaacc

SEQ ID NO: 56089 - DNA, 120 bp, Artificial Sequence
  ENSG00000070159_48 (sequence is synthesized)
tgcacttggtgttttgactttccagaagaaaaaaatgcaactttggttagggggcagtggttggatcacacagttgtctttcgtttcctaccacagtaattcatatttaaatatgctttt

SEQ ID NO: 56090 - DNA, 120 bp, Artificial Sequence
  ENSG00000070159_49 (sequence is synthesized)
agattagtgtggatactattgctgctgtgttgctacctgacctttttctggggggggtacctcagaaatgagcatttgagggcaagcgaaaaagccctcttcatcctccagaggcaacaa

SEQ ID NO: 56091 - DNA, 120 bp, Artificial Sequence
  ENSG00000070159_50 (sequence is synthesized)
agaggcagcagaaatggggaaagattgtgagaggcagggcttgggtctagacctggacttaggcaagatatgttgccctcaaccctgagttttcttatatgtaaaaagggaaggttgggc

SEQ ID NO: 56092 - DNA, 120 bp, Artificial Sequence
  ENSG00000070159_51 (sequence is synthesized)
tggactagatgaggtcaagatttgccattctgggaggctgatattccagagaatcaaaattaatcctaaaccaaagctttatggctgctacagagacatgtcacatttctgagacttgtc

SEQ ID NO: 56093 - DNA, 120 bp, Artificial Sequence
  ENSG00000070159_52 (sequence is synthesized)
accaagagtttgtccctcagactttggcgctgttgaatgcaaagacaaggatggccaccttctggttcttgcctgttgtcctcagctgagagcagtctcggtaaaggtggcaaagattct

SEQ ID NO: 56094 - DNA, 120 bp, Artificial Sequence
  ENSG00000070159_53 (sequence is synthesized)
gtgacctcagaccggggaccaaatgcttgggagtctgatggccgggctgggccaccattctcatagctctcattctgtttggagcaaccaaaggatttgtgtgaagttatttggaaaagg

SEQ ID NO: 56095 - DNA, 120 bp, Artificial Sequence
  ENSG00000070159_54 (sequence is synthesized)
accttaactgagcagtaatcttttttctgtatatttggaatgtttttcattctgacctgttctgtcagtgattctactgaaaaacaatttaatcaatataaaaatgttcaagctatgcaa

SEQ ID NO: 56096 - DNA, 120 bp, Artificial Sequence
  ENSG00000070159_55 (sequence is synthesized)
ggaggggcaggtgctgaatcagcggccactgtcatcccaggtggtcacgcttctaggtgtgcactctgtttgcacctggcaagcgtgtcaaccggggaagaacacacagtgacacatctc

SEQ ID NO: 56097 - DNA, 120 bp, Artificial Sequence
  ENSG00000070159_56 (sequence is synthesized)
gaagggtggtatcccgttgtggagtagaatgtaactatgaccttctgggatttgggcaccagatttatcttactgcaacaggagccatggtgggagccacccccataactcttatagagc

SEQ ID NO: 56098 - DNA, 120 bp, Artificial Sequence
  ENSG00000070159_57 (sequence is synthesized)
tggtgggccaccaggactgccagatatatatatatattttttgaaacagggtcttgctatgttgcccagactggcctcaaactcctggactcaaaggatcctccctcagcctcctgagta

SEQ ID NO: 56099 - DNA, 120 bp, Artificial Sequence
  ENSG00000070159_58 (sequence is synthesized)
gctgggattataggcacataccaccacgactagctgccagatcatcttatcttggaccaggcttctaccattaattcacatgctttaaaaaaattaaaaattaaaaaaatgaaaaataaa

SEQ ID NO: 56100 - DNA, 120 bp, Artificial Sequence
  ENSG00000070159_59 (sequence is synthesized)
aaaacttaaaagattttacctatattcctggaacatagttatcttaccccagctttgtagttcctgtttaaggaaattccctctgaaggaaattttagctctcaagagtcaaagaagatg

SEQ ID NO: 56101 - DNA, 120 bp, Artificial Sequence
  ENSG00000070159_60 (sequence is synthesized)
tatagaggtggtatctgttagtttttgtttgtttgttaaggatctaggcagagaggtcattacatttttctgaagttgaggtcacaggtggggtacccacaagagaggtcattacatttc

SEQ ID NO: 56102 - DNA, 120 bp, Artificial Sequence
  ENSG00000070159_61 (sequence is synthesized)
tgaagttaggcatcccaggcatctcttctaaagaactatcctgtattctaattgttaaataaatatcttcttcattgtgagcctccacaactgctgtttctgataaatttagatcattct

SEQ ID NO: 56103 - DNA, 120 bp, Artificial Sequence
  ENSG00000070159_62 (sequence is synthesized)
ttgcagaattttatatactggcaatctcaaaactaggctccttcaagattcctaggaagtctcccaagctcgggttgggttccactattctagtttctttgtgtatgatgccatggggtt

SEQ ID NO: 56104 - DNA, 120 bp, Artificial Sequence
  ENSG00000070159_63 (sequence is synthesized)
gactcagaaactttgctcaatatatgacaaggcagcatttggtgagtggtgatctccacgtttatcttctcatttatatccctaggaagacatactgattagctgagcttgtcaatgaaa

SEQ ID NO: 56105 - DNA, 120 bp, Artificial Sequence
  ENSG00000070159_64 (sequence is synthesized)
gcccgggttcaccattggattatctataactctcctttctctttttttctctcagtagcattgtaggaggagagaacacttaattctggttgaatgtcagcttggataaacatagaaaca

SEQ ID NO: 56106 - DNA, 120 bp, Artificial Sequence
  ENSG00000070159_65 (sequence is synthesized)
aactagaaagaactgatgatgttctcctaggtggaaaagatggagattccaataccaaataggtgtgaatcagcaaatgtatgttatactgtctctcaaggccaggtgttcaatacattg

SEQ ID NO: 56107 - DNA, 120 bp, Artificial Sequence
  ENSG00000070159_66 (sequence is synthesized)
tgggtagttaattataatcaaagtaataatattagagttacgacatggatcctaagctttttagccattaaacatataagaaatttgtagcatagtgagtttttttataacatgatcatc

SEQ ID NO: 56108 - DNA, 120 bp, Artificial Sequence
  ENSG00000070159_67 (sequence is synthesized)
caggttaaaataagacacaattgacctcacatatcctatctgagctccgattttgtcatctgtaaaaatggagatagtggtacctaccttacagagttatgaggctgagataagagggaa

SEQ ID NO: 56109 - DNA, 120 bp, Artificial Sequence
  ENSG00000070159_68 (sequence is synthesized)
agttacaaagtagtaccatgtacaaagcccggaactgtgcaaataggaggttgtaatactgtttgaagcattcccatctcaaaaagccagttccttggcctttataaatttgaaggaata

SEQ ID NO: 56110 - DNA, 120 bp, Artificial Sequence
  ENSG00000070159_69 (sequence is synthesized)
atgaaactgatttgtttcaattgtgaaaattatttctctcctgcccctgtgcacttctgccctgtctatattagatttcaagaggtttcccttttgtcatcttggccagacaatggaatg

SEQ ID NO: 56111 - DNA, 120 bp, Artificial Sequence
  ENSG00000070159_70 (sequence is synthesized)
tctatcccgtttgaatctgggtttaaaaaagcatgggagctagtggccaagtgtcacatgtatgccgcatccctaaatagaagtctccccagggcgcttcctgacctgcgcaatgctgcc

SEQ ID NO: 56112 - DNA, 120 bp, Artificial Sequence
  ENSG00000070159_71 (sequence is synthesized)
gaaggcctcctttccccgctccccaggcagaggagcaaagtcacaggctgaggggcctgccacgacttgcccacaaaacaggtctggagtttggaagttacatttgctggttgcccagag

SEQ ID NO: 56113 - DNA, 120 bp, Artificial Sequence
  ENSG00000070159_72 (sequence is synthesized)
atgagtgcagaattcagcttggaggtcctggaaacttctagtttactgatgtttatgcttttgctcatgcacccacagttcctgggacacagaatgctcacctgggggtttgtaccccag

SEQ ID NO: 56114 - DNA, 120 bp, Artificial Sequence
  ENSG00000070159_73 (sequence is synthesized)
ccaagaaggtgtcttcacagactcccctccttttagcaacttcatgcagatggagcttgggtggatggatcctggcacagtgttcagaacagtggccctgccagtgtgtgggcgccgctt

SEQ ID NO: 56115 - DNA, 120 bp, Artificial Sequence
  ENSG00000070159_74 (sequence is synthesized)
gtgcagagcccctgtgggttctggtcctcaagggcaggggcgctcactgacagcggaacccatagtaccagcccatctttggtgggctgtttccaccccattcatccctgctcagctctt

SEQ ID NO: 56116 - DNA, 120 bp, Artificial Sequence
  ENSG00000070159_75 (sequence is synthesized)
cataggacagcctgtgctggcagaaaattgcccccaccagtcaagacgtagggcatcaacatgagccatcagtaatgacagggcagctttgcagagcgtaaggtagcacctgataccttg

SEQ ID NO: 56117 - DNA, 120 bp, Artificial Sequence
  ENSG00000070159_76 (sequence is synthesized)
gaccaaaaccgtatttttatgtatctttcacatgtacagctcttgtctttgactcatcaaactttcttttttttttttttttgcttatttcagtttgagtatgaattaatgaaaacaatt

SEQ ID NO: 56118 - DNA, 120 bp, Artificial Sequence
  ENSG00000070159_77 (sequence is synthesized)
gggaaatcaactcttttggaggagagtgctctctgctcatctccaccttccctctggtcaggagcatgaactcccatcttggccttgtcctggggtattagtccattctcatgctgctaa

SEQ ID NO: 56119 - DNA, 120 bp, Artificial Sequence
  ENSG00000070159_78 (sequence is synthesized)
gaaagggcccctgcaagaatacttgttaggtttgccagcagtagaatctgcatctgggactgtgcctggaaaggggcactatggaaggtcccaaaattactagcaacgatttcaattcag

SEQ ID NO: 56120 - DNA, 120 bp, Artificial Sequence
  ENSG00000070159_79 (sequence is synthesized)
tcccaaaattactagcaacgatttcaattcagcaaacctttctgggaaggacacttaggttgagtagaacatagcataagaagtgccaatatagccgggtgcagtgactcacgcctgtaa

SEQ ID NO: 56121 - DNA, 120 bp, Artificial Sequence
  ENSG00000070182_0 (sequence is synthesized)
cagggatccttccatgaagactgaggcaggcggagctgctaagagcctgctgacatgacatcggccacagagtttgaaaatgtgggcaaccagccaccttacagcaggatcaatgcccgc

SEQ ID NO: 56122 - DNA, 120 bp, Artificial Sequence
  ENSG00000070182_1 (sequence is synthesized)
tgggacgccccagacgacgagctggataatgacaacagctcagccaggctctttgagaggtcccggataaaggccttggcagatgagcgggaagttgttcagaaaaagaccttcacgaaa

SEQ ID NO: 56123 - DNA, 120 bp, Artificial Sequence
  ENSG00000070182_2 (sequence is synthesized)
tgggtgaactcgcacctggctcgagtgtcctgccgcatcaccgatctctacaaggacctgcgggatgggcgcatgctcatcaagctgctggaggtgctctctggagagatgctgccaaag

SEQ ID NO: 56124 - DNA, 120 bp, Artificial Sequence
  ENSG00000070182_3 (sequence is synthesized)
cccaccaaggggaagatgcgcatccactgcctggagaatgtggacaaggctctccagttcctcaaggagcagcgtgtacacctggagaacatgggctcccacgacattgtagatggcaac

SEQ ID NO: 56125 - DNA, 120 bp, Artificial Sequence
  ENSG00000070182_4 (sequence is synthesized)
caccgcctggtcctgggcctcatctggaccatcatcctccgcttccagattcaggacattgtggtccaaactcaggaaggtcgtgaaacacgctcagccaaggatgcgttgctgttgtgg

SEQ ID NO: 56126 - DNA, 120 bp, Artificial Sequence
  ENSG00000070182_5 (sequence is synthesized)
tgtcagatgaagacggcaggctaccctcatgttaatgtcaccaactttacctccagctggaaggatggcttggcctttaatgccctgatacacaagcaccggcccgacctgatcgacttt

SEQ ID NO: 56127 - DNA, 120 bp, Artificial Sequence
  ENSG00000070182_6 (sequence is synthesized)
gataagctgaaggactccaatgcccggcacaacctggagcacgcattcaatgtggctgagcgccagctgggcatcatcccgctcctcgaccccgaagatgtctttacggaaaaccctgat

SEQ ID NO: 56128 - DNA, 120 bp, Artificial Sequence
  ENSG00000070182_7 (sequence is synthesized)
gagaaatccatcatcacctatgtggtggccttttaccactacttctccaagatgaaggtgctggcagtggagggcaagcgtgtcggcaaggttattgaccatgccattgagactgagaag

SEQ ID NO: 56129 - DNA, 120 bp, Artificial Sequence
  ENSG00000070182_8 (sequence is synthesized)
atgattgaaaagtacagcgggctagcctcggacctgctcacctggatcgagcagaccatcactgtcctgaacagccgcaagtttgccaactcgctgacgggcgtccagcagcagctgcag

SEQ ID NO: 56130 - DNA, 120 bp, Artificial Sequence
  ENSG00000070182_9 (sequence is synthesized)
gccttcagcacctaccgcaccgtggagaagccgcccaagtttcaagagaaggggaatctggaagttctactttttaccatccagtcccggatgagagccaacaatcagaaagtgtacaca

SEQ ID NO: 56131 - DNA, 120 bp, Artificial Sequence
  ENSG00000070182_10 (sequence is synthesized)
ccccacgatgggaaactagtgtctgacatcaacagggcctgggaaagcctggaggaagctgagtatcggcgggagctggccctgagaaatgagctcattcggcaggagaagctagagcaa

SEQ ID NO: 56132 - DNA, 120 bp, Artificial Sequence
  ENSG00000070182_11 (sequence is synthesized)
ctggcccggcgctttgaccggaaggccgcaatgagagagacctggctcagtgaaaaccagcgcctcgtggcccaggataactttgggtatgacctggcagctgtggaggccgccaagaag

SEQ ID NO: 56133 - DNA, 120 bp, Artificial Sequence
  ENSG00000070182_12 (sequence is synthesized)
aagcatgaggccatcgagaccgacacggctgcctacgaggagcgggtgagagccctggaggacctggctcaggagctggagaaagagaactaccatgaccagaagcgcatcacggcccgc

SEQ ID NO: 56134 - DNA, 120 bp, Artificial Sequence
  ENSG00000070182_13 (sequence is synthesized)
aaggacaatatactgcgcctatggagctacctgcaggagctgctgcagtcccggcgccagaggctcgagaccaccctggcactgcagaagctcttccaggacatgctgcacagcatcgac

SEQ ID NO: 56135 - DNA, 120 bp, Artificial Sequence
  ENSG00000070182_14 (sequence is synthesized)
tggatggatgagatcaaggctcacctcttgtctgccgagtttgggaagcacttgttggaggttgaagacctgctacagaagcacaagttgatggaagctgacatcgccatccaaggggac

SEQ ID NO: 56136 - DNA, 120 bp, Artificial Sequence
  ENSG00000070182_15 (sequence is synthesized)
aaagtgaaggccatcaccgcagccaccctgaagttcaccgaggggaaagggtaccagccttgtgacccccaggtcatccaggaccgcatcagccacttggagcagtgctttgaggagctg

SEQ ID NO: 56137 - DNA, 120 bp, Artificial Sequence
  ENSG00000070182_16 (sequence is synthesized)
agcaacatggcagctgggcggaaggcccaactggagcagtccaaacgactctggaagttcttctgggagatggatgaggctgagagctggatcaaggagaaggagcagatctattcttcc

SEQ ID NO: 56138 - DNA, 120 bp, Artificial Sequence
  ENSG00000070182_17 (sequence is synthesized)
ctggactatggcaaagacctgaccagtgtgctcatcttacagcgcaagcacaaggcctttgaggatgagctccgtgggctggatgctcacctggagcagatcttccaggaggctcatggc

SEQ ID NO: 56139 - DNA, 120 bp, Artificial Sequence
  ENSG00000070182_18 (sequence is synthesized)
atggttgcgcgcaagcagtttgggcacccgcagatcgaggcccgcataaaggaggtgtcggcacagtgggaccagctgaaggacctggctgccttctgcaagaagaacctccaggatgct

SEQ ID NO: 56140 - DNA, 120 bp, Artificial Sequence
  ENSG00000070182_19 (sequence is synthesized)
gagaactttttccagttccagggcgatgcggatgacctgaaggcttggctgcaagacgcccaccggctgctctctggtgaagatgtggggcaggacgaaggggccacgcgggccctgggg

SEQ ID NO: 56141 - DNA, 120 bp, Artificial Sequence
  ENSG00000070182_20 (sequence is synthesized)
aaaaagcacaaggacttcctggaggagctggaggagagccgtggggtgatggagcacctggagcagcaggcccagggattccccgaagagtttcgggattccccagatgtgacccatcgg

SEQ ID NO: 56142 - DNA, 120 bp, Artificial Sequence
  ENSG00000070182_21 (sequence is synthesized)
ctgcaggccctgcgggagctctaccaacaggtggtggcccaggcggacctgcgtcagcagaggctgcaggaagccctggacctgtacacggtgttcggggagacagacgcctgtgagctg

SEQ ID NO: 56143 - DNA, 120 bp, Artificial Sequence
  ENSG00000070182_22 (sequence is synthesized)
tggatgggagagaaggagaagtggctggccgagatggaaatgccagacaccctggaggacctggaggtcgtgcagcacaggttcgacatcctggaccaggagatgaagaccttgatgact

SEQ ID NO: 56144 - DNA, 120 bp, Artificial Sequence
  ENSG00000070182_23 (sequence is synthesized)
cagattgatggtgtgaacctcgctgccaacagcttggtagagagtggccacccacgcagcagggaggtgaagcagtaccaggaccatctgaacaccaggtggcaggcatttcagaccctg

SEQ ID NO: 56145 - DNA, 120 bp, Artificial Sequence
  ENSG00000070182_24 (sequence is synthesized)
gtgtcggagcggcgggaggctgtggactcagccctccgagtgcacaactactgcgtagattgcgaggagaccagcaagtggatcacggacaagacaaaggtagtggagtccacaaaagac

SEQ ID NO: 56146 - DNA, 120 bp, Artificial Sequence
  ENSG00000070182_25 (sequence is synthesized)
ctggggcgggacctggcaggtatcatcgccatccagaggaagttgtcagggctggagcgtgacgtggccgccatccaggcccgtgtggatgccctggagcgtgagtcccagcagctgatg

SEQ ID NO: 56147 - DNA, 120 bp, Artificial Sequence
  ENSG00000070182_26 (sequence is synthesized)
gactcgcaccctgagcagaaggaggatattggtcagcggcaaaaacacttggaggagctgtggcagggcctgcagcaatccctgcagggccaggaggacttgctgggggaagtcagccag

SEQ ID NO: 56148 - DNA, 120 bp, Artificial Sequence
  ENSG00000070182_27 (sequence is synthesized)
ctgcaggccttcctgcaggatctggatgacttccaggcctggctctccatcacccagaaggctgtggcctctgaggacatgcccgaatccctcccagaggctgagcagctcctgcagcag

SEQ ID NO: 56149 - DNA, 120 bp, Artificial Sequence
  ENSG00000070182_28 (sequence is synthesized)
catgcaggtatcaaggatgagattgacgggcaccaagacagctaccagcgtgttaaggagtctggggagaaagtgatccaaggccagacggacccagagtatctgcttctgggccagcgg

SEQ ID NO: 56150 - DNA, 120 bp, Artificial Sequence
  ENSG00000070182_29 (sequence is synthesized)
ctggagggcctggatactggctggaatgccctgggcaggatgtgggagagccgcagccacaccctcgctcagtgccttggcttccaggagttccagaaagatgccaagcaggctgaagcc

SEQ ID NO: 56151 - DNA, 120 bp, Artificial Sequence
  ENSG00000070182_30 (sequence is synthesized)
atcctcagcaaccaggaatacactctggctcacttggagcccccagactccctggaagctgcagaggctgggatccggaagtttgaggatttcttggggtctatggagaacaaccgggat

SEQ ID NO: 56152 - DNA, 120 bp, Artificial Sequence
  ENSG00000070182_31 (sequence is synthesized)
aaggtcttgagtcctgtggactctggaaacaagctggtagctgagggaaacctatactcagacaagatcaaggagaaggtgcagctgattgaggacaggcacaggaagaacaacgagaag

SEQ ID NO: 56153 - DNA, 120 bp, Artificial Sequence
  ENSG00000070182_32 (sequence is synthesized)
gcccaggaggcctctgtcctactgagagacaacctggagctacagaacttcctccagaactgccaggagctcactctctggatcaacgacaagctgctgacatctcaggatgtctcctat

SEQ ID NO: 56154 - DNA, 120 bp, Artificial Sequence
  ENSG00000070182_33 (sequence is synthesized)
gatgaagcacgaaaccttcacaataaatggctaaagcaccaggcgtttgtggcagagctggcttcccatgaagggtggctagagaacatcgatgcggaaggaaagcagctgatggatgag

SEQ ID NO: 56155 - DNA, 120 bp, Artificial Sequence
  ENSG00000070182_34 (sequence is synthesized)
aagccccagtttacagccctggtgtcccaaaagctggaagccctgcaccggctctgggacgagctgcaggccaccacaaaggagaagacccagcacctctcggctgccaggagctccgac

SEQ ID NO: 56156 - DNA, 120 bp, Artificial Sequence
  ENSG00000070182_35 (sequence is synthesized)
ctgcgcttgcagacccatgctgacctcaacaagtggatcagcgccatggaggaccagctgcggtcagacgacccgggcaaggacctgaccagtgtcaatcggatgttggctaagctgaag

SEQ ID NO: 56157 - DNA, 120 bp, Artificial Sequence
  ENSG00000070182_36 (sequence is synthesized)
cgagtggaggaccaagtgaatgtgcgaaaagaggagctgggggagctgtttgcccaggtgccttcaatgggagaggagggaggagatgcagacttgagcatcgagaagcggttcctggac

SEQ ID NO: 56158 - DNA, 120 bp, Artificial Sequence
  ENSG00000070182_37 (sequence is synthesized)
ctcctggaacccctaggaaggaggaagaagcagctggaatcatccagagccaagctgcagatcagccgggacttagaggatgagacgctttgggtggaggagaggctgcctctggcccag

SEQ ID NO: 56159 - DNA, 120 bp, Artificial Sequence
  ENSG00000070182_38 (sequence is synthesized)
tcagccgactatggcactaatctgcaaactgtgcaactgttcatgaagaagaaccagacactgcagaatgagattctgggccatacgccgcgggttgaggatgtgctgcagagagggcag

SEQ ID NO: 56160 - DNA, 120 bp, Artificial Sequence
  ENSG00000070182_39 (sequence is synthesized)
cagctggtggaggcggcggagatcgactgccaggaccttgaggagcgcctggggcacctgcagagctcctgggacaggctgcgggaggcagcggccgggaggctgcagcgactgagggac

SEQ ID NO: 56161 - DNA, 120 bp, Artificial Sequence
  ENSG00000070182_40 (sequence is synthesized)
gccaacgaggcacagcagtactacctggatgcagacgaggctgaggcctggattggcgagcaggagctctacgtcatctccgatgagatccccaaggatgaagagggcgccattgtgatg

SEQ ID NO: 56162 - DNA, 120 bp, Artificial Sequence
  ENSG00000070182_41 (sequence is synthesized)
agggggaacagatcatcagacttcaggggcaagtggacaagcactacgcagggctgaaggacgtggcggaagagcgcaagcgcaagctggagaacatgtaccacctgttccagctcaagc

SEQ ID NO: 56163 - DNA, 120 bp, Artificial Sequence
  ENSG00000070182_42 (sequence is synthesized)
gggagaccgacgacctggagcagtggatttcagaaaaggagctagtggcctcttccccggaaatggggcaagactttgaccacgtgactcttctgcgggacaagttccgggactttgccc

SEQ ID NO: 56164 - DNA, 120 bp, Artificial Sequence
  ENSG00000070182_43 (sequence is synthesized)
gggagaccggggcgattgggcaggagcgggtggacaatgtgaatgccttcatcgagcgactcatcgacgcgggccacagcgaggcggccaccatcgccgagtggaaggacgggctgaacg

SEQ ID NO: 56165 - DNA, 120 bp, Artificial Sequence
  ENSG00000070182_44 (sequence is synthesized)
agatgtgggcagacctcctggagctcattgacacgcgcatgcagctgctggccgcctcctatgacctgcaccgctacttctacacgggtgccgagatcctgggcctcatcgacgagaagc

SEQ ID NO: 56166 - DNA, 120 bp, Artificial Sequence
  ENSG00000070182_45 (sequence is synthesized)
accgcgagctgcccgaggacgtggggctggacgccagcacggccgagtccttccaccgggtgcacacagccttcgagcgggagctccacctgctgggtgtccaggtgcagcagttccagg

SEQ ID NO: 56167 - DNA, 120 bp, Artificial Sequence
  ENSG00000070182_46 (sequence is synthesized)
acgtggccacccgtctgcagacagcatatgctggggagaaggcagaggccatccagaacaaggagcaggaggtgtctgccgcgtggcaggcgctgctcgatgcctgtgccgggcgccgga

SEQ ID NO: 56168 - DNA, 120 bp, Artificial Sequence
  ENSG00000070182_47 (sequence is synthesized)
cccagctagtggacacggcggataaattccgcttcttcagcatggcccgtgacctcctctcctggatggagagcatcatccggcagatcgagacccaggagaggcccagggatgtctcct

SEQ ID NO: 56169 - DNA, 120 bp, Artificial Sequence
  ENSG00000070182_48 (sequence is synthesized)
ctgtggaactgctcatgaagtatcaccagggcatcaatgcagagattgaaacccggagcaagaacttcagtgcctgcctggagcttggcgagtccctgctgcagcggcagcaccaggcct

SEQ ID NO: 56170 - DNA, 120 bp, Artificial Sequence
  ENSG00000070182_49 (sequence is synthesized)
cagaggagatccgcgagaaactgcagcaggtgatgtccaggaggaaagagatgaatgagaagtgggaagcccgctgggagcggctccgcatgttgctggaggtgtgccagttctcgaggg

SEQ ID NO: 56171 - DNA, 120 bp, Artificial Sequence
  ENSG00000070182_50 (sequence is synthesized)
atgcctctgtggctgaggcgtggctgattgcccaggagccctacctggccagcggggactttggacacacagtggacagtgtggagaagctcatcaagaggcatgaggcttttgagaagt

SEQ ID NO: 56172 - DNA, 120 bp, Artificial Sequence
  ENSG00000070182_51 (sequence is synthesized)
ccacggccagctgggcagagcgctttgctgccctggagaagcccaccacgcttgagctgaaagaacgccagattgcagagagacccgcagaggagactgggcctcaagaggaggaaggcg

SEQ ID NO: 56173 - DNA, 120 bp, Artificial Sequence
  ENSG00000070182_52 (sequence is synthesized)
agacagcaggggaggctccagtttcccaccatgcggccaccgagagaacgtccccgggggaagaagagggaacgtggcctcagaacctgcagcagccaccaccgccgggtcagcacaagg

SEQ ID NO: 56174 - DNA, 120 bp, Artificial Sequence
  ENSG00000070182_53 (sequence is synthesized)
atgggcagaaatccactggggatgagaggcccaccacggagcccctctttaaggtcctagatacgcctctgagcgagggtgatgagcccgcaacgctgccggccccgcgggaccatgggc

SEQ ID NO: 56175 - DNA, 120 bp, Artificial Sequence
  ENSG00000070182_54 (sequence is synthesized)
agagtgtgcagatggaaggctacctgggccgcaagcatgacctggaggggcccaacaagaaggcttccaacaggtcctggaacaacctgtactgtgtgctcaggaacagtgagctaacct

SEQ ID NO: 56176 - DNA, 120 bp, Artificial Sequence
  ENSG00000070182_55 (sequence is synthesized)
tctacaaggatgccaagaacctggccctggggatgccctaccatggggaggaacccctggccctgagacatgccatctgtgagattgctgccaactacaagaagaagaagcacgtcttta

SEQ ID NO: 56177 - DNA, 120 bp, Artificial Sequence
  ENSG00000070182_56 (sequence is synthesized)
agctgaggctgagtaatggcagcgagtggctcttccatggcaaggatgaggaggagatgctgtcctggctgcagggcgtgagcaccgccatcaacgagtcccagagcatccgcgtcaagg

SEQ ID NO: 56178 - DNA, 120 bp, Artificial Sequence
  ENSG00000070182_57 (sequence is synthesized)
cgcagagcctgcccctgccttccctctccggccccgacgccagcctcggcaagaaagacaaggagaagagattcagcttcttccccaaaaagaagtagcaggtggggctggcgggcgcgg

SEQ ID NO: 56179 - DNA, 120 bp, Artificial Sequence
  ENSG00000070182_58 (sequence is synthesized)
cggagtcgggacgcgcagagaccgggcagcccaggccttggcctcctctcgccgccgcccgccggtcgaatcgagatgagtcgagtcgcgggccgggcccccgggccccacgctgcactg

SEQ ID NO: 56180 - DNA, 120 bp, Artificial Sequence
  ENSG00000070182_59 (sequence is synthesized)
caaaagctgccttcgcccgcgtgtcctgggccgacgccccctccatgccctcgcccgcgctggctccgctccagggacaggggctcccagctcctctggcgcctttggggcctccaggcc

SEQ ID NO: 56181 - DNA, 120 bp, Artificial Sequence
  ENSG00000070182_60 (sequence is synthesized)
tgggggcaggaaacggttctctgaggcacacgccctcctctcccaccctcctcctgagccgagggggcacaggccccttacccccaaccaaaaaaaaaaaaaaaaaagagctggagaagg

SEQ ID NO: 56182 - DNA, 120 bp, Artificial Sequence
  ENSG00000070182_61 (sequence is synthesized)
ctgatggggttcttcaaacgctgcccgttcctaaagcaagtcttgcttcgggtcacctcccacctggtggcagccagggaaaggggaaaggaagaagacactggaaatgcatggccagcc

SEQ ID NO: 56183 - DNA, 120 bp, Artificial Sequence
  ENSG00000070182_62 (sequence is synthesized)
ccctaggggcatgaggaaggagccttcaggtggcccacaaagccctagctctgggccaggggctctggggggctgaggggaccagactgggtgcagggccttgggagctgccagcctcct

SEQ ID NO: 56184 - DNA, 120 bp, Artificial Sequence
  ENSG00000070182_63 (sequence is synthesized)
tcccactgggcttccgcagaactgggactctcacttcaggggccaccacatccctcctctctgcttctccccccagatcaaagggtaccctcccacggttggcagggcctggctgagtgc

SEQ ID NO: 56185 - DNA, 120 bp, Artificial Sequence
  ENSG00000070182_64 (sequence is synthesized)
ctctagcaccctttgtgccaccacaggcggtcccaggaagggcagcaaggtcagaccattcctcattgaaaaccgtggctagggcacagggctctgatctgaaggagtgacaggtgcgtc

SEQ ID NO: 56186 - DNA, 120 bp, Artificial Sequence
  ENSG00000070182_65 (sequence is synthesized)
acaacactgcctaaggctctccctctcaatgctgggaccctcgccccactcccagtggcagccaaaccagcaatatccaacagacataggccccctacgggacagtgtgggcccccagat

SEQ ID NO: 56187 - DNA, 120 bp, Artificial Sequence
  ENSG00000070182_66 (sequence is synthesized)
ataagatggataccccccgcacctgcagtaaagcatcccaaagccaaatgctcaattgcatcctgtctgcagctgggactttggagggtaatggctgggcagacagtaaagttgatcatc

SEQ ID NO: 56188 - DNA, 120 bp, Artificial Sequence
  ENSG00000070182_67 (sequence is synthesized)
tgttttctcggggtggcagacgcagccatgtcttggtatcaccacccatgtgacagctactcctgcacaactgggacaaatgtcagggccagagccatgaaggtgtggtaccccttgatc

SEQ ID NO: 56189 - DNA, 120 bp, Artificial Sequence
  ENSG00000070182_68 (sequence is synthesized)
agcttctccacgtcctggccccaggtcttggcggggagggggtcacatgagtacagaggtcaaatatctaccaccctccagccctgagcaccagaagctctgcaaccaacgtccccagga

SEQ ID NO: 56190 - DNA, 120 bp, Artificial Sequence
  ENSG00000070182_69 (sequence is synthesized)
atggccttccccttgctgctcaggtcatacttctggaggaagagaaagctcattccatattttccccaccactctactccgaaagcaacacagttctggcccagtatcaaactagggtta

SEQ ID NO: 56191 - DNA, 120 bp, Artificial Sequence
  ENSG00000070182_70 (sequence is synthesized)
ggtccaagagagcagtcaagcgggtcgggggtgggggggagggcggagggcagcaggcattttcccccaaggaaaccatgaaagtccccagggcctgcagtcaagtttctatcaccttcc

SEQ ID NO: 56192 - DNA, 120 bp, Artificial Sequence
  ENSG00000070182_71 (sequence is synthesized)
ccgtgagaaggaccttagttccatggagatgaagtgggtgaggttcaggtagaagccacaggggcaggcatccagaatgaggccccctgaggaaccctgagtgctgaccagtgccggcag

SEQ ID NO: 56193 - DNA, 120 bp, Artificial Sequence
  ENSG00000070182_72 (sequence is synthesized)
aaatcagttccaccctgtggccctgacactatatgtcagggtgacaccaactgcagcaggcaggagccacaggaaggaagacgtcatccgatggagcctgacatccccaggttcccgccc

SEQ ID NO: 56194 - DNA, 120 bp, Artificial Sequence
  ENSG00000070182_73 (sequence is synthesized)
tggtgagcaaggtcttcatttggctttggtacatatgaccctatacagggaacctagtgtgtatcactcaccagcctctttctgtatctggggaaaccaaggcagtgaggtgactgcact

SEQ ID NO: 56195 - DNA, 120 bp, Artificial Sequence
  ENSG00000070182_74 (sequence is synthesized)
cacctagcaataaagtaggcctttggtgcacttgcaggcatgtcctcctctggggcagagagcaggttccttgctgaagggcagatggtggcaaacatctccctcaactgtttccctggg

SEQ ID NO: 56196 - DNA, 120 bp, Artificial Sequence
  ENSG00000070182_75 (sequence is synthesized)
ccagtctttagggagcctagggacaagggcccaccctcccccttccacgtgtgccaaatcagcacctgaagtgaggcatttccagcaagcaactccacagacccgagaaaggaagggctc

SEQ ID NO: 56197 - DNA, 120 bp, Artificial Sequence
  ENSG00000070182_76 (sequence is synthesized)
tagtggaagagctagcatctcaccaccccaggtcccctggcctggtccagggcagccagctgcatgtgaccattctgttgccagctccccacacatccctcctgtcacccaggctccaag

SEQ ID NO: 56198 - DNA, 120 bp, Artificial Sequence
  ENSG00000070182_77 (sequence is synthesized)
acattcgaccaactagactgaaaatgcaggcatccagctttgggagaccctgtgtgtgccacaccagggctaagctctcccagtgccctagcaaggtctttttttttttttctctcctta

SEQ ID NO: 56199 - DNA, 120 bp, Artificial Sequence
  ENSG00000070182_78 (sequence is synthesized)
ttctactctacagtcttttgacagtattcccaaacgaggttgacacagctccagtccacaccagcataccaggcttccttcccagggcagtttagaggaagctccttctgggcaaggtca

SEQ ID NO: 56200 - DNA, 120 bp, Artificial Sequence
  ENSG00000070182_79 (sequence is synthesized)
ggcggtcctccttccctctctccttcccctttgtcccagcctcaactgactctggctgtgggaggtgtggagggtccttaggcttccctccccaacctggcctccaccaacacccctaac

SEQ ID NO: 56201 - DNA, 120 bp, Artificial Sequence
  ENSG00000070182_80 (sequence is synthesized)
aggaggcccgtggaaggctcagcctctcctccgcatccctcctccttcctgcctatcggagggagccagggtcccctaggctgaccctgaatcctcttcctcccttcatgggaggggggc

SEQ ID NO: 56202 - DNA, 120 bp, Artificial Sequence
  ENSG00000070182_81 (sequence is synthesized)
aggaatccagaggaggatgaagccagcgggaccacatggcttggtggcttggacaaacaagctcagggaggaaatgaggaggcggcggctgcagaggaatgcaaccctgttgggcacaga

SEQ ID NO: 56203 - DNA, 120 bp, Artificial Sequence
  ENSG00000070182_82 (sequence is synthesized)
ccatgcaatctggggctggccctggggccagctgggtcctgtcctccacctgctcaaccgtgcttccaccaaccagaggaaacccatttactagtttttctaataaatcaataatgctcc

SEQ ID NO: 56204 - DNA, 120 bp, Artificial Sequence
  ENSG00000070182_83 (sequence is synthesized)
tcccaccatgcggccaccgagagaacgtccccggtcagtctctggtctcgtttgtctagttcctgggagtcactgcagccagagccctctcacccctactaggctcagcccaggtggagg

SEQ ID NO: 56205 - DNA, 120 bp, Artificial Sequence
  ENSG00000070182_84 (sequence is synthesized)
cgagatgagctggcgcagccccgccctccatcctccccacatccctgcagccacctcccagcagagcaggctacgtcctcactgaggtgttcttcatgagagtactagcctcctccactc

SEQ ID NO: 56206 - DNA, 120 bp, Artificial Sequence
  ENSG00000070182_85 (sequence is synthesized)
ctccccacagcgcagaggaaacaggccagcccagtgacatgacgttattagttttgttttacctaatgtaataaattttattgtataaatatatcaccatttacatgaggggaaacacta

SEQ ID NO: 56207 - DNA, 120 bp, Artificial Sequence
  ENSG00000070182_86 (sequence is synthesized)
gagaggagggagacagaagaggaggatgaagaggaggaggaaacagagtctgttgctgtagaaatgcagcaacatgcttcccacgtgtcctggaacaacctgtactgtgtgctcaggaac

SEQ ID NO: 56208 - DNA, 120 bp, Artificial Sequence
  ENSG00000070182_87 (sequence is synthesized)
ctgcacggtcccaccgccttccctcacctcttgcctttttacattagagcacgttctggtaaaggccaatccgttcatacagggggaagaagagggaacgtggcctcagaacctgcagca

SEQ ID NO: 56209 - DNA, 120 bp, Artificial Sequence
  ENSG00000070182_88 (sequence is synthesized)
tctctacaggagcagtcaggaacgccaaagaaatctttgcatacattggaaaacccccattttccaaagccaacctgtgacctggccacataatttttgatcgcactggcatagcctctg

SEQ ID NO: 56210 - DNA, 120 bp, Artificial Sequence
  ENSG00000070182_89 (sequence is synthesized)
aatgtccctgccaaggaatgtgggccaggcacccattaagaggaaacagaagaaaggtgggattaagttgggagtcagtcctggcaaaatccatctctattttcagaggacagttttcta

SEQ ID NO: 56211 - DNA, 120 bp, Artificial Sequence
  ENSG00000070182_90 (sequence is synthesized)
aaggaaggaaaatggaatggaagtataggaagaaaatgtagacatggaggtctctagtaaaaccaatcccaggagagcagaggctgggtaagaggggcaaacatggctgagagggtctgg

SEQ ID NO: 56212 - DNA, 120 bp, Artificial Sequence
  ENSG00000070182_91 (sequence is synthesized)
caagcttccctccctatatctgccatggctgcttctctgagacccaagggcagggagagcactgatggtagcaggagcagcagtgcagcccatgtcccctcctctggaacctactcccgc

SEQ ID NO: 56213 - DNA, 120 bp, Artificial Sequence
  ENSG00000070182_92 (sequence is synthesized)
ccctcttggaggaaaagcagggcctccccagatgtatacccaagtcagagcgcaggatccacagaaagaccccaagcccaggcttccagtcccatccctgcctctcctgctcttcctccc

SEQ ID NO: 56214 - DNA, 120 bp, Artificial Sequence
  ENSG00000070182_93 (sequence is synthesized)
tgctacggtgatccaggcagggctttggggcctccagatccttgtggccaatgctggctcattgcagacactctagggtccaaaggctgccagatgcatagagaggagtggcctggccac

SEQ ID NO: 56215 - DNA, 120 bp, Artificial Sequence
  ENSG00000070182_94 (sequence is synthesized)
aaccctcaggggcgctaaggtgggaaaagatgaacaccataaagatgggataaaagctcaggtctgtccattttgggagtgcatattccgaactgcctcctatacctattagctttgttg

SEQ ID NO: 56216 - DNA, 120 bp, Artificial Sequence
  ENSG00000070182_95 (sequence is synthesized)
tcaccaggaaatgcagagtcctcaattcttagtctgtcttgggagaattcggccaagagaccaagtagtaatgtaagcaaaaggtttactgaaggaaaataaagagcagggattgtattt

SEQ ID NO: 56217 - DNA, 120 bp, Artificial Sequence
  ENSG00000070182_96 (sequence is synthesized)
gattacaggcgtgagctaccatgcccggcctgggagtttattgaagtagactccaagagaggagccagcaggtccgcctgggaagcagcagtattcacagcaagagtgaggtagcagcag

SEQ ID NO: 56218 - DNA, 120 bp, Artificial Sequence
  ENSG00000070182_97 (sequence is synthesized)
acagcaagagtgaggtagcagcagagacaatacactctgaaagatgaggcagagcaggctgctcgaaagatgagccagcaactagagagttctgccttgcggtttttattaggtcacact

SEQ ID NO: 56219 - DNA, 120 bp, Artificial Sequence
  ENSG00000070182_98 (sequence is synthesized)
ctatttaggttcctgcctctgtctcaagtctccacctttgtctaatttcctgcctctatcttatgtctccatcttttcgccccacctagttcccgccccaggtttgtgggactctccctt

SEQ ID NO: 56220 - DNA, 120 bp, Artificial Sequence
  ENSG00000070182_99 (sequence is synthesized)
actgtcagctgatgaacctgcaggggcgggtgtcggatatgaatcctatcgaatggtgatgttgctaattactgccactccaggaagggtgtatattggtatttattgcacgtgcatatc

SEQ ID NO: 56221 - DNA, 120 bp, Artificial Sequence
  ENSG00000070182_100 (sequence is synthesized)
tcgtaggaatttctcctttgctttctttccctccttagcatgcagctggctacattcccacaggttaactgcagagtgatgactgggcatcttaaggggtgtcttggggtgttccttcct

SEQ ID NO: 56222 - DNA, 120 bp, Artificial Sequence
  ENSG00000070182_101 (sequence is synthesized)
gcatagatatttcccctcctctctgctcatatctagggtgaatgttttggatggtctctggggtgtgagactttccagacctccctttctcagaggctttcccacctgctcatatttatc

SEQ ID NO: 56223 - DNA, 120 bp, Artificial Sequence
  ENSG00000070182_102 (sequence is synthesized)
tgcctactccgacagtataaccttgggcaagtcacttgacctctctgagcactggttttctcattatagatcgaaagcattagactaagtcagtggtttccaaactttcccagccacata

SEQ ID NO: 56224 - DNA, 120 bp, Artificial Sequence
  ENSG00000070182_103 (sequence is synthesized)
accctttctttaaatgaaatcttactggatccctaccatgtaacctgtttactgaacagtcctaatttgatgagatacaaacatgaccagttttatctttcttgcaaccactgccttcca

SEQ ID NO: 56225 - DNA, 120 bp, Artificial Sequence
  ENSG00000070182_104 (sequence is synthesized)
acgtctccattgagccccccttcccattcctaaggccacctcaggcagaccctggtcactttcagtggataaaaagtctgcccagttgtttcagtttaaagcttcgatctgatgtccaac

SEQ ID NO: 56226 - DNA, 120 bp, Artificial Sequence
  ENSG00000070182_105 (sequence is synthesized)
attcagaccagggaggagaacatggtctgctctctcctggctccttccctctcctccccagcactcttctggacctctgtcttcagctgttggggcagggaggagggagcagaaaaagaa

SEQ ID NO: 56227 - DNA, 120 bp, Artificial Sequence
  ENSG00000070182_106 (sequence is synthesized)
ccttttctgacctcctggctgaagatgtccttggtgcttcaggcatccagctgcttgggggccttcctacctcttgctgaaaggtgtttagcagtcaggtctttgggaccgggtcctggc

SEQ ID NO: 56228 - DNA, 120 bp, Artificial Sequence
  ENSG00000070182_107 (sequence is synthesized)
cagatggctccagtgaggctgccttccttggtgctcacttggcacggaggagacccacccattcttgccccacctggcaatgggaggccgcccgctgctgccccaatctgtcctgccctc

SEQ ID NO: 56229 - DNA, 120 bp, Artificial Sequence
  ENSG00000070182_108 (sequence is synthesized)
tctttcttctgccccaacaggcaaaagggcagatcagcaaggtctagcataaggagatgcccagccagggaatggcaggtcagcttccccttctcgtgggcacctgtatgtcatacagtg

SEQ ID NO: 56230 - DNA, 120 bp, Artificial Sequence
  ENSG00000070182_109 (sequence is synthesized)
agtggcaccattggaggcccctcccttgacttgggcaggggccaggcatccccaggtctccacagggaggtgcagggaggtaaagaccacagcagttccccaaggctgtgcctccttacg

SEQ ID NO: 56231 - DNA, 120 bp, Artificial Sequence
  ENSG00000070182_110 (sequence is synthesized)
agggggattctcaactcctgctgaacattagatcccatgaaatgctcagtaagagataccaatgtgccgacccccggggccagttaactcagcatcttgagatggagcctgagaatgttt

SEQ ID NO: 56232 - DNA, 120 bp, Artificial Sequence
  ENSG00000070182_111 (sequence is synthesized)
cttttgaaagcacctgaggtgattgcggaaggcagccagggttaggaaccactgccctgtccaaaaagttcccatcaaatgatggagaaaggacctgttagacctgctgatggccaggga

SEQ ID NO: 56233 - DNA, 120 bp, Artificial Sequence
  ENSG00000070182_112 (sequence is synthesized)
gggtctgggttctccctttgtaaggtggcaggggcgggcagacttaggacctggtacccttagttttagggctttaggcacaatttgaaagtaccagaagagttcccattcaacattcta

SEQ ID NO: 56234 - DNA, 120 bp, Artificial Sequence
  ENSG00000070182_113 (sequence is synthesized)
ctataagtggttgccgaacttgtcttagcagcagaactttcctcatacgagtgtctggctgcagcaaggggaggggccagagctttgccagcagcattggaacctgccccccctcacacc

SEQ ID NO: 56235 - DNA, 120 bp, Artificial Sequence
  ENSG00000070182_114 (sequence is synthesized)
cctttaatgaaataatcactcaggcccctttggctcactctgagaaccttccgttgctatgttacattggagagagggggccaccctgcagctctctgaagggagaatggggtggaaatg

SEQ ID NO: 56236 - DNA, 120 bp, Artificial Sequence
  ENSG00000070182_115 (sequence is synthesized)
gagccagaagcacaggcagagtagagaagcaagggggcacccatagcaggttgtgggagagccagggtgggccaggaggtgggagtagaaaggaagtaggcttgggggtgtggagagggt

SEQ ID NO: 56237 - DNA, 120 bp, Artificial Sequence
  ENSG00000070182_116 (sequence is synthesized)
ggctgctgacctcccaattttgctgagaacagccatctctaagccagagtacccagaaaggtgtgctcctccctatgccctgagcagggggaagaagagggaacgtggcctcagaacctg

SEQ ID NO: 56238 - DNA, 90 bp, Artificial Sequence
  ENSG00000070182_117 (sequence is synthesized)
cacttggtaggctgagatgggaggatcacttgaacccaggaggctgaggctgccatgagccataatcacatcactgcactccagcctggg

SEQ ID NO: 56239 - DNA, 120 bp, Artificial Sequence
  ENSG00000070182_118 (sequence is synthesized)
ctccagcctgggtgacagattgaagccctccctctaaaaaaatataactattgtgaagatcggttaggggcccagtgtggaatggggtggctgcaggcagcaagcgtatccatgtggttt

SEQ ID NO: 56240 - DNA, 120 bp, Artificial Sequence
  ENSG00000070190_0 (sequence is synthesized)
gccatagcaggctgctgtctcacagagcgagaaggtgtcaggagcagcccagttgtgtctctctctctacctctgtgaagggcgcgaatgggcagagcagaacttctagaagggaagatg

SEQ ID NO: 56241 - DNA, 120 bp, Artificial Sequence
  ENSG00000070190_1 (sequence is synthesized)
agcacccaggatccctcagatctgtggagcagatccgatggagaggctgagctgctccaggacttggggtggtatcacggcaacctcacacgccatgctgctgaagctcttctcctctca

SEQ ID NO: 56242 - DNA, 120 bp, Artificial Sequence
  ENSG00000070190_2 (sequence is synthesized)
aatggatgtgacggcagctaccttctgagggacagcaatgagaccaccgggctgtactctctctctgtgagggccaaagattctgttaaacactttcatgttgaatatactggatattca

SEQ ID NO: 56243 - DNA, 120 bp, Artificial Sequence
  ENSG00000070190_3 (sequence is synthesized)
tttaaatttggctttaatgaattctcatctttgaaggattttgtcaagcattttgcaaatcagcctttgattggaagcgagacaggcactctgatggttctaaaacatccctacccaaga

SEQ ID NO: 56244 - DNA, 120 bp, Artificial Sequence
  ENSG00000070190_4 (sequence is synthesized)
aaagtggaagaaccctccatttatgaatctgtccgggttcacacagcaatgcagacaggaagaacagaagatgaccttgtgcccacagcaccttctctgggcaccaaagaaggttacctc

SEQ ID NO: 56245 - DNA, 120 bp, Artificial Sequence
  ENSG00000070190_5 (sequence is synthesized)
accaaacagggaggcctggtcaagacctggaaaacaagatggtttactctgcacaggaatgaactgaaatacttcaaagaccagatgtcaccagaaccaattcggatcctagacctaaca

SEQ ID NO: 56246 - DNA, 120 bp, Artificial Sequence
  ENSG00000070190_6 (sequence is synthesized)
gaatgttcagctgtacaattcgattattcacaagaaagggtaaactgtttttgtttggtatttccattcaggacattttatctctgtgcaaagaccggagtagaagctgatgagtggatc

SEQ ID NO: 56247 - DNA, 120 bp, Artificial Sequence
  ENSG00000070190_7 (sequence is synthesized)
aagatattacgctggaaattgtcacaaataagaaaacagctcaaccaaggggaaggcacgatccgatctcggtcgttcatctttaaatagatctttcttgccaaggaatgctctggccca

SEQ ID NO: 56248 - DNA, 120 bp, Artificial Sequence
  ENSG00000070190_8 (sequence is synthesized)
ggagcaaggtggaatgtttccctgacgctgtgatctgcagcaggcttcaaatgaaaaccgactaaggattttctttcaaaaacaaatcagaagcagatgctgattgggacccatatacca

SEQ ID NO: 56249 - DNA, 120 bp, Artificial Sequence
  ENSG00000070190_9 (sequence is synthesized)
cgttgctgactcacgttgctgcccttccatgatgttgccatctccttgagaacactgaagcaatcaccattctgatagaaagtgcttaaaccaccactcttaggtctgctcactcttaga

SEQ ID NO: 56250 - DNA, 120 bp, Artificial Sequence
  ENSG00000070190_10 (sequence is synthesized)
acacacaatggaagaggaagggtttttgttttcactcattgtggtccccaagcctattgacactagttgcctagagtcccactgtgagtcatggtcagcctgtctgacatccaggttgtg

SEQ ID NO: 56251 - DNA, 120 bp, Artificial Sequence
  ENSG00000070190_11 (sequence is synthesized)
ctattaaccaagaaggaaacagatacttggaggcttagatgacttctgcaggatttatattcagatagaaaacatcaaatattttcaggggagaggtttttttttttaatttttccccct

SEQ ID NO: 56252 - DNA, 120 bp, Artificial Sequence
  ENSG00000070190_12 (sequence is synthesized)
ttattttctctttttaaaaggttcagaaatttggcaggtcctttgcttctaatgacaaaactgtgagagctagatgtcctatgggcaattaggtagtataataaaggtaaatgaaggtac

SEQ ID NO: 56253 - DNA, 120 bp, Artificial Sequence
  ENSG00000070190_13 (sequence is synthesized)
aatttttaaaccattattttcaccctgttggggtaaatgttttaaagagtgagaaaacataaattgagaaagggtgataaagtaatagataacttttagtttaataataattattgttat

SEQ ID NO: 56254 - DNA, 120 bp, Artificial Sequence
  ENSG00000070190_14 (sequence is synthesized)
tatactactaataatagagcacttgtaagcactaagttatctttatccaacatttctccaaatggactgaaagaaacttttcaaggacagtgtattataacaatccctttcccagaatta

SEQ ID NO: 56255 - DNA, 120 bp, Artificial Sequence
  ENSG00000070190_15 (sequence is synthesized)
gttgtatagggttggcccaagagatgtaagaaaaatctcgcattgctccctaagcaccctgggccttattaaagagcaacttctatttccagtcgggggagtaacactaaagctacaaga

SEQ ID NO: 56256 - DNA, 120 bp, Artificial Sequence
  ENSG00000070190_16 (sequence is synthesized)
aatatgtaataatgataggtaataatgtgttccaaagctttttcaaactagaataaggaggcaaatagaagaatgagatactgatgtccacagttcattggcagaatctaaccccttctg

SEQ ID NO: 56257 - DNA, 120 bp, Artificial Sequence
  ENSG00000070190_17 (sequence is synthesized)
ttatcttttttaatactatttttgtttagatagaagtttcaaagaagataaaaatgcttgaagagcctgagagtaaaaagattatgctgcaaagctatgatataaactgctcttgcagtc

SEQ ID NO: 56258 - DNA, 120 bp, Artificial Sequence
  ENSG00000070190_18 (sequence is synthesized)
caaagggatacctgattaaagaagtttcttatttaaacatctcagacgcaaaaattacattaaatttttgtatatttcaacaacattttaaatgtattttgttatgtttgtattatatag

SEQ ID NO: 56259 - DNA, 120 bp, Artificial Sequence
  ENSG00000070190_19 (sequence is synthesized)
gataaagcaaatgtcaagttaaaatgtattgtgttgtttgtaaagtaagaagttactggccaggagcggcggctcatgcctgtaatcccaggactttggtaggccaagacaagcagatca

SEQ ID NO: 56260 - DNA, 78 bp, Artificial Sequence
  ENSG00000070190_20 (sequence is synthesized)
tgtaatcccaggactttggtaggccaagacaagcagatcacttgaggtcaggagttcaacatcagcctggccaacatg

SEQ ID NO: 56261 - DNA, 85 bp, Artificial Sequence
  ENSG00000070190_21 (sequence is synthesized)
ggtggaggttgcagtgaaccaagatcgcggcgctgcactctagcctgggtgacagagtcagactccgtccccagaagttacaaat

SEQ ID NO: 56262 - DNA, 120 bp, Artificial Sequence
  ENSG00000070190_22 (sequence is synthesized)
aaaacaaaaaaaaacagaagttacaaatgaatactcacggatatgtatagttttatgtttgttttcttagaaacaaatgtgtttctttgggtgggtaatattgtgttttactatgtttac

SEQ ID NO: 56263 - DNA, 120 bp, Artificial Sequence
  ENSG00000070190_23 (sequence is synthesized)
cttttataaaacataacctgtttatttatattctttggctttgtttattaaaaagcatgattttgctgtgcatgtaccattttgctattaaaatttatttttaatatttgtaacttgaaa

SEQ ID NO: 56264 - DNA, 120 bp, Artificial Sequence
  ENSG00000070190_24 (sequence is synthesized)
cctatgagaccgggtgccatggccatccccagcagctgatcataattggcttaaacaaattaggatttattgcttggggttctgttagcaaaagaaagggataattatctgtattaatag

SEQ ID NO: 56265 - DNA, 120 bp, Artificial Sequence
  ENSG00000070190_25 (sequence is synthesized)
acagttaataatgtctcccatagggagtaccaaacaatgacaatgacagaaaccagttttcgagtatatgcactgtatcactccctccccaccactgtccactcactctccactagacct

SEQ ID NO: 56266 - DNA, 120 bp, Artificial Sequence
  ENSG00000070190_26 (sequence is synthesized)
cacatccaggtattagcttctatgcacagagacttacctcttacctattcaactttaattgctggtatcaacaaaatacactgcttaggctttaagatatagaaacccttctgaaggctt

SEQ ID NO: 56267 - DNA, 120 bp, Artificial Sequence
  ENSG00000070190_27 (sequence is synthesized)
tttcacaaaaagaaaaaagatttttggtatttttgcatctcaactgtaagtaaggaagtatgttcagtatgtaatttagggctgaccttattgcttacataattttaactaggtaatcag

SEQ ID NO: 56268 - DNA, 120 bp, Artificial Sequence
  ENSG00000070190_28 (sequence is synthesized)
acacagtcaaatgaaaaattactatacatttaggaaaagtattttgtgccagtaggaaagttcttattccctgcagcagagactgactcttggccagagatgggagaaataactaattta

SEQ ID NO: 56269 - DNA, 120 bp, Artificial Sequence
  ENSG00000070190_29 (sequence is synthesized)
gttttattgtctctttttattgtcccaatagttgaaattgcccacaaccacagaaggcagagttatcctcgttgaagcaagctaacacaaatgagttctttttagcaaacttctctgtct

SEQ ID NO: 56270 - DNA, 120 bp, Artificial Sequence
  ENSG00000070190_30 (sequence is synthesized)
tgcctattctttggatcatagcacaagtttttgagagatcagctgaatgaatacataagtgttagagttaacctaagacatgaaccacaaaaggatctaggggtgtcctgaacatgtttc

SEQ ID NO: 56271 - DNA, 120 bp, Artificial Sequence
  ENSG00000070190_31 (sequence is synthesized)
tttcttcttcaaagtcttattcgagtatatacatctgacttggaataataatatgaatctacaacttccttaacatttctgcagtttgctggcaggagtaggtgcatatataccagcact

SEQ ID NO: 56272 - DNA, 120 bp, Artificial Sequence
  ENSG00000070190_32 (sequence is synthesized)
agtaggtgcatatataccagcacttcaaggtacttacctgcatcctttatcaattcttttttcccttgcaatactctaattagtgttcaactaatatatatatatatatatatatataat

SEQ ID NO: 56273 - DNA, 120 bp, Artificial Sequence
  ENSG00000070190_33 (sequence is synthesized)
tatatattatatatatatatatatatatagctaatgatctgcaatatcttatgttctttcttttgtcctattagtttggtatttccattcaggacattttatctctgtgcaaagaccgga

SEQ ID NO: 56274 - DNA, 120 bp, Artificial Sequence
  ENSG00000070190_34 (sequence is synthesized)
gttcagctgtacaattcgattattcacaagaaagggtaaactgtttttggtaagttgttttataaagaaaacgttttttaatgtcttcttgccagacacttattttggctaaggaataga

SEQ ID NO: 56275 - DNA, 120 bp, Artificial Sequence
  ENSG00000070190_35 (sequence is synthesized)
aagctgtatatcttaatgtctacaaagatcagatatgaggggcatgcctgcatgtaaggagtgttttcagctgagtgtgacataacacctcatttaaagtagcttaaacaaacaggcagg

SEQ ID NO: 56276 - DNA, 120 bp, Artificial Sequence
  ENSG00000070190_36 (sequence is synthesized)
tcagctcagcttatgttgcgtactggagaagtatgactcacatagaggatgccattcacatcttagacaatttaatttctttgaggctttctccctcattttatttataactttgttgac

SEQ ID NO: 56277 - DNA, 120 bp, Artificial Sequence
  ENSG00000070190_37 (sequence is synthesized)
tctaatgataggtgatttgtattgttatgacaatttctggcaaatggcacaaaaatattttgttctaacataatcagtatgttataaaaatgttctaactgggagaagagtcttgagaaa

SEQ ID NO: 56278 - DNA, 120 bp, Artificial Sequence
  ENSG00000070193_0 (sequence is synthesized)
agggagctaaccagcagccaccacctcgagctctctccttgccttgcatcgggtcttacccttccagtatgttccttctgatgagacaatttccagtgccgagagtttcagtacaatgtg

SEQ ID NO: 56279 - DNA, 120 bp, Artificial Sequence
  ENSG00000070193_1 (sequence is synthesized)
gaaatggatactgacacattgtgcctcagcctttccccacctgcccggctgctgctgctgctgctttttgttgctgttcttggtgtcttccgtccctgtcacctgccaagcccttggtca

SEQ ID NO: 56280 - DNA, 120 bp, Artificial Sequence
  ENSG00000070193_2 (sequence is synthesized)
ggacatggtgtcaccagaggccaccaactcttcttcctcctccttctcctctccttccagcgcgggaaggcatgtgcggagctacaatcaccttcaaggagatgtccgctggagaaagct

SEQ ID NO: 56281 - DNA, 120 bp, Artificial Sequence
  ENSG00000070193_3 (sequence is synthesized)
attctctttcaccaagtactttctcaagattgagaagaacgggaaggtcagcgggaccaagaaggagaactgcccgtacagcatcctggagataacatcagtagaaatcggagttgttgc

SEQ ID NO: 56282 - DNA, 120 bp, Artificial Sequence
  ENSG00000070193_4 (sequence is synthesized)
cgtcaaagccattaacagcaactattacttagccatgaacaagaaggggaaactctatggctcaaaagaatttaacaatgactgtaagctgaaggagaggatagaggaaaatggatacaa

SEQ ID NO: 56283 - DNA, 120 bp, Artificial Sequence
  ENSG00000070193_5 (sequence is synthesized)
tacctatgcatcatttaactggcagcataatgggaggcaaatgtatgtggcattgaatggaaaaggagctccaaggagaggacagaaaacacgaaggaaaaacacctctgctcactttct

SEQ ID NO: 56284 - DNA, 120 bp, Artificial Sequence
  ENSG00000070193_6 (sequence is synthesized)
tccaatggtggtacactcatagaggaaggcaacgtttgtggatgcagtagaaccaatggctcttttgccaagaatagtggatattcttcatgaagacagtagattgaaaggcaaagacac

SEQ ID NO: 56285 - DNA, 120 bp, Artificial Sequence
  ENSG00000070193_7 (sequence is synthesized)
gttgcagatgtctgcttgcttaaaagaaagccagcctttgaaggtttttgtattcactgctgacatatgatgttcttttaattagttctgtgtcatgtcttataatcaagatataggcag

SEQ ID NO: 56286 - DNA, 120 bp, Artificial Sequence
  ENSG00000070193_8 (sequence is synthesized)
atcgaatgggatagaagttattcccaagtgaaaaacattgtggctgggttttttgttgttgttgtcaagtttttgtttttaaacctctgagatagaacttaaaggacatagaacaatctg

SEQ ID NO: 56287 - DNA, 120 bp, Artificial Sequence
  ENSG00000070193_9 (sequence is synthesized)
gaatacgaactcatatcaaagacttcattgctcattcaagcctaatgaatcaatgaacagtaatacatgcaagcatttactggaaagcacttgggtcatatcatatgcacaaccaaagga

SEQ ID NO: 56288 - DNA, 120 bp, Artificial Sequence
  ENSG00000070193_10 (sequence is synthesized)
gttctggatgtggtctcatggaataattgaatagaatttaaaaatataaacatgttagtgtgaaactgttctaacaatacaaatagtatggtatgcttgtgcattctgccttcatccctt

SEQ ID NO: 56289 - DNA, 120 bp, Artificial Sequence
  ENSG00000070193_11 (sequence is synthesized)
tctatttctttctaagttatttatttaataggatgttaaatatcttttggggttttaaagagtatctcagcagctgtcttctgatttatcttttctttttattcagcacaccacatgcat

SEQ ID NO: 56290 - DNA, 120 bp, Artificial Sequence
  ENSG00000070193_12 (sequence is synthesized)
gttcacgacaaagtgtttttaaaacttggcgaacacttcaaaaataggagttgggattagggaagcagtatgagtgcccgtgtgctatcagttgacttaatttgcacttctgcagtaata

SEQ ID NO: 56291 - DNA, 120 bp, Artificial Sequence
  ENSG00000070193_13 (sequence is synthesized)
accatcaacaataaatatggcaatgctgtgccatggcttgagtgagagatgtctgctatcatttgaaaacatatattactctcgaggcttcctgtctcaagaaatagaccagaaggccaa

SEQ ID NO: 56292 - DNA, 120 bp, Artificial Sequence
  ENSG00000070193_14 (sequence is synthesized)
attcttctctttcaatacatcagtttgcctccaagaatatactaaaaaaaggaaaattaattgctaaatacatttaaatagcctagcctcattatttactcatgatttcttgccaaatgt

SEQ ID NO: 56293 - DNA, 120 bp, Artificial Sequence
  ENSG00000070193_15 (sequence is synthesized)
catggcggtaaagaggctgtccacatctctaaaaaccctctgtaaattccacataatgcatctttcccaaaggaactatcaaagaatttggtatgaagcgcaactctcccaggggcttaa

SEQ ID NO: 56294 - DNA, 120 bp, Artificial Sequence
  ENSG00000070193_16 (sequence is synthesized)
actgagcaaatcaaatatatactggtatatgtgtaaccatatacaaaaacctgttctagctgtatgatctagtctttacaaaaccaaataaaacttgttttctgtaaatttaaagagctt

SEQ ID NO: 56295 - DNA, 120 bp, Artificial Sequence
  ENSG00000070193_17 (sequence is synthesized)
tacaaagttccataatgtaaccatatcaaaattcattttgttagagcaggtatagaaaagagtacataagagtttaccaatcatcatcacattgtattccactaaataaatacataagcc

SEQ ID NO: 56296 - DNA, 120 bp, Artificial Sequence
  ENSG00000070193_18 (sequence is synthesized)
aattagacagagctagaggcgccggcggaggctgcggccgcaacagccgcggcgaggaagggacctggcagcccccgagctcggtgcaaaggcatcgcgctctctcctcgctcccctgct

SEQ ID NO: 56297 - DNA, 120 bp, Artificial Sequence
  ENSG00000070193_19 (sequence is synthesized)
cccccacccccttctctgcccctttcaccctccctctccctggcgttcccagcagcctagggtttcagatgtcccaccgccggttgaccccctcccccctcttctccacccctgcaaatg

SEQ ID NO: 56298 - DNA, 120 bp, Artificial Sequence
  ENSG00000070193_20 (sequence is synthesized)
aggtttgaccagcagaggcagagcccacctctggcttagaatcactgacatttagactccaggcttcaacctgtttacaagcggactttccaaaggaagggggtgggagatagggccata

SEQ ID NO: 56299 - DNA, 120 bp, Artificial Sequence
  ENSG00000070193_21 (sequence is synthesized)
caaaacaccagccgccgtcccccaaaacaaaaagtgactttcggcagccttcaaatcggcaggcaccactaaaaacagaaaggaagagagggaagaaaacaacggcgactgggcagctgc

SEQ ID NO: 56300 - DNA, 120 bp, Artificial Sequence
  ENSG00000070193_22 (sequence is synthesized)
ctggggctccgcagagagagaccagaagacctttttggcatctaacatggtgaagaaaggagtaaagaagagaacaaagtaactcctgggggagcgaagagcgctggtgaccaacaccac

SEQ ID NO: 56301 - DNA, 120 bp, Artificial Sequence
  ENSG00000070193_23 (sequence is synthesized)
caacgccaccaccagctcctgctgctgcggccacccacgtccaccatttaccgggaggctccagaggcgtaggcagcggatccgagaaaggagcgaggggagtcagccggcttttccgag

SEQ ID NO: 56302 - DNA, 80 bp, Artificial Sequence
  ENSG00000070214_0 (sequence is synthesized)
agacgcgtagccgccgtcgccgccgccgggggatgtggccggcgcctgcctctagccgcgccgcctcttgagtaccagcc

SEQ ID NO: 56303 - DNA, 120 bp, Artificial Sequence
  ENSG00000070214_1 (sequence is synthesized)
ctcgcatgccgaggggctccggggcgtagctgcgcgcccggcgccgcctccgggctccttcggccccgccatgggctgctgcagctccgcctcctccgccgcgcagagctccaaacgaga

SEQ ID NO: 56304 - DNA, 120 bp, Artificial Sequence
  ENSG00000070214_2 (sequence is synthesized)
cctccgccgcgcagagctccaaacgagaatggaagccgctggaggaccgtagctgcacagacataccatggctgctgctcttcatcctcttctgcattgggatgggatttatttgtggct

SEQ ID NO: 56305 - DNA, 120 bp, Artificial Sequence
  ENSG00000070214_3 (sequence is synthesized)
tttcaatagcaacaggtgcagcagcaagactagtgtcaggatacgacagctatggaaatatctgtgggcagaaaaatacaaagttggaagcaataccaaacagtggcatggaccacaccc

SEQ ID NO: 56306 - DNA, 120 bp, Artificial Sequence
  ENSG00000070214_4 (sequence is synthesized)
agcggaagtatgtattctttttggatccatgcaacctggacttgataaaccggaagattaagtctgtagcactgtgtgtagcagcgtgtccaaggcaagaactgaaaactctgagtgatg

SEQ ID NO: 56307 - DNA, 120 bp, Artificial Sequence
  ENSG00000070214_5 (sequence is synthesized)
ttcagaagtttgcagagataaatggttcagccctatgtagctacaacctaaagccttctgaatacactacatctccaaaatcttctgttctctgccccaaactaccagttccagcgagtg

SEQ ID NO: 56308 - DNA, 120 bp, Artificial Sequence
  ENSG00000070214_6 (sequence is synthesized)
cacctattccattcttccatcgctgtgctcctgtgaacatttcctgctatgccaagtttgcagaggccctgatcacctttgtcagtgacaatagtgtcttacacaggctgattagtggag

SEQ ID NO: 56309 - DNA, 120 bp, Artificial Sequence
  ENSG00000070214_7 (sequence is synthesized)
taatgaccagcaaagaaattatattgggactttgcttgttatcactagttctatccatgattttgatggtgataatcaggtatatatcaagagtacttgtgtggatcttaacgattctgg

SEQ ID NO: 56310 - DNA, 120 bp, Artificial Sequence
  ENSG00000070214_8 (sequence is synthesized)
tcatactcggttcacttggaggcacaggtgtactatggtggctgtatgcaaagcaaagaaggtctcccaaagaaactgttactcctgagcagcttcagatagctgaagacaatcttcggg

SEQ ID NO: 56311 - DNA, 120 bp, Artificial Sequence
  ENSG00000070214_9 (sequence is synthesized)
ccctcctcatttatgccatttcagctacagtgttcacagtgatcttattcctgataatgttggttatgcgcaaacgtgttgctcttaccatcgccttgttccacgtagctggcaaggtct

SEQ ID NO: 56312 - DNA, 120 bp, Artificial Sequence
  ENSG00000070214_10 (sequence is synthesized)
tcattcacttgccactgctagtcttccaacccttctggactttctttgctcttgtcttgttttgggtgtactggatcatgacacttctttttcttggcactaccggcagtcctgttcaga

SEQ ID NO: 56313 - DNA, 120 bp, Artificial Sequence
  ENSG00000070214_11 (sequence is synthesized)
atgagcaaggctttgtggagttcaaaatttctgggcctctgcagtacatgtggtggtaccatgtggtgggcctgatttggatcagtgaatttattctagcatgtcagcagatgacagtgg

SEQ ID NO: 56314 - DNA, 120 bp, Artificial Sequence
  ENSG00000070214_12 (sequence is synthesized)
caggagctgtggtaacatactattttactagggataaaaggaatttgccatttacacctattttggcatcagtaaatcgccttattcgttaccacctaggtacggtggcaaaaggatctt

SEQ ID NO: 56315 - DNA, 120 bp, Artificial Sequence
  ENSG00000070214_13 (sequence is synthesized)
tcattatcacattagtcaaaattccgcgaatgatccttatgtatattcacagtcagctcaaaggaaaggaaaatgcttgtgcacgatgtgtgctgaaatcttgcatttgttgcctttggt

SEQ ID NO: 56316 - DNA, 120 bp, Artificial Sequence
  ENSG00000070214_14 (sequence is synthesized)
gtcttgaaaagtgcctaaattatttaaatcagaatgcatacacagccacagctatcaacagcaccaacttctgcacctcagcaaaggatgcctttgtcattctggtggagaatgctttgc

SEQ ID NO: 56317 - DNA, 120 bp, Artificial Sequence
  ENSG00000070214_15 (sequence is synthesized)
gagtggctaccatcaacacagtaggagattttatgttattccttggcaaggtgctgatagtctgcagcacaggtttagctgggattatgctgctcaactaccagcaggactacacagtat

SEQ ID NO: 56318 - DNA, 120 bp, Artificial Sequence
  ENSG00000070214_16 (sequence is synthesized)
gggtgctgcctctgatcatcgtctgcctctttgctttcctagtcgctcattgcttcctgtctatttatgaaatggtagtggatgtattattcttgtgttttgccattgatacaaaataca

SEQ ID NO: 56319 - DNA, 120 bp, Artificial Sequence
  ENSG00000070214_17 (sequence is synthesized)
atgatgggagccctggcagagaattctatatggataaagtgctgatggagtttgtggaaaacagtaggaaagcaatgaaagaagctggtaagggaggcgtcgctgattccagagagctaa

SEQ ID NO: 56320 - DNA, 120 bp, Artificial Sequence
  ENSG00000070214_18 (sequence is synthesized)
agccgatggcttcgggagcaagttctgcttgaacctagccgacggttatggaaacccattgacattccaaaacaatatatacacataactatgtatttgtgtgtgtgggtgtgtgtatat

SEQ ID NO: 56321 - DNA, 120 bp, Artificial Sequence
  ENSG00000070214_19 (sequence is synthesized)
atgtatatgtatgtgtgtatatatgtatatgtatatacacacacacacataaatcagccaaaatcagagaaaaggaacagggatttaataccttttttatgcttatttttgtcaaacatg

SEQ ID NO: 56322 - DNA, 120 bp, Artificial Sequence
  ENSG00000070214_20 (sequence is synthesized)
tactcctttcatacgggtggcttttacaaggcaacttccgtcatttaatgttttcaactgtaattgtcttaatggaaatgttaaaattcatatctgattaacatttttaataacttagag

SEQ ID NO: 56323 - DNA, 120 bp, Artificial Sequence
  ENSG00000070214_21 (sequence is synthesized)
gagattttaactttatttaaaaataggtaaaattattgtacctaattatgtctaaagtttattcaggggtaatttccctgatgtctgtataaaatcaagatcttattttactgatgcata

SEQ ID NO: 56324 - DNA, 120 bp, Artificial Sequence
  ENSG00000070214_22 (sequence is synthesized)
agtcctagtgggtcaagactaggcatatgctttcagataaataaggaattactccaatcagttttccccaatcaaagaagccatgtcattttacttttagaaacatacaattgggcccaa

SEQ ID NO: 56325 - DNA, 120 bp, Artificial Sequence
  ENSG00000070214_23 (sequence is synthesized)
tatgggaattttcataatagttcatacatttgtcagccaacattaaaaggtaaccaactcctcaggtatttgtagtttaccctaacgcttctttaaaagaaagtaggtaaaaaaagaaaa

SEQ ID NO: 56326 - DNA, 120 bp, Artificial Sequence
  ENSG00000070214_24 (sequence is synthesized)
gggtagataatctttcgtatgcaaacttttcccttatattttgtctttctttcctttttgactttagtagcatcctccacacatttgtgtgcctgatttgaaaggaagctggggcaccca

SEQ ID NO: 56327 - DNA, 120 bp, Artificial Sequence
  ENSG00000070214_25 (sequence is synthesized)
gcgagtttagcctttaagtttctgtgtattgatttgcagattaagtaatgctgggaggaataaagaagggacagaaacatggaacataaagcattgaaaattccggtgcttgggcttcgg

SEQ ID NO: 56328 - DNA, 120 bp, Artificial Sequence
  ENSG00000070214_26 (sequence is synthesized)
cttcagagtaacgtcagtggcttagggttaaacggccattttattcaaatgcttgctatacaatctgaaaacacactggcaggtgctcctctccttggcaattcattgagtatccagagt

SEQ ID NO: 56329 - DNA, 120 bp, Artificial Sequence
  ENSG00000070214_27 (sequence is synthesized)
tctacgatgtttaactgaagaattggctaatgttttgatcctccagtgtgactgttgtttttgtttgggggtgggtttggggttttttgcttttttattcctgaagcttaccagatatga

SEQ ID NO: 56330 - DNA, 120 bp, Artificial Sequence
  ENSG00000070214_28 (sequence is synthesized)
atggctaatactccattgttctgcttgttgtaatggtgaatgctttaagaaaaaaaagtgtaatttgctaagaataattcatgatctgtttatgcgataactcctttttgttacaatttt

SEQ ID NO: 56331 - DNA, 120 bp, Artificial Sequence
  ENSG00000070214_29 (sequence is synthesized)
tttaaaaaaagctatttttgttaatgtaaagtaaatatttcagagcaaattttttaaacttattgcactaaatacaggctctgtacaaaaaaaaaaaaaaaaaaaaagcctcagcatttt

SEQ ID NO: 56332 - DNA, 120 bp, Artificial Sequence
  ENSG00000070214_30 (sequence is synthesized)
atcattccatggaaggagaatcttttgaaagaaagcattgcctcctaccagaactagacagtgaattagatcggtattatggaaatgcatacaagtaatgtcactagggcttaataagca

SEQ ID NO: 56333 - DNA, 120 bp, Artificial Sequence
  ENSG00000070214_31 (sequence is synthesized)
gccgtttgctaatgtgcttcctttcaaagggttggacctttaaattgctgcaaaaggtaaattgtatttttttttaagtattggtgttctttactctagctaggctaaaatttgctaaat

SEQ ID NO: 56334 - DNA, 120 bp, Artificial Sequence
  ENSG00000070214_32 (sequence is synthesized)
gccttggtttcttttaaaagttcatgtaatatttctgatttttcagaatatttgcaataagagtctggattttaaaaaacacatgcatacacacaattaagagctcatgtcttagcaaga

SEQ ID NO: 56335 - DNA, 120 bp, Artificial Sequence
  ENSG00000070214_33 (sequence is synthesized)
tctgggaaaccaacattgcgagagtagctattttgaaagaataattctccagaagttaacatctaatatctagtatcaccaaacagtatcgctgttctcttttattcatttgaaatgaat

SEQ ID NO: 56336 - DNA, 120 bp, Artificial Sequence
  ENSG00000070214_34 (sequence is synthesized)
ataattatataactaacaattgtccaaatagatgagagagcaaatcatgtgagaaaattcagaataccatctgtttcatagccgcacagattttggactttcacaaacattgggaactaa

SEQ ID NO: 56337 - DNA, 120 bp, Artificial Sequence
  ENSG00000070214_35 (sequence is synthesized)
atttagaattggcaaaagtctagaagatgggtatcaaaacagaagacattccaggagctagcaattttaagaggtgtccctccaaagtgacctgatggaagtcctgaacttggaaattag

SEQ ID NO: 56338 - DNA, 120 bp, Artificial Sequence
  ENSG00000070214_36 (sequence is synthesized)
gttctactcacttggacatccctgcatcatggactgttgctgctccctgttccatatgctcgcaatctcagctatttggaagctaccaggaatgctttctaattatcatttgcaactaga

SEQ ID NO: 56339 - DNA, 120 bp, Artificial Sequence
  ENSG00000070214_37 (sequence is synthesized)
actgtaatcagaaagaaattttgtatttttgtataacttgattgtgtgccattttatataacaggtcctgttttacaaataaattttgttttactaacattgtgtttagaaattataatc

SEQ ID NO: 56340 - DNA, 120 bp, Artificial Sequence
  ENSG00000070214_38 (sequence is synthesized)
tatgtgtaaccatgtcatttgagttgcaaattaattgccaggctgttttccttaagtaaattcatgtgccgtgtagaaatatgcagatatgcattacacaggcacacacagagagatatt

SEQ ID NO: 56341 - DNA, 120 bp, Artificial Sequence
  ENSG00000070214_39 (sequence is synthesized)
taatatgtggaatatcactctttcatgagctttattccttgattaatttgataaagcctcacagaggattttaagcaatatttaaatgtgttgaggttatgtttggatattcctgctgcc

SEQ ID NO: 56342 - DNA, 120 bp, Artificial Sequence
  ENSG00000070214_40 (sequence is synthesized)
tcttttcattcatttcaagtcattcttcagctagctatgggctgccttattgctattcgctcactgcttccatcttctgcccaagtgagaagaatagatgaagaacagaaatttctctgt

SEQ ID NO: 56343 - DNA, 120 bp, Artificial Sequence
  ENSG00000070214_41 (sequence is synthesized)
gaaatgtggatacccgaataatttcataaatcattgattctatgtggtggtttttgtcttcttctgtggtgaatcttcaaaactgtattcaggactcatatttctagagttttaattggg

SEQ ID NO: 56344 - DNA, 120 bp, Artificial Sequence
  ENSG00000070214_42 (sequence is synthesized)
gtcctctattgtcaattgtagtagtgaccagagtatcgtggtttttgccatcagataattaaggctctggtgcataatttagactttctaagctcctgcctgaagaataaggtcttccat

SEQ ID NO: 56345 - DNA, 120 bp, Artificial Sequence
  ENSG00000070214_43 (sequence is synthesized)
acccatcttctatgagaggcttaccagtgcattagtaataaaacattagcaatttagctagagcactgagattgtataatccttgcatggatgagcagagctcaaagccagttgttcctt

SEQ ID NO: 56346 - DNA, 120 bp, Artificial Sequence
  ENSG00000070214_44 (sequence is synthesized)
taaagcatttaatgcaatggctaatgtttaggattaaagtttttattttatcctataagataattaagtcctaagtcactacaacttaagtagcttaactgtatgttggtacccaaactt

SEQ ID NO: 56347 - DNA, 120 bp, Artificial Sequence
  ENSG00000070214_45 (sequence is synthesized)
gtacccaaactttttctataatggttaaggaggaggcacttactgagtttattttaaagttatgctagaaatgtttttcttttgtagagatgctctctctctctctctcttttttttttt

SEQ ID NO: 56348 - DNA, 120 bp, Artificial Sequence
  ENSG00000070214_46 (sequence is synthesized)
ttttccgtgagggcattaggctgctgattgtaagttatttccaataccactgatcttggtatctgccaagggcttccttgccttccctgggcagttttaggatttcaccctagtaggggg

SEQ ID NO: 56349 - DNA, 120 bp, Artificial Sequence
  ENSG00000070214_47 (sequence is synthesized)
tatgaggcactgacccctttattctggacccaaactgctttagagcagagttaatacctctccctccctcttcaaaacagctacaggaactgcaggcaccacatatgtgtgaggccacat

SEQ ID NO: 56350 - DNA, 120 bp, Artificial Sequence
  ENSG00000070214_48 (sequence is synthesized)
cactgcccctgaggcttcaactatttccaccatgcactattactagctactaacagccattttaagagatctcctagcctgcaaggtagaattctgggatcagttccaaaaccagaactg

SEQ ID NO: 56351 - DNA, 120 bp, Artificial Sequence
  ENSG00000070214_49 (sequence is synthesized)
ccagtaatggtgacttgaatattttatttgatttttggtcagtaaccttgtcatttaaattggactttccaatagccttaacatggcctctgagaagtttcctccagaaaggtctttaag

SEQ ID NO: 56352 - DNA, 120 bp, Artificial Sequence
  ENSG00000070214_50 (sequence is synthesized)
ctttcgcttttcaataagtaagttctttactgcttttctactgctactttaaaaaaaaaacaacaacaacaaataaaactctcagagtctggaggcttatcagtgcacctgccacagtta

SEQ ID NO: 56353 - DNA, 120 bp, Artificial Sequence
  ENSG00000070214_51 (sequence is synthesized)
atttctgtattcttttcatacattccatctgacacatacgagtgcactataatggcttgcctagaactggtaagaagtggtctgtgaatgtatattgaaaaaatgtgggttcataagtaa

SEQ ID NO: 56354 - DNA, 120 bp, Artificial Sequence
  ENSG00000070214_52 (sequence is synthesized)
aagcgtaacgcagatatttgtgtattctgtattcacagcgtaggctgccttttgctttaaatgcatattcatgtatctttgtgtgctaagaatgcatgttagcccttttgaaaagtaggc

SEQ ID NO: 56355 - DNA, 120 bp, Artificial Sequence
  ENSG00000070214_53 (sequence is synthesized)
actattcatacacagtagcttcttggaattaactcatctttgttaacttagtggcacatagtccaaatttttaaaaagcaagacccttgaatatgccaagagaaaatctaaagctagcaa

SEQ ID NO: 56356 - DNA, 120 bp, Artificial Sequence
  ENSG00000070214_54 (sequence is synthesized)
acttaaaaaacaaaacaaaaattacacgtcgtgtacagttatgaatttagaatagcacactttttccattcagatttcatacatttgagccaaattcttatactccatgttttaatttta

SEQ ID NO: 56357 - DNA, 120 bp, Artificial Sequence
  ENSG00000070214_55 (sequence is synthesized)
aaaggataattttaatccaagatttaaatctttgaaaatatctttcttatagaaaactttaatgcagtttttaaacttactgatttctgtggaaaacctttcttttctatagaaatactg

SEQ ID NO: 56358 - DNA, 120 bp, Artificial Sequence
  ENSG00000070214_56 (sequence is synthesized)
tagtgccctttcttcccatcttgattttgtacatgtaaagacaaatgatgattcagtttcaatattgcatgaacaattgccactttgtaaattatatggacagaatgtgttctaaggaaa

SEQ ID NO: 56359 - DNA, 120 bp, Artificial Sequence
  ENSG00000070214_57 (sequence is synthesized)
ttcgttagtaaatttgtgaaaaacatgtgagattgttcgagacctattaggctattcttcagttttgatgctcagttttacaacttaaatgattttctccaggacacggagctcagaata

SEQ ID NO: 56360 - DNA, 120 bp, Artificial Sequence
  ENSG00000070214_58 (sequence is synthesized)
ataaagcttttattaatggtctagtgaagatctagttgaacatggaaacattgtaatttacaaatgtctcagaaatttctcacttttatttgctaagacctgaatttaatatttgatatt

SEQ ID NO: 56361 - DNA, 120 bp, Artificial Sequence
  ENSG00000070214_59 (sequence is synthesized)
caaaaacaagttattttgaagagacaatgggtctctttgagcttaagaaagctatggactatctttccttcaaatgcacatcacatgtctgtgaacactcaaaatgctcatagaatttca

SEQ ID NO: 56362 - DNA, 120 bp, Artificial Sequence
  ENSG00000070214_60 (sequence is synthesized)
gggccctcagacggccagcttccacccctgtaccccctcaggggctaatgaacccaagtcaaaaggctgctctaaagttgttctgataatgtgttttgaaatgaggaagtgattaggcct

SEQ ID NO: 56363 - DNA, 120 bp, Artificial Sequence
  ENSG00000070214_61 (sequence is synthesized)
ccactagagatacttttgagatgatgcttaccaccttctgacctggaatcatttttataacttaaagactttatgtaatttagtagcaggttagggaatagaaaccacactaatctgaag

SEQ ID NO: 56364 - DNA, 120 bp, Artificial Sequence
  ENSG00000070214_62 (sequence is synthesized)
agggaatagaaaccacactaatctgaaggaataacaagatgatcaacactgaatcttcatgacagtaagattttctttccttggaggtatgagggtgtgtatgtgtgtgtgtgtgtgtgt

SEQ ID NO: 56365 - DNA, 120 bp, Artificial Sequence
  ENSG00000070214_63 (sequence is synthesized)
gcggttatttgggggcaaggtaccagattatttgcagtgagccaaaaaaaaaaaaatatccaagaagaaataaatagggaatccttgtaattaatccatctaccaaaacacttgattctt

SEQ ID NO: 56366 - DNA, 120 bp, Artificial Sequence
  ENSG00000070214_64 (sequence is synthesized)
tttattgtagctcagctatgacattatgacattatgtggcttagtgttatcagtatactactgtcttaaaatatatttgtcaacatgtccagttccaacaacagttgaagatgatgataa

SEQ ID NO: 56367 - DNA, 120 bp, Artificial Sequence
  ENSG00000070214_65 (sequence is synthesized)
attagcaaactcaagggtagtccatagttggcaaaaaataaatttggtagaaagttggaggagcagatgctgaaggtagaaatgcaaaagatgttttttcttcctgcataaatcacggag

SEQ ID NO: 56368 - DNA, 120 bp, Artificial Sequence
  ENSG00000070214_66 (sequence is synthesized)
gtgtgttctgttttagtgttttccagtcacccactagagcagcttcagattcctctgccaatagaactccacccccagtcccttacctactctatcttctttagggaagcatgtggattt

SEQ ID NO: 56369 - DNA, 120 bp, Artificial Sequence
  ENSG00000070214_67 (sequence is synthesized)
cttcacatctgcaccttactattaggtaagggtgctgcatctacatggaaggctccctgggcccttgaaaaagcaggcagaaactcatcaaggggtttgaagttcttgtgaaatttgatc

SEQ ID NO: 56370 - DNA, 120 bp, Artificial Sequence
  ENSG00000070214_68 (sequence is synthesized)
ccagtggctcatgacttatagtcaggcatcaaaccatttcctactttttcaggctgaagaaagtggaaatataactggctggtgaagaaaggagaaaagtcagccccctaccccacccca

SEQ ID NO: 56371 - DNA, 89 bp, Artificial Sequence
  ENSG00000070214_69 (sequence is synthesized)
ggtgaagaaaggagaaaagtcagccccctaccccaccccacactcctagaaaagtttgggggttttttttgtttgtttttggtgagctt

SEQ ID NO: 56372 - DNA, 63 bp, Artificial Sequence
  ENSG00000070214_70 (sequence is synthesized)
gagttttaatgaaccttccacagtagtaaatgcagagaccactggtggaaattcccatgttgg

SEQ ID NO: 56373 - DNA, 120 bp, Artificial Sequence
  ENSG00000070214_71 (sequence is synthesized)
tagtaaatgcagagaccactggtggaaattcccatgttggatagaaaagggcgtaagtccagtctaagtatctaaatgtgatatgcccttttgtcacagaagtgtaagacttaaagggaa

SEQ ID NO: 56374 - DNA, 120 bp, Artificial Sequence
  ENSG00000070214_72 (sequence is synthesized)
tattctgaccttcgtgtatgaatctgatccacccatcctgtcagctaggattataatttgaactgtcgtttcaggagcatgtgttaaatcatatgagtaaaaaaaaagtagacattgaaa

SEQ ID NO: 56375 - DNA, 120 bp, Artificial Sequence
  ENSG00000070214_73 (sequence is synthesized)
agaagacttgggaataattgggcagatagaatgggttccatggatcattctagttgccactagaaaatgtgagctccttcttcatttaccatgttgataatccggtggtgactttttttt

SEQ ID NO: 56376 - DNA, 120 bp, Artificial Sequence
  ENSG00000070214_74 (sequence is synthesized)
tttttttgtaaattgtattagataccccacaggaatgtgacaataataggatagctttgggggctggtgatttgaaacagggactattaagtagattttcccccatcctctaggttcctg

SEQ ID NO: 56377 - DNA, 120 bp, Artificial Sequence
  ENSG00000070214_75 (sequence is synthesized)
tagtctgtgctcagaacttggtttttggcccctattgtttttgcctattttgattttcagagatgatcacatggggacagttaacttttcttctgctgtgttgccttaatgctactagat

SEQ ID NO: 56378 - DNA, 120 bp, Artificial Sequence
  ENSG00000070214_76 (sequence is synthesized)
tgtgttgtgttgttggagttttctgacttcttccctataaaaagatactgagagctccataatgaaagaagttgttatactttctcagaatattctggaccactgaatgcacttctaata

SEQ ID NO: 56379 - DNA, 120 bp, Artificial Sequence
  ENSG00000070214_77 (sequence is synthesized)
gagctttaatctaaagaagttagttcagtggttattaactgattttattacaggagaaaaaaactttaacaaaaaggcagggagaaaagtgtgaagggcatcaagcaaaatgacaggggc

SEQ ID NO: 56380 - DNA, 120 bp, Artificial Sequence
  ENSG00000070214_78 (sequence is synthesized)
ttcaaaaaacaaccaaagacaaaaccctatcttctgaagaccaaaggtccaactttacttactggctggcacagcctttctgaactccttgagtttagaatagagctcctagaataataa

SEQ ID NO: 56381 - DNA, 120 bp, Artificial Sequence
  ENSG00000070214_79 (sequence is synthesized)
ggcggccaaatttaaagatcagtcaatacagtagggacctgctattgatctctcaggcactgagtcttcacatccagtgtcaagcccagcccagcatatggggtgatatgagcagaaaac

SEQ ID NO: 56382 - DNA, 120 bp, Artificial Sequence
  ENSG00000070214_80 (sequence is synthesized)
acacatcggtgtgtcttgatttctcgcagctgtgtaatgtggcatgagaagtatgttttggtgccacatatttctcaatctgatgcctttttgtctttttttttttttgccatttgcatc

SEQ ID NO: 56383 - DNA, 120 bp, Artificial Sequence
  ENSG00000070214_81 (sequence is synthesized)
ctatttcatagtgccaaaatgaatttttgtatcttgtcttgtctttgtccattataaactggaggatcacagttaagccttccatgaattcatagtttggaatcatttaccttaccatta

SEQ ID NO: 56384 - DNA, 120 bp, Artificial Sequence
  ENSG00000070214_82 (sequence is synthesized)
ttttggatttttttcttattacagtgtcactacactgtattcatgtgggggaacaaacatgtaggtgcttgaacatgccccacagacacagttgtagccctagtatttgtgacggtcatt

SEQ ID NO: 56385 - DNA, 120 bp, Artificial Sequence
  ENSG00000070214_83 (sequence is synthesized)
attgacacagtgcagactttgcagatggagcattatgctctcagaggactttaaaaatatgtatattaagcaattaactttctggagttggagttatcaaatcttgctgggaaattaact

SEQ ID NO: 56386 - DNA, 120 bp, Artificial Sequence
  ENSG00000070214_84 (sequence is synthesized)
tccaagagctctgaattggatggaattccatctggcttcagagaacaatcagcctatatgaaacggagctttgaaatgtttttcttgtgcagaaatacgaactagaaagaaaagtgctga

SEQ ID NO: 56387 - DNA, 120 bp, Artificial Sequence
  ENSG00000070214_85 (sequence is synthesized)
tctaatgctaagttttctctgtgtactgactcagttgccagaattataatgaaaactgtattttagtctaacaaatgtatagaattttttatgtaataaataaaattttataggaaagaa

SEQ ID NO: 56388 - DNA, 120 bp, Artificial Sequence
  ENSG00000070214_86 (sequence is synthesized)
ggttgtttacatgaggttctcccactcaccagctgttgagagtctgcgattatgaagagcaggatcttattacttcaatgaaagcatgtaacaagtttctcaaaccaccaacagccaagt

SEQ ID NO: 56389 - DNA, 120 bp, Artificial Sequence
  ENSG00000070214_87 (sequence is synthesized)
ggatttggtacagtgcggctgtctaataaataatcaaaagcatttgatagaaatctgtcttgcagcactgtcttcacatttaatgttgctttctcttctagtctcgggtatgtttaaatg

SEQ ID NO: 56390 - DNA, 120 bp, Artificial Sequence
  ENSG00000070214_88 (sequence is synthesized)
attcccttttctcactctagcgccaatactggcctgaaggctagatccccagcgaaattcttgttcaggctgggtctgtcgactttgactctgctatttatagagccaatgtgggttaat

SEQ ID NO: 56391 - DNA, 120 bp, Artificial Sequence
  ENSG00000070214_89 (sequence is synthesized)
aactactatttattgagtgcccgttccatgccaagcattaggctgggtgctttacataagtttaatcctcacaatagccctgtaaggttgcacctattatctccactttgaccacgaaga

SEQ ID NO: 56392 - DNA, 120 bp, Artificial Sequence
  ENSG00000070214_90 (sequence is synthesized)
aacggagactcagagagtttgtatcctatgtgtaagatcacacagttgtcagagtcaggattcaaatctagttctaactccaaagctctccacactaacattgttttgcttattattgct

SEQ ID NO: 56393 - DNA, 120 bp, Artificial Sequence
  ENSG00000070214_91 (sequence is synthesized)
ccaaagataattaccccaacaccttatcaatgctatacttcctctcataatggcagtgtaggtatgtgggaagtgtctgagatggaggaccagggagtctttagaggcgcaaaagaatca

SEQ ID NO: 56394 - DNA, 120 bp, Artificial Sequence
  ENSG00000070214_92 (sequence is synthesized)
cagaattatcttctaaaaaaaaacacaatattctttgagatcaggagttgataaaatatggcccccagctatttttgtaaataaaggtttattgggaacacagccacacccaatccttca

SEQ ID NO: 56395 - DNA, 120 bp, Artificial Sequence
  ENSG00000070214_93 (sequence is synthesized)
gtgtgtgtgtatgtgtgtgtgtgtgtgtgcgtttcttttcagaaggggcgggtaatgtcttctgttggaacatgcactccaccctctttgataaggcttgtggtaagatttgcatcacta

SEQ ID NO: 56396 - DNA, 120 bp, Artificial Sequence
  ENSG00000070214_94 (sequence is synthesized)
actacccatgacagtcatcctcatagcattaagcacacagctcttagctcccataatgatgtgtggagggtggagtgtattgcagccatattcacctttcatttgtgtgtttgatgtggc

SEQ ID NO: 56397 - DNA, 120 bp, Artificial Sequence
  ENSG00000070214_95 (sequence is synthesized)
tattgggactttgcttgttatcactaggtagtacttgactcaattgaaataatgctgtccatatgaaaatctatttctgtgatatttgaaaggctcccatctgtttttggttcctgtaca

SEQ ID NO: 56398 - DNA, 120 bp, Artificial Sequence
  ENSG00000070214_96 (sequence is synthesized)
attctgcttgggattctctgaacttcttggatctgtgctttgatttctttcattatttttggaaaatttgcagtcatttttttcaaatatttcctctgcctcattctgtcttcttcttgg

SEQ ID NO: 56399 - DNA, 120 bp, Artificial Sequence
  ENSG00000070214_97 (sequence is synthesized)
atttcaattacatagctccaaacgagaatggaagccgctggaggaccgtagctgcacagacataccatggctgctgctcttcatcctcttctgcattgggatggcccctgctgccttctg

SEQ ID NO: 56400 - DNA, 120 bp, Artificial Sequence
  ENSG00000070269_0 (sequence is synthesized)
gacccggaagccgccgtggccgccgcacaagctgcgctcgtctctcggctggggagctccgtgtcgcaccgggttcttgggctggccgtgtccttctccctcggtcgccactggcccatg

SEQ ID NO: 56401 - DNA, 120 bp, Artificial Sequence
  ENSG00000070269_1 (sequence is synthesized)
caggcccaggggcgggcagtccgagtggggctgcggcgctccgggggcatccgcggcggcgtggcggtgttcgccgccgtggccgcagtgttcaccttcaccctgcccccttcggtaccg

SEQ ID NO: 56402 - DNA, 120 bp, Artificial Sequence
  ENSG00000070269_2 (sequence is synthesized)
ttcaccctgcccccttcggtaccggggggagactccggggaactgatcacagccgcacatgagcttggagttgcccatcctcctggctatcctttgttcacgctggtggctaaactggca

SEQ ID NO: 56403 - DNA, 120 bp, Artificial Sequence
  ENSG00000070269_3 (sequence is synthesized)
attacactgtttccttttggttcaattgcctaccgcgtcaatcttctctgtggcttatttggagcagtagctgcatcattactttttttcaccgttttcaggctttctggctcatctgct

SEQ ID NO: 56404 - DNA, 120 bp, Artificial Sequence
  ENSG00000070269_4 (sequence is synthesized)
ggaggaatccttgctgcgggggtgttttcattttctcgtctaacatggcagtggtccattgcagcagaggtttttagcttaaacaatctctttgtggggctgcttatggctcttactgta

SEQ ID NO: 56405 - DNA, 120 bp, Artificial Sequence
  ENSG00000070269_5 (sequence is synthesized)
cattttgaggaagcagcaactgctaaggagagatcaaaggtagctaaaattggtgctttctgctgtggccttagtttatgtaaccagcacacaataatactctatgttttgtgcataata

SEQ ID NO: 56406 - DNA, 120 bp, Artificial Sequence
  ENSG00000070269_6 (sequence is synthesized)
ccttggattctctttcaacttttaaaaaagaaggaactctccctgggctctttgttgaagttgagcctgtacttctctgctggtttgctgccctatgtccaccttcccatctcatcttac

SEQ ID NO: 56407 - DNA, 120 bp, Artificial Sequence
  ENSG00000070269_7 (sequence is synthesized)
cttaatcacgcccggtggacctggggagaccagacaacactgcaaggatttttgacacattttctcagggaagaatatggaaccttcagcctggccaaatctgaaataggatccagtatg

SEQ ID NO: 56408 - DNA, 120 bp, Artificial Sequence
  ENSG00000070269_8 (sequence is synthesized)
tctgaaatactgctttctcaagtaacaaatatgaggaccgaactctcattcaacatccaagcccttgcagtttgtgcaaatatatgtttagcaacaaaggacagacagaatccatcatta

SEQ ID NO: 56409 - DNA, 120 bp, Artificial Sequence
  ENSG00000070269_9 (sequence is synthesized)
gtatggctttttactggaatgttttgcatttattcattgttctttgcttggagagcaaatttagatatttcaaaaccacttttcatgggtgtggtggaacgattctggatgcagagcaat

SEQ ID NO: 56410 - DNA, 120 bp, Artificial Sequence
  ENSG00000070269_10 (sequence is synthesized)
gcagtagtggccgtcctcgctggcattggtttggctgcagttgtgtctgagactaaccgagtgctgaatagcaatgggcttcagtgtctggaatggctttctgcaactctttttgtagtt

SEQ ID NO: 56411 - DNA, 120 bp, Artificial Sequence
  ENSG00000070269_11 (sequence is synthesized)
taccaaatatattctaattacagtgtttgtgaccaaaggaccaactatgtgattgataagttcgcaaagaaccttctcacctctatgcctcatgatgcaattatcttactcagaggagat

SEQ ID NO: 56412 - DNA, 120 bp, Artificial Sequence
  ENSG00000070269_12 (sequence is synthesized)
ttgccaggaaattctctccgttacatgcattactgtgaggggttgaggcctgacatttcattagtggatcaggaaatgatgacttacgagtggtatttacccaagatggcaaagcacttg

SEQ ID NO: 56413 - DNA, 120 bp, Artificial Sequence
  ENSG00000070269_13 (sequence is synthesized)
ccaggtgtcaactttcctgggaaccggtggaatcctgtggaaggaatattacctagtggaatggtcacatttaatctttatcattttcttgaagtaaataaacaaaaagaaacatttgtt

SEQ ID NO: 56414 - DNA, 120 bp, Artificial Sequence
  ENSG00000070269_14 (sequence is synthesized)
tgcataggaattcatgaaggcgacccaacctggaaaaagaactattcactttggccatgggggtcttgtgacaaattagttcctttggagattgtattcaaccctgaggaatggattaaa

SEQ ID NO: 56415 - DNA, 120 bp, Artificial Sequence
  ENSG00000070269_15 (sequence is synthesized)
cttacaaaaagtatctataactggaccgaagaatatggaaggtttgatccatcttcttgggaatctgtggccaatgaagaaatgtggcaagcgaggatgaaaacaccgttcttcatcttt

SEQ ID NO: 56416 - DNA, 120 bp, Artificial Sequence
  ENSG00000070269_16 (sequence is synthesized)
aacctggcagaaactgctcacatgccttcaaaagtgaaagctcaactctacgctcaagcatatgacctttataaggagattgtctatttacaaaaggagcacccagtgaattggcacaag

SEQ ID NO: 56417 - DNA, 120 bp, Artificial Sequence
  ENSG00000070269_17 (sequence is synthesized)
agtgctgttatcggaaaccatcagacatttccgtctgtactctcagaaagcaccgaatgacccacagcaagctgatattttaggtgctctaaagcacctaagaaaagaactgcaaagtct

SEQ ID NO: 56418 - DNA, 120 bp, Artificial Sequence
  ENSG00000070269_18 (sequence is synthesized)
gagaaataggaaaaatgtctgagacagcaaaatatgaaaaacctgctcatcgttcagcttccaaaattctgaagtctggaagtttttccttcaagaaaagaaactgcataaaaaatttaa

SEQ ID NO: 56419 - DNA, 120 bp, Artificial Sequence
  ENSG00000070269_19 (sequence is synthesized)
aactaagtcatctcccagatataagtatcatggtccagcagtactgtttaatggggtattcagtgactaaggtctgctatttatgcaaaattctgtttatcccgtgttaccaaattacca

SEQ ID NO: 56420 - DNA, 120 bp, Artificial Sequence
  ENSG00000070269_20 (sequence is synthesized)
tttcagtgagaagcttttgaaaagtcttctgacttccagtctttcaccagatgactgcactggattagattctagaagagaatgaaccattttcatataactaaatattggtcatgaact

SEQ ID NO: 56421 - DNA, 120 bp, Artificial Sequence
  ENSG00000070269_21 (sequence is synthesized)
gtgtaagggccatgcttattgggatcagttttaaagttaaattcttttgatattaataccagaccaaagacattttctgtttcctggaaaaaaaaaatgaatcatgttaggctttaggtg

SEQ ID NO: 56422 - DNA, 120 bp, Artificial Sequence
  ENSG00000070269_22 (sequence is synthesized)
agagtacattttttacaaagtagctatagttgttacatagtcttacacttcaagctaaacaccaaatgggtgatattttgaaaaaagtttgtgttttactgtcttagatcgttcttggaa

SEQ ID NO: 56423 - DNA, 120 bp, Artificial Sequence
  ENSG00000070269_23 (sequence is synthesized)
atcactaaaaaaaaaaaaagttaatttgatgtttgcttatttcagttgcagaaactggcgagtaaaaaagattttgcatttacttaattaattttatatttatgttttatttctatttgg

SEQ ID NO: 56424 - DNA, 120 bp, Artificial Sequence
  ENSG00000070269_24 (sequence is synthesized)
actcagagatctagacccaataattagtaggctcctgctgccaaaatgcaaaggggaaaaaaaggcagggattgggggggatggggaagtggcccaataaattcatttctgttacaagca

SEQ ID NO: 56425 - DNA, 120 bp, Artificial Sequence
  ENSG00000070269_25 (sequence is synthesized)
tcttttatacatattactaaagagaacatagtaagaaatgcaaataatagttctttattttattatgacagttaattaatagcaacctgttttaatgaataaagtcactcagagtccttc

SEQ ID NO: 56426 - DNA, 120 bp, Artificial Sequence
  ENSG00000070269_26 (sequence is synthesized)
agcacttcctaagtagaggccagaatctgtagggcttcttttccccccaattgtatagctcctagactccaagcactatataggcccctgtatagaaatgctcactaatgaagagggagg

SEQ ID NO: 56427 - DNA, 120 bp, Artificial Sequence
  ENSG00000070269_27 (sequence is synthesized)
gctagaagcttgtctgcattcaaagatcactggtgagtcattcagcaagaaaaggccccttaccaggaatagtcacagttccgtggcattgtactagcaaaagggtctgatcaaaggtct

SEQ ID NO: 56428 - DNA, 120 bp, Artificial Sequence
  ENSG00000070269_28 (sequence is synthesized)
cctgtggagcttgcatggttccctttcatactacgaccataattaaaaccactaattctcttttaaaatgctgcaggatgccatgtaggcatctgtctggagtgtcctttgtgatgtcat

SEQ ID NO: 56429 - DNA, 120 bp, Artificial Sequence
  ENSG00000070269_29 (sequence is synthesized)
aagctgttaaggaccagtgccgagggcttttgagtgaaatgccagtcatgaaggtgcttcaagacaagggtgcctctaaaagcttgacagggccttgactgcacaattcgagctgaattt

SEQ ID NO: 56430 - DNA, 120 bp, Artificial Sequence
  ENSG00000070269_30 (sequence is synthesized)
gccccttgtcagctgccagtaaataaatctcaaagggggaaaagctgaagtttcattacctgatccatggggctttgttggttttggcatcacacaggggaagctcttgcccctccattc

SEQ ID NO: 56431 - DNA, 120 bp, Artificial Sequence
  ENSG00000070269_31 (sequence is synthesized)
tctggatttgaagatgtccattggagcctgcagtgcctggacagggttcagagcggaaccttttgaagagtgtcaatagttgtaacagttcagctgttaggaagacaaataaatggagga

SEQ ID NO: 56432 - DNA, 120 bp, Artificial Sequence
  ENSG00000070269_32 (sequence is synthesized)
gctcattaatccgcttttggctctcagtgccttttgcccttttatcacagccttattaggctcctactcatcttgaaccagaaaaaaatgaattgaagttgttgagtactaattggcaaa

SEQ ID NO: 56433 - DNA, 120 bp, Artificial Sequence
  ENSG00000070269_33 (sequence is synthesized)
gacttttaatcatgggccaagaactttcactgacttgaaagtaacttctccacagggaaggaccaaaaacctggtttaccttaaaacaaaaacctgttggagttcagcgtggtgtaaaaa

SEQ ID NO: 56434 - DNA, 120 bp, Artificial Sequence
  ENSG00000070269_34 (sequence is synthesized)
tgtaaggaagcattgataaattgtctaagtttatccatttgaaagaaattgtgtaagattatgatattctcttttctttaaaaaaaaaagtacaataaaattcaaacattccttaggaaa

SEQ ID NO: 56435 - DNA, 120 bp, Artificial Sequence
  ENSG00000070269_35 (sequence is synthesized)
aaagtaagtaatacaattcctttttctgttatttttctatgttcatgaattgaattaatgttttcagtatgtcgctgtaggacattgccagtattattttatactccaaataaatgactc

SEQ ID NO: 56436 - DNA, 120 bp, Artificial Sequence
  ENSG00000070269_36 (sequence is synthesized)
tcctagctgtctattaagataaacgtgtattgctttcttctattctgattctaaataaatcaatgatttcaagaaattgagcattatattacatctaagtagacagtcatttgatgtcct

SEQ ID NO: 56437 - DNA, 120 bp, Artificial Sequence
  ENSG00000070269_37 (sequence is synthesized)
tctaattacagagacaaggtctcactatgttgcctaggctggtcctgaactcctggtctcaagcaagcctccctcttcagcctcccaaagtgctggaattaacaggtgtgaaccactata

SEQ ID NO: 56438 - DNA, 120 bp, Artificial Sequence
  ENSG00000070269_38 (sequence is synthesized)
gaaaagaagacagttatggtttaagcagagaattctgttgctcacatttgatgcttaatagcatcacatcatccttactccagtggagaatttctgtcatttgcatgatctgggctttct

SEQ ID NO: 56439 - DNA, 120 bp, Artificial Sequence
  ENSG00000070269_39 (sequence is synthesized)
aataatttaacctatgtcttagtttcatctagaaaatagagatggtagattgcaggtttgttgtctttaagcaaatgaatgtatctggaacactagaacatagaaaacacttagtgaatg

SEQ ID NO: 56440 - DNA, 120 bp, Artificial Sequence
  ENSG00000070269_40 (sequence is synthesized)
gcagctacatcatcatcatcatcatgatcatcatcgtcatcatccccaagtttagctgggagagtttgcttggctgcttcatagaagaattgcaatctggcttgccccaacatgtatagg

SEQ ID NO: 56441 - DNA, 120 bp, Artificial Sequence
  ENSG00000070269_41 (sequence is synthesized)
ttgagcctgctgcagcacctgtcatgggaggcagagagagcatgcaaatccctcaggcccatgtctgttcaatgacaaaaggaaggaggatgcactattcccagtgacctcaagatggca

SEQ ID NO: 56442 - DNA, 120 bp, Artificial Sequence
  ENSG00000070269_42 (sequence is synthesized)
accaattaaggaaaaaaataacccacaaaagaatggctgggaattatctctcatggcctttattttcttcatattagatctccagaaatctatttgaattaattttgttatcatttgcta

SEQ ID NO: 56443 - DNA, 120 bp, Artificial Sequence
  ENSG00000070269_43 (sequence is synthesized)
aatcactggaggccatgtctacactgccaagagaaaaaagttcaaaaactcatttcaaacagcttcctaccaaaccagtcggggatattctatacagtataccaatataaaaaatacaga

SEQ ID NO: 56444 - DNA, 120 bp, Artificial Sequence
  ENSG00000070269_44 (sequence is synthesized)
agaattatttgttctgatcctattccaaattatataagttgataaccaaatgttaccattggaaaacgtcttggaactatttaagtctttctattgcactttttcttccaactttaaaag

SEQ ID NO: 56445 - DNA, 120 bp, Artificial Sequence
  ENSG00000070269_45 (sequence is synthesized)
acaaaattttaaaatctgaccccagcccttgtgattgttcagtatataatcaatggtatcttacaaggactattttatttggaatcaatcaaatttgtttcctgccaacaataagttaga

SEQ ID NO: 56446 - DNA, 120 bp, Artificial Sequence
  ENSG00000070269_46 (sequence is synthesized)
atttgaaactactttaaaatgaattctctattagttcctttaagtgattttagggatttctgagttcatctctttgtaacaaagtatgtctgagaagtagttgttacctctacagttaac

SEQ ID NO: 56447 - DNA, 120 bp, Artificial Sequence
  ENSG00000070269_47 (sequence is synthesized)
agttgtttgtgtttacagttgtccctcagtatccatggggtattggttacaggaactcctaaggatataaaaatccatgggtgctcaagtcctgatataaaatggcataatatttgtata

SEQ ID NO: 56448 - DNA, 120 bp, Artificial Sequence
  ENSG00000070269_48 (sequence is synthesized)
cctagtataatgtaaatgctatgtaaatagttgttatgctgtattgtctagggaattatgacaagaaaaaacatctgtatatgtttgtacagacagttttttccccaacttttttttttt

SEQ ID NO: 56449 - DNA, 120 bp, Artificial Sequence
  ENSG00000070269_49 (sequence is synthesized)
ttttttgatttaaggttaattgaatccatggaggcagaacccatggatacagagggccgactgtactgtcaaatatttttagcacctccttcactaagatagagcttaaaatgagcaata

SEQ ID NO: 56450 - DNA, 120 bp, Artificial Sequence
  ENSG00000070269_50 (sequence is synthesized)
aacacaacggtgaatattagaatactatatagagcatttatagaactaaaatgtttcaaccttcaattgaacaactattttcttgttattttggattttagtatttcagagtttaattta

SEQ ID NO: 56451 - DNA, 120 bp, Artificial Sequence
  ENSG00000070269_51 (sequence is synthesized)
tgtaatgtctcctatgacttctttaggctatccttgccgtaagctctatctttggcttacatatttttaacatccaaccttattagagctggcttaagcaaatatattttcatgtatatt

SEQ ID NO: 56452 - DNA, 120 bp, Artificial Sequence
  ENSG00000070269_52 (sequence is synthesized)
atttaatagtgttctttgaaaactgggttaatatttgctttaaaacctacagattaagacaagtggaaagatatccataccaacttgatacaaaattttggaagaaaataggtttctaca

SEQ ID NO: 56453 - DNA, 120 bp, Artificial Sequence
  ENSG00000070269_53 (sequence is synthesized)
acactaaagtgatgtcctaactaattactaatttggaactcttggggctgtttgaaaaaaaactatgaggagaatatttcaactttatatgtgaggcagtttatgagttctcacagtttc

SEQ ID NO: 56454 - DNA, 120 bp, Artificial Sequence
  ENSG00000070269_54 (sequence is synthesized)
ggtgtaatttacttaatagcttgctttcttccagccatccttccttgctttctttttaaacaacttcttttttctacttcaaaaaaggtacataagctttatagaaaacttagaaaatac

SEQ ID NO: 56455 - DNA, 120 bp, Artificial Sequence
  ENSG00000070269_55 (sequence is synthesized)
aggtaagcaaaaataagaaaattaaaactacctataaatccaacatgcagagataaccactgttattaatctgttaatgactatatttttctaatatttttaagatttttatttcttttt

SEQ ID NO: 56456 - DNA, 120 bp, Artificial Sequence
  ENSG00000070269_56 (sequence is synthesized)
aaaagtaggatcatagtaaacatactgttttattagcctgctgtttttcactttacattatatcttggaaatacctccttgccatcagttactttcacgtaaccttttgatggttctcac

SEQ ID NO: 56457 - DNA, 120 bp, Artificial Sequence
  ENSG00000070269_57 (sequence is synthesized)
cattgattgtaaatatttctttttatgtgtgagacttttgtggctttctcattttcgctgggggaatgtaacaagaagctcagttttcttttcaaaaataaaaatggcactgagtgcggt

SEQ ID NO: 56458 - DNA, 120 bp, Artificial Sequence
  ENSG00000070269_58 (sequence is synthesized)
caccgttcttcatctttaacctggcagaaactgctcacatgccttcaaaagtgaaagctcaactctacgctcaagcatatgactgtacagactccataaaatctgataaaaggggtttcc

SEQ ID NO: 56459 - DNA, 120 bp, Artificial Sequence
  ENSG00000070269_59 (sequence is synthesized)
tgtagtctgacccccgacattgaggagactgtaatggaggtgacttctcatgcaagatttggccagcgttctagcagtgtcccgggagtgccatggtttggcaggaagacaggaacccca

SEQ ID NO: 56460 - DNA, 120 bp, Artificial Sequence
  ENSG00000070269_60 (sequence is synthesized)
ggacttcggcctgaagagccagtgggagccagtgaaactgtctgactctccacatgcgtcagggccctgccgccctggcaccaaggctggcacgcaccagagggcaagtggagaagcgga

SEQ ID NO: 56461 - DNA, 120 bp, Artificial Sequence
  ENSG00000070269_61 (sequence is synthesized)
tggtggctcccatgttatctgactaaccactgggtgggctacactccctgtgcccccgctgttgcctctgataggagtatgcttggttcttggtattgacttgcctttttttgttgtttt

SEQ ID NO: 56462 - DNA, 120 bp, Artificial Sequence
  ENSG00000070269_62 (sequence is synthesized)
ttaaaagcacccattttgttcaatgcttctgttctgttactcaaaatgtagccaaaatagaagggaatcaattactagtgtattattttgaaagcttcaaacagaaattgtgaaatgtta

SEQ ID NO: 56463 - DNA, 120 bp, Artificial Sequence
  ENSG00000070366_0 (sequence is synthesized)
gtggtggtttcctggctgcgcgcggcggtggcggagccgctacggctgtagcagcagccgcgaagatggcggaagggctggagcgtgtgcggatctccgcgtcggagctgcgcgggatcc

SEQ ID NO: 56464 - DNA, 120 bp, Artificial Sequence
  ENSG00000070366_1 (sequence is synthesized)
tggctactctggccccgcaggccgggagcagagaaaacatgaaggaattaaaggaggccaggccgcgcaaagataacaggcgtccagatctggaaatctataagcctggcctttctcggc

SEQ ID NO: 56465 - DNA, 120 bp, Artificial Sequence
  ENSG00000070366_2 (sequence is synthesized)
taaggaacaagcccaaaatcaaggaaccccctgggagtgaggaattcaaagatgaaattgttaatgaccgagattgctctgctgttgaaaatggtacacagcccgttaaagatgtctgca

SEQ ID NO: 56466 - DNA, 120 bp, Artificial Sequence
  ENSG00000070366_3 (sequence is synthesized)
aggaactgaacaaccaagagcagaatggtcctatagacccagaaaataatcggggacaagaatcctttcctaggactgctggacaagaggatcgtagtctaaaaattatcaaaagaacaa

SEQ ID NO: 56467 - DNA, 120 bp, Artificial Sequence
  ENSG00000070366_4 (sequence is synthesized)
agaaacccgacctgcagatctatcagcctggacgacgtttgcagactgttagcaaagaatccgccagtcgggtggaggaggaagaagtcctcaaccaggtagaacaactgagagtagagg

SEQ ID NO: 56468 - DNA, 120 bp, Artificial Sequence
  ENSG00000070366_5 (sequence is synthesized)
aagatgagtgtaggggaaatgttgcgaaggaggaagttgcgaataaaccagacagggctgagatagaaaagagcccaggtggtgggagagtaggggctgcaaaaggagaaaaaggaaaga

SEQ ID NO: 56469 - DNA, 120 bp, Artificial Sequence
  ENSG00000070366_6 (sequence is synthesized)
ggatgggaaaaggggagggggtgagggaaacccacgacgacccagcccgcgggaggccgggctccgcaaagcgctactcccgctcagacaaacgaaggaatcgctaccgcacgcgcagca

SEQ ID NO: 56470 - DNA, 120 bp, Artificial Sequence
  ENSG00000070366_7 (sequence is synthesized)
ccagctcagctggcagcaacaacagcgctgagggagctggcctgacggataatggatgtcgccgccgccgacaggataggaccaaggagaggccacgactgaagaagcaagtgtctgtgt

SEQ ID NO: 56471 - DNA, 120 bp, Artificial Sequence
  ENSG00000070366_8 (sequence is synthesized)
cctcaaccgattccttagacgaggacagaattgatgagcctgatggattaggacccaggagaagttcagaaaggaagagacatttagaaagaaactggtctggccgtggggagggtgagc

SEQ ID NO: 56472 - DNA, 120 bp, Artificial Sequence
  ENSG00000070366_9 (sequence is synthesized)
agaaaaacagtgctaaagaatatcgaggcactcttcgtgtcactttcgatgcagaagccatgaacaaagagtctcccatggtgaggtcagccagggatgatatggatagaggaaagcctg

SEQ ID NO: 56473 - DNA, 120 bp, Artificial Sequence
  ENSG00000070366_10 (sequence is synthesized)
acaaaggcttgagcagtgggggcaaaggctctgagaagcaggagtccaaaaacccgaaacaagaacttcggggtcgtggtcgtggcattctgattttgcctgcccataccaccctatctg

SEQ ID NO: 56474 - DNA, 120 bp, Artificial Sequence
  ENSG00000070366_11 (sequence is synthesized)
tcaattcagcaggttctccagagtccgcgcctttgggacctcggcttttgtttggatctggtagtaagggatctcggagttggggccgtggaggcaccacacgccgattgtgggacccaa

SEQ ID NO: 56475 - DNA, 120 bp, Artificial Sequence
  ENSG00000070366_12 (sequence is synthesized)
acaatcctgatcagaaacctgctctaaagactcagacgccccagctacatttcttggacactgatgatgaagtcagccctacatcttggggtgactcacgccaggctcaggcatcttact

SEQ ID NO: 56476 - DNA, 120 bp, Artificial Sequence
  ENSG00000070366_13 (sequence is synthesized)
ataagtttcaaaactctgacaacccctattattacccccggacaccaggccctgcctcccagtatccctatacgggctataaccctctacagtacccagtgggccctacgaatggtgtgt

SEQ ID NO: 56477 - DNA, 120 bp, Artificial Sequence
  ENSG00000070366_14 (sequence is synthesized)
acccagggccttactacccaggctacccgactccgtcaggacagtatgtgtgtagccctctacctaccagcaccatgagtcccgaggaggtagagcagcacatgaggaacctgcagcaac

SEQ ID NO: 56478 - DNA, 120 bp, Artificial Sequence
  ENSG00000070366_15 (sequence is synthesized)
aggagctgcacaggcttctccgggtggctgacaaccaggaactgcagctcagcaacctgctctccagggaccgcatcagtccggagggcctggagaagatggcgcaactcagagctgaac

SEQ ID NO: 56479 - DNA, 120 bp, Artificial Sequence
  ENSG00000070366_16 (sequence is synthesized)
tgctgcagctatatgagcgctgtattctattagatattgagttctctgataatcagaatgtggatcagatcctgtggaagaatgctttctatcaggtgattgagaagttcaggcaacttg

SEQ ID NO: 56480 - DNA, 120 bp, Artificial Sequence
  ENSG00000070366_17 (sequence is synthesized)
tcaaggatccgaatgttgagaacccagaacagattcggaacagacttttggagctcttggatgagggtagtgacttctttgatagtttgcttcagaagctgcaggttacttacaagttca

SEQ ID NO: 56481 - DNA, 120 bp, Artificial Sequence
  ENSG00000070366_18 (sequence is synthesized)
aactggaagactacatggatggtcttgccattcgcagcaagccattacgcaagacagtaaaatatgccttgatcagtgcccagcgatgcatgatatgccaaggagatattgctaggtacc

SEQ ID NO: 56482 - DNA, 120 bp, Artificial Sequence
  ENSG00000070366_19 (sequence is synthesized)
gggagcaagccagtgatacagcgaattatgggaaagcacgcagttggtacctgaaggcccagcacattgctcccaagaatgggcgcccctataaccagttggctttgctggcagtgtata

SEQ ID NO: 56483 - DNA, 120 bp, Artificial Sequence
  ENSG00000070366_20 (sequence is synthesized)
cgaggaggaagcttgacgctgtctattactatatgcgcagtttagctgccagcaaccctatcctgactgccaaggagagtctcatgagcttgtttgaagagaccaagcggaaggcagaac

SEQ ID NO: 56484 - DNA, 120 bp, Artificial Sequence
  ENSG00000070366_21 (sequence is synthesized)
agatggaaaagaagcaacatgaggaatttgacctgagccctgaccagtggcggaaaggaaagaagtctactttccggcatgttggagatgacaccactcgcctggagatctggattcatc

SEQ ID NO: 56485 - DNA, 120 bp, Artificial Sequence
  ENSG00000070366_22 (sequence is synthesized)
catcccatccacggtcttcccagggcactgagtctgggaaggattctgagcaagagaatgggctgggcagcctgagtcccagtgatctgaacaaaaggttcatcctcagttttctccatg

SEQ ID NO: 56486 - DNA, 120 bp, Artificial Sequence
  ENSG00000070366_23 (sequence is synthesized)
cccatgggaagctgtttacccggattgggatggagacattccctgcagtggctgagaaggtcctcaaggagttccaggtgttactgcagcacagcccctctcccattggaagtacccgca

SEQ ID NO: 56487 - DNA, 120 bp, Artificial Sequence
  ENSG00000070366_24 (sequence is synthesized)
agccgcagctctgggcttggccatgttttctctactggtccgccgctgcacctgcttacttaaggagtccgccaaagctcagctgtcctctcctgaggaccaggatgaccaagacgacat

SEQ ID NO: 56488 - DNA, 120 bp, Artificial Sequence
  ENSG00000070366_25 (sequence is synthesized)
caaggtgtcttcctttgtcccggacctgaaggagctgctccccagtgtcaaagtctggtcagattggatgctcggctacccggacacctggaatcctcctcccacatccctggatctgcc

SEQ ID NO: 56489 - DNA, 120 bp, Artificial Sequence
  ENSG00000070366_26 (sequence is synthesized)
ctcgcatgttgctgtggatgtatggtcgacgctggctgatttctgtaacatactgactgcagtgaatcagtctgaggtgccactgtacaaggacccggatgatgacctcacccttcttat

SEQ ID NO: 56490 - DNA, 120 bp, Artificial Sequence
  ENSG00000070366_27 (sequence is synthesized)
cctggaagaggatcggcttctctcgggctttgtccccttgctggctgcccctcaggacccctgctacgtggagaaaacctcggataaggttattgcagctgactgcaaaagggtcacagt

SEQ ID NO: 56491 - DNA, 120 bp, Artificial Sequence
  ENSG00000070366_28 (sequence is synthesized)
gctgaagtattttctggaagccctttgtggacaagaagagcctctgctggcattcaagggtggaaagtatgtgtcagtggcacccgtcccagacaccatgggaaaggaaatgggaagcca

SEQ ID NO: 56492 - DNA, 120 bp, Artificial Sequence
  ENSG00000070366_29 (sequence is synthesized)
agagggaacacgactggaagatgaggaggaggatgtggtgattgaagactttgaggaagattcagaggctgaaggcagcggaggcgaggatgacatcagggagcttcgggccaagaagct

SEQ ID NO: 56493 - DNA, 120 bp, Artificial Sequence
  ENSG00000070366_30 (sequence is synthesized)
ggctctggccaggaagatagctgagcagcagcgtcgccaggaaaagatccaggctgtcctggaggaccacagtcagatgaggcagatggagctcgaaatcagacctttgttcctcgtacc

SEQ ID NO: 56494 - DNA, 120 bp, Artificial Sequence
  ENSG00000070366_31 (sequence is synthesized)
agacaccaacggcttcattgaccacctggccagtctggcgcggctgctggagagcaggaagtacatcctggtggtgcccctcatcgtgatcaatgagctggacggcctggccaaggggca

SEQ ID NO: 56495 - DNA, 120 bp, Artificial Sequence
  ENSG00000070366_32 (sequence is synthesized)
ggagacagaccaccgggctgggggctacgcccgtgtggtacaagagaaggcccgcaagtccatcgagttcctcgagcagcgattcgagagtcgggactcttgcctgcgagccctgaccag

SEQ ID NO: 56496 - DNA, 120 bp, Artificial Sequence
  ENSG00000070366_33 (sequence is synthesized)
ccgtggcaatgaactcgaatccatcgccttccgcagtgaggacatcactggccagctgggtaacaacgatgatctcatcctgtcctgctgcctccactactgcaaagacaaggctaagga

SEQ ID NO: 56497 - DNA, 120 bp, Artificial Sequence
  ENSG00000070366_34 (sequence is synthesized)
cttcatgcccgccagcaaagaggagccaatccggctactgcgggaggtggtgctgttgacggatgaccggaacctgcgtgtgaaggcgctcacaaggaatgttcctgtacgggacatccc

SEQ ID NO: 56498 - DNA, 120 bp, Artificial Sequence
  ENSG00000070366_35 (sequence is synthesized)
agccttcctcacgtgggcccaggtgggctgagggagccacactggggccccccccccgtggaaccgttcctgaaaggccaccaggcgcccagtgtagcacggaagatgcccacgtgcctg

SEQ ID NO: 56499 - DNA, 120 bp, Artificial Sequence
  ENSG00000070366_36 (sequence is synthesized)
agccaccaatccacccagacaataaaccatcctcttccaacccacgccacggccatgctgtgggggacctgctcctcacagagcccctcccaaggatcgggcggaagctgctgggaccct

SEQ ID NO: 56500 - DNA, 120 bp, Artificial Sequence
  ENSG00000070366_37 (sequence is synthesized)
cctgggctgccaggatttagcagggaggtggctggctacagcaacagcagctgggcaagccagataggccgcccatgctctcagcctttctccctcccccgtctcattccaaggctgagg

SEQ ID NO: 56501 - DNA, 120 bp, Artificial Sequence
  ENSG00000070366_38 (sequence is synthesized)
gagggccttctcgcctggggacgcagccactttctccagtggagacagggcaggggttctgagtttccgtcagatgcagtgaaatcacagttccctttcatcttcagaacctctgtcgtg

SEQ ID NO: 56502 - DNA, 120 bp, Artificial Sequence
  ENSG00000070366_39 (sequence is synthesized)
aatgtgttcaagaggctttggttaagtcaggaagaagtgcccagggtgtgtgtccccagtctccctgaggcctggactcgcccatgaacccaagtcggcttctagacagcatgtccctaa

SEQ ID NO: 56503 - DNA, 120 bp, Artificial Sequence
  ENSG00000070366_40 (sequence is synthesized)
cagcagccctgggcccccacctcttctaccatccaccccagacttaccacacacccttcctgctgctcctcttcctgcccttatcaacctgggtccctcacacttcgccagttgcgtccc

SEQ ID NO: 56504 - DNA, 120 bp, Artificial Sequence
  ENSG00000070366_41 (sequence is synthesized)
cgtggacagtcatgagtctagaggaaaggggcatctggtctcaggcccgtgctctcgggtggcctccacctgctccctctctcctcactggcctttctttccgtctagcttcctcttcag

SEQ ID NO: 56505 - DNA, 120 bp, Artificial Sequence
  ENSG00000070366_42 (sequence is synthesized)
gaaatgtcctgactcccctcagctcccccttcacccctccttgcccgcctaccctccctccagaatagcccctcacccttcttccccttctagttgatccttttcacctccctgatcccc

SEQ ID NO: 56506 - DNA, 120 bp, Artificial Sequence
  ENSG00000070366_43 (sequence is synthesized)
ttcatttcttcaccgcggttcctcgtcataggggttctcactctgaactttccctctctactacccatggcaggaacctagtacaggtctcccacccagggccttccaccctcggctcct

SEQ ID NO: 56507 - DNA, 120 bp, Artificial Sequence
  ENSG00000070366_44 (sequence is synthesized)
gtgctgggagaaacttccaggcgtggacagcccagcctgaggcattccagtgctggggcaccgtcgcctaacctggtttctagctttgccctcactccccggaaaaactgacactgacac

SEQ ID NO: 56508 - DNA, 120 bp, Artificial Sequence
  ENSG00000070366_45 (sequence is synthesized)
aggggccctttccttgcccctttagctggtacctcagtggggaggcttccttaccaagaatgagttcctgaaacccagggccagagacaaggacaacttaggggaagacggggttttcgg

SEQ ID NO: 56509 - DNA, 120 bp, Artificial Sequence
  ENSG00000070366_46 (sequence is synthesized)
tggagccaggggcaaatcttaatgggaccagtgggggataccccagagcccatggcctgactgcacagcctgcctggaggatgggtgcgcagctctgccctccctgaggcccaggactat

SEQ ID NO: 56510 - DNA, 120 bp, Artificial Sequence
  ENSG00000070366_47 (sequence is synthesized)
gccagaagcgatggggtaccgtgtaggggagccaaggccagtagtttgggggtaggagtcccctagagtctcagaagactgggctctttggagtacagggtccccggcctctcctttaag

SEQ ID NO: 56511 - DNA, 120 bp, Artificial Sequence
  ENSG00000070366_48 (sequence is synthesized)
attctctccccagctggaaggccgatgactgggtggtcgggagggagacccagctctcctttctgtcccgtttgcagcactggttttgtttccttaataaatttttagttatgaaacata

SEQ ID NO: 56512 - DNA, 120 bp, Artificial Sequence
  ENSG00000070366_49 (sequence is synthesized)
ggggtaggtaggaagattgctgtttctttgctggtcagactctccaggctctctgcggagagtccaggcaggatctgtctgacttggattgcagttctctttttctgctgagctggggtg

SEQ ID NO: 56513 - DNA, 120 bp, Artificial Sequence
  ENSG00000070366_50 (sequence is synthesized)
tgggcagcctaggcctgtgtaactcgtgacaggcctcccaaagtgccatgatggcatggatcctcgtggagctgttgagaacaaaaacaggactgcttctcggaggagtgccgctctgtg

SEQ ID NO: 56514 - DNA, 120 bp, Artificial Sequence
  ENSG00000070366_51 (sequence is synthesized)
ctagttggttgagtcagaacctggagttagtttggtagggtgtggtttcaggtttgcagacatccccggttgatgcctatgaagggttggtgcctgatgtaactgaatagggtgctactt

SEQ ID NO: 56515 - DNA, 120 bp, Artificial Sequence
  ENSG00000070366_52 (sequence is synthesized)
ggacccagatacccgtcagaatttccaggccttggtttggtttagacattttagaagatgttaacagcaataattgtaaaagactttgagtggcacgcatggtgaacagaaagtactaga

SEQ ID NO: 56516 - DNA, 120 bp, Artificial Sequence
  ENSG00000070366_53 (sequence is synthesized)
tcctgaagaggggggaaaggcatttctgtgctcttcctggtaaagtgtttgaaaatgaacattcagaagaaaacctaaagcacctgaaatgcacaggggacgagaatgagagctgaacaa

SEQ ID NO: 56517 - DNA, 120 bp, Artificial Sequence
  ENSG00000070366_54 (sequence is synthesized)
gtgtgtgggcccaaggagttaaggaaggacgcctccctttccctcgagctgctgcataccctggactctcctgagggaccctttcactgatcaatgagctggacggcctggccaaggggc

SEQ ID NO: 56518 - DNA, 120 bp, Artificial Sequence
  ENSG00000070366_55 (sequence is synthesized)
ataccagagagtttagggactgtgaaggtttcaggaaatttgttgagtatttagaaaagccgatggtttcagagagaaactttgatattagcttgaacacagttattgccaggggtgagg

SEQ ID NO: 56519 - DNA, 120 bp, Artificial Sequence
  ENSG00000070366_56 (sequence is synthesized)
aaatagcataccaaagcataataactcatagtgatttatccaaaacttgagttgtttgcatctctggaccctgaaaactcctttatcttgaatttgttcaaaattgcaggataccgggaa

SEQ ID NO: 56520 - DNA, 120 bp, Artificial Sequence
  ENSG00000070366_57 (sequence is synthesized)
ttgatatcagaaaaaagaaaaagcttctctgggcagctagacagtgcaaggaatgtccccccaaatctgagcactgttgttctctgatgaagaaagtgacctgtgaatctgatctgagat

SEQ ID NO: 56521 - DNA, 120 bp, Artificial Sequence
  ENSG00000070366_58 (sequence is synthesized)
aatttcaactttgcataaatccacatacacatacctcagattgctgccttgggcacagttttgtttcctagcatttttggggtatgatttcctggcagatgccagcctagacaacatttg

SEQ ID NO: 56522 - DNA, 120 bp, Artificial Sequence
  ENSG00000070366_59 (sequence is synthesized)
agctgaagccagccagacctgaaaggcttgtgttggcagtgccaatatccgtccttaacccctgccaatgtgggtggctgctctaagagcactctgcaggggaagcagaattggactgaa

SEQ ID NO: 56523 - DNA, 120 bp, Artificial Sequence
  ENSG00000070366_60 (sequence is synthesized)
gcccgagctactgctgcctatagcttgctctctgtgacgcttttgccgctgagaatgtacctttctggtacagccggagccgagagctctagaaaagaatagtttctgtccatgaaggaa

SEQ ID NO: 56524 - DNA, 120 bp, Artificial Sequence
  ENSG00000070366_61 (sequence is synthesized)
acaaggcagccactttagtcagtgacacacacagcccgaaaacgatggtatcttctgaggttttaaaggatagggacagagtcatctcggattcgggagaagtactcagtcggggtgcca

SEQ ID NO: 56525 - DNA, 120 bp, Artificial Sequence
  ENSG00000070366_62 (sequence is synthesized)
agagactttcgcctgtatacatggattactgttacttagcaggggcgaccggttggccaaagccttggtgtgcccttggcacaattctgccaagacccttaccctctcctctcctcaggg

SEQ ID NO: 56526 - DNA, 120 bp, Artificial Sequence
  ENSG00000070366_63 (sequence is synthesized)
ctcccttaacccctctccccacatctggaaaaccctggatacattttctgttccatctttagttttctgcctctggatgcgtaaagcttcaacctgctggcttttagagggagaggactt

SEQ ID NO: 56527 - DNA, 120 bp, Artificial Sequence
  ENSG00000070366_64 (sequence is synthesized)
gttaaaaaaaaaaaagtggggtgtggggagagcggtgttgtgatctgggggccagccatgtggtaaaaaggagtagaggtcaaggggctgcttctattccctcagtttagggtcctggga

SEQ ID NO: 56528 - DNA, 120 bp, Artificial Sequence
  ENSG00000070366_65 (sequence is synthesized)
ggctgacgggtttgggcagcttttgggaactaggcagaagagagtcctgtatgggaggccggagtcaaggcagaagcccagtgcagccctctctaggccagcaggggagggtccccgggg

SEQ ID NO: 56529 - DNA, 120 bp, Artificial Sequence
  ENSG00000070366_66 (sequence is synthesized)
ctgagagcccggacggaggaaaggactggtagaagagccaagacacggctagcgtggcaccccctccccaggaccacattctccagggtgagaagagcagccagccctctgcctcctgtc

SEQ ID NO: 56530 - DNA, 120 bp, Artificial Sequence
  ENSG00000070366_67 (sequence is synthesized)
ggacattctgcctctcagtttctccatctactaaagagctcagactgtgcacttctcactcccacagtacactttacacagctttgaccatcctccctgctgcttggattgcaaaggaca

SEQ ID NO: 56531 - DNA, 120 bp, Artificial Sequence
  ENSG00000070366_68 (sequence is synthesized)
gggtactcttccaaaagacagacaacctttctctctccaaacaggtagaatcctttccaggcctgttaacaccaggtcagagaccccagtagatcacagccttttgcatatcagccagca

SEQ ID NO: 56532 - DNA, 120 bp, Artificial Sequence
  ENSG00000070366_69 (sequence is synthesized)
gttgtccttgtcctagagaaggaactaatagctatgacagacacaatccccaaggaaaccaatttccttctaaatggggcggaaatgaaaactgggagagggctactcctcgttgcttgt

SEQ ID NO: 56533 - DNA, 120 bp, Artificial Sequence
  ENSG00000070366_70 (sequence is synthesized)
gtccatggaataggcaattcccacagaccctgtaaggaagtgctgcaggtggcctcaggatgtccacatccctgggtcctgctgtgccctggaaatccccatctccaggagtcccacatc

SEQ ID NO: 56534 - DNA, 120 bp, Artificial Sequence
  ENSG00000070366_71 (sequence is synthesized)
cacacatgtggcttttctccctgtcggccagaaaccatgctttcttagccacgcagcataccatgtagcccgtgctctagcagcagcaacactcctgcccgcctgtctgtgcatgtgtcc

SEQ ID NO: 56535 - DNA, 120 bp, Artificial Sequence
  ENSG00000070366_72 (sequence is synthesized)
gtggcacactcctgtcctgggcaggtttcctctgcacacttagcaggggtgccagtgtacctctcatcgtccaggtgaggccaaggacaattgcaagcttttcctctgtcctcttctcac

SEQ ID NO: 56536 - DNA, 120 bp, Artificial Sequence
  ENSG00000070366_73 (sequence is synthesized)
tccttagctcccctctcctctccattcagtggcagcagcctcacaccaagaaggaaaatcctggacccattacataattctccatagtgcaagcagtagctggggcgtaaggtcagaggt

SEQ ID NO: 56537 - DNA, 120 bp, Artificial Sequence
  ENSG00000070366_74 (sequence is synthesized)
catagtggggtcaggtggctgacacacactgtaacgacaaggtggttaaaattagaccacagagaggaaactggcagtcttgtggaaatgcagaagtttcctatgcaagtgagaggctgg

SEQ ID NO: 56538 - DNA, 120 bp, Artificial Sequence
  ENSG00000070366_75 (sequence is synthesized)
agatgcagggaggccactgtgcgtgctgcctgccaggctattactcatttcggctctgttctttaatgccttttagcccctgcttctgtatttctagccttcctcatcacatgtttgaat

SEQ ID NO: 56539 - DNA, 120 bp, Artificial Sequence
  ENSG00000070366_76 (sequence is synthesized)
acacgcaatggaaccaggcttacctgccctgggccaagacaagcttcccttctccttcacggaggcaagcccaggaccaggcaccccaagctcaaggggctgaactttttctaagccctt

SEQ ID NO: 56540 - DNA, 120 bp, Artificial Sequence
  ENSG00000070366_77 (sequence is synthesized)
ctgggtagccgagaaccttctacatcaacctctcaggtgaaggtggtcaaagtacttagcttgagattccagcctataatggtaacagggccaatggtgagagaaagcagagaacactcc

SEQ ID NO: 56541 - DNA, 120 bp, Artificial Sequence
  ENSG00000070366_78 (sequence is synthesized)
tagaccgtgtaggaaagcggggttggctttttggtgaaggtggcagaggatgcagccacagagcacacagttgaccggtgtgtgccgcactttcctgggcagccagcctgcacagcggtg

SEQ ID NO: 56542 - DNA, 120 bp, Artificial Sequence
  ENSG00000070366_79 (sequence is synthesized)
ctcatttatttccactgtcttagagaacatgggtcatgcctgcttcatctgctctctgtggtacccagccgagcttccctgggctgtccgtctttactgtgagcctactgtgtgcacagc

SEQ ID NO: 56543 - DNA, 120 bp, Artificial Sequence
  ENSG00000070366_80 (sequence is synthesized)
ttgtccttacaattcttgccagtgacgtacgaaaacgatgagatttaggctttgccaccagaggggttgctgtccacatgagagagagaacacctgcacctgtaaaatgatcatcagtag

SEQ ID NO: 56544 - DNA, 120 bp, Artificial Sequence
  ENSG00000070366_81 (sequence is synthesized)
ctcttaccgtgcgacccagagatcggaatgggacgtgacggccggcacaggcgccgtgcacagctgccaggaatctgacgggctgtcctggaggaccacagtcagatgaggcagatggag

SEQ ID NO: 56545 - DNA, 120 bp, Artificial Sequence
  ENSG00000070367_0 (sequence is synthesized)
agttccacttccggcgtatgaggcggtgacaatgggagcagcgcgggcggcgccgggaggcagctgacaagcgtttgcggcttcgcttcatggccgctctcccgcccctcctgggatctg

SEQ ID NO: 56546 - DNA, 120 bp, Artificial Sequence
  ENSG00000070367_1 (sequence is synthesized)
tggggagctggggagcccgcagcggcccggagccggagctggcgagccgagcggagacctgtgcgccgcgcctctgaggcgcagcatgtgaagcggagacggcatccagtggggggcgag

SEQ ID NO: 56547 - DNA, 120 bp, Artificial Sequence
  ENSG00000070367_2 (sequence is synthesized)
cctctcagccggccgggatggctaccacggccgagctcttcgaggagccttttgtggcagatgaatatattgaacgtcttgtatggagaaccccaggaggaggctctagaggtggacctg

SEQ ID NO: 56548 - DNA, 120 bp, Artificial Sequence
  ENSG00000070367_3 (sequence is synthesized)
aagcttttgatcctaaaagattattagaagaatttgtaaatcatattcaggaactccagataatggatgaaaggattcagaggaaagtagagaaactagagcaacaatgtcagaaagaag

SEQ ID NO: 56549 - DNA, 120 bp, Artificial Sequence
  ENSG00000070367_4 (sequence is synthesized)
ccaaggaatttgccaagaaggtacaagagctgcagaaaagcaatcaggttgccttccaacatttccaagaactagatgagcacattagctatgtagcaactaaagtctgtcaccttggag

SEQ ID NO: 56550 - DNA, 120 bp, Artificial Sequence
  ENSG00000070367_5 (sequence is synthesized)
accagttagagggggtaaacacacccagacaacgggcagtggaggctcagaaattgatgaaatactttaatgagtttctagatggagaattgaaatctgatgtttttacaaattctgaaa

SEQ ID NO: 56551 - DNA, 120 bp, Artificial Sequence
  ENSG00000070367_6 (sequence is synthesized)
agataaaggaagcagcagacatcattcagaagttgcacctaattgcccaagagttaccttttgatagattttcagaagttaaatccaaaattgcaagtaaataccatgatttagaatgcc

SEQ ID NO: 56552 - DNA, 120 bp, Artificial Sequence
  ENSG00000070367_7 (sequence is synthesized)
agctgattcaggagtttaccagtgctcaaagaagaggtgaaatctccagaatgagagaagtagcagcagttttacttcattttaagggttattcccattgtgttgatgtttatataaagc

SEQ ID NO: 56553 - DNA, 120 bp, Artificial Sequence
  ENSG00000070367_8 (sequence is synthesized)
agtgccaggagggtgcttatttgagaaatgatatatttgaagacgctggaatactctgtcaaagagtgaacaaacaagttggagatatcttcagtaatccagaaacagtcctggctaaac

SEQ ID NO: 56554 - DNA, 120 bp, Artificial Sequence
  ENSG00000070367_9 (sequence is synthesized)
ttattcaaaatgtatttgaaatcaaactacagagttttgtgaaagagcagttagaagaatgtaggaagtccgatgcagagcaatatctcaaaaatctctatgatctgtatacaagaacca

SEQ ID NO: 56555 - DNA, 120 bp, Artificial Sequence
  ENSG00000070367_10 (sequence is synthesized)
ccaatctttccagcaagctgatggagtttaatttaggtactgataaacagactttcttgtctaagcttatcaaatccattttcatttcctatttggagaactatattgaggtggagactg

SEQ ID NO: 56556 - DNA, 120 bp, Artificial Sequence
  ENSG00000070367_11 (sequence is synthesized)
gatatttgaaaagcagaagtgctatgatcctacagcgctattatgattcgaaaaaccatcaaaagagatccattggcacaggaggtattcaagatttgaaggaaagaattagacagcgta

SEQ ID NO: 56557 - DNA, 120 bp, Artificial Sequence
  ENSG00000070367_12 (sequence is synthesized)
ccaacttaccacttgggccaagtatcgatactcatggggagacttttctatcccaagaagtggtggttaatcttttacaagaaaccaaacaagcctttgaaagatgtcataggctctctg

SEQ ID NO: 56558 - DNA, 120 bp, Artificial Sequence
  ENSG00000070367_13 (sequence is synthesized)
atccttctgacttaccaaggaatgccttcagaatttttaccattcttgtggaatttttatgtattgagcatattgattatgctttggaaacaggacttgctggaattccctcttcagatt

SEQ ID NO: 56559 - DNA, 120 bp, Artificial Sequence
  ENSG00000070367_14 (sequence is synthesized)
ctaggaatgcaaatctttattttttggacgttgtgcaacaggccaatactatttttcatctttttgacaaacagtttaatgatcaccttatgccactaataagctcttctcctaagttat

SEQ ID NO: 56560 - DNA, 120 bp, Artificial Sequence
  ENSG00000070367_15 (sequence is synthesized)
ctgaatgccttcagaagaaaaaagaaataattgaacaaatggagatgaaattggatactggcattgataggacattaaattgtatgattggacagatgaagcatattttggctgcagaac

SEQ ID NO: 56561 - DNA, 120 bp, Artificial Sequence
  ENSG00000070367_16 (sequence is synthesized)
agaagaaaacagattttaagccagaagatgaaaacaatgttttgattcaatatactaatgcctgtgtaaaagtctgtgcttacgtaagaaaacaagtggagaagattaaaaattccatgg

SEQ ID NO: 56562 - DNA, 120 bp, Artificial Sequence
  ENSG00000070367_17 (sequence is synthesized)
atgggaagaatgtggatacagttttgatggaacttggagtacgttttcatcgacttatctatgagcatcttcaacaatattcctacagttgtatgggtggcatgttggccatttgtgatg

SEQ ID NO: 56563 - DNA, 120 bp, Artificial Sequence
  ENSG00000070367_18 (sequence is synthesized)
tagccgaatataggaagtgtgccaaagacttcaagattccaatggtattacatctttttgatactctgcatgctctttgcaatcttctggtagttgccccagataatttaaagcaagtct

SEQ ID NO: 56564 - DNA, 120 bp, Artificial Sequence
  ENSG00000070367_19 (sequence is synthesized)
gctcaggagaacaacttgctaatctggacaagaatatacttcactccttcgtacaacttcgtgctgattatagatctgcccgccttgctcgacacttcagctgagattgaatttacaaag

SEQ ID NO: 56565 - DNA, 120 bp, Artificial Sequence
  ENSG00000070367_20 (sequence is synthesized)
gaattcagtgtcagttcctttacagaggaatgtcttatacttcagcagccctcggttgatagaaagcacaggagataccttatgacacagccaacattttgtgaaacaatgactggaaca

SEQ ID NO: 56566 - DNA, 120 bp, Artificial Sequence
  ENSG00000070367_21 (sequence is synthesized)
aaacagcagccatacttacctttgaggttttatttaaagtttggataccactagctatattttgcttttttcccctcacattgaattttaattccattcttgaatgtagaaatttcagat

SEQ ID NO: 56567 - DNA, 120 bp, Artificial Sequence
  ENSG00000070367_22 (sequence is synthesized)
tctctaaaactacatgtcactgtttttatcctagaaaatgttgctgtcagaaggcaaaggaaatgttaccagtgttttcggttcttgtacttttaacatattccatttagaaattttgcc

SEQ ID NO: 56568 - DNA, 120 bp, Artificial Sequence
  ENSG00000070367_23 (sequence is synthesized)
attctgttttccattaataataggtgaaatacaggaaaactacatttgttattcctcagtttttaatgaccttttcagcatcaattgttaatcagattattttaggttttcgtaaataat

SEQ ID NO: 56569 - DNA, 120 bp, Artificial Sequence
  ENSG00000070367_24 (sequence is synthesized)
ttttttgcctctttcaaaaggttaacaattaagcatactttctgcagttggttgattggatttttttctgaggtacagcattaatactagtccaaaaaatgtcataaactgaactaaaat

SEQ ID NO: 56570 - DNA, 120 bp, Artificial Sequence
  ENSG00000070367_25 (sequence is synthesized)
gatgaactattttatgtagacattaggagtggatcggaatacttctgctttctgggtaaaacttaaaagtttactatttcttatttggtaaatagattttaagccaattctagtaagaaa

SEQ ID NO: 56571 - DNA, 120 bp, Artificial Sequence
  ENSG00000070367_26 (sequence is synthesized)
ttaataaaactaccttattttgtatttcacttaaggtggaggaccttaactaaaggaccatatttattcattattttaatattataagggaagtaaaaaaaagtgaggtatagtctaaat

SEQ ID NO: 56572 - DNA, 120 bp, Artificial Sequence
  ENSG00000070367_27 (sequence is synthesized)
ggtgcatataggaaatactgacagtgtttagcaacatgcagccctttgagatttctgtcgtaatgctaaacttgaataagatggaatggctgaacatgtggttagtcttttattttaaga

SEQ ID NO: 56573 - DNA, 120 bp, Artificial Sequence
  ENSG00000070367_28 (sequence is synthesized)
agaattgagaattgatagatttggagatgagctttgcaaaggctgtttgcttttcatgtctataggtctgtcattgtcctttttcaaagcatttctgaagttattcctacttggatatag

SEQ ID NO: 56574 - DNA, 120 bp, Artificial Sequence
  ENSG00000070367_29 (sequence is synthesized)
ttaatggaattggcttaatttgatgacataataaatcacttataaaattttaaatatcaagtgaaaatttagaaaggccattactattctataaaccttataaacttgctctgggagaat

SEQ ID NO: 56575 - DNA, 120 bp, Artificial Sequence
  ENSG00000070367_30 (sequence is synthesized)
gcattctaaattatatatagtgtttcagctcccattgtggtgttcatagtcttctaggaacagataaacttaagtattcaattcactcttggcattttttctttaatataggctttttag

SEQ ID NO: 56576 - DNA, 120 bp, Artificial Sequence
  ENSG00000070367_31 (sequence is synthesized)
cctatttttggaaaactgcttttcttctgagaaccttattctgaatgtcatcaactttaccaaaccttctaagtccagagctaacttagtactgtttaagttactattgactgaattttc

SEQ ID NO: 56577 - DNA, 120 bp, Artificial Sequence
  ENSG00000070367_32 (sequence is synthesized)
ttcattttctgtttagtccagtgttaccaaggtaagctggggaatgaagtataccaacttctttcagagcattttaggacattatggcagctttagaaggctgtcttgtttctagccaag

SEQ ID NO: 56578 - DNA, 120 bp, Artificial Sequence
  ENSG00000070367_33 (sequence is synthesized)
ggagagccagcgcaggttttggatactagagaaagtcatttgcttgtactattgccattttagaaagctctgatgtgaattcaaattttacctctgttacttaaagccaacaattttaag

SEQ ID NO: 56579 - DNA, 120 bp, Artificial Sequence
  ENSG00000070367_34 (sequence is synthesized)
gcagtagttttactggccatttaagctctttgtacagtgtcaatttgtaaaaaagaaaaaacgaaaaaaaatctcaaataaaacatgagataacattttaagacttccaaatcagagaag

SEQ ID NO: 56580 - DNA, 120 bp, Artificial Sequence
  ENSG00000070367_35 (sequence is synthesized)
tgcttcaaattattttgtttggattaatttttaaaatgtaaagcatatacttgttgcttagttattttgtttattattttcatgtttgagttctgtgcaatattttctattatgtccgtt

SEQ ID NO: 56581 - DNA, 120 bp, Artificial Sequence
  ENSG00000070367_36 (sequence is synthesized)
gataggacagtgacaaaattcgtaagtgaatacttaatttaaaagtgttaacattaatgctcaataaacaaattccctgcagttgttttttttatttcactctttttatattttagagcc

SEQ ID NO: 56582 - DNA, 120 bp, Artificial Sequence
  ENSG00000070367_37 (sequence is synthesized)
atccatcctgaattttataaatgattttttatttaaaaatttgagatttttaaaatttttcacagcacaggtcttctcattttcttttttagcaaaaaatacttgactatataaacaaga

SEQ ID NO: 56583 - DNA, 120 bp, Artificial Sequence
  ENSG00000070367_38 (sequence is synthesized)
ctagaaatttatcctaaacagatggtctttctctgagggaaaaaaaaaaatgtgtcatgtgaggcaatatgcattctttgtattctgattttttaagtgttttcatatttatagccatca

SEQ ID NO: 56584 - DNA, 120 bp, Artificial Sequence
  ENSG00000070367_39 (sequence is synthesized)
caaaattttgcccaaagtgtatggctcagaagagatgatcaataactaaaatgtttttcgttttgcacatggtaaaattttaggtagagagtggagctttgtataattggtaactttaac

SEQ ID NO: 56585 - DNA, 120 bp, Artificial Sequence
  ENSG00000070367_40 (sequence is synthesized)
caacatttacgtaagtacggtctttgcagtattacacaataccgcatgagctaatatgcagtatttaggtaatgcattgaatgaagttgaaaatatgctcttaacacactgtgcattgtt

SEQ ID NO: 56586 - DNA, 120 bp, Artificial Sequence
  ENSG00000070367_41 (sequence is synthesized)
tttctaaaattgagaaatatctgaaatacagaatacgaatttaataaaggaagcctaccttatgtaaattatgatgttgaaaatgacagtcaaccagagtagatgaagtgtccttatgaa

SEQ ID NO: 56587 - DNA, 120 bp, Artificial Sequence
  ENSG00000070367_42 (sequence is synthesized)
gaattattaaatagtagctggatggatctttagatggatgaccacctgaccattccaggacaatttttggtcccattttgaggattgccatagttgcaagtccttaggatcttccttgtt

SEQ ID NO: 56588 - DNA, 120 bp, Artificial Sequence
  ENSG00000070367_43 (sequence is synthesized)
ggttaatttatattacattgtagatcattcttttttcccccctctttcacttctaaatattttgctttctaaatactagccttctggttcacagtgaaataatttaattatcaatcagta

SEQ ID NO: 56589 - DNA, 120 bp, Artificial Sequence
  ENSG00000070367_44 (sequence is synthesized)
gattgattccaagtggagaattcactgcttccctaaaatgcgtttttcttacctgtaatggtgaatatttacaaggatctggataaagagattttgatttttgaaatgccacaaaacccc

SEQ ID NO: 56590 - DNA, 120 bp, Artificial Sequence
  ENSG00000070367_45 (sequence is synthesized)
ttaaagtggtcaagtacctaaggtagtggctaaggcatgcttgaactgtgtttgagagacagcagttcagtcagtacataatttgttggtgactaacaaagctcacatctgggagattaa

SEQ ID NO: 56591 - DNA, 120 bp, Artificial Sequence
  ENSG00000070367_46 (sequence is synthesized)
ctttttttaacgcaaaaatattctgcacattacccatatattgttgaattttacatacaaagcattttgtgctttcattcaattagtttaactatattcagtttctgtattatttctctc

SEQ ID NO: 56592 - DNA, 120 bp, Artificial Sequence
  ENSG00000070367_47 (sequence is synthesized)
tgatctatcctgtaattattctatactttagaagaaaagatcagttcatattgttagactgaataattctacatgaagttaaaagttagcaatttaaaaaattttgctgcataataaaga

SEQ ID NO: 56593 - DNA, 120 bp, Artificial Sequence
  ENSG00000070367_48 (sequence is synthesized)
taattatagttacatgtattgatttaagtctcacacactgtgctaataagtcctttgcacatattattggattctagagcaaccctaggatttgggtactattatttccatttgacagat

SEQ ID NO: 56594 - DNA, 120 bp, Artificial Sequence
  ENSG00000070367_49 (sequence is synthesized)
gaaaaacctaatgcatagaaagataagtagaccagtcaaggtctacagctagtaaaatgctcagattgaaacctaaatcttttctcactcacttttaggttctatatgctattctcctta

SEQ ID NO: 56595 - DNA, 120 bp, Artificial Sequence
  ENSG00000070367_50 (sequence is synthesized)
cgtaacgttaaatagatcctttagtttgataggttcattagttttgcttaatcgttgcttccaatatgattcttattgtagtatttatattacaaagttggcatacagggtcaatatcta

SEQ ID NO: 56596 - DNA, 120 bp, Artificial Sequence
  ENSG00000070367_51 (sequence is synthesized)
actgttgtgtttttcttaatatgttcaatgtatggtcatactttttaaatttgattttttaaatattataagtggtcatgaaattttaatgttaagtttgtacctaatagaaatatgtct

SEQ ID NO: 56597 - DNA, 120 bp, Artificial Sequence
  ENSG00000070367_52 (sequence is synthesized)
gtctatcacaaatctttattggtattattttatatacttttccagcttgataattttcacaatagaaagagaccaaatattttgtactatattttgtgacatagaagtaaatgacaactc

SEQ ID NO: 56598 - DNA, 120 bp, Artificial Sequence
  ENSG00000070367_53 (sequence is synthesized)
taccttggaagatatgaagaaatcagtgtttttatgttcaaaaactattttaaatgtcataggcttgccaattgtgttaactatttagtacattggtagtttttaaatgactaatgctgg

SEQ ID NO: 56599 - DNA, 120 bp, Artificial Sequence
  ENSG00000070367_54 (sequence is synthesized)
agtgaaaatgtaaggcaaaatatttagtatattaacagtagatagtcattttcatgtaatcagaattgcatgttaagggttttaaaagctgtcataactcttaccttttatttctaccag

SEQ ID NO: 56600 - DNA, 120 bp, Artificial Sequence
  ENSG00000070367_55 (sequence is synthesized)
tgatcaatcatttctctttacaaatttagggaggaaacaactgttcaaatgtataggggacagaaacctgacatttagagaacagaaattttaattgccaaattaaagcagctaggctgc

SEQ ID NO: 56601 - DNA, 120 bp, Artificial Sequence
  ENSG00000070367_56 (sequence is synthesized)
ccctgggcttaacaaaattcctatttttgaactagacccgaggtattttatcattattatttgataggtaccattaacctttgttttgtgattatcgacttttggggggaaagatgagta

SEQ ID NO: 56602 - DNA, 120 bp, Artificial Sequence
  ENSG00000070367_57 (sequence is synthesized)
attaaacacactcgcccattttctaagtggtttagaaggttgcagtctgcctcaccatacaaagccagtttaaataggaatatatcacatcatacttcacatagcagtcaacctcagagg

SEQ ID NO: 56603 - DNA, 120 bp, Artificial Sequence
  ENSG00000070367_58 (sequence is synthesized)
aaagtcatttattcagaaggcatagattttgctagacagcagtgatgcattacaaatatataattatttgcactaatatttgagcaggtggaatggattagaacatggtcaacatcatgc

SEQ ID NO: 56604 - DNA, 120 bp, Artificial Sequence
  ENSG00000070367_59 (sequence is synthesized)
tgctgataacatgtatttttctatattaatatgtactgtgcaacatgtattaaaattgtcaataattcattttagccaagatactaatatttatattactgtgtttaagagacagtatcc

SEQ ID NO: 56605 - DNA, 120 bp, Artificial Sequence
  ENSG00000070367_60 (sequence is synthesized)
aactgagccacttttaatttaaaagtctgaaactggaattaagtttactttcaaaaatcacttaaattactttataatcagtgaaaggtcagtaaaatgtagaattataagtgcctagtg

SEQ ID NO: 56606 - DNA, 120 bp, Artificial Sequence
  ENSG00000070367_61 (sequence is synthesized)
acttaataggaggaaatatggagggttaaggaaggaagtaggaacctggaataagaaagctaagtttcatttatagttccaatgagtgactttctttgttttcaccactgggaatcttaa

SEQ ID NO: 56607 - DNA, 120 bp, Artificial Sequence
  ENSG00000070367_62 (sequence is synthesized)
atgaagaaagtgtcgtatcccttccagttatctttatgttaataaactaagtgaagtttggatagaactaacaaaggaattagtctccattggtggacttccagagttttgagattaaac

SEQ ID NO: 56608 - DNA, 120 bp, Artificial Sequence
  ENSG00000070367_63 (sequence is synthesized)
tttgagaggtgagaagccttcctgatgcccctgtaatcttaaattggcaggtgcctctaagtgaggccatccctctttgcctgcctatcattttaatctttatactgtaactggttcctt

SEQ ID NO: 56609 - DNA, 87 bp, Artificial Sequence
  ENSG00000070367_64 (sequence is synthesized)
ctgcctatcattttaatctttatactgtaactggttcctttcaactctggccttttattgtagcacttttatcaagtctgcagcaca

SEQ ID NO: 56610 - DNA, 120 bp, Artificial Sequence
  ENSG00000070367_65 (sequence is synthesized)
gagtccctgtttttagaaaaataaataacctttaggtttttgctatagaaaatatccaaatagagtctggacaatgctggatgtaaagaaaactgtgaagctacctctaagcatattgtt

SEQ ID NO: 56611 - DNA, 120 bp, Artificial Sequence
  ENSG00000070367_66 (sequence is synthesized)
tgtgaatactgtgtaccatttagaggataacatgggggattcacatgaagttatgtgaaaatattttataaggaataatacctaagtgcctctcttaagttctccagtagaatgtatttt

SEQ ID NO: 56612 - DNA, 120 bp, Artificial Sequence
  ENSG00000070367_67 (sequence is synthesized)
caatttttgccacaagggggagaagttatttttatagtaatatgtacatttttttattttaaaaatagaattcacacaactttacagcatctatgaacattttgctatcccaattatgtg

SEQ ID NO: 56613 - DNA, 120 bp, Artificial Sequence
  ENSG00000070367_68 (sequence is synthesized)
tgtgtgtgcatgtgtgtaaacaagattctgaaagtcttgcatgagaaaaatttcaaaggaaattaataacaaaaccaaaacagttttgaagaacatgtgcacagtggacacaggaattga

SEQ ID NO: 56614 - DNA, 120 bp, Artificial Sequence
  ENSG00000070367_69 (sequence is synthesized)
acaaagtttaccatgattaacattatgttttcttagttatatatcacattgaattcctttatcaactctaataagaatctactgattagtgttctacattctgctttttaaagaaaaatt

SEQ ID NO: 56615 - DNA, 120 bp, Artificial Sequence
  ENSG00000070367_70 (sequence is synthesized)
tttgaaacaatcagacttaacagaagggttgtaaatactgtacaaataaaatttttcccttttgagaataagtcgctgtcatgatgctgcaccaccctccaatacttttgtatttccaag

SEQ ID NO: 56616 - DNA, 120 bp, Artificial Sequence
  ENSG00000070367_71 (sequence is synthesized)
aagaaagaatgcttcagtataactacaatacatgaaaattgggaagttaacattgacatattactactatctaatcctcagacaccaatcattttactagctgtcctaattccttttaag

SEQ ID NO: 56617 - DNA, 120 bp, Artificial Sequence
  ENSG00000070367_72 (sequence is synthesized)
gatctcagttcaaaatcatgtattgctttaggttgtagtggctctagtctcattcattctgacacagttccacagtctttccttgacttttttgactctggacatttttatagattatag

SEQ ID NO: 56618 - DNA, 120 bp, Artificial Sequence
  ENSG00000070367_73 (sequence is synthesized)
ggtagttactttgtaaaacacccctacatttggatttctgtttccacgtaattagattctgtttgtgctttttggcagacataccacggatgcaactctgtgttattgttgcatcctatc

SEQ ID NO: 56619 - DNA, 120 bp, Artificial Sequence
  ENSG00000070367_74 (sequence is synthesized)
acatagtacacaatttcaatttgccccatttctgatgatgttcatttttatcactttcttaaggtactatttaccaggcttctccactttaaaactattacttttccctttgtaaatatt

SEQ ID NO: 56620 - DNA, 120 bp, Artificial Sequence
  ENSG00000070367_75 (sequence is synthesized)
aactattacttttccctttgtaaatattttggaggtagatatatattaatagatacagacatatataggtcccccttatttatttatttgcagacagagtctcgctctgttgcccaagct

SEQ ID NO: 56621 - DNA, 72 bp, Artificial Sequence
  ENSG00000070367_76 (sequence is synthesized)
caatttttctatttgtagtagaaatggggttttgccgtgttggtcaggctggtgtcaaactcctagccttaa

SEQ ID NO: 56622 - DNA, 90 bp, Artificial Sequence
  ENSG00000070367_77 (sequence is synthesized)
tgcctggccaatttttctatttgtagtagaaatggggttttgccgtgttggtcaggctggtgtcaaactcctagccttacctgggattac

SEQ ID NO: 56623 - DNA, 120 bp, Artificial Sequence
  ENSG00000070367_78 (sequence is synthesized)
tatatatataatattaatatatataaaaatatatgtatatgtgtggtgtgtgtgtatatatatacatatgtgtgtgtatatacacgtgtgtttatacacgtgtgtgtacatatacacgcg

SEQ ID NO: 56624 - DNA, 120 bp, Artificial Sequence
  ENSG00000070367_79 (sequence is synthesized)
tacacgcgtgtgtatatatacacacgtgtgtgtgtgtatatatatatactaatcagaattctcttgatatcactatgtattcatagttttctgttcaactaattataatctgtcatttta

SEQ ID NO: 56625 - DNA, 120 bp, Artificial Sequence
  ENSG00000070367_80 (sequence is synthesized)
ccaaatctcaaattatcccaaatttggtcagaagtagcctcttcaggttgtctcctgtgtcgttttggcatgttcccatcatttttacagcaatttattctgggcacaacaggattttcc

SEQ ID NO: 56626 - DNA, 120 bp, Artificial Sequence
  ENSG00000070367_81 (sequence is synthesized)
aaggtcatcttgtacttgccttgccccagctctggaatcagccattcctccaccttttagtgaaattggcagttagaaatcaagatttgtgcatgagatgtgcttattattattgagatg

SEQ ID NO: 56627 - DNA, 120 bp, Artificial Sequence
  ENSG00000070367_82 (sequence is synthesized)
tctcaccctactctttctcaatagataatgctagggggctttatgtgtgcatacacacacacacactcacgcatattttaaatatacacccacacccatgcgcccctctgcaacatcttc

SEQ ID NO: 56628 - DNA, 120 bp, Artificial Sequence
  ENSG00000070367_83 (sequence is synthesized)
ctcacctcacttgagcttccatactccatactgggcttcccctctctctggaggagaccatcctcatctcacatagctcttgaagttttggctttaggaccaaattgagggaataagaat

SEQ ID NO: 56629 - DNA, 120 bp, Artificial Sequence
  ENSG00000070367_84 (sequence is synthesized)
ggtcattgcagaaatcctgtaaaaattttaaaatattaaatttaaaaattacaattttatcacgcagaaacaactatatttttggtggaagttttttttttttttttttaatgtagtgag

SEQ ID NO: 56630 - DNA, 120 bp, Artificial Sequence
  ENSG00000070367_85 (sequence is synthesized)
caaattagtaaagctgaattgaggagggggtaaagtgttatgcccaagacacagaacttacattttgaaagaattaaatttgaaatgcataccgtatgtttttctattatacaatctcct

SEQ ID NO: 56631 - DNA, 120 bp, Artificial Sequence
  ENSG00000070367_86 (sequence is synthesized)
tgctactgtaattgctatttaataagagtgcatcagagaaactgtatgaatggaaacctgaccattaagcactgaataccaataggatatttttactaataaagttcaaaggaaaaatga

SEQ ID NO: 56632 - DNA, 120 bp, Artificial Sequence
  ENSG00000070367_87 (sequence is synthesized)
gcagacatcattcagaagttgcacctaattgcccaagagttaccttttgataggcaagttcatttctcaagagctaatttgaatatgtggtataatttataaaataaaatagtatctttt

SEQ ID NO: 56633 - DNA, 120 bp, Artificial Sequence
  ENSG00000070367_88 (sequence is synthesized)
caaatgacaatttcagctctaaatcttctgtaggaatttgtcttgtgcttttgtaaatgtcagtgttactcttagagattgtctcagaagcttcatatggagtcttgtggggtttttttt

SEQ ID NO: 56634 - DNA, 120 bp, Artificial Sequence
  ENSG00000070367_89 (sequence is synthesized)
ttccttgacttttcccaaccctattactcttcttcagtgtcttcattttgggagaaggtttttccaaagttaccgtaatgaggaagtccatctcaacaacaacactgttatgaccctatc

SEQ ID NO: 56635 - DNA, 120 bp, Artificial Sequence
  ENSG00000070367_90 (sequence is synthesized)
ttcagcaatgggaaatagaaaattagagggaaagtccacaaggacaaaacaaaagagggtgaacagacagtagatctttcagtactctgttttgggtcccatgtgatgaatggcattaga

SEQ ID NO: 56636 - DNA, 120 bp, Artificial Sequence
  ENSG00000070367_91 (sequence is synthesized)
catacttgaggccaatctgccactgtcgccatttctggactagttaattgcctcacaagttcttttcctaggaatttataacagttctcaaaaccgtaaagttgttcgtaatatttcact

SEQ ID NO: 56637 - DNA, 120 bp, Artificial Sequence
  ENSG00000070367_92 (sequence is synthesized)
gtatttatatgtaaccctgtagagttgatctctgcatcataagtactctcccagagtttaagaaatggtggcttaacataagtcatgaaagtcacgttgtaaaaatttgtattccttaat

SEQ ID NO: 56638 - DNA, 120 bp, Artificial Sequence
  ENSG00000070367_93 (sequence is synthesized)
ggatttacagaaaagttgcaaagatagtacagatggttctcgtatctcctgcacccagtttcccatttggttagcatcttacattgccataggatgtttatcacaactaacaaacctcat

SEQ ID NO: 56639 - DNA, 120 bp, Artificial Sequence
  ENSG00000070367_94 (sequence is synthesized)
gtgcttggggccgaggtgggctgggcggccggtcggcagagaggggaagccgggtgtcccaagggaggagggttgcttttgtttgtgggggcaagagggaaagtctggaaggttcgggtg

SEQ ID NO: 56640 - DNA, 120 bp, Artificial Sequence
  ENSG00000070367_95 (sequence is synthesized)
acatggtattggctgctctacaatcttgaaagaaggtaatttagctcactttcttcccctcaggggaaaaaaaatcaaaatgtgcaagaaaatggacattcttatggatcttgtatgtac

SEQ ID NO: 56641 - DNA, 120 bp, Artificial Sequence
  ENSG00000070367_96 (sequence is synthesized)
atagcaacattgtccactcatattgaatacagtcttcctgaattattccagatttactccatagaatatttcagatagtggaatgtaaaagctaagtattattgacactcactttgaatt

SEQ ID NO: 56642 - DNA, 120 bp, Artificial Sequence
  ENSG00000070367_97 (sequence is synthesized)
aagcaacacttttttttaatagaactctatagggttatagaatttataatttttagagttctttggaaaatagttatgtgtgtacagataattcctctaaagaaaaggtgtttttgaaaa

SEQ ID NO: 56643 - DNA, 120 bp, Artificial Sequence
  ENSG00000070367_98 (sequence is synthesized)
attttgatagtattgtcattctctagaagtggggatgtaatgtacagcatttcacacatttactgtctaagaaaccctgttttggagtaatgcctatagacatctgaaggaacactagtg

SEQ ID NO: 56644 - DNA, 120 bp, Artificial Sequence
  ENSG00000070367_99 (sequence is synthesized)
ttacctggaactcagtttgggagatgctgccttaaggaattgactctattgtttgtactctcagttttgtttttttgatgcacctcacagagcagaataggccaatttaacagaaaaggt

SEQ ID NO: 56645 - DNA, 120 bp, Artificial Sequence
  ENSG00000070367_100 (sequence is synthesized)
gtaaatatgagaagtggtaaaatgtaaaaacctgttttaaaatattttatgattggtttgttttctgtaattgcctttttgattggattgtaagtcagaaaggttcaaaactgtggagtg

SEQ ID NO: 56646 - DNA, 120 bp, Artificial Sequence
  ENSG00000070367_101 (sequence is synthesized)
aattttaaaagaaaaatatcttgagaagttgtagaatttaatatttacctaattaacagaatgttaacctttttcttttagagttttgtgaaagagcagttagaagaatgtaggaagtcc

SEQ ID NO: 56647 - DNA, 120 bp, Artificial Sequence
  ENSG00000070367_102 (sequence is synthesized)
gatgcagagcaatatctcaaaaatctctatgatctgtatacaagtgtcttcattttgggagaaggtttttccaaagttaccgtaatgaggaagtccatctcaacaacaacactgttatga

SEQ ID NO: 56648 - DNA, 120 bp, Artificial Sequence
  ENSG00000070371_0 (sequence is synthesized)
gccaccggtcagcccgcgcgaggggtcggcgttcattcctgccgctgccgccgccgccgccgaggtcccgcaccagccatggcgcagatcctccctgttcgctttcaggagcacttccag

SEQ ID NO: 56649 - DNA, 120 bp, Artificial Sequence
  ENSG00000070371_1 (sequence is synthesized)
ctccaaaaccttggaattaatccagctaacattggattcagcacactgaccatggaatctgacaagttcatatgtatccgagagaaagttggtgagcaggcacaggtcacgatcattgac

SEQ ID NO: 56650 - DNA, 120 bp, Artificial Sequence
  ENSG00000070371_2 (sequence is synthesized)
atgagtgacccaatggctccgatccgacggcctatctctgcagagagtgccatcatgaatccagcctctaaggtgatagctctgaaagctgggaagacacttcagatctttaatattgag

SEQ ID NO: 56651 - DNA, 120 bp, Artificial Sequence
  ENSG00000070371_3 (sequence is synthesized)
atgaagagtaaaatgaaggctcatactatggcagaagaagtgattttctggaaatgggtttctgtgaacactgttgccttggtgaccgagaccgcggtctaccactggagcatggaaggt

SEQ ID NO: 56652 - DNA, 120 bp, Artificial Sequence
  ENSG00000070371_4 (sequence is synthesized)
gactcccagcccatgaagatgtttgatagacataccagtctggtgggctgccaggtgattcactaccggactgatgagtaccagaagtggctgctgctcgtaggcatctcggctcagcaa

SEQ ID NO: 56653 - DNA, 120 bp, Artificial Sequence
  ENSG00000070371_5 (sequence is synthesized)
aaccgtgtggttggagcaatgcagctctactctgtggataggaaggtttcacaacccatagaaggccatgctgcggcttttgcagagttcaagatggaggggaatgccaagcctgccacc

SEQ ID NO: 56654 - DNA, 120 bp, Artificial Sequence
  ENSG00000070371_6 (sequence is synthesized)
cttttctgctttgctgtacgtaatcccacaggaggcaagttgcacatcattgaagttggacagcctgcagcgggaaaccaaccttttgtaaagaaagcagtagatgtgttttttcctcca

SEQ ID NO: 56655 - DNA, 120 bp, Artificial Sequence
  ENSG00000070371_7 (sequence is synthesized)
gaggcacagaatgattttccagtggctatgcagattggagctaaacatggtgttatttacttgatcacaaagtatggctatcttcatctgtacgacctagagtctggcgtgtgcatctgc

SEQ ID NO: 56656 - DNA, 120 bp, Artificial Sequence
  ENSG00000070371_8 (sequence is synthesized)
atgaaccgtattagtgctgacacaatatttgtcactgctccacacaaaccaacctctggaattattggtgtcaacaaaaagggacaggtactgtcagtttgtgttgaggaagataacatt

SEQ ID NO: 56657 - DNA, 120 bp, Artificial Sequence
  ENSG00000070371_9 (sequence is synthesized)
gtgaattatgcaaccaacgtgcttcagaatccagaccttggtctgcgtttggccgttcgtagtaacctggctggggcagagaagttgtttgtgagaaaattcaataccctctttgcacag

SEQ ID NO: 56658 - DNA, 120 bp, Artificial Sequence
  ENSG00000070371_10 (sequence is synthesized)
ggcagctatgctgaagccgccaaagttgcagcgtctgcaccaaagggaatcctgcgtaccagagagacggtccagaaattccagagtatacccgctcagtctggccaggcttctccattg

SEQ ID NO: 56659 - DNA, 120 bp, Artificial Sequence
  ENSG00000070371_11 (sequence is synthesized)
ctgcagtacttcggaatcctgctcgaccagggtcagctcaataaacttgaatccttagaactttgccatctggttcttcagcaggggcgtaagcaactcctagagaagtggctgaaagaa

SEQ ID NO: 56660 - DNA, 120 bp, Artificial Sequence
  ENSG00000070371_12 (sequence is synthesized)
gataagctggagtgctcagaggagctcggagacttggtcaaaaccactgaccccatgctcgctctgagtgtgtaccttcgggcaaatgtgccaagcaaagtgatccagtgttttgcagaa

SEQ ID NO: 56661 - DNA, 120 bp, Artificial Sequence
  ENSG00000070371_13 (sequence is synthesized)
acaggccaattccagaaaattgtgctctatgccaaaaaggttgggtacaccccagactggatctttctgctgaggggtgtaatgaagatcagtccggaacagggcctgcagttttctcga

SEQ ID NO: 56662 - DNA, 120 bp, Artificial Sequence
  ENSG00000070371_14 (sequence is synthesized)
atgctagtgcaggacgaggagccgctggccaacattagccagattgtggacattttcatggaaaacagtttaattcagcagtgtacttccttcttattggatgccttgaagaataatcgc

SEQ ID NO: 56663 - DNA, 120 bp, Artificial Sequence
  ENSG00000070371_15 (sequence is synthesized)
ccagctgagggactcctgcagacatggctgttggagatgaaccttgttcatgcaccccaggttgcagatgccatccttggaaataaaatgtttactcattacgaccgggcccacattgcc

SEQ ID NO: 56664 - DNA, 120 bp, Artificial Sequence
  ENSG00000070371_16 (sequence is synthesized)
cagctctgtgagaaggcaggcctcctgcagcaagcactggagcactacaccgacctctatgacatcaagagggctgtggtccacactcacctcctcaatcccgagtggcttgtcaatttc

SEQ ID NO: 56665 - DNA, 120 bp, Artificial Sequence
  ENSG00000070371_17 (sequence is synthesized)
tttggctccttatcggtggaggattctgtggagtgtctgcatgccatgctgtctgctaacatcagacagaaccttcagctgtgtgtgcaggtggcctctaagtaccacgagcagctgggc

SEQ ID NO: 56666 - DNA, 120 bp, Artificial Sequence
  ENSG00000070371_18 (sequence is synthesized)
acgcaggccctggtggagctctttgaatccttcaagagttacaaaggcctcttctacttcctgggctcaatcgtgaacttcagccaagacccagatgtgcatctgaaatacattcaggct

SEQ ID NO: 56667 - DNA, 120 bp, Artificial Sequence
  ENSG00000070371_19 (sequence is synthesized)
gcctgtaagacagggcagatcaaggaggtggagaggatatgccgagagagcagctgctacaacccagagcgtgtgaagaacttcctgaaggaggccaagctcacagaccagcttcccctc

SEQ ID NO: 56668 - DNA, 120 bp, Artificial Sequence
  ENSG00000070371_20 (sequence is synthesized)
atcatcgtgtgtgatcgttttggctttgtccatgaccttgtcctatatttataccgcaacaacctgcagaggtacattgagatctacgtgcagaaggtcaaccctagccggaccccagct

SEQ ID NO: 56669 - DNA, 120 bp, Artificial Sequence
  ENSG00000070371_21 (sequence is synthesized)
gtgattggagggctgcttgatgtggattgttctgaggaagtgattaaacacttaatcatggcagtgagaggacagttctctactgatgagttggtggctgaagtagaaaaaagaaatagg

SEQ ID NO: 56670 - DNA, 120 bp, Artificial Sequence
  ENSG00000070371_22 (sequence is synthesized)
tgagagagaatgcctactatgacagcagcgtggtgggccgctactgtgagaagcgagacccccatctggcctgtgttgcctatgagcgggggcagtgtgaccttgagctcatcaaggtgt

SEQ ID NO: 56671 - DNA, 120 bp, Artificial Sequence
  ENSG00000070371_23 (sequence is synthesized)
gcaatgagaattctctgttcaaaagcgaggcccgctacctggtatgcagaaaggatccggagctctgggctcacgtccttgaggagaccaacccatccaggagacagctaattgaccagg

SEQ ID NO: 56672 - DNA, 120 bp, Artificial Sequence
  ENSG00000070371_24 (sequence is synthesized)
tggtacagacagcattgtcagaaacacgggatcctgaagagatttcggtcactgtcaaagcctttatgacagccgacctgcctaatgaactgattgaactgctggagaagatagttctgg

SEQ ID NO: 56673 - DNA, 120 bp, Artificial Sequence
  ENSG00000070371_25 (sequence is synthesized)
ataactctgtcttcagcgagcacaggaatctacagaatctgttgatcctgactgccatcaaggcagaccgcacacgggtcatggagtacatcagccgcctggacaactatgacgcactgg

SEQ ID NO: 56674 - DNA, 120 bp, Artificial Sequence
  ENSG00000070371_26 (sequence is synthesized)
acatcgcgagcatcgctgtcagcagcgcactgtatgaggaggccttcaccgttttccacaagtttgatatgaatgcctcagcaatccaggtcctgatcgagcacattggaaacctggacc

SEQ ID NO: 56675 - DNA, 120 bp, Artificial Sequence
  ENSG00000070371_27 (sequence is synthesized)
gggcatatgagtttgcggagagatgcaatgagcctgctgtgtggagtcagctggcccaagcccagctccagaaagatttggtgaaggaagccatcaactcctatatcagaggggacgacc

SEQ ID NO: 56676 - DNA, 120 bp, Artificial Sequence
  ENSG00000070371_28 (sequence is synthesized)
cttcctcttacctggaagttgttcagtcagccagcaggagcaacaactgggaggatctagttaaatttctgcagatggccaggaaaaagggccgtgagtcctatatagagactgaactta

SEQ ID NO: 56677 - DNA, 120 bp, Artificial Sequence
  ENSG00000070371_29 (sequence is synthesized)
tttttgccttggctaaaaccagccgtgtttctgagctagaagattttattaatggacccaacaatgcccacatccagcaggttggagaccgctgttacgaggagggaatgtacgaggctg

SEQ ID NO: 56678 - DNA, 120 bp, Artificial Sequence
  ENSG00000070371_30 (sequence is synthesized)
ccaagctgctctatagcaatgtttctaactttgcccgcctggcttccaccttggttcacctcggtgagtatcaggcagcagtggacaacagccgcaaggccagcagcacccggacgtgga

SEQ ID NO: 56679 - DNA, 120 bp, Artificial Sequence
  ENSG00000070371_31 (sequence is synthesized)
aggaggtgtgctttgcctgcatggatggacaagagttccgcttcgcacagctgtgtggtcttcacatcgtcattcatgcagatgagctggaggagctgatgtgctattaccaggatcgtg

SEQ ID NO: 56680 - DNA, 120 bp, Artificial Sequence
  ENSG00000070371_32 (sequence is synthesized)
gctactttgaggagctgatcttgctgttggaagcggccctgggcctggagcgggcccacatgggcatgttcactgagctggccatcctctactccaaattcaagccacagaagatgctgg

SEQ ID NO: 56681 - DNA, 120 bp, Artificial Sequence
  ENSG00000070371_33 (sequence is synthesized)
agcatctggagcttttctggtcccgtgtcaacatcccaaaggtgctgagggctgcagagcaggcacacctgtgggctgagctggtgttcctctatgacaagtacgaggagtatgacaatg

SEQ ID NO: 56682 - DNA, 120 bp, Artificial Sequence
  ENSG00000070371_34 (sequence is synthesized)
ctgtgctcaccatgatgagccaccccactgaggcctggaaggagggtcagttcaaggacatcattaccaaggttgccaacgtcgagctctgttacagagccctgcagttctatttggatt

SEQ ID NO: 56683 - DNA, 120 bp, Artificial Sequence
  ENSG00000070371_35 (sequence is synthesized)
acaaaccactgctcatcaatgacctgctgctggtgctttcaccccggctggaccacacctggacagtcagtttcttttcaaaggcaggtcagctgcccctggtgaagccttacctgcggt

SEQ ID NO: 56684 - DNA, 120 bp, Artificial Sequence
  ENSG00000070371_36 (sequence is synthesized)
cagtccagagccacaacaacaagagtgtgaatgaggcactcaaccacctgctgacagaggaggaggactatcagggcttaagggcatctatcgatgcctatgacaactttgacaacatca

SEQ ID NO: 56685 - DNA, 120 bp, Artificial Sequence
  ENSG00000070371_37 (sequence is synthesized)
gcctggctcagcagctggagaagcatcagctgatggagttcaggtgcattgcggcctatctgtacaagggcaataactggtgggcccagagcgtggagctctgcaagaaggatcatctct

SEQ ID NO: 56686 - DNA, 120 bp, Artificial Sequence
  ENSG00000070371_38 (sequence is synthesized)
acaaggatgccatgcagcatgctgcagagtcgcgggatgctgagctggcccagaagttgctgcagtggttcctggaggaaggcaagagggagtgcttcgcagcttgtctcttcacctgct

SEQ ID NO: 56687 - DNA, 120 bp, Artificial Sequence
  ENSG00000070371_39 (sequence is synthesized)
atgacctgcttcgcccagacatggtgcttgagctggcctggaggcacaacctcgtggacttggccatgccctacttcatccaggtgatgagggagtacctgagcaaggtggacaaactgg

SEQ ID NO: 56688 - DNA, 120 bp, Artificial Sequence
  ENSG00000070371_40 (sequence is synthesized)
atgccttggagagtctgcgcaagcaagaggagcatgtgacagagcctgcccctctcgtgtttgattttgatgggcatgaatgagacccagctgattgcactaagccctgccgtgggccca

SEQ ID NO: 56689 - DNA, 120 bp, Artificial Sequence
  ENSG00000070371_41 (sequence is synthesized)
gcccctgccagcttcccctatggatatgcctctgctcccaacttcgccagcctccaatgtacaacttccgcgtgtagtgggcgttgtcaccacccaccctacctgcagagttactaactt

SEQ ID NO: 56690 - DNA, 120 bp, Artificial Sequence
  ENSG00000070371_42 (sequence is synthesized)
ctccaaggagcatgtcactccagcagcacaggggacgcaatgggaggcagggacacctggacaatatttatttttgctgaaacccaatgacggcaacctctgagccatcccagagcctgg

SEQ ID NO: 56691 - DNA, 120 bp, Artificial Sequence
  ENSG00000070371_43 (sequence is synthesized)
ggaggccagggtagaggctgacggcgcaagaccagctttagccgacaacagagactggactgtgggccctcctgctggagccaggccttcctcctgggcgcctccgactggctggagctg

SEQ ID NO: 56692 - DNA, 120 bp, Artificial Sequence
  ENSG00000070371_44 (sequence is synthesized)
ccccctccaggccagtttgaagactacatgaacacgtcttgtttggaggtaccggacctcataaaaggactctcagcctcttggcaatcataaatattaaagtcggtttatccaggcaaa

SEQ ID NO: 56693 - DNA, 120 bp, Artificial Sequence
  ENSG00000070371_45 (sequence is synthesized)
agatgaagcttcactcgcttgcctgctgctcacttgctgctatggggcgtgattcctaacaggccacagaccagcagcggtccgtggcatgggggttggggaccgctgctttagtgtgat

SEQ ID NO: 56694 - DNA, 120 bp, Artificial Sequence
  ENSG00000070371_46 (sequence is synthesized)
tctcttctttgttcggcatcccccttctcatataatagctcttgtctcttccctcaacctgtccatctgagaaatgcttagtacctgattgcttctgactgaagtgaaatggtcatgcag

SEQ ID NO: 56695 - DNA, 120 bp, Artificial Sequence
  ENSG00000070371_47 (sequence is synthesized)
ctttaggcagaacaggaaaccaaacaaaaatgtgtctgttttttggagctgactagatgttgcagagaatggaagtcctctcataacccctaggtcctgatcgagcacattggaaacctg

SEQ ID NO: 56696 - DNA, 120 bp, Artificial Sequence
  ENSG00000070371_48 (sequence is synthesized)
ctctgtgagaaggcaggcctcctgcagcaagcactggagcactacaccgacctctatgacatcaagagggctgtggtccacactcacctcctcaatcccgaggcctcttctacttcctgg

SEQ ID NO: 56697 - DNA, 120 bp, Artificial Sequence
  ENSG00000070371_49 (sequence is synthesized)
ctgactcgagctgggctccaggccgcaggagcgggacactgactgggagcttcctgggggctgcttctactggaagtcctctgggaaggcagtgagacagtccccaaggcccacagagga

SEQ ID NO: 56698 - DNA, 120 bp, Artificial Sequence
  ENSG00000070371_50 (sequence is synthesized)
ggaacagagcagggcccactttaggcacatgtggaagacaagtcagcaagggtaggctgggccggtggagggcacggcagggagacagatgagcgggcgtcacaggtcctcaaagcggag

SEQ ID NO: 56699 - DNA, 120 bp, Artificial Sequence
  ENSG00000070371_51 (sequence is synthesized)
acccaaaggcacctggagctctcacctgagggtcagaatcctggtgcctttgtaggaacagtgtgggtcaggaggcagcgatcgatgagcagcatgccagcgggggagacttctttccgg

SEQ ID NO: 56700 - DNA, 120 bp, Artificial Sequence
  ENSG00000070371_52 (sequence is synthesized)
agccagctcagcacatcgggtccatgcagatgtgggcactgggcgtcctcaggggtctcccaaacggaactcagaggtgtgtgctgcaggcgatggcaggcatgcagagctgggaccgcc

SEQ ID NO: 56701 - DNA, 120 bp, Artificial Sequence
  ENSG00000070371_53 (sequence is synthesized)
acagggtatccctggagagcacaggtcacagtcagtggatcatggccaactccaggtggagtggccctgggcaagtgactacatctgggtctcaggttcctggtctctgaatggggtact

SEQ ID NO: 56702 - DNA, 120 bp, Artificial Sequence
  ENSG00000070371_54 (sequence is synthesized)
aatagcccctgccatagaaggaatcaggtgatccagtgcctgctgtggagctagaaaatagagaatggccacagaaagtgcaggcttcttcaggactggtcaggtgcaggtgttattttg

SEQ ID NO: 56703 - DNA, 120 bp, Artificial Sequence
  ENSG00000070371_55 (sequence is synthesized)
tcaatgatattgtcttagacaaatacatttgcaaggatgaaaatagcagttaggggtttttgagccacttgaaagaaaaacacattgctgtttctagagcagtagccgtacccctcctaa

SEQ ID NO: 56704 - DNA, 120 bp, Artificial Sequence
  ENSG00000070371_56 (sequence is synthesized)
ctgctcccctggtgtcacacgctccatggacctgagtgcagcacctctgcagcagccccacaacccccaaactcccatcagtgccttcctcagagcagcctgtgcacgccctctgccctc

SEQ ID NO: 56705 - DNA, 120 bp, Artificial Sequence
  ENSG00000070371_57 (sequence is synthesized)
ggggctagagttcctgtctcccagggcacctgcgcctccgtgagccacctgtcccctccagagcctccggaggtggcatctccgtttcaccagtgggcagcagggcatagggaatggccc

SEQ ID NO: 56706 - DNA, 120 bp, Artificial Sequence
  ENSG00000070371_58 (sequence is synthesized)
agccatgggtccaggcttgctccacagcgcaggaagtccttggtggagtctagtgccactccctgccctccggcccagctgctgcaggcacaaagcctctgcctgcaggatgcccaagca

SEQ ID NO: 56707 - DNA, 120 bp, Artificial Sequence
  ENSG00000070371_59 (sequence is synthesized)
aggtaggtgccgggccggctgcagctccccggcccctgtgtggcatgacccaaccctggcagtgactctggccgcaggtcttaagggtgggcccctttgaggccaacccagattccccag

SEQ ID NO: 56708 - DNA, 120 bp, Artificial Sequence
  ENSG00000070371_60 (sequence is synthesized)
ccagccctggctgccttcaggagtggctgctttccttcatgctgaagtggttttctgcccaacgttaagcccctccagaaaatcatcatggggagtgcccactggcagcagccctcctgt

SEQ ID NO: 56709 - DNA, 120 bp, Artificial Sequence
  ENSG00000070371_61 (sequence is synthesized)
agactctggctgggcagctgtcccaatgtgcacactgctaggagcacaacaggcgtgctcatccccagccctggacttcaacaaggtgacagtgaggtggctggcaatcccagctccctg

SEQ ID NO: 56710 - DNA, 120 bp, Artificial Sequence
  ENSG00000070371_62 (sequence is synthesized)
aggagctcccagtggcgtctgggggtgcagctgttagcatacggttggtggtagctgccttttgctgaacacatagtaggagtattcacagatccactgaatccttctaacagctatagg

SEQ ID NO: 56711 - DNA, 120 bp, Artificial Sequence
  ENSG00000070371_63 (sequence is synthesized)
gaggatgactctctgcctcatcgaagtgacagtacttgattgtaaaactctccctgggtgttgaagtcctaggagtccctgctgggatctagctttagccactgtccagagacctgtgtc

SEQ ID NO: 56712 - DNA, 120 bp, Artificial Sequence
  ENSG00000070371_64 (sequence is synthesized)
agcagtgtcatctggtacagtttgttgtttctaacactggaaaagctacttccagtagcatctacttgcctatctaacctccttcaagccagatggagagcctcggaaggcactcatgct

SEQ ID NO: 56713 - DNA, 120 bp, Artificial Sequence
  ENSG00000070371_65 (sequence is synthesized)
gaagcatcactcagtggagcgagggaagggaggggcctcccaggtgagtgggaggtaggaaggaaacaggaaggcgggctcatgctgccagctttagcctggagggctgcctgccgcctg

SEQ ID NO: 56714 - DNA, 120 bp, Artificial Sequence
  ENSG00000070371_66 (sequence is synthesized)
ggacagtgtgaccccatcccatctgcatagcatgcctgagtgagactccctgatgactctcaagggttggggaggaagggacagccctggctacgtggcctgagattcgtgggctgccag

SEQ ID NO: 56715 - DNA, 120 bp, Artificial Sequence
  ENSG00000070371_67 (sequence is synthesized)
gggacatggactggttggattgacaagggccctggttcccccaccacagtggatggcaactccctacaggcggcacgtgtggtatgtggtttgtggtatgcagtgtgtggtgtgcggtgt

SEQ ID NO: 56716 - DNA, 120 bp, Artificial Sequence
  ENSG00000070371_68 (sequence is synthesized)
ctggtgcgtgcctgtggaagctgctgtcaccatgatgagcaggttttcccatccctcgggtgtctttcctgaaagtagtctgtgttctgagaaccagcacaaggaaagaaagtgcttgaa

SEQ ID NO: 56717 - DNA, 120 bp, Artificial Sequence
  ENSG00000070371_69 (sequence is synthesized)
tctcttcctggcagtagaggcccgtgggttagtgtcagaggaactcaggctcaccaggccctagggagtgtcattgctgtgggggtcaaagtgcttgtggggatcccccaggactttgag

SEQ ID NO: 56718 - DNA, 120 bp, Artificial Sequence
  ENSG00000070371_70 (sequence is synthesized)
gcgcacattccctttctgttgcggatgatggagttagcagccactatcacgttggtccacactgtggctgcacagccttggcccagggttcccagactccactggccctgggaggtggtg

SEQ ID NO: 56719 - DNA, 120 bp, Artificial Sequence
  ENSG00000070371_71 (sequence is synthesized)
gctgctggagcaccttctctgctgccacccacctattcctgctggggcagatgagacgcctgtcatggggagagttcaaggagaggagggggctggcaaggggtttcccagtcagtggca

SEQ ID NO: 56720 - DNA, 120 bp, Artificial Sequence
  ENSG00000070371_72 (sequence is synthesized)
tgggggtgtgagctgattgtcagcttgagctggtgctcagctgacaccacacagcagtgctgggagaatgagggcgcggacaagaagcacagtcctttcctggtggacagctgggcctgg

SEQ ID NO: 56721 - DNA, 120 bp, Artificial Sequence
  ENSG00000070371_73 (sequence is synthesized)
ggcctcgtggctcatctgggaagcttgagggccatccctctgagacgcccccagcgctctcccattgtagggagggtacaggcctagctcagccctcaccctaggtgtcagcaagtgtgc

SEQ ID NO: 56722 - DNA, 120 bp, Artificial Sequence
  ENSG00000070371_74 (sequence is synthesized)
cccctgcttcctcctcatttctcagccccccccagaccccagctcatggggggcacattcttatttctctttcttactcagtgtgtttgtgaggggatcctagctgcacagttgctgccg

SEQ ID NO: 56723 - DNA, 120 bp, Artificial Sequence
  ENSG00000070371_75 (sequence is synthesized)
cccctctagtgcagtgctgccgcctcgctctctggcagtgggtggggtcagtgcctggtgaagcctcagggaagagtgaggaggcagtttgtcctcagtgcttctcaggtgaagtgtcta

SEQ ID NO: 56724 - DNA, 120 bp, Artificial Sequence
  ENSG00000070371_76 (sequence is synthesized)
ggtgccaggtgacttgtctctgagagccacatgatctctctgctggtttggaggggcgggcaaactagactggccagagccagaagcagacagtgttccctgcacatggccccagccctg

SEQ ID NO: 56725 - DNA, 120 bp, Artificial Sequence
  ENSG00000070371_77 (sequence is synthesized)
caggtcggtaagtggcagtgtccctgtatccagaggaggacttggccccccataagcaggccacatgcacagcctgtaacaactgactgccccagtgcccactgggaagctctgggggcc

SEQ ID NO: 56726 - DNA, 120 bp, Artificial Sequence
  ENSG00000070371_78 (sequence is synthesized)
ccacctggcgttccatctcagcccagctaccgaggcttcacctctccatgccttgctgcattctaaaagtgcatggggtgtgggctgagccactccacatctgcccatgtgcacctcctc

SEQ ID NO: 56727 - DNA, 120 bp, Artificial Sequence
  ENSG00000070371_79 (sequence is synthesized)
cactgtcattctcctggaggccctgtgtcctgaccttccactccactttcacctagaggccggactgcactctgtcaagcgggtgctcacgtgcttttgcctccttgcaggtggacaaac

SEQ ID NO: 56728 - DNA, 120 bp, Artificial Sequence
  ENSG00000070371_80 (sequence is synthesized)
ctttgtggtctgggctctttgtatagttaattgtgccttccatgtacattaaatcaattcatttaattggatattgtgtttggcagaaggtggtacctacacatgataatgttgctgctc

SEQ ID NO: 56729 - DNA, 120 bp, Artificial Sequence
  ENSG00000070371_81 (sequence is synthesized)
ttctggtcccgtgtcaacatcccaaaggtaccgtgtactccttgcagtctggcagccgtggccacgtgcagcacaagccgaccctgacctccttgtccaggtgctgagggctgcagagca

SEQ ID NO: 56730 - DNA, 80 bp, Artificial Sequence
  ENSG00000070388_0 (sequence is synthesized)
gacgagcgcgcagcgaaccgggtgccgggtcatgcgccgccgcctgtggctgggcctggcctggctgctgctggcgcggg

SEQ ID NO: 56731 - DNA, 120 bp, Artificial Sequence
  ENSG00000070388_1 (sequence is synthesized)
gcgcagctacccgcacctggagggcgacgtgcgctggcggcgcctcttctcctccactcacttcttcctgcgcgtggatcccggcggccgcgtgcagggcacccgctggcgccacggcca

SEQ ID NO: 56732 - DNA, 120 bp, Artificial Sequence
  ENSG00000070388_2 (sequence is synthesized)
ggacagcatcctggagatccgctctgtacacgtgggcgtcgtggtcatcaaagcagtgtcctcaggcttctacgtggccatgaaccgccggggccgcctctacgggtcgcgactctacac

SEQ ID NO: 56733 - DNA, 120 bp, Artificial Sequence
  ENSG00000070388_3 (sequence is synthesized)
cgtggactgcaggttccgggagcgcatcgaagagaacggccacaacacctacgcctcacagcgctggcgccgccgcggccagcccatgttcctggcgctggacaggaggggggggccccg

SEQ ID NO: 56734 - DNA, 120 bp, Artificial Sequence
  ENSG00000070388_4 (sequence is synthesized)
gccaggcggccggacgcggcggtaccacctgtccgcccacttcctgcccgtcctggtctcctgaggccctgagaggccggcggctccccaaggtgcctgggctggtggcgaggggcccgg

SEQ ID NO: 56735 - DNA, 120 bp, Artificial Sequence
  ENSG00000070388_5 (sequence is synthesized)
gtggccaccaagcaggttcaatcctgagttggggacctcgaggacccaacagggcgcctctcgggctgaaggacgcagacgtcgaaaggtcgagggggacgtcccaggcagggcccggca

SEQ ID NO: 56736 - DNA, 120 bp, Artificial Sequence
  ENSG00000070388_6 (sequence is synthesized)
gaggcaggggctcggggtggggagcacgttgggagtgggggcaggagcggaggggaggggagggggccggggagacggtgacagacgccgcagaacaccagcctcgaagccggtcccgtc

SEQ ID NO: 56737 - DNA, 120 bp, Artificial Sequence
  ENSG00000070388_7 (sequence is synthesized)
ccgggaatctgcaaatacaacgccttgcgaggacaaaggcacctgcaggtgggacggagatggaggagcatccagggtggggggtccagggccccagtgtcctcacagggtcctcacgac

SEQ ID NO: 56738 - DNA, 120 bp, Artificial Sequence
  ENSG00000070388_8 (sequence is synthesized)
aggaggcgggacagtgagagccagagagagatggggatgggccgcgctgtggccgtgaaggggaggaagggccctaagctgagggacgtgggtgcctccagatgctggggaaggcgggaa

SEQ ID NO: 56739 - DNA, 120 bp, Artificial Sequence
  ENSG00000070388_9 (sequence is synthesized)
cggttccgcactggagcccccgggagggaccggcctgctcctgccttgatatgagcccagtgggacccagtttggactctggcctccagaaccgccagaaaataaacgtagtaagccatc

SEQ ID NO: 56740 - DNA, 120 bp, Artificial Sequence
  ENSG00000070388_10 (sequence is synthesized)
aggctcctctgtgcagcctcggcctcagtttccgtggtctgtgagatgggtgcagcctgcctggtgggagggttgcactgttaaagcgaaggctgcagcggcggacccggctcaggggca

SEQ ID NO: 56741 - DNA, 120 bp, Artificial Sequence
  ENSG00000070388_11 (sequence is synthesized)
gagaagcgtccgtgtggtacaaccctgtgggtggggccacccatctgcaggtgggaaactgaggctccagaggggctggggcaggcccagctgcatggcggaagcggcggggggctgacc

SEQ ID NO: 56742 - DNA, 120 bp, Artificial Sequence
  ENSG00000070388_12 (sequence is synthesized)
tccggactcctgacatcacagaatccagtcagggctgcctgagtcggggccccctctgcttcttcccagacaccccatctggcaggtgaggacaaggaggcacacagaagggatgggacc

SEQ ID NO: 56743 - DNA, 120 bp, Artificial Sequence
  ENSG00000070388_13 (sequence is synthesized)
tgcccagggtcacactgacaggggtggcggagctgggtccccacagggcccaggacgtcacggagcgggcgtctctgtccccagggtctgccgagcacactgaggtaggccctcagtgtt

SEQ ID NO: 56744 - DNA, 120 bp, Artificial Sequence
  ENSG00000070388_14 (sequence is synthesized)
gcacagcaggggatgtgggtacctggaggccaggggagtcggtgtccccgccgggcggggggcactgggaagggggcccgggcccgctggctgccgcctgaatcaccaccatcagggcag

SEQ ID NO: 56745 - DNA, 120 bp, Artificial Sequence
  ENSG00000070388_15 (sequence is synthesized)
gtaatcaccccctgtccttcccaccgctttcatctgggcgccaaggccctcattaggccgcacgtgacgagggcggacaggggactggctgggccggtccatccatggcgggcatggcca

SEQ ID NO: 56746 - DNA, 120 bp, Artificial Sequence
  ENSG00000070388_16 (sequence is synthesized)
ggcggggtggcctcgggccggggcagaggcctggctccgctgcctgacctggaacagtctctgcctctctccaagcctcggtttccccagctggacggtgatgggggtgagggctagctg

SEQ ID NO: 56747 - DNA, 120 bp, Artificial Sequence
  ENSG00000070388_17 (sequence is synthesized)
agggctctcctgcccttcgtgcattcgctggtcactaatcgggcaccttgtgggtgctgtgctccgcatgggggacccagtggtgacagagacgcccaccctcctggggctcccagagca

SEQ ID NO: 56748 - DNA, 120 bp, Artificial Sequence
  ENSG00000070388_18 (sequence is synthesized)
ccagagcagaggcgcgcagcagttagacacgtgaacaagggcgcaggtgggtgcacagaacagtgaacggttggccgggtgcagtggctcacgtcggtaatcccagcactttgggaggcc

SEQ ID NO: 56749 - DNA, 120 bp, Artificial Sequence
  ENSG00000070404_0 (sequence is synthesized)
aagtcggtgccgctgccgtctctgcgttcgccatgcgtcccggggcgccagggccactctggcctctgccctggggggccctggcttgggccgtgggcttcgtgagctccatgggctcgg

SEQ ID NO: 56750 - DNA, 120 bp, Artificial Sequence
  ENSG00000070404_1 (sequence is synthesized)
ggaaccccgcgcccggtggtgtttgctggctccagcagggccaggaggccacctgcagcctggtgctccagactgatgtcacccgggccgagtgctgtgcctccggcaacattgacaccg

SEQ ID NO: 56751 - DNA, 120 bp, Artificial Sequence
  ENSG00000070404_2 (sequence is synthesized)
cctggtccaacctcacccacccggggaacaagatcaacctcctcggcttcttgggccttgtccactgccttccctgcaaagattcgtgcgacggcgtggagtgcggcccgggcaaggcgt

SEQ ID NO: 56752 - DNA, 120 bp, Artificial Sequence
  ENSG00000070404_3 (sequence is synthesized)
gcgtgccgcatgctggggggccgcccgcgctgcgagtgcgcgcccgactgctcggggctcccggcgcggctgcaggtctgcggctcagacggcgccacctaccgcgacgagtgcgagctg

SEQ ID NO: 56753 - DNA, 120 bp, Artificial Sequence
  ENSG00000070404_4 (sequence is synthesized)
ccgcgcgctgccgcggccacccggacctgagcgtcatgtaccggggccgctgccgcaagtcctgtgagcacgtggtgtgcccgcggccacagtcgtgcgtcgtggaccagacgggcagcg

SEQ ID NO: 56754 - DNA, 120 bp, Artificial Sequence
  ENSG00000070404_5 (sequence is synthesized)
cccactgcgtggtgtgtcgagcggcgccctgccctgtgccctccagccccggccaggagctttgcggcaacaacaacgtcacctacatctcctcgtgccacatgcgccaggccacctgct

SEQ ID NO: 56755 - DNA, 120 bp, Artificial Sequence
  ENSG00000070404_6 (sequence is synthesized)
tcctgggccgctccatcggcgtgcgccacgcgggcagctgcgcaggcacccctgaggagccgccaggtggtgagtctgcagaagaggaagagaacttcgtgtgagcctgcaggacaggcc

SEQ ID NO: 56756 - DNA, 120 bp, Artificial Sequence
  ENSG00000070404_7 (sequence is synthesized)
tgggcctggtgcccgaggccccccatcatcccctgttatttattgccacagcagagtctaatttatatgccacggacactccttagagcccggattcggaccacttggggatcccagaac

SEQ ID NO: 56757 - DNA, 120 bp, Artificial Sequence
  ENSG00000070404_8 (sequence is synthesized)
ctccctgacgatatcctggaaggactgaggaagggaggcctgggggccggctggtgggtgggatagacctgcgttccggacactgagcgcctgatttagggcccttctctaggatgcccc

SEQ ID NO: 56758 - DNA, 120 bp, Artificial Sequence
  ENSG00000070404_9 (sequence is synthesized)
agcccctaccctaagacctattgccggggaggattccacacttccgctcctttggggataaacctattaattattgctactatcaagagggctgggcattctctgctggtaattcctgaa

SEQ ID NO: 56759 - DNA, 120 bp, Artificial Sequence
  ENSG00000070404_10 (sequence is synthesized)
ggtctagcctgggtgagtacggagggtctagcctgggtgagtacggagggtctagcctgggtgtgtatggaggatctagcctgggtgagtatggagggtctagcctgggtgagtatggag

SEQ ID NO: 56760 - DNA, 120 bp, Artificial Sequence
  ENSG00000070404_11 (sequence is synthesized)
ggtctagcctgggtgtgtatggagggtctagcctgggtgagtatggagggtctagcctgggtgtgtatggagggtctagcctgggtgagtatggagggtctagcctgggtgtgtacggag

SEQ ID NO: 56761 - DNA, 120 bp, Artificial Sequence
  ENSG00000070404_12 (sequence is synthesized)
ggtctagtctgagtgcgtgtggggacctcagaacactgtgaccttagcccagcaagccaggcccttcatgaaggccaagaaggctgccaccattccctgccagcccaagaactccagctt

SEQ ID NO: 56762 - DNA, 120 bp, Artificial Sequence
  ENSG00000070404_13 (sequence is synthesized)
ccccactgcctctgtgtgcccctttgcgtcctgtgaaggccattgagaaatgcccagtgtgccccctgggaaagggcacggcctgtgctcctgacacgggctgtgcttggccacagaacc

SEQ ID NO: 56763 - DNA, 120 bp, Artificial Sequence
  ENSG00000070404_14 (sequence is synthesized)
acccagcgtctcccctgctgctgtccacgtcagttcatgaggcaacgtcgcgtggtctcagacgtggagcagccagcggcagctcagagcagggcactgtgtccggcggagccaagtcca

SEQ ID NO: 56764 - DNA, 120 bp, Artificial Sequence
  ENSG00000070404_15 (sequence is synthesized)
ctctgggggagctctggcggggaccacgggccactgctcacccactggccccgaggggggtgtagacgccaagactcacgcatgtgtgacatccggagtcctggagccgggtgtcccagt

SEQ ID NO: 56765 - DNA, 120 bp, Artificial Sequence
  ENSG00000070404_16 (sequence is synthesized)
ggcaccactaggtgcctgctgcctccacagtggggttcacacccagggctccttggtcccccacaacctgccccggccaggcctgcagacccagactccagccagacctgcctcacccac

SEQ ID NO: 56766 - DNA, 120 bp, Artificial Sequence
  ENSG00000070404_17 (sequence is synthesized)
caatgcagccggggctggcgacaccagccaggtgctggtcttgggccagttctcccacgacggctcaccctcccctccatctgcgttgatgctcagaatcgcctacctgtgcctgcgtgt

SEQ ID NO: 56767 - DNA, 120 bp, Artificial Sequence
  ENSG00000070404_18 (sequence is synthesized)
aaaccacagcctcagaccagctatggggagaggacaacacggaggatatccagcttccccggtctggggtgaggaatgtggggagcttgggcatcctcctccagcctcctccagccccca

SEQ ID NO: 56768 - DNA, 120 bp, Artificial Sequence
  ENSG00000070404_19 (sequence is synthesized)
ggcagtgccttacctgtggtgcccagaaaagtgcccctaggttggtgggtctacaggagcctcagccaggcagcccaccccaccctggggccctgcctcaccaaggaaataaagactcaa

SEQ ID NO: 56769 - DNA, 120 bp, Artificial Sequence
  ENSG00000070404_20 (sequence is synthesized)
gctgccgcagtgcgtaggggcggggcctccagcccaggacaggtcacatgggtggcggtggggcctgagtaagggcgtctttatacttccgagggagtatcacggggtagggtcttttgt

SEQ ID NO: 56770 - DNA, 120 bp, Artificial Sequence
  ENSG00000070404_21 (sequence is synthesized)
cggcgtgcgccacgcgggcagctgcgcaggtgcagacgcagggcgggggcacaggcctgtcctgggggccggagaaccccctgccctgcgccctcaatgctcttatcgacccttgcaggc

SEQ ID NO: 56771 - DNA, 80 bp, Artificial Sequence
  ENSG00000070404_22 (sequence is synthesized)
gccccaccggtcccgcgcccggaccctgagccctgcccctgggaacccgagggccccgactccgactgaccctgacctgg

SEQ ID NO: 56772 - DNA, 120 bp, Artificial Sequence
  ENSG00000070404_23 (sequence is synthesized)
cctgcagaaggggcgcagggaggggccccgaggccttcgcgcggccccacgcccgggaccctcccgcgcccggccccacgcgcgtgtcctctgtccgcagattcgtgcgacggcgtggag

SEQ ID NO: 56773 - DNA, 120 bp, Artificial Sequence
  ENSG00000070413_0 (sequence is synthesized)
atcttgcgcgcagctggagtcggtgcctgaggttgcagccgagagtgtgcgccagcccgcggcccagccgaagctctttcccgccgcctctccgcgcctcgcccaggttcagctccgcct

SEQ ID NO: 56774 - DNA, 120 bp, Artificial Sequence
  ENSG00000070413_1 (sequence is synthesized)
gaccctccgcttggcacggtcccctgaccctcagtccggcctggtccggccttccagccgccccggggacgatgaacggaggataaatggtgcccaaggcagacagcggcgccttcctgc

SEQ ID NO: 56775 - DNA, 120 bp, Artificial Sequence
  ENSG00000070413_2 (sequence is synthesized)
tgctcttcctgctcgtgctcactgtcaccgagccgctgcggccagagctgcggtgcaaccctgggcagtttgcgtgtcgcagcggcaccatccagtgcatccccctcccctggcagtgtg

SEQ ID NO: 56776 - DNA, 120 bp, Artificial Sequence
  ENSG00000070413_3 (sequence is synthesized)
acggctgggcgacttgcgaggatgagagcgacgaagccaactgtccagaagtgaccggggaggtgcgtcctcatcatgggaaggaggctgtggatccgcggcaggggcgggccagaggag

SEQ ID NO: 56777 - DNA, 120 bp, Artificial Sequence
  ENSG00000070413_4 (sequence is synthesized)
gcgacccttcgcacttccacgcggtgaacgtggcgcagcccgttcgcttcagcagtttcctagggaagtgcccgacagggtggcaccactacgaaggcacggccagctgctaccgggtct

SEQ ID NO: 56778 - DNA, 120 bp, Artificial Sequence
  ENSG00000070413_5 (sequence is synthesized)
acctgagcggggagaactactgggatgccgcgcagacctgccagcgcctgaatggctctctcgccaccttctccactgaccaggagctgcgctttgtcctggcccaggaatgggaccagc

SEQ ID NO: 56779 - DNA, 120 bp, Artificial Sequence
  ENSG00000070413_6 (sequence is synthesized)
ccgagcggagctttggttggaaggaccagcgcaagttgtgggttggctatcagtatgttatcactggccggaaccgctccttggaaggtcgctgggaggtggcattcaaaggctcttcag

SEQ ID NO: 56780 - DNA, 120 bp, Artificial Sequence
  ENSG00000070413_7 (sequence is synthesized)
aggtgttcctgcccccagaccccatctttgcctcggccatgtctgagaacgacaacgtgttctgtgcccagcttcagtgcttccatttccccaccctgcggcaccacgacctccacagct

SEQ ID NO: 56781 - DNA, 120 bp, Artificial Sequence
  ENSG00000070413_8 (sequence is synthesized)
ggcacgccgagagctgctacgagaagtcttcatttctgtgtaaaagaagtcaaacatgtgttgacatcaaggacaacgtggtggatgaagggttctacttcacccctaagggggacgacc

SEQ ID NO: 56782 - DNA, 120 bp, Artificial Sequence
  ENSG00000070413_9 (sequence is synthesized)
catgcctgagctgcacctgccatggaggggagcctgagatgtgtgtggctgctctctgtgagaggccccagggctgccaacagtaccgcaaggaccccaaagagtgctgcaagttcatgt

SEQ ID NO: 56783 - DNA, 120 bp, Artificial Sequence
  ENSG00000070413_10 (sequence is synthesized)
gtctggacccagatggcaacagtctgtttgactccatggccagcgggatgcgcctggtcgtcagctgcatctcctccttcctcatcctgtcactgctgctcttcatggtccaccggctgc

SEQ ID NO: 56784 - DNA, 120 bp, Artificial Sequence
  ENSG00000070413_11 (sequence is synthesized)
gccagcggcgccgggagcgcatcgagtccctgattggagcaaacttgcaccacttcaacctcggccgcaggatccctggctttgattacggcccagacgggtttggcacgggcctcacgc

SEQ ID NO: 56785 - DNA, 120 bp, Artificial Sequence
  ENSG00000070413_12 (sequence is synthesized)
cgctgcatctttctgacgacggagagggtgggactttccatttccacgaccctccacctccctacacggcatacaagtacccggacatcggccagcccgacgaccctccgccgccctacg

SEQ ID NO: 56786 - DNA, 120 bp, Artificial Sequence
  ENSG00000070413_13 (sequence is synthesized)
aggcctccatccacccggacagtgtgttctatgaccctgcagacgatgatgcttttgagcctgtggaggtcagcctgccagcccctggggatggtgggagtgaaggtgcattactccggc

SEQ ID NO: 56787 - DNA, 120 bp, Artificial Sequence
  ENSG00000070413_14 (sequence is synthesized)
gcctggagcagcctctgcccactgcgggggcctctctggcagacctggaagactctgccgacagcagcagcgccctgctcgtgccccctgaccctgcccagagcgggagcaccccagctg

SEQ ID NO: 56788 - DNA, 120 bp, Artificial Sequence
  ENSG00000070413_15 (sequence is synthesized)
cagaggcactgccagggggtggccgccacagccgcagctccctcaatactgtggtgtagacggcctggcctgtaccccaacggtctgggagcacctgtctgttgtagaaaacaccggtcc

SEQ ID NO: 56789 - DNA, 120 bp, Artificial Sequence
  ENSG00000070413_16 (sequence is synthesized)
ctggggagacttgaaaggcccctgtcccagcctggacgccacgcactgccgcacgtcactggcgggctcgcgtgtgtacatagagaccacagcccgccttctgccaaaagaagtgatggc

SEQ ID NO: 56790 - DNA, 120 bp, Artificial Sequence
  ENSG00000070413_17 (sequence is synthesized)
ctgcaccgagcttccttgagggcttcagaaacatgcatagctttggatcactgtcttctcctttataaatggcagaagagtgacaaaattcattcagaccgcacatgttagaggcaggga

SEQ ID NO: 56791 - DNA, 120 bp, Artificial Sequence
  ENSG00000070413_18 (sequence is synthesized)
gccacagtgccccttgctggccgccctcaggagggggcctctggaccgtcagtgtggcgtaggcagtgggtctgcttcagggaggcagcctcttgactttgtcacaacggttgcactgaa

SEQ ID NO: 56792 - DNA, 120 bp, Artificial Sequence
  ENSG00000070413_19 (sequence is synthesized)
gatggcccccacaagcccagttgtgaatatcaaggtgaccctgcccctggctgggagctcccctggggctctggaacctgaagccctgagaaggagagcttggaaggaggttgagctctt

SEQ ID NO: 56793 - DNA, 120 bp, Artificial Sequence
  ENSG00000070413_20 (sequence is synthesized)
cactgtgtctttccatctgggctctgcagcccagctctgtggcaggaggcctgaccccaccccatcagtccctctcccagcattgctgtgcatggctccctcaggaagaagctctggagt

SEQ ID NO: 56794 - DNA, 120 bp, Artificial Sequence
  ENSG00000070413_21 (sequence is synthesized)
ggggccgaggccccagatgctctgctggggtctggggactgagctgcctcctgtctctccactctggagccctgggctcttgcctcctgttgaattgcccctgggcctgcccccggcccc

SEQ ID NO: 56795 - DNA, 120 bp, Artificial Sequence
  ENSG00000070413_22 (sequence is synthesized)
atttgtgccataaagggttgcttcattgcaggaggggtggctgaaaccaccatcctgggctgcatctatctccttaaagtccactccttacatcaccgccactactgcagctcagtgccc

SEQ ID NO: 56796 - DNA, 120 bp, Artificial Sequence
  ENSG00000070413_23 (sequence is synthesized)
agcggccgcatgcacacctcccggcccctcctcagcagcgcaggggctgggggcccttcctggcacccttttgcctgacggaccctgttgcctgctcctgggcagtggttttgttgcctg

SEQ ID NO: 56797 - DNA, 120 bp, Artificial Sequence
  ENSG00000070413_24 (sequence is synthesized)
acacagggcctttaacatttctgaggtttggagattaagcgggttctgtgcgatttttagcacatccatatcttttctacgttgaatgtctggatctttcctttgtatgtttgtgtctct

SEQ ID NO: 56798 - DNA, 120 bp, Artificial Sequence
  ENSG00000070413_25 (sequence is synthesized)
gtgtgtgtatgtggccaagcgtctgcaggtgagggtggcacatggaacttcacgggtcactgggggcccactcttccagggtcatcgatgcatcctgggctgtgctgaggcagtgctgtc

SEQ ID NO: 56799 - DNA, 120 bp, Artificial Sequence
  ENSG00000070413_26 (sequence is synthesized)
tcgctcagtctttccagaccagcggggcagcacctgggaggcctgtctgaagcatgcagttctgtggtgctgctcggggatggactccatgcacagtccacttcttgacacattctcaca

SEQ ID NO: 56800 - DNA, 120 bp, Artificial Sequence
  ENSG00000070413_27 (sequence is synthesized)
ctgtggctggagacccattttttccatcccatgtggaatgagaatcttgagttgcccacagacagacttgacctttgtgccagaactgtccagagctgtgagttttgttactgaattgcc

SEQ ID NO: 56801 - DNA, 120 bp, Artificial Sequence
  ENSG00000070413_28 (sequence is synthesized)
tgtccctgagcttggcctgctggagcatgatgctggaggctgtgtgcgggcaggcttgtgctccccttggagaagggctgctacttaacaaggaagtcctggccacaggagtcccctact

SEQ ID NO: 56802 - DNA, 120 bp, Artificial Sequence
  ENSG00000070413_29 (sequence is synthesized)
ggctgcagaggacgaagcaggaagcatgccgtggatcccacatgcactggggcagggcagccaggttccagagcagcaggcatgtgcattatgggtgccaggtggccagtgagggcccga

SEQ ID NO: 56803 - DNA, 120 bp, Artificial Sequence
  ENSG00000070413_30 (sequence is synthesized)
ggaccacgcagcagagtcccccacgggcctgagcctgagagctcagaggattcctgccaggcctcagaactgtgtgtgcgggacagggtggctggcacgagatgtgtgggactgggacgc

SEQ ID NO: 56804 - DNA, 120 bp, Artificial Sequence
  ENSG00000070413_31 (sequence is synthesized)
ttcctttggggaccagaggaacattaggggccggtcagacacgtagggggcagtgaggaaacggggtaaagtggaccatgcaggctgcagagggtgggccttgggctggccggggttgct

SEQ ID NO: 56805 - DNA, 120 bp, Artificial Sequence
  ENSG00000070413_32 (sequence is synthesized)
gggtggccccttccccatgggcctccacaagcactcaggccactggcacgttgggccaggcagaaggtccacatggcagggctgcctggaacaccgctgccactgtggctccaggaggcc

SEQ ID NO: 56806 - DNA, 120 bp, Artificial Sequence
  ENSG00000070413_33 (sequence is synthesized)
cttgggagcatgaggagagctggactcgctcatctgttcttgcaccaccatccagaatgccccctttgcaaggcctgctgcagtccccagtctgaccagcaagtcccggggtcacccttg

SEQ ID NO: 56807 - DNA, 120 bp, Artificial Sequence
  ENSG00000070413_34 (sequence is synthesized)
ctgaaccttgtgctccaggggtcctcctcctctaggaccagcttgccacggtttctcagagcccaggtgccctctgacctgccatgcggaggtgggatttgatactgtacattgtcttga

SEQ ID NO: 56808 - DNA, 120 bp, Artificial Sequence
  ENSG00000070413_35 (sequence is synthesized)
tgcctgtttttttatgttttcattaagggtttttagtttttggttgggttgacactaacttttcttaagatgctgtgagaatcatttcatccaaatgccaaataaacttgtgttccggaa

SEQ ID NO: 56809 - DNA, 120 bp, Artificial Sequence
  ENSG00000070413_36 (sequence is synthesized)
acaagacatagctgcactttaaaaatggcatttttaattttacaactggctttgctaaaaattgtcactcttctccagtgtactaatatgaggtacccaacatttgaaggttaaagattc

SEQ ID NO: 56810 - DNA, 120 bp, Artificial Sequence
  ENSG00000070413_37 (sequence is synthesized)
gtacatagacgcttactatgcccatgtgtcggtaccctgcacacacatttgaagttgggagctcgtttccgcagggttcctgtgcgccttggtggagcgctctccaggcgctcccccagg

SEQ ID NO: 56811 - DNA, 120 bp, Artificial Sequence
  ENSG00000070413_38 (sequence is synthesized)
cccacaccagcctgtgagccccgcctgggggccaagaccctgcaggtttgacagcaccaggtcatgatgtgccctggagacagaactgccgctgctgctgccagaagacatgaggccagg

SEQ ID NO: 56812 - DNA, 120 bp, Artificial Sequence
  ENSG00000070413_39 (sequence is synthesized)
atttctgtaacatttgtgcagaaaggttgaaaaagtacagatccttgtgtagggagaatcatccacaccgccccacgtgctgctcccagggccttcccgtcagcaccagcagtgtagctt

SEQ ID NO: 56813 - DNA, 120 bp, Artificial Sequence
  ENSG00000070413_40 (sequence is synthesized)
catgtctccatgagctccccagccctggacagagaggggcagaggcaggtttgaaggccacatgttgtggggtctgtgtcctcacctgtgggccaggaaagttcttgccaagaccctcct

SEQ ID NO: 56814 - DNA, 120 bp, Artificial Sequence
  ENSG00000070413_41 (sequence is synthesized)
tattcccattgagccacagggtgggcagaactcggaggcctctgagggtcagaggcccggatcacccttccagctggaggggtgtggtcagccagaggctgggtctgacagaagtgtcag

SEQ ID NO: 56815 - DNA, 120 bp, Artificial Sequence
  ENSG00000070413_42 (sequence is synthesized)
cccagagggacaggttggtgtggtgagggtgagacatgccacggagcacaccaggggtctcatggggatgccgaatgtggccgaggggtaggcagcggggcacaggtgtgtgcactcagg

SEQ ID NO: 56816 - DNA, 120 bp, Artificial Sequence
  ENSG00000070413_43 (sequence is synthesized)
gacggcaggcccagcctgggggtggggggctcaggagccaggcagcctgcccccagtgacttgtctctgttcccgttgcacacttttgatggcccagtgcaccacttcaacctcggccgc

SEQ ID NO: 56817 - DNA, 120 bp, Artificial Sequence
  ENSG00000070423_0 (sequence is synthesized)
caaacggccggcggcgggtgccgcgcggggggcgggcggcgcggagtaggtggcggcggccatggccgaggcgtcgccgcatcccggacggtacttctgccactgctgctccgtggagat

SEQ ID NO: 56818 - DNA, 120 bp, Artificial Sequence
  ENSG00000070423_1 (sequence is synthesized)
cggtacttctgccactgctgctccgtggagatcgtcccgcgcctgccggattatatctgtccaagatgcgagtctggttttatcgaggagcttccggaagagaccaggagcacagaaaat

SEQ ID NO: 56819 - DNA, 120 bp, Artificial Sequence
  ENSG00000070423_2 (sequence is synthesized)
ggttctgccccctccacagctcccacagaccagagccggccaccgttggagcacgtggaccagcacctgttcacgctgccgcagggctacggacagtttgctttcggcatcttcgatgac

SEQ ID NO: 56820 - DNA, 120 bp, Artificial Sequence
  ENSG00000070423_3 (sequence is synthesized)
agcttcgagatccccacgttccctcctggggcgcaggctgacgacggcagggaccctgagagccggcgggagagagaccatccgtcccggcaccggtacggcgcccgacagccccgcgcc

SEQ ID NO: 56821 - DNA, 120 bp, Artificial Sequence
  ENSG00000070423_4 (sequence is synthesized)
cgcctcaccacgcggcgggccaccggccggcacgaaggcgtccccacgctggaagggatcatccagcagctcgtcaacggcatcatcacgcccgccaccatccccagcctgggcccctgg

SEQ ID NO: 56822 - DNA, 120 bp, Artificial Sequence
  ENSG00000070423_5 (sequence is synthesized)
ggagtcctgcactcaaaccctatggactacgcctggggggccaacggcctggatgccatcatcacacagctcctcaatcagtttgaaaacacaggccccccaccggcagataaagagaaa

SEQ ID NO: 56823 - DNA, 120 bp, Artificial Sequence
  ENSG00000070423_6 (sequence is synthesized)
ggacgactacgcgctgggtgagcgtgtgcggcagctgccctgcaaccacctgttccacgacggctgcatcgtgccctggctggagcagcacgacagctgccccgtctgccgaaaaagcct

SEQ ID NO: 56824 - DNA, 120 bp, Artificial Sequence
  ENSG00000070423_7 (sequence is synthesized)
cacgggacagaacacggccacgaacccccctggcctcactggggtgagcttctcctcctcgtcgtcatcgtcctcctccagctcgcccagcaacgagaacgccacaagcaactcgtgagc

SEQ ID NO: 56825 - DNA, 120 bp, Artificial Sequence
  ENSG00000070423_8 (sequence is synthesized)
ccacgtcggccgtcgggaaagcacggggcctttcccacccaccctcagccagcgccacacggcacccacagactgggtgccccggcggcgccacgcttggctggtcagcgctgcaggtcc

SEQ ID NO: 56826 - DNA, 120 bp, Artificial Sequence
  ENSG00000070423_9 (sequence is synthesized)
cgcctgttccagggcaggacccgggcccggcccaccggccccctggcttgggaaggcgtgggccacatggtcccctctggggcgtccccagcctccccgtcctctgtctaacctcaccct

SEQ ID NO: 56827 - DNA, 120 bp, Artificial Sequence
  ENSG00000070423_10 (sequence is synthesized)
ctaaacgttcagcggtggaaagatttttataattttaaattattactgctttgaaataaacggacgtttgagctcacgtggcggccatgcatggtttgtggcggaagacggggcccagcg

SEQ ID NO: 56828 - DNA, 120 bp, Artificial Sequence
  ENSG00000070423_11 (sequence is synthesized)
gctcccccagcgctgaagcacggggttcagcggctcccccagtgctgcaggtgccgccaggacgggccacgtgggcccccagcctccccctcggccgcctccacgacccggagtaggggg

SEQ ID NO: 56829 - DNA, 120 bp, Artificial Sequence
  ENSG00000070423_12 (sequence is synthesized)
gctcgggaccatgaggatgaccagcaaaattcaagaacaaaactgctccaacagacttttttaaaggaaaaaatatgtgtatcttgaaagctatttaaaatacactacttacaaagagaa

SEQ ID NO: 56830 - DNA, 82 bp, Artificial Sequence
  ENSG00000070423_13 (sequence is synthesized)
aagcccagcaggttggggctgcagtgaaccaagatcaagctgcttctctcctgcctcggcattagagtgagaccctggctca

SEQ ID NO: 56831 - DNA, 120 bp, Artificial Sequence
  ENSG00000070423_14 (sequence is synthesized)
cttctctcctgcctcggcattagagtgagaccctggctcatagtaaaataaataaatagaagctaatctagaagctgatgctggccctgcccttggtgctcaccacggacctggcaggcc

SEQ ID NO: 56832 - DNA, 120 bp, Artificial Sequence
  ENSG00000070423_15 (sequence is synthesized)
cccacccctgggagctgccccactgcctggacccacgaagccccacaaaggtcaaaggggatgcgggcacagcctccacgctctggcgggcacagggggcagctccggccttcctcctgc

SEQ ID NO: 56833 - DNA, 120 bp, Artificial Sequence
  ENSG00000070423_16 (sequence is synthesized)
catttctgagtcttggcaactttgggggttctcctgtgttcacgcggaacgttgtagcaaaaccgcggggaggactcgcccacagtcacatggtcaggaggccacgcggtccctcttccc

SEQ ID NO: 56834 - DNA, 120 bp, Artificial Sequence
  ENSG00000070423_17 (sequence is synthesized)
gagaggtcgcgccctgacctgcttccaagtgccacccgtctcagccttgctgaggagcccttggagcattttgtcactggcaggacccgaccctcacagtagcccaccagccggagcacg

SEQ ID NO: 56835 - DNA, 120 bp, Artificial Sequence
  ENSG00000070423_18 (sequence is synthesized)
gcccccccattccgccgtcagggcactcaggagcgcggcccccccccccattccgctgtcagggacccaggagcgcgggcctccgcccattcccccattccaccgtcaggggacccagga

SEQ ID NO: 56836 - DNA, 120 bp, Artificial Sequence
  ENSG00000070423_19 (sequence is synthesized)
aggggcccagggcccaggacaaacgcggcctcggtgcttttgcaggtcctgcagcctcgcgtttcagagccccgggccgggcccccgaggagctcccggcactctcgcctcttgtctttc

SEQ ID NO: 56837 - DNA, 120 bp, Artificial Sequence
  ENSG00000070423_20 (sequence is synthesized)
cccacgctggaagggtgagggggccccgggggtggccgcgagggccccacgccttgaggtcggaagttctggcgcttagaatccagcacgggttccacggaaacgtggcatcatccatag

SEQ ID NO: 56838 - DNA, 120 bp, Artificial Sequence
  ENSG00000070423_21 (sequence is synthesized)
gctctctggagaggccgcccggccaggccctccagccccctgtgactccccacacggcccttcggagacagaagtatgccggttcagggtgtgtgggttgaccacagagtggggcaccgt

SEQ ID NO: 56839 - DNA, 120 bp, Artificial Sequence
  ENSG00000070423_22 (sequence is synthesized)
cctggtgtctgtggctccgggagcacttttctctgtgcagacagcagcgtgccgttctcttctgtgatggccgggccggggccagaggggagtgccggcaacctgtgcagccgctcacct

SEQ ID NO: 56840 - DNA, 120 bp, Artificial Sequence
  ENSG00000070423_23 (sequence is synthesized)
ccctcagcctcggcggctaatctggtgacccaggccctccggggaaggggccacgggggccctacccacattctcacgcttaggaggctgttggggtctgcaccggtttatcgagaaacc

SEQ ID NO: 56841 - DNA, 120 bp, Artificial Sequence
  ENSG00000070423_24 (sequence is synthesized)
cgtggtttactggcgagggaagcagcagcgggttacggcaccaaatgctggggcggtggcgggtgggaagcagtgccaaggacaattcctgctctcccaacataggcttttgaggggagg

SEQ ID NO: 56842 - DNA, 120 bp, Artificial Sequence
  ENSG00000070423_25 (sequence is synthesized)
tcccacagaccagagccggccaccgttggagcgcccccagcagactgcacgggcctgagcccccgaggtcacgcccccctcctctccccagcacgtggaccagcacctgttcacgctgcc

SEQ ID NO: 56843 - DNA, 120 bp, Artificial Sequence
  ENSG00000070444_0 (sequence is synthesized)
atcttgttgcaaagccctttcttgtcggcgggactcccgggggccgcggggcgggaggcatcggaagggaggtagagagggaggggaagaagggaggcagtgccgccttttttttttttt

SEQ ID NO: 56844 - DNA, 120 bp, Artificial Sequence
  ENSG00000070444_1 (sequence is synthesized)
tgcatcccatttttttaaatttgcaattttatattttgcaaatattttgagagacattgatttttctccccgtgctcccccgttcttccctgcggagtgcgctgcgccgcccagccctgt

SEQ ID NO: 56845 - DNA, 120 bp, Artificial Sequence
  ENSG00000070444_2 (sequence is synthesized)
ccccggaggtgatccctccctcctgcctgcccgccagcctgacctgtgcccggctcgcgggccgcagcctcggccccggcgcgcccccggcagctctcggcgcgatgagcatagagacgc

SEQ ID NO: 56846 - DNA, 120 bp, Artificial Sequence
  ENSG00000070444_3 (sequence is synthesized)
acgctactggaggcggcccgcttcctggaatggcaagcgcagcaacaacagagagcacgtgaggagcaggagcggcttcgcttggagcaggagcgagagcaggaacagaagaaggccaat

SEQ ID NO: 56847 - DNA, 120 bp, Artificial Sequence
  ENSG00000070444_4 (sequence is synthesized)
agcctggccaggctggcacatacccttcctgtggaggaaccccgcatggaggcgccacccctgcctctgtctccaccggctcccccgccggcacccccaccaccacttgccacccctgcc

SEQ ID NO: 56848 - DNA, 120 bp, Artificial Sequence
  ENSG00000070444_5 (sequence is synthesized)
ccactgactgtcatccctatccctgtggtgaccaactcccctcagcctctacccccacccccacccttgcccgcggcagcccagcctctgcccctggcgcctcgtcagccggccctggtt

SEQ ID NO: 56849 - DNA, 120 bp, Artificial Sequence
  ENSG00000070444_6 (sequence is synthesized)
ggcgcccccggactcagcattaaggagcctgcccccctgcccagcaggccgcaggtgcccacccctgctcccctactgccggactcgaaggccaccattccacccaatggcagccccaag

SEQ ID NO: 56850 - DNA, 120 bp, Artificial Sequence
  ENSG00000070444_7 (sequence is synthesized)
cctttgcagcccctccccacgcctgtcctgaccatagcgccacaccctggagtccagcctcagctggccccccagcagccgcccccacccacgctggggaccctgaagttggcaccagct

SEQ ID NO: 56851 - DNA, 120 bp, Artificial Sequence
  ENSG00000070444_8 (sequence is synthesized)
gaagaagtcaaatccagtgaacagaagaagaggcccggggggatcggaaccagagaagtccacaacaaattggagaagaacaggagggcccatctgaaagagtgctttgagaccctgaag

SEQ ID NO: 56852 - DNA, 120 bp, Artificial Sequence
  ENSG00000070444_9 (sequence is synthesized)
cggaacatccccaacgtggatgacaagaagacgtccaatctgagcgtgctgcggacggcgctgcggtacatccagtccctgaagaggaaggagaaggaatatgagcatgaaatggagcgg

SEQ ID NO: 56853 - DNA, 120 bp, Artificial Sequence
  ENSG00000070444_10 (sequence is synthesized)
ctggcacgtgagaagattgccacgcagcagcggctggcagagctcaagcacgagctgagccagtggatggacgtactggagattgaccgcgtgctgcggcagacgggccagcccgaggat

SEQ ID NO: 56854 - DNA, 120 bp, Artificial Sequence
  ENSG00000070444_11 (sequence is synthesized)
gaccaggcctccacctccaccgcctctgagggtgaggacaacatagacgaggatatggaggaggaccgggcgggcctgggcccacctaagctgagccatcgtccccagccggagctgctg

SEQ ID NO: 56855 - DNA, 120 bp, Artificial Sequence
  ENSG00000070444_12 (sequence is synthesized)
aagtccaccctgccaccccccagcaccacccctgcgcctctgcctccacacccacaccctcacccccactccgtggccctacctcctgcccacctccccgtgcagcagcagcagccacag

SEQ ID NO: 56856 - DNA, 120 bp, Artificial Sequence
  ENSG00000070444_13 (sequence is synthesized)
cagaagacccctctgccagcccctcctcccccaccggctgcccctgcccagacactggtgccagctccagcccatctggtggcgacggctgggggtggctccacggtcatcgcccacaca

SEQ ID NO: 56857 - DNA, 120 bp, Artificial Sequence
  ENSG00000070444_14 (sequence is synthesized)
gccaccactcacgcttcagtcatccagactgtgaaccacgttctgcaggggccaggcggcaagcacatcgcccacatcgccccctcggcccccagccctgcggtgcaactggcgcctgcc

SEQ ID NO: 56858 - DNA, 120 bp, Artificial Sequence
  ENSG00000070444_15 (sequence is synthesized)
acaccccccattgggcacatcactgtgcaccctgccaccctcaaccatgtggcccacctgggctcccagctgcccttgtacccgcagcccgtggcagtgagccacatcgcccacaccctc

SEQ ID NO: 56859 - DNA, 120 bp, Artificial Sequence
  ENSG00000070444_16 (sequence is synthesized)
tcgcaccagcaagtcaacggcacggccggcctggggcccccggctactgtcatggcaaagccggccgtgggggctcaggtggtgcaccacccccagctggtgggccagaccgtgctcaac

SEQ ID NO: 56860 - DNA, 120 bp, Artificial Sequence
  ENSG00000070444_17 (sequence is synthesized)
cctgtgaccatggtcaccatgccctccttcccagtcagcacactcaagctggcttgaggacgaggccactcagaggcccccagtggggacagggagggggacctgtcccccactctctca

SEQ ID NO: 56861 - DNA, 120 bp, Artificial Sequence
  ENSG00000070444_18 (sequence is synthesized)
cccaccagctccacacattccagccaggcccaggccagcccccccacccacccccaggcctcctaggggaagggggtgcaaagactctgagccaagggagggaagggccaccctgctgca

SEQ ID NO: 56862 - DNA, 120 bp, Artificial Sequence
  ENSG00000070444_19 (sequence is synthesized)
ctaggacttggtaagatgactctgagaaaatgcgagactctgatggaatgtgccacctgtccggcccagtgccagctccagtgccgctcctgcttcccctccctaccctcggaaatcagt

SEQ ID NO: 56863 - DNA, 120 bp, Artificial Sequence
  ENSG00000070444_20 (sequence is synthesized)
gtggacgtcacgctccctgacttctcccccgccctgccccgccttcgtgtgctgctgctgctattgctgtctggtgaggtggcccaggcccccggctttcctccggagcctcatgttctc

SEQ ID NO: 56864 - DNA, 120 bp, Artificial Sequence
  ENSG00000070444_21 (sequence is synthesized)
ttcccaggcctttggaggggaaatggggaaagcagaactgaagccacttggcccagaaagctgcggattggggtgataaggggccttgctctgagcacaggtgacagatcataggaagtg

SEQ ID NO: 56865 - DNA, 120 bp, Artificial Sequence
  ENSG00000070444_22 (sequence is synthesized)
gctggtctggagtcccacccggacaggtggggcctcagcctggggctctctgacccggttgcagtcactgtgattcgttaccgtagatactacttaaaatgattctctaccaacaataaa

SEQ ID NO: 56866 - DNA, 120 bp, Artificial Sequence
  ENSG00000070444_23 (sequence is synthesized)
ccaaacccagccactgccaagcttcctgtgccctcaccccaatccctgccactgggctctggacctcaggagggcaggctgaggtggggaaggagggacttggctgtccttccccttccc

SEQ ID NO: 56867 - DNA, 120 bp, Artificial Sequence
  ENSG00000070444_24 (sequence is synthesized)
cgtcccctgcagcctgggtctggatgggaggagagccactgggcccctgtccccagtccccagtccccagccctgggcttggctcttggcttccagaaggcagcaaagaggggcgctgtc

SEQ ID NO: 56868 - DNA, 120 bp, Artificial Sequence
  ENSG00000070444_25 (sequence is synthesized)
ctgcgttcagcccctgatctctgacctctgctgagtgctgggcactgctccaagggacaggtgggcctggcggcctgtgggtttgggtgcctcctgcagtttgggagacatggaccagca

SEQ ID NO: 56869 - DNA, 120 bp, Artificial Sequence
  ENSG00000070444_26 (sequence is synthesized)
tctggtcttgtttccaggagcatagaagccacatcgttgagacatcaggaaggtaaaaacccagcggcttagccaagccctaagcctgtccccagaccaaccctgggacctatacagaac

SEQ ID NO: 56870 - DNA, 120 bp, Artificial Sequence
  ENSG00000070444_27 (sequence is synthesized)
agagggccagagctagggctgctgcttctgctccagcccctttgcctctgtcctcccatcccctcaacaccctgcttctcccggggacgcttttgagtgggccctgcccggggagctgca

SEQ ID NO: 56871 - DNA, 120 bp, Artificial Sequence
  ENSG00000070444_28 (sequence is synthesized)
gagcagcagcacctttctctgagaagaggtccttggttgggtcaaggacagggctgagcgtggaagggggaggagtcaggggctctgtgttaggatgcggctttctctgcctctgggcag

SEQ ID NO: 56872 - DNA, 120 bp, Artificial Sequence
  ENSG00000070444_29 (sequence is synthesized)
cctgctttggcctttccttgtatgtgggtgtttattacaagtggctttgtgtcagacacgctcggctccccacctggacacacactcaccagtggcctttcagtgtagcgggaggaagcc

SEQ ID NO: 56873 - DNA, 120 bp, Artificial Sequence
  ENSG00000070444_30 (sequence is synthesized)
ggtgtccctggatgtgaagctcacactgatgggctggggcaggggcctgggccggcgagggggccggggggaggggacagagctgaggatttcctggagtgccctgcaggcacagaggag

SEQ ID NO: 56874 - DNA, 120 bp, Artificial Sequence
  ENSG00000070444_31 (sequence is synthesized)
gtcagcaaaggtcttgaatagattttctctggaaataaagaatccttagatgcctaaaaattcccttcctgttccctcctggtcctggacacctcccaggggactgttccttatttctct

SEQ ID NO: 56875 - DNA, 120 bp, Artificial Sequence
  ENSG00000070444_32 (sequence is synthesized)
ctcctggtgtgggtaaagggacagttacaaaccaggtcaccatcctcagaggctgagccctgtacccaccccagcacagccacctccgccagaccccgtggctctgggagagccagcttt

SEQ ID NO: 56876 - DNA, 120 bp, Artificial Sequence
  ENSG00000070444_33 (sequence is synthesized)
gctattcccattgtgacagcgatggcaggcctgacccacggggcagttagagcagcctcgtggagctcgcccctcccctcagcctgcccacctctccctgcatcctgaggccagtggccc

SEQ ID NO: 56877 - DNA, 120 bp, Artificial Sequence
  ENSG00000070444_34 (sequence is synthesized)
ccgggcctgcacagatacctcatcatccacccgctgcccctccccgtccctgtcccccagcatcgggggcctgcaaatctagtgccgaatgactatgtccagattggtgacgatgggtgt

SEQ ID NO: 56878 - DNA, 120 bp, Artificial Sequence
  ENSG00000070444_35 (sequence is synthesized)
tgctgtttttcttgtcgtttgtgaacgctgtgatgctgtgtgcccaagtgggcagtcaccacccagcccttccttgggcgtctcccccagagtgctgtcgggaccacatctgtcctcacc

SEQ ID NO: 56879 - DNA, 81 bp, Artificial Sequence
  ENSG00000070444_36 (sequence is synthesized)
tctcccccagagtgctgtcgggaccacatctgtcctcaccctgtgggaccgcctggccctccctccctagcccttccagcc

SEQ ID NO: 56880 - DNA, 120 bp, Artificial Sequence
  ENSG00000070444_37 (sequence is synthesized)
tgatgttcagagtggctcactggctgggagtccttacctcggggagagggggaggttggttccttggggggccaaagaaggcagggaatgcctggagggtaactggggggccaccatgac

SEQ ID NO: 56881 - DNA, 120 bp, Artificial Sequence
  ENSG00000070444_38 (sequence is synthesized)
cccttctctctccagaaacagctgcttctccccccatcccagggtcccacccccaacccccagaggtggcccttgtttacagtgaggactcggccactgtgtctctgtttcctgaaatat

SEQ ID NO: 56882 - DNA, 120 bp, Artificial Sequence
  ENSG00000070444_39 (sequence is synthesized)
aaactgtagcgaccccagactgtagagatttttatgtgtttggatacatctgctgtgtggaaaaaaaaaaaaactacaaaaaccctaattttgtacatactgtatttttactattgaact

SEQ ID NO: 56883 - DNA, 120 bp, Artificial Sequence
  ENSG00000070444_40 (sequence is synthesized)
gtattctagtggctgttcatgctccaagactttagttaccgagacatgaatactatccatgtaataagcacttgcctggaataaaatataaaactgaaataaacctgcactgaaacctga

SEQ ID NO: 56884 - DNA, 120 bp, Artificial Sequence
  ENSG00000070444_41 (sequence is synthesized)
aacatgctgcgagggacctggctcctgcgggcgccaccccggctgcgtggcacccctgtgccccttctgtggtgggctgcttttgcgtgggccagcggagccctcggtggcactgaggat

SEQ ID NO: 56885 - DNA, 120 bp, Artificial Sequence
  ENSG00000070444_42 (sequence is synthesized)
gctgttcctgaggaaaggacctttgagctgagacctgcaggataagtctgggtggcacggagcaaagtggaggccaagagcccaggggcagcccagtttctccagcaggagggaacagga

SEQ ID NO: 56886 - DNA, 120 bp, Artificial Sequence
  ENSG00000070444_43 (sequence is synthesized)
tgctttttggaaataaaagtgaggcacggtggcttgcacctgagtcccagctacgctactcgggaggccaaggcagtaagagcgcttgagcccagggagttcgaggacagcctgggccac

SEQ ID NO: 56887 - DNA, 120 bp, Artificial Sequence
  ENSG00000070444_44 (sequence is synthesized)
agagtgcgacctccgtctctaagaacaaacacaaacatggtcaggaggctgtcactcagagacaggcagaatcaagagctggtcctggagagaccagtggggctgtgtagactgggagct

SEQ ID NO: 56888 - DNA, 120 bp, Artificial Sequence
  ENSG00000070444_45 (sequence is synthesized)
ttggttgtttgctgagagcaggaagctgcaggaagaaggcagtggtccccagccagaatacggagtggcttggaggtggtcaaaggtttgaagacagccacagtaaagtggacagagaca

SEQ ID NO: 56889 - DNA, 120 bp, Artificial Sequence
  ENSG00000070444_46 (sequence is synthesized)
agaaaaataggtaccaaaccgtgcatccaggtagtcacagaaaggaaatgggtttagattgaagcaatgtgggttaaagttagaccctggggaaaccttgcaggggtctgtaggcctgtg

SEQ ID NO: 56890 - DNA, 120 bp, Artificial Sequence
  ENSG00000070444_47 (sequence is synthesized)
aagaactggactaggtgagaagaagaagcttttgacccatgtcactccctggcccagaactatatcctacccacaggtgggttgagttcaggactgctgcttccagcccccagcagcaag

SEQ ID NO: 56891 - DNA, 120 bp, Artificial Sequence
  ENSG00000070444_48 (sequence is synthesized)
ctgcttccagcccccagcagcaaggttcaagtgagagctgactcacctagggccccttgttagagcctcagagccaggtgaaaagccacacacaggctgggcgcgatggctcacgcctgt

SEQ ID NO: 56892 - DNA, 120 bp, Artificial Sequence
  ENSG00000070444_49 (sequence is synthesized)
gaaaagccacacaggtgtgtgtgtaggggcaagggagtttcctactgtcttcctagcagaaaatggggagaaactgttaaagccagaatgagggagggctgtgtgtggcctgggactggc

SEQ ID NO: 56893 - DNA, 120 bp, Artificial Sequence
  ENSG00000070444_50 (sequence is synthesized)
aacagaagtgtcaagctgccaggtttcaggccagtacagagcacggttctacctgggttatgtgttgccggcactaatggttagagacatctgtcactggtgagggcagaaatgtatgca

SEQ ID NO: 56894 - DNA, 120 bp, Artificial Sequence
  ENSG00000070444_51 (sequence is synthesized)
aggcctggtcaggaaaagctgctacaaaacagcaaaactgctcctagtgcagcgatccccaacctttttggcaacagggagtattttcctggaagaccatttttccatggagagggaggg

SEQ ID NO: 56895 - DNA, 120 bp, Artificial Sequence
  ENSG00000070444_52 (sequence is synthesized)
cggggctggtttcgggatggaagtgttccatctcccatcatcaggcattagtcaaactctcctaaggagcacacaaaacctacactcctggtgtgcacagttcacaggagggcttctgct

SEQ ID NO: 56896 - DNA, 120 bp, Artificial Sequence
  ENSG00000070444_53 (sequence is synthesized)
tctgtgagaaccaaatgtcccactgatgtgacaggatcagagcgccatcgctgctcacttcctgcatgcggccctgttcctgacaggccacggaccagtacctggggtttggggtccccc

SEQ ID NO: 56897 - DNA, 120 bp, Artificial Sequence
  ENSG00000070444_54 (sequence is synthesized)
gccctaggggatgaaagaagggaaacctgggtctaatgggttactgtgattctccctgcgatgcagggaagagacaggacagaggtgggaaggaacatggtcaccaggagtcgggacagc

SEQ ID NO: 56898 - DNA, 120 bp, Artificial Sequence
  ENSG00000070444_55 (sequence is synthesized)
actcttccaggtccttcccctggggctgagtaagcaccctgcgcgtagctcttcctggccgcctgtgggctctgggatctaaacggactatgcagccattctcactttcattcacagctc

SEQ ID NO: 56899 - DNA, 120 bp, Artificial Sequence
  ENSG00000070444_56 (sequence is synthesized)
ggacagggacagtgtgtgttgaggcggaaagacaaaacatgtatgtgagagactttgtatgagccggttcctgatgaagtcctatctttcagcctcgtatttactgcccaggcagatggg

SEQ ID NO: 56900 - DNA, 120 bp, Artificial Sequence
  ENSG00000070444_57 (sequence is synthesized)
gctcttttcttcaccctcccgctttttttttttgagacagaaaacttaatagaaattttgtttgcagttcttacattctcagtgtgagccaatctgtgacccaccgccccacccagaagt

SEQ ID NO: 56901 - DNA, 120 bp, Artificial Sequence
  ENSG00000070444_58 (sequence is synthesized)
ggcccagtcctggtgcagggtaggaagggaagggtggagtgagaagagccccatttttcctcagtgccagggggctggagacaccacccccttctcctgcctctgggctccaggaaggag

SEQ ID NO: 56902 - DNA, 120 bp, Artificial Sequence
  ENSG00000070444_59 (sequence is synthesized)
tgcagatggactctcaggcctatggttcctcctccacaccactgtcccccaggttggaggggagtgagagatacagggagagaaggggacagaggcaagaaaaggtgttgatcaagaaag

SEQ ID NO: 56903 - DNA, 86 bp, Artificial Sequence
  ENSG00000070444_60 (sequence is synthesized)
agaaggggacagaggcaagaaaaggtgttgatcaagaaaggcaagaaccaggggtgagggctgacagagaatcaaagataaaacac

SEQ ID NO: 56904 - DNA, 120 bp, Artificial Sequence
  ENSG00000070444_61 (sequence is synthesized)
gtttggggcgtgtccacgagcccgggctgtctgctgcgttcgtcagcggagcggggcgggcgtccggggtcagaggagagggctgcttgtcccggcggctccctggcctggagtctgcag

SEQ ID NO: 56905 - DNA, 120 bp, Artificial Sequence
  ENSG00000070444_62 (sequence is synthesized)
actccaagggcctgggccagccccgtagccagggaaccagaatggtggcgcctgggagaggacgaggcaagcgggagatggaggtgcctccccttcccctgttggcagccagctcctgag

SEQ ID NO: 56906 - DNA, 120 bp, Artificial Sequence
  ENSG00000070444_63 (sequence is synthesized)
tggggtgcactgccctgctcagcccccattgaagagcccagccccttcttgtttgggagaaatggtcgctgctgtacctcctcctcctcaactgccctctctcacccagaaccagaggag

SEQ ID NO: 56907 - DNA, 120 bp, Artificial Sequence
  ENSG00000070444_64 (sequence is synthesized)
tcccgcgccgctcccgagcccctgcagcctcggcgtccccggggccgtgaggcgcgcgccgtgacgcctggggtctgtaggcctgtgaagaactggactaggtgagaagaagaagctttt

SEQ ID NO: 56908 - DNA, 120 bp, Artificial Sequence
  ENSG00000070444_65 (sequence is synthesized)
ctgcacacctggttgagcttgcttcagtggtgcctgtcccaagagcccacactccttgggacgctgggcctcactgggcaggggcatggaccacaacaggtgcggtctccagcagccccc

SEQ ID NO: 56909 - DNA, 120 bp, Artificial Sequence
  ENSG00000070444_66 (sequence is synthesized)
gtcaggctgggcccgctggttgccacggacttgcctctgtgggccagctgatagggagaggtttgtgggggctttgggccccaaggctgctgctcagggtgtcctgctgtcccttactct

SEQ ID NO: 56910 - DNA, 80 bp, Artificial Sequence
  ENSG00000070476_0 (sequence is synthesized)
gctccgacgccgtcgctgggaccaagatggacctcccggcgctgctccccgccccgactgcgcgcggagggcaacatggc

SEQ ID NO: 56911 - DNA, 120 bp, Artificial Sequence
  ENSG00000070476_1 (sequence is synthesized)
cgcctgctactggtgcggggccctgaagatggcgggcccggggcgcggcccggggaggcctccgggccaagcccgccgcccgccgaggacgacagcgacggcgactctttcttggtgctg

SEQ ID NO: 56912 - DNA, 120 bp, Artificial Sequence
  ENSG00000070476_2 (sequence is synthesized)
gcgactctttcttggtgctgctggaagtgccgcacggcggcgctgccgccgaggctgccggatcacaggaggccgagcctggctcccgtgtcaacctggcgagccgccccgagcagggcc

SEQ ID NO: 56913 - DNA, 80 bp, Artificial Sequence
  ENSG00000070476_3 (sequence is synthesized)
ggcgggcgccgtcaccatcagcagccaggacctgctggtgcgtctcgaccgcggcgtcctcgcgctgtctgcgccgcccg

SEQ ID NO: 56914 - DNA, 120 bp, Artificial Sequence
  ENSG00000070476_4 (sequence is synthesized)
gccgctccccgccgcgcgccccaggcctccggccccagcacgcccggctaccgctgccccgagccgcagtgcgcgctggccttcgccaagaagcaccagctcaaggtgcacctgctcacg

SEQ ID NO: 56915 - DNA, 120 bp, Artificial Sequence
  ENSG00000070476_5 (sequence is synthesized)
tcaaggtgcacctgctcacgcacggcggcggtcagggccggcggcccttcaagtgcccactggagggctgtggttgggccttcacaacgtcctacaagctcaagcggcacctgcagtcgc

SEQ ID NO: 56916 - DNA, 120 bp, Artificial Sequence
  ENSG00000070476_6 (sequence is synthesized)
acgacaagctgcggcccttcggctgtccagtgggcggctgtggcaagaagttcactacggtctataacctcaaggcgcacatgaagggccacgagcaggagagcctgttcaagtgcgagg

SEQ ID NO: 56917 - DNA, 120 bp, Artificial Sequence
  ENSG00000070476_7 (sequence is synthesized)
tgtgcgccgagcgcttccccacgcacgccaagctcagctcccaccagcgcagccacttcgagcccgagcgcccttacaagtgtgactttcccggctgtgagaagacatttatcacagtga

SEQ ID NO: 56918 - DNA, 120 bp, Artificial Sequence
  ENSG00000070476_8 (sequence is synthesized)
gtgccctgttttcccataaccgagcccacttcagggaacaagagctcttttcctgctcctttcctgggtgcagcaagcagtatgataaagcctgtcggctgaaaattcacctgcggagcc

SEQ ID NO: 56919 - DNA, 120 bp, Artificial Sequence
  ENSG00000070476_9 (sequence is synthesized)
atacaggtgaaagaccatttatttgtgactctgacagctgtggctggaccttcaccagcatgtccaaacttctaaggcacagaaggaaacatgacgatgaccggaggtttacctgccctg

SEQ ID NO: 56920 - DNA, 120 bp, Artificial Sequence
  ENSG00000070476_10 (sequence is synthesized)
tcgagggctgtgggaaatcattcaccagagcagagcatctgaaaggccacagcataacccacctaggcacaaagccgttcgagtgtcctgtggaaggatgttgcgcgaggttctccgctc

SEQ ID NO: 56921 - DNA, 120 bp, Artificial Sequence
  ENSG00000070476_11 (sequence is synthesized)
gtagcagtctgtacattcactctaagaaacacgtgcaggatgtgggtgctccgaaaagccgttgcccagtttctacctgcaacagactcttcacctccaagcacagcatgaaggcgcaca

SEQ ID NO: 56922 - DNA, 120 bp, Artificial Sequence
  ENSG00000070476_12 (sequence is synthesized)
tggtcagacagcacagccggcgccaagatctcttacctcagctagaagctccgagttctcttactcccagcagtgaactcagcagcccaggccaaagtgagctcactaacatggatcttg

SEQ ID NO: 56923 - DNA, 120 bp, Artificial Sequence
  ENSG00000070476_13 (sequence is synthesized)
ctgcactcttctctgacacacctgccaatgctagtggttctgcaggtgggtcggatgaggctctgaactccggaatcctgactattgacgtcacttctgtgagctcctctctgggaggga

SEQ ID NO: 56924 - DNA, 120 bp, Artificial Sequence
  ENSG00000070476_14 (sequence is synthesized)
agctccctagggccgatggaacccctggtcctggtggcccacagtgatattcccccaagcctggacagccctctggttctcgggacagcagccacggttctgcagcagggcagcttcagt

SEQ ID NO: 56925 - DNA, 120 bp, Artificial Sequence
  ENSG00000070476_15 (sequence is synthesized)
gtggatgacgtgcagactgtgagtgcaggagcattaggctgtctggtggctctgcccatgaagaacttgagtgacgacccactggctttgacctccaatagtaacttagcagcacatatc

SEQ ID NO: 56926 - DNA, 120 bp, Artificial Sequence
  ENSG00000070476_16 (sequence is synthesized)
accacaccgacctcttcgagcaccccccgagaaaatgccagtgtcccggaactgctggctccaatcaaggtggagccggactcgccttctcgcccaggagcagttgggcagcaggaagga

SEQ ID NO: 56927 - DNA, 120 bp, Artificial Sequence
  ENSG00000070476_17 (sequence is synthesized)
agccatgggctgccccagtccacgttgcccagtccagcagagcagcacggtgcccaggacacagagctcagtgcaggcactggcaacttctatttggaaagtgggggctcagcaagaact

SEQ ID NO: 56928 - DNA, 120 bp, Artificial Sequence
  ENSG00000070476_18 (sequence is synthesized)
gattaccgagccattcaactagccaaggaaaaaaagcagagaggagcggggagcaatgcaggagcctcacagtctactcagagaaaaataaaagaaggcaaaatgagtcctccccatttc

SEQ ID NO: 56929 - DNA, 120 bp, Artificial Sequence
  ENSG00000070476_19 (sequence is synthesized)
catgcaagccagaacagttggttgtgtgggagcctcgtggtgcccagcggaggacggccaggaccagctccagcagctggggtgcagtgcggggcgcagggcgtccaggtccagctggtg

SEQ ID NO: 56930 - DNA, 120 bp, Artificial Sequence
  ENSG00000070476_20 (sequence is synthesized)
caggatgacccctccggcgaaggtgtcctgccctcggcccgcggcccagccaccttcctccccttcctcactgtggacctgcccgtctacgtcctccaggaggtgctcccctcatctgga

SEQ ID NO: 56931 - DNA, 120 bp, Artificial Sequence
  ENSG00000070476_21 (sequence is synthesized)
ggccctgctggaccggaggccacccagttcccaggaagcactatcaacctgcaggatctgcagtgacggcagcctcggcctgggcaggcccaaggccacggtctaggacacaccttccct

SEQ ID NO: 56932 - DNA, 120 bp, Artificial Sequence
  ENSG00000070476_22 (sequence is synthesized)
gagactcatgacatgagcctggggagacctcatttggtttccgttcagaagaccagcgtagcccttttgagacttttgggtacatttatcaaaaatgttttccttttgttttaccaggaa

SEQ ID NO: 56933 - DNA, 120 bp, Artificial Sequence
  ENSG00000070476_23 (sequence is synthesized)
tgagttcgggctatactctttgaaactgcctttgtgagcaaagtgctttggcaaggcaagggtctccctcagcagggctaggtgcactacagcctctttccccgtgtcccgttggatctg

SEQ ID NO: 56934 - DNA, 120 bp, Artificial Sequence
  ENSG00000070476_24 (sequence is synthesized)
agctgtgtagcacttgttgcattacaaagaaaaagacttctgcaggaaatagggtagagaacaggctgtctagtcagatgcagcttgatctgtggcaaaaccaagtgtggtctttcagct

SEQ ID NO: 56935 - DNA, 120 bp, Artificial Sequence
  ENSG00000070476_25 (sequence is synthesized)
tcagtgtgttagcatcccagcacctgggatggggtttgtgggcaagttgattttgccacactgtagggcccaggtggtcccattgccaccgtgaagccaaattctagcccaagtctggta

SEQ ID NO: 56936 - DNA, 120 bp, Artificial Sequence
  ENSG00000070476_26 (sequence is synthesized)
gagcagtcgggcagctagttttcgggggaggatgatgtggtgggacagaggacctcagtggcctattacggagccctcttcccagactaaattcatagccgagagctcggggggatggta

SEQ ID NO: 56937 - DNA, 120 bp, Artificial Sequence
  ENSG00000070476_27 (sequence is synthesized)
gagttaaaatttaaaataattttctaaattctgtatttggatattagtgtttaagtggtaatttggcaacagtttataaagtgatgttctgaataccataaattatgtgtaggactgtga

SEQ ID NO: 56938 - DNA, 120 bp, Artificial Sequence
  ENSG00000070476_28 (sequence is synthesized)
gtttctggtttacaaaaggacgcagccctggactacaagtctggaactgacaagttcttatgaccttgacaaatcaccttaacccatctgagccttaaattctcatttatttcctgcata

SEQ ID NO: 56939 - DNA, 120 bp, Artificial Sequence
  ENSG00000070476_29 (sequence is synthesized)
aggagatttggctaaatgctttctgaggtcctttggagtcctgtggctccatggtaatgtgctcctttccttgaagattgggggttttgtaatgttgagatactttgcctctatgcttgt

SEQ ID NO: 56940 - DNA, 120 bp, Artificial Sequence
  ENSG00000070476_30 (sequence is synthesized)
cagctcatgaccagtcctagaagaggagtcgagacataagccaccttcagaggttcaatggaaactttaaaaccataccaaactcttttttaaaattagaattaacaagaaaaaaaaaaa

SEQ ID NO: 56941 - DNA, 120 bp, Artificial Sequence
  ENSG00000070476_31 (sequence is synthesized)
caaggaggggtgagtaagttttgtgccccaggcacctctcttgccccagacccagccctgctcttctgtctgaagcaagtagagcaattagaaaaagagaaaccaggcgtggagaacagt

SEQ ID NO: 56942 - DNA, 120 bp, Artificial Sequence
  ENSG00000070476_32 (sequence is synthesized)
cagagatgatccagagcgagggttgctgggttttctggaacactgatggatgaacagaaaggaagtattttgtaatggaagtgcatctccctgcagtgagggggaactgaatctgtgtta

SEQ ID NO: 56943 - DNA, 120 bp, Artificial Sequence
  ENSG00000070476_33 (sequence is synthesized)
cccagaaacctcctggttagcatttgcacttcaaagaaaaagagccctgaggcacccagaaaagacagcaggctgtgcctaagtacagaggacccaaggtttgtgcacccagttggcttg

SEQ ID NO: 56944 - DNA, 120 bp, Artificial Sequence
  ENSG00000070476_34 (sequence is synthesized)
cctgctgagtgtgaagctctccgggacccagggcactgcggaagacaggaagggatctggagtgaggtgagcaggtcagggagacagcatatgcagggcaagtcagctctcaccccatgg

SEQ ID NO: 56945 - DNA, 120 bp, Artificial Sequence
  ENSG00000070476_35 (sequence is synthesized)
gctgctcagaaccttcctgtcaaacagcctcgtaaaaacagcctgccttgggcagcagggtcacccaattgaatacttttattaggaataacttatatgatagtcattgtacagttgttt

SEQ ID NO: 56946 - DNA, 120 bp, Artificial Sequence
  ENSG00000070476_36 (sequence is synthesized)
ttttgaagccgttcatagctggatcccacacatccaggcagggatgtgtgggcagagcagtgacagtgcctaaactccttggcactcgccagtcactgttctaagttttgatcacatatt

SEQ ID NO: 56947 - DNA, 120 bp, Artificial Sequence
  ENSG00000070476_37 (sequence is synthesized)
tcctatgaaatcctctccaaaaccttccgaggttgggactagcattcccattttacaggtagataatgctgaggcccagagcttgagttccttttccagatccctggagcagagtgggtg

SEQ ID NO: 56948 - DNA, 120 bp, Artificial Sequence
  ENSG00000070476_38 (sequence is synthesized)
gcgggtcagggtgagcctagccggggtctctgcagtgcacgctctaggctacctttgggcccttttgaagcagctcttgggtttgttatgggtgttaagattttttcttttttctttgtg

SEQ ID NO: 56949 - DNA, 120 bp, Artificial Sequence
  ENSG00000070476_39 (sequence is synthesized)
ctttacttcatttcttaagaagcacatatttgtaaaacccatggagtagtgacttggaaaggagctggacagaggcagcagtccacccacaggtggggtatggagaccgcccgcttcctt

SEQ ID NO: 56950 - DNA, 120 bp, Artificial Sequence
  ENSG00000070476_40 (sequence is synthesized)
cctattccatgatgctgtggctctgggctgttggctgtcctcagttgcgcttgggattcctgccagccagcagctgctggagttagaggattctgctctccaagaatttgcagcttgtgt

SEQ ID NO: 56951 - DNA, 120 bp, Artificial Sequence
  ENSG00000070476_41 (sequence is synthesized)
ctgattaccgtaccgtctggcaaaaaaatacgtatgatgtttttacatttttaaaatcaaaatcctgatgtttttttgttcgtatggttgtttgtttcaacctcttaactcttgattttt

SEQ ID NO: 56952 - DNA, 120 bp, Artificial Sequence
  ENSG00000070476_42 (sequence is synthesized)
tctgttaagtgattttacgtctcttagctgtgcagaatgacaattaatgggaaggctgtcttccccatagtgagaccttggtaagggcagacctgactggtagattgtagattgggtgtg

SEQ ID NO: 56953 - DNA, 120 bp, Artificial Sequence
  ENSG00000070476_43 (sequence is synthesized)
cggggtgggagggtcacgcaggtctgagcagtgtgcggcatgctgcatcccctgcccatcgcagcaccccctgcctgcctgcccctcgtgcatcctcccctgtagactgccccaagtcct

SEQ ID NO: 56954 - DNA, 120 bp, Artificial Sequence
  ENSG00000070476_44 (sequence is synthesized)
gtctcctcacagcccagctcctccctttttcccagcctgtcctgcatctgctcaagctctgagtgttgctgggaccgtgcatccacttcctgaacctgtctgtgcacagccctgcgtcta

SEQ ID NO: 56955 - DNA, 120 bp, Artificial Sequence
  ENSG00000070476_45 (sequence is synthesized)
gccccagagtagcccgcctccctgcccgaggcccccagggctgttttgcagcaggatgagatctgtttgaggccaccctgcccttcttctgcagggctggggcaaaagggctccgcaggc

SEQ ID NO: 56956 - DNA, 120 bp, Artificial Sequence
  ENSG00000070476_46 (sequence is synthesized)
cgtctcagccaccccatttctagggcggcctgcttgtggcgcactagcagcctttctatgctgaaggtggtgggggtcttttcagtgtttttctattttctttcctacgaaacagagccc

SEQ ID NO: 56957 - DNA, 120 bp, Artificial Sequence
  ENSG00000070476_47 (sequence is synthesized)
ctccagggcaggcccaggcccctcccagcctgtccgggccacagatacctgcagctgtggccagtttccaggaggtctttgagcacacctgcttcagcagccctgagcacacctgcatct

SEQ ID NO: 56958 - DNA, 120 bp, Artificial Sequence
  ENSG00000070476_48 (sequence is synthesized)
gggctgtctgggtttggcccaggtgtgtgcccctcttcaccactccactttgtagattccctgtggcaggggatgcggttgcaggccccacggaagtgcggagggtggaggtgacgctgg

SEQ ID NO: 56959 - DNA, 120 bp, Artificial Sequence
  ENSG00000070476_49 (sequence is synthesized)
ctctgagttgggaaacaggcacgtttgtgggttcagagtcctgggagagtctcgccaaggaaacaggaccaggcctggggctcagagaggcaagaggaggggcagcctgggcagaggtgg

SEQ ID NO: 56960 - DNA, 120 bp, Artificial Sequence
  ENSG00000070476_50 (sequence is synthesized)
gctgggaagggggcagggaagaggctgcgggcagctgggggtggccctgtgctggttggaagctagcggtgagcgtcagatgggggctgaagcttgtcttagagaggggcaggagcactg

SEQ ID NO: 56961 - DNA, 120 bp, Artificial Sequence
  ENSG00000070476_51 (sequence is synthesized)
gtcctttgtttccagcttctgaagaggtaagaactccccaggagcaggggcagggggagggggaggaccatccaaggaaacactgcctcagctggcagggcagaggtacagagtcaggac

SEQ ID NO: 56962 - DNA, 120 bp, Artificial Sequence
  ENSG00000070476_52 (sequence is synthesized)
cagaggcttggcaatagggagacggtagggaagctggtgccaccggcagaacaggagcaagtagggggtatacttttaagagatgcctgattaaacctgggtttgagttctttttctgtc

SEQ ID NO: 56963 - DNA, 120 bp, Artificial Sequence
  ENSG00000070476_53 (sequence is synthesized)
ccttaccagctagcgtagtcttggttacttaagcactccgggcctcagttttgtcatctatgaaatgggaacagtagtgcagaccttgacacacaggagcttctcaaacagaaggaatga

SEQ ID NO: 56964 - DNA, 120 bp, Artificial Sequence
  ENSG00000070476_54 (sequence is synthesized)
gaggtgcagagcagcagcaccaggagctccgcttcggggtgtgaatggccatgggcggacatgcaggtgcaggacaggcgaagtgtgggacagatgaagtttctagcctggactgtgagg

SEQ ID NO: 56965 - DNA, 120 bp, Artificial Sequence
  ENSG00000070476_55 (sequence is synthesized)
ggcctggcagcctcccctctcaggagcccctctacctgccctggtccttccagctggcccgtaggcaagctggggcatgcagggaaggccctctgtggggcccgaggatttgctggagag

SEQ ID NO: 56966 - DNA, 120 bp, Artificial Sequence
  ENSG00000070476_56 (sequence is synthesized)
cactctgggtacacaaggttggtgggggtacagggcgtgccagggcacctgcaaggagttgaggagcgtgccttaggagggaaatcagtatttgggctgactgaggggaggagctggaga

SEQ ID NO: 56967 - DNA, 120 bp, Artificial Sequence
  ENSG00000070476_57 (sequence is synthesized)
gcagaaggttccaggcccagcaaaagctgctgggatcaaggtgacagaatgagaaccaggtgggaacaggtagtacccagcccccataaacaattcctgctgggtcctcgggcctccctt

SEQ ID NO: 56968 - DNA, 120 bp, Artificial Sequence
  ENSG00000070476_58 (sequence is synthesized)
ggaatacagggggtgggctggttctgccacgcattgcagctggaggagacttctcaggtgagacgaggacctttgctgcactctcacagacatgtgacaggcctttctgtgttgccttcc

SEQ ID NO: 56969 - DNA, 120 bp, Artificial Sequence
  ENSG00000070495_0 (sequence is synthesized)
gaagacggcggccgcttgcccaacccgaggctcgggaggtggctggggagtgaattttctggaaggcgactttaaaggcgccgggactgagcgaagggcgtttgggtactgccgtcgccg

SEQ ID NO: 56970 - DNA, 120 bp, Artificial Sequence
  ENSG00000070495_1 (sequence is synthesized)
ccgcccaggccggggaggggtgcgttagtgtcaggaagcgggctgcgccgaggtcgtagcggaaccagctggcgaccccgcagaatgaaccacaagagcaagaagcgcatccgcgaggcc

SEQ ID NO: 56971 - DNA, 120 bp, Artificial Sequence
  ENSG00000070495_2 (sequence is synthesized)
aagcggagtgcgcggccggagctcaaggactcgctggattggacccggcacaactactacgagagcttctcgctgagcccggcggccgtggcggataacgtggaaagggcagatgcttta

SEQ ID NO: 56972 - DNA, 120 bp, Artificial Sequence
  ENSG00000070495_3 (sequence is synthesized)
cagctgtctgtggaagaatttgtggagcggtatgaaagaccttacaagcccgtggttttgttgaatgcgcaagagggctggtctgcgcaggagaaatggactctggagcgcctaaaaagg

SEQ ID NO: 56973 - DNA, 120 bp, Artificial Sequence
  ENSG00000070495_4 (sequence is synthesized)
aaatatcggaaccagaagttcaagtgtggtgaggataacgatggctactcagtgaagatgaagatgaaatactacatcgagtacatggagagcactcgagatgatagtcccctttacatc

SEQ ID NO: 56974 - DNA, 120 bp, Artificial Sequence
  ENSG00000070495_5 (sequence is synthesized)
tttgacagcagctatggtgaacaccctaaaagaaggaaacttttggaagactacaaggtgccaaagtttttcactgatgaccttttccagtatgctggggagaagcgcaggcccccttac

SEQ ID NO: 56975 - DNA, 120 bp, Artificial Sequence
  ENSG00000070495_6 (sequence is synthesized)
aggtggtttgtgatggggccaccacgctccggaactgggattcacatcgaccctctgggaaccagtgcctggaatgccttagttcagggccacaagcgctggtgcctgtttcctaccagc

SEQ ID NO: 56976 - DNA, 120 bp, Artificial Sequence
  ENSG00000070495_7 (sequence is synthesized)
actcccagggaactcatcaaagtgacccgagacgaaggagggaaccagcaagacgaagctattacctggtttaatgttatttatccccggacacagcttccaacctggccacctgaattc

SEQ ID NO: 56977 - DNA, 120 bp, Artificial Sequence
  ENSG00000070495_8 (sequence is synthesized)
aaacccctggaaatcttacaaaaaccaggagagactgtctttgtaccaggaggctggtggcatgttgtcctcaatctcgacactactatcgccatcacccaaaattttgccagcagcacc

SEQ ID NO: 56978 - DNA, 120 bp, Artificial Sequence
  ENSG00000070495_9 (sequence is synthesized)
aacttccctgtggtatggcacaagacggtaagagggagaccaaagttatcaaggaaatggtataggattttgaagcaagagcaccccgagttggcagtcctcgcagactcggttgacctt

SEQ ID NO: 56979 - DNA, 120 bp, Artificial Sequence
  ENSG00000070495_10 (sequence is synthesized)
caggagtccacagggatagcttccgacagctccagcgactcttccagctcctccagctccagttcgtcagactccgactcagagtgcgagtctggatccgagggcgatgggacagtgcac

SEQ ID NO: 56980 - DNA, 120 bp, Artificial Sequence
  ENSG00000070495_11 (sequence is synthesized)
cgcaggaagaagaggaggacgtgcagcatggtgggaaacggggacaccacctcccaggacgactgtgtcagcaaagagcgcagctcctccaggattagggacacttgtggaggccgggct

SEQ ID NO: 56981 - DNA, 120 bp, Artificial Sequence
  ENSG00000070495_12 (sequence is synthesized)
cacccctgagcagataaagagactctccctgaggtgctttcagcgtaagcttttggcagccacccaactcagttctcgcatcttctgctcctaccttctcctctgtcttctttgaatttg

SEQ ID NO: 56982 - DNA, 120 bp, Artificial Sequence
  ENSG00000070495_13 (sequence is synthesized)
gatattccttccctggtccaagctcctatcttcggtcaaatgctgtttttactgcttcctaaggatagattatcaagaaatttaacagctcggccagctcagtgaaacactgaagctaat

SEQ ID NO: 56983 - DNA, 120 bp, Artificial Sequence
  ENSG00000070495_14 (sequence is synthesized)
gggatgttgggtaagaaggttctgtgctgtctcattgaaaaccgagccagtcaaccacaaggctggcagggtgtgatccttgtaacgtcttgtgtctgttacctcacggatgtcggtaag

SEQ ID NO: 56984 - DNA, 120 bp, Artificial Sequence
  ENSG00000070495_15 (sequence is synthesized)
gagtttccacagagccagctgtgtaccacagagactgagagtggtgagtggactttgtgagccaattatgtgtcggaaggacttggagtctgcccttcttcctgtatgtcatcatcagcc

SEQ ID NO: 56985 - DNA, 120 bp, Artificial Sequence
  ENSG00000070495_16 (sequence is synthesized)
cacaaatgcattcagtggcagtgacccagcaccatcaccatcacccactgctcagtctgtcttaggattccttatctttttctccatcatcatagagactgaaatttcaggggtgttttt

SEQ ID NO: 56986 - DNA, 120 bp, Artificial Sequence
  ENSG00000070495_17 (sequence is synthesized)
gtacagtgtatttttttgtgggggggtgatacattggggttttttgtttgcatagagtgggaacggtgtgcaatgtgctcttaccacagaacttaaagtatgaataggctccattcttcc

SEQ ID NO: 56987 - DNA, 120 bp, Artificial Sequence
  ENSG00000070495_18 (sequence is synthesized)
gcaccatgggatccataagaagtgctcactttgcgaggtactctgagattagcgttccccatttgtttgacctacagacgttaagtgggtgacttgtgttacacacggggagtaaattca

SEQ ID NO: 56988 - DNA, 120 bp, Artificial Sequence
  ENSG00000070495_19 (sequence is synthesized)
gagatggcacctgtagtctttgcagtctgttgatacttctaaataactaactggatgactttttggggattgaccagcagatgccatctcttgccctcttgattcacctgcttgccttaa

SEQ ID NO: 56989 - DNA, 120 bp, Artificial Sequence
  ENSG00000070495_20 (sequence is synthesized)
tttgtccctaaattcaactaaacttcaataagaggggttgtcaaggccatggggcgcacttggaagcactgcctgggctggagcgttggaggcattggcaggcaggtgggaaggagctct

SEQ ID NO: 56990 - DNA, 120 bp, Artificial Sequence
  ENSG00000070495_21 (sequence is synthesized)
cactgcagtgttcacaggcagggaggctgtgtgtggatgtgttagaattgtgtgctgttgcctctcaaaatatccactagaaacaggtgtaaccaggaaaatacaggtctctgctcactg

SEQ ID NO: 56991 - DNA, 120 bp, Artificial Sequence
  ENSG00000070495_22 (sequence is synthesized)
gacattgggtcatgtggctttactctaggaggctggttctctatttttgtcttagttcaattttctgcatcctcaaatgccaaccccagtatgtggctgggtaggtagaactgtgctgcc

SEQ ID NO: 56992 - DNA, 120 bp, Artificial Sequence
  ENSG00000070495_23 (sequence is synthesized)
tgcctgccatgggggctgctctccctccttacccccacgcccacagcccccttggttctgtggtgggcacaggatgtgtttgggtgtgagtaaagtcaaactctgaatgtataatctctt

SEQ ID NO: 56993 - DNA, 120 bp, Artificial Sequence
  ENSG00000070495_24 (sequence is synthesized)
ggtagtaatatctgagtggtgttgctactcctgctttttaaaaagacttttcttgccatctataaaaagcttttttctttttcccagcattgctcctgtgctgccacgcttgcccttttt

SEQ ID NO: 56994 - DNA, 120 bp, Artificial Sequence
  ENSG00000070495_25 (sequence is synthesized)
ccttaccttcctttcagttttctatcaacaactcctctaaacttcagtttaaaataaaaaacagcccaaaaaggctctttgccaccagggggcgtggtaggacacgttgccagtggtctg

SEQ ID NO: 56995 - DNA, 79 bp, Artificial Sequence
  ENSG00000070495_26 (sequence is synthesized)
gccaccagggggcgtggtaggacacgttgccagtggtctggataggggagcagaaattttgaattttaaaaattagcca

SEQ ID NO: 56996 - DNA, 120 bp, Artificial Sequence
  ENSG00000070495_27 (sequence is synthesized)
agaccagtctgggcaacatagtgagatcccatctctcaaaaaaataataatctagaaaataaagattagccacccagttttctttctccagatgctaaagttgattcctgtttgataaca

SEQ ID NO: 56997 - DNA, 120 bp, Artificial Sequence
  ENSG00000070495_28 (sequence is synthesized)
aacagtattccagaaatgaggggaataacatatctgataggcccaagtcagctctggatagtacagtgtctggatagtacagattctgtgctcctgggacatgctttgtttattcctgcc

SEQ ID NO: 56998 - DNA, 120 bp, Artificial Sequence
  ENSG00000070495_29 (sequence is synthesized)
aggccagggattcagcagccctattccccaacccccgttactgtctctgtgggctagccaggctgtccgttatgtaagcacaacaggggcaaggtggggaaaccgtgtgtggaaaaggag

SEQ ID NO: 56999 - DNA, 120 bp, Artificial Sequence
  ENSG00000070495_30 (sequence is synthesized)
tggagtggtggcgggtggccaaggtagactaggaagagtgggtacccagagaccacttgttcagaagttaactcctcttcccatctggcgtgagctactccattgaatggtgccaacaac

SEQ ID NO: 57000 - DNA, 120 bp, Artificial Sequence
  ENSG00000070495_31 (sequence is synthesized)
agtaaagtgaaggagataatgttagattattttcagggatgattctccaagatgacagcagatcttaaaaccaaagagctgggtcctggaagaagggatcttggattattaacttctgat

SEQ ID NO: 57001 - DNA, 120 bp, Artificial Sequence
  ENSG00000070495_32 (sequence is synthesized)
ggaaggaccagagtgggagagagaagagttggggacctagaacatcaggaggaccctgggtctttggggatgaggcttcaccatcagctggaagaatccatgcttcacacacatgcctct

SEQ ID NO: 57002 - DNA, 120 bp, Artificial Sequence
  ENSG00000070495_33 (sequence is synthesized)
gccattagtggtactgggatgtttagggtgacatccttgaggggagagccactgaaaagagggacattcacattttgctgtattcttgcagctgtccgtgtcttaataattcaagcgttc

SEQ ID NO: 57003 - DNA, 120 bp, Artificial Sequence
  ENSG00000070495_34 (sequence is synthesized)
aataggtgtttgagggccaggcactgctcttgaggtgctggagataacggtgacaagcccaggtccctgacaagctccacaagcttaatggacagtgaatgtgcggctgttgcggctgtt

SEQ ID NO: 57004 - DNA, 120 bp, Artificial Sequence
  ENSG00000070495_35 (sequence is synthesized)
cacagggccgctggtgagggcaggtagaagaaagtgcagaccttcttaaatgcaggtgtaacggatctacatgaaagagcataattaacaccaatgtatacttaaggtagtaacagcttc

SEQ ID NO: 57005 - DNA, 120 bp, Artificial Sequence
  ENSG00000070495_36 (sequence is synthesized)
ttcataaagtagcaaaactaaggatctgtgggaaggttgctggtgcaaatgctttataagcttactagagactgagccttggatttaggactttagacgagtataggatggaacaaaatt

SEQ ID NO: 57006 - DNA, 120 bp, Artificial Sequence
  ENSG00000070495_37 (sequence is synthesized)
tttgcagtaaatgtaaaaaatgctgtgtaggaggaaggcgtataaggatgccccagctgtaggttctttagattgtctgtagtatttccacgagtaagttgtttttgatgtgtgtactgg

SEQ ID NO: 57007 - DNA, 120 bp, Artificial Sequence
  ENSG00000070495_38 (sequence is synthesized)
tattgctggtagatttgaagtggagtctggcggcttcttccacactcccctcccactagcttgtgtcaagatgtgacatcctatgcagcaaaactaggtgagcttgcacccccaggcggt

SEQ ID NO: 57008 - DNA, 88 bp, Artificial Sequence
  ENSG00000070495_39 (sequence is synthesized)
ctatgcagcaaaactaggtgagcttgcacccccaggcggtggctctcaactttgtctcattgttcagaaatttcggccaggcgccgta

SEQ ID NO: 57009 - DNA, 90 bp, Artificial Sequence
  ENSG00000070495_40 (sequence is synthesized)
ttaaaaaaaaagaaatgtcatctaagccccagtgaacctcctgggaggagagctagccctggccagctgtctccaaagtgactggatgct

SEQ ID NO: 57010 - DNA, 120 bp, Artificial Sequence
  ENSG00000070495_41 (sequence is synthesized)
agctagccctggccagctgtctccaaagtgactggatgctacagaagaactgggactgtcttctgcacactcgtgcctcctggagttgtcagaacactgagcagtctcctagttctgcgt

SEQ ID NO: 57011 - DNA, 120 bp, Artificial Sequence
  ENSG00000070495_42 (sequence is synthesized)
ccgtctagccatggggtctgccatgaaagcctgtggatctgctattgggttggtattttaaactttcacttgggtgaaacttgttcatcattttaaataaagcaacatgatttggagttg

SEQ ID NO: 57012 - DNA, 120 bp, Artificial Sequence
  ENSG00000070495_43 (sequence is synthesized)
cgcggcaagggcagggcctggggagggtggcctgtccagtcctgcagacaaggggaggcctgacagagcccaagaatgaggacaccctcggcacgggaacccattcacttagcgtttgct

SEQ ID NO: 57013 - DNA, 120 bp, Artificial Sequence
  ENSG00000070495_44 (sequence is synthesized)
ccagtagctttccctctgctaccaatgcagataaacgcggcttgttttactcaggcaagagaatgtgaatagtgccaagaaaatcctttacattatttaataaaaattgaatccattttc

SEQ ID NO: 57014 - DNA, 120 bp, Artificial Sequence
  ENSG00000070495_45 (sequence is synthesized)
cattgtacagtatccattctgaacggacacacctggcattcccaggtgtttctgagagacacaggcctcgactctgagtgagtctttgtgagtgggtatggctgtcagtgcactgagaac

SEQ ID NO: 57015 - DNA, 120 bp, Artificial Sequence
  ENSG00000070495_46 (sequence is synthesized)
gacttagctcctctgtttatccacagaacagatacagcacgggcagcggcagtgcaagccacccacagccaccccgtgccactgtgtcccaaccctgacctggagggaccagctctcggg

SEQ ID NO: 57016 - DNA, 120 bp, Artificial Sequence
  ENSG00000070495_47 (sequence is synthesized)
ggggcggggcggtgacgcagccgacgtgaccttcccaacatggcggaggcccgccgtatgtgaaggagtaccccaggggagccaaagccaatggaaaaccgcgagaggcgtcggggcggg

SEQ ID NO: 57017 - DNA, 120 bp, Artificial Sequence
  ENSG00000070501_0 (sequence is synthesized)
attgttccgccggtcgcgccggagctgggttgctcctgctcccgtctccaagtcctggtacctccttcaagctgggagagggctctagtccctggttctgaacactctggggttctcggg

SEQ ID NO: 57018 - DNA, 120 bp, Artificial Sequence
  ENSG00000070501_1 (sequence is synthesized)
tgcaggccgccatgagcaaacggaaggcgccgcaggagactctcaacgggggaatcaccgacatgctcacagaactcgcaaactttgagaagaacgtgagccaagctatccacaagtaca

SEQ ID NO: 57019 - DNA, 120 bp, Artificial Sequence
  ENSG00000070501_2 (sequence is synthesized)
atgcttacagaaaagcagcatctgttatagcaaaatacccacacaaaataaagagtggagctgaagctaagaaattgcctggagtaggaacaaaaattgctgaaaagattgatgagtttt

SEQ ID NO: 57020 - DNA, 120 bp, Artificial Sequence
  ENSG00000070501_3 (sequence is synthesized)
tagcaactggaaaattacgtaaactggaaaagattcggcaggatgatacgagttcatccatcaatttcctgactcgagttagtggcattggtccatctgctgcaaggaagtttgtagatg

SEQ ID NO: 57021 - DNA, 120 bp, Artificial Sequence
  ENSG00000070501_4 (sequence is synthesized)
aaggaattaaaacactagaagatctcagaaaaaatgaagataaattgaaccatcatcagcgaattgggctgaaatattttggggactttgaaaaaagaattcctcgtgaagagatgttac

SEQ ID NO: 57022 - DNA, 120 bp, Artificial Sequence
  ENSG00000070501_5 (sequence is synthesized)
ccagtggtgacatggatgttctcctgacccatcccagcttcacttcagaatcaaccaaacagccaaaactgttacatcaggttgtggagcagttacaaaaggttcattttatcacagata

SEQ ID NO: 57023 - DNA, 120 bp, Artificial Sequence
  ENSG00000070501_6 (sequence is synthesized)
ccctgtcaaagggtgagacaaagttcatgggtgtttgccagcttcccagtaaaaatgatgaaaaagaatatccacacagaagaattgatatcaggttgatacccaaagatcagtattact

SEQ ID NO: 57024 - DNA, 120 bp, Artificial Sequence
  ENSG00000070501_7 (sequence is synthesized)
gtggtgttctctatttcactgggagtgatattttcaataagaatatgagggctcatgccctagaaaagggtttcacaatcaatgagtacaccatccgtcccttgggagtcactggagttg

SEQ ID NO: 57025 - DNA, 120 bp, Artificial Sequence
  ENSG00000070501_8 (sequence is synthesized)
caggagaacccctgccagtggatagtgaaaaagacatctttgattacatccagtggaaataccgggaacccaaggaccggagcgaatgaggcctgtatcctccctggcagacacaaccca

SEQ ID NO: 57026 - DNA, 120 bp, Artificial Sequence
  ENSG00000070501_9 (sequence is synthesized)
ataggagtcttaatttatttcttaacctttgctatgtaagggtctttggtgtttttaaatgattgtttcttcttcatgcttttgcttgcaatgtagtcaataaaacctcatgtactatta

SEQ ID NO: 57027 - DNA, 83 bp, Artificial Sequence
  ENSG00000070501_10 (sequence is synthesized)
gagaccgggttttgctatgttgcccaggctgatctccaactcctaaactcaaatggtccacacaccttggtctcccagagtgc

SEQ ID NO: 57028 - DNA, 120 bp, Artificial Sequence
  ENSG00000070501_11 (sequence is synthesized)
taaaagcaaaaccaaaacaatcttaacttccctctagctagcaccttccctcttttctcactttatggtgaatcttcttgaaaaatcttcattccttgcctggacttcttaatacctaat

SEQ ID NO: 57029 - DNA, 120 bp, Artificial Sequence
  ENSG00000070501_12 (sequence is synthesized)
catttactcaagaagtcccagtccttgcctggacctaccagtgctctgaaaatccgctcacctacgtctcatcttattggactctctgtggcattcacccctggctcatgctgtgaatat

SEQ ID NO: 57030 - DNA, 120 bp, Artificial Sequence
  ENSG00000070501_13 (sequence is synthesized)
ctcgtgaagagatgttacaaatgcaagatattgtactaaatgaagttaaaaaagtggattctgaatacattgctacagtctgtggcagtttcagaagaggtaacatacttcctaatcttg

SEQ ID NO: 57031 - DNA, 120 bp, Artificial Sequence
  ENSG00000070501_14 (sequence is synthesized)
ggttatttttgccctgatgttaaaattgcctaatatatgggaagaatttggattaaaaagatgtaatttgtggtacttcatagactcactaagacctagtagtattagttaagggtattt

SEQ ID NO: 57032 - DNA, 120 bp, Artificial Sequence
  ENSG00000070501_15 (sequence is synthesized)
ataggatgatattttaatgactagttttaacgacgtttattaaatgactttaagtatattgaaatgctagtaatggttgtctttggccttttggctggatgatagtgaagttgtgggtag

SEQ ID NO: 57033 - DNA, 66 bp, Artificial Sequence
  ENSG00000070501_16 (sequence is synthesized)
ctttggccttttggctggatgatagtgaagttgtgggtagttttgttaatttaacgctggagtgca

SEQ ID NO: 57034 - DNA, 120 bp, Artificial Sequence
  ENSG00000070501_17 (sequence is synthesized)
aatgtcattcactgtagtgagactcacaggaaatgaggtgagtgaagttgatggctttaactttttgaatgttatttccataaaatgttcacttgttttatgtggcatttaagagactat

SEQ ID NO: 57035 - DNA, 120 bp, Artificial Sequence
  ENSG00000070501_18 (sequence is synthesized)
taataggtgataatgcaatttcatttctccacatctctttcagaacaaagttcacagaaacctaaacaaattacaaggttggggtgatttgagcagtctacctcatgatagtcttctctt

SEQ ID NO: 57036 - DNA, 120 bp, Artificial Sequence
  ENSG00000070501_19 (sequence is synthesized)
caaattattagaccacttaggcttatctttggtattttgttccttattgattttaggagtcctatatttgctaaacttgaaatgcatggtaaaaaaatgtatctactgtccatttttttt

SEQ ID NO: 57037 - DNA, 120 bp, Artificial Sequence
  ENSG00000070501_20 (sequence is synthesized)
tgagggcccagtggatatttggtccatctgcaagagcgggaaaaagcaagaatcgaggctggtaccttactatttcttgaagaatgtgggcagtgcgttataggatcagttcagataagt

SEQ ID NO: 57038 - DNA, 120 bp, Artificial Sequence
  ENSG00000070501_21 (sequence is synthesized)
tcccaattctgattgcagatagctgtagcctgatacgtattttgtcatcatcaaacatgaattactagaaatgcggtgtaattttaaccgtaatgaaagacagcggatgaagtccatact

SEQ ID NO: 57039 - DNA, 120 bp, Artificial Sequence
  ENSG00000070501_22 (sequence is synthesized)
tcatcgtttcttccacgttgctctcttctgtttattttgatgtctgtgtttcgtgttcagggttttctttgattagtttcttgcttagaatcacacaaagaccaaatcctcataatgaga

SEQ ID NO: 57040 - DNA, 120 bp, Artificial Sequence
  ENSG00000070501_23 (sequence is synthesized)
atccttatttgcagttttgtgtagttctctaattatcgtgaagtgtaatagaaaggtagggatagtgtattgctcacagaagctgctaagttaaaagtgctcagaattctagagctgcta

SEQ ID NO: 57041 - DNA, 120 bp, Artificial Sequence
  ENSG00000070501_24 (sequence is synthesized)
acattaaaaacaaaaatggccttgtgttttacttgattaaaattaagccttaagtttagaacatctttaaacttggtttaaaatgttcattttagggtgtttgccagcttcccagtaaaa

SEQ ID NO: 57042 - DNA, 120 bp, Artificial Sequence
  ENSG00000070501_25 (sequence is synthesized)
atcaaccaaacaggtgcctcagagtttataatcaatggtgatcagtcttacacaacagtgaatttcactttttaagtgatagttgggtattttcagaataagttttgttttcgccttcct

SEQ ID NO: 57043 - DNA, 120 bp, Artificial Sequence
  ENSG00000070501_26 (sequence is synthesized)
gaaaagtctgaagagctttgtactgattgaattctgcgaaaggcaaatttctcgaaaaggatacctattattcttccatgagttgctgggaggacagtctaacatttgaaagagaaaaca

SEQ ID NO: 57044 - DNA, 120 bp, Artificial Sequence
  ENSG00000070501_27 (sequence is synthesized)
gacagtctaacatttgaaagagaaaacattgaatacaatagttttagaacgatttactgtctgtgataaatactttagaaatactataatcagattttcattaaattttatcttaaaaaa

SEQ ID NO: 57045 - DNA, 120 bp, Artificial Sequence
  ENSG00000070501_28 (sequence is synthesized)
acactagaaggctcacagctggattcatgcccagtaaagggacacctgaatggaactgagtcacttttagacttaatatgggatgttatgacaattcttaagttaaaaaatgcagatctc

SEQ ID NO: 57046 - DNA, 120 bp, Artificial Sequence
  ENSG00000070501_29 (sequence is synthesized)
agtggattctgaatacattgctacagtctgtggcagtttcagaagagattctgctgtctacatcaatacacctgaatagttggacagaaaattgaaatcttttaactaattctaactatg

SEQ ID NO: 57047 - DNA, 120 bp, Artificial Sequence
  ENSG00000070526_0 (sequence is synthesized)
attgttaagacaaagggtgtgcacttcctggccaggaaacctgagcggtgagactcccagctgcctacatcaaggccccaggacatgcagaaccttcctctagaacccgacccaccacca

SEQ ID NO: 57048 - DNA, 120 bp, Artificial Sequence
  ENSG00000070526_1 (sequence is synthesized)
tgaggtcctgcctgtggagatgcaggcacctgagccaaggcgtccagtggtccttgcttctggctgtcctggtcttctttctcttcgccttgccctcttttattaaggagcctcaaacaa

SEQ ID NO: 57049 - DNA, 120 bp, Artificial Sequence
  ENSG00000070526_2 (sequence is synthesized)
agccttccaggcatcaacgcacagagaacattaaagaaaggtctctacagtccctggcaaagcctaagtcccaggcacccacaagggcaaggaggacaaccatctatgcagagccagtgc

SEQ ID NO: 57050 - DNA, 120 bp, Artificial Sequence
  ENSG00000070526_3 (sequence is synthesized)
cagagaacaatgccctcaacacacaaacccagcccaaggcccacaccaccggagacagaggaaaggaggccaaccaggcaccgccggaggagcaggacaaggtgccccacacagcacaga

SEQ ID NO: 57051 - DNA, 120 bp, Artificial Sequence
  ENSG00000070526_4 (sequence is synthesized)
gggcagcatggaagagcccagaaaaagagaaaaccatggtgaacacactgtcacccagagggcaagatgcagggatggcctctggcaggacagaggcacaatcatggaagagccaggaca

SEQ ID NO: 57052 - DNA, 120 bp, Artificial Sequence
  ENSG00000070526_5 (sequence is synthesized)
caaagacgacccaaggaaatgggggccagaccaggaagctgacggcctccaggacggtgtcagagaagcaccagggcaaagcggcaaccacagccaagacgctcattcccaaaagtcagc

SEQ ID NO: 57053 - DNA, 120 bp, Artificial Sequence
  ENSG00000070526_6 (sequence is synthesized)
acagaatgctggctcccacaggagcagtgtcaacaaggacgagacagaaaggagtgaccacagcagtcatcccacctaaggagaagaaacctcaggccaccccaccccctgcccctttcc

SEQ ID NO: 57054 - DNA, 120 bp, Artificial Sequence
  ENSG00000070526_7 (sequence is synthesized)
agagccccacgacgcagagaaaccaaagactgaaggccgccaacttcaaatctgagcctcggtgggattttgaggaaaaatacagcttcgaaataggaggccttcagacgacttgccctg

SEQ ID NO: 57055 - DNA, 120 bp, Artificial Sequence
  ENSG00000070526_8 (sequence is synthesized)
actctgtgaagatcaaagcctccaagtcgctgtggctccagaaactctttctgcccaacctcactctcttcctggactccagacacttcaaccagagtgagtgggaccgcctggaacact

SEQ ID NO: 57056 - DNA, 120 bp, Artificial Sequence
  ENSG00000070526_9 (sequence is synthesized)
ttgcaccaccctttggcttcatggagctcaactactccttggtgcagaaggtcgtgacacgcttccctccagtgccccagcagcagctgctcctggccagcctccccgctgggagcctcc

SEQ ID NO: 57057 - DNA, 120 bp, Artificial Sequence
  ENSG00000070526_10 (sequence is synthesized)
cgattgagcggagctctcattaaaggctacgaacaggatgtggggactcggacatccttctacggctttaccgccttctccctgacccagtcactccttatattgggcaatcggggtttc

SEQ ID NO: 57058 - DNA, 120 bp, Artificial Sequence
  ENSG00000070526_11 (sequence is synthesized)
aagaacgtgcctcttgggaaggacgtccgctacttgcacttcctggaaggcacccgggactatgagtggctggaagcactgcttatgaatcagacggtgatgtcaaaaaaccttttctgg

SEQ ID NO: 57059 - DNA, 120 bp, Artificial Sequence
  ENSG00000070526_12 (sequence is synthesized)
ttcaggcacagaccccaggaagcttttcgggaagccctgcacatggacaggtacctgttgctgcacccagactttctccgatacatgaagaacaggtttctgaggtctaagaccctggat

SEQ ID NO: 57060 - DNA, 120 bp, Artificial Sequence
  ENSG00000070526_13 (sequence is synthesized)
ggtgcccactggaggatataccgccccaccactggggccctcctgctgctcactgcccttcagctctgtgaccaggtgagtgcttatggcttcatcactgagggccatgagcgcttttct

SEQ ID NO: 57061 - DNA, 120 bp, Artificial Sequence
  ENSG00000070526_14 (sequence is synthesized)
gatcactactatgatacatcatggaagcggctgatcttttacataaaccatgacttcaagctggagagagaagtctggaagcggctacacgatgaagggataatccggctgtaccagcgt

SEQ ID NO: 57062 - DNA, 120 bp, Artificial Sequence
  ENSG00000070526_15 (sequence is synthesized)
cctggtcccggaactgccaaagccaagaactgaccggggccagggctgccatggtctccttgcctgctccaaggcacaggatacagtgggaatcttgagactctttggccatttcccatg

SEQ ID NO: 57063 - DNA, 120 bp, Artificial Sequence
  ENSG00000070526_16 (sequence is synthesized)
gctcagactaagctccaagcccttcaggagttccaagggaacacttgaaccatggacaagactctctcaagatggcaaatggctaattgaggttctgaagttcttcagtacattgctgta

SEQ ID NO: 57064 - DNA, 120 bp, Artificial Sequence
  ENSG00000070526_17 (sequence is synthesized)
ggtcctgaggccagggatttttaattaaatggggtgatgggtggccaataccacaattcctgctgaaaaacactcttccagtccaaaagcttcttgatacagaaaaaagagcctggattt

SEQ ID NO: 57065 - DNA, 120 bp, Artificial Sequence
  ENSG00000070526_18 (sequence is synthesized)
acagaaacatatagatctggtttgaattccagatcgagtttacagttgtgaaatcttgaaggtattacttaacttcactacagattgtctagaagacctttctaggagttatctgattct

SEQ ID NO: 57066 - DNA, 120 bp, Artificial Sequence
  ENSG00000070526_19 (sequence is synthesized)
agaagggtctatacttgtccttgtctttaagctatttgacaactctacgtgttgtagaaaactgataataatacaaatgattgttgtccatggaaaggcaaataaattttctacagtgaa

SEQ ID NO: 57067 - DNA, 120 bp, Artificial Sequence
  ENSG00000070526_20 (sequence is synthesized)
cgtttgagcccgggaggtcgaggctgcaatgagctgtgaacgtgccaccagcctagacaacagagactcagtctcaaaaaaaaagaaaatatatatatacagagagggaggatgttgcca

SEQ ID NO: 57068 - DNA, 120 bp, Artificial Sequence
  ENSG00000070526_21 (sequence is synthesized)
tgatgcggtgccaaggcatgggagtgggacgctgacccttcgctattgagtagctgctgaaacagccattgttcctgccccttggctctttcaggtccacctggcttatgtgtgagagac

SEQ ID NO: 57069 - DNA, 120 bp, Artificial Sequence
  ENSG00000070526_22 (sequence is synthesized)
tttttttgggttttttttgttctgtttttttgaaaagccagtaccaaaagcttacataattgtatgattgcattcaaataacattcttgaaatgataaaattataaaaatacagaacaga

SEQ ID NO: 57070 - DNA, 120 bp, Artificial Sequence
  ENSG00000070526_23 (sequence is synthesized)
aggttagagcagaaagcacgtgacacgtagcccaggtccctgttatccttgcagcctcctgacagttgggggtttggggcatttcacaggtttctgaggtctaagaccctggatggtgcc

SEQ ID NO: 57071 - DNA, 120 bp, Artificial Sequence
  ENSG00000070526_24 (sequence is synthesized)
cactggaggatataccgccccaccactggggccctcctgctgctcactgcccttcagctctgtgaccaggtaaggctccactgcagctgcagaaatacctggagaaacagctcctgggct

SEQ ID NO: 57072 - DNA, 120 bp, Artificial Sequence
  ENSG00000070526_25 (sequence is synthesized)
attcctgggcctgttcagcataggacagtgcatgggctgggtgcccacatctgctgggaaagagggtgggcatgagtatgggtgcatgcagttatgcgtgcgtatccagggacctgcacc

SEQ ID NO: 57073 - DNA, 120 bp, Artificial Sequence
  ENSG00000070540_0 (sequence is synthesized)
cgggctgctgaggtggctgtcgccggctccgagctgcggcttcccgggccgagcccccgatggaggccgaggccgcggacgctcccccgggcggggttgagtcggcgctcagctgcttct

SEQ ID NO: 57074 - DNA, 120 bp, Artificial Sequence
  ENSG00000070540_1 (sequence is synthesized)
gcgctcagctgcttctctttcaaccaggactgcacatccctagcaactggaactaaagccgggtataagctgttttctctgagttctgtggagcagctggatcaagtccacggaagcaat

SEQ ID NO: 57075 - DNA, 120 bp, Artificial Sequence
  ENSG00000070540_2 (sequence is synthesized)
gaaatcccggacgtctacatcgtggagcgcctcttctccagcagcctggtggtggtagtcagtcacacaaaaccacggcagatgaacgtgtatcacttcaagaaaggcacagagatctgt

SEQ ID NO: 57076 - DNA, 120 bp, Artificial Sequence
  ENSG00000070540_3 (sequence is synthesized)
aattacagctactccagcaacatcttgtccataaggctgaaccggcaaaggctgctggtttgcctagaagagtccatttatattcacaacattaaagacatgaagctgttgaagaccctc

SEQ ID NO: 57077 - DNA, 120 bp, Artificial Sequence
  ENSG00000070540_4 (sequence is synthesized)
ctggatattcctgcaaacccaacaggtctatgtgctctctctatcaaccattccaattcttacctggcctatcctggaagcctgacttcaggggagattgtgctttatgatggaaactcc

SEQ ID NO: 57078 - DNA, 120 bp, Artificial Sequence
  ENSG00000070540_5 (sequence is synthesized)
ctgaaaacagtctgcactattgctgcccatgagggaacactagctgccatcaccttcaatgcctcaggctccaaactagcaagtgcgtctgaaaaaggcacagtcatccgggtgttctct

SEQ ID NO: 57079 - DNA, 120 bp, Artificial Sequence
  ENSG00000070540_6 (sequence is synthesized)
gtccctgatgggcaaaagctctatgagttccggagagggatgaaaaggtatgtgacaatcagctctctagtgttcagtatggattcacaattcctctgcgcctccagtaacaccgagacg

SEQ ID NO: 57080 - DNA, 120 bp, Artificial Sequence
  ENSG00000070540_7 (sequence is synthesized)
acccaggtgtcagacatgatgcatcaggacagggcttttgccactgcacgcttgaacttctccggacagaggaacatctgtaccctctcaacgatccagaagttgccacggctgctagtt

SEQ ID NO: 57081 - DNA, 120 bp, Artificial Sequence
  ENSG00000070540_8 (sequence is synthesized)
gcgtcatccagtggacacctttatatgtacaatttggatcctcaggatggaggagagtgtgtcttaatcaaaacccacagcttgcttggctcaggaacaacagaagagaataaagaaaat

SEQ ID NO: 57082 - DNA, 120 bp, Artificial Sequence
  ENSG00000070540_9 (sequence is synthesized)
gacctcagaccttccttacctcagtcttatgcagcgaccgtagccagaccaagtgcatcttcagcctccacggtgccaggttattctgaggacggcggggcgctgcgaggagaagttatt

SEQ ID NO: 57083 - DNA, 120 bp, Artificial Sequence
  ENSG00000070540_10 (sequence is synthesized)
cctgaacatgagtttgcgacgggaccagtgtgtcttgatgatgagaatgagtttcctcctataatcttgtgccgtggaaatcagaagggcaaaacgaagcagtcatgatgagaagcacac

SEQ ID NO: 57084 - DNA, 120 bp, Artificial Sequence
  ENSG00000070540_11 (sequence is synthesized)
ctcagaaatcaggacatcccccctatcaggtggttttggagaaaacaaggaaggcggaagaatggagtgcaattgtgtgagcagaaaggggggcaggaatcccgggtgctccactgctta

SEQ ID NO: 57085 - DNA, 120 bp, Artificial Sequence
  ENSG00000070540_12 (sequence is synthesized)
aaccacaggacctggttaactcctcaccaagcttcccacgaccctggttgccaatgggcgcgggagacattgtatacacatcatgctatttaaaatacgttcaaactatagtgtaaatgc

SEQ ID NO: 57086 - DNA, 120 bp, Artificial Sequence
  ENSG00000070540_13 (sequence is synthesized)
taattaaccatattggtatataaccggaattttatattaaaaggggcctcctttttaaatatatgccgtgtaaaaaatgtacttataggaacatctctttgaattgtatttcttgtatat

SEQ ID NO: 57087 - DNA, 120 bp, Artificial Sequence
  ENSG00000070540_14 (sequence is synthesized)
tacatacttagagagagactcttttagccaggcaaagtcttttttggctgtggctggaataaatcatttattacttgggagtcccattttggacactaataataaaatcatggcaatgca

SEQ ID NO: 57088 - DNA, 120 bp, Artificial Sequence
  ENSG00000070540_15 (sequence is synthesized)
gcggctcagtctgtgtgcttagaaggaaaccttcgcctcatacgagaggcagagtccctttccctgttttctaatctataacaactaattctctgctctagtatttggaaagccatagga

SEQ ID NO: 57089 - DNA, 120 bp, Artificial Sequence
  ENSG00000070540_16 (sequence is synthesized)
cacaggtgaagagactgcttttcaaaagacagcctttcgagagctggtcgtgtagagttgtcccttcgccaagaacgacaagcttcagtgcccttgcattgatttgttcttcactggcag

SEQ ID NO: 57090 - DNA, 120 bp, Artificial Sequence
  ENSG00000070540_17 (sequence is synthesized)
cacacaagatggtctccccctcagcctatgctcctaacacagccctgagctcacagtgggtgttcaaaaatattccctgccaccaggtgtggcggctcacacctgtaatcccggcacttt

SEQ ID NO: 57091 - DNA, 81 bp, Artificial Sequence
  ENSG00000070540_18 (sequence is synthesized)
cgggtggatggcttgagtccaggtataccaaaaacaaatacaaaaattagccggttgtggtggcacacacctgtagtccca

SEQ ID NO: 57092 - DNA, 120 bp, Artificial Sequence
  ENSG00000070540_19 (sequence is synthesized)
taaaaggagaggaaggggattgggccacagacttatccatggactcgtctgctctgagatctggaaaacgacctaactttggtctaaatctgtgctcctcaaggcattgtttgatagaaa

SEQ ID NO: 57093 - DNA, 120 bp, Artificial Sequence
  ENSG00000070540_20 (sequence is synthesized)
tgtaggatttcaggatctactcgagccctactgagacggaatccggattctcacaagatcccaggtgatttgtttgcatattaaagatggagaccagtgagtacactggtttgtggaagg

SEQ ID NO: 57094 - DNA, 89 bp, Artificial Sequence
  ENSG00000070540_21 (sequence is synthesized)
cctcaaaaataaataaataacccacagagctgagcacaggcttcttcatgcttttcctttggaaggtgtcctagatatatgatgatttc

SEQ ID NO: 57095 - DNA, 120 bp, Artificial Sequence
  ENSG00000070540_22 (sequence is synthesized)
cacgaaccaagatctaacagttctcggaaccaagatctaacgtcggaaccaagatgagcatcggttcattggaaccaatatctaagagttctcccttcctttacatttcttctccgacaa

SEQ ID NO: 57096 - DNA, 120 bp, Artificial Sequence
  ENSG00000070601_0 (sequence is synthesized)
aggcggagcccgagccgagcccgagcagcgctgcttcccgagccttggccgcgaccgtgcccgccgctgggcggggccgcccttctccgagagcgtcagcccgctaggtccttgtccgcg

SEQ ID NO: 57097 - DNA, 120 bp, Artificial Sequence
  ENSG00000070601_1 (sequence is synthesized)
cgggcggcacctcctctgcaggtaaatggaagagctggagaccagtttattccagacacggaaagcacatagaatagaacaaatggtggcaagatggcttcggcgctcccgggacagctc

SEQ ID NO: 57098 - DNA, 120 bp, Artificial Sequence
  ENSG00000070601_2 (sequence is synthesized)
ggcccgggctaaagttgctgcagctgatgggcccgccaggaacccaactcagaccctcatccctgtgcgacacacagtaaagatagacaaagacaccctcctccaggactatggatttca

SEQ ID NO: 57099 - DNA, 120 bp, Artificial Sequence
  ENSG00000070601_3 (sequence is synthesized)
catttctgagagccttccccttacagtggtggctgtcacagcaggaggctctgctcacggcaagcttttccctggtgatcagatcctccaaatgaacaatgagcctgctgaagacctttc

SEQ ID NO: 57100 - DNA, 120 bp, Artificial Sequence
  ENSG00000070601_4 (sequence is synthesized)
ctgggaacgagcagtcgatattctcagggaagcagaagattctctttcaatcacagttgttcgctgcacgtcgggagtccctaaatcgtccttcctgaccgaggagaagagagccagact

SEQ ID NO: 57101 - DNA, 120 bp, Artificial Sequence
  ENSG00000070601_5 (sequence is synthesized)
gaagaccaaccccgtgaaggtgcactttgctgaagaagtgctcatcagtggacacagccagggtaattctctgctgtgtatgcccaacgtgctcaagctatacttggagaatggacagac

SEQ ID NO: 57102 - DNA, 120 bp, Artificial Sequence
  ENSG00000070601_6 (sequence is synthesized)
caaagctttcaagtttgaggcaaacacaaccgtgaaggacatcatcctcaccgtgaaggagaagctgtccatccgaagtatcgagtactttgcactggccctggaagagcagtacagcat

SEQ ID NO: 57103 - DNA, 120 bp, Artificial Sequence
  ENSG00000070601_7 (sequence is synthesized)
ctcccggctgcacctgctgcacgaagaggaactcatccagcaggtggtagaaagggaggagtcacatgactaccgctgcctcttcagggtctgttttgttcccaaggaccccctggacct

SEQ ID NO: 57104 - DNA, 120 bp, Artificial Sequence
  ENSG00000070601_8 (sequence is synthesized)
cctgaaagaagaccccgtggcctttgaatacctctatctgcagagctgcagcgatgtgctccaggagcgctttgctgtagaaatgaaatgtagctctgcactccgactcgcggctctgca

SEQ ID NO: 57105 - DNA, 120 bp, Artificial Sequence
  ENSG00000070601_9 (sequence is synthesized)
catccaggaacggatctacgcctgtgcccagccacagaagatctctttaaagtatatagagaaagactggggaatagagaactttatatctccaactttactccgaaacatgaaaggcaa

SEQ ID NO: 57106 - DNA, 120 bp, Artificial Sequence
  ENSG00000070601_10 (sequence is synthesized)
agacatcaagaaagccattagcttccacatgaagaggaaccagaatttgctggaaccccgacagaagcaacttatttctgctgcccagctacgtttaaattatctacagatcctcggaga

SEQ ID NO: 57107 - DNA, 120 bp, Artificial Sequence
  ENSG00000070601_11 (sequence is synthesized)
actcaagacatatggtggaagaatctttaatgctactttaatgttacaggatagagaatcctacattgcccttctagttggagccaagtatgggattagccaggttatcaatagcaaact

SEQ ID NO: 57108 - DNA, 120 bp, Artificial Sequence
  ENSG00000070601_12 (sequence is synthesized)
caacatcatgtccacattggcagagtttgcaaacatcagccgtgtagagctaacggaagagtctgagaaagtgagcgtcgtcaaagtgtatcttcaggacgtcaaggttctgactttgct

SEQ ID NO: 57109 - DNA, 120 bp, Artificial Sequence
  ENSG00000070601_13 (sequence is synthesized)
gctggaatccaacagtgcaaaagacctagcctgcctgattgctgggtactacaggctgttggttgacccagttacctccattttcctctggcctggaaacaaacaacaagcgcaccgggt

SEQ ID NO: 57110 - DNA, 120 bp, Artificial Sequence
  ENSG00000070601_14 (sequence is synthesized)
atctgcagaagaaggctatgaatccagggcctgcagtgactcagaggagtcctctgaggtggactgcgtactcgaacctctctctgacaggcgcctggtgaaactggcaccctgcagatc

SEQ ID NO: 57111 - DNA, 120 bp, Artificial Sequence
  ENSG00000070601_15 (sequence is synthesized)
actcataaaggaggagcagcctcctgggaacagccccacacctgaggtggctaggaggggccccagcacctgcggggccagcagcacgacagacagtgccgagtccgaggcgtccgactc

SEQ ID NO: 57112 - DNA, 120 bp, Artificial Sequence
  ENSG00000070601_16 (sequence is synthesized)
agccaacactgagagccgcggctacaggaccagtggctcgagtgagtccatggacgctctggaagaggatgacttagacacctgctcctccagcaggtccaccttcttccactttggctc

SEQ ID NO: 57113 - DNA, 120 bp, Artificial Sequence
  ENSG00000070601_17 (sequence is synthesized)
gccaggcctcgcagagagcattgactctgacagccaggaggagagaagcgggattgaaaccagtggcttcctctgtctcctggacctggcccagagagccaacccccagtgccagaagac

SEQ ID NO: 57114 - DNA, 120 bp, Artificial Sequence
  ENSG00000070601_18 (sequence is synthesized)
agagttttccgagagtgctgctttggagacatttggctgggcaccagaactgagcacagtcaggctggaccccaggctgtatgaaggcagccacgctgactactacagcctgtgttccag

SEQ ID NO: 57115 - DNA, 120 bp, Artificial Sequence
  ENSG00000070601_19 (sequence is synthesized)
tgtctccccggccagctacctgagtgacagttccgagagtacagcttcccggcaagggggagccccgccagcctggggtcagcagggctggactgaggcccagcccagttccatgctgga

SEQ ID NO: 57116 - DNA, 120 bp, Artificial Sequence
  ENSG00000070601_20 (sequence is synthesized)
tcagggcccagagatgtttctactgcagaacccagtgccacaagcttgcagaataaggccagcacttctagccctgagaacagcctgccttgtgggccagatggaagacagccaagcagg

SEQ ID NO: 57117 - DNA, 120 bp, Artificial Sequence
  ENSG00000070601_21 (sequence is synthesized)
aggggaggggtgaagaaatatgccaagaccctgaggaaaagaaggtctttcctacagaccgactacacctctcaggtctcatttcccctggtgccatcagcctccctggagagtgtagac

SEQ ID NO: 57118 - DNA, 120 bp, Artificial Sequence
  ENSG00000070601_22 (sequence is synthesized)
gacgtgtgctactatgacagggagccctacctggcccttggtgcaccctccccaactgtgtcctctctgcaggacatgcagggtgagcctggccttctggagaccaaggccttggggctg

SEQ ID NO: 57119 - DNA, 120 bp, Artificial Sequence
  ENSG00000070601_23 (sequence is synthesized)
ctggctcctctgagggagaccaagagcacaaacccagcctccagggtcatggagatggagcccgagaccatggaaaccaaatcagtcatcgactctcgagtgtcttctatttctgccatt

SEQ ID NO: 57120 - DNA, 120 bp, Artificial Sequence
  ENSG00000070601_24 (sequence is synthesized)
cgcttccggattgaccccaacaataaagagaattctggtgttgtccctgctgccagctcctcagcaagcactcctcactgttctaacccaggttcatctggcccagatactgctcaggca

SEQ ID NO: 57121 - DNA, 120 bp, Artificial Sequence
  ENSG00000070601_25 (sequence is synthesized)
aggccttcccaaatcttacctctatctcaagacctggatgggattgcccccaaagaaccaaccatagagcatggagacagctccttctccctctccagtggtgaccctaacccagacaga

SEQ ID NO: 57122 - DNA, 120 bp, Artificial Sequence
  ENSG00000070601_26 (sequence is synthesized)
gcctgcctggccagcaacccaggactaaataatgtctctcaaggagacacactagagctccagttggagccccatgtccagttggaaatgggattggaatctttttgtacaaatcatata

SEQ ID NO: 57123 - DNA, 120 bp, Artificial Sequence
  ENSG00000070601_27 (sequence is synthesized)
caagaaactgcccccaaatacacagagcctttgttgtctcctagagatgagcctagaagtgatgaatgtggaataaatccaggagagaagatagcttctatccctacaaaggaagagcca

SEQ ID NO: 57124 - DNA, 120 bp, Artificial Sequence
  ENSG00000070601_28 (sequence is synthesized)
caaggacaactatctctggaaagagacagagaagttacaaacaaaaatggcaccaacgtatttcaggaggagtctaggaaggattcaggtgactccccgggtgatgtgtcaaataatgtt

SEQ ID NO: 57125 - DNA, 120 bp, Artificial Sequence
  ENSG00000070601_29 (sequence is synthesized)
tcacagactcttgatattagctctccagctggtaaaatagtaacctccctttctttagatgctcctgtaacagggaccgagcagatcccaccacatccccctagagaccctcaaggacag

SEQ ID NO: 57126 - DNA, 120 bp, Artificial Sequence
  ENSG00000070601_30 (sequence is synthesized)
agcagagaacccccagggcaaggctgccaggctcaagaacaaaaactattcgtagagttggatttagaccctgatttctttcttgggaagcagacagtttcaccagccgtccctccagag

SEQ ID NO: 57127 - DNA, 120 bp, Artificial Sequence
  ENSG00000070601_31 (sequence is synthesized)
gggatcaaggcagaggcacctaaccatgtgacagggcaagatatagcccctagggacagccctgagtgggtctgttttaatcctgagccttccctgccagaaccactaccatgtccacaa

SEQ ID NO: 57128 - DNA, 120 bp, Artificial Sequence
  ENSG00000070601_32 (sequence is synthesized)
gaggatcctcacttagaaacttcaaaccattgcttactctcagaaggcaaaagtgacagctctagcatctgcctttctgctgagaagtcttttctgtgctttgccccagaaagccatcct

SEQ ID NO: 57129 - DNA, 120 bp, Artificial Sequence
  ENSG00000070601_33 (sequence is synthesized)
gaagtctctgccagtctcagggtggccacatctttgggttttgcaggcatgaatgagatggtggctcccaggatagggatggaccagtgcagctgtcagttctcctatgccacatgcttc

SEQ ID NO: 57130 - DNA, 120 bp, Artificial Sequence
  ENSG00000070601_34 (sequence is synthesized)
cgtggcccgcagcctgagacagaggaagaagacagggacttggaagcacaccccatggcccccctcacctcaccgccctctgcgggaagcccggtggttctgccctggaggcctgcccga

SEQ ID NO: 57131 - DNA, 120 bp, Artificial Sequence
  ENSG00000070601_35 (sequence is synthesized)
gcccacagctgcaccaccgcacccctgtcgaggaaaagccacatctggccagagtactgctccagggcactgagacagctgaaagccacccctgccagcacccctgagggcttcatccaa

SEQ ID NO: 57132 - DNA, 120 bp, Artificial Sequence
  ENSG00000070601_36 (sequence is synthesized)
ctcatggagagcttgctggagctacaagacattttagaaacttcctggggggttggaaacaaacatcccccagagaagtgcacctggcactttaccgaaagccggagccgcctctgcatg

SEQ ID NO: 57133 - DNA, 120 bp, Artificial Sequence
  ENSG00000070601_37 (sequence is synthesized)
ggctcccagaagctcctgtcgagctgtcggcatgtgatcagaatggaccagtcccccgaagagatgcagggggccgtgcgtgacaccttccagcacctggtccagctggccggcctgtgc

SEQ ID NO: 57134 - DNA, 120 bp, Artificial Sequence
  ENSG00000070601_38 (sequence is synthesized)
tttcagttcacagactgtagccgctgctccgcccggcacagggaggcagcggggaacctgagggatgtggtgtacacctaccatcagtttatagaggctgctaaatcgacctgcgagaga

SEQ ID NO: 57135 - DNA, 120 bp, Artificial Sequence
  ENSG00000070601_39 (sequence is synthesized)
ggctaccacgacctgagtgtgaaactcctggcccgtcagtgcacggccctcacggccgccgtgttctgtttgacccagaagttccgggcatccacggccctgtaaacaggtcaacggccc

SEQ ID NO: 57136 - DNA, 120 bp, Artificial Sequence
  ENSG00000070601_40 (sequence is synthesized)
aagggcctcctgccctgtcctgccttggacacttccctgagaagccccttccactctcccacccaccctcttcaaatgtttactatatagagtattcaaataaactgctgcttaatcttg

SEQ ID NO: 57137 - DNA, 120 bp, Artificial Sequence
  ENSG00000070601_41 (sequence is synthesized)
gaacacaactgggcagaactagcaggagaccaagtattatgtggcacagaataaactctacaactataaaatggatgcatcatgagaccttgggtgtcatcttctgtgttgcccttggca

SEQ ID NO: 57138 - DNA, 120 bp, Artificial Sequence
  ENSG00000070601_42 (sequence is synthesized)
cagaggaagccagtttgccaatcaaggacctctagggtttcctctctcgactggctcaagtggttgaggtcttgaggatgagaatgccatctgcaggactcctgtgcctgtcgtgctgaa

SEQ ID NO: 57139 - DNA, 120 bp, Artificial Sequence
  ENSG00000070601_43 (sequence is synthesized)
aggagagaagccagacatgttgacaggcatagctgcagctgcccagtatccgcagatgaggagggtcatgctcctgtgaggagggggcccgtgccacagagataccacccaactttgccc

SEQ ID NO: 57140 - DNA, 120 bp, Artificial Sequence
  ENSG00000070601_44 (sequence is synthesized)
acatggcctggcagtcggttttacttgggcttatcgatgagctatgggaaggtcatttgatattcacattcttgtggccgcaatgttgggaatgtggccttttatctttaaaaatagctg

SEQ ID NO: 57141 - DNA, 120 bp, Artificial Sequence
  ENSG00000070601_45 (sequence is synthesized)
tgtgctgggaggcccgggagcagtgtcctgggatggaggggagctgccagcagggggaagaggtgtggatttctttccgaggaagagtcccttcagctctgtgccactggtaaatggaag

SEQ ID NO: 57142 - DNA, 80 bp, Artificial Sequence
  ENSG00000070610_0 (sequence is synthesized)
agaccggaaagggctcgggtcatcccggcgcccagggtcaccttcccacgggctggcacctgggcgcgggcgctgccccg

SEQ ID NO: 57143 - DNA, 120 bp, Artificial Sequence
  ENSG00000070610_1 (sequence is synthesized)
ccgggggcggtgccttgcgggcccgtcccggggcggtgcctggtgggctggccccgcggctcctcccctctctgcgggcccagtcgccctttggccgggcgagctaatcgtcggctcaat

SEQ ID NO: 57144 - DNA, 120 bp, Artificial Sequence
  ENSG00000070610_2 (sequence is synthesized)
ctttggccgggcgagctaatcgtcggctcaatgacgacgaggcccgacccttcccgtccaggacctacagagacaaccgaaggagagcccaaggcggcttctttgctgtcgccgccccca

SEQ ID NO: 57145 - DNA, 120 bp, Artificial Sequence
  ENSG00000070610_3 (sequence is synthesized)
ctgaagcaagagctccccggctccactgaaacaccagctcatttaagctttccccaacgcccggccctccgggacgatacctaacaacgaccggcgcccgcatctggaataggctggcga

SEQ ID NO: 57146 - DNA, 120 bp, Artificial Sequence
  ENSG00000070610_4 (sequence is synthesized)
gatacttagtatccgagggctcgggacttggcgccatcgaggtcatggggacccaggatccagggaacatgggaaccggcgtcccagcctcggagcagataagctgtgccaaagaggatc

SEQ ID NO: 57147 - DNA, 120 bp, Artificial Sequence
  ENSG00000070610_5 (sequence is synthesized)
cacaagtttattgccctgaagagactggcggcaccaaggatgtgcaggttacagactgtaagagtcccgaagacagccgacccccaaaagagacggactgctgcaatccggaggactctg

SEQ ID NO: 57148 - DNA, 120 bp, Artificial Sequence
  ENSG00000070610_6 (sequence is synthesized)
ggcagctgatggtttcctatgagggtaaagctatgggctaccaggtgcctccctttggctggcgcatctgtctggctcatgagtttacagagaagaggaaaccctttcaagctaacaacg

SEQ ID NO: 57149 - DNA, 120 bp, Artificial Sequence
  ENSG00000070610_7 (sequence is synthesized)
tctccctaagcaacatgataaagcatataggcatgggcttgaggtacctgcagtggtggtaccggaagacccatgtggaaaagaagacacctttcatcgacatgatcaattctgtacccc

SEQ ID NO: 57150 - DNA, 120 bp, Artificial Sequence
  ENSG00000070610_8 (sequence is synthesized)
taagacagatttatggttgtcccttgggtggcatcgggggaggcactattacccgtggctggagaggccagttctgtcgttggcagcttaaccctggaatgtatcagcaccggacagtca

SEQ ID NO: 57151 - DNA, 120 bp, Artificial Sequence
  ENSG00000070610_9 (sequence is synthesized)
tcgctgaccaattcacagtgtgcctgcgtcgggaagggcagactgtgtaccagcaagtcctgtccctggagcgcccaagtgtcctccgcagctggaactggggcctgtgtgggtactttg

SEQ ID NO: 57152 - DNA, 120 bp, Artificial Sequence
  ENSG00000070610_10 (sequence is synthesized)
ctttctaccatgccctctatccccgagcctggactgtctatcagcttcctggccagaatgtcaccctcacctgccgtcagatcacacccatcttgccccatgactaccaggacagcagcc

SEQ ID NO: 57153 - DNA, 120 bp, Artificial Sequence
  ENSG00000070610_11 (sequence is synthesized)
tgcctgtaggagtctttgtgtgggatgtggaaaatgaaggggacgaagctctagatgtgtccatcatgttctccatgcggaatggactgggtggtggagacgatgccccagggggtttgt

SEQ ID NO: 57154 - DNA, 120 bp, Artificial Sequence
  ENSG00000070610_12 (sequence is synthesized)
ggaatgagcccttctgtctggagcgtagcggggaaactgtccgggggctgctcctgcatcatccaacccttccaaacccctacacgatggctgtggctgcacgagtcacggcagctacca

SEQ ID NO: 57155 - DNA, 120 bp, Artificial Sequence
  ENSG00000070610_13 (sequence is synthesized)
cggtaacccacatcacagcctttgaccctgacagcacggggcagcaggtgtggcaggatctacttcaggatggacagctggactctcccactggccaaagcacccctacgcagaaaggag

SEQ ID NO: 57156 - DNA, 120 bp, Artificial Sequence
  ENSG00000070610_14 (sequence is synthesized)
taggcattgctggagctgtgtgtgtttccagcaagttgcgacctcgaggccagtgccgcctggagttttcactggcttgggacatgcccaggatcatgtttggagctaaaggccaagtcc

SEQ ID NO: 57157 - DNA, 120 bp, Artificial Sequence
  ENSG00000070610_15 (sequence is synthesized)
tatacaaggttctttggccaggatggagatgcagcacctgccctcagccactatgcactgtgccgatacgcagagtgggaagagaggatctcagcttggcagagcccggtattggatgac

SEQ ID NO: 57158 - DNA, 120 bp, Artificial Sequence
  ENSG00000070610_16 (sequence is synthesized)
agatcactgcctgcctggtacaaatctgcgctgttcaatgaactatacttcctggctgatggaggcacagtgtggctggaagttcttgaggactccctaccagaggagctgggcagaaac

SEQ ID NO: 57159 - DNA, 120 bp, Artificial Sequence
  ENSG00000070610_17 (sequence is synthesized)
atgtgtcacctccgccccaccctacgggactacggtcgatttggctaccttgagggccaggagtaccgcatgtacaacacatatgatgtccacttttatgcttcctttgccctcatcatg

SEQ ID NO: 57160 - DNA, 120 bp, Artificial Sequence
  ENSG00000070610_18 (sequence is synthesized)
ctctggcccaaacttgagctcagcctacagtatgacatggctctggccactctcagggaggacctgacacggcgacggtacctgatgagtggggtgatggcacctgtgaaaaggaggaac

SEQ ID NO: 57161 - DNA, 120 bp, Artificial Sequence
  ENSG00000070610_19 (sequence is synthesized)
gtcatcccccatgatattggggacccagatgatgaaccatggctccgcgtcaatgcatatttaatccatgatactgctgattggaaggacctgaacctgaagtttgtgctgcaggtttat

SEQ ID NO: 57162 - DNA, 120 bp, Artificial Sequence
  ENSG00000070610_20 (sequence is synthesized)
cgggactattacctcacgggtgatcaaaacttcctgaaggacatgtggcctgtgtgtctagctgtgatggaatctgaaatgaagtttgacaaggaccatgatggactcattgaaaatgga

SEQ ID NO: 57163 - DNA, 120 bp, Artificial Sequence
  ENSG00000070610_21 (sequence is synthesized)
ggctatgcagaccagacctatgatggatgggtgaccacaggccccagtgcttactgtggagggctgtggctggcagctgtggctgtgatggtccagatggctgctctgtgtggggcacag

SEQ ID NO: 57164 - DNA, 120 bp, Artificial Sequence
  ENSG00000070610_22 (sequence is synthesized)
gacatccaggataagttttcttctatcctcagccggggccaagaagcctatgagagactgctgtggaatggccgctattacaactatgacagcagctctcggcctcagtctcgtagtgtt

SEQ ID NO: 57165 - DNA, 120 bp, Artificial Sequence
  ENSG00000070610_23 (sequence is synthesized)
atgtctgaccagtgtgctggacagtggttcctgaaggcctgtggcctaggagaaggagacactgaggtgtttcctacccaacatgtggtccgtgctctccaaactatctttgagctgaac

SEQ ID NO: 57166 - DNA, 120 bp, Artificial Sequence
  ENSG00000070610_24 (sequence is synthesized)
gtccaggcctttgcaggaggggccatgggggctgtgaatgggatgcagccccatggtgtccctgataaatccagtgtgcagtctgatgaagtctgggtgggtgtggtctacgggctggca

SEQ ID NO: 57167 - DNA, 120 bp, Artificial Sequence
  ENSG00000070610_25 (sequence is synthesized)
gctaccatgatccaagagggcctgacttgggagggcttccagacagctgaaggctgctaccgtaccgtgtgggagcgcctgggtctggccttccagaccccagaggcatactgccagcag

SEQ ID NO: 57168 - DNA, 120 bp, Artificial Sequence
  ENSG00000070610_26 (sequence is synthesized)
cgagtgttccgctcactggcctacatgcggccactgagcatatgggccatgcagctagccctgcaacagcagcagcacaaaaaggcctcctggccaaaagtcaaacagggcacaggacta

SEQ ID NO: 57169 - DNA, 120 bp, Artificial Sequence
  ENSG00000070610_27 (sequence is synthesized)
aggacagggcctatgtttggaccaaaggaagccatggcaaacctgagcccagagtgagccgtctgaactgtgggagggaagtgctaacagcccagcctccagcctggcctttcctccttc

SEQ ID NO: 57170 - DNA, 120 bp, Artificial Sequence
  ENSG00000070610_28 (sequence is synthesized)
ccctctgaacctcctgcaaccctgagccatcaggacaatcataccccttcccttctctccacccaattgtgccagtaaatgggggttgagggtgacctaggcagcattagaatcacttat

SEQ ID NO: 57171 - DNA, 120 bp, Artificial Sequence
  ENSG00000070610_29 (sequence is synthesized)
ttatttctttcctcacctgttccctgactgcgtgaaatgttcagggaggtcagttgatttccccaggtacattcatggtgtgacagacacatgggtacaaataaaagacccagaaagcca

SEQ ID NO: 57172 - DNA, 120 bp, Artificial Sequence
  ENSG00000070610_30 (sequence is synthesized)
tgtctgtgggtcatagttatctcctccacttgctgggagctccttgaaggcaaagactctactgcctccatctatccagtggaagtggctcttcagagggtgccaagttagtatgtatga

SEQ ID NO: 57173 - DNA, 120 bp, Artificial Sequence
  ENSG00000070610_31 (sequence is synthesized)
gtgtgccaggggtatggttggtgtctgggaagagcctagctggttgttgcctttcctcggtacctaggtcttcaacatcttggtccctctctaggctgtgatggaatctgaaatgaagtt

SEQ ID NO: 57174 - DNA, 120 bp, Artificial Sequence
  ENSG00000070610_32 (sequence is synthesized)
actgggcaacaagggattgtagggctcaagaaagaatgactcattgtctattacacggcatgggagcagctggagctgccagtctgacccccaaacccatgtccctgatcagtgcttact

SEQ ID NO: 57175 - DNA, 120 bp, Artificial Sequence
  ENSG00000070610_33 (sequence is synthesized)
cctgggggatgacttgaagctgatggtgcagtggtaacagttgcaggctctgaaaggggaggagctgatttgaggagagggaagacttagtctgtggtccctgtggtttaccccgttcca

SEQ ID NO: 57176 - DNA, 120 bp, Artificial Sequence
  ENSG00000070610_34 (sequence is synthesized)
cctcagccggggccaagaagcctatgagagactgctgtggaatggtgagttcggggagcctaagtagtcttaaggcagctgagaggacaccaggagccttatttttctcttcctcgactc

SEQ ID NO: 57177 - DNA, 120 bp, Artificial Sequence
  ENSG00000070610_35 (sequence is synthesized)
ggcccagaaaacttcctcaaccaccaaatttcttcaaggcataacccaatgccatcttgtccgtctataaagcctcccatttttccctggtatgcattccagctcctgccttcaggcttc

SEQ ID NO: 57178 - DNA, 120 bp, Artificial Sequence
  ENSG00000070610_36 (sequence is synthesized)
ggggaggcactattacccgtggctggagaggccagttctgtcgttggcagcttaaccctggaatgtatcagcaccggacagtcatcgctgaccaaatgaggacactaagatccagagagg

SEQ ID NO: 57179 - DNA, 120 bp, Artificial Sequence
  ENSG00000070610_37 (sequence is synthesized)
gccccatgactaccaggtgaggcccccacatctgtatcttccattgccctcccttccccaggacctgcctctgctagaaactgcatggcctgcgaggcgcggtagctcacgcctgtaatc

SEQ ID NO: 57180 - DNA, 120 bp, Artificial Sequence
  ENSG00000070614_0 (sequence is synthesized)
ctggccctgggattaggtgcagccgtgttaaggagaggacattcgagagggcgtggcgaagtgaagaggaacctcacgccactgcctggagctccgccttagccccgtgggccccacgga

SEQ ID NO: 57181 - DNA, 120 bp, Artificial Sequence
  ENSG00000070614_1 (sequence is synthesized)
gtgagcggcatgcagcacccccgggcctgtccagtgtcctctggcctgctgccctgcacccccagaaggccctgacgccctggggcacttctgctctgcacaggaccacgcgggggtttg

SEQ ID NO: 57182 - DNA, 120 bp, Artificial Sequence
  ENSG00000070614_2 (sequence is synthesized)
ccatggtgacataaaggggcgcggaggaaggaaggagcgtgaccagcctgtggactgcgcccctggctgggaggaaggactgggggcccagatcctccactcccagtgccccacaagggc

SEQ ID NO: 57183 - DNA, 120 bp, Artificial Sequence
  ENSG00000070614_3 (sequence is synthesized)
gtcgcttcctaagtctctgtgaatttgttggtcagtggacgattctcgtgtctcctcctgtgtggggccttggggtagccagggcaggccgggcctccggtggccaaggtctcggaggcc

SEQ ID NO: 57184 - DNA, 120 bp, Artificial Sequence
  ENSG00000070614_4 (sequence is synthesized)
aggatgcctgccctggcatgcctccggaggctgtgtcggcacgtgtccccgcaggctgtccttttcctgctgttcatcttctgcctgttcagcgttttcatctcggcctactacctatat

SEQ ID NO: 57185 - DNA, 120 bp, Artificial Sequence
  ENSG00000070614_5 (sequence is synthesized)
ggctggaagcgaggcctggagccctcggcggatgcccccgagcctgactgcggggacccgccgcctgtggcccccagtcgcctgctgccactcaagcctgtgcaggcagccaccccttcc

SEQ ID NO: 57186 - DNA, 120 bp, Artificial Sequence
  ENSG00000070614_6 (sequence is synthesized)
cgcacagacccgttggtgctggtctttgtggagagcctctactcgcaactgggccaggaggtggtggccatcctggagtccagccgcttcaaataccgcacagagattgcgccgggcaag

SEQ ID NO: 57187 - DNA, 120 bp, Artificial Sequence
  ENSG00000070614_7 (sequence is synthesized)
ggtgacatgcccacgctcactgacaagggccgtggccgcttcgccctcatcatctatgagaacatcctcaagtatgtcaacctggacgcctggaaccgggagctgctggacaagtactgt

SEQ ID NO: 57188 - DNA, 120 bp, Artificial Sequence
  ENSG00000070614_8 (sequence is synthesized)
gtggcctacggcgtgggcatcattggcttcttcaaggccaatgagaacagcctgctgagtgcgcagctcaagggcttccccctgttcctgcactcaaacctgggcctgaaggactgcagc

SEQ ID NO: 57189 - DNA, 120 bp, Artificial Sequence
  ENSG00000070614_9 (sequence is synthesized)
atcaaccccaagtccccgctgctctacgtgacgcgacctagcgaggtggagaaaggtgtgctccccggcgaggactggacggttttccagtcaaatcactccacctatgagccagtgctg

SEQ ID NO: 57190 - DNA, 120 bp, Artificial Sequence
  ENSG00000070614_10 (sequence is synthesized)
ctggccaagacgcgctcgtctgagtccatcccacacctgggcgcagacgccggcctgcatgctgcactgcacgccactgtggtccaggacctgggcctgcacgacggcatccagcgcgtg
